United States Patent Application Publication US 2005/0228172 A9 - sequence listing, part 106

SEQ ID NO: 490383 - DNA, 537 bp, Homo sapiens
ccctggcgctgtgatgacagaggagggtcaacattgccaatagtgtctgtgcatctgggctgagcagaaacaaggaaggggaagcgtcctcagtattctatgtggaaaggatagtctttgtgatttttagttctgaaaaacagaaaaacaaatcaaaaataggaacaaagartgattattttttaagagaaacattttaaatggtatatacttttaaactccccagtgcatgaaattagcttcattcagtggctcatcttcaaacaggaaagaattataatgagaaggtttaattaatctaaaatgtgtatgataaatacctattcagacaccaatcattcaatctgtatattcttccctctgttttaaaaagaaggagccatatttacatggggaacatggccagtcggagattcctgtttaggctgaggatgttatccatatcgtgctgtgttaattcaaaatcaaacacctggaaccaaaacacaatgtttgtagaaaacttagtttaattcacatttaatggagcacatgtta

SEQ ID NO: 490384 - DNA, 537 bp, Homo sapiens
ccctggcgctgtgatgacagaggagggtcaacattgccaatagtgtctgtgcatctgggctgagcagaaacaaggaaggggaagcgtcctcagtattctatgtggaaaggatagtctttgtgatttttagttctgaaaaacagaaaaacaaatcaaaaataggaacaaagaatgattattttttaagagaaacattttaaatggtatatacttttaaactccccagtgcatgaaattagcttcattcagtggctcatcttcaaacaggaaagaattataatgagaaggtttaattaatctaaaatgtgtatgataaatacctattcagacaccaatmattcaatctgtatattcttccctctgttttaaaaagaaggagccatatttacatggggaacatggccagtcggagattcctgtttaggctgaggatgttatccatatcgtgctgtgttaattcaaaatcaaacacctggaaccaaaacacaatgtttgtagaaaacttagtttaattcacatttaatggagcacatgtta

SEQ ID NO: 490385 - DNA, 560 bp, Homo sapiens
ggggaccagccacacaggttaaactctctgatgcttccatcggcttacctggttggttagtggcttgaacctcaacccaggcttattcaaaagcctctcaagctgttcatggttgaagtttgacaccccgatgttcttcaccagcccggtgatcaccaggtcctccatggcctataagagaacgactctgctgggtgtgaagcttctgtctactgcactgacaatctacgtccctcagcagttctgtatggtattctaaaactggttggacccaatatttttacaatattttacttgaagcttcaaaagcatttctgcactcaaggtctgatttcagtcccatcttttctggctaggggatgctgggcaagttgcatggcctcacttggccccaatyttctcagcttcaggacaggtctacatggcctgtgccacggggatgtttaggggttatgtggaatcacaggaagtgtcagctaaggctggcgtccagtactcgacacatgtgagctcttcttgttcctattcctcctgatgtctggcaagcatgtctgctgcgg

SEQ ID NO: 490386 - DNA, 560 bp, Homo sapiens
ggggaccagccacacaggttaaactctctgatgcttccatcggcttacctggttggttagtggcttgaacctcaacccaggcttattcaaaagcctctcaagctgttcatggttgaagtttgacaccccgatgttcttcaccagcccggtgatcaccaggtcctccatggcctataagagaacgactctgctgggtgtgaagcttctgtctactgcactgacaatctacgtccctcagcagttctgtatggtattctaaaactggttggacccaatatttttacaatattttacttgaagcttcaaaagcatttctgcactcaaggtctgatttcagtcccatcttttctggctaggggatgctgggcaagttgcatggcctcacttggccccaatcttctcagcttcrggacaggtctacatggcctgtgccacggggatgtttaggggttatgtggaatcacaggaagtgtcagctaaggctggcgtccagtactcgacacatgtgagctcttcttgttcctattcctcctgatgtctggcaagcatgtctgctgcgg

SEQ ID NO: 490387 - DNA, 560 bp, Homo sapiens
ggggaccagccacacaggttaaactctctgatgcttccatcggcttacctggttggttagtggcttgaacctcaacccaggcttattcaaaagcctctcaagctgttcatggttgaagtttgacaccccgatgttcttcaccagcccggtgatcaccaggtcctccatggcctataagagaacgactctgctgggtgtgaagcttctgtctactgcactgacaatctacgtccctcagcagttctgtatggtattctaaaactggttggacccaatatttttacaatattttacttgaagcttcaaaagcatttctgcactcaaggtctgatttcagtcccatcttttctggctaggggatgctgggcaagttgcatggcctcacttggccccaatcttctcagcttcaggacaggtctacatggcctgtgccacggggatrtttaggggttatgtggaatcacaggaagtgtcagctaaggctggcgtccagtactcgacacatgtgagctcttcttgttcctattcctcctgatgtctggcaagcatgtctgctgcgg

SEQ ID NO: 490388 - DNA, 629 bp, Homo sapiens
tactcccacgtagcatgttaagggtgaatggcataggcatgtttatttaatgacacctaatcacactcctaaacaacagtggaagaatgtcacatgttccagcctgatacacatgaaagaggcattttccatgatgagctgaagtaactaacagtctcactttaaagccacatcccatgttgccatttatccaagcctccacaaaattgcagcccgggactcatactcggaccctgatctaattgtccagcatcacacaaggcctagcagttcctactggccagaagacatgctgacgatgctgcattattctcttctgtaatttgttggatgatctgagaccttttccttttctacgacccagaaatccaaagacaggaatctgctaaaggatgagggcaaggaaagtgtaacaaatgtctgacctgagcatrtgcttctgggctccaataatctaacttaaaccttaaactttctgtatcttagtttcatcatctctccaagagggatgttaatagtgtcaactttgtagaactgtcatgagaattaaatgagttaatatgtgtaaagtacctaacatagttctgggtacataattacaacaatgctggctggcaatgagtgtaata

SEQ ID NO: 490389 - DNA, 502 bp, Homo sapiens
ccttctcactggctggtccggtgccagatgcccttctagcttgcaaatgtcccaagatcccatcctgggatctcttctgtattgtggctctgcttcccccatgggtacacctgtccagtttcatggctttaaagagtacatgtgtggacaaacatgtctccagcccagacccctctccccaaatccagacccctacatcgatctacagcgaactcttcacactgaggcctgagcactccttctggggatctgggccctagtytccttgccaagctcacctctgtccaccgtctccctggctcactcagttcggcccctgttaccctccctgctgctcctcaggcaccactcacactcttacctgctgttcctctgcctgggacactggtagatattcacatggcttgttctatcacttcacttcattcaggactctgatcaaaagccacttcctcagaggggactctgacctgaaaaatcaccctctgtcactagctaggcc

SEQ ID NO: 490390 - DNA, 393 bp, Homo sapiens
atcagggaaaagtaaacagtttaaataatgaatgaatttctgccactataaaccaacggtgattatctcccttagccccctaaatatttaacctacactattatgtttcagttggtgcagtaactgcaaaataaacttttaaaaagccaccttattatgtgtgggatatgactatcaagtaatggtacttgttcattgtaagacctaggaaaattatgatttcagtttgtatttatttttgtaaaaaggrattagaatttatatgacatgatagaacgaagataattttaataataagctagtttttttccccatgtttgaaaaagtggcatttcggtcttctgaaataattacttatttctgctatattctggctgtatgatctcacataag

SEQ ID NO: 490391 - DNA, 605 bp, Homo sapiens
agaaaactgtcttttctgatgttagaaaggaaacatgcagatttgatctgcacacctaacattctgtcactatcaacaactaaagggacagtgagaaggcaagaatgtggcaggaaggagagcatttcacctctttgtgaagctcagagtagcagatccctgtctccaggctacctccctgagcctcagggacaaatgacaatgttgtaaaagcctgtgtgtgatccactgtacctaaaccmctcctctgtcagctcccttgggtttgacactctctttgtcttcctgacaactcccttttctggcctatacaccaagggaacttctcctttctaaaactaggaaattcagacaaagtaggaagtcagggttacttgatcagggacagcagcttttcctccagaggccacaagatggacatgcagtgactggaagttacatctccgagttactgctcctggatggaatgtttaatggtcctgcccaggaaatgtcagggcatcagctcagcctctaggcaggaacagactcttcttgccaagagtgcttttagttccacttccacccccagagcaagcatgacaaactgatcaaggcagatagaa

SEQ ID NO: 490392 - DNA, 602 bp, Homo sapiens
ttttctggcctatacaccaagggaacttctcctttctaaaactaggaaattcagacaaagtaggaagtcagggttacttgatcagggacagcagcttttcctccagaggccacaagatggacatgcagtgactggaagttacatctcygagttactgctcctggatggaatgtttaatggtcctgcccaggaaatgtcagggcatcagctcagcctctaggcaggaacagactcttcttgccaagagtgcttttagttccacttccacccccagagcaagcatgacaaactgatcaaggcagatagaatactgctgccagagcaattatgggctcctggggtccaggacagaatgaggcagaaaggcaacaccacactggcatttccattagcagagtcagatggtgtctggcagaactgaatcaggggaaacatggtctttcagaagaatcaagtgacaaagacaatacttagagactgcattttgggaacttgcagactgagacttcgctgtaggtgttctgaagtagtaagggccctgaagggagaaaatgatgtgattgatgttctagagtagatagcaacagcctgtgtgacccctg

SEQ ID NO: 490393 - DNA, 402 bp, Homo sapiens
aaattcatgcactatagaaaaatataattgttctacttctaataagatagttaaatagaaaaataatacaagataccataatgactaataatgtcaattaaggaccacagtaataaaggaccacagtaatataaaacaggataacaaaattgaaaaaaatttacattgattatttttgatactattgcatcctttagaaaaagatagtcaacactaacccttcataaaatctactgcaataataatttaaataatggttttgattttattttgtgtccatatttcattaattaaaacattactcggccgagcatggtggctcatrgctgtaatcccaggacgttgggatccatccacgaggtggatggatcacctgagattaggagtttaagacaagcctgg

SEQ ID NO: 490394 - DNA, 628 bp, Homo sapiens
tgccaatatcttgactccttgggggacactcacccaggctgcagccaacacaaagaagaatgtaagagctggagaaagagaacctgggtcctgataacatttttgaatgaatctttacctgaggctgaagctatccctacatattgctgcttgtgttgtaaagcaaataaatttattttcctgcttcaccggcttcaagttgagttttctgtcactttctactaaatgagtcctaatcaatatatcactcaggtgtaccagcaaatcatggaaaccttcaccatggttgcagaagagaatgaaaattttatcaacttgacagtggcaaaataaagggaaagctgaaagattttgaacgataggaaggttgttatggagggggtgatatgagcaaagggaaggttgagtttgctaatattcttatatttcaaagtcaagcgatgcttcctatrgttgatacaaaaagcaatcaagttttaagtgtggtgtttgatgttgcagaagtgacaaggggaaaactggaaataaagatggaacagtgttgggaggagatggggtgtagtaagtagctaaacgctcatctatcttattagaaaatcaatagataatgtctaaagttgacagataa

SEQ ID NO: 490395 - DNA, 597 bp, Homo sapiens
gcactgcctccctgacaagttgattaattgccgatctttgggagcaactggtttatagagtggagaaataggtctgcttcatgtcctcacgcttgcttgcgggcttggaattagtcgatacttgctgaacgatgatgtctgtgcagagagatagccgttgtaagaaaatgaatgtaaaacatcaatagtgtgattgaggtggtatagagagtrgtttgagttaggtcattatctacttcaccatagaaactgaggcacttctgagagtgcaaggtgttgttattaataattacattgggaccgcaggtgggaattgttacttttccaggggaagcagatgttcggtcatctcagaaacagtagcatcacaggagggcaaacggtgaaagcagggaagtagcatcatgcactgcttaacaacggggatctgttctaagaaatgcatcgttagctgattttatcgttgtgtgaacatcaaagagtgtactcccataaacctagatggtgtagcccactgcacacctgggctggatgctgtagcctattgctcctgggctgcaaacctgtacagcatatgatggtgctgaatactgcagg

SEQ ID NO: 490396 - DNA, 597 bp, Homo sapiens
gcactgcctccctgacaagttgattaattgccgatctttgggagcaactggtttatagagtggagaaataggtctgcttcatgtcctcacgcttgcttgcgggcttggaattagtcgatacttgctgaacgatgatgtctgtgcagagagatagccgttgtaagaaaatgaatgtaaaacatcaatagtgtgattgaggtggtatagagagtagttwgagttaggtcattatctacttcaccatagaaactgaggcacttctgagagtgcaaggtgttgttattaataattacattgggaccgcaggtgggaattgttacttttccaggggaagcagatgttcggtcatctcagaaacagtagcatcacaggagggcaaacggtgaaagcagggaagtagcatcatgcactgcttaacaacggggatctgttctaagaaatgcatcgttagctgattttatcgttgtgtgaacatcaaagagtgtactcccataaacctagatggtgtagcccactgcacacctgggctggatgctgtagcctattgctcctgggctgcaaacctgtacagcatatgatggtgctgaatactgcagg

SEQ ID NO: 490397 - DNA, 597 bp, Homo sapiens
gcactgcctccctgacaagttgattaattgccgatctttgggagcaactggtttatagagtggagaaataggtctgcttcatgtcctcacgcttgcttgcgggcttggaattagtcgatacttgctgaacgatgatgtctgtgcagagagatagccgttgtaagaaaatgaatgtaaaacatcaatagtgtgattgaggtggtatagagagtagtttgagttaggtcattatctacttcaccatagaaactgrggcacttctgagagtgcaaggtgttgttattaataattacattgggaccgcaggtgggaattgttacttttccaggggaagcagatgttcggtcatctcagaaacagtagcatcacaggagggcaaacggtgaaagcagggaagtagcatcatgcactgcttaacaacggggatctgttctaagaaatgcatcgttagctgattttatcgttgtgtgaacatcaaagagtgtactcccataaacctagatggtgtagcccactgcacacctgggctggatgctgtagcctattgctcctgggctgcaaacctgtacagcatatgatggtgctgaatactgcagg

SEQ ID NO: 490398 - DNA, 597 bp, Homo sapiens
gcactgcctccctgacaagttgattaattgccgatctttgggagcaactggtttatagagtggagaaataggtctgcttcatgtcctcacgcttgcttgcgggcttggaattagtcgatacttgctgaacgatgatgtctgtgcagagagatagccgttgtaagaaaatgaatgtaaaacatcaatagtgtgattgaggtggtatagagagtagtttgagttaggtcattatctacttcaccatagaaactgaggcacttctgagagtgcaaggtgttgttattaataattacattgggaccgcaggtgggaattgttacttttccaggggaagcagatgttcggtcatctcagaaacagtagcatcacaggagggcaaacggtgaaagcagggaagtascatcatgcactgcttaacaacggggatctgttctaagaaatgcatcgttagctgattttatcgttgtgtgaacatcaaagagtgtactcccataaacctagatggtgtagcccactgcacacctgggctggatgctgtagcctattgctcctgggctgcaaacctgtacagcatatgatggtgctgaatactgcagg

SEQ ID NO: 490399 - DNA, 335 bp, Homo sapiens
aaatgttaacaaacaaaaatgcttttggtgaytctgtctgctctgaccctcaagtatctctttctttctttctctctcttttattcctttcaacttcaaacttttggaaaattgagtctgtgccaccatattttatctgtcattgcatactcagtactcaactgatcatgatacaatttttgccttcaccataatactgatactgcttttaaaaagatataaaaacaccttctaaatgcaaaacccaatgtgtacttttaaggctaagccaacctgcataattttgccggttgcatcctttatagtcgttggccactgcaccataaatcatgtaa

SEQ ID NO: 490400 - DNA, 560 bp, Homo sapiens
tgtatgagacttccagttgtcccacatccttgcccacacttggtgtatgttctgcctttttattgttagctagtctgttggttatgtggaagtatttcatcttggttttcatttttatttcygccatgactaatgagtactatttcctctgtttattgacaattgcgatattttatttcataaagtgtgggctgaattatttgtccgtttttctattgtgctgtttgtttcttctcattgatttgtgagaatgtggtaggaagcctctaaaacgtcctccagggaccatcccctgctgtgttcccacccttgtgtacctctcccttgagtgtggaccaaatctaatgactcacttctttcttttcttttcttttctttcttttttttttttgagatggagtcttgctgtgttgcccaggctcgagtgagtggtgtgagctcagctcactgcagcctctgtgccccaacccacgtccagtttaagcaattctcgtgcctcagcctcccgcttagctgggattacaggcgcccaccaccacacgcagctaatttttgtattt

SEQ ID NO: 490401 - DNA, 560 bp, Homo sapiens
tgtatgagacttccagttgtcccacatccttgcccacacttggtgtatgttctgcctttttattgttagctagtctgttggttatgtggaagtatttcatcttggttttcatttttatttctgccatgactaatgagtactatttcctctgtttattgacaattgcgatattttatttcataaagtgtgggctgaattatttgtccgtttttctattgtgctgtttgtttcttctcattgatttgtgagaatgtggtaggaagcctctaaaacgkcctccagggaccatcccctgctgtgttcccacccttgtgtacctctcccttgagtgtggaccaaatctaatgactcacttctttcttttcttttcttttctttcttttttttttttgagatggagtcttgctgtgttgcccaggctcgagtgagtggtgtgagctcagctcactgcagcctctgtgccccaacccacgtccagtttaagcaattctcgtgcctcagcctcccgcttagctgggattacaggcgcccaccaccacacgcagctaatttttgtattt

SEQ ID NO: 490402 - DNA, 594 bp, Homo sapiens
ccactgcacatagaacaataattgtaaattccccgtgagcacactaaagactcagcctcacaagtaatcaaaaaccagattaaaaggagaatgatttttcttgtctatcaaattagcaacaagtagatgcttaactgattttgcttctacgcttgccgcctgtggtctcacccgcacgtagcagcctgagtgatcctgatgaaaccccagacacgcggagtctctctcctgattaggaccttccagggcctccttccccactaagaatcaggccckctatcacctgccaccccctggctgctgttccaagagcctgctcacctccttgctgtctctctccgctcactctaaccccactgctagtcccttgacattatggagtgagctgatcttaagccccttatattcgttcttcctgctgcctggaacgctgtttccttgggtctctacgaggcttcctgtcattctgctccagctcaggtgtcaatttcctgtctcaactgaatagagagcatcccatccaaaatagcatccccctgccctccagcccctcccctgctctcttctctgcacaggtcttaaccattgcacgat

SEQ ID NO: 490403 - DNA, 579 bp, Homo sapiens
cttgcttcatgaggctaattttagctaaagctgcagcgataaaaatctacataaataaatacataaataaataaaatctacaaggcttcctggaattaccactttccagaaacaatagtttccagaaatgattctaattagtgagtgttccattggctccagcggacagttttatagatggtttccatttgtagaaacttgttcacaacacacatccactttcataaacacacatatacacatatgcatgtgtgctttttgttagcttgttggctttagtctttgccatcgacatttcaaattgcactgaaactaaacattaaatatggattcagaaggatcctgctgacactctaagcatatatcatggcrgaaataatacacagctctctttcagagatctggttgctgataaatctgtaatcctttttataacatttctgtatattgaaaaatagggatccaagatcctggaagtacacatcatggaaatcccaatggcaatgaaggggatattttgcaggtggcccccttagttttgggaaagagttgactttccatgtacctcttccaaacagc

SEQ ID NO: 490404 - DNA, 587 bp, Homo sapiens
cagctgctctctggaagctatgctgcttccgctgcaagacacacagttcaaaaggttgacccttcttacccgacttctgacatgcttctgtaatggtaatgggtcagttgcccaatgcacacagcaagtcactacattgcagagagaaaggggtttaatcatagggccatcaaatgaggacatgggatgaaaactcacatccgtctccctgaggagtttggggctagggtttttaagggctttggagtggtctgaagtttggagatcattgattggtcagaatgcagaataaagtcatgggacaaggagatgaagaagctgtattctcatgctgcttcttttcctccgtggtggtcttcaaaccagtgggcatcagctgtttcactgggattcaggatgtgaaaaacaccttaagcaaaagccttatgacctaatgctggagatcctatctrtctttaacaaaagccgtatgattctaactccaaaaatcctatctctaggaacaatgggaatgcaaatggtgagtatctagtgctacatgactttccactacaaggaagtgggccaaagtacagctgataaatgct

SEQ ID NO: 490405 - DNA, 573 bp, Homo sapiens
catgtgggtttgttaccattaaagcttcaatgcaaacggataattttcacttttctgtccaatcacaaatgttttctatggaatatgtgatgggaaagagtgaagggatatacaaaaaaaaaaagttggggaaaatgcacatacatgcaacagctaagggagccaaaaacgtttcaactacagtaatgagacagccaaatataaagaggtccctggagaacctatgcctggcctgcgcactgggagggtggggtggagccacagragttcatgccatttgcagcagggaggagcctggcccctcttgttcctgggtggaaacctgggattcagtctatgagatgggggcttattaacaggaacctctcttgctttgctgagtttctttcctttatgctcagtaaattccatttttctcacccttccgtgtatccacgaacctaatctttcctggtcctgtgacaaggatcccgcttttagcttaactaaggagaacgtcctacaacagtaatactggcagctaaaatttgcggattcctctgtgccaggtagtgtgcccagccttcatgtgtg

SEQ ID NO: 490406 - DNA, 642 bp, Homo sapiens
actgtgaaggattcatgtgggtttgttaccattaaagcttcaatgcaaacggataattttcacttttctgtccaatcacaaatgttttctatggaatatgtgatgggaaagagtgaagggatatacaaaaaaaaaaagttggggaaaatgcacatacatgcaacagctaagggagccaaaaacgtttcaactacagtaatgagacagccaaatataaagaggtccctggagaacctatgcctggcctgcgcactgggagggtggggtggagccacaggagttcatgccatttgcagcagggaggagcctggcccctcttgttcctgggtggwaacctgggattcagtctatgagatgggggcttattaacaggaacctctcttgctttgctgagtttctttcctttatgctcagtaaattccatttttctcacccttccgtgtatccacgaacctaatctttcctggtcctgtgacaaggatcccgcttttagcttaactaaggagaacgtcctacaacagtaatactggcagctaaaatttgcggattcctctgtgccaggtagtgtgcccagccttcatgtgtgccatttttaaatgttcacaataaacccagaaggtagatcattttatggcacccatt

SEQ ID NO: 490407 - DNA, 642 bp, Homo sapiens
actgtgaaggattcatgtgggtttgttaccattaaagcttcaatgcaaacggataattttcacttttctgtccaatcacaaatgttttctatggaatatgtgatgggaaagagtgaagggatatacaaaaaaaaaaagttggggaaaatgcacatacatgcaacagctaagggagccaaaaacgtttcaactacagtaatgagacagccaaatataaagaggtccctggagaacctatgcctggcctgcgcactgggagggtggggtggagccacaggagttcatgccatttgcagcagggaggagcctggcccctcttgttcctgggtggaaacctgggattcagtctatgagatgggggcttattaacaggaacytctcttgctttgctgagtttctttcctttatgctcagtaaattccatttttctcacccttccgtgtatccacgaacctaatctttcctggtcctgtgacaaggatcccgcttttagcttaactaaggagaacgtcctacaacagtaatactggcagctaaaatttgcggattcctctgtgccaggtagtgtgcccagccttcatgtgtgccatttttaaatgttcacaataaacccagaaggtagatcattttatggcacccatt

SEQ ID NO: 490408 - DNA, 573 bp, Homo sapiens
catgtgggtttgttaccattaaagcttcaatgcaaacggataattttcacttttctgtccaatcacaaatgttttctatggaatatgtgatgggaaagagtgaagggatatacaaaaaaaaaaagttggggaaaatgcacatacatgcaacagctaagggagccaaaaacgtttcaactacagtaatgagacagccaaatataaagaggtccctggagaacctatgcctggcctgcgcactgggagggtggggtggagccacaggagttcatgccatttgcagcagggaggagcctggcccctcttgttcctgggtggaaacctgggattcagtctatgagatgggggcttattaacaggaacctctcttgctttgctgagtttctttcctttwtgctcagtaaattccatttttctcacccttccgtgtatccacgaacctaatctttcctggtcctgtgacaaggatcccgcttttagcttaactaaggagaacgtcctacaacagtaatactggcagctaaaatttgcggattcctctgtgccaggtagtgtgcccagccttcatgtgtg

SEQ ID NO: 490409 - DNA, 641 bp, Homo sapiens
tgcagattgacttttgaagtgtcaaataaacctttacttaacagatgtcaggactgtgacyttaggagataatgacagtttttatagtaggttggtggcagaatttctaaggagaatgaataaagtttcagtgccaagtgtggaaaaaaatgacaacatgattattaacaattgactgaattgaggaaagcaaaaataagtgttttaatttgtttgattagacagcgtaaattgttccataaataccagtaaaatacattttacaaaaggatagactatgcctgcaggtataaattagactaactgaaaggccctaccttcctccaaaatctccatgaatgaaattgatttaaaataaattcaaaagctttagacaagagatcaaaatagccatggaagacttttaaacaactatgttcagattctgcctttgctgcagcagtagcaaatagagaaaactcttcaatattgacaaatatattccaccttggcaatgtggggtcagtagtgctatttagtataattgaaattattctttaggagatttagccaaaatctcctaaagctctattcccgtatcctacaagctccccttcaatccaacctgcctgcaaccaagcaaattttggaagcagttcaag

SEQ ID NO: 490410 - DNA, 618 bp, Homo sapiens
aattcaatgtgacactatctacctggaaatggtgtcagaccccacaggttaagggctcagtctcacaatgcttccccaactttagacaccaattgcaaggttagtacattgtcgcctgtgcttctgactaaccgyctataaatcgggggtcctactactccctccatgggtttaatttgctagcatggctcacagcactcagggaaacacacttacttatgttcaccagtttgttataaaggatattacacaggatacagataaacagctgaggaagagatggataccgtgagttatgggggtgcacaacttccaccccgtctctggggctccaccctcccagtacctccctgtattcagccactggaaactcaccaaatcttgttgttcaagtttttgtgaagcttgatttctatttgccccccaccaacccaccagctatcagtaggtggggctgacagctccaaccttctaatcctctaatcaccttgtctttctgttgactggctccatacagagactatctaggggtgtcaccctacgtaatctctttaccataaactcagaaagtgatcaagtggcttcattataaataacaaaaatagtcctatcactcag

SEQ ID NO: 490411 - DNA, 562 bp, Homo sapiens
aacagcacctctgcgtatgtgagagacgtctaaacattgttttcaatggggcttataacccaagaacttggagatcccckctctatgctttcaaaacttgacccctattggatacttgttatgaaggatcatcttgacattcaggaaaatgacctatagaagtcatctgagagaccatggaactttccttcttcagaaaacacttcacctcccctatctcctaatttcaagttcagtgtttttactttataccagactgactcattctcactgttgcacttatttcaagacctctaacattttctctgcagctttaacattctatgattactcactgatgaaatgcaaaagtgtagtttaaaaaaaaacacatagactttattattttctgcccaattttctttttttgtttccatgaatataggaacctgaatcaatcttgagagaatttattggtcacacaccaagttaggtaaaaggcggatgaataatttctttactcatttactccactctgggaacaagagactgtgctgaatcgggatgtgtggcacacagagta

SEQ ID NO: 490412 - DNA, 562 bp, Homo sapiens
aacagcacctctgcgtatgtgagagacgtctaaacattgttttcaatggggcttataacccaagaacttggagatcccctctctatgctttcaaaacttgacccctattggatacttgttatgaaggatcatcttgacattcaggaaaatgacctatagaagtcatctgagagaccatggaactttccttcttcagaaaacacttcacctcccckatctcctaatttcaagttcagtgtttttactttataccagactgactcattctcactgttgcacttatttcaagacctctaacattttctctgcagctttaacattctatgattactcactgatgaaatgcaaaagtgtagtttaaaaaaaaacacatagactttattattttctgcccaattttctttttttgtttccatgaatataggaacctgaatcaatcttgagagaatttattggtcacacaccaagttaggtaaaaggcggatgaataatttctttactcatttactccactctgggaacaagagactgtgctgaatcgggatgtgtggcacacagagta

SEQ ID NO: 490413 - DNA, 550 bp, Homo sapiens
aaaattatattcttaaatttaaacaacctcttagctaaataagcttttctaataactttgaattgttttctatttagattaaaaaatgcattctagtgtaatcctcccaatacccaccaatggtagctatgattattttactttatttttaactctattaacataggtgggagtttccaatccataatcagaatatattagtaacttcacttacacagttgtgttgattacttctgcctctgtcaggtaggtagtgattaggggcactgctatgtcttaagtgtgcgtaagcaaaaagggaaagaacagggaatataaaaggcagggaaaaatcctgggaaggcaaatacacatagtgtatgtaaattctaaattatgttaacaaatacacactaatgatttatattaatatatacattaatgtacctatagtttgggagtaagacttcagttaggatgagacactgctacttactagctatgtaactttgaacaagcrccttaatctccattggcctcaattttccaatctttaaaatagaacagtagt

SEQ ID NO: 490414 - DNA, 581 bp, Homo sapiens
tgccctcatacgccatttaatggagttcttccctttctgtgattctttatttctttgtttggttaaaaaggggaaggacacaacaggttttgactagcattggattctcaatctgctgcataagcctactatttagttcttacagaccttagtgacaataaatgtttactgattaatgggtaaaagcctgatatatttatttttagacaaggttttaattttttccaatgtagttcatgaagaggaaaatcatatgtgaaacagtcacactaaacttggctgaaaacaaaaggctatgactacactgcctggaagaatgcttattcaatattccctagactagcatatttctcagtagagacaagagcatatactgtagccatggaaaatctggagaackaagcatttgaaaataccatttatactacatcaaacttgagcccactcaggcaatgtaaatctttcccatatgtgatgactacttgttgtccagcttccagttctaaagagacactgtaaatatcccaaatagtcctttttaactcctaccaagagtctgtctttatgcttgtggttgaaag

SEQ ID NO: 490415 - DNA, 580 bp, Homo sapiens
ggttgaagttttactaaattaaaaattttacagcctccagacccatgaaatgttccatccaggaaaagttcttctgtaaatgtgcaaaataggtctgtggagttacacamtcatagaaacaggagaaagaacaactgaatcagagaggtaaaagtctaaaactgattggtataacagataattacaaataacagtttatgcacacatgtacatagataaaatagataaatgcataggaacatagacagattagctaaaatagagataaagagtgagagagaggtgagagagagagagataataaagtctttggttcccaatataaactattattcttaaactacagtcaatgattgcattttagggaatctctgaagtcctcaaaagtatgtgcaattttggtaggtatttgcctttttttttttttttttttttggcaaaaggatcaatgcatttattagattctttaggcacccatgtcctctaacttttcacctatctcctaagaaatccttctggaaaaaataattagaatggaaactttttaaaatttgaaatgtacaaaagtaacatgtaattg

SEQ ID NO: 490416 - DNA, 336 bp, Homo sapiens
gggaaaatatgcttttccattttagattcccagcatttaatataaatataggaaaaatacattttattgactgcattattgataagaactccacattacttacccaaataaattcacatccaccctagactgtgatcaaatcaatatcaatattacayaaacggtcaaccggagccagattcctacctccctttttcttacattgagggataaggaaaagttgaagaattgatcaaagaggtagacaacatggccttggaggaattgttgctgggttagtcaaagactttagtggagatcaggttcactaagaggaatgaatacagatgactagga

SEQ ID NO: 490417 - DNA, 336 bp, Homo sapiens
gggaaaatatgcttttccattttagattcccagcatttaatataaatataggaaaaatacattttattgactgcattattgataagaactccacattacttacccaaataaattcacatccaccctagactgtgatcaaatcaatatcaatattacacaaacggtcaaccggagccagattcctacctccctttttcttacattgagggataaggaaargttgaagaattgatcaaagaggtagacaacatggccttggaggaattgttgctgggttagtcaaagactttagtggagatcaggttcactaagaggaatgaatacagatgactagga

SEQ ID NO: 490418 - DNA, 363 bp, Homo sapiens
gactgtaagctctttgagggcaggggctttgtcttacatatttgtctgagcacagtgtttcacccacaaatcccaaattttggggtccagtattgctctggtcttgttacaaatgtggacatatcctctgtgagaatgtgctgacrgattgcccggcctgtcgcagtggacatttaattaagtgactggaaagttaaaagacactaacaagaggatatgagcttgcttttcttcccttttggtaaaatattccaggcctttgctctccatatatttcatttcttatttgctcagatttcataataaagcagatgaccattcaggtgactcattcaactttgtttatcttagattcttcaccat

SEQ ID NO: 490419 - DNA, 552 bp, Homo sapiens
atctgaaaccaacaatattcctgacattattattatgttaacagataaatacccatttttacttcagcatgtgtgggtagactacttttaatttgcagttgaagagtctgataccccctctcccgtaatacctactggtctaaaactatatccaattctcttatagctgtacgtgggatgggcttggtttgttctgtctttatctttgttggyctctctatgtgtctctcttttcctgtttctgtctctatgtctcttgttccattgtttttctctctctttctctcttcctttagaaagcttttaataagctgttgctgagacttttcattacgattatttagaaagaaaattatctattagcctaaaagataaagcttttggtgctgagttgagagactttattgttatatctgttctatttttttctgatcaccctggttcctgtgtttataggtagaagacttctgggtctgaggaggaaatgtttttgttagctagctttgtaaaatatgaatgagctctgaatgcattagaagggttagtaatcag

SEQ ID NO: 490420 - DNA, 360 bp, Homo sapiens
aacaaaagttcaagtgcacaacacagcactgttagctgtaggcacaatgttgtgcagcagatctccatcacttaatcgtcttgcataactgaaactttatacccattgaactgcaatgcccacctctccctccccccagttcctaacaacmaccagtcaactctcaaaatctcccattttataatgatagctttcaacttgagaatccttcccaatcaatttaatcctcagcctcagtactcctaggaaaccccctcctcccatcatctaccttaaagaaggctctttcctgtgccctagttggctttccaatcatttcctcctaatcttcaagggtaaacaaagccaaaatgctagaat

SEQ ID NO: 490421 - DNA, 272 bp, Homo sapiens
ataagcttgtttactagtggaccccaacaacccaagctggtaacctcttaccatatccagcttttgggttttctcrtggtccaggtactatttcaaaaatatctttatttgtagcttctaagttattaactaaatccaccctgtaaaaccccgtttctccaacattaccattcccttagaaacagcgttgctaggtaaaatacaagatgcctggttacagttaaatttcagataaacaactaaatttttagtatatggggccaaatattgca

SEQ ID NO: 490422 - DNA, 272 bp, Homo sapiens
ataagcttgtttactagtggaccccaacaacccaagctggtaacctcttaccatatccagcttttgggttttctcatggtycaggtactatttcaaaaatatctttatttgtagcttctaagttattaactaaatccaccctgtaaaaccccgtttctccaacattaccattcccttagaaacagcgttgctaggtaaaatacaagatgcctggttacagttaaatttcagataaacaactaaatttttagtatatggggccaaatattgca

SEQ ID NO: 490423 - DNA, 564 bp, Homo sapiens
cagctggggatgcaccaggaccactgagaaagcagcatcagagacccaggaacaggtgycacctgagactgagccttcatcagaaccacagaactcccccacttcacactattgggctaacaatctagctagcaacagtggcatgcaggcaagtgcatggaacgaaaccttttctgagagaaaaggcgcaatgataggagggagaaaagatcagtagttgtcacgggttgtgagtcgggggagatgttgaccccaaaagagcagcatgcacgagctcctcgtgggtggtggaaactgtgccatatcttgagtgtggccatatatacacgagtctatgagtttatcacaactcacaaatattgtgcaccacaaagagagagttttactgtgtattaataaattaatagatctacaatgcgcatggagattgcctgtcaacatataaatagaactttaatccagaacttgcagcaacctgcccaggaaagcaaccccttatatacaataaacaacccagggtgctgacctggtataaagcaggcttgcagaaagccagattgctat

SEQ ID NO: 490424 - DNA, 564 bp, Homo sapiens
cagctggggatgcaccaggaccactgagaaagcagcatcagagacccaggaacaggtgccacctgagactgagccttcatcagaaccacagaactcccccacttcacamtattgggctaacaatctagctagcaacagtggcatgcaggcaagtgcatggaacgaaaccttttctgagagaaaaggcgcaatgataggagggagaaaagatcagtagttgtcacgggttgtgagtcgggggagatgttgaccccaaaagagcagcatgcacgagctcctcgtgggtggtggaaactgtgccatatcttgagtgtggccatatatacacgagtctatgagtttatcacaactcacaaatattgtgcaccacaaagagagagttttactgtgtattaataaattaatagatctacaatgcgcatggagattgcctgtcaacatataaatagaactttaatccagaacttgcagcaacctgcccaggaaagcaaccccttatatacaataaacaacccagggtgctgacctggtataaagcaggcttgcagaaagccagattgctat

SEQ ID NO: 490425 - DNA, 576 bp, Homo sapiens
aaaattaagtggcccattgtaaagagtcaataattattttttgactacaatattatacgaataattgaaggactaartagcttagtgaataaatggataaataagtgaacagataaatgaatgaataaatacacacatacacacacacacacacacccataaaacgggaaaagttctcttgtcccccttgcaaagcgtgtgacaagggtgtggctggcttcttcgcttctttggtgccctgctgctctaacccctagtgggagcctgcagatgagcaggtcgtggggagcattctgtggctctgaacccatggcagcctctagggttgagtgtttacagctcccgaagccccagtgggcatgtatgacagtatgctctttcaactttcctgtctgcaggtggcttgtgttaatcagctcagttagacccactgctttatctcaaggacagagggctttctgtatcccaggttcttgccctagtgtactggaaaaattggaccacacgtgggcttggagaatgagtgcaaggttttattgagtggtggaaatagctctcaacagatggatgggagcc

SEQ ID NO: 490426 - DNA, 543 bp, Homo sapiens
agattcctaatgagtttaaaaaacataacattggaactcttcagggaaatggttaagtcagagccaaaggcattgacactgaatgaagaggagccttagctaatgaaaagggagcagagagtggaagaagccagggaaggaaggtgactagaaatccagtgctggactcagagaagggaggcggaggcgagagctcaccgacagcattgttggtatgcaaagcacggcagcctcctcccaggagttggggcagcagcagcagagagggagccaggaattcagagggaaagcaggacctgcaggatggcccctgggatcacattcgggacttctgacttctggagaagactgcaccccaggtggccagggacaaggccagcctgatattagggtgtcaccaggttctgaggcaaagttggtagagtttctttcactttctccctccrtgcctttgctccctcctctctgtccacctggctctccctgacactgctatcttggtccaggtgcaaattgttgggtttcctctttgcggagtgaggg

SEQ ID NO: 490427 - DNA, 509 bp, Homo sapiens
ctgcataaagtaattggtaacagaggtacttcaagtgagggaaatagaaatctgagattggttgtctgacttggttggatgtgaaagcactgaggatctggttactattgggagggagcacagtgatggaggttgcctaaacctttactggcagtcaccagaatacmgtcactgggaccaccaggatgcttcttagtgaagacaaggttttacagaccaagtggccaccattatagaacagaatggagggacataagccagactacttccattgtactggagcacttaaataaagaaaaggatgacatcaaggttcttagttcttgtttaaggcctgatcagagaccaaggaattactataattaccctaaagacattttatcttttgtcagccacattttttgtctgacatagccaaaactgagatatagagtctgattccatgagtccctgaattatgacatagatgaatttacattcatattaggtctcttatgtgaaactttgaa

SEQ ID NO: 490428 - DNA, 606 bp, Homo sapiens
tcaagcattttacatgattaatcccctatgattatctaatacaagatgttgcacactgcctgaagctcagattatgaagagaggcctgtaaccttgggggcgtctgcatcgtgttcactgcattatcagtctttcccatcgtttgtttgtataataggatcaaaaacacagatattttgttttttaccttgtttattttaaaccyttcgtgtcttttggctgggaatagagtctaaactttctaatttaagcaaaggagtttatgagcgactggggcaaagatttcattccatagcccggctaggaatgaaaggaggagggagatggaaggagggagatgatttggttcattgatttctcttctgagtccatttatttccagttctagcccctgatccctatctgccaggggagtagttaatcatttttctcatatcctctggctctcaataagtgctcaggtgatctgatttaaggtatgccttaagtttgtgcaagccacttacatgagctcatagttacaatttatttcaggtaaagttattgatagtatataaggatgatacaacttggtttacattattatgaaattttaaaatctgatta

SEQ ID NO: 490429 - DNA, 606 bp, Homo sapiens
tcaagcattttacatgattaatcccctatgattatctaatacaagatgttgcacactgcctgaagctcagattatgaagagaggcctgtaaccttgggggcgtctgcatcgtgttcactgcattatcagtctttcccatcgtttgtttgtataataggatcaaaaacacagatattttgttttttaccttgtttattttaaacccttygtgtcttttggctgggaatagagtctaaactttctaatttaagcaaaggagtttatgagcgactggggcaaagatttcattccatagcccggctaggaatgaaaggaggagggagatggaaggagggagatgatttggttcattgatttctcttctgagtccatttatttccagttctagcccctgatccctatctgccaggggagtagttaatcatttttctcatatcctctggctctcaataagtgctcaggtgatctgatttaaggtatgccttaagtttgtgcaagccacttacatgagctcatagttacaatttatttcaggtaaagttattgatagtatataaggatgatacaacttggtttacattattatgaaattttaaaatctgatta

SEQ ID NO: 490430 - DNA, 606 bp, Homo sapiens
tcaagcattttacatgattaatcccctatgattatctaatacaagatgttgcacactgcctgaagctcagattatgaagagaggcctgtaaccttgggggcgtctgcatcgtgttcactgcattatcagtctttcccatcgtttgtttgtataataggatcaaaaacacagatattttgttttttaccttgtttattttaaacccttcgtgtcttttggctgggaatagagtctaaactttctaatttaagcaaaggmgtttatgagcgactggggcaaagatttcattccatagcccggctaggaatgaaaggaggagggagatggaaggagggagatgatttggttcattgatttctcttctgagtccatttatttccagttctagcccctgatccctatctgccaggggagtagttaatcatttttctcatatcctctggctctcaataagtgctcaggtgatctgatttaaggtatgccttaagtttgtgcaagccacttacatgagctcatagttacaatttatttcaggtaaagttattgatagtatataaggatgatacaacttggtttacattattatgaaattttaaaatctgatta

SEQ ID NO: 490431 - DNA, 568 bp, Homo sapiens
tacgtaattccaacccagtcactgggtaaaatgatgagcattagtgttcagaggcaaagtttcttaagggaaattattatcatgattaatgtggttaacataaaaagtggtaggctagtggggcgctgggagggatggaacagctgcttgactctcacagcaaaacaaggttcactttttttaaagtttttctttacgaggttattttgtsgtaattgttggcaatattagatagtaatagtttcttttaaatagaaaacatatattcttgccactgaatttctacattttcactggcaatccaaacttccttagtgctcttttgcttatcatcagtgttagttttcctgcaataaatgtgcttagctagataagtactagaaagcttaaatggacgagttgagtttttctctttttcaactctctgaaaacaacttcactttattaagaagatagaaaggtgggaagtaaatgaaacaaaacacaaattttggtcttcagagtgactgtttcctgaaagattactaaaatcctcaattctaaagattcaatgagttttagaagatca

SEQ ID NO: 490432 - DNA, 635 bp, Homo sapiens
ctggctttgtgggtggcttttttcatactactgttaacttttttaaaaaagaagcaatgtaaagaccgtaatgcactaagctttttttttttcttttacacgtttaaaaacttcttaaagcactctgtaatataatgattaaattgctcccttttatamacattgctaatgtggtctgagttttgtttgacaataattttaatgttctcaaaatttgaaatgtcaagtattagaaatgaagcctttgaatatagttgtttcccttgcaatatgttaactctgtgtagctgtatataactattaatttccctcatctcttttataggcctgataaaactcttctctgacgtttgctagcttttaaatatatttatttgacagagcaaaagaaccctcttctggttgattgtgaccttgaatacaaaataaaagtagtgattagtagtttacagtgaccttttttttttcattttattaacaaagtcaatttttaaaacattgtggtaaaatatatatcacatactatttgccattataccagtttttaagtgtaaattcaatggcattaattatattcacagtgctgcaccaccttcaccacttttccaaaagtttttcatcaccccagacagaaa

SEQ ID NO: 490433 - DNA, 576 bp, Homo sapiens
ctcggttctctggagttcttggtgcactgtgggtccacttttcttgtttggggtgatgaytaacatctgccctgatactcgcctggtacttgaggctctgaactttattatcttctcttcaactgcagctcgtggcacttgtaggcaacgtgcctcccaaagagcctgaaagagattacagctcacttcctgccatcagacagtatgtggggaggtcaaggggtgggcagaggagaggcttggtgaaattcagacttttgggccccatctagaagaatctgcttcagtatctcttggagctacccaggaatatgtattttcaacagtgctccagatctgagggacagttggaattaggaaaactgtggctctaactgatgccccagtacttctcaaagtgggtgcccccacatcctgatatgctggatgtgttttgtaactgcagattcctgggctccactgggagtggtggccctggaccagcctctgtcatgtgtccccaaccacactcttgggattcgtatttgtatgaactttagagaatgaactgccacagagattctaggtgacaggaaa

SEQ ID NO: 490434 - DNA, 536 bp, Homo sapiens
ctggtctcttggatagatcaggcggcggtaacttctgtatcagctattgaggaaggggagatccaagagtccaaaagagaataggaaccccagaaacagccatgtatatttaacgggccctttgtatctgttggctgcatcttgagtttcacttccacatattcaactaaccatggatccaaaatattcagggtggggtggggaggggcgatggctggcgcctgtagtcccagttagtagggagactgaagttggaggatcacttgagcctagaagttcaggaagtagtgcactataatcctgactgctaatagccactgcactccagcctggcaacatagtgagactccatctcttaaaaawtttttttttaattaataaataaaaatattcagtcaaaaaattaaaataactatacaaaaattttaaaataatgcaaatggaataaatcagggcagtattacaactatttgcatagcatttacattgtattaggtaatataagtaatctggagatgatttaaagaatatgtata

SEQ ID NO: 490435 - DNA, 529 bp, Homo sapiens
tgatatataaataaaaagtgacactctataaacagaacagaaacctaagccagtgttgttaaatagaaagtaatgcttgagttttaacccttattccaaagcttttgccttgacataaaggaagtttatgtcttagtcctgctaaacaaaaaacacagatgacattttcaacctatttaagaatcattgccaccctcaaatgctaagacacatgcttatatactgtttgacttttttcattcagactaacaccaaaaataaaatgatgttcattgatagcaatataaccatggaataagtcattattttgggttaaaaattttgtatttaataggggaaaagatgaccttattaaagaaaagcaaatcttattcattattttaatctctaactaaaraaatgcaaatgattagtatttataaatgtaagcaatcaaaaactgaaatattaagttttttgaaatggattctgatgaatgatactacagaagaacattttatacagacatctaagaaaacacatgaacagt

SEQ ID NO: 490436 - DNA, 637 bp, Homo sapiens
gaaggtccttaattcaccaggaataatttttttctggtttactatatttgagaatatagaatggttgatagaaaatgtatatttgacaatgtagtaaagaaattattcwaccataaatttttgcattactccgagtaaatctcattccaaaagttaattaattcaatttttgaattaacatatactaaaaaaagaaagacatgtgagacaatatgttttacttagttaataaataaactactttcatatctgagaatagaaatccatatatgatggaacggaggcatgtggtcagagcagacaacacagtcatgtgtcacttcagacacattctcagaaatgcattgttaggtgattttgtcattgcacacacagaatacacttacacaaacctagatgtcatagcctattactcataggttacaaatctatatagcatgttatggtactgaatgctgcagacaattgcaacatagcagtaagcatttttgtatctaaacatatctacacagagaaaaggtacagtaaaaatatggtaccggagataaaatatggtgcatctgtaaagggcatttaccatgaatgaagtttgcaggactgaaagttgctttgggtgagtcagtgagtgagtggtgag

SEQ ID NO: 490437 - DNA, 612 bp, Homo sapiens
cctcctctttttcattcttctttttgaaaatggatctttaatgagaggagaaagggtataattaggaagtcatggcaactgtgaaaataaatctgctgagaaataaaataatttcatatttttgaagtgtaagtacagtggcataagtgtttataacacagttccttcctgtagaagcttagtggacaaaattgagrtaactcacacagcttccagaactttccaatgggagcagctggataagaaagataatatgcacagaacaagtaacttatatcagaacttcctcaagagttggttcccagcagctcaaaatcttaaaacacaaaggaacaagtcagtgttctgtttggtcttgtttgaagtgatgatgagcaagatgttgcatttgaaccttcctcaagttgtcaccatgttaaaggtaggatcaggacccaaggttccattagtctttatgttaataatctttagattttccagttgtttgaggcacattctctttgtattcttagaaaagactcacaggaacaatattttatgtttcttctatttcaaacaggttatctgcggattttatgtttaaagataagtttggcataggtataaaatttg

SEQ ID NO: 490438 - DNA, 598 bp, Homo sapiens
tcatcatcaccattatcttcaacatcaatgtcattcattcaacaaatatttattaagcacctacaatatgctcaacactattgtagacatatggaatagaaaataatccctgctctcatggggctttttttttttttttttttgagacagggtttcgctctgtcgcmtaggctggagtgcagtggttccatctcagctcactgcaagctccacctcgtggattcacaccattcttctgcctcatcctccctagtagctgagactacaggcttccaccaccaagcctggctaattttttgtatttttagtagagacagggtttcaccgtattagccaggatggtctcgatctcctgaccttgtgatccacctgcctcggcctcccaaagtgctgggattacaggcgtgagccactgtgcccagccggggcttgcattctaattggagtattacattatcgggagatatttccttatgaatttatcacatccctatacatttataattaattatccatattctccaggcctacatttttaagaatgcttgcacaagcatgcaacactagaaagaaagaagcattcctggataactaaaat

SEQ ID NO: 490439 - DNA, 615 bp, Homo sapiens
tgtttaggggaaagagaaaaaaaaatatgttgattaaatgaaataagtcaggatgattcctcaaagtttaagtcaaatatccccatttgagagtctttagagtgtagctcgtgatatttttttcctttgttgatwtttgttgttgctttctctgggttaaatatatttcaaggaaaataacataattctcaaatccattatttcctcaggtgtttccattttcttttaatatggggtaacttaatcaaacacaaaaacataaacaaataatttctattgtaaaggaagggtaatctaattgagcagtggagcagtggtaatctaagcactagactttgggttgtagttggggctttcacaacaataattatcatcggcaatagtgagggcattgtatgaaggatttcacacatactacgtcagttcatcctccaatcagtactgagagatgcgtatattgattactcccgctttacacatgatgcactcactttttgcactgactgtgctctaagtttgaggacaaacttcttcccacagggtccatctattcataccccaaataaatttagaacaaaccacttcaaataaacgtaatctaagtaaaaacagcct

SEQ ID NO: 490440 - DNA, 528 bp, Homo sapiens
gcaatgcccagtcaccccaggcttctgagagtgaacgtgcccagtggctctggaagtctttctctgcttgcatgacatgcagtgttgtatactaaatcgctgttacttagtcccttatgtacatgtgttgtgggatccacctattcttgtgtcggtataagaagaggtaaggcaactttgattggcatgaatgtgtcacacacggtgctgtgtggacatgccagtgctattcatttcttgaagccagttgcattgtgagtatcaacaaattttcttttttcttttttttttttttatttttttatttttaggatggagtttcactcttgttgcccaggctggagtgcaatggcatgatctcagctcactgcaacctctgcctcccaggttcaagtgattctcctgcctcagcctcccaagtagctgggattacagccacacgccaccatgcccagctaatttttgtatttttagyagagagaaggttttgccatgttggccaggctggtcttgaactcccgaactcag

SEQ ID NO: 490441 - DNA, 613 bp, Homo sapiens
agctttctagggtccctttcataagggccctaatcccacccatgaggctccactcacaaaacatatcacctccccaaggccccatctcctaatgccaccatcccatggagggttagaatgtcaacataagaattttggggagacacaaacattctgaccataacacagggcacacgtgaggcagttccaaaaaactatsccacagaaagaagaagacagacacttctccaacagaagtcctcaagatctcagtgcacatatgcccaagggcacaacactcaccacatgctaaagtcaacagcgccagaaaccagaggtgggcccgtcccttgagtcagaatgcctctgcctccaacggtgcccatggctgctgtttcctcccaatgcctccaccaagtgccttgagtgggggtccctcctcggggatggagcctgcaagtgctccctgaagggcggtggccctccttcctccagaaggcaaaggttttccttcatctgggccagttcctggttccttctcctgataatggacctcctgccatgaactcaacaggacatgcagcttcccaagcctaccacatcctcagcttctgccagttctctctgcaaaaag

SEQ ID NO: 490442 - DNA, 478 bp, Homo sapiens
ccaggggctgggctgtgggtggggactgcacaaacccctcatcttggcaagaactccaagcattgctgacggaccgggattcagatccaaggctcagtatcctcacaacacacacaagttacttgagctcgctaagtctcagcgctctcttccagaaaagggagaccatcaggatggcatacatgcacggttcagcaacgatcagactagggacagaaagtgcccaagccaccttggrtacttgagtagtaaaaggaagggggtcttgttagccgcgttattaggctgagagctggcgggctgtttgcagagggctcccagggcttcctgcccagcgctggggtggagacagggacagagaggtctctcccctgaggggtggctctgaggagcacttccctagctctgggagcacctccctctgccagagggaattttctagatcacagacatagaatccttcagtataatctttcat

SEQ ID NO: 490443 - DNA, 583 bp, Homo sapiens
caagggggacccagtgaactggtatctgatgattgatcaggaaaccttgaggacaagggagaagctgacttgttgaggggctactgcacggaatgggtctctactcccacaatttgatggaacagaaaatgtgtgacctttctccgtggagcaggtgtgaccctgttgggcaatagaatcccaacagaaagaactcgtgtggcgtagactaccaggggtgtgagcctgcctgggggaaatgcaccgcctttgtcataayatatgcagtcaaatatttccactggggccggccaaagaacccatggaagccccttgccaggccccacaagcaggaaacctcttatgacacggctgagcgaggaatgatgtgctttgttgccccctttcctgctcccctcttccccaccccatttcccgctgcagcagcagaggcagggccaaggccaggtgtcccttcagatgggtcattgcttaagtggttcttaaatgatgtaactttcagctgggcgcagtggctcatgcctataatctcagtactttgggaggctgaggcgggtggatcacttgaggtcaggagtttgag

SEQ ID NO: 490444 - DNA, 465 bp, Homo sapiens
ctgggcttgctgaggtttgacgttagatacagatctggtggccaggagagaggtgctggtggaccatgaagggaaggcattgccttgtaaagcccctgcctaacatttgtggcctctgcatagtcttctggcagaagttggtggttgggggcaggggcctatattcctgaaagggggagtgggtcacttctgcaggggaatctggagatccttggttcttacctgcagtccccaaatacccccatcccaagtctcacagtcccactcctttcccttcagagccctggctttgacattagagacttgcctagaatgagaactcagcctctcttacaattagaagctgtgcctgctcttccattctctttgccttctgcctgcagggggtgagggtctctttaaaggcagccamgtaggccctgtgactctcacaattggctgtaaatcactgagcaacagatctga

SEQ ID NO: 490445 - DNA, 463 bp, Homo sapiens
gctgcctgtgttttctcatttgattctcataaccctgggaagtaagtaaggccagaatttttattcccatttctcagataaggaaatggaggttagagaaacatgaatgaggcacatttgccatgcaacttagcacctggaacctgacctcaggattctgagttctagcacagcctttctccactctccaggctctccaccctgaagccagtcgcatatcaccccaataaacagttacaacgcctctgccaacacaggatcccaaattgctgcctccgcctcatcatctttcccttctaggcatgagactttccagaaaagggcacagatggacagagcatcctatggttctggaaccagatgtataatcttaagtctgttttttccccctttcagaattagcattcctttatctcattcctaamtattcagtcaagtgtgttaaatgctgcgtcccaatgct

SEQ ID NO: 490446 - DNA, 577 bp, Homo sapiens
gaggaacaaaataaatacaagtgaatacttgggtgcatgaaggttcccacctgttgttttcagtaccagakaagtgagggggagttggccctcctgtttctgcaggagcatcggcgtcacacggagctgaggcttcttttttttattgagatggagtctcgctctgtcacccaggctggagtgcagtggagcgatctcaattcattgcaagctccacctcctgggttcacgccattctcctgggagctgaggcttcttaaggatgggcgccatctgcctcacttgctgcggtttcgggatcctggcatactgctcggcgcctagttgaagtccagtcaatattttcaaatgaacggtacctaattgcttacttaggatgtattctttctctttattaatataaaaataaatatactgggtaaaacctttcaaatattgtgaacaaatataccatgcaggtgagaacccctccaactcctagcccccaggggcttctccagagttcaccaccaccacaagtttgcacttgctttcaaaaatttccatgcatgtatgcacctgtgcaggatgacatcat

SEQ ID NO: 490447 - DNA, 639 bp, Homo sapiens
tggacattatatttaatgtaacgtatcttcttaccagcattgactctgctccattattcattagaaagcatgtttcagtaagtgaagttgaggagtgagtggttggtgaggtggtggagacaggacagaagacttgagtttccttgtttacaggagaaaagagagaaggcaggagtagaaagagggggtggactgaggaaggagttttttaggaccaggaagatgtgaccacaatgatgagagagaagtgctaacagtctagaaagacaattctaaaagactaggggaaattacaaaaatctaggctgctgctacacttggggagacttgcayagaatatttacaagtaactgtgaacttgaacaattgtaggcagcatactgagatgcaattaacagaagaaagataagatgaaagggcttggattctgtaggcccaccctcaaagatgaccaaatagagaaatggcaattaaaataatacagttaggttacatgtatattcatgtatgtgtgtgtgtgtgtgtgtgtatacaaacatgtatacaagtaagtgaatatttactatatcataatatattctaattttacaaataatactgattatgataaatacttaatcctcactttaactgtctctg

SEQ ID NO: 490448 - DNA, 513 bp, Homo sapiens
ccatcctggacagatgcgccgcactgggtattctgttctccactgtagtgacagcagtttagcctctaagagcttggtgttgggagcaaggatgtcttccacacccttgcatcctgcttcctatagggtcctagggcaggccttaagctctccccacatcttggtctcaccaacttaaaattaccttccctgtaggctcgctctgagaagtcaatgggctgcttcttatgaaacaccatgcctggctcccaggggatgctggacacatattcacagaaagtggtgactctcactgtcactgtgcattctttagaaggtcactttrcttctttgatgaatatctttcctagtgctacccagggtcaagaatttctgtttttgtgttttttttttttttcttcagagtcttgctctgtcacccaggcttaagtgcagtggtatgatctcagctcactgcaacctctgtctcccaggctcaggctatcctcccacctcagcctcctgactagctgg

SEQ ID NO: 490449 - DNA, 643 bp, Homo sapiens
tatttttagtagggccagggtttctccatgttggtcaggctggtcgcgaactcctgacctcaggtgatccgcctgcctcggcctcccaaaggcctgggattacaggtgtgagccaccgtgcctggcaacatccacattttcatccacttcctgatccatctacaatcaagtccacagccacagccattccatattcatattcacatccttgcctgtcttgacaaatgcagccactgctgtggttccattcaatggcgcacacctagtgaagttgacagccagatggacaactgaggctgcaacgtcttgtccacatgaatttttctgtttatcccccgagagaacctggtgcttcctgtctcataatttgactaggtctgcaagattaagacagctttyattttgtcacctcaaatcacggaatgcccttacatcacatgaccatttggattcatgctagggtcagtcctggtgaagtttaaatgactgaaagcaaatgtgaattttcaaaaactccagtacatctgtgcttccctccagcccaggctttagttgtttctattcactccttcaggttcatcattacttggttctaacaaatcctggaacttgggtggatgtattacttcttgacagtcaccac

SEQ ID NO: 490450 - DNA, 524 bp, Homo sapiens
tgcatgtttcacttttgctgaggatgacagcagagctatttgcttttcagggtcacagccttttgaayctaatctctgtgtatagatccggcccagacagcagcagggacttggctagagaagctcctaggtgtggttggacggtcactccttggagggatggtttgcaggcctctttgcctatcctatgaggcccttaatttttattgagaaagttctttgtctcattcagcaagaatgggctctattgaaacagaatcacctgtgtgatacatctcttaactttttgcttttgaaatctgtccatgagtgaccaatgaccaattgctcttatcctacctactgcctagtttggtctatgtaaactgcttgtctgcttctaatgtgataacactcaaactgttagatcatgctctgaacttgggcatgggcagggaggagcaggttggctctcatgtttctgagcaggtgttgtttcttggcacttttactagcctatttccactttcacagatggacttaga

SEQ ID NO: 490451 - DNA, 524 bp, Homo sapiens
tgcatgtttcacttttgctgaggatgacagcagagctatttgcttttcagggtcacagccttttgaacctaatctctgtgtatagatccggcccagacagcagcagggacttggctagagaagctcctaggtgtggttggacggtcactccttggagggrtggtttgcaggcctctttgcctatcctatgaggcccttaatttttattgagaaagttctttgtctcattcagcaagaatgggctctattgaaacagaatcacctgtgtgatacatctcttaactttttgcttttgaaatctgtccatgagtgaccaatgaccaattgctcttatcctacctactgcctagtttggtctatgtaaactgcttgtctgcttctaatgtgataacactcaaactgttagatcatgctctgaacttgggcatgggcagggaggagcaggttggctctcatgtttctgagcaggtgttgtttcttggcacttttactagcctatttccactttcacagatggacttaga

SEQ ID NO: 490452 - DNA, 524 bp, Homo sapiens
aaaaaactgaatatcttaatttgtgatgtagcttcaagatattccgaagtactttgctaaacagyttgtctatatttcctatttaaatagaatgtattttataaacaatgcaaaaacatcagtttggtgaactcaaaaccatctatcaaacaaataacttaccacaatctagggcaagaggtcatctgtctgcttgttttgtgttgggttggcatttatgtgttctgacatatgaccagaacctaaactgcttttcccctttttgctctattttttatttaataattacatatgaaatagaagcttattttcagaaaggaaatggactcagcgaagtcactttatattacagtgtggttctccatttaaagctgcactcccacctttaccttgtttgtattttcacttttccttttccattctcagtttcagttgtcatgattttcttttcaagccattgcagatagttcaagtagtgttcatagttaaattcacaggtgagttttcaagttccatttacatat

SEQ ID NO: 490453 - DNA, 546 bp, Homo sapiens
ggtcaatctctttgtaacaaacctgcackttgtgcacatgtaccctaaaacttaaagtataataataataaaataaaaaataaataaataaaaagaagtagatattccctactccagaataacattcaagtaaagtctgtatacaattgctctattattttacttgtttgatttttggggtgctttgttttagggaactctgagcttaaagaaattggaaaaagtcatttttgtcatactcacttttgtgagggtctagcacagtatctgctacttaccatgttttatgaatgaataaacttaaagaggtaaagtactgtataccttttgttacggttactatgagtaaattcaaggacttgttataatacctctaaagatgtttagagtataaattatcaataagatgaggtcacccaaatatgtaagatccaggaaaatcttaacatccaaataaaaaattcaaatgttttatagtcaaataaggtgatttttttaaaaaccaaattcatcttttgctcacactagactcctcacaatcttcct

SEQ ID NO: 490454 - DNA, 586 bp, Homo sapiens
gtgggggttatgggcatcggcccccacacagttgaatatccacatataactctggactcccaaaaactttactaatagcctactgttgacttgaagccttaccaataacataaagagttaacacatattttgtctatgtattatatactgtattcttacactaaaagtaagctagagaaaagaaaatgttactaagcaagccataagggagagaaaacatacatactattaagtggaagtagataatcataaaagtatcttccctgtcttcatattgagtagcctaaggaagaagagcaagaggaagggttggtcttgttgtctcaggggtggcagaaatgaaagaaaatttgtatttaagtggacccatgcagttcaaacccgtgttgttcaagggtcaactatattttgctgtcataaaccaattaaaawttttaggtgatttttaaaatcaatagataattagtttaaaataagtaagtaattgaagtttggcattgaggttagtatagtatagtatttaagttagtatatgcataattttaatagcaaatgctgaaaaataactattaaatagattagatgc

SEQ ID NO: 490455 - DNA, 338 bp, Homo sapiens
taaccttcaaaactctgacagatcasatcaatccttcttgttagtacccaaaatgtatcaaatcaaagtgttactaatatacatgatgcaatagaactcttatcaggaaactaggctgaatgtttcaatatttgcagttacttatatgctatttttcctatctgacagtttgtatggtttgtacctttagcaaccttattttttttttatctaagttacactacttcagtacatattccacataaagaaattcagaacaaccgtattttaacgtcaactactgtagcaaaagctgctggtgcctgcccagattcctctttcatcaggctgctgtactc

SEQ ID NO: 490456 - DNA, 551 bp, Homo sapiens
ctgttttaagaacttctttataagattctacctgccttttttctcttagtatataaagtatgtgctgtgcttcgagcctattaacaaagcacaatagggttgttctgaccttgattccttatagaagaaccccaataggtttgtcagtgcagcttccatagccgtcttgaaatattagctgtctttacaaggcaagaaagcagtaccatacaacattttgctaaatttggtttagacataatgcatttctgttcaattcttcagaccacatttactggcattcactaattgacaccatattcatggcgataattttgcccaagtctgagatgtggcaaataaagcgatttaagtttcaaggacaagttagcagagagatgaacagagtattatattatattttttaaaaagataacccttataaaaaccagaaaatcaggatataagtctttgagccaacaccccaaattgtaattgtgttctattaattagtgtaaaattttgagytttatattttaatgggcattgacatattccatggcaatgatact

SEQ ID NO: 490457 - DNA, 637 bp, Homo sapiens
ttagaagacattggtgatcatgaccaaagtgctttttacatctctttccatctttctcagccactyggtagcagtactctccttttgtcacttccttgacatcactcttgcctggattcttacctcattgactgtttttgttcctctgctctgcttgtaaatgttggcatgcctcagcacttggtcttaggtccactccttgatttttacattttcttcctggatgatctcatccagtaatagcttcaggtaccagctttattcattggtttcctaatttttatctctaatcctgagcctctgagctccagactcagacatctacttgtatgtccgatggctcatttttcatgtgtaataagcatcttattcttaaagtggctaaatagaactcttgatttgttccccaacaacttgtttctcccatagccttcccctggctccttcaatattttcttaatttctcttgtccccttactgtccatttttcacatagcagccagggtaatcttttaaaaatgaaaaacagttcaagtcactctccattttagaactcttcattggctcccgtaacacctaaaattctgactccttaccctggttttgtggcccaatcaatatcatctcctaaagttga

SEQ ID NO: 490458 - DNA, 643 bp, Homo sapiens
tgccggggccgggcgctcacctcctggggtctggcttccgtcgctcctccagtttggcggcggagtgtggggctgcagcrgccactgccactgccgccgccgccgccgccttcgctgccaccgcggccgccgccgccaccgaagcgctgcccggcgcgccgccggggttggaggctggggggccgcggaatccctggaggcgcgagcccgggacgcggcggggccgagccgcgggaagttgtctgcgccgggcgcggagcgagcggggcgccagtcacccgcgcccaagtagtcacaactttgccgcctgggtgggtgcgcgctccggagagaggcgagcgcgggagagcggggcaaaggcgctggggcgggagggtcttcggagcaggcaggactgcaacctgaacggcccgcgaggaaaggggaaaggtggcgcggggggatgtctacacagcctgtgtggtgcgcggcgagcgagtgtgtaagagcgcgggcgtctactctactttgcctcctgcagctcctgcatatttatggggatctctgatgttcctgctagtaactaacactgcagcagtggagcccagcccaggcgcccctcgggagcaagccggggtgcgggggctcacggaaggcggccgcg

SEQ ID NO: 490459 - DNA, 525 bp, Homo sapiens
tgaaaggaggacttcattcatgactcctcakgacattccctgacttagcctacactcacactcacatgctccttaatatttttaatggaccatttcacgtgcttccacaaagaccgtgtgctgcttctgaccagagttccattgtagaatacagtagtctccttcctctgtcagaaaccaaatactttgtccttccaacattttctcagaggttttaccattacagacaggaaaaagaagctcccttctaaactcttttagctttcaatcacccttcttcaaggcttcttgtgtgaaaatcagaaaggtcctaagacaggaatcaggcaagatgaaatggctgggctcctccatatgacacaccagcacagaggatggcgacgggcatgtttatcctctgtcccctcctccccaccaccatcagctcttcaaccaagagccagaaccaaaccagcagcagaataaggaaagaagagcaaagggaagaagggatgataccccacaggacaatcacgggaaagggaa

SEQ ID NO: 490460 - DNA, 572 bp, Homo sapiens
ggagcttaagataataccccaaaattcagcaattccaacaggataccagaatgatttcctctaataaaattgaacaatatgtgatagagaaatatgcaaatctttcagaaatggtatcaacatatttattacgaaagctctgtttaataaccttaggccaatgtttcagccccttcctcctgcaggaattctcccatagatcagcataacacaggacacagacctctctgtttggaaggagaaggaaaacttaaaatgagctactaagccactaaaacccaggcccctgatttaaaagattggtctggttttaggtacggtggtagagaattatgttagacttctctatcagaacagactcttggggcccttggactctcataatgtgagagagwgtgtgtgtgtgtgtgtgtgtgtgaaatgtacatacacgtgatcagactagcaacttcccagacacagaaaggtgttttttcctttgtatcccactggcttcctgcctccttgggaattgaatgggcctacatagcaggccacttaaaagctgttcctcctttttggcctatggacca

SEQ ID NO: 490461 - DNA, 614 bp, Homo sapiens
caacgaatgctaagctgctctgcacatcttttaaaaggtctaggaaataggcacagccatgggaaagttgctattccctcaagaactttttaaaagcaagatatgtttatataggctcccataaattcttaggagttctgccaaaataatggacccagactcagctttttggaattgggagtttctgaagcagtcctttcctcctttgggttaaaggagggctgcaacaagccagaggcatttccaagtgtacagaggaaggtgatgttctygcatgcgcagataaaaaaggacaggtcagtctaaatcattcttatagaggaatgagaagttaagagaaggacaaggaagcactgtgagaaaacatcagggctgagagagacatttgggaaattaaagtttaaaaatccactgccatttcatccagcagagtgcaacacattcacaagtgcaaggaatactgggtagtttggtttaaaacaaaaacaaaaacacctcccatacaagggccaatttttcaccccatccccaacctctaatttttcaaaaaggttgtttactgctatacaatcccagaaacacatcaaccaggctcagtatttaaaagtcccaac

SEQ ID NO: 490462 - DNA, 622 bp, Homo sapiens
cttcccagttccatctggatactttgtaatatattttaaaggctagagagataagagaggttaatccaaacaatytgacttcataaatggaatacttgaataacttacatataaaataattggtatttttagaataatttaaaaatcaggccaggcgtggtggctcacacctgtaatcccagcattttgggaggccaaaacaggcggatcacttgaggtcaggagttcaagacgaggaccagtctgggcaacatggtgaaagcccatctctactaaaaatataaaaatctgccgggcatggtggcaggtgcctgtagtcctagctacttgggaggctgaggcatgagaatcacttgaatccaggaggcggaggttgcagtgagctgagatcacgccactgcactccagcctgggcagcagagtaagactctgtctcaaaaaaaaaaaaaaagaaagaaagaaaagaaaaatcagtgagatgcttcttttcttcctttcatgcaacccctcttgttaggcaacagatctggattaacaacctatattgtgcctgagataacattaagacaaaaagcatacatatagtgaattacctggtctttaccatttaaatgagttaagc

SEQ ID NO: 490463 - DNA, 633 bp, Homo sapiens
accccagcctgggcgacaaagcaagactccatctcaaaaaaaaaaaaatagaggctgtaactatacaggtgctttttcttggktctttaagtgatatggtaacagggtaagcatatgatttgatcagcctctgtatctaaataatcatctctggttaatagtttaagtaaatgtgcataggtttcagtttcaaaagaaagagcaacatcttcttaagtaatgtttactttcctttttctttgtgatcttacacttttcatgcatacctatccctctttccagttgtttaaactttaacctgccctgcctctctaatagtatgctacttcacttccttctcatcagtgtgttgttttccaggcccaaggtgttgattacaataataaaaatcagttacatatatcagatactatatttacaagagaaaactaaatttcatgttaaatttcacaggaaaattaaagttggatactattgaataacactattcaatactagtttctaggggaaataaatacttaaaactctattacttatggacaaaaactgattatcctccacagagtcagtgccttttgtattttgttttattgacatcttgaagaaacaaagaaaaacctcagcttcctcagg

SEQ ID NO: 490464 - DNA, 632 bp, Homo sapiens
ctggacttctagctgtgtaacgttgaacaagagacttatgcctgtctgtgcctcagtttcctcctcagtaaatggggagtcttacatgtaaaatatttcaaatagtgtctgatgcatggtaagcactcaagaagtgttactggcattttaattctgcagttcctgtaatagtccagtgcaaatacaatgcagatcttaaagactgcatccctcagaaactatcctgaaagatcaactgaagtctgccagcggtcctgaagtagatcttaaggagcaagaagtgtttgtcatgcatgagttttattctcaggttctcactacggaatctagatgccctttgaagcwcttaccttaagtttggcatttcttactatgtgatctctttactctactctctgccccccactgccccaccccccagccccatgtgtgtgtcatctgtttcttttttaatatggggaaaatgggaagacagcaattgcatttaatttgattgcatcaaattaaggtaaattttagggaatctagaatgacatatgggtttttcactaatggtaattaacaccatattatagaccataagaaatgcttaaccatgagtagtcatgtgatatagtattatccagatgtga

SEQ ID NO: 490465 - DNA, 575 bp, Homo sapiens
agaaaaagcacttaaaaaccagaattcatattgatattgccaattcatatttatcattacagtattttaaaagtcttttgaatttatactttcatctaatttatcttactttgaaaatcctcgttcctaataacaggaacataattccttatttgctactctgtaatgcatatatatatatatataaaatatatattcacacactatatacatagtatcaatatcactgtagtatcaatatcactattaacaattaaactactgaataaggattacaattatagttctttttgtcccaccaaagaactgataaagtattctaaagttattgaaaaattattttacccatgtggttatgttactattttgatatacagttagggtcatttctttctttttttgcaattttaggttttgtttcttttcttaactttatattttgaaaaacatttacaggctcacaagtcaaagctatacaaaaaggcacactcagagaaactgcatttccttcatgcccttcagccccwatccctattgttaaatctgaggtaataaattttgtttctggtttatac

SEQ ID NO: 490466 - DNA, 575 bp, Homo sapiens
agaaaaagcacttaaaaaccagaattcatattgatattgccaattcatatttatcattacagtattttaaaagtcttttgaatttatactttcatctaatttatcttactttgaaaatcctcgttcctaataacaggaacataattccttatttgctactctgtaatgcatatatatatatatataaaatatatattcacacactatatacatagtatcaatatcactgtagtatcaatatcactattaacaattaaactactgaataaggattacaattatagttctttttgtcccaccaaagaactgataaagtattctaaagttattgaaaaattattttacccatgtggttatgttactattttgatatacagttagggtcatttctttctttttttgcaattttaggttttgtttcttttcttaactttatattttgaaaaacatttacaggctcacaagtcaaagctatacaaaaaggcacactcagagaaactgcatttccttcatgcccttcagcccctwtccctattgttaaatctgaggtaataaattttgtttctggtttatac

SEQ ID NO: 490467 - DNA, 529 bp, Homo sapiens
ctgggactacaggcacacaccaacatgctcagctaatgtttgtatttttttttttttttgagatggagtctcactctgttgccaggccggagtgtagtggygtgatctcggctccctgcaacctctgcctcccaggttcaagcgattctcctgcctcagcctcctgggtagctgggactgcaggcgcacaccaccgcacccagctaattttggtatttttagtagaggcagggtttcaccatattggccaggatggtctccatcacttgacctcgtgatccacccgcctagccctcccaaagtgctgggattacaggcatgagccactgcgcccggccttattttttttcagtagagacaggtatcgccatcttggccaggcttgtctcaaactcctgacctcaggtgatccacctgcctcggcctcccaaagtgctgggataacagacatgaaccactgcgcccagccagcaattatacatttttaagtgtacttttgtgtctttgtggattgcctaactagctttct

SEQ ID NO: 490468 - DNA, 458 bp, Homo sapiens
tgcattttccagctcttttttcctcamctccttttagcagaattaaatcttcttcaacgggtgaggctgctgaacagtacttcggggaattggaggtacatacgtctgagggtctgtttaatggacttgggtcttttctcatggcacttaagaactaggagatacgtgatttagctctgatttcaggagcccacgttccttgtactatattgtggaccctaagtccaagtcccaggctatgctattcatgcatcaggttctattctggagatggctgtggcacatgaaggccagaagagcttgaagctaaatgagccggcacacccatgaggctctgaacgggaactcctgccacaggcacaattgggagcctgggggcagggataaactgagccagcataggctggtcaacctagggagagatttcagcagtgccttgtgaagatgtacaacctgac

SEQ ID NO: 490469 - DNA, 585 bp, Homo sapiens
gctcacacttgtattcctaacacttctggacgccaaggtgggaggactgcttgatccccaagagtttgaaaccagactggacaacacagtgagaagccatctctacaaagaatagaaaaattagccggtatggtggcgcatgcttgtggtcctagctacttgggaggctgaagcccaagaggtaaaggcttcagtgagccatgttcacgccacttcactccagcctgggtgacagagtgagaccctatctcaaaataaattaataaatacatttatgaagtcagtcatttcaaattgatacaactggcagataaagacaaaaatgtgtatctataaaatatttaacaaaatttctcatgacagctcatcaatctatccagaatacaytatagtccctcaaggtataaaaaaataaggtaagctcaagctcacaaaacagtagcagtacatcttagtctgttttctgctgctataacagaattcccaccagactgggaaattgataaagaaaaagatttacaggatttggctcatggttctgaatgctgaaatgtccaaggacatggcactagcatctagacggcc

SEQ ID NO: 490470 - DNA, 585 bp, Homo sapiens
gctcacacttgtattcctaacacttctggacgccaaggtgggaggactgcttgatccccaagagtttgaaaccagactggacaacacagtgagaagccatctctacaaagaatagaaaaattagccggtatggtggcgcatgcttgtggtcctagctacttgggaggctgaagcccaagaggtaaaggcttcagtgagccatgttcacgccacttcactccagcctgggtgacagagtgagaccctatctcaaaataaattaataaatacatttatgaagtcagtcatttcaaattgatacaactggcagataaagacaaaaatgtgtatctataaaatatttaacaaaatttctcatgacagctcatcaatctatccagaatacactatagtccctcaaggtataaaaaaataaggtaagctcaagctcacaaaayagtagcagtacatcttagtctgttttctgctgctataacagaattcccaccagactgggaaattgataaagaaaaagatttacaggatttggctcatggttctgaatgctgaaatgtccaaggacatggcactagcatctagacggcc

SEQ ID NO: 490471 - DNA, 564 bp, Homo sapiens
ggccgtgcgggcccaccttgaacaaggtgagccactgttctggctgtgcttcaggcatctctaccctgtgcttctccgccttctgcattcaactaccaatgcatacgtctgcatctccatccctagtgtgcacttcctgagatctgcgcccttgtcacctgcatcttccatgccatgtgtccgtatcctctcgctctactaacatctcgcttgcccatccttmctgcacactccatggcgttccgcagtctccctgaggcagcggagctctatgcagcccctggggcccctctggtcacaccctccaccgcagtgttttggaccaggtgtcctgaaagtcctcaccatccctggagaatccacgtccctatcttgctgtatcttctttatggtccctgaaccagcacggggagctttctgaacgccccgtacaaatctcaaatctctgaatgccagtagccaaccactaagtgaccttcgtggctaccagctcctaagtcctcacctccttccccagtgctgtgcctgtggctgtggtgcagtgctgcggagccacctgcgggt

SEQ ID NO: 490472 - DNA, 487 bp, Homo sapiens
tcttcagccttccagcattaacaagttacccagaggcatccatatcaactctctacactcatctcttttttgggaaggttgcttccctcccctcttcctgactgctactgctgcacagcccaaaaaactatagctgaggctcccaggcagagggagagatgagcctcaggcatcccaagaggaatgcactttcccagagaaaagaataaataatggttggtgggaatcatacagtcaatgttgcatttcaggtacactgtggcacaagcaggcatttgtggaayaccactgtttataaaattgttcctgtgggaaaatgtcttctgatcccagataaatgatttagaaataaattttcggaacacggccagttttgctgatggggacatcccatatctgacaggaaggaaagatagaataatactacatagtctggtaaactgctgggcttgaacatattgtagggcagacatcaggagttcagaaa

SEQ ID NO: 490473 - DNA, 506 bp, Homo sapiens
ttaaggccacatcataccttgtattataaagaacaattgggagatgaaaggcacaacttctgggacattaaaagaagrtgaagtatattttaagttgctatttctaaagtatagcaaaacgacagttcctccagaacttttattaatgtagccagggaaaatttatcagagaggataggtccatgaggtgagagctgaacggcaattgccccttggaatttaagttaaattcacctctctagcagatgttttgatttaaaatagttaccttttgttcagcttaactctcagctcccaaatctttctgctttcaattcttcaaggaaggcacccctgaatacaatgcaagggagggagtttaatccagaattcttgaaaacagcttgatattttcaactaaatccagtagcggaatgcagacttaactggccccacccaatttctcccacccagatatttttcctttttgtccagcaaagtttcctctgttccaaaggaagaaaagg

SEQ ID NO: 490474 - DNA, 506 bp, Homo sapiens
ttaaggccacatcataccttgtattataaagaacaattgggagatgaaaggcacaacttctgggacattaaaagaagatgaagtatattttaagttgctatttctaaagtatagcaaaacgacagttcctccagaacttttattaatgtagccagggaaaatttatcagagaggataggtccatgaggtgagagctgaacggcaattgccccttggaatttaagttaaattcacctctctagcagatgttttgatttaaaatagttaccttttgttcagcttaactctcagctcccaaatctttctgctttcaattcttcaaggaaggcacccctgaatacaatgcragggagggagtttaatccagaattcttgaaaacagcttgatattttcaactaaatccagtagcggaatgcagacttaactggccccacccaatttctcccacccagatatttttcctttttgtccagcaaagtttcctctgttccaaaggaagaaaagg

SEQ ID NO: 490475 - DNA, 506 bp, Homo sapiens
ttaaggccacatcataccttgtattataaagaacaattgggagatgaaaggcacaacttctgggacattaaaagaagatgaagtatattttaagttgctatttctaaagtatagcaaaacgacagttcctccagaacttttattaatgtagccagggaaaatttatcagagaggataggtccatgaggtgagagctgaacggcaattgccccttggaatttaagttaaattcacctctctagcagatgttttgatttaaaatagttaccttttgttcagcttaactctcagctcccaaatctttctgctttcaattcttcaaggaaggcacccctgaatacaatgcaagggagggagtttaatccagaattcttgaaaacagcttgatattttcaactaaatccagtagcggaatgcagrcttaactggccccacccaatttctcccacccagatatttttcctttttgtccagcaaagtttcctctgttccaaaggaagaaaagg

SEQ ID NO: 490476 - DNA, 506 bp, Homo sapiens
ttaaggccacatcataccttgtattataaagaacaattgggagatgaaaggcacaacttctgggacattaaaagaagatgaagtatattttaagttgctatttctaaagtatagcaaaacgacagttcctccagaacttttattaatgtagccagggaaaatttatcagagaggataggtccatgaggtgagagctgaacggcaattgccccttggaatttaagttaaattcacctctctagcagatgttttgatttaaaatagttaccttttgttcagcttaactctcagctcccaaatctttctgctttcaattcttcaaggaaggcacccctgaatacaatgcaagggagggagtttaatccagaattcttgaaaacagcttgatattttcaactaaatccagtagcggaatgcagacttaactggccccacccaatttctcccacccagatatttttcctttttgtccagcaaagtttcmtctgttccaaaggaagaaaagg

SEQ ID NO: 490477 - DNA, 527 bp, Homo sapiens
tggaagaacgtttttgatgyactacgtttgcagtcgaggttatttgaaatgaactgggctaaaacccttagaaggagatatgtggacgacagagtctcaggacagctcggatgcagtgaataaatgccagtcctaagcacatgcaagccagcatggcacaaagccttcaattagcttgcaaaatagtctttgaaaaggtctgtttctgaagaataaaatgtgtaaaaattcgctttattttaatctgtggttataacaccgggtaaaagtacaagttttaaattatttatcatttcaaagtaaaactgcatctggcaatcagactcaatactaattaaataaaaataacagggtatttttatttgaaaagcttttatgggtaaggaaagtcaatggactttctcttctctgtagtataccccatcccccacactgtctgcaggggtcaggtgtacaaaggctgtgggtcatctctaataagtatgaacccatacggggtacatgttatgtttgaggatacaaaagta

SEQ ID NO: 490478 - DNA, 627 bp, Homo sapiens
gcacataactcccttgttaagtctctgtctattccttgtatggcaaataggaacagccaagatataccagtccaatccattttcccttaaacactcaacaggtttcttgcaccaggattcttatttccacttctgcacttttgccggtgtcattccttcacctagacaggctccgtttccctcttcattgccatcattacctcctccatggctcacctccaccaagaaactttytctgactagttccattgcaggataatgactacctttccttctcttggcatgattgtttagctctggctatgctgctatgctatttcttgtttggctagtgataatggttaataataataatagctatcatttatgaaaaactatcatttatgaaaaactactatgtgctaggtacctgactaggctatttatgaagctcaataatcttcccaacaatcacacaggctatgtagatattatgcctgttttatatataaggcaactatggcttaaagagaaatcatttgctcagggccacacagcttgcaaatggcagagctaggatttgaaccaacagaatgcaggtaccatccatagtgccttgtggacatgtttagtcagttcatgaatgcc

SEQ ID NO: 490479 - DNA, 597 bp, Homo sapiens
cctctcggagctcggctgcccacagaagctctggcgcaatggtgggtcattgagttacattttccagtgtggagtgataattgcaagatttactgagcagagaaatatgacccatcaaattcagtctaaaaataatttttgctctgaaaaagaaaatcgaattaccttgctcttcactatgaaaaattggcttcatctgggtcaagagacatggaacctttctttgaagtagaccctacattccaaaatatcactggcaaactctggggcctgcttctgattaaataattgacataaacctccgccraataaacactgaacccttcaaaaacagagaagtaaatgaaaaataaaaatgcatctatgctttaagtagaagatcttctgcaataatttgttaccagaaagcaatttacttttccttttgtaaaccagcattaaaacctaagaagaaagcacactgggtgaaactctagttgaaacttcgaaatagtcttaaatctattctacatattatcagatttaatgttgaccttaagagagtgcttccatatttatggtttgctatcttatccctcaaaactaaatttattactc

SEQ ID NO: 490480 - DNA, 441 bp, Homo sapiens
taaatttattagtgttagtcatttgcaattggtggcaatctctattttattttttccctttccaaatgaaaataatgggccttttcaagaaagtataacaaaatcttgcatatcagtatgcaacagtaatagttaatgtcctaaaaaattgctcagactttttcctggmgcaagaagtaaacaggaaaggcaactggcattagaagatgcctcgctgtctgcatgaaagcaggatcggcaagagatgatgaagtgctttcgttgcggtgtcacaaagggatggggctgcccacaagagcttcttccagtgtcagttcagtgaactttgggaaacttccctccctgactccatgacagcgcctccttgaagtgcagtaatgaaagcatttcccctgatttcctctcttttctggcttgtggcagcaaagaagaaagaccgta

SEQ ID NO: 490481 - DNA, 441 bp, Homo sapiens
taaatttattagtgttagtcatttgcaattggtggcaatctctattttattttttccctttccaaatgaaaataatgggccttttcaagaaagtataacaaaatcttgcatatcagtatgcaacagtaatagttaatgtcctaaaaaattgctcagactttttcctggagcaagaagtaaacaggaaaggcaactggcattagaagatgcctcgctgtctgcatgaaagcaggatcggcaagagatgatgaagtgctttcgttgcggtgtcacaaagggatggggctgcccacaagagcttcttccagtgtcagttcagtgaactttgggaaacttccctccctgactccaygacagcgcctccttgaagtgcagtaatgaaagcatttcccctgatttcctctcttttctggcttgtggcagcaaagaagaaagaccgta

SEQ ID NO: 490482 - DNA, 369 bp, Homo sapiens
aacattgagtgatggaggaaaaataactgtgggttagttctcacaaggaggcaataagtcttaggaaattgatgggatggggagagagcccgaggatgtcaagaagagggatataagaaatggacatgtgaaggcactaaagactaattttggtatttgtgctttttctgaggttagacttgtagtgccatctttccatgtcaagggtaacacacctgttttacacttactgcatgctgaagagaggaaggtgattcctgtrgttttgtggtcatagttcatgtaacttcccgtcccccgcaccccccgtatagtagtttgttcttaccaagtttttcaaatgttttacagttgttaggctacggctaa

SEQ ID NO: 490483 - DNA, 627 bp, Homo sapiens
cttatgtttattgtggggactagtaataatataatgtgtccagaatagtgccttgcatatttagttgttcagtaaatcacagctgtggtttttatggcgattattaatattataagtatgcctatattatcactgagaatacaatgaaaaaaataaaagataaagtatggcttattaaaatctttcccccccttttggactaatcagttttcattatcaaaggggtgtagcagtattgttggtgaaagtaaagcactgtattatttttaaaagccaattagaagtaaatttacaggaattacaacaaaagtataggttaactagagataaatttcttttgtataaagaagtgcctggaaaatggtttagaatgtcaaatttctgactccttgagaaaattgttttatttctctgcacttcagtttttcatgtgataagaaggcctctragatctatccctttcaacccaacattctggagttctatgaaacactctagagagaatcaccatcactagcttatagtctggaaacagagacaaataaacagccattctataccttgactcatgtgatcttacaggagtacagcatgtttcagggttgattaggagcctggaagagaaca

SEQ ID NO: 490484 - DNA, 622 bp, Homo sapiens
ttaaaacgaatatatttgcacatatgtttttcagaatagctgcatattcagcaatacttgattttagatgccttgaagaaagatgctctctcttttgtcactgtgtcaactgcttaatagtcatgagcacaccaacttgcaattttcaagtcttcctggtgtaataatagtctctgcatttgcatagtatcttctaccagagaattttccagtgccttagaaacaaacaggtactatgtcattatccttgtgctacagatgggagatttcaatgcaaagggagtaagaatagtgcatcaattgtagcactgggaacagatcccagacatcctacttctcctttcatgtactcatgctactacttctgtactctgaagtgtgtgaagaaagtggctgaatgtatgatactctgtaatacatggattgcctaatagaaatgacagtggtgtctcttggaattaygtgtactgtaaatgagtttagctgtcatgaaataatttgtgtatgatggagacaaaaaattagaaagttaccttttggaaattctcctcatttgactccccttgtaggcaatggaaaagtaatatgtggagcttcctaaatatctttatctattgttgag

SEQ ID NO: 490485 - DNA, 599 bp, Homo sapiens
tctatgtgaaatttggttaaaataaacaagggcaaccttgaagttataaataggtatagacttcttgataaataaaatgatttaatttgatctccaaaaacctagtgtgagaggtgtgtcagatattattctcagattttatacaaggacattgtaactcaataagagtcagtgatttttgcaggtgtcatagtaagtagccaagtctcacattctacttctgggcactttcaactttacttgatgttaacagtgagaatgggtaaggaggaggggtggggatgaatagggattactgttacaggggtatcaacctaaatgccttaagtggcagactactatttatctatccattatccattttcccttcttctttactaagagaatctaaatttggytcacaaaagcaatgggctcagctaataatatacactttcaagattcctttgcataggtggggtgatgatgctataagttctaagcagtgagataaaaatggaagtcatagtatcagccttctttgaaagttccttcaaaaaagaatggggaaaacttagccgatacatatcttttgcattttccttttactttttaacctg

SEQ ID NO: 490486 - DNA, 605 bp, Homo sapiens
tattgagctactcctgaccttttaagatacaattttacttatttttagacaggtgcctcaaagacttaaaacacaaatgcattatgaattctactactaacagcaatactcttacaatttttctatattttaatcgattctaaggtctaagtctgaacctctgtaaataaggaaagaaatctgtgctttggaacacatatctcctgttttacattcattagtatttgggttttccatccagtctataagaattccaagaagtgaaactacccaattcctctacaaaccggttacaatgtagctatatagaataygctattgcttgcttacccatcacctgtgcctctttttttttctgacagaatcgtaattctgttcaagtgtttacttgtctttgaagtaacttaggagaagttgatcccagtcactccaaggggtgtatgctgattagtctgcctattgacacatggcattcccctagtaacaatggctgatctgagaatgggcagatctaagaagggttcaatccttctgaaggaatggctctagttctaactctttctctttctatctctttttctctctcccactctatgtgagtaggc

SEQ ID NO: 490487 - DNA, 599 bp, Homo sapiens
ctgagtcctagaaactgtggacattttctcaattgtttgcagatggcagaagctcaggtagctactgtgttcatattcatggtcatacaaaccaatgaggcatataatcaatttaaatttaaaatgtaagggtaaggaaggctatcattctagtgattaatatagccgcacgataggagagaaacaaactgccacacttttcactagggaagatatttcatgtattcagaaagtttaattatgtccatgtttctaaataattaacggggagtataatttcttttctgctcaaaccccaatctgtacattatagttactactgaaaggacaagtcttaaaaaaaaaaaaaaaaaaaaaaaaaaagcctctcagccccattactacataggtgccgagggccaaaaaacaaacaaataaacacacacacacacacacacacacatccaggaaraaagagaacaaatagttaatagaagccattttcaaggcaatatgtaactggggacagacatttgcaaagcaatctggaggagccagaaatcaaatgataaaagttctgcacttaaaatgaacttggggcaaatgcagacatgaaaacc

SEQ ID NO: 490488 - DNA, 599 bp, Homo sapiens
ctgagtcctagaaactgtggacattttctcaattgtttgcagatggcagaagctcaggtagctactgtgttcatattcatggtcatacaaaccaatgaggcatataatcaatttaaatttaaaatgtaagggtaaggaaggctatcattctagtgattaatatagccgcacgataggagagaaacaaactgccacacttttcactagggaagatatttcatgtattcagaaagtttaattatgtccatgtttctaaataattaacggggagtataatttcttttctgctcaaaccccaatctgtacattatagttactactgaaaggacaagtcttaaaaaaaaaaaaaaaaaaaaaaaaaaagcctctcagccccattactacataggtgccgagggccaaaaaacaaacaaataaacacacacacacacacacacacacatccaggaaaaaagagaacaaatagttaatagaagccattttcaaggcaatatgtaactggkgacagacatttgcaaagcaatctggaggagccagaaatcaaatgataaaagttctgcacttaaaatgaacttggggcaaatgcagacatgaaaacc

SEQ ID NO: 490489 - DNA, 493 bp, Homo sapiens
ctcccttatattttatttatcttaatctctcgtagtatatttcaaatgattcaaatctatctttcaattcagatctgtgtactacttaagtcaccagtggtaattcagtaattaagatctgtctactatttaagtcacctgtagaggctatgtttacttgtttatttgtttcagagactgtatttttttgctaggccaaggtggcctacttatctttttataatgtcctatagcagtgacaaatatcattacaaaatccaattttagaaaaatactaatctaatgtggggtagtttttttggcaaaatacattaaatggcactaattacacagtaaatatgaggtaacatgaaatcacaccmctatctgatttacagcaacatggacttggttgtacctttcaggatgagcacatttccaaaaaatgagattaccagtgaaatctaattaggaagaaagctttaaaataatactacatcagagcgtcttgcag

SEQ ID NO: 490490 - DNA, 638 bp, Homo sapiens
ctgtgttccattgttaggctgtgcccacctgggacagaagacagaaattaaaataagttcaattttaaaaaaatgcatatcttaggaaaatgtttaatattatttgctcttaagagaagttttatttatgagctattaatttcccattgtgaataagttgtaatataaattcaggaacccaacttttcagtcagttaaaactttaaaacctaatgagttgaaacaattgattctgctctttctcctagagggggtggaaaaaaaaatcaggatcttacgaagaaaatttattttgtttaawtaaaggcacattaattaagatgctgtttaattcaataatggtgcctttaaaatgcatttttcatctttattctttaaggacaaataaagcagttataaatcagacattcctttaatgtaaggtgtgactaggaaaatatatgattcataatctgagagaatgctgataaaaataaatttgcattcacaatccttagcctaaatgatattgaatgtattacagccaggactgggcataggttgaattgtgaaataggcaaattacatttgtggccccattttggtctcctctctgtggctgtcctctgcctttccgaagtctcattcgatgctatctg

SEQ ID NO: 490491 - DNA, 638 bp, Homo sapiens
ctgtgttccattgttaggctgtgcccacctgggacagaagacagaaattaaaataagttcaattttaaaaaaatgcatatcttaggaaaatgtttaatattatttgctcttaagagaagttttatttatgagctattaatttcccattgtgaataagttgtaatataaattcaggaacccaacttttcagtcagttaaaactttaaaacctaatgagttgaaacaattgattctgctctttctcctagagggggtggaaaaaaaaatcaggatcttacgaagaaaatttattttgtttaattaaaggcacattaattaagatgctgtttaattcaataatrgtgcctttaaaatgcatttttcatctttattctttaaggacaaataaagcagttataaatcagacattcctttaatgtaaggtgtgactaggaaaatatatgattcataatctgagagaatgctgataaaaataaatttgcattcacaatccttagcctaaatgatattgaatgtattacagccaggactgggcataggttgaattgtgaaataggcaaattacatttgtggccccattttggtctcctctctgtggctgtcctctgcctttccgaagtctcattcgatgctatctg

SEQ ID NO: 490492 - DNA, 507 bp, Homo sapiens
ttttattacactatattaattttactctgtaagttggaccaactatgctcataagaactgaaatggagaaaaattcctctttgaaaatttccattatactcagttgcaattcttagccactaattatatgataatacataatatcatgacatttgagacctaaatgaatcttgagatatagccacaccaatgcaaggaaagctagtaccagtgaattccgactctgtaccaagcaccataataaggaccttatatacaaacatttcaattattaaccttcatgacaaccatgtatattatatacaaatccttcaagaaatatgtgtgcttgtccttttcagttatcaaaacaacatacaaagaaataagacattaaaggtaatattttttatttagaaatatccttctgcttggctgcagaagtaggtttwacagtagtccacagtcaagacaactcatatctaatgccaaaatttactggccttatctcccctactaaattgatgt

SEQ ID NO: 490493 - DNA, 507 bp, Homo sapiens
ttttattacactatattaattttactctgtaagttggaccaactatgctcataagaactgaaatggagaaaaattcctctttgaaaatttccattatactcagttgcaattcttagccactaattatatgataatacataatatcatgacatttgagacctaaatgaatcttgagatatagccacaccaatgcaaggaaagctagtaccagtgaattccgactctgtaccaagcaccataataaggaccttatatacaaacatttcaattattaaccttcatgacaaccatgtatattatatacaaatccttcaagaaatatgtgtgcttgtccttttcagttatcaaaacaacatacaaagaaataagacattaaaggtaatattttttatttagaaatatccttctgcttggctgcagaagtaggttttacagtagtccacagtcaagacaactcayatctaatgccaaaatttactggccttatctcccctactaaattgatgt

SEQ ID NO: 490494 - DNA, 625 bp, Homo sapiens
ttcccctgcatattacagcctaatgtaggaatgtcaaacattttaattcaccaaaggacaaatgaatcataaatgttacaacccagacacaggtttcactgtttatagacatactgaggtggcagagacatgacaccttcatttaaaactaggattggatttctgactgatgcagtttttgacagagaactaatgtgtttcggtgctagaaatgaaaaattttctctgtcacaggtggttgagaatggccagttacagaagcctatcttaaagctgtttcttcatccccaaagatttcttggccagttgggttctcaatcttaggactactgttttagatacattatggtacatctgggcacaatgacaaggagtgagaaaaattgtttcttagctgtcaataaagaaagttcttccttcmggggctctggtccataactctacactgagatttgcagtatctgcagctacgtgtggagtttgggtgaggaagatggattgtaccattagaagagtttaggcaggagtgcatattacaaattaagctaaaggaatttctgtgcaactatctctaggtgaagagtgatagtagctgctaggttcataatttacatcctttatttgg

SEQ ID NO: 490495 - DNA, 648 bp, Homo sapiens
cgggcgtggtggttcacgcctgtaatcctggcactttgggaggccgaggcaggtggatcctgaggtcaggagattgagaccatcctggctaatatggtgaaacccagtctctactaaaaatacaaaaaattagccaggtgtggtggtgggtgcctatagtcccagctactcaggaggctgaggcaggggaatcactgaaacccaggaggcagaggttgcagtgagccaagatcgtgccactgcactcgagcctgggcaatagagtgaggttccgtctcaaaaaaaaaaamaaaaaaagattacatatgataatagtaagaaaatgaacttctgccatgtgctgagttttagcttttaataataaaaatttaaactactttgccatatgctgtatattgtttttaagattataagttgactatatcatgttactttcgcaattaaaaaaactgttaagtaatatacagttgtgtgaaggttgcttagctagtaaatacatgagctgagagagggaacatcgaactcaatattacacagcactgagtataaccaaaagctcatattttaaaatagcatttattgagtgcttaataagtgcgagggaggggtgtgttttaagcatttgcatttttaacaactctttaaaaa

SEQ ID NO: 490496 - DNA, 599 bp, Homo sapiens
agaggcatttggtataccaggttacacatgtgaatcaattatggtaggaatgaagagaagtgacaaggactgagatacccatggaggtaaaataaagagaataggtgaacatattgggtgaagaagaagaaaggacaaagggtggatttgaataggggtggcctaaccagaattatgtttaatacttaagacattgaaaacagaatattcactaagcaggtattgctactcttcctatctatttaggtcagttatttatatttcagttagggattctcattaaagtgccttattgaggcatgtgcttaagagaagataagtgagagaaacagaataaaggcaggagaagaaaaataagcatgcctgtgttctcaattgaattctaccttagccttgatgcacagggaaatctgggacacaaattagaccgctgatttggtctcaacttgaagcaaggggtcaatagtttgtacctctrtatcattccatcaatgtttgctggctggtgagcagttatctaacctctggatgaggaagcttgcattaaactgagagaatcctccagacaagagggcatctttgcaccattagtaatcaac

SEQ ID NO: 490497 - DNA, 657 bp, Homo sapiens
taatcaagttcaatgtcaccagtaataagtaataagacaattgatatcatgtgctccttaatgtgattcaatgagaagggcatatcatctccatggcgttcttccccaaaatccacaaacccagtcagatgttcagatgatcccaaatgagaaacactctgcaaaatacctgacctacttttcaagtgtcaagatcatggaaatgatgaactgtcacagagcggaggagaataaggaatmatgaaaattaaatgtgatgtggggtctcacactgaatttcaaaaaagcacaaactagtaaaaatctactagtgaagaaaagtagtgaaattcaattaaagtttgtagtttagctgatagcattgtacctatgttaattacttagttttgagaatggtattatgtatgtaagatgctaatactagaggaagttaatatgaaatatgcataaaaactttctgtactatttttgcaactccagtataagtctaaaattatgtcaagatatataggttttaaaaaaatgccatgcgagcataaatagatgcttcagtgaatcatcagagtgctaaatatattctgtgatgtatcctttatatggcagtgatcctaccctctcttaaatgtctgggtcaattgcccctgacagtctgctggt

SEQ ID NO: 490498 - DNA, 546 bp, Homo sapiens
ggacagggatctcctcaggccacacagcaaggtcacatgtggcgaaggtcactaaaactcagaggagtgccttctacagtgtccaggctggggacgctggcacacaccctatttgacacataacacccgcctccctggagtcagcccctgtcctctcagagacagcattgacccacctttgttcatctggggaatgagccagggtgatcttctcccagtccccggggcacaggtcactgaggtatgggataaggaacagaaaacagaaraacttttgttccacaaaaggggactggggacaggaagcacaggggtccttcctctccggagctccaggctgtgtctgagtggtacccccagccccatgcaggccaggctagctcttgcctgggccttttcctgaccagttggttggaggcctggctcccacagggcccaccacctggggtctgaatctcagctttgccactgaatagctctgtgactccagccaggttgtttcacatacccgaggcctattttaccagaaacactaagattttataa

SEQ ID NO: 490499 - DNA, 577 bp, Homo sapiens
tccagtggctggaggtcctggggatctctggggacattagtcttggtctctgggcccacacaccgggcatcctcccaggatggttagatgccattaggctcggtctatgcagtaagagccacagccaggacccaggtcctgctgagccaagtgaggagctgtggccactggggatcctgaaagagccccaggccacatgtatctgtcctgggagcctgccccaggattgacccccacagccctttttggcaagggagaggcctccattgtgctccgtttccttctaggtgcgcatgttcctcctcaaccattcctccccacccactccatggctgtgttctcagtttaccccaggtcatgtcaagtgagatcagccctttaccctcgggattctgaaatagggccagggaaaggccaggtatttctgaactatctaggcactccctggggccagatgctttcagatrccaataaaaacactgtgtcctttttgtgttcagtgaaggcccctccttgacctgctctgggcaggagtgactaggaatggtcaactggttttagaccctggagaaggtta

SEQ ID NO: 490500 - DNA, 634 bp, Homo sapiens
gatgaacagagctttgttacttgmcaaagccagcctcactttttgtctcatcaaatttctacaatcccccttcaagataggcctttgtcaggtgtggaaactggggctcagagacattaaggaacttgtcctaagacacacagcaagttcataaaggaactgacaaattgaagagcttttttcttggcagaaggaaaagccaatagagccatttttcttccaaaggctccaaattggataatttaatctcagttttggctaaagatgggaagatccctacaagatttgacgttgggtagctgttttattcccctgcctgtgacttatttctgttgggaaataagaacctcagcttctctgatgatcacggctctgcgtcacgcaaacactggtaagctgtgaaaagaattcattgatgaattcatgcaacactctctccctgggtgaatgaaacccagagactgacacgagggtgttattgtcaggttagcgcgaagggaaaatccgcaagtcttccttcccttgctgttccttttcctgtctggacaacacacgtgcctgcgttgctttttgtggttttctccacatgccgagcccaggcaccccacgtagatgtgtttgcagaaaggcaaca

SEQ ID NO: 490501 - DNA, 581 bp, Homo sapiens
aacaggtggcccagcgtcctgcatttgtctgagacctggctcctggcttctctcctgtgtgcccacttcactccgggaagagctagagcatcccccattcccctctgcctgcctgccctatccccacatcttcaatcccccagggccgggaaacacagtagtcaatgtctgactgttatccttgcaaggmaagggaggaagaagtgaacagttatgtactgaccgctcatgtgccaggccctacatagcaatagttattatattgaaagaataatatatgatataacatgtcctagatgagcctgtcatataaggggggagtcctggctggggctcaaggggcctaggcctgagttctggtcctgccactaacagcacgtggcctgacttccctgaacctatttccccatttgccaaatggcctaggtgatctcttacgtccctcccaaccctggtagtccagggttgggccagacagaaccctcctgagtaaacagcctggccatttgcctgtctccccaggtcccagtttcatggattgtttagaacattccctggaatctaagccacggacgcgcctg

SEQ ID NO: 490502 - DNA, 387 bp, Homo sapiens
ctaggagggaaagggcacagttctgagccaggggagcgctgggtactcctgccagcacagcctcattcccasccctaccccagcagaaaagggtgcagggagcttccggctttccttggtgcatttagtgtcagacaggataaagcaggtggtatttggaacccagggagagggtgagacacagaattccacactggggctatgcaagggtcaggagaggggaaaggcgggccccagggagagtttcccttttgcaggtgaacacaggaaacttacttttacctcctaaatgcctactgtgcagtggacactgtgctaagttcttacattatctcctttgaaccccactatagtctatgagtcaggcatattattattcccagttga

SEQ ID NO: 490503 - DNA, 605 bp, Homo sapiens
ggcagctggtagagtgtgaagtgtgtgtgygtgtatgtacacatacatacttatatacatatttatatgacgtggacataactgaaattagtgacataggtatgtgctgaagtcacaaaggttagatttgattattaaaagatattttgttaatagatatgcttaccagtataatcacagaaagatttatatgaagtaaaaaaccttgaatttttgactttaaaattggacatttaaaaaacctttacatccattaaattttcagtttactttttctaaaatcaattgtaagtttaaagtgtatattataggagtacttactttttataactttgtagcaacaggttagctgaagaaaaatctgtcaaatttggcaatggttcagaaaatatgtgaacctgtcactgtaagcagtctcaaagggagaaatgcattacaggagctaattaaccttagaaaataattacacaaatatgcaaatgttgtttagataattccatgtgctgtcagctcaggtagtccatcataaatgcagaccttgcaatgcctaggtagtagaatctggcatagttgataaggctttggttactgcatcacttctgttt

SEQ ID NO: 490504 - DNA, 398 bp, Homo sapiens
gagtaacagggattttgaaagaacatttttttttctttttttgagagtctcgctctgtcrccaggctggagtgcagtggcacaatctcagctcactgcgacctctgcatcctgggttcaagcaattctcctgcctcagcctcctgagtagctgtaactacaggtgtgcgccaccaggcccagctaatttttgtatttttaatagagatggggtttctccatgttggtcaggctggtcttgaactcccgaccctcaggtgatccacctgccttggcctcccaaatcccatgcctgggattacaggtgtgagctaccgagcctggccaaaggaatactttcaaagtgttgtttgttgaaggcaaaaaacaaggtgtcatgtctatatattcatgcttgta

SEQ ID NO: 490505 - DNA, 461 bp, Homo sapiens
aagtactcagatactactagttaacttactcccacaccccagcctttcagtgactcaattctaatttattcgtcataactgtaacagatggaacttcctgctctgttatcgaatgattaatgcttaaaccttgttagttcattattctgttacaaactcccttaagaaagataacctattaaattaaaccgtttacttatctctcattcctttcttgaaaatatattttatattaacagaaagttgaaagaaaacatcttrttgctgtaggaggtagttgggggatgagaatcctattaaacaaagaagttaaaaagaagcctaggccaggtgccgtggctcacgtctgtaatcccagcactttgggaggccaaggcaggccgatcacctgaggtcaggagttcgagaccagcctgaccaacatggagaaacaccgtctctaccagaaatacaaaattagc

SEQ ID NO: 490506 - DNA, 635 bp, Homo sapiens
ataatgtcaacaaaatcactaatattaacagttttatgtggaaagattaggttatattcaaatgataacagtgagttctttaaaaaawttttttctctcaacagagtgacacacactgtataatcaggagctcaaagtcagaaatttagattaaatctatctcctcataattgatattccctcttcctgcctctgtctaaacactgagagaggctaactccaaaaataattagataacaaacactaaaaaacacttaacaaaataagatatgcatcatatttactatgtctcaagtagaccaaaaatttaagaataatttttaaaaacatgtagggaattttggctgggagaaatgagttctccataaaataatagtcaatcgcttttaaggctggaatgtcctcattcaatgtacctcatagacatatccttgtaggcacagcagatgttctgagaccaaaaggggaaattatctaattattttaagaaaagggaagttgtggtaggcataataatggcctacccataataacagctctgctgaaaagtccacatcctaattcctggaacctatgaatgtattatgttgcatggcaatggaactaaagttacaaaagcaattaatgttgctaac

SEQ ID NO: 490507 - DNA, 648 bp, Homo sapiens
tgtaacagtcacggggaaggtctgcagcttcactcatgaagccagtaagaccacraacccaccagaaggaagaaactcctaacacatctgaacatcagaaggaacaaactccagacacgccacctttaagaactgtaacactcaccatgagggtctgtggcttcattcttgaagtcagtgagaccaagaactcaccaagtccagacacacgaggatgtagataggggcaagaacaaatgaggagagactatcctttttaaatttacaatcttatacattgatttaaaaactctttacaattctaaatattaagttaaaaaatttttaaacttattttaaattctgcttttcttctaaaatgtcctaatgtacagaagtaaagcttagaagccaagccaattacaaaattaagaagccacaaagatccatgtcattctaaaatatgcaatgtataggaatacattagactctcttctccttgtgaaaaaaagtctcctgatacgacaatgcttatttttgtcaaaccttatttaaaacaatgcagaatcttcacctaaaagccaatcataaattaaacagtacttccatgtttctgtaccagaaccatcccgaaaagcaggtcctggcctgagcttgctcactagtgct

SEQ ID NO: 490508 - DNA, 648 bp, Homo sapiens
tgtaacagtcacggggaaggtctgcagcttcactcatgaagccagtaagaccacaaacccaccagaaggaagaaactcctaacacatctgaacatcagaaggaacaaactccagacacgccacctttaagaactgtaacactcaccatgagggtctgtggcttcattcttgaagtcagtgagaccaagaactcaccaagtccagacacacgaggatgtagataggggcaagaacaratgaggagagactatcctttttaaatttacaatcttatacattgatttaaaaactctttacaattctaaatattaagttaaaaaatttttaaacttattttaaattctgcttttcttctaaaatgtcctaatgtacagaagtaaagcttagaagccaagccaattacaaaattaagaagccacaaagatccatgtcattctaaaatatgcaatgtataggaatacattagactctcttctccttgtgaaaaaaagtctcctgatacgacaatgcttatttttgtcaaaccttatttaaaacaatgcagaatcttcacctaaaagccaatcataaattaaacagtacttccatgtttctgtaccagaaccatcccgaaaagcaggtcctggcctgagcttgctcactagtgct

SEQ ID NO: 490509 - DNA, 574 bp, Homo sapiens
agtgagtagcataggttgggccacttttggagagggcttgcttcctcagaaaaaagcctgtgaagtgtctaattttaaataaaggtagtcattcatctcaaagcttccagacctttcaggaatgttattaggaatcacatgatataaccctattcctcctaagcaaaagcataagaccatgattccctatatccataaactaagaggaacaagaatggggacaaaaagtctacaaatgtgctgttgtgtctacactggcaaggctggacttyaagatctcaacatgcacactctgaaatgtaagaggctggactgcatggacctgggattagcaacagcatttgccaaatgctgtacttcaaatgccaatcagccactccaaatcagtatcactagcttctggctgggaaacatcacaaaaaattcagttgcctccaagatccaaacagtagaaactcattagtggcctattcaataatattcaaaacatgtgtactaattaacatagtctgtgatgccaagttagagatggtctaatgcacttgatgtgcggtgtactacaaactggtacctg

SEQ ID NO: 490510 - DNA, 575 bp, Homo sapiens
tgttctattaagcaatctagagtccttttactataagctgaactacatcagtgagaatagacaggaaaatgtgtccactatcacctggacactgagcagttaactcctaagtatgagtaaaacaaggtgaatatacagaacccagatccagacatgtggtggagtcattttaaagaagaaaatcctgtcttmtgggcaaggtatagacacccagaactccccagagccccagggtttttcttttgttaggagaaaagtatgtttctggtttaatctctctaattaaatagcaactccttccccagctctggaggtggttacatccaaaagcaataaaacccaggattccttcacttcaagcatccccctagttatctgtcttctaggtcacatatcacaggagagaaccttagggatgaatttttaaaaggcaacgaggctttttcctgtgaagatgacagatgtgttatgtattacattggacaatgacataagaatttccagcatgaaagactcctcctatcccatcgtaccctcttgaaattatcaaagattttaagaatattcatgtccaa

SEQ ID NO: 490511 - DNA, 540 bp, Homo sapiens
gtcattgagcagaatttagaggataaatgaaggaaacagaagtttaaaggtctaatatggactgtttcttatttctaatctctatgagaaaatcgattgttaaagtaagacatgattttagtgtgaacaccaaatccagtgggctgtcagaatggaatggcttcattgttaacgtctccctgacattactaaaagagtcttttctttttttttctgaactgaaaaagttttaagggcatgcctaatagggtttctaatattcctaataatgtgacttgtagttaagtaacaggttttctaagaatttcaaaggtgttttctcatagcagcctcactggagcccaaagtttagaagagtgtatctctaagagatwggcattgaatagattttatctaacgtagtggattataactgatgtgtggaaactctaccaatattttattaattatggtagcctgaaataaaacgtgcatagaaaatacaaaataaaatgaggctttggggctcttaatttacaacatcagaagtttaagaaaact

SEQ ID NO: 490512 - DNA, 540 bp, Homo sapiens
gtcattgagcagaatttagaggataaatgaaggaaacagaagtttaaaggtctaatatggactgtttcttatttctaatctctatgagaaaatcgattgttaaagtaagacatgattttagtgtgaacaccaaatccagtgggctgtcagaatggaatggcttcattgttaacgtctccctgacattactaaaagagtcttttctttttttttctgaactgaaaaagttttaagggcatgcctaatagggtttctaatattcctaataatgtgacttgtagttaagtaacaggttttctaagaatttcaaaggtgttttctcatagcagcctcactggagcccaaagtttagaagagtgtatctctaagagatargcattgaatagattttatctaacgtagtggattataactgatgtgtggaaactctaccaatattttattaattatggtagcctgaaataaaacgtgcatagaaaatacaaaataaaatgaggctttggggctcttaatttacaacatcagaagtttaagaaaact

SEQ ID NO: 490513 - DNA, 352 bp, Homo sapiens
gggcctcggcgagccgcgaaaccttagcgctttggcattggaatcccgggcgagggkgggcgtgaaaggggacactgcagtctagctgcgcgcgtgagggcaggaagggatcccctgcgcgtccatccttcctgcccgctggcctcgcaaatctcagctagcgccgcttccaggcgctgccaagggaagcgcagtgctagcaaagcgttgcaaaggcgcaggaagcgcgagcccccagagacttcaccggtgctcgcatttcggggtatcttgcttctggtcccacatttcgccccttgtccccctaccccgcacccttccggagcagagttggcagtgtcttcacggaggc

SEQ ID NO: 490514 - DNA, 604 bp, Homo sapiens
ctgctccgtatatatttacttattggaaaaagtacctttgcagagttagtatttgggaccctttagaagtaaaagcgaaacttctaaaaagatcatggtcccaagtaactacctaaccaagcaggtgacctgcctctctccttctctctcttcattcccttaatggttcaatatgctgtttattgagcatcttctatatacatagcaccgttagttgcgaggaaacaatttcatccatatggctcccaagcacattctctgaaactggaaccctttcaatatgttttaaaagataattgtcagtagggtggttaggaccatgatgaaaaatcattacaggarcccaatgaaccatcatcagtgggtggaaccatttttactccctttcacttcacgtctatttccccagtctttttctccttgattggaacctgactcccccactggattcaaatagtccttgatgctgagatccagactggaatgattataaacaaggggaaggaaaatgtggatttagggtgcctccctgccaggcaccgttagttctttgcgtatggtattctgtttagtctttgtgtaacacaggtatctgctgcccccg

SEQ ID NO: 490515 - DNA, 637 bp, Homo sapiens
gcttagacttttccatctttaggagatgtataaaatggaaccctttcaattgaattatctcaggaactcgttttactgtgtcattaggaaaaataacaacggtttgggaataacataaaatatccttgtgtctgaagtatctgggtttaagtagaaattttatatcatctgggggcaactttttatttttgggattgagttctttgtctatgtaaacttactttatgtagttttaaagtaactacataaagaattttccttccatttcygtagtgtgctaggccaaaattggttctgttttatgtattattgacagttttgattgagtcctaccatacctttcagggaagattgttgaggtggttgctgtggaacgttaaggaacgaacactttccataggaccctgcttgtggtattctgatagaatcagaagttagattcttgggttacacttaaacccttccaatgaaaaggactttttattatactctgaaatgagaatgaaatattcatttgcttggaacctgttaaattcttaaatttcatataggagttacagaataaagacctattgttgactaaggctaatctgaaaatctctatcatacttctctgcaagctgtaaaagctgtgcag

SEQ ID NO: 490516 - DNA, 562 bp, Homo sapiens
acccacgggactagactccccaaacgaggtataaccctaaattttctagcccgaaagagagactttgcaagcagtcctggtgtaggtgcccaggaattgtccttctcagccctttccaatgacctctgaaattccagccccttcccgatctgagccctaactgccaagtctcacccactgtgggcttgagcytctctggcttgtccactcatggcccccgatccttcccttagccagagtcagggcccctgtgggtcggctttcctggtcctaggagagatggcgctgcctaacatgcattcattcaacaacacttcctgagcccttcatgcgctccaagccttgggcccagtgctgggaaatgaacatctccttagaacttcctcctccaatgagccttcctcctgccaaggcaggcaggacacaaggtccacgctcatggagacaaggtgggtgcctctcccagctcagacaagcaccatccctctgcgaagccttccctggccgcgtcctgccccctccagcactgtcagccccctcaggcccttgcgccctctcccag

SEQ ID NO: 490517 - DNA, 643 bp, Homo sapiens
tccagcagaattctgaactgtcagcattctgtcacatgttagagtttataaccagaaatcaaaatttatctccaagaagttctacctcctgatcaactgttttcagcaacagtcacctcttaaaatggcaacaactagtctcaggctcttacatttaaatgggtaaattttcacttgccttctttttgttgtttgtttcctgtcactgaaatgctatgaaratttcaaggtgaatggaatgaaaaaggcagaagcaagaaacatatcagagataattattttggtcctggtaattgcttgggcatagttggagaggttagatatgatggagaattgtgagggaagttcatgtttctgcccttcgagggttaataatgtggggtagatgagactcagcaaatagaaaactttaaataaaactgtatcctcaagtgctaggtaatatagaatggaccacaaataaagtgggagggaaaggagagagacatcgctgacgtataagttaattgaaggtagaggagctctcttgggctttcatgtagccatacgagcttgaaacattcgctatttttgctctgaataatgctactgaattcaccatacttgtgacatttttgtaagaattaacattaaaaattactgg

SEQ ID NO: 490518 - DNA, 587 bp, Homo sapiens
aatcaaaatttatctccaagaagttctacctcctgatcaactgttttcagcaacagtcacctcttaaaatggcaacaactagtctcaggctcttacatttaaatgggtaaattttcacttgccttctttttgttgtttgtttcctgtcactgaaatgctatgaaaatttcaaggtgaatggaatgaaaaaggcagaagcaagaaacatatcagagataattattttggtcctggtaattgcttgggcatagttggagaggttagatatgatggagaattgtgagggaagttcatgtttctgcccttcgagggttaatartgtggggtagatgagactcagcaaatagaaaactttaaataaaactgtatcctcaagtgctaggtaatatagaatggaccacaaataaagtgggagggaaaggagagagacatcgctgacgtataagttaattgaaggtagaggagctctcttgggctttcatgtagccatacgagcttgaaacattcgctatttttgctctgaataatgctactgaattcaccatacttgtgacatttttgtaagaattaacattaaaaattactgg

SEQ ID NO: 490519 - DNA, 587 bp, Homo sapiens
aatcaaaatttatctccaagaagttctacctcctgatcaactgttttcagcaacagtcacctcttaaaatggcaacaactagtctcaggctcttacatttaaatgggtaaattttcacttgccttctttttgttgtttgtttcctgtcactgaaatgctatgaaaatttcaaggtgaatggaatgaaaaaggcagaagcaagaaacatatcagagataattattttggtcctggtaattgcttgggcatagttggagaggttagatatgatggagaattgtgagggaagttcatgtttctgcccttcgagggttaataatgtggggtagatgagactcagcaaatagaaaactttaaataaaactgtatcctcaagtgctaggtaatatagaatggaccacaaataaagtgggagggaaaggagagagacatcgctgacgtataagttaattgaaggtagaggagctctcttgggctttcatgtagccatacgagcttgaaacattcrctatttttgctctgaataatgctactgaattcaccatacttgtgacatttttgtaagaattaacattaaaaattactgg

SEQ ID NO: 490520 - DNA, 337 bp, Homo sapiens
tgttttttatggacctttaagacatgttcatttctttttctaacccagaaggaaaagcagcagcatcatttctgtctttttgggggggctcaaagtacaaaggagcccttgtgcatatctgacaaattgctaatgcatatttattagtaagataataaataaattctaaagatcttcatagatcttctcattaaatttagtatccaatgcatatagtcaaacatagggttttagaatttattataaatattatgtgctaataatccatgtgtaggtactataaatgaattactttggaaaaaaagaaggagccmttataaaacgtctttatttaaaa

SEQ ID NO: 490521 - DNA, 458 bp, Homo sapiens
aaccgcattttactgcatacaaatcatatgattatacaaacctgaacaaacctgacacaaaagcaaataaaagctattggcctcaggacaacccttgaccttgacaatggcttttttacataatggttggaggctgtcccctcagctcttgacattcgctccccagggcatgagttttcctaaaggggcctgcaagccccgcctgctgcccagaggcttccccaggcacctccttcttggtgcaggagggccctggacccactagggacttaagctccttttccacagaaacacagcaatggttctgaagggggaaccgcaggtcccagtgactcatggtgaccacasgcctgcatccgaggatgacttcagccccctgtcctctccccacagtgagctgctccccacaggccccctctattgcgaatgccctgagtcaagctgcccagtcttcatcc

SEQ ID NO: 490522 - DNA, 458 bp, Homo sapiens
aaccgcattttactgcatacaaatcatatgattatacaaacctgaacaaacctgacacaaaagcaaataaaagctattggcctcaggacaacccttgaccttgacaatggcttttttacataatggttggaggctgtcccctcagctcttgacattcgctccccagggcatgagttttcctaaaggggcctgcaagccccgcctgctgcccagaggcttccccaggcacctccttcttggtgcaggagggccctggacccactagggacttaagctccttttccacagaaacacagcaatggttctgaagggggaaccgcaggtcccagtgactcatggtgaccacacgcctgcatccgaggatgacttcagccccctgtyctctccccacagtgagctgctccccacaggccccctctattgcgaatgccctgagtcaagctgcccagtcttcatcc

SEQ ID NO: 490523 - DNA, 605 bp, Homo sapiens
aacatgaacagagaggtctgactgcacagagatcacaatcaatcaattgcttgcagacacatatgaaaaccctatcagtgggctttagagtggcaaatgagttggaaaaaagtgcacaataaacatattgcacttggatctttccaaaaccacacccccaaccatggtccatggaaaaactgtcttccaggaagctggtccctggtgccaaaaaggttggggaccactgtcttacagcctattgataaayggcacactccgtcagtatcccacagtacattaatgttcatcatgacatgatgcctggagaacattaaggctcctattaacacatgaggggccctgaagacccacctcctgagctaacgtccaacaagagttcaaaagacacacctcatgcagaactcttattcaacagaatttgaagaactattttgaagaattatttttgtaactcattcaaaaaaagtgatcagaggcaaaagcagcatgcagggtcaggcacttctattagtgaatgtatctatttgatataatccacagggccagtatttgcttcagaacagagcaatcatgcacataatatcatccctataaacaaaatg

SEQ ID NO: 490524 - DNA, 601 bp, Homo sapiens
ccctgcagatgtcagacccgccaggcccccaatcggtgagctaatgccttgaaatactgtctctgtctgtacacacacatatatctctatttacacacacatatatctatttatacacacacatctctatttatacacacatacaaaccccctgctgagtctgtttctctggagaaccccagctccacagcagccttctccccacagaaaatactttcggaggattcccccgaccccaggatgtagccacctctcccctgtgtcggcttcactctgcaggtctcggcaaggagcacccctgtccacactgaacaagaagcccctggacccttccgagtggccatcacctgatccacggccacatcctccacgggaagccacggttcacgtcaatcccggcaccaaggtcccagaattcacagcttctgggctcggtcccgcaagaccacccccccatgagggccagtgcagatggacagccaggccacctgcatttcttcccagccagcgacaaactcggctgcccacaacctcctcgggtgcratttttctttggatgacacagaacttgggaaagcacttcactcaccatcactagctc

SEQ ID NO: 490525 - DNA, 511 bp, Homo sapiens
tgctttgtgtaacaaagccaaaggtgcggtgagggaattcagtttcctcattattacttctatggtttgttagcaaaaacataattagcatgaaagatatttctctgtggacatgcaaatcaatgcaaatgactaatttgccatttaagaatttgcaaattgcaatgcaaaattgtcttaggtaaataaccctagtctaattgagtgacaatattctgtgttttgttattaaggctattagctgaagatgtaggaagactgtaaaaatgccacaatttttgcttatacatgcagtgtgagttataatttmcgggagattttatgcacattgtttcacttgagccccacaattccagttgcatcctagactagctactgtaaagtagcacagggtaaatgggtggcggtgaaagcaagaatttgaacagcttgccacagtgtaacaaacgcaacagcaacagaaacatcaacagggccttccccgggggctcccaggtctttggcagcagaa

SEQ ID NO: 490526 - DNA, 511 bp, Homo sapiens
tgctttgtgtaacaaagccaaaggtgcggtgagggaattcagtttcctcattattacttctatggtttgttagcaaaaacataattagcatgaaagatatttctctgtggacatgcaaatcaatgcaaatgactaatttgccatttaagaatttgcaaattgcaatgcaaaattgtcttaggtaaataaccctagtctaattgagtgacaatattctgtgttttgttattaaggctattagctgaagatgtaggaagactgtaaaaatgccacaatttttgcttatacatgcagtgtgagttataatttacgggagattttaygcacattgtttcacttgagccccacaattccagttgcatcctagactagctactgtaaagtagcacagggtaaatgggtggcggtgaaagcaagaatttgaacagcttgccacagtgtaacaaacgcaacagcaacagaaacatcaacagggccttccccgggggctcccaggtctttggcagcagaa

SEQ ID NO: 490527 - DNA, 511 bp, Homo sapiens
tgctttgtgtaacaaagccaaaggtgcggtgagggaattcagtttcctcattattacttctatggtttgttagcaaaaacataattagcatgaaagatatttctctgtggacatgcaaatcaatgcaaatgactaatttgccatttaagaatttgcaaattgcaatgcaaaattgtcttaggtaaataaccctagtctaattgagtgacaatattctgtgttttgttattaaggctattagctgaagatgtaggaagactgtaaaaatgccacaatttttgcttatacatgcagtgtgagttataatttacgggagattttatgcacattgtttcacttgagccccacaattccagttgcatcctagactagctacygtaaagtagcacagggtaaatgggtggcggtgaaagcaagaatttgaacagcttgccacagtgtaacaaacgcaacagcaacagaaacatcaacagggccttccccgggggctcccaggtctttggcagcagaa

SEQ ID NO: 490528 - DNA, 365 bp, Homo sapiens
cttccagctactcaaccagggagggagcggggaattttatttgcagatttttggagggagggaggtagggcaggggggtgggggaggggagaggcacatacttgaagaaattaaatttatgcaaagaaagaaagaaataaggccgatgaataagtgctggccagtgccctcctgtgtatctctggggtccatgacttcgttccctttctatctcattcctgaccaagaatttaagcrgctctattaaaaatggctaaagacgcccagctaaaattttatcctaagaatgttgaaaattttttggaatgtatccacaacacttatcagctctatgctgagtgacggttagttttgtttggatgaga

SEQ ID NO: 490529 - DNA, 450 bp, Homo sapiens
aaattgctgtccaaagactttaaatgggcagtatttcttttagtttctgaatagaaaaagaggaaaaagaggatttaaaattacataaaataatattttccttgtactgctcttcttaaagaacaatatacastgtgcaactacacttgagcagtaaggtgatcttcctttagcataaatcagtttaacttttaacctgggaaaacagactgaagaagacagagagttatgtctcgccttctgagaatttcaagtcaatagtaaattggggggcacgttagtaccactgagatccaatcaggataaaattacgcagtcatgtaagaaataatatctattaggctaatttaatcaccgaatactttacagatgaattagaatttagaatccaattatttcttacattcggactgtcagagctggtatctctaagcaggaggaggggggaaa

SEQ ID NO: 490530 - DNA, 647 bp, Homo sapiens
gccacaggctcttcattggatacctactttgcagaaacccgtggcaactgagaatgatagagatgcaaagcctcctagtccctcctccccaccgggggctcaggatgtggtgggatttacagtgtagacaattactctcctatgagagggtttgtggggccctataggatcacagaggaggaatgaatggctgcacctggagggaaggcagggcctggggaggctccctgtgcaaaggtatccctctgagttgagggttgaaggctgaatagttttcagcgggggctgttgggggatgggctggccttccaggcagaggagggtaagggaygagaaacagagatatgaaggtaccgcattttcagaaacactgcatagtggctgagcacagtcagtgctcaacaaatgttgcttgaatgagcaaatgatgcttccaaaataactaagtccaggaaggaggtgaaattggctgtatataaattattgatcaatggtaaggcaatgaatgagaaatggctgattaggtaacatcattcacactcaggagagaaaacctctggagattttgtttgctgatttcacctggcatacaaaatcctgaaaaacgagtctcttggaatccacaaaggatgaagaggacaaaaatt

SEQ ID NO: 490531 - DNA, 647 bp, Homo sapiens
gccacaggctcttcattggatacctactttgcagaaacccgtggcaactgagaatgatagagatgcaaagcctcctagtccctcctccccaccgggggctcaggatgtggtgggatttacagtgtagacaattactctcctatgagagggtttgtggggccctataggatcacagaggaggaatgaatggctgcacctggagggaaggcagggcctggggaggctccctgtgcaaaggtatccctctgagttgagggttgaaggctgaatagttttcagcgggggctgttgggggatgggctggccttccaggcagaggagggtaagggacgagaaacagagatatgaaggtaccgcattttcagaaacactgyatagtggctgagcacagtcagtgctcaacaaatgttgcttgaatgagcaaatgatgcttccaaaataactaagtccaggaaggaggtgaaattggctgtatataaattattgatcaatggtaaggcaatgaatgagaaatggctgattaggtaacatcattcacactcaggagagaaaacctctggagattttgtttgctgatttcacctggcatacaaaatcctgaaaaacgagtctcttggaatccacaaaggatgaagaggacaaaaatt

SEQ ID NO: 490532 - DNA, 605 bp, Homo sapiens
gtgttatctttctttagcaacattgaactacttctaccctttatcaagcacttcataaaagctgcaccctgcgctgtgctcttggcacacggaatcttttctcatggtcacactgatgagaaaactagggcttggagggttgctccacagctggtttgtagcagacccagctctgacctcagcttaaagcccttcttgctaaccctgcagacctagccaacttctgaggaaaacaattctgtaagaagagccaggtggatctatctcaagtaaacagtgtgtgtttgtgtgtgtgtatttgcaacatttatttatttttcttataacagcaaagtacataaaatttatatcaaccctttggaaagtagacagctctgtgaataaggatacaatatttgaccttaacactatgattcagatacctccgttataataagmctttcgctttattttcttttgtttgtatacatatatctctaaatttagatatgtgttgatgttgctgtaattttttaaaaatttttcctaactcaaagtggctgattcacagtgttctggttaatttctttttctggagtttctgtttctttgttttttggtttttg

SEQ ID NO: 490533 - DNA, 605 bp, Homo sapiens
gtgttatctttctttagcaacattgaactacttctaccctttatcaagcacttcataaaagctgcaccctgcgctgtgctcttggcacacggaatcttttctcatggtcacactgatgagaaaactagggcttggagggttgctccacagctggtttgtagcagacccagctctgacctcagcttaaagcccttcttgctaaccctgcagacctagccaacttctgaggaaaacaattctgtaagaagagccaggtggatctatctcaagtaaacagtgtgtgtttgtgtgtgtgtatttgcaacatttatttatttttcttataacagcaaagtacataaaatttatatcaaccctttggaaagtagacagctctgtgaataaggatacaatatttgaccttaacactatgattcagatacctccgttataataagactttcgctktattttcttttgtttgtatacatatatctctaaatttagatatgtgttgatgttgctgtaattttttaaaaatttttcctaactcaaagtggctgattcacagtgttctggttaatttctttttctggagtttctgtttctttgttttttggtttttg

SEQ ID NO: 490534 - DNA, 618 bp, Homo sapiens
gggactgtccatctctcctgggttccagttttaattaaaggcagcttgcagtgtaacatcaccctcacagcctgctaaagcttaagactctgagattacatacaaggcacgtgagtaggggaatgggggggaaatagagtaaataggtgatttctggtacaaatggggaaagaatgagtttagggatgactcattttttcctcctcaatactatcatattcacccagaaatagcaaatttcagcattcaactcatctagactgcttgttgaaaccccaaagtgacaattatttgaaagtcatgccccttcaacatgatttttgtttaatgtgggataaggtgaagcacaatccacctcaagaccaaatacactcagaagcaagccagaatgcaaatgtttgccatcattctcatcacatcagctacaaagacacaagatggatatgatagcaggagcttctgccagacatctactcacagcagcctccctgggacaaacyccgtgtggcatcatgacacttcattgtgcatggcctcacagagggaatcctttgttgtttgggctaagactgcaaaaggctgagctgcctcgctggggtagagtcaatacacttgctg

SEQ ID NO: 490535 - DNA, 509 bp, Homo sapiens
tgcttccgttatgctcagcaaaacccccagcccttgggctggcatcttcagcctggcttttgtctgactcggattcgccagtgcagtctgacattttgaaatgctcttcctctcctctgatgtcctcaacctggatgaacatatcaatgctcaaaatcactgctatcaccctctctttctgcttcttctgcttattgtttctgttagcagcaccatcctctcggccagagggatctgaagctcaacccactcttgattcttctttcttctataatgcccaaaagccaatcattagatcctaccaccattttcactataaagtttcacggtgccactacccaaatgaattactctgtattaatcttatctttaaaatgtgttrtaaacaacccacctcttacagatgacactcagattcagtattatggagaatgcatttctctaagatggcatcaccctgttaaagaaaaccttactcactgatacttgttaaagcacagaaaagctta

SEQ ID NO: 490536 - DNA, 509 bp, Homo sapiens
tgcttccgttatgctcagcaaaacccccagcccttgggctggcatcttcagcctggcttttgtctgactcggattcgccagtgcagtctgacattttgaaatgctcttcctctcctctgatgtcctcaacctggatgaacatatcaatgctcaaaatcactgctatcaccctctctttctgcttcttctgcttattgtttctgttagcagcaccatcctctcggccagagggatctgaagctcaacccactcttgattcttctttcttctataatgcccaaaagccaatcattagatcctaccaccattttcactataaagtttcacggtgccactacccaaatgaattactctgtattaatcttatctttaaaatgtgttataaacaacccacctcttacagatgacactcagattcagtattatggagaatgcatttctctaagatggcatcaccctgttaaagaaaaccttactcamtgatacttgttaaagcacagaaaagctta

SEQ ID NO: 490537 - DNA, 589 bp, Homo sapiens
atgcacaggaaacctaatccacaatgcaatgcaacagtgttgagatgtggggcctaattagaggtgcttaggttatgagggcaaaaccctcataaactaattaatattgttattgtggaagcaggttagttatcacaagcctggtttgtttataaagccagtccagcccctgtggtgtctctctgtctcatgtactcacatttcacttctgccttccactttccaccatgggtaccctcaacagatgctggtgccacgctcttggacttcccagcccccrgaaccataagctaaataaacttttcttaataaattacccactatgtggtattctattatagcaacagaaaatggactaaggcatattttatgaagcataatttgtcaacaccactaacgatctccttattgccactggtagtgggtactttcagaaagatcttgaattatctggagcattagacgttagaacatttcttcctttttgcaacgttttgctctctactcccattttttccctccactgcttgggccacttctgagtgtaccttctgtggctgctctttttttgcccatcctttaatgttgg

SEQ ID NO: 490538 - DNA, 589 bp, Homo sapiens
atgcacaggaaacctaatccacaatgcaatgcaacagtgttgagatgtggggcctaattagaggtgcttaggttatgagggcaaaaccctcataaactaattaatattgttattgtggaagcaggttagttatcacaagcctggtttgtttataaagccagtccagcccctgtggtgtctctctgtctcatgtactcacatttcacttctgccttccactttccaccatgggtaccctcaacagatgctggtgccacgctcttggacttcccagcccccagaaccataagctaaataaacttttcttaataaattayccactatgtggtattctattatagcaacagaaaatggactaaggcatattttatgaagcataatttgtcaacaccactaacgatctccttattgccactggtagtgggtactttcagaaagatcttgaattatctggagcattagacgttagaacatttcttcctttttgcaacgttttgctctctactcccattttttccctccactgcttgggccacttctgagtgtaccttctgtggctgctctttttttgcccatcctttaatgttgg

SEQ ID NO: 490539 - DNA, 608 bp, Homo sapiens
gaaaaatgtcaaggcaattttatgcaaaaagtggtgaagtaaaggaacttaaatggaagtcaggtttctatacttctcacaaaatggtaatccatggacagcagtaggctgtaatcatttacatatgtaaatagcaataaataaaacaactgctaagaaaaatattcaaaagccatgcttaaaatcattgtaaataaatcaaaagaaaattctcaaaaatgttctagtaacagactcaagaaaaaagaaacataaggattaaacaaaggcaattgataaaatagcaaatgtatgtctaagatatcagtaattatatcttgtaaatggcctaaaacaacaattaaaaggagattgtcagagtgkatgaaataaacacaacccagccatatgctatatacaagaaactcaaggctcgaacataatgtcataagtaggttgaaagtaaaatgagggaagaagatatataatgtaaacaatcaaagaaaaaagttatgtctatattaatattacataaagaaaatttcagattaaagaaaattattagggacaaacacgacactgcctaatgataaaaatagatatatctgcctggcacggtggctcaagct

SEQ ID NO: 490540 - DNA, 413 bp, Homo sapiens
tggcaagcttctttcattgaacctccagaagtacagagatcggggaagcagacatagtgagccccacttagtggactggcaggaaggcactggctgctgctctgagatgggcagggagcactgactgctccctttacctttcctcttgcaaaataaaaaccttaaattacggggggaggaacagaaaattcccctgtccmtaggacctaaccaaggatccattctttctgatgtaagagtacacatgaaagacttctgtcttccgcgaagaacaaggaaaagtcaggcaaacttctgcaaaccaagggcatttttaaatcagattaaggaaaaagagacatgtagaaagtaacaaagatgagaattacattatcattatagtcagtggccattgccagatctcatggaatagg

SEQ ID NO: 490541 - DNA, 600 bp, Homo sapiens
taatctccaaggtcgtcacatacaatccatcgtttgaccctggaatcgccaccacaccctgtgacatggtcatctggacagtcccagtgcatcctgcctaatgcaataattgcatcattactattccccagtgagcatcctggcacactgctgtttttcacactgctgtgggtatttctgaaggataggtgtctgtggaacggctgagcaggggtatacatacttcacacggtgctgcctattacctgcaggttcacacgcacacacacatagcagtgtacagcagttatgggctcaaatgaagaaaggcctttctcataaactgtccctttgcagattggactacctgggttgaatgagtgttcaagaatctggatgattaggatgctgtagcagggatttccaccctgaactcagcttgtgagragctctggagaaaccccagggcctcctcctaggcggccggtcgccaagcagggcacgcttgtggaggcagtggattctccaggccagcctgagacagcaccttctcccaggtctctgtgaggctttccactggaccctgcttgtcctctccttaaactcacgcttgtcgactgc

SEQ ID NO: 490542 - DNA, 541 bp, Homo sapiens
tgccatgctctctttaacaaccatctcttgtgggaacaatattgtaagaactcactcaatcattcccctgctgccagagaaatcattaacctgttcatgaggggtcaccccgatgaccaaaacacctaccattaggtcccacctccaacactggggatctaatttcaacatgagatctggaggggaaaaccatccaaactatagtaatgtatacacatatagatgtaagtgtgtgtgtctatatgtcttgcaaatttccatgtattttctttcattttgctaatgcttggaagctctgctagataattccatttgttcttacataatatatgtgatttctttatgttcttttcactatatttaacagtattttgcttccctgaatctacatattgatagcccactctcattttctatcatctaaagaatgatatttggggtagtgaaggacaattgttctcacctgagatttttttacagttgttatagtatctgggytccacctcctcttctgggatataggtgactgtcctattacaag

SEQ ID NO: 490543 - DNA, 619 bp, Homo sapiens
tatagaactgagttccaatcttaatatttatacatactagctgggtgactttagactttgtctatatatcatctgtgaaatagacatgagaacacttcgccgatttgctatgtggtggaaataaggcaatgtacataaaagcaaaggacataaactgttcaggcaagccatgtttgctccctactctgcccctggagagtgtgacaacactattatattaaagacgacacaacctgcatctactttctaccagtatataacacacattttcttaatagtctcctttgaaataatttagccttccaagaatgcaatgaagtcagcagagaaaaacaatcatactgatgacttargatctaaaatttctagaaaatgaaacatgagaagctcttcatatgtttttatcacctctcaaacagtcctggtgagtttcccagaaccttttttggctttgtccaaaataaagccatgtgttttgaatactattggtctttctgcaaagtagagacgcttggcatattcagaaattttggatgcaagtgacagaaaacccccacacccaccagctttagaaaaaaagaaaacctaccagctaatatcacagaaacgtccaagaggt

SEQ ID NO: 490544 - DNA, 469 bp, Homo sapiens
atgttttgtatattattagttcattccttttgtgactgagtagtattccattgcatggaaatatcataatttgtttaaattcacctattgataaacatttgaattcctttcatgttttctctatwataagtcaaactggtatggatgcaaacatatatttaatacatccagtttcctacatttaaaaaagttctatgtttcttcctcctgtttttaacacctttgctaaccaaccaccatctgtgagtaggtgttaagggtttcttgactgatcttctactttctattcttcattctaccctacaaccatagctatcatttttttaaaaaacattaatgtttgtccttttttgtttaaagttctttagtaaccaccacttcctctaccttgccccagcccagtactctaaggatgtaatccaaacttcatagtctaaaatgccttttatattatctggcctccctcact

SEQ ID NO: 490545 - DNA, 469 bp, Homo sapiens
atgttttgtatattattagttcattccttttgtgactgagtagtattccattgcatggaaatatcataatttgtttaaattcacctattgataaacatttgaattcctttcatgttttctctattataagtcaaactggtatggatgcaaacatatatttaatacatccagtttcctacatttaaaaaagttctatgtttcttcctcctgtttttaacacctttgctaaccaaccaccatctgtgagtaggtgttaagggtttcttgactgatcttctamtttctattcttcattctaccctacaaccatagctatcatttttttaaaaaacattaatgtttgtccttttttgtttaaagttctttagtaaccaccacttcctctaccttgccccagcccagtactctaaggatgtaatccaaacttcatagtctaaaatgccttttatattatctggcctccctcact

SEQ ID NO: 490546 - DNA, 440 bp, Homo sapiens
tttgtgataagcatgtatcagttttataaaaccaatacgttttgaataggtccctgacatctgagctattgcagggtatggctgaggagagggaattttaccagaaggcccattaaccatgggtctcatactcataaagaccataarcttagattttttatgtcctctccaaatgagttcatacatgctgtaattgaaatatactaataggattaaacacttaaattatagggagttttcttctttttaaaattatagctggaacttcaagatgtccattcttcttgagaagccctgcatatattattcaaaattaaataaataatgatttaatacattgggaaggatatggctcagaggaaggatcctagaggcttccttccccttcctagatcatgcccagtttagaactttctaccaggtgaacacgtagccctgac

SEQ ID NO: 490547 - DNA, 539 bp, Homo sapiens
cagccattagccacatgtagctattgaacttggaatatggctagtctgaattgagatgttttataagtgtaaaaaatacactggattttgaatacttagtgggaaaaaatgtaaaatttctcagtttttctgtattgaatacatgttgaaacgataatattttggatatactgggttaaataaaatacattactaaaattaatttcacctgttcctttttactttttaaatgtgattactagaaakttaaaattatatatgtgactcacattacatttctattgtacagcactgctctggagccctataaatatgatttattattgttatggtaatttcactcagaacaatattctatttcatcactgaggtcatcacctagactgagtctgccatagaatgagtcaccatttttctataaatgtgagttttagtatataaaaagattataagtattcatcttttgaatccagtctttctcgtatgtattttattgtcgtttttcaaatacacagagtcttccaaggagacagaagtcc

SEQ ID NO: 490548 - DNA, 430 bp, Homo sapiens
gtttgattttactattcgatgtgatctcacttctccatgtaagcagcttccaacaaaatcacttactggagaaaagagaaaagacctaacagtccagcgcgctgtgtataccgcgggggccgtgtcaggggagcaggctctggaacactcccgccaaggccaagagggctcccgcctcccctccaagcggtgaaacccgccctccgccagactctggcggtgggagcggctccccctgcaggatctgcagagacgcctcctgggctttctgttctggcctcgcgtttcccgggcgcctcggtgtgaaggcagcttagtgctgtgcccgcccgcctgctgcttcccagtgggggagtttgggtgagcaatggsaagccagggggcccgagaagctggcgaggggtgatgttgccggccaaaccccgggcag

SEQ ID NO: 490549 - DNA, 215 bp, Homo sapiens
ctgtgtcagagctggagacaatcagactggttttctccagtgagagctttcttgacatcttttagtgtcaggaaagtgtcctgggaatccctcctagagaccttcccaagagggcatggaccacccgtgtctgggaggacagagcttcccagagaggaggggatagtgctgagagaasccagcgcaccttgtgccctagcagtggttgaaagttt

SEQ ID NO: 490550 - DNA, 599 bp, Homo sapiens
tgtgcctcccacgatggcccgtggggcctgcgctctgcccgatcagatggaaaagaacgttttagattgaagttttaagacgactctcccgatgccgcttgaactgggtacaggtgtgtgtaaaaacagggtcacaggctcagtgcattcagtgatgatgcaactgtggctgagcgccaagccctccggcaggcaacgccggacaggcagccctccaaacccacagaggagcgcgacccctccccatgtctgcaccccacccgcctctgccctcctctctgctccccaaacctctactttggggataagtattaactctcctggctctgacatcccacctgatgaatgtccctctgcaaggatctggggttgccctacacgtgtttgggccctcttttttcgggcctctggctttagccrtagaccttggtctttgtcctgctttctcctctgcctcaccatcaccctgttttccgtatgacccaatctccttccaacaccccagtcccttcatcagcagccccaatcctgatgcctgagcaacttcattaaaagtaactaccatccaccatcagcccaggatcactcagctccttcag

SEQ ID NO: 490551 - DNA, 519 bp, Homo sapiens
agttttaagacgactctcccgatgccgcttgaactgggtacaggtgtgtgtaaaaacagggtcacaggctcagtgcattcagtgatgatgcaactgtggctgagcgccaagccctccggcaggcaacgccggacaggcagccctccaaacccacagaggagcgcgacccctccccatgtctgcaccccacccgcctctgccctcctctctgctccccaaacctctactttggggataagtattaactctcctggctctgacatcccacctgatgaatgtccctctgcaaggatctggggttgccctacacgtgtttgggccctcttttttcgggcctctggctttagccatagaccttggtctttgtcctgctttctcctctgcctcaccatcaccctgttttccstatgacccaatctccttccaacaccccagtcccttcatcagcagccccaatcctgatgcctgagcaacttcattaaaagtaactaccatccaccatcagcccaggatcactca

SEQ ID NO: 490552 - DNA, 541 bp, Homo sapiens
ggaattcctgaactctctcacctctccatgcctatcataggtacccacgttcttggcctgggttctgaccttgataaatggctctgtgtccactgagtgccctcaacagtccattgagaaccatgtttgatgacatgggtgtgtagttagccattcttggtacttccacccctgtgggggctgacgggctccagatctgtactgcagggcttatttctccccctgggaccactgtctgttgccctagccagattatctggggagatcgtctcctgtagcagagaattcacttggggtgacaatcaaggtttaaaaaacgatggccagtcttgctgccttagagaggtttgcagatggatcgattagacctgagtacctctctgcttctgaagygtgtctagtcagtgcccagctggaaaattcaaagtgcaggctctggaaccctgcactcattgccctgcagctcttatggaggccagcccagaggcggagagaatctctgctgggggttaggttgatgggatgacgtatactaggaaaa

SEQ ID NO: 490553 - DNA, 660 bp, Homo sapiens
aggctgaactaaaattgcctttcttggatggtgaaaataatacctgatcataaaaaaggataatctcgaggctatttcttcccagcagaaattctcccgtaagccttctcgcatctgtctgccccaccaagcckgtgtgtgaccccagagtctggttgttttgcctcattcaggtttctctgggtccccggaatgattcaggatccacgctctccgtcagctctggaacggggccaagcgcatgcctgcctttctgctgtcttcattaatactgggcttgtgtcccagcattcctgagaaattgatagagacagaacatcaattgtagtttagctctacaatggggaaactcacggtgacagactgggggatttttttgccagggaagtcgatgggccctttcctggagcagctcagtgttgaggctctctgggcttttgtgaggtcatcgagtgggacataagacaagagcaacaagccgctaatctgctaattgcagcctggctaagtgatattacctttgtgtttggctttcctggacttgaagaatggctatgtatgtgcaagagaacaaaaccaagatgccttctcccagactgggaggaagctgtggtgtcagatttagaactcagcagatccagactgaggccagcctgggca

SEQ ID NO: 490554 - DNA, 650 bp, Homo sapiens
gccccacaggaagtactgcaggagaggcactgagggagcacggggcatgtgggtaggacaccgccacctgagttctcctgagttcctgactcagcttggcccatgcaccaggtgcgggggataatggagagcccagttgggcaggtggaccagctytgctcagccccagctcattcagttcctctccatcacttgtttgttgacaggttatcatggcaacagaggaggcacagaaatgaaacagaaccgcatgaaacggaacaatctggactttgatttaacattgattataattctgctctctgtctctcatgtctcttccaagtcctggctcttttcttcagtcttgggatatctttttgtctcttgcctcagagaatcagatgacttaaaaataaactcacccctgaacttcagaaaaacagtgatttatttttcccacatagaatgcatgttgagggaagacctgctctcctgggaattggggaattagagggccttgcaattcaacagccgctcctacagggctggtgggggagggctgtgaagatcacatattgtcatcatcactttgtttttaaaacccccatccaggctccgcagtgttcagcatttccagtcgagcattcaaaatgtctcatagttgagga

SEQ ID NO: 490555 - DNA, 636 bp, Homo sapiens
gccctgattcgggcatcccaagtgtgcctgatgaagactcaggtgccaagatttctcaaactggttccaagcaaaccccaagcgggccccaaggcagargttcctctgtattttctgggtaagatgctctctgcccaccagagcatgcagtgttctcttacggagaagtcaagggagacctaattgctgtaaacgctgtctcttggaagaggttcccaggcagagagagctgggctcacaggccaagtatgggagcttgaatcacaggggcttggctgggaaggggcacatgagacagaggggattggggggagcatgctgggctggctggtgcctggcctccaccttactaagcctcttggtgtgatgtcccttcttctggccttgctgctcttcagcacatagtccctcatgctggtcccctagggcaggggatctgcatcgagatagaaactggagagggggaaccaggaagggcaagaaacgagagccctacatggaggagggcccaacccagactccaggaatttgcctgttgccagagaagctgctgaaggcctttgctggtgggacaggcacttgctgtgcccagcttccaggtactcctggacaagcctttctccctgccaccctttg

SEQ ID NO: 490556 - DNA, 636 bp, Homo sapiens
gccctgattcgggcatcccaagtgtgcctgatgaagactcaggtgccaagatttctcaaactggttccaagcaaaccccaagcgggccccaaggcagaggttcctctgtattttctgggtaagatgctctctgcccaccagagcatgcagtgttctcttacggagaagtcaagggagacctaattgctgtaaacgctgtctcttggaagaggttcccaggcagagagagctgggctcacaggccaagtatgggagcttgaatcacaggggcttggctgggaaggggcacatgagacagaggggattggggggagcatgctgggctggctggtgcctggcctccaccttactaagcctcttggtgtgatgtcccttcttctggccttgctgctcttcagcacatagtccctcatgctggtcccctagggcaggggatctgcatcgagatagaaactggagagggggaaccaggaagggcaagaaacgagagccctacatggaggagggcccaacccagactccaggaatttgcctgttgccagagaagctgctgaaggcctttgctggtgggacaggcacttgctgtgcccagcttccagstactcctggacaagcctttctccctgccaccctttg

SEQ ID NO: 490557 - DNA, 499 bp, Homo sapiens
tgggctaatttatgaccaagtctttaagcttgtctggtcccatttaggccatggaaagaagagggattaatcacacccagcccaggggatcagctctaagaactgtggccagcacctcctggtggtcattgctggtgtgtgtgtgtgtgtgtgtgtgtgtgtgtgtgtgtgagagagagagagagagagagattgattgattgattgattggttcacacacagatgggagaagctgggggaggtttcttgagtatcagcctccccaggatatctcaggtttgactttctactgagggtattgatgsgcaggactgaagcaggtcagagcttagactttctcttcatggagcttagcatttgtctttggtggcagtgatgaagtcaggatgagcacaggctcacgtgttgattttatgtgttttgcttcagtaatacaccctcttcatcatggggtgggctacgacatgtgggcagactgaggatgtgtgccctttcaag

SEQ ID NO: 490558 - DNA, 577 bp, Homo sapiens
ctaatcttcacaatcagcagggactttacagtgatcaaaaagccatttcctgctgaacatattgataccagaaggttctaagtcatataagagaaaagttgataggtagggccctgggagattggtaggttctggccagggcagtgtccagggtggtctgcatccagtgttgtgcaactctcttgtgagaccatcctggcacttccctctgcagcgtgtgcacaccttggagattgttcactcttatggtcaactgggagtgkgagtgaagggagacggggacaggcttgagtctgagtgaaggcagttgttctgtgtgaggtgttgttactttctaattgtctccagtgtttggaaagactggaggaccgaggaagaaaacgcagccttccctctccacttgggaatgccccgggacaagaagatgaacttaagtgcttcaggggggtctttcttcctgacggagggtgtagaggggccatgggaggctagactttaggccagggcaaagagcttagggagaaaaatgggagtgtattaggatactctccaatgcaagtgacaaaaatccaaccta

SEQ ID NO: 490559 - DNA, 577 bp, Homo sapiens
ctaatcttcacaatcagcagggactttacagtgatcaaaaagccatttcctgctgaacatattgataccagaaggttctaagtcatataagagaaaagttgataggtagggccctgggagattggtaggttctggccagggcagtgtccagggtggtctgcatccagtgttgtgcaactctcttgtgagaccatcctggcacttccctctgcagcgtgtgcacaccttggagattgttcactcttatggtcaactgggagtgtgagtgaagggagacggggacaggcttgagtctgagtgaaggcagttgttctgtgtgagstgttgttactttctaattgtctccagtgtttggaaagactggaggaccgaggaagaaaacgcagccttccctctccacttgggaatgccccgggacaagaagatgaacttaagtgcttcaggggggtctttcttcctgacggagggtgtagaggggccatgggaggctagactttaggccagggcaaagagcttagggagaaaaatgggagtgtattaggatactctccaatgcaagtgacaaaaatccaaccta

SEQ ID NO: 490560 - DNA, 596 bp, Homo sapiens
atacaagaatccagtggggagagatatcctccatggatgtcttgtgctcctacacatctcattaggagtgcaaagcatgtaagtaaggccttggcttttctttccctggccacttctcagagtgtatttgccaggaacaatcttgattaatgagataatgtcacccttccagacaaagagcaggtttgcttactgcttacaataaaatgagtggatttctaaagctcaatattcttttgtaagtatagcttccatcaagatcatccctgtgagatatggaggccagaagcaaggacttaggctgagggtcatgctgcctatcaagccaccaggaataaagctctttgtggtcatccatgaagcagtgacaggctaacttgcaaatagggtaaaagcaactttgagacycgatgaatcccactactatatttgttagcaagtattcaagttcagtcaatatagtcacagaatacagcttccatcaccaagactagccctgaaaatattagtacaaaaaagcccactcttcatgaacatgataataattgcttgttgtttgctaaactagacagaatgaaggaagtaagtgaaaagtg

SEQ ID NO: 490561 - DNA, 655 bp, Homo sapiens
tgggacagagggggtgggggtggagtttgaggagatattgttcaaaggatacaaattttttattagacaggaggagtaagttcaagagatctattgtacaacatggtgactataattaataatatactgtattcttaaaaatgctaagagagtagattatatgtgttctattacaaaatcacgagatatgtgaagtaatacatgtgttaattctcctgatttagccattccacaaggtatagttgttttaaaacatcatgtagtacatggtaattatgtaaaattttatctgtgattttttaaaaaataaaataaaacatttttaaaagaaatgttacattacaacctctaattgcttccacttttacatttagctaatttcacaagctgcacgccatgtttcaaattggttttcttctagcaaattgtgcatgtgtrtattctctcagatatgaccttccaggttttagagtccactatgtcaagaagtaagacatattaaggaatctgatcttggtaaaaatttccagagtctacctacttgtcttttctaaatttgtttaatcagatggaataaattagagaaaaatactggtcgttttgtgaatttttaacaattcctttgtcttttttgcagtatttcaattacataagt

SEQ ID NO: 490562 - DNA, 671 bp, Homo sapiens
gtatagattaaagccttaaatatacaaatttccatgaaaacaaaaagaaaaagcaaacaacagcaacaataaaatctaccctccaaaattgcttcaagcccagatagtttcataggaaaattttaccaaaatttcagaccaggtaatctcaatgctaaatagatatttccagagtataaaaaagtattcacacaaagaaagtacaacattgatattaaaacctaatgaagtaacagaaaaaataaaactacataccaaatcgattttaattttgaattgcaatggacaaatatttttaaaaatagtaaaaagtattatgccatttataattaaggctcatttgcaaccaaataactctgtttgcatcttctcttatcttttgtgctgttattatcataaagtttacttctacatrttataactccacaatatgttgttattatttttgctttaatgagtcaatttgtttttaaagaattaagaacataaaaacagtttttgaaacatttacctaaatacctctcagtgtacttccttttatgtaatctttaattctaagatatggaccttaaaaagtttcaatgaaaaactcaaagtatttgccaagcccctctaatttgataagacttaaactccaaattgtatgtccatctgttgaaacctctactcag

SEQ ID NO: 490563 - DNA, 620 bp, Homo sapiens
gtgtaacttcttaaacacactgcatgtgctcacttcccaaggrtaaggagggcaacgtgcatgcgggcagcccaccctaagggaagaatcacgggaaaggggccagcctataaagtcctaggatcaaggttgaacaccacactgggcctttatgtgccctcttcggtctcttccaagcatactttctctttctttccggttctaaaaccctttaaaataaacttccactcctgttctgaaacttccctcggcctgtttttctgccttatgcttctcagacgaattctttcttctgaggaggcaagaattgaatttgctgcagacccatagggattaaccaccagtaagtcagacaccttccactggtgacacaacaaggactacggaattcagcagcaggtatgtgaagattcttgttttgggcccattcatgatttttaaaacaaatttcttttgacagcagaaaacttgcctatgttaaagatttcgcaagcaggaagtgagaagagatgagaatgtgcatcagatggaagtttgggtgaagggcaagaggaaggtcaggttagagggagagagaatggttgaagaaaaaataaagggcttaggatgaatactaacag

SEQ ID NO: 490564 - DNA, 602 bp, Homo sapiens
tttccaaaattcttgattatctcttagttagcattgatatagtacagggcaaaaacaatgtcaacagtgtcacattccatatgagggaggcatttaactggacatttttcacaaaggaaacaggctgattagaaaaatgaatatatataacagatgtaaacatcttgaatgtcaaaggtataaacgatatatttgacatgttttartggttcacaattatagatgcacagtgatcttaacttgttagagattattttatagattatcttatctttggaataacacagataaattatctcacagggatgaaagctaggtatagaatacattaaattagagggttcagccacttcgcttactcctcctgagtaaatttgaaggtttattaaaaaataatgaataaaatgcctgactgcattagaaacttcgattgagcagatacattaattaatggtagcatgcttttagtcacaatttctctccaaattaggattagaattattttctaaaaaagaaggatctcaaatcagtaacttactttacattttgaggagctagagaaagaagataaagtaaacctaagtctagcagaatgaagggca

SEQ ID NO: 490565 - DNA, 591 bp, Homo sapiens
ctgcttttgttatctgagaatgaggcatcctggggctgtgggactgctctaggcttaatgatttgggtgttttattaaataaaggcactcagatgacattctagtggaggatgaagcatcaaaaggctcaagaaataaaaacaacctttaccttgaatattttcagttcagttccaatggggttgcagttgtatcaagttaaaagacttacaaaatacttcacaataactttttgaggaaaagccttttgtccttaacctgatttgaattggttccagcaccatctggagaaagtgttaaatttggtctctkgaatcatatatggcaaaaaaacaaaaacaaacaaacaaaaaacttgctttagtgcttgtagcccttttaaacctcatctttcatgaaatggtcgtaactattccacgtcaccatgaccatctggaactctagcagggataccctgggtgtttcattagtttgcagttggctttatccaaatatagctttggttgtactatagagtcctcccgtagccttgtcacagtcttcaaacccatcgacacattgaatccaccagcaagcatttgttggtgaatg

SEQ ID NO: 490566 - DNA, 631 bp, Homo sapiens
ctaggttccagtcagtctgtgctcagaactcaaaacagtcctaggctgtaagccttcttcacagagacagaaaccactgacgctttcaggcccctcccctctcaggctgcccatgaatcagggtcgcccagctcctcactcaaaattatatctcaaatctcacttgggacgttctctcaatccatgaccaccctgagttcgctggcagactttcacagggttccctgttaggtagaattagcgatggcttccctccttccctgctggagactgggagtgcacacacagcaggtcctgatgctgctccttctcatatactccccaccactcactaaataagctccagagctgggtaaggttaaggccttcctcagtggcctggattgccagattccctggtggaaattgtatcccagaagtagcttatctacctctcaaactctggtgattttccactgggcttatggtgtgtgctgcagcccacgacttctttcaragcatctgtggtttctttcggttttcctgtgaagtttctgtgttacttcttggaaaaaatttcagggcatgaatctcttcacatttttttttgtcgttccaagtggaagaggcatgctaacaatgcctccaatcc

SEQ ID NO: 490567 - DNA, 646 bp, Homo sapiens
tctatggcactctcttgcaaaatgacttttaatgggtcagcgaacccttaattcactcttctctttctggtccttacaatataaaaaggtcagactgagagagkgttcagtcagtcattcatctgcaaaataaacttttacttcttggccggttacccaggtgctgatcttcttctgttctatttcctaatgtgtgtacatattttgattttttaatgaaatcttaaggtgcacacttcatacctaactgcatccccacagcaggtatctccttagtgtgacaggcgagagcattatgctaagtagataatcacaacaattaactgaaaaggttataatttcatcctgtttggtactgttggcctgtcaaaaataattaggttaaaatagatctcaagactccctctgcaaatttaggggagaaaatagaagaagaaagaaagaaaaaggtgacagctaagaactttttacttggccaaattaaatgttctgaaatttcactgctggctgaaacactagagagctatttaatagaagaatcctttcaactcagttggaggtatttggtttctgtttcaatgcttctcaatacaaatattgaaaatgtataaggcaaaatttcaaggcacaagttctgaccagaaag

SEQ ID NO: 490568 - DNA, 646 bp, Homo sapiens
tctatggcactctcttgcaaaatgacttttaatgggtcagcgaacccttaattcactcttctctttctggtccttacaatataaaaaggtcagactgagagagtgttcagtcagtcattcatctgcaaaataaacttttacttcttggccggttacccaggtgctgatcttcttctgttctatttcctaatgtgygtacatattttgattttttaatgaaatcttaaggtgcacacttcatacctaactgcatccccacagcaggtatctccttagtgtgacaggcgagagcattatgctaagtagataatcacaacaattaactgaaaaggttataatttcatcctgtttggtactgttggcctgtcaaaaataattaggttaaaatagatctcaagactccctctgcaaatttaggggagaaaatagaagaagaaagaaagaaaaaggtgacagctaagaactttttacttggccaaattaaatgttctgaaatttcactgctggctgaaacactagagagctatttaatagaagaatcctttcaactcagttggaggtatttggtttctgtttcaatgcttctcaatacaaatattgaaaatgtataaggcaaaatttcaaggcacaagttctgaccagaaag

SEQ ID NO: 490569 - DNA, 664 bp, Homo sapiens
gttttagatgcttccttcttattacagtatagcattccactacatgaaaaccacagaatcctactaatctaatatmtattttgctactttattatatccctcctattattggaaattttagtttccagttggggaattttaagaatggtgttgcaatgaccatagctacacaaatctttttttgagtctaagggtatatttttctccactacacacctaggaacccatacctaggaatgaaataaaatttgggtttttttaatatatatacacagacacatatatacacacatatataatctatatatatagatatacacacacatatatatttctatatataatccatatatagatatacatactcacatatatattatatagatatacatacacacacatattatatatttatattatatattacatatatatgatatatactattatatattgcacatataatatataataggcttatattatatattatgtgtatgtatatctatatatgcatatgtacatgtgtacacatattattaaatatataatatgcttaatatataacacatatgttttatatattatatacatgcatatgtatatctatatatgtatgtataggtatacatataatatataatatatataatgtataatatat

SEQ ID NO: 490570 - DNA, 664 bp, Homo sapiens
gttttagatgcttccttcttattacagtatagcattccactacatgaaaaccacagaatcctactaatctaatatctattttgctactttattatatccctcctattattggaaattttagtttccagttggggaattttaagaatggtgttgcaatgaccatagctacacaaatctttttttgagtctaagggtatatttttctccactacacacctaggaacccatacctaggaatgaaataaaatttgggtttttttaatatatatacacagacacatatatacacacatatataatctatatatatagatatacacacacatatatatttctatatataatccatatatagatatacatactcacatatatattatatagatatacatacacacacatattatatatttatattatatattacatatatatgatatatactattatatattgcacatataatatataataggcttatattatatattatgtgtatgtatatctatatatgcatatgtacatgtgtacacatattattaaatatataatatrcttaatatataacacatatgttttatatattatatacatgcatatgtatatctatatatgtatgtataggtatacatataatatataatatatataatgtataatatat

SEQ ID NO: 490571 - DNA, 406 bp, Homo sapiens
gtaaaattcaatagataaatgttgacgcaatatggctaagtytgtgatttctctctacctatatgttcatgttttgtttatgaaaagtcattaatttttaaataattagttatccttcaggtctcaataatccctattccacaatggtaaagttacaacaaatgcacttacttagagcacagaatcctttcacaccactaccaaattttcttcattccgtttgctgggccaatgctacaagataagataaaccctggccctattttctcagactgcatgataagatgaatactgtaattttgaattgaacatagagtcagtggtacattaggagcctagtagaggaatagtatcaagaagtcaaaaatctttaatgtgagacactggataatgactggactggaga

SEQ ID NO: 490572 - DNA, 406 bp, Homo sapiens
gtaaaattcaatagataaatgttgacgcaatatggctaagtttgtgatttctctctacctatatgttcatgttttgtttatgaaaagtcattaatttttaaawaattagttatccttcaggtctcaataatccctattccacaatggtaaagttacaacaaatgcacttacttagagcacagaatcctttcacaccactaccaaattttcttcattccgtttgctgggccaatgctacaagataagataaaccctggccctattttctcagactgcatgataagatgaatactgtaattttgaattgaacatagagtcagtggtacattaggagcctagtagaggaatagtatcaagaagtcaaaaatctttaatgtgagacactggataatgactggactggaga

SEQ ID NO: 490573 - DNA, 406 bp, Homo sapiens
gtaaaattcaatagataaatgttgacgcaatatggctaagtttgtgatttctctctacctatatgttcatgttttgtttatgaaaagtcattaatttttaaataattagttatccttcaggtctcaataatccctattccacaatggtaaagttacaacaaatgcacttacttagagcacagaatcctttcacaccactaccaaattttcttcattccgtttgctgggccaatgctacaagataagataaaccctggccctattttctcagactgcatgataagatgaatactgtaattttgaattgaacatagagtcagtggtacattaggagcctagtagaggaatagtawcaagaagtcaaaaatctttaatgtgagacactggataatgactggactggaga

SEQ ID NO: 490574 - DNA, 567 bp, Homo sapiens
tgggagctctttaagtaaactcctatgctaatttggcatacycaatcattgtgcatgtgtgtgtttcctatcatttaattgttgagtatttcctttactttctgtcattacacaatgctccaagtttatcttctatagtttttaaaatgtcctaaaatccattatttcccaggtaaatctgctcctgtttattggataaaggtactaaaaaccagaccaagtttattggatctggtttctgggtgttcttattgttattgatgtatccttttttcaaggtcttctcagctagcagagcaataggggtatgcgtgtatgctagcccatgtgtgtacaaatatttatcaatctaaggttactcatttatcatctctatctatatgaagtaattattagttcatacttttgtttctaagtaatcaattacaacaatgataaatctagttatttttatttgcttgttctccagaagtaagaaacaaggctatcaacatctgacattcatttacttgtttattctagcacgcatttatactagtttcagaattgttagtccataccttatca

SEQ ID NO: 490575 - DNA, 567 bp, Homo sapiens
tgggagctctttaagtaaactcctatgctaatttggcatacccaatcattgtgcatgtgtgtgtttcctatcatktaattgttgagtatttcctttactttctgtcattacacaatgctccaagtttatcttctatagtttttaaaatgtcctaaaatccattatttcccaggtaaatctgctcctgtttattggataaaggtactaaaaaccagaccaagtttattggatctggtttctgggtgttcttattgttattgatgtatccttttttcaaggtcttctcagctagcagagcaataggggtatgcgtgtatgctagcccatgtgtgtacaaatatttatcaatctaaggttactcatttatcatctctatctatatgaagtaattattagttcatacttttgtttctaagtaatcaattacaacaatgataaatctagttatttttatttgcttgttctccagaagtaagaaacaaggctatcaacatctgacattcatttacttgtttattctagcacgcatttatactagtttcagaattgttagtccataccttatca

SEQ ID NO: 490576 - DNA, 567 bp, Homo sapiens
tgggagctctttaagtaaactcctatgctaatttggcatacccaatcattgtgcatgtgtgtgtttcctatcatttaattgttgagtatttcctttactttctgtcattacacaatgctccaagtttatcttctatagtttttaaaatgtcctaaaatccattatttcccaggtaaatctgctcctgtttattggataaaggtactaaaaaccagaccaagtttattggatctggtttctgggygttcttattgttattgatgtatccttttttcaaggtcttctcagctagcagagcaataggggtatgcgtgtatgctagcccatgtgtgtacaaatatttatcaatctaaggttactcatttatcatctctatctatatgaagtaattattagttcatacttttgtttctaagtaatcaattacaacaatgataaatctagttatttttatttgcttgttctccagaagtaagaaacaaggctatcaacatctgacattcatttacttgtttattctagcacgcatttatactagtttcagaattgttagtccataccttatca

SEQ ID NO: 490577 - DNA, 567 bp, Homo sapiens
tgggagctctttaagtaaactcctatgctaatttggcatacccaatcattgtgcatgtgtgtgtttcctatcatttaattgttgagtatttcctttactttctgtcattacacaatgctccaagtttatcttctatagtttttaaaatgtcctaaaatccattatttcccaggtaaatctgctcctgtttattggataaaggtactaaaaaccagaccaagtttattggatctggtttctgggtgttcttattgttattgatgtatccttttttcaaggtcttctcagctagcagagcaataggggtatgcgtgtatgctagcccatgtgtgtacaaatatttatcaatctaaggttactcatttatcatctctatctatatgaagtaattattagttcatacttttgtttctaagtaatcaattacaacaatgataaatctagttatttttatttgcttgttctccagaagtaagaaacaaggctatcawcatctgacattcatttacttgtttattctagcacgcatttatactagtttcagaattgttagtccataccttatca

SEQ ID NO: 490578 - DNA, 473 bp, Homo sapiens
cttctgcctcaacctcccaagtagctgagtagctgggattacaggcacgyggcactgcacctggctaatttttgtatttttagcagagatgggggtttcacaatgttggccaggctggtctcgaactcctgacctcaggcgatccacctgtctcagcctcccaatgtgctgggattacaggtgtgagccactgggcccagcctgaaattccttattttatcttaaaaaaatcatacaagtttgcatccttctctttaatgtgtggggatttccctcccctttcctaaaacatcttcctctcagtcttctacctgagtggatgttccgagaagatacacccgggttatgtcctgaggctgtggacatctcatgccccacggtgacctccaggcccttcaagccccaggccctgggccacctggtctggctggggagaagttcagggatggctgaggttgatggttgagggcctg

SEQ ID NO: 490579 - DNA, 443 bp, Homo sapiens
ttgaccttataggctttaatactgaggtgtcttagttcattacgtgttgctataacagaaaacctgaggctgagtaatttattttagaaaaataggtttatttagctcacaattcttcaggctaggaagatcaagggatgaaagatcttcaggctaggaagatgtacttggcttctcatgaggacttttgtactgcattataacatgccagagaaagtcaatggagaagcagacacaygtacagagacaaaacatgaggggcatcctgcttttataagaacccactgttaaaagaaaaacctcaaacatattgaatttaacagagtttcattaagcaaagaacaatttgtgaatgtggaattacctcctaaccagaatagcttgaggaagattccaagatgctgtacggtcggataggatttttggacagaaaaaggaaagtg

SEQ ID NO: 490580 - DNA, 647 bp, Homo sapiens
tacatttttaggggtgaggggctttgggaacacagttgctttcagtgcagagaaggtagagagcaaaattcataattttaatgtagctaatttattagtttttttmtttatggctaatgcattttatatcttgtttaagaattttttgcctaccccaaggtcgtgaggatattttccattttcttctaaaatcgcattgttttctttttataattgtaactctgaacttgatttttgtttatgatgtgaggtagtggaaaaaggtaatttttccgtgtgcatttacaaatgacccagtaaataaatttcgaaaggataaaattataagaataaaagggaatgttaaagctgcctgaagagctctgcagacccactgtctagcaaaataaccatgagtgaaaattatatttaaaaagaacaactatataataattacattaaacaaatgtattaatcttccaattaagaggcagagattggtaacatggacttttaaaaatcattaattttatcctgtctataggagactaattttagattccaacatacaaatacatggaaagtaaaacaataaaagaggatacaaccattagaaagttgaagtggcaatactaacataagacaaaatcaactttaaaacaaaaact

SEQ ID NO: 490581 - DNA, 647 bp, Homo sapiens
tacatttttaggggtgaggggctttgggaacacagttgctttcagtgcagagaaggtagagagcaaaattcataattttaatgtagctaatttattagtttttttctttatggctaatgcattttatatcttgtttaagaattttttgcctaccccaaggtcgtgaggatattttccattttcttctaaaatckcattgttttctttttataattgtaactctgaacttgatttttgtttatgatgtgaggtagtggaaaaaggtaatttttccgtgtgcatttacaaatgacccagtaaataaatttcgaaaggataaaattataagaataaaagggaatgttaaagctgcctgaagagctctgcagacccactgtctagcaaaataaccatgagtgaaaattatatttaaaaagaacaactatataataattacattaaacaaatgtattaatcttccaattaagaggcagagattggtaacatggacttttaaaaatcattaattttatcctgtctataggagactaattttagattccaacatacaaatacatggaaagtaaaacaataaaagaggatacaaccattagaaagttgaagtggcaatactaacataagacaaaatcaactttaaaacaaaaact

SEQ ID NO: 490582 - DNA, 535 bp, Homo sapiens
tacatttttaggggtgaggggctttgggaacacagttgctttcagtgcagagaaggtagagagcaaaattcataattttaatgtagctaatttattagtttttttctttatggctaatgcattttatatcttgtttaagaattttttgcctaccccaaggtcgtgaggatattttccattttcttctaaaatcgcattgttttctttttataattgtaactctgaacttgatttttgtttatgatgtgaggtagtggaaaaaggtaatttttccgtgtgcatttacaaatgacccagtaaataaatttcgaaaggataaaattatragaataaaagggaatgttaaagctgcctgaagagctctgcagacccactgtctagcaaaataaccatgagtgaaaattatatttaaaaagaacaactatataataattacattaaacaaatgtattaatcttccaattaagaggcagagattggtaacatggacttttaaaaatcattaattttatcctgtctataggagactaatttt

SEQ ID NO: 490583 - DNA, 538 bp, Homo sapiens
ccttttgcataaatgtatttatttcataagttatggtgatttgtagtgtaacattcctttctgttttccttctttgccatcattctgtatgtaggaaagatggagaaatccgagaagttcttgaaattcaaccattctttccctaacctgaatccaatcacattatgacttacataactcttgcgagttctcttgaactttaattaatttatgacaattggtttgagttttgtggttttccttttaaaggtacattctcacataatttggaacaggggcggtgggggtgacacccatgagaaaataamctcctcttctcttttcctcatacctaaatatatagttacatttgtaggaatacttatatatttctaacatgtgctcataatatttgaagataaaagctacactcttataggtgtaactgaagagtggaagtctttctgacagaaaatcaggactgagaggggattaccaaggtagcatccaggggagactctaattttgattgttcaaagtgtcaaagaagagatttctt

SEQ ID NO: 490584 - DNA, 592 bp, Homo sapiens
agggcttccggcgcgcgctctatcccaaacctgccgcggcgccgagaggcgcgcgtttactgcgcycaggagctcggtgcagcctcttctggagagttgggggcggtttccagggtccggagtgtcccctgaccccgggaaagctgggtaagtatgcggtgcggggacttgggcctgaggcaggcgggggaggaaacctcgagtagacaggtggatgtgagaaggattctcctttctggtgatttgcacctgttgacgcccccaaatctgagctctaaggaattttacagatggttaagacaggttctgaaaggtagactcagaattcgaaaggaccttagagcagtgctatccgaagtgtgatgcaaggactaatagcatcgccttgcccttgaaacttgttagaaatgcaaattcctggaccccacaaaaccctgttgaaccagaatctctgggaatggggataaggaatgtgtattttaacaatcctccacgggattctgatgcagctaaagtttgagaaccattgccttagaagtcacttagtcctacatttgagcccctagccccaatgcaggaacccccaaataaa

SEQ ID NO: 490585 - DNA, 330 bp, Homo sapiens
gtcccagctatttgggaggctaaacaggaggatcccttgattccagcttgggcaacatagcaagatcctgtcccttaaaaaaaattgtctaaagtgaaagcctaatgtctagaaacagataaaaagaaagctattaaggagtagggggctgctctctttgctcttttatgcctggatggtaaaggggttccttggagcccagtttacaracaagtgatatggatgatcacatagaaagcatttcagaatgatagactattgacttcattttagtagtacagacaaaaataaaaagttcataaaaatattcttaaatatcaaaatcacaaa

SEQ ID NO: 490586 - DNA, 681 bp, Homo sapiens
tctgtgtcctcatccaagtctcatcacaaattgtaatcttcatctgtcaagggagaaacctggcagaagatgattggatcatgagagaggycattcccatgctgttctcatgatagtgagggagttcttacaaaatctgatggtttaaaagtggcagtttccctttctcctctcgctctctcttgctgtcgtgtaagtcatgccttgctttcccttagccttcaccatgattctaagtttcctgaggccttcccagccatgtggaactgtgagtcaattaaacctattttcttcataagttacccagtctcaggctgtatctttatagccatgtgaaaagtaatacacagagtttagaagagctaaaattatttcatgtatctgttaatattaggtatatggctcataaattttagtcattttgaaaggtatgtatgtatctagtaataattttagtttatacttaccttacaacatgaagttgagtacctttttgtttatttactggccatttgggtatctgtttttgtagatctacaaaccaatgttattcttttgtatgaggtaggagtcaacagtaatttatctcacaagaatatccagttgactgagtactatttattggaaaaaattgtcttttgtaataaaccaactattcattgatgtgcaagtttatttctg

SEQ ID NO: 490587 - DNA, 521 bp, Homo sapiens
taaacatctatttttgatttctattggttggtttaggtctttatattactcccctacagcagtgagtatttyctgaatttgaggtattcttttgcatccttcttatctctctatctttctttctctacctcctccctccaattttattccaatctaacatctcatctctatcctctacagtaacaatatctaagtctgtgtgttccattatcctaaaacaatgctctattgccttgccttttaaaacagctaattgttgttctataaacatttcttcagttaatgcccccacttctgaattatattacacaaacatttcgttcttcctttccttccttccactgcacttgaaactgctctttcacagtcagcaatggcctgtaaaatgcttttctcttcttatttagtttacatactttttcggtgggaattagcactgttggccaccctttctctactctttgatttccaaaatctcctaagattcttacaattttcaataatctttattgagttattag

SEQ ID NO: 490588 - DNA, 440 bp, Homo sapiens
attttcaatttttaaagttccaatttctgattttctcctgtttttttctccygcaaatttgacagtttcatgttttgcataaaacattgttcatgatccattttgaattatttttgtatatggtatgaggtataggtacaagttctttttgttttcttttgcttttggatgttcaattgcatcggtaacattgtcaaaaatgctattcttccttcaatgaattgcttcagcacctttgtcaagatgagtttggcatatttgtgtgagtccattctgggatctctattcctgggatctattctgttccaaggatctttgtctcttcccctctgtcaggaccacatggtgttgattgctgtggctgcatagtatagtataaccaccttctgtgcaaggcatccagttcctcccctctccactctgacccaccatccaataaa

SEQ ID NO: 490589 - DNA, 645 bp, Homo sapiens
gtttaaaatctatatgggcaatgaatcaaggttttctgtttgttttatttcctcagtaattgggacaaagtcaacaatgacttctgacaaccaaaacctagagaagctgtgmgtggctgtcacccctcgggttcccttcagagcaggcagggccgcacatggttgaatgggggatgaatggggctttagccagcaccggccaagaaaaatgcaatgcaagctatgggtagaattttctagtagccatgttttaaaaagtataattaaacagagtaaatttgttttataatatattttgtttaaaatagtacatgtaaaatcataaaaaatagcatcatgtcaatatgtaaccaacataaaaattattgagatattttacatttttaattttttttttttttttttttgagagagagtctcaatctgttacccaggcttgagtggcaggatctcggctcactgcaacctccgcctcctggtgagttcaagcaattctcctgtctcagcctaccgagtagctggggctacaggcacatgccaccatagtggctattattattatttttattttttttgcattttaatagagacagcatttcaccatgttgctcaggctggtcttgaacttctgaactcaggcaatct

SEQ ID NO: 490590 - DNA, 645 bp, Homo sapiens
gtttaaaatctatatgggcaatgaatcaaggttttctgtttgttttatttcctcagtaattgggacaaagtcaacaatgacttctgacaaccaaaacctagagaagctgtgagtggctgtcacccctsgggttcccttcagagcaggcagggccgcacatggttgaatgggggatgaatggggctttagccagcaccggccaagaaaaatgcaatgcaagctatgggtagaattttctagtagccatgttttaaaaagtataattaaacagagtaaatttgttttataatatattttgtttaaaatagtacatgtaaaatcataaaaaatagcatcatgtcaatatgtaaccaacataaaaattattgagatattttacatttttaattttttttttttttttttttgagagagagtctcaatctgttacccaggcttgagtggcaggatctcggctcactgcaacctccgcctcctggtgagttcaagcaattctcctgtctcagcctaccgagtagctggggctacaggcacatgccaccatagtggctattattattatttttattttttttgcattttaatagagacagcatttcaccatgttgctcaggctggtcttgaacttctgaactcaggcaatct

SEQ ID NO: 490591 - DNA, 299 bp, Homo sapiens
ggggaaattgatatgcaaaagtataaaacttagcagtgaaaagattaatttttaatgcccttgattcttgaaaactttaaacttttttcacagtaaggacagtggtttcattgtctggtgggcagtggacaggtgataacgttctgctctattttactttgtgatgaaccaaagagcaccggttgtttctctaatgactttgtaagagatgcttcaatgctgaaacattagctgcatcttttggactactatgatgggraagtgagaagtagttttaataacttgctaaaattatcacc

SEQ ID NO: 490592 - DNA, 536 bp, Homo sapiens
ctcagttctaaaacaggcttgcgctttaaatcagggacttcaatagaacaatatgcatatagtgcaaaaagtacactaagccttcattggagatgacaaataactactcactaccaagggaaggaaagatgacttagtcaaatagaaataaaactattaaatgtgtggataaatgtgttttgcaggaaasaatcaacaagcttaagtattccagcattgaccacagagagattttgctcatttattattttcacacttaaacatttatcataaaacacacttaagcttggctgctgtgtgtttgaaactgcaactgcatttatcaagggaggggtccattttttctggcattcttatattgatctgtgctagtgtgcttgctgctttgtaaggactcacattatattcacttgtgtacatccagttttgtcaactgtattttaagtcccccaaaactgttcattccagcatcttctatttattttaatatctccaaaatggctcagcatttgataggcatgaaatcaatactttgg

SEQ ID NO: 490593 - DNA, 570 bp, Homo sapiens
gctggtaataattttgtcaagtggcgatataattcaggacatgttgaagacagcttcctttgttttgcctcctgtgcttcacaatcatcttagctttataggaatttctctacaatcatcatccccttagacatgaacttggagcagtgagggcacaggcaagaccatctccttatactgactgtctagacaataatggctatgcatggggggagtgggagacacatcattagtaaggattttcattttataagatttcataagctgtcaaatcagagcttgggctgccaaggctatggctgtgtacatttgaagtatagctctgatccaggaaagtgctggattatttcatctgggattagaatgtactttgcattcatctttctagtatctcaaaagatgatctgggaaaaaagatgagataaaatcttcaagtgttattcaagaaaactgagatactgtagaaacaactatggtmtttcagggcacaaatattcattttgctgctattggaaataattaggtaaaactaacctatacctaggtgtgtgcaaaattaagtgacacaat

SEQ ID NO: 490594 - DNA, 591 bp, Homo sapiens
ggatggcatggtgtctctgtcatgctacctccacctctgacttcacattcattccagtctactctgtctgttaactgtactgtctttatactcttccattttgtagaatctttttaactccgtcatttctgatcagtttttctttcagaattgtgattgaacctgatccatcayagcctccttgacttctctattatcacattccttgagtttctactacactgtatgttgactggtggtgaccagtgagcttgcctgagagtcaggaatatggagccacatagcgacaaaagccatggcatgaagctgtcctgtcgatagagctttggaatgactttcctttacaaaagctgtggaaatgtcagataatattcttgttgtgtttatgacagagataatatcctctcctccatgtccctctataccattaaaactaggtttctgtacctatcaggaaacaaggtgaggctctatgacaaacagagatgttccaagtctagaaatcagaatggattagagagtattctacggcacatattgattcctacctaaattaggataacccagctaatgcatggttaacaaatgtct

SEQ ID NO: 490595 - DNA, 570 bp, Homo sapiens
gctggtaataattttgtcaagtggcgatataattcaggacatgttgaagacagcttcctttgttttgcctcctgtgcttcacaatcatcttagctttataggaatttctctacaatcatcatccccttagacatgaacttggagcagtgagggcacaggcaagaccatctccttatactgactgtctagacaataatggctatgcatggggggagtgggagacacatcattagtaaggattttcattttataagatttcataagctgtcaaatcagagcttgggctgccaaggctatggctgtgtacatttgaagtatagctctgatccaggaaagtgctggattatttcatctgggattagaatgtactttgcattcatctttctagtatctcaaaagatgatctgggaaaaaagatgagataaaatcttcaagtgttattcaagaaaactgagatactgtagaaacaactatggtatttcagggcacaaatattcrttttgctgctattggaaataattaggtaaaactaacctatacctaggtgtgtgcaaaattaagtgacacaat

SEQ ID NO: 490596 - DNA, 591 bp, Homo sapiens
ggatggcatggtgtctctgtcatgctacctccacctctgacttcacattcattccagtctactctgtctgttaactgtactgtctttatactcttccattttgtagaatctttttaactccgtcatttctgatcagtttttctttcagaattgtgattgaacctgatccatcacagcctccttgacttctctattatcacattccttgagtttctactacactgtatgttgactggtggtgaccagtgagcttgcctgagagtcaggaatatggagccacatagcgacaaaagccatggcatgaagctgtcctgtcgatagagctttggaatgactttcctttacaaaagctgtggaaatgtcagataatattcttgttgtgtttatgacagagataatatcctctcctccatgtccctctataccattaaaactaggtttctgtacctatcaggaaacaaggtgaggctctatgacaaacagagatgttccaagtctagaaatcagaatggattagagagtattctasggcacatattgattcctacctaaattaggataacccagctaatgcatggttaacaaatgtct

SEQ ID NO: 490597 - DNA, 496 bp, Homo sapiens
  misc_feature (1)...(496): n = A,T,C or G
ctctggctttgatttcacacctgagactcaaaatctgggggcttgtcaacagtacaattctaaatgtggagatatgagaaatgggaggcaaaacgagaaaagaattggagaaagaaaacattctcaccattcaaaggctaccaactattaacattttggtataatttttttgtgttattgttcttgtttttacggtttgyttgtaaattatattcataccattttactaaccatctagtaatcatactgtggcacaagaggctgttgtaagactgttcataacagtatcagttgaatggccaagaattgaatgaaggcttgctaattgatcactaatgggaaataaatgtaaaatgctaaatagatgcaaaagatggaataccatgcactgctccccaaataaaaactaatctacaaacagcagcaggaacagaggcagttaatacacaggggatnnnnnnnnnnnnnnnnnnnnnnnnnnnnnnnnnnnnnnnnn

SEQ ID NO: 490598 - DNA, 594 bp, Homo sapiens
tgtgaatccatctggtcctggattgttttgttgttggcaagtttttttgattactgattcaatcttgctgcttgttattggtctgttcaggttttctgtttcttcctgatttaatctaggagagttgtatgcttccaggaatttatccattttctctagatgttctagtttttttatatacaatttttgcaattatatttgtaattgatgttactctggctttgtttgctgttgttcctgatggctattatgtttgttgtgttttattttgtctttttctaaatatttatttgacaatatttttaawttcctcaacaaaattgatagactttggctttctaccttttcactatttcctttttttttttctttttttttttttttttttttttgagatggagtctcgctctgttgcccaggctggagtgcaatggcacgatctcggttcactgcaagctcagcctcccgggttcacaccattctcctgcctcagcctcccccattatttcatttttgtttctttttattttcctgaaaaattatccatttcattaacactttcaagtgaattaaaatatatttttttaaatatta

SEQ ID NO: 490599 - DNA, 594 bp, Homo sapiens
tgtgaatccatctggtcctggattgttttgttgttggcaagtttttttgattactgattcaatcttgctgcttgttattggtctgttcaggttttctgtttcttcctgatttaatctaggagagttgtatgcttccaggaatttatccattttctctagatgttctagtttttttatatacaatttttgcaattatatttgtaattgatgttactctggctttgtttgctgttgttcctgatggctattatgtttgttgtgttttattttgtctttttctaaatatttatttgacaatatttttaaattcctcaacaaaattgatagactttggctttctaccttttcactatttcytttttttttttctttttttttttttttttttttttgagatggagtctcgctctgttgcccaggctggagtgcaatggcacgatctcggttcactgcaagctcagcctcccgggttcacaccattctcctgcctcagcctcccccattatttcatttttgtttctttttattttcctgaaaaattatccatttcattaacactttcaagtgaattaaaatatatttttttaaatatta

SEQ ID NO: 490600 - DNA, 594 bp, Homo sapiens
tgtgaatccatctggtcctggattgttttgttgttggcaagtttttttgattactgattcaatcttgctgcttgttattggtctgttcaggttttctgtttcttcctgatttaatctaggagagttgtatgcttccaggaatttatccattttctctagatgttctagtttttttatatacaatttttgcaattatatttgtaattgatgttactctggctttgtttgctgttgttcctgatggctattatgtttgttgtgttttattttgtctttttctaaatatttatttgacaatatttttaaattcctcaacaaaattgatagactttggctttctaccttttcactatttcctttttttttttctttttttttttttttttttttttgagatggagtctcgctctgttgcccaggctggagtgcaatggcacgatctcggttcactgcaagctcrgcctcccgggttcacaccattctcctgcctcagcctcccccattatttcatttttgtttctttttattttcctgaaaaattatccatttcattaacactttcaagtgaattaaaatatatttttttaaatatta

SEQ ID NO: 490601 - DNA, 641 bp, Homo sapiens
gctgcccaccggcatgctgctaggtaaccagaacgagcctgctgcatctgggatttaattactaagttacrctgatggggtgggcagatcctggaggtagaggggcaaatgtttggaaaaagtaaatgatatgtactcggatatctgactctcatacatacatgcatatatgtgtactgcatagaccatgtacatgcgtgtgcgacataagcaacaagtgcaacacaacacaaaaaaactaatcctaccacagtggctgctctgtggctccattgttttccaagcctgtccatttgcgtgtgtaaatttcacccactgataaccatatcatacacataattgtgtgttctgctcccttgagatctacaaaatctaaatctaaagcattttccatgttgctacatagtcttcccaatttcaatcccctactgaaatacttaaaccaaatgcctacaaaaagatagtatttggttacctttttgcttctataaataatgctgtaacgaacatctttattaggattcatacggcttttttcttttttgggattatatccttaccataaattcctaggagccatataactggaacaagaacataacattttttcaaattgtattgtttctaaattggttccaaat

SEQ ID NO: 490602 - DNA, 526 bp, Homo sapiens
ggagaatggccatcagtcagaattctcttaaacaggcaactggcctgtgcccttgtgaaggcacctgctctcctgcaaggatggacctgagatgcccaacatcctgctgggctcactgaggctgagccccccacgctctacagtcagcatccccatcccaacaggatcctcccagccagggctgcacctcctctgctcacctttgccatctcatccttccgaccccatgcaggggaggtcacgtccactggaaggccatcccttcccactgggacagaaatcgtgcatcctccctgcatgaaagcataaagcccttagtctccatccattacggaagtgcatggccttgctaggctgctttttatataccaactggataattcaaacctgaatgccacctcttctagggccagaacctcgcctaacactcgattatatccagagcctagcacagggtattaaccctgagagaaagcttggactctgggtgcagtgattggcayggaagagctaagctcctttgctc

SEQ ID NO: 490603 - DNA, 544 bp, Homo sapiens
gggccttctccccaccacacacagcacaggctggaagacatgggggggaaaccaccagcttcgccttctgcccattgggtcagccctcctggtgcacctaaaccacaccgcatccctgcggccctctgagccctggggccactccaaacatcatcccaaaacctgcctttggggccctcttgtcttagaaccaaatgggccctactccggaattctctgtcctcctgcacacactcctgttcccctcacactgtcctcagcaatctttgaaagaacccctcacacctctagaatttcagcaaagtccaaactccaagtacctccactccaacccctgccacttttacaaacacacccctgccccctgcagacgcctggaccaggcccgctcctttctcctcctcctaggagagtagcgtctcctcccacctgcgcctygagtgcgctcagtcagttgtttgtatctgaggtgaaggcggtaaagaatgaggcgcacgggctgctcctgcattttctgccccattaccctttgttacttcatcta

SEQ ID NO: 490604 - DNA, 548 bp, Homo sapiens
ccctgacaagtcggtcaccttctgagccttcatcttctcatctgtgaagtaggagaacggttcacgccacagggctgctgtgacactcacgaggtgttagcagagcacctggccccatgtggccccagagagaaagggtgttggcggcagtggcagtggaggtagaggaagagaagarggtggtgtgggctgggcaggaggagggaaggacgggtggtgaacggcaggggaagctggggagagtgctggcggccgttctgctatctagtgctgtgtgaaaacctccctgaaggctcaaacagcacgttattccaccatgtgcttccaagggttgtctgggcagagctggggcattctccttaatgtacctcatgatgtgagagtcacatgaaagttgagtctccttcgtctggagactggacagtgtggatacccaggatcgctcgcgcatgtgactggagttgctgctggccgtcgtgggcactgagcggggcctatgtcgaccggacaggctgcacctggcctcagtgcagcttctcagacctggc

SEQ ID NO: 490605 - DNA, 548 bp, Homo sapiens
ccctgacaagtcggtcaccttctgagccttcatcttctcatctgtgaagtaggagaacggttcacgccacagggctgctgtgacactcacgaggtgttagcagagcacctggccccatgtggccccagagagaaagggtgttggcggcagtggcagtggaggtagaggaagagaagaaggtggtgtgggctgggcaggaggagggaaggacgggtggtgaacggcaggggaagctggggagagtgctggcggccgttctgctatctagtgctgtgtgaaaacctccctgaaggctcaaacagcacgttattccaccatgtgcttccaagggttgtctgggcagagctggggcattctccttaatgtacctcatgatgtgagagtcacatgaaagttgagkctccttcgtctggagactggacagtgtggatacccaggatcgctcgcgcatgtgactggagttgctgctggccgtcgtgggcactgagcggggcctatgtcgaccggacaggctgcacctggcctcagtgcagcttctcagacctggc

SEQ ID NO: 490606 - DNA, 548 bp, Homo sapiens
ccctgacaagtcggtcaccttctgagccttcatcttctcatctgtgaagtaggagaacggttcacgccacagggctgctgtgacactcacgaggtgttagcagagcacctggccccatgtggccccagagagaaagggtgttggcggcagtggcagtggaggtagaggaagagaagaaggtggtgtgggctgggcaggaggagggaaggacgggtggtgaacggcaggggaagctggggagagtgctggcggccgttctgctatctagtgctgtgtgaaaacctccctgaaggctcaaacagcacgttattccaccatgtgcttccaagggttgtctgggcagagctggggcattctccttaatgtacctcatgatgtgagagtcacatgaaagttgagtctccttcrtctggagactggacagtgtggatacccaggatcgctcgcgcatgtgactggagttgctgctggccgtcgtgggcactgagcggggcctatgtcgaccggacaggctgcacctggcctcagtgcagcttctcagacctggc

SEQ ID NO: 490607 - DNA, 605 bp, Homo sapiens
cccttcaatatcaatgatgataatggaatatgctggcaggtcccattgaacacctctacaataacacagccaactaccttgaaggataaaaagttaatagatgtcgaaagggcctgaggttttgaccatggcttttcagctctaaagagtccccctaaagtcatactctgaggaggtctggcttcaggtagtataaacattatcactttgacaagaaagagctactttctctgcaatctttttaaacacagtagattttaggtcatccttaatttttttacctcacagtagagagggggtcgctgacctacatacagagccattccattttctgactcttgatgacaatggtctccacacctagggaccccgttctgctccatccccttttagttggcaattcrccatgggcacaggactttaaaacctttgagtctctgagttcctgggattaaaaaaaaaaaattacctgtgcttccttccaaccagcaagcttcagaattcagaattcaacacactgaaagggatatcagagctttaatctaggagccttttgaagagattttcccaaaaagaaaagttacagtaaagtaactgtgttcaca

SEQ ID NO: 490608 - DNA, 597 bp, Homo sapiens
gcttccagccggcctcactgctactatttccaaggtcagtctccaaaagctggttgcccaatcaggcgggaatgagtcagggccccaccaggctggtggaggtgggtgggagcttgggggacttgcacaagcctggacygctgagatcaccagagaagcccagctgcccacgaagccctagaatggctcctaaaaagacttggagaggggggtgccaggcagtaggatttctggcttcccctctggcttggtcctcgtatgtgccctgtcacttcccagaccatgtattaacaggaataatgggttctgtccctgtcagcccctgtgggtaaggggagggccagggaggtgttggagccaatgcccctgacatccccaagcttgactttatgttccaggaccagcacctgcctcttctgggctggagagtggcatcagtgcctctcaggggcctgctggtccaacctgatctggtggcttccctgggcctctgtcagggaggaatggggccctttccagggtagcattggcctccggatcaccagccaacttgggtttaggggagggggataagggatgctgggtgtccagcccagg

SEQ ID NO: 490609 - DNA, 375 bp, Homo sapiens
gctttttggctagctcactggggagctagccaaattgggagatttccaatctcaaattggaaatattttaagccartggttttcaggtttcaacatggataaaaaatcacctggcaggctcattaaaacacagagctgagcctgattcgagttttgatgcaaaatgtttgaggtggggcctgagaatttgcatttctaacaagctctcaggcaaggtcaatgctgctggtctgggtgtaacacattgagatccactgctttaaacccggagcagaatggctgtaaggacctttgcaaaaaggaccccacagacacaatctcctttacggccatcatggagctcctgccctatctcctgccacttcccaatatatc

SEQ ID NO: 490610 - DNA, 330 bp, Homo sapiens
tgcaggcagacccatggcccctggagacattggctgaggagcttccttggcctccttcacttggaccttggcccaactatgtcctgggrtggattggaggaggggcgtctagcattttggatcctgaatattgtattctccagcctggcctgcctttgtttttagttgcttttatctcttacaaaaccttatttcaccctcacaaacatttgccaaatgtgcgtgtgaaagatcttgaaacagggattgcttcaaggtctgaagcagttgcaaaatattttgagcaatacagatcatctctggtcttgtgactgttgtagaaaagctttt

SEQ ID NO: 490611 - DNA, 330 bp, Homo sapiens
tgcaggcagacccatggcccctggagacattggctgaggagcttccttggcctccttcacttggaccttggcccaactatgtcctgggatggattggaggaggggcgtctagcattttggatcctgaatattgtrttctccagcctggcctgcctttgtttttagttgcttttatctcttacaaaaccttatttcaccctcacaaacatttgccaaatgtgcgtgtgaaagatcttgaaacagggattgcttcaaggtctgaagcagttgcaaaatattttgagcaatacagatcatctctggtcttgtgactgttgtagaaaagctttt

SEQ ID NO: 490612 - DNA, 585 bp, Homo sapiens
ctgtctggtccttcttctcttgattaaagttgcttaagccacaaatctgaagcttaaaaagaaaamtaaatactaaacagaggcctcatattttaatcatatttcaaagcagctactttccccatctgctcttcaaacaaatagacagcttagtttacagcactctgttattctgaataactacaggataactgaaagagagtagaaaaagtcatctcaataacagttatatacctttgacattgtaactgttcttgttcacaagttccagtgcacatacaacctcttttttctcatctgcctcctacctaatgtcaaaacatttagaaatgaaagctgattaagatcttatcatgttgaattttgtaaacatactaaaagaaagaatgatattaatagaattgacatgagaaaattggactaaactgtttgaagcatctactttctttattgtagatgtaaattagccacacttaagcaaaatactagatttacaaatctcttgcttatgggccagattcagccaacaggcttgtattgctggcctcacataatctttcaaaattaggaaatattacattgaaa

SEQ ID NO: 490613 - DNA, 585 bp, Homo sapiens
ctgtctggtccttcttctcttgattaaagttgcttaagccacaaatctgaagcttaaaaagaaaaataaatactaaacagaggcctcatattttaatcayatttcaaagcagctactttccccatctgctcttcaaacaaatagacagcttagtttacagcactctgttattctgaataactacaggataactgaaagagagtagaaaaagtcatctcaataacagttatatacctttgacattgtaactgttcttgttcacaagttccagtgcacatacaacctcttttttctcatctgcctcctacctaatgtcaaaacatttagaaatgaaagctgattaagatcttatcatgttgaattttgtaaacatactaaaagaaagaatgatattaatagaattgacatgagaaaattggactaaactgtttgaagcatctactttctttattgtagatgtaaattagccacacttaagcaaaatactagatttacaaatctcttgcttatgggccagattcagccaacaggcttgtattgctggcctcacataatctttcaaaattaggaaatattacattgaaa

SEQ ID NO: 490614 - DNA, 601 bp, Homo sapiens
tataaaacaaaactctatgtagaaatgcagtatacaatatatatgccatgtgtgacactccttagatgtggcccttttgtgcagtgtcagtctacagactgcacatggctgccctgttgttaaatgaaatctagatccagtggggtaggctcctggcataggtgctcttttaaagctcccctagtgatttgcagggtgcrggcagaagccagcaactgtttacttacagaagttctctgtgaaaaatgtggcaacaaattatgtaggtaaatcaaagaatatttggagtcatgaatatagactctatagactactgcctaacattaccctgcaaaggtagcccacttatcatagagacgactcagtagaacttggtcacctctaattagtcacattaagtgacacatgcagagttttggaagtgatgcctaaggaaaggtattaatttctgatcttttctttttacctacagcttgttgaccaaggaagagaagaaatgggtcactagtatgaatgagattgactggctccacgttaaaaatttatgccagttagaatctgaagagaagcaagttaaaatatcagcaactgttaacacagt

SEQ ID NO: 490615 - DNA, 582 bp, Homo sapiens
gtgactctcattttacaggggacaaaacaaaggctcaggaaactcaactgacttgtcccaaatcttacatgtagggccaggcacggtggctcaagcctgtaatcccagcactttgggaggccgaggcgggtggatcacttgaggtcaggagttcaagagcagcctggccaacatggtgaaaccccatttctactaaagatacaaaaattaaccgggtgtggtggtgggcacctgtagtcccagctactcaggaggctgaggcaggagaatcgcttgaacctgggaggtggaggttgcggtgagcygagatgatgccactgcactccagcctgggcgacagagcaagactctgtctcaaacaaacaaaccatcttctttacccaccagaaggccctagggggtgactgtgagctcgcgggggattgggggtggccatgtgggtgtgaagcacaggcacagatggcagcccctgccctggttcactccggtccccttgctgcccggccatgttgtcctgcaccacaaggcaccacctgtgtaagtgccatcacaccttctttgtgccacaatgccagcttagga

SEQ ID NO: 490616 - DNA, 543 bp, Homo sapiens
tcacccaggttggagtatggtggcacgatattggctcactgtgacctctgcctcctgagttcaagcaattctcctgcttcagccactcaagtagctgagattacaggtgcatgccaccatgcctggctaatttttgtacttttattagagacggggtttcaccacattggccaggctggtcttgaactcctgaccacaagcaaccctctctccttgccctgctaaagtcgtgggattacaggaatgagccactgcactccgtcrtgcctgggatttttaaccactgtactccaatgatctaactgtaacaaaactaatagtattttagctatattattatattaaaattacagcaaaaataacaatgctgacactgattgaatattgacctatatgccagctactgccccaaatgctttacagaatcatcacttttattcctttcaacaatccagtgaggtaggttctgttattattacttgccccaatttacagacaagtcatctaaggtacaaagaacaaagtaacgtgcccgaggtcaca

SEQ ID NO: 490617 - DNA, 547 bp, Homo sapiens
cattgttttcttttcattaaacaaatgtatatatggcatattattccggtttcaactagtctcctggttcccttcatgcccctttcctgtccatcttcccatttagagcggtgccatccaatagaactttctacagtgacrgaaatgttctgtggaacatggtggatagttatgtgggtttagaatgctaccatttttaatacacaagggtggccactatctaaaccttgtttagaacacgaaagtatggtttatagaataagcaatttgaattcataattcttggccccacccctgatagagttacttgcccctgtagtcccagctactcaagaggctgaggcagagaatcgcttaaacctgggaggtgtagtcagcagtgagctgagatcacatcactgcaccccagcctgggtgacagagcaagactccatctcaaaaaaaaagaaaaaaaaaagaatttgccccagagagctgggtttgggctgcttatggaggtcatccctgcttccactagatccttgactttgagtttgggagttttagc

SEQ ID NO: 490618 - DNA, 547 bp, Homo sapiens
cattgttttcttttcattaaacaaatgtatatatggcatattattccggtttcaactagtctcctggttcccttcatgcccctttcctgtccatcttcccatttagagcggtgccatccaatagaactttctacagtgacagaaatgttctgtggaacatggtggatagttatgtgggtttagaatgctaccatttttaatacacaagggtggccactatctaaaccttgtttagaacacgaaagtatggtttatagaataagcaatttgaattcataattcttggccccacccctgatagagttacttgcccctgtagtcccagctactcaagaggctgaggcagagaatcgcttaaacctgggaggtgtagtcagcagtgagctgagatcacatcactgcaccccagcctgggtgacagagcaagactccatctcaaaaaaaaagaaaaaaaaaagaatttgccccagagagctgggtttgggctgcttatggaggtcatccctgcttccactasatccttgactttgagtttgggagttttagc

SEQ ID NO: 490619 - DNA, 587 bp, Homo sapiens
ctggctcaaatgtgggtcctgtggggcacagcattccctgtcgtgccagattaatgtggcattctgtggaatggaataaatggaatgtggaaatggaataaatgggctaacatagaataaataccaaaactcaactgtattatctaagtcagttgaattaagtaattatgatttgctttatttatatgaagtactttaatccatataaagtttatattttgaatacaaatctgtataactcaatttgtgaattactgttactttccccagttttaaagtatagaaatatctataagcatattacttcaaagttctatgatatgctagtaataaagctttcttccctctctcagatatgcaatttcatcagcaccagaaagtttgggawgtttttcagatgagtaaaggaccaggtaatattttctgtttacaattgaatatttgatagtttggcttggactcaggaagcagaggttacagcgagctgagattgcaccactgcactccagcctgggtaacagagcaagactctatatccaaaaaaaaaaaatagcagtatgttcctcatttctttcaaaatgaggtga

SEQ ID NO: 490620 - DNA, 531 bp, Homo sapiens
tttgtgtgatttgatcattattactctggaattatacaaaatgcttagtttcatggtactttacgaatgtatttactgaagacattgtagctcccttgatttttctttatttttttttcactttggcaggtgaagatgttgacctttttgatatgaaacaatttaaaaattcgttcaagaaaattcttcagagagcattaaaaaatgtaagaataaaattcatcttttacataaaattcaatgtcatgacgtctgtgcacttaaaatttgctactatcatagtttttttttaatttgtaagaaattcagttagtaatagttcatacggttctactccatatcagaaacacactgtaaatattatgaaaacttccctttcctctctcctgtccattcagggcctgaggcttctttttccagaggagctcagtccaacagagctytctgcagtgatggaaatgctctgtattggcactgttcagttcagccacatgtagctgctgagcacttgcggctagtgtgactgagcag

SEQ ID NO: 490621 - DNA, 649 bp, Homo sapiens
gctgggaatcttcaactacgaggaggtaacggggtgagggcacggttgctgccatctatacggagcctctgtgaagattagaaaaagcactccctgtccaccccgccccgtgccatcccttgggcccatggcctggcaagcaccgggcaagtctggacaaacagaaatgttccycctcctctaggtagacacccctgctagagcccacagcttgcccttgggatccctgctcacagaggaacattgggtgctggctactcaggggagggctgtacaggggtctcccaaaggaaacaccccctaccctgggcagaaagggcagccgtctttggaggtggcagccgtggaaagtgaggggctgcccgttctctccttgcccagctctctcagccccaggcagaggggaccttccaggctctaggctctgcctaactctgaggaccattttccctctgagggttcccagtaggggaagtggctactgggacccaggacactggatgaccctggctttctttctgacaggtcctggactatagcccagtgcttggctccttcctcattggatcctgcattgtttttatgacatttgtggtgctgaacctgtttatctctgtcatcctggtggccttcagtgaggagcaaaaat

SEQ ID NO: 490622 - DNA, 649 bp, Homo sapiens
gctgggaatcttcaactacgaggaggtaacggggtgagggcacggttgctgccatctatacggagcctctgtgaagattagaaaaagcactccctgtccaccccgccccgtgccatcccttgggcccatggcctggcaagcaccgggcaagtctggacaaacagaaatgttccccctcctctaggtagacacccctgctagagcccacagcttgcccttgggatccctgctcacagaggaacattgggtgctggctactcaggggagggctgtacaggggtctcccaaaggaaacaccccctaccctgggcagaaagggcagccgtctttggaggtggcagccgtggaaagtgaggggctgcccgttctctccttgcccagctctctcagccccaggcagaggggaccttccaggctctaggctctgcctaactctgaggaccattttccctctgagggttcccagtaggggaagtggctactgggacccaggacactggatgaccctggctttctttctgacaggtcctggactatagcccagtgcttggctccttcctcattggrtcctgcattgtttttatgacatttgtggtgctgaacctgtttatctctgtcatcctggtggccttcagtgaggagcaaaaat

SEQ ID NO: 490623 - DNA, 624 bp, Homo sapiens
ctgacagccacccaaaccaagccttggttggctccagcctggcgcaagtcattgctctaccactggccgccctcctctcttggtctcaacctcttccacccccacctggcctctgacgcttgaaatcttcttggaatcttatccaggctcttccttgagtccttgttggctaatcttggtcctacttcttctgagctctctgaaggtgctggcctaactcatgccagagtcattctccaacccccctcacccacccaccagctcccaggaccctccccctattctggccactaaatcataacatctacaaaggtagagaccatgtctgttgtgtccctggctatacccccaggacgtggcccagggtagatgctctgtaaatatttgtggaaggaatggatgaatcactgacttatctggctatgcccctggctatcttccatccggccatccttttagtgaggttcatatgggtggagaatttttctcagtaaagaaacagtgaccactgccaccacctaccttagccatggcctgggtctgctgcgtgtcccctgcaygattggtggcagaaataactactgtcagcacaaagtcattgttctcctctccaagtggcagata

SEQ ID NO: 490624 - DNA, 630 bp, Homo sapiens
taaaccatggttctcacagggcaatgaaataagcgatgagtgaagcctgcacacttagtgggctgtgatataggaaaggaaatccaagcttggaaaaccaaaaccttttctttttcttttaattttttagagacagggacttgttctgttacccaggctggattgcagtagtgccatcatgactcactgcagccttgaccccttaggatcaagtgatgctctcatctcagcctccctagtagctgtgaccacaggtgtgtgccaccagaccaggctaacttttaaattttttgtagagatcgagtctcaccttgttgcccaggctggccttgaactcctggcttcaagtgatcctactgccttggcctcccaaagtgctgggattacaggtatgagccactgcatccagcctgtatttcttcatataarttggagatactgtctagtgtcctttcctttcgttttatttcctttaggcattccatgatggtttactttatctgattacttgactggatcatggagtgcccggattaaaacctatttctaggtgtgtttattagggtgtttctggatgagattagcatttgaataagcaaagccacggggcaaggctgcccgaggcttggg

SEQ ID NO: 490625 - DNA, 610 bp, Homo sapiens
tgcaagggaggttggggaatgaagtttctgcttgggtaaccaggggcgcagctaaaatgtagggggttctattactaaaaatatgaagaggagaagggaaataagaagaggaacagttagcagtggcttccaayttggtgtttttatgatgcatctaatgaaaaaagggaacagaagacagagaaaaaagtgacaacaataggaagaacaagaagatgggactggggagagaaagttgagggaaaggagggaggggggaaatatgaaggcgggaatgcagaggagtatgagtatatgaggaaaagagaagaggtgaagtaggatagaaagaggagaaaaaagtttagggaggcgtagaggagggaggaaaaaggggatggagaagtgtgacaaaaaataaaaagacaagagattaaagtggaagcaaagagaaggggtagcaaatacattctagaaagggggcaacatagtgaaaccccacctaaaaaaaatagctgtggtggtgtgagcctgagactacagtgagccatgatcatgtcattgagctctggcctgggcaacagagtgggaccctgtctcaacaaacaaacaaacaagcaaacaaataaaa

SEQ ID NO: 490626 - DNA, 610 bp, Homo sapiens
tgcaagggaggttggggaatgaagtttctgcttgggtaaccaggggcgcagctaaaatgtagggggttctattactaaaaatatgaagaggagaagggaaataagaagaggaacagttagcagtggcttccaatttggtgtttttatgatgcatctaatgaaaaaagggaacagaagacagagaaaaaagtgacaacaataggaagaacaagaagatgggactggggagagaaagttgagggaaaggagggaggggggaaatatgaaggcgggaatgcagaggagtatgagtatatgaggaaaagagaagaggtgaagtaggatagaaagaggagaaaaaagtttagggaggcrtagaggagggaggaaaaaggggatggagaagtgtgacaaaaaataaaaagacaagagattaaagtggaagcaaagagaaggggtagcaaatacattctagaaagggggcaacatagtgaaaccccacctaaaaaaaatagctgtggtggtgtgagcctgagactacagtgagccatgatcatgtcattgagctctggcctgggcaacagagtgggaccctgtctcaacaaacaaacaaacaagcaaacaaataaaa

SEQ ID NO: 490627 - DNA, 589 bp, Homo sapiens
tggccttcatccatgcaagtttctgtcaccacatctgtcaaggagcctccagccaagtattccataacaacccacagctcatctcccacgaggtaactgcaggaatatagataaagggtgagagagaacaatcagagtacactgagccatagcactgggtttcaaaggctaagcatatacacagagtgaaactacgtcttagcacaaagtaaagtaaaaggttctttactttggggaaaagcagaatctggggaacagaatcactaactttgaatctctcaaggatgctcctggagaaaaccaagtatayatgttctgtgaagccccaaagggcagaactaagatctctagcttgaagtgatacaataaaattatatttcatcacaacacaaaggaagacatcctaaaattagaaagactgacatgattcccacacctctagaagcatccaaacatttgacaaagataggatttagagtccatgttacccaaagaagagagagctactaaacctcccagagagtcctaccagatctgagatctatgagaccaagtattgggtcttgttcaagactctatcctcagagtc

SEQ ID NO: 490628 - DNA, 510 bp, Homo sapiens
acaggcgagagccactgtgcttggctttcttcttctaaatataaaatggtcaatgcagtaaccatcctgtcctatatggtgcagaatttactggcaaaatctccactacttctgagaaacagtagaataaaatctaaaagataggggataggacaagcgcggtggctcatgcctgtaatcccagcactttgggaggcaaaggcaggcggatcacttgaggtcaggagtttgagaccagcctggccaatatgttgaaaccccctctccactaaaaatacaaaaattagccaggcgtggtggtgggtgcctgtaatcccagctactagggaggctgaggcaggagaatcacctgaacatgggaggcaaaggctgcagtgarccaagatcgcaccactgtactccagcctgggtgacagagggagactctgtctctaaataaataaagatgggggggatttcctatcacatgttatcaatagttttaatgaaaatgttattatcttaaataaa

SEQ ID NO: 490629 - DNA, 410 bp, Homo sapiens
aactggaaaagtttgtgcttactcctagaatgtaaccctgtaaggttccaaatcaaagtgtgttgtgtttacgagattaccttctcccctgtagccctgtgaagtttacaagagcttcctgtacctcagccaatccttctagrgaaaaattaccccaaatgctacactatcactggatttccttccttatttagatcttggcttcatagttcttcactgtctggtagatatctgatgctttcatttagatttttcaaaacattttgtctagcttttctagttgttccccttagctagaaagagcagaattttttggtagggtaaccgtaactctctcttttcccctctgtgtgtgttgtttctccatttcaaactgtgcgagggttcctagggcctccaccatcgatggt

SEQ ID NO: 490630 - DNA, 494 bp, Homo sapiens
ctgtctaggcagcaggcaaggtgaacccattgggtagttgcaaatttggtgacttgtctaggattgcccttgtggtacctgcccatggttcagtagcctccctccagtgatggatccagaggccagctcaagtgattgagacatgtatttaagatcattatttttagaaagtaccaacttagacacacctgaaactgccagacacacctgacactacctgaaactacagacacacctgaaactayaattagtgcaatgtattacaattactacaattagtgcaatgtattacactacactacaattacactaaaactacaattagtgcaatgtattacaattactacaattagtgcaatgtagtttcagacacacctgaaactacaattagtgcagccataccagacacacctgaaactacaattagtgcaatgtgaatacttcatattatcatcattacgaaagcaactgagtgttttttctttaaattcaaa

SEQ ID NO: 490631 - DNA, 494 bp, Homo sapiens
ctgtctaggcagcaggcaaggtgaacccattgggtagttgcaaatttggtgacttgtctaggattgcccttgtggtacctgcccatggttcagtagcctccctccagtgatggatccagaggccagctcaagtgattgagacatgtatttaagatcattatttttagaaagtaccaacttagacacacctgaaactgccagacacacctgacactacctgaaactacagacacacctgaaactataattagtgcaatgtattacaattactacaattagygcaatgtattacactacactacaattacactaaaactacaattagtgcaatgtattacaattactacaattagtgcaatgtagtttcagacacacctgaaactacaattagtgcagccataccagacacacctgaaactacaattagtgcaatgtgaatacttcatattatcatcattacgaaagcaactgagtgttttttctttaaattcaaa

SEQ ID NO: 490632 - DNA, 494 bp, Homo sapiens
ctgtctaggcagcaggcaaggtgaacccattgggtagttgcaaatttggtgacttgtctaggattgcccttgtggtacctgcccatggttcagtagcctccctccagtgatggatccagaggccagctcaagtgattgagacatgtatttaagatcattatttttagaaagtaccaacttagacacacctgaaactgccagacacacctgacactacctgaaactacagacacacctgaaactataattagtgcaatgtattacaattactacaattagtgcaatgtattacactacactacaattacactaaaactacaattagtgcaatgtattacaattactacaattagtgcaatgtagtttcagacacacctgaaactacaattagtgcagccataccagacacacctgaaactacaattagtgcaatrtgaatacttcatattatcatcattacgaaagcaactgagtgttttttctttaaattcaaa

SEQ ID NO: 490633 - DNA, 494 bp, Homo sapiens
ctgtctaggcagcaggcaaggtgaacccattgggtagttgcaaatttggtgacttgtctaggattgcccttgtggtacctgcccatggttcagtagcctccctccagtgatggatccagaggccagctcaagtgattgagacatgtatttaagatcattatttttagaaagtaccaacttagacacacctgaaactgccagacacacctgacactacctgaaactacagacacacctgaaactataattagtgcaatgtattacaattactacaattagtgcaatgtattacactacactacaattacactaaaactacaattagtgcaatgtattacaattactacaattagtgcaatgtagtttcagacacacctgaaactacaattagtgcagccataccagacacacctgaaactacaattagtgcaatgtgaatacttcatattatcatcattaygaaagcaactgagtgttttttctttaaattcaaa

SEQ ID NO: 490634 - DNA, 560 bp, Homo sapiens
ctgggctctttcaaatgcaggatcttccctgtattagcttaaatcccctaaaatcacgaaacaatttcgtgaaactggcatatttctcgaagcagaggagaaaataaaaccaccctaaatcttaccaaatataattaactttaaaactcatcagacaagcgacaactttccatatggctgggcttgagtggaattcgaatcccagggaaaaacatctccacaatttcctgtaaccctcaagagagaagcagcaagtctaggaatacaaaagcaagaacgatgaagaaagaggcacaagaagcatagtcataaagaagagaaggcccctgatggatctggattccacattctagaatgactgccccaggacagaccagaagctgggaaaagcctaaataaagagcctccaaactcaaagcagccagcatagccaaggtgccccccgtccctgtggagtcaggcccaggtagccacaccgtgagcttccccctaaacaagcaactgcaaagccgttcccaggccccagggagggcctgyccccagacacagggaaacccagc

SEQ ID NO: 490635 - DNA, 674 bp, Homo sapiens
gtgcacacagatgtcccagttgctacctctagcatctctcattttttcaataatgtgcaagctcagtaacatacatttttaagaagtgagaattagagatgtcaagaatgtaaaactatcaagggcgaaggttgaaattcaaaataggactgaggcttcaaagcccatagggttcaaatctcactacaacatcctagggcactgttcaagtgagatgtcacaagaccaggtgcatagtggaaatggcggggatcaaaacaattgtcttacccagatggatgttccaggatcacctttacttgccataatgctccttggacayaccagtaaaacttctcttcctccctctttgctccctttacagtacagaaaaaagtactagatgccagcaagatgataattattttctgagaatgtgaggaaagggagaaggctgaatgtcagtggaaatcacgttctggttactaacagaggaatttgattctggccgtcttaatacaaaatgggattcactagaatcctctcatgtgcttggaggaaaaactgaaagtccgtgcttgagaactgaacaggcatcaaggggggctggacagtggtgagcagaccaaagtgcatgccatgggaagattttggtcagcacaacatcatcattacccccaggaataatacagtca

SEQ ID NO: 490636 - DNA, 630 bp, Homo sapiens
aagttcagaatttacattagagttcactttttgtgttgtccagttccagttccaagaaaaaagtgtggaaagaagtgcattgtagagacatcctcataagcaaaatccccttataaaaccctcagatcttgtgagaactcactatcacgagaacagcatggaggtaatggcctccatgattcaataacctcccaccgggtccctcccatgacacatggggattatagaaactacaattcaagatgatatttgggtggggacacagccaaatcatatcactggaatctgagggaggttcaaggggacatgctgtatgactgcccagaaggacrggctggaagctcaggagggatttctatgttacagtcttgaggagatgtctcctttcccgggaaatctcagtctctgctcacaaggccttctctactaattggatgaagccaaccaatattatggaaggcaatctactttactcaaagtctactgatataaactgttaatcacacctgaaaaatacctccacagcaatatctaggctgatattggactaaacaactgggcactgtagccttgcccggttgacataaaatttaactgtcacgtccaagaaaagatacttgagaatgccag

SEQ ID NO: 490637 - DNA, 415 bp, Homo sapiens
tcctcatccatttgcaccttggcaagccctctactacatctgaatctcgaaatgggggataacctcttgggagagtctatgctagtacccttctagtagtagtttacaatctgccaacaaatcttgaagccttatttggttgatatcaatttgagaggtgggaggttcagtttccaaagagtcaggaaagagcattcatctaggyttgagaagcctccatttcctaactcaagagttctgattaggttgttggttgagtgacacaaggcaatcatctcacttttctgttcctgagcttctccttttatagaatgtgggcaggagtgtggagagggagaatttatttcatttcctgttttccaaacttactaaactgtggaaactttttcttttgcagcattgggcaaaactgatg

SEQ ID NO: 490638 - DNA, 405 bp, Homo sapiens
ctttgatctttttgacatcttatcaatrtgttcttctatgatttccttggcagagaaagagaaagcagagagaatcatgtgctggatcttaaatgcttctacgtggatgtagtaaatgtctcttctactttttttaaataagaagtgtattaaaatataatccatgtatcatataatttactcatttaaggcataaaattcggctgggtatggtggctcacacctgtaatcccagcactttgggaggttgaggtggggtgaatctcttgagcccaggagtttgagaccagactgggcaacatggcaaaaccccatctctacaaaaaatacaaaaattagccaggtgtggtggcacgcacctgtaatcccagctatttgggaggttgaggtgggagtattgcttga

SEQ ID NO: 490639 - DNA, 483 bp, Homo sapiens
tgcctcatctgtaaatgtagttaatattgtcctctcaaagatgttaggaaaaccagaagaatgtatttatgtaacacctagaacaagtataccctgcattaggcattatttgtttggttttacctgtccatctcaatgaacatgctgggttaatgaagtgtgttcatcaattttccctgatcgtagccttttagattgctctgggcagtgtttctcaaagtaggrgacacagaccacctacctgtgattgacaggaggacagaaatctgctctaatgcactctaaccttctgcacttttcactttttattgaaatatacatatagaaaggtgtatttattgtaagtgaacagctcagtggcttttcctaaactgaacacacccatgtaaccagcacccagatcaagaaacagaacattaccagcacccccgaagcctcctctgcaggcacactttaagaaccactggtctaggaagagcccag

SEQ ID NO: 490640 - DNA, 492 bp, Homo sapiens
ttttctccatcaagactaccttgtatttgtttaggcagccacctctcaacaacccatgaagtgtctggagctccaccctctgctcaagaggaacggcacatgacccaggcytatgccaatcagcatttcacattcctcatggttggttcaaaggtgagcaagtaattgaaatcagttaaattagtgccagcacaaagaggctctttcccccaccccagtattaccatggttttaatatggtttatccccacaaaactcacgttgaggcttggactccagtgtgacagtattgggaggtggtgcctttaagagatgattagatggttaagagggatgaatgccttactcttgcagtgagttcttgttctctcagttctggattagttcccatgagagtgggttgttataaagcaaggctgccttttgcgtttggtctcttttgcttgcccgtccacttttctgccacagtataatgtggcaggaggccctcac

SEQ ID NO: 490641 - DNA, 454 bp, Homo sapiens
ggcttcccccaaagtgaataatctgagaaagaaagaaagagaatgtccaagaaggaatcctcaatatcttctataacctaatgttagaagtgacataccattgctctgccatattgtattagcacaaaccaaacctggcacactgagggagcagactatataaggatgtgaacaccaggaagcaggcatcactgggaggcaatctcagaggctagtgacaccagagtgatacagtccccaatccccttgccctgaaacaacaaaacacaccattaacccttctaacttagacattttagaattctaagactttatttagctaagtgaaactatctttcacccaacaagatcagaaaggcaaatatttttgataaaatctagtaatagtatrattatttcttccatttattgagtgctcgctatgtgccaggtagtgggcagactttacatggat

SEQ ID NO: 490642 - DNA, 642 bp, Homo sapiens
ctgcgttactttataataatgttgtctaattttcctttcagcatcctcggggaaatggcctcatccatgtgttctgtacctattgcatttttagggaagtgagagaagttgcaagaatgggaacctgtcctagaccaagtggttcctgggaattttcctaacctggcttggctttgttctgcattctactgcataatcaccagaatatttttaccctagagtgtggtgggggggaaggccttgttaggrattaatttatttaaatgtataataaataattaatgaggccttggggggttaatgatatttctttcaggaagagtcttgtcaatcttatcacagtttcttccttgctgaaatccagagatttgtcatccaagttgggtgacagccccctccctctaggatttttccaattagcttaaaggatgacataaaattctcaaaacaaaaccaaggagaaggggtggactgtgttactaaatcaaacaaacaccttttaagagtgaagccccactgccccatcgcagaaaagaagtgctcttgtactctgtctctctttctctttcttctgtgtgctgcggtaaacacctctcactttgactgactcttcagatttcagattcaaagggaactcccctc

SEQ ID NO: 490643 - DNA, 524 bp, Homo sapiens
ctagaccatatgttctaaccctttttttaagttacagaccttttaagaatctgctgaagtattgtgagttttttcccctcccaaaacacaaacatagttctaatttcatatatcttcttaccacccttaggaccctatcttaagaacctaggtctagaaggttctttgtgtgtgtgtgkggggggggttttgttttgttttgttttttgttttttgtttttttttttgtaaccatgatgatctttttaacaagcaagtgactggactgtttgcaaaggaaagaaaacattttccaaggatagtaagtattctacgaattcctagccagcttttgtcttcttgaaaattatcaccataaggaaagaattaaattacactggcatttataagggattaggcacaccaggtaccctatgcttcaatcctgtcctttcatcttccttccatttctctgtcttgggacatggtaatttggaggtgagaccactctttcttgtccctgacaaagaatcctgtcatctgca

SEQ ID NO: 490644 - DNA, 635 bp, Homo sapiens
aactaggtggggccctcagcctagaaatagccaagggcacttctgcttctaaagacccagaaaaactaaggttgcctcacttttagagtgggataatctaaaggttcactgcttcttttctttgagacagagtctctctctgttgccccagccggagtgcagtggtgtgatctccgctcacttgcagcctctgcctcctgggtttgagaaattctcatrcctcaccctcccgagtagctgggattgcagtgcaccgccacacccagctaatttttacattttttttagtagagacagggtttcgtcatgttggccacgctaaactcgaattcccaatctcaggtgatccacctgccttggcctcctaaagcgctgggattacaggtgtgaaccactgcgcccagccacactgcctgatattttaattaatcccacccctgtcaccttcatctctccacccactctccagcagccactgcactcagtgcacaccatctccaggagggacaccacgagggctaagcctggagcctgacagcaaacaccctacccttcctcctagccgccaaggatttctctctcttatctcaatccccacactttccccgaaggcaaaggtcactgcaggaagctcc

SEQ ID NO: 490645 - DNA, 635 bp, Homo sapiens
aactaggtggggccctcagcctagaaatagccaagggcacttctgcttctaaagacccagaaaaactaaggttgcctcacttttagagtgggataatctaaaggttcactgcttcttttctttgagacagagtctctctctgttgccccagccggagtgcagtggtgtgatctccgctcacttgcagcctctgcctcctgggtttgagaaattctcatgcctcaccctcccgagtagctgggattgcagtgcaccrccacacccagctaatttttacattttttttagtagagacagggtttcgtcatgttggccacgctaaactcgaattcccaatctcaggtgatccacctgccttggcctcctaaagcgctgggattacaggtgtgaaccactgcgcccagccacactgcctgatattttaattaatcccacccctgtcaccttcatctctccacccactctccagcagccactgcactcagtgcacaccatctccaggagggacaccacgagggctaagcctggagcctgacagcaaacaccctacccttcctcctagccgccaaggatttctctctcttatctcaatccccacactttccccgaaggcaaaggtcactgcaggaagctcc

SEQ ID NO: 490646 - DNA, 635 bp, Homo sapiens
aactaggtggggccctcagcctagaaatagccaagggcacttctgcttctaaagacccagaaaaactaaggttgcctcacttttagagtgggataatctaaaggttcactgcttcttttctttgagacagagtctctctctgttgccccagccggagtgcagtggtgtgatctccgctcacttgcagcctctgcctcctgggtttgagaaattctcatgcctcaccctcccgagtagctgggattgcagtgcaccgccacacccagctaatttttacattttttttagtagagacagggtttcgtcatgttggccacgctaaactcgaattcccaatctcaggtgatccacctgccttggcctcctaaagcgctgggattacaggtgtgaaccactgcgcccagccacactgcctgatattttaattaatcccacccctrtcaccttcatctctccacccactctccagcagccactgcactcagtgcacaccatctccaggagggacaccacgagggctaagcctggagcctgacagcaaacaccctacccttcctcctagccgccaaggatttctctctcttatctcaatccccacactttccccgaaggcaaaggtcactgcaggaagctcc

SEQ ID NO: 490647 - DNA, 644 bp, Homo sapiens
aatatagtcctatgattatgggttttatgtttacttttattgatttttttccaattcattagtttcttgccctcaaaaaggcaagactgagttgttttgcaagctccttctaggactagtattcaagattaaagaatttatcattttagttgtaattaacttcaaacttgtgacaagctgaactaaatgtttaattttttttttttttttttttgctaagcaaaagattttataatgaagaaagatgagtaactagcctctcaatcttccatgactggcaggctgggccaggagagaagatggaacatgcggccaggcaggaattcacatgaccctaaagctgccggtggagctctcaaaagtccctagatccactgcgtccgtctctaggtggagcctggacaagggcatccttcacacacttcccaggggctcatatacaatgargatgagaactctgctgcccggaaggactgacattcttcggatatcctacaaacccttcctgaagctcacttttggatagatatgggctgtaccaaagacacttattattctaacatgcatcaagtaaagtaaaacaaggagagaggctgcggtgtgtgggtaggggatgcaggagaagctgtgtaaggtagtggaca

SEQ ID NO: 490648 - DNA, 335 bp, Homo sapiens
cccaatggtcttagaacaggatcccaagagttcaggttgaccagacggcaggacaggaagcagaggactgattgctctgggttctgagygcataattgttaagttcacagagttttccaaataaaatatacctttcttttgaaagatgctaattttgatacttgtagagtggcagacatcttgtcaggtgaaatgctaatttctgtcatgagttacctccctgtcctatgttaaccttctccaggttggaaacgagagtcacagaccttgaaggggcccgtggcttccctttgctggttgaaagctgatgtgaagtgagattgttgtataagcac

SEQ ID NO: 490649 - DNA, 605 bp, Homo sapiens
atgcactcatttaaagtaaacagtttgatggtttttagtatattcagaatgtctacttcaaggttaaaggctgtgaccaatgtggaaatcatgaaagcctacagaaacgatcataggttcattaggtctaacaataacactattccataactgatcttcacaggatggaagtttacatttatgaatacgtacttataaaatatattatgttttaagtgtatatatccatataaactatttatatttcagtcctagctctataccctcccatccttaaatgtagaatgataataatattaatcttaagtagaaattttactaaatccacaacatacaggctgatggattgcatatatcctaaatttaaatctattttttagcttaaactaaaaacctgatatttactgctttatttttagccatcttggggcattaatgttctaactgaaggaggttctcagaccacagaactgaagcaacaacggtcacatcctttcccttctgtgtctcagccrcagtgtgggtgtgaacaagaaacccaagcagcatcctcatcctatctgcagctacgatgaggactccaacacttcctcaaccacatgacc

SEQ ID NO: 490650 - DNA, 477 bp, Homo sapiens
ggtgaaaccccatctccactaaaaatacaaaaaattagctgggcatagtggtgcgcacctgtaatcccagctactcagaaggctgaggcaggagaatcacttgaactgggggaggcagagactgcagtgagacgagatcatgccactgcactccagcctgggcgacagagtgagactccatcaccaaaaaaaaaaaaaaaatctggaaaatatttggatgtagaaatgtctgtgtcgtatatggtaatgccaatagctattggaaaatatggaaaaagtcatacagcrgcagccttagaagtgcaacagcacagatgaccagcagccttgctgctctggaggggaaagaaggagcttattgctctccaaaagttccatccccagggaattgtcactatttcaactctcaggctcccaggaaaactccatctccaggtttgttggtccagaagaatcggtggcggttgtttaacattg

SEQ ID NO: 490651 - DNA, 415 bp, Homo sapiens
tgtcactagcacctaacacagtacctagaacatagcaaatgcctaataaatgtccataaattcatcaagactcatttttaatgcttacatataaattggactagtttcttaaaatgcgatccaggaaaaaattcacaaaaataaatagtttgctttaacaaacattmtagaactttaaaaacagttaagaaaaataaatgaagaaaagaaattagtgacaggaagaaagactctggaaaaacctccataaataaaacatgctttatggaaaaaatgatcccatgcaaaagacaactactaacatattcaccatctgtgtaagaactatgccccacccaattccaaaagaacaggaggtgactcagtgttcaaggaacaataagatcattgagagtaaaagaagatcgcctatttg

SEQ ID NO: 490652 - DNA, 530 bp, Homo sapiens
tgtttgaatggttgttcttttcccatgaagccccaggctgagggcataggctggctcagactgctcccctggtggcctgtggggcttggggtggtctctggcaggctttccccttcccttcatccctcttctttccctcccaagccctgactcagtccttgacaccgatggggacttcgatctggaggacacaatggacgtagcgcggcgtgtggaggagctcctgggccggccaatggacagtcagtggatcccgcacgcacaatcggtaacccgggacctctccatcgtcaacttcttcatcttcaccagaagaatcactcttgtggatgtttaaatcccaggaatcgcttctcttttgaaacaatactcataatgtgaagtgttaatactagttgtgaccttagtgtttctgtgcatggtggcaccagcgaagggagtgcgagtatgtgtttgtktgtgtgtgtgtgtgtgtgtgtgtgtgcgtgtttgcacgttatggtgtttctccctctcactgtctgagagtt

SEQ ID NO: 490653 - DNA, 533 bp, Homo sapiens
aatggtttctcccctccatttttgtggttttgggagctagtctctggaggatacaagattggggttgttgacaggacactgagtatcttctaggaaactgaggaaagacgtcctcttcagcattctctccaaatgagaggtgctgaagaatggagtcccgggaaactgggaggtaagaggaatgtgtgaatgttgtctgacagatgaagtgaggagtccggctccttcacagggaagtgaaggcgcaggggctcccctgctrcagaacatgtactgaatgcttcccgatgccaggccctttgctgagagtctcacatgcatcatcttcctggcagtcctggagacgggtggtactggtctctccattttacgtgtgaggaaatgggttcagtgacaacaccaggccaccctagtaagtggtgcctccagaacttgaactgaagttcaagttgtctgactccagcacttgtgtgcttaagctctgtgcagtagggatggaggaagtcctccctggggaagtgaggcagctcctc

SEQ ID NO: 490654 - DNA, 500 bp, Homo sapiens
ctgggctacctttaccaccctcgcttgccacttaaaagtgctgtgttttttggccttgaggtgtgtttgagggcttctggacagtggctagtatctgattcctacagtcttttgagtagagctaggatgtactttcttcacttttttgtttgtttgtttttgagatggagtcttgctctgtcgcccaggctggagtgcagtggcgtgatcttggctcactgcaacctctgcctcctgggttcaagcagttctcttgcctcagcctcctgagtagctgggattaacaggcgcctgccaccacacccrgctaatttttgtatttttagtagagatggggtttcgccatgttggccgggctggtctcgaactcctgacttcaggtgatccacccgcctcagcctcccaaagtgctgagattacaggtgtgaaccaccgtgcccggcctacttatttcactttttatcggacaacagaagaagccttccttattagggtcaaca

SEQ ID NO: 490655 - DNA, 542 bp, Homo sapiens
aagccgtgcagtttgtgggaacttctgtagctcttcagtgttctgggctacctttaccaccctcgcttgccacttaaaagtgctgtgttttttggccttgaggtgtgtttgagggcttctggacagtggctagtatctgattcctacagtcttttgagtagagctaggatgtactttcttcacttttttgtttgtttgtttttgagatggagtcttgctctgtcgcccaggctggagtgcagtggcgtgatcttggctcactgcaacctctgcctcctgggttcaagcagttctcttgcctcagcctcctgagtagctgggattaacaggcgcctgccaccacacccggctaatttttgtatttttagtaragatggggtttcgccatgttggccgggctggtctcgaactcctgacttcaggtgatccacccgcctcagcctcccaaagtgctgagattacaggtgtgaaccaccgtgcccggcctacttatttcactttttatcggacaacagaagaagccttccttattagggtcaaca

SEQ ID NO: 490656 - DNA, 502 bp, Homo sapiens
cacaatgttagagaaattcagtaataatataatattttacgtatatatataatattatgtattatataatagaaaataatgtattattttactgcctgcagagcaaacatggaaagggggcagtttggtcttttatttgctcatgacagcctcctttctctttcctttccacctccaacttatgaagggctggagttaaatttgttgctttctccttgccrcccatattgcacttctagttgttctctactagagcacttggagacttgccgtgttcgctgtttgcatccatctctgctgtttgaccgtcaataccttgagttctgggactgtgtcttatttatcttttcatccccaccactcagcacaatgtctggtgctttgtaaggccccccaaaatgtccagtgaatgagtcaattaactggacttcagggattgaagtgaatctctagggactagaggcctgactctaattagagaaagcttgagtttattctttca

SEQ ID NO: 490657 - DNA, 502 bp, Homo sapiens
cacaatgttagagaaattcagtaataatataatattttacgtatatatataatattatgtattatataatagaaaataatgtattattttactgcctgcagagcaaacatggaaagggggcagtttggtcttttatttgctcatgacagcctcctttctctttcctttccacctccaacttatgaagggctggagttaaatttgttgctttctccttgccacccatattgcacttytagttgttctctactagagcacttggagacttgccgtgttcgctgtttgcatccatctctgctgtttgaccgtcaataccttgagttctgggactgtgtcttatttatcttttcatccccaccactcagcacaatgtctggtgctttgtaaggccccccaaaatgtccagtgaatgagtcaattaactggacttcagggattgaagtgaatctctagggactagaggcctgactctaattagagaaagcttgagtttattctttca

SEQ ID NO: 490658 - DNA, 523 bp, Homo sapiens
tttatatttctatttctttccagatacagtccaatcaagatttgtacattaaagttctcttaatttttttgttttgaaacaatttttttattttgaaaacttatagagaagtttgaagaatagtataaagaaatcctgtataaacccacccagattcaccactgttaacatgatgccatacttgctctgatgttttttctgttccttctgtacaagtgtgcacacacacctatacacacatacatacatacatacacatatgtttttcatgaactgtttgagtggaggcctcagattacactttattttgaagataaayagaatcttctgggagattggttgtgtggtatgagagaaagtgagaattcaagaatgacgcttgggttttagcctaggcagttagacagaaggagttgcccttgagtgggttgaggaagcgtgagggaggagcaaacctggggagaagtccaggattttgattttggtcatgtgaatctggaggtatctattagatatctatgca

SEQ ID NO: 490659 - DNA, 587 bp, Homo sapiens
ggctctttcaattgccctgacataccagtcacacaatgcagacatttaaaatcatgcctcatctcctggarttttaagttgtttgtaaagaaaatacaagtatgtgtagacacagatgtttatacatgtgtatatgttcacacatatgcatatgtatattatgaaaatatgtgtatacacatacgtttgtatgcacatatgtatgaaagttaaatccatgtatgtcaaggatctcccatccaattgaaaacaaatgtagttgcacagacttctgaccaataatttgtattttctatttgagaagatgctcttgttccttcctcactcagtgaaggggccataatcagcctaacaatctgtcaatgcttacatttttccaataaatgccagtgaacttgcactcctgcataagaaaataagccatttcacaaaatccaaccccattacaatgcacacaatgaagttcttagctgactggctgatgccatatgagctgcatgctgattgcaagagttgtgagttgctcacacatcagctatattcatactgcagcacctcatgttctaaataacaagggcccttttttc

SEQ ID NO: 490660 - DNA, 587 bp, Homo sapiens
ggctctttcaattgccctgacataccagtcacacaatgcagacatttaaaatcatgcctcatctcctggagttttaagttgtttgtaaagaaaatacaagtatgtgtagacacagatgtttatacatgtgtatatgttcacacatatgcatatgtatattatgaaaatatgtgtatacacataygtttgtatgcacatatgtatgaaagttaaatccatgtatgtcaaggatctcccatccaattgaaaacaaatgtagttgcacagacttctgaccaataatttgtattttctatttgagaagatgctcttgttccttcctcactcagtgaaggggccataatcagcctaacaatctgtcaatgcttacatttttccaataaatgccagtgaacttgcactcctgcataagaaaataagccatttcacaaaatccaaccccattacaatgcacacaatgaagttcttagctgactggctgatgccatatgagctgcatgctgattgcaagagttgtgagttgctcacacatcagctatattcatactgcagcacctcatgttctaaataacaagggcccttttttc

SEQ ID NO: 490661 - DNA, 587 bp, Homo sapiens
ggctctttcaattgccctgacataccagtcacacaatgcagacatttaaaatcatgcctcatctcctggagttttaagttgtttgtaaagaaaatacaagtatgtgtagacacagatgtttatacatgtgtatatgttcacacatatgcatatgtatattatgaaaatatgtgtatacacatacgtttgtatgcacatatgtatgaaagttaaatccatgtatgtcaaggatctcccatccaattgaaaacaaatgtagttgcacagacttctgaccaataatttgtattttctatttgagaagatgctcttgttccttcctcactcagtgaaggggccataatcagcctaacaatctgtcaatgcttacatttttccaataaatgccagtgaacttgcactcctgcataagaaaataagccatttcacaaaatccaaccccattacaatgcacacartgaagttcttagctgactggctgatgccatatgagctgcatgctgattgcaagagttgtgagttgctcacacatcagctatattcatactgcagcacctcatgttctaaataacaagggcccttttttc

SEQ ID NO: 490662 - DNA, 519 bp, Homo sapiens
gcaagactctgactcaaaaaataaataaataaaaaataaaaatcacacaggccaaatcgtgcaggctagattcaacttggggctaccagttcacaacctgtgctttaaactctttaacagtataactatagtatgtggcagagatgggtgggatggtctactcttcttacactctaaactatattccatatagaatgaaagtctgctttcctgaagcatagaattttcatagggaaaattcactcttgcattaaattattaaataataatctaaygaacttttgctcagttctccgtttggaaaatatctaccaaataaaaatgaaatcaaatcaaatacattctatttgttattatgctaacaactggatggccattcattaagatataccgaggatttagtaaataccaagacatactactaggtgctgggaatataaatatgaattaagtcaaagtccttccctcaaggggctgacaagctaatctccaaagctgcttcccgatggatgggcaaca

SEQ ID NO: 490663 - DNA, 309 bp, Homo sapiens
aggtgaagtatggcttatacctatgacattaaaatttttctttcataaaatttaacacaatataaatcactgcgctgtatctcacaaattattacaaatgaagtgaaattatacagttggacaaatgagmagaatatatttaggaacaaatatagacttcaatctagtgttactttaaaatacataaatcactttacctctaagaacaaagtagattaagtgcctatttttccactcaaaactcagagctttcatgagatatgaacaaagctacaagatagacatattacactcatttttatcagtttt

SEQ ID NO: 490664 - DNA, 619 bp, Homo sapiens
atgatcctgagtttggctttgactatttaaaatatacaagaccaaaagcataatccaagaaagaaaaaaatcagtaagctgatcttcattaaaatttaaaacctttgttatgcaaaagagaataaaaggacaagagagaaaatctttgcaaaacawgtacctgataaaagactacctggtatccaaaatatgcaaagaactcttaataataagaaaacaacctagttaaagaaagaatgggcaaaaaatctaaacagacaccttgccaaaaaggacatacaaatggtaagcatatgaaaagatgttcaatatcatatgtcattaagaaaatgcaaattaaattgataagataccacagcacacctaataagctaagatctaaaatactaaaacaaaaaatgctggtgacaatgacaagcaatggaaactcatgcactgttggtggaaatacaaaatggtacaaccagtttggaaaacagttttgcagtttctgatgagactaaacatactcttattatatgatctggcaatcaagctgcatgattgccaaatcatgctaggtattaacccaaatggtttgaaaacttatgttcacaaaaacctacacacaaacatttat

SEQ ID NO: 490665 - DNA, 619 bp, Homo sapiens
atgatcctgagtttggctttgactatttaaaatatacaagaccaaaagcataatccaagaaagaaaaaaatcagtaagctgatcttcattaaaatttaaaacctttgttatgcaaaagagaataaaaggacaagagagaaaatctttgcaaaacaagtacctgataaaagactacctggtatccaaaatatgcaaagaactcttaataataagaaaacaacctagttaaagaaagaatgggcaaaaaatctaaacagacaccttgycaaaaaggacatacaaatggtaagcatatgaaaagatgttcaatatcatatgtcattaagaaaatgcaaattaaattgataagataccacagcacacctaataagctaagatctaaaatactaaaacaaaaaatgctggtgacaatgacaagcaatggaaactcatgcactgttggtggaaatacaaaatggtacaaccagtttggaaaacagttttgcagtttctgatgagactaaacatactcttattatatgatctggcaatcaagctgcatgattgccaaatcatgctaggtattaacccaaatggtttgaaaacttatgttcacaaaaacctacacacaaacatttat

SEQ ID NO: 490666 - DNA, 619 bp, Homo sapiens
atgatcctgagtttggctttgactatttaaaatatacaagaccaaaagcataatccaagaaagaaaaaaatcagtaagctgatcttcattaaaatttaaaacctttgttatgcaaaagagaataaaaggacaagagagaaaatctttgcaaaacaagtacctgataaaagactacctggtatccaaaatatgcaaagaactcttaataataagaaaacaacctagttaaagaaagaatgggcaaaaaatctaaacagacaccttgccaaaaaggacatacaaatggtaagcatatgaaaagatgttcaatatcatatgtcattaagaaaatgcaaattaaattgataagataccacagcacacctaataagctaagatctaaaatactaaaacaaaaaatgctggtgacaatgacaagcaatggaaactcatgcactgttggtggaaatacaaaatggtacaaccagtttggaaaacagttttgcagtttctgatgagactaaacatactcttattatatgatctggcaatcaagctgcatgattgccaaatcatgctaggtattaacccaaatggkttgaaaacttatgttcacaaaaacctacacacaaacatttat

SEQ ID NO: 490667 - DNA, 491 bp, Homo sapiens
ttcccaaagaagtgtagtcatctgagtactgctggaaagatagacctgctccctcatgccagcccccttccttagtgtgtctctgttccttctacattgctgtcagcttcacctctaatatggcttgcttttcctagatttaattggatccaaccatctataatagccatttattgattacaagtaattcaggatagggccaagaaaaaggcacaggtgagatacatgctgtcagtcctgggggaccccaccttccccaccacacactacrtaaggtttcctttttaagccttagaatatgggacatgattgcaaattcaagtggctttggggaaggtttacttattagcaagagttcattgcttgccaaatgtgctcctccaaaccactaaatcagatgttatagacgagagagaagaacctgcctcccttgggttagacatacttctttggggtgttttttctttagaaaacaactgctcagataaaga

SEQ ID NO: 490668 - DNA, 615 bp, Homo sapiens
tttccttataaaaactactccagctcttgaaacctagggaatcatattgttaccacctgggcttaaagtaagattaaatgagataatgtaacatgtttaacatttaaaaggaggaagttattgttattatgtattgtaacaaattgrtgaacatttcattgttttaggaaaagaagacccagactttgttgaaataatctgcctttaaggtaggctgagccttttaaatctgggaatgagtgactgttatttctgagatgaatagaattagcttttactgggcagagaaagtgaggaacgaagtaaggaagggagagataaggggatggagggaggtttcagaagcccatgcatctactgtgcgattcctcaggatgtttttgccacaaagctactataaacatcttaaacacaaactgcttagatccagtgtcattttgtggaaacctgtaaagagactgggttttgatattggcagtttatacaaacaagcaaattaagagaatgtaacctgaagaaaattagaaaaattatagagctggattttgaatctcaggagaccaagaaactgaatttgagccatgtgtaaggaataggtgggatccacagggacag

SEQ ID NO: 490669 - DNA, 589 bp, Homo sapiens
cctcaaatatctaggactcaaasaagaattttctggccaatgaatttaaaagggtcattcttccaactctattttcttagcttgctttaccttggttcctaacatttatacctacttgaaattatattgtattcattggtttttctctcattttgtaagtatattcatctcatgaaggcagagactatgcctgtttttcatggttatattccaagtcattagggtagtgtctgtaatgtagtggctgcataattaatacttccctactaaataaataataaatccaaaaggagaagcctaaactcattggaacacactcttactaggtgctgtcccctcagtgccttaatggccctcttttgtcatagtacaatgtaaacagatgctttcaagacacttttttcattctctctcatgacttctcttgcagatcaccgtatcaatccttcactccttcaaaacatggtgtccttaacagatttctgtgaaagacaagtcttttatgtattcacataactcactggtgacagtacaagtacacattccatgttcagatagtgttggttcctaaagcttgcctaggaaacta

SEQ ID NO: 490670 - DNA, 480 bp, Homo sapiens
ttagcaaaatcactactaaacttacgtaaaacttgttaatgatttagaattgtaaatatcttcctgtttcttgtcaagaacttcctttcaaattccatggtatagaaaaacatgattttgacatcagatagagtttgagtatcagacataccaaattcttaactcatgtattcactcattcacatatattttattatctactatgtattatcttgagtaagttatgtgggacattactgacatcttatatatagaatacaagcattttttgttatcaaggcaggggaaaagtgctaatatttgagatattgttaaaaayggaaagttaagctactgataagaactggtcatattagggtgatgctgtaattatacccatgtgatttcagtgacaagactcaggtacaattagaatgggaagattctgagagcacagaatagaaatggacttattgaaggaggaagacagttacagcctaa

SEQ ID NO: 490671 - DNA, 653 bp, Homo sapiens
tgataccagggcaagctttacagaggaggtagtatttgatatggaccttgattaaaaggtaggataaaagggaaggatttagagacagaaaaaaatgactccagagcacagactggaattatgaggctagtttggctgagcaaaagatgcatgcaggtgaggcaggtgactagagggagaagttattgaaagaagcagtttataaagctctctggagtatttgtatttataaagattactaaccctgggaaattagacaatgacaaacctagattgaaaagatattttaaagcagcagaatcctcaaatcctaccatctagatcaatttctactttgaccaactctacaatgtctgtttacccttgacttacacagacatgtgtcacttaacgacaggtataggttctgagaaatgcattaggagatttcattgttatgtaaacatcatagattgtacttacacaaagctagacaataaagcctactacaatctagcctgtatgactagactgctccgaggctaaaaatctgtactgcatgtactgtactgaatactatygttaattctaacacaatggtaagtatttgtatatttaaacacatctaaacataaaaaggcacagtaaaaatataatataaaagaaaaaaatgg

SEQ ID NO: 490672 - DNA, 622 bp, Homo sapiens
attttatggataaaggttcatttcaattagcttgtgccaaagatatctgaaaatgtaagcaaaacataagaaaataaaatgtttaaaaaggtgtctatgatggtcagataagcagagaatcataatggaaatgacaaaaccaggcagctaatcatgggactgcttaaagaacaagccacctagcccaaattataatagatttcccaaagattaccactttgttttttttaaatgcattatattgattccaagtctatgtttgggctgaaagacccaatatatctcttaattaaaagtaccaaaaagatgrtttttagttgaaaataaaatgagaattaatgttaataaaatcttaacataaagcctattacctacatggaaaattcctttatttatgactctaaagaggttaatgaacaacagtatccttttagagaactaagataatgcattcaacgagcaaaaaagaaaaaaaaataaagatgccacacataaacaatattaatcttaaatgtaaaggggctaaatgccccaattaaaagacacagactggcaaattggatagaatcaagacccatcggtgtgctgtattcaggagacccatctcacatgcaaagacaca

SEQ ID NO: 490673 - DNA, 500 bp, Homo sapiens
cttgtgttagatgttgaagataaaaattgttctacattgccgtctgtgccctgaaggagtttaatggattttcccyattcaccacctgtctattacaacaccaaggttggaattgaccatgcctttctttgtgccttgtaccttgcatgaacattaaattatttgttttcatgtctgccctcaattaataatctgtatctgtcaatgaatacttattaaagaatcatttcctatccaaagatatgagcaaatgcaaaaggcccagggagggaaggagcttggtatatggagaaacatatagtaggccagtgtgactaagacttggggaattaattcattgagatgaggtcaaagttaacggggccaggtcacatggaacaaagtttctgaacttcagcattattgacagttggaaatttttttgttggtggtagctttcctgtgcattgtaggctgtttatcagcatttctagtctctggccagtagaggcatttacacc

SEQ ID NO: 490674 - DNA, 304 bp, Homo sapiens
tatctgtcaatgaatacttattaaagaatcatttcctatccaaagatatgagcaaatgcaaaaggcccagggwgggaaggagcttggtatatggagaaacatatagtaggccagtgtgactaagacttggggaattaattcattgagatgaggtcaaagttaacggggccaggtcacatggaacaaagtttctgaacttcagcattattgacagttggaaatttttttgttggtggtagctttcctgtgcattgtaggctgtttatcagcatttctagtctctggccagtagaggcatttacac

SEQ ID NO: 490675 - DNA, 500 bp, Homo sapiens
cttgtgttagatgttgaagataaaaattgttctacattgccgtctgtgccctgaaggagtttaatggattttccctattcaccacctgtctattacaacaccaaggttggaattgaccatgcctttctttgtgccttgtaccttgcatgaacattaaattatttgttttcatgtctgccctcaattaataatctgtatctgtcaatgaatacttattaaagaatcatttcctatccaaagatatgagcaaatgcaaaaggcccagggagggaaggagcttggtatatggagaaacatatagtaggccagtgtgactaagacttggggaattaattcattgagatgaggtcaaagttaacggggccaggtcacatggaacaaagtttctgaacttcagcattattgacagttggaaatttttttgttggtggtagctttcytgtgcattgtaggctgtttatcagcatttctagtctctggccagtagaggcatttacacc

SEQ ID NO: 490676 - DNA, 494 bp, Homo sapiens
agcagaaaaccttggagcacttgtttctcatctcacatgaagtaggggagttaatgggaacctgggtgtgggaggggctgaaggatggggatcttgctttgtaatgtgagaatgtaasaagaacgtgaccttctactgttttcctaggttggaggggaccggccaaaccccaaggaaagtggagagaagaaaggcatggaggggttctgtggagggtgtggaaagggaggatgtgtaaatcccagcgtgggtttggagaacctaagtaggttggcttccctggggtttaaatcacagaggtgttgggaggtgagcccgaaatggaaataggccgcatcttgaagaatcccacgtgcggtgctgagaagtttgcatatggaacaatggactaattttaaacaggggaatggcatagtcagatttggatttccaacagattgctccagtttcagtggagagaatgaagcagaggcgggatctttggtggcaactgt

SEQ ID NO: 490677 - DNA, 580 bp, Homo sapiens
tgagcagaaaaccttggagcacttgtttctcatctcacatgaagtaggggagttaatgggaacctgggtgtgggaggggctgaaggatggggatcttgctttgtaatgtgagaatgtaagaagaacgtgaccttctactgttttcctaggttggaggggaccggccaaaccccaaggaaagtggagagaagaaaggcatggaggggttctgtggagggtgtggaaagggaggatgtgtaaatcccagcgtgggtttggagaacctaagtaggttggcttccctggggtttaaatcacagaggtgttgggaggtgagcccraaatggaaataggccgcatcttgaagaatcccacgtgcggtgctgagaagtttgcatatggaacaatggactaattttaaacaggggaatggcatagtcagatttggatttccaacagattgctccagtttcagtggagagaatgaagcagaggcgggatctttggtggcaactgtgcaggtgcaaggcgaggaaagtgcagcctaggtgagtgagagtaaaactagggaggaagagttggatatctgatatggcaggag

SEQ ID NO: 490678 - DNA, 631 bp, Homo sapiens
attggataattgataatattaagtaaatatttttaggtgtgatgacagtattgtagttatgtttttaaaatatcttgtctcttaattatacatatttaattattataggtgatatgacaytggtgatatggcttggtatttactttcaaataatcgaagaaaaaatggaagtggtggagttagtccattaattaatccattctctctacttgcatatgtatttaaatttttccactttcaaaaaagtaaaaacatccagaacaatatattcagatgcaccactagtgatcagattgtcaattggatctatgtcttagcttagctgctgatttctattatgaatcctaatgattcagcaagaatatgaggtcatcatatttagcatccttactttatgggggtaagaacttgagctcagagacgttaagtatttgttcaaggttatgttggttagtctcccaggtttgtgaccatgagttgaggtctggagttgagtaggaagagaatgtactgaacctagcctagaaaacctagttgagtacctgaggcaaagtagagccagcacatttctagagaggaaaggagacagtgaaaatgttgccataggaagatgatctaatatgcagaccag

SEQ ID NO: 490679 - DNA, 632 bp, Homo sapiens
tatctgcgcttctgacccacagaacaggaggataatacatttatgctgttataagcctctaggaatatgctaatttgttacagcaacaatagagaactacaatagaaaaagagtgaaaatacaatacagaatcctggaaaactaggcttggagagtgggatcctattagcagcagaagtggacactcctcaggaggctgaagtaggggaatcgcttgaacctgggaggtggaggttgcagtgagccgagatcgcgccactgccctccagcctggtgacagagcaagactctgtctcaaaaaaacaacacaaaacaaaaaaacaaagaagtggacactcctttagagggatctraataacttatgaagaagacaccagagacacaaaaatggtccagcagttttggaaatacttttggaaaatatgaagcttgttgctggtggtgagtgtgaatgtgtgtgtgtgtgtgtaaagaaaggcttcaaaactggaattaaaacatagaatatttgaaataacaatttctggttttgaataccttttctaaaggtaaagtcacatttttaaataagtctttataataagcatgtatttgaatgtgcaatttaatttaagtaaactaattacacattt

SEQ ID NO: 490680 - DNA, 517 bp, Homo sapiens
cctggcttaagtaaagtacacatttgataaatgttacccattactatttatgaaatgcttctctaagaaatcaatttcctattctctttcaagtcaattgactatacctttatttttagcccttgggataaagcttaccaagtctggatcagatagattgaacaatgggttgctggagataatcaataaatccagaaagtgttkctggggaagaagcttaacaaagaccctcttctcacatggccatagactgggggagtatgcttatctgatgaaggtgacctcatctcagccttccaagaacacattcttatcctttctcatctctggtggcagcccccaccacaaacgccttgagaccatagattctcttttctctcccccatcaactatgaacagacaaagatcctaaacttaaactgctgagaaagtttaaagggtggctcccctccccagttccgtgccttgaatggaagctcagtgtcaggacaataaacttgtcatcctgtttacattg

SEQ ID NO: 490681 - DNA, 348 bp, Homo sapiens
taaagaataatctgttagtgactttgaggrtgagcagtgtctagagcacatggtgtcggggagatggcatccctgacaaatgaactatagtgctcatttcctttttttttgccccagtggtccccatggcagcaatgccaacttgcagacccatcttccacattgctgattttttaagcacagacatgatcctgtgtctgtcccactcgaaaacattcaatggctccctgtttcctattggataaaatcatatctcagaagcaaacatcctaacatctgctataatcagatgttctgctcttgctcctgaagaagctatattgctcagtgatacagtgcccatggttc

SEQ ID NO: 490682 - DNA, 637 bp, Homo sapiens
tgtcagcatttgtggtaatggtttgggatgtggaagggggagtgagaagggagataatccttcttcttctccttcttcttctgagacagggtcttgctttgctctctctcccaggttggagtgcagtagcatgatcatggctcactgcagccttgaactcctgggctcaagcaatcctcctggctcagcctcctgagtagctcaggctacaggcrtggaccaccccacctggataattttattttttactttgtaaagatagggcctcgctgtgttgcccaggctggtctcagactcctaggttcaaatgatcctacagccttggccactgcacccagtcttgatctgacttttgaagcactatgtatttaccgtactccagcctgggcaacagagagacatcctgtttctaaataagtgttatctcttagtgctatttctattcttgttgtcagcttgcaagttgatagctggggtcaaaagtgtgacagttgtttgagtcagatttggaccagaacattttctgccacttattccaaggagatggcaagggtcagcggggggtcctaaaagtctcggggccagacattaagtttctgccttctgtaagtcacccaaagatccccaaagtgtccca

SEQ ID NO: 490683 - DNA, 595 bp, Homo sapiens
ctgcagatttaggggagcgatgttaggggtggggttttagggctgggcagtgattggctgaaagggagggatgtttagaaagtcccttggacatgccatcgtctcttgacacttcttcatgagttgcatgtgcaaattcggagggagttggtatgaaacatgtgaaaattcgggctgtgacatcgaaagattactcattgggtgagcaagtttgttctgtgcaggctccagtcagccatattggttccaatctgtttcggtcagttttgtaagctaggggggactgtagcaaactgtatcttttttttttttttttttttttttgagacggagttttgctctgtcgcctgcccaggctggagtgcagtggcgccatcttggctcactgcaagctccacctcccgggttcaggccattctcctgcctcagcctcccgagtagctggaactacaggygcctgccaccacgcctggctaattttttgtatttttagtagagacggggtttcaccgtgttagccaggatggtctcgatctgacttcctgatcctcctgccttggcctcccacagtactgggattacaggtgtgagccac

SEQ ID NO: 490684 - DNA, 641 bp, Homo sapiens
cccccatgctgttcttatgacagtgagtgagttctcatgagatctgatggttttataagtgtctgactgttcctccttcacacactcactcactctctcccacctgccaccatgtaagatgtgtctcttccccttccgccatgattgtaagtttcctgaggcttccctagccatgcagaactgtgagtcaattaaacctcttttctttataaattacccagtcttgggcagttctttatagcagttgagaatgaactgatacaggaggaaaggaggatgaagggctgtttctactggcaaaaagacttggcacaatttatgggttcagtgtacccagcttcattgggatctgcccatacgwccccattcaaaatttcaggatctcattctctcctaatccaaaccctcactttaacagcaaataccctgtgaggctgtgaattcaatttccattgtagttctgctattctcaagatgagactctgggtcacttttcagcaatctcagccttgcaggagatacaagagataagggtttgttaccactcctctcccccgccgccggggcagaccacagaagctttcaagtaatttatgcagtattttgagctgagaatttgaaactctgagcttattcttttc

SEQ ID NO: 490685 - DNA, 455 bp, Homo sapiens
gctttccagaacctcttcatggcagtcgaagaacactttgagttgtgcctggccacatgcaggacctcatctcagagcatgcaacatgagaacacctaccaggactccatagcaaagtcctgctaagtagaaagcccacccaaactcttccctgcatgacaggtacagggtacttgctccagcttgggcaaagaggccccaccaaagaacttgcctcctaaggcctggcttcagcgcgaggaaaccttggctttgacatcttctcgtgttgtcttctttgccttcattcaccacctgggcttaccagatgcaaatcttctgcaaagcagcatggaccctctacytgatcccattcgggaaagatgaaacctcaggctgggctcagggagtggctttcttggaccactcaaccctgggactgcacaaggacctgtgacttgtgttgtcagggggct

SEQ ID NO: 490686 - DNA, 623 bp, Homo sapiens
ctgtaataaaagcaattattccttgggacmcaagctacagccttttagagtctctggagcatctttgagggtgtgtggctcttggttggggagctgtgaaaagcaggaactatcttcacgcttctcacaaagccctgacagcttcacatcattatctttaaagtggtctggttatttaagaacaccacatttattatagaagaacttgagaatacagataagcaaaggcagaacaaatgtctgtatatatatacacacacacatggaaaacttagattcagaaatggttagcatcttaatatttttgcttttccatcaatatataggtatagatggatagcagagacacggttgtggccaatttatatacatgtgcacatcaaatccctggaacatgtgaatgaatgtcaccttatttggaaaagagatctttgcagattttttttttttcttgagatggagtcttgctctgttgcccaagctggagtgcaatggtgtgatctcggctcactgcaacctccacctcccagtttcaagctattctcttgcttcagcctcctgaagtagctaggactgagtagctaggactacaggcgcacgccaccactcccagctaatttttg

SEQ ID NO: 490687 - DNA, 625 bp, Homo sapiens
tagcagcagggaaggggcaaagtggcaagagaaggttgctcagaattgtcatttaaattgaaaccagaagttcactgtgaattagtgggagaaagaaaatggatttgcaaggaggcctggatattttctaaaatataaattaccattttccctgaccaactactccagtgtagagggagaaaggtagtgcttctgaaataaacatcccacattatttgagttttttttctaccagttgggctgattttccatatacctagtgccaacatcctgggtaacatcagatggcagcagatgacccagagatgatgaccctgagcatgatactggcacagagcagcttccaggaacctgaagccactcatgcatgcatccattccgttgttcaacagcagttgctattgacttactatggcccaggagccaggctagagctggaggagtacgaagagggagaagtgaacttagctcctacaaagcttaatacaaagtagacaatgggtagtgtaagaggggccacagggtacatgtaaggaacccargtgagagattacaagccacggataccttgtggcacgtgcttgagaagatggactgtgtgtcaggctacctgggtctgatgccc

SEQ ID NO: 490688 - DNA, 582 bp, Homo sapiens
agcagcagggttctgtggtgttgtcagggttaaagggagggggtcatggaaaataaggtggaaagagagggggctgcagaaygccaggccgcctctccccatcttagcccaagcagctctgctctagcctgtctgtctgctgagattttatttaggggaagcagggagatgaggaagggaccactacttttaaaaaatagggatggaactgtggttttttaaagtatgtggttcaagttctactggtaagatgattttgggtggcacattttcattactttgtatttcttctaacagttgtatatgtattcatatgcaggaaaacatataactaggagaacatcaaccatgtgattccttggatatgatattcttttttaataacagatgttttttttccgagcaattttattttacagaaaaactggaaagaacaaagaattcccatatatcctcttctgcttcccctcatagtttcccctattatttatattttgcattagtgtagtactaattgttagtgtagtagtaatcgttataatcaatgagccaatatggacacattcgtattaactaaagtga

SEQ ID NO: 490689 - DNA, 582 bp, Homo sapiens
agcagcagggttctgtggtgttgtcagggttaaagggagggggtcatggaaaataaggtggaaagagagggggctgcagaatgccaggccrcctctccccatcttagcccaagcagctctgctctagcctgtctgtctgctgagattttatttaggggaagcagggagatgaggaagggaccactacttttaaaaaatagggatggaactgtggttttttaaagtatgtggttcaagttctactggtaagatgattttgggtggcacattttcattactttgtatttcttctaacagttgtatatgtattcatatgcaggaaaacatataactaggagaacatcaaccatgtgattccttggatatgatattcttttttaataacagatgttttttttccgagcaattttattttacagaaaaactggaaagaacaaagaattcccatatatcctcttctgcttcccctcatagtttcccctattatttatattttgcattagtgtagtactaattgttagtgtagtagtaatcgttataatcaatgagccaatatggacacattcgtattaactaaagtga

SEQ ID NO: 490690 - DNA, 538 bp, Homo sapiens
  misc_feature (1)...(538): n = A,T,C or G
gcagctgaagcacaacagagctgtcctagaaatgaggagagaagaacatgagctgaccctcgcacccctgggttatctcttcccagccagtggttgccatagcaaaacttgttctgcaaagtggtaaagaaagagagaactgaatgtagaccagcacctttctgcagcagcacctcagagctgagataaagaacaggaaaatatggatgctgccacaactgagatgacagcaaatctattcaattgaggacccctcgtntgaggataacttcagcagacatttgtacagtcttgggattccctcactgttgtttatatccactacccaaatagacgatttggaattactgkgggctgaattttgtttcccacttctgccaaaattcccctagcacctcacatgtgactgtatttgagatgaggtctttaaagaggtaaataagtaaaaatgaggtcactagggtggacactatgactagtgtccttataataagaggaacttaggacacagatgtactcagagggaacaccatgtgag

SEQ ID NO: 490691 - DNA, 588 bp, Homo sapiens
aggaaaaaggaaataatcagaactttgagtgattactggacactggctctgaattgacaccaattcctgggaaccccaaacatcactgtggtccactagtcagaggaagagcttatggaggtcagtcaagcaatggcgttttagctcagatccatctcacagtgagtacagtgggtccccaaatccatcctgtggttagttccctggttccaggaggcatcttagagcagacacatttaacaagtggcagaatctcttaaaaattatttgttatttatatgaaattcaaattgaactggrcactctgtgttttgtgctgttgttgtttttgctaaatctggcaatcctacttcaaggaaacaccaagtggaaaaaccaccatgtgagcaacagcttagaggacatgagagtgagggtctattaagaagactgtgagtatcctgagttggacggtaaaatccaagggccagaggacatgaaattcagtgagctgagggactttgcaagactctggaaattttccttttttaaaagagccagtttgtccctagccaaaacaaccacccaaaacaaaacaaaagcttttca

SEQ ID NO: 490692 - DNA, 566 bp, Homo sapiens
ctgcataggagacagcaagatggaagaagaaaagaacatcaaagggcaggtatgtcccttaaagaaggctcccagaagctgccacccacactttctacctaaatctcttygtccagaactcaaccacatggctatccctagctatgaggcaggctgcaaaatgtcagccttattctaggcatttcctgtgtagctaaacattctgttggtgtgagtgaagaagaaactggctactgaggacaactagagtcaatattaactcagtagaaactatgagacttccaggacataagactcatcccagctttgtttaggaaacataagctcattcatgaggaaggaaaatagatcggggagacagttggggtttggggtgcctggaggcaggtaaagccttggcctcccataacattgaagagtgtggaggtttggggttttcacaggtgattagaactgggctgtctttgaacacagatctcagggataccagggtggttggatacagtgccaagacttggacagcactggcaaaattccatgtggtcaaacttctggctagaagaaaa

SEQ ID NO: 490693 - DNA, 637 bp, Homo sapiens
acccacaattgctctgcaagcagagttcactgctggatttagaaacctcaccaaatattaattcagctcaatgtgaactgattacatgtcaggtattatgcaatgcaatggaaaagataatgatgaataaattcragttcttgcccttttgagtgaggtcaaagaaaggttaggaagatgactgaaactcttagttgccatcttttcctgctgaaaggaaaggccttgctggcctccaatgcacaggttcaagagtacaatgtcttaaatcagacatacctgggctcaaatcccacagctgcatcacttgcaaagcatgtggcctcaagcaagttacctaacttccctgagcttcaggactgtcatctaagaaaggcaaatgaaaatggtactgatctcaaaggttgtttgtgcagaggaagtgagaagaaccacatgtcacctaggcacaaagtctggcaaatagaaaatatgcaccaaattttcattgttactattattgtcattttcagccccactattggactagtttcatggaccttattttttcctaatcttttctatgagttttctcactgcttcaacttaaagttggaaaaatacacatttgagacttagccacttggcagcatgaggc

SEQ ID NO: 490694 - DNA, 642 bp, Homo sapiens
tgcctggaattgagccttacttagcctggaaggtatgactatgtctgtgaatcctcattggaagaagttttattggtcagacatcctgttccatgtcagcctctccctctaggatcttttgcttcctgcaaggagtggggcctggtatgtttatcttttgcatttgtcattyatagtgagtcagcatcaattcatcctttcccacagtattgtgaatttcctttggggaagcacacttttggtactctccagtggattaggtggcattagccccaccttcactccagtgctgggccctgattcccttaagtcaattagcgtactccattccccaggccataatgactgattcagggatgggccaaagagagccaggctttggattttttattcaactgtcagagtaaagagaaagaacttctctttcctctgcacatgaattgggcagccatcttgaaatagtaagaagagaagctttataaaggaatgaaattaagaaatggagtgagaagaatggagttaagaaatggtgtgaggtcaggcatggtggctgacacctgtaatcccagaactttgggaggcttaggtgggtgggaggattacatgagcccaggagttcgagaccagccctggcaacatagt

SEQ ID NO: 490695 - DNA, 642 bp, Homo sapiens
tgcctggaattgagccttacttagcctggaaggtatgactatgtctgtgaatcctcattggaagaagttttattggtcagacatcctgttccatgtcagcctctccctctaggatcttttgcttcctgcaaggagtggggcctggtatgtttatcttttgcatttgtcatttatagtgastcagcatcaattcatcctttcccacagtattgtgaatttcctttggggaagcacacttttggtactctccagtggattaggtggcattagccccaccttcactccagtgctgggccctgattcccttaagtcaattagcgtactccattccccaggccataatgactgattcagggatgggccaaagagagccaggctttggattttttattcaactgtcagagtaaagagaaagaacttctctttcctctgcacatgaattgggcagccatcttgaaatagtaagaagagaagctttataaaggaatgaaattaagaaatggagtgagaagaatggagttaagaaatggtgtgaggtcaggcatggtggctgacacctgtaatcccagaactttgggaggcttaggtgggtgggaggattacatgagcccaggagttcgagaccagccctggcaacatagt

SEQ ID NO: 490696 - DNA, 642 bp, Homo sapiens
tgcctggaattgagccttacttagcctggaaggtatgactatgtctgtgaatcctcattggaagaagttttattggtcagacatcctgttccatgtcagcctctccctctaggatcttttgcttcctgcaaggagtggggcctggtatgtttatcttttgcatttgtcatttatagtgagtcagcatcaattcatcctttcccacagtattgtgaatttcctttggggaagcacacttttggtactctccagtggattaggtggcattagccccaccttcactccagtgctgggccctgattcccttaagtcaattagcrtactccattccccaggccataatgactgattcagggatgggccaaagagagccaggctttggattttttattcaactgtcagagtaaagagaaagaacttctctttcctctgcacatgaattgggcagccatcttgaaatagtaagaagagaagctttataaaggaatgaaattaagaaatggagtgagaagaatggagttaagaaatggtgtgaggtcaggcatggtggctgacacctgtaatcccagaactttgggaggcttaggtgggtgggaggattacatgagcccaggagttcgagaccagccctggcaacatagt

SEQ ID NO: 490697 - DNA, 607 bp, Homo sapiens
aatcacatggtcccacttccttgaccragaaaattggcatgtgatgcaggctgaccaatcagagtcatccctgggagttttgatggaactatcagagaagctctcctttcttggtatctctggcagtaggggaggatattggaggacattcatattaccaagtggaaaaagtaaagaccacaccaaggaacacagagctgagggatgggaggaacatattcctgaagatatcatttgagacacgggattcagccatgcctgaagaccaccagtggagtttcccgttacattccattcctgaattcaatacattcccgttctctttagtttgaattaaattattgaatttctgccatttacatcacagtgtgtccttcttctccctcctcaatagaagagtaattatatatttcttccttttactttaccataacagtcttctcttagaataagaaaaaacctttctcttgaacttggcaggataaaataaaggcactgacccagaatccactgttattcttgtatagatcataaatgcctacagtgaagagcattacactatctttggcgacatctctaaaggaggtctgcccaattagcagtgaca

SEQ ID NO: 490698 - DNA, 638 bp, Homo sapiens
tggcgatgaagaagaaacagtgttccaggcagaaagaggtgcacaggaagatgctgcctctagggaactgtaaatattggcacccactctcctggagtgaagaatgccatgtgtgaggctggagaggtgggcagagttttttccaggagcctgaactgtgttctggagtggggttcctggaagggctttacacagagggatatgattccagggaagtatctacctggacaaaagaggaggagagggtgactgacaggagaggaagggatgagggagcataagcatctttcccagattcttcagggcctttagaaaataaacatgatgatatagagtccccttcgtattccagtcccattggaacgagtcaccaagtcctttgatctggaagtgacttcagaagacaccttgttcacagtccttgaagacatagtctggccggcagaattcccaactcatgttgtccatagcagatatcaccaatagatgactgcattttccctccatggagccctcacagagctcatcacatggtgctcaggcagtcaaaccaaaggatcagaatcagtcagcagaggagatgagttctctatgccrtctcacatttatccccaaagcccagggaggctgtgtaattt

SEQ ID NO: 490699 - DNA, 613 bp, Homo sapiens
ttgtttgtttgtttgagacaaagtcttgctttgtcactcaggctggagtgcagtggcacratctcagctcatcgtcacaacctctgccttccggattcaagcgattctcctgcctcagcctcccaagtagctgggattacaggtgcgtgccactgcaccgggctaattttctctatttttagtagagacggggtttcaccatgttggtcaggctggtcttgaactcctgacctcaggctatctgtccactttggcctcccaaagtgctaggattacaggtgtgagccaccgcacctggcccctctttgtttttaatagtaatggatgcctcttcaccaccaccatcccctcagagctagatactccccactagctactgcctcctcccttctcttctcagccaagagactcaagagtagtgtagtctatgctcagggactccacttccatccagaacctccaggagtgccattcacatcatgctctgtgagggtgacatatctggaaacatagctctgtggaacacagcaagagagaagccccaggatttgagttctacccacccctccatccactgctctctggctctcatcaccgcactgagccagttctg

SEQ ID NO: 490700 - DNA, 613 bp, Homo sapiens
ttgtttgtttgtttgagacaaagtcttgctttgtcactcaggctggagtgcagtggcacaatctcagctcatcgtcacaacctctgccttccggattcaagcgattctcctgcctcagcctcccaagtagctgggattacaggtgcgtgccactgcaccgggctaattttctctatttttagtagagacggggtttcaccatgttggtcaggctggtcttgaactcctgacctcaggckatctgtccactttggcctcccaaagtgctaggattacaggtgtgagccaccgcacctggcccctctttgtttttaatagtaatggatgcctcttcaccaccaccatcccctcagagctagatactccccactagctactgcctcctcccttctcttctcagccaagagactcaagagtagtgtagtctatgctcagggactccacttccatccagaacctccaggagtgccattcacatcatgctctgtgagggtgacatatctggaaacatagctctgtggaacacagcaagagagaagccccaggatttgagttctacccacccctccatccactgctctctggctctcatcaccgcactgagccagttctg

SEQ ID NO: 490701 - DNA, 562 bp, Homo sapiens
caaatgcttgagtttgcattttatatttcttgctgtgagaccattatataccctctgagaccacctgcctcttctgtcttctatttttcggactgcttccccaccaccttttcttctaccccactccttaaacttccttctctcttcacatctgtctagacaacttcaccttcttcatggctttaaatgctggctgtgtgctgatggcttccaagttgtaccttcctaggcacacagctctttttttcctttctcagttatttaaaatctttttgaatgggcactgcattttcatagttaaaaatccagatagtataaacagttagtaaaaattctctctcttygttgtcttgtatatgcctagtttctgtcctcatgagagattattgcacttaattttgcgtttctttcctttcctttcccccagcccctttcatttcctttcttaacaaagtcttgctctgtcacccaggctagaatgcagtggtgcagtcatagctcactgcagcctccaaatcccgggctcaagtgatcgtcctgcctcagcttgccaaagtgctag

SEQ ID NO: 490702 - DNA, 535 bp, Homo sapiens
gatgcccctccttcattcaccccaagggcctaagtgagggctgccattggatgaacccttcctatggaccagagccctaatcttttctttcctaaagttgcttaattatcagaatcacctgggagagatgcttaaaatacaacaaattcctgggtctcctggcagacttgctaaatcagaatctctaggggatcctggaattggtgtttctaacaagctccctagtacatgctgactgacacaatctcatttaattctcactcccccacccctcctcctctttggggrtcattgttcccatttaagagacgaacaaatcaaggctctgcatcaagtggccccagagagagactcggggagttggacatcatgtgtctaccttctgcttgctgccagaacttcatgtgtactcttattttgtatttgcttttaggagctctccagtcgtggggtctttggcttggttgtcccctgctggttctaatggccaagctcctgtggtgagtggcctgagcacatcgtcctgtgttgcccc

SEQ ID NO: 490703 - DNA, 535 bp, Homo sapiens
gatgcccctccttcattcaccccaagggcctaagtgagggctgccattggatgaacccttcctatggaccagagccctaatcttttctttcctaaagttgcttaattatcagaatcacctgggagagatgcttaaaatacaacaaattcctgggtctcctggcagacttgctaaatcagaatctctaggggatcctggaattggtgtttctaacaagctccctagtacatgctgactgacacaatctcatttaattctcactcccccacccctcctcctctttgggggtcattgttcccatttaagagacgaacaaatcaaggctctgcatcaagtggccccagagagagactcggggagttggacatcatgtgtctaccttctgcttgctgccagaacttcatgtgtactcttattttgtatttgcttttaggagctctccagtcgtggggtctttggcttggttgtcccctgctggttctaatggccaagctcctgtggtgagtggcctgagcrcatcgtcctgtgttgcccc

SEQ ID NO: 490704 - DNA, 503 bp, Homo sapiens
gcattctccatgcatcaagaaagaagagtagaagggaagttcattaccatcctctgtggctttcatagcttccgcttctctcttctttctggaaagtctttgtttttcctccaggcgctgcttctccgcatttgcttcatcccagcgtccattttccatcagtctctggtcaggtcgtaaccggctgtctgtggggcagtgccactttcccaagcattgagagtcagagcaagctctgagaagtagtacatgttttctgcattcttcctaaaagtagaagacaagaaaaagaaatggtaatcccagagcccagaccctatttaaagagcaacaactaagtacactgccaaggccacaycaccaaggctgttctacaaaaacaggatctgtgaaaaggatctaggaccatgtcacattgccctaactaaaggagacaaattggatccctccccatccgctccctggcatcactcagttccatagtcttctggtgttgtgtggtg

SEQ ID NO: 490705 - DNA, 464 bp, Homo sapiens
tattccttatgccatgtgaaaacaaaaaattcacaggtataggaatccatggtttgcaaatgcctgaacatttttttttttaaaaaaggacagttatccctgagagatgagaaatagtgatgtgagtcctactgtagccttgggttatggttgagtttccaggctgtgggtgtggcaaggaccttggaagacactcragttgagaaggtggaactgagagtctggagaacaaggtggctgagtttcatcaagccattctccatgtccagtgctaggaaggggaaagagtattcatgccagctgccatgagatagctttgctatgtaccatcatcactgatgtggcacatggatcaaagaactatggaaaaaatccagacacaagaagaagccatttgggtgaacttagccttcaacaattttgtcttattcttgaccacaaaaaggcaactttatatgacactg

SEQ ID NO: 490706 - DNA, 532 bp, Homo sapiens
ggtcccaactgtctctttcctaacagctccccaggcacccacacttttctgcctctttttcaatctgtacccttgaccctcctcctttttctgctttgtcagactccttaaggcacttcataaattaaccatttccagggatttcccctcacacatgagttattccagtggacagggcagcctcatgggtgcctgtggagggtgaagggtctgcctggccgtaggtgtgatcacacactcccgttgtaacccctgyctcctgtgacacttgctgccccacgatttagctgctttgtgttccgtgcctcctgtttgctggtgaactcctgagttggggggcgtcattccctccactgtagttcttccgcgatgctgactccacccacggtcagcaccactcggaaatacttcacagtcctgtagaggaagacaggtccaggtttccagttacccttctatgtctggatactctgctcattcactgaagccaggccccttcctgcacttatgcctctacccagataatgagttc

SEQ ID NO: 490707 - DNA, 547 bp, Homo sapiens
ctcatgggtgcctgtggagggtgaagggtctgcctggccgtaggtgtgatcacacactcccgttgtaacccctgtctcctgtgacacttgctgccccacgatttagctgctttgtgttccgtgcctcctgtttgctggtgaactcctgagttggggggcgtcattccctccactgtagttcttccgcgatgctgamtccacccacggtcagcaccactcggaaatacttcacagtcctgtagaggaagacaggtccaggtttccagttacccttctatgtctggatactctgctcattcactgaagccaggccccttcctgcacttatgcctctacccagataatgagttctacccactgatgacctcctctcctctagtaacagtccgcctccctaatgagcatctctggctgacacacgttccgttctccaggcctgtgagccctggtccctcgctgttgctgagccacagcacccgcccttctggcctcactttagagcactgtcatttcagagcagactacgcgcggggtggccaggtgaaat

SEQ ID NO: 490708 - DNA, 530 bp, Homo sapiens
ctgaaattacaatgatctcttacctrtcagtctcaatgacctcgcctaactctgtgcaatactcgatcctgctgtggaaaccctccgtgcaacgctggcttctcttggcttccagtcacagtgtaccaccctggctcaactccagtacttctagttcctaaatcttatccattctgtctgcacctcattttccagtttctttggttctctaaaattttatgttctgtaagattctgttctcagtcctgttttctcaactccctctaaaagctccccacacccaactcactcctatagttttttctttttttttttttttaaggtcccactctgttgcccaggctgaagtgcagtggctcgatcataactcactgcagacttgagctcttgggcttaagtgatccccttgcctcaacctcctgagtagctgggactctaggcgcaccaccatgcccggctaatattgcgttttttgtggagatgggggtttcactctcttgcccaggctggtttgaactcctgggctcaag

SEQ ID NO: 490709 - DNA, 530 bp, Homo sapiens
ctgaaattacaatgatctcttacctgtcagtctcaatgacctcgcctaactctgtgcaatwctcgatcctgctgtggaaaccctccgtgcaacgctggcttctcttggcttccagtcacagtgtaccaccctggctcaactccagtacttctagttcctaaatcttatccattctgtctgcacctcattttccagtttctttggttctctaaaattttatgttctgtaagattctgttctcagtcctgttttctcaactccctctaaaagctccccacacccaactcactcctatagttttttctttttttttttttttaaggtcccactctgttgcccaggctgaagtgcagtggctcgatcataactcactgcagacttgagctcttgggcttaagtgatccccttgcctcaacctcctgagtagctgggactctaggcgcaccaccatgcccggctaatattgcgttttttgtggagatgggggtttcactctcttgcccaggctggtttgaactcctgggctcaag

SEQ ID NO: 490710 - DNA, 530 bp, Homo sapiens
ctgaaattacaatgatctcttacctgtcagtctcaatgacctcgcctaactctgtgcaatactcgatcctgctgtggaaaccctccgtgcaacgctggcttctcttggcttccagtcacastgtaccaccctggctcaactccagtacttctagttcctaaatcttatccattctgtctgcacctcattttccagtttctttggttctctaaaattttatgttctgtaagattctgttctcagtcctgttttctcaactccctctaaaagctccccacacccaactcactcctatagttttttctttttttttttttttaaggtcccactctgttgcccaggctgaagtgcagtggctcgatcataactcactgcagacttgagctcttgggcttaagtgatccccttgcctcaacctcctgagtagctgggactctaggcgcaccaccatgcccggctaatattgcgttttttgtggagatgggggtttcactctcttgcccaggctggtttgaactcctgggctcaag

SEQ ID NO: 490711 - DNA, 534 bp, Homo sapiens
  misc_feature (1)...(534): n = A,T,C or G
gctanntgtcctcccaccctccctcccttgcccttcacagatattccacatatctgcaatgataacatgcaaaccttccctcctggaggtaagtgaaattgcttacgggctttccacatcttccgccctacccctgacattatctgccaaaatcctccaccctctcctagcttatactataatcccccaaggagcctctgcttttgtttcncaagtccctaagaatacctagcctcaactttagaaagacagatagaggcatataaatactgtcccagagagatatagaaactgacagacagagacyggaaggcacagtcagaagcagaagtaagacttggagactgagtgtgttcccgaatcatgggggtggatgagctagcataatctccctgtgtttttataatgatcactgatgaaactgccttgaagactgttttagatgaaaaggcaaaaatgggttttgtgctgacagatgtgcattttttctgtcttcagaaaagtcaggagaggagaaggtcatccgtaagtgtt

SEQ ID NO: 490712 - DNA, 534 bp, Homo sapiens
  misc_feature (1)...(534): n = A,T,C or G
gctanntgtcctcccaccctccctcccttgcccttcacagatattccacatatctgcaatgataacatgcaaaccttccctcctggaggtaagtgaaattgcttacgggctttccacatcttccgccctacccctgacattatctgccaaaatcctccaccctctcctagcttatactataatcccccaaggagcctctgcttttgtttcncaagtccctaagaatacctagcctcaactttagaaagacagatagaggcatataaatactgtcccagagagatatagaaactgacagacagagaccggaaggcacagtcagaagcagaagtaagacttggagactgagtgtgttcccgaatcatgggggtgratgagctagcataatctccctgtgtttttataatgatcactgatgaaactgccttgaagactgttttagatgaaaaggcaaaaatgggttttgtgctgacagatgtgcattttttctgtcttcagaaaagtcaggagaggagaaggtcatccgtaagtgtt

SEQ ID NO: 490713 - DNA, 565 bp, Homo sapiens
gtgatgtacatagactcaccctagttttcttctcaagaatagttaaactgacttgaacattttttattccagtagaatcrtgagtggtttgagagttgtcccttgccaagaatccttaaaactagtatattagggggctcaggatcctaaaccaccagagaattatgagtgactgtcattcaccaaaaatacctcacatatgatattaataacacagtccaggtcttctgaatattttttccaggtgaagataatagtttaagatgtaatatttacaaatcttcatgtacacccaagtcagttcgaaatatatttgcttaatttgcttcatgtatgtatcagtctgtggctgcttttaacttttgtgtttaatgtcaaatatttaaatttcttgaaatgagtttgcagcttctaaatccaagtgcttagaatggtgctaagcacatagtaagttttcaatatatgctaacatccttatggtatcattcccttacttatcccatagagaaattgaaaaggacacaaagaagacccatgccccttttcattagtactttctgatatt

SEQ ID NO: 490714 - DNA, 587 bp, Homo sapiens
aatgtagatttgcagaaagcaaatctgtgatcaggaatctggtgatgtatcaagagacaatttttaaatgctcataaaaacaagaaagacaaaaatgttgattatttttgaaggtgggaaatggcacatggggattcattatatttgaaaatgtctatttacatttttttaatttaaaaaagaaacctcagctgggtgtttttcctgtaatcctggcactttgggaggatcacttgagcctaagagtttgagaccagcctgaacaacayagtgggaacccaactctacaataaataaataaataaataaataaataataattaaaaagaaacctgataatctgtgattcactctgaaatgaaatctaataaaatttaatgagatgctgtcattaaggcatttgttacagtgacaatatttattcacattaagtgaatcatgcagtaaataatagtatatctacatagtggcataaccacataatggaatattacatacctgtgagaaatgtttggaatgatttttaataatacagggaaatatttgcctatgttaagtgaaaaaaaaatcgtgctaaaacacaaaaa

SEQ ID NO: 490715 - DNA, 549 bp, Homo sapiens
agttgtttttggtgattaatgaatctgttcattcaaacagaatttgaagaagtaagggtgtgtaaatttctggctctatgaaatacagtacctaagaaatggagaatttggtttaggataggaaaagattagttgagttgtgaatacatgaagtcttatatatctataggtagctcagaaaactggatataaatctccagttcttgatacacctgactcccataaagtgcaaaaccatagacaggtatatctcacttaaatatgctctccaaacaatcagtttctctactatcactcctccagttataggtggaattgtggtggtatgcatatccatcagggggaatactagtgttgtatgtacattggatctcagagggaaggaaartaaaatcataataatcagttaagtaggaagcgccaaggcaactggagtaagtgcataaagtgagtatttgcagactaaacttattttatttctgcatataagctttaagccatcatagaaaatagctgaatttataaagtaatgagctatatagcgaagct

SEQ ID NO: 490716 - DNA, 638 bp, Homo sapiens
cgtggtgcaatatatattctatttttattttcagaacaagtgtttaatatgtgccatctacttaggaaaacattcaggaaagtgtccttcttatgaacgtacttttcaatcatattttttgaagagagatcaaatagtgatgtgaaagtttttgaatagcaagtccttagagacctagaaagagacttagactcccacacaatartgggagactttaacaccccaccgtccacatttagccggtcaacgagacagaaagttaacaaggatatccaggaattgaactcagctctgcaccaagcagacctaatagacatctacagaactctccaccccaaatcaacaaaatatacattcttctcagcaccacaccacacctgttccaaaactgaccacatagttggaagtaaagcactcctcagcaaatgcaaaagaacagaaattataacaaactgtctctcagactacagtgcaatcaaactagaactcaggattaagaaattcactcaaaaccgctcaactacatggaaactgaacaacctgctcctgaatgactactgggtacataacgaaatgaaggcagaaataaagacgttctttgaaaccaacgagaacaaagacacaaataccagaatctc

SEQ ID NO: 490717 - DNA, 518 bp, Homo sapiens
ctaagatgggatggagtacaagttcatgggaagcttggaggtaaagaaactgagaagtcataatattggatggatcattgatgtatatatggttatcaccaagacattgactgaataaaataaatgaggaagaccgtgccaggaagatgaggggttattaaaagacggatgattacaatggctaaaaaaggatgtcatgaatgctttactcactaatgtctaaatgttttagtcttccacttgaaggctttgatagaggcaggaggcagacagggataggtccctggtgaaactccaccttcaagctgaaaagcctgaaacccatggcccaaagtgaaaacttctattcctgtctgccctctctttcccaattggttctttctgaaaaacgccttcttaccaactgaatgttgcyttttccaaaactacctatagcccaccctacccatcatcctgtgcctataaagaccccagacacagtcagtagaggatagagaggtgacttgacttcagagaga

SEQ ID NO: 490718 - DNA, 631 bp, Homo sapiens
gcatatgtgtataaatgttcattcattcatctcaccaacagttattgtgtacaattttcttctgtggatgtaagcaaagttcattaggctgatggagggcaactaatttttgcattaggtcacacttagctcccagatccctcacgtctctcctttctactctgccttctgaacacactacatctaccagctcctgggtttttttttacactcttccatgtgggaaaggggagcatttatgattctcaagaaactgtgatttaaggtttttaatcactttttatgatattgtacttctttaaaagactatagaaaaggacctcaaaagaataaaaagtttgatggtaaaatttcaggtcatgaaatatttctccttgaactagaaattgtctgaatcttttccagtaattcttaaaatcacttgtgcaaaaatcacttgtcctttattctttcaatatggtccattttgttaacctaaccataaaccagtctcactatttacatatgcggtgtttgaagaatcccaacatcttattctccactgagcttgggatcagttgagagatayaaatgagtgttggacagagtttattgttgatcaaactggaacagaagatttgttttagatgtg

SEQ ID NO: 490719 - DNA, 286 bp, Homo sapiens
ctacctacaacactgggaaacagatttctgcctgagacccagacacctccatccagcttcaccaccagcactggggaccagatttcagcatgagacccaaacaccctcasccagccccacctccaacactgcggacgagatttcagcatgagacccaaacatcctcacccagccccacccctaacacttgggaccagatttcagcatgagacccaaacaccctcacccagcaccccctccaacactggggatgagatttcagcatgagacccaaacaccctcacag

SEQ ID NO: 490720 - DNA, 286 bp, Homo sapiens
ctacctacaacactgggaaacagatttctgcctgagacccagacacctccatccagcttcaccaccagcactggggaccagatttcagcatgagacccaaacaccctcagccagccccacctccaacactgcggacgagatttcagcatgagacccaaayatcctcacccagccccacccctaacacttgggaccagatttcagcatgagacccaaacaccctcacccagcaccccctccaacactggggatgagatttcagcatgagacccaaacaccctcacag

SEQ ID NO: 490721 - DNA, 140 bp, Homo sapiens
actgaaaattgattcatcttgkctggcctgtattgatgggatgtcttgcagccaagctgctgaagccgcgtccaaactggaggctcctcactgactcctgagggcacccccaacccactagggatggcggagttaaggtg

SEQ ID NO: 490722 - DNA, 314 bp, Homo sapiens
ggaaagaaaactcactacctaattttgtgctgagctcctaagacctgaaatgagctctgccattcctgcctgtagattctgagcagtgtctgaaaacacatgcctgagaaatccagtctttggtcagtaagaaaacatccgccaaggtctgagtatggagcgcgaccctgttaagttgagattaaattgtggtcactgaagagcaagtgggtaattaacaaatcacagagcaatyagccagcagaaatgactaaatcaagactgggacctgaaggataggaaattcttcctccagggtcacaaagtggaaattc

SEQ ID NO: 490723 - DNA, 603 bp, Homo sapiens
agcatgatagaggatgtaaaatgaaactcaccgtggcatactggaacactcactatcttagtctgttttttgttgctatgaccgaatacctaagactcggtaatttgtaacgaaaagaaatatacttatgacagttctggaggctgggaagtccaacaatgaggagctgcatctggtgaggaccttcttgctagtggggactctctctggagagttttgagatggggcaggcctccgagaaaaacaacctggcttttgatcacagacctgctcttctgataactaacccacaccttagataactyattaattgattaattcatgaagggattaatccattcacgagggcagagcctcatctaaacactcttacattggggacccagcctcaacatgacttttggtaagggcaaaccatattctaaccatagcacttacaaaccatctgcttatgttgaattaaatttaggtggttgaatacacactcagagctgtgactcttcggtttgatttatctcagaaagctctcaaagtcctcatgctctactgagccctctcagtataggtggcatttgctacatagctggacactgaagttggcag

SEQ ID NO: 490724 - DNA, 600 bp, Homo sapiens
agcatgatagaggatgtaaaatgaaactcaccgtggcatactggaacactcactatcttagtctgttttttgttgctatgaccgaatacctaagactcggtaatttgtaacgaaaagaaatatacttatgacagttctggaggctgggaagtccaacaatgaggagctgcatctggtgaggaccttcttgctagtggggactctctctggagagttttgagatggggcaggcctccgagaaaaacaacctggcttttgatcacagacctgctcttctgataactaacccacaccttagataactcattaattgattaattcatgaagggattaatccattcacgagggcagagcctcatctaaacactcttacattggggacccagcctcaacatgacttttggtaagggcaaaccrtattctaaccatagcacttacaaaccatctgcttatgttgaattaaatttaggtggttgaatacacactcagagctgtgactcttcggtttgatttatctcagaaagctctcaaagtcctcatgctctactgagccctctcagtataggtggcatttgctacatagctggacactgaagttgg

SEQ ID NO: 490725 - DNA, 447 bp, Homo sapiens
gtggaaaacacattcttgaagacaatattttgctaattatgtgcagtagagggtcaattttctgaatttgaactgcaagagagaaacttaccctttaattatggaaatgttccagggtgagagaaatgaaggagctggcactatgctactctctaacactagcctagacaaaatgcccaagctccataagggtcagtctgcagagatcttgtcttsccatagaaattctatcttgtcttccaagcacagtctaagtgccttggtttgattccagattttgatactttcaaagtctgtaactgtgatggttaatactgattgtcaacttgattggattgaagaatgcaaagtattgaccctgggtgtgtctgtgagggtgttgcccaaggagattagtatttgagtcagtgagctgggaaaggcagacccacttttaatctgggcggg

SEQ ID NO: 490726 - DNA, 575 bp, Homo sapiens
actcaacttccaactttatgctccatcatcttttcctgcacctctcctacctctgagcctttgcatagggatttcctgctgggaatgccctccttaaacctgaccaattggcaaactccttctcactctttagagctaccctcatycactgattttccaaatatttattgagagtctttcttggcactatgattgatactggatactatttctcttctgtgtcattattccaagatctcctcacaagacttaagtgtatttttcattacagatctatggtttatagctatttccattctagaaactgtcatattgtattataattatttctaggtctgtcctggcaatagatcacaagttccttgagagcagggacagtgtcttttcactctctttgcctggcagagtccgattcaacaaatacttgttgaataaacgctattgttgttgctattaattcaactgagtaactattaagtagaactaccatgtgctcagtgaattttggagattcaaagataagtaaaatatagtttgtttttatcctcactaagttctcatttggtgagagaggc

SEQ ID NO: 490727 - DNA, 594 bp, Homo sapiens
gaccaaaaaataaaaaatcctggggagccctattaatactttaaaatcacttgttccaagaaagtagcactcccctgtgtgctattccactacagcatttcagttgacagtggctgtgggatttggctggtgggtatcggagctggaggctcttgctgcatcctgaaacttgcattacagaaaytgacaccaataaaggcatggtatttttttcttgacttgttagtcctgtgtgcttccttgtgcatcaaagtacaaattgctaaatatcaggagatctgtggcaagttccttcactggcattgtgtttctaaatcttccagtggtgttttagcactcctgatatattaccccattatttctgcctggcccctctcttgaatgaagatctacaagcaagacgtggtggtggggtgcacaggaagtaaatgtggcattcctagacaagaatacaacctggatgggggcttgagcaagcatccagaaaaacatggcaggttccttgagagaagtacacacagtaccatgaaacgtcagagaacaaagcagaagagtttataagttaaaaagtaaatataatgggctttgatttcc

SEQ ID NO: 490728 - DNA, 545 bp, Homo sapiens
ttgtagaaaaacagcacattcttacctcagtgtgtttctcctatagtcattttatgcatgaccaaaatagatcatctcttaagtcttattactcatttaatccaaaaatattaggaaatatcrggaaatcaagagtgacactatcctacttagacctaatggttactttgaaatttttctttggtatcattgtcagcacttgcaaagaaacataaacactttaaattaatgttataaaaattagtgcctagagaaaactttcatgaaatgtttagtcatgcttgtatgtttacctgatgattcaaaagcttgattattctggaatgaaacttcatcactatctatcaatatacacttgggcaaattcacagatgtaacaaattagcatttgttaaagtacatattttagcttggaattcataatgaatatttaaaatacttcaaattacaaatgaatgcatattaaatgatgtgtcatttatttattagctatcattattaagtgatgcaatgcatattgagtgttttgccaggaatctgacaca

SEQ ID NO: 490729 - DNA, 545 bp, Homo sapiens
ttgtagaaaaacagcacattcttacctcagtgtgtttctcctatagtcattttatgcatgaccaaaatagatcatctcttaagtcttattactcatttaatccaaaaatattaggaaatatcgggaaatcaagagtgacactrtcctacttagacctaatggttactttgaaatttttctttggtatcattgtcagcacttgcaaagaaacataaacactttaaattaatgttataaaaattagtgcctagagaaaactttcatgaaatgtttagtcatgcttgtatgtttacctgatgattcaaaagcttgattattctggaatgaaacttcatcactatctatcaatatacacttgggcaaattcacagatgtaacaaattagcatttgttaaagtacatattttagcttggaattcataatgaatatttaaaatacttcaaattacaaatgaatgcatattaaatgatgtgtcatttatttattagctatcattattaagtgatgcaatgcatattgagtgttttgccaggaatctgacaca

SEQ ID NO: 490730 - DNA, 545 bp, Homo sapiens
ttgtagaaaaacagcacattcttacctcagtgtgtttctcctatagtcattttatgcatgaccaaaatagatcatctcttaagtcttattactcatttaatccaaaaatattaggaaatatcgggaaatcaagagtgacactatcctacttaracctaatggttactttgaaatttttctttggtatcattgtcagcacttgcaaagaaacataaacactttaaattaatgttataaaaattagtgcctagagaaaactttcatgaaatgtttagtcatgcttgtatgtttacctgatgattcaaaagcttgattattctggaatgaaacttcatcactatctatcaatatacacttgggcaaattcacagatgtaacaaattagcatttgttaaagtacatattttagcttggaattcataatgaatatttaaaatacttcaaattacaaatgaatgcatattaaatgatgtgtcatttatttattagctatcattattaagtgatgcaatgcatattgagtgttttgccaggaatctgacaca

SEQ ID NO: 490731 - DNA, 545 bp, Homo sapiens
ttgtagaaaaacagcacattcttacctcagtgtgtttctcctatagtcattttatgcatgaccaaaatagatcatctcttaagtcttattactcatttaatccaaaaatattaggaaatatcgggaaatcaagagtgacactatcctacttagacctaatggttactttgaaatttttctttggtatcattgtcagcacttgcaaagaaacataaacactttaaattaatgttataaaaattagtgcctagagaaaactttcatgaaatgtttagtcatgcttgtatgtttacctgatgattcaaaagcttgattattctggaatgaaacttcatcactatctatcaatatacacttgggcaaattcacagatgtaacaaattagcatttgttaaagtacatattttagcttggaattcataatgaatatttaaaatacttcaaattacaaatgaatgyatattaaatgatgtgtcatttatttattagctatcattattaagtgatgcaatgcatattgagtgttttgccaggaatctgacaca

SEQ ID NO: 490732 - DNA, 648 bp, Homo sapiens
gacagcagctggtctaatgggcccagtaaaaatctaactcatagatgcagttaccacattctgacaatttcttccccctacctgaccaatttatgaccccaaattttccagcccctcacccttcacaaatcccattaaaaacccttccccagaacccctcaatgaaatggatttgaggcttgagaattcctcccatttcctcgctgggcaccttgtgatcattaatcgctttctctgctgcaaccctgctcacagtttattgctatgcagtgggcatamgaacctggaagtcctgtagtaatactctctactctccatagatagaaacactggaaaaattctagggatattttggcactacttacaattttgtccatcttccacagaatatttgtattcaagggctccagacaagctgaacactagctggagaatattcaatggacattacacattccattttgttgtattctgataaaaaaaaaacctggaatctaaacagcgattttattatttgtcctagaaaattaaaacaaaaggttcttattgtaaagagaaattaagtagtataaaaggagaaaatataccttaacagttatatttaaagaatactttattagagcacatccccagtgctgatggttgaag

SEQ ID NO: 490733 - DNA, 588 bp, Homo sapiens
aggaataatatgtgtgctgtatgatcattagaacactgtctgcaacatttgattgtgcaggtcttgggtaacatatatttttctatgttgtattttcttctgcagtagtgagatattcctcaaatatgtcatttccatctgctattttcctatttctttgaggaagatgtagctgagttttgaatagtttattctactccttaagttggtttacttcctcgtctaagtaaggtggcatataatttattatctaacctagttttgtgagtgatagggacagcaggtaaaaaccatgactgtccttggctatccagaaatttagtcacactgcatataaggccagcatcatttgctggaatggaaatcctttcttcattttaatakctctctagctgagttatactgtttttctaatttatttttccaaattatataattggaatcctttatatgtgagaatacacacacacacagtcaatatttcaatagctactaaactttgtcattaaaaaaattattgcccctcttcatcttcctcattgaggataatcttaacagaatgtattttccaaatggccccatgtctaa

SEQ ID NO: 490734 - DNA, 684 bp, Homo sapiens
gtcagtttgcctagtatttacagttagctctttaaattcacatgtaattaaagaaattttgagagtagaaaacatcagtgataccattcttatatatgtgaaaaaactaacagttttcataattcactttcataatatcccatttcaaacagtaccccacggtrtattttgcttttacattgaatggcaaaatagaccactgatgaaagaggagtcatccaattactatgagcaaagtagctttaacttcctttagatatctgctagcaagatataaaatgacacttcctggacacttcagtagcacaatagggcctttattgattttcataacgtgttcttcggtctaagatgggtctcttgagaactccacttcccagcatgaaaaaaaattgccttttctacgtttgaattctcaggtctgtcaatgcatccctagctggagacactgtcattttagttctatttctttgttgttgatgtgtctacaccttgctattgtagtgccctaatggaacctagggtcataggtcaaagtatgaaaacaaaaaatgaaattgcttagcctgtgaatcaataaaaaagactcaacactttttctaagtataaaatgtgcaaccaatgaagtgtgataagttcattcaaccttgtactaaaactataaatagaatgcttctaacaccc

SEQ ID NO: 490735 - DNA, 667 bp, Homo sapiens
ttcctcacgtgtatctaaaaagtttattttcatctagaaattcattcttatcttattaattacacacatcataaatttgatagcttgattttaattttccaccaattaatttcaatgttattgctatctctttagtttctactatcattctaatcaattgaataaataccagtattgagaattactaacgttttcacttatatatttgtgggtattttatatatakcaacattaaataaaattttaattttgcttatatatcaaacactctattatcttgccctatttgttatacccctgatttttaaggaagtaaaccatttgctatattattttccttcctttttaccattgactcatcagtccttcttctaactaatacttggaagcctatttctaggctggactccaaaaaagagcacttaaattccaagacattaagatgtatacaaatgttaaaagaaactccacttggccgggcgcggtggttcacgtctgtaatcccagcacttttggaggccaaggcaggcagattatgaggtcaagagattgagactatcctggccaacatggtgaaatctcgtctctactaaaaatacgaaaaccagctgggcatagtgtcgtgcacctgtagtcccagctactcaggaggctgaagcaggagaat

SEQ ID NO: 490736 - DNA, 610 bp, Homo sapiens
cacctgctcttttctcatggggagtcaactagtccatttccgtgtgatgagaccaccagacaggctttgtgtgagcaataaagcttttgaatcacctgggtgcaggcaggctgagtctgaaaagagagtcagcgaagggagataggggcagggctgttttataagatttgggtgggtagtggaagattacagtcaaagggggttgttctctggctagcaggggtggggggtcacaaggtgctcagtgggggagcttttgagccaggatgagycaggagaaggaatttcacaaggtaatgtcatcagttaaggcagggactggccattttcacttcttttgtggtggaatgtcatcagttaaggcaggaacagactattttcacttcttttgtgattcttcagttacttcaggccatctggatgtatacgtgcaggtcacaggggatatgatggcttagattgggctcagaggcctgacagtccataaggaatatagaaagattaggaaagcgtgtataacacataattcaaaatttaattctaaaaaccccccgatctgtaaagtttgacaatcatcaaccatagactatgttaaaagggtttgaagtgg

SEQ ID NO: 490737 - DNA, 674 bp, Homo sapiens
ctgcgacagcttatagaaagcaatttgagacatgatcaatcgttttcaagccaaatcatatgccataatcatatcccaagtctgttatatataagtgttatgtgtgttttgtttcctaccccaaattaatatgttgaagccctaattcccagtgtgatggtattgggaggtggagcctttgggggtgatttagaccatagcaaacataaaaatcagactgcctccagtgacatgagcagcaaagtcctttgcctctaaccaggagtctcaggtcttcttctgccagcatccatgaaattgtgtcaggctgacttatcaactaggtgaaagtctcagaccctttgyagtttttgacagcattcgttaagggccatttgaatttatctatgtatatttaaaaaccttttttattgcagtttcacatgtagaaatctatcctgcagaacaagttatgcaaacatatccaaatacaaatgcgaatctgtatagttcagggctgtgcctgataacaagagattaaaaaaaccctgaacatccatcagtagaaatgtacttaatttactgatatgtatccacattttggactacaattcagcaaccagaaagaaaagctctgtatgtgctgacataggactgttttcataattcattgttcatgggaaaaaagcaagtta

SEQ ID NO: 490738 - DNA, 584 bp, Homo sapiens
caaatccttctcatgcttggaatctctcttacttccccttctgccacatctcttctgcctctagacaaaaaacgttttctgcttttaagaggctcatatgattagattgggcctacccaagtgatttaaaataatttcccaatctcgaggccaataaccttaatagaaccatgaaagacaatgtattaatagtttctggagattagggtgtgaacatctttgggaatggcatcattctgcctacagagatgattgaagaaggcagtagtgagccaaggacagcaggattctacacatggacttgatgaacagtggggctctaatgaaaatttttgcacacagagcattttttaagtaaactttttatttcagaataattttagatttacaaaaaagttataaaragactttctatatacccctctcctagttttcctcatttggtaccttgtcaaaactaagaaatgaacattggtacattgctacaaactaaactccagccatctgcatatctcttgcttttccgtgaatgccttctctctactccaggatcaaacccagggtaccacattgcatttaattat

SEQ ID NO: 490739 - DNA, 580 bp, Homo sapiens
tttccctacaaatccctctatagactgagagttagtacttttgtggtgacttttaatatgtcactctaatccattatagaatgaggagggaacacagcacagtggcacccaatctgggctttgaaagtagcctgctttacccctgctctgtggccatgggcaagtttcttggtctctccmaaccataatttgcacatgtttgaaaatgggcgtgtgactacttacttcacaggattggtaaaatgatcaaatgagataatattaggttggtgcaaaaataattatggtccttgccattacttttaatatataaaacacacacagaatgttgtctagagtgcactcagtaaatgacacctcttgctgccattgctgttcttactgttatttatactcatattaccttgtaactctcaaaagaaaatcctataccctctatttccagtgcttgagaacatgccactgttgtccctttgggctggctacttccctctttgaggctgccttgcctttccagggaggaatcgcacaagtttccaggtaggttgtttattagcctgtttactgcctagagaatttc

SEQ ID NO: 490740 - DNA, 594 bp, Homo sapiens
tgtgagtcaggcagccatgccatattaccaagagggaaaccggaagaggaaaagaagacccttcctcctatactgtttcgccagtactctctattgacaggacaaacattgtaccaaagattaaaaccacatgcttaagggggaaaaagaaactttaaaaaatcaaatgaaaaacaaattcaagaataattagaataagtaatctaactaaaatacaaggaaccagaaaaataattctggtaatacgataaacagggttctgtaacacactcaattatcacactagccctccagcaatggatggaaaccaagatgaaatctttgaaatatcagataaagaattcaaaaggttgattattaagctactcaaagaggtaccagagaaaggtgaaaaccaacrtaaagaaattgaaacacaattcagggtatcagtgaaaaattttgtcaagagatagatgtcttaaataaaaaccaatcagaatttctgaaaatgaaagtcacaattagggaattacaaaatatagcggaaagtttcaacaatagaatagaataaatagaaaaaataatttcagagtccaaagaaaatgcttttca

SEQ ID NO: 490741 - DNA, 681 bp, Homo sapiens
gttgccaggccctggggagtggaagaaaataggagatgttggtcaaagggtaaaaacttacacttataagataaacaagttctgaagacctaatgtatagcatgttgaatatagttaataatggtgtattatatactttatattttcccaaaaagtagatcttccagtattcttaccacagaaaaagagataactatgtgaggtgacgtatatgttagttagcttgattgtggtaatcattttacaatctatatgtatatcaaaataacatattgtacatctcaaatatatataatttcttatttttcaatcataccacagtgaaaaaaaatactggaaaaaayacttccaaaaaaagcataattaggaaaataaagatggagagatgcatctgcctcccatttctcctatctccttgaacataaaagtgatgtcttcagtagggcagccattttgcagctatgtagtaacaagagtgaagataaagtatcagtatatgagaggtgttcatgatggctgactagaagcattttatgcctgcctcctctacttaaaagaaccaaaataatttacagtcagtcacactttgagtatgttatctataatggaacagtgaaattcaacagagaagtgacaggggacaccaaaaatggggaagaaggagagacagcttacctggat

SEQ ID NO: 490742 - DNA, 514 bp, Homo sapiens
attcttaccacagaaaaagagataactatgtgaggtgacgtatatgttagttagcttgattgtggtaatcattttacaatctatatgtatatcaaaataacatattgtacatctcaaatatatataatttcttatttttcaatcataccacagtgaaaaaaaatactggaaaaaacacttccaaaaaaascataattaggaaaataaagatggagagatgcatctgcctcccatttctcctatctccttgaacataaaagtgatgtcttcagtagggcagccattttgcagctatgtagtaacaagagtgaagataaagtatcagtatatgagaggtgttcatgatggctgactagaagcattttatgcctgcctcctctacttaaaagaaccaaaataatttacagtcagtcacactttgagtatgttatctataatggaacagtgaaattcaacagagaagtgacaggggacaccaaaaatggggaagaaggagagacagcttacctggatg

SEQ ID NO: 490743 - DNA, 576 bp, Homo sapiens
gcaggtttttggctatagttcaaacttatataagagatatgtaacaatatagcttttctatctctttatgtattgttttgccaagttggatttgttaaggacttggttgtcttcagctaaattgtgaaatttatgagttgtaatgaagctgcccatcgtatcttctcaccagctttttaacatgtaagatccacgttggtggttttgtctcattcctgatattgatagtttgtgkttttttttttttaatcttgagcaattttctagggttttattattttattattttttaataaactaacttttgttttttaagtttctttctcatgttttatttatcttacaaacttggatttaaatatgctattttattttaacttctttttatttatatctattctcatttttaatgcaggtatcaatgctctaaatttgcctatgaatactctttagctagatgtacatttttattactatcgaattctaattattttgtaattttcattgcaaatccttttttaccctttcattgtgcaggtttctaggaacaaaaaatagcaaatgattactggacaa

SEQ ID NO: 490744 - DNA, 468 bp, Homo sapiens
tctttgggcagtttagcaagattctytatagcaagcttggctcctaccagcggactattactctaaaaacactctgggagcaattacacactcagtaacccctcattaagtagcaattttacctaaccttacccgtttccttttgagtgtgagagtgaagggagaaatgaattaaagcacatcaagaagctctgtatgctcttggcttggacggtatggtgagcagcaggggggcataatatatgcagtagcgccatgcagaagttgggggaggagagattttggttaacacttcccactctcccaccgcccacacttcaaatcagtccgaattcccgtgctgtcagagaaaaggggaggtgtgcgagggaaataaggacttgctatcaccggtcccatttcaaatggtaaattcaggtagtattaatcctgtttcagagttgggggtataactcaaggctagaaaca

SEQ ID NO: 490745 - DNA, 627 bp, Homo sapiens
aaatgaggtggtttcccaaagaaagagaagcagcagaagtcaagttcatttggagtgtttcagcatatgttctgaatttgaaaacattgtgcagaaggaaggcaagaaaacaagatttttccacatagcttgggaaatgtgtgggaaagtgtttgtagcaggaggaatcaattataaactcttcctgtccttttcttatgcctgtttcacttttccctcatagaccagaaagagtagttcaggaagttccagattaatggattaawgatctcatcaaataacctttgtggaagtcaatctattgcttcccatgtgtattagtcaaagttttgtggttgcaagtgacagaaacccaattcaaaaacaatgaaagcaaaaccaaaaaggactccattggctgatgtaattgaaaagcccagtaggtagtgcaacctcagtcatggctgcattcaggggcttgcatagggacatcaggaatctgtcttcctcagtcccttggcttgactttactctgagttgacttgattattaaatggactctcacttaatggtggtaaacatggcctggcttgaactaactcaacaaactcagcagaaagaagctttttctcaatgtagcaaaagacc

SEQ ID NO: 490746 - DNA, 627 bp, Homo sapiens
aaatgaggtggtttcccaaagaaagagaagcagcagaagtcaagttcatttggagtgtttcagcatatgttctgaatttgaaaacattgtgcagaaggaaggcaagaaaacaagatttttccacatagcttgggaaatgtgtgggaaagtgtttgtagcaggaggaatcaattataaactcttcctgtccttttcttatgcctgtttcacttttccctcatagaccagaaagagtagttcaggaagttccagattaatggattaaagatctcatcaaataacctttgtggaagtcaatctattgcttcccatgtgtatyagtcaaagttttgtggttgcaagtgacagaaacccaattcaaaaacaatgaaagcaaaaccaaaaaggactccattggctgatgtaattgaaaagcccagtaggtagtgcaacctcagtcatggctgcattcaggggcttgcatagggacatcaggaatctgtcttcctcagtcccttggcttgactttactctgagttgacttgattattaaatggactctcacttaatggtggtaaacatggcctggcttgaactaactcaacaaactcagcagaaagaagctttttctcaatgtagcaaaagacc

SEQ ID NO: 490747 - DNA, 656 bp, Homo sapiens
cttgcacatgacccttccccatgtgcaagcattccatgttaagaatgtttaatcctcaggacctcagagaaatttgtttccagtgatgctgtttatttttttgcttttatttgtttatttttttaaagacaaggtctccctctgttgcccaggctggagtgcagtggtgtgatcatagctcactgtaaccctgaactyctgggctcaagctatcttccttcctcagcctcccaagtagctgacactataagcatgtactaccacacctggctaaaggtgatattgttgaaatgaaaacttagctgtatctgagggaagggatatgtgttatatttgtagaggattgatgtcagggacagactgtttacaatgaattccctaatgaatcacttctgggatgatttccaggtgtagaggtaagaacgtgaagtgagagggctgaggttccataatccttgcatttttctactttcaaaagacaggagattggctgggcacagtggctcatgcctgtaatcccagcactttgggaggccaaggcaggtggatcacctgaggtcaggagttcgaggccagcctggtcaacatggtgagaccccatctctactaaaaatacaaaaattagctgggtgtgctggtgcacacctgtaatccca

SEQ ID NO: 490748 - DNA, 382 bp, Homo sapiens
taaaaactttttaagttatttttatttttaaaaattttatttttaatctacaaatagcaattgttttcaccagattattttaaagcaaatctcagattgcatattctgtcattgatgaatatttcagatcttatttataacagatgaacacacatttacaaattattacatttacttatttatttttggtgggttggtttgctgtttatttatttattgtggcaaaatatacataacaaagyttgctattttaaccatttttaagtgcacaatccagtggcattagaaacattcacattgttgtacaaccattgctccccttctatctccagaacttttctgtcttccaaaactgaaattctgtacccattaaacaataact

SEQ ID NO: 490749 - DNA, 402 bp, Homo sapiens
tgtaaaaactgtgtcttttctgatctctatctggcatctggcaccactcctggaatatagctagcattcaacaaatattggttctctcaactgtatcgagttaagagaattggaatacaatatattattcaaaccaaacaccatctatttktctacaaagagtatggatacagaagtaaaagttcgcatagatattgactttagacagtttcatgatcacagcccccaagcaaattacttaatttcttgaagcttaatttttcttatcttccaaatctctgagatctcttctcatctatagcataatgagactaatatttgccccaaaggacaaataatatattaatagtaaaatgctggcatagtgattggcacacattaagtaatgactacatagtagct

SEQ ID NO: 490750 - DNA, 632 bp, Homo sapiens
ttgatctgtaaaaactgtgtcttttctgatctctatctggcatctggcaccactcctggaatatagctagcattcaacaaatattggttctctcaactgtatcgagttaagagaattggaatacaatatattattcaaaccaaacaccatctatttttctacaaagagtatggatacagaagtaaaagttcgcatagatattgactttagacagtttcatgatcacagcccccaagcaaattacttaatttcttgaagcttaatttttcttatcttccaaatctctgagatctcttctcatctatagcataatgagactaatatttgccccaaaggacaaataatatattaatagtaaaatgctggcatagtgattggcacacattaagtaatgactacatagtagctattattaggagatcaaggtgttgaaaaaacaaaagaatttgaaaaacatgtatgagagaaaaatgcttgtcttatgaagtataaggaatgcaagacaggacagcatcaacaatgacttgatatcaaaggtgcagtgtracaccagaaaaatagtgactttgccaaccaaggtgatgaggaaaggaagaagttcttgtaaaagatgacgatatttagtttgaggt

SEQ ID NO: 490751 - DNA, 280 bp, Homo sapiens
agatatatacaaacatacacatttacatgcttatataaaaatgtrtaccaaaatagacacacacacacatttgttagagtatttattagttatctaatatatgcaatccataaaaccaaactaacacatttttctaacaaactttaaaagactaaaagtattcaatacaagtaaactatcaccataggaatatttaatgaatgtacatcaggaagataaaaattgataccaaagaaaaagctgcaatgtcagaagaaaatgggagtgaaccaaaaaaaaa

SEQ ID NO: 490752 - DNA, 280 bp, Homo sapiens
agatatatacaaacatacacatttacatgcttatataaaaatgtgtaccaaaatagacacacacacacatttgttagagtatttattagttatctaatatatgcaatccataaaaccaaactaayacatttttctaacaaactttaaaagactaaaagtattcaatacaagtaaactatcaccataggaatatttaatgaatgtacatcaggaagataaaaattgataccaaagaaaaagctgcaatgtcagaagaaaatgggagtgaaccaaaaaaaaa

SEQ ID NO: 490753 - DNA, 280 bp, Homo sapiens
agatatatacaaacatacacatttacatgcttatataaaaatgtgtaccaaaatagacacacacacacatttgttagagtatttattagttatctaatatatgcaatccataaaaccaaactaacacatttttctaacaaactttaaaagactaaaagtattcaatacaagtaaactatcaccrtaggaatatttaatgaatgtacatcaggaagataaaaattgataccaaagaaaaagctgcaatgtcagaagaaaatgggagtgaaccaaaaaaaaa

SEQ ID NO: 490754 - DNA, 280 bp, Homo sapiens
agatatatacaaacatacacatttacatgcttatataaaaatgtgtaccaaaatagacacacacacacatttgttagagtatttattagttatctaatatatgcaatccataaaaccaaactaacacatttttctaacaaactttaaaagactaaaagtattcaatacaagtaaactatcaccataggaatattkaatgaatgtacatcaggaagataaaaattgataccaaagaaaaagctgcaatgtcagaagaaaatgggagtgaaccaaaaaaaaa

SEQ ID NO: 490755 - DNA, 599 bp, Homo sapiens
caagcagatgctctctcctccatatacgctgtttattagataggcctgtatgggctaactgagtcaaacctgaaaagacagagacagtgtggtcagttcaagcatagattgttctgttcttttctctcatggcccagggctctcaggagccatctctctagcatagggccacaatagtatttaataagggcttataataagaagactgagcttttaagtttattttcaaagtgaacttttaaaaattggctttcctttttatttatttgaaatgaataagacagtctcccaggtgaagagggtggggaaatacaggggtgtagaattttgctggaatttctggaattagctatgtcctcgggcattcctgctgccttgagtgtggggcctttcatgtaggtggggatgtggctaaaggaagggaggctgggtgttttgaaaacaaaatactttgtattatcctcagggcctgattcactgggctgtgtgcaggagaattaggagaatttacttttaaaagaaattcttggtaactgcargctgtggcagcttggttccagcacgcagcacctacttcaaatggttttccagagaaatgc

SEQ ID NO: 490756 - DNA, 643 bp, Homo sapiens
gtggaattcaagtaactagttaaagattttttgcctcattttttaatctataaaatagaaataatgatactatttacctcacagagttgatatgagaacaagattcatcatggctttaatgtgtttagaaaatatcttactgacctcatagctcacgggtgtgagctattattattacagctattttacttcttcatttccagtgtggagactgtatttataacattaggatatgcattattgtgcatacatctccctatttatttctgtattatttctttaaaatatataccagtgtctaaccagggtcagttccaaatcccacatgctgtggtttttaccacctctctgacatctgcctcatttcaccattactagctctattgccattcctcaaaattagcaatgcacttcccygtagaaatttgttatttgtgatcatctctcctgtccagaagcaaggtattatacaagtgcatttactttagtcacattataatggctgttttcttttaagaccattctagatactggatgaaacagaagactcataatttccccattcgtagactttactttttatgatgattttgactgagaaatctggattacattgtctgacttagcttagaaatacaaagac

SEQ ID NO: 490757 - DNA, 606 bp, Homo sapiens
tgcctttgtgtgtggctgaattatagggtctaggtaaaagtrgaaagaggaaaagcagggatggtttggttttaaccaggaaactttgactttaccccataagtgatgagaaagcactgaagacccataagccaaccagacatgtgttctagaaagtccaccagaaacaacatgtaagatgttagagagccacttctggaggcttaaagaggtgggctcttagattatttttacaatgatatagacagaggcaatgaggtacttcacttagtcacaggtagtgatccgagacccgttcaggaaataaaacctacagcactgggtgattaactgaatactctaatacagtgaatgaagacgcggacttagtccataatagagtttagatttctgttttcactgtgagatttttatacttgggcaggcggtggggggattatgtcatagtttatgtgggaagaaaagtccattttcagtaaacctgatgactttccatttgggtgtctcttatgagatgttgtagccattagtgtaaatagccagtttacactgagatatatgagtctaagcttataaaaggtggttaggagtaatatgtatgaatct

SEQ ID NO: 490758 - DNA, 606 bp, Homo sapiens
tgcctttgtgtgtggctgaattatagggtctaggtaaaagtagaaagaggaaaagcagggakggtttggttttaaccaggaaactttgactttaccccataagtgatgagaaagcactgaagacccataagccaaccagacatgtgttctagaaagtccaccagaaacaacatgtaagatgttagagagccacttctggaggcttaaagaggtgggctcttagattatttttacaatgatatagacagaggcaatgaggtacttcacttagtcacaggtagtgatccgagacccgttcaggaaataaaacctacagcactgggtgattaactgaatactctaatacagtgaatgaagacgcggacttagtccataatagagtttagatttctgttttcactgtgagatttttatacttgggcaggcggtggggggattatgtcatagtttatgtgggaagaaaagtccattttcagtaaacctgatgactttccatttgggtgtctcttatgagatgttgtagccattagtgtaaatagccagtttacactgagatatatgagtctaagcttataaaaggtggttaggagtaatatgtatgaatct

SEQ ID NO: 490759 - DNA, 562 bp, Homo sapiens
tgcctttgtgtgtggctgaattatagggtctaggtaaaagtagaaagaggaaaagcagggatggtttggttttaaccaggaaactttgactttaccccataagtgatgagaaagcactgaagacccataagccaaccagacatgtgttctagaaagtccaccagaaacaacatgtaagatgttagagagccacttctggaggcttaaagaggygggctcttagattatttttacaatgatatagacagaggcaatgaggtacttcacttagtcacaggtagtgatccgagacccgttcaggaaataaaacctacagcactgggtgattaactgaatactctaatacagtgaatgaagacgcggacttagtccataatagagtttagatttctgttttcactgtgagatttttatacttgggcaggcggtggggggattatgtcatagtttatgtgggaagaaaagtccattttcagtaaacctgatgactttccatttgggtgtctcttatgagatgttgtagccattagtgtaaatagccagtttacactgagatatatga

SEQ ID NO: 490760 - DNA, 569 bp, Homo sapiens
aacaccagctctgtggccactgggctgtactgcaacccgggacctcccagatagtaatcatcccggacaggctggtttgtagcagctcctctatctacccttgagagaaagattgcagggagtgagataacagagtcgattttcctagggtaaaagctctcaaaagtaaacattccaaagcattgtatatctgtgtctatttttctttagtctttgattacaaacaggcaaacatttcccgggagcgttgatagcacaagtgtggcttgcagagtagaaaggatttttcatgttagcatggggacacctgagtgtgaaaaaatataacctttccctccccttagctcttaagataagtgcagagcttgaagccttttatctgtggccatttatttatttttatatgtcttttaaaaactacaacttgcttcattttcttccatgacaatttcatgaaaggcwgtgtctttaaagcagcggtgtctttactgcagtgtgagttttcacggcggtggacggactccttgctggacgtcagccctgcccctggcatgcgtagccccgagcct

SEQ ID NO: 490761 - DNA, 650 bp, Homo sapiens
gctgattttttttattgctcttttatcctgtaaccttgtggtattcatttaattctgatgtgtgtgtgtgtgtgtgtgtgtgtgtgtgtgtgtgtgtgcatgtttgagttcgttagaattttctatataagataatttgtagggatagttttattttttcttttctaatttatatgctcttatttctttattaataatttttaaaaatataaatatcaccaaaacttctgtgaggcataatgcatttaactaccaacatttaatgacrttgatttttatcacttctttctttataagttacagtaaaggtagaggtatgcaaatttccaaattacatgatgaaaaggagtcagtgaaagaagaaataagaacacaggtgacctcactagcttagctttcttctttccctggaatgaatcgagttccttgattatttggtctcagtttctgtgtttagagaacttgagaggtatgttagagctcagtgtgccatcatcatttactaaaggttcataagagagggaatttatgagtaggtttgattactaatttgtagaccttatccgtttcgtcaacagatttaattggtgtttccattttcaataagaaatgtcaactcatgtatgacaattcaatccatttttcaaatc

SEQ ID NO: 490762 - DNA, 616 bp, Homo sapiens
caggtacatttcaacatgggattcctccctcccttttctttgtagccagtgtaggggtgttatggtgccatccaggtagagaccacatatgcataaaaaagattagggtgaaaccaatcccctgggccccatttaaatcaatcactgcctcctcaagcctctctacaaaatcaatcgcatccctccccaaatctggaaaccctcttgggcaccccgctttctctgtatgagaaagctgtctctctctctcttttatttatttatttttgtctgttaaaccttctgctccttaacctgctctgtgtctttatgtctatgtcattaatctttttggcgtgagatgacgaaccttggatattaccccagacaataaagtcacatcaataatgtttccatcttatatacctagttagtttttaagctttggtgggatagcagtttgagagtgaagttctaaattttctgagatgtataaatgcttaggaaattcagtgtttatggaagacaatttttttttcatmcatttgacaagaatcaaatgttcattttgtgttcgtaacaaacatcttctcatatcatgcaacttgatgttcagtaagtaaaatatgattatgct

SEQ ID NO: 490763 - DNA, 591 bp, Homo sapiens
catttttccacatttttttcagatgctttaaagtaggccttatcttcattccaaggaaaggattattaaaaacatatgtggagttgcggagaggaaatgagtgtattagttagagtctctctggctctgagcctgactccaaaatcttacacaactccatttcacaacccagatccccaacatcaggattgtctcataaatgatgtgctgtggggcattggtgctggctacacatcaagctgcgaaatagccaagtttggtctggtgccttttcttctcttttttcacactgtaagcattaaaactcctcttacatgtttatacattcactgccacctaatctgggtttgacctatgactattttgaccaatagaatttggagaaagtgatgtttctggatttctgagcccrggcattgcaaagacctgaaatctttggccatgccttgagccactacagaggaagtccaatttcccctgctgtagagccagaccacagggagaggccttggaggttgagccatcacctggagatcggccatatggcctctaagcacctgaggcctagacattcagcccagtcgagcctca

SEQ ID NO: 490764 - DNA, 575 bp, Homo sapiens
ggtggtcccagggagagaaggagctaacccctcctcctttccccactgcaagatccccagcctgaggaaaaatataagttgtaagttggatgacagctttgagttttgatattatgctggacaaagctttttaatacctggaaaaggagactccttatttaatacccgcataagctgtgagatctaccccaagattytctctaaaagtgggaggatggagtttacagtatagattaaaagagatagaagtaaaatgaaaaaaaaaatttcatcttcctctaggacatagggaaggcatcttggtcatatattcaagtagaattgctgaagacatgttaactcctgctaaatgtatttcagctttcttgtccagattttcaatatgaccccaaacctcttttcagcattgcttctcttgaaacacgtgcttatctcttttttcaaccaaataaaactctttgctacccctacccccaacctctcccactcttctgtacacctgtgtatatatatgatttcctctttctcagattttcctatttctgctagttgaaatcccttgtgactttcaagtt

SEQ ID NO: 490765 - DNA, 595 bp, Homo sapiens
tcaaactacaatgctcttaaaaagacagtggcttaaattagaggtttgtttcttctcatgtcattgttttgaggtgggcgtttcaagctggttggggggctctgaatctctaagctattcaagagcacagtttctttccatcttgccatggggtcatacttgaggccatttttcacacatgcaagggcaaagccgggtcttggcaaattcagccagcctgcaagaaggatgaaaagaagtccaggatgagcagttgtttttcaataagtttcacacacaggagcttttgttctttccctcagatcccattagtgagaacttagtcacgtgactgtcaccacatgggaagctgagaaacatartcttgaatagggaagacatgcccaggaaaaaagggagaatggaattttgaggacaaatagctattaaccagaaatatcaatatcaatagttgtaaaagtcaaataagataataagtgctaagcacctgctgatgtagagtattactgaggacgtaatactcaataaaaagcttttacctgccctcatttatattcttctttagagattgaaaattattagaagaagaggaggg

SEQ ID NO: 490766 - DNA, 590 bp, Homo sapiens
taatcatgcattttaatagatcttctaactacaaatgttccaaaaggcttttcatattgtctggaatcacaacaatccaatatccccaytaggtgaccaaggaaaggagggttgggatgatgttgggtgttttttcaaatgtaaatctattatgtatggctccccaagatagttgtgggaacaaaattggaacatgtaacgcatccattaaaggcctcaaaactcatgaaattcattgttcatagaaacataatgagtgcaaaagactgacatttcctttgccattgtttctttctttaatgctccctagtgccccatattcctacaggaaacagctccccattccttcctcttaatggacatcaaaaggcttagaagctatttgtacatacaccatatgtgcattgtagagactgaaatcaaatcttatttcaagttcccaagtgggaattatggaggggacttgtcagggttactccaggaaatgaaggtgaaggttatcacatttattttccatatccagaaaaatctcatgtagcctatctccaataagagatttgtctttcaaagttaactctatatttcccaga

SEQ ID NO: 490767 - DNA, 508 bp, Homo sapiens
atagtgcagcatatatttgttcataactttatttgcacagaaattttacatccattatcagaattgattctgactactacactagaaggtgagttctcatgaaaaagggtgaatccaacattattaagtaccacacagctagtaactgatgatatctttttttttttttttatggagttttgctcttgttgcccaggctggggtgcaatggcrcgaactcggctcaccacaacctctgcctcctgggttcaagcaattctcctgccttagcctcctgagtagctaggattactcaagtcatctgacttccaagttcaaacttttaaaaatatctcatggtggtctttgacaggataccataagtgttgaaccattggtttaactacatgcatcaaggatatacaatttcccttagtttctatgttcaactatgggctaatcccaaggaataaggcaggattactgttgtagaatctattgaggagttattattcccatggttgaggaa

SEQ ID NO: 490768 - DNA, 466 bp, Homo sapiens
tggggatcagattatgtcccccaggcagggcattgttcgccctttagccgggctgactggagctactattcatgctcacaaaggctctgatctcctttgaattcctgtaagccttttgcctggtaatcccttccagcaggcagcacacccgtggctgcagttggcagtcgcgaatatgcctccctcccttcattttgccctgattatctctttatctcattaagggccttgagctcttgtgttaacatgtgaaaagtaggtagtggcttcaaattggctttraagatgcaacttggaattttctctttcaaagcagggggctgttatgggagtcaggaggctccattcattctggacatcagcgctaatgagctgtttgaacttggaaaagtcagtggcttcactgggcctcagtttcctcatttgtgaaatgaaggggctgtgttcattcagcatgatatcggag

SEQ ID NO: 490769 - DNA, 556 bp, Homo sapiens
cactttgtttttaatgaatcaaaaataaattacagaccctcttcccaccctccctttagcctcacagtggctgacrcccctgctactccagccaaggcagcctgcctcaggagtaggaacttacagagggcacggccgcagtcttctcgctgaaaaggactttggaaatcattcagatgagttccctctgtggatgaagtcagttcagcagaccgctggccgcctgggtggaattgaactgaacactcccttgggggtgcttttatcaaattatgcccatctagtgtaatgttttaactatttttcagtatatctcacactgttatattttattttatgtgtgttagctgcctctgttagtctgtttgcattgctataaaggaatactgagactggataatttattaaaaaaaaaaagaggtttatttggctcagggttctgcaggctatataagcatggtaccagcatctgctcttggtgaggctttaggaaacttacaaccatcgtggaaggtgaagggggagccaggacatcacttgttaggagaaagaagca

SEQ ID NO: 490770 - DNA, 556 bp, Homo sapiens
cactttgtttttaatgaatcaaaaataaattacagaccctcttcccaccctccctttagcctcacagtggctgacacccctgctactccagccaaggcagcctgcctcaggagtaggaacttacagagggcacggccgcagtcttctcgctgaaaaggactttggaaatcattcagatgagttccctctgtggatgaagtcagttcagcagaccgctggccgcctgggtggaattgaactgaacactcccttgggggtgcttttatcaaattatgcccatctagtgtaatgttttaactatttttcagtatatctcacactgttatattttattttatgtgtgttagctgccyctgttagtctgtttgcattgctataaaggaatactgagactggataatttattaaaaaaaaaaagaggtttatttggctcagggttctgcaggctatataagcatggtaccagcatctgctcttggtgaggctttaggaaacttacaaccatcgtggaaggtgaagggggagccaggacatcacttgttaggagaaagaagca

SEQ ID NO: 490771 - DNA, 626 bp, Homo sapiens
tgcacacacaggcacacaatatgtacacacatgcacacatgacatgaacacaggcacacatgcacataatatgtacacacatgcacacaacatgacatgcacacacatgcacacacatgcacacaatatgtaacacatgaacacaacatgacacacaatatgtaatacatgcacacatgacatgcatacacacatgcacaaacatgcacacataggtacacacatgcacacatgagatacacgcrcacacaatatgtacacacatgcacacaacatgatgtgcatacacacatgcacacacaatatatacacacatgcacacaatatatacagacatgcacacatgatgtgcatacacacaaatgcaaacacacgcacacaatatgtacacacatgcccacatgacatgcatgcacacatgcacacaatatgcacacacaggcacacaacataacatacacacatgcacacaatatgtacagacatgcgcacaacatggcgtgcatacacacaaatgcatacacaagcacacaatatgtacacacatgtgcacaacgtgacatgcatgcacacatgcacatacagacacaatatgtacacacatgcaaacacgcatacacaaatgc

SEQ ID NO: 490772 - DNA, 588 bp, Homo sapiens
caccctcccacattaaacaaccataaaattggacaacatttatgaggcaactgatttcaggtgtgaacaacaggtagtgcaagactccaaggaagaggaggaggtgtgcgccccatagttccctggctctcagcccggttacagcttccctgtggcaccacaagcggaagtccaagggagcctggtggggtcccaccgacccaaagatggtcccactgtcctcggtcccactgagccgaggcygcaaagatcggaatttggggaatgtcaaagtgctaactgccagtgcctgggaatgtgacctgacgtggaacagggtctttgcagatgcaattcaattgaggtcgcctgaatttagggcagccctaaatcaatgactggtgtccttagaagagaagggagaggggggtttggcacagagacgcagggatggaggcagagattggagtggtacatctacaaggcaaggagagtcaagggttgccaagttaaaggagaggtgtgtgtgcatagtctctctcagagcctctgggaagaaccagccaggccaaccccttggttttggacttctggcctccaggacggtga

SEQ ID NO: 490773 - DNA, 588 bp, Homo sapiens
caccctcccacattaaacaaccataaaattggacaacatttatgaggcaactgatttcaggtgtgaacaacaggtagtgcaagactccaaggaagaggaggaggtgtgcgccccatagttccctggctctcagcccggttacagcttccctgtggcaccacaagcggaagtccaagggagcctggtggggtcccaccgacccaaagatggtcccactgtcctcggtcccactgagccgaggccgcaaagatcggaatttggggaatgtcaaagtgcwaactgccagtgcctgggaatgtgacctgacgtggaacagggtctttgcagatgcaattcaattgaggtcgcctgaatttagggcagccctaaatcaatgactggtgtccttagaagagaagggagaggggggtttggcacagagacgcagggatggaggcagagattggagtggtacatctacaaggcaaggagagtcaagggttgccaagttaaaggagaggtgtgtgtgcatagtctctctcagagcctctgggaagaaccagccaggccaaccccttggttttggacttctggcctccaggacggtga

SEQ ID NO: 490774 - DNA, 588 bp, Homo sapiens
caccctcccacattaaacaaccataaaattggacaacatttatgaggcaactgatttcaggtgtgaacaacaggtagtgcaagactccaaggaagaggaggaggtgtgcgccccatagttccctggctctcagcccggttacagcttccctgtggcaccacaagcggaagtccaagggagcctggtggggtcccaccgacccaaagatggtcccactgtcctcggtcccactgagccgaggccgcaaagatcggaatttggggaatgtcaaagtgctaactgccagtgcctgggaatgtgacctgacgtggaacagggtctttgcagatgcaattcaattgaggtcgcctgaatttagggcagycctaaatcaatgactggtgtccttagaagagaagggagaggggggtttggcacagagacgcagggatggaggcagagattggagtggtacatctacaaggcaaggagagtcaagggttgccaagttaaaggagaggtgtgtgtgcatagtctctctcagagcctctgggaagaaccagccaggccaaccccttggttttggacttctggcctccaggacggtga

SEQ ID NO: 490775 - DNA, 639 bp, Homo sapiens
tagctgatctctgtgtgccatctgagccagtttctgggggaagacaatcccctcagtgtagatggaggtaaatatcacagtgaaatgccagacaggctgagagcatttagcattacctgggaaagcagggtgtaygtgttaagattattatcagaagaaaagaaaagggcacagaaggcggtattgaggcagggggaaggaaagcagtgtgtgtggctccgccaggaacagggggcattttgttcaaaaagcaggatttggcttcagctctcttcatttttcctcattttagtttagtatgacagaacagtggaaattggctcaggttacatgttacaaagaggagtgaactgatagctatccttcccattttcgtaatgttgtgtttgaggataagtagtaagaaaatgtgctcgaaagtctcagagaccctatgatatgattctgctattaaggagagtagggaattgtctgtgattatggcagtattgcactgaagatttattaggttctttttttgagacggggtctggctttgtcactcaggctggagtgcagtggtgtgatcacggctcaaccacagcctcggccttccaggctcacgtgatcctcccatctcaacctcctgcaaagctggga

SEQ ID NO: 490776 - DNA, 639 bp, Homo sapiens
tagctgatctctgtgtgccatctgagccagtttctgggggaagacaatcccctcagtgtagatggaggtaaatatcacagtgaaatgccagacaggctgagagcatttagcattacctgggaaagcagggtgtacgtgttaagattattatcagaagaaaagaaaagggcacagaaggcggtattgaggcagggggaaggaaagcagtgtgtgtggctccgccaggaacagggggcattttgttcaaaaagcaggatttggcttcagctctcttcatttttcctcattttagtttagtatgacagaacagtggaaattggctcaggttacatgttacaaagaggagtgaactgatagctatccttcccattttcgtaatgttgtgtttgaggataagtagtaagaaaatgtgctcgaaagtctcagagaccctatgatatgattctgctrttaaggagagtagggaattgtctgtgattatggcagtattgcactgaagatttattaggttctttttttgagacggggtctggctttgtcactcaggctggagtgcagtggtgtgatcacggctcaaccacagcctcggccttccaggctcacgtgatcctcccatctcaacctcctgcaaagctggga

SEQ ID NO: 490777 - DNA, 639 bp, Homo sapiens
tagctgatctctgtgtgccatctgagccagtttctgggggaagacaatcccctcagtgtagatggaggtaaatatcacagtgaaatgccagacaggctgagagcatttagcattacctgggaaagcagggtgtacgtgttaagattattatcagaagaaaagaaaagggcacagaaggcggtattgaggcagggggaaggaaagcagtgtgtgtggctccgccaggaacagggggcattttgttcaaaaagcaggatttggcttcagctctcttcatttttcctcattttagtttagtatgacagaacagtggaaattggctcaggttacatgttacaaagaggagtgaactgatagctatccttcccattttcgtaatgttgtgtttgaggataagtagtaagaaaatgtgctcgaaagtctcagagaccctatgatatgattctgctattaaggagagtagggaattgtcygtgattatggcagtattgcactgaagatttattaggttctttttttgagacggggtctggctttgtcactcaggctggagtgcagtggtgtgatcacggctcaaccacagcctcggccttccaggctcacgtgatcctcccatctcaacctcctgcaaagctggga

SEQ ID NO: 490778 - DNA, 629 bp, Homo sapiens
agcaggctttcggagtgggaggtgaagatgtggctcttcctgggcccgaggcctcttctccctgactgagcgcagtgtctgcgtctctcactgatgaccgcctttctcggcttctgaccaggactgttttgagttctcagtctctcgcacagcccatttgcatargactggggggacaccaggtcttgtagctcacgcctcccagtggccacctctgaaattgggaggcctcttgctgggagacaccaggagcatctgcagccagtgcgctctttccagaaagccctttacctgtggcttagacggtgccctatttctcactgggaactgcccgtctttctgttctgagtggtggtttccaggcagagcccctgcctgtctatgcagtgggcactcactctgtggggacctctgggacttgttcaccccgagcctgggtacccaacctgccctggccagcaaagcccctcggtaaatcttgtgagatgctgaataaactccagcaccagctcggtcattggcctctcacggcctgtctagcagctcgtttggacctgccctcagcctggccaggcccgcctcaccagccacctgactcaggctcctctcagagggctctgaagagcaca

SEQ ID NO: 490779 - DNA, 629 bp, Homo sapiens
agcaggctttcggagtgggaggtgaagatgtggctcttcctgggcccgaggcctcttctccctgactgagcgcagtgtctgcgtctctcactgatgaccgcctttctcggcttctgaccaggactgttttgagttctcagtctctcgcacagcccatttgcataggactggrgggacaccaggtcttgtagctcacgcctcccagtggccacctctgaaattgggaggcctcttgctgggagacaccaggagcatctgcagccagtgcgctctttccagaaagccctttacctgtggcttagacggtgccctatttctcactgggaactgcccgtctttctgttctgagtggtggtttccaggcagagcccctgcctgtctatgcagtgggcactcactctgtggggacctctgggacttgttcaccccgagcctgggtacccaacctgccctggccagcaaagcccctcggtaaatcttgtgagatgctgaataaactccagcaccagctcggtcattggcctctcacggcctgtctagcagctcgtttggacctgccctcagcctggccaggcccgcctcaccagccacctgactcaggctcctctcagagggctctgaagagcaca

SEQ ID NO: 490780 - DNA, 629 bp, Homo sapiens
agcaggctttcggagtgggaggtgaagatgtggctcttcctgggcccgaggcctcttctccctgactgagcgcagtgtctgcgtctctcactgatgaccgcctttctcggcttctgaccaggactgttttgagttctcagtctctcgcacagcccatttgcataggactggggggamaccaggtcttgtagctcacgcctcccagtggccacctctgaaattgggaggcctcttgctgggagacaccaggagcatctgcagccagtgcgctctttccagaaagccctttacctgtggcttagacggtgccctatttctcactgggaactgcccgtctttctgttctgagtggtggtttccaggcagagcccctgcctgtctatgcagtgggcactcactctgtggggacctctgggacttgttcaccccgagcctgggtacccaacctgccctggccagcaaagcccctcggtaaatcttgtgagatgctgaataaactccagcaccagctcggtcattggcctctcacggcctgtctagcagctcgtttggacctgccctcagcctggccaggcccgcctcaccagccacctgactcaggctcctctcagagggctctgaagagcaca

SEQ ID NO: 490781 - DNA, 604 bp, Homo sapiens
ccatggctgccttgcttgacttgaagccaagaaggcatcagcactcacccccatctcccaaaggctttgactatcctcactatcaccactccttgccaccatatctgggattttgatactgggtttcttcagaaaataatttgacaagaaatttttatgcatttctacatagcctcactggagaataaagagtcctggtcatgagagaaaacacaagttccaagaatggaaaacaaaattctaaggttttatacagaatagtctcgcttctctatactttgggttattctctcaggccctggagatgctcctcaaatgtgcatcctatcatgtatggtttctccagasgtaccgctgccacctacgcagcatgcttcccctgtcccactgtcaccttcttctggtcacaaacctttttccctgcacagggcagagtatatgacccaggctggaccaatcaagtacctttccctactcctcaagccagcaacagttctggggtgataggggtacttgacccgatctaggtcactcacagaatttcactgttgtttttcttaacagaactaacatgaaagacactccttttcctttgacaaaagct

SEQ ID NO: 490782 - DNA, 604 bp, Homo sapiens
ccatggctgccttgcttgacttgaagccaagaaggcatcagcactcacccccatctcccaaaggctttgactatcctcactatcaccactccttgccaccatatctgggattttgatactgggtttcttcagaaaataatttgacaagaaatttttatgcatttctacatagcctcactggagaataaagagtcctggtcatgagagaaaacacaagttccaagaatggaaaacaaaattctaaggttttatacagaatagtctcgcttctctatactttgggttattctctcaggccctggagatgctcctcaaatgtgcatcctatcatgtatggtttctccagacstaccgctgccacctacgcagcatgcttcccctgtcccactgtcaccttcttctggtcacaaacctttttccctgcacagggcagagtatatgacccaggctggaccaatcaagtacctttccctactcctcaagccagcaacagttctggggtgataggggtacttgacccgatctaggtcactcacagaatttcactgttgtttttcttaacagaactaacatgaaagacactccttttcctttgacaaaagct

SEQ ID NO: 490783 - DNA, 316 bp, Homo sapiens
ttctgccctctgggtgtcactggagacacagagcaatgcacagagcaatggctcctgctgacccagccccggacagtacctccyggggttctctctcgcctctccatgtgcctgaagaccaggcatgttcctactgaagctgggactcagcaacacccgaccttcctctcaactcctcccagcctctggactgaggctgaccctgaattcccaagtctggttctcagccacacctgccccacaccgaggcctgaaccaggagggcttagggcccatggcagttggtcgagcatgaaaatcccgcaggcccagggcc

SEQ ID NO: 490784 - DNA, 526 bp, Homo sapiens
atggtgtgacagcttgtgtcaaaatcacctttgagtagcttctaattacacatgcacagttcttatagatgaaactggcctgggtaaactgtgaagactaactcagtggagaccacaactctccctctgtctagtgcccyctacccatttccaaggtagggaagggtctcatttcaatcccttacacaagctgatcaattcactgattatactccaatgtgaatagatgtcataagtcttgatcattcaatcagtctgaagacgtaaccggcaagtaatctgatttagtactcttgatgtgttttttgcagtatataatgtacctttcccagataaattccttaccacagactcaaagtgcataagccaaactagatttgaatgcccagttcctaaggctttatttcctttcactttacacatttacataagtcttatggagaaagactttttgatatgtggtgtctcttttctcccagaaacttatttgagcctattaggcacaagttttggtggaagtatttaa

SEQ ID NO: 490785 - DNA, 598 bp, Homo sapiens
atatgctcctctctccctctcccttcaaaccgtgatataaatactctttagttatggcatatttgacgatgttaaacatayagtgttgtttttaaactgaaattctttcctgacattctggaatgcaatcccctgtgcttgcttcattttctctctgataacaacagaaacttcattaaacattcccgaatatagcctcttcattaattaaggtattactgtagaagtacttgtttcctaatcaactctcaagactgtgtctttaaatagaaccaccaacctcctcacagaaagtcttttcctcacagaaaagaaagcttcattttctactgtgctattttttttctttctatccacaggacacatgggagtcccaccagcttgaaaaaaatttcacagagctggcatttccatcagtgcagacacggctctgaaaacagtaattgctgccttatgggcatgatacgcccatttctactctgacctcctcccaggagaaactcttctgcaaatgaccacagtacttcacttgagttctgcgtcatcctcctcctattagttcaagtggtctgctaagcggttcatgaaccacttccct

SEQ ID NO: 490786 - DNA, 598 bp, Homo sapiens
atatgctcctctctccctctcccttcaaaccgtgatataaatactctttagttatggcatatttgacgatgttaaacatacagtgttgtttttaaactgaaattctttcctgacattctggaatgcaatcccctgtgcttgcttcattttctctctgataacaacagaaacttcattaaacattcccgaatatagcctcttcattaattaaggtattactgtagaagtayttgtttcctaatcaactctcaagactgtgtctttaaatagaaccaccaacctcctcacagaaagtcttttcctcacagaaaagaaagcttcattttctactgtgctattttttttctttctatccacaggacacatgggagtcccaccagcttgaaaaaaatttcacagagctggcatttccatcagtgcagacacggctctgaaaacagtaattgctgccttatgggcatgatacgcccatttctactctgacctcctcccaggagaaactcttctgcaaatgaccacagtacttcacttgagttctgcgtcatcctcctcctattagttcaagtggtctgctaagcggttcatgaaccacttccct

SEQ ID NO: 490787 - DNA, 451 bp, Homo sapiens
tgcttcattttctctctgataacaacagaaacttcattaaacattcccgaatatagcctcttcattaattaaggtattactgtagaagtacttgtttcctaatcaactctcaagactgtgtctttaaatagaaccaccaacctcctcacagaaagtcttytcctcacagaaaagaaagcttcattttctactgtgctattttttttctttctatccacaggacacatgggagtcccaccagcttgaaaaaaatttcacagagctggcatttccatcagtgcagacacggctctgaaaacagtaattgctgccttatgggcatgatacgcccatttctactctgacctcctcccaggagaaactcttctgcaaatgaccacagtacttcacttgagttctgcgtcatcctcctcctattagttcaagtggtctgctaagcggttcatgaacc

SEQ ID NO: 490788 - DNA, 451 bp, Homo sapiens
tgcttcattttctctctgataacaacagaaacttcattaaacattcccgaatatagcctcttcattaattaaggtattactgtagaagtacttgtttcctaatcaactctcaagactgtgtctttaaatagaaccaccaacctcctcacagaaagtcttttcctcacagaaaagaaagcttcattttctactgtgctattttttttctttctatccacaggacacatgggagtcccaccagcttgaaaaaaatttcacagagctggcatttccatcagtgcagacacggctctgaaaacagtaattgctgccttatgggcatgatacgcccatttctactctgacctcctcccaggagaaactcttctgcaaatgaccacagtacttcacttgagttctgcgtcatmctcctcctattagttcaagtggtctgctaagcggttcatgaacc

SEQ ID NO: 490789 - DNA, 615 bp, Homo sapiens
tgtaacacggagcacgtcccttcccatctctgatctctctgcatcttagtttcctcatctgtaaattgatgacactgagctacacsaaaggatttcacccaagctaaataacagaaccacctggagagctgtgggaatgtccaaaagccaggcctcgctccagaacgatggtatcaggatatcggaatgtgaagctgggtgtatctgaaaaactcctcatgtggcacatcgaaaggtcacaggtgccaacctaaaggcgtccccagacatcaaagctggaacaatttgagcaacaaaataatgatagaacggataacccacagggtacaggaaatattcataagttcatagtaacaaaaaattaaatatatagtaaatggggagaaggagacactcttccttacagtagcattccaattaataaatgttgaaaaatgatggagatagcaagccaccatttggcaaacaccacagtaataattgttgcagacacaaatcattgatggatactgaattgagtaaaaatatatgagaaacgtgatacgtgcatagccttgcagtatctccccaggagctagcattaattacaaagggaaaaataaaactttacagaga

SEQ ID NO: 490790 - DNA, 615 bp, Homo sapiens
tgtaacacggagcacgtcccttcccatctctgatctctctgcatcttagtttcctcatctgtaaattgatgacactgagctacaccaaaggatttcacccaagctaaataacagaaccacctggagagctgtgggaatgtccaaaagccaggcctcgctccagaacgatggtatcaggatatcggaatgtgaagctgggtgtatctgaaaaactcctcatgtggcacatcgaaaggtcacaggtgccaacctaaaggcgtccccagacatcaaagctggaacwatttgagcaacaaaataatgatagaacggataacccacagggtacaggaaatattcataagttcatagtaacaaaaaattaaatatatagtaaatggggagaaggagacactcttccttacagtagcattccaattaataaatgttgaaaaatgatggagatagcaagccaccatttggcaaacaccacagtaataattgttgcagacacaaatcattgatggatactgaattgagtaaaaatatatgagaaacgtgatacgtgcatagccttgcagtatctccccaggagctagcattaattacaaagggaaaaataaaactttacagaga

SEQ ID NO: 490791 - DNA, 615 bp, Homo sapiens
tgtaacacggagcacgtcccttcccatctctgatctctctgcatcttagtttcctcatctgtaaattgatgacactgagctacaccaaaggatttcacccaagctaaataacagaaccacctggagagctgtgggaatgtccaaaagccaggcctcgctccagaacgatggtatcaggatatcggaatgtgaagctgggtgtatctgaaaaactcctcatgtggcacatcgaaaggtcacaggtgccaacctaaaggcgtccccagacatcaaagctggaacaatttgagcaacaaaataatgatagaayggataacccacagggtacaggaaatattcataagttcatagtaacaaaaaattaaatatatagtaaatggggagaaggagacactcttccttacagtagcattccaattaataaatgttgaaaaatgatggagatagcaagccaccatttggcaaacaccacagtaataattgttgcagacacaaatcattgatggatactgaattgagtaaaaatatatgagaaacgtgatacgtgcatagccttgcagtatctccccaggagctagcattaattacaaagggaaaaataaaactttacagaga

SEQ ID NO: 490792 - DNA, 534 bp, Homo sapiens
ttttgcaggtgtacttttgatttaatcattgttgcttcataatacacttgtttaatggttcatgtctttcctgcttattattctattgcaaagttatcttgaatattctcaccggtttattattatagataatctatagctttatttaatttytggctttgtcagccaaattctcacacaccctcatgctattgaaattttcactggagatcattggcatcactggttgagttcaaaaacattgtataatctcttcatctctttctagttaagtaattgttttcatgtggctcttgcaagttaattaggtttatttctgcacattttggttttgctgttgtgaataggaactcttttgttacattttacaatccttgatgtaatattcttgatattattgtaacttgttaattaataatagctacccattgaacactctgtgctaaataatcttatttgtttctctcatcaatccccctcaggtagatactgttgcattgtgctcattttatatttgagtctgaagggtgaaca

SEQ ID NO: 490793 - DNA, 508 bp, Homo sapiens
ctgcacgcttttctgctttgttcatttagtccctacttaaacagaaacttaacagagaggctttccctaaccaccttaaacaaaacagcaccctacaccccttctatgactctctctctctccttatcctgccttatttttctgcayagcacttatgactgacatatttttattaacttattagtttatcatctgtctttcctcacagaacgtaaacttcgtgagagtagggataaagatccaggcactcatatatgtattaaaaagaataagttttatgtatataggtgttatgttatatgcaataacataattgttagaatctttccaaatcagggaaatggaactcaaaattatcacatactaattgtgatggctaattttatatgtcaactttaataggccacgatactcaggtatctcatcaaatattattctagatgtttctgggaaggtattttttagaagagactaatatttaaattagtagactgagtacagcagatga

SEQ ID NO: 490794 - DNA, 552 bp, Homo sapiens
tatgtgccaagcattattgagctatcaagatgcctccaccatattcctattctgctcaacttggattcttagtgcctcctgaacacattatggccattcccaaccagaacctgtgccctggtttgcaatgcctttctcacccattcctccctgtttcattcttaaccagtatccttcagcacctagctgctttgagcttttgctgaacttaatgggtacattgaaaatgtgaagtttctttatatcaaggtaattttattttaagttccagggtacatgtgcagggtatgcaggtttgttacataggaaaatgtgtgccatggtggtttgctgcacctatcaacccatcacctaagtattaagcccagcatgcattagctgtatttcctgatgctttcccccactcccacccacrgcaggccccagtgtgtgttctgtgttgttcccctaactatgtccatatgttctcgttgttcacctcccacttacaagtgagaacatgtagtgttttctgttcccgggttagtttgttgaggataatggcttccagct

SEQ ID NO: 490795 - DNA, 677 bp, Homo sapiens
acatatgcagaaaattatctgagagagaagattctaagacatttttttaaaacagccaaaaaagtccccctcaaacaaaactaattttatttcccactattttatgtgggacttttagaagggggatatctcactgatgttgtacactgttttacttaatattttgggaagtaactgcctctgacttcaactgaagaaaacacttttttgttgcaaatgtaatgtttttgtaatggtgtcagcaaataaaaggatgcttagtatttaaaaaaaaaaaaaaagaagggggatgtctcaaaataaaacaacttcaataatttactctaaggtgtcacaactccaaaaaagtaaaccattccttccgaattttaatagcgctttgtatcttccttttagcacttgtcactttctgcctggaagtatattgtctgtgtcttatctctgttggtttaacagctccctctgagaatgaaccatgtcttgttcatccattttgtaaaattattttgcttgccaggcatggtagctcatctctgtaytccttgcactttgggaggctgaggcaggtgtatcacttgagctcaggagtttgagaccagtctgggcaacatggcaaaataccatctttacaaaaaaatacaaaaactagctgggtgtggtggtgcatgcctgtagtc

SEQ ID NO: 490796 - DNA, 573 bp, Homo sapiens
tccctgagccgactcagccctgagcacaggcggctgcggagccctgcacagtaccaggttggggggaggcccaccctgtcattctgccctgtgcgcccccgccctcaccctgcccaccgctcctgtcctctgctccctgcaggtggtgctgtccgagaggctgcaggccctggtgaacagtctgtgtgcggggcagtccccctgagactcggagcggggctgactggaaacaacacgaatcactcacttttccccacagcttgtcctgtgttgtttgtgtcgtttgttcacccagcccacgggctgcgcctcccgggctgcggctgggctggagtcgggaatctgagctcgaggtagcaggaagatttgcatcccagtgaaagcacaggccctgccggcgtgggagacagccctgtgctgaagcccgaagggcagtgaggagttcccyggctttgggtgggctgtggggagtcagatcccacactagaactacaaagccacaggcagggagggctttggtgtctgccttggagttgagggagttgctgcagacctttccttgctagaggcagg

SEQ ID NO: 490797 - DNA, 354 bp, Homo sapiens
tcacctcttctgtaaggccttcccagctctgtgccacagcaggcaccccctcacctgtgctccttcacacctgaggrcacatacttaactcaccctactgtgatctccgtcttccccactacacggtggatgacttcagggtagtgggttgctcatctgttttcccaacattgaggactattccttatagatatcaatacattttgaaatgacacaatgagccagagagcatggaaaatgacaagagctcagttcaacctcagaactgctacaacagaagagttacgtagcgcattgagactgtgcctttcgagtgagacagaaagatacagacaagtaagtaaagaccttctc

SEQ ID NO: 490798 - DNA, 596 bp, Homo sapiens
tctgccttgtacacctgacgcctgccacttcaaccccaccaacagctaacacatggctgcagcttggcacttaatacttttttttttttttttttttttgagacagagtctctctctgtcacccaggctggagtgcagtggcgcgatctcggctcactrcaagctctgcctcccgggtttatgccattctcctgcctcagcctcccgagtagctgggactacaggcacccaccaccacgcccggctaattttttgttttttagtggagacagggtttcaccatgttagccaggatgttctcgatctcctgacctcgtgatccacccgcctcggccttccaaagtgctgggattacaggcctgagccaccatgcccggctggcacttaatactttgagtttacttgtttggtactgattgtccctgccagtagaaaggaagctccgtaaggtcagggacccccgtctcgttccatgtctagcccagtgcctggcccatgtggacctcagcaactgtggtggatgctgcgatgagaggccccgggagacccctccagtgacaggctgggtgtcccagttgttcagggtgtggtaagcg

SEQ ID NO: 490799 - DNA, 596 bp, Homo sapiens
tctgccttgtacacctgacgcctgccacttcaaccccaccaacagctaacacatggctgcagcttggcacttaatacttttttttttttttttttttttgagacagagtctctctctgtcacccaggctggagtgcagtggcgcgatctcggctcactgcaagctctgcctcccgggtttatgccattctcctgcctcagcctcccgagtagctgggactacaggcacccrccaccacgcccggctaattttttgttttttagtggagacagggtttcaccatgttagccaggatgttctcgatctcctgacctcgtgatccacccgcctcggccttccaaagtgctgggattacaggcctgagccaccatgcccggctggcacttaatactttgagtttacttgtttggtactgattgtccctgccagtagaaaggaagctccgtaaggtcagggacccccgtctcgttccatgtctagcccagtgcctggcccatgtggacctcagcaactgtggtggatgctgcgatgagaggccccgggagacccctccagtgacaggctgggtgtcccagttgttcagggtgtggtaagcg

SEQ ID NO: 490800 - DNA, 596 bp, Homo sapiens
tctgccttgtacacctgacgcctgccacttcaaccccaccaacagctaacacatggctgcagcttggcacttaatacttttttttttttttttttttttgagacagagtctctctctgtcacccaggctggagtgcagtggcgcgatctcggctcactgcaagctctgcctcccgggtttatgccattctcctgcctcagcctcccgagtagctgggactacaggcacccaccaccacgcccggctaattttttgttttttagtggagacagggtttcaccatgttagccaggatgttctcgatytcctgacctcgtgatccacccgcctcggccttccaaagtgctgggattacaggcctgagccaccatgcccggctggcacttaatactttgagtttacttgtttggtactgattgtccctgccagtagaaaggaagctccgtaaggtcagggacccccgtctcgttccatgtctagcccagtgcctggcccatgtggacctcagcaactgtggtggatgctgcgatgagaggccccgggagacccctccagtgacaggctgggtgtcccagttgttcagggtgtggtaagcg

SEQ ID NO: 490801 - DNA, 259 bp, Homo sapiens
ctgggatctggggtgtctcgaggtggacgctcacaaaacgtggaaaggcctagaaccttgtggcaaatggaaacggctcagcctgggctctgcctgaggattggaggacgcaaaacttggctccagccagaagcttacaaggctgggtgatckcggggtgtctgggtgggcccggctgaaaccagcaccctgcggtagatctctgacctgcaccccggtgcttcccagccggttcccactgcgtgggcctgggaggacg

SEQ ID NO: 490802 - DNA, 259 bp, Homo sapiens
ctgggatctggggtgtctcgaggtggacgctcacaaaacgtggaaaggcctagaaccttgtggcaaatggaaacggctcagcctgggctctgcctgaggattggaggacgcaaaacttggctccagccagaagcttacaaggctgggtgatcgcggggtgtctgggtgggcccggctgaaaccagcaccctgcggtasatctctgacctgcaccccggtgcttcccagccggttcccactgcgtgggcctgggaggacg

SEQ ID NO: 490803 - DNA, 422 bp, Homo sapiens
ggatgaagcctgcggaggcttggggaaggggcttctagaaccagggtattttctcgggctggcagcccagcagtgacagttttgctgtctttgcgctgggcccgtctgcaccagggcccactctcgtgcctgctatttctggaggccctggtgctcccatctctgtagcccactgtgcataaggcccaggggctggtggatgctggcctggggcacggtcagaggccttctgggtctccacctcagttgatgggcgagaccctccctgatggascctcccatcagcaggctgggagccggacagatagctggacagctccccaggatactcaccttggccctggtgggctggacagtgaagtggtggagcagccttctctcctgcttggcagcctcagacagttctttgcacagagtagtaa

SEQ ID NO: 490804 - DNA, 553 bp, Homo sapiens
ctgcggaggcttggggaaggggcttctagaaccagggtattttctcgggctggcagcccagcagtgacagttttgctgtctttgcgctgggcccgtctgcaccagggcccactctcgtgcctgctatttctggaggccctggtgctcccatctctgtagcccactgtgcataaggcccaggggctggtggatgctggcctggggcacggtcagaggccttctgggtctccacctcagttgatgggcgagaccctccctgatggaccctcccatcagcaggctgggagcyggacagatagctggacagctccccaggatactcaccttggccctggtgggctggacagtgaagtggtggagcagccttctctcctgcttggcagcctcagacagttctttgcacagagtagtaattctagtttcatcttcttattcattaaccaattgtgaaattagcaacttattttcttcctagttatttccctttgaagttccataaaaatctgaactctccctcactcctgctccacataaaacagagcaaggctgcgac

SEQ ID NO: 490805 - DNA, 537 bp, Homo sapiens
cttaattcggctcctgctacyattaatgtagttaatgctgagattatatctattttctggcgtcaggcggtgatttattcaagccatttttccggtggaggctcccacgctgttaaatcaagcgccttgccaattaagtgctgacttgggaagtggacgcaatcttagcagacgtccaaccgcaaattaaaccgcgcctgactctggggagtggacggggcagcgggacccttgctgacttgcaggaaagtcaggaaagtggtgggtgcatcctacccactgtggtccctgggccggtccctgggcctgtccctgagccacgggtctctggaactgcagcccacacccacactccaggccacagggttccagggaaacacccttagacacccgtggttcctaaaccacgcccagcaagcacctgacacacagggccctggcaggtactggggatggggcaggggcggcgggggtgaagggggccatgaggaaggtgggagcctccccagcaggtgggtggggctgcacagtgctcag

SEQ ID NO: 490806 - DNA, 231 bp, Homo sapiens
cgtggcctggcgggagactttggccctgtctgcccgttctccttgctggtgctcrgtgccctatctgtgaatggggtcaggagtgtttgctgtggggctgagcggtgcctttgggtgctttggcccggtgtgatgttcctgctgggctgtgctgctggccagcattgcccacctgggaggctctgcctggtgcctctggggtatgtgatccaccattgcttgctgtgtgca

SEQ ID NO: 490807 - DNA, 507 bp, Homo sapiens
tggatttccccactgctcaggaagaactgctggagatgccagagaaagcgggagatggagagagctcaggaacacaaaagatcccaggaatgacaagcactccaccaccaggtaggggctgggtgtgtgtgctcgcaagcttttataaaaaggaataaaatgtgtcatttcagattggataagttgaacattactaattaagaaattacttaattatggagaagaaaataaaacgaaggtattttgccctagagggaaaaaaattttcgatttgccaaatcaaggaaatgatgagattccaattattcattaaataattgraaatggctccaacaaaagcattagaatgtacgtgctgctcaggcctcccagggagctctgccttcctctcaaagcctctgtgttgtgtgcttcccttctgcaaataagtctcctctagaatggactgaatgaatactcccacacttggggcaaaaaaaaaaaaaaaaaaaaaaacagaggggcaaa

SEQ ID NO: 490808 - DNA, 507 bp, Homo sapiens
tggatttccccactgctcaggaagaactgctggagatgccagagaaagcgggagatggagagagctcaggaacacaaaagatcccaggaatgacaagcactccaccaccaggtaggggctgggtgtgtgtgctcgcaagcttttataaaaaggaataaaatgtgtcatttcagattggataagttgaacattactaattaagaaattacttaattatggagaagaaaataaaacgaaggtattttgccctagagggaaaaaaattttcgatttgccaaatcaaggaaatgatgagattccaattattcattaaataattgaaaatggctccaacaaaagcattagaatgtacgtgctgctcaggcctcccagggagctctgccttyctctcaaagcctctgtgttgtgtgcttcccttctgcaaataagtctcctctagaatggactgaatgaatactcccacacttggggcaaaaaaaaaaaaaaaaaaaaaaacagaggggcaaa

SEQ ID NO: 490809 - DNA, 507 bp, Homo sapiens
tggatttccccactgctcaggaagaactgctggagatgccagagaaagcgggagatggagagagctcaggaacacaaaagatcccaggaatgacaagcactccaccaccaggtaggggctgggtgtgtgtgctcgcaagcttttataaaaaggaataaaatgtgtcatttcagattggataagttgaacattactaattaagaaattacttaattatggagaagaaaataaaacgaaggtattttgccctagagggaaaaaaattttcgatttgccaaatcaaggaaatgatgagattccaattattcattaaataattgaaaatggctccaacaaaagcattagaatgtacgtgctgctcaggcctcccagggagctctgccttcctctcaaagcctctgtgttgtgtgcttcccttctgcaaataagtctcctctagaatggactgaatgaataytcccacacttggggcaaaaaaaaaaaaaaaaaaaaaaacagaggggcaaa

SEQ ID NO: 490810 - DNA, 628 bp, Homo sapiens
ctgcctgccagttatgttctccaaggataacatgacaggaaaaaaaggaagagacaattctkgtgctaaagaaagcagccgcctggatgctccacttagaagaatgccacttcatcctgtctctaaaaggggtatcctaatgtccaggaaaaaatgccaagtgctgggaacctcccagggttgccaacagtggcaatgtcacctgttggaaactgagagagccagagcggagatgccaagaggtggttcacctgcaaggaaaacaaagtgaaatgggaaagcatgttcctggttaggtggggatgagtttcgcaaggcttcatgttatgtgagtgcccaggaacgcggtggtgctgaagcgaaaggatgtgcatatatatgatggctgctgagaaccgtcatagatgcctgttctctcaaagaacaaagtcattcttcctggaacaccacgaaggcgcccaaccccaattcatctggctaatctgtagttctaacctgaaaaccaccaagatgaggactcaagtgtgtcaaggaaattgaaaacgtgataattttgttagcaccacctcatgaggtgagctggtggaggttatatatggtgctgtttttactttaaaatatgaataaa

SEQ ID NO: 490811 - DNA, 564 bp, Homo sapiens
ttgctgtaagctatcatcagtccccaacatctaaaatttccccatggagacaaaagatggaaaagctgtgtacaagcttggttccatcttgcaaggcagtatgtgcaagtataattgtagccttttccagagccattttaagggacaaaaaaagaggaagggagaagggaattgatgcctatcaaaaatgttgtggtaatctctttgaatgaccatcaccatgaattcctgttgctctctttccytccctccctctctctttctcttcctatctttcctctttctttcctgacatctttattgagatatagttcatataacatacaattcactcattcaaagtatacaattcaactgattttagtttgttcacagagttgtacaacaattactacaatcaattttagaacattttcatcaccccagaaaagaaatcctgtgtcctttagcagtcacctccaatctccccatctccccagttctatacaaccactcatataatttcttttctctctagaaacaaatgactattctggactttttgtataaataaaattatgcaag

SEQ ID NO: 490812 - DNA, 683 bp, Homo sapiens
agtcagaatcaagattagttcaaatcttggacatgttttactttcaatgtttttccatcttagcagcactctgagttcatgttttaattgccatatgcatccaggatgtatactttcaaagcatagacaggcagaatgccaaaacaccacaaaatggagaaatgcccaaaaaattgggatgtatcgctaaataacttgttttataaaaatgttcttctttttttccaggtccctatgaatttagggtaagtttactctcagtaactaaacatttggatgcttgggtgagctagactctgaactccttgaggtttgtggctctcactcatgcctttcggtctaatgaagggatggggaggaatttatgatgactcttccgtactctggacagctcctgctgcctgcctgccatggaaaagcttcatcaacagattgttaatttccctcctttctccctgaatagcattatgccttctggcaggaagcactgtgttgcatccatccatgcgctctcacctgtggacatgtggagctrtctaatgggctcctgctttttgccccactgggctgtgactgagcagggagacagagctgtacaagttgctaattgtctcagcctgtaactcttgaatgatgaaaaagattaaaagggaaggaaaacagctattatatctctttcctga

SEQ ID NO: 490813 - DNA, 574 bp, Homo sapiens
ggcagagggaaaatgatggaggatgggttcggcggacaggtaggactggccatctcccatctacccaacctagtgcaggagggaaggatggcttcagccggaggtggaatggctgacctcctctgggcatgcagacctctgggcaacgttacctcggcagagacccctccttgattattccacctaaatcattcccggatctttgtctatttctttatgtctatcttttcacagcagttctcaatggctgacagtgaattattttttatgtgtgttcattgtctgcctgttccgctggaatataagctccattaaggcttggaggctttgtttggtgacagctaatttctcagcacgttgaacaataccagattcatagtaattaataaacaataaaaaaccattgattgaatgaatggatggcatgaaatactgacctaaaaagttaggaggtaaatactggcagataagtttggagaggcggtgagaaggcaggcagagacctccaaccctatttctcagacatagyggctttagcagtgttgacattttctgagctggagacacagcatga

SEQ ID NO: 490814 - DNA, 201 bp, Homo sapiens
ctcaggatgggacactcggctttcccggggycgaggaccacaccctggtctcaaggccgaggctgttgccacttccagcacccacactgacgccatccacctggtacaggctctggcaaacagcgctactgcaggggtcactggacggtcacacagaggagggcctgagattctgtcagccggttccatctccacaaccca

SEQ ID NO: 490815 - DNA, 454 bp, Homo sapiens
acgtggcctcagtctagacagagagacaggcaaagtgggcacgacgggggtctgtgaaaccaacccaaccttcattcacccaccacgggaccctcccttctgggcagagacaggtgctttcgacccagcaggtgggcgctgacagctccactgccacacaagcccctggcatcttctcgctgcagacacacttggtggcaagtgcttgcgtgtggacgctgcgtggcccgatgtcccatcggtcagtgtccaagaggaaggctctgggatgccgcttactcagagagccctgcacgcaccactcccagcttcacctgtgctgccaggctgggaccaagtccaccttggagatgtggctggcaactgtcatcgctaccaggtccatctcgccgccactcactccccaccgccctccaataatgccaacaaaacycacagtggagccagggtctcg

SEQ ID NO: 490816 - DNA, 578 bp, Homo sapiens
ccacgagtgctggatggttccaggggtgcccaccactgttggcctgggatggctggcctgggtggatgtgagtactttccgtggtcctggggctggagtgaggcccggaactcggccgcttgtctcttgtctaagaagcttgtatcactagatctctcctggtagagattttgtcttctcccagggaatctggtaaggtggggcctctcagatcaccggccccccaggctcccctcagggctgttcatttattcatgggatatatcagctttgagtcctgtgtgcttgacttctgggctctgcagatacagcagggaacaaaacagtgtggcttctgttcatagcgatcccaggatgtgctcaggggacataaacagtagccactttcagagcttccctggggagacattcgggtgtcctcagggtgggtctcgtggctgtgcatgtgggcaccaaagccacagggagggaaggctcttgctcccggcagtgcagcagggccgggcagagygagggtggggtccggtctcctgcctctgtctggggcccctcacacctctaatccgtccagggcccag

SEQ ID NO: 490817 - DNA, 295 bp, Homo sapiens
catccaaggacccagggctctcagaggtgagggcacgtcgatccacctgagctggatgttgaggggtcagcacgtgagccactaggatctcgggcaacgttgccactggcaagagcggagggcggcaggggatcgggaccaggggtgagccgaggctggatggaggctgggcctggggcgcagggagagagccccacgcttctagtggcaacaagagccacgagggcttccaagcaggggtgtcgtcaggarcagctcagctttatgaagtctaggctggcagcgtgccgacacc

SEQ ID NO: 490818 - DNA, 619 bp, Homo sapiens
gcttatttgctgtctgttttcatctttggtgaagtgtcagttcaaattttgtgtatttaaaaaataggcgttgtttttcttatgactgagttgtaagagttcttctatgttctagatgagagatatttataatgtacacaatttggaaatattgtctcgtagcctgtggcttgtcttttcattttattagcagtgtcttttgaggagaaatttctgttttgatgaggtctaatttatgattttgttcttttatactttgtgctttttgagtcctacctaagaattcatgcctgtctcaaagttgcagaacttctgctctgttttcttccaggcttgtagttgtaggttttacatttaggtctgtgaccctttggtgtgaattcacttttgtctacagtgccctgcagtgcccaygtcctgtggccaccagcagctggccaggctttccctgtcacagttgcctttgtccacctgggcagctggcttggccaagtcttctttgccacctgtgaacaacagatgtgaagctgttgggccaccctgcgggttttggtgctggtgtcagcctttgcccaactgtttgtcctcagaactgcagggtgactgtattagttcattt

SEQ ID NO: 490819 - DNA, 619 bp, Homo sapiens
gcttatttgctgtctgttttcatctttggtgaagtgtcagttcaaattttgtgtatttaaaaaataggcgttgtttttcttatgactgagttgtaagagttcttctatgttctagatgagagatatttataatgtacacaatttggaaatattgtctcgtagcctgtggcttgtcttttcattttattagcagtgtcttttgaggagaaatttctgttttgatgaggtctaatttatgattttgttcttttatactttgtgctttttgagtcctacctaagaattcatgcctgtctcaaagttgcagaacttctgctctgttttcttccaggcttgtagttgtaggttttacatttaggtctgtgaccctttggtgtgaattcacttttgtctacagtgccctgcagtgcccacgtcctgtggccaccagcagctggccaggctttccctgtcacagttgcctttgtccacctgggcagctggcttggccaagtcttctytgccacctgtgaacaacagatgtgaagctgttgggccaccctgcgggttttggtgctggtgtcagcctttgcccaactgtttgtcctcagaactgcagggtgactgtattagttcattt

SEQ ID NO: 490820 - DNA, 619 bp, Homo sapiens
gcttatttgctgtctgttttcatctttggtgaagtgtcagttcaaattttgtgtatttaaaaaataggcgttgtttttcttatgactgagttgtaagagttcttctatgttctagatgagagatatttataatgtacacaatttggaaatattgtctcgtagcctgtggcttgtcttttcattttattagcagtgtcttttgaggagaaatttctgttttgatgaggtctaatttatgattttgttcttttatactttgtgctttttgagtcctacctaagaattcatgcctgtctcaaagttgcagaacttctgctctgttttcttccaggcttgtagttgtaggttttacatttaggtctgtgaccctttggtgtgaattcacttttgtctacagtgccctgcagtgcccacgtcctgtggccaccagcagctggccaggctttccctgtcacagttgcctttgtccacctgggcagctggcttggccaagtcttctttgccaccwgtgaacaacagatgtgaagctgttgggccaccctgcgggttttggtgctggtgtcagcctttgcccaactgtttgtcctcagaactgcagggtgactgtattagttcattt

SEQ ID NO: 490821 - DNA, 619 bp, Homo sapiens
gcttatttgctgtctgttttcatctttggtgaagtgtcagttcaaattttgtgtatttaaaaaataggcgttgtttttcttatgactgagttgtaagagttcttctatgttctagatgagagatatttataatgtacacaatttggaaatattgtctcgtagcctgtggcttgtcttttcattttattagcagtgtcttttgaggagaaatttctgttttgatgaggtctaatttatgattttgttcttttatactttgtgctttttgagtcctacctaagaattcatgcctgtctcaaagttgcagaacttctgctctgttttcttccaggcttgtagttgtaggttttacatttaggtctgtgaccctttggtgtgaattcacttttgtctacagtgccctgcagtgcccacgtcctgtggccaccagcagctggccaggctttccctgtcacagttgcctttgtccacctgggcagctggcttggccaagtcttctttgccacctgtgaacaacagatgtgaagctgttgggycaccctgcgggttttggtgctggtgtcagcctttgcccaactgtttgtcctcagaactgcagggtgactgtattagttcattt

SEQ ID NO: 490822 - DNA, 530 bp, Homo sapiens
tgtagacctgtaatacaggatgagacagtaggagaaaagtctccaaaagccaattgtctgaatttaaggtgcctgtaaatacacaagaatcatcgtgcaatacccctctaccccacccagcgtcaggccagatggcaggtgggtgtagtttccagtcgtctgaagaagaagaccttggcatgcttctcccacatccctcttcaacacatcccccaagttgtacattgtatttggtgacatmtaaatttcttgctgcttcatatggtctcttcagtaacctgattttacttgtatttaaatgtgaaggccagggttggctctattattatgtaaactgtaaacacatggtgattgtaggagttactctggaaataaggcaatacatttctatgtaattaattaaaaagctaaaaaattgataatttttttcaaaattagctaactctaacttaaaatgttctcagcaacttgtagatacataaaacaatctgtagaactaccgtagaactattaagcaatttctaagaact

SEQ ID NO: 490823 - DNA, 552 bp, Homo sapiens
tgccaccttcactaggccattagaccttcttacaaaggacattggaaacagaaaatcttaaaggagtaattaatctcagaaggccccctttgagtccttgggtttttttttgatggactccacctaaccatggactcctaagaccctccctccactgtagtgtatgtctgtgagtagactgaggacttgaacagggctaatctgtacaggatatakagaagaagccagtcttacacagggctcagtaagggagtaagggaggaatttagcagaaaagatttgggaaaagattctactttaccagtagaaataaaatatgttcattttgaaattggcaaataagagtaagatacaccaagaagtttttctttgtttagaagtgggaggtctttggggggattaatgataaattttggaggagattggatgtatttgttgaaactcaaatatggcctgctaaagaatggaaagttacaatgtgtttcttatcaatagataagaaatctcttacctattggtgattcagactctatcatctaagatgaactacaa

SEQ ID NO: 490824 - DNA, 601 bp, Homo sapiens
caagtgtggccattgccttgcatgacaatagaggaaaattctaggcaagtgtggccattgccttgtgtgactgccccactcatgtccatctggtcctggggcctgtagcctgcctgcacctcacagtcctaacagagctgttgacatccgtggagccccagaatttcaccaactgctagatgtatctttgggaagtgtattttgtggaacatactcagaacatgaggctgtcctttctacagctttcctccctagaccttctcaataactctgttcttaaatgtagacaagagcctgggatcatgaaaagcattgaaacctcagtaaccccrggacaaatggagaaccaaaatcctgtgcactggtgggtccttgggggaggagtaaaggggagtctaggagtcagggggccgtggggtgacccagtgtggaacagcaatatggcctcaggaggtgaaaaccacagatgggtctagctggggtacagagatggtaaggacaggaattccaaaggagctgagatcattgcaggggagacaaatgtgaaaactgtacactctggagcttcgtttctgacttcaaatcaggttctgccacatgg

SEQ ID NO: 490825 - DNA, 601 bp, Homo sapiens
caagtgtggccattgccttgcatgacaatagaggaaaattctaggcaagtgtggccattgccttgtgtgactgccccactcatgtccatctggtcctggggcctgtagcctgcctgcacctcacagtcctaacagagctgttgacatccgtggagccccagaatttcaccaactgctagatgtatctttgggaagtgtattttgtggaacatactcagaacatgaggctgtcctttctacagctttcctccctagaccttctcaataactctgttcttaaatgtagacaagagcctgggatcatgaaaagcattgaaacctcagtaaccccgggacaaatggagaaccaaaatcctgtgcactggtgggtccttgggggaggagtaaaggggagtctaggagtcagggggccgtggggtgacccagtgtggaacagcaatatggcctcaggargtgaaaaccacagatgggtctagctggggtacagagatggtaaggacaggaattccaaaggagctgagatcattgcaggggagacaaatgtgaaaactgtacactctggagcttcgtttctgacttcaaatcaggttctgccacatgg

SEQ ID NO: 490826 - DNA, 601 bp, Homo sapiens
caagtgtggccattgccttgcatgacaatagaggaaaattctaggcaagtgtggccattgccttgtgtgactgccccactcatgtccatctggtcctggggcctgtagcctgcctgcacctcacagtcctaacagagctgttgacatccgtggagccccagaatttcaccaactgctagatgtatctttgggaagtgtattttgtggaacatactcagaacatgaggctgtcctttctacagctttcctccctagaccttctcaataactctgttcttaaatgtagacaagagcctgggatcatgaaaagcattgaaacctcagtaaccccgggacaaatggagaaccaaaatcctgtgcactggtgggtccttgggggaggagtaaaggggagtctaggagtcagggggccgtggggtgacccagtgtggaacagcaatatggcctcaggaggtgaaaaccacagatgggtctagctggggtacagagatggtaaggacrggaattccaaaggagctgagatcattgcaggggagacaaatgtgaaaactgtacactctggagcttcgtttctgacttcaaatcaggttctgccacatgg

SEQ ID NO: 490827 - DNA, 530 bp, Homo sapiens
tgggcatgttccccaaagcccagccgcttgccatttccttaggagcatctcattatccttttttgcttttgctctttgggcctctgcaaatggtgagaggaaaagggctgttttttcttccaagagcaggacattccaggtggggcttaggagcaacatgacatcctgttctgtatgtgccttagaagggtctgagatttttatagtttaaggtaacctgcagagaactattaacgtcacaagggaaggaaccagggaggacaattcctacggagaggaagagagaagtttgcttactgatagtagaaaaaatattcatcattcaaagaaatgtctgggaatggggctgaaaaagttgagatsactaaaggttgagggagaactttaaagacatcttagtaggaaggaaaactttaccctggcccataaacatcacatgttaaggcttctttgagagcataacctaccactcccgctgggttctctttctgctctagccacactgattttactgggcctgaagttcccca

SEQ ID NO: 490828 - DNA, 569 bp, Homo sapiens
gcgtggtgcctcatgcctgtaattccagctactcgagaggctgaggggagagaatcgcttgaacctgggaggcagaggttgcagtgagccaagatcatgccactgcactccagcctgggcgacagagcgtgactccatctcaaaaaaataaaaaattagataaataaataaataaagcaagctatgtattttcattatgtacaggcatctcctgcttaaatrtaagtaatctgtaaaaatgaaaatttgctgtgtgaagaagctaatagaattcatgatacacctcagtcaaatcccttaatttcctacaaagacaatggaaatgcaataaaactatcatgttagactgtaagatgcttaaagcatctcttagtatcaaagttgctttgtgtgcaatagtatcttctcttccatatttgtttttctcacacatacgtggctgtcttctgtacagttttagacacttgctgtacttttttgggacttgcacaccactaggtaaaaacaaggtctagacgtggaaggcactacgaaaatgcattaaaagcacatgctggaaagtggaaaca

SEQ ID NO: 490829 - DNA, 583 bp, Homo sapiens
gaatcacgaggtcaagagatggagaccatcctggccaacatggtgaaaccctgactctactaaaaatacaaaaattagctgggcatggtggcatgcacctgcaatcccagctacttgggaggctgaggcaggagaatggcrtgaacccaggaggcggaggttgcagtgggctgagattgtgccgctgcactctagtctggcaacagagcgagactccgtctaaaaaaattttaaaaattaaaaaaaaaaaaagacaaaaaaacgtggtccgaggaccagtagcatcagcaaccctggatcagaacctctggggctggggctcagatgattaacttcaggtgattctgatgctcactaaataggagaaacatggatctacataattactttgtgtgcatgtttattaatatcccttcaaaaaggaatttaagagtagatttttttaatgtaagaatcagaaaataatgtatatgctttttatgctggtaacctccatctagatgactagaagagtttttagatctaatgttaagaagacatactaatttcctaattacttggagaagctacctaatgtgaggca

SEQ ID NO: 490830 - DNA, 583 bp, Homo sapiens
gaatcacgaggtcaagagatggagaccatcctggccaacatggtgaaaccctgactctactaaaaatacaaaaattagctgggcatggtggcatgcacctgcaatcccagctacttgggaggctgaggcaggagaatggcatgaacccaggaggcggaggttgcagtgggctgagattgtgccgctgcactctagtctggcaacagagcgagactccgtctaaaaaaattttaaaaattaaaaaaaaaaaaagacaaaaaaamgtggtccgaggaccagtagcatcagcaaccctggatcagaacctctggggctggggctcagatgattaacttcaggtgattctgatgctcactaaataggagaaacatggatctacataattactttgtgtgcatgtttattaatatcccttcaaaaaggaatttaagagtagatttttttaatgtaagaatcagaaaataatgtatatgctttttatgctggtaacctccatctagatgactagaagagtttttagatctaatgttaagaagacatactaatttcctaattacttggagaagctacctaatgtgaggca

SEQ ID NO: 490831 - DNA, 583 bp, Homo sapiens
gaatcacgaggtcaagagatggagaccatcctggccaacatggtgaaaccctgactctactaaaaatacaaaaattagctgggcatggtggcatgcacctgcaatcccagctacttgggaggctgaggcaggagaatggcatgaacccaggaggcggaggttgcagtgggctgagattgtgccgctgcactctagtctggcaacagagcgagactccgtctaaaaaaattttaaaaattaaaaaaaaaaaaagacaaaaaaacgtggtccgaggaccagtagcatcagcaaccctggatcagaacctctggggctggggctcagatgattaacttcaggtgattctgatgctcactaaataggagaaacatggatctacataattactttgtgtgcatgtttattaatatcycttcaaaaaggaatttaagagtagatttttttaatgtaagaatcagaaaataatgtatatgctttttatgctggtaacctccatctagatgactagaagagtttttagatctaatgttaagaagacatactaatttcctaattacttggagaagctacctaatgtgaggca

SEQ ID NO: 490832 - DNA, 479 bp, Homo sapiens
cactaaccccctcccttatcactctgtctccagtcacatacagcctatttagtgtgttgataaccatattaaaatcatccacatacagtttgaatattgatgaaagcacaactatatttagatttgatttttcttccctagtcctcaccctccccaaactctcatctttcctatttctttaagtttctcgaaaattgtgcaaattgttaaacatttatcagaatatgtttttcatatcaagacacatccatacagtaaaggttttggctgagctgatcagcttctctgatcgggagaaattgcttctgtgtaagaactaatacccacctggtttcaaacctcarccgctggcaaatatgtcatagcaagagacatttcctgtttctttgacagattggcccggggctgaaatttaatctagtatgtcaaaagtggtaggtggggagaaaaagcagagaaactctgtccccactcagatt

SEQ ID NO: 490833 - DNA, 439 bp, Homo sapiens
ccttgcatgactatttccccatatgtaaaatggatgctaaaattttgtcttttgacatcacaataatgttgggaggtaaaataaaataatttgcaaattwaaaccctgtgaaatggacagttttaatgaaatactaggaaagctccttaaaattagaaatataccattttgaagcagtttttattaacaagaaatagcatgtccaataaagatcataaaattcttttcaagtacataaaatggggacttctctctctctcctctctctctctctctctctctctctccataaacacacacacacacacacacacacacacacacacacacacacacccctatgtatctctccagggccagcttcatgggtgtgatctgtgcagtcccacagggtctcatgcttacagggtccctgtgcttgctctgctgcactgctttg

SEQ ID NO: 490834 - DNA, 506 bp, Homo sapiens
tgttgaagacccttgattctcacccaaaacacgtcaaaactgatgctggtagaagaaactatgcaggaaaggggagaaatatattgttgggtatttttttagcactacagtttttaatcaactctttacccaaagcctgataccagatcaaaccttaaatttcattccaccatatggcttaatgatgatatattccaaacttcttcatgtggaagcaaggctgttgactggacatgccaatactgggtacagccacatccacagctccttccaagctgaycaactcacaccccttggtagaaggaaattcaccacatactagttttgtgaaccgctaagacttagtttcctcatctgttaagtgaaggtaatcatagaacaaacttatgggatgattaaataaatatggaggtgaagaaatgaatgttgactaaatggagatgatgattaaatgaaataatatatgtgaaatgcctagaacaatgctaaacaaatcttagcgactg

SEQ ID NO: 490835 - DNA, 617 bp, Homo sapiens
gttgaagacccttgattctcacccaaaacacgtcaaaactgatgctggtagaagaaactatgcaggaaaggggagaaatatattgttgggtatttttttagcactacagtttttaatcaactctttacccaaagcctgataccagatcaaaccttaaatttcattccaccatatggcttaatgatgatatattccaaacttcttcatgtggaagcaaggctgttgactggacatgccaatactgggtacagccacatccacagctccttccaagctgaccaactcacaccccttggtagaaggaaattcaccacatactagttttgtgaaccgctaagacttagtttcctcatctgttaagtgaaggtaatcatagaacaaacttatgggatgattaaataaatatggaggtgaagaaatgaatgttgactaaatggagatgatgattaaatgaaataatatatgtgaaatgcctagaacaatgctaaacaaatcttagcgactrttgactgttatattataggactctgcttcttctgccaggcacagccaattgggccaccattgtgtatctgaacacaatttcattcatacattggacagcaacttacgctact

SEQ ID NO: 490836 - DNA, 589 bp, Homo sapiens
ttcctgctagtgtttgatcatatcttttcaaacagccagaattaartcactcagaattggggttagggccttgctgccaagtacgctgcctgctacaaagtccttgcttcgtcaagcatgaggagcagccactttggcccaaccgtcacctacagcactcgcaccttagaggtggagcaacagagggagccctgtgagagaaaacccttgacctctcttctctttcgttatgtcattttcatgacaaatttatttaaatttacccgccgtgccctgctccagtaaggaggggtcgttgcaaatctggcacaagcatctgctatgactactgacctgcaggatgggcagaaaataggccagagcctcctggagccaccacccctaggacttggagccttgatccccaaccctactgcctggaagagaggctggggcaacgtattagtgagagaacccctcaaaatgtgcctctcatcttcagtgcactcacattttgggggcaggtgtctgccctgcccacagccctgctggagcacaccttgtggtaaccacatgggactgagcctcgtctcccctctcacagggccca

SEQ ID NO: 490837 - DNA, 505 bp, Homo sapiens
caagcagccggtgagactgttcccatttgcgatcttatgtggtaacggatcaagcttacacacctgaatatatcagaaatggaaactgttgtttatagtctcaatcacagaacactttamaaatcaaagtatcatagaatatcttttctttttgcctgccttctcgcatccttttttattttgcttcttcattaaacctctaaacaaaggctatgaagaggaatactcggaagtaccaaagccatgccttctccacacacactgaacattcctccattccaaccaggaacaatgaagtccaaaccaccccaagctcatagagatttggcatattcctagatatccccaaggaagatgatatgatcattccacaacccttggttccagactttaaatacaccatagtatcatggtctttctgatacatgatcaatatctacaacccgatgaaacatacacacacactttttctcttgtcttcttgcaaaaagaagaacaggaccac

SEQ ID NO: 490838 - DNA, 593 bp, Homo sapiens
ctgtttccttttttattctttctccctctccccagtcttgtttcttcaggcatttacacattgccatatgttaaataatatgcatgtactattctcttttgattagataatttagatatatgattttcctattacggtaaatgagaatttagcactcttttcagccatctcttctgttttctctccctaattctccctacataattatattataatttttggttaattcactgtgtgtttacattatcatatacatgtaaaaamagtggagcattgtagtgtattatgattaaatttctttgttgcattttgtttttcctgaagttaataattgccttgtgttttcattagtgactactttaaatttcttcctttgcagtcactttgatcaaaagtattatactgactgggtgcagtggctcatgcctgtaatcccagcactttgggaggctgaggcaggaggatcacttgaggtcaggagttcaagaccaacctgggcaacacagggagaccctgtctctacaaataattttaaaaattagccggacatagtggcacattcctgtggttccaggtacttaggaggtcaggag

SEQ ID NO: 490839 - DNA, 593 bp, Homo sapiens
ctgtttccttttttattctttctccctctccccagtcttgtttcttcaggcatttacacattgccatatgttaaataatatgcatgtactattctcttttgattagataatttagatatatgattttcctattacggtaaatgagaatttagcactcttttcagccatctcttctgttttctctccctaattctccctacataattatattataatttttggttaattcactgtgtgtttacattatcatatacatgtaaaaaaagtggagcattgtagtgtattatgattaaatttctttgttgcattttgtttttcctgaagttaataattgccttgtgttttcattrgtgactactttaaatttcttcctttgcagtcactttgatcaaaagtattatactgactgggtgcagtggctcatgcctgtaatcccagcactttgggaggctgaggcaggaggatcacttgaggtcaggagttcaagaccaacctgggcaacacagggagaccctgtctctacaaataattttaaaaattagccggacatagtggcacattcctgtggttccaggtacttaggaggtcaggag

SEQ ID NO: 490840 - DNA, 630 bp, Homo sapiens
ctccacactagcaagaactgggcactatgaaaagagccatgaaaacctgtatcaagatattatttaaatggcatgggacctcctgaaatgctggagtcaacccagtgagcatcctgaatattgatggagtatcaagctctgtcctcagggagctcgctcctatgttggaagggagacaaaaatgcaaacaaattttgaaagcacatgctgttcatgactgctggcaagcagtgtgcctaagggcaatgagatgggagccccgcagtttgacagagcggctaaactcttgagttgagaatggaaaggctgagtaggaaatagctaggtgaatgggacgagggagcattttagaaagggagaagagagygtgcaaaggcacacaagcaagagtaaactgagtaggaggaaagccgtgtgtgtataaatgaggtgtagggaccagaccatgaaacgcctcatatgacattctgaagagtatctattttatattttagtgatggaaaaccattgcaaattctgagaataatatgatcagaattatatttaatgagaaatggttaaattatatttaatgagaaaaggttatcctggtcagtctagtgctcctttgaagacaaacttttttttctc

SEQ ID NO: 490841 - DNA, 382 bp, Homo sapiens
aggctgaaggcagtgataattcagatgactctaagggtggagcagctctagacatgcaggagtggaacagttaataataaaaaaaaaacctctgacttcctgaaaggaaataagaattaaaggcaaggccttagagacaatagggttattgccatggaagaatattaaagtgcatgagctatttaaagtctgtaaggtaggtggttacttcattaaagtgttgggcagtttagttaaggagaatggtaagcttaaaatttcaggttcttggctcatggtataaactgaaacctaaggatgttttatgacataatctcttgaagccataaggttaaactagcsagaagccaaattaaaaatttgatcctgtaggtttccagct

SEQ ID NO: 490842 - DNA, 656 bp, Homo sapiens
tgaaatgtgcatttgtgcaacmctgttcttctgttattttgttactctgtgcacatagacatccaaaaatgaatgtacaagtatataacatttgtttcttaattgtaaaaactattttttagtagaattaaaatatgcatgtgctaaaattgaaacatttcaatcaaggtcaaactatctcctcagaataggtcagacaatttttgcaacatctgtgggtcaggcaactgctctgcccatcattaaaaaaatagtttattgtactatacattagaaaaatgcattaagttagcatacataaggcattattttataaatatcttgcattgggtaggcaacatttcttgaaacaatctgaaacttacagaaaagttgtaaatatagtacaaaaattactttttcttaaacggtttgagagtaaattgccagcctgatgccccatcagttcctcatacttcagagtatattttctacaactgggacattctcctatatagctaaacactactaaaaaaatcaggaaaaacactatgaaaaaaatcaattaccattggtacattactaccatctaatcctcagacctcattcaagtttcaccaaatgttggaataatatcctttagagcaaaaggatcaatttcagaaccgtgtcttaat

SEQ ID NO: 490843 - DNA, 617 bp, Homo sapiens
taccaaaatgggaaaatgagctgaggacagcaattgtattctccgtggagggaaaagcacaccaggtaaatttgtgtttaaaatagygagccaattttaatactaacttaaaattaagataagtgattgtatgatagagtgtaactcattgaaagtattttaaaacataatttagaataaaatgatttaaatatatataatacattatttatggaaaattataaaatactatatattctgctaaattgtttaaataataaaagactgattagtttggactctatgcgcttgtatgcaaaaacccatttccaaaatttatctcctaaaatttttctcagagtagtgaaaggaaaaaagcatgaacattaaaaacagacagtcaagaatttaaaaacaagtgccaccacttacttgtctgctacttcagacaataacatgtaaactattttaaatttaattaaggttggtcatccataaaatggtaatactgttgaaatttttgcattgaagtcatcatcaggataaaagtgagatgatatgaaatcatatggcaacatccctcattaaagaattataaataaaagctttcatcatttaactaacctattaatgatgat

SEQ ID NO: 490844 - DNA, 617 bp, Homo sapiens
taccaaaatgggaaaatgagctgaggacagcaattgtattctccgtggagggaaaagcacaccaggtaaatttgtgtttaaaatagtgagccaattttaatactaacttaaaattaagataagtgattgtatgatagagtgtaactcattgaaagtattttaaaacataatttagaataaaatgatttaaatatatataatacattatttatggaaaattataaaatactatatattctgctaaattgtttaaataataaaagacygattagtttggactctatgcgcttgtatgcaaaaacccatttccaaaatttatctcctaaaatttttctcagagtagtgaaaggaaaaaagcatgaacattaaaaacagacagtcaagaatttaaaaacaagtgccaccacttacttgtctgctacttcagacaataacatgtaaactattttaaatttaattaaggttggtcatccataaaatggtaatactgttgaaatttttgcattgaagtcatcatcaggataaaagtgagatgatatgaaatcatatggcaacatccctcattaaagaattataaataaaagctttcatcatttaactaacctattaatgatgat

SEQ ID NO: 490845 - DNA, 617 bp, Homo sapiens
taccaaaatgggaaaatgagctgaggacagcaattgtattctccgtggagggaaaagcacaccaggtaaatttgtgtttaaaatagtgagccaattttaatactaacttaaaattaagataagtgattgtatgatagagtgtaactcattgaaagtattttaaaacataatttagaataaaatgatttaaatatatataatacattatttatggaaaattataaaatactatatattctgctaaattgtttaaataataaaagactgattagtttggactctatgcgcttgtatgcaaaaacccatttccaaaatttatctcctaaaatttttctcagagtagtgaaaggaraaaagcatgaacattaaaaacagacagtcaagaatttaaaaacaagtgccaccacttacttgtctgctacttcagacaataacatgtaaactattttaaatttaattaaggttggtcatccataaaatggtaatactgttgaaatttttgcattgaagtcatcatcaggataaaagtgagatgatatgaaatcatatggcaacatccctcattaaagaattataaataaaagctttcatcatttaactaacctattaatgatgat

SEQ ID NO: 490846 - DNA, 617 bp, Homo sapiens
taccaaaatgggaaaatgagctgaggacagcaattgtattctccgtggagggaaaagcacaccaggtaaatttgtgtttaaaatagtgagccaattttaatactaacttaaaattaagataagtgattgtatgatagagtgtaactcattgaaagtattttaaaacataatttagaataaaatgatttaaatatatataatacattatttatggaaaattataaaatactatatattctgctaaattgtttaaataataaaagactgattagtttggactctatgcgcttgtatgcaaaaacccatttccaaaatttatctcctaaaatttttctcagagtagtgaaaggaaaaaagcatgaacattaaaaacagacagtcaagaatttaaaaacaagtgccaccacttacttrtctgctacttcagacaataacatgtaaactattttaaatttaattaaggttggtcatccataaaatggtaatactgttgaaatttttgcattgaagtcatcatcaggataaaagtgagatgatatgaaatcatatggcaacatccctcattaaagaattataaataaaagctttcatcatttaactaacctattaatgatgat

SEQ ID NO: 490847 - DNA, 598 bp, Homo sapiens
agatggaggtctcattttgtagccctagctggtctagaattctggtctcaagtaatcccgctgccatgacctctcaagtactggaataggcatgagctacattgctcagtcagggaaatatatatttgttcaaagaaattgttaataaagtatctcaatgttttgtacattttatatagatatagatatatattatattagtattctaatgatcataattatcttamcattaatgttcctttgtgaaaaattatacttcatctttttatctatcagacacagccagttctgaaagacgtaaatgaataaaacattccaggttttgtgtaactcacaacctagcgaaagaagtaaatctgtaaacacataattacagaatgctatgattgctgttagcacagtgagatttatagagaatattctctgagaaagggtaaagggtaatatgtaaactaaatcgtaataactattaggagaccatccgtggagaaaattataaaaagaaaattcattcaagaagaagagtttgtacaaataaatgaacatcaaagaaaaacaacctattaatgtaaaagttgaaaactcaacttgctgcttt

SEQ ID NO: 490848 - DNA, 612 bp, Homo sapiens
tgagccaccatgccctgccgggtaatttaattcaattaaaggaaatacttccttttatgtgaaaccactacttgattacattaattgcagtccacttttcacattctgacgcagagatgcttctttccaatatcagtatcagcatctctcccttaaattgctacaaatcactcactggatttgtgccatttttggtcgtgttttctaagctcccacctctgccatgggccactgttaggtttgctactggacatggtgcaggtttcagactcagtcacccttaacataatgctttcatgtactcagagaaccaggaaacactggagcaggtctccttccccttggccccttatctcaaccattttctacaacacaacacaatcacacaktgttgtatatgtgtgtcagacttttttgaagggctgcagaaatgcagaaataagtaaatcaaaagaggatagttaaaactatgcactaaatattttattcttaagttttgaaggaaaatagtaaaaaataaaataaattttaaacatagtctcttttattttaaatcccctttcctcagctcattcttctatcttgacctattttcttcaaacctccacctta

SEQ ID NO: 490849 - DNA, 652 bp, Homo sapiens
aaaatctggtttgacttgaactcattttgaggactcttgacctgaactgatagggggtacagtttttatttgtccctcccactgtgaatatttatatgtttcactgctgatgtattaatayactcaattttaaaatgctacccttgatcttactaggagatattataaaatatatttcatatacattgtactactctgataatttctgaaacctataatcctctggcttcagtggatttggataagaaattatcgaagtgaatatccttattaaaataaatcttgaacagtatggaaatgtgttcttcaaaaagtaatgagcttaaaccaatgctgggcataatttgtgctaaataactgttaactattactattaacctgaatcattggtctttcaactatgaatgaaaagcatttgtcaattaaaactccaacaagacatctcaaacaatacatgtctaagaaaaaacttgaatccaccctcactggcaaaacaaacaaaaactgcttacaccacatgctttcctcccacaccaactgagttactgtgaatttagttttttggttacttatatccaaaaccttggtaccattcttgatgtgatgatacttttctttctaacatatgccacatgcaagtatcagaaaatcc

SEQ ID NO: 490850 - DNA, 646 bp, Homo sapiens
aaaatctggtttgacttgaactcattttgaggactcttgacctgaactgatagggggtacagtttttatttgtccctcccactgtgaatatttatatgtttcactgctgatgtattaatatactcaattttaaaatgctacccttgatcttactaggagatattataaaatatatttcatatacattgtactactckgataatttctgaaacctataatcctctggcttcagtggatttggataagaaattatcgaagtgaatatccttattaaaataaatcttgaacagtatggaaatgtgttcttcaaaaagtaatgagcttaaaccaatgctgggcataatttgtgctaaataactgttaactattactattaacctgaatcattggtctttcaactatgaatgaaaagcatttgtcaattaaaactccaacaagacatctcaaacaatacatgtctaagaaaaaacttgaatccaccctcactggcaaaacaaacaaaaactgcttacaccacatgctttcctcccacaccaactgagttactgtgaatttagttttttggttacttatatccaaaaccttggtaccattcttgatgtgatgatacttttctttctaacatatgccacatgcaagtatcaga

SEQ ID NO: 490851 - DNA, 518 bp, Homo sapiens
tgtattaatatactcaattttaaaatgctacccttgatcttactaggagatattataaaatatatttcatatacattgtactactctgataatttctgaaacctataatcctctggcttcagtggatttggataagaaattatcraagtgaatatccttattaaaataaatcttgaacagtatggaaatgtgttcttcaaaaagtaatgagcttaaaccaatgctgggcataatttgtgctaaataactgttaactattactattaacctgaatcattggtctttcaactatgaatgaaaagcatttgtcaattaaaactccaacaagacatctcaaacaatacatgtctaagaaaaaacttgaatccaccctcactggcaaaacaaacaaaaactgcttacaccacatgctttcctcccacaccaactgagttactgtgaatttagttttttggttacttatatccaaaaccttggtaccattcttgatgtgatgatacttttctttctaacatatg

SEQ ID NO: 490852 - DNA, 646 bp, Homo sapiens
aaaatctggtttgacttgaactcattttgaggactcttgacctgaactgatagggggtacagtttttatttgtccctcccactgtgaatatttatatgtttcactgctgatgtattaatatactcaattttaaaatgctacccttgatcttactaggagatattataaaatatatttcatatacattgtactactctgataatttctgaaacctataatcctctggcttcagtggatttggataagaaattatcgaagtgaatatccttattaaaataaatcttgaacagtatggaaatgtgttcttcaaaaagtaatgagcttaaaccaatgctgggcataatttgtgctaaataactgttaactattactattaacctgaatcattggtctttcaactatgaatgaaaagcrtttgtcaattaaaactccaacaagacatctcaaacaatacatgtctaagaaaaaacttgaatccaccctcactggcaaaacaaacaaaaactgcttacaccacatgctttcctcccacaccaactgagttactgtgaatttagttttttggttacttatatccaaaaccttggtaccattcttgatgtgatgatacttttctttctaacatatgccacatgcaagtatcaga

SEQ ID NO: 490853 - DNA, 646 bp, Homo sapiens
aaaatctggtttgacttgaactcattttgaggactcttgacctgaactgatagggggtacagtttttatttgtccctcccactgtgaatatttatatgtttcactgctgatgtattaatatactcaattttaaaatgctacccttgatcttactaggagatattataaaatatatttcatatacattgtactactctgataatttctgaaacctataatcctctggcttcagtggatttggataagaaattatcgaagtgaatatccttattaaaataaatcttgaacagtatggaaatgtgttcttcaaaaagtaatgagcttaaaccaatgctgggcataatttgtgctaaataactgttaactattactattaacctgaatcattggtctttcaactatgaatgaaaagcatttgtcaattaaaactccaacaagacatctcaaacaatacatgtctaagaaaaaacttgaatccaccctcactggcaaaacaaacaaaaactgcttacaccacatgctttcctcccacaccaactgagttactgtgaatttagttttttggttacttatatccwaaaccttggtaccattcttgatgtgatgatacttttctttctaacatatgccacatgcaagtatcaga

SEQ ID NO: 490854 - DNA, 590 bp, Homo sapiens
tctctgtaaccatcagttcagtctctccactgccttctttttaaattgttttagccaaagtatcctgtagctatgcagtaaaaaactgyccaggctttagggtccttaaaaatatatttccatgtcaactctttaccctctctttcccctaccccacataaaaaatacctcccaaattcctaattctcctggccagaggaataaggaattgcataacaatttgcaatatatctttccaagtgcccttttcggtgtctttgacattttgtggagtgactatctaagagcaaagtcgagtctctgaaactgttttctgctatagagtgacaggtaatttaagattttaaaaaacttttgccctagataatacttcaaaatccagcctcatagaaagacaggctttctcccctttaaatctgttctggggcctcagttccttgttttccagcctacatatgctatcatatataatgtctgcagaaacatattgatttaaagatcaagtcagcaatggcattgggctttttgcaagtcaccttggtttaactactgaaaacctgtgtaattgcctctgagacttgagtcactgg

SEQ ID NO: 490855 - DNA, 590 bp, Homo sapiens
tctctgtaaccatcagttcagtctctccactgccttctttttaaattgttttagccaaagtatcctgtagctatgcagtaaaaaactgcccaggctttagggtccttaaaaatatatttccatgtcaactctttaccctctctttcccctaccccacataaaaaatacctcccaaattcctaattctcctggccagaggaataaggaattgcataacaatttgcaatatatctttccaagtgcccttttcggkgtctttgacattttgtggagtgactatctaagagcaaagtcgagtctctgaaactgttttctgctatagagtgacaggtaatttaagattttaaaaaacttttgccctagataatacttcaaaatccagcctcatagaaagacaggctttctcccctttaaatctgttctggggcctcagttccttgttttccagcctacatatgctatcatatataatgtctgcagaaacatattgatttaaagatcaagtcagcaatggcattgggctttttgcaagtcaccttggtttaactactgaaaacctgtgtaattgcctctgagacttgagtcactgg

SEQ ID NO: 490856 - DNA, 525 bp, Homo sapiens
aaatgctttcatgaaatcagcaagtgttattggaatccagtacaagagatgttactatgaaaaacattttttgcatgttccctaaattaatgtccaatgtgttacctaatctcactcccaaatttgtatctccaatttagatcactcttaactcacttttctactaactgtttgatatttccactgcctcaaaagcatctgaaattcaacatgtctaagagccaactgattatttgtccctccaaatctgattgccagggataccctatctcagcggcttctgattgcattcagaagaagcaatctttgacctgtcagtctccttcaccagtatattaaacccattatcaaagmcaattaatttaaacccttctgtttctcgctgtcttcacactatcatctttcacctagataccagaatagccacctaaatagccctctgcttctactgtgaatattctctctttggtctctatattgcaagggtgatgttttccaaatagaaatctgatgatgttcttcctc

SEQ ID NO: 490857 - DNA, 667 bp, Homo sapiens
acgcctacctgctgtggtgatcttggctattttgtattttaatcttttttactcccagtcatatgttatttatctatttatccaggcttaaaaacagtggaaatttacttctcacagttctggaggctargaagtgcaagatcaaggcactggcatatttggtgtctagtgagggcctgcttcctggttcatagcggtcttttctctgtgcactcacatggtgaaagggacagggaatctctggtttctatcttatgagggcaccaatctcattcatgctttttatttatttgtgtattcattgtatgttttttggtttgaggttaccatgaggcttgcacatactatcttataaccctttttttttttttttgagatggagtctcactctgttgccaggctggagtgcagtggcgcgatctcatctcactgcaacctccgcctcccgggttcaagtgattctcctgcctcagcctcccgaatagctgggactacaggcatgcgccaccacgcccagctactttttgtatttttagtggagacagggtttcaccatgttggtcaggatggtctcgatctcttaacctcatgatctgcccacctcagcctcccaaagtgctaggattacaggcatgagccactgtacctggccataacccatatttta

SEQ ID NO: 490858 - DNA, 667 bp, Homo sapiens
acgcctacctgctgtggtgatcttggctattttgtattttaatcttttttactcccagtcatatgttatttatctatttatccaggcttaaaaacagtggaaatttacttctcacagttctggaggctaaraagtgcaagatcaaggcactggcatatttggtgtctagtgagggcctgcttcctggttcatagcggtcttttctctgtgcactcacatggtgaaagggacagggaatctctggtttctatcttatgagggcaccaatctcattcatgctttttatttatttgtgtattcattgtatgttttttggtttgaggttaccatgaggcttgcacatactatcttataaccctttttttttttttttgagatggagtctcactctgttgccaggctggagtgcagtggcgcgatctcatctcactgcaacctccgcctcccgggttcaagtgattctcctgcctcagcctcccgaatagctgggactacaggcatgcgccaccacgcccagctactttttgtatttttagtggagacagggtttcaccatgttggtcaggatggtctcgatctcttaacctcatgatctgcccacctcagcctcccaaagtgctaggattacaggcatgagccactgtacctggccataacccatatttta

SEQ ID NO: 490859 - DNA, 667 bp, Homo sapiens
acgcctacctgctgtggtgatcttggctattttgtattttaatcttttttactcccagtcatatgttatttatctatttatccaggcttaaaaacagtggaaatttacttctcacagttctggaggctaagaagtgcaagatcaaggcactggcatatttggtgtctagtgagggcctgcttcctggttcatagcggtcttttctctgtgcactcacatggtgaaagggacagggaatctctggtttctatcttatgagrgcaccaatctcattcatgctttttatttatttgtgtattcattgtatgttttttggtttgaggttaccatgaggcttgcacatactatcttataaccctttttttttttttttgagatggagtctcactctgttgccaggctggagtgcagtggcgcgatctcatctcactgcaacctccgcctcccgggttcaagtgattctcctgcctcagcctcccgaatagctgggactacaggcatgcgccaccacgcccagctactttttgtatttttagtggagacagggtttcaccatgttggtcaggatggtctcgatctcttaacctcatgatctgcccacctcagcctcccaaagtgctaggattacaggcatgagccactgtacctggccataacccatatttta

SEQ ID NO: 490860 - DNA, 597 bp, Homo sapiens
gcaggaagtttgtgagttttatcatctattgcttgtttggtggattgacagagacagaaaccaggatagagtaggcagagaagttagggggggtggatgtcagaaaatggagttggatgagcagatgcagaagactaaagacatctgactgcaaaggaaagaaaaaaactaaggcagcagttagaaggggaaaggaggaatggagaaaagagtttttggtgtgtttgtgtgcttgtttggtttggttttgtattacattggttttgtttttgggaatgagagacttgagcatgcttcagtgctggatgaaggtacacatttgagagggagagactgacttttaatctgtgactgtaagcagccttgttgaaaagtctagaatagatcaaaaccagcaattcarctaacttcaacgaatatgtgttattcttatgggccagggatcaaacatgaacaagataaactccctgccttttagaagctatagtttggggaaaacttgctcataggaaggatattcaggcaacgggcaggaggccacataatgaaaatgtgacaaaatacagtccagaagaaaattaccagaaaaataaagac

SEQ ID NO: 490861 - DNA, 549 bp, Homo sapiens
gctttcaccctggtcttctgctccagcagggagccagagcactgaaatgtaatcattctcacaggatatttttagattattgatttggtgctttattgtttccttatttttggaaatgtatgagtgatttggacagaaactaatctgaactggaaaccctttccaaatatttctctcctctatttctttctctgtgtgtgtrttatatctatctacacacacgtgtatgtatgcacacacatacacatacataaacacacactgactaaagaatgatatttattagaatatttggtagttcaagtggaatatatttgagttaatttccaaaaggcttattattaaattataatagaaagcaaagaagttcagatatggaaaggcctgctagggattttaaaccattattcattctaattattcatttgctcgttcatttcgatcattcattcagtaaatattgagtgtttatatgtacaaaaataatattaaagaattcctaaaacttttcagacaagaagaatcaatgattggctctaataatttgct

SEQ ID NO: 490862 - DNA, 646 bp, Homo sapiens
tgctggtggctttaagcaagttatcatctgagccttggtttccttacctgtaaagtggaataatgacagctaatcttggggagtaaagtgataacatgataaaaatcaggaataaaatgtatacattcaaatataaatactattgtagaaacaatatactttgcttgtaccaaaaacagaaaaaaaatacagaaatggtggaaaaaccagatcagtttaacatcaatcagtgtctataaatacaatagaaagaagaagtctggatctttgcaacatttggggtcacagaaataatttttttggtacacatttggaagagaactagccagcatcattatgaaggaaggtctgcataggttcttraaaggcagctggggacacgaaaccactcctcacatgaaaatcacatggaagtgaatatacaagcctaattaggacagggaagaaggcagcactgtgggatcaacccctcagagggaaaaactggaagaaaaactggatggaaaaaaagacagtacgtgtaatggagggactttgggttacactaaatatataaaaccaagatgcatatttaagaacacctcagctctgtggttgtctgtgctgattgcatccgtggtgatgtgaatgaaccagattgcttaag

SEQ ID NO: 490863 - DNA, 604 bp, Homo sapiens
cccactggctgaggatgaagggaatgaggactgggtagtgaaaagaaaagctacagatgccgactatgaatatgagatcatttgcataaacaaggattgtagtaattatccatattttcttcttgcttatatatatgcatatatatattttgtatctattaacaaataatgttttaatctttctccctatggttcctttattatctaatataaacagcatcactaaaaattgctcatataatttagtctttaagtttcaagatgcaaaagaacgattgtgactgaactagaaaagaaacaaaattcattcagggatagatagaatgtcatacaaggttttgtattttctcttgattatgtgtttgagcttataagggccattctgaactaggtaagaaaagtatgatggtactacctttggtcagaactgaaaatatggataaaaagggagttgtggtttgttactgctgagtccaaaaatccatgcattgagaaggaccactggaggccggttgggcatcaacaccaccagggamttgatggagttccaaagcccccctcattgtacagttcttggataaggctcccttacgtgaggaattca

SEQ ID NO: 490864 - DNA, 603 bp, Homo sapiens
ttttatgtgacagagttagtgatttttagaaaaaggaagttcacgtcaaatatatatttgtaagtataatacaaaaaaatctatacatgcattcagaatatcctcttcctctctcttttctgaatggttctggttcttttgtccagaggatataaaaaagaagtaataaaaaagcaaaataaggacagaaaagcaaattttgtttacatttaaaaagaaagtcctatttttttttcaaaaagaggatatctgcaaggcaaaaggaaggaattgaagacagagtgraatttcaggtagataacgacttagagtagcccctaggatgagaggggttttaagggaaaagctgctcaaagttgaattttagaatatggtgctgtgtataaggatgaaattccactgctttccaggcttcctgctcaaaaaacttgcataaaatttacattatttttgaagccttttgcagttgaatgaatgctctttgaatgtgacacactgttaaaatgaatcttaaagagagaacaagacaagcagaataatttacgttatacaaataaaaccattttgaagagttatatctcccatgaccacaaaggcatgttg

SEQ ID NO: 490865 - DNA, 655 bp, Homo sapiens
gagctcaggagttcataaacaactttctgggcttaatttcccaggtttgactctctctctgatgcccgttgtacactgtggttctctgcgatttcttttttttcatcctttggccagagagctgggccttcatttacctagatctgtcataaacttcccacatctgtgcctatgtatgaggctaagaggcaagagaacaaagagagggaaagaaaaggaacaataacagcagagattttcccatcctcttgaggccaccatcgtctggagagaacatttcgctccctctgagtcttagatactgcagccacccattctctctgctgctgctcctagtataggatggacttgttcgggtgctgaggtatagaagaaaagagaaaatcttaacaattgataatttattcaactctctctaaatctcagaagaccattgttcctctcctcaagccagaaccaaaagacttytcctcaagctgacaggcaagccatgctcactcccacatctcaagctgcattgagtccaggtaagggaaaaaatgacaaagtcacctctgctttggtgatactttgaattctgttttcattcctcaattcacttcctactattaacttttcaaggccttcaaatacatgctccgtgcattctgtccag

SEQ ID NO: 490866 - DNA, 629 bp, Homo sapiens
ctggaaatagcaaaggcctgcttacatatatcttctctggatcatagattttaaactttgccctcaaggggtccacaaatggcctgaaattgtttgcatctttttccatgcatgaatgcacattttttatggagaaacgattcatcattttcatcagattttaaagtttatagctcaagcctgtaatgcaggaaataactactatgagatttaatattttttgaaagagagatgatagaaatgccaaaattggagaaaaagtgttatatattccacaacaatatatatataaatgaaattttactatttgaaaatattagaagatatgaaatcttatttaacatctttaacaatgttagcatgaaaagagtggacattttagacttaatacaggcacastttttcttttgccagaacctttgcatttacctcatggtactctgtcatggtaataaaataaaagtctttaacctgaattctcatttttaaagctagataagttcattgcacatgaagttgcctctggcaaccctcactgagttggaaatacagaggccttaggcagagctattgtgtatgtgtgccatttgtttaaaccgctgcattttacctctgaaggtatatgtttt

SEQ ID NO: 490867 - DNA, 629 bp, Homo sapiens
ctggaaatagcaaaggcctgcttacatatatcttctctggatcatagattttaaactttgccctcaaggggtccacaaatggcctgaaattgtttgcatctttttccatgcatgaatgcacattttttatggagaaacgattcatcattttcatcagattttaaagtttatagctcaagcctgtaatgcaggaaataactactatgagatttaatattttttgaaagagagatgatagaaatgccaaaattggagaaaaagtgttatatattccacaacaatatatatataaatgaaattttactatttgaaaatattagaagatatgaaatcttatttaacatctttaacaatgttagcatgaaaagagtggacattttagacttaatacaggcacactttttcttttgccagaacctttgcatttacctcatggtactctgtcatggtaataaaataaaagtctttaacctgaattctcatttttaaagctagataagttcattgcacatgaagttgcctctggcaaccctcactgagttggaaatrcagaggccttaggcagagctattgtgtatgtgtgccatttgtttaaaccgctgcattttacctctgaaggtatatgtttt

SEQ ID NO: 490868 - DNA, 604 bp, Homo sapiens
cccactggctgaggatgaagggaatgaggactgggtagtgaaaagaaaagctacagatgccgactatgaatatgagatcatttgcataaacaaggattgtagtaattatccatattttcttcttgcttatatatatgcatatatatattttgtatctattaacaaataatgttttaatctttctccctatggttcctttattatctaatataaacagcatcactaaaaattgctcatataatttagtctttaagtttcaagatrcaaaagaacgattgtgactgaactagaaaagaaacaaaattcattcagggatagatagaatgtcatacaaggttttgtattttctcttgattatgtgtttgagcttataagggccattctgaactaggtaagaaaagtatgatggtactacctttggtcagaactgaaaatatggataaaaagggagttgtggtttgttactgctgagtccaaaaatccatgcattgagaaggaccactggaggccggttgggcatcaacaccaccagggacttgatggagttccaaagcccccctcattgtacagttcttggataaggctcccttacgtgaggaattca

SEQ ID NO: 490869 - DNA, 604 bp, Homo sapiens
cccactggctgaggatgaagggaatgaggactgggtagtgaaaagaaaagctacagatgccgactatgaatatgagatcatttgcataaacaaggattgtagtaattatccatattttcttcttgcttatatatatgcatatatatattttgtatctattaacaaataatgttttaatctttctccctatggttcctttattatctaatataaacagcatcactaaaaattgctcatataatttagtctttaagtttcaagatgcaaaagaacgattgtgactgaactagaaaagaaacaaaattcattcagggatagatagaatgtcatacaaggttttgtattttctcttgattatgtgtttgagcttataagggccattctgaactaggtaagaaaagtatgatggtaytacctttggtcagaactgaaaatatggataaaaagggagttgtggtttgttactgctgagtccaaaaatccatgcattgagaaggaccactggaggccggttgggcatcaacaccaccagggacttgatggagttccaaagcccccctcattgtacagttcttggataaggctcccttacgtgaggaattca

SEQ ID NO: 490870 - DNA, 638 bp, Homo sapiens
ctgtgtacatcatttcctaggaattggctggggaaaatcatgataatgacagctaagacatacactttgtactatgtgccaggcacttttctcaatattttatacatattaactgatgtcattcttaatcctatgtgatagatattattattacccccaactcacagaaaaagaaactaagtccctgctcaaggtcacacaggttgcagaacctaaattcaaatccctgcagtttggcttgagtsaatgctcttaactattataccatgcgctctactgctgcaggaacagccacctgttctgcatcctctcactgtttctaatcttacggatcttattcctgaaacaccaaactgaaaacagtttactgaattacctatcctttttcatgtatctgatctttctttgtatatgactgtcttatccccatggattgttcttcccccaagtcccctctcctttgaagacaatttcttgccctttaaatttagtttacaaagatgatttgcctttcctgaactcctaaacaatactaattactcccttgtttgcattccagtgtacttcttactccctcttcacagttaccatactaagttttgttggtctgtttacatatctttatcatctacaaatct

SEQ ID NO: 490871 - DNA, 638 bp, Homo sapiens
ctgtgtacatcatttcctaggaattggctggggaaaatcatgataatgacagctaagacatacactttgtactatgtgccaggcacttttctcaatattttatacatattaactgatgtcattcttaatcctatgtgatagatattattattacccccaactcacagaaaaagaaactaagtccctgctcaaggtcacacaggttgcagaacctaaattcaaatccctgcagtttggcttgagtcaatgctcttaactattataccatgcgctctactgctgcaggaacagccacctgttctgcatcctctcactgtttctaatcttacrgatcttattcctgaaacaccaaactgaaaacagtttactgaattacctatcctttttcatgtatctgatctttctttgtatatgactgtcttatccccatggattgttcttcccccaagtcccctctcctttgaagacaatttcttgccctttaaatttagtttacaaagatgatttgcctttcctgaactcctaaacaatactaattactcccttgtttgcattccagtgtacttcttactccctcttcacagttaccatactaagttttgttggtctgtttacatatctttatcatctacaaatct

SEQ ID NO: 490872 - DNA, 638 bp, Homo sapiens
ctgtgtacatcatttcctaggaattggctggggaaaatcatgataatgacagctaagacatacactttgtactatgtgccaggcacttttctcaatattttatacatattaactgatgtcattcttaatcctatgtgatagatattattattacccccaactcacagaaaaagaaactaagtccctgctcaaggtcacacaggttgcagaacctaaattcaaatccctgcagtttggcttgagtcaatgctcttaactattataccatgcgctctactgctgcaggaacagccacctgttctgcatcctctcactgtttctaatcttacggatcttattcctgaaacaccaaactgaaaacagtttactgaattacctatcctttttcatgtatctgatctttctttgtatatgactgtcttatccccatggattgttcttcccccaagtcccctctcctttgaagacaatttcttgccctttaaatttagtttacaaagatgatttgccttkcctgaactcctaaacaatactaattactcccttgtttgcattccagtgtacttcttactccctcttcacagttaccatactaagttttgttggtctgtttacatatctttatcatctacaaatct

SEQ ID NO: 490873 - DNA, 632 bp, Homo sapiens
tgaaaatttggtgccttttcaaacgaatataccagtacagtattaaataaggatttaaatacttatttcgactttatttctaaataaactctctacagtggttgcttactgagtgatgaaacactgagaggtatctacagtaattcacccctaaccataatcttgtgtatcctcactcagcaaaaccaaaactgttataaatggctcccatcatcttttgggtggtttgcaaacaatccattgttgtttgaacttgccttggtgtctcatataatattcccaatcaggttatcgacatatgattttcaattccttttcctcaaaagagttcggccgaatacattttttttcttgtacagtaacacttacggtaatatttaagtaccttggtcatattttatgctactgatagtttggggcccggagagcttcacagttggggtttctgttattccagttctrgccctaactgtcacagcctcctctctactttgagaactagaaaaatcagaggattgacattttcatagacttggagagtcagtcaaatagattaaacttttcagtgtttgaaaaatgtgtgtgcatgtttaagatacttgatttttctgaactttatggttctgtggtga

SEQ ID NO: 490874 - DNA, 577 bp, Homo sapiens
aaataagaccggcgaagggccctgttcttacaaaggttacattctggtggtcaagatggataagaaacagacatatgcataacatcaagtagtgatacagactccagaaaaaataaaacagagaaaggaaataaagaagatggatgagtaaatagcttacggaagttaaggaaaggatctcagagaaagggatatgaatagcaacctagattacattaggaagtacccaggccctgtgctargtgctaataatttaaagatcagtgaagcatgttctttgcttacaacctggtgaagaaacctacctggaggtgacaacaattacactctagtgtctagaaagtactccagtacatcctgcagaggaaagtcattctcacactggtatggttgccttgctatttgatgtgcatctgtgtgccttactttattgttatctcgtccaggaaggagcctgtgttgttcactttggtatttccccagagtgctaacagtccctgatgcattctaggcccagcaggctattgaatccagccagtgcagtcctgaggggagtgttcccagacttacactgcag

SEQ ID NO: 490875 - DNA, 596 bp, Homo sapiens
cataaccgcctgagctacgcctcttgtcagatcagtgggggcattagattctcgtgggagcacagatcctattgtgaaccgctcatgcatgggatctaggttgcgtgctccttatgagaatctaatgataaacgtaatgcacttgaattatcccgaaaccatccctccccagtccgtggaaaaattgtcttgcacaaaaccagtccctggtgccaaaaaggttggggaccactgatataaaatatatggaaggatgtgcataggttcaatgcaaatactayaccattttatatcaggaacttgagcattcatggattttggtaacagtggggatcctagaacgaatcccccatggatactaagggaacactgtaatcatgcttttgtgctatatttacatactgactttttaatacccctaggcagcaacatctacaaccataagatattttaacagtgtacagtcactgaggactctccctccttcctgaattcctacttctgaaacttggattctacttataggtagctgttgtctaggctttttgtctcctactgttactttttctaactctcttcctttcccttttagagca

SEQ ID NO: 490876 - DNA, 573 bp, Homo sapiens
agcagtgtttatctcctttctacagtggtttttatgaaattacttctaattgtttgtaaacctaaatttcaaatggagctgtatttatccttaatgcctgttatacatcaacaactgtacctgattttcacaaataccatcttatcgtcattcatttatttagccaataaataactattcatcacaatccaggtatcagggactgtactagggatataagcrtgtagtagagttttgtgaggcttagagaagcaaaggtgagacctgaaaactatataatcaatgctagaatcagatgaagcccacagtgccagagggcctataggaggaacacacggcccagttatgaggaactcataaatttttctgaaggtaacttgaaagagaactcagagttaatcaagtgagttagggagaaaaggaaaaagtaggggagggggtacagaagaggatatctaaaaatgtgactaccataggcagatgctacatcatgatacactcacacttgtagaaagaaagaaagcataagcttacatctcaaagcaaattgtttaatacaatgagagtatgaat

SEQ ID NO: 490877 - DNA, 287 bp, Homo sapiens
ctgagaggcaataaattagctacttacataaagtctacagttamagcttctaagatcaccttcaaggaagcccatatatcctggcagaggaagaagacaacagtagaagggaaagggaaatttttcacattttaggtcagagttgaaagtcagtggataaagagtagaaccctcttcatttcctaaaatgttactgaataaaaagcaaaagagggaagatagggctctaagtgcttttgttttctaactcatgtgcttcactcaaagattcagcatttcaaagttgc

SEQ ID NO: 490878 - DNA, 354 bp, Homo sapiens
tctgatgtaaccacaagtgccatcccagccactggtgaggctctactgcccccgggtggctgaagtccttctctgacaaagctgccggtgctctcatgctgataatgttacagtgatttttacaagggcagagtggatgtatgaatagttggatggatggataaatgcatggagggattggggtattcattcatttaatagtatttaatttcaactatttttccacacatggggccaagagctgttaagacatgatgtttgagatctgagatgtaaaaaactgcattggtgttaattaagctagagctgtggtcckagctgctcagtgcattggtcccaggagaatggggcggg

SEQ ID NO: 490879 - DNA, 542 bp, Homo sapiens
aggctacagtaacaaatggatacaagcayataatggcacagccccataaaagtttcttagtcacaatttctctcttggtgggcaagtaaataggttgctgaaatgactcttaagagacatttcagcctgagagggggtccacctcataaacacagggcttccactgcatctcagtcagtatgcagtggcactttcaagcctttaagtggcagcatcacttccacttataatcaacaagctagaacccagtcacatggccccaactaactgcaagggccatctaggaaacatagtcaagctttgtgttcaaggagaagaggaaatggattttgctgaacaatgagcagactgccataattttcattaaatcatctgagaaaaaaagctaacttataggaaataaaacactgggtcatgaagaacacttagtgtaccaatgaacagaatctttagcactgcttctctggaaagaagtaattggcacttataaggaacttctattcatgtaacagttaaaccatgttttattagaaacaaaacag

SEQ ID NO: 490880 - DNA, 582 bp, Homo sapiens
agctgcttcttttccccagcatggagttattctgaaagccaagtgttgaggtagattgggggatgggggatgaaggcgaagaagagaggtgctccaggaagaaagggggagcaggcccacaggcccacttgatacagtaatcaggggcatagccacatggaaatgctttcatcagccagaactcagctcctgccatgccagacacagtggttgcctgcctggcagccttttctcctcctccttcctggcagggccccattttttgggggggaatatmtacctcctctcccctaccagtcaaaggatggtcccattgccagttccaagggtgtctcccttactaagccaaccaccgtaggtcccattcccctgtctgggactggtttagacatgggtctgtgatataattctgtccaagaagattaatgagaaacctgctggggctctcaggaagagtttcttcattgatttacaaaaggcatgatatacagggaagagacccccctcttattcactggccagcgtcatgtctgcctatggtgcctggaactgctatggtcacttggccaccatgagggggac

SEQ ID NO: 490881 - DNA, 452 bp, Homo sapiens
ggatggacgctctctggactcctcaaaagaggcccaaatcacaagtgctcatttcaataacataagaaaataaacatggggcttatttatagcacaggaaagggactggggcaagagaactgctcatttggtaatccaccctgacggggccagataggatccagacccccaggctctctggtaacacrgtaagcagaaataggggccggaagagggctggctgccagcatcaccaggtacaatctggtaaacgatctggttaataaaaggggaagagatatgatacatcattccatctcaccaactcaggcataagtgctcttgctgtctccaatttctggctgaggaaactaaggcatggtcaagggaagtcactgtgagaaaaggacattttaaagcttcttgcatcctccatacattggagaagatggggttaatggaatcctcattta

SEQ ID NO: 490882 - DNA, 564 bp, Homo sapiens
tgtcacttctatcttcggagccgtcctcatccttggctctggaagtagcctttccccagcctctcctcctccataccatctccctttctttgagaaaaagtttactcctcccttaccaccaagggaggagaagccacgaaagggtgtgacgatctttgtgcaacttcccaatacactcggggtctggcgaaaagttgcaattttcttaaaaagcctctctgagcaatagagtcccccacagcgcccttatgaagtttgtctgacgtggggtgaaatttcctgttggtccattttcacaaatttagattctggctgatgctgcattttccaagggcttctttataaaaaggcaaccmctgtctgtctctagccttctgctctggaatgtccttcctcaaaatggtagatgatatcactggggccaaatggcagttttcttttctccttttaaccatatgtaggtgtgtcctcccttaaaagaagagaactataggaatttggatttacagaacaaggttggttgtttttctctccatctttcaaatagtgatatcaaaggattac

SEQ ID NO: 490883 - DNA, 564 bp, Homo sapiens
tgtcacttctatcttcggagccgtcctcatccttggctctggaagtagcctttccccagcctctcctcctccataccatctccctttctttgagaaaaagtttactcctcccttaccaccaagggaggagaagccacgaaagggtgtgacgatctttgtgcaacttcccaatacactcggggtctggcgaaaagttgcaattttcttaaaaagcctctctgagcaatagagtcccccacagcgcccttatgaagtttgtctgacgtggggtgaaatttcctgttggtccattttcacaaatttagattctggctgatgctgcattttccaagggcttctttataaaaaggcaaccactgtctgtctctagccktctgctctggaatgtccttcctcaaaatggtagatgatatcactggggccaaatggcagttttcttttctccttttaaccatatgtaggtgtgtcctcccttaaaagaagagaactataggaatttggatttacagaacaaggttggttgtttttctctccatctttcaaatagtgatatcaaaggattac

SEQ ID NO: 490884 - DNA, 643 bp, Homo sapiens
ctggtgagctcctattcaactttcaaggtccacttcgaatgtccatgctcaggaagccccaatccattcaccttccctggggattcccatggcatgtagcacattctaaccaggctatgggctctctgagggcaggagccagttcattcactgccaaacactctggtccctgcctgacacagaagtgccaggctgaaggatstgttggatgtaaggaggagcttttgccaggcgcacactcctccatgcattccttctgagctgttccccctctttgaactttggcttccatctgtaaaatggagattcaattcctccacctaggcctttggtgagactcaggggaccatggatgttcaagtgccctcagattgcatatgccggggtgggacgggtggacggaatcatgggtgtgctgggaagagcccaggccttggagccggatgccctgctgggaacccgggtgaggtcagatggcatcctggccagaagagagggctgcatcccttgcaggtgagtctcagaatcccagggtggaggatgagtgaatgggggactaagggaggaacctcagcagctctcaggcagcaccctgggcaggtggcaggaatgggggtgccagcgggcaggacacggaactcac

SEQ ID NO: 490885 - DNA, 600 bp, Homo sapiens
tggtgagctcctattcaactttcaaggtccacttcgaatgtccatgctcaggaagccccaatccattcaccttccctggggattcccatggcatgtagcacattctaaccaggctatgggctctctgagggcaggagccagttcattcactgccaaacactctggtccctgcctgacacagaagtgccaggctgaaggatctgttggatgtaaggaggagcttttgccaggcgcacactcctccatgcattccttctgagctgttccccctctttgaactttggcttccatctgtaaaatggagattcaattcctccacctaggcctttggtgagactcaggggaccatggatgttcaagtgccctcagattgcatatgccggggtgggacgggtggacggaatcatgggtgtgctgggaagagcccaggccttggagccggatgcccygctgggaacccgggtgaggtcagatggcatcctggccagaagagagggctgcatcccttgcaggtgagtctcagaatcccagggtggaggatgagtgaatgggggactaagggaggaacctcagcagctctcaggcagcaccctgggcagg

SEQ ID NO: 490886 - DNA, 632 bp, Homo sapiens
tgtgaggattaagtaagtgcctagaaaagacaagtgctcagtttatggtcaaataaaataacagtattatttgcagactaaaattcaaggatcctaggctgacactcaacagggacaatggcactgagggtttgaaactatagctggaaatctgagacatatgggcagtccaaagggcctcgggctccaacacactgatccaaaaattgaaaacccaaagactgtgggaattctctgtggctggagaagtcaggctcctccagccctgggaagacggaaatgaatccagtcagttcagaggcagaaggcgaccagccttggcaggcccgggaacaaccctgggaggtgaycaaaggttggtgatcattgcaggaaaactgctgtgtccagagagaaaagcttcttccagagcaaggtacggcagttcaggactgcaacttagacctccaatggggcaaaagaggctggacactaaaactgacacgaataaccagggggccagtcccatgtggcattcaagaagatttccttgaatgggaactggggccaagcgtgcgaacttgggaagaataggattaatgaggcatagacctgtctttgtagagctcaggaaaactaatatattctgactt

SEQ ID NO: 490887 - DNA, 653 bp, Homo sapiens
tggctatcccacaccactagtcaaatggggattgtaacaatgtaagaacrtcctccaactgtttctttccattctaatttttatatttacatcatagggctgttgtaaggattgtgtgaagttgcatagtaagcattcataggcttccatcagacttgagatgtttattaacccaacctttatgctggacactcttccaggtactggggttaaagtgatggacaaggtattcaaggagacttctcccaaggagcttacattctagtgaaggatcctcaacacctcttacctgttggtcctcaacacctcttacctgattatggaaatgttctgctctctagattctcagctatgcttacttggccattttccaagttcttctttcttgagcctcctgaggtcttttgtcgtgtcccattactatagataggatcaaacaaatatcttctacctttgtgtaaaagcccacagggggcagcctagattgagtctcacatcctatagaaagtggaccagaggcacatggttaaagtaggtccaggaagctctgccactagtgcattgtgcaactgacctattcaaggtgtcttgcttccattttgccatctataaaataagggattggattaagtgaattctgatgtcctttaaca

SEQ ID NO: 490888 - DNA, 615 bp, Homo sapiens
aaaaggaaaatggaaagaagttaggggagaagttgagaatttctatgtttcgytttatatactttcaggaaattaggttacatctagacttttcccagaatgtttttcttttcttttctttgagatggggtctcactctgtcgcccagggtggggtgtagttggcacaatctcagctcactgcagcctcgtcggcccgggctgaagcgatcctcccacctcagcttcccgagtcactgggattataggcacatgccaccgcaccagctaatttttttgatactttttgtagagaccgggtttcgccacgttgcttaggctgatctcaaactcctgggctcaagagatgcacccgcctctgcctcccaaagtgctgggattataggagtgtgccactgtgcctgaccaagttttcccagaatttagtatgttgacgggaatagtagaaggtgatttggagccaatatacgaagtttctgaagaaattgtattatttagtctttattataaagtattcattaactgtgcctatatggtctttcaggcaaacagatttttactttgtgttaaaatactacaacaagcagcatatagaagtctattggggacgtggcat

SEQ ID NO: 490889 - DNA, 579 bp, Homo sapiens
ccaactgtcttaatataaggagaccccataattcgatgtgtttagagaatgagcagcatgaaataggaaaatgaaaatcaaacacaatcactgatccctgggaaaacatataattaaagagactagagatgatatactttaaactttgtatattatttgaaaatacaaagcattcataaaacattgttatgttaatgcaaaggaataaatatcagataacaagaataaataattggtattagaaatatgataaaartccaagaatgaaagaatagaaaaaaaaagatggaacggaagtaattaccaatgaaatagtagacaaccatttttttcaaagaagaaacaggaaaaaagccttagttccataaaattcctgaaatatatgcctaaataaaagatgctgttccatgtaggagaaaatgagaccagtacaacatactgctagactaattatcagaaaaagtaatgcaagaacaccatagagaaatgtgttggtgtttatgaaggaaaatttgcaatctagaaagaaatggccataaaacaataatgaaggcaacaaagccgcattcaaatattaat

SEQ ID NO: 490890 - DNA, 534 bp, Homo sapiens
ctgtttctccttttgcaattgttccatcagaatctgagataaacttctagaattagcagaaatgtctggtgcacttggtgccacagttgtagttcctgctttgggggctgtaggagcatctgtcatgttaggtactgtggaagtacttgctggacttggtgattttgatactttggtggtggttactccaaaagtttcaagttctgtgacatcatcatcaaaatccaaatacaagttttcaagactctcaatttttcggcactcgttgacttcacaggacatcttatgtaaataaattggtaaaktattagtaaaaatttcaagccaccctacctatctcttaatgtccctatccctgtcatacatacttcctgctcttttaaagtagaaagaaaagtctaatggttgtaaaaggttcttgtttaagatgacaacaaactactaccagctattattaacctcatcttcccactgatatgttcatgataacaggcaaatttgccaagttataatagcacaagaaatggaatattt

SEQ ID NO: 490891 - DNA, 646 bp, Homo sapiens
aaaggattttctggtttttactattatattcttactgtcattattactcagtttcttataggaacttgcaaaaagtgatgaaatatttaccacatagaatatattacatttaactctaatttgtagttttgtttcaatagacatagtctttcatttattgtatttatgctgtgacatatattaactctgaaagatgtttaaaaaattaaatatcaaaacagtatggacataatttcttatatacaggaatatgcaaatattaattttattgtcaaaagaaagactaccctattgcttatatgtatagacttactgttattccaaattccagtaacgaacaagtaaataagtcataaaaactcacccatttgaggttgtctactaaagtactacrttcctttcatttcagtgaaagacagaacaacctgaccatttcatgtatttcttggccaccctatgccatcattttgtctctaactctcacccttaaacatgactacaggtgctatagacctaattaattcatttagtagtgctgagcctaaagtagctttacacataaaaaagtttcactgaatgtgtcaaacttacatcctccttaaatcagtactttgatatctgacaactgaccacctatatttagaca

SEQ ID NO: 490892 - DNA, 634 bp, Homo sapiens
atgtgactgagaacccgctagctaaactgcacacgacacccaccatgctgttgcagaaggagtctctacatgagcagcttagaaacaaactcactaacatcagatgacccaaatgacccaaaccatttctgcctctgcttaggttctctagaggtggtgtttatcagaatgtgccgtgcctttgactctcagaacaacaccgtgtactttgatgggaagtatgccagccccgacgtcttcaaatccttaggtaaggggatatcaaggtgccttttcttcaaatcagggctataggaaaagatgcgggttgagtgaaagctctgcttggacaaaatgaaaactttatttagaaacaaaaattaaggggttttatacctattttactttctagttagtcactgyagaaaagtcatatagctcaaaagttttttgtctacattacttgtaaagatgtagagtttcattttatctagttggtaatcaaagggatttatatgacgtgtccttccagttcccttccagattttaagaaaccagatttgctggtgatatattattcggatgacctttaggatgtgagctgatacataaaattaagcaaagggcaaaagctttgcccttccatccccctcaa

SEQ ID NO: 490893 - DNA, 636 bp, Homo sapiens
tgatgtgactgagaacccgctagctaaactgcacacgacacccaccatgctgttgcagaaggagtctctacatgagcagcttagaaacaaactcactaacatcagatgacccaaatgacccaaaccatttctgcctctgcttaggttctctagaggtggtgtttatcagaatgtgccgtgcctttgactctcagaacaacaccgtgtactttgatgggaagtatgccagccccgacgtcttcaaatccttaggtaaggggatatcaaggtgccttttcttcaaatcagggctataggaaaagatgcgggttgagtgaaagctctgcttggacaaaatgaaaactttatttagaaacaaaaattaaggggttttatacctattttactttctagttagtcactgtagaaaagtcatatagctcaaaagttttttgtctacattacwtgtaaagatgtagagtttcattttatctagttggtaatcaaagggatttatatgacgtgtccttccagttcccttccagattttaagaaaccagatttgctggtgatatattattcggatgacctttaggatgtgagctgatacataaaattaagcaaagggcaaaagctttgcccttccatccccctcaa

SEQ ID NO: 490894 - DNA, 634 bp, Homo sapiens
atgtgactgagaacccgctagctaaactgcacacgacacccaccatgctgttgcagaaggagtctctacatgagcagcttagaaacaaactcactaacatcagatgacccaaatgacccaaaccatttctgcctctgcttaggttctctagaggtggtgtttatcagaatgtgccgtgcctttgactctcagaacaacaccgtgtactttgatgggaagtatgccagccccgacgtcttcaaatccttaggtaaggggatatcaaggtgccttttcttcaaatcagggctataggaaaagatgcgggttgagtgaaagctctgcttggacaaaatgaaaactttatttagaaacaaaaattaaggggttttatacctattttactttctagttagtcactgtagaaaagtcatatagctcaaaagttttttgtctacattacttgtaaaratgtagagtttcattttatctagttggtaatcaaagggatttatatgacgtgtccttccagttcccttccagattttaagaaaccagatttgctggtgatatattattcggatgacctttaggatgtgagctgatacataaaattaagcaaagggcaaaagctttgcccttccatccccctcaa

SEQ ID NO: 490895 - DNA, 604 bp, Homo sapiens
catggtagtgtgatatggtagcattaccatacagctctgtgttgagatttcagatcatcaccaaacagtatgctctgaactggtatatctgagtttcaatggttgcaagatagcacacagaatcagaatttttagaatcagaacacgatttggagattatctagtccaaccctcttgttttccttacaaggaaatgggctcstttcaagattgtcaagtgacttttccaacatcacatgatcaatgataaaactgatactaaaactcaggtctcataattcttgccaacgtgtgcattgtgcatcttcccaaaattcatatcttatatgaatatgtaattcatatgtcatattataggagcctaatggcctcctataatttttgtttactacaaggaatcctaatggtatttggaggtggtatctttaggaggtaagtaggtttagattaagacacaagggtgcagccccaatgatggagttcatgcccttgtcagaagaagagaaaccacagctcattctctcccccaagtgaagacacagcaaaaaggtagccatctgcaagctagaaacagagttctcaccaggaaccaaattggctggca

SEQ ID NO: 490896 - DNA, 603 bp, Homo sapiens
tggattaaaggggaaatgaactcccaccaagtttagaaactagtattaatttgggaaaatataaagtttaaaatccaacaattcacttattttgtctcttttccttctctctccgccagatttaaggtctaaagagcagggattttatttttggcgggggtctgttttgttcactgctgtatccctagtgctcataactatgagtggaacacagtaggtaattaatattttgtggaataaatggttgtttaaagcagcccactagagcctgagactccttttgtgacaatcccgctctcctttaatgaaaaatgtctccgcaggctccaggctctgcacaagcgaagggtgagaacaaaggctccagacaatgcattagtgccagattctaggcccagtggtgtaggaagagcctacagccctcaaaatcaatagcaattatagaagcacatctactttgccaggaaaactacttaaatcagaaattagccaggaaactaacggccatgactgcgagcctaatgtcaatcaataccatagtttaatagctcaaagacacaagatgmtaaatattgagactccagtgcaagactgagctcctaa

SEQ ID NO: 490897 - DNA, 598 bp, Homo sapiens
cagccttgttgctcacaaaaagcctgtttggtggactcttcacacagatgcgcatgacacagggtatctttacaggcaaatggaaaagtgtgactggttaatagtaaaatcatgtgaggtcaagggaggcagaacaccttcaaagaggaatgattaaggaattagtgtaaactttcaaagcgggtgtttagtggtgtgccctcaaatattcagttcagaatacaacaaagtgatgctccagattaagaggaaaaaaagaatgattcaattttgtgaacrctttgagaaaaaaaaagtaaagttagaacttcaccataatatcctattccaaatcctgaatccctcagcgattaaggaggtaaatgtgaaacacaaattgaggtctgtaagaagatatagatacacatatggccacagaaaaaattttaagttgtgtaaagctttttgattcctcttccactcagtgaactattgagtgtgggggatggggagttgggaacaactattgtgtcccctcagcagctctcacaccctgagtgtcatggagttggcatcttgttgagctgagtgtgattctaacattaaaagacagatcaca

SEQ ID NO: 490898 - DNA, 641 bp, Homo sapiens
atgaaaaatcagctggatgtggtgacgggtgcctgtggtcccagctactcgggatgttgaggtgggaagattgcttgagcctaggagttcgaggctgtagtgggctatgattgtgccacttcaccccagcctgggcgacagaatgagactcyatctcaaaaaaaaaaaaaaaaaatatatatatatatatatatataaaacttcacactcatctagaagaggaattattaaaaactaatcccctgggggaccttgaggcacttctgtcttgttactgagtctgttttaatgtaaaatgtgtaaaatgtgttttaacatttttacattttaacaaaattccgtactggtctgttccccaccagggctgcccctctcctctgcctggcctccagaagagtaagtatcacagacccagatgtccgtggcccacagtccagcccagcctgggaacagagcctctcaattataggctgagcaccttaaatgactggctcctcaagagtctgactaacacttggagaggcagaaaacaagctgtgtcaagcggcaggagcagcagggcttacatgggtgctacctccccagcctccctggaggggctgatttgggtcacttagctacattgcaggatgatcctcacc

SEQ ID NO: 490899 - DNA, 621 bp, Homo sapiens
aatcagctggatgtggtgacgggtgcctgtggtcccagctactcgggatgttgaggtgggaagattgcttgagcctaggagttcgaggctgtagtgggctatgattgtgccacttcaccccagcctgggcgacagaatgagactccatctcaaaaaaaaaaaaaaaawatatatatatatatatatatataaaacttcacactcatctagaagaggaattattaaaaactaatcccctgggggaccttgaggcacttctgtcttgttactgagtctgttttaatgtaaaatgtgtaaaatgtgttttaacatttttacattttaacaaaattccgtactggtctgttccccaccagggctgcccctctcctctgcctggcctccagaagagtaagtatcacagacccagatgtccgtggcccacagtccagcccagcctgggaacagagcctctcaattataggctgagcaccttaaatgactggctcctcaagagtctgactaacacttggagaggcagaaaacaagctgtgtcaagcggcaggagcagcagggcttacatgggtgctacctccccagcctccctggaggggctgatttgggtcacttagctacattgca

SEQ ID NO: 490900 - DNA, 692 bp, Homo sapiens
tcctggcctcttggccctgtcaggactaacacacctgggttgggcccactggggtcaggttactcayggtaagcaagtgcaggtggagagaggtggcccagaggagcaggccaaggtggcaggagatgggtcatttcaaatggctcgccagcagcccaggggatccctgacatctagcaggtattgacattgggattaaccctgtgggtcgatggttccgtgctgattcctcatgtgcctctgcgtcagattgctcaggcaagagggctggagaaaaaaatcagagatgcacccaacttggtcagtatctgtgcagcgatcctgttacggttggcagtcccttactttgaagctctgattcctttcagaagcttctgaagttcaaaggagcaggtgggggtggataggtcattgagaaagggcagaccctgttcaaaagtaagatacttcctaaatctggtctcctttctgtaagttctttggtgtccctccccatatgtgttgagccccttgtggcatgttaagctcagtgctgggaccagccaggggaacaagggttctgccttcatgagtctgagacctgtttagagtgcagcctctcctcccactttcctctcctctcccctcctccgatgcatctatccatccaaaaaaatgctattgtgataacacacataaagcatttagcatta

SEQ ID NO: 490901 - DNA, 627 bp, Homo sapiens
actagattttttacttctatttaattttaattttaattttaacttagataggcctacgggactagtgacttctgtactgagcatcacagctccacagtgtcttgatttcaccccttctcctcgtctgtttttcatttcactatcaaaaatgtaatttaacacaagaactgaaattgttcttttgtgtttgttatgtacgtaatgcttaaagttttaacttttggcttagagacagaggccagatggagttgactggttttaggcccagtacaagaaagcatggcctcctcttgcagtgaaatggaaaagaggagtgttttcctgtggacagtgctgtggctcacaattgcctggtagttaagcgggagaagcagttggagaggctgcagtaaaatctacagtcactggcagcaaggaggttgctgcaaggtttctttgagccagaaagaagggatgagaacccatgtccacatccctgggccttgtttggaagtctrtgagttaggggttctttgctctttatcatggtttctgagaagccacaggtgaaatttgggtctcataaagcaattttcccccaaattactcctcgtattcctgcttccacagatggatattgtatactgt

SEQ ID NO: 490902 - DNA, 643 bp, Homo sapiens
ggcctggcggtaacacaatctctgggagcagcccggtaggaaggcctcctaaggacaaaactgaactttagaaacagcgtcttctgcaactgcacctgcctcgcttgcctctggaaagggtgggggcaggtcagcagagccatgctgttatataagctacttgggggaattgtgcatccgtggattctttatgtgttatgtcttcttttccttatgtatttatttatatcccaccttgtacaaaagaggatctgtggtggctttcagaaacactgatgttgcggcaggacaaacattaaataagaagaacctggggcaaatggaaaggaagggtaagaaaataggagtgtggtttgtcactcagcaaggatactgaggatttacsatgtgcttggctctgtagatacagcagtgaacagaaaaacagccatggttcctgccctcctggagcttacagtctaataggaaaggtgcaggggtagggtgggggagggaggaagaaaggccattatggatccagtgcttttgttgagggtaggctgcagattagactgtgagtctcctggcggccaaagcaagaggtgactacaattatgagggactgggtatgttatcagtgttgtgttggtaacagtacagcgac

SEQ ID NO: 490903 - DNA, 456 bp, Homo sapiens
acgccagtctgcagggtcccaaaaaaactctaacaactaactggaaaaacctacacctgccctttgtttctggaatggaacggctggggtcaagccacccctgctaacacacccccagagatgggaggtgtgttagctggaacgagggaccagagagctgacagaggagagatgggaggtgccccaaggtggccagscctatggatggacactccgataggcagaggttcctcctccccatgagctggcatcggtctgcatagagcttccgtgaggcagcctgcgtcctgcccctgaggccacacagtctgcagtttcctcttccagccgagagcccttcagctccctgaagatgccgtgtcccttatcgctccataatcattgacagggtaggggccacgtgtcgggcggtgagtgaggagacagagggaagacagataagggccctgccccaac

SEQ ID NO: 490904 - DNA, 456 bp, Homo sapiens
acgccagtctgcagggtcccaaaaaaactctaacaactaactggaaaaacctacacctgccctttgtttctggaatggaacggctggggtcaagccacccctgctaacacacccccagagatgggaggtgtgttagctggaacgagggaccagagagctgacagaggagagatgggaggtgccccaaggtggccaggcctatggatggacactcygataggcagaggttcctcctccccatgagctggcatcggtctgcatagagcttccgtgaggcagcctgcgtcctgcccctgaggccacacagtctgcagtttcctcttccagccgagagcccttcagctccctgaagatgccgtgtcccttatcgctccataatcattgacagggtaggggccacgtgtcgggcggtgagtgaggagacagagggaagacagataagggccctgccccaac

SEQ ID NO: 490905 - DNA, 456 bp, Homo sapiens
acgccagtctgcagggtcccaaaaaaactctaacaactaactggaaaaacctacacctgccctttgtttctggaatggaacggctggggtcaagccacccctgctaacacacccccagagatgggaggtgtgttagctggaacgagggaccagagagctgacagaggagagatgggaggtgccccaaggtggccaggcctatggatggacactccgataggcagaggttcctcctccccrtgagctggcatcggtctgcatagagcttccgtgaggcagcctgcgtcctgcccctgaggccacacagtctgcagtttcctcttccagccgagagcccttcagctccctgaagatgccgtgtcccttatcgctccataatcattgacagggtaggggccacgtgtcgggcggtgagtgaggagacagagggaagacagataagggccctgccccaac

SEQ ID NO: 490906 - DNA, 555 bp, Homo sapiens
ccccatggctccaggggtgggaggcctttgatgcctatattcaccctttggctgagcagtgacagcctgcacgctagatttggtgccaagccaccccaaatccagttatttttagtctgtttgtttatcccatttcaagctaactctgtgtcaccactggttatcataacagagagcacctggacgtgtctcggaaaagcaacaaataagctttggagagtgccggggattgccaggaayaccaactgtgtttctagcctggtgcccagttgtgacaaggcagattcctttcttccctccacacgaagggcctaatccagataagccaggcaacaatggctgcctggcttctcaagaccttccttcccgctcatcaccccatgcctagtgtcaggactcacactcgatgacatcagccccatgggcctgagtgcgagtcctggccaaacaccaggtcccaagaatgtcttaacactcaaggcaccagcttaggccaagagcaatcttcccttccacatgccagcctcaggccggcctgtccaccaatagccagag

SEQ ID NO: 490907 - DNA, 568 bp, Homo sapiens
acagaccccaactccagagggatggctgcaggagggttacacagaaggcttacaggggttgtgctagcccatggtcgaacagcagagggagtggaaatgttcaaggttggggctgaagtcagagggaagcggccacatggcaagaactgcccaactccaaacccctctctcattatggccctaattctgtcacatgctaagttaagaccctgggcaatgtaacctgtaagagctgtgcygtctcatatggtagcatctagtcaccttagccatttaaatttaaatgaatactaattgaaactaaataagattgaccatttagttcttcagtcacaccactcccactgcaagggctcaatagccacatatatgctgttggctaccatattgtacagcacagaatagagcatttcactcatcacagatgaagttaaataatataactgttgtgaaaaaagctcagcacagtgcccaacatgtagtagatgttcaatatcctccacccttcccataagctccagacactccagggactcctcactgcccttgccatgccacctccttgagg

SEQ ID NO: 490908 - DNA, 603 bp, Homo sapiens
gctggcctctccatactccccctacccgcccagagcaggcccagagcgcgcaactgcgggcgaaytgacacctctcctggcgtcgacccctcggtccagaactgagtccaagggccccgattaccgatctatgggcggaacgcaagcagcgactttgtttctccacccccaggccttggggaaacttagggcggcgcgcgctcccaggtcggctaagaccggagcgaaccgacttgcaaaaccacaagggcaactgatgggataaaaagaaacacccaaagccatagcctcgtgtgccactcgggccactcccggagcaaagaggcgaggcccggaggaagcaagctccggaggtcgctagctccggaggtcgctgggaggtggcttcttcgttgaacttctagagcgccactgctccaccccccgccccccgccccgcgcatctcagccgacccgcgcaatgtgctctctcggtcctcactcaaggtcttggggcctgaaggaggctgggcgcgtcccgaggaggagccgcccgctggaaacacccaggaaactactcgtcctcaggggttggctgtggaatgagctttggctggagagcct

SEQ ID NO: 490909 - DNA, 605 bp, Homo sapiens
acaaagttgagtaccaacagtgtagasaggccagttttaacctgcacttaaacttgttggcaatgttcttcagagttgttcttctgttagtatcaatgacattatcatattccgtgttttgccaactggattcacagccttcacttatgcatggatacagaatgcatgtatgctctgtggcaggagatgaaaactctcctgcaaaatccattctccttttctatcttttccatttttaaaattaatttaaatgttttattttcattaaaaaaacatttttaaaaaaaatttatttgttttttttagagatgacgtgttggagctatgttgcccgggccggcctggaactcctgggctcaagcgatcctcctgcctgcctcagcctccctagtagctgcgattacaggctcataccaccatgcctggactccccttctctccttttttttttaaatttaacagagtttaaatgagcaaagagtgatccccgaattgggcagctcctgaatcagaatgggttcagagtgactccactgctgtggttggaggtttacgaacagaaaaaggaaactgacacacagaaaacagaagtgaggtacagaaac

SEQ ID NO: 490910 - DNA, 524 bp, Homo sapiens
tcctgtctaccgagcacactagaaacagacagacccaccactcaccatcccttgtccacggttcaacaaggaggttttcgggtccagacttatcttcttttcctttgacatcacatgcctgaagagtcaactggagaggtttacctgaccaaagaaaaggaagaccaagctgtaagctaaaatatgaagaactggaaactagcaygcctatctgtggaaatagagtcctgtggctacccagactgctaactaaaaatctccctgtttaaaagctgaaatagagcagtaatatcagacaaaagttgacaccatccctttgtactttcctgaaagagacaaagtacagctatggccctgagtgattccaaggacagctttctagaacaatcattgttctgaaaaaaggacattataagacataggttgataacatagattgaacacatttgggggggtgattcctaagatactgttttggagccaataattaactttattacaattgcatttaaatataaaatatt

SEQ ID NO: 490911 - DNA, 606 bp, Homo sapiens
gagcagcttgaggctcagtagaaaatttattttataatttgttcagcagcaacagggaaaaaaaaaaaacaaaagaaaattttatagctaggatctgaagatctatggtatctaaagatgtgccatgaatgttatgttctcttaaacagattagcacatcaccgtctccattcctgccatgtttcttggcctttccaccttaatgtctgttttagtgtttcccttttcttgtctttgcttacatttatctttctgaatcccccaatagctttacctactctagattagcagtcatcaaaaatttacrcaacaaatgacttctgagccctactgtgtgccagcaactgtgctaggtgactgaatgtaccatgaaaaatttcaaggtattctgtgaatgtatcaaaagtaactcaaaattctacaactgatagtcgcttaatgataatggtaatgaaaatccctgaaacaatttcatttctacatttcaaaatagagacaataaagcaaagcaaacactgtcagctcgcactctgccctagttctgttcctgtctacacaatgagccattttggggttgcacaaacatggcagctacacacagatgca

SEQ ID NO: 490912 - DNA, 552 bp, Homo sapiens
gcaaaaacattatataagatttacaaaacacaatttgtcaaatagtgtatatgtgggagtgtgggctggaggtggtgtctatgtcaggatttctgccactgaaaaaacaaagtgtgttggatgactgcagataaagattggcagacacaagaaatcatagacaccaagttttggggggtatactcataaaatccaattgttgtaacaatagataggtaccttcttmtgttagcaagtaactacaactcacctgcttgtgtgcatgatcataggagttgatatggttatcaaattcctgatgtttctgatattgcttatcacacagttcacaataaaagttggctctgaggtcttccaaggctttggcaattgccttctctttgtcaacataatccttcaagacccatgaaatacaaagaaacaaaaaatgaacttggtaaaactttaagtgaatgttatagagaaaacagtctatctgagaagacaaaaaagggcttttcataatatttagtggtaccagtaaaagctggatgaaacacaagtggtactttg

SEQ ID NO: 490913 - DNA, 517 bp, Homo sapiens
  misc_feature (1)...(517): n = A,T,C or G
tgctctaactgaccttggtgacttgtctctaggaccttagcgtgtcccatctccacccatggactgtttcttgcatgcctggggcctggcatctctcacaggactggaggagaggcagctctgtgggcatccaggagcaggagcctgggaagggaggtcctggggacaggctgcctcctgcccccacacaggagcccacatgaaggtgccaggcttgggtgagaagaagattcaggattacatgggggctacgcagtgtctgtctcagaccttggaggaatgcgcctgtctcactggctgtaggtctctgaggggctggaatgtggcccagtggggcttcctcttcccttccgctgctctccctgaactgccttcatactggaatgtcagcaggatgggaattttcwcagcaaggatcttacccagtcacagcaatggattccagctggagcctggggncagctcccacatgtccctaccagggaggagagagtgggtgctaaggcagccccagttg

SEQ ID NO: 490914 - DNA, 568 bp, Homo sapiens
cgtggtggtgggcgcctgtagtcccagctacttgggaggctgaggcaggagaatggcgtgaacctgggaggcagagctggcagtgagccgagatcgcgccactgcactctagcctgggcgacagagcaagactccatctcaaaaaaaaaaaattgctacatataaaattagtcaagtttctaattcacatactataagaaatcaatacaaattaataggcatataaatttttcttcctatttacttgttgaatttgttgtcttttatctacaatcaagatttttctctgatgaatctatgtactaagtagatttaattcttaggacagttatcatctccaaattgggaccaatattgtaatgactcaattatttttctttcttacttgactttcacacggtcatgtgatgtgatttattttgggccacccagwgcaagttatttagggaagtctcattcccccaaagcccccttctctctcttactgatcatggaccttgaaagacgtttatttccagcactggcagcagcatgtgcacttatctctcttaatactcacaatttttac

SEQ ID NO: 490915 - DNA, 479 bp, Homo sapiens
gggctccacagctcagagataaaaacatagaacatttgagattgtacaaaactttctagtgtatggtgattattgagtgtttgtgaatggttatgtagcagatgtgtaaataaatgtatcttgttgagtagaagatgtcacagaagagaattcatgaaaatgaaagccacaggcattgcaaaaaatgaaatgatttaactcttatatttgtctatggatagtattatcataattatacacaattagatctgatgttctgaaatactcttcaagaacaatttaaaacatcacactagatgtccagaggttatcaactagaagcctgttgacaggttattagaaacacattgtttgacaatttctatttgattggctatagtcaggatacatattctcccacctgctrtagttctcaccaattgctattgtattaaataaaacatgttttattcatttattaatatcttctgcctggtctg

SEQ ID NO: 490916 - DNA, 644 bp, Homo sapiens
tgtcactgcctgctccatacccccagcagcatccacaaagccctgctctggctttcctggttcttccacacccatgctgctggcctctctgattagattataccgcaaaacctctagggcaaggactgtcttttttccttttcaaccacaacgtctatcaccatgctacacatggtcctaattctatccaactgcatgtccttgcaggcccaccaatatctcccttttttttttttaagagacagagtctcactctgtcacccaggctggaggagggcagtggtgccatgatcatagctcacttcagcatcgacctcctgcctcaagtgatcctcccacctcagcctcctaagtgtctaggacaacaggtgtacaccaccacacccrgctaatttttttttttttttttggtagagacaggggtctcactatgttgcgcaggctgacctcaagctcctagcctcaagcaatccgatcccccaacctcagcctcccaacatgctgggattcctggcgtgagacaccatgccgaggttcaatgtctcctctgaaaggaaagaagtggacaaagccattctgcagattcccaacactgtcaccgaggctgcccgcacagctctattatctgtcctgaagcattgtta

SEQ ID NO: 490917 - DNA, 644 bp, Homo sapiens
tgtcactgcctgctccatacccccagcagcatccacaaagccctgctctggctttcctggttcttccacacccatgctgctggcctctctgattagattataccgcaaaacctctagggcaaggactgtcttttttccttttcaaccacaacgtctatcaccatgctacacatggtcctaattctatccaactgcatgtccttgcaggcccaccaatatctcccttttttttttttaagagacagagtctcactctgtcacccaggctggaggagggcagtggtgccatgatcatagctcacttcagcatcgacctcctgcctcaagtgatcctcccacctcagcctcctaagtgtctaggacaacaggtgtacaccaccacacccggctaatttttttttttttttttggtagagacaggggtctcactatgttgcgcaggctgacctcaagctcctagcctcaagcaatccgatcccccaacctcagcctcccaacatgctgggattcctggcgtgagacaccatgccgaggytcaatgtctcctctgaaaggaaagaagtggacaaagccattctgcagattcccaacactgtcaccgaggctgcccgcacagctctattatctgtcctgaagcattgtta

SEQ ID NO: 490918 - DNA, 621 bp, Homo sapiens
tagtccctgggaagggaaggaaagaggcaaatacagggttcttacagacccaggactgcccctgccccacccacaaaacccttgtatgcactccttcctccaaaataaaaataataacagcacttttcagactttccagactacccggtttggtaataaggcagagaaatggagtctgctcctggtcccctgcctgactggtgatgccacctggactacaggtgttggtgggagaataatgaaggatcccttccttcgctcattgagaagggaagccaatctggtcaaacaacatgaacagggaatctggatgcttctgctggttcagtggttctcggacacttgccactatttatctctggctccacctgagggctagactctcctggaggtggtgaccatggttgcaggtttgttttcactgaaaccacgtggtgggagccatgatgcttatgtaggagacagtgattcagaccactttcctcagaagtgtgctgagtccataggattttgacaacaatatgcaygcctcttgaagcccaacaggaatataaggttgacttatcctgtcttattatttggagtgacttggtctgttctttgaaacagatgtgttctctg

SEQ ID NO: 490919 - DNA, 643 bp, Homo sapiens
ggattacaggcacctggcaccacacgtggataatttttgtatttttagtggcgacggggtttcaccatattgggcatgctggtctcgaactcctgacytcaagtaatcctcctgcttaggcctcccaaagtgctaggattacaggtgtgagccactgcgccttgacttaagttcttactcttaaaaataaacaaatatattttgtttgtatgacactactgttaatttttaacaatgtatatataaacttcaaattagtatgttttctctctttccacttaataaatattatattctgagggaaagttaatacatagaactctagatttaccattgtcttctaaaaatacagactcaaatctaattgtttatttttaagaataagaactcaagttctcatttttcatctgtataattactgtgctagctttgtttgactcaaatctaatgttgaatacatgaatgtatggaaccacagaggtttgagacaaaatttgcatcctactagaacccaagcaacttcaaattcttaggaatatggtaactttttacctaataaaatagaaatttatcattaattttctgttgaaattattgtagtagaatttttttgcttgcagagacatgtagaagtttctagaat

SEQ ID NO: 490920 - DNA, 561 bp, Homo sapiens
caaattagtatgttttctctytttccacttaataaatattatattctgagggaaagttaatacatagaactctagatttaccattgtcttctaaaaatacagactcaaatctaattgtttatttttaagaataagaactcaagttctcatttttcatctgtataattactgtgctagctttgtttgactcaaatctaatgttgaatacatgaatgtatggaaccacagaggtttgagacaaaatttgcatcctactagaacccaagcaacttcaaattcttaggaatatggtaactttttacctaataaaatagaaatttatcattaattttctgttgaaattattgtagtagaatttttttgcttgcagagacatgtagaagtttctagaatcaatcctgaagtaaaaacattaacagtaccagaatttacataatttagtataaaatgaaatttttatgaatttttaacaaataggaagtttaaaaccttatctatttgtatagctcttgcttcatatgaaacaaactaaaattaatagaaagtattattttctcaata

SEQ ID NO: 490921 - DNA, 643 bp, Homo sapiens
ggattacaggcacctggcaccacacgtggataatttttgtatttttagtggcgacggggtttcaccatattgggcatgctggtctcgaactcctgacctcaagtaatcctcctgcttaggcctcccaaagtgctaggattacaggtgtgagccactgcgccttgacttaagttcttactcttaaaaataaacaaatatattttgtttgtatgacactactgttaatttttaacaatgtatatataaacttcaaattagtatgttttctctctttccacttaataaatattatattctgagggaaagttaatacatagaactctagatttaccattgtmttctaaaaatacagactcaaatctaattgtttatttttaagaataagaactcaagttctcatttttcatctgtataattactgtgctagctttgtttgactcaaatctaatgttgaatacatgaatgtatggaaccacagaggtttgagacaaaatttgcatcctactagaacccaagcaacttcaaattcttaggaatatggtaactttttacctaataaaatagaaatttatcattaattttctgttgaaattattgtagtagaatttttttgcttgcagagacatgtagaagtttctagaat

SEQ ID NO: 490922 - DNA, 512 bp, Homo sapiens
caaggatattaacagatgatgaagcattggtgtgttgcttctgctcrggcagcgtctgcactccggagggcactcctgcatgaagaagtctctagtgaaggatgtgctggccttatgccaggcttctggaagggtacagctttttttttttttttttcaaactaagggatgtcctttcagatcttttcatcaaattactcattcacattgctcacttaaggtaagataaggccttgttgaagttcctagagaaaaaaagtcaagtattgaataaacagagagataacactggattaaaaatgaggggatcattctacaaaacatgtgaccagtgctcctcaaagctgtcaaggttttcaacgaggaatgtctaagaaactgtcagagccaagaggagcctaaggaggcatgacatgtaactgtaacatggcatcctggatggaatctcagaagagaaaaaagacattgggtaggaactaaggtaatccaagtaactctggacttcagttaat

SEQ ID NO: 490923 - DNA, 512 bp, Homo sapiens
caaggatattaacagatgatgaagcattggtgtgttgcttctgctcaggcagcgtctgcactccggagggcactcctgcaygaagaagtctctagtgaaggatgtgctggccttatgccaggcttctggaagggtacagctttttttttttttttttcaaactaagggatgtcctttcagatcttttcatcaaattactcattcacattgctcacttaaggtaagataaggccttgttgaagttcctagagaaaaaaagtcaagtattgaataaacagagagataacactggattaaaaatgaggggatcattctacaaaacatgtgaccagtgctcctcaaagctgtcaaggttttcaacgaggaatgtctaagaaactgtcagagccaagaggagcctaaggaggcatgacatgtaactgtaacatggcatcctggatggaatctcagaagagaaaaaagacattgggtaggaactaaggtaatccaagtaactctggacttcagttaat

SEQ ID NO: 490924 - DNA, 512 bp, Homo sapiens
caaggatattaacagatgatgaagcattggtgtgttgcttctgctcaggcagcgtctgcactccggagggcactcctgcatgaagaagtctctagtgaaggatgtgctggccttatgccaggcttctggaagggtacagctttttttttttttttttcaaactaagggatgtcctttcagatcttttcatcaaattactcattcacattgctcacttaaggtaagataaggccttgttgaagttcctagagaaaaaaagkcaagtattgaataaacagagagataacactggattaaaaatgaggggatcattctacaaaacatgtgaccagtgctcctcaaagctgtcaaggttttcaacgaggaatgtctaagaaactgtcagagccaagaggagcctaaggaggcatgacatgtaactgtaacatggcatcctggatggaatctcagaagagaaaaaagacattgggtaggaactaaggtaatccaagtaactctggacttcagttaat

SEQ ID NO: 490925 - DNA, 637 bp, Homo sapiens
tcaggaggctgaggtgggaggataacttgagccagggagccggactggcagtgattgcatcactgcactccaacctgaatgacagagaccctgtcccccactccccgctccaaaaaaaaaaaagatatgggacaattagccagcattttgggttctaggatcaactctgtcacttatcataattagtgatttggaaaaagckcctcagtttcctcacctgtaaaatagagattaaagggtgtctgtcctctatgagggtcaccatatgtgattgttttataaatgtcaaagtccttcagaatcagaagggatgagatgataatgatgttagtgattactttcaatgcaatgaaaatgaggaggcatagccagatcctcctattaataaagaacaagactcccggatctcaaatactgctttcctgatgtgtgcaccagcagccaaggctagctcttggctcaattcatctccttgaggagatccatcatttaccagttttatttatctcgcttaccacagaggcacctctcaaaccagaagttgctgcatacctctctgccttgtcaatgcctgcctgtcttctgtgactttgactctggccattcatccctctaataaagaagatatgggtggagc

SEQ ID NO: 490926 - DNA, 640 bp, Homo sapiens
gatatcttttctacaatctaatgagacaccctgagccaaaactaccctggaaagtgactcctaaactcctgacatacaaaaatgatgagaaaataaatgtttattatttaagcgattacatttggagggaaaattgttatacagcaataaataactaatataatgaataagcaataatagacataaaccttaaaggcaagaataataaagggggattaacccgattatatagtaaaacatattctaaagctataataattaaaacaatgtggtaattgcatatgaataaatatagatatcaaaggagtagaataggaggttgataaatatgtacatatccactgaaaaaagttagtgtatgaaaatggcaaaatttcaaatcaatagggcaaaataaggattattcaataaatggcattgtaggaaatgaagagctagctgaaaaaataaattatatccatacttcacatattatacraaaatgaattatggatagatcaaatatttaaatagtaaacataaaaaaggattttaaaaattatgggaaaattttaaaaagaaaacctctgagtggaaatatagaagccttaagagattagtaagtttacttacacacacacacattctccatggctcaaac

SEQ ID NO: 490927 - DNA, 316 bp, Homo sapiens
tacacttgtaaaagcgctgccttttgcctgtgctggctctgtttctgtgaacttccgggctgccgagcctttctttttatttactgcttgctcggctgcacggctttcggctcctaatgccttttttcttatctttttataaacatacacctgattgccttgccgattctgcattactgggcagagtaagagctctgcttctaatgctgcccgcttaagacagggactgatagctgtagcatatcctaggtcttttttcctatctattggaggaggmggctcaggtataaacccccgtttcctctgttatttcggc

SEQ ID NO: 490928 - DNA, 656 bp, Homo sapiens
cactgaatttttaatggacatcaaaatcatgtctcttccttatcatacatgcyggaagaatctctgttacataacaaacattctatatatgtatattatttaaattgaatatgttgcttatatacattttaaaatttattaccatgggtgggagaatggaacaaactctcctaagtgagatagtgacttcctctctagttgcatgaaatgtgttttacatttcactatgtaacttgtacgcactaaaaagcttctaacttgtattgttgtcttttgatatgtatctatatcttatctatatctatcttgatccataaaaagatagtagaccctgattatttagagattgcttctcatgccttgttttccagaggacctagcactgtgcttatacatgatgctagtaacaactgaagtttactaggcttggtttcttcctaaacccctatgtaatagattctgtctctctagtcagtagcccactactgaggcaagaagatttcaaaggatgctaagatataagacaagaaaattattgaccacaccattctattttgcataaatgtaaccctttgaaacattttagatgccaaaatatatgatatttttctgcatatctgaacaggtgattatgctggagttttgaggatcttaag

SEQ ID NO: 490929 - DNA, 656 bp, Homo sapiens
cactgaatttttaatggacatcaaaatcatgtctcttccttatcatacatgctggaagaatctctgttacataacaaacattctatatatgtatattatttaaattgaatatgttgcttatatacattttaaaatttattaccatgggtgggagaatggaacaaactctcctaagtgagatagtgacttcctctctagttgcatgaaatgtgttttacatttcactatgtaacttgtacgcactaaaaagcttctaacttgtattgttgtcttttgatatgtatctatatcttatctatatctatcttgatccataaaaagatagtagaccctgattatttagagattgcttctcatgcctygttttccagaggacctagcactgtgcttatacatgatgctagtaacaactgaagtttactaggcttggtttcttcctaaacccctatgtaatagattctgtctctctagtcagtagcccactactgaggcaagaagatttcaaaggatgctaagatataagacaagaaaattattgaccacaccattctattttgcataaatgtaaccctttgaaacattttagatgccaaaatatatgatatttttctgcatatctgaacaggtgattatgctggagttttgaggatcttaag

SEQ ID NO: 490930 - DNA, 598 bp, Homo sapiens
ctgccaaataatgtaccaggtgttttctttttctcttaagagaaaaaaatgatctctaaaattatatgaagtttaaatgatttaattcctggttagaaaatttrgcttgaaatctaatggttatcatcaccttatatttcaataatatttcatttcccacacctgccttctagagcagtttcaatcatgaataacagtgggggagaaaaatgataaacattatgtgctcagcaaaggacttagtagtgttgagccaagttggaaaaggagaacaactattactacagggctgaaccttgtggggagtctggaggtctgccctgacaatcccaaactctgcaactttattatctttgtggttttaaaaagacttgatctttctaatattacattctgaaaggcaacttaatagatactctatttctggagagctctgtatgcagaataatggaaaattcttgtcgtggttgtcatgtttttttgaagaagcagcaaagtgaagaataaatttggctgatttgcatgaagtgttagtattcactgacagtgattcctgaactgaattttctttatgctgtgggagaagagacgtgaagca

SEQ ID NO: 490931 - DNA, 558 bp, Homo sapiens
ggtacaattatttgtcagttaaaaaaaatgaaaagacaaactccagccatttatttctcaaaaattacatgacacatgtgttttgttcaaaagtaggagatacagaatagtaaattagcatgggaagctacactttagatatccagttttgagatcagagccaattccatttacaagctccagtgcaccattaattagctctgtaaggctggacaagttattgattttttttttagtctctttgtactatgctgcttttagggcctataaaacctaaatcatatgattataataaagattaattgagaagcatamtataacacactatacagagtaaagtacaaaataagtgctcaagattatttttgataatgatgacaacgattaagaaatgagtaaaacaacactgttttcaacctagtaatgtggaaaaattatattcaagtgattacagaattaattatctatttctgtataagctcatcggtaattaaaatttcaacagaaataacttgagtatttggtaacattctgaatattgaaaagacatggaagact

SEQ ID NO: 490932 - DNA, 414 bp, Homo sapiens
accggggagacggacgctgggatggggtcagcggcgccctgccgaatcccgagggccgagcacccctccctcagccgcactgcacctgcccgtaggtgaccaacccacgggcggacccccagacccaatcctctccagagccagggtgggatgggcagggacaggagcggagccctactggccccgggcgaaggcatcctgraaagcatccagagcgtccagcatccctcccgcggccacccgcaggctgaccgacccctgggcagaccctcagactcaatccagtccagggcggattaaggagtgggagacaagggagccggtggccccgctggccccgggccggaggcgtccagccaagtccggagggccgagcatccctcccgcggccgcacgggacccgcctgcggatgg

SEQ ID NO: 490933 - DNA, 396 bp, Homo sapiens
tggggtctcttctactctgtccctgctcctctgcccctcctgcgtcccaccccccccacgttattctcagagcatgggacaattcctctgttagggtgaataattgagcgttaactctaggaacagacggctatgaatagatgcgagggaagaaagcgttttgccaagtttgagctgagctgaggattgtcggcgctgaattaaagatgagcttcctggctctctgttctacttagcattgatcgagcaccatgtcttgaattttcaaaaaaagaagaaggagaagaaaaaagtcagaaaggggtttatatatttcacttgaggtcaggagttcragaccaccttggccaacatggtgaaaccccgtctctactaaaaatccaaaaattagccggg

SEQ ID NO: 490934 - DNA, 610 bp, Homo sapiens
taatggtcgcttaagtgttcacaaatgtaagtcattactattataagtggtgggtgatcaagtggctaggggtgccatctttagcaaataaaaatataggacgcacagttaaatttgaatttcagataagaatttcttagcataagtatgccctatgcaatatttgggacacatttataycaaaaaaaactcaatatttatctgaaattcaaatgtaactgtgtgtcctagattttatctggcagccttattgatggtggcttattgactggctgggaatgacaggggtgtaggccaggaaatggctctgtgaaggctgcctagaactgaatcgaacatgaggatgagtcagtgtcaagactcccagtggggccatcggatcattactgcatgatcgtcttaagcctttgttagtgaatccctcagactcacgccttcttctctccaggcctgaacaccctgtcctacctggtcctacctggatgctggcctcagtaagctcctgggctcattgaagatgaacctagcagtagtatttacaccacttgttgtgtgcccactgtgggcccggcgccatgccgagtgctctatggatgtgaggtaatgaagc

SEQ ID NO: 490935 - DNA, 610 bp, Homo sapiens
taatggtcgcttaagtgttcacaaatgtaagtcattactattataagtggtgggtgatcaagtggctaggggtgccatctttagcaaataaaaatataggacgcacagttaaatttgaatttcagataagaatttcttagcataagtatgccctatgcaatatttgggacacatttatatcaaaaaaaactcaatatttatctgaaattcaaatgtaactgtgtgtcctagattttatctggcagccttattgatggyggcttattgactggctgggaatgacaggggtgtaggccaggaaatggctctgtgaaggctgcctagaactgaatcgaacatgaggatgagtcagtgtcaagactcccagtggggccatcggatcattactgcatgatcgtcttaagcctttgttagtgaatccctcagactcacgccttcttctctccaggcctgaacaccctgtcctacctggtcctacctggatgctggcctcagtaagctcctgggctcattgaagatgaacctagcagtagtatttacaccacttgttgtgtgcccactgtgggcccggcgccatgccgagtgctctatggatgtgaggtaatgaagc

SEQ ID NO: 490936 - DNA, 589 bp, Homo sapiens
ggcgatatatgccctaccttcctcacaattagaaaaacacttcgaaaagtaaaaatggccacacaaatccaaggctgaggcatgacttttagacttatgttcattccattcagagcttgaggcccatttctcgcaatgcgttacatgaggctgaaggagccagtgagaaccttctctattaggtcgcccaccctctgccactgaaacagtcccaatgcctcccctgaggcctccccgacgccccacccagacaacctggaagtggcgtgggttcctctgggctggggtgggtggactgatcagtgattgctccttcaggggagagtgtgcaggccccctcctgmggcctgcctgtctcattcctgaggagttcatcccccaacccacaccctgctcaaacctgacaggaggaggtggagaagccctggggtgggggactgagggaggggaggcagaggcagctccacacctgcctgggggcagaaaggaacttctgcttccatatccaggacctggttcttcagagcagagccaggaagaggcactggcacggccagtagggttgtggagtggggagggggctctgcag

SEQ ID NO: 490937 - DNA, 594 bp, Homo sapiens
tgctgcttgcctatctcactcactgcttccaaggtagagcttagggggcctcagaactgaggatgaagcaggaacctatgtatatgtttaaaaattgaatctggccaggtgcagtagctcacacctgtaatcctagcactttgggaggccaaggcaggtggatgatgtgaggtcaggagtttgagaccagcctgaccaacatggtgaaaccccatttctactaaaaatacaraattagctggtcatggtggcacatcactgtaatcccagctattcgggaggctaaggcaggagaatcacttgaacccaggaggccgaagttgcagtgagccaaaattgcaccattgcactccagcctgggcaacaagagtgaaactccatctcaaaaaatatctatctatctatctatctatatatatgttttcacagaaacaatgctccaacaaggaacttgtacctgaacttttgaaacacaacccatgtataaattgggaatttagtctttattatagtcgagaaattctacatttagtccttgtagagttttaaaccatttggaaagaataaccataggatttataaatgcagtgttat

SEQ ID NO: 490938 - DNA, 551 bp, Homo sapiens
cagctggatgtttgggggctgggattacagtgaaaagagagaatgcttcttcgtgtgtgtgtgtgtgtgtgtgtgtgtgtacacaacagtgggaaggggacttctgaaaacacttggaggaaaaggaagacctgtttaatactgatttttttattttttaaagagacagggtctcacctcactgcccaggctggagttcagtggcacgttcatagctcactgcatccttggcctcctgggctcaagtgatctcctgccttagcctcccaagtggctgggatgagaggcacgagtcactgtgcctggcctctaatgcttattgttaatactgtataataatctgatgttttttattttaacatcataaaaatgtatcatatttaacttggtttgctcataacattatcacgtttgatagacttagaaatatacaggcctggaaaaaaaatgaaaaatatttaagaattatcttccttcccacactcaaatggggtgaaacccagaatgtctcaggtcacctscagcatctgaccagtgccaccctcacccac

SEQ ID NO: 490939 - DNA, 612 bp, Homo sapiens
cttttgtatggtcatgttagtgttttttgttttttaccaaaagactgtaattatgctgcatagacatttggcatatagaatttgctttctcagtttaatcgtttaagcatttcaaatatcgttaggaactcttcataaacatttaagtggatacttaagattttatcaggcatttgtcctgttgtttattgagctattctcttagtgttagactcaagttttttttcactcccactgaggtgaatatctctgtagctaaacactttttctgtatatcagattcaccttatgctagattcctagaagtgaaaatactaaggattatgaattttttatagtctcttggtacatattctaaattaaccactagaaagattktaccaattttttccctcctggggtgtatgagaatgcacaccttgtgcagtggattcttaggatgcaattttatggtgaggtggcttttcttaaacctttcttttcaccagtctttgaaatgtgtctcctctggaataaagtcagaacctgtgggatcacagaaacaagcaactcagcagatatggtgctttctgccataaccacgaaaggcaaaataattgacctcatatagcc

SEQ ID NO: 490940 - DNA, 534 bp, Homo sapiens
tcaaaattaacataccaatatccttcctgtatgtaaaataaacttccatatagatattacggaagaaaatactagatttatgcataatatataaaactaaattttaaaactagccagaatctacatgaagacatttttaatatcactaaaagggaaaaagataacttcaaataatggcaggggatacrttaagaaaagtatcataaaatttcaactctcccgaagtgcatctatgtgcaaaccaatgttttaataggcaggattcatgagatatcattttcaagtgtctttactgggtttttttctccttttctcttttaaatgtgtttcctggtactagttcttttggctttggggtgaagttaaaacaagtcctgttaatttccttgccactttatgtagcaaagtatccttgggttagtaatcaatatatgtagtgttttctcacagatgtgggggttaaaagtccaagatgaaggtgtcagcagggttgtttctccttggcttttagatggccattgtctctctgccttc

SEQ ID NO: 490941 - DNA, 534 bp, Homo sapiens
tcaaaattaacataccaatatccttcctgtatgtaaaataaacttccatatagatattacggaagaaaatactagatttatgcataatatataaaactaaattttaaaactagccagaatctacatgaagacatttttaatatcactaaaagggaaaaagataacttcaaataatggcaggggatacattaagaaaagtatcataaaatttcaactctcccsaagtgcatctatgtgcaaaccaatgttttaataggcaggattcatgagatatcattttcaagtgtctttactgggtttttttctccttttctcttttaaatgtgtttcctggtactagttcttttggctttggggtgaagttaaaacaagtcctgttaatttccttgccactttatgtagcaaagtatccttgggttagtaatcaatatatgtagtgttttctcacagatgtgggggttaaaagtccaagatgaaggtgtcagcagggttgtttctccttggcttttagatggccattgtctctctgccttc

SEQ ID NO: 490942 - DNA, 534 bp, Homo sapiens
tcaaaattaacataccaatatccttcctgtatgtaaaataaacttccatatagatattacggaagaaaatactagatttatgcataatatataaaactaaattttaaaactagccagaatctacatgaagacatttttaatatcactaaaagggaaaaagataacttcaaataatggcaggggatacattaagaaaagtatcataaaatttcaactctcccgaagtgcatctatgtgcaaaccaatgttttaataggcaggattcatgagatatcattttcmagtgtctttactgggtttttttctccttttctcttttaaatgtgtttcctggtactagttcttttggctttggggtgaagttaaaacaagtcctgttaatttccttgccactttatgtagcaaagtatccttgggttagtaatcaatatatgtagtgttttctcacagatgtgggggttaaaagtccaagatgaaggtgtcagcagggttgtttctccttggcttttagatggccattgtctctctgccttc

SEQ ID NO: 490943 - DNA, 534 bp, Homo sapiens
tcaaaattaacataccaatatccttcctgtatgtaaaataaacttccatatagatattacggaagaaaatactagatttatgcataatatataaaactaaattttaaaactagccagaatctacatgaagacatttttaatatcactaaaagggaaaaagataacttcaaataatggcaggggatacattaagaaaagtatcataaaatttcaactctcccgaagtgcatctatgtgcaaaccaatgttttaataggcaggattcatgagatatcattttcaagtgtctttactgggtttttttctccttttctcttttaaatgwgtttcctggtactagttcttttggctttggggtgaagttaaaacaagtcctgttaatttccttgccactttatgtagcaaagtatccttgggttagtaatcaatatatgtagtgttttctcacagatgtgggggttaaaagtccaagatgaaggtgtcagcagggttgtttctccttggcttttagatggccattgtctctctgccttc

SEQ ID NO: 490944 - DNA, 625 bp, Homo sapiens
tgcaatctcaccatttacattttggagaataattggaaataattggattattattggcatatcttacatgtacatagaactctgattctgcatgtttttccacctttaaaaccaagcagtaaagtatgttccccttttctggggatatttytggattaagtaatcttaagaaaacaagtatcctaaaaaaatatgataataagaattgctggttgacttttattcttgccacaggcagcagtttggcaggtgcatgtaagtcttgatgagactgtcttattaaattataggaccaattagtgcacctagatatattttgactggttctatacctatggcacctataaattataattggctggtgatggttgtgacttaactatacctggaactgataatcatatgttataatttcatataaatgataaaaataattataactcccaaatcttggtgattgatttagcaatagtcttttagaagtaccgtaataccttacctaagagattttaataatcttgaattgattcaatgagatatttcttcaagtagttctaaaaaatgcatagatttcattatctttactatgctgtgacaagtaaaacattttccgtccatgagtttt

SEQ ID NO: 490945 - DNA, 625 bp, Homo sapiens
tgcaatctcaccatttacattttggagaataattggaaataattggattattattggcatatcttacatgtacatagaactctgattctgcatgtttttccacctttaaaaccaagcagtaaagtatgttccccttttctggggatatttttggattaagtaatcttaagaaaacaagtatcctaaaaaaatatgataataagaattgctggttgacttttattcttgccacaggcagcagtttggcaggtgcatgtaagtcttgatgagactgtcttattaaattataggaccaattagtgcacctagatatattttgactggttctatacctatggcacctataarttataattggctggtgatggttgtgacttaactatacctggaactgataatcatatgttataatttcatataaatgataaaaataattataactcccaaatcttggtgattgatttagcaatagtcttttagaagtaccgtaataccttacctaagagattttaataatcttgaattgattcaatgagatatttcttcaagtagttctaaaaaatgcatagatttcattatctttactatgctgtgacaagtaaaacattttccgtccatgagtttt

SEQ ID NO: 490946 - DNA, 574 bp, Homo sapiens
agatgtagacttctgaattcaaaataggttttctgaaaacctattgtatctgggatatgttattgaatgagtaattcagtgggagttacgaagggactgtaaaaatgtatttgttaaatggtgagcatatcataataaaaagtagaccatatttatggaatgcaccgtgtatgtcaggcattatatatgacttttttttctttggagacggagtctcgctctgtcgcccaggctggagtgcagtggcgcgatctcrgctcactgcaatgcaacctccgcctcctgggttcacaccattctcctgcctcagtctccctagtagctgggactacaggtgcctgccacacgcccggctgatttttcgtatttttactagagatagggtttcactgtgttagccaggatggtctcaatctcctgaccttgtgatctgcccgccttggcctcccaaagtgctgggattacacgggagccaccacgcccggccgtatatgacctcttaaccctcaaaacatcccttggaagtaagttatcttagtctccctttaggtagctgggtcatagtaaggtgaaa

SEQ ID NO: 490947 - DNA, 574 bp, Homo sapiens
agatgtagacttctgaattcaaaataggttttctgaaaacctattgtatctgggatatgttattgaatgagtaattcagtgggagttacgaagggactgtaaaaatgtatttgttaaatggtgagcatatcataataaaaagtagaccatatttatggaatgcaccgtgtatgtcaggcattatatatgacttttttttctttggagacggagtctcgctctgtcgcccaggctggagtgcagtggcgcgatctcagctcactgcaatgcaacctccgcctcctgggttcacaccattctcctgcctcagtctccctagtagctgggactacaggtgcctgccacacgcccggctgatttttcgtatttttactagagatagggtttcactgtgttagccaggatggtctcaatctcctgaccttgtgatctkcccgccttggcctcccaaagtgctgggattacacgggagccaccacgcccggccgtatatgacctcttaaccctcaaaacatcccttggaagtaagttatcttagtctccctttaggtagctgggtcatagtaaggtgaaa

SEQ ID NO: 490948 - DNA, 624 bp, Homo sapiens
aagtctttactaaatgtaacacataattagatgtagacttctgaattcaaaataggttttctgaaaacctattgtatctgggatatgttattgaatgagtaattcagtgggagttacgaagggactgtaaaaatgtatttgttaaatggtgagcatatcataataaaaagtagaccatatttatggaatgcaccgtgtatgtcaggcattatatatgacttttttttctttggagacggagtctcgctctgtcgcccaggctggagtgcagtggcgcgatctcagctcactgcaatgcaacctccgcctcctgggttcacaccattctcctgcctcagtctccctagtagctgggactacaggtgcctgccacacgcccggctgatttttcgtatttttactagagatagggtttcactgtgttagccaggatggtctcaatctcctgaccttgtgatctgcccgccttggcctcccaaagtgctgggattacacgggagccaccacgcccggccrtatatgacctcttaaccctcaaaacatcccttggaagtaagttatcttagtctccctttaggtagctgggtcatagtaaggtgaaaataactctcacaagtttcacag

SEQ ID NO: 490949 - DNA, 596 bp, Homo sapiens
ggtaaaataatttgtttagaaaagtgatatttaaaatgaacacattctaaatcattcttggaggcgaaaattatttgcaacaacaactaccttctaggaagaactgttcaatggattgtagtatgtatttttggctgccttgcaagtatctgagtgagctgaatgttttcttcagactgatgattttgagatgtggagcactgcaggttgaatactttagtgataatgaaacatgcaattcaaatacacccttgtgatggctataattacaaagaaatggtttacagagaaggctatatttgaaaagtagatttcgagattttcttgtaactttaaatgttaagatgaatagaagacagaatcacgttcttcggttttcaagtgatggtagatgacaatacttgaayggatagtcttgcctcacttaacgaaagggatacattctgagaaatgtgtcaggtgatttcatcgttatgtaaacaccatggagtgtgcttatccaaacctagatggtacagtctactaggcatctaggtcatggggtttaccctactgttcctaggctataaacttgtcaagcatgttactgtactgaa

SEQ ID NO: 490950 - DNA, 518 bp, Homo sapiens
ggaaaaaagatcactaaagaaraaacaacatgactaattccacttgaagaggtgaaaatacactgttacaacatgatacaagattactaaccactgagtgaacagtgttgcaagtttggattgatcatatccccaggaggggatggtttgtcctttagcttagcctgaaagcccaccagatgcggaactaatgaaataaaaaagtacctggtgatagcaagggtatgcatacgtgggttgagggtggggatgagaacttaagcagaaatcatgacttgcaaaatagactgatttattattcacaaaataaatctatcaaacaaaaccataatatacatgccacactatctgtaattagattttttaatatcagctttatcagacccatatgctccaggaaatcaaagaacaacagaaaaacttccctccatttctacatgaacccatgtactctaatggtgagatcactgactagtccagcactttgcctatttcctgtatcttggagaatccttgcc

SEQ ID NO: 490951 - DNA, 518 bp, Homo sapiens
ggaaaaaagatcactaaagaagaaacaacatgactaattccacttgaagaggtgaaaatacactgttacaacatgatacaagattactaaccactgagtgaacagtgttgcaagtttggattgatcatatccccaggaggggatggtttgtcctttagcttagcctgaaagcccaccagatgcggaactaatgaaataaaaaagtacctggtgatagcaagggtatgcatacgtgggttgagggtggggatgagaacttaagcagaaatcatgacttgcaaaatagactgatttattattcacaaaataaatctatcaaacaaaaccataatatacatgccayactatctgtaattagattttttaatatcagctttatcagacccatatgctccaggaaatcaaagaacaacagaaaaacttccctccatttctacatgaacccatgtactctaatggtgagatcactgactagtccagcactttgcctatttcctgtatcttggagaatccttgcc

SEQ ID NO: 490952 - DNA, 518 bp, Homo sapiens
ggaaaaaagatcactaaagaagaaacaacatgactaattccacttgaagaggtgaaaatacactgttacaacatgatacaagattactaaccactgagtgaacagtgttgcaagtttggattgatcatatccccaggaggggatggtttgtcctttagcttagcctgaaagcccaccagatgcggaactaatgaaataaaaaagtacctggtgatagcaagggtatgcatacgtgggttgagggtggggatgagaacttaagcagaaatcatgacttgcaaaatagactgatttattattcacaaaataaatctatcaaacaaaaccataatatacatgccacactatctgtaattagattttttaatatcagctttatcagacccatatgctccaggaaatcaaagaacaacagaaaaacttccctccatttctrcatgaacccatgtactctaatggtgagatcactgactagtccagcactttgcctatttcctgtatcttggagaatccttgcc

SEQ ID NO: 490953 - DNA, 578 bp, Homo sapiens
tacacgcattataatatcacaggatgcaattgttagaaactgcttgtaacattaacaggtcttaccgtgaagtgcatgtaataaaaaatactcaacagaagtattcatggccaagacatgggcttaaccacaaataatttttcaattgggagcaacagattcaaagcattcagtggtgctgtaaatgtttgcatgcttcttttcaactaaaccagacattatgtgacctgaaacaaaattttagtaacttcaagtggtttcgaaagagttaagtttgtttttttatgaaaagctttctgtctcccctctgcctttgaagctcttctacagaatgtgaatgcatatgtgtgtaaatatcctcattgtttccaatgccagagaagatcttcacagtgattctatttatccaaggaactgaaatttatcaggtcttagatctttgtaaacaggactttacaactcaagatatamtgaaagattgacattggagccttccttcaggaccaaagctagctgtcaaattccaaggacatctataggataagcagcattgcccttcctgtgtaggtggccaccag

SEQ ID NO: 490954 - DNA, 184 bp, Homo sapiens
ccatgctggccaggctggtcttgaattcctgacctcaggtgatccacctgcctcaggctctcaaagtgctgagattacasgcgtgagccaccatgcccggccttgttgctaactcttaacgaatctgcctctgtttgggtacaactatcccttgaggattaaatataccaattaaggattaaaa

SEQ ID NO: 490955 - DNA, 681 bp, Homo sapiens
tttaaatatagaacataaagggatgaatttaggcartactaaaaatatgtttgtgggagattgtcagatgttcaaaataatcaaaatttttattcccaaaccaagtaactttaaaatctgttgttttccaagagcttagtacataatctttaataagtcatctaaacttgttccttatctacaaaatagagatttttatgccttcttgcctcattcccttcagatatatagtagctgtaaatgctcttaattcttatcaagaaaactgaatgtgttgggtttcgtctcatgtatgtaagcctatctatctgaagatgttaataggatctactgtaaaggactgttggtagataccatctgtgcttctgtctcttctcattatcacatttttctttcaactgggacaaaccgttcagcatacaaacatgctcttatttctcccatctttaaagcaaaagaaatcctctcttgacggttctagccatgccccagttttctgcttccctttcataaaacctcaaagaggaaactgctccagttcctctcttgccattctttatcatactagggcccaggcttttgcccacaccactcccctgaactgcttgtgtcaagatcaccaatgacttccacattgtcaaacaaatggttccttctcagtcatcttactctatcaagcag

SEQ ID NO: 490956 - DNA, 681 bp, Homo sapiens
tttaaatatagaacataaagggatgaatttaggcaatactaaaaatatgtttgtgggagattgtcagatgttcaaaataatcaaaatttttattcccaaaccaagtaactttaaaatctgttgttttccaagagcttagtacataatctttaataagtcatctaaacttgttccttatctacaaaatagagatttttatgccttcttgcctcattcccttcagatatatagtagctgtaaatgctcttaattcttatcaagaaaactgaatgtgttgggtttcgtctcatgtatgtaagcctatctatctgaagatgttaataggatctactgtaaaggactgttggtagataccatctgtgcttctgtctcttctcattatcacatttttctttcaactgggacaaaccgttcagcatacaaacatgctcttatttctcccatctttaaagcaaaagaaatcctctcttgacggttctagccatgccccagttttctgcttccctttcataaaacytcaaagaggaaactgctccagttcctctcttgccattctttatcatactagggcccaggcttttgcccacaccactcccctgaactgcttgtgtcaagatcaccaatgacttccacattgtcaaacaaatggttccttctcagtcatcttactctatcaagcag

SEQ ID NO: 490957 - DNA, 627 bp, Homo sapiens
tcacgctttacatccacacaacttcctactgggtccgcatgagctttagtcccaacagttatggtgatgattagtttggtaacacattcttgtactgacttttctcccttcttgtttcaccctttcctgtcccctactcctgtaccctaagaacatttctcaaattaagttattgcacactaattcttatctcaggctttgctttctgagaaaaatagactatggcagcttgggcaagtggcactaaaaagcagaccctcaacaagggactttggaatttaataattcactgataactggcaaaaacaatctcattgccaataacacttgagaggtgataactcctrgtattcagtaaaatcactttgaacaaaatggatacaattcacacaggggagaaaagaactgaggtgaaagacatggggaaagtgaaccattgctttaccaacagtataaagatcatggtaattacatagtttataaagtgaagacttttagcagttttagagagtttgtaaaaagaaaaaaagcaggctcagtttgaataaatatcaaatcaaaatatactatgtaagtcagatgttcttggcagtgtttaaagaaaatcgacttctgtagcagcagcag

SEQ ID NO: 490958 - DNA, 627 bp, Homo sapiens
tcacgctttacatccacacaacttcctactgggtccgcatgagctttagtcccaacagttatggtgatgattagtttggtaacacattcttgtactgacttttctcccttcttgtttcaccctttcctgtcccctactcctgtaccctaagaacatttctcaaattaagttattgcacactaattcttatctcaggctttgctttctgagaaaaatagactatggcagcttgggcaagtggcactaaaaagcagaccctcaacaagggactttggaatttaataattcactgataactggcaaaaacaatctcattgccaataacacttgagaggtgataactcctggtattcagtaaaatcactttgaacaaaatggatacaattcacacaggggagaaaagaactgaggtgaaagacatggggaaagtgaaccattgctttaycaacagtataaagatcatggtaattacatagtttataaagtgaagacttttagcagttttagagagtttgtaaaaagaaaaaaagcaggctcagtttgaataaatatcaaatcaaaatatactatgtaagtcagatgttcttggcagtgtttaaagaaaatcgacttctgtagcagcagcag

SEQ ID NO: 490959 - DNA, 615 bp, Homo sapiens
accctgctttactcacctgttgaaccatctgccagcctaaattttcgtggccctgagatggacaaagacaccattgcgttatttagtccacctatttacactgtaatgacatctgctttttaccattaatctttaagcctcttcctatttctcaaagattaaagtcacgtgaactgaacggtaccacagtttttaacttctctttaaaaaatattagatgcaagtgtttgtctttttcaggccaaaatcatttagagctctttctgcagacattacacataacacacacgcagacaggcaggagaaaacccagttcctggrtggggttttataagagccaggccaaggaaaacatgcagatatcaaacctgaaaaagagtcagtccctaaggcaggataagcccctactttgtgcaacaaaatgcacagtgcaggtgagtgtggctgtttcctgccaattaagtgaagcccaagctccctggttcatggataaaagccttgttagtatccatggcatagatgaggtctagggactcccagactactgaaagcaggggagatagggtgtatgtgggtaagtgggtaagagtgaatgttctcaccccctaggcccca

SEQ ID NO: 490960 - DNA, 639 bp, Homo sapiens
ttccaagtcctttcaggaaaatacctgcatattcaaataacaattctcgtgttagctaccttttgttttgttttgtttttttccatcaggaagacccactacattatttgagacaatggggaaagctgaaatgtggctcattcgaacctattgggattttgaatttcctcgcccattcttaccaaatgttgattttgttggaggacttcactgtaaaccagccaaacccctgcctaaggtaaatgtrttcttgtttcatttgtttgcttgacattttcagaaggaatggctggatatgtttctttcagagtgtttaactcagagtgaggggaatatgggaggtcaaaaacaaggacttgccattagaaaatcatatatttctgtagtatcacaagtatgtgaatgttattatcattaaagaccaaagaggtttactagggagattttgaaaacagggttggttaaagtaaggccttcattgtgccacccaaaagatagtatgattcatttcttcaaaaaatatttgtagagtgattaatacaaaccacaggtaagtgctggattttcagagaataaaggtagcacagtttctgctccctcatgccttacattgtactttgaaagatagaataaaaacaa

SEQ ID NO: 490961 - DNA, 688 bp, Homo sapiens
taaaaatgattacagaacaattatgaaaattgaggaaattttgcaatataaataataaattgttgatatttgatttatgatttaatacaaaataatagtaacagaatagaaaagttggacaaatgatacattagatagtcaaaaatgtgaaaaaaaagatcattatatactagatgataatttagtactatcattcaaagtatgaaatctgtttatatacttaatgagaaatggcatcaccaagaatgtatcattaagaaacacacaatacgttaaaataatgcattgttttaaaaaataatttgtaacatagcaaaacaaaagtgtaagcaattaaaatgttcattaagaggcagagaaagatggtggagtaggaagctccaccaactgtcccctgcacaaggacaccaagttaaccactatctacacamaaaaaaaaacaccttcataataaccaaaaatcaggtgaatgctcacagtacccggttttcactttatgtagctgaaagaggcactgaagagacagaaaaaacaggccttaagtgctgatgtcacacatcctccgccccttggcagtggctgcaaggtgcagagagcatctctcggcactgtaggagggagagtacagcaacggtgaggcattgaactttgtgctgccctgttaagagtagaaaggaaaaccagacca

SEQ ID NO: 490962 - DNA, 688 bp, Homo sapiens
taaaaatgattacagaacaattatgaaaattgaggaaattttgcaatataaataataaattgttgatatttgatttatgatttaatacaaaataatagtaacagaatagaaaagttggacaaatgatacattagatagtcaaaaatgtgaaaaaaaagatcattatatactagatgataatttagtactatcattcaaagtatgaaatctgtttatatacttaatgagaaatggcatcaccaagaatgtatcattaagaaacacacaatacgttaaaataatgcattgttttaaaaaataatttgtaacatagcaaaacaaaagtgtaagcaattaaaatgttcattaagaggcagagaaagatggtggagtaggaagctccaccaactgtcccctgcacaaggacaccaagttaaccactatctacacaaaaaaaaaaacaccttcataataaccaaaaatcaggtgaatgctcacagtacccggttttcactttatgtagctgaaagaggcactgaagagacagaaaaaacaggcctkaagtgctgatgtcacacatcctccgccccttggcagtggctgcaaggtgcagagagcatctctcggcactgtaggagggagagtacagcaacggtgaggcattgaactttgtgctgccctgttaagagtagaaaggaaaaccagacca

SEQ ID NO: 490963 - DNA, 528 bp, Homo sapiens
aaccccagtcagcatgttaaagaagtcctctctgctttaacccatagaacgaaagtaacgtgaagtaacttggtattcacaaatctgcttcctgtactaagctgtttccttgttcttgcaaaagcctctttaccaaaattgactattctaccaggcccagcagagcccctgtctattttgtaatgaattgctaatataagccaattcaatctttaaaagtaatttgttaatttctttttctttcacaatgtagatgacgaatgcaaagattcaggcwgccagaaatgttgaaatgaatttatcttatgaaatgtacccaaccacccactaaacctaactgtattcctagcggggactcagataatcaagatccctggaaaatcaaactgccttcctcacaggctagaaatgcaagtttatactttgccattgtaaagagcttttggtgtgccaacaggcatgttaccagattcataaggctggacattctttatatagtttcatagtaggtagcaaggtgtcagtgtg

SEQ ID NO: 490964 - DNA, 506 bp, Homo sapiens
tgccataaagtcataggaagaaaaagcatatgttgtatcaatgacttgaattttgtttggatgcagccactaaccagcagagtgatattaagatgtttatttaacctttctgtttcacaaattmtccgatgaaaaatggtaacttttactagagatgagatatctggaagattgcttctatttgtgaagttctaaatacattgcttacataaaaattttaacaaaggctgattgctctgattaagattgtgttttgccaatgtgtactggtacaaaaacacacacatagaccaatggaaaagaacaaaaaactcagaaataaagctgcacacttgcaaccatctgatttttgaaaaggctgacaaaaacaagcaatggggaaaggactccctactcaataaatggtgctgggataagtggctagccaggtgcagaagaatgaaaaagaccctggcctttcaccatatataaacatgtcatccattctcaagatggattgaagatgt

SEQ ID NO: 490965 - DNA, 506 bp, Homo sapiens
tgccataaagtcataggaagaaaaagcatatgttgtatcaatgacttgaattttgtttggatgcagccactaaccagcagagtgatattaagatgtttatttaacctttctgtttcacaaattctccgatgaaaaatggtaacttttactagagatgagatatctggaagattgcttctatttgtgaagttctaaatacattgcttacataaaaattttaacaaaggctgattgctctgattaagattgtgttttgccmatgtgtactggtacaaaaacacacacatagaccaatggaaaagaacaaaaaactcagaaataaagctgcacacttgcaaccatctgatttttgaaaaggctgacaaaaacaagcaatggggaaaggactccctactcaataaatggtgctgggataagtggctagccaggtgcagaagaatgaaaaagaccctggcctttcaccatatataaacatgtcatccattctcaagatggattgaagatgt

SEQ ID NO: 490966 - DNA, 506 bp, Homo sapiens
tgccataaagtcataggaagaaaaagcatatgttgtatcaatgacttgaattttgtttggatgcagccactaaccagcagagtgatattaagatgtttatttaacctttctgtttcacaaattctccgatgaaaaatggtaacttttactagagatgagatatctggaagattgcttctatttgtgaagttctaaatacattgcttacataaaaattttaacaaaggctgattgctctgattaagattgtgttttgccaatgtgtactggtacaaaaacacacacatagaccaatggaaaagaacaaaaaactcagaaataaagctgcacacttgcaaccatctgatttttgaaaaggctgacaaaaacaagcaatggggaaaggactccctactcaataaatggtgctgggrtaagtggctagccaggtgcagaagaatgaaaaagaccctggcctttcaccatatataaacatgtcatccattctcaagatggattgaagatgt

SEQ ID NO: 490967 - DNA, 506 bp, Homo sapiens
tgccataaagtcataggaagaaaaagcatatgttgtatcaatgacttgaattttgtttggatgcagccactaaccagcagagtgatattaagatgtttatttaacctttctgtttcacaaattctccgatgaaaaatggtaacttttactagagatgagatatctggaagattgcttctatttgtgaagttctaaatacattgcttacataaaaattttaacaaaggctgattgctctgattaagattgtgttttgccaatgtgtactggtacaaaaacacacacatagaccaatggaaaagaacaaaaaactcagaaataaagctgcacacttgcaaccatctgatttttgaaaaggctgacaaaaacaagcaatggggaaaggactccctactcaataaatggtgctgggataagtggctagccaggtgcagaagaatgaaaaagaccctggcctttcaycatatataaacatgtcatccattctcaagatggattgaagatgt

SEQ ID NO: 490968 - DNA, 641 bp, Homo sapiens
tagatctgttggaactggttttaagtaaaatgtggttgaaaaaaatctgtgtttgtatgtatgtatatttttagatacaaagcagatgaggaagtttcaggcacarcacacagcattgtaccagagcgggctagtaaacggtagccttaactaaagaaaagcttcagaacaaactaaagaaaatataagtctgttgttgttgttgatgttttttgaggcggaatctcactctgtcgccaggctggagtgcaatggcttcatcttggctcagtgctacctctgcctttcaggttcaagcgattctcctgcctcagcctcccgagtagctgggattacaggcacccaccaccacacccagctaatttttgtatttttaatagagacagggtttcaccatgttggccaggatggtcttgatctcttgatcctcccgcctaggcctcccaaagtgctggaattacaagtatgagccactccacccagccagaaaatgtaagtatttttttaaaaaagaaaaataatttcatcagataagtcatttttattattttaaaggtcattccagatcagtggtgggagaaatacaaggatgcgctcatagatcatgacatggttttgggaccaagtgtgacaggaaattg

SEQ ID NO: 490969 - DNA, 641 bp, Homo sapiens
tagatctgttggaactggttttaagtaaaatgtggttgaaaaaaatctgtgtttgtatgtatgtatatttttagatacaaagcagatgaggaagtttcaggcacaacacacagcattgtaccagagcgggctagtaaacggtagccttaactaaagaaaagcttcagaacaaactaaagaaaatataagtctgttgttgttgttgatgttttttgaggcggaatctcactctgtcgccaggctggagtgcaatggcttcatcttggctcagtgctacctctgcctttcaggttcaagcgattctcctgcctcagcctcccgagtagctgggattacaggcacccaccaccacacccagctaatttttgtatttttaatagagacagggtttcaccatgttggccaggatggtcttgatctcttgatcctcccgcctaggcctcccaaagtgctggaattacaagtatgagccactccacccagccagaaaatgtaagtatttttttaaaaaagaaaaataatttcatcagataagtcatttttattattttaaaggtcattccagatcagtggtgggagaaatacaaggatgsgctcatagatcatgacatggttttgggaccaagtgtgacaggaaattg

SEQ ID NO: 490970 - DNA, 625 bp, Homo sapiens
ggctcaagtgataccctcttctcagcctcccaagtacctaggactgcaggtgtgcacctggatattttatttttatttttctctctttttaaaaaaaatttcagtttgttctctctctgcgcaaaatcattttatttatttatttwtttattttattttgtagagaagggggtcttgctatgttatcaggctggtctctaactcctggcctcacagcattggaattacaggcatgagccactgcacctggccctcatggtgatttcttgataactgaattcagtgtatccctggaaatgccaattccaccaaagattgaaaatgtatttgtgttattttaatggaatttagccagttgtgtttgataattttccaagtatttagttaaatttaagagtcaattttagtaagctgatgattctttctttctgccttctcctcctccacgtagtttctatgatctcacttttatgaggaggagtttggtgttcagttccatatcctggtctggtcctgggtacctctccttggtctgtctagtggtgcttcctgggccccactgaggtgtgttttcccaccggttccctcactgactcactgctgatgggtccatgagtggagcagc

SEQ ID NO: 490971 - DNA, 625 bp, Homo sapiens
ggctcaagtgataccctcttctcagcctcccaagtacctaggactgcaggtgtgcacctggatattttatttttatttttctctctttttaaaaaaaatttcagtttgttctctctctgcgcaaaatcattttatttatttatttttttattttattttgtagagaagggggtcttgctatgttatcaggctggtctctaactcctggcctcacagcattggaattacaggcatgagccactgcacctggccctcatggtgatttcttgataactgaattcagtgtatccctggaaatgccaattccaccaaagattgaaaatgtatttgtgttattttaatggaatttagccagttgtgtttgataattttccaagtatttagttaaatttaagagtcaattttagtaagctgatgattctttctttctgccttctcctcctccacgtagtttctatgatctcacttttatgaggaggagtttggtgttcagttccatatcctggtctggtcctgggtacctstccttggtctgtctagtggtgcttcctgggccccactgaggtgtgttttcccaccggttccctcactgactcactgctgatgggtccatgagtggagcagc

SEQ ID NO: 490972 - DNA, 454 bp, Homo sapiens
ggtggataaatatttgaaagaaaatggcatcattttcataacttgtgaatggtatcattatatgccatagaaaacaattattcagcttaaaaaccactaaatatatgtaagaaaattcagaaaagtagaaagcaatgtacaaaaatgaatagtttttcaaacaatagtgatgactagtaaggaagcataatggagttggctcttcacatccgtggatttcaccaccctggtttcaaaccaactggagataaaaatgttctggtaaagaaaaaatgaatggttatatctgcattgaacatgcacagttttatcctgtctttccccaaaaaataatgtatagcaatgatctacattggattaggtatgtaagtaatttagaaataatttaaagtatacacraggatgtaggtcgctttgatgcaactagtttgccattttatataaggaacttgag

SEQ ID NO: 490973 - DNA, 597 bp, Homo sapiens
tggctttggctaagtaaatctaacagagacctctgtggcttgagaaggggctttgtgaggttgattctctgtgagatggattctattcaatacagaattgttgagggcgatgcttaagacagaaaaataatatggactgtaataaaatagggagtaaccatgcacatttgcaaccaaactccccccctacaaaaaaaataaccagcagttaccagcaaaaacgtgattcagcgatgtgattaaatgcagagatttatttacaaaaaaagggtaaaaaagaaaacacaaaacataactagtattggctggtgagacttggcagggcaacccgcatcattgttccagcattgsaacattgttccaccctcttaatccaaaagcattctagtgtgttggctcccagctcacgccctgaccgtggactgatccggcctgccctgaggttaccttccctgctcatcaggtgtgaggacctgggcaagtcactgcacctctctaggcttcattgttctctcctggaaaatgggacctggcaccaggacttaagcacaggtttgcggtaagcatgtggtgacctagtgaaaggcgcgcttacca

SEQ ID NO: 490974 - DNA, 618 bp, Homo sapiens
gattgtgagttatttgcacgggaggtctgtgtcctggaccagaggaaaggcagacttaacagcttatctgctttctctttttgctttcccctgctcctgtcagcctgaccccttttctcttattaggactctacactatattctgaaaaaaaaattactaatttattatgtgcattgaacttgatggtggtatattttgccatgtagatgttttggggtttttgtgtcatcaaatatattagagagttttttttttaaacgatttttgctcttggtrtccttcctaaagagaataatcacaatttaaaattacgtaagtagatatttatgttttcttgttcttctttcttttcttttttctgagacagagtctcactcacttgcccaggctggaatgcagtggcgtgaccttggctcactgcaacctctgcctctgggttcaagctattctcctgcctcagcctcccgagtagctgggactacaggcaaatgccaccacacctggctaatttttgtagttttagtaaagacggggtttcatcatgttggccaggctggtctcaaactcctggcctcaagtgatctgcccatctctgcctcccaaagtgctgggattac

SEQ ID NO: 490975 - DNA, 592 bp, Homo sapiens
tcttcttgggtaatatgcttattcacagcttaggtccattttttacttgggttttcaaaaacttatttatttgcrtatattctttgtatattttgaatacaagccctctatcagacatgttccaatttttgtcattgttccaagattctcgatgttccatttcatattttccatttttttctttttgcttttcaatcttgagatttctattgatatattttcaaacctactgatgctttccttggccttgtcctccactgagggacctattaaaggcattctttatttctgttacagtgtttttgatcttatagaatttccttttgtttcttaatgtttacatcttttgacttacattatccatatgttcttgcttggtttccacttttttcttagagcccttaacatattaatcataaatttttaaattcccattctaaaaattctaaaaactctgccatatctgagtctggttgtgatgcttactttgttttttcagactgtgtttttggtctttcagcatgagcatatttagatctgtattgtgagattttatgtttgtttggccaggagttagccagcatttaatatg

SEQ ID NO: 490976 - DNA, 596 bp, Homo sapiens
attaacattaatatcaacaatagtttttatcaaataactattttcagaaacaaaagaaatacttagaactgtggtgttactttacattttggcaagtctctataatgcatgacttaagagaagcagctagattttgatatatgcatctatattcaaactattgtgacagatcaattgtatttaactacattaaagtaaatgcaacctcacacagatatgtttgtagtatagggaagaatattttaayaaacttgatgaatagtagtttctaaaaggttatttttattatggattctgacagtgtgaagaagaggataaattacaaaaggaaacagaaggaaatatcacaagatacttggggtgtcacttcaccagtcggaaacttctgtggccagtggcactttaccagagttttgcttgggccctgggcatattttacctacttggcctggcaggctgcacttggctggtactaccagcccagatcccatgcctgccaagggtaagccaggcacagaatggctccaggcacagagcagcagggcagacagatccaggtggtggcacaggtgccaggtccatgcaaggctgcagct

SEQ ID NO: 490977 - DNA, 622 bp, Homo sapiens
attattatgttctattaaaaatgatttagtccttgatgaacatctgtttggtaatatgttgtatstagatatagtaaattagtgacatatataaaattatagggaaatgacaccttcagtttcattatgaggagagtttttaaaatgctattagtctcaacctgtcaccttatcattatatagcattatgtagcacttaaaagatgtataccctttattttgaagttctttagaaatttaaaatattactctttatggtttctggttctgcatttctttattgctaataagaacacatccatatgctttgattcaagcaggtactaaaatttggttatttggaataatgatgtttactctcatcttctcacccttagcaggtgtcctaattttagtacacttcagtgatatgatttcacacttattaaaaacatttattaaaattactggtgatatttcaaattgctgaacaaaattcttattttcttaaattttctacaaaatatgagctttaaagtttcttttttttgagggcgttattttagggtcttcagagagaatctagcagtgtggaaatctatactttttgaataattattatttggtaattcatgtgattgtt

SEQ ID NO: 490978 - DNA, 622 bp, Homo sapiens
attattatgttctattaaaaatgatttagtccttgatgaacatctgtttggtaatatgttgtatctagatatagtaaattagtgacatatataaaattatagggaaatgacaccttcagtttcattatgaggagagtttttaaaatgctattagtctcaacctgtcaccttatcattatatagcattatgtagcacttaaaagatgtataccctttattttgaagttctttagaaatttaaaatattactcwttatggtttctggttctgcatttctttattgctaataagaacacatccatatgctttgattcaagcaggtactaaaatttggttatttggaataatgatgtttactctcatcttctcacccttagcaggtgtcctaattttagtacacttcagtgatatgatttcacacttattaaaaacatttattaaaattactggtgatatttcaaattgctgaacaaaattcttattttcttaaattttctacaaaatatgagctttaaagtttcttttttttgagggcgttattttagggtcttcagagagaatctagcagtgtggaaatctatactttttgaataattattatttggtaattcatgtgattgtt

SEQ ID NO: 490979 - DNA, 636 bp, Homo sapiens
gtgttcatgtgtgtgacttcataagactatcagaaactttcaaagatagtagcagaaaaaagtaaaatctgaataaattaataataaagttaaaaatgctgtcaaaaactactttcactaacgattttactgatgatttagttttaaagaagagttaccttctgtggtcctgtttcttagactttaatatacatttatactattggataatttggaaaatgcagattctttatcactacatcttgaatatggttgaagaatctgtgttttaataaatgcccagataatttcagtgttacttgtgcttgaattttctttcagtagcaaaatcgtatgatacttaaagtgctttatatttagaaaatgataatatttgtaagaactttaaaaactatcatcacaaggtggaactaaaatcttagaaaattaacttaatcagtaatttaccaaaagaacatacatgtagacacagacacacacacacagacaygtacacatgagaatttttaaaatcaaatttccaaaactgttgtaaacatagcagcaaaaaagtaaagcctgcttgaagaaaaccagtaaagcttatagtaaactgtcaaaaattaaaagtatgaaaagattctttttttatttgtg

SEQ ID NO: 490980 - DNA, 532 bp, Homo sapiens
agctgtaagacttctgggcagcaccgcacggtaggctttctataagcttagtgatgtaatcctttaactatttttatctttaatacaattgttatctctactggctttrttggcaagttttaattcacaaggagcattaagaagcgtgatttctgttggctcagtaaagtgattttcacttccttgtctcgttgggccacctgccatctcttaacttttggcaaaggaaaatagactaacacattgtctttttatttatatatttatttattttttttggtggaagaatatccccatcttgtggatatttgcattgtgttttagcttccgtggttataaatacagattcacccagtgtgggcacttgatcacagagattattcttagagtcttctttggtgtccaatttcaccagcatttcggattctggacacagaagcaccaggctgtccctcctttatgctttttttttttttttggagaaagggtctttctctgtcacctaggctggagtgcagtggcatgatcatgg

SEQ ID NO: 490981 - DNA, 532 bp, Homo sapiens
agctgtaagacttctgggcagcaccgcacggtaggctttctataagcttagtgatgtaatcctttaactatttttatctttaatacaattgttatctctactggctttattggcaagttttaattcacaaggagcattaagaagcgtgatttctgttggctcagtaaagtgattttcacttccttgtctcgttgggccacctgccatctcttaacttttggcaaaggaaaataractaacacattgtctttttatttatatatttatttattttttttggtggaagaatatccccatcttgtggatatttgcattgtgttttagcttccgtggttataaatacagattcacccagtgtgggcacttgatcacagagattattcttagagtcttctttggtgtccaatttcaccagcatttcggattctggacacagaagcaccaggctgtccctcctttatgctttttttttttttttggagaaagggtctttctctgtcacctaggctggagtgcagtggcatgatcatgg

SEQ ID NO: 490982 - DNA, 533 bp, Homo sapiens
gagctgagcaagccctattacttgataaagttacaacagccacacaagaatggaacaacttgtctatagtttgatcaaaatacacctgattaaaatacatttgatgagtttgctgatattwattgaaatgaaacctagttgatgttacgtgttttatatacatttaacccgcattttagacctactagacttttacatttaaaaagagtttctgttttctctggaagaatattattaatttctgcagcagaagagagttggaaaattagggtaattccactgtttcatttgctctgtctttcagacatggtgaaatgtttcatatttgagtaattggacggagtgggaaagactttgaagatattctttgtgtttattatcattggcttgaaagttggccctttttcctggacatttcatggcacatcagtaactcacttggtgggatcacaggtgttgcctttggtggactgatattctcataatggggatctgatgtatggtatgccgaatctgtcttcgcgcttgtgaca

SEQ ID NO: 490983 - DNA, 447 bp, Homo sapiens
gatggggtcatggaccataaatccttgtctccgtttacgtgtgtgtgtgtgtgtgtgtgtgtgtgtgtgtgtgtgtgtgtgtgtgtgwgtgttatgctgccatgtggcatcttcctaatggtttgcttattctttgccattccctatgtgcatattgcccttgagcactctccagggggaagagattttctgcatcaaatcatagctgacactttaatttacttgaatgcccatcctgcttgttgagtagcattcacccatccttctcaacaacttgaaggcaggcagggtgcaattgatcacttgaattttgtggagaagaactggccctggcagcctgaaggtgacccctgcactttcctcctgaatccctgtttcctcttctgctttttcttactcctgattataaaactaaggaccctcaacacaggggaacgggttagattg

SEQ ID NO: 490984 - DNA, 568 bp, Homo sapiens
gctgtgtttctcctctattcatagaacctggcacatggtaaaagctaaacagtaaatgaaagaaccatccatgcgtgtatggaaggcctgcaatgtgccaggcacccgctttggattcgtatctgccatcatctctcttccctctaccccataaccctgccagcccagcctcactctcctctctttcattcttttgtattgcctattcccgtgtccagtcttctcattaaagctgagcctaccggcaatgtctctgtctggcctgcacttaccctgagacgggggcaaaaagactggmagaaccaatgcagggcatggggggaggttcagtttgggcgcagaaaaaaaaaactacaaaaatgataggaggcaaaaatgttacacatcaggggtttaatgccccacttggaagacaaagtccctaacccacaaaacattcctttaagtgttaattccttggaaagagcacaaatgtggtccatctctccatctcttttgtccaaaacaggtaaggctatcaagagtcatccaatattaactaaaatgacacatcccacacgataatttc

SEQ ID NO: 490985 - DNA, 597 bp, Homo sapiens
ctccaaaagtgctgggattacaggtgtgagctactgcgcccggccttcttctagaattttcacatatacatacctatacagcagtattaagaaccaaaaaatggtcaaagggtataaaatgttagttacgtgggatgagtaagttacagagatctaacaaagagcatggtgactatagtaaataatactgtatactgtatactggtaatttgctaagagagtagaccttcaacattctcaccacaaaccaaaaatggtaactatgtgggataagagatatgttaattagcttgattgtggtaatcgttttacaatgtgtacatatttgaaaatatcatgtatactgtaaatacatacaatttttatttgtcaattataccttagtcaakctgggataaaaagagccaaaaattgaaaaaaatccaaacatccatcaagagcagaataaataatgaattgtggtacactcacatgatgtggtaagcattggtggtataatataaatgagcaagctatagtcacacaactgcatagatgaatctcagacataacactgagtgaaaaaaaacacaccgtattatttacatacagttcaaa

SEQ ID NO: 490986 - DNA, 477 bp, Homo sapiens
caaacactcaactattgagaaacggaaactctttgccatctagtattatgcaagtgaaatttaatacctagagtgttagttttaaaataactgacttaattttttaaatgttttacattattcatcttttatgcaattttatattctaatatatatcatggtttataagcagataagatgatgtattgtcatatacttatgaartgtacaggtacatattttgctattttacttaattttaatcctagttattttacatagagtatgtaaggttgtaccctctgttgtaatagagtatgtatttgcaatgtttaagaaacatccccctttttagatttttacacaggttgttatattttattttcccctccattttcctcttatatttattatatagaaagtggaccaccatgcataattctacaattgcctaggaacagtggttaccatggcatttgcagtttgctgtacagaata

SEQ ID NO: 490987 - DNA, 588 bp, Homo sapiens
ggctcccatttgtaacatttgtttaataagggcctccattaccctcactggacacttactctttgccaggaacagtaaatttcctaatgtcacccagatagtaagaatcaaatccagggatgtaaactcaaatctgtctggctccagagcctgagctcttaaccactgtggtacttagttaaccgcacacacactcagcctcccagaagaaaaggcacaggaggggcaaggaaccctgccaggatgaaatatgctgagacttgttaggttttatgcctggaaagccaaatcagtggctacctggctcaaagctgtacattttgaaatacatggaaactgacaagcagttaaggctttaggaagctctgtaagacagaaagggagcgatgcagcttctagttacagttagaattgaataggcaatgtaaaatcctaaataccaagatttagtaaattgtatcayataaaatagataaaagttgactttttttgtccttttccttttttttaaagaaacacccatatttgaatggtatttgaattttaaattaccaaggtactttgaacaaaactgatactttaatgtga

SEQ ID NO: 490988 - DNA, 637 bp, Homo sapiens
cttcccaaaagtctttgctgtctgtacagtaaaggccagattctgtagaaggcattgagaatgcggggtgtctggtcctaactttcctttgtggccttatctctcacactgtcctttcacccacattcttttcagacttagagggcccactgtagcttctgaagactggkgagtttcacacctccttgcctttgcctgctgtttcttcagtgtggaattctactggttcaattcacttcccagaggaatccacacatttttcaagacccacttccaaattccaccttctgcttgaagctttcacagatcctcaaaccaaatgcatttcttctctttttctttcatgatactttaactctatcagagtatatattaccttctgtcttctatgtttttgcgtacaagcttgcttttacacaaaattataaacttcttagtgcaagatttctctttttatctacattagcacttgctcacattgttttgtccctactgggttttcaaaaatagttttttccataattaggatttcgatggtctaagaaattttactttttgcgaagaagggtacagtggaggaatttgagtctttcaaatagttgtgtgttttttctaaccccttccctttctcttgtgc

SEQ ID NO: 490989 - DNA, 637 bp, Homo sapiens
cttcccaaaagtctttgctgtctgtacagtaaaggccagattctgtagaaggcattgagaatgcggggtgtctggtcctaactttcctttgtggccttatctctcacactgtcctttcacccacattcttttcagacttagagggcccactgtagcttctgaagactggggagtttcacacctccttgcctttgcctgctgtttcttcagtgtggaattctactggttcaattcacttcccagaggaatccacacatttttcaagacccacttccaaattccaccttctgcttgaagctttcacagatcctcaaaccaaatgcatttcttctctttttctttcatgatactttaactctatcagagtatatattaccttctgtcttctatgtttttgcrtacaagcttgcttttacacaaaattataaacttcttagtgcaagatttctctttttatctacattagcacttgctcacattgttttgtccctactgggttttcaaaaatagttttttccataattaggatttcgatggtctaagaaattttactttttgcgaagaagggtacagtggaggaatttgagtctttcaaatagttgtgtgttttttctaaccccttccctttctcttgtgc

SEQ ID NO: 490990 - DNA, 637 bp, Homo sapiens
cttcccaaaagtctttgctgtctgtacagtaaaggccagattctgtagaaggcattgagaatgcggggtgtctggtcctaactttcctttgtggccttatctctcacactgtcctttcacccacattcttttcagacttagagggcccactgtagcttctgaagactggggagtttcacacctccttgcctttgcctgctgtttcttcagtgtggaattctactggttcaattcacttcccagaggaatccacacatttttcaagacccacttccaaattccaccttctgcttgaagctttcacagatcctcaaaccaaatgcatttcttctctttttctttcatgatactttaactctatcagagtatatattaccttctgtcttctatgtttttgcgtacaagcttgcttttacacaaaattataaacttcttagtgcaagatttctctttttatctacattagcacttgctcacattgttttgtccctactgggttttcaaaaatagttttttccataattaggatttygatggtctaagaaattttactttttgcgaagaagggtacagtggaggaatttgagtctttcaaatagttgtgtgttttttctaaccccttccctttctcttgtgc

SEQ ID NO: 490991 - DNA, 489 bp, Homo sapiens
tattatttaatcaacttggcccagatatttaattctgaagaaaaatcaatattatacaaaaacaaatgtattttcraatatgcacatgcttattttcaaatatgtcaatcaaaaaaataaaagtttatcaataatcttatttaacctagatgaagtagatttatagcctgagaagatttcacatggcttattaagagcttacttttttttcttttttctttttttttcttttccagacaggggttcactctgttgtccaggctggagcgcagagttgggatcatggctcactgcagccttgacctcctgggctcaggtgatccttccacctcagcctcctgagtagctgggaccacaggcaccaccaaactcatttaatttttctagtttttgtagagatgggacctcgtcatgttgcccaggctggtcttgaacccctggtctcaagcaatccactcaccttggcctcccaaagtgctggcaagctca

SEQ ID NO: 490992 - DNA, 489 bp, Homo sapiens
tattatttaatcaacttggcccagatatttaattctgaagaaaaatcaatattatacaaaaacaaatgtattttcgaatatgcacatgcttattttcaaatatstcaatcaaaaaaataaaagtttatcaataatcttatttaacctagatgaagtagatttatagcctgagaagatttcacatggcttattaagagcttacttttttttcttttttctttttttttcttttccagacaggggttcactctgttgtccaggctggagcgcagagttgggatcatggctcactgcagccttgacctcctgggctcaggtgatccttccacctcagcctcctgagtagctgggaccacaggcaccaccaaactcatttaatttttctagtttttgtagagatgggacctcgtcatgttgcccaggctggtcttgaacccctggtctcaagcaatccactcaccttggcctcccaaagtgctggcaagctca

SEQ ID NO: 490993 - DNA, 637 bp, Homo sapiens
aagtgataatcaaagggtcctgggcttatatcaaaatattggccaattaatttacatttgtggtttttttttaaccctgtgatcctcctccttaactcattttttagattaactatcaaaaaactggtctcaattatatttgaatagaaggtttctactgtattgttctctaacttgaccatgttcggtacccttaattaaaatatataattctttagtagttttcatagatgttttctttctaactggttatatgaaagctacccaaataatgggcaggttgaatagtcgtggggtaggctcaatgttgatctgtggaatgctaccataggtmtccacaaacctaagacacaaaaacgcacccttagaattattatctgcttatcagtagaactgtgactgaacctgaggcttgcccgactccgtacttcttggtgttattcacagcaccacagcctaatcttgcttgtttctttatttgaagaaatcttgaaaaagaattgcattctttgatttttctagttaattaaaaatttcacctgaatcagcaatatcttactgtgatggcaattgcatcttctaaaaaagcacagtggagatatatttggaataaatatatccagatatttaagtagta

SEQ ID NO: 490994 - DNA, 637 bp, Homo sapiens
aagtgataatcaaagggtcctgggcttatatcaaaatattggccaattaatttacatttgtggtttttttttaaccctgtgatcctcctccttaactcattttttagattaactatcaaaaaactggtctcaattatatttgaatagaaggtttctactgtattgttctctaacttgaccatgttcggtacccttaattaaaatatataattctttagtagttttcatagatgttttctttctaactggttatatgaaagctacccaaataatgggcaggttgaatagtcgtggggtaggctcaatgttgatctgtggaatgctaccataggtatccacaaacctaagacacaaaaacgcacccttagaattattatctgcttawcagtagaactgtgactgaacctgaggcttgcccgactccgtacttcttggtgttattcacagcaccacagcctaatcttgcttgtttctttatttgaagaaatcttgaaaaagaattgcattctttgatttttctagttaattaaaaatttcacctgaatcagcaatatcttactgtgatggcaattgcatcttctaaaaaagcacagtggagatatatttggaataaatatatccagatatttaagtagta

SEQ ID NO: 490995 - DNA, 637 bp, Homo sapiens
aagtgataatcaaagggtcctgggcttatatcaaaatattggccaattaatttacatttgtggtttttttttaaccctgtgatcctcctccttaactcattttttagattaactatcaaaaaactggtctcaattatatttgaatagaaggtttctactgtattgttctctaacttgaccatgttcggtacccttaattaaaatatataattctttagtagttttcatagatgttttctttctaactggttatatgaaagctacccaaataatgggcaggttgaatagtcgtggggtaggctcaatgttgatctgtggaatgctaccataggtatccacaaacctaagacacaaaaacgcacccttagaattattatctgcttatcagtagaactgtgactgaacctgaggcttgcccgactccrtacttcttggtgttattcacagcaccacagcctaatcttgcttgtttctttatttgaagaaatcttgaaaaagaattgcattctttgatttttctagttaattaaaaatttcacctgaatcagcaatatcttactgtgatggcaattgcatcttctaaaaaagcacagtggagatatatttggaataaatatatccagatatttaagtagta

SEQ ID NO: 490996 - DNA, 637 bp, Homo sapiens
aagtgataatcaaagggtcctgggcttatatcaaaatattggccaattaatttacatttgtggtttttttttaaccctgtgatcctcctccttaactcattttttagattaactatcaaaaaactggtctcaattatatttgaatagaaggtttctactgtattgttctctaacttgaccatgttcggtacccttaattaaaatatataattctttagtagttttcatagatgttttctttctaactggttatatgaaagctacccaaataatgggcaggttgaatagtcgtggggtaggctcaatgttgatctgtggaatgctaccataggtatccacaaacctaagacacaaaaacgcacccttagaattattatctgcttatcagtagaactgtgactgaacctgaggcttgcccgactccgtacttcttggtgttattcacagcaccacagcctaatcttgcttgtttctttatttgaagaaatcttgaaaaagaattgcattctttgatttttctagttaattaaaaatttcacctgaatcagcmatatcttactgtgatggcaattgcatcttctaaaaaagcacagtggagatatatttggaataaatatatccagatatttaagtagta

SEQ ID NO: 490997 - DNA, 671 bp, Homo sapiens
caccagttaggaatccaataactttagttccctcattttatttttatttatttattttattattattttaagacagagtttcgctctgttccccaggctggagtgcagtggcatgatcttggcccactgtaacctccaccttctgggttcaaggaagcatgtccgcctaatttttgtatttttagtagagacggggtttcaccatgttggccaggctggtttcgaactcctgacctcaagtgatccgcccgcctcagtctcccaaagtgctgggattacaggcrtgagccagcacgtccggcctagttctctgattttaaaagcacctgcctcacagggatgctgaggatattcgagaaaatacttgtaagcacccaattagtcgaaagccacactgtgtttccaggtataagtacttgaacgtatatatctaggagtttactgtagacgtatttcaggggaatagaggtcagagaagttgctccagaaattaaaggagctgatgctaaagatttcagccggaatccctgagccaaatggcttctccacattaccaggaagctgccgcagtgcttgagactctgggatctcaccaattgtctcggtctgcagtggcaaagcaggtgggaagctgctgtggatctcctgtctgcccagatgtcttggctgca

SEQ ID NO: 490998 - DNA, 304 bp, Homo sapiens
ggtaaatgctaattcactgaactttatttgataatgcttattctggtattcactagagctattcagtgatacrcctatctcctccttctggtcaactggaactgagaaaagagcatcaaattcttgagcagtatggcaaacaagagggagaagtccaaatagaaaaatccagaacataaaaatcagtaaatgccacctattaatgttgtagaacatgaaatgtttctttatttttctttattatttgtttaagaagcatcaaacatggtaaaattgtgtatttaatttttatttataaatctac

SEQ ID NO: 490999 - DNA, 543 bp, Homo sapiens
tgctaacttagaagaaagtacatgtagggatttaagtcgagactgtattttgattggcttatggaactattaaatggtagaaataaaatccaaacttagaattttcatgtgtttttacattttgaagcarcaactgtaaatatcacttcttccatggtaaatcagctactttttgtttttgctgaaggagcaagaatacctttagcagtattttggaaaattataattgagtttggtcatgcaagcacttagaaaaaagttttgccaaataattgtatgactactaaaagggtttgtgatatggcacgggctatgatcagcaatataccctcatcgcgttcatttcttaaatgaatttgaataaagtaatttaaccttaaataatttattatttgaggtaattatataataatttccactttccagaattgtaaaccaaggcttagctaaagatatagaataactttcccaaggtcacgacataaatggagcagagatttgaactaccatctactcttctgttattacctttaaccagcttgc

SEQ ID NO: 491000 - DNA, 626 bp, Homo sapiens
tgctaacttagaagaaagtacatgtagggatttaagtcgagactgtattttgattggcttatggaactattaaatggtagaaataaaatccaaacttagaattttcatgtgtttttacattttgaagcaacaactgtaaatatcacttcttccatggtaaatcasctactttttgtttttgctgaaggagcaagaatacctttagcagtattttggaaaattataattgagtttggtcatgcaagcacttagaaaaaagttttgccaaataattgtatgactactaaaagggtttgtgatatggcacgggctatgatcagcaatataccctcatcgcgttcatttcttaaatgaatttgaataaagtaatttaaccttaaataatttattatttgaggtaattatataataatttccactttccagaattgtaaaccaaggcttagctaaagatatagaataactttcccaaggtcacgacataaatggagcagagatttgaactaccatctactcttctgttattacctttaaccagcttgcttttcggccagataaatgagtgcgtggtaagttcctgcccaatgttccgtcaagttaagtgcgggattgagccttcagcacta

SEQ ID NO: 491001 - DNA, 543 bp, Homo sapiens
tgctaacttagaagaaagtacatgtagggatttaagtcgagactgtattttgattggcttatggaactattaaatggtagaaataaaatccaaacttagaattttcatgtgtttttacattttgaagcaacaactgtaaatatcacttcttccatggtaaatcagctactttttgtttttgctgaaggagcaagaatacctttagcagtattttggaaaattataattgagtttggtcatgcaagcacttagaaaaaagttttgccaaataattgtatgactactaaaagggtttgtgatatggcacgggctatgatcagcaatataccctcatygcgttcatttcttaaatgaatttgaataaagtaatttaaccttaaataatttattatttgaggtaattatataataatttccactttccagaattgtaaaccaaggcttagctaaagatatagaataactttcccaaggtcacgacataaatggagcagagatttgaactaccatctactcttctgttattacctttaaccagcttgc

SEQ ID NO: 491002 - DNA, 543 bp, Homo sapiens
tgctaacttagaagaaagtacatgtagggatttaagtcgagactgtattttgattggcttatggaactattaaatggtagaaataaaatccaaacttagaattttcatgtgtttttacattttgaagcaacaactgtaaatatcacttcttccatggtaaatcagctactttttgtttttgctgaaggagcaagaatacctttagcagtattttggaaaattataattgagtttggtcatgcaagcacttagaaaaaagttttgccaaataattgtatgactactaaaagggtttgtgatatggcacgggctatgatcagcaatataccctcatcgcgttcatttcttaaatgaatttraataaagtaatttaaccttaaataatttattatttgaggtaattatataataatttccactttccagaattgtaaaccaaggcttagctaaagatatagaataactttcccaaggtcacgacataaatggagcagagatttgaactaccatctactcttctgttattacctttaaccagcttgc

SEQ ID NO: 491003 - DNA, 623 bp, Homo sapiens
ctgtttcttaaaccttccagtagaataaaagagtgaaaaatcctgaaggcttattgggaaaatcagggaccagaacaatgagttaaagaaacctcttagaaatatcttttcatagatcaaggatttagagaacattaaaaaataaatggaaaaagtctattcatttcccctttagtgatctggcatttgtaggagaatagatgagtttaggtaataaactgtatatatttgtaagyattggtagtcacttattaagtgcgcaccaagcaatatttctactgcaataaactcaaagtacatttctaacatttcgtagcattacattgcatcttgaacattaaattgaattagaactaacaaaaaagcttttatatgtccttctcccttaattctttatatctaaaatagctccagaaaaaaatatgactaatgataatgtgtgtcaggtaaagtattattgatttgacaaaatttaatcctttgtttaggttgactttaagtaagactactctcaacataatatacaaatattttagccaaggtagtttgtcttttgtttagcagttttagaaggattgtttcttaatatagataaaggtaatttaaataaggtcatacatgtt

SEQ ID NO: 491004 - DNA, 623 bp, Homo sapiens
ctgtttcttaaaccttccagtagaataaaagagtgaaaaatcctgaaggcttattgggaaaatcagggaccagaacaatgagttaaagaaacctcttagaaatatcttttcatagatcaaggatttagagaacattaaaaaataaatggaaaaagtctattcatttcccctttagtgatctggcatttgtaggagaatagatgagtttaggtaataaactgtatatatttgtaagcattggtagtcacttattaagtgcgcaccaagcaatatttctactgcaataaactcaaagtacatttctaacatttcgtagcattacattgcatcttgaacattaaattgaattagaactaacaaaaaagcttttrtatgtccttctcccttaattctttatatctaaaatagctccagaaaaaaatatgactaatgataatgtgtgtcaggtaaagtattattgatttgacaaaatttaatcctttgtttaggttgactttaagtaagactactctcaacataatatacaaatattttagccaaggtagtttgtcttttgtttagcagttttagaaggattgtttcttaatatagataaaggtaatttaaataaggtcatacatgtt

SEQ ID NO: 491005 - DNA, 493 bp, Homo sapiens
agtagtatcatttccattttactgcagaggttcataaggttaacttggccaagacaatctccacctcattcttaccttgccctgacactaggcaaaagacacctgctgctgtgaaaggggagaaaacccactcatgccaaggatcctgcactaatacaaagcaaaagtgtattgccgtctggggagaagcacaaacattgaaaacgtctaacccctgagactcakgtgcacagggtatggccaagaatgagccctccaggccctaccacaagccttgaaccaacttaacagtctacttctagagaggctcaggagcacagagatctgtcatacaggggtgcaaagtctgctgaaagctgtgaagggagcaaaattattgaaaaaaactctctaagaccccaggctctaaactaagcacaagataatgatagcccaccagaacaactgcagataactacagcaacaacaaaaccaaactcagtttcactactgc

SEQ ID NO: 491006 - DNA, 617 bp, Homo sapiens
tttccctgagattacctaaaaatttatacttcataatttaacaccataaaattacggctgtcaatacttgtttggggacacamtttcaaatacaaaatggaacttaaaagaaagataagctacttaaatcttaaaagggaaactaaacattaatggtaattttctcatgtatcacatttcaaagaagagcccttacagtataaagattccatgagttcgtgacagctttattcttagacccacaaatcgagccattgttatgctctgaaactgtaggaactgctgccacctataggatctgaacaacaatggcagtgttttactcagcagtaccctctactggggacagaaatgtgatgaatgtgtaggcacttttcttaacagcaggtggcctcacttttgctacagatttacctcaaaaatgttggtttaaaagctttttcatgttttgtaaaataaactccaacttccgcctgaatctaaagttgctaggtgatctgagataggaaaaaaacccacaaccgtgaactctgaaaattcacttccataaacagtttcacaaagttgttccccagttgctaatctaatgtcacttagtgccatgccataccaaccaa

SEQ ID NO: 491007 - DNA, 287 bp, Homo sapiens
tggactatgttaactaaaagaactgccaacatctattgatayggacaggaggcagggaaatactgagtagaaaagggtggggtccctggcgagggttccaccctcgagcctggacctgcggccctaaatgagaacttcacatctccgctttcctaccctagtgctgcctttttgccccccacacttcctatcatgtgcccataaaaatcacaacctccattggcagaggagcagggcagcacaacagagaaggaaagaagagaagatgtgtctgaacgtcgagaaga

SEQ ID NO: 491008 - DNA, 630 bp, Homo sapiens
cagatttacaagccacgtacacatgcatgtgcggttacacaaacacatgttgtggcatgacaaaacaatattgtagggcaagtgacatctgtgtgaaaagatctgaaatagcatcatcaactttagarcagtcagccttcctatttatttttagggtcaaaatagtaatacctgtgccctgcccagtaattgatcacttgtgaataagacaatggggaaaacttttaaaacagtggttttggctccacataaaatcacctggggagttttgtttttttttttgtttttttaattccagactcagaccactctccaggttacttagatccgattctctgagtaggatccaggcatcgtttttttgttttgttttgttttgtagctcactatgtgcttccaatgtgtagccaaattttagaagaactgctttagaatctgtttattcctgaagttttttcttgctttttgtaaagtaagcacaaactctggcaatattaaattacgtaatcctcacacatcactaatgggaaggatctaaaaaagtatctcatctctccttcatttttcaaaaggagagatggagaaccagagaagtcaagtgactttaccaagttctctccagaagttagt

SEQ ID NO: 491009 - DNA, 562 bp, Homo sapiens
ctaaaattggttgcaatcaatatggccaactagattctgcacagaaccagcttgctgatgtcacaacccgaatttgcactgcatgtttcatactaactcctccccaaatttgcacatgttatccatgaggtagtgtgaagagataactgagcatgcccaaggattttccagacctccctttccttccaccaatcacctattaatcccagattccaccacctaaatcttgtctaatcaaattactgccttaaagacagcacagggaataaatttgagctggattcctgtctccttgttggccagatttcaatagaaggctttatttttcccaaaaatcctggtgtcatagtattggcttctagcgcgtgtggcagcaagctggttaggctctgtaacagtgtagggatagaagtttgttcctagctgataagaaaacattacctcaactacttacattttctttgacacagaatgttgatgagtttcataagaaatgactctcgcatgrggaaggatgaattcttctgttactaaggagattgaaaccaaatctcagagatca

SEQ ID NO: 491010 - DNA, 440 bp, Homo sapiens
tgtttacgctgtcagttatatccatcaatactcaccagatttgaaattaatactgtggcatctagaaatatttacttataaatcattatacaataaaatagtatttatttataaatctatacaataaaaatagtatatattatgtacaatatacataatacaaacattgtattaaaatgactatatttttaaaagaaaactagttgtcttacattttggaaaaagctatttcatgttgtgcttaacaaaagacagttggattcttataactttggtatccaatttgttgtgatgtgttgtttttggtggaagtacatgaagaaaatctggcctcgtccagatatatagttggttaaaagagaaccttgtaaactgtgtgaaagtgccttasggacaccctagtggtcctaggaacaccctaagaacagcctgaggcaggc

SEQ ID NO: 491011 - DNA, 649 bp, Homo sapiens
cctgggttttgaacttttttttttttttaaccgaaggtaccctcccaagtgactcacyaaaccaataagccttaaataaggttataccttcaccaaggacacatgaggcatctccaaagaggtgcaaagcagtctttataaaatccagaaccaccccagaaatggttcaaagaaaggaaggttttgctagccacaaaagggggacagcccacattgatctggccatatctttcagggtctcagcttctcagttgaccattgatacacaaggcccaaaacctctgtttgaccccacagatggaagaagacaggaaatcaaaagttgttcatagaaggcgaagggatcgataacaaatgggtgttccaaaaggtcaaaagtcacataaatatcaaaccaaaggaactgatttcctgactgggaattgaaccaggccatggcagtgaaagcacagaattttaactaccagactacacggtggaacagctccaaagcaggctgtttgaaattatgaagggctttagctttgttttaggtcagattctggctcttcaattttgccgaatttctgaggctggccacaacactattatttatctttaaaaaaaaacattttttgatctcccataaatacaaataaggcaattgctt

SEQ ID NO: 491012 - DNA, 492 bp, Homo sapiens
attttgagacagggtctcctgttgcccaggctggagtgcagtggtgtgatcacagctcactgcattcttgacctcctgggctcaagggatccttctacctcagcctctggagtagccaggactacaggcacacaccaccacacccggctaatttttttattttttgtagaaatggggttttgccatgttgctcaggcaggtctcaaattcctgccctcaagcaatccayccactctggcctcccaaagtgctgggattacagatgtgagccaccacacctggccttttttaaaaaaaaatctataagattgatagtcttctgtgatgaaaggattcccttgtgctcctctagccctttgaagcattggatttccaacagaatttttctgagggccttctcctgtttgggcacagtgtcacccacagcctttctccaggccggggcttctaccctttggcccacattctctgggccccgtttcctgaccacca

SEQ ID NO: 491013 - DNA, 492 bp, Homo sapiens
attttgagacagggtctcctgttgcccaggctggagtgcagtggtgtgatcacagctcactgcattcttgacctcctgggctcaagggatccttctacctcagcctctggagtagccaggactacaggcacacaccaccacacccggctaatttttttattttttgtagaaatggggttttgccatgttgctcaggcaggtctcaaattcctgccctcaagcaatccacccactctggcctcccaaagtgctgggattacagatgtgagccaccacacctggccttttttaaaaaaaaatctataagattgatagycttctgtgatgaaaggattcccttgtgctcctctagccctttgaagcattggatttccaacagaatttttctgagggccttctcctgtttgggcacagtgtcacccacagcctttctccaggccggggcttctaccctttggcccacattctctgggccccgtttcctgaccacca

SEQ ID NO: 491014 - DNA, 492 bp, Homo sapiens
attttgagacagggtctcctgttgcccaggctggagtgcagtggtgtgatcacagctcactgcattcttgacctcctgggctcaagggatccttctacctcagcctctggagtagccaggactacaggcacacaccaccacacccggctaatttttttattttttgtagaaatggggttttgccatgttgctcaggcaggtctcaaattcctgccctcaagcaatccacccactctggcctcccaaagtgctgggattacagatgtgagccaccacacctggccttttttaaaaaaaaatctataagattgatagtcttctgtgatgaaaggattcccttgtgctcctctagccctttgaagcattggatttccaacagaatttttctgagggccttctcctgtttgggcacagtgtcacccacagcctttctccagsccggggcttctaccctttggcccacattctctgggccccgtttcctgaccacca

SEQ ID NO: 491015 - DNA, 565 bp, Homo sapiens
gcctgaggcagtgggcatggaaggagattatacttgatggattttttaataaaaaatgataaatgaatataaaaataaagttaacagaattgacaaaactgcattttaaatagttttactagatatttatttggtatgtttactagatattctaggcatacaagaacttggttaagctctctaatagccccaattgagtaggcattattaatyctactttatatataaggcaaagtaactttttttaaaatatgccattaataagagataaaacagaggtttttaagcaactctgtcttactctaacacccatgcttagccagctacaccttgatgactttaaaagcaaccaaaagacccatctataaggtgaaaatgtgtttggcctggctattatggtttgaatgatgatgtctccacaaaaattcatgttaagacttagtcctcaatgcaacagtattaggaagtgtggcctttgggaggtgattaagtcatgagggctctactctcatgaatgagattagtgaccttataaaagggcttacaattgaaggaagctctcttg

SEQ ID NO: 491016 - DNA, 565 bp, Homo sapiens
gcctgaggcagtgggcatggaaggagattatacttgatggattttttaataaaaaatgataaatgaatataaaaataaagttaacagaattgacaaaactgcattttaaatagttttactagatatttatttggtatgtttactagatattctaggcatacaagaacttggttaagctctctaatagccccaattgagtaggcattattaatcctactttatatataaggcaaagtaactttttttaaaatatgccattaataagagataaaacagaggtttttaagcaactctgtcttactctaacacccatgcttagccagctacaccttgatgactttaaaagcaaccaaaagacccatctataaggtgaaaatgtgtttkgcctggctattatggtttgaatgatgatgtctccacaaaaattcatgttaagacttagtcctcaatgcaacagtattaggaagtgtggcctttgggaggtgattaagtcatgagggctctactctcatgaatgagattagtgaccttataaaagggcttacaattgaaggaagctctcttg

SEQ ID NO: 491017 - DNA, 611 bp, Homo sapiens
cccccaaaacacaagactacacttcaccatcaacatttatgacaaatatctcaaatttattttagtaacctgaggataatatttacagtgcccttcagtatcatataagcaataaaatyacatggcattcttcaacataaccttcacaaaatagctgagggaaagacactgaaactttctcagaagtgagaaaaatatctctctgttttatatcattaagtgtaataaattaaacttatgatgcaaatatttaaaataccttttattataattaattatgattaagtatgcatacgtttagctattatgtttagacttttggtctaaatctatagctctgctttaaatatcttaataaattaaattagtaaaatccctaaatctttctgttggataagagtgatgtatttctaatattcaaaaagtccaatatattctacaacataaatagaacctatattttaaactatttatccaaacatttaattatcaaaaaagtcctccttttatttttgattctgaacgttggttcttttccatgccctcaattagctaatattctctccaatcaccatgatgtgtaataattctcactgaggtgtatgtcatag

SEQ ID NO: 491018 - DNA, 562 bp, Homo sapiens
atcaaataaaatcttaggagtataatgatatgcattaaataaaaactgcttattgattgaaatgatactgtaataagtaatgacatgcaaaaaacaatgaaatgagggctactatcattaagtgggtggggaatagaaatccacaggatccctctgcggcccttatttcccccaacacacactgatcayggaatgaaaaccattaaacacattgaaattcttcatttattttccaaagaagtagtctggtgtttttctgattatacaagtaatatatttgttattaaaaatgacacattaccaaattaaagcagaaattgagcagtctaatttctcaaagttaaatactattaattattctagactttctatacaatatacgtttttcacatcgtgttatacaatatgctgttctaaaatctgcttttccctccacttaataattttataagcaacatagctataaaaatatatataatatataatacagttatataaatataaatatgctataatctatcaaattcactattgataaatatgtaatatttttaatgttatg

SEQ ID NO: 491019 - DNA, 632 bp, Homo sapiens
gctgtaaatgcaagatataattagggagacaggttgcatagtcattatgagcatgaactctgagccaaactgcctgtgttacttcacttttctatcctttatttacctcacatattaaatggggataaaaatagtaccttccttatagtatttgtgaaacacttgtagcagtgtcttaacatatattaaggtgctaaataagtatttcacaacttcatagaaacttctagacccaatctagtcttgtagctaagaataagaacataattccagctaatgcagcaaggagtcgagaatcaggattccaggtacagcggttccataaacagaataagagctctgaggtgaaggcaagtgtagctttcataccgaaaatgaaagcccattggtcagcagtgaggcatttagttcacagagaagtgacactggaagaagatacaactaaatctrtctgagctggggataggctgagagtggtggagatcagataaatctgcttctcacttctgtctaacttggcttaggaattgaggtgcagttgaggtttcaggtaagaagcctgaacctaatgatgtagactgggtagaataaataggagcaatgagtaaagactgacaagataccagaacata

SEQ ID NO: 491020 - DNA, 507 bp, Homo sapiens
cacagataagggtactttatttttataacttaaataaaaaacctattactattatattagaaatcctgataagcccatcaatttctaatattatcctatgttagaaataagaataagcacttggagagctttgaggtgaaagactaaggtagaaaatgatcatgggttatgtactctatttttttacatccattcttctttttcttttttcatttatcagttattgaaaaatcagatatcaactcaattacttatatatgatctataaagtgtagccattgaaaattatgggtgtgtctatgtattagtttcctaargctgtcaaaaaaagtactacaaacaaactgagtggcttagacaatggaaatctattgtcacagttctagaggctagaattctgagatgaaggtgttggtaggaccaagcatcctttaaaggtgctagggaaggatctattctggacctcaagcctggtatctggtagtttcttggtttgtgatggcataa

SEQ ID NO: 491021 - DNA, 582 bp, Homo sapiens
ggataaatatctctttttcttccagatggacaaaactgaaatcagttttataggtatactaagatggtctcaaatgattaaagaatctgctgcacatattagtgactaactccacaatatcccggaattggctctccatctttttctgtttcattcacactgtcccacattctaatccttgggattaaacttctcattaggtatygtgtacacaaatcttcatctcaatctatgatatctggcagaatttatgctgataactatactttctaaaattcaaatatgccataatgtttacaggatggtttaattagttgtaacatatttactgaagtaggcttaaaattaaattttcccaattaagtataaaaaattaattacactcttagaaaattcaagtccattattcacttttttgttagataaatacatttatcaaatttatataaattagaatatatgtattttatctgctttaagtatctattataacctgttgattattttaataacaattttcaaaaagcaggaccaatgtaaaagaaattaagaggatatttgcaccaacaaaaactcatgcaa

SEQ ID NO: 491022 - DNA, 582 bp, Homo sapiens
ggataaatatctctttttcttccagatggacaaaactgaaatcagttttataggtatactaagatggtctcaaatgattaaagaatctgctgcacatattagtgactaactccacaatatcccggaattggctctccatctttttctgtttcattcacactgtcccacattctaatccttgggattaaacttctcattaggtattgtgtacacaaatcttcatctcaatctatgatatctggcagaatttatgctgataactatactttctaaaattcaaatatgccataatgtttacaggatggtttaattagttgtaacatatttactgaagtaggcttaaaattaaattttcccaattaagtataaaaaattaattacactcttagaaaattcaagtccattattcacttttttgttagataaatacatttatcaaatttatataaattagaatatatgtattttatctgctttaartatctattataacctgttgattattttaataacaattttcaaaaagcaggaccaatgtaaaagaaattaagaggatatttgcaccaacaaaaactcatgcaa

SEQ ID NO: 491023 - DNA, 496 bp, Homo sapiens
gtccactgccaaagtccacagttcacaaaattgactagaatttaacgtcttatatggcattttgtactacattctaacttctagagaatatagttcatttattttgaaaatattataaaataagaattctcaaataaactctttgtggtattccacttaggaaatataaagcccaatagcttagagatgctcacatctggggctttattatttgtgttttaggttcagyaatagtaactgctgagcaactcttaaaagtttcgatgattagcttagccagtaagttcccagacagctttaaaacactgatctatgatcttacatcttctacatcagctcacaattctatggctatattttctgtgtagtaggaattaatgtttagagagaaatgtgatggcctaattgattctgaacctagaacctcaaggtagcttttgctacagttatctgaaaatgtctctcccactctgtattagacaattctaccccagat

SEQ ID NO: 491024 - DNA, 496 bp, Homo sapiens
gtccactgccaaagtccacagttcacaaaattgactagaatttaacgtcttatatggcattttgtactacattctaacttctagagaatatagttcatttattttgaaaatattataaaataagaattctcaaataaactctttgtggtattccacttaggaaatataaagcccaatagcttagagatgctcacatctggggctttattatttgtgttttaggttcagcaatagtaactgctgagcaactcttaaaagtttcgatgattagcttagccagtaagttcccagacagctttaaaacactgatctatgatcttacatcttctacatcagctcacaattctatggctatattttctgtgtagtargaattaatgtttagagagaaatgtgatggcctaattgattctgaacctagaacctcaaggtagcttttgctacagttatctgaaaatgtctctcccactctgtattagacaattctaccccagat

SEQ ID NO: 491025 - DNA, 639 bp, Homo sapiens
taattggtgtagccttctattcaggcatcttgctgtgtcctgcttttcaagatacagatatttgggtggtataagtaatatatgagtgaaaaatcagtagccatcaaggatattattatacagtagggctcaactaaaaattaaacagctgatatcttttgcaatgtgagatctcacartaataagtatagactaatgatgttaacaataataatagcttatggtttgattttcactttattccagactgtgatctaagagttctatatctataaacctatttaatcatcatcaggtgtactgatagtagcccctgtttacagtgaatgcacagacatgtcacaaggtcacatagcaatgtcagagaatggccaagaagggattcagacccaggctttacagcccatgcttccaaacatttcagtgtgtcaataaacatggaatttgaaatctgattattataccaatgactaccaagactgaagtatatccaattctcaaatgaattatacatccatttatctcttggtccccttcccttttctcactgccacagaaaaattataatttttaatagttattaataatcaaattttatccttagtattatacttagacctcctggaacctcatctccac

SEQ ID NO: 491026 - DNA, 639 bp, Homo sapiens
taattggtgtagccttctattcaggcatcttgctgtgtcctgcttttcaagatacagatatttgggtggtataagtaatatatgagtgaaaaatcagtagccatcaaggatattattatacagtagggctcaactaaaaattaaacagctgatatcttttgcaatgtgagatctcacaataataagtatagactaatgatgttaacaataataatagcttatggtttgattttcactttattccagactgtgatctaagagttctatatctataaacctatttaatcatcatcaggtgtactgatagtagcccctgtttacagtgaatgcacagacatgtcacaaggtcacatagcaatgtcagagaatggccaagaagggaytcagacccaggctttacagcccatgcttccaaacatttcagtgtgtcaataaacatggaatttgaaatctgattattataccaatgactaccaagactgaagtatatccaattctcaaatgaattatacatccatttatctcttggtccccttcccttttctcactgccacagaaaaattataatttttaatagttattaataatcaaattttatccttagtattatacttagacctcctggaacctcatctccac

SEQ ID NO: 491027 - DNA, 528 bp, Homo sapiens
acaagccattgaagtaaattcaataagctgaagtcttggaatttgcattagttctttaaacaaagactctttcctgaacaatggagttttgagtacagtttgctctcttaactgtagaaggttcatagggagttcacagggaagaaattaattgggctctctattgtttttttttctcttttcccatccccaatgtattaaacatttctgtatacctcaaatgctactgtccttctttggtaaaatttaattcaattaaaatttacaaaggcacagaataaaaaatgatattagaagagragtcaattctaataagaaaaatattctacaactataaattgctcattaatttctaccctctagtgcttgtaagcttagtcatgccaagttaagagatatccttccaattggtctttgatgagacttaaatagtaaaccagccaatctgattctataccatttcttagaacaaagaagagtgctatagattagatttctgataaggatgacctctatacagtaggagaa

SEQ ID NO: 491028 - DNA, 504 bp, Homo sapiens
ctggctttaaaaatttctgcttggaagagacccactttattattctcacttttttaatggcccaggcaagtcacaaggccatgcacgagttcaagtggacgggataccttccccatgcatgtggatattgatgaacaataagtttatcatagaggggaagttgtatttgttgcaagtgttttcacctaaccccttgctctttctccagtgcaagattacctgttgcttcagttagactgatcgcttgagcacagacacmatggatgccattttacccagcatggcctcaagaatttattaggcccattacttctttaagaacttggaagagtgagaatttttttttcttgtggggcttcagtggtcaataggaagttacttgaatactatgcaggatctgtccctactttcatttctgactttgagtactcctttttgtttttatttagtctagctaaagttttgttcatcttgtcaatctttacaaagaacaggttttgatgc

SEQ ID NO: 491029 - DNA, 586 bp, Homo sapiens
ctgctatgcttcaatccatgacaataatgaggccattttgagtaacacaaaatttggtcaataccatatctaagaatgtattttccataccatttatcaaaatggctaaagcacattaaaaaaattcaagtaaaatattcacagaattcctgaaaaccactaagatttattaaaatttgaaattaattaccaaagattccaatgaacttttctgtaaataattaatattcattcaataaatattaaaaaatattcaatatttttatatgctcctagatgtttgaaatgcataattgaacaaaatagacaaatctctgctttcatgggggaagakaggcaataaacatagtaagttactttgtagcataatagaaagtgataagagatgtagaaaggatatggatgactaggagtcctgggcaggatgaaaagtgcaattttaaataaggttgtcagagtaggcttcatggagaaggtggtatttgagcagagatttgaagaggagcactgcaggcagagaaaatagccaatgcaaaggcccaaaggtgggcacatatctggcatgttcagcaacatggggggccag

SEQ ID NO: 491030 - DNA, 439 bp, Homo sapiens
ctctacaaaaaattaataaattagccagacatggtggcttgaggccaggagtttgagactagcctgcgcaacatagcaagaccatgtctctacaaaaagttaaaaaaattagccaggcatggtgatgtatgcctgtggtcccagctactcaggaggttgaggcaggaggattgcttgagcccaggagactgtggtgagctatgatcataccactgtactccagcctgggcaacacagaaagactgtctcaaaaaaaaaaaamaaacttgaacctgaagtgttataagatcaggaaacctgatttaagaaaagtcttccagattagactgtctggcagaacaaaggggtctgggaagaatgacagcatgactgaagggctccgtctggaaaggaaggaaggtgtgccaccaggagaaggcagagccaccccagacaccaa

SEQ ID NO: 491031 - DNA, 567 bp, Homo sapiens
gggtggtcacatgtgcctgtagtcccagctactcagaaggctgaggcaggagaatggtgtgaayccggggggcggagcttgcagtgagccaagatcgctccactacactctagcctgggcgacagagcgagactctgtctcaaaaaaaaaaaaagaaagccaaccttcaatcacttcagcatcctggacagttccgagcacattgcaggcataatagctgtttgagggcaataaatagcagtcctcaaagccattgagcaaatacctgcttcccctctggggcactctgcatgggacaagcagcttggtcttggatgctggcattttgctaagcactttctcttggtcttgtttggagtgctgttgtgctgcttccttgtacaggtatttatctattccagaaatccctactgatcacctacattgtggcaggctccagggtaggtgcacctaaggatgcacaggtgaaggggttatcacatagtgccttcaggggcctaaaaggtaacataaggtgcagtaggctgggtagagaccgaagtgaactggagagccttgtctaaatgt

SEQ ID NO: 491032 - DNA, 576 bp, Homo sapiens
cctccccattgatgtgctttaggttttggattttcttatccattgtaggtagggttactacacgtcctggaacattctgggtgatgtctgttattccagcaaagttaattaacagtactttactccccaaagtgtcccactttagacaataaattatacactcatcctaattgctggatcgggtatcccagtcatgagatgattctcaccattatgaaccagagaagaataggcaggtgatgagaggaagtcaggaaattaaaagggctacactcagaatatgcaaacaatacaaatgttgcaatcaccaacttctcaacaaaaccctatttcctgagattctgatactctagagtgagacttgagagagcacctggcatagcggatgcagccaaagttctgggatgtggcagaagtggatttcaaatcctcttcctatcaatagctgtgaccttgggaaacaagcctcttgggtttcacacagaaattctatacaatgagggtawttcccatctactgagcagggaagaattcttctgcaatttagagataattcatgaaaaatgcctaccacag

SEQ ID NO: 491033 - DNA, 495 bp, Homo sapiens
aaatgaaaaaaaatctgagaggaggggcttagggagaaccaatgaagaaacacakacttgcttctcttaaacaggtccgggcaggtggacccttaaagctgacagcctctttggttcccagaagacatctacctgggtaaagaccagatactgggccgcaggaagggtaacgtctgggtcacaacccattctctgaagttctaagaatctatattttgattatcctaatgtcccagccctacattctcaatccaagtaaaacgagcagttctcctctccactggcaggagcccagtgacatgcagacatgttctctctcacatgcggtgattttccctctttggatcttacccctgtctctgctgatctttcttgactccaggctagagggcccctgcgcgaaagtcaatctggcagaggttgctggaacaagaccagctaacacttaaaagtcccagcacctatcagtgagatgtgtaggacaccttcagtgat

SEQ ID NO: 491034 - DNA, 462 bp, Homo sapiens
gctggtattttattctcttgaggaccaaactgtgaaacagttaatctagaaaaccaatcacactatgttacatgttgctgtatgtatgtgtgtctttttcactggattttgacttattcatgtcctgtttacctttgaaattcctactatttcttacaacgtgttagaatatagtagaagttcaattggtgtttattgaattaagaatgatctggagacaaaattcacaactttagaggtcacttaatcagtgacagcagatgtggtgatttcaggacaatgatgtcatttaaagagagcccaaaactttgggcagtttcctacttgtcatattgttgatcaagcccaagtgggggcaaacattgggcttatttggcaattggactccamaatctgtgagcaaggtgtgaatttatttctcagaattatgggtagcaattaccttgaaaaacataccttata

SEQ ID NO: 491035 - DNA, 628 bp, Homo sapiens
tctcataggcatcttaattttaaaatatataaattctaatttggttattggttctggaatttgattctctatccatatttctccaatctgtaattagtatcaacagaaacttgagaatttccccagacttatcttattaatcattaaattatttcattactttctatattcctgtggttactaagtctattaactattgcatcagaaatattcaaatgtagcccctaatttgtaatcttaacttgccttatggtagagctttggccttcataatttcttgtctggagtactgcaataaccccctaatagttcttttacccaccaatctggcccccaacaaagacacctttgatttctccttcctaccaagacattctcaacattctccctccaccaggtggatctggccattgattatcataaatctaattttgccttctgcttaaaatatttcagggagacccattaatgcatttggataaaaattatttattagctgtgtgactttgggtgaaagatttgagctcatctgtaaagtaaggcaatatggcaccyttgaagagtggtgtgaggattatggtgtttaatgtccaccacaatgcctactgtcttatagaagctgagtggg

SEQ ID NO: 491036 - DNA, 546 bp, Homo sapiens
gctgggtaccaagactgatctaatagtcaaaaaggtttcattccatctagatatttctctagaacaggacctaaagaagttctttgactgaatttcttatggaagtaataggagagttccttgtgcttcattaaatgctgtattggtaaatatatatggtttaccattacatgcaaatataataagctataaatcattggattctgatatttttagtttagtctcactaatgaactgctaagaaatcttggataacatatctagaataatactctctctttccaatatggtatggatccttctgtgtcctgkgttgttggtctcatccatatatccttaagtgtctggtcagcatgactgtcaaaggtttactttgggatctacagagaattcttagtctttgatcattaacgtgaggactggcccaccaaaactgaagctctgactgacttgagtgtactctcagcacctttcactttgctgcctgtattctctgcatatgtgatagaaaatataattttaaagtctgtgtggaaaaaagtattt

SEQ ID NO: 491037 - DNA, 514 bp, Homo sapiens
cagctgccagtgtagctagaatataagcaggcagaaaaatgtgaaaaggagagactggcctagcctcccagcctaaatctttctcctgtgctggatgcttcctgccttcaaacaatggactccaaattctgcagttttggagctcagactggctctccttgctactcagcctgcatatggcctattaagggatcttgtgatcatgtgagttaatacttaataaactctcctttatatgtatgtaaaggagatatatatatatatatatatatatayacacacacacatacatacacacacacacacacaccacatcgcttcactgcctccccactggcgaccatatattatatatatgtattccatgagttctgttcctctagagaaccctgacttaatacagggggtaattggggtaagggttaaaatttcaatttgccaattcaaggtatatcaatttcttaagtttagacagtttttctagttaagacaacctgattgggtaaacatttag

SEQ ID NO: 491038 - DNA, 616 bp, Homo sapiens
cagactcctgaagtctgcttataatgactttgttcatactggtttaacattgctgcatcaaatggaatagtattaagaaaagtctattttaatgtagaagttactttgatttgactgtcctattaaaaataccagtagagtcaaatgtcattattatgattttcagataacccaattacgtatgaggagactcagtagaggtgtcaaaaccaaaagcaatcctgttatgtctgataaactgtctgtataacactcaaagtgctttatgaatctttgatgctatttaggttgatatgtaaattatctagcccagcatgtacagagtcactgtgcagcaacaccaaagatcaaaagcaatgtcagctcttagtctrttcaacttcaaagactaataaaaaatgaagaaagttaagtgaaaagtattttatatttaatacaagaaatcctttaaaaatataaggcatacaatcctggttcaactgaagacattctagtgggtttacaatgtctctagctagtttacactgcagcccctcatgacttctcagtacccatgaagatacagatcaagaggaattctgacagtgcagttgcaatatgaaactgacatttaacc

SEQ ID NO: 491039 - DNA, 628 bp, Homo sapiens
aataaaccatagtgattatggtggaaatcaattatttgtcagtgctgatgggaaacaggaaatttaagaatgacagggacaaatccttgaatgaaatttttttttttagtgtaataaatgccccaataagtagactgcaatttttaaacaccagcaactcttaataagcacacttaggtctcatgctgctaatttatgggtcttaagttacaaattaagagctgtaataactagaagcagtttaggtcttaagggtggaggtggtaggaagaaggcagggagctcaatgcctctctagctttgaatttgaaaactatttcatgctttactctstcttcgtcagcctgagaaaaaatagctgagtgttgggcaggtcttggaagcctgaggttttacgagggatggcatcttggaggatctctagaagcagagctgagacagacattcttgggcaaggggtctgtggatgaaatgctccagaagaaggggaatgagaggacagggcaggggaaagagttcagcaagtactgcagtggtggagccctggagctccaactgtaccacacattggtccccgtggaggcaaggagaccccctggaggcccagggcaacactccagagcaaagg

SEQ ID NO: 491040 - DNA, 628 bp, Homo sapiens
aataaaccatagtgattatggtggaaatcaattatttgtcagtgctgatgggaaacaggaaatttaagaatgacagggacaaatccttgaatgaaatttttttttttagtgtaataaatgccccaataagtagactgcaatttttaaacaccagcaactcttaataagcacacttaggtctcatgctgctaatttatgggtcttaagttacaaattaagagctgtaataactagaagcagtttaggtcttaagggtggaggtggtaggaagaaggcagggagctcaatgcctctctagctttgaatttgaaaactatttcatgctttactctgtcttcgtcagcctgagaaaaaatagctgagtgttgggcaggtcttggaagcctgaggttttacgagggatggcatcttggaggatctctagaagcagagctgagacagacattcttgggcaaggggtctgtrgatgaaatgctccagaagaaggggaatgagaggacagggcaggggaaagagttcagcaagtactgcagtggtggagccctggagctccaactgtaccacacattggtccccgtggaggcaaggagaccccctggaggcccagggcaacactccagagcaaagg

SEQ ID NO: 491041 - DNA, 480 bp, Homo sapiens
ctttttttttttttttaaatttatgctgtggttctgggagccagagatagagaaaaaaaaagttgtcctggagtctgtygcattgtgactgaatcaagttatccataaaaggactcaaaagaggagtctgggttcacagcttaaaggaatgaggctaaacagcagaaaggctcaagcaaccactggtggaggggaacaagtaagaacttgtctggagaagtttggagccaagtataaatacccactgctgacattcacacattcccagcttgcttgtccaagggcaagcaggagtcattcagagcctgaacttaataggcatctaatattgctatgtgttgttatatctcaaccaccaccaacaccaccactcccagctagcactcacagagcacctgacctgggaacagtgcctgaatcagaaacagaaacttctagactgatgtggttcagtggtgcttacataggctattgtttact

SEQ ID NO: 491042 - DNA, 606 bp, Homo sapiens
ccctattaatgttcctctttttccttgaaatttattctttaggtgttttattctagcttatcccccacatttctttttgacagctcattttcaatctgtacctcttctacacactaagggcttttctttggttctgacttttcctcttattcacaattgacagttcacatgacctcattctgtatttcccctctctcattttcccaggcttaaacacttggagagattttctcttaacactcccctaaaaatgtgagtttatctcatggagatttaataaagcaaatgctctctccacaaagagatatcgttggactgctaaaaattcaacactsttctcaactaaattttctccatttatattattaagacagactaattaaacccacagttctccacaatgacaactgcccttacagatttgctttaaaaaagtagtccatatattcactaaaatctaggggatatttaataatatgagtgcacctcttttctcctttaggatatggacaggaactttcattcaaagtcaaggcacatgcctaaaatattgcagtaagacagtcttctcattgtctgtagcatatacagacactgcttacttct

SEQ ID NO: 491043 - DNA, 646 bp, Homo sapiens
tggcttaccccaccttgcccatttcttcccatgaagaccataataaaagctgttccttttgtctcttcttcctcctgactgaccttggtgctttcccctgcatccttgaatagtgtacctagcatattcgccctcctcttggaactgggagtaaaacactaacttgttagtggcagtcatttcctggtctattggcctcactatacttggatagtaatagaatcgacattttcaaatgtgttgtaaatattcaattagttttttgttttgttttgtttttttctgagacagagtctcactctgtcatcctggctggagtgcagtggcatgatcttggctcactgcaacctctgcctcccagattcaagtgattctcttgcctcagcctcccgaggaggcacgcaccaccacgcctggctgggaatacaggcacgcaccaccacgcctggctaatttgtttgtttgtttgtttgtttgtttgtttgttttagtggagacggggtttctccacgtaagctaggctggtctcaaactcctaacctcaggtgatccgcccayctcggcctcccaaaccaaagtgctgggattacaggtgtgagccactgtgcccggcctatattcaatgagttttacataagaatgtctt

SEQ ID NO: 491044 - DNA, 485 bp, Homo sapiens
aaagcgatgggatggtgttcttgcatgactcagaggcagactctgaatgcaaatgccatgacagggagttcattattgcgtggcgtccacatttgagaacygtatcgccattgtgaagagcagggcgtggtctctagacttagacagacatgatttaaaatgtgctgggaaagagagactctatgtttgcatgtaattggtgctcagtcatgttaggtctttatcctaaattcttatatgttacacacaagtcccaatcctgaattagtaaaagtgagtttaggtgctgggatgatgtggtcaggaagcagcctggaccacagtcctgaagggggtgcattagttacagattgccttggtggcttaaaacaacctacattcaccatctcacagttgctgagccacaggggtctgggccttacaaggctccagtgaaggtgctggccaggctgaattcgtgtctggagttggggtcctctttccag

SEQ ID NO: 491045 - DNA, 485 bp, Homo sapiens
aaagcgatgggatggtgttcttgcatgactcagaggcagactctgaatgcaaatgccatgacagggagttcattattgcgtggcgtccacatttgagaactgtatcgccrttgtgaagagcagggcgtggtctctagacttagacagacatgatttaaaatgtgctgggaaagagagactctatgtttgcatgtaattggtgctcagtcatgttaggtctttatcctaaattcttatatgttacacacaagtcccaatcctgaattagtaaaagtgagtttaggtgctgggatgatgtggtcaggaagcagcctggaccacagtcctgaagggggtgcattagttacagattgccttggtggcttaaaacaacctacattcaccatctcacagttgctgagccacaggggtctgggccttacaaggctccagtgaaggtgctggccaggctgaattcgtgtctggagttggggtcctctttccag

SEQ ID NO: 491046 - DNA, 477 bp, Homo sapiens
  misc_feature (1)...(477): n = A,T,C or G
ataaaagtccaggccttctagtgtaagaggactacatcaagtagaagaggttaacaacaaggccaggcctcccctccaagattttttcttagataatatttcatcagtgtccaacaatgcaaactgctcttaattatactttgtaagcattaaataaattttaattaaaatagaaacagtcataatagagcatcttaaggttataacaaaagctataaaatgaaatgactgagtggtgtttacatgggaagtactawgccttttcaacagattttccccaaaacacgttagatatcttggcccagaccttagggacggtgtgggtgagagtaatttgaagaggactgcntcaagttgnagaggctaacaacaaggccaggccttccctccaatattgtttcctagatgatattttcaccaccccttactgaggacaaagtctatgatcatttaaggacctaccaataacgctgctaa

SEQ ID NO: 491047 - DNA, 477 bp, Homo sapiens
  misc_feature (1)...(477): n = A,T,C or G
ataaaagtccaggccttctagtgtaagaggactacatcaagtagaagaggttaacaacaaggccaggcctcccctccaagattttttcttagataatatttcatcagtgtccaacaatgcaaactgctcttaattatactttgtaagcattaaataaattttaattaaaatagaaacagtcataatagagcatcttaaggttataacaaaagctataaaatgaaatgactgagtggtgtttacatgggaagtactatgccttttcaacagattttccccaaaacrcgttagatatcttggcccagaccttagggacggtgtgggtgagagtaatttgaagaggactgcntcaagttgnagaggctaacaacaaggccaggccttccctccaatattgtttcctagatgatattttcaccaccccttactgaggacaaagtctatgatcatttaaggacctaccaataacgctgctaa

SEQ ID NO: 491048 - DNA, 484 bp, Homo sapiens
gtggctattagaaaagccaactaacattatattcattttacaggcagaaaaaaataggaaaagattccatctcttgtgcatggcaaaccaacatgaaaaatgaaatcccagcttcataattcaccatatactggtcccagaggtgggcctgttagtgatgctttggaggagctcccaaagasaaaccccacgacagtggcagcagcaggaacagcagtggtcttctcattagttcgggtgatgatttgccagggaacacggaggctaacacatgctactctagtgagatattgacggtgtgaccctctgttcagtgtgtaccccaatgccatatgctgcaaaatcaaggcagatctgagaacatgttactgctgggaccagggatatgggttcgacaccactgctcacaccatgccaggggactcgattcaaatgctctgggacacaatacactgtgactgatgctccctgtcattacacaaac

SEQ ID NO: 491049 - DNA, 484 bp, Homo sapiens
gtggctattagaaaagccaactaacattatattcattttacaggcagaaaaaaataggaaaagattccatctcttgtgcatggcaaaccaacatgaaaaatgaaatcccagcttcataattcaccatatactggtcccagaggtgggcctgttagtgatgctttggaggagctcccaaagacaaaccccacgacagtggcagcagcaggaacagcagtggtcttctcattarttcgggtgatgatttgccagggaacacggaggctaacacatgctactctagtgagatattgacggtgtgaccctctgttcagtgtgtaccccaatgccatatgctgcaaaatcaaggcagatctgagaacatgttactgctgggaccagggatatgggttcgacaccactgctcacaccatgccaggggactcgattcaaatgctctgggacacaatacactgtgactgatgctccctgtcattacacaaac

SEQ ID NO: 491050 - DNA, 644 bp, Homo sapiens
tacacaactaaactacccaacatgcaagtgctgcaaggtggggatgttgccctgtgccccaagttacagcccaggcaaagcgtgacctgcagtagggtggattgggtgagggytattcctatgcatatttgagggtctaaggaagagaacatggaagcctgggcctctcttctccccagaagcaaatgcctgagtgaatttctcattgagctgaagtcaggccaaatctgcttccacacaggtgttaggttattctccctgttggctggaaattcgattgcggttgatttaaaatcccgacacctgtgtccatcacccgagcctctaccatgattactgtccctataaagttcctaatccctgtacttacacagcgtccttaccctctgacaggccagatctatgtgagcagggagatttggttattatgtagaagagttataagaaatatgactgcaaaagccaagtcagttgaaattggactataattaaatgcttagaaaattctatgcttggctcattttaaaatcaagtgcttctttgtagcaatttcctttctttaattacaatttcctgtctagttcgacatttacaatgcaatcttgggggacatgtttgtgatttattattcctgctcctatcag

SEQ ID NO: 491051 - DNA, 420 bp, Homo sapiens
gggcagatgtgggcgctgggcatttgggatctgaccacaggcctaattaaggcagtgtttcctgaagccacagccacccacarccaagtcgattgtactgctttccccttagggtggctcctgcaaggttcagttctcaaagctcttgaatggaggctggggccagtgagcgtctctggtttctcagggcctagaagagatcccaagcactgctgtcgctggaacccagtagctggagagcagacctctttccctccctccccttcggaaggagcccagtgcataattcagggaatgcataatgcatggattccagtgtggaacaacttttaggtgatttgtaattagatttctgctatagagtctgcttcataattagaaaaagattacgtagagcttcctagattctagagaaggaag

SEQ ID NO: 491052 - DNA, 429 bp, Homo sapiens
gcttctgaggggcagatgtgggcgctgggcatttgggatctgaccacaggcctaattaaggcagtgtttcctgaagccacagccacccacagccaagtcgattgtactgctttccccttagggtggctcctgcaaggttcagttctcaaagctcttgaatggaggctggggccagtgagcrtctctggtttctcagggcctagaagagatcccaagcactgctgtcgctggaacccagtagctggagagcagacctctttccctccctccccttcggaaggagcccagtgcataattcagggaatgcataatgcatggattccagtgtggaacaacttttaggtgatttgtaattagatttctgctatagagtctgcttcataattagaaaaagattacgtagagcttcctagattctagagaaggaag

SEQ ID NO: 491053 - DNA, 624 bp, Homo sapiens
cgtgtgaagaattggctgtgggtaccagacatcatgccatgctggcagtgcatcgagagacggtgatggctgtggaaatgcaagatgcaggtgggatgaggagcaagagytggcagggaaaggggtgagggggatggaagtctgaagacgacacttagtttctggccagagtgctgggtggatgatagtgtgggagggaggaagtctggggtgagggtacaggggccaggtttggggaagaaatcaggaatcctgctttggacctgttgtttttgagctatgtctgagactttctagagacaaccaaagaatggaaagaaaatgccaatacccatcctggagaaggagaacacattacagataactatgcaattaacgtaagcctcattccaagtgacaaactccagtgagcacatgcagcttctgatgtttctaaattccccccactaaagaaccacagaaaattatgtgaggctgtgagagcagactgcatctacacctgctccagaatcactatgctccagaattacatccaggccttcctgcaagctctctatgatctgagtgtttgtgtcttcccaaaattcttatattgaaatcccaacacccaatgtgatagtgtta

SEQ ID NO: 491054 - DNA, 598 bp, Homo sapiens
gccgtgtgaagaattggctgtgggtaccagacatcatgccatgctggcagtgcatcgagagacggtgatggctgtggaaatgcaagatgcaggtgggatgaggagcaagagttggcagggaaaggggtgagggggatggaagtctgaagacgacacttagtttctggccagagtgctgggtggatgatagtgtgggagggaggaagtctggggtgagggtacaggggccaggtttggggaagaaatcaggaatcctgctttggacctgttgtttttgagctatgtctgagactttctagagacaaccaaagaatggaaagaaaatgccaatacccatcctggagaaggagaacacattacagataactatgcaattaacgtaagcctcattccaagtgacaaactccagtgagcacatgcagcttctgatgtttctaaattccccccactaaagaaccacagaaaattatgtgaggctgtgagagcagactgcatctacacctgctccagaatcactaygctccagaattacatccaggccttcctgcaagctctctatgatctgagtgtttgtgtcttcccaaaattcttatattga

SEQ ID NO: 491055 - DNA, 653 bp, Homo sapiens
ctggttcctggagaatggcaagtgatggcctgtctctctcctggacacctgcactgaactctctttggtatggaagttctgacttccctttttggtgtgacagccagactgagggtgagagggaagaagagccagagactgatgggatgtcttccccatccggggtgtcctgcagcacagttcttggcacacagtggggtctcagttaatatttattgaatgaatgataaatgactctggatactctggccatgtttggaaggtaatttttccatttgttgctttcttccatccagatgatgctgttggcacccaggctttatgaagactatgctgtctgagcagaccccaatggccagatgagttctaccttgttaataccacaccagatcaattatggcagagccagagttctcctccaccccatcccaggaggtggtatgccgttatggaaggaattcgggactamgaattaataaggactgatgttctggttccttcatcttcatggacttgttgaataaatttggaaaggtcacctacccttgagacttcagtgccctccagagatgataatctctgcccctatagagttatggcaagattaaatgagctaacaaattggaagaactttgcaaatcataaaacatggt

SEQ ID NO: 491056 - DNA, 517 bp, Homo sapiens
tgactttgggcatgtcacccaacatctctgaggctctggtcttcatctacaaatggggagaacatcacctacttctttcccactaacctgagccctccatgagaacagagactgcacctgactctcctctgtgtcctccttgacccctgcgaaggggctggctcaagaaattgccgatataataagagcctcctccaggtcagagggacctcacagctccccaggaaaacatctcaccttattttaccaaaatcctagtaataacatctctcttggtgcctcctcacatccctccaactactcttccataaggggcttggggttacctctttcttccttggagaagtgggggaaaaactaggggactgaggctgcggcagggcctggagcccttgggggtgttgggccagcagggcttggtttggagaggggccagagaggggtttgctttccttggcaggggacggatggggtagaagagtgtacctaggrcaagggcccagcagtgagacctttg

SEQ ID NO: 491057 - DNA, 508 bp, Homo sapiens
tatgtagctggcactgaactaggcacagtgaggtgatgctgcccagtggggttagatctcacttgtgctttagttctcatcyaatgagagctcagatatgtctaaataaacaattgtgatgtcagtaacacaggcagaaacagacccaaaggaaaatagggaagcttggttacagttgaaaaacccttagtcactttgacacatctgctctttacactggtattttcttggtttaagtgacgacatactgaaatgactgggtcaaatcaacaaatcagatattgcaaaaccagtatttttccaaaaattgactgtatatataaagtcagccagtgctgacttcgtatttttagatagtaagtgcagaaatataacttcctcttctttctgtctctagtttttactgttgacctatccctatgctcctcaactggacgctagtctcttgtaggaaataaatctctttaagaaagatgaaagaggttggtatgtatgccaggcacttgct

SEQ ID NO: 491058 - DNA, 508 bp, Homo sapiens
tatgtagctggcactgaactaggcacagtgaggtgatgctgcccagtggggttagatctcacttgtgctttagttctcatccaatgagagctcakatatgtctaaataaacaattgtgatgtcagtaacacaggcagaaacagacccaaaggaaaatagggaagcttggttacagttgaaaaacccttagtcactttgacacatctgctctttacactggtattttcttggtttaagtgacgacatactgaaatgactgggtcaaatcaacaaatcagatattgcaaaaccagtatttttccaaaaattgactgtatatataaagtcagccagtgctgacttcgtatttttagatagtaagtgcagaaatataacttcctcttctttctgtctctagtttttactgttgacctatccctatgctcctcaactggacgctagtctcttgtaggaaataaatctctttaagaaagatgaaagaggttggtatgtatgccaggcacttgct

SEQ ID NO: 491059 - DNA, 610 bp, Homo sapiens
ataatcctaaaaaaagaagtcaacatatattttgaatatcacccacaggaggtagtcttttgagtgactcccttaagaaggactcatactatttcgtatataaaggggctgacacagacccagtctgggaaatgctgggaatggtttcctcaggcaggtgacatttgaactcctttttaactgatgactatgacttaacctggtgaaacacagtgggtagaggagagcacattcyagacaaagcaagcagtacaggcaatggccctgcagcagggctggtgtgcctcgtgcacatagagattatggtgaaatatgttgctaaataagaccagaaaggtaggcctgaggccagatcaccccagctcttttaggcctgaagcattttggtctcaattttaaaagcactggaaacccactgaaaaaattaagtgctagactagagaagaagtgggcttgtgtgacattgtcagatttattgagaaaagttcactggggctgcagcacacacacacacgcacaaaagactggcaaaagtggctagtggaagaccaattagaggacaaatgtgctgaagcacagaaacatgattttttaaaaatcctacttggcg

SEQ ID NO: 491060 - DNA, 696 bp, Homo sapiens
gaggagaactacataaaaatgacaattataaatctaagttgatgggcatacaatctattaagatgtaatttatggcaataacaatataaagatgggatgcatgctatatgtatatgagcaaattttttatattattaaaattaattggtatgcatttgaactaaattgctataaattaagatgaatattttaatctccagaggaaccactaagaaaataactcaaaaaattcagtgaaagaagtgacaaagaaattaaagaaaatatatatttaatataaaataaggcactaatagagaaactgaaaaacaaaaaagacataagacattgaaagcaaaatctagcatatgaccatcagggtaggtggtaaagagtatggggaaaatgattactaaaaatgaaaactttaagaaatgaacaaattgsgatgttagatattttctcccctaacatggcagtgaaggatgaaaagcatctgagaggagatgaaggtccggaatctaaagtctccactgggtgtagaagaatgatagcagaagagaaggtgacatcaacaagaagagaaagagaatgttctagccccaaaggtgtaggtggacagtgacaaagttagggactggagccctgaagggaagcaaggaggacatcactcataagtatggtctgtgtgatgtgagaaaaaaataagcttctcaa

SEQ ID NO: 491061 - DNA, 635 bp, Homo sapiens
ctgtctaaaacatgtaaatctgggtgcggtggttcacgcctgtaatcccagcactttaggaggccgaggtgggtggatcatctgaggtcaaaagttagagaccagcctggccaacatggtgaaaccccatctctactaaaaaaatacaaaaattagttgggcgtggtggcacatgcctgtaatcccagctactcaggaggctgaggcaggagaaatgcttgaacctgggaggcggaggttgcgtgagccgagatcaygccactgcactctagcctgggcaacaagagtgaaactccatctaaaaaaaaaaaaaaaaggaaatcctttctcttatagttcagtgaaatatttcaaggtatatgtcatcttctgagtaactgataataatttgagggaaagtattgtgctaacagacatcagaattataatttagtccttaactatcagtttcagaaatttcacttagacttaacgcatctcaacatgcatccagtgtgtttaaattttcaaatctactaatttccttggagaaatggcttcataaaaaatcatgttgaattatgcagcagacatatgaaacttacagtcttcgttttaaaaattcataagtaatattatttttcaatcagaataat

SEQ ID NO: 491062 - DNA, 642 bp, Homo sapiens
tatttagggtaggcataagctaccacaatcaaatacataaattgtaactagatagtctcttctctttgtatagttagatggagtatgaaaatctattggaggtattgtttaaagtacaaccttacatgaataggctaaaatttaggcttaagatgcaaagttaaaatatagtaataagaagaaaataacattaattatacttccacagcagaatacatagtgattttgcaaagctgaagttaaaaggaagagagggggaaacaaaaatcaaccaatgatttttagttttgcttttatcataaatttcacagcatgatattgtttcattgacatatataaaataatactgagggcatcagtatyatgttaaaaggaataggacagcatcctaactaaagccagtgaaaacatttgcttcaaaaaggcagttatttgtgccataatagtaataatatgtcattgtctagagtgcactcagaataaatggctcagcattaccaattatacatcttgacttggcagcctgtagttttattgttgtgggagggaactacgctcttcatattcacttgacaaatgaactctaccatttaaataactattgaaacactgcaataaaatgaagacatacagaatagtgtg

SEQ ID NO: 491063 - DNA, 587 bp, Homo sapiens
atttccttctaagaactcagcaagaataaaaccattagaaacaatttactcaatatacatattatgctttttcattcatacattgtgatctccctagataccaaaaataattttgtgatcatttctctttgtcacttatgtctgcagaccttggatgctcatttttctacatctgccaatataacagagctttggaaaataataaacgctgtattactacctttcygattagcagcaatgtatgtattaaatttaaactcttgttatatgcttcaaccaaataggggattagctcagtataagaataggccaattcaaaaagtggccaatttaccagttttctataaaatgtgttattttaaaactttatttttattaccaaaatttgtattaaattatataataatcaggccagtcgtggtggctcacacttgtaatcccagcaatttggtaggctgaggccggcagaacacttgaggtcagaagtttgagatcaacctgaccaacatggtaaaaccccgcctctactaaaaatacaaatattagccaggcgtagtttgggaggctaaggcaggagaattgcttga

SEQ ID NO: 491064 - DNA, 585 bp, Homo sapiens
ctgcaaaaaacccaccattgccttcattgtgggcaaactgctagggatgcttccactacatcacagtgctccctttatgagggcccaagaataatacctcctgtggctcagggcctggcaaagctattcctcctgcgcaactggtatgttttcatcctgtagacaagattttctagctgayttcttctttgtcttaactatcagaaagttagaaccagacttggggttctaccttcagctttaggtgctttttaattattatcttctataattcctttactcagcacaactgttctctgtgagtgatctaaaatgcttttctgaattaagacaagaaataattaccttaacctaggctggtaccatttagaactaaaaatgctagattttaaatgcttcagtttattctttttatgataactttacacacaggccaaattctttcactctaaactagtgctatctagtagaaatagagcatgagccacatgtaattttaagtctttagtagctacattaaaaaggtaaaacgaaataggtgaaattaagacaatttagtctttggaagcctactgtatatcttct

SEQ ID NO: 491065 - DNA, 617 bp, Homo sapiens
gactagaggttgatggtattagctgattattgaaatttcaaatgagataatygtattacagctctattaaaactatatgcaagtgtgatttgccctaaaattggggagtgggcagactaggcacaccaaaattagctatcttcagaattttcataagaaatgttaaacaatagtaataaaaaaaagcttacaactagatccaatgtaccaacatagacaatcattggttctttcaaataagattgtgcgaggcgatgaactgaatgaggccatgtagcactgggaatacaagttacaaacattacaattttgttgtaaaaacattactatgtttccttaagcatgctatgaaccaagttactcatgaaagacaaatttagtacttattttttcaataagtaaggcaaatttaacagttaattcactaattactcaactactgtaaagctattagatgaaacaaatatgtttaataaataggtttttggctgggcccagtggctcacgcctgtaatcccagcacttcgggaggccaaggcgggtggatcacctgaggtcaggagttcaagactagcctggccaacatgataaaaccacgtctctactgaaaatacaaa

SEQ ID NO: 491066 - DNA, 633 bp, Homo sapiens
atgtccttagatacactctttgtgtttttgtttctccatctgaaaataagggtaataattgtagtacctcctgaagttgtgaagatcaaaggagttaatatgttaaaggcttagaaaggcatctggcaggtggttaagcactcaaacacagtcatgcactgccgtgtaaggatgattcagtcaatgatggaatgcatacaattgcctacagtattcagtatgataacatgctgtaaaggtttgtagactaggarcaataggctacaccgtatagactgggttgtagcagtttataccatctaagtttatgttagtatactctatgatgttcacaaaattacaaaatggcctagtgacacgttaaacaagttttgtttttgtatctaataggtattaccagtgtaactagtttttattgagttggatttggctcagtgcatgcaaaaaaacaaaacaaaacaaaacaaatctcactattcaccattcaatttgctcagtcaaattactcttccacatctcctaaatgaaatctcaacgaggtttcacagccttttttgtgtgtgtgtgtaggggtagggggtgtggggttcactttcagaaacgaaaatgtccagcacagtttcatatcagcca

SEQ ID NO: 491067 - DNA, 623 bp, Homo sapiens
ccaagaatctccattccaagtatacatttggaagctgagaaaatgatcactaggtgggttatggacccagtgtgcccactgtgagctagatcttaggactccatttattacttgaccccatatgtcctccctctaagaggagtggcagatgatgctgaatctacatgtatcattgtcaactgggaccttgtgtccaagagtctatgatgtttggctatttctcttttcccagtgtatattacttgaagtaaatgactgtaggttcctttgtgggaaggaagagggaaccattactatgtactgccatagcattgccaggtccttcctcctggggatctggcctctccttcagtcattsagtttcagatctggaaactggcgtatgtctggaaactgggcaagggagcatgagactactgcttccagcctaatcatctagccttgatttctttgatgtacagattgaatagtacccttgttggctgcccaggtatttttccttagtcatttaataaccctctagtagtcaggtccctctgtgaagctgacttgccacttgttatgatgattgtgtctttctggcatctgagggttaagtggccttgactggcctttgggggata

SEQ ID NO: 491068 - DNA, 177 bp, Homo sapiens
gctcggcttcctcatttgtctttctcatttgctgccratggccacccacacctggcactgggtgggagatctgaatgagtgggcgctcctaagcttctcttccataggtgcatgggttagcaattcggaaacaactttctgggtattttagaactgggcaaataagtaacctggagc

SEQ ID NO: 491069 - DNA, 552 bp, Homo sapiens
gctgtaaataagaaaaaacacgagagtaaagaattctggggtgggactgccatttcaaataaaatgttcaggcacgcctcattgaggttactgtgagttccataaaattgggggctggatacaagaaaaatattaattaaaaaaaatataggaagttactttgagcaaaggtatgagggaggttggaaatgaagtaggtgtatatttgagataagaacactttaagtagagaaaatagccatgcaaatagaatgtaaatgtccaatattacatatgcttagttatttaatcaaaaacctaccagcagcacaggaaaatataattctgtagacgtgcactacttaccccactaggactctacatagagtagacactatacaaatgtgatctcttttgatactagcttaccttttaaatacattcaatacagtgactattttaactaggcacaataattgaacttaattgcattgtctyataggtggaaaaggcatggggggctgggaaggtggaatccgcgtcccaggaattgtccgatggcctggaaaggta

SEQ ID NO: 491070 - DNA, 587 bp, Homo sapiens
ataagacagcgtggtgagcagccaggttctagaaagcaaagagaagtaggcatcaacaacctgggaggagcactgctttgatccccccagaatgtgccagaccattaatgaagtatcttatttccttcttaattcagcctcatgatttaggtataaacacttgtgtgagattgcccagagctgccataaaaatcaccataaacttggtggtttaagaaaacagacawtcattcttccacaattctggaggctagaagttcaaaaatcaaggtgcttcctccgaggccctgggtagaatccgtccttgccaatccttgaaattccttggcttgtggacatatcactccaatctctgcctttgtcattacatgaatgtctacgctctgtgtctttaaatctctctctccttatagagagagattatagtcatatagaatttagaacccaccttcatctactatgacctcattttctcttgatggcatctttaaagaccctatttccaaataaagtctcatgtgcaggtaccaggatttaggactttaatgtaaccttcgaggaggtcataatttaaccctttgcaccct

SEQ ID NO: 491071 - DNA, 636 bp, Homo sapiens
gttttctaagcacatatattttaattacaactagcatgtgtgatccgtgctactcattcatcccccagagkgtgaacataaatggagaacctagaataatccaggcactggtctaaagttggagaaaagatacgtagtttcttctgtctcaagaccgtgttcggaggatgagtaaagcaacgtgaattagagttgagatgggccaacaataaataatctcaaaaggcttggctgaaagcagcacccgcacctcagatcttggctataatttagctaaggaagcagtgtatttagaagcctacttgcaatgattttttcaaatccaaatcttttatgaaatttgacttgggtggtacagggattcaagagcaaatcccaaattggatggacccacaaatggtaaagactcctagggttagggttatagggttttccttactcagatctgcaaatggcctcagaagccctgcctctggctggagcgggtttccttagcagtgttgtaaaaaaaagcgggagatacaggaagtacacattgcatggaagcacagtttgtatgggtggataccttggggtgatgttatggggcgatgattagttgcccggccacctcttggtgagggtaattgggcaatg

SEQ ID NO: 491072 - DNA, 516 bp, Homo sapiens
cttttgttgttgttttttgttttactcctctgatgctacaaaggctcgaatgtatacttcttttaaggtgccctggctcatgcctgtgggccgaggtactcaggaggctgaggcaggaagatggcttgagcccgggagttcgaggctgcagtgaactatgaatgcacgactgtactccagcctgggtgacagagtgagaccctatctcaaaaaaaaaaagaaaaaaataaacaagatagtgcatttcaatgaaagaacattctcttaaaacggaatagaaaacactttcgatggatgggcagggtggctcatgcctataatcctagcactttgggaggccgaggcaggaggattgcttgagcccaagagttagaaactagcctgggcaacatggcaaaacgctgtctcgaactcctggcttcaagtgttytgcccacctcagcctcccaaagtgttgggattacctgtgtgaggtactgcgcccgtccagataccttgtctctacaaaaaacacaa

SEQ ID NO: 491073 - DNA, 489 bp, Homo sapiens
ctaggatggaatatttaacgctcactgagagcctaggcagcaactgttcaaggcacttttcagcagactctgagagacacctggaaatgctcccatgaatgatttgggtcactctgaacctgaaaatctaaaccatgtcctaacatttcctattcatattgattatagccacgtggacaccatcagagaagctaaatcttttcaaaaatttaaactttcctataagagggaaatagaaaaatgtatgttttatttattgcataamctaattcttttacctgcgggttttcatttcatccctggagtaagttatcaacggtttgcagtggaatgaggaaacacatagtattctttctgcagcatctgtgcatcattcaacctgtggcatattttgagatttgacatgatatccaatattgccaaagagaaaccgctaagatatgacaccatcattatcctaaacattgagggaaaacagtttcaattagg

SEQ ID NO: 491074 - DNA, 642 bp, Homo sapiens
cctttgaatggccacagtgggccaggtgggagatgggccaggctctggagattcttcagaattgagtttaaaaggaggatgaattggcaggtggcagttgaattatagagtcctactctcttgttcrtgtcagcagcaagctattcttctttgtctcagagacaaactgcaggccccaggcctatcaaaaacagtgacatagaaccataaagatctcggtggaggaaaaagaaacaatgcttcttttccttatggaagtgattgctgatcaaatcaccctgtttaaataccaaggcaaaacaacacagaggcaaaaacttctctgcatccttaatcatttgtgggactgtttctcttcaacactagccctacatttctgcaggatgtggtacttttctttattattttccctttaagtcaaactctggtgcagggcctctcagagtttagtgtgcatacaaatcaccttgagatcttgttaatatacagattctgagtcaagaagcctggactggggcctgagatgctgcatttctgtcaagctcccaggtgatactgttgctactggtccaccaccatattttgatagtcaaggctccagtatatttcaagcatggctgagtcactgcaattgttagcatt

SEQ ID NO: 491075 - DNA, 599 bp, Homo sapiens
aattctacgttgtctagcatctccccaagtaaacaatgtgttctgtaatttatccctgactctggtccagatagaaatkaaacaggataacttttagaggcctgatacagcagtatgtattaaccaattaaagtagttcgaggcaataaaagttgcccacaaccatagagactggccatcaaatgtggagcctatgtaattactaaaatatcttgtttcatctgggaaagcaatttaggaagtaaaacaattaattaagatgaacagtcatctggttatctaaagtcagccaaaatgagtcttagagacagagttttgctctgcctcccaggccaaagtgcagtggtgtgatcacagctcactgtaacttcaaactcctaggctcaagcaatactcctgccttggcctcctaaagcactgggagccaccatgcctggccagaactgtttttttggttatgcctaggtgaatcaaaaaactgaaaccaagtaagtcctaaatgtttcttataatgtcattcatatttcttgcctttctccactatttgatttgcaattactttaagatgctacgcagccattatcctgagctgacatgca

SEQ ID NO: 491076 - DNA, 574 bp, Homo sapiens
ccagttactgactctaaaactgagatattaatcactgtatttttctgctttgacgttatttctgaatcaatggtaaatcagtctgctaacctatgctattatcattatatacttgtccatttatactttgcttgatttaatttaatttttgaatttatatgcagtaaaatggtctttttttggtatacagttctatgatttttaacacaggtataaacttctgtaacatttaccacaatcagaatacacaacacatccatcatctcaaaagctctctggtgccatccctttgcagttaaaccttccccttcccatagtccctggaaactgctgatctattctccatcactgtgtctttctcttttcaagagtgtctaatctaaatggaatcatgccatatgtaatcttttgagacagtcttctttatctcagtacaatgtctttgagattcatccaagtttttgcaaatatcattmtttttttgagtagttttccattttattgatgtaatcccttcagcttatccattcaccagtgggtgaacatttgttttttgttttttttttctccagtt

SEQ ID NO: 491077 - DNA, 574 bp, Homo sapiens
ccagttactgactctaaaactgagatattaatcactgtatttttctgctttgacgttatttctgaatcaatggtaaatcagtctgctaacctatgctattatcattatatacttgtccatttatactttgcttgatttaatttaatttttgaatttatatgcagtaaaatggtctttttttggtatacagttctatgatttttaacacaggtataaacttctgtaacatttaccacaatcagaatacacaacacatccatcatctcaaaagctctctggtgccatccctttgcagttaaaccttccccttcccatagtccctggaaactgctgatctattctccatcactgtgtctttctcttttcaagagtgtctaatctaaatggaatcatgccatatgtaatcttttgagacagtcttctttatctcagtacaatgtctttgagattcatccaagtttttgcaaatatcattakttttttgagtagttttccattttattgatgtaatcccttcagcttatccattcaccagtgggtgaacatttgttttttgttttttttttctccagtt

SEQ ID NO: 491078 - DNA, 439 bp, Homo sapiens
caaaccgtagatacataatccaagacagcttaattttcygtgcccacacctgatatggagaagatgtgaggggatttgttatttcacactatgctttggttctgtgcctgcattttgcccccttttgagttggtatgctggtgctgaatttcctattttgtgattaactgagaaactccataaaaagccactccaagaaattttcccaagacttcatgcaggatctgccttggggccacacagcacgtttccccatctagatttctggagcagccctggctaggcccctgtctccagttactcttgaaacaagagattgggctctgtcctttctgttaagtgggaaagtgaagggtttgcctctctgtctgcagaaaataaaacaaggtcatgttgtcatataacgaagtttattcacacaaagttcaacaatcattaa

SEQ ID NO: 491079 - DNA, 427 bp, Homo sapiens
ccagcatttcacccctccctgccttgtcacctgacctctttgttggcctggtccaccctgcctgacttactcactctaggctcatcacattcattatctgaagcttccaattcaccttaggggtttgcagttaaggtgtttctgtaatttggtgtgtttcattttaggtgtctcatttaaaaacacagatttcagggaatttaaatgacatggctaagccagttacagaagacaggaaaagacaggattcacagatactgttttctaagccrgtgtcttcctcctcctccacgctcctttccataaaaatgatgcctttcaccagagaagtgtcgtggccgtgatgagccacttaacctccctgagccccaatttcctcatctgtcagagggaattatgagttctgtcctgcctatcttgtatggca

SEQ ID NO: 491080 - DNA, 608 bp, Homo sapiens
ctgactataatgtaaatatgtatagaatcatatggaagcatacaagaaaaagcaatgatttacttgacagacaatggaaatttcaaagcaaaaaagtatatttcatatggttattaggggatgagcacaactttgtcaagcagacaaaggaataaaaaattgcaaataacaattattgagctcattggtgccagaaactgtgctaagccctttccacagatcatcttatttaatcctctcaatagccccaatgaggaagatgttttgattatctttacccaacagatgatgaaacaggcttagaaagatgagtaacttgcccargagggcattccaggcatggagaaacatgcatgcaaggcactatgtgtgaataagtaggaggaattagggaaactatagcagtttaattgcttaggatgcaatgcaggaggaatcctatgggaaaaaggcaagaagttgagataaggaccatatgtgcaaaagctatatctagagtttgaaataaatctattaggcagcatggaatacttggataattttccctctcttccaccattatgtttatagtataaggaagaggtggatgctccccacctccatagatc

SEQ ID NO: 491081 - DNA, 521 bp, Homo sapiens
catgatgctgagatatgcaaatatagccaccattactctatctatccaacagatcatttttgataaaggaacatgttttaccaggggctacaatccaggaagtttttctcggcgttggaggaagcatgaagactggaagcctattgagggaaaggcacagaacaaataggtttaaaatgcaagacttccatttaaaagataaagtaacttgggcttttcagcttcaagggtgatctaatagaggtctcatggaggtaaccagatattttccatttacttagagtggtacttcttttaaatgggcctaacctacttcataagggtatatataaagacaatttgggggatagtcaagtaaaaataagatttaagcaaataatatgggaatatgttttgtaaaactctgacagtgcaataatcctttttggctagggttcaacagggccctcttaaatgaaggatatggttcatggcctccyatgtcccttctaattgacactatccataaacactcatgaatg

SEQ ID NO: 491082 - DNA, 477 bp, Homo sapiens
caagaggacatgggaacactaagagatgccccagagaatcccttaagctccakccattttgctccctgcctcgaccatatggtagcaactcaattttctttggtaatcaggattaattttcctaattagcagggattccactctttaccaagatggctaggagatagtctcaactggcaatgcaattgaactaatgttgtatccccacatagaagcattccttccttggaaacaaagtcagaaaaaactgctgatctgaacattctggggataagaattagaaattctgtaggtaggctatcaaaattcatagtgagaagaacaatttttgcttctattcttgattctggggcccaggcatactggctgtgggagaaacagcaccatatactgaccactaattttattatttaagatagaacccagtgttttctcctcactgaaaaattaattcaacctttatttggtcattctgtg

SEQ ID NO: 491083 - DNA, 618 bp, Homo sapiens
cagctgcttctgggtgatggagtatataataaatcattgatggtacagctaatctcctcaatctcccttcctacyataagggacttcactctacaggtgactatatcatgtgtctgagtatttctgttctaattacatctctagcaactggaaaaataaccacaggagagtccattgactcacttggccaatggtgagacagacttgggcaaaatttcattgattgcttggacaccataaggccctagttgactagtggaccgtagaatttctttgggtcctcaggaataagcataatttcagagccagtgttcactgatcccccattgtctgagtacttgcctttctcaagtattttcctccctccttccccgtttccatagtcactcataaatggaagagttaagcgaatatttaaaaacagtaatacaaatctactcaactctcttgcttcttttatttttcttcatagcactgattgctactcaaattacatcttttttttgttgctatttggttatctttcatcttctttctttctgagtaaaacataagctccaggaggatggtatgtcttattcatcactgtttttccccagtgcttggaacaatgcctgg

SEQ ID NO: 491084 - DNA, 618 bp, Homo sapiens
cagctgcttctgggtgatggagtatataataaatcattgatggtacagctaatctcctcaatctcccttcctactataagggacttcactctacaggtgactatatcatgtgtctgagyatttctgttctaattacatctctagcaactggaaaaataaccacaggagagtccattgactcacttggccaatggtgagacagacttgggcaaaatttcattgattgcttggacaccataaggccctagttgactagtggaccgtagaatttctttgggtcctcaggaataagcataatttcagagccagtgttcactgatcccccattgtctgagtacttgcctttctcaagtattttcctccctccttccccgtttccatagtcactcataaatggaagagttaagcgaatatttaaaaacagtaatacaaatctactcaactctcttgcttcttttatttttcttcatagcactgattgctactcaaattacatcttttttttgttgctatttggttatctttcatcttctttctttctgagtaaaacataagctccaggaggatggtatgtcttattcatcactgtttttccccagtgcttggaacaatgcctgg

SEQ ID NO: 491085 - DNA, 618 bp, Homo sapiens
cagctgcttctgggtgatggagtatataataaatcattgatggtacagctaatctcctcaatctcccttcctactataagggacttcactctacaggtgactatatcatgtgtctgagtatttctgttctaattacatctctagcaactggaaaaataaccacaggagagtccattgactcacttggccaatggtgagacagacttgggcaaaatttcattgattgcttggacaccataaggccctagttgactagtggaccgtagaatttctttgggtcctcaggaataagcataatttcagagccagtgttcactgatcccccattgtctgagtacttgcctttctcaagtattttcctccctccttccccgtttccatagtcactcataaatggaagagttaagcgaatatttaaaaacagtaatacaaatctactcaactctcttgcttcttttatttttcttcatagcactgattgctactcaaattacatcttttttttgttgytatttggttatctttcatcttctttctttctgagtaaaacataagctccaggaggatggtatgtcttattcatcactgtttttccccagtgcttggaacaatgcctgg

SEQ ID NO: 491086 - DNA, 494 bp, Homo sapiens
attaactttaattcccaattttgaatatacttttttaaagaagaccctcaaaattgtayacatttctaggttcacaatgcctggatccaaccctgttactagggccacatcttacgcagcttcaaaatagctgagttgtcaattgaaatttgttgttagctataaaaaaaggaagacatgtagatttatgagttcctctgagtagcaagtacagcatttactccccaaaaggagtcattcacatataaaatcaaatcaatacatatattcttatcaaatgagactttcagcagatgtaaacatgcacaccaataatccctaacctctttattctgtcagaaggctgaaaaatattgtgcctggcaaagtttcctattcctgaaaattcatttttaattcctaaggaaggtttacattaatttcatctttgttttcctaccagctcctactttcatggaattctcttgggagaagctcctaaagtatccaggact

SEQ ID NO: 491087 - DNA, 494 bp, Homo sapiens
attaactttaattcccaattttgaatatacttttttaaagaagaccctcaaaattgtatacatttctaggttcacaatgcctggatccaaccctgttactagggccacatcttacgcagcttcaaaatagctgagttgtcaattgaaatttgttgttagctataaaaaaaggaagacatgtagatttatgagttcctctgagtagcaagtacagcatttactccccaaaaggagtcattcacatataaaatcaaatcaatacatatattcttatcaaatgagactttcagcagatgtaaacatgcacacmaataatccctaacctctttattctgtcagaaggctgaaaaatattgtgcctggcaaagtttcctattcctgaaaattcatttttaattcctaaggaaggtttacattaatttcatctttgttttcctaccagctcctactttcatggaattctcttgggagaagctcctaaagtatccaggact

SEQ ID NO: 491088 - DNA, 516 bp, Homo sapiens
tatggctataatggtgtctagtcatgtgatcctgattgtgctacatattccccaagtccctgcattctgaatggcagaaaaagtgtctggcccacctttatcctggctcagctggatttatgctgaccccagggaaacctttcaagaactgtggcaccaacatgggtattgtcctggtgtggcatccctcagagataggctcctaggaggatgcagttagcagcaatgaaggctataatgaagccaggggtcatgcagcttctgatgctctggktcactgaatctttgcttacgggatcccccatgaacatcaaaggtctgtcctacttaatgcttacatgcagcctgctgtggactgaattgtatcccttgacaccctcaattatatattgaagccctaatcccaaatgtgatggtatttggacatgggcctctgggaggtaattagctttaggtgaggtcatgaacgtggggccctcatggtggaattagtgcccataaaagaagagacagcag

SEQ ID NO: 491089 - DNA, 525 bp, Homo sapiens
ctgaaagcaagtgtaatcctgcatcaatcagtggacttggtgggaayggatcaataaatccccaaatcaagtgacatacacactgatgttagaaatgacctgagctccagaagatactcaagaaattctaggctgcagtaggataaatggggagagcatgtgattatctgaaatgtgcctctggaggggacatgaaaaaatagaccaggataactgaagtcattagcctgtgttcaaaatgttcctcgaatagaaagaaaaaataaaaaccatgggattgataaagaaacttatactaaccaaaagaataaagagaggaaaggatatgtcagtcttcaagacagatatacacatgtcacaacttaaatccaaatgtctatattcatatctacacaaggaagacaagtttagaatgaggatcttgtttacacgtcacttctttaggcaaatgactactttttttaagcaaaaggattttcttgccttcaaaaatgtttcagtgccatggagagaatgtaaactgtg

SEQ ID NO: 491090 - DNA, 550 bp, Homo sapiens
agacaaaattcaagtggtaggagctggctccagtgatttgtccactagtgacactcagagagcaagtgacacgtcagcagtgcctctcttctccaaattcctataaccctcttgactacacctctggggcctcagtgcatcctctgggtgcctcagtcctgggtgggtgtctcctctttcctctagacacagcctccttcgctcctattctcaggccccgtggtcagggctcaagcttctctaggctgaagagcttggagcctcaagttttccagccctgaaggtgggcagtggtcagttgctgaatggccaagcgtgtttaggtgagacaccgtgagatccccgtgcaagggcaatgcctgcccaagggatgaycctgccaggagggggctgcagggcaacgtggactcacccaaggtcccagagaggctgacgctgatcaaggctgccaggagcagcctggcccatgggctggggcgtggccctgccatcctcttcctcctgcagaacagcaacaattgacacatgaggcctccacagccatggtcgg

SEQ ID NO: 491091 - DNA, 601 bp, Homo sapiens
ctgaacaggggcacagggcagccagccccgaggccacaggcaagaatgctacagactgggggtttcctgttgggcaatgtaatcttgcatcttacaagtacgtggcagctagggaggcagattagtaaaatgactcctttcaaacctttattctctcagacctgggacagcccatggcctgatgagatctcacttcacgagcacaatagctccttaaaaacagatcctcactgtggcccacgagccttgaggattccctgctgcccatttcagcctcttcctcccctttctgcacccaggatctttgcaatgcctgctccctgaaatcaccttctccccactcctgcctagaaagccccgtgtaggcctcagcccagcccagggaagccttcctctaccctcatgctcacctggccgatgaagacaaactactctactctgtgtactcacaaaaatcaccaagtctaatagtcagcctggtccacagaaggtgctcaagcactgacctctctctgtctctctcacacacacacacacacacacacacacacacacacacmccccaaacactgtcagtttgtcttctgtcaagtttaggttc

SEQ ID NO: 491092 - DNA, 514 bp, Homo sapiens
aagcgtgtgcttgctgcgccaggcagtgggcacactccacccaggagctgctgagtgcagggcgggaggggacgaggggagcgagcccaacctgcagtcaatgagcagcgcgtggcctttctgtcccataagtgagatgaactggtccatgatgccacagggcatccctgcgaagctgtgctcggcctgctgacacacctgggcgcgggcagctattgtgcccgagtctgcagtacagggtgaggtggggaggctagggctggtggaagcagcagtggcttcaatgacactccagggagaktccctgccaccccctccataaggcatagtagaagctgggaccacctggagacctcagggaaggagggctgggtcagggctggggcctagctggtacctggacagagctgctggaggaaggtgtacgtggccacttccaaggatgctgagctggacaggccaccccccaggggcactgagctgaccaccactgcactgaagccagggagggggg

SEQ ID NO: 491093 - DNA, 515 bp, Homo sapiens
ccctggaggaagacagacggccagctcaacccatgaggtacctccagcctggccctcacctgacactcycggttccccgtctgatcctgctccaggctgcttaggaactgcatgatctttttggcggcttccgtcttccctgagccactgtgcccactgcagtgggaggagctaaggatgtgttggttggtagggtctccagggaggggcacataggaccaccccagtgaacccaggaagtgggatgtgccacccagaagtgacagctagcctggagagacccccataaatgtggaaagatagtcccagggcatggagagacccgacagaaaagaaaaagtccccaagatgccacattccaggggctcatgtgatgatttcagccaggagctcggccctgaggagtccagaactgtagcccagcagtggagcataccagtggcttccagtgaagacctcaggccccgccccatcaaccctcagtgtggcccatgggttcagccacccaggaaggc

SEQ ID NO: 491094 - DNA, 515 bp, Homo sapiens
ccctggaggaagacagacggccagctcaacccatgaggtacctccagcctggccctcacctgacactctcggttccccgtctgatcctgctccaggctgcttaggaactgcatgatctttttggcggcttccgtcttccctgagccactgtgcccactgcagtgggaggagctaaggatgtgttggttggtagggtctccagggaggggcacrtaggaccaccccagtgaacccaggaagtgggatgtgccacccagaagtgacagctagcctggagagacccccataaatgtggaaagatagtcccagggcatggagagacccgacagaaaagaaaaagtccccaagatgccacattccaggggctcatgtgatgatttcagccaggagctcggccctgaggagtccagaactgtagcccagcagtggagcataccagtggcttccagtgaagacctcaggccccgccccatcaaccctcagtgtggcccatgggttcagccacccaggaaggc

SEQ ID NO: 491095 - DNA, 368 bp, Homo sapiens
gctgcggctcccgcttcgccctcgcctgccgccgctggcacctgccccaccgcctttccgacctggtggcgcggagccgggccgtcgaggcctgcattgtttctggctcggcgccccgctgcgcccggttgtcgctcgcgtccttggccggcccagtgtcccgaggagcccgcgagctgtcctcgaaggtcctggaggccatagctgcccgagagccccgtccaggtccggtccccagcggactcgagtcggagtccccgccggaatgctcgctggctcccaggggccccgtccccgacgacccttcccggccccgggtatctgcktggggccagtcgctgtccaggccgtcgctgcttggctccagc

SEQ ID NO: 491096 - DNA, 523 bp, Homo sapiens
ctgtagcgcacctggggcttgagcaggggcagcgagaccacctggatgtcgcccaggttggtaaggactgccaggtggtgctccccgtagtcctcggctcgacgactgccgaagtgggccacgctgacccgccgcactcttgagccctccaggcgcgtcagcttcaacttcagcttggcactcaccttgggcagcgtgaacacctgggggcgtggggtggttgttcatgcccatggccaaaccagttctcctgccctgtgctgctgctgctgggccctcccctccccrcatgcctcccggtgtcctgacaaactcttggctctcagatgcacagacatggcctgggaggatgccgaggtcaccgacttccctgtctggatttttttttttttcctccgagatggagtcttgctctgtcgcccaggctggagtacagtggtgtgatctcggctcactgcaacctccgcctcaggcaattcttctgcctcagcctcccgagtagagctgggattacaggcgtcca

SEQ ID NO: 491097 - DNA, 523 bp, Homo sapiens
ctgtagcgcacctggggcttgagcaggggcagcgagaccacctggatgtcgcccaggttggtaaggactgccaggtggtgctccccgtagtcctcggctcgacgactgccgaagtgggccacgctgacccgccgcactcttgagccctccaggcgcgtcagcttcaacttcagcttggcactcaccttgggcagcgtgaacacctgggggcgtggggtggttgttcatgcccatggccaaaccagttctcctgccctgtgctgctgctgctgggccctcccctccccgcatgcctcccggtgtcctgacaaacycttggctctcagatgcacagacatggcctgggaggatgccgaggtcaccgacttccctgtctggatttttttttttttcctccgagatggagtcttgctctgtcgcccaggctggagtacagtggtgtgatctcggctcactgcaacctccgcctcaggcaattcttctgcctcagcctcccgagtagagctgggattacaggcgtcca

SEQ ID NO: 491098 - DNA, 523 bp, Homo sapiens
ctgtagcgcacctggggcttgagcaggggcagcgagaccacctggatgtcgcccaggttggtaaggactgccaggtggtgctccccgtagtcctcggctcgacgactgccgaagtgggccacgctgacccgccgcactcttgagccctccaggcgcgtcagcttcaacttcagcttggcactcaccttgggcagcgtgaacacctgggggcgtggggtggttgttcatgcccatggccaaaccagttctcctgccctgtgctgctgctgctgggccctcccctccccgcatgcctcccggtgtcctgacaaactcttggctctcagatgcacagacatggcctgggaggatgccgaggtcaccgacttccctrtctggatttttttttttttcctccgagatggagtcttgctctgtcgcccaggctggagtacagtggtgtgatctcggctcactgcaacctccgcctcaggcaattcttctgcctcagcctcccgagtagagctgggattacaggcgtcca

SEQ ID NO: 491099 - DNA, 583 bp, Homo sapiens
tggaaagggagggggtcccaggtctttccatcagcagcaaacccagggccaccgaatgccagcctctccacaccagccctgctggaagcagtgaaggcgaggagggcatggaagtggcttcctgtcccaccccaggtccctcacctggccgggcaggaggtggatctgcgtcacagcgttgttctcctggtgcagccccatgaactccacgcctggggctccgtagctaggagtaggctcaggaaagctctggaaggtcggacaccatcccctgcctgccttgagtgccaggccctcggggcccatgtgcaatgatgcaaacacagagaggggctgccctcccccgaggcagcaggacccatgcatggagcctagggtggggaggagacacagcagccctggccctggggcaccaggccagtgacctgatccctgggagatttttcccagtcaggccggtgggagcaactccatagaaaggcgaagccctaccctggcaactgtcaggctgccaccctgatcctgagctgcaaragacatgttggctgtcgcttggtagcacctgtgaaaaaacacacggcac

SEQ ID NO: 491100 - DNA, 635 bp, Homo sapiens
tttctgtatttttagtagaaatacatgtttcaccatgtttcccaggctggtctcgaactcctgggctcaagctatccactttccttggcctcccaaagtgctgggatctcaggggtgagctaccatgcttggctgcatttatcatttcttggtgytgggaatattcaaaatcggctcttctcactatttgaaattatacaatatattgttgttaattaattttaccctacactgctgtagaacactagagcttattcctcctatctagctgtaattttgtatctgttaaccaacctctcatgttcatcaaaaggactataactttttatacaaattctggcaggatataaacaatgggcatcagagtcttgactgactgtctcagtcgaattactaaatactcccattttttgtttataattgcttgaagtgcaactttaaatgcaaagccctcttcaaatggtttctgaaggatggttgcttcctttaattttctttacaaaatattgatcacctgttacttacaactcagagcatatggtggcattctgaagtttctgcctctatgatatattgtactgtttactccatgatagactattatttgctcaacatatttgctctgctgtctgtac

SEQ ID NO: 491101 - DNA, 439 bp, Homo sapiens
tttctgtatttttagtagaaatacatgtttcaccatgtttcccaggctggtctcgaactcctgggctcaagctatccactttccttggcctcccaaagtgctgggatctcaggggtgagctaccatgcttggctgcatttatcatttcttggtgttgggaatattsaaaatcggctcttctcactatttgaaattatacaatatattgttgttaattaattttaccctacactgctgtagaacactagagcttattcctcctatctagctgtaattttgtatctgttaaccaacctctcatgttcatcaaaaggactataactttttatacaaattctggcaggatataaacaatgggcatcagagtcttgactgactgtctcagtcgaattactaaatactcccattttttgtttataattgcttgaagtgcaacttt

SEQ ID NO: 491102 - DNA, 580 bp, Homo sapiens
gatatttgttgaattaccaatatgggccaagtacttaatctgtattatctccatcctcaagagggtgaaaaataagtgatctttctataaatgaggatattgactctctgaaaagaaatttaaccaaagatagcatagaattcaagcccaagaagggtgagtggtttctaagtgattacactatttatattagttatgagctctaaataagctctataatgactgggcacggtggctcatacctgttattccagcactttgggaggccaatgtgggaggatcacttgaggccaggagtccgagactggcctgggcaataaagagaggccctttgtctacaaaaaagtaaaaaattagccaaccatggtggggcacacctgtgtgcacccagctactcaggaggctaagataggaggaatgttgcttgagcctgggagtgatgkttgcagagagccaagattgcatcagtgcactccagcctgggcaacagtgtgagaccctgtctcaaaataaaaaaaaaaggctttataaccagtgtccgtccccccaacccccaccaactttaatgcatagaggagag

SEQ ID NO: 491103 - DNA, 521 bp, Homo sapiens
cttccaaaaaagtattcaatagcaatgacctaaagagacatttgcacaatggaacatctgaatccagaacatattaagaattattttctctgcatactaayattccttgtcacctagtgataaccgttgcatgtatctctctaagaaccccgatgatacagcccatatttgtcttgaggaaagcctttacatatgttttcaattcaagttatttgtagctaatatgtaatctgtaacatattaacaatttataaagatatcctaaatcaatttgtttgtcttgagtttctggactctcaggaggcaaaccgtgtttccatttccagtagagattactattgcttatgtacatccagttttccaacagtcatgtcctcataggaagattccacttcctttgtagttaggtggggtttcattactacttctagcaaattacatgtgccagaagtcatttatgtgtcacttgctgccaagacatttagaaacaaacgtgcctcttctatgtttccaactgccct

SEQ ID NO: 491104 - DNA, 521 bp, Homo sapiens
cttccaaaaaagtattcaatagcaatgacctaaagagacatttgcacaatggaacatctgaatccagaacatattaagaattattttctctgcatactaacattccttgtcacctagtgataaccgttgcatgtatctctctaagaaccccgatgatacagcccatatttgtcttgaggaaagcctttacatatgttttcaattcaagttatttgtagctaatatgtaatctgtaacatattaacaatttataaagatatcctaaatcaatttgtttgtcttgagtttctggactctcaggaggcaaaccgtgtttccatttccagtagagattactattgcttatgtacatccagttttccaacagtcatgtcctcataggaagattccacttcctttgtagttaggtggggtttcattactacttctagcaaattacatgtrccagaagtcatttatgtgtcacttgctgccaagacatttagaaacaaacgtgcctcttctatgtttccaactgccct

SEQ ID NO: 491105 - DNA, 619 bp, Homo sapiens
tgtgagggcttcatggagagtgagtttccaagtacacattcagctttcagtgaaatgaagaagatgaaaagaggagataagggcatttgctgaaagcaggttagaaatcccaaaaagcagtgggaagaaagtgagtgagggtrgtgggtggactgagtcatgcaaaggttaggacagataacatgcttccggatgtcctggctatgggggagtagagggggatctgtgcatctgacagtgtcgcagtcagtggaaggcattgcactgtgggcttcgttctaacgctccttccttgagggtggctttctagtctcagtagtgtattttctgaggctttcctcgtcatgtggagatgttccctaaagctcgtttgggacatatgacagagattgggaaatgatttccttggaagaaaaaaaaattaagactttatggacacgtgcattttagaaatgctaaacacctaataaatttcatccttaaacattctttggaatgtcaagtggttaaaaagcatatccaattttaattttgcttgaccccaaattttccaagatatttgatttcagaacacgttgaaggataatggcttccactgaactctctatgaaaaacattg

SEQ ID NO: 491106 - DNA, 625 bp, Homo sapiens
aaaaagtaattctgccaatttaatcagaggagaattaacaagacattaggaaatagaggcaaaataaaaacgggtttggaaggcacgtaacctgatcattagcagaagtaaaggtacttttctcaaacagaataacaaagtaggaagaagatataagctaaactgtaccacacaacaacctgcaaggaactactttgtgtaggattatgccggccagtcatcaaatgtgccaactcccacctggcattgaaatttaggtcaaaatgtcctgtttagtaggctgrctattatatgcacatttttactatgtgttataaaaaaaattaaaagtgattacagaaggttgcttttctagattcctcttatcgttcctacatccatgcaagtctttatagaaatcaaggaaaaccaccctagtcatgataacaaggaaaaactatcaccctctcatcccgcaaaactaatatcatgatgtcactacaaacagggaaataatccacacatgttctccccagtttatctgagtgcttcaaatgtgtagaaagttcttttctacatagacagatgaataaatactgtcttttccactggctatataaaagccattgtgtaaagctactgaaga

SEQ ID NO: 491107 - DNA, 625 bp, Homo sapiens
aaaaagtaattctgccaatttaatcagaggagaattaacaagacattaggaaatagaggcaaaataaaaacgggtttggaaggcacgtaacctgatcattagcagaagtaaaggtacttttctcaaacagaataacaaagtaggaagaagatataagctaaactgtaccacacaacaacctgcaaggaactactttgtgtaggattatgccggccagtcatcaaatgtgccaactcccacctggcattgaaatttaggtcaaaatgtcctgtttagtaggctgactattatatgcacatttttactatgtgttataaaaaaaattaaaagtgattacagaaggttgcttttctagattcctcttatcgttcctacatccatgcaagtctttatagaaatcaaggaaaaccaccctagtcatgataacaaggaaaaactatcaccctctcatccmgcaaaactaatatcatgatgtcactacaaacagggaaataatccacacatgttctccccagtttatctgagtgcttcaaatgtgtagaaagttcttttctacatagacagatgaataaatactgtcttttccactggctatataaaagccattgtgtaaagctactgaaga

SEQ ID NO: 491108 - DNA, 618 bp, Homo sapiens
catgtacaaataatatgctaggaatagaagcagttgaaaaaatactgatatatwtcagaaaagtgagtgaagtctttgtttaaacttcaactcagtcctacctatttaattatacaaaatgactctaaaatattaaaggtaaaacaacccagaagaaaaatattaaacttttatctacccacgcttaagggctcagattgctggatttgagatttagctctcattatacaaccctgggccaaactaaatctcagttttctcacctgtaaaaattgcataaaagtagtacctacatcaagggaatgtggtgaagattaaatgagttaatatttagcacttcataattagagctactattatattcccagtgtttttacttctgttatggtaacccctcccccagtaatgggaatattcttacaccaaaatactattggcttttgtgctatttctttattcatgtaaaattttgttcctgaatccccctccctgtgtagatagttgccctggtgacattcttttattcctttcaacagcccaaatccctgaagatgatgtaaacacagctttagctacttcggaacattgttttgatgagtaatgtgggaagaaatttta

SEQ ID NO: 491109 - DNA, 443 bp, Homo sapiens
tttagttctaacatacatccatgcaaagaccaacactctagtctcatcccaggacagattttaacatggccacctaccaatactgtttcttgcagccagtttatcagcttttcttcctagtgtacccacatgagtacactcgtttttttacagcccaatcatgtttcactcatttcaccagccctcatgaacatattaamaataactgagtaataattgacgcatggatggatagttctgtgtgaaacattgatgactgtacccacataactatcctattacagtctcacaatctatatgcagtaggtacaattattaatctcattttaccatttgagggaatcgacatttagtaaagttaaatcacttgcccaaggtcacacagcccacaagtggcgctgaaaatgaatccttgtctatgtggtgccaaagctgaacaaaga

SEQ ID NO: 491110 - DNA, 595 bp, Homo sapiens
agctatgaacctatcgttccatatttcagcaaaagcagyttcccatacagtggaatcccatcacaaactgtgtttaacttatttaaagttatattttagtcagtgcgcacatatccagagtgagatggaaaatattaaaaggttgtttttctaagtattcatgtactaatttttcctgtgggcattttatagtactgagtatgattttacaatttgaagaaatacattttcacatggcctctgtattcatgccaacccattaatgcacaatggaagaaataacaaactatccaattatgtagaacaattgattatgttgtttattaagaaatgtattgatctgaaaagcagatctattaatggatttttaggataattttgattattgtatcagaccaaacttgaagccatacccaatcctaagattaatacatattccatttctcttgtcaaatacaaaacaagctctaggcttaggtaaggataaattatacacaaaagaatagaagcaatgggtggggaaggaactatcataatagagaaaatgcaatgaagatgagatctgcaatattcccagtggaaaggcagaaaaaaa

SEQ ID NO: 491111 - DNA, 513 bp, Homo sapiens
ctggttctactgctggtgccaactggccatgatcttcaggctatgtgaagttctctaggtctcagtttccttgcctataaattaagagggttggtctgcagtaggagtcagttaacttcgacgtgtatataattctctaggaatcttgttaaaatgcagtttctgattcaatagatcttggatgaggatagctttaggattctgcatttttagcagtcttttggggtgatgttgatgttgctgatttgtgaagcacatttgaatagagagaatcattaaaaaaattgttgatttcattacaccatctaatttaaagatgacatgtaaataaataggagaacttcttccaatattactgttgggggaaataattcactttaaaattattgtattctttgtgacttttaattgtcctcagtgtcaaacaatttctccctctttctaaaactcctttgcscttgataaagaacaaaactgatatgtattgaatatcacgtgccatgtgtgtacctt

SEQ ID NO: 491112 - DNA, 642 bp, Homo sapiens
  misc_feature (1)...(642): n = A,T,C or G
ctgcctttctgttgctttgtttaatatttgttagacaagccttatgcatgtatctcagtaacaacatttagcctcacctctttataaggttctttttttgagtactttccttttcttatgtgttgctttgcaagaattcggttcatttctctcaagacaaatattttcttctatcatgtcaaattaatatcaccgcacttttcctggaactttcagtatacacagcaacttttygcttaagtgctgaatcatagtgtaaatttcttcaaattattttaaatggctattaaattctaaactctctagtgttaaaaatgtacaaactcaacttatgtaatggcagtatgaacaaatatgatcaagttcacacaccatgtcaaagttgttgcctgatcaacagcaactgtggctgngccaaaattttaggatgcatcccaattttattaatagatgtgcttcttggtaccaatcataatatgatcacattcactgctgtaccacatcaatttgtgggcaagtgaaaagaacagaaattaaagaaaaaagaatcaaacacagaattttctacggagaatgtttgtttttaatagatagaaaataatgacatctatttaagtgtttatcagaacccagaacatattt

SEQ ID NO: 491113 - DNA, 593 bp, Homo sapiens
aaaccttgcctgtgctgttcccagtgctgagctctccctccaaacacaactgttcatgccatcagagttgtgcaactccaggcgatgcagctttgcagggactactccttgtctggctgggatattgacctgttttcatggaactgcacttsccccactgaaaggtccaggaatggaggcttagctgatggctcactggctgctctatgatccgtgaaacctcccctcatcgtggtctggctgtgccccacagcccggtgctgcctgcccctgctctccacctgctatggccagctctgccttcatctcaatctcaaaggccacccctccagagcttatacagagtactcttaagtggaaatgatttctctccactctgaactcgcccagccctttatccactcttgtctcttcacctcttggagtcttaatctccttatctgtgaaatagataccagtggctccttcaaagggaggttgtgaaaaccaagtgactcaagcaatgcttcatatcataagtatttgctcatttactggtttggaagttcttaaagccagagattctctgtttcatcactatatgcccctcgttc

SEQ ID NO: 491114 - DNA, 620 bp, Homo sapiens
tttccatgctgttctcatgatagtaaataagtctcatgagctctaatagttttaaaaagaggagttcccctgcacaagctctctctcttttcctgcttccatccatgtaagacrtgacttgctcttccttgccttctgccatgactgtgagtctcccccagccacgtggaactgtgagtcctattaaacctctttcttttgtaaattgctcccagtcttgggtatgtctttatcagcagcatgaaaacagactaatacaatgagtgaggcccccaaatcctttatatagatgaagttcatgggagtttgggagagagggaggagatgtaggcagttcccaggaaggggtccttcaatgagcaagtctgcagggaaaggatatcctggaaaggcaggagtgcagtggaggacagggctggggggaagctggaggcttgcatggccaacaccaagtttagtcttcatatgatgggcaggagggattgtggatggctttggagctgaagagcatgattcattttctttcatttacctttttaaaaatagaaattagattgtctgttgttgctagagtgatttgggggaaaatgacagaagtcagggagccagggtaagaggca

SEQ ID NO: 491115 - DNA, 621 bp, Homo sapiens
attggcccagtttgtatatggtggtgcagcagaaattcaaacccaggcaagcttgactccagagcccatactctcaattcctcctgcccttcaagccagagataaagacatccaaacagccccagcttccgcatggctggatgcccttgaacagcatacttaacctctctgagatttgacttcaatcgtaaaggtggaacccataatacctgccttctgaagtggcagcaaggaggaactgagtcaagatccctagggtcaggagctggacgttagagttgcaaaacctacccaggtgactcaaataagcagtcaatgttgggctccatcccatcaggctctgggaggtggaagggcttcttaggttttaaggcaatgtggatcacctgggatcttgttaaaccacaacttctgattgagcaaggctggagtggggcctgagattcctcgtttctaatgaagcctgcttcctcctccagccctccccgcctccaaggctggtggaccatactctgaatatcaagtaggtcatggtggtgagatgaattttcttttatgtcccaaaggatgtgcctcccccwtggagagttttaaacagcagagtgttatgctctgttctat

SEQ ID NO: 491116 - DNA, 568 bp, Homo sapiens
tgggcttaaggacctcaagctccggcacctcctacctccagagagagcccacccacacaacagcccgcacaggtcaaggtgctggagactgagcggcctcccaccccacaggcatcctgccttaaagttcctgcctggaaggccgagcatcttggctgcctgccatgcgacattccatccttcccttgagaaaaataggagaacacggaacccaaggctaggctcctgctttcccaagagacaatttatggatgttacaacaaagagtaggaaatggaagacaaagcgttcttcagggcctttatatcttgctgtaaatcatgagatcttttccacatttgctactttgtaataaatctattagaggttagaggagaccgagctcccagggccccaaatgagaagaagaaatagcaattgaatgtcacttttgccacttagctcaagtgtaaaagaagggggcaggtcaccttgtccccaggcaagcagtgacgagcttatgttccaggaactgaaccatgaagggacctctctgtcttcctcyaataagggtgggagtgggcaggaa

SEQ ID NO: 491117 - DNA, 637 bp, Homo sapiens
cacttctggcacaccctgagtgttagctcttattgcarcatcctttcatgtaaactcatttagggttttatatttatgctgagaaggatttatttttgtttttattttacagatgatgaaacaggacacagagaggttatttttcccaaatccagtaaagacgcagagctggaggttgaaccagggcttccgatgccaattctggattgctcctggctgtgccatgttggttctgtatgccaaaattcttggactttcttgctattgttgacccccagtgtcttgctagatgctgcctgggaccgacactgagcagaatcatgacaggagtgtccgtgtccctaggcttccctttttgcccaattgccctatattggtggaggctccaacctgccctgcaagatgctgggtgctcttctgcatctgacttattcttccgctctgatttatgtgaacttatttccaagacgtggtaattaatcaccgcctcagcaagggggatctgggggggctgacaaagcactggagcccctataggattccacaaacattgggataatcaatattcctattgatatatttattctggattccctgtgtacttactgggtacttgttctgagtgctcctcctgtgc

SEQ ID NO: 491118 - DNA, 636 bp, Homo sapiens
gtcacatggtagatctattttgattttccaaggaaccattacactgttttttataacggctgtaccaattacacgtctgtcaacagcgtgtaacagtgaggtgatagttcattgtggttttcatttgcattctctgattattaacgatgttgagcacattttcatatacctgttggccagttgtgtgttttccttctagaaatgcctattcaagtcctttgcctatttgttaaccagactatttatttatttgctattgagctgtgtgagttctttatatattttggatattaactcattattagatacatggttcgcaaatagcttctcccaaaccatagcctgccttttcattttgttgactgttggctgtgcagaagcttttagtttccagcctgctcacttgccctatatatttcagcttcctagacccccacattgagtsaatgtgtgagccaattacttagaataaactgtatcatatatataattcataaatactacatgatagtaaatatatatttatgatatataatattacacacacacacacacacacacaatatcctgttggtttagtttctccttctctgaggaacccagcctgataccgaaacccagcctgataccgatacc

SEQ ID NO: 491119 - DNA, 597 bp, Homo sapiens
ttttggcattgaaataattatccatggcacttaaaccgtgtttctttcatcatttcatggcagtaagagcttcaactgctatttgttgggaacccatcctgactagctcgttcactagggcttcatgttttattgtgatgattggcagtcttgtgtttcaggcattttcagatttggaaagttactatgattctcaaattataaatgcaaaagtatcaatgaatttattttcacaaactattttaattcattatggacaataagtcgtttaattagaaatcaataatttaaataatattttatttgttggagcattcataaatactacatcttcaagtcttgctttattctacatgttacatacacagtaaaatatttaataasagtgttacatattttccctccttctccaactatccacaagctgaggcttaaaataaacagtggaatgagtaaagacccaaagtaatatagcagcaaagctgtagttgatttttataataaaataatagatatcaaagcttcctgacgtttttaggcaaatcttcctgtgtccctaaaaggaggatccccttgacagcagtcatgaacaacagg

SEQ ID NO: 491120 - DNA, 399 bp, Homo sapiens
actaacagaaagtacaatataagatgacagaaatgagtccacaaacacaatggatacaaacagattaaactctataatgaaaagataaagacacaaaaggtttgaaaagaagatgatggaaaaccaaasaccaaatatatgttaacccaaggaaaagaggcttaactgtatcaacatcagatgaattaaatattaatgctaaagtcatccttatggataaaacagtcatccatttgagaaaatctgttaagttctcagatagctataagaatttaaatctatatgcatctaattaaatggcatttatatataatatacataaaagaaaaattaacagaatgaaaatagaaatgaacaaatccgccattatactgggataattcagcatattctcaccag

SEQ ID NO: 491121 - DNA, 399 bp, Homo sapiens
actaacagaaagtacaatataagatgacagaaatgagtccacaaacacaatggatacaaacagattaaactctataatgaaaagataaagacacaaaaggtttgaaaagaagatgatggaaaaccaaagaccaaatatatgttaacccaaggaaaagaggcttaactgtatcaacatcagatraattaaatattaatgctaaagtcatccttatggataaaacagtcatccatttgagaaaatctgttaagttctcagatagctataagaatttaaatctatatgcatctaattaaatggcatttatatataatatacataaaagaaaaattaacagaatgaaaatagaaatgaacaaatccgccattatactgggataattcagcatattctcaccag

SEQ ID NO: 491122 - DNA, 399 bp, Homo sapiens
actaacagaaagtacaatataagatgacagaaatgagtccacaaacacaatggatacaaacagattaaactctataatgaaaagataaagacacaaaaggtttgaaaagaagatgatggaaaaccaaagaccaaatatatgttaacccaaggaaaagaggcttaactgtatcaacatcagatgaattaaatattaatgctaaagtcatccttatggataaaacagtcatccatttgagaaaatctgttaagttctcagatagctataasaatttaaatctatatgcatctaattaaatggcatttatatataatatacataaaagaaaaattaacagaatgaaaatagaaatgaacaaatccgccattatactgggataattcagcatattctcaccag

SEQ ID NO: 491123 - DNA, 497 bp, Homo sapiens
tgtgagaatggtctatgactggcatagagatcaaactaatataaatataaaagatttaatagtttaataagctccttgtaatggacatatatagaaaactacatgaaataattggagaacacgttcttttcaagcgttccagaaaattttctaaaacttggttacccacttgacataaagtatgtcttctcaaatttcaaagaatctgaaattttctaactataatacaaaaattaaaaagttaatgcctaaagaaaaccttcaatggccctgtatatttaaaaatgtaaaaagacacacaaagatcaccatgagttaaaagaaaaatcataataaaaataaaactgtgtctaggagagtttgatactaataacaaactccctttactctattcataatttaaggcttttataattattgcagaagtttgacaaagtacatatttaaaakaaaaattttacctttaatttttatgcatggatcttatttgggccata

SEQ ID NO: 491124 - DNA, 563 bp, Homo sapiens
gccaaaaatgagcaggctcccttgtgttgtagcctgggctccttatagaatcttggtgtgatgtgctgccagggctgtcctgctgagagacagtggtgaatgcttccagggcacgatgtcccataatgttctagactctcatttctgctgaccttttattacatatgataataatgatggtggtgcctacaatagtggttgatattttctagaagaaataatacatgtggattgattcctycagccacagaagcatggtttcctctttttagactattagagttcattcaaacaacatgtgattgggtcatgtattgttcaccagtataaacacagcacctatatactcggattgcctctcttcttttctggttgccttgagacaattgaaagaaactacttggtgtcagggccattgtaaacactggtaatggccaggtactgattgatcatgatggaccttgcataagctgttattacttctataaaccttaattaagaagggggtgtattagtctgttttcatgctgctaataaagacatacctaagactgggtaattta

SEQ ID NO: 491125 - DNA, 575 bp, Homo sapiens
ggtctgaagacctctccactgaccctcttcttgccttattgctggtgcacattcattcattcctgcaccaataaagggctttgccctcaggctttcaagctgcctgaccttgggaaagttgactaacctttctgaatctcaggtttcccgcttgcagaatggtgatactttcatggtatgtggtgaaaatcaagtgagataatgagttacagaacctggtaagtgctactgaggaataagtggcagttgatgtttttattattcattcagcaaacatttcttccacaccaggcacttctagagagayactgggacagtggtagaggtcagtgtgggaggggacggggacacccatatctgggctgctgaagcctggtttccaaatgcagggcaggatgtgctctgtggacacacagaggggaaacaagctccttgatctcagctttccaccctctaatccatcttccaagctgctggagctgccacacaagcccatttccctgaatgaggcctggaaggcctctctgatctagttcccaacttgtttcctatcacccttcccattgctgtgctcc

SEQ ID NO: 491126 - DNA, 666 bp, Homo sapiens
cccacttgcctgcctcccctaccagatgctgagcttcctagataagcacttctgtatgcccactactttgcacagtgcccgttagccagggatgctcastatgtgttgcttcaacaaataaatgaatgtggtggattgtaggagtgaatgggattgcctctgcatttacctgacggcgtcgggaatccagcagtgtcaacttctctgaacccagttagttcaaccatttcagtctccacttatgatcaattagctctgttagttcaaccacttcaatatccacttatcatcaatttatctttttagttattagctactttctatcataatccaatgaatttctccatacaacctttttcttctaataaacaacaccttgcagagagctggtccttgaggccacggagcactttgatataatgtggcttggctttcttttcagtttacaggccaaaaggcagacacagagaggcacagtgatttttcccaagttacacagtcaatcagagatggagccaaaagttatgctttcttttgagtcaacaaaaaagctacaggattgaatacagagctgcagctaagttcactgaaagtttatttatatcccttggagaattagaaagtactcacacacgtttttcaaagttaagtcttattataccatat

SEQ ID NO: 491127 - DNA, 666 bp, Homo sapiens
cccacttgcctgcctcccctaccagatgctgagcttcctagataagcacttctgtatgcccactactttgcacagtgcccgttagccagggatgctcactatgtgttgcttcaacaaataaatgaatgtggtggattgtaggagtgaatgggattgcctctgcatttacctgacggcgtcgggaatccagcagtgtcaacttctctgaacccagttagttcaaccatttcagtctccacttatgatcaattagctctgttagttcaaccacttcaatatccacttatcatcaatttatctttttagttattagctactttctatcataatccaatgaatttctccatacaacctttttcttctaataaacaacaccttgcagagagctggtccttgaggccacggagcactttgatataatgtggcttggctttcttttcagtttacaggccaaaaggcagacacagagaggcacagtgatttttcccaagttacacagtcaatcagagatggagccaaaagttatgctttcttytgagtcaacaaaaaagctacaggattgaatacagagctgcagctaagttcactgaaagtttatttatatcccttggagaattagaaagtactcacacacgtttttcaaagttaagtcttattataccatat

SEQ ID NO: 491128 - DNA, 611 bp, Homo sapiens
ccgggcttcagagtcttccggcggccgcgagctggcgcacgttcggtgggcggcggccgggagctccgcggagccgagggcacccggactgcgactccccacggcgcggggcgcctctccggcgtgcggggtaggggagcggcggggctttacgcaggactctgctctgggcgcttctcctctcccttttccagcctcgggcggcgtttggaaaccgctcggstctcccgtgtagctgaacgcggagggggagtggaggggagacttaatcaggttagtttgctgaccctccttcccggtgacgtttcctcgagaggaattgagtcctaggctagtgactgtaattagccttcattctacacaatagctcaaaggagcagcgcgagagcgagcgtgtggccctgtcttgttgggaagggcggcggtgactactgtcggtccccagactctgccccgcggcctggggccccgcctggtcgtcagccacgttcccacttgggcctcgtaactttcctggacaggcgacaggaagcctttctgagaggactcagtcggaatcctagcgcgtccccgaagtgatcttcagatgtgacgccgaggggcttgcttgc

SEQ ID NO: 491129 - DNA, 459 bp, Homo sapiens
attagagctggaagaaaacctagacaatttcttaatagaacccttttcaaattcttacaccaaaatccaatattcaaaagaaagtcttggtagaggcagaggtggaacacmcagggcctctgctactgtggcctttccctccacttcaaccacccctctagcctgaggcattcttgtgaaacctcatggctttaaggaacccactaacaattgcattttgccccatcttctcacctgtctgagcagaaatgcctagcacttctacttccaaggtattttttgaggtgtcattggctttagtttagcctgaagaattaaaagaatctcgagtgtagatgatttcaagctcaacttgttccctttatgaaagtataatactgaatttgagacgtaactttcatggatggaaatagactgcaggtccacaatcctataatcccaaagctttggaaaccaaaa

SEQ ID NO: 491130 - DNA, 340 bp, Homo sapiens
ctgtgccctctgcctgtgggatatctgtttggctgcctccctgattgggcagggatgataggctcaacaccaggaaggctggaagaaaacaaggctgcgtggaacgcaggagaaaagccatgcctctcctctctaaccaaaagaattcaggattcagaagaaaagaagagcccagagcacgaattccagcccccsaaaagttcaaaggcttcaaccattcaaaggaagttcttttctaccttcagtgtaaaggccttccaagggacatattttggcagcatcattttaatatggagttccatactagctcttgagtaatggtctctggaggaatgtttgt

SEQ ID NO: 491131 - DNA, 589 bp, Homo sapiens
caaactcaacaataaaagaaggacagagagcaatttaattcatatctaattcccaaagctaagttgttgcttaagtaagcagaggcttctggctggctcctctttgtgaaatagtcatatcaaataacatttgcagagcactttattttccaaattgtttttcttttcattactatctcacctaagcatcagaataacccagagaagtaggtattacttcctccatttaacctgaagagactgaggctcagataagttaaatgacctacccaaggtcacacagaaaggaaatgaaaaagacatgatttggagccaggtcttttgacttcaagtcttcttatgcaattgtcctgcctttttaaggacctaataaatattgctgaatgaataagggaagtggtagatggatagatggatgatctcttatgaaacagacacagtgstaaaaattcaaattaacttaactttaatatgcactgttggatataatcaaggaaggtgtcaaacttaaataaaaactggaaatggactgccaaacagaaacccaaagtgtgaatttgctagctggtcttatcacgttaagactctg

SEQ ID NO: 491132 - DNA, 638 bp, Homo sapiens
gttgataggtacagcaaactaccatgggacacatatatctatgtaacaaacctgcacattcagcacatgtatcccagaacttaaagtgaaattaaaaaaaagttaaaaagaactaaatatataaagggtataccataattaaatggagagatagagtcaatattattaaaattaaaacaatctcaaataaatctcagcacagactgatgtggaaattgaaagatagatactgaagtttatctgaaagtacataggacctagtattccaaggcaatgctgaagactaagaacatggctgtagaatttatactaccagatttcaagacttattacaaagctacattaaatgaaatattgtattggctgggcacagtgrctctcccctgtaaccccagcactttgggaagccaaggcgggcagatcacttgagaccaggagttcaagagcagcctggccaacatggtgaaaccccctttctgctaaaaatacaaaaattagcctggcgtggttgtgtatgtctgtagtcagctactcaggaggctgaggaactaacattgcctgaaccaggaggtggaggttgcagtgagccaagatcatgccactgcactccagccttggtgatggagcaagggaatcag

SEQ ID NO: 491133 - DNA, 511 bp, Homo sapiens
gggtccctggctagaaccccttgtcctgcctcttgagtgctcagggtatgctatggaaatgcagacgaattttaacaagatcccaagctaaatgcaatcagggagaaatgaaaacttgggcaaaacacatcacatgttccaaggtcaaaggtgaaagctgtttgtgactgttgcacaccacttcagctctctgtcacagccctgcctctccccagtataccactctgatagttgagtgatgttttaagtatgaaaaactgtcacacctggaaggtgggggggccctggaaacctgagctgctggraaaacgtgctcccctcctccatgaggaggacacaagcccacacccctaagccactgtatggggctgctctgatggggcttcaggatgtgccccagcctggaaggagcttgctgattcttgcctctgaatggccatgtcctgagctggagcacctgaagacagctatggtgcccagaggcctgggagctgtcgggtagcctggcccc

SEQ ID NO: 491134 - DNA, 506 bp, Homo sapiens
cttggaccctccagactagttcgctgctagttgaatatcactgagtgaccttggttgccaccagaagagttgctcagacgagtcctgcctgaattccttactcagaaaactgcgagatagaatggttgttttaagccgctcagacttggagtaacttggaacacagcaatagataactggaccaacatgtgttatctcattgaatctatttattatgtctgttttacagactaggacatttaagctcagagygattaaatgactcgctcaaggcctcccaggaagcaggaagctgggtggcatttgaacttgaacttgagaagtatgactctagagctccttggaaccaaagcccttgttatgctgcatcttggtggatctgtgtgcccctcctggcaagagggcttgcatctcaaccaaaaacattaccttcaaccaaaagactgaatacttgacaaggagtgactttcagcaccaggccatttcctggtttgaaagatacatgg

SEQ ID NO: 491135 - DNA, 607 bp, Homo sapiens
tttattctgcattgatgacagggggtacaagcttgggtgtaaaaacatcggcctctcrtatttggctgtaaacactctagggtgtgcaggggaaatataggagtatgggatagaacagaatgttggttctggatgggagcttaaacatcatcgagtccaaaggttcttaaagtataggcctcaggccagcagcagaagcaacagctaggaacttgttaggaaggcaaattatggccgggtgtggtggctcacacctgtaatctcagcactttggggggccgaggtgggtggatcacttgaggtcaggagttcatagaccagcctgggcaacatgacggaaccccgactctactaaaagtacaaaaatgagctgggcacagtggcaggcacctgtaatcccagctactcaggaagctgaggcaggagaatcgcttgaacctaggaggtggaggttgcagtgagcagagatcttgtcaccgcactccagcctgggtgacagagcgaggctccatctcaaaaaaaaaaaaaaaaggcaaattgttgggccctaccccagagctactaaatcagaaactctcggggtggggcccaacaatccttgttttca

SEQ ID NO: 491136 - DNA, 645 bp, Homo sapiens
cagtttggttgggggacccagaaaataataaatattggcaatcaaaacactcagaagcatttttaaagagataattataaatggttgcgtagataacaaaagtaatttcaaatttataatttatgctcataattgcttaagacgtagggtttttatgtaaaggcagaatgaattttctcttccaaaataaccaaacttaacatttagtatactactctaaaaattgcaaacacttaatggagatttttacataaaggccacttttattgtagaaaactaaacaaagataatttgtttgtttcaaataaccaagtattgactggattctggtacacaacatccctggtatttttcatatgaaataatgcttaaatgttataaacaagttctacaaaatgttctaaaatcttttttggtattttcatatattcattctgcatagaatcaggaaacctaatcacccagtaacccagtttgaaaactcatattattttgtaaatcctgatgtaattaaaccactttaaatktctgctaaaaaatatcaagttatatttacatatgcttttttaaagttatgccttgtgaaaaatattattatctttaaatgagacagttagagacatcttaaactattaaggttaacat

SEQ ID NO: 491137 - DNA, 518 bp, Homo sapiens
gggacataactcaaaacaataaaagtcctatatgataaacctacagctggtatcatactgaatgggagaaaccaaaaactgttyctctgagatctggaacaagacaatgattcccactctcaccattcttattcaacatagtactggaagtattagctagcacaatcaggcaagagaaagagatgaagggtgtccaaattagaaaggaagaagtcaaattatccttcttacagattacatgatcttatatttggaaaattctaaagactacaccgaaaaagcattagaactgataaaccaattcagtaaagcttcaggatacataaaataatcagtagcatttctatatgacaatagtataaaagaaatcaagaatttaatcacatttacaatagttacaaataatataaagtacctaggaataaacttaaccaaagaagggaaaaatatacataaaataatcagtagcatttctatatgacaatagtataaaataaatcaagaatttaatcacattt

SEQ ID NO: 491138 - DNA, 579 bp, Homo sapiens
gctagaacaaaaaagaaaagcctcactactgaacctttttcatttcgtatagctgctcaaaatttagaaaactcatagaccataatccattaaaacagcatctattacatcaagttctaattgctaaacttgctggtaaatccttggggtaaagagattggaactcttccattttcaataaagattatttgtaaaactaaaaaaaaatccatgagacaatctgatagatgtctcattattcctgatctgtgttcttttttatttcttagccctacctctacaaccgattaaaatgcttagcctaaatactttcaccatttcaaagaaaccactacaaaaagtgctattttttggccgggcgyggtggctcacgcctgtaatcccagcactttgggaggccaggcgggcggatcacgagatcaggagatcgagaccatcctagctaacacggtgaaaccctgtttctactaaaaaaatacaaaaacataattagccgggcgtggtggcaggtgcctgtagtcccagctactcgggaggctgaggcaggagaatggcgtgaacccggaagcggagcctgca

SEQ ID NO: 491139 - DNA, 484 bp, Homo sapiens
tgagaatcttcctcagtgacactggatgttgtaagacaaagggcctgggaagatgtgttgaaacttctccagaaaaataatgttgtgtcctaatttccatcctcgggactcctgtctatcatgtgttgtcttagtctgcccgggctgctataactaagtaccacagacagtggggcttaaacaatggaaatgtattttctccattctggaggctgggaatccaggatcaakgtgtgggcagggctggtttcccctgaggcctctctccttggcttgcagatgctgcttgctgtgtcctcacatggccttttcttactcaggcagtccccatctattttttcgaatgaggacatcagtcctgttggattagggcccactcttactacctcatttaaccttaatcaccttgttaaaggctctatctctaaacacagtcacatgggggcataggacttcagcgtatgaattttaggggacaaaattc

SEQ ID NO: 491140 - DNA, 531 bp, Homo sapiens
tacaaacctatccttatttctattactacctctacctccgctgaccctaagcctgcccccagtcacttctatagtataaaagccaatgtcagttgaaaatgaaacgcaaaaacaagtcatattaaaaataaaaacttctactctcctttgttctaaatactctcataacaaccagccgtacaaaaaacacccgtctatgcaaaaataaatttattttaataaaaatcctttatctaaatactcatttttccttaaaactctaagccttatttctaacagacagcaaagggtgggtacctgagatacagcaatagagacaggtggaagacgacccaggttccctgggcttcacatcggagcgaagggaagcgccgaaagcattaggcagggagttacatgaacagacacaggtcttcaaggaccatgctggtcccaactaggaaayatgatttgagtgagcacttccattccagctaccagtcctttatcaagtatggacgttgcaaatactttctctcagtctgcagcttg

SEQ ID NO: 491141 - DNA, 535 bp, Homo sapiens
tgcacccacaacataaagctttgttagaatgtctggctgtgggaggcacctcttcccacccagcttgtgtccttgctcaytgggacttgggatgccacggcccattcaactgactttacagccaggcaggaagcaccaaatttatagggtctctatgaggattaagtggataatatgtgtctgtaaatttaattatatttacacctgttatgcttagactctgcatgccctcttgaacgctgtaatactgttattatgtctgggaagaaggaaagaaggagaaggtgagaagaagagttaatttagaccttgtttccattcagcgtttggaagctgaagcgtttagtcgttcatactggacctggtgtgatgggatcatcttgagattctgtgtctcgcagacagcagcggtggcagattcttgcttctttttttctttcatttctgtttcctatcagttatgtgataaatgagacgtcaggatgaggaatgtatgcttccctaggaagcagtcactgaacttacagttgtttga

SEQ ID NO: 491142 - DNA, 556 bp, Homo sapiens
atgatcccagcaatgacctaaaaatggaagagttttaagtgagaaggaaaacacacacacacacacacacacacacacacacagagagagagagagagagagagagagagagagagaaagagacagagagaagctgctgtggctcttgaagagggcaggggctgtggaagctgtcacctggggctgtaccatgaacgggggattcttttaacgcgaaccatcggcgactgggccccggaggctgaggaccccgagacaggccctgccctgggcggatgtcaagcaagggagacccactgtttgccccgaggagaaaggacacagagtttagtcaaatggtcggaataactagcgacaatgcatacaaaggaatattcaacacgcgacctgggtgatgtgggctgttgaagtgactggactcaggtgatgcggctgcgggaggtggtgagcgatgctggaagctgcgtcccggccacccagatacsctgggagtgcgtggcgctccggggaggctgctcctccgcgtgccaggaacaggccaaggaccaaaaccaga

SEQ ID NO: 491143 - DNA, 512 bp, Homo sapiens
gggtgttgagctctgtccaccaacctccctgtgttcacctctgctgagtatctgcttgtctaactctctccctgacctgtccatacttgaggggcgggaagctgtgtcctgcagctgtgtattctgaggactcagcacactcccagaactcaacaggtgctcaacagagaatggtttatttttaaagtcttcttgagaaatcaaagcagacaccattatccaagsagacaagggctaaacacaaatattctgctctatttctttccccaactctacatttgttcggattaatggagactattccagaggcagggcatggagaaggctgagtatctgtacacagaatgcagacatgctgttctttgtgtctcatgaagtatggatgagctaaaaagctgaagacagctcaaagcagccaggagggcaggcagcctcagtaaaaaatttgtagtgaagaaaatctcgaggccttaaataaggacttctgtcagaagtgaagactgtaacccacg

SEQ ID NO: 491144 - DNA, 625 bp, Homo sapiens
ctgctttggtacatgccaagtgctaagtatcagctttcactgttcacaaaattaacagttttgtaaatgctttgggtaaaaataaggtgatgaactttcaaaaatgtgaatttcttctgctttttaagcatttaagaaactgtaatatttgacttctgattttaatcaaatgcttaaaagtacaatttttcaacaattagtaagaatttacataaatttaactaaactyttaggcttcaaatttctattgttttatttatttagagaatgtttaaaggagcaatcattaaaggaagggaaacattgcatgttctcatttatatgtgggatctaaaaattaaaattgaactcatagagatggagagtagaatgatggttaccagaggctgggaagggtagtagcgcttgggggcagagtggaaactgttaatgggtacaaaattatgttaaaatgaataagatctagtatttcatagcccaacagggtgataacagttaacaataattttgtgtgcatttaagaataactaaaagagtataattggaatgtttgtaacaaaaggaaatgataaattcttgaggtggataccccatttatgcttattacacattgtatgcctttatc

SEQ ID NO: 491145 - DNA, 690 bp, Homo sapiens
ttggtgatgggatcattgggacctcaagcctcggcatcggcaatttacccatgtaacaaacctggacatgtatactttaaactataataaaagttgaaatttttaaaaagttcgatggaaattcttttaccactartaaacaataaattgtgaaaaaatcactaatatgacatatgtggcttgtaaaaaaatttctagttaaataatttgagaaggtaataatggataatcactcactttactatagatattaagaatttcatcctttctttcctgttaacacataagactgggggcttgccctcactttgctgacacacagtctactctaaaatcagtatgttactggaaatataacattcaaaatacacccccttttcaaattccctgaatactgatgacctcatgcctttggcaaagatcgacagatctcccaacactcctattgtgaccaaatttaacctcctgttccctcaacatactgcctccaggagaatctacaaatagatgaggttcaagatatgtgataaaacatatattccacttttgacaaatatcgaggggcttcctggtctccaggaaaggagaaaaatcaacagactaatgacatgtcgggggtcatggtcataggatggtgattctggattgagggcagttttcctgcaccctctgctgattcactttgcatgt

SEQ ID NO: 491146 - DNA, 690 bp, Homo sapiens
ttggtgatgggatcattgggacctcaagcctcggcatcggcaatttacccatgtaacaaacctggacatgtatactttaaactataataaaagttgaaatttttaaaaagttcgatggaaattcttttaccactaataaacaataaattgtgaaaaaatcactaatatgacatatgtggcttgtaaaaaaatttctagttaaataatttgagaaggtartaatggataatcactcactttactatagatattaagaatttcatcctttctttcctgttaacacataagactgggggcttgccctcactttgctgacacacagtctactctaaaatcagtatgttactggaaatataacattcaaaatacacccccttttcaaattccctgaatactgatgacctcatgcctttggcaaagatcgacagatctcccaacactcctattgtgaccaaatttaacctcctgttccctcaacatactgcctccaggagaatctacaaatagatgaggttcaagatatgtgataaaacatatattccacttttgacaaatatcgaggggcttcctggtctccaggaaaggagaaaaatcaacagactaatgacatgtcgggggtcatggtcataggatggtgattctggattgagggcagttttcctgcaccctctgctgattcactttgcatgt

SEQ ID NO: 491147 - DNA, 690 bp, Homo sapiens
ttggtgatgggatcattgggacctcaagcctcggcatcggcaatttacccatgtaacaaacctggacatgtatactttaaactataataaaagttgaaatttttaaaaagttcgatggaaattcttttaccactaataaacaataaattgtgaaaaaatcactaatatgacatatgtggcttgtaaaaaaatttctagttaaataatttgagaaggtaataatggataatcaytcactttactatagatattaagaatttcatcctttctttcctgttaacacataagactgggggcttgccctcactttgctgacacacagtctactctaaaatcagtatgttactggaaatataacattcaaaatacacccccttttcaaattccctgaatactgatgacctcatgcctttggcaaagatcgacagatctcccaacactcctattgtgaccaaatttaacctcctgttccctcaacatactgcctccaggagaatctacaaatagatgaggttcaagatatgtgataaaacatatattccacttttgacaaatatcgaggggcttcctggtctccaggaaaggagaaaaatcaacagactaatgacatgtcgggggtcatggtcataggatggtgattctggattgagggcagttttcctgcaccctctgctgattcactttgcatgt

SEQ ID NO: 491148 - DNA, 573 bp, Homo sapiens
aattccctgaatactgatgacctcatgcctttggcaaagatcgacagatctcccaacactcctattgtgaccaaatttaacctcctgttccctcaacatactgcctccaggagaatctacaaatagatgaggttcaagatatgtgataaaacatatattccacttttgacaaatatcgaggggcttcctggtctccaggaaaggagaaaaatcaacagastaatgacatgtcgggggtcatggtcataggatggtgattctggattgagggcagttttcctgcaccctctgctgattcactttgcatgtgtctagcttctccgctaatcactgtagcaccttaacacacttctgcccctcacatactcacaagtcaaagtcccagcgggcaaatataaacacaaagattccttgtcaatttttccaaacacactaacccttcctacagccacagcaaagcttctagataaagggatgttaaactcttctgagggggactaataaaccctcagctattttgaaattaatttcacttgcaaacaccagaaaacatagcccttctttgtacagcat

SEQ ID NO: 491149 - DNA, 530 bp, Homo sapiens
gcatgtgcacaagtgtctgtggatattaacacttgagcacatcgaaccctttccacattctgaaaagaaaacatatcctcgcccacacatgcacacatagatatcagcttccagagtactgttgtagatttaaccaacaacacaaaagaccaagacgtattcaccaaaatgtatctggcttctggacttccacagaatcctacgaacagacactttaaagtgggaggggggaaccccaactgtactgtcatgtcaaagcatttgttttctaaagtaaatgctgcattagagctagttaataatccctagttgtcagctattttgacagggatggyatttggaatgctgcatttaatgacttctttcccagaaaatgagaaagttatttgaaggaccaaaaggtgtcaggagtaatcctacccaacccaatcaactttgcatatgaaaggggtagaggtttttcgggagaaaccaatagagctgaagttgcttatcattcaaggaacgatctaggaaggaacacaatctgt

SEQ ID NO: 491150 - DNA, 653 bp, Homo sapiens
agtgactgggatattccaaagtgagttttgaagggtgcccaaaagatttcccacccccttcctaaattgatgccaatcattaagtagttcatgccatttgtctacaaattaggctttctttcattaagcagatatccctgagaataacgtcatgagcccttagacttttgatgaaaattggtgaattttggagagattgatcaagtatagataagktatcattaaatcgaagaaactctagagccaaataatcggggttcgaatcccagatttactccccatgtgactgcgtgagttgtgcctcagtttcttccatctttaaaacggcaaggtcaatatcacatgcctcagagtactgctacaaggactgaatacttgtaaatttttagaaagttctggtacagagtaaatggcatgaaggttaagtatatgccactattattatggaagtgttctcgaggaaggggctgggcactgctgccttcttccacatccttaccactagtttctttgatgttcccactctaggcttagttggtcttgctattgttcctgagacaaacctgtttgagcccaaggcactttgtaagaatcttactaccttattcctcattagcattatgagccccaattcctcagctccttggcccagt

SEQ ID NO: 491151 - DNA, 545 bp, Homo sapiens
cctttgccttccatctggaaatgaaatcaaaagcctattagcagggataaaaggggaatgatgttgcataagcagtagatggtgtctgccatgtaattaggtttttaagtttatgtggtggatatttggatatttttgtagttatttactattttttaaggatagggataatgtaattcagtttacatcatggaacacccaatgatgactctgtggctttaaacttgggtgactgggaagtcatttactgagatagagactgtcaatgtgagatgcggagcaagatttacgagggaaagtcaggacttacagtttgcttatgttaagttagaaatgctctgggacatcaaattgagaaaccagtagattgttcagattatagatctgtagctaaagagatttagtggattcraaactgagactagactcctttggcgtggttagaacagtaagactggatgagtctaaactaggagagcaggaaattcagatgacaccctggggaaatccacacatttcaaagtgtgggtaaatacatagaaatg

SEQ ID NO: 491152 - DNA, 630 bp, Homo sapiens
gcactgagtagcttttgtccacttggggtgcccctatgctttccaggtcacctgcatttccatcattgagtcctgaggtgcatcagcttgcaatagattttccttgtaatggagaaatatttctccttagcaatgcttctaacaaatgtgggaatatagaacttagaacaaaagggcttcaagtttcaagaaaagtgggaaaaacattttcctttgtgggagtaaagtacatttgtaagtgtttcatgtataagcaaaatacatgaaggaaggcatctttcctgcttcacttgctaatgatacctgtctgtcctgaaggcatctcaattagcatctcatcttagaccttttcagaacagcagaagcacagaaagttgaacacgcagaaaccaagggttttataatatagckgatccttccctttatagtgttttcattctttttagatttaaatgttacactataaaccctgtttgcctatatatgtctgtgtgcatgtgtgggtatgataccactttgttcataagccaagggctgagtttacttccaaaaacacttctgtcagggtggcccagcagggccaagccagggcaggtgtgtctcttcacctttttcatcccatgtggaata

SEQ ID NO: 491153 - DNA, 429 bp, Homo sapiens
ttgtccaattctttcttcaagacgccaagaacctggacaccctctaccgttagcattaagagccccgtggcacagcaggatgggagtggccagcagcccagcgttaccacctgagctccacttcttgtcagatcagcagagacattagattgtcgtaggtgcacgaagcctactgtaaactgcacatgcaagggatctaccttgtgcgctcctcctgagaatctgatgcctgattatctgaggtagaacagcttcatctccaaactatccctgtctaccaaccccccatccatggaaaaattgtcttctataaaaccagtcccttgtgccaaaagggttggggactgctkatttaaagaacactgttaatgtctgttccctgccttcatctggaggaccagggtcagttttgaagcaactccagcaagt

SEQ ID NO: 491154 - DNA, 571 bp, Homo sapiens
ttcagagatatggagtagtaatttattaccttgctttgttccccctggagctcagggtattgaattattttaagtaaagtcaaaaatagtctggctatggtggcacatgcttgcaatcacagcactttgggaggccaaggcaggaggatccctggaggtcaggagttcaaaaccaacttgggtaatagagttagatccygtctccacaaagaataaaaaaattaggctgggcatggtggctcacacctttaatcccagcactttgggaggccaaggcggttggatcacctgaggtcaggagttcgagaccagcctggccaacatggtgaaaccctgtctctaccaaaaaatacaaaaattagcagggtgtggtggtggacacctgcaatcccagctactcgagagactgaggcaggagaatcacttgaacctgggaggtggaggttgcagtgagccaagactgcaccattgcctgggcaacaagagcaaaactccatctcataaaaaaataaataaacataaataaataagtaaataaataaataagccaggcatggtgctatgtacctgt

SEQ ID NO: 491155 - DNA, 571 bp, Homo sapiens
ttcagagatatggagtagtaatttattaccttgctttgttccccctggagctcagggtattgaattattttaagtaaagtcaaaaatagtctggctatggtggcacatgcttgcaatcacagcactttgggaggccaaggcaggaggatccctggaggtcaggagttcaaaaccaacttgggtaatagagttagatcccgtctccacaaagaataaaaaaattaggctgggcayggtggctcacacctttaatcccagcactttgggaggccaaggcggttggatcacctgaggtcaggagttcgagaccagcctggccaacatggtgaaaccctgtctctaccaaaaaatacaaaaattagcagggtgtggtggtggacacctgcaatcccagctactcgagagactgaggcaggagaatcacttgaacctgggaggtggaggttgcagtgagccaagactgcaccattgcctgggcaacaagagcaaaactccatctcataaaaaaataaataaacataaataaataagtaaataaataaataagccaggcatggtgctatgtacctgt

SEQ ID NO: 491156 - DNA, 631 bp, Homo sapiens
tttctaatgagatgagatcaaagaagcatcaacaaacaaaactaagaaaatagatgctgtttcagagttcagaagttcaatagcatatgcctttaggattcctgctgacttttgctggggttgttagaatgttcatgattttcaggagagcttggagagaaaccaataaagatttctaagcataaagataccctctaacttccacatggacatgttccaagagttcaggttgcaagtttattaaaactcaatttgcatttttctgagacacaaccagatagctaaagtggcagaaacaaagttctgtcctgagaattttgtgaacaataaatgccatgttacaatactcctgtgagaaaatgcattcagcatgtcaacttggaatggcaggggcatatttcccatcagagtaggaatacttcggtttcaagtccctgggccaggagcctgagctccaaaacagaagaagataagatatgagaattaaaggaaatttaaagtgaaaacttataaaactcagggacgccaaccagggagtaggaagtatcctctcctcacacccccataacatcctttacctccataggcctaggccagtcycaaactggaatttgagaagtttgctttctac

SEQ ID NO: 491157 - DNA, 498 bp, Homo sapiens
cagctggaggccattatgctaagcaaattaatgcaggaacagaaaaccaaataccatatatattctcacttataagtaggagttacaaactgtatactcaaggacataaagatagcaacaatagacagtggggactactaaagcagggaggatgggggggtgtaagagttgataaactaataggtactatgctcactacctggatgatggaatcatttgtattccaaacctcagcakcatgaaatatacccatgtaacaaacctgtacatgtaccccctggatcaaaaataaaaattgaaattattaaaataaataaatgaattaattaattaaatacgattggccattggatgcaactgcaaattgaaacaagcccagaactgattatgctagagcaagagagaaaatttgccagtggggtggaagaaatcgccaaatgagacaagaaatgaccatcaggtagagaagaaaagccaaaaacaaggacaatcatgttg

SEQ ID NO: 491158 - DNA, 498 bp, Homo sapiens
cagctggaggccattatgctaagcaaattaatgcaggaacagaaaaccaaataccatatatattctcacttataagtaggagttacaaactgtatactcaaggacataaagatagcaacaatagacagtggggactactaaagcagggaggatgggggggtgtaagagttgataaactaataggtactatgctcactacctggatgatggaatcatttgtattccaaacctcagcagcatgaaatatacccatgtaacaaacctgtacatgtaccccctggatcaaaaataaaaattgaaattattaaaataaataaatgaattaattaattaaatacgattggccattggatgcaactgcaaattgaaacaagcccagaactgattatgctagagcaagagagaaaatttgccagtggggtggaagaaatmgccaaatgagacaagaaatgaccatcaggtagagaagaaaagccaaaaacaaggacaatcatgttg

SEQ ID NO: 491159 - DNA, 616 bp, Homo sapiens
ccaacggcatttaagaagttaactagatctggaagattgtgttgccaatatatgtaccatccagctcccataagataaattcaaatccaaaatatatgactggatacctagttgatagaggaatggtatacagtgcaaagaataatattttgatgatattcttatggaaatttttgttttagaaattttttacataagaattttagtaattttcaaaatcactgctcagaaagaaaagggctttgctgttttwaaaaaaaaaaaaaagtgtggtcaggccaagtgtggtggctcacacatataatcacagcactttgggaggccaaggtgggaggatcacatatggccaggattttgagctcagcctgggcaacatcgtgagtccctgtcattatcgtaaaagaaaaaaaaaatgggggcattattaacaactgctgctttctaatgactcttatactgattattcctggtgaaattgtttcagatattgggctatttctagcctaattcaatctgattcaaattaatttaatcatttgctgaaggtctgacaagaaaaacttcaataggcagatgatggcattggcgaaaaaaaaactgtttttcttttctatct

SEQ ID NO: 491160 - DNA, 616 bp, Homo sapiens
ccaacggcatttaagaagttaactagatctggaagattgtgttgccaatatatgtaccatccagctcccataagataaattcaaatccaaaatatatgactggatacctagttgatagaggaatggtatacagtgcaaagaataatattttgatgatattcttatggaaatttttgttttagaaattttttacataagaattttagtaattttcaaaatcactgctcagaaagaaaagggctttgctgtttttaaaaaaaaaaaaaagtgtggtcaggccaagtgtggtggctcacacatataatcacagcactttgggaggccaaggtgggaggatcacatatggccaggattttgagctcagcctgggcaacatmgtgagtccctgtcattatcgtaaaagaaaaaaaaaatgggggcattattaacaactgctgctttctaatgactcttatactgattattcctggtgaaattgtttcagatattgggctatttctagcctaattcaatctgattcaaattaatttaatcatttgctgaaggtctgacaagaaaaacttcaataggcagatgatggcattggcgaaaaaaaaactgtttttcttttctatct

SEQ ID NO: 491161 - DNA, 601 bp, Homo sapiens
tgtcagtgagcacaagctcactctctgctctgctacagaccacactgactacccaggcaccagtgcaaastatatcccacctgtaaagtgtggagtcctgatgataagttagcaacaatgagggaggggccccaggtgggggagaacaattgttctgagagacagttaaccacaaacaatctgcttgcacaacaccctgttcccaaatacctcactctgcaggtagcccctccaacatgatcctacaaaacttccctccagcccctgcctcctggaggacacctccttctctgctgtgctgcccatttgcccccttgcaatgtattttctctccaataaacttgctttaactcactgctgtttcaggaaattcctttaccaaccatgacaccagccccaatcagtcacaaccacaacataaagaatgcatgtcaggttctggctggtttgtggtgccgcctcctcaccaggccttaagctgagggaaccactaccatctctagtcctccttaggagtaataagataggagagggctcacagcacaactttgtcctaaaagatcctctccacagaaggaatcttccacatccttgtcctctt

SEQ ID NO: 491162 - DNA, 525 bp, Homo sapiens
aggtaatgtcaccaatgataagtgcctgctgttaaaataaatgctgtgttctgttttgcatctcaacttgtttttaatgcagactcctagggactggggcaacagtgggaatccatttatcggcacaaaacagccttttgtttacataagatcacttggtaatcatgccgcctgtgcaccagaagtcaagaaaaataataagtgtggctcaatctgcaatgctaaaacaagggggctgtcttttgacaatcaagcactatttatgaggattaatgtggcttttgataagctgccaaatgaccagagaggccacatttagaacaaggcccactgaagaccttctggcctcttcattttcataaagactcttcacagggcatgttgagcaatttctcagtaattggaaataaaatgtactaaaagaaagcatagctaagtattctccctgaaagctcaaataatcccatttatcgtattcttcatagygaagaaattatgttctgcaatcataaaaggtaaagatat

SEQ ID NO: 491163 - DNA, 636 bp, Homo sapiens
tgtttagatataaacactgtatttaatcatgatgattttctcaaaatgtaaatctatcacatcgtttccctttttttaagcatcgttctttttatcatttgtgggacaaagtccaatttctgtaatgttaattataaggcacttcatgatctgatgtgcctctgcaatctcaactttatctgcatgattttgttttataagaataaagatcatttaaaaaatgtcttcagtaaccttttccagaatatgagcctttgtgtttgctgttctgtcattctagactaatctatctttcataataccttcctatttgttttaatcttctgactcctattcagatattattataayggtcagttattctgagatacttttctttacctagtaactaaattttttccctgctgcaaaagcattttactctatcctttttctgattacaccttataaaaattattcatctagttggctgttttcccagactaatatatttaatgtcggagattgtacctatcttgttcaacatcaccctattcttagaggctagcatagttccaagcacatataaaatatttgttcatgaatgaatgttgaaataataaaagctcccagaggcaatggtttccaaagttagat

SEQ ID NO: 491164 - DNA, 648 bp, Homo sapiens
gctttcacctaaggatgaagggcatttgaatgccaaatcttggggagtgcatttagatgagcagttgatatgggggcagaaaatcaaactcaggaataaccatggtgatctcccagataaaacagggtcccaaagagtcaataaaagtttaatagcttaayacagataggaaaattaaagaaacttgcctgcctaagtctggcactagatggaagagaagaaaaaaatttggtttcttctagaaattctttacaaaagttgtttttttttaatttgagactaagctagcagtaaagtgcacaaatcttactagcccagatacataaattttgcatatttttacacccatctatccagcacagagataaagacacattactcaagatcacctcgtgttcaatcccagtcaatagagttctcactcttgaggtgaccattggcctctagcatcattgattagctttagctgttctttttattattttttactgttactttttatgattttttagctttttatattatccttttagtagttactcttgaaattatagaatatatttctaatttatcagtatactttaaaatattttttaaaaaatcagaaggcaagaagcatagaattcttcatagagtttgaggtgaatt

SEQ ID NO: 491165 - DNA, 523 bp, Homo sapiens
tgctaaaccttgcttgacatatacaagtaaatcaaattagacattagacataggaatttctgagaaaccacgarctttcgtatccatcctttacaccgtactgtagttgtgactctgaacttgctgcttttgttgatgccccttgaatgacctaacccctttcctgcctcttgctaaagttcacagagaagctcacaagaagagtgacaaagcagtcattttttatgaaaagagcactgacctaaacaactcccagaaacacagaatctcccatgatttctttgagacatttttttttcctgcaattgcagatgtcatttccacaaattttcattttggcatttggcacatgcatgttatttgaaagcaatattgcacatgtgctggctgttaccgcgacattctttggggactgcttcacacaaattaggtgagaacttatctttgtaaaagaatgtctgtcactgacaattatggtgatgcccagccaatgcccacattgcgaatacagaacgtcaacatg

SEQ ID NO: 491166 - DNA, 523 bp, Homo sapiens
tgctaaaccttgcttgacatatacaagtaaatcaaattagacattagacataggaatttctgagaaaccacgagctttcgtatccatcctttacacygtactgtagttgtgactctgaacttgctgcttttgttgatgccccttgaatgacctaacccctttcctgcctcttgctaaagttcacagagaagctcacaagaagagtgacaaagcagtcattttttatgaaaagagcactgacctaaacaactcccagaaacacagaatctcccatgatttctttgagacatttttttttcctgcaattgcagatgtcatttccacaaattttcattttggcatttggcacatgcatgttatttgaaagcaatattgcacatgtgctggctgttaccgcgacattctttggggactgcttcacacaaattaggtgagaacttatctttgtaaaagaatgtctgtcactgacaattatggtgatgcccagccaatgcccacattgcgaatacagaacgtcaacatg

SEQ ID NO: 491167 - DNA, 615 bp, Homo sapiens
gagtagtaagttaaaattagaatttgttaaaagtatgcagtatgtttatgaagggtaagggatatttgaaagcaatatttaaatatttttaaaacatgtctgatgcagaagagaagatttcactttctctttagagttactgaggcgcaagataagagtaggaaagttcacccggccatgtatattttactgcaaacatgtcattttagacatctttcaaaatgtatctggaatatggaaaacagtcctactgagctattgtttggcatagctcattgacatatttatktttgcaaaatcaatcagatcagggcaactgtgagttttgggtttttttttttttcctgtttgagagaatggagtcttggagatttcagtaaaagtaaaaataaaagaaatgtgcaatgcattttgcctattatgttgcccttaaaattaagaaaaaaaaagacagaaaaagggagaaattaggagaatgatttagggatccaaagataccgtaataagtggccaatgtgtaacaatataaggatactgaaacatatcccagaagctggttccaggaccagattttcatcctacatgctgtgaattttcagaaagtcaacagctatt

SEQ ID NO: 491168 - DNA, 635 bp, Homo sapiens
ctagacgtatttggaggagcacacgcttgatgtcctgtttcataccacacatttgtccacaaaggagggaaaagtaaactcagtttggggatgattgcagaaagcttcttggaagaggtgccatttgaactagatggtgagaggtgagtagtaatccagcaaatggcattctgctcagatagaattccctagactcaagagctccaaatgttctctggggaataatgaataattctatttgacttttgggtaaagttgtgttcaaaaagaaaagaccagaaattaagtgcatgataatacagagagggataaagaaagagcaacaaatttgggttataattagtagataactaaaaactagtaaagcgtatgttctaagaaaagtttttaaaagacgaattggcctggtgattatgacatttctgttcttctcaagcctgtgctctgggattgttaactttcaataattcagtgacattttgtcacatgccaatcatcccccaattctgggtaaatttaactgtcatctctctctattcttggtccctgcataaagcatgttgttatttggaaaggagtctattattacccgmgagcttggcatgctcaacaaatattttgagcaaaattcaaca

SEQ ID NO: 491169 - DNA, 617 bp, Homo sapiens
atacagttaaaatccaattgaactaaatagctcaaacaaaacatgagcagttctttgcaaactgcggtccaccagaagaaatcacttatgattctttttggctcagcgattttctcgcgtggagtcagagctaaagcccacaagccacaaagcttcaatgaaaacatctcaagccctgttagtgctgatgggcacagtcaggctgagttagcaggaagtaagttgctcggattgtcagcatgctcagcagatgctgaaggaacagtcctacacatggtgccttcatcatattccttgaatagtgatgttgagatacagtggtctatggtcttaagccaagtcatgaaagtcctgacagaggaggaatggggcaaaaggtattagacccccatgacataattatattgctaatctatacttgagagagttccatggtcacagtcaccacagcartaacagcaaatatttctctgtgtgtgcatgtgtgtgtaacttacttgtgcacgttttttcatctgggttaagagcaaatccttcatggcactggcaaaggtaggagccatcagcatttacacactcatgttcacatccgtggttttctgaggcacagtagtcca

SEQ ID NO: 491170 - DNA, 617 bp, Homo sapiens
atacagttaaaatccaattgaactaaatagctcaaacaaaacatgagcagttctttgcaaactgcggtccaccagaagaaatcacttatgattctttttggctcagcgattttctcgcgtggagtcagagctaaagcccacaagccacaaagcttcaatgaaaacatctcaagccctgttagtgctgatgggcacagtcaggctgagttagcaggaagtaagttgctcggattgtcagcatgctcagcagatgctgaaggaacagtcctacacatggtgccttcatcatattccttgaatagtgatgttgagatacagtggtctatggtcttaagccaagtcatgaaagtcctgacagaggaggaatggggcaaaaggtattagacccccatgacataattatattgctaatctatacttgagagagttccatggtcacagtcaccacagcagtaacagcaaatatttctctgtgtgtgcatgtgtgtgtaacttacttgtgcacgttttytcatctgggttaagagcaaatccttcatggcactggcaaaggtaggagccatcagcatttacacactcatgttcacatccgtggttttctgaggcacagtagtcca

SEQ ID NO: 491171 - DNA, 617 bp, Homo sapiens
atacagttaaaatccaattgaactaaatagctcaaacaaaacatgagcagttctttgcaaactgcggtccaccagaagaaatcacttatgattctttttggctcagcgattttctcgcgtggagtcagagctaaagcccacaagccacaaagcttcaatgaaaacatctcaagccctgttagtgctgatgggcacagtcaggctgagttagcaggaagtaagttgctcggattgtcagcatgctcagcagatgctgaaggaacagtcctacacatggtgccttcatcatattccttgaatagtgatgttgagatacagtggtctatggtcttaagccaagtcatgaaagtcctgacagaggaggaatggggcaaaaggtattagacccccatgacataattatattgctaatctatacttgagagagttccatggtcacagtcaccacagcagtaacagcaaatatttctctgtgtgtgcatgtgtgtgtaacttacttgtgcacgttttttyatctgggttaagagcaaatccttcatggcactggcaaaggtaggagccatcagcatttacacactcatgttcacatccgtggttttctgaggcacagtagtcca

SEQ ID NO: 491172 - DNA, 611 bp, Homo sapiens
gtctttaccatgaagttgataaagaggccctggggcctcttcagcctttcaagacggctgctgagtctgctgagcaaagccgggcagtgcagtgcagtgagagacagcagccctgtctcctgcagagtggatggggggactcacaggggattcatttctcaggcacaggaacaagcgggataacgctaatgttttcttagagcttccagattataacaaagaagatgaagggaggaaaagtccaaactgccttttcattttgctgccttgccakaaagcacacagagatggtttttccacagacaagtccacattggtatatcctattcgacaccaggattgcgggggtggggggaggggggcggtcagtcccattgtgtagctcctcagccttatcatgttatctttccattttctgataaatacagaaggcttataaaaagaacccctccattaaaattttccaacacaaatgaataagctgtcaaaatggttacagaaccaatttcccttttaatattttcaggaaaggggaaacataaattctgcagaagtcatttaaagtcataaaccttgaaaatgtttgcagtgtgttctgctgattgaagtgt

SEQ ID NO: 491173 - DNA, 584 bp, Homo sapiens
agggtaagcttctttgagtgtacagaaaggcctcctggcaactgccattatacatctttactaccctgccacctagaagccttaacaggaccccacaggagttaaataaagtgctcaggaaggagtctggctactagaagggtaggctaagctgaccacaggcgggtatcctctcactgtgatttactagccagtgtgtgatctccagtgtaagaatcgcctagatatacacaatagttccgaaacactggtcggcttgctctagaatcaactgaagactttgttaaattgtttctgatgggaacttttactgtgtatatttattcttgtattttttaaccaatacttcaagcgrgcattctgaaaatgcaatagcccctagggtggataatactcttgtgtttccaggaggcaaagttagcttttccgaaaatcaaatgatggaacagattatgactctaagctcttgttgctcagtaaagcccagcctcttctctgaggttttcctgacctgagggttacttcagttgtacagatgtgaagcgtgctcgaggagtatgacccttggctaaaggaaacccaaa

SEQ ID NO: 491174 - DNA, 547 bp, Homo sapiens
ctgctgagcagacaccagaacacgaagtctggctgccgcaactaactggctttctaaaaccttgcttgctggcagagccaccatccaccccacttcatcctttgtgaatatattgaattggggttccccaattcttacccagaaccctagctgcctgaaagatagtctgggaaatatttgttttgtccttttagcttctgcaacrctggaagactcatggggagagttgggagttcatgccaagtgccaatggacatggacagcaatcgattttttttttttttttttgagatggagtcttgctttgttgcctaggttggagtgcagtggcacgatcttggctcactgcagcctctgcctcccgggttcaagtgattctcttgcctcagcctcccaagtagctgggattacaggtgcacaccaccacacccagctaaattttgtatttttagtagagacggggtttcgccatgttggccaggctggtcttgaactcctgacctcaggtgatctgccttcctcggcctctcagagtgctaggattaca

SEQ ID NO: 491175 - DNA, 562 bp, Homo sapiens
cttgctagcctcacatacattctactaagatcaaggaggctttatggtccagtctagtgtttgctgcattgagtatgtttcagtcttaagctctttggggagcaaatgcagtatggatgaagatggataatgtgcactttctaagctcctcccagcccctctctatggacctgttgatatggtttggctgtgtccccacccacacctcatcttgaattcccacatgttgtgggagggacccggwgggaggcaacttaaactttgggacaaatctttcccatactgttctcatgatagtgaataagtctcatgagatctgatggttttaaaaatgagagtctccctgtgcaagctctgttatcttgtctactgctatgtgagacatacctttcactttctgctgtgattgtgaggcctccacagccatgtggaattgtaggtccattaaacctcttttgtaaattgcacaatcttgggtatttctttatcagcagcatgaaaacagactaatacagaaaattcatacagtagagtggggcgctgctgaaaagatacccgaaaa

SEQ ID NO: 491176 - DNA, 591 bp, Homo sapiens
gtgcaatgaagggagagcattttctaaataattatttaattaaggttgagaatctgagattaagccagtttaatcaatttacccaaaytctcacagtacatagtgaaaccaagttgcaaatgcagatatttctgacagcaagggccagaacctcatgcatgttatagtgcattttataacgcctcttggggaggaaagctgaattttggaaagccaatatcttttaaatgtagtggtatcaagtaagaggtattgattagtctcagtgataagaagttgacttaagactggaattatgagaagaaggaaagggctgatgaaaaatacattaccaacaaaataagaccccaacaaagatgaggctgagcctcatgaatatgggaataaggaatagtcaaaggtgactcagggcttataagttcccatacatagaaaaatatggtggtctgcatctaccatgaatttggctttcatatgatgttcaatttaattaatacattccatcacaatccctcatctgctttttggatctaaatggtttttcacacctcagctgactaatgatgattttgagctatcgtttggcagcac

SEQ ID NO: 491177 - DNA, 591 bp, Homo sapiens
gtgcaatgaagggagagcattttctaaataattatttaattaaggttgagaatctgagattaagccagtttaatcaatttacccaaactctcacagtacatagtgaaaccaagttgcaaatgcagatatttctgacagcaagggccagaacctcatgcatgttatagtgcattttataacgcctcttggggaggaaagctgaattttggaaagccaatatcttttaaatgtagtggtatcaagtaagaggtattgattagtctcagtgataagaagttgacttaagactggaattatgagaagaaggaaagggctgatgaaaaatacattaccaacaaaataagaccccaacaaagatgaggctgagcctcatgaatatgggaataaggaatagtcaaaggtgactcagggcttataarttcccatacatagaaaaatatggtggtctgcatctaccatgaatttggctttcatatgatgttcaatttaattaatacattccatcacaatccctcatctgctttttggatctaaatggtttttcacacctcagctgactaatgatgattttgagctatcgtttggcagcac

SEQ ID NO: 491178 - DNA, 623 bp, Homo sapiens
actaatgatgattttgagctatcgtttggcagcactgccccctagttgtttcaggattttttgtaaaaacatgcttgactttctaatgtattttccagaaatctcttacgtacgaaagcaagttgatccttttaagtaaaatattggcaaaaacaatgaacaggaaaagttcaaaagaaaagataataarcttagttttataaaattatattctgatatgacagcagatttaacttgaaatatgtagacatattcatgtgccagttatcagcacagctctcaagatggccaggatagcacatgataatgcaaaacttaaatactagccagttaaccttgtaaaatttaacaggttttattgaaaaatctcagagcggtagctatttttattttatttcatagacaaggggacaaaggtctctgccagtgatttggtcaaaatctcttagctactaagtggcacagccaggattcaacccagttagggtttatagcaaagcatgtactctcagcaataacatggatgtggcttctgagaaagtacttgagaggtacaacccagtgatcatctatgtagcttcttcatggtagcttttgtagtatctctgtagtgtgcagattct

SEQ ID NO: 491179 - DNA, 628 bp, Homo sapiens
tgtgagcctattcagttcctactcttgtaatggagaggaaataccacaatgtagtttttgtggcagatgagagctggaatctcttcaaccaccacatcttttcatagtgttgtgtaaagtatggtgaagagactggagaactattacaattctgtatttctttattgaaagtagkatttactgcttagaataatgggattacagataagaggatatccatttctcaatcacagcaacctaaaggtaaatatagaaatgttattagcagactgaggagtataactttgtgaagaaatttaggcattgatacctcacattttcatatgatgcatcaaagcgtagggattcaaacatcttttgtaatctgttacataagcatcttttcagaactggtttcctctaaatgagttataatttttaattctttctagaatactcgataacactgcataagccctttcatgaaacaaacattcatactaacatattagtaatattacttccatttcaagggattcaaggaacaaccaaatcttttctatgtgtccatatatttgggattaacaaccaccaaaagggaaaaggaaggtgttggcatcaaggagatattaaatctataatcacccat

SEQ ID NO: 491180 - DNA, 542 bp, Homo sapiens
tgtttcttctggtgcaaaaatgtgttgacaacccctatatgcaattgcccctgctctaatactctgatttttttttttttttgagggggaggtggaaatatatatatatatgtatattttttcattattttcttatawttttttcaagtttcatgtaggattgtaaaagggaaacacatgtatttgatttgccatgtttactataatgcttttcatatactcatattctttcctttcaaggcttagatttaatggtgaattctctgtgctagatcccttgaaattccaaagtggaataattactccttgctccatgctctcctagcactttgattatcatgctaacatagcaatcattagattatattttagctacatttggatatagttatctagctttgtaaattgtgttttactttgtaaaaatataaaagtaataaaacttggttaaatgtaactcgggtttgagaactcagagatagtcctaagtacataataagatcacagaaaaatagcgggagtcacagccatctggagaagat

SEQ ID NO: 491181 - DNA, 614 bp, Homo sapiens
cttcttacttctccaacttctgttggccacctgcattccttggcttgtggcccttcctccaacttcagcagagcatcttcaaacgttgccctggctcccttatcacgtcacctcctgctggctttgactctcagctccctcttatgaggatccctgtgattgctggacctacccaaataaaccaggatataaaccatcttaagatgctcagtcacctctacgaggtcccttttgctcgcaggtgccaggagttgggacttggacatctttaggggaggccattcttctgtccaccacaccaccccatgattccatttccatgtcaccactgtctctaagtgtgtctaacccayggctcaagagtcaaaggtgcatcacagcagtgagaactcacaggttcgggtttgctttcttcctgtggttgatttctaggctttggaactgcgacataactagcgatggctgctgcgatctcacaaagcttctccaagaaaaatcaagcctgttgtgtttggatctggggctgaatcacataggagttaagggaatgaagttcctgtgtgaggctttgaggaaaccactgtgcaacttgagatgtctgtggtgagttaact

SEQ ID NO: 491182 - DNA, 261 bp, Homo sapiens
tctgactcctttggactggtggtgatactcctagaagtctctgggaaccaaacaaaggctaagtgtgaaatgaaaccatattcccgccccctgtcactgtgcctactccgaacacacacacacatggkgaggcacaattccacagcatttaagaaaagcatgggccgggcacggtgcctcatgcctataatcccagcactttgggaggctgaggcaggaggctggcttgagtccaggagttcaagaccaacctgagcaaca

SEQ ID NO: 491183 - DNA, 261 bp, Homo sapiens
tctgactcctttggactggtggtgatactcctagaagtctctgggaaccaaacaaaggctaagtgtgaaatgaaaccatattcccgccccctgtcactgtgcctactccgaacacacacacacatggtgaggcacaattccacagcatttaagaaaagcatgggccgggcacggtgcctcatgcctataatcccagcactttgggaggctgaggyaggaggctggcttgagtccaggagttcaagaccaacctgagcaaca

SEQ ID NO: 491184 - DNA, 571 bp, Homo sapiens
ggaagagggggagttacccttggaggcaggcggaatcgaccattggatagctccaagtgctgacaagggcggacacgggagctgatttctgcctggtgggaaaggtgatgattccagctactttgggaagtggttggtcagcatggattatagccgaaggccccagctttgccttgttctagcagttccactcctgggcagcccgagagaggccttcccaaccatgggcagatgttcatcatagtattgtttgcagtagtaagaggtcggagcccacaccaaagaggatggatcaatcactaaactctaaatgagtgatctaagcaggggtcagcaaactttctctgtaaagggctagacaatgaatgtttcaggtgttgcgggacacaccatgcctggcaccactattccactagtgctgtggagcgggagactgctagggatggtgtgtgaatgaatgggaatgactgttccatcccacgtttattgacaaaaatygcctttcagaataggcaaatccacagggacagaaagattgctgggtgcaaggggctggcggagagggaggtct

SEQ ID NO: 491185 - DNA, 614 bp, Homo sapiens
tgtgctttcgatctggggccacagacgagcaatggtcatgcctgacttggctgtatggaacctctcgctgatgtgaacacctgttcccatgtttagatccaggccgatggcctgtgaattttgttcttctctcattcctattccttcataggatcaccagtgcatgatagaaggtggggagttcacaagaaggggcttttggatgctggcacttgtggagctagccgggaaggttgaagttggacmtgtcaaccgtgttgccatttgtgattcttttgtaggttggaaaactgtcaccttacagaagccaattgcaaggaccttgctgctgtgttggttgtcagccgggagctgacacacctgtgcttggccaagaaccccattgggaatacaggggtgaagtttctgtgtgagggcttgaggtaccccgagtgtaaactgcagaccttggtgtaagtccgtgctggctgcctgtgtgcgtgggtgtatatgcacacgccccccacctccgggtttgagtagggtggttatgagaacacttaattcctctaaaagttccaagcatgatgctaatgacaactggtaagacctgggtagatgatggtaggaaaaaa

SEQ ID NO: 491186 - DNA, 566 bp, Homo sapiens
atttgggggtgtgttttcacttctccatcgtcatggactccaatctgccatctatttccaaggcccttccaggtcctgtgtccctcagctagtggtatgcttcacttgggacccagagatacatgggcattatagttcaaattataattaagtttagaactctattgagacagaagaaagaaaacagagctaaggtgaaatatctctgataatctgtgttggttaatatctaggatcctagtaccagatatgttggagtgtgagctggtgtcttctgcctgtaagacactacctctctagcaactgaatttagcaaatacaatcgtaatcccagcaygttagggaggccagggtgggcagatcatctgaggtcgggagttcaagaccagcctggccaacatggggaaaccctgtctctactaaaaatacaaaacttagctgggtgtggtggcacgcgcatgtgtgtacacacacacacacacccctgtaatcccagctactcggaaggctggggcacaagaatcgcgtgaacccaggaggcggaggttgaagtgagccaccgtgcc

SEQ ID NO: 491187 - DNA, 566 bp, Homo sapiens
atttgggggtgtgttttcacttctccatcgtcatggactccaatctgccatctatttccaaggcccttccaggtcctgtgtccctcagctagtggtatgcttcacttgggacccagagatacatgggcattatagttcaaattataattaagtttagaactctattgagacagaagaaagaaaacagagctaaggtgaaatatctctgataatctgtgttggttaatatctaggatcctagtaccagatatgttggagtgtgagctggtgtcttctgcctgtaagacactacctctctagcaactgaatttagcaaatacaatcgtaatcccagcacgttagggaggccagggtgggcagatcatctgaggtcgggagttcaagaccagcctggccaacatggggaaaccctgtctctactaaaaatacaaaacttagctgggtgtggtggcacgcgcatgtgtgtacacacacacacacacccctgtaatcccagctactcggaaggctggggcacaagaatcgcgtgaamccaggaggcggaggttgaagtgagccaccgtgcc

SEQ ID NO: 491188 - DNA, 480 bp, Homo sapiens
agaatccttcttacttctccaacttctgttggccacctgcattccttggcttgtggcccttcctccaacttcrgcagagcatcttcaaacgttgccctggctcccttatcacgtcacctcctgctggctttgactctcagctccctcttatgaggatccctgtgattgctggacctacccaaataaaccaggatataaaccatcttaagatgctcagtcacctctacgaggtcccttttgctcgcaggtgccaggagttgggacttggacatctttaggggaggccattcttctgtccaccacaccaccccatgattccatttccatgtcaccactgtctctaagtgtgtctaacccatggctcaagagtcaaaggtgcatcacagcagtgagaactcacaggttcgggtttgctttcttcctgtggttgatttctaggctttggaactgcgacataactagcgatggctgctgcgatct

SEQ ID NO: 491189 - DNA, 585 bp, Homo sapiens
ttctgctccctcccactgtggcttctcttcacaccttgatacctcttcagtacttcttgccagaatcctaccatggcgacgaacttatctaaaagtcttagaatcatacatttaaaattacctttaaaatgtcaaattccctgcattgccattagcattatgtttccttaaaaatgaagaggtgttaccctgtagaactgtcatagagggagatagccactgccaaaacaaagaaacctgaaagcagagatggattggagaagaaatccatgtctgtggctcttcctgctccttgatatcttgctggtgctttccatggcctgagcccagctagacgtcacaagggtgcaaggtgactcagtgctaagggtcaggcctttgtggagaggaagcagggatggatggaagaagckggagaacttgttcatggttagagacccagcaagggcaaatccagggctagaagacaaaccttactaaattagtttagtcctgtgactaggcataatataattacttttctgtgaagaacttgagttattgaaaaggtataaactctgatggaataaaaggaataagtcttta

SEQ ID NO: 491190 - DNA, 607 bp, Homo sapiens
gacttgatgtttctctaactacaaatattatatgtggacatagttttagagttccatccagtgatcacaagcagtatcaattattcctccagttccatgacatattatgtgcagagtctagcaactcactgcattgtattataattatcacctcttatatggctgttaagctctccacaagaaggactataattatacacacacacacataattatataatatatatgaattatgttaaattatgtatgaattatatacctatatatttayagcatctatataaattatatgcatgtatacatttatatattttaaaataaaacagtatctaaaattatgttttttataaaagacatccccaatcaatggagcgatatgaatgtaagagaaaagttatataagctgaacagtgtcagaggagatatttttgaccaagggaaagtcagcatgtagataggtcatcattttctggcattttaatttccaggttagacatcccctgaaatcttggttttctatttctttctctccttttaaaaagtcagaatgatggcatgtacatgtgggtgtgcagacacatctgcatgtgataagtcttccttttcc

SEQ ID NO: 491191 - DNA, 607 bp, Homo sapiens
gacttgatgtttctctaactacaaatattatatgtggacatagttttagagttccatccagtgatcacaagcagtatcaattattcctccagttccatgacatattatgtgcagagtctagcaactcactgcattgtattataattatcacctcttatatggctgttaagctctccacaagaaggactataattatacacacacacacataattatataatatatatgaattatgttaaattatgtatgaattatatacctatatatttacagcatctatataaattatatgcatgtatacatttatatattttaaaataaaacagtatctaaaattatgttttttataaaagacatccccaatcaatggagcgatatgaatgkaagagaaaagttatataagctgaacagtgtcagaggagatatttttgaccaagggaaagtcagcatgtagataggtcatcattttctggcattttaatttccaggttagacatcccctgaaatcttggttttctatttctttctctccttttaaaaagtcagaatgatggcatgtacatgtgggtgtgcagacacatctgcatgtgataagtcttccttttcc

SEQ ID NO: 491192 - DNA, 548 bp, Homo sapiens
ttttggcctgagaatcatgcttttgcaatcccataggagacagggtgagacatactatagacccacgtcacaaggttccagtcacagcacaccaaacagcacttttgaaaaaaacatgttttatgggtgggtcaacacttgtcagattaggggaccctgtcctcactgatgtcacttgatcctgttaattaccgagtcccgagaaagagacccaggtaaaagtaagctccgtatccttgggccatgtgatgtttccggataatttccagattatctgtagttgaacagggagttcacaagctttccccatgactcagaaaattrtaactgcctgaagaatttttagaaggctgtaagtgaggagatggtcctgtgggactgagcaaaacataccatgctggattttccaaatgtgggatgtgatttagataagcttccacccttgatatgcttttcaaaaataacctttatcagattgttatttattatttcactcaacacatagtaagtattgactaaggaccactcactattttaggcagtgacac

SEQ ID NO: 491193 - DNA, 608 bp, Homo sapiens
aaaaaaaaaagaataaaagttggaaaacttcaaaccatcyagattgcagtctcattttacccatataacttatgtaatcccagccatctcttcaattttccaatctttaaattgtgggaaaccatactgaacttttatgtataatagctaattgcaagcctaagtgtctatactaaataataaagataaacggtggttttcctaccttctccataggcgagcccacaaactatcccgacaatatattttatgtcgaaatcatgccagtgcttctctatatcccttccccgatccattgcaatgcagtctgtcgcttgcagcatactgatgatgtaagaacctatttctgagcatctcttgcagagtcctcataaaaaatggccgccactttggggatgactttcccatttaactcttcttaaaatactctgagtttcttctaatgattttaagcattgatatttagaaataaaaattttcaagatgacttctggaatttccttccttttgtaagagcaattttaaaagataccatttcgattccatatcagacattttgccgcttccaatgcaacatctgggtttgtgtgtgtgatcaagaatgacag

SEQ ID NO: 491194 - DNA, 614 bp, Homo sapiens
gactcaggcagctgaagccgctgggaacaaagccttcatcatgggggtgggaggcgtcgtgcacctgagtgcagcaaggcacctgcctttcagctccgtccccacatccacagacttggtcctgggagacggacatctttaaagaaaaaagaaaaaaaactcagtgacttgaggttgcactagccaacagaaaggaacatggagttacgaaagcgacatgctcctcacttctccacagatgacctttcatttgcttttgcaggatgaggccgtcagtgccttgccacgagtctgaggtgggaagaaagggtcgcagctcctggcacatggcagaattagcgaagcgtgccatgtggaggtctgaggtctgcaggttctgastggacagtgaaacccactgctcccgccatccctttctctgtcacacacacacacctagtgaccttcaaaagtgtctcgggagaatttggcaggatgctcgtgtcctgtgccagtgacagcactgtcatcactgttagtgtgaccctatctgtttttcaggcttgtaaggtgaccaggaggaacatacgtacacacacacacacacacacacaagcgcagccaccgtcccatgg

SEQ ID NO: 491195 - DNA, 614 bp, Homo sapiens
gactcaggcagctgaagccgctgggaacaaagccttcatcatgggggtgggaggcgtcgtgcacctgagtgcagcaaggcacctgcctttcagctccgtccccacatccacagacttggtcctgggagacggacatctttaaagaaaaaagaaaaaaaactcagtgacttgaggttgcactagccaacagaaaggaacatggagttacgaaagcgacatgctcctcacttctccacagatgacctttcatttgcttttgcaggatgaggccgtcagtgccttgccacgagtctgaggtgggaagaaagggtcgcagctcctggcacatggcagaattagcgaagcgtgccatgtggaggtctgaggtctgcaggttctgactrgacagtgaaacccactgctcccgccatccctttctctgtcacacacacacacctagtgaccttcaaaagtgtctcgggagaatttggcaggatgctcgtgtcctgtgccagtgacagcactgtcatcactgttagtgtgaccctatctgtttttcaggcttgtaaggtgaccaggaggaacatacgtacacacacacacacacacacacaagcgcagccaccgtcccatgg

SEQ ID NO: 491196 - DNA, 547 bp, Homo sapiens
cccacataaaagaattatcagggtcccacaaatgtcagtaggattaaggttgaaaaaccatgccattcgtctacttcgttattatcacagcacttatctgcatcatcataataataattaacatgtatttcagacttaccacgtgccggacaccattctaaagtttttacatttatttcctctttaatcctcatgttccaaccatataaaatgggtcctattattacacagatgggacattaaggcaggaaaaggttaactgtcttgctccagatcaagttggagagctagaatttgaatgtagatggtctggctctaaagcctttacctttaaccattgcattagagggccatgaggttacatttttttcctatattatctgtcttttcccactaatatactatctccatgagaacatggaaataatatacttgtttatctctggatcctctctgtctagacatataggaggccctcaaaaatcttgaacgaatgaagagttctgcatacctttcyagcattgcttcttataatctcacacaaagc

SEQ ID NO: 491197 - DNA, 636 bp, Homo sapiens
aacaggtatgtaccatcacgctaccacttcaggcacatcagggaaaacatacacttggcttcctttctcagtccatacaagcattttgaacagacatgagaagagtttaagaaattgtggagggcgacacaggaccatgcctcccatgtctgacaaatggctgtgttctctgatgactagcgtgggatccatcaccctgcctcctaatccagggccttcctccagcccagctcactgcccgggtactgctgccctgtcatctctgcccttcatccctcttagaagccaatccccacttcccagtaggtggcagatacttctggtgtcctttgtacctttctcaacagccctccctgacattgcacrttcaggattaggctcctgcactaatagatgacagtaacctgttattttctcagtgtggatctgtcagacttgcttgggcataaacacagttccctggtatcagcagtaccataaggtgccaggatccactgacctaagtttgctgagagatgctgaacaaaggtaaattttcctaatttgcagattgtattgtgaagtcaaattgagactattaatttggccacctttcccatcgggtaacttaggcagcttggtagctcagtgtgcatg

SEQ ID NO: 491198 - DNA, 636 bp, Homo sapiens
aacaggtatgtaccatcacgctaccacttcaggcacatcagggaaaacatacacttggcttcctttctcagtccatacaagcattttgaacagacatgagaagagtttaagaaattgtggagggcgacacaggaccatgcctcccatgtctgacaaatggctgtgttctctgatgactagcgtgggatccatcaccctgcctcctaatccagggccttcctccagcccagctcactgcccgggtactgctgccctgtcatctctgcccttcatccctcttagaagccaatccccacttcccagtaggtggcagatacttctggtgtcctttgtacctttctcaacagccctccctgacattgcacattcaggattaggctcctgcactaatagatgacagtaacctgttattttctcagtgtggatctgtcagacttgcttgggcataaacacagttccctggtatcagcagtaccataaggtgccaggatccactgacctaagtttgctgagagatgctgaacaaaggtaaattytcctaatttgcagattgtattgtgaagtcaaattgagactattaatttggccacctttcccatcgggtaacttaggcagcttggtagctcagtgtgcatg

SEQ ID NO: 491199 - DNA, 592 bp, Homo sapiens
agcaagaatatggaccaggcggggcaggtaaagattgagcccaaagcatcggctcctcctcttctgctgtccgcccctcccgttcatccttcccccattctcagtacacacaacccaccgtccaggatatgcttttctttttcttttttttttgagacagagtctcactctatcgcccaggctggagtgcagtggcttsgtctcagctcactgcaaattctgcctcctgggttcaagcaattctcttacctcggcctcccaagtagttgttattacgggcacctgacaccatgcccgggtaattttttgtgtttttagtagagacagggtttcaccatgttggccaggctggtctcgaactcctgacctcaagcaatctgactgccttggcctcccaaagtgctgggattataggcgtgagccaccgcacccggccgttcagtgatctatttgctcttaccaaggcgttttctcttagtaaactgttaaataattctttgcctgcctccacttcccaaatctttaaaattaaatttgatgaagcaaatatagtgatagtggtgatgatttcaaatcttcaaatgtaatagta

SEQ ID NO: 491200 - DNA, 592 bp, Homo sapiens
agcaagaatatggaccaggcggggcaggtaaagattgagcccaaagcatcggctcctcctcttctgctgtccgcccctcccgttcatccttcccccattctcagtacacacaacccaccgtccaggatatgcttttctttttcttttttttttgagacagagtctcactctatcgcccaggctggagtgcagtggcttcgtctcagctcactgcaaattctgcctcctgggttcaagcaattctcttacctcggcctcccaagtagttgttattacgggcacctgacaccatgcccgggtaattttttgtgtttttagtagagacagggtttcaccatgttggccaggctggtctcgaactcctgacctcaagcaatctgactgccttggcctcccaaagtgctgggattataggcgtgagccaccgcaccyggccgttcagtgatctatttgctcttaccaaggcgttttctcttagtaaactgttaaataattctttgcctgcctccacttcccaaatctttaaaattaaatttgatgaagcaaatatagtgatagtggtgatgatttcaaatcttcaaatgtaatagta

SEQ ID NO: 491201 - DNA, 639 bp, Homo sapiens
aactggctgcttctgacagggccaaacatgacaagcttctccattctgagagaatctgcagactgaatgccatctaaaagggagcctaaatagatagctctttgatacattaccatggatctttttgtccctgatttttattaatcttttatatatatagcagcacttgatatagatgactactgcccttgtgatttcctcgtggatttttctaaaccttgaagcaatgaggaagtgaatacagagtttatgcctttgtatgggaaatgaattggattattagagaaaattctctggaaaaccaaccagcaagcagtcatggctctagaatttctataaaggagttaaacggggcaacttattgggacagccagggaatttgtcttaaagttgtatagcaaagaaaccacctttacctagataatatggggtggtagggtggattttggagacaggcaagagacctctgagccatctcttgtcatcaccaccctgtgtaagtttgacatacctaaatacctaaggaacaaaggctttatctaaattrtaagtaaatactcaggtatgaatctgaccaatgtcaccattcaggtactcaggttaaacaaagccaagaataaatcctcacaatcctttcac

SEQ ID NO: 491202 - DNA, 561 bp, Homo sapiens
ggcttggctcctcactgatttggggctcatgtctactccatgtgtgttcatcattgctaggaggcaggagcttcccaggacaagctcttctcatggtaatggtagagatacaagacaggcaaacagaatcaagtactgtcacttaagacagacccaaaactttgccatattatcactttcactcacattccattggctaaagcacaagtctaggtcagggaagtacaaatatagatagtaaatatagatggcaaagggtgtggacagagggaggaaataattagagtcaataatttacaatattattaaaaagcaaatagctctcctgaggttccccttttaagtatatttctagatatcagaagtttaactttgagaagaaatgcaaaagtgagtggatatttcagattggatagttgattaggtggatgacattcagagaagaatttggagcatattttcctgctctccttgcaatcactttaggtcaaattctgctgtstgacatccatcctatattcctgtgatccgttgacataggtccagtcattgatgttgttt

SEQ ID NO: 491203 - DNA, 600 bp, Homo sapiens
aatatccatgtgaacttccctcattctataggaaacaacaatgccaaattctgaaccttctgagcaaaatgtcacagacttaatgttccctatcgacacatgaattgactccggttccctcccttccctgcctttctatgcctgcagtctctccctaaatcaccaccaccacgatagggtcaagtgtggcctcggctgcctgtcactgggatagaaaggakttctcttctattgattctccaaagaaacaattatcaagtaaaatgaaaatttcattttcaattttcataggcctacagcccttgctatctgtatctgattctgaagttctataaggctgaatatgatgcattcagtgtaatctatttactgtcccttgcaaggttaactattactgcataaaaccactctaaagcttagggactttgaacaaaacagtttgctatttctcacaattctgtgggttgatccggtgtgtgaatacttcactgggtttggctggggtaaggtgtgtgtatactaaactaaggttggctgggggcattgggattgttagaaggccctaaatggcttcactcacataaatgtcaattagtgctg

SEQ ID NO: 491204 - DNA, 571 bp, Homo sapiens
cctccactagactaaatatgagcatggcaccctgatacaaataatgtagtcaaattcttatctggacttcattgtctacccccaagcaatttgtcaagttattttcctaaatacagagttttcctgccaagaattctggtgacagttgtcaggcaataaaattgtaatttcctggctataaatgaatggtctttccactgacagatgacatcatattgtatagattcattcctgaagaatctattgcagccctaaagtactactacctttaccttttaaaggggctctgaactttccgaagcttamtaactaaaaggatattttaaaaacttcaataatggctattatatcattatttaccatgtaagtattattgtggcacattgcaaagcattggtaatatggccatcgcagagttatcttgcctaatcatttaatcctaaggtttcttttaaaaaaaatggctcatgatccacaaagacagtaagcacataagatttcagaggagaaaacaatcgctgtagcctagaataattgaggtttcagcagtgaaatctgagttggccaggta

SEQ ID NO: 491205 - DNA, 599 bp, Homo sapiens
tatcaagtgccagcttctaggccatatggtaagtgatacaaccaatggataccatgatcatgggcccatgctgcagctccttcactgtgaaatggttatcctgatcagatactacgtgttgtgggatcccatgcctgtgggccagtttctccatacgccactggataatgtgctggatgaggctctgcaggcatgaaaggtagacccacacccaaaacaggtrtctactgctatgagaacaaattgccaccaagtgatcaattggtgtccccaaaaagtagtgccatatttggggctcagcattgatctctagtactggcaggttagacattcagaaggggcaatagctatgtcagtctttttaagtggtggtccatgcagttgcgttcatgtgggacctctatctctgctaccatgaccactctattcatgggtccatttgacaatctatcatgccagttctggaggaaccaatgatgaatgctgactaatgtaaactggctgagcattttgtctgtttgtatatccaatgtcatttctgtgacagatgctttataatggacattaacacgtcacacaaaaatctttacactttatgc

SEQ ID NO: 491206 - DNA, 599 bp, Homo sapiens
tatcaagtgccagcttctaggccatatggtaagtgatacaaccaatggataccatgatcatgggcccatgctgcagctccttcactgtgaaatggttatcctgatcagatactacgtgttgtgggatcccatgcctgtgggccagtttctccatacgccactggataatgtgctggatgaggctctgcaggcatgaaaggtagacccacacccaaaacaggtatctactgctatgagaacaaattgccaccaagtgatcaattggtgtccccaaaaagtagtgccatatttggggctcagcattgatctctagtactggcaggttagacattcagaaggggcaatagctatgtcagtctttttaagtggtggtccatgcagttgcgttcatgtgggacctctatctctgctaccatgaccactctattcatgggtccatttgacaatctatcatgccagttctggaggaaccaatgatgaatgctgactaatgtaaacyggctgagcattttgtctgtttgtatatccaatgtcatttctgtgacagatgctttataatggacattaacacgtcacacaaaaatctttacactttatgc

SEQ ID NO: 491207 - DNA, 484 bp, Homo sapiens
catatgtacccctgaacttaaaagttaattwaaaaaaaaaaaaaaagaggccaggtgtggtgcctcacgcctataatcccaacaatttgggaggccaaggtgggtggatcacttgagcccaggagttcgagaccagcctgggcaacatgatgaaaccccatctctactaaaaaattacaaaaaagtatccaggtgtggtggtgtgtgcctgtggttccagctactcaggattctgaggtgcgagacctgatcacaggaagttgaggctgcagtgagctgagatcatgccactgcactccagcttaggtggcaagagtgagaccatgtctcaaaaaaaaaaaaagaaagaagaagagaaagaaaaagaaaaagaagatgtccttgttaggcatttcaatctgtgatcaactgaattgtaacaatgaggtgagccacgataagcatgtgtatggccgttccttacacacactcattacttacacac

SEQ ID NO: 491208 - DNA, 625 bp, Homo sapiens
ttaaatatgtacacactcatgtaactattctccagatcaagatatagaacacttcagcacatgccttcttcagcataattattaacagcatcacttttcactctcaaaagttcttgatttaggctgggcacagtggctcacacctgtaatcccagcactttggaaggcctaggtgggtggatcacaaggtcagaagttcaagaccatcctggccaacgtggtgaaaccccatctctactaaaaacacaaaaattagcygggtatggtggcgcatgtctgtaatcccagctacttgggaggctaaggcaggagaatcacttgaacccaggaggcgttgcaatgagccaagattgcgccactgcactccagtctgggcaacagagcaagactccgtctcgaataaaaaaacaaacaaacaaacaaaacagtaaaagaaaaaaaagtatcttgatttgaatgatcaagatgataaagagttactttagtcatcctaataaaatctttccatggtttctccttgacccacctgaagaagggtggatttcattgcccattaacattatacagtcctgtggtctttgagtaatattttatacttggcggagaatcaaagtaaatatattgc

SEQ ID NO: 491209 - DNA, 572 bp, Homo sapiens
gttgcccaggctggtctttaactcctgactttagggattctcctatcttggtctctcaaactgttgactttacaggcatgagctaccatatattggcagagaagtattttaatagctttttcaaatcattgtgaatttttaaaatttgataccatgtcatagtggagtctcaaatacatcaaggaactgttatgttaaaatacatcagtctatcttgcactctcaatggattatttacccttgcatgattttttaacatcatcactattcatttcaaaaataatggttcaaacctgagattatctaaaagtaaaaataaaagttaatagtaatttttaaatgaaatattaaaagacaatgttattcwattctattctttattctgtcatctcactattatgactttcagtaatgtgaaatatttccaagcttctctgacttctctgttcttttgaatgttctgagcattccttcatggagaatttgtactgtgtaccattcattactgtcaaaggttcacacaaataaaaataaaaagtttgacatcttagccataggcatctcattatccc

SEQ ID NO: 491210 - DNA, 680 bp, Homo sapiens
tgttgacaagtctcaatttttaaaataaatgtaagaatgttactggtgacatactacaattacaatgggaaacttggcactctcctccacaagccctaactcaatttgtaaaaatgagacaggaaataaaaatactaagccaaagctaaagatactattatatcataatgctaggctgtgggaaggagaattggttgaaagcttgtgttcagtcatgtaagagaagttaaagatttttgcatcctctgccaaagtcttggaattctttaaagaagacgttttttaatgtggtacgcctttgtacttgtcttaaatcatttttgctgtaagcagataggtttcaaacttgagaggacaagcaagaggggaactaaggagaaaaggatgccagaggctgaggctcatcattttatgcaaaaagagccactgcagttcattgatgtactatctcaggtagtcagaaaaatttaatctagaagctttaatgcagtttgtccactttgcatatatctaccttgaggtttagaatggaaaatatatagcaaaatggatttaaagtttttaatcttggttacactttttgtgattaacaartgctgtaaccattagatgacaatgtgctgactacattaatgtgtgtacaaagactgactctggcttagccttataccaaaccacat

SEQ ID NO: 491211 - DNA, 472 bp, Homo sapiens
tggaagaaaaaatatagggcggcagcccacatcacagcggtggccacgatgcagaagagcgggactgggaggaccttttcagagctgcggagctgtgggaggagaagcagatgcggcctcacgcgaccccgccttcgcctgcccgagggcccgaggtagccgctcccggcacccgctcttaccttcatgatgatgtaaaaggccaggtacagcaaaaggttacagatgaagatgcccagcatgtaggaagcaaagtccctggggcggtatatcaatccaaagagggcgctgcaggcgtgggagaaatgtgggcaaccgtgaaggtggatttgtaacactattggcttttccaatcccccagtccctttagggggaargggcaggttctttttttttttttaacctttaattttaggtcaatttaattttttttaaactcttacctctgatggaacagtagatttttaaaaaa

SEQ ID NO: 491212 - DNA, 643 bp, Homo sapiens
gcacagtttcaggtaaagtgcaggaacagggtagaggctacaggtggaaagatctagaagctctgtgtccaacaaggtcctcaygcttcttatcagcatggactgactcaatctaaatttggtgtcccccctccacaggttctagtagaaacctacgcatgaagaatagaatgcagacagaatatagttaaatccaaaaaaggcccttttctttcaaaccctggggaaagaaaaatggtaatgttcagccaaaaaggcatcttgagaagaaactaacttctgcctttaatttgcatataagtatcataaaatcatcactcacagattaacttcactagtttgtctggttgttggctattactgttgccctctggatgtacacagccacaggcgcactacctccaggcaaaggtagcatttatatagacaacaaaattacaaaaatggcttccaggctcctaaagatatcactccaaagctgtttcattttggtatcacctttgccctttcattcttcacaggaaaaaacaaggccaaccaaaccaagggacagagctatatggcacactgaaatattttaaatcaattctgaactaattttgtttcaagaaattattgttgctttttaagagaatacaaggca

SEQ ID NO: 491213 - DNA, 602 bp, Homo sapiens
tatgctaaaattggaaggatacagagaagattgtcatggcccctgcacaaggatgacatgcatgaagcattccatatttttttaaaaatacatatttacaacgatattcactgcagcattatttgtagtcacaaaaactgtaagcaacccaactgcttacaggaggaaattggctacataaattacagtatattcattcagagggatattaagcagccaataaaaagaatgaggcaggccaggcacagtcactcacacttgtaatcccagcactttgagagaccaagatgggaagatcagttgaggccaggagttcgagaccagcccgggcaacatggcaaggcctgactctacaaaaaataaaaaattagcgaggagtggtggcacgtacctgttgtcccaactacttgggaggctgaagcaggaggatcccctgagctcaggagttagaggttgcagtgagctataatcacaccacagcactctagcgtgggagacagagcaagacctgtctctaaaaataaaaataagaaaaagaatgaggcagctttatatttatggaattatctctaacatgkagtcttaaggttacaagcaaatta

SEQ ID NO: 491214 - DNA, 280 bp, Homo sapiens
cctgcacttcggcccacagccacatggtacaaggttatagttacagttgaaaactgctgacgtctactttttggtkgttgtacaaataataattaataaaacacacacaaaaaaacacacttttcttcatggctaaatattcacatagttgattcaaacctaaatatgcatacttgcttttcttttcctgttttcttaagtttgaataatagtcatgtagctgtttaagaatcagacagaaggaaaactcatccgcttagtacttttcttaaattgtcca

SEQ ID NO: 491215 - DNA, 280 bp, Homo sapiens
cctgcacttcggcccacagccacatggtacaaggttatagttacagttgaaaactgctgacgtctactttttggttgttgtacaaataataattaataaaacacacacaaaaaaacacayttttcttcatggctaaatattcacatagttgattcaaacctaaatatgcatacttgcttttcttttcctgttttcttaagtttgaataatagtcatgtagctgtttaagaatcagacagaaggaaaactcatccgcttagtacttttcttaaattgtcca

SEQ ID NO: 491216 - DNA, 541 bp, Homo sapiens
ccctgtctttgaaacacccaattattttgcaattcttacccactgtgtatatattctttaggagaagagagagagttaatgttcatagaacacctattatgtgccaggtttttcctacrtcttctcatttaattttcaccatgctatgaaggaggtattattctacctgttccacagatgataaaactgagaggttaggtacacttgccgaagttcacataactaggaagtagtggactcaggattcaaatccagatctctctcatctgcagctcccagactgtgctacaccacattgccacagccactgtgcacatcacagcttacagtaacatactttccacttttcaaattatgacccaattttcataatcactacttttgtggatgtattcactcattcagtaaattatttattaagcagctactctgtgccaggaatagtcaagacactgaggatatagtagtgagcaaaatacataaatccttgctctcatagagcatgggttacagggggaggaatagacaacagcccagaaaa

SEQ ID NO: 491217 - DNA, 592 bp, Homo sapiens
gttcaagcgattctcctgcctcaacctcccgagtatctgggattacaagtgtgcaccaccacacctggctaatttttgtatttttagtaggggaggtttcaccatcttggccaggctggtcttgaactccggacctcaagtagtctgcctgccttagccttccacagtgcttggattacaggtgtgagccactgcacctgkcctgcccacttgttaatggggttattttttgcttgttgaattgtttaagttccttatagattctgaatagacctttatcagatgcacagtttgtgaatatttctaaaattttctccaaacattagatctttttagagacatgttggatttgacatgtgtccatgttttaagtaagatttttaaaataagaatacagggcaagttgaaataaatggtaactcattgcatctagtaagtcacacacatacacacaccatcctccaaaagctcaaagcatgtcaagatacaaatcacaccagtgttagcctcttatttatgtgtcttagccctgcctactcaagagcctgtctcctcttgacagctctgtcatatagggtagaaaatatagaac

SEQ ID NO: 491218 - DNA, 592 bp, Homo sapiens
gttcaagcgattctcctgcctcaacctcccgagtatctgggattacaagtgtgcaccaccacacctggctaatttttgtatttttagtaggggaggtttcaccatcttggccaggctggtcttgaactccggacctcaagtagtctgcctgccttagccttccacagtgcttggattacaggtgtgagccactgcacctgtcctgcccacttgttaatggggttattttttgcttgttgaattgtttaagttccttatagattctraatagacctttatcagatgcacagtttgtgaatatttctaaaattttctccaaacattagatctttttagagacatgttggatttgacatgtgtccatgttttaagtaagatttttaaaataagaatacagggcaagttgaaataaatggtaactcattgcatctagtaagtcacacacatacacacaccatcctccaaaagctcaaagcatgtcaagatacaaatcacaccagtgttagcctcttatttatgtgtcttagccctgcctactcaagagcctgtctcctcttgacagctctgtcatatagggtagaaaatatagaac

SEQ ID NO: 491219 - DNA, 597 bp, Homo sapiens
agtttactctcctacttagagctgtgatycttatcatgggctcttgtgatctaaccccagcctgcctccctggcctctgtccttgcttaataacctctagccatatgaacctggaataccagtctaattcccacttcaaggcttttacacttgttgtttcctctgcctggggtgctcttccctcatatcttcatgacacttgttcatttacattgtagctcaaagcatacctcctcagggaggcctttcctagacactatctgaggtacactcctgcacccccagccttcatgattgctttttatacattactgggttttgtttccaatggaacttatcgcttattactgtcctaaattattttatttattaattttttagccacctttctcttatagaaataaggttcctgaggacagggagtttattctgtatactacggtatccctgacatcagggcttgtgcctgccgatagtagatgctttctaaatatgttctgaatattagatagctagttcccaaatgcactgcactgaaagtgtatgaaaattggaaattggcttctagatttttgtattatattgccaaatgatgga

SEQ ID NO: 491220 - DNA, 357 bp, Homo sapiens
aataaagggaaatgaggagtcaaaaatgatcccaagtgtttatcttgaatgtttaagcagatggcgttgtcctgatatggaatgcagaaaaataacatcgagttgagtttgtgaygctttcgagatacttaaatgaaaatgttgagaaagcagttgaaattacgtgtctcatactcaggaaagagttgagggcatgagtctctctaggtaataactgattccataggagaggatgagagcatctgagagcatgtgagggcgagagaaggtctagaatgaggccctcggttaaggaggagagagaggagaatgagacaacaaagaaatccaatgtggagtcatgagagccatagaaaa

SEQ ID NO: 491221 - DNA, 617 bp, Homo sapiens
gaataaagggaaatgaggagtcaaaaatgatcccaagtgtttatcttgaatgtttaagcagatggcgttgtcctgatatggaatgcagaaaaataacatcgagttgagtttgtgacgctttcgagatacttaaatgaaaatgttgagaaagcagttgaaattacgtgtctcatactcaggaaagagttgagggcatgagtctctctaggtaataactgattccataggasaggatgagagcatctgagagcatgtgagggcgagagaaggtctagaatgaggccctcggttaaggaggagagagaggagaatgagacaacaaagaaatccaatgtggagtcatgagagccatagaaaaagagtttattcacagggaagaaagagtttgcagtgttaaaaatcaaagaaaggatatagattgaaaaaaaggtcctaaaagaactgtaatataaggctacaaacatactcattgggggctggaggaagtccaacataagccagccccagagttgagccagtgaatcggagacaaaaggctccttctcttttttagtcccagccagttcataagcctgaggttgaattgcaactatgatttatgctaaatagctttatct

SEQ ID NO: 491222 - DNA, 617 bp, Homo sapiens
gaataaagggaaatgaggagtcaaaaatgatcccaagtgtttatcttgaatgtttaagcagatggcgttgtcctgatatggaatgcagaaaaataacatcgagttgagtttgtgacgctttcgagatacttaaatgaaaatgttgagaaagcagttgaaattacgtgtctcatactcaggaaagagttgagggcatgagtctctctaggtaataactgattccataggagaggatgagagcatctgagagcatgtgagggcgagagaaggtctagaatgaggccctcggttaaggaggagagagaggagaatgagacaacaaagaaatccaatgtggagtcatgagagccatagaaaaagagtttattcacagggaagaaagagtttgyagtgttaaaaatcaaagaaaggatatagattgaaaaaaaggtcctaaaagaactgtaatataaggctacaaacatactcattgggggctggaggaagtccaacataagccagccccagagttgagccagtgaatcggagacaaaaggctccttctcttttttagtcccagccagttcataagcctgaggttgaattgcaactatgatttatgctaaatagctttatct

SEQ ID NO: 491223 - DNA, 617 bp, Homo sapiens
gaataaagggaaatgaggagtcaaaaatgatcccaagtgtttatcttgaatgtttaagcagatggcgttgtcctgatatggaatgcagaaaaataacatcgagttgagtttgtgacgctttcgagatacttaaatgaaaatgttgagaaagcagttgaaattacgtgtctcatactcaggaaagagttgagggcatgagtctctctaggtaataactgattccataggagaggatgagagcatctgagagcatgtgagggcgagagaaggtctagaatgaggccctcggttaaggaggagagagaggagaatgagacaacaaagaaatccaatgtggagtcatgagagccatagaaaaagagtttattcacagggaagaaagagtttgcagtgttaaaaatcaaagaaaggatatagattgaaaaaaaggtcctraaagaactgtaatataaggctacaaacatactcattgggggctggaggaagtccaacataagccagccccagagttgagccagtgaatcggagacaaaaggctccttctcttttttagtcccagccagttcataagcctgaggttgaattgcaactatgatttatgctaaatagctttatct

SEQ ID NO: 491224 - DNA, 565 bp, Homo sapiens
gtctgcaaattggaagcccaggaaagttagtggtgtattatractccagtccaagccagaaggcctgagaaccaggagagccaatcctgtaagtcccagtccaagtccaaaggccccaaaaccagaaacactactgatatccaagggcaggaggagatggatgtcccagctccagaagagagagtgaacttgtgcttcctccacctctctgttttattcaggccttcaagggattgcatgatgcccactcacactgccaagggtgatcttttactcactctaccaattcaaatgctaaccttttccaagaacaccctcccagacacacccacaaataatgttttaccagtgatctcagcaatccgtagcccgctaaagttgacacacaaaattaaccatcacactatggtaccaaaatttgatagaggagagcaatttttaaaaacatctgaaaagcctccttaggaaggcaataatgaaaagaaaagggttgagaaatattgtgataggtgatgaggctgcaattcctgtaacagaaggaacataaggagactggattgtgagg

SEQ ID NO: 491225 - DNA, 565 bp, Homo sapiens
gtctgcaaattggaagcccaggaaagttagtggtgtattatgactccagtccaagccagaaggcctgagaaccaggagagccaatcctgtaagtcccagtccaagtccaaaggccccaaaaccagaaacactactgatatccaagggcaggaggagatggatgtcccagctccagaagagagagtgaacttgtgcttcctccacctctctgttttattcaggccttcaagggattgcwtgatgcccactcacactgccaagggtgatcttttactcactctaccaattcaaatgctaaccttttccaagaacaccctcccagacacacccacaaataatgttttaccagtgatctcagcaatccgtagcccgctaaagttgacacacaaaattaaccatcacactatggtaccaaaatttgatagaggagagcaatttttaaaaacatctgaaaagcctccttaggaaggcaataatgaaaagaaaagggttgagaaatattgtgataggtgatgaggctgcaattcctgtaacagaaggaacataaggagactggattgtgagg

SEQ ID NO: 491226 - DNA, 565 bp, Homo sapiens
gtctgcaaattggaagcccaggaaagttagtggtgtattatgactccagtccaagccagaaggcctgagaaccaggagagccaatcctgtaagtcccagtccaagtccaaaggccccaaaaccagaaacactactgatatccaagggcaggaggagatggatgtcccagctccagaagagagagtgaacttgtgcttcctccacctctctgttttattcaggccttcaagggattgcatgatgcccactcacactgccaagggtgatcttttactcactctaccaattcaaatgctaaccttttccaagaacaccctcccagacacacccacaaataatgttttaccagtgatctcagcaatccgtagcccgctaaagttgacacacaaaattaaccatcacactatggtaccaaaatttgatagaggagagcaatttttaaaaacatcwgaaaagcctccttaggaaggcaataatgaaaagaaaagggttgagaaatattgtgataggtgatgaggctgcaattcctgtaacagaaggaacataaggagactggattgtgagg

SEQ ID NO: 491227 - DNA, 599 bp, Homo sapiens
tgcataactctccagtccacagagctaacaaatcactgtgtcatcaaagaagagggaatcatgggaaatagcctgtggttcaccctctaaggcagggagtcaggaggctgtgaggtggcacatttgattcttgctcattaacatagtttctctttgtgtcctcctcctcctctttgcctgcttgcctgttccactgggtaagcagcaagtgcctactcaaatcattatttatcaaatgtgtactatgttcccaacattcattcaatacacctatattgaaagccttttatgagaataacaaaaataacaagatagattcagagtaagattcagagactgaagcaagtccccatatagtaatcacatgwtcaactagttgttaagtggtatatataatacatagaaaccaaccgtggaggacctcagggaaaggagccaggaagctgaggaaggctttggagagaagatgacattggagctaggccttcacccaaaattccataggtgttggtccattttgcattgctataaaggaatacctgagactgggtaatttaaggggaaaaggggtttattttggccaggactggtggctcaca

SEQ ID NO: 491228 - DNA, 609 bp, Homo sapiens
gagaattcaatttttctacaactcaagagtatttgtgaaaattaggagacagagtaaggaagacagatacaaataaggaatcaataaatgagtaaggaattgaaaccctcatactgcataggttttaatttgtattatgacatccacgtggtctcaggggaaacatcacgaaaattttggatgaatgaatggaatcattcattcgctttatcattctaaaaatgttcaccaagggccaactcatggtttctggggccatgttaggaactagggatacaaagaagagagagacatggactttgcccacataaaatctatagtttgtgagacacaggcaaataaaccaatatggaaccacatgtgggaaagtataatgatacagatatgccagagggctttgtgaacacagaggggcacttaacataatcatgaaaaagtaggaagatttcagggcaagataattgytgtaagaattctaaaacatcagtggtttaaaatggtagaactttttcttgctcatgcatttctatatatttgatgtgtttggcagggcccctttcacttgctgtttcagagacttacatcctatggctctagaatctcctaggg

SEQ ID NO: 491229 - DNA, 332 bp, Homo sapiens
gtgccaccacagccggctaatttttgtattttttgttgagaccaggtctccctgtgttgcccaggctggtcttgaactcctgggctcaagtgattcrcctgcctcagcctcccaaagtactgagattacaggcatgagccaccatacccagccaattacctgaaaatctaaccaaaaaaacagaatgatagacaaaatataatgtgtaatatatatgaaatgaagtgcccaaacatttaaataaaactgggactgaatttactaggacagaagggacagcctaagtaccaaaagaaaaaaaaaaagaaaataacttgagaagaaaatatgta

SEQ ID NO: 491230 - DNA, 473 bp, Homo sapiens
gtagcctagaatgaacactgctcctagtgatggtcactgaattccccactttatgttctgaaatctggccattaccaaaggtaatgagatgtactaagctcaaagattagtacatctgtgagcttcctgcagaaattaggtaaaaatcatctgttaattgggctgagaaaattcatatttttccttaggcctgaaaaaagaaggacctgtcaagacaaagaaaaatctgagaattaccaccaatttcatcaccactcatccttcaagtgtgtttccatttttaatctttttccaggttccctgtcatttgatggtttttcagctcctagcaaaamagtgacgagactaattctaagaggtttggtttgcccaaatgatatcataaatttgcagttaataaactctttaatatgaatgtgcagtaacaacaaggaatttgttaatagtaacagataacattttattgactgttc

SEQ ID NO: 491231 - DNA, 473 bp, Homo sapiens
gtagcctagaatgaacactgctcctagtgatggtcactgaattccccactttatgttctgaaatctggccattaccaaaggtaatgagatgtactaagctcaaagattagtacatctgtgagcttcctgcagaaattaggtaaaaatcatctgttaattgggctgagaaaattcatatttttccttaggcctgaaaaaagaaggacctgtcaagacaaagaaaaatctgagaattaccaccaatttcatcaccactcatccttcaagtgtgtttccatttttaatctttttccaggttccctgtcatttgatggtttttcagctcctagcaaaaaagtgaygagactaattctaagaggtttggtttgcccaaatgatatcataaatttgcagttaataaactctttaatatgaatgtgcagtaacaacaaggaatttgttaatagtaacagataacattttattgactgttc

SEQ ID NO: 491232 - DNA, 473 bp, Homo sapiens
gtagcctagaatgaacactgctcctagtgatggtcactgaattccccactttatgttctgaaatctggccattaccaaaggtaatgagatgtactaagctcaaagattagtacatctgtgagcttcctgcagaaattaggtaaaaatcatctgttaattgggctgagaaaattcatatttttccttaggcctgaaaaaagaaggacctgtcaagacaaagaaaaatctgagaattaccaccaatttcatcaccactcatccttcaagtgtgtttccatttttaatctttttccaggttccctgtcatttgatggtttttcagctcctagcaaaaaagtgacgagactaattctaagaggtttggtttgcccaaatgatatcataaatttgcagttaataaactcttyaatatgaatgtgcagtaacaacaaggaatttgttaatagtaacagataacattttattgactgttc

SEQ ID NO: 491233 - DNA, 482 bp, Homo sapiens
tttaaaatgtcaaatctgtctgttctgttaaaaaaagcacctagctatataagtagaaaaaggattgtaggacataagcttgtgtatagcttaatggcagggacacgttttattcacgtttttattttttctactatttatgatcgtgcctcccccaacactgcccacccccccaggactcaacactatgcagtacacataacaggcactcaatacgtgttttaacttgactgcattcttttatactgacctaaaatgggtaaaactctccatttccctttttcataagttttcaagtggcccaggttcacttggcactacagacaatacaagagcratcagccaagaatgaaatgccctgaagactggaaaagcagacattaaaaccacttgctgcagaaagccctcagcgtgaggaggaggaaagcacagcagctgagctgcggagggcacccaccaggcaggacaaagctgctcccagt

SEQ ID NO: 491234 - DNA, 628 bp, Homo sapiens
gaatttttggcaaataccaatcattatgtacatgattcaaatatttgcccttttctgcatagtcaaggcaatctaattttaactaattgtaagaaaataaatgttaatattcaacagcattagagtactgttttgttgcactaaaattcctctaatgacataagatatcaagatgcaaaaattccatggagatcccaaygcacgatgtacaaaatcatagagactaaatgctgaagttggaaatgatcttaaaaaggaaatctagtgaaaaggcttgacttcatagatgaagaaaggaggagattaaaatttcctaagcaaccagaggtattgtattaagtgctttactgcaccagtgtattcaatcttcatcatagctccattatagttccttcattttacctaaaaataatctgaaagccagggaagtaaaataatttaccctttctcagtgatatgattatgatcaaactccagattctgtatcagaggtcctcattcagagatcaagccaaaaacctataagtctacttgagcctaaattctatattcagtagtaaaatgccaacaagctgaccaacaaatttttctttctgagagaaacaattcatggtagaaagctggtaca

SEQ ID NO: 491235 - DNA, 670 bp, Homo sapiens
gggaaagcctatcagaggcaggaggcggcctggccctgcgaggatgctgcagggatgaatcaaggctctgctgaggtctctggaagcaaaagcacacgctgaaaaccctcttcacgctgctggcctcctgcgtacgaggaaggtacccctctcccaggtcttctgtggaggcaggagcgggcctgcttgctcagcacggggtctccggcaccagcacggagcttggtgcctgggggatcagaaaatgctggcagatgggaaacatgcaggacgcacagggctcaccattccaccaaccctgcctccgccccgtggcgcaggttttgggacagcataagcttacgggccatcagccaaaatgggttccctcaagttaggaagggaatgtgcctaatgcctcagtacatctgggcaaggagatgaacgtttttacaaagcatgttggaatgcagagtartagtttgcaaaaaatgttcagtgaaagcatttgaggttggtatctggtaaattagtcctgtttctttcaagttcatggttgttttttgttcatattgttaaagactaactcttggtaagggatgacacgcattctggctgactggtttatttgcctctggacaatcatatgctgactctttcctgagccactgcaactaccgtttaatagtag

SEQ ID NO: 491236 - DNA, 607 bp, Homo sapiens
tggtttggttgccttgggaagaactgtgggctacaccacacccagctctcacgatgcaccggtgagcagggggcacgcctggcacacaacgctccaatccatggttcttaggtccccctgcccggacttaaacagaaggtggttagagccagctcacgtgctgacccttagtgctctggtcgggctaatggaaaatgtatctgaatattaggaactgcatttggctgccagtcatagacagctgaaaaatgctggcttcarcaaggaagtgggttccttttccataagatcacatgaagcccgcaggttggcagtcagagctggcgaactgtcccccatcactgccccaggtcctcctggggccctccctcccacaaggaaggaggaggcaggggcagggtcaaaggggcctccagtgactcagccccctttgatggagttccctgaagctctacttgacgacatccaagtcacccctggctggagctcagtcccagggccaccccacctgcaaaggtggctgggaaaacatgcaccaacaaaattggggtctgatactgagcaggaagggctgcagcttgcagtttctgccacagtgattgttaaa

SEQ ID NO: 491237 - DNA, 422 bp, Homo sapiens
tgccaggtgcctctgacacctcctgtctgtcagggccactctcagccgtatgttcctaattccctgacgctcagctccatataagccatgaggcgggaggggcggctccactgctgagcaactgcagtcccccaggtggccgtggctggaaccacgaggggctgcagctcaggcgtggcctkgccccaggaagttcctgccaggtggtccagagccggccaggagccaggaatggcctgcagggctggggctgaaagcccttctgcaggcttgatgctcctggaacctggccttgaaaggtcccagcaggatccctcctcagagacggtactgcctaaggcccctttaagcaaatccagcagacaaagccatttcctggagagccaggcaggtggagctaggccccgtgtcacagcctttaa

SEQ ID NO: 491238 - DNA, 486 bp, Homo sapiens
gccacaggataagctttctcagagtgttaaaagaacactctaacacacaagctacacacagaagtgtatagtacagaggttcccaaagggcacagcgggcaggacgttggagatcagagcacctggaaagcccccttctcaccccctgactactggggctccctagagggagcagctcttcaggccagatataaaacagaaaagcgcagatctgagcttgacaggacgaaaattggaaggacagacagttggatgcatggagagttggaactgggaagagggatttgcattagtcagaatgttttctgttaccagtgacagaaacccaattcagaccagcttaggtggaaaaaaagagggttggggtatgttgtggaatctctcggcgtgtgcacctgaaatatcccggggtcggctggtttcaggtatggctggatccaggacycaagcaatgatctcagtctctctctctctctctctctctct

SEQ ID NO: 491239 - DNA, 644 bp, Homo sapiens
atacctttttttctgttcccctcagccttctgcatatttcacaatgacagttacaattcagcactttaccattctcaagtcttttaaatgatagaccatctcttctgttttcaaggagaattctctccagctttctgataactccatattccagtctcacacagagtttaagcagaacacacagcatgccacttacacacaacataactagccttctagatctgggtttggatctcccctcaagcatcctagcccatcattcttcagtttgttgtgtattttaacatctctttgtcaactaaaacatagtgttcattccactaataggttcaattagaacctattcaattcaatagaactcaattcaatagaattcaattctaattgaacctattgmattgaataggttcaataggttcaaacttccattttcaaacaataagaaaaatgatgtcatgcccgatttcagcccttctcttttcagcatggtgccctgtagtggtcttcatccattggctacacttcttcacctcccttcaaatttctcaggcccattagcctaaatctgatctggaactgctctgtcaaagatatccaatgaggatccactaattgacaaatccaaacaatgcttgtttagtccc

SEQ ID NO: 491240 - DNA, 644 bp, Homo sapiens
atacctttttttctgttcccctcagccttctgcatatttcacaatgacagttacaattcagcactttaccattctcaagtcttttaaatgatagaccatctcttctgttttcaaggagaattctctccagctttctgataactccatattccagtctcacacagagtttaagcagaacacacagcatgccacttacacacaacataactagccttctagatctgggtttggatctcccctcaagcatcctagcccatcattcttcagtttgttgtgtattttaacatctctttgtcaactaaaacatagtgttcattccactaataggttcaattagaacctattcaattcaatagaactcaattcaatagaattcaattctaattgaacctattgaattgaataggttcaawaggttcaaacttccattttcaaacaataagaaaaatgatgtcatgcccgatttcagcccttctcttttcagcatggtgccctgtagtggtcttcatccattggctacacttcttcacctcccttcaaatttctcaggcccattagcctaaatctgatctggaactgctctgtcaaagatatccaatgaggatccactaattgacaaatccaaacaatgcttgtttagtccc

SEQ ID NO: 491241 - DNA, 548 bp, Homo sapiens
aatgaataatctttgaataagtatggtctatttatgctcaktactatgaagaagacttatttgtaatactttaaagaagaaaagcacatttaaaaactagagaccaatgttgatgagctgctttttgaacaaatctttgggaaaaagttggatgcagtttatttttgttgcttaaaagccttatctcacaagttagaactgtttaactagattttaaataactttttaagaattgttattattcagaatagtggagaaataggttgcattggaataaagagaacttaaaacttttaatcagttattaaaatcctattctagctacagatttgtgatttattactttgagtactgttcatgcatatcattactcattaaaatcacatctattataattccacttttctagtatggttccccaaagtcttagatgttcctttccctgcctgcctgtttgtgctttggaacttaattgtatcattctgttaaaaagccttaggttcattttttccctaccatttttcttcaaatatttgctgaatggcctt

SEQ ID NO: 491242 - DNA, 602 bp, Homo sapiens
ggcagctggctgctttaatgaaaactgctataaagcttcaagaactttagccttgggggatgcatttataaggaacatggaaaatgcatttccaagttgctggttcttgggagagacataataaacatttaccaaaaaaaaaaaaaaaaaaaaaaggatagaacttactatctttaattatgcagcagcatattttttcctgaagaaataaagcttccaataaatttgtatgttactgtctatacctatattttgcaaattcctaaatgtgcatctgtccttrtgtaataaaaggtcttgaagaatgaaaagttttctgaaagttgaaactctcctacgtcatatgcttggcaactctgtccatacctcacatacaaacaattctattttaccttcactactgtgtaaaccagtgaaatataatgtccttaattcagtatttgaaataaaattatctgtatttatagatactaatatctttccctttttcttcaagttataaattttatcattaaaacagtctcccctttgtagtctgcaagtgaatattttatatacagggatggcttgaagacatctaacaccatgtcacccagatagtc

SEQ ID NO: 491243 - DNA, 627 bp, Homo sapiens
agctggctgctttaatgaaaactgctataaagcttcaagaactttagccttgggggatgcatttataaggaacatggaaaatgcatttccaagttgctggttcttgggagagacataataaacatttaccaaaaaaaaaaaaaaaaaaaaaaggatagaacttactatctttaattatgcagcagcatattttttcctgaagaaataaagcttccaataaatttgtatgttactgtctatacctatattttgcaaattcctaaatgtgcatctgtccttatgtaataaaaggtcttgaagaatgaaaagttttctgaaagttgaaactctcctacgtcatatgcttggcaactctgtccatacctcacatacaaacaattctattttaccttcactactgtgtaaaccagtgaaatataatgtccttaattcagtatttgaaataaaattatctgtatttatagatactaatatctttccctttttcttcaagttataaattttatcattaaaacagtcycccctttgtagtctgcaagtgaatattttatatacagggatggcttgaagacatctaacaccatgtcacccagatagtctagctgtttcaaggattactttgagtaa

SEQ ID NO: 491244 - DNA, 553 bp, Homo sapiens
gttacctcattcagttctgcctcagattttaagttgaagtcacacttttcttaactgggaaagcttaactaagcaagaattgtccttcctgtacactgaagcccaagtgggagaggaaggatcttcctggtgggtgagggggtggggagtgagaagcgtggcgtgagcccagcggagtgagaagggcatctgatcagtgaggatgtgcatgccaactcaaggacatacccatccactcctccatgtgggtgtggatactctaccatacagatgcgctcatcaccctgcytggattctgaaaccctaagccgagccattcacaaacaggcatgccctcttgggctgattctccatggcagtccatcccgtacagatccatcccgtacagatattatctttcaggtgtttaggtttggatatcaagagccccagcagagtgagaacagagccctagccagggtcaactggtatgaggattcagagttgaagagggtaaggtgggtagccacacagcatgcggactagtcagggaggaggttttctataaagaggg

SEQ ID NO: 491245 - DNA, 553 bp, Homo sapiens
gttacctcattcagttctgcctcagattttaagttgaagtcacacttttcttaactgggaaagcttaactaagcaagaattgtccttcctgtacactgaagcccaagtgggagaggaaggatcttcctggtgggtgagggggtggggagtgagaagcgtggcgtgagcccagcggagtgagaagggcatctgatcagtgaggatgtgcatgccaactcaaggacatacccatccactcctccatgtgggtgtggatactctaccatacagatgcgctcatcaccctgcttggattctgaaaccctaagccgagccattcacaaayaggcatgccctcttgggctgattctccatggcagtccatcccgtacagatccatcccgtacagatattatctttcaggtgtttaggtttggatatcaagagccccagcagagtgagaacagagccctagccagggtcaactggtatgaggattcagagttgaagagggtaaggtgggtagccacacagcatgcggactagtcagggaggaggttttctataaagaggg

SEQ ID NO: 491246 - DNA, 511 bp, Homo sapiens
ttgatgtttaccccagcagttgctgatggcttttcatggacaatgacatgtccttggactctctgacgtttcattttgtgctgctggggctgccagctcttttctgtaactgcctgtcaaaataacaaaatcttgcctacttatttagaacaacctgcttaataagtgacagtctaatcctgccccagccttttaatmgtacaagctggctttcacagcgagattgggatattttgtccctagaacataaggtttacacttaaaatatcctcaagaatactgacctagaatgacaactcaaaaggtgggggttctttgtgaaatcacgacattggtattcttagagcttcacagatataaataatgaacatgaaatcttgaagtgaaagtagaatcacagtgagagtcgaacacacccaagaaatatttggcgtacaaaaataaactccttaattcattcaactaaaaatattgttgaatgacaaagatgtatactgttctaccacggaat

SEQ ID NO: 491247 - DNA, 477 bp, Homo sapiens
tgggggttgaaagactggaaggtaaagaagtgctcaaggatctccctggaggaaataagggtgagagggtgctaaaaaccaggaggcccaggttcattggagtgtggacagattttaaggttggctataactgtgtgaaatagagatgaaaatcgcttgaactgaggtggttgagagtgtacaaagatagaatatcattttaatgggcattgaagttgtctagaatgatctagacacaggtagaaaaaaaaacagagatccaggtgtcaagtctttactgagtgaaagtgagagagtgatcagcaaatttgtggatgaaggcaacataggaatcagagagcatgaactctaaggaargaggttccttatctgtaaaatgagaggcttgtaccagatgatccaaccataagaaactttttcaactctaagatcatgtaaatattccacagagcttttgggctctttatttcaagtaat

SEQ ID NO: 491248 - DNA, 421 bp, Homo sapiens
ggctccaacactctgttttccttcaaacttcaaatttggataacttatttttccctcttagtagtaggcagaattctgacacttggcattaagaaaaaactttctgtaatccactctgaattttttttttttttttttttttttagcatttataactctgtaagagtttaggatagtttagttatgagtgacagaaaaatctaaagcaaactggcttataccaaagagaactaatcagccatgttgagcatgactgattcmcttgtggtagcaagatggccacctcccacactcacaccaaattctgtggaagcaagagagtcccttcctggcattcctgagcaagtaagtcctcacatttgcttaggaatgcctgaaaggatactcatgtccatttgttaataggaatcgatgaacaaat

SEQ ID NO: 491249 - DNA, 476 bp, Homo sapiens
gtatgtaagttcaacaggataggaaaattaatctggctccttatgatgatgaggctcaataaatttgttgttctctaagcagagaaaaatcaggctgcttacacttactgcccttcctaggcagcagaggaaacttggtattttcaatccttgttttccaggtmcacaaagtcaatggtggttatgtgttatgtggagactctaggcagtggcttccatgttttgctttaccataagataagtttcttttcttttcttttttaataacaaaaaggaacaataaacttgtctttcaggtatgttaatgccaaaggatattttgaagatgtggcaaatgcaatggaagaggcaaatgaagagatttttatcacagactggtggttagtatttgtccctgggaatttttttctggaagtctctatgtttagaaatgtacagtggtatagtgctgttcaagaattacacattatgaaaat

SEQ ID NO: 491250 - DNA, 598 bp, Homo sapiens
tataaaaacattaagaaagattatttaaatccrtcttttatttcataaaatatttcatcattgttctaaaatcagaatattctttccattggtatggatcaaaataaattcaaagatgtgatacattctaataattaatggggttttaaaaaatggttgttaattagaacaaataacaaaagaaccttcttttataacttaattgtaaattttcttttctccgattataaaaatattaaacagttattttaaagaatttggaaaatacagcaatttgcttagaaaagaaattgtagttaggtgtagtggcacgtactcatattcccagctactcaggtggctgaagtgggaggattgtttgagcccaggggttcaagtccagcctaaccaacatagcaagaccttgaaaagaaagaaagaaagaaagaaggaaagaaggaaagaaagaaagagaagaaagagagaagaaagaagaaagaattaaaaatttcattaatatactactcagaaataattctcagtattgtgatatactacaaatagatatcttgggaaattatacatgtttgtatattgcatcaaaactgaaataataaca

SEQ ID NO: 491251 - DNA, 598 bp, Homo sapiens
tataaaaacattaagaaagattatttaaatccatcttttatttcataaaatatttcatcattgwtctaaaatcagaatattctttccattggtatggatcaaaataaattcaaagatgtgatacattctaataattaatggggttttaaaaaatggttgttaattagaacaaataacaaaagaaccttcttttataacttaattgtaaattttcttttctccgattataaaaatattaaacagttattttaaagaatttggaaaatacagcaatttgcttagaaaagaaattgtagttaggtgtagtggcacgtactcatattcccagctactcaggtggctgaagtgggaggattgtttgagcccaggggttcaagtccagcctaaccaacatagcaagaccttgaaaagaaagaaagaaagaaagaaggaaagaaggaaagaaagaaagagaagaaagagagaagaaagaagaaagaattaaaaatttcattaatatactactcagaaataattctcagtattgtgatatactacaaatagatatcttgggaaattatacatgtttgtatattgcatcaaaactgaaataataaca

SEQ ID NO: 491252 - DNA, 597 bp, Homo sapiens
ttggtttcaagtttcaaatgataaaaacttttctccttcttaaattcctgttttcaatttcttgttacagtcttaaatacttggcatccgaagggagacaaatgctcattctaccctaatattatatcttcactttgcttgaaatcaactgttgatacttccaaaaaacagcattccacaacattttgtggctaggaattccccaagtcatgcagcagcctgctgctttctaataaggatagaaatttcagatctttcttactattaaatcttggtacaagttcattcaaagaaagtttagkctaattaaaaaattatgtcctttaacttaattccccagtacctatctatctatgatgtaattgatcatgaatggtttccactggcatacattttcaactaccaacatgcctattttgaggagctgtgttccactctcttgaagtgccttggattgtgccacaaggattcctagtaaatgcttgtgataaattaaagtcttaattaagatgctaatatgcatagcaattgctattaaatcagcttcctttggtggatagaaatggtatttcatatcacttatccaatagcatgtgt

SEQ ID NO: 491253 - DNA, 527 bp, Homo sapiens
atgtggtcttctccacccattaatgtccctgccaaactgcctgaagtcagtgcacctacttcccactgatgcaggagctggcaggacatcctgccttaacttactctcattgcatagtggtacatctaatagccagatggtgtacctaatgatcagawtaccttggagtcccaattgtaagtgcttaatgtggtcagtctcactcaaggtgaagccttggtcatagatattccagaattattctcactatgagagttgcttccattctaagagagctccaagtcagaagaagtcagactctgaggcatttgataagtacaatagttcccctttatcctcaaggggtttatttcaagaccccagtggatgcccagaagtatggttagtactgagccctatatatactatgttttctcagtctgataactgagagggctactgagtgactaatgagcaggtagcatatatagtgtggatactctggacagaatggatgattcacgtcctgggcggaacggagcaagagg

SEQ ID NO: 491254 - DNA, 505 bp, Homo sapiens
tcatatttttgatagattgtccctcctaatactttttcagcaatattcttcgttccattcacacaagaaataagtcactactcaatatttgaaaccaatagttgaacctattacttgcttaaacaagtgagtgttatatttgaaagtcagtttttctgggcaaaaagatggtatcaattttatgtctacttggcttccttatccattcttactgaagacaggcctcagcgtgatgggaagatgattgatagcagccccaacttcatacccttctagtatgtgattcaagaggaaagaatattttttctacttccctaaataactcaatagcaagtctctctgatcgctttgaataacatgtcccttactgggccaatcccagagtccrgaggaataaaatataacaagccaggactgggtcacttccctaactatgttgtggggactaagaatgtggttactagggtagggagggtcaggtagcatgatattaaaaatcagtaat

SEQ ID NO: 491255 - DNA, 379 bp, Homo sapiens
aattaagtgactcaaactttacaattagacctcattatttattatctcataacctaataacatttttatattactgagagctgcttatgttgttaatgactcattagcatgactccacttgcaatgggaatgcaaaccaggtacttccaaaagtmactaatacccagttttgattctgtggagggcaacaaagcaggagtcaaaataaatggagaagaatgagaaagacattttttttccagaagaatgctagtttagacataacatagatgtaaaaattttcccaattttaatttttctagcatgcttactttgaaagattacattatggataacattcccttgaattgagtggttaagtttatagccacaaaatagc

SEQ ID NO: 491256 - DNA, 457 bp, Homo sapiens
ttaatgaactttatcttatgaatgtaatgcacctaacaattagataatacacaatatatttcaagtatatatcaaacagattctgagtacagtcttccttatcttgctaactgttcccaattgttgatattcctctaagctggtttacaatgaagtgaaatggtaggatatataatgactacagcttcagaatttcaatacaccaaaggataggaatcctggtaaggagctgggatagaggggccagtgggccagaaactagtcctgtgagattcttttgtacaagaaagrcatgtttttacttagattatatgtttctttgcatgagggaagattattaggagctaagtcaactctcttacccaacaaagtcatccctttgtgctttgactgttcattgaaaccttcttgggattgacctattcgtctgtttcttgttaaaggctgaaggtccctg

SEQ ID NO: 491257 - DNA, 457 bp, Homo sapiens
ttaatgaactttatcttatgaatgtaatgcacctaacaattagataatacacaatatatttcaagtatatatcaaacagattctgagtacagtcttccttatcttgctaactgttcccaattgttgatattcctctaagctggtttacaatgaagtgaaatggtaggatatataatgactacagcttcagaatttcaatacaccaaaggataggaatcctggtaaggagctgggatagaggggccagtgggccagaaactagtcctgtgagattcttttgtacaagaaaggcatgtttttacttagattatatgtttctttgcatgagggaagattattaggagctaagtcaactctcttacccaacaaagtcatccstttgtgctttgactgttcattgaaaccttcttgggattgacctattcgtctgtttcttgttaaaggctgaaggtccctg

SEQ ID NO: 491258 - DNA, 457 bp, Homo sapiens
ttaatgaactttatcttatgaatgtaatgcacctaacaattagataatacacaatatatttcaagtatatatcaaacagattctgagtacagtcttccttatcttgctaactgttcccaattgttgatattcctctaagctggtttacaatgaagtgaaatggtaggatatataatgactacagcttcagaatttcaatacaccaaaggataggaatcctggtaaggagctgggatagaggggccagtgggccagaaactagtcctgtgagattcttttgtacaagaaaggcatgtttttacttagattatatgtttctttgcatgagggaagattattaggagctaagtcaactctcttacccaacaaagtcatccctttgtgctttgactgttcattgaaaccttcttgggattgacctattcrtctgtttcttgttaaaggctgaaggtccctg

SEQ ID NO: 491259 - DNA, 530 bp, Homo sapiens
tggtaggagaggttatgaagaatgcacacacaattctccgtggcctgagaaaacaggacaagaatattgatcgtatacatatagatatccttgcaggtgtgatatcacaggacacaggctttagctcttacaaggtttaccagatgcaactgggtgtgcttaaactgcgggttgcctgggggaaatgcaatgagtatggctagaaaagctaaggttttcatgaacagtcaggagtacartgctaagaagtagaggctgagtctttttagtttactttctaaagagtgtgtccagaacaactgtatagcttagatacgtaacttactagccatgttgagctggagaaggggaggagatactgtttatagggaccaactaggaggctattgcaataatcggcatgaaagatgcacaatgtaggaaaacattagaagcattagagggaagtgtaagaactgaaagccttttcagaggtagacagcacacaattactcagatttccatcttcttttggtggatggtgatgatta

SEQ ID NO: 491260 - DNA, 590 bp, Homo sapiens
ctgctccccatttctgccaacataaaactcctccaggggggctcacagatctggcctgtccctgctccctgacctcttgtccctctcttctcccccatcttccactgtgctagcagtgacactagccttgtctctgtcctttgagcacaccaagctcctttccctcccaaggtctccgcatctgcaactcccccctgcttctctcctctgtgtcastgcttgcaatgctatctcctggttattcatggtgcaactcaaatgtcaccaccatgagagctgacgtccctggtaaccttgactaaagccacttctcaccccctctccaagcatccctcgctctccaccatatggccttattttctcttcttcctaacagttatctaaatatgacattgacttatttgttttccatgtcgttaggcaatcttccccactggaaggtcagcctcatgagcaaaggggcttttcaaattctgttcatcactgttttcccagtatgtataaggtgtctggcacacagagaagacacttgaaaattttctgtgtctgaataactctgtgtttgctaagatcttttaaagctgtctact

SEQ ID NO: 491261 - DNA, 590 bp, Homo sapiens
ctgctccccatttctgccaacataaaactcctccaggggggctcacagatctggcctgtccctgctccctgacctcttgtccctctcttctcccccatcttccactgtgctagcagtgacactagccttgtctctgtcctttgagcacaccaagctcctttccctcccaaggtctccgcatctgcaactcccccctgcttctctcctctgtgtcactgcttgcaatgctatctcctggttattcatggtgcaactcaaatgtcaccaccatgagagctgacgtccctggtaaccttgactaaagccacttctcaccccctctccaagcatccctcgctctccaccatatggccttattttctcttcttcctaacagttatctaaatatgacattgacttatttgttttccatgtcgttaggcaatcttccccactggaaggtcagcctcatgagcaaaggggcttttcaarttctgttcatcactgttttcccagtatgtataaggtgtctggcacacagagaagacacttgaaaattttctgtgtctgaataactctgtgtttgctaagatcttttaaagctgtctact

SEQ ID NO: 491262 - DNA, 549 bp, Homo sapiens
aaagactgagggctcaatatgagtaggtcaacagtgttatatgaagacaaaaaaaggaagttaattgatttcaggttacaataataacatccaaagcaaaagagataatggtctmtaacagtcctgctatactccctaacattctagattctagaaggatctagattctagaaggatctactcagattagatattatatgtgaagagagagattcataaggtaaaaatgagtttagatgcaaataaacaggaggtcgaagagtcaggaaactctaatgtgaggaatggttgaagaaacagctatttcacttaaaagaagatagactgggcatggtggctcacgcctgtaatcccagcactttgggaggccgaggcaggtggatcacgaggtcagtagtttgagaccagcctgaccaacatggtgaaaccccatctctactaaaactacaaaaattagccaggtgtggtggcgcgtgcttgtaacccagctactcaggaggctaaggcaggagaactgcttgagctcgggaggaggaagctgcagtgagc

SEQ ID NO: 491263 - DNA, 489 bp, Homo sapiens
ttgattttggctctccttcaattttgctaaaagcaaagaatttgaaaccatcatattttccaaaggttttgcttccytgtcagaataattcattttctaaaagctgatactgatatttgaaaatgttgctttgtttggtgccccagaagttttgacatttgtgggccacaaactagggtaagattctggatgggtaaaaagtttgcctatcttttgtgggagggagaaagagattataaacgagcaccacaggcatatcctcaggcagatcagctttaataaaaagaatgtatggaaattgagtacctggaaatacagtgatctgcaaataccattttgaatgccacaaggttaatggactagctgtgagagttgaatgaaacaccctgataaactgggtcgggaagagaacgatcagaagctgccaccattcacgttttattatttattattaattgtctcactttagaggaaaactccaaagatggt

SEQ ID NO: 491264 - DNA, 601 bp, Homo sapiens
gccaggcagctttctgaaacctcttttatggggcactgatcccattcaggaaggtgaagccctcagaatttactcacttcccaaaaagccgcatctattatcactatccccgtggggttgaagtcccaacatgtaaactttggagggatgcacgcattcaaaccagtgttcttggtaatcggtccataacaagagtmagagaaatacttttcaaggacacttgtaggcagagattatagtaatcctgacatatttccaacggatattttcctttctgatgtggaaaagctctggaaaggaaaatacacttctgccaatgggtaaggaggatgtctgttcgtgtggatgaagtgggaccagcccgggaaggacgctccttcctctcttaacggtgccatctgtcacgatacacggtgtgtttgggctgacttttcctgtgcttctgtaacgtgactgtgctttcctcgatgctccccagggggtgactctgtttcccgtccccttgcagagcagcgcctgctgataagccttcagaggacttggactgagatgtgaattactcaaacactctttcctttgtgttcttaaacatcacgacatc

SEQ ID NO: 491265 - DNA, 601 bp, Homo sapiens
gccaggcagctttctgaaacctcttttatggggcactgatcccattcaggaaggtgaagccctcagaatttactcacttcccaaaaagccgcatctattatcactatccccgtggggttgaagtcccaacatgtaaactttggagggatgcacgcattcaaaccagtgttcttggtaatcggtccataacaagagtaagagaaatacttttcaaggacacttgtaggcagagattatagtaatcctgacatatttccaamggatattttcctttctgatgtggaaaagctctggaaaggaaaatacacttctgccaatgggtaaggaggatgtctgttcgtgtggatgaagtgggaccagcccgggaaggacgctccttcctctcttaacggtgccatctgtcacgatacacggtgtgtttgggctgacttttcctgtgcttctgtaacgtgactgtgctttcctcgatgctccccagggggtgactctgtttcccgtccccttgcagagcagcgcctgctgataagccttcagaggacttggactgagatgtgaattactcaaacactctttcctttgtgttcttaaacatcacgacatc

SEQ ID NO: 491266 - DNA, 601 bp, Homo sapiens
gccaggcagctttctgaaacctcttttatggggcactgatcccattcaggaaggtgaagccctcagaatttactcacttcccaaaaagccgcatctattatcactatccccgtggggttgaagtcccaacatgtaaactttggagggatgcacgcattcaaaccagtgttcttggtaatcggtccataacaagagtaagagaaatacttttcaaggacacttgtaggcagagattatagtaatcctgacatatttccaacggatattttcctttctgatgtggaaaagctctggaaaggaaaatacacttctgccaatgggtaaggaggatgtctgttcgtgtggatgaagtgggaccagcccgggaaggacgctccttcctctcttaacggtgccatctgtcacgatacacggtgtgtttgggctgacttttcctgtgcttctgtaacgtgactgtgctttcctcgatgctccccagggggtgactctgtttcccgtccccttgcagagcagcgcctgctgataagccttcagaggacttsgactgagatgtgaattactcaaacactctttcctttgtgttcttaaacatcacgacatc

SEQ ID NO: 491267 - DNA, 587 bp, Homo sapiens
cttgcaatggccatgccttctcgaccatcagggtttttctcattgcctttctccctcccactcagagcggatgcacacctggccttcaggcccttctgtgcaggcttcggtcccactgacccacgccttcctccctaaggactccgtgaggagggtcttgtctcaagaggcaacaatttaaatacgaattttttaggggaaattaaaatacggattttcaaatttctctttcttgctaaacagaaatattaaggtgaacttttaaaaataaagtgctggccaggcacagtggctcacacctgtaatcccagcactttgggaggccgaggtgggcggatcacgaggtcaggagatcgataccatcctggctaacacggtgaaaaccagtctctaccaaaaatgcaaaaaaatagccgggcgtggtggcgggcacctgtagtcccagctactcgggaggctgaggcaggagaatggcgtgaactcgggaggcggagyttgcagtgagactagatcgcgccactgcactccagcctgggtgacagggcgagactccatctcaaaaaaattaaaaaatgaaataaagtgca

SEQ ID NO: 491268 - DNA, 600 bp, Homo sapiens
gtggcttcttcctcatgaaacagtaggacaatttctgggttcttcaccgccrgatttccaaaccccaatacaggcattcatcatgcaataggcctcgtaaatatttgtcaattttattttaaaggagaaaataaaatgtactgattgtgttcactccttgaatggatattaaataattgcttgagaggcctcaaaagtgagattattcaattattttgtccaaccaatgcatattattttctctttatatgttaggtacatctacatatatacgtatatataggtgtgtgtatatatatgtgtgcgtatatatatacacacatatgtatataaaataaaatacatattcatttaatacatatatacacatacatatattaaataaaatatatacgcatatatacacacataaaataaaatacatattcatttaatacatatatgtatatacacatacatatgttaaataaaatatatacgcatatatacacacacacaaacatatatatataaaattttagattattcaattattctgtccaaccaagtagtcttctgtctttttaaaaattaactaggttttgtctatgacacaccaac

SEQ ID NO: 491269 - DNA, 621 bp, Homo sapiens
ttgttgtgatggccttctgatgcccactaggaaggagacaagagcagggccgtagcaatccgcccaccgctgaagctccttctcctgcaccacaggaggaaccgagtcctcaagctaatggcawcttctccccaaaaactcaaaggggaggggctcttgatgttctagggactggattaaactcctggagatcggtctctgagctgcacgcaccagaggagaaggatgtcgtcggggcagtcacgaagcttcaaggagaagagaataagtcagtacctgtctgcctttcccgaatactggctgctgctgctgctgtcgctgccgccgccgccgccatcttggctcccacgagccactgcccggctggggagcggagcggggggatgacgtggctgcccttaccgccccggaagcaaagcccggaagggcggggccaaagggtgtgcctgagttccggaccccacctcctccaggaagacctccactctcggtagaactgggagacccggtgcaggttaattcagtggcccgtaatgttaggcgaatactaagagtttttatcctaccgaatcaagccacactctctcaaatggtagcaacattaaattgagctgttagggt

SEQ ID NO: 491270 - DNA, 526 bp, Homo sapiens
tgcatactattccactgttcagactcccgtcatattcttgaccattccctattgatggagatgaggctgcttccagtttcgctcttgtgcgtaaccctgatgaacacatcttgtatgtacatcctcttgtacatttctaattatttgctccaaatcctagtggtgtggctgggaggctgtgatgcatgttgcttatttctgtttcagaaaggtgtgtccgttcaccttcctgacctgctgcgtatacagatgcttgtttccccacatccttaccaacaccatgatttctggctttttttttttaaagtggtctttgagttttgctgttagtcttgttccttatgaaggtgtccgaccacagtggcaatcactcagcattgcactgtctccaggtctctgtgggagcctgggttcctttggggcctggattcagggctcatcctagagtgagctgtcatctcagggcatctccctgggggatatgtgcmccccggagctgcagttacagacactgagctcactccac

SEQ ID NO: 491271 - DNA, 497 bp, Homo sapiens
tcctcacggctagtggccctggcaacctagaagtcccatctccagaaaggccctgagcccagaraagactccctgttttgaggccccaaggctcagcccttgtggggctcccagacctccgccttcccagggcacctctgccgttcccagtcagcacatcaccgcagccacggtacagccacctgcgcctgcactgtcctcgctggaaagatggctgtgggatgcgggcagaccccgcacctgggccgaccgggggtgtctaggggtctggaggacaggcagtgtctaccctcaggttggccacaaactcctgtccctctggggagtgcgccctgccaacccctgtgggggccatacaggaaggagcagccagggaggtggagtctgggaggatgaaggcttgtactgcccgagctggaacgggggcattttctctcccagtcaaccctcggacaaggccctgtccaggtatccagccccctgacaggtacagcctg

SEQ ID NO: 491272 - DNA, 515 bp, Homo sapiens
aacttgggggtcctctggtatgcctcaggacaccccagatttcctcaaatcacccgattctctcaataagaggccccgaataaccactctctgctagaagaagcccatctgccaacgttgctgcaagcttattctctgatcccttgaggctcaactaaaaataattcaacycctccaatatttagagaaatgaagggccttgaaatgtcagggaggcagcataaatcccaggaagtgcttccctcctctgccacgccacggctgcaggagctgagtggctgtgagagcctgcactggtcagcaaacgtgggctctgaggaccatgactgtccaagcagttatgacctctgggcaagtcagaaaccaccttgggtctcacttttctgtaaaatgggatgggagagaaggagctagttaattcccaggattctcccaggcatgcgagtctcagaacaacaaatggactatctggcaacacaatttcatcctccgtctcttccagggtctcagcagca

SEQ ID NO: 491273 - DNA, 478 bp, Homo sapiens
tgctcaggaagctgacgcacgagattcgcttgaatctgggaggcaggggttgcagtgagccaagatggtaccactgtactctaggctggacaagagagtaagaccttgtctcaaaaaaaacaacaaacccccccccmaccccgcggtttctcaacctcgacacttggtgtttttggactgggtcattttgtggtgaggggatgtcctatgcattgtagggtgctaaacagcatcccactgtccgcccactacatgggaccacccccttcccaagctgtgaaaccaaaattgtctgtagacattgccagatgtgccctggggagaaccgcagcattaagcggtattaagagaacggttacggagaactctagtactgaacccaagattactttgccaatgaggagtgaagccaggcaccaaaccatcgtcttccagccccatccagtgctctttgccatagcccaactctcagggagga

SEQ ID NO: 491274 - DNA, 583 bp, Homo sapiens
ctgtattaagccatcagatttatctggagatcaaacaaacacccataaactacaagctgcaaatacttaccaattgaatctgtgtgtgtgaaaatgctttactaaggaaagctctgttcaaatgctaatcattatccaactgactacattaaaagttccttcagagaattaataacctcttactcatctttataacaccatcctctgagaatcaaaggaaatttgtttattgcctaaacacaactaaagctcagctcttaggctaaacagcagagggctattggattctcagtccagayttcttaaaggagccatatatgcctggatattaaaaattgaaatgcaaggttcagtctcattattagtggccatcatctaaacgatgtgttagtgccttaaaggaaaagtattttaaaagtactagaatataagtatgctgttgaaattgcatagaagacccaagaaaagcctacaatacaaatgcttaaaactggatttaattatataatagatcatatatgtaaaccaatcatatgaattaaataaaatactaaaaatttttattatgttctattttttccca

SEQ ID NO: 491275 - DNA, 583 bp, Homo sapiens
ctgtattaagccatcagatttatctggagatcaaacaaacacccataaactacaagctgcaaatacttaccaattgaatctgtgtgtgtgaaaatgctttactaaggaaagctctgttcaaatgctaatcattatccaactgactacattaaaagttccttcagagaattaataacctcttactcatctttataacaccatcctctgagaatcaaaggaaatttgtttattgcctaaacacaactaaagctcagctcttaggctaaacagcagagggctattggattctcagtccagacttcttaaaggagccatatatgcctggatatwaaaaattgaaatgcaaggttcagtctcattattagtggccatcatctaaacgatgtgttagtgccttaaaggaaaagtattttaaaagtactagaatataagtatgctgttgaaattgcatagaagacccaagaaaagcctacaatacaaatgcttaaaactggatttaattatataatagatcatatatgtaaaccaatcatatgaattaaataaaatactaaaaatttttattatgttctattttttccca

SEQ ID NO: 491276 - DNA, 633 bp, Homo sapiens
ttttatgaaacgttctgctggaaaattgacctagagctgaatgtatattttacccaagcastggataaactataaaaataataaagactactatatatcacttttaagccctacatctgccccaggccaggcaaataaattagtgtaaattcaaattatctccttctgttcttttaatagccctgacaataggcttagcaagaaaagaggtatgagccatcacctaaaatgaaaccaagaatatctactgatttttattatctcttgattccattaccactcggtgtcatgaataataaagattttgaatgtatctgttcataagaaaatagaagtcattggttgcctctatcatctctcctctggactactattagaaaccccaaactggccttcctacttccccaccgccgccactcaccttcctcccagactcatatccatccttggtatttctagaggagtcttacagtgttattcccttgcctaaaacctttcagtggctcccccaactgtctacagtccaaagtgctcagcatggcatgccataatctccctccccatggaagacgtggcaccatcccaatctacaggcataatgcccttgtgtatcatttgctttgtctcatgtat

SEQ ID NO: 491277 - DNA, 633 bp, Homo sapiens
ttttatgaaacgttctgctggaaaattgacctagagctgaatgtatattttacccaagcactggataaactataaaaataataaagactactatatatcacttttaagccctacatctgccccaggccaggcaaataaattagtgtaaattcaaattatctccttctgttcttttaatagccctgacaataggcttagcaagaaaagaggtatgagccatcacctaaaatgaaaccaagaatatctactgatttttattatctcttgattccattaccactcggtgtcatgaataataaagattttgaatgtatctgttcataagaaaatagaagtcattggttgcctctatcatctctcctctggactactattagaaaccccaaactggycttcctacttccccaccgccgccactcaccttcctcccagactcatatccatccttggtatttctagaggagtcttacagtgttattcccttgcctaaaacctttcagtggctcccccaactgtctacagtccaaagtgctcagcatggcatgccataatctccctccccatggaagacgtggcaccatcccaatctacaggcataatgcccttgtgtatcatttgctttgtctcatgtat

SEQ ID NO: 491278 - DNA, 633 bp, Homo sapiens
ttttatgaaacgttctgctggaaaattgacctagagctgaatgtatattttacccaagcactggataaactataaaaataataaagactactatatatcacttttaagccctacatctgccccaggccaggcaaataaattagtgtaaattcaaattatctccttctgttcttttaatagccctgacaataggcttagcaagaaaagaggtatgagccatcacctaaaatgaaaccaagaatatctactgatttttattatctcttgattccattaccactcggtgtcatgaataataaagattttgaatgtatctgttcataagaaaatagaagtcattggttgcctctatcatctctcctctggactactattagaaaccccaaactggccttcctacttccccaccgccgccactcaccttcctcccagactcatayccatccttggtatttctagaggagtcttacagtgttattcccttgcctaaaacctttcagtggctcccccaactgtctacagtccaaagtgctcagcatggcatgccataatctccctccccatggaagacgtggcaccatcccaatctacaggcataatgcccttgtgtatcatttgctttgtctcatgtat

SEQ ID NO: 491279 - DNA, 520 bp, Homo sapiens
cctttcaggacctctaagtctgccgagagtcagtaaataaagatctgaggggcaggaatggggctcagggmaaaggggttacataaaggccataaatgtagcccagcctgcgctgccaagagccacttctgaaagccgctccccaccacctggcagcaccctggctccctggcctggaagaaggaagaggggcttaacagataaatgaatgaatgaacgaacagataaacttaagctggcgggacctggcaaccaccaagcaggcagaaccaagaagcaaagctctgcaccgcacgggacggttgatgacaaccacgatgatgaacggctgtgaggatgaagaggaagacgggaaagcagatgctgcatgagcacttgctgcaggccagaccctacgcagccctccccatgcagatcttcactcaatccttgcaacactccagttcccattttgcagataaggaaactgaggttcagggaaatctaatcacttgctcaaagtcacaaccagtaaggaata

SEQ ID NO: 491280 - DNA, 438 bp, Homo sapiens
cactgcaaaatactgagttgagtactttgatatttccctccattagaagtttttgaggcttcctctttatcattatagattttccatacttagagatgaagttttagctatttcacatgattgcctcttttcctaaccacacacatgcccatttcccatctgcccaatacagaactgtgtacctttggttatatcagtatttggtgttaactttgtaatgacattagtactactgagagctgagtaacctaaagtaatatgccttttccytttcctgcataacaatttgtttctcatgaaaaaaataactgctttgctgcttctttttcttagtttccctgtttagttgtgactgacttgtccccaaactctgaccccaccttttgcctctctgtatattttcatgctcatcttcttaaagccagtcccccaccttct

SEQ ID NO: 491281 - DNA, 575 bp, Homo sapiens
caggagttcaagaccagcctggccaacatgatgaaaccccatttctactaaaaatacaaaaaattagcagggcgtggtggtgggcacctgtaatcccagctacttgggaggctgagggaggagaatcacttgaacccaggaagtggaggttgcgctgagccgagattgcgccattgcactccagcctgggcaacaacagcaacactccatctcaaaaaaaagaaagaaaaaagaaaaaatagcgtacattcaagataccagtcttgaattatctaccattttcttaatgaggaaaaaagcagaaaaactgtcctaaggagcaaagccattgttttttccttgaagctggtgtagttttgttaatattcgtgtgactatttgagtccctrttggctttattgtatgctctataattctcacccccaaaccagactttcccctattcatttctgagagcctccagcagggcttctaagtgcatgcaaatcactctcaaatattatttactactgttgcttcctaaggcaggacctatagtcccgcagatctgccaggctccaggcgatactgctctc

SEQ ID NO: 491282 - DNA, 617 bp, Homo sapiens
tgtggaaacacacatccctggggccccaaatctgacccccacagataagggcgagcatcccttctgtacaaacgtgaggtgatcttaaaaccatacagcattagaaaggataaagggcttagggggcacctaattcatgccacaggtgataaaactgaggcacgttcaggcttgtaaaratgaggtaactcccccagagacagcagagagacagtgacagagctgtgtcccaagctcagggctcccaaccatcctccagctctgattaggaggcctgatgctacccaccctgccgcttccacttctctcagccaggctggaatgtggcgaaagccacaggcctaattttaggattcaaaagcaattaggggagagctgacaaaatctgatctgggtgaggattctcgtgctgacctgtgatgtgggttatcatacactagctcaggagaccttggtcagccagaccaggtcagcttttctcctggaagacacacagcccctgcactgccccatacgcagtcttgcaaattggtagataagtgtgcccatgacctggtgtacattataagacacggtcttttccagctccttgcagaaaagccaaccccaaccaaacc

SEQ ID NO: 491283 - DNA, 617 bp, Homo sapiens
tgtggaaacacacatccctggggccccaaatctgacccccacagataagggcgagcatcccttctgtacaaacgtgaggtgatcttaaaaccatacagcattagaaaggataaagggcttagggggcacctaattcatgccacaggtgataaaactgaggcacgttcaggcttgtaaagatgaggtaactcccccagagacagcagagagacagtgacagagctgtgtcccaagctcagggctcccaaccatcctccagctctgattaggaggcctgatgctacccaccctgccgcttccacttctctcagccaggctggaatgtggcgaaagccacaggcctaattttaggattcaaargcaattaggggagagctgacaaaatctgatctgggtgaggattctcgtgctgacctgtgatgtgggttatcatacactagctcaggagaccttggtcagccagaccaggtcagcttttctcctggaagacacacagcccctgcactgccccatacgcagtcttgcaaattggtagataagtgtgcccatgacctggtgtacattataagacacggtcttttccagctccttgcagaaaagccaaccccaaccaaacc

SEQ ID NO: 491284 - DNA, 611 bp, Homo sapiens
caagttttgggaaccagaaagggaagccacatctgagcaggtttgcttagcacctgatttgagctcatgagacaatctgagccaaagaagctcatgcgtaagcccagtgttataatattggtagaatcatgtccaaagaagcaaatagaccagagggagagtttcacctgtgtaccatggcaggggaagaggaaagacaataataatacctatgaaaggcattaaaactgttcacagcggtggaaggctgtgaagaccacaaaccttacctcccatttatcagtgcccccattttattttatgttcattgcttctgggcttcataaaaggctccacctctccctgggcctcagactactcacttgaccaaaaccactggaggagtggggcaagaagaggcaagaagagaggaatagctgagtgtgtcatctgtgccgaagtcataaccactttgtgttctatcacttcagaaacttggtggcattagaggaattttcawgtaacaacagaggcctgttactagccctcaggagcaatgatttgtgttggaaagatgccataagtttggaaaactgctcacattatgagccttcaaatctcatggaaaaaaa

SEQ ID NO: 491285 - DNA, 646 bp, Homo sapiens
ctgtatgcaaagataaagaattccatacagatctttccaaacattccagtttcagttgttttgaatctgaggtgccagtgagatagcaaagtgtaaatgtccactggggctaaatgtaagggtatggaaagcaaggtcatgctctggtagggagaattgtattggagctggaggaagattgcttcagatggagacccaaggacaagaagaayagtgaagcccttggctttctgctctttcatcacatctgctgctggtcctgtctccagtgtgagcctcaaacattttcataatcagagtcaaggattctacgcaacacatcaaagtgaaagaaaaatttatttatttctagatctgtatctattcatccaccttcccataataaagcttccatgccttctagatttgaatcctgaccaaaatattaacctgagaaacccaggagacacacagcctaaaaattgactatcaggatgctagtgactttacctgtgtggacagtacatttgagaaattaaaataagtttgtttcttgggtgtcctatacttaatttctttttgaaagaccttatttaaaatccactatctttacttattgagagttagaggaaccacatgaatgaattactttactgcaccactgcag

SEQ ID NO: 491286 - DNA, 646 bp, Homo sapiens
ctgtatgcaaagataaagaattccatacagatctttccaaacattccagtttcagttgttttgaatctgaggtgccagtgagatagcaaagtgtaaatgtccactggggctaaatgtaagggtatggaaagcaaggtcatgctctggtagggagaattgtattggagctggaggaagattgcttcagatggagacccaaggacaagaagaatagtgaagcccttggctttctgctctttcatcacatctgctgctggtcctgtctccagtgtgagcctcaaacattttcataatcagagtcaaggattctacgcaacacatcaaagtgaaagaaaaatttatttatttctagatctgtatctattcatccaccttcccataataaagcttccatgccttctagatttgaatcctgaccaaaatattaacctgagaaacccaggagacacacagcctaaaaattgactatcaggatgctagtgactttacctgtgtggacagtacatttgagaaattaaaatwagtttgtttcttgggtgtcctatacttaatttctttttgaaagaccttatttaaaatccactatctttacttattgagagttagaggaaccacatgaatgaattactttactgcaccactgcag

SEQ ID NO: 491287 - DNA, 611 bp, Homo sapiens
tgtggggaaaaaggcattcttgtacatttttggtagaaatacaaaatagtgccacaaccactatagaaaggaatttggcaacatrtagaaaaattatatatggacttacttttgatttggcaatattacttctaggaatctatcctaaagatacactggcaaaaaagaaaagcaaagagaaacatgcaccaagctatttgttagaatctacttaatatggcaaatgtaaaaaaaaacccaaatgtctatccatatggaactggtaaaataaatgatagtttgttacacgatgaatatacaattataaaatgatccctaaactatactaagtaaaaaaaaagcaagtgagaaaagtgtgaattatatgttacttcttacatcaaaagggcagacaatatatatgcctacatgcacccacacatattttaatatttgcatttatttaaaaatggaaggataatccataaaacaaaggaagcaatgaaaaacagcaagaggcttatctgaacgactaaggtaccaacatgaaggggacttcactgtccaaatatggaaacaaatttgagaatcactagctgtagtagattaaaatacataaaaaatgcttaaga

SEQ ID NO: 491288 - DNA, 602 bp, Homo sapiens
agtggaggctttgatgaaatgtgtcagtcattttccagcaactctgccttagacggtaggctatcaggagtaaccgctgtcaaagaactattgtcaatgtagttggaattctttagacagaacattcctctcctaaatattttctttaacctatttgtgagccttttctttttatgactgtatttactatttaaattaacattctgaacatcatagcctggattattttttgaaaaaaattctgggggggagtaatgagtggaaaggatggactttagaattcatataaagaaatagcagtacatatgttcattacgtgagtgatgggatcagtcgtaccccaaacctcagtatcacgcaatatacccatgtaacaaacctgcacatgtaccccttgaatctaaaataaaagctgaaattatataaaaagaaagcgcagtacctaagtaacacataattaaacaataaatgtcgcataayatcctatttatataatattttgttccaagttttacttaaaattaactagctattcttatttagctaaatttgaagaattaaatattgtttctgttcttgtacatctcatagcctgaaccaaa

SEQ ID NO: 491289 - DNA, 603 bp, Homo sapiens
acagctccttgaaccaagctggtactcttagaccatttggtgatagacttcatttttttaaatgttagtatttttttagttataaaattaacatgtaatcatggtgaaaatttcaaacttgatataaacaacaaaaaaagttcctcctacccctatcccacctctagtcccaggcccagaggtatcctctattaacagcttcttcagtgttcctctagaattttccatgtatatacaagtatatatacacagcataaatttagttaatctaatggcattatacttagcatattattcaggcatttgcattttaacacaacagtatattggctaactttttaaaagaagaatttaggtatatcctggacttggtataaatccagcctctgtcttttaaatttgtagttctatayggaaagaattgatgtccactctataaccctgaggatacaaaatgccaattcaccaaacattccattatgtttagtatcatgtaacagttagctttttctgcacaacaaactaccccataagtcagtagctttaaacaataaccacttatttagcttaaggatcagtagagtagcaatatgagctgggctc

SEQ ID NO: 491290 - DNA, 667 bp, Homo sapiens
ctgagttttaatatgaggtctcattaggttaaaattataggtttttaaaaaattattgatgttaaatctaacagatgggacaaaaagatgcagaatacatcatcttggttcccccagaaggccccagaaaaagtcaarccaatgagcaaactgtggcagactccttcccagaatgacaccctctacaaggctgtaaggttgttctgggctgaatgtccagcaaaccaaacctgcctgaggccagccattgatccagtggcctgactgaccctaggtcatcctcagatgtttggccgagcctatgagggaccctggccctccagcaccaggagccaggaattctctgacccctttgaggtttggcaggtgccaacctcgagatcagtgccacaagcggttgttctgggttttctcatttaggctgccctgaactaaaggcagttaccaccaggtgaggcctgattttccctttcctccttcccctgaggaggaagcaaggagttcccgatcctcctgcagccacatcctccaaagagtctgggggactaagggacaacatgatcttccagtgctctctggcttgagatggtccccagaaccaggcctggaggggcaggctggtaatcttccggcttgttgccagcaggctgttgggcaccctccccac

SEQ ID NO: 491291 - DNA, 667 bp, Homo sapiens
ctgagttttaatatgaggtctcattaggttaaaattataggtttttaaaaaattattgatgttaaatctaacagatgggacaaaaagatgcagaatacatcatcttggttcccccagaaggccccagaaaaagtcaaaccaatgagcaaactgtggcagactccttcccagaatgacaccctctacaaggctgtaaggttgttctgggctgaatgtccagcaaaccaaacctgcctgaggccagccattgatccagtggcctgactgaccctaggtcatcctcagatgtttggccgagcctatgagggaccctggccctccagcaccaggagccaggaattctctgacccctttgaggtttggcaggtgccaacctcgagatcagtgccacaagcggttgttctgggttttctcatttaggctgccctgaactaaaggcagttaccaccaggtgaggcctgattttccctttcctccttcccctgaggaggaagcaaggagttcccgatcctcctgcagccacatcctccaaagagtctgggggactaagggacaacatgatcttccagtgcyctctggcttgagatggtccccagaaccaggcctggaggggcaggctggtaatcttccggcttgttgccagcaggctgttgggcaccctccccac

SEQ ID NO: 491292 - DNA, 440 bp, Homo sapiens
tgatatgataatattatagattaaacacttaaagattaaatacttaaaacattaccttaaaaacattaaaagtattgcaagaaattgatgaatttccagaaaaacattctggrggaaagtgtgaaccctgaaagcctgaatgctggagaggtaagcaaatatctaagcacaaaagttgctgttacctaaatgaattttccagccgtattaaaggggataggagccagggaccagagcctgtccagtggggagtctttctgaagactgtctttacattttacactgtggttaaaaaaggacacacactcagggtaagagaatgccaaaatctatgtgtctttttttttctcctgtcaactctgggttgtgggaaagatcaccttggtcctgatcagaacaaaggttgtgggtaggaaaaagtacaacaaaacatcactgag

SEQ ID NO: 491293 - DNA, 377 bp, Homo sapiens
cctcctgcatctatcaattactgctcaatgtttgccttttttgaagccattcgaacagttgtctacatttgattgtccaaaactcagtaattgtcacgtgtaggctatggtgtgtttacacctctacttgttgtatttcacratgtacagagatacctttaggtcaaacttaaaatatgtaaggaggcagctttagactaaacttgatttaatgttatgcagcacccaggtgtatttttgtggaagggtcgtgtagataatcgaccattctactggggaaggaagttttttactttatttctaacaatacagtattacttaactcaccaaaactcattagtgaccaggcatagtggctcacacctgtaattccagtt

SEQ ID NO: 491294 - DNA, 601 bp, Homo sapiens
ataagtccaaaagtatacaaaaatataaataataatgatgattatgatttcaaatcacaaatttttaaaaagccatcaaaaaaatcatattacagtatgatctttttaaaaaggactttctcaccacatgagggaagaaaaaaataagagttaactataaaaatgcaaatatgctgcagagagttcagagaatttctaggaataccaaaaatgctgtatacattcagctatcactatactaaagagaaaaaaacaggccaggagtggtggctcacgcctgtaatcctaatactttgggaggctgaagtgggaggacggcttgagaccaggagtttgagactagcctggccaacatagcaagaccccatttctgtaagaaattcaaaaattagccaggcatgttggcacatgcctgtggtcccagctactcaggaggctgagggaggaggatcccttgagactgggagactgaggctgcagtgagccatgatcatgccactgcactcagcctgggttacttgtttatttactaacccattcattaacccataaaatatttactgaggatctattaygtctcctattccaggctcttaggata

SEQ ID NO: 491295 - DNA, 611 bp, Homo sapiens
aaatgatgagggcagatatttcctgtgcatgcaaagcaagatttgtacacaggagagaaagaaggcttgcaattacgaacctcagagcttatgtaggagctaaacagctaccgttcctgcttcctaagaaaaacagaaaaatttttggtctgtgatgtaaacaagtcttctctgagacaaacgcgagaaggtcctttggtattgacaattctttgaaacatgaacacgtggcaccaaaatagaggaaacctgtacatctccccaggatatttcactgttttagctttcacggtttttaccattcacttatcctttcagccatgttgccaataatttttgctcagaaagtcatgaccatgcagaaccataaaagtgttcacattgttttttgacagtgctcaataaccatgaatgattattgttgttatagtaatttgtagcaaccacagcctgagaacatgagtatatttcatgctccagtctcccaaggaaaggaagaggagcgagggctttgaggaaataacacattcactgcaaaataacagmatttactcttatgatctcttccttttctttccttttattttaagtaccttctcaagagtttctct

SEQ ID NO: 491296 - DNA, 571 bp, Homo sapiens
tttttgttttctggtgtagcagaatgcaccatgacaaacaattttaatgaagggatggcaaaaaaaatatctctttgttgtagtttttattaaagtttttctgtgattgtttggttatgtcttcagttaatggagtatgcagaaaattaatataatttacttcccttagttattaattcaacagatatttatccagcatttagtatgcgttgggcactgggctagttactgtgctttcaaagtatcaaaggacagagcctcagtgmttaataagctaagagtctatttgaggagacagaaaaataaacaaataatatgtggcctaataaatcaatgataggactattttcaaggcacaaacggagaacaaaagagttatgatgaacccaactgctggctgagaagagaaaaatgagattagaaaaagatcacatgtccataactcagatttatgttacttttttcctgccattggtgttgctaaaatgaaaagacaatggctgtatattagtatattaaaaatctccattattgcaatggtaaaagcattgtaacctccagtcacctgctg

SEQ ID NO: 491297 - DNA, 667 bp, Homo sapiens
aagggtaaaaaaaatggcccctgtcattcagccactttgcaaggcaatttgacagtatgtttcaaaactaaaagtatacataatcgcagtctggcactttcacttcaaaaactttatcaaacgtttatgctcaaaaagataaattgacatgagtgaagttgattctttgcaacatttttttctaatagcaaatgattagaaacaaatgtaatttaatggggaactggttaaataagttgcagtacatacaccatgsaattgtagtgcacataccatagaacgacatagaataataaaatatgaaaaaagaaaaagagaagtgggtaagtatgagaagaaaacataagtgaaaatttggagaaaatagataaaacagcatgagtggggagattggcaggaactctgctagaattggatactttttccaattcatgttttttgtcaacagaggaaagtgccatttaaatatttaatggattcatgtattttctttcactccaacatttgtttgcttggcttcccttcctcctccagtgacgaaacaaatggcacaataaggtttgacacacaaagaaagaaaaacagactgttttcagccttagagagtttgttagatagccagcttatagcatggattccaccaagatataaatatgtggcaaaggat

SEQ ID NO: 491298 - DNA, 640 bp, Homo sapiens
tcagccactttgcaaggcaatttgacagtatgtttcaaaactaaaagtatacataatcgcagtctggcactttcacttcaaaaactttatcaaacgtttatgctcaaaaagataaattgacatgagtgaagttgattctttgcaacatttttttctaatagcaaatgattagaaacaaatgtaatttaatggggaactggttaaataagttgcagtacatacaccatgcaattgtagtgcacataccatagaacgacatagaataataaaatatgaaaaaagaaaaagagaartgggtaagtatgagaagaaaacataagtgaaaatttggagaaaatagataaaacagcatgagtggggagattggcaggaactctgctagaattggatactttttccaattcatgttttttgtcaacagaggaaagtgccatttaaatatttaatggattcatgtattttctttcactccaacatttgtttgcttggcttcccttcctcctccagtgacgaaacaaatggcacaataaggtttgacacacaaagaaagaaaaacagactgttttcagccttagagagtttgttagatagccagcttatagcatggattccaccaagatataaatatgtggcaaaggat

SEQ ID NO: 491299 - DNA, 667 bp, Homo sapiens
aagggtaaaaaaaatggcccctgtcattcagccactttgcaaggcaatttgacagtatgtttcaaaactaaaagtatacataatcgcagtctggcactttcacttcaaaaactttatcaaacgtttatgctcaaaaagataaattgacatgagtgaagttgattctttgcaacatttttttctaatagcaaatgattagaaacaaatgtaatttaatggggaactggttaaataagttgcagtacatacaccatgcaattgtagtgcacataccatagaacgacatagaataataaaatatgaaaaaagaaaaagagaagtgggtaagtatgagaagaaaacataagtgaaaatttggagaaaatagataaaacagcatgagtggggagattggcaggaactctgctagaattggatactttttccaattcatgttttttgtcaacagaggaaagtgccatttaaatatttaatggattcatgtattttctttcactccaacatttgtttgcttggcttcccttcctcctccagtgacgaaacaaatggcacaataaggtttgayacacaaagaaagaaaaacagactgttttcagccttagagagtttgttagatagccagcttatagcatggattccaccaagatataaatatgtggcaaaggat

SEQ ID NO: 491300 - DNA, 490 bp, Homo sapiens
attaataatcagtacactctttctttttagttactgtgtcatcaatttctttctcttgtctcattgtgttgaatagttctgccagaacaaatctgtagtgaccatagcggatacctttgttctctttctgcctccgtgggaaggtgtctttcatttctcagttaagaacaatactgttttttagactgaaacaggtatgtttcaacattatctattgcaaggtaagtgcctatttattcctttttaacragttttcattaagaataacaatacattttattatatgcctttttagcagctgggtaatcattgaattttcttttttctatggatatggcatatttcatatatttcctatcattgaaacaacttttcattcctagtcttattgagttaattcattcagtattctgttggcctgtttttctggtaatttatttatacaacctactttaatgattaaggtcatttccttttctttgtatgctac

SEQ ID NO: 491301 - DNA, 490 bp, Homo sapiens
attaataatcagtacactctttctttttagttactgtgtcatcaatttctttctcttgtctcattgtgttgaatagttctgccagaacaaatctgtagtgaccatagcggatacctttgttctctttctgcctccgtgggaaggtgtctttcatttctcagttaagaacaatactgttttttagactgaaacaggtatgtttcaacattatctattgcaaggtaagtgcctatttattcctttttaacaagttttyattaagaataacaatacattttattatatgcctttttagcagctgggtaatcattgaattttcttttttctatggatatggcatatttcatatatttcctatcattgaaacaacttttcattcctagtcttattgagttaattcattcagtattctgttggcctgtttttctggtaatttatttatacaacctactttaatgattaaggtcatttccttttctttgtatgctac

SEQ ID NO: 491302 - DNA, 474 bp, Homo sapiens
ctgatatcttaatcatatcagctaagtcacctatagtaccctagagtatattcactggttttgagtattaggatgtagacatcactggggtacagcactattttayctaccaaatgaagattagaaataaagaaatgtgatatattattttaaaaagtaaactatcaagtccaaagcaaataataaaaaatatgaaatatttttgtataacagcagttaatattgaaatatttttagtttcttaaattgatttttattataaatattgaccaaaaatttttcaatatattataaaacagagatgaacaaacattttaaaattccaaaccaactagttaaatatgaccatctaataagtgaattttgtaacttggtaataaagatttttaatagaataagaaagagataacattataatgtaaatcatcaagagctgagagagaattcaacaagaacaatattattaatattaaa

SEQ ID NO: 491303 - DNA, 562 bp, Homo sapiens
gacctcagtacatgactgtgaaactcattttctggaagaattacaagatctctagctgagctcattagcttttatcctggacttgtgaattccagtgttcttgcgtggaaaycagaaattaatttattcaattctttatttatatttttattagtttaaggaaacaaagtacatataaatttatttgactatataaacataaaaacacaaagctattataataatctgagttaaaattgtcttgttttcaccatacagctttcttacttatccttaaagtactttagactttgatttttagttctgaatatttgggcacatgaacatatacgctactctcatgagcttgatgatagtcccctaaaagatattttcatatcttaatttcaaggatctgtgagtattgccttatatggcaaaagatgcgattaaattaaggattttgagagattgggttatcttggatgatataggtaggccctaaatccaagtgcccttgtaagagtaaagcagagagtgatttggtagagaaacagaatgggaagcaatgtgatcacaaggg

SEQ ID NO: 491304 - DNA, 562 bp, Homo sapiens
gacctcagtacatgactgtgaaactcattttctggaagaattacaagatctctagctgagctcattagcttttatcctggacttgtgaattccagtgttcttgcgtggaaaccagaaattaatttattcaattctttatttatatttktattagtttaaggaaacaaagtacatataaatttatttgactatataaacataaaaacacaaagctattataataatctgagttaaaattgtcttgttttcaccatacagctttcttacttatccttaaagtactttagactttgatttttagttctgaatatttgggcacatgaacatatacgctactctcatgagcttgatgatagtcccctaaaagatattttcatatcttaatttcaaggatctgtgagtattgccttatatggcaaaagatgcgattaaattaaggattttgagagattgggttatcttggatgatataggtaggccctaaatccaagtgcccttgtaagagtaaagcagagagtgatttggtagagaaacagaatgggaagcaatgtgatcacaaggg

SEQ ID NO: 491305 - DNA, 532 bp, Homo sapiens
tgtgaaactcattttctggaagaattacaagatctctagctgagctcattagcttttatcctggacttgtgaattccagtgttcttgcgtggaaaccagaaattaatttattcaattctttatttatatttttattagtttaaggaaacaaagtacatataaatttatttgactatataaacataaaaacacaaagctattataataatctgagttaaaattgtcttgttttcaccatacagctttcttacttatccttaaagtactttagactttgatttttagttctgaatatttgggcacatgaacatatacgctactctcatgagcttgatgatagtcccctaaaagatattttcatatcttaatttcaaggatctgtgagtattgccttatatgscaaaagatgcgattaaattaaggattttgagagattgggttatcttggatgatataggtaggccctaaatccaagtgcccttgtaagagtaaagcagagagtgatttggtagagaaacagaatgggaagcaa

SEQ ID NO: 491306 - DNA, 480 bp, Homo sapiens
gctttgtgacactgcagttctgtgagtggacatggggatttcagcaggctccagggatgtggagagacagaagctattgggttccagggcaggatgtagtcttgtgatggctgggctctcaaaatggcgccatgctgcagaagcttgggtcttagggtttatgcgagacctagaatgaattctttctcaagaatgaggaagtcacatgggctccaggtgtctccctatattaggctcagggtctgtgaggtctgtgaccgtgactgcaagcatccatggtaggaatgtgggccctgggatcttttgtttaccttttccctgcactgcaaagtttctcctagcctcaagtcaatcccagccagtcttgttgctttgctttctctccatacctcagaggatcccttcacttccctgctgaaatccagtgttctttyttaggtttagccacacagacagtattagctatatttggttggattt

SEQ ID NO: 491307 - DNA, 496 bp, Homo sapiens
tagtaattttcttgctgtgtccttacatgttggaaggaagggaaagagagagagaatgagggaggaggggccaaactctctggtctctttagataagggatctaatcccagaatgagtctcaccttcacgacttcatgtaaacctaatcacctcccaaagaccacatttccaaataccattgattgggagtcagggcatatgaattttggaggagcacaatattcagtccataacaatcatgtattattgwtttttacaccacgtggattacattggtgtttctctcaattgcagaagggaaatacatttgagtgaattaatcagtgtaattcatttgtatggcacatttaataagtaataaagctgttccacagttttttttaaaaaaaccttccatgttttatttatttttctgcctatctgaatatcaaatttctcttaaaatttagtacattacgactagtaattttgaaggtaaagatgtgtaatttttca

SEQ ID NO: 491308 - DNA, 640 bp, Homo sapiens
tgtgggctgggttgcagacagagataagagagatgagtgttggggcaatcccatgagaggctgtgttgttcataactggcttaagggatttcttcccctgaaattaaaattaaccacagacaataatggaaatgcatatgttgagaggtttctttgttgatttaatattctgttaggttgtgctctgagttaaggataagtgttagaatagagcaaggtacaagagctgtggatatttggaaaagatgagaaaactgggatatggagctgtttaagaacaaagaaggagtaatatagacagtacagaaggctcagggaagttagaaattactatgggattgttttctaacagccattagttcaaagggtgcatgagatacaacaatgaaataatctgtacaacaaactcccatggcacaagtttacctgtgtaacaaacyttcacatgtaccccgaatttaatataagtttttaaaagataattaaaattagtaaattttgaaataactttgtatttattagtaaactcagttcatgcaatttaccaaaatgattactaaaattctgattttagtttaaacacacacacacacacacacacacacacacacacacacatattttatatttcatggccaaa

SEQ ID NO: 491309 - DNA, 521 bp, Homo sapiens
ggggccactgactgacagtgtgtgcccagacctggggaaagggaaacagagggagccatgtgaacaccactctcatcgccctctcccagctcgctaccagttttgcatgctgattgggttattttgttggcaggagtaatttgctagtgagggttgatttcccaagtgcaaatgattggtgtgtttgaggcatgtcaagaggaggagagcagagagtaagtcctcctggccatactgtcacatgaygggtggctgagggcctccttaggccaattctagttcccttctcaacctttagacactaaacaaacaagtaagtattttcattacagaagacagttgttatatggaaggaataaaatgaagcatttactataaaatattatttacacactaaattatttttccgtgtattattaaaaacatttttatcacattcctggaattcccaagctcttcagatgccacttggggtttgttgttgttgttgttttgtagtgggattggctttagcagaattt

SEQ ID NO: 491310 - DNA, 556 bp, Homo sapiens
ccatgtccaccaagtgataagaagttctggctgtagactttaaccctaggataggatttaacaccatctgttctgtataacatttggaactaacttcataattataataaacatctacattagaaattcctctaccaccaagcgctatgagcgaattataaataagatttkatttgctccaaagatgagcaactcaggattctttgttatagaccctaaacccagataaaaattaaaatctcaaaaaaaaagaaaaaaaaacagatgtccctagataaatgttccagtatacaaccagtacaaactgtctggctaacttttttttttttttatgaaatcagatattccagagccacctttatcaccaaacataaaagcatcccactgcatacctcaacagaattgcctgcatatccttaatgtctttccaagcaattttatgcagtcagcaccctatacattagggaaggaatggatgtgtgctctatgggttcttataatagcaatgaaccttcataatcagactcattccttaattttgcttactttttcatgc

SEQ ID NO: 491311 - DNA, 414 bp, Homo sapiens
caatgcctcaggccgagggtgggccacacgcgacccagcgctaaagggtcacagccaagctgtccgcctcctgccttccctttaaagaagccgcacacaagggagctgcccsggagttcaacttccggccacatagtgagaggatgttttcctactggagctgagccgcgggggcgcgccccccggccgcgccctcctagccacgccctccacgcccggccttccgagagcgagctcggtcggacgcacggaaagggctgggccacgtgggcggctgctgagtggttcgccttcgcctctcagcgcgcagtcaggcggaggcaagctcagagcgcacggacagagcggtagcgcgcgcccgcgcgcgttcttagtactctccccggtgacgtgcctgaccgaggccgcgccagg

SEQ ID NO: 491312 - DNA, 632 bp, Homo sapiens
tgtcattttagaaggcagccataactataacaaaactttggagcaaaatagatatcacacagtgatttacttatgaataattttttttcataaagagctgcccattctgtgttaaaaattttgaggcatatagccttgaaaacctgttcatcatacatcgagttgatcatagaactaagctctaaaaatgcagctcagtcgatatagttccattaagctacaaccttatataatgtaattatgtgattctcatctgcacttattttatagcttttcagttaacctgaatttataagtagttgcttaggagatttaaaactcgkatttactctgagactcaaaataaaaattagatgtatcacccaatgccttccctcccaaatggatatatttctctttgtaacccacaaaattaataacatacatataaaaattactgaaaatgaatgtttgcataatattagagtataaatgtgtaaaaaatttatactatagagtacacatttattttagtataaaatttttttaaatgaccacctttgtaaatatatttggaggccaacacaacattaaaacaagcagtttactctaactaatatagatattactaaaaccagaatgaaatgtgacat

SEQ ID NO: 491313 - DNA, 632 bp, Homo sapiens
tgtcattttagaaggcagccataactataacaaaactttggagcaaaatagatatcacacagtgatttacttatgaataattttttttcataaagagctgcccattctgtgttaaaaattttgaggcatatagccttgaaaacctgttcatcatacatcgagttgatcatagaactaagctctaaaaatgcagctcagtcgatatagttccattaagctacaaccttatataatgtaattatgtgattctcatctgcacttattttatagcttttcagttaacctgaatttataagtagttgcttaggagatttaaaactcgtatttactctgagactcaaaataaaaattagatrtatcacccaatgccttccctcccaaatggatatatttctctttgtaacccacaaaattaataacatacatataaaaattactgaaaatgaatgtttgcataatattagagtataaatgtgtaaaaaatttatactatagagtacacatttattttagtataaaatttttttaaatgaccacctttgtaaatatatttggaggccaacacaacattaaaacaagcagtttactctaactaatatagatattactaaaaccagaatgaaatgtgacat

SEQ ID NO: 491314 - DNA, 632 bp, Homo sapiens
tgtcattttagaaggcagccataactataacaaaactttggagcaaaatagatatcacacagtgatttacttatgaataattttttttcataaagagctgcccattctgtgttaaaaattttgaggcatatagccttgaaaacctgttcatcatacatcgagttgatcatagaactaagctctaaaaatgcagctcagtcgatatagttccattaagctacaaccttatataatgtaattatgtgattctcatctgcacttattttatagcttttcagttaacctgaatttataagtagttgcttaggagatttaaaactcgtatttactctgagactcaaaataaaaattagatgtatcacccaatgccttccctcccaaatggatatatttctctttgtaacccacaaaattaataacatacatataaaaattactgaaaatraatgtttgcataatattagagtataaatgtgtaaaaaatttatactatagagtacacatttattttagtataaaatttttttaaatgaccacctttgtaaatatatttggaggccaacacaacattaaaacaagcagtttactctaactaatatagatattactaaaaccagaatgaaatgtgacat

SEQ ID NO: 491315 - DNA, 632 bp, Homo sapiens
tgtcattttagaaggcagccataactataacaaaactttggagcaaaatagatatcacacagtgatttacttatgaataattttttttcataaagagctgcccattctgtgttaaaaattttgaggcatatagccttgaaaacctgttcatcatacatcgagttgatcatagaactaagctctaaaaatgcagctcagtcgatatagttccattaagctacaaccttatataatgtaattatgtgattctcatctgcacttattttatagcttttcagttaacctgaatttataagtagttgcttaggagatttaaaactcgtatttactctgagactcaaaataaaaattagatgtatcacccaatgccttccctcccaaatggatatatttctctttgtaacccacaaaattaataacatacatataaaaattactgaaaatgaatgtttgcataatattagagtataaatgtgtaaaaaatttatactatagagtacacatttattttagtataaaawttttttaaatgaccacctttgtaaatatatttggaggccaacacaacattaaaacaagcagtttactctaactaatatagatattactaaaaccagaatgaaatgtgacat

SEQ ID NO: 491316 - DNA, 630 bp, Homo sapiens
gggacttggcagcctctttgttactgttaccacctctttgcgcatgcagacacacagttgttaaacaaatttggtgacttgaactatgctggatttcagacactgggataaacgtacttccccaaccatgacttttatttaataaataagattaaaacctaagcatgttatattaaacatttagtatgacccaagtagttttacatattttttatgtaattcttcaggcaactctggtattaccatctccattttagaattagggaaactgaatcataggccagttaagtagttttcccatgactgcacattcagtaagatgccaattagaaataaaracaaagtttttcacctcaaatgctaaactctgaactattatactgcgagcatgtgttagatctatttggatttgaaacaaaaatttcttcccactaatctttcaggtgtattaagaaattaattaaaaagtttcttcaaattgccaacattttttaaaataaaaaagtaatattgaatactattgtacatgtcaggattcagactgcttactctgagtgacagtgcagccaaactaaaatatagagataaattggattttgaagctgacagaagtgtgagtttctgagttat

SEQ ID NO: 491317 - DNA, 630 bp, Homo sapiens
gggacttggcagcctctttgttactgttaccacctctttgcgcatgcagacacacagttgttaaacaaatttggtgacttgaactatgctggatttcagacactgggataaacgtacttccccaaccatgacttttatttaataaataagattaaaacctaagcatgttatattaaacatttagtatgacccaagtagttttacatattttttatgtaattcttcaggcaactctggtattaccatctccattttagaattagggaaactgaatcataggccagttaagtagttttcccatgactgcacattcagtaagatgccaattagaaataaagacaaagtttttcacctcaaatgctaaactctgaactattatactgcgagcatgtgttagatctatttggatttgaaacaaaaatttcttccyactaatctttcaggtgtattaagaaattaattaaaaagtttcttcaaattgccaacattttttaaaataaaaaagtaatattgaatactattgtacatgtcaggattcagactgcttactctgagtgacagtgcagccaaactaaaatatagagataaattggattttgaagctgacagaagtgtgagtttctgagttat

SEQ ID NO: 491318 - DNA, 642 bp, Homo sapiens
tgatttaataagatactgtggcaaacccaaagcagaattcactgcctctcttcctttaacttatcccttttttgtgtgtttgaatgagtttcaggcttttccatgaggttgaaacattatatatttttgttatgttccacacattatatgtgtgaacccattatgtgttgggaatgatatctctatcattaatagtttagcttggaactcaatgttcatagatttctagttactttaaaaaagctgctagttattaaaatttacaacttttatcaactatagttatatataattttatttattgaagttaayttaaaactaaaattgtacttattaattaaagaatttacagatagtaacttaattctgaaagtacagagtattcaatcaactacaatattctgaggtctggttcatcattactagaaatcttttaatttcacagttcaaaaagaataaaacattttctgatctttgacttctagaccaacactaagaaaattgaatttgaacttgctataatttctagaattcagctcctagttgctggcatgagaatgtggggaagtataaaagatgacacaatatcaaaatacatttggcttgctagaaataaaatatatatatatatatatatatata

SEQ ID NO: 491319 - DNA, 492 bp, Homo sapiens
ttctctcaagttgtcttaggtatggttagattaaatacacatcaccaaagtgtatagctatagtgtattttatatacccaagtgttygtcttcagagcagtcctcagagaaaactgccatcatctgtattgaacatgtgttctctagtccttccatattggttaatgattatatatttgtgtatataccaagctaaatcatatgaaattgccaatatttggttttctggcctatacaattagaagttgaatatgattcaaacccaatatttatgctttgggtgtgaattaccagtttcttccaagacacttgatcctgggcgatgggaatatgtttagcttcttcaaattgacttgaacagcctcacctgaaataaagcctttcttttctggacatttccaggaaaagccagtcttgctatttcttgaatagagtgaactgttgcaagtaaactggatgagaactgttatctgactctgactcattttagtt

SEQ ID NO: 491320 - DNA, 492 bp, Homo sapiens
ttctctcaagttgtcttaggtatggttagattaaatacacatcaccaaagtgtatagctatagtgtattttatatacccaagtgtttgtcttcagagcagtcctcagagaaaactgccatcatctgtattgaacatgtgttctctagtccttccatattggttaatgattatatatttgtgtatataccaagctaaatcatatgaaattgccaatatttggttttctggcctatacaattagaagttgaatatgattcaaacccaatatttatgctttgggtgtgaattacyagtttcttccaagacacttgatcctgggcgatgggaatatgtttagcttcttcaaattgacttgaacagcctcacctgaaataaagcctttcttttctggacatttccaggaaaagccagtcttgctatttcttgaatagagtgaactgttgcaagtaaactggatgagaactgttatctgactctgactcattttagtt

SEQ ID NO: 491321 - DNA, 491 bp, Homo sapiens
tccgggttacatttcatctcaggcattatatatgtaagcagtatttacttgcaagctgttcaggcatcattctcaaagttctctgactgaactctttagctcattgagaatgtgagtgtactaaactagactggttgtacatttattatgcccaaattttattcatttaatgtacttttcctaaattctacgatgcactgttccaggtacacaatgtctttgcctttttggatctttcatggtaggtggmtaaaacagaccataagcttttaacaaacaaaagtatttcatatagcgctatgaagaatgtcaaccaaggtgtttggtcagggaggatctcagcagggaattggataagaagacctgttagtgaagatggtcagataattcttctctgaaaagacttttgggttgaggtataaattatgacataggacacgggataatttggcagtacaactttctatgtgaaggactgtgatgagtgaggc

SEQ ID NO: 491322 - DNA, 551 bp, Homo sapiens
catgaaattttagaacatgaaaaacttttccaatatggccaggatgaaaagaggaaggagtacagaatattcttgtcctgtaacttgtatccacttttaacgaccactgccacctggtggcttgtgaccctgtttccactgaaggaagaaaccctgtttattcttgattttgcatacctaagcagggataaaaacaggataaaaagaacactgkcctggaacaccagggatctaagttcctggagcgcaggggttaaagaccatagtatgtcttgttcgttgagatcgtttaactacaaatacctatacttcaacgatttcttatgaaatttgcagccaaatctggaatccagaaagaattctgacatgaattaaaatcttcaaatcccatcatgtatgttgaattactccttttttttttttcaacaagcctcatgtctcccatcctgttagaccttggtaatgtaagcccgtatctctctcctgagttactgagtaatagaagacatggcaagcacaatagctaaggaaagaggaagtgataggtggac

SEQ ID NO: 491323 - DNA, 487 bp, Homo sapiens
agcttctagcgcaataagccgcattattagatgctgtggcatacatatagatagataaatagaatggagtctatgcctcaaggtactggaagctggcagctagsgtgacctctagaggagggtagtatatgcagccaccatcatggattgaagaatacaaactccaaattacttcacttcactctaagccttgtatttttactatcaacataagtttttccttaataattttatttgcaaaataaagactcaaaataaagattgcaaaataagattcaaataatgtacaggcaaaatcattagcctctgttggatactgtggttgctggttaatcctcataataaccttatgaggaaaattacattaccttccagttgtatgtaacctgtatttcccaaatgaccatcaccaatgagttgaaataattgattgactatcacctacattctccttgttattgccctctctcaccacctgtaaaggacc

SEQ ID NO: 491324 - DNA, 619 bp, Homo sapiens
ctgaaggatgatcaatggacttcaactcagatgcagatcttgactgacagaagataattatcattcaagctaatggggaacttgaattggactcaatggtgttagaaagtgaagaaaggctaagtcttcctaaataagaaaaaaataataatatctttggtgagttcatccttttagcctgagtctctttgatagttgacagtaaaaaagtttgcatcttcaaataattgttttcagtttagattattatcaatgttctttgttgctgttatttagtatatttccacagaaagaggctagaaattgccttcttccctctaggkgagagtaactgagcattataaaggttttctgccaaaagcatggagcctcagataagtaatctcatccttcacctatgataaataagctattaaaaatcaagaaaaaaagaaacagaatgtgtgaaatgcacagacaatgttgtagaaacctcatttgtgagaccatgagtcttccccattgtttcgccacaatgctgaatcttctctatttatatttttgtttggggatttttttctttcccaggctgaaatgttttgtgcatgagactgaaaagctgccaggactggtccatctg

SEQ ID NO: 491325 - DNA, 655 bp, Homo sapiens
tatactggtgtcttgcttatgcaagtattattttaaattaagaaaatgcacaagtattcatcttaaaatgaatttgtaatccacatcatgctttctgtcactgtagagatcgacagctgggatacaaatgtggaagtacatatataaatgatttgtgtgcgtctttatgtctgggtgtgtatgacacacacacacagatattatatgtaggccaggtgtggtggcttatgtctgtaatcccagtactttgggaggctgaggtcggctgatcacttgaggtcaagattttgagaccggcctggccaacatggtaaaaccccatctttacaaaaaatacaaaatatctactgggggtggtggtrtgtacctgtagtcccagttactagggaggctgaagcatgagaatcccttgaacccaggaggcaaaagtttcaatgagccgagatcgcaccactgcactccagcctgggagacagagcaagactccagcttaaaaaaaaaaaaaaaaaaaaaaaaaattgaaaaacgctaaccataacttagccaaacatagacaaaaaaaaatcggtaaaattaaactataaaattgaaacaattcacaatattttattaaatcatggtgaatttaaaattctgaaactagagtcatcacaat

SEQ ID NO: 491326 - DNA, 507 bp, Homo sapiens
ccttcttggagtcttattggagtcttagtttttctacctaaatttccaggctgctttttttttgccttgcttctagaactccctatttctagctgtgacctgggtttgctcctgagactccagtcccgttctctctagtgaacttagctgctcatgtcctgcttctactctcactacccatcagccctggatttcagagttgagtcttaccctggcgtttctactaacacctagtcctaccttaagaagtgaggggtctgtaagcttcactggaaccttttccttggggacgtagagaaagtccttttttctaccttctargagtgagtggctgcagaaaggggaactcttcacgattaaaaagaaaatgtgataaagtctcatcaacgtgcataggaatttgctcctcaggctggttcacagggatgcctatgaagcatttctgagaagtggatgtacttcatgaaagatgcgatgcatcagctaccctacaagattttgcagttg

SEQ ID NO: 491327 - DNA, 638 bp, Homo sapiens
agctgccttcttggagtcttattggagtcttagtttttctacctaaatttccaggctgctttttttttgccttgcttctagaactccctatttctagctgtgacctgggtttgctcctgagactccagtcccgttctctctagtgaacttagctgctcatgtcctgcttctactctcactacccatcagccctggatttcagagttgagtcttaccctggcgtttctactaacacctagtcctaccttaagaagtgaggggtctgtaagcttcactggaaccttttccttggggacgtagagaaagtccttttttctaccttctaggagtgagtggctgcagaaaggggaactcttcacgattaaaaagaaaatgtgataaagtctcatcaacgtgcataggaatttgctcctcaggctggttcacagggatgcctatgaagcatttctgagargtggatgtacttcatgaaagatgcgatgcatcagctaccctacaagattttgcagttgggaaagtaatgatctaggattcatagttctggaggactaaggcagttcggagtcatagctatacaaaaagcaagaatggacaatattttgtgtcttttcttttgagacaggatcttgctttgccac

SEQ ID NO: 491328 - DNA, 424 bp, Homo sapiens
tagatacattaaatgtggtatatccatacaatgtaatattatttgaccatagcaaggaatgaagtttcaatgcatgctacgccatggatgaaccttgaaaacattatgctgagtgaaaaaagcaatcacaaaaggccacatatggtatgatttcatttatatgaaatgatcagaatagtcaaatccatagagacagaaagtagattagtggtcgccagaggctgggggtgatcggggagtgacaaataatggatttgggtttctttttcagagggtgaaaatgttctatccttagttagtggtgatggttgcataactctgtgaatatactgaaaaacattaaattatgcactttcaaraaatgaattttatgttatgtgatagtaaaactattattaaaaagatgcttacaattcttgactgt

SEQ ID NO: 491329 - DNA, 660 bp, Homo sapiens
gctggtgaatgaatgtattttagtccattagtttactgtgcatgaggctgacaaatgattctgactttaagcaagagccttggttccaacccctctgcctgaagcaggcccaagcctgtgtccctgagaaggttcagacccaacccttggccatcaccaggtctgaaaacaagccgtgctcctaccagggctgccacagtctctgaccacatatttatcagtctatttttcagtttactctttaattttgaacstgggaatttcttttagtttttttacatgttcagttatatgtttaaagggatatttgttatatcatatttaggatttccagttgtttgtatcagaagaattcccaaattatattagttcaccatattgacaaattaacgtctgatcctccagcaaattaaaggctgaggcaggaggattgcttgaagccaggagtttgagaccaacttgggcaacataaccagaccctgtgtttacaaaaaaaaagaaaaagaaaaaaagaaaattagcttggcatggtggtgtgtgcctgtagtcccaactgctcaggaggctgaggtgagaggatcccttgagcccaggaggtcgggctgcagtgagctctgatcatgtcactgcagtccagcctgagagaaagagtgaaaccct

SEQ ID NO: 491330 - DNA, 660 bp, Homo sapiens
gctggtgaatgaatgtattttagtccattagtttactgtgcatgaggctgacaaatgattctgactttaagcaagagccttggttccaacccctctgcctgaagcaggcccaagcctgtgtccctgagaaggttcagacccaacccttggccatcaccaggtctgaaaacaagccgtgctcctaccagggctgccacagtctctgaccacatatttatcagtctatttttcagtttactctttaattttgaacgtgggaatttcttttagtttttttacatgttcagttatatgtttaaagggrtatttgttatatcatatttaggatttccagttgtttgtatcagaagaattcccaaattatattagttcaccatattgacaaattaacgtctgatcctccagcaaattaaaggctgaggcaggaggattgcttgaagccaggagtttgagaccaacttgggcaacataaccagaccctgtgtttacaaaaaaaaagaaaaagaaaaaaagaaaattagcttggcatggtggtgtgtgcctgtagtcccaactgctcaggaggctgaggtgagaggatcccttgagcccaggaggtcgggctgcagtgagctctgatcatgtcactgcagtccagcctgagagaaagagtgaaaccct

SEQ ID NO: 491331 - DNA, 660 bp, Homo sapiens
gctggtgaatgaatgtattttagtccattagtttactgtgcatgaggctgacaaatgattctgactttaagcaagagccttggttccaacccctctgcctgaagcaggcccaagcctgtgtccctgagaaggttcagacccaacccttggccatcaccaggtctgaaaacaagccgtgctcctaccagggctgccacagtctctgaccacatatttatcagtctatttttcagtttactctttaattttgaacgtgggaatttcttttagtttttttacatgttcagttatatgtttaaagggatatttgttatatcatatttaggatttccagttgtttgtatcagaagaattcccaaattatattagttcaccatattgacaaattaacgtctgatcctccagcaaattaaaggctgaggcaggaggattgcttgaagccaggagtttgagaccaacttgggcaacataacmagaccctgtgtttacaaaaaaaaagaaaaagaaaaaaagaaaattagcttggcatggtggtgtgtgcctgtagtcccaactgctcaggaggctgaggtgagaggatcccttgagcccaggaggtcgggctgcagtgagctctgatcatgtcactgcagtccagcctgagagaaagagtgaaaccct

SEQ ID NO: 491332 - DNA, 660 bp, Homo sapiens
gctggtgaatgaatgtattttagtccattagtttactgtgcatgaggctgacaaatgattctgactttaagcaagagccttggttccaacccctctgcctgaagcaggcccaagcctgtgtccctgagaaggttcagacccaacccttggccatcaccaggtctgaaaacaagccgtgctcctaccagggctgccacagtctctgaccacatatttatcagtctatttttcagtttactctttaattttgaacgtgggaatttcttttagtttttttacatgttcagttatatgtttaaagggatatttgttatatcatatttaggatttccagttgtttgtatcagaagaattcccaaattatattagttcaccatattgacaaattaacgtctgatcctccagcaaattaaaggctgaggcaggaggattgcttgaagccaggagtttgagaccaacttgggcaacataaccagaccctgtgtttacaaaaaaaaagaaaaagaaaaaaagaaaaytagcttggcatggtggtgtgtgcctgtagtcccaactgctcaggaggctgaggtgagaggatcccttgagcccaggaggtcgggctgcagtgagctctgatcatgtcactgcagtccagcctgagagaaagagtgaaaccct

SEQ ID NO: 491333 - DNA, 485 bp, Homo sapiens
ctcacctctgccttctgggctcaagcgattctcctgcctcagcctcccragtagctgggattacagacacctgccaccatgcccagctaatttttgtatttttagtagagacagggtttcaccatgttggccaggctggtctcgaactcctgacctcaggtaatctgcccaccttggcctcccaaagtgctgggattacaggcgtgagccaccattcctggcccaaaacaaggggttttaaatcaagcccctttttcttatgatttagaaccattgtaggagtatcttgaaccccaaataaaaggctaaataatgcgttcttgatttaaacagaaagataatgatctaaatgcttgtttggggttgagggacatgggcctgctgctgaaaaatcctctatagatttatcaagaagccaaaatgaaagcaagtggccaacttgccagggtccctcctccacttctcagggaaagagctgatggcag

SEQ ID NO: 491334 - DNA, 471 bp, Homo sapiens
aacaccttaaaatcctgaagttatgtagaaaactagggagacttcattgtcctgcagactcctgctagtcctattggccacactattttctacatcttgagatttgggccttgcccaggttcaagcctgagctagagagaacatttcttaaaggtagaaaatgcttcattccatagtgtagagtagtgcatgacataagtaggcactattaaaacacagttcttcaaaacctgttacacaaattgccagttttccttcttgaaaacttgcgacaacatagaggacattatgctaagtgaaatagccatacacataaagataaaatactgcatggtctcatttaagtataggatctaaaaaattcaaactcacrgaagcagagagtacaacagtggttaccaggggttaaaggtgaaggaaatagagaggtactgatcaaagaggacaaactttcatttaaaagatgaacaa

SEQ ID NO: 491335 - DNA, 471 bp, Homo sapiens
aacaccttaaaatcctgaagttatgtagaaaactagggagacttcattgtcctgcagactcctgctagtcctattggccacactattttctacatcttgagatttgggccttgcccaggttcaagcctgagctagagagaacatttcttaaaggtagaaaatgcttcattccatagtgtagagtagtgcatgacataagtaggcactattaaaacacagttcttcaaaacctgttacacaaattgccagttttccttcttgaaaacttgcgacaacatagaggacattatgctaagtgaaatagccatacacataaagataaaatactgcatggtctcatttaagtataggatctaaaaaattcaaactcacggaagcagagagtacaacagtggttaccaggggttaaaggtgaaggaaatrgagaggtactgatcaaagaggacaaactttcatttaaaagatgaacaa

SEQ ID NO: 491336 - DNA, 629 bp, Homo sapiens
cattggctacacgtagatcaataatgaaattattacttagtcaataggatgttctttctaagtagacaaaatcattggtaacctgatgtctttgtagggaaaatamaaacaataaaaagaaaaagataactggagctttgggggacattgtctcacaaaacctgtcactgaataagggttagagttgataggaatagttggctttgctgactgtctaaaacaaagccaggcagaggacatttctggattcagagaacaatggaggttccttgatttcaaaacttaccacaccctcccaaaaggaaaacaaagaataacaaggagaaaaagcagacaaaacgacacatgaccatgtcttttgttagtaggagacagaagcatcacaacctctaacttacctgtaagtagagaaaaaggtgaattccaatagagcccctgcctgtgggtgagagattagaaaaggggaggcttgagagtcttcataaaatgtgcaaacaaaataaacccagaaacgaaagtccaacattaaaatccaaagtacagaatgtatcctgtgacctgaaattgtcagtactggacacagggcagagagagaagagagggaagagagggaagagctgcagagagag

SEQ ID NO: 491337 - DNA, 543 bp, Homo sapiens
agtgggctgggtctgccttcaaaggaagtgattcatgtgggaaactaggtcagagckgcttctggtgaatgccatgattaatagcaacctacgtgttactgtccttatggaaaaaaagaataacaggactaataataatagtcctcctgtaggtatgatgtatgtttccagcttggtcgctagtttaattacctgcagaagacacaaggaccaacatgatttctgcctccatctttttttgtgattcatcatgggaattgtgagtaacaggtccttgtcattctgaaaccttacctaaagttaggcattaagggagacacggtggaaatggctggtgccatcaacactgtttgatagctatatcttctccccttttggtttcattttacctcttcttccttttttttttttttacccttccttccaatcaaattttgatcctcctaaagagcctttgatgagtcctttcaatgtgatttgacactaatgaaggtttcccactgcaaatgataaactgagaatcagaatcaacatttattaagc

SEQ ID NO: 491338 - DNA, 538 bp, Homo sapiens
ttttttcaaatgcttgactgaatcttttggttcttcagttttctaactaaaaacttagaggagacagacactcaagacttaaaaaattgaagctgaacaacttttctaaaaacttagcaagctgagaaggggggagcagtttagaagtttagtacctattttcaaatctatggactagcttatttcactatgcaattttagtaatggagcttcagttctctgaaacacaacccacttaccartctgtgatttttaggcattttgaaactatagagcaattcagaattcttgccttgttaaacatttttcatcttttacctgttgtgacttacatttagtctaatttcgtatgctctcatgtaaatatcatgacctaagaagttcttaggaacaaggtattaggaagtaatgttattatttgtcttcatctcagttcaataattgtagattatgattatattaagaaaaaacaaaatttttttccctgcttttatataggaaccagctatcattcctatatatctctatcccccgtaag

SEQ ID NO: 491339 - DNA, 619 bp, Homo sapiens
gacttaaatgtcccttcttctacccacctggtgccttagccacctgtcaagtacttatatcttggtttatcattacctattctttccctcaccagcatgtgagcatctcaagagtgcagtctgtgtcattcagccatatagtcccagcacctgccatagtgtcttgcagaccacaccagcattgtcaggatcaacatttaagatttattgagattactctgtaccaggcattgtaccaagtgtttagagaaaccctaatgttagggagaaagcaccttctctttctccatgcttctgtccatggtgtagtgcttttatcctctctcctcctccccaggtcaaatggaattacttttctgattggaagatgcagaagacgaagttaagcacacgtagttcagcaccatcttcattgmtttctcataggagagtattgtctgcaatgagcagttgcttctccatgccaaaaatgcccctgtggctgggtgtgtcagtctttctaattctggggattgcattaaaaatcccacttttctgtttttgcaatatcagtattatcagggttttaaaaaatgatatattggccctgcctactgactcttttacttttcatttggtt

SEQ ID NO: 491340 - DNA, 641 bp, Homo sapiens
ttttggcttataagtattttcagtgacacgttacttataggaattttctttgactggctggagatacatacctgtcaaacagttttaatttagctccttccatgaaccccagaagtatcatctacctatttttaagatttttcattcatttttattcttattttattattttcttcttgttacttactttggctttgatttgttaatctttatcaactttcttatgaaagaaaattaattagatcattgactttacaacaattttcttttttaatataagcatttaaaactgtttaccgagtagtcattcaggagcagtttgttcagtttccatgtcgttgtgtggttttgagcgagtttcttaatcttaaaytctaatttgattgcactgtggtctgagagactgtttgttatgatttccattcttttgcatttgctgaggagtgttttacttcccattatgtggccaattttagaataagttcgatatggtgctgagaagaatgtatattttgttcatttgtggtggagagttctgtagatgtctattaggtctgcttggtccagaactgttttagtttctctctaagtactgcttcaattgcattcatacaaacttttatatattgcattttcatttt

SEQ ID NO: 491341 - DNA, 270 bp, Homo sapiens
cttcccttattcatacgcaaataaggaaggacggagttgtaaatattatgggcctaacttggcccatctctgttctaatgctgccacctgctggacagccaacaacccacacaggtatttcaaggggatgccctgatastaatgggagacaatctcagatgcatctaggcaaatccttccttccctaacacactccccctggcctccatccttcagatctagacctagtgcacccctgacttatcggatcctggggttgactcacaacct

SEQ ID NO: 491342 - DNA, 411 bp, Homo sapiens
ctgtgcatttatttatagaaacataaataagattgcaaaagaaatgtttagcttaagaaagccaacagttttaaagagtctataaaattactttaatctaacccatctgtctacagaaacttactgcattaattacgaatgttgttacctgttcacttaacagagacaaatatgcataattgctactcacaaagctatgtaatgccaattgtttgcatcacctagtttttcactgagagacaacattgtgtagtagaaaatataggagcttcgargtcagagaaatgggttcaaatcctggctctcctgtgcaccagctctgttgttttggacaagccatttaacttcactgaacctcaaattccttatataaaaagctgttattaacaccaatttctggcttattggaaa

SEQ ID NO: 491343 - DNA, 538 bp, Homo sapiens
acctttcgttcctgttggcatgtcgatgtgacagcttcagcttctcagccatagattgctgacctctaggcttcttttttttttttttcttttttttgagacgtagtcttgctctgtttcttaggctggagtgtagtggcatggtctcggttcactgcaacctctgcctcctgggttcaagcaattctgctgcctcagcctccagggattacaggcgtgcamttgataatgtgtttaaaccactgtatttaagtttcagttcctaatagctgtgccactgtgattcctccctgggacagtggaaaataagagacctagaacagccttccccagccttggaagatatttctttgggaacagtcaccagagtgctgcattaaaattacgtttatgtgtgtgtgtcttctgccctgaatggtgagttccttgaaggcaaattgactcattgacagatgtagcagcacctagcacagtctgccgtgggtgagaactctgcaagtgtttgttcaatgagcaagcagaagctgcactgggatct

SEQ ID NO: 491344 - DNA, 538 bp, Homo sapiens
acctttcgttcctgttggcatgtcgatgtgacagcttcagcttctcagccatagattgctgacctctaggcttcttttttttttttttcttttttttgagacgtagtcttgctctgtttcttaggctggagtgtagtggcatggtctcggttcactgcaacctctgcctcctgggttcaagcaattctgctgcctcagcctccagggattacaggcgtgcaattgataatgtgtttaaaccactgtatttaagtttcagttcctaatagctgtgccactgtgattmctccctgggacagtggaaaataagagacctagaacagccttccccagccttggaagatatttctttgggaacagtcaccagagtgctgcattaaaattacgtttatgtgtgtgtgtcttctgccctgaatggtgagttccttgaaggcaaattgactcattgacagatgtagcagcacctagcacagtctgccgtgggtgagaactctgcaagtgtttgttcaatgagcaagcagaagctgcactgggatct

SEQ ID NO: 491345 - DNA, 477 bp, Homo sapiens
catctcaggggtcttgcggggaagacttttgtgggggcacattagggagatagaatagaacaagcctgataatatccttggagatggtgaagaaatttctagtgaagtcctggtttgcaccttccagaactctgccaactaaccaccttctccacagaccagtatggccagtagctgtcattgctgggacctcagggtggccagctatgggccctgagtcctgggagcctaatcacatggatggaggcccagtgggctgggaatggggtcacagctgcctcactggcaagggcctaggcacagctggcacagacgtkggagggcccttgggctaagcagggacatctgcctggcatttcccacatcccagcaggacccacctcttatgcacctttgtcttggcttctagataaggcctgaatggggattcacatgtctgactgggaaatcctctctgagtggttgcgttagagccca

SEQ ID NO: 491346 - DNA, 519 bp, Homo sapiens
tcattaggttttatttttgttcctgaacattacttacaaattgttctccctccatattttaaaacctaatttcaaatctgagggaaaaaaacttcatttttctgtatcattgcatttactgaatagatatctaatgataaataacttgcttcctaaaaaaaaattcaataccaaaaactgttcatctttccatctggagaaaaaattggaaatgaggaattggaactacaaccttaactttgccaaagtacttctatacagcaggatattaattcttgtcatcttcagtgacaacaaggatacttctgtttgtgactgaaaaactgtgaaattttacattattttttaaagttttttttttcttcaaggttgtctgccctayacagcatgaaacaaaaagctgctataatatatgagttttactgtcaatgtgccttatgttgttgatggaatcatgatttccttctcagcccaacctcaaaaatcacgtatgtggacaaggacaaagacaatacgaac

SEQ ID NO: 491347 - DNA, 629 bp, Homo sapiens
tagatagtaaattaatttcattagaaaagaagcatcttggaaatggcaatgttaaaccacctatgagcagtatacatcagtacgtactggattgctaaggaaggggcagaaagaaaggtaagggaagagatatatatagatatgtccatatttacaatctgattataaccactgacatatgtgtgcttttttyttggtatactttgtgaatactatatgaattgttaaataattaagtagaaacatcatttctggtaatattttaatagtgcagatctcatactgaactatctaagaagcattatacttacttgactgctttgtatctcattttatattgggtattaagtgaacacagtatttaactataaacctgccaatatgcatttccagagacctgttgccattttgttttttaagatatttttgtccccacaaaagataagaaaatgtatcgtgaatatttaccaatgtctgaatcctaaagccctgagtattttgatactcaagtactcatgatatgcaagaaagcatggcacatactatataagtgtaaccatgtaaaaaggtatactcagttatgtatatatgtatacacatacaaggactggaaagatacatcagaatgt

SEQ ID NO: 491348 - DNA, 498 bp, Homo sapiens
cccttaagggccacagtcttactttaaactcccttatctgggwttgcatccatccatatgctctacatttttgctgagaacaaataggataaagatcaatggcccacactgagttggacttagtacctgagttttccaaccaggtactaagagcagtttaacttgtagtaaatttggcacattttatcttcagagccaactgcatttcatttctgaatccttttatcctcaggttcctgcatttctatcaaatctttcctcagaaagcctaaaacattttagaagtgatcaagccttagcagaagaaaatgaagctccagtgctgataaattgcagcagatggtagagactttgtggcaggcgaggaagccatctggtgggatccttccacacagttgcctacttgtagacccagtgacagtcctgatttcaagcaagtgaattctttccttctcttctcaaataaaaacacacctttgcttgcgttgagatctgctt

SEQ ID NO: 491349 - DNA, 446 bp, Homo sapiens
atgatctggagttataatattcaaggagtattccactgacgatttttacaccctagtcagtgactagattagagagacacagagattagagagacatagagaaacttcttttcgttctttaaaaatactgaaaatcatatctgtaatgataaagacaggrggcagagaaattctaggcagaaaagggcggggtcccttgcgaagctccactttcaagcctggaaccacagcccaaagtgagaacatgcattcccgttttaccactccaacgttgccttttccaaccacccatggcccgacctgccccccatcttgtacccataaaaaccctaggctccactggtagagagcagataaagggaaaagagaaggagtagttgaacattggagagaagcagcttaacttcaacgggacggcttgacagtgggacttcggagcagagtcc

SEQ ID NO: 491350 - DNA, 555 bp, Homo sapiens
tgtaatgacagtctgtatacctccttccaaccttccctgcccagtgggagtggagacttgtttttgttgtccctccctgggtagaggatcatgccttatacctgtgcaaaatatatttttctcattcatatttccctagaaacttttatacasagacattgagttatctcaggacacagtaactgtgtgcttctcccattttaacaaaggctttgtgggaaaacaacatcttaagctaaaatgatgcatctctaacgatgaaatatctggcttcaaagcacgcgtgaggaggagaattatgaggggaaggggggcatttctgtgagataaaagtcaaacctcaaagctgaatatcccctttcccttactcgggcccgggtgactctgaatagttacaccaaatcatcacctttcacagaaaatgggggcagagcacacgcatttcttctagctttcatctgctgggaaatactgggcacactctaaccctaaccccatatctctaatagaggagcccaactcttgccttacctatcaatgggaccgaatcggatg

SEQ ID NO: 491351 - DNA, 555 bp, Homo sapiens
tgtaatgacagtctgtatacctccttccaaccttccctgcccagtgggagtggagacttgtttttgttgtccctccctgggtagaggatcatgccttatacctgtgcaaaatatatttttctcattcatatttccctagaaacttttatacacagacattgagttatctcaggacacagtaactgtgtgcttctcccattttaacaaaggctttgtgggaaaacaacatcttaagctaaaatgatgcatctctaacgatgaaatatctggcttcaaagcacgcgtgaggaggagaattatgaggggaaggggggcatttctgtgagataaaagtcaaacctcaaagctgaatatccccttycccttactcgggcccgggtgactctgaatagttacaccaaatcatcacctttcacagaaaatgggggcagagcacacgcatttcttctagctttcatctgctgggaaatactgggcacactctaaccctaaccccatatctctaatagaggagcccaactcttgccttacctatcaatgggaccgaatcggatg

SEQ ID NO: 491352 - DNA, 598 bp, Homo sapiens
gggcaaaagctatacaggagttctcaactattttttaatcttttctctaaaagtagtttagaattaaaagttaaacacaaaaatttccactgatgaaggcttcccataaactatcaaatatggttataagaggaaaaaasgaaacacagaatattgtgtaaagcaagcttgtccaacccgcagcccgtgggctggatgcggcccaagacggctttgaatatggcccaacacaaattcataaactctcttaaaacattgtaagaatttttttgcaatttttttttattggttttttagttcatcagctattgttagtgtattttatgtgtggcccaagacaattcttcttccagtgtggcccagggaagccaaaagactggacacccctgggaaagatatcacaaattgttctagaaagcccactttgaaaatgcgccaatgcacatcaaacttagcataataaagttacactgccagacatatgaactcacaaaaagaattagctccattatgaaaaacagctaaatcatctatataaaatgctgtctatctagaaaataaacatgaatccaaaaacccttacattgttctaaaccac

SEQ ID NO: 491353 - DNA, 598 bp, Homo sapiens
gggcaaaagctatacaggagttctcaactattttttaatcttttctctaaaagtagtttagaattaaaagttaaacacaaaaatttccactgatgaaggcttcccataaactatcaaatatggttataagaggaaaaaaggaaacacagaatattgtgtaaagcaagcttgtccaacccgcagcccgtgggctggatgcggcccaagacrgctttgaatatggcccaacacaaattcataaactctcttaaaacattgtaagaatttttttgcaatttttttttattggttttttagttcatcagctattgttagtgtattttatgtgtggcccaagacaattcttcttccagtgtggcccagggaagccaaaagactggacacccctgggaaagatatcacaaattgttctagaaagcccactttgaaaatgcgccaatgcacatcaaacttagcataataaagttacactgccagacatatgaactcacaaaaagaattagctccattatgaaaaacagctaaatcatctatataaaatgctgtctatctagaaaataaacatgaatccaaaaacccttacattgttctaaaccac

SEQ ID NO: 491354 - DNA, 598 bp, Homo sapiens
gggcaaaagctatacaggagttctcaactattttttaatcttttctctaaaagtagtttagaattaaaagttaaacacaaaaatttccactgatgaaggcttcccataaactatcaaatatggttataagaggaaaaaaggaaacacagaatattgtgtaaagcaagcttgtccaacccgcagcccgtgggctggatgcggcccaagacggctttgaatatggcccaacacaaattcataaactctcttaaaacattgtaagaatttttttgcaatttttttttattggttttttagttcatcagctattgttagtgtattttatgtgtkgcccaagacaattcttcttccagtgtggcccagggaagccaaaagactggacacccctgggaaagatatcacaaattgttctagaaagcccactttgaaaatgcgccaatgcacatcaaacttagcataataaagttacactgccagacatatgaactcacaaaaagaattagctccattatgaaaaacagctaaatcatctatataaaatgctgtctatctagaaaataaacatgaatccaaaaacccttacattgttctaaaccac

SEQ ID NO: 491355 - DNA, 630 bp, Homo sapiens
ctgggcaaaagctatacaggagttctcaactattttttaatcttttctctaaaagtagtttagaattaaaagttaaacacaaaaatttccactgatgaaggcttcccataaactatcaaatatggttataagaggaaaaaaggaaacacagaatattgtgtaaagcaagcttgtccaacccgcagcccgtgggctggatgcggcccaagacggctttgaatatggcccaacacaaattcataaactctcttaaaacattgtaagaatttttttgcaatttttttttattggttttttagttcatcagctattgttagtgtattttatgtgtggcccaagacaattcttcttccagtgtggcccagggaagccaaaagactggacacccctgggaaagatatcacaaattgttctagaaagcccaytttgaaaatgcgccaatgcacatcaaacttagcataataaagttacactgccagacatatgaactcacaaaaagaattagctccattatgaaaaacagctaaatcatctatataaaatgctgtctatctagaaaataaacatgaatccaaaaacccttacattgttctaaaccacactaatgttcccaatgagacaagaaaaaaa

SEQ ID NO: 491356 - DNA, 468 bp, Homo sapiens
aaggaaatggggactgcaataatacctactcaaggaactaagtgtggctaacaatctgaacaaacgtggaagcagacctttcctcagagcctccaataaaaaatgcaagagtgtggctgggcgcgggggctcacgcctgtaatcccagcactttggaaggccgaggcgggcagatcacgaagtcaggagatcaagaccatcctggctaacacggtgaaaccccgtctctactaagaaaaatacgaaaaaattagccaggcatggtggcgggcgcccgtagtcccagctactcyggaggctgaggcaggagaatggcgtgaacccggaaggcggagcttgcagtgagccgagatcgcgccactgccctccagcctgggcgacagggcaagactccgcctcaaaacaaacaaacaaaatgcaagagtgatggagtcagtgcattactacctgaatacaacacacttttca

SEQ ID NO: 491357 - DNA, 636 bp, Homo sapiens
ctgtgtggcctgacagtctctaccagtcctgctgtcccttggctgagaatcaaacccgcttctggatggcggggaagtgtgtcctctgctggctgtgttctctgtggagctcaggggaggggaaaggccaagccatttctagggtgctgttgggagcagtgaaaaggccatgccctttccaagggacacttttcctggaaagcccctggagcttagctggctcttatcctgtgaagccggctctggccaccagggggcagggccatgaactcagcccagagggagcctgcagggcagccggcactctggaggcacagacagaacaggccaccaggtgcagacaggagagggagacaaggggatagaacggaagatgccggggctgggtggaagtcagtgcccttaggtgctggtacctgtcttccsggccaccgctagatcaggcttctgagcctgttggctgtcagggccagactgcgccccatagactacatggcagtccccttggaatcccccaggcgccaccaggcagcatacaggtaacacgcctggaaggtccccaacagcctagctggacatgctcaagacactctgggactccttgtttggtggcacaaactccaggacccagtgagg

SEQ ID NO: 491358 - DNA, 639 bp, Homo sapiens
ctgtgggtcttatgtattttagtcttgcttatctctctgacattatctccctcaatgtctgtcttgtccatgaagctgcagctatactgactttctttctgtaaatggaacatgcacaattcatctccctttttggaactttgcacttgctgcacctttttcttggaaagttatttttcctggtctccttgtgtttggtttcttcctgtcccactcatctcaacacaaatgtcacttcttcgctctatagaagttcacccaatcctccttataactattttgtcttcatagcatttatcaatctcaaaagtttttcttaattaatgtaagtacttattgttggcttctacttagaatgtaacctccttgaggacagagtctgcttgtcttgctccctgtagtagtctggagcttggaacagtacctagcaataatagggcctcaatacattttatttgacaagctgattctttcwaaaattctttgtttttttttgtcatagagacatgtgaagtgtttgatgtaatatcttatttcaggaatataccaatggcttataattccaagatgatttcagttgacaagctgggagagaggcacagtgagaaacagcctgttccacccagtaggtagccagac

SEQ ID NO: 491359 - DNA, 440 bp, Homo sapiens
tggcattctttgtagttctctgtgcaacttcaatgcaggttacttctttctagctgagatttttttwaaggagtttaatattctggcatggacatggaaaaataaaatacacaacaaatcttccatttttaattacagaaaatattcaaaagtgttcattattgcaaatgtgctcagaggatgttcagaatttttcaaaatggagaaatgaagaaaacgagaagaaaattttgtttaatatataacttgagaatgcagaatgattattaaaaatgtattaactgttgagacaaagtttgcaaaaagctcctgggaattagagagccttattattcctatattaaatgctgaggttgaaagaacatgattcataactagatggggatgaccagatgaatttcagattccataagcacagttaaaaattttccctaaattcc

SEQ ID NO: 491360 - DNA, 440 bp, Homo sapiens
tggcattctttgtagttctctgtgcaacttcaatgcaggttacttctttctagctgagattttttttaaggagtttaatattctggcatggacatggaaaaataaaatacacaacaaatcttccatttttaattacagaaaatattcaaaagtgttcattattgcaaatgtgctcagaggatgttcagaatttttcaaaatggagaaatgaagaaaacgagaagaaaattttgtttaatatataacttgagaatgcagaatgattattaaaaatgtattaactgttgagacaaagtttgcaaaaagctcctgggrattagagagccttattattcctatattaaatgctgaggttgaaagaacatgattcataactagatggggatgaccagatgaatttcagattccataagcacagttaaaaattttccctaaattcc

SEQ ID NO: 491361 - DNA, 603 bp, Homo sapiens
ccctcactgctcctgaggcacaaactcctttaggaagaaacaagtgattgccatgactcccagcaagaggctcatggtggggtccccacttccacagcacctcccttctttgttgtgtaaagaaataggtctgcgaaatttcagagttgcaagatggcacatagggttagaagcacagaatagacacaggtttccccaagttttagttgagtggttattgcatggctaccatagcggtgtgaactccttaatcagtacctctgtgtacattcattgttcattgctactattaataacccttttatattggtgctggtatcggagagtgtttgctgtgctgtctctccattagatgctaaagccagactaagcctttcaatttccatctcaccatatttaacctcttttgaggtttagcttagtgttgttaatggtgcatagcatgttcttttccatactcaatttgacaaactacggggaatctttgatcttataatttaaagacatcatgtcttatytcggcagacagataatctcagaacatttaagatttaattgaattggacacggtaaaaacatgttagcattatcgaaatactaaaa

SEQ ID NO: 491362 - DNA, 523 bp, Homo sapiens
cagggtgtggacttgtctttatttcccctgcttgggattcattttgtttcatgactctgcgtgttcctgtttcatatgattctggaatatttccatgattatcttttggaatattgcttgttccttattctcaggatgctgttattctccatcaccttttagtcattatatcctgaatctcttccatgtaccttccttctctctaaaactgactttgatacaatctatctgttgatatttatgtgctgcatyctaagtaattttttcatgtctctctgcccattcatttttttctcagttcagtcatgtgtaatctgatctttaatttatccatcgaggtttaggttccagggcttactttttacttctacaagttctcgtttttatttcaaacccatctgtcttttaattacaatatcttcctcttatttctggtccttcttcaattctaaatgctttttgtaatccaaatctgattacgtattatgttgttgtgattatattgctatttgtgccttttgac

SEQ ID NO: 491363 - DNA, 564 bp, Homo sapiens
  misc_feature (1)...(564): n = A,T,C or G
aatgaagaggggctatgtcttttccttcttttttttttttattatactttaagttcttgagttggaaggtagttcgttacatagcatcactgtagtaatagatgactaatatatcaacctcttcttgagaggtaaaaagcaatgaccatttttttattattaaaaggaccactgagatrtttattatattattaactgagattattatttaattttgtattatagatggaatttaatttacaaagatataaaggcatatactggatcatctgttgatcaaccaattagcagagattatctcataacttcaatgactgtgtttgattggcatttgtgattattttgatgccaagtgaatattcacagtaataatatttaactattaatgtatcagtaagcaaatatgactgacattagtagggcatattttaatgtcaacttgaccaaagntcgcctcaggcttatgactatattacattaccagtaataatgatgtactttctttgcagtaataaatagcaattgaagatctgtccacagaatgaaactttgtattttaagttc

SEQ ID NO: 491364 - DNA, 494 bp, Homo sapiens
catgggaactgaactccacgtataaagtcattgtgatagtcagcatccacattgatccaggaagatacatttttactagttctgatgacagcatccatacatttcatgctagtatctggtgaggagtttttcgaaacttcccttcactatcttacacttgtggtcttcagcatgaatctgagtcccattctacctttatgatacattgtgaaatcaatataaatsaaacagaacattattctcaggaagtaaaagtttcagtcagagcttaaaatttgaagttctttgacatttatgactttgtagtttctgattaaaaattccctttgatatagtttttctttattctctcagtctgtgattaatcctactggccaccaaggacaggatgaatgtcagagtagagaatggcaggtaattggagcagaaagacaaagaaactaaaggcacatcattttatttgtaattcaaagtcctggttgtgggacactgac

SEQ ID NO: 491365 - DNA, 627 bp, Homo sapiens
tgacaggatttcattctttttatggctgaatagtattccatagtatatatctatatctatatatgacattttctttatctgttcatctattgatggacatataggttgattccatatcttggctgttgtgaatagtgctacaataaactaataaaaatataatatgaaacgcaagagaaaagcacataattttaaatttcctaattggcatcttaaaacataaaaagaaacaagtaaaacaaatttttataatttatgtaacccaatatatcccaaatattatcaatttaatatgtargagagagaataaatcattaatgagatattttatattctctaactgtactaagtctttaaaatctggtatgtattttatacttacagcacatctcagcttaggctagtgctatttcagatgttcaaaagctacatatgactaggggctaccatgatgaaaaacataaatctaagggaaagaactttgttccactcactgttcactatgggcctcagactagtaaagtaacaagttaatttgttgcttttttttctcagtagagatacaaataaggtctgtccagtaggaaagagaaacaccagtaatcattttgggttctaaatttttag

SEQ ID NO: 491366 - DNA, 619 bp, Homo sapiens
tgtaggctctggaaaccactgccagttatgcttcttccatgacctacagaaacagtgagttactgttttcttagttaccagaaatttctcacattgtgtctttgcatctttggctaatgattcaaaggcccaggccagttcacctcattgtctaagcttatgggagaaacaaagattctattttaacttctaaattatccttatgttgttactgctagaccagctattattcttgcaaaacaaaagtttcagacrtacttttactaaataagtgattaatcaaacttaaaatgtcatgaatgggaaatccatgacaaaaaaaccagtggttagcattaattataatttgtaaaaaataatgctgcaatatggaaggcaaatataaaatatacttatttacatatgatatatatttatttacatataatagtcaacaataataataactagtgccacaatgtatggagaaaaattgggaagttagtagcttaagagaaataagaaatatgctaatttctttgcataggatatattctttatataatatttatttaataaaatgttatgttagtactttcaatactacagataataacccctcaaaaagtgcccatagaac

SEQ ID NO: 491367 - DNA, 619 bp, Homo sapiens
tgtaggctctggaaaccactgccagttatgcttcttccatgacctacagaaacagtgagttactgttttcttagttaccagaaatttctcacattgtgtctttgcatctttggctaatgattcaaaggcccaggccagttcacctcattgtctaagcttatgggagaaacaaagattctattttaacttctaaattatccttatgttgttactgctagaccagctattattcttgcaaaacaaaagtttcagacgtacttttactaaataagtgattaatcaaacttaaaatgtcatgaatgggaaatccatgacaaaaaaaccagtggttagcattaattataatttgtaaaaaataatgctgcaatatggaaggcaaatataaaatatacttatttacatatgatatatatttatttacatataatagtcaacaataataataactagtgccacartgtatggagaaaaattgggaagttagtagcttaagagaaataagaaatatgctaatttctttgcataggatatattctttatataatatttatttaataaaatgttatgttagtactttcaatactacagataataacccctcaaaaagtgcccatagaac

SEQ ID NO: 491368 - DNA, 476 bp, Homo sapiens
gcaggatggcgatctttttacatgctcccatgcgcacacacgtagctccacagttggataaaccatggwgtaaagtgttaagagctgtatttttttaaatccatatggacactgagctgagtcaagcagagagaattttctaagttttcatatttgctgattctattttaatgataagcctccgggatagcttaccctgtacttatagcgtgagtaaaaacaacagggtactagtatttttttcagccactaattacagttactttggcatatttgatatatatttagatatggcaaagattattaacttttaagtgttcccatccttctacccatgcccaatttcatccaaggagagtttgatttttttgccttttctacttcttggctatcctcagaaggcctctcccctctttctaggtctttaccacccttgagtttttatcatgcaaaaactgggaacttagctgcaagag

SEQ ID NO: 491369 - DNA, 223 bp, Homo sapiens
gtaagaaagacaaaaaggcattgctaagctccttttccacgtggggagactaagcagagagtcggtaatgaaactgggattaaaacttgcactattgcatctgaatttgtataattttctttctttttctttaacttttttagaagcccytctcctaagctgccaaagaaagacgttatgttgaagtgaggcagtggccaattgcagttaatatggttgctta

SEQ ID NO: 491370 - DNA, 377 bp, Homo sapiens
ctgagaggatgccccgcatcaatactaaggaaactgacctcagcatcacgtactcctacattttgtcaaaggaaggcaagctataccaatagtaaatttctcccattggtatgaaaatattagcattacattttagatatttcatgatarattacttcaaattgagggtttttgtttgtttcttttaagagaagcggtcttaatgtgttgcccaagctggtcttgaactccaggctcagtttcctgagtagctaggattagaggcatgcaccaccacaccaggctctgagtttttaaattcagaagaaagttgggtacacaagagaagctgaacctattaagatattcttcttctccttccctatcccctcttattt

SEQ ID NO: 491371 - DNA, 618 bp, Homo sapiens
ccttcaaggtgagaggtctgtgcatatccctaggaaaggggatgaatccaggcgtctgagcagcatcgatgttggggcctcactttgatggcaccttacaaatggcaccatttacttttcttatatagcacttaatagaggtgtcatttggtttactgtgactattatttatgtgctcattcaattaatgtgtgcataaattagtacattgtgaactccagagaggcaggaccttgatctgattttgctctcccctttatttttagtgctcaggagaattcttgaaactgagtagcaaataaaaaagtgtttacttaaaaagcatctcacaaataatctgatgaataaaatcaaagcaactagactgtttaataaactcatgacattatctagtccaagcttaacaagttttcaactctcaactctaacktctcatcaagtatcaaggtgtttttcactgtgcacttttaataatatagtatttaagaaggcagtgcattctatggttgagcttctgtaatttattggatcaggctttgctgtgctgaattaatcttctaaattgtcactccaacgatattgggccttgtgtgagcagtagtgtctgctttattgacc

SEQ ID NO: 491372 - DNA, 642 bp, Homo sapiens
acaaaagggcaagaaattccacgtggacttgtttccctctctgctacagaacaaaacctttactctttgggaatgaagggaaaccaagaactgcaatccttagtgcaatggtgaaaccacattgcagttgaaaaaaaaaaatgtcaggtttaaaaagcaaaaaaacaaaagctattgtttgaaaagtagttggatgatacatagagcccacagctacagtcagaagacaagcagcaggacaaagaaggctgtatctcccagatcctgagacattactccaggtcaaatactgaggtttaactactaattagagaatgcatctcattttatgaattagagaatgtacaccgttaagtgaagcagcttcaacttgtaagtcacagcagagcatgccaagagactttctgaggctcagcacaggggcaaggcctgagactcagcattggagaggcattgctctggaaaatcaaccttgctctaaatacaaggtatttatacagaaatttgaagcctgtggtatactaatagcaaccatagcaataaccctacaaaatyagtaccactcttaaatatgttgatgcagacttttccattaaatacttaggggaaaggtgtccccaattccaagtacacatattattt

SEQ ID NO: 491373 - DNA, 642 bp, Homo sapiens
ttaatcaagaccctcatcaagttcatttgatatcacttggaataacaattagaaataaggtgatctgctcactagacttgctaatatttagacatcctaaagtggagtaatgtgaaagcagtacagaggaggctggcttccctaatattcagctaagctatggatggtttgagccagtactttttccatgggtaccagaggtgtttccattcaaattttccaggggtgtgtgtgtgtgcatgtgtacttccaagcacataaaagagaggcagagaagtgggcaggcagtaggcagacaaaaaacacaggcagacaaacaacattttctgatgataatggctgagcttaaaatatctttaaaaggttagaaacctaaaacaacttttccaaaaattcatattattagttccattttacaaagaaggtagaggagtctcaaagactaacaaaagcagaaagtcttcagagtgatctttgactcaaaattctatactctctatttgaagccagctttattatccagaaaggaactggtagtgatgcaggacaagaaaggcccaaaattgaggcttagcctgggagggtttttggctctacccaggggttcttgsctttgcccagtgaggaattcaagggtgaact

SEQ ID NO: 491374 - DNA, 660 bp, Homo sapiens
  misc_feature (1)...(660): n = A,T,C or G
nnnnnnnnnnnnnnnnnnnnnnnnnnnnncttaatgccagcctcaacactactgacattttggactggaaaattctttgttgtgggatctgtctcatgcattgttaactatttagcagcattctggcctctacccattggatgccagtagcaaccttctcccctgagccacaactacagttgtctccacacatgacaaatgtcccatggggagtaaagctggcttcactttaagaccactggcttacatgatttcaaagggcctctgaacactattcttttcagagctcacgtccctaccctgagtcagygcataatgggaaatgaatgagaccttgtgtcaccagttacgtcctcctcttcagattttttctttgggctagcctgagagttggtgtggctcctaggactcaaaggatgcctcttggcttttgtgtgagtgaagcaaatccttgtgggccaggactgtggtactttcaaagagtgccttcttatggaatgacctttgtggtcctagtcaatgccaatttcccactttctttttctcttttgtaattcccaaacatataacacaacagtaaaatgtgcgaggcagtctggtgtagatagtgagcctaaatgatagtgacttactttcacttcttgaacagagtttagcata

SEQ ID NO: 491375 - DNA, 489 bp, Homo sapiens
cagtgatacatagtaggtactaatcaaatattcttggatatatgaatgaagaaattarttatacttatttgtgtcactcacaatctagaatggtgctaatctgtttggaacaggaagaggcaagacatcaactcatgaaatttcaactcatgaaatctcactcagcagatgttttagtaactattaggtgctcaggcttgtgctgggaatagattaatgagcaaaattaggaacgttctctgcttttactgagctgatcatctggttgtggaaacagatcctagtcagaaaatcacatgcagtaaagcacacctcagacaaatgccataaaattgctggatagtggctcatttagatttcagtagctgtaagcaagaggctgccagtggaaaagtgaagacggtcacctgcccataagaatgcaggtatagtttggatttctctctttactactcaatagctacctcttttgttcatgcccataggcaa

SEQ ID NO: 491376 - DNA, 608 bp, Homo sapiens
ggctcagatctagagtgaggtgccttaaggatgcgacttagggacccagggctaaagattcggagaacttaggttcagtaccccctcacatcccaggcccgagttcggaacctttgagctgacctttgagtcagaggtcaagaggtcaaaaaggacacctggcagggaaaatggcctagttgtggagaaggtcctggaaccagagcaacaaaaaacgtctgtgggttggagaagactcagagatcagaggccggtgggcgccgcgataaccactggaaaaaggaaaggagtcaggaagtaaagtgcacytcccactcccggaaaatggcggcccccgcacactgcctttcccatatcacgtggtattacacgcaacagttcccgcccattttgcgatcacgtgacagaaaacgcagctctggcgggggtaagaggcgggactccaaaaaggattgcctccggaagacaccgcagcgagacgcgtacagactcgtgaccttcactgattggtccgtagacccgggcgccacggaaggaggtgggctttcagggagtggggcggggtttttctacctaggcgggaacccaaatatcgttttgattggcaa

SEQ ID NO: 491377 - DNA, 597 bp, Homo sapiens
ctggctccgtgcggtgcagcctggtacccggcggggcacacgcacaggaagctgcctggcgtgttctcgcagcgcccgaggtcacacggcggcggcacgcggtggcactcgtccacatctgtaggcacagaccaggcggctgggactggggcagacagycccgggagaagcgacgcaaggaggcaggggtagagggaagcgggagcgggaccaagcttgggccagagccaggatggggatccggccaggacagccggagaggggcacagtgagagaggcaattgtggagggcagggtttggtagcgcaagggcagaaaggagagctttggggaccaagctaagggaaggtggggtaggggctagagaagaaaggagcagtttggggatagggctctggtgtggcagggttggaatcggggtcgcggtcaggagattggttgccgcagttgcaggacagctgcggggcctgggggagggagttagtcagggagggcgtggccaataagggcggggcctgggcgtgggggcggagcaatacgagttgcgaccaggccccgatagaaactggcagtttgggagctgggtaggggtggggt

SEQ ID NO: 491378 - DNA, 597 bp, Homo sapiens
ctggctccgtgcggtgcagcctggtacccggcggggcacacgcacaggaagctgcctggcgtgttctcgcagcgcccgaggtcacacggcggcggcacgcggtggcactcgtccacatctgtaggcacagaccaggcggctgggactggggcagacagccccgggagaagcgacgcaaggaggcaggggtagagggaagcgggagcgggaccaagcttgggccagagccaggatggggayccggccaggacagccggagaggggcacagtgagagaggcaattgtggagggcagggtttggtagcgcaagggcagaaaggagagctttggggaccaagctaagggaaggtggggtaggggctagagaagaaaggagcagtttggggatagggctctggtgtggcagggttggaatcggggtcgcggtcaggagattggttgccgcagttgcaggacagctgcggggcctgggggagggagttagtcagggagggcgtggccaataagggcggggcctgggcgtgggggcggagcaatacgagttgcgaccaggccccgatagaaactggcagtttgggagctgggtaggggtggggt

SEQ ID NO: 491379 - DNA, 597 bp, Homo sapiens
ctggctccgtgcggtgcagcctggtacccggcggggcacacgcacaggaagctgcctggcgtgttctcgcagcgcccgaggtcacacggcggcggcacgcggtggcactcgtccacatctgtaggcacagaccaggcggctgggactggggcagacagccccgggagaagcgacgcaaggaggcaggggtagagggaagcgggagcgggaccaagcttgggccagagccaggatggggatccggccaggacagccggagaggggcacagtgagagaggcaattgtggagggcagggtttggtagsgcaagggcagaaaggagagctttggggaccaagctaagggaaggtggggtaggggctagagaagaaaggagcagtttggggatagggctctggtgtggcagggttggaatcggggtcgcggtcaggagattggttgccgcagttgcaggacagctgcggggcctgggggagggagttagtcagggagggcgtggccaataagggcggggcctgggcgtgggggcggagcaatacgagttgcgaccaggccccgatagaaactggcagtttgggagctgggtaggggtggggt

SEQ ID NO: 491380 - DNA, 597 bp, Homo sapiens
ctggctccgtgcggtgcagcctggtacccggcggggcacacgcacaggaagctgcctggcgtgttctcgcagcgcccgaggtcacacggcggcggcacgcggtggcactcgtccacatctgtaggcacagaccaggcggctgggactggggcagacagccccgggagaagcgacgcaaggaggcaggggtagagggaagcgggagcgggaccaagcttgggccagagccaggatggggatccggccaggacagccggagaggggcacagtgagagaggcaattgtggagggcagggtttggtagcgcaagggcagaaaggagagctttggggaccaagctaagggaaggtggggtaggggctagagaagaaaggagcagtttggggatasggctctggtgtggcagggttggaatcggggtcgcggtcaggagattggttgccgcagttgcaggacagctgcggggcctgggggagggagttagtcagggagggcgtggccaataagggcggggcctgggcgtgggggcggagcaatacgagttgcgaccaggccccgatagaaactggcagtttgggagctgggtaggggtggggt

SEQ ID NO: 491381 - DNA, 551 bp, Homo sapiens
agtgaccgctctcgagaacgcaaggtgcctgcctcccgcatcagccgcttggccaactttgggggtaggtgtgactttgggggatcttggtgtgacctcaattagaaagggcaacatttacagattgaagcaagggagaggatgaatcagagacaggaaagagagagagacaaaaaaagagagacaaaggcaagggcctgcaaggccaagagaaatcaagaggaacataaatgataatttttttttttttttttgagacagagtctcactttgtcacccaggctggagtgcagtggcgcgatcactgcagcctcaaacttctgggctcaagcaattctctcgcctcagcctcctgagtagctgggaccacagttgtgcaccatccgcccgggtaatttttttttttttttcctttgagacagagtctcgctctgttgcccagkctggagtgcagtggcaccgtcttggctcattgcaacctctgcctcctacattcaagcaattctcctgccacagcctcctgagtagctgggattacaggtgcctgccac

SEQ ID NO: 491382 - DNA, 457 bp, Homo sapiens
aaaccaaataccatgtgttctcacttaaaagttggagctaaacaactgctacacatggacataaaaatagaaataattgacactgggtactccaaaaggaggaagggagagagagagaggcaagggttgaaaaactacccattggatagtattttcacttaytgggtgacggattcaagagaatctcaaaccccaaccttatacaatatacccatataacaaacctgcacatgtactccctgaatctaaataaaataaaattttaaaaaattagaaagaatgccttcaaccacaacactactatctataatatctaatggtagccttcgtgtttttaaaatgtcttgtaggattattatcaagttaaatgtctgaacatttctctgatataatttggtaaaagtgattttaaaaagttgaagatacagatatctgttaagatgtgaatcaaattgta

SEQ ID NO: 491383 - DNA, 618 bp, Homo sapiens
ctgctctggctacccatatgtcacagacaaattggattttttaataataaaagcagcagtgaaagcattaagagaactctttaaacatacctgaaacactgtttcttaacaacaacggtcatgcctgcgaagtctaaagccacttgtgatttataaccacaaagtttcagttttcattgacaagattggagaatcacacctttttcttctaactttcccctctggatatttcctacaaagttctaaatttagtagactattactatatgcttgcaaatttacttcatttatgttaaggaattcttcatcaccatagtcatttattgattattaacaaccttattgtgttayaatgtttgtactttcagagcctatcccacccataataacttaaattttcaaaacagtatatttgtcccagaactatagagacagaaaataatcctaaacaaatttgagactccaatttccctctaccagcctatccatcattgagcttatccattcatgactgactagtctttcaatatcttacaaatttagacttggcttggctttacttttgtattattctttaagctaccattaaagcagctttctccactttcccctttccac

SEQ ID NO: 491384 - DNA, 312 bp, Homo sapiens
tttgatgaacatttacttttgcttatttacttatgtattcatttattctattcatttgcttatttatttttatcacaacaaatgatgcagcaatagaaatctttggaaatatattcttacgtgctgaggcatataattccatgggatgtttttcaagtgaaggaccactgggttaaaatgcatgtgtgtgtgtgtgttttaattttaatagatgtttcccagttgctttttcaaaaagttatcaaataaatrttttcataagcatgtttgagaattcacattttaaaattcacattccctgtatcccagaag

SEQ ID NO: 491385 - DNA, 272 bp, Homo sapiens
tactcagtgaggacccattcccctctggggcaaggctgggcattcacaccagacttccttatagctgacgggtctgcagttccaaactccttcccaatcgaatagaagaaaagttgcttgctctttttccctccacttctrtccttcctgttgccctatgacatggttaagttgtctatcatcctgcaaacacatgaacacatttagctctttcctttcataataagaaagataataagaacataataaacagagactgtggcacgacagca

SEQ ID NO: 491386 - DNA, 512 bp, Homo sapiens
acagccagtcctgggctcagtaagcaaatgaagaagcacgtgtccttggttaatatcatataaagtgacagggccacagtttgcaagcatgttttgtgaagacctttctggtcacactttgttctgacttaacacaatattccattaaaatatggattattcattaacttacagaaaggcaaaaaaagtgaatgtcattgaaatctgtgttccctttggaaaaaaaataactagagtcattagtcattagtttgttatgaacaacagtgcttgtaatgaacatttaaaaataaaatgtatttgataatcgcaaccaagtttatttaggttagaaaaacagttatggcatacaaatagtgctgagaaacaaatttaacaaggcttttttacagcatggcctctatagcaaaaatagtaagattcagcctgatgtgtattaaaatctattattcttttgactctgcaactttrataaatcaagcaagagtcataagaacaaagagaggaaacag

SEQ ID NO: 491387 - DNA, 592 bp, Homo sapiens
actgccagaatattttttctgagagccctcagaggaaaaaagacacactatcctagatttggggacctgtagtatttctctttaggatttaaccccactgtgcatataggaaactaagagacatggataatgtctttctccagtgaaaaagatgttttttctctaatatttggctttaaattacatttgtgtgcttcttgggggtcaatccaaatttctcttgcaggcctgaggtatgcgcggtactctgctaggtaaacagagggagcattaagaaacgattcctgtttacattctaaggagtgaggtcacactcagctccagagcccacctactatgccggacagaaatgttcatgtaatcacttattctttcattccaaagatacgtactgaccaccagtcgtgcgcttatctctgctagacactggagacagacacattagtgagcaacacagactaggtscttgtctgcaaggagcttacactcaaatgggagaagacaataccaaggaaaaaggaagaaacaaaatgattataaattgtgatcagtggtgtgaaaaagacaaaacagaaggacacgataaagtaca

SEQ ID NO: 491388 - DNA, 636 bp, Homo sapiens
ctgctttttaccttttgcaacatggccaatagaaatttaaaaatcacatagtttgcactggtggcttgcattctattttgattggacagtgctgctctagagtttggaaactctaaacctgtcactgctttgagagggatgcaaggggcaagtgtgtttccaagtcttgtctctggactttttctgccacactaatgaaactcttaccaatgggtgatattgaaactaacactatctaccaggaaggctgcaatacactcagatgtgaatcgcctcctgttccagggccttcaaycacccttctattcgcaggctttgaagtacaggctctgactggccccagcaagagcacactttggcactctgtggcacatgtaactcattcttattgcactgatctaaaacctagctctcactcacagtggcttttagggaatgatcatgtggacccaggctgccaccgatggctgtgcagtttgtgcctggcacaacagtgtccagcagagggtacacaaggggttgccatcacacctggggtgcctgcaggctggggctgcagtttatcggctcagaggcgttgcctgaagtggactgcactctacacccaaggcaatcttttttcttgcacccctgact

SEQ ID NO: 491389 - DNA, 556 bp, Homo sapiens
ggatacacagcaatggataagcctaacaaagccagwcactgccattccccctcttacctttgtgttctctccctcccacatttcctgtcaactctcccaacatcccctcccaaactgtactcagaataatttacacggcctcaatctcaaagagaaggaaacataagctgtttatgatattccgtattatgctttcgaaaaatatacatggctcactgagcttaccccagtgtgagcaactcctctcagcgatccctgagacaaggggtgtgcgtgtgggtgaatgtacacatgtgtgagaccagctagtggcagtggcacagggtgtgtttgtgagtgtgcatgtgtgtgtgtgtttatgagagagagaaagaaagaatgtcggtgtgtgactcccccactcactctttggagcctgagaggctctcctttctcagagcaattactacaaatgatttatgtgaccagtcaaaagggcctgccagggttcttatttcatctccagaaaaaggaactctgctggaatgttatcagggagcttgggattaaactgaca

SEQ ID NO: 491390 - DNA, 322 bp, Homo sapiens
caaacaagttttgctaatttttattgaagtctgtattggtcaaatgacatttggaattttatacacagatctgggaatataactttttaaaaaaatatcagttattatcagcatgtcagaaagaggatagcctctgtgacaatgggtcagatggtcatgttaacgtaacgaataatggaaggaastggccatgtctgagctgggaaagagaagctagagaaatatgaaagcttttgttagctctctagaggttgcctatgaaaaaggggtagatttactccatgtcacaacgtaggaacaaagtggaggttatatagagata

SEQ ID NO: 491391 - DNA, 551 bp, Homo sapiens
tcagtcgcccaagctggctcactgcaagctccgtctcccgggttcatgccattctcctgcctcagcctcctgagtagctgggcctacaggcgcctgccaccacacccagctaatttttttgtatttttttttttttttagtagagatggggtttcgccatgttagccaggatggtcgcgatctcctgacctcgtgatccgcccgcctcggcctcccaaagtgctgggattacaggcgtgagccaccgcgcccggcctaatttgaatctttcaaatgcacttcctgacgtgtctagcttcaaattagatgatgttttatgatttctacaatcgcgtctacggatgggggtcaggaagtgacagatttttttttaaaactgactccagaacgttttactttttgaaatgtttggcacacaaaataygtctcttctttcatttctaatcaatatttattttatattccattggtaaatttagcatatttctttttttatactatttttttaatttttagagacctctgattaatgaaagagaccggtaggtgat

SEQ ID NO: 491392 - DNA, 650 bp, Homo sapiens
acatgtatcccagaagttaaagtaaaataaaataaaataaagaaaagcagcttccttaataggacctgcatgatcctgctcccacctcttgccccagcctcacctgatagctccattgctctgggagctgcaggtactctgaccttcttccagctcctgcagggactgtactgctcaggccacagggcttgtgccctgtgccgtacatctctggaaccctcttccttctccactcacctacatttcttctcttgtttaagagctcaactcaactstcacgtcctccttgaagcctcccccacctctttgagacaaagcccccatggtacatgtatctcctttcatcgtgagtagtaatcattctattatggtctgtctccccggccaagcagtgaggccagcagccacagacccatgcccaccctgcatacctcacatagaataggcacctaataagaatatttggatcagacaaaacaataaatgaatgaagaattaatacatggtgaaaggaaaaaggatgatctcagagactgacaggcatgcactcaaaaccaggaacaacacactggatgctggatggaaacccagtagctcagagaaccaatgggaggcctgaggatcatgtgcaacctgaaatgtgttccatt

SEQ ID NO: 491393 - DNA, 650 bp, Homo sapiens
acatgtatcccagaagttaaagtaaaataaaataaaataaagaaaagcagcttccttaataggacctgcatgatcctgctcccacctcttgccccagcctcacctgatagctccattgctctgggagctgcaggtactctgaccttcttccagctcctgcagggactgtactgctcaggccacagggcttgtgccctgtgccgtacatctctggaaccctcttccttctccactcacctacatttcttctcttgtttaagagctcaactcaactctcacgtcctccttgaagcctcccccacctctttgagacaaagcccccatggtacatgtatctcctttcatcgtgagtagtaatcattctattatggtctgtctccccggccaagcagtgaggccagcagccacagacccatgcccaccctgcrtacctcacatagaataggcacctaataagaatatttggatcagacaaaacaataaatgaatgaagaattaatacatggtgaaaggaaaaaggatgatctcagagactgacaggcatgcactcaaaaccaggaacaacacactggatgctggatggaaacccagtagctcagagaaccaatgggaggcctgaggatcatgtgcaacctgaaatgtgttccatt

SEQ ID NO: 491394 - DNA, 530 bp, Homo sapiens
aaattttgcctccatcagtggagggaacgagctcacstcaacctgagtttaagagcctcatttgaaggaactccttgagggactgtggcctgcaggagagactttgggagatccaagcccagagaaagaactctttcctgctctgttgtccccccccaaaaccaaactgggccacctcaaacccgagatctctgtgccccaagacagcagtccgcaacctttttggcaccagggaccggtttcatggaagaccatttctccttggatctagggggtcgggggtggggacggtttcaggatgaaactgttcctcctcagatcaccaggcattagttagattctcatgaggagtgcacaacctagatccctcgcgtgcacagttcacggtagggtttatgctcttatgagaatctaatgccactgctgatctgacaggaggcggagttcaggcaacaggaggtggagctcaggctgcaatgctcactcaccagcagctcacctcctgctgtgcgggtcctaacaggccacag

SEQ ID NO: 491395 - DNA, 412 bp, Homo sapiens
ctgcagctcaatctcaagaccctgaagggtgcgccgcaggtcagtaacctcggacctgctcatctggagctgctccgtgtggccagcgacctcccggttcaattcttcagtctgcagagagaggaagaagagggaataagcattgagtcagaccttcgcgtagggaacacmaagccctccccttcctaacccccaaagggtgcctgcttccctctacctacccggctggtgaaccaggcttcagcatccttccggttctgctcggccatgacctcatattggcttcgcatgtcactcaggatcttggcgagatcggtgcccggagcggaatccacctccacactgacctggcctcccacttggcccctcagcgtactgatttcctgtaaagatacagcagagatgggcatgt

SEQ ID NO: 491396 - DNA, 412 bp, Homo sapiens
ctgcagctcaatctcaagaccctgaagggtgcgccgcaggtcagtaacctcggacctgctcatctggagctgctccgtgtggccagcgacctcccggttcaattcttcagtctgcagagagaggaagaagagggaataagcattgagtcagaccttcgcgtagggaacacaaagccctccccttcctaacccccaaagggtgcctgcttccctctacctacccggctggtgaaccaggcttcagcatccttccggttctgctcggccatgacctcatattggcttcgcatgtcactcaggatcttggcgagatcggtgcccggagcggaatccacctccacactgacctggcctcccacttggcccctcagcgtactgatttcctgwaaagatacagcagagatgggcatgt

SEQ ID NO: 491397 - DNA, 527 bp, Homo sapiens
gtgtgcagcaaaccaccatggcacacgtttacctatgtaacaaacctgcacatcctgcaaatatacccaggaacttaaaaggtgaaaaaaaaaaaaaaaaaaaaaaaactcaacaaatgtgccccacacagggtggatatcaacaactgataccaccagtcaaataacgtatcatatatgcctttcacttctcatctcccaaccttttcctaacttcaaccctgaaaraaccacatgcatcctagtaagtaaaaaaaaaaaaaaaaaacacaggttgggaatattggagttatggggaaggattgtctacacattaattcctacgtaggccaactcaaaagttcacatcttccacgtgatctgcccaggttaaaaacttcaaggacagcggccatgtcagaccagaaaaacaaaacaggagactcttccaaacttgaaaaatcaaattgtatcactcaatttataccaagctttgagtttgctgggattttggcaagaggaatgagggatgtgaaaagaaccaagat

SEQ ID NO: 491398 - DNA, 527 bp, Homo sapiens
gtgtgcagcaaaccaccatggcacacgtttacctatgtaacaaacctgcacatcctgcaaatatacccaggaacttaaaaggtgaaaaaaaaaaaaaaaaaaaaaaaactcaacaaatgtgccccacacagggtggatatcaacaactgataccaccagtcaaataacgtatcatatatgcctttcacttctcatctcccaaccttttcctaacttcaaccctgaaaaaaccacatgcatcctagtaagtaaaaaaaaaaaaaaaaaacacaggttgggaatattggagttatggggaaggattgtctacacattaattcctacgtaggccaactcaaaagttcacatcttccacgtgatctgcccaggttaaaaacttcaaggacagcggccatgtcagaccagaaraacaaaacaggagactcttccaaacttgaaaaatcaaattgtatcactcaatttataccaagctttgagtttgctgggattttggcaagaggaatgagggatgtgaaaagaaccaagat

SEQ ID NO: 491399 - DNA, 527 bp, Homo sapiens
gtgtgcagcaaaccaccatggcacacgtttacctatgtaacaaacctgcacatcctgcaaatatacccaggaacttaaaaggtgaaaaaaaaaaaaaaaaaaaaaaaactcaacaaatgtgccccacacagggtggatatcaacaactgataccaccagtcaaataacgtatcatatatgcctttcacttctcatctcccaaccttttcctaacttcaaccctgaaaaaaccacatgcatcctagtaagtaaaaaaaaaaaaaaaaaacacaggttgggaatattggagttatggggaaggattgtctacacattaattcctacgtaggccaactcaaaagttcacatcttccacgtgatctgcccaggttaaaaacttcaaggacagcggccatgtcagaccagaaaaacaaaacaggagactcttccaaacttgaraaatcaaattgtatcactcaatttataccaagctttgagtttgctgggattttggcaagaggaatgagggatgtgaaaagaaccaagat

SEQ ID NO: 491400 - DNA, 504 bp, Homo sapiens
tgagaatgtcaaagtggctatatctgaacttaaattaacctttcttgttgctcttctttttctctccttttccattcaattttccaccccagggttcccagcatcttcctcaagactttgatctattttgctatattgactgagttgactgctccggtagatggatagtggccctcgaaggagggtagattagagrgttggtggggggagagcttggaggcagagacaggggtgagtagacaaagcagtggggtgctgacggaaacagttttatcatgtgtcacagctcctcattataagcactgattagagcatttctgagtttttaattgcatccagggttaattcttacccagtgtgctaatgtatatgtatactgcaaggttagtgatgttaggcccacctcacattttaattcaggatagttctacctgcctctgggaattaaaatgatgatgaattccacatgcagtgagtagttctccatcctcctgctctgcacag

SEQ ID NO: 491401 - DNA, 504 bp, Homo sapiens
tgagaatgtcaaagtggctatatctgaacttaaattaacctttcttgttgctcttctttttctctccttttccattcaattttccaccccagggttcccagcatcttcctcaagactttgatctattttgctatattgactgagttgactgctccggtagatggatagtggccctcgaaggagggtagattagagagttggtggggggagagcttggaggcagagacaggggtgagtagacaaagcagtggggtgctgacggaaacagttttatcatgtgtcacagctcctcattataagcactgattagagcatttytgagtttttaattgcatccagggttaattcttacccagtgtgctaatgtatatgtatactgcaaggttagtgatgttaggcccacctcacattttaattcaggatagttctacctgcctctgggaattaaaatgatgatgaattccacatgcagtgagtagttctccatcctcctgctctgcacag

SEQ ID NO: 491402 - DNA, 599 bp, Homo sapiens
gtcaattccccaaaataactaggactccagccatcccttagaaacagattccaacctggctgctattaataagttttcatctaaagatgctgtgtattccccagtcttcttcaggtacccagaattgaagcccagctttaactagcttaaccaactacagacatttgctggctggtagaactgtgaaacagagtggatcaggttttctgtgtgtgtgtgtgtgtgtgtgtgtgtgggcgcatgtatgtgtgtgtcagtgggtggcgaaratgagattcatcccttggcactgtttctcagtattggtctcatcttcttctactgtataagggaaagcttcctgcaccatgagaagaacagtatatgacttcaggaaatacgtagataactttatgccatctagtaaccccaaggaaagagggcttcagtcccatcatgtttatatgaagtccaaggccacattcttatccctcagacagactactgtggctgaacacagacagtgattggccaggactgagccatgtgaccagtcgaggtcctttagaactgattaacaaccttgccagattagagccaagtggcaccaagagagggtt

SEQ ID NO: 491403 - DNA, 500 bp, Homo sapiens
gctacactgagattcaaagaagcagccattaacccttacaaagatccacatgacggcactatggcctttccaatattctgtctgtcaataaccatcgtgtgagtcagatttctgtattgtctttaaaatttattgggcattggcaaaggagcttttagctcttgcatacgtttaataaatacacatttactgaagccctgcaatgtgccaggsaagtatgtaaactcagctatgtctgtagtctccctcagctctaggtgccttaggaatcccccaggctttaggaaaccttggtccatgagcgcgggggaaggaatttcacttctaggaaaggcattgggaacccttgatgttgcccctgccgcgaagctctctttcacactcccggccgaaagccctcagaagatgcgaggaggaggattttggcatggacagtgatgccatagggcagttgctgtggtaacaggagtctctcatgctgttggagtagtgtctgggag

SEQ ID NO: 491404 - DNA, 500 bp, Homo sapiens
gctacactgagattcaaagaagcagccattaacccttacaaagatccacatgacggcactatggcctttccaatattctgtctgtcaataaccatcgtgtgagtcagatttctgtattgtctttaaaatttattgggcattggcaaaggagcttttagctcttgcatacgtttaataaatacacatttactgaagccctgcaatgtgccaggcaagtatgtaaactcagctatgtctgtagtctscctcagctctaggtgccttaggaatcccccaggctttaggaaaccttggtccatgagcgcgggggaaggaatttcacttctaggaaaggcattgggaacccttgatgttgcccctgccgcgaagctctctttcacactcccggccgaaagccctcagaagatgcgaggaggaggattttggcatggacagtgatgccatagggcagttgctgtggtaacaggagtctctcatgctgttggagtagtgtctgggag

SEQ ID NO: 491405 - DNA, 500 bp, Homo sapiens
gctacactgagattcaaagaagcagccattaacccttacaaagatccacatgacggcactatggcctttccaatattctgtctgtcaataaccatcgtgtgagtcagatttctgtattgtctttaaaatttattgggcattggcaaaggagcttttagctcttgcatacgtttaataaatacacatttactgaagccctgcaatgtgccaggcaagtatgtaaactcagctatgtctgtagtctccctcagctctaggtgccttaggaatcccccaggctttaggaaaccttggtccatgagcgcgggggaaggaatttcacttctaggaaaggcattgggaacccttgatgttgcccctgccgcgaagctctctttcacactccyggccgaaagccctcagaagatgcgaggaggaggattttggcatggacagtgatgccatagggcagttgctgtggtaacaggagtctctcatgctgttggagtagtgtctgggag

SEQ ID NO: 491406 - DNA, 338 bp, Homo sapiens
gctcttagtgctgggactttatgggataaatgcggtggaaaggggcacacttcccgtgcagaatgtcctttttactctcttctgctcctctgagctttgcttctgaatacacaaaacctgtatttgtgactgccaagaggccttccactgtgaggaagaatgcattgtaaatcactctttcwcagccagttaacagggagtgtctttctcacccataattatggttttgcttggagttgagaaagttgttttgggggcaataaattgtgatgtcagttatccttcactccctttgcatgtgagtcctcagtcggaaattggtattcttaacagttgaa

SEQ ID NO: 491407 - DNA, 616 bp, Homo sapiens
acttagccaataaggagccattgagggtatgtttttacaaatggcaatgtctggagctctttctgttgcaggtgctgctcctgccatccagtgagtcatggtaaactcagtagactgttcagcccctcgatgcagataaagccacatgtagaaatatggagtttatagttctcaggagaatgtaagagaaagacaggcattcctctatccatatgtgtctgtggaagttgagaggggatgtttcgtagtagggaatcctgcttttctgtaattgaatggtgtttcatggccttcctaacttgcgggacgtacgtaaaagtcctacctagtgaaatgtggcagatgctgtgatatgtatggctgaatcagcagatggagtgcatgacacctaattccactgccttgcacaagagtcraaattaggctgatgatgctgtaggcccagctctgagaaggccccagggtgttatgtgtgagaaactggccacagtatcagctttctcactctctctctcttcttttttcttaagatagagtgttttgctgtgttttccaggctaaccttgaactcctggactcaagtgaccctcctgcctcagcttcccatgtgggaagt

SEQ ID NO: 491408 - DNA, 551 bp, Homo sapiens
ccccattgggactctttagatagtgtcaagtcctgaaggccactagattactttaaaccagtcttggcaaatcagtttatttttttcattcatggtttcccatctctttaaatgaaaaaaaaaattacaccaacagatttgtttccataagcttttcttacaatacaaatctttgattctatgwaagtcctcaatgtaataaaaaacattgcctgttctattactttgttgagtgtaagactatttaggtgagccaatgtgcagacacacctgattgtattttgtgtctacatttattccttcattctttcttactatatatgagaagttcctcctctttagacaacccctctgcagtgttccttcgttatctttactctcaaagatttttctgttgctctattgagtttgtctccagtatgtcctttgcacagactctttcccttctgccttcaaaaatgtgtagttctcccttatcttacaaaaatgtaatttgattctgttacatcttatagcttcttccttctacccacagatgtcagaaatgaatg

SEQ ID NO: 491409 - DNA, 551 bp, Homo sapiens
ccccattgggactctttagatagtgtcaagtcctgaaggccactagattactttaaaccagtcttggcaaatcagtttatttttttcattcatggtttcccatctctttaaatgaaaaaaaaaattacaccaacagatttgtttccataagcttttcttacaatacaaatctttgattctatgtaagtcctcaatgtaataaaaaacattgcctgttctattactttgttgagtgtaagactatttaggtgagccaatgtgcagacacacctgattgtattttgtgtctacatttattccttcattctttcttactatatatgagaagttcctcctctttagacaacccctctgcagtgttccttcrttatctttactctcaaagatttttctgttgctctattgagtttgtctccagtatgtcctttgcacagactctttcccttctgccttcaaaaatgtgtagttctcccttatcttacaaaaatgtaatttgattctgttacatcttatagcttcttccttctacccacagatgtcagaaatgaatg

SEQ ID NO: 491410 - DNA, 551 bp, Homo sapiens
ccccattgggactctttagatagtgtcaagtcctgaaggccactagattactttaaaccagtcttggcaaatcagtttatttttttcattcatggtttcccatctctttaaatgaaaaaaaaaattacaccaacagatttgtttccataagcttttcttacaatacaaatctttgattctatgtaagtcctcaatgtaataaaaaacattgcctgttctattactttgttgagtgtaagactatttaggtgagccaatgtgcagacacacctgattgtattttgtgtctacatttattccttcattctttcttactatatatgagaagttcctcctctttagacaacccctctgcagtgttccttcgttatctttactctcaaagatttttctgttgctctattgagtttgtctccagtatgtcctttgcacagactctttcccttctgccttcaaaaatgtgtagttctcccttatcttacaaaaatrtaatttgattctgttacatcttatagcttcttccttctacccacagatgtcagaaatgaatg

SEQ ID NO: 491411 - DNA, 640 bp, Homo sapiens
caggatggtgataaattctcagagtttttggttttaatgattagaaacaagtgaggctcatttgagaagagtcaaggaaactggaagcaaggacagctccgtaagaaaagggaagataaaaccagggarttagctggagttgaatgctactttccttcaagttttgcagagagggagtggggataggaggaaggacccagcccacgacattagggaagaaggaccagaacttctgactactggcacaatcagaaatagattagtaagtttacagcttgatgctcaaactggtgctggtttactctagggttctcacagataccccgcctaggatatggaattacttccagaccccaaaagctagttgggagaaggctcctaacagactctcaagctttgctgtcactaatctggaaccttagaagggctaaatgtgcatactgcttctcaaactgaaatcctcatccacactacctgagatcttgttaaactacaaattctgattcagtagatttggagaagagctgagattctgcatttctagtagactctggaagcttttaggtaacagtgatgttgctggtttgtgactgctcctctttgcatagcaaggagtgcaggaagcaattgttattatgag

SEQ ID NO: 491412 - DNA, 631 bp, Homo sapiens
tcaatcctgtccctctcctattgatgagaggctgctggtgagtgtgcaagcaggttcattccaagagcatcaacatctaatggtgctccaggtggaagagatgaaaactcaagtatggaatgctaattctttgtttatatacatttcatacctggatgctctttctacactattgtataaggagcacagaggaaaataaagtactttcattgtgggcagagaaactacttttcaataaattagaaaataacttcatgaaacataagttagttgaaaggaagaactggcctgaacagagaattgtgacctgcatcctgcatgtaggcagtgggcttgaatgaggaaagtacctgtatgacatatcctttcattgttgctcaaattagctaacaaaaggacaattacaaacaaagacagagctatcaatgcttatttgctaaacatctatttggtattgagtatacttatttgytatcagagagcataaaaatgcttccataatccccttggaagggcagtgtttttaaatgtttagtaaatgttggcttactatccttccaagggagcttatcagaacattttaatgctgcttcagatcaactgattgaagaagggtagttgtggattccaa

SEQ ID NO: 491413 - DNA, 620 bp, Homo sapiens
attctctatgtcaagctttgatattttatttcccagtctgttcaacatttttttcctgcatatcctcagtaaggcctcaaactaaaaactgaacgcatgggatggtaatttacatgtttactgaagtgcatgggcttaaagcctgtctgtggcccatcagggcagatctttgcagggactctgcctcagtttcaagaacaatgacaccttcctttaggcagggggacagtgacatctttgacataagaagcctggcagggcccatgggtacctggtacttagctagtaattaacactgaataagtgttgctgtggttacttgcatcawgcttgcttccagacgttcacagtcaaaagagaagagtactcctagataatccttaaaccttccgtttaagtttccttttcttcccttccttatcctctatatgcaaatttacatttggcaaccagcagggagctttcagattccttatctctcacacccaccagaacctaattttgttcatggagagtaaaataaatattgcattgggggaaagatatgtgaaggaacccacgtgacagagaatggctgtcaggatatgaacatatataaagtcagacagtctgattctaaa

SEQ ID NO: 491414 - DNA, 620 bp, Homo sapiens
attctctatgtcaagctttgatattttatttcccagtctgttcaacatttttttcctgcatatcctcagtaaggcctcaaactaaaaactgaacgcatgggatggtaatttacatgtttactgaagtgcatgggcttaaagcctgtctgtggcccatcagggcagatctttgcagggactctgcctcagtttcaagaacaatgacaccttcctttaggcagggggacagtgacatctttgacataagaagcctggcagggcccatgggtacctggtacttagctagtaattaacactgaataagtgttgctgtggttacttgcatcaagcttgcttccagacgttcacagtcaaaagagaagagtactcctagataatccttaaaccttccgtttaagtttscttttcttcccttccttatcctctatatgcaaatttacatttggcaaccagcagggagctttcagattccttatctctcacacccaccagaacctaattttgttcatggagagtaaaataaatattgcattgggggaaagatatgtgaaggaacccacgtgacagagaatggctgtcaggatatgaacatatataaagtcagacagtctgattctaaa

SEQ ID NO: 491415 - DNA, 446 bp, Homo sapiens
atacagaaaaatgaacttggctgagctgaagagccacacatatgttaaacggaagctcgggtattaggaacgtcgagaaaggcaggccgaaaagttagcccccttctcctcacccctgtcctcacagcggccccttcagtggcctgactttttctgcgtgggacccagaatgtcgcttgaggatgggacccccgcagacctccacgcgctgccacgcaaacggcctcggccgagagcattcgctttccagatgagaatggcatcttcagggacccgctggtagtggggccaggtctccacagggccggtccagtccttcctacccacccgggccctgcggccaggcggggccgggaggggcggatgccggagggcgcygggggaggccgacccgcgcggggctggtccgagggcggaggcaatccgccggcgacgccgcaggtccc

SEQ ID NO: 491416 - DNA, 610 bp, Homo sapiens
gctgtctcagtcctttaccaaccatcttgctctctaaggaggcaccatggcccagtgttccccctcattctttctcccttcacargagatgggaagtggtccttcaactggccatatgtccaaaagtcctttgttcctgaatattctgggtaaaggtatcacctgtaaaaactttagtaactgagaaaaataagcaattactctaacaaagccttcaaccaaattatgaatatgcaaataactattgtgccttcaatgtctgttttatcctaaattaaaatgcacaggaaacagaatctttaaaaagttagttgcagccgggcgcagtggctcacgcctgtaatcccagcactttgggaggccaaggcaggtggatcacctgaggtcgggagttcgagaccagcctgatcaacatggagaaaccccgtctctactaaaagtacaaaattagccaggcgtggtggcacacgcctgtaatcccagttacttgggaggctgaggcaggagaatcacttgaacccgggaggcagaggttgcggtgagccgagatcgcgccattttgcactccagcctgggcaacaagagtgaaactccatctcaaaaaaaaaaa

SEQ ID NO: 491417 - DNA, 610 bp, Homo sapiens
gctgtctcagtcctttaccaaccatcttgctctctaaggaggcaccatggcccagtgttccccctcattctttctcccttcacaagagatgggaagtggtccttcaactggccatatgtccaaaagtcctttgttcctgaatattctgggtaaaggtatcacctgtaaaaactttagtaactgagaaaaataagcaattactctaacaaagccttcaaccaaattatgaatatgcaaataactattgtgccttcaatgtctgttttatcctaaattaaaatgcacaggaaacagaatctttaaaaagttagttgcagccgggcgcagtggctcacgcctgtaatcccagcactttgggaggccaaggcaggtggatcacctgaggtcgggagttygagaccagcctgatcaacatggagaaaccccgtctctactaaaagtacaaaattagccaggcgtggtggcacacgcctgtaatcccagttacttgggaggctgaggcaggagaatcacttgaacccgggaggcagaggttgcggtgagccgagatcgcgccattttgcactccagcctgggcaacaagagtgaaactccatctcaaaaaaaaaaa

SEQ ID NO: 491418 - DNA, 610 bp, Homo sapiens
gctgtctcagtcctttaccaaccatcttgctctctaaggaggcaccatggcccagtgttccccctcattctttctcccttcacaagagatgggaagtggtccttcaactggccatatgtccaaaagtcctttgttcctgaatattctgggtaaaggtatcacctgtaaaaactttagtaactgagaaaaataagcaattactctaacaaagccttcaaccaaattatgaatatgcaaataactattgtgccttcaatgtctgttttatcctaaattaaaatgcacaggaaacagaatctttaaaaagttagttgcagccgggcgcagtggctcacgcctgtaatcccagcactttgggaggccaaggcaggtggatcacctgaggtcgggagttcgagaccagcctgatcaacatggagaaaccccgtctctactaaaagtacaaaattagccaggcgtkgtggcacacgcctgtaatcccagttacttgggaggctgaggcaggagaatcacttgaacccgggaggcagaggttgcggtgagccgagatcgcgccattttgcactccagcctgggcaacaagagtgaaactccatctcaaaaaaaaaaa

SEQ ID NO: 491419 - DNA, 674 bp, Homo sapiens
ggggagttaacatatttatcattgctagtggttcttttcttctgaccttatctctttagtattagaaaatcaactgaacaggagtgggtaaagaaatataaagtgcatagtttaggagataaaaagtaaatggcttctggttctggcagtgaaagtgtcaaagccatagcacccccggactctccagaggaccagtgttgtttacagtatatgtttaaaataatattcctgcttagctgggcctccccttgggacaatgtaatctcaacagtaacagaggattaattaaaactggtctcactggtgaggctggcgattcgggatggagcagaggggtacaaccctcactgccccctctccacacagggaagggaccaggcctactgaaaataattagtgtggctcaagggcaggctgacacttttgtctcatttgtatgattttgattaatactttaatttcacttcctttgaatgcaggagaggtaagaaatgagtaaggaagataaagcctcccaaagccaaaatcaataaagaatgaatctcttcccagtccagtcaggcagggctaccatttttcacacctggtagggacctctggatttatgcctktgctgcggaagatgggatatagcaagagaagacacagagacatgccctggggacagagaggca

SEQ ID NO: 491420 - DNA, 674 bp, Homo sapiens
ggggagttaacatatttatcattgctagtggttcttttcttctgaccttatctctttagtattagaaaatcaactgaacaggagtgggtaaagaaatataaagtgcatagtttaggagataaaaagtaaatggcttctggttctggcagtgaaagtgtcaaagccatagcacccccggactctccagaggaccagtgttgtttacagtatatgtttaaaataatattcctgcttagctgggcctccccttgggacaatgtaatctcaacagtaacagaggattaattaaaactggtctcactggtgaggctggcgattcgggatggagcagaggggtacaaccctcactgccccctctccacacagggaagggaccaggcctactgaaaataattagtgtggctcaagggcaggctgacacttttgtctcatttgtatgattttgattaatactttaatttcacttcctttgaatgcaggagaggtaagaaatgagtaaggaagataaagcctcccaaagccaaaatcaataaagaatgaatctcttcccagtccagtcaggcagggctaccatttttcacacctggtagggacctctggatttatgcctttgctgcggaagatgggatayagcaagagaagacacagagacatgccctggggacagagaggca

SEQ ID NO: 491421 - DNA, 516 bp, Homo sapiens
aggagtgcatcccttcttcagtatttactgcgcatggcagacaaatggrtccttggagctgcctccagagaaccaagacccagacattaaagtgaattacgaaaaaagtaccccgtcattttccttgtttgcttcattcagtctccagtaaataatcagaaagcacttagcaaggacacaggccagtagtgtcaataataagacccctttgtcactgacaaagctctggaaacaaagctggagacatcgctgccaagtgaggtgagcattaggcaacctgtggagcctccgagttagcctccaatcctgccttctcctcccgctccttccttgggcaaatcgcaagcctgctctccgccagagtgtcctcatcagtaaatagggctgatagtcccctggcagtttatatacagaggtaaggtattattgattcatcaaaatgaatttttttattcacgttattttatttatttatttagccattcaaaaagcatctattgaacacctacagtgtgc

SEQ ID NO: 491422 - DNA, 516 bp, Homo sapiens
aggagtgcatcccttcttcagtatttactgcgcatggcagacaaatgggtccttggagctgcctccagagaaccaagacccagacattaaagtgaattacgaaaaaagtaccccgtcattttccttgtttgcttcattcagtctccagtaaataatcagaaagcacttagcaaggacacaggccagtagtgtcaataataagacccctttgtcactgacaaagctctggaaacaaagctggagacatcgctgccaagtgaggtgagcattaggcaacctgtggagcctccgagttagcctccaatcctgccttctcctcccgctccttccttgggcaaatcgcaagcctgctctccrccagagtgtcctcatcagtaaatagggctgatagtcccctggcagtttatatacagaggtaaggtattattgattcatcaaaatgaatttttttattcacgttattttatttatttatttagccattcaaaaagcatctattgaacacctacagtgtgc

SEQ ID NO: 491423 - DNA, 516 bp, Homo sapiens
aggagtgcatcccttcttcagtatttactgcgcatggcagacaaatgggtccttggagctgcctccagagaaccaagacccagacattaaagtgaattacgaaaaaagtaccccgtcattttccttgtttgcttcattcagtctccagtaaataatcagaaagcacttagcaaggacacaggccagtagtgtcaataataagacccctttgtcactgacaaagctctggaaacaaagctggagacatcgctgccaagtgaggtgagcattaggcaacctgtggagcctccgagttagcctccaatcctgccttctcctcccgctccttccttgggcaaatcgcaagcctgctctccgccagagtrtcctcatcagtaaatagggctgatagtcccctggcagtttatatacagaggtaaggtattattgattcatcaaaatgaatttttttattcacgttattttatttatttatttagccattcaaaaagcatctattgaacacctacagtgtgc

SEQ ID NO: 491424 - DNA, 485 bp, Homo sapiens
cctgcaattatataatttcttgtgaatttgtttcatgaactaaagaaggcaaaggctttttcagggttacaagggggataaagtccatcttacggcccttggaggaaaatcttagtcacctttcttatarttcctttttcttggctgcttttagtgctagcccctttctttgagtactttatccttcctgaactctctagacatacgtgtctccaagctcctctctaacccagatttcactctggcagccatgctaaactttgatccaatgttgtccataacttctacttatttccagagtaataataatacttcacagcataccactcaagagctcttatggtttgaccaccatctattattttacaccttagatcctcaaaaggcccatacaccaacaccttttatcccagaaaaatcaagagatccagtcatttttactattgtcaatccagaacatagcccaactcactctcatagctctg

SEQ ID NO: 491425 - DNA, 553 bp, Homo sapiens
gcaagcaataggggatagttttagttgaggaaatgaagaaaaaagtcaaattcttaagtagcaacattatgaaaaccactagggcagatagatatgcaccatcattagccattagrgaaacaaataaaaatcgtggtaagagagcacttcaaacccactaggatggctatgagaataatactaatctgatatattgatatagatggatagataagtatatatagatatatatgaaataatattttgatgagaatttggataaaattaacaccttgcttattattcggggggacataaaatggtgtgactactttggaaaatattttggcagttgctcagaaagttaaacagagagttatcatatgacccaataattttattcctaagtgtatactcaagagacttaaagatgtatgtctacacaataacttgttcaggaataattataatagcattattcgtaatagctaaaaagtggaaataatccaaatgtccatcaaatgatgattggataaacacagtgtggtctttccatataatggaatgatatttg

SEQ ID NO: 491426 - DNA, 553 bp, Homo sapiens
gcaagcaataggggatagttttagttgaggaaatgaagaaaaaagtcaaattcttaagtagcaacattatgaaaaccactagggcagatagatatgcaccatcattagccattagagaaacaaataaaaatcgtggtaagagagcacttcaaacccactaggatggctatgagaataatactaatctgatatattgatatagatggatagataagtatatatagatatatatgaaataatattttgatgagaatttggataaaattaacaccttgcytattattcggggggacataaaatggtgtgactactttggaaaatattttggcagttgctcagaaagttaaacagagagttatcatatgacccaataattttattcctaagtgtatactcaagagacttaaagatgtatgtctacacaataacttgttcaggaataattataatagcattattcgtaatagctaaaaagtggaaataatccaaatgtccatcaaatgatgattggataaacacagtgtggtctttccatataatggaatgatatttg

SEQ ID NO: 491427 - DNA, 553 bp, Homo sapiens
gcaagcaataggggatagttttagttgaggaaatgaagaaaaaagtcaaattcttaagtagcaacattatgaaaaccactagggcagatagatatgcaccatcattagccattagagaaacaaataaaaatcgtggtaagagagcacttcaaacccactaggatggctatgagaataatactaatctgatatattgatatagatggatagataagtatatatagatatatatgaaataatattttgatgagaatttggataaaattaacaccttgcttattattcgkggggacataaaatggtgtgactactttggaaaatattttggcagttgctcagaaagttaaacagagagttatcatatgacccaataattttattcctaagtgtatactcaagagacttaaagatgtatgtctacacaataacttgttcaggaataattataatagcattattcgtaatagctaaaaagtggaaataatccaaatgtccatcaaatgatgattggataaacacagtgtggtctttccatataatggaatgatatttg

SEQ ID NO: 491428 - DNA, 509 bp, Homo sapiens
ctattttattatataaatctttttatgcattttcacatgtcttctcctttaagaactcccaaaatgcatttgctcactaatggtgttccctatggcatacagagyttcttcattttatttcattcttgtttcttttttattctttctttctttctctttctttctctccttcttttctttctttgcttttgcttcttcttcttcttcttcttcttctctctctttccttctttccatccataaaaggacctctcttcaaggtcaaaaattctcttttctgcttgattaaggtttctttgtaagtgaagctctcaattatacttttaattttatttattgagttattcagttcgaaggtttctgttgcattcttttttatggcatctatatctttgctgaattttttattccaattgtgaattattttccttatttctttgttccgtccattggtgttcttgtgtatcttgcagagtttctttaagattattagtttcaattgcttttca

SEQ ID NO: 491429 - DNA, 509 bp, Homo sapiens
ctattttattatataaatctttttatgcattttcacatgtcttctcctttaagaactcccaaaatgcatttgctcactaatggtgttccctatggcatacagagcttcttcattttatttcattcttgtttcttttttattctttctttctttctctttctttctctccttcttttctttctttgcttttkcttcttcttcttcttcttcttcttctctctctttccttctttccatccataaaaggacctctcttcaaggtcaaaaattctcttttctgcttgattaaggtttctttgtaagtgaagctctcaattatacttttaattttatttattgagttattcagttcgaaggtttctgttgcattcttttttatggcatctatatctttgctgaattttttattccaattgtgaattattttccttatttctttgttccgtccattggtgttcttgtgtatcttgcagagtttctttaagattattagtttcaattgcttttca

SEQ ID NO: 491430 - DNA, 521 bp, Homo sapiens
attaaattctattaataatgctggatgtttcatatcagcacctacatttaaaggaaagaaatctaaatgttaaatgataggagcagaaattgagtccacttctattttcatattccagtccatgctactcagagaaacacttggggtggaggacggtggatggaagagtttgtgcttcccttttaggacttttacagaatttaaaagtctgactctgtacagccagactgacaatacattcagtcttgccccttttcatgaatccratcattatttgtgtgggaaaagctttcaaagcctcaattacaccaccaggtatagtgtgtccacttagaaacaagccagattccactgttcatgagatgcttctccactctggacactggagcacctactttagttccctgccagatagatttacattgtgtctgcaactcaggtattgcttttcctagacatgctcagcacaggtaggaaaattttgcccttcattgtgtcttatataaaacaacccaactgca

SEQ ID NO: 491431 - DNA, 521 bp, Homo sapiens
attaaattctattaataatgctggatgtttcatatcagcacctacatttaaaggaaagaaatctaaatgttaaatgataggagcagaaattgagtccacttctattttcatattccagtccatgctactcagagaaacacttggggtggaggacggtggatggaagagtttgtgcttcccttttaggacttttacagaatttaaaagtctgactctgtacagccagactgacaatacattcagtcttgccccttttcatgaatccaatcattatttgtgtgggaaragctttcaaagcctcaattacaccaccaggtatagtgtgtccacttagaaacaagccagattccactgttcatgagatgcttctccactctggacactggagcacctactttagttccctgccagatagatttacattgtgtctgcaactcaggtattgcttttcctagacatgctcagcacaggtaggaaaattttgcccttcattgtgtcttatataaaacaacccaactgca

SEQ ID NO: 491432 - DNA, 658 bp, Homo sapiens
tgcaccagcctagcaaggttgaaactgacygattgttcttggcaaggtctgcagcccagggtctaaaggagtcaacgggaaatgtccttctcttgccatcccccaaagtttaacatctctcttaagacttgattttgaattttgtggtgttacattttatttctctaaaatgaacattagaggctaggcacggtggctcacacctgtaatcccagcactttcagaggccaaggtggacagatggcttgaggccaggagtttgagaccagactggccaacgtggcaaaaccctgtccctacaaaaaatacaaaaattagctgggtgtggtggcacgtgcctataatcccagctacttgggaggctgaggcaggagaattgcttgagcctaggatgcaaaggttgcagtgagccaagattgcaccactgcactccagcctgggtgacagagggagactccatctcaaaaataaacaaacaaataaatacataaacaaatggaatgaacattagaatctctttcttatcagtttattcaatatagtgctcctcctgcatttagatcttgagcttacagcatattttaaatttttgctatattaataaaaaacatcttgggactaccttttacatttttcctagatgtgaaacttttcctat

SEQ ID NO: 491433 - DNA, 658 bp, Homo sapiens
tgcaccagcctagcaaggttgaaactgaccgaytgttcttggcaaggtctgcagcccagggtctaaaggagtcaacgggaaatgtccttctcttgccatcccccaaagtttaacatctctcttaagacttgattttgaattttgtggtgttacattttatttctctaaaatgaacattagaggctaggcacggtggctcacacctgtaatcccagcactttcagaggccaaggtggacagatggcttgaggccaggagtttgagaccagactggccaacgtggcaaaaccctgtccctacaaaaaatacaaaaattagctgggtgtggtggcacgtgcctataatcccagctacttgggaggctgaggcaggagaattgcttgagcctaggatgcaaaggttgcagtgagccaagattgcaccactgcactccagcctgggtgacagagggagactccatctcaaaaataaacaaacaaataaatacataaacaaatggaatgaacattagaatctctttcttatcagtttattcaatatagtgctcctcctgcatttagatcttgagcttacagcatattttaaatttttgctatattaataaaaaacatcttgggactaccttttacatttttcctagatgtgaaacttttcctat

SEQ ID NO: 491434 - DNA, 658 bp, Homo sapiens
tgcaccagcctagcaaggttgaaactgaccgattgttcttggcaaggtctgcagcccagggtctaaaggagtcaacgggaaatgtccttctcttgccatcccccaaagtttaacatctctcttaagacttgattttgaattttgtggtgttacattttatttctctaaaatgaacattagaggctaggcacggtggctcacacctgtaatcccagcactttsagaggccaaggtggacagatggcttgaggccaggagtttgagaccagactggccaacgtggcaaaaccctgtccctacaaaaaatacaaaaattagctgggtgtggtggcacgtgcctataatcccagctacttgggaggctgaggcaggagaattgcttgagcctaggatgcaaaggttgcagtgagccaagattgcaccactgcactccagcctgggtgacagagggagactccatctcaaaaataaacaaacaaataaatacataaacaaatggaatgaacattagaatctctttcttatcagtttattcaatatagtgctcctcctgcatttagatcttgagcttacagcatattttaaatttttgctatattaataaaaaacatcttgggactaccttttacatttttcctagatgtgaaacttttcctat

SEQ ID NO: 491435 - DNA, 600 bp, Homo sapiens
ctggcagcacagctagaataaagcagacagaagttggaagagcagacttgctgagtcttctggtcatcatcttgctcctttgctggatgcttcctgcccttgaacatcagactccaagttcttcagcttttggtctttgggacccacaccagtgatttgccaggggctcttgggccttcggccacagactgaaggctgcactgtcagttcctcatttttgaggtttgggactcggactggcttccaggctcctcagcttgcagacagcctattgtgggacttcatcttgtgatcgtgtcagtcaattctccttaataaagtccctttcatatagacgtctatcctattagtcctgtccctctagagaaccctgactaatacgcccattctakaacacagagggaaaaagcatactgaatataaccttaggaactagtaaaaatataagaaaaaaataacatttacattattagaggtccagaatgaaaagaaaaaaagttggtctaaaaaagcactcaaataatgattaaaatttttcccaaatggcaagagacacaaaacccacagattcaaaaaactgaatgaaccccaaagaaattc

SEQ ID NO: 491436 - DNA, 629 bp, Homo sapiens
tgggacacggctgttcccacagaaatgctccatcttcccatcgctgacagacaagcacagcgtctttctattctgcagtaggatgaagctcccttcctgtcactaaccataaatacccsaccccacctcctctccctgcccagtgacttctcttcctgttttccctctctccttccctgatctctcatccattaaactgtcccaacctagcccacaaacagctcactcttccccagcttcaaataacagccctcactgatccccaagtgtgttcagagatattcatccaatcctcctgctacaagctccatgactcagcctccccacactgtgcccagcacagagagcccaggcatcgacagatcccaggacggacagcccccagcatggacagccgccagcataaacaaaccccaccatggacagacagcggcataggcagcccccagcatggacagaccctggacatggacagcccccaccacggacagactccatcgtggacagcccccagcataaacagaccctatcatggacagcccccagcatggacaaaccctggacatggacagcccccaccacggacagactccatcgtggacttctcccagcataaacagaccctatca

SEQ ID NO: 491437 - DNA, 629 bp, Homo sapiens
tgggacacggctgttcccacagaaatgctccatcttcccatcgctgacagacaagcacagcgtctttctattctgcagtaggatgaagctcccttcctgtcactaaccataaataccccaccccacctcctctccctgcccagtgacttctcttcctgttttccctctctccttccctgatctctcatccattaaactgtcccaacctagcccacaaacagctcactcttccccagcttcaaataacagccctcactgatccccaagtgtgttcagagatattcatccratcctcctgctacaagctccatgactcagcctccccacactgtgcccagcacagagagcccaggcatcgacagatcccaggacggacagcccccagcatggacagccgccagcataaacaaaccccaccatggacagacagcggcataggcagcccccagcatggacagaccctggacatggacagcccccaccacggacagactccatcgtggacagcccccagcataaacagaccctatcatggacagcccccagcatggacaaaccctggacatggacagcccccaccacggacagactccatcgtggacttctcccagcataaacagaccctatca

SEQ ID NO: 491438 - DNA, 629 bp, Homo sapiens
tgggacacggctgttcccacagaaatgctccatcttcccatcgctgacagacaagcacagcgtctttctattctgcagtaggatgaagctcccttcctgtcactaaccataaataccccaccccacctcctctccctgcccagtgacttctcttcctgttttccctctctccttccctgatctctcatccattaaactgtcccaacctagcccacaaacagctcactcttccccagcttcaaataacagccctcactgatccccaagtgtgttcagagatattcatccaatcctcctgctacaagctccatgactcagcctccccacactgtgcccagcacagagagcccaggcatsgacagatcccaggacggacagcccccagcatggacagccgccagcataaacaaaccccaccatggacagacagcggcataggcagcccccagcatggacagaccctggacatggacagcccccaccacggacagactccatcgtggacagcccccagcataaacagaccctatcatggacagcccccagcatggacaaaccctggacatggacagcccccaccacggacagactccatcgtggacttctcccagcataaacagaccctatca

SEQ ID NO: 491439 - DNA, 600 bp, Homo sapiens
catggtgagattattttccacgtgagctcccgtggaaggaactgagcactgttcctggggttccagtgccctgtgctgtgatgagtcaggggagctctccctcctgctccaagctcctgagctgccctcactgaggaccactttaccagtgttctcctgcagtgttttcctggatcctttcggcttttccgggcactgacagggataggaatgggagagagaagagagaagaaacaaaatccacaacagagccttcgtcaaattccataattacagaggctttggggatttccaaaagattattgttgggggagtaacggctgattccgagagcccaagccgaagctaattctacagaggtgttcacagcaatgtcgttggtctgrttggttcgagaaaaggcaaataaaaaaggcaacagttaatgatctcggctactaacaacatggtagcgtcgctttcccacaccctgaagctgagggacattttcttcttggggtagccaattagtagcattaatgggacaggaatcagattaatcatggcacgagccacccgctaatgcattccacccattattctcagcattcactcatcaag

SEQ ID NO: 491440 - DNA, 400 bp, Homo sapiens
ggctcaagcaattctcctgcctcagcctcccaagtagctgggattataggcacgtgccaccacacccagctaatttttgtattttttgtagrgacagggttttgccacgttggccagtctggtctcaaactcctggcctcaagccatctgtccaccttggcctctcaaagtgctgggattacaggtgtgagccaccgtgccaagcctctaatgttcattttagagaaataaaatgtaacaccacaaaattcaaaatcaagtcttaagagagatgttaaactttgggggatggcaagagaaggacatttcccgttgactcctttagaccctgggctgcagaccttgccaagaacaatcggtcagtttcaaccttgctaggctggtgcagttgtttttaaag

SEQ ID NO: 491441 - DNA, 400 bp, Homo sapiens
ggctcaagcaattctcctgcctcagcctcccaagtagctgggattataggcacgtgccaccacacccagctaatttttgtattttttgtagagacagggttttgccacgttggccagtctggtctcaaactcctggcctcaagccatctgtccaccttggcctctsaaagtgctgggattacaggtgtgagccaccgtgccaagcctctaatgttcattttagagaaataaaatgtaacaccacaaaattcaaaatcaagtcttaagagagatgttaaactttgggggatggcaagagaaggacatttcccgttgactcctttagaccctgggctgcagaccttgccaagaacaatcggtcagtttcaaccttgctaggctggtgcagttgtttttaaag

SEQ ID NO: 491442 - DNA, 400 bp, Homo sapiens
ggctcaagcaattctcctgcctcagcctcccaagtagctgggattataggcacgtgccaccacacccagctaatttttgtattttttgtagagacagggttttgccacgttggccagtctggtctcaaactcctggcctcaagccatctgtccaccttggcctctcaaagtgctgggattacaggtgtgagccaccgtgccwagcctctaatgttcattttagagaaataaaatgtaacaccacaaaattcaaaatcaagtcttaagagagatgttaaactttgggggatggcaagagaaggacatttcccgttgactcctttagaccctgggctgcagaccttgccaagaacaatcggtcagtttcaaccttgctaggctggtgcagttgtttttaaag

SEQ ID NO: 491443 - DNA, 599 bp, Homo sapiens
tggccctgaaggatcttgtgagctggttaagcttacgtttcatatgtacaaaacaagggacttacattctggtcagggcagatcaagcttatgtattgtgtaatataatacagtaactaatcaagggctagatgaggtgtcttagtctrtaggttctgtaggaatattaaaaagaagagacattttaaactgtcaaagttggatgggatcatcaaatactaaagagattagagggcagcatcatcactatttagcagatttccatttaggaagatgctactaactctgtatagaagatagcagaaaaatgtaattttaacattaattgccattatgcaacaaggctcactacaactctcaatgtctactcttcttttgtatgccaaggagcattgtgcaatattggtgtttattttgttcctttgcattttgtaatttgagtcctgccaagtgcctgcaacacaggaaatataggatgaaggtcatttggtaacaaggattgttggtaaatcttgtttattctctgcctttttattcttgtgcaaatatactgtccctgtgacaagtcacatgctgttcttagctgcttcagtacacac

SEQ ID NO: 491444 - DNA, 556 bp, Homo sapiens
tataaaaagttagtaaatataaaatagcgttattcaaggctaactgaattgttaaattatctttcttttactcaaagaaacattgaaattcctttaataaaagtttttgttataaatttaaatgttgtggtaatttatttcttactatcatcttgaaatcttttttttttgccaaagaatactaactaaaaagtaggtttgcttcaaagtttgaactttgacaaatgatagtctttcacagtaagttaaaaaaaaaatagcagctaggttttgttttgattctaaaacaaatatgtctagtcataagagaagaaatgattataycccatggaactatccatatgtccttctggcacttgcaggtttagaaaaacgaatgaaacaaccaataagctaatgaataaaatgtgtaggaaatagcattgcagaatgttgacaaatgtaaatttctacagtcctgactagaaattggcacatgacagagccatcaaaattaagtgccaggagctcagtacaaaaaggcttcaagatgtttaactataggcatatttagttt

SEQ ID NO: 491445 - DNA, 556 bp, Homo sapiens
tataaaaagttagtaaatataaaatagcgttattcaaggctaactgaattgttaaattatctttcttttactcaaagaaacattgaaattcctttaataaaagtttttgttataaatttaaatgttgtggtaatttatttcttactatcatcttgaaatcttttttttttgccaaagaatactaactaaaaagtaggtttgcttcaaagtttgaactttgacaaatgatagtctttcacagtaagttaaaaaaaaaatagcagctaggttttgttttgattctaaaacaaatatgtctagtcataagagaagaaatgattatatcccatggaactatccatatgtccttctggcacttgcaggtttagaaaaacgaatgaaacaaccaataagctaatgaataaaatgtgtaggaaatagcattgcasaatgttgacaaatgtaaatttctacagtcctgactagaaattggcacatgacagagccatcaaaattaagtgccaggagctcagtacaaaaaggcttcaagatgtttaactataggcatatttagttt

SEQ ID NO: 491446 - DNA, 625 bp, Homo sapiens
cttctaattgaaaaagagtgatgggatgctatagggacaatgcaatagaggtcagggtgtttcctccctgctccctccatgctgtagtctcaaaccgttgctcctttagatctcagcatacaccattgttgtttttcttaatcctgaccacactctattaatagtctcttatttaggtctcattatttaaaccattttcaagkggatgctgtttcttgctgagactgaatttccggattatttgagttaatagtatccatatagtctaacataactatgtgacctttaaatttgttaatttctttatgtccaagcatccattggtctcatttaaaatagctatgctgttggtgattctgtagggtggcaggttggtgattctgttggtgattctgtaggtgaccagtgtttctagatttatctgaaagtgtcaccatacaagtctgtcattatcagtcatctgctcctgattcatttggtgtggtcatcaatacagaacttcaaccaatagtcagcaagttgaaacccactcttaaatgaatcatctacacctttataagagttttggaaatgatgtttcttaatgaatataaagtgaagcaaaggaagtgcctatgacaggcaa

SEQ ID NO: 491447 - DNA, 586 bp, Homo sapiens
aaagatcaaatgcttattttttgttataccacaatctacctagtcattctgtctttcttccagttatattattaatttgtcctacatatctcatcgataacattccaggtgttaactyggagagctttataacttaaatagcatttgacaggtgcaatttcagcaggaaaatagctgtttgagatgaggacatctggaaggcatctctgatggtgtggcgtatgaacaggtatccaaatgacaaaatgcagccagccatgtgcaagtcttgaggaagatgctccagcaagtccaatggcctgagagacaggggctatgattgtttttccaccattctactttccatgcctcccaagttcaggaacaagtttggttctcaagtgcacattagttgaagtgctgtttcttccttgaagatcttcgtcatttggtcagagctagtaagtaatatctgtgtgatttctacatgtgcacacactattgataggccacacagtacccatagttggtaacattcctttctttcagatgtaggctggctgtcagcatagaaaatgttagttactcagctccataacctggttcc

SEQ ID NO: 491448 - DNA, 586 bp, Homo sapiens
aaagatcaaatgcttattttttgttataccacaatctacctagtcattctgtctttcttccagttatattattaatttgtcctacatatctcatcgataacattccaggtgttaacttggagagctttataacttaaatagcatttgacaggtgcaatttcagcaggaaaatagctgtttgagatgaggacatctggaaggcatctctgatggtgtggcrtatgaacaggtatccaaatgacaaaatgcagccagccatgtgcaagtcttgaggaagatgctccagcaagtccaatggcctgagagacaggggctatgattgtttttccaccattctactttccatgcctcccaagttcaggaacaagtttggttctcaagtgcacattagttgaagtgctgtttcttccttgaagatcttcgtcatttggtcagagctagtaagtaatatctgtgtgatttctacatgtgcacacactattgataggccacacagtacccatagttggtaacattcctttctttcagatgtaggctggctgtcagcatagaaaatgttagttactcagctccataacctggttcc

SEQ ID NO: 491449 - DNA, 633 bp, Homo sapiens
cagagcactcactcccactggctgacacctttgttgtgatcttatcacgattcatctaccacagttgtccactcctgcttcctccgttttctaccagatgttgatttgaggggccatcagctataagctcctgcctgcaaaaatattccagagcctatttcaccagtaatctaactttaggtacttaatgaagccttaagtaataactaaacaatttgtaccataaaatgttattttcaagtgtctctttcctaaaccaaataagtgtatgcatagattactgtatgtaagatctaagataaccaatggactttattactatatatactctctaaaggttttcgtatgagggccaccttttcctatggcagtataaaaatgatttcatgaggaacactgataattacagataygttaaatatagaactgcataatttcacatcgagtctttagatgcttcatgtcatggttcatctttgaagtgttcggtattttaggagtttctatatatgtgaatattatgtgctgacactgtttgaaagagcatggagaaaatcttttaaggtacactatttaaaaaggaaattatgcatattttatgaagtatgatccttaaattagaaaatttaattt

SEQ ID NO: 491450 - DNA, 636 bp, Homo sapiens
ctgcagagcactcactcccactggctgacacctttgttgtgatcttatcacgattcatctaccacagttgtccactcctgcttcctccgttttctaccagatgttgatttgaggggccatcagctataagctcctgcctgcaaaaatattccagagcctatttcaccagtaatctaactttaggtacttaatgaagccttaagtaataactaaacaatttgtaccataaaatgttattttcaagtgtctctttcctaaaccaaataagtgtatgcatagattactgtatgtaagatctaagataaccaatggactttattactatatatactctctaaaggttttcgtatgagggccaccttttcctatggcagtataaaaatgatttcatgaggaacactgataattacagatatgttaaatatagaactgcataatttcacatcgagyctttagatgcttcatgtcatggttcatctttgaagtgttcggtattttaggagtttctatatatgtgaatattatgtgctgacactgtttgaaagagcatggagaaaatcttttaaggtacactatttaaaaaggaaattatgcatattttatgaagtatgatccttaaattagaaaatttaattt

SEQ ID NO: 491451 - DNA, 508 bp, Homo sapiens
ttccctgaactccagtttgggagaggtacctggcagcacagatctatgtgagatccctcctattgcaatttaatatggaaatgtagggagggaggggaaggatcagagtcagggaaaccaggaatgggtgtattgcaagagttcgggtaagagacagtgaggtccttagctgggatactggctttgagatgaagaagacgtggaagatttgagagctatttaggagggatggagtggggtgggaagagagaaagaaaacaggatgtcctagttattaatgctttacaggtgggatgatgggcagaacatggaaagatggtgtgagaaggggagagtcccacaggctgatggtggcattcctgctcctgctctgagctcacccagccctgtggcactccaacttctactaactggtggggtcacactcccagtattttccagagagaagtactgagaagcttaaagtatytgaatgggaggaggagaagcaaactacagctacttcaga

SEQ ID NO: 491452 - DNA, 593 bp, Homo sapiens
agctctcttcctgccgcgtcttttacwtagattgtttactcctcttgtgatcccagttccctgcttctccctctcctccacacttttcaataattaaattatactcagcgttcagaattcagtcaggatatcctaccttctttggtcagccccccagggttttctgaaagctgggaagaggccctcttctgcaatccccatgcactgtagacacatcccctttaggtccctatgttgtgagtgactgttttcttgtctgtctctgccactatattatgcactcttagaaggcaaggactacttctcttcattgtatacctagaacttaacccaaaaactggcatgtgcatgcacccaagttttcactgagaaaataattgcatgagtcacttgctttccaggtctttctgactactatgatggtgatgacttgtagtcacaacatgaaattggtttctgcccctgaggattgtatctctctactttgcatgacccctagatttcaatccctctttattctctcctgatccttgggttccagtaattctctgggtttcaaatataagcacagtgtgaggagctcttcattcttg

SEQ ID NO: 491453 - DNA, 593 bp, Homo sapiens
agctctcttcctgccgcgtcttttacatagattgtttactcctcttgtgatcccagttccctgcttctccctctcctccacacttttcaataattaaattatactcagckttcagaattcagtcaggatatcctaccttctttggtcagccccccagggttttctgaaagctgggaagaggccctcttctgcaatccccatgcactgtagacacatcccctttaggtccctatgttgtgagtgactgttttcttgtctgtctctgccactatattatgcactcttagaaggcaaggactacttctcttcattgtatacctagaacttaacccaaaaactggcatgtgcatgcacccaagttttcactgagaaaataattgcatgagtcacttgctttccaggtctttctgactactatgatggtgatgacttgtagtcacaacatgaaattggtttctgcccctgaggattgtatctctctactttgcatgacccctagatttcaatccctctttattctctcctgatccttgggttccagtaattctctgggtttcaaatataagcacagtgtgaggagctcttcattcttg

SEQ ID NO: 491454 - DNA, 624 bp, Homo sapiens
cagctggaaccttttatgttaatgatgaatgtactaattaaaaaggcccatagctttttgttgttttctttccttcaactttttattgactttgtgatgtctcttgataaatagagtttcttaaatttaagagcctttttgtcaggcaataaagtgctcatatttaaaatgtaaagtttgataatttttgacatatgcatacatgaaaaactatcaacaaaatcaacataattatcatgtccattaccctaaattttctttatgcccttgtaatacctcttgcttgttgttctctgctcatgatatccctaagcaattgctgatctgctttctctcactagagattagatttcrtattttagaaatatatttaaagtgacttgcagaatgtgtacttttctgttttttttttttttggcctagtttctttaatcagtagaattattttaaaattcatctatgtcatagcatgtgtaaagaggtcattctcttctacttctgcgtagtttcctattgcatggatataccacagttttgttatccattcacctgttggtggataatcagattgttttcacttttggctaatacaaacagatctgccagcattttgtataattggta

SEQ ID NO: 491455 - DNA, 644 bp, Homo sapiens
aggtatcacaggcgcatcttacattctgttggatcaaggtcactttgtttatatcagggaatttatatgcatagtctataagtatatgttttgttgttgttgttatttcattttttttgagacagagtctcgctctgtcaccaggctggagtgcagttgcaggatctcagctcactgcaacctccgtgtcctgggttcaagtgactctcctgcctcagcatcccaagtagctgggactacaggcgcatgccaccacctccagctaatttttgtatttttagtagagacggggtttcaccatgttgtccaggatgatctcaatctcttgacctcatgatccagccrtctcggcctcccaaagtgctgggattacaggcgtgagccaccacactcggccagaatatgggttttttttaaagaatatttttaaacagtttgtcaattgttcacaaattatgttttattcagttacaacattgaggcagtttatatcctgagcaggtagcaagtacttatttttgagtgagctaaactaacaattgggtgattagcttttcttacaaactgacttttttttcctactcaatgaatcacagtaaacaattcagggtaagatcctttaaaatatttctaacttacctata

SEQ ID NO: 491456 - DNA, 558 bp, Homo sapiens
gttttgttgttgttgttatttcattttttttgagacagagtctcgctctgtcaccaggctggagtgcagttgcaggatctcagctcactgcaacctccgtgtcctgggttcaagtgactctcctgcctcagcatcccaagtagctgggactacaggcgcatgccaccacctccagctaatttttgtatttttagtagagacggggtttcaccatgttgtccaggatgatctcaatctcttgacctcatgatccagccgtctcggcctcccaaagtgctgggattacaggcgtgagccaccacactcggccagaatatgggttttttttaaagaatatttttaaacagtttgtcaattgttcacaaattatgttttattcagttacaacattgaggcagtttatatcctgagcaggtagcaagtacttatttttgagtgagctaaactaacaattgggtgattagcttttcttacaaactgacttttttttcctactcartgaatcacagtaaacaattcagggtaagatcctttaaaatatttctaacttacctatac

SEQ ID NO: 491457 - DNA, 542 bp, Homo sapiens
ccataatggcctgtttgctgctatttgaaaacaccacacatgctccgttcaggaccattacacttacttcytcctccttcctcaaatgctttcataaatggctcacttaattttggtccctgctcaaatgtcactttagcaaagagatttttacaaataatccttaatttaaatagcatccttccaacttattctcaagttgcttgccctgttcattcttctgcattgaacttataaactcccagtattatatctagtagtctcatcttatccacacatttcctttccatggtttcagttaccgtcggtcaactgggggtccaaatgtaggtaagtacagtataataagatattctgagagagagagagggagagagaccacattcacattacttttattatagtatattgctatattgctattaatgttctattttattcttagtgtctgtttatctctttggtatagattgaatatttgtccccacccaaatctcacgctgaaatgtaatccccaatgttggaggtggggccaggtgaga

SEQ ID NO: 491458 - DNA, 465 bp, Homo sapiens
gctgcagccataatggcctgtttgctgctatttgaaaacaccacacatgctccgttcaggaccattacacttacttcttcctccttcctcaaatgctttcataaatggctcacttaattttggtccctgctcaaatgtcactttagcaaagagatttttacaaataatccttaatttaaatagcatccttccaacttattctcaagttgcttgccctgttcattcttctscattgaacttataaactcccagtattatatctagtagtctcatcttatccacacatttcctttccatggtttcagttaccgtcggtcaactgggggtccaaatgtaggtaagtacagtataataagatattctgagagagagagagggagagagaccacattcacattacttttattatagtatattgctatattgctattaatgttctattttattcttagtgtctgtttatct

SEQ ID NO: 491459 - DNA, 549 bp, Homo sapiens
gctgcagccataatggcctgtttgctgctatttgaaaacaccacacatgctccgttcaggaccattacacttacttcttcctccttcctcaaatgctttcataaatggctcacttaattttggtccctgctcaaatgtcactttagcaaagagatttttacaaataatccttaatttaaatagcatccttccaacttattctcaagttgcttgccctgttcattcttctgcattgaacttataaactcccagtattatatctagtagtctcatcttatccacacatttcctttccatggtttcagttaccgtcggtcaactgggggtccaaatgtaggtaagtacagtataataagatattctgagagagagagagggagagagaccacattcacattacttttattatagtatattgctatattgctattaatgttctattttattcttagtgtctgtttatctctttggtatagattgaatatttgtccccacccaaatctcacgytgaaatgtaatccccaatgttggaggtggggccaggtgaga

SEQ ID NO: 491460 - DNA, 648 bp, Homo sapiens
ctgcattgataaaggccatctttgctcagtctaccaatgcaaattctactgtcttctggaaacattcttacagagacacagaaataatgttttataagatatttgggcatcccttagcccagtcaatttggtacataaaattaaccatcacatattgtatacaatttatttatgtgtctttatccatttttttaattttttcaattataagttcgacaagatataaattctcattggttttgtagcttaatatatcccaaatgcctaaatgcacccagcttatagtaaatactgaacatatatttgttgaattaatgataaattcaattatattttgggggaaaagattctgagtaaatttaccaagaaacattcattaaagaaggcctattaaaatataaaarttatataataaagcttaaagaaaatgaagttataccatatgattaaatagtaaaattaaatactatgaaaatgctaatttccccaaattagtatataggtttaaataatgtctaataaaaaccaaagattatatttttgacaatattatttaaaaattcaacagaaaaaaatcatttttaaatgttatagtccacagtttcttatttgtcctttatctgtactcatattctaaacctgtattct

SEQ ID NO: 491461 - DNA, 640 bp, Homo sapiens
tttgtgcacagcacactatggactgtctggcaggcaactgctatattttgtctattataaccagtgacccttctaagcattcagtcatcacaatttatagttatacagtgattacagtcacacagtttcttgctgagaggtcatccttgtttctggcacccaaagttgcatccctagttctatgacctctgcataacattaaaaaaaaatgaaagttgaagtgatctgaggaagattcacagtcataccaatattctcacccatctttacttcctaacattctctagaaaagccaagtaatctatcaagggggaggaatctacacttcctggcccctgtagtttgactgctgattgtaagaacaatmaaaaatgagatcttgatgcccttcccaaggtaatgagtgagttctcactatattagttcacatgagagttggtcatttataagaagcctggcacctttctctttccttctcttttttcatctcttgccatgtcatacgctcactccctttccccattgcaccacgattggaagcttcttgaagtcctcaccagaagcacgtgctggtaccatgattcttgtatgacctgaagaaccatgagccaaataaacctcaattatttacaaattaccc

SEQ ID NO: 491462 - DNA, 590 bp, Homo sapiens
gcacactgtatgagaatctctcctgagagcagatgttgggaaagagaaggaataggggccgtgctgttaggagcaagagattgaatggaartgatgtgaggggttcaaaaaggagccccgtgaggcggaaggaccagtgggaacccaggggttgctaggagaccttcctagatgagctctcatccaagatatgaaagttaatcctggaagagttagccctgaacgctggaggggccatcagaaatgcactgtcgccatgcacaggcactgggctaaacccacacaggcattgtgccttaatttactccatcgccataggaggtgggatgttgctgtaatctcattccacagatgagtatactgaggcccagggagaggaagtcatttgtgcagcatcccacagtgagtgagtgtcagagctgggattccaacccgttccgcctcactctaacctcttcctatggggcaaagtgagcaggaggtttggccgccgctgtgagggtgcaactcataggcgcggggggcggctcagcctccaggcctcccagcacatggtacgtacctcctggggaaagaccgaacacatggcc

SEQ ID NO: 491463 - DNA, 590 bp, Homo sapiens
gcacactgtatgagaatctctcctgagagcagatgttgggaaagagaaggaataggggccgtgctgttaggagcaagagattgaatggaaatgatgtgaggggttcaaaaaggagccccgtgaggmggaaggaccagtgggaacccaggggttgctaggagaccttcctagatgagctctcatccaagatatgaaagttaatcctggaagagttagccctgaacgctggaggggccatcagaaatgcactgtcgccatgcacaggcactgggctaaacccacacaggcattgtgccttaatttactccatcgccataggaggtgggatgttgctgtaatctcattccacagatgagtatactgaggcccagggagaggaagtcatttgtgcagcatcccacagtgagtgagtgtcagagctgggattccaacccgttccgcctcactctaacctcttcctatggggcaaagtgagcaggaggtttggccgccgctgtgagggtgcaactcataggcgcggggggcggctcagcctccaggcctcccagcacatggtacgtacctcctggggaaagaccgaacacatggcc

SEQ ID NO: 491464 - DNA, 590 bp, Homo sapiens
gcacactgtatgagaatctctcctgagagcagatgttgggaaagagaaggaataggggccgtgctgttaggagcaagagattgaatggaaatgatgtgaggggttcaaaaaggagccccgtgaggcggaaggaccagtgggaacccaggggttgctaggagaccttcctagrtgagctctcatccaagatatgaaagttaatcctggaagagttagccctgaacgctggaggggccatcagaaatgcactgtcgccatgcacaggcactgggctaaacccacacaggcattgtgccttaatttactccatcgccataggaggtgggatgttgctgtaatctcattccacagatgagtatactgaggcccagggagaggaagtcatttgtgcagcatcccacagtgagtgagtgtcagagctgggattccaacccgttccgcctcactctaacctcttcctatggggcaaagtgagcaggaggtttggccgccgctgtgagggtgcaactcataggcgcggggggcggctcagcctccaggcctcccagcacatggtacgtacctcctggggaaagaccgaacacatggcc

SEQ ID NO: 491465 - DNA, 430 bp, Homo sapiens
gggcctgaaacagcacagatgtattcccgccgttccggaggcgaagtccaaactccaggtgtcagcagggccgccctccctctggggctctaggaaaggggctttcccaggcctcttccagtgtcttatcttgtggctccaggagtcctttggcttgtggctgcatcactccaatcttggcctctgtgtctgtgtctcctcctcttgtctcgtataagaacacttgtcactgaacttcaggccaacccaaatccaacggcaggaggacctcatcttgacatccttaacttaatcgtgtctgcaaacacscttattctaaataaggtcacattctgaagttccaggtgaacatatctttttggagggggccaccattctacccacgacatccctgctgccgaggttctcatttggcagggatctggaatcg

SEQ ID NO: 491466 - DNA, 627 bp, Homo sapiens
gataaacggcattttaaagaaactacagctaataattccccaaaatagaaacagaactggctgttaattcaggccaccgagagaggaatgagcagcattttagaggtgtagagaaacctttgcatttatacattatttctccaaactagctctctgtgtctctctccttctctctcccacccacacacattttagcgagtgttatgagatgaaaccaacgttctcaggtgctggaatgtcattaaatactccasagtagtcattaactaaatggtacctgatcattttggaagagttcatggaacttctaaaacaatacctggtttgctttcttagagtagtttttgaattggttgaatcaggctgaacacttctagaaaactctaagctctaggggtgatgacctctttaaaggcaaaggagatactgaccctatcttctgtgatagagtcattgggggtcttaaatgatgatctggaatgttctggaacagatgggttgcctctcctctttgatgagccacatggggtgttttctgcggaaaaagtcctgtcccgattccccttggaggatctcctgggctcactgccattccctgggcaacctctaaacgagaggtcccctctc

SEQ ID NO: 491467 - DNA, 631 bp, Homo sapiens
ctgctaccatgtgcgcttaccaaaaagcttgtccacaaaagaacagatgtcgcctctccaagcagaggcgtccttgcctgcccaggtctccacagggggctgtcctcatgagacccatgccaggaagcccctgtccttaagaactgcccatgccaagcccagacccctcacctgtgaagccgctggcctggcttgggcccacagcactgaccagagccagcagtgccagccccgaggtcctgagcatcgtccggcagtggtggcagtacagggctctgggcctctaccaagaagcctgggtctctgctacgccagggctcataggggcctgagctgcctggacctggagaaacggcctttctgtcccctgtgctgctgcaggtggcaatgacttcagaggaagcaccgctgggagcagtcccttatgcctgctcgttaacacccaccattgccatggccgtttccctgggggctcctgcgtgtcacagcctattctgctccaagcagatggcatcttttaggaaaggtgagtacccaaaagcccagaccgcatcgctggatcccatctcgttgttacgcagaaaacacatttgagactcawatctgagtctctccatcaacacggagtatt

SEQ ID NO: 491468 - DNA, 635 bp, Homo sapiens
atgccctcagggcttgcaccacgcccccagtttctctcttctaagacccagactctgagctgggcatattctgagttcctcctccccacgataggtccacagctactcagctcagaagcaggaccacagagcaagggaaaccaggcccaaggtcccctctaarcaagcactgctcacctgcccacgggtctgacccagcattacacacagcatcaggcccttgtctcatatttgtacctgacttccactccattcattcaaaacatgttgtctgcacgtcctgggctctgcagtagggggtgacagttcactgaaggctccttggtccccaggaggcagggtcaactctgcctgggtctccagggctcagcctgaacttcagcctgaatctgccaccaccccgccctggacatgccaacaggtgagcaccccacttctgccccctccccgccaggtctctttgcagaggcccaggccccgttcagcttccccactggtccctggtgtccatctccatgcccagagctcctcattctcttcctgactctcgtttctctgcacggctctcttgtctcctacccacaccttcatagatgatgagtaagtgggtctttccttaggttcccgcaaacatg

SEQ ID NO: 491469 - DNA, 582 bp, Homo sapiens
tgaaaggtgctgacatgagtgccttctctgccttcctagaaaggagctgcaggggcaccacagttcctgatgaggcaccccagcactctcaactcttggagcctgtggctagcgccttgcttcacatactatctaaggacgtgcacaagagtgggggaagctgcacccaggtcctgcccccgatcgtgctgggcatcagttcaaatcctggaggagggtgtctagcagccccggtggggttgaaggcagccaccctgggcctccacagccccgtgactatgtgatatggtttggctctgtgtccccacccaaatctcatcttgtagctcccataattcccacatgttgtggaagcaacccagtgggagatgattgaatcatgggggcatgtctttcctgtgctgttctcctgatagtgaatgagtctcacaagatctgatggttttattttattgtattgagacagagtctcactctgtygcccaggctggagtgaagtggcactatctcagctcactccaacctccacctcccaggtccaagtgattcttgtgcctcagcctccccagtagttgggattac

SEQ ID NO: 491470 - DNA, 607 bp, Homo sapiens
ttctgagtccacatgttgtcccctcacacggcagaacgaacccctaacaggacgacatgtagggaagcgagggagccagtgaaggcaccagcgggccggtgcaatgccgggcaggcagtgrgatgactgggaggggagggaggaagtgcagggcggtcagtgacttctggtgccctggttataggaagaagaaagcgacatgctagggccacagacctgggatagaaagacaagctcgcaagctaacgtgggtctctgactgggggccttactggttttgatggtcagcgtggtggagacgtcggccccgcacccctggtagctggtcttcaccctgtacagcactccagcctccagcccagccactgccagtgcctggctctgtgtcctggcgctcctgagcaactccataccccggtaaacccggacatggaaagtgtggttctgtgtagaatttaaacgccaggatacttgaaaactgtcactggtgacgttgaggaccacgtagtcactgactggaggacaatctatgaaagcacagacagagaagatgagcaaagggtcagtgagggcggctttctcttctgaagcaggtaacagagcctca

SEQ ID NO: 491471 - DNA, 607 bp, Homo sapiens
ttctgagtccacatgttgtcccctcacacggcagaacgaacccctaacaggacgacatgtagggaagcgagggagccagtgaaggcaccagcgggccggtgcaatgccgggcaggcagtgagatgactgggaggggagggaggaagtgcagggcggtcagtgacttctggtgccctggttataggaagaagaamgcgacatgctagggccacagacctgggatagaaagacaagctcgcaagctaacgtgggtctctgactgggggccttactggttttgatggtcagcgtggtggagacgtcggccccgcacccctggtagctggtcttcaccctgtacagcactccagcctccagcccagccactgccagtgcctggctctgtgtcctggcgctcctgagcaactccataccccggtaaacccggacatggaaagtgtggttctgtgtagaatttaaacgccaggatacttgaaaactgtcactggtgacgttgaggaccacgtagtcactgactggaggacaatctatgaaagcacagacagagaagatgagcaaagggtcagtgagggcggctttctcttctgaagcaggtaacagagcctca

SEQ ID NO: 491472 - DNA, 430 bp, Homo sapiens
catccccagccttttccacctggccagtgccaacctctggcctctgctctttccttggggcamcctcttcctttcaaccctctacccagtctgagcctgctcacccctcctggtatccttcccatgtctcatgctctgcctcttctcatttgcagtggtgaccccccctcaattcccactgcccccctgcattgaccaaagtcaagtggcctacagcccctgtccctacctccttttcatatgctttcctgaatagtgagtctggaaacctgaaatcatagtcccagactcccttgcagctcggttctagatgtgaacttggctctgaccattagattcactgacatgtgtgaccagaatgctttctggtgggaaagtgtgggagaagctcctccctgctgcaaaggcacgtgtccctacagcagtgtca

SEQ ID NO: 491473 - DNA, 271 bp, Homo sapiens
ctccccagataaggcaaaaaaawttttttttaaatcagacccaattaaaccacactgtcttaagacttaattcattaacctagatggaataccctttcctcttcgtggccatgagccacggatactgtgatggttagtactgagtgtcaacttgactgaaggatgaaaagtattgttcctgggtgtgtgtgtaggtggtgctgccaaaggaaaataatattggagtcagtggactgggcagacccaccctcaatctgggtgggcaccatct

SEQ ID NO: 491474 - DNA, 651 bp, Homo sapiens
catttaggtgttacttcattgaggtttctttgcgaatatcagccttcttgggcagagaaatatttcctgaccagtctgaatgcaatagcaagctcataccatctttattctctttctctgttccgtatttcttcttagtgtcttctcttttttattccactaaaattctcagccagagccttttgtgtttgattagggaactggctgaggtgcccagctttgggggacaccagatgactggaggccacatggaattggcaatccactggtcccccatcaatgtacatcaggtgctggtgctggtagacaccagcgtagattgcagccttgtttatgggaacccagataagtttccaggcaaggctgcattcatttacagttatggagtccagtcagtgaaagtgaaacctatatctttsaaccttgacactggccacttggttccccatttatacactgtgtatatctctcccatacctgaatacatgctggggttggatgttttacacagcttgacagctgtgctgtttatcacagatttgatggaccacttgacaatggaattgggacaataccactatgtggtggacttggctaacgcattcttctcaatttacattgctgtagagagccaggaacagtttgtctgca

SEQ ID NO: 491475 - DNA, 651 bp, Homo sapiens
catttaggtgttacttcattgaggtttctttgcgaatatcagccttcttgggcagagaaatatttcctgaccagtctgaatgcaatagcaagctcataccatctttattctctttctctgttccgtatttcttcttagtgtcttctcttttttattccactaaaattctcagccagagccttttgtgtttgattagggaactggctgaggtgcccagctttgggggacaccagatgactggaggccacatggaattggcaatccactggtcccccatcaatgtacatcaggtgctggtgctggtagacaccagcgtagattgcagccttgtttatgggaacccagataagtttccaggcaaggctgcattcatttacagttatggagtccagtcagtgaaagtgaaacctatatctttcaaccttgacactggccacttggttccccatttatacactgtgtatatctctcccatacctgaatacatgctggggttggatgttttacacagcttgrcagctgtgctgtttatcacagatttgatggaccacttgacaatggaattgggacaataccactatgtggtggacttggctaacgcattcttctcaatttacattgctgtagagagccaggaacagtttgtctgca

SEQ ID NO: 491476 - DNA, 633 bp, Homo sapiens
ttaaatttaacgcgtgagtagtagatatgctcataggtattggggtgttgtttctttaggacctctcaatggacagaaccggagagtgtgacatttacacctatttatgtatctttattcgccatcttatctatctaaatgttacaagtccacaagaatatctccaattccaaatcaaagcacaagtgtttattctagtttccctcttttccatattgtaactttcttctcccacagtgaaggaactggtccccttatcctcaccatatttccctttttatcactgtcacatagatttccacctcagacacctcattctgggccaatgcctccagcccctctacacakatgtgcttcttatctttttctggctcgacatttctgcttgtggtcatcacatccaacttgtatgaatgaccttcttaccttttccaggatctgcacccagtaaagagctgccattgctctcctttctcccccaaccaatgctactatgtagatgtctgctttgctcaatttcaaggaatattttctgaacagaatattttagaaaggcagaaaggaagtcaataatagaaaaagaaaggaaataagagggaaagaaaggcaggcaagaagacaggaaggaaagaa

SEQ ID NO: 491477 - DNA, 633 bp, Homo sapiens
ttaaatttaacgcgtgagtagtagatatgctcataggtattggggtgttgtttctttaggacctctcaatggacagaaccggagagtgtgacatttacacctatttatgtatctttattcgccatcttatctatctaaatgttacaagtccacaagaatatctccaattccaaatcaaagcacaagtgtttattctagtttccctcttttccatattgtaactttcttctcccacagtgaaggaactggtccccttatcctcaccatatttccctttttatcactgtcacatagatttccacctcagacacctcattctgggccaatgcctccagcccctctacacagawgtgcttcttatctttttctggctcgacatttctgcttgtggtcatcacatccaacttgtatgaatgaccttcttaccttttccaggatctgcacccagtaaagagctgccattgctctcctttctcccccaaccaatgctactatgtagatgtctgctttgctcaatttcaaggaatattttctgaacagaatattttagaaaggcagaaaggaagtcaataatagaaaaagaaaggaaataagagggaaagaaaggcaggcaagaagacaggaaggaaagaa

SEQ ID NO: 491478 - DNA, 331 bp, Homo sapiens
gagctttatcaaagtcattgccacctgctctgaaasgttgtgctaagaaggaaatacaggccaggcacagtgactcacacctgtaatctcagcacttcaggaggctgaggcgggcagatcacatggtcaagagatcgagatcatcctggccaacatggtgaaactctgtctcaaaaaaataaataaataaataaaataacctccatcttttggtggcccctttactggccttatttcactcaattgttaggacaccttgtctctgtgagatggggcctgcaaggcccattcaccagataaaaaatcttggaccccacaggacttgggcttc

SEQ ID NO: 491479 - DNA, 628 bp, Homo sapiens
gctgtgtccccaaagcctggcactgcagtacttaagaaacccgcggagaatgaatgaatggatccagaggctctgtgatgcagaaatctagctacaagccaccgggcctcccaagcccaagcccatacttggcccatccttcatacagggctcagagaggccaagggaactgcctgaggccacacaggaagcaagaccaggctttgaagccccaagagtaacatgagggcaggaacctgtaaggcagagagtcctggaactgtgagccattggtcactgggtttttttcttttgagacaggatcttgctccattgcccaggctggagtgcagtggtgtgatcatggcttactgcagccacgacctccctggctcaagtgatcctcccaccttagcctcccaagtagcaggtcaytgggcttttctccatggtgatagatgtagttagcatttcaggaccaaaaaccttctgtatgtcagcactgaagacctccaggcctagatcctgcagtctgtagcccactttgcccccatacctccccaccctaaccatagcagcttcacattgccccaccccgatcccctctctgtccagccctgggctggggtgtgtctgggtccaggtcctg

SEQ ID NO: 491480 - DNA, 594 bp, Homo sapiens
atcagttcaataaatgaagccagccatctagcagtatttccataatcttaatcagaaaatcaaaatatagacaaatgtggagaaataataactatgtctatggctgaggacattaacaaattttggacttgacgtctccagtctgtctttgtgactggttgggatgtataatttgcataagttttcattcatccagtctcccattactgcctctaatgataacctacaaagaaagtacaacatcactaattaatggattgaaaagtagtcaggaaatagacaaggtcttattaagtgcataaggacatttgcaaaccaacctggtaggcacctgcctgctttactgatttttttttaggcacgtctttgtagtgacaattgttgccacttcctgaaaaaatccaaagtagaaaataagacagtaagtaatctgaccttaagactaagttaatttcttaatttcttaatttccagtatgtgctaaagtttttcatttttcctrctgagaaatacccaactataatgaaaaattacacattctctaaagggcttgttcttttaaaaagtaaactttgattaggttgaacttctatt

SEQ ID NO: 491481 - DNA, 418 bp, Homo sapiens
gtatggtgaggaggtacgcaaaagggctggggaggttactcaagccatcactggcttcccccggtacctgcacagatggagaaggcagttaagacagtatgtcttgggcccaagcaagagaatttcagaaatacttcttgattttggagggaaaaaagaaaggccactatgatgatcractgtcatccccaactcctcctcactatgacaacttggttaccctgctttattaaaaagtcccttacatttctccccagtgggattttatcagtattcagaagcaaatatgattacatctttgcaaggttagccttccaagaattagataaccaacctctgaaataccctcattaaattactgcaggatcccttgttataaaactcagggtagagccccaagagaggcaacaggaggaag

SEQ ID NO: 491482 - DNA, 592 bp, Homo sapiens
gggtcgctgcagagccaagtggcgtggagagctgggaggtgagaggggcaatgtggaggcgctgggacgctgctgccaggctggggggaagccgaggggcatcaagaggaagggcagttgtgggtgctggaggcccttcctgcggctagtggaggaggtagggaagaggcggcaggagccagcccaggtggagtcagtgtgtgctgatgtgcagaggcaacagagatggacgagagagggtgagggtgtacaggaaacgttaactggtggggatgacgtttctcagaaaggggaaggagaagagattttcagggtagatctcatttcagaaggctccgtctcttccatgaagtggaatgacaggggcctgttggggcttgaggtgaatggaggtcggaaccactcgggtggctgatggcgggcaggctgggtatctgacaggtggcaggaggtgacagaggggtgcctgtcagcagtgagggctggctgagggtggaggcccattctcccgggatgcctgtgaccctgcagttacagcagaggatctcggggccgggtacagrctgtgtgactccctggggccacccaacac

SEQ ID NO: 491483 - DNA, 538 bp, Homo sapiens
aaaggcaacatgatccttttgggaaagctgagaccccttcctctgtttaactcgatcccatcctttgcctctccttgcttctttctcatccccaaacaaagacccagggcatctctccacactcacaggcccctcccatcatcctttctcctcctttttctgccacaaaggtttactgagctcatatcgtgtacctagaactttgctagaccctgtggatgtaaatgcctgtcttctggagttcaggatctaggagaggaggaaagaagcaagtaagccagtcctcagtccrcaagatgatgatgctgttgccaagagtgatctggcccattaggtgacagagtgagggatctgaaggcagactcccaggctctaaactggcttggacactttctacctgtgtgagtctgggaaacttgctcaacctctctgtgcttcctgagaccttccattactttagctttgatagagatcacaacagcatccctcccaaggattaaaagaattgctatatgcccagtacttagaacactactgg

SEQ ID NO: 491484 - DNA, 624 bp, Homo sapiens
ctggtgatgaggagccgtttattacaacttcagctctggaagggaaaaaaaaagaaagagggtagacatgatgtgttagcaagccgacgacaagtctaatagttttgtttttgcacgggcttgaatgtaaacttctccagaagagcaaaattgcagttattacctgagaagagaaggaagtctatttatcttccagtaatgcagaaactctgtccctaaggtataacctacatacattgttggagacaggaaggagggtgataaacttattcttcttcccctgcccctagtgwttttttttttcctggtaaaacctggcagtcactgtcagaagagtaatatttcttattcaagctattgataagaaactctacaaggagcaggtatatgagcaacaaagtatcaaatgatggtcttacaaacttaaaagagaaaacaagaactcataccaggacaatgtcattgtagcctgtggcttcaccctcctccctggcagccccatcactctcttgagggtaattctgagatatgctccttgaaacatggaccttgttacacagtcatctgtgctgtgtctgtccctcataggagactgtacgcaagggatctcccacattcatttta

SEQ ID NO: 491485 - DNA, 624 bp, Homo sapiens
ctggtgatgaggagccgtttattacaacttcagctctggaagggaaaaaaaaagaaagagggtagacatgatgtgttagcaagccgacgacaagtctaatagttttgtttttgcacgggcttgaatgtaaacttctccagaagagcaaaattgcagttattacctgagaagagaaggaagtctatttatcttccagtaatgcagaaactctgtccctaaggtataacctacatacattgttggagacaggaaggagggtgataaacttattcttcttcccctgcccctagtgattttttttttcctggtaaaacctggcagtcactgtcagaagagtaatatttcttattcaagctattgataagaaactctacaaggagcaggtatatgagcaacaaagtatcaaatgatggkcttacaaacttaaaagagaaaacaagaactcataccaggacaatgtcattgtagcctgtggcttcaccctcctccctggcagccccatcactctcttgagggtaattctgagatatgctccttgaaacatggaccttgttacacagtcatctgtgctgtgtctgtccctcataggagactgtacgcaagggatctcccacattcatttta

SEQ ID NO: 491486 - DNA, 630 bp, Homo sapiens
gtaacttctgggacttcaaaaaataatcctgcagtgtatttagttgaatgcttcaaacttgatcctttcctattaaatgtgcaggagttgtgtcacagagaagaaaggaatgttcttctgctagtggtgccaaggcagcagtcataggttgagacatgagaaagagcttagggttgttagaaattctcaccatttcagtggttttggtattctgggggaatctgatgttctatggtagtgagattaattggagatacagtgacaaccatataaacaaaaaaactaatttttttgtacatatgtacataagcatgtgtgtgtgtacatacatatatataatttcccttggcagtttagatgaaggagagggaattgttgggttccaatgtttctctcagcttcaacaccattggacaaactttgaacagtagttttgtatcttaacaaatgtgtgacactggttttcccaataaccctcctgcctccaatatctacwggtgtccttattttataggctgttgattctcagagaaaaaaaaaacagagaactttttgtttttatttttattttgaggaccagttgtttaactgggatagccaggagttgttttcatttctagcttgtttact

SEQ ID NO: 491487 - DNA, 630 bp, Homo sapiens
gtaacttctgggacttcaaaaaataatcctgcagtgtatttagttgaatgcttcaaacttgatcctttcctattaaatgtgcaggagttgtgtcacagagaagaaaggaatgttcttctgctagtggtgccaaggcagcagtcataggttgagacatgagaaagagcttagggttgttagaaattctcaccatttcagtggttttggtattctgggggaatctgatgttctatggtagtgagattaattggagatacagtgacaaccatataaacaaaaaaactaatttttttgtacatatgtacataagcatgtgtgtgtgtacatacatatatataatttcccttggcagtttagatgaaggagagggaattgttgggttccaatgtttctctcagcttcaacaccattggacaaactttgaacagtagttttgtatcttaacaaatgtgtgacactggttttcccaataaccctcctgcctccaatatctactggtgtccttattttataggctsttgattctcagagaaaaaaaaaacagagaactttttgtttttatttttattttgaggaccagttgtttaactgggatagccaggagttgttttcatttctagcttgtttact

SEQ ID NO: 491488 - DNA, 585 bp, Homo sapiens
acatttccctgccttctttaaaatttgcagtgaccatgtgactgagttccagccaatggaagaaaagcagaagtgatgtgtgtcattttggagtgaggcttttaagaagggactgaggccccttcacrctatttttctttttgtctgccagatatggaagacaatgaggccttaaggcaggagttgccaagctttttctgaaaagaatcagatggtaaatatttgcagtgaatattacagaattgtctctgtcaatacaaacctttttaagttttattcatttttttttacaacctttaaaaaaataaaagtcattcttagctcactgaggtacaaaaccaggccatacttatttgctcacccctgcccttaaggatgtggaaccagaagaggaaggagcctaggtccttgaatcaccatgtggaggagaggcacctgccaaacttaggaaattttgctggggacagttacatgaataaaaaacaaatatttattttttttgagccattatgcacattgggacttgtaatcacaccttattctaccatgactaagctttttaggattaggttgaaggctatactt

SEQ ID NO: 491489 - DNA, 637 bp, Homo sapiens
gtggggtgggggacaaggggagggagagcattaggacaaatatgtaatccatgcaggatttaaaacccagatgatgagttgataggtgaagcaaaccaccatggcacatgtatacctgtataaaaaacctactcgttctgtacatgtatcccagaacttaaagtaaaataaaaataataatmatcatcatcacacacacaaaaaaagaaatgccatgcttcagcagtgacgactacaaatggttattgattaatatcagattgatcaattgtaatgattaccatatcatcaatatcaaatactttgcacattagcatagcaagtgtcataaatggatttttattggtgaaactagtggcttgtcttattgatgaaatgccatgatcaatcttagtaatggctctcattggtgaaataaccaagtgtaacagacatgtggcttggttaaagttttagagacactctgcccttccatgaggaggaaatagaaccttgcaaaacctgtatccttacggtcttggagacaacacctatgtcctgctctccaaggggcccgatttcagccattaattaagagaatttctcattttctgattccaagtataagggtatataattccttctgagaatatagttt

SEQ ID NO: 491490 - DNA, 637 bp, Homo sapiens
gtggggtgggggacaaggggagggagagcattaggacaaatatgtaatccatgcaggatttaaaacccagatgatgagttgataggtgaagcaaaccaccatggcacatgtatacctgtataaaaaacctactcgttctgtacatgtatcccagaacttaaagtaaaataaaaataataataatcatcatcacacacacaaaaaaagaaatgccatgcttcagcagtgackactacaaatggttattgattaatatcagattgatcaattgtaatgattaccatatcatcaatatcaaatactttgcacattagcatagcaagtgtcataaatggatttttattggtgaaactagtggcttgtcttattgatgaaatgccatgatcaatcttagtaatggctctcattggtgaaataaccaagtgtaacagacatgtggcttggttaaagttttagagacactctgcccttccatgaggaggaaatagaaccttgcaaaacctgtatccttacggtcttggagacaacacctatgtcctgctctccaaggggcccgatttcagccattaattaagagaatttctcattttctgattccaagtataagggtatataattccttctgagaatatagttt

SEQ ID NO: 491491 - DNA, 481 bp, Homo sapiens
gggctttacctgcccagtgccctgatacctgtgcctgtggcatgggcaagcacaggacctggccacaccagccttgcagggacctgccaatcagtctgcacaactgtcactcagcaggttaagagatcacacccacttcttcttgctttgtaccccagggcaggcccaaggagccctcagcccaggagactggctctggggcttccctgggggacaggagggagacctgcaggaggcctgcagcaacttacccatctggaagtccccgctgcccaggtccccactgcccagktcgtctataagcaaaaaagagatgtaatcagcaacaacaagtatttgttgagtacctactgggtgtcaggcactgttctgggcacctagtatacagtgggacagggttgagaaagctcggaatggtcggtcaccctcctcccccatgccagtgggaagaagcacagtctcaccccccacccctctgctc

SEQ ID NO: 491492 - DNA, 590 bp, Homo sapiens
aatcatcacaccttttccttaataaattctaccttaagtgattttcttgttatcattgaaacaattgtgaaatattcctacyaccactgaggcataccaaatttagaacttaaatttcagagctaaatatacaaaaaataatggcatgtgaagagactatcgtcttaaatacaataatcacacaattccttttttcacttagaatcataaaatcttaggggaaggaacatacaagttttgtttaacttcctacccaaacaacaatcctttatacagaatccttgacagatattgtgggaaccactacatgaatactcaactctcttatgttgtacttacctttaaaaagtaaatcttactgaatttttaggcagatgactgaacatagtatgcttaaggcttaaaacggagtatttaggtaggagctaatagagaaaaatattcgatttttcttttcaatttctcaaccattggtaaataatgctcaaaatctcaagcaacttcaaagacaaaagcacaccaagatcacttccaaactggagtcaatacaatcttaccaattcagtgaacttctctgacttgtataataa

SEQ ID NO: 491493 - DNA, 627 bp, Homo sapiens
tgggtttcacttttagctatactatcaatccttataattttacatsacaatgtttgttattccttaaaataaccttaaaaggcccagaaatctgaattttagtgaacaggaagtgagtaatctgtccaaaaaagtagggaagatcatggatatagcccctagtaaaaggtctggaagccacaaggaaagctgacgagtaaatgtggacaagaaaaaatgcttccattacaaatcacctcaaatgaagattacaaaaaccagaaatacacttcctggtattggtcacaaatcccttcagtagtgggctaaactgacttatagtagttgttgactagattgttcttccccaaaatattaagtcttcaaattggatcaaggcaattgacagttgaagccaaataacaatgagtacttcaaaaatagcgactaatgatagtgacctcaattgtgttctctgagcttatctacactaaaatacggtatgctatttacacaaatttgcatctttatatacttcttgatataggccaaaagtcacaaaacttccactgaattaaccagtgatttgttttgtattattttagtaactgtatgagactttttcattaatcttctaattagcacagc

SEQ ID NO: 491494 - DNA, 558 bp, Homo sapiens
agttcatgaattacttactaccagaatgagacaaagttcagcattaatcctattcctaytttttatttttatagatataagtgcttaagaaccttgttcaaataagaaggaaccagaaaacccttcgttatagcaatgtaagtgtccttagttatgtgccacatatcacacagtgatctattataaaaaattatctttaataatctggcattattaaacacaactcaaatcctctttcatttttgttgaaaacaaatagaaaccacctgacttacaaaagaatatcatctaattatatccagtcacttttacactactacaaaactatttagaggcctctccctgccttcttttttctttttttaaagtgggacttccagacctttttacaactccagattagcaagataaaggttagatgaaagatataccttcattttgtaaaatgggagaaggaagataatttattccctaacacaaatgttgccaccatacctgaaagtctccatgtgcccccaggagcaggtcttttcccagagcaaggctggggtaactgtc

SEQ ID NO: 491495 - DNA, 583 bp, Homo sapiens
aggcttaactgaataaaacccaatggcctctcctttcttccacagaatcttagcataatcagtactgctatgacacaggaatgggatctcatttctctccatttcctgttttctataaataattcgattcagaacatacagaaccactctctccccaagagtgctcacctacaaagagagtcaaacaccaggcacagcagttataatatgcatcaatcacaagatgctatttactttgctccctgctcccatacctcatactggaattcaaagcacttcaaatgcattcaaaaaaatttgcaaaacattttattaccacagagatgagactaatcattcacatagattacaatccatttccacacacacatattatgcatagaatactgcctttcaacaaaattctaaawcgggcaaaaaacaggtccccaatgtaccaatcccgagcatgtctttcagcactcaccatcttctttctgcttccagctgcccagatccagggtcttaccaaccctaatcacagccctcactatagtaaactacttcaactgcttttcagtctccacatttaaaaaaaaaaaaa

SEQ ID NO: 491496 - DNA, 583 bp, Homo sapiens
aggcttaactgaataaaacccaatggcctctcctttcttccacagaatcttagcataatcagtactgctatgacacaggaatgggatctcatttctctccatttcctgttttctataaataattcgattcagaacatacagaaccactctctccccaagagtgctcacctacaaagagagtcaaacaccaggcacagcagttataatatgcatcaatcacaagatgctatttactttgctccctgctcccatacctcatactggaattcaaagcacttcaaatgcattcaaaaaaatttgcaaaacattttattaccacagagatgagactaatcattcacatagattacaatccatttccacacacacatattatgcatagaatactgcctttcaacaaaattctaaatmgggcaaaaaacaggtccccaatgtaccaatcccgagcatgtctttcagcactcaccatcttctttctgcttccagctgcccagatccagggtcttaccaaccctaatcacagccctcactatagtaaactacttcaactgcttttcagtctccacatttaaaaaaaaaaaaa

SEQ ID NO: 491497 - DNA, 463 bp, Homo sapiens
ggcaggccttctgcctgggagtggccggccttctgcctgggagtggccatctgtgagggggtcccccatagctacctacactttggggcctcccctgctggctgcaggcccctctgtgcccacaatgaagtaggacttctgtcgagggaagtccctgagcagctccaggtccgacaccaggtctaacacgtagtcgtggccagccagctctgcccactggacaccattcttcatggccacggtccagccgcgccagccatctgccagccccctggtgatggcatgcacaggaatggaaatgagggacagagtcatcaggcactacctggggagatcctgggttataagccagaccctaaacatgaacagartggaccctatgggaccctctgggggatctgacctccccccacaacattccaggtacataagagtgtgctgggagggcatcctaggagccaac

SEQ ID NO: 491498 - DNA, 591 bp, Homo sapiens
tgggatcacaagggttatggcaggtttcattagtccatggtggtttacatttctctgtctctcccagtcgccctgcctctttccccatcttggctacccagtatagtttcttcttgtctcttttattcttagtctaagatccagtccattcctttgttcccaagtgaacttgctgtgtccagaccttactttcaaaaagcaaagctttgcactgtgtatcagatgcagcctgtcaactacttcagacctgttggcccactcccctttctccagccactgctacagtgatgggttccaccataggctttaattcatttcacacaggtacaacctggcagcaccttgctttgggtctgctccgtggaccttctacttcctactccaggtaaacccactggacactcttgtgtgcatagccaacaaatgcagaaaagttaacaatggtggggccacctttgaccaaagggagatggaagccagttgctaggtgcctttcaktttggactgctgatggagagcactgagacactttttatgatgttcctctgaaggtcccagtggcatcagttatgtggctcttatgcatggcca

SEQ ID NO: 491499 - DNA, 423 bp, Homo sapiens
ttacatgtgtgaccttggagaaggcctgaacacatacctctaaacctgtttatccaacygagaacatcaaaggcttctctgcagtgtcaatccgataaagcatgtaaagtataggacacagtcttgcaattgcagtgtaaaagatggcagcgattctagttactattcactggccttccatattccagcagagtttggactgccaccagtgtgtgcctgtattgaggctcttattgtgttgtgtctacctacatatctcgctttctctttagaacaataaacattgtcaaacgacaatgagtgagactaatgtatcttgtgaacagttacacaggacaatagaaatgaaagtgtttttatgaactgttcaaatgctagttatgttacaggggcttccagtccagcaggggaactgacatacaa

SEQ ID NO: 491500 - DNA, 423 bp, Homo sapiens
ttacatgtgtgaccttggagaaggcctgaacacatacctctaaacctgtttatccaaccgagaacatcaaaggcttctctgcagtgtcaatccgataaagcatgtaaagtataggacacagtcttgcaattgcartgtaaaagatggcagcgattctagttactattcactggccttccatattccagcagagtttggactgccaccagtgtgtgcctgtattgaggctcttattgtgttgtgtctacctacatatctcgctttctctttagaacaataaacattgtcaaacgacaatgagtgagactaatgtatcttgtgaacagttacacaggacaatagaaatgaaagtgtttttatgaactgttcaaatgctagttatgttacaggggcttccagtccagcaggggaactgacatacaa

SEQ ID NO: 491501 - DNA, 518 bp, Homo sapiens
tcagttgccaggactcttgggatgaggctttccaaagcctcatagaaacatcattgaggacaaggccaggaggtcgagaaggggacaggacacaactgacagggcagtgaagagatctgggcacacagaggcctgggaatagcaataaaatgactggtgaggcctctgcatgaccagggagagggggtgggtgagcggtgtgagacaattgatcaatgtagccgcagatacaaaaggaagggtttaacatagagagttattaatggctaacatgagattagctactaagggataaaaaacacagaaagaaataaatttgggaaagggctcctcacaaggctgagattaaatcttgctggagagtgcttgctgtaccactgggtggcaggaagcttttgctgggtgccacaagccwaagctgcaagcaaggagctctccattgaggtgctagcaaaacgtgccggggtgcagttgaactcactgggaatgtggctcgggttcctacagactcactgggc

SEQ ID NO: 491502 - DNA, 533 bp, Homo sapiens
ctggggacgtgcccagcatccaggcagggaagggtgggagagctcttggtctgctgtattatcacggaggggtgcagggggcatgcagatcactctctcatgagaacatcaacagggtcagattagctctgcagaggcttatggaggagcatggtggccagagatgggtcagtaccagagcccagggggctgaggccaggacatgcagagaggctggtggacatagcagcaactctggtttcttcttctccagtccatgttcataccctgagggctaggcatttgtaataacaaacaaacaagcaatttagaaatgggccaggcatggtggcatgtgcctatagtcccagctacttgggaggccaaggcaggaggcctgcttgaacccagaaatttgaggccagcctgggcaacacagcaagattatcttaaaaaawtttttttaatctctgagaaatgggtagggccaggaagtaaaggatggccaaatactccataagcagcaaatgcgtggctccaatgtgaacaatgat

SEQ ID NO: 491503 - DNA, 474 bp, Homo sapiens
agaattctatttgctgaaccctacacaaaggagtgttctgtagtctagttctattatagtgaatgaattctaggtaaaaatgaaatattcatgttacaaacatatccttttttatgaatactgattaacagacattttcagttaacctatccacttgcattcctgaatatatcattaagtgggcttttcataacagtatctctcacttattctactgtttattgtataaatacatactgagcatcttctattctctaacttgcatgccagacacttaaggagtcaaagtaaacacacctacattcacagagcgcacagcctgtgaaggaaggacactagtgcaggaaagactgcctcccartgtgacacatgctatccaagagttgtacttgtggctcaagggtgctcagaggagagggtatctaaaaattccaagttatcttactgccatcctgaagaggaatgccaccccca

SEQ ID NO: 491504 - DNA, 430 bp, Homo sapiens
ctttatgtctacacatgtataatcatttttccccaagtataagtctctttttcatggaggcacagcctagacctggttagccgccatctcccctcattgtatgcccaatatctattgtagtatctgctgcatagaaggcactcgatgcgtgaatggataatgactgatgatgaatcaataaatraatggacatgtcattgtaaaaaattctaaaaatctagaataacacaagctgttggcactacctagaaacacagatgtaaaacttcctaggttgtgtttcaccatgggaacatgtctttgaacaaaaatgggatcatattctattgcactctttcccttaagagatacttctccaggtcattaagtgctcttccacaatatcagtatatggcagaggcaaggtcataccaggtctgtctgaaaccag

SEQ ID NO: 491505 - DNA, 433 bp, Homo sapiens
aagtagttttttaaggttatttttgcactaaattacttatagaaagttaggaaataattatgttacatgaagtgttctgtatctaaaaggaatggaaagatcctagaaatacacttctctttccaagccaattggagagtttataattgccaagaaacttctaacaattggagctaagatagctytactaaccgcctcataacctctcctacctaatgggatgctataatgaaagcaagtcccagatcaaaatctgccacacagatgtatgtgtttttagcaagcaggcacaaaaatagttgtagaacttgttcttgtaagcttggtgaaatttcagctctctatcctataggtactctgacaaatgcttgcatgaaagatctgctggaggcagtttcagccatattctaatgtcagagttcagccagccttc

SEQ ID NO: 491506 - DNA, 433 bp, Homo sapiens
aagtagttttttaaggttatttttgcactaaattacttatagaaagttaggaaataattatgttacatgaagtgttctgtatctaaaaggaatggaaagatcctagaaatacacttctctttccaagccaattggagagtttataattgccaagaaacttctaacaattggagctaagatagctctastaaccgcctcataacctctcctacctaatgggatgctataatgaaagcaagtcccagatcaaaatctgccacacagatgtatgtgtttttagcaagcaggcacaaaaatagttgtagaacttgttcttgtaagcttggtgaaatttcagctctctatcctataggtactctgacaaatgcttgcatgaaagatctgctggaggcagtttcagccatattctaatgtcagagttcagccagccttc

SEQ ID NO: 491507 - DNA, 499 bp, Homo sapiens
cagcagggacaggccccagagcaggacacacacgaccgctgacaggtgtgtggggcggcggccggtaccagatgggccacagaacagacaggcagcgctcggtgctgatggcgctcagcatactcaggcctgtaaagtagggaaaggtcatcacagaaacgaggattttgcggatgagatggctgatattgatgaggcgtaatggcgaacgtataatctggaagctgaggaagaggaagtctgctgcggccaggttgaggatgtagatggagacagcgttcctgcgcatgcggyagcccaggagccagagcacaaccgcgtttcctgtcagtccgacaagggaaatgatgcacgtcagcaccgtgaagctcagggtctgcttgtagcaaggagtctcctcacgtccgttgattggtgtcagttttgtacccaagactgggacggttggatccatgctcagaaaccctagtctggtgcccctgggaacacaaaccagatg

SEQ ID NO: 491508 - DNA, 462 bp, Homo sapiens
gctgaaccctacacaaaggagtgttctgtagtctagttctattatagtgaatgaattctaggtaaaaatgaaatattcatgttacaaacatatccttttttatgaatactgattaacagacattttcagttaacctatccacttgcattcctgaatatatcattaagtgggcttttcataacagtatctctcacttattctactgtttattgtataaatacatacwgagcatcttctattctctaacttgcatgccagacacttaggagtcaaagtaaacacacctacattcacagagctcacagcctgtgaaggaaggacactagtgcaggaaagactgcctcccaatgtgacgtatactatccaagagttgtacttgtggctcaagggtgctcagaggagagggtatctaaaaattccaagttatcttgctgccatcctgaagaggaatgccacccccaa

SEQ ID NO: 491509 - DNA, 623 bp, Homo sapiens
tttccatttcatgctaactcgaattattagggacttaaattaattttgactagaaaaagcatcttcttctacagttgaaatactaccacagatgaaggattctttgaagcagcgtcttgaaataatttagggaaaacgtacaaggwgagcaacccattgctatttcctctcatctccaatttccacagttaacttctcagcagaaaggcttgtgtatagtagaaatccacagacaagcataaattagtacaccccaccttgagaacaggttgagaaatttaaaaactggcacatggaatgaccattgttaagctatttcttgcaagcctaaactacagatgcaccttttaaaatatgagatgtttgagcacttgacagatgattatcttggtctacttgagagaagttccacaggcataaaatcagttgtctttatttcttcctgtctctcacccaggccttttttttttcttcctgctaagaacaggaaattgcagaaataaagatttgatcagtcgccattaattcagtaagctttgtttagtttaacctaagctaacagcacatttataatttgcccaaataaatcacacaaattatcagaataggctagttttgtatat

SEQ ID NO: 491510 - DNA, 623 bp, Homo sapiens
tttccatttcatgctaactcgaattattagggacttaaattaattttgactagaaaaagcatcttcttctacagttgaaatactaccacagatgaaggattctttgaagcagcgtcttgaaataatttagggaaaacgtacaaggtgagcaacccattgctatttcctctcatctccaatttccacagttaacttctcagcagaaaggcttgtgtatagtagaaatccacagacaagcataaattagtacaccccaccttgagaacaggttgagaaatttaaaaactggcacatggaatgaccaytgttaagctatttcttgcaagcctaaactacagatgcaccttttaaaatatgagatgtttgagcacttgacagatgattatcttggtctacttgagagaagttccacaggcataaaatcagttgtctttatttcttcctgtctctcacccaggccttttttttttcttcctgctaagaacaggaaattgcagaaataaagatttgatcagtcgccattaattcagtaagctttgtttagtttaacctaagctaacagcacatttataatttgcccaaataaatcacacaaattatcagaataggctagttttgtatat

SEQ ID NO: 491511 - DNA, 405 bp, Homo sapiens
aaacccttcctctagattaggcctcctgtttctgagcggggagaccttggacttaatcacatagctaggaagaaggcagcatggtttgcatccagatgggcttgagttcaaattcagtgctcttttaaaaaatggctcttctgctgctgaagtaacaggcctgttaaacagcaatcttcaaacttaaataatgggtctctattggaacckgggtttgtagatacacaaccaaacaggctggcagcttcaaccttagtgtaatctgcaaaggttatgagaaacacctagccactcttcctttctaaaatttcacagtggaagattaatgtatgctatgcatcaaaggtagtgtttttgtcttctacaatttaggaatgtcaactaagttaggtgatgtcttctgac

SEQ ID NO: 491512 - DNA, 503 bp, Homo sapiens
ccactgcaagtttctgtctcctgaactgacctgagtgtaggaatagtgctcagctctgttcagttctgtgaaacaaacttcacagcagaacatgtcatgaatgttgtttcggcctttcttcatccatctcctcctttcaaatggggaaactgaaacatcatcatgttgtttggcctagaattgtttccattccctacttacccttctttctctcctccctgccttcacccctgtcccacgtccccactggagatcagtctgccactgagagaggacagaggagggacggtctccactggagcacccctgtgaccctgggtgcctgagagacggtccagagaccagaccaacagcagccccatggctcactgccccacctgcaggaaggcttgcttgattaaaatccaccttcattgccctaaaaaatcatcwgcctgcccaaacaccatacttctctgagctttacttttctcacacttaacttacaaaggtctaggatgatc

SEQ ID NO: 491513 - DNA, 603 bp, Homo sapiens
tcccttcattgttggaccagagtttgttgagatctcaaagatatagggaagagtctttggaagcactgatatttaagtttgaatagaacagacgtttatcatgactggttttcctaaagcagtctcctcatggtgtggattaatgacattagttcctaggaggaggtccagggtgagtggggcttgatgcctctgtatttgattacattacattgatgtccaaatgcttcctgcctccatcatctgtctccttcctgtgacatcggagggaaaacaagggagaggatgttctaagctgtgagctcagttagcagggacaatttcttaatctgttcactctgcatatggtttattgaagctggatttctggactcatgactttgtcaggtcagtatcataaattattagatatagactttaatttgctattgaggtaccgaggatacatatgctgtttttgagagatgaaaacagtaattgtgctggaaaaatagaaagctaaaaaaaakaaagaaagaaagaaagaaagaaagaaaccttgagctacataaaagtaaggagctcttttagcctttgccaccttctcaaacacactgactctat

SEQ ID NO: 491514 - DNA, 619 bp, Homo sapiens
cctgtaacaaccttagtcgttgttcattgttgaatctttccactgcagcccagaaccaccgaattacaatatgattgtcatggtatcctatcaaaccaatcataaaagcccaygttactttgactcttctatattaagccaccaagatacgtgacacgaagagtccccagacataaatcatcctcttgaattctttacaagttgtctataattttaagactaaggaataacactgtatatatgatcatatgaatgtcaaaagttaaacaaaaacaacattaagtgaaaccaagaggtctctgttttcatttaacggtcactaagtgaaactagtaaagagaagaacaacaaatgagttattttaaccatatcatttctgtaaaatacaacagttgttactggaaatacttaactctttcggtcattcacataagaaataattttcaaatacctctatgccaagcactgtaccaaggttgggggcataatggcaaagaaaacagaccctcccagggcttctggcagaggggagacacattaatcaaataatttatacaaacaaatacataactgcaagctctcttaaaagctatatataatattcatactttaaaatcaa

SEQ ID NO: 491515 - DNA, 671 bp, Homo sapiens
gagatgggactcaactgctccccaagagtctagaacttttcactatcttctcagcttcaactatttcctcctccaacccccattccctggacttcttggccacctgctgtttaaattacactgcattaaatttcttctgtccattgtttggggaacatcttcctggcaaattaataacactaaaaaaattctgtggcccttaactaaagaaaagtaaattcctatattgttaaaggaaaaaaaactttatgttccacagcaattaattcttgaaaaagaatgactcatctaaaaagcttaggttgataataatgagaagccacaaataaagattctagagactagaaaagatgtttggctttaaataacaaatgtatatgttctgctttagtaaacatcaatgcttgkgctgactaaaggggtcacatttatttatttgttctctagtttccaaacaaggtatatatgtgggtgagtattattatttttttttaatcaagagaagtccaattgaagtctgggaatcaaaagcggtaacagctacactttaacgacaggacacacaaagatcaaagagacaaccatgtcttctactttgtgccaagtaaaaattagcccaaccacaaaatacaacagtcacagcaaaatgttcatcctcaccgccggttcag

SEQ ID NO: 491516 - DNA, 369 bp, Homo sapiens
actgtccgctggtctggttgcaaagactgaggtcttagggagaagacctttggcttttctgggaaatgatgagacatggcaacatactgtgaggagagaaagtatatattggagtgttgaaatgataagttatctgactaacaatctgtacttagtgatcagatctccccagagartagctgtattcattcctcaaagccagtaactcaagagaagcaggatgagaagacttctagttacatacatgagtcatttgagccactgtcttatattccttcagcaaatattccattcagtagaaatattgatgtcttttccatctaacaagttaacaccaaacacctgctacactgaagaaacatagtggtt

SEQ ID NO: 491517 - DNA, 413 bp, Homo sapiens
gtgaacaatgcactgcctataataaggacctatatacatctgctattcygtcaacatcatgactgccttcattttcaaagctcatttgccaagctgcatttcctaccatttgctcatccacccattcatccacccactcactctttcattcaggcctatctctttcaaaaagagattgaatgtacacatttcaggttacctatcaacatcttctatctgccaatccatttctgttctatctaatgcaattaatgaattgcaggaatgtccaagtccattaaactgaacaatttcaattccatattatttcttgagagtagagactttatcttcattgtatatcaaaaaagttctcttcactagaactttctaaagtcaaaaagcaacctaatattttgtgtcctgatattgta

SEQ ID NO: 491518 - DNA, 413 bp, Homo sapiens
gtgaacaatgcactgcctataataaggacctatatacatctgctattctgtcaacatcatgactgccttcattttcaaagctcatttgccaagctgcatttcctaccatttgctcatccacccattcatccacccactcactctttcattcaggcctatctctttcaaaaagagattgaatgtacacatttcagkttacctatcaacatcttctatctgccaatccatttctgttctatctaatgcaattaatgaattgcaggaatgtccaagtccattaaactgaacaatttcaattccatattatttcttgagagtagagactttatcttcattgtatatcaaaaaagttctcttcactagaactttctaaagtcaaaaagcaacctaatattttgtgtcctgatattgta

SEQ ID NO: 491519 - DNA, 611 bp, Homo sapiens
caccataccacctctcagggaatcctactcatgactctgaatgacctcttttttccactcagcgccaacaaattacatcaatttctgtttgattttatatgctcctccaaaactttgtaacctcttgaacatatcagaaaaatgatgcaccaaaacaacatgccaaaatagaaatagtgtagcgataagaatgggactagctggcatttattgaggtgctccttaacgtgccacaatgttatgtctcacgttcatgttgttagtgaaccctcacagaaccttgggaggcagaaattcctttccccatattacagaagagatgttgaggtttgctgyaggtcagacagataagaaatgagagtcaggactcaaacctgagctgtctgattccaaagccttcactcataacctctatctacattgactgtagctctcaatggaaatagaggaaaagcagtctaacaaagcatggaagtatactgtagtagattctctagtgacaggatctgtaaatttatattattttaattttccaagtcatttaaatacacccagtagacagggatcaaatctacaaacaactgatgtctatatctcacagcttgtggcaa

SEQ ID NO: 491520 - DNA, 457 bp, Homo sapiens
ttcactcttgcctacagctcaccccctgctgtgcagctccgttcctaacaggccayggaccaatactggctcttccccagatttgatgatttttcagcatctcagtattccctgattatttttcacatccataccctcttatgggtccttcttgtcctgcactgaccaacctggagtgtgaccatctggcgtcagggcctgtttttttaaataagattcttttcctacatccccctctccttctttccctcccttcctttcttctttctttctttctgattcaaaaagttttctgtttggttgtttttttgttttattttcacaaaaataagacactgcagattaaattatagtcttctttgttcatcaagtttgtaccattctactttctttccagataaacaagctccatagtgactttggaacatactcttctagtgatgtgagtgtgtgttca

SEQ ID NO: 491521 - DNA, 527 bp, Homo sapiens
atgtctttttggggtccccaggtgcctgatgaagccacccctgtgtcttttgcttcgttaccttctacatgaaaaagggaattaaaagtcatttccacctgccctgcatttgccttgtggcttcaagaatatgaaaactaatcaaaagtggaaattgcagctttttataacatctcgcagcaggggccttttctttaaaaaggcagaaaaaagaaaatggaacagaagaattgacagttaaactcatagggccmcaaaaccttcaaagtttcatctctagggtcttctgaaaagaaaaagcctgtgctctggaggtttttacctccaggacttaatgtacgaagatgcttttgacacttcaaaggggtttgatgtttcacagttatgggcagatttcctcaaagttgcattttgcctgatatgctgttcaatgttgttcttcacatgggcgatttcagcaagagctacattctaacctctcttagatcttgaaaatcactcatcctgctattctaggaaatctaatc

SEQ ID NO: 491522 - DNA, 551 bp, Homo sapiens
ctgacaaagaagcttggggaagccttccataataaaaaaagatggggccgggcgcggtggctcacgcctgtaatcccagcactttgggaggccgagacggggggatcacgaggtcaggagatcgagaccatcctggctaacgcggtgaaaccccgtctctactaaaaatacaaaaaaattagtcgggcgtggtagcagacgcctgtagtcccagctactcgggaggctgagacaggagaatggtgtgaacctgggaggcggagcttgcagtgagccgagatcgctccactgcactccascctgggcaacagagtgagactctgtctcaaaaaaaaaaaaaaaaaagaaaaaaagaaaaaaagatgggtaggatcctccataggtctccttgtgtcccatccttctcaattccttccatttgtatataggaaagttccaaacaggacatgaggtatcataacaataaagagttctgtacaacagaatttctcctctacagcacttaatacactgaaacctatctgaatgtagtctgtttatgccctttttct

SEQ ID NO: 491523 - DNA, 593 bp, Homo sapiens
aattatctccacaagggagcagggacacatatttaagtgtaaagtctgagggttttatggcttgcctagtgagttgttaataaagctgagtcagcaacttagccctattaactagtcctgtgaactccccgcttctctacatgtgattacctccacaaaatgcctctcacttttatattgattcagtcccctatgtggtttctaactcctttctgttgctttctcatgggggaaaagaaaatcaattcagagtggctggaagacatttggctttatctaaaagtgatcgatggcaataattttcatcttttttattctcttgttccatgaagctgagcttyaaaaagctttgcagagaaaaaaaaaaaaggccgatggtgaggaaaaacataaggtaatagtacctcaggggcaagggctaagaagagctttgtgactcattcaagcgtaacattctggatgcaaccgggaaaataatttatatgtgagcaaagagatagatttacaaagaggttgaggcaaaaataggctttggctatttttcatgtaatatgcatattcaaaaactaaggtttagccatgagtcttcaatg

SEQ ID NO: 491524 - DNA, 593 bp, Homo sapiens
aattatctccacaagggagcagggacacatatttaagtgtaaagtctgagggttttatggcttgcctagtgagttgttaataaagctgagtcagcaacttagccctattaactagtcctgtgaactccccgcttctctacatgtgattacctccacaaaatgcctctcacttttatattgattcagtcccctatgtggtttctaactcctttctgttgctttctcatgggggaaaagaaaatcaattcagagtggctggaagacatttggctttatctaaaagtgatcgatggcaataattttcatcttttttattctcttgttccatgaagctgagcttcaaaaagctttgcagagaaaaaaaaaaaaggccgatggtgaggaaaaacataaggtaatagtacctcaggggcaagggctaagaagagctttgtgactcattcaagcgtaacattctggatgcaaccgggaaaataatttatatgtgagcaaagagatagatttacaaagargttgaggcaaaaataggctttggctatttttcatgtaatatgcatattcaaaaactaaggtttagccatgagtcttcaatg

SEQ ID NO: 491525 - DNA, 603 bp, Homo sapiens
tggcaagctactgccttaaaatcygagctcctcgagtgcacaatttctgtcccttttgagggctcacaacactaaagatttcacatgaaagggtcgtgattaattgagcaatctaggggatacgtgacaggggtttcatgcactggtagtcagagtgaaacagaacagagcagggagtttcacagtgttcttttatacaatgcctgaaatctatgggtaacatcgggttctaagtcatgagttgatttttaactactgggtttaggctaggcaggcccaggcctggtttcgagcctggcgccgggctgcccgtctttggttttacttccttgttgttttttctttttttcttaaaacaggtactgagtataaaaccatatgagaaggtctctctcttccctcaaatttacatttatacatagagagcagaatatcttggaggacaagttagaaacatgatgtattttacatttcatgtaaggttgcagttccttgcatagaaacgcaaaagagggaaatagcttcaggccatggcttcatgtttatttaatgtaacaatagataggctttgctacttctgagtcccatgaacaggcataggtg

SEQ ID NO: 491526 - DNA, 603 bp, Homo sapiens
tggcaagctactgccttaaaatctgagctcctcgagtgcacaatttctgtcccttttgagggctcacaacactaaagatttcacatgaaagggtcgtgattrattgagcaatctaggggatacgtgacaggggtttcatgcactggtagtcagagtgaaacagaacagagcagggagtttcacagtgttcttttatacaatgcctgaaatctatgggtaacatcgggttctaagtcatgagttgatttttaactactgggtttaggctaggcaggcccaggcctggtttcgagcctggcgccgggctgcccgtctttggttttacttccttgttgttttttctttttttcttaaaacaggtactgagtataaaaccatatgagaaggtctctctcttccctcaaatttacatttatacatagagagcagaatatcttggaggacaagttagaaacatgatgtattttacatttcatgtaaggttgcagttccttgcatagaaacgcaaaagagggaaatagcttcaggccatggcttcatgtttatttaatgtaacaatagataggctttgctacttctgagtcccatgaacaggcataggtg

SEQ ID NO: 491527 - DNA, 603 bp, Homo sapiens
tggcaagctactgccttaaaatctgagctcctcgagtgcacaatttctgtcccttttgagggctcacaacactaaagatttcacatgaaagggtcgtgattaattgagcaatctaggggataygtgacaggggtttcatgcactggtagtcagagtgaaacagaacagagcagggagtttcacagtgttcttttatacaatgcctgaaatctatgggtaacatcgggttctaagtcatgagttgatttttaactactgggtttaggctaggcaggcccaggcctggtttcgagcctggcgccgggctgcccgtctttggttttacttccttgttgttttttctttttttcttaaaacaggtactgagtataaaaccatatgagaaggtctctctcttccctcaaatttacatttatacatagagagcagaatatcttggaggacaagttagaaacatgatgtattttacatttcatgtaaggttgcagttccttgcatagaaacgcaaaagagggaaatagcttcaggccatggcttcatgtttatttaatgtaacaatagataggctttgctacttctgagtcccatgaacaggcataggtg

SEQ ID NO: 491528 - DNA, 541 bp, Homo sapiens
tgtttttaaaatatatgctggatctaaccaatttccacaagcttccctgttatcactgttgggggagaaagtcggctgtgggctctgagccttcctgcttactgctgcatgtgccaaactgcaaggattattctttccttaaatgtgagcagtttctatagctggtaaagaaggcaactaatacatggaggcaaccatagcttgattgcggtgtgacttcttgctcccctggagacatggactgacttgtttgctatttgctacgaaggrttctgggccttaatcctgggtccctctaccgctgtgcaaccccctgcaggccgagcatctatctaggctctttatgggacttgaggacgaggcaaactggcacaattacgctgctgctgttttctgtgccgtgagtaagtaactgtcttaaggcttgttgtctgctttccaggagtactcatggagctgtggcacccttcctgcttgccattctctatgaagttgaggttctgtatacatcgctggtaaaaaggtaaaaatcagggagtgg

SEQ ID NO: 491529 - DNA, 600 bp, Homo sapiens
ataaatatgttttgatcatctaaagtcataatacaaaaacatttccttccccacttacttatgaggtacaaatgtaagccatatctctaaaactgtaaaggtatacagtaatttatcagttagtgatatatatggtatggtgaagactaatctagaaagaatagaaatgatgcaacaattatattaatttattcagccataataaaggtgaaatatttcaatttcacataggtgtgtgatgagaagaaggaaagggaatgtatgcttttctcttagagaaaatataatacaaatctggcattattctgatatgtaagttgccatctattattgtaggtatttattctagatgctcaatgaagaatttattttatgaacaaacaaattaaggaacaacaactcaggcagggcaaaaaagaaaaaagaaatcccaaaatatttcactctggaatttgtctactgaatgttttttctctctctgtctctaattttcttagtgtttatatgtctgtttgccagtttgagactctgttgtgttctccacaatcagatcagattctasagtgtaataaataaacaaaaaatcaatgagttaaacag

SEQ ID NO: 491530 - DNA, 573 bp, Homo sapiens
atgtgtgaatgagaaagcacccaagattgaagacacagtcttttataagctaatttagaaagccctatgttattggccacatgaacaatccctgatacattatgggaggggattatagaaagacataaatawcgccaccatatggggatctttggaggtaatcttggagactggctaaccaaagtgcctttgctgaacacatagattaaggcccagattcctctccccaaaccctccatctacccagttcaataaacttctcatgcaatgaatgatatggatgttgctatggatattgcagaaacatagggtttttacccgtgttcctcctaaccatgggcatggttaggttactgtttttcaaagtaattacctttgtcttcagcaattggctttatttcaatttactgaaatgtggttgttcaaagtatcttcgatttgtttcttatatactttattatttcactatacctttactttctctcttcctacatagaatttcctgaaaaaaatctataatcttgcatatttcaatctatttggtgaccttaaatctattccccattccataat

SEQ ID NO: 491531 - DNA, 606 bp, Homo sapiens
catggttattctgtatattccataaataaataattaaatctactgtagaaaattgagagctaccttctagtctaaaaaatgttctgtattttgcaattgtcatgtcctactgaaactgctcactctctcaatcttggcaacctaaaatctcttaagggtttactccaaagaaagacattttttaaaagaaggctttgctaaccttaaatatatatgctttgtaaataaattaaatctttctatttaatacaaattttatttagaaatggcctgatttttcattttgacatactcagtctttaattattccttgctctctgcattttcctagaactttggggatacacagagtaagccccttactctgacactatgacatgattttgttagacatgtcatagaaactccatgcagaggttcaattcattgatcatggatgaattcaggtgacatacatgttagtttggcacacaagttttaaaaattaacatggaatttgtttcaaatatttaaatattcatccattgaaaatcctaatatatattactttgggagrgtggatgtgaaaaaaaccaaataatatagcagtgacaagcctgcatttct

SEQ ID NO: 491532 - DNA, 550 bp, Homo sapiens
cttgctctgtcgccaggctggwgtgcactggcacgatcttggctcactgcagcctccacctcccaagttcaagcaattctcctgcctcagcctcccaagtagctgggattacaggtgtgcaccaccacacccagctaatctttgtatttttagtagagacggggtttcaccatgttgaccaggatggtttcaatctcttgaccttgtgagccacgtgtctcagcctcccaaagtgctgggattgcaggaatgagccactgcgcccagccagaattgctaagattcttaccagcactttgctgtcagacccaccagagcctacccacacacaacctcagccagcttacacttcgtagccaaggatgctggagcctgtggggagggtcagcttggcagggagggaccttcagaaagatgaggatggagatcacaaagcaagacaccaaggaggcaagaggggcaggaagattcaggaacctttattgagtgtcctcagggaaggtgtctggggccgtggagcctagtgctggactctccggatggactgcag

SEQ ID NO: 491533 - DNA, 606 bp, Homo sapiens
cccacgcgcttggccagcatcatggcaggatggggcgaggccatgctttaggggtggggggatgaatgagaggggcaggagacattttaaacactctcttaaatgtagttactactggtaggtcaaagttcccaaaagccttaaaaggggaatttctaggaaagcaaataaggcagtctctgaaagtgggggtcagagaaataggaatagagtggaaaaggaaagcttcggcaaggaaaaattgctaaaaagaatgagaaatacaacagagattgtaactaaatggtgaaagcactggggagcttatccttttgaaccctggcccttggtcaaagcaagagtcataaggtagaagaccaggtgaccaatttaagtaacctaatggaacaatttaaactgacctggtttgagttttggctctgttgcttacttgctatgttaccttgggaagctcaaggamccccagtttcctcatctataaaatagggataataatacaaaaatattgtcctaattcacaaagactaggaccaaccataaatatcacgcatatataaatcatcattataattaattccattccagctaactgtgccttttacactc

SEQ ID NO: 491534 - DNA, 617 bp, Homo sapiens
actgggatctataaaatataagagaaaggaaatgtctagtgatgggtgtaatctggagcacagaaacattttatagcttgttcatgttggaaggaaaatcaactaacattaggctgttactaggcattaagactgcagataccaaaccagtttgcctactacagagaaataccaggaagtggatgtcccaccctgatttgggcatggaagcaggccatgttgagagactgcttagggtattacaggtcagtctgaggaaagtgcctggtggaaaccttggtggaatcagaagagaaagcaaaaaagtgcatgtagttggggaggtttgtttttgtatacatatgcaaataaatatgcaaatgtgcatataaatatgcaagcctgtgcttgacctggctgccagtcagtgtaaatgaatgagaggtaataacttcttgattttttttttctcttcctatcaatatttctgcaaggtttggttgttaatattggacgcaggrgtattcactcccttggcagaggttggagctatagctgttagacacctgtcacagaattgctgatcttcttaaaggctgctgtggggagactacctgaagaagggtataaagagtggg

SEQ ID NO: 491535 - DNA, 636 bp, Homo sapiens
tggaaatggaagcagaagactgtaatgcgtcatagcccagtgtgcttcctgagctagctagaaaactctgtccctgggcaccccaggcctttggtacagttttacacttttttttttttttttttttgagatggattctcacactattgctcaggctggagtgcattagtgcaatcttggctcactgcaacctccacttcccaggttcaaacaattctcctaccacaacctcctgggtagctgggctaatttttatatttttagtaagacgaggtttcatcctgttggctgggctgatctcaaactcctgacttcaagtgatctgccagccttggcctcccaaagtgctgggattacaggcrtgagccactgcactggcctacgcttcttattaccatacaccactctgacatttgaaaagtggtaaaagttaatctgagctcaagaatagtaactatcttagatcctttgtaaaatgaggacaataatagtccccacttcttcattctagtgaggatcaatgctgtattacatataaagtggttggaacagagcccagtagatagtcagctctcaataaagcttgcgtatgaatactatttttaaattgttgcttctattattgttattgtttga

SEQ ID NO: 491536 - DNA, 636 bp, Homo sapiens
tggaaatggaagcagaagactgtaatgcgtcatagcccagtgtgcttcctgagctagctagaaaactctgtccctgggcaccccaggcctttggtacagttttacacttttttttttttttttttttgagatggattctcacactattgctcaggctggagtgcattagtgcaatcttggctcactgcaacctccacttcccaggttcaaacaattctcctaccacaacctcctgggtagctgggctaatttttatatttttagtaagacgaggtttcatcctgttggctgggctgatctcaaactcctgacttcaagtgatctgccagccttggcctcccaaagtgctgggattacaggcgtgagccactgcactggcctacgcttcttattaccatacaccactctgacatttgaaaagtggtaaaagttaatctgagctcaagaatagtaactatcttagatcctttgtaaaatgaggacaataatagtccccacttcwtcattctagtgaggatcaatgctgtattacatataaagtggttggaacagagcccagtagatagtcagctctcaataaagcttgcgtatgaatactatttttaaattgttgcttctattattgttattgtttga

SEQ ID NO: 491537 - DNA, 587 bp, Homo sapiens
gtcctggtggctggcgctcttgccgttgaagtcctgctaaacaaaatgtctttgctccwctcatttctcactggtcttcctttatttccaccagagggagtcagaagggccagcggttttccggcatggggtggtcaaagggacctggcgaaatatatgggagcaggactttgctctttcttcctgattaccgaagaatattgggctcaatcaggtttctggggagaagaaatctgcttttgggtctgtttcttcgaagcaactggaaatccgtattggaaaattagaggagcagaaatatgaacaaaaattagtgcttcgcaaatgggaaaatgtaacaagcagaggctacgagaaaggtcccaataacgtgggatgaattcctcaaaaattggcggcaggtgacgggcatccctatttggccaccagatggcgatgagcgcctgtctttagctcctcctccgcccactccaggagtttggaaagactgggcctacgcccctcaacactccgtccggtctttgaaccagaggaatgagggactctgtcgctctgtctgtctgtctctctgttcacatggatgaaaa

SEQ ID NO: 491538 - DNA, 587 bp, Homo sapiens
gtcctggtggctggcgctcttgccgttgaagtcctgctaaacaaaatgtctttgctccactcatttctcactggtcttcctttatttccaccagagggagtcagaagggccagcggttttccggcatggggtggtcaaagggacctggcgaaatatatgggagcaggactttgctctttcttcytgattaccgaagaatattgggctcaatcaggtttctggggagaagaaatctgcttttgggtctgtttcttcgaagcaactggaaatccgtattggaaaattagaggagcagaaatatgaacaaaaattagtgcttcgcaaatgggaaaatgtaacaagcagaggctacgagaaaggtcccaataacgtgggatgaattcctcaaaaattggcggcaggtgacgggcatccctatttggccaccagatggcgatgagcgcctgtctttagctcctcctccgcccactccaggagtttggaaagactgggcctacgcccctcaacactccgtccggtctttgaaccagaggaatgagggactctgtcgctctgtctgtctgtctctctgttcacatggatgaaaa

SEQ ID NO: 491539 - DNA, 587 bp, Homo sapiens
gtcctggtggctggcgctcttgccgttgaagtcctgctaaacaaaatgtctttgctccactcatttctcactggtcttcctttatttccaccagagggagtcagaagggccagcggttttccggcatggggtggtcaaagggacctggcgaaatatatgggagcaggactttgctctttcttcctgattaccgaagaatattgggctcaatcaggtttctggggagaagaaatctgcttttgggtctgtttcttcgaagcaactggaaatccgtattggaaaattagaggagcagaaatatgaacaaaaattagtgcttcgcaaatgggaaaatgtaacaagcagaggctacgagaaaggtcccaataacgtgggatraattcctcaaaaattggcggcaggtgacgggcatccctatttggccaccagatggcgatgagcgcctgtctttagctcctcctccgcccactccaggagtttggaaagactgggcctacgcccctcaacactccgtccggtctttgaaccagaggaatgagggactctgtcgctctgtctgtctgtctctctgttcacatggatgaaaa

SEQ ID NO: 491540 - DNA, 599 bp, Homo sapiens
gaaaatatttcaactagctgcttgagctggatgtacaaagaaattagcaataaaataatgctgtaatgttgtatgatacttcaactgtacaataatattgtcacttatcataaatgtaccatggttttattaacaataaaaccataaatagaaataacaatgaaaagaaatctattaatgaggtattaatataggaatatatactgtacatatatattgcattatataagtatattatatattatatatgtaaatatacattacatatacatatatattatacatatatagatatatacatattccccagaggtttagaccgaggaaaccaggtcaagctgcttctcaggtgcttgctgtataattaaccacttttagatttgagtcttggctattccacatgcatctgtgaccttgggcaattacttgatctcagagagcttccagttcctcatctataaaatragtacaaaaatttctcatatgattaacaccagatctaaaaaaatacctggaatgtaaaatgagctagaacagtgtaagatatgaataaccttattactgtaatttacgtgactatttaagcaaaacgctaaaat

SEQ ID NO: 491541 - DNA, 484 bp, Homo sapiens
ggtatgacaagtactacagccaaaggagatgtttatgccaagactctgcctcccagaagcctttttcagtcctcaaggaagcctgatgctgaagaagtctcctcagattcagagaatattcctgaggagggggatggttctgaagaactggctcatggtcactcttcccagtccttggggaagtttgaagatgaacaagaagtcttctcagaatcaaaaagttttgttgaggacttgagcagctctgaggaggagctggacctcagatgcctctcccaggctttagaggagcctgaagatgcagaagtcttcacagaatcaagcagttatgttgaaaagtacaacacttctgawgattgcagcagctcagaggaagacctgcctctcagacaccctgctcaggccttgggaaagcccaaaaaccaacaagaagtctcctctgcttcaaataatactcctgaagagcagaatgattttatgcagc

SEQ ID NO: 491542 - DNA, 519 bp, Homo sapiens
gtatctccttagaatcacccttctcctatgtaaacatatttgggcttcttttctcttcctgtttctctctctctctctctctctctttctacccccccccacctcccgctacacatgtacacacatgcacacacacacacagttgcaatcatcctgacacttcgcacgtaartactttatcgtgtatctccttagaatcgcccttctcctatataaccacaatgccattaatttacacataaaatttcaagcgttaattaaatattattaaacagtctataaccaaattcccccaggatacccaatatcatctgtagaatttgtttgatccagaatctattgcatttggctatgtcactttcaatttagaatattttccccaccttttcctagtttttcacgtcctagaaatttttaaggtccaagccagacaatttatgtcccacagtctggatttgtctgcttcttcatgattagattcaggttaaacatttttggcaagaatattctacagatgct

SEQ ID NO: 491543 - DNA, 519 bp, Homo sapiens
gtatctccttagaatcacccttctcctatgtaaacatatttgggcttcttttctcttcctgtttctctctctctctctctctctctttctacccccccccacctcccgctacacatgtacacacatgcacacacacacacagttgcaatcatcctgacacttcgcacgtaaatactttatcgtgtatctccttagaatcrcccttctcctatataaccacaatgccattaatttacacataaaatttcaagcgttaattaaatattattaaacagtctataaccaaattcccccaggatacccaatatcatctgtagaatttgtttgatccagaatctattgcatttggctatgtcactttcaatttagaatattttccccaccttttcctagtttttcacgtcctagaaatttttaaggtccaagccagacaatttatgtcccacagtctggatttgtctgcttcttcatgattagattcaggttaaacatttttggcaagaatattctacagatgct

SEQ ID NO: 491544 - DNA, 591 bp, Homo sapiens
atgactaatgactatagcattattacatcaaagtaagtagatacatttgtcagaattcaaattactaatagtatgaaaaaaattaatgccaaaattagtagcagtttttacccaattataactcaaagtccagacacaataaataaaaatattgttaaactggactatgtaaaaatgaaagaaattgcagcaaacataaacaaagtcaaaagacaaatgttataaaatattaatattagaattaatatatatcatagaccaggatcttatgttcctaatataaaagaacacaaaaatcaagaaaaaaagaaccaaaaccttctagaaaaatgtacaaaaagcatgtacacagttaataaatgatattcaaatggccctttagyaggtcaaaatcctcagctgcttcttcttgcattacagaaatgcaaattattactacatttaggcaccatttctcacaaggttgcaaaaatgtataagtttgataccattccataattctgttagtaaggctgtgggaaaatgaatactctcatcaaatgctggtggaaatacaaaacggcatgacctctgtggaggagaatttagcaa

SEQ ID NO: 491545 - DNA, 175 bp, Homo sapiens
gacagaaattgttttgcctatgctttatccatttctcctccctttgaggtcagaatgtgtgtttttcttggraaaccacctgtctctcactctcaccttactcgggtgtcctggactgaccttaggtgtgagtaggtgacccaggcctggccaatcagagcatcagattcaccag

SEQ ID NO: 491546 - DNA, 366 bp, Homo sapiens
atcagcaagctccccctaggaacccagaacaaaagccagacacattccttaataggaaaacagggtgttggacacaatcctattccagccacacaccaacccatcctcccctctgctaccgcccagcggtctcctcccaggttagagaccaaaatgcatcagcaggaaagccgaggttaataatttgagtggacagaaattgttttgcctatgctttatccatttctcctccctttgaggtcagaatgtgtgtttttcttggaaaaccacctgtctctcactctcaccttactcgggtgtcctggactgaccytaggtgtgagtaggtgacccaggcctggccaatcagagcatcagattcaccag

SEQ ID NO: 491547 - DNA, 416 bp, Homo sapiens
tgtttcaaaacgttcatgaggaataaggatctttttgcccctttatggagaagagggtgaaataaatggtgttttctctggaaagagtggcttggaatcagtgagttaggaagagttaagtttccacaatcttcttggtgacttcagaactatggagagtggagagggagggagaaggaaggaggaaaggagggagggaaggagagatggaagggagagattgaggaggaaagagacagcttattcagaaagaaatcaaagagcactgagacctggcatcctcygagaactgggtgacctgggtcactgggcctgttttctgaatgtcggctgggaatgagccagcccagaggacagacagggagttggaaatgaagagagtttgctaatcctgcggttttgtacaaatcctctca

SEQ ID NO: 491548 - DNA, 550 bp, Homo sapiens
tcccagttggaggtttaattctggagaaacagagagagaatgcctggccttttggggaggcaggcgagcaccagcasctcccaaactcactgtgtcccaggccactgtggggtaggagaggagaggcttactgtataaccctcactctactgaagcttccctagagctgagcggcagtgcttccctcccctggcccgcctccttctcatctttactcttccactgtgtgtctgcaaactgcacagcttgttagtgagatacgctaataaaccaccatgtcatcacattagcagtttccagctgagaatctcccttcctgctcggggtggcagacacccaaacacagccccatcatcaggctgtttgcacagctaattacttttttccaacatggaggcgagagacttcctgaggcttccactcactcagaattgctgttgtggatttcagaatggtccccctgccaggcttgtctggatgtcccaaagactttagggagtagccagattctgccctctcattggatagaacgggaggccgaggtccacag

SEQ ID NO: 491549 - DNA, 305 bp, Homo sapiens
ttcttttgctgctgggtagagaaacagatgttgagaggtcccagtaggtgactgccatgagttgagggtggagactcaaagcctggttcaccttcttctgctgggtggaagcctcagggacaccaggtctaagttaccctctgccattagatggaggggctggagactccrggttttctggtaccacaaagaagggatgcatgtgtccagtgagcatggggtgtgggacaggccaactaagccctggaagctttgctggagccactgctgctgctatgtgtgggctccatgacactgcccccttc

SEQ ID NO: 491550 - DNA, 542 bp, Homo sapiens
gtgtcttgagaccacgcccatgagcacaagagtttccacggtgaaggttcctggatggaacgccgtggatgttcctaatgttccttcctgatgttcacctgccatcttgctatttaatgcaatgtcttctaaatattgaatagaaaaaagtatttgtccaatatgggcaaggtatgaagaatatgaatacactggacacacagacagggaggggcacccacagcaaactcccttcgcctgggagcaggtggggtccttgagtcctatgtcacctgtttcttcctccgccttggcctacaggccccatgtgatctgacctctgcctgcctctccgactccatctcccctcccgctcctgttctttcaacaattatgttacagcctcagtgamtatcacaaggaccctgaatcacggtggctttactaagacagaggttcattcctttcacatgaaagttcaagccagtcgggtgattcttctctgtgcatttttcagggtcttagggtacttccatcttgctgctttgacttctttagggtgt

SEQ ID NO: 491551 - DNA, 567 bp, Homo sapiens
taggaaaagaaaatgaaaccatcgtaatccccccatttgtaaattttgttaggggatatttgcaacattttcttgggctttatgtctcagacaaatgttccttatgttagctcttaaataaggctgatgtgctataatcgtttccttcttgtcagtggtgtacatgggagtgataactgtgtaactgagcatggtggctactgcttggggaaggagggacatgcacttggaggcaggtactccaagggtttggcagcacacacgcagagggcttcaaccctctcctcatgtctggaagctagaaacayggatattcatggtaatatttttcatgccttttgtatgtctacactggagtcatctacactggagtctaccaacctcagcactgttgacattttgggctggttgattctctgtggtggggctgtcctgggcattgtaggatgtttgtcggcatccctggcctctacccactagatgccagtagcaccctccccttctcaattgtgacaagccaaaaagatgtgtccagacattgccaaatgtcctctaagagtaaaatta

SEQ ID NO: 491552 - DNA, 560 bp, Homo sapiens
atgcttctgtctgccttggataatcagggaaccatgaatagacacagatgtgataggtggattctgaagtaggagttttcaggttgcctttgagatgcatttccaccagatttttcctttctcatttttcactaggaccccgaaaagaaagtgcaaccttatggtttgaagtgcaaactcagggacagacttccttgttaattcctggctcccctactagctaagtagccttctggaagatgaccttgagaaataacttcttcccagcctcagtttattcatctacacaatgaggataatagtaatacccatcttataagattggtgtgtgatcttataagtcacacaccagtcagggcagctcattgctataccaaatgacctccaaatctagggtgattagatttaggtttgcctaagactgaggggttccccaggaagcaggactttcagtgctaaaaccaggacaattacaggcaaactggaactgacagttacgctgctaagtctccatggctaacataatagaagttgttttccrgctcacatggttgttgagc

SEQ ID NO: 491553 - DNA, 654 bp, Homo sapiens
tgcagtttatgcctgacattagatcctctttctataggttcgcatggcagcctatactttgctttctaygatattcattatcaatattgccaatatttgtttaccatttctcttcccgccaaaaactataattaactccgtatggataaaactgtaactactttatttactttgtattcctagccccaagcccagtgcttggaacatggtattcctgagtggaatacaacagaatggagtgtcctgatatgagcctaacttgtgcttacttgagagttctgataggtcttgcctttgttgaaatactgcctggcatcaaattgcctaaactggaaaagaggctcaaggacagtgggccatgctggagggaagggctacttctgtatatagcaccactgatgatgactagcttggtcatcagtatcatcaccaacactactatcctcaatgctattagccccatctttatggatttatgcttaatcttggaagaggaatctagaatcctagccattttactaaaatccctctgggagattcagagtgcaaatcagcatgagtggattcagcaaagttgatgccagaaactttgacagcaatagcaggaagcattgtcagctatacagtgatgctgtatttttctgcttcggctat

SEQ ID NO: 491554 - DNA, 654 bp, Homo sapiens
tgcagtttatgcctgacattagatcctctttctataggttcgcatggcagcctatactttgctttctatgatattcattatcaatattgccaatatttgtttaccatttctcttccygccaaaaactataattaactccgtatggataaaactgtaactactttatttactttgtattcctagccccaagcccagtgcttggaacatggtattcctgagtggaatacaacagaatggagtgtcctgatatgagcctaacttgtgcttacttgagagttctgataggtcttgcctttgttgaaatactgcctggcatcaaattgcctaaactggaaaagaggctcaaggacagtgggccatgctggagggaagggctacttctgtatatagcaccactgatgatgactagcttggtcatcagtatcatcaccaacactactatcctcaatgctattagccccatctttatggatttatgcttaatcttggaagaggaatctagaatcctagccattttactaaaatccctctgggagattcagagtgcaaatcagcatgagtggattcagcaaagttgatgccagaaactttgacagcaatagcaggaagcattgtcagctatacagtgatgctgtatttttctgcttcggctat

SEQ ID NO: 491555 - DNA, 654 bp, Homo sapiens
tgcagtttatgcctgacattagatcctctttctataggttcgcatggcagcctatactttgctttctatgatattcattatcaatattgccaatatttgtttaccatttctcttcccgccaaaaactataattaactccrtatggataaaactgtaactactttatttactttgtattcctagccccaagcccagtgcttggaacatggtattcctgagtggaatacaacagaatggagtgtcctgatatgagcctaacttgtgcttacttgagagttctgataggtcttgcctttgttgaaatactgcctggcatcaaattgcctaaactggaaaagaggctcaaggacagtgggccatgctggagggaagggctacttctgtatatagcaccactgatgatgactagcttggtcatcagtatcatcaccaacactactatcctcaatgctattagccccatctttatggatttatgcttaatcttggaagaggaatctagaatcctagccattttactaaaatccctctgggagattcagagtgcaaatcagcatgagtggattcagcaaagttgatgccagaaactttgacagcaatagcaggaagcattgtcagctatacagtgatgctgtatttttctgcttcggctat

SEQ ID NO: 491556 - DNA, 652 bp, Homo sapiens
actaatttgtatacatatattaaatatcttttacatattaaaagtcacaattttcttcttcctactattaataattatcctgttaaactattcacaagataaaatgataactagttttcaactagaaggacttatctatttctaaaggcaaaacaaagtaaagaaggttctttttcaatatcattagcaaaggagtagtctgtctacaaacaagctgtattatacacaatatcacaaagtgtgcatttgagttttaaacatcatccaaatttactttatgtagataccactttagtaattactttaataattgctgcatcctagcaacatacaatgcactgcatttctcaatgcaaatatacctcagagggtttatctggaaatccacaggaagaaaagagacatttgccttcttaaggggaacttggcctcttgtctctcttcctcttggaataaaactggaaatgaaaatggagacagcgagtgtgcttatacttaaagcacagccctgtcaatatggggctaacttgagccttttcattttcaactctcagccaaaactaagatrgatcttaattctgagttttatttcaagaatattatgtactgggccagatgaaaaagtggtgagatttttaacttttgagctaaa

SEQ ID NO: 491557 - DNA, 620 bp, Homo sapiens
ggctaatggcctcagttcctcatgagctgttgtctggggtcaggagaggcttccttggttccttgctacatgggcttctccacagggcagctcacaacgtggtgacttgcttcatcagagctagcaaggragggggccacagagagtgctagtaaagctgaagtcacagtctttcctaaccttagctcagaagtgacatcccatcactttttccctattctatgcattagaagtgagtcactaggtccagcccacactcagcaggaagagataacacacatgcaggagatggggatcattgggaaccattgtagaagcagcccatcagacttttcccctcattgttcttggcctcattgggtcatctgagactgtggctgtcttgcttagacttttatacgctgctccattaaaaaggggctgagaagtgggaagcggtgattgggagaatgtgaggtaggcccgctaagcaaacccctggagggttggtgcaccaggagaatgaagaaaggggaaattgacaacagatgtagccctattacattaatgggagttgcttcagccaattaccccatgggtgctgcatcctactaatgcaacttaggagaaaaggcagtgtc

SEQ ID NO: 491558 - DNA, 492 bp, Homo sapiens
ctgatgctaagatggtatgagagaagcttctcaaaaatttcaaatactcacatatttatcttaatatgaattaataaaaaatctggctgggtgcggtggctcatgcctgtaatcctagcactttgggaggccaaggcgggcagattgcctgagctcaggagttcaaaaccagcctaggcaacatggtgaaaccccatytctactaaaaatacagaaaaaaaattagctggggcgtggtggcatgcacctgtagtgccagctactcgggaggctgaagcaggagaattgcttaaacccaggaggcagaggttgtagtgagccgagaccgtgccactgcactccagcctgggtgacagagcgagactccatctcaaaaaaaaaaaaaaagaaaaaaaatcgacagtcaatacaacaaacccatacattattccctggaaccagacaagccaaaaaagaagaagtccattattgaaatttgattttaagaaaatg

SEQ ID NO: 491559 - DNA, 333 bp, Homo sapiens
ccataaccgctctgcaaatgggrgtttttcattttcgtgttttaagtgcagagaatattcgagctggagcgacctcggagatcactcacttcggtggttttgaaacttgtgtgtttttctttttcttttaagtaggaaaacccttttagaggaaacattatcaccctcctaaaatcccaataccttgagcaagatgatagatcttaaagtaaagctgccctggtggatgctggggatgaggcccacatcgagcgctccttccacacaagtctttcacaacctcaagactgctcccttcctccgcagctagtattgtagctggggttttgtttt

SEQ ID NO: 491560 - DNA, 671 bp, Homo sapiens
tgttctccacttagaagtttatagttcacgtgagcctatgaaaggttatgagaagtcctgcagttttttgtgtttggcttgtctatgttcattttccagttttattttgttgaagtccacacttgtttggcctcagaaccctctttccattaatatctattaacatcgtgtgagcaagagctctgggaatcacagggtggaaaatgccgctctggccctgaacaagcctcctgatctcttcctcgatatcatagcagtagaaatagtaataataataacaacaactactgccaattgatgccatttattgagagcttactatgtgccaagtgctatactttgcttgtactattcattgaattctttccagaatcttgtaggtcatttctgtgtttagaccatggaataaacaagaataatgagacacttagaaatgcaagccctggcctaagggcatagagtcaataagaggtgaagctggcatttgaacccagatgatctcttctaactagtccctgcttccagacccagcctccccagttcatccaccctgctgccgttggagagacctttctcctgcacggttctcaccatgtctgtacctcaactcctctgctctctgttttcayagcactccctattgttgaaggtccaagctctttagtatgccc

SEQ ID NO: 491561 - DNA, 532 bp, Homo sapiens
cagcctgcagcggctgtctgggaagcacccttagcaagggccctgcttgccacacccctgggcagttagcacccggcctgcccactctgcacccctggcgctgggggcccgcacctccctgcagcctctccacttccttcccttctcctcctccccgggatttccatggtcaggaaggatttcccctgggtaaccaactgtctctgggtacaaagaactgcctgtgaaggccatctccccaacagcctatcagagctcacctcctgctcacccctgggccggtcacagaggcttgctgcgtctctgaagggctatccacggcccttccacctgtgcacatcagtgagcactgtggaggtttcaagagtctctggggygagcccacctgagcttaccacctgcaagctcctaccagagaacctcagggagtgacctaagctgtgcgttcctcactgtcctcatctgtaaattgggagcaatcgcatggtccccgtcatagatctgtggtgaggatcaactgggttcgggtatc

SEQ ID NO: 491562 - DNA, 498 bp, Homo sapiens
agaaatttaccaaaggtttcaccaagatgtagagaattaccctatattatttattgttctgacttatataagtaactttaattatagagtaaattgcccacagttctcattccttagtgtagatttcctcattcttttttttttttttgaaacagtctcgctctgtcacccaggctagagtgcaatggtgcgatctcagctcactgcaacctccgcttcctgggttcaagtgattcttgtgcctcagcctccccagtagctgcrattacaggtgcacaccaccatgctgggctaattttttgtatttttagtagagatggggtttcaccatgttggccaggctggtctcaaacttctgacctcatatgatctgcccgccttggcctcccaaagtgctaagattataggtgggagccgctgcacccaaccggattccctcattcttgatgcatcttttagttgattttaatgtcttgagttcccctgaacagactgtga

SEQ ID NO: 491563 - DNA, 608 bp, Homo sapiens
attacatgtagtatcaacgggtgtatgcccactgcgatattacgagtaatatctccctaggatattatgagtaatatcgcagggtgtacaccaactgtgatattaggaataatatctatcttggatattatgagtaatatcacagggtgtacaccaactgtgatattaggagtaatatctatcttggatattatgagtaatatcacagggtgtacaccamctgtgatattaggagtaatatctatcttggatattatgagtaatatcacagtgtgtacatccactgtgatattaggagtaatatctcccgaggatattagaagtaatattatagggtgtccacccactttgatattaccagcaatatctccctaggactttaggagtaatatcacagggtgtacagccactgtgatatttggcatcatatgtttctaggacattacatgtaatatcacagaacatataaccactgtgatattactcataatatctgcctaggatataacgagtaatattacagtgtatacacatatggtgtatgcccactatgatattaggagtaatgcaaagcttatagcttgcagtgaacgctaagaatgagttct

SEQ ID NO: 491564 - DNA, 576 bp, Homo sapiens
acaggtgatgctgtataacaaacaagcccacaatcctcagtggctttaacagcaaagttgacttcttttttttttttttgtgggggttggggtgtggtggatggagtcttgctctgtcgcccaggctggagtgcagtggtgcaatctcaactcactgcaacctccacctcctgggttcaagagattctcctgcctcagcctcccgagtagcagggactacaggtgcacgccaccatgcccagctaattttttgtatttttagtagagacggggtttcaccgtgttagtcaggatggtctcgatctcctaacctcatgatctgcccacttcagcctctgaaagtcctgggattacaggtgtgagccactgcacccggccttgacttctcaattgatttcacatccatcacgggtcaacaagggggctctggtggtcrtagtcattcagagactcaaacagatagacccttatcccagaagatgctcccacagttccagaaatagagcaaagaaaacacaatcagccatgagccacttcttaaatccccagcctggaagggatacacatttcttctgt

SEQ ID NO: 491565 - DNA, 600 bp, Homo sapiens
ttttccaggcctgcagcacaaagccaggcggacgtcctaagaacaagccaygtctgcagaggcctctactgcatccctgcctcatgggcacaatgtcacagaacagaattacatcatgtgggaggccatgtgcagtgtaagtgtcataatggagctggacccagaaggtcccagacccaggtccagctatgtctctgctatagtcaatgtttgtgtgcccctaaaatccgtgtgttgaaatctaacccctgataggttaggtttgaattaggaggcaaagactttaggaagtgatttcatcatgaaagcaaagaccccatgaatgggataagtggccttgtaaaagggagtcaagggagcttgttctctccttccaccatttgaggacacagctaggaggtgccctctataaggaacaggtactcaacagacacctaatctgccactactttgaccttccacttgccagcatccagacctataagaaataaatttctgctgcttataagccccccaggctaaggtattttgttatggcagcccaaatggaagaagacggtctctgaccatcttgagcaactcacttatctgctgaactct

SEQ ID NO: 491566 - DNA, 600 bp, Homo sapiens
ttttccaggcctgcagcacaaagccaggcggacgtcctaagaacaagccatgtctgcagaggcctctactgcatccctgcctcatgggcacaatgtcacagaacagaattacatcatgtgggaggccatgtgcagtgtaagtgtcataatggagctggacccagaaggtcccagacccaggtccagctatgtctctgctatagtcaatgtttgtgtgcccctaaaatccgtgtgttgaaatctaacccctgataggttaggtttgaattaggaggcaaagactttaggaagtgatttcatcatgaaagcaaagaccccatgaatgggataagtggccttgtaaaagggagycaagggagcttgttctctccttccaccatttgaggacacagctaggaggtgccctctataaggaacaggtactcaacagacacctaatctgccactactttgaccttccacttgccagcatccagacctataagaaataaatttctgctgcttataagccccccaggctaaggtattttgttatggcagcccaaatggaagaagacggtctctgaccatcttgagcaactcacttatctgctgaactct

SEQ ID NO: 491567 - DNA, 549 bp, Homo sapiens
cagaaaagatatataaacaccaatgaaaataaatatgaaattatatgacatgyaattatattgtggaacgactgaataaataagtgaactaagctctaagaaaaaagatgatgatataaaattatatagaagtaaaaaccttggctggtatagcataattaatgtatcagtaaagcatgtacactgtagaagggtcaggaagacagcacacagagtgagaccggaccaaaagctttaacggaagttctatacccttaaacaagattaaagtggactcaggaaaacatgggccacatgaggggaaggacacatgttccagacaggccaaagctcagaggatctctaccttctccaggaggaaaggggaggcaaagcagcaggcagaagacatcacggccaggtcagcacagggcactcaggccaagccaggtgggctccatcctacagttagtgaggagccactgccgggtgggctttattcattagtttgttttgtttcctttagtaacgaaggcacatgatcaaagttgacctttgtaagtgctgcag

SEQ ID NO: 491568 - DNA, 655 bp, Homo sapiens
tgaacaaaaagatagatataaccagtattttaaaaattatgttgtataaagcactaccctcagtgagatattagtagaacacacatgcacacacacgcacacacactcacactgagcccagattattctggcaaatgctgggttaagcaaattgaaagaaacatcttttgtgctggacttctcagaacctggaatgtggctatatgactcataaaacagcaaggttaagacagagcatgtcattttttcccagaaatgttgaaacactttccttcccttggcttcagtgtcaccttctttctcctggttctccwtcaatctctttggctgctccttcttgatttcctttttgacaatctgctgctgctcagccattctcttttctttcaccatggatttctcaagtgtgtttctattcctgcagattaaacttcccttgtttttcctgacaactctccttgtctgaccctccctggttctaaggcaggtgttccatctgtgtgggcttttggcatcctgggatgctcccagcatgttccctgccacacttcatcaggttttctccgtagactctgcgagggcagcaaccttgtctccactgttccttcaatgctcagcacataacacggaaactgactccataacatttagttgg

SEQ ID NO: 491569 - DNA, 495 bp, Homo sapiens
cctttcctccctctgtccctccctctcactttgtctccgttcctttccccatttctgcctggcttccctcccacctagaaagggcagaaccacggtttgcgcaagatctcggggtctacatttagttgccgggagctccacgtgatgcggcggggcacgggtgggcgagggagggtggagcggggaggtagtggagttgagctgtggaaaggagagcaggcctggccgctgcccgggccggtgtttcccggggtggaggtctccgcctacaccattgaagaacgcggaggctggggggaggtgtacggcgtggggaggcgggggaagggatgagagccctgtccgggctggtcccaaaccctagccggctgcccatgaacccgcgcatgccagcctgggctggctctgaaatccttgggatgctcaggaaaasaatgacagccctcctttctgtggagtttctcgccggacctggactcagggatcctagacagg

SEQ ID NO: 491570 - DNA, 576 bp, Homo sapiens
gtgtgtgtccgcgcgcgtgcacccgtgtctatccgtgtgtgtgtcagggkgggtttgctcgtggtagtggtggggtgtgtctgggtgtccgtcagcccctctttcccgggatgaggctgccggggctctagtgctagcacggggcaaagcagagccttcctgccccgttggccacggcgggtcctcgtcggaacaagcgacgatggtgtgggcgttgtgagaaaaagggcccgcggggctgggcggctgttagcccctggcatgccctggcggctctgggtgtgtggggcaagagggggccttgcaggaggggcggcgaggaatccaaaataatttttccgcggcaaggcggaggaccagagggtaccccaggaccctgggccctgggccctgacgcctcggagcacaccccgtcctgagcgggccccaggtgttggaagctctggagctccagagcctggggaaggcctggagtgtcagcgagagggtggtcgcatggagagtccagagccctggcaggggatggaggcctctggcaccgcgtaggtctcgcgcgtggtctggccgccagcgaca

SEQ ID NO: 491571 - DNA, 560 bp, Homo sapiens
gcgtgcacccgtgtctatccgtgtgtgtgtcagggggggtttgctcgtggtagtggtggggtgtgtctgggtgtccgtcagcccctctttcccgggatgaggctgccggggctctagtgctagcacggggcaaagcagagccttcctgccccgttggccacggcgggtcctcgtcggaacaagcgacgatggtgtgggcgttgtgagaaaaagggcccgcggggctgggcggctgttagcccctggcatgccctggcggctctgggtgtgtggggcaagagggggccttgcaggaggggcggcgaggaatccaaaataatttttccgcggcaaggcggaggaccrgagggtaccccaggaccctgggccctgggccctgacgcctcggagcacaccccgtcctgagcgggccccaggtgttggaagctctggagctccagagcctggggaaggcctggagtgtcagcgagagggtggtcgcatggagagtccagagccctggcaggggatggaggcctctggcaccgcgtaggtctcgcgcgtggtctggccgccagcga

SEQ ID NO: 491572 - DNA, 575 bp, Homo sapiens
tctaatcaatctaaaccaccatttgcatctgagcacttgcgtctgagtgttgctacrttagagttgatgatggactgaggcattctatcttttcttctgggcttgttatttctctttagttttgaattctagatctagcaactttgctagctccatcctttccagaattcaaagtccactcctttcagtccatcaaattggccatcagtttcttccagggcagagaccatgtcttcctctgctccctgtttctctctctctcctccctgtcactggcctctcactgccccagtgcctaggagagggccccaccatcatgctcatgtgtccttctgtgcaatgaggttgttgcaattggggcgctcaagagtatgatgatgggcgcatcaagtcatatgatgaaagatcaggcagttgttaaaatcatgcttatgaagaaatgttaatgacacagataaatgctcatggaatgtcaaatgaaaaaagcaggaccttacacagaatatatcacacagaaggcttgaggaaaaagcacacaagaaaatgctacaaaatattaatagtggttgttttta

SEQ ID NO: 491573 - DNA, 502 bp, Homo sapiens
cccgttcattcatttattatccacccattcatccattcacccattatccacccagccacccacccacccatccatccatccatccatccacacatctatccatccatccacccayctatctatacacccattcatccacccattatccatccatccatccatccatgcatccatacattcatccataattcacacattatccatttattcatccacccatccatttacccacccacccactcatccatccactcacccacccatccatccattcacccactcactcgcctgttccaccatcctcctgtccagcatcccaggcactgtactaggtgctggagagctggcacatgaattagacacaacccctgcttttaaagagctcatagcctattcatgcatttgagtgggaaaaacaaaagaaagagtcagagagtgcattttagtgggaggtttctggagtgaagcggattgtggaaaaggacagccactgaggagttaa

SEQ ID NO: 491574 - DNA, 575 bp, Homo sapiens
tctaatcaatctaaaccaccatttgcatctgagcacttgcgtctgagtgttgctacgttagagttgatgatggactgaggcattctatcttttcttctgggcttgttatttctctttagttttgaattctagatctagcaactttgctagctccatcctttccagaattcaaagtccactcctttcagtccatcaaattggccatcagtttcttccagggcagagaccatgtcttcctctgctccctgtttctctctctctcctccctgtcactggcctctcactgccccagtgcctaggagagggccccaccatcatgctcatgtgtccttctgtgcaatgaggttgttgcaattggggcrctcaagagtatgatgatgggcgcatcaagtcatatgatgaaagatcaggcagttgttaaaatcatgcttatgaagaaatgttaatgacacagataaatgctcatggaatgtcaaatgaaaaaagcaggaccttacacagaatatatcacacagaaggcttgaggaaaaagcacacaagaaaatgctacaaaatattaatagtggttgttttta

SEQ ID NO: 491575 - DNA, 458 bp, Homo sapiens
taggagctacgggaagctttgtggacgtggaggcagtgggcaggtgacaggtggcctcctctctgctccggcccactcttcatggtccacctctgtcccatcagggacccattgccattggcagcggtgagtcgggctctggctgatggtgtctcctgaggctcaatggagtcactctgcaaaggmgtgcagcgtcctcattgccaaggccctcttcctatgtggactgtgagcttcttgagagcagaagccacacctgataaccctgtttctttcctggtgttgactgtttgtaaattgtaatgatgattcacttgtttcctcattcaccaaatagttacggagccccttctaagggcaggcactgttctaggtgcttgggattcctgcctcgaggagtgtacattcttggaggatggggagaaattaaacaatcatcatgatgcatttgtaattta

SEQ ID NO: 491576 - DNA, 539 bp, Homo sapiens
cagctgggctgcttcccttccaggcctctctgcttggtgtggagatgccatcttgtccgtatctcacatggccttcctctggtatctgtgtctcatctcttcttctcagaaggacacagtcaccttggataggggccccgcccatgtggtcttgtttactttaatccctctttaaagcccctatctcaatgcgcccgccgtgtccatggagagaggctgaggcggccgacctccggcccgaggcaccggggcatcgggacggcgaagatgtcggcttccttagtccgggcaactgtccrggctgtgagcaagaggaagctgcagcccacccgggcagccctcaccctgacaccttcagcagtaaacaagataaaacaacttcttaaagataagcctgagcatgtaggtgtaaaagttggtgtccgaaccaggggctgtaatggcctttcttatactctagaatatacaaagacaaaaggagattctgaagaagaagttattcaagatggagtcagagtgctcatcgaaaagaaagcaca

SEQ ID NO: 491577 - DNA, 479 bp, Homo sapiens
tctgactacttatacaaaattgcaagctgcctccagcccttgcccaacccagaatccctaatctcacctactctgctgggatttctcaaacatgaactcctcctaacatactatagaatgcccatagttgataatgtgtctcctccctactagaccgaagctctacaagggcagggatttgtgttattctgcccagtgcctagggcagtagctggcaggtggaatacttactgaattgaaaagctcttaayattgctgagtcccagcttgcccatcttccaaagctgaaatctttaacctagctcaaaggtgcttattgctggaaagatcaaaggaaaatgcttttaaaatatctaacactgtgcaagaaatgggtagggagagctgcagttcttcctttcaaaccaccctttaataaaaggcaaagattgctgactaagccttcaggggtggggataacacaagtagggccctggaca

SEQ ID NO: 491578 - DNA, 629 bp, Homo sapiens
ggcatagtccatagtttcctgatacctttcttaagatttccttcctgaggaaactgtgtctcacagaggaggaacgacgcctctgaccacatcctgctgttcttgtgtgtggttgagcagtttttatcagatctcagggaaaggcaaggtgaagtcacctcctaacacttctcttttttccctatagacgtttagaactagaagccttagagctggcacaactggatgtgtaaatatgttttgccaagtaaggagatccatttaaacagggaccatttaatggtgaaaatgaaaatcttgagcattcagcctgggagatgactgatgctggagaatgccaataaatgtataaaaatctctctattgaaaaatcaaagtgcttttacatccttgtctgtgacttctgtttttaatccatttaggcaatgttgattttttctctcttaatgaatagcaattgagctgtacattttacataccartaagtgactacgagatgcttttgaaaattagccaccagcaagtacatttcacatctgaagcaacattttggcagatggactcagcttaaaattgggactgccgtgaatagtcccaatttcagaatcaagttaattccatgtggaacc

SEQ ID NO: 491579 - DNA, 604 bp, Homo sapiens
tgaatcagcactggaatggcactgtgtggtgtttggaatctgtgttctaccttgtggttccatttgacaaggactctgttcccaaaccagcagcctttaagttctagttagcaggatagaggaagggataaagaaggggccaagagcatatgccagttcctctgaaggcaagtcccagaaactgatctgtaacacttctacttatatttcactggcagaaatttagtctaatggccatacyttgctgtacagaaagttgagaggtgcaatgtttagtcctgatggccatattcacagctaaaataccataattttggaagaagggtaaggcagatattaggaagatgagttagtctctgcattttttggatagacagaaattagagtgttaaaacaacagccgtcatctatttgctcatgaatctggacttcagacagggctcaatggggatagttcatgtctgctccatgcaggatcagctaggaggctcaactagggactggaggacctactcagtagatgagtcacaggtggcaaattggtgctttgggctgtggacccgggttcctcaccatgggctacttgggcctcctctctgccttg

SEQ ID NO: 491580 - DNA, 640 bp, Homo sapiens
attgatgccctttaatctcattgagaaaccctcttggccctggccacagggataaatttggttggcacttctggctctgctgctacaggcacatggcttgtctggtcctctgtggggatattaattgccatcactgctccttttttaggagcctgtgttatatctgctgcaggacaaatggcttttcatatatccacagagttgtatattcatcatcacttttggaacattttcatcatcctccaaagaaactccatacccttttgtcatcactctctaacctcccctaccctcccatcctctgccctcatcaccccctgcaacacatacatgcatgggaaactagccatgtgcacaatgagaaagctctgttgcaaatacaataagtgactttgaatatgaatgtcaggattattattattattttaatttatttaatttatttattttttttagagataaggtctcactatgttatccaggctggtcctgaactcctgggctcaggcagtactcyaacctaggcctcccaaagtgctgggattacaggtttgagctaccacacctggctgcaaggattactttgttttcaagtgactaaaacccagactaaacagtcttggacaaaagggagaatttt

SEQ ID NO: 491581 - DNA, 654 bp, Homo sapiens
cttcccaataaatattttagatttagagatttgtctctatattttatttgactccaacaaagtggatagcagatggaggtccatgcgggagaagatctccaatccctcctttgtgatacaatctgcagtacaaataatcaatttttccacaaggcaaatgagccaatgcatttgctgggggagcagggagaaacatgaatcagcatctttctcccactctcacttttcttcctgcaggatataaaatttgtgctagccagaagggggcagaagagaatatggggcttgggctctaaaaaatgcctcttgatatatcacaggagggataaaatagatatgaagttgaacyttgcttccataacttaagaaaagtgtggctggggagaggtttctaaccaccaaaccctattttctcaactttaaagtacctaacttgcaggataattatcatcattgagattacgtacataaaacggacagcattgggcctggcatagagttcattataattgccagtttatcgattgatctatatagtatagtctgcatctatcttgttccatggtgctatccctgccaccaagcacagggctcagcgctgggatttgttgaatgactcttcctctccatgacaatatctgggccactgttcgt

SEQ ID NO: 491582 - DNA, 650 bp, Homo sapiens
agattattatttcccaaatgagagttccatggtcacataaagtttgaaaaaaatctaggtactttagttctcttttgtagagaactaaagcatatcattatttgaaaagttatgaaaacaatttttgcactctgtttatcacaaatttattgtccatttaatttggaaaatgtttgcttttgccactcttctacctgttcccatattaatcaagtttttggtttagggaagaactaggctgaatgcctttccttttatcattagtaaggtgacagtctttgcagaaatttccccagttgactatctctgaagtcttttttggacaaggaggatatgctgagctgtgtgggatgccatgcaagtcaatggtcaacaarggagaatgggatgatcaggacataattggaccaatcttttcttgtttattttagatttgggggcacacatgcacgtttgttacatcagcatattgcataatggtgaggttgggcttttagaaaacccatcactcaaatagtgaacattgtatgtaataggtaaattttcaactctcaccccctccatcctcccctattttggaatcctcagtgttcattatttccatctttatgtccatgtgacccattgtttagctcccacttataagggag

SEQ ID NO: 491583 - DNA, 451 bp, Homo sapiens
ctctcctgcttaattcttcagtgcctttctcttgttgtcagaataatatggaatatcctcagtctggaacacgtggcctttgtatccaggtccctgcctgtgttgcaaccccacctcttattaccaccctccaccacattcccagtgttttggcattttattcrttggctaaggttgccataacaaataccacagaaaagatggcttaaacaaacagaaatgtatttctttcatggttctggaggctagagctgcaagacaatgtcagcaggtttggtttgtcctgagtcttctctctctggctggcacatggctgctttctcacagcacccacaagtgagtggtctttcctctgttcatccccgatgccttttcctatgtccaaatttcctcttcttataaggacaccagtcgtattggatgagggcctaaagacatcattttagcttaa

SEQ ID NO: 491584 - DNA, 578 bp, Homo sapiens
actgggaaggcacaaaattaagaaatcaacagttttctgcaaacttctttgtgccatgcactcctctggtactgttacctttattcgtgattaagtatcaccttactgctgatttctacactgagattacatggatacaggtaatggcctatatttgaagcaaagtaaaaacatttagaagacttgccttgtgagagactaagccaattaacaaagcagactgaccatgccccttttgctattccagggaacaaagactcctatcattctgtggaggtatccaaagaattcaagtagttatggcagttttgggcaaggacccaattacatttcaacttaaaatttcacaaggcttttcaatacaacacacagtctggaratcccaaaagaattcttcaaaaatggaacttaaatgttaaagaaattccttaaaaataaattaatatgacaatgtgccaagcactgcattcattccaagcttagaggggaagaaaaaaaatacacacacagacacacataggttatttagtgtgtcaaagttccataaaataaaaaaattcattttgtacacccttgat

SEQ ID NO: 491585 - DNA, 602 bp, Homo sapiens
ctggaattgtgtattatttttagcattctaaactgactactagttgattctagtggataagatgaaacatttggtcctacagttgcaaatctttgcaacagtgaaaatcatgctagtatagagatcctaaggaaaaggctcttgaggagaaaaaaactatatactcacytctattagtaaatagtcattggaaggatttcaatatttacttgactaaagagtggaaatataagaatgtattaccataaccttcccataaattcttttaaactatgtgatgattacttcttagttgccaattgcctactgtttgcatccccaatgaaaataagccccacttggttatgttgtcaagaattctctccttccactgttgctttttctcttagctttctccaggtacttcttattaaagagatagcagaaagtttgtgtatgtttgtgtgtgtgaaaattgctttgacaaggacatgtgctcattggctcaatgttcatgtgttcattggctcaatgttcaactttgtggaccaaatcaatttgtttcatgacaatttaaagtaagctacagtaagacaggcagtgcattactatcatggtggatg

SEQ ID NO: 491586 - DNA, 602 bp, Homo sapiens
ctggaattgtgtattatttttagcattctaaactgactactagttgattctagtggataagatgaaacatttggtcctacagttgcaaatctttgcaacagtgaaaatcatgctagtatagagatcctaaggaaaaggctcttgaggagaaaaaaactatatactcaccyctattagtaaatagtcattggaaggatttcaatatttacttgactaaagagtggaaatataagaatgtattaccataaccttcccataaattcttttaaactatgtgatgattacttcttagttgccaattgcctactgtttgcatccccaatgaaaataagccccacttggttatgttgtcaagaattctctccttccactgttgctttttctcttagctttctccaggtacttcttattaaagagatagcagaaagtttgtgtatgtttgtgtgtgtgaaaattgctttgacaaggacatgtgctcattggctcaatgttcatgtgttcattggctcaatgttcaactttgtggaccaaatcaatttgtttcatgacaatttaaagtaagctacagtaagacaggcagtgcattactatcatggtggatg

SEQ ID NO: 491587 - DNA, 602 bp, Homo sapiens
ctggaattgtgtattatttttagcattctaaactgactactagttgattctagtggataagatgaaacatttggtcctacagttgcaaatctttgcaacagtgaaaatcatgctagtatagagatcctaaggaaaaggctcttgaggagaaaaaaactatatactcacctctattagtaaatagtcattggaaggatttcaatatttayttgactaaagagtggaaatataagaatgtattaccataaccttcccataaattcttttaaactatgtgatgattacttcttagttgccaattgcctactgtttgcatccccaatgaaaataagccccacttggttatgttgtcaagaattctctccttccactgttgctttttctcttagctttctccaggtacttcttattaaagagatagcagaaagtttgtgtatgtttgtgtgtgtgaaaattgctttgacaaggacatgtgctcattggctcaatgttcatgtgttcattggctcaatgttcaactttgtggaccaaatcaatttgtttcatgacaatttaaagtaagctacagtaagacaggcagtgcattactatcatggtggatg

SEQ ID NO: 491588 - DNA, 620 bp, Homo sapiens
ttaaattcaagtctgtctgctgttatgatatatacctcagaatgtttacgtttctttaagataatattgggtttgctgttgtttgccatgttcttcatttcaggaacatgtgcaaatcattatgttcaccataaatcatcacctcccccataggcattcatgtatctgtattttatttttcattttattttattaagactgcccaaaaccccaaaaatacagattatctttgagactcttgwatgagacatctatgtacaatatcctgaaagaataagatgcttattaaagccaactaattgctcctcatcttgttagtggaaatgaagtctttatattgagctgcctatcctcaccctgagagaataggagcttctgtttctttcaattaataaagcatgtcaactactgctttgttgtactacaaccccaaacccatatctgtatttgtaagactttggaaaaggcagatggatatagttacgcaccttgaacacagaagcagttcttgccctgatctgataataggatttcctatactaggacaggtttgtgaaaacatatgtagttctgaatttaaaaactaaaatgtactcaagataatactatcctggagtatc

SEQ ID NO: 491589 - DNA, 620 bp, Homo sapiens
ttaaattcaagtctgtctgctgttatgatatatacctcagaatgtttacgtttctttaagataatattgggtttgctgttgtttgccatgttcttcatttcaggaacatgtgcaaatcattatgttcaccataaatcatcacctcccccataggcattcatgtatctgtattttatttttcattttattttattaagactgcccaaaaccccaaaaatacagattatctttgagactcttgaatgagacatctatgtacaatatcytgaaagaataagatgcttattaaagccaactaattgctcctcatcttgttagtggaaatgaagtctttatattgagctgcctatcctcaccctgagagaataggagcttctgtttctttcaattaataaagcatgtcaactactgctttgttgtactacaaccccaaacccatatctgtatttgtaagactttggaaaaggcagatggatatagttacgcaccttgaacacagaagcagttcttgccctgatctgataataggatttcctatactaggacaggtttgtgaaaacatatgtagttctgaatttaaaaactaaaatgtactcaagataatactatcctggagtatc

SEQ ID NO: 491590 - DNA, 553 bp, Homo sapiens
ttagtttttacacaataaacaattggkttcatcagcggaggtacaagtaggagaacatttgccatgagaacattaatgaggggagagacatgcccggcaaagcggtggacaacggccaggttgatgatgggcaggtagaagatgatcactgcacagatgtgtgaaacacaagtattgagagccttaagctcctcctttttggatgcaattcccggtacagtcttgaggatcagggtgtaagacacagcaatgagaataaagtctaccataaggcagagtgctccaaaaaagccatagataacatcaattctgttgtcagaacaggccaacttcatgacatcctggtggagacagtaggaatgggataattggtttttcttgcaatatctcaagcttcttaaagtgaaagggaagggaagaaccaggagcatgctcttaaaggagaatactatccctatttgggcaactctgacagttgtcaggattgaggtgtatctcagaggattgtggatggctaggaatctatcaaatgacatgatcaggaggactgagg

SEQ ID NO: 491591 - DNA, 553 bp, Homo sapiens
ttagtttttacacaataaacaattggtttcatcagyggaggtacaagtaggagaacatttgccatgagaacattaatgaggggagagacatgcccggcaaagcggtggacaacggccaggttgatgatgggcaggtagaagatgatcactgcacagatgtgtgaaacacaagtattgagagccttaagctcctcctttttggatgcaattcccggtacagtcttgaggatcagggtgtaagacacagcaatgagaataaagtctaccataaggcagagtgctccaaaaaagccatagataacatcaattctgttgtcagaacaggccaacttcatgacatcctggtggagacagtaggaatgggataattggtttttcttgcaatatctcaagcttcttaaagtgaaagggaagggaagaaccaggagcatgctcttaaaggagaatactatccctatttgggcaactctgacagttgtcaggattgaggtgtatctcagaggattgtggatggctaggaatctatcaaatgacatgatcaggaggactgagg

SEQ ID NO: 491592 - DNA, 553 bp, Homo sapiens
ttagtttttacacaataaacaattggtttcatcagcggaggtacaagtaggagaacatttgccatgagaacattaatgaggggagagacatgcccggcaaagcggtggacaacggccaggttgatgatgggcaggtagaagatgatcactgcacagatgtgtgaaacacaagtattgagagccttaagctsctcctttttggatgcaattcccggtacagtcttgaggatcagggtgtaagacacagcaatgagaataaagtctaccataaggcagagtgctccaaaaaagccatagataacatcaattctgttgtcagaacaggccaacttcatgacatcctggtggagacagtaggaatgggataattggtttttcttgcaatatctcaagcttcttaaagtgaaagggaagggaagaaccaggagcatgctcttaaaggagaatactatccctatttgggcaactctgacagttgtcaggattgaggtgtatctcagaggattgtggatggctaggaatctatcaaatgacatgatcaggaggactgagg

SEQ ID NO: 491593 - DNA, 553 bp, Homo sapiens
ttagtttttacacaataaacaattggtttcatcagcggaggtacaagtaggagaacatttgccatgagaacattaatgaggggagagacatgcccggcaaagcggtggacaacggccaggttgatgatgggcaggtagaagatgatcactgcacagatgtgtgaaacacaagtattgagagccttaagctcctcctttttggatgcaattcccrgtacagtcttgaggatcagggtgtaagacacagcaatgagaataaagtctaccataaggcagagtgctccaaaaaagccatagataacatcaattctgttgtcagaacaggccaacttcatgacatcctggtggagacagtaggaatgggataattggtttttcttgcaatatctcaagcttcttaaagtgaaagggaagggaagaaccaggagcatgctcttaaaggagaatactatccctatttgggcaactctgacagttgtcaggattgaggtgtatctcagaggattgtggatggctaggaatctatcaaatgacatgatcaggaggactgagg

SEQ ID NO: 491594 - DNA, 546 bp, Homo sapiens
actgcttgagcccaggaggttgaaactgcagtgagccatatctacaccacagtactccagccacttcagctttgrggacagagcgagaccctgtctcaagaaataaaaaaaaaataggaatgaaaaaagaaaatcctgtttgttcaaaagtaactactatggttaggcaaaggcaggaaatgttagaagaaatgcagcgagaagtccttggaaggagtatattttagcattggagtctgggctacgtgaaggagatgttgacacagatccaatcctaaactgttagggagggtgcagtatctctctgagactgtgtcatgagggatctctgcccttttcctgagctttagagggtcatactctagactttttctctctatgagaagaggagtccacgggctaaagggttgtgccccccttaagcccactgtggtagaaggaattctaagatggcacccaagattcacgcactctctatcttccccctctttgagtgtgagtgtgacctatgaatcacactccatgattaggtgacattatatggca

SEQ ID NO: 491595 - DNA, 489 bp, Homo sapiens
caaactcaaggacttccatagctactgggaaccagcacagggctgacacctccattgaactctctttgctattctagaatattttaataatgagacacacccaaaacatgtttagaatcatgccacctgctgcttctcatggccagcattatttgtcatcaaatctgatcccaatgtttgccatattattggatatcctgtgaaatagaatctaaaaatatacattttttccctctaaatcggtcctaaccttacagctagggttgcaactgtamtattgttgtctgtttcattttactttccaggattaggtaataatattaaattccccatctcatgttagtttctgtttgaacttggcctggtatttgaagaatatatttagaagttaaagcgtgctactttttatcccatgcaagccagttgtgggttcatagatctgtggtatctcataacattttctgtcctaaactgaacacatccagtctc

SEQ ID NO: 491596 - DNA, 489 bp, Homo sapiens
caaactcaaggacttccatagctactgggaaccagcacagggctgacacctccattgaactctctttgctattctagaatattttaataatgagacacacccaaaacatgtttagaatcatgccacctgctgcttctcatggccagcattatttgtcatcaaatctgatcccaatgtttgccatattattggatatcctgtgaaatagaatctaaaaatatacattttttccctctaaatcggtcctaaccttacagctagggttgcaactgtaatattgttgtctgtttcattttactttccaggattaggtaataatattaaattccccatctcatgttagtttctgtttgaacttggcctggtatttgaagaatatatttagaagttaaagcgtgctactttttatcscatgcaagccagttgtgggttcatagatctgtggtatctcataacattttctgtcctaaactgaacacatccagtctc

SEQ ID NO: 491597 - DNA, 566 bp, Homo sapiens
tggggaccttaatattgatacggkgcttgtacactttaaaatatttccacatatgttaagcttgtggtgatcctctgaggcatgacagatactattttccttgtttcatagaagagaaaatttgaggttccctggcttccagtctggcactcttcctgctattccatgctgtgttctctgattgaaaaatagtaagtctttggtattccccagcttggtcaaatctgtttaaagatcacttagcccacttttttctgagtccatatgaaccaagtgatcctttaatctgccttattgagtaaatgcacccttcctgaagtaagtgagtgccctacagagttaggtgccaagctgagctgcagtcatgggttatttactgccaatttggcatcaccaacactcccttctaagggttcctctgtcttttgagaagctgggagctatatttgcagaatgcctttccccatatgtttacagattggttgaccaagaagtcccttcttgctgaagatttggaaggctgaaacgaacaacaggctagaggtggttataggcagaaatgtgga

SEQ ID NO: 491598 - DNA, 443 bp, Homo sapiens
ctttatagcagtgcaagaatggactaatacaccatacaagcaagaagtatttctagagagtgggtagaaaaggcttccttatgatctccaagaattccctctcakaaatgggattatggtagcaaaagacaacaaaatccccataggaatgggtccctttaataaaaaattcacctaagtgcctgatacattcaggatggagaatgtgctgatgtttcttggactcccagtctttcaaaccagctgcctgatatgaacctgaaaatttctgccttctggatggcagaatatccccacatggttaaaagtcaagctcccaaggacatgaaacaagataagaaggaaacctcatctagtttttgcttcagggacctgcagcaaagatgtatctgaccattctgcagggccagctcaactggtgggtatataggggtcctaggcca

SEQ ID NO: 491599 - DNA, 629 bp, Homo sapiens
gctggttcctgttgataatgaggccawgaccggggccttcactgaattcccacatgtgcttggttgcaagccacactcaggtgacagtcttgcagttgctgctattggtcacatgaagactgggaaagagagtgcatcagatcaatataaacttatttctcttgcaaaacataacaactcaaggcacatgcattgtgaatattgggtcagaagcattatcttcatattcaaagactagcatgtaattatcaagaacagaaatataaagaacataaatagcctgatgatagaattggtgcacatttattattagaaattctatttgaaatccagagaagagtaactgaatggataaaaacataccggatattagatgacagagaatatgagaaaatttcaacttttttttccggttgaatttagcaatgttttgctccttagttgactgattgaataatttgcctctcccaggatgtaaattctcagagatattccttctgccattgtgccaatctaggtcacagctaggataggatttatatgctgtcctggtcaatatccttcagaaatgcccagcagaacacaggcacaaatattctccttcaacaaatactcattgaatatgaaat

SEQ ID NO: 491600 - DNA, 611 bp, Homo sapiens
gctgaaggccatgggcaacattcacatcttcagagtaaagactgttttagaagtccgtgggcaatcaccagtcacacagggagttccagggaccagccagttgttcctttcatgagttaggaggcagtaaggacatcacagtgatcatttccactgaaaacgcaaatgtaatccactctgctactcagcagttaatgctgacttttgaaaattataaagcaattatcaccatggtctccttctaggtttatcagtgcagtcagctcagaaaactttcattccttcagtatatccagctacagctaatcagaaagggaacaatgaaaacaggctgacatttgattcagaggttctggaaagaaagtggacctggcaacaaagtgactgcacttagaatcccccaacctaatgtattcagggtccagrgtagaccatctggggctacaggggagagaagccagtttcagaggctattataagcagctctgattaacatcttaggaccacaagacaaattatcattggtatttggaggcaaaaggtcttggatgctctgggcctgggtgaatatctgggtctaacacaattctcagaaaggcctctgggtccat

SEQ ID NO: 491601 - DNA, 602 bp, Homo sapiens
tctttaaagtatcttttactattttaatcataaaataccatttcttactattcacttcagacatattaaatgtgaaaaaaaggtgattcatttttcaaataagtaaaagtattataaagcataagacttggtttggggagaggatgtcttttcttttaaatgaaaataaactcaaattaaagccacccttgaatatttaaccaaaatttcagactaagagaaatgaatgatcactcacacaaaatagattaaygaatcagctaacaaaagaaaacttagatttatctgtcaattcactaaaaatcacaaaacttaatactatcatttaaacatcctatgacctcagcttcccttcataatgcttaatctaaactaatataaaataggacttaaatatgcataggaatcacctagggaacttgtgaaatgcagattcaatactcttctgcatatctaaccagtttccagatgctgctgttcaggagactacactttgagtagcaaaggaatacatgacatttacatttagctcagcagcagcatctataaatgtcactagtagctttaagaacacaaactcaatttgaagtcacaatagtaga

SEQ ID NO: 491602 - DNA, 599 bp, Homo sapiens
gtgtgtgtgtgtgtgtgtgtgtgtgtgtgtgtgtgtgtgtgtgtgtgtgtggtggtgatgatggtggtggtgggggtgctccaaagtgccaatgcttatcaagaagtcggtgaatgaggttttaaaaaattgttataaaaatttatacatatcaggatcaaggtatcttacatttttatttttaaaatcttttaaaattttgttttatatcctggaatttaatctctgggtagcagaaagccaaggaaggtttctaagaaaaggaataatagaattggagtgacatgaccttggcaaatgacagatctcaaaccatttcagcaaagggatggaagacagtggaaagaaaggggaggaggatgtgataaagacaggatgaatggaacaatatcctggagaaggcagcaagggtggttcagaggaaatcattgtttcccctatgtagcttaccctttaatacatttgctgatttccatgaaatgaatgtagcaattarttgaaataccttggctcacttctgcattttcacagggtgttttatttgtgcagagaccactgacatttggcaggctcttgactgcttcaaacagcctgaggtg

SEQ ID NO: 491603 - DNA, 609 bp, Homo sapiens
tgaaatatttgacactggttaaatartgagtccgatctagatctgagaaaagaatattgacttccagtactgcttgttatatagacattaagttttgtggctttgagcatatggaaataaacctcccctcctctgtttagagtttagaatgataaaaaccttccctaatcagatgacagtctatgtttaaaagcaactgtgcttaaacagatgtagtaaataattttcaatgtattaagaatgtattaagatgtaaaatgtattaagaattctcatctgggcaacatattacaagggagatgtgccccaatacatgctctcaggtgataaccactgattttaatgaacccaggagagaaggaagctgtggtcctttagttgtaataagggaccttagcacatttcaatcttcatgaaaccacagaaaaccatagtcacatttgatttgtattctctccacaatcaacttctggaaagattgtattagtttcctgttctcaggacagggaaagagtatgtttgtgaaatatccgaattagagttttattttgtttgtttggttttccagcctgtccagtggtacacaaggatggcattgatcttgcaggt

SEQ ID NO: 491604 - DNA, 609 bp, Homo sapiens
tgaaatatttgacactggttaaatagtgagtccgatctagatctgagaaaagaatattgacttccagtactgcttgttatatagacattaagttttgtggctttgagcatatggaaataaacctcccctcctctgtttagagtttagaatgataaaaaccttccctaatcagatgacagtctatgtttaaaagcaactgtgcttaaacagatgtagtaaataattttcaatgtattaagaatgtattaagatgtaaaatgtattaagaattctcatctgggcaacatattacaagggagatgtgccccaatacatgctctcaggtgataaccactgattttaatgaacccaggagagaaggaagctgtggtcctttagttgtaataagggaccttagcacatttcaatcttcatgaaaccacasaaaaccatagtcacatttgatttgtattctctccacaatcaacttctggaaagattgtattagtttcctgttctcaggacagggaaagagtatgtttgtgaaatatccgaattagagttttattttgtttgtttggttttccagcctgtccagtggtacacaaggatggcattgatcttgcaggt

SEQ ID NO: 491605 - DNA, 507 bp, Homo sapiens
agaaagcacaatcagctgaatcatcttaaaatgtgcagatagggataactgattgcaccaatacttttacatatatacaagtgcaatccatcactgtcatcataacagttaccctgcggaaaaattttataaaacctaagtttacttgtcattatttaatttaatttatttatttattaatttatttattttgagatggagtcttgctctgttgcccaggctggagtgcagtggcgcgatctyggctcactacaagctctgcctcccgggttcacgccattctcctgcctcagcctcccgaggagctgggattacaggcatctgccaccatgcttggctaattttttgtatttttagtggagccaggatttcaccatattagccaggatggtctcgatctcctgacctcgtgatccacctgccttggcatcccaaagtgctgggattacaggcgtgagccaccgcgcctggccacttgtcattattttaataactcagcacttgtgg

SEQ ID NO: 491606 - DNA, 507 bp, Homo sapiens
agaaagcacaatcagctgaatcatcttaaaatgtgcagatagggataactgattgcaccaatacttttacatatatacaagtgcaatccatcactgtcatcataacagttaccctgcggaaaaattttataaaacctaagtttacttgtcattatttaatttaatttatttatttattaatttatttattttgagatggagtcttgctctgttgcccaggctggagtgcagtggcgcgatcttggctcactacaagctctgcctcccgggttcacgccattctcctgcctcagcctcccgaggagctgggattacaggcatctgccaccatgcttggctaattttttgtatttttagtggagccrggatttcaccatattagccaggatggtctcgatctcctgacctcgtgatccacctgccttggcatcccaaagtgctgggattacaggcgtgagccaccgcgcctggccacttgtcattattttaataactcagcacttgtgg

SEQ ID NO: 491607 - DNA, 384 bp, Homo sapiens
cactcattacccacaaaaaaaagaatagtgcacacagttttttgtgttaatactgtgtattcacagctaattagcagcattctctaatttgagtcattctatagtgaggcattttattcttgtaaacaatcccaactgttctaatctacacttctcttatgtaatagaacaatcaagataattatgaattactattgtctcccactttcatagatctgtagaattagccagttatacaagagctggtagttctcmaagacttttaaagctgaagatcactttgtaaaaatgaaatcctatactatgtcaaataaataaaacagacccatggttctaattccactaccattcacttagtacacaggaaatagtccaagtgggaga

SEQ ID NO: 491608 - DNA, 632 bp, Homo sapiens
tgggtgttatactttctgttgtacatcccagaagtgtgtaagctctgaaacagtggaaggcctgataaattctatttcatttctgatgaccaccatatgtacaagttaaaagattgaagtttcttttccaggattaataccagggagcaatttagccactaaagcaaatagaactaaaagggaagctttcttaggcccctattttgttaatttcctcaagatacttggaaaataatattwaaaaaaaaaatgaatatggcactcttgttttttatagttaatgaaaacagccaaatagaaaagctaagagttttggaaattactggaaaagttttaagatctgttatttccatggtttccctaatttatgatattggtgaatgctggaaacagaaatggaaggccaccctggactgatgggccccagttttccttctttcctgtgctttcctaaagcaaaagattcctcaaagagtcttctacacccctgggagatacttgggttttggctttcttgccttctcatttccctaacaaaacctccttcctcggtttacagaggaagttccagcccagcaatacttagaaattgatgaggtgacgacagacagttttagggtgacctggcatcc

SEQ ID NO: 491609 - DNA, 313 bp, Homo sapiens
cagccttttcacaacttggtctacagcactgtctaatttcccttaattaccatggctrtgcccctatttcaaagtaattgggtggtttcacaattctgtagatgtagttcaaatgtttatatgaagcctggtatctgtgatgagaaactttaacattctttgggtttcagttttcttatctgtggcacaggtatgtctgccttacttacaattcatttctttcgtcttctaaccattgtcatgtttgttgtgggaggcaagtgagataatataggtgaaatgttctttgaaagctacaacatgctatagaaaa

SEQ ID NO: 491610 - DNA, 572 bp, Homo sapiens
aactcagtctagtggaaaagactgcctcataccccagtgattcccatggaatgttttaagctcaataacwaagctacacacaggtgatcatgagggcatcgagaaggaacccagtccagacacgtgaaccaggagtctcaccctcttgggaagataactagggaactatcttggcatttatgaatatatgcaataacccacattcttagtaaagctttaatttaactctttattatattaataaagtataatcattgtcatcagcatcttccagaatctctgatttcttagaggaaagaaagctgtgaaaagatagccaagtgcactgaagatattagacaggccaggtgctcagcgaatgggacactcagagaatgggaatcagtatggtctgggtttctgttgcagcccccaacttgacccctaccgaaaagatgcctttcgttgtggagggtggattcaggttttctgttgtggttttaaaagcaactacagctcctgtgaagtttccctctgactcctttaatgacttctttcaagcattttcctttttaatatttatttatatttaa

SEQ ID NO: 491611 - DNA, 229 bp, Homo sapiens
ctggacataaattatatttattactgtgaggaaaacacttagttgtaacctctcttacaggaaagtttttgaatttttaagatatgactaataacgatttatgaggtacaacttcacaaggagaaaaaggatttgagtgaaaacttttggaggtaaaatagaaaatcacaagtgtaactatagatgaactcctatagaaatcatctrctaacttaattgagcaagtgaa

SEQ ID NO: 491612 - DNA, 637 bp, Homo sapiens
ctctgctttccattgccaagcatctttggcacaagagctgtaataagaagtgtaatgaacataaaacagtttttagaatcactcctttggtagctggtatatgaagctgacaaggccccctctgccaaagctgcagaaggtcgggcatatccttcccttagctcatatggctgcagaggaaggaggtgtctttctttgggcttcatcgccaggcaacccacacactttgatgctcacctgtctgccttgggggactggagttgaatgactgcttgttttgctcctgggatctgtgggctccacagtcgtcccaggcctccttgcttaatcggactcccacccatgrcatctgagtagttcctcttctggtcctgtcactatcatctccctttctctctctcaaggcctgtccttctgtagtacatctttttaataactggtaagagtctcctccgaccttccctttggagaccttttctcttcagtcaatccccgccccacccaatcccatcccttgttctcagcgtcctgctcacaatcccttttactatgccactgacttacccagactggctaggacatctctatttgcattgcattgcaatatggactgaggtgagcttgcctatgaaatcag

SEQ ID NO: 491613 - DNA, 529 bp, Homo sapiens
atgatgccacccgctacagggactctagggcaatgccagggatttgcaatatattttactttttggttttgtttaattttagcttacacaaaatgtacaagtcagatgtggaagattgtctcatattcaaggatttcaggctaagttatggaaaatcagcatgagacagagagaagggacagagagagtatgtgagagagagaggggggagaaggaacagacccactgagccacttgaaaactccacggtctgtaaacctgctctggccatgacagaattctttattgtgaagacaggtctactggcctgcasgtcccttgcaaccacgtggctgaatggtaacctgaactgagtcagccaactgcagccccttctccaaaggccctgaggggaggcgagaggcaggagcctctaccccaagagtgcccatggtcaaaaaggagagaaacccttcctgctcttaggaaatcccaacttatgaggcataggtaggtcctagtgctggcaagcttttggcttaccagaaaa

SEQ ID NO: 491614 - DNA, 558 bp, Homo sapiens
tctgtcttcgtctagccttgattatctgtatccatttacttcaaagggaatgaaacattccctgggcagtagcagaagccacagagaaactcaggtgtcttaaccaagtctggcatcctatgcattaatatcccattgctaatagtaattcatcccatttgtttatttattaatgacagttatatgcattgctcagataacttcctcatccaaattaaatattagcatattaggtcaacaacatcagtcttctgaaggtgatatctctctgaagtacaaaagggattcaacaaatcaagcaaagacctgtagcctacttcctaccaggcattttcctaggtactgtgacacttagttcattcagaagactaccgtgatagacaagctaagaaatgtctttgtggaagaacaaaaataatcttcagtacatcatctttacaaaagtgtagacatatcctaaacagctctatctccctttaacaactcattgtgagtactttatccatgcagttatctgaatcccttcagcatrtattctgttcatgtctctagcactgc

SEQ ID NO: 491615 - DNA, 502 bp, Homo sapiens
caacttcaacttttccttttatactgccagcactttgaccacagacttcatatcacatcaattatactgtggttccatgatagttatctgtattcctctcttattagccatatggagggagggttcacgacttattcatctctgtgtccctccctgacccccttaacacttaaagttctgcactctgtgttcaaaaaatgcttttcaatttctgaaaatgaattaagtgtcccttattaacaaccccaaagctttttaacaagcgcattccaaattttttttaaraagttgacttcttaggctcaaatattctcatttcatccctatgcaaatatttgtatagggaccacattagagctatctgaaaataagaagttataatggaaacagtgacacagccttaagtgaggcaaccgaaataggaactactttaatacttttactgaaatgttctctgcttgataaagttcattaccagaatatcatctttaaaagtgaaatg

SEQ ID NO: 491616 - DNA, 566 bp, Homo sapiens
atttctcggaaagtcattccctctgtaataggaggaaggaagagagctgttgaggacaaacccagcaacctgtgcaggaatttcatttgctgttaagaaacaaggatttatcggtgtaggtcaaagcctgaggcatttcatggtagatatatttaatcagaaatgttctcactaatgttccaggtgcccatttaactctatgcatggtcaccttaccatctcagtctcaaaccactattatccagaaaggatgatttaggtacctgtatgggraaaaaaaattctgagggtctgaaaggagtattttacaaaataccatgggtcatggagttagtgccaggagcagggtgagatggaaaaattcaggaagtcaagctggagagagagctggggaagtcaactctttcagagttaggcccaagtgggctatgcttttccttggtctcattcaggaaaagacaaatgtcgctggaggtcatatcatttctgggacaggcctagatgtgtaaattggcctgagacccttcagagttgtttgtgtggtcactgtaaaccatggggagcgc

SEQ ID NO: 491617 - DNA, 594 bp, Homo sapiens
tcatttattagcatgttactggcatatctgccagatatatgagcrgccctatcacagttccttaggattattttcatcaagattaaaacccttctacattaaatatacatactaattcctccataaagtaatcagattacagagcaggtgacattgtgtgctggaattcaaatgatttgcagtaatgagctggaaaggtgtgcttggagtcaggcagagaaaagggaagaggaaagacaagggaagaaggaaggctttggttttaaatttgagcttgcacatctgttgttttattgttttgctaacttctacttatttatttatttattttttaataagtaaagaactcaggcaagcatctatgaaacttagcaacccacggtgtcaatcatttaaactattaaatgctacatgcttctagcttatcttgccttctttgtccacatattatctaaagacagggccgggaaatatttcctgcggtcgagtggtactcatagatcaatgcctaggaatatctttgcggttgaatgggaatgttttatctcctcacatgatcgatctacctttctgttttaaaatttttattcctta

SEQ ID NO: 491618 - DNA, 615 bp, Homo sapiens
cctacttctgctaaatttggcatttggacaaagcatgtatttaattcacctctcattagacaagcattttaaagataggcattgtatctgtaggtgatagtagacctctagtcaaatataaatcaataatatgttgagttagtcaaattataaatgaacacccagatctctgaaggatactccagaaactggractctcttctgaagaagagatatgggtatccagaggtcaaggctggtagggaagtttacttttgtaatatatacccttttctgtgattcaattattctggccatgtatgtataccagtttttaagtttcacatcttaaaatacaaaatttaagatgaaaactgaaaagtacatagtaatatctcagtgattcaaattcaaatattaaatatcaatttggcttaacagaatatatataatacaaatgtttctaccaaaactcacttttattactttaaattataagtaaccttagaaaataagtagcgtatcactaaataagttagttaaaaattaacagtatacatactttgcatcataatatatacaattatttgtttaacatttaaaaatcaattactggacacagaaaaagaaatgaca

SEQ ID NO: 491619 - DNA, 619 bp, Homo sapiens
tgggaggcactactggtatctagtaaactgaggctctgctacatataacacatggatttcctcacacaaacatgcacacacaatgaaacatcaccttgccctaagtgtcaatagttttgaagttgaaaatttctatttaaatctataaataactgaacaacactcctaatatcatacaacacatttttttttctagtaatttcacttttggtccatatgacataggtatgatacatatattttcaatgataaaatcatcacctcagcttataaggctccctgagatccaaaaggtcagaatttaattgagcaaacagcatcttttagaaaattaaaacagccagaagagcaataagttggaaaccattcattcatgcctttatgtgaattaaggtaatgagaakttattgtggggaaaggcagtcctgggtaaatgccatagaagaggggtttaggcaggtggaagacagcataagaatgcccggcaccacaggcctgctggtgggtgcctgtaaacccagctactagggaggttgaggctggagaatcacttgaacctgggaggtggaggttgcagtgagccaagattgtgccactgtactccagcctgggcaacagg

SEQ ID NO: 491620 - DNA, 507 bp, Homo sapiens
ttaaccagaaatttaaaatctttctcaatggaagcaatagagtatatcactgataaggtaaaggtgatccagtaaaaggtcacaacttagccccttctggacaaacaataaaaagaaayttgtctgctcgcatgttatgtggcatcaataatccagcctattttagcacatcaaatcccttctatgctttgaagccaacctttccctatatccagtatatactaggtagtcatggagggctcccccttgcaaagtaattataacggagctataaaagtaagaccagaagtaaagtgaagaaagggcagacagatggttcgttgccatattgtccattataggggagtggagaagtttacttaatttataatcatgggataatctgaagggaaaaaaaaaccccacaaactctcttttctctgctgtcaaactacagcaatcaacatagaaaacattttcccccatataccaagcaatcaatcaatcaattctgcaggggaaatcagc

SEQ ID NO: 491621 - DNA, 351 bp, Homo sapiens
ctggggaagtcacaaaaagtggtagcagagctgcttccagatgacatgaggctaggcattgactacagtagtctccagtggaagtcagtggtgtgtatatctgttattggctttttggtgggtctctcatatttgttcagatttatgcattaggctagaagctgacttttgggaaagaaaatgcaggttctgcaaatactggctgcaccagttctgatgaagcatccatttcttggcatacttagttctgatcaaaaggaatattwagatattgagtaatttttagaagataccagcctagaaaaggaatcgtaaaagatacaaagtcttgtggacgcatacataaagttg

SEQ ID NO: 491622 - DNA, 579 bp, Homo sapiens
ctgtctgcttagactgtctctgcctcctgcctctctcatttccccctttgaagaggcatgcataactgctgttagaatatggatgatgaccaatcttagctgcttcctgctgacagggggcattgttttggggaaaatggcagtcagatttccctcagaggtctacctaagggtycctggactcagaagtggctggagtcatcgtctgaggctccagttgcatgactgattggagtttgatgccctctgggtgacaagaattggttaagtacgcatggatcaaatatgtatgttatacaaaaaggagttaaaagaaaagaatctagtgccaaagattatagaaataagaagtgaaatacactaatcctcttgaaaacaacattatgccctgagctgtttcactgtagtgacagaaattaaactctgtatgggaacacttaaactttagaagagagataactgtttaggggagtacatattctcacaggcatttaggattaaggggtctttggtaaaggtgccccatggtataatatagaacgaaggtaagaacagcaagcataagcaagactataaagg

SEQ ID NO: 491623 - DNA, 575 bp, Homo sapiens
gttataattttatataagggcaaagagatgatctttgcaattgcttcaagtcctattgccctttgattctctttgtccagcctgtttagtctcataatatttggtcagttccaaaattttaagttatgaagatgtaaggtttttacattggcttatcttgtcctgtccacagtacgccttgcaaaaaattcaccccaaagtatatttcatttcccaaacttccaaaagggaaaggtagatataaaatacattctcaaacaaagggaaaattatcctatctacttttgattaatgtgttaaaatacattttaaayaaagaagaaatcagatttttattgcagtataacaggaaaaagttatcattttgttcataactttttcctcctgttgaacatagtgatattttaaaatatataatgagtagtagaatatgaattaaataaatttgtgctgcataaaaaagataaaaacatagtttcttccaacaacctagaggaactttctgtggaaatatgattgtaatggaaaaaagaatgcccaattgttttatgtattaataaagaattccattgggc

SEQ ID NO: 491624 - DNA, 674 bp, Homo sapiens
atcattaataaatcttaaaaagcataatgctgaagaaaaaaggaagttgcagaaaaaataccctcaataccatatcacttcacataaaatttaaaagcgcacaaaacttgggcatatagacaaatgcaataaaatattacaaactgcttatatcaattttaaacaccacattgaggtgttccctttcctataggaaagaaagggagagtaatgcttttaacatatctgtaatggtaaaaaaataagtgaaatatggcaaaatgttaaggtttgacaaaactgggtagaagtgtgtaagcattttgttttgtttcctccgtgatttttcgtttgtttaaaacatcttgtaaaaagaggaataataggttaggtgtggtggctcatgcctgtaatcccaacactttgggagacctaggtgggcagactacttgaggtcagcagttcaagaccagcctggccaacacggtgaaaccctgtcgctactaaaaataccaaaaaaatgaaccaggtatggtgctgcacacctgtaatcccagctacttgggaggctgaggcaggagaattgcttgaacctgggaagcagaggctgcagcgagccaagatcatgacagagctgatctgatcttgcctgagcgacagagctgtctcaaaawatatatatatatatatatatg

SEQ ID NO: 491625 - DNA, 464 bp, Homo sapiens
aatgactgacatcatcttatttataatttgctgagtgcttatatatatagcagtagggccaagggctgtacatgcattttcttttttttttttttttttttttgagatggagtctcgccctgtcatccaggctggagtgcagtggcgtgatctcggctcactgcaaacttcgcctcccggattcaagcgattctccttccccagcctctcaagyagttgggattacaggcgcgcatcaccatgcctggctaatttttgtgtttttagtagagacggggtttcaccattttggtaaggctggtctcgaactcctgaccttgtgatccacccgccttcgcctcccaaagtgctgggattacaggcgtgagccaccacgcccagcctgtacatgcattttctcactttccttttacatcccaatgatgtaggtactattattagctttttgtcttacagatgaagaa

SEQ ID NO: 491626 - DNA, 613 bp, Homo sapiens
ccaattcagaagaggtagatttgggccaggacaggaggatgcacaggacccaaggatgcagcggagccccaccccagggtgggaggcaggaactctccagccagtggtttcscagtgctggggtcctgccttgccagccgtctggtctccctctgccaagatctcaaggctgtggatcctatccacagagctagaccagctgagcactcacatctccccaaggggaggtttgtcaggtgacttgggccagacagggaccagagtcaaaaagtttgaattttgtaatgtccttttcaatggataaagcactctacagtgtataaagtgctcacccacatcgtgaagcacttcccagtgagtaaaggtttccagagtgcttctgccctccttgcctttcatcctcacagccactccttgagggggacttctcatcaccattttgcagttggggagactgagtctgaagtagccagcccaagggccccagcaagtgagttgagactggaaaccacgggctctgaatctgaattctgagctttttctgatcgggaggtcacggaggacaagacgtggcctgaaggtgtttctaacctcagatgaccagtgctgccac

SEQ ID NO: 491627 - DNA, 613 bp, Homo sapiens
ccaattcagaagaggtagatttgggccaggacaggaggatgcacaggacccaaggatgcagcggagccccaccccagggtgggaggcaggaactctccagccagtggtttcccagtgctggggtcctgccttgccagccgtctggtctccctctgccaagatctcaaggctgtggatcctatccacagagctagaccagctgagcactcacatctccccaaggggaggtttgtcaggtgacttgggccagacagggaccagagtcaaaaagtttgaattttgtaatgtccttttcaatggataaagcactctacagtgtataaagtgctcacccacatcgtgaagcacttcccagtgagtaaaggtttccagagtgcttctgccctccttgcctttcatcctyacagccactccttgagggggacttctcatcaccattttgcagttggggagactgagtctgaagtagccagcccaagggccccagcaagtgagttgagactggaaaccacgggctctgaatctgaattctgagctttttctgatcgggaggtcacggaggacaagacgtggcctgaaggtgtttctaacctcagatgaccagtgctgccac

SEQ ID NO: 491628 - DNA, 613 bp, Homo sapiens
ccaattcagaagaggtagatttgggccaggacaggaggatgcacaggacccaaggatgcagcggagccccaccccagggtgggaggcaggaactctccagccagtggtttcccagtgctggggtcctgccttgccagccgtctggtctccctctgccaagatctcaaggctgtggatcctatccacagagctagaccagctgagcactcacatctccccaaggggaggtttgtcaggtgacttgggccagacagggaccagagtcaaaaagtttgaattttgtaatgtccttttcaatggataaagcactctacagtgtataaagtgctcacccacatcgtgaagcacttcccagtgagtaaaggtttccagagtgcttctgccctccttgcctttcatcctcacagccactccttgagggggacttctcatcaccattttgcagttggggagactgagtctgaagtagccagcccaagggccccagcaagtgagttgagactggaamccacgggctctgaatctgaattctgagctttttctgatcgggaggtcacggaggacaagacgtggcctgaaggtgtttctaacctcagatgaccagtgctgccac

SEQ ID NO: 491629 - DNA, 336 bp, Homo sapiens
gtttctagaagctactgcattccttggctcatgctccacctcaccctgactcctgcttctgtcatcacatctccctccctcattttggcctttcctcttataaggaccgttgycatcacattgagatcacctggagagtcttctcatctctagatctgtaacttaatcacatctgcaaagtcccttttgccatgtaagataacatatacacgggttctggggattaggacatggatactttgggagccattattctgtctaccacaaagagcaaagccagacataagaatgagcaactaatgtttggagatggacctttccagctgaagcaaaggg

SEQ ID NO: 491630 - DNA, 554 bp, Homo sapiens
ggaaataaagctagaaatgtctcactgcatatacatttctttgaagtactgttttgccttacaaattcacgtaggtgttgcattttaacaccatattacctatttaatataaatttaatattttaaattactwaccattaggtaagatgtatcatactgtcctgaggtatcctctctttctctggaaccacatgccccagcttggaagtagagccctgcatgtaaagtgccttgaatgctaaaataagaaatttggatttttctctcgtaagtaatgaggaaccggggaatgatcagattagatggtgtatagtagaacctttcagtctagagtacgtacttatgtccttagggaaggtggtggtgctaggtagagcagttcttgaagcctcaagatactaaaactgatagtggtaattcaaatagtcatattcatttcacttatccccagacctctctcctactgttggggctacttggtacaaaagtccaagaagcactagatgctaggagctgggttagagggatggaagagggtgagcagggagaaaagt

SEQ ID NO: 491631 - DNA, 633 bp, Homo sapiens
tcttgataagactataaaaccagtgaaaatgagtatttcaaaaattaaacaatatgtacttaagcaatgacactaacagttaatttcttcaccaaactctcgtgagatatctaccatgttgcgagcatgtgtcaggtgctatgcattcaaakacaaataagatgccaactggcctgggggggaggggacaagagtttagttaggagatagatacatctgcagggagtctcagtatcatgtggtaagatctgtgatgtatgaatggagtttgaaagcaaatttaagggactccaaactcaaactgtggcagaggggtagaaatcagagaagtaactctgacctcagacatgcaggattaaaatacgactaggaacacaaaaagcaatcggaggaaggtattttaggtagatggaacagcatgagcagagaaaatctacagctcatataccgaactaggagtacttcagaatagttggactgtgtatgtgtgatagggactggcatgaaataagctgatgagagaggcaggagccagacatacagggcattatatgttgggatggaagctggtgatcatcatactccccatttgggaccaaggtgctgggagtgttggctcctgttggctacagc

SEQ ID NO: 491632 - DNA, 633 bp, Homo sapiens
tcttgataagactataaaaccagtgaaaatgagtatttcaaaaattaaacaatatgtacttaagcaatgacactaacagttaatttcttcaccaaactctcgtgagatatctaccatgttgcgagcatgtgtcaggtgctatgcattcaaagacaaataagatgccaactggcctgggggggaggggacaagagtttagttaggagatagatacatctgcagggagtctcagtatcatgtggtaagatctgtgatgtatgaatggagtttgaaagcaaatttaagggactccaaactcaaactgtggcagaggggtagaaatcagagaagtaactctgacctcagacatgcaggattaaaatacractaggaacacaaaaagcaatcggaggaaggtattttaggtagatggaacagcatgagcagagaaaatctacagctcatataccgaactaggagtacttcagaatagttggactgtgtatgtgtgatagggactggcatgaaataagctgatgagagaggcaggagccagacatacagggcattatatgttgggatggaagctggtgatcatcatactccccatttgggaccaaggtgctgggagtgttggctcctgttggctacagc

SEQ ID NO: 491633 - DNA, 585 bp, Homo sapiens
ccaacttccctccttttttttttttgagatgggagtttcgctcttgtcatctaggctggagtgcagtggcgctatcttggctcactgcaacctccgcctcccaggttcaagtgattctcctgcctmagcctttcagagtagctgggactacaggcgtgtgccactatgcctggctaatttttgtatttttagtagagacagggtttcaccatgccggtcaggctagtcttgaactcctgacctcagatgatccacccattttggcctcccaaaatgttgggattacaggtgtgagccaccatgcctggcctccaatttttttatttagcactctcaacaaattctttgatctctttctaccattcttttccttctaccagtacctgacatctattgtcttcctgacttctagcctcaatctcattttgaagtcatagcatgccccctgacttctctgggggcacatacactaactccatggtttatgtctcactctctctctctttttttttttttttttaatttgagacagtctcactgtttgcccaggctggagtgcagtggtgcaatctcggcttactgcaa

SEQ ID NO: 491634 - DNA, 433 bp, Homo sapiens
tcttgatgagatagctaatttttttaagtgagccatttatcaattgtctttaaggaaaatgggcttctggggatggtattgagtgtaaataccagagacatgaattggctctctactctgtccatcagactagctagatgatcttgcaaaagtcacttaacygtttgtacaattatgcattcattcatgcgacaaatatttaccacacaccaaccatggccaaaaaaaaaaaaaaagaccatgttaggtattatgtaaggaggtagaaagatataaaggatgggatccccaaggagatcaaagtctctgtgtgagattcagtatctgctatgtgtcaaagccaagcacaaataaagtgtgacaggaattcagggagaaatccttctggtggtaggagatcccaaaagactcaatagaggagactacacttcag

SEQ ID NO: 491635 - DNA, 401 bp, Homo sapiens
aggctggtctggaactcctgacctcaggtgatccgcctgactaggcctcccaaagtgttgggattataggcatgaaccaccacacccagccccagaggactattatgattaaatgagataaagtatggcagcccataggaggtcctcagtacaagttagtatcatcatcatgatcatcatccttcttgggttgaagcaacrtgttagctgatattttgagtgctgactctttgagaatttaccaaatgaagtctccaaatcaaaaccaaaaacctattaaaatgacattgacctgtaatcctaatgtgtctggaatgtattccttctggtgggttcttggtctctctgacttaaagaatgaagctgtggaccctcgcagtgagtgttacagttcttaaaga

SEQ ID NO: 491636 - DNA, 623 bp, Homo sapiens
tcataatcactatctgtgttaagataacttttgagatgattcgaacaaaattgtccaaagacttttttaaaatgctttaaaaatcttgcactatattacacttactcattaaatctcataaaaatctcattaactacttactgatgttgacattttgatagagtgagtcaacatttcagatgttcccttgccatatgtctaagacttgcattacaaaatttggtatacaacttgattccaaatgaactttgttcaaagagaaatgtttagaatgcctcctctatcctgcctgatgccatccaggtgagtcagaatggcacagagtgaagctagtaggcagcaaatttatctacggctgactcctccatgagggaaaaattggattaggccagtgatgtgagtttaccttctaggctctggggcttctggcttcctaacagtaaggatggttgagcaacagaacagattagtagagcctagaggaaaagattatcaggaggaattcccaggagaagaaagtcaaaggtcatttaagaacaatattgtctaggatttgattcagtagttagccattgcctrttttctttcatgctacagcttctctccatgttacactaaagcct

SEQ ID NO: 491637 - DNA, 595 bp, Homo sapiens
aatttaaaacacagttcactcagctttgaaactgtatttaacaagcacatgcctataatgtgccagacaatatgctaattgtttcyatgtacttgaattcatacagtagttccatgagggatcaagaactcccacttcacatgaaaaaatgaagttaagcatcgtgctcatagtctgtactgagctagaaagtggtagtactgagtttgactttatgactcattctttctataaccttacaagcaattacaatttctggataacaaacctgaggcaatgcaggccttctgtctttgaaccagggaactgtctatacaccaagccaagggaagtataagtaattggcacgtgaggcaaatacatgggttgttgtggttcttaatcatgtcacctcgttcatttttccattcaacttccctttccaaccatattgctctgtgccaccccttcttcccatgcctcaaaggctagtgagggccaccaggaggctggtgcagtcccggctatgccaggagggaggagagtcagcacagaggttaccaggagagcctgagtgatattcctgtaaattgggaaagatggcattctttaccat

SEQ ID NO: 491638 - DNA, 639 bp, Homo sapiens
attctcattgtttaagagttcaagacaagtattggaagttcaygtaattaagctgaacccaagtcatcatctgaaatatgaaagtttaaaaaatatatttatgcatgattgtatatgtgcatataaaactaaatgctttatgagttttttcatgaatttatttccttgtgatttctctacggatatatttgttatattccaatgcaatgaggtgctgctacagtagtcttactttgcaataaatttaaagtttaatttaaaaaatgaaagtagagacgcaggattcttcacagaacctccttttaaaaacgtcttttttaatagctaaacttcataattcctgcttccacatttgcttttctattattgctttttctagaaacaccataaagtagctgcgaattttatttcttaaaatgaaacttattttcaaggcagttcagagaaccagaaagaaaaaaatgtgagccaaaaagtcatactaagcaggttaactcccatgagtaaaattaagacctgtgtaaagagaattggcattgtatttcaaaagtcaatattaaaaaattgactcaaaaggaacatttaacagaattatcaaatgttttcccttactatgttctagagataaaggttaacaga

SEQ ID NO: 491639 - DNA, 538 bp, Homo sapiens
aggcatcacccaacaatctcagcactctttcccacagagcctgccttctgatttagaatccttttcaacactgggctctaggtggtggatctgagtaggcatgcaagatgaaaccactctgtgtaacatagcttattattttttatatacatatattttatttatttatttatttttttgagatggagtttcactctgtcgcccaggctggagtgcagtggtgctatctcagttcactgcaacctctgcctcccaggttcaagcgattctcctgcctcagcctcctaagtagctgggaagaaaggcgcccgctaccatgcctggctgatttttgtatttttagtagagacagggtttcaccacgttggccaggctggtctcgaactcctgacctcatgatctgcctgcctyagcctcccaaagtgctgggattacaggcgtgagccaccgcgcctggcccgcttattattatttgttaaaaattagtcttgacccagttttgaggctctagctggaggctggtcagttccccttctta

SEQ ID NO: 491640 - DNA, 524 bp, Homo sapiens
ggtgcagtggcatgcacctgtaatcccagctactcagtacactcagacaggaggatcatttgactccaggagtttgaggccagcctgggcaatagagcaagaccccatctctcaaaaaatatttttaaatgaattaaaatatagaacagtaacaatttccattcattgagtgtcaattatgtcaggccctgtgctaaacactttatgtatattattgttacccaacctaagcagcctttatttacatataaatcctacccatgtatgctttgtatattttcatcacatttagcaccatttttatccttctttcagtaaaagaattagcattatcttgtggatgccaaataacaatgatctcctccctaaggaggtcatcaggtatcttaaaatgacacacattatcccctcactgctttgaggcaatgtctaccgaagygaaacatttttcatctttactatgaaatgcttcagtactcatatgacacagtcattataatatccttaacacgtgtatgttacgt

SEQ ID NO: 491641 - DNA, 580 bp, Homo sapiens
aaagaagcaggagaggcaggctaagtagctaagcaagggtgtggtctcagctggaatctgcttccractgattccaccgagtggtcctaccttcagacaaaggactagcctttgtacatttctgtccctcagtcattggctatgtctgcccccagaagtagtgagagtgcagcattccaggcaaggagcatccctcttggccaaggacagctccctggaaaaaaaaggggggcatctgtgagtcattggctgccaacactcacagcactagaatggtaaataagatcaagacaagggtacactatatctgtgaacatactttaatgctacaagatgaagtataaaacactccccactaggaacaaatttaaaatgcagatgaaccttgcaattgctgtacctaaaacattatattgccattataatgaataatatatcatgagaaaatactacattacactgagtcccagaccttcctgctgggctgttgtttgaccattaggttgttttctgacctattctgacctcatcccattgctcaacaaagccataagccattaatcaaaccttgaatggaaaa

SEQ ID NO: 491642 - DNA, 525 bp, Homo sapiens
tctttcattttgtaggttgcctgttcactctgatggtagtttgttttgctgtgcagaagctctttagtttaattaggtcccatttgtcaattttaaggtctagtgggtggagatagattataggtagataatcagagtggtaaataatataaatttggacagggagaggaggtacaaaggaaaataaggctagagctgggcattagaaggtgacaaggaaggcttctctaaccagtgacaatggaacagagacatgaagtaagcagtgagtgtttgagctatgctggagaagagcattgtgggcagtggccccaacaagagatcaagggcagggtatctgagaagcactgggaggtcggtgcgtctggttaagaacgatgggggagagaaagagcagagatgtcaagggtagcttcttgctggaccttgtaggtcatggcatgggctttggaatttatcctaagrgtgatggttttgaacagggaagtgacaggctctgacttttatttaaaagggtcactctag

SEQ ID NO: 491643 - DNA, 463 bp, Homo sapiens
tgaggaattgagtcctggggagatgaatttgccacgtacacatggctagtcactgttaagggatgacgttctgctcccaacygaattccttctgtgagctgatgtctgggactctggaaaaacacagggattaacttcaacagatatctttctatatagtaaatatcttcttggaaaaagtaaaattttatttcaaactcttcccatctgacaaaaattttaatgaatgcttttcataatgtttcaggcaccatgaaatgggtgtgagggaacctggcaggttaaggaaacctagggaaaaggttggctaagtcaagaaaccttttgcagtgtgaattgtctgcgctttattttgtaaaattggatttttgtgtatttctcctggttttctcaaaataggacataaatgaacctttgcggtggtggaggcctctctgcttgcttgtttgcactgggtgtgttt

SEQ ID NO: 491644 - DNA, 644 bp, Homo sapiens
tttcctcttttttttttttttttttttgagatggagtctcgctctgtcgcccaggctgsagtgcagtggcgcaatctcggctcactgcaagctccgcctcccaggttcacgccattctcctgcctcagcctcccgagtagctgggactacaggtgcccgccaccatgcccggctaatttttggtatttttagtagagatgggggttttaccatgttagccaggatggtcttgatctcctgacctcgtgatccacccgcctcagcctcccaaagtgctgggattacaggcgtgagccactgcgcctggccctgcagtttcctctttattgccagttggtgatacccatcgagagggctgctttaaagaatgaggagtaattaagacataaaaccttcaggattttggcagtgtgccatgctgcagtgctgttagctgagtttagaatcgccttctccatctttacgacagccatgggagatacagataccattatctctgcatcacagatgaggaaactgaggcacagagaagttaagattgccaggctggtgagtgacggaggacttggaatgatcctctaagatttcatccaggtcttaaaaaaagtcgtggcatattctccatgaaaaaacatggtgaagaa

SEQ ID NO: 491645 - DNA, 590 bp, Homo sapiens
tgctctgggcctgtctgaatgctaccatgtaattattgcacgttgttatttatgtctgactccccagctaatagctatccaaattatcaagactgtaatgtactccattaaccgctctggctgagaaaggagttgtttctccttggctcctccagaaagaatgaaaagtatttcccccaccccctcccatctccctcccctgagagaaggtagccgggcctttgtgtcctggaagtctgacttcccttagccccaaggagagttaacagcctttgtgtgtgtgtgtgtgtgtgtgtctgtgtctgtgtgtgtgtgtgtttttctgggggaaaaaggaaagctgcctggtaggatggattccccctttgctttctgagayggaaagttggtgtggctcaggacatctttgatttggcctgcgaattattttatataaatttaaaatattagttgcaattttctaaaagtgagagatttcccatgaaaatctaaatctctgggttctctggaaaaactcaaaggtttcccatttctgggcccctattttcacatggcaaaaatgggaaggatccaagtccagctggtgcctt

SEQ ID NO: 491646 - DNA, 579 bp, Homo sapiens
gataggatatgtgtggggttctgtgcttggcgctagaatttgtggttggcaaatgcaaagaggctgttaagtgcccgcatataagatgatgaagaatacttcttccctgtaagtctattctcagcactggcaggggccccctgcagcaggaaacgttgggtttacagggcagggtcccttcctctgctgcagatgcccctgtttaatggccctccctctgctcaggctgagagggcctgaccctcacgggacagaagtcagccactgctgagctttgcattttcaggtctttcaaatgcattgtgtttgccccagccagcttctgcaggggcccaggttggtgagtgggtgctaatttgcctaacaggcaaaagggggtttgtgtatcaccartgtcttttgggagggaaattacaacctgctgaagggggagctggaggtgatcaaatgtgactaaatgcggtaaaaccagcaacttcacaacttcttgttgtgaatgcggtaaaaccaccaactaaatgcggtaaaaccgactaaatgcggtaaaaccaccaacttcaccaacttcttctgaggaga

SEQ ID NO: 491647 - DNA, 401 bp, Homo sapiens
gagataggaatgaagcgccctgtgggctgacccaaagaaatagtaagtggggctggaatccatgtagaagaaaatggggaagaaggagagaaactaagatggagaaatgagttttgtgaaatattggccttaaactatgaaattctgcaatgggtacattgggttttgatagttcaacatagagctttacaaacaggaatattgtttccattgttctccatgcctttttcaataattataytgaagatgtgaacatatgtttggaacatctctcccacaaaagaactttcatctaaatcaaatggaagtgagctggaactcaaaccaatgcttactaagagtgggcaagcacataatcctaagcaagagtcattaaatgagtagaaacttcccaaagatga

SEQ ID NO: 491648 - DNA, 596 bp, Homo sapiens
ttcatcctgataagatgcaccttgtcttacaaaacatttacaaggttagtgatttggggcctgcacttgagggttggacagtctggattcttttacttaccttccctcatgaggctcatgtactgtctagattcacatagtctctccattctcactaggtaggctgtgtagtgagtgtatagaaaggggtcctctggcataaaacatccaccctaaattctgatttgtgcagtgccatggctgctcttcagagcttcgccagccctgggacaaggatgattttgcagttacctgggatccatggagtcctgctataaggtgagaggagttatggtttagtggtcaagagtacacagtttggccaggtgtggtgkttcatgcctgtaatcccaacactttgggatgccaaggcaggtgaatcacttgaggtcaggagtttgaaaccagcctggccaacatagcaagaccttgtctaaaaaaagctaatgtatgatcattggcagatcacttaaccctgttgagtattggtttccgtgtctcatgtgagaataataatcacattcctttgtcccacagttgggtgaagatacaatgag

SEQ ID NO: 491649 - DNA, 596 bp, Homo sapiens
ttcatcctgataagatgcaccttgtcttacaaaacatttacaaggttagtgatttggggcctgcacttgagggttggacagtctggattcttttacttaccttccctcatgaggctcatgtactgtctagattcacatagtctctccattctcactaggtaggctgtgtagtgagtgtatagaaaggggtcctctggcataaaacatccaccctaaattctgatttgtgcagtgccatggctgctcttcagagcttcgccagccctgggacaaggatgattttgcagttacctgggatccatggagtcctgctataaggtgagaggagttatggtttagtggtcaagagtacacagtttggccaggtgtggtgtytcatgcctgtaatcccaacactttgggatgccaaggcaggtgaatcacttgaggtcaggagtttgaaaccagcctggccaacatagcaagaccttgtctaaaaaaagctaatgtatgatcattggcagatcacttaaccctgttgagtattggtttccgtgtctcatgtgagaataataatcacattcctttgtcccacagttgggtgaagatacaatgag

SEQ ID NO: 491650 - DNA, 596 bp, Homo sapiens
ttcatcctgataagatgcaccttgtcttacaaaacatttacaaggttagtgatttggggcctgcacttgagggttggacagtctggattcttttacttaccttccctcatgaggctcatgtactgtctagattcacatagtctctccattctcactaggtaggctgtgtagtgagtgtatagaaaggggtcctctggcataaaacatccaccctaaattctgatttgtgcagtgccatggctgctcttcagagcttcgccagccctgggacaaggatgattttgcagttacctgggatccatggagtcctgctataaggtgagaggagttatggtttagtggtcaagagtacacagtttggccaggtgtggtgtttcatgcctgtaatcccaacactttgggatgccaaggcaggtgaatcacttgaggtcaggagtttgaaaccagcctggccaacatagcaagaccttgtctaaaaaaagctaaygtatgatcattggcagatcacttaaccctgttgagtattggtttccgtgtctcatgtgagaataataatcacattcctttgtcccacagttgggtgaagatacaatgag

SEQ ID NO: 491651 - DNA, 595 bp, Homo sapiens
ctggggagggatggaggatgaagggaggatgatctggcaggggaatggcccagttctcaaccttggggcaaattggaatcatcttgagagcttttaaaaatatggatgcctagcacatgtatacatatgtaactaacctgcacattgtgcacatgtaccctaaaacttaaagtataataataataataataataaaatatgggtgcctgaccaggcgcggcagctcacacctgtaatcccagcactttgggaggccaagggagatggatcacttgaggtcaggagttcgagaccagcctggccaacagagtgaaaccctgtctctactaaaaacacaaaarttagccaaacctgatggcacgtgcctgtagtcccagctactcaggaggttgaggcaggagaatcacttgaacctgagaggcggaggttgcagtgagctgagattacaccactgcacttcaccctgggcgacagagtgaggctccgtctccaaaaaaaaaaaaaaaaaggatgccttatgctaaagtggtaaaaaaattttttttaataaataaataaaagtgtggatgctgcctaggttcagttcagttttcag

SEQ ID NO: 491652 - DNA, 595 bp, Homo sapiens
ctggggagggatggaggatgaagggaggatgatctggcaggggaatggcccagttctcaaccttggggcaaattggaatcatcttgagagcttttaaaaatatggatgcctagcacatgtatacatatgtaactaacctgcacattgtgcacatgtaccctaaaacttaaagtataataataataataataataaaatatgggtgcctgaccaggcgcggcagctcacacctgtaatcccagcactttgggaggccaagggagatggatcacttgaggtcaggagttcgagaccagcctggccaacagagtgaaaccctgtctctactaaaaacacaaaaattagccaaacmtgatggcacgtgcctgtagtcccagctactcaggaggttgaggcaggagaatcacttgaacctgagaggcggaggttgcagtgagctgagattacaccactgcacttcaccctgggcgacagagtgaggctccgtctccaaaaaaaaaaaaaaaaaggatgccttatgctaaagtggtaaaaaaattttttttaataaataaataaaagtgtggatgctgcctaggttcagttcagttttcag

SEQ ID NO: 491653 - DNA, 531 bp, Homo sapiens
tgcgggctgcaaatgaaaaaagagaggaaagaaaagaaggaagcatcggtgtgagtcgggcaggttcctccctcccaggcatcccacactttcctcactcatccttstgtaccactctcctcttccttctttgagaagtttggagaaggcatcaggagctttcctgctgctgctgggagttctgtcctgggaccatgctccacagaggactttccaggggtttcgggcctggcatggggcttcttggggacccgggaagacagggaatggggcgacattggccatcctacttggagagactttcctgcccacctgctcttcttacttcactaggattccgggtttgttccagtgtttggacttgtcccccgtatgaggggactgtcgggtgggttatgatcatgaggagttgaaactggactgccctttgtgtccaacagggccagcttggcttctgagaccgtccttactggggtggacctcatggagtggcccccaaaaggtttccagattctctgtggtcatctggaa

SEQ ID NO: 491654 - DNA, 559 bp, Homo sapiens
tgcctatttgcccaaatttgaacttaagttaccaaaccacaattagattatattaaaatattttcctcattctcataatttatataggttaaaaatagtttttctaaattttattcataattccagagaaaaccacagaattgggaagcttataataccaaataatatattatggtaatagtagaatctctctttttggaattcaccacactaggtcttctagcttgtagtgccactattctcttattcaggatgtgttagattatgccatggtaacaaccacaaaaatttgatttcacacagcaaaggttcttattctatgtaaagtctatcataagrctgagcccctctccatggaaaattatcttcatgaggccaaacctgaagaaaccttcaccatcttgcaagttcaacttaaacatgtagcctctttggtcaatgaagtagaggaaagtgaatcactagtaattaaattcttcagtctagaagtaaccagtatcacttttaccacaactgggaaaggggctcttggaaacagttttctacgtgtatagagaag

SEQ ID NO: 491655 - DNA, 631 bp, Homo sapiens
gcacaccgcctttcagttactcaatcaagtactaatctagttgctgctgtaaggggacctttgcagatgtaactgaagtccctattcagttgacttcttaagctaagaagaacatccttgaggagcctgacctaatcaggcaagccttttaaaaggactgcttttttcctggcaaatgaaacttcaaatagcagctragactataattgctctctcttctctgcatcttcttttctgaacgcctgtggccagaaaacagcttcaactcagccacataggctcccttctgcctgtcctacaaacttcgattccttgtaataaaatctctatatattttctccttctcctcctcctcttcttctccttcttcctgcttttctttctctgtctccttctctttctcagtctatcaaatgttcttctagttctgcctctttggttgagctctagctaatacagaaccccccacattagctgctatactctaacagctatgcttttcgtgaaagctgagtgaaaactgcaaagttaagtaaaagctactgtaatgtatctgtattatatttatgaccaaaaaatagcattcattggaaaaatagtaacatatagtcattgatttattccacagaaa

SEQ ID NO: 491656 - DNA, 576 bp, Homo sapiens
tagatgtaatgtagatttacaatcagtgcactttaagggaattattatagataatctgggtcagttwgattcaatgaattcaaggctttaagagaaaaattgtgattcccctgaagaggaagaaattccatttgtggaccaaagcctcagctccatcctgagtttctagcttgcccttcctgatagcctggactgtggctctctcatctgtatacatacacaatatatgtatgtatatgtgtatcatacagactggttatgtttctttggtgaaactctaactgatatatcacatcatgattggaaaatgatgggaattctcacctcttggtaaagtggtttcctgtgatccactaccctataactttcagggctggggattgagcaatggactgtttttcaagaggtatataattctctgctacagatgacatggcctttctccagaactttgtctatgctgtgattctttttttagggcttgccttacactccacacaacttcttttcccaacacaaatacctctaatacttccctactaggtcataaggcgaaagtgacagagcttcatgctt

SEQ ID NO: 491657 - DNA, 576 bp, Homo sapiens
tagatgtaatgtagatttacaatcagtgcactttaagggaattattatagataatctgggtcagttagattcaatgaattcaaggctttaagagaaaaattgtgattcccctgaagaggaagaaattccatttgtggaccaaagcctcagctccatcctgagtttctagcttgcccttcctgatagcctggmctgtggctctctcatctgtatacatacacaatatatgtatgtatatgtgtatcatacagactggttatgtttctttggtgaaactctaactgatatatcacatcatgattggaaaatgatgggaattctcacctcttggtaaagtggtttcctgtgatccactaccctataactttcagggctggggattgagcaatggactgtttttcaagaggtatataattctctgctacagatgacatggcctttctccagaactttgtctatgctgtgattctttttttagggcttgccttacactccacacaacttcttttcccaacacaaatacctctaatacttccctactaggtcataaggcgaaagtgacagagcttcatgctt

SEQ ID NO: 491658 - DNA, 576 bp, Homo sapiens
tagatgtaatgtagatttacaatcagtgcactttaagggaattattatagataatctgggtcagttagattcaatgaattcaaggctttaagagaaaaattgtgattcccctgaagaggaagaaattccatttgtggaccaaagcctcagctccatcctgagtttctagcttgcccttcctgatagcctggactgtggctctctcatctgtatacatacacaatatatgtaygtatatgtgtatcatacagactggttatgtttctttggtgaaactctaactgatatatcacatcatgattggaaaatgatgggaattctcacctcttggtaaagtggtttcctgtgatccactaccctataactttcagggctggggattgagcaatggactgtttttcaagaggtatataattctctgctacagatgacatggcctttctccagaactttgtctatgctgtgattctttttttagggcttgccttacactccacacaacttcttttcccaacacaaatacctctaatacttccctactaggtcataaggcgaaagtgacagagcttcatgctt

SEQ ID NO: 491659 - DNA, 612 bp, Homo sapiens
aactgtaaataatattagtaataaacctcttacaaagtataaggaaaacaaaggcaaactttgagtacatacaaaatatactttcaaataagagtattgatgttgcatatcctctctccctcagtgatatagggtggagctgctgattctttctaactgtaagacccagtactggtgatggggacacagaggagagaaagacatggtccctgccctagaggatctcacaactggggatgaggaagatgtaaagacagataattggaatttaatttggtacttgctgttactgaattttgaactggaccaggaaggaagaaactaaccccatgtgggggagttttaggagagcattataagtttggcttgtaagatgatagggttatgtcaggggaataggaagaaggtatccatggggaagtcaccgcattcagtggcagtcagccaggaaaaggctgtgagtcttctagaaaccatgaagcatttcaagtgcttggagcmtaggatgaataatggaggggagggggagagatgcggctggacagtgggctggggtcagattatgaaaattccatattgattagcagatagttcctgttttcttccttctct

SEQ ID NO: 491660 - DNA, 597 bp, Homo sapiens
aacagaaaggtggtgctagcagggttttagtagctttgtctcagttgtggttctggattttctaaagtggctctaaacccaccagccaatgagagtatttgagattttattttaaggcttaatatctcaagctctgaacaaacaacaaaaccggaggtaacaaaagtcttccaatagaataggaaaaacaatcatatacctgcagtatatagaaatttacctcctccagagtgatgacygctggttaaaaatggcttttaaaacctgatattggtttctctgcaagggaagtatgaagaagaaagagagatggggtaggaaggggctcacagatgctgccaatgttattgataatttcctgttacattacatatatttatatatattatttcgtatgtagcatatattccataatgtcaaagaaaaatacaatcattgaatatttgctatgtgccaaatagtatacctgatattgaaaacagtaatctttataataaaacattcaggctgtactaagtaacttatttttaaattcattgatatttctggcatcatcagatcatactaaaaataatactaataataacaattcattga

SEQ ID NO: 491661 - DNA, 597 bp, Homo sapiens
aacagaaaggtggtgctagcagggttttagtagctttgtctcagttgtggttctggattttctaaagtggctctaaacccaccagccaatgagagtatttgagattttattttaaggcttaatatctcaagctctgaacaaacaacaaaaccggaggtaacaaaagtcttccaatagaataggaaaaacaatcatatacctgcagtatatagaaatttacctcctccagagtgatgaccgctggttaaaaatggcttttaaaacctgatattggtttctctgcaagggaagtatgaagaagaaagagagatggggtaggaaggggctcacagatgctgccaatgttattgataatttcctgttacattacatatatttatatatattatttcgtatgtagcatatattccataatgtcaaagaaaaatacaatcattgaatatttgctatgtgccaaatagtatacctgatattgaaaacagtaatctttataataaaacatkcaggctgtactaagtaacttatttttaaattcattgatatttctggcatcatcagatcatactaaaaataatactaataataacaattcattga

SEQ ID NO: 491662 - DNA, 592 bp, Homo sapiens
atatctccacttaacactacttaataaatgtcttaccaagcacatcaggatccatttgaaaaaggattagtagaaaagttcctcctttgactttcttaaaattacaattctcattctatgagattgggattggattctcattctatgggattggaattataatcgtaaccctaactcattgtcccaaaccaaatggatcttttctttttaaaaattacattgttcaaactttttttgtcttttattgtgagaaccaagaaagtaaaagtatttcagcatatgccagtgctacccacacttttcatattcttctataaacaaccaggttgcaagtgaaaagcaaatgactgtccccagtcttcaatctgcacacctgagttgggtcacatttataaaacaatatgtaatggagagaagaattaatatgtggatggaaaacaatgctcacatggattaggatgattagtaatttgmtaatgaaagaaaagcccaattagtgcaaaggcaataagaaaatctgcccatggtagccaagtagaagggaagataaactggaaaatatgctgaagacctaaaatcaaataaaatttca

SEQ ID NO: 491663 - DNA, 373 bp, Homo sapiens
actctaatagattcttctcatttttacagaagaaccggagactcaaaggagaagccaactcaacccaaggagacgcagataaaatacaaaggcagggtcagaattcaaatccaggsccctctaactccaaaggacacaaccagacatctctaggtctgattttcctcctcccaacaacggatgagattctcctatttagagccacttccctaattagaagtaatgaggaaatgtccctccccagtcttctcagaaacagggagtccagatttgaacacagtttggtctcctaggaaaaaataagccagaaaaatcccagttgcaattaccaatgccatccatgtgattatcaaccacaaacgtttacagggag

SEQ ID NO: 491664 - DNA, 373 bp, Homo sapiens
actctaatagattcttctcatttttacagaagaaccggagactcaaaggagaagccaactcaacccaaggagacgcagataaaatacaaaggcagggtcagaattcaaatccagggccctctaactccaaaggacacaaccagacatctctaggtctgattttcctcctcccaacaacggatgagattctcctatttagagccacttccctaattagaagtaatgaggaaatgtccctycccagtcttctcagaaacagggagtccagatttgaacacagtttggtctcctaggaaaaaataagccagaaaaatcccagttgcaattaccaatgccatccatgtgattatcaaccacaaacgtttacagggag

SEQ ID NO: 491665 - DNA, 525 bp, Homo sapiens
agaattccagcaaaggactaaactcctcatcctcagaaagtagggctcacttcacagagacatcaaacatgtctttttctctgtcactgaatacactgataggcacatttgattatccatatacttaaatcttcagcagtactattaaaataattggaaaccatcttgaagagaacactgtgtcccaatcagtgctcaacaagaaaatgaaaaatttagaaaaaaataaatctattattattttgttatgtttctagttaactaccaatcccttcaaaatgaagttaaatgtctattttgatatagtaaccaatgcaaaaatctttttatcatgtttttcaaatactgtaacaagcagttcttaagacacagaaaactacaatcaaggtaaggcctttaatggcttttttgttttccattcagtactttccccaatacatacttaacctagcctggtattcagtttcaaacccacatgctragaagggctgcattttggcaactgtattgagaagggttcatctt

SEQ ID NO: 491666 - DNA, 471 bp, Homo sapiens
ctttagtgctctcctccatgaaatgrgatatcatgatgcctgctccccagagggttgtgtagagcattacctgtgatgatataagcagagcacttagcacagggactgtacaaagccctcaataaatgacctggggtctgtcccaaatgtggatggtttgtacttttaaattcccacacattccaggagagcttgtgtttctctggactgcctgtatgtttggatggcagtaaacaggcaagaagaaaactgcactacctccaaaaagaagtggaagaagagctaggtcctgggtcatgggttttaccctcccctggccctgtccttattctggctgctggctaccaagtgaccagcacagaccttccaggagccaggctgcccctagaacctgactgggaccagcttgtaagctggggccagggctccctggggtgagtggtgtgaactggggggtgggctgggccaggt

SEQ ID NO: 491667 - DNA, 593 bp, Homo sapiens
cctacaggtaggaacttcatcctgttcactgctgtccacccccatgttgccatgctgcagggtgtttctccttggcaagcgccctgccctttctgggctttagtgctctcctccatgaaatgagatatcatgatgcctgctccccagagggttgtgtagagcattacmtgtgatgatataagcagagcacttagcacagggactgtacaaagccctcaataaatgacctggggtctgtcccaaatgtggatggtttgtacttttaaattcccacacattccaggagagcttgtgtttctctggactgcctgtatgtttggatggcagtaaacaggcaagaagaaaactgcactacctccaaaaagaagtggaagaagagctaggtcctgggtcatgggttttaccctcccctggccctgtccttattctggctgctggctaccaagtgaccagcacagaccttccaggagccaggctgcccctagaacctgactgggaccagcttgtaagctggggccagggctccctggggtgagtggtgtgaactggggggtgggctgggccaggtcctcctgaatctgggggtggctgca

SEQ ID NO: 491668 - DNA, 593 bp, Homo sapiens
cctacaggtaggaacttcatcctgttcactgctgtccacccccatgttgccatgctgcagggtgtttctccttggcaagcgccctgccctttctgggctttagtgctctcctccatgaaatgagatatcatgatgcctgctccccagagggttgtgtagagcattacctgtgatgatataagcagagcacttagcacagggactgtacaaagccctcaataaatgaccyggggtctgtcccaaatgtggatggtttgtacttttaaattcccacacattccaggagagcttgtgtttctctggactgcctgtatgtttggatggcagtaaacaggcaagaagaaaactgcactacctccaaaaagaagtggaagaagagctaggtcctgggtcatgggttttaccctcccctggccctgtccttattctggctgctggctaccaagtgaccagcacagaccttccaggagccaggctgcccctagaacctgactgggaccagcttgtaagctggggccagggctccctggggtgagtggtgtgaactggggggtgggctgggccaggtcctcctgaatctgggggtggctgca

SEQ ID NO: 491669 - DNA, 629 bp, Homo sapiens
ctaccagaggtacaaggaggagctggtaccattcctcctgaaactattccaatcaatagaaaaagagggaatcctccctaactcattttatgaggccagcatcatcctgataccaaagcctggcagagacacaacaaaaaaacagaattttagaccaatatccctgatgaacatcgatgtaatgcatgttgttaaaaaattttctgtcccagttagttaagagtcctctctcttcctttttagtcgtakataaaatcatttatatgcatatatgattgcatgttcttacaactctgaggctgtgactatggagaaagcaggcttacaattcaagttctaagtcggtttaaggtgtctccttattctaccaccagcctggaggtgaacagagtcacccattttaggcacactgccttcctctccttccctccctttctcagataatatctattttaggtgttttttttttaaatcagttttagcattttgtcagagagtgtgcatgtaggatttctggagttatgtattacatagaagtggggaaatgactcctccacagccctcagattagatattcagattaaaagcaaattcagaaagaaaaataaaacattgtagttcactcaaca

SEQ ID NO: 491670 - DNA, 232 bp, Homo sapiens
tttttagctgccaggacatagctatttggggtttgaagtgaaattctggacaccttagtgctggaatcattcgtggaggcactttgtcgagagtggtttctcaaggtgggatcctgcagaagccactgggtgcctgcagggtcctacccagacccactgaggtgagaccaaggaatctgcmcttgaacacactgtccctaaacaggttcttctatgagccactcaaggggca

SEQ ID NO: 491671 - DNA, 504 bp, Homo sapiens
agttcagaaaagacccaagtcagaagtcctaggagattggaggcctcccactcctccacctgcctttagagctgtgggctgcacctaatgctttctgttctttctaagctatgagccccatgcagtggctgaactagtaaagggatgaaaactstcagaaaagaacagatgtccttagaacagggagctcctgtgagcttgtcctccacggcgacacactcagactgggagggagaccctgggcatctctgggcaaaggagactccacatttcctctgaattctcccagggctccctggaggcttgactaacagaataggaaactcagctcagtctaagacaagagtctccagtggcaccagctccaggattttctcctcagcaaatgttctaatttccaggaaaatggaggatcctgtcctacagcttcccactagagtaactgctcttgaggtctcttggtcctcgcttatttgaagatgaccagtggctatgcctagcccc

SEQ ID NO: 491672 - DNA, 534 bp, Homo sapiens
ggggggtttttctcattggagttattatcaggttgaatttccacaaccaaaggagttagttgggttgggaaagtcagaaaacattgatttttatactgcttgtgtgccatgtattgttctagctgttttatatgttactttctaatcatctaaaaccctgcaatattaccatgcattagactgatgatgcagacatcatacttctcagtattatgttgccataagtttggaggagagaacaccgaggcttgctttgggaaggttgcttcagatcacacagccagggccacgagttaagaatgccagtttccatctgtcctttcgtattttacttaagtccacagaagagtgagcagaaactgatagaggctagaggccagagatgagccrgaataatttgtttggctttggaatgaattgcaatacacacacacacacacacacacacacacacacacacacacacacacacacattgtgttgctcttttcacctggcttgtctctgttctgctttagtttttctcagttgtca

SEQ ID NO: 491673 - DNA, 411 bp, Homo sapiens
attgttctagctgttttatatgttactttctaatcatctaaaaccctgcaatattaccatgcattagactgatgatgcagacatcatacttctcagtattatgttgccataagtttggaggagagaacaccgaggcttgctttgggaaggttgcttcagatcacacagccagggccacgagttaagaatgccagtttccatctgtcctttcgtattttacttaagtccacagaagagtgagcagaaactgatagaggctagaggccagagatgagccagaataatttgtttggctttggaatgaattgcaatacacacacacacacacacacacacacacacacacacacacacacacayacattgtgttgctcttttcacctggcttgtctctgttctgctttagttttt

SEQ ID NO: 491674 - DNA, 573 bp, Homo sapiens
gtacagtcagagctggctgtaaaacttggcttcagcatcgagttcaactatgggaaattagtaaccttgtctgtaaaatgaactcaagagaacaacctcataacattgtcgtaatcacatctggaaaagtacctggcacatagtaggccctcacatcttattagctttcttgcccataaacccctgcagtataatatgacatttcttctcatttctgtattgaataggctctcttgaaaagcaccagtgatatatcttctaagcaccaaatccagttccaccttttctcagctatcagccaccttgacacatgtacagcatgttctggttgtcatagaagagattatccctattgctcttaattaagktccccaaactagaaaatgtcccctaattcactgatgtagaaggcttttggaaagttcagctcagcagttctcaaccagaatgtgcattcaaaccacacaagggcatcattactgcatattcccaggtccccggcagctctgagcccttgacctagaatggggttcaagctgtgcttagaaaactggagcacatgtgagtcctatg

SEQ ID NO: 491675 - DNA, 515 bp, Homo sapiens
ttgaacaggatgtgcgttgggggtgggatatctgttcccaaagccttagccccaccctgacttgagggaaaatttccagatgggattggtctctgctaagcctctgagcccctctagttggggccagaggtcatcttggcatcctcccgcccacccagatgaatggaaagttctctctccaggacatggttatcctcattccccactcytgtgcctcacgattcttactcttatgacagacttcctaaaattccagcctaaatcctctccattacagtttctacaaattctgactcctaactacaaagggaagagaacagagtgaagccttcccgaggtttggggtctgtataagggtataggaagtggggagtggggtgcagatcagccctcttgccccaggtggtttataggatgaaggtttctctgtttaaaacagtaccctggtggcaaggagtaaaggggaatattacacccttccttcctcttccagccttagtgaggttttctgggca

SEQ ID NO: 491676 - DNA, 488 bp, Homo sapiens
tgcaatgcctatgagcaggacctgggtttgtacatctttggatctgcacacagtaagttcttaatacacacttgctgaggacagagttttataatgatatcaacacttcctgggaggatggtgggagcactggtgtgcacatcagtatgcattgatggcatacatcctatgggtctcccatatgtatgtatggcatatgtatgcatgcatggaagcatgaagtaggcgctgaagtcagccagctctggcaccacactgcctggcttccagccccagctctgctgcaagaccttcagcaaagttcttggacctctttcagctcatgtcctccctataatggggggaagatggtaacaacacttgtctcagaggtcatgaggactgaagtcctcaacacagtgctggttccctggaagccctccttaaatgtggcctgttgcagctataaccatagcaccaatygggtgctaaatgaaccagctattagg

SEQ ID NO: 491677 - DNA, 513 bp, Homo sapiens
ctgaggtgggaggattgcttgagyccaggagtttgaggccagccctgacaacacagcaagatcccatctctacaaagaattcaaaagctggatatggtggtgtgtgcctatagtcccagctacttaggaggctgaggcaggaggattgtttaaacctgagaggtcgaggctgcagtgagctataattgtgctgttgcactccaacctgggcaacagagcaacaccctgtctcaaaaaaaaaaaaaagaaaaaaaaagtcatagaattcagataagagactttccactgacatctctgaaaatacctatggaggaaactacaggttacttgcccttttgaaacatctattaagaaatgttggtagggagagtgttagaaagtagcagggcatggagatacacctgtggtgtccaggagggcagcatggagccacccaacctctgcagatctatctcccctgccaagattgtctggagtcaggagagacttcttgttgcaaggaaaagataagca

SEQ ID NO: 491678 - DNA, 494 bp, Homo sapiens
cccacctttaggtgcctccaccccatccattctgatgtctgcacccacagccagtgamccaaacccaggaacatgtggtcagcagagccacatatgagaggtaaatggccccagggtagcaacatggccatggctgggccagaggcacattctaagtggagctgagctgcaacaagtggaaccaagctgcccctgccagggctcatcagacaacagctccatccctgccctcaccaaggggcccccaacccgtcccctcccagctacgcaagaagaataggggctgggaattgcaagatgctcccttctaccaccaagccaaaccaagtgggacagtagctcccagggactagggaagcctgcaagaagaagggtatgtttggggaaggcctgggagtactgtgggccaccctggaaaccagaagggcaggcattcttgagagagcgggacgtgtatgcctgaggactaagacacatgtgaacttggatgcagg

SEQ ID NO: 491679 - DNA, 523 bp, Homo sapiens
ccaaatttgaccgtgtctaacccctccccataaaggctcaactgctgagcagcattccaggctgctggtccaaccagaacctgcttctccagcttccacctctccccctctgtggttcacatcctcctatccaggccttttcccaccctatgccccactgccttgtgtgacttgggcttttggtacttgagcaggaacctcccaccytcctggtggccatcaccttgatcagccttcccagcacaggggtgggtccctcaatctctacatactcctagagtatgtagatagtactttctgtccctagaaccacacccttggcctgtccagtcctgtaaactttcagcagattgggctgagctgggttcagggctgggacaatcaagacagccttcaggggctctgaaaggggatgacgaggtctccaaagcacagtattaggcaggggtggggtggctgcctgtcctgcctccctgggtctcactgtttctccctggaagacctcaggccaactctgacctag

SEQ ID NO: 491680 - DNA, 632 bp, Homo sapiens
gcagctctactgagcacctgaaagcccaaatttgaccgtgtctaacccctccccataaaggctcaactgctgagcagcattccaggctgctggtccaaccagaacctgcttctccagcttccacctctccccctctgtggttcacatcctcctatccaggccttttcccaccctatgccccactgccttgtgtgacttgggcttttggtacttgagcaggaacctcccaccctcctggtggccatcaccttgatcagccttcccagcacaggggtgggtccctcaatctctacatactcctagagtatgtagatagtactttctgtccctagaaccacacccttggcctgtccagtcctgtaaactttcagcagattgggctgagctgggttcagggctgggacaatcaagacagccttcaggggctctgaaaggggatgacgaggtctccaaagcacagtattaggcaggggtggggtggctgcctgtcctgcctccctgggtctcactgtttctccctggaagacctcaggccaactctgacctaggccccatggcttgagactgcaatgtgtcggggtaygggagtccctcagggagccagggtcagagggcagagaatggcaggggac

SEQ ID NO: 491681 - DNA, 567 bp, Homo sapiens
ctggcaaacctgtttccccagttgtgggtctgggyggggatggagaggggggagtaactccttcctgcccttcctcttccttaaagaccccaggtttagacccacccaccccctccccctgggggcccggctcaactgggggcctcatagtgagggagggggctgtgggtggctgctgagggaagagggaagggtcagagcatcccaggacttcactcagttggagctccttagggccctggtggggaaaccaaggcagggtcctactacgattgtcagacctcacatgcagtaggtgctccttgggtattagctgaatgactggatagaggaggtgggtcccatggcagtgaccagtcaggaagtcaccccagaggaggctgagtttgggctttgaaggctgagaggaagaaacagcaggagcagtgggacaagagcaattgtcaggagttggggcagggcagagctagtcaagcaggcctggtggacaggtgggggctcatctagaggactcagagcccaccagagctcccccagggtaggcataggaagggcaggagagtcttg

SEQ ID NO: 491682 - DNA, 476 bp, Homo sapiens
acctgtttccccagttgtgggtctgggtggggatggagaggggggagtaactccttcctgcccttcctcttccttaaagaccccaggtttagacccacccaccccctccccctgkgggcccggctcaactgggggcctcatagtgagggagggggctgtgggtggctgctgagggaagagggaagggtcagagcatcccaggacttcactcagttggagctccttagggccctggtggggaaaccaaggcagggtcctactacgattgtcagacctcacatgcagtaggtgctccttgggtattagctgaatgactggatagaggaggtgggtcccatggcagtgaccagtcaggaagtcaccccagaggaggctgagtttgggctttgaaggctgagaggaagaaacagcaggagcagtgggacaagagcaattgtcaggagttggggcagggcagagctagtcaagcaggcctg

SEQ ID NO: 491683 - DNA, 567 bp, Homo sapiens
ctggcaaacctgtttccccagttgtgggtctgggtggggatggagaggggggagtaactccttcctgcccttcctcttccttaaagaccccaggtttagacccacccaccccctccccctgggggccyggctcaactgggggcctcatagtgagggagggggctgtgggtggctgctgagggaagagggaagggtcagagcatcccaggacttcactcagttggagctccttagggccctggtggggaaaccaaggcagggtcctactacgattgtcagacctcacatgcagtaggtgctccttgggtattagctgaatgactggatagaggaggtgggtcccatggcagtgaccagtcaggaagtcaccccagaggaggctgagtttgggctttgaaggctgagaggaagaaacagcaggagcagtgggacaagagcaattgtcaggagttggggcagggcagagctagtcaagcaggcctggtggacaggtgggggctcatctagaggactcagagcccaccagagctcccccagggtaggcataggaagggcaggagagtcttg

SEQ ID NO: 491684 - DNA, 543 bp, Homo sapiens
cactgtctcctgcttacctcgccrttgcagaaacagtatatgattgcgacaaaaaatccctgtgaagaggggtgtctcgaatcaggcctgcccccggaacccctcccaccctcagccaggcccgggccagcactgcgcacctggaaggagttgaagagcatctcatagtgcatctggacttgccagagcgtccctgagacctcggtgtatggtgtggccatgaagacaatgtagtggacgccaaagaggggcatgagcaccagcgtggatttgagcagcttcctgggccagcggggcaggtaggtcagggccaagccacttccccttcaacaagcattgtaccaccccccaccctgcgagccccaggctccggaagctcaaaggggcccagggctccagtcaccatgggaggacaacccagttcacctgcatggctgctgtcctggctaagtgctaatagggcccgttggttctcagcggtgtcccggagcggacttcaaatgacagtccccctgtccctgggcccttcgcacctgtggagcc

SEQ ID NO: 491685 - DNA, 551 bp, Homo sapiens
agaatgatgggatggcttaagggaggacaagttggacttgccaggatccaggggcctccaagactaacctgaagctctccctgtgcctctgacatgggggatccatgctggtgagggggctgatccctgtccacctcactccatttacagcacccattaactaccatttccatcgttgctgctagtacctccatcaataaccatcattactgtcactaacaccaacaccagcatcaccagtccctcccagtactaccaccaccaccactggcatcaccgttaccaccatgagcactactgtaaccatcmatataaccaccatcaccaccatctgcaccatcacaactggtacatcaccagcaccagcaccactgccaccacctccagcatcaccaaggcaacattagcaccatcagcaatactgccacctgcccaacaactaccatctacactgcctttgccatcttgttgtcttaccccctccccactatccttcttcttctgccacctccacccctctcaagacaaacccattgtgctgtattttctcc

SEQ ID NO: 491686 - DNA, 530 bp, Homo sapiens
tgtgccctcctcttcaaggagattctgccaccagccccacaatgtgaatcccacctccacccttgactagcttcgtgtctgagaaagttgcttaacccgtgtgcctcagttttcctgtaaaatcagggtaataatagggctgttgttggcccggcacggtggctaacaccagtaatcccagcactttgggaggccaaaccaggtggatcacctgaggtcaggagttcgagaccagcctgaccaacatggagaaaccttgtctctactgaaaaatacaaaattagctgggtgtggtggtgcgcctgtaatcccagctactcgggaggccgaggcagcagaatcgctcaaacctgggagcggaggttccagtgagccgagatcgcgccattgcactctagcctgggcaacaagagcgaaactccatctcaaaaaaaaaaaaaaaaaaaaaaaagctgctgtgaagattaaatgaagtacttcacaacaagcctgtgcagggrtgaagctcaggaaaagctggttgctattgt

SEQ ID NO: 491687 - DNA, 541 bp, Homo sapiens
accagtttctacaaccagacatattcctagattctcctgtagttcttaactaggatcaatccacagctctctaggctgggacctggtggaatgtaagctccatcagggaagggtcttttactgagcgtttatcactgtattcctaacacatagcacaagcctgtcacatagcaggagtttaataaatatttattaaatgaataattgaacaagagtgcttgacaactttcataacyttcacctactccaggttattggactcttctgtgggcacttaaccatagtcatagtcctgcttcttccaggatggaccctcttagatccaagaccttctacccacttgtcactgaaagcttctatgaccagagattcctcattatccacctgggtgggcccatggacaccagtgccagccttgactaggacaaagatttcaaatgtccctttaggcactgcagtgatagcttttttatacccttcttggtgacaacagcattagtcccctgacccagaacttgggtctcagcctacttccttcttg

SEQ ID NO: 491688 - DNA, 367 bp, Homo sapiens
  misc_feature (1)...(367): n = A,T,C or G
ttctttgtttgggtctcattttaccaagatagacacctcagggtgaaaatagagagctanagagtataanagctataaaatcttttaatctatgttgaccaattgctctataaaatgtgtagatataaccaatttaccttcccactagtcatgtgtatatactgggcaatctcaaaaacattttttttgtttgtttgagacggagtctcactctgttgcccaggctgaagtgcagtggcgtgatctcggctcactgcaagctccgcctcctgggttcacgccattctyctgcctcagcctcccgagtagctgggactacaggcacccggcaccacacccggctaatttttttgtgtgttttttagta

SEQ ID NO: 491689 - DNA, 367 bp, Homo sapiens
  misc_feature (1)...(367): n = A,T,C or G
ttctttgtttgggtctcattttaccaagatagacacctcagggtgaaaatagagagctanagagtataanagctataaaatcttttaatctatgttgaccaattgctctataaaatgtgtagatataaccaatttaccttcccactagtcatgtgtatatactgggcaatctcaaaaacattttttttgtttgtttgagacggagtctcactctgttgcccaggctgaagtgcagtggcgtgatctcggctcactgcaagctccgcctcctgggttcacgccattcttctgcctcagcctcccragtagctgggactacaggcacccggcaccacacccggctaatttttttgtgtgttttttagta

SEQ ID NO: 491690 - DNA, 481 bp, Homo sapiens
aagaacactgacagttaattttttggtttaggaggaggagaagccagcaaacgacactgagtagcaatatccaaagaaaaagaggaaaaaggaaaactgggagattatgagtgtcccagagggaatgtttcaagattaccatcagcagtgagctttgtgtaaaggtggcctcctgtaatagaggtgcgggcaggagaaggcagaatagggaaaagggggtgaaaaagcttccctcaagatttataatacagtggaagagagagacagagagagagaaagagaaagagagagagagaacttaaggaggtagaggaagagagagaaccaaaaaagagggagctgagtatagaagcaattagattcatagtttttagttgcggcagtgatatttgagtgggggccttttatatattccattctaggtgtttcccmgttgatgggagagggtcttacctagatctgcatgtaaaagggagtaggc

SEQ ID NO: 491691 - DNA, 609 bp, Homo sapiens
gactttcatttgctgccatatagctgccccctttgccctactcctctgcagtcaccctttcacccatggaaattcgatgtgctcttcaccagtttcctcttctctggagcacagttaaacagctaaagtacatttcccagtctcctttggagttggggccatgtgagtgtggctgtaccaatgacatgttggttgaagtgacctgtgccattttcaggcctggccctgaaaaacatcccatgcaatcctccagctctctcttcttctggtgctgcatgcagccttggaatctgtgagatccagacggaaggctgcaaaactggggcgggcctcctgccctgcactagagtacaagagtagtaaataaactttctctgtaaagccactgatttttggtgattgtgactgtagcttagtctaatttagcctagcctagcaaacaggaacccattctccaagaaagctcttctgctgyctgccagggagatgcttctctagggctcccaaggcacagtctatgccagtgcaccttgcaccgtctccacttgctcctctctgtgcctctgtcctttgtggccctctggtcacattacccatcacccactgaaa

SEQ ID NO: 491692 - DNA, 502 bp, Homo sapiens
tctgcactcacacagtgcatttcttttataggtggatgatttcagaccctccactatctatcccccattgcggggccacagaaactctccatccccaccacggcccctgctttgtacttgtgctttctttttgctgctgcagaccccttactgcctgataccccayatttagtcccagtcctttgctgcatcaggagcagtcttgggataagagctttagatgacttcatatgctgtaaggagggagcaaggacataaaaatggaagagggaaatctcagattccacatatttctgtaccctcccttgccccctctctccagacctggtccaggatcctccaaccccacatctgcttcccaacctttttcttacagccaggcttcctgctctaagtcttttaataaaatgccccaaagaatggtgcttttctctggatgtggctgaattgcattcttaaaccttggtgtattccagagaccagccctttccatatggaggac

SEQ ID NO: 491693 - DNA, 583 bp, Homo sapiens
ttgtagcaaatcatctagcaactaacagccttgtgcctagcacagggtaggtactcaataaatatttgttgcataaattcaacaataaaattttattcatggagcgagatcagtatttactgtgacatccttaagtttcaaaggttagaccaagaacattgttgcttgaaacaaaaaatattcgtttcatgtttgcaaatattttgatgatacttttctgctttgttggaagatgcaattgagtccttgagattaacttgcctcgtgtccaaaagataaaacctagtgtctgaaaatgtcagttactcaatgtcatttacgtcttcawtcaaacattttgtgacattagaaactttttttcatctgtgaggataaaatctgaaaaatcaggtggaatgaaaagtcattccaaagttttaatgagacatatcaagggtgaattatttcatttcttctattcacttttattcctgttaacatgcaagtaattttgcaggtattctgtgttttctttgatgcaagttgggactgagtttgcatctggggtggtagccctagaatgctggggtgcattctgggaaca

SEQ ID NO: 491694 - DNA, 508 bp, Homo sapiens
ctgggccactagttgaccttgtaaccacttggccacttaatcattacaggtttcaagttctttatttgtaaaatgaagggattagaccaatatttccaacataccataagaaatctgttttgttacataatttgctggtttctactcattattgttagaaygtatttagattagttcaagagaataaaaaggtacacatctcacatcctgtgagacaaaatagggagttgcccacgcatctgagagattccccatatcacaggtcttgtataaacttcatgagcaccttcccaacctgattcaagaatgtgacaccctggactgttaacaagtgagcaagtgatcctgctttatttccacaaactcagtttgtaaaaactctaaaaattaaatgtattttccattacttgtagagggagaggtaatattttgaggcatatttcatcaacaaccctctgtgaattggccattattatgtctgtatttaggaaaaataagcatatttaac

SEQ ID NO: 491695 - DNA, 508 bp, Homo sapiens
ctgggccactagttgaccttgtaaccacttggccacttaatcattacaggtttcaagttctttatttgtaaaatgaagggattagaccaatatttccaacataccataagaaatctgttttgttacataatttgctggtttctactcattattgttagaatgtatttagattagttcaagagaataaaaaggtacacatctcacatcctgtgagacaaaatagggagttgcccacgcatctgagagattccccatatcacaggtcttgtataaacttcatgagcaccttcccaacctgattcaagaatgtgacaccctggactgttaacaagtgagcaagtgatcctgctttatttccacaaactcagtttgtaaaaactctaaaaattaaatgtattttccatyacttgtagagggagaggtaatattttgaggcatatttcatcaacaaccctctgtgaattggccattattatgtctgtatttaggaaaaataagcatatttaac

SEQ ID NO: 491696 - DNA, 620 bp, Homo sapiens
ccctgtctctttaaaaaaaggaaaaatgactgggcgtggtggctcatgcctgtaatcccagcactttgggaggccgaggcaggcggatcacctgaggttgggaattcgagaccagcctgaccaatatggagtaacccccgtctctactaaaaatacaaaattagccgggtagggtggcacatgcccgtratcccagctactagggaggctgaggcaggagaatcacttgaacccaggaggcagaggttgcagtgagccgagattgtaccattgcactccagcctgggcaacaagagcgaaaatccgtctcagaaaaaaacaaaaaaaagaaaagaaaaacacaacattttgcccttctggtgctctgggttctgtctcctgctcatgctccctgggtcttcatggcactattgagtagctggcagtgacggggtaggagtggtggtaccagcagccttcattttttcctagacaggaatgtaagaagcaggcacgacgccttctctccaacagttgcattttacagcttatgatttatagcgaggtccatcatggcagggaagcacacaccattatttatgtgtttgtaccctgccttgttccaaggaagatttaaggca

SEQ ID NO: 491697 - DNA, 411 bp, Homo sapiens
atatgctgaattaattattagaccactgctaaaattatgtttaacatttgatattaaaatagtattttctgtcttaaacaaataaaaacctgcattaccatctaacaggaatttcctaggatgaacatattttactaaatttaatcatagaagatttatctcataattatggaaaacctatcatctcaaatggtgccgctgcaatttctggggtgtcccattaggagctgctatagggtaatggtagaactaataaatattattccaaactatggttcacaaaactcagaacctttagaaatgaattaacatattataatcatataataattattttcatcacgtgtccttttcacatactatcaacataggtaccrctatgctttattctatgattttaaaattatggaa

SEQ ID NO: 491698 - DNA, 603 bp, Homo sapiens
gctgaagacagctcagggtactgcatgcaaaggtggtttctcaatgaagtgggtaaagcacttctgccctgaaaatggcttcaggaagaaaacagttagaggtcacctctatttgtctgctccaattaagctcaaagtaaaaacacaaatagaagagttggatgcccactgacaaattaaactgttaaacatacccataactttacatttcagtgtagtatatagctagtgaaggaacattttggtgggaagcaataaggccttttaactaatcttacatttggcatggatattaatcagactaacagaaagtcatggaagtttcatccgctctcttttcctgatcactgggcagcacaggttataaccactcttgttttctagctgatcgcttttcaacaaacaggatctatggcctgcgatatgtaaactgaagtggggrttgggaaagaacatagattatagcgtctagaaattcagttcgctggacatctgcagagatctgtgcatcatgctgatattcacatttccaccccacggttttgggaagtaagagaggaatccacgcatccaggctttcagagatctttatgctgggcttct

SEQ ID NO: 491699 - DNA, 618 bp, Homo sapiens
acaaatgttacagggtatgttggcagaaaataaaccccaaagatttcatgaaaccttaataatttgacttgagattaccctttcaatgatgtcagaatttgtcctacttctttggaggttatagctttgtgtattactatttttaatcattgtactctgtatcaattaaagcaaacctagcaatagtaacagataaacttgtactaccagtcagcccactaaagtgtctttagagtccaattggctgctggaatatgagaggctctgctccacacagtcacttagggatcgaggcttctcccttccagtgactgtggaagcccctaatatctcaaaggcagtctggcttcgttgcaccttgggccaatagatgaagaaagagtattagaaatattgcatgggaggatattagggacacacttggaactccacataggaatgtgccagatagttcattaacagggaccaaatcataaatcacatactctgctygctgcaatagaggccaggaaatttacctgtatgtccaggaagaaagggaatcagatattgtggacatatagcaagccctaacatacactcattacattttgatagtcctcttcaattgcaaatcca

SEQ ID NO: 491700 - DNA, 608 bp, Homo sapiens
tccatattattagatatttttgttatttgttttctgtgttttttacactataaaatttgatcagatgaatatttcctatgcatatatgtgactatatttactggatatatttttagaaggaaaatttcttggtcaagaatataaacttcaaaaatgatatatagtgctaaattgttcttcatacattttaagcaatatatgtcaatatacgactatggtatttcccatatttttgctaacagagtatatccttttaattgttaaacaaagatttttaattatagttttaatttgtccttctttttccttcagagatttatcattatattattttgttaatggtcatttgcctatttttgcacatgttcatgtgtgtttatggtgggagtgagtagcctgtttatgttctctgctcatttttgtatttattagattgtttgatttatttttttctcatgagctgtaagcaatctttatgtactaargtaatgtgtcctcagtgagccatattctttgcaaatatttattcctagttttattattctttgtctttgacttggtttattgaattgagcttagctctctttcaaaggaagaatttattgagc

SEQ ID NO: 491701 - DNA, 471 bp, Homo sapiens
ggagcagctggtgggcaggcatggggggtgggcagtgaggggatggggctcttcattctacagatcctggacattccagcaggcctgcattccaagtgagaaagccaggattgccgagttgtggaaataccttyggaatggtcccttgagcatctggaatactgggagatggggggctagtatggggtgcctcaaggaaagagactgctgaaagaagtggaaaaatattgtggaaatcatcctatccataccgcagacccctgtgcaaatgtgccatgcgcacacacacacacacacacacacacactcacacacacaggacttatggcatgagggagccccggagagccaggctgccctttgcctggcccctccctagtggccttctcttgctatgactttcctgtttccaactctattctttttctctgctcccagtcttgccttccttctttgtgtctctcattctcc

SEQ ID NO: 491702 - DNA, 537 bp, Homo sapiens
tattcagaattggctctgttggttgtaagttcctcgtttttgtttgttgaggtctctgtctttcacaccacatcgtaattacccagtaatccttggttgtctactctattacgaataaagcactaaaragctgattggaagccctaagtatatgaaagagatttctggctagcaggtggcacattaatttaaaaaacttttcataaaattattggaggatttctggttttcaaaatctatggattctttttcttctttgcgaaggtaaattcccctaagagaattctccagtcttaggggagaacatcctgacagcaaacgtcctgagagcaaaatcaggacaggggcatgagccccctggattggaacatagtccatcaattaatccctgtttctgttttgcttccagaccctagtaatacctactgttcctggattcggagtttctcagattcgatctgtacagagagtatgctgccaatcttctactggattggggaaaagttcttctttgctgtgtgggcggatgagaaggca

SEQ ID NO: 491703 - DNA, 622 bp, Homo sapiens
cctgcaacacttcactggtgttaggaaaagtggtgtgtctggggaagctgacatgctccaggactgagtaggtcactctggtgtgtagagttaacaactccttttacctcgtatttgggtttttccttggaataagccactttgtgtattgactggagtaccctattggagaggggaatagctattggatttttcttttttttttagatgaagtctccctcggtcgcccaagctggagtgcagtggtatgatctcggctcactgcaagctccacctcccgggctcgtgccattctcctgcctcaccgtcccgagtagctgggactacaggcacctcccaccatgcccagctaattttttttttttttgtatttttagtagagacagggttttactatgttagccaggacagtctccatctcctggccttgsgattcgcccacctcggtctcccaaagtgctgggattacaggcataagccactgtgcccggccagctattagatttttacccaatttgagaaccagttcatttgcatttgtcttccagttgtctttgtgggctctggggttacatctttaaaaaaatgggaaagttaaaagacatgccaggttttctgggac

SEQ ID NO: 491704 - DNA, 294 bp, Homo sapiens
ggggagggtagggcaaaaagtgggaagggctatctgctgttggctccctgcccctctagtcttccaccatccaccagtgagtggagccagggttgatagacaggatgcctggggtccaagctaaagcagaggcctratgctgggttagtcctgtcttcccttccccaccctgctccactcccatgtatacccctgctaagaatgtaccatcctggaggcacagggtcacccagacaagggcagaaataaaaggtgtggataggcaggaaaagaagattgacagcccaggggtaa

SEQ ID NO: 491705 - DNA, 602 bp, Homo sapiens
aggaataaatccagtggacaatgtgaaaactacaaaacactgttgaagaaaataaaaagagcccaaataaatgtagagacatatgctgttaatgaatgagaagacttcatattttaaacatgtcacttcactctaaatttattttttgattcaatatagccccaccaaaattgcagcagctctttttttaattgttaaatggtgagttgattctaaaatatatagaaaaagaatgggcaacaaatagcaaaaaatacattttcctccattcctcttgaagttcacagggcactatcctgtctgaccaattcctgccttggtttaagcaggagaagtcagaagtggaggcaggtccaccccaggctcttcatgctcacagcatctaacacttccttgcttggcttgcatccagaggggcaccttctttctctcactagttttcctgaaaatatgttgtgctatggtttcytcttcaatcagatctcattgcacaatatctttgaaagagtactcatagttattcttctaattttaagtattcaaggttatagatttgttaaacaaaagataattttctatttgtttagagatttaggatcaaa

SEQ ID NO: 491706 - DNA, 459 bp, Homo sapiens
aggcactatgcaatgtgttttattcatatttcaatcctcgctcccctatgcaaagtaggtcctcatgttatccccattttatagatggaaatatcaaggttgtataattagtaagtggtaaggtggggatttgaaggcgacctttctgattctttctgatctcttcattgtgatacattctctactatgttgtctccaactgtttatatggaggtaaaatcttcacttcaaaaaacatcatatattccaggcaatagttattgatcaactactacattcactgtgctrtgctgggtaatcacaggaaatttctcaggacagtcacctgagaagtatacaaagtggcctctgactcccaggaatccattctgtttacaagggtgcttatataatcaagtgtccatgtgtcatcactagcaagtccacttccacagttggaagactgacttcccaaacaag

SEQ ID NO: 491707 - DNA, 640 bp, Homo sapiens
attattcataaataggattgggaaacacacttgggtatttttccccatctgtctaattaaatggtaagtcccaaaaggcagagaccaagttgagctccagcttgtgctctcagcatagtttttggtgctggataaatagcaaacagtagtcttggaagaaaagactagcattttcyacagggcctttgtagctgacgtgaaaagaagccctttgagtggagttgcagaagttcctcattgtttacttatttcttagtaagaggctcactcttgtcaatcacatttttcatttgtagtaaactaagctgactgaggattataaatgaaatagtttcatgttggagtataaccatgtaaagcctcagatgggaagtagttcttgttaaaactaagaagcaactgaggagtcactgcctcacatcacttcctctagaaagggctggcccaactcaacccaacacctagagaggtgctgtccaatagaactttctgcgatgtggacaggccctatgacatagaagacatatgtagctagtggctgccatactggacaacacagcactataggctttttagtacagaagattccgcagctttttgacaacgtgcactgaagtttattcttatataacagtgacaa

SEQ ID NO: 491708 - DNA, 470 bp, Homo sapiens
ccgtggtgggcctaatcttgtgttttttagattgtaattctcagattccacagaggtactcagaggttgcccaagagtaagaaaaggtagagtggaaggccggagaccgaggggaaagagctccgggctttcaattcccttttccagagagtaaagtttcccttaaactttctttatgttggaattctayataagatttcatttaggagcaggtaggcaggggtggagggagaggaaaaggaagtttgttgaaccattatgaaaaaagtagttgacaattgctgagttagtctagatctatcattttataggtgagataatggaggcccaggtggtaatttagccaaagtcactctgttaacatcataacctccctaaactgagagagcccttggggatcacctgacccaatcatttgccagcattggcttctctcacctgccatcagccacatggggtccaaactcctc

SEQ ID NO: 491709 - DNA, 619 bp, Homo sapiens
tggggccactgctcccctcacccctgctctttgcctctaaagctragccacctccctgcaagaaaagcttggaatttccctctgcttgagtcatagcctaagactgggattcccaaattgaacttcaaactggtgctcacatatgaggtatgtcctgcagaggtatgaggtgtggcttgggatttcatcatcatgtctcagaccaaagagtaagcgaaaggtagaaccatggcagagtcagtgctccagcaaatgatgggcagttgttttttgctctgttctatttggtgttttatgtcctgagtttttaggacagattttaattcataagtagtgtctaggtagagcacgagttttgaggagcatctcattctccacctttccctaggtctacctcaaataacatactgtggctccagttctccctctggcctctctgtgggttgtctctacctctcctcagaaaagtgtcagcacgtcctggccaaccagcatcctggatgatctgctgtagtatcagcagccccagtctaaggagagggctgcttgaggtggacaggccacacaaagcagtgtaaccatgcctagcccttgagctacaaggatcaggggctttctt

SEQ ID NO: 491710 - DNA, 639 bp, Homo sapiens
tgcagactggttcctaacaggccatggactgacagcaatctgtggctcaggagttaaaggcccctgttttagagcatctgtccaatattggctctatgctaagaacattccatgggttatcttatctaatccttacagcagcacttcaagataagtattgtctcacctctgaagttaaagcttatgatttgactctaaatctttgctgctttacagcaagctacaaaataccaggcttgaccctttcactggcatactttttttcttgttattggtcatctgacgattccaagcttcagattcgcttcaatgacagcacatgcgtctgcagctacatgcatttgtgaacctgtaaattcttaactgtaggtgagaactacttccagacatactgtgttctgggtrggctacctctttttttctcatgtggatctactgtgaaatatgaatagtgatggatctgagcatagagttgaatgtctgtaggtgttttcatgtagaaagctgaaacaatttgctactgtttctgacatagaagccacgcagtttcttctctagtttcctacatctcaggttttcctctcactgcatgaggtattggaggagcaatgtgcaagaaatcagaagacctggtctctg

SEQ ID NO: 491711 - DNA, 612 bp, Homo sapiens
taaaaatttgggtaataatagtaatttaatgctactaatgtttgacaggtaccatttaaagtactttatatgtttgaattcatgcaatcttcacaacacctttttgatgargatactattattactgccatcttacagatgaggaaactgagattacatgagattacatgatttgtatgaggttatacagtaagattccatgatttgtataaggttatacagcttgttagctggattacaaactcaagaaatctggcttcccaattcatgtttgtgattattgtacagaattactgtattctacctcttcctagaagcttatacaatggatcaatgggtttccaaagacattgagaaataacaaaataaaaaagagaatatttctttttatagatagttaatgctaccctacaatttctatagtgtgtgatattgtatatattcttcatatcctctaaaaaggtaagatcttaatatacttagattagtgttttcactattagtgggattgttttattcacacatagaaagcacacagatgttcaccttgtaataatgtcaggcaaatgtgacataactaaaacttctacatgagcgatcttcaaaagtcat

SEQ ID NO: 491712 - DNA, 589 bp, Homo sapiens
catcaatgtttcatgtacttaaaaaaaccttttggaggtgtggcccttctgggtagcttccgccaatttcctttatcagtgtgagtaatccttctgctgtcattggaagtgagtgaattcatcaggaagctgatgaaaagaacacaacgttgaatgatgattttcatttttcagacatttagaatttaggtgttcagcagagtccagatcactttaacatagtaagtttaggaaatattttcctaaaaggaaaataagcagtgttctttatcatttccacatgtttattgcttgatattagtggccactgacttagacacctacagtcactatgttactcgygcattgttaaccttaggatcaagtactccgttggttggggttaaagaggtcaaggtcattggcttaaccatcttgaggttcacgttggctttatccagtcctaaggtcacagacattattattattattattattatttttagtaaagtcagctatattgcaaagacgtatgcacaagaacaccggcatgtattaacatcctgttagggcggattcactattcatttactgcccacttttaggcata

SEQ ID NO: 491713 - DNA, 605 bp, Homo sapiens
ataactacctctataaagagattcttcatttctttttttccttaagatatagaacaattccgatttcccatccttatttcgttatttaaaaaataatattttaatggtatttgcttatttcatttaaatattgaaattacggacataacattgtttatatctttctattatattttaacaattataaaatctaaagtaatatcctggcttttatttctgacttttttgacttctctttttttcttgaccttggggtttataaattgtgttttatttttgaaggaccaacttttggtcttctttattaattttatgtttgttttctcttcattgggcttctgcctgtgtcatctttttcttcaactttcgttggattaatttgcttttctcattgcttcttcagatagatatgtagagtgttgatattcaatattcttttctaacatatgcacataagcctgcacattttacctaagcataactttagttaygtattttgatatgtcaaccatgttatcatttatttccaaacatttatttccaaacattttctaattttcattgtgattacttgttttcgcaaccgtgttttaacacctatatac

SEQ ID NO: 491714 - DNA, 652 bp, Homo sapiens
tccactgctcactgccagtaaccaggagaagccatcatcacctctcctggactagaagagtcttctagaaactctccccaacccagttttctctttaacttagatttaaacaaacataaaacaaactatccagagtttaaaagaataaaaattcagattaagatatttatattaataggaattttcagaaaagtgttctgagatgtattactaattccataattttatttatggttatattataaagccagtattttaacagtatctcaccaataatatgatttctgacctagaatgaaattttggaatataataaagtaaggcttctatgttcaaatacagtcactttttgattattctctgatttcacaataagaagtaaactttgatgcaaataatatacaacattagatgatacagaaacatttcccttggttaggaataggttatatttatttttggaagtagatttttctttgcaacmgtcacattttttataggttcacattgagtgagggaccagaccttagcacttacaaagtatgattctgtgaccagctgtatcatcttttcctggggacttgcatggaatgaagaatcccaagaaacatcctgtaactattgaatcagaatttgaattttcacaaaatcc

SEQ ID NO: 491715 - DNA, 652 bp, Homo sapiens
tccactgctcactgccagtaaccaggagaagccatcatcacctctcctggactagaagagtcttctagaaactctccccaacccagttttctctttaacttagatttaaacaaacataaaacaaactatccagagtttaaaagaataaaaattcagattaagatatttatattaataggaattttcagaaaagtgttctgagatgtattactaattccataattttatttatggttatattataaagccagtattttaacagtatctcaccaataatatgatttctgacctagaatgaaattttggaatataataaagtaaggcttctatgttcaaatacagtcactttttgattattctctgatttcacaataagaagtaaactttgatgcaaataatatacaacattagatgatacagaaacatttcccttggttaggaataggttatatttatttttggaagtagatttttctttgcaacagtcacattttttataggttcacattgrgtgagggaccagaccttagcacttacaaagtatgattctgtgaccagctgtatcatcttttcctggggacttgcatggaatgaagaatcccaagaaacatcctgtaactattgaatcagaatttgaattttcacaaaatcc

SEQ ID NO: 491716 - DNA, 604 bp, Homo sapiens
tcttttcctggggacttgcatggaatgaagaatcccaagaaacatcctgtaactattgaatcagaatttgaattttcacaaaatccacatgtgattcttaagaacattaatatttaagaagcactgaaccagagtgtcttctgggataatctcagatttgaaattttctttccataatacatgaaatcacagggaataaacagctcagtgtgtctttctgtttgtctacctcttttctaccccttcaccaaatgtaaaaattaatatatatcacagaaaatgagaatcgacagggatgttttgtcctatgttccatgatattaagcttaatcaagcatcaaatatacttacccaaaacataaatgctaatgtcacaagaagtagtatatttttcttctttcacaaaaaaagatattttgcatttaatcattctcagctagatgtcattgccaactccaacctattttcttctattgccaatgatatatatatatatacatattttaaatttacaatccaaagcattgtgcaaagatgaaaacattgaaacaatttggttcagtcagtatgtgyatgttttactaccctctatgacatttatagt

SEQ ID NO: 491717 - DNA, 342 bp, Homo sapiens
tgagtcacttcagagtcttcctgagtaaaatgtgtactgtctaccaggaggatctagagaggtgcagtggttggaatagaaggaggggcttatgaaggtagaagccgaactgcctgacaggctgcggacctctgtctttgaggaactgatggcagaggccagaaagcctgcttttgccatcacctggctgcagtggggaggmgctgcccaggctgcacgcttcatggagccagcgggagccccgccccatccaagttggagtgggaacttcctgggtgccgtcacccaaactgtggctgcagacccaggtctcctgctccagggaccaggctggagccctgc

SEQ ID NO: 491718 - DNA, 408 bp, Homo sapiens
ttaaccccagtgagctgcacccacgggcaagacatatgtgcctgcaagtagagaaactccagaattactatataagaggggttgatgggcatccttgtcatcacctctccatgcaagttgtgggtggcagcaaattatgcagtggtgagtaacttgtgttacggcttaatttgtagtctattgtgatgcgtctcaggatgatggcatagtaagactgattatagcttgaaatcagatactgattggtaacacttcatactttactcccacagaaaaaatcttacaacatcgttagtattattctatattgcttgcactttataaagtgtatattgcacagakatttttgtttataagtgaaaggaactcacaaacaagtaacttaggcaaaaatagttgggagaggag

SEQ ID NO: 491719 - DNA, 599 bp, Homo sapiens
ttgctcaaaggatatatataaaataacttttgatttttttgaactttcatcagttgtttcattcatcacagttttggttatgttccatttttacagatccaatgacttaaatagggataggaggtcttttttattccattaattttccctaagagaaaagagatgtgctatattcaaaggggcatgtgtgccaaaaataatgaaattatatttaaaatttgtgctttatctttttctatggcgtctttcaaaaaacatttcttttcacattttgaaaatacttagactagagctcctcttttgacttgtagtaagacggtgctgcaccctgaaaagcattagaaacacccatctccctttaatttttcttaggttgtcattcaagatccttgttgctttgtcgtttgactccattttttstactaacctacttttttacccatcataaacccaacactcatctgaaagtgcagttttagcggtttccttattgccaaatattcttgatcttattgcccttacctttctcctcctcaaataccctgtttcactagccctttaaatccaatgtgtatcacacccagctattttctccccac

SEQ ID NO: 491720 - DNA, 629 bp, Homo sapiens
caatgactataaagacttgtggaaacatattaaaaaatgtttctggataaggtagagtggctcctttcaagatcagctaaacgtttaacaaaatttagagactaaaatttcattattattctacaaacttgtccatggattttgaaaagaaaaataacaatgactttggaacttaaaactgttgaggggagagtttttctccccagatgttggtaaatttatgaaattaataaaattgcatgggaatgggcactgaaaaatgccttccaggacatttgtcatattctcagtatcaattcatgaaatggaaaccagaagttgtttctgtagtcattatgtaatagatagtaaacatgcatttttggcaaatgaatagttagcaaattaggcatctggatgcagtggaattttggattcttaattgcataattcacccttgaacacctgccagaggaaaaaygagcaaagataatatagaatctgaggaaaaatataagctgataaatagggaatgataatgcagtatctaacaagtttttgacttcacatcctagcctgttttccacaattaatactatttctgtaattatccagagatatttagatttgcataagaggtattctaagga

SEQ ID NO: 491721 - DNA, 518 bp, Homo sapiens
ttattattctacaaacttgtccatggattttgaaaagaaaaataacaatgactttggaacttaaaactgttgaggggagagtttttctccccagatgttggtaaatttatgaaattaataaaattgcatgggaatgggcactgaaaaatgccttccaggacatttgtcatattctcagtatcaattcatgaaatggaaaccagaagttgtttctgtagtcattatgtaatagatagtaaacatgcatttttggcaaatgaatagttagcaaattaggcatctggatgcagtggaattttggattcttaattgcataattcacccttgaacacctgccagaggaaaaacgagcaaagataayatagaatctgaggaaaaatataagctgataaatagggaatgataatgcagtatctaacaagtttttgacttcacatcctagcctgttttccacaattaatactatttctgtaattatccagagatatttagatttgcataagaggtattctaaggat

SEQ ID NO: 491722 - DNA, 551 bp, Homo sapiens
atgcagggaacgagcaggcaaattacttcttatttttgccagtcctaaaaacaaagaaacagtcaaacatctgatctttgaaatkaatgcctcctaaaatagagttgtccaaatcattggcagtgttagagctttgaagaaacacagatggttcggaattgcacagggtgagtttatcagcagtgatggcaaaagggatactaattaattagaataggactggctatttattgctctgcagcaagaagttttgacctttaagtagtttcaagacccagaacaattcctgccactttcatagttatgtgtgacctggggctagctcctccttagttattttgaccagcctacaaaatcttattgtcacttaaggtttctcatggttgtgttatacttaccaattaaaatgggagctccttgatggcagggctgttgtttataccactttaactccagccctgaccagtaggtgcttgttgattatgtttatcttggagtcaacctctggggagaatgttggtcactgaattgagaggctggtagaaagtcac

SEQ ID NO: 491723 - DNA, 637 bp, Homo sapiens
aagcctcccaaacacttaaggatcaaacatatacaaatgactcactattctctaatatcatagccattgaatccttagtacatgtttgtcagtgggccaggaatttcacatacattatcctatgctacagtagaagacagtgcagcaggagatccagaaatttgcagaggaaactgaagcaggagacccaaaaaaagtaaagtcaggtaaaggccaaataattagaagccattaaagtttggactcaaaccccggcattctgacttagaagttcatgtttttattcttamaatattgccatctaaacatttgaagtaatccctataacctcctcaagctaagaaatgttaacatatatctgtattaaaatacataatatataatttattttttcatgcatttagtcatacatgaaaaaatgtcaaggactcctctttgaaattgtatagccacctgttctacctttgagtcacatttttggagatagaatgttttggaggtaaaaatgtacaaaaaagggtaacctagaaaatacaagaggaaaaggaatcaggctacatcaggaagtgaccccaggaaattgctttaaaagcagggcaggcaagaatcttcaggtcaagcacagtggagttcagta

SEQ ID NO: 491724 - DNA, 636 bp, Homo sapiens
tgggtgcactgagcgcctcctccttaggagtccaactttcccaagacttcaagccaactgyggtccatgcagctcctccctcaccacaaggacaagtactcactggccccgccccggttttcctccagagacccagtgtaaaatgaaaacgtggggcctctctttaaaaaattaagaatttcaatacagtgacagtggagcattagatcaagcatggcccttctccccagggcttggcccctgggcccctgcaattcagagcagtgagttctgattctttctgggccccagcctcctgtctccctcaggttttcaaacaagaatccatcctccctctgctccaagcccctccttgactctacaacttctgcccctcaagaaaggggcattggtatgagagttttagaggaaatgttaaatggctgttaaagttgtaaaatgttcctactctttgatgcagcaatttcactccaagagatttattcttcagtggatagattccccgaggagctctcccagtgctcaaagcctattcactcttacggtgcttgtaataagaaaaaataaaaataacaacagcttaaatgtctctcaatagtaattaaagaatgaggcagatttataggtaatgatcag

SEQ ID NO: 491725 - DNA, 646 bp, Homo sapiens
caatttactgcaactagtattacctttttacaattacagtaaaaccatgccatttttctcttcccgatgtgttgattttctggtgcccacacctgccatttgtttttaaggcttctccctgcagcagatacgttcaagagaaattacaaagtagtgccatatacaatactgagatgttttgtttggttcattcagggagattttttctttgaaatttgagctagcattttaaaacagagagattttacataaaactcagggtttctagcctttcttgaaaaatggggaagtctggcaacactgggggacaatccaggtgaggtggcctgcagcgacttctagggaagggggctatgaacaccagtttagccaccaactcatcatacacggtggacaaattccccatacccagcctgcttgtaggcatttcagttttctrcttctgatgtacagtgtaatacttacctggggtgatgatcaaaacattaccaaccagttcccccaggcaccagccagaactgacttgttagtaaggtacaggagactcagtgcctagggctcacaataatttttagacctccccaccaaaaatgttttgatttctttaaggaggaaaaaagtggagtggagaaagtatttaacaata

SEQ ID NO: 491726 - DNA, 568 bp, Homo sapiens
gtctgcaagccagggagagaaggctccttggaaaccaaccctaccagaccttgacctgggacttctgcgccctagaactgtgagaaaataaataccagttgtttaagccacscagtctatggtactttgttatggcagccctagccgacaagtcctaaaacaatatgatttagtctgagctattgggatattaaaagacttcatctggcttgaatgccttaattaagataacttgcttttagtagttatgggaccctgccttctttgtgagtatataattcaaaactgacaaagtagtatgatgacaaaagacagagtgcctgttgattcaggttttatccacaattgtaagtgaaacaatgtcatttacaaaatcatcagggctttccactgtaggacaataggtttcctacatgtcaaatcaaatgttaactctcatgtttaactctgatatcttcctcttccctcatacaaatctacataaatcaatgcatgcatatgtagggctgtttttttccctgtttcttatttaacaacatgaaattaaagccttctggctcaagagagt

SEQ ID NO: 491727 - DNA, 568 bp, Homo sapiens
gtctgcaagccagggagagaaggctccttggaaaccaaccctaccagaccttgacctgggacttctgcgccctagaactgtgagaaaataaataccagttgtttaagccacccagtctatggtactttgttatggcagccctagccgacaagtcctaaaacaatatgatttagtctgagctattgggatattaaaagacttcatctggcttgaatgccttaattaagataacttgyttttagtagttatgggaccctgccttctttgtgagtatataattcaaaactgacaaagtagtatgatgacaaaagacagagtgcctgttgattcaggttttatccacaattgtaagtgaaacaatgtcatttacaaaatcatcagggctttccactgtaggacaataggtttcctacatgtcaaatcaaatgttaactctcatgtttaactctgatatcttcctcttccctcatacaaatctacataaatcaatgcatgcatatgtagggctgtttttttccctgtttcttatttaacaacatgaaattaaagccttctggctcaagagagt

SEQ ID NO: 491728 - DNA, 605 bp, Homo sapiens
tggaaaagtggatctggttgtggggggtgcttgtgatctgccccactgtggagtcagtaattctgagcaacaggcatcaagcggacgggtggaccttcggactggagaatcagaggacaaatacattcactaacaaagacactaagtagcagaagttcaagcaaagagatcaccgactatgcagataaggtttgtttgtagtgcccctaatagctctccactgcatatgtaatccctataatgtattctcctttaataaaacagaaacggattacttgatgtacaaagtctggatagttctagccttcacttcatcttagatctgatctgacccaggctcagcctccccacagatacttttcctagcctggtctgttttcctgcccacttatcccaatcctcaattcctcctctgaactcctaagcactgtgacactctgcaatccaagcactctcctgkgatttcacgtatgtgtaaatacagcctttttttttttttttggtaggccacattttgctcctcaactagactgctcattcctttagggcaagaacagtgccttattcatctttctgtcaccagcacctaatacactgccagcata

SEQ ID NO: 491729 - DNA, 596 bp, Homo sapiens
aaaacaaaacaaaacaaaaaaccgagcatttatgcatgggaacattgatgtcaatgatggctaacattttatcacaaagagtggaggccagcagacagtgaggatatatctttaaagtgctgaaagaaaataaatcagtcaatctggaatttygtatcaagtgaaattatcccagaggtaacataaaggcatttttggaaaagcaaaaacaaacctaagagacttaattaccagcagactagcattaaagtaaatgacaaaggaagtactttatattgaagatagatggtaacatctgagttgttataaactcagagttgtggaaagaatgaaagagtatgataaatagtaaatataggtaaataaaaaagaatagatttttctgttaatttctttaaaatgcatataattttaaggtgaaaattataacactctagggtagagtatattgtatatgtatatgtaacacataataaatagcttaaagagtggggggaagaaaagaaaatgtttaatccaaaattcttacactatataaaattgtgtattactataggttttaatcactaccaaaaccacttgtaaaaatatcataa

SEQ ID NO: 491730 - DNA, 590 bp, Homo sapiens
gaaaattccagatgattgaggatttggacagcgatcagacatcagccgaataatgtgcagaaagaacaaagagcacagtcgtgtggagggaattctgagtgtaagactataagaatgagcaacactatcacagctttgtgcagcttgggtagaaaaattkagagaggccacagtgggtaacaagtaggccaccagtcagcatttttttttccttctggaggagtggtaaaaagcaaatctgtaactgtgagaaaggaatgagaacagcccttttgaaatagtcaacatgactcaggccttggctggactgataggtccagtcctgggactcaactggaggctatgcctcaccaaacaccccaatagaaatggagaaacagaatcagtcacccagtggccattgaacatctacacatttgactttgtaaatcatatcatgtgaatggctagttaaaggtatcaattattttcatcacttttagtttgcttgcttcaggtaggcatccaaaaaggtacagaatattcagaaaactgaaacgatggttacaatttagaaaatgcaagattgtttctgcggaaacaaaacttat

SEQ ID NO: 491731 - DNA, 601 bp, Homo sapiens
actaaagccactagaggtttggggatacaaaattatccaaaatgcatttcttccataaaactcaggtacactggaggccaggcaacttgggtagcaataaggaagctgaacacatagaaattctgggcccttcagactcgatcttccaaaaaagcatgtttttatctgttttatacattgagacatcaatttctgggggaaaaatctataaaaaattatagctttaaaaccactagtccctgagaaaagctgtgaaatcaggatcccaagatttgtgctttgctgtatactcatctatgtaccaccagtgtattcttagccttgctgagaatctggttcctgaactgtaaagcagaaaaaatggcctctgccatatctccacacatctcttgcaggagttgtgagactgaagtgatataatgtatttaaaagctgattgtagcatttattaagagtaaggctataaagatggatatagcagaaggaacaggggaaccagcagtatcagagaaagcmtagttcccatattcaaagggcctgagctgggaaggggaaataaaaatgccagtaggcagttgatataatgagaaagcgagcagag

SEQ ID NO: 491732 - DNA, 656 bp, Homo sapiens
gtgcagaggaataatgcacatatacatacataacatctttactgacagacattcaaacacaaactatgtaagggaaaatatatcatcgaccatagtattcagaattaaaaaaacacaaactatcaycagaagctgggtacatcataattccatagtcagttaattgaaaattgtagttttaaccgtaaagatatataaaggttaatgcaacaggtaaggctattatccaaacactattgtaactgtaattttcattttcaattatgaagaaatatagtctattctctacccttaccatcaggctacagcaactgataaatatttacattcacagctataactcattaaaagaaaagaaattattcaaatgtaattgtagatttctttttattggaattcctttgaggaacattaagtgaggcaaaacttctcaatatgcatcttgctccattttagcacttagcctgctttaagctacagaatattttttaaataaaacaaagccttatcatacttagtcttgaaatacattttcaattacatatgctattgcttatatggatacaggtcaaagacttacattgcttcatcagctctcattcatagctagattatgcagaaactatcttctttttagataccaaaatgtcacattt

SEQ ID NO: 491733 - DNA, 552 bp, Homo sapiens
tggacccaattaggtgaaccctttaaaagcagagaattttcctttgacaaggaagtcagaatttgaagcatgagaacgatttgatgtgccttggctagcttgaggatggaggtagccatatctcaaggaatgtaaacagcatttatgagctcagagagacccactggctgacaatcagaaagaaaacatggacttctgtcctaaagaacttaattcggccaacaatctagttgaacttggaagctgacttttccctagaacctacagataagaacccagtttgatcaacatcttgatttcaacattttgagagacaaagaagggaactttaaagagctgcccagacctctgatctatagaactgtgagytgataaacgggtgttggtttaagccactgtatttgtggcaatttgttacacagcaataaaaaaaaatgcactagtatttaaaaaaataaaaaaactaatacaattgtaatgtatgatgctatattttgacccacagatgtcatgaataataatatatcttaagatgactatttgtacatatag

SEQ ID NO: 491734 - DNA, 580 bp, Homo sapiens
ctgctgcacctgtggccctaatctcaacacatgccgccagttgcagacctggggaacaatgccagtgcagcaggagaatgtcaccaaatgcctgcttcatgacagaggaggtcctgaggagctgagttaggtcttgaaaaagttttgtcccaccaccggggacaaaatggcattgctttatgtgtcactaatccttggagaggctccttaaagatggaagagactaggggatctaaacacagcctgggttgcccaggcctcactgggacacaccctggtaggaatgagggtgagatgccagtgctggcctcttgcctctctccaagatcagcgaagctgggcactcattaaaggggtgaggacagactttattgagtaagaatgactgcaatccagaagagggrccagggtgaactgagctcaacttccctgaaacagaaggcagggggtaaaggtgcatgtactaagaagacactggggatgttaaggagctttggtccatgagactaggccacctgggtgtgatagtgactaggccacctggatatgataactggtgctcatctggaggagaagcaaa

SEQ ID NO: 491735 - DNA, 618 bp, Homo sapiens
ctgggcccccacatgatggtggtgtgaagctccaaggtggatattgactgagtgactcctcttggggccgggttccaatgtggggaggcaggaagcagtttctttctcctcagaagacactaagaccagttaagtcttgggagttgatgcagccagatttaagaacccagaggcccttgggatagcaggctgcagataaaatcgacttacaacttagccacggctggagcatggttcaggctgatgtttactgtagtgatgtagaggccaaacgtgacctcagaaagcacccagcaggcggagtttgagacatccccgtgggcagagctggtgctgaggctcaggcygtggggtcgtggaagggatgcaggaaagaaggttctagaccagggcttgacacttcactctctggggccacatgggctgaggcctgggcatgcatccctggtgctgatctgctctgtggatattaaggtgcctactgtgtgctggctgtggtctctgtcatgccgggaggtgacggtgtcttctctggagccccttgccctggctctctgcccagtggttctgcctctgccacgtggaggccttcagctcccaacaggggtggaggacctc

SEQ ID NO: 491736 - DNA, 446 bp, Homo sapiens
tgctttacatactgaagaaacgggagaaattccaggatgtgcttgcagaaacaccgagtctaccggctgagaggaagcatagagggtgcgaggagagtgggcatgaggctgctctttattttacagaaccttcccattccctgtctcattcggcargggtaataatgatagctaacatttgagtatttttttgagaaagcaccatacagagcacttttcatgggtcagcaatctcattcactcctcacaaccctttaaatagatgctgttattaacctcatttttgtaacagaaaatgaggcttaatgggcatgggtggatactgaagctagacttcttcaaaacctcttctttgaggtttgcaaacactaaggagagttgatcatggcaatagcatccgaccagacatctcctcggagtctcgcccccacgtggagctcgaatga

SEQ ID NO: 491737 - DNA, 624 bp, Homo sapiens
aagtaaattgtatatttttttaaagcagagacttattctgtggttacagttttgggatttttcttttttgttgttgttgttgttgttttgttttgtttttggtaccctgtgctttgaataatatgtcttctgaatagtaggagctttttaaacatttcagaatttgagaacagaagcgttctcaaatcctgccaataatacattcattggcagttatttttagtggtgcccratctggataggtgatgattgccactgtagttagcaacttaaagcattcacaaatgatggggtcacaaaataaaccgcaccttctcaagcatgagaaaatactgtgcctagatgggaaatattacaagtcactagttaatggaagatctatgtttgtgctcattgtcgtgtcctcatttcttgtaacttctataaactggttctattttttaatttctttgacaaataaaaattatgtaaatctattgtgtatagcacattattttgaagtatatatatatatagtggaacgcctcaatagagctaattaacatatgcattacctcacatacttatttttttggaggtgagaacacttaaaatctacacttttagcaattttcaagaataaca

SEQ ID NO: 491738 - DNA, 624 bp, Homo sapiens
aagtaaattgtatatttttttaaagcagagacttattctgtggttacagttttgggatttttcttttttgttgttgttgttgttgttttgttttgtttttggtaccctgtgctttgaataatatgtcttctgaatagtaggagctttttaaacatttcagaatttgagaacagaagcgttctcaaatcctgccaataatacattcattggcagttatttttagtggtgcccgatctggataggtgatgattgccactgtagttagcaacttaaagcattcacaaatgatggggtcacaaaataaaccgcaccttctcaagcatgagaaaatactgtgcctagatgggaaatattacaagtcactagttaatggaagatctatgtttgtgctcattgtcgtgtcctcatttcttgtaacttctataaactggttctattttttaatttctttgacaaataaaaattatgtaaatctattgtgtatagcacattattytgaagtatatatatatatagtggaacgcctcaatagagctaattaacatatgcattacctcacatacttatttttttggaggtgagaacacttaaaatctacacttttagcaattttcaagaataaca

SEQ ID NO: 491739 - DNA, 640 bp, Homo sapiens
gattgtgccatcgcactccagcctgggtgacagagggagactccatcttggaaaaataaataataataaagacggaaaataacatagagaagggtttttcctttctattctcagagcatatagaatatgtaatattcagtttcccttttggagggagacagctacctgatacaatttgttttagaatttgctgtaggtgtccagtgcatgtgaactaaaaatttgcagctatttaccacctgttgaaataatgcaaagtttaaaagctgcaatttggaatctgccatccagtaaaaatctctgtattttgtgaagctttttgttttttaactaaatcccattgatgcttttgtatttttcagttgttggtataagagaatgtttaatttaattacattatattagatgtggcccaattatagtccttcagactcacccagactacagatttatagttggcagttgcaaacatgtgttacacagaatcaattctccatttaaaattctaatgtcaaagtrtttttcctttatgttagaagtttagtttttatttgagtttgaagaagagagctaatgatgtacattttcctctgtttaattgatgttctttagtgtgcttaataaaaaaaaaaaggcctta

SEQ ID NO: 491740 - DNA, 553 bp, Homo sapiens
gctgcctttttcctgctgttagctgctgattgcatttggtcatatttcattttgattcagctctttcctctctgtaggatattaccattacatttttgtgccattttagattttctcttgttgtcacgtgtaggaaatagattacatttttcttgtctgtgaagccaaagagattgttttatttgaagatggcctcrcactgtctggactaaagtacaacagagattaggtgccagaagagtctttccgtgagatgtgatttcttgcaatggctctaaagagggatcagagtaatccagttgacctggaaactcatcctaacccatagtcactggagcagcacaaatcattactctactcctcttggtggctgcctcatggttacagattctgcttccataagaaattcctttttagaggaagctatgtacagtttctgcatatagtttttccctatttatgcatctatataatcctcacctttccacatggggcttatttgtgtatttgtttattcatttgaccaaaacttatgtagtatctccttatgtat

SEQ ID NO: 491741 - DNA, 553 bp, Homo sapiens
gctgcctttttcctgctgttagctgctgattgcatttggtcatatttcattttgattcagctctttcctctctgtaggatattaccattacatttttgtgccattttagattttctcttgttgtcacgtgtaggaaatagattacatttttcttgtctgtgaagccaaagagattgttttatttgaagatggcctcacactgtctggactaaagtacaamagagattaggtgccagaagagtctttccgtgagatgtgatttcttgcaatggctctaaagagggatcagagtaatccagttgacctggaaactcatcctaacccatagtcactggagcagcacaaatcattactctactcctcttggtggctgcctcatggttacagattctgcttccataagaaattcctttttagaggaagctatgtacagtttctgcatatagtttttccctatttatgcatctatataatcctcacctttccacatggggcttatttgtgtatttgtttattcatttgaccaaaacttatgtagtatctccttatgtat

SEQ ID NO: 491742 - DNA, 553 bp, Homo sapiens
gctgcctttttcctgctgttagctgctgattgcatttggtcatatttcattttgattcagctctttcctctctgtaggatattaccattacatttttgtgccattttagattttctcttgttgtcacgtgtaggaaatagattacatttttcttgtctgtgaagccaaagagattgttttatttgaagatggcctcacactgtctggactaaagtacaacagagattaggtgccagaagagtctttccktgagatgtgatttcttgcaatggctctaaagagggatcagagtaatccagttgacctggaaactcatcctaacccatagtcactggagcagcacaaatcattactctactcctcttggtggctgcctcatggttacagattctgcttccataagaaattcctttttagaggaagctatgtacagtttctgcatatagtttttccctatttatgcatctatataatcctcacctttccacatggggcttatttgtgtatttgtttattcatttgaccaaaacttatgtagtatctccttatgtat

SEQ ID NO: 491743 - DNA, 553 bp, Homo sapiens
gctgcctttttcctgctgttagctgctgattgcatttggtcatatttcattttgattcagctctttcctctctgtaggatattaccattacatttttgtgccattttagattttctcttgttgtcacgtgtaggaaatagattacatttttcttgtctgtgaagccaaagagattgttttatttgaagatggcctcacactgtctggactaaagtacaacagagattaggtgccagaagagtctttccgtgagatgtgatttcttgcaatggctctaaagagggatcagagtaatccagttgacctggaaactcatcctaacccatagtcactggagcagcacaaatcattactctactcctctkggtggctgcctcatggttacagattctgcttccataagaaattcctttttagaggaagctatgtacagtttctgcatatagtttttccctatttatgcatctatataatcctcacctttccacatggggcttatttgtgtatttgtttattcatttgaccaaaacttatgtagtatctccttatgtat

SEQ ID NO: 491744 - DNA, 627 bp, Homo sapiens
actactgtgtagttaacaacagtatattgtatatttcaaaatagctagaggagaagacttgaaatgttctcaacacagagaaatgataaatgtttgaggtgatggatattctaaacttgattgttacaaattctatacatgtatcaaaatatcacacgtaccataagtatgcacaaatattatgtatcaataaacaaaatggacatttaaaaatgaaaaaaaaaaaaagcatcacagacacctattgtaggccaggtcttactaggggaacagtagatagttccttccttcaaggaacagagtcttggagagaacgccagctcttacggttattgaagtgaataatactgaggacacaacagtcagcatgcttctaggacacctccaggaatataaactcgtgtttatgtctaaggtaaatctgttgccacgtatgcgtgtgtaagtaatacagactattaaaaggtatttgtctgacccagttatatcatcsacatcacggtcaactttctaccaagatgactgtgggaaaaaatgtattaatatatgtggactatttccttacctctagaatttctctagttatatctttagcattttgttcattactggctaatgtacaagttt

SEQ ID NO: 491745 - DNA, 486 bp, Homo sapiens
tggccctgggcagcctggcatctagagagaggtgttggccaagatttgaagggtgtggaagctcccttctccctattgctyattcttgacctggactttttgtcccacatcccttctttgctcccaccgggatccgcaccctgcccccaggagatggagtttctggatatcaccagcatccgggatactcgctttgggaagtttgccaagatgcccaaggtaggtgtgtccagtagcagcccaggctcaagcacagctactagctccatggggcaagggcaggggtccctgtgcgggtgggaagcctgacttctgaagcacggggaatggttccttggctgggcagcaaggaccgtggctggaagccaaggaaggggagcggcagctcctgggctcgcctgggctctgagcttcagaactgcgcacagtgagctgagatggcagggatctgggaggaggggtcacctcctgcccctaaagcacccc

SEQ ID NO: 491746 - DNA, 486 bp, Homo sapiens
tggccctgggcagcctggcatctagagagaggtgttggccaagatttgaagggtgtggaagctcccttctccctattgctcattcttgacctggactttttgtcccacatcccttctttgctcccaccgggatccgcaccctgcccccaggagatggagtttctggatatcaccagcatccgggatactcgctttgggaagtttgccaagatgcccaaggtaggtgtgtccagtagcagcccaggctcaagcacagctactagctccatggggcaagggcaggggtccctgtgsgggtgggaagcctgacttctgaagcacggggaatggttccttggctgggcagcaaggaccgtggctggaagccaaggaaggggagcggcagctcctgggctcgcctgggctctgagcttcagaactgcgcacagtgagctgagatggcagggatctgggaggaggggtcacctcctgcccctaaagcacccc

SEQ ID NO: 491747 - DNA, 226 bp, Homo sapiens
agcacctgaccaaattcatcaaccagaaacagcgggactcccggcttaactccctgctgttcccgccagcacggcctgaccaggtgcagggcctcatcgacaagtatgagcccagtggcatcaatgcacagaggggtgaggactaagggaaycccttgtcccctgtggtcctgtcctgccttggcagcggggttgtagcctgacagctatctcctgtcccccaggc

SEQ ID NO: 491748 - DNA, 619 bp, Homo sapiens
ggtgtgtgtgtgagctgtgagacatgcacaccctttcagagtgatactgtgtggtggaaggactgttagaactcaaagaatagttaataaatccagtgtattattccgttgcgagaactggcctctctttgccttatcaagcactcctgaccctcggctccctttggagagatggaccgagcctttgcctcctgtggaggcccctgccttagtgagcctccgccctgcccgtccyactgtgctggctcctgaaggtaagtcacaggtgctgcttctgctgagctggggggacaggccgggccagccgcagcaccagggcacctgtcagggtgtgaatgcactggggagtgaaagaaaggctgcatggttccttgctcctggcttgctcctgaatcctgggcagtgggagatctcaggaaggaagtgcgggaatccgtgtgggagctggaagttgcaagataatttcatccacctccccacccccagaacgaaagcccaggctccctggtttccaggctctgctccgttctttttgaaccccacaccatctccctcagtcctgaggagtgaggcagggactgctctcccactggaagcggtttcagaccacttcctatgg

SEQ ID NO: 491749 - DNA, 619 bp, Homo sapiens
ggtgtgtgtgtgagctgtgagacatgcacaccctttcagagtgatactgtgtggtggaaggactgttagaactcaaagaatagttaataaatccagtgtattattccgttgcgagaactggcctctctttgccttatcaagcactcctgaccctcggctccctttggagagatggaccgagcctttgcctcctgtggaggcccctgccttagtgagcctccgccctgcccgtcctactgtgctggctcctgaaggtaagtcacaggtgctgcttctgctgagctggggggacaggcsgggccagccgcagcaccagggcacctgtcagggtgtgaatgcactggggagtgaaagaaaggctgcatggttccttgctcctggcttgctcctgaatcctgggcagtgggagatctcaggaaggaagtgcgggaatccgtgtgggagctggaagttgcaagataatttcatccacctccccacccccagaacgaaagcccaggctccctggtttccaggctctgctccgttctttttgaaccccacaccatctccctcagtcctgaggagtgaggcagggactgctctcccactggaagcggtttcagaccacttcctatgg

SEQ ID NO: 491750 - DNA, 494 bp, Homo sapiens
tttctgaacctgcttccctggacacccagaggatccctcaccaggtccttgacagcctgaaggacacagctctgcttccagccccttagcaagaggcccaargagctgagtgcatggaggctgtgggcagaccagagcacaagagattgttgcctaggcagagagacactgggattggctgaccgaggcagcacttttggggaataggttgccacggagaatccacaggtgtcaaaaaaagtcatcactggccctatgtgaatacttgggtctctgccctgcctgatgtgtcgtgatgaggttttgtaggaaatgctggccagcagaggtgtccctttgctggggctgaggcagttgcggcctctcatgtagttatgagggaacctgttttttcacatgtgagttcccccagcccaagaaagcctgtcatgctctggggttgccttgttttccttaggtgaataagctttaggattacctttcctaaattcata

SEQ ID NO: 491751 - DNA, 610 bp, Homo sapiens
ccctccccagccccagcccttaggggtgaatcttaagtttaaaccaatcttggtaacgcccttccctttgccagggattggtgtaggctcacatatgtgacaatctggccaagagacacgcgaggaagccagctgggagggttttgggagaaagttttcttatgctgctccaagttgttsaggaacttggaactgtggtagccaactgagacccacaagggaaccagctcgaggacaaaagccagcatgctgaggacggaggaataggcaggtggaaacaacttgggccccgcatgaacttctgagctccaggtttgctgttatgtgaaataacagatattcttaccacttaagatattttggttgttcttctgggtttttctgcagctgaaaactacctaatataagccagctccagcccctatcatgccacactagcccttagttcagtctaacatatacaccgctccactccatcagctactgctcatggcttccctcgagatgtccgtttttgactgacttatttctctcatatattatcttggcttttaagtgttgtggcctgggccgggcgcggtggctcacgcctgtaatcccagcactttgg

SEQ ID NO: 491752 - DNA, 557 bp, Homo sapiens
gatctgcctcctgcaggagggcagaagccaggggctagaagtcagggtggcactgtgctgggggaagctgagcctgccaggaaccacctaaggtgactggggtagggggtggtgacaragaccagcaaagcaaagtttgcattctgttaattcaaagacctccacaggtacccaggtgtggtccacctgcaagaatggagagggggtggccgcgaccactgccaggacaccagcacaaggagccatggcatttgtgggtgctggttggctctctgatcggctctctgagaaggacaaaagcccccaccagtctgggatctggcttttgaccgtatctgccttgatctaaaagtctgaggagctgcatgaagcagccaaacctgatgagcttttacagggaaaaagaactgcagagctggggtctcatgggccatgcaggtcacatgcatctgtgtctgaacttcagttagatgaactaagacttctgctagcctgcctgtggggccagcacagtgctttcgtcctcatcacagccgttaaagcccaggatgtgaggc

SEQ ID NO: 491753 - DNA, 478 bp, Homo sapiens
tacaggcctttagaaagaccttctctgaaggtcctgtcgcagaacacactggaactggggctgtgcaggaaacatgcccagacaggaggacagttcagtgacagcaggaaccgggactgccgtgggctccaggctttgaagcttgtgtggttctgggagtccgaattcaggagtgaggaaggggacttcgagacctccctcccttcagccaggggatgtttgtgggaggaggtcggcttcatgaagggcatttggttaactcaaaggatgacaggtaaagcctgggaggaagacacctgtgggagatgtggagcgggctgggcaggtgaccttgacagaggagaaaggtgccaggggtggggtagagaggaagcaagaggaggcrgagaaaccccaaggccacagggagaggcaagactcgtaagaagatgaagggagaaagcgtgtacatcacagtgcccaggttgccttggaagaa

SEQ ID NO: 491754 - DNA, 655 bp, Homo sapiens
ggagtctggcaagctgagggccagatgcatttcagtgcccacttggccacctgtcaagtgccttcaggaggggcacagcctgtggactgtccctggtggccttgcctgcctgccagcccataacrtcatccctgcaggaggagaggcgccaccttactaaggaggtggggatctcagacccgtgggtgggtcctgagccattccacttaggggccgctggggtccgtgttaccaggacggcagggggggctagacgccctgactgaaagcaatgcatcgggcccacctggagggggccagccgggcctgggctgcagagagcctcccaggcagctcagtgtcctgggtctctcctcgaagtgtacaggctgcctgacccagtcctagattatatcctcctctgtgtaaacttgcctcaagcagcatgccagacaccaaccagtctgggcccctccctggggaaatcacactacttcccgcatgctctttctgggcctgaacccagagcccagagccctggtcccagcccaaagtgcaccccttctgccctcctgtcctgacctctcctgccacaggtggatctcctccagcaggtcttggtgctccctcagcagccgctgagccgaggccacatccactgacacctccttgctgc

SEQ ID NO: 491755 - DNA, 516 bp, Homo sapiens
gagaggcgccaccttactaaggaggtggggatctcagacccgtgggtgggtcctgagccattccacttaggggccgctggggtccgtgttaccaggacggcagggggggctagacgccctgactgaaagcaatgcatcgggcccacctggagggggccagccgggcctgggctgcagagagcctcccaggcagctcagtgtcctgggtctctcctcgaagtgtacaggctgcctgacccagtcctagattatatcctcctctgtgtaaacttgcctcaagcagcatgccagacaccaaccagtctgggcccctccctggggaaatcacactacttcccgcatgctctttctgggcctgaacccagagcccagagccctggkcccagcccaaagtgcaccccttctgccctcctgtcctgacctctcctgccacaggtggatctcctccagcaggtcttggtgctccctcagcagccgctgagccgaggccacatccactgacacctccttgctgcg

SEQ ID NO: 491756 - DNA, 579 bp, Homo sapiens
ttgagaagagcacttccaggccttagcctctgccatcgtgtccagagagtaaggaagccccccaaaaacatgaattctgcgtagcccccgctggcagagccttttctgtgcctgtccttgcagaatcctggctctctaagccttttaatcccattagaagcttaatagcccgagagtcgggaagaagggggaggcccaggaagggccattcctcccctggcttcccttgtataccaggcaccgtgctgggyccattacccatgctccctggaacactcacaagggccttctgttatccaggcatcatcatctccatgtgatagagggtgcacagtgaagttgggtgacttggccaaggccacacagctagtacgtggcagggcaggcttcacgcttaggcctgtctgcctctggagcccttgctcaccccacccctcctttctcccccaccttagtgagtctcctctggacagtctgcccctgatgcaggcgggagcagtagtggtagtagagggagacgtaggtcatgatagagcgctcatctggctgtgcggctgccacgtcctcggggtccagcag

SEQ ID NO: 491757 - DNA, 589 bp, Homo sapiens
ctgctcctctcccgctgggatgggaagtgtcccagcaagrtgacggggtgtatctggcagctaagaagagacctcttggttgatttaagtggggaggagaagagggaacccctgctctcctgaggaggccctccatttcctcagcccatgttaaaattgattctgagatcctcagctttgaagcattgcactgggtgtgacagaattctcctcctgaactgtgttctcgtgacacctgagctgaaggaacacagagctaccttcttacttgctgtagggtattcgccagggacagtagagagaccaggtgggcctgagagaagaaaaggttgggacttggtgcccaggatcatgcagtgtgttagcagacaggcctgtgacctcagtgttctgctctttccacctctacactgcccttgagcatcaaggagtcctaaatgcctgaggtacaggagaaccatggacctctccccagggccctcattcacactctgctacccaggaggttccttggcagccagggctttgagatcttgcccctagtgacttgaagacatattcacttgtttacaaataattactgagggcc

SEQ ID NO: 491758 - DNA, 463 bp, Homo sapiens
ctggaggctctgcgccaggcagtgcagcggaggcggcagcgcaggccccactgatggccggggcccctgccacccctaactctcattcattccctggctgctgagttgcaggtgggaactgtcatcacgcagtgcttcagagcctcgggctcaggtggcackgtcccagggtccaggctgagggctgggagctcccttgcgcctcagcagtttgcagtggggtaaggaggccaagcccatttgtgtaatcacccaaaaccccccggcctgtgcctgttttcccttctgcgctaccttgagtagttggagcacttgatacatcacagactcatacaaatgtgaggcgctgagaccatctgttattactgctgagaagggccatgtcattctaggctcttggctgtacatggcaagggctggtacagagctcgctcatcagtgttcttcctccgaagagcacatt

SEQ ID NO: 491759 - DNA, 463 bp, Homo sapiens
ctggaggctctgcgccaggcagtgcagcggaggcggcagcgcaggccccactgatggccggggcccctgccacccctaactctcattcattccctggctgctgagttgcaggtgggaactgtcatcacgcagtgcttcagagcctcgggctcaggtggcacggtcccagggtccaggctgagggctgggagctcccttgcgcctcagcagtttgcagtggggtaaggaggccaagcccatttgtgtaatcacccaaaaccccccggcctgtgcctgttttcccttctgcgctaccttgagtagttggagcacttgatacatcacagactcatacaaatgtgaggcgctgagaccatctgttattactgctgagaagggccatgtcattctaggctcttggctgtacatgrcaagggctggtacagagctcgctcatcagtgttcttcctccgaagagcacatt

SEQ ID NO: 491760 - DNA, 451 bp, Homo sapiens
tggggagctgcctggagaaggaatctccaggcactcacctgcctcccgccaggcagcaggtgctgcttgaactccaaagacccctccatggtgggggtaccctttgcatcctgaaaatgcaagatggggcccagaaatgtcaggaccagcaccctcaggaaggtgggcaaggcacccactgcccccagctctctttattcctcccatccaagtactaaccaggcctgaccctgcttagcttctaagatcagatgagatcgggcatgttcagggtggtatggctgtagacagccatctttattcctaatgaccttcagctcctgtgcccgggctcccagcactggctccagggtgtgggccctcacccccacagccccagccccactgcatgctycagggagaccacggcgggggtgcctgcagccccatagggacacctgcctgggggtcc

SEQ ID NO: 491761 - DNA, 527 bp, Homo sapiens
cttttattgcttggtccaacctctcccaagcagcctcaatgcggctcctctgggcttggatgtggggatagcgcctgggtgcaccccgctccagggtgcctgccaacttcctcagggcatacaccttggcctggcccaggctctgcacttcctttctgaaagcatcaaacttctcttccagcacctgcaaaggtatgaggcccagcagggtcactygagatggtatcatgagctctcaaagctcatgaagagctcagcagactctgatggctctgaaatccctcagcccaggttctggaaccatcgggatcctccctaggacaccctctccaggctcctttctgctgactccccagcaaccctttcatcccagggcaggccttcctcagcctctgcccactccccgtgaggtttgctcaggagtaactcaccttgacaccctccaggtcctgcccgtagtcctgggactcggcggtggccgccttggtggtcagccaggcgtcgaggagcagggtctctcgctccag

SEQ ID NO: 491762 - DNA, 665 bp, Homo sapiens
tcaccttctctgagaagccttccctgaagcttccctayccctgaccacctagatctggctttggggccctgccatgcatctctgccacccgtgttgtttctcttgcagcttctattgtatcatgttctcgacgattcctccttatcctgactgtgagcccgagagggcagggaccaaggtcctaatgtatcccagcggagcgtacacatagtaggtacctacgtcgtgttggttgactgaaagtcttctcacccagcaagaggcaggcagtgatgaggggacctcagaggggtgctctggactgttacctcagaagaggaactatgcagagcggggcgggctagctggggatgcagctcagggaggagactgacctaccgtgaccatcccacacctccgcaggcaccagggcttgccccctgggtcagggcatcggactgtttagatgcaaagaaagagtcctgggctgggagtctggagcttccagtctgttttcagcggtgtgttttagtcaaggcatttttacactctctggacctctgtctcctcaaatgcaaaatgaagagctggaccggaaactttttctcgtccagttccagtagctcatctttctgcacgaaggatatgggctcggagtcggaggaactgggttcaagagctggggc

SEQ ID NO: 491763 - DNA, 665 bp, Homo sapiens
tcaccttctctgagaagccttccctgaagcttccctacccctgaccacctagatctggctttggggccctgccatgcatctctgccacccgtgttgtttctcttgcagcttctattgtatcatgttctcgacgattcctccttatcctgactgtgagcccgagagggcagggaccaaggtcctaatgtatcccagcggagcgtacacatagtaggtacctacgtcgtgttggttgactgaaagtcttctcacccagcaagaggcaggcagtgatgaggggacctcagaggggtgctctggactgttacctcagaagaggaactatgcagagcggggcgggctagctggggatgcagctcagggaggagactgacctaccgtgaccatcccacacctccgcaggcaccagggcttgccccctgggtcagggcatcggactgtttagatgcaaagaaagagtcctgggctgggagtctggagcttccagtctgttttmagcggtgtgttttagtcaaggcatttttacactctctggacctctgtctcctcaaatgcaaaatgaagagctggaccggaaactttttctcgtccagttccagtagctcatctttctgcacgaaggatatgggctcggagtcggaggaactgggttcaagagctggggc

SEQ ID NO: 491764 - DNA, 530 bp, Homo sapiens
gaatgctgcagagccccgggctccatttggaaactctggcaggatgaagaagctggagaccacgtcctgggaaggmtggggtacagcagggctccctgcagcagacgaggggtccctcaaattcatgtgcacccagacctcagaatgtgaccttatttggaaacacgggttttgatgatataattagttaagatgaggtcacagtgtattgggggaccctaaacccagtgagtggtggccctaccaaaaaagagactgggcatggcggcacacacctgtaaccccagctactcaggaggatgaggcaggaggaacacttgagcccagggattcgaggctgcagtgagctatgatcatggcactgtattcccgcctgggggacacagcaaggccccgtctcaaaaaaaaaagggggggggagcaggtggggggtacacacagagacagcgcacagggtcacagacacacaggagaggggttgggacgtggggatgaggctgtatgccagcagccactggatgctggaggca

SEQ ID NO: 491765 - DNA, 530 bp, Homo sapiens
gaatgctgcagagccccgggctccatttggaaactctggcaggatgaagaagctggagaccacgtcctgggaaggctggggtacagcagggctccctgcagcagacgaggggtccctcaaattcatgtgcacccagacctcagaatgtgaccttatttggaaacacgggttttgatgatataattagttaagatgaggtcacagtgtattgggggaccctaaacccagtgagtggtggccctaccaaaaaagagactgggcatggcggcacacacctgtaaccccagctactcaggaggatgaggcaggaggaacacttgagcccagggattcgaggctgcagtgagctatgatcatggcactgtattcccgcmtgggggacacagcaaggccccgtctcaaaaaaaaaagggggggggagcaggtggggggtacacacagagacagcgcacagggtcacagacacacaggagaggggttgggacgtggggatgaggctgtatgccagcagccactggatgctggaggca

SEQ ID NO: 491766 - DNA, 660 bp, Homo sapiens
tgctcccgaagatagggtaaggatgggaagcagatagtgcttttgattatatctgtcccacggcttcataaagtcatgaacaggctatgggacaaacataatcaaaactgtgacatggaactcctgatacaagtgcctttctttcatgtttctctgttccctcttaggccacattttctcaagttgcatttacccyccaacatacatacacttattcttcctgctaagtacaactaaaatctctggacttatatatgaaataaacacaagatgactgaaagatagagagagaaggaagactggctagaaccctcaggagcaaaaaaacaagctggtgagtttcctggattttctttttgcctcataattatggcttgaattgtgttctcccaaaattcatatgttgctgtcttaacccctagtgccttagaatgtgaccttatgtggaaatagggtcactgcagatgtattagttactaaaacgaggtcattttggagtagagtggacccttagtccattctgactagtgtccttataaaagggggatatttagacacagttgcacccagggagaacaccatgtgaatgtaaaggtaaatatcaaggtgatgcttccacaagtcaagaagcatcaaagatcaccagccaaccaccagcag

SEQ ID NO: 491767 - DNA, 604 bp, Homo sapiens
cccacggcttcataaagtcatgaacaggctatgggacaaacataatcaaaactgtgacatggaactcctgatacaagtgcctttctttcatgtttctctgttccctcttaggccacattttctcaagttgcatttaccccccaacatacatacacttattcttcctgctaagtacaactaaaatctctggacttatatatkaaataaacacaagatgactgaaagatagagagagaaggaagactggctagaaccctcaggagcaaaaaaacaagctggtgagtttcctggattttctttttgcctcataattatggcttgaattgtgttctcccaaaattcatatgttgctgtcttaacccctagtgccttagaatgtgaccttatgtggaaatagggtcactgcagatgtattagttactaaaacgaggtcattttggagtagagtggacccttagtccattctgactagtgtccttataaaagggggatatttagacacagttgcacccagggagaacaccatgtgaatgtaaaggtaaatatcaaggtgatgcttccacaagtcaagaagcatcaaagatcaccagccaaccaccagcag

SEQ ID NO: 491768 - DNA, 611 bp, Homo sapiens
ctggtttgattcttcttacttcctgctacacattgactcccaagttgcatgcactstccctctccttgccaccaggagtgtgtcattgtgataagtgtgagaagcataggcttaaggcatttatttggagggagagtagagatggtgatcctagctaggaatgttataataatgttcctcaatgtacagtctttccctgtttgcagcattttttcttttaacaagattctccattctacttcctggaaaaatataaacaataaagttctgaggaggagaaaggtggagttcatcaaggaaagcattatagagaaagtcagtcatactgccaagaaagaggtacagaggatctttttttccccaaagaatacaggtgtaaaagtagccacttctatcccacaagtgagccaaaaacaaaagctgactctcagcctgaaaaagggccgctcttggatcctgtaaatggccccaatagaattatttttggggatattaaaaggaactgatgttagtgaagaaggtgaacttcactgaagggtagaaccagacttgataactgggcctactagtgaaatatgtttcaggcaaactaaatagaacagagcaaaatg

SEQ ID NO: 491769 - DNA, 611 bp, Homo sapiens
ctggtttgattcttcttacttcctgctacacattgactcccaagttgcatgcactgtccctctccttgccaccaggagtgtgtcattgtgataagtgtgagaagcataggcttaaggcatttatttggagggagagtagagatggtgatcctagctaggaatgttataataatgttcctcaatgtacagtctttccctgtttgcagcattttttcttttaacaagattctccattctacttcctggaaaaatataaacaataaagttctgaggaggagaaaggtggagttsatcaaggaaagcattatagagaaagtcagtcatactgccaagaaagaggtacagaggatctttttttccccaaagaatacaggtgtaaaagtagccacttctatcccacaagtgagccaaaaacaaaagctgactctcagcctgaaaaagggccgctcttggatcctgtaaatggccccaatagaattatttttggggatattaaaaggaactgatgttagtgaagaaggtgaacttcactgaagggtagaaccagacttgataactgggcctactagtgaaatatgtttcaggcaaactaaatagaacagagcaaaatg

SEQ ID NO: 491770 - DNA, 385 bp, Homo sapiens
ccctgcaggcctgggaaggtgcagagcctgcacctcagatttgactcctctcatagaatcatggaatttaagtgaacctcttccagtattagggaatcttgaatggaaactctaatatcttaatccccagtgtaacaaacttttactacattgttctcatgatgacaaatgtctcatcagaaaatggcttaaaatataattattatgaaagcagactggcttatttaaaacaaacataatctgaaaactgtaatccaaaaagtaracatccatatatatatatattcattcattctctttgctttgaaactttcactgaatgacctttgtccgttttatcggtcaccatattttagtggtgctgtgcagtgacttttgtagagta

SEQ ID NO: 491771 - DNA, 385 bp, Homo sapiens
ccctgcaggcctgggaaggtgcagagcctgcacctcagatttgactcctctcatagaatcatggaatttaagtgaacctcttccagtattagggaatcttgaatggaaactctaatatcttaatccccagtgtaacaaacttttactacattgttctcatgatgacaaatgtctcatcagaaaatggcttaaaatataattattatgaaagcagactggcttatttaaaacaaacataatctgaaaactgtaatccaaaaagtaaacatccatatatatatatattcattcattctctttgctttgaaactttcactgaatgacctttgyccgttttatcggtcaccatattttagtggtgctgtgcagtgacttttgtagagta

SEQ ID NO: 491772 - DNA, 385 bp, Homo sapiens
ccctgcaggcctgggaaggtgcagagcctgcacctcagatttgactcctctcatagaatcatggaatttaagtgaacctcttccagtattagggaatcttgaatggaaactctaatatcttaatccccagtgtaacaaacttttactacattgttctcatgatgacaaatgtctcatcagaaaatggcttaaaatataattattatgaaagcagactggcttatttaaaacaaacataatctgaaaactgtaatccaaaaagtaaacatccatatatatatatattcattcattctctttgctttgaaactttcactgaatgacctttgtccrttttatcggtcaccatattttagtggtgctgtgcagtgacttttgtagagta

SEQ ID NO: 491773 - DNA, 458 bp, Homo sapiens
tgaagcgataacagctggcaactgttccgcaagaaggtgcaaagcccctgcaggcctgggaaggtgcagagcctgcacctcagatttgactcctctcatagaatcatggaatttaagtgaacctcttccagtattagggaatcttgaatggaaactctaatatcttaatccccagtgtaacaaacttttactacattgttctcatgatgacaaatgtctcatcagaaaatggcttaaaatataattattatgaaagcagactggcttatttaaaacaaacataatctgaaaactgtaatccaaaaagtaaacatccatatatatatatattcattcattctctttgctttgaaactttcactgaatgacctttgtccgttttatcrgtcaccatattttagtggtgctgtgcagtgacttttgtagagtaatatctctcaaagtgtgcaatgatcaat

SEQ ID NO: 491774 - DNA, 439 bp, Homo sapiens
aacattgtctttagcaacatttcttagcaatggtgcccatagcaacagttccctagtaacagcaaccttaggagaaactccctttgcaagagcacatttaacatcactgcctttaatgaaaaaccacttaataaagaagtcctggctgggcgcgctggctcacgcctgtaatcccagcactttgggaggccgaggtgggcagatcacgaggtcaggagatcaagaccatcctggctaacatggtgaaaccccgtctccactaaaaatacaaaaaattacctgggcgtggtggcaggygcctgtagtcccagtactcgggaagctgaggcaggagaatggcgtaaacccgggaggcggagcttgcagtgagcggagattgcgccactgcactccagcctgggcgacagagcgagactccatcgatggcctgatggcctgc

SEQ ID NO: 491775 - DNA, 439 bp, Homo sapiens
aacattgtctttagcaacatttcttagcaatggtgcccatagcaacagttccctagtaacagcaaccttaggagaaactccctttgcaagagcacatttaacatcactgcctttaatgaaaaaccacttaataaagaagtcctggctgggcgcgctggctcacgcctgtaatcccagcactttgggaggccgaggtgggcagatcacgaggtcaggagatcaagaccatcctggctaacatggtgaaaccccgtctccactaaaaatacaaaaaattacctgggcgtggtggcaggtgcctgtagtcccagtactcgggaagctgaggcaggagaatggcgtmaacccgggaggcggagcttgcagtgagcggagattgcgccactgcactccagcctgggcgacagagcgagactccatcgatggcctgatggcctgc

SEQ ID NO: 491776 - DNA, 439 bp, Homo sapiens
aacattgtctttagcaacatttcttagcaatggtgcccatagcaacagttccctagtaacagcaaccttaggagaaactccctttgcaagagcacatttaacatcactgcctttaatgaaaaaccacttaataaagaagtcctggctgggcgcgctggctcacgcctgtaatcccagcactttgggaggccgaggtgggcagatcacgaggtcaggagatcaagaccatcctggctaacatggtgaaaccccgtctccactaaaaatacaaaaaattacctgggcgtggtggcaggtgcctgtagtcccagtactcgggaagctgaggcaggagaatggcgtaaacccgggaggcggagcttgcagtgagcggagattgcgccactgcactccagcctgggmgacagagcgagactccatcgatggcctgatggcctgc

SEQ ID NO: 491777 - DNA, 123 bp, Homo sapiens
gcatggattgatacttccccgaggcaaaacttgcaactmcacatgttcacactgagatattcttgcttaaataactgaggttaaaaactgaaccacgctactctggagggtgaggcaggagaa

SEQ ID NO: 491778 - DNA, 477 bp, Homo sapiens
aaaagcaaaaacacatttcccagacaccacagcttgaccttccacctgaccacacccatctctcctgcaccccacatcgtgaccctccacccgaccacacccgtctctcctggaccccccmgagtgaccctccacccccatatctctcctggatcccacagcatgaccctccacactgaccacacccatctctcctcgaccccacagtgtgaccctccacctgaacacccccatctctcctggatcccacagcgtgaccctccacatgaccacacccatctctcctggaccccacagcgtgaccctccacccgaccacacccgtctctcctggaaccccaagagtgaccctccacctgaccacccccatctctcctggatcccacagcatgaccctccacactgaccacacccatctctcctggaccccacagcgtgacccttcacctgaccacacctgtctctcctagaccccaca

SEQ ID NO: 491779 - DNA, 479 bp, Homo sapiens
gctgcgtgtgtggcgcctggtcactcaagaaggatttgcagaattgagttttcaacacaggtgccgccactaagtccctcaagcccttcgtgagcctagagccacagagccatttgctgcactcccacaatctctaaccaccctgcacagaagcccagtttatccaaaggaccataaaattttgcgtgtaaacacttgaagtttggcataatgaactgaaagttaagtcaccacttctattttccattaacccaatcattcaaacaagtatctcttgagtatgtgcattgaatactgtggaattaggatttagtccatgccttcaagaaacatacatcatagaagaaaaggtatatagcttgtaactktaagagtggcgaacaagcaagaaatatacatcataggagaaaaggtatagcttgtaactgtaacagcggcaaacaggcaagaaatatacctcataggagaaaaggtatacc

SEQ ID NO: 491780 - DNA, 598 bp, Homo sapiens
cgtgttgaaggagtgacaggaagacagacggctgtcggtgaatggaaggcaacaaggacagagtagattccagaactgagacaggtaccaaggctctggcacagctgagggtcgatcccaattctagcctctcacagaaaggcagaggtgacttagcacaaagagcatggaactttgctttaataaagcaaatgcttaacatccactgtgaggaactcaaggagaaatggcagtaggctctactaataactactgctttaaaaaatgcaagggagtgggtacattttcacatgggccatgtggaaagttggctggacctgccactggacctgacactggacatgctgctggacttgccactggacttgacactggacctgcccccggacctgccgctggacctgccactggacctgccactggacctgacgctggacctgatgctggacctctccctggacctgatgctggacctgccgctggacytgaccctggacctgcccctggacctgccgctggacctgatgctggacctgtccctggacctgcccctggacctgccactggacctgtccctggacctgcccctggacctgcc

SEQ ID NO: 491781 - DNA, 598 bp, Homo sapiens
cgtgttgaaggagtgacaggaagacagacggctgtcggtgaatggaaggcaacaaggacagagtagattccagaactgagacaggtaccaaggctctggcacagctgagggtcgatcccaattctagcctctcacagaaaggcagaggtgacttagcacaaagagcatggaactttgctttaataaagcaaatgcttaacatccactgtgaggaactcaaggagaaatggcagtaggctctactaataactactgctttaaaaaatgcaagggagtgggtacattttcacatgggccatgtggaaagttggctggacctgccactggacctgacactggacatgctgctggacttgccactggacttgacactggacctgcccccggacctgccgctggacctgccactggacctgccactggacctgacgctggacctgatgctggacctctccctggacctgatgctggacctgccgctggacttgmccctggacctgcccctggacctgccgctggacctgatgctggacctgtccctggacctgcccctggacctgccactggacctgtccctggacctgcccctggacctgcc

SEQ ID NO: 491782 - DNA, 598 bp, Homo sapiens
cgtgttgaaggagtgacaggaagacagacggctgtcggtgaatggaaggcaacaaggacagagtagattccagaactgagacaggtaccaaggctctggcacagctgagggtcgatcccaattctagcctctcacagaaaggcagaggtgacttagcacaaagagcatggaactttgctttaataaagcaaatgcttaacatccactgtgaggaactcaaggagaaatggcagtaggctctactaataactactgctttaaaaaatgcaagggagtgggtacattttcacatgggccatgtggaaagttggctggacctgccactggacctgacactggacatgctgctggacttgccactggacttgacactggacctgcccccggacctgccgctggacctgccactggacctgccactggacctgacgctggacctgatgctggacctctccctggacctgatgctggacctgccgctggacttgaccctggacctgcccctggacctgccgctggacctgaygctggacctgtccctggacctgcccctggacctgccactggacctgtccctggacctgcccctggacctgcc

SEQ ID NO: 491783 - DNA, 598 bp, Homo sapiens
cgtgttgaaggagtgacaggaagacagacggctgtcggtgaatggaaggcaacaaggacagagtagattccagaactgagacaggtaccaaggctctggcacagctgagggtcgatcccaattctagcctctcacagaaaggcagaggtgacttagcacaaagagcatggaactttgctttaataaagcaaatgcttaacatccactgtgaggaactcaaggagaaatggcagtaggctctactaataactactgctttaaaaaatgcaagggagtgggtacattttcacatgggccatgtggaaagttggctggacctgccactggacctgacactggacatgctgctggacttgccactggacttgacactggacctgcccccggacctgccgctggacctgccactggacctgccactggacctgacgctggacctgatgctggacctctccctggacctgatgctggacctgccgctggacttgaccctggacctgcccctggacctgccgctggacctgatrctggacctgtccctggacctgcccctggacctgccactggacctgtccctggacctgcccctggacctgcc

SEQ ID NO: 491784 - DNA, 418 bp, Homo sapiens
gaaacaacaacttttgtataggatttttagcaagaggataaaaggtaaaaaatgtcaataatttgaacaagctaaaaaaaatggggaagaaacaaaaccaagccttgattctaaaagtctagggtaagtaatggggatcaaagctcgactgaagaaaaagcaagaattcaacatgtaaagagaggctgcaagaggagatgccttcatgtgaccttggatgtgaggagcagaaacaacaggtgaaggcagagcctaatacagacaggacttctagaacagtctttytgagacctttacaagcctttctattttattttaaacagctttattcaaatataattaacatagcaggcttctagaacactcttttttgagacctttacaagcctattttattttaaacagctttattcagata

SEQ ID NO: 491785 - DNA, 507 bp, Homo sapiens
ttaccatatggagcagtgcagaactagggtaatttgaagtactctagcagatcaataagaaaaaaatacaagattgtccaatataaaaataggtcaagaatataaataggtttacagaggggaagcccaagtacatagtttttaggaaaagatccaaaatcacaagtaaataagcaaaatacaaattaaaaccataagatagtattgctaaaattggaaagtcatatgatcccaagtgttagtaaggatgtggggaagagcaaccctcatttactgctgaaggttggggagtagtaggcttctgcagccattttggaatgaagtatttatatatcaaataatcaatcaatcsttctcaccttccttagaacaactcacacacagattgttgaggaggtgaatgtgaaaccgaatacttcccttgacctcctcacaggactagccaaagggttggctcgtttactcagcccacagctttcaaaccttcacaggacggggagcatgcag

SEQ ID NO: 491786 - DNA, 563 bp, Homo sapiens
tgcaaaacaaagctgaatgctttcaattccatgatgtattatgctacaagggaagctctcagctaagcaaaatgtagagctactgtcagaccattcctctgccaaattactactgcmctgaaaaatgactacagtgatatcacttggtgagatcatcacagtctacttctcttaatgtttccatcatttctgatcccaattttacatctcagtaatttactttcagtaatgaagtgttttctcctccttcactttagtagagcatatactacattaaaaaaaaaaacttattcagttctttgagaatgaaaacacatgcagtttcctccctccatcatgagcagtgtaataagtgaacaatatctaggtaatgagttacttgttatgatttatatgtgtaatgtgcaattattttaaacatagaggaatgttcttataagtgggttaaacgcagtgaacataagccttcttgtacttaagtatttactacctaatgatgtgactgattagctttgttcaagtttacttacaaggaaaaagaaaaaaagattcctacatctcca

SEQ ID NO: 491787 - DNA, 585 bp, Homo sapiens
tgcttggtttacctgtacagtaaaggacaaaatagtaaacaaacaaaacaaagcaaaacaaaaaagcagcaacaccatgtttctggactctgctgtaaccaggcttttttacctgaaaggctgtatttttttctggacagcggtatctattggtctctgggctgtcaggctggggctgtggtgctttgctgtgagcacgctgcagtttggtgatctgtgtaatgttctstgtctctgttaatcacacaatggaaggattgaacttactgaatcatttgctttattacaactccagaagagcactgtaaccgcctcatgggaactttcttggagggagttattctggttgcagtcactatataaatacatctcttcaattcctgtaaaatggcaccaagacattctgctacaactgagttaaaaagcaaaataacccttttgataagctttcctagtggaggttttttatgctgcatttaatacttcatggtgttagcatgctaaattgctagggcggtaattgaatgagataatgtatgtaagttcgccctggtacggtgcctgggagatggtgagcgctcaaca

SEQ ID NO: 491788 - DNA, 471 bp, Homo sapiens
catgagatgggtctcctgaatacagcacatcgatgggtcttgactctttattgaatttgccagtctgtatcttttaattagggcatttagtccatttacatttaagrttagtattgctatgtgtgaatttgatcctgtcatgatgatgctatctggttattttgcatactagttgatgcagtttcttcataaggtcgttggtttttatattttggtatgtttctgcagtggctagtactggtttttcctttccatatttagtgctcccttcaggagctcttgcaaggcaggcctggtagtgatgaaatccctcagcatttggaaaaccaagcttttcaccatgagggaaaggagatacagatgtaaacctgcagtcctgaatttgaactggaacatcaatttgacccatcaaaatatcttttaataaaatagatatttctttgattggttcactctgtaaaaatcaagaaa

SEQ ID NO: 491789 - DNA, 471 bp, Homo sapiens
catgagatgggtctcctgaatacagcacatcgatgggtcttgactctttattgaatttgccagtctgtatcttttaattagggcatttagtccatttacatttaaggttagtattgctatgtgtgaatttgatcctgtcatgatgatgctatctggttattttgcatactagttgatgcagtttcttcataaggtcgttggtttttatattttggtatgtttctgcagtggctagtactggtttttcctttccatattyagtgctcccttcaggagctcttgcaaggcaggcctggtagtgatgaaatccctcagcatttggaaaaccaagcttttcaccatgagggaaaggagatacagatgtaaacctgcagtcctgaatttgaactggaacatcaatttgacccatcaaaatatcttttaataaaatagatatttctttgattggttcactctgtaaaaatcaagaaa

SEQ ID NO: 491790 - DNA, 619 bp, Homo sapiens
cttgtttttggttttaagatattgcttttttcttaattttattttataatgatgtaaaaaaaacttaaggcctcaaagtcaaatcttcaaaacatggtatatttgaaaaggtgtagctgtctctatcacactgtccctctcttcttctataggtaagctttttaactttttattttttgcttttattttatggtagtctttcattgttttgttagtaaatattcatayccatatcccatgtccccacttgtttagatgaactttagccttcttttattgccttgttttttcccttatcaatatgtcctggagattgttccataagagtatacagagagatttcttatactgttttacagtactccatcgtgtagatgtacaatagtttattcaacatcctccattcaacttatcacctattgatggatatttggattgatcctagtcttttctattatccctaatgctataatagtctcatgcatcttttcaaatgtttgccagtgtttcttcatgatatatctctgcaaatgtaattgctggatccaaaggtaaatacctatgcaattttgctagatatgggaaaatccctctctgaaaaggttgtattttttaatta

SEQ ID NO: 491791 - DNA, 619 bp, Homo sapiens
cttgtttttggttttaagatattgcttttttcttaattttattttataatgatgtaaaaaaaacttaaggcctcaaagtcaaatcttcaaaacatggtatatttgaaaaggtgtagctgtctctatcacactgtccctctcttcttctataggtaagctttttaactttttattttttgcttttattttatggtagtctttcattgttttgttagtaaatattcatacccatatcccatgtccccacttgtttagatgaactttagccttcttttattgccttgttttttcccttatcaatatgtcctggagattgttccataagagtatacagagagatttcttatactgttttacagtactccatcgtgtagatgtacaatagtttattcaacatcctccattcaayttatcacctattgatggatatttggattgatcctagtcttttctattatccctaatgctataatagtctcatgcatcttttcaaatgtttgccagtgtttcttcatgatatatctctgcaaatgtaattgctggatccaaaggtaaatacctatgcaattttgctagatatgggaaaatccctctctgaaaaggttgtattttttaatta

SEQ ID NO: 491792 - DNA, 584 bp, Homo sapiens
tcaccgatttttcatctacagtaaggtcagccagacaaaaagacccaagacaacacattcagtagcgtctttgttcccatctcagcctaaaagatataacttcttgtggtgatttccaattatggccatagtgatttttcagcatattattggtttggattaattgttggtcatatgggagagtcctttcaagcttctaaaataaaacaaatgtagcctctgttaaaaaatgatgttaaccccaaagcttcagagataaattccctaactttccatgctggaacctccactttgttttgtggggaaagggattcattattaattcaaaatgaattttaatcataaagaacctactctgttattcagtgtttgatgatataaattattattgagatcctttctccactttgctctgttttccttctgaactttttctccatcctttttcccctccaatggctaaataggatcaatcttctayttattaggtacttaaggaacagttagtaaactaaggtttaaggattattcaactatcagtggaatccatcttctaattatttatggctattaaaatgtaaaat

SEQ ID NO: 491793 - DNA, 434 bp, Homo sapiens
ttgagttcttggggaagatcctctttcaggtttacagttggccaacttgtttccttatttggtaaaggggggtgggtggggagaaagagggagagaaaacgagggaaatggagggggtcaagggagagggacagggagggagagagagcacaaactctagtcttttcttataaggacactaatctcatcatgagggttccactctcatgacctaattacctaccaagggccccatctccaaatacgataccataccatcacattggaggtaagggtttcwacatatgaattgtggcaaacacaaacattcagtctataacaagtgctgcagaagaaagaaaaataaaactagaatacaggttggaaagtaccacgaggatacttgagatcctattgacaaagaagaagggatcagcaattagaaatttttcaca

SEQ ID NO: 491794 - DNA, 576 bp, Homo sapiens
ttgcctagtgcaacttatttaacttctaagtcccaggtatttattatttaatatttaaataataataatacctactttacagattatagtgggaattttatgaaataatgcacayaaaatatttaggacagtagctggaaaaaagtatttgttcaataaatgcgtactgtactatttgtaatggtttttatttgaaacacagtccttttttcaatatcagacgtggcttcatagcaaaagttagggtaacaagaaagtgggagagaaagtgatgttacccatttatgaaaaccaaaatcatcaaatttttatcaattgattaaaacaactaaaaatcattaatccagaaattaccctcccagagataaggtaaaattgtcttaacgaatgtgggcatggggaggcagctcagcaattcccctcgagggttagttttatattcctattatttgagttacttgtaaaaataaaaaaattgattgtcttctttcaaagaataacacttgagcaaagtcaattttgggttgcatttacgtaacacaaaataattacttcaaagtggaagggagtgggcag

SEQ ID NO: 491795 - DNA, 404 bp, Homo sapiens
acaggtcccaagccaagtgaggagcacaaataaagtttgttgaatgaatgsgagaataaataacaagcacttctaaaaatcacaacaaagacaggatgaaaggaagcttgtttacttaaacacgactaactagaatcaagggatatgccttgacatttatgaggtaaatttaggagaaataaaggaaacacaggataaaataaaaataaagtaaaagtgggcaaaaccaaaataatcctaaactgaagccaaaaacaaagtctttccctcccagcagctctggatccaatattggagatggacccttatttaagaaaactggaattaggcattctcatcataaaatatataagtggaattttgttattataaaaaagatatgtagtatttgccagagagggctc

SEQ ID NO: 491796 - DNA, 526 bp, Homo sapiens
caggataatattctccagcgccatttccctcgcacatgccaggcacagaaggcaagtcagagtgctgtgtgtggtctgtttggataataattttcatctggaaacctcaatttggaaaccaactggcagtaattctagagaaagtttggtctcctggtttttagaattgactcaaaaccgagtgtcccgagtcacctaagtctccttgctttggttacgtctgcccrtaaaatgagaagcaaaattgcttagtgagtgctggcgggaaactaggacattggcggggttcacagtggccacagaacaaggactggccacccagacaggccaggtgcctgctgcatgtgcagggatggtctctctctctccaaatctctctaagaatgagctaaaattcaaaaagagttctgctgaatgtaaatggtacttattggagattttattgcccataaagaaatccatcaacagaaaaccacactctgcaaatctaccgatgcacaattagtttgtgctgcttacaaatccc

SEQ ID NO: 491797 - DNA, 574 bp, Homo sapiens
taatgggctccttcacaagcagacctggcccacattcctgccctcagcagaccttacgaagccctgctgggctaagtgccagggtgggggatagggtgggcaaaggcagcaaaacaaggagaggccctgggtcctggtgtctgggcctgggagggaggggctgcagcacccccaccgtgcagaggagggagctgtggcacagagccggtcccagaccttcctgaggtcacagagtcaagggagaaggctgagccagagagctgaccgcagaggccaagcttctaatcccaggccaggagctatggtcgccgccacctgcaggtcccagaggaactgacgccggggaggtgctttgagccctttgacatgagcagaaggcctasggtgtccctgcttggatgtttcccgtggtgcaaagggcaaggtttcaatgatcaccgtattataccagcctggtgatttgaaaaagttgccccctgctgtctggcttgcattgtacagtctggtgctttctgcccttgaatgcgcaaaggagttgtgactatgtatgtgggcgctgcctgtccgtgaggca

SEQ ID NO: 491798 - DNA, 574 bp, Homo sapiens
taatgggctccttcacaagcagacctggcccacattcctgccctcagcagaccttacgaagccctgctgggctaagtgccagggtgggggatagggtgggcaaaggcagcaaaacaaggagaggccctgggtcctggtgtctgggcctgggagggaggggctgcagcacccccaccgtgcagaggagggagctgtggcacagagccggtcccagaccttcctgaggtcacagagtcaagggagaaggctgagccagagagctgaccgcagaggccaagcttctaatcccaggccaggagctatggtcgccgccacctgcaggtcccagaggaactgacgccggggaggtgctttgagccctttgacatgagcagaaggcctacggtgtccctgcttggatgtttcccgtggtgcaaagggcaaggtttcartgatcaccgtattataccagcctggtgatttgaaaaagttgccccctgctgtctggcttgcattgtacagtctggtgctttctgcccttgaatgcgcaaaggagttgtgactatgtatgtgggcgctgcctgtccgtgaggca

SEQ ID NO: 491799 - DNA, 605 bp, Homo sapiens
atgccagccacaaagaacaccaggaaaaaggactggaaatgaaaggaaaataaaaatgcagctaactttctaaaaatttgagatctatttatttctaaatgccatggatcccaaatggataaacaaagtatggcatatgcacacaatggaatattactcagccttaaaaaggaaagactttctgacacatgctacagtatgcatgaaccttgaggacattttgctaagtaagataagccagtcatgaaaggacaaatatcatgtgatcccacttgtatgaggtccccagagtagtcagattcacagagacggaaagtagaatgtgggttgccaggggcacatgttactttgtcatgaagatgcctattctatcctatgcttccatttgacccttcctcaaaataaaagacagttcaagcaaactaatgacttgattgcattttctgactccattctctgcactagtactggcagcaytagtcctcagacatgaaggaatctgacattagggagggctgccaagtttctggtgactccaaggacacaccagcccctcctcctggcagtcgtccacaccctgtgagatgtgctcggagtgtgtccca

SEQ ID NO: 491800 - DNA, 420 bp, Homo sapiens
tgtcttgaagggtctcaatatcggtcttctgcatttgaccaggccaatgccatgtaattccaatgaccacactactgtacaggtattgaagaaactctgaacttagcaaatggtcacaaagaactgaaccatcagttatttctgttagctgggcagcattgtgtccaaggtcatacaggaattcgaccagaaaggccaggatgtcttatgtgattattgtactagcacgtagtgaactccagaaaaaytgaaatgaatttaatataaagcacagcttgatgggaggggcttattcttgtcaaaatttagatgtgtgtttaaatttattgttccaaatcctatacacaatcctgtatagatattggcacagggataaaggtgatatggtttacagggaagggcactggatcaggatggggc

SEQ ID NO: 491801 - DNA, 556 bp, Homo sapiens
gctgcaaatctggttaaattaaacccaacaggcaaataatccacatacagagcagagggaagcagataatgtaaactccaacgaagaccatttgaaagctttccaaaaggaaaccattaacccgggaaagttctcagcaggggcaggagggggtgtagtgtgtgaagtacagacattccatttccaattaggcatctactcagtaagcagagaggtgccagcttcaaaaacattcagtgttgtggaaaaccagattcactgaaaattcggaaacgtggaaacatctgaggatgccaaggctgcccctcctctcactgtgtttctccatccactgcccgagtacttgacccttacttaaggaacagctctttcttgctgttgggtaaaaggagaatctgcgycttagagcccagacatgcagaattaaaggtgtcatctggttggagaagtttagtcagatttgcctcttccatttggcgaacctcactcctccaacactcttgtttgctggggctgaccctgggctgccccctgccccaccacttcccccagcctg

SEQ ID NO: 491802 - DNA, 632 bp, Homo sapiens
cagaaatattgttaagtcagggaacaaagttgaggaaccaatgattgttggtaatcttgaattgataatgcccaattgctcaattatgccatttattcttggtattttcaggatataggggataggcacagaaaagtcagtagggattcacccaaccaccatggagaaggtggatgccattgaaggtcaaagaaaagaacaagccaaacagtggttgaaaaggcagagtatggaatctaagatggagaacatcaaaaaagggggcaaaggatcaaccagcatcctgcatttagaggattttagggcatggtgtcttcaaggatcaactagatgtcagtgtaggcaaagagagggatcaaagctagcatgtattttatagatggaccttgtggtctacaaaggtaaattccgtaagacacagtgagaaaaaggagtagatgatgagagagcaaactcacaaaattgctgtgaggagagaaattctatctgaacgactgacatagtggttgagaaaaattgcaacagggggcacagttagaattagtaggagaacgwcattgataatgttaatgataccggattgtagatgagtaaatactctgtgccattagattcagatgcactctggtaag

SEQ ID NO: 491803 - DNA, 600 bp, Homo sapiens
cagcagcatggttaaggagcttccccacactttggcctcactgttctggatacattccagttagttataccctctgtatttgagataaacaagactgagagtgatagtctgcatgggtagtgtgtactgagagaagagaggggaccacgccacgtaccagcagtgcagcactgagaaaagacttgggcctctctaagccaaagcgttctaggctttgcattggaactatcagtaggtttgttttgactatgaagtgagayaatgaactatgtaaagcccttgagatataatattcgtgcatgtatccatgtatttattctatgatttagtctataataaagactatccaacaattaatcgaatgagtcaataccatatgcctttgaaaatgcagagtgggaagatagaatctacaacatcatggaccacaaatttccatatgtttaaggtagaataatttgtattataccaaatatccttgatatgcaattagcattctattgatataatcattttgtgctatatgttctattagtttgcaattctccttttgaaactggatgccaaattttgtttttacccgcttcacagaacctgagc

SEQ ID NO: 491804 - DNA, 368 bp, Homo sapiens
ggtttctcaacaaatgaagtggaagagggtggagggctgtggtgtgggcatcactgcaacatgccactgctgctggatgcgagtgatgttgaccttgctggcaggacaagacagcagcaaacagactgtgctggtggcacgatccatcagggctgggtggcrgcaccgggcggcagcctgctgatgcaaggctgggaggcgggagggcgcgagtctgtaactggagaggtttgtttggattcagcattgctgaaatcctccctggcagcagatgcggctggcctcggaaatacgggagggacatgggaaatgaactaataaataagaggccaggtgtggtatctcggtgctggcaaaacagaggccag

SEQ ID NO: 491805 - DNA, 368 bp, Homo sapiens
ggtttctcaacaaatgaagtggaagagggtggagggctgtggtgtgggcatcactgcaacatgccactgctgctggatgcgagtgatgttgaccttgctggcaggacaagacagcagcaaacagactgtgctggtggcacgatccatcagggctgggtggcagcaccgggcggcagcctgctgatgcraggctgggaggcgggagggcgcgagtctgtaactggagaggtttgtttggattcagcattgctgaaatcctccctggcagcagatgcggctggcctcggaaatacgggagggacatgggaaatgaactaataaataagaggccaggtgtggtatctcggtgctggcaaaacagaggccag

SEQ ID NO: 491806 - DNA, 626 bp, Homo sapiens
gattctaatgcaggagcagaaactgatctttgaactactctcaatgttacctgcacaccaacaattatgaaataaatataaaaagtgacacagagaaacgtcagggccaggaaaaaagagatgggtgtgatgaggaggggcaagaggacttgcaggtgagggtgggttttgagctgtgattcataaacagtaaaaaatacaggggggtgggtggcagggagaagaggggcacctcaggaaagaagggagagagagaggaagagcaagaagctgctctgtggagcaacctggtgttcagcggaggctggggctacgcactccgaactggaatgctgatgggctgggggagagttccaagtcattaagtgagatggcacaggtggggtgcccaggcaagcttccaagcacagagcttggcaccaagcacgccctgagtagaatttagctctcttcctctcccttctccatgycaagtgtaacagattgggctagtagattgcagagctgaggacctggctggagaagctcgctttcacagggaagatggaacatgtgtcacgcagcatccaaaggcaatggtggccaagcacgaccccgaagggagggggtacagaggagacacagct

SEQ ID NO: 491807 - DNA, 484 bp, Homo sapiens
ggagacccgcactgccagcagcatctcagctctgctgtatccgcttggttgtggttctaccaacagaggggagagggagtgtttctgcagtgactgtaaataagcctttccctccagacgcaggaagaagggcgtgaggggagaacaaagggagggagacaccaagagctggccagagaagggccacctttcacccagcccagccgaggcttgccgaggctcccgcggtcccggacttgtggcccatactgttttaaaagaaagggccaaaacattgattaattgtatagctaaagaaataaccattcctccttttgggggcaagactggctggccgcaaaagagctgaggatgagcaagaagagagaaggggagggaaaggaggtgtgagcgtgcaggaggcgctgcctggaggtgccctggtgtgcaccccagtctccaagtggccgacrggaaagttcctgaaggccagtcctccccagag

SEQ ID NO: 491808 - DNA, 538 bp, Homo sapiens
ttcttattggtgatttcttttcttgaagtgagttcttcttccaattcaatacaatttgattcaattgaatccagccccactgaacaaacacacagccaggcatttggatctgaagccaggtccagagccttggaagggtacgtctgtggctctgctggaggcaggctcgggcccatgggctgagaaggtgaagcaggactaagccaaagattcagggcttcacctctcttcccgaacacctccgtgtcccctgtcccttctcctctactggcccaggctctatgcccaagcccttagaagtcctcccagcacagtaactcctttcggctctggaattcccagtctttrggccacatcagcccagatgggagctggcagagtagcctgttcaccccaccccatccaacccagcttctctgcctctgccaacccttctctcctgagagattgctggcatttcttgagttctcttaaatgtgtcacacacgtacgagtgtctttatttagtcaaggtgaaatatgtcctacctgcactgtg

SEQ ID NO: 491809 - DNA, 532 bp, Homo sapiens
tgttgaagagaatgtattgtatctgttgtaggatccttcagttgtyttatatcagttaaacaaatatacacctatattattgaaaggctgattctttgcagtttatctatacacttatgtgatagtaagaccctaaaataaaagtatcttaaacaagtccaacatttctttctctctgtctttctttctttctttctttctgcagtaaccccagaataagcaattcagggttaatatggaggtcctttccttcagaaatgctctgacatttccaaaatgttgccttatccacatcgaggagggctccccaccatgctcacatctcagccagctataaggggaaagagagcaaagtggtagacacacttcttccttttagaggaatgggcatggactagaagccacgtacaaattctgcttatatcattggaccagaacttgatcacatggccacattgagacacaagggaggctgagaaagggaatccttactttaggtaactctgttaaaatattcttaccacaaaagaag

SEQ ID NO: 491810 - DNA, 532 bp, Homo sapiens
tgttgaagagaatgtattgtatctgttgtaggatccttcagttgttttatatcagttaaacaaatwtacacctatattattgaaaggctgattctttgcagtttatctatacacttatgtgatagtaagaccctaaaataaaagtatcttaaacaagtccaacatttctttctctctgtctttctttctttctttctttctgcagtaaccccagaataagcaattcagggttaatatggaggtcctttccttcagaaatgctctgacatttccaaaatgttgccttatccacatcgaggagggctccccaccatgctcacatctcagccagctataaggggaaagagagcaaagtggtagacacacttcttccttttagaggaatgggcatggactagaagccacgtacaaattctgcttatatcattggaccagaacttgatcacatggccacattgagacacaagggaggctgagaaagggaatccttactttaggtaactctgttaaaatattcttaccacaaaagaag

SEQ ID NO: 491811 - DNA, 532 bp, Homo sapiens
tgttgaagagaatgtattgtatctgttgtaggatccttcagttgttttatatcagttaaacaaatatacacctatattattgaaaggctgattctttgcagtttatctatacacttatgtgatagtaagaccctaaaataaaagtatcttaaacaagtccaacatttctttctctctgtctttctttctttctttctttctgcagtaaccccagaataagcaattcagggttaatatggaggtcctttccttcagaaatgctctgacatttccaaaatgttgccttatscacatcgaggagggctccccaccatgctcacatctcagccagctataaggggaaagagagcaaagtggtagacacacttcttccttttagaggaatgggcatggactagaagccacgtacaaattctgcttatatcattggaccagaacttgatcacatggccacattgagacacaagggaggctgagaaagggaatccttactttaggtaactctgttaaaatattcttaccacaaaagaag

SEQ ID NO: 491812 - DNA, 627 bp, Homo sapiens
ctaatttttgtgtgttgctgaatatcagaartatttacttctcatattggggcttaatttctgaaaaatttaagaaatcattccaaaggaagagaggtccaaatttagtcctctaggtataagttgaatgagataacaaaaatttttacctaaaatcttagaaatttggaaaagatgtcaaatgcttcaccgtctaagaattccttttacaggaaaaggttttctgcttttagaaatattttatgtatgtaccacatttactttatccagtgtatcattgatgggcatttgggttggttccaaggctctgatattgtgaacggtgctgcagtaaacatatgtgtgcatgtgtctttatagtagaatgacttataattctgtgggtatattcccagtaatggattgctgggtcaaatgggatttctggttctaaatccttgaggaatcgccacactgtcttccacaatggttgaactaatttacactcccaccaacagtgtaaaaccgttcctatttccagcacatatacaccatggaatactatgcagccataaaaaggatgaattcatgtcctttacagggacattgatgaagctggaaaccatcattctcagcaaactaacacag

SEQ ID NO: 491813 - DNA, 627 bp, Homo sapiens
ctaatttttgtgtgttgctgaatatcagaagtatttacttctcatattggggcttaatttctgaaaaatttaagaaatcattccaaaggaagagaggtccaaatttagtcctctaggtataagttgaatgagataacaaaaatttttacctaaaatcttagaaatttggaaaagatgtcaaatgcttcaccrtctaagaattccttttacaggaaaaggttttctgcttttagaaatattttatgtatgtaccacatttactttatccagtgtatcattgatgggcatttgggttggttccaaggctctgatattgtgaacggtgctgcagtaaacatatgtgtgcatgtgtctttatagtagaatgacttataattctgtgggtatattcccagtaatggattgctgggtcaaatgggatttctggttctaaatccttgaggaatcgccacactgtcttccacaatggttgaactaatttacactcccaccaacagtgtaaaaccgttcctatttccagcacatatacaccatggaatactatgcagccataaaaaggatgaattcatgtcctttacagggacattgatgaagctggaaaccatcattctcagcaaactaacacag

SEQ ID NO: 491814 - DNA, 667 bp, Homo sapiens
aacagctgctgtggccccagagctccctttacctcatcagtgtttggaaaaactccctaagcaggcaaaagagggaagccagaaagacagagcaatggctgcaatttcttccaacaagtagcttcaatgtccttatttgtatatyagctactgagaaaaactacattaagaaacagagatgtgggtcctgaactttaatccatttctacttcaaaaaaatctataatatatattgtaattctctttttttctgtttcacatatctattttatatccaatccttttaaaatttctgtattctagaaaaacatgttaattttttaatcaaacattgagttgtctttctgtagcttcaattctgctgtgtatgacctcaactgaatttaaattgctcatatttcattttaagttttctagcattttaaagttatttcagcctagttatattcacttagctatcattcatgaaattctagtttattttatggccctgaagattggctctaagccaattctaactgagatattatatagttacagtagacaattacttaaaatttggtgaggacaaattaatgttacttgggaaagttataatttctaattcttaatgtatatgttgctaagaagggatatcataacttatataccctgttgtctcaatatg

SEQ ID NO: 491815 - DNA, 456 bp, Homo sapiens
ttttcagtgaagtccttaataaatggtttatttttctgttaaaaagtggagagtaaagtttctttcttttcttgagtatgcctaagagactgtagctatataaataatatatggaatatttctcagccaagaggtgaacagcccagcaacaagcactcaggacccatgggagaaagactcagagtagttgcatcacaagacctattctctcagttactacaaatcagaatgttggagagaagcaaacctttccacagactttaattaatatattgaagtcatcatagatgtataagtaaagtcataaaagttttaagcatccccaaaccaaggtgatagattaccatgggatagttagggaagagactctgatggaacatgtaggaagtagaggaccaagaaagccagaggatttccaagtaacccctgtagcrattttcccttaaaacttgaaat

SEQ ID NO: 491816 - DNA, 557 bp, Homo sapiens
catgcacgcctcccgggccgggccgagccgagccgagcgggcggtcgacgcggtgggccccctccccggtccgccgaggcagccaccgggggcgcggcggcggaggcggcgggaggacgaggcacgggaggcgggatggagccgctggaggaagaggcggaggcaggtccgggcttcgaggcgccggcaggctgcagaggaggcggctacccccggacgagccccctctcccctgcccgccccctgcccgccgcaagcgccgcccgccccggcgcggggtcgcgagggagggcggggagtcccgggcgacgggcagcggccgctgcgcccctgcacgagaccattcgagaagcagcggcgctgggtcaatcccccaggctagcccggaggaggcgctgcgtgggcggacggggcggcagccggcgggacagcggcacctgtacccctcacagggcggacgctgtggggctggagaagctcctggcgggggtaaaatcaaaagsgggggaggggaggcagtagagatggagcttccagaaactcttccgaggcaccag

SEQ ID NO: 491817 - DNA, 594 bp, Homo sapiens
cgaacagccggggtcagacaggcagcagcgagggtcagaggcaggggcaacgtagtgtgcaaatcccacaacaagagcagagagacctcgattggagccacaagctcgaagctaagtggccgcrtgatcttggaagagttatttagtgtccctgagcttcactcgcctcatccgtaaaacggagataaaaacagctaccgattgggttgtgtcaggatcaaacaaatgagtgcaagaaagtgcccctaataaatcaatgcttattaatgtttcctgaatgaataaacagcacaagacactgttcagagtcctccttctttgacttcatcctctgtataatgggggacataatcttaaagtgcttgttaaggacatggagtaagtggctctccaactccagtatgcatcagaatcacctggaggggcttgttacaacagagtgcggactcctccccagtttctgatccaggatctctggagtggagcctgagaatagtctgcatccaggcgacactgctgctgccggcccagggaccatactttgagaaccgctgctctagcagaagcacttggaagagactctatagtaaaaac

SEQ ID NO: 491818 - DNA, 594 bp, Homo sapiens
cgaacagccggggtcagacaggcagcagcgagggtcagaggcaggggcaacgtagtgtgcaaatcccacaacaagagcagagagacctcgattggagccacaagctcgaagctaagtggccgcgtgatcttggaagagttatttagtgtccctgagcttcactcgcctcatccgtaaaacggagataaaaacagctaccgattgggttgtgtcaggatcaaacaaatgagtgcaagaaagtgcccctaataaatcaatgcttattaatgtttcctgaatgaataaacagcacaagacactgttcagagtcctccttctttgacttcatcctctgtataatgggggacataatcttaaagtgyttgttaaggacatggagtaagtggctctccaactccagtatgcatcagaatcacctggaggggcttgttacaacagagtgcggactcctccccagtttctgatccaggatctctggagtggagcctgagaatagtctgcatccaggcgacactgctgctgccggcccagggaccatactttgagaaccgctgctctagcagaagcacttggaagagactctatagtaaaaac

SEQ ID NO: 491819 - DNA, 544 bp, Homo sapiens
ttccttccagctataacatcccctaatttcagggcctgaaatttaaagaggacatttttatttttgtggatttacatccttgaagaagccccaaagaaggcctatgaagctaataaaatgtgtgtctaaatgctatgatagtatcctccaacagcaatgtgggatatggaaagatagctggcaaacgccttcactgctgggttattatgtaaagtccatgaagatacaatagaaaaagtgcattaaaatactgtaaggttagttaggacccagaatataggtgagamgcatcaagttttataaacatgttgcctccagcaaaatgcaaacgccccactaagctaataaatacatccatagtctggagaataatttaaaacatttcagcttcttttagaagaacagacagatctttgcctaaactcactgaggaacgattacctcatggggctgctaaagcccccaaggtgaaagatgatccccatataatgactggtaaccctaaagtctgcagaggtgaggcccctgtgaagcacacaataag

SEQ ID NO: 491820 - DNA, 618 bp, Homo sapiens
tggtcttcaactcctgatctcaagttatccactcgtctcggcctcccaaaatgctgagattacaggcrtgagccactgcgcccagcctattctagtcttcttttgaaacacagcacgtggttcatacgtggtacataacaggtgctaactaaatgctcctttaagtatgttagttcaggtctcgaagttaacctgtactataaattgtgcgtgtgtatgtgtgtgtgcgtgtttgtgtgtgtgtgtgagagagcgagcttacagtttttgttatttacttatttatttattgtctcagttttgaagactgcgagacggcagcatcatctcttgggatgaaaggttagcaggaagcctagatcagttgaacccctttcaggatctatgagatatttctcttccataacttacacccatctccagtgctaagaactcaggccttcctctttgctcttcctttcagagagtattatgagggaggccgaggacttcatgctccggacagagaaacggcgctgggattagggattgccacttctgagaggatgctgggaatctgcagggggagacggaaattcttggctgcctcgttgagtcttctctgcatcccagccatca

SEQ ID NO: 491821 - DNA, 587 bp, Homo sapiens
cctaatgcctaggctgagtcccatatgggaaagtgtgcttctacagtgcagactttatacatgtctaaggtgttactgtcatcagatggtggtggagaatgtctgggtattgggarccctggttttaattcctactttagttgtatatcaactggagacaatcacaaaagctcctcaggcctgttgactcaatggtcaaacgcagagatttgcgtagggatttgctagatatacttctgatatgaaaattctattatgttggaaaataatctctgatgtttcactcttgtttttagttttctcatataataaaagattgagtcttggatttggctttatggaactatatgtgagcgtgcttatgcagaggggttactggggaggaggagagaggagaaggggaaatggtcaagaggaaggggagaggaaattggaaagaggaagagggataagatgttacaacaggcattgtagattgggaaaacagaccacctggaactgaaggcccctgattatgtgctctgaggaaacaggagcccagggacagggcggatgtcgatgctttgacaagccctgctctggtcgtg

SEQ ID NO: 491822 - DNA, 416 bp, Homo sapiens
ttctgcttggctgatctagctggctaggcgggtgtccccttcctccctcaccactccatrtgcgtccctccagaagctgtgcgcttggtggaagaggacgaccatccttgatagacaaggaccagtctttggtcaagggtatacgagtagctgtggtcccctgctggaacctccaaacaacctctcaagagtaaagaaaaagtatgtagttcagaaattcacatctacttaaagaacagcattagagaaggaataaaggcaaaatataatcttttattttttcttatttataattgaaaacagttttctcaacataataatagcaagtggtggctcacgcctataatcctagcactccggaaggccaaggcgggcagatcacctgaggtcaggagttcgagaccagccagactaat

SEQ ID NO: 491823 - DNA, 416 bp, Homo sapiens
ttctgcttggctgatctagctggctaggcgggtgtccccttcctccctcaccactccatatgcgtccctccagaagctgtgygcttggtggaagaggacgaccatccttgatagacaaggaccagtctttggtcaagggtatacgagtagctgtggtcccctgctggaacctccaaacaacctctcaagagtaaagaaaaagtatgtagttcagaaattcacatctacttaaagaacagcattagagaaggaataaaggcaaaatataatcttttattttttcttatttataattgaaaacagttttctcaacataataatagcaagtggtggctcacgcctataatcctagcactccggaaggccaaggcgggcagatcacctgaggtcaggagttcgagaccagccagactaat

SEQ ID NO: 491824 - DNA, 416 bp, Homo sapiens
ttctgcttggctgatctagctggctaggcgggtgtccccttcctccctcaccactccatatgcgtccctccagaagctgtgcgcttggtggaagargacgaccatccttgatagacaaggaccagtctttggtcaagggtatacgagtagctgtggtcccctgctggaacctccaaacaacctctcaagagtaaagaaaaagtatgtagttcagaaattcacatctacttaaagaacagcattagagaaggaataaaggcaaaatataatcttttattttttcttatttataattgaaaacagttttctcaacataataatagcaagtggtggctcacgcctataatcctagcactccggaaggccaaggcgggcagatcacctgaggtcaggagttcgagaccagccagactaat

SEQ ID NO: 491825 - DNA, 677 bp, Homo sapiens
ttaaaattcaaacgccagtttagacctgttccactagaccctcctccccttgtccccatattctctagagtattagcctattgagaagcaggagaatgcactattgagtgaattgagaggttcttccctggcagtgagtgggattcagaaatattctggggaccccctttccttttctggagyggaccatgcccttaggccatccctttaaggctatgcatggtgtgtggccagcccaaccactgggcttcagcctgggttcctggttttctcttctatcatctgccgggccagtagccaaggctgagcccagtccagttggctgagactctgcttctcctagtttctgccaactttctttgtttctggtatttctactttaattcatacgttgatccttgggccaagactctggtcaacaggataccaggaactcttgcttcccagaatgccccctccttcccctgccctcagatcaggcccttcatactgatgttggcccaagttgcacctgttcccatcctgactgcaccttagtccacactaagaccttgaacctgaactgttagcatcttgcagcctgggtgagttcccctaccctgtgccaggcacctcagcaaaatcctcacagtgaatgcttccatacccatcacttcagctagtactgccgctttgac

SEQ ID NO: 491826 - DNA, 601 bp, Homo sapiens
tgccaacccagtgcccaccatacctgagtacccagcagcccttcacagggctcaggccacccccaacttccaccccctaagttcacaggctcacctcctatgcttagccaagtagacccctgcagttctgaacgtgctcccattctggcttctactcctttgtatgtgttcttccctctgcctaaaagccttctgctcctccctactccttgttctcttggcmagttcatagtcattttgccagaatgggctcaagtgtcctcctcctccagggaggcttctccctgactccgcaagccaagcagagctgttcgtcccctgctacacagcatcgtcctggggcctgtaagtacctgcaacacggccggctctttccaccctgctgaactgtttctctgctaaacactggagcctcttctagaggaacccgaagatgagttttcagctctgttaggaggtactcactggagccagaaaatgaaggaaattgttctcttccaatcacaattgtggaggaactctttttttctctctctcctatctctgtgaccagcattatacatagaaaaatggtctcaaaaagcacatgtttgctatttcg

SEQ ID NO: 491827 - DNA, 469 bp, Homo sapiens
gtgttttcaacaagatgatcttaaaaaaaaaaaaaagtaaacccagagggtttcttttctaaggccctaattaatagtcaytcctgtctccctggggccagtggaagggtttaaagggggactaacgacgttgcttttatacttttcccaactgggagtagaatggaagtttccacctttctttggaaactttgagggatgggaaatcattgtctttttctatcatcggaattaaggaaaatggtagaatatacaaaacattgtctgtgaagtagctaaattggaattttttaaaaaagaaaaatatcatgatatttttattctaaaacacttgtaagcctaaatatagactttggaaccagtgaaggaatcagagggttattaccccataggctaggggaaagcacatccttgccctgaagcatctgaaaacctcatctcctttttgccaactcacttgggcagctat

SEQ ID NO: 491828 - DNA, 469 bp, Homo sapiens
gtgttttcaacaagatgatcttaaaaaaaaaaaaaagtaaacccagagggtttcttttctaaggccctaattaatagtcactcctgtctccytggggccagtggaagggtttaaagggggactaacgacgttgcttttatacttttcccaactgggagtagaatggaagtttccacctttctttggaaactttgagggatgggaaatcattgtctttttctatcatcggaattaaggaaaatggtagaatatacaaaacattgtctgtgaagtagctaaattggaattttttaaaaaagaaaaatatcatgatatttttattctaaaacacttgtaagcctaaatatagactttggaaccagtgaaggaatcagagggttattaccccataggctaggggaaagcacatccttgccctgaagcatctgaaaacctcatctcctttttgccaactcacttgggcagctat

SEQ ID NO: 491829 - DNA, 469 bp, Homo sapiens
gtgttttcaacaagatgatcttaaaaaaaaaaaaaagtaaacccagagggtttcttttctaaggccctaattaatagtcactcctgtctccctggggccagtggaagggtttaaagggggactaacgacgttgcttttatacttttcccaactgggagtagaatggaagtttccacctttctttggaaactttgagggatgggaaatcattgtctttttctatcatcrgaattaaggaaaatggtagaatatacaaaacattgtctgtgaagtagctaaattggaattttttaaaaaagaaaaatatcatgatatttttattctaaaacacttgtaagcctaaatatagactttggaaccagtgaaggaatcagagggttattaccccataggctaggggaaagcacatccttgccctgaagcatctgaaaacctcatctcctttttgccaactcacttgggcagctat

SEQ ID NO: 491830 - DNA, 612 bp, Homo sapiens
taggaccttgatttttttccttgggagacttcatgattgcagttagaagtgatcttttgtgtatgtgtgtgtgtgtgtgtgtgtgtgtgtgtgggttggagtggagaatgcttttctttttccccctacttttgcacctagggtcatagagaagggacttcccgccattaccctaattctgcgggaaaaatttggagagggtgttcctgttgttctttctaccatttcttatcgggggcatccgtgacgcattgagcaggacagttcttcattttacaagactgtgctgctcatttcaggacaatttggtatccctgtcaccrtgtgaacctctttcaattttaacctcttctttcccacagtggtgtcatctgactctcttgaggacaactgagtccccttacttgctcctccttccaggagacggatcgattaatctggtgagtttggtgagaacctggcattcattagctatggtgctccagtgagcagggtgaggtgccgaaactcagttttcaggcaggatatatttgttctttttttgctttttcactctggtatgctgcacttgggacctctccaggcgttacacatgctagggtctggttcaag

SEQ ID NO: 491831 - DNA, 612 bp, Homo sapiens
taggaccttgatttttttccttgggagacttcatgattgcagttagaagtgatcttttgtgtatgtgtgtgtgtgtgtgtgtgtgtgtgtgtgggttggagtggagaatgcttttctttttccccctacttttgcacctagggtcatagagaagggacttcccgccattaccctaattctgcgggaaaaatttggagagggtgttcctgttgttctttctaccatttcttatcgggggcatccgtgacgcattgagcaggacagttcttcattttacaagactgtgctgctcatttcaggacaatttggtatccctgtcaccgtgtgaacctctttcaattttaacctcttctttcccacagtggtgtcatctgactctcttgaggacaactgagtccccttacttgctcctccttccaggagacggatcgattmatctggtgagtttggtgagaacctggcattcattagctatggtgctccagtgagcagggtgaggtgccgaaactcagttttcaggcaggatatatttgttctttttttgctttttcactctggtatgctgcacttgggacctctccaggcgttacacatgctagggtctggttcaag

SEQ ID NO: 491832 - DNA, 612 bp, Homo sapiens
taggaccttgatttttttccttgggagacttcatgattgcagttagaagtgatcttttgtgtatgtgtgtgtgtgtgtgtgtgtgtgtgtgtgggttggagtggagaatgcttttctttttccccctacttttgcacctagggtcatagagaagggacttcccgccattaccctaattctgcgggaaaaatttggagagggtgttcctgttgttctttctaccatttcttatcgggggcatccgtgacgcattgagcaggacagttcttcattttacaagactgtgctgctcatttcaggacaatttggtatccctgtcaccgtgtgaacctctttcaattttaacctcttctttcccacagtggtgtcatctgactctcttgaggacaactgagtccccttacttgctcctccttccaggagacggatcgattaatctggtgagtttggtgagaacctggcattcattagctatggtgctccagtgagcagggtgaggtgccgaaactcagttttcaggcaggayatatttgttctttttttgctttttcactctggtatgctgcacttgggacctctccaggcgttacacatgctagggtctggttcaag

SEQ ID NO: 491833 - DNA, 612 bp, Homo sapiens
taggaccttgatttttttccttgggagacttcatgattgcagttagaagtgatcttttgtgtatgtgtgtgtgtgtgtgtgtgtgtgtgtgtgggttggagtggagaatgcttttctttttccccctacttttgcacctagggtcatagagaagggacttcccgccattaccctaattctgcgggaaaaatttggagagggtgttcctgttgttctttctaccatttcttatcgggggcatccgtgacgcattgagcaggacagttcttcattttacaagactgtgctgctcatttcaggacaatttggtatccctgtcaccgtgtgaacctctttcaattttaacctcttctttcccacagtggtgtcatctgactctcttgaggacaactgagtccccttacttgctcctccttccaggagacggatcgattaatctggtgagtttggtgagaacctggcattcattagctatggtgctccagtgagcagggtgaggtgccgaaactcagttttcaggcaggatmtatttgttctttttttgctttttcactctggtatgctgcacttgggacctctccaggcgttacacatgctagggtctggttcaag

SEQ ID NO: 491834 - DNA, 514 bp, Homo sapiens
tggtggtatgtacctgtagtgctagctactcggacgtcaaaaatggaaagattgcttgagcccaggagtttgaggctgcagtgagctaagaatgtatcactgcactccagcctgggtgacggagcaagattctgcctcaaaataaatacattaaaaaaataaaaataaaaatgaaagtaatacctcaccaggacccatagggttaaagggaaagcaaatttcaatgcaatataagatagaatattctaataactagtgtttctcaacaataaatcaccactattgtgtttaagtgttctccctatcactgaagtgtgcaaacagatgttggataacaatctctcagcaaaatagagaagcaatgtaggtatctggtgtgatttagactgggttcctaggtggccttttgaaaattagattctatgcttgtgtatatacggaaaatggacttatcactactgggcatgttgcaataasgtaactgcagaaagaaactgactatggagggcaagta

SEQ ID NO: 491835 - DNA, 592 bp, Homo sapiens
ttgagtggtacagaaagtgtcattacagggcacactaaacaggtgagactgtgtttcttatatgcacataccaccaactgttaagactgtcrccctcacagatggacagaccccattggagaggtcctgaatttcacacattgacacagcccacagtttggattgtgaccgtcatatgtgaacatccagctacagttgacatggtgactcatttctaattctggcaagttagatcctttctacctggatgcattcaatggagagatgttgactcttagtcctgggtttggggccacaggtaggatcatgagtctgtagatgcacaaagtctcagagcatactgtgactttaatgtgtatatatacatatatatacacattatcatatatatatgcaaattatcatatatatacacacattatcatatatatatacacattatcatatatatatacattatcatatatatatatacacattatcatatatatatatatatatatatacacacacacacacacacacccattatcatatatacatatccctcaggtgatacaaagggtgtcctaacagagcatggtatagaggt

SEQ ID NO: 491836 - DNA, 592 bp, Homo sapiens
ttgagtggtacagaaagtgtcattacagggcacactaaacaggtgagactgtgtttcttatatgcacataccaccaactgttaagactgtcgccctcacagatggacagascccattggagaggtcctgaatttcacacattgacacagcccacagtttggattgtgaccgtcatatgtgaacatccagctacagttgacatggtgactcatttctaattctggcaagttagatcctttctacctggatgcattcaatggagagatgttgactcttagtcctgggtttggggccacaggtaggatcatgagtctgtagatgcacaaagtctcagagcatactgtgactttaatgtgtatatatacatatatatacacattatcatatatatatgcaaattatcatatatatacacacattatcatatatatatacacattatcatatatatatacattatcatatatatatatacacattatcatatatatatatatatatatatacacacacacacacacacacccattatcatatatacatatccctcaggtgatacaaagggtgtcctaacagagcatggtatagaggt

SEQ ID NO: 491837 - DNA, 650 bp, Homo sapiens
tattttcactacacaccgctattagtatgcaaaatgctttgcaaaatggtatgcaaaatattttactaatgcaccaaaatgcattttggtatgcattaaaatattttactaatagaagtgtttattgaaatcctagtaattgttaaacatagtgatgtaaaaattaacaaaaatgaagaaatattctgtatagaagcttatttttagaacatcaaagacagagaaggaaaacttaagcagttgaatactaaagcaaagcatccctttgtgtcagtcatttagatctggggaaagtcattccttgaattaaagttagggaaaactgagatcggaaggttttcagcattgacaccacatacgggttataaaacaaatcagaaatacttcactatcagcatattatacatgtacttgtaattctttgmttataaatcctgagcaatataaaggtagaagaataagaatattgataaattaagtgactgatggttatgtgaacacaaacacgagcaaaacctagaaatcctgggtttctagtaacatagagatctaagtggaaatttcatttctgtaagcctctattcactccatttaaaaatttataaaacttgctcctgtaaaatgcacatgctattttgaagataaattat

SEQ ID NO: 491838 - DNA, 509 bp, Homo sapiens
gttggtcaaagatgtggttatccctacttcctttatctctccctagactttcttgctgttttatrcctttacttgtctttcaattgcttttttaaaactccccatctattaaacaatagatattgacatgttttctatccttcaaatcttttttatttatttggtttcccagctttatttttttccaattaaaattatttttgagacgaggtctggccatgttgaccaggctggtcttgaactcctggcctcaagcaatcctcccacctctgcctcccaagtagctgggattacaggcatgagccacggcgcccagcctcttacaatttcgaagcactcactttttcctccttttccaagtatccccaacacaaggcatttcatgactatcagaaaccaaattcaagagagaagtgctgtccaatgtaaatacaaccacaaatataattttaaattttctggtaggtgcatttaataagtcaaaaaaaaaaaacacaacaaaaaacagg

SEQ ID NO: 491839 - DNA, 577 bp, Homo sapiens
ctgagggaaagggcaacttcattgaaatttgttataggttgaccagattttgcctcttgcagccccggaagagcaagaaaacttcatttaggtttcacattaatgatagatagccactgatacaagtgtgggaccaatcatataatgcaatctggatattatttggaagaattgaatccagcctattcacataaagaattgtctatttccctgtctgattcattggctgccattactcccacgtctcagaagagttatagtttaacaaactttttcgatccgtgagatacaagtacattaaaaccaccaagatggccatccttcctaagagctgaaatgaccctttttacccattggtagactcttacccattttcaacttaggggaaaatttcttactggctgcccttttctaagaggtagagctgagaacaggaccccaatttcctggctcttgtgttcctcttggttttagaattacatayacccttttggtgtgcctctttggctccagctatgttattaaattattattacctaacaatactcccattaatcaccgtgacagatggacacca

SEQ ID NO: 491840 - DNA, 624 bp, Homo sapiens
tcctgggcccttctgactagtgactgtcttctcactgctgctgctaccagtgcccagtttgttgcctgaagccaaaagctgaaagctcacataatcttttgaagagtactacataagtaaattgagttctcataatgaagaatagctgagtaaacactgccacaccatgtggctacatgcatttcctaagattaaaaacatttgcagtyacagaaacagacatgggataggaaacacaggtctattttattttgtgggttttgaaattaaaccaattgtttacagtaaaggcgctgaagttctgcagattaaaagaatgaattaaatgtatttattcaacaaatatttattgatcatccactacatgccagacactgagccaggtgccaaagacaagcatgggtcatagaggtttcatggtgcttccggggaaatttattaaatggagacagagcagtgattatgcttttctttatttcataaatgtgaataagagtatatagttgtttctcagcgaaatgttaattttctttattttagggcttcagctgcttctgtataagagaaactttattttcagccccagaagttcattccaatgtgttttcatgaatttacagctat

SEQ ID NO: 491841 - DNA, 624 bp, Homo sapiens
tcctgggcccttctgactagtgactgtcttctcactgctgctgctaccagtgcccagtttgttgcctgaagccaaaagctgaaagctcacataatcttttgaagagtactacataagtaaattgagttctcataatgaagaatagctgagtaaacactgccacaccatgtggctacatgcatttcctaagattaaaaacatttgcagttacagaaacagacatgggataggaaacacaggtctattttattttgtgggttttgaaattaarccaattgtttacagtaaaggcgctgaagttctgcagattaaaagaatgaattaaatgtatttattcaacaaatatttattgatcatccactacatgccagacactgagccaggtgccaaagacaagcatgggtcatagaggtttcatggtgcttccggggaaatttattaaatggagacagagcagtgattatgcttttctttatttcataaatgtgaataagagtatatagttgtttctcagcgaaatgttaattttctttattttagggcttcagctgcttctgtataagagaaactttattttcagccccagaagttcattccaatgtgttttcatgaatttacagctat

SEQ ID NO: 491842 - DNA, 624 bp, Homo sapiens
tcctgggcccttctgactagtgactgtcttctcactgctgctgctaccagtgcccagtttgttgcctgaagccaaaagctgaaagctcacataatcttttgaagagtactacataagtaaattgagttctcataatgaagaatagctgagtaaacactgccacaccatgtggctacatgcatttcctaagattaaaaacatttgcagttacagaaacagacatgggataggaaacacaggtctattttattttgtgggttttgaaattaaaccaattgtttacagtaaaggcgctgaagttctgcagattaaaagaatgaattaaatgtatttattcaacaaatatttattgatcatccactacatgccagacactgagccaggtgccaaagacaagcatgggtcatagaggtttcatggtgcttccggggaaatttattaaatggagacagagcagtgattatgcttttctttatttcataaatgtgaataagagtatatagttgtttctcagcgaaatgttaattttctttattttagggcttcagctgcttctgtataagagaaactttattttcagccccagaagttcattccartgtgttttcatgaatttacagctat

SEQ ID NO: 491843 - DNA, 529 bp, Homo sapiens
ttctttctaagccttatggagtcctgcagccataattcatgacaaactatctcttgcattgagactggttgcagaatcatgaactgtcagagctggcagggatctgagagttcatatggtgtcattgccttacttcacaggtgaggcatgaggattcagagaggrgaaatgcttgtccaaggtcacagagcaaatataaggtgagctaggacccaggactccatgatgtacttttccatcttcagttcatgcgactgcaatgaatgatcaggtggttcaaattgtttcattgttgtttcttggtttaggcctgagaaacccaaacaaaacttcaaaaacttgcccatcccctaaatttttgtgcttttaacaaaccattttgagtaaattaggagttcttggcttatttcagccttatccctacactgtcaattcttgttatttgtagtagttatgttctgtaagtttccataaatatcattgctcctagaggaaacagttaggttcctgtgaacctctggtcacaaca

SEQ ID NO: 491844 - DNA, 603 bp, Homo sapiens
ctttagttttactgctttgtcttaccaatatatgtacattagtgttggcaataaagtaaatgagattaataataataataatttagaagaatacttataaaaatcctaagaaagggttatatataaactaatggggtaaaargggccatcagcatcccaacactcagtgttgttattctttctcttcccatgtggtttccatctgttgcttgtgaataatttcactgaggtccagttcacagtagggctaactgagccctttagaagagcctgaccctcagctgagagtttgggtctaaggtgtaaattgtggatctgattacgtcttccatcctggcccagttcaggaaattagaacctggccagctgtgtttcccagtttgtaggttgcaggcagttacctggctctctctcagacagcctgctgtcctttacttgagagtagacacagatgtatccactaagccagttttacccaatgttcaatcatgattttgatctatcagtaccacctaccttcttatttacttaacagtttgcatgaatgtaagatatagagtcattttttacagtatttaaatgtatttttaaaagtttgcgtgg

SEQ ID NO: 491845 - DNA, 603 bp, Homo sapiens
ctttagttttactgctttgtcttaccaatatatgtacattagtgttggcaataaagtaaatgagattaataataataataatttagaagaatacttataaaaatcctaagaaagggttatatataaactaatggggtaaaaagggccatcagcatcccaacactcagtgttgttattctttctcttcccatgtggtttccatctgttgcttgtgaataatttcactgaggtccagttcacagtagggctaactgagccctttagaagagcctgaccctcagctgagagtttgggtctaaggtgtaaattgtggatctgattacgtcttccatcctggcccagttcaggaaattagaacctggccagctgtgtttcccagtttgtaggttgcaggcmgttacctggctctctctcagacagcctgctgtcctttacttgagagtagacacagatgtatccactaagccagttttacccaatgttcaatcatgattttgatctatcagtaccacctaccttcttatttacttaacagtttgcatgaatgtaagatatagagtcattttttacagtatttaaatgtatttttaaaagtttgcgtgg

SEQ ID NO: 491846 - DNA, 603 bp, Homo sapiens
ctttagttttactgctttgtcttaccaatatatgtacattagtgttggcaataaagtaaatgagattaataataataataatttagaagaatacttataaaaatcctaagaaagggttatatataaactaatggggtaaaaagggccatcagcatcccaacactcagtgttgttattctttctcttcccatgtggtttccatctgttgcttgtgaataatttcactgaggtccagttcacagtagggctaactgagccctttagaagagcctgaccctcagctgagagtttgggtctaaggtgtaaattgtggatctgattacgtcttccatcctggcccagttcaggaaattagaacctggccagctgtgtttcccagtttgtaggttgcaggcagttacctggctctctctcagacagcctgctgtcctttacttgagagtagacacagatgtatccactaagccagttttayccaatgttcaatcatgattttgatctatcagtaccacctaccttcttatttacttaacagtttgcatgaatgtaagatatagagtcattttttacagtatttaaatgtatttttaaaagtttgcgtgg

SEQ ID NO: 491847 - DNA, 632 bp, Homo sapiens
gctagggaggcacttttccttccagcagacatttggcaatatctggagatatttttggttgtcacgactggggagtggtggtgtgctactggtgcctagagggtagagaccagggatgctgctcaatatcttacattgaacaagacagcctctacaacaaagaagtatctggcccaaaatatcactagtgccaagattgggaaaccctgttctacactcctagcatttggcmcaataatttgcacgtaggtggagtgctgcgtagcttgtttataattgattgacagagagtggatctaaataaaccttttctctctctctctctctctctttaagaattaatacctaaggtatataactgactgcccaggcttcgtttgttcaaaaccttttcatatttgctaccttatctgatgaacaaatctcactatgtcaagaggagagaaagcgtataattagcagaaatagcactggatgtagggtctaggttaaacctgatttcacttatcagctatgtatccacggcaaagtcaggaaaacaccttgggtcttagtgatttttattgctaaaatgatagtataaaatcattctttttctttgttttagttttaagactagtacttggactcaa

SEQ ID NO: 491848 - DNA, 632 bp, Homo sapiens
gctagggaggcacttttccttccagcagacatttggcaatatctggagatatttttggttgtcacgactggggagtggtggtgtgctactggtgcctagagggtagagaccagggatgctgctcaatatcttacattgaacaagacagcctctacaacaaagaagtatctggcccaaaatatcactagtgccaagattgggaaaccctgttctacactcctagcatttggcacaataatttgcacgtaggtggagtgctgcgtagcttgtttataattgattgacagagagtggatctaaataaaccttttctctctctctctctctctctttaagaattaatacctaaggtatataactgactgcccaggcttcgtttgttcaaaaccttttcatatttgctaccttatctgatgaacaaatctcactatgtcaagaggagagaaagcgtataattagcagaaatagcactggatgtagggtctaggttaaacctgatttcacttatcagctatrtatccacggcaaagtcaggaaaacaccttgggtcttagtgatttttattgctaaaatgatagtataaaatcattctttttctttgttttagttttaagactagtacttggactcaa

SEQ ID NO: 491849 - DNA, 616 bp, Homo sapiens
gaaagtggattggaacagtgaatgcaggtagatasatgaggaggcattttcatggactggacaagcataggtggactaaagcctctgtggtggatatgtcgaacacaatatagattcagagaggggtctcaacaacgaatcagtgggaagttagggaagcaatagcattactggtgactcctaggtatatggcctgggcaaccagttgggaaacacagaagaagagaaatcccagtgagggactgatgggaaataagaccaggcattcagctttgaatatgttaatgttaaggttccttcgagcctactttagtatcgactggactttttaatacatagcttatgttatattcgtataattcaaacgtgaatcacagaaactatcttgtcctctaaatgttgcactgcgaaaatcttgtctcactgtacatttaaatacattgaaggcaaaaaaatttcaaacatctttagtatccccagattatttgatagagtgatatttaaatttgaaaagttgctctccacatatttggtatttgattaaacatacaagtgtaaaacactaatagttgttcttggatagagggatgagaatgtaccacaaaatggagtctgt

SEQ ID NO: 491850 - DNA, 616 bp, Homo sapiens
gaaagtggattggaacagtgaatgcaggtagatagatgaggaggcattttcatggactggacaagcataggtrgactaaagcctctgtggtggatatgtcgaacacaatatagattcagagaggggtctcaacaacgaatcagtgggaagttagggaagcaatagcattactggtgactcctaggtatatggcctgggcaaccagttgggaaacacagaagaagagaaatcccagtgagggactgatgggaaataagaccaggcattcagctttgaatatgttaatgttaaggttccttcgagcctactttagtatcgactggactttttaatacatagcttatgttatattcgtataattcaaacgtgaatcacagaaactatcttgtcctctaaatgttgcactgcgaaaatcttgtctcactgtacatttaaatacattgaaggcaaaaaaatttcaaacatctttagtatccccagattatttgatagagtgatatttaaatttgaaaagttgctctccacatatttggtatttgattaaacatacaagtgtaaaacactaatagttgttcttggatagagggatgagaatgtaccacaaaatggagtctgt

SEQ ID NO: 491851 - DNA, 616 bp, Homo sapiens
gaaagtggattggaacagtgaatgcaggtagatagatgaggaggcattttcatggactggacaagcataggtggactaaagcctctgtggtggatatgtcgaacacaatatagattcagagaggggtctcaacaacgaatcagtgggaagttagggaagcaatagcattactggtgactcctaggtatatggcctgggcaaccagttgggaaacacagaagaagagaaatcccagtgagggactgatgggaaataagaccaggcattcagctttgaatatgttaatgttaaggttccttygagcctactttagtatcgactggactttttaatacatagcttatgttatattcgtataattcaaacgtgaatcacagaaactatcttgtcctctaaatgttgcactgcgaaaatcttgtctcactgtacatttaaatacattgaaggcaaaaaaatttcaaacatctttagtatccccagattatttgatagagtgatatttaaatttgaaaagttgctctccacatatttggtatttgattaaacatacaagtgtaaaacactaatagttgttcttggatagagggatgagaatgtaccacaaaatggagtctgt

SEQ ID NO: 491852 - DNA, 616 bp, Homo sapiens
gaaagtggattggaacagtgaatgcaggtagatagatgaggaggcattttcatggactggacaagcataggtggactaaagcctctgtggtggatatgtcgaacacaatatagattcagagaggggtctcaacaacgaatcagtgggaagttagggaagcaatagcattactggtgactcctaggtatatggcctgggcaaccagttgggaaacacagaagaagagaaatcccagtgagggactgatgggaaataagaccaggcattcagctttgaatatgttaatgttaaggttccttcgagcctactttagtatcgactggactttttaatacatagcttatgttatattcgtataattcaaacgtgaatcacagaaactatcttgtcctctaaatgttgcactgygaaaatcttgtctcactgtacatttaaatacattgaaggcaaaaaaatttcaaacatctttagtatccccagattatttgatagagtgatatttaaatttgaaaagttgctctccacatatttggtatttgattaaacatacaagtgtaaaacactaatagttgttcttggatagagggatgagaatgtaccacaaaatggagtctgt

SEQ ID NO: 491853 - DNA, 638 bp, Homo sapiens
tttttcagctgtcaaaggagcttccacttaggaaggggaggatgcggtaagaaaaaatacttacataaattaagacaatcaacaaagagcaggcaggtggggcagagtggagcagcctgaaggtgtggaatagtagttaggttcagaattataaattggagcactagtgctgattggaaaccatgtgcaagatggaccaattaaagttggagacattcacaataaccctcagatccaagttcttaagagaagacctgtgtctgctttaccgttttacccaccaagcacagagtactgggagtcctttgcacaaaactgatgatcagaaatggtttattcttaattatttaatttatttattaatattccctacttaagcatacatcaacacatatagatatataatgggcatgttgatgttgtcaggagaaaaatcttcatagtaaattaagtatatttcaaatagtcaccaaaatgtattttaaattatcgatttacaaatctattggatctgttatgggttgaattatgttctcccaagaagaaatgttgmaatcctagccttcagaatcctcagaatttgatcttatttgaaagtaagtttacaaaggtaatgaagttaaaacgagatccttagg

SEQ ID NO: 491854 - DNA, 627 bp, Homo sapiens
tttacttggtgtatcaatgagggctctaaacaggaaatgaagttgtgtgtgtgtgtgtgtgtgtgtgtgtgtgtgtgtgagtgtatgtgttttgcttatattgtactgtagaaaccaaaggtttatctcaattgaggaatgcctaaatgcctaacaagtatacgtagagatgtaacatataaatttatgtaaatatgaaacatctttgggatctaggaataatctatgatatcaatgttaatatttgcagcaattacaaatttgcctcccttttcagcccctgtgataaatacttaatttggaatatttactcattttcattgatggggctaaaaaacagatcatgattaaagtgacaatctgaaaaaagttcttatcagaaaatcatcactataattttgtcatataattttaataagttaatttaacttattttaataatctatacaatataaccattactaataytttattggtaataattattaaattataggtaattattattgataattagaatactttattcaatttaggaaatttaaagttggcttatttattttaaacctatataatcttaattcttctaacgacatggctgagcactctatatgacctggcatcatg

SEQ ID NO: 491855 - DNA, 614 bp, Homo sapiens
tgttctggtggcaaccaatgataactcatgatcctgagacagagtgggtgaaaattacagagaattgatgaaaatcaggagcaagaggacaaatggctctaaagagaagaatctgtgattattatttcctaatccttcagtctgatagagcttgaatctatttcctttgaaaaatctatagagtgatagacactatatgtcagcgtgaaaatggctgcatttgtttcttgccaatggcaaatgattaacttttcagtrtggatgtaggaatcagcccccaagggaagatgcatttccaaggagatggctcatatggtttgcagccttcccatcagtcaagtgcatcctcagaaatctaggagctacagacacttcagtcccatctacactattatcaaaagagccgctgagttccatacttttaaaagaaacacaatttgtttcccatctctgaaacaaatgtgtttcttttaaaagtttagatggatttcctaaataatgaatgataattgttattttatagttgttagtgtaatgaatttatttgggaatgagaaagaacattgaaaactcaggtaggatttatagtgaatacaatatgtacatgatggagt

SEQ ID NO: 491856 - DNA, 643 bp, Homo sapiens
ttagtatctgaataacccacattcaactactggtactcgatagccccacgttgtcattctgaaatttatttgtacttattataatttaagtaatatggttaaaaaaactgttttgctcctaaattggctcatttagtttaaagatgcatcatcagtgatacgggttcttaattcagtcctacactcaggtgaatcttagataattcatcacggaacttggctttaaggtaagaatttgagtgctctatttaaaaacattagcattgcttccaagtcatttgtattggacttttccaaaagtacatagtaagccatcatggaaattttgggaggaaaaagtraatgtgaacattcttttaaaatcaaataaaatcatgatgctgaagcagtgcccactggcctccttcccctgtgagggtggaagcttgctcacagtcctgctgagaggccgcaacatgcccttgcagtgctagtcaagcccctctctagcgaagtatggcccagaatgtgccctggggcatttggctgatcctttctaaaaaccccaaagaatacagtgagcaatgctcatttcaagataggcacgccaatggctgcagaagtgatactgccatcatagtcacatcccagtccctccagacag

SEQ ID NO: 491857 - DNA, 559 bp, Homo sapiens
atattttaaggcttcgtctttctggagattagtgcaggaggagcacacctcatttccttaaatgggatgtatgcttggctcttcattccacatataactgtgtgggagcatggggattcactgcatcagcttgtcaggtgaaacattatctcaacacgggcgttccaaatgtgtgtctttgcctaagtacttcagtttctacatttgagaaataataatctcctgtcttaygtggctgtcatgagttttagctcatgcaagcaattattaaaaaaaaacggtcttgcgaaggtaaactttgaaaaactatctgttctatgcagtgggctaatcttgaatttagtcctagcatcattcacagttatactggtaagttttttgaatacttttctaactttagaattattatatctacattctgtgaagatattttcttaatgtgttcctttcagaattaaatgcaagcatgcgtccccctccatgacaaaaatatgaattttataatataatatcctgtaaaagctgacctctcagttctctttgagataattctactaat

SEQ ID NO: 491858 - DNA, 579 bp, Homo sapiens
gaaacactacatctttaaatcaggcaaccctggcttcagtgtgaattcccttgccgcactccctcaccttacccaggtgcatgttaaatcagtattaatgacaatatcattcttgtgcagtcatctcctgcctgcaatttggttttaattacccgccrcgttgtctttccccctcactgacagccattaaatagggaatgacaccggagccatagttgtgtggaatattcacttcgccagatttcatccccttcataaagcaggctgcagtgcctcctagtggcagagatcagaaagggaacggtggactttctgggcactctgtaggtgaatttggagatctgggcagatttgtaactgcaatgactatatttaaagaaaaaaataaagtttaaagagcacatattaattaaaggacaataagtgcgatttggttaagttgttttagaaattgatatatagcaataaatcgatgcactatttaagccttgtctgaccatctataaaagtgaaaatgaggattcagaaacaacaaacttgtggaataaaacgtaactgacaaagttctcaaggccagtt

SEQ ID NO: 491859 - DNA, 264 bp, Homo sapiens
cagctgttcagtatatgtgattcatgaaaaatctcttctatcccagacatgggccaaggtgctgtatctgagggatgtgctgtaatctgatttacatgcattagagcacacagtagaaaaackttagcttcattagtaatatgacacatgtatatagtgagatgtctttattgtgtgctttgcatattttgtaaatattttgcacgtcattatttttcttttttgtttaagcggtgtttggcctggaagagtgatatgcttgct

SEQ ID NO: 491860 - DNA, 206 bp, Homo sapiens
cattcacttgcccctcagcaccccacccckcaaaaaaaaaaaaaaacccactccctagaggtaaatactatgaaccattttgaatctgtatagggcaccaacaggagcctgtgtggtgtgtactctcaagcttctgggtaaagcttgctctgggtctcttctgggctgaaccttttccaggaagggggaagggagaagggaccgca

SEQ ID NO: 491861 - DNA, 500 bp, Homo sapiens
cctgctgtgaagccagtgctgtgctgagcacttgcatgctttctcttgtctaataatcctcccaacataaccaaaatggagataytatgatccccattttacagagaaagaaactgaggtttctagatgctgcccaaagacttaccagctggtcaaacagggagtcagggttttctgacttttctaccaggtctgactccagagctccaatagtcctggctattctatgaggcagggactttatttttctctgacaatctggaagtaccctgagctggtgatggtgcagaaaaaggagaggatggaagagctgggctgctgtgggctcccaggatctcccttctcctcaagcccctgctgtctctaaagagaagtaacactctgtgaagctctgggcgggttgctaagaatgactaaaccattgtgcttctccctgatggaccgcgcctttgaaagtgagccagctgtgtctttaatctcagccagtttccctcccagcc

SEQ ID NO: 491862 - DNA, 500 bp, Homo sapiens
cctgctgtgaagccagtgctgtgctgagcacttgcatgctttctcttgtctaataatcctcccaacataaccaaaatggagatattatgatccccattttacagagaaagaaactgaggtttctagatgctgcccaaagacttaccagctggtcaaacagggagtcagggttttctgacttttctaccaggtctgactccagagctccaatagtcctggctattctatgaggcagggactttatttttctctgacaatctggaagtaccctgagctggtgatggtgcagaaaaaggagaggatggaagagctgggctgctgtgggctcccaggatctcccttctcctcaagcccctgctgtctctaaagagaagtaacactctgtgaagctctgggcgggttgctaagaatgactaaaccattgtgcttctccctgatggaccgcgcctttgaaagtgagccagctgtgtctttmatctcagccagtttccctcccagcc

SEQ ID NO: 491863 - DNA, 616 bp, Homo sapiens
tacctggcctgcagtaaatattgaatgtgtcattgggtctgaatagaactaagaacagggatttcccttctgaggcagcatgtctctgctgatccctgcaagaatcaggccctcacttgtgatgagaggctgctatgtgttaggcactcgctgtataccyggcctattccaagcacctcacatgcatcttctcatttaacactcacaaccgcctagtggggtgtgtggtccactgaggctgctatcacaaaggaccacagcctggctggcttccacaacagaaatctattttctcacagttctagaagtccaacctgaaggtgtcaacacggtgggtttctcctgaggcctctctccttggcatgtagatgaccctcttctccctgtgccctcacacggtcttcccaatctgtcggcgtcctaatgtcctcttcctataaagacaacagtcatactggattagggcccaccctaatgacctcttttaacttcctctctttaaatacagtcacactgtgatgtactgggagttaggacttcaacatacgaattgggggtgggggcgggagatagaattcagcctataatagggtggtagctattattgccccatttc

SEQ ID NO: 491864 - DNA, 432 bp, Homo sapiens
acagcagtgacttcctttggcccctgcagtaaccacgtggaccctcccttcccaggggccaagsctgcccccagccctggatcttacttggcagggactgagaacacttactgggccacgggggtcgcaggctgcagggcctttctcccagcccccaggcagccaggatgttcttgccaaggggccctgccccaggcctatagctgctgttcaccgtgtctccagggcaggtactacaggtccaccaggctgacccgatccctcccggacacgcagtggtagaaagtgatgatgaaattgtcagatggcaggagtgctgccttgggcggcaacactacagtgcactcactgccctgccagatgcacttctgtgtgccaccagcagcctggttgctgaaaagggcatgtgtcagcaccacggggctgctacac

SEQ ID NO: 491865 - DNA, 601 bp, Homo sapiens
ctgattgattctatgtggattgttttccttggagtgggggtcttgtcttggtgtcccttcatggtgttgctgaaagatgttgctggaaaagagggtcctgacacagaccacaaagtaggattcttagatcttgtgcaggaaaaaatttgaggtgagtcagagrgcaaagtgaaagaagcaagtttattagaaatgactccattacagagttggacatcctcagaaaacaagagcaggaatgcattgtcttttgttagtgtctgtactctaactataaagagaaagagttataattaaacttggaaggtgcagatgtactcattaaagtcggggctattcgttttaacaatgaccattaacccgttgacctaagctagctcattaatattatcttttaagaaaaaatgctgcactcctaggacatttatacatttttcaggcttggtggaagtgtcttgtatggccataaatattctgcaattgtaatttgtggccagtaaaaaaatgtggctatttccagactataggtattaaccttctagatgccttgtgagtacctagctactcatattaagatagagaattctcgtcatgtttatta

SEQ ID NO: 491866 - DNA, 524 bp, Homo sapiens
attctatgtggattgttttccttggagtgggggtcttgtcttggtgtcccttcatggtgttgctgaaagatgttgctggaaaagagggtcctgacacagaccacaaagtaggattcttagatcttgtgcaggaaaaaatttgaggtgagtcagagggcaaagwgaaagaagcaagtttattagaaatgactccattacagagttggacatcctcagaaaacaagagcaggaatgcattgtcttttgttagtgtctgtactctaactataaagagaaagagttataattaaacttggaaggtgcagatgtactcattaaagtcggggctattcgttttaacaatgaccattaacccgttgacctaagctagctcattaatattatcttttaagaaaaaatgctgcactcctaggacatttatacatttttcaggcttggtggaagtgtcttgtatggccataaatattctgcaattgtaatttgtggccagtaaaaaaatgtggctatttccagactataggtat

SEQ ID NO: 491867 - DNA, 538 bp, Homo sapiens
actcccctgtagcttccgtccttcctggactgaccgtgccttggagtgggcagggtcaggcctggggttcagggctcrggggcagggcttacagtctttgtcttcatgattcaggagggttcttgtagggctgagtagaagaagggggctctgcccctagaggcagtggagccgaagctcccccattcgcatgtcactgaattgtgtatgtgctcggtcagcaagctcatttggagtgcaggtccaaccggagcttcctgctgggtcttcaggaattttagagcaaagatatttggtaactgacccaactttagctgtgactgtggaaattaatataaagtagaagatatttgagagtcgtgtaaaagtgaatgtttgtgatacagcgattcacaattggagcagaagagctagcgttttgagaaaataccatttaatgctgcagaaacacccaggcaatgtcatctgcacgcatccagctcgtgccagtcaggcctctgctcagcgtcacctcctcagagagcccttccccacattg

SEQ ID NO: 491868 - DNA, 317 bp, Homo sapiens
gaggggacaggagcaggagggaggggatactgttttgtcacccagtaaatgaggctttctgggggagcgtccatctggggcctgctccttttctcctgctctgaagccgcctggatgggcccaaccccttcccctcctcctgactgggggacccctggctgcagtgttcccactcccaaggcctaagctgatgctttggcaaagctctcattcctttatcacagaaagaggaaatagtgggaactgcagggggctggagtggagaggaaasagaggaaagaatgccgctcttccagagaggagctgcaccgggagcg

SEQ ID NO: 491869 - DNA, 431 bp, Homo sapiens
ctgctgaaaggccctgaggcacatgctgtcaggagctggctctgtcctgggcagatatcaccatctgtacctcggttcaggctgccgtggacaccaggtcctgtgctgggggagtgctgagaggcctgaaaggactcagggtcccrtgatgaggctgggctggcacatggaggaaagacagaatgtccaagacacaggcgctgcttggcctctgggtgtggacctcaggagggcttcctggaggaggagggatgctgggcttgccagaaaggaggcagctgctcccaggatgagttctgaacatgctacctgagcccttccctcctcctgcactctgttccagactcggatgggggccacagggccggtgtgctgctgagccaggactgtgctggcacccgacgaggagccttggagccctgcatccagga

SEQ ID NO: 491870 - DNA, 589 bp, Homo sapiens
tgcttgggaggctgaggtgggagaatcacttgaacccgggtggttgaggcttcattgagccataattgtgccactgcactctagccttgatgacagagtgagacyctgtctaaaaaaaaaaagaaaaaaatcagatctagtactatcacagggctctaaaacctcataaagccctcagtggcaaagagaagatgaagataattgagccattttggggatctacctactctgtgtttgaatatcatctcattacctgggccaggcactgttccgtgccatgtaatccttaccacaagccactgaggttgattctctgttttcaaattagaaacatgtggcccagcaagatgaagtaattttaccaaagtcacccaattagtgagcagtgtgcacacagcagtctcaggtctgtgtgaccctgaagctcatgttctttgcaacctggcaccatctaggtgcaacaaagctaaacctggataagtttcgtgcagatggcacattagtgcttgtccattatgcacactgaggacatgagcatgtcacccaaaaatatcagttagagtttcccggtttgagattctccctaaca

SEQ ID NO: 491871 - DNA, 589 bp, Homo sapiens
ctgcagttgatgtcacatatatatgttctctgtctggcactgtactagacacctttttcatcccaataaattctcacaacaaaattatgtttcccgctagtttgcatattaggaaactaaagctcagatgaaataacttgtttaaatcattcattacagtggcagagccatgttcgtctgattctctctcctctgggtcacagtggaatacagcctggcctactctcaccttctccctggagaggatatacttatatataaataggtcaaagagatgcagcatatttctttctttctttcttttttgcctaggttaaaggtttaggagtcctccttcccaccaagcccaggttcaaatcttaaatcttaaaactccagtggggcgaggtgggggtgggaaaaaaactcatatcccatagagccaggaacagtgtaggtgcaggcaatggggaagaagcatrttacccaatatctctattggcatcaagccaggccacccaccctcgtttcccagactagcgtagtagcaatagatttgctttcatgtagaaaattgttgaagttagagctagctaggattgcttgagct

SEQ ID NO: 491872 - DNA, 598 bp, Homo sapiens
ggaagcctgtcttacaagttttcccaagcaaagaaaccagccagaatcctagaggagcttttaccatgtaggtgaactgarcaaagtaattagatctgagcaatacaaggggtggactgtagtgagggctattcattcaacccaacccaaatcttcctttaaagaagcaaagcacttgttttttaagcttctgggagctttgcctgatgaattttcagagctggattcttccataggacttttcctccatcaaaggatgctgccccaaaagtttgctctccttcctggggggctgcttctccattcaggatgtctctgaagagacttcacaggtttaaagctgaaacctctgctgcacttgtcacagttcaacttctccttttgtctacctatttctcttgctttgaagtgcgtgcccaaataaacctcctgcatgcaaatctgttttctggggaacctcgtctacaacacgatcttaatctagcatttatttttgtggggggtgttgtaaggatctggcattaattttatttcatgtagaaagtttagtgacccaaagccatttattgaaaaatctatcaaaaagcacattgaattg

SEQ ID NO: 491873 - DNA, 598 bp, Homo sapiens
ggaagcctgtcttacaagttttcccaagcaaagaaaccagccagaatcctagaggagcttttaccatgtaggtgaactgagcaaagtaattagatctgagcaatacaaggggtggactgtagtgagggctattcattcaacccaacccaaatcttcctttaaagaagcaaagcacttgttttttaagcttctgggagctttgcctgatgaattttcagagctggattcttccataggacttktcctccatcaaaggatgctgccccaaaagtttgctctccttcctggggggctgcttctccattcaggatgtctctgaagagacttcacaggtttaaagctgaaacctctgctgcacttgtcacagttcaacttctccttttgtctacctatttctcttgctttgaagtgcgtgcccaaataaacctcctgcatgcaaatctgttttctggggaacctcgtctacaacacgatcttaatctagcatttatttttgtggggggtgttgtaaggatctggcattaattttatttcatgtagaaagtttagtgacccaaagccatttattgaaaaatctatcaaaaagcacattgaattg

SEQ ID NO: 491874 - DNA, 579 bp, Homo sapiens
ggtgaatgggctccgacaaattcacccatctcaatagctcagtacaaattggaatgttgctcttgagtcagttggggtccattttttatgtctgtgttatatacagttaaatggcaagaggaaagaggagaaatgatttgattttgatttcaactttctctgattaggggttgctgaaggactttttctgaatgcaccattaggatagctgacagatgtcttcttaccatttgtacagaaatttagagaacttagcaaagtgtgctcaatgactttctggtagatttcgtagcatctgaatgtgataatttaacatttgtttagttagggtatccttgttttgaaatggtggtgaaagaaggcgctgaggctcattttgaaggagagttgctttggaatatggtgacaagctgataaactaaaggtcagaactgtgaccagttgatcattaatttgttctcgcttctgggaggaccagatcctrcatatttacagcagaccttaatgctgatgatttgagcaatgaaaaatgtctgtgattttagttctgcatgcagaggctgtgatgtataagggaaa

SEQ ID NO: 491875 - DNA, 560 bp, Homo sapiens
agtcaccctaggtttcacatcctggggccacttggttcaatgcactaagacgttaaagcatagtaaggcagggcggtgaggaccctctgcttctggggctggggacctgcaacagagtctgggctgttctagccagttctccacttgtcttggctattacattccaagcacattctacaattattcttgagaacgacacatgagaacctagggggtgggacggtggaggacagaacgtgagtccatccaaggccaccaagggaactgtcctgcatatagcagttagtacgttatcttaaactgtgtaacatttcaatacaatatgcatctagaagttttttaaatctgaatgaagttatattttaaacaatgaatcctggaagcaaataatgttgcactttagatgccaaatcattacagagtaattcttaatatgaatacatagaacactttaataatrataataaattttattgcatactggcttatgtcataaaattacttatatatttaattttaaaattcagcaatgtgattatagtacaattaaataaaggagt

SEQ ID NO: 491876 - DNA, 528 bp, Homo sapiens
ttaagaaaatgcagtctacagatgcagtggctcacacctgtaatcccagcactttgggaggccgaggcgggtggatcatgaggtcaggagttcaagaccagcctggccaagatggtgaaaccccatctctaccaaaaaaaaaaaaaaaaatacaaaaaattagccgggtgtggtggcacgtgcctgtaatcccagctactctggagactgaggcagmgaattgcttaaacctgggaggcagaggttgcagtgagccaagattgtgccactgcactccagcctgggcaacagagcaagagtccatctaaaaatagaaaatgcagtctaaaaaagataaatgaataaataactaaagctgaatttcaaagtataaataataacctggtattacttttacctttatatcacaaccatttcttaacaactgacatttgaattaaaaagaagttagacttacactgtccctttgttgtgaagaactgccacacaaaacctattactaaaaatttctattacacaaaccgtatc

SEQ ID NO: 491877 - DNA, 528 bp, Homo sapiens
ttaagaaaatgcagtctacagatgcagtggctcacacctgtaatcccagcactttgggaggccgaggcgggtggatcatgaggtcaggagttcaagaccagcctggccaagatggtgaaaccccatctctaccaaaaaaaaaaaaaaaaatacaaaaaattagccgggtgtggtggcacgtgcctgtaatcccagctactctggagactgaggcagcgaattgcttaaacctgggaggcagaggttgcagtgagccaagattgtgccactgcactccagcctgggcaacagagcaagagtccatctaaaaatagaaaatgcagtctaaaaaagataaatgaataaataactaaagctgaatttcaaagtataaataataacctggtattacttttacctttatatcacaaccatttcttaacaactgacatttgaattaaaaagaagttagacttacactgtccctwtgttgtgaagaactgccacacaaaacctattactaaaaatttctattacacaaaccgtatc

SEQ ID NO: 491878 - DNA, 561 bp, Homo sapiens
aataatagcatgaggtccccatgcccaagaaagagtatgggaaacacgagaccacattaaaataccatggcaagtaagctccagagaagttatattgaaagagagtcagggtttaagatcgtctcacaggcccgttccgtgggacttgaagtttttgagagtttccctgaagggtaaatgcaaacctctgcttgagtttttattaagaatgtctgggccgggcgcagctggctcacgcctgtaatcccagcactttgggaggcctaggcgggcagatcaggaggtcagaatatcgagaacatcctggctaacattgtgaaaccccatctctactaaaaatacaaaaaattagccaggcacggtggcgggcgcctgtagtcccatctactcgggaggctgaggcaggagaatggcgcgaayccgggaggcggagcttgcagcgagcccatgtcgcgccactgcactccagcctgggggacagagtgagactctgtcgcaaaaaaaaaaaaaaaaaaaaaaaaaaaagtctgatattttgggctgggcgtggtggctcatgcc

SEQ ID NO: 491879 - DNA, 556 bp, Homo sapiens
gaggctcaaggaacaagccacattgcatccctgtaggcttacaatctactgaatgattctcttttctcrtcctcttctcttgtctttggagacaatgaggataatgtttgggcatagcagaaccagtggagataccacttaataactctggaaggagtgtctgtcgtcaactattttgtcactttctatcatgagatgtattttacatctttaagtcctcagctttgggtcccagttgccaacagtaaggcaaagaagttccatgcaacatctgttttaaggggtattggagacttactagtccgaaagtatcttggcacttggcttccttatttttttttttcagtagaaataaagtgaagtgagctgatcatagaatgtacaacactaggtgagtgtttgcaggtggagaatgagggggtcatgacaaaaaatactttgcaggtcactgctttgaataataggtggtgtgatttcctgagatagggaacacgggagggatgacagtgaggcaaggtcacaagtatccttttggacaaacctgaggtgcctgtga

SEQ ID NO: 491880 - DNA, 556 bp, Homo sapiens
gaggctcaaggaacaagccacattgcatccctgtaggcttacaatctactgaatgattctcttttctcatcctcttctcttgtctttggagacaatgaggataatgtttgggcatagcagaaccagtggagataccacttaataactctggaaggagtgtctgtcgtcaactattttgtcactttctatcatgagatgtattttacatctttaagtcctcagctttgggtcccagttgccaacagtaaggcaaagaagttccatgcaacatctgttttaaggggtattggagacttactagtccgaaagtatcttggcacttggcttccttatttttttttttcagtagaaataaagtgaagtgagctgatcatagaatgtacaacactaggtgagtgtttgcaggtggagaatgagggggtcatgacaaaaaatactttgcaggtcactgctttgaataataggtggtgtgatttcctgagatagggaacacrggagggatgacagtgaggcaaggtcacaagtatccttttggacaaacctgaggtgcctgtga

SEQ ID NO: 491881 - DNA, 615 bp, Homo sapiens
ccaggtcctgagggttaggactccagcacatcttttggggacattattcaacacccatggggcacttccctgccctaagcggcctccacatgggtcccaaggtattccccccaccccctccacaaagaggaagccgcaggagggagggctgttgaggcagagagtgcctgaggaggctcacgggcccggccctggggccagacgggaggcagggtccccggggctgggtgtcggtgccctcatgccccggggcatctatggagagggtgaccctccgtgagagcgagttctccctcttctcccactggagtggccagattaagccaagtaaagtgcaggcacccagttaaacgtgagcttcagatcaacaaggactcctgtttgggatgttctagatcctgcacggggcatactcagcccgaggaagcggctcctgtggctccgggttcgctggtgcctgcaccctctgtttcatccggcggtgctgcttggatccctgcggctccgttctggccactctgcatccactcagggatgagagaagctgggccygggatgagatcccctggcggctgcagctctgcaccccttcccggaagggtcagggggcagcag

SEQ ID NO: 491882 - DNA, 436 bp, Homo sapiens
gctttttcccagggttgttgggggcctatgcaaccacctgcagccctccctaggggaccatcccagaagctgcaccgcagcccagcttggctcaggaccggattcctgggtcattagcggactataacccccatccccagcagccagagcctccccgcaggttgatcttcccgggtgtttgagtctgaatgctgtgcttccccttcaggctggggaggggagggaagrggtccccagggcagggagccaggcctgactcatagagggcctagcgagcggggctggccaacttccccttcggatccctgtcaccatcaccaagtccttctgtaagaaagattgtgcgagagactgtcattagaggtcacgcttctggaaggttcttgctctcggcgagctcagtcaggaagatgctggtgccagcatccgacatggc

SEQ ID NO: 491883 - DNA, 436 bp, Homo sapiens
gctttttcccagggttgttgggggcctatgcaaccacctgcagccctccctaggggaccatcccagaagctgcaccgcagcccagcttggctcaggaccggattcctgggtcattagcggactataacccccatccccagcagccagagcctccccgcaggttgatcttcccgggtgtttgagtctgaatgctgtgcttccccttcaggctggggaggggagggaagaggtccccagggcagggagccaggcctgactcatagagggcctagcgagcggggctggccaacttccccttcggatccctgtcaccatcaccaagtccttctgtaagaaagattgtgcgagagactgtcattagaggtcacgcttctggaaggttcttgctctcrgcgagctcagtcaggaagatgctggtgccagcatccgacatggc

SEQ ID NO: 491884 - DNA, 500 bp, Homo sapiens
gtgtgtacataaaacaatgaacatatgtgcacaatgcacacactgcacacacatacacatgcacacacatgcactcatacttgcagtctacacacatgcatatgtacacatgcacacatacactatgcacacacaaacatacatgcacatctgcacacagcacatacattaacacaatcatgtgcacacccacatgtttgcccacatgtgcacatgtacagccggtgcccatgtgtgcacatatccacatgtacacatgcatgtgtttgcacatgaaaatacacatggacacatatgcacatggacacacccacgcagatgtatgtccatacacccacctacatgtgtacccacacatgacgtacatgtacacacactcctgatgacctctcccaggacccagggcccaaggcccctccagccttcagacacattctgtgtcctgggaccgggattctcaatggcyggcatccggggttctagctggcaaagggcactcc

SEQ ID NO: 491885 - DNA, 490 bp, Homo sapiens
cggctttgcaaaagccccaggactttccgggtggacatggggggcttggctttgtcaccgggacctcttgaaaggcagccggtcctgggcctctcatctggccccgcacccttcttggccaccgacgtggaaggcagggcgccctgtggggtgagcagggccatccgtgcctcggggtctgccctcggcttgtgtcacaggcagaattgtgtccccccagatacacatgttgaagtcccaacccccaatatcttgaaatgcgacctgatttggaaacaggctcattgcagatggtcaagttcagatgtggtcattcgggtgggccataccccaaaatgactggtgtcctgtggaaaggaggaaactrcgcacagaaagggacccacaggaagctgtgaggatgaggcagggactggccaagaatcgccgcgatgggcggctccgagcaggttctctctcgagcctcagaaggggccctccctatggcacc

SEQ ID NO: 491886 - DNA, 547 bp, Homo sapiens
tttttaaataatgaccatctccgaatggtcattgataatatgaacagttctgaattatccttgatgtagtttgtctatcagtttaaaaatacgcacaagtataggccataatatgtagctgactggagttcaagaaaatttggcatgccttaagtttaagaatttcatttcatttcttattaatcccttgggaacaaagaaaatcctataaatcctgtcagaaaatgtcagaatttaagaccagtgttttagatgatagcaactaccctagtggcttttatttcagccattctgaattcccttccagaatgtttatttttgctcttaaaatatttgtagataaaarcaagggaatgcagtcaacccaaataaaaataaactaagatgaatgtgttcaaaacagtttaacccaggcatgcaaatgaaacaaaatattgaactaggcatgcaaagcagagaagacatatctcacagatagaatgtaaattctgtattaaaaaagaatatttaatctagaaagacacttcttatctttatactaaaaagg

SEQ ID NO: 491887 - DNA, 569 bp, Homo sapiens
ctgcaggttttttaaataatgaccatctccgaatggtcattgataatatgaacagttctgaattatccttgatgtagtttgtctatcagtttaaaaatacgcacaagtataggccataatatgtagctgactggagttcaagaaaatttggcatgccttaagtttaagaatttcatttcatttcttattaatcccttgggaacaaagaaaatcctataaatcctgtcagaaaatgtcagaatttaagaccagtgttttagatgatagcaactaccctagtggcttttatttcagccattctgaattcccttccagaatgtttatttttgctcttaaaatatttgtagataaaagcaagggaatgcagtcaacccaaataaaaataaactaagatgaatgtgttcaaaacagtttaacccaggcatgcaaatgaaacaaaatatygaactaggcatgcaaagcagagaagacatatctcacagatagaatgtaaattctgtattaaaaaagaatatttaatctagaaagacacttcttatctttatactaaaaaggacttactaccagaa

SEQ ID NO: 491888 - DNA, 621 bp, Homo sapiens
tcaggcatatattttcagaaagctttttctttttggtgcaagcttttgcattctagggggaactgctactccattccactcagctttgcactgcaacacattctcaagcagtttctgtctcagagtatcccacaggcacagcttcatcataatggcacttagcatctccatagtacttattatcttggaggcactctacaaacattagctaattagtccttgtggaaaaaaaggtcttgtggaaaaaaacatgcctattcatattctaggagtggccaactgaaatgaagaggyaatatcaatagatctgtttacaaggccacagagagaaaagagtggcatttaggacttgtcaaaatatggtccccaaggtaatgctaaatataactacaaatcttgtcaccatttgaagattattactaatcttattcctttaattttttggtgaaaatgattgcatttaaagaaacagcatatgagttaatattaataaggaaaaataactgatttgatagcaataggtgaataactctacaggcatagatatttaggggtgagacttattaatctgtgctaataatttgtcaaatttaaattatctctttcactgaacaccaaaaa

SEQ ID NO: 491889 - DNA, 646 bp, Homo sapiens
gtaagacactgttctggggctcccagaatccctcagatcttccaagagagatgaaaacctccatccccaaaaagagaaaactctctattttcaagtggactgttcctatcaagagaattctatgaaatgttaatttttttaaacttataatattgattcttttctgtataaagaaaatgagaagcagcacagtaaaacaatgatagattaaaaacattttgaacctcagttctatttttttactagttgggtgaccatggacaaatcatatcttctaagtctgttttttaatctgaaaaatatgaacaataaaactcatgtcatcaagttgtacgcttgtaaaaaatctcctagcatgttgcctagtacatagttcatctagtttttttaattgamaaagttcaaaacactttgtagaactaatcagttaaagattttttctaacaatgatttatttaaattattattgagtcttcattttcattataatcatagcttctatatactaccagaatataattataaacattataaaatatttgaatgccaaggtaaatttgttatgtaataggaaaccaccaaaggcatttgagcttgagattcattaatttcttgcatacatacctattacatgcttaggtgtcat

SEQ ID NO: 491890 - DNA, 316 bp, Homo sapiens
aactaattttctgccccttcagggaaaactcttggatattggaattaagtgtcacaactggaaatgtaagaatgtaattgcttttattgaatacttactatgtccttgatactaaggacagtatttgcctacattctctcttaatttcatcaactctgtgaagtaggtcctaaaccccgttttataggtggtgaatgacgcagacattaccagttgctacccaatgtccrttctttccttgttccttacagagaggcaaccccaagcagtgactgcttctagctcaaagttcaggctctctggtgatttctgcggc

SEQ ID NO: 491891 - DNA, 472 bp, Homo sapiens
ttatggagcaccgattgtacaccaggtactgcggtgagtctcaggggtaccaagaccgaggttcgatgagaatcctgtaatcaattgcagaatgctccttcggagagcaggacccatcaaaataggaactccgttttgagagttcgcctcgatcgttgaggataatcttagaaggaccgaagcagttccgtttcsttacatttcaaaatcttatgtcaaagtaagcgcgcagaaaggggtccttgctcttctacactgagccctacggcccccctgtggggaaatactcctgataatcatctcgaaaattgtttcgaccagcaggggtcactatgaaggctgacttgagcccaagacacaatggggcacggtaaccagactggtccgtaagggttccaggaaggaatgcagtttcaagagaacagtttgaatctttattcgaatttgaattttggtacaatgaagagagtca

SEQ ID NO: 491892 - DNA, 664 bp, Homo sapiens
taggcctttggcatctgagccagttctgatttgctgggatgctattattgcctcttcttatccatttcaggagtaaggggtagaagggaggaaaaaaatagaaataggaacagcatgaatgttgatcgacatcttgcattttgaagaggaaactcatcatctcctccaaatggtcatctactcaacgcctggagctctaaagaaatgcccatcctcttaatataaaacaaacacaaactatgtgttcagagcttccatgtgcatttgtgtttacagacggaaatacctgtgagactaaaaatcttcaagccttattgcagatccctggtttctgtgggattatgtaaaacctgtatttctgaaaccccgcctcccgtcttccttccatcttaaagcagggttgaaccttttattaaactgacagccaggaaatgttttacctgcttgacttgttcttactattttatacaggtttcagtcaaatgtttctacaccctgctgggcgtgggaggccgtgactcaccaagagagargatattcggtttgcatatccagggtgttgcaggatgatagaggacttcacaattcaggcttggtgccattttgtcccttccctcgttctctcttggatatttacttggctacttgctcccatggagaacca

SEQ ID NO: 491893 - DNA, 600 bp, Homo sapiens
acactcaggcggtgacccagccttttgcttcattgagaaagaagagggcatcaggataactctctcaccatttttctatctcccaacttacattttttctttttccattatttatttatttatttatttattttatgagacagagtctcatcactcttgagttcagtggcgcaatctyggctcactgcagcttcaacctcctgggctcaagcgaccctcccatatcagcttcccagatagctgggactacaggcatgtgccaccacacccagctaatttttttttttttttttctttttgagatggagtctcgctctgtcgcccaggctggagtgcaatggcatgatctcagctcactgcaacctctgcctcccgagttcaagcaattctcctgcctcctgcctcagcctcccaagtaactgggattacaggcacctgccaccccgcacagctatttgttgtatttttagtagagacagggtttcaccatcttggtcaggctggtctcgaactcctgacctcaggttgatccacctgcctaggcctcccaaagtgctgggattacaggtgtgagccaccgtgcccagcccagcttatatt

SEQ ID NO: 491894 - DNA, 600 bp, Homo sapiens
acactcaggcggtgacccagccttttgcttcattgagaaagaagagggcatcaggataactctctcaccatttttctatctcccaacttacattttttctttttccattatttatttatttatttatttattttatgagacagagtctcatcactcttgagttcagtggcgcaatcttggctcactgcagcttcaacctcctgggctcaagcgaccctcccatatcagcttcccagatagctgggactacaggcatgtgccaccacacccagctaatttttttttttttttttctttttgagatggagtctcgctctgtcgccyaggctggagtgcaatggcatgatctcagctcactgcaacctctgcctcccgagttcaagcaattctcctgcctcctgcctcagcctcccaagtaactgggattacaggcacctgccaccccgcacagctatttgttgtatttttagtagagacagggtttcaccatcttggtcaggctggtctcgaactcctgacctcaggttgatccacctgcctaggcctcccaaagtgctgggattacaggtgtgagccaccgtgcccagcccagcttatatt

SEQ ID NO: 491895 - DNA, 600 bp, Homo sapiens
acactcaggcggtgacccagccttttgcttcattgagaaagaagagggcatcaggataactctctcaccatttttctatctcccaacttacattttttctttttccattatttatttatttatttatttattttatgagacagagtctcatcactcttgagttcagtggcgcaatcttggctcactgcagcttcaacctcctgggctcaagcgaccctcccatatcagcttcccagatagctgggactacaggcatgtgccaccacacccagctaatttttttttttttttttctttttgagatggagtctcgctctgtcgcccaggctggagtgcaatggcatgatctcagctcactgcaacctctgcctcccgagttcaagcaattctcctgcctcctgcctcagcctcccaagtaactgggattacaggcacctgccaccccgcacagctatttgttgtatttttagtagagacagggtttcaccatcttggtcaggctggtctcraactcctgacctcaggttgatccacctgcctaggcctcccaaagtgctgggattacaggtgtgagccaccgtgcccagcccagcttatatt

SEQ ID NO: 491896 - DNA, 535 bp, Homo sapiens
ccttccttcactgcctgattcacaaagagccctcagagcaagcagccctgcttctgtggatgctggatggcatcatcaccaggcgggtccttcagagtactgggagcagcatgcagcccgatagagttggcaaacgtgaatctactagaagattgacatggagatcgagtaggtattctttttattaatattccgtcatcaaactgtctttacaaatatctaccttcattttggctcttccctaggtggtaactaatacatctgactagtaaatcaygtctaatatataggacttcataatgtgttacatagcgcttgatgctcaaatgcaaacgtcctgtttttttgggttttttgttgttgttgttgttgttgttgttgttgtttttaagagacagtgtcttcactctgtcacccaggctaagctggaatgcagggggccaaccatagctcactgtacccttgaatgcctgggctcaagtgatcctcccacctcagcctcccaagtagatgggattacaggcactagccactg

SEQ ID NO: 491897 - DNA, 609 bp, Homo sapiens
aaagtcctcaccacaagcagatacgagcactatgctttttgtgccatctgaagaactgattccggaacctaaatgcttaaacaccaactgtttggtctggttataagaaagtgggtaaattttatactcaaaaattttagaaattatcgagtttagagagcgtatggagagttgatgctgaagccaaagttgaagagagaggaatttggcaacactgcacagagtgcttaaaggttagggctagttcccaccctcaaatggctcctgggaacggcagcatggctatgaatgccagggagtatcaaagagccatgaggttgggtatttgcctagctacttactggccrttagtcttaatcatcatctgctactaaatcacatcccacaatacaacaccaaaaattatcctcttaacatatacacctgtgaaacgaagtgcaaaaattcacccacacatcaagatcctgtaaagagctcaggccccttgaaagcatccagaaatgaagctaactgactatacttaactcacaccaccgttaaaggaatatcaaccctcctagatgagacagaaattagtgcaagaactctggccatccaaaaaaccggagt

SEQ ID NO: 491898 - DNA, 636 bp, Homo sapiens
atgccaggctgaggttggaagagttaatttgaccaatgatgtgtgttttagaaaaatgagaataaaaagggaaggaaattccagaaatacaatatgtgtggctgtgatatatattggaaaaacacagacaacattataaaatataaaatgcaaactatggtaaaacccaaaacctgcagcatcttgcataacttagctcaaaaacaaccagcatgttctaaacagaggattgatttatgttttataactctctatgaacagtgtagtcatcagaagtcaggggacaaggtggcaaaaaaaatccacttctggggtatttttaatgatccaagtgtgagcttaaaatgaagcagttattgtggtgmtggagaaaggtaacagcttttaagatgaaaaattgctatgggtttgcattaattttactcttgccaaatttattttcagagtagaacagcagacaatttttggcttaggtaattaagtggataggaacattaaacgtaggtgaaataatagaaatccagttatttaactccaggggaaattgtaattgtttactaaaattcggagttacatgccttaaattccttaaagaaggcatttctttttggcttatggactcagacatacttttat

SEQ ID NO: 491899 - DNA, 649 bp, Homo sapiens
atttagcaattacactattatgtttattaaaatactcacaactgaacattgaagtgtaatatgagcacgttccatgtcttctttgttcttccttgagttaatgcttgtcttttgtctgcattatttgtaagttctttgaaatttttttctatttatctcacactttccgattagatctcagtatgtgttttcacaagggctgttatataatgtactcaatcagttgtctttttatcacccttagagataacaggacttgagatctccattattctctgtagwctggttagcatctaggacttctttttaatctcaggaattacatttgtttttccctgagtagggccataagaagcaattcctcatccattcaaattgtatcctgagatttcagcaattcagtcacaccttcaggctccacttctaactctatttatcttgtaattttcaccacattttcagttatttcctccactaaaatctcgaccccttcaaagtcatccattagggttggaatcaccttcctccaaactcccttaacattgatgttttgacctcctcccattaatcacaaatgtttttaatggcatcttccagaagattttcaacttactttgccttgatccatcacaggaataactgtatatgt

SEQ ID NO: 491900 - DNA, 667 bp, Homo sapiens
tatctataggattgatctcaacatagcacctaacttccccagagacagtgatgagagagaaggagaatgaaagaatgtaacagaaacaaatgccgcagtgtcttttataaccctatcttgaaagtggtattccattacttctgccagattttactggtcacatatgcccagcctaaaacaatgcaggatgggattatacaagagtgggaatacaagaggcaggatccctggggatatcttaaggttgcacactgctcaagcactttgtttttaccctctggctcttattacgttagagcccagasgtaacttacaatgttgagtgtgtctcgtgactttgtgggtcccataaggctcctttcataatggagagttttggatgtgtggtgttccatcattaggcatgatgtctctattaggagcaagtagtatgataggagtattttgtttttctcaaaagacattgaattatctgcagtggctatgatagccttgatttatcaccccagggctctacattaggacttccccatacattttgcctcatagtcttcagggtcttttttcaccattgataccaccataattgaagggtcttccagatacaatgttccaagagataggtcttcttgcatcacagcctggacctgctgctgagaaaattcct

SEQ ID NO: 491901 - DNA, 611 bp, Homo sapiens
ccaattggcttcatcaatcagaagcttacacataacaaggcaaatgttggtagggagctctgttggcaagggatttcattcttcattggcacaagatcacttacttaactccaaggcaggaagtggagatttaccagagagaagaatgcaaaatatttccctagagtaccttagtgtacttacacttagcatgtcattggtatgactggtatacattcagttttaattacaaacaatatggctaaaataattactgcctctatattggaggtggagaaggtagaatttttactgagttaattaaccagctatatcttcaaatagcataaaagaagtaaactgtaatatgcttaaaatatgtatgtcctctgtcaacatagtgttcacatttactgtagatatttaaaacaaatatagcttatgtttgaatctaattaagtatayttataatgctatttgtttagtactactaataatccattggcagctacatatattaatgttatatgtaaatttttcttacaaataaacacaaggtatatttttatacttagattaaaattatttcttaatgagttaaaagagtttataatattaccactattactctt

SEQ ID NO: 491902 - DNA, 588 bp, Homo sapiens
tttgatgggcagaactaatgatttcaaaagtccttatttccttttgcctcatctgttcttgcttcaaaggtcagctcagccttgctgggaagactctcctctcccataaatgatatacattgggttattttctcctttttctacatattgttgttccaaaattattacactgtatagcattgttttatgtgctttttgttttgtgttttgagacagagtcttgctcttttgcccaggcaggagtgcagtagcatgatcttggctcacagcagcctcaaccttctgggctcaagcaatcctctmgcctctagctgagactacaggcacatgccaccatgcctggctgatttttatatttttttgtagacagggggtcttgctattttgctcaggctggtctcaaactcctggcctcaagcaatcttccctcctcagcctcccaaagtgctggcattacagatgtgagcctctgtgcctggccaaggttgtggtttttgcagtcttttgtgatagttttataatcagccacacaagtgtgagaaccctctcttcatggccttccccagctctgtttttcagggttttctt

SEQ ID NO: 491903 - DNA, 380 bp, Homo sapiens
gttttataaggggcttttccccttttgctcagcacttctctctcctgctgccctgtgaagaggggcatgttgattccccttttgccatgattgtaagtttcttgaggcctgcccagccatgctgaagaactgtgagtcaattaaacctctttcctttataaattatccagtcttgggtatttattcatagcaacttgagaacggactaatacagtaaccttaaattttagtgaaaacctgggaagcaagaaatattgcattgcctgtcacatatgagtattttataaacraaaatcatttaataactttacaaacatgttttcccataattttcgtgtattaatagactccaaaatatttagtttttataattataagaa

SEQ ID NO: 491904 - DNA, 592 bp, Homo sapiens
aactcagaattccctgatttacattataaatccgatgatatagttagcatagatagatttctttaatgtaaattttaaaaaacttttcctgcttttaaatgaaagcttccttcaggcaaacaaattttaagtaaaaatattcaagtttgtggagggtagaattgctgatctttattggtgaattctgggttcacccattgacagcttctggaaattcctttctggttgccaatgttttagtctatttccatggatgcataagaaggtctcattttgtggakaattgattatgatgtggcatttgtctgctgaatagtgcaaagcaagggttttgactcagtctgttcttggcctctttttttaaaaaataagcagccttatttagaaagttggaatagatacctgtaaccaaagctatagaaaaataaatatgccagattgagaaattatatctggtaaaaatttaacaaagaaatttaaatatattttattttaattgagtgaatttggtgattatttaaggccaggtcctacacttttgaggatttcatagagttaagcaacttttagttgaataaatatactgtcaaac

SEQ ID NO: 491905 - DNA, 632 bp, Homo sapiens
ctcccatacttcctcactcctgctccccatgattatatttcctattaaagtattagcacacttctggtcaggctttgctttctagggaactcaggctaaaacaatatttatagattaggatagtcagtattataaagatatcagttatccccaaaactgatctataatgcaatcccagtcatatctcagcatgtttttgtggaaattgatcattgaaatctaaaatttacattgaaatgaagagaacccaaaataggcagacaagcctaaggaagaaaagcaaacaggaacgacttactctaccagatatcgagacttatttctaaagttacactaatattggtattggtattkgtgcaataatagacacagagacaagcataacagaattgtgtctttaaatagttctatgtttaaagataactgatttccaaaaagggtgccatgacagagacagaacaattggagaataataatttttttcaaataaactgtactataccaattaaatatttttattgaaatgtgtgacacttgatacctatttcaactatacatcaaaatattattcctgaaacattgtaattgagatgtaaaacataaaacagtggagcttctagaagaaacagaag

SEQ ID NO: 491906 - DNA, 585 bp, Homo sapiens
taaagaatgttattcatgttcccctatatcttactatggaaagttttagaaagcatgaagtcaagagacacaaaaaccatacctacctgacttacattctatcaaacccaccatatgacttaaagggacatggaataaatgaacttaattgtgctgagaatgtaacagccaaacatataacacacgggggctaacaaagtctagaacagcttgtgcgtaatgttttataccatttcttaaacattaaatagttctcattcttaatgagtaattcttcttctatttcaggtctttgacaaagaatataatcagttttgctataactcttgttttggaaatgtgaatttattcccacacaatttatatagtagagaataatttgaggacaatgcaaattttgtatttgtgtatgcaccatgttgtccataagctacactagaggaatgcaggaagctgtacccaattcatacaagctacacaggaatacacaaaacacacatatgctcctcaaacatctgccagctacctcagttcaccrgcctgtgttatgagtcacacccatccacatctgctattagaactttc

SEQ ID NO: 491907 - DNA, 276 bp, Homo sapiens
cattctgaactattacagtgaattccacataggcactgaaggtgcaagctttcatgaattgcttgcctttgagtcaggtactgtgttaaggacattatgtttaggactagatttacttctccaaaaagctaattccatgaggtaagtatgattagccccaattttcaaataaggacatcaatgttcagagatttattaatttgyccaaaatcaaattgctaacatgtagtaaagatgttaacttacccgtgttttttctactacatataaatgcac

SEQ ID NO: 491908 - DNA, 604 bp, Homo sapiens
accaccattctgaactattacagtgaattccacataggcactgaaggtgcaagctttcatgaattgcttgcctttgagtcaggtactgtgttaaggacattatgtttaggactagatttacttctccaaaaagctaattccatgaggtaagtatgattagccccaattttcaaataaggacatcaatgttcagagatttattaatttgcccaaaatcaaattgctaacatgtagtaaagatgttaacttacccgtgttttttctactacatataaatgcacaaggacctgagttaaragaaattgtttccggtagtgtcttagtgcaagctgccagttttaaaatgttgtttaagcctgggagacttaaataacagaaatgtatttctcagttctggaggttgggaagtccaagataaagatgccagcagatccagtgtttggtgaggaccggcttcttggtttgtagatgtccaccttttcattgtatcctcacatggcagagaacagaaggcagaaagcagagagagatgctttctcctgtattttcataagagcactaatcacttatgaggactccaccctcatgatctaatcacttccta

SEQ ID NO: 491909 - DNA, 505 bp, Homo sapiens
ctgcttcaccacctccacagtgctggatttcagcaagtaaattgtttttcatgacatctgtcccgtgttacacaattccaagggcacaattcaccctgccttctacgtgcatggcattccctacagccaatgacagttgtactacatctggtctagatatgtccttttaccaaggacatttattctttattctctgctaaatcataatgcttttaaagaggctgaaattgtcctctttgagagtgaatcatggcatgtgtacggctggcccatcccatagccttgtagccacccttctatgctggcatgagttccaggttctgtgttagctgaagtggccamagagttattagcaagatatttctaaaggggcaacttcttccaccctccgcccaatgagtcaggttttaatgaatgaggctaaggcagctataaaataaaacatgctacttcttagttaaatcaaggatgtggccaactcagcttcctccacaatgactggttt

SEQ ID NO: 491910 - DNA, 531 bp, Homo sapiens
  misc_feature (1)...(531): n = A,T,C or G
agggagaccctcttcccattggtgaggccattttaataacggattctgtaatgactatgtgaaagaagcatcttctacatccaccactgcaagtaggttgaacatggatatggacattcttattccaatgagttccactttcagtcaattcakttaccaaccaaccaacaaagctaatactcatcagtgttctgcgtgtgggtgtgggtgtgtgtgggtgcatgcatgccagtgctttgcagtactatgctctaaaaaatgagaaagtcttcatgtaaatccacatgtgctattagctcagacttccagatttttttatgtanatgataccttanaatcacaaacaaattagacaaaaacacaaatcccaccaattctaaatttttgacatgcattaaaatnnnnnnnnnnnnnnnnnnnnnnnnnnnnnnnnnnnnnnnnnnnnnnnnnnnnnnnnnnnnnnnnnnnnnnnnnnnnnnnnnnnnnnnnnnnnnnnnnnnnttacatgatatacacatgcaggaaaaaata

SEQ ID NO: 491911 - DNA, 628 bp, Homo sapiens
gatctctaggcagcttgccttgaatagcaatgaaaggaacagtaatgagattccacgggtaccttgatctggatcttgtcttttaatgataggccacattggttcttcttactacttagcttagccaatgctaatccagtttgtggagacagtggggacagaacatttcagatcttcgtatgggctctattctcttatttgtaacattctgggtgggggaatataacatgtaaccactggaggacagcagagagccaggagcagatgcagtggtgccttgcatggacacatttggagtagcagttgatgcagtagtctgtagccagttatcacacccctgaaccaggctccaacttaattggagaaaagaaaaatacttaagtgctatccataaaagagacttagaatgtagtcctctagcgtatcaygtcattggtataaaattttggatactaaatggaacaagtaatacatagaaatggaaatggtaaatgcttcagaatcaaacaagtattaatctatttaacacgtgtgtgtgtgtgtttgtgtgtgtgtctgtgagattttaaacaccactgcattcagactagccaacaaacatttcttgagtggctgctataaaccatgt

SEQ ID NO: 491912 - DNA, 628 bp, Homo sapiens
gatctctaggcagcttgccttgaatagcaatgaaaggaacagtaatgagattccacgggtaccttgatctggatcttgtcttttaatgataggccacattggttcttcttactacttagcttagccaatgctaatccagtttgtggagacagtggggacagaacatttcagatcttcgtatgggctctattctcttatttgtaacattctgggtgggggaatataacatgtaaccactggaggacagcagagagccaggagcagatgcagtggtgccttgcatggacacatttggagtagcagttgatgcagtagtctgtagccagttatcacacccctgaaccaggctccaacttaattggagaaaagaaaaatacttaagtgctatccataaaagagacttagaatgtagtcctctagcgtatcacgtyattggtataaaattttggatactaaatggaacaagtaatacatagaaatggaaatggtaaatgcttcagaatcaaacaagtattaatctatttaacacgtgtgtgtgtgtgtttgtgtgtgtgtctgtgagattttaaacaccactgcattcagactagccaacaaacatttcttgagtggctgctataaaccatgt

SEQ ID NO: 491913 - DNA, 668 bp, Homo sapiens
ggtaaaacattattcctggcaatatctgtgacagcattttcagaagagattggcatttgaatcagtagaccaaagaagattcattcttacccaatgtgggtgggcatgattcaataagctgagggcctggataaaacaaaaaggtagagcaaaggcaaatgtgccctctctcacttttctggagtggaggcacccgtcttcttctacccttgggcatcagaactccaggttctccagcctttgagacttgcaccagtgtccctcaggttcccaagcctgattaagactttctcagactttgagttatgctatcagcttcccaaattctccagcttgcaaacagcatatcctgggacttcttagcctccataatcatgtgagccaatgcccctcataaatttcctctcctgtgtctatatccacatgtatatttctatcctattggttctgtttttctggagaaccttgactaatacaactcaaattactttctacatattaataataaggctgtcatgtgacattaataagataaataccttgaagtactgacacaattcttgaaatattttattgttgagagccatgtgacatagacccatgttttgrttctttcctcttaggcaaacaagaaattcagtttcctagttttgtaaataaacacaata

SEQ ID NO: 491914 - DNA, 447 bp, Homo sapiens
gagagaaggaagcttcatctatgggatgttgtgatggcatggatttgtaagttgaggaagtgagggaaatcggggatgactttgtgcagccgaacagacagcctcagagctgcagaagttacacactgggccagccaacaggaagcccaaagaaaggatcttgctgctgagagagtttgggcaagactgacactctgtttttcttcattttctttatctagggcatgggggtggtactgtttttacgctctcttaggatttctagagattttgcagttttcagcactctgacttcttaatgcagcctgawaacaactttgtgaagtgggcaggccaagtagtaccacatcgatttcataattgaaaaagttgagttttgaagtgataacataactaacttccccatgaccatatagccaatcaatcacagtactaggatgataacta

SEQ ID NO: 491915 - DNA, 602 bp, Homo sapiens
aggccttggatagatacagtgcagcaaattggattctgcctgataaaagaggagttgggtgggagaagtgtcggcagaagagtgacagttgtcatgaacttgttttaaaggattaggatttttattagaggacaggaagagcatcaatggaagagtcgggaagcccaaaagtacagaaaacagtagtggagggctagtctagaatgaatggaagggagtgtttggattgcagactcagtgatcagatggaagttaagcagggggcttatacgttgtgtttagactggaatttacctttcaagtgaaatatagtcattaaaagttctcgagtaggggaatgacatgatcagatgtgttttgagagtaatcatcctgtggacaaggtgggttgatttaagatgggaccatttaggccaatagaagagtagtgattggagaaattggagaagaaaaaaatggttaaaatactcattttggaggtaaaattgagacagatcatgaaggctatgagtatggaagctcagataattytgctaacctactgcacaattgcatatgcctatcacataaatcatttaatattcttctctaagctttgcatc

SEQ ID NO: 491916 - DNA, 317 bp, Homo sapiens
ttccactatttacctgcatctcatatttattcttttttttttcttttttgctctgcagctattttttccttcaaaaaacaaacatgatatttgaaagctgaagtattcaactttgcatagctcctaggtgattagatgcttggtaaacatcacaagtcttttccacgtataccaatttccaatttaattcaactraccaccattgaacatttattactaaacctgtgctaggcacatgtcttttctgcaaaatcatttaatcaggcctggagcacattatattttactataatgtcaacctgacattgacatgagca

SEQ ID NO: 491917 - DNA, 626 bp, Homo sapiens
tggtgtcatgttaataaatactagagcaagcaacacattgttcaactttacctgctctttactcaatccaggaaaagtttttcataatcggatgaggtagaataaatatgatgattaatgacctaaaaaacaaaagagaatgagaaattacttagtatctttagatgaattcaagtttccagaccaaatgaattaaatctcagagaactaaaataatttgcaactgtaattataaattataaractatgattgaaaatccttaaataataatggagaatagaattagtatcaggaaactagaattgggagcaaaacatataccaaaaatgtgggtagggtgagtcaccggattctgtaaaatacaaactgagaagataaggaagaaagcaattaatttcatatctttgcatagaaccttagactaatacgaacacattactagagttagctaggaaagcagtggttattattaggagtcttcccaggttctctaaaacatgattatctcaaacttgtttcagttattagttaaaatagtttgatagaatgtttagattgctagataagaaaatcctgttatagtatggctctgaatttctggacatttaatatggtgggaaagaat

SEQ ID NO: 491918 - DNA, 656 bp, Homo sapiens
aataagatggtacttagactggaaataaaatccaaacagttgataaccttcctctttggtttcagattcctgctaataagataattgtggattaaacgactcactctatacttctgaagtcacagcaaagacattcaagtgtttctgttgaccttcagagcattagcctgagaggaaatggcaactgatgtaggttctcctcctgagatggcattttctggtgccctggcaacccaaacttacttagaatcttttgtccttaygagcctcagttgaactggatctgaaactttgcctaccactatgccatcatcctagcttcaggaaaagtgtcaagacaatattttaaataaatctgcagtgggagcattgtttatagtaagcatggcattgtacagcctgttttggggttcttctcgtccctgttaggttgtttattgatgccagattcacagaatattaaatacggcggggactttagagataagtttgttctaccatatcactttacaaaaaaaacaaagtgaattgttgggtattgtaattcctaaaggagaaaagcatgtgcatacattttaaacaataagataaaatcaaaaatattttctagttaaccctcagtaaagcagaaaattaaatttacttgattacttttc

SEQ ID NO: 491919 - DNA, 656 bp, Homo sapiens
aataagatggtacttagactggaaataaaatccaaacagttgataaccttcctctttggtttcagattcctgctaataagataattgtggattaaacgactcactctatacttctgaagtcacagcaaagacattcaagtgtttctgttgaccttcagagcattagcctgagaggaaatggcaactgatgtaggttctcctcctgagatggcattttctggtgccctggcaacccaaacttacttagaatcttttgtccttacgagcctcagttgaactggatctgaaactttgcctaccactatgccatcatcctagcttcaggaaaagtgtcaagacaatattttaaataaatctgcagtgggagcattgtttatagtaagcatggcattgtacagcctgttttggggttcttctcgtccctgttaggttgtttattgatgccagattcacagaatattaaatacggcggggactttagagataagtttgttctaccatatcactttacaaaaaaaacaaagtgaattgttgggtattgtaattcctaaaggagaaaagcatgtgcatacattttaaacaataagataaaawcaaaaatattttctagttaaccctcagtaaagcagaaaattaaatttacttgattacttttc

SEQ ID NO: 491920 - DNA, 438 bp, Homo sapiens
atccagagcttgagagcccctggtatagttcaatatcatcccattattccaaatacttcagaaacctcaaaacctctgatattctcagaagaataattgaccaagagacaaatgaaggcaggctttaactacctgtggtaagaaatcacatcaatgataacaaaacaactgaaggttgttatagacataattcagcctctcctggtaaactaaaaagagaactgcatttcctctgaaaagaagaagttctaccagtgtcacagggaagtcctcgtgttgctggaaaggggtcctgatccagactccaaaagagggtgcttggatctggcacaggacaggattcagggggagtccatagagtaaagtgaaggcaaatttattagacaagtaaagaaacaaaagaatggstactccataagcagagcagcagcatgggcc

SEQ ID NO: 491921 - DNA, 604 bp, Homo sapiens
gtggtgcatgcctgtagtcccagctactcgggatgctgaggtgggaggatcctgagcctaggaggtctacagtgagctgtgrtaacaccactgaactccaacctgggtgacagagcaaaactctccctcaaaaaataatataaaataaaccccttcatctgtaaaatgggactacagaaacccacctgtgtaaagtagattgtataccctccaaaagagaattgcctaagtctgctcctcagagagtgagacgagaagaacttgtaaataaattttattatagcaggtgctgttcacaaatagatgaaaattaactatcacgtggaaatagctattacctcatttaattaatcagaaatctgcctctaaactatttagattattcctaaatactaagaaataatttgtaaaataaaattcaaaaacagctataagcagcttgataaatgtttagattccataaaatgaaactcacacattcatctcacaatgacacaggcttttgatcaaccttgatagcagtactttccaggttttaagttccttttcctccttctcatagttactcaggggtgagcccctactgctaaagatggtttgctcc

SEQ ID NO: 491922 - DNA, 598 bp, Homo sapiens
gtgcagcacaccaggcctgcactgaaatgcatcggggagcaaaagggaggtgaagtcaaacatcccatctgctcctgtccacgtcttcagggtcactgccaagttctgacactgccgactccccacattgaggcaaacagcccccccgaatgcaaatctcactccttgtttgcagtcactgagaaattctttctggaagatgtttattgtttctccttcgctctgcaaaatcatcagtgtagagaggatgtcttaggagtttccagaataaggaaacgaaggagcagcgactcatgtgggtcctcttgggatggctgaatggaatgcagagaggggaggagagtggaaaatagagcatgcattttgagaaaatttcgagcagtttctcagaagccttgagccttggaggaggcagaaagggaaattattttcagctttgtgtaygctgttttccgaggatagcacttgtctatcagaggctgacttcctgaagactttatctatcagattagaagcctgtatgagagcctaggtaaaaatgcaaattcctaggtcccagcccagaccctgggatcagaatatggagtgtgagagaccc

SEQ ID NO: 491923 - DNA, 328 bp, Homo sapiens
gcaggttttatttaaaggtttgttcaatttaacagaggactgccgtaatgaggagttgaggattaaggagtacagagaactgcaaagaacatgagagaagctcatacaggcgccagcactgaagaagccaccagcccagcaccaccctacaagggggcccagccctgaccttctagcccagcccactggagctggcttagccgcaccttttctcctgccaggcctcctcggcrccctctgctcactgtgctcaacactgcactggctgacatgggagagatgctgctgggcccagatgcatttccaccgagcagacaacgcagggcag

SEQ ID NO: 491924 - DNA, 221 bp, Homo sapiens
tgccgtcatcaggggagagtaaaccctgcacaccaagcggtactgttcccaagagaagctcaaaaattctgattcttatgtgggattttctagttgggagtgttcaccactaattcaaatgtatgacacaaaaagccaatgcacaggttgaggccgtgcaggacagtaaaacccatctctgagccagtccctgctctgygtgaggcatgggcaattagccc

SEQ ID NO: 491925 - DNA, 613 bp, Homo sapiens
ctgaggcaggagaatggcgtgaacccgggaggcggtgcttgcagtgagccaagatcgcgccactgcactccatcctgggcaacagagtgagactccrtctcaaaaaaaaacattttatatatatatatatatatatatatatataattctttgtagaaattagctccctaaatacttggggttggtgaaggagactggggatttggaagacttttcttaggagtcttgtttagcattcagaagggactcaggccacactgggtttctattttaggttgaaagttgtggctcctcactgccctttttacccacaataaattgcatagcaaatccgtaaaagcgatgactcatctcctaatcctgccccttaaagggggaaaccagatgcttgcagttccccaagtggtagtgttgatcatgccaaggtgaggaccgtcgttccatcccttgcaaagtgaatcaaagtgaattgtagccaaacacagataagaccagagggtgtctgcactgagcagtccaggaaggaggggagctgcagtggctgtcaccgggctgggacacgaggaggaattgcaggtgaaatcagatccagtttcaacttgaggaaaattca

SEQ ID NO: 491926 - DNA, 631 bp, Homo sapiens
aatacactgagagttggtaaaatcaatatatttcctgattgacatctccgcaaaatttgaggcttgagagtcaagtattagtggttataaaaagaaaccttctgaaatatcatcattataaatgacaaaggctagaataaaggtcatttccgtggagaaaaagctaagttttccatgagatggataaagattagcagatgtaaagtaagaaaataaaagcatacctcatatagttgaactgtggactgaaagattgaggttagtaattggagttgaataagaggttaaaagttgggacaaatttaatttttaagtgcttttccttctgaattttgagaatatttcataatttttctattttccaaaaacagtgcaaccactgaaattggtgaattctatttattactaatttagtrttagaataaaatacataaaattaatcatatttcataaaaagttttagcttgaagtaaatgctttgaagcaagaaattattcaatgaaaatgataaatttctgaatgagtaaaattagaaaatggttctagactcattaatacagtgttggaaaataatacagcactttttagcaaatattgaaagtcaaaatatatgatttaacagactataaca

SEQ ID NO: 491927 - DNA, 685 bp, Homo sapiens
cttagttaataatcaagtattcactctcaatataattaattattttaatttcaattatattaaaattaatagtgaacaattttattatgctgaggttgacagtaaacaaactttgaaaagtgataatatttgctattttattcgggggtactatttgggaagtggtatatactttatatgcatacacacatacacacacacatatggcaaatatataaaataaatgtatgtatagtccatcctcttagttttacagtctccatgcaagttgcattagatatttctcttgtcaacatcataattkgaaaatttttttgtcctttagaaatcaaatttagttcatttttacttaatataattgattacttaatgtacttgcaattactacttcagacttagtgtttaaagtttttcttctgctatattattattatgcttgtttcagttttcctgttgggttgagtgaattttttgcaacaatttaacaagactttacttagaagtcatagtttctatttttaattgttcattggttgccctcaatacacaatgtgcagactccctattggtgtaacaaattagataagtacaatttcaaattttcatatccttcactcactttttgatggggttttttttcttgtgaatttatttaagttccttgtagattctggatattagccat

SEQ ID NO: 491928 - DNA, 535 bp, Homo sapiens
ctggaaaaacagtgagagactctggacccaaaacarcaagtattatccttgagaatgaataagaagtgccatagcagaccaactaggcaaaaactgtttttctgtgtgtagaatgtgggaacacgagtctttattccctaacagagagatatgtctgtgtgtgtgtgtgtgtgtgtgtgtgtgtgtgtgtgtgtgtagtggagggaagataaagagcatgtgtgtatggaggagcagcaattatattatttagtgtggatgtggtacttcatatatgttcttttttattttccaaattttggaggccctagtgtgataatgaattcttcattcattcattcataaatgcaaataataccaattgacataatacatgctcaggctttctggtaagtgtctaactcagaaaacaactttttaaagagacagacagatatacacagggcaaagaaaaggtacatcaactaccgagttcttctttctgaaggactactgttgttatcaaaagaattaatcagaaaagaagaaaccacaa

SEQ ID NO: 491929 - DNA, 552 bp, Homo sapiens
aaagtggtggtggggtactccttctagaagggaaaaaggaaaatgagaatatgatatagaaatgtgcttcctgaactgcctttggtacaacattccctttcattatgacacatctatgtttttctcctctccatctacaagcagatttggtatcagttcaaatccatttgttggcacattattgtctcaacattgtgcctctcttttgctcttacagtgatgcattatctctcatgtctcttttggtctcactttgtttttcctctgatgggaaacaaaagactgacaaatccatcactgtgcccttaaagtgattttcttcaggcatcatttgaaattctcagttgaatatggagaaaaaaattattcatataagytatgcactttgtggaacaaaaaaaatgcaatttagagataggctaacatattcaatatcttctatcttcagaattctcagctcaataatgaaacattttagagatgttgtatatctgtttttcttgtagagtatatagttcaagaagttctatgtcaattataattaattattaa

SEQ ID NO: 491930 - DNA, 506 bp, Homo sapiens
atgaatacttcttttcctgtcgttattacacatttttataactttttttttttttgagacggagtctcgctctgttgcccaggctggagtgtagtggcgcgatctcggctcactgcaacctccgcctcccgggttcaagcaattctcctgcctcagcctcctgagtagctgggattacaggcatccaccacyactcccggctaatttttttgtatttttagtagagacagggtttcaccatgttgtcaggctggtctcaaactcctgacctcgaacatttttaaaaagtcttttttagggattaggtcatcaagcacagcggaaagactaaacatgataccaaatatctaatccttaaagttagtatctgtaataaatgtgaattctaacaaatccttttattacctgcccttataataagtagcacatttaactatgtattttttttctgatcagatttccagaggctaaagtccaacaaatatttaactgtcatactttttctc

SEQ ID NO: 491931 - DNA, 670 bp, Homo sapiens
taaccattttatatgaatttaggggatgtaaaaactgtgcttttgctatatatatctccacattatgcctgaaaagatttaacattggaattgcactagtagaaacttgcagcttttattaccaaaagcaagaatacagggctgtgggaaaatctgataaaccaaactctaagactcatgacttaaaagctcaatttttcctcccccmaccccataatgttgaccttggtctggtctgtttctctctgattgtttaaattgcattctccttcacggatggtggtttcttattaaattatttattgatgtgactgacactagttgaatagattcattaaatttcacaagttgttagagcctagttcactggaaagaaaaacccctctttagactctttaaaggacaaaaagcgtcatgttttttgagctcttttaaagtatttaataaagcatgaaaagatatgacatcaatcctactaaaacacaagagaaaatgaatgatgttactgtaaatctttacatcaatcacacccaatactttggaaaacaatatagttttgtttgcatttcagaagtgacaaacaactcttgtgactggcttaacatagtcactttctattagtcaagaccagaagcaagtcagaattaaaatgtggccctgcgttgctagg

SEQ ID NO: 491932 - DNA, 580 bp, Homo sapiens
ccctttttataaaattcctgaagcaattaccaccaagctcagtttgatttcttttttagatagaaaaatttattctacacaaactattgaaagcaaatacagtattgagatgctattacatcaatattatgggcctagatgacttttgtttagtatcttaatagctcagtcatttgttattcattcagccacacacgggacaccagggtgttatgaaggacaatactctyggggcattttgagttcaatttttgtttctctacttatgcagaacatgtgttggcatcagccatggttacaacaggggaatcacaatatacagtgaagttttaccacgttgctctgagataatttttcatttttcaaaacaatcatcagaatagctgaagtatacagttctggtgctttattattaaagttactggatatatgctttctttctgctttttaatctcatttcttgtggtttttcagatgaggcattttctgaaagaataaaaagcaaattcctaataaaaaagggcattaagctgcaaaataggccaacaacatgaaatatttgttatttatacttataggt

SEQ ID NO: 491933 - DNA, 580 bp, Homo sapiens
ccctttttataaaattcctgaagcaattaccaccaagctcagtttgatttcttttttagatagaaaaatttattctacacaaactattgaaagcaaatacagtattgagatgctattacatcaatattatgggcctagatgacttttgtttagtatcttaatagctcagtcatttgttattcattcagccacacacgggacaccagggtgttatgaaggacaatactcttggggcattttgagttcaatttktgtttctctacttatgcagaacatgtgttggcatcagccatggttacaacaggggaatcacaatatacagtgaagttttaccacgttgctctgagataatttttcatttttcaaaacaatcatcagaatagctgaagtatacagttctggtgctttattattaaagttactggatatatgctttctttctgctttttaatctcatttcttgtggtttttcagatgaggcattttctgaaagaataaaaagcaaattcctaataaaaaagggcattaagctgcaaaataggccaacaacatgaaatatttgttatttatacttataggt

SEQ ID NO: 491934 - DNA, 653 bp, Homo sapiens
ctggtgttggcagcttgaaattggccatggtgagaggatttaccacaaatgtcagaaaatactacaaatcagagagttgtaggcatttactggcataacatagatctcacagtccactcaaagatatagaatattttatagaagtggaaatttaagctcagagaaattaattgaattgtcctatgctacttatcttataagggttacaatcaacatgttcccctgactctatgccaatatttttttctgtgacactttttggctagaaataccaacaacatcacaaaggccaactttaytgaggcattcctgagtgtcaggttctctgataaatacttaaggtaccttatcttgtcacagaataactgtaacctttatcgtcattttacatacgaatgaaatatgttgttaagaatttactttctttttccagagtcaggatttgaactcagacctctctgagtctgaagccaaaactctactcatactactcacacaaataactttcaaagggttatttaaaatttaaaaaagtaggtggagaaataacacacacacataaattttctaatattagcatcaggcttgggagtctacttttattttgatttcaattcttacctatgtttaaatactataaagttcttgtaaat

SEQ ID NO: 491935 - DNA, 498 bp, Homo sapiens
gcccgcaagcgccgcgcgcagccccggtttccgctggcgcctctccctccacacctccctgcaagctgagggagcgggctccggcattggccagcccagaaaggggctcccagagtgcagcggtgggctgaagggctcctcaagtgccgccaaagtgggagcccagatagaggaggcgccgagagcgaggagggctgtgaggactgccagcacgctgtcacctctcagtactattttatggtctgtttacwgtaatcttgaaagagatagaaaaggttcgtccaaaggatataatctttgacctaggcctaacagctatttttttcttcactgttatttattgagcactattatgtgctagaccttcccggtatttttttaaactctgtcttgctgacgtaatagctttataaaatagttgttagtagactagttttacaaggaaactgaaacttaaagaggtcgattaacttgacgataccagtaggctgtatacag

SEQ ID NO: 491936 - DNA, 578 bp, Homo sapiens
actcaggacctactgaacaacaggagttaaaagaattataacaggttcttggctggcttgccaaactgtgggcagtgacatgctcccagattgcaggagtgaagagtactgacccttctggggacctagacctagagattcctggagccagagctgctgtaacactatagccttcctaccatccactggtgccaggtggctgcatcctatgacaggaagtagtggcagggatgggccagcccargagccacaggccagagcaaggtggcgggactgaaggagctgtaacacaaactggctgaaacatgcccctatgaaacatacctccctgccccagctcaccatgctgcaggagacaagaaggagagaaaagctgctgcctttctgggagcccagacctctggggtccccaagccagacctggggccccacagacgtggggtccccaagccagggttgtgatacactataataccctctttgggttctgttcttcttggcgtctctaagcttttggacaccatcacatttctcttgtccagacgctggtgcctgtagtggaagctgcttgtagtatg

SEQ ID NO: 491937 - DNA, 578 bp, Homo sapiens
actcaggacctactgaacaacaggagttaaaagaattataacaggttcttggctggcttgccaaactgtgggcagtgacatgctcccagattgcaggagtgaagagtactgacccttctggggacctagacctagagattcctggagccagagctgctgtaacactatagccttcctaccatccactggtgccaggtggctgcatcctatgacaggaagtagtggcagggatgggccagcccaggagccacaggccagagcaaggtggcgggactgaaggagctgtaacacaaactggctgaaacatgcccctatgaaacatacctccctgccccagctcaccatgctgcaggagacaagaaggagagaaaagctgctgcctttctgggagcccagacctctggggtccccaagccagacctggggccccacagacgtggggtccccaagccagggytgtgatacactataataccctctttgggttctgttcttcttggcgtctctaagcttttggacaccatcacatttctcttgtccagacgctggtgcctgtagtggaagctgcttgtagtatg

SEQ ID NO: 491938 - DNA, 578 bp, Homo sapiens
actcaggacctactgaacaacaggagttaaaagaattataacaggttcttggctggcttgccaaactgtgggcagtgacatgctcccagattgcaggagtgaagagtactgacccttctggggacctagacctagagattcctggagccagagctgctgtaacactatagccttcctaccatccactggtgccaggtggctgcatcctatgacaggaagtagtggcagggatgggccagcccaggagccacaggccagagcaaggtggcgggactgaaggagctgtaacacaaactggctgaaacatgcccctatgaaacatacctccctgccccagctcaccatgctgcaggagacaagaaggagagaaaagctgctgcctttctgggagcccagacctctggggtccccaagccagacctggggccccacagacgtggggtccccaagccagggttgtgatacactataataccctctttgggttctgttcttcttggcgtctctaagcttttggacaccatcacatttctcttgtccagacgctggtgcctgyagtggaagctgcttgtagtatg

SEQ ID NO: 491939 - DNA, 547 bp, Homo sapiens
ctgcaggctcccacagagccagtacctgtgctggcattgggagctgtctgccccactgcagcagccrgcatgcctgactgtgtgcagtggccagaccccacactcactcactcatacacccttctccactccacacctggctcacccttggcaagtgtgggatctgggccagtagcatgagctgagcacagcttactgggctgaatggatggaacaaggtgctgctggtcacagaggtttctggacagcaaagcaacacctgaaggatcctatgacaatactgtgatctaagaatatgaccagtattcaaaattctttatttcttgtttatttgttcagtattatatacatatatataactatattacttctatacttaatttgttgagagtttttatcacaagtacatgttgcattttattaaatgctttttctatgtctattgagataaccataaagtttttgtcctttattttgttgctgtgatatgtaacatttaatgatttgcatctttgcatccctgggatgaattgcacttgatcatggt

SEQ ID NO: 491940 - DNA, 547 bp, Homo sapiens
ctgcaggctcccacagagccagtacctgtgctggcattgggagctgtctgccccactgcagcagccggcatgcctgactgtgtgcagtggccagaccccacactcactcactcatacacccttctccactccacacctggctcacccttggcargtgtgggatctgggccagtagcatgagctgagcacagcttactgggctgaatggatggaacaaggtgctgctggtcacagaggtttctggacagcaaagcaacacctgaaggatcctatgacaatactgtgatctaagaatatgaccagtattcaaaattctttatttcttgtttatttgttcagtattatatacatatatataactatattacttctatacttaatttgttgagagtttttatcacaagtacatgttgcattttattaaatgctttttctatgtctattgagataaccataaagtttttgtcctttattttgttgctgtgatatgtaacatttaatgatttgcatctttgcatccctgggatgaattgcacttgatcatggt

SEQ ID NO: 491941 - DNA, 547 bp, Homo sapiens
ctgcaggctcccacagagccagtacctgtgctggcattgggagctgtctgccccactgcagcagccggcatgcctgactgtgtgcagtggccagaccccacactcactcactcatacacccttctccactccacacctggctcacccttggcaagtgtgggatctgggccagtagcatgagctgagcacagcttactgggctgaatggatggaacaaggtgctgctggtcacagaggtttctggacagcaaagcaacacctgaaggatcctatgacaatactgtgatctaagaatatgaccagtattcaaaattmtttatttcttgtttatttgttcagtattatatacatatatataactatattacttctatacttaatttgttgagagtttttatcacaagtacatgttgcattttattaaatgctttttctatgtctattgagataaccataaagtttttgtcctttattttgttgctgtgatatgtaacatttaatgatttgcatctttgcatccctgggatgaattgcacttgatcatggt

SEQ ID NO: 491942 - DNA, 656 bp, Homo sapiens
aaatatttttgccattttctacaatattataaatcaaccttcaaaacataaaagtgaaataaataattcatgtttacaaagaactgtcaggaaatggctagatttataagatatagtgaatttactatcttctcaaaattttttcagtctataaacatgttgtgtggatttaatctgattcactgtgtagataacactgattttagtgatatgatttactattgagatgttttatttccatagtagctactgaaaaaatctcaccattttcaaagacctagtagtgatatatatatatataattaaattttcattaaatgataaaatcttaagtttgcatataaaatattaaaactgaatcaaggcaaatcaagatcaacaatagaaatcctattgaattctcataaaagaaaccatagttttaaaaaatatgattttaaaaaggtcattttacacagttggtgaagtcaaggcaaaactaatttatgactcatggcaaattctgaagaactccaaactgtgtatgcatacyttaactgtgagccaaatacatttagaacatttctgacattggcaaggcaggagggcagtagattccagaaatttaaacactcctaagacattatttttcatcattaagtttctctcattatttt

SEQ ID NO: 491943 - DNA, 606 bp, Homo sapiens
tataatactcttcatgcaagtatagaatccatagatttaggctgagtgattcttaacaagtcaggtactgtaggttaggggccatcttggaaacataggagcatttttggttgtctgatgactggggacagagacatggaagctcaggcatttagyatgtaggagcaaggatgctggatactctaaaacacacaggacaatccaatgcaggaaataccctcttgcacaatgttttaatgtcccatgacgccaaacccactacaagtataaatcaacgatactttactagatgaaatactgaaaatatttgcatatatttatgcaagaagtcaatgtaatttaagtgaagaatgttacagagagaaaagcttaaatgggataaagacattattttgaaactattgaataatttacttactctttgctttccatctactcaatgtagtgtagctttccaattgcatattagttaaaaagggttttagtgcagaagtgaaattactgcaaaaatgacaaggcagattgcaaatacataatagatgtgggacttcttttaagtgacttgatgctaaatattattaaattatcagaacgcatggagatctc

SEQ ID NO: 491944 - DNA, 572 bp, Homo sapiens
cacttataagtgggagctagattataagaacttaagaacacaaagaagggracaacaggcacaggggtctacttgaggtgggaggagggagagaagcataaatgataactattgtgttatcacaataattcttgggtgatgaaataatatatacaacaaacctccatgacatgtgtttacctatgtaacaaaccttcacatgtacctccaagcctaaaataaaagtttttttaaaaaggtattttcgttccctcctcctgagactgagtaggcttatgaccaatacaatacagtggatgctatcataaatgatgttcctttctcactggaatgcttaaacttgaagccctaagaagtctcactaccctgaagtaggcagagatattttaatgctaagctaaggcaaatcaattttgtaagtatcagttccctgatggagaaaacctggaactgaaaaaagagactgaatattctgaggaggttgactctacaaccttccagatcctgtaagattgcagaggtagcccacctttccttagtaagaactagtacttctggagcatctcccagca

SEQ ID NO: 491945 - DNA, 601 bp, Homo sapiens
taaaaaagataccatttaggagctctactattacaagaatatattctatatttgttgtgaggtatgtgatttaagaatgacttgaaactattttaagaagtgaaattaatcatgcaatatacccatgtaacaagcctgcacatgtaactcctgttaaaataacaatttttttaaaaaagtaaaattagattccttcatcacatcttatcaaaataaaacctggtagattaataatttagagtttcatttttacattttaaagactataagaaagttattgaaaacacgaccttaggaagaaggccttttaacaaaactgtacattttctattatctctataaaaatggaaaaagcaacaaaatatagaaatacttttgcaatatgacaaagttatgagtccaattgyttttatttctcttagagcaataactaagatagttggtaaagtcaaaactgctccaaaatagtattagttatcaaaattgagacctttatatttcttcctatggaagtatttgcatgtataatatataaaaggatatcacaatgattattttggaagagtaagattacaagtaatcattaaactcatttttctac

SEQ ID NO: 491946 - DNA, 592 bp, Homo sapiens
tgaaatcccaccatttaggggatttgtacatgtactgaaactttgatctctaggggtgctgtctttgccttcggttctgttttggtgtgtttttatttttgattttggaaatcaagctaagattatgtgctaacgttttgggggaggtgaggaggtgcaattgcagggcaggaagagtgagggaaaaggggaagtgaaacaaggaagaatggaaaacagatactaggtggtgcttgctttgccagccacagattcagaatggaaaatagagccacctgctcagtcacaagggacaatctctagacatgctccacagaaccacagcagctcaaaacaatccatcagaggaagagagcaaaaaggaatttatctataagttgccccccagtggttaaagttttccccattggcattagctcctatgctcttcctggttgtgcctatggccccttgggaaaagcactacgaaagccaaatgccatgccttactgtgtggcattttaactgyatgatgctttgtgtttgagtctggaaacaggtgaaaggtgaaaccgcagtctgtgtgtttccttgggtcatgtctggattctgc

SEQ ID NO: 491947 - DNA, 592 bp, Homo sapiens
tgaaatcccaccatttaggggatttgtacatgtactgaaactttgatctctaggggtgctgtctttgccttcggttctgttttggtgtgtttttatttttgattttggaaatcaagctaagattatgtgctaacgttttgggggaggtgaggaggtgcaattgcagggcaggaagagtgagggaaaaggggaagtgaaacaaggaagaatggaaaacagatactaggtggtgcttgctttgccagccacagattcagaatggaaaatagagccacctgctcagtcacaagggacaatctctagacatgctccacagaaccacagcagctcaaaacaatccatcagaggaagagagcaaaaaggaatttatctataagttgccccccagtggttaaagttttccccattggcattagctcctatgctcttcctggttgtgcctatggccccttgggaaaagcactacgaaagccaaatgccatgccttactgtgtggcattttaactgtatgatgctttgtgtttgagtctggaaacaggtgaaaggtgaaaccrcagtctgtgtgtttccttgggtcatgtctggattctgc

SEQ ID NO: 491948 - DNA, 525 bp, Homo sapiens
gcaattgcagcacatgggaagcacctccctaaacaagtcattacatggggttgctggtgggctctgcagagaagaccctaaatccagtgccacaacacttctcaaattgaggccaaagttcaaaccacttaattgcccctctcgcataggacttatccttgaggcagctattcaggcatcagtaaaaaatttctggagtctctcaatgattcatatttcttatatttagatctaagtatattcaatataaccaactcttaggctctccttcaaaagagatgcttttgacctcccttaaggtagtatttatgcatattattggcaaccctatcaacttaccttgcagggttactagtmattcagttagggcctggattcatttgtataaaataatcaggagtccatggaacaaagatgattttaaaaagcacagatggatcggctcaaaatttggagtgaactctttccatagtagacacatgtgtgactttttaccatgtcaatatggagtccaagagggaagac

SEQ ID NO: 491949 - DNA, 486 bp, Homo sapiens
aaatgctccacacccgagccccgctggcctgcggaagcgaagactgacaagcactctgtccgcgcgctgagtgggggctcgcggcaccgggtgctccgcccaggccccagcacactcactcaccagcctggtagctcggtacggcccgggccccacgatgcgatgctccatggcgcgtaggcagcagcggccgcacgcgccagcgctgatccccgccagccggaggagcagcagtttgaatcccaagcccgcgggctgcgggcgctgattgggcggcgcggcagcacgtcaccggaaatgcgcggggaggcaggcgtcttctccgagacccgaggcgctgggagctccgggtgcgaacttgcccggggcgaaatctgttgcccaccctggtcccaccgtgcgagcacacctaggcaggtgcgactaaggggccgggggcgtctccccagcgctgsaaaacgctgtgcagcgcccttcccagatttc

SEQ ID NO: 491950 - DNA, 612 bp, Homo sapiens
tgcccatatccgagacacggccccaaagtatgttacaggcagtgaattcctacagatctgcagcaacctcaattcttgactcctcagaagaaagagttcgactgaggggcataaggcaaaaggagagaccaaggcaagtattagaacagaagtgaagtttattaaaaagctttgaatgaaaggaagtacacttggaagagggccaagccagtgacttgagagatctagtgcgtagtttgaccttttgacctggggttttayacgttggcatacttctggggtcttgcttttggggctttgcattacttctctcctgattcttcccttagagtgagctgtccacaggcgcatacttgagcccacttgcccaactcctaagatcttatcgggaagctgctgatcaacagttcaagtgttttctattgggagactgcctttccctggtgccggctgtgaccaactattattttagagagacaattaacaaccacctgaccatcacctgatggctgcctgacattcctgatgtgtgtgtgtatgagggggagccctctcctgccctgctcatgcctgactagctacctactgtaacaccttaaccagattttcttt

SEQ ID NO: 491951 - DNA, 580 bp, Homo sapiens
ttggcacatagtggcattcaacaactatttactgagtgagtaaatgagtgagcaaatgtattgctcatgtagtgtattcttacataagctttagaagttattcatttcttaaagatcaatttgattcattcattctgtttgccatttctcatatgaatatgggcaacaaaataatagctagcttttacatttttattttaatgtatcaaatttgtttttaaaactcttacttatcattaaagtcctctgagattttgagtttgggaaaatacaatctgcacatactccatgacttgtgttataattgcccctccacctcctgccgcctcacacaccattacagtacaaagttagcataataaaacctgtgccaaggaatatagctaaatggattttcatatttgagaataagctcaatttctgacacatcgcagctatgccatgtagcacatatggtgaagtataattctctacacctcagaaagagacgtaatgaaaaaaaattttaaytaacattgatctggccaagaaatataggatgaattaaaggaggaagattctgaagataggaaagccattt

SEQ ID NO: 491952 - DNA, 521 bp, Homo sapiens
gcgcagtggctcacgtctgtaatcccagcagtttgggaggctgaggtaggcagatcatctgaggtcaggagttcragactagcctggccaacacggtgaaaccctgtttctataaaaatacaaaaattagccgggcatggtggcaggcgcctgtaattccagctactcaggaggctgaggcaggggaatcgcttgaacctgggaggcagaggttgcagtgagccaagattgcgccattgcactccagcctgggcaacaagagcgagacactacctcaaaaagaaaagaaaagaaaaaaacaaagaaagtacaaaatttaaaaatgatgaccttgtatataaaaggagaaaagtcttatgaatataattttacatttactcatagttgtataaaaggaactcttaagaggtagacacgaaaaagggaatggggtacaaactgggctgaaggaatggaagaaagattttatactgttgttttgtggctcatatagatattttacctatctaaaaataaagaat

SEQ ID NO: 491953 - DNA, 625 bp, Homo sapiens
tgcccagaaattgttatgggaattatggattccatggcaggaattgtaaagccatcaggagctgagccagggttggggcaaagtcatccagagagtcagtcacgctatctccagaacagtcagaatgtctgcctgttccataggatcagagaaaatacaccaacctaagatgctratgatgaagacagaagccaattctcattatcagggagaaaaagaccttagcagaggccaatgagaacagcagaacatgctcaagccacaaacatttcccaactccagggctataaagaatagtacactgcagtagcttcccaccatctcattagagccaagtgtgagcatctctatccaacaccgcattcagtgatgtcaagttggaagctcaaaattggccactatgtgaacattcataccagaaacttggaaaccctacaaatcagggccttttttattttttccctccaaagtgcttgttgttgttaaacatttaccagcacactatcgatgatatataagcctgctaactacttaggtcaccctgagaagaaggaaaaagagggagaagaaataatcagattttaccatgaattgagaatgggttgacaactctgcagaaataatt

SEQ ID NO: 491954 - DNA, 625 bp, Homo sapiens
tgcccagaaattgttatgggaattatggattccatggcaggaattgtaaagccatcaggagctgagccagggttggggcaaagtcatccagagagtcagtcacgctatctccagaacagtcagaatgtctgcctgttccataggatcagagaaaatacaccaacctaagatgctgatgatgaagacagaagccaattctcattatyagggagaaaaagaccttagcagaggccaatgagaacagcagaacatgctcaagccacaaacatttcccaactccagggctataaagaatagtacactgcagtagcttcccaccatctcattagagccaagtgtgagcatctctatccaacaccgcattcagtgatgtcaagttggaagctcaaaattggccactatgtgaacattcataccagaaacttggaaaccctacaaatcagggccttttttattttttccctccaaagtgcttgttgttgttaaacatttaccagcacactatcgatgatatataagcctgctaactacttaggtcaccctgagaagaaggaaaaagagggagaagaaataatcagattttaccatgaattgagaatgggttgacaactctgcagaaataatt

SEQ ID NO: 491955 - DNA, 625 bp, Homo sapiens
tgcccagaaattgttatgggaattatggattccatggcaggaattgtaaagccatcaggagctgagccagggttggggcaaagtcatccagagagtcagtcacgctatctccagaacagtcagaatgtctgcctgttccataggatcagagaaaatacaccaacctaagatgctgatgatgaagacagaagccaattctcattatcagggagaaaaagaycttagcagaggccaatgagaacagcagaacatgctcaagccacaaacatttcccaactccagggctataaagaatagtacactgcagtagcttcccaccatctcattagagccaagtgtgagcatctctatccaacaccgcattcagtgatgtcaagttggaagctcaaaattggccactatgtgaacattcataccagaaacttggaaaccctacaaatcagggccttttttattttttccctccaaagtgcttgttgttgttaaacatttaccagcacactatcgatgatatataagcctgctaactacttaggtcaccctgagaagaaggaaaaagagggagaagaaataatcagattttaccatgaattgagaatgggttgacaactctgcagaaataatt

SEQ ID NO: 491956 - DNA, 634 bp, Homo sapiens
tctctaagatgttgcagactttacaggcaagcataaaaggcttgatcttcctggacttccctttacttgtctgaatctcacctccttcaactttcagtctcagaatgtaggcatttgtcctctttgccctacatcttccttcttctgaatcatgaaagcctctcacttcctcttgctatgtgctggaggcttctgtcaggttttagaatgagttctcatctagtcctagtagcttttgatgcttaagtccaccttttaaggatacctttgagatttagaccatgyttttcgcttgagaaagccctaatctccagacttgcctttctgtggatttcaaagaccaactgaggaagtcaaaagctgaatgttgactttctttgaacatttccgctataacaattccaattctcctcagagcaatatgcctgcctccaactgaccaggagaaaggtccagtgccaaagagaaaaacacaaagattaattatttcagttgagcacatactttcaaagtggtttgggtattcatatgaggttttctgtcaagagggtgagactcttcatctatccatgtgtgcctgacagttctcctggcactggctggtaacagatgcaaaactgtaaaaattaagtga

SEQ ID NO: 491957 - DNA, 624 bp, Homo sapiens
ctgctgtcttacgtttcttcctataagggcactcctctcattgaagagggcccctccctcatgacctaaccacctcccaaaggctccctctcctaacaccatcacattggtgattagggtttaacatatgaattgtgtggggacacaaacatttagacaacagcacttattaaatcgaattttacttatcaggacctgcttcagggttcttgctttgctgtggctgctgcatctaaagtcttttatcacaaatcttcccagtcagtcccctgccttgaatgacccaatttaaccacttgagctgagacatcaaagccacaaaaatatctcacttctctccgcccccttctgagactcygtcatggcagtgttctctcttatggcaatgcctagaaatacagtggcttttactttattaacaggtttcctggtgacattctggggagtcaaacacccctgaagtcttggcttattttcatctttgacaagatgatagctttgggttggctgtttggaatactaggttctggtgacaaactctgagtgactgtttgagaaaaggcactccaaatggcctgtgatgaagactcactttcatttccctttcaccaggggctaggcaag

SEQ ID NO: 491958 - DNA, 595 bp, Homo sapiens
gtccccaagagcagcctttccttgtaggtcagagtctccccagcatctgagaaccaggccttgatttgatgaaactctaaagagttctgttctttcctggccccagaaggattacaattcatttctgtcgatctctgacaccatcagattcctcctaccccaggtgtagaactgccagtccccaaaatacagatgtattctaaatgatcagtcaatgagctctctgttcatcaggagtgtagggcatctgctgtgttaactaagtctcttttgattgtaagcaacagaaatagactttaactatttggtgggtggaggggagattcattcgaaatgtctcatagctggagactgctggcatcagccaaagctgttcttccttcttccatagcaacggagttgaagcagggtgtggctgcccagccaaggacatggcccagccccacycgtgcagctaggtgtggctgatgttcaagttcctgccagggagcatgagcagaagttttaggtgtcacttccaggccttgccccaaagactttgcaggttcacttctgcatcttttcccctccttgtttctggctggaatcatttcag

SEQ ID NO: 491959 - DNA, 595 bp, Homo sapiens
gtccccaagagcagcctttccttgtaggtcagagtctccccagcatctgagaaccaggccttgatttgatgaaactctaaagagttctgttctttcctggccccagaaggattacaattcatttctgtcgatctctgacaccatcagattcctcctaccccaggtgtagaactgccagtccccaaaatacagatgtattctaaatgatcagtcaatgagctctctgttcatcaggagtgtagggcatctgctgtgttaactaagtctcttttgattgtaagcaacagaaatagactttaactatttggtgggtggaggggagattcattcgaaatgtctcatagctggagactgctggcatcagccaaagctgttcttccttcttccatagcaacggagttgaagcagggtgtggctgcccagccaaggacatggcccagccccactcgtgcagctaggtgtggctgatgttcaagttcctgccagggagcatgagcagaagttttaggtgtcacttccaggccttgccccmaagactttgcaggttcacttctgcatcttttcccctccttgtttctggctggaatcatttcag

SEQ ID NO: 491960 - DNA, 571 bp, Homo sapiens
agtgtcctgtaaatgatgctgtttatcatatactgtcagaagatgctgctgaaaatgcatttccatttgtttccttacttgggtttgatttgtaaaatcagatttaaaccgtgtatgaaattgaatctaaatttcaaggatagacaacctaatgatatttatcataactaggacaaagtctaaaaacagttattctaacaccagcttttargatttgaaagaaaaatgtgcctttattttaaaatttaaaatagcttaaatgtaatgaatttcagactaattataggcattaatgtagaaaaacctaatctcagccaaaatgtttatgtgtaaactgcaattggcatactgagttactactgtcatcttttctcttgcacttttacggcatacaaataatttaaaaataaagggtggtaaatatattgctttgatttattagtatttttataattattataagcattacattaattcctcacttccttggagagaagaagacatcttatgaatacagatctttttggcagattatcgtgtgcccacaaagattcaaaaacacaatttgcct

SEQ ID NO: 491961 - DNA, 269 bp, Homo sapiens
tgtgaaaattaaagaaaaaccagtawaacaaatatcatgtaagatcaaatcggaaaaaggcacatgattaaaatatagatttaaaaaaaattattgtgaaaaaagatcatattttcagaaaagtacatacacctgtaagtacaatttcacaagtctttataaagtgatcacctgctccgcttattatgagaacatacaaactatagcaaaacatttatttattatgcttatgaaatctgtgagcaaggaatttggacagggcaggaaga

SEQ ID NO: 491962 - DNA, 269 bp, Homo sapiens
tgtgaaaattaaagaaaaaccagtataacaaatatcatgtaagatcaaatcggaaaaaggcacatgattaaaatatagatttaaaaaaaattattgygaaaaaagatcatattttcagaaaagtacatacacctgtaagtacaatttcacaagtctttataaagtgatcacctgctccgcttattatgagaacatacaaactatagcaaaacatttatttattatgcttatgaaatctgtgagcaaggaatttggacagggcaggaaga

SEQ ID NO: 491963 - DNA, 528 bp, Homo sapiens
acatatacacattcatagagcctgaggtttggggcagttctatttgtctgataaaattactaaaattaagaaattaaaaccttaactttaatggctgtaataagtaaatataaaacatcttttcctccacttgtttgcacaaatgcrtttcatggtggaatcaaaactatctgttacattcatttctatgaattttaaactctctaagcaatgatgcatttcactgagcatcttctgtactctcattacatcaggtaaagtgagagcaagatgtaaaatgtctcttcacttttaagaggaaacaaaatcttgagcttggaattactcttctaaggaaaagaatattcccataatttttgcgatggttcaggagcaaatttggtactacattgttttgttcaacatcctgctgattgttcagtctgtcacaatatataaaatatcattgctctgaaatcactctgcaagctttccaagcaattgcattccagacataattaagaataaactaaggccttcagacaagct

SEQ ID NO: 491964 - DNA, 584 bp, Homo sapiens
ctgccggcgtctgccagtgcctgttggcatgctcttcaactgatgtgcttttctagacgtccagcggcctgtgtgtctgcctgctggggtatgggkgggtgatatttataggaacagggtgcgggtgtggcaggccagggtggtcttggcaaatacaacatttgggcaggaaaacaaaaaagccctagccagggacccgcccttcccttcccagcacttccctgccccacttccgtatcacacacacagctacttccttctattttatgactatattatatttaaatgtatggctctatgtaaccagtcttccgatgtaggcagttgagtgtttctaatattttgttattacagatggtcacaataaaaatctttgttgcacatgcacacacacatatgcagaaatcccaaaaaatgatttctctcaattttttttcatttctggaactgacacacagaatggttaaatttgtctagtctgaaaagacacctaagattcaaaagatgtacacaacctacttcctttaggatatttttgagcattgagttaatgaagtctagatttttttctatgcttaaacttt

SEQ ID NO: 491965 - DNA, 576 bp, Homo sapiens
atatgcatttttagctctctatcttccaggtccacttcttgtcatcttctttccataaacctgagcatatcatacctggcctcattcataccaggacagcatcagctcactccttagcaaaatttagggtgtatgggaagcttgggaccatgagaaggaatagaattgaagagatgagtaatatggggtagggtcacttggccaactgataaacttgtatattaattttatattatgcccccctttttaagtcagtgagttgggcttcatttcttcccaaggccatgcacacttttaagaaaagtgtgcatacttgagaaaaaaatctaactgtattttcaatgcaatttcttttrtttatttatttattttattatactttgagttctagtgtatgtgtgcacaacatgcaggtttgttacatatgtatacatgtgccatgttggtgtgctgctcccattaacttgtcatttaacattaggtatatctcctaatgttatcccttcccccttcccccttcccccaccccacaacaggccctggcgtgtgatgttccccttcctgtgtccaagtgtt

SEQ ID NO: 491966 - DNA, 608 bp, Homo sapiens
ttcttcttcccctaatccctttaatatatctaatttgagggaaaaatgagatgctttctttccatccactcttcataacctgttgctaaaggcacaaacttaatgtcctgtgtcctatgttagattaaaaacaaacaaaaaaacctaaaataacaaaaaacaaaggtattatttggaaatgcaaaaataccttatctgatttttagtgcatttttcttccyctagaattctggctgattaaaataaggtagctgtttggcaaaaacctcacttggtacctgtaaatattaacttctcatatatcactattatttagcacagttcctgacacatatgaagtgctgaacaaattttagctattattattgttgttgtcaccgtagctctgaacgagagcacctaggatccaaagagcaagtcttctaaatgttgccttttatctgaaaaaaataaagattccaaactatttttaatatccataaaattattgaaagtgtttttttacaatacaacaaaatgcagaccagtcttgataaaatattatatatacctgatgacagtagtgagagggtagggaaattaaaaaaaatacacatatagtttatgtt

SEQ ID NO: 491967 - DNA, 590 bp, Homo sapiens
gtatgacttgaaaggggagcaggggaagattttatcagcatgctattagtgatctcaaccaatatgtattactactctgtgcacaccactgagctaaattctggtgatttaacaaagacaagattgttcttgcctttgtataaatctcctctgactttcactatactcatctatatgttctcaactgctctaggcaggacatgtagaatacatctctttctataggcagcactgccagtattaacctaggttcaggcccaggtccgtattttgttgttgtttttgttgttgtttggaaatcaagttttgtttttatatgaacagaagtagaccatctagaaatatttcagtttacctaaattgttaagtagaatatgaaacygaatttgtagctagtaccagagaatggacttaaactgtttggtgttcaatgagaacagcttctacacaggatcccaaaagacttacagaaaaggggcaaagctgtaatattaagcaaataaaactcatgtttcaaacagattatacaaaaattgatttatactccatttcccttttttgacatttagaaagtgtggatttaacaaaaa

SEQ ID NO: 491968 - DNA, 497 bp, Homo sapiens
aattttaagtaagtgcacttcatcataatgaatgttggccttgcctagggagcccctactctcagacacagagaaagctgaggacttataggacttcactacaattttcatttcacttcatctaacagatgtcatagagtrgtgaattaggcatctgctgtggcagaaccttctttttactctcagcatccctggcttgaaaggcagatttgtagatttctaggaagctacttcaattaaaatctctaagatcctcttgctaagggcttggcaacagggaggagggggcatgttgtagtggttgaattcttacttttagggacactgatgaatttgtcttttgttctctcatctcttttgcttcttcccctcttctttctcctagcctcctctattggcccaggaagcccacccagccccgccacgcagagcccagaaggaaagaaagcctcatgcctgagccgaggggagcaccatggatctgacaaaaatgggca

SEQ ID NO: 491969 - DNA, 619 bp, Homo sapiens
tgaggtggatgctgttagttctggaccacattttgagaaccggtagtttagactgaccaggattcattgcaaggactgggctcaactctcaggaactccattgccactcagagraagggggatgcttggccaaaatcagaattccatcagaaaggagcaagggaagaaaactgttaggtaggcaacaagtagtgtctgcctcagaacggacaaagggcagccaagaggagactgagagggaggcgcccagatagaggagaagaaagtcagaacaaggtggcatcaaaggagccacagagaagagatttgggagagtgtgctcaacactgttaatgtcacagagagggagcactgaaaagtttccattggattggacaactaggaagtctgtattgatcttagcaagagcagtttagttttgaaaacaagacgtgagaacaattatacaaaacacaaagtgatatatgcatcattatctgctactgacgatgccaagtgctagagctaactcatggattccttgaatccaggtgatgagatgaataagaggaggcaatggggtttttcactgctgagcagtgaaataagttttcagaactgggggttcaaacacagtctg

SEQ ID NO: 491970 - DNA, 606 bp, Homo sapiens
ctgcagcgatacagtgcctgcgtgggcattcctgcccctggacacgtggacacatggagttttctggcttctttgtgaatgatactcaggccatgagccccagtccctccactaagaataaatccataaccttattttgagcacataatctgatagatcatgatgccagtgataagtttgcctcacyatttccctcttctattttcttttactatggtattcttcccccctttcttttttcacttttctaagctttatttgaatgtttctgtctgctgcaatggtttgtccaaagatcaacaagaatagacagggtgtgagtccccagtcacaacagtttttgactcctgtgttgactcaatgaagtcaatagaagttcaagcccatcctttttctctgacatcctggaagctcctgtgtcttctcttgatcccttttgatggcctttgccctgtgaccagaagaatgcagagcatgctgcagtttgggacctcagctctgctgtcagcactatgacaagctcttgttatctggtctctgtggtttttgatgggccagtgaaatggggagagggtggcctttagggccacatagatgtgagtgcaa

SEQ ID NO: 491971 - DNA, 564 bp, Homo sapiens
ccgtgctgaggtgggggaaaggtactgacttacctgctctccctggctgatgacataaaggtgagcacctgccaggtgcagtggctagcgcctgtaatcccagcactttgagaggccgaggcaggtggatcacctgaggtcaggagttcgagagcagcctgaccaacatggagaaaccccatctctactaaaaataccaaattagcagggcgtggtggtgcatgcctgtaattccagctattcaggaggttgagacaggataatcgcttgaacccagraggtagaggttgaggtgagctgagatcgtgccattgcactccagcctgggcaacaagagcgaaacttcgtctcaaaaaaaaaaaaaatgagcacctttccacagtgccagtagaagatgagagtctaagccagatatgcccataactccaaagctcaggaagatcccaggggttgggagctgcagtccagaggaagggtgactcctggtggaaacaggggctgcaaccacaccacagggctacttggccccagagcagactgcatgccttagaaaaggccctggga

SEQ ID NO: 491972 - DNA, 564 bp, Homo sapiens
ccgtgctgaggtgggggaaaggtactgacttacctgctctccctggctgatgacataaaggtgagcacctgccaggtgcagtggctagcgcctgtaatcccagcactttgagaggccgaggcaggtggatcacctgaggtcaggagttcgagagcagcctgaccaacatggagaaaccccatctctactaaaaataccaaattagcagggcgtggtggtgcatgcctgtaattccagctattcaggaggttgagacaggataatcgcttgaacccaggaggtagaggttgaggtgagctgagatcrtgccattgcactccagcctgggcaacaagagcgaaacttcgtctcaaaaaaaaaaaaaatgagcacctttccacagtgccagtagaagatgagagtctaagccagatatgcccataactccaaagctcaggaagatcccaggggttgggagctgcagtccagaggaagggtgactcctggtggaaacaggggctgcaaccacaccacagggctacttggccccagagcagactgcatgccttagaaaaggccctggga

SEQ ID NO: 491973 - DNA, 564 bp, Homo sapiens
ccgtgctgaggtgggggaaaggtactgacttacctgctctccctggctgatgacataaaggtgagcacctgccaggtgcagtggctagcgcctgtaatcccagcactttgagaggccgaggcaggtggatcacctgaggtcaggagttcgagagcagcctgaccaacatggagaaaccccatctctactaaaaataccaaattagcagggcgtggtggtgcatgcctgtaattccagctattcaggaggttgagacaggataatcgcttgaacccaggaggtagaggttgaggtgagctgagatcgtgccattgcactccagcctgggcaacaagagcgaaacttcgtctcaaaaaaaaaaaaaatgagcacctttccacagtgycagtagaagatgagagtctaagccagatatgcccataactccaaagctcaggaagatcccaggggttgggagctgcagtccagaggaagggtgactcctggtggaaacaggggctgcaaccacaccacagggctacttggccccagagcagactgcatgccttagaaaaggccctggga

SEQ ID NO: 491974 - DNA, 497 bp, Homo sapiens
tattgaagaatatataacttttggaacattattaaattgttaaataaacattacttcaaaaactacatatcaaaacacataggcacatcacacccatcaagatggccaatatcaaaaataataataatarcaagtgttggtgaggatgtgaagatttggtactcttttgctggtgggaatgtcaagtagtatagccactgtgaaaaacaatatgccagttcttcaaaaaaattaaaaatagaattaccatatgatttagaaatcctacttctgggttatactcaaaagaactgaaagtagaatctcaaagagatctctgtacatccatgtccatagcagcactattcacaattgctaaaacttaggagtaacccatgtccatccataggtgaaggtataaacacatggtctttacatgcaatgaaatgttattcagccttcaaaaggaaggaaattctgacatgtactacaacatggatgaatcttaaggatatttt

SEQ ID NO: 491975 - DNA, 554 bp, Homo sapiens
ataaggatcatgcaacctagatccctcacatgtacagttcacagcaggatttgcaatcctaagagaatctaatgccaccattgatctgatgggaggtggrgctcaggaggtaatgtgagtgatggggagtggctataaatacagatgacactttgcttgctcaccctccctatactggtcagtggccctgaggttgggaattcccgtcttacagaaatcagttcttggagagatctcatttctgtgttgggaaatgtggcataagcaggaagaaagaggatacgtgtggagccagaggaggagccagcatgattcgcaaggtaatttgaaaagagagggcagacgcatggctgaaatattataactggccaagatttgtatcccagcctggtcacataaaaactgaatgcttcaaagtgccgaacacttacccagtgcttgatatctgccaaggagccatcaaaatgtccttaatgtgcactaactcattgagacctcaaacatttccgaggatgtttgtgctatggcaatgttcccattttacagaagaggaa

SEQ ID NO: 491976 - DNA, 651 bp, Homo sapiens
cagctgcatctactactcactcctcccccatggtattgtgggaatggtgcaaggtaatgcataatagacattgattgcaagggtctgcacagtacctggaacataagaagaactatatacatagtagctgttcatctaaggcatacaatatcaaataactaaacaataaaataaactaattatatatatataatacaatgaaataaactaattatatataacaccacccagaagaaaatcttactgtacatgttgcctcctcatcaaatgtaaatatgtgacttaatgagcgtccttcatgatgaggttgtaagggagtaactttcagagggcttgtccaacctgaaaacacaaaaaaagcgaatgggattttggttaaaaacacaataaaagttctttttcaacagaaatatttactattagaagctagactgtgtgatcgtaattcattttttaatggattatttaataacttttctggatcttttagctgtgagaacagaatagctctggaatttctatgtgagccgaattayaatagtgcagaatcacttgttatttcttacttattattagaagatacctatttggtactatacatctatgtatgtgcacacagacatgttggggatggtgatgacacaagagggg

SEQ ID NO: 491977 - DNA, 458 bp, Homo sapiens
ctcacaacaatcttgtgtcataggtcctatgatcatgtccattttatagatgragaaactgacacagagaaagtctaagtatcatggccagcaccaaccaagctggcaagtggtagaactggacctcagtgcaactgaactgaataggaaggaccattggcattactcccagcccagccaggagagcctcattagctcacagtgggctgcaattatacagggtggggtgtaagtgcaggttcaaatcaatgtgatagtcttttatttagagccattctatatcagctacagttctaggcagacatcaagctgacttagctcccaacagctttcacactaatacttttaatttaaaaaatgcacatttaaatgtttaaagatcccaagtgaacaaagaccatggatgcgacataagggaggggggtgtgagacagacacatttaattccagggctgccc

SEQ ID NO: 491978 - DNA, 515 bp, Homo sapiens
taaaagccacgtttaaattccttcatttatggtaaagtccatcatcatgtttcatccttagtaataaaacaagtgaaataatcatgaatggaactcaccgacttgtgtttrtataaagaggcttagagtaccgctgcttggctagcgatgcgatgtctcccaaggggttgtcaacatcatcagcatttgtagactgcacatgaccactgttagaatggaaaggaaagaaggcatatatttctgtataagaaacatagaagaaaccattgaacagtattctaacttccaaaggaaatttatttgccaaagtagatcaaaggctcaaaatgcaaaatgtaaagcataatgatagaacaattttccttaaaaaatataaagataattttctcttcttcagaatgagcggtggcatgctccttgatcttaagtttgagccagagtgacagtaagggctgttttgtgtttctgaacaaagaagcgggctgttcctgcagccccagcacaactcctttgga

SEQ ID NO: 491979 - DNA, 590 bp, Homo sapiens
aaaaagtgaatacaacatgcgtgagctgaaagcaactacaaccaaaatataaatctaaaatttttttacaagactgagaaacattacttacgtatagagaggaatatatttacttctagaacttgaactcacacttcaaaaaagagaagagaggcaactgggttatttatattaagttaataaacatcaaattattacagtatttctctaattaagacaaaagccttcacagatatctcataggaattgtcctttaaagrtttgtgattttaaacagagactatttaaggatgtagtttgctttctccagaatgtcaaataaatggaatcatataataaatttttgggtctggctgctttcaaaatgtatttcagattcatttatattgttgtgtgttgtgtttgttctttttcattgctgagtagtattccattgtatgggcatactctagtatctttatctatttacctgctgaagggcatcttggttgtttctgggttttggagatcatgaataaagctgttataaacgttcacatataggtctttgtgtgagctcttggaaggaacatttacgtacaggaggcttc

SEQ ID NO: 491980 - DNA, 595 bp, Homo sapiens
gtcttaagggacaattagcgttgtttactttccatgacccaaggcatgtctaagttcaggccagtaactacttctaagctggaactttacccatggacaccaaattattctgctgcctagtcatctgggtcccttttattagatgttttgagattctaagtccgggctcagtggaccaaatctggcctgccacctgttttttgtaagtaaagttttattgggacacggctgcacccattcatttacatatcatctatggctgcttttgatctacaactgcagagttgaatagttttggcagagatcctatggcctccagagcgtactgtctgggtctttgcagaaaagtttgctgacttctgtccaagggggaaagagcaagtgaaaagcatgaaggttctaagcgggatagatgctccaaattcatacgtaaacactaagcaaaagctacagagatgctagaatgggttcagatggtttgaaagtsagcacactgggtcaagctgggtcttacgaggactctgctcagccagtgatatataatgggcacctcacagggagctgagccagttccatgtctccctggaagaagcat

SEQ ID NO: 491981 - DNA, 429 bp, Homo sapiens
gacaactccatcagatcctcattcaattttgttgaaagcaaagaattgaaaaccggttgacttacaaaaggatttgtaacccaatcattagaatgtttcactttctcaacactgaaacagctagattttgaatcactcctttgttgggagacctgtttttttttttttttttctttttcctggggcaatacaccacaacgagattsaggatgagttagaggtgggcgtttcttttgtaaaaggggaaaaggtagttgtgaaaggggaagtggcagaggacccgctgaagcctaccacacaaccgaaggatcatcatctttaatgttgtgtctctgcatgtcctgaaggaggtgctcaggccccttgaggccttggaaggagaactcgcatgtcgcagtcatgctctcagacatagcagttttaggagta

SEQ ID NO: 491982 - DNA, 429 bp, Homo sapiens
gacaactccatcagatcctcattcaattttgttgaaagcaaagaattgaaaaccggttgacttacaaaaggatttgtaacccaatcattagaatgtttcactttctcaacactgaaacagctagattttgaatcactcctttgttgggagacctgtttttttttttttttttctttttcctggggcaatacaccacaacgagattcaggatgagttagaggtgggcgtttcttttgtaaaaggggaaaaggtagttgtgaaaggggaagtggcagaggacccgctgaagcctaccacacaaccgaaggatcatcatctttaatgttgtgtctctgmatgtcctgaaggaggtgctcaggccccttgaggccttggaaggagaactcgcatgtcgcagtcatgctctcagacatagcagttttaggagta

SEQ ID NO: 491983 - DNA, 603 bp, Homo sapiens
tggcaactccacggatggcttggacttcagtttcctccacagttcacactaattacactgactgggcagagcccctgctccttcctttcgaatgtaagatgtgtaataaataccttctccaaggacctgccttctctttatcactatgtaccaagtccttccactccttcaactgtcattccataatttacatcttaatttaataaaaatgtattgagtggctggtaacgctaggtaggtgctaaagataacagtggtaaagattgtagaygaaggaggtaaaaatatagaacatttaaacaacatgattagcaagaataatctagtggacatgtatataacactattactaataactgaaataaacttttttgtgcatacacacaatgtgcataaaatttgaacacatactggagtataaagcaagcgtcaaacaaattttaagcatttggtaccacgctggcaaatggtatgctagtaaactacctctgtgggaaagagaaataaaaaagccttgatttgcagcgattccctattcatggtattaatggtattaccattaatgtaatacttaattaccattaagtattcatggtattaata

SEQ ID NO: 491984 - DNA, 585 bp, Homo sapiens
taatcagtataccatgattaatgaaatgttttcatttttaaaatattaagtattcaaaatccagcgcatcccaaccaatcacatttaaggtgctrtatgacacataatcagtgactactgtattcaatagcgcaactccaggggtagaggtaaattcaaaccccaatggggcttcttcatagtagtgtgaccttggacaagttacttaagctctctgaaccttggtcttctcatccaaaaaatgataatgatgtctacccacagaggggatgtgaggattaaatcagttaatccaaggaaagtgactggcacatattagtggtcagtgaatgtgagttgttcatagaagcataattattattgtttttactggcatcgttatgactgttaacattgctactgagaaagtcagagctcatctggtctattgtcggttatctcatggaaatggaaactggaatcagattcgctacctccaaggtactaggggattgggaaaagaaaaccaaaggaataaatcgtatttttacaaccgttaaaaatttaaaaatccttcctccatattatttctttaatagtcaaaat

SEQ ID NO: 491985 - DNA, 382 bp, Homo sapiens
tattacaggactagtcattctatttcaattattgcccttttattattataccagagctgcactgtgtaatcatttctaaaaaaaaaaacaaaaacaaaaacaaacaaaaaaaaccaaaaacttttaactttctattatggagaatttcaagtatatacaaaatcaatagtcattctaaaatcacaagtgctcatcactcaggttcaacgtaattatttcatttaagtttcatatttttaaaaatcagcatgatttttggaaataccaaaaatggcaaagaatcaaagacaggaaactaataatcccaccattgcatcaaattcatttatgacttggtgtctatcaatayaataagtataaaatagaaaaatccatgtaacat

SEQ ID NO: 491986 - DNA, 616 bp, Homo sapiens
gcaaagttgtggtcaagcagaactaaccaccactattgctamcacaggatgttagctctacaatttcaactggcaacttctagaaaatagaaaataaaataatttcttggatgtctaaaaactttggcagaaaaaaataaccaactaagcagaaaatatatttggatggtgatatagtttacctaggaaattgatgacaattcattgaatagtttaaaagaatttgaagtcaaattttttgtgaggcaccatgtagtttaaactataattatgcttttagaattcatttttatactctgaaatttgtttgttttctctatgcaagttactgcattagagttgtgagaatagtcatgaaatattttaggcaaaaatcccctagcgtttaacagatgcttagtgagtacttgctggattcagacaatgtactcagtcctggaaattcaatgccaaatggaaccctacgttaaaggagttgtcagcctggttggcaatttctggcaccataaccaatggttaaagcaactttgttttgttttgtattttaaatctgtagagaaatccaagaaatgagatagaagtcatgtcctgaagaaagttaaaaaatagtaagtgt

SEQ ID NO: 491987 - DNA, 447 bp, Homo sapiens
tggaacatttgccattgagcraaagactgataaagaataagtacagttaacagatcttgcaactcccttactgataatccccagtgaaattaaaataaaggctgggggtggtggctcatgcctgtaatcccagcactttgggaggtcaaggcaggcagatgacttgagctcaggagttcaagaccagcctgggcaagatggtaaaaccccatctctaccaaacatacaaaaaaaccagccaggtgtggtggtgcatgcctgtggtcctagctacctgggaggctgaggtgggaggatcgctagaccccgggaggcagaggctgcagtgagtcgagatcacactgtgcactccagcctaggcaacagagtgagaccctgtctcaaaagagaaagaaagaaattaaaataaagagttacctctatcttgggaagacagactacctccag

SEQ ID NO: 491988 - DNA, 276 bp, Homo sapiens
tgattatcacccttgctcttactatcttatagcgccagtcttctgcaaatggggtcctaattctcattaatgacactacagtcctgtcattttcaccttctacctggcagccaggacttggactcaggagtcctttgaatccccatttcttccacacatgagctgtatcattctartcaagtcatttgacctctctgagcttccattacctcaaaagggataatgagattacctacctcacagcactgactatgtgatggaatccatataaagcac

SEQ ID NO: 491989 - DNA, 568 bp, Homo sapiens
atgcttgtttcatcagttactttttaaaatttaagattaaaatttctttagggaaaaatgtagtatcttttagtttaaattttacatgatcctcagcttgaaagccctcaataaaatgtaatacatatatactccatagattgtttcttagagaaccttaatacaagctttgtattatccgtgtttcttgattctctgagaactaagttatgaagatggtgtaaagtgccaaaagatagggataaccatgcagtaaagacttccaagataaaacatctgaccaatctgagccaaatagcagagtctggggacaccctgctgaacagtccttatctaagcttgctatattcagttgaattattgtactttgtgttgcacagacaaaaaycctctactttccaatcacagatgagctcatttgcatatatacataacaccaaaaaatatatatatatataatataaactgtgaacagtactgtgtcaaagaagttcagatggcttttagagcatggaacacagttgtctgacctttttagcagcttaggctagtttccccagtgaaaagc

SEQ ID NO: 491990 - DNA, 630 bp, Homo sapiens
ctgagaaccttgatgtgtttggcttaaaaatactayctgctaggttgaatattaaaatgataatgcagactacaaaaatgcaatcaaactgggctgagcaagtactggcttttgttggctatttctgcaaaataatagtcctgaatggtgagtctgtctctaatgagactggcaactattttcggccctaaacttgatataattgttcacatttacatttccagaccctccagttagttgctcacgcttaacataaatcatattctttatctttgagtatgaaagtatagtgagtggtcagtccaactatactcttagaaaatgtaaatatcatggaatgtaaatatttagctataatattataatttctcaagaacaaaactgaaaacttggaaaaattgaaactcttcatagagtaactgaattgatggaatttagttttcttttttccagctcttcattaatataatttgtttaataacattttttaagagataaattgatatggtatttatttgtatgtattatttttgaaaagtaattgaaagaacttggaataaagaatgctaaaatgtcaatgcactctttattgatcaaggaatggaggaccaatcaagataatggaattga

SEQ ID NO: 491991 - DNA, 630 bp, Homo sapiens
ctgagaaccttgatgtgtttggcttaaaaatactacctgctaggttgaatattaaaatgataatgcagactacaaaaatgcaatcaaactgggctgagcaagtactggcttttkttggctatttctgcaaaataatagtcctgaatggtgagtctgtctctaatgagactggcaactattttcggccctaaacttgatataattgttcacatttacatttccagaccctccagttagttgctcacgcttaacataaatcatattctttatctttgagtatgaaagtatagtgagtggtcagtccaactatactcttagaaaatgtaaatatcatggaatgtaaatatttagctataatattataatttctcaagaacaaaactgaaaacttggaaaaattgaaactcttcatagagtaactgaattgatggaatttagttttcttttttccagctcttcattaatataatttgtttaataacattttttaagagataaattgatatggtatttatttgtatgtattatttttgaaaagtaattgaaagaacttggaataaagaatgctaaaatgtcaatgcactctttattgatcaaggaatggaggaccaatcaagataatggaattga

SEQ ID NO: 491992 - DNA, 642 bp, Homo sapiens
cttacttttgtattttccagggagcacgttgtcaaaggtgaaagtcatggcgttgaccttgccggagagctggaggctccgcttctcaccctggcggctcagggactgtagagtcaccagcaagtcaccacaggtgtctgcagggaaaagaagggagggctccatgtgaccccttataaggcttcagcacaggtttgaatcctaaccctatgtaatagcttcttgctactgctgagctcctaagaggcagtggccggaggcagacggagtgcttctttcaagctaacatgcacccacttgactccaagaagcctccctcgcacgcaggtgatcagtagcaaacaacaaaggcaaaaggaaaagtttcccaaatcccactcctaccggctgacttctttgaaactatgtgttcttactttccagtgatatcttacccaaacaagagactttcccagaaactgatgccaagaactgtacaaaggccacatccatcaygggcctgttggtcacagtaagaggaaatgtctggggtttcaacgtcagccctgctctggtttctgcctcaggaaccatcacctgtggaaacgtggatggaacgttagaggctgcattcggggagatcttccccctgacctacagggc

SEQ ID NO: 491993 - DNA, 642 bp, Homo sapiens
cttacttttgtattttccagggagcacgttgtcaaaggtgaaagtcatggcgttgaccttgccggagagctggaggctccgcttctcaccctggcggctcagggactgtagagtcaccagcaagtcaccacaggtgtctgcagggaaaagaagggagggctccatgtgaccccttataaggcttcagcacaggtttgaatcctaaccctatgtaatagcttcttgctactgctgagctcctaagaggcagtggccggaggcagacggagtgcttctttcaagctaacatgcacccacttgactccaagaagcctccctcgcacgcaggtgatcagtagcaaacaacaaaggcaaaaggaaaagtttcccaaatcccactcctaccggctgacttctttgaaactatgtgttcttactttccagtgatatcttacccaaacaagagactttcccagaaactgatgccaagaactgtacaaaggccacatccatcatgggcctgtyggtcacagtaagaggaaatgtctggggtttcaacgtcagccctgctctggtttctgcctcaggaaccatcacctgtggaaacgtggatggaacgttagaggctgcattcggggagatcttccccctgacctacagggc

SEQ ID NO: 491994 - DNA, 403 bp, Homo sapiens
ccaagtggtaaaaagggactagatgacgggtgtattttgattgtaaagccaaggctttgttggggaattggctgggcctagggttcaagggaaataagaatcaagaaacaaggagaaagcgggagctgccatatctgaatcagaaaagaccacagaggggctcatggagggcaactgtcagcagtcgggttttgggtctgctgagtacacgattcccagggggaatccgagtggctctgtctagctggaagatgcattccatacaacctccggcacaagcaagcaacacaaacacccttgtgaagttacaaaaatgaatgtaatcaagctgaaaggaggtaayatgcagttactactggtaagaaggtagattgctagtcctatcagtaattcatactttcca

SEQ ID NO: 491995 - DNA, 508 bp, Homo sapiens
tgctgctttgcctgccacagtggagaacaaggggaagagaagaggctcccctcagcctcccaccctcccctaaggggcctccctgactttcccgtccagagcttcgcagtgttcctgattcacaccragaggaaaaagggagtccagtcatctggagtgctgtttggttactggcttctctgctttgtcttgccagctaccaacgctgcccagcaggcctccggagtggtaagtcggggcgtgggccaccctgggaaaccaaaatggtggctcatgccttgggtcccttcctttctcctcctgtttccacatacaacttattctctatacagtgacacacacaagccagtcacttacactctagagacacaaaatccactcccgcacctgtcagtacccatcatcccatacattgcttatccacacaatttcctgtcttacacgcccacatcacacgtgccacttgcacacgatgcacacacttataggcactgattcatacatcgca

SEQ ID NO: 491996 - DNA, 508 bp, Homo sapiens
tgctgctttgcctgccacagtggagaacaaggggaagagaagaggctcccctcagcctcccaccctcccctaaggggcctccctgactttcccgtccagagcttcgcagtgttcctgattcacaccgagaggaaaaagggagtccagtcatctggagtgctgtttggttactggcttctctgctttgtcttgccagctaccaacgctgcccagcaggcctccggagyggtaagtcggggcgtgggccaccctgggaaaccaaaatggtggctcatgccttgggtcccttcctttctcctcctgtttccacatacaacttattctctatacagtgacacacacaagccagtcacttacactctagagacacaaaatccactcccgcacctgtcagtacccatcatcccatacattgcttatccacacaatttcctgtcttacacgcccacatcacacgtgccacttgcacacgatgcacacacttataggcactgattcatacatcgca

SEQ ID NO: 491997 - DNA, 508 bp, Homo sapiens
tgctgctttgcctgccacagtggagaacaaggggaagagaagaggctcccctcagcctcccaccctcccctaaggggcctccctgactttcccgtccagagcttcgcagtgttcctgattcacaccgagaggaaaaagggagtccagtcatctggagtgctgtttggttactggcttctctgctttgtcttgccagctaccaacgctgcccagcaggcctccggagtggtaagtcggggcgtgggccaccctgggaaaccaaaatggtggctcatgccttgggtcccttcctttctcctcctgtttccacatacaacttattctctatacagtgacacacacaagccagtcacttacactctagagacacaaaatccactcccgcacctgtcagtacccatcatcccatacattkcttatccacacaatttcctgtcttacacgcccacatcacacgtgccacttgcacacgatgcacacacttataggcactgattcatacatcgca

SEQ ID NO: 491998 - DNA, 255 bp, Homo sapiens
cctattcatttgcacccaacatcatcattgygtccagtgcctcaccacttggtgagacccttgaatattcaaaccagcgtgtaagcagagagttaggaactataaacagtaaattataacaagcatgaaatggaagcctgatgctgatcattcacaagagagcaatcaaatctgtcttggtgcctacatgttttatggaaaacatgtctatgttttaaaagtgtttttgaaataaaaaataatttactaactaaa

SEQ ID NO: 491999 - DNA, 255 bp, Homo sapiens
cctattcatttgcacccaacatcatcattgcgtccagtgcctcaccacttggtgagacccttgaatattcaaaccagcgtgtaagcagagagttaggaactataaacagtaaattataacaagcatgaartggaagcctgatgctgatcattcacaagagagcaatcaaatctgtcttggtgcctacatgttttatggaaaacatgtctatgttttaaaagtgtttttgaaataaaaaataatttactaactaaa

SEQ ID NO: 492000 - DNA, 255 bp, Homo sapiens
cctattcatttgcacccaacatcatcattgcgtccagtgcctcaccacttggtgagacccttgaatattcaaaccagcgtgtaagcagagagttaggaactataaacagtaaattataacaagcatgaaatggaagcctgmtgctgatcattcacaagagagcaatcaaatctgtcttggtgcctacatgttttatggaaaacatgtctatgttttaaaagtgtttttgaaataaaaaataatttactaactaaa

SEQ ID NO: 492001 - DNA, 255 bp, Homo sapiens
cctattcatttgcacccaacatcatcattgcgtccagtgcctcaccacttggtgagacccttgaatattcaaaccagcgtgtaagcagagagttaggaactataaacagtaaattataacaagcatgaaatggaagcctgatgctgatcattcrcaagagagcaatcaaatctgtcttggtgcctacatgttttatggaaaacatgtctatgttttaaaagtgtttttgaaataaaaaataatttactaactaaa

SEQ ID NO: 492002 - DNA, 595 bp, Homo sapiens
accatggctgatttcacactaccttgtccctgaacaaggacttggggaaagatgcacataccagctcttgcttcatagttatctgacctaaggggtgagggagatggggtacttatccacatacaccaactctcatcagttcctggtggagggatgctcccagggcaggtgttgattcctccaagacttccaagccatcatatgggtgggcaaagacagtacaaccagaaaaagacctcagaaagagggccaggcatggtggctcacgcctgtaatcccagcactttgggaggccaagacaggtggatcacctgaggtcaggagttcgagacagcctggccarcatggcaaagccccacatctactaaaaaaaaaaaaaatagctgggcatggtggtgcatgcctgtaattccagctactcaggaggctgaggcaggagaattgcttgaacctgggaggcggagattgctgtgagctgagatcacgccactgcacttcagcctgggcgacagagtgagactccatctcaaaaaaaaaaaaaagaaaagaagaagaaaaagtcctcagaaagagaatgcaactacatttggatggg

SEQ ID NO: 492003 - DNA, 571 bp, Homo sapiens
agaaattatctgagttctttatgcaaattgatgcactttttcatccctttggtctcttgaagtggcagcttttgctgcacccagttctcacaacaacttgcaaagaggatcaacacacacgactgatcacgagataaaggaagtctgaagcagtccccaccaaacatgcaaattcaatgaatgaagatccatttcttgcagctttctgctttgyataataacatttggctgtgatgatctattatgacactaatccttgcacagcccagagaagatgggcaatagttttctggatgtcagtgggactctggcacaagggccagccaattttggtgagcgcaacaggaaattctttgcaatgtccttgtgaatctgaggttacaaagactggctcaatctgtcacaggaagcatgctggaatgcctttgtccttctttctagtttttctttctttctttctaataattctcagtgtgggagaatattattctttctaataattctcggtgtgggcttacatcctttgctttgggaaaggtttctatcattagacctctcttttcccccaacc

SEQ ID NO: 492004 - DNA, 489 bp, Homo sapiens
aagcggttcactgcggacccaacctctggcatgactgtggatcagcagcaccaatgccatgaagactgcagacacactggagaaccaaggctaattcccttagccattgagcctccgctttccatccatgaaatgrctctcaaaatgccagcttgggctattgcttgcttcagagcacctaagagcatctgaacaaaaggaatatctttttcacagatgtaaatgaggaaagcgaggattatacagtagaagaagtgctctataaggctgctgaagatcacaatttttttttttttttgagacagtcttgctctgtgtcccaggctggagtgcagtggcgcaatctcggcttactgcaacctccgcctcccaggttcaaacgattctcctacctcagcctcccaagaagctgggataacaggtgtgcgccaccacacctggctaatttttgtattttttagtagaaacagaatttcaccatgttggcca

SEQ ID NO: 492005 - DNA, 489 bp, Homo sapiens
aagcggttcactgcggacccaacctctggcatgactgtggatcagcagcaccaatgccatgaagactgcagacacactggagaaccaaggctaattcccttagccattgagcctccgctttccatccatgaaatgactctcaaaatgccagcttgggctattgcttgcttcagagcacctaagagcatctgaacaaaaggaatatctttttcacagatgtaaatgaggaaagcgaggattatacagtagaagaagtgctctataaggctgctgaagatcacaatttttttttttttttgagacagtctkgctctgtgtcccaggctggagtgcagtggcgcaatctcggcttactgcaacctccgcctcccaggttcaaacgattctcctacctcagcctcccaagaagctgggataacaggtgtgcgccaccacacctggctaatttttgtattttttagtagaaacagaatttcaccatgttggcca

SEQ ID NO: 492006 - DNA, 489 bp, Homo sapiens
aagcggttcactgcggacccaacctctggcatgactgtggatcagcagcaccaatgccatgaagactgcagacacactggagaaccaaggctaattcccttagccattgagcctccgctttccatccatgaaatgactctcaaaatgccagcttgggctattgcttgcttcagagcacctaagagcatctgaacaaaaggaatatctttttcacagatgtaaatgaggaaagcgaggattatacagtagaagaagtgctctataaggctgctgaagatcacaatttttttttttttttgagacagtcttgctctgtgtcccaggctggagtgcagtggygcaatctcggcttactgcaacctccgcctcccaggttcaaacgattctcctacctcagcctcccaagaagctgggataacaggtgtgcgccaccacacctggctaatttttgtattttttagtagaaacagaatttcaccatgttggcca

SEQ ID NO: 492007 - DNA, 612 bp, Homo sapiens
ctgccagcatggctagaataaagcaggcagaagttggaaagaacagacttactgagtcttctggccttcatctttctcctgtgctgtatgcttcctgccctggaayattggactccaagttcttcagcttttggactcttggacttacaccagtggtttgccaggggctctcaagcctttggccacagaatgaacgctgcactgctggcttccctacttttgaggttttgggactcagactggtttccttgctcctcagcttgcagatggcctattgtgggacttcaccttgtgaccgtgtgagtcagtacccctgaataaactccccttcgtatatacatttatcctattagttctgtccctccacagaaccctgtgtaatacaccaggccagcagaagggagacatttgctttcctggacattttctgttcattttacatttgctcaatgaaaaaaatcaggttgcaatacatatataaatagaaaacacagaaagacataaatattttttaaaaagaatcagaaacatatgccccaaaatgctaatatgattacatccgggtggttaatatttattttctgtttctattctctttgtgtttccccaaat

SEQ ID NO: 492008 - DNA, 612 bp, Homo sapiens
ctgccagcatggctagaataaagcaggcagaagttggaaagaacagacttactgagtcttctggccttcatctttctcctgtgctgtatgcttcctgccctggaacattggactccaagttcttcagcttttggactcttggacttacaccagtggtttgccaggggctctcaagcctttggccacagaatgaacgctgcactgctggcttccctacttttgaggttttgggactcagactggtttccttgctcctcagcttgcagatggcctattgtgggacttcaccttgtgaccgtgtgagtcagtacccctgaataaactccccttygtatatacatttatcctattagttctgtccctccacagaaccctgtgtaatacaccaggccagcagaagggagacatttgctttcctggacattttctgttcattttacatttgctcaatgaaaaaaatcaggttgcaatacatatataaatagaaaacacagaaagacataaatattttttaaaaagaatcagaaacatatgccccaaaatgctaatatgattacatccgggtggttaatatttattttctgtttctattctctttgtgtttccccaaat

SEQ ID NO: 492009 - DNA, 612 bp, Homo sapiens
ctgccagcatggctagaataaagcaggcagaagttggaaagaacagacttactgagtcttctggccttcatctttctcctgtgctgtatgcttcctgccctggaacattggactccaagttcttcagcttttggactcttggacttacaccagtggtttgccaggggctctcaagcctttggccacagaatgaacgctgcactgctggcttccctacttttgaggttttgggactcagactggtttccttgctcctcagcttgcagatggcctattgtgggacttcaccttgtgaccgtgtgagtcagtacccctgaataaactccccttcgtatatacatytatcctattagttctgtccctccacagaaccctgtgtaatacaccaggccagcagaagggagacatttgctttcctggacattttctgttcattttacatttgctcaatgaaaaaaatcaggttgcaatacatatataaatagaaaacacagaaagacataaatattttttaaaaagaatcagaaacatatgccccaaaatgctaatatgattacatccgggtggttaatatttattttctgtttctattctctttgtgtttccccaaat

SEQ ID NO: 492010 - DNA, 596 bp, Homo sapiens
cccaggtcacacggaggaaaagagacagagccaggatttaaacccctgcccctggctttcattcctttgctgtgtccctgcagacccgaggcccacctgggtgaagaacaggtgggtggacattggcagtgttcaccaggggaagcatgccaggtgcaaggaaacatgtgagcacctgtccgtgcccaatgggtctctgtttgtctccctgcatcttcacccaaaccagcttctcacacccccacggccaccaccascactccaggcctctacctgggccctttaatgccccttccccattcctcaagagcccactggcgtcccttccctgatggcctgctggcctcctgcctccctccctgacctcagcctcctcggattttcaacagcctggggttgcaggctgagctcagcatctggcaggggcctggaagaaatgacctctagagggcccacactctctgggtgtcatattttggggctattatcacaaaataccttagactgggtaatttataaatgacagaagtgcgttgctcacagttctggaggctgggatgtcccagatcaaggcacctgcagattcagtgcctggt

SEQ ID NO: 492011 - DNA, 527 bp, Homo sapiens
gccaggcatggtggctcacgcctgtcaccccagcactttgggaggccaaggtgggcagatcacctgagatcaggagttcgagaccaacctggccaacagggcaaaaacccatctctactaaaaatacaaacattagccaggcctggtggtgcacgtctgtaattccagctactcgggaggctgaggcatcagmatcacttgaacctgggaggcagaggttgcagtgagccaagatcatgccactgcactccagcctgggggatagagtgagactctgtctcaaaaaaaaaaaaaaaaaaaaaaaaaaatgtaactgggcatcctgtttgtatctggtaacactccttaaggttggactaactatgcgaagacactgaatttaaaaggcttttcttttcatttattttttaagagacgtatctgtgtaactcaggctgcagtgcaatggctattcacagggatgatcagggctcactgtagcctcaaactcccaggcttaagagatggtcccacctcagcctcccaag

SEQ ID NO: 492012 - DNA, 642 bp, Homo sapiens
cttacttttgtattttccagggagcacgttgtcaaaggtgaaagtcatggcgttgaccttgccggagagctggaggctccgcttctcaccctggcggctcagggactgtagagtcaccagcaagtcaccacaggtgtctgcagggaaaagaagggagggctccatgtgaccccttataaggcttcagcacaggttygaatcctaaccctatgtaatagcttcttgctactgctgagctcctaagaggcagtggccggaggcagacggagtgcttctttcaagctaacatgcacccacttgactccaagaagcctccctcgcacgcaggtgatcagtagcaaacaacaaaggcaaaaggaaaagtttcccaaatcccactcctaccggctgacttctttgaaactatgtgttcttactttccagtgatatcttacccaaacaagagactttcccagaaactgatgccaagaactgtacaaaggccacatccatcatgggcctgttggtcacagtaagaggaaatgtctggggtttcaacgtcagccctgctctggtttctgcctcaggaaccatcacctgtggaaacgtggatggaacgttagaggctgcattcggggagatcttccccctgacctacagggc

SEQ ID NO: 492013 - DNA, 642 bp, Homo sapiens
cttacttttgtattttccagggagcacgttgtcaaaggtgaaagtcatggcgttgaccttgccggagagctggaggctccgcttctcaccctggcggctcagggactgtagagtcaccagcaagtcaccacaggtgtctgcagggaaaagaagggagggctccatgtgaccccttataaggcttcagcacaggtttgaatcctaaccctatgtaatagcttcttgctactgctgagctcctaagaggcagtggccggaggcagacggagtgcttctttcaagctaacatgcacccacttgactccaagaagcctccctcgcacgcaggtgatcagtagcaaacaacaaaggcaaaaggaaaagtttcccaaatcccactcctacyggctgacttctttgaaactatgtgttcttactttccagtgatatcttacccaaacaagagactttcccagaaactgatgccaagaactgtacaaaggccacatccatcatgggcctgttggtcacagtaagaggaaatgtctggggtttcaacgtcagccctgctctggtttctgcctcaggaaccatcacctgtggaaacgtggatggaacgttagaggctgcattcggggagatcttccccctgacctacagggc

SEQ ID NO: 492014 - DNA, 503 bp, Homo sapiens
attcaagtcaggaaaaggtggagtggaggttttagtcaagcaccaagtcctctgacttctctgggcacttgcccatgccggtacctactcctgagacactgtctacctcgctaagcccatcttcttctcaccttgtgtctcacctgagacatcactgactttaggaggtttcctgacccatgtgtgttccccatctcagcacccagcacctgcctcatgttcaccagggtacatgtcttccctccccgccaggctgcactgagagctcaatgagggyagggaacatctctgttccccatcttgttagaagctatctccccagagcatggtccaaatgtggtgttaagaacagaagttatcacaaagaagtgagaaagtgaaggggaaatggggagagctgtaagaaaggcatgggggagaaaaaggaaagaaggccatgttcccaggatccaatgccactccctggggaggcttctctatcttagctcagccctcagtcacta

SEQ ID NO: 492015 - DNA, 503 bp, Homo sapiens
attcaagtcaggaaaaggtggagtggaggttttagtcaagcaccaagtcctctgacttctctgggcacttgcccatgccggtacctactcctgagacactgtctacctcgctaagcccatcttcttctcaccttgtgtctcacctgagacatcactgactttaggaggtttcctgacccatgtgtgttccccatctcagcacccagcacctgcctcatgttcaccagggtacatgtcttccctccccgccaggctgcactgagagctcaatgagggcagggaacatctctgttccccatcttgttagaagctatctccccagagcatggtccaaatgtggtgttaagaacagaagttaycacaaagaagtgagaaagtgaaggggaaatggggagagctgtaagaaaggcatgggggagaaaaaggaaagaaggccatgttcccaggatccaatgccactccctggggaggcttctctatcttagctcagccctcagtcacta

SEQ ID NO: 492016 - DNA, 369 bp, Homo sapiens
tcactctcattaagagccagagcaatgcgccccagggagacgatayggtgttctctccagtaagatggcatgtcccaaacctttaggcaaaaaaagaaaatagattagactgaacactgtgatggtatttacaatgatttgaatgtttgtgcccctctaaaatgcatatgttaaaacctaatctccaatgtgatagtattggaaggttgggccttgggagatgattaggtcataagggtggagccctcatgagtgggattagtgcccttgtaaaagagaccccagagagctagctacaagctagtccctttccaccatgtgaggacacagtgagaaagcaccatctatgaaaaacaagtccttaccaga

SEQ ID NO: 492017 - DNA, 632 bp, Homo sapiens
cttttgttctttttgatttgtcaagattctgcattaaattgagaatgaaaacctttgttttatatactttagttttttcaatttgtratttggcttttaattttctcactctttttaccattcagaagttaaagtttttttattgtcaattgtgaaaatgttttccttcatgattggtatctgtctttctttcaaaaaatattgttatcagtcatgtttcaaaaaaatatttccaggctgggcccaatggctcatgcctataatcccaacactttgggaggccaaagcggggggatcacttgaggacatgagttcaagaccagcctggccaaaatagcaaagctccatctctactaaaaatacaaaacgttagctgggtgtggtggcacaggcctgtaatcccagctactcagggggctgaggcacaagaatcgcttgaaaccaagaggcagaggttgcagtgagccaagatcacaccactgcactccagcctgggtgacagagggagactgtctgaaaaaaagaaaaaaaaattcctcttccttttgccggctactatgccaaacactgagaataaacagtaggcaacaacattagcttttattgaatacttgcttggctcttgttctaag

SEQ ID NO: 492018 - DNA, 622 bp, Homo sapiens
caaagttaggaagtgcagagttcagattagcacaatattgttcccgccattaccatcccagctccatttgttcatgtttcaaagtcttacacccacctctagctaggggccagtgggaaccgctccacggcagaagaagcctctaggaaccccttcagcttctgcagtggtggggctggggagtaggtgcaaaagatacttagctttaccatcctctcccatgactttttttttttttttttgagatagattctcactctgtcacccaggctagagtgcagtggtgcgatctcagctcactgcaacctctgcttcctgggttcaagcaattctcatgccacagcctctggagtagctgggattacaggtgcccaccaycacacctggctaatttttgtatttttagtagagatgtggtttcactatgttggccaggctagtctcaaactctggacctcaagtgatccacccacctcagcctcccaaagtgctgggattgctaagccaccatgcctggccccatctcccataacttaatgggatagggaaaagaattcctccaagataaaattaaagtgaggttaggaaaggaagtaggtgtttgttagccttaagtcagcag

SEQ ID NO: 492019 - DNA, 532 bp, Homo sapiens
gcaacttggggaccactggtggtgggctgagcccctgagacctctggagtgagcaggaaagaaagtgaggaggagccagccagggagccagaggcagagggaagagaggaaagtagaccccgggaggagcagacaggaaaggatgaaaatttcccctcacctgcctcagcagcctctgcccctgcccacacacccttgtgcactccccctgagyccctgctcacctctgcctacccagccatcccaggatggtgtgggctcaagctctgggggtaactgaagagccactttaagaaggcacagtctagaagtgagcagcattgagtcactgttgtctcccagtcctgggaacatcctgtgccacagtttgctgagctgtcttaatcaccagtgggtccccatctcccacccctggaatcccagaggacagctcagagttgtgattggtgcctcttcccagcgtctctctacacagctcccggctgtgcttcagcatcctccaccgaaaggtgggcctgtcgctgcatgtgaa

SEQ ID NO: 492020 - DNA, 487 bp, Homo sapiens
ttctgaggctcccagctctgcaaggggctgggtttcttctcctggtaaactgctcccaatgcctgtcctgactcactcacttagctgggctacctgctgggcctccttcctggtgggccctccccatgtgcctccctgtgcaggtggggtatcccctcgagactccattattctttgaggctttcaggccaggatgaagaaccccagcctctcagcaggagcagccacttgggggaagcagagggaatagaaaggcacacattgccagctctgagcatgactgggtggggacattgtgttgaagctcctgggagcctcattcagcccaagtagatgtccttgamatgtcaacactctccctacacaggagaaaaacatgagactcggagtgggcagggtgatcttgaatcgggggtctggtcagatgggtctctgttcctcgcctcagctatggccttcatgtgtgcttccaccagcagagacccct

SEQ ID NO: 492021 - DNA, 636 bp, Homo sapiens
gcctctcagcaggagcagccacttgggggaagcagagggaatagaaaggcacacattgccagctctgagcatgactgggtggggacattgtgttgaagctcctgggagcctcattcagcccaagtagatgtccttgacatgtcaacactctccctacacaggagaaaaacatgagactcggagtgggcagggtgatcttgaatcgggggtctggtcagatgggtctctgttcctcrcctcagctatggccttcatgtgtgcttccaccagcagagaccccttcctggactttgccccagtggatggacaggaaactgccagccatgctggccaccacaaccaactttcactgcctggctcctagcaaccccactctctccatctcctggctgaagaaccacaagaggtctaaggagagcatcacatcaggatattgaggtgggcctggaagttggtgggagtgtgggctggatgtggaaggtgggacctgtcttttgcttacctgtccttccacctggagctatggcaccagaagtagaccctgatcatggagtgtggtgccctcagactgctttcatcccacctctgtgatgaagaacaagtgcagcagccttcagcagtcatgcatgctggaca

SEQ ID NO: 492022 - DNA, 548 bp, Homo sapiens
gaggactgtggcctgtgggcagggtgcagggagctaggcagcctctgagctcycatctattctctcaatgtgccctcctgaccaactctttctacctgcaggactgctgaccaaccagatgcagtaaggtgaaattccactgcaaagtgtatggcaacttagtatgtggaggtgaacaacagcaaggtgggtgtcaatggcatgccctatgtgactgtgcttaggttagctgctgctgcttgtcaggagcatggggatggcatgccgatgctccacttcactaaactctaccatcattatagaagttttggagtagcctatgaaagacagaatcatgtcattatccaagagacaaaatcctctagagtaagcagttctcctggatataaacttggtgctggttcatttagcatttgctacgaaccaatatctaaaattagaggcagtttctcctaaagtgagatgacatgagtcagttgataaaagtgtgaagcactcctgtgagtattgtccctcataattcattcaaaaacatttgcttctgtctt

SEQ ID NO: 492023 - DNA, 609 bp, Homo sapiens
tgggtgaggactgtggcctgtgggcagggtgcagggagctaggcagcctctgagctcccatctattctctcaatgtgccctcctgaccaactctttctacctgcaggactgctgaccaaccagatgcagtaaggtgaaattccactgcaaagtgtatggcaacttagtatgtggaggtgaacaacagcaaggtgggtgtcaatggcatgccctatgtgactgtgcttaggttagctgctgctgcttgtcaggagcatggggatggcatgccgatgctccacttcactaaactctaccatcattatagaagttttggagtagcctatgaaagacagaatcatgtcattatccaagagacaaaatcctctagagtaagcagttctcctggatataaacttggtgctggttcatttagcatttgctacgaaccaatrtctaaaattagaggcagtttctcctaaagtgagatgacatgagtcagttgataaaagtgtgaagcactcctgtgagtattgtccctcataattcattcaaaaacatttgcttctgtctttgcaacttcatgctctctgaattcccacactgagtaaaaacctccttggtgggctt

SEQ ID NO: 492024 - DNA, 453 bp, Homo sapiens
cctgtcatcatcacaatgagacagctgggtgctggagactcagaaactgccatgcagaccttgagtccttcccaggcccagccaacagggcagagaatccaggagaaaagtcattttcacctcctgaaggaccagagctgaccaggcacctagaagctgtgccccrctgcaggctgccggtggagctcatgacaaggccggaacgtgaagcactcccttgtctgtccttttttcctgaaggctggagcttgcccggccaatgtcacccttcaggacagggaatcagagctttgcatggctgccttaccccaccagagcagtgccacagagaatcatggctgaggctttcctgtgggctgcagtgcctgaccctttagggtccccacaaaaacacctttcctgcaaataatccacagtgtcctgcttgccagcctaggcttcctcatcagttgg

SEQ ID NO: 492025 - DNA, 453 bp, Homo sapiens
cctgtcatcatcacaatgagacagctgggtgctggagactcagaaactgccatgcagaccttgagtccttcccaggcccagccaacagggcagagaatccaggagaaaagtcattttcacctcctgaaggaccagagctgaccaggcacctagaagctgtgccccgctgcaggctgccggtggagctcatgacaaggccggaacgtgaagcactcccttgtctgtccttttttcctgaaggctggrgcttgcccggccaatgtcacccttcaggacagggaatcagagctttgcatggctgccttaccccaccagagcagtgccacagagaatcatggctgaggctttcctgtgggctgcagtgcctgaccctttagggtccccacaaaaacacctttcctgcaaataatccacagtgtcctgcttgccagcctaggcttcctcatcagttgg

SEQ ID NO: 492026 - DNA, 631 bp, Homo sapiens
ggcatggttactcatgctggtaattccagmtattcgggtggctgaagcctgagaatcttctgaacccaggaggcagaggctgcagtgtgttgatattttgccactgtactccagcttgggcaacagagcaagactctgtctcaaaaaaaaaaaaaaaagaagcaagtgagtaagagagagaaaactataaaatcactgaacaaagtgtaaagatgttaattttcccacaacgttagaaattttgtgtatatttacatgcatatctacacataaagctgatctccttatatgttaaatcagttacatgttcagtgaaaaatacattattttctctgttttaacactgaagaggggtgcacgtggtccagacatgtcctgttggagttgaatggggcatgttctgggaaaaggggaaaggcagagtaagggcctggtgcatttaggtggggtaaagtgggactctaatagagaggcatccagggtctgggccctagcaacactgaggctcacgggggcttctgcaggtgagggaaatggtgcagggtgctgaaggctaaaatatcctgtaacaggcgaagatctggccagatcgtcctgcattccagcatcattgccagccaggcctaacttg

SEQ ID NO: 492027 - DNA, 606 bp, Homo sapiens
ctgggcatggttactcatgctggtaattccagatattcgggtggctgaagcctgagaatcttctgaacccaggaggcagaggctgcagtgtgttgatattttgccactgtactccagcttgggcaacagagcaagactctgtctcaaaaaaaaaaaaaaaagaagcaagtgagtaagagagagaaaactataaaatcactgaacaaagtgtaaagatgttaattttcccacaacgttagaaattttgtgtatatttacatgcatatctacacataaagctgatctccttatatgttaaatcagttacatgttcagtgaaaaatacattattttctctgttttaacactgaagaggggtgcacgtggtccagacatgtcctgttggagttgaatggggcatgttctgggaaaaggggaaaggcagagtaagggcctggtgcatttaggtggggtaaagtgggacyctaatagagaggcatccagggtctgggccctagcaacactgaggctcacgggggcttctgcaggtgagggaaatggtgcagggtgctgaaggctaaaatatcctgtaacaggcgaagatctggccagatcgtcctgcattcc

SEQ ID NO: 492028 - DNA, 410 bp, Homo sapiens
atctgccctgcggcaagggtccagaccgttacggccaggccaatttaaaagagccccatctcctctgttctcagaggcttatgcgggtggagaacagataagaagtgaactgaagtctccttgaaaaaaacaaagtcccatggggtttgccaccccctccccccacccacctaaaactggaaccagtcagccacctctgtctcttctccatgccaagaacctctgttcagggctcctggcaaacccctcctccctgctgcctccccrccacagtacgcttgccaggaatgcccgagatctggcacctgagcatgttgcgtggcaggcgggggagcaagcgggacaagggcggcgatgtgtcctgcacaaaggcccaggctgcagaccaactcgcctcgcagcaggtagca

SEQ ID NO: 492029 - DNA, 543 bp, Homo sapiens
ctgttagttattgatttatttttscaacccatctaattcttctgtctctctcctctcctcaggctcaataattccatgggtctctaaggctgtgtttattttctttaaattttgttgatttacttttatactccatttgattttttctatctctcaccttttctcagactcagtcatcccacaggtctgtaaggctctgttcattttctttaaacttcttttttttttcctctcctcagattggataaattatattgctatgtctctgtttctgaactatagaaaagctcaaaattattatttttatttctcattttttatatggctattttttctctgctgatgtttcacatctattcatttatgagaatattttcctttgccctcatgagcgtgtttataatagctgccttcaaattcttgtctgccgtttacatcttggacatcttggagatggctactgcctgctttttatcttgtgtatttattacattttcacgtgtcttcacgcatcccttgaattggaaattgtgccctggagac

SEQ ID NO: 492030 - DNA, 431 bp, Homo sapiens
gaggctccgtcactcatagataagacggaactgacactgccatttacaggggcatctggtaggctctcaggaaaggggtttgctgagtgctgcagtctcaggattcagtccaggactctgtcctcgcaagcttcaggatcctggtccccaccctgcctgcctgccccagtctcactcacatctmtataatcctctatggcaatttccagcatctgcaggttgttgagaagtgtgcccggggtggggggtgggggggaggggagtgggggcacagcagcctgtgttatcaaggtggtagcagtgatgagcaccaattctcagctaactgcacaagacctctcctttgaactctcaccaacctatttctccttgacccccgtacccaagtctctcactcagagcatccaaggacctttcacctccttgcccaa

SEQ ID NO: 492031 - DNA, 220 bp, Homo sapiens
tttaattcctaaaggcagaatgtgttttcttacatgatgatgtacactctatacaaatgtaagcagtgtgttttttagcccctgcatctattaaatggtatccattttgttgtcaaggagctgattctttatatagctgtccstctccagaataggccaggaaatgcctgggtggcccaggccctggagatgcagttctttttttttgagatggagtttt

SEQ ID NO: 492032 - DNA, 585 bp, Homo sapiens
ccattcctggccgtctcagtcttttcatggccttctgccctgtttccatgtctgtcacctttctcttacaaggacatcaggcattggatttagggcctaccygaaatccaggatgatgtccttctaagatcctgaacttaattacctctgcaaagaacctatttccaaatagggtcacattcacgggtaccaaggggtaggaccaagacagctttttgggggaggagagggacaatttggcccaggacatgttgccttgttgtcacccccttccagaagatcaccccccacgtttcccatgatgctttctacagtggccctgacctcctgttcagggacttgattcccttggtgccacggtgcaccccacatgaccctgttgttgcatatcgtggagagaaagcaccccagcttgaagctggacaccctgccctgtgtatgtgacttaagcctcagtgtctctgtgaggaccttctcttgttccttggagttgatggagatgtctgcttcttgagggacagttttccccaggtcagggggtcctcacgcagtggtgggtggccgtgcctgggtgcagtttgcccc

SEQ ID NO: 492033 - DNA, 585 bp, Homo sapiens
ccattcctggccgtctcagtcttttcatggccttctgccctgtttccatgtctgtcacctttctcttacaaggacatcaggcattggatttagggcctacctgaaatccaggatgatgtccttctaagatcctgaacttaattacctctgcaaagaacctatttccaaatagggtcacattcacgggtaccaaggggtaggaccaagacagctttttgggggaggagagggacaatttggcccaggacatgttgccttgttgtcacccccttccagaagatcaccccccacgtttcccatgatgctttctacagtggccctgacctcctgttcagggacttgattcccttggtgccacggtgcaccccacatgaccctgttgttgcatatcgtggagagaaascaccccagcttgaagctggacaccctgccctgtgtatgtgacttaagcctcagtgtctctgtgaggaccttctcttgttccttggagttgatggagatgtctgcttcttgagggacagttttccccaggtcagggggtcctcacgcagtggtgggtggccgtgcctgggtgcagtttgcccc

SEQ ID NO: 492034 - DNA, 304 bp, Homo sapiens
cctccttttgctgagtcatcacagttttgctcattcccacatcaggctctggcccccaataccagctcagttgctcaatgggctgtttgtcctggagcccagatggactgtggccgggcaagtggatcacaggcctggccagcctaggagttgccacatgtgaggggccgaggggctcaaggaggggaacatcggggagaggagcctactgggtggaggctgggggtcccagcaggaaatggtgagacaaagggcgctggctggcaggragacagcacaggaaggtcctagaggttcctcagtg

SEQ ID NO: 492035 - DNA, 492 bp, Homo sapiens
agcctccccataggcactcggggcctcccctgggatgagactccagctttgctccctgccttcctcccccaggcatggctggggactggaagaccaccttcaccgtggcgcagaatgagcgcttcgatgcggactatgcgragaagatggcaggctgcagcctcagcttccgctctgagctgtgagaggggttcctggagtcactgcagagggagtgtgcgaatcaagcctgaccaagaggctccagaataaagtatgatttgtgttcaatgcagagtctctattccaagccaagagaaaccctgagctgaaagagtgatcgcccactggggccaaatacggccacctccccgctccagctcctcaacttgccctgtttggagaggggagagggtctggagaagtaaaacccaggagacgagtagagggggaatgtgtttaatcccagcacgtcctctgctgtcctgccctgtgtcgttgggggatggcgag

SEQ ID NO: 492036 - DNA, 584 bp, Homo sapiens
cagctggggcctccctgggggccttgggaatccccagacaccagcttgaaccaggagcaagggaagcagcaacaggctgagccctggagagatgggaagagggtggcaagacagggagagagcttgagaaggaagggaacatgccttttctgagcctgtgctagctgtgagcacggtgcaggcactttgaccagcatcattcctctgcctcctcaaaaccacaatggaggctgggtgcggtgactcacacctgtaatcccaacaatttaggagaccgaggcgggcggatcatgaggtcaagagatcaagaccatcctggccaacatggygaaaccttgtctctactaaaaatacaaaaattagctgggcatggtggtgggcacctgtaatcccagctactcaggaggttgaggcaggagaatcgcttgaacctgggaggcagaggctgcagtgagctaacaccactgtgctccagcctgggcgacagagccagactctgtctcaaaaaaacaaaacaaaacaaaacaaaacaaaaccccacgatgcagccagcacggcccccatatggcatctccgcatggtgt

SEQ ID NO: 492037 - DNA, 496 bp, Homo sapiens
caaataaacttcttttctttataaattgtgcagtattaagtattctgttacagcaacactaaatggactaagacatcatcagagggatggggacactragtgttagggtggggtaaggctggggccagaacccaggttcctgactcttggccagtgtctttctccatataaatggtagaggtttctcactttcctctgccagggtggagagcttcacaatctgacaggcactgtagactaaagggtacatccattatctcatttaatcctcatgacaacactgcaaggagggtttagcctcattttaaatatcacaaaactgctttagaaaagttattatcttgtgtaaggccctgaatactgaatggcagagtcagcatttgaaagtaaaactttataaggaagtccatgcctttaactcttactttacctacctgaggagagtagtgtttgtcctaaggaatggattcacaaatgtagattttctgtcatttgg

SEQ ID NO: 492038 - DNA, 558 bp, Homo sapiens
tgtacgagatgtctggattctcccagtcagcaaagagttgggaacagggtggtcacagaggagccaagccagggcagaaagatgtctccattcagtgaatacttattgaatccttgctctgcaccagatcttgaagggagggaggaaaaagccttgaagctgacaatgtagttccttcatgtcaattaaatgtttatttaaaagagtgcaaaaatagaaaaagggtggtttcttcctttgagggaagccacgggcacgtgaatgaacaccagcaktatgatgtgctgggtaccagaattggagtgtgctggggagtcccaagagaggggcttcccaggggagctggagaagacttttcagaagagatatttttaagacagaccttgcaggcaggtcttatgcacctgctcagaaggtaggtaagaagctgagaggtagacaggaggaccaccttggctaaaagctgcgagtcctgagccagcatggtgtgcttgaggcacagcaagaagttctgggtcagatgaatcgacagtcccacctcatgctagctgagagacc

SEQ ID NO: 492039 - DNA, 297 bp, Homo sapiens
tgttgaagccaaagctgcatcacrgtttgagggagtggcagtatggacagccagaattcttaccataggcagcaggaagccacactcgtggttattgactccgatgatggaaggaattgctttaaatgctttctgagacaatagatctagaggctcattaggaaagaaagcaccatcaaccactcgagtgaaagactttgttttctgtaataaggaagaaaaaaaaatcatcagctatcatcagctatttctgttcacaaaatctgctgtcccaaatcctggccaagaaaagccaac

SEQ ID NO: 492040 - DNA, 297 bp, Homo sapiens
tgttgaagccaaagctgcatcacggtttgagggagtggcagtatggacagccagaattcttaccataggcagcaggaagccacactcgtggttattgactccgatgatggaaggaattgctttaaatgctttctgagacaatagatctagaggctcattaggaaagaaagcaccatcaaccactcgagtgaaagactttgttttctgtaatarggaagaaaaaaaaatcatcagctatcatcagctatttctgttcacaaaatctgctgtcccaaatcctggccaagaaaagccaac

SEQ ID NO: 492041 - DNA, 604 bp, Homo sapiens
gtcctgtatgtgaaatgagactgagcccctaactcataatgtgttgtgaggcttgaaaaagacaatgtgtattaaagggtttgttcaacatgaaggcaacaatcaaatgttagtgactcatcatcatttttggaacctccggcactgagattcattcaaaccacaaagcagagaactcacaagactagaaacacttatggctcccgcggactcgccaaagatggtcacagagctggggtccccaccgaagaactcgatgttcttctggacccaggacagagcagccacctggtccttgaaggcccagttccccggagcatgctgatcccatgtgctgaggacaagaggcagggtgagaattcttggtcagccatggtgtgtttcccacagccctggaagttctcagcagaggctgtgggcaggggtcagtggggakggggcggagagtcagaggcctggaggagctggggaaaccggactcagttctcacactttgctgagatttggatttctttgagaatttgatgaaagctatgcacctaagaaaaatgcacattcaatattgtagctgcaatttcaagtattcacaggttcctcagaatcc

SEQ ID NO: 492042 - DNA, 613 bp, Homo sapiens
  misc_feature (1)...(613): n = A,T,C or G
nnnnnnnnnnnnnnnnnnnatgcactagggaccctttattgaatcatcatatacagtgaaccaaggtcccctaatctaccttttgggtgaatcggtttccctctcctcccttgaggggtgtttaaagcacggaccaccctactgggttgagaatgaggctttcctccgagtgggaactgagttgacattaatcatcatctgtcctcacctccccatactcaacggcgagacttacagaaataggattgggttccctagtggcagagcctgggtctgtgagtkgggtagggggtcgcatgtcacttgtcagttgcgcacatcatgaactgacggtctgctctcaggagaaacagtaagggactgagggaagccaaacggagcaagtccttggcctagtctcccagggagctttgtcccactggagagtttgggctggagagttgtgccctctgcctctgtcattggccactctaggttagggggaagtgggggttgtaccctgccaggcgtctctggttcttatcagccaagggtagttctccagaggtataaaccgtgagcagcctatatccacagcagctaggaagaggggtgctggctgtaacggggtctg

SEQ ID NO: 492043 - DNA, 613 bp, Homo sapiens
  misc_feature (1)...(613): n = A,T,C or G
nnnnnnnnnnnnnnnnnnnatgcactagggaccctttattgaatcatcatatacagtgaaccaaggtcccctaatctaccttttgggtgaatcggtttccctctcctcccttgaggggtgtttaaagcacggaccaccctactgggttgagaatgaggctttcctccgagtgggaactgagttgacattaatcatcatctgtcctcacctccccatactcaacggcgagacttacagaaataggattgggttccctagtggcagagcctgggtctgtgagttgggtagggggtcgcatgtcacttgtcagttgcgcacatcatgaactgacggtctgctctcaggagaaacagtaagggactgagggaagccaaacggagcaagtccttggcctagtctcccagggagctttgtcccactggagagtttgggctggagagttgtgccctctgcctctgtcattggccactctaggttaggggraagtgggggttgtaccctgccaggcgtctctggttcttatcagccaagggtagttctccagaggtataaaccgtgagcagcctatatccacagcagctaggaagaggggtgctggctgtaacggggtctg

SEQ ID NO: 492044 - DNA, 613 bp, Homo sapiens
  misc_feature (1)...(613): n = A,T,C or G
nnnnnnnnnnnnnnnnnnnatgcactagggaccctttattgaatcatcatatacagtgaaccaaggtcccctaatctaccttttgggtgaatcggtttccctctcctcccttgaggggtgtttaaagcacggaccaccctactgggttgagaatgaggctttcctccgagtgggaactgagttgacattaatcatcatctgtcctcacctccccatactcaacggcgagacttacagaaataggattgggttccctagtggcagagcctgggtctgtgagttgggtagggggtcgcatgtcacttgtcagttgcgcacatcatgaactgacggtctgctctcaggagaaacagtaagggactgagggaagccaaacggagcaagtccttggcctagtctcccagggagctttgtcccactggagagtttgggctggagagttgtgccctctgcctctgtcattggccactctaggttagggggaagtgggggttgtaccctgccaggcgtctctggttcttatcagccaagggtagttctccagaggtataaaccrtgagcagcctatatccacagcagctaggaagaggggtgctggctgtaacggggtctg

SEQ ID NO: 492045 - DNA, 512 bp, Homo sapiens
ctccacctggctgaggtctttacacttgctcagcaaccagcagagtgactctacgtgctcctggctgaggctgcagcctgtgaacctgctggacggaggtaaaggggacaagcaggggatggggcgtttggccactgagaccccctccggcctggctagcccagggcacagcctctgggctccaggtgggtctccactcaagcttggaccctctggaagtgtccagaatccactgctcccacccccacagtagatcccacccggacctgtgtttcttcatgctgggtgaaacaagtccctctkcagggttgttccaggggaatgttttgtggtaggcagtctgcatactgctctggccacccaggaggcagatctactggtccccaacatcaactagctgcctaggcatggttcaagggggcttacccacagcacacgccttcctcctcctcgttggatctgaagtgcaaagttgcatggtgcagggacctggatcagacaggacctgggtc

SEQ ID NO: 492046 - DNA, 566 bp, Homo sapiens
ctgcagcagagtgtcatcacagttgcttttggttttcaatccccatcccaggaccttactgtgagtccaagctcccggccccttcctttctttccctgtaggttctctctgtgttgcgcagttcttgcagttatttcaggaaacttgaaacccctagcctcttagtgagcacacacactctcagaccttcagcccttacgctgtcacaatttatagttaagacctatgtggacctgaaaccttaactgtcatctgtgaagtcctctttgatactgttccctcacactggcaatgctcttgggggcaccctaacacctggtttttctaaagtaactctaagtttagccactatggtgcccttcactgcaaggaagacagggtctctatcaccaaatagtgacaatcaagtacatacgataacgtttatttaaagtgtaatatactctaagtgtgtgtattcgttcaattacactagtaggaaatgtagcagctagcattagtgagtactcagtgtactcaaagtgctttgtacayattaatcaaataaatgcagtgacttgttttat

SEQ ID NO: 492047 - DNA, 432 bp, Homo sapiens
ggttttataagggagagtttccctgcacagtttttttgcctgctgccatccatgtaagatgtgacttgcttcttcttgccttctgccatgatggtgaggcctccccagccacatggaactgtaagtccattaaacctctttcttttgtaaattgcctggtctcgggtatgtctttctcagcagcatgaaaacagactaacacatttacccttcccaagtgattctgtgarcactgaataatttataaaaattcccttttgcttaacaaggctatagtgggttgaatgctactttccctcctcaacccccaccaaaaaaagatgtgttcatgtggagcctgtgaatgtgactttatttagaaaaggagtctttgaagatgtaattaagaacctagagaagaggagatcagcttggattatctgggtgggccct

SEQ ID NO: 492048 - DNA, 497 bp, Homo sapiens
tgaccctcaggaggtgtggtggacagtggtttacttccgaacaagcccagtgcctgcttttgaagacgatatggcactgaactgagagtggtgctcatctgtgtgacaagcaggatggaagcttgctataaatattgtgatataatgctaatgacctttacacagctaaaatcaatcctttcacttttccggttttatgtgatactgccatactagtcagtctaacactgacccctgttggttgtgcttcagcataacgaaattaggatgacgagaatctgaaattacatctaccatccaggtgaytaagttatgcagaatatagtccaacttatttgcccatatttggttaatcagatatctgtgtttgcaggaagtttgctgtatggattaccaatttcaaaaatcaaactacactaaaattcagatgagtccgttgtgttccttttgaacactcctcgttgaagaggctgctgttcaggcttcctcgtggtgct

SEQ ID NO: 492049 - DNA, 524 bp, Homo sapiens
ctttcccactctgctgaggtcatttggtgaagtgcctaaataaaacataagaaccatcgtttacaataattccattagaattataacacttgaatttccatgtaaaaacaccaacgaccagcaggaccaatttttatagggcaatcttggtgaacaaggctgtaaataacatggaaaaagagtggggaagagtttctctgactgaagccctcagttgtgagatgctagagtaatggaaaggggtggaggtcagagaccccagtgagggggttctcataatcttagtccaatcacgcttgaaggtggcatccttggaactatagaaaartgtcaccatgtcaatgatccccatgctaaagtcacagccaatgttaatgaagaacatccttccaggcactatttttttatttttttgagatggagtctcacactgttgcccagactggagtgcagtggcgtgatctcggctccctgcaacctccacttcctgggttcaagcgattctcgaaggcacatttattaaa

SEQ ID NO: 492050 - DNA, 525 bp, Homo sapiens
tgtcaaatggtgacgttaagtagggttcctagctccaagtgttgacatagccaagcagcaaatgcatcttcaggaaatctgctgtaataacaagggcagagcatagaatagtgagaaggtgtgggagagaagcagctagacatttctctgccatttgctttggccactggacagtcatggaacccaaacaggcaagctcaccttgcaaaccttggcctcctcatctgtttagtggggttgagaagattcaccacaggtggttgaaaggaccagaaaataaaaaatacaagcatgttgcctratgtgcgtgctggcacatattaggacctcaatgccccgtctcctcctctttgcagtagattgatgccaaggaaatatgactagtgttttcagactcttgagaaggtttgatgccatgcctgctgattatgatacatgtaccctaaactaaacttttgagaatggagtcttttcttggaaaaaaaataagtcaaaaataaagtcactaggttgtatgtctcagaa

SEQ ID NO: 492051 - DNA, 549 bp, Homo sapiens
caaatggtgacgttaagtagggttcctagctccaagtgttgacatagccaagcagcaaatgcatcttcaggaaatctgctgtaataacaagggcagagcatagaatagtgagaaggtgtgggagagaagcagctagacatttctctgccatttgctttggccactggacagtcatggaacccaaacaggcaagctcaccttgcaaaccttggcctcctcatctgtttagtggggttgagaagattcaccacaggtggttgaaaggaccagaaaataaaaaatacaagcatgttgcctaatgtgcrtgctggcacatattaggacctcaatgccccgtctcctcctctttgcagtagattgatgccaaggaaatatgactagtgttttcagactcttgagaaggtttgatgccatgcctgctgattatgatacatgtaccctaaactaaacttttgagaatggagtcttttcttggaaaaaaaataagtcaaaaataaagtcactaggttgtatgtctcagaatgaattctctaagtctctcgggaacct

SEQ ID NO: 492052 - DNA, 525 bp, Homo sapiens
tgtcaaatggtgacgttaagtagggttcctagctccaagtgttgacatagccaagcagcaaatgcatcttcaggaaatctgctgtaataacaagggcagagcatagaatagtgagaaggtgtgggagagaagcagctagacatttctctgccatttgctttggccactggacagtcatggaacccaaacaggcaagctcaccttgcaaaccttggcctcctcatctgtttagtggggttgagaagattcaccacaggtggttgaaaggaccagaaaataaaaaatacaagcatgttgcctaatgtgcgtgctggcacatattaggacctcaatgcccygtctcctcctctttgcagtagattgatgccaaggaaatatgactagtgttttcagactcttgagaaggtttgatgccatgcctgctgattatgatacatgtaccctaaactaaacttttgagaatggagtcttttcttggaaaaaaaataagtcaaaaataaagtcactaggttgtatgtctcagaa

SEQ ID NO: 492053 - DNA, 624 bp, Homo sapiens
ctcctgtcccactggtgacaccatcttccctgcagaatacagacaggaagaggcccgcataggcataggcagtagaagtgggcttgcagctttaagcaaggaattctggggtcttgggtaggggaaatgtgatggggaaggaggagtgggctctggatgagcagttcccttcagtcccaggaagtcctcagctagatgggagggttgaggttgaaggagagcccaggaggacccttgagaatggagggcctaattctgagacccacagtacctcaatttaaaggtgacaccgtcctagtgttgactatggtcctgcctgaggggtgtccaataaactttggctaaataaaggaataaatgaagtgggttaccacatgacattcatgatcgtaagaatgacttaaaaactgaaggtgaaaacttctagaaacttctctctgcttatgctagagaacggaaaactgacactgggaggggctctgagttttcayagtgggtcacacatttgaagtggcactgtttcagggtagatgtcttttctttttgtattaattatatattcagttttacctgttttaactcacttgccctccttcaaactaatgctaatcatggtatatggct

SEQ ID NO: 492054 - DNA, 625 bp, Homo sapiens
ggctccaacaaatgtgtcctttccactrcaactgtgttacctcacaggacaatccttctaaaacttgcataatttttagtgcaggtctggttttctcaggccaatagccatcaggagaaacacttaagaacctgcctcctagtgacttgtacaattctggatgatctgaatgcaactgcagataggagattacagtgagatttgttgtcacagacaatgactaagagataattattcctatcatctagttattatcagaaataaaaagattaaaataaaaactaaaatcctgatcatcactttattattatgtccactttgtagataaagaaattgcagttagggaattgaagtacctttttttcttccaatatgacacagcaagatctgactgcaaagccaggttttgttctactgagctttgatgaaaaaaaaaattacctaggaagtttattaaaaattgtagcttttccaaaattgtctgattccacaggtcaaaagatcttagaagtctatatgtttatatagtgctaataagtgtttagattctggtacaggcagtctgaggccttccacgccagactgccttcgtatttgatcctttctggtttcagatatgttacca

SEQ ID NO: 492055 - DNA, 625 bp, Homo sapiens
ggctccaacaaatgtgtcctttccactacaactgtgttacctcacaggacaatccttctaaaacttgcataatttttagtgcaggtctggttttctcaggccaatagccatcaggagaaacacttaagaacctgcctcctagtgacttgtacaattctggatgatctgaatgcaactgcagataggagattacagtgagatttgttgtcacagacaatgactaagagataattattcctatcatctagttattatcagaaataaaaagattaaaataaaaactaaaatccygatcatcactttattattatgtccactttgtagataaagaaattgcagttagggaattgaagtacctttttttcttccaatatgacacagcaagatctgactgcaaagccaggttttgttctactgagctttgatgaaaaaaaaaattacctaggaagtttattaaaaattgtagcttttccaaaattgtctgattccacaggtcaaaagatcttagaagtctatatgtttatatagtgctaataagtgtttagattctggtacaggcagtctgaggccttccacgccagactgccttcgtatttgatcctttctggtttcagatatgttacca

SEQ ID NO: 492056 - DNA, 545 bp, Homo sapiens
ctgctctggagatataaggatagggtcaccgtttgttgtccatatcagatctatagtctctaagtcaagcaaaaagcatcaaacatgaacctggaacaaaaattcacagaaaaagtctatattcacatatggtatactcatgatatgttaagaagaaataacaataaaaaataaacaaatcccagccatttgggtttgagaatttggggatagaccagaaattttaggtggcttctgtgtcttctaaaaagaatcacaagcaggaaccagaagataaattagaatgtgtttgtctcctccagtagggaactccttctatgtgtgcrcatgcacacacatacacacatacacacactccccacattttctctaaatgaaaacatcactgcattctctgggccaaaagaaaaattctagctatgtggtctgaagaaaacaattcttagaatatttccatgtcaagaggcagtgtaaggggtacaatttttatcctgttgttagcagaattgtagaacattttttgctttattaagatggatagaaat

SEQ ID NO: 492057 - DNA, 587 bp, Homo sapiens
tgtgttctgagtccgattttatctgttttatgggattgcgatagccccagctctgctgtgtactcttggagcacaatgctcttgctgtagaattcctcaaattccccaacagaccmtagacaccatggatctttccataacactctgcaattaagggctggttcccaatgactgactcttgaaaaatactagaccttcttccattagcaaaatgaaacaaacaataccatttaaacttgaccataatgtgtttgaaatctcattttctcttaaccaaatgtcctctacttttttagttgaacaacttaaactagaaatttactatacaagttataagtctgaggtattagaccttccttttttgagtactggtggcagtctgatttgtttatatagtgcttccgagttgacaggaaacttctggagccattatcactttttcctacacaaaggactgaaagagtattttctctccatttgacagatgaagaagctaaggcatgagggaatgagcaaaagtaagcccaatatgctgcaggagaggaaggggatccaaggatacctgacagaaaattttctgctcattt

SEQ ID NO: 492058 - DNA, 602 bp, Homo sapiens
gctgaggaacaaaaccctctctgtcttctcaatctccttgccagcctacagcttgagatttttcacacagtggattttcagagcctacggtcggcatctaatgaacaaatacgcgggtggggactgaatacctcttgyaagaatctcatctcagcccttcaaggccactctgggaagcttacttcttggaagaggacttatctcttccttcccaaaagagctgcattctaaatccaaacagccgtggagtagctgctcctggaaggatacttcaacatccatgaaatgtaatgatgtcctcaagtgaaatatttcaacagcgtgctcaggaacccaacaaaagaacataggtttaggggaaatacacagacacgcacacacacacgcacacacaccccaaattctttccttaaaacataagctggaaggattttatctgctctcacagggaaaactcaagaggtttaatttaaaacttgggcgggcttgtggtttttcaatggggtgattgttccgtagtcagggaatgagataataagaaaatgtttttgagccagtgtttggtttggcttcagaaattcaaaccagccttcttctgagag

SEQ ID NO: 492059 - DNA, 592 bp, Homo sapiens
ctgccgggaagcagagctgtctcgtgacctgtcggggaagcttctgtgctcyttgctcgctaggtaaaggcagtggggttgcatgttacttgaatacaattcccattggttcttacaaagtctttcagagaaaagcagccaaagtaaatggtaccgtctgttgtctccccatcgtgtttcgtcctctgtagggtgatagtgtgagcccatttcactgtgcaataccctacttaacaaggggcctgagagacctccaataattgtgattgggggatttcagcctttttttttttttaagatggatcttgctcttgtcgcccaggctggagtacaatggcgcgatttcggctcactgcaacctccgcctcgggttcaagcgattctcctgcctcagcctcccgcgtagctgggattacaggtgcccgccaccacgcccagcaaatttttgtatttttagtagagacggggtttcactgtgttggccaggctggtctcaaactcctgacctcaggtgatcacctgcctcagcctcccaaagtgctgggattacaggcgtgagccaccgcgcccggtctctgattgtggtatttga

SEQ ID NO: 492060 - DNA, 572 bp, Homo sapiens
tttcattcctcctgggaaaaggcctgtccacmagcctcacacccttgcaacccactggtgtttctgcgaagggtggagtggggaaaagcgtatgtgtctgctcgcctgtgtagccttgtacaaacacttacaccccaacctcagttttgtcttctggagaatggggataaggatgctaccctcctggcagagctgctgagaggcttaaaggagggagagattgtaagtggccagcaagggagagcttttataaagaacagcacagaggggagatggcaggcaaagcagagtgagtgctggggacattctgcaagtggaggtggccacgggcaggggcgggtgctggttgtgtgcctagagtgtgccaggcccacacgggctgtgttctcggttcaccctcagagctacctaggagggaacccatgtagttcatgaatgtcattacccccattttatggataaggaaactgaggctctgggggcagccagcaaggggcaaagccctgcccccacctggcagcagctgtctttgcagataggagcctgcagtgcaggggagagaagggacccgt

SEQ ID NO: 492061 - DNA, 628 bp, Homo sapiens
ctaaattgctaatacacaggattgtgataactgagtttggggatgatttsaggatggttatgtcgaattagctaaatggccagtgagaaggtggagagacataagagggtaatgtctagcactcagttttaagttgttatctgatctgggctgtaaacccccttaaaccaccccaaataggcccaaatcttccataaacacacaaccctggtgaatgatgcctttcctagtacatagtggaaggggaagaagagggaatacagaagggaagtcgtggcaggaaagatgcagagggggcttcacagctccaaagaggcaggaaaccagggtgggaggttatcaggaaggaaagcaaatcccccacagaattcccagagcagtgagggaggggagattggacaagccagagcatgtggaatgggccttgggtgagtctgttgggatattaaagaaaagggtgacactgtcaggctggagggctagaaacacacctgcagcagacccttgcatccaatcctcatacccaccatgacagggagagatttatcaccctcattttataagtgagaaatccaaggattggagaggttaagtaacctccccaggataactctcccgggaagtggtg

SEQ ID NO: 492062 - DNA, 471 bp, Homo sapiens
taagtatttgtgtatctaaacatagaaaaagtacagtaaaatacaatattataatcttataggaccactgtcttatttgcagtccatcaytgaccaaaacatctttatgagacacaaaactgtagcagcaaatcacatgtccatttaattcgctcagggacactaggatgtcaagacaggcaggcccaaggatatgagagtgacagctgggcagtgaagcacaacaggaaatatcagaatgaaatgcaaatggccactttcttcccaacaactttgacaagtttggatgtgtttggatcaagatttagatttaaacacagaaagcatttattaaacatctacactgtccagcactcttccaggtgctgtgaaactcttacagaagccttgcgataatctttcatattaacatagaacactgtagatatagatgcttcttactcagggagaaaaccttgcagaaaagtaagg

SEQ ID NO: 492063 - DNA, 609 bp, Homo sapiens
gctgtgtgttttccagcaggacgttcagcaggtcagtttcgcctcatgcccttctgcatgggaaatggcttgtgttgagtagagtttaaatacatcatcatattgggaagatctgtgcttaaggagtgatgactagaagataaggagaggagcttttttgttgaatgtaagtgaaaactgggcttargaacgcgtgttcaggctgctgtcagccagtagctcctgtgcacagaacccaggagaggatgtggggcctacactgggaagttttcttctagaatcggatcattctcatttatatttatttgtgacaataatgctggtgtgctcacaccagtgtattgttataatttagttaacacttgtctgcttttccaactatgtaaacagtgaggtggtcatgcttcacttcccacgtggtaggtagtgcagtccatggtgcacagtaggtgcattataattagttatcttgttgatgaaaagtagacttttatgactattcatttctaagcagttgccatctcttttgttttaaagaaacaaaaataagagtaagtccagttccccattgttttgcttccttattatagaataagagttttaaggatt

SEQ ID NO: 492064 - DNA, 365 bp, Homo sapiens
ccctcagtgtgaagagctcaggaggagctcagtcttgtgttgaagccagtgaagaattccgggcactcccaytactgctatggctctttcctgctgcttctgtgtcccctctccggctcctgggattttgggtgtgtccatgtcctggtccctgcctctgctgttactcccccctccctctccattcgtgtgtaccctgccttttctctcaatgttttgctcgcaacttagacatgaaatgtttttttttttaagttagatttaaatttgattaaagattatattccttaatgcaagtaaaattccacccctcctcccaattcagttgtttctagcttagagtccttggctgatctttatgtcta

SEQ ID NO: 492065 - DNA, 623 bp, Homo sapiens
ctgggaggcttccatccacagggactgttcatatgatagttgcctcagtcaatggcttgattccaaagctgacaaagtgagtttgtgtaagctgtasagctaaaaagatcagttttgctcaagttgtttttgttgtgggacctgttgatactatctgtaaaaccttgaacatcacagacaacgtgtacttattagcagctgattagcttccattagctgttagttgagagatactagatgtaaaataaaaatacatattagttatatattgaagtaggtaaagcacaactaccagaccctgggagattatttctagcattcagtaatactttttgatacaaatataaatattaactgttttagaaaaaagcatttctccctaaccaactgcccacaatgcctaatgaaatggcttatcttaacctagagtgagtatttttgaagctatatcacaagaggaatggatccccaaaatagggtatggcatagtactgacatttgggtatacaactccaaaaccaaaaaaaaaaaaaagaaaagaacttcctagtgagctatcataatgactctgtgtcttagatctaaacctttatgtcatgcttagaatccatcttggcttttag

SEQ ID NO: 492066 - DNA, 611 bp, Homo sapiens
aacacatgtggtttcattaatgtctttcactatgaataaagaatagtagaaataactccctattttaaattaagtaaatacgttttaggatatcacatttggaacttaaaattatttgggggagatatattcttatgtatatgtgaatatatatatatatatatatattttttttttttctatacccaaaaggttcagattttgcttaaactgtggagcaatggtttcagtttagatgatggagaattgagaccttacaatgaaccaacaaatgctcaatttctggagtctgttaagagagggtaagatgtattatttgtattctatttgttatgtagagtgggacttattttcttaacagactactcattattagtgcactacgggttttcaagaagtagttcctggaatatattaaataartggttgctgggggtgtaggtattcttaagtttataaaggatatacttgctatctgtatgtaagtcactggttcttaattttgtgggccaggggcattggacattggcccattttaaaatctgatgaaactatgaacccagctccaagaagaaacatcttaatgtgataatcagtgaattaattagtat

SEQ ID NO: 492067 - DNA, 663 bp, Homo sapiens
ttatcgaaggacagtgtaaaatcctcaatatagaattgtgaaaagtttgaaaatggagcaggctccttcctttctctgtctcaratagtttcagtcattttttgtaggtagaatggatatttgcattaaaaattgtttctagatgattctgcttacaaatatatctggagataccatcaatgtggacaaaatgaaaagagaatgcttcagttttggataaatattttatttgcccagagcacagtttctcttactctttctggcctcagcccgataattccatacatatttttactattggtttaagtacaaatgcctcaaggtagaaagatcgattaaatgacctcttcagattccttctaagctttattattctaatttttcagcttccacagtgagatgagagcatgacagaaaacctgtgttctttgtcctatttatcaagggactatgaagacacatgtttggactccctcatttgctgtagaaacacatgtgtaacaccctcaggattattgtgtcttctcggaaatgcatgcccttggaagtaagcctgtgggtgggcttctctcttttagagacattatgaaaagacatagaaatttctacattgccctttgggttaggtaggcgaaaggtgatatatggcataatactaaagca

SEQ ID NO: 492068 - DNA, 566 bp, Homo sapiens
ggtatttttaccatgcagaatttaaaatattgtatttggtcacatttatcaattttttttatgacttttgttttttgtcttttttttttttttggtaagcctgtctcaaatcagagatgaaaaataaatccttccatgtgttcttcaaatgcttttatggtcttaactattttttgcggttaaatcttttctccatctaraatctattttggggtaagacttcattttaatccaatggctagatgctgaaccccaaaccaattttgaaataattgatctctcttttcccctctgatatgaaatgccaagaatgtcagtttcagaacttttagagaaggaaataaaaaaatccccaggtgatagggaaaacgtgagacaaggaagtctataccagtcttctgacttcttaacctatgtccactgttttatctcaacattttctgaaaaatctcctctgaaattagaaacccctctcaccactactaccaccacagcacttactcagtcttcactgggtatctgacatagtgtaagtattttacaggtatcacactcaatcgtcacgt

SEQ ID NO: 492069 - DNA, 498 bp, Homo sapiens
ctgttgctgctacggcagtcaggacagatgctatgtgattctgtgcaacctttaacatctcagttggatcgtgagggtaatcccctagctagagtaattagttattctgctagtacagagtttgtcaaacaacacatgcttttctgaatgcatcttactctggagcccagatttccttggggacccagaagcatatcttctgggagagcaggcrtcttgaagaagccatgttattgggttattcttcactcactgcatcctcttcgtgtgtatctgttagaaaatatctaaatcatcatgttactgaactgcgtattggggcagaagcactacacattctccttgcagccaagtgaccctaatccagttatgatacgtgtctctagtctcttattctatgcctaggcaaatatcaatcacggatcaatgctgctgagcacagcctcatagcattcttttctgctgttccagaaagccagcactaattgactggaactg

SEQ ID NO: 492070 - DNA, 645 bp, Homo sapiens
tgattcatctattgtttggttagatcttaacacccttttatctggtggaagatatgggtgacaggtcttttccttgcatattctcaactatgtttccttgaccctgacagaggagtggggtcttgctacaggattcttggtgtgcagtgtttttctctcagtaatcttcacacgattggcctcaatcatccctacttcaggtgtcatagaagagaaagttgatgcccccatgatccttcttcccctataagtcacttgtactttctttctggaagactgtaagattttcttttcatccttagacttctggaatttctcaacctatgaatcatttgtcttgcccataacttgccaaaaccttccaataggcagactcaggccctttcttaacttgggaaatttacttcctattaactactacytttctttccttcagctactgaatttgtctgcagatcttgtcatttggttccagaaagtctttttgtgctctactggaatgtttatgtcctaacgttaatattttaaatgtattactgttccctagtggcttggtttcatgtgagcctcttctaagagcattgctgtgccccctaagtataagggtaatgttttcttttgtctgctctctgggctcagggccag

SEQ ID NO: 492071 - DNA, 596 bp, Homo sapiens
ctggaagcatattacagtgcagattccagggcctctccctcagacctatagaatcctctccagaatctgctttattagaagtcctctgaccctcatccccccacctcctatgccattggtgagttcggtgcagatggtccaggcaccacactttaagaaatactactcagtctctaacactgagtctttattgtgcacaggaatatcttggggatcttgttaatatgcagattctgattcagatggtctaagctggggcctaagattctgcgtttctaccaagctcccactgctaccaatgctactggcctgaagaccacattttgagtagtaaggttgcctactggaactatttggggagctttcaaacttactgatgcctgaatcccatccccagagattctgaattaatttgttaggccacagcctggggatggagtgcttattctccagcaggaaggaccttggcataacttcctatcgatagtagctgtgttaggcatcacactcccaccagaccccatcaaggcctttgcttcaggmcgaggagccaattttattactgaaaagctttttaatttatgacagcaatattc

SEQ ID NO: 492072 - DNA, 572 bp, Homo sapiens
ctgctgggagctgggaaaagcaaggaaacggagtttctttagagtctcccctactgtctccagaaggaaggcaacctttccgacgccttgatttcagcccagtgaaacaagtattggaattctgacctacaaaaccataagataataaatttttgtcatcttaagcccctaaatttggggtagtttgtttcagaagcagtaagaaactaatatactggtcaacatttagtgttgtcaatattttcaattgttgctaatttgaaaattcaaaaatgatattttatattcattgtaaaatgaacattttataacttaatgaattttcttcctatttttgaatttctgtttgtgtccttttcctatttttcttttagagtgtttccattttatcgttgatttatatgagctttttatatattatggaaattaagttttgcaggtattttcctggtttttcaaacttrtaacacttttgtaattttttaaaacatgaattttagatatcttatcattctttttctttatgtttacttttctttctttctttctttcttttaaggcaaggtcttact

SEQ ID NO: 492073 - DNA, 573 bp, Homo sapiens
tcccagcttcaagcgattctcctgcctaagcctcccgaatagctgggattagaggcatgtgccaccatgcccagctagttttgtatttttagtagagacagggtttctccacatttgtcaggctggtcttgaactcccaacctcaggtgctcctcccgcctcggcctgccaaaatgctgggattacaggcgtgagmcaccatgcccggcctacacctggataatttttaaatgttttgtagagacagggtctccctatgttgttggtctcaaactcctgggctcaagcgatccttccacctcaaccacccataatgctaagactacaggtgtgagccacggcgcctggccaaaagttggatagtttttaaaaaacactggctacttacagaaagaagtctaacttaagaaaaccgtaattccctaaaactctttcagagttaaagaaaaaaagtcatatttgcttttatggaactaaaataattattagagttttggctattgatctgtgaccagtgattcctataggacactctctgcctattctcacgctacaaaatcaagccaggtttca

SEQ ID NO: 492074 - DNA, 581 bp, Homo sapiens
gaatcttacagtgatcaagcatttttataagatatttgcaatttttgtaaatatttttggcctgcaactgggaaggggattcagagtcataaagcctaacttaagaatcctggctcacttctttggtgatacactgtagccactagaaagagaaataaacccaatggcatgtgtttacaggaagaaagattaccttcagatacttgacattaacctcatcaaaagtgtgtgaattttaaaacaaattctaaaaaaactatagtgctaaattggtaactggtattttractctcaatttagcattttccttgatactttatcattgaaaatttatgcatttatttactgattgtgttgtgaacatgagttttatggtattttgtgagggatgcattttttaaaagattaattttggaaacagaaggagaagcactgccatttgtttttatttcaacaattggaaaaattaccaatttgtacattttaattattcaatttctactttgtaaaaatagggaaattatttgaagtgatatatttggttaaacatttctaaaaataaactaccaatactaaatagt

SEQ ID NO: 492075 - DNA, 583 bp, Homo sapiens
tgctgcaatagctaagcacaatacttactacattgctcttatcacagtcataagtaggtttgaggaggagttctgctccatatagtaattcaggggcccaggctcttcccattctgtgattctgcttaaaatcttcatttggccggcagatgaagaaaaagcaaagattagatgggagtttttatgggccaggcccagaagaattggcatcatcacttctgaccatattccatgagccaggatttgatcttgtggctccaaccaactgcaaaaaaagatgggaaatgtagtttggttatgtgcccaggaagaaaacggggttttgataaacacagagtaaacctctgccatgtaccccacccctgctccattttgttattttctttgttcctttttcctaatgtgcatttaatggtttcagtggctctcagtattaaaggttttttccatgatttcttactgtatgtagctattttatccatatttttaaatatatataattatttccatacgcctcctaatgawcgtttctgaatgaacatttgtgataactcagaaaccactgcttatctttttagcatga

SEQ ID NO: 492076 - DNA, 641 bp, Homo sapiens
ctgggggttgagggtcatggctttggtggctcttagctgcmacacactagttattgcctgagggagagggggaaggggttctgtttccagaggctgctccagaatttcacaacagggggggccatgggcatagcaatctgattttggtagaaactgagttggcttggtaagcacataattgacccatagattgtgttatacgactataaaaatatcttagttttcttaaaaaaaaaaggcctttatttacactttatataaaattgagaaaaaaatgtttatgttaaagattgtggcggggcgcggtggctcacgcctgtaatcccagcactttgggaggccgaggcaggtggatcacctgaggtcaggagttcaagaccagcctggccaacgtggggaaaccccatctcttctgaaaatataaaactgagccagggtggtggagcatgcctgtaatctcagatacttgggaggcttaggcaggagaatcatttgaacctgggaggcagaggttgcagtgagctgagatcatgccactgcactccagcctgggtgacagagcgagactctgtctcaaaaaaataaataaataaataaagattattatggtggtaatgatttcatctgaggttgggactttt

SEQ ID NO: 492077 - DNA, 578 bp, Homo sapiens
gattttgtatctatatcatcactgccagggaatgtagccttttaggtagatagtatgtacaaagtttagtgaaaaccagactgtagacctaatakattatatataaggggtttcctctcccacaaatctaaattataaaatctattacagtacctgctcagatttcagacactattcaacaatatagcttatgcatttgataaatgtttttgttttttccttcaaagttgaacataggcaaaaggtataagttattgagattccaattaagttttaagattcactggttttgttatgttctctccaaaaatattgtttattgagaactatgtattttaatattcatactttcagcttttctattttctaatttttttatattctcaatatttataaaataaaaaggtaaatacaaccgtgtttccatacagtattcctcaattcaaaggcacagcatttttcatgttgtaacctcctgtattcactggtgtcttaggatcacttaccaaaaatctgtggcatcttagatttggtaacaaagcctaaatatttccatcctacaaacgtggtcatgcttc

SEQ ID NO: 492078 - DNA, 516 bp, Homo sapiens
acacttccttgctgatcaatagtcccagaactggtggcacagccaggaccgacgctgatgcttacctccccctctcctgcagcagagacgcccccgtccctgtggcccagggaagtgccagggatccctgggaaggcgggagatggggaaggggcagggtgagcgaagaggagcaggctgcgtctgcacgcgggctgggaagcggggcttccgggccgcagggtcgcggggacgggtgtgatgcaatcgcgccacagccgctgcgtcaaggggcggctccgggatgcgggcactgcggtagagccsgtcctgcccccgccgcccgccgcccgccgcccgcctccgctgctaaacccgcggacaaccgccgggacgaccacccagagccaccagagccccctgacacccgccccgaggcaccggtaacccacggcacccgccccggtgcgtgccatgaagtcggccgcgagctcgcgcgggggcggtgggggcggccgcgggggcggcggctggggc

SEQ ID NO: 492079 - DNA, 656 bp, Homo sapiens
gcaaacttgaaatagcccccaaaggcctctgggagtgagcagtggttcactttgggaagatccaaccttgaagattacagaagacgtgaggcaactggttctttttctagacaacagcacacacctaagagagcaggacatctgaaggctatagaagccagtccacaataatgtcaaaacccagaatcccaggagacctaggacagaaggaactgaaaaagtgatgaaaaatggcaaccaactggccaaaacagaggagccagagcraagcctagaaatgttgatgattcgggaaaatatagacttcccaagagtgaagacaggggacttatgggaacccggaagactaccaaggacaagtagccccagcccaaaaagaagagcaaactggagacgctcagtgttagctgccctgccctgaacacttcaggatggctgaacgcctacacatggtgctaaaggaatgaaggaagggccctcattctagctagattcttttggcttttaggaacagagatctctgcatatcagctccttagtcttccctcaattgactttatctgcctcaccacagtgactgcttcctcacagctttgcttatttatagtccatcatggactcttcagccctgactttatgtcacagaggttttattt

SEQ ID NO: 492080 - DNA, 618 bp, Homo sapiens
gtgccctcccaaattgagggtggctgtgcctctcccagtccactgactcaaatgttaatctcctttggcaacaccctcacagacacacccaggaacaatactttgcatccttcattccaatcaagttgacactcaatattaaccatcacagaaggagaatttcaggctgagtccaaacactatggccccagccccagcttcccctttctgggttgaataaccagactgagcctaagaaaaggaaaagagttgactttctcccaaaaggcctgcagcgggttagaaagcaatggtttggggaccatactgagtgcctaggatgctctggaccacaaagcttgaagtcaaattgttcatgcacttgtttcatgatagraagagagagagagagagagagagagagagagaaatttcctttccttgaagaatggcaaaacacgtctcttgttctgggggctatatcttgaagggtatctgatctccccctcatgggaggaactagaatgccctaaggcagccgtggctcctggagctgagagatctttctgacactttgtgagagctgcaaggctaagtctggagccagaaaagtccatgtggacagtgcagagcaagcag

SEQ ID NO: 492081 - DNA, 621 bp, Homo sapiens
ggctttaatcagctggaagcatcagcagactaacgtctcaaaatccaagcttctcgagtgcacaatttctgtcccttcacaacactaaagattttacatgaaagggctgtgattgattgagcaatctagggggtatgtgacagaggcttcatgtactggtagtcagagtgaaacagaacagaacaggaagtttcacaatgtccttccatacaatgtctggaatctatggataagattggttgctaggtcacrggttgaattttaactatcaggtaaagtcaggcaggccaaggcctggttttgggtctggttttgggtctggtgcctggtgccgggctgcctgcttttggtttcacttccttgtttcttcttaaaacaggtactgagtataaaacaatatagaacaatatgggggggtctctttctctcttctctcattttaactgatagaggtgcaagatctgagggccaattattcacaaacttaaataactattaagtacctactattagaatagcatcgagctcatcaacaccaggaatgcaaggcatggctgccacccacacatgtttacgatccagttcagtctacaaataaactgaggtagaatataaatagaa

SEQ ID NO: 492082 - DNA, 568 bp, Homo sapiens
ctctgtctccagccaattatccaaacaaagatcttgtaacatcatccccctgctgtaaataacattagtgatttctgagagttcaaactctttagtggagcacttaaggcccttcccaacttaggctttagctacctttgcagtgtttatctgcatcccctcactcattttgtgctgaaaccagatcaaaagaactgcacatctctcaacatgtgcagcaccttcatgctttccattttttttcaaattatagttcattcaaaaagcaatacttaaagctttctatgtgccattctgaggattcaaatcaacatatttcctgccttcaawaaatagacttacaaccaccattgcagataaaccgcccactaagcaaataatagaacctgatctataaagtaatagatatgcaaagtgccgaaatagaccaaagtcggagatgattaactttctttaggagtcattcatgaaaggcctcactgaggatgtaatgctagagcagagctttgaaggatgaagagaagttcaccaagtgaacgtggaggaaaagcagtccaggcagaaggaa

SEQ ID NO: 492083 - DNA, 568 bp, Homo sapiens
ctctgtctccagccaattatccaaacaaagatcttgtaacatcatccccctgctgtaaataacattagtgatttctgagagttcaaactctttagtggagcacttaaggcccttcccaacttaggctttagctacctttgcagtgtttatctgcatcccctcactcattttgtgctgaaaccagatcaaaagaactgcacatctctcaacatgtgcagcaccttcatgctttccattttttttcaaattatagttcattcaaaaagcaatacttaaagctttctatgtgccattctgaggattcaaatcaacatatttcctgccttcaataaatagacttacaaccaccattgcagataaaccgcccactaagcaaataatagaacctgatctataaagtaatagatatgcaaagtgccgaaatagaccaaagtcggagatgattaactttctttaggagtcattcatgaaaggcctcacygaggatgtaatgctagagcagagctttgaaggatgaagagaagttcaccaagtgaacgtggaggaaaagcagtccaggcagaaggaa

SEQ ID NO: 492084 - DNA, 677 bp, Homo sapiens
ctccctactgctagcttaatgtggctgtccaagtttgggatttactggggagccaatttgttttaagaaattaacaaaaccgatacctaagtaccgcagtgaacataaagtttttattcattttggtgaaagggaaaaaaaatacccaacattctgctactcacaaaacagctcttgaaaatcatctttatgaaattgaatctctctccccaaatgattccccgatgctaagcgggatggccttgtaataatcactcccttgtattcgtgcgttaaccggttcaaacttcacaggctttgcccaacccaagggtctcatggcaccggctttatactttttaaaattttatttatttatatttttatagaatgcagggagccacacrgatgagagagaattctcaagtggggaaagtcatatgtggactgtgagatttagacacaaaaaaggaatgtatctctcacaccccacaccccacacatacacaaagtagatttttttttttccaaaaatgtggtctggaaaaaggaaggaagaaggatgcctgtcatggagctggatgtgtgaaaacctctttgaaaagcaatgacatttcctccttgggggacctcatcttccctttgctcctacctggtgctgaacacaggaagttcgtgctctcccttcaccatcacag

SEQ ID NO: 492085 - DNA, 594 bp, Homo sapiens
gacagccacagaactaagagaaacagaatccagggtgaaaagagaactaattccagataatggrgcagtgcagggaaggtgggtgccacaatggggtgtcttttttatatctgagagcagtgcttccctgggcaagaagaaagaagccctgaaagtagtttaaatactcaaaggaaaaattggccatcttaaaatttaacttagctcaacttttactctcctaaacatacttcaagtatcaggataccagtaccccaaaccaaattgtaacctcccaatgtgatccaggtaatgactagcaaagtttgagctagactcagttctcctgattcctacaagagtgctctttccactagaaaaaattagggattaccagcccaaaaagacggaaaaatatcaaagtgttattgttattgttttacagcaaatctagtaaggggatgaagtaccaattcatgtccatacatccatgtaagtacaacataccctgctgactccacaatcattctcaccatgtgtaataatgataaagtagttttcatgtatacctattttgactgtactttatcatgaaaccagatggcactttttgca

SEQ ID NO: 492086 - DNA, 594 bp, Homo sapiens
gacagccacagaactaagagaaacagaatccagggtgaaaagagaactaattccagataatggagcagtgcagggaaggtgggtgccacaatggggtgtcttttttatayctgagagcagtgcttccctgggcaagaagaaagaagccctgaaagtagtttaaatactcaaaggaaaaattggccatcttaaaatttaacttagctcaacttttactctcctaaacatacttcaagtatcaggataccagtaccccaaaccaaattgtaacctcccaatgtgatccaggtaatgactagcaaagtttgagctagactcagttctcctgattcctacaagagtgctctttccactagaaaaaattagggattaccagcccaaaaagacggaaaaatatcaaagtgttattgttattgttttacagcaaatctagtaaggggatgaagtaccaattcatgtccatacatccatgtaagtacaacataccctgctgactccacaatcattctcaccatgtgtaataatgataaagtagttttcatgtatacctattttgactgtactttatcatgaaaccagatggcactttttgca

SEQ ID NO: 492087 - DNA, 607 bp, Homo sapiens
ttttcactttgtaatattctggctctaacttccactggtcccttcataggtcccacacatctcccttcagccatgaaaactcttcataaacacctaatttcttagggggtttcttcctatctgaggttgcacatatattgttacctttaactcatccacaagtaaattcactgtctcgtcaactccacagtgtggtcttcctcctgcatcactctcgcagtgatggcagcccccatcactcacccagggactagacagggtgccagggtaggttctyccatcaatggattgctgggctgtaagttcgaatccttcgtctttgctcaggtgccgccccaggctccttccaagtccccctgcctctagtattatttccttttaatgcactttcctcactgctgctagaaagagcttttcaaaacacaaatctgaccatgtctttcctctctctacaatctccactggctccccattgcccttccctcgaagtcctttcattatctggtcatgcctacctgtccagtgcccctcttgttgttctgctgtgaacatgacaccctggctgcataaaccatcagcagtttccagaaagtgggctactctttct

SEQ ID NO: 492088 - DNA, 607 bp, Homo sapiens
ttttcactttgtaatattctggctctaacttccactggtcccttcataggtcccacacatctcccttcagccatgaaaactcttcataaacacctaatttcttagggggtttcttcctatctgaggttgcacatatattgttacctttaactcatccacaagtaaattcactgtctcgtcaactccacagtgtggtcttcctcctgcatcactctcgcagtgatggcagcccccatcactcacccagggactagacagggtgccagggtaggttctcccatcaatggattgctgggctgtaagttcgaatccttcgtctttgctcaggtgcsgccccaggctccttccaagtccccctgcctctagtattatttccttttaatgcactttcctcactgctgctagaaagagcttttcaaaacacaaatctgaccatgtctttcctctctctacaatctccactggctccccattgcccttccctcgaagtcctttcattatctggtcatgcctacctgtccagtgcccctcttgttgttctgctgtgaacatgacaccctggctgcataaaccatcagcagtttccagaaagtgggctactctttct

SEQ ID NO: 492089 - DNA, 397 bp, Homo sapiens
ctgtgaggaatgtgcctagctattacctccttcaggatctgcgtcaacttctgatgggaggtcctgttctttttggaacagcctctagtcctaagcaaggtggtggtagcctggtctggcagtttccactcaacccgggactctgatgggcatcctttgctttgcagctcctgcatccaaccttgtgaagcctacagagctgtctgaggctccagcytcctgcctctgcctctttcctttcataggcattatctcctctcagctccttgtcttccaactctgtctcagcacctgcttcttggagagcccagatggcctcactctgctgtgtctcagctccttgactgcaccctctcccgcctcagtgtgctcatctctaaactgagctaataacacc

SEQ ID NO: 492090 - DNA, 581 bp, Homo sapiens
acggctggcccagcaggaggggctccgcggggcaattgcacccggcctcccacccctgggtgtgcaactccagagcttctgttcggaaaacacaggccagccggagcctgtgacctccacggcccgaagaagaggggcggattcaggcctgtggcagcgcgggcctttcgcgctcccgcccctgtctgttctcagatttttccctcggctgctcaacgtcaaggctacacaacccgtcaagggagtgtcagcggtgcgcmcgggtttgacaaatcatagttcgctgaaagaacgaggtgcccgataactgtgacttaggcgcactttattctgtcttggtcgtttttatttgggagggagatgtgttagggacttgctgtatccggtggaaactatgatgctgctattctcaaaaatgcacctacacacctagtttgcaccttccacttcaatatcctttgatctggagataaaaacacagcctttcgccttccccatgcttgacccactctgttacccaaggccctggaagcagcccccaggctgacccttgatggggggcagcaacctcccggccccca

SEQ ID NO: 492091 - DNA, 580 bp, Homo sapiens
gtggatgacccaaggtcaggatttcgagaccagcctgaccaacatggcaaaaccccgtctctactaaaaatacaaaaattagccaggtgtggtggcaggcgcctgtagtcccagctactcyggagggtgagacaggaaaactgctcgagcccacgaggcagaggtttcaatgagctgtgatcacgccatggcactccagcctgggcgacagagagagattccgtctcaaaaaagaaaaaaaaagaaaaataaccagagtgggagaggttgataatacaagagagaatagatctaataaatagagatttatccaagaaaactggaggaaatgagatccagagctcgggggcaacatccacactgggctcttcgaggtaaaggagatttaaaaaaatattattctacaaaaaggaaaaaagagataatgcattgggggtacagaccagaggctagttttaggcaagacagtgagagggtggcttctattttccatgtgaattagagaggcttgcacatctgctacagggctcaagaaacaatggacttttaagaaatatggtagaactgccataaagcatga

SEQ ID NO: 492092 - DNA, 619 bp, Homo sapiens
tgtttcctctaatcctccttaaacactattgattaaaatcctaagtatattcaggtttccatcctttcctacttcttccaacagcattttgctacctttaaatgacaggctaagtacacttaaatgacatagactaagtactatggttactactcatggctgcaggatgtcagaaaattaatttgaagcactatcaaaattattttcaaatttgcctggtatttcgtcagaattttaactggtgagagatcatgatcttaaaaatgcaatctgaaaaataaaatgtgcatggggcaaaaagaaatgaaaaagaaaactagtattttctaaggaagggagtcattttctgaatataacttttgttcatctttacaaagatgaagtgcattgctatcttaagattcaaaggacttcttcaactgttcagaaaataccaatattccacacctaagatgctaaaaggcaggattgtttagtagaccgtttactcataaagtatctttctgygtactctgaatgtatttatcctggatgtgttacttgctcccaaaggaaggaaaaggaagtgaaaccactagggatataatgaattgattcttctctgtgaaagtctcttcag

SEQ ID NO: 492093 - DNA, 619 bp, Homo sapiens
atcctgggtgtatctgtgagggtgttgccaaagaagattaacgtttgagtcagtgggctcggaaagacagacccacccttaatctgggtgaacacgaacaccatctaatcagctgccggcatggccagaatataaaacaggcagaaaaacgtgaaaagactagactggcctagcctcctagcctacatctttctcctgtgctggatccttcctgcccttgaacattggactcccagttcttcagttttgggactcagactggcttccttgctcctcagcttgcagatggccgattgtaggaccttgtgaycatgtgagttaatactccttaataaactctaatatatatttaccctattagttctggttgtcaagagaaccctaataccagaacatttacacttgccctagtataagtcactgagtctcagtggcatggacctgttctcgggacccctctttcccagcaaatgcttgaagcaagaaccattaaataataggacggctgataatctcctgattccctactcactaccatacacctccacctgacccctcttaggctccctggcctccttccctggggcctggcgtggtggagcaggttgaattctccctc

SEQ ID NO: 492094 - DNA, 619 bp, Homo sapiens
atcctgggtgtatctgtgagggtgttgccaaagaagattaacgtttgagtcagtgggctcggaaagacagacccacccttaatctgggtgaacacgaacaccatctaatcagctgccggcatggccagaatataaaacaggcagaaaaacgtgaaaagactagactggcctagcctcctagcctacatctttctcctgtgctggatccttcctgcccttgaacattggactcccagttcttcagttttgggactcagactggcttccttgctcctcagcttgcagatggccgattgtaggaccttgtgaccatgtgagttaatactccttaataaactctaatatatatttaccctattagttctggttgtcaagagaaccctaataccagaacatttacacttgccctagtataagtcactgagtctcagtggcatggacctgttctcgggacccctctttcccagcaaatgcttgaagcaagaaccattaaataataggacggctgataatctcctgattccctactcactaccatacacctccacctgacccctcttaggctccctggcctscttccctggggcctggcgtggtggagcaggttgaattctccctc

SEQ ID NO: 492095 - DNA, 302 bp, Homo sapiens
aagtagctgagccagaatttgaaccyaggtcagtttgacttttcatcatgaatgcttcccactctgacatgatactttttgattgtcacacacattatacctttgtggcagaagcagacccatgagtgggaggtctctcattgcatctgtttcttccaagagctgggacattacgaatgttttttgaatgtctacttcagcagggaggaattccataaaatgaagtttgtttgtattggtttggtacctagaaatgctcagggagttccttccactcatgatcctaaaatgtgtcacagcaa

SEQ ID NO: 492096 - DNA, 609 bp, Homo sapiens
caatctttatataaccaccccaatcaggaaacttcccatcccgccaaaaggccccctcacgtgctctccctgtcagtaccccatgcaaaggtaaaatagatgatatttttaaacatgggtcgtgtttaaaagaaatggaaactccttcagagaatgaaggagaaccacactgggtagaaggttattcctggggctccaccccttgctccatcaagtcctctgagcatgagctgggctctgagaaggaagagacaggaaccaattggtcatgtccacgtggcctcagaagctgagtacgtgacggtcaccagatgcctaggcagkctcccttgaaatggcagggctgctgtccaaaatcctgctgggtcattgctatttacaggcagccttcccggcgtgcggtggatatcccaagcggggctatttttaagcagggctatggcctgccgtgggttaagctggtgtggacagaaagcgagatgatctagccatctactgcagggggcctgatcttgaacagaaacctgactgtaattgtccctggatccaggtcccagacaaagacgctggaaggaggtccctccagcccctggctcagggcccggtcag

SEQ ID NO: 492097 - DNA, 229 bp, Homo sapiens
ccccctaaaaatatcagagaagataatacaaaatatttagtttggagtccccttgaaattattttatttatttatttatttatttatttatttatktattattgtagagatgaggtcttactatgttgcccaggctggtctcaaactcttgggttcaagtgattctcccacctcagaccctcaaaatgctgggattacaggtatgagccactgtgctagcccccaaatt

SEQ ID NO: 492098 - DNA, 507 bp, Homo sapiens
tagttttcattgaaacagtaactctcttatttatcctattcttatgtaattggtttctataatgtgtattttaattacataatttaaaaaaatggctcaagaggccttagcaggcttaagaacaaatacawctcactcctggtaagcagacagctcagctggtgaaagcctcaggacgcagagcacaggggagcagcccctggtgtggagcgataatgacccagtgggtatctgtccacctgcttcacagaaggaatggtgagttggctaagtggagtggtttaggaaaaattctgtgccggtttaaatgaaccctcttcatatcttatacaataataatgcattagcaaagctatgaatttgaccagggcacagtgtgcgtttagttctatgtcctgtgtatttgtgtagctatgacaacaatgaagatatagaacgatttcatcaccataagcatctcctctgtgctaccctttatactcacgcccatctctttctcccctggca

SEQ ID NO: 492099 - DNA, 618 bp, Homo sapiens
ctgaatcgttgctgctcagattcaagtagcctttaaaggtaacggggaaaaatgctaaccattgagaatcaggggtaacagggataaggaagcaaaccacaagaaggagactgtggtgggtaaagaagtcagaagcaaaacaaggcaggtactgttttcatgcctagtaaataagaaaaataaatgggaaaattgtaactcccagtgctggtcaggacatggtaaaacggacaaccctgagtcctgaggctaatggtgtgaatggacacagcacattttgaaaagcagtggcgggaggcatgaagggccaaaaagtgttgctgcccttgacctaataattgtactcaccagggaattaatgggaggaaaaactgtatgcacaaagaagttcattgcaacagtatctaacaggccaaaaaaagagaaraaaaggccataaatgcatgcccagcgcctgtgtatgtggacaggaacagagggcagcaagaaggcccttgtgtgcatggtagctggcagagggaaaggctggcacctgacagccagaggggcagcagctatagtgatggacagcagtgagagcaggctgaacgtcggagcctgggaacagcagtgataggt

SEQ ID NO: 492100 - DNA, 334 bp, Homo sapiens
ctcgctgcagaccctcttaagcactcaggatctacaactgccttcacaccacccccacatactccaaaacgtaagtgctgatgtggaccaggcctgaggaggctttggaggaagtctctgaagtcgtggaaggggagatttgaaacctggagcayggctactactctaggtaaagagggagagaattcaaacttgctaacaacctagaacccccactcagaagtggttttcctgaaagctcaactcagaaaaggaaaccctgcaggaaggcacagaagcccagtgggagagctacctgagtgtctgcggtgaggaggactgacattccaaaagg

SEQ ID NO: 492101 - DNA, 522 bp, Homo sapiens
tctacttcccatccacagcaggatggaayggaccaggtcactgctggttaaattctctaacatcctgagacctggacgggtgcagtggctcacacctgtcatcccagcactttgggaggctgaggcgggtggatcacttgaggtcagcagtttgagaccagcctggagaacatggccaaaccccatctctactaaaaatacaaaaattagctgagcttggttgcgcacgcctgtaatcccagctacttgggaggctgaagcaggagaatcgtttgaacccgggaatcagaggttgcagtgagccgagatggcgccactgcactccaggctgggtgacagagcgagactccatatatcctgagaccgatttgaggatggagtctgccgcactgactcccattcagcccctcttaggaagagcactcccatctgtctttgggaaatttccctccctcttttcacagatggtgtggttgacagtgcagtgaccccacctcagctctagcaatggtcatgtgaccc

SEQ ID NO: 492102 - DNA, 329 bp, Homo sapiens
caatgaagacataatgacattcctggccttgcactgtgtggggagaagggctcagccttggggtctacacccaagtgatcatcagccctcccacccacccactttcccatctatgcaccctcctaccaccacccatccatccatctgcccatgtatttatctgcccatctacccatccatccatgtatttattcatccgtccaccatctacccatccatccacccatgaattyatccattcacccatccatccatccatccatccatccatccatccatgtattcatccatcatccatccaccccaccatccacccatctacccatcca

SEQ ID NO: 492103 - DNA, 554 bp, Homo sapiens
ccgtaaaagcttgatgtttctgacttggctaatggagtgagagggcacgggttctgtctgcgggtaacgcaaatcagtgccgccaccatcattcagtgggtgtcagagctggccagtgcagtccccgaaggctgcttgccaatgctgggaataaatgatttcccctctttatttgctatgtcaaggaatgataatggagcacattccatgaccatttgtcacggaagcgcagtcccctccatggggaatgtgtgggagtagcaaggacctagtgttttcaattaatcagggccaggawtactcacgcaggaaatgaaagagaaaatttaatacttggaaatcgggtgaaagcagcaaccaagtctaattaaaatacactttctgcttcgaatttacatggcaggatccattttatgagtcacctttattcttgttgcatttctcttgcccctggaaactgccttaggcaaaagcacccaggagtttacacctgtgcaggtggtttctttccaatgacctcacgtgaaggcaagactggtcaaagcagatgggtt

SEQ ID NO: 492104 - DNA, 625 bp, Homo sapiens
acaaccctgagagacagctactgccattctacccattgcacaggaaagctcactggagctccagggggctgacctgctgcatttacaccactgctaggaagcaggatttgaactccagctaccacggtctgtccccggagttcctgcgttgacctcagatgatgtaaagcttgtgtaagatgctgcgggaattccagatcgtttcrgtgactatggccccagaacacagacagaggtcccctccccaccatggcaggatctgagtgcaacaggaggctcccacccactcccagggccccacaggcacagccacagccacttctgaccctttattggggcactgtcggccccaaataaatataatacattaaacccagagctgagggaatcgtgcaccccaggaggcgccccccacaacctcagccgggcaaaataagttagtggggggcctgccagaggccgggccagctccctggtctaaagtgcatctcggttccgtggtccccacgtctgcacagcccctggttgggccgtcgggaggggcgggtgggagatgcctggcgctcacaccgtgccagcagtggccgccgaggctctgtgtgtccatctgtccatgtgggggaac

SEQ ID NO: 492105 - DNA, 506 bp, Homo sapiens
caaaaaactttaaaatttcaggtgtggtggcatgcacctatagccccaactattcaggaggctgaggtgggaggatcacttgagtctgggacttcaaggctgcagagagctatgatggtgccactgcactccagcctgagtgactgaatgagaccctgtctcttaagagaaaaaaagttttaaatgaagttgcatccctacctcacaccatatacaaaaataaactcaaatggatcacagacctaaatgtaacagctaaagctataacattcttagaagaaacataagggtagaccttcatgcccttggatttggcaaagaggtcatgaagtacaaattacatgtgctagtcattagtctgatgccataccagggtatggacagttcagtgtgacacttaaacctcacccattcagactggttggagagccagctagaatgaggsagacatagatgttttaaaaggagcacagattgtagcctctgaagaaccctaaaacagccct

SEQ ID NO: 492106 - DNA, 646 bp, Homo sapiens
agcaatttaataagcaaatatacagtaagtatctgtaaaagttcttgttcatagactccagaggccaggcacagtgactcatgcctgatgagtgtctctcccagcactttgggaggctgaggtgggaggatcgcttgagtccagaagtttgagatgagcctgggcaagatggggaaaccccatctctacaaaaactaaaaataaaaaagttagccaggcttggttgtgcacacctgtggtccctgcgacttgggaggctaagatggatggcttgagcctgagaggttgaggctgcagtgagctctgattgcaccactgcaatccagcctgagcaacaggagactctgtcttaaaaaaataagaaaccaaaataagttttaaaaatatgtagtttatagactccagagsaatggggatgtcccttcaattcatctaacagacatttatagagcatctactttgtgttggtcctggtctgagccctgaggatgtagcagcacattggagctcctcatacatctatgggtagggggagataatcagcaaatggaaagacacaggccttttcctgccccactgtgagacctggcacaggtataaaagggcctcaaatggggcctgacgaacttgccactggcaccatgaa

SEQ ID NO: 492107 - DNA, 512 bp, Homo sapiens
aaaatttagtacatatataagggactccataactattctcattctttggaagggacagccctgcttcaatgggagcaaagactagcgagcaataaagcttgtttgtgagtcacagaagtcacatgcctagactctgatctctcctctctgtcccgtttcttgcttgtgtagcaatggcctagaggtgaacagccacaacagcctcagcaatccagaacacattcagattatttgctctgccattgaccttgtgcacaggagactaaatctggaagtcctgaaaatatctgtgtaccstcatgcctcacagctatagcacactctggaagcatgtttagatggggcacataccctctattttgttgccctgagctctatgaatcacatgcagtatgtgaatgtaattatggtggtctgcaatggcctcagcccactcatgatttcctccagggaagcggagggagtacagaggtctgccttcactgagcaccctgggtaacctaaggtacact

SEQ ID NO: 492108 - DNA, 578 bp, Homo sapiens
gctacattgagccatgatcacacaactacactccagcctgggcaacagagtcagaacttatctcaaaataaaataaaaattaataaaatagaaataaattttaaaaataaatcaaggcatcataagtcagctgtgtctttgtgtattctggggaagcaacagcatgtccttaggaggcgagctcataatggggactgtggtttcaggtcttacctctaccctgccttgttctctaagtccaggacaaggatccagtgtgtgcttaaaaggccctggrgtattcttctttctctttgttgagaggtgtactgacataggcatgagcacacccatcatttgcattaggctttgagtgtactgaagacctcctcaccccttagtccctttgcttttctctggaaccctatagggtggttgccatccctcccattttgtaggaaagagaacaaagtaccgatggtgttgctatctttcccaactgtatgcagccagtacttggtagagactggattcactcagagttctttattccaaggttcctggtttgatacaggaaaaatttcaatatattgaacaag

SEQ ID NO: 492109 - DNA, 578 bp, Homo sapiens
gctacattgagccatgatcacacaactacactccagcctgggcaacagagtcagaacttatctcaaaataaaataaaaattaataaaatagaaataaattttaaaaataaatcaaggcatcataagtcagctgtgtctttgtgtattctggggaagcaacagcatgtccttaggaggcgagctcataatggggactgtggtttcaggtcttacctctaccctgccttgttctctaagtccaggacaaggatccagtgtgtgcttaaaaggccctggagyattcttctttctctttgttgagaggtgtactgacataggcatgagcacacccatcatttgcattaggctttgagtgtactgaagacctcctcaccccttagtccctttgcttttctctggaaccctatagggtggttgccatccctcccattttgtaggaaagagaacaaagtaccgatggtgttgctatctttcccaactgtatgcagccagtacttggtagagactggattcactcagagttctttattccaaggttcctggtttgatacaggaaaaatttcaatatattgaacaag

SEQ ID NO: 492110 - DNA, 628 bp, Homo sapiens
cacttcatagtgtagaaagccctttttacctccactctataaattcttaaaataccgctgctgccaataatctgggagtgtctttctgggtcagctgtggctttgggcagcagcatcctaccttgctggttgtcactgattgtagccacttcccacaatcatcatgtaaaagcaaaaacacaaatggaaagaaataaggaaatggagcccaaactttgtcttggggaagaaaagctggggttgggggcattgagcacttctccttggccatctcctcatagctttgccccgacrtgagtacaaattctgatgagaatttaaaacagaatatgactggtgctgtatcaatgtcttttcaaatttcaggtcagaattttaaaaatctaaaaacaagacattaaataatggaaaagaaagcccttgattttcccattttcttttgcattggattgcaggttgaagccaatgagaaggaggacagagtgagtgcagaaagcgggagaaagttcaggcaagaaaggagaatgcatagaggtgtctgctccaagcaaagccttctctgcactccctcattgaatagacaaaacataaaaaagacagcaaagaaagaaagacagagggctgggcg

SEQ ID NO: 492111 - DNA, 349 bp, Homo sapiens
ggcagcttagcttctccccaagggaggcatggaactgtagcaacagtatctgtgtcatcttcccaacaaggtaccctgaatgcttcctgtgggtcaaaatctctgcaatgtggcagataggatcgtgcaaaagatggacccacgggaagaaaaagaaaaccaaagataagaggtggggacctttgtgcactgctggtgggaaggtaaaatggtgtggcttccrtgggagacagtatggtggcttcttaaaaaattaaatggccaggcgcagtggctcacgcctgtaatcccaacacttcgggagaccaaggcgggcagatcacctgaggtcgggagttcgagaccagcc

SEQ ID NO: 492112 - DNA, 622 bp, Homo sapiens
gggcaacatagcaagactctgtctcttaaagaaaaataactgaaaagttcaccaggtctggtggtacacacttgtagtcccagctacttaggaggctgagggagagggattgcttgagtccaggaggtcgaggctacagtgagctatgattgcaccactgcactccagcctgggcaacagagttagaacccatctaaaaacaaacaaacaaaccaaaaaaccaaaaaaaccattctccctaaaacattttagggagaacagagactatgacatatcatgacctgtggtgaggagtggcccactaggggcatatactgtgggattcgagactccctcttcaactcgcattcctttaagargcagacctgccatccccatttcagacgaggaaacagaagtgctgaaaggtctgccgccctccctcaagtccaagagcaggaggctgacgcgtccgtggctcccctcctggcccatgccctgcccacctgccctgacacgtttggttacgtttagccacagctcaggtgtcttggcctctgggagcctccctggacctgcctggacagagtgggctgctcacttcccggagccttgatgctgtttctttttgttgttgttgttg

SEQ ID NO: 492113 - DNA, 614 bp, Homo sapiens
gggcagccagcatggcattgacaatagcaatagcatgggcaagatgattctatgagtcccaagtgatgtgcattaatgttggtgctggctgcaatgggctggacaagacagcctttggacccacagttggcacttgcaggtaggcgccaggcaaggtagtagcagccagaagtttagatccaacctcaagcccccagaagaagtgctcaggtgcccaaggtagtgaattgggtcgagcaatccgcaggaccctgggctatgtgctctgtctcagagcgggagaggtgaggtgaagctgagctagatgggtttgtgctcaggtcctcaatgttracagcaggcactcgtcattgtgggcagggtcagagcaatcgtcgggtcccaggcagaggattactgaagagggtagggccatcttgagtggtcatagcctgggtcagttgaaggtggcggaagaacatatgtccctttcacactccagtcctggaggggctcgacaccccccctcacctggttgctggagctcccatctggcttgcaaacaagttccaatggcaatttgtgcccctcttgcatccttgtctcagatcctggcagtgcttgcttcacagcca

SEQ ID NO: 492114 - DNA, 632 bp, Homo sapiens
ctgaaagggagagcaacacctccatcctgtaagctccaacagcatcttcccgacagccacgaggagccacatccagttctttcctccatgtttttatgagcgaataggttgactggagtttgaacttctgggttcaaaccctcagaagttcaaggttcaatcccccattgacctattcccacactcgatatccatgataagaatgattctcagggtacattgggcttgttgacaaagaaaggaggattttttataagaatttccatctctgacttttgtccaacaattagattctattccttgtttctaaatgaaaatatgaagaaacacatcctttcggaactaaaataaataacactttgaagttgaaacagagaaaatatgaggctgcacatggaattagtaggaaattatgctctcatttgaggttattctgatttckccaaggaagatttaagctcaaaaggtaaggtggacagggaatcaccccatggtgagacacatagggatattcgggcatagagtacaagctaattaagcttgatatgtacgaggaatttctcttagtaatcaatgagaatgtgaagtgtacagaaaataacttttgatgaacaaggaagagcacatgaatt

SEQ ID NO: 492115 - DNA, 446 bp, Homo sapiens
ggagcaacaactgcctgaagggtgatgtggggattagagacacgtcttggaggaaaaggggacttgcagcattctcagcatagagtagaccagagtttctcaacctcagcactatcagcattgggaccataattctctgatggggaagaggaggtagtaaggctgtcctgtgcattgtgggacatttagccgcataactggcctttttccattagatgctagtggtaacaaccaccaccaccccagttcagaaaaccaaaaatgtctctagacactatgaagatcacatgggaggcaactttgcctggttgagagtcagtggagtagatgttagaaagtgcagtgatgcttgggaggatgrtgacgttaatgatggagataatggtaccaatggtgatggtggtgattatagtgggaatggcaatgatgatgtagattaatagtgg

SEQ ID NO: 492116 - DNA, 581 bp, Homo sapiens
gatggggacgcaggatcaggatggaggtctgaggtttcacccagggggaagcccagtctctggtccagctccttctctgagcccaacatgcttaattgtacccgcctcccaagacggggctcccgtcccagccctgccctacggcccccatgaccttcccctgtggctagtcctggagctggttccttacccatcacacgcacagagagcttggaagatgtataaccgtatttcatccatttggayttcaaccgaaagaagtatgcagcattgtccctcctccgggcatctctgatgctcagggagcagttcttccttctgggatcccagaggaggtggaatcggccccgggtctcctcctgcacttcttcgtctgggtcgtttgtggccactggaacatcagccccttccaggaaccagtagccataaccatagtacgaggctggaagggtagtgggcaatctgcagggtacgaggacgcacagaccctcctgcaccgtcagtgactctggcccctccagctggaatctccgctcctgagccagggcccctatggagacatgagggtcagctcggcccag

SEQ ID NO: 492117 - DNA, 532 bp, Homo sapiens
ctgaaaacatccctgacagacccatctccctggtattcagggagggatggactaggcaatgattcagaagtcatactgaaaagctgcccttttcctactggtgcccctgcagtstgagcccaagcagacacatacttcagaggtgctacatttgtgctacaaagcacagatccttcttgacctggaggccagccttacccactgagaccaggttcctgtagttctccagcatcacttccctgtacagggacttctgtttgaggtccagcagtccccactcttccggggtaaaacccagtgttacatcttcaaaggtcactggttcctaaaaatccagattcttgttcagccacaggccatccgcatccacgacaaaagaaagacaggggaggctgaccaggccagtgaaagcacagaatggtctacaagatgacccaagggcattttgggagtctcatcctgagttcctgtctttgtctgaaaccccaagcaaacccaagcttgactctattcaggttacaataaggagagc

SEQ ID NO: 492118 - DNA, 571 bp, Homo sapiens
taaacaagaactagaaaagaaaaaaaaaakaggctgggcaccgtttttgtaattccagcactttgggaggccaaggcggatggactgcttgaaatcaggagctcaagaccatcctaggcaacatcacaaaaccctgtctctacaaaaaatacaaaaattagccaggcatggtagcatgaggctgaggtgggagaatcccttgagcccaagaggttgaagctgcagtgagctgtgatcacaccactgctctccagagtgggcaacaggtgagaccctgtctcaaaaaaaaaaaaaaaaaaaggaaagaggaaataataggacatcaaaatcacagattccacaccattagaactaggaggaaagctgagcccagtgactggctccaaaatgaatacacagggccgggtgcagtggcgcattcctgtaatcccagcactttcagaggctgaggcagataagattgctttgagctctggagttcaagaccagcctgggcaacatggcaaaatccagtctctacaaaaattggcccagtgtggtggctctcacctgtgctcccagctactcagga

SEQ ID NO: 492119 - DNA, 571 bp, Homo sapiens
taaacaagaactagaaaagaaaaaaaaaataggctgggcaccgtttttgtaattccagcactttgggaggccaaggcggatggaytgcttgaaatcaggagctcaagaccatcctaggcaacatcacaaaaccctgtctctacaaaaaatacaaaaattagccaggcatggtagcatgaggctgaggtgggagaatcccttgagcccaagaggttgaagctgcagtgagctgtgatcacaccactgctctccagagtgggcaacaggtgagaccctgtctcaaaaaaaaaaaaaaaaaaaggaaagaggaaataataggacatcaaaatcacagattccacaccattagaactaggaggaaagctgagcccagtgactggctccaaaatgaatacacagggccgggtgcagtggcgcattcctgtaatcccagcactttcagaggctgaggcagataagattgctttgagctctggagttcaagaccagcctgggcaacatggcaaaatccagtctctacaaaaattggcccagtgtggtggctctcacctgtgctcccagctactcagga

SEQ ID NO: 492120 - DNA, 638 bp, Homo sapiens
tgccacttgctcaggtgagtgaagacatctgtcaaaagtcagaattttatttttattttattttatttttgagatggagtctcactctgtcgcccaggctggagtgcagtggcgcaatctcagctaatcgcaacctccgcctcccagtttcaagcgattctcctgcctcagcctcctgagtatctgggattacaggtgcccgccaccacacctggctaatttttgtatttgtattagagacaaggtttcaccatgttggccagggtggtctcaaactcctgacctcaggtgatccacccacctcagcctcccaaagtgctgggattcactcacaggcgtgagccaccacacccagccaaaagacagaattttaacaaatttggttaaagatcgaattggcttttatttgtgattcatgaatctgggcagcctccactctgcaaaacggaatgagrgctcccacggggcaaatggtagaatagtggtttttgtaagatagagaaaaggctaattagttaacactaggttacttttcttgtaaggattaaagcagaggggacttccttattatgctgctcaggtagactggaaatctggtttgtttagggatctacctgcttaaagtatcagtctgatta

SEQ ID NO: 492121 - DNA, 642 bp, Homo sapiens
ggtacagggccagaaggatctgagagagtgtggccagcttgagccctcaggagtcggccagaaggatctgagagagtgtggccagcttgagcccctcgggagtcagctcctccgtccccactggtaacgtcttcaccccttcaacacggtgtgaagggccatgtcatggttgatcttcagtccctcagactacaccatcagccccatgggggtgagcaaataacaagtaactatactgttccctgctatgtgtctggctcttggtaaaatttaaaaaagttaaaaattgttgtggtttgaatgcaacatttttgaatggaaatctgcttccccatttttcttttttaataactttttattttttttttgagacggagtcttgctctgtcacccaggctggagtgcagtggcctgacctcggctcacggcaacctccgcctcccaggttcaagcgattctcctgcctcagcctcccgagaagctgggactacaggtgcccgccaccacgccgggctaatttttgtatttttagtagagacggggtttcaccatattggccaggttggtctcgarctcctgacatcgtgatccacccgcctcgacttcccaaagtgctgggattataggcgttagccaccgcgc

SEQ ID NO: 492122 - DNA, 617 bp, Homo sapiens
ccttgaacccttcagtacttcagtttcctaatccctcagcaggttaataaatttcctccttgctcacctcacagggttgataaaataatcagagctagtaatgatcatgaaagtacctggaaaaccatggattcctacataaacctaaggtctggataattttaggagtctgtccagagccacacctgagtcaagaataactaagaattccagaaacaagatttccaagtttctgtccatgtttcagagcaaaacagtatttccaggaggaaggctctctacatttttgagaaaaacactgaggtggggagagggcagcgggagcttgagcttcagcttgggtttgaagcctgccgggtctgagaggcgaatctggcagcccctgaagcccaggggtgccgccgcctcattgctgcagggccggtgataaagtgagggacagcccagggtcctgtgtcctcttacccagggagctggcaggcagatgggataaaggaaacccagcatgggaagagaggagtgrattctagcccactctgtgtcttccccaactccagtctgtgtgggacagccagcagtaccttccttctcatcttaaacatcctagccagaaacag

SEQ ID NO: 492123 - DNA, 515 bp, Homo sapiens
atgtttttccagtcacctgacygctcatttcaatgcttttcctcaccttagtcacataatgagtgattcccaaggattcgtattcatatattttcctcctatttccacgggatttttcatgatatatagcttgactgactgaggcaaggcaactcttacatgatcattgtgatttcaacttgctttattatttaatgtatgaatatactcagaacatcttttcaagtcatgacatttagatcatgtttttattggctgcagaatataccacagtttggatattccaaaatttgtttaactctttcataattgatggtcatttaatttgtcatcatatttgttttgatagtgcaactagttttacaataaacatcatatttggctttatgaatttatacttttgttttataacatatattccacattttttggaatattttacttctttctggattctcaacaatatttaaactccatgaatgctaatatatgtctgttagtaaactgttgaatcc

SEQ ID NO: 492124 - DNA, 515 bp, Homo sapiens
atgtttttccagtcacctgactgctcatttcaatgcttttcctcaccttagtcacataatgagtgattcccaaggattcgtattcatatattttcctcctatttccacgggatttttcatgatatatagcttgactgactgaggcaaggcaactcttacatgatcattgtgatttcaacttgctttatkatttaatgtatgaatatactcagaacatcttttcaagtcatgacatttagatcatgtttttattggctgcagaatataccacagtttggatattccaaaatttgtttaactctttcataattgatggtcatttaatttgtcatcatatttgttttgatagtgcaactagttttacaataaacatcatatttggctttatgaatttatacttttgttttataacatatattccacattttttggaatattttacttctttctggattctcaacaatatttaaactccatgaatgctaatatatgtctgttagtaaactgttgaatcc

SEQ ID NO: 492125 - DNA, 515 bp, Homo sapiens
atgtttttccagtcacctgactgctcatttcaatgcttttcctcaccttagtcacataatgagtgattcccaaggattcgtattcatatattttcctcctatttccacgggatttttcatgatatatagcttgactgactgaggcaaggcaactcttacatgatcattgtgatttcaacttgctttattatttaatgtatgaatatactcagaacatcttttcaagtcatgacatttagatcatgtttttattggctgcagaatataccacagtttggatattccaaaatttgtttaactctttcataattgatggtcatttaatttgtcatcatatttgttttgatagtgcaactagttttacaayaaacatcatatttggctttatgaatttatacttttgttttataacatatattccacattttttggaatattttacttctttctggattctcaacaatatttaaactccatgaatgctaatatatgtctgttagtaaactgttgaatcc

SEQ ID NO: 492126 - DNA, 540 bp, Homo sapiens
ttttgtgtttttacttgctatttaatattgcactctcctgggcatggggataatagtagggtaagtgcaaaccctagtaggtgcctgagggtcccacaccactactcagcacatgcgcccagcccactaaagtccacccctgccaagtcccgtgcttaaccaggaaaccaacatgctgtgtcccacccagagcaaggaaattgagccagacatctaccctaaccacaggccaccaccccacccctaccacaatagaagaagggcaacctccaaggctattttaacccctgtgcagaggcatgctaggttcctgaattgactttaggcaaggggctcattcccgcagagtcacctccagtcctggactaggagtgcygccaccattccatgtttagagaggccatgttgcaagcactgctggctctggcccaccgctcctggctccgtcacaacacaggagaggaaaagcagcagtttctgggtgaggcagtgagggcgagttcaaacctggaacgctaagatgaaatgtttgggcaacag

SEQ ID NO: 492127 - DNA, 552 bp, Homo sapiens
gatccaaatctgccactaaaaattgaagttttcaaccaatattagaagtcaataagcaagcagggccyggacacagtagaagttaacctcattctgtgtttgactttcaaggatggactactaagtgctcaatgaaagtagccagtggccactgcagccattatttaatagaatggctccttgttccaaagaacacctgaaagaaagttcttgccatttatatataggatagtctgggagtctgaacatgttccgttagaaggatttgtagaaacagtcttgattttagttttgaatattcagggcctgatttttactgataagaatcaatacaggtcctggcatggaggcactttaggaggctgaggcgagagaattgcttgagcccaggagtttgagaccagcctgggcaacatagggagaccttgtctctaaagaaaaaaatttaaaaaattagctgggtgtggtggcatgtgcctgtagtcccagctacctgggaggctgaagtgggaggatcgtttgagcctgagaggtcaaggctgtggtgagctg

SEQ ID NO: 492128 - DNA, 552 bp, Homo sapiens
gatccaaatctgccactaaaaattgaagttttcaaccaatattagaagtcaataagcaagcagggcctggacacagtagaagttaacctcattctgtgtttgactttmaaggatggactactaagtgctcaatgaaagtagccagtggccactgcagccattatttaatagaatggctccttgttccaaagaacacctgaaagaaagttcttgccatttatatataggatagtctgggagtctgaacatgttccgttagaaggatttgtagaaacagtcttgattttagttttgaatattcagggcctgatttttactgataagaatcaatacaggtcctggcatggaggcactttaggaggctgaggcgagagaattgcttgagcccaggagtttgagaccagcctgggcaacatagggagaccttgtctctaaagaaaaaaatttaaaaaattagctgggtgtggtggcatgtgcctgtagtcccagctacctgggaggctgaagtgggaggatcgtttgagcctgagaggtcaaggctgtggtgagctg

SEQ ID NO: 492129 - DNA, 552 bp, Homo sapiens
gatccaaatctgccactaaaaattgaagttttcaaccaatattagaagtcaataagcaagcagggcctggacacagtagaagttaacctcattctgtgtttgactttcaaggatggactactaagtgctcaatgaaagtagccagtggccactgcagccattatttaatagaatggctccttgttccaaagaacacctgaaagaaagttcttgccatttatatataggatagtctgggagtctgaacatgttccgttagaaggatttgtagaaacagtcttgattttagttttgaatattcagggcctgatttttactgataagaatcaatacaggtcctggcatggaggcactttaggaggctgaggcgagagaattgcttgagcccaggagtttgagaccagcctgggcaacatagggagaccytgtctctaaagaaaaaaatttaaaaaattagctgggtgtggtggcatgtgcctgtagtcccagctacctgggaggctgaagtgggaggatcgtttgagcctgagaggtcaaggctgtggtgagctg

SEQ ID NO: 492130 - DNA, 488 bp, Homo sapiens
tctacctgccttaatctcaaggaacctggtgctgtgccatctgacttcccataagtcttataaatagagaaaaataatagagagatggatgaatggatgaatggatggatggatagacagacaggcaggcacatagatagatagagatagatagataggcagacagacagacagatgatagatagatagataaatagatagatagatagatagatagacagatagatagatagacagacgttggcttaaatgacccagccagggacaacaagggagtgaattctagccaatttcgtgtttctagtcttgagcttaatagaatttccttaggcatccatttaggagttcaaatkgtgtaccttagaaaaattgtgtagcaatgaacaaagagaaaaagaattctgtcctcaaatgagttgtgccattgctatgtcccccacattggataattatattaaagactcagaaaagtcttgaagactttccct

SEQ ID NO: 492131 - DNA, 478 bp, Homo sapiens
tgtgtggcccaggagccgccggccaccttacagcccaggtgccagcagccctgccacgtaggtgtgagtgatgttgctctaggatgctggcaggatgacgacatcgcctgagcacgcactgcccagatggtatcagtgtcgttaaggraagaatggctgtggcgaaacaaacaaacaagcaaacaaagaccgcctgttctgagtgtggagcttattattctcggcgtaattatgatgaattgttagttacgtttgcctctaggattgaggtagggggggtgatcccaattagggggtgccccaggggagcgccccaggagtcagggcttgtctcaaaagtccccactcctccctcagcctcccctccctccatccgaccccgttcatatcgcgggaaggtcccacagagtgcgtgtggatactcccaaaacgcaacggtgtaaacggggagggagggagagagactgaggagcccttt

SEQ ID NO: 492132 - DNA, 302 bp, Homo sapiens
gcagctgcgcgaacacgccggtcagcagcgccgccatgcccgccacatccagcgccacggccagcagcagcgccatccggcagcggcccaggccggccgcgggtgctggcgcggccgccggcgcggacggtgcacccggcgrgctcccctgcgaggcgcacaccgctggcgccgccgccatggccctgcaccgccgccgctggcgcccagagagagcgttccggggtgcggcccggtccggggcggggtcaggggacggcgccaggtgtgccaagctcccgcctggtcacctgaaccgggct

SEQ ID NO: 492133 - DNA, 625 bp, Homo sapiens
agctgtgtcctcagtactccgtgatgacgagtgagcctctgtgaaatggacaggtgggaaaacagctacctgctggcctgcccaggcacccgccacgggcccacgctgctcagcttctcaatgtgagactgtccacacctgcgaggtgtgctaaaggtgcaggttaggtggactgaccccaggacctccctgacccccaaccaggccagcggaagcctgccacctcctatgtgcggaccaccatcaacaagaatgctcgcgccacgctcagcagcatcagacacatgatccgcaagaacaagtaccgccccgacctgcgcatggtgagctggggtttggggatcaggcttggggagactggccagtgctgtggggargggcctcccactactggttgcaatatgggctggagagggatggattcttgctttcagcctactccccacacccagcattggcctagggggcggcttgtggagtgtatgggctgagccttgctctgctcccccgcccccaggcagccatccgcagggccagcgccatcctgcgcagccagaagcctgtgatggtgaagaggaagcggacccgccccaccaagagctcctgagccccctgcccccagagc

SEQ ID NO: 492134 - DNA, 507 bp, Homo sapiens
gtcaaacaacaacaaaacagtcttaatatagatgtggtttgtttctctgggcctgtgactacatatggatatttggaaacattacagtgtttggcgacaacaaagctattcattgttagtcaacagatatgcacactgtggtgaaaactcaaccaataaaattgttcaatttaatgcagtgattctcaaagtgtggtctccagactagcagcattagtgtcacttggggtcttattagaagcaaacaaattggaggctgtaccacagatctacagaattagaaattttggggaaggggcctggtaatgtgtggcttattggcccttccaggtgattctgatgatcattagtggatgcccttttactttcttaccttaaaatatcttataatcttgtttgatagtgtatatgaaaaagcacmattgctttttaaaaggtgaaaatctgagtcagcattaaggctaagtcatatctaaaaatcatgtgggcagagtattttgaaaacta

SEQ ID NO: 492135 - DNA, 603 bp, Homo sapiens
ctggtctcctttccttcagcactgtccttccccaatacactctctacagcacagccaaatactacaacctcaaagactttcccttttgttggaatgaagtccggaattcttaacatggatagcaaggcctgttattttctcttccttgtattattctcagcttcatctcccatcattctccagagcatgtgcaactgtcctctctgcaccctaaactccaccatatgcacattcagtaatgtggtaatgtcaagaactctccactttccaactttgcatatgctcttgtctctgcctgccctgtccatcatcttgctaatttctattcacactgtaggctttagtgcctcttccatgaaccattcatgaactccacatcacccagtcctaaaatcaagratgactgcttgcataacatcctatattctgcctcatcctggaagtgattatacttcattgtaattgatgtttactcatctagctttaccactggacctctggcttcacaagaatcacatatgtgagtatcttgctcactgtacaaccttagcccattatagtgataagcccatggtaggtgctccacaaatatttgttaagtga

SEQ ID NO: 492136 - DNA, 654 bp, Homo sapiens
aggctacacaacaactaaaaactaagaaatgactacatgataaattgtaatgaaaatcggaaggcagactgactgaggaatatatctctaacaagtattcaaagatataattttgttattgttaaaaagaatacaatgaatggagagagggtttggatttcacattcaggacttctgaagaccaagtataagagattcaaaagtgataatgtgaatctgattagaaaattcaattttggaatttaaataagaaaaaaattagttggtctagcaggtgaggctataatatggaaaaatgagaaagggatacagcactgaaagtgaaaatgtggaaagagagaagatcagaaggggagaaaaaaagaagaaataaagggttagagtttatgaactgtaccaaaagaaatgatacaatggccagtcctgtgagggtagtagagggatctctttattgtattttcttattttatttttattttagattcagggagtacacgtgcaggcttgttacatgggtaaattgcgtgaagctgaggtttgggcttgtaatgatcccactgcccacgtagtgacataggaccatagggagtttttcaacacttgctcayctccctcctcccacccttttggaatcctcagttgttcagtgtttcc

SEQ ID NO: 492137 - DNA, 627 bp, Homo sapiens
gctgccatattgtgaagagtccacttataggcacactggtcaccagttacaggtgatctcaaagctgaagctagcctcagcttccaaacaagtgaatgagcccaatcaagcttccaaatgactacaacctcatccagcatcattgaagctggagaactgtcctgctaagcctaattaacccacagaatcatgagagrcaataaaatagttattttaagccactcagctttgcatatatttgttaagcaacaaaatgtaatcagaatatgttgccacagtattctaggatcttccacacttcatttgctaccaatgatgaaatcttaactgttagccacctggtgggtgatctggctccaaaattccacacttaaagttccgctttcttgttccacttggcaccaactctctgaaatcaggtcccctgagaaacattagttaagatagagaagacaggcatatgcatatgaaaaggtgttgaggaataatcagaaacagtacctgtgagggcgtacaggaaagactgggcagaaggaaaggttgaactgcaatcctagaggtcccagccagtctcacagagagctctggagatgggaaggaccttaggagttgtcctgaattgaagca

SEQ ID NO: 492138 - DNA, 609 bp, Homo sapiens
accaatccacataaagtggtggtgcaaatatgaattttctaggaaagtattttaaaactacacttaataatacacattatgtcctatctcaacaaatatacaaaatagaaaactcctgagatgggaactaacggcataaaaaattttgaagaaggtctccaagtaattytgatattcatctctggcaaagaaactgaagtaaagcaccagttttaagtaagccttttctgaaaatttatcttcctccagaaaactgaatatacattagaaaaaaaagaatactgtatagttccagagtgtgctgggtaaagaatgacaaaattaaagttccctccactatcatgacaaacaaatactgactgacaaacaagtagtttagcgataccaacctctttattacgggcaaatgcagagaaaacatttccataagcagcaaagactaatctgccatcagctgccatacagcagatatcctgtggaacagaattacctagcagaaaatacaaaatgaaagaaacagggatttttaagatgttaaagagaaacctcaagtatacatataacatttttcatggctataatttaaaaaaatatataaataaagatcaa

SEQ ID NO: 492139 - DNA, 622 bp, Homo sapiens
ctgacatctagattacattgtcttaaccagacatccatgctgaagactttccaataatgccaactttctacacataggaagcggtcaagttggactctctttgtaacagttaaaagatggcatctcccacttcattcaccctcaggtttattcaattctacccatcacttcctgtcctaaacttctgaagctaaagaccactcgagtttcagtggaaaccatgagttttaaatcagaacaatttcatttccttgaggagaattttctgagttctgaagccagtcccctgagaaaacactcatggaaaacgtaattacagcatcctaaagcattaggcttcctgtcctgattacaacaaaagactcctgggctttccatgagacagccactcctggaaatggtcctgtaattgggataaaaggcaaaaggaaaatgaaattcagatcaattccctgggttcttcctgtttatccttattttaawttttcacatgaagtaagatttcagtgtgctattctagcattcactgcttccttgccttcggtatgcaagttttaaagccttgatgtattgcatagaaacaatagaaaattatcatactgtgcttctggttgggtggaat

SEQ ID NO: 492140 - DNA, 521 bp, Homo sapiens
caggtggaatctatgactcttttaactctgtatccttactgcaatagctagtatatatcagatttttattaaatgtttgcctaataagtgaatgaataaaattttcagactttttgctcatgcttttctttgtttaaataatcatattatttaagtggtttaaaatttttggaggttttctgggtgtcttagtatgtgcaggctgctataacaaaataaactgggtggcttataaacaatagaaattagtttctcatggttttagaagctgggaagtctaagatcaaggtgtcaacagattcagtgtctggtaagggctttctaattcatagacagcaccttctagctatgtcctcaaatggcgaaaggaacaaagcagctctctgaggccttttatatttacttaatayaaattatttatttgaatggaactatttcttttttaaaaaaacaattttattgtgcacatttaagtcatacaacatgatgttgtaggatacatatatagtaagatggttact

SEQ ID NO: 492141 - DNA, 333 bp, Homo sapiens
gctgcataacaggtcatgcaaaatggggggaagaataaaaatttcccaaataatcaaaattggagctctagcttatcaggtcccagcttacttttttttttttttttttttttgagacagggtctcacactatcgcccacactggagtgcactggtgccaactcggctcacttcaacctccgcctctcaggttcaagagattctcctgcctcagcctcctgagtagctgggactacaagtgcctgccaccatgcctggacacttttggtatttttaatagacatggtttcaccatrttggccagcctggtcttgaactcctgacctgaagcgg

SEQ ID NO: 492142 - DNA, 393 bp, Homo sapiens
cctcccagtgtcacccacagtcatggaaactctgtgagctgtcacagtcatttctygccacctaagttaagtcacaccccttgactatggccaccatgtgtcaggatagagggcttgtgagccagtctcctccaggggagtcaggacctagccccacaactctggagttccacttaatgtacccagtgatttctccaactaaccctccatccccacttccccttttacttctagatctggggccagggcctacaaaatctttaacccttttgctcactttccttccttcaggtttcttcctagaaccaagtgggaacataggtgagaaccttatgcctcatagccttcttttttcccttctccagttctaagttcagttatattaagtcacca

SEQ ID NO: 492143 - DNA, 474 bp, Homo sapiens
cctttataatttacctcctaaggaactatccctaaccaaaattttattttacatgtgttcgaattttaaacaggtaatgctacattattatataataattgtgtttctaagatgtgtccctgttgttgcatattgctgtagtttatcttaattgtgtgcagcatcctattttatgaaaataccacaatttcttataccagtcctaccattaatggacatttctgtagttttcgctttgaggctattgatgtttaatgctacatagaatcctaggacatgcaccctggtgtgtacaagcatgcatttctgtagagtttttcaaggagaggaattgcgggtcacactgatacaacacaataccayactatcttccaaaccaatttatgcttctttatataagcagggcaggagaatttccattgttccatgttcctgccaacatttggtattgtcagacttattaatttttgccag

SEQ ID NO: 492144 - DNA, 654 bp, Homo sapiens
gtttgtgtccaggagtttatccatttcttctagattttctagtttatttgtgtagaggtgtttatagtattctctgacggtagtttgtatttctgtggkatcagcggtgatatcccctttatcatttttttaaatatccctctttcttgtgtaatcccatcatttttattttaggacaaaaatttaccatacaagattctttcttatataaaatatcttttctttaagactttttaaatttttttgtcaaaaatacctctttatttttataactttctttatattgctcttatttcctggtttcccttgtttcatatataacccttaaataaggttttaattagacaaagatattttaccttaataagaatgttaaaaaatttcttaaattggaaattacccagaaacttaatatcaaataataaccttaaatcctaaattatgacaagtgtgtttacaagcatttattccattacatgtacctgattaatttagtagtttacctaggttatttgcaaaaaattgatagccaatattttaagttatttttctattaacgatttttatagctgtgaatttgaggtgtttacttaagtaataaaacttatggttagttttaaggatatttataccaataattcagtatttagctgt

SEQ ID NO: 492145 - DNA, 585 bp, Homo sapiens
ccccgattcaagtgattctcctgcctcagactcccgagtagctaggattataggcgactgccaccatgcctggctaatttttgtactttttgtatttttatatttttagtttcaccatgttggccaggctggtcttgaactcctgacctcatgatccgcccacctcagcctcccaaagtgctgggattacaggcgtgagccaccaagctaggccactgctcacccaattttaccaacaagaagactgagggttagatgatagcttcttaaactttaaagtatstatgcatcactggtggatcttgttaaaattcagatcctgattcaggaggtctggggtgaggcctggcccacttggaagtaaaaggctagaaggtctaagtcatttgcctcaaggtcaccccactggtaaagttcagtgccaggttttcaacctagcttcagtctgactctaaagcctgtacttttatcatctctcagagaccctgctccaagatctcttgcaactctaaaattccaattctggtgccagattaattggagaaatgcaaataaaataacagcaagcatgttctcgtgtcccag

SEQ ID NO: 492146 - DNA, 481 bp, Homo sapiens
tgtcccccaacttgtgtagcatgacccagaggggtttatcgaggggcggcagattcaactctctctcatttttttttctgagacagastctcattctgttgcccaggctggagtgcagtggtgcaatcttggctcactgcaacctccacctcctgagttcaagcgattctcctgcctcagcctcccaagtagctaggattacaggcgcccactgccacgcctggctaatttttgtagttttagtagagatggggtttcaccatgttggccaggctggtcttgaactcctgacctcagatgatcctcccgcctcagccccccaaagtactgggattacagacgtgagccaccgcgcccagccagattcaactctcatccagtcattcaacaaatatttactgagtatccctgtatataagcacgttctaggtgctagatggtggccaccctctccactaggggcagaatggaccattaggag

SEQ ID NO: 492147 - DNA, 650 bp, Homo sapiens
gcaagacgtggaccctggaggagacctggccactgtcaacagtcagctcaagaagctgcaggtatggtcttcctggcccagatgagggctccctatgccacatgggggccaggtcagggtccaaccccactcaaggtatgtcaartggaggggatttaatacagggatttatttcaaacttgtagaagatgagaaagggaatattgaagcaatccagctagtaataactgttggaagcagccaccactccctaaggtatggagtacaaagggaaaaggaaggatctagagccacaaagcagtaggtaaatgactagcatgctaaaggtttcacaggaccctgacactcatttcctggatggagaaaccaaggctcaggggtatgggaatggctttgcatggaataacaatgacattcattgagcatttctctaccagtctctgggccaagcactcactgaactcatcccagccacttctggagattggtactgttattatcctgttttaccaatggggaaactgaggcacagaaagtaaggcacctggcccaaggacacacagctaaccagtgtctcctttatgaaacagggcactcttagagaacagacgcagcgtctgcttgtatctgctcccagcttggcagctcca

SEQ ID NO: 492148 - DNA, 661 bp, Homo sapiens
tgtgtgcagtgagagtgctggatacacaggggctgttaagccaaaaatagctgcaaatatgatgcatttggtgcatgcagactcagttccaagtgctccatagtttatcaccttataacaaccccgcaaggtagattatctcagcctgatactagctgtgtgaccttagcaaattcctcaccctctctgtgcctcagtcttctcatctgtaaaatggagatggtaatgttgtctggctccataggttgggagtgaggaggtgtgaggctatattatgtaaagctcttacttagcaaagcacctggcaggtagcagggtagcagacactcaagaatcgttggctggccgggcacagtggctcatgcttataagcctagcactttgggaggccaaggtaggaggatcgcttgaggccaggacttcaagaccrgcctgagtaacatagcaagacctcgtctctccaaaaatattttttaaaatagcagggcatggtggtgcacacctgtagtcccagccgcttgggaggctgaggcaggaggatcacttgagcccaggagtttaaagctgctgcattccatcctgggtgatagagtgacaccctgtctctaaaaaagcaaaataaggagaggacttgctggctgttattatctttatcagttga

SEQ ID NO: 492149 - DNA, 694 bp, Homo sapiens
tttttactgcttgggatgccaagattttaaaaaaaggactcagttgaaggatatgtagattaacataataaagaatattaataaacaattgggtccagtttcctgcctttaggcaagtgattagacaaaccacctaagtccaatattttacacaatcaaagatatttatattctaagtgggaaaagaaataatttcttcttgtttctcaccgagcaactcatttagggtactaagacagttccaaatattacttacatgtgtctggtatggtaatctgaattctataactgggtggtggtaaattccagggtaaaacaattagaatccaatctgttaaaaaaaatcgtattttgaatacatatggcgtatgatgcggttgtaattaatcagttcatgaaattmagcatgagctgttcctatcatctgaagaccttgtgtgtatatctgcaagatctactgtcaggggatcaaaaggaactgacaccaagagaattttttagtggccccaaatggtgggataggaatattccagactcccctactcatcacctcatgcctgaggagatggaacactaagtgaaatttccaagctcaaaaaaaggtattttttccatcttaattttgaaatgtctgtggaaaaagtcagattcaagtaggtgcccacagtgtaggtgaacatggagcaaagtgaca

SEQ ID NO: 492150 - DNA, 577 bp, Homo sapiens
atctatttgtgcttttgttgcttgtgacacaaaaatagttagaataggccacaaaaaataatgaaagaatgaataagacttagtatttgctagcacaatgggtgactctagtcaaaaataatttaattgtacatttaaaaagaagagtataattgaatcatttataacacataggagaaatgcatgaggtgatggatatcccatttaccctgatatgattattaygcattacatgcttgcatcaaaatagcttgtgcaacccataaatatatacatatactatgtacccaaaaaattaaaaaatatatatgatatttgaaaagatacaacatattgataagagcagatgttaagtgttctcaccatcaaaaaaaaatgagttaagtatatgaggtaacaaatatataaagtatttgattcagccattccatcatatcaaaatatggtgtacatcataaatatatataatttttatttttgtcaatgaaacagattttaagaaaaggttatatctaaaaaataatggcctaacccaacgttgtgaagcttttctcctatattttcttagtagttttac

SEQ ID NO: 492151 - DNA, 605 bp, Homo sapiens
tggggctgctgctagaatgctctgagatggtctacagagctcagcttcttgtgttgatagctttttgtttgtttatttgttttgttttgttgtttttgagacagtctcgctctgtcgtccaggctggaatgcaacggtgtgatctcagctcactgcaacttctgcttcccgggttcaagcgattctcctgcctcagcctccccagtaactgggcttacaggcacccacatcatgcccagctaatttttgtatttttgtagggacagggtttcaccatgttggccaggctggtctcaaactcctgacctctggtgatcctcctgccacggcctcccaaagtgctgggattataggcatgagccactgcgcctggccgatatcttttgttagtagggcagaccccagggaggcaaacctctcctctctgtcttcatcccacctccaccatcatccagcccagagctgggtacctggaaacttctcagggtcagacaggagaggctgaggaaggcatctccaagacgctgagggaatcacagatggaactctgcatccacaggrtggctaccaaggctccgaggaggatgtatccctcacagctcttg

SEQ ID NO: 492152 - DNA, 599 bp, Homo sapiens
tcactttgcccaccctgctccggggcaaggtctctggcgccaggatcttctgggtgggtgggagcagcgcccctcccctccgatctgggcccgcccccaatgcagagcccgcccctccctctgggtacagctaataacctctaattagtgcacattaccccgcccgtctaccggggaggggttgcagagggaccctggggtcacagggcgcgagcctgggcttcacccttcccctcaaaacccggtccactcggaacctctgttttctcgccggcaaagcagggaattaaaacagcacttgccatctggagacatggggaggattcaatagtctatgtatttaaatcgcttagcgcaaggactgcatacagtaagcactccatacatggtgactgcaatttattgttaactataattcccatcactttccattgacccccsctccaccgccccagccggggtttcagggcgggcgcacagtcttccccctaggccgcgttctgcggtctccgcgccccctggtgggcccgggcgacgcggcagcttcagccaaatcctgggttctgaggtgggggtgatgccgggcgcgcatctgggga

SEQ ID NO: 492153 - DNA, 569 bp, Homo sapiens
tctttgttcattcatggtcaaccttcatggtcaaaaacctttatccactgacttccaacatttttgcagggacactaacccaatgctacatttccccttctcacatttattaagatcctgttttattcaactgcaaacacattgcttgggacacacaatcctcccccagattctgaacgtatacacacacacacacacacacacacacacacacacacacacaaccactccaccaagaaacacacataaacataacctcatacaacaaaaacacacatacatgctcaacacacacacagccacacaaacaaaagacacaggtgcctgggaacacacacaggctataggccacacaaacacaccttcctcacacacatacacacacacacacacacacacactccccacatatatagatacagagcttaagccacaagctgaacataaaaacaaacacaaggatatatacacaccagccccaagtcggccagcctttggtcakctggagtgtgggcaggacggtgggaggtcccgcccctgcattaagccacgcccctttcagcagccag

SEQ ID NO: 492154 - DNA, 639 bp, Homo sapiens
agcaggatgagaactctgcaggaagcccaggagaaggaacgctggctttggagtcagccagaggtggctcrgaatccctacttcataagccacctaacctctctaagttttacttcctcctttataagataatgagagcaatactttctcacagggttgttatagattttaaatatccctagtacttatgagacacccagtaaattttagccattataataaagttaattgagaatgctacagattgactgcaattgacatctttgtacagaaaaggtttcctcagcattttctagctgtctcttggtttaacttcagatgctcaaaccaatcacagggaaaaccatccacaacccacagagagaagatccccagagatgacataggaaggtgcacacccttctcatggattctaaaatgtccaatgggccagcgttgcccagtggagagggatgattaaaacaaacaaacaaacaaacttctactctgccaaaaacactgtcaagaggatgagaagacaaggtttcttgtctgaggtttgaggttttcacagtaatctttctgcaaaatcctgctgatcaacaagaaccccaaaacacttaaaaaccttgtcaagatctagccagagcattcagccag

SEQ ID NO: 492155 - DNA, 622 bp, Homo sapiens
gtttatgcctttaagggaatgaagaagatacggtaaaatacaaaaatttgataaaactgagtgatagttcctggtggtctcatattagtctctgtattattckgtctgttttaagtattttcataatgaaaatactgaaagtacaaagaaggcacctccacagtgattcggatgagcgcatttcaactgtagttcgcattaccctgaccttattcatgaagctttcctgcaggacaacaaacagcctggaagaggaaggcgtgagactgcaatttcagaaagtagcacaaacctgacgttcaatgtttccctaagcacggatttgactgtgggagaaaggagcaggtgtcagcacccttcccacctgaagaaggtttgagccagagtggcaggaacaaaggaaaaggctcatgtctgcaaggcaggaagtgcaggggagggaaaaagattagtctttcattttattacctactgtctgctgtcatcttaagaattaccctgggctgtgagtggcactcacatatgagagatatactagaggatgattctcttttcctttgaaagagtatgcagggagaaatggtatggaatggaaattgagtttgcaatcaactgtaatggc

SEQ ID NO: 492156 - DNA, 474 bp, Homo sapiens
agaataattattcaaggttagtaaatccatttaatcccaaatagcattaaaaaataagaaaaaacctagagcctaccttattttctacaatgatgctaagtcctaagaatattcacccccaaatggggagcactatgggaaagatagaggagaggcaacgccttattttggttatcaaattttccatgccccttgtaaaataaattcataccttcaagaggacatggtacagttatctttagtgatgaggaagagatatactgaaaawtttccccaaataaatcttaatatacatgctagtacaatagaacccacatatccttttaattaggatgatagtttagcttactataggactcttggtcaagagatctacaaacaccacccttctgtaagaaacctacaaacaccacctaatgctggtggtctcagggcatgattgcaaggcaatgaggaaaattcaaatctagtggt

SEQ ID NO: 492157 - DNA, 582 bp, Homo sapiens
ctcacccagcacattcatcacaatggacgtgaggaagagatagttacaataccctcaaaactagggagctgacacattggcagatcacataaaggggaagaggagaaagggatttatattatgttataatagtaagagtaagttggtggagatggggctggcattaagtgttgtatggtaaagatttgttttcctttaaagcaaagttcttctcgtctcctgacattttaacatcttacttgagggaagggtgaatgcaggaatgtgaggggcaawggcctctgaagggttctggaaagggagaaagagaagtctgttcttagactcggctctgacttagggatctccaaagatgacaaggcagaaattccagatcttggtttgggggctatattggaagatgcctctgatgagctatgatggctagagtttcttgctctcttttgccatgttctggctgcaatgaagggcaggagaaatcaatcctaaaagaaaggaggatagctgatgatgtgaacatcacatgtgtgcacacacacacacgtgtgcacatgcaggcatacacacacaactgcagtgtgc

SEQ ID NO: 492158 - DNA, 638 bp, Homo sapiens
ctcacccagcacattcatcacaatggacgtgaggaagagatagttacaataccctcaaaactagggagctgacacattggcagatcacataaaggggaagaggagaaagggatttatattatgttataatagtaagagtaagttggtggagatggggctggcattaagtgttgtatggtaaagatttgttttcctttaaagcaaagttcttctcgtctcctgacattttaacatcttacttgagggaagggtgaatgcaggaatgtgaggggcaatggcctctgaagggttctggaaagggagaaagagaagtctgttcttwgactcggctctgacttagggatctccaaagatgacaaggcagaaattccagatcttggtttgggggctatattggaagatgcctctgatgagctatgatggctagagtttcttgctctcttttgccatgttctggctgcaatgaagggcaggagaaatcaatcctaaaagaaaggaggatagctgatgatgtgaacatcacatgtgtgcacacacacacacgtgtgcacatgcaggcatacacacacaactgcagtgtgcttttggtggctgggatactgatgtgtggtgtttagcaggggtttcccactcagccg

SEQ ID NO: 492159 - DNA, 638 bp, Homo sapiens
ctcacccagcacattcatcacaatggacgtgaggaagagatagttacaataccctcaaaactagggagctgacacattggcagatcacataaaggggaagaggagaaagggatttatattatgttataatagtaagagtaagttggtggagatggggctggcattaagtgttgtatggtaaagatttgttttcctttaaagcaaagttcttctcgtctcctgacattttaacatcttacttgagggaagggtgaatgcaggaatgtgaggggcaatggcctctgaagggttctggaaagggagaaagagaagtctgttcttagactcggctctgacttagggatctccaaagaygacaaggcagaaattccagatcttggtttgggggctatattggaagatgcctctgatgagctatgatggctagagtttcttgctctcttttgccatgttctggctgcaatgaagggcaggagaaatcaatcctaaaagaaaggaggatagctgatgatgtgaacatcacatgtgtgcacacacacacacgtgtgcacatgcaggcatacacacacaactgcagtgtgcttttggtggctgggatactgatgtgtggtgtttagcaggggtttcccactcagccg

SEQ ID NO: 492160 - DNA, 627 bp, Homo sapiens
cataaaactatagggacaattgaacttaaaaaagaccatattagagaatagtattatatcaatgtgaaatttctgaagtatgatatgaaaggaggaaaaccttttgttgagatactcacctaagtatgtaggagggaagtatcctgaagcatgggaagctaaaacaatgaattctcaaatgattaaacaaaaaaaagtgtgtatatgtatacagagagataaagcatatttgggacaataaaaataattagtgaatgtaggtgagcaatatatgggtgttcattttactgttcttgcaattttctccaagttagagtattttgaaaagaagttggaggagggatgctgggttgcatgagaaagactgtggaagacagggctggggctgcactatacacttttaacatctgcagggcatcctagagggttcagaaggacatgccacatgggaagttggctgggggcaaatagcagaaaacagagcatctggggcagcasctcactcacagtgatttagggtctgcaagccttgggattttaacaatgcaactatttgttttaaacacacatgtaacatcatttcattttatatgcatactttacacatgcaacattagggccaaattc

SEQ ID NO: 492161 - DNA, 521 bp, Homo sapiens
aaaattctgtattcagccaaattatcatttaagagtgaaggtaaaataaacaaaattgtatcttggcattttaaaaatattctttttgttattgaaatgtttgttgtcagtgcttataagtaatatactgttccttttttattgtttctgagatttcctctctgtcttttgagttctgaaatttcctttcagaaagtctattgtatttttttttatttaatctacttgggatttgttgtactttctgaatatgaggacrtaggtctaccctaattctggaaaatttttaatcattttctcttcaagtattacctttcacctactctctttactctttccttcatgattctttcctttatgattaacataaataagcctttcaattctatcctacaatgatttttacccatcttacatattctccattttttatctctcaatgatagtttctggataacttcttttagatctacttttcagtttactacctctcatctcaatttcatccaattacattctac

SEQ ID NO: 492162 - DNA, 460 bp, Homo sapiens
gagcatgtatttatttcctgtagtggattgaatgtttgtgccattccaaaattcatatgtttaarttctaaaccccaatatgatggcattagaagatggggcctttggaatttaatgagctcatgaaggcttgaggtggatattccattctccctttgattttcctaaatattgcccacatcttttaatatctgtctccttatccaaatttgcccaattacatagttaagggaaccatctgagacagataaactctgacagagagtgcagaatttcaaatctagaaattcgtactcttctaaactactaagagaataagaaataagatgcatgtatattatctatggttataaaagtaactgaaagcataactaaaaataaagttatactgttaagagaatgtgtgaggaagagatgagagggtctagagaagtgcaaagagctaagctatttgtcttcc

SEQ ID NO: 492163 - DNA, 460 bp, Homo sapiens
gagcatgtatttatttcctgtagtggattgaatgtttgtgccattccaaaattcatatgtttaaattctaaaccccaatatgatggcattagaagatggggcctttggaatttaatgagctcatgaaggcttgaggtggatattccattctccctttgattttcctaaatattgcccacatcttttaatatctgtctccttatccaaatttgcccaattacatagttaagggaaccatctgagacagataaactctgayagagagtgcagaatttcaaatctagaaattcgtactcttctaaactactaagagaataagaaataagatgcatgtatattatctatggttataaaagtaactgaaagcataactaaaaataaagttatactgttaagagaatgtgtgaggaagagatgagagggtctagagaagtgcaaagagctaagctatttgtcttcc

SEQ ID NO: 492164 - DNA, 587 bp, Homo sapiens
ttaaatggcaaaacagaataaattatttgcaaagtatatttaaggcaagggttaatacacytaatacacaaagaacttttttaaatgttggtgcagggaaccaattactttataataggctaagattatgaacacacatttcacagaaacataagcacaaatatctcttaaaatattttgaaaggttaaacctaacttataacttaaaatgcagattaaaggtgtactgagttgtgtgtaaccagacacaaaaaatctaaaagcttgatgacatatttggttggtgattctatgagaaataggccctctgataaattggcagtgttaagtgcaacatgatacagtgaaggaaaattcagaaatatccatcaaaaccatgtatgcatttatcctttcagccagccatcccacttctaaagatctagcccaaggatgaaccgagaaagaaaagaaaagaaaagaaaaaaaaaaacatgaaaagaggctattcactgcagcactattagaaatagcaaaatctcaaatgcctaccagtagaaagttggttaaatagagtagagtgcacaacacaactgagtaccatgcag

SEQ ID NO: 492165 - DNA, 531 bp, Homo sapiens
attttggttagcattcattggctaggtgaacaaaattctccttttctagagtttagttttctcaactagaaaacttgggaggtagacaagwtcagtattccttacactcttttttaaaatggtcatagcttcttcgatggggcaaaggtcccctttttttctaagctaacttgtcccacttaccagtaaaaaagtaacaagccaaataacaacaaagaattggatagaaatataataatttaaaatattcactcatgcttttttttggctggcaaccctcttgttctttttgccttcttttttttcttccattctctctattaattgtcagattcaaactagaccagagttttccatcaccttaaagaaaaaattgttgctgcagaaaggcaaagagaaaaaaaagtcagttctcacctctcaacttcaaaccagactattgaaaccaatggcttggtgtcaccaggggcccttctggaagcagacacacagagctgaaattgagagtttaatgagttaaggagctattta

SEQ ID NO: 492166 - DNA, 608 bp, Homo sapiens
gttgccaatcaaaacgatatttgggttcccgcctaggtagaaaaaccccgccccactccctgaaagcccacctccttccgtggcgcccgggtctacggaccaatcagtgaaggtcacgagtctgtacgcgtctcgcgctgcggtgtcttccggaggcamtcctttttggagtcccgcctcttacccccgccagagctgcgttttctgtcacgtgatcgcaaaatgggcgggaactgttgcgtgtaataccacgtgatatgggaaaggcagtgtgcgggggccgccattttccgggagtgggaggtgcactttacttcctgactcctttcctttttccagtggttatcgcggcgcccaccggcctctgatctctgagtcttctccaacccacagacgttttttgttgctctggttccaggaccttctccacaactaggccattttccctgccaggtgtcctttttgacctcttgacctctgactcaaaggtcagctcaaaggttccgaactcgggcctgggatgtgagggggtactgaacctaagttctccgaatctttagccctgggtccctaagtcgcatccttaaggcacctcactctagatctga

SEQ ID NO: 492167 - DNA, 608 bp, Homo sapiens
gttgccaatcaaaacgatatttgggttcccgcctaggtagaaaaaccccgccccactccctgaaagcccacctccttccgtggcgcccgggtctacggaccaatcagtgaaggtcacgagtctgtacgcgtctcgcgctgcggtgtcttccggaggcaatcctttttggagtcccgcctcttacccccgccagagctgcgttttctgtcacgtgatcgcaaaatgggcgggaactgttgcgtgtaataccacgtgatatgggaaaggcagtgtgcgggggccgccattttccgggagtgggaggtgcactttacttcctgactcctttcctttttccagtggttatcgcggcgcccaccggcctctgatctctgagtcttctccaacccacagacgttttttgttgctctggttccaggaccttctccacaactaggccattttccctgccaggtgtcctttttgacctcttgacctctgactcaaaggtcagctcaaaggttccgaactcgggcctgggatgtgagggggtactgaacctaagttmtccgaatctttagccctgggtccctaagtcgcatccttaaggcacctcactctagatctga

SEQ ID NO: 492168 - DNA, 624 bp, Homo sapiens
cctaaaggggtctcttgagacatcaatttgtcatctaactgtctgcttatctatctgtctatctatctatctatctatctatctatctatctatctatctatctatctatacatctgtccatccgttcatccatccatccatccatccatccatccatccatccatccgtccatccatcctttatcctatctattcatccttcttgtctatctatctatctatctatccatccatcgatctatctatatcatctatttccatatatatactatgtattttatttatataaataggagtcaatgaaatatatacatatttatatattttaatatatattaaatttattaacatatttatttaatttaataattaggagtcaatgaaatgtatatatttcatatacatagaaatatatatttccatatatactatatatattcctaattattaaattataatgttattaatatgtttatttaatttaataattaggagtcratgaaatgtgtatatttccatatacatagaaatatgtatttcatatatatatatactatgtattttgccctttgctatttacatgtatgcattttgtggcttatttttgccactcgacagtgtgt

SEQ ID NO: 492169 - DNA, 624 bp, Homo sapiens
cctaaaggggtctcttgagacatcaatttgtcatctaactgtctgcttatctatctgtctatctatctatctatctatctatctatctatctatctatctatctatctatacatctgtccatccgttcatccatccatccatccatccatccatccatccatccatccgtccatccatcctttatcctatctattcatccttcttgtctatctatctatctatctatccatccatcgatctatctatatcatctatttccatatatatactatgtattttatttatataaataggagtcaatgaaatatatacatatttatatattttaatatatattaaatttattaacatatttatttaatttaataattaggagtcaatgaaatgtatatatttcatatacatagaaatatatatttccatatatactatatatattcctaattattaaattataatgttattaatatgtttatttaatttaataattaggagtcaatgaaatgtrtatatttccatatacatagaaatatgtatttcatatatatatatactatgtattttgccctttgctatttacatgtatgcattttgtggcttatttttgccactcgacagtgtgt

SEQ ID NO: 492170 - DNA, 474 bp, Homo sapiens
atatatatacactcatgacaaattttattgtatctatactcatctactctttcaccccctgggttaaatatcagaaatcatataattttgtttgtaaacacgtaagactcacccttgcaatttaaaaaaaaatccatatccatgatgcccttcccccsagtctgccaggctccaagtgtacagaaaatttccctagactcatggtttttatactgaaaaaagtgagatggagacggacaaatagcctccccattatcttgggtttcctgacaggaaacctgaccctttctcaatccacagaaagcacagagagtgcttggagggagaaatatccctgaggataggcagagacaagggcgggggagtctgcactaccatcttcagttctggaaactctgcactgcaatttggctaaatgagacaccaaatatgagtggcttttcagcagcactatgctatagcaggttccttcca

SEQ ID NO: 492171 - DNA, 474 bp, Homo sapiens
atatatatacactcatgacaaattttattgtatctatactcatctactctttcaccccctgggttaaatatcagaaatcatataattttgtttgtaaacacgtaagactcacccttgcaatttaaaaaaaaatccatatccatgatgcccttccccccagtctgccaggctccaagtgtacagaaaatttccctagactcatggtttttatactgaaaaaagtgagatggagacggacaaatagcctccccattatcttgggtttcctgacaggaaacctgaccctttctcaatccacagaaagcacagagagtgcttggagggagaaatatccctgaggataggcagagacaagggygggggagtctgcactaccatcttcagttctggaaactctgcactgcaatttggctaaatgagacaccaaatatgagtggcttttcagcagcactatgctatagcaggttccttcca

SEQ ID NO: 492172 - DNA, 474 bp, Homo sapiens
atatatatacactcatgacaaattttattgtatctatactcatctactctttcaccccctgggttaaatatcagaaatcatataattttgtttgtaaacacgtaagactcacccttgcaatttaaaaaaaaatccatatccatgatgcccttccccccagtctgccaggctccaagtgtacagaaaatttccctagactcatggtttttatactgaaaaaagtgagatggagacggacaaatagcctccccattatcttgggtttcctgacaggaaacctgaccctttctcaatccacagaaagcacagagagtgcttggagggagaaatatccctgaggataggcagagacaagggcgggggagtctgcactaccatcttcagttctggaaactctgcrctgcaatttggctaaatgagacaccaaatatgagtggcttttcagcagcactatgctatagcaggttccttcca

SEQ ID NO: 492173 - DNA, 639 bp, Homo sapiens
ttcaaaataatctcttaggtgatgttcttcagtgtcttcttttttttttttttttttagacagagtctcagtctgtcgtccaggctggagtgcaatggcgcaaccttggctcaccacaacctccggctcctgggatcargtgattttcctgcctcagcctcccgagtaattgggattacaggcatgcaccaccatgcccagctaattttgtatttttagtagagacggggtttctcaagttggtcaggctggtcttgaactcccgacctcaggtgatctgccctcctcggcctcccaaagtgctgggattataggcatgagtcaccacacctggccttcagtgtcttctttaatgccaccaacaaatatctttttcacagttaactgggcacctggtctttgagaatcttctcttgagacagctctctttggttccacaactcttctatccaccttgtgcggcctagcattcatggcgcatctgcctccttcacagtggcatatgtgacaagcccaaagctcctggagcgcttggtgtttggatctctcattaccacacagtccgtgagcattctccattgctcaaaatggcttctcaggctcttatcagttgtttcaaagctcaatcctccaatgaag

SEQ ID NO: 492174 - DNA, 665 bp, Homo sapiens
tcatggctgttagttttaataactggaaggcttgacagagataattgcrttagtgcttcactggcctcaagatgcatgcaatgagtaaaattaagaccatcttattaaaataccaaagcattgtataggaaactcccatgtattcaaaggggaaagaagaaaaaggaatgtcatatttacagagcatgtactattttcaaaactctgttctaggtgctttcacattcattaactcattttaatatgtgagtgctttgtaatcctttttgagtgttgcaggctcagagagggtaagaagctttgcttaaggtcccctagctggcaagtaacagaacctattcaaattcagatctgatttcaaagtgcatgtagtttttgccacagtacgatgcttggggagctaaatggcatttgggaacctagagttaaagcatcagtattttttactaaggggccattggatcctagagaggcaacgaattataatggataaaaatacaaatttcaggcaagttacttctcttagcaccattgctttatccggcatagtaataaaaatcaaatgagacaatggatatgaaatgctaaaaatagtacattctctgttgttattatctattgtgattattgtgttacccttggaaaaaggcctgtagaatagcggc

SEQ ID NO: 492175 - DNA, 665 bp, Homo sapiens
tcatggctgttagttttaataactggaaggcttgacagagataattgcattagtgcttcactggcctcaagatgcatgcaatgagtaaaattaagaccatcttattaaaataccaaagcattgtataggaaactcccatgtattcaaaggggaaagaagaaaaaggaatgtcatatttacrgagcatgtactattttcaaaactctgttctaggtgctttcacattcattaactcattttaatatgtgagtgctttgtaatcctttttgagtgttgcaggctcagagagggtaagaagctttgcttaaggtcccctagctggcaagtaacagaacctattcaaattcagatctgatttcaaagtgcatgtagtttttgccacagtacgatgcttggggagctaaatggcatttgggaacctagagttaaagcatcagtattttttactaaggggccattggatcctagagaggcaacgaattataatggataaaaatacaaatttcaggcaagttacttctcttagcaccattgctttatccggcatagtaataaaaatcaaatgagacaatggatatgaaatgctaaaaatagtacattctctgttgttattatctattgtgattattgtgttacccttggaaaaaggcctgtagaatagcggc

SEQ ID NO: 492176 - DNA, 666 bp, Homo sapiens
atagtagggctggtgaatggtttcctgacctgtttgatgsagagtgcaaacccagaggaaaaacatggtatatgagttttcgtatccattagtctaaaagaatcagaattcggttatattttaaaggcaattatagtagaactattacttttttgttttctgttataatcttacctagacttatttaacatacttaacacataatattttaaggctaagtatttctacaaaggatttatcattcaatcattcttatttagtcaataaaatcttttggagattaatttttagtaagcctaaatacccaaatagccaggaatgtgattgaggatcacatttttaaaacccatccctcaaaaagaaaattgtaatatcttgagagacaggtatggtttgaagatcacccctcttcaaagtgagttcaatatctgacctaatggaatcactccccattccccaggactaggtgacactcactgatctgggaaaaataaacacgtgcaactaacaagagaaattttgagaattatgagtaagctttgaaaatttgggtactgaaaatagagagggagggagagagggaggtgatagggagggagggaaagaataaaaaggaatgaagaaaaaactaataacaatttatctcttaagaaaatagaaggcgca

SEQ ID NO: 492177 - DNA, 483 bp, Homo sapiens
ggtcattactgttactgccccctcatgggagaccaaatatagctatatcattcctcctccaaaactgccttctggcaaaagttatctcttttaagaattgtgtgcattcttaaattgcattaagggaagcaaacatatggaacaagaaagcacctcacttagttccatttgctaagcccttttgcagacccactgacccttccttaattccaaatgaaatctcaaatgctataaagaaacccgccaaatgggttacagcaaagacttttttacaccctactgttatgttcagaattggaaaaakctggggatttggcaaattccaaaatgttgggtcatatgaaaacttttttttttgagacagagtctcgctctgtcgcccaagctggagtgcagtgacgtaatcatggctcacttcagcctcgacctccttagttcaggtgatcctcctgcctccacctctggggtagctgggactacaga

SEQ ID NO: 492178 - DNA, 458 bp, Homo sapiens
atttttattctaattaacgtgctaaatcaagcacaccaaatgtctctaattcttatattactcaaatggcaatatttttgtcagtgactatcatatgaaatttcaggtgcctaatgcattttcaaatggcactcataagcatactaacgttttataaataaatgtctccatatttttaagatgaatggacaatttttgatttttaatrtagtccccaattttcaatttttcaatttcttcatttaccgaatggagaaacagcattcatcagagcaaaagagcaagtttcacaagtcatgggaacaaacatagatgctaatttcctattttaggaagttctttttaaagtattatcattaagaagcacaactctgtggaatatttatgtgcacatttaataatagagaattcggatgtcaagtctgtgtgttactcatacccatacatgcatcctcaaa

SEQ ID NO: 492179 - DNA, 596 bp, Homo sapiens
tcaatacatgtttattgtatatctatgctagagtcaatgtatctttttctggaaaatttcttttaaccattttggaggtccccttgagacatcctatagatttatcaaccaaaggcaggcaaacttcatcatcgaagaaatggtgtaccttatgcttaagcctgcatacctcttttcttggctctaaaaggtgaatccaaagcagtaagagaactctgctgactctgactctggtcttttgctctctactaatctggggaattggttttgcaatctgaccatctgatgatccctgtaaatggattaatggtttatagaggtctattctctattgggtgagaaaaaatggagaatctagtttgttaatctattttggactcaaatcaattaataatttgtcctcagaaaagaacagctctttggtatttcatcattttgtattattaattcatggctgaaagtttagaactgaagttataaaytctgtgtgactgtatgtctatcaatgtctgtatagagaaaagccttattgtgcgtgtagataaggcttttctaccttcaggtggcactgattagattataaagtctttttaggg

SEQ ID NO: 492180 - DNA, 610 bp, Homo sapiens
ctcttgttacccaggctggagtgcaatggcacagtcttggctcacggcaacctctgcctcctgggttcaagcgattctcctgccccagcctcccaagtagctgggattacaggcatgtgccaccgtgcccggctaattttgtagttttaatagagatrgggtttctccatgttggtctggctggtcttgagctcccaacctcaggtgatctgcttgccttggcctcccaaagtgctaggattacaggcgtgagctactgtgcctggccacacttattttcctttttagtaattgtcaccaacacccagccagttgtctaagccagaaacctgtgtattattcttctctccttcctctcttaggcttcatatcagctagtcattaaattctagtattcattttcctaactctgaatcaatttccatctttgctacagctattgctatcatcctgcctcctaactgatctccctctcatcagtctcagtttgttctccatgttgggtacatgttgcaaaagtctaaacttcccagcatgccacagagtccttcatattccctgctcatttcattcttgggcattcatactttcatcagtcccctcctgaccc

SEQ ID NO: 492181 - DNA, 245 bp, Homo sapiens
ggaattatagtatagagaacagggaaactggataagctgtttgaagagggaaactaactgtatctaacaatggcaagatgggcccccaagcccaagctctggcctctgcctcagaccttggaaagtgaccatgatggaaccacaagcaggcagaagawcactctgcccctcaagatcatccaatcaaaaattctctcctccccagcagggttaaaagtgaaacacaccattaaaatgtgaccctt

SEQ ID NO: 492182 - DNA, 543 bp, Homo sapiens
gttgtaccttgtaagaatattgaggccaaagttgtgagacattccagtttttcaaaagaagccaaaagcttggattttatatgaaatatcctggttttatttgggttctcatttaaaggaaacaaaaagccaagcccaacaaracccacctgtgtgctagacttggcccatggaccactagcttgtaatttctaccacgagaagagagaatgcagtgttggaaaagatagagactctgaactagtaagacaaatacacagacaggggcacatggtcagagatcaggagactatgaactatctgactcatttgttgctctaaaggtaggcttaatggttgctgtgaatgaagacatcaatagaaataataagaaagccagtaacagccttcatattttaaaggtgcttcccttcttgtccccactttgcactgacacgtgtatgctcagccattcttgcttgtgctcctcccctgactactccaaacacatccaagcatcttcctccattaccaccaggattcttcacttctcctctggtacca

SEQ ID NO: 492183 - DNA, 362 bp, Homo sapiens
atgttctgaagataaaagcctttaaaacaaaaagtcatcttgatatatcaagtcaacacgaaattggaatacaaaattgagatagctgagattttcctcatatattatgcttttaaattctctattctatagccctagaaccaaactttttttttttttttwaatttagagacatggtcttactttgctgcccaggctggagtgcagtggtgccatcagaactcactgcagcctccaactcctgcactcaagcaatcctcctgcctcagcctccccttcctaagtagctacaattacaggtacatgcccccatccctggctaatttttaatttttgtggagatggcattttggtttccttgc

SEQ ID NO: 492184 - DNA, 510 bp, Homo sapiens
ggaggtttatgaggaaatactccagctacctcaggcagtaccttgcatatagatgtattaattcaataaattaataaagaataaatcaagattatatttaaatttaagctacatgcagcaaataacagatggaaggaaagggatcttccaaaagagtaaaagtgaaaagtgtattctaatttcaaaaagagagaaaggaaattctacatttgaatgcaacatgttgctacctattacttctggaagcctagtgctagggcaaggaggtgttttttacatgcatgctatttaaagaaaggaaaaagatcctatcttccagagattggctttcaatagactgagtggggaaggggaaattcatatcaaataaacttctggtgtctttttaacagattgtttttagaaaatcatcaaaagtcaacagaarccaggcatgcattacctttggatggacatcctaagtagctcaccttacacaccctttgtaagcaagccttgcatgaaaactca

SEQ ID NO: 492185 - DNA, 552 bp, Homo sapiens
atcataaaagtcactattagaaaagggaaaaatacaaatcccaaagcaactataaaacaacrccaataacaaataatggttcctccataaatttatcttgatggttataccttgtgttctatctcacaacaaactgtcagcagcaagacatgcagacagatgtaagttttgaactgtttaactccacctaagagtgaaattagaccacagtttctgtcttcagtgaaacttcactgaaactgatgcagatccctcctctgtgatgtcatggttctcttctcatcagagaataatctcaaattcctctgtaacgccccttgattctacaattttggatggaattttacacataaaaatcacacaagtgtgtttaccttctcataaaaaatcattgtataattcacaggggcccttccctgcccatgaaataagatagcctccctcttctcatttgtataggtgcaggatggcagaagaggccccacacagtttacagaaaggaagccagttgatgccctgaatggaaagtacatcacaataataaatctacaa

SEQ ID NO: 492186 - DNA, 552 bp, Homo sapiens
atcataaaagtcactattagaaaagggaaaaatacaaatcccaaagcaactataaaacaacaccaataacaaataatggttcctccataaatttatcttgatggttataccttgtgttcyatctcacaacaaactgtcagcagcaagacatgcagacagatgtaagttttgaactgtttaactccacctaagagtgaaattagaccacagtttctgtcttcagtgaaacttcactgaaactgatgcagatccctcctctgtgatgtcatggttctcttctcatcagagaataatctcaaattcctctgtaacgccccttgattctacaattttggatggaattttacacataaaaatcacacaagtgtgtttaccttctcataaaaaatcattgtataattcacaggggcccttccctgcccatgaaataagatagcctccctcttctcatttgtataggtgcaggatggcagaagaggccccacacagtttacagaaaggaagccagttgatgccctgaatggaaagtacatcacaataataaatctacaa

SEQ ID NO: 492187 - DNA, 639 bp, Homo sapiens
caatctatcatttgccagaggaaaagccattgctcatcttttataaaaagttcaaaatccaacccataatgaactaacagtttcttgtccaacataggaaacacattaacctgatttgattctgttcccattttggttctcagaatttcaatctcctttggaacctttattattgccatttaattaaactaatccctcccataccttttaatttgtttaaacaaacaaaaaacactcttttctctaccactaggaggcagtgtttcagtaggtctaagctaaacaaagactgatcagcccagaacactgaagtggaatttgactcctcaaacctgaaagtttcccttagaytttggttcttcaagaaataggggaaataacatctttctcaccaagaaataaccaatacatatcttttcaccattaaatcactaatagtcctaaaagatacatgcaaactcctgttggaataatttttttaaaaagtctctgcagtttatagtgctatatttggggtgttcttaatgtttaatttactacttacccattcaaaacaattcgtcatgccattaataacttatctattatcatcaaatattgaatgacacttctgtattttaaagaatgtaacaagtaatt

SEQ ID NO: 492188 - DNA, 577 bp, Homo sapiens
tgtatggattgtacaatgttgtcgttttactgccaatgtattctctgtacaataggattgatgatactaagatctgacatgcctttcatctctttgtcagaatgtctagctaaacagacctgggtcagctctttgataaaaagacttacttctacctagtgtgttcccaagctaaatcctttgtttctaccctgcatccccaggggaactcagtctgcttgggaagccgtggaatagcacatttttgggacagcacttcaatcaacaggactgtttctagctttaaaaagcccatatgaaacataaatgaggccctggatctgggcaggcattatccaggacaatctgaattttcagtttgtatgcatttcattcccttaatcaaacaactataggatgggatctatagtaatcacaccycagaaggaaatcccccaggccttgtttctgactatgagaaaaacaggtccacagcaaataagcccagtgtgcttctgcaagcagaaaagtggtagaaagcagttgccaaaaccctgggcaatccctgcaagtacaagccactggtggaggtaagatc

SEQ ID NO: 492189 - DNA, 431 bp, Homo sapiens
ttctagttattaactatttcagttaatagagctaaaattccattatttacctagacagaaaacgggaatatctttgattcctccctttgtcgtgtttcccacatcaaatctgtcactaaatcctgtcattccaagctgcctctcttaacatctgcccccacctcaccattgtaattcccaatctcccaattcaagactcacttttacttcctggtctgttgttacttattagagacttcttaacatttagtggtatgaaacaagaaacattttgttctacgcatgattttgtaggtcaagtatttaggaagggctcagatgaacagtttgtgcttggagtcactctgtcatttggtgcygtagtcatctaaagatacaactgggttggaccttgcaaacagtgcgctcacatagctgactgtgcccaggaa

SEQ ID NO: 492190 - DNA, 610 bp, Homo sapiens
cttagcatgagctgtttcaaagaaggtgcaatttaggaagcatagagcttaaagraagaaggtacattactggaattagaagtataacaaggaaaaatacatgtttgttatttcacattgaatgacatttaggtctgcaatcttcaatgctggaatgagatattttgttcagactgaacctaaacatgtcagacattaaatacaatttccctgctcactgagactagatatacatgtaggctctaggaaaccataacaagctgttgcctttctctcttgaggtagccctcctgacttcgcaggctgacttcccatgcttatctgatggtttactcatatgttcccaatactggaaacactttgttccctgctggtgtttccccttctggctctccagatggtttttgatcttacgtctcgaaggatctctctttttcttctctctccagtgaccaatctacaactcaagggcagattgttttgtccttccctccatttagaaactcttcaccggcctgctgcctcctcagtttcttgcagtctagtcctgctttgtgggctttcaagacttactgagcagcaatagtgtaacaatgtgagttctgatgcc

SEQ ID NO: 492191 - DNA, 600 bp, Homo sapiens
cttagcatgagctgtttcaaagaaggtgcaatttaggaagcatagagcttaaaggaagaaggtacattactggaattagaagtataacaaggaaaaatacatgtttgttatttcacattgaatgacatttaggtctgcaatcttcaatgctggaatgagatattttgttcagactgaacctaaacatgtcagacattaaatacaatttccctgctcactgagactagatatacatgtaggctctaggaaaccataacaagctgttgcctttctctcttgaggtagccctcctgacttcgcaggctgacttcccatgcttatctgatggtttactcatatgttcccaatactggaaacactttgttccctgctggtgtttccccttctggctctccagatggtttttgatcttaygtctcgaaggatctctctttttcttctctctccagtgaccaatctacaactcaagggcagattgttttgtccttccctccatttagaaactcttcaccggcctgctgcctcctcagtttcttgcagtctagtcctgctttgtgggctttcaagacttactgagcagcaatagtgtaacaatgtgag

SEQ ID NO: 492192 - DNA, 644 bp, Homo sapiens
ttaaggagtgggaatttctgccacacgtggatgtcagaaatggaagcttttattatcaggagaaatatttgctggttgatgttacttaaataggttcaaatttcaaacagttctaagagcctgttgaatgtccgctatgaagagttgattttgccaagatggaaaaaaaaatctcatctggttgccttttaacgcctctgtatgatgttagatacaggtgtacttcttgccttttcacatattgaagaaaacagtgagagtatctagaaaacgggggacctagatggagagactgaatgcatgagggttartgccagtttcctcatattacaacccaggcttgagcaatatctgattttttaatgcttcacagaaagctaaataaatgcctatgtactgtggtggttccattcttgttcagtaccatcttggcttcctttcaggtaaggaagaaattgagcagtgattgtagcagtgattcccctgtgggggaatgccctactatggaatactctgagtgtgtgacatgtcgccgtttacccaaatccttgaagttaatgagtaaaacggcagaatacaatctagactcatagattctgaattttggaagtgaaattgatcttaagataatgaaatctactatg

SEQ ID NO: 492193 - DNA, 644 bp, Homo sapiens
ttaaggagtgggaatttctgccacacgtggatgtcagaaatggaagcttttattatcaggagaaatatttgctggttgatgttacttaaataggttcaaatttcaaacagttctaagagcctgttgaatgtccgctatgaagagttgattttgccaagatggaaaaaaaaatctcatctggttgccttttaacgcctctgtatgatgttagatacaggtgtacttcttgccttttcacatattgaagaaaacagtgagagtatctagaaaacgggggacctagatggagagactgaatgcatgagggttaatgccagtttcctcatattacaacccaggcttgagcaatatctgattttttaatgcttcacagaaagctaaataaaygcctatgtactgtggtggttccattcttgttcagtaccatcttggcttcctttcaggtaaggaagaaattgagcagtgattgtagcagtgattcccctgtgggggaatgccctactatggaatactctgagtgtgtgacatgtcgccgtttacccaaatccttgaagttaatgagtaaaacggcagaatacaatctagactcatagattctgaattttggaagtgaaattgatcttaagataatgaaatctactatg

SEQ ID NO: 492194 - DNA, 603 bp, Homo sapiens
agacgttctgagaaatttgttgttaggcgacttggtccttgtgggagcatcctagagtgcacttaggcaaacccaaatggcagagcccactacacacctaggctgcatggtgcagcctgttgcttctaggccagaaacctgtacagtaggtgactgcactggatatttctggcaattggaacacagtggtaagtatttgtgtatctaaacatacctaaacatagaaagggaagagtaagaatatgagaccactgccatatatgtggtgtgtgattgacagaaacatcattatgccctgcatcgcattgactgtattctagtaaaagacagactctagacaagaagagtgaaatacgcatagctcatgaagttgggatgggcacaggcaaagatcrttaagtggaattaggaaggtgtgagggagattttagaaagggaggccaaggaagctgagaagatgccacctggggaaacacccgggaaacctgaaccacttgagccgcgtcggagtgcacaaagcctcctgcttggcgtttacatcattttccgtttcttgtgagggcatgtctcctcccgggagtgtatgaataggaagtggctgac

SEQ ID NO: 492195 - DNA, 534 bp, Homo sapiens
cgttagtaagttttcaatgggtccctccatcactgttactcccaaagtctttgtgtatatttccactatcacgcagtaattattcctttcaggaatatgtctgtctcagcccctctccccgtagaacacctcctcaaaggccttgaaggccaatggctgtgttattcaccctcatgcccagaagcaatgcaagtatcttatgaattcctcaggaaacccaatccctgccacaagtgctcacactgtcagtgctcacaatagtaagtgagctcctattacaaagaagggtctgccgagtgaatatttgatgaaatttttaggaggtcgagatgcctttgtttcttaagtaaatcaattacttattttttatcttgtatttcagttatagaattgactgcaactggatgaaaattatacagtaatttttctttgatttcatmtagatagaaaatcaagaattattaatgagcaaataaaaatagagtaataataaaatatttcttttttgttgtttttttgaaatgcttggaaagc

SEQ ID NO: 492196 - DNA, 279 bp, Homo sapiens
cctaagaatctccagggtctaggggcacgcagcacaccaaatccatcagaatctctagggcagaaatcttaraaactggattttgttatccaggtatactcaagcaagagtaagaaacactggcctcaaaaacactcgagagacaatgggaaagaaaatttcaattcctatgtccatgttgtcttaaacatcacatcttctaactttatgatcaatgcttgtgattctcttcagaatgttttccagaataatctaagtaaaatgtctgtgggaaacaaa

SEQ ID NO: 492197 - DNA, 498 bp, Homo sapiens
ttttgacttccccacatggagaagcctgattctaaacttggagaggtaatgagacctagcaggtcaggctgggccagcccatggcagtgaccaggtcggtataagcttttcacctctgaaaatctttaaactatttgggaaaacaaattactctgaaagaaaatcagacagataccactttatacccactaggatggctatccaccccccgccaaaaaaaaaaagaaataaaataacaagtgttggtaaggaaactggaaaccttatgtgtacatgctggttggaawataacgttgtcactatgtaaagcaatttggtagcccctcaataaatcaaacatagaattatcatatgatcatataatccagcaatttcactcctaggtatatacccaaaagaactcaaagaaagtgttcaaagaaaaacttgtatgcaaatcttcataacagcaccgttcacaattggaaaaaggtagaaacaacctcaatttctcatcaa

SEQ ID NO: 492198 - DNA, 585 bp, Homo sapiens
tgaggacacgaaggcataagaatgacacattggactttggagactcagaggaaatgttggggggtggcgacggataaaagactacacactgggtacagggtacactgctcgggtgatgggtgcaccaaaatctcagaaatcaccactaaagaacttactcatgtaaccaaacgccacttgttcccccaaaacccattgaaaaaataaattaaaaaatgtaaaaagtccttcagctctaaattctrtaaataaatattccacacatcctaaaaatggccaggtggatatcaaacttgaattggtaaattgtgtggtaccagtggcctgaactacaacaattgacagcaatgtgcacagttaatcccaattctgtgtttttcaaaattcatttatttaaagttgtacctgcacgttaaagagacaaataattctacaaagctttatagaaaaaccaacagtccctgcccatatttcttatcgccaagggcaaccactttcaacttctttagctgattcttttgatatttacctccatatctcgaaataacaggtttatgtaactactttttgatgtttctgttttag

SEQ ID NO: 492199 - DNA, 594 bp, Homo sapiens
acatacaaatatttttatacagaaagaaaaattctaacatgctccaatcacctgccagagacactttataaacttactaccatttggacttgcttccaccatttcagaatttcagaataggtgaggctttcccatgtggaccacaagaatgactactgtgcacaaggagaggcggttttgagatgcacagtatgtgattgctggaggacacaagcaaggcaaggagcagaatatgcaaacaggccatggtaagctctcagatgaattgtcttgggctcccagttaagctacaaatctagtaggtagaacctttcttgtttctacgcctctmttttagggatctaattcttagtaaagcaactcagaaagaaaaaaaataataatgcttctttgtttctaggacttggccttttgttttataattaatatagattcccacccaatgcataaatgtttaaagcatcatttatattgcattgcccacttgttaaagtttaaaatgttgcaaatggccaagagtctgtgcttcagttacaagcaaacttgctcgccccatggtcttaatctccagcaaacagtggcataaatgaacct

SEQ ID NO: 492200 - DNA, 520 bp, Homo sapiens
cttactctaccaatgacgtaagttctgagaacttttcttccggatcactggatggttctgaggaagtaggaagtgtgtgctgataatgtctcagctccctgaagggcaggattccccggccatgttccccatcaagtctccaaggtatccatgtgtgcccacattgtaaagtatttactgagcgagctggggaacaagcaacactattgtgactttttccaatttcacaatccctgacaggccctgtcagagggatccctgccccgatggcacaccagcgcttgaacctcagtgcagggcctgtccctatgtgattcagccagaagagcatcatgtttaaggacaccatcatgggtgttcttattgaataccaacgatgtgtctggcgtggtcgggtgggtgacacaagggtaaggtagtccatgtttggaggcttayaggagctaacatcatacatgctttgagcctcttcccacctttccccaacccatgtccaggggttggcatcctgccttggtat

SEQ ID NO: 492201 - DNA, 225 bp, Homo sapiens
tcaccagttcacccacctcacctggcaagctgggccctagtttggcgacaggcatcttccacccacctgggaggcagggttcaacactctgcctctgaccttgtttccttcytctgccacctgcttaggcagccagaaggggttgtctagccagcctgggctttggtgctcctcaggcaggtggaggaagtttcaggcacctggctcctcaggtgtctgccattc

SEQ ID NO: 492202 - DNA, 629 bp, Homo sapiens
aaatcttttagtaaaagctttttaaagatgagctcgtggcttagtgtaaatttcacaagcttaattaggtcaaatggaaggaactcagatgagtagttgcccaatcagagcccattatttgtaagtcatcarcccccttcatgacctaaaaactctactctgacctagttattgcaaacctatatacaacaaagtgaaaggattaattttcattcatcaacctctcaatcctagattttcaaagaaaaaacctatctaaggaatacttacaaaaatcagacaggaaaattagagcctgcatacttaagagtcaaatttgttccactacagccaggtcgcatacaattacatcatttggttcttcgtacacgctagaactgaccaggacagagtttagcgtagaaaaactgtaagaaataggttcctacacataggaattgcaaagttcaaaagggtatgaagaaaactaatataaatgagagactcccctccgttttaaagaaatacacgctctctaaaaatatacgcaatttttacaaatacatttataagttgtttttatcttaaaaattggggatatttcacatttataactaattattgagacttaagttttcttggccatttct

SEQ ID NO: 492203 - DNA, 497 bp, Homo sapiens
tggagcctgatgaggcctggctgcaccccgggtgtggctttcctggggctcacmcgttgactggtacctggactcgctgcccgggctgctgtcagtcccttaacatcagcttctgttagcgtttgataagcaccaatcagcaaggtcagagtcaaggccactcttcctgtcttgcaagcagaaggcagaatccagaactgacctgctgagcagaagctggtgtcctggtggggcacctctctcctgtccttgaagtttccggcatggcgtggcacaaaggcagcaccatatgggtggaagtagcctgtgaggggggcctcatggggtgggtcccaccagggcttggggtcctcatcccctggggagtctgctggctgtggagggtgagctggaagcctggcacctggagtggcttctggggggtctgcaccatgcagggtgaggctgggtctcaccccgggcccatgtgccatcactgccagggagcagggtagagc

SEQ ID NO: 492204 - DNA, 558 bp, Homo sapiens
aagccactgcgcccggcctacattcaataattcttaacagtgtaaacgggttccaagaccaaaatgtttaagaagcactggctggtaaaaatactcccaaatataattttaatatcatttttctcttccttccaaatatccaatggcttttcagtgtatatctatctaactttaatgtttgaggaggaaggctttactggatgttcaaataagggattttttgccccacaaagttaggatatattcccatatgcacacactttttaaatactgaccaatacattcatcaggacccataatcctgttaatggaatcatttaaaaacaaagcaaaaccmcccatgattcctccctcagttaactgatctgataatgccacacagggtatttcagattttggaggatatcagccaagtatatagtatttcctaatgatttagaattcttattatttcatttgtcatatgaaaccattttcatttctacaagataaaatgtaatgaaactataaaatcttcatttagatgaacaaatagtaaaagtatgaactaagactgtt

SEQ ID NO: 492205 - DNA, 558 bp, Homo sapiens
aagccactgcgcccggcctacattcaataattcttaacagtgtaaacgggttccaagaccaaaatgtttaagaagcactggctggtaaaaatactcccaaatataattttaatatcatttttctcttccttccaaatatccaatggcttttcagtgtatatctatctaactttaatgtttgaggaggaaggctttactggatgttcaaataagggattttttgccccacaaagttaggatatattcccatatgcacacactttttaaatactgaccaatacattcatcaggacccataatcctgttaatggaatcatttaaaaacaaagcaaaaccccccatgattcctccctcagttaactgatctgataatgccacacagggtatttcagattttggaggatatcagccaagtatatagtatttcctaatgatttagaattcttattatttcatttgtcatatgaaaccattttcatttctacaagataaaatgtaatraaactataaaatcttcatttagatgaacaaatagtaaaagtatgaactaagactgtt

SEQ ID NO: 492206 - DNA, 616 bp, Homo sapiens
accaactgaataaatgaaattgaagctgtagatcaaatgtgtccttgagcaggaagagacaagtcatgtatgaaagtcaaggtggccaggaaactttagatctcaggcaggcacagacaaggtgtgtcagagagcaggtatataatattatttatgacaaaataacttcagtctgcacatggaaaaaaatttaattactgatcatctatcatattgacagaaagtttttcaattgccatttaaaacgttctttgaatgataaaccactcagttatccaaactgaagtgtgtcatttagatgtcctttttcctggccacaaagatttaaatacttggctgcagtattttcgactggaaacaaatatctatgatgaaattacgtagttcactcttttctaggttaatgccaactaagatacttaaatcctaggtatggtaaaccatgtgcagtggactgagagtttgcatccccccagaatggaaacattgaaatagaagcccctagtttgtggtattgggagatggagccctkatggatgggatttgtacctttctaaaaggaattgtggagagcttccttgccatcttttcaccatgtgaagattcaggaaataag

SEQ ID NO: 492207 - DNA, 623 bp, Homo sapiens
tccagcttttcactgatattatttttgaacatttctcccatagttgaacatatcattatttcaataagggattatgtatttgtaatctattgtagcatatcaaatgactccagagttgaatggcttgaacaacaaatacttattttcagtttatgttgggtgagattccagaagtagcttagtggggatagatttggctcatggtctctcttggagtaaaactattggctggggcagcttcatctgaagccttgattagaataggagggtctatgtgcaagaagcccattcacgggattggcagttggtgttggttgttggttggcgtaccgcagtagtcctctgaatagacagcctccatcctccgaggccgctccagcraagtgtgtgcgtgagtgtgtatgtgtgtctgtgtgtatgtacatcagagaaagagatagaacgtaagatagaagccaataggtccaccacttagtgcccataatttctgccatgttctattaattagaagcatgccagtaggtcaagtccacactagaggagaatgaattacacaagggtgtgaaaatgagagggcaaaaatcactggaggccattttagagactacccaccagactttagt

SEQ ID NO: 492208 - DNA, 662 bp, Homo sapiens
ttttctaccttcatgttcagttttgttttttgggtttttgtttatatgtttctttctttttttttttttttttttttttgagacggtctcattatgttgcccatgctggagtgcagtggcacgatctcagtgcactgcaacctccaccatacaggttcaagcgattctcctgcctcaggctcccgagtagccaggattacaggcaaacaccaccacgcccagctaattttttgtagttttactagagatggggttttgccagattggccaggctggtctcaaactcccgacctcaagtggtctgcccgtctctgccctccaaagttctgagattacaggtgtgagccaccgcatctggcccagttttgcttttgaatgatcaacatgtattctttcagtttttgaaaactttagtcatttttaaattccctttattacactagcctttcagtttccattttgctcatttatcctgtacttgaataatttgcctgtcaaaaatccccacatgaattctgtrgcagtgaggatggaaacaaattacttaagcataatcttattttacatataagttttgcctatactaatagaaataagaggtgtgaaacatgttaatactgtacatttaagactaaatttttttagacagaaatctttataat

SEQ ID NO: 492209 - DNA, 670 bp, Homo sapiens
ctgttttgcttccctttcaagggctcctctgggggatgccacatctgggagggtcatgtcccaggacactctcacaatccaccatcctccaatgggttcctgctgaagataaagacccagacatactctcctctcagccttaacttgatcagcctggactgtgccaccattatccttctgagagagggagagaaaaggcattcattttgccttcgtcttacgcttccattatgatgcctttttgtgtagtttggggtggaggaggatgcacattgcagcttcgagaaagattcaactcggtgttaggtgggcccctttctcggagggcagcagatgttccagtcatcaagccctcctctctttcccatggagtctgataatcgacaattctcacctgtattggctgacagacccttttagtcttttattcctggcctctcagacttgttagtgaaaggaaagaaaagctactttgatgtatgtgtgcccttggcttaatgcygccttttctttccagatatgttttctgtgcttacaagcagtccctgggagaggcctttccctcagcccttcctccaggcttctcaaaggaattgctgcaaatgagccgccgccataaggaaaccctaacaagtgatcagagagcactaatgggtcccagtagcacttc

SEQ ID NO: 492210 - DNA, 502 bp, Homo sapiens
ttctgtggcaagtctacccacatctgcaacagacaagggattcattcatcaagaccctggcttcatgagaagatcatatgtcagtgtgtgtttctgacaagtgttgttagctgaaagtgtggaccgaaggtgccccccagctcaccactacctaggccaccaagaaaagggaaaaaagaggctgaattcacacagccttgtgaagttcctggcaggaccaagtgttagaaacttagaaactacaaactgtaatataaagcaattattaaaatgaataatagtcgtataaactgggcatggatgaacgaatttattgcattttggaaacttttgcatcaggaggactcatattgtagaaaagagtaatcataaaaatggctgtcattttaaaaaacatgcctactgttgcaagtaccacatgtaattctatttaattttatcctcacaacaaccctttgagcacttctagccccygtagtggattgaatgacgactgcatcca

SEQ ID NO: 492211 - DNA, 500 bp, Homo sapiens
ctacaatacagactttcattttataagtgaacaaggaatagagaaagcaaaatgataaacttcttgaggaaagaaagcattcttatagtattccccagacctaactctacactaaatacattccaatattgattttaaggcacactttccccctacattttaacatctctaaaattgagctccatcttactgttggtggtgagttactatcaccattgtggtgccaggcagcagtcatgatgtagttttcatggactattgtgattgtactcacttcaattcattagaggcattgttgctacataaatattaagtttaattgctgttttaaaatatattttaaaatgtgtactgtgatttgatattgagatgaaaagtttaytatgtatgcagaaatgtaccaaaacagagcagcagggtgtaaatttgttatcaatgaagcaaatattcattggtggaggaatgacttcaattgtggattctttgcaaagcaacaaaca

SEQ ID NO: 492212 - DNA, 650 bp, Homo sapiens
ggagttcaatgtttataattcaatgagatctattacatgtggcgtctttaaatagaagcacrcataaaataagtttgtgtagtgatttgttaatgaaaatgtgatagccagaggctcacaggaacctaaccctatattttccttgggagcaatgattcaatattccataattcattgcttggggcaagtttgcagaacatgactaccatgaataatgagaattgactgtgtgtacagatagatcagaatgatcatggactctttcacactgagtaaggatgctctcaccgggaccagaatgcttgtgcctgtgagtatcatcattttcttcctatcagtagactttccttgaaagcaggtgaggtttggatatgtccccaggcttcagaactaggggaaatggaggaacccagcactgaatggcatagcccaatatgtcccaagacgaccaccccagaatggatgttcttggtcacttctgacccctcccccatctgtggtccacttcctcagctaacacaaatttgaaaagctctcgcaaccaaagggactggaagctctggaagtgtgttggccgaggctcttggatggatgtggcccacactggcctctgtgacatccccttctctgtcctgccctagcccactagg

SEQ ID NO: 492213 - DNA, 530 bp, Homo sapiens
ccaaccccaatggggaaaggctacagtccagataactgaaatgttaacaaggcagaagcacttaactttggtctgccttaggtggcaaaggaaaccagagaaaacaagtatcggggctctgctatcaaggtaaatcgcaatacattcttcccccatgactcttccccatatcctctctgttgaacctctgaagttaacaataggggataaaatgcaggagggttttgttgttaagaattggaaaytgaaacttaataaaattacttagactctggaaagctctgggcatcaagaaatgggctgatatgtttttctcttgagtggcagactacacatgctttctttcctgccacaaaacctgactctcacatctatttctcaattcagagggtctactgtgtggatgcccatttgactgtagatgtcaaaatctagttactgaagtttaatttccttaatctgaatttcagatttttattttctgcactaagtagaaattgttgaccacaatacaagatttctaaaattaa

SEQ ID NO: 492214 - DNA, 628 bp, Homo sapiens
atgagtcatctgtcactaggcagcaccggaacagtaggtggcaaataattatcatgtgtctctgtaaacagaggagggtaaattaatgcagsctgtatcttccctatcaaatgacagcctctatgataacagattatgtctaatcccctctcttccccccacatgaccttccataaagtaaatactcagctatttcttaattaattgatgaactgaaagtctattctctgggtatctctcctttacgagaatatagcacccacacgtgaccacatctagccttttatgactagtgtcatctatataactagtaccactgtccctgtggcagtgtcatgaagcgaaagacgaaggtaatacaagatggtaaaagcagggaattatttctcgcttatttcttcttttatggagtttgggagtattgaatcatggtcttaatattgaaatatttcaccaaagtccaggggactcctttgggtaatgaggttgagctggcaccagatcagcttccagatttgatgcttagcattttgctggtaagatggctaaaggattttaatttagcctctattctatagtggcttaaaagaacaaagggtggtgcgttttccccttatacactcaaaac

SEQ ID NO: 492215 - DNA, 507 bp, Homo sapiens
tactctaagaaacagaattatctcatgctaactcacctctctcacttaacatccagctaccacccagcagctgtcaaacatgtagtttgaatgatgggatctgctctaagcaaagaattggattattcctaagtcactcaaagtatattagatacacctggaaaaattayggaattattttcaaatttaatctatatggatactctaagcttttgagttggacaagaaagtctaccatgatgattctggagctgaagttttttgaggtctgagttcagatatcactaagaggtaatggcagatactatagtataagccttttgcttagtctctgtatcagtccgttttcacactgctataaagatactacctgagactgggtaatttatgaacaaaagaggtttaattgactcactgttctgcatgggtggggaggcctcaggaaatttacaatcatggcagaaggggaaggggaagcaaggtatgtcttaacatggcagcaggaga

SEQ ID NO: 492216 - DNA, 561 bp, Homo sapiens
tcctgtataaggtgtctgacaatccctgttggagtgtctcatccagttgggtggcatggggaacagggcccatttaacaaagcactttgtcgcttggtggagggggtgtgcctcactgggaggaaatctacttgtctgggctgcctggactcctcagagctaccaggaggaaagactaagtctactggtctgcagagactgtggccaactctcctcctggggggtcagacccagggggatctggattctgtctccgagtctgtgrctggagttgttggagttcctgcagggaagccccacccaatgaggaaggatgggtcagagtcaggcctaaagaagcactctggccgcagactgccaccgctggtgtgttgggctgtgggggacaagttttgggaccaagccgtccagcctccctggctccagcaggggaaaagcacagcctggggctttagagatgggtgctgcccttcccccacccagggagcttagcgtgttaggcagtagtgagttccagtgctggctgctgtccctctcccaagtagttcaaatggtttagac

SEQ ID NO: 492217 - DNA, 571 bp, Homo sapiens
ctcactgttatggactgaatgggtgttccccccaaactcatatgttaaagccctaacctctaatgtgactctatttggagagagggcctgtgaggagctggcaaaggttaaatgaggtcataagaatggggccctggtttgatggtatcagtgcccttataagaaaatataccgaaatgcttgttctctctgttacgtgaggactcagtgagaagrtgatgtttacaagccaagaaaatccttgccagaaaccagattggctggcaccttgatctagcttctagaactgtgagaaaataaatttccgttgtttaaatcacctattcttgaactctatagtagagggaagtgatcttaaagaaaatgctgatattggagttatatatataataatatatcccagaggtgtccactcctttatgtcccttcactggtccttttactacctaatttagccctaaagtataggttcaaaaactcctcgctgttctctaggtcttgtgagtctccttgcccagaactgctttgaccaggtgttgagagactgagctgtgttcaggacattatgttg

SEQ ID NO: 492218 - DNA, 573 bp, Homo sapiens
agttggtgcaccacataagctattcccaaagcacacatgatgaaacggagttttctatgtagtgggctgatgcttaaaaggcatctgaggagatcaacagccagttggatcttagtttcttattccatgaccacgaaatgagttggaggacggaaggagttaatttgtgtgtcagagaagcaagggcaaccccacagcttgcaaaaaaaaaaacaaaaataagtgcattttatttaaacaacggaacaaacatcagagagcatcccctgcaaagcccccaccccagagcctgctgatggaagcggggctgcaggacgctctgccacaacggcagcatctccaactgcacaaagaccccttgctgccagggccgggcaccggcctagctccttgcctgcctgcctgaggcagccgtggaatcagggcaggggtggcacaggtagaaaagacagatggaaacaatgcccatgaatatacccaaagtgtcccaggaggataaaagccrtcatgaggaccagaagccaacccagtctttttttggcctcccggagaagctgtttttgagacctgaga

SEQ ID NO: 492219 - DNA, 624 bp, Homo sapiens
agcaaaaaaacaaaaacaaacaaaaaaaattaatttttcccttagaaacttttatttggtagatagtaaataatatgaaacccagaagagggctctcatgcagccttggccttacctgctttgttgccattcaattacacctcgggccccatcattggcatcaataataacttgtgcagtcaaaccttctgaatcttaaaaaacatagaagcatatcttaaaatacatataaatgattaaaaatatttttgatataggatttaaagacagtccctttgaaattatataattcataatgtacaggtattatcaacattactcaaaagatgtttaagaaaataaagagacaatgcttatcacgtctgaataaggacacttttggctaacaagagccactgatttatagaaatttaatcaactgagaacagtataaaataatmaacaactgagattactattttgtttctattattttaattagttaaaacatatttggcatctctattctataatatcactatttcaggaggaaaggaaaatggggacagttggaaggagtagaaagagcaaaaaaaaatgaaaaataaatgaaagaagtgcaaggaaaggtacagagaaaacaga

SEQ ID NO: 492220 - DNA, 601 bp, Homo sapiens
acattttttgagaattgtcttttgagaatagtctaatgatccaagagatgtactggccaatagatcaaggaccagacttgagatgaatgcaatccccaccacacacctgagcctgggtgcttttgctcagaaccataaatgagctgggctaagtgatttaatgaaataacatagatttgcaacacacatttgctttggggcattggtagcagcatctgctatttttcacagtgccttcatcctacgaataattatgctgcttctattcactcaaccattctgtgggtggaagaggagagttaattaagactcttgccaaatctcaaattttaatacctctaagtaaaaggaaaactaaactttaaaaataagcgatgaaataatgtaaaataaaagcataccaaaaggatcaaaatcaaagcacaaaaccctaaactacgcctggtaaaaaaaacaaacaaatgtacaaaggaaatgaagcaggacaggaaaaatgtgttatgttctttccatcctgtgtgttagccctcctttccccagtttgttcccagaactttgtctgggtcaagragctccactgagactgtggttacaaacgaag

SEQ ID NO: 492221 - DNA, 567 bp, Homo sapiens
ttcttgtggctttgcatatataagttgtagttatattgtaaaatagcccaataaatgacatatggcagattcttactaaaatttatccttattaactctatcaaatatctatgtattcttacatatgaatttcacactaaataaacttctaggaagtttcacatttgattgattcacaaaaagttatcacatttgattgattccaagacccaccttttttaacatctttgaaatctaaacgatctttccattattcctgaccgggaatgacgtacaattttytcaggatgatttgtgtttgttctgatattctccaagggatactatcaacctgaaacctctttaaattaaattatgattgtcttgaggattcttttgaaccacactgagagcataaatctcagacagcttaaatggtctccaagttaccagactttacattttttgactttacaatgatttaaaaataatgaatttggtagaaaccatatagtacttagaattttgatcttttcccaggctagtgatatgcggtaaatactctctcccgatgctgagcagcacagc

SEQ ID NO: 492222 - DNA, 567 bp, Homo sapiens
ttcttgtggctttgcatatataagttgtagttatattgtaaaatagcccaataaatgacatatggcagattcttactaaaatttatccttattaactctatcaaatatctatgtattcttacatatgaatttcacactaaataaacttctaggaagtttcacatttgattgattcacaaaaagttatcacatttgattgattccaagacccaccttttttaacatctttgaaatctaaacgatctttccattattcctgaccgggaatgacgtacaattttctcaggatgatttgtgtttgttctgatattctccaagggatactatcaacctgaaacctctttaaattaaattatgattgtcttgaggattcttttgaaccacactgagagcataaatctcagacagcttaaatggtctccaagttaccagactttacattttttgactttacaatgattyaaaaataatgaatttggtagaaaccatatagtacttagaattttgatcttttcccaggctagtgatatgcggtaaatactctctcccgatgctgagcagcacagc

SEQ ID NO: 492223 - DNA, 630 bp, Homo sapiens
aatttttaatgcaatttttttccttcccagtctccctctcttatcatgccaaaggaataaatgaatatgtaagagctggtttctagtaaaaagaaatgttcaaacctggctgccagtcaaagggtttgtatacaacctaatagatgtatattacctctttccaatttcagagcaaaataatttcagagagtactaattttggtcataacattacatatttctttaagacatgaaagtcaaactgacttccttcctactgccaaaaaatctatagcacatttccgacatttgaaatgctacattctcttttggaatcaaagataacagtgccagaatgatgacacaaccaagcattcaaatgtgccatgaggcttgaaaaccgctgtggtcagaaagcacagctaaagaagcaaggaaaagctgccctttcttctccctcctgttaaaggccatctgaaatctataggcttctggaaaaaaatagacttaatgggcattaagatatttcgaaatggtatgctgattaacagtgtgtcacctattrgtgttcaaggtggaaaatttacccaccagtttagacaacacaataacgaaggttgaaaactagcgaagtagcacaagtgaaatcaa

SEQ ID NO: 492224 - DNA, 571 bp, Homo sapiens
cgtaagtctgattttcttttattccttaaaatgtaaacagccattcatatacaccttttatgtacacacttgtttaattaggagaagctattccaacctgatcagattattctaaattgtatataataactatgatcaaaaagctatttggaatagtttgattaaaatcagtgcagacctagaattataatggtaaacataattatttcacaatagctattccattaaatgtcatactgctgtgctggtgggaaatcgctgatgaaaataaatgtgttgaagatagaaaataatggtcaacaatccatttcaatrtaattgtaggagatggaatagaaaggctttcagttttgatggttttgatagcagatgttctaaagctccctggtggctatgttttcagagataaatgcaagtgctcaaatggaaatgcattcaggttcaacagaacacctgaaaatctttttaacaactccgctcactgtttcattgctcacttttggatttaattaaaggataagtaatgttatctttagtcaaaaataaacccacttaagggccgggtgcaggg

SEQ ID NO: 492225 - DNA, 571 bp, Homo sapiens
cgtaagtctgattttcttttattccttaaaatgtaaacagccattcatatacaccttttatgtacacacttgtttaattaggagaagctattccaacctgatcagattattctaaattgtatataataactatgatcaaaaagctatttggaatagtttgattaaaatcagtgcagacctagaattataatggtaaacataattatttcacaatagctattccattaaatgtcatactgctgtgctggtgggaaatcgctgatgaaaataaatgtgttgaagatagaaaataatggtcaacaatccatttcaatgtaattgtaggagatggaatagaaaggctttcagttttgatggttttgatagcagatgttctaaagctccctggtggctatgttttcagagataaatgcaagtgctcaaatggaaatgcattcaggttcaacagaacacctgaaaatctttttaacaactccgctcactgtttcattgctcacttttggatttaattaaaggataagtaatgttatctttagtcaaaartaaacccacttaagggccgggtgcaggg

SEQ ID NO: 492226 - DNA, 569 bp, Homo sapiens
tccaacatggcaacgctctgccttcttgtttcagctctcatacygtgcacaagtgtcctttttgagttcatttagtgccatattttttgagtttttggagttggtgatgttgctgtttaaaacggcctccaagcatagtgtttaagcgctttctgtcatttctaagtgcaagagagccgtgctgtcccttacagggaaaatacgtgggtttgatatgtttcattcagacatgagttacaatgtcgctggtcatgagttcaatgctaatgaatcaacaataggtactaaaataaggcgtcttccaatagaaacacatattaaacaaggttctgtgttgaggggctgaggaaaatgttgtgaccggagattcacaagaacctagccgtgtatttcctcttgaaacagaggttcagtatttgctaattcactgttttcagtgactttatagaacataactaccatgaatatcaagaattggctgtttggggaagaggtattgcaaacagagataaaacagaagctgggcacgaagaggctaataaagacaaagcgaattggcagggtgcagt

SEQ ID NO: 492227 - DNA, 569 bp, Homo sapiens
tccaacatggcaacgctctgccttcttgtttcagctctcatactgtgcacaagtgtcctttttgagttcatttagtgccatattttttgagtttttggagttggtgatgttgctgtttaaaacggcctccaagcatagtgtttaagcgctttctgycatttctaagtgcaagagagccgtgctgtcccttacagggaaaatacgtgggtttgatatgtttcattcagacatgagttacaatgtcgctggtcatgagttcaatgctaatgaatcaacaataggtactaaaataaggcgtcttccaatagaaacacatattaaacaaggttctgtgttgaggggctgaggaaaatgttgtgaccggagattcacaagaacctagccgtgtatttcctcttgaaacagaggttcagtatttgctaattcactgttttcagtgactttatagaacataactaccatgaatatcaagaattggctgtttggggaagaggtattgcaaacagagataaaacagaagctgggcacgaagaggctaataaagacaaagcgaattggcagggtgcagt

SEQ ID NO: 492228 - DNA, 569 bp, Homo sapiens
tccaacatggcaacgctctgccttcttgtttcagctctcatactgtgcacaagtgtcctttttgagttcatttagtgccatattttttgagtttttggagttggtgatgttgctgtttaaaacggcctccaagcatagtgtttaagcgctttctgtcatttctaagtgcaasagagccgtgctgtcccttacagggaaaatacgtgggtttgatatgtttcattcagacatgagttacaatgtcgctggtcatgagttcaatgctaatgaatcaacaataggtactaaaataaggcgtcttccaatagaaacacatattaaacaaggttctgtgttgaggggctgaggaaaatgttgtgaccggagattcacaagaacctagccgtgtatttcctcttgaaacagaggttcagtatttgctaattcactgttttcagtgactttatagaacataactaccatgaatatcaagaattggctgtttggggaagaggtattgcaaacagagataaaacagaagctgggcacgaagaggctaataaagacaaagcgaattggcagggtgcagt

SEQ ID NO: 492229 - DNA, 618 bp, Homo sapiens
tgcaggaacacagggtaccttttaacaccaccaccatcaccaatactcataataaacaaacagatgaataacacttatataatgcttattatgcaccaggcactctccaaaacactttatacttaggtactacttttatacacatttcagggaagtaaattgagacttacagtggttaagtgatctgttgtgaagtagcagatcccaaatttaaacacctgtatgttggttccaaagaccacattctttatcactattctatgctaaagctcacaagtgaagacttaataataaatctttaaaactccaaatatataactaaaatttgaagtatataattcttccatcaagaaagccttgtgaataggattacrtggaccctagctcttccatcccttttcaaaaaatctttatggttggtcagcttctttatattatatgaattctaaaatatatttgccagagaaactcaatcatacctataaatatgattactcctcatctctaccaaaccacttaaccatcccaactagccctactaacttcatgttttactgctaatgcaaaaaaaaatctaatgcatttctggcaaacagggagtttctgtggaagtcaatg

SEQ ID NO: 492230 - DNA, 603 bp, Homo sapiens
agacactgtgccttgtagaatgcaaatacctttggcagtgagagttcttaaatcattgattatttatagcggaagataagtaaataaatgccactaattgtgtgacctatggcaagttatactgtggttttctacctccagtgttcttatgtacaaaatgaattaatgatagaattttgtgttatggtgggtcattgttctgaagatattgtcagaaatgaatgggcaaggtgcttagcacagtgcctggcaagtcatgcatgtttaatagatgttggttgctattactgttattgttatcaaaacttctttgcaacttcagtacaagttggtgagtataatgacagtactggtgctgatggctggtttaggggaaagaacagaaccaaaaggatccttagtcctckgggttactgaagataaatgtactacttgacagttttgacttaggtcacgcctgctcgatatccttttttagggagtgcgtaagtgagggaaggggcattgcagggatggcaaacagcaaaaacacagtgggaagtgagaaggtccctgaagcaggaagttggagaaataagactgagcctcagcctctgcaactaa

SEQ ID NO: 492231 - DNA, 597 bp, Homo sapiens
gcttgaatttgtaactgtcatagtcataatgactctaatttcacactaattacactcccatttttctaaagtttattctataactttacaacatatagtttacaaggtagttaactattatttcttctaggatagtcaaacttgatcatttatatattgagatgcacattctttttaaataattatatttttcttgctcttttatattatagggcattaaatttttaaaaaatatgtgtgaagagaaagttatataaatttttttttcagrttggcaaataggtacaacatacaatatttgtttgtaaaaggagggactggagctactagattagaaatcaccgacttgagtggagttcaattcagttcattatttgttgagcacctgctgggtatggtagggtgggtaagtaaacattggctctgcctcaacaggtgcaccaatctgtgattaggtaagcgattttttactaccaagaataagaaatatggtagctaagacctcaatcttaatgaggatccaagcatcttaaactctttgcaaaatgagtcagagcataaattaatcaatagagaaccactggacccaacagaaac

SEQ ID NO: 492232 - DNA, 661 bp, Homo sapiens
cagcaatatcaaaagactgctgttttaggaagggaagttattccgatttaaataattaatgtgacagtatctgaggaattagagttggaatccagagtaatcaataagagaatcctctttttctccatagctggggaagcaaaggctaaataacataaggaatgtgcctgagtgaagacagcctcggttctggaattgggcacaaactctggctactataagtttccaaaggtcaatgtcattcttcccctgggaatgtcttcccagtgagttatttcaaatagcatgggcctgctccttctcacacaggtgcagcatcatcatccccagcaggtaacacttacgtggcactaagtattgcccagataggatgaggagtggaaacttaattctggatttggaactggaagactttcagatctgtcatacacgacagcgggcaagtcactgaacttctaagccttaagtgactccractctaagatggaaattataatttacctccaaatgttgtgggcataaaacatggaatccaaagtgaaagatgtaacaaaaaatgatagttaccgtatactaaccacaaggtatcaggcactctgcaaactcttcatgtgtccattatcccatacaattttcacagcaaccatgcagtacaggtatt

SEQ ID NO: 492233 - DNA, 528 bp, Homo sapiens
ttgtatgggaaagctcatctagaattctatataaagggacagaaaaaaaaaaaaaaagttaagtatcaggatctataaaatctgaaaagaaatagaaaacaggtactctagagatgaagttgatctaaaccactcatttcatagataagaaacaagcttaatataaagtgtttctccaaggatgaatgtggttaaccagggtagatgacctcactgctggatctctaagaagttggaagagaaatacttttactagtgaattataacactccaagagggaaataaactgtagtttacccaataactctggaaaccctataagttgcaggactaattaattcatgggagaactgtttcagaaaccccattcttatgtcctctagatgcatcaggatgaaaccaaacaatatgtgaaggatgacttcccaaaaagaggagaagggtaagggggaggaagatmccatgataaactgcttacaccctaaacatagattttcaataagagtttaaggttcacaaactaaagct

SEQ ID NO: 492234 - DNA, 613 bp, Homo sapiens
ttcgtgtttctttcctttttcttaactcttacaaacgtttgtctagggcctggcatttgggagcacagactgaggtactacatctcactcttgcttctctagccacaccacccttttgtttttactggaacttggaagcttgttcttatcctagggcctttgcacttactgttctgtctgcacccaggtctttgcatggatggctattttatgtcattcagacctcagctcaaatatcctcacctcagaaaagcatcccctggttaaatccagacaaatgaaatctaaacaaacactctgctattctatatatattaccaggtttaattattttcatagctcttagtactataaaaattctgattgctgcatttagttgttttgttattctctctcttgccactgcctttggtgaacccccaggagattgtaagctccatatgaaaggaactgttgtccactatgcttcctgatgcacccctacatctagaagagtatctagacctaagaggmacagggtacacattgtttaatgttaatgaataaatgggaattcaaactagggaagaggctgtgatttgaaaacctagttaactagaagccactcttatta

SEQ ID NO: 492235 - DNA, 369 bp, Homo sapiens
ctgcaaccaattattattttagagagacagtttgacaactgcctgaccatcacttgatagccgcctgactttcctggtkgggggttgcggggagctctctcctgccctgctcatgcctgactacttactataacagtcctatttatatttgtatataaagtgacatatcgaaatgtatttaataaattaataagtttaatacattttgagtatggtagtttttcgggtttcacacccatcttaataaaaatttaaaatataagccaatatttttcagaaacaaacaaccaacaatactgtcctgatcatcactaccgactcatctccttaaccagtgtaaaggatttattagaaaaatttatggtttta

SEQ ID NO: 492236 - DNA, 550 bp, Homo sapiens
ctcctttctgccgtctgactgagaaacgctcttaaatatttagccttcgtctcattattttataaatgagcttaatatacttaagttgcagaattatgatgatatcatatattagaatgggccagacataaaaaagtcactattacatatgagattgcttcctttcctccttgctgaggaagtggctgagagtgtttcatayggcagtccttcctttttcttgtctccataagttctcagaatttatactatactattcatttataaatgtgcccatgtccagcagcatttgccttggaaccaagatattgaataacaggagcaataacacagacctcaggcacggaattcattactcacagccaacggcagttcttagttcagactacagtcagttccagttacaaatattccttgctgaagcacaggcttctgcttcaaaacaactcagagacacggactgctttctgttttatctcctcatatagcagcgatagtgcttaaagttatccccaatctgatgccattccgtctcactccatcaaaaggc

SEQ ID NO: 492237 - DNA, 636 bp, Homo sapiens
aacctgaaactttaattcacagtcctactcaggatctgttgtgatcaaagctctgcatgccagttctctactcagaaawctgttaattaacacctcttcacaagtagagctgattttgattttctatgaaggaaaacataggtcattctaattttccttctgcttcattcattcttttgtcttataatcttcctggcacaaacaggtaggatcaaaagctgcaccagttagttaacttccataccaccttaagtctgcccagatatttatgtctgcctaccagacaagaatttgctttctacctcacccaagagtatattctattatgtatcatagctacaaggatgtaagctgacattctaggtaggatgctaaacaatgtcagagaaatactataaagcatcttattgagaaaaccatatgcttactaaagattagaatagcataggcaagccaagcatggccacataagagagggtgagtgactgaggaaagaaagaagtagaaatcaaatgacttagagccaatgagttacctaaagacaataaaaattaaacagcacacatgaatgtttggcgattatgtaaaaggtgcaaagctatgtgtaaacctagagcttctcctattcaagttttc

SEQ ID NO: 492238 - DNA, 630 bp, Homo sapiens
gaagtatcaatgtaggtgatctataacaaacagaaataagaagccacaaactgcaaagttttgtcatgttaattagtayaactcctcattccacatagtcaataaaaattcaagacaatttctgaaatctatgcaggacatgagagtaatcaatgttcacagtctatttgtgagctagaaggattcaacattaatgtttctgagaggaagataagaagagactaaatttatacacttctcattataaataagtgctacctgagttaaaataacaggtcagagaatcagcagctagctttaaactttctattttccatgaaacttgcaactactcaaataaatccaaagtagctttctaaattattatattaatacattggtaggtaggttttgagtaccatctgtccgcaaatgtgctgctcttagcttgtcttgtttcttcttcactaatttttcagagctatactttcacctttattcccaagcagcccacaggatccaaatctattttagtttgaaagtcgaagacaaagagagaattgtagttatcggcaatctcaggtgtgctcatccttagagtcagccccagtgattattagtctatgcacaacgagtgatccccagacatct

SEQ ID NO: 492239 - DNA, 641 bp, Homo sapiens
tctgacagttgccccaaaaccacatgcagctttgaatattttttgaccctttgtatggacgacctcttctttcctgtttatgtttaagttttctttatccttatatatctatyaattcattctgatttgttttctatcttccaggaatttttcaaaattcatgaactattgatcatgtcctttttaaaaaattttttactactgttactacttgtactgttaagtttattttttcctacataattttgtgggggaaggaaaatagatgcagatgttgtatctgaaatctttatttaatctgatgtatcacttctcacctatcacactggtaaactttcaaaaatataagacaatagctcctgtaggtgacactgtggagaaacatgcacttcatgtttccccacacaaagaatgcaaattgtacaacccttttggtgggaaacttggcatacctaatgaaactacatatgccctaacattttgattcagcaatctcacttctaaaaatctatcttgcatatgtatttttattcctccaacactataaaaatacatagcacaaggttatttattgcagtgttgtttatatatgcaaaatattggaaacaacctaaatgcctatatatatggcagagtggctg

SEQ ID NO: 492240 - DNA, 640 bp, Homo sapiens
gcaaatattggtcactaagctagctgcaaacacctccttaacattttgaaaaataacaaattaataataatttgagataacaccatttaatatcttaatgttaaactgtgcatatttgctgttaatcaaaacaattttttaaactccaagtgatggcacttaatgttcttttaattatgcaaggagctaatcaatttgtcctttaaatggatgttcaactgattaagagaagctaatcatcagttacgaaatccataaggcacagatgagtcaggtttaaaatgytttttgctaacttgggaccaataattctgtctccttaaattacctcttatttcagttgggagaagttactttctttccttaaatatgtaaatgttatactcttacctgtggaaattaaagcctacttcagcctatagttaggaatcaaatccagaatgatgctgtaagggttcagtttcttattttacccctaaaggacaataactaagcaagggaattatgattcagcattaagaataggttgctatgaattaaataagacagtttagatgtttgactctctttgatactctaaagaggatttaggcatgttaattgttcagtactctaaaaagatgatttcatccgataacat

SEQ ID NO: 492241 - DNA, 425 bp, Homo sapiens
tcttggctgagtaagtgtgcagggccaggatgaccacatcaccctgactggtctcctttccctgatcaaacataggccaaccatrtgaaccatctctgctggctggatacagaaagggcttcatcatcccagtgaccaccaccctacccttggggcagttatgatttcacataagtaaggatccatattgattaagattctatggttgcaaacaacagactctgtctctagctaatttgaacaataaaaagtacattttgggaaggacacagggcagttcacaaatattaaagaaaagttgaactttagaccttccagcagccagaaataagggcagcttgggcagtctcaatagcagaactactggacagtcagttcaggttactcctccaaacactctccatccttgggtcaatctgcttgag

SEQ ID NO: 492242 - DNA, 599 bp, Homo sapiens
atgaggaaaggagggctgggaagtttgcggacaggggkagtgtaagatgcacgttgcaaagttagaagcaaaacttacaagagaaatgaagcaagacctcaagataatgcagaatgatgggaatacagggagtccaggggcatctacggcataaggaccttggtgtcagaaaggcagaagcttcagagaatttattcggtgtcagaagacaggctgttctgccttgactttcttctggaggaaaacacaggccaaggatcctagtatagtattcaaggacagcataaatagaatcagaataacgacatgaatgaggacccattagctccatgtgaacttactcaaaaaactctctatcccagaacttcccccaaatcatcactaagaacgtattagctggttcacaatatattaattaaatagagcagatgaatgcaacactgtgtgtcttcctctagagaaacgataaagggtatactaaggcactgatactctgcagaaacaggaggaatgctttctttccatttttggtgcttattttagattacagttttgcaaagacgagtaagttttgtgtaataaagaaaagtatcatttta

SEQ ID NO: 492243 - DNA, 487 bp, Homo sapiens
gctgggaagtttgcggacagggggagtgtaagatgcacgttgcaaagttagaagcaaaacttacaagagaaatgaagcaagacctcaagataatgcagaatgatgggaatacagggagtccaggggcatctacggcataaggaccttggtgtcagaaaggcagaagcttcagagaatttattcggtgtcagaagacaggctgttctgccttgactttcttctggaggaaaacacaggccaaggatcctagtatagtattcaaggacagcataaatagaatcagaataacgacatgaatgaggacccattagctccatgtgaacttactcaaaaarctctctatcccagaacttcccccaaatcatcactaagaacgtattagctggttcacaatatattaattaaatagagcagatgaatgcaacactgtgtgtcttcctctagagaaacgataaagggtatactaaggcactgatactctgcagaa

SEQ ID NO: 492244 - DNA, 492 bp, Homo sapiens
ttattttcattctggacctctaataatgtaaatgttattttttycttatatttttactagttcctaaggttatattcagtatgctttttccctctgtgttctagaatgggcgtattagtcagggttctctagagggacaggactaataggatagacgtctatatgaaagggactttattaaggagaattgactgacacgatcacaagatgaagtcccacaataggctgtctgcaagctgaggagcctggaagccagtccgagtcccaaacctcaaaaatgaggaactgacagtgcagccttcagtctgtggccgaaggcccaagagcccctggcaaatcactggtgtgggtcccaaagaccaaaagctgaagaacttggagtctgatgttcaagggcaggaagcatccagcaaaggagcaagatgatgaccagaagactcagcaagtctgctcttccaacttctgtctgctttattctagctgtgctgccag

SEQ ID NO: 492245 - DNA, 502 bp, Homo sapiens
atggaaacgtcatcccttatggtcataggcgagtttgtgggaccctaacactttgaagccatgtgatcacatcaccgtcatattttaaatcagacctgcctatttccacctctcagtttgcctgtctgaacatttctgttgtctttttttctaaatgtctttcttaacacattggtttaatacaaacaattacatctcctgggcacccatgatgcataagacaatgtgagatatatatatatatattaaatgcatactttattacttatgttttattatacatattaaattgtatgtacagcaggccttcaataaccagaagactgtatatatttattttcatttgttatrtagtctactatatattatacatttatacgaaatatttatataatgaaatattttatagtaattgtatgtatataacctcttgattataaggctttgaagagggagcaccattttgcctgtttctcatgtgtgagcagacggactcagaagg

SEQ ID NO: 492246 - DNA, 623 bp, Homo sapiens
aggtgcccagcctggaacagcacgcagcaggcttttgcttatacgagagagaaaaacagacaacagggctttgttagagtgaattctagttgcctatctcagatgttgtaatgtggttcaagaaaggacctgaagaaaagacgccgagattgtcttctgtacttcgaaaaatggtataagcaggggaagctggtgagagagaatttgaaaataaatagctgtatgtatatttacatctgtatctctgtctgtaccttcatctctattttatttctgtctctgtatctgtgtctattaaatatctgtgtctctatctctgtccctatctgcacatatgactctattctatcactgtatctacagctacctgcatagctctgtctatatctataactatatwtctacatatccaaatctatctgcctgatcttcccaagagaaccctggcggcacacaaggctctgtgggtcaccctgcactgccttatctcagagtgtcccatttgagttcttaagattcgttagaccttgccttacctgaggcaaatacttataggaattatggcaaattttcctgggcggagctttcattattagtttttgcagattgtctgtgtcctgggg

SEQ ID NO: 492247 - DNA, 623 bp, Homo sapiens
aggtgcccagcctggaacagcacgcagcaggcttttgcttatacgagagagaaaaacagacaacagggctttgttagagtgaattctagttgcctatctcagatgttgtaatgtggttcaagaaaggacctgaagaaaagacgccgagattgtcttctgtacttcgaaaaatggtataagcaggggaagctggtgagagagaatttgaaaataaatagctgtatgtatatttacatctgtatctctgtctgtaccttcatctctattttatttctgtctctgtatctgtgtctattaaatatctgtgtctctatctctgtccctatctgcacatatgactctattctatcactgtatctacagctacctgcatagctctgtctatatctataactatatatctacatatccaaatctatctgcctgatcttcccaagagaaccctggcggcacacaaggctctgtgrgtcaccctgcactgccttatctcagagtgtcccatttgagttcttaagattcgttagaccttgccttacctgaggcaaatacttataggaattatggcaaattttcctgggcggagctttcattattagtttttgcagattgtctgtgtcctgggg

SEQ ID NO: 492248 - DNA, 614 bp, Homo sapiens
ctgctggttggaggtcgcacgtctaacttttgtggaacagagacctgaaccctggccacctcactcatcaactctcttctgttatatccaccaaaagcatctggtgtcgcagcaggtcactcgctgggagccccacgttccgtgggcaccttcacatttttataatcagctcttggtctatttgaactcaccatcccaggggttttgcacatcagatgtggttggattgccattatacataatggttagtgttctccttgtctcattgtgaaattgtgctgaaatggagtaattacgttagccttgacttcaactcttcagtagagagaacaatttttacttatctctatcyaagcacttttcttatagtaggagtttgttaagtgtttgttgaattattctgtaaatgtccactttgtgttaattctagggcaaaagttcctctcagaagcccgtacctctttgagcctcactacttgagtattcaaagctggaggacagaaatgttggtgtttgatacgtctctgcgagcaacaacttctccgcagccttgtgatgaggaagaaacaatttagagcctcctctacccactgatccttgcctgctgaagacat

SEQ ID NO: 492249 - DNA, 667 bp, Homo sapiens
cgctgtctcagctgttgttttaggaccatgggccctgggcggttacagcaggaaggcgggtcccagtctccttctgatggctccatctgcactgggtaattatttttgacacgaggacatttatcagtgagggtgagctgtttggagtgcctggagtgctcccaaaaaggagtattagaacagctcaatccaactaaaaagaaacaaamaaacaccaaaactgctaagtgggctttaggactaacagccagatcccagctactagagtgaatttaaagagtaataattaatcctaacaattaagggaatatattttgccaccttctccctgagtggacgcagtgagtggatttggttgtgaagaaggcagacgttgcctttcttattgaaaagatgggttcatgcagcagagaaagtaagctggcagggatgggttttttctgctcaggtagcagccagagcggcaaagcgatctgtttaaacactgaccttctgtgttttccttgaaacagaaacagaattttaacactggcctaaaggatggtgagaaatgaactcctggttgccgaccagacttctccttctcatcccgacgacgcgggacatagggtagacggtcccaatgccgacgtaagttccacagttcattcctttccacgaggatgca

SEQ ID NO: 492250 - DNA, 667 bp, Homo sapiens
cgctgtctcagctgttgttttaggaccatgggccctgggcggttacagcaggaaggcgggtcccagtctccttctgatggctccatctgcactgggtaattatttttgacacgaggacatttatcagtgagggtgagctgtttggagtgcctggagtgctcccaaaaaggagtattagaacagctcaatccaactaaaaagaaacaaacaaacaccaaaactgctaagtgggctttaggactaacagccagatcccagctactrgagtgaatttaaagagtaataattaatcctaacaattaagggaatatattttgccaccttctccctgagtggacgcagtgagtggatttggttgtgaagaaggcagacgttgcctttcttattgaaaagatgggttcatgcagcagagaaagtaagctggcagggatgggttttttctgctcaggtagcagccagagcggcaaagcgatctgtttaaacactgaccttctgtgttttccttgaaacagaaacagaattttaacactggcctaaaggatggtgagaaatgaactcctggttgccgaccagacttctccttctcatcccgacgacgcgggacatagggtagacggtcccaatgccgacgtaagttccacagttcattcctttccacgaggatgca

SEQ ID NO: 492251 - DNA, 667 bp, Homo sapiens
cgctgtctcagctgttgttttaggaccatgggccctgggcggttacagcaggaaggcgggtcccagtctccttctgatggctccatctgcactgggtaattatttttgacacgaggacatttatcagtgagggtgagctgtttggagtgcctggagtgctcccaaaaaggagtattagaacagctcaatccaactaaaaagaaacaaacaaacaccaaaactgctaagtgggctttaggactaacagccagatcccagctactagagtgaatttaaagagtaataattaatcctaacaattaagggaatatattttgccaccttctccctgagtggacgcagtgagtggatttggttgtgaagaaggcagacgttgcctttcttattgaaaagatgggttcatgcagcagagaaagtaagctggcagggatgggttttttctgctcaggtagcagcsagagcggcaaagcgatctgtttaaacactgaccttctgtgttttccttgaaacagaaacagaattttaacactggcctaaaggatggtgagaaatgaactcctggttgccgaccagacttctccttctcatcccgacgacgcgggacatagggtagacggtcccaatgccgacgtaagttccacagttcattcctttccacgaggatgca

SEQ ID NO: 492252 - DNA, 501 bp, Homo sapiens
tggtctgactctgtgtcaggcagcaaaggccagtgtgtgcccaacatttccacgtggactggtgccttaactgggctggcatgcccccagggcatggctacaatggaggcacaaattcctgttgctgtctctgtccggatgcatctctgaagcttacaaagcagcggcttaaagagagtgcccctttctcccagcacactggcctgccttcctgatgttcacattgtcacagctgcttactctatccaacgctgtctttgggtggatatttacaaaatgcattcctagtgtgatatcaagaaatacacatttttcagcaaaatgtccaccttttgcaacaygatagaatttacttagcagatcagtgcaacacaaacgacgatgtgactttaccccatatgcattattgatgatgctctcttgacccctaaaaccaaaaatgtgctgttgtcccataaagccagatttcaaaaagagatatgtaatgtttgtggggatttt

SEQ ID NO: 492253 - DNA, 448 bp, Homo sapiens
ttggcagtggagctctccaggaggagatggcagcagaggtggagggtttgtctccttctccctccctcaaggctcaccccagactggcttatccctcaaccagtggtcacagcccctatcagttgggcctgtccacacagctctgtctttgttttttgtttttgagacagagtttcgctcttgttgcccaggctggagtgcagtggcgtggtctcagctcactgcaacctcccagttcaagcgattctcctgcctcascctcccaagtagctgggattacagatgcctgccaccatgcctgattttttgtatttttagtagagacagggtttcaccatgttgaccaggctggtctggaactcctaacctcaggtcatccacccgcctcggcctcccaaagtgctgggattacaggcatgagccaccgcacccaacctgtctttatgtt

SEQ ID NO: 492254 - DNA, 556 bp, Homo sapiens
gatctctcaggtttctgccagttgagaaagtgtagcagtgccctggacggggaggcgggcggggcgaactgcgagctcctgccccttcccarggctcaggcgactgtggaccccgatcagcgcaggctcgcggcccgctgtggccccgcctcctggccgccagccgggcggagccaggccgccccccaagccgggtggccttcggggtgcttgcccggctggaggtggtgagggggcgggtccaaaggagaggtcaatgggcggggcggggccacaacgcccccacgtccagagccggcaggcaggttccccgcggggggccggggccgggccgttgcctagcaacgccgagccccgcccggccggcgcgtgcctgcccccagcatggcttggcagggctggcccgcggcgtggcagtgggtcgccggctgctggctcctcctcgtccttgtcctcgtcctacttgtgagcccccgcggctgccgagcgcggcggggcctccgcggtctgctcatggcgcacagccagcggctgctcttccgaatcgggttagtgc

SEQ ID NO: 492255 - DNA, 556 bp, Homo sapiens
gatctctcaggtttctgccagttgagaaagtgtagcagtgccctggacggggaggcgggcggggcgaactgcgagctcctgccccttcccagggctcaggcgactgtggaccccgatcagcgcaggctcgcggyccgctgtggccccgcctcctggccgccagccgggcggagccaggccgccccccaagccgggtggccttcggggtgcttgcccggctggaggtggtgagggggcgggtccaaaggagaggtcaatgggcggggcggggccacaacgcccccacgtccagagccggcaggcaggttccccgcggggggccggggccgggccgttgcctagcaacgccgagccccgcccggccggcgcgtgcctgcccccagcatggcttggcagggctggcccgcggcgtggcagtgggtcgccggctgctggctcctcctcgtccttgtcctcgtcctacttgtgagcccccgcggctgccgagcgcggcggggcctccgcggtctgctcatggcgcacagccagcggctgctcttccgaatcgggttagtgc

SEQ ID NO: 492256 - DNA, 556 bp, Homo sapiens
gatctctcaggtttctgccagttgagaaagtgtagcagtgccctggacggggaggcgggcggggcgaactgcgagctcctgccccttcccagggctcaggcgactgtggaccccgatcagcgcaggctcgcggcccgctgtggccccgcctcctggccgccagccgggcggagccaggccgccccccaagccgggtggccttcggggtgcttgcccggctggaggtggtgagggggcgggtccaaaggagaggtcaatgggcggggcggggccacaacgcccccacgtccagagycggcaggcaggttccccgcggggggccggggccgggccgttgcctagcaacgccgagccccgcccggccggcgcgtgcctgcccccagcatggcttggcagggctggcccgcggcgtggcagtgggtcgccggctgctggctcctcctcgtccttgtcctcgtcctacttgtgagcccccgcggctgccgagcgcggcggggcctccgcggtctgctcatggcgcacagccagcggctgctcttccgaatcgggttagtgc

SEQ ID NO: 492257 - DNA, 660 bp, Homo sapiens
ctgcttgggaggctgaagcaggaggatcacttggactcaggaagttgaggctgcagtgagccatgcttgtaccactacactccaggcggagagacagagcaagaccgtgtctcaaaaaataaagtaaaataaaattacatagcactaaatacacatatacaagtaaaagtaaaactggggaaataagaataagatcagtggtctgtatcaatgtcaatatcctagttgtgatattacgttacagttttgcaagaagttatcattaaggacaagggggtaaagggtacataggaatctctttgcatgagaatctacaattacatacaaaacatttgtcttaagtttagttttaaaaatatttgaggaaaagcagcaggactgttctagcttaagttggtgcatgtcctgagctgacattttgagcccatctatgagactgtcatcctctgcctgtaagcccatctgcctcccactgctcctgggaaacactgggcccatgtaaatgtttagcctgaggcatagatgcaaaccctgaagctgaatctactgcagacttctttccctacagccagcattctggccaactgcctcgcactcatggctttgggcttgcagggcatgctyatgcactgcacctgtgcacgcttctttcagactagg

SEQ ID NO: 492258 - DNA, 633 bp, Homo sapiens
ccagctgcagtgttgtctacggatgagggatttcaatggggctacagggtcgcaagagattcagggcctgttatgccgcagtgcagratactatctggtagaggcagggctgtcaaaatggtaccttgctgtagctgcttagaacttagcgggatatgtgggacctggcctgagctctctttttagggcaatgccatcatgtggtctcagtcagcctccaatgttagtctcagagcctatgagtcgaggggctctctatgcctagaattgcagagtcatgataggcatgtggatgatcaggtgtctctccattaccctttccttgcactggggaacctctctgggttcccagcttatccaagctgagaaggctgtcttatttccctctcctttcttgctttaggtatttcctgtcacttctctgttgaattccagtgttctctctgaactgatatattcaaaatgtgatgatctatgcttttgcttcttctttgtggagggggcaagtatcagatacctctagtcagccatcttgaagctgctcccccattagtcagcaatatagctttaaattggtcacctgtataaacaggcaatgctcagtgatatttgttccattttcatctctctccc

SEQ ID NO: 492259 - DNA, 633 bp, Homo sapiens
ccagctgcagtgttgtctacggatgagggatttcaatggggctacagggtcgcaagagattcagggcctgttatgccgcagtgcagaatactatctggtagaggcagggctgtcaaaatggtaccttgctgtagctgcttagaacttagcgggatatgtgggacctggcctgagctctctttttagggcaatgccatcatgtggtctcagtcagcctccaatgttagtctcagagcctatgagtcgaggggctctctatgcctagaattgcagagtcatgataggcatgtggatgatcrggtgtctctccattaccctttccttgcactggggaacctctctgggttcccagcttatccaagctgagaaggctgtcttatttccctctcctttcttgctttaggtatttcctgtcacttctctgttgaattccagtgttctctctgaactgatatattcaaaatgtgatgatctatgcttttgcttcttctttgtggagggggcaagtatcagatacctctagtcagccatcttgaagctgctcccccattagtcagcaatatagctttaaattggtcacctgtataaacaggcaatgctcagtgatatttgttccattttcatctctctccc

SEQ ID NO: 492260 - DNA, 606 bp, Homo sapiens
ttaaaggcagacaattagaatgaacatcttgttgaaattgaggaaaaactcactgactagactgaaaaattcttatttggaaaaagaatttgggaacaagctttgggatagaaggttggggtttggatagattatggtaaggatttgcactcagagcgagtctgaatttttttttttgagacagtcttgctctgtcacccaggccggagtgcagtggcgcaatctcgctcactgcaagctccgcctaccgggttcatgccattctcctgcctcagcctcccgagtagctgggattacaggcgcccgccaccacgcccrgctaattttttgtatttttagtagagacgggatttcaccgtgttacccaggatggtctcgatctcctgacctcatgatccaccctcctcggcctcccaaagtgctgggattacaggcatgagccaccacgcccggccggagtctgaattttttatgttaaatatgaaatggtctgtttctgcatagagaagtgacataaaaatgtgattaggaagagtaatcatttttaaggttctttcagggaaaaattggagagggacgagattagtgtctgataaatcaacttat

SEQ ID NO: 492261 - DNA, 606 bp, Homo sapiens
ttaaaggcagacaattagaatgaacatcttgttgaaattgaggaaaaactcactgactagactgaaaaattcttatttggaaaaagaatttgggaacaagctttgggatagaaggttggggtttggatagattatggtaaggatttgcactcagagcgagtctgaatttttttttttgagacagtcttgctctgtcacccaggccggagtgcagtggcgcaatctcgctcactgcaagctccgcctaccgggttcatgccattctcctgcctcagcctcccgagtagctgggattacaggcgcccgccaccacgcccggctaattttttgtatttttagtagagacgggatttcaccgtgttacccaggatggtctcgatctcctgacmtcatgatccaccctcctcggcctcccaaagtgctgggattacaggcatgagccaccacgcccggccggagtctgaattttttatgttaaatatgaaatggtctgtttctgcatagagaagtgacataaaaatgtgattaggaagagtaatcatttttaaggttctttcagggaaaaattggagagggacgagattagtgtctgataaatcaacttat

SEQ ID NO: 492262 - DNA, 623 bp, Homo sapiens
accttgagactgcactctccagttcttcacggcctgtgaacggtgcagaagggactgtgaatttcccaagtgtccctcgaaccatgtgaaactcaggagaaaggtgaaggtgctggctatgttcttgaggggtgtgccgaaaactgagaagagtctgcaactttaccctacttgccagctaataagttagactgccactgtttcatagatcctggaagaaatcatcagacccctgggacagagatgaaggtcaggttgatgagtcagagtaaccaccatggtctggctatcagtacctctcatgctscttctgcaagccccagtcccacagggaaacagaaagaagactgaatgacggctgcacgcgggttaaggaacccagctctttcatacgggcagtaaacatccctgctctgtgctccaaagaagacagtatctctacctcctgagactgttgagatcctcgaaatgacagtccaaaacaaagagctatccattcattgctcacaaaacatgcagaaatgtcagatagccatgggaaattgtctcccaacagggtaaagtgagccactagctgggtaatgtagtgaaggaaaatcagaagaaatcacctgggagtccca

SEQ ID NO: 492263 - DNA, 605 bp, Homo sapiens
caggccaaaatggcctgtgcttttgcatagcatcatggctattagaataggggcctaccatcccattttaaaaagtggtgaagaaataaaacaggatagaagacaagtaaagaaaacctgaaattgagcagcatccttaagacagttatgaaaacagaatagttactgacwtagaaaaatcctattcatttcattgctttttctttaaaacattttctactgtggtaaaataatataacaatttctgttctccctttattatctagctatttggtaatacggaatgtctttgtatatagaaaatgataatataaaaatcatatagccagtctctggtcccagatgctgttcttctccatccatttctttttcttctaagagatgtgaagtccattaatctgatatttaggaatggcctattgtgaatgttcacaagtgattgtggtgaatctaatctttattagtttgaaactcttttacatattatataattagtaagcatttattatttctgtatcctggtggataaattcaatattaatttctttgatagttacaatgcattctttacagtgaataattctgggcaatacgttctttttcta

SEQ ID NO: 492264 - DNA, 514 bp, Homo sapiens
tcagcatccctcctttctgacccacagctttcctttctgtaaccccaaatcaggctgattgtacttgaaactcacatctgaataaaagatttccctgtttaaaatctttagatagcttcayataaccttcaggataaaaatccagactcataacatgtcaacatgagatcttcagtggactttaacattttttggttcacagacatcttttttttattgaagtgtttttttttttttaatttttggttttttattttactttaagttctgggatacatgtgcagaatgtgcaggtttgttacataggtatacatgtgccgtggtggtttgctgcacctatcaacccgtcatttaggttttaagccccgcatgcgttaggtatttgtcctaatgctctccctccccttgcccccaactctccaacaggccccagtgtatgatgttcccctccctgtgtccatgtgttctcattgttaaactcccacttataagtgagaatatgcagtgtttgggt

SEQ ID NO: 492265 - DNA, 606 bp, Homo sapiens
tatctccaaaacagcgatgtaaaaatctgaaaaattatgtgtcttagaaatggtaaaatagacatgctgacatatttggccaatcgaaatgttaatattactaatagtcaaaatcatctgaaccaaataactcaaaattgatcattattaattattcccatttgggtaaaagatgaataaatgtgtgctgaagatacctgaagatgcattctctttatatattagggggtctatgatctggctgcatatatctttatgatataataaataaatcctattgtaaacaagttgtagtatagtcataaaatgcattactctgctgcaataaaaaggaactactaatacaaatgaatttcamaacattatttcatgaaagatgccaggtatacacaaaaaagaatcattaataaatggaatcagaattctacttacaatattcaaaaaaagtaaaactaatataactaatatatagtggcagaaattataacaatggtgcctctcatgggagatgatattaactgaatggaatactgcgaaaaaattgctggagtgatggatgtgttctacaccttgactgcaatcagttacaatgactatatacatgta

SEQ ID NO: 492266 - DNA, 657 bp, Homo sapiens
gaaataaaattataacatttttgtatattacacatccataacagaaatataaactaagcaagaaaaaactacccatatgatattcctttatttggacagtttgttctggatatcccaaaaagtatgctctgaacttgttagctgggaataaccaatctgtgagagtgggaaaacaaaaatttctatgttgtacaaaataccacccatcatactattaaaaaagaaataygtattaggatatctaaaaatagcattcatctcatagggtttaatacgcaatattctaaaactcagtatgtcagttttaggtaatcaaagatattgtacagaaagagactaaaattaattaacccttgctcttgatgacacatgttcaactcctgagcagaattatctagcagttcaaatagagtaataccagagggaaacttatataatcaaaaaaactaaaaagactaagttaagtgacccacactactatcagaatgacttcaggaaaatactttgaaagcatccatcagagagttaaacatttgagcacatagtattttaggtataaacgaaagcacaaattcaaagcaggttcttaaattactttaccatcaggattttataatctaaaaatcagacctaaaatattttcacataaactaagaa

SEQ ID NO: 492267 - DNA, 657 bp, Homo sapiens
gaaataaaattataacatttttgtatattacacatccataacagaaatataaactaagcaagaaaaaactacccatatgatattcctttatttggacagtttgttctggatatcccaaaaagtatgctctgaacttgttagctgggaataaccaatctgtgagagtgggaaaacaaaaatttctatgttgtacaaaataccacccatcatactattaaaaaagaaatacgtattaggatatctaaaaatagcattcatctcatagggtttaatacgcaatattctaaaactcagtatgtcagttttaggtaatcaaagatattgtacagaaagagactaaaattaattaacccttgctcttgatgacacatgttcaactcctgagcagaattatctagcagttcaaatagagtaataccagagggaaacttatataatcaaaaaaactaaaaagactaagttaagtgacccacactactatcagaatgacttcaggaaaatactttgaaagcatccatcagagagttaaacatttgagcacatagtattttaggtataaacgaaagcacaaattcaaagcaggttcttaaattactttaccatcaggattttayaatctaaaaatcagacctaaaatattttcacataaactaagaa

SEQ ID NO: 492268 - DNA, 602 bp, Homo sapiens
tccaagagagtcagtcacctttttttaatcaaacgtaatgttgtacagtgtaagacaggcattaataaagaagaaatcccaaattaggaccccaaactgaaggatttgacaaatgttcagtttaaagtcctataactaagctaccaactcagccaaayaatttgttatatatcttgatgctagttctgagagcttagggactagactatgtcaagacattgaagtcaagaagcctatagcaaaactgatgggcatggtggcacacacctgtaatcccagctactctgggggctgagctggaggattgcttgagtccaggaattaggggctgcagtgagctatgattgtaccactgcactctgtctagcctgggtgacagagcaagatgttgtctctaaaaataaaaacaaaaaacaaaataaacaaaacaaatgaacacttattaaagacttactatttgtcaggcactcttctaagcatttatacatattaagttactcaaggtgtttaatccccacaacgaatctctctgatcccattttacctgtgagggaattgatacattcagttacacaactagtttgtaaaggaaccaacattca

SEQ ID NO: 492269 - DNA, 628 bp, Homo sapiens
atggtcatgtccacctttgagtggtgtcttcactttaacctttttcacttactcacaaaccaatcagcatacactccctgttttgagcccataaaaagccctggactcagccatattggagactttcctgcctttgaataggggggaccatccacgcatcccctctctgctgaaagctgtttcatcactcagtaaaattcttctccacgttcctcgcccttcaatgtccagcgtatscttgttcttcttgggcatgatataagagcccaggaaccacaggacacaggtataagctataacacagttgagctggggcatgccagcgtggccacccctgggcagcagtgtcactggccaggggtccccggcttgcaaagtgaccaaaaacaaaaatcctgcatcacatctacacctgacagaatgctgagctatgagcagcaatagcagacacattgtcttcaagcaaaacgtccctgaagccacgtacaattgctgtctgcatttagactccaccgaaagctcttcagtgggtaagttcagtttgtaggttggcctctagtccatgttcatttttaggttcatggattattcaatacagtggatcacaatgtagagcagagtcatgaca

SEQ ID NO: 492270 - DNA, 627 bp, Homo sapiens
attaattttagacttaatctgtagttatcagaattttcaagtggaaagattaaggagaagcrgatttttttttttttttctggctagcatggttcaaatttccagttagattctaacacacttttaaggcttttgaaccatatggttttgaatatttttatgtttttatatgctttgcaaggcacttctaaatattaataggggtacaaatatttgaatataataagaggaatagccatgtcacatactggaaaatgagtgacagatcataataacattaattaagataattaaggaaagagtgaagtccaaaggaaaaagatgagttcctctgagcaaaagcctatttttaaaactataaaaccaggaaatgtaagagctaaaaaacaaagttatcatggctgcttatctacacactcaagtttccaagggataccatggtaatgacatgggacaccaagtgtgtgctgggaggagtctggccttcagatagcagtggggcattcatgcttctttttcctcacatgtccagggaggataagagaagtcagaatagctggaaacgttaaagaaaaccatggatatacagcaatgagcctcacctgcagtgaaccttggatatgtttc

SEQ ID NO: 492271 - DNA, 499 bp, Homo sapiens
  misc_feature (1)...(499): n = A,T,C or G
attacgaagtttcaacatcccttgccattaaagaaacatcacaccctctcactgtatctgctggcttctttccatcaaacatattaccatccatgtgtgacagccatgcagttgatgctatgggcgactgttggcaaaatatttctagagagctgtagtagagtgcttttgatgacattctaacaggcagatgttttggttcactgtctttggtttgtctcacctctaagtcaatttgtcaataattggcattttaaattcagatcatgctttcttctgatagcaaactgtcagtctttanagtttcgtaaacagttgtctggnatatatttatatcttctnttctgaaaatcattaaatccagtggttagtgaygcaaaaaaagtatgctgagaagacaaaaagcaaattgatagtaaatgaggcagcggtccaggctgaatgaataccacaccatccacaacaaaatccaatgaaggagaagcagcgacgccaacca

SEQ ID NO: 492272 - DNA, 636 bp, Homo sapiens
gtgttttttagagctgagttttctgttttcctggtattccatgggcaccactccataagtggatgatcatgaatgtatcccatgtgtcactttccaatactctagaaaaagttttccggctctaactggggaaattctcttatagagaaatataatttcccattggttttaaagcaatgatccacataaaacatgatttcttaaatgttactgcaattcaaggcacctgaacacttctgccttttctgtatacatttatattgacaggattgtacacatttgtattggcaggacacaaactgagttctgtgtcctcagtttacaaatgattaaaacctactacttagccagttttacaatgstatgtatttcatttttaaaactgaaataaactggattgaaataaagcttgtgttttccagaaatgatatgatagaagggaaattcataattattttgttttatatttttgaaacatcttttagatgtcatatatttaatattgttccttttaaagcatttccagtatcaagatatctgtatatatcttataacttacatgaaatagagctacagaaatgggtatatgccatttataagcacacagaagacaagaaaccatttagtgctgtgtgc

SEQ ID NO: 492273 - DNA, 578 bp, Homo sapiens
gttttttagagctgagttttctgttttcctggtattccatgggcaccactccataagtggatgatcatgaatgtatcccatgtgtcactttccaatactctagaaaaagttttccggctctaactggggaaattctcttatagagaaatataatttcccattggttttaaagcaatgatccacataaaacatgatttcttaaatgttactgcaattcaaggcacctgaacacttctgccttttctgtatacatttatattgacaggattgtacacatttgtattggcaggacacaaactgagttctgtgtcctcagtttacaaatgattaaaacctactacttagccagttttacaatgctatgtatttyatttttaaaactgaaataaactggattgaaataaagcttgtgttttccagaaatgatatgatagaagggaaattcataattattttgttttatatttttgaaacatcttttagatgtcatatatttaatattgttccttttaaagcatttccagtatcaagatatctgtatatatcttataacttacatgaaatagagctacagaaat

SEQ ID NO: 492274 - DNA, 501 bp, Homo sapiens
tatcattcgggagtcagcacactgcatcactctacgtcctggtccgtccgtctgtcttcctgggacacaaataactgccttctccgagttcaaccctgaacatctgtatcctctggacaacggggagcgggaaaaaagctacgcaggagcttggatcgggcgaagctcgcgggaaaccgctctgggtgcgcaggacaaagacgcggggacagcggggagggccggccgcagcctgccgggctgcccccacggcgcggaacgcgcgcagcaacctccaccaggcctccgcgtctggactcccgccctgcctctgggcctcctccgcccaccggcggcgtctcccgcgaagcccgctgggcctcgctctcaccctcctcctcctcctcacgccgggccttgctcttggccttggatttctggctgcgcasttcgcgtccccgcggctccccgccggccgcgcgtttccgagccatgttgcttgtctgggcaaattccacttcg

SEQ ID NO: 492275 - DNA, 605 bp, Homo sapiens
gctgggcacctcaatccacaaaacgttaaaacccaaccatccgctataaaacttatgtaactgaaacttcactcactggaaatttttgcaggagtaagttgaacacatttcagttttaaaaaggcagcccactatctcaccagatgaaaatgtaagtgcatattagaaataattcactcaacgttagttaatttttgtgagtcattctcactaacttcttgctaatgatctgtcttggcagcaaatggtttcatctagactcctcttcaatgctccttattcatttcaaggaaagcatttaataaggggcaaatggcaaataattaggcaaaaaaacaaaaacttgccagtcaactcaaagggaaattgactcctttccccaataagtttccaatgagaaaagatcagagagttaattaatgtgtaaccaacctgtggatgccgggacacccacatatgcagtaagttgcaggctaatgattaaagtccacctcttaaaccaaaaaaggtcagcctttctagctgtcaagaaggtggtgacttgaaccacagatcaatcaccattcacatcaaaggagtaagaggwgaagccattaagacaaacc

SEQ ID NO: 492276 - DNA, 640 bp, Homo sapiens
ctagctacagagcttgtgcccttaaacactgtgctatggctgatgtgaatgaccatggtaaatgtactgctgcttctgatgttgattgtaaccaatgataatcataatagaccactggctatgacctgacatgctaatggcttcatgtagaatgcttctttaaatgctgtgagataaatctgatcattatacccattttacatatgggtacactaaggtttatagaagtaacccttttgtagtcgccacagatggcgaggacttgatcccaggtgtgatcaactgcaaagccatgcacttaactggcctgatattcctcacaagaagggtcataatmacagtcagaagacttgcacaacggctttagctgaagggataggcattttctctcctgtgacagctggcttgttgatttgtctgtttgccaatgctaaagagaagcatgcgagcacagctgtgaatgccagaagtcagaggtggcagtccaagatgatgtgccaaggtcagaggtaggaaagacaaggcagacaagcagagatggtccaggggctggtgcctgggcaagagacaccaagggcagagtgggggaccaaggcattagttgcaaattagaggtcagggctcaagccacacactggga

SEQ ID NO: 492277 - DNA, 606 bp, Homo sapiens
gtttcctaacatgtacacttgcatgctgccaagcagagcaaaatggatgccatttgcagcttcaagtcatttattttaaaatgccatctattggtttgtggggtttagagctgtcccttaggcacatttatttagatgcttgtgtagattcttcagaaaaacgtaagatattcctgctcaggaatgagttttatgaaataagctgtgattaccttctggttgtctgttcatagggatggagtcaataaccagtctttcgtttcaaatgatgattatacttgctatttttacaactcattggaaaattagggggagggaggaaggaatgtagtcaaaggctttgcaaggttctaaatgttcatggaaatatataatatacaaaataattcagaatacscaaacagcaagaatggcatgattttctaaagtgtttgctcaatgatttgtcacttatctgtagtttttaaaaatgtcattgcagattgtgttagggcctgaatcctttgcagccttgccacatgtttgtgtgataaacacacttataaccataattatctgataaagccctgcagtctttgacaaatgattaataaccactgacctcag

SEQ ID NO: 492278 - DNA, 530 bp, Homo sapiens
tgtctttcagggtgattctgttagagtmagttatccagatggacgggctcctttttatagttagaccttgtccatttgacaaggagctgtctgaaatattggctccaactagtcaggtatgttttgatttttttgtgaccctagtcattatgaaagtgatacttaggggctgggtgcggtggctcacgcctgtaatctcagcactttgggaggccagggcgggtggatcaccaggtcaggagatccagaccaacctggctaacacggtgaaaccccatctctactaaaaatacaaaaaattagccgggcatggtggcgggcgcctgtagtcccagctactcgggaggctgaggcaggagaatggtgtgaacctgggaggcagagcttgcagtgagccgagatcgtaccgctgcactccagcctaggtgacagagcaagactctgtctcaaaaagaaagaaaaaagaaagtgatacttagaagtgactcaccttttcttttctttactatccagttattatagcctagttt

SEQ ID NO: 492279 - DNA, 548 bp, Homo sapiens
tcactccgtagtagtctgaggcaacacaagtgcatctcatctgaaatatcctctaatgcaggatatactggagctgttgcctagggagatactgctcaaggaatatgggttccacaagcaaatgctatgaagttctagttattattttgagcccagaatgagttgaggcctaaaaatgttgccattccattaaaatgtgttagtttgaatttaggcacaaatgttatttttgaattataagcatgcgactcgtttatagtaatgtagctttgagaggactttgggttatttgccaggccattctttttccttttcttttcttttcttctcttttcttttcttctctttcttttcttttcttttctttctttctttctttctctctttctttcttttttytttttttggtagacatgggtctctctatgttgcacaggctggtctcaaactcctgggttcaatcctcccaaagtactggacttacaggcatgtgccaggccattcttgatataagctgtttctcacccatttggtccaaaaatagagga

SEQ ID NO: 492280 - DNA, 599 bp, Homo sapiens
ggcttcctcagaattccccactttgagtgctcctttgccatgtgaggctcagtgatttccttctccgagtccactcacatttgataggctcctatgaaatgtaggtgagcttcacctgaatctgcacctgtcctcattgctaaggtgatgagctagtgtcaagaaaggctgagggatccaaggatgaactcaggcagggcttgaggccactactcccggttcccctcctctcytccccatgaatcaccttcaaggacacttccatcaaacctgactcacacagaaggcccagacctgagaaatgaccagcccctgggccagagcagagagccagaaggcaattccctcccccatcactgctgcactgggtggaaattgggtcagagctggccagcccattcatttaatccaaacgccccctttccattcagctcttagtcctcagagctttcagtccaaggaagcactatttcctctgcaaaataaacaaaataaattaagcccatgctctttgatctcagggcttttgtgtggctgatgaattgaacagaaatgatctgccatcctcctggcatctcaaagacactgcaaaaattcag

SEQ ID NO: 492281 - DNA, 392 bp, Homo sapiens
ataaaaccagggcaagcctgtcaaagagaaatttgatttggttctgctgttttacattttaatatgcctgtatgatgacctagcccattaaawtttttttctttaaattatcaataggctgtctcaacctctgttcaattgaattttactctactctcccagggaacaaaatgacagagcattttgttctaggtaccttagttcttgttgcctattgtggcagctctatttccagtacagagtttcataggaaacctctcttcttctggtcatgcctatcacccagtcacctttcctgaacaattaggaattgactttctcttccccaatgctgcatttcactctcaccctcagtgtccagccctggtcatattgtctttagcccaattttt

SEQ ID NO: 492282 - DNA, 575 bp, Homo sapiens
aacactcttcctccagtgcctatgtaaactcatgctgccatcttgttggtttcctcattaatgagctaaatgcatttttgacatgtccacattctagatttgtatgagtcacaattttaactttttgaaaattatactttgccacccaggtgccaccaactctgggagtgtgagcaagtccctccctcccctcttctggactcagtttcttcaacagtaacatgagggcgtaggtctgcatgggaaattacaagccccaggaatatttgattttaagcctgaatcttaaaaagaataatttcctcatagggttgaacatcttacggagttattttccaaaataacaacaataatgggacagtgcttcatacctggggctaagtattttaattctcacataatgagatggggctattgttcctagctctattacaggtgaggttargaaagctgaaacagtattttttttaacgaggagacactatgtttgtccttccactcatgtttccttccattcttcttttcacctgtctggtcatccatgtttccagtcatccatcccactgatgcaaaaa

SEQ ID NO: 492283 - DNA, 348 bp, Homo sapiens
ctcagccctggacccctgagatacaagaggagcctgaccagtgacatcccggaattaaacagggggagaatcttcctcttattgtcatcctgagcaatacactagacaaaggccatcgggcagataaaaagaggaaccctgtgcccctgaagttgatctgaccaccagcgagaggtcacatctgctatgtgcaatgccctgcaggggtcacaaagatgacttcaacctcgaccctgtcttcaaaggagagtccagtccaggcgagtaggtgagaaggcatgtaccaactcaaatcccaggtagaaagtgascagagcccgaactacagaggtatggaatacagggcaa

SEQ ID NO: 492284 - DNA, 520 bp, Homo sapiens
aagcagcctcctgacatcacccacacctctgtgtgctccttctgcagttgtcccactctgtcctccagggcttctcccttctaggctcatgatctgaggctgccccttgctacccmggggcaaaattgttagtcctggaaggctctttaaaggtcattgtgggccaggtgtttcagttaactgatgataggatgggggccaacataattgaatagttcccaagactgagcagcttgctcaggtagcctggctaaacccaccagctctcccggccaggccaatgtcctttctctgacaccctattgcttttctttccttacattctctcagggagtcatatacaatgacagagaagtccagggctctgtgttgtttggctgtccagtctttgggagagagagaaaaaaaaaagaatgtggaacctccagacagggcacaccctaccgcgccccatgtgagtttcctgaggtgctgtaacaaaggaccatcgcctgggtggctcacacaaccgacagttacc

SEQ ID NO: 492285 - DNA, 630 bp, Homo sapiens
aaaaatggcatttgcacccttagtaaccttttattcaattcaacttcatctagtcctagtaaatagaattacattacttccttgcttaaaacrcttccatggtgcctatgcaaaaatgtaaaatactttctctggcacacaaagcccacatgctcttgccctcctctccagcctccttcatgccagtcactggcttggccatccaattcagactccctggcttcacttctccttccttgactgtgcgtagctctttcttgctttgtagtgagacatacactcctccccgtctttgtccagttaattcctgctcccttttctggtctcagctcaaatgttgcctcctcaagaaaaactcccctgactgcttcccagtacaatttattcccactcctgcccccttctctcctatagttccctgttctttttaaaatggacttgtcaatatgcatgacgatatgtttttgtgtttattgtcctcgctctctgaccatgtaaactctatgaagccagagagaatatcttattctctcgaccagtttgcacaatgcctgacacctagcagatcctcaacaacctttgttgaataaatgtgtccatttattcagttctccaatgtctgacttcatt

SEQ ID NO: 492286 - DNA, 571 bp, Homo sapiens
ttacttcttgtcttcctggaaataactagtgtcctccatagggctctggacactgtccctcacccctagacacctcattttctctccttatacacacgtgatcaagtatttcctccagagaattgttccttgaatatttacatggtgacaggaagtgttttcttaacaaaagaaatggggcactaatggtaaataaacatcacgaagagacaccagggaggagattctgtcagtcacctccctaacccctccctcccgctcccagcactgtcctggaatcactgtccccagtgtccaggaaaggggttgtgaacaacagctacaaagagctatggtccagatatctggggcatctgctcccctgacttcccagtgttcctgtgcagcatggctccctagatagtccaagggaatcaaccaaaaagctgttggaactaacaaaaaacactgaagaaggaggttraggaaaatcagcatgccaaaatcaatggtgtcccaagaacatattatgacagcaagactagggatggggcgcaaggcagctttaagcaagaatttcccatggtgttta

SEQ ID NO: 492287 - DNA, 629 bp, Homo sapiens
gcggggatttggtgactttcacagactaatacacattagtaataacaatacaggcagggtctttggtcccataaatgggttttgctggatcccataatacatgaaataaaggtgaacaagttttggttaataatgagagtgaatcatagatttttaatggtttctgatttattttcttctcaaaaccaaagtgttccacatgaaaagttcttaaggaagctgggctttctgtcagcacacagatcaaacaagagccttgcattgcacaggctgacatggccaaggagtgggttcctccccagggggctgtgacagctatggtccaagcstccaggtgcagccacacatgagagagataagagggatggggaccagatggagtaaaggccatagcctggaactgcttagacaaacccctgggcacatattccagggaggtcacattccactagatctgacaaagcttcctccaggcagccctggcttcttaaacaggaaggggaaaaggtcccagggaggaaggggaaaaggtcccggggaggaaggggataggaatagcgtcagatggtgagtcatgagccggggggaagaagctgtgccttacggtatgcagcgcctaaggaggattg

SEQ ID NO: 492288 - DNA, 629 bp, Homo sapiens
gcggggatttggtgactttcacagactaatacacattagtaataacaatacaggcagggtctttggtcccataaatgggttttgctggatcccataatacatgaaataaaggtgaacaagttttggttaataatgagagtgaatcatagatttttaatggtttctgatttattttcttctcaaaaccaaagtgttccacatgaaaagttcttaaggaagctgggctttctgtcagcacacagatcaaacaagagccttgcattgcacaggctgacatggccaaggagtgggttcctccccagggggctgtgacagctatggtccaagcgtccaggtgcagccacacatgagagagataagagggatggggaccagatggagtaaaggccatagcctggaactgcttagacaaacccctgggcacatattccagggaggtcacattccactagatctgacaaagcttcctccaggcagccctggcttcttaaacaggaaggggaaaaggtcccagggaggaaggggaaaaggtcccggggaggaaggggataggaatagcgtcagayggtgagtcatgagccggggggaagaagctgtgccttacggtatgcagcgcctaaggaggattg

SEQ ID NO: 492289 - DNA, 653 bp, Homo sapiens
tgtcactgaactgtacagttgaaatgaataaatgttattctatctaaatcagacatcaacagaagtgatcattataaaaaggatttccattaaagaaaaaaagtacaaacaagaaaaatcactcctgtagactatgccatgctgattatttaccagccaaggaggcagagttatacaagcacaccaaactacttaagacttgaaagtacgtgcaagcatttaacagtcctgtgtgccaggcaataatctcagagcaccttgaacatcccttcctcagtaatcccaactggtggtcccagcctcacacttgcctaagttggggaaatcaggggctgaggccatgcaggcatcagcaccacaggccactccttaagttctagtggagtttctgattaagcaatccctgccctctgccttggcaagcctaaatgatgaaatacacacatgtacayacacacacacacacacacacacacacacacacacacacacacagtgccaaaagacagtcaacttcctatgaattggggcagtcgttctggggatgtgattttgactgtatgttcaggcaggtcaaaacaatgtacacaccttgtgacccaattaatctctcctgggaatctatctcagcaaataatttccctcccttccct

SEQ ID NO: 492290 - DNA, 522 bp, Homo sapiens
gacatgccagcagacccatgcccagcagatcaggtatcagcttaggcactgagggctgcagcagtccccttggggatcttacaaggtagacgggcctgttgagctgtggtgcagcacacggattcgcagagaggggctccgtgtaggcaactaacctaacggtagctataactagcattcaccagcttgtttcaaattacagggtcccaaagcactgggttggtttgttaattttttgtgtaggtagagataggagtctcactatgttatgttgcccaggctagtctcaaactcctggccttaagcaatcctccygccagggcctcccaaattgctgagattacctgcatgagccaccacacccagccaatggtttgactttttaaattgttcttttttttcccttcaggggagggttgggctacccaaccataaatccatgtctggattaatgcatataggatgaaaaaaaatttttaacctaaaactcaagtacatttatcacagagaactgtcaattca

SEQ ID NO: 492291 - DNA, 636 bp, Homo sapiens
tgtaaaagctactctaaccaaatgatagagacctgcctcttccaagaccaccgccctcctgtgttcgtgccggcagaaacacaggcctagagcagtgacacaggctggccccgaagacaatgggaggaagtcagacgggcaacaggcacaggggggcctggtaggcagtgctggtttgggtgggcgggcccagaggatggaggctgggccaggaaaggcacataaagggcagaaacccagcctgaaaggtcaccaggaaaagaacattttgtctcctagaacctgttgacaaaatagaggcaaaatttaaacacagtctccacccccaaagaagaggaatggggatattgttttcatttttacttttaacaagtttgtttttacatttaagagcttggcctcactttggcaagaggtaaaattaaaagctttacttccctctccctggattccacttcacaacagaggggctacactaataaacaaawgtaatgtgccatttccaagaaaagccaaggcgaggtccaaggtaagactactcatcagtgaactccaggggccacactcagcgcctgaacactgggagtgtgtgtttgggctcagggtggctcggtttccacttgaaaactacaggca

SEQ ID NO: 492292 - DNA, 569 bp, Homo sapiens
tctgacaaaggcacaaaagaaaccagaccatctgctgccaagcccacttcatgataaatctgtaagaccctaagattcaggcaatgtaggcgatgcaggagacgggrctgaaacccaggcatcccgggcatccacagggacccttctctgagccctccccactcagtcatcagtggagctcgaggtcctagtgctatgaacacatcccagtttcagcaactaaagaaagctatttcaacagatttctaggcctggcccaattccaaggacaggctaaaaacagtttctccaaaatcccagctcaaaaccccattccctaaccactaaactccatgtaccttccaggaaatggaagctgcaaaatggagctgtgagatgcacttgtagatttattcctcactaaagagatacatatatgttgtttaaaagcttcctttaactgacgtgtcaataaatactctgcactcagaagcactgatatacttcctccaagtgatttttccccctaaggaacaatacaaaaaccattccagcctttcctgctgctgaggggaatgacacaatgacca

SEQ ID NO: 492293 - DNA, 619 bp, Homo sapiens
ggctgggaggagatatcgaatttctttttttcctctcttagaaccaaggactttcaaagcaaaggagctatgggaaaaaaatggagctgtgattatggccgtgcggaggccaggctgtttcctctgtcgagaggtgagtgcagatgaggatctattcagagaaarggatcctggcaagtaggggccattgttttccggccagaaccaagggtcggtaagccagctttagccttttacccacatgttctgttctgttatttgctctaggtatttctttgatttgtgctcttttttttttttttttaaacaactcaccctctcctactggggttagcaacacatctcagtttcccttagtactcccaggcctttcaccctgtgctgtaccttctgagtcctggaccatattccaatttaatcaggggcagtgaccaggtccaattccatgcttctgatgctcagcacagatatatgatgtgcctggattgcttctgattcgggtgtggtcagtccctccctgtgatgaagctgcagtgtcggaggaaacacttcaaggttacctattagagcagacctgcctgtctctctttccttggggagctcttagagtccatcgtgg

SEQ ID NO: 492294 - DNA, 619 bp, Homo sapiens
ggctgggaggagatatcgaatttctttttttcctctcttagaaccaaggactttcaaagcaaaggagctatgggaaaaaaatggagctgtgattatggccgtgcggaggccaggctgtttcctctgtcgagaggtgagtgcagatgaggatctattcagagaaagggatcctggcaagtaggggccattgttttccrgccagaaccaagggtcggtaagccagctttagccttttacccacatgttctgttctgttatttgctctaggtatttctttgatttgtgctcttttttttttttttttaaacaactcaccctctcctactggggttagcaacacatctcagtttcccttagtactcccaggcctttcaccctgtgctgtaccttctgagtcctggaccatattccaatttaatcaggggcagtgaccaggtccaattccatgcttctgatgctcagcacagatatatgatgtgcctggattgcttctgattcgggtgtggtcagtccctccctgtgatgaagctgcagtgtcggaggaaacacttcaaggttacctattagagcagacctgcctgtctctctttccttggggagctcttagagtccatcgtgg

SEQ ID NO: 492295 - DNA, 619 bp, Homo sapiens
ggctgggaggagatatcgaatttctttttttcctctcttagaaccaaggactttcaaagcaaaggagctatgggaaaaaaatggagctgtgattatggccgtgcggaggccaggctgtttcctctgtcgagaggtgagtgcagatgaggatctattcagagaaagggatcctggcaagtaggggccattgttttccggccagaaccaagggtcggtaagccagctttagccttttacccacatgttctgttctgttatttgctctaggtatttctttgatttgtgctcttttttttttttttttaaacaactcaccctctcctactggggttagcaacacatctcagtttcccttagtactcccaggcctttcaccctgtgctgtaccttctgagtcctggaccatattccaatttaatcaggggcrgtgaccaggtccaattccatgcttctgatgctcagcacagatatatgatgtgcctggattgcttctgattcgggtgtggtcagtccctccctgtgatgaagctgcagtgtcggaggaaacacttcaaggttacctattagagcagacctgcctgtctctctttccttggggagctcttagagtccatcgtgg

SEQ ID NO: 492296 - DNA, 448 bp, Homo sapiens
tgggcttgcaacccttccccaaacattcctgcttgmccctgctcagaggtgtctctcgttctctcctaggtttctctgaaatccttggatcccacccaacacccacttaaccttcagcaggtgcccattctacttccagagaaagtggaccccttcccttaggaagccccaccgaacccacaaacatctgcatcctcacccagcttgtcttcctgcctcctgtctctatgaaggtcctgctgtcctccagtttggggctctcctcttgttctgaacaccaatccttcccaccttctccagcaagcgttttctctcttccttcagactctcttatctcccctcttctcttgccttctcccttcatcatttaaacatatttgagtctctcctttgtttttcttgttattttcttttaatagaaacagggtttcactatgttgcccaggct

SEQ ID NO: 492297 - DNA, 602 bp, Homo sapiens
tagtcttttagcaacactattttgtatggttaaatatgtcagtaaatttctttaccattccaacaggtttaatacaaacttaaatatatatataaccattctagtattgcttagagttccttaactttctcctgcttcctaatatgaaaataatgctggcacctaaagaaagttgaaaggataaattttcctttatcaatgttttcccttgaacttattaaaaaagaaatagtatccataaatataaattttctatatagtcagttaccaattgagagaaaaagaaagtcagaatgttaaaaatrcattgttctgatatgaaaagcacaagaagatcaacatggcataacaaattacaaccataataactgtagcatacatttcaacactgatggggacaggacgggagggggaaaggacttaaaaccttgcagatgctttgccttgaaaacagtgagggataaattagtaacagcaagtttaggaaagagaaagaacttgtaggaactattggagggaatgagtctctttgggggggtcctagtagggagaatgtcaaattaaatccttcccagctggttgctcaggaaaagattctcctg

SEQ ID NO: 492298 - DNA, 602 bp, Homo sapiens
tagtcttttagcaacactattttgtatggttaaatatgtcagtaaatttctttaccattccaacaggtttaatacaaacttaaatatatatataaccattctagtattgcttagagttccttaactttctcctgcttcctaatatgaaaataatgctggcacctaaagaaagttgaaaggataaattttcctttatcaatgttttcccttgaacttattaaaaaagaaatagtatccataaatataaattttctatatagtcagttaccaattgagagaaaaagaaagtcagaatgttaaaaatgcattgttctgatatgaaaagcacaagaagatcaacatggcataacaaattacaaccataataactgtagcatacatttcaacactgatggggacaggacgggagggggaraggacttaaaaccttgcagatgctttgccttgaaaacagtgagggataaattagtaacagcaagtttaggaaagagaaagaacttgtaggaactattggagggaatgagtctctttgggggggtcctagtagggagaatgtcaaattaaatccttcccagctggttgctcaggaaaagattctcctg

SEQ ID NO: 492299 - DNA, 602 bp, Homo sapiens
tagtcttttagcaacactattttgtatggttaaatatgtcagtaaatttctttaccattccaacaggtttaatacaaacttaaatatatatataaccattctagtattgcttagagttccttaactttctcctgcttcctaatatgaaaataatgctggcacctaaagaaagttgaaaggataaattttcctttatcaatgttttcccttgaacttattaaaaaagaaatagtatccataaatataaattttctatatagtcagttaccaattgagagaaaaagaaagtcagaatgttaaaaatgcattgttctgatatgaaaagcacaagaagatcaacatggcataacaaattacaaccataataactgtagcatacatttcaacactgatggggacaggacgggagggggaaaggactkaaaaccttgcagatgctttgccttgaaaacagtgagggataaattagtaacagcaagtttaggaaagagaaagaacttgtaggaactattggagggaatgagtctctttgggggggtcctagtagggagaatgtcaaattaaatccttcccagctggttgctcaggaaaagattctcctg

SEQ ID NO: 492300 - DNA, 602 bp, Homo sapiens
tagtcttttagcaacactattttgtatggttaaatatgtcagtaaatttctttaccattccaacaggtttaatacaaacttaaatatatatataaccattctagtattgcttagagttccttaactttctcctgcttcctaatatgaaaataatgctggcacctaaagaaagttgaaaggataaattttcctttatcaatgttttcccttgaacttattaaaaaagaaatagtatccataaatataaattttctatatagtcagttaccaattgagagaaaaagaaagtcagaatgttaaaaatgcattgttctgatatgaaaagcacaagaagatcaacatggcataacaaattacaaccataataactgtagcatacatttcaacactgatggggacaggacgggagggggaaaggacttaaaaccttgcagatgctttgccttgaaaacagtgagggrtaaattagtaacagcaagtttaggaaagagaaagaacttgtaggaactattggagggaatgagtctctttgggggggtcctagtagggagaatgtcaaattaaatccttcccagctggttgctcaggaaaagattctcctg

SEQ ID NO: 492301 - DNA, 660 bp, Homo sapiens
agctgggaatggcaggtgagtgtcagatgtgactgtctggggcatggcagggaaggccatgctggctttgtgggtattcccaccacacttttcatagcagcagtgtggccaactattycagaaaggacacatctcccagacgctgctcaggccagcaagatctccaaaaccgctcagtccatggtttgcaaaactggcttccccatctccttcctccttgttctagctcatgacctcctgcacatgcaggattgagcagaaatcaccaggtgtgagtaatcatcttcccaatcccagcctttaccggaaacctctcctcggcctccacactcctctccttaatgatggtggaggcgtccctttgtaggaggtgaccctcgttagtgcctataccctatctcctttcacctgctcttcctatcatggcccctgccttcttcttagatcattcctatcagtgtgcaagcctgcttcagtgactcccatattttaacaaacccctctttattccaacaaatgttagaattagatgtggctacatgtgccataaaacagaggattaaacaagacagaaatgtccttctcccataaagaaagtcaagaggtagtagtccaaatgtgtggtggctccctacacattagcatccacatttattctca

SEQ ID NO: 492302 - DNA, 541 bp, Homo sapiens
aaaggcctcagctgtcttgttcactgaagtatcccaccatgcacacagggcctggcatattatcaggcactcagwcaaacactcactatctgctgaatgaatggacaggttcccagggagtttccagagctgcctgggctgtcacagacaggttgcatccctcttaattaaacaaacaaataaaattagccaggcaccgtggctcatgcgtgtaattccagcactctgggaggcagaggcggaaggattgcttaagcccaggaatttaagaccatcactggcaacacagcaagatctcgtctctacaacaaaaaaaaaaaataaaaattagctaggtgtggtggcctgcacctgtggtcccagctacttggggaagctgaggcgggaggtcgaggctgcagtgagccatggtcatgccactgcactccagcctgggtgacaaagcgataccttagctcaaaaaacaacccaaacaaacctgggaatggactgaacagtctccatttcaagatttcctccttccattggaattaacctgttg

SEQ ID NO: 492303 - DNA, 484 bp, Homo sapiens
tttttgtaaaggggtgaaaaggggaattcacttgcaagtttctcagggaggaagaacactgcacactaggaagtgttctcttgtggcaagtagaggaccacaccaaggtgccgagggggccacaaaggagaggacgccactctcctgtctgaggaggctggaaggaggcgtctcctttgaggaggctgggaagaagagcaagctccctgctaaggagggccagggctgggtatgttgtgcctggcartggggccagagggctccactgagccagccatgtgggttggacagaggaggcaccgtggcccggagataccttcactgccatttcctttttgttattattttctttaacacatcaaaagggcaggtcctctctctctctctctctctctctctctctctctctctctctctctctctctctctctctccccttttttctttctctccttttctctttctctctctctttcctttcttt

SEQ ID NO: 492304 - DNA, 513 bp, Homo sapiens
tgtcgtcacccctttgtcaaacatactagcccaaaatatggactgttagctgataagacaataagtcaaactcttaatcattaaaaaaaaaaaaaaaactgcacaaaaatgccgctattgtgtttcaccagattaacacaractgattttcaaaattaagggcctcctttatatgaatagatctgtattatattaagtatatcctcatacaattagaacccaactcaactctttgtgtgaagcagccatttcataattaggggatttttagtatcctatctgaaaaatattatgcgaattagcaggtatttggctactttttaaaaacgttttacatgtggcagccttcaggggaggcagtttattcatgatactcatagtttttttaaaaaagcaaatttcacattcattgccttagtttttgatcttctagtctaaaacttattatagttcctaattttcacttctttgtctctgttgtttaagccgcatacttcccctttattaaaaaga

SEQ ID NO: 492305 - DNA, 513 bp, Homo sapiens
tgtcgtcacccctttgtcaaacatactagcccaaaatatggactgttagctgataagacaataagtcaaactcttaatcattaaaaaaaaaaaaaaaactgcacaaaaatgccgctattgtgtttcaccagattaacacaaactgattttcaaaattaagggcctcctttatatgaatagatctgtattatattaagtatatcctcatacaattagaacccaactcaactctttgtgtgaagcagccatttcataattaggggatttttagtatcctatctgaaaaatattatgygaattagcaggtatttggctactttttaaaaacgttttacatgtggcagccttcaggggaggcagtttattcatgatactcatagtttttttaaaaaagcaaatttcacattcattgccttagtttttgatcttctagtctaaaacttattatagttcctaattttcacttctttgtctctgttgtttaagccgcatacttcccctttattaaaaaga

SEQ ID NO: 492306 - DNA, 557 bp, Homo sapiens
tcagaactgtggaaaaacctcaggtctccctgataagattgtgctggggtttgcggggaagatgacagagctgcagggagggagaggccttccccttctacccttgttggctgggtcttttctgggctgggtggggggtgctccccattcagcctttctgccaataggccccagattccttgctgcagaagaaaagtagcaatgcccgtaagttcctgaatgcaaaggcaggaaggttttgcacttgagatttgggactttggtcttggggcctggctctggcttaactgtttgggaggtaaggaggtacttgggccagagcagcaacaaagcctgccgcaaatagtgtggaaatagagactgcccagcaaaagcttagacatggctgtgaggactgaggggaactgcattctgctcacataaaacctcctgatttgagaaagcagagatggagtatttggtcccacctaaattttaagtgtcagccaggccaatttatgctgtggcrccaggaactgggctgttgtggcagcaggtcctactttgccacttcccag

SEQ ID NO: 492307 - DNA, 653 bp, Homo sapiens
gctgccatctggactgtttggaggggatctctccctccttatctagggtatgatatcatgaattcacacagtggtggccacatcagtctgttggcttatattaagcttaaaggtagttgcatccagatcttctcccacaagctcctagttgagtcttttccacctgttcttatgtctgtgactctcaatccatctctgttgagctccgttttgctcattatggcccattggtccagatggccmgatctttttgtatcccacacactgtattaagtctctctcaagtggaatcagtagcaatcaatatcctctgcagtcattgataaaactgttgagcagacaggtctgaggatagagccctaaggcctatcactagagactctgccagttgttatctctgaatgcacctaattgcactagcacccagcccacctcagagaggactgtgtgaatacctcattgaaatccaactctgcgtcaaagcctaaggttgttgactcttgaggtgctttagtcagtgtttgggaagaaacagatcacgtattccaaaggggcactgaacagatttgaatacagaggaacccagcagggacagggaagcactcagagggtatcagtgctagggagatgcactatccctgggcctgaaggga

SEQ ID NO: 492308 - DNA, 610 bp, Homo sapiens
ctgccatctggactgtttggaggggatctctccctccttatctagggtatgatatcatgaattcacacagtggtggccacatcagtctgttggcttatattaagcttaaaggtagttgcatccagatcttctcccacaagctcctagttgagtcttttccacctgttcttatgtctgtgactctcaatccatctctgttgagctccgttttgctcattatggcccattggtccagatggccagatctttttgtatcccacacactgtattaagtctctctcaagtggaatcagtagcaatcaatatcctctgcagtcattgataaaactgttgagcagacaggtctgaggatagagccctaaggcctatcactagakactctgccagttgttatctctgaatgcacctaattgcactagcacccagcccacctcagagaggactgtgtgaatacctcattgaaatccaactctgcgtcaaagcctaaggttgttgactcttgaggtgctttagtcagtgtttgggaagaaacagatcacgtattccaaaggggcactgaacagatttgaatacagaggaacccagcagggacagggaagcactcagaggg

SEQ ID NO: 492309 - DNA, 653 bp, Homo sapiens
gctgccatctggactgtttggaggggatctctccctccttatctagggtatgatatcatgaattcacacagtggtggccacatcagtctgttggcttatattaagcttaaaggtagttgcatccagatcttctcccacaagctcctagttgagtcttttccacctgttcttatgtctgtgactctcaatccatctctgttgagctccgttttgctcattatggcccattggtccagatggccagatctttttgtatcccacacactgtattaagtctctctcaagtggaatcagtagcaatcaatatcctctgcagtcattgataaaactgttgagcagacaggtctgaggatagagccctaaggcctatcactagagactctgccagttgttatctctgaatgcacctaattgcactagcacccagcccacctcagagaggactgtgtgaatacctcattgaaatccaactctgcgtcaaagcctaaggttgttgactcttgaggtgctttagtcagtgtttgggaagaaacagatcacgtattccaaaggrgcactgaacagatttgaatacagaggaacccagcagggacagggaagcactcagagggtatcagtgctagggagatgcactatccctgggcctgaaggga

SEQ ID NO: 492310 - DNA, 653 bp, Homo sapiens
tgtcccaaagagtcttgtgaattatataggcattgatcccttgggatggagagacagcttctctgtccagcttctctggacacagtttgttttaattattaattttaaagtacagatacaatatagatgcatgacagaatatttgaaaataaagaaaagaaaagcatgtttgcatcttggcttgcttctttgcacgcccttcttaaatacttgtgattccccagggagtgggggacaagggtgtggggtgacatccaggtgggtggggagcccatggarcaggagacacagtgggaaaggatcagggagagtggctatgaccaagggcaggcctggtcttgggggtgtggaggccaggctcaggctggagttgtttgccctgggcttcctcatgtggctttctccaggggctggtccttatctgtgcttcctgagtcctggaggttttcccctgctttagtgagggtccctcaggcaaggccagcctgcttggggatccctggctggggctgtgcagccggcactggttcagccaggttcgcttgcaggaactcttgtctcctaggcatttctgtggtccagtggggagctgctgggcatctgacaggtgatgggcagccccaggcttcagcggctctgctttagtggcagca

SEQ ID NO: 492311 - DNA, 549 bp, Homo sapiens
gctgtgttctgggctgctgaacaagccaggactgggattcaccaggtctgccttgggaagccaaggaagaatggacagcaatgggaccactgctgggcacagctccagagtagtaagtgttactgagcagttaccacgcgccaggtactgagctaagcccctgacatctattgrctcatttaatccacacgttaaccccatcaggcagaaagtagtattgtatcgcaattttacaaatgaaaaaactgttgcacagagaggttgagtaacttgcccaatgtcacacagatatggcagcggagctgggattcaacaagaagactgctctggagcccatgcccctaactattaaacgcaaaggttatcctgagcctgactggaggagcaaactgccaaatctcttgcaccaagattctaccaaggttgcctagtgcccacacgcactgccatgagggaagaatgttggttcctaccactcttggtccccatgcatggtttgttgtgatcatatagaccacttaccatgtgccaggcactctactagtgttt

SEQ ID NO: 492312 - DNA, 567 bp, Homo sapiens
cctccctgtccctgcagtgtccagtggccttttccagagtccatgcctctcctgggtgcctggagacctggtggctcttgcctttctcatgccctttctggatcaggttgatgcgaggcctgacaaggcctcagtcagcaaacttccccaggggcaggtggaggtgcgtgtggttggtggaagctgcattggtgatggtggatggggctggccagtgtgtacagggagcttgctggggaggccctgggacaaagtccagagctctgtgggagccaagggattctggggaaggggcactaactgtgtggcccagtgggggaagtcccagctctgttcattgtctacctgcttggggagttctctctgtgtgagmagcagcagcagacagtcaggttttttggggggatggggtagggtgggattacaaatttggtttcttgaagggagaaaaggactttgcgggagaagtggggttccgtggccccattcctggagagtggcaggagggctgcagcatgggcttgggctcctcactgttactctgcctccagccccaccccaagtgca

SEQ ID NO: 492313 - DNA, 567 bp, Homo sapiens
cctccctgtccctgcagtgtccagtggccttttccagagtccatgcctctcctgggtgcctggagacctggtggctcttgcctttctcatgccctttctggatcaggttgatgcgaggcctgacaaggcctcagtcagcaaacttccccaggggcaggtggaggtgcgtgtggttggtggaagctgcattggtgatggtggatggggctggccagtgtgtacagggagcttgctggggaggccctgggacaaagtccagagctctgtgggagccaagggattctggggaaggggcactaactgtgtggcccagtgggggaagtcccagctctgttcattgtctacctgcttggggagttctctctgtgtgagcagcagcagcagacagtcaggttttttggggggatggggtagggtggsattacaaatttggtttcttgaagggagaaaaggactttgcgggagaagtggggttccgtggccccattcctggagagtggcaggagggctgcagcatgggcttgggctcctcactgttactctgcctccagccccaccccaagtgca

SEQ ID NO: 492314 - DNA, 281 bp, Homo sapiens
tgcgtccttcagttcggccccctggtccatgccacagggtctaggcccagccccgggacagcctcctgggtccccacaccccaccacaccatcttgggcatggatgmtggcagagggccaagagtggagggcgccttctggaggaagggaacgtggctccacccccaagcgttctcttattacgtgctctggaccacagccctgttaggaagggccccttccccacttcactgttaacaaactgagctcagagaggttaaataacttgcctgaagatcgcc

SEQ ID NO: 492315 - DNA, 556 bp, Homo sapiens
tgtctaatgactcctgtggtggttaataatagctgctcactctgcttccttttgtggtagcaaataccctttggagacacacttggacaggttattcttcccatttatcaaatgggaaagctgaggcctacagagataacatgaccccractgtgctcttcatccaaagcttttgctgtctcattgcttgaatacttgtggagagagagaatggttgacagtagggccatgggcctgcctggttcagcatgccctggctcagggcacaagggttcacttagggggtctggaatagggttacctgtggcctgctggatcaggggccattagagccagagcctctgtccggagtgcagaatgacttggccctgcttcccaggcagatggctgtgccctgagtgtgcagagatggtgggggtcaagagggcatttctgacctcccaggaaccagcccgggccccctgcctccctcctgggagacactatcttcagatttccagcagattagcagcaaaccaaccatttccgcttggaatttgaaattgattgtggacaa

SEQ ID NO: 492316 - DNA, 556 bp, Homo sapiens
tgtctaatgactcctgtggtggttaataatagctgctcactctgcttccttttgtggtagcaaataccctttggagacacacttggacaggttattcttcccatttatcaaatgggaaagctgaggcctacagagataacatgaccccgactgtgctcttcatccaaagcttttgctgtctcattgcttgaatacttgtggagagagagaatggttgacagtagggccatgggcctgcctggttcagcatgccctggctcagggcacaagggtycacttagggggtctggaatagggttacctgtggcctgctggatcaggggccattagagccagagcctctgtccggagtgcagaatgacttggccctgcttcccaggcagatggctgtgccctgagtgtgcagagatggtgggggtcaagagggcatttctgacctcccaggaaccagcccgggccccctgcctccctcctgggagacactatcttcagatttccagcagattagcagcaaaccaaccatttccgcttggaatttgaaattgattgtggacaa

SEQ ID NO: 492317 - DNA, 609 bp, Homo sapiens
gtctaatgactcctgtggtggttaataatagctgctcactctgcttccttttgtggtagcaaataccctttggagacacacttggacaggttattcttcccatttatcaaatgggaaagctgaggcctacagagataacatgaccccgactgtgctcttcatccaaagcttttgctgtctcattgcttgaatacttgtggagagagagaatggttgacagtagggccatgggcctgcctggttcagcatgccctggctcagggcacaagggttcacttagggggtctggaatagggttacctgtggcctgctggatcaggggccattagagccagagcctctgtccggagtgcagaatgacttggccctgcttcccaggcagatggctgtgccctgagygtgcagagatggtgggggtcaagagggcatttctgacctcccaggaaccagcccgggccccctgcctccctcctgggagacactatcttcagatttccagcagattagcagcaaaccaaccatttccgcttggaatttgaaattgattgtggacaattttctgacatgcatgtctctgccatttgcaaaatgtgtatcacagggcccctt

SEQ ID NO: 492318 - DNA, 518 bp, Homo sapiens
ctgctccaattgtatcaaggaggcttaatccttctaagtgcctttgtggttgggtggtgtggagtgaggatgggggaccaaggccagagcaaggtcagacttcctctgattgtctacgtttcctctcccattcaccccacccaccccctcccatgcaccaagccacccccattcactcctcaccacaccatcctctcccccacccctccatccacccatgtacacatccatccggccacctactcacccacccacctacacatccatccacccacctactcaaccaaccacctacacatccatccacccacctactcacccaaccacctacatattcatccacccacctactcacccactcacctcacatccatccaccccaacccggtcccccatccatccacgcattcaaccatctttccttccatccatccaactatccttccatccacccatctgttgatctatccattcacccatcartctgcccacccatctacctacccatctgtctgttc

SEQ ID NO: 492319 - DNA, 488 bp, Homo sapiens
agctggtctgtggcctgtggcttggtcctcgtggtgagccggcctcattgtctcttttctgctcccatgggctggtgggtggggggcacctgaaagctaagcacttattccyttagccttccttggatggcaggggaccctccagggcctgtgcattttggcctaaacatatggactagcaatagagagggttcagcaagcttctccaagaccgcctagctggtaaatggtggagatggaatttgaacccagtctttctgcttccaaagctcccactctctgcccttcccattccccaggatgctgtagctctgtcttctcttctgtcttttcttcctagcccaggcttcccggactgcaccctggactctaggtgcattctccaggtgggagtgggaagtggctggctgcatcagggtggagcggactggagcccggggaaatgctgtgcttggagtcccaggccaagctcaggcagggttctttcc

SEQ ID NO: 492320 - DNA, 616 bp, Homo sapiens
gtggtggagggaacatgctggggatgccggaatggcctagggctcaagctgtcctgggtcctcatctgtattgcactgggtacttcaagttgaaggccaagaccatgcagaccttgacttctagggatgaagtggggacagtgatggtagtggtggctccgtttttcaatggcctatgtgacacactaggcactcatcatccttgttctttactacaacatggtaaagtgttatggcatrcttcaacttgcaggtgaagacattgagaggttgaaatattgcctaagagaaaaaacgtgcaaatcacatattttataatgaatttctgtccagaacatataaatgagtcttccaattcaataagacaagccacccaatacaaaatgggcaaaagatttgtatagatacttcaccaaaaaagagatacagatttcaaataaacatgcagaaaagatgttcaataatgttagtctttagggacatgcaaatcaaaacataatcagataccacttcacacccactaggatgactataataaaaaagacagtaacaagtgttttgagaatgtggagcaactggaaccctcatacactgccagcgggaatgcaaaatgatg

SEQ ID NO: 492321 - DNA, 616 bp, Homo sapiens
gtggtggagggaacatgctggggatgccggaatggcctagggctcaagctgtcctgggtcctcatctgtattgcactgggtacttcaagttgaaggccaagaccatgcagaccttgacttctagggatgaagtggggacagtgatggtagtggtggctccgtttttcaatggcctatgtgacacactaggcactcatcatccttgttctttactacaacatggtaaagtgttatggcatacttcaacttgcaggtgaagacatwgagaggttgaaatattgcctaagagaaaaaacgtgcaaatcacatattttataatgaatttctgtccagaacatataaatgagtcttccaattcaataagacaagccacccaatacaaaatgggcaaaagatttgtatagatacttcaccaaaaaagagatacagatttcaaataaacatgcagaaaagatgttcaataatgttagtctttagggacatgcaaatcaaaacataatcagataccacttcacacccactaggatgactataataaaaaagacagtaacaagtgttttgagaatgtggagcaactggaaccctcatacactgccagcgggaatgcaaaatgatg

SEQ ID NO: 492322 - DNA, 459 bp, Homo sapiens
tgacgttcactccctgcactccagaacccctgtgctgggggtgtggggctatgggcagccctggccgttcttgtgaggactcacccaggcctggagacccaggcttctactgtgcttctcctggggtggctgaaacgccctccccacctccctggaaaggcccctccttcaggactcatcctggagctaaacaygcccccgaggcttcctcacctccctctctgtttctcaatcccactccacccctacggcacctgcaactctcccagacacagagttgccagagtgtcctgtgccctgctcccagcctggggtttccttgagggcagtggttctatccagtttgtgtctggaggcccggtgctgagctctggcctggtataaggctgacattggtaatggtttgttcaccactcacggatccctggcctgcaattttatgccaagcctgggtggcac

SEQ ID NO: 492323 - DNA, 574 bp, Homo sapiens
tgcatagcccctgccctcaaggaggccacagtctgaaggggtgagggaaagagtttatcattgttttaatcagaagattcggctgctcagacaaagcagatgttccatgtttccaaactattaagaattagattcatttaaaatgttttcattgaatgcaattataaacgctgttccaggaagacctacaaataaggatagatttgtttagtattaagggaaggggatgtttaattctgtgagggaggctgtagagaggagcttgggtcagaagactcatgtgtgagccctgtagaccccttccctacagggggtcttagtgcccgtagtacagtgaaatgggaccttgtattacaggcatctttcagggtttccatggagtacacctaggcratggtcaataaatgtgggtcccatatcttagagggcttagagggacagcaaaaagcaaaaaagcaaacaggatgtgcccctacctccaagaagttgctgccaatctgcctcagaagtccagcttgggaattgagactaaaggggagtgaaagcagccctagatggggcctgaggaaagggc

SEQ ID NO: 492324 - DNA, 499 bp, Homo sapiens
ctggatgggagaccatgcagccctgcaccgccagcctgatctcctggatttgtaargtgatggttgcagtgggaggccttgggtgggtgcagctaaccaagttcacctgtggggataagagtgaaggtttgtaagcaaataccagggaacgtgccctgctcctggcacctgtactgggggttgctctgcacacctgcatggttgggggtgtgtgtggcttgtacagcctcgtggctgtatcctgcccaagcactgtgtgttcgggggaggttcagcctgggcttggctgtcctcatggccagcatccaagcgaggaccctcacttgcctgccctggtcctcagcaccatctctgcccctccaggttagccttccctgagcccagagcttgccagttcccttacagagcctttggcctctctggtctggcactggtctccccaagtcctatttcaggagggggctacagggatcttattggccattatgtgtccacagtc

SEQ ID NO: 492325 - DNA, 495 bp, Homo sapiens
ctgctctgttcagccaccctacttctgagcatattccagaccccagagggccgctaccgcattccctcctgcctcccaygtgccttaccccctctccttcccatttcccctgccatctgtcctttcctctttttactctccctcttcctcccaaagtctgaaacaggcccttaagagctgacgctcccctctagcaaaatgtctaaccttggggaccaatagcaaggcaggggtgggggcacatgtgtcacagtaaagattactgggttggtagagggaatgggtgctgtctccagggacagagaggaaggtatccaaagaggcaacgtaggtgctgaagccagtcgcctgccctggtgaggggccaagttgaaacaagttagcctgtatcatccagagtgggttgagagcataggctccggaatcagacctgattttgaattccagctctatcacttatttgctgtaggatctgggcaaattatttaacctctc

SEQ ID NO: 492326 - DNA, 495 bp, Homo sapiens
ctgctctgttcagccaccctacttctgagcatattccagaccccagagggccgctaccgcattccctcctgcctcccatgtgccttaccccctctccttcccatttcccctgccatctrtcctttcctctttttactctccctcttcctcccaaagtctgaaacaggcccttaagagctgacgctcccctctagcaaaatgtctaaccttggggaccaatagcaaggcaggggtgggggcacatgtgtcacagtaaagattactgggttggtagagggaatgggtgctgtctccagggacagagaggaaggtatccaaagaggcaacgtaggtgctgaagccagtcgcctgccctggtgaggggccaagttgaaacaagttagcctgtatcatccagagtgggttgagagcataggctccggaatcagacctgattttgaattccagctctatcacttatttgctgtaggatctgggcaaattatttaacctctc

SEQ ID NO: 492327 - DNA, 495 bp, Homo sapiens
ctgctctgttcagccaccctacttctgagcatattccagaccccagagggccgctaccgcattccctcctgcctcccatgtgccttaccccctctccttcccatttcccctgccatctgtccyttcctctttttactctccctcttcctcccaaagtctgaaacaggcccttaagagctgacgctcccctctagcaaaatgtctaaccttggggaccaatagcaaggcaggggtgggggcacatgtgtcacagtaaagattactgggttggtagagggaatgggtgctgtctccagggacagagaggaaggtatccaaagaggcaacgtaggtgctgaagccagtcgcctgccctggtgaggggccaagttgaaacaagttagcctgtatcatccagagtgggttgagagcataggctccggaatcagacctgattttgaattccagctctatcacttatttgctgtaggatctgggcaaattatttaacctctc

SEQ ID NO: 492328 - DNA, 531 bp, Homo sapiens
tgactggcactcagtgtgcgcctggctaagagctttccacacataacctcatttaaacctttgaggtaggtgttcttatgcccaacttcagtgctggtgttcagagtactcaccagcacatccaaaacaggtgtaaaaatgtttaaatgtttccatatcagttagcaaatgcctctgccctaaactccccagtgcccatcactgcctgacccctgcccaggagccctaaacgaaccaacaactaaagaataagtgtctggcacatcagggggcctccaggaccaaggtmtagaaagtttcagtcacttgcagttccacaattcagacccaggccctcagatctcaggaccaggctctttgccaccaaggtgcttgctgtgatcaagagaacattagcagagctccggagccacagagagagggacctggccatgatgacactggggatgttgtatcagaattatctctttgaggtagctctgaaatgtgcaaggcctgacatcctaaaaacttttcttcacaataattatt

SEQ ID NO: 492329 - DNA, 505 bp, Homo sapiens
agctgttttcaaaataataagatcaagtaaaacaacatatgggaagcaccagctatagtgtttggttctaaacaaataataccgatttaaattaagtcaaaatayattttaaagatcacaaaatatgtctacaaaaggtaccttaaaaagaagatacggcaaatatctggataatttttccaaggcaaacatcaccctaaaaatatatgaatcggataagtcaggctcacagaacgtaactgcccaaaccttaatttgcctgcaactcaatgtgggaaaaaaaggaagaaaaaaactctgctttacatagataatttgggatatattccaaaataataaagcttaaatccatttaaataaacagtaattgtccacatgcaaaatttttatgcattttttttactaaacataaattggctttttaaatttttaataatattcatcttaaataaatgaaacttttactagtttttaaaaaaaattctgacaacacaaagtgaaaatg

SEQ ID NO: 492330 - DNA, 684 bp, Homo sapiens
ctattccaggcaggaaataggtagacataggtcaccaagtggcagcccgtagggtagttgccgcccacatatgtgtgagtttggctgtgttttttgaagtattggcttggttgaattgggactttaaaatgagaacattcttttgaaaagcaggagaatccatgtctttagaaacgcatccccacatagcaactatctgcagaggttgagtagatgctgcttcctgtacacacggcaggtcccagaagctccytcctgaccaaggctctcatttctgttcccagcctggaccccagagtgtggcaatctgtgactagcacagtgctagcctcagcagctctcccactgtagattccctcctccttgcagctcagggcaggaatccacagggaataggccttcactgtgcacagggtctgcaggacacacagcactgggctgttctgtctgttgcaccagcctaaggatttccagttctcaccttcgctccagactgggctgtggctgagtccatccctctccctgcagcctgctctgcagcagcctggctgcttgtgatgtcagccctcggcactcagcacacagtttcttcctgcttagttactctgcccagggcaggtcatgcctttccctccaagaaaagaaagtcagtgcataaatccaatttgaacttaaataatcagc

SEQ ID NO: 492331 - DNA, 626 bp, Homo sapiens
gtcgtccctggcccggctgccgtgtgcgtgcgcccgtgtgtggcagcgtgcgcgcgccggggtgtgcgcccgcgagtgtggggggcgtgggcgagcgcgctccccgctccccagccgagagcccgagacccagccccgcagccggctcctgtgtgtcggcgccgcagcctgccctggctgcgaggggggctgggcggcagttggaggggggcctgcctgctgggttgcccctgcaatggcatgcgatggctatgtgattgcaagatgacagctcccctgtgaggaccagagaggggatatgtgtgcgcccagttgcctcggagtcagcgtatgtccaaaatgtgagagtgtggggaacagagatcctctctgggctgactccgtaaagaaaagccctcaccccaaagctcatgccacccaagggaactggaacaagatcgtgattaaaactcagaattagctcattaaccagccctttatttgacgagagtaatttcagttgttgaagaaacacatcaaaggtccttattaatctttggacatgtrgccttcaggattgcaggaataagacatgctttcaatttgcctttaaaaacatttccaaagcatcagagcaggaagagaga

SEQ ID NO: 492332 - DNA, 240 bp, Homo sapiens
cttctgaacctcagacttgtagcttttggaaaaccagagaaaagcattttatttgttttgaaaattagatcacagtgtgttcaacttcccattaggatagctcccatttgttctgaaccagttttcaaaaatggtttgcctggaagtgagatgatcgggtctcagcctgggacttagtgaatctctccttataaatgatccagaccrtctttcagtggtcccttcccccactcccacccc

SEQ ID NO: 492333 - DNA, 589 bp, Homo sapiens
tgccaggacttctgtctgctgagggctcacagtggagcccttcctcaggaaggccgacaggagcggcctcactcaagttatctcacactccgggggcagccaaagccagtgactaggtgcaggggcctggaaaacactgtagggccacctggctccgaggctgtctataccactgtgtcatttagcttctctctctggttatcctagtccctcagctcccttattggtgtggtccccctagcactctcccatatacttmtgcactcaaatttcgatctcagagtccctaccctgagatatccaacctgagataattcatgccaggagtgatctaaggaagtgggctctaaggtggcatctgaggccctcatcatctgacattcagtggcaacgaggactctggctgctgtaactggagtccccatagcctgatgctgtggtggtgagttggaggggtcactttcttaggggttagagaggttcaggggaaggaataattctgaagacagtgggattgtcaagtgccatggatgcattagaaatagacaataaaagattgagaaggatgaaacactaattgaaggcagag

SEQ ID NO: 492334 - DNA, 637 bp, Homo sapiens
gtggcgggaaccaactccggacacaccgggcccaccaaggggaagaatatggtagactggaggatctgcagagtcaacgtgtataagcaagacctgagggagtatgattgggatgggtcccaagggtgctgaatcaagggagactggatktggaagtggataagggagagtttgtcagtctaagagcacggtcccatgatgccggttttccaccatggcaagtgccttagggtacggggctgatatgcttatgggttggccgttggacacttggaaaaagcaatggtctgcagtaagtgatgtgtcaacgctgaaatagctgtggtaagtgatagaagaatggactaaaggctcagagagcagacatgctggattagaaatggtacgcaggctggaaagccaccagcctatatgttccatggaaggactcagaggactctccatttaccaaagtgataaggaatccactggtaagagggataccagcaacatgcaaagctgagggatggcttctatctgtaggctggggctgagggtagagggtattgttactgatctgggctccctagcagaaatgaggatgaaaggatcccaaaataatggagtattttgctgtgcaaatcaaagtagatgcaat

SEQ ID NO: 492335 - DNA, 637 bp, Homo sapiens
gtggcgggaaccaactccggacacaccgggcccaccaaggggaagaatatggtagactggaggatctgcagagtcaacgtgtataagcaagacctgagggagtatgattgggatgggtcccaagggtgctgaatcaagggagactggatttggaagtggataagggagagtttgtcagtctaagagcacggtcccatgatgccggttttccaccatggcaagtgccttagggtacggggctgatatgcttatgggttggccgttggacacttggaaaaagcaatggtctgcagtaagtgatgtgtcaacgctgaaatagctgtggtaagtgatagaagaatggactaaaggctcagagagcagacatgctggattagaaatggtacrcaggctggaaagccaccagcctatatgttccatggaaggactcagaggactctccatttaccaaagtgataaggaatccactggtaagagggataccagcaacatgcaaagctgagggatggcttctatctgtaggctggggctgagggtagagggtattgttactgatctgggctccctagcagaaatgaggatgaaaggatcccaaaataatggagtattttgctgtgcaaatcaaagtagatgcaat

SEQ ID NO: 492336 - DNA, 641 bp, Homo sapiens
tgctccagagggtgggagatgaaccccatgaacctcatcactgagactatgaggtrgtgtgttagtccatttgtgttgctataaggaatacctgagactgcgtaatttataaagaaaagaggtttatttggcttatggttcttcaggctgtacaagaagcatggccctagcatctgctcctggtgagggcctcagggagcttccactcatggtggaaggtgaagggggagcagggatcacatggtgaggggggtacatgaaagagagagggaggaggtgccagatccttttaaacaacgaggtctcatgtgaacccacagagtgagaacaaactcattattgcgaggacagcaccaagctattcatgagagatctgcccccatgacccaaacgcctcccactaggcccacctccaacattggaggtcacatttcaacatgagatttggaggagacaaaacatccaaacatagaggtttggcctgagcaacttggaacattccctccaaaatagaaaacacattgtatcttgcacttcccatctctaagaataaacaattcctggcacttttttgggctctggagatgacaagttccatcgttgtgaatgctactctgacccagagggacacaggaggatgc

SEQ ID NO: 492337 - DNA, 578 bp, Homo sapiens
tgggatataccagttctggcgcatctccgtggtagagcattggaaagtgcggctgaagcaccatctggagrggatgctctgagagggtgggaggccatcctccacaacacaatactcaccccaaaccaatggtcaatatgtgttgctgtgtctcagtcagtagaaatcatgggtccaggaaccaaggcacagaaataggagtggcattgctcatcgtcacacttagtggcccaccaggggaatctgtgctgcctgaatgctcggcacagtgggtctaaaggtcctggtgcccagaggaggaatgcttcctccaggggacatggcaagattcccttttcatgttcagtgacaggtgctgccaaccaccaccagctcctacgtctagagactggtgggaaggaggggagtctccatcctgcacaggtcatcaaacctgtgctgtcacacactgggacagggaggatgtctttagcatccaggtgacctactgggtcatttcctggtgcctccctgcccaattctgatgacaaatggacaagggaaggagccacagcttgagaagggcatgacaactctct

SEQ ID NO: 492338 - DNA, 578 bp, Homo sapiens
tgggatataccagttctggcgcatctccgtggtagagcattggaaagtgcggctgaagcaccatctggagaggatgctctgagagggtgggaggccatcctccacaacacaatactcaccccaaaccaatggtcaatatgtgttgctgtgtctcagtcagtagaaatcatgggtccaggaaccaaggcacagaaataggagtggcattgctcatcgtcacacttagtggcccaccaggggaatctgtgctgcctgaatgctcggcacagtgggtctaaaggtcctggtgcccagaggaggaatgcttcctccaggggacatggcaagattcccttttcatgttcagtgacaggtgctgccaaccaccaccagctcctacgtctagagactggtgggaaggaggggagtctccatcctgcacaggtcatcaaacctgtgctgtcacacactgggacagggaggatgtctttagcatccaggtgacctactgggtcatttcctggtrcctccctgcccaattctgatgacaaatggacaagggaaggagccacagcttgagaagggcatgacaactctct

SEQ ID NO: 492339 - DNA, 543 bp, Homo sapiens
agaaggcttcccccaaaccacacatgaggctcagtggagctgcctgtctgagaggctgcctaagtgccatgccagggggttggtgtatgccagtcctaacacttcccccagccacagtgaatcccaggagaaatcctaagttgggttagtcattgttccacaggattcttctaagcagacttggtggtgacagccccgctcttcagtttgctgaggtggaatgtcaggtggccagaccgggctggtgctgccaaggtccctgtaacacagagacacctgtgtctaactgaagggaactgaggcagcagaggagaggataaagaggtggagaagcaggaagaagagaaggaggaggaggagggaggggaaagagaaacaggaagaggaggagaaacaggaaaaaaaaaggggaaggaagaggaggaggagagatgaagatgagagaagagggaaggtgttttagttacaaattatccccaaacttattatggctcaaaacaatacacaggttctatctcacwgcttctgtaggtcagtggttca

SEQ ID NO: 492340 - DNA, 514 bp, Homo sapiens
ctcccaacgctctgccctggccttgcgaccactctctgggccgtagttgtctgtctgttaagtgaggaaagtgcccatctccagaggcattcagcggcaaagcagggcttccaggttccgaccccatagcaggacttcttggatttctacagccagtcagttgcaagcagcacccayattatttctataagaagtggcaggagctgggatctgaagagttcagcagtctacctttccctgtttcttgtgctttatgcagtcaggaggaatgatctggattccatgtgaagcctgggaccacggagacccaagacttcctgcttgattctccctgcgaactgcaggctgtgggctgagccttcaagaagcaggagtcccctctagccattaactctcagagctaacctcatttgaatgggaacactagtcctgtgatgtctggaaggtgggcgcctctacactccacaccctacatggtggtccagacacatcattcccagcattagaaagctgt

SEQ ID NO: 492341 - DNA, 651 bp, Homo sapiens
ttcccttttgtcacaagcttttgactagctcctgtggaacatcgccaccccgccttgccctgcagaccaccccgtgtgacttcatgaagaggacgcaaaccacgtggtgcagcaggctccacaccactcctgatgccctttttgagtggattcctcagagggggtgcctgacgtcagaggtgaatgtcggccagtgtctcccaaagaggcagaggcagaaacatcactcctctctgtgttcccgagcaaagcactcaacctctctgagcctcargtttccatctgtaaaatgcgctctggctaagctgtctctccaggccatcccagacctactcatgtatgactaattggaagaaaccagttctcctttacagcaggatggaacatttgctatcaggatgcttcagggtatcagaatagaagttaccatttatcggctacgtaagtatctacatgacaaacaatagtattaacaaatgaaataaggcaccttgttcatttcattttcataaaaaccatatgagggaagctatgtgtctcaattcagatgcacttatctccaatctgccaaatgccatcccgataaactcagggcagcatctcagctttcagagaccactgtggatcctgacaccgccaactgctgaatta

SEQ ID NO: 492342 - DNA, 651 bp, Homo sapiens
ttcccttttgtcacaagcttttgactagctcctgtggaacatcgccaccccgccttgccctgcagaccaccccgtgtgacttcatgaagaggacgcaaaccacgtggtgcagcaggctccacaccactcctgatgccctttttgagtggattcctcagagggggtgcctgacgtcagaggtgaatgtcggccagtgtctcccaaagaggcagaggcagaaacatcactcctctctgtgttcccgagcaaagcactcaacctctctgagcctcaggtttccatctgtaaaatgcgctctggctaagctgtctctccaggccatcccagacctactcatgtatgactaattggaagaarccagttctcctttacagcaggatggaacatttgctatcaggatgcttcagggtatcagaatagaagttaccatttatcggctacgtaagtatctacatgacaaacaatagtattaacaaatgaaataaggcaccttgttcatttcattttcataaaaaccatatgagggaagctatgtgtctcaattcagatgcacttatctccaatctgccaaatgccatcccgataaactcagggcagcatctcagctttcagagaccactgtggatcctgacaccgccaactgctgaatta

SEQ ID NO: 492343 - DNA, 584 bp, Homo sapiens
gccctagacggcgatggatctatgaagcccttgttctccttgctccgaacatgatatgaaaagatgctttgtggtcgtcagctctcctcagtaggttcagttcacacccgggctctcaccccctgacactctttactggccctcgtcactctgtcattgtgagtgtcctgggaagggctcctcttgttctccttggctcttgtccctctgacctcagcaagacatctttctgagccacacagatgtctctcattgccaccccatgtctttcctacttgaaaaaaacagatttaattccaggactcacccaccactttcagagccctcagatcacgtgaatcacagaaatcaagtgatgatctttgaaactttctgaaactgagctccccaagtctacaggggatctaaccatgcctggccttccccaccaacacagagcacatctcccaaaggcttccaaccaacctgggccatcaaccagggtcccctrttgcccaactcagcaagtgctgcatcctgggagatgaagcctcgcccaccccacagtgttaagagcttgtggttctcggtttatcacccatcct

SEQ ID NO: 492344 - DNA, 553 bp, Homo sapiens
taaaatatcattaaaaactaaatcacatatctctgataagattacattgtaaccaagaaacaaaaaattgcctcgatatagttctattttatccctcaaaaagaatgagacttgattttctagagttcgtcccttatgcatctacgacaatctttgatactaacaggaaatattttccccttggccctcctatctaatgtacataaaatcattactttcaaatgccataattactgccataaaatgtctaatgtctccctcaggagtaattaatttcatttctgtacatcagtkgcattggcaactacatattttagaaatttactgttaatttcttatttccaggctccctcaaatgtttcaaagccctggcctcccactgtcttcctacaaccctgctctgaatcctgtcccctccctcccctgcacctggcattgcatagcctgcccagaaggcaggtgtgggtgggaacgccccctaaatgcttctgcaaggcttagcttcctgctgtgctgtctgtgtctattagtaaaggcaaaatgtcaaggaaag

SEQ ID NO: 492345 - DNA, 445 bp, Homo sapiens
caagctccttactctgtgtctggggactaagtgggagaatattagcagtaagatctggaagtcaggacaataagggcatgtggctctccctgatgctggggaaatgatgacgccaggacagcagtggccaggtgtgcttcttccctccccagtggtgtctgctggagaaggctctccatgcccagagcggcttggctttgcaagcttataagaaatatgggaggcaaaatggcccaaagtgcacatcctcccttgcctgaggcccaggctcccacagggaatgtcactacytccctctgtgggtgctgggaaatgtgggacagtgagcaggatctggaggtgtcatgaatagggttagcaggtcacacacaggctgccagaaggatccccaaccgaagggtccggtctgatgtccaagaatccaagagtccaacagaggaatgat

SEQ ID NO: 492346 - DNA, 595 bp, Homo sapiens
agttcctacaagttctttctctttcctaaacttgctgttactaatttayccctcactgttttcaaggcaaagcatctgcaaggttttaagtcctttccccctcccgtcctgtccccatcagtgttgaaatgtatgctacagttattatggtttgaatttgttatgccatgttgtgctcctgggcttttcatatcagaacaatgcatttttaacattctgactttctttttctctcaattggtaactgactatatagaaaatttatatttatggatactatttctgttttaataagttcaagggaaaacattgataaaggaaaatttatcctttcaactttctttaggtgccagcattattttcatattaggaagcaggagaaagttaaggaactctaagcaatactagaatggttatatatatatttaagtttgtattaaacctgttggaatggtaaagaaatttactgacatatttaaccatacaaaatagtgttgctaaaagactagtttttctcctttattctgtgcatatgtatatatatgaatgtgtgtgttttttttaagaaattttaaaaaaacttaatctgccagct

SEQ ID NO: 492347 - DNA, 598 bp, Homo sapiens
atttatattactgaagtcttgtagtttcaaagaatgactgctgcatatcatttgtctgcaggaaagaggaacctaatagagtttctaatgttgagaatcctttctaaatcgggttagctcaagaatgtggtcagtcaccaatcatmatagcgggtgttgcaactttgccttttcagaaacttctagctgccttcttgtgcctctctcccactctcctggagttctcccagaacaatatgctgagaacattgataagggtaagtcactattagtggaactgtcaacctgaattgtcttcttgcaggacaacttggctgtagctttcaaagttaaaattgaaaaggctttttaatccagcattctgaatatggtacttattctacagaagcactttcattttcttggggtggggtggaagcaagataatatatgtgcttggacattcattgcataattataattgtaaaataaagtaatgaaatgaatttccatataagaagacaagtacaataaatttgataccttcataaaatgaaatattctatagccatgtaaaaagacaattttataaatctccctgtggtagttttaagtgaaa

SEQ ID NO: 492348 - DNA, 598 bp, Homo sapiens
atttatattactgaagtcttgtagtttcaaagaatgactgctgcatatcatttgtctgcaggaaagaggaacctaatagagtttctaatgttgagaatcctttctaaatcgggttagctcaagaatgtggtcagtcaccaatcataatagcgggtgttgcaactttgccttttcagaaacttctagctgccttcttgtgcctctctcccactctcctggagttctcccagaacaatatgctgagaacattgataagggtaagtcactattagtggaactgtcaacctgaattgtcttcttgcaggacaacttggctgtagctttcaaagttaaaaytgaaaaggctttttaatccagcattctgaatatggtacttattctacagaagcactttcattttcttggggtggggtggaagcaagataatatatgtgcttggacattcattgcataattataattgtaaaataaagtaatgaaatgaatttccatataagaagacaagtacaataaatttgataccttcataaaatgaaatattctatagccatgtaaaaagacaattttataaatctccctgtggtagttttaagtgaaa

SEQ ID NO: 492349 - DNA, 535 bp, Homo sapiens
tataaagttacggaagagagatacattctgttatatgggaaagtaatacttaagcttagaaacttaatggatgagtgaagtttaaccagcttggtaagaaaaatggggaaaaaatttacagtggttgtgaaatgtgcccaggctgagatgactcaggagaatttcatatagtatgtctatacatggtgtggrtggcatggctagatgtgagatcatgaggaacagtaaacgcagaaaatttcaaattttctaatgaaagtgaagaattattttaagcaagtgaaaaaaaattgtcccattagtttttttagaaagaatagagtgaaaaaaagtggaggacagagggggtatgattattagcacaaagtcctgattaaaagatattacactaggaaaagtgagaaataatgagtgaagctaaagcattcactgcagggattaaggaggatggaatgttgtaagcatgagggttaattaagaggcagaataaacaaaatgatatttgactgggaaggggcaggacgagacaggagga

SEQ ID NO: 492350 - DNA, 443 bp, Homo sapiens
tcctagcttcctccttcagctcagcatctctgtcatctggccatccattccaatactttccctttgacgatctttgcagagtgcaccagtcttccagatgatgtattctctcagtgacagatgttccttttggctgcatctagttgaccatcttgaatcttgtctcatactctttaccatgatttctgcatatcatgacagaattttgatttattgctataaattaggtcataattgttttggatcagatattaaatcattggacaaataaaaccccaccaagtgataggggaaaatattaaaactcgmtgcaacgtcttcctaaaaaaaccgcttaaatgccaggaatgctcaatgtaacttctgtaaatattttcttatcttatttagtactggttaatgctacttccagaaaataataacttaatttaattgcttcagta

SEQ ID NO: 492351 - DNA, 590 bp, Homo sapiens
ttttttttcttatgtcttcacatcgtcttccttctgaatgtatcctgtccatattttctcttcttatgagaacaccagtcatactggactagggctcactctaatgaccttattttaatttaattacctctataatcaataccttctttccagattcagtaaaactctgaggtacttggggttaggatttcaacatgaactttttcaggggcacaatttagcccacacaatagctttctcctttttacaaagtataaggatgccaacaaatgcagttgttactcattttcatcttagtgtgtattttagtccactaaatttaagcacttaaatataaatttaagtgaatgagctattttaaaagataattttcatgtcaaaataaacctgaaattgtgaaaagagattttatccttgcttaatagactacctaaattataaatgatatcaagtgttcactatatgttgaccactgtaaataaaattcctcttcagaaatcacctcatttaatcatgtgcttactgcaacaatggaaattaagtgagattattagggamccctaaatctgcaaaaatagagtcgtggcaat

SEQ ID NO: 492352 - DNA, 601 bp, Homo sapiens
tcactttaaatacacatttatcacacactgcttggcattgtgccagattttcaagggattaaagggaaaacatgacatataatttgaggttaaggaattcacaatttagtaattaaaaacagaaagataaaccactactaagaatgagtggctcatgcctgtaatcccagcactttaggaggctgaggcgggtggatcatgaggtcaggagatcgagaccatcctggctgacacagtgaaacctcatctctactaaaaatacaaaaaattagccaggcgtggtggcacrcacatgtagtcccagctactcaggaggctgaggcaggagaatcacctgaacccaggaggcggaggttgcagtgagctgaggtcacgccactgcacttcagcctgggcaacagagtgagactctatctcaaaaaaaaaaaaaaaaaaaaaagtagattgctacaaattttcaaaaaagctgcaagtagcctgatttggccaacaagtgtaaggagctgattgttcaagggaaaagcagatgctccatggaggggacgtatatttgtcctgggccttaaagaaagagattctcctgcctacgatgtcctggggt

SEQ ID NO: 492353 - DNA, 601 bp, Homo sapiens
tcactttaaatacacatttatcacacactgcttggcattgtgccagattttcaagggattaaagggaaaacatgacatataatttgaggttaaggaattcacaatttagtaattaaaaacagaaagataaaccactactaagaatgagtggctcatgcctgtaatcccagcactttaggaggctgaggcgggtggatcatgaggtcaggagatcgagaccatcctggctgacacagtgaaacctcatctctactaaaaatacaaaaaattagccaggcgtggtggcacacacatgtagtcccagctactcaggaggctgaggcaggagaatcacctgaacccaggaggcggaggttgcagtgagctgaggtcacgccactgcacttcagcctgggcaacagagtgagactctatctcaaaaaaaaaaaaaaaaaaaaaagtrgattgctacaaattttcaaaaaagctgcaagtagcctgatttggccaacaagtgtaaggagctgattgttcaagggaaaagcagatgctccatggaggggacgtatatttgtcctgggccttaaagaaagagattctcctgcctacgatgtcctggggt

SEQ ID NO: 492354 - DNA, 526 bp, Homo sapiens
ggtgtgatggcatgcaccggtagtcccagctatttaggaggctgaggcaagaaagttgcttgaccctgggaggcagaagttgcagtgagctgagattgcaccatcgcactccagcctgaatgacagagcaagactctgtatcaaaaaagaaaaaataagaaaatagtggctgaagtttttccaaatttggtgaaagacataaagttacatatccaagaatcttggtaaaccccaagcaggataaatacaaagaaaagcatactttggaacactttactcaaactgctaaaagtgaaagaagccacagacattttgcacacatgtccaaaatggaatttatcctcttccctccgaatttgctcctcttcttrtatttactttttcaggaaatgatgctacctgctgccttctacaagagagaaccctggagtccctctgaactcattcttctcctttcttttctacttcagtgggacaccaactccatctactatgtcattacatagctcaagcctctttcctttct

SEQ ID NO: 492355 - DNA, 560 bp, Homo sapiens
tgaggtgcagggaggtgagaggcaaagaccttcaacctaacgcacctgaagcacttagcaccgagcctgacacccactgaattatgagtgatggcccctccagagatggggcctgaggaggaggtgctgggggctagatgcggccacaggtagcagtgacaggggctggggagactgcctttcctgggcttaagactacaggcagcctccagaggtagcaagtggcggccgactctgtggagcccacatcctactttggtcctctgaagcctgtgtcatcttcccattcttcaaaggtcattctcagagccactctctgtgacatagaagcattctagaaataaaaacttgccagtaattagaatggaagtagcttacatactttttatattccaaaattgtgtttaaattacacaaacgcataaaaatttcaagtgcaagagcmcacagtgaaaaataattctccctccacctctgccctccctccctggaaaaaattctgttttctacacattctttttccagaaatattctcagcacacacacacacacacacacac

SEQ ID NO: 492356 - DNA, 555 bp, Homo sapiens
gtgggcttgttaagccttggatgtgggctcctgacctccatggcagattgcagagggtctctgagtttccaaagcaccctggaggctgagctcagcaggtgtgagggctacctatgtgctggttcttgtagagaactarttagtaacagtaaatgtggtcagagtaatatggggctgcactgttctaggccctttgtgtgctaatttatttaattcccacaattccattaataggaattactagccctgttttacagatgagtaaacgaaatcccagaatgattaattaaattggccgagggtacacagtaagtggggaagctgggatttcaacccagttctgcctgacccaaaaaattcactggcctgaatgtctctagcaggggctcacacccctggagaacctatcagtatttatgcctcagaaataaaagcagatacctggaggcatgtaatgtgagagtaggggagtgtagagaacagaggacagcttagaaccctggccaaggtgggagccacttctgggtgggccaggcaggattacatactccatga

SEQ ID NO: 492357 - DNA, 622 bp, Homo sapiens
gtgtgtgtgtgtgtgtgtgtgtttaagagagagaggaggattccagatcacatctactgagcttccatctttgtccaaattcagatcgacttcctggcttttcagtgtatataagccaatcatataagaccgaaagaacaggtctcgtaggatgtgatgactcctgcaggaggcaggtaggaggatatctgagcaggcagatgataagggatgagagtgttaatggtaaaataactggcagtgaaagacatttcaggcaggtggtcctacttgaatgcccccttccaagcacatctgtggtgcagtgtgtcccattcctggagccaggcctgacctgcccagcctgccttgcccccacccccgtccccaggcttttgctaggagctctggactcataagctckggccagctctggcatcgcattgcctgggcatctccctgcttccaggatggaggccccaggagagaggaggctgtggcccggggctgaggacaacagccagggcccaaggctgtttaaggaaaagccacagttccattgtatagacctgtagacagaggggtaaactcagaggaaatgagttgccttgatgcacacgttgatagccaggggctacgtcta

SEQ ID NO: 492358 - DNA, 627 bp, Homo sapiens
ctgtttctagttgcctccctccaccagactgaacaatgctccccctaaaaagatatgtctgcatcctaatttctggaacctgtgaatataaccttatttcagaaaagggtattctttacagatgtgattaagttgaggattttgagatgaggaaaccatcctggattacccaggtgagccctaaatgtaatcacgtgtattctaataagataaacacacagaggaaaaagacacagagaagaggaaaaagccatgcgaccacctaagcagagactggagtgatgcagccacaagctaaagagtgcctggagcggccagaagtgaaaggaagagattctccaccccacccccagcctttggaggaaatgcagccctactgataccttgataatggacatctgaacctgaatgcctctagaacttcaagataatcaattttattgttttcagccaccaaggtgatagtgatctgttgtggcagccctagaacatggatgcgctcctcttttcttttcagaatctctcctcaatcttttctgctcctgactatgactctgyttctgcttcttggagcaacctgtcttgcagcaggctgaacagtgcagtaggatcacaatcagagcagta

SEQ ID NO: 492359 - DNA, 387 bp, Homo sapiens
tgctctacaactagcaggggcagatgatagtctctgggaggtgaatacgactgaagcagaggaaaatcacaaaggaggaagcygctccagctcccaccgagagatcaggctttaagttgtactgtccctcagtatccttatctgctaaattgaagtgtttatatattgttcctacctctcagagattttatggagtttaaatgagttaatgcatgccaaactgttagaagagctcttggaaaatgataaatgcttaatacatgttggtatagtttggacgtttgtcccctccaaatattatgttgaaatgtaatcccaaatgttggaggtggggcctggtgggaggtatttggatcatgggggtggacccctcacgaatggttttgt

SEQ ID NO: 492360 - DNA, 387 bp, Homo sapiens
tgctctacaactagcaggggcagatgatagtctctgggaggtgaatacgactgaagcagaggaaaatcacaaaggaggaagccgctccagcycccaccgagagatcaggctttaagttgtactgtccctcagtatccttatctgctaaattgaagtgtttatatattgttcctacctctcagagattttatggagtttaaatgagttaatgcatgccaaactgttagaagagctcttggaaaatgataaatgcttaatacatgttggtatagtttggacgtttgtcccctccaaatattatgttgaaatgtaatcccaaatgttggaggtggggcctggtgggaggtatttggatcatgggggtggacccctcacgaatggttttgt

SEQ ID NO: 492361 - DNA, 507 bp, Homo sapiens
ttacttgaggccaggaggccaaggctgcagtgagccgtgactgcaccactgcactcccgtctgagtgacagagaccctgcgtctctctctctctctctctctmtatatatatatatatgcatgcatatatatatatgcatatatatacatatgatttatattcaattatttaagaatattattaaccctctaaggcaagtgatcttctaggagtctagacaatggatagaaaggataacaatactgggcttttcctgtctaattccaccctaaattttcttttaatatttgacttttttttttttgaaggaggtgatagctaatgttcagaggcacttttttcaacggtgtatggtggcatttactcctttaaattcataaccacaaactttaagtgggcctttaatgctgcaggcaatctatgtgaccctcttctactaatctcccaatttcccgatggactatttctcatcttttctctctcttaaaccctcaaaccaccttccc

SEQ ID NO: 492362 - DNA, 598 bp, Homo sapiens
gcaggaggattgcttgagcccaggagttcgagactagcctgggtaacacagtgagaacctcatctctacaaaaaaattaaaaaatgaggtggaggattacttgaggccaggaggccaaggctgcagtgagccgtgactgcaccactgcactcccgtctgagtgacagagaccctgcgtctctctctctctctctctctctmtatatatatatatgcatgcatatatatatatgcatatatatacatatgatttatattcaattatttaagaatattattaaccctctaaggcaagtgatcttctaggagtctagacaatggatagaaaggataacaatactgggcttttcctgtctaattccaccctaaattttcttttaatatttgacttttttttttttgaaggaggtgatagctaatgttcagaggcacttttttcaacggtgtatggtggcatttactcctttaaattcataaccacaaactttaagtgggcctttaatgctgcaggcaatctatgtgaccctcttctactaatctcccaatttcccgatggactatttctcatcttttctctctcttaaaccctcaaaccacc

SEQ ID NO: 492363 - DNA, 516 bp, Homo sapiens
tgtttagtttgctagagctattacaaaaagtcccacaaactgggtattgcaaaaaaaaaaaaagagcattgtatcatgttcagatagatacctgcacatatatatatatgtgtgtgtgtagacatgtatgtgtgtgtatgtatatatatgaatgtacatatctatctgtcatgttcatatggtgcgcattctgtatgtgtgtctgtttccaaatttccccttattatagagataagtcatatttgattagagcctgatttaatgaacttattttaacttatctytgtaaagacattattctaaaataagatgacaatctgagatctgagatactgggggttaggatagcaccataagagatttggggggacacaatttaacctataataatcaatcttttaaagacttactctattttatctttatttttattttaatatgtaatccttttatttttattttaatgtgtaatccttgagtaacaactgaaatttatttggtttattaaaccccttc

SEQ ID NO: 492364 - DNA, 369 bp, Homo sapiens
cactgcagacatctgatttctaaatttttgaactgcagagaagcatatactagggccatgtttctctgggcacttgtttatcttgggttcagttggcgtgttacagaaatatattaggcccccaatcccaggaggaaactgaaactgtgagaaagacaaaatctggctgaccttctgtaaaaacagccagccaaccctgctgataggctacagcagcaaaaacagagggcagaattactgagtttttgtctcrgaggatgtcaatttattttaaaatgtttaattctgaaagaagtaactcagctacaccctctcgtttcatctgcattaagcaggtaacaaatggcaatgtgtaatctatatgggtaa

SEQ ID NO: 492365 - DNA, 623 bp, Homo sapiens
ctgaggatggttcccctaccagrcaactgacagaaaagccagaatattaaattcttttttttttttttttttttgagacggagtctcacttttgtcacccaggctgcagtgcagtggcgcgatcttggctcactgtaacctctgcctcctgggttcaagcaattctctgcctcagcctcccgagttgctgggtttacaggcgcccaccaccactcctggctaatttttgtatttttattaaagacagggtttcaccatcttggccagtctggtcttgaactcctgaccttgtgatccaaccaccttggcctcccaaagtgctgggattacaggcgtgagccaccgtgcctggcccaggatattaaactcttgacctgcagtaggagccaacaaacctcaaacaaagatttcaagcaaatatagtaagtcactcttcctaaatgtgaaagttgaaagaattgccggaagaatttgaggaaagcaaaccattttcctcaaaatgtagacagactgctgcccacctcctcaggttagaatccttctaagttcacttactacccagggggcacattataaacaggagttttattttttaaatactagatcaaatttcccaaaatgaa

SEQ ID NO: 492366 - DNA, 527 bp, Homo sapiens
ccaggctgcagtgcagtggcgcgatcttggctcactgtaacctctgcctcctgggttcaagcaattctctgcctcagcctcccgagttgctgggtttacaggcgcccaccaccactcctggctaatttttgtatttttattaaagacagggtttcaccatcttggccagtctggtcttgaactcctgaccttgtgatccaaccaccttggcctcccaaagtgctgggattacaggcgtgagccaccgtgcctggcccaggatattaaactcttgacctgcagtaggagccaacaaacctcaaacaaagatttcaagcaaatatagtaagtcactcttcctaaatgtgaaagwtgaaagaattgccggaagaatttgaggaaagcaaaccattttcctcaaaatgtagacagactgctgcccacctcctcaggttagaatccttctaagttcacttactacccagggggcacattataaacaggagttttattttttaaatactagatcaaatttcccaaaatgaagt

SEQ ID NO: 492367 - DNA, 458 bp, Homo sapiens
aacccttacatttttgttcacttccacaagggaatttattracagagatttatagccatccttggtgatgatgtaatcaacttaccatttgttgatgggcagataattgcattcaaatataagagtagtaatgctctaaagctacccaaagtgtatcacaggtgcagctactaaacccagcactccagaaagtgagtgttcatgggccctatgcttataaaggtagaaatttggaaaggacatagaaacataagggagaaaaagaaaatgcacacagtcttatattcttctatactagtaggataataatagtaattacctcaaaatgttgctgtgaaaattaagagagataatttatgttaaaatctgaaacataagaggccctccataaatgtaagctatgcttattattaatgtgtcatctagtgtcatataatagtcttagtttaacttcccag

SEQ ID NO: 492368 - DNA, 640 bp, Homo sapiens
cttctgagccctccaaactgttccaacttctccctgttacccagttccaaaatcacttccacatttttggctgtcttttcagtagcaccctactcctggtaccaatttactgtattaatccattttcacgctgctgataaagacatacatgaaactgggcaatttacaaaagaaagaggtttaatggacttayggttccaagtgactagggaggcctcccaatcatggtggaaggcaaggagcaacaagtcacatcttacgtggatggtggcaggcaaagagagagaacttgtgcaaggaaactcccccttataaagccatcagatcttgtgagacttattcattatcatgagaacagcatgggaaagacctggccctatgattcaattacctcccactgagtccctcccacaacatatgggaattcaagatgagatttgggtagagacacagccaaaccatatcaagtgggaaatgaacatcaggattgatattttttaaaaatgcctcctaggagattctaatgtgctctctggtttgagaaccactcatctgcttattttgattcttgctgacttctttatattaaagtcctaaatatgtgtctctttttctgggatacttatgtgttctattaatc

SEQ ID NO: 492369 - DNA, 640 bp, Homo sapiens
cttctgagccctccaaactgttccaacttctccctgttacccagttccaaaatcacttccacatttttggctgtcttttcagtagcaccctactcctggtaccaatttactgtattaatccattttcacgctgctgataaagacatacatgaaactgggcaatttacaaaagaaagaggtttaatggacttacggttccaagtgactagggaggcctcccaatcatggtggaaggcaaggagcaacaagtcacatcttacgtggatggtggcaggcaaagagagagaacttgtgcaaggaaactcccccttataaagccatcagatcttgtgagacttattcattatcatgagaacagcatgggaaagacctggccctatgattcaattacctcccactgagtccctcccacaacatatgggaattcaagatgagatttgggtagagacacagccaaaccatatcaagtgggaaatgaacaycaggattgatattttttaaaaatgcctcctaggagattctaatgtgctctctggtttgagaaccactcatctgcttattttgattcttgctgacttctttatattaaagtcctaaatatgtgtctctttttctgggatacttatgtgttctattaatc

SEQ ID NO: 492370 - DNA, 641 bp, Homo sapiens
tgttgccaattctgtatacgaatataatctctacttagaaatcagacatactctcaagcagaaatgttatgtgacagagttcatgtttgtcatctgtctgcaatcctttttggtactttttcaactttttcttttcttttcttcttttcttttctaagacaggatctcactgtgttgcccaggctgaagtgaagtggcatgatcacagctcactgcagcctccaccacccaggctcaagcgatcctcccacctcagcctccctagaagctaggactacaggcatgcaccaccctgcttggctattttttttttcttttttttttagagacaaggttcaccatgttgcctaggctggtctagaagttctgggctcaagtgatcctctcaccttcgcctcccaaagtgctgggattacaggcatgagcaaccatgcccagcctcaagtatttcttctgtattagattagcagccttaattagaaaaaaaaaaagtgaaaagattattcacatcaatatctgaggacttaatctagtaaagtctgttttatctgaaggaataaccaaaaggccagttaacccayacattgttaaaataaaaagaaatatacataccttcaataacttattttaacataaaactt

SEQ ID NO: 492371 - DNA, 475 bp, Homo sapiens
ccagccctgttactttactgcacaatgcttacaacgttacagcaaacaatatgtagtgataaaactgtcctgtcataccctagtttggaaaatgttaagtcattcctattatacaagagcacttgttgagaaagtgctattaagagacttgatataaaaagattgagaaggaatatcactctctgggaagaatatgagtaacagggcaaacagaagacaattaaagaattgcagagttgtttgttaaagtttgtgaggagaggagacatgctccccatacatttgcctygtcaaggaagtcagtttctcttgtttccctctcaggtacagtatcatgaagtcctgctggcgctggcgtgaggctgaccgcccctcacctagagagctgcgcttgcgcctagaagctgccattaaaactgcagatgacgaggctgtgttacaagtaccagagttggtggtacctgaactgtatgca

SEQ ID NO: 492372 - DNA, 631 bp, Homo sapiens
tattatgtgttccagctgtgtttcatttgacctgatatgctttatcccgcccatttctacagctaaaatttttctatcaagaatcagctgaagtggcatatgcttgtacaattagtttctcacgtttcatcccagccagaattaactgcccattctcctgctstatgaaactctttgtcttttattatgtcactttggattacattaagtaaatgtttgtcatttgaattccactgaaaaatatttttttcatacactcgttcacaatttgtataaactttgaacagtttatttcctcacttagtagtttggcttttgtcgtgaaagcaatacaaaatgaaacccattcggtccagatatcttagaagagaagtgagcatttaaaaaaagaagaagaatctggagaaagctatctttcagtggtggaaagcataagcagagatgtggtaactctaagacttcactggaaaaatctctcagagcaattattatgataaaaccatcagaggaaataaggatctgggtggtatgtgcttaagtgtcaaatatccaagatgtactcgaaagctaaataataaggaaatatttaaagtttatttttattcaagaattatttattaaacaactacca

SEQ ID NO: 492373 - DNA, 542 bp, Homo sapiens
ctccctgttgctttcctggtgttctctgatgacctccatgatcaccccatgctcttcttattttttaattagtttcatggaagtaagagctcaggcagccctttagtttgtggccaaatataaggttgtttggtatctcttggtcacaaggttttcctgaacaagcctcaactctgcttctccagagctctccattgtgctgagtggatgcctcagccgcctcttgtgtctgaaagcacacatgaaccatttctctattccctttgctaggtagctatgaactctacctagaaatcccactttggttaaaaaaaaaagtctttccatagctaaagcaactctgtcacaaaaacaaaggccccgcgaattttgagttcacaatgctgacttggcaaacccaatcttttccccacctgaggcctgtcaccttcataactcaaggttcccttctcccatctggcccacagtttcggtagtttctgmaagcaaataattcctacttgtggtttctaaacccttatcaattgaaacaccacagcggc

SEQ ID NO: 492374 - DNA, 570 bp, Homo sapiens
agctggtaaattgcctaaggtctcatggtgaaaaagtgccaatgctgacctttaacctcctggatgctggctctcytgccaacaattatgctccactgtcttccccagtgaaatgctacccatcgtggtatcttcagagagtgggttccagaaggaactcccagaccaagcctccttgaattcaggctcagtctgcaaaaggttttcttttttctcacggtaagagacatgggtggtgtcctttctctgagctgttccctaggaattagtaccactttctcaaccgagaggcccagcctccctgctgttgggcctctgacctccctgttccctccctcataccctcccctcctattccctcttcaggtaaaccactgagataagtcagagctccccaccctaggcctcccacccactctttatctttttctctctctaccaaaaggcctgtaattaggaaacattagcaggctcaaaacagctttcatacctgaaacatcctccataattgcactcagcagagctcttccctggctattaatgtcacttctatgaagcaatgaggaacaa

SEQ ID NO: 492375 - DNA, 570 bp, Homo sapiens
agctggtaaattgcctaaggtctcatggtgaaaaagtgccaatgctgacctttaacctcctggatgctggctctcctgccaacaattatgctccactgtcttccccagtgaaatgctacccatcgtggtatcttcagagagtgggttccagaaggaactcccagaccaagcctccttgaattcaggctcagtctgcaaaaggttttcttttttctcacggtaagagacatgggtggtgtcctttctctgagctgttycctaggaattagtaccactttctcaaccgagaggcccagcctccctgctgttgggcctctgacctccctgttccctccctcataccctcccctcctattccctcttcaggtaaaccactgagataagtcagagctccccaccctaggcctcccacccactctttatctttttctctctctaccaaaaggcctgtaattaggaaacattagcaggctcaaaacagctttcatacctgaaacatcctccataattgcactcagcagagctcttccctggctattaatgtcacttctatgaagcaatgaggaacaa

SEQ ID NO: 492376 - DNA, 373 bp, Homo sapiens
agttcgagaccagcctggccaagatggtgaaatcccatctctactaaaaatacaaaaattagctaggcgtggtggcgcttgcctgtagtcccasctacctgcgaggatgaggcaggagaatcgcttgaacctgggagtcagaggttgcagtgagccaagatcgtgccattgcactgcagcctgggcaacaggagtgaaactctgcgtaaaaaaaaaaaaaaaaaaacagaaaaaaatacagaccctcagggcccacctcagactcactgcaccagaattcttattctaacaaaatacccaagcacttaatatactctttaaaccttaagaaccacttttctaggacaaagaaaccatagtggaagaacaggca

SEQ ID NO: 492377 - DNA, 373 bp, Homo sapiens
agttcgagaccagcctggccaagatggtgaaatcccatctctactaaaaatacaaaaattagctaggcgtggtggcgcttgcctgtagtcccagctacctgcgaggatgaggcaggagaatcgcttgaacctgggagtcagaggttgcagtgagccaagatcgtgccattgcactgcagcctgggcaacargagtgaaactctgcgtaaaaaaaaaaaaaaaaaaacagaaaaaaatacagaccctcagggcccacctcagactcactgcaccagaattcttattctaacaaaatacccaagcacttaatatactctttaaaccttaagaaccacttttctaggacaaagaaaccatagtggaagaacaggca

SEQ ID NO: 492378 - DNA, 608 bp, Homo sapiens
tggcaagagtcacctcttctctgacctggtatgmcagggagaactaaatggaacaatctgtcaggcctctcttctcatgtggatggagaaatctagagcccattgctagcaagtctctctagatctctagagattatcttgctcatttactttcttctagatagcactgtacattgggcaatctagtcagaagagaaacagtttcttgtgagtgtaagtaaaggcttcaaattcttgacacacccttcccattaggaagtggtatctatctcttcctcttgaatctggctgggcttgtgacttcttcaaccaatcgggtatggcagaagtgatcatatgtgatttctgagactgagtcataaaagccataaagctttttccttcttcactggaacagtctcctttagaatcctgaagcaccacataagaaatccaattgcaccgagaccaccatgctatgaggaagctcaagtcacatgcagagggcatatctgagagttccagtcaacagtctcagatgagttctgccttctggtcatctcagtccaggtaccatgcatgtgataagtctctggatgattccatctcccagccattcaaattttgca

SEQ ID NO: 492379 - DNA, 687 bp, Homo sapiens
taagcccctagcctagcctggtgccaggtaactcatcttacatgaagacacacatgccttgagtatttatcctcagcaaaggatggcaagagtcacctcttctctgacctggtatgccagggagaactaaatggaacaatctgtcaggcctctcttctcatgtggatggagaaatctagagcccattgctagcaaktctctctagatctctagagattatcttgctcatttactttcttctagatagcactgtacattgggcaatctagtcagaagagaaacagtttcttgtgagtgtaagtaaaggcttcaaattcttgacacacccttcccattaggaagtggtatctatctcttcctcttgaatctggctgggcttgtgacttcttcaaccaatcgggtatggcagaagtgatcatatgtgatttctgagactgagtcataaaagccataaagctttttccttcttcactggaacagtctcctttagaatcctgaagcaccacataagaaatccaattgcaccgagaccaccatgctatgaggaagctcaagtcacatgcagagggcatatctgagagttccagtcaacagtctcagatgagttctgccttctggtcatctcagtccaggtaccatgcatgtgataagtctctggatgattccatctcccagccattcaaattt

SEQ ID NO: 492380 - DNA, 687 bp, Homo sapiens
taagcccctagcctagcctggtgccaggtaactcatcttacatgaagacacacatgccttgagtatttatcctcagcaaaggatggcaagagtcacctcttctctgacctggtatgccagggagaactaaatggaacaatctgtcaggcctctcttctcatgtggatggagaaatctagagcccattgctagcaagtctctctagatctctagagattatcttgctcrtttactttcttctagatagcactgtacattgggcaatctagtcagaagagaaacagtttcttgtgagtgtaagtaaaggcttcaaattcttgacacacccttcccattaggaagtggtatctatctcttcctcttgaatctggctgggcttgtgacttcttcaaccaatcgggtatggcagaagtgatcatatgtgatttctgagactgagtcataaaagccataaagctttttccttcttcactggaacagtctcctttagaatcctgaagcaccacataagaaatccaattgcaccgagaccaccatgctatgaggaagctcaagtcacatgcagagggcatatctgagagttccagtcaacagtctcagatgagttctgccttctggtcatctcagtccaggtaccatgcatgtgataagtctctggatgattccatctcccagccattcaaattt

SEQ ID NO: 492381 - DNA, 687 bp, Homo sapiens
taagcccctagcctagcctggtgccaggtaactcatcttacatgaagacacacatgccttgagtatttatcctcagcaaaggatggcaagagtcacctcttctctgacctggtatgccagggagaactaaatggaacaatctgtcaggcctctcttctcatgtggatggagaaatctagagcccattgctagcaagtctctctagatctctagagattatcttgctcatttactttcttctagatagcactgtacattgggcaatctagtcagaagagaaacagtttcttgtgagtgtaagtaaaggcttcaaattcttgacacacccttcccattaggaagtggyatctatctcttcctcttgaatctggctgggcttgtgacttcttcaaccaatcgggtatggcagaagtgatcatatgtgatttctgagactgagtcataaaagccataaagctttttccttcttcactggaacagtctcctttagaatcctgaagcaccacataagaaatccaattgcaccgagaccaccatgctatgaggaagctcaagtcacatgcagagggcatatctgagagttccagtcaacagtctcagatgagttctgccttctggtcatctcagtccaggtaccatgcatgtgataagtctctggatgattccatctcccagccattcaaattt

SEQ ID NO: 492382 - DNA, 650 bp, Homo sapiens
aggccccagatataatgaagcagaaataactcattcctgtcatgccctgtcaaaaactaccattgaggtgttttgctatgcagcaattggtaataaaaacacaatctttccagttaaggtctccagcagtgcaatgtgggataacccaaatgacttttgcatttgggcckcaaagtaacaacaacaacaaaaaaaactgattaagggagagagggtctagacacaaataccacctacaaccatatactgactagatggtcttgggttggtcattcaagcactcttgtttccatttttttccctctacaaaacaaagaaaatcatcaacagactacagatgctcctcgacttacaatgggttgctcctgatcaacccattataagctgaaaatgcatttaatacacctaacatcatagtttaatctatatggtttctacacaaatacatattacttttgcaccattataaagttgaaaaatcataagttgaaccattgtaagttgggggccatctgtagtaactcccttataagattgtttaaaaagcaaatgggaaagtgtaacttgcttagccctgtacaaacgctcactgttgctgtcaatggagtgagagaagccctttctaaaatgtcttcttgaagtgaagacca

SEQ ID NO: 492383 - DNA, 328 bp, Homo sapiens
tggaaacaagagagccagccatgggagaaggaaggggyggggcctctggcaggagctcttggcttcgttcccattcttacaatggaggaaagtcccagtctctgggtgaaaaaaagccacatctggcctcaagagaggacacccccaccacattctgtgtgttcccccaattgggtgggaatgtggccaccatgtgtgatccacttcagggactgctttttcctgggactttggatgctggagcttggtcctaggaagccctgcagaaaactctgcctccattgagaaaaagtattccattcctttgcctcctggacttggcttccca

SEQ ID NO: 492384 - DNA, 604 bp, Homo sapiens
ctgcttgatactgctaagcccaggcctggactccattgacagaggagcagagagtcaccccctgggagagactgatggcatttcccttcagcttggcgggatttctgctcagaatgtatagcagaggccagcctcaagctggcccatcatgctgggttacaggctaaggaaatgggctcctcattccatgagcttgggaagttttgactgagcgtaagccatgctggctggggccagccaaagctgtcttggaaacaagagagccagccatgggagaaggaaggggcggggcctctggcaggagctcttggcttcgttcccattcttacaatggaggaaaktcccagtctctgggtgaaaaaaagccacatctggcctcaagagaggacacccccaccacattctgtgtgttcccccaattgggtgggaatgtggccaccatgtgtgatccacttcagggactgctttttcctgggactttggatgctggagcttggtcctaggaagccctgcagaaaactctgcctccattgagaaaaagtattccattcctttgcctcctggacttggcttcccaggtgcaagaatattctttgaatgacaa

SEQ ID NO: 492385 - DNA, 328 bp, Homo sapiens
tggaaacaagagagccagccatgggagaaggaaggggcggggcctctggcaggagctcttggcttcgttcccattcttacaatggaggaaagtcccagtctctgggtgaaaaaaagccacatctggcctcaagagaggacacccccaccacattctgtgtgttcycccaattgggtgggaatgtggccaccatgtgtgatccacttcagggactgctttttcctgggactttggatgctggagcttggtcctaggaagccctgcagaaaactctgcctccattgagaaaaagtattccattcctttgcctcctggacttggcttccca

SEQ ID NO: 492386 - DNA, 622 bp, Homo sapiens
gccctcgctccatccacccatccatccagactgttgtccctaagctcctcctataaattccagagcagaacccagggagactgaatgtcacgcatcgactctacctgctactggaaagaccaagggcagaatgatgccactggtgaggaaagtaagttggaactcagggtagggtcagaatgaagaggaggagctccatttgcagagaacaagaatccactaaacccactcccagtttatttaatctgctttattttcttctggtctctctgtatctttgtgctgcttgcatctcagattccctgggccccacacttgataagttaagcctcattgttggagttgaagcactgttagycagttgaaagcttccattctagccgactttgcctcctaaacagctttcccctccatcctgcccaccacctcatctatgagtcacttctaacacccaggattgagggctgattagaatttaagattattttcccagggcattagagcacttcctttctttcaagaggtatcggggtgagaaaaggataaagcttatatttcaaggaacaaataatttaagactgatggggaaaatggtttaattgcttatgttcttattagcctc

SEQ ID NO: 492387 - DNA, 596 bp, Homo sapiens
ctgccctcgctccatccacccatccatccagactgttgtccctaagctcctcctataaattccagagcagaacccagggagactgaatgtcacgcatcgactctacctgctactggaaagaccaagggcagaatgatgccactggtgaggaaagtaagttggaactcagggtagggtcagaatgaagaggaggagctccatttgcagagaacaagaatccactaaacccactcccagtttatttaatctgctttattttcttctggtctctctgtatctttgtgctgcttgcatctcagattccctgggccccacacttgataagttaagcctcattgttggagttgaagcactgttagccagttgaaagcttcyattctagccgactttgcctcctaaacagctttcccctccatcctgcccaccacctcatctatgagtcacttctaacacccaggattgagggctgattagaatttaagattattttcccagggcattagagcacttcctttctttcaagaggtatcggggtgagaaaaggataaagcttatatttcaaggaacaaataatttaagactgatggggaaaatgg

SEQ ID NO: 492388 - DNA, 568 bp, Homo sapiens
tcatgccggtgtcacagtcaattacagacagccaattacatctgattcctctctgggggtcgctgggtagggccgccatggggagcagaggaggcccgagaggtttctaaatgaagtagcctgttgggaaatcctattatgaagctcatgttacagggctgcggtgttaatgaccctggcctcccctggccctgaacacagccggtctccctggagcttgagaggaggctatctgggctgtggtttccctctcaccagccaatagctgatgggactgagagagcagagagggctccttggtgcccttgaatgtggcttccagcactgaggcctcacacacacacacacacacacacacacacacacacacactcccttgtrttcctcaccttctctttcagcagctcaggatgaggaggcagggggaacccagagctgggaccagcaaccctaagggagatggaagcaggccccgaaaacctctttttccaagaagagttaaattagatgtattttttccactttcaaatcctgcaaatttttcatctcaactcccccaggcttataa

SEQ ID NO: 492389 - DNA, 568 bp, Homo sapiens
tcatgccggtgtcacagtcaattacagacagccaattacatctgattcctctctgggggtcgctgggtagggccgccatggggagcagaggaggcccgagaggtttctaaatgaagtagcctgttgggaaatcctattatgaagctcatgttacagggctgcggtgttaatgaccctggcctcccctggccctgaacacagccggtctccctggagcttgagaggaggctatctgggctgtggtttccctctcaccagccaatagctgatgggactgagagagcagagagggctccttggtgcccttgaatgtggcttccagcactgaggcctcacacacacacacacacacacacacacacacacacacactcccttgtattcctcaccttctctttcagcagctcaggatgaggaggcagggggaacccagagctgggaccagcaaccctaagggagatggaagcaggccccgaaaacctctttttccaagaagagytaaattagatgtattttttccactttcaaatcctgcaaatttttcatctcaactcccccaggcttataa

SEQ ID NO: 492390 - DNA, 568 bp, Homo sapiens
tcatgccggtgtcacagtcaattacagacagccaattacatctgattcctctctgggggtcgctgggtagggccgccatggggagcagaggaggcccgagaggtttctaaatgaagtagcctgttgggaaatcctattatgaagctcatgttacagggctgcggtgttaatgaccctggcctcccctggccctgaacacagccggtctccctggagcttgagaggaggctatctgggctgtggtttccctctcaccagccaatagctgatgggactgagagagcagagagggctccttggtgcccttgaatgtggcttccagcactgaggcctcacacacacacacacacacacacacacacacacacacactcccttgtattcctcaccttctctttcagcagctcaggatgaggaggcagggggaacccagagctgggaccagcaaccctaagggagatggaagcaggccccgaaaacctctttttccaagaagagttaaattagaygtattttttccactttcaaatcctgcaaatttttcatctcaactcccccaggcttataa

SEQ ID NO: 492391 - DNA, 648 bp, Homo sapiens
aaaatgcagctaaaaaaaagtgggggctgagggagtcgcaggtagagaaggattatggaaataagcagccctagaaatgggcctgcttctagatttacccatcaaagggaagtcctggaaaagtgtaaccacacaccacaacctggagaagcagcaaaatacttaccatggggagcagagagctgtgcatgcaaataacagggactctgtctcattggaggggtcagcaagactccctggggacaygacgggtcaggtgagactgacttagggaatgaggagggaagaaagggaggtgcaatccaggcagagggatcaatattggaaaggcctcaagttgaaagaaaatgtggggcaggcaaggaacaaagagcaggccctcagtaggggtgctcagccaggggagagtgtttgcactggggcaaggggtgaggtccatggggccagtggcagcagcactagtgagctagagttctgagaaattcctctagacccctttatctggagggctggaaaggagcatgctgagagggtatttttaaaaatatttttcttttcagggctgatgcccgtatggaaacataaactgcagatctccactctgaggcaggaaaacaatttgaataccaaggctttaccccaccacta

SEQ ID NO: 492392 - DNA, 648 bp, Homo sapiens
aaaatgcagctaaaaaaaagtgggggctgagggagtcgcaggtagagaaggattatggaaataagcagccctagaaatgggcctgcttctagatttacccatcaaagggaagtcctggaaaagtgtaaccacacaccacaacctggagaagcagcaaaatacttaccatggggagcagagagctgtgcatgcaaataacagggactctgtctcattggaggggtcagcaagactccctggggacacgacgggtcaggtgagactgacttagggaatgaggagggaagaaagggaggtgcaatccaggcagagggatcaatattggaaaggcctcaagttgaaagaaaatgtggggcaggcaaggaacaaagagcaggccctcagtaggggtgctcagccaggggagastgtttgcactggggcaaggggtgaggtccatggggccagtggcagcagcactagtgagctagagttctgagaaattcctctagacccctttatctggagggctggaaaggagcatgctgagagggtatttttaaaaatatttttcttttcagggctgatgcccgtatggaaacataaactgcagatctccactctgaggcaggaaaacaatttgaataccaaggctttaccccaccacta

SEQ ID NO: 492393 - DNA, 648 bp, Homo sapiens
aaaatgcagctaaaaaaaagtgggggctgagggagtcgcaggtagagaaggattatggaaataagcagccctagaaatgggcctgcttctagatttacccatcaaagggaagtcctggaaaagtgtaaccacacaccacaacctggagaagcagcaaaatacttaccatggggagcagagagctgtgcatgcaaataacagggactctgtctcattggaggggtcagcaagactccctggggacacgacgggtcaggtgagactgacttagggaatgaggagggaagaaagggaggtgcaatccaggcagagggatcaatattggaaaggcctcaagttgaaagaaaatgtggggcaggcaaggaacaaagagcaggccctcagtaggggtgctcagccaggggagagtgtttgcactggggcaaggggtgaggtccatggggccagtggcagcagcactagtgagctagagttctgagaaatycctctagacccctttatctggagggctggaaaggagcatgctgagagggtatttttaaaaatatttttcttttcagggctgatgcccgtatggaaacataaactgcagatctccactctgaggcaggaaaacaatttgaataccaaggctttaccccaccacta

SEQ ID NO: 492394 - DNA, 628 bp, Homo sapiens
ttatgggccaggtgcagtgttaaacacttcacaaaaagtacctcattcgatcttcaaattaacgtgggaaacaggtatattgcatccatgctactgataagaaatctgggrctcagagaggttgtgtgggttacccagtgccacattgccattatcaacacagcttagattggaacctttatcttttgacttcaactccagtgctctcttagttgcaccatggctggctaggtaagagtccactaaataaagtagatatgtgttttcttctgctggtagacaaagctttgcatcatttttctaaaggaagggcagatgggcccaaagtgcttggtgaaacataaagaaaacacagctcagttgtctctggccattaccagatttaacactgagatttgaatgctgtagagtgaagttccatgtcattttgctgagatgcaaatttgacccacgggcactaaggtaccagccaagagggatgcaagtgctttgctgattgccagttatcatcattgcattacatacattagattaactccctcccgtgaagtggaagaaaagtgactgacccccctgcccgccccctccccaccaagaaagccagccagcactggtgatggaaatctta

SEQ ID NO: 492395 - DNA, 619 bp, Homo sapiens
agcttcttgtcagagtccttcaggtcctgcacatggattctgcagagccacatttctcctggagagactgtaggatgctcagtggaattcataagggaacagatagagagatgaagtgagcctgatggtgccatggggctcctcagacagttgtggtcctggaatccatcaacagaggtaggatgtgcccaccargaaggtgataacccactttttcgctgggctgatcagaccccgtggagcatatagagctcagcaatgggtgctggcccatcagagaacagtacacacaaggtggggggggcgggggcgggctggaagaaaagctgatggacccaagagtgtggtggctaggaaacagaatgctcaggaggtcctggcctctcataatctgaagggatgccatggagaaaggggagtagttgattctgtggggggcctttcaggaacacaacaaggaccaaggaaagggaatcccaaggagccagccttctgaaagttggaaccagctaacaagaaaatgtctctctgggaaagtagtaagtgcctcatctttggaggtgagcaagcggagactgcgtgaccacctgggtagggtgctgtggccaaggctcaagct

SEQ ID NO: 492396 - DNA, 547 bp, Homo sapiens
atgcacaaacagtagttttgtgttttggctgctctactgtccactgctagcccacaagaggaaaagcaaggcttacagaaggatgttyctttaggagaaagcagcactaaaagcactctgaatcaagatgagtgggaaaccatctcaataagcacattttggattaaaaaaaaaattagccgggcatgttggcacacatctgtagtcccagctatttgggaggctaaggtggaaagaatcacttgagcctgggaggtggctcatgcctgtaattccagcactttgagaggctgaggcaggcgggtcacttgagtccaggaattcaagaccagcctgggcaacatggtgaaacccagtctttattattaaaaaaaaaagtttcaaaaaattaaaaattaaattattagttacataatttttagaggaacttaaattacccagctatgcattaactgtaataactatttatatagttgatcaaattttttaggctataggacagctgttgtttctgaagttgaagttagctaaaatattttaaaaagtg

SEQ ID NO: 492397 - DNA, 547 bp, Homo sapiens
atgcacaaacagtagttttgtgttttggctgctctactgtccactgctagcccacaagaggaaaagcaaggcttacagaaggatgttcctttaggagaaagcagcactaaaagcactctgaatcaagatgagtgggaaaccatctcaataagcacattttggattaaaaaaaaaattagccgggcatgttggcacacatctgtagtcccagctatttgggaggctaaggtggaaagaatsacttgagcctgggaggtggctcatgcctgtaattccagcactttgagaggctgaggcaggcgggtcacttgagtccaggaattcaagaccagcctgggcaacatggtgaaacccagtctttattattaaaaaaaaaagtttcaaaaaattaaaaattaaattattagttacataatttttagaggaacttaaattacccagctatgcattaactgtaataactatttatatagttgatcaaattttttaggctataggacagctgttgtttctgaagttgaagttagctaaaatattttaaaaagtg

SEQ ID NO: 492398 - DNA, 668 bp, Homo sapiens
ctctcagtattagagcgcctaaacttcaggcggggcaggggtgacggtcatcagattgtgcccttgtgctcagtgtcctcctgactcgaagggctctgtttgattctgkcttggctttattctcagaaaggttcttgtcacctggcagtgagatgttccctggcagctccctttcctgtcattactttgccataaacatgagaaagcaaggcaactaagttgtatttaccaatctgctggtaacaatagtaacctaacatccagctaaagctgatctcatcatgatggaaactctggagacaccctcagagtcgcccaccacaacagtgtgactacttttctccacacaaattcttgtgaaaatgctaggctcaccaacttgcaactcacgttcagatagcaagcaccgaaacctgtctgttcttattggcaacattggtgaaaattacctgtagaatgcttggaaaataatcgtgtttcgggacctgttctttgacactgcctgctattcctttccttctcatatctttgctttggtcctgctcttctgtcctgcaaggggtctagtgctgctgggcaggcattcctggaagaggacctcagggtgcaggaggctgagccaggtggtgcgcagggcattgtgtagggcacacacgtgagctctttct

SEQ ID NO: 492399 - DNA, 465 bp, Homo sapiens
ctctctccctcatacaccttgaaagctgaggattgtgttttggtttttttctctccctaaaaggtagctgtactctgtcttccttttaaccacagttccctagaaaataagaactgtgacaaacaaaaggagrtgggtacaagaataggccttactcctcttctcccccagttcctcagccccagatcccagggaccctaaccatggttgcagttttcgttgaggaattaaggcctacaaagaaaatctaatgcgcagtaacctaagcttgactcttggcttagaagtcccagcttcaggaaaagcctacccattaggttctttcctcattctgttgaggtagctcttatgagctctattttacacacatggctcctcagacttagagagagtaagtcagtttcccaaagtctgcagtggtgcatagtaacatttttaatattaccttcagtactggctctgttt

SEQ ID NO: 492400 - DNA, 465 bp, Homo sapiens
ctctctccctcatacaccttgaaagctgaggattgtgttttggtttttttctctccctaaaaggtagctgtactctgtcttccttttaaccacagttccctagaaaataagaactgtgacaaacaaaaggagatgggtacaagaataggccttactcctcttctcccccagttcctcagccccagatcccagggaccctaaccatggttgcagttttcgytgaggaattaaggcctacaaagaaaatctaatgcgcagtaacctaagcttgactcttggcttagaagtcccagcttcaggaaaagcctacccattaggttctttcctcattctgttgaggtagctcttatgagctctattttacacacatggctcctcagacttagagagagtaagtcagtttcccaaagtctgcagtggtgcatagtaacatttttaatattaccttcagtactggctctgttt

SEQ ID NO: 492401 - DNA, 445 bp, Homo sapiens
cagcacagtaaatcttcagaggctaatacatgttttttttttcttgagatggagtttygctcttgttgcccaggctggagtgcaatggcacaatctcggctcactgcaacctctgcctcctgggttcaagcgattctctcacctcagcctcctgagtagctgggatgacaggcgcccgccaccatgcccagctaatttttgtatttttagtagacacggggtttcaccatgttggtcaggctggtctcaaactcctgatctcaggtgatccacccgcctcggcctcccaaagtgctgggattacaggtgtgagccaccgtgcccagcccacagactaatatctttaaggaacttctagaaatcatctctggccgagtcatccaggtgcaaacgagaggttctgggctgagatcaaagagaacaaggggaagatccagcagttaca

SEQ ID NO: 492402 - DNA, 507 bp, Homo sapiens
agtagcctgaagaggaggcaggtaggatggaggggagcacagggtagacaaggcttatcctcaagttgccactagtgtcctcaaggtccaagaaatcagtactgcctgtgctgtttccagaatgctagtcacagtagtagtggctggcagcgggctgtccctgtgagattgtgtgagagaattaggaaaagagagaaaccctgttattttgttttccattctccatgtgacctgcagtatttttcctcctcccataagaagtcagcttcctccctcgccatcccgatgtgacctacttatctgctcccttgaaagggaggtactctggaagacatcccagtckggggcggttctgagtctcagaaacaagctctttaataaggaaaatccagaagctataaaactggggggcaaggtatgagggaggctggaaaacgttggagaagaaggtaaatggaggctagtggcgccacagcagagtattcggtggtgtgccatcagccctca

SEQ ID NO: 492403 - DNA, 551 bp, Homo sapiens
tcggcaggtatctgtcctgtcatggtgatctgctgggtcatcttccctacctccaggccgtagcatccttcagagtcctccattccttcctgtctcaccttgctccacttcagttccttttcaccctgatcctaaatcaatactataacttttaaatgactctccctgcttctagcccttcctggcccagtctgttccaagcaccactgctaaatcaatcttccaagtactcttgagtgactgcagattgcccttggtcatggcgyccagtctgaatttcttggcccaacccagaggcccacagcatatgccctgtattgtgattctgtcttttggagttagtggcttctggagaagctttagtaaattatgcttcaataaatcctagccaaaagtaataattaaaatgatgtgagtgtttaactagtatgcattactgtgtgtatacactcatgcatgcatgcatgtgtatgctgagagcctgtgtctgacagcgtgtgtgcctgagcagggcggcagctccagtgctcctgagggttggaaatccagcc

SEQ ID NO: 492404 - DNA, 459 bp, Homo sapiens
tatcctgctccctgtccagggttttgcccccrtacaccctttcctcttcttccactcaaggccgggtggccagggctctccctgcagaagggcaggtctgcagtggagctggactgtgaggctcacagcttccacttcccttttcgtccctttctgtccagcccccacccgcttcttgcctaaggaaattgacagatatgtccacatcctctttacctcttctccatgtcctctcgggaggccttacccacaggcacgccggtaagggaaagggcttctctcccctgccttcatcaccctgcctgttctgcaggcctcaatgtccagtgccagggagtggcaagcccctgcccgccagctccccacctcccaatgcccaagcaccagaaacagcccgttctgtgcttctggtctgacgtgagccatccggaggaagttaatgccctaatcagtggccag

SEQ ID NO: 492405 - DNA, 563 bp, Homo sapiens
tgtgcagtaggaaacaatgacaaatactaggaagtggcaagcatttcttaaaaagggcctttaaacaaatagagtcctgagcatttcccagagtttcttataaaagttgtcttcctctctttaggtagcccctttctttctttctttccttttttttttttttttttttttttgagacggagtctcactctgtcacccaggctggagtrcagtggcgtgatctcagctcacagcaagctccgcttcccgggttcatgccattctcctgcttcagcctcctgagtagctgggactacaggcacccaccaccgcacccggctaattttttgtattttttagtagagacggggtttcaccgtggtctcgatctcctgacctcatgatccgcccgcctcggcctcccagagtgctgggattacaggcatgagccactgcgcctggcctttttttttttttttttcccgacacagtcttgctctgtcacccaggatggagtacagtggcgtgatctcagctcactgcagcctccgcctcccaggttcaagcagttctctacctcagcc

SEQ ID NO: 492406 - DNA, 473 bp, Homo sapiens
aatgactcagtaaacactaaaagaaacaccaactaaatcttccgagacacagccttggttggtttgttgattaatattaacaccatgcctcagcaaataaagaattttgtgtctatattcttttataggaagggtacatagttttcacctgactcccaaaggtgtgtttgacccccacctcctcaaaaaaaaaaaaaaaaaaaaaagcttaaraaccattaatagatagtatgatgctcagttctggccactatatattttttttaattttagagatgggatctcactatgttgtccaggctggtcttgaactcctggggtcaagtgatccttctgcctcagcctcccaaagtactggaattacaggtgtgaaccactgtgcccagccctgaccactactttaaaaagtttttttttggaaacagggtctcgctctgtcacagtggtgtgatcacggctcactgcagcctcaa

SEQ ID NO: 492407 - DNA, 534 bp, Homo sapiens
attatgttgttgaaagacttacttagcattgtatatcctttgtactgctggaatttttaaccatgtacatgtactatttttatgaaaaggaaaaatttaatttcattcttaaaaaaataaaaaataaaagaacacagcaaaggtaaacaatgattagcagagataaatttatctagaggagccattttggagctccttaaattctaaaccccacaattataacttctcctctgtttatggatgccttactttctcacggttagaataaaatagattcggcaactcattttgacagtctgcatggtgtgctaaggagaaatgttagttctcccctctgctgtgtctcatttctgccaattcaaragatacactcctcttttagaggttgtctaggctgagaggcagactgaaaacctggcaggttttccccaacattccccggccaaggcggtcattgtctggctaaacccaaaagggtcaggtttctagtgacaatgaagctgcctcaggtcttcctcccatctcaccagcagc

SEQ ID NO: 492408 - DNA, 487 bp, Homo sapiens
tgcaaaatcttaaatgactacacaccaccatatacctggcatcttgaagtgtgtgtttaagtggtcaaattttttttctcataaaattaaataattgtcgctgagaataaggcatgttttcacagactttcttttaaaacttctatttttaattggcaagtgatatgtacatggggtgcaatgtgatgttttgatacaagtatacggcataaaataattaagctaacatatattcatcacttcacatactttttttgtggtgtgaatccttaaaatctattctcttagcaattttsaaatatgcattacattatttttaactatagtcaccatgctgtgtaatagatctcaaaaacttattccttctgtctagctgaaactttgtaccctttgaccaacatctccccattcctcccctgctggattctactctctacttctgtgagttacttttttagattccacatgtaagtaagatttgagcctg

SEQ ID NO: 492409 - DNA, 622 bp, Homo sapiens
aatttagctgaacaaacaatgttccatgtaatgaactactaattatccttttatgccatgtcagtctgagtgattacagagctgtgcagtttaatttgacgtttgagcattgccttgctccattagcttcatataaagctacaacacattcaaaagcgggggggtgggggttctgtatttatctggaagtaagtaagcacctgtattaataataagactagaatctcagaatctgtttaaaaatatgcttttaatatgaggatgaataaagcacggagaacccgagggagtgtgaagatcaaatcaggtgtctttcggtcagtggaggaaacacccggaagcagtgaaacgcactgggcttattgmaacaaccccagctactgaaaatgccaccctctccacgacgaagcaccgccagtcccaaactccaatcagccgctgggctgggaggccgaaaaggcaagaagacacagagcggggttgaaatgaagaaggaactctttttcaacgagactcattacagtatgcaaaacctaaaaaactgtaccctgtgttgtaatgagaatatgactgcatgggaaatgtgggttacaactcttgactttacctgcttttcacatat

SEQ ID NO: 492410 - DNA, 380 bp, Homo sapiens
atttgaatatacatggatctagccagtttccctttaacataaaccctatgtatagtgaaagacagaggtggcttagccaaccctaggatggtgktagtgctatctgctttctgattgcttctcttttcactcattggctaatccagtgacactcatttcaatgtggcatctatatgatttatttatactgaactttctggatcactgaccaagtcaaccaagggtgccaaagttgaccattcatgcaccgaagactgagacagtccctcattttgactgactttgctttcttatatggcaagcagggatttaagagccagcccgggtatcttttgagtgtgtagtgccatttggagaggcctcgcctctactgggggacc

SEQ ID NO: 492411 - DNA, 350 bp, Homo sapiens
cacagcagctgtctcctgtcttgagatttctgaaatctaccctgtatcaacatatgagttaacatttcatagaacctgtgctcccctcttaccctcccaggtgatagttgtgctccctcatagtaaacaagaaacaaaggaactagaatgtaagaggaattttcacaacgtattactttttaaaataacagcttcattgagatataattcacataccatagaattcacccatttaaagtgtacaattaactggttttagtatattcagaactttgtacatcaccactatcaagtttagaaccccctaaagaaaccacatactcatyatcagtcccgcccccgctacccca

SEQ ID NO: 492412 - DNA, 552 bp, Homo sapiens
ctgtctcctgtcttgagatttctgaaatctaccctgtatcaacatatgagttaacatttcatagaacctgtgctcccctcttaccctcccaggtgatagttgtgctccctcatagtaaacaagaaacaaaggaactagaatgtaagaggaattttcacaacgtattactttttaaaataacagcttcattgagatataattcacataccatagaattcacccatttaaagtgtacaattaactggttttagtatattcagaactttgtacatcaccactatcaagtttagaaccccctaaagaaaccacatactcattatcagtcccgcccccgctaccccacattatccatggactccctctcccctcactaccactaatctactttgtgtctctccaaatttgcctatgctggatatttcctataaatagaatcacagaatacctggtattttgtggccgatttcttttatttagcataaagttttcatggttcattcatgayacagtttttgccatgactttgtccctttttagtccagaataatattc

SEQ ID NO: 492413 - DNA, 596 bp, Homo sapiens
cttttttgactgttgtgaataatccttttataaacatttgtgtgcaaatayatgtctgagtcaccactttcgatactgttaagtatatactcagaagtctctgctttctcttaattagtgaatgttgctgactgaatctaggtagggtgaaaatacttcaaggagcatcttggcctataaaagatacgttatgtcatgctatggaaggacattgcctaaaaggagagctgaggctgggtgtggtggctcacacctgtaatcccagtgaagtggcagtgtttaactggggtgatactcgaggttttttgtctcatgccaaggaaatcaaggacttggacacacaaagagtgaggttaagagggaaggtttaataggctaaataaagagaagggctttctctgctgcagagaaaggggtcttggagaaatgggttgccagttctgcgatggaatgcaaagcgttttttggatgagtttgaggaagcagtgtctgatttacatatagcacaaaagactggttggactaggtgtgtcatttgcataaagcgcaaaacactggttaaggctaggtgtgccatttgcatagggtgtgaaaat

SEQ ID NO: 492414 - DNA, 586 bp, Homo sapiens
actaaagcacctgttcattcgctcttcagtgagtagtgtaatyctagagttgatttatgtgcctttttggcgtttgactagtttgtggtttttaaatttaatttaatttcaatttcttaattttttgggacagggtctcactttcttgcccaggctggagtgcagtggcataatcatggttcactctatcctctacctactaggctgaagtgatcctcccatctcagcatccctaggagccagaactacaggcatgcacccccatgcctggctaattttttaaaaatttttttgtagagatgggatctctcactatgttatccaggctggtctcaaactcctgagctcaagtgatcctcccaccttggtctcccaaagtgctgagattattggcatgagccaccactcctggcccgtttgacattaacgccagttaattaaatgatttcaaatctgacttaaatgcaagtattattttaattagtttgttttacattgtttcttgttgctgtttattgtagcttaaaacagaatttgacaaattgtttgaagatttaaaagaagatgataaaacccatgaaatgga

SEQ ID NO: 492415 - DNA, 485 bp, Homo sapiens
ttaaattgcttttcacgtaaaggaaattggggcaataagtttattaattcatttttcactgaatgttagatttttttatttaattcatatgaaatgagaattgatgactgaagaaaatgttatttttggttgagatttgcttttcaccaatgacctgtcatgttggtcacatgtaatccagaatgccatwgaatcatctcttattttccttcatcaaatgacaataatgcttattttgacttttttagagagctactatggagatcacactgaaataacgttgaaatattagctatttattttagcctgggtatgattttctgagcacattgaaataagattaaacatgcaaggattttatttgaaaaaatatctatgagagaaaatgagaaggaaatggcagaagactgaacagacgtcagactgtgatgaactgggatcctgagggaaatagaaaagaaaagaaggtgaatgggagcatcctg

SEQ ID NO: 492416 - DNA, 588 bp, Homo sapiens
ctgccacctgagtaattatttattaaatatctgtttaactcaccctgcccccccttaaaaaaaacattttattaaaagataaaacagagatacagaaaactccagaaacacacatagggatgaatggaggcaaacaccttggtgatcaccagccggggcaagaaactgaactttgctacccacctctgaaccctgttcatgtgccctctatcaatcagaacccctcccttctcctacaagcaaccactcttttgatttttggatatgtcattttagttttttcccttgcatttcattttagttttattaccccaatgtacatttctgaatcctgtagtttagagttgttccttataaaaatatatgtcttttaagtattttttgatctacaggatctccctcygtcttttttacttgcaatttacttgctatagatcttggctgtttgtcttgtggaggtttgctcagtctggattttgctgatcgtatgctcacagtacagttcaacatgttcttctgtcctccatattttctgtaaattagcaattggatccagaggcttgatagacacaggctcaatccatttga

SEQ ID NO: 492417 - DNA, 623 bp, Homo sapiens
ggagatagagacataaaccacaagaagggggccacatgtagaactttccccagggtctcttgaattgtgtaaggtcagcattggcaacaccctcacccsactaaataactctgcaaggtccatatctcaaactttctcttctccaaaaagaatatcttggagggaaaacgtgctggagagatggaaatgggccaggactctagggcagatgctggaggaggtggctgcactggcaatctctctgaatcagatgctctgaatattcctttgagtttgggttgctgggtagagtagaggtaaaagcagaatttacaggtacaggtttgggagagggtaaatcaccagaggatgtccagacctagggaggctctttttgcagcagagaaagtctccagatttttggctggaggccatcccaggcccactgttttctctgtgaagtccaatatctggccattgggctggccttctggagaggccttctggcttaatccagacctagggcaccccagtcagagacagtgggaggcctctggtgttgtcagggatcttcactgccagcttcagtcttctctcccagctcttctgttcccttcgaatggatgcagtttataatgggccta

SEQ ID NO: 492418 - DNA, 623 bp, Homo sapiens
ggagatagagacataaaccacaagaagggggccacatgtagaactttccccagggtctcttgaattgtgtaaggtcagcattggcaacaccctcacccgactaaataactctgcaaggtccatatctcaaactttctcttctccaaaaagaatatcttggagggaaaacgtgctggagagatggaaatgggccaggactctagggcagatgctggaggaggtggctgcactrgcaatctctctgaatcagatgctctgaatattcctttgagtttgggttgctgggtagagtagaggtaaaagcagaatttacaggtacaggtttgggagagggtaaatcaccagaggatgtccagacctagggaggctctttttgcagcagagaaagtctccagatttttggctggaggccatcccaggcccactgttttctctgtgaagtccaatatctggccattgggctggccttctggagaggccttctggcttaatccagacctagggcaccccagtcagagacagtgggaggcctctggtgttgtcagggatcttcactgccagcttcagtcttctctcccagctcttctgttcccttcgaatggatgcagtttataatgggccta

SEQ ID NO: 492419 - DNA, 513 bp, Homo sapiens
ctcatgtgactgcacaaaacaggttctggggcagtttatccacccatgatggagatagcattcatcccaaacacctgcacacctctctcccaggtctttttaccctccatacaacacatgtgcttctttgccccacagccattttctccttctctgctccactgccttctataatccatgctagcttgtctttggccttctttcacactttcaatcgagatcattctcaagtttcccactgcccacatcctatcagtcactgagcccttggaatcccatcttttaaacatctcttaatttcatctcttcctttccctttccttccttcccttcccttattttctcttcccttccattccctttcctttctccatttcttcttactttcctttctttcttcttccttgccctgcctttctttcccttccctccctcccttcctctcttgtttccttccttctttactacgattgccttggttcaagctcttrccatcaccatggcaatagctcc

SEQ ID NO: 492420 - DNA, 241 bp, Homo sapiens
agagggagaagtcaaatatgtattgccttggggtgggtggaggaatgatttctgctttccttttgtcccatacccagaagataagytgttaatttacgtggtggggagatacctgtttaggaacacatacaaaggcagtttttttgcatgactcagtttccaagcttaacttttcctttaggcttagtgagtttggggtgaggagagtgtatattccttttacactctgtatccctagctc

SEQ ID NO: 492421 - DNA, 663 bp, Homo sapiens
tcttatttatataaaattcatttcccagaaattttagaaaaaagctgtgctcgagtcaagataggttttctaaattcacaaagctccctcttctgtgcttttgtatagtgttaaaaaaaacagcagtttgctttctgaggtctcctggctgttaatgttttctaatttcatctagatatttttttccctatttgcttccattctgctcaattttacttccattccaggagtttatctttagtttgaggtcctctcctggaagggattcctacctagccagttttgagartttataaaaggtagccttttcagttctcttgggatcttactgtagttcacttgtactcatccatgattagggaggggaaaatcactcctagttttagctgttgttctcaaattggtctgccaagctttctgattaatgcttgtggttatttggggttctcctcatgttctccattaatgtttggctttactatctatttgttttcttttagtgtgaagattcaggaagattgaaacaacatgctgttgtcttctgatcctcccagaatcttttactaacctttccttttaattatatttttttgggggtgggggagaaaatttggtgtcttgagataaagtttacttgtaatagaattcaccaatgttatgttt

SEQ ID NO: 492422 - DNA, 663 bp, Homo sapiens
tcttatttatataaaattcatttcccagaaattttagaaaaaagctgtgctcgagtcaagataggttttctaaattcacaaagctccctcttctgtgcttttgtatagtgttaaaaaaaacagcagtttgctttctgaggtctcctggctgttaatgttttctaatttcatctagatatttttttccctatttgcttccattctgctcaattttacttccattccaggagtttatctttagtttgaggtcctctcctggaagggattcctacctagccagttttgagaatttataaaaggtagccttttcagttctyttgggatcttactgtagttcacttgtactcatccatgattagggaggggaaaatcactcctagttttagctgttgttctcaaattggtctgccaagctttctgattaatgcttgtggttatttggggttctcctcatgttctccattaatgtttggctttactatctatttgttttcttttagtgtgaagattcaggaagattgaaacaacatgctgttgtcttctgatcctcccagaatcttttactaacctttccttttaattatatttttttgggggtgggggagaaaatttggtgtcttgagataaagtttacttgtaatagaattcaccaatgttatgttt

SEQ ID NO: 492423 - DNA, 537 bp, Homo sapiens
tcttttcttttctacagtgcagtatactttcttgaataaatgatctctctttggggagaggaagggtcctggttttctgattgtgtcttctattacttcagtagaaattttattttaaactacttccttcctgctttccctttactcccaagccactctaaaggacactacatcggtcagggtccagtcagaaaactaaagaatgcaacagtgattagaaatggaaagcctaatataaagaattcttaactagtaatagttgaagatttaaaaagattaaacaggactctcagagatcgaaaagtagtatgttcaaaaaaaaacccagctactacttctgggctgagggaaagtggcagcaaagaaacaaaraacttggaaaagcacctttatcctcacaagcctgagatttagacttttgtaaagaggaacatacagcctacctataatgacaaagcttgctggaaggcctgggtcaagtggcgatctagttgcctgctatagctggagctgctgtggctcatggaagccaccaac

SEQ ID NO: 492424 - DNA, 537 bp, Homo sapiens
tcttttcttttctacagtgcagtatactttcttgaataaatgatctctctttggggagaggaagggtcctggttttctgattgtgtcttctattacttcagtagaaattttattttaaactacttccttcctgctttccctttactcccaagccactctaaaggacactacatcggtcagggtccagtcagaaaactaaagaatgcaacagtgattagaaatggaaagcctaatataaagaattcttaactagtaatagttgaagatttaaaaagattaaacaggactctcagagatcgaaaagtagtatgttcaaaaaaaaacccagctactacttctgggctgagggaaagtggcagcaaagaaacaaagaacttggaaaagcaccttyatcctcacaagcctgagatttagacttttgtaaagaggaacatacagcctacctataatgacaaagcttgctggaaggcctgggtcaagtggcgatctagttgcctgctatagctggagctgctgtggctcatggaagccaccaac

SEQ ID NO: 492425 - DNA, 509 bp, Homo sapiens
ctgagcctccttctggctcctgccatgaccagacccaccctcagcctctgcggccctcgcatggctcacaatgaccattttcccyctctgcttctttgcttcccaagttggctctgtgtcctctcctaggagtcagggacctaaaattcaagtcccagctctcccagtgacctttgcagtgtgagctcaaccaagtccctaaacttctctggtctctaattcctcacctgaacaaaagagagttgctctagaataatctgtgaaggtcataccagttctgaagcacccctgtcagaagacactttctgccctactctctctcggggccttggtcagacacccaaaggagacagtgcaggtcagggctgggctgagacatttcactgggactgagtcaggggaaaagaccagaatgatttggaaacagcccccagggacaaagaggagagaggaaaggcaggaaatgtgttggtcaagactggcccctcagggagttattggactgagca

SEQ ID NO: 492426 - DNA, 416 bp, Homo sapiens
ccaccacacctggctaatttttgtatttttagtagagatggggttttgccatgttggccaggctggtcttgaactcctggcttcaagtggtctgcctacctcagactcccaaagtgcttggattacaggcatgagccacagcgcccaaaggccacatgacttctaagtgcaggtcgttaaaggccaggcagctttggcctgggtctctcgaaatgctgttcttcaggtgtccctctctgacactccctctgagaacctcactgccaagctatgagaagccatggggaggctccctggaggtgcttcagttgacagtcctagctgagccgtggtcccgtccagatatgggagtgaagaagctggagcagtgagtccmacccagccgtcccagtcacccccagtcattccagtgctcc

SEQ ID NO: 492427 - DNA, 416 bp, Homo sapiens
ccaccacacctggctaatttttgtatttttagtagagatggggttttgccatgttggccaggctggtcttgaactcctggcttcaagtggtctgcctacctcagactcccaaagtgcttggattacaggcatgagccacagcgcccaaaggccacatgacttctaagtgcaggtcgttaaaggccaggcagctttggcctgggtctctcgaaatgctgttcttcaggtgtccctctctgacactccctctgagaacctcactgccaagctatgagaagccatggggaggctccctggaggtgcttcagttgacagtcctagctgagccgtggtcccgtccagatatgggagtgaagaagctggagcagtgagtccamcccagccgtcccagtcacccccagtcattccagtgctcc

SEQ ID NO: 492428 - DNA, 629 bp, Homo sapiens
tgatctgcagctgaccttggggagcgagggggtctggagcagccagggaaccacagggtccagagcaggctgcctgcgtggaggccacagcrgagcctgattcagccacaccgtcaatatttcttttatgatcatcattaaattaaaatagcctctggattatggaggagagctgggcaagggggctgccccctttctgtgagcccacagccacagccatttcttcatattctcttctggctttcaatctgctccttcccattgatgttccccacttacaggcaggcctcctcctacctgaagtttacctggatctgcagggaagcctaggactctgcctggggcaggagggactccttaaaggtgttctgggttgagagatgcaggcctgcaactagctgtgagaccttgagccgggggttgggggagccgcggtctcctctgccaatgcagatgcagcggtacctgctccctagggctgctctggggaataggtaagcgctgagcattatataaaccattcagcattatataaaccatataaacgttgccggcacacagcaagcacatagtaaatctttttaaagcctctgaacctgcattgcctcctctccaaaatggaacagata

SEQ ID NO: 492429 - DNA, 638 bp, Homo sapiens
ccttcacagctgcttttgccactactgctgggggcagaacctccagccctagagcttgcccagcctggggaccccatcacctccatgagagctcctggatctagcttgccagcccagagcccatctctgatttcttgagagcctctattctttatctagatcatagcagtcaccagtgaggacccagatgtgctttccaccaggctttggagaacatctgaggagtggaaattcctattttaaccctctttcccacacctctgactcttgagcaggggtccattgtccgctgttgctgcaaactgtgaccgttcagtacaatggacagtgctcatgactggggtggggtggggacaagcttctctgcgctgtgcaaaagtcagtgtttcagccacactaggcatgtgcccagtgcccagctccttatctctaggagccattgtctcacttgtttcttatggcagayaaagatggcttatccatctcttaggaacaaagcacgccactttagacagtcacaaacatgaacgaccttatttaggaatcaggtgcctcagagagagcctttgcaggctgaaacatggagggaagtggggacttatctctttgccccccagatatgcagaaaaaggcagtgc

SEQ ID NO: 492430 - DNA, 536 bp, Homo sapiens
tgtcgtgaggatagtgagaatccaggggaagcgcctgctgcggagtggggcagctccggcatctttctcatggagtcctcggcttggcagcttctctcctcacccatgagggtctgagcgggggaaaaaggaaggagtggttgcattggctgttttcattgctgcctcagtgtccctgtcctggtggggcactccytcacttgccagccagggactgtggcttgcttacattacttatagcgggactcatctgtgactcactagaggggcgtgaggagagaaaaccagcccagtgcattacagagtatcgttttgtaaatgtatgtgtctattggttgctgtaaaatgtatttcttactgtgcgttgaggttaagaagctggagacacctgctccactgtctctgggcggggcagaagcaggggcctggggactccctggttttgctttgctcctcctctgctccatcatgagattcgcactaagcgcccatgtgtgctgtcctggcatggctgggccccaaaatgcgagagccca

SEQ ID NO: 492431 - DNA, 536 bp, Homo sapiens
tgtcgtgaggatagtgagaatccaggggaagcgcctgctgcggagtggggcagctccggcatctttctcatggagtcctcggcttggcagcttctctcctcacccatgagggtctgagcgggggaaaaaggaaggagtggttgcattggctgttttcattgctgcctcagtgtccctgtcctggtggggcactccctcacttgccagccagggactgtggcttgcttacattacttatagcgggactcatctgtgactcactagaggggcgtgaggagagaaaaccagcccagtgcattacagagtatcgttttgtaaatgtatgtgtctattggttgcwgtaaaatgtatttcttactgtgcgttgaggttaagaagctggagacacctgctccactgtctctgggcggggcagaagcaggggcctggggactccctggttttgctttgctcctcctctgctccatcatgagattcgcactaagcgcccatgtgtgctgtcctggcatggctgggccccaaaatgcgagagccca

SEQ ID NO: 492432 - DNA, 454 bp, Homo sapiens
tggcagcttctctcctcacccatgagggtctgagcgggggaaaaaggaaggagtggttgcattggctgttttcattgctgcctcagtgtccctgtcctggtggggcactccctcacttgccagccagggactgtggcttgcttacattacttatagcgggactcatctgtgactcactagaggggcgtgaggagagaaaaccagcccagtgcattacagagtatcgttttgtaaatgtatgtgtctattggttgctgtaaaatgtatttcttactgtgcgttgaggttaagaagctggagacacctgctccactgtctctgggcggggcagaagcaggggcctggggactccctgrttttgctttgctcctcctctgctccatcatgagattcgcactaagcgcccatgtgtgctgtcctggcatggctgggccccaaaatgcgagagcccaag

SEQ ID NO: 492433 - DNA, 614 bp, Homo sapiens
ccgcctctgccaaggtccacgcagcctggctgcctccacgcttcactgggtttttccttcctggctgctgcatcatttgatgcagggggaggggtgggatgagggggtgtctttgggtctctcctcggggggtccttgtaggttctgtgtggctatctcagggtagggggtgtctgggtgcctggtgtggggaggatccgagggccctgcccctgtggtgtgtgtgggtggggggtgtcccagrcactgtggccctttctgggcaatgtgtctctcagcccctgcgtgtgaatctggaaacgtgagcatgcgagtatgcctgtgtgtgtgtgtgaatttgttgtgactgtgtgtgaacatgtgtccctgcaccctgtgctcactcattcctctgtgtgaacatgtgagtgtgcaaatgcggctgtctgcttgttctcctgtatgtgactgtgtgaacacgtgggagcacatgcctcctcacaccctgcatgtgaatgtgtgtggacatgtgagcatgtgagtgtgcagacacacccactcatgcccccacgtgtggatgtgtgtgtctctagatgtccttgtgggagtgagtgtttgagcatgactacttcctc

SEQ ID NO: 492434 - DNA, 553 bp, Homo sapiens
ctgcatctcggcctgcgggccccggcccggccgctgctgcatcaccgccgccccctaccgcggcgtctcctgctaccgcggcctcaccggaggcttcggcagccacagcgtgtgcgggggcttccgcgccggctcctgcggacgcagcttcggctaccgctccgggggcgtgtgcggacccagccccccatgcatcgccaccgtgtcggtcaacgagagcctcctcacgcccctcaacctggagatcgaccccaacgcacagtgcgtgaagcaggaggagaaggagcagatcaagtccctcaacagcaggttcgcggccttcatggacaagktgggtgtcctggatcacacctttcctgaacctggaagtcctggaaggagatggaaattcccagtggtctctctagaaatggggaatgaggatggctgatattttatataatgttaggcggtgccggcccatcatattaaataacattgaaacacgtggtaagaaaatacatcttctttaatgtctgtttcaatccttaagattaggtgggaaaaaaatatc

SEQ ID NO: 492435 - DNA, 489 bp, Homo sapiens
aatacatcttctttaatgtctgtttcaatccttaagattaggtgggaaaaaaatatcactggatgctaatgtttttagcatctctctaatacttgcttccctcctgcttctaataaagagagcaagccccggcttcagaactgtctaggacaactgtttctactagaatttaatgwtctgtaatttccctttatgtatgcctagtaatgatggttttgcatctctggtggccatatgaagttactcttttaaccccatacgtgtaaatgttaattgaatccacttatagataaattaggagtaaaatagtatatgggatggcaaaatcctgaagtcagccttgggtgtacacagaagagaaaggaggcagagagagggtgaggggctggcccaagggcccacagagagtgggtgccagaacagggttccaagcccaggccctctccaactctccagcccctgggctagaaggtccacagcttgggatcc

SEQ ID NO: 492436 - DNA, 515 bp, Homo sapiens
caaccctggggggatatggaggtagataccttgcttttatctcttaacttatcagagttgtggtccagaaactcattcaaactgggaggcctactttaagaatacaaagttaccaaaaaaaccccacttacttagaatgagaaaagtcacacagatcactagagccttggacattcaggcctcttccgtctgagttccttaggcatcgtaccagaaattcttcgagttgctgcctgactgcaacctggctccctctccccacccacaagtgccagcaactcccagcaccagcaggggccatttaagcaagccccctggaagctttcagcaaacctctctctttccctcagcctttgctctgcctgcttcctgggcttggggccgcagaggccagcgaggctcccttcattccctccaccaaagygaggtcttccctgcccccacagagcaaactgatccccaaggccaaggccttggtgacaatgggactgtgagtcacaaaacaaacatagcca

SEQ ID NO: 492437 - DNA, 581 bp, Homo sapiens
tcccgaatggatttttaatttctactgcaagacctgtttcagccccactggctgcttaaagccacccccactccctgctccttccttagtcctggctggagccccattcaatcagtcaacgattcacgaattattttgacatatattaagcaatgacttctccaggcctcatactggggataaaagtatcaataggccacagacacctttaggattttatgatacggtgaggaaaggcagccatctacataaataacacatacagctaccattcaccgaatcccaggtgctcagggctttagacagattatgtcatttaaccctcacaggcccatgaatttggtcctgtagttgggcccaagrcataggtgggaaatggaggccctgagacattgcctggggtcaggtggccagtggatagaagggccaaggtgaacactcccttcctgcatgcctcctcgctccttttacaaggctgaaggcaggctggaagtgtggggcaagaaggaaaaatcaatgatcctgcttggggcctggaaggagagagggctgagagcgcttccctcccacgctaggaaaga

SEQ ID NO: 492438 - DNA, 596 bp, Homo sapiens
agcatgactacttcctcctctgtgtgtgaacatgtgcgtgtgtgtgtgagtgtgtggctggggaagcgccacsccccagccatccagcattgcctcatccctgtgacacagccgctaatgactgtttgccattgtctgagcggtggtggcatcacccgcactaatgacagtctcccctgcctaatgacctggctcctgccccattatttaggagcctcaggagcactggccctgtgaccagagagatgttgaccagctcaacacatttccctttggggtgtgcgggggggtggggaagtcataaatcccacccctccccgacagccctcagggtgccggcgtgggctggatttcaactggctgatggcatcctgggcgggaagccccaggtctggccctgccctctgtctctggcagagctgggcggctgctgcccctccccacaggtgaccctggaccctggcagccagatccatatcaggttccaaagacagggctttcctttccaccgtgaaaccctcaggccgtctcacctctgcgaatggagatgtcccttctgagcagggctctctgtgcccaggaagctctgatctgca

SEQ ID NO: 492439 - DNA, 505 bp, Homo sapiens
gcagactggacatatccaggtaatggacagagagaccgtaacctatcttgttctcttctggtcccccagaactccaagctggaggtggaggtgacccagtctgagcagcagggtgaggtggcccttagcgatraccgctgcaagctggttgagctggagggcaccatgcagaaggccaggcagtaccaggaggtgatgaactccaagctgggcctcaatgtgaaggctgcctcttcttgccaccttctaaatggtgaggagcagaggtgggtgcagcctgcagagctgggcccagagctcatctgcatagacctgccccactttttagcaccatcacttacccagccctcactactacttctgttttcatcttggaacccttttaggacctctactggtattgagcacagtccaaggagcggagtcttagttgagtccacaggccgatttccaataggctccttgcatgatctattagggacaatggtttgtctcagagaacttg

SEQ ID NO: 492440 - DNA, 547 bp, Homo sapiens
gcagactggacatatccaggtaatggacagagagaccgtaacctatcttgttctcttctggtcccccagaactccaagctggaggtggaggtgacccagtctgagcagcagggtgaggtggcccttagcgataaccgctgcaagctggtygagctggagggcaccatgcagaaggccaggcagtaccaggaggtgatgaactccaagctgggcctcaatgtgaaggctgcctcttcttgccaccttctaaatggtgaggagcagaggtgggtgcagcctgcagagctgggcccagagctcatctgcatagacctgccccactttttagcaccatcacttacccagccctcactactacttctgttttcatcttggaacccttttaggacctctactggtattgagcacagtccaaggagcggagtcttagttgagtccacaggccgatttccaataggctccttgcatgatctattagggacaatggtttgtctcagagaacttgttctctgagataaacaatgccctaatttataacacttaccga

SEQ ID NO: 492441 - DNA, 507 bp, Homo sapiens
tatccaggtaatggacagagagaccgtaacctatcttgttctcttctggtcccccagaactccaagctggaggtggaggtgacccagtctgagcagcagggtgaggtggcccttagcgataaccgctgcaagctggttgagctggagggcaccatgcagaaggccaggcagtaccaggaggtgatgaactccaagctgggcctcaatgtgaaggctgcctcttcttgccamcttctaaatggtgaggagcagaggtgggtgcagcctgcagagctgggcccagagctcatctgcatagacctgccccactttttagcaccatcacttacccagccctcactactacttctgttttcatcttggaacccttttaggacctctactggtattgagcacagtccaaggagcggagtcttagttgagtccacaggccgatttccaataggctccttgcatgatctattagggacaatggtttgtctcagagaacttgttctctgagataaa

SEQ ID NO: 492442 - DNA, 615 bp, Homo sapiens
tggcttcccagtcccagcagtgacagcctgacttccataacatttcagtcccagtgccactgggcccaggacagcattcagtctgtgaggtttgaaagtgtcaccttgctgtagctacttagctcacagaaagggtataggacccagcatgagctccgtctcagagcagttctcccccatcatcttccagcagcttcccatgttagtttcagggtttgcgagggtcaaggagttctcctgtggcatggattgcacaatcccacagtgggactgtgggctactggaagtccmttactcatccttgccctgcattgagaggaagttattcccagcccccagccaatcctgtcccagcagattgcctcttccttctccttccccacttttggtgttccctgtcactgctctgttcaattctagcattctctcttggatagtgtattcgaagtatggctatctatgtactatttttgtattttctaagtgaaggaggtgggtatgaaatgcttctggtcatccatcttaagcctctcttgaatcaaatcctaacactcctttaacatcttagtagctcaatagtaacttgcccaacagagtctaggcttcttgttttac

SEQ ID NO: 492443 - DNA, 628 bp, Homo sapiens
ccctagttcataggcagtattgtgatcctatgagctctctgatatttcctagtacatttatcaytacttgttacttaatattttgttgacatctcaaaaactgagtctttcccattttgaaaagcaggaaaatataacttctgaatatctgctcatttgctttctcgtattgggcttctgtactgagtcagacacatggtagatactgggaatacagcagtaatcctatagccaggtctccaggactcaacaagcttacattcctggaaaaatctcactgttactgggagtaaactttctttctgaactggcataccagaaaattgagtccaggatgtacaaatctgtgctaaaaattttgtttgctactttttaagtggacttgataaaatatgaagcacatgctttgtgttcagcctgttcttacctctttatgtacattccctcatttattctcactgtaacatggagtgctatcattatcttcatttttcagtagaggaaactgaagcagcgaaggcatcacttgctcaggtcatacagtcagtaagtggcagagccataatttgaatccagaaagcctaactctggaaatttttaacaaccctgatacataaggttaatgcag

SEQ ID NO: 492444 - DNA, 466 bp, Homo sapiens
attactcttctatcaatcagttccattaagcaattggaaaataaaaaaatcctcccccckccccaccattattataagctccattaggaaagacaagaggaaagaaaatggaagtatccaatccttaatagtattatttatatttaattttttcatattgctgagggatattttctgattcaggggattcactggccataattacatgcacaaatagctaaacagactccaaatgaaaatttttaaaaatatatattttttaaggaacgacttttcatttcttagtccaagtcttcagagaatagtctgtacagatctgctaggagcagagtcaggtcatactaaattcagttgattgataagcttgtttgtggattgattttttttttttttttttttttttgacagagtctcattctgttttccaggctggagtgcagtggcacaatctcagttcacacaacct

SEQ ID NO: 492445 - DNA, 591 bp, Homo sapiens
ctgaaggtttcggagtatgtctcggagaaagtttccttcaataataatatacttctccaaaagttttaacaagagatatgtaataatctgaaaacaaatgatacaatatacaatgcaaagctaactttcattctttttcatagaactgtagcaaaaataatcctagaaatcaaagttcgagaagaatctctttgcaggcaataaaatatatatgtagcagaggaattatcacgtggtggacctatataataaattaagctctcaatcaattaagtsaaagaatatgaaataagctgaacaaaagtggaaatcctaattccccacatttatttcattaaggtgcaggctactgaacttatctttgccttatctgtaaatcagcaattgtagggtttacctgcctatatgtgtgtgacaaatagcaccaagaagactgtattaactccactaaatcactttatgccaatacaggtattttgagaaataaattgtgatcattccatttatatggattacagttgtttaaattgctatttttgtgttccctttacattgcttagaagcagccacattttaaaatttgctttgtac

SEQ ID NO: 492446 - DNA, 615 bp, Homo sapiens
ccacaaaaatatcttttaaacgatccatcaaataaatgattaacacatctataattgcattgtgaaaacctatgcctgcttgtattaaagttttaaaggtaacacaatgttttattctaagctctgagaaagtcttaaaaactggatttttaaatgaaattgtatttattttattgaaaaccttattcaaagagagaaatatgtctacataaaaacatcaattycttgttttatatattatcttgatgtatagaaataggcattacacttcaacatctttttaaatgcattcaaacagcttcaaatggtaatattttaaaaatagggaaaaatctgttttttcctaagatggttcacttagattaagatgagtcaggggagagtaacatgactgaatagacacagccacatagaacagctcccgttgagggaccaagatgactggcatgcttctaacagatgttcagagggaaggtaccaagagtggacagacggaagacacagaagttgggatgaaggggagaaagctggaaaccctgcctgggtctatggcacgtcagactccttcctggcccccaacagctccaggggaatgaatgagttgaactggcaaga

SEQ ID NO: 492447 - DNA, 626 bp, Homo sapiens
gtgtggcctccaccactatggtgaatgcctacaggtaagcaggcactgtagtgaacacctacaggaaaacagacacctgggcactgggctaacacagstaccacacctgacttaccaccccagcacagtggatttctaacctggaggaggcagacaacaaagtcggggcccaatactagtccccagagttagagcacacagtccaggagttgactgctggccccctaacatttacagaaacaaagccagatggctgaattcaccttatgccacaatcaaaccctcaaggtcatcaaatacgataaaaaaaaaaaggtcagaaatctcaaagattgaaggtagttaagcccacaaagatgagaatcagtgaaagaatcttaaaagctcaaaaagccagaatgccttctttcctccaaacaaccacatcacctctccagcaaggattctcaactgggctgagatggctgaaatgacagaaataaaattcagaatttggataggaatgaagataattgagctacaggagtacattgaaacccaatgcaaggaagctaaaattcatgataaaacaattcaggagctgacagacaaaataaccagtacataaaagaatgtaactgacctaa

SEQ ID NO: 492448 - DNA, 523 bp, Homo sapiens
ctgggtatacatccaaagggatataaattgttataatataaagacacatgtatgtgtatgttcattgcaacactactcacagtaacaaagacacagaatatacctaaatgcccatcaacgagagactggctaaagaaaaggaactggaggccgttgtccttagcaaactaatgcaggaacagaaaactaaatactgcatgttctcacttataagtggsagctaaatgatgacagcacatgaatacatagagggtaacacacactggggcctttcagagggtaaacgttgagaggagggagacaattagggaaaacaactaagagatactaggtttaataccagggtgatgacataatcgatacaacaaaacctgatgacacaagtttacctatataataaatctgcatatgtactcctcaacttaaaataaaaaaattaaaaaaagatgaatcaaattcacttattagtagatagtcttatagaagcaagactgatttttctttgaaaatccaagcagaactt

SEQ ID NO: 492449 - DNA, 542 bp, Homo sapiens
aatgaaatattacagcattttctccatatttctctgggaaagcattgatttgaaaggcaaattgatttccaggaacatttatagtgtatattgtctatgccttctaaattagaatgtaattgggcatattcttctcaaataactacttaacatgattcagttttgcctcctgaggaatacaccttacacttcctatgtcaatgtagaagctagaaaaatactgaaataacaaatgtgtctttattgaaaaaacagcctgcagataaaatcctcattatattcatargcaaatataacacagaaaacatagaaaaaagtgaaaaaaaatctcgtgtaaaatgctcgtattttccactagagacaaagaatacattaactttccctttccttttaataaatagctaaatatttatagattccttccagtcctaccagccagatggtaattaccattgtcagaaatattaagcaatgattatatgcaatatttcctttcatctggttacgtgggagcagatgccctttcagtatgcttatagtca

SEQ ID NO: 492450 - DNA, 542 bp, Homo sapiens
aatgaaatattacagcattttctccatatttctctgggaaagcattgatttgaaaggcaaattgatttccaggaacatttatagtgtatattgtctatgccttctaaattagaatgtaattgggcatattcttctcaaataactacttaacatgattcagttttgcctcctgaggaatacaccttacacttcctatgtcaatgtagaagctagaaaaatactgaaataacaaatgtgtctttattgaaaaaacagcctgcagataaaatcctcattatattcataagcaaakataacacagaaaacatagaaaaaagtgaaaaaaaatctcgtgtaaaatgctcgtattttccactagagacaaagaatacattaactttccctttccttttaataaatagctaaatatttatagattccttccagtcctaccagccagatggtaattaccattgtcagaaatattaagcaatgattatatgcaatatttcctttcatctggttacgtgggagcagatgccctttcagtatgcttatagtca

SEQ ID NO: 492451 - DNA, 497 bp, Homo sapiens
aactgagcacattctgagctatatttcagtactagtaggtttatttctgttgatttggtgacgtgtaaattgtgtatgtaagatgagtaagagattttatgaaaaatttataagtaaatatataaacatgtgaagcttggaatgaaacttacaaactataacttgagctattttttaattgagctatatttatataacaatattacaagctactactataagaagtgcttatttatttatgtgtttgctcttctacagaattctytaatgtttactaacagattcatggcaaaaaaaaaaagttttatgcataatccatacattcatcagtttgttctagcatgaatcttttgacgtttagaaaatatgacaaatatatacacttatgtaatccatgtacctatcaaaatgcggttttttcaaaaacctcagaaatttgttaaatgcctcttttgagttcatcccagctcgcaaaccagcattcagaggtgacgttt

SEQ ID NO: 492452 - DNA, 497 bp, Homo sapiens
aactgagcacattctgagctatatttcagtactagtaggtttatttctgttgatttggtgacgtgtaaattgtgtatgtaagatgagtaagagattttatgaaaaatttataagtaaatatataaacatgtgaagcttggaatgaaacttacaaactataacttgagctattttttaattgagctatatttatataacaatattacaagctactactataagaagtgcttatttatttatgtgtttgctcttctacagaattctctaatgtttactaacagattcatggcaaaaaaaaaaagttttatgcataatccatacattcatcagtttgttctagcatgaatcttttgacgtttagaaaatatgacaaatatatacacttatgtaatccatgtacctatcaaaatgcggttttttcaaaaacctcagaaattygttaaatgcctcttttgagttcatcccagctcgcaaaccagcattcagaggtgacgttt

SEQ ID NO: 492453 - DNA, 263 bp, Homo sapiens
ttaaagacactggaaagcatcccaaaccagacagtagcsagaggagagtttaatcctgaaaaaccacaactgtgagaaggattggtaatttacagctttctcaattgagggtgctctgtgatccccgtggctgcagatgcgaaaacccataatcttactggcctaaagtgccagaggtcgggatatagggatagaagaggaggtaacactttaaagaatgattcctggcaatgagaatcacagaagtagtgagatataaacac

SEQ ID NO: 492454 - DNA, 520 bp, Homo sapiens
tccttgtgttcagcttggcccgctttcatgtgcttgcctttgactcaaacaaaatgcctgacccagtccaaggtggacaggtgagtggaactggtttcattcaacacatcctattaactctgcaacttcatatatcaagacctccttggggctgctttcctcagcaaagggatgcaaggagacaggctaattgaactttgtagatccttatcatggacattaatcacacttgtgcctgcccattttgttttagtagccttttaatatttggagatatttctatattatgtaacctcatcttctaatagtgctgaattcccagcctcccttgtggctgagacactgcaagtcatgtgacatggacactaccaatcatataggcttgcatgagagtttgatcaagagatcaccgtgagcaaagaggttctgtgattctcttattctgtaggaggcaayaggctgtctggcctttggggcaggagtgtggtaaggttgaatttcccagggcagaaatgtatct

SEQ ID NO: 492455 - DNA, 614 bp, Homo sapiens
aaaataggttagtaatcaatgtcctgtagatttgccctacttttgttytgtttagttttgacagtaagtcagagacttggtcaataaaatgattgtgcttactgtttactgtcgaaccttaggggaggtagtgccataataacgatatgtatgtaagcatatgtgtggatgtgtgttcctcatattggtgaatgataaaatgaaaagagctgacccaccaactctcattttctttatttaaaagtctctactttgaaaacaacatgacaaagaggataaatgcttgagggtatggacaccccattcgttatggtttccttatttcacattgcatccctgtatcaaaacatctcatgtgctctatacatatatacacctactatgtacccataaaatttaaaaaaattaaattgaaataaaaaaataaaaaaagataaggaacatcttgtggaaaagaggattctatttaccttaaattactttgatttggaactagaaacaaggacaaaaataagatcatatattcaatctcctgtgtccattaatgtaaataaatcaagaacttgtttcaaatgtatgaatacaatcttgttaagcaatgaaactcttaaaaa

SEQ ID NO: 492456 - DNA, 614 bp, Homo sapiens
aaaataggttagtaatcaatgtcctgtagatttgccctacttttgttctgtttagttttgacagtaagtcagagacttggtcaataaaatgattgtgcttactgtttactgtcgaaccttaggggaggtagtgccataataacgatatgtatgtaagcatatgtgtggatgtgtgttcctcatattggtgaatgataaaatgaaaagagctgacccaccaactctcattttctttatttaaaagtctctactttgaaaacaacatgacaaagaggataaatgcttgagggkatggacaccccattcgttatggtttccttatttcacattgcatccctgtatcaaaacatctcatgtgctctatacatatatacacctactatgtacccataaaatttaaaaaaattaaattgaaataaaaaaataaaaaaagataaggaacatcttgtggaaaagaggattctatttaccttaaattactttgatttggaactagaaacaaggacaaaaataagatcatatattcaatctcctgtgtccattaatgtaaataaatcaagaacttgtttcaaatgtatgaatacaatcttgttaagcaatgaaactcttaaaaa

SEQ ID NO: 492457 - DNA, 614 bp, Homo sapiens
aaaataggttagtaatcaatgtcctgtagatttgccctacttttgttctgtttagttttgacagtaagtcagagacttggtcaataaaatgattgtgcttactgtttactgtcgaaccttaggggaggtagtgccataataacgatatgtatgtaagcatatgtgtggatgtgtgttcctcatattggtgaatgataaaatgaaaagagctgacccaccaactctcattttctttatttaaaagtctctactttgaaaacaacatgacaaagaggataaatgcttgagggtatggacaccccattcgttatggtttccttatttcacattgcatccctgtatcaaaacatctcatgtgctctatacatatatacacctaytatgtacccataaaatttaaaaaaattaaattgaaataaaaaaataaaaaaagataaggaacatcttgtggaaaagaggattctatttaccttaaattactttgatttggaactagaaacaaggacaaaaataagatcatatattcaatctcctgtgtccattaatgtaaataaatcaagaacttgtttcaaatgtatgaatacaatcttgttaagcaatgaaactcttaaaaa

SEQ ID NO: 492458 - DNA, 650 bp, Homo sapiens
acagttagaatgtaggtcatggctcggtgtggtggcatgtgcttgtaatcctagctaatcaggaggctgacttcggagggtgagatgggaggatcacttgagcctgggagtttgagaccagtctgggcaatgtagtgagaccctgtctcctgtaaataaataaataaataaataagtttgccttgggctttcctgggtgagccgagccttgccctggccttttgggttcccctgcctgagggcctgcaggggctgtggttggagacctgaggaggggacagagcccagcccctctyctgtggctgagcaggcctctgtgtccatgacacctgtcttcgggggcctgggggctgtgggcgtatgtcctccctgctggctcccccagcccctgctgcttgatgctcttggaactcttccctaaggagtcagtcccctagaggcctatcagggaatccttttgtatctgcactttgggttttagtttcaaagctccatcaggtacagctcacgtttcaggatgtgtggaaagcttgagtgagggctcccctggtttgtcctagttccaccttccttagagggagaaggctgttgcagacccccatccatgccacaccagctcagcactgcacatctcaaggtgattcccaaga

SEQ ID NO: 492459 - DNA, 619 bp, Homo sapiens
aaaaggtaaacacttaaaattgcttttattaatactggtgattttctgttctccagtagccatatctcttcagactaccagtgggagttggtaaattgacatatggaaactgaatccacataytgggaggccagttgtcctcatcaattttctttatggcccctgcaaaaatagaaatgacaaaacataatatactaaaactgttctccaattcaaactgttaaagcaagctaaatatggcctgagaaggattccgttcatctatatttgggtccttgtggatgaactgtaacctagcttaatagacaaaattgaaaacctaatttaggaataggtatctgtaacaatagctgagttttgggcaatcccaatggccatacttcaaccattcatagactgttaggtgttcaaactgtgttcaaataaggcaaatgccaacctgtaaccaatccacctatttctgtacatcactgttgatttctgtacttcatttccctttgtctataaatcttcttccaccacgtggctgtgctggaatctctgtgaatctgctgtgattctgggggctgctcaattcacaaatcgttcattcctcaattaaacacctttaaatttaatt

SEQ ID NO: 492460 - DNA, 619 bp, Homo sapiens
aaaaggtaaacacttaaaattgcttttattaatactggtgattttctgttctccagtagccatatctcttcagactaccagtgggagttggtaaattgacatatggaaactgaatccacatactgggaggccagttgtcctcatcaattttctttatggcccctgcaaaaatagaaatgacaaaacataatatacyaaaactgttctccaattcaaactgttaaagcaagctaaatatggcctgagaaggattccgttcatctatatttgggtccttgtggatgaactgtaacctagcttaatagacaaaattgaaaacctaatttaggaataggtatctgtaacaatagctgagttttgggcaatcccaatggccatacttcaaccattcatagactgttaggtgttcaaactgtgttcaaataaggcaaatgccaacctgtaaccaatccacctatttctgtacatcactgttgatttctgtacttcatttccctttgtctataaatcttcttccaccacgtggctgtgctggaatctctgtgaatctgctgtgattctgggggctgctcaattcacaaatcgttcattcctcaattaaacacctttaaatttaatt

SEQ ID NO: 492461 - DNA, 648 bp, Homo sapiens
atgcaagcacatgaattgctggattagctggagttcaaacaaaggggaaggagtaaatgaggggagatgcaacaaaccgtatcccccaaataacttccaaaatttcccagctattacctataatttaaaagtaaattcctcgatgggaaggaagctgtgtttctaaatctggattgttttataataacaaaatatagaattacctctttcttggtttttttttgaaagatttaagacattcagaaaactaaagagaataacttaacacagactcacttacctactatcaagatttaasaaatgtcaaaatgttgccatatttgctttacatttttctaaaagcaataaaattctgcagaagcagttaggcccctttggagtcctcctaagcctgctcttcaccccattctcttctccctcatcccagaggtaaccagaaatccagagtcggtacaagtactccccacctaggtgtttatattttgccagatgtttatagatttacaacacgtagagtttttcttcatgtttacaccttacataaatgataacatgctatatatgttatactactgcatcttatttttttttatccagtcttatgtttggatgatttctcagttatgaaacatatacaattgagtttgt

SEQ ID NO: 492462 - DNA, 647 bp, Homo sapiens
caattacgcatttgcgtgcaaatgcaagagtggcatgtctagagagattattctcttgctgtaggagtgtggggcagggattgtgaatcactgaactgggctttttaggacacagatgtgctgctacatctatgcactttattctaggcgatttgtcgatgaataggtagtgacccttacattcaatcttgtgggggtgagagctgtggacttaactaacacagaagataagtgacagaggggcaggggcgagagcagagggtggttgagtgctgggagaagcagatttgacagttactcagagaaccctggggcttggatgtggaaaagcagttcctcacttctaggattctgctgcttgggtacagagatgaggagagcagcatgatcggaatggttaggggttttcagtgtaacatacacccacaaatagaaasacctacatagcctatatggccaaacaagaatggaagcatgactgggtgccaaacacagtggagcctgccagagataaaatttttatacgtgtgtctctctatgtgtgctttccctttttagccagccagattgctgcctgattctaggtgatggcaaagaaagaaaatcaccataagacaaatgttccttgtccagtgaaaggtcactag

SEQ ID NO: 492463 - DNA, 581 bp, Homo sapiens
tagatggcacttcagccacattgatgtttaggaaccacacaaggttttcagctagtgacgttcccgggggcaggaaggatggtcatattttgatgtttttgcctgtggcctgggtgataggcaaataattcagtaaagaaataacctctatcaacatcaaacactgaagagagaccagmaaaactgagagtgttttgggaaaaagagcagagagaactgaattccaaggggatcccgaagcaaagaaagattgctggtctggaaactcctgagagatgtgcttaccatatacacaggcttttctaagatcattttgatttcaaatattctgtccttgtgcttcgacaaatgtagccaagggttctgatatttacattagaaaacacgaccgccatatgtctccttaagcacaggaaaactctaaatgatgcatgaatccctctgttcaacatgcatcatgaatcctgtatgccccaaatattttgaagtttcccttcactgaaaggagcggagaagcagcagctcagtgacacacgagctgctgaaatgggttattgaaaacccatttcaaccagagggta

SEQ ID NO: 492464 - DNA, 314 bp, Homo sapiens
gtaaacagtgcagaattggccgagtgtatgcagcaaaagcctggatctcaaggttctgtctcatgacagagtgagtacttccatgtccttgtgacagccagcatggctgcttccagtcctcctgctttacagtcatacctgggaggttgagcaaaggtcccacactgcatttattcttggagaattattaagtcttacagtcaccctttgtgctgtggttacyacataagtttccaggtccttaggctgctccctgatgtttagaacagatttgtgtgatgtgctgacattgtgtctaacccacaaaacagtgc

SEQ ID NO: 492465 - DNA, 522 bp, Homo sapiens
ctatcatcccctcttgagagaaaaagagaagatttgtctctcaaatgtatcacaagttggaaatgtaaactggaatttggaatgtatgtgcaagtaagcctacaagttttcattcccctttgaagcaaaagcacatagctctagggagatatatctttatatctctgaaattgctgtctattcaattatgctttaactttcaaagcatatcctttaacccactttccagttttctttgcctagaataccctagcatagggaaatatgaaaatattttctctatacttctacatgattraggaaacgctttcttgtagagatggcatttgaacctagaaggttggatacctatgaatttaccaaacaaaaggtaaacccattcctggcagagggaacagaagcacaacggtttggcagtaggaaagaacatggcagaattcacatcaattgtttaatagctgttatttctgggaaatggaatgttaggatgaagtggaagtttaaggatatcttttcaatttt

SEQ ID NO: 492466 - DNA, 430 bp, Homo sapiens
tacttgcattacaacttgttatttcaatgcattttggattccattaggtgtttgcatatgattttgtgtrtattttggtgttttaaaatgttgtccctgtggatcaaaatatgataactaaattatcaatcatgttggtattgctgtagatcagattattgttgtcttataaaacaggtatggcctgtttaagtcttagaagtcttttatttagtatgttttactatcttaaattgttatgtcaaaatatgtaagaacgacattgtgttgatatatttttataggtaaaataatttctcattgtgattatgtaattttctttccattaaggtgtgaagcacagggtctttgaaaaataaactgctgactgtgttttgcttgtcattggtagtattgccatataaaaagatatctgacaaggaaatatttt

SEQ ID NO: 492467 - DNA, 611 bp, Homo sapiens
cacttagatagccacacggtgctgggcaagagtcagttttcatcatgcaccatgctgcttctcacttacctgtcatgaaagcactctttctggaatctttttctgcttcacgctttgaccccttcgaaactcctattgattttaacagattcagtttaaatgtcacttcttcctgggagccacgttttatgactccaagcaatgccaagagcttcctcctttctccagttgagtgccttgttcatatctctaacatggcattaattcatttgtcctgattatttgttaatgtctatgttacctccaagtaatggcagcttccagartataggaagtttcctcaatttacttttataataaggggttaccaaactttttgggaaaaagagtaggcttgcattaatacttactgattggctataaaaatgaataagaaaacacttctgtttttgcctctcataccctgaaaaatctaacacattttaaaattaggtttatatattagttcttaaaagatttatttgcacccttgcagaaagcaaatcaatagatacaatccttacataagctagatcaagtgggtccttgtgatttctgtgtgctctttttac

SEQ ID NO: 492468 - DNA, 601 bp, Homo sapiens
caacttccaaacccgaggtgtacaaattctagtgacgaacaatcacgagtggagaagatttaggagaactgatcatttcagagaagagccaagttacatcttagccaagaatagggagaagaacttcagagaagtagttgtgtgtgtaggagctcattaaaccttgtcccaggagaaataatttgaaggttgggagagatgaaggaggaggaattgggagaagaatggagatgtaggagaagagacgaaaagagagactagatgactttggcactcaccaaaaataacaaggttgggggaattagctgaccactcccactgaatgatcaggggagagggggcagcaggtgcttgasgtcactcagaatgctgccacactctggccatagtcatttccaaggaaattctttggattagtatatgagaagtctctggtccctttgcaaggaaacaaatgtggttagattggattaaccccaaaacctaaaacccaagtatgaaactccccagtgctggttacaggcctggtacatttgtgccgaggatggtgggcaaaatcgctgactcccaaggcttagtctgtaaatcccaaagacaggat

SEQ ID NO: 492469 - DNA, 644 bp, Homo sapiens
tggcaactatttccgcaagtcttcagattattgacagtaccatatttgttattctccacctacaccatttaatacactgcttaccagctagtcagctctctgctctattctccccaayagctaattcagaaatttatgatgccaagaattccatttccccagcactgttttctttcagcaggtgatcttgcttcctgtttcatacctccagaccccaatatctatttgtttaccaaatacatcctcttgaatttccagcagccacttaaaattaaatatgtccgtagtaggctgagtaatggccccaaagatatcacaccctaatctctgcaacctataaatgttacttatatggaaaaatggtctttgaagacgtgattctgttaaggactttgagatagggagattagcttttattatccaggtggccctaaattcaatcatgagtgtccttacgagagaggcaggggaggattccataggcgcagaaaagaagtcagtgtgaccacagaggcagagggtggagtaatttggctgcaattcagggaactccagcagccatcagaagctataataaaagtggcaagcagcatgtttttccctagagtctctgcagggaacatatccctgctgacaacttgatg

SEQ ID NO: 492470 - DNA, 455 bp, Homo sapiens
tccataaacaaatagatttcctgtggttttaagaacagttgagggtattacaaagggtcagggcgatctgtgagtaaagctcttttcacagtttgacttcccccacatccctgtttctcataaatatgcacccttacacccaacatacatgtatgtatttacttactcagcaggcacatgttgcaaaggctayggagaaacaaagaatgtaaaggagaaagagaaaaattgaacttaaaaacatatgcatatttaaaacattgtgtttttaaaaatatatttttcaaaggaccataagtctaaaccaaagaagatgaaaaatggaagttttatgagtaagaaagatacagcttaatgcctccaactgaggtgattttatcctacaagttagtgccggccatcggtgttggatccaaggcactgataaaagaaggatgctccgatacttccttcag

SEQ ID NO: 492471 - DNA, 574 bp, Homo sapiens
cattcttgacatttattatggtagcaagacaatgttttgaaatattctscaatgtaattgctttaattatgatttcactctaaagccgttctgtaattaaaacaaggtctggaggctgagactgttgtccctggaaagaaaaaaacagaaaagcactcactgagaacaaagagttgatttccatgcttttaactccaaagcagacttttaaaaacatatagtagaggcaataatcttgaaagtcacttttatgaaagaggtgagaatttggggaattttcaaaacttggcttggaaaccaagagccaaaacctgaaggaagaggtcatacagttttcccaaaaataaaatattagagaattcatggttttgtaagaagggaaaggagcgtctgactatgaagagggtaggagggctgagtatctgggaggagtggaaaaaaaacaccatttttggaagaatcaccaccaggctttctggggcatagccccagaaagtctcttttccaggttggagatgacttctgaataaacaggtaaccagcatctgatactggaagttatttccaacatgac

SEQ ID NO: 492472 - DNA, 506 bp, Homo sapiens
gaatatagaaatataaatttaaataaatatttctatatatttatatatttattggaatatatatttatactttaagtatttaaataatcacaggaaaagcgttatgtgaaaattacgcacataattcaccacttaattgatttctaaagtccagtgtattatggacaatttcttgataaagcaatttacaattacatgagaagtaacagaaaatctgaatagctctatgtatattaaataactcttcccatccaataaaaaagtcccttcacttaacagtttcactcatttgttctatcaaatacttaaggaagaaataatggcagtgttacacagattttttaaatayatagatgcaaagggatcacttcccaacacattttatgagaaacgcaaaccctaatatcaaaacatgataaagataatataaaagacacacacacacacatatatatatacacacacatatatatgtatatgtacatataaactctataaactacaga

SEQ ID NO: 492473 - DNA, 576 bp, Homo sapiens
atagtgcatataacttataagatagcacagggagatagtgcagctcaagctaatggcaaaagtatttactgtgtattatttccaggctcaatagaaatttgttttactatttggtaagatgcaaattcataccaatgaaagagtaaaaatataatcaatcaattacttcaagaactcactgaataatgtagaagagatggcaaaagtagagttccaaatctgagttcttcaggagcttgggcactcttccagcaatatgacctttggtctatcacttcatayggtagatattattagtgttcatcaaatcttgacctccctccccctgcctccccacacatagtacctactcacttcccatagtaggctcatgactaggactggtcaataaaacatgaacagatgtaactgtgccttttctaggttaaggcatttgaaagctcctgtgcattctctggtgtctctcaccaagctctgacaactgtgaaggacatatgttggcatggcaagaccaaacattaaagccagctaaattgctgttaccacatggaggacaactgtgttggaggatagccc

SEQ ID NO: 492474 - DNA, 628 bp, Homo sapiens
tcaaaaacaccaaaaaatctgattaaggagctaattaaatactaaagagtatgaacattgatcccatgaaatgccatagaattgtgctacccaatagaactttctgcagtgatggacatattctgcattgttctgtccaatacagttgccactaacaacatgtgattatttagccctcaaaatgtggctagttggcgggtgaagtggctcacacctgtaatcccagcactttaggaggccaaggcaggcagatcacttgagctcaagagttcgagaccagcttaggcaacatggcaaaaccaaatttctataaaaaatacaataaatagctgggtgtggtggcgtgmgcctgtagtcccacctacttgggaggctgaggtgggaggatggcttgagcccgggaggcagaggttgcagtgagctgagccagaccttgtctctaaataaataaaagaaatgcagctagtatatctaatggactggaattttacattttatttttcattaactttgtttgagacaaggtcttgctctgtcatgaaaggtggagtgcagtagtgtgatcatcacacactgcagtcttaatatcctaggtttgagtgatcctcccacttcagcctcccaaaca

SEQ ID NO: 492475 - DNA, 576 bp, Homo sapiens
cctctgctacacaaaagaatttgcatggggtttggggggttagcaggtgccaataagccccactcagcccccacatacttggcaaggaaggtccatggtgttctgctaggagcagctagctgggtcccaggcattctgcactcaacacaaaactgcccccaggacacaaacctttttgctggagacagaaactgtggctttcaggcaatgtttctcccagtccacccatgaagcagggtttttcagctcctgcacccatgggaatagcacatttcctgctgacctctcaattctggccaatggggttcatccccaatccagattatatcacagatctaagttgggagcktctctgaacctatgaccaccacctgagttagctggcagactttcacaacttcccctgtgcagtaggatcaggaatggcttccctccatggccactggagtctcggggtgcacacaaagcatccttctcatgtagtccagactgttcatgaaatcagctccagcagtggatagggttaagaccttgccccgtaacctggatttcctgtccctcctgttggagcatatg

SEQ ID NO: 492476 - DNA, 528 bp, Homo sapiens
ggacctacgccccaggtggtcagttcgggctcagccaaggtgctaatcccccagggatggtgggagcagcctggaccctggccgttttcttctcctgggtctcagggtgggtcagcatctccctgcagggtcggtcctctgtgagcccccccaggacatcaggcaggtgtgaaaactctgacacagcacgcagtctgggaagcatgagtaacaaagcccccacgtgggtgaccttgggagaggcgtgtccccaggayggagccttctctgaacgggaggctggagctttctccttatgggggctgctgaaggcccagggcaggcacaccagcgccgccagccccaggacctctggttggcagcagaatccgtcctctggcagtggccctgagggctcctgtttcctgtggtcagagcacctggcagggggctcctgagagcagggcgggggcaaaggggggccagggatgcctggatcctgggggagctgctcctgacaaaggaatgctcgagggaacccggggaggt

SEQ ID NO: 492477 - DNA, 528 bp, Homo sapiens
ggacctacgccccaggtggtcagttcgggctcagccaaggtgctaatcccccagggatggtgggagcagcctggaccctggccgttttcttctcctgggtctcagggtgggtcagcatctccctgcagggtcggtcctctgtgagcccccccaggacatcaggcaggtgtgaaaactctgacacagcacgcagtctgggaagcatgagtaacaaagcccccacgtgggtgaccttgggagaggcgtgtccccaggatggagccttstctgaacgggaggctggagctttctccttatgggggctgctgaaggcccagggcaggcacaccagcgccgccagccccaggacctctggttggcagcagaatccgtcctctggcagtggccctgagggctcctgtttcctgtggtcagagcacctggcagggggctcctgagagcagggcgggggcaaaggggggccagggatgcctggatcctgggggagctgctcctgacaaaggaatgctcgagggaacccggggaggt

SEQ ID NO: 492478 - DNA, 303 bp, Homo sapiens
cctcattctgcgttaatttgctgttggctgttttgtgaacacaaaataaacttgagatttttttttttttttttttttgkgaaactcctccaaagccaatttcagcccttggtaagcttgcagacagttactgatcttaaatttaattttaaaagacaatgtatcttaattataatttagctttttaaaacaatgagatagctttacatttcccctttgtttgaatgagaaaatggatcttgggttgctatgctagaacacttgtagattgctgggtcctttgtaagggggccatggacacac

SEQ ID NO: 492479 - DNA, 527 bp, Homo sapiens
cctcatacataatgcatgtgagctcgctttaagcataagtgaaggagtggaaaaatcctggagatagaaatcaaggggtatacatgtggatgtaaaaaatcaacaaagattcttttaagaaaaggtgtgtatgggtagggaacaatagcatgacagcagtgcggcctctaacagtctggaaccagttaggacaaagagcaggattgagcgccattccattcatagacaccgtggtgatattttgagtacattaggttaaaaggctttcttcagcaaaatctatctctagagatagatttgatttttataatcaaatctactagagatagatttgatttttataatcaaatctacyagagatagatttgatttttataatcaaatctactagagatagatttgatttttataatcaaatctactagagatagatttgatttttatacttaatgttctagactgtatcttttcaggatgctaggtactttatgaagatccatgctgtctcaatttgcatagtgggttgg

SEQ ID NO: 492480 - DNA, 548 bp, Homo sapiens
ggtgcaaaaatcagaaggtggaaatgagttaatcatgttcaaggacgaatgtgatttcattcctctttttgtttgcgatgtagttgcatttgtcacgtagttggcagagaacatggtaggaactgagcatagagagctacactggggcttgttccacagttaagtgtcacacagttttgaacacgggagaaagaagtgacgcaattcctttattttcygaaaaaagcttggattccaggaagaccagaacaaagcaatcatcagggttattgttcagcttggggtgggaggagaaagctgagggtgaggagctctcatttattaggcaccacctgtcttcagtggcaggcagatgtgacttcatttaatagtccacatcagccctgtggataagatatcattaactctcctggaccaatttggaaacagagattaaggctgagcaccttgtttggcactatacgactaataccatgtgcccttcctttaggaaagctctgtctcctgaaaacacagttaactgggaacttacaggcaaacctcaggca

SEQ ID NO: 492481 - DNA, 512 bp, Homo sapiens
aaatgagttaatcatgttcaaggacgaatgtgatttcattcctctttttgtttgcgatgtagttgcatttgtcacgtagttggcagagaacatggtaggaactgagcatagagagctacactggggcttgttccacagttaagtgtcacacagttttgaacacgggagaaagaagtgacgcaattcctttattttccgaaaaaagcttggattccaggaagaccagaacaaagcaatcatcagggttattgttcagcttggggtgggaggagaaagctgagggtgaggagctctcatttattaggcaccacctgtcttcrgtggcaggcagatgtgacttcatttaatagtccacatcagccctgtggataagatatcattaactctcctggaccaatttggaaacagagattaaggctgagcaccttgtttggcactatacgactaataccatgtgcccttcctttaggaaagctctgtctcctgaaaacacagttaactgggaacttaca

SEQ ID NO: 492482 - DNA, 651 bp, Homo sapiens
gctaccagggattattgggggtgccccactgactccacaagcccagcagtacaggaaatgagactggccaggaattcagcctccagaggaggagatccaagatctatatggcagaatggctctcagtccagagcaagaccaagctgtcatctcacggaaggtaggaacatcttagaggcaataayttgcccatcagaagtagcattggctcaccatggaagtatggatatggggagtctgagaagcaggtgggaagtgtcctctgagcattgttcaggggagagggtgtgctgaccccagaatacgacctgcctggtcttagtggctctgtatccttgaaatggagatgaaaatgtcaggctggctagaagttcagggccatgaaacactcagataatataactaatgccccctgttttgattcctttcttaccaagccaatttctaattacaggtgatctgcagggataaactggcctatggatgtattgtctgatatcgttggccgttgttctcactatatagcaatcatttagcatgctagtgtatgtatgtatcagtttagttaatgtgagtctacctatgggggtggagaccctgaaaataaatgattgactaatggtgaattccatcccatgagagcacacagga

SEQ ID NO: 492483 - DNA, 289 bp, Homo sapiens
tttgccgtggtctgccacaccctcctcagtccctagagcccacgctgcttctgagggccarctctgaggcaactccacgaatcccccaggtcttcccaactacagcctctcccagggagaatgagaccttgtctcccttcacttcactgtacttgtgcacatttctttttttctcaatcagactgagctcatgcaggacaagagttctaggtcattcttcattacagtgttagctcccaggtcaatgttgggatgttatagatgctctgtaaatgattgttaaatatac

SEQ ID NO: 492484 - DNA, 555 bp, Homo sapiens
tgcagctttgagcaggagctgccctttccttgctgcctactgcatgctcccacaacacacatgcacacacacatgcctttgcacacagctggacacacgcatactgtgcttcatgccctcattaaggaggcacagaagggaatgtatctgttaggaaatgaagacggctcaactccctggttccctgggtgtttgcacaggtgccctctgtgcagaccattctttggtctctttcttctyttagtgaagggagaagcagagccccagtgggtacccggctactttgggcccaagccaaggtcacaagcttccttgggagcctggtgagatgggggcaccactggtcctcccgaaccgagggggcagcgttcagtggagccatgagcccaggaaggtgatagacaggatgactcagttcattagaaacaaccaaaatccagtgaggaagggcagccctcaaaggttttattctccaggaggaaggactctcaggggctgcgagcagcaggcacgagggctttattgcacctgcagttaggtgatggtgacctacaa

SEQ ID NO: 492485 - DNA, 555 bp, Homo sapiens
tgcagctttgagcaggagctgccctttccttgctgcctactgcatgctcccacaacacacatgcacacacacatgcctttgcacacagctggacacacgcatactgtgcttcatgccctcattaaggaggcacagaagggaatgtatctgttaggaaatgaagacggctcaactccctggttccctgggtgtttgcacaggtgccctctgtgcagaccattctttggtctctttcttctcttagtgaagggagaagcagagccccagtgggtacccggctactttgggcccaagccaaggtcacaagcttccttgggagcctggtgagatgggggcaccactggtcctcccraaccgagggggcagcgttcagtggagccatgagcccaggaaggtgatagacaggatgactcagttcattagaaacaaccaaaatccagtgaggaagggcagccctcaaaggttttattctccaggaggaaggactctcaggggctgcgagcagcaggcacgagggctttattgcacctgcagttaggtgatggtgacctacaa

SEQ ID NO: 492486 - DNA, 555 bp, Homo sapiens
tgcagctttgagcaggagctgccctttccttgctgcctactgcatgctcccacaacacacatgcacacacacatgcctttgcacacagctggacacacgcatactgtgcttcatgccctcattaaggaggcacagaagggaatgtatctgttaggaaatgaagacggctcaactccctggttccctgggtgtttgcacaggtgccctctgtgcagaccattctttggtctctttcttctcttagtgaagggagaagcagagccccagtgggtacccggctactttgggcccaagccaaggtcacaagcttccttgggagcctggtgagatgggggcaccactggtcctcccgaaccgagggggcagcrttcagtggagccatgagcccaggaaggtgatagacaggatgactcagttcattagaaacaaccaaaatccagtgaggaagggcagccctcaaaggttttattctccaggaggaaggactctcaggggctgcgagcagcaggcacgagggctttattgcacctgcagttaggtgatggtgacctacaa

SEQ ID NO: 492487 - DNA, 394 bp, Homo sapiens
tgctcaaggggaggactgggcactgcactgagtctgctgcccagagcctggcaccattgggctggctgaggcacactgccaagccagcaggtttgtgcaacagacttggctcccaaaagggaggcccagaaggcccagacaccctcaggaatagggcctggctgaagactgtgattaaggaggtkagagtttcaagtctggtaattttgttattaaacagaaatgtgacttcatttacattcctgagcctcgaagcctggacttaaagatgaatccccagtgggtgaggctgggtaccagaagtggctacatatttgcagagcccaccgaaaatggaaacgtggatctcttggtcatgtgtcatgaaggatgtcaaggcagttatagcagagca

SEQ ID NO: 492488 - DNA, 394 bp, Homo sapiens
tgctcaaggggaggactgggcactgcactgagtctgctgcccagagcctggcaccattgggctggctgaggcacactgccaagccagcaggtttgtgcaacagacttggctcccaaaagggaggcccagaaggcccagacaccctcaggaatagggcctggctgaagactgtgattaaggaggtgwgagtttcaagtctggtaattttgttattaaacagaaatgtgacttcatttacattcctgagcctcgaagcctggacttaaagatgaatccccagtgggtgaggctgggtaccagaagtggctacatatttgcagagcccaccgaaaatggaaacgtggatctcttggtcatgtgtcatgaaggatgtcaaggcagttatagcagagca

SEQ ID NO: 492489 - DNA, 416 bp, Homo sapiens
ccaattgtttctgtctcaggaattggtttcttgttgcactgtgatacacatgaagccatatacctttttcagctcattatccccagaatgtatttgtacattattaacacagaatagacacctaataaatatttctaaatttttattgttcttccttgccacaaaaagcaatcacttttttttagcatgatgtacatgcccttctatcatsttgccctgaactatttatcaaatcttatttcttcccactcccccatttgtttcccatgctgtggctgtacaaaactacttagagctctgtcaactctccatgctattttataataatcaacactaatgaaaagaaagggggctttataacagaggcagaactcattatgttctaaaaaatacacgcatgtttcccatgttgaata

SEQ ID NO: 492490 - DNA, 416 bp, Homo sapiens
ccaattgtttctgtctcaggaattggtttcttgttgcactgtgatacacatgaagccatatacctttttcagctcattatccccagaatgtatttgtacattattaacacagaatagacacctaataaatatttctaaatttttattgttcttccttgccacaaaaagcaatcacttttttttagcatgatgtacatgcccttctatcatgttgccctgaactatttatcaaatcttatttcttcccactcccccatttgtttcccatgctgtggctgtacaraactacttagagctctgtcaactctccatgctattttataataatcaacactaatgaaaagaaagggggctttataacagaggcagaactcattatgttctaaaaaatacacgcatgtttcccatgttgaata

SEQ ID NO: 492491 - DNA, 554 bp, Homo sapiens
ctgctacagctttggctctggcggtggctatggcagcagcagctttgagggcgttgatgggctgctggtcggaggtgagaaggccaccatgcagaacctcaatgaccgcctggcctcctacctggacaaggtgcgtgccctggaggaggccgacactgagctggaggtraagatccgtgactggtaccagaggcaggccccggggcccgcccgtgactacagccagtactacaggataatcgaggagctgcagaacaaggtagggcctgctggtgggaggggtctccggggggcatgactttttccccccaactcctgccctggccaaaggcctggagtccagccatagggtctcagggagccaagggtggtttggctgtggcttagcttctgggaacctgccttggggcccctgtgtggcccacatcccccttttctgggggcagtaggctgagtcaggaacaaacaggcctcgtggagccccttggagactcagtttctccctcgtggagctcctccacctggagaggttgtaggatgaggcaggaggatgc

SEQ ID NO: 492492 - DNA, 554 bp, Homo sapiens
ctgctacagctttggctctggcggtggctatggcagcagcagctttgagggcgttgatgggctgctggtcggaggtgagaaggccaccatgcagaacctcaatgaccgcctggcctcctacctggacaaggtgcgtgccctggaggaggccgacactgagctggaggtaaagatccgtgactggtaccagaggcaggccccggggcccgcccgtgactacagccagtactacaggataatcgaggagctgcagaacaaggtagggcctgctggtgggaggggtctccggggggcatgactttttccccccaactcctgccctggccaaaggcctggagtccagccatagggtctcagggagccaagkgtggtttggctgtggcttagcttctgggaacctgccttggggcccctgtgtggcccacatcccccttttctgggggcagtaggctgagtcaggaacaaacaggcctcgtggagccccttggagactcagtttctccctcgtggagctcctccacctggagaggttgtaggatgaggcaggaggatgc

SEQ ID NO: 492493 - DNA, 293 bp, Homo sapiens
tctcctttcctcctgctgtcccttaagacaggctcarcaaaccgcagggggcggggctgctggctggagcccagggttagggattaggaagggtcctgacttctgatttgggaccactctttggtgagggctcctttagcctccttttgggggagcctgtcaggggcaccctctagctgactgtaaaacgagggggttgcccacatcccctcccttgttctagaattctgggacagtttctgccctggggacattttccctttcttttctggttgcctcatactcccagccag

SEQ ID NO: 492494 - DNA, 365 bp, Homo sapiens
ccaagtgagcagccagcatggtgggctgggggcagagggcaagggacaaagagtggagctgtccacccagcagggccagcagaccccgagcctcagaatcctcagggctgcagcctaaggacctgacctctgtcctgccagttacgagcacgagctggccctgcagcagactgtggaggctggcgtcaatggcctgtgccgggtgttggacgagctgaccctggccaggactgacctggagatgcagatrgaaggcctgaaggaggagctggcctacctgaggaagaaccactaggaggtgtggttgctgctggcttccaggatgggaggctggtttggtggggttgccagatgcacccagggcc

SEQ ID NO: 492495 - DNA, 389 bp, Homo sapiens
ccaggactgacctggagatgcagatagaaggcctgaaggaggagctggcctacctgaggaagaaccackaggaggtgtggttgctgctggcttccaggatgggaggctggtttggtggggttgccagatgcacccagggccaggagaggagtctgctgagctgaccgcctcctgccatcccttcccaggagatgcttgctctgcgaggtcagaccggtggagaagtgaacgtggagacggatgccgcacctggcgtggacctgagctgcatcctgaatgagatgcgcaaccagtacgagcagatggcaaagcacaaccacagagatgctgggcctggttcctgagcaaggtggggcttgggccctcagtgggcctgcagcacttcccag

SEQ ID NO: 492496 - DNA, 389 bp, Homo sapiens
ccaggactgacctggagatgcagatagaaggcctgaaggaggagctggcctacctgaggaagaaccactaggaggtgtggttgctgctggcttccrggatgggaggctggtttggtggggttgccagatgcacccagggccaggagaggagtctgctgagctgaccgcctcctgccatcccttcccaggagatgcttgctctgcgaggtcagaccggtggagaagtgaacgtggagacggatgccgcacctggcgtggacctgagctgcatcctgaatgagatgcgcaaccagtacgagcagatggcaaagcacaaccacagagatgctgggcctggttcctgagcaaggtggggcttgggccctcagtgggcctgcagcacttcccag

SEQ ID NO: 492497 - DNA, 389 bp, Homo sapiens
ccaggactgacctggagatgcagatagaaggcctgaaggaggagctggcctacctgaggaagaaccactaggaggtgtggttgctgctggcttccaggatgggaggctggtttggtggggttgccagatgcacccagggccaggagaggagtctgctgagctgaccgcctcctgccatcccttcccaggagatgcttgctctgcgaggtcagaccggtggagaagtgaacgtggagayggatgccgcacctggcgtggacctgagctgcatcctgaatgagatgcgcaaccagtacgagcagatggcaaagcacaaccacagagatgctgggcctggttcctgagcaaggtggggcttgggccctcagtgggcctgcagcacttcccag

SEQ ID NO: 492498 - DNA, 624 bp, Homo sapiens
cagatcatcaaggtccactgccctactcccaaacaaataaataatgaactgaggccagagtggcaggtggctggagtcacaatgacagggagcagcgtcaggcggtatgtggctggagaagggacttgccctgagcatgagtgtccaccatagcactgcggctgagcctggtgcccactgcaaggtaggggcttggcctgggatttctactgtgctgtgagctgaggcccttgagcatcacagtgtttccaaatcctgggtgcattcctgttactggcagaactatacctctctagggaaaagttttccaacttggctccacagaagttcactgatgaacagcaagcaatgcatgcacagtcaaacacttccaagcgctcaagcatcaaagaaagcaaatcacaatgagacaacaaagggcaaactttgatacmctcctgggacaacatgtcttggaatctagaacattagtgtatgaaacatttaaagaaattatcaacacagtcatatagatgagcacacaacaaggaactatttgaaataaatagttacatttggaaataaaagaatttctagatattgagatataatcactgaacttttctaaacaagtgcagttatata

SEQ ID NO: 492499 - DNA, 499 bp, Homo sapiens
tgctccaggaggctgtaggaggaatattgcacagagctgcagtccaggaggtttggaagatggggggttggtggactcagaatattatttgctctgtttttgcaacaattctttccacacacagtgaatgctggcttcttagtggtaaattgatatctctgtagctattgggcacccatctgccatatgtttcatgaaagtaatttacttggctttcaagactgcgttctagaaggacttgcttcactatcagttgcctttggaccagactttatgatctgaagaacattcttrattttaggaagtaaaagaacttttcagtgttagaggacaagatttaaagagctaatttattccagacctctgtgtccaggcagggtaccaatcaaatgggcaggtctttgactctaaggatgccattatttcccggcagcctgttatcccttgtcatcagcctcaacagcaggaagttctgtctctgttctgattttatctcttg

SEQ ID NO: 492500 - DNA, 525 bp, Homo sapiens
ttggggctgtgtgtgccctgatgggggcttccctggaacatgtgttttcctgatgattgggacaagttgcagaacagaactggttctcggcagagtactctgcccacagagttccccctctttgatatgaaaaataaaacgtgatttctccaagmataaaaattagaatcagggttgtgttccctttttacactccttagagcctctgatcatttccagccaaggagcatgcggctgtgtttcccaaagatagttgcacacggtcttcccaagtcagagtagcttgctggaggcacaacccagtctttacccagatggcgatggggtggttcgaatagttggtttggaaaatgatctccactctgaccccataccagtttttataacgcttatctgattttgaacatactctgttcctggtgcttcctacccatctattaacaaggggtccgtgctgggagggtcactgtgtgcaaacgcttccattaggaatcccagtgaggaggcttttcctttcccttggtg

SEQ ID NO: 492501 - DNA, 501 bp, Homo sapiens
aggagctggagcagtcgctggttgtgcgcaacacctaggagcccaaaaataagcagcacgacggaactttcagccgtgtcccgggccccagcattttgccccgggctccagcatcactcctctgccaccttggggtgtggggctggattaaaagtcattcatctgacagcagccstgtggtcattggaaactggggaggggagggggagagaaggggaagggaagaaggtggggaggcagtgggtccctcgggacgactccccattcccttcccttggattcttctccttactcaattttccctagacctaaaaacagtttggcagaagacatgtttaataacattttcatatttaaaaaatacagcaacaattctctatctgtccaccatcttgccttgcccttcctggggctgaggcagacaaaggaaaggtaatgaggttagggcccccaggcgggctaagtgctattggcctgctcctgctcaaagagagccatagc

SEQ ID NO: 492502 - DNA, 599 bp, Homo sapiens
ttaaaagaaaaaacaaaaacagaatccttggccccctcccatacctaagtcagactctgggaatggagattggtagaagttaatagaggaccaaattagaatcacataggaagcgttttcaagatccccatgaccarcacctatccctggagactctgcttcagcatacccatgttggttcccagacctcacttgttacctttagaggattctagagagacaacaacttactgacaaaaagagagaagtacttctcatcccttcattatatgaaatgtaccttcatgtaatcaaatagttgatgagggggcattttttttatgaagtaatcaaactaattaaaggaggaataatagaatagtactcttttgaactaatggagctagagaatcatcagtggctgctaatataacaaaaagagtaaactagccatcatgtgctccaatataaaacctcacaacaccaacaaaaaaaggacatcttgacaaaaagacaaaacctgaatctgatcaagctttagagtggcttggtttatctaactataaatttacagaaaatatatggagtagggggacaggcaaagaaacaggtaaataaca

SEQ ID NO: 492503 - DNA, 620 bp, Homo sapiens
attcagtttaaattgtaacattacatgcccttattttttccatcacatgatttttttcattacatttttaccttatggtatatattttgtaagctatttcaaatatcttttattgagaaacaaggtaaaataattatataaagccaagataagttaataaaagcatttcctttgtttataagagaataactggggggaaaagatccacactatggctcttgggaattcagaccattagtagatcatttagtttctgaatgtggctaatgagagcagagatttgtggatarggtatgtagttatgaagtttatattgtaatgactgttagttagccttgtggtattatggtattgttacagatatatggacttaaaaactgactgctatgcaagggaaggactaagttcgagtgtgttatctatttaatattttttaattaatttaccatagcatttcttattctataaaggaaatgtttcctagatttttcagtaatattgacagaattcaattttgtctacaaattcagtgatttccaataatcttattctcttttgctttgctttgctttcatttcggagtgcaatgtcagcaagtacctatatccctgataaaaaat

SEQ ID NO: 492504 - DNA, 583 bp, Homo sapiens
gccagatggggcccttccccaccccatttctgccccatctacagactggggcgcaagaggattaatggctgcttagcctaagggctgggcactcagcagggggctgagtagagaaagcaattagggtgcagctcctggagacaacctccttggcctggggcagttctggggtgctggcacagggaggagaggcctggagggagtgctcttctctcagggtttccgggaggctsttggaagcctcggtgtgtctgggggtgaatctattaatataattgtgcgtttctgggaatgggtgtgtgtgtcatggacgctgggttcgcacctgtgtcagatgattttgtatattatgtatgtgtacctgtctgtcactgtgggctgtttgtgggtgtctgtgatgagcatgtgtaagtgtgagtgtgcctgtggctgtgtgtgtaggtgcctgcggctgggagtgatgagggtggattcttaggacgcacgaagcaacaagaggaccttcttctcagtatagatttattttatattttaataactattttcttaaattagtatgtgctgacagttaaaaaaaaaaaag

SEQ ID NO: 492505 - DNA, 583 bp, Homo sapiens
gccagatggggcccttccccaccccatttctgccccatctacagactggggcgcaagaggattaatggctgcttagcctaagggctgggcactcagcagggggctgagtagagaaagcaattagggtgcagctcctggagacaacctccttggcctggggcagttctggggtgctggcacagggaggagaggcctggagggagtgctcttctctcagggtttccgggaggctgttggaagcctcggtgtgtctgggggtgaatctattaatataattgtgcgtttctgggaatgggtgtgtgtgtcatggacgctgggttcgcacctgtgtcagatgattttgtatattatgtatgtgtacctgtctgtcactgtgggctgtttgtgggtgtctgtgatgagcatgtgtaagtgtgagtgtgcctgtggctgtgtgtgtaggtgcctgcggctgggagtgatgagggtggattcttaggacgcamgaagcaacaagaggaccttcttctcagtatagatttattttatattttaataactattttcttaaattagtatgtgctgacagttaaaaaaaaaaaag

SEQ ID NO: 492506 - DNA, 428 bp, Homo sapiens
aattttataattggtgacccgctcgattgtcagaacatgaggcttccaccatctcaggggctttgtgatcccctctgcagctacacatcgagggtccacacaggagcaaggccacctggaaggaggtccctctgacagccatagggcttgtccccggctctgcctaaagacaggaggaccaggctttaagggataacttatctggagagtgcagatgtcaggtcaggaacccgaaggcctcatgggcaggctggaatgacatctgcctyggaacagatgaaactactgggataaatataaatcctggcatttaagtttagaatgagttgggagagatgtggtttagcagcagctcacgaggaaaagatttggggatccccacttcttgtgggctaggatgagtcaggcgcataaagtggctgccaagg

SEQ ID NO: 492507 - DNA, 478 bp, Homo sapiens
gctgttgcagcccaccttctatctaatgatccctctgctgtctttgccacctgacccctgccatgcatttccctattctcacacctgccttttccctgcagtgaagctggctggagaggagtggttggggaggtgccaagacctgaacaggtgcaggaagccctgacaaagcatgatttgtatatgtgagtgcttaaggcagggatgtggggagaggggcagtcctgaggatggtatcaccatgggttgctttgggacttgagagcctctgaagacacaggcagaggccaggtattactagctcaagactcatctcacctccttctgccttagctatgcagggcatggggctggtgcccgcttccttgatgggcaggctgtcctgcggctgagctgtcgggcagtggcctgctgtttggctgtagcagtgcggccctggctgtgcrtggaaacctggagggggctggcatcgtgctca

SEQ ID NO: 492508 - DNA, 590 bp, Homo sapiens
acaagggatttttttttttttcctgcctttcggcctcagaggccatctgggaaaaagagtttagaatttccctgccatttccatgccgtgctgggaggaacatttgaaatcgggcctggcggggtaccagcaggcagcaatagcaagcggggtggagaggagcagggccaggcccccgagccgtcgccatggcaatccagcctgctttccagtagcttataccacccacgtggagtagcatacactactttgtaatatcgtggttgtgtcgtgagaactttaagattttgcagttccttgtaggcaggagtcctgtttgctgctactttacaatactaggcttaagacattttatgaaatgaactcacasaacagtctctgagaggctcaagcccctccttcccttccgggacggaggatcatagagctgtctggcgcagcgaggcctcccggcgccaccgagacgcgcagaggacggctagagcgttgctcgccgagagacttcctcttcgttaagtcggccttcccaacatggcgcagtctattaacatcacggagctgaatctgccgcagctagaaatgctcaagaa

SEQ ID NO: 492509 - DNA, 634 bp, Homo sapiens
tgtaaaaacgaggcaattattactggcacataggattagaagagttaattcctgtagagcacttacacaatgtctggtgcatgttaagtgctcaattaatgttagctacactagcaagacatggcaaagtcacacgaaagtcctcttccggtccaccctgctggtccgagatcactagcacagtggtggcaagaagtggcctgaatttcagagagcacagggtcaatatttaccagaatttgcctttattctgcactggcccgaagaggtgttttctggggagtcaacccaccgctttgtgcaaccctagagtgtgtctttgtgaggaggcttcaccctgccccactcctttcctgctgctcattttcatgttcagagatggccacagcggtcactgctagtttagttcacttcctcttcattgtaaactccaagtcccaaacctaccagccctcactctcctgagccgctcagcagcccagctratttcatcacagccataactctctagaatagctgccgttacgcaacagctcctagcgcaaaactggtacgactgtgtctactgcaatgtattcatcagtttccacaggcatttatttagtgcctactgtgtgtgtgtcatatagatgcc

SEQ ID NO: 492510 - DNA, 493 bp, Homo sapiens
gttgagcagtagtggacctgggatgcggttctagcaaaatgctcttttcaccagaacccaacatttcccaaagtgtcatccttggaacccatattccaggggctgtgtatttgtgagacctgaaaggactgccttcacggttggagaagcgtgacccgcagatgtgcgtggagggccatcatgaggaagacatcaaagatcctcggcagttctacagttccaaaaaaaaattgattttaactcagcattttgcaaactcattgacctcaaaactcttctttcatggaacatctccctgggtcagttgtccatcttatatagtcaagaaatactgacctgtttttagygtgagagttttccagccagattctgctgatgggtcctgccaggacccatacctgcgctttgaccttgtaggtgaggggaggtttcttttctcacccctagattcatggctgagacacctgtaactaaaggcagcttaataagagaa

SEQ ID NO: 492511 - DNA, 540 bp, Homo sapiens
gctcatctctaatgcactgttaaacactaagacaaatccactggtaaagccagagacaactgggtggctgtggctgctacctccctggtgaggccagtgttaccatatgagtctgacaacattcggaccccccccttctgaaaacgttcatartccctgctcaaggcaggtagactgcaagacccacagcatactccacctttcatcctcccagcacccccagtagcagagacacggggaacggcgatggaatatctggcttcatcttaaaccccaagtccattactcggcaagcctcgatactctttctctgttagagaaattcatggcactctagacctgcctagagagttccccaaggcccccatctctgcccagaagactccagcctcaaacacagaaaaataatagaccttccctagacaccgtgtcccaggtccaggtgtgccccagtcagcttgcggagactttggggctgagctcaggctgggcaacgatgatgataaccactgaactaaccgtgtctgccctgtgcccagt

SEQ ID NO: 492512 - DNA, 552 bp, Homo sapiens
gaagacacacctggggcgagagtatcaagttcttgttgagtgattcatactcyagtaatacacactctagtatgaattacttacctgttcctttccagggttaacctagagcaggtttctaagtgggcaggaaggaggtggtagggagaggtctgaaaggtgagatgctgtcctgggaggcagggctggggaagctcaagtcagcaccgggttttgggggaaaagaggatcccttcttctttgtcttctcctcctcttgcctccagtgctagaaggttttggctgagaagacccaagggtgaaattctcttatccccttctctgtacttgaggctggggctcagtctgacaatttggggaaggctctttcctcttctgtcatgcatttcattgtggccagttctcagactcagccaggatggtatggatgtgcagaaaacaagcggggttggtggggtggagatccccgtgcagagcctggcgtcctgggccggaagcaccctggggactgtcgagtggatgacagccggacactgcgaggccagctagagg

SEQ ID NO: 492513 - DNA, 635 bp, Homo sapiens
cagctagaccgggcatgggagatggaagttacttgccttcccaggtcgaaaacatcagcccctgtcacaggaagacacacctggggcgagagtatcaagttcttgttgagtgattcatactctagtaatacacactctagtatgaattacttacctgttcctttccagggttaacctagagcaggtttctaagtgggcaggaaggaggtggtagggagaggtctgaaaggtgagatgctgtcctgggaggcagggctggggaagctcaagtcagcaccgggttttgggggaaaagaggatcccttcttctttgtcttctcctcctcttgcctccagtgctagaaggttttggctgagaagacccaagggtgaaattctcttatccccttctctgtacttgaggctggggctcagtctgacaatttggggaaggctctttcctcttctgtcatgcatttcmttgtggccagttctcagactcagccaggatggtatggatgtgcagaaaacaagcggggttggtggggtggagatccccgtgcagagcctggcgtcctgggccggaagcaccctggggactgtcgagtggatgacagccggacactgcgaggccagctagaggcactattctatcc

SEQ ID NO: 492514 - DNA, 483 bp, Homo sapiens
tgcggggtgaggtgaggagtgtgtggaggaggaaggatccgcagggcccctcctccaatcctgatcttaactcctcccgagtggacctgaggaaaaggaaatgacatgagaagaaagcaaagaacagatactggagtgtgtcctccagagcagcgggagcctgctcagtagagtagtgtggcaagcaggtagaacacagcacctgagcttacaggcaggagaggatatgactttcaggaggagaaggaaagaagaaaataaaggagatgagcatgaagaggcttctcctccagggctgtgmgtttattcatccacgaatgcaatacttcttatcaaacacctactccacaaaaggctggaagctgcttagccctttcccgtgtggaggagtccactctgtaggagaggagtggcttgcaggtcatcttggtgccatagagcttgggggcagaggaggtctcaccagctcgaaacacaagaggc

SEQ ID NO: 492515 - DNA, 578 bp, Homo sapiens
tgggagatgccacagggagtggaaagacgtctcctagtgggtccaccctcaagagaggaagcaagttagagcagaggaacaagaaagtcatcagtgctccaggaagaagcygaatagctctcacagggcctccttgcgctagacgccttcatgcacaaacattcatgaggtcctcccagcgaggcagatagctgctcatccccatagccaccctcagcccttctcccgctgctctgcgctcggaggcagagctccgtggaccgcatcactaggctcccgactcaggtcacagagagagggtgggaatttccccagccctccgacccctgtcaaagctctgttcccattctgaggccttctacagcgaagggacagctatgctttctccaggccactcacttgtcgcacaaggagtggtttccctaaaccctgcccacatcttggtaaaaagccccttccaaggccagctttgtgggcctgtgacccatgacgtcatcctgggcccggcgcttagaagggcccattcctggtctaactgccgctgttatcatcttgaaattcttaacactttttaacca

SEQ ID NO: 492516 - DNA, 578 bp, Homo sapiens
tgggagatgccacagggagtggaaagacgtctcctagtgggtccaccctcaagagaggaagcaagttagagcagaggaacaagaaagtcatcagtgctccaggaagaagccgaatagctctcacagggcctccttgygctagacgccttcatgcacaaacattcatgaggtcctcccagcgaggcagatagctgctcatccccatagccaccctcagcccttctcccgctgctctgcgctcggaggcagagctccgtggaccgcatcactaggctcccgactcaggtcacagagagagggtgggaatttccccagccctccgacccctgtcaaagctctgttcccattctgaggccttctacagcgaagggacagctatgctttctccaggccactcacttgtcgcacaaggagtggtttccctaaaccctgcccacatcttggtaaaaagccccttccaaggccagctttgtgggcctgtgacccatgacgtcatcctgggcccggcgcttagaagggcccattcctggtctaactgccgctgttatcatcttgaaattcttaacactttttaacca

SEQ ID NO: 492517 - DNA, 424 bp, Homo sapiens
tttccaaatattttaggtgctacctagaagtttcataaacaaaattcacccttagtacatactacgaacttacacatatatgacacacacacacagagttgacttctgaactaaatggcatgggtacacttatacatgacttttttttcaaccaaatgcatggagagaaaatacagtatttataggatgcaaaacttgcatatacagacagccaacttttcatacatacaggttctgcaggactgtctacaggacttgtatatacatggattttggtatactggcacaagttgggggtgtcctagaaccaatcccccacatataccaagggatgactgtaatagttkaaataaatataaatatatttatatatacttaaatggcaattatgacccactaatttcatgatgcattaataggttta

SEQ ID NO: 492518 - DNA, 332 bp, Homo sapiens
tctagagataatttagttatcaatcttctctacttcttagatgcttgactttcctctttagccggtatatttgattatccagcatctgcctgggacamctttagtgactagaaactcacttgtgttgaaatagtcatttcagttggaaatttttgttagaagttctttcttagtgctgagctgaaatattttctgtttctctgcatttgatgtgatacagattggttctaatcctttaacctgacagcctggatcagttaggataatcttggtttttctgccaaaataatctccaaacctcagaagggtaaaaaacctgtttttttttttta

SEQ ID NO: 492519 - DNA, 546 bp, Homo sapiens
ataattaaaataaataataacaacaactataatgaagaatataaaaatagctaagtctgttgaaaactaaaatatgccatatataactcatttaatctatgtaactgtcatacagccttcgttttatggaactagtaactgaggaccaaaatattaaataatgtgtcaaataaagtaattggcagaactaagaatcaaatccaggcaatttgtccaccaatttttattactttcagaataacaggaaaggatatttagcatatttrgcttgatggatattcacacttttaggtatcaattcatctctaagcaccactgggaattcattatcttgcttccttagacatgtctttgaaatgacaaatgaatcacagaaatgtaaatgaaaatcttcagtagttttgaggtcacattccacacaaaattctgagtttttaaatcctgcaaatttcatcccttcattttataaggcatcctggaggtccagtcattctccttgagtaccatattgctctctggctcttgctttattctgtcatccagaaa

SEQ ID NO: 492520 - DNA, 662 bp, Homo sapiens
attacaggcatttatgctactattctctttttaaaaaactgcttcaacaatgaaaggtaaactgaagtttgtggggatgaaaaaaaaacaattcaggtgttgaaatacgtgaagtaggttttgcctctaagtgttctggcmttttctacatggcaatattattgcccaactgtgaggttgtttgttatcaaatttgaaaaggttacctcatgaccaaagaaagcctaaaacacttaaacctctgcttgaatttagaaacagaaagctattcattatatttcacattttctatcttcacttgtcttcaaacacaataatcttgttgaatccaacatcaattgtattctatgaatatttcttgaaagtgaatatagcagtatcaggcaactgctgctgaagggtgatttagctcatctttcttcctattaatattttcatgtttttggacataggcattatttttgtagcactagatgtcctcaaggtaaaatatcacaatatgggtactgaaaacaaaaagttcaatatagccatttcagttttagttttgctgtgtaatacatgaggcaatcccaaagttgaaatttcctagttcttgttagcttacagaagtcattcaacatgcgcatactgaaaactgaaatttgcctatacacatggta

SEQ ID NO: 492521 - DNA, 662 bp, Homo sapiens
attacaggcatttatgctactattctctttttaaaaaactgcttcaacaatgaaaggtaaactgaagtttgtggggatgaaaaaaaaacaattcaggtgttgaaatacgtgaagtaggttttgcctctaagtgttctggccttttytacatggcaatattattgcccaactgtgaggttgtttgttatcaaatttgaaaaggttacctcatgaccaaagaaagcctaaaacacttaaacctctgcttgaatttagaaacagaaagctattcattatatttcacattttctatcttcacttgtcttcaaacacaataatcttgttgaatccaacatcaattgtattctatgaatatttcttgaaagtgaatatagcagtatcaggcaactgctgctgaagggtgatttagctcatctttcttcctattaatattttcatgtttttggacataggcattatttttgtagcactagatgtcctcaaggtaaaatatcacaatatgggtactgaaaacaaaaagttcaatatagccatttcagttttagttttgctgtgtaatacatgaggcaatcccaaagttgaaatttcctagttcttgttagcttacagaagtcattcaacatgcgcatactgaaaactgaaatttgcctatacacatggta

SEQ ID NO: 492522 - DNA, 662 bp, Homo sapiens
attacaggcatttatgctactattctctttttaaaaaactgcttcaacaatgaaaggtaaactgaagtttgtggggatgaaaaaaaaacaattcaggtgttgaaatacgtgaagtaggttttgcctctaagtgttctggccttttctacatggcaatattattgcccaactgtgaggttgtttgttatcaaatttgaaaaggttacctcatgaccaaagaaagcctaaaacacttaaacctctgcttgaatttagaaacagaaagctattcattatatttcacattttctatcttcacttgtcttcaaacacaatratcttgttgaatccaacatcaattgtattctatgaatatttcttgaaagtgaatatagcagtatcaggcaactgctgctgaagggtgatttagctcatctttcttcctattaatattttcatgtttttggacataggcattatttttgtagcactagatgtcctcaaggtaaaatatcacaatatgggtactgaaaacaaaaagttcaatatagccatttcagttttagttttgctgtgtaatacatgaggcaatcccaaagttgaaatttcctagttcttgttagcttacagaagtcattcaacatgcgcatactgaaaactgaaatttgcctatacacatggta

SEQ ID NO: 492523 - DNA, 527 bp, Homo sapiens
ggtttctctttgggtctctatctttgcagttggcttacggatgaccatcttcttgtgtcctcaagggtctttcctctgtacagacatggccctgttgtctctttgtccaaacttcctttgtagtatactttaaacattgatggtgttagccaaacttcatgattcttccttttttaaagtgtcttcatagatattattgtctctattttttctatgaaatttggtattaattagatctggaaatagaaatcttactgacagttttatgaagttcttattaaatttataacttagtgaaaacgtaaatattttgaccaaaagcagatgtgtttttatttcttcaagtctaccttttygtctttagaaatgatttagtttattcatatagatttgaaaatatctagttaagctttttcctaagaattttatatttttgtttatttttcaacggggtcttctctttcattgtatcttttaagtggttattattataaattttttcatgttaactttatattctattctcc

SEQ ID NO: 492524 - DNA, 612 bp, Homo sapiens
tataatcggtgtgtttaagtagcataaaaatgactgcagctcaccttctcttaaatataaatttatttttaaaataacttgtaatataagtcaaagagggttattaaacataaatttatttttaaaataacttgtaatataagcaaaagaggaattgaattttgctttaaatgtttaatattttaaaaatatatgaagtggataaatgcttatcacagaaagtttaacaaataaagtaaaattaaagagtgcgtagacacacacacagaagtttcccattaattctccaatcagaaagaatatttcttcacattttaatgcattaaagaaagtttggtttaaactttaggtacaattttgagactttcacttaaaattatgtcataaatgttttctatgtacataaatgttcttggaaactatttttaaatgcctattttctatgtatttagagaaactaggtgtatttattacataaaaatagaaaatataggtgagcaaatagaaaattcaactaactatgctaatttccaataacttctgrcctattttaaagtatattctgtaatgttgtatgcatttatcactttagaatatcttgatttaaaaaag

SEQ ID NO: 492525 - DNA, 500 bp, Homo sapiens
aacagaactgtttttgagtaaagatcatggagcccacaagggatttccctgtgagttaattgtgagggaggtatgttgtcttttatctctgtagtcatctatttaggaacaaaatgggaggcaggtttgctctactcagttcccatacttgacttttccctttgacatagtgagttcggggtcccaagatttttattttccttccacaaaacattcagatgtccccagaagagacactttttatatccacctaagtactgccacataattggaaaagataatcccatattatttccatgcctctcttgacatatgatatcataatgtatacattcatttttctttaataggaacagagacctacattttcctttgtaatgtggaaaaacaatgtttyaaataattgcactgtatgaattcatcaagttgcattcccaataagccccagaataaaaggctgagttaatttatattaggtcatttagcttgagtccaaggta

SEQ ID NO: 492526 - DNA, 465 bp, Homo sapiens
ttattcacatgtgtattatccataatacaaagttgtcccaattttaagattcccatatttattttctggtttaccttcatatcaccttccaggttcccattggcttagaatataatccaaactgcttatgttggtctatgtcctcaataatctagattctgcaatctctctaacttcttcataaatcactatgttcactgattactaartctcagtaccaaattcattcagttatttgcttctgtgctctttctcttccttgccattcttgtataaattttctcttctgacattttccccactgattatctttgaatagataatactttctctgtcatttgatctaagcatgtatgctgcattctctgagaggtcctcagtgacattactatttaaaggagctctttatctgtgtatcagcacaatgtctgtattatttatttacagtttgtttttcttttttta

SEQ ID NO: 492527 - DNA, 679 bp, Homo sapiens
ccatctcctctgacgtctctatcaaatttcagtctgcctctctgataaggactcttatgactgcatttattttagagctcaccaaggtaattcaggtaaatcttctgatgtatagattcttaacctaataccttctgcaaggattgcttttccattagtaggtaacgtttacaggttccaggggttaggacccgatatctttggggatcaccattcagcacagtacatatgtgtacayatgttacatctgtctgccaaccatagatcccttgcatgattagtccaaagtactagaaagaaattgcacccacccttgtctctttacgtgcacaggggagtacagtgattggatcagggaaactttattgttggctgtgtccaaatgcagggttagagttagggggcatggagtggggatttttggcaagaggggctttagaccactcctgggtttagggaaattaatccaagtatcttcccttgtatggatactgcctcctctcctggttcctgttgcttcatcacaggtggacctttagatttccctgctgggaggtaagtagttactagaccagggtctagacgaaccccctcccactggtcctgtaccagcactgaggaagtaatcaaatgatgtctcttttggcctctcttacactgtgcaaatgtgattattgct

SEQ ID NO: 492528 - DNA, 679 bp, Homo sapiens
ccatctcctctgacgtctctatcaaatttcagtctgcctctctgataaggactcttatgactgcatttattttagagctcaccaaggtaattcaggtaaatcttctgatgtatagattcttaacctaataccttctgcaaggattgcttttccattagtaggtaacgtttacaggttccaggggttaggacccgatatctttggggatcaccattcagcacagtacatatgtgtacacatgttacatctgtctgccaaccatagatcccttgcatgwttagtccaaagtactagaaagaaattgcacccacccttgtctctttacgtgcacaggggagtacagtgattggatcagggaaactttattgttggctgtgtccaaatgcagggttagagttagggggcatggagtggggatttttggcaagaggggctttagaccactcctgggtttagggaaattaatccaagtatcttcccttgtatggatactgcctcctctcctggttcctgttgcttcatcacaggtggacctttagatttccctgctgggaggtaagtagttactagaccagggtctagacgaaccccctcccactggtcctgtaccagcactgaggaagtaatcaaatgatgtctcttttggcctctcttacactgtgcaaatgtgattattgct

SEQ ID NO: 492529 - DNA, 271 bp, Homo sapiens
aaggaagttaccaaaacaattaagaattgatttaattaacctttgtatcttagtattgacccagcctttataacagcctcttaaactctggaataccccaagtccagagtgtaggcgtgtttgcacacgcacacacgcactcacacacattcacacacacacccaaacacatatactctcgcgcagatacaccaactgcaacagcatttttaattgaaaagcataaatttggamtgctaaaactattaacgatttgttttaattaggaacc

SEQ ID NO: 492530 - DNA, 491 bp, Homo sapiens
caaaatgctaggattacaagcgtgagccattgtgcctgaccactcatgtattcttgattgaaataatttgcttrtttcttagttctacagctgaccctctttcactgtttccaaggtcaatagctgtgtgttcacacttctgcattttataaatgttcctgtgagttttttgtaaggaagaattaactgtcaggaatcaatgtcatcagaaccttgcaaaagaagtttctttagcccaggtttgtgaaagaggcttctctaattttcaaggatgggggtgataagagcaacctttgccattagcccttccaggaccccatgtaagactttagacaccttctcactcatctcagaccttctcagggtaacttggtgaaaatgtcttccgatctgagccccagtgagcctccctgcaacttggcgacgaggggcttgaccagaaaaggtcaacccgagtgtccctgaccgttgaaatgattggcaaaatggag

SEQ ID NO: 492531 - DNA, 491 bp, Homo sapiens
caaaatgctaggattacaagcgtgagccattgtgcctgaccactcatgtattcttgattgaaataatttgcttatttcttagttctacagctgaccctctttcactgtttccaaggtcaatagctgtgtgttcacacttctgcattttataaatgttcctgtgagttttttgtaaggaagaattaactgtcaggaatcaatgtcatcagaaccttgcaaaagaagtttctttagcccaggtttgtgaaagaggyttctctaattttcaaggatgggggtgataagagcaacctttgccattagcccttccaggaccccatgtaagactttagacaccttctcactcatctcagaccttctcagggtaacttggtgaaaatgtcttccgatctgagccccagtgagcctccctgcaacttggcgacgaggggcttgaccagaaaaggtcaacccgagtgtccctgaccgttgaaatgattggcaaaatggag

SEQ ID NO: 492532 - DNA, 484 bp, Homo sapiens
tgccaatgggagtcgcgtatgaatgtgcacaaagtacgtgtaarttctagaaaacgaaaccaaaaacagaaaatcttttttccccctgattttatactacatttttaggtaatggattgagttcgtgtttctgactccaaaaatcgtactaattagaatggaaagttcatacagacatgaatgatagaaggtgttttattccatcattagtttaagaataggaaatcaacctgaataatagcaggagattcattcaaccactcttaacacattaagttcatggagactggggttactgtggagaggcttgtgaaacaggtgtttttggtaaaaatggttacaatttattttttgagatggagtcagcctctgccacccaagctggagtgcagtgacatgatctcagtttactgcaacctccgtctcctgggttcaagtgattctcctgcctcagcctcccaagtagctggggttataggcatgt

SEQ ID NO: 492533 - DNA, 605 bp, Homo sapiens
aagtgagagcagagttgtgaagtagacctttctgtacctaaagttacactgttaatatttaaaaatagaatgtttcaatttcacagtatttgaagtagctgcaatgctaaccacaaaragaaaatctatccgacacacacaagagatgggattcaagtatgttactatgatgaaacaagcaaaatactacaaaaggcagtaagaaagacatgtaggggaaaaaaaatctacaagatttaaaaaatctacagataataatctaatatgtattcttttgtttttaatagttactatgtttgatattctccttttcatgtaatgttggcctgatttaactttgcaatcagaagaaaacaagatttactaaatcccatctgcaagaaactccctttaattctaaggacacacacaggctgaaatggaaaggatggaaaaatattttccatgcaaacaggaaccagcagaaagtacaggtagcagtgttaatatgagagaatagacttttattcaaaaaccataagagacaaagattattataaaatgatgaaagactcaattcaccaagaagatacaacaattataaatatataaacaccaagtgtcag

SEQ ID NO: 492534 - DNA, 605 bp, Homo sapiens
aagtgagagcagagttgtgaagtagacctttctgtacctaaagttacactgttaatatttaaaaatagaatgtttcaatttcacagtatttgaagtagctgcaatgctaaccacaaagagaaaatctatccgacacacacaagagatgggattcaagtatgttactatgatgaaacaagcaaaatactacaaaaggcagtaagaaagacatgtaggggaaaaaaaatctacaagatttaaawaatctacagataataatctaatatgtattcttttgtttttaatagttactatgtttgatattctccttttcatgtaatgttggcctgatttaactttgcaatcagaagaaaacaagatttactaaatcccatctgcaagaaactccctttaattctaaggacacacacaggctgaaatggaaaggatggaaaaatattttccatgcaaacaggaaccagcagaaagtacaggtagcagtgttaatatgagagaatagacttttattcaaaaaccataagagacaaagattattataaaatgatgaaagactcaattcaccaagaagatacaacaattataaatatataaacaccaagtgtcag

SEQ ID NO: 492535 - DNA, 614 bp, Homo sapiens
gttctctgtatttaaccagccatagtgcattcagagataaacagcttttatggactatttgcccaggaattttcagtaaacaactaagttcaggccctgattttatttcggtcagtatgtgcacatattcacttgcaattacccagaaagaagagaaactggttaacaagaaacctaccattatgtcagatgctggaaatcaatctttagctacataatatttacaggaagcattttaagattcataatcgactgggcacggtggctcacgcctgtaatcccagcactttggtaggccgaagcaggtggatcacgaggtcagatcaagascatcctggctaacacggtgaaaccccgtctctactaaaaatacaaaaaatttgccgggcatggtggcaggcacctgtagtcccagctactcgggaggctgaggcaggagaatggtgtgaacccgggaggcggagcttgcagtgagccaagattgtgccactgcaatccagcctgggagacagagcgagactgcgtcaataaataaataaataaataaataaagataaaaaaatcataatccactttttcagtctgtctattatatttcattagtcaattggaag

SEQ ID NO: 492536 - DNA, 614 bp, Homo sapiens
gttctctgtatttaaccagccatagtgcattcagagataaacagcttttatggactatttgcccaggaattttcagtaaacaactaagttcaggccctgattttatttcggtcagtatgtgcacatattcacttgcaattacccagaaagaagagaaactggttaacaagaaacctaccattatgtcagatgctggaaatcaatctttagctacataatatttacaggaagcattttaagattcataatcgactgggcacggtggctcacgcctgtaatcccagcactttggtaggccgaagcaggtggatcacgaggtcagatcaagagcatcctggctaacacggtgaaaccccgtctctactaaaaatacaaaaaatttgccgggcatggtggcaggcacctgtagtcccagctactcgggaggctgaggcaggagaatggygtgaacccgggaggcggagcttgcagtgagccaagattgtgccactgcaatccagcctgggagacagagcgagactgcgtcaataaataaataaataaataaataaagataaaaaaatcataatccactttttcagtctgtctattatatttcattagtcaattggaag

SEQ ID NO: 492537 - DNA, 614 bp, Homo sapiens
gttctctgtatttaaccagccatagtgcattcagagataaacagcttttatggactatttgcccaggaattttcagtaaacaactaagttcaggccctgattttatttcggtcagtatgtgcacatattcacttgcaattacccagaaagaagagaaactggttaacaagaaacctaccattatgtcagatgctggaaatcaatctttagctacataatatttacaggaagcattttaagattcataatcgactgggcacggtggctcacgcctgtaatcccagcactttggtaggccgaagcaggtggatcacgaggtcagatcaagagcatcctggctaacacggtgaaaccccgtctctactaaaaatacaaaaaatttgccgggcatggtggcaggcacctgtagtcccagctactcgggaggctgaggcaggagaatggtrtgaacccgggaggcggagcttgcagtgagccaagattgtgccactgcaatccagcctgggagacagagcgagactgcgtcaataaataaataaataaataaataaagataaaaaaatcataatccactttttcagtctgtctattatatttcattagtcaattggaag

SEQ ID NO: 492538 - DNA, 614 bp, Homo sapiens
gttctctgtatttaaccagccatagtgcattcagagataaacagcttttatggactatttgcccaggaattttcagtaaacaactaagttcaggccctgattttatttcggtcagtatgtgcacatattcacttgcaattacccagaaagaagagaaactggttaacaagaaacctaccattatgtcagatgctggaaatcaatctttagctacataatatttacaggaagcattttaagattcataatcgactgggcacggtggctcacgcctgtaatcccagcactttggtaggccgaagcaggtggatcacgaggtcagatcaagagcatcctggctaacacggtgaaaccccgtctctactaaaaatacaaaaaatttgccgggcatggtggcaggcacctgtagtcccagctactcgggaggctgaggcaggagaatggtgtgaacccgggaggcggagcttgcagtgagccaagattgtgccactgcaatccagcctgggagacagagcgagactgcgtcaataaataaataaataaataaatamagataaaaaaatcataatccactttttcagtctgtctattatatttcattagtcaattggaag

SEQ ID NO: 492539 - DNA, 501 bp, Homo sapiens
tgtctgtgattgtgttttattatacttttccataaggagtgatgacattctttaaatcagagtagatgtctcattttgtggataatacaagcaatacaaacaaaaaattaaaccagggttatctgtatagaaatgttaggtattactgccgggcacggcggctcatgcctgtaatcccagcattttgggaggccaaggcggtcggatcacgaggtcaggagatcaagaccatcttggccaacacggtgaaaccccatctctactaaaratacaaaaaattagccaggcgcggtggtgggggtctgtagtcccagctactcaggaggctgaggcaggagaatggtgtgaacccaggagtgggacattgcagtgagctgagattgcgccactgcactccagcctgggtgacagagtgagactccgtcccctcccccccccaaaaaaagagaaagaaatgttaggtattatttttgacacatcaagtgacatttagtatctacc

SEQ ID NO: 492540 - DNA, 501 bp, Homo sapiens
tgtctgtgattgtgttttattatacttttccataaggagtgatgacattctttaaatcagagtagatgtctcattttgtggataatacaagcaatacaaacaaaaaattaaaccagggttatctgtatagaaatgttaggtattactgccgggcacggcggctcatgcctgtaatcccagcattttgggaggccaaggcggtcggatcacgaggtcaggagatcaagaccatcttggccaacacggtgaaaccccatctctactaaagatacaaaaaattagccaggcgcggtggtgggggtctgtagtcccagctactcrggaggctgaggcaggagaatggtgtgaacccaggagtgggacattgcagtgagctgagattgcgccactgcactccagcctgggtgacagagtgagactccgtcccctcccccccccaaaaaaagagaaagaaatgttaggtattatttttgacacatcaagtgacatttagtatctacc

SEQ ID NO: 492541 - DNA, 596 bp, Homo sapiens
gtggtgacatatgttactcaggtctgatatctttccactaatggaggaagcaatttccctggctctgccaatcacttgtttaggcacatattcatcacagtttcagggcgtggacaatagataattattagcaacattctttcttaagtttacaaataactaacaatgtagaattttcaaaatgaagatatcaaatgaaaacaaggtaaatcagaagaaaactactgaactagaaatgtgaagaacctccaaaatccagtgcttaaacaattttgtcattgatcataggtcttaatgaataccttaattaaagtcttaatgaattcccagaaccaaaaagtaaggcacaattatgactttttatatatacctgtggatatagacaggcatatrccatgagacataagggtagacctggtggcagctaattaaggaagttaaaattgtaaacattatcagtggaaaagagactgttctctttaaatggccccagagtcaaagttgaatctatatattaattataaagatattcatggattctctgagcaggggatataaaatggaagcaatagtaatgaaatagagttaagcagact

SEQ ID NO: 492542 - DNA, 646 bp, Homo sapiens
cttttttttttttttttttttttgagasccagtttcactctccccccaggctggaatacattggtgcaatctcagctcactgcaacctccgcctcccaggttcaagcaattctcctgcctcagatttctgagttagctgagactacaggtgtgcaccaccacccctagctattttttgtgtgtgtgtgttattggtagagatggggttttgccatgttgaccaggctggtctcaaactcctcacctcaagtgattcacctgcctcggcctcccaaagtactgggattacaggtgtgagccaccacgcccagtcctaggggcaccttcttctccaggccatcactaagtcgtatatggatggtgaggacagaagcaactaacccagtcccagaggaggaggccttttaactcacactccagcagagcaggggtctgcatacattttcttaaagggctggatagaaatattttaagcttttcagaccagaaagtttctattgcaactattcactctgctattgtatcaggaaagcagccatggacaatacacaaatggacaggtatggctgtgtttcaataaaactttatttataaaaaacacaggcagttgtttgctgacctgctggggtgggagccttgctgaggg

SEQ ID NO: 492543 - DNA, 584 bp, Homo sapiens
tgatccttgtaatccaattaggtgatgcaggaagctatatcttaattcctgacttcattgtgacttgcctggtcacaggcaaaccttgtttaataaggtgtcacctaaacactgagtggtgcatacaaaatgggcacagaacggtgatggggttgggggctgaggggaggaggtgactgctgttgagaatatgtcctgtctcaagcagccaataggggacttagaagctccatgtcctcatcagcgaggcttgtgattggaggaggcttgtgattggaggaggcttctgatcggtggaggcttgtgattggagaaggcttctgattggaggcagcttcatctccccttctctccatccattttgctcctccggacctgtgtgtgacaactgtctgtctggtggctggaactcatctgacaataggaacaacaatcrtttttacatgattgctacttactgagggcccacttcatacctggcattttacacacctggcccaaaacacccttgggcagagtagattgtatcctcattctaaggatgagaaaactgtgactcagagagattaaggcatttgtctcag

SEQ ID NO: 492544 - DNA, 492 bp, Homo sapiens
catttttattaatttggtgtcatytgtctcctggttattttaatcatctctcattatgagaaaatgggaaaacttcctgaaaaaaaaaaaagtagagtcatcttgctctattttattcctcgctttgttttagtgtgaaaagtagcttgttccagttcagtttgggaatggaggttactgatgcctgattaaatgtagttctagatttcagagggaaaagctcccttatctcacacaagtcagacaaagctgttcaagtcatacacaagttgagacgtgttgaaagtggcctggaaccactaacagccaaatcatcatcattatcatcttttttttttttttttggagacctactatgtgctgaatgtgctgagcatggtgctgggtgagctcttctctccagtcctcccacccatcctgcaaaaggacgtaccagtatccccatttacaaatggggttcagagaggtcagctaacctggccaaaggtcaca

SEQ ID NO: 492545 - DNA, 573 bp, Homo sapiens
tgggtgtgggggtgactggggaaagggatgcccaggagtgggccgctccctagtcaaaggagggggcgcgggagggagtgagaaaaaaatgacgtgtctttttggaccggcaacagctacggaggttggccrcggcattgcccgcatccctatcctccacccgtccctggcgagtcactcacccagaagccaggctacgtagggccgcccccaaggccgccgagtttcgattccttagtgtttggaaacggaccgaaaacaaaccgggtcgccaggggtcaccacgggcttccggtttcttcgaagacaccgccgcttccacagcgaagggagctgctccgggcacgtcgcggagggagtcccatttcttctgactcggcaggagcccgggacgttctggaaggagggacgagccgaggcaggaggggccgggccgacgcgagagaaggcccgttacccagcaatacgcgcgcgagacccaggcccgccgtcgggaccagcacgggccggagggaggggaagcactccggaaagtgattggaagtgtggatgagctctcagccggaaaagggg

SEQ ID NO: 492546 - DNA, 573 bp, Homo sapiens
tgggtgtgggggtgactggggaaagggatgcccaggagtgggccgctccctagtcaaaggagggggcgcgggagggagtgagaaaaaaatgacgtgtctttttggaccggcaacagctacggaggttggccgcggcattgcccgcatccctatcctccacccgtccctggcgagtcactcacccagaagccaggctacgtagggccgcccccaaggccgccgagtttcgattccttagtgtttggaaacggaccgaaaacaaaccgggtcgccaggggtcaccacgggcttccggtttcttcgaagacaccgccgcttccacagcgaagggagctgctccgggcacgtcgcggagggagtcccatttcttctgactcggcaggagcccgggacgttctggaaggagggacgagccgaggcaggaggggccgggccgacgcgrgagaaggcccgttacccagcaatacgcgcgcgagacccaggcccgccgtcgggaccagcacgggccggagggaggggaagcactccggaaagtgattggaagtgtggatgagctctcagccggaaaagggg

SEQ ID NO: 492547 - DNA, 614 bp, Homo sapiens
gccaggcaatgatgctgccagtatactcgattaaattcttcaaagtgtattccattttcttccctaagacaatctctttaatttctcatctaattactcaaacataatttttggaacatgtcacattccacaggatgaacttacaaactgccaaccccaaactccttttatttaaaccacagccttacaaggttgaaagcacagtaacaggccaaaagacattttttctcgaggccrtgggatgtggccagataaatgcttatagtcgttgcatttgctgacttgctgttttgctggcatacgttcttcaccgttccatcctacgcctttgttctgagttaggttctttcctgtaaactattaagggatctgctagcaatgagctattttctttcctcttgctgactcatatataactttagcaaactcaaaaccatttattgttaggtattatgctaatttaactaactgctttcactgtcaccattcatttctgcagtgtgctgaacagctaagttttttgcccttaattgataaataaattggggagggcggagagaaattaaatttctatggagcttactttacttcagaattaatgccagcagtttccc

SEQ ID NO: 492548 - DNA, 614 bp, Homo sapiens
gccaggcaatgatgctgccagtatactcgattaaattcttcaaagtgtattccattttcttccctaagacaatctctttaatttctcatctaattactcaaacataatttttggaacatgtcacattccacaggatgaacttacaaactgccaaccccaaactccttttatttaaaccacagccttacaaggttgaaagcacagtaacaggccaaaagacattttttctcgaggccgtgggatgtggccagataaatgcttatagtcgttgcatttgctgacttgctgttttgctggcatacrttcttcaccgttccatcctacgcctttgttctgagttaggttctttcctgtaaactattaagggatctgctagcaatgagctattttctttcctcttgctgactcatatataactttagcaaactcaaaaccatttattgttaggtattatgctaatttaactaactgctttcactgtcaccattcatttctgcagtgtgctgaacagctaagttttttgcccttaattgataaataaattggggagggcggagagaaattaaatttctatggagcttactttacttcagaattaatgccagcagtttccc

SEQ ID NO: 492549 - DNA, 384 bp, Homo sapiens
gctggattcaaaactataaagcacagaagcaaaaaagaaaaaaataaagaaattatttggtgaaaaagatttggaatccatacaatgaaactaagaccattatatgggctggtagtaatcttgatttaagcaacrtcctatcctttctagttttcagatttttaatttaattcaaagatgatttttaagtctaattatttccagatgagctcatctgatatcagcatcttggaaaagtggatcaaaacaggccttggatctgaacctttacgttacagggtaggttgctcaaatttttgtctattgcattacagagttttttctaaatatttcaattttgccatctctaggttagggcactttttttcttatccatttattcta

SEQ ID NO: 492550 - DNA, 590 bp, Homo sapiens
ctgttgcaagattctagtttctttgcaagcacttatttgtttccttaaccttcccacacctttgcaaattgtctctgtaatttttttattttagaatacttaatagacaaataaagattgtttatattcaaggtgttcaacataataatttgatatacrtacacattgtgtggttattgccacagccaaattaactaacacatccatcatcacccatgctgtacattagattcccacaatttgttcatcttgcaggtttgtactatttgatcaaattattgctgtatttaattctctctacctttacagttgtgccatttctttcctgatgggcttcctaatcaataaagtaatttttaccagaagcagcctgagggaggaaacagccatcaaaatggaattctggggtttggttgcacatgtcttcaatgatcacattgaggttatactggtagtctgtggcacagcctcgtatcatggttgttcagtttatgggctgcagcatatggtcactgtggtgacaatggtgattatgattgtagggtgagttggttgctctgattgcccttgagaaagcaggctaagaaaag

SEQ ID NO: 492551 - DNA, 590 bp, Homo sapiens
ctgttgcaagattctagtttctttgcaagcacttatttgtttccttaaccttcccacacctttgcaaattgtctctgtaatttttttattttagaatacttaatagacaaataaagattgtttatattcaaggtgttcaacataataatttgatatacgtacacattgtgtggttattgccacagccaaattaactaacacatccatcatcacccatgctgtacattagattcccacaatttgttcatcttgcaggtttgtactatttgatcaaattattgctgtatttaattctctctacctttacagttgtgccatttctttcctgatgggcttcctaatcaataaagtaatttttaccagaagcagcctgagggaggaaacagccatcaaaatggaattctggggtttggytgcacatgtcttcaatgatcacattgaggttatactggtagtctgtggcacagcctcgtatcatggttgttcagtttatgggctgcagcatatggtcactgtggtgacaatggtgattatgattgtagggtgagttggttgctctgattgcccttgagaaagcaggctaagaaaag

SEQ ID NO: 492552 - DNA, 642 bp, Homo sapiens
attcaatagcatttattagcacgttatattccaagccctgttccagctgctggcaattggcagcgagctcaacgagcaagaattatgcttgttttaagcttgtcttccagtagaggaatacaaacaataaaaaaagaaagtatccatcaatgacaaatgttgtaaaacatgttggtatcatattaagtgtttggtgtagagtgggagagggggtttatttkaaacttaatgtccaaagaagaattcttcgaggaagggaaattttaatctacagtcttcatgagaagagtaagatgtctgcaaaatgtctgcaaagatcttgtcaaagacctttccagatagaggaaataactattgatagtataaaggtttatagttggaaagagccttccacactggagtaacagaatgccagagcggttggaacatagcaaaaagggacagcattatatgagatgagttttgagagacaggcagatgctagtttatatgtagcctcataagccaaagtaaacaagcaaagaattgttattattaagcaagagaataacacaatctgatttactgagcacagatcaccctacttgttacttgacatactgtgtagtacatagaagaaggagaatattgcagtgattcaag

SEQ ID NO: 492553 - DNA, 642 bp, Homo sapiens
attcaatagcatttattagcacgttatattccaagccctgttccagctgctggcaattggcagcgagctcaacgagcaagaattatgcttgttttaagcttgtcttccagtagaggaatacaaacaataaaaaaagaaagtatccatcaatgacaaatgttgtaaaacatgttggtatcatattaagtgtttggtgtagagtgggagagggggtttattttaaacttaatgtccaaagaagaattcttcgaggaagggaaattttaatctacagtcttcatgagaagagtaagatgtctgcaaaatgtctgcaaagatcttgtcaaagacctttccagatagaggaaataactattratagtataaaggtttatagttggaaagagccttccacactggagtaacagaatgccagagcggttggaacatagcaaaaagggacagcattatatgagatgagttttgagagacaggcagatgctagtttatatgtagcctcataagccaaagtaaacaagcaaagaattgttattattaagcaagagaataacacaatctgatttactgagcacagatcaccctacttgttacttgacatactgtgtagtacatagaagaaggagaatattgcagtgattcaag

SEQ ID NO: 492554 - DNA, 587 bp, Homo sapiens
tctttaaaaatattttaaccttagagagtcctctttaagaaataatatcacattaaaaattatctgttgccagtttaaagtttatgactataaatgtgcttttaacataatcccatgttgcttggaagctgaaaaatagttgtatagttctttaacaagagcaataacaaaatatcaactgtgtcaaaagagattttagctgcatctttcactaagaaatttaaatgttcgcaaaacgagcaatataaaattacctatgctgtatattttaatctcctgtggcaatctatatttttcaagttttatttagattcaggaggtacctgtgcaggtttgttacctgggtatattgaataatgctgaggtttggagtacaaatgatcccatcagccaggtactgagcatagtacccaatagtgagattttcaatctttgccctccttctttcttcccaccttttgtagtcacgagtgtcwactgctgccatctttatgtccatgagtatccagtgtttagctcccacttataagtgaggaaattgggtattttggttttctgctagtgcattaatttgcttagaataatgc

SEQ ID NO: 492555 - DNA, 587 bp, Homo sapiens
tctttaaaaatattttaaccttagagagtcctctttaagaaataatatcacattaaaaattatctgttgccagtttaaagtttatgactataaatgtgcttttaacataatcccatgttgcttggaagctgaaaaatagttgtatagttctttaacaagagcaataacaaaatatcaactgtgtcaaaagagattttagctgcatctttcactaagaaatttaaatgttcgcaaaacgagcaatataaaattacctatgctgtatattttaatctcctgtggcaatctatatttttcaagttttatttagattcaggaggtacctgtgcaggtttgttacctgggtatattgaataatgctgaggtttggagtacaaatgatcccatcagccaggtactgagcatagtacccaatagtgagattttcaatctttgccctccttctttcttcccaccttttgtagtcacgagtgtcaaytgctgccatctttatgtccatgagtatccagtgtttagctcccacttataagtgaggaaattgggtattttggttttctgctagtgcattaatttgcttagaataatgc

SEQ ID NO: 492556 - DNA, 515 bp, Homo sapiens
gcaatgccttgccctgcttcagctcaygctcggtgggctgtacccattgtcctggcccctctgtccgaaaagccccagtgaaatgaacccagtacctcagttggaaatgcagaaatcacccatcttctgcattgctcacgctgggagctgtagactggagctcttcctatttggccatcttggaactgccccatctttttcatattcttacaaaaacacacgttttccaaactttgttctacatgtcagcacgaaagaggtgaaagaccagactgcaaagcagtaagagaaggcatttattgggattttaggaattgcaattttggagacacagatttggccaaaggtcaaattgagttccagagggaagggtgtaggggtttatgaaagaatgctgagggtgtttacataagttattttgaaagaattattgttaatggaggtggctgtcttagtacatgagttcacagttcactggttgtcaccgttcaggagttgtagcactggtgaaattc

SEQ ID NO: 492557 - DNA, 618 bp, Homo sapiens
atactatttggaatagtgatatagaatgttctctctgtcctctccctacctccagtgmctctccttttacaggggtggaaatgctgcctctgtcactttcccataagtacacttcatcctgtgttgcctttttatagtctgttcacacctttgtggatgttctttctaatacactttcctcaaaagactcaatttgaggtataagcatctgttcctgctaggatcctgcctaactgacaaacaaatactacagagatatgctttacggagagaacaaaaaagaaatactctgcccacaggaaatgaaagcagacctttaagggtttgagaaaccactcgagatgaagctataaattaagaactaaagccatacatggacaatattaaatcctagataagtcttcacgtgaaagccaaaaaaacaaaattctaaagcattctttccctagtcctggaattttgtgctttatcctgccttatattctaaaacaggaaaagaaaaaaaaaagtcttcatttttctcaagagccacaacaatcatgcaaggaaaagactaatgaaggattatgcacacactgatccacaatctcctaagcccatttaattgaaattgcaggt

SEQ ID NO: 492558 - DNA, 508 bp, Homo sapiens
taaaagtttgcatagatttaaaagtagatattcagcaactttttttttcttttcctactttttctgagaagggtagtagcaagcacagaattttcaaagagcatatagtcacaacatagttgttgtctctctggagttctcataagacactactgaggccaatagatcttcttttgattgtgaacaagactgaatcaaaattattttaggtggaatggagtgaarcacaagggttaagggggcttatagtttcatacttcttttggtcccatgatacctcgatgccttggaatcagaaaccaagcttacaatcttcttagtggatttctgctcagacttattgctagttctcgagtatcactaagtgtgtgactgtgtttatttgtgtgcatttgtgcttatatcccatatggtaaagcaatgtttttgaaactgatggtaattacggatattggggaagtaacaaaagaaaaataaaccatttcataattggtttggttgtataaat

SEQ ID NO: 492559 - DNA, 534 bp, Homo sapiens
tgtttctaaacccagcacctctagttttttttttttttttttcattgagacggactctcactgtgacgttcaggctagagtgcactggtgcaatctcagctcactgcaacctccgctttcccacagggttcaagcgattctcctgcctcagcctcccaagtagctggaactacatgcgcgcaccacctggcccagctaattttatattcttagtagagatggggtttcaccatattggccaggctggtctcgaactcctgacctcaagtgatccacctgcctcggcctcccaaagtgctaggattacaggcgtgagccactgtgtccggctgtagtacctctacttttaatttctaagttacactcacgttctcattctgttgtgatacagttttaatgatgctgattaagaaaaatgccagaaagycaataatacatgcatgtagataatttataacatttgttttacaataacctgataagaaacactagcacacacaaacatgatttattatagctcccataacctccatt

SEQ ID NO: 492560 - DNA, 594 bp, Homo sapiens
aatagtatgaaatgtttggtacaggtaccatcatttaaagatgatggaaatcactaacagataataaaccacttgctccaagtcacacagctggagtgtagcagagttatgaattcaatttggtgtctgaatccagcttcatgagcttcctactgaaaggaccattctcttaggtgatggttctaatatccatccatttttagtccacaattctcaggaaagtgacctggagaaaatcaagacataattgsagggaaaaaagttcctagactaaatgttaacatttaaaatggatttaaccatgaagagaaaattatagtcagctaaataaagaatgctcagggtaaaatagaagaagaatattgcaaaggaggagaaataatattcttctctagaagagaaaaaagagaagatataccttttcttcttttcttaccaacttcagataagtacatcatgaacatgggaaagtgggtgttttggggagaggtaggatgaaaatgtaatattaagaaattattgggagcctgaatttcaatcttccttgtagcttattccaacctagttgttgcaagtagagtgggaagccttaat

SEQ ID NO: 492561 - DNA, 603 bp, Homo sapiens
gctggtgtgttatagtggctctgaaatctcctttcttcttcatrggattgctaggttttggttccataagccactaacttgcctggaatcaaactgaaatttgtctcccccatggtgtgaagaagctgatatactgccaagtgttcttggattccagttgctgctttttcagcctaggcccctggtggctccgccttgtctgttttgtttaggagtctgccaaatctgagtttacgctcagatttaaaggctcacccttttggtggtttcttgcctctaggtccccctagtaaacttccagttgctcttcttatgccagaattctaccttgtaacaaatcaatctaataaggcttctgttttctgccacccaaactgtgtgtggccagggaatgtactcaatcaaagacaggacaaactccagtatctcaccagaagcaattctgtctttcaggaacaggcccacctctactctctccctgctttgtcaacaaactccctgggttcatccagaaattttgcaaaatttttgctcatttcagctctttggtggtgctcctccttctagaattttcccttaggtattcagcaattcttctgccct

SEQ ID NO: 492562 - DNA, 630 bp, Homo sapiens
ctggtgtgttatagtggctctgaaatctcctttcttcttcataggattgctaggttttggttccataagccactaacttgcctggaatcaaactgaaatttgtctcccccatggtgtgaagaagctgatatactgccaagtgttcttggattccagttgctgctttttcagcctaggcccctggtggctccgccttgtctgttttgtttaggagtctgccaaatctgagtttacgctcagatttaaaggctcacccttttggtggtttcttgcctctaggtccccctagtaaacttccagttgctcttcttatgccagaattctaccttgtaacaaatcaatctaataaggcttctgttttctgccacccaaactgtgtgtggccmgggaatgtactcaatcaaagacaggacaaactccagtatctcaccagaagcaattctgtctttcaggaacaggcccacctctactctctccctgctttgtcaacaaactccctgggttcatccagaaattttgcaaaatttttgctcatttcagctctttggtggtgctcctccttctagaattttcccttaggtattcagcaattcttctgccctgaaactgagtcatgtaggctgaggtttt

SEQ ID NO: 492563 - DNA, 566 bp, Homo sapiens
ctccttgggccatttctgcaagatgaaggggttggttaagggatacgcactccaaggcacttgtgttctgggcattgtcagcagcaacccatggcgtaaatgtaaccatatacgaaaatggcttatgaatctggaaatatgctgtcctggattatgtctcccacccttaggtggctatttaagtgtaagaattaagaaattaatagtaaatatttaaaattcagtttctcagtaatacaagccaaatagcaagtgctcatagccccttggtggctattggctaccaagaaaagagaaaattctacataagtaactatgctatgtgtattattttctggaagcagaggtaatacacaccaaaattatcaacctacaaaagtattaatttgtttccaaggagtaatggaggtggtagagtcatgtatatacagttttgcattttgggttttttttttttaacmttgctcagatccttttatttttttttctgacaatatagacatgtgcaaatcccttgctttctttttgacaaaaaaagttctgagtattgctaaaagaaaacttca

SEQ ID NO: 492564 - DNA, 552 bp, Homo sapiens
ctgaacaagttagattgaaaaggatatagagaaactcttcatgctgcaggaaaattgggtgaagaatcagattgggagagagcaaagaatacgcctacagtaaaagtggttgcctgtggtcactttccttggaatgagtagaactcatagttgatctcctggtcagaacaagttatcttctaagttcttttttagaaaaacagtttattgatgtatgattgacacatgaaaaggtgtggatatttaatgtctataacttgatacatttttagatcagcatatacccatgaaaccatcatgacaattaatgccataaacatatccatcacttccaaacagttcctcttgctctattctgaaaccaatcttataggaatctcacacctggtsttcctttactgtcattatctctcagcgttaaattgtgtcgctgctgaaattgcttttctcaatcttgtaaatgtttattttatctgccaaggtagacacagtgggtctccatgcttggagtctgaagatacaccctcttgagaaccactcacttattccagc

SEQ ID NO: 492565 - DNA, 493 bp, Homo sapiens
ctaaaagtttactataatatgatagaaacttgtaccaatgttagtttcartaaataaaaacatttctttcattttaacaataaaatgatattgtatctaataacttctcaaattctgactttgctacttattttttaaataattccacaaacacatatttttttagcttctttgatattcctaactcaataagacttttaaaaatctattggcacatgcctgtggtcccagctacttgggaggctgaggtcctgggagcgcttgaactcaggaggttgaggttgcagtgaaccatgattgtgcactacacttcagcctgggcaacagagcaagactctgtctcaaaaataaataaataaataaataaagtatttgatctcttaaatcataaactattctaaaatttagaattccaagtatgtgagttataatccaaaattatgctaattattactaaaatttctttagaacttcccaactttgctataagaac

SEQ ID NO: 492566 - DNA, 643 bp, Homo sapiens
atctgtgcctttgatttttcaaatgccaaaaatatggcccacttaattgatgtatcgatcaatggcaatatttgttttaaatataggtactgtattttaaacatatgtacacgtgcatactacacatttggttagctatagagacgaaagatgatagatagatagataaatagacagacgtagaaaaaaacagattcttgtcatatgaccaggaaaatctaggcacgtggacacattgtayggtgggtagggcagggtttattgggtgaaaggaagaaaggaaagagggactctcagcaaagccagacagagtcccgctgcaggactcccgcctcacggtttgattcccaggtcaccacccaggaactgaccaggccaggctccttcccattgcaaacgcccggaacttcccaaggctccaccccgtcctcccagtgcgcaggtgggcattattcagagagaatcagtgggaaaagggccagcttcatcccgggaccagcagtccggtttttcagccttcaggctattttaggctttaaggcggggtttcaccggggatccttggctgtctcctgtctctatcacagatacactgaagatagatagatacacagatgagctatggctcatctgaaatttttca

SEQ ID NO: 492567 - DNA, 598 bp, Homo sapiens
tctaccttggatagaggaagattaaattccatttatcttctctttttctagtcttctggtggtaattaacagatggtccttgttttctatttgatagaccaatgagcaaacatgwgctttatctctagtgtgcagaagtagtttgtcatctaatgctttatgtcatgacaacattgaacttaatttacaaaaccacttttgcccgcttggtagattattttatttctcagtcacactggttcaaacatcaaatccataaagatacttttcttcactttgtagtggaagttacctcgaactgctattttggttttattttcagaacgagtccttaataaaacaaattaaaaagttaataatatttggaaagtgtagcaaaaatcttgctttttcctgcctcttgtgactatggtctatatcaatgtaaataacaatagaggcaaatgtctactgtttttgttttgtttttcttcatctgtatgatagaaacctatactagttatatattggtgtgtaaccgattactacaacaattagtggcttaaaaaaaccaacatgcattatttcatagtttctgtggatcaggaatttgggagta

SEQ ID NO: 492568 - DNA, 555 bp, Homo sapiens
gcatatatatattttaacacctcaaaatagtttgaaatgagcctcacagccttgttcaatcttcagattacaaataacattgatagcatctcctgtggccttcagttagtagtgccagttaatattgtttctgaaaactttcctctcaaagtgctggctataattttttctccatccagtacacataagaaaaggatttagtaacacttgggcaagtaataaactgtagaactttaaaagtagtaaaggcatataccaagcatacgtgactccacacattgtcagaaaggcagtggactggctaacgagtttctgccaagtttcagaagcaaagaatgcactaatgaaaagggtaaggcatccaagcagagtgtctgaattgatggaccayttttgtctaaaactaatttcaacatcttccaatatgaaagcaggcatttgttttacataaggtgaaacactttataagagaaaagaaaactcctataaagcttataagatcagaaaaaattaatactgaatttttataatcaatgcatggagcaatgatataaa

SEQ ID NO: 492569 - DNA, 539 bp, Homo sapiens
agggtcagtcactatgtggtgggaatgcccaggggtgagtgtcggttactatgcagtggaaatctccagtgctgtgtgtcagttcctacagaaggttccgtcactccccrtgcgccccctgtctgggaaccacctctcacgggctctggcggcatccacaggcccccttctttacagatctgttacagcaggtttagaaagctctagagacaccagatcaggatcaaagcaaggagaggccgtggaagacagaaggcagagccccatccaccacctgcccacagcgagacctcagacaggtctcacagcctctctggattctgtgacttcatcagtgaatagcattacagttaaagtcaaatttcagataaacaaatttttaaatcgtaagcgtatctcaaatattgcctgggacatgcactaaaaatcagttatcgtttatctgacattcaaatttaaccaggcattctgcatctgtaatctccaaaatctggcagacctccctgtgatggatttgatccctgtagccaataggatta

SEQ ID NO: 492570 - DNA, 448 bp, Homo sapiens
cagccgggatgaggctggccttggggctccatgacccaggcagggcagaggtcaagttctcccacccgtgccctgaccccagatgggccccagggcctgtatccaggtgagggcttttgcacctacagtgctaaccccgagtcatgaccgagccctcagccaccagatcccccagycccttgggggtgctcaggtgctctaagaatgtggcccggcaggctggggatggggaccgacagcacaggcaaaggaacgcccgggcagggctggacagggactgggcggggctggacaggggcctggagacactcgctgcggcccgccgtcagactggctccctgcatgacctgtggagtgactgtacctctcccggcgtcggagacggggaacgctccacggccctcgtgggtgttacagggacgcgacagtgcgtgtaagccccagcgct

SEQ ID NO: 492571 - DNA, 575 bp, Homo sapiens
cccagccctgtatttcacctagagcaatgggtcagtatctgtggcccctttatgtaacataactaacatgaataataaccagcacagccagtatttataaccagcatctaataagccaagacaccagagcagggacttcaaatactgaaagtatcagacacagagtgtaaatgaaacaactacatttactctatgtacaagaaaacagaagccaaacttgaaattttcctcagtgaaatataaaactatacaagagacatgtctaatttggaagagaaacaaattttgagaactgaaaaatacgatgtccaaaaataaagactcaatggacaagctaaatatcataatttagacagaggaatgcttatcttcagtgagtaaaagaaaataaaccctgacctagaactgtcttactcagtaaaaacatcctttaaaaawatggaaaaaatgaatgcattttcgcacaaataaaaactaaaagaccatcaatggataaatggataaacaatatgtggcatatacatacaatggaacattactcagtcttaaaaaaagaaattttgacacatggtaca

SEQ ID NO: 492572 - DNA, 591 bp, Homo sapiens
tattgtgtttaagagaataatttaaaagcatcactttggttaaaaatgtaatgtttcctaaaaacaagtggaacaaggatttgattagtcaatttaccgaatatcatgaaacaaataccagaatacttaagggtagatgataattatgcagttttctggaaaacaaaagaaaattgtaaagcagataaaagtactaacaaaccaaccatactgagatcttagagaagttgccattctaacatcttgtggttggtattcaatgcataggtatttttctcatcatctcatcagcttcaaagcaaaacatggaccccagctttctttaggaagccgatatgaaaactatacttcataatattgcttctcggacttttggctaagatgaagtgaaaactgtacttaatgtaaaaatgacaagttcatgcattatgcattagaatgagagtttcttgactataatatrcttttcaaaataatcatgagggaacatatgtggcaaagcagaggaatgtgggtacatctggaaagcctttaagacatctcggaagcacaacacaaaatcacgaaaattgtaaacaccttccgtgtggc

SEQ ID NO: 492573 - DNA, 572 bp, Homo sapiens
ttatgattgatgaattatgtgagaattctttttcttttttcatatgttccaaattgactttaatgtacatgtatcacttttatggcaaaacataattctaatctctccctggtttttctgttatttttccatttttagccagtcaaataatttaatttttgcccatcaccaatctctactatacttctgttctcatcttaattagtgctctctgagttctcaggaagatagggaagctctacaataatagcagttctagacaggatcgcccagataagttaccacctaactcaccttctaagtaggtaatgccaatggacaaaaatgtcaatcggtgcctttaaaaactctatggggcaatatatattatcttctttctagacttttttaaacctatgttttaagtcttattttcaatcacttgaattatcccataatatrttacccattgaactcctgtaatcacataatttgggcaaatctgagaatctttttttgagtgctcaccaagaccaaacaatctagtaattagtaataatggacgcactatcaatatgtttttttttcaatcc

SEQ ID NO: 492574 - DNA, 614 bp, Homo sapiens
gctgcctccttcatggagtatatagtgtagaaatgtgtttgcactacttactgtgacataaagatattatattagtttcctattgttggtgtagcatattaccacaaactcagtagctktaaataacaataatttagggttttacatttccagagttcagaagtccaaaatcagtttcactgggctaaagtcaaggtgttggcagggctggtttcttctagaggctctagaaaagaatccgtttccttgcctttttttaacttctggaggctgcctgcattccttggttcatggcccctttcttgaatcattccaagctcttgcttctgtgtcccatctcctactttcataatgaaatctccctcttcctcctttttataaggacacttgtgattacacttagtgctcatccagataatttaaaataaactctccatctcaagattcttaacctaatcctatctgcaaaaaaattattttgctttatagggataaaatcaagaggttccagggattaggacatggataccattgattgacatattattcaacctaccacaaatagtaagttagaaattattaagtgcaaggaaaaaaaaaaaaaaaaaaggatg

SEQ ID NO: 492575 - DNA, 614 bp, Homo sapiens
gctgcctccttcatggagtatatagtgtagaaatgtgtttgcactacttactgtgacataaagatattatattagtttcctattgttggtgtagcatattaccacaaactcagtagctttaaataacaataatttagggttttacatttccagagttcagaagtccaaaatcagtttcactgggctaaagtcaaggtgttggcagggctggtttcttctagaggctctagaaaagaatccgtttccttgcctttttttaacttctggaggctgcctgcattccttggttcatggcccctttcttgaatcattccaagctcttgcttctgtgtcccatctcctactttcataatgaaatctccctcttcctcctttttataaggacacttgtgattacacttagtgctcatccagataatttaaaataaactctccatctcaagattcttaacytaatcctatctgcaaaaaaattattttgctttatagggataaaatcaagaggttccagggattaggacatggataccattgattgacatattattcaacctaccacaaatagtaagttagaaattattaagtgcaaggaaaaaaaaaaaaaaaaaaggatg

SEQ ID NO: 492576 - DNA, 585 bp, Homo sapiens
cagatttggcatgtgataccccattactatatttccagctggttccaatatttgcccaaaatttccacaggaattcaagccaattgtgctgagttcttccagaagcattcatttcactttggaaaaattcccaggacgtgattcatacaggactcctcagagagtatacccgggtaactgcactctagggtcaccctrtcagggttaaaattccagcctcactttcactaagtgtatgacccttaaaaaagaactacatcaccttgtaagccttagtttcctcaccagtaaaatggcatctatacgccaaagagttgttgtaaatgattaagtaacatgaataatgaacttagcatatcacctaacacataaatggttaaaaaatgtgagatatgtctttccagtttaagatgtaaaagtatgaacagaaattttatattttctatattttgtactttaacgttctagcattccaataccgacgcatataaacagagaagtaaacaagaactggcagaaagtattcccagaaaactgctggaaggccatgaaattgaaaaaaaagaataaacaagaaatatggca

SEQ ID NO: 492577 - DNA, 637 bp, Homo sapiens
gctgctcattactcagtcattaatccttttttaaaaatcttaatagccttgtttggatagttcaagaaaatgtcatgaaaaggtttttaactgctgtaaaagaatggtaatacagtatraaaatgaaagagaggttaacacgaagtttttctttagcaatttaaaagctgtgtattttaaatgcttttctgtaacaaaagtaatgattcatattgtcacaaatagaagcaggtatatggagtagttactttcttttaaaatagaatttctgctctacatttttaaagtggagattaggaaatttattcattacttaagcttaaaatgaaattattagataaatatactcctaaaggtatgttagctcaggattctctttcagattattttaattgtactgaaaaagtttaataatctattataatgaaacacagagtgcatagtaaataaatgaaaataaatgttttctgaaaaatgttggtaaaagggaataaaccagtacctgatagtgtgttgaattgacatatttttcttgttttttttttgtgtaattgagtttatttcttaaataaggaaatcttaggtttaagaacatgaaagcaactttttcccctttatcctcatgcttaaataatat

SEQ ID NO: 492578 - DNA, 637 bp, Homo sapiens
gctgctcattactcagtcattaatccttttttaaaaatcttaatagccttgtttggatagttcaagaaaatgtcatgaaaaggtttttaactgctgtaaaagaatggtaatacagtatgaaaatgaaagagaggttaacacgaagtttttcyttagcaatttaaaagctgtgtattttaaatgcttttctgtaacaaaagtaatgattcatattgtcacaaatagaagcaggtatatggagtagttactttcttttaaaatagaatttctgctctacatttttaaagtggagattaggaaatttattcattacttaagcttaaaatgaaattattagataaatatactcctaaaggtatgttagctcaggattctctttcagattattttaattgtactgaaaaagtttaataatctattataatgaaacacagagtgcatagtaaataaatgaaaataaatgttttctgaaaaatgttggtaaaagggaataaaccagtacctgatagtgtgttgaattgacatatttttcttgttttttttttgtgtaattgagtttatttcttaaataaggaaatcttaggtttaagaacatgaaagcaactttttcccctttatcctcatgcttaaataatat

SEQ ID NO: 492579 - DNA, 572 bp, Homo sapiens
taaatgtccgtaattatagaagggaagattggacaataaccagcagtcctatgtgggtttggagccttgataaatacattgcatatttttattcatggactctgatctctccttctctctctctctcwcacacactccttgtccttcttacctgctttccttctgcatagaactaatctcttaaagctcctcaactcacttttgatcgttagaggttagaacctctaacgtttgatcgtttcttggttaaaaccaagaaataggaggacagaaagccaagcagtcctttccatatctttcttgagatctgggaaaacaaaaattgttctttttttttaactgagtctatgtgttaatttcactgaggtaatgggatggttctggaattctgagtctacagacccttgataaagttgagctaaaaaaaaaaaatttccaccccaattcctagcaacctatatttaaccagagcacttgtcagtatgtgttagacagggaaataatagttatcagtctacagtgaattataaaggaaaataactagttaaacttgagatagcaggggtgccgga

SEQ ID NO: 492580 - DNA, 572 bp, Homo sapiens
taaatgtccgtaattatagaagggaagattggacaataaccagcagtcctatgtgggtttggagccttgataaatacattgcatatttttattcatggactctgatctctccttctctctctctctctcacacactccttgtccttcttacctgctttccttctgcatagaactaatctcttaaagctcctcaactcacttttgatcgttagaggttagaacctctaacgtttgatcgtttcttggttaaaaccaagaaataggaggacagaaagccaagcagtcctttccatatctttctygagatctgggaaaacaaaaattgttctttttttttaactgagtctatgtgttaatttcactgaggtaatgggatggttctggaattctgagtctacagacccttgataaagttgagctaaaaaaaaaaaatttccaccccaattcctagcaacctatatttaaccagagcacttgtcagtatgtgttagacagggaaataatagttatcagtctacagtgaattataaaggaaaataactagttaaacttgagatagcaggggtgccgga

SEQ ID NO: 492581 - DNA, 640 bp, Homo sapiens
tatgctaaataaatgagtaaacagtttaattaatcaaaagtactaggggtttttttgcactaaagtgcaaagccatgaggtatgatttgtattgtattgtaattattccattattataaaaacaagatatatttgagaaaagccatatgaaaattaggtcataatctgaagaatgaagaggattccattaactcactagttcccaaaattccatcatgaaggtcccctgttgtagtttttcttccatgatgccaatggtttgaaataaaatgcttttcaaacccactggcttctagtaaatcagtttgtatacccttatacactttctaacaagatttttgcaagaaaaaataaatggcaggggtaaaaacttgttaatgaatgttcatagcaacattccttataatggccaaaagcagaaacaacccaaatgtcatcaaccaatgaacagataaatataatatgatatatccatatagccatgcaatggaacattattcctaacaataaatgagatactaatacatgctgccacatggatgagccttgaagacattatcctaagaaaaagaagccagatacaaaatgccataggctatatgattccatttatatgamatatatgaataggcaaatctat

SEQ ID NO: 492582 - DNA, 597 bp, Homo sapiens
acatgctttaagtttcattaactgaggaagtaataatgatcaaaattatggaatggtatggtgtttttactgagcagcagccagcagagggctaggacggcttcagcctctgatgtggaagtccacagaacaggggcttcaccaaatcagccgggagggagggagagccagcttctgctaccagagatgtctttgttctttttcttgtgagctgtctgaattatgcccttgtctcctgaaactctcttggcaccattcacttcggcytcaatggcaccagaacagaaatgataactaactacaggctccagggttcctaaatccagtcaacaaacagtttacaggaatccagtggattttcccactttttagatgtggattatatcatggcccactcactccacatctggagaaaagcctgcctgttgtagatgcaggacttgactgtgcacttgtgtttgtgcacagttccatggtccacacaccacactcgtcccacttaggtgctttctaataagtcctgaaagtgtagagcttacttcacttaaagattaagggaccaggaaattcttctttaatatgtagaaacgtacacat

SEQ ID NO: 492583 - DNA, 511 bp, Homo sapiens
gccctaatgtggctgtgtctaacagtggagtcgtaggcttttagaatgatacagtactccatggaattgtggcaattaaatgaatgttttgttttcaaagtgttcagattccatttttttaatttgaaaagaggtaaataatgtgcaaagaggagatatgaggtgggaagagggcaggagtttttatcttatgtcttgtccctgtcttgggtttgcccctttggtcctgaagctctgtcctcagacccgttacctagtatctctatagtccttgcccttttgtccttctcttacaaaaagggaacgttgtgttgagcttctgtttttatcttcacttactttgttatctccaaactctttgtctcaratttaatctgtctgtacaggaagaagaatcaaactcattgtgatacacttaggttccaggatgtgaaatacaatacaaatttctgcttttggggctatatccatccatagaaccttataattttttcaaaaggtgatcaccttg

SEQ ID NO: 492584 - DNA, 611 bp, Homo sapiens
cacacccattcataactgctatagtagtttttgtataaataaaaaatacttatgaattaattttggtatatattaatatcagcaagctaacatgagataaacaacacacttatttaactttcagattttttttgacatgcacaaacccttgaaaactcacacaattgttacaaaaataagagcttccataaccataaacatgttagcgttccctcggcctcaccaagatgtcatatgaattttcaacttaggatcttttttggtgtttcattggctagggagctttgtccccaggtcttggcatagctaaatcctttttgtcatacaggtctcagctcagattttatgtcctcaaagaggacttttagactgttaatctaaattaattcttccatccccactcttgcatattcagtaatgctgtatcatacatacaattttcatcttgtgaaatggtcattaatatctaaaatcttgtttatgtatttgyttctttgcttattgaatatttctttccttgaaagcaaggaaacatttcaccttgagagccagaacttacctctcctgctaggtttgggatgcagttaccgcaatttgaactggcacatggt

SEQ ID NO: 492585 - DNA, 667 bp, Homo sapiens
ctcccaagttttgaaccaatcgtaaccccctatatatagcatagagaacgagttactaatttctgttaagctatccctgactctcagcttcaacaggcttaatctctgttgctctatcaaagartaagtagctactgccatggtgatagcttttcaagttgaaggaaaaaaaaggaatgtgctctaatattcttctaagggtttagaagaataattctaagaagggtttagaagaatattagagcatatttctttgaaaagagacaaatctctaagtcatgtgtatctttgaggggttctcctttgttttagaataaagctcatcctccctggcatcttatcaaccttttaagtatctggttccacaaatctctatctgctcatctttagcaagtcccaccactctgggctacttgtattcaccacagtctctcagtctttgcatttttacttttttctctttatctagaactcacttcccatcctctttacagactacaaatttctcaagatttagatcaaagattcctacccccaggaagcctttccttgttggttcatgtcctaaggtctttctttttctgtattctcaaagctgggcctcattccagcctcgagccatacttgccagaaagccgtcactcaataaatgcttcttaaattaacg

SEQ ID NO: 492586 - DNA, 663 bp, Homo sapiens
gcatgaatctaatatacaagagtagactccatatacagggtttcttattagacaaggtatagggcaatatttgaatcatacatttgattgtcaatggctcggccacagcctgatttctgaatcactaggcctgagattaggctcaataatcagtatttatttatttttttttgagatggagtcctgctcttgttgcctaggctggagtgcagtggcacgatcttggctcattgcaaccttggcctcctggcttcaagcgattctcctgcctcagcttcccaagtagctgggattacaggcgtgcaccaccacgcctggctttgtacttttagtagagacggagtttctccatgttgattaggctggtgtggaactcctgatctcagatgatctatccacctcgcccacccaaagtgctgggattacaggcgtgagtcaccgcgcccagccgataattagtatttttaacaagccctagctggcgctgatgctccaggttcaaaccactgtcctcaaatgagaactttagagtaaatatgtgcagaatgattgaagtgagttatttttcttcattatgtctatcatttttcatacttygatattaatgtttgcaaataaaaacaaatgtttgaataactgtaagtcaagttggctccactccat

SEQ ID NO: 492587 - DNA, 234 bp, Homo sapiens
ctcttttaatatattaacatttattatttaagagcattggcttattgtaaggccatgggttcttggtgcttttacacttagtttcttcccctctctgctttattttaccctgatcccaawttttttatgctacacaaagtttggtcatttacagactcccaaaggccagctgctaggtacataaaaaaggtaagctaagtctgccactatgtggctatttgtttatctaagagc

SEQ ID NO: 492588 - DNA, 570 bp, Homo sapiens
ctggtactctgttcccccttcctgagcttcaaccagagtgacttgacttctgtttatttcatatattggagggtggtatgaatggtacttaaaaaaattccagtgctaaaaataaaacttacagatttatggttaagatagaccaatatctcaaagtttaagtatgtatggtgtctgcatgaaatcttttacaaaataatttttcattgatgatgaggtcatatctcaaaatggtccaaatatatattttgtagtcaataagatattcctatgataaggattttttcaggacatattccatcccagtagcttgatgttacccagctctatagttttataaatatgtaggaaaatacaatttactttgtttcccaaatgtaagtccatcttctgaagtggcctttaattatggcartaatctctaaaatcataaaaggcagggaaatgtgtatttgatgtcatgttcctgatttgtttttataagattcatgaaaagactaaaccaaggtgtggacacaggatcggggactagatggatcctcttttggctgttatagcaggaactataac

SEQ ID NO: 492589 - DNA, 648 bp, Homo sapiens
aatgggcattatctcacactactagactggtcctcaaaataggtaggtgaaggaagaagggcttggaaagattaaaaaacaatagcctacaactcttagagagatataacctgcaggcctatttttcagatgtggaaactaaawttcaaagaattgaattgactttgctaaagtcacccaggaaatggataactgaagattcatatctagctcttctgtctccaagttcatttttcacattaacctgcacattctcttgatctcagtcctctacattcaattcctgtgatgagttccagctctcttagggtcacgagcaaatctcaaaatggggtaaatgcagccacagacagaaaaatggagcatctttataaagcatcaccttttatctgaggacagatagcattcttttttattgacataaaacacaaagctatcttggagagtaatgtaaaattcacattaaagatgaaacacgagattttaaagctatcttatgtatgttttgaccctctctggattatactatcaagtcctcaaggcctgtggcagagctagctatagtagtggtagctttggtgtttgaggcaagggcatgcacagggtgcccacagagctggggtctggagtgcattcacacatgaagca

SEQ ID NO: 492590 - DNA, 614 bp, Homo sapiens
attctaacttgggattacaggaatttattttctcacaaccccagaaataaaagtacccccttcctgcctctcactcccaacccctcacttacactggcctgactttcgcatgttccccgggttgggaaggatggggcatgggacttcctggcgtggtttgggcgggaagggagggcacaggggcttcaggaagcatctgtggggttggtgggaaggaagagctagcaggagtgtgaggcaaaggctcctgcatgcccaggtcagtgcaggggaagacagyagaatagtctcctgggggtctcataggactgtggttcttaaggaaaggctggtgaggggaggaagaggagagaagagaataaaaaaagagaggtggggagtgggactgagccagttatctgatgtacacagcatggaatggaatcccactggctaccagtaccctggggagatggaagaacccggggtccatgaaagatctggatggtagggataaggagatgtcctacctcctttgtgtgattagtcttacagattattgcctgtgttgctgagcattagggacttagctattcaacatggggtagaagtactagcctattggtaaactgtac

SEQ ID NO: 492591 - DNA, 498 bp, Homo sapiens
gatgttattcataaatatttatatcatagtctttatgtgtatacaaatgtagatttatgtgaagagtgtcttcttctggggtaagagagagtttggattagactgatttgcagttcttaaattattgtttattgataggtgagaattacccatgacattttggtgtgtaaatgagctctttaaatgactctttaaaaaacacaacatacattgatatatttattcctagatatttgcttataagactctaatcatttattcatagttcagaggcttattgtttaaatgccattttgwaaggtcgaattccgtgaaagaaaacaggattttaactttctgtcatttttaacatttagcatatttgaaattggagataaactattttttcccatacccacatgttcttggaaagaacagatgcaaataattgcccaaatatgacttttaagatataatgtggctgagcacagtggctcatgcgtgtaatcccaacacttt

SEQ ID NO: 492592 - DNA, 563 bp, Homo sapiens
ggaagatcactcagtgttatgggaactgtgaaatcaaggaactggatgttttaaaaggtwaaaaaaaaaaaaaataaaaaaaaggaaagactgaaagataaacttaaaaggaaaccaagagtttggagcttaatctgtatgatgaaaagagccactgctgagttttaagccatgaaaaaaatatgattaaatttatcttccagaaatatcactgatatatgaaggatgaatttgaattgtgggagaagtagtatggaaatttagcctagaaaggagaggatagatgggagaaatattcagtaagcataaaaataaatggataaattcactctcgccatgctcttccctgccaaaccaaaccaaaccaaacgttgtgactgttcctcacctaactataattaatgcagcacaatgcctggcaaataatagatgctcagtttggctcagaattatgaccttgggggtaatttgaaggaaaaaaataattgtttagtggaatgaattttaaaataatcttgaggcatagtgaaaaccttaacacattattctgtacaatctttatt

SEQ ID NO: 492593 - DNA, 644 bp, Homo sapiens
gggagggatagttactatgtgcataaattttaattgaaagaattatgagctcatagctgttaaaatagaaaataacaggttcatttgcataccttcccaaagtataaaaaattaaagcatttgttctaggctgcggaggcagggattttagtggagctaggattcaatatttgcaatattgtttatattttaaactatatggaccrtgataattatccagaaactattaagattgggaatgattcaaaaacattccttcccagccgggcacagtggctcacgcctgtaatcccagcactttgggaggctgaggctggcagatcatttgaggccaggagctcaagaccagcctggccaacatggcaaaactctgtctctaaatacaaaaatacaaaaattagccagcgtggtggcacagtctataatcccagttactcacaaggttgaggcatgagaattgcttgaacccgggagatggaggttgcagtgagccgagatcatgccactgcactccagcctgggtgtcagagcaagactctgtctcaaaaaataaaaaataaaacttcttcaccttggtctaccagtccatctactttcagttcagtccactggttttgattcacaccataacctgacgatattgg

SEQ ID NO: 492594 - DNA, 644 bp, Homo sapiens
gggagggatagttactatgtgcataaattttaattgaaagaattatgagctcatagctgttaaaatagaaaataacaggttcatttgcataccttcccaaagtataaaaaattaaagcatttgttctaggctgcggaggcagggattttagtggagctaggattcaatatttgcaatattgtttatattttaaactatatggaccgtgataattatccagaaactattaagattgggaatgattcaaaaacattccttcccagccgggcacagtggctcacgcctgtaatcccagcactttgggaggctgaggctggcagatcatttgaggccaggagctcaagaccagcctggccaacatggcaaaactctgtctctaaatacaaaaatacaaaaattagccagcgtggtggcacagtctataatcccagytactcacaaggttgaggcatgagaattgcttgaacccgggagatggaggttgcagtgagccgagatcatgccactgcactccagcctgggtgtcagagcaagactctgtctcaaaaaataaaaaataaaacttcttcaccttggtctaccagtccatctactttcagttcagtccactggttttgattcacaccataacctgacgatattgg

SEQ ID NO: 492595 - DNA, 557 bp, Homo sapiens
agaagaagttggaaagaacagacttgctgaatcttccagcctttatctttctcccatgctggatgcttcctgccttcaaacatcaaaccccaagttcttcagcttttggactcttaracctacaccagtggtttgtcagggactctctggctttcagccacagattgaagcatgcactgtcagcttccctacttttgaggttttgggacttggactggcttccttgcttctcagcttgcaaatggtctattatgggacttcaccttgtgatggtgtgagtcaattctccttagtaaactccccttcatatatacatctagcctattagttctgtccctctagagaaccctgactaatacagatatcatggcacattttagctttccaagaagctacaggttactaaaggcagatccaagtaattagtctcttatttttgttctctattggaaaaagaaaataaaacaaaactttctctttctttgatgcataagagctctgagacttataggaccttttccacaaaatagatgtgcctcctcccacctattcacagg

SEQ ID NO: 492596 - DNA, 557 bp, Homo sapiens
agaagaagttggaaagaacagacttgctgaatcttccagcctttatctttctcccatgctggatgcttcctgccttcaaacatcaaaccccaagttcttcagcttttggactcttaaacctacaccagtggtttgtcagggrctctctggctttcagccacagattgaagcatgcactgtcagcttccctacttttgaggttttgggacttggactggcttccttgcttctcagcttgcaaatggtctattatgggacttcaccttgtgatggtgtgagtcaattctccttagtaaactccccttcatatatacatctagcctattagttctgtccctctagagaaccctgactaatacagatatcatggcacattttagctttccaagaagctacaggttactaaaggcagatccaagtaattagtctcttatttttgttctctattggaaaaagaaaataaaacaaaactttctctttctttgatgcataagagctctgagacttataggaccttttccacaaaatagatgtgcctcctcccacctattcacagg

SEQ ID NO: 492597 - DNA, 609 bp, Homo sapiens
attcacacacagaaggcattttgaaagagtaatttcagagtatattcacatccaaggaaaattacattttttgatatccttgctttttataaagcaatgaaattttacatagaattagctatataaaatatatttgataaaagcctgaaatattatactagaaagtcattgtatttttaaaatagaatttcgagtatgtcagtacttagagtgtgaggcggaagacagcacagtacaggatagagctgasaggctttgaagccatattgagccagacctctttggtgtgaccccttggttaagtcatttaatttaactaagccctgttttctcatttttaaaattataggagtgagaataacttcatagcgttattgagaggactgtaaataagtaaagtgactacttaattatgatgatgattataaatgttacatcacattaaacatgcaaaacatttattgcagtgcttgacatataatatacattccgaaaagaattccagttcctttcctttctctctgcaattggcatatcaagctaaggtacaagaaagcagccagtgcaacaaggactggcatataccaaaatgagatgaggactcacttg

SEQ ID NO: 492598 - DNA, 566 bp, Homo sapiens
ctgccatctgtgaggtctgactcacataacagcagggttcctgtgacgtacgaacaactgggcatttggctctcactgtgtcactccatgagagaatcagggtttgaggggaaaaagcactctgattttccatgakcgataaactgtttgttttctgatccagaggttgtgtgtttcctataaacacacacacacacacacacttttaacaaccactcacataggagttctgtacttggtttgttactctgcattgcctttcaatgttgcctgtgtcctgatccgctgtttcatcgcctttgctccagatccacttcttgacctaggtccactgcaacccctagttttaagctccatatgaatatggttcttgaccatattcagcacaattttgtgcttggatttaacagcccttttcatcctgcttctatcaccccgggaactctgattctaagccctgatttcagacgaacacccagtacttgaaagatcttattatgaaaatagggtatattattattggctgtatggccaagaaagacatttgggcttcctgatcttaattg

SEQ ID NO: 492599 - DNA, 471 bp, Homo sapiens
agcaagatatctctgcaatactcacaacacatttgtttaattacattattgaatgtgttaggggaaaaataaagcctgcccactggctgagatcaggcttcggtctcaacacctctttcctcctgaggttcctgcgtttgagttagaggaaacagtgtggacttrtttcttaggagacatggtagagtcacatttttaaaagatgtatttttttcttttcttacaaaattcaaaatgaaataaatgtggccaaataataaataaataatatgagactagttactttggtctgtattcccttgcgggagattgaatacccagggatctttggggtcatttgagtggtatggatagcatggtcccttgagggagacaggaaagtaagaaacattcttccggtgtgacactggtcacaaggatggcaggagatattctaggactttgaccataggaatatatctgtgaacagct

SEQ ID NO: 492600 - DNA, 471 bp, Homo sapiens
agcaagatatctctgcaatactcacaacacatttgtttaattacattattgaatgtgttaggggaaaaataaagcctgcccactggctgagatcaggcttcggtctcaacacctctttcctcctgaggttcctgcgtttgagttagaggaaacagtgtggacttgtttcttaggagacatggtagagtcacatttttaaaagatgtatttttttcttttcttacaaaattcaaaatgaaataaatgtggccaaataataaataaataatatgagactagttactttggtctgtattcccttgcgggagattgaatacccagggatctttggggtmatttgagtggtatggatagcatggtcccttgagggagacaggaaagtaagaaacattcttccggtgtgacactggtcacaaggatggcaggagatattctaggactttgaccataggaatatatctgtgaacagct

SEQ ID NO: 492601 - DNA, 569 bp, Homo sapiens
caacactttaaatttttctagaagttttattgtttatttggaagactggacacacattgatttcattagaagccttttgtttagctgaatagtatattaggacactaccttagatttttctgagatcttaattaaaaattttataggaatgccctttactttatctttgaaccaagttttcttggtagtaccctatgtttaatattttctcagaaggcatttttttaattttttcatcatgtaccccacaaaaagagtaagaattttcaaaaccatcaactttcacctctgtttgtttaccagtcattcctccagttcatctttattctgctgcattttactataaacagcaaaaagaacccagaaagcgactttgatgatttgcttggaaatgaccttaattaggtcatcacattttactagccaatttattaattttcatgttactgcaggtaaaggggctgtgaacgttttctgccacttcataataaggattatttttcctctagtttccaatgatatttaccttacttycctgaaaattctcctctgcagtcctatcaaagacc

SEQ ID NO: 492602 - DNA, 647 bp, Homo sapiens
aatgaacctcaaatttttttttcctgagacaagatctcactcagtggcccaggctacagtgcagtgatgcaatcatagctcactgcagcctcaacctccttggctcaggtgatcctcccacctcagcctcctgagtagctgggactgcaggcttgtgccatcaagcacggctaatttttgtattttttgtagagacaggatttcgccacgttgcccaggctggtctcaaactcctgggctcaagtgatctgcctgcctcggcctcccagagtgctaggattacaggcctgagccactgcacctggccaaattctttttaaatcaaagaaaatgtgtacttttaagtttctgatacaagactacacacacaagacatgcttgacaaaggcttgatttcaagtagcggttggcaaactatcaccaatgggccaaatcgggctcactgcctgtttttgtgaataaagttttattggaacactaccatgcccctttgcttacatattctctatagctatttttctgctgcgtaaaacacgagtggttgcaacagagaccatatgacccacaaagcttwaatatttactatctgaccctttagaaagttttctcactcatgatttaaggaatgacctgtggccatgtacata

SEQ ID NO: 492603 - DNA, 572 bp, Homo sapiens
gctgcagaattagtctctaagggtagttcccagactaacaacatcagcatcactagggaatttgttagaaatgaggccaggcgaggtggctcacgcctgtaatctcagcaccttgggaggctgaggcgggcggatcacctgaggtcaggagttcaagaccagcctggccaacgtggtgaaaccccatctctactaaaaatacaaaattagccaggcctggtggcgcatgcctgtaatcccggcttctcaggaggctgaggcaggagaattgcttgaasctgggaggcagaggttgcagtaagcccagatggcgcaattgcactccagcctgggtgacaaaggcgaaactccgtctcaaaaaaaaaaaaaagaaaagaaagaaatgtacaatcaggtatgtaaattcccaaacatcacccaagactactgaattagaaactctgaggctgggccggcccagcaatctgtattttaacaagccttcctggtgattctgatgcagcctgacattggagaaccaccggtcttcacggatcatggtaatcacattccccttgataattattggttcc

SEQ ID NO: 492604 - DNA, 526 bp, Homo sapiens
cgttcctgcagccctggtcttgcctgagttgatttcaggtgcttttcacttgaaggtgaaaagaggaggaaaaatacctggagagaagggagaggggagattaattctaggcctggtgtctaccccatgtctgatctgatgaaggttctgagactctagaaagatagaagtcaggacctaaggctgaggractccactcatcaaagactctctgacatgctgggcccgagaggggtcatgccccccatccctactctgccacagaccaccacatagcactggcactctgggccttggggtggccactaatagagaatagcaagaaacaggtacctacccagcaactgtcaggagctagggaccctgacagcaaaacagctcagaagaatgtgagcaagccctttcttgaatacctataagacacttgccctgcgaagtcccagggacattagaggagggttgttgttgttttttttttttgtttgtttgtttttgttttttcttttttgtgggggtgaggtgcgat

SEQ ID NO: 492605 - DNA, 618 bp, Homo sapiens
ttgatctatggggtaccctttggaaaaaattggggaatgtgtagcatacaatcctagtcagcatgtaacacgatggcattgggagtgtgcattcaaaacactaacggtggcataaaccatctcaccaggacccaagtgctgccgtttgatgtgaataagccccaggagctgtcccttgccatcacatggcttttctgcagagagcccttcccctgctggctttagccctacrtagctcatggacaggctgtcatttatggccctgggtattacttctttctcctgttgttcaccttttttttcaactaagaatataattctaaacctggaaggcaaactccagggtagaattcatcaaacaggaagctacaaacagtaatttgtgaattgggagaaaacaagcctactcattaaaattccaccgtgagaagcttgcggtgagattccaggttgaaatgtgcttctgaagcaggctttgggatcgatgggtttctctgctctcatttccttctttacttacagaaagggcacaggtggaaacgccatgtctccctgtaggtaacctgtcagttctctgtaaagatgtggacggacttagggtataaatgccagccgtcc

SEQ ID NO: 492606 - DNA, 618 bp, Homo sapiens
ttgatctatggggtaccctttggaaaaaattggggaatgtgtagcatacaatcctagtcagcatgtaacacgatggcattgggagtgtgcattcaaaacactaacggtggcataaaccatctcaccaggacccaagtgctgccgtttgatgtgaataagccccaggagctgtcccttgccatcacatggcttttctgcagagagcccttcccctgctggctttagccctacatagctcatggacaggctgtcatttatggccctgggtattacttctttctcctgttgttcaccttttttttcaactaagaatrtaattctaaacctggaaggcaaactccagggtagaattcatcaaacaggaagctacaaacagtaatttgtgaattgggagaaaacaagcctactcattaaaattccaccgtgagaagcttgcggtgagattccaggttgaaatgtgcttctgaagcaggctttgggatcgatgggtttctctgctctcatttccttctttacttacagaaagggcacaggtggaaacgccatgtctccctgtaggtaacctgtcagttctctgtaaagatgtggacggacttagggtataaatgccagccgtcc

SEQ ID NO: 492607 - DNA, 659 bp, Homo sapiens
ctaaggtctgtcacttctaaatgacagacaatttaaataacttgtgaaatcattagcctcaaagccatctacctagtaatttttcataatcacatccaatgtgtattcttaggaacacacaagcagactccagtttatctttctatctacttcaatatttgatyacaacattttgagaaatatgctcatgactaattttaaaacctctaatttttctttaatggttttatatttcccaaatacacttaaaggggtggggaggagagaaaagtctattaaatacactgaaactttttaatattggttactggattccctaaggagttagtgtacattcagttcagttgaatgaaacagatatttcttcatctcctactatcagtatggtattgtgctgggattacggggagaaataggaatgaataaagcaccttctctacgcttaaggattctagaatctataaaaaaagtaaggtgcacaaccataataaaagctagaatatgatgaataagaacagaaagtcacaaaattctgtcagaatatatcaatgagattttgtctggctgtatcaaggatgacatcatagaggagagagcacttaaacactgccttgaaagatgcattcagttggcctgcagtggagaaggacagaatagtc

SEQ ID NO: 492608 - DNA, 659 bp, Homo sapiens
ctaaggtctgtcacttctaaatgacagacaatttaaataacttgtgaaatcattagcctcaaagccatctacctagtaatttttcataatcacatccaatgtgtattcttaggaacacacaagcagactccagtttatctttctatctacttcaatatttgattacaacattttgagaaatatgctcatgactaattttaaaacctctaatttttctttaatggttttatatttcccaaatacacttaaaggggtggggaggagagaaaagtctattaaatacactgaaactttttaatattggttactggattccctaaggagttagtgtacattcagttcagttgaatgaaacagatatttcttcatctcctactatcagtatggtattgtgctgggattacggggagaaataggaatgaataaagcaccttctctacgcttaaggattctagaatctataaaaaaagtaaggtgcayaaccataataaaagctagaatatgatgaataagaacagaaagtcacaaaattctgtcagaatatatcaatgagattttgtctggctgtatcaaggatgacatcatagaggagagagcacttaaacactgccttgaaagatgcattcagttggcctgcagtggagaaggacagaatagtc

SEQ ID NO: 492609 - DNA, 623 bp, Homo sapiens
catggcgatttctcctagggctattcacatttcttttccttctcatttccttgtagctataaggaggaagggttaatccactgagaagcaaagatgatagctgaaacacttggctgcttaatcatttgttcttccaggatcctaaaagaacaataagaagtcttggcaattgcttccaattacagtccttttaaaataaactggtatcaataatggttttttataccaacaaagatataacyattaataactaattataagtaaggtttgttaaaccagtgctgatttattcaaaatgatatgtaattcaaagtcactggtagtctttaactgattagatgttatgcattctttaacaaaacactgggaagaatttaacctcaagtcaattaattaatgttattgaattctggtttgttgcttgatgaattaataagagtttgctgtaatcagccatagcatcaactttggactcacaaggatgccagatatgcaatctggtgaccttgaataggtgacacgtttctatcaactctcctctgccacccatcttctccttctactcaatttcacttttgcctgacaaaaagactagagcagcttgctggagatgcagcatggtt

SEQ ID NO: 492610 - DNA, 469 bp, Homo sapiens
cctatatagggcataatacagtcagaatggcaaccatttattgggatgttatgtgtctggcatggaaagtgttacttgctttattatcttaacaatcctgtaagacaggtatcaatatccctattttactgataagtcgattttaaatttctattttgagacaaagtgatttgcccaaagtcaccttacagagccagcaatctaatacaagtctgtgtgaatttaaagtctcttctcttgctgctgaactagtcatttaattttttaaaatcagaaacaagtttataaagttgygtaggacatgaataatataatatattaattggctttccccttttcagttttaccattatgtaaataaagttaaatatttgtataaaatttataacctgtcgctatcatgagattttttttttttttatctagaagaaacttgagaatagctactccaccccattcatttataaat

SEQ ID NO: 492611 - DNA, 469 bp, Homo sapiens
cctatatagggcataatacagtcagaatggcaaccatttattgggatgttatgtgtctggcatggaaagtgttacttgctttattatcttaacaatcctgtaagacaggtatcaatatccctattttactgataagtcgattttaaatttctattttgagacaaagtgatttgcccaaagtcaccttacagagccagcaatctaatacaagtctgtgtgaatttaaagtctcttctcttgctgctgaactagtcatttaattttttaaaatcagaaacaagtttataaagttgcgtaggacatgaataatataatatatyaattggctttccccttttcagttttaccattatgtaaataaagttaaatatttgtataaaatttataacctgtcgctatcatgagattttttttttttttatctagaagaaacttgagaatagctactccaccccattcatttataaat

SEQ ID NO: 492612 - DNA, 432 bp, Homo sapiens
attcaccttttgaacgccaaagtggaaagaggggaagaggaaggctgagaagagacttaagtactattacgagtgagcttggtgttgataaggtcgatgcctatacatttttggaaagacagtrctgtttgaatgtgtttgactttctaagggcccggtaactttcaaagttttttatgtgttttatgagggacagaatttgcactccatgtttggctaagaaaggagattcagtaatttttatatttcattgtgtcctgtaagtaaaatgtgcagtatattatgaaaagtgagaaagaagataattttcagctaaagtactagtcagcagttaattttaattttcttttcttctttgtaaggttttttttaaaaaattttttttacttagaagaattgttttagtaaaaagtaaaacatctatagcacatt

SEQ ID NO: 492613 - DNA, 432 bp, Homo sapiens
attcaccttttgaacgccaaagtggaaagaggggaagaggaaggctgagaagagacttaagtactattacgagtgagcttggtgttgataaggtcgatgcctatacatttttggaaagacagtactgtttgaatgtgtttgactttctaagggcccggtaactttcaaagttttttatgtgttttatgagggacagaatttgcactccatgtttggctaagaaaggagattcagtaatttttatatttcattgtgtcctgtaagtaaaatgtgcaktatattatgaaaagtgagaaagaagataattttcagctaaagtactagtcagcagttaattttaattttcttttcttctttgtaaggttttttttaaaaaattttttttacttagaagaattgttttagtaaaaagtaaaacatctatagcacatt

SEQ ID NO: 492614 - DNA, 351 bp, Homo sapiens
ggaagtggggatggaaaaaacagagacaccccaagagctgggtaaagggggaggccaaagggaactgaggcaggcccaagraaggagggagagcaagaaaatggtagactcagacggagttaccatgcagacgaggagggtccaagagttaagagaacggggcaggcaaagcaaagagaggctgggaaagtggctcacgcctgcaatcccagcacttagggaggctgaagcgggaggatcgcttgagccccggagttcaagaccagcctgggcaacatggcgaaacctcgtctctacaaaaaattaaataaaaaattagccggctgtggtggcgcgtgcctgtagtcccag

SEQ ID NO: 492615 - DNA, 465 bp, Homo sapiens
gtactgccacatatgagtagagggaaaatgaaaaaggtaggttaaggaggtagataatttgttttaaatcccttaaatctgaaacatgtgtggcctccaaatgaaactgtccccctaccaggcatacaagcctagagatgttggctggaaacagatacttggaagtcatcaacatttaggtaatagttgaagctgtgggtgtgaaagagattgtccaagtgaagtgtacaaagtaaaaaaaaaaaaagaagaagaagaatgaagggaccccacaaacaatttatttagaaaggaagaataaagaatcagagaaggaaatgaagaaccaccagtgttccaggcccagttcaaggcctgaagaatatcttgtctagggtggrgaataggagtcctcgaaggaaacaagagggaaatgacatcgccaaatgagaggcggggaatagtgctacccaggtaggcagtggc

SEQ ID NO: 492616 - DNA, 555 bp, Homo sapiens
atttgcaactgctctgaaaagtacaagtaggatcaagtcatagagaacgtccaaggtaaaagtctgccttttcactcacattctggaagctaatgttactttgtaagccattttttacaaatttttttaaggtaaaaaaccaagcaacagatctaaatgatgaatacctaaaggacagaacactctgaggtgttctgtgacaaagttaaccttgagattcataactragtctcaaacataggaaaacagaggactaagaatacaccatgtgcacctgcatgcaggctcccagacacattcaaaaatcctaaaagttacctttgaaattggggggtgggagaccacaaggggatagtggagaaaggacatgaataaattctgaagtcttctcaaaatattaactaacattccgacagcccatttgggctgccccatgaatacgttcttccaaaaaggagctctgcactgccccctgacaaatgaaggaattaatttatttcatagtgccttgcatacattagggctgtagtaagaattattaaatggaattatatt

SEQ ID NO: 492617 - DNA, 555 bp, Homo sapiens
atttgcaactgctctgaaaagtacaagtaggatcaagtcatagagaacgtccaaggtaaaagtctgccttttcactcacattctggaagctaatgttactttgtaagccattttttacaaatttttttaaggtaaaaaaccaagcaacagatctaaatgatgaatacctaaaggacagaacactctgaggtgttctgtgacaaagttaaccttgagattcataactgagtctcaaacataggaaaacagaggactaagaatacaccatgtgcacctgcatgcaggctcccagacacattcaaaaatcctaaaagttacctttgaaattggggggtgggagaccacaaggggatagtggagaaaggacatgaataaattctgaagtcttctcaaaatattaactaacattccgacagcccatttggsctgccccatgaatacgttcttccaaaaaggagctctgcactgccccctgacaaatgaaggaattaatttatttcatagtgccttgcatacattagggctgtagtaagaattattaaatggaattatatt

SEQ ID NO: 492618 - DNA, 570 bp, Homo sapiens
ctgggatgctgtgaagacagaaaaagacgtcttccccattcaccaatttatctgcagctcccaacaccatgcttggaacgcagtcaatactgaagggtaagggagggagaagaaaaaccatamggcagcgtaatagaaggagaggatatataaaagtatttgtttttaatttccttaacaatttttgttcctagtctagtcaagcagaaggcaatgtgttttctatcacgcaaatacagagtttcagggcccaggtcactaaaaaataagtgaactggctacagctgactcttcagtggtcctcttaattcacatactgagtcctgaagaagatactctaatataaaaagctccagggaacctgtggtgatttctagactcggcttagcaattattttggtttttttttcaaccttttttttcctttactgagtgctaaaaaacccccaacagaatattcacagaattcagtccttatgatcttaaaggtgggcatggggtgtctctgacttggaatcctctttacccaaggagatgtggatttcaaatccaaggtgaaataaatacatg

SEQ ID NO: 492619 - DNA, 514 bp, Homo sapiens
tcctcttaattcacatactgagtcctgaagaagatactctaatataaaaagctccagggaacctgtggtgatttctagactcggcttagcaattattttgktttttttttcaaccttttttttcctttactgagtgctaaaaaacccccaacagaatattcacagaattcagtccttatgatcttaaaggtgggcatggggtgtctctgacttggaatcctctttacccaaggagatgtggatttcaaatccaaggtgaaataaatacatgttattctttgaatgattaacagtaggaaaggtgtcttatctctcactgtgaccgccctaaagaaaagatgtcagtgaagcccaggtacggccaagccgagttctgggacctccacaaggagcctggagtgaaagacagaatctatggcatcactgggaagaagcatggctagtgtctctgtcacttctctcacgaagtcagaaaacataaagtgcaaaccaaagcaatattcaggattcatgt

SEQ ID NO: 492620 - DNA, 514 bp, Homo sapiens
tcctcttaattcacatactgagtcctgaagaagatactctaatataaaaagctccagggaacctgtggtgatttctagactcggcttagcaattattttggtttttttttcaaccttttttttcctttactgagtgctaaaaaaccyccaacagaatattcacagaattcagtccttatgatcttaaaggtgggcatggggtgtctctgacttggaatcctctttacccaaggagatgtggatttcaaatccaaggtgaaataaatacatgttattctttgaatgattaacagtaggaaaggtgtcttatctctcactgtgaccgccctaaagaaaagatgtcagtgaagcccaggtacggccaagccgagttctgggacctccacaaggagcctggagtgaaagacagaatctatggcatcactgggaagaagcatggctagtgtctctgtcacttctctcacgaagtcagaaaacataaagtgcaaaccaaagcaatattcaggattcatgt

SEQ ID NO: 492621 - DNA, 664 bp, Homo sapiens
tctctttggttttggggctccttagtttagatgtatttctttctaatttttcttttctcctttagtcaacgaataaggaagaagattgtgtattttttccttttagcaagtagacaaaagtcttcattctacacctagattatttttggaagtggactagagaagtaactagggaaaagaaatagcagctatgatgtaggcaaatcaaaaggcagtgaaatagatagataagctttatcttcttttctaactctaagacttcatggtacctattgatacggttaggttttgtgtccccacccaagtctcatctgatttatactccctataatccccacatgtcaaaggagagatgaggtggaggtaattggatcatgggggcagtttccccctgctgttcttgtgatagtgagttctcacgagatctgagtttttcaagtgtttggcatttccttctgcattcattctccctcctgctgccttatgaagaacatgccttgcttcygcttgccttctgccacgattataagttccctgaggtcttcccagccttgcagaaatgtgagtcaattaagcctcttccctttataaattatccagtctcagtcagttccctatagcagtgtgaaaatggactaatacacctataataaattatcacctc

SEQ ID NO: 492622 - DNA, 546 bp, Homo sapiens
gtaacatttaccgaagaagccaagttcagctctccaaatgatggctagttccatgagagagccagtctgcttggaagtgccagaggttcccaggtagcagctcttctagaaytgtgctgctgtgaaatgatcacattggaatggtcatagaactcagggaagccacatttgttaaagtggcctaagtttggagccgttttgcaggcacagaaaaactgcagagcaaatgagttgtctatgatataggtgtgtgtatggaggcacgtctttgtaaaatggaagttgttgctgggctgagaagtacctttgggaaataagataaattgtgcagttgaaaaaggttaaggcgtgttcatcaataaatgattggataaaaaaacatgatatgtacgtacaatagaatactattcagcctgtaaaacaaaggagattctgcaatatatgacaacatggatgaacctggaggacattatgcaaagtaaaataagaaagtcacaaaaaaacaaatctaaagtagccaaatttatacaatcagtgacatgatgg

SEQ ID NO: 492623 - DNA, 546 bp, Homo sapiens
gtaacatttaccgaagaagccaagttcagctctccaaatgatggctagttccatgagagagccagtctgcttggaagtgccagaggttcccaggtagcagctcttctagaattgtgctgctgtgaaatgatcacattggaatggtcatagaactcagggaagccacatttgttaaagtggcctaagtttggagccgttttgcaggcacagaaaaactgcagagcaaatgagttgtctatgatataggtgtgtgtatggaggcacgtctttgtaaaatggaagttgttgctgggctgagaagtacctttgggaaataagataaattgtgcagttgaaaaaggttaaggcgtgttcatcaataaatgattggataaaaaaacatgatatgtacgtacartagaatactattcagcctgtaaaacaaaggagattctgcaatatatgacaacatggatgaacctggaggacattatgcaaagtaaaataagaaagtcacaaaaaaacaaatctaaagtagccaaatttatacaatcagtgacatgatgg

SEQ ID NO: 492624 - DNA, 573 bp, Homo sapiens
tatatcatttaatcctcacaataatcctatgagatgcggatgtggtattgatctcattttgacaccaattagaggtaacaaaaataatgagggggtaaaaggccacctattaaaataacatattccttggtgaattgcaatccttttttacctataggaatgtcaatttgaccctatcttcatctagcacagcaattatctttaaatattatcatcgatttattttatgtaaagttttatgtgagaaatcaaatcacagtagaagagattttccagattatcaggggcagccttaggaccccatatcatctactgatgtttctgaaaatgttgcttgtcacttttggctttgcaaaatgaacaactttgcaactctgttgctatacagtgcaaagcatttgatttataaggttgccaggataggaaataaaacactttttacaattaacactctcattasaatatatttcttatttttccaagttaatggtggagatgctgcttaggagaattaatgaagaattgttcagagacagattatagatatttcataatatcagatttggtaaagga

SEQ ID NO: 492625 - DNA, 611 bp, Homo sapiens
tactgcttaagcattttaccttcattacttaatcttcatatgacactatgaggtggatattgttattacctacaatttgtagatgactagagcatctgagcccatattcttctcagcgattttattcttcctcatctgaggtgtgtatgtgtgtgtgtgtgmgtgtgtgtgtgagtgtttgtgtgtatgtgtgtgtgtggtgtatcagtaggtaaatctaatcatgtatccattcatttactcaataaatatttattcagcaccaagcagggacaagacactgctctaggcaccaaagatacagcaatgaataaaatagactagtctttatgagatgcactggggagagacagaaaaaaaatttaatacataagtgtgttaaattttgtaatacgttagaaggtggtaaatgctacagggagaaaaaacagggaattgagggttgagagtattgtggggtataactttaaagacagtggtcagagaaggccttgctgaatggggaacgtttgaacaaagactcaaaggatttgaggcaggagcatgtccaggatgctggaggaacagccaggaggcagcatcagtacagtgtggtgcgtgtgatagggaga

SEQ ID NO: 492626 - DNA, 440 bp, Homo sapiens
aaattggatttaacactgtgttctttaaaagttgaattatgatctggcccagtgtggtggctcatgcctgtaatcccagcactttaggaggccaaggtgggtggatcacttgaggtcaggagtacaaaaacagcttggccaacatgctgaaaacttgtctctaccaaaagatayaaaaattagccagatgtggtagcatgcacctgtagtcccagctactctggaggctgaggtgggagaatcgcttgaatccaggaggcggaggttgcagtgagctgagattatgccactgcactccagcctggggaaaagggcaagattctgtctcaaaaaaaaaagttgaattatgatcaaaataatgctgtataaaatggaaaaagaatgaatgtactaatatccacttaaaaacacactaaattggattatttggccaaataacg

SEQ ID NO: 492627 - DNA, 649 bp, Homo sapiens
gggaaccaatactcagctctacgtttggatatgccagagcgatcttcatgataagattatgacgtagtaaaaatgaggaatttcataagggaaaaattgaataactgtttaacacctaataaatttaacaaaaatttaaaatttatagtttgttattttacctttaattttaaagtatatataattgagtaattgttggtcattatattttttgattcttacttttatttttaaagtaagtttcaagcaatgcagaaataaattaatgyctcttttccttaagaaagcaaatttcttttgcaatgatgccctttttgttcacttttgtagaaaattctgccctcttcagtgagttatttcaaagattttttccctacatgtctctgaaattcttttaagaattgtgataataaaaaccatacttcttattcagtttcccaactaggtcatgcacaaaccaaagcttttatcactcatggtgatataaatggggtctatgaagctatttaccatggagtccctatggtgggagtttcctatgtttggtgatcatcttgacaacacctctcacatgaaagccaaaggagcagctgtgcagctgaacatgaatacaattacaggtacagatttgcttaggtctttgagaaca

SEQ ID NO: 492628 - DNA, 538 bp, Homo sapiens
aaaatgattacagttattttaaggcctgacatttgaaaacaatttttcatgcagtgatacataactggaataatagttctaaacattttaaattatacatttgtaataaaattacaattaatatatagctacataagtgaaaaatagggaatattatattttgaaaatatctgtaccccaaatagaagagtcagcataacgtggtggttaagagctrgcactctggatccagatggcctggattcaagcctctgagaaaccactacataatgatgtggggctggacaagttacttggactttatttgcttcaacttcctcaccaatgaaatggcagtggttgtcatagcattaccgacctcatggggttgctgaaagaatgaattcattaatatttcaaagcaccaaaacaactgtatatacagcaaagtaaaattttgtgtaatcttgaatgtggcaaggtttttagatatgacaccagaagaagaagcaaccaaaataaaattgataaattagatttcatcaaaattaaaattttt

SEQ ID NO: 492629 - DNA, 427 bp, Homo sapiens
tgctgctctgagacttaactacagtgcctggcacatgaaaggggtttagtaaatggtattattattattaaaacactgccatccaggagtgggtgttggataggaaagcattcacagccagaagttgaatggatgggaggaagcttgaaaggagtgtaaggcaatccaaacttttcaggcatgagtggttggagagggctgttcttgccactaagacaaacaaatacatgaacacaaagttgtaattttggaagagctggtagtaggtttttattttcttagtgacccattccatttttactctccttctctcytagaagaaaaggtgtctagcttccttgaagtcctttcttcgtgatcgaagctcctgctctcacttcctccttcaactctcccttgtttccatgacctctggtcctccctatca

SEQ ID NO: 492630 - DNA, 487 bp, Homo sapiens
tgctgggagagtgaaaggcagagacagaatgaacctcaaattcgaggaaaaagaatggggaatgcaagaggctgctgcatgggcagaagataattggccctcagagaatggggaaggcacaggggtggatagggtcaggcagttcaggcacaagtccagagactcagtcaaggagtttattccattgcccttgaggatgtgctccagggcaggcaaagctgctttcacacacctatcaactccacaggctgctgcaggacctccaatcctcattttaacttagagcagtctcatcaggtcttctacagtagcctgaggtttctgctcctgaggtttctgtttgctttgtrtttccacatggctgtgcccatcctcaccaactttttacaaaagcatgtgtgtgcaagtgtgtagaagggcatacttgtgtatatgtatttgtaaaatatattgctaattgttcccttaacaagtttttgctctcaaa

SEQ ID NO: 492631 - DNA, 652 bp, Homo sapiens
acaaaatcctcaatactatttaatcaatatttccttttattagatacctttttattaaagaataaaggcaacataagactataaaaatccaaatatagagtaaaaaaatattttcagtgattctttgatagtttctactccaacagttctgataactttttccatatatcaataaactacatagaatctgttccttgtgctatttttctctgaggggttgatcttattcctatttatttcaaagtgaattttatgtattaagaaaactagacatttcctttaccttttcactgattatgatgggttttccaatgcaaaggtttttttttttaatttttatgtagagtaaataatctttagctttatgacttctgcgtactatttcatacttatagaagactgtcttgttctaaaaccattacaattttctcccagaattttttctagcctggttccattttattttatacacttacatctttgctccctctggatttgtacgtgtgtgtttatttgcttratgtttgtgtttgtaagatatgaggtttcaattcaaatttattctattctaatttgctgttcagttttttctggtgtcatttgctgcatagtttatcttttctcagtcatttcaaatgctacctcttctatc

SEQ ID NO: 492632 - DNA, 277 bp, Homo sapiens
cccacaaatactgccactcattcagttagcagtttgttttaaaaactgcagatttttgacttttcagattttatrtgagttatgccaggggcagaaaagtaccagggaaaagcactgcagggcctggtatatggagcttacaggattctgacacctctttggttttgcaactcttttctaaaagcattgaattttatcgtttataccatggtgcacctgttggtaattccccccacctggttttcttcccgttgggtttactgttcagatttgcagg

SEQ ID NO: 492633 - DNA, 490 bp, Homo sapiens
gcccaatgcagagagaaacaagagctagcagccagaatgcaagggaggagaagtaatgtccattccttccttttgtgtgaataaaaacagaaacctactaacarcgtccctgagtgttaagcatctgtgaaattgtaccgtgatgagcacttagcagtgctttggcaatagtgaatgtttaatatacattcattgaataaataaatacataaataaaagaaaaaatactgaataagagaaatacttgttgaaagaatcatgcttgtggggaataaaatcacttagcaattctgtaaaacttctgaaataaaaatgttgagagctccataactctattctatgtatttccccggcatttgtagaaaggaacatatatctttataatgttgactttccctaatcctaaacagaaataaagattgctcctcatctcagttctggtttgaatatggctatcatttagtactcttccaggaagctaggagaggga

SEQ ID NO: 492634 - DNA, 490 bp, Homo sapiens
gcccaatgcagagagaaacaagagctagcagccagaatgcaagggaggagaagtaatgtccattccttccttttgtgtgaataaaaacagaaacctactaacaaygtccctgagtgttaagcatctgtgaaattgtaccgtgatgagcacttagcagtgctttggcaatagtgaatgtttaatatacattcattgaataaataaatacataaataaaagaaaaaatactgaataagagaaatacttgttgaaagaatcatgcttgtggggaataaaatcacttagcaattctgtaaaacttctgaaataaaaatgttgagagctccataactctattctatgtatttccccggcatttgtagaaaggaacatatatctttataatgttgactttccctaatcctaaacagaaataaagattgctcctcatctcagttctggtttgaatatggctatcatttagtactcttccaggaagctaggagaggga

SEQ ID NO: 492635 - DNA, 486 bp, Homo sapiens
aattactctgggctgtatggaacttccatgtcattttatattaaaggttatgaaccacgtgatcttcatttataaatatattcacaacccaggacatgacatataaatggtctcttaggttccatatcatgtatcacagacctgaagagagagattaatagtccttaaacaactcacacacccttcttactacttgtattactttccggtctgtrctctctctccttggccccaaaggactctcccccatatcattctttcacttcatttataaaattctggaaattgtgctctactcccctttttgctaggtatatattaacaatgcctttcaaactaggctataaaatttacagactaccagtagatgccactgtccaacaaatgatgctactgcatcacctggacagtcagaggtttccaattggctacaaagttatcacttcttaactcgacgaaaagataactgaaatgacaagcattaaa

SEQ ID NO: 492636 - DNA, 486 bp, Homo sapiens
aattactctgggctgtatggaacttccatgtcattttatattaaaggttatgaaccacgtgatcttcatttataaatatattcacaacccaggacatgacatataaatggtctcttaggttccatatcatgtatcacagacctgaagagagagattaatagtccttaaacaactcacacacccttcttactacttgtattactttccggtctgtgmtctctctccttggccccaaaggactctcccccatatcattctttcacttcatttataaaattctggaaattgtgctctactcccctttttgctaggtatatattaacaatgcctttcaaactaggctataaaatttacagactaccagtagatgccactgtccaacaaatgatgctactgcatcacctggacagtcagaggtttccaattggctacaaagttatcacttcttaactcgacgaaaagataactgaaatgacaagcattaaa

SEQ ID NO: 492637 - DNA, 528 bp, Homo sapiens
cttgagtggcaaatattcttaacccctaaaaagtagtaacatatagccaaaatagtttgaatggcctgagcaactgccatactaagccttgtttagcaagaaaattaatatgttatctaaatattctctcctaaattcatcttttaaaaaataatatccactccatgattctattagtattaagttcacaaactggcaaaacttatctgtggtgacaaaactcagaaaacagttaccaacaaggaagtattgagaagacactaccttctggagcactggaaacattctacggctcaatatgggtgatgattacaatgttaaaatcgactcaactggacatttattatatgttgtatctcaatataaaggaaaataatttatggattracaagttttaaaatagttttttctcccagttagaagcaaaataaacatattaacttataccaatcaaagacatattaggaataaaagttttaaatatatatataagaaacttatttaaatctgtgaccaacctgttaatac

SEQ ID NO: 492638 - DNA, 596 bp, Homo sapiens
tgatacaaaactgccaatgcaggtgcttgcgaattgattcactacgtgaaggggatgcactctaatctctgagtaggtcagatatgatgaaaaktctgtggtatttataaaggcttccagcaggtagaggttaaagccagaaaaagtcagacaaaagctgactaattttatgattctacaacacagacataaggcagaaagctctcgttttcaccctaaaaactagttcatttgaagctaaatctcactaaaattgaattacatgcataactcattttattgttctgctttattgtgctttgcagatattgcattttttttttttttttttaacaaattgaaggcttgtagcaaccttgcaacaagcaattctattagcacttttccaacaccatggctcactgtgagcagtgctcactctgtgtctctttgtcacattttggtaattttcataccatcttaaattttttcattattattacatctgttataatgatctgtgatcagtgattcttgatgtttactgctgttggggtgccacaaacaaaatattactgctcactgacaatgcatctggtcaccaaagagctctgatg

SEQ ID NO: 492639 - DNA, 395 bp, Homo sapiens
tatattctatactactgtagtgttaacctgttataatagggtctcactgcagcagcataaactactttgttctccacwtttctttttaaagtttctttcaatgaattaattttaaagagatgatgttattttacatgatgtggttggggactcaggtcatttagttgcatgattaatactttatcaggagcctgcatgccatcagggccatcaggcaacatacccacacactgaatgtttcaatttgacaaaaaggaaacagctttaacagtgattattgtgtgtgaaaattttcaggggcgggagactgttattattgatcaaaatgagcatcattctgctgtctttgttattttgttgtggagactcctaggtatttgcatttgattatagtc

SEQ ID NO: 492640 - DNA, 395 bp, Homo sapiens
tatattctatactactgtagtgttaacctgttataatagggtctcactgcagcagcataaactactttgttctccactyttctttttaaagtttctttcaatgaattaattttaaagagatgatgttattttacatgatgtggttggggactcaggtcatttagttgcatgattaatactttatcaggagcctgcatgccatcagggccatcaggcaacatacccacacactgaatgtttcaatttgacaaaaaggaaacagctttaacagtgattattgtgtgtgaaaattttcaggggcgggagactgttattattgatcaaaatgagcatcattctgctgtctttgttattttgttgtggagactcctaggtatttgcatttgattatagtc

SEQ ID NO: 492641 - DNA, 593 bp, Homo sapiens
ctaggctaaaaacaagatgtcaacaaagctgtgttactttctggagattatcctggattacccaggtgggcccaatgtagtcaaaagatgcttacaatggamgcagaggtcagagagagaaatgtggcaacagaaggagaggttggagtgatacacattaaagatcgagaaagggagtcacaagccaaggcatgcaaggggttcctaaaagtttgaaaaggcaaagaaatagatccatgccgacagcctccagaagggatgcagatctactgccaccttgattttagcctataagacccttttagacttctgacttccaggatgctaagacaatacatttgtgttgctttaaaccgttaagcttatggtaattctttaatgcagaatgggaaatatatacatggagaattcatttccttgtcttttctatcttctaaaggtcacctgcattcattggttcctgactctgtcctctatcattaaagccagtaaaactgattctctctctgactcttcttccatcatcatgtctttctacccttagctgggaatggttctctgattttaagaattcatgtgattagatttagccc

SEQ ID NO: 492642 - DNA, 593 bp, Homo sapiens
ctaggctaaaaacaagatgtcaacaaagctgtgttactttctggagattatcctggattacccaggtgggcccaatgtagtcaaaagatgcttacaatggacgcagaggtcagagagagaaatgtggcaacagaaggagaggttggagtgatacacattaaagatcgagaaagggagtcacaagccaaggcatgcaaggggttcctaaaagtttgaaaaggcaaagaaatagatccatgccgacagcctccagaagggatgcagatctactgccaccttgattttagcctataagacccttttrgacttctgacttccaggatgctaagacaatacatttgtgttgctttaaaccgttaagcttatggtaattctttaatgcagaatgggaaatatatacatggagaattcatttccttgtcttttctatcttctaaaggtcacctgcattcattggttcctgactctgtcctctatcattaaagccagtaaaactgattctctctctgactcttcttccatcatcatgtctttctacccttagctgggaatggttctctgattttaagaattcatgtgattagatttagccc

SEQ ID NO: 492643 - DNA, 593 bp, Homo sapiens
ctaggctaaaaacaagatgtcaacaaagctgtgttactttctggagattatcctggattacccaggtgggcccaatgtagtcaaaagatgcttacaatggacgcagaggtcagagagagaaatgtggcaacagaaggagaggttggagtgatacacattaaagatcgagaaagggagtcacaagccaaggcatgcaaggggttcctaaaagtttgaaaaggcaaagaaatagatccatgccgacagcctccagaagggatgcagatctactgccaccttgattttagcctataagacccttttagacttctgacttccaggatgctaagacaatacatttgtgttgctttaaaccgttaagcttatggtaattctttaatgcagaatgggaaatatatacakggagaattcatttccttgtcttttctatcttctaaaggtcacctgcattcattggttcctgactctgtcctctatcattaaagccagtaaaactgattctctctctgactcttcttccatcatcatgtctttctacccttagctgggaatggttctctgattttaagaattcatgtgattagatttagccc

SEQ ID NO: 492644 - DNA, 653 bp, Homo sapiens
tgttttacaaggaacgtagattgcttctataatttttaaagcaatgtaaattgttttaattatctagtgaattgagattagcaaaatacctctcaaaatttgactttttgggcctcaggttttgaaatcatttcttttcgtagagtcactatacatatatagttctgatgcagaactgctttctttttctacaaagctactagttattctcagctacttcatatttctgactagatatcagaatgatgagtggtactgaatgctgatacagcctcacacttaaagagccttagtcaaaaaaggtagggttctttatcagcaccctctgaaatctctgaaagagtacagaaccttctagtcagatcagaaagatccttgaacagttttctttttcactttttgttttcaaattaattctaagaagctagttctgttgtcttgacatattaattgtgttgtttctcctttcagagaaaaaaaacacgagcccttaaaagagtaccagaatccattcctctgagtctttctttcaagtatttgcaaatcaatttcccttcattctcctctaattcctgtggtgcgcaggcrccagcacttccacaacaatatctgagtaatacactagatcacagcctcctcaacataatcactgg

SEQ ID NO: 492645 - DNA, 580 bp, Homo sapiens
cagcagcagcagcagcagcagcagcagcagtaacaaccacaacagcagcaaaaacaatsccagcaataaaaaaaatttaaggatggtttcctcaaatatgcagaaaggcagcattaaagcgtaagaaaaataaagtccaagtagtaaacccacaatataggagtatttgagagtgtctgtacaaaaggcaccgctcccaaaacagtgcttggatcagagggccggtctacgatacaaaatatgtgaaatcagggaggcttttccttagcatttccaagaactgttttagagaagattaacaaaggggattgtctggatctgcattgctgttttacaagagattagagagtgaattcaactagcaagagtggcccattctccgaaataggccttaccaataaaggaattatcaatcattttcacctcattcgtgccagagtcacagcagtgaaaaaatgtcccctcataaaatctcaagcctttcacaaacatgctattttaattaccacaatctaaattttcatccgtgtcctcagagagttaacattccaatatgggaactttaaggaggaaaacactt

SEQ ID NO: 492646 - DNA, 584 bp, Homo sapiens
tcaggcctcacttgcttacttgtttctcatctgtctctgcaagacacacttaaatataagttccatcactggaagaaccttgcatagaacagcacctggctcatggtaggtgctcagtaaatgtcgaatgacatcaagctccaaagacgaagcaaagatccctgagataactcccaytctctctctttctctctgattttgttttgttttattttgagatagggtctggctctgttgcccaccctggagtgcagtggcgccatctcagctcactgcaaccacgcccaggcttaaaccatcctcccacctcatcctccctggtagttgggaccacaggcacatgccaccacacctggcttaatttttgtatttttgatagagacaaggttttgccatattgcccaggctggtcttgaacctgggctcaagcaatccaactgcctcagcctcccaaagtgctgggattacaggcgtgagccacctcacccagccgacaatacgtttttgttgctgaagtcaccccatctgtggaactttgtgacagtgaatcctagcaaattaacatagaagcccttggctagact

SEQ ID NO: 492647 - DNA, 584 bp, Homo sapiens
tcaggcctcacttgcttacttgtttctcatctgtctctgcaagacacacttaaatataagttccatcactggaagaaccttgcatagaacagcacctggctcatggtaggtgctcagtaaatgtcgaatgacatcaagctccaaagacgaagcaaagatccctgagataactcccattctctctctttctctctgattttgttttgttttattttgagatagggtctggctctgttgcccaccctggagtgcagtggcgccatctcagctcactgcaaccacgcccaggcttaaaccatcctcccacctcatcctccctggtagttgggaccacaggcacatgccaccacacctggcttaatttttgtatttttgatrgagacaaggttttgccatattgcccaggctggtcttgaacctgggctcaagcaatccaactgcctcagcctcccaaagtgctgggattacaggcgtgagccacctcacccagccgacaatacgtttttgttgctgaagtcaccccatctgtggaactttgtgacagtgaatcctagcaaattaacatagaagcccttggctagact

SEQ ID NO: 492648 - DNA, 584 bp, Homo sapiens
tcaggcctcacttgcttacttgtttctcatctgtctctgcaagacacacttaaatataagttccatcactggaagaaccttgcatagaacagcacctggctcatggtaggtgctcagtaaatgtcgaatgacatcaagctccaaagacgaagcaaagatccctgagataactcccattctctctctttctctctgattttgttttgttttattttgagatagggtctggctctgttgcccaccctggagtgcagtggcgccatctcagctcactgcaaccacgcccaggcttaaaccatcctcccacctcatcctccctggtagttgggaccacaggcacatgccaccacacctggcttaatttttgtatttttgatagagacaaggttttgccatattgcccaggctggtcttgaacctgggctcaagcaatccaactgcctcagcctcccaragtgctgggattacaggcgtgagccacctcacccagccgacaatacgtttttgttgctgaagtcaccccatctgtggaactttgtgacagtgaatcctagcaaattaacatagaagcccttggctagact

SEQ ID NO: 492649 - DNA, 578 bp, Homo sapiens
gcagcggcagagcgaggagtgggatttgagtgrataacattgctgaagggctgcggcctggggcagttcccctgggaactggtttgggatggaagctaggaaggcagtggggccaaaaggaaatattttagaggaaggggcgtggctggaagaaaatgtccctgggattgagtttttccttgaggcgaaatattctgaggtggatgggaggggcctaaggtaattcccctgggagacctttaggtttttttttctgtattgggggaaggggtggggcatcggtcctactttaggacctaaagaaattcccttgggagtgggtggggctcagagatttgggtaaagaaagggcaaatttagaattcggagaggctgaggcttagtgttctaaacggtggttggaagggggagggaggagcctcatggacgtgcctgggggtgtggcttggcttccccttgattttggccggtggatgacgctgtcctgaccacaccactcttgtctcacgcgtgtaggtcttccactttcgccttggtgcctgtcttcgcccacctgagcatcctccagagcctcgtgc

SEQ ID NO: 492650 - DNA, 525 bp, Homo sapiens
tcttaccagtgaccaataataattaaatcagcatcaggcctacctctatggtaagcactctacctggatgacctgatttaatcattatagycactccatcgggaaatggtaactactaagattactttcattctactgatgaagaaaatgaagctcagagaggtgaagtcattttctcaaagccacacagcaagtagctgcccaagccagagcttgacataggagtgtggctgtggtgatcatgcactggctgatctgtctggggacagcccgcactaacctcctcaatccaggagagtcttagccatactcttgttttcctggaccacctataacttctaaggtgcatgggtgtttgcactggtgaggccaagtgtctgctttttctttaaaaataccccaaagtaacagaaatagcacagtcatcttaggacactgggcatccctctttttctgaccgctttgatgtacttgggttgatggaaacatattgcctctaagaaattccagctgtgtgactaataa

SEQ ID NO: 492651 - DNA, 525 bp, Homo sapiens
tcttaccagtgaccaataataattaaatcagcatcaggcctacctctatggtaagcactctacctggatgacctgatttaatcattatagtcactccatcgggaaatggtaactactaagattactttcattctactgatgaagaaaatgaagctcagagaggtgaagtcattttctcaaagccacacagcaagtagctgcccaagccagagcttgacataggagtgtggctgtggtgatcatgcactggctgatctgtctggggacagcccgcactaacctcctcaatccaggagagtcttagccatactcttgttttcctggaccacctataacttctaaggtgcatgggtgtttgcactggtgaggccaagtgtctgctttttctttaaaaataccccaaagtaacagaaatagcrcagtcatcttaggacactgggcatccctctttttctgaccgctttgatgtacttgggttgatggaaacatattgcctctaagaaattccagctgtgtgactaataa

SEQ ID NO: 492652 - DNA, 691 bp, Homo sapiens
ataaattacgcagttgtctttatgagtccctactcctatgctctctgccttggagtctcagatcctaaaaagcaggaaattgtgcttgtctaatatcgatatatgggatcctgtagggatacatgtgacaaaaaatatgaagtaaaaatgtccttgacaataacaaattttaagtggctcacctgaccatagctccagcttctggtcttgatgtcattgacctctccataaaaaattaccccgatgtcattcaggacatactcttctctttctttctcattgtccagatacacagcatcatctgcatcagggtttaaacatagtgactattaccaaaccagactgtttccaaacacttgcaagtttatgcaagtttattttgtttctaaactacatttaatcagccaaatttttaaaaaatgccctttgtttcaccaagcatagctcatttcccaatatttttagtaatggtgaacataatcagcaccaaattcagtctgtaaatgatgacatttgttagcaaaatgctgacgaactctggctctttaagttccaagcagcagaattaaattgatatgtctcattaaacattttatgattctgttgcatcagtagtttcagaattctatgatgctgatgtacrtctctaacactaattaaaatataatttccaaccttttaacattaatag

SEQ ID NO: 492653 - DNA, 574 bp, Homo sapiens
cagacagtgagtcacttgctggctttgctacagcatccagagacgatctgaaacaaagtccaggctgctgctgctaagtgagaagaaagatagcctttggggtcagcaggccccttatcataaactactaaataagcatgtttcatacaaacaacagccttcattttaaacaggccttacctccactgcacagactccatatgcttcttaagaatcaaacttaaactggaagataaagtctgaggtttgggattggcagtgttgtgtatgctgtctcgctgatgtgaaatactgataataaatccaaagaaaagcaagtatatttagtccaagaataccttcatttcctttctaaaaacaaaacatgattaaaatcccacacaaagaggtgagcctgcctgtagaccggaaggctggtaaatacattaacgacgccttaaaatctgagtcttaccatgccttggcaattagaccagacagtatagaatgaagaactgaaagccgcttatgggcccctgggccayagatttcataaaaaattaatgctgagtgaaatagaaaccatctgaactac

SEQ ID NO: 492654 - DNA, 622 bp, Homo sapiens
ctggaaaaaaccagcagcgtccagacatgactgggttttttgtttgtttgtttgagatgtgaagttttgcatgtaaatcraatagagtttgccagaaaattcattgcctgaacaaatatggtctgctccttgggtattgccaagtaggagaaagatggtttgtctggagagactgcagagaaaagtgtcaataccatagaaatgaaaactcagaattaaaggatcaaggtaaggggatccggaatccctcctcccacgtattttctgtttactcacaactcccaaagtttactacatatttctgagagacgccaggatcccagagtgatgtgtttaggaatttttaccctgcttcttggggaggcaatggggtgagcccttcagcttcagaagagtgagaaggtatgcccaggcccgtgcagccagagggagttcacgtctccttggaggtctcatgctgagctggtaaggccaagaaagtaggggcagaactggattacccttgtgacgttctcattggagtctcctcgtgctccaggcctattgacatctcatgtgagggactgccatgccatgatgaaagagcacagtgtgttgtggcagtcctggaactgtttgccca

SEQ ID NO: 492655 - DNA, 622 bp, Homo sapiens
ctggaaaaaaccagcagcgtccagacatgactgggttttttgtttgtttgtttgagatgtgaagttttgcatgtaaatcaaatagagtttgccagaaaattcattgcctgaacaaatatggtctgctccttgggtattgccaagtaggagaaagatggtttgtctggagagactgcagagaaaagtgtcaataccatagaaatgaaaactcagaattaaaggatcaaggtaaggggatccggaatccctcctcccacgtattttctgtttactcacaactcccaaagtttactacatatttctgasagacgccaggatcccagagtgatgtgtttaggaatttttaccctgcttcttggggaggcaatggggtgagcccttcagcttcagaagagtgagaaggtatgcccaggcccgtgcagccagagggagttcacgtctccttggaggtctcatgctgagctggtaaggccaagaaagtaggggcagaactggattacccttgtgacgttctcattggagtctcctcgtgctccaggcctattgacatctcatgtgagggactgccatgccatgatgaaagagcacagtgtgttgtggcagtcctggaactgtttgccca

SEQ ID NO: 492656 - DNA, 652 bp, Homo sapiens
gattcactgctgctaacatactttggtgcygtgggactccagtacatttgctgccactaacacctagacgtgcatccacaggacagtgtgtatgtatgcatgagagacagacagagaggaagagcaagacagaaacagacaggccgggatgaaagtaatagaaatcttaagaaagaagagaaaagatcagaaaagaggccaagatactgagaagaaagagggtgaagagggtagcaagagagaggtacagctatttatagcctgtcttatggttgtgtaatacctgtctggctctggctgctgttatagtagcattttatgaaggttatccttccttaaggaataccataagaatttagctttcctacatagttgcaatattgaaaataaggctggtaattgggtcatcttattaggaaggaactatcacgaagcagttcaaagagcttccagttattccctcattaatccttacaacatgcttctggagtaactggagggcaaagatgaagaatatttagtccatttggatcctttctttagtgggctgtaattccacttgcatgctctctttttagattagagactcaagagcaagttatcgcagtgggcacatttgttttcattaaatattttcccccacctttttcac

SEQ ID NO: 492657 - DNA, 652 bp, Homo sapiens
gattcactgctgctaacatactttggtgctgtgggactccagtacatttgctgccactaacacctagacgtgcatccacaggacagtgtgtatgtatgcatgagagacagacagagaggaagagcaagacagaaacagacaggccgggatgaaagtaatagaaatcttaagaaagaagagaaaagatcagaaaagaggccaagatactgagaagaaagagggtgaagagggtagcaagagagaggtacagctatttatagcctgtcttatggttgtgtaatacctgtctggctctggctgctgttatagtagcattttatgaaggttatccttccttaaggaataccataagaatttagctttcctacatagttgcaatattgaaaataagsctggtaattgggtcatcttattaggaaggaactatcacgaagcagttcaaagagcttccagttattccctcattaatccttacaacatgcttctggagtaactggagggcaaagatgaagaatatttagtccatttggatcctttctttagtgggctgtaattccacttgcatgctctctttttagattagagactcaagagcaagttatcgcagtgggcacatttgttttcattaaatattttcccccacctttttcac

SEQ ID NO: 492658 - DNA, 554 bp, Homo sapiens
tgttgccccacagctggtctgcagtctggcttcttgtagaatagagccacttcatgacatggactggtttggccagaattcagaatttacttaacaaagacctaattgtcacatcactctaccaattcttaattatttatcgagcatccactagcgccccagattggcataggcccccaaaacagtgggcaacccagacgagaagagaccagtatctgagacacatttggagaaaattaaatgctgatttgtgacattgagactttaacctccttaaaagcatactatttttccagaagtattggggaaaatacttttccagaagttttgttttttgcttttttgatgtactaaatgagagtggaatggayggtgaagcaagaagctattttttttaaaataaacttttcatttcagaagagttttagatttataggaatattgtgaaggcagaacagagagttcccatatgcccacacacccagtttccctattattaacatcttacattagtccagtacttttgttataattaacaaaccaatagtaataca

SEQ ID NO: 492659 - DNA, 554 bp, Homo sapiens
tgttgccccacagctggtctgcagtctggcttcttgtagaatagagccacttcatgacatggactggtttggccagaattcagaatttacttaacaaagacctaattgtcacatcactctaccaattcttaattatttatcgagcatccactagcgccccagattggcataggcccccaaaacagtgggcaacccagacgagaagagaccagtatctgagacacatttggagaaaattaaatgctgatttgtgacattgagactttaacctccttaaaagcatactatttttccagaagtattggggaaaatacttttccagaagttttgttttttgcttttttgatgtactaaatgagagtggaatggacggtgaagcaagaagctatttttttwaaaataaacttttcatttcagaagagttttagatttataggaatattgtgaaggcagaacagagagttcccatatgcccacacacccagtttccctattattaacatcttacattagtccagtacttttgttataattaacaaaccaatagtaataca

SEQ ID NO: 492660 - DNA, 574 bp, Homo sapiens
tagaatatcatattcataaatagtttataatgcaaaacagtaactttggtacctactgggtctattggttggaattcttttaacccttttcaataattatggagacacttgtccagaatttattatataaacttttttatacattagacttttacaaacaaatgctctcaaaattcaatattttcttcatgttcagtcaggatattaattcctagcttgctatgccagagtggtaaaagggggtagggcttcattttcaaaatgaacccagcaragggaacccagaagtgctcagaaagggctttctgctaactaatgatggcaaacgtggtctgtgtgatggggtggcatctactttctgaaaatttttaattttaatttttgttgttttcgttttgttttgttttataacttgtgttttatttttgccaaatttggtttcattccctgcctgttccatttggaggtactacactaaaaaaaaaataataaaacacgtaatcacaccatggggaaaaatgaaaggagaagaaaaaaagaaagctggataatcagcccctaattttctaaaaat

SEQ ID NO: 492661 - DNA, 632 bp, Homo sapiens
tacaacagaaatttagaggaattttgaatttatgtccttgttactccccagaaggcattttcttaaaaaaaagaaaagmaaagaaaagaaaaatactaataatcccaagctacactgattcttggtgggtattagcccaaatgcttaaaagggacattgtgatctctgataatttaccattgcagataacataacctctggactccccaagtatatcccacattgtattattttctttcctccaaacagtacagtttctttaacagaaagtggacattttttagaagaaaataatcatttaaaaatagctttatattttttctcttttcttacaaatgcaaaacttgatagtatatgtagatttccagattgctgaggaaattgaattactgtttcatccttatctttttatgtacttctctgtcatttttaatttatatatacgtatacataatattttcactgaaaacatcaaatgtctcattcattccttagtcttatttgattttttctatcaccttgtatagcaaagcataacaaaatgaaaaataagcttctgcagtcatggaagttcagaattggataacaacttagattatttattccaacctcatcgaaaaagagataaagac

SEQ ID NO: 492662 - DNA, 619 bp, Homo sapiens
aacaataagtagttgtcaaagattcacaaggattcaaaggcattctgagctgcagcacagaacgtgacagaaaaaagaggcacgtgccaaaggtaattagaaagccccaagtctttttggtgtgttcctacttggtgctctgtttgtctgtcagataacttggaataagttagaaaagaatggagtagccttcttttcagttattatgctcagtaaacaaaatgtgattttattcaagttcaaatattttcaaaactgtgtctatccaataatttgaaaagtaaaatccttcttcaagcaagatattctgtgtttatattcaagaagtgataacatacctaatacctattctgagccaaaaatatcattttcaatatatagctaagcttgttttcgggtaagttgcttatttctgtgcaaggacattcatgagatgrctattattttaattttaaaaaatttgtagtggagtaggtggctatgatacataagtcttctcatttccatttgaaaacagaggaggattccacagaggctgtcctacaaaaggtcttttgccagaattacattcttcttctttttaattatttccttttttctttacgtaggggagtagcag

SEQ ID NO: 492663 - DNA, 442 bp, Homo sapiens
ttaaatgtctcaatcattttctttgttctttgaaatttgttatatgaaggctacctatggtaaggcatcttgaccattcattaatgaacacaagaatctcttaaaataaaaaaaagtcagaaaatacttcattatgctgygctatttgcctctgcttctgcttctccattaaattgtaccaaaatcacattttccaattattcctgtgtcatttggcatttttacctgacaagtaaattgaggtcatcaggaagagtgaatctcaaaatctctgttgtttcagtgtagccacagtttgatatactgaattgtattgtttctggagaagtggcagaggagtagaagaaggcacagctatgaaatcactttctgaaaaaaaaaaaaaaagtatgatccctgctaagggtctctgcttcaacagaaatgatccatgaggtttgtt

SEQ ID NO: 492664 - DNA, 550 bp, Homo sapiens
tgacagagagattctgcagttattgccattctttggaatgattcattgcaaaastgagagaatttaatcttttcaacaagctggaggcagtttacattgtctttattttgttactgaaacaaatggtgcaaaaatgaaaattcatccttcctgaccccctcttagccattctctcttttgagccatcctctcttctaagataacaggacaatagggctagacacctgtaaatcacatctggggctctgagaagaaagagtatgcaagaagtctcatgcttcttctctaaccaatactcaatggggcagtgggtttccagtcattccttctctcacttacactaattctcaacaggctatcagctttgtgagagaggaaatgtcttttcccttttgtgtatctttgtatttcccttgtcattttgatcctgactgactctcccagcctaatgcctggcactgaacatttgttcattaaaggtctgctgttgttgaatgaccgatcctttgaatgctgacagaaacgggcaagttggaggaggatgaaggaa

SEQ ID NO: 492665 - DNA, 606 bp, Homo sapiens
gagaggacttaacaatcttcagtataggaggagatactatgaacaaaatcctgtctggctgttccttattctagtcaggagaaaataggatgaagctacaacactgggaaactccttgacaatacaaatttttctactgaccatgaggattcagagatagggaaatagaaaacaaaagggggatttgggttcccaaaagctataaagaataggctgggatccaaaatggccagaagaaatcctggtaggtcagaacctcaacacagartctatcatgttagttcctgtctgttgtgtttgggatgctacccatttaataactcactgcaaaaatctctgcatttctgaatctctgtgtagggctgctgtagtctagaagatcgctgcttataacataaccttctagtcagcagtggacagaggtgtctcacttccttgtcataaggactgaaaagttatgtgcataccatgatcagcacatactcatgtatcagtctgtgcttggaactgttcatttaatatctgtatccacagcacttagcacagttctcagtacatagagacaacagatacattaatctttctatcctcaagtaaaaataatga

SEQ ID NO: 492666 - DNA, 505 bp, Homo sapiens
ctgccttgctgacatttagccagcaaaaaggctttctctagatgcctagagtcctggggcattcccatgatgggaactcttaagcatatccttctctcctttgcagagtaaaacaaaacccacagaaaatctgacagaaaatggaacagagctaacccttactctgccatgcactgtacctgggctttgtccatgccatctcattcaattatcctagtgaccctgtgaggtaatatgaatgaataaakgaagcagaatacattatttcagcctcaggatgcttatcttttgctttaaattgctacacaacacagacatgatttcttataacgaagccaaatcccaaagagattaaattacttcatggagctcatgtggaccaagctgagccttgaacctgaacctactaactgaaaatctttgttctttctattacatcaggttgcaaattaatgcagatactgtggtcttgccctaattcaaatttcccctgggctttggacct

SEQ ID NO: 492667 - DNA, 594 bp, Homo sapiens
cagaaatcatctaaaagcaacacacactgtctatggcactcaaaaaaaaaaaagaaaaaaggaaggaaggagggaaggaaggaagaaagggagggagggagaaagaaagaaaaaagaaaaattaaagtccaaaagtccagaggtagatttggatttcaggcacagttggatacaggcacttcaacaattgcatcaggaatctgtctcttcccatccccaggttcttctttgttttcctctggcctcgtcttgaggcaggcttccccttgtgctggcaaaatgtgtgcctgtagctccaggctgatattttcccactcagcaatgccaggagataaagattaccacttcccccgtacctcctgaaaggctcctgggctgacccccaagggtctggcttaggtcacagcctaaacagtggctccaggggtttggagagtgctgattggccaggcctaggctggcagccaggccctsaaacctggggtggagtcaccctcatcctacacacacagactcagatggaagaagagtggttccctaaagaagagtctgggcagtgcagccagagaaggaggtattgggaggctaaaccat

SEQ ID NO: 492668 - DNA, 639 bp, Homo sapiens
ctggcatggccggggcctggtcccctcttgggaaccagcacggccaagagcagtgtctcatcaaaacaggaaaaatcatagaggaaaaatgtgcacgtaaggggactggcatgcacagggaacgacatgacccaagcaccaggaggagggaaggggctggggcaggtgcacaggggcatttaggggagcagagccctccccggtaagggcgccgatgacgacccagacctggagatcccaggaagctatgaaggtaagtctgggctaagaaagcctcaaaatcacgtcctcagcacagctcccctcaccacaggccttgtagcttttgaccacacagaccttttgacctggtgtgactgtccaaagtacttcaaacagtaatctcccccgtgttacccacagggcagggaagcatggactttggccccaaacatctggctggcaggggccttggaatcttgggcagggccctcacaagctcccagccctgttttctttctgtggacaacagcggacccccacccatgccagcggggggctggtaaggtcagccgagatgatgaacttgggtctgccaggtacgcagtagggcctatgctaayagccttttcctcgtgtcctcagaagcggcctggatta

SEQ ID NO: 492669 - DNA, 645 bp, Homo sapiens
taaaaaagcaaatctggtgtgttataattggtgatgaggactttttaaacaaatctggctagttattatttctagtctggttgctgtcctggttttcaaaatatttcagtgctttcttaggtctttttgttttgttttttgcttttaaaatatgcaagagtatgtcattttaaaagaaataaaagcactactattaatgttcgtaaaaacctgttttgaatatgcatctcctatgctcagaaaggtttgatatctcccactgctcacaatataaaacccaacaatttaccttggtactcaatccctttgactatttggcccttcctacctttccatcgtaattttctaattctgttctacaaacacacatgcagtttgccatctctgtgaatacttacaatatgctttttttacccatgatattgctcctttttctcataattggaagtactatgcatactttttgtcctatgcatctcatgttctctccaaaattttttcatccttcctactactgtaggtgagcagtgcaatacgatgattagagtcactgccatgatttgaatatttagccgctatrctatcttttgtacattactaagttactctcagtgtgtctttatctgtaaatggggtttaataata

SEQ ID NO: 492670 - DNA, 613 bp, Homo sapiens
gtgtttggggacaaaggcctcggttctcacgaagtttacattccgatgaggggagacagataataaataacaaatgtgaaaaagaagtaaattgtataacatgttggaaggcaataaaagtcatgaaagtaaaaaggaaaaagtcaaacagagaataggggttaagaatgcataagggcagggcaggttgcaacttgtggtggttaggatgatccttgagaagatgacatgaataaagtcataaagagagtgggggattagctttgtgaagataattctggcagaagaagttgctgatatgaagattttcaggtgggagtgtgcctggtacattcatatagcagggagaccctgtatctgatggggattgagggaggaggagaggtaaggagtggggcragagggaagtggggttgctgtagctgcggagaggctacaggggcacagatcacaggaggggcagagatcacaggaggggcagagatcacaggaggggcacagatcacaggaggggcacagatcacatgaggccttgaagttccctttgaggagtttggctttgactctgtgtgaggaggagccatgcctagcagggttttgaactaagaagtgc

SEQ ID NO: 492671 - DNA, 613 bp, Homo sapiens
gtgtttggggacaaaggcctcggttctcacgaagtttacattccgatgaggggagacagataataaataacaaatgtgaaaaagaagtaaattgtataacatgttggaaggcaataaaagtcatgaaagtaaaaaggaaaaagtcaaacagagaataggggttaagaatgcataagggcagggcaggttgcaacttgtggtggttaggatgatccttgagaagatgacatgaataaagtcataaagagagtgggggattagctttgtgaagataattctggcagaagaagttgctgatatgaagattttcaggtgggagtgtgcctggtacattcatatagcagggagaccctgtatctgatggggattgagggaggaggagaggtaaggagtggggcgagagggaagtggggttgctgtagctgcggagaggctacaggggcacagatcacaggaggggcagagatcacaggaggggcasagatcacaggaggggcacagatcacaggaggggcacagatcacatgaggccttgaagttccctttgaggagtttggctttgactctgtgtgaggaggagccatgcctagcagggttttgaactaagaagtgc

SEQ ID NO: 492672 - DNA, 619 bp, Homo sapiens
gaggacacagcatgaagacatcctctatgaatgagaaagtgggccttcactagacattgaatttgctgggrtcttgatcctgaatttccttgcttccagaactgtgagcaagctacctggtctctggtattttgttatagcagtccaaacaagctaagacactaagggatggtggggagagaaagggaagagtaatgtaggtaaaagccctgtatcaacagagagtgtcagagaaatgtagtgaaggccagggcggttgatgcctcaggaatgagagagaagagtaatgtgtagtgcaactggggatgctagcaggagtttgaacatgtagggccttttagaccatattatggattccgtttttttaaaattaatatttttgagaagcccctgaataattttaagaagaacgaaatgttggtgatggtgacataagtatgttgtattttgaactctggttacaatgtaaacaagatggggggatgggatggatcttgcaataggctaagtgagggctgagggcaccttgggttagggagacagtagagaggaggggaagaagttaatagcactgagaaggtcaaatcaatatatatatatattaggtataattgttatt

SEQ ID NO: 492673 - DNA, 619 bp, Homo sapiens
gaggacacagcatgaagacatcctctatgaatgagaaagtgggccttcactagacattgaatttgctggggtcttgatcctgaatttccttgcttccagaactgtgagcaagctacctggtctctggtattttgttatagcagtccaaacaagctaagacactaagggatggtggggagagaaagggaagagtaatgtaggtaaaagccctgtatcaacagagagtgtcagagaaatgtagtgaaggccagggcggttgatgcctcaggaatgagagagaagagtaatgtgtagtgcaactggggatgctagcaggagtttgaacatgtagggccttttagaccatattatggattccgtttttttwaaattaatatttttgagaagcccctgaataattttaagaagaacgaaatgttggtgatggtgacataagtatgttgtattttgaactctggttacaatgtaaacaagatggggggatgggatggatcttgcaataggctaagtgagggctgagggcaccttgggttagggagacagtagagaggaggggaagaagttaatagcactgagaaggtcaaatcaatatatatatatattaggtataattgttatt

SEQ ID NO: 492674 - DNA, 619 bp, Homo sapiens
gaggacacagcatgaagacatcctctatgaatgagaaagtgggccttcactagacattgaatttgctggggtcttgatcctgaatttccttgcttccagaactgtgagcaagctacctggtctctggtattttgttatagcagtccaaacaagctaagacactaagggatggtggggagagaaagggaagagtaatgtaggtaaaagccctgtatcaacagagagtgtcagagaaatgtagtgaaggccagggcggttgatgcctcaggaatgagagagaagagtaatgtgtagtgcaactggggatgctagcaggagtttgaacatgtagggccttttagaccatattatggattccgtttttttaaaattaatatttttgagaagcccctgaataattttaagaagaacgaaatgttggtgatggtgacataagtatgttgtattttgaactctggttacaatgtaaacaagatggggggatgggatggatcytgcaataggctaagtgagggctgagggcaccttgggttagggagacagtagagaggaggggaagaagttaatagcactgagaaggtcaaatcaatatatatatatattaggtataattgttatt

SEQ ID NO: 492675 - DNA, 577 bp, Homo sapiens
taattcagtcataaaaaataatgaaatcatgtcattcacagtgacatgaatggaactggaggtaattatgttacgggaaatgaaccaggcacagaaagacaagtattcaatgttctcactcatatgtgggagctaacaaagttggtctcatggaggtagagtagaatgagagctaccagtggctgggaagggagtgtaggtggtggtaggaggatgaagagaggttggttaatgggtacaaacataatagttaaatagaaggaaaattttctattgcttcatggcagagcagagtgactatagttagcaaaaatgtatcgtgtatttccaaacagctgcaagagtggacttgaaatgctcataacacatagaaatgataaatacctgagatgatggacactccaaataccctaaygtgatcattgaacagcctatgcatgttagataataccacatagactccagaaatatgtacacatattatgtatcaattttaaaaaggtaaattgaagcatgcttctttttttaaaaataggctggttcaagagtctgacagtcaaaaactgacagacagata

SEQ ID NO: 492676 - DNA, 508 bp, Homo sapiens
tgtgtatgaagtgaccctcatatagaggcaggttcttgtattcctgaggctgtacgcactcaaaacatgtgaaaataaaaattatggcagaataagataatcataaaaaggtcagcgggtagacataagaaagaccaataccacattctcacagaggcataagatttaaaaaaaaataaagaaaaagattaaaactgttaaatatacatggtgatgaagaatactatcacatttttgtctaaatttttgtatatttaaaataatttatagggttttttattattatyacacttgaagttttagggtacatgtgcacaatgtgcaggttagttacatatgtatacatgtgccatgctggtgtgctgcacccattaactcatcatttagcattaggtatatctcctaatgctatcttttagcagtttcctcgtttcaggtcttagatttaagactttaattcattttgagttgatttttatacatagtgagagatagggtctagtaagct

SEQ ID NO: 492677 - DNA, 472 bp, Homo sapiens
ttcttttatatctataatttcaacttttattttagattcgggggatacgtgatgtgcctgtttgttacatgggtgtatcacataatagtgagatttggagtacaatygatctcatcgcccaggtagtgagtgtagtattcaatagttagttttcaaccttgtaacaggcatttcttaatgactggtatatggaagtcattttgcaaagctactttaagatggaaagaaaaaatatttcactcactttcctgtgttctctctgttggcatccaaaaggctcatcagcattatttacttaatcacaagtgctctgtattttttatatagcatagtcattctctaatgtgtttaacaaatattaattgagccactatgacagtgtcagtctttttgtttgaagctggaaattaataatatccatctcagaaggtaaatcaaatacgatttttaagactagccaaaaatccgacta

SEQ ID NO: 492678 - DNA, 472 bp, Homo sapiens
ttcttttatatctataatttcaacttttattttagattcgggggatacgtgatgtgcctgtttgttacatgggtgtatcacataatagtgagatttggagtacaattgatctcatcgcccaggtagtgagtgtagtattcaatagttagttttcaaccttgtaacaggcatttcttaatgactggtatatggaagtcattttgcaaagctactttaagatggaaagaaaaaatatttcactcactttcctgtgttctctctgttggcatccaaaaggctcatcagcattatttacttaatcacaagtgctctgtattttttatatagcatagtcattctctaatgtgtttaacaaatattaattgagccactatgacagtgtcagtctttttgttygaagctggaaattaataatatccatctcagaaggtaaatcaaatacgatttttaagactagccaaaaatccgacta

SEQ ID NO: 492679 - DNA, 587 bp, Homo sapiens
ggaagtgctgcacggagcatgattgattagcaatgtctgtatgggcgagggagaacaatttacactttatatcacagaaatgagtttagaagtattggttctgaattctaagatttcaaaattactaaaccctagattaaacatccacgattcatgactttctccctactgttcttgagactttagggktttttttttttttttttgccaaaaatatcaaacttccttttatttattttttattctttggcagtcatagagcaggtactttttttccatcaaattataggagatcctatcaaaaaatgccttaagttgtatttcaaaattctgaaaaatcataggcaaaatgtacaaactatgttgaactgaaattaagcaaagttaattgtgctaatatccggggaaaagaaattgggctacagttcccttttcattaaaattgcatttgaattattacatttggcctaaatatgattgcattctaaggcattttctaacaaatgaagcactcagttttttttattcttcaccactaagcataggagtagtgtgaaatgtacaagacctgtcaaaatcttatatta

SEQ ID NO: 492680 - DNA, 587 bp, Homo sapiens
ggaagtgctgcacggagcatgattgattagcaatgtctgtatgggcgagggagaacaatttacactttatatcacagaaatgagtttagaagtattggttctgaattctaagatttcaaaattactaaaccctagattaaacatccacgattcatgactttctccctactgttcttgagactttagggttttttttttttttttttgccaaaaatatcaaacttccttttatttattttttattctttggcagtcatagagcaggtactttttttccatcaaattataggagatcctatcaaaaaatgccttaagttgtatttcaaaattctgaaaaatcataggcaaaatgtacaaactatgttgaactgaaattaagcaaagttaattgtgctwatatccggggaaaagaaattgggctacagttcccttttcattaaaattgcatttgaattattacatttggcctaaatatgattgcattctaaggcattttctaacaaatgaagcactcagttttttttattcttcaccactaagcataggagtagtgtgaaatgtacaagacctgtcaaaatcttatatta

SEQ ID NO: 492681 - DNA, 635 bp, Homo sapiens
caaataggtaacaaacgtgcctgtgtgatgccaggggtggtcagtggtcggagtctggggtagctgaaattactcttagccgtttgcctcagtgtgctgagtaaaattattatttttaaatcatgttataacatgaaatgtttcataaacatttcctaagastatcccagttaaattaaaattaattgtttcaaaaaatcagagtaaaccagcttcgccttgtgtgctttctgaaggttagactataatttttcagtaaacagatgtggaagacaaatggtaatactagctagggacaaatgcacacataagtaatttcccattttcaaagtctatggactactctctacaatttggcaatttagatgatttcctcaatcttttaacattgaaaactcacctttaagatttgacaaccttttagttgtcaaagtgcaactgaaaatgtaaatgcaagtaaaactaccaccgatatgttaatgatgtcactggggtactgaagcttaccccgtgggaagcgtcatcacacaagactaccaagcatttgtatttacacgtagagaatgaggacaattttggggaaacgtttgattttgcttttgacttaggctcttagaaaggccatttcttccttc

SEQ ID NO: 492682 - DNA, 418 bp, Homo sapiens
tactggagcggagggagggattggmccccactaagtcatgtgagaggggggtggtgagaaggagataggtcctgtcccaaagaaaaatcagatggaagatggatgcaagaccaggaaaacccacaggtggccctctagggcaccagctcatgggacacccatcttccctcttgcctacttgtcatggccatccctttttcccttcctcagctctctgtcattttgctccctcaaatacctccacccttcccccactcctctctcatcctgtttttctgcctgtttttcacctccccagctctcatttttaggaaaatccctgcccagattggggaggacctccaatttccagcttgctgtgtgaccataaagcccttccttgccctctctgagcctctcccaccgcctccagattttt

SEQ ID NO: 492683 - DNA, 554 bp, Homo sapiens
gcaacttagagaaatccatcttgggcacactctataaaggagctccttctctgcaaatagcaccccagataagtgcacaaaagcaagataccctcgtggacctacacgtcctcccgcttttcaacaccctgatgcctgaaggtgaggtctctttcctgtgtgtcttagaagccatgagcacgcttaggtaactagagccctgccacagcctgagcagcacagcacacatctgcaggctttcctgccagacctttacctaaaggtaatttttctcattaggagagactccaggtcaagagtgatgacagtaaggttgcatttaaagctgcattacattaaatagtggactggtctagtgattattttcccacactgggcaatatttgcttaatgattaagtttttttgtttttgtttttgttttttttaatccagctatgsttgatactaaaggaggttttcccactatccgtatgcatcttctctgttttgagattgcaactatggacagttatggctaatcctagtagattgtcttcccttttaacatcttgg

SEQ ID NO: 492684 - DNA, 538 bp, Homo sapiens
tgcccttgaggagaggccatccccgggccacaacccatgtgggacggatgctgcgacgcgactgcagatcaggcggaggagaaacgagagtctgtgtgtgttagtttcccaggctgccgtagcaaagtatgagaaactggccagaagaatggaaattgatgtctcagggttctggaggctggaagtccaaaatccaggtggtagggccaggctgtctctgaaatcttacaggggaagggcccttctgcctttcctggtgcctgctgaggctgcatcacccgtcctcacatggcctctccctgtgtctctctgtgtccttgtgtcttccctctgtgtgtgtgtccgtgtccacgtttctccttttcacagacaccagccatagtggattagggcccgcaatttaactcgaytacctgtgtaaagatctttccaaattaggtcaccttctgaggtactggggcttaggacctcaacctgtctttttgaagggggcacacttgaacccataagactaggaggacagaggaggcccccgtct

SEQ ID NO: 492685 - DNA, 493 bp, Homo sapiens
attaggattctgaccatttctcatatgcaaaggcatatcaacaaacccatctgcagtgtacagctcatcctcatctgggatctgggggcacaatttactctcccagcacaccctccctccctaacctgacgatccaactgtgtttcacccaggattcagatcctgggaggaatcctaactatcagggctgttaagcttttaaatacgccaccctcagagaaggccctcactagatgggtaggggctgggtgtcatgataasagaattcctattttcccacggaaatgaattactttttaaaaaaacccatttgctggtgaaagggaggagagggaggaagtgaggctaagcaagtgtatttggggggtggcagatgaagcgagtcttgtgggtctcaggacagtctttggaacagaaattacaaaaactaatttgaaacccagaggcagtgaagataaggcatggaaaccaaatgaaacaccatttgatcttt

SEQ ID NO: 492686 - DNA, 620 bp, Homo sapiens
ggtgtcttggtactgtctttattcattgacttaaaaacactcacaagtaagcatcatttactggatcctaggctgagtgtgtatgatatgagtggagaagcagagataaataagagaatgccctctgcactcaaagaacagtgcagatgtgtaatgaaatactcaggtgtataaaatttaagtgtaaatcaacatatgaacaatgggagatgaataaaraggtttataagaaatcctaacagggattctaactctacttggggtacggaagaaaacttggaagacgcaatgactttgaattcattcttaaagaatggaagaaaattcattatatcaaaataaactgaaagaagtcatttaaagaagagagaaaaccaagatcacaggtatgacatgaaattacatggatggaaaggtaccaggtaatttgatgtggccagactatacggggagattgctggcagaatgagaagatagaaaggtaaagtgtagtcagtctgagagggctttacaatgtctacaaaagagcccagacattatattttaggaacctaatctcataaacaacttcaattttggataaggaatctatgaatatgtattaagcacaattaaaacag

SEQ ID NO: 492687 - DNA, 605 bp, Homo sapiens
tgttttcttattaagtgatcctggttatagaacatgtgacttcaggcataaaattctttctacatgattactagcatgcctctgaacacattaaatgtttcatcgtggaacatattgcacgtaactcaaaaaacactgtctcaggacgtgatattcgaaaggaagcataggtcattttaaaatttctaatttctcttctctctagaggtattatcaatttggagccacataaatacttcttcaaaagccatttggcgggtagagggtgatacaatatgtatgtgtgcatatagaaaaagccaacaaaattgtttttcaaaaataagacaatgtgcaagtcaacttgattatacactgtaaatatttgatggaagtatctaatgtcattggttctaaaaccctgtagttctctactggtatttgccatgcctatattttcactctgtaagtcaattattgattggatacctcctattagccagacactgtggaaggtgctagtcatcattctctgctggaggatgaatggattggaggagcccgggaatagaagtaaggagaccaagyaggagatatcatggtagttaaagtgaggaaagatggtc

SEQ ID NO: 492688 - DNA, 621 bp, Homo sapiens
gaggtaactaaacattttatttttattggatcattttctactcacaagtagatgtaaaaagcgttttacagcttcaactaacaacatctaaatgcctctagactctgaagctactgagataatagccatcatattttcctaaaatctctaaaactgagcgatgaactcctttttatctgatcatgaaattgttcacgtttcatttaggcttcatatataagcacagaaatctgtataacatttaactaagactgctggtttccttatcatcctcccatactatcccttccttgtaatagaggtaaaacaattcctgacagaaaacagtgtaatgggtcagatttgactaatatctggaataatgaaatgatagcttatcatgagacgaaattttcagcttaattatgatgttgctttaggtttatcctctcagatcttgtctttcccaccatcataacatttacctcatgctatttaactttytatttacattgctccttctcactgacctttgatttctgggtcaaacaagctctgttcctaaatatgatggaccttcaccaaaagtttgttaaaaacaatttccaaattcaggattattattttttcaatgtaagaagc

SEQ ID NO: 492689 - DNA, 530 bp, Homo sapiens
ggacttttcttgtgatagttattgatatagctaattactggtaatagacaatgttttctgattagcttcatcatagctgtagactatattattgatgatagcatagttaccattcgtataatgactactatttgccttccccaaccctgattccaacagattgccactttacagataagaaaatgaagcaagggtgggtgggatagtagtgacggtagtgacaatgatgtgaatagcttgcccacaacctcgtgggatgtrggagagttaatattcaaacacagctaggtctgaatccaaagtttatactattggcagtagtaacagctacgtcttcatatcttacaacaacttaataacatatccaaatgatttgatcaaattatgttatttctaagcattaagaaattttactttcaccatctgaatctgtttgatattatcacatatgctgaaaaacatgccctacctctctgataatagagaatcactatgggtcagagggagacaggcaacttaatgcaacagtc

SEQ ID NO: 492690 - DNA, 545 bp, Homo sapiens
ctggttgtcaaggcaacttagccackgcaggccaggcctgagccagggaattgggaagtgggtccccccgcctcccctgcaagcagatgaagattcaatccccagggccaccccctgctacccaacacgcttaccctcctggctcagcgagggcagagtgggcagcacctgcctgcccaggtcctgcagggcacgggcgatcgtatccaacatctccaatttccaggtgactccgtactgaatgttcgatgggtctcttctttcttatatggaatgtgcacaaaaataattttcccaccctccagccccttctccacggagctttggatgtgccttaaaaataagagtgacgaaaatcttgaacttcttgactctttttcttctttcttaaataaacttaaacattggttctcgccgtccctccccactgctctggctctcgggcagctcccacagcaagagccgcaggaactgatgtccggcaccgagtgagagtgtgcagacccgcgccctcctgaccaacgagagacccaatgaggggtgag

SEQ ID NO: 492691 - DNA, 575 bp, Homo sapiens
tgcaaaaaaatataagaacacctcaccctcaggaacacacggaccatactgctcccctctatgtacacatgaatctacacaacaccgtccactggaggagggagagcaaaactgaataggtctgtgttgggggtggggatgaagaccaagcatttactaattgcacataccagggatctaaaatggaaatggatcacacctagggctgtttcatttttgtttttgttttttccttcctaggtttagcactggggaagagaggaaaagtaatattggaatgaaggggagggatgggtgagggactgtggacagcagtgttggacatgtgaatggatatattaactcaaacatgaatgcgtgaatgtgggcacagtgaagcactgcctaaaggagaatggctttggaaactgcctaaattaataataatagcaaacatgatttttttactatcactcaggtgtatgttaaacattttacatggatggcctcatttatccatcrtaagtactctcccagtcttaaaaatgcattttagagaggaggaaactgaggcacagatgaattaagtcactcgt

SEQ ID NO: 492692 - DNA, 642 bp, Homo sapiens
ctgcggcaggaggctcacttgaccttgggaggccaaggctgcagtgagccatgattgtgccactgcactctagtctgggcaacagaatgagaccctgtctcaaaaaaaaagaagaaaaaatgaatgtcttgagacattgccaaaggtcttcttagggacaaaactgtcaccggttgagaaccactgtagctgacttcaggcagaatttcattgaagtattgggtcgcatccagagtccctggtctggactcatgttagaaaaccaacccaccctcctttcctttccattcctctcttttcctcccccttcctctcttacttctctccctccctccttgaaatcttactgaatacctaccatgtgcctcacattgtgctgggccctggggatacaagcatagaatgaaacaaccaggaatttcagttcaagagagatgctcaccttaacacctagcctgtgttyagggcccctccaccccacctcctgcagctccttccatcacagcagtcatacgctattgggttatctgtgtgtgcgttggtgtgaatgaccactcctgctggccaactttccacgtcttccattcctgccacccctacacagagtcagtggactcattcatgcatgacacatttatttct

SEQ ID NO: 492693 - DNA, 273 bp, Homo sapiens
gaagaaaacattgaccagggagacagaaaaaatgcaggagtcttggctgagtcccctttctctgtctgggtctcagtttcctggtctgagagcattggaggagtagcacaacctacttaatatttggggctggaattgaatactagaagcttcactcaggtatttctacaagtccagagcagggaggttagayatttctctgtgagagcaacatgtgaggaaaatatggggggtgagtgtcttagagccctttgtgcttacacaaactggacc

SEQ ID NO: 492694 - DNA, 508 bp, Homo sapiens
acttttcttcattgaaggcacttgcatgcacccacatctgtgcatggggatctccacccactgtccctctcctttcctaatggccaccctgcccccatccttctgttgaaagacacccctgaaagcccagggcttcctcccctctatgctccatgtgattttcatttgtctaattaaagctaatctgataaaggcaggaattgcagagattggtaaaagctccagtgagcacaggtcatgtcctgatccaaagagggggtctttgtctccccagccccaggcaggggccagctgggcaatgggtcacccaggggagtgggcagaggagccaagaccaaggaagggctcttcttggacaagctgggcttatatcattgtgctgaycatttgcaaacaccgccacaaagaagctgagggaagaggctaaaaagatgaaaatacactgaaaatcacaagagaaacaccctgtgaaaaactgagtggctcagagggctaattacaggctaga

SEQ ID NO: 492695 - DNA, 628 bp, Homo sapiens
ggtgcaaaactattcatgagagaccacccctgatccaatcagcycccaccaggccccacctccaacactggggataacaatttgacatgagatttgggcggggacacagatacaaaccatatcatcaggtaactgccaagcatgggaggaggaagacctagaaggatagggcagattctgacttacgggctgcaattttgcagcatcctctttctctgggtcccacctgcttctgtagccctgccctctggctctgcacagtggcacagcccctactcttagcattttcctgcatcatccaccagcctggtcttgtctggtcgcttgttcctgagtctgctcattcattcattgactcattcagtgcatatttactaagcttgggatgagccaggcacaggctaagtacaggcatacaaatactgtgaacaaaatgaaaaaggggacaaagtccatgcatccttggagcttggagcaagagacatatgaactaatatgaacaaataaatgtataaaaaatgtcaggtagtgagaagtgcaatgaagaaaataacacaagataaggctttcaagaacaaggctgctgtattatacaggaggcctggggaggcctttggtaaaatagcag

SEQ ID NO: 492696 - DNA, 542 bp, Homo sapiens
tgatggggccagaggtctcacttcctaagattttgctttgcatgttgagccacgccttcagaggatcataaacaagaccacatccaggggagcacctctcttgactcactgggttctgctagactacagagcccacagtttctctccttgagggcgaaaggagagtcccaaggctcacttgctcttctctccccttgggctcccccagggcctctccaaccatcacccgacaaacaaggaccttcttacccccaggaaaaccctccaggtcagcaaactgctcaaatgtgctgaccccaggcccaccaattctggggctggggacatctcctccttccggtggctggatttcccagccctgccagggacaactcttgggtttctcgtaactcaatttctcagcccatgtccctttttaacatcataaattttaaaatgttcttttattacaaagagtgggggaggggaggaataagaggaggaaatgaaacgagcaactataaacaaaacataatggayggcataatgaggctgcgaggaaa

SEQ ID NO: 492697 - DNA, 596 bp, Homo sapiens
atcaaggctacaagagagggaacaagcccccygtaacttgacacagactctacaatgatgacactgttcactgatttagcaaactatatatataaagtttaagtaaataatgaaaggtaaatttggatttgactcctctttaaattatcatttgttcctagttactgagatccgactcaaatgttaaggtttcactataaaaaaataaaagtaggcaaattttactatactttataggctttttagtgacagccaagaactaatctagattaacaaagctatatgaagatattctacaacctttaaaacattagcagttttaaaataatgcaaaatataagaaaatatattctttctggcttaatagggctaaccctgttttttgatacactgtctggaaaaaaataatgacttagaccatttctattcttcaagccacctaaaaagaacaaagtagatgagtccagggttccttccctgagtctacgtcagtttcctttaccctgactattaatttaccatttggcatgtgtcctacatagcttcctgttttcttgatagtgacgtttgtgctaaaccaacaatatttaacatca

SEQ ID NO: 492698 - DNA, 601 bp, Homo sapiens
actggcggtattctgcaccccccacactgtacccaccacccaagtgtttcaaacaatgttaataatgaggctttaaaaagatcaatgaatagaaatatataaatgtatatacaatgaacattaaacatatagattgcagtctgctgcaagtccaaacatcagcctagttactggcaggcaaaaggctgtctctgccctggttgccttccccaaggtctctgctgactttcctgcttctattctatgcctacactcgaagccctccagggaccaggaattcagctctgcttccagtccctctaggatctacaytgatactctcatctgggttttctaagtttgattgatgatatgaaacttcccccagatttagaaggaagaaggaagaaatggggaaaaagcaacccctgaatatttctactacaaaattgcacatttttgcagctctctccttccaaccctactttggaaacctccaagtcacagagccctaaatgttagcacagtagcccctgaattgtaccagctcctctggtagtgggcctgtgaatacaatttccaaattatattcacctaaaagatttaaagtatcacaaaatag

SEQ ID NO: 492699 - DNA, 639 bp, Homo sapiens
ctggagactcagcctgggacagtagtcattgccgtgtgatccacaagctatgccatccatatggactcagaagagggggatttcaaaagaattctgcaacctctaggctattagtcaccctccagtctacataagggaaacaagagttatagggaagaaggccggaaaaagggacttttttttgagagacagtggttggggaccatgtttccccccactccctcctttcccagcacatctgactgcctccygcccacctgccctcctgccttcctgccctccatccagccctttccagaaaacagcagccaggtcaactattcacaaacagccccttctcatcctttggtatttttagatatcagtgttttatagggatgtcttgtttttcttccccccccagaaaacatatcagaagtcaaaagaacaaatgcaggctgaattaaaaatggactatgagagttatctggaactggaaaagactgttcttatcaaccttggcctaatcaaagtcacagagaaggggtcatacatggaggtgatgtaaaaaagcttcctgaaggggtgttttggggacttcttccctctatttatttttatgtcaggtgaactggcatgctgaacatatatatatatagg

SEQ ID NO: 492700 - DNA, 651 bp, Homo sapiens
cctggtgtggtgttttcattgtgtgtttataacctcagttttcctgagtctcatcacctgtggccaccgagaggacacataagcagccatagcccaggtttcatgggaccttggcccacttgcttctcaggtatgctagccttctgcagagtgcccccaagtgtgtccagtggccactgggatgaagatggagtcacatatgttcaagcccacaaccaccaggcactcagggatcccttctctcaaaatgctagagctgcctaatggcctgtaacgtgggggaaggtgctgggacaatgcttctgggttagttcaagttcagcgagaagcaaacaccaaggcagtagcagaggtgcaagaagcaaggcagagccttcagagctcatgcaggtctggtacctatggaagaaaagaggaaaggacagaagatgatacgattcatctcagaccactcagcgtggtttaattattcatgatacctctcttggacactaagactttgaaacagacaaactcatagtgatgtctctyccttctctgggatgagttttctctgaggctcttcaaccccttaagctaaggtccttttgtttggcccagaacttccatttggcagacaaggccaggcatgctgaatcccagtaaagaaca

SEQ ID NO: 492701 - DNA, 642 bp, Homo sapiens
ctgctccagtctcctgcataacgattgctaagtggactgtctaatcggttttgccttggcctaagtactcctgatgaatcagtaccactcaaatttaacatatgaggtcgttctttcttctgcctcarataattcagagaagacttctgctctgggaataaattgtctgttgattttttgacagttaaacgctgcactagaaacaaacaataattttgctttagtgacagtaatccaactgaacttaaaaaaaaaacagagctaaagataagccatttaatcatcaactacaaacatgcattaaaacaaaaacatgcactctgtcaaaagaaagcattccataattattttttattaccagaaataatctagattaaggatagaagcagtataacgttccatggtgctaattcatgctacatcataacgtccccaaacaaatcacatttccaatgtcgattaattttctatgcaactttattattatctagctataattcaaacaatagctaagctggtagcttctcctaaattaaaagctacagcaaaaagcaggcaaggcatattggtgtacaaacaaaatataacaagaagttcctttgtctgcaaacatctaaatgaggcaaaggcatctaaagtgat

SEQ ID NO: 492702 - DNA, 584 bp, Homo sapiens
ttttattccatatggaccagtatggttccacagtgattaataaacaatacagggcaggtggagagagagasagaaagagagaagtgtttgtgtatgcatataagggagaaacatctaaggctatttcaagattcaaaataactgttccagagaccctgggcaaaagcagtgaaaaatcaaagcagctaaatcccccctcaatcccaaaccaagtgtttactccttagcaaaacaaagctgctgaaagagaatcagcagaacaaaagcagagacttggaaagtaactttgagagatattgcagagaattgtaaagaaactgtcctttctaatcccagagttgctgaaactacagaaaagctagtagaaattaaccgtttgtgtcacaggcggagcaccatatgctgctccccttccctggagaaagaacagccagcaattgcttccccatccccagcaaggctgctgagctcagcctgcactcacttgggctctctaatgaaatgcaattgaacaagccaggccccagcatacttaacctttggaccacggatgcctacgtttctctggagaaacagccagttgt

SEQ ID NO: 492703 - DNA, 584 bp, Homo sapiens
ttttattccatatggaccagtatggttccacagtgattaataaacaatacagggcaggtggagagagagacagaaagagagaagtgtttgtgtatgcatataagggagaaacatctaaggctatttcaagattcaaaataactgttccagagaccytgggcaaaagcagtgaaaaatcaaagcagctaaatcccccctcaatcccaaaccaagtgtttactccttagcaaaacaaagctgctgaaagagaatcagcagaacaaaagcagagacttggaaagtaactttgagagatattgcagagaattgtaaagaaactgtcctttctaatcccagagttgctgaaactacagaaaagctagtagaaattaaccgtttgtgtcacaggcggagcaccatatgctgctccccttccctggagaaagaacagccagcaattgcttccccatccccagcaaggctgctgagctcagcctgcactcacttgggctctctaatgaaatgcaattgaacaagccaggccccagcatacttaacctttggaccacggatgcctacgtttctctggagaaacagccagttgt

SEQ ID NO: 492704 - DNA, 538 bp, Homo sapiens
tgtttttttgttttttcgtttttgtgtttttttttttttttttttggagagacagggttttgccgtgttgctcaggctggtctggaactcctgggctctagtaatccaccatctcaggctcccaaagtaccaggattacaggcatgacccatctcacccggctgaaaataatttaaaatgagatgtatagtgtggccaaaagaatattgaccttgcagttaaaaaaaaaaaaaagtttgattcctagcttcagtacttgatatttatgygtggcatgatgcaaataagtaaactgcgttaacattttttcatctgtaaaatgagcataatgttgttacacctgactgttgtgaagaaaaaacaggataacaatggagtgcccaacagtgtcagcacacagtaggtcctcacaaatgtttctttcctctggaaagcaaatttgctcaattggtttgcactttttcataaaacatagatcaaaagagtcagattaggtctggagtgcacctttcttatcctcatttgaaaagtcttatta

SEQ ID NO: 492705 - DNA, 490 bp, Homo sapiens
cctggcacagcccccagagggatgtgaagagccccagtgcctattgtgcaaaggcagattcagaaatccctgcaagtttggacataggtgacagccaatgtcactgttccagagtggccaggtttgataaacatgctgagaagttgttagaatttgttcttgatgaaggaggcttcacccgacataccattcattccttcatttgttcttcaaacagtctttaagggcctactgtgtttgagacacaccacgctcagcactgagaatacagtcatgacaaacacaatctctgcctactattctgtaggaagacagtctagtaaaaacagctactatactacaatagttaggcagaccagagccaccataggagtattagaacagtctcagatctaccctgcatggcctctctccagggcacctcaattcatttcatcartcatcactggaattcctatcaaccctgtgctaagagtttagtccctccata

SEQ ID NO: 492706 - DNA, 630 bp, Homo sapiens
agtctattgcaaagacagcagagaaaagagggaagagaataatttgtggccactttttggagtctagcaaatagttctaggcaatgataattgggtttggcaacatctcaagaaatgagatgaataaacattatgagactcatagtagaaatataaaatatcatctattataacgcacacacacacacacacacacacacacacacacgaaatctaaatgtaatcaagcatccagatctaacaaastaatctggggataggaaattaagggcacagaagatcaggctatacaatgttacagataaatccatatttgggtaaactttttagtgcaagcaattttatttcttccaaccaataaacttgaaaaaaaaaaattaaaaggcacagattagaaaaggaaaaacaaaactgtcatatttgcaaataaaatgactccctacaaagaaaattcaagaaactctaacaaaaagtattataaataatggttgctggatagaatatcaacagaaaaaaatggtatttctctacaaagcaaggagcagaaaatttaactaataatgtccttttaccatggcaacaaaaatacagtgttcttaggaacaaatcaaatggaaattggccaagaac

SEQ ID NO: 492707 - DNA, 680 bp, Homo sapiens
ggtgacacaagcccccactggtgacaaggaagtaaaagtaatacagagggagcctagaaaaggcaatctaatattactacctgcaggggaatggcagtgatggggaaatcaagtgccctcacaacacagacatccaagccctactattcagcagtgaatgaaatggtaggcatatttacagccttagtttgagagcaaagaaaaacaaacagaaacgctggaattgattaaacatgcattgaagtcccatcctagttttaagttaaaatagcaacttttaatgataaaattctctcactcttatgacctctttgtgagaaaaaattgtgagaaattttaaataacctctgcactgcaaaaaaccacagcagtaatatcaaatatcattgaactagtaaacataagatagcagtctgaggggaatatgtgccagaatccccaaaaccgcagaaagtaccaaatcctctatatacactaggttttttcctacacacacatacctatgataaagtgaaatttatagttaggcacagtgggagattaacaataactaataatacaataggacaagtrtgatataccagcatcgctactcttgtgcactggagccattattaagtaaaataagggtgatgtgaacacaagcactgccatatcccaacaggggaccccatcaccaa

SEQ ID NO: 492708 - DNA, 513 bp, Homo sapiens
gtggtacagaatagcttaacaattttgtacacacacacagacacacaaaggaacagaaattgtaaaagcaatcagaaacactcaaaaatgtgattatatcctttctagtttttcattttatatttgaaaaactatagcggtatatattaacaaatgtggtatacaattttatatataaataactccattataaatattacacattttctggctctgatccctaaagaatttcttctacctcttctttactctctctcctcaccaagatgtgttatttcttacaaaagtttgctggcttgtctctgggatgagctcccaagagacaaggtcaggcccaagtaaggtagggttcacaggagcccaagaaacaatagcatttgtaccttcagtttacttcaaatcttcaggatagatcaatacatagagaaaacagatgcaaatgtttggcagtgttctataccccagatctcaaactgartacaactgcaccagaaacctgttctaaggcttgaa

SEQ ID NO: 492709 - DNA, 641 bp, Homo sapiens
atttagaaactgtaacaaaatgtcagttggtgatagttggtggtagggtagggtaaagggacttatatggttgcaagggttctgtataataattgaagtggtacattattaactctactaaccaataataaaaataatacaaagacatgtagccagaaaaccaacagacaaattgaaatagaatattaaatatactcgagtaatccataacaaggcagacaagagaacacagaggaagaaatgcagaagggacaaacagaaaaatgaaataaaatggtagacataaattcatttatattaataattatattaaacattaatggcttaactacttcaattaaagggcagatattgacagagtgaatgaaaagcaagatcctaccagaggccaaaaacaaaagcacagttattgaaagtaaaggatagaaaaagatctaccctacaaaactaagccaaagaaagcgagrgcgtttatattaacgtcagataaaataaacttcgagacgcagataatgtaattagataaagaggaacatgtcgtaacgataaaagggttaaattatcaagaagaaataacaatttaaaatgcacatcccagagcctcaaaatacatgaagcaaaagttaatagaattaaaggga

SEQ ID NO: 492710 - DNA, 641 bp, Homo sapiens
atttagaaactgtaacaaaatgtcagttggtgatagttggtggtagggtagggtaaagggacttatatggttgcaagggttctgtataataattgaagtggtacattattaactctactaaccaataataaaaataatacaaagacatgtagccagaaaaccaacagacaaattgaaatagaatattaaatatactcgagtaatccataacaaggcagacaagagaacacagaggaagaaatgcagaagggacaaacagaaaaatgaaataaaatggtagacataaattcatttatattaataattatattaaacattaatggcttaactacttcaattaaagggcagatattgacagagtgaatgaaaagcaagatcctaccagaggccaaaaacaaaagcacagttattgaaagtaaaggatagaaaaagatctaccctacaaaactaagccaaagaaagcgagggygtttatattaacgtcagataaaataaacttcgagacgcagataatgtaattagataaagaggaacatgtcgtaacgataaaagggttaaattatcaagaagaaataacaatttaaaatgcacatcccagagcctcaaaatacatgaagcaaaagttaatagaattaaaggga

SEQ ID NO: 492711 - DNA, 545 bp, Homo sapiens
ggtcttatgccaaaattagcatctgaatattttatagtcttttaaaatattctacttttcttttagttgacaatattccaagtcatagacagtaccttcaatttaaagataatgaaaaatataaattcactttgagaaaataaatctactttcataattatatatgttgtgtacttccaattttgccattattcatctatactttctcattataatatcttgaaaaagtagcctgaaaattcccatcagaatcaactttttcctgcagttcacagtccactactttttctgagatgctgattactggtccctgaaaacttaaacttggtacagttctatttcttggttctatattggttcatattaaatcatgaaccaaaagtatagtctcatatatttaacatatcctcctgccacaaaaacctgwcacagctgtatttatcatgagataacctgcctttgaaagacaacctgctctctctgaggatgccaggacatccatggcagctgaccagagaggcaaaaagcactatattacacctgta

SEQ ID NO: 492712 - DNA, 492 bp, Homo sapiens
tttatatgagatcatttgcattagaaatacttaatttggatttgataaattaaatttaattttgctaaattgttaggaagatatcctggaaatttaaaaagtgtatagagtgattgaaatttgtagtgcatagggaagtggagcagaatctacacacatcagacaaaagaaacacagagttgcaggtgtcccaggaggcaccttcaagtagaggcgaacgccaaagggatctgcatgggctgctaacaagtgatatggcgtctatctgatggactaagatagaaacctgagttattcctggctttcyttcacatgctttttacatccagacagtcatcaaatcccacctctaatctccttcactcatgttcttcatctctttatcacagagctccacatttattcatcatcatttattctttgaattgttgcaagagcctgttcattgatttctttgagttttaaactgctgtcattttttttttttttttt

SEQ ID NO: 492713 - DNA, 555 bp, Homo sapiens
aagactccttaaaatctgataggagattgtcttaaaaactaaaatgtgtccatttatctgagatttgaaacccaatcatttaaaataaatatttgaagttagagagttgtgttttcatatccttgtcagttgtccatttttgccagtctagaaaagggggaaaaattcttccagaatttttagaaaatcaatatcaagagcaactggttctcggctttttcttagacaactgatgtttatattagtttcattttcattactataagttaccactgaagttttcytaccctgccaaccactcacatctattattttgtcctataaaattagaaaacagaacaaaagaaaggagaaagttaatatatcctgtggtatgggatattgttgctttgaacatattaagacagaatttatggggaaccagattaattttaagaaactccctgtgggttctgtttgttgttttgaatcgctttaatagtaaacttgcattatttatgtttattaatatttagaatgcactctgcaaggatgattttcatctgagttataatt

SEQ ID NO: 492714 - DNA, 485 bp, Homo sapiens
aaatattaacccacctgcctttctgtttcctttggccttgcattatttttttttcttgagcttaatgctatttgaaagcacaacatttatttgtttacttttctagtgtatatctcctccaacaaagttcaggttctatgaagaaagtttgtttcctgttcatccacgaactagcataaaaactgatacatagctggagtttaatataattttacaaaataaataaatagataagtcaatgcagcacaccaacatggcacatgtatacatatgtaactaacctgcacattgtgcacgtgtaccctaaaacttaaagtataataataaaaaaaaattgaagcatatgataaattgcactytctattggcaaaaataaataaaccaggggatgggggaatgaccaaggcggcttactagaaacagctagtgtgggggtgtgtgtgtggtggtcacagggaggaaagaaggggtgagtaaacacagta

SEQ ID NO: 492715 - DNA, 613 bp, Homo sapiens
tctttcagcacagggataattcagtggcagtgaatagctgggatagaaagcatggtgtgtttctcctaagcgtatattgcatgtggtacggcacttcatattgtgaagaggaatacattaagtggatgatgcatgccatgctttaaaaaatgaaaaaagaaaatagctttctttcaaatatgaaggacttagaatgaaattttaagraaatagtaacataaatacatgtaaaattcacttggtgaatgtttttagaaatgtttttttaaatggcagcaaatgcatatcactgatctctaggtctttgcatttttagacttctctgattaataagtaaaaatttacatggggataaattttgctagagggatttctcaataaagatagttgggtcccccaatgttaatgtagcttactaataggagatatggcaaataaaacaactgctagaatatctaaaaattataatcaagattgcagaacatcttagggatttgtgtgtgtgtgtgtgtttataactttaaaaagagggatgatattctaccttcaaaaggaacataattatccagagctggttccttagtgaggtcactggtggaccaattttgcagct

SEQ ID NO: 492716 - DNA, 595 bp, Homo sapiens
gcccaaagaggacaggaagcagcgagaggaaccacggactcacggagaaccataggagagggaggctggtgggggttatctggggaagtatgtcccagggactggcaaccctgtgggcctgggtagaaggagggagggaggctgtagactgtgatgccagggaagtgggggtggggctggggcttgggcgggaccccggtttctgaccctaagccatccaaggaccctggaggtcttgggccccaaggaaggagccctgacttactgggaagggttgagaatgggctgtacgggccaggcccggatggagcagggaggccgggggagtagggtgcctcatgcaagtgtgggaggcgctgcccatcacggggccttggccatggggatgatgagaaatggctgggttgggtttcctttgacgttttgagtagaagatgctgagcttaaatcatgaaccctggagcactgctctggttctggggcatggagaggaggtaagatgtcacgccagggcatggaggggaggtgagacgccgcgcccgggcacggaggggaggtgagaygccgtgccggggcatcaatgggaggtaacgca

SEQ ID NO: 492717 - DNA, 632 bp, Homo sapiens
tgtgttatcagagacaaagggaagtgacaacacagttattatcaatgatccctgcccaaattatctcagcactccgactaagagcagtgttcctgggcaaggagaacacacaatttctcacctgctgaagaatgtggaagccacaggcagtgtggctggaagttcccatcgtccctccatgagtgacttcataaagcttccatcaggcacctgggcctggctgccctcctgctcggattattctaaatataaacaaacgacccccaaggcccgtgctaactcaawcacacttttacatgtctcaggccagtctgctgtttagatttcctggcaatatccttgcaagtcttctgtattcctttttggatgtatcttcatttactgttacaatttttctgccttccttttgcctccttccaggtgaacaagacaataatctaagaagacattcatataaaaattaatggaaccaactgcaggaactgccaaatgttatgttgctcacagaagttttgactttgaaagataagcagcttctatttattccatgctccaattagggcaaacacaaaacattttctatctgctaagatatatgtattatatatgtacatatatatgaaataaaagta

SEQ ID NO: 492718 - DNA, 463 bp, Homo sapiens
caagaggcccccatcagaccccaaccctgctggtgccctgatctcccacttccagcctccagaactgtgagaaatacatgtttattgtcttaaagtcacctggtccatggtattttgttatagaccccaaagtaagacaccacccatgaaattcacataccccttgttcatggacacccagaattaaataaatgtcattgaatatcttgggccatccagaaaacgtctctgggaatgcagacatgaattcacctctgcaaaatattagcatgtaaaattcccaggcatacaattgttgatttatgcaccatatctcctcatggcaggtgtgagacacttacacgtagacacaccctgtgagccacataagagagagctgttatcacagtttccagggctggtgcacgtgtgtgtatgtgagcccactccgacgtgcckggttggaggtgcacagattcacaat

SEQ ID NO: 492719 - DNA, 596 bp, Homo sapiens
gctgcgagacgctcaggttatggcttcctgctttaatatcagtagccagatctatgccacagctcaggagatccagggagaaaatgggcctcmaccacgggttagtatttatgtatttatttaaaaactccatttaacctcatgggtggcgagaacaaggaacatcattgcatccattatgtggatgtcaaaggttatgtcaattcttgtatgcatctaattagacacaaagaccgccaggtctattacaaacctggggactctgagtgttcatcaagggtcaggaggcagacccctgtggccttcaatgcccatttgcaccactcctaatttctttgtgttataaatagatacacccttcctgattctgattataattcctgtgcatgagaggaatgggcacctccagctcctgaaagaactgatccttccgcattcctcaaggggtgagctgggagggcacctctctctttcctcctgtcctcttcacattgcagacagaattttttaactacctattcccctggaaagaggacatgtgtgggtgtgttacaggtaaaccaaagattctatggcttggtagaagtttctgcata

SEQ ID NO: 492720 - DNA, 596 bp, Homo sapiens
gctgcgagacgctcaggttatggcttcctgctttaatatcagtagccagatctatgccacagctcaggagatccagggagaaaatgggcctcaaccacgggttagtatttatgtatttatttaaaaactccatttaacctcatgggtggcgagaacaaggaacatcattgcatccattatgtggatgtcaaaggttatgtcaattcttgtatgcatctaattagacacaaagaccgccaggtctattacaaacctggggactctgagtgttcatcaagggtcaggaggcagacccctgtggccttcaatgcccatttgcaccactcctaatttctttgtgttataaatagatacacccttcctgattctgattmtaattcctgtgcatgagaggaatgggcacctccagctcctgaaagaactgatccttccgcattcctcaaggggtgagctgggagggcacctctctctttcctcctgtcctcttcacattgcagacagaattttttaactacctattcccctggaaagaggacatgtgtgggtgtgttacaggtaaaccaaagattctatggcttggtagaagtttctgcata

SEQ ID NO: 492721 - DNA, 640 bp, Homo sapiens
ctgaactaattctttctcccagataactttatcccctcgtctttttgcccccaggytaggtaaaattatcctgttatatactctcataacacttactaactttcaattcaatgattatttgtataattctttatttaatatcttattcccccactggtctataagctcccaagggcagggactgtcttttttactgctcaataaatatatgttgattgaagaaggaatgattagaggcctttcaatatgatttctttttataattgtcatgacagaaagtgttttgcaactgggagaagtgtatgggtttgaagtcctacataatgtgtctactcactagcaaaaacccttttatgggttataaagtgacagtaataacttctcaatggatgtaattcccactttatttaagagtgtgtaaaaattatactcaaaattttcagttttcatggccctcacttggctgttcctttcaggggaagtttcttttgtttgaaattgcttctgatgttagatcctccttccttcttcattttttttcttcgaaacagtaggacttatttctcttatctagtgataattttggttcctttgtgtcaaatctctcctattctttcttcctttatacccttcctagcct

SEQ ID NO: 492722 - DNA, 575 bp, Homo sapiens
tgctatctagggaaccccagctacgagtaatcttattagtacataaaggacactcttgtcactgcagagcttccaagggttttaggarctatgtacccagaaccaggagcaaagaacaaatttctatttcttactgcatctcagtatcttaggtatctaatgtttttatagcacgattgttagcaaagcattttcagatatttgattctcatcagaatttgatggggtaaataggacagtgttactattagtctcaatttgcaaatgagaaaattgaggttgggaaaacccccacacattgtcaaaggctactctaggctttcgatggcaaatagagtgttcatttcattatactttattgtcaattcaactgcatcaaacctttgttatattttaaattattgtaagatacttcacaatatggtaacatttcacattctaagaagtcattcatgccttctacatggattaaaaaaccctcatttattcgcatattaaaaataaaatgtactgagtgtgtatcgtgacttctaggcattcttctaaatactgtaggaagagtcacaggtgcagct

SEQ ID NO: 492723 - DNA, 337 bp, Homo sapiens
caccctactttaccttttcttttcttccyttattccctcccctgcaggccattatgctgctggattggacctcaatgacacctactctgggaagcgtgaaccattttctggggaccacagtgctgatggatttgaggttacctcaagaagtgagatgtcttcagggagtgagatttcccctgtgagtgaaatgccttctagtagtgaaccgtcctcgggagccgactatgactactcagaagagtatgataacgaaccacaaatacctggctatattgtcgatgattcagtcagaggtgagtaggggataaagcaaaaatatggcctgtgagatgtg

SEQ ID NO: 492724 - DNA, 605 bp, Homo sapiens
tatttatacatacacatgaatgtggtctgtatattcagacacatcccagtgagtgggaatatagacttatttcattgcagttatattaacgagtgtgctgtagtataagcgttgtattacccctgtgatccttaggtattaaggaaaaggaggtgttggctagggccttattccagggcactggtttctaatgaccgtactgtgccatccatgtaagcataagtcccctgaactccctggtgcttgatgatcaaatgtctattgaataattaattaactaattawttaaaagtattctgtgattctcagcatggcttgaaatcagtgatccattaatcttcaggtgctttgtttagtggaaggtcacctgccactcaggtaacttgggagcctgcctattaggcttcccccaaggatcacttcaagcacatgactcactccacgaaggcttttagagccaataaactcaatactagggaaaaggctacagatgtggctcattcatagctttcattgaaaagtaagcagggagaatcttaatggccaggattctattggagatagatcatgaacaaggaaagcaaagcacctaattaaatcttaat

SEQ ID NO: 492725 - DNA, 609 bp, Homo sapiens
gacaaaatgggagaaggacgtacagggtctaaaaacaaaaagagattataatattcaagtaatgactaaaaagtcaacaaagaaataccttcaacttaggaccttccatttaaagaggggaaaggatatgagctaggaattcacagaatttaaaacctaagtaaccaataagcatgtggctatgactagtgacagcccatttgttgctttggtggaattagaaataaatagtcagcctttccttcaaatagctattgtcccatccatgccagtgcacacagggcacaagctggttttgagctcccactcacattcttggctaggtgttcttttgtaagtacccgcatccatatatcatggccctgcatataaacatgctcaaacttcttgaaataaacagaaatrcaaatcaaaataacaataggatattacttaatgaccataagatttgcaaaaatagaagctgggtaatgccaaatgttggtagaagcttgtggacataggaatccttaaacattactgactggagattagcatggagctgccattatggaagtacttagtaaaattaaaaatgaatataccatattatccagagtaaatatattc

SEQ ID NO: 492726 - DNA, 608 bp, Homo sapiens
acaaaatgggagaaggacgtacagggtctaaaaacaaaaagagattataatattcaagtaatgactaaaaagtcaacaaagaaataccttcaacttaggaccttccatttaaagaggggaaaggatatgagctaggaattcacagaatttaaaacctaagtaaccaataagcatgtggctatgactagtgacagcccatttgttgctttggtggaattagaaataaatagtcagcctttccttcaaatagctattgtcccatccatgccagtgcacacagggcacaagctggttttgagctcccactcacattcttggctaggtgttcttttgtaagtacccgcatccatatatcatggccctgcatataaacatgctcaaacttcttgaaataaacagaaatacaaatcaaaataacaataggatatyacttaatgaccataagatttgcaaaaatagaagctgggtaatgccaaatgttggtagaagcttgtggacataggaatccttaaacattactgactggagattagcatggagctgccattatggaagtacttagtaaaattaaaaatgaatataccatattatccagagtaaatatattc

SEQ ID NO: 492727 - DNA, 520 bp, Homo sapiens
aatcataagtgaggggcactcctaccattgtcctttcattcacatttgtcagmcaccaggcatcaccagtgaaacacagcacccttttctgtgacatctggaagcggccttaatatctttctcaatacagtgacccaagaaaccacaggaaatcaattggaattacagttttgggtgtatattaagcaaacaacttaatgtagcctataggagaattagagtcacagttctatagagtagggtgactatacgtcgcacatgtcccagaatgttttttgtttacatctcttgttacaacataattaatagcaccccattcactctcaaaggtgtcccaagtatggactataaattatattgtccttctgtttatggggaaaatagtcagacatccaagccctacttctgactgaccatgtaatcttaaggctatgtaaaaccactgaatcaagttactgaagaaaacagataccctgtatatttggtaccatggagatcacatttgttttatgcatatgca

SEQ ID NO: 492728 - DNA, 520 bp, Homo sapiens
aatcataagtgaggggcactcctaccattgtcctttcattcacatttgtcagccaccaggcatcaccagtgaaacacagcacccttttctgtgacatctggaagcggccttaatatctttctcaatacagtgacccaagaaaccacaggaaatcaattggaattacagttttgggtgtatattaagcaaacaacttaatgtagcctataggagaattagagtcacagttctatagagtagggtgactatacrtcgcacatgtcccagaatgttttttgtttacatctcttgttacaacataattaatagcaccccattcactctcaaaggtgtcccaagtatggactataaattatattgtccttctgtttatggggaaaatagtcagacatccaagccctacttctgactgaccatgtaatcttaaggctatgtaaaaccactgaatcaagttactgaagaaaacagataccctgtatatttggtaccatggagatcacatttgttttatgcatatgca

SEQ ID NO: 492729 - DNA, 441 bp, Homo sapiens
gtagttgacacagagatcataggacctgcaaagcctaaaatatttaatatctgggcctttacagagaaatttggttgacccctgtcctagaccttagacccctgctctttccattattctcaagtgccggtggatccagatcggttgtgacattgcttaatctcctggcattcttggggaattattaaactgccatgtaggttgcataaatgctccctgctggcttgaataggagagttttgaaggtgccagatgggaacagattcctttctttcatcttaacaaaaatccaatctcactctctttcatgttcaagagcatttgattaattaggacaggaagtaggggggcgstggggagaacaatccgagctgttgagctggactgagctggcagtttcaggtgctctcatttcagcttctcctccccatgtctagcagg

SEQ ID NO: 492730 - DNA, 563 bp, Homo sapiens
cttggcaattttgactgttttggagataaactgtcagatgagtccatcttcagttcttttttgtcagttatgggcaagctacaacatggggccaagcctgagggcaaggctataatagatgaatttgagcaaaagcttcaggcctgtcatgccagaggtttggatgggattgaggagcttgagattaaccaagcaggtagccagagagccccaacrgccaagaaaccatccactgtttgtaggcaccagcctctggcttctgcagcctcagacaatgacttcgtcacaccagagccccgtcgtactacccatcggcatccgaacacccagcagcgagcttccgaaaagaaaccaaaagttgtcttctcaagtgatgagtcaagtgaggaagattttttagcctagatgacagaagacaggacacccaagaaaataacccccattctcagagcatcagctcgcaggcacagatcctgagaagtcatcttgcctgttcctttcctccctgtgcagggtaacttgtagggtgacctagaattctaattctgttccccttgtagaat

SEQ ID NO: 492731 - DNA, 509 bp, Homo sapiens
ttctcatcagccttggaatatgacggaaaccttctaaggatacgaaattgaactttaattgtgtcagttattacaataatcagggccaagctgtgattggcaacttgtctcccttgtactttctgcccttactcaacaaccccctcttgggcccccagggcttgcctcttaggaagatgtgaattattttgagtgtaattgggcttggcctatgatatagtcattatctgaatccattgtttgccaggtaattgctttgtgactttgggcaacttacttagatatcttgggtcttagtttctaccttataaaattagggtgggtatacttactttgtgaagattaaatgtcccacgtgtttggaacattataggctcccaataatgaacatcttcctttacctctcctcacttcccctttctaccsccttccctttatccttgaaagatttagaaagagatttttaggaaaagggataaggagctagagaatcaagagaaatgttaaga

SEQ ID NO: 492732 - DNA, 504 bp, Homo sapiens
tacttctgatatggaagccttttcaactgaaattacattctgatagccttttggatgagaattggaaagaggaagagaataaaatcagtgaactcagggtagttttgcattggaagtcaacgttacattttcagactatatctctctttcatgttctcctttcctcatataaatacaggcaggccatgtttccagaaaatcaatgctgaagtgagtaaatggtctgcttttcacatagagcgtcggcattgatgactctggcagcaaagttcacatttccagaaatgaagtttctgcctaatggaagaggcttctggtccccagtgggcagaaaatggctgccttcttcatctttgyagagtacaatccgagccaagggatccagtcttttcaaagtagtcccggggctcagatctgcattgttggaagttcagagtgacaaacactgcatatcaaatcaccctggtttgatgtatcagtgaattggaaatcattcccaggggc

SEQ ID NO: 492733 - DNA, 533 bp, Homo sapiens
ccccttgcggtccactggagtgatctctgaacttttaaaattatgcactcataaaacttgcttttcagtggccactcccctcaaatatataactgattaaatatataactatattatgtacatcattaaacagataaaagtagaaagataaagtattaaataaaatgaaaaagaaagtctaatattttcttttgtacccctaggattcctcttggatatcacctggggtgtacaccaccttaccgcatctgggaaagcaactaattacctgcagcattctctttctctctctttttgcttatttttaattttcttaagcatcattcatgaaaagagaaaagtctgcttcgactgatagtattaaacttgcagtcaataaactcttattacagagttatactgtaaaacacacacaagcaaacaaaatcstgtcctggaagttgaataggtcttaacattttagaaggaatatggaacataaaatgtgacacactgtttttcattctctcatgatttgggtttccaatttcaac

SEQ ID NO: 492734 - DNA, 555 bp, Homo sapiens
gaaaaaattataagtgacagagaattaattcagatgttcatttattgatttttaattgactcaacaaatagtaaatgctgcatcattttaattttcaaaaggaatcttacttctcattgagaatattaattggaaccaatagtcagaaattgttttagcataaatgctggtcatatattgttctgaacttatataaccaatatatagaattcaaaagacaaatacacaccaaatatgttatacaacttatcttctagcaataaagcttgtgtagagaaaacaagccctctttcaatagattcattatgactaagagtattttagaaatggcaaaacaggaaattgtgcactttcccctcataaactgtaatgcaaatttcatgactgaacatcagtgaaawccttttgatatgactgaatttgcaacgttctgctgttacagctattcaaggtaactacgtgaagttagaactgtctctggtgatgaaaatgattttcaatatactttcatgtataaaactatattgatggatattatctattcatttttcttca

SEQ ID NO: 492735 - DNA, 575 bp, Homo sapiens
aaaagtgactgcaggtcctccatgccaattcaccactcccactatgattcacctattttctttcaggacagtgcttatcttttctttgttttctgaacatcatgggaacacaggaytttctgatttctgagagttttcaggatagttttgaagcctcttgcacaatctaagggttcagtagtgtcttgtaagaactgttcacgtgatggtggctcctcaaatctccatactcaaccctcctgacctcaagcagtttagtatttttttctagtaattatatttttcctttgccagttttcaacccatgtcatttagcccaggccctggcattggtacaaatgctttttcctctgctcatcttgaaatatttctcctatttctagaattttagtctatctagttttcacaattttgacagctcattgcagccttcagtatatgatttctaaatttatctggcttttccattgctgtttgtgggtacattaatcttttacatattatcctgaggcaaaaatccctgatctgggatgtatttcaatttgaaattagtattgatattaaaattgtcatga

SEQ ID NO: 492736 - DNA, 619 bp, Homo sapiens
tagctattcttaaaggtgtccaataaatcctgtaggctttatttatttcttttcattctattttcttttatttcctgtgatagaacattttcaaatgacctttgagttcacagaatctttattctgcttgatcaattttgctaacactctctattacattatatttttatttaattaattgtattcttcagctctagaatttctgttctgttatggtttctctctgttaaacttcctttttgttcacatattgtttttgtatttgactgaattgttgatccgtattttcttgtagcttactgagcttcttaaaacaattgttttgaattccttgtcagaaaatccacagatctccatttttttttaagatcaattactggaaaattactgtgttcctttggtagtgtcatgtgtccttagttttttataatktttgttgccttgcatggatgtctgtgcaatttattgagaaatcacctcttccaaacttctcatactgctttcattggggaaagaccttcacttacttgtaggtgtgagtgatggctggatgagtggagggttggggagtacagcagttccagctctggtgagggtacatcagtgtcatctccatgta

SEQ ID NO: 492737 - DNA, 632 bp, Homo sapiens
ctttatgtaatgtcttctttctctgtctatatttaaaatttcctcctcagtgtcttcagcaatttgattatgatttgcctcagttgatttcttcatgttttttaatgtaattttaagaactctagttttgatcatcatttgaatatattttagatttgaccaactctacccaactagctcaaatctgaatgagaatttgtgttcaccttatcttatgtaaagtgtggatttactgagcatgagaatagtacatacttgagtattttcctacctgcttcttttctcttgcaacatatggattcagtaatgtaaccatactctccctcttttccttctagcacacttttcctttaaatattggagacctcaaaataatctttgaagaaaggyacagaccacagactgtttctgtgatttacgttttcctttcttctgggcatgtacttagttctaccaaaataaacttcaaaactgattgagacctgtcttagatcctttttggtttacaaaatggccaccaatggaagggactctgagtggaggtggcctttgacaaatctcctatgggttcatggcaacagcctggactaactttattgctcaagctcaaattgtctttattgctcaaagac

SEQ ID NO: 492738 - DNA, 632 bp, Homo sapiens
ctttatgtaatgtcttctttctctgtctatatttaaaatttcctcctcagtgtcttcagcaatttgattatgatttgcctcagttgatttcttcatgttttttaatgtaattttaagaactctagttttgatcatcatttgaatatattttagatttgaccaactctacccaactagctcaaatctgaatgagaatttgtgttcaccttatcttatgtaaagtgtggatttactgagcatgagaatagtacatacttgagtattttcctacctgcttcttttctcttgcaacatatggattcagtaatgtaaccatactctccctcttttccttctagcacacttttcctttaaatattggagacctcaaaataatctttgaagaaaggcacagaccacagactgtttctgtgatttacgttttcctttcttctgggcatgtacttagttctaccaaaataaacttcaaaactgattgagacctgtcttagatcctttttggtttacaaaatggccaccaatggaagggactctgagtggaggtggcctttgacwaatctcctatgggttcatggcaacagcctggactaactttattgctcaagctcaaattgtctttattgctcaaagac

SEQ ID NO: 492739 - DNA, 362 bp, Homo sapiens
gtgaggacaaggttaattcagtgcttaactcatagttggtgctcagtaaatgctagttatatcattactgcatgtggctgcaagatcaagtccattaggtagactgttagagcaggggrcttttggactatctgtgccaaggagtcctaatgagacttgcagcctgggaaggtcattttcctctgggaaccttccactgggctctaaagaccaccttcggtttgcaccctttcactccctcctcaccctcatgctcctaagagctcaccctcccagcctcagcccagagcccagagtgtgctactccccatcacctcagtccactgctcctgggcctgacaaccttggcctcaccttctgga

SEQ ID NO: 492740 - DNA, 573 bp, Homo sapiens
tgcaaagcggccggctggttcctgtagtccctctcctactcactctctcccacgaggggttgagcatggcaggctgagtaaatggagcacccctgtcacgggttccatgaaggggtcaagaaaatatcctgcatcactaactgtcatgctgcagtcaccagcaaggatgaaacacagctccgtgactgtgtggatgtctcagtatctctgcctctccatgcttgtttcatctgggagcygtgccctccctgcactttctcactcagcaatttctactaatcaatgaatacagtttaatgttgctcagtgaagcctccctcaccttccatgggaggtgttaaagcttgttccttgggactcccatagcactttgtttataccctattttaatgtttataagcttgtacttctatgcattgatttagaagcctatctttccaaccagatgatggacttcttaggggaaacttctttgaatggtttcattccttgacttcgaggatactctgctgtctggattttctttctatcactgtatgctcctttcagtcccccttgtgggttttgctgtgc

SEQ ID NO: 492741 - DNA, 573 bp, Homo sapiens
tgcaaagcggccggctggttcctgtagtccctctcctactcactctctcccacgaggggttgagcatggcaggctgagtaaatggagcacccctgtcacgggttccatgaaggggtcaagaaaatatcctgcatcactaactgtcatgctgcagtcaccagcaaggatgaaacacagctccgtgactgtgtggatgtctcagtatctctgcctctccatgcttgtttcatctgggagctgtgccctccctgcactttctcactcagcaatttctactaatcaatgaatacagtttaatgttgctcagtgaagcctccctcaccttccatgggaggtgttaaagcttgttccttgggactcccatagcactttgtttataccctattttaatgtttataagcttgtacttctatgcattgatttagaagcctatctttccaaccagatgatggacttcttaggggaaacttctttgaatggtttcattccttgacttcgaggatactctsctgtctggattttctttctatcactgtatgctcctttcagtcccccttgtgggttttgctgtgc

SEQ ID NO: 492742 - DNA, 557 bp, Homo sapiens
gcttgtaacacctatgagaagacctgcaggagcttacctcccaagctgagccagaagatatttagataattaagaaatgatacctatttttcctttggcccttttgtgtataagtcttttataatacgtttttctacttttgtttgatttatttatttttaatgcaacactggttcaacctattggcaatagaacatcatcttctcaaatgtaaataaccaggtcatggtgggttttcccagggatgacwggtgaattgaagagaaaagcatttagagctattggagatctgcaaacaaagttaaatgttgttgtaaggtcagtaaatacaatacagaaaaaacaatttccctgaatattctttaatgaacagtaagccaaagatgatgtgatgggaatgtaaagcagtgttgtaatttgggagtgtcctagaaaatacattttatagaaatcaaagcagaagaacttggggcaaaatgttatgggtaatgttgggcaaaaatactccatgattactgcaattacttgactggccttctttcctgaaagttgatcat

SEQ ID NO: 492743 - DNA, 604 bp, Homo sapiens
caattatatgggattagggcctagccttacaattctgtttgaacttaattacctccttaaaggtcctatctccaaatacagtcacattctgtggtactgggggttaggccttcaacaaatggattttgtgagggcacaactcagcctatagtggtaactaaaagtgtttatcatttattcattcatttatatatttttcagttagcactcacttttatagaacctactctgggacagacacttgtgccaggtacaggggattcaaagatggtcaatcactgtccctatcctcaattaactcatagtatagttgcagtgatttgcaaacttggctgaactacagaatgacytaaagcactttaaaatatgcagactcttgagtgtgtcagaatctctcagagtgaacttgcaatatgtagttacaaaaaactccttgaaggaaatggtggtttgaacacctgtgattaaatggaaaatactagccatatatgtaagctgctttttagatagtttagctcttttgtgtttgttaaacctcctagtccagcgatgttagaaattgagtttaagggagtttcaagtgcttagtccaagatgaacacag

SEQ ID NO: 492744 - DNA, 531 bp, Homo sapiens
gacactaaaagaactttcacaaaataagttaatttgggatcatgacatgtcaacatggctcatcaaatttttttaattgactgttattactgaaatgatattcaatcaygtaaagtttagaggcactttaagctgaatattaatattcttgcatggaatgtaatagttagtgtagatgtgcagcatttttggagaaaataaaccaattacaataactattgagtatattcctcagttgggctatgctcttcagctaagttagaatccttgggcattattttggcatttggaaccctctttttctagctccagttgcaagatattgtcagaactatttggaaaataattttctttctttttcatcaagttgtatcaacaaataaggacaataatagttactaagcatttttatttatcaattagttttctgggaatgatagactatgtagaaaaacgtcataactgactaccttcagggaacttcagcaacctacatatgaaaaccactgaccccaaatgccaagtttcacc

SEQ ID NO: 492745 - DNA, 628 bp, Homo sapiens
gctgtaaaacaatgaagacggcactgggcagytggctattttttgtgcaactagaggaacatgtcagtagcattaaggaagaaacccataaaccacaagagcatttttatccattctacagactgaagaattgcttctggtaactaaggaagagggccgcttagcccactcacatactattttcttttaatcaactttattgaggtataatttaaaaacaataaactgcgctcttcgtaattgctgtttgatgagttctgacaaaaatatactcccatgcatctaacaccacaatcaagataaagaatattgccagaaaatactcatttatgcttttatccatgcagtctcttctcctcacccccgatccaggcagccagggatctacttttcatataacaatttaaaattttctagagtttctcaaaaatataatcatacaatatgttctctttgtgtttccacaatcttttgattaccataatgtttctgagattcatatgttgttgtatttattagtaattctattcttttaatgctgagttgctttccattgcatagatgtgccacaatttgtccactcatcagttgataggtgtatgacttgtttctaatgtttatgctattg

SEQ ID NO: 492746 - DNA, 544 bp, Homo sapiens
agctggagaagcaacaaggtgaacccacctccagcagaaacattcctggtggacccactcccaggtccaccaagcatctgtatccctgcacccatggccagcgaaactgcatggaaaattcacccccagcaagccagtcaccaaaccaaccaacccactgcacacttatcgtctggccagagaaaaagctcaatggtcccatccccgcaaagatgcaccactgccaccatagattctcacagcctaggccactgaggtactcacaaagatcattaatgtggattatagcctaaagaatcttaacagrttaacagactacactactgtgtccacccagaaccaaggccaactcaacttacccattgacacccatatgactcacctacaggaatgactctccctaccaaaggtactccataaaattggaagaggcaattgtttcagcagatacacaggtatcaacatagagatacaagaaaatgaaaatgcaaggaaacatgacacttccaaaagaacataataattctccaataccagctccccc

SEQ ID NO: 492747 - DNA, 625 bp, Homo sapiens
cttagtttcattggcaaaaatattgtataggttatcagcccaaattttcaccacattttgaaattcccctgtgatggttaaattttatgtgtcaattttactgggccactgggtgccagatatattggtctagcattattctgagtgtttctgtgagggtgctttgggatgagattaacakttaaattggtggactgagtagattgccccccataatgtgggtgagcatcatccaatcagttgaaggccagaatagaacaaaaaggttgatcctctcagaaataagagagatttcctcctgcctgactgcttttgaactgggacactggtgttttcttgcctttgggcctgaactgaaataccagctcttcctgggctcaagcttgcaggtctttggactgaaactacagcatcagctctcctgggtccccaagcttgctgattcactctgcagaacttgggacttgtcagcctgcacaatctcatgagttaattccttaaagaaaatctttttctatgtatatatacattctataggttctgtttctccggagaactctgatatactgtacttcaaaatttctaaatatggtaattttagtgtcagatatttggactgcttcag

SEQ ID NO: 492748 - DNA, 636 bp, Homo sapiens
ttcagttctgtttgtctgaaaatgtctttattttactctcacttttgaaagacatttttgcagtgtgtagaattctagactgtaagttacttccttttgcaagtttaaaaataccattctaatatttctggccctcattgtttctattgagaagtcatccttcagtaatattatggctctgtaattttctttttatccttggcttttataggccttcttgaatccatagctttatgttttccatcagttttaaatagttctatcatattttcttcagctattgcttttttacattatctttctcctttctgtgactccatgcatattcaaacttttcagtgttctctgtatgtcttattctctctatcacatttaaaaatcttttcatatcttcatactttagttcttattttcttctgawtttttcctgttcattctttttttaatgtaatgtactctgcttttaaatccatttgttaagatcttatttttggttattataatttgtcttagttttagaatttccatgtagttattttttatagttcccagttctttacctacagtctatatagtttcttttatcttcttgaatatagttttcataattatattacagttgctgtgtagtgacta

SEQ ID NO: 492749 - DNA, 517 bp, Homo sapiens
atccacacatagtaaacgatggctttccactactgagatttaggtaatttcttatgtggccataataggtgaaacatactgcatcctgtgcttgcccrtattatttcacccacaagaccacacccattgtaattggttgcttttctctccctcatagactctaagttccttttggacagataccaggccactcatcaatccatcagctaatgagtcctctttaaattgcctcatacaggagggcattagctaaaaatgttagatttaaagtgaggagaatttggccttcaccaaagagggacagagtctttacccttggcttctgggagagtatcaatgtcatatctgataggaatatctttgtttagagttgtggcctgccacactggatcttagagtgggttgggctacaccttatagtcttagagtaggtactggccatttcggaaagaccaaccatatgacttagggtggaagctttgggtcacttgcatcagttgatctggaggctgggttt

SEQ ID NO: 492750 - DNA, 634 bp, Homo sapiens
tgcttctaagactttctctctatctttggtttactgcaattttactcgctatgcctaataggagaatttcttttctttctttccttccttccttcttttcatccttccttcttccttcattctctctctctctttcttttccctctttttttgcttttccttccttctttccttcattccttccttcctttctctctttttttatcattactttgattaaattgtattactagttctatttcttctaatattttatttcaaactcaaattatttgtatgttacatatgctcacttctaatcatccaccattttcatattttcaagtatccatgtatttgttattcataataatatttcatgttctaataatattgatgttataatattattatatttcattgtctgatttattttaacatctgaagttattgtcttcagtagtcatcttttgtgtgtagtttctacagcttctcattcatagtactttcatttcttgtggaatttgttattttctactgtgaataggtattacttggaaattttttcttayaatagtattgaagtctgattgacattgaattgtttgaattttctttttgtcactttccctgggggtggacatattactctaat

SEQ ID NO: 492751 - DNA, 628 bp, Homo sapiens
tacagagtgatcttgtttctatgttgttcttccatagtcaaggagtgaccctgtctcatttttgttaatgtcctctggaaattgcttctgctcaaaaagaaacatcatggtctaccccttagtttccatctgccatctgttagttctccgtctcccattattcctgccttaagcaaagatatatgaagcaaggccagaggacaataatctgtatgtagtgttcaattctgcaatgttccccaaatgttatggtttacrgattgttcagggaacttctgcagttgggacaattacatgttatcatttcttttgctgcaggattatgttttgaatagtgtcccatgacagcatcacaaaagtgttgggaaacaacacttgtgctccatgggacccttgctttctgcatgcacacaagaagaggcatggacaacttttgtcattttgtatgtcttgcactttattttaaaggatacttttctagcaaaatgcctggatatataaacatagtatccaccttcatagcagaatgaggatttgttttttctatacagtagaagaaagataatgtcttcttctgaagcagagtttggaaaggtttacttgcagcctctataaaagtttggtgttt

SEQ ID NO: 492752 - DNA, 428 bp, Homo sapiens
aggagctgtccccaacccctagaaagaaaaggaggttgagagaaggaggacttgggtgtcttttagggtttaatgaaatgttctagaatgaggtagtgatgagggttgtaaattattgtgaatatactaaaacccactgaattgtatacttgaaaatgagtacaaagggaaatttttgtgttatgtaaattttatctcaatacaaaagataatgaagagacaatgyagtatatttgtctcagaaccagagctagtaaaggacaaataactccaaacatactgtttcatgcatctgtgcttttacatattttattcttctgcttataattaattttccttaattttatttaatgattgaattattaattactctcatgattcagttttaaaaacatctaatttgagatgcagttgttattgatcatttt

SEQ ID NO: 492753 - DNA, 543 bp, Homo sapiens
cttccagaatttatcatccaggtagaagatgaaaagtatcaagagaaagagaaggaccaagcagaaacatgtgggaagaaaatcaagggcatgtggatagatagtgcttcaaaaaggatgatgcagttaacatatttggatgattctgaaatttcaagtarctggaattacttgaatattttcagtatttttgaagactgaaatattggaaaatatttactagcagtaatgacatgaaagtcataagtagccttagcaaaaatcatttttggaaaatgtctgtagagactggaatactggcatccattaaaaagtaagaaatgaatggaagataggcacttatatatagtgagtagggactactctatcaaaaagattgtctaaaaataagaggagagagtgtaatagctggaggggaagatgaagtagagtcggtgtagttgattttattatttttgaagatatgtggttcaatttttcaaaagagagtacaacaaatttgattaaatgttgaagggaaagactgattttaaggggtgtgct

SEQ ID NO: 492754 - DNA, 644 bp, Homo sapiens
gctgtgtaatttgtgtatattatttattttatcatctctgtgctgcagccagttcgactattaaatgggaataatattatctagtttatgcagttgtgaattttaagagtttctgaaacagagtaacatagttcataacacacagcagggatcagtgcatttgaactctcatcattagtgtcttgactgaatacatttggagatctgtgagccttcatattattggaaattttctttggagaaattagtacttatatattttagctctttttcatttttacttatacttaatagttcaccgaaagaggaacagtgaaaatgtgataaagtgttttgggtttactgaaatgaatagatagcctatacaatacattttgttatctgctaatgcagaacacaatcatattaacattacaaaaaatagactaaaaatccccaagtgatatggaaataaaatattagtaacaagaccttagaccctaaatattagtaacagaaaaaccacaatgtactcgctgtaayatgaaaaaatgaaacaaataatctttacatacctatgatactattaactaaaagatgtttgggtgttttagtcgtatggaggtatataactccaaaaatgcagtttaatactcattacattt

SEQ ID NO: 492755 - DNA, 601 bp, Homo sapiens
ttccctgtaagaagaagtcctcctgactctgcactgaccttggtgtggcagatgcaaaatgccttgctcccctctctatggagaatcttctctctctacctctcattcctggaaatgaaactgtgtcaaaagaaatatattctcttaagtaaagcacataactactactcagtaaatatttgatgaatcatttagaagtttattgacacagtcacttagtgataaccccacataccactttaagacttaacagaaaacaattacacaagagaaaaattctgtcggcaatttttattggctaatattaaagacttcaagccaattscttgtgctagaagattcacaaggttaaccagttacagtaatgattaaggtttgttaacaacaataacaaagataacaagctgactggatgttgtaaggtaactctacactctctctttggcagtgaccccacagagcagatatatgatggaataaacatttctaatatgggcttggttgtgtaatggcaaagctcactacttctagtaagttttagatatcttaagataatatccaatatagtaaatttatatttaaaatcacatagcagaataaa

SEQ ID NO: 492756 - DNA, 601 bp, Homo sapiens
ttccctgtaagaagaagtcctcctgactctgcactgaccttggtgtggcagatgcaaaatgccttgctcccctctctatggagaatcttctctctctacctctcattcctggaaatgaaactgtgtcaaaagaaatatattctcttaagtaaagcacataactactactcagtaaatatttgatgaatcatttagaagtttattgacacagtcacttagtgataaccccacataccactttaagacttaacagaaaacaattacacaagagaaaaattctgtcggcaatttttattggctaatattaaagacttcaagccaattgcttgtgctagaagattcacaaggttaaccagttacagtaatgattaaggtttgttaacaacaataacaaagrtaacaagctgactggatgttgtaaggtaactctacactctctctttggcagtgaccccacagagcagatatatgatggaataaacatttctaatatgggcttggttgtgtaatggcaaagctcactacttctagtaagttttagatatcttaagataatatccaatatagtaaatttatatttaaaatcacatagcagaataaa

SEQ ID NO: 492757 - DNA, 642 bp, Homo sapiens
tttcctccatgtggatggagacatcagaccatacatactgtaatattgagtcagaaaattactggttcagagctctggtttcacatctggctaatacattgcaaaaatattgcctagagattgtatatggtctttgaagacctagatactattgaaattaattgaatttttgcaacatctggataagcagagatgtcgtgatagtaggaaatggccttatacttgctacatacaaagtctgtacaaaaagatgaacaccaggtgcatttcaaatgcttcatttgtggcgttgtccacattagttcttcatctgtgcctagatttcattgcccttttcaacatcttttttttgagatggagtctcgctctgtcgcccatgctggagcagtggtgcaatcttggctcactgcaacctccrcctcccaagttcaagcgattctcctgcctcagcctcccaagtagctgagattacagttgcacatcaccacccctggctaagttttgtatttttagtagacatggggtttcaccatgttggccagtctggtctgaaactcctgacctcaggtgatctgcccacctcagcccctcaaagtgctgggtttacagacttaatgttaaataaaataagcccctctaagc

SEQ ID NO: 492758 - DNA, 482 bp, Homo sapiens
aaacactgcacaaacgtaactctccctcttaatacattcacattctaccaacgcttcrtaagatgtgcaccttatagtcactttgagtctcccacacagtgtgggtgcactggagttctatgctcgggggcatcatgaactttgtatgtgagtgaggcagcaaggacttgtaggagatgtgcaaactgcataaatctcctttgctcaggcacaagcttgattggcccattagacttcacttacaaaatacaagttcaaaggaaaacttggcaataattttaaggtgtaaatagcagagcattaaattaaatgtgaggccattttgagcatgggaccctgtgtaactacacaggtaacacactcaagaatccagtcttgaaagagaatttttaatttgtatgaattagctggtatcaggcttctcctcctcctttttttccctacaggtgctatgttcaattaaatactgcagggaacgactc

SEQ ID NO: 492759 - DNA, 482 bp, Homo sapiens
aaacactgcacaaacgtaactctccctcttaatacattcacattctaccaacgcttcgtaagatgtgcaccttatagtcactttgagtctcccacacagtgtgggtgcactggagttctatgctcgggggcatcatgaactttgtatgtgagtgaggcagcaaggacttgtaggagatgtgcamactgcataaatctcctttgctcaggcacaagcttgattggcccattagacttcacttacaaaatacaagttcaaaggaaaacttggcaataattttaaggtgtaaatagcagagcattaaattaaatgtgaggccattttgagcatgggaccctgtgtaactacacaggtaacacactcaagaatccagtcttgaaagagaatttttaatttgtatgaattagctggtatcaggcttctcctcctcctttttttccctacaggtgctatgttcaattaaatactgcagggaacgactc

SEQ ID NO: 492760 - DNA, 249 bp, Homo sapiens
cttgtcagcctgttgatggaattagagtaatacctggggggatggggtgtttgtattagttttggctctggagctgaaggaagaatgctagcatttagcatcttgatatattcttcggcaccagcacatcctgggacagcaattacacttcaaagattcctcaggaggggctggggttgagccccctgggaagktgtggctacctgagcaggcttgtcctgcctgatgtgggaggtggtgggggggggc

SEQ ID NO: 492761 - DNA, 573 bp, Homo sapiens
agcttttaccacctctcatctctccttgctttatcctcaaatgggaaggcaatatagtgtgatggttatagcccttcatctagagtcaagtggctcaagtttcacatagaacctaygttagttgtgtcattttggcaagttatttaaccttgtgaagcagttacttctgtctccccttatagatgagaaaccttcagagaagctgtcatggagattaaaggtagggtataatctatttggcacaatgtctggcatgcagctagggtaagagtttttactacaatggctcaagttatgctacacattagaattacctgagcagctttaaaaagccaccctgatgccctggtcacatctcatacaaaatcagtgtctgggattggaagccaagcatcaatactttaaaaaatccgagtgtgtagcaacgtttggaagacactgatcataattttcccaaagcaggttttaggtgccttgagttttcctgatttggggcactcagccacctgcctgcagactcctattcctttagtagctctggcttcaaatatttcctgcataggtgtgaaagat

SEQ ID NO: 492762 - DNA, 435 bp, Homo sapiens
taatggctcttaataatgatggtgatgacgataattgcacctcccccacagcataaatcttgctccacccgggctggttttggactcctctggctccttacccggcctgggaacctgaggggcatcgagccagactcacgcccgcrtcccccgccacgcctagccctggtgtggaactgcacagatgcccccactgtcccctcccgccgtcccgagttccctggggttgctattaagaaacctgtgacctggaagctccctcctggcttcaagtcttcctgcctttgcttcgagtcgtcctgcctttcaacactgaaccaatgtagttcttacatatattgactgatgtctcctgtctccctaaatgtccaagactaagctgtgccccgaccaccttggacacatgtcatcaggacctcctgagtctgtgtcatg

SEQ ID NO: 492763 - DNA, 608 bp, Homo sapiens
ccccacgctgagtcagctttgagagtccatgagctcggctggacctgggccaggaccctgtggtccctgctcagccgatgggctgggctgggctggggtctcttgaaccaggccagacttgcttttcttgaaagctgtttctcctcttggcctcccagggagcactggcccctcaccccccagggcttatgagagatggtgcttcctgagtcctgaccccttcttgcttctcagggccaccctgaagtgtgataacacttgatccaaaataatcaacttaaatccagtcacagtggctaacactgacagcatttccactgcgccaggcattgctccacacacgcctcgacaacctctggggcagggactgtggggagatgacctgaggggctgtaacccactgcgcatgccgagatgcatctgaaagtgcaactgaaaatccacaccggggcgacggtcctgcaccccctagcctgtcctgcgtgagccaagatgctggagcatctcttcttgcatccattttagaggtgaggaaacaggcacagatcagaggccccgtgctgagggcacagagtgacwggcagaagaatcgctggggctgcagccct

SEQ ID NO: 492764 - DNA, 617 bp, Homo sapiens
cagctgctgccatttcatggtgaagctcttggatgatgggactttcatgatccccggggagaaggtggcccacacctcgctggaygccctggtcaccttccaccagcagaagccaattgagccgcgcagggagctgctgacacagccctgcaggcaggctgagggcggggaccacaaggttcacagccatttccttggggccaagcccacgacccctttgtttcccacgcccccatcagctcctcttgattctgtcactctcatggtccttggcccctccggccccaccccagtagtccctctgccccccacagcggtctccgttgtggttcctgcttccccatggctccgcctccaggcccatgtcaacaggctgattttttataagggttcatgtgccaggtataatcttggctcatctgaaggaatgacatctttccttagaaggctcggtgggcgtggcctggctcccaatacgctttccttagaaggctcagtgggtgtggcctggctcccaataaactgctgtgggtggagcatctttccttagaaggctcagtgggtgtggcctggctcccaataaactgctgtgggtggagcatctttccttagaagct

SEQ ID NO: 492765 - DNA, 486 bp, Homo sapiens
acccacctcggccttccaaaggtgagccactgcaccagccgacagccttcttaataattacacagaagcattttttctatttagatatattttatctttaattccttttaaaatcagttatattttgtttagagaacatagtcaatatgwcataatcctgattctttaatatttgtattgggcttgtttgaatgttaaatatatgcatgaaatgtgtatttttgaattttcaggtttgccattccttatgtgggatattttatgcatgttaatttcattattcaaatatgtatgtatctataattttttttcttctgtttgatctctcaattattgagggacttgcatttaattcttctctcggaagacggatttattaagtctcctgttaattctgttacttctagttttacttaatttgaagttatcttgttatatatgtaaaatgcccaacatattatatctgcagggtgaattacacagttt

SEQ ID NO: 492766 - DNA, 575 bp, Homo sapiens
tttcttatagaagttactcttgtttcaaagccattttctcatgagatgattatttttccattttctttcacattcatagggggaaactaagtctgttttataatgttccaaaatctctaagggtaggtaataatttataaagttttgtgtgaatcaataaaacaggttttgggttttatttcattttagtgaaaccaactggattttacattaacacgataattttcatagttttatcatttctcaatcctagtactgctcttttcacaataaaatagcagtatttttaaatagtaagaataatccatgatttaaatacatccttctgtttatactataggaaatggatttttaaaaagactggccataagcaaagaacaaaaagaaaaaaaccaacacacatacagagataattttattatttattctaaaatgcaatctgtttgcttagcttaaatactgatattaaagagataaagataagacaagatgctacatgctacatttagcacaatggtaaacagagtagtagcaaatrttcttttgattttataaagatatattcatgctttttc

SEQ ID NO: 492767 - DNA, 534 bp, Homo sapiens
ggtgttggcttgcatgcatgttttaaaaggtgatggggtttgagcaattttatgcttgcaggtgaggtaggtgctgcagtccaggaagctgataaagaatgtctgaaataactgccatgtgttacacagaaaaaggataatgtagaaaagcaggtttttaatgttgacaagattggaatgttttataagaatgttggcaaagaaacctgcattatgcaaacggcctcgaaaacccctggtcttaattcatgcaaagacaatgaaattaattatttgtaacaaatatataycaaagaaggtagttttaaacgaaacacacagaaaacaaagcttcgtattgatcagttgatgaacatgtcctggccagtggtactcaggaatccagtgttgtctttccccgggaaaaagggctttatatttatttgctaattgagtgtttcatgtctttagagaacatgactatcgtgaacaatgaaaatctattatatattcagtcatataatatataaagtcacatatatgtggtttagttta

SEQ ID NO: 492768 - DNA, 651 bp, Homo sapiens
gctgcactaaagtgctatttgcttaatctgcaaggctattgtttcagagacaccaagcattcaaacgaaacatacttcactaggaattatcaggagtaaaatgaagtgatgtttttctctacaaaatacaaaatagagtttaagtgtgatgctgtaaattgaggtataatgtaatcaattcatgaagtacacatagctgccttacatattttgtgtcaattgatggatttgtgttagaatgtagtactgtttacatgatagtacacaatgattggttatctagattaaatcatgggtatagtaaatctaaattaattattacctgaatcatagtcataaatttcattttattagaaataaacaggtttttaattaatgctttactcatagctcccttaagaataaatatggaatgaatggactgtttaaatgcatctatatatatatacatrtttatacttagcagttgaacacacatatatctctagatacatataatcataagttcaatatcttccatccttttaatcagttttccaaagacaaggatatagaaactattaaagtgaagaaaatatctatcaaagattagggaagcattacatgaagaaaattattttttgtttatctcctggaaataatacatttaga

SEQ ID NO: 492769 - DNA, 651 bp, Homo sapiens
gctgcactaaagtgctatttgcttaatctgcaaggctattgtttcagagacaccaagcattcaaacgaaacatacttcactaggaattatcaggagtaaaatgaagtgatgtttttctctacaaaatacaaaatagagtttaagtgtgatgctgtaaattgaggtataatgtaatcaattcatgaagtacacatagctgccttacatattttgtgtcaattgatggatttgtgttagaatgtagtactgtttacatgatagtacacaatgattggttatctagattaaatcatgggtatagtaaatctaaattaattattacctgaatcatagtcataaatttcattttattagaaataaacaggtttttaattaatgctttactcatagctcccttaagaataaatatggaatgaatggactgtttaaatgcatctatatatatatacatgtttatacttagcagttgaacacacatatatctctagatacatataatcataagttcaatatcttccatcctttyaatcagttttccaaagacaaggatatagaaactattaaagtgaagaaaatatctatcaaagattagggaagcattacatgaagaaaattattttttgtttatctcctggaaataatacatttaga

SEQ ID NO: 492770 - DNA, 477 bp, Homo sapiens
tatactaaacagcttctctgctttcatgtattgacaacccccactaacgcctttaaatcttggaatattcagttttatttgatgtgtgtaggtgtgtaatgttctgaataacaggaaagtgaatcaccgaaaaaaaaaaggaagaaagaaatgggcttaaaaaattaaacaacaaaatgtctacgggtttatttatcattttgtaagatctcaccaccacagggcatttcaaactgaayagcttctttgagagaaaaatcatcctggtgactgtttaggtgttcttttcaaatgattatgggaattatggcactttgattctttttgataaatacttagtatgtacttactgagtggaaggctggaacagaaatttgcatagagaaatgtaagtggaatcattattgagtagagtcaagtaacagtgggtttgagccccacatcagtcatgttctactttctctaagatagttcagg

SEQ ID NO: 492771 - DNA, 541 bp, Homo sapiens
aacagctgtcagtgaaatcacgcacagtagatatttttgtttagtattgaagcaaatcaagggcaagactaaggtcacaatagaacctgaatagtcaaaaggaatgattccttgagagtgggcatgaccgaacattcctacgttgttaggtctaggagccctataaaagcaattactcacaagtctaccatggcaatttcataaccarcctggaaaggatcagacaacgacatcaattttcctctgatggatatgggaaaccctcagggaaaggtaggattttaagagttatttaacattatggcagaagtttggttgaatggtggaatgctctggaactgacataacttgggagatttattgtacagaaattggaggggactttgcaccgataacagagatgaggggaaagacacatcagcaagtaatgtgtttctactggtaggctggtaaatgtttaacaactggctctcaaaaaaaaaaaaaaaaaaaaccctgaatttacatagtgtttttttttaattttctgtgatataaatat

SEQ ID NO: 492772 - DNA, 492 bp, Homo sapiens
aacaacaacaacaaaaatgccatttgattcgtgggctgagccaatccatctgggaaatctctcaaagaaagtagctggaaatgacatttcagctctgattttcctagtcaagtctgcaccttaagccaaagactcaaaaatagcactccatctagatggtgtaaatacagtgacacttgagtctcttcactttggtcttttaagagtgattttaactctttcagagataacatgggagactgaaggggctggatgctggaaacgagactgtccacatcttgtttccagaaaacggattactctgctrgcggttgattcttggatttcctatcataagatctgaaccctgggcctgatgtacagtgaggcgtgcgattggcatttgcagaagccttgacatcccacactgcagttcatgattggtgtcagacaaagaagcatattaaatgactgccggcccggtgataaggccggttattaccgaggtgtagt

SEQ ID NO: 492773 - DNA, 626 bp, Homo sapiens
tgctcaggatatttaaaatagtgtaagcagaaaagtctcttccacctgctwgctacaaggtttgattctgaggatagtgtactcccaaagacatacctctaaaggaaaaaaaataccatttgattttctttccatttttaaaatctgatatcactaataataaattttatgtatttttcctaagtcaaagagagaaataccttattagtagctgtctgttgcttacattgaaacagccataagaacatattttaaaagctatgccttataaaagtgccttttttagaaaataaaaaaaagagagagagactgagaaatttgctaattgctctcaaattcaaatctccaatcaactgaacacaattgtaagtaaatagggcctctttgggggaaggtaatcttaattatgtggcaagctacagggacacccaagtttatgtcagtagcagattctgataagatatgcaccaaaggaatcatgtctggactgtttcaactgggagggtgttggtgtaatgttggtgtttagctgtgatctagagatcagcaaaggtcaggctggacaaaacagcgcctaatgaagcttctcgtgtttggggtgaaagagccacaaagcctttcaaatt

SEQ ID NO: 492774 - DNA, 475 bp, Homo sapiens
ggctcactgtctggcaagacctggagaagttcactcttcacttacagttcagagtacaaaataagtaatcagtgtttgtcaagtagcctgaatataactggtacagaatctacacgacgctaagaactcaatcactgagaattcagccactgagaaaagggaatactgtatatttgacaattggttttaatgtccataggacgttctgagggcccacctggtctagcttccgaccmatctcaaacttgacaccaactactttgactgcagccttgaagcgacggtctctgtaactaagagtgacttctagagctgctcacagtacgggaataaggtgtctgagctgaagaaatgataccaaaaagcctaaaattgctggtggaggctttctttgaaaactctcactgccgtactgtgaggtttaatgtaagatttgtcctactcccatttctcacttttattgaacgatgctcac

SEQ ID NO: 492775 - DNA, 451 bp, Homo sapiens
tcctgttacttgatggcattttcgttgtttttttttttccagactagattaattgggaaggccctgcagtcaagcttcaaacttcttggtattcaaatagcaacactttaaaattgtcaggcaaagaggtgcctgcctttttccattttattcagatcatgccagctaagctgacctgcttgtataaaaaaaaccaaggccatatatatactctaacatggaaaaaaaatccttgctctgaatgacccaaagaactctaccagccgggcacggtggctcacacccggaatcccagcactttgggaggtcaagacaggcagatcacctgaggtcaggagtttgagaccagcctggccaatgtgataaaacccyatctctactaaaaatacaaaaattagccgggtgtggtagcaggagaattgcttgaaccccggaggtgcaggttgctgtg

SEQ ID NO: 492776 - DNA, 593 bp, Homo sapiens
gctgtattttttaatgtaatcatctcatgtaattataaatgactttaaaaatcatagcattctagaaagattctgcactcagattgtttcacaagcatctttatgttcaccaataaatatgccaaaatgaaaatgtgatacgtttttaataaagatgagaaattaaatgtgtgatttacccaagaaagacagtgctgacctataatcactgtgtccatacttaaagggaaggcttcagttctacctcaggacactgaccaaagcatgcacatcttatgcttcacattaaaataaaactatttagctatatgattatcatttgtatgggttcctacgttagctgacttttttgatgaactgaacacttttctttcyttgtcaggttggataagaaggctttaactggactaggagctgcgtatgcacaggactgtgaagatagaagtccttcctgccttcccaccacccttaactcttgtgtggccttttcaaaggacaaaatctccagatgcgttacaaaagacatacattttggttttgcattttttgtttctatctatttttataggcaaattattagtttactcactttc

SEQ ID NO: 492777 - DNA, 651 bp, Homo sapiens
gaatgcagcccaacacaaatttgtaaactttctaaaaacgttatgagatttttttgatgttttcttttcttttcttttttttttttttttttagcttatcagctattgttagtgttagtgtatttcatttgtgacccaagacaatttttcttcttccaaygtggcccagggaggccaacagattggacacctctgtcttaaggaattattctgctccattttatcaattattgaaggctatgtacatcatgttgccctagtatattttggtttcaggaagcatagaactatcttgaacagagtaatgtgagaaaattttctgttcttgtttcagaggtaggaaaagttggaggacaagagttccatgtgaagagatatgagggtggactagagagtgcaccattctctcttccaatcagtgatggtgtcctgctctagctaagcagggaatgcatgcaggattttagaatttgaaccaccagtggcaagttaggttatcctcagaattgtacatctggtatcctcccagcttttattatttctttgttaagtactagcctgatttacatggacttttgacagttttgaaagatatttgcttcttccctgaaatcaaattaccactgcgtgaaaatatgacttacagaatgg

SEQ ID NO: 492778 - DNA, 546 bp, Homo sapiens
agttgttaataaagactcagtctatccaatggggatctctggagctggtatgggtttttaaagttgcctagaattgagtcaagggaaataccttttgcattattctattgaccagtcagtggatgaatgatagtcacaagaaaggatttaaaagtgcgtggccaaaagcaatgcatgagaagggactcagccatgagcagtcagcagtgggggcaatgagtgctttaattttacaatcagaatcttgaagtcctatttaattttgctcttaaattgtaattctaaataaaagaacatcttaagcataataaaacaatatgccttgttgatatttttgttaacaattttctttccactttgaaacaaattagagcccataaacaaggtaaaagcaaaagcacagcagggattckgtgaaacatatgatctatttaggtaccattctttacttcttgttgtgtttccagtttcagagctttggggatgttgcttctcattgcagggctgccaaacatggttgactattatgtttgtaatttgtgagca

SEQ ID NO: 492779 - DNA, 541 bp, Homo sapiens
gggtgattcaagtggcatagacaagaacagtcagttatgaaagtcccaaagtcaagcagacatgtaggttttccagaaattcagagtatgtgtgtaacttgtagtctgcaaatgaccacttggttctattttatttcattattttttaattttttaaaaataattttatcttttattttaaattcaggaggtacacatgcaggtctgctacctaggtatatcrtgtgatgctgaggcttggagtatgattgtttctgccacccaggtacttattttttcaaatgttgtaaaacatacattatacataacaaaaagtttaccattttaagtatatttatgtgtacatttcagtggcatttagtacagtcatgctgttgtgcaacctctaccctatgttttaaaataaatactgtttcggaatacttaaattcacagaaaagttgcacagttagtacagattttgcccacacttcttacctattgtcccctattattaacatcttacagtataatgggacatttgtcaaatccaagaaaccaa

SEQ ID NO: 492780 - DNA, 541 bp, Homo sapiens
gggtgattcaagtggcatagacaagaacagtcagttatgaaagtcccaaagtcaagcagacatgtaggttttccagaaattcagagtatgtgtgtaacttgtagtctgcaaatgaccacttggttctattttatttcattattttttaattttttaaaaataattttatcttttattttaaattcaggaggtacacatgcaggtctgctacctaggtatatcatgtgatgctgaggcttggagtatgattgtttctgccacccaggtacttattttttcaaatgttgtaaaacatacattatacataacaaaaagtttaccattttaagtatatttatgtgtacatttcagtggcatttagtacagtcatgctgttgtgcaacctctaccctatgttttaaaataaatactgtttcrgaatacttaaattcacagaaaagttgcacagttagtacagattttgcccacacttcttacctattgtcccctattattaacatcttacagtataatgggacatttgtcaaatccaagaaaccaa

SEQ ID NO: 492781 - DNA, 534 bp, Homo sapiens
cggtggcatgcacctgcagtcccagctactcaggaggctgaggcaggagaatcgcttgaacccaggaagcggaggttgcagcgagctgagatcatgccactacactccagccttgatgacagagtgagctccgtctcaaaacaaacaaacaaacaaaacaccttgcctcagttttcccttacaccttatgacttatgcccctcagttgaattctttcttctgaggaggcaagaatcgaggttgctgcagactgcacagatacggatttgctgcagtaacagtacctcagatctctytggctggttgggctaagaaaggacgccaggcttaccttgtacagctcactttgaagctctgctgtatttgtttgataatccgagatgtatgattacactggaaaaataaagggcttgattctttaaaaacatcagcaggctaccatgctagaataatctttaaaatcatttctagttccaaaactgtgagagtcagagaggtcagagaagtgagcctagaagataatgtctgttgaca

SEQ ID NO: 492782 - DNA, 571 bp, Homo sapiens
atttgtgatgtttctcctcataaatcatacattctctacttcgttctcctttgtatctgagaataacgttctcttcgttattctcagttacaaagatctgaggaggcattcagacgaaatagatatracaatatctatgtgttaatacacatgattaaagactttgttggtgctggaataccagcaaaatgatagactaggaagctcctaatttgcatttccccacagaagaattttttaaaacctagaaactttctgaaccaattttgtcacagcactggaaaacagttaaaggtttacagcaatcaagtgaaggcccaatcaagaaaaagtcatcttcaaaatggcagggaagttttgtgttttaactcaccctggccccatcctctccccggtgtggcagcagtctttgtcttgaaacacagcagccagccttgttccaatttcctccttgtaaactggaagaatcagagcagatattacttgcgaattattatatacatgtcttttaaactgtctgggagataagtgaaggactgactcactaatctgtgttacctaactcagaaca

SEQ ID NO: 492783 - DNA, 639 bp, Homo sapiens
ctttgggttttgttcatctgtttttcttgtattttaatcagtacactgtagggtcggaagggtcccacccacgactgggagcttgaagatctttccaggggccgctgggtggtttgcttcagctcatgtgactcctcctatcacatytgaaaaactctgaactgagtaaactcacattccatttaggtgagatagcaagttccaaatgatgaaaacagtttgcaaagaaatgtgctagaatattttgaaaacagcttgtacttgaaggaatgcagggagagtgagattagagagagggattgcttcaatcactatcagaaattcctgagcacaatctttggtatatgggcactttttttccttataaaaagaaatgtgactaaagagtggagaaaatgccccctccatttgtcttcttgtgatcctgcccacctccaaggtccagctcagctatgacctccactttggcctggatcccactccagcctcaaacctcactccttcctctgaaccactgactggctgtgatatttcctttgatacttaatctcataaggttttatattgcatcacttatcttccaataagcagattgtgagctattacagtgctgacaaagatcaaattaaggctgagtcc

SEQ ID NO: 492784 - DNA, 639 bp, Homo sapiens
ctttgggttttgttcatctgtttttcttgtattttaatcagtacactgtagggtcggaagggtcccacccacgactgggagcttgaagatctttccaggggccgctgggtggtttgcttcagctcatgtgactcctcctatcacatttgaaaaactctgaactgagtaaactcacattccatttaggtgagatagcaagttccaaatgatgaaaacagtttgcaaagaaatgtgctagaatattttgaaaacagcttgtacttgaaggaatgcagggagagtgagattagagagagggattgcttcaatcactatcagaaattcctgagcacaatctttggtatatgggcactttttttccttataaaaagaaatgtgactaaagagtggagaaaatgccccctccatttgtcttcttgtgatcctgcccacctccaaggtccagctcagctatgacctccactttggcctggatcccactccagcctcaaacctcactccttcctctgaaccactgactggctgtgatatttcctttgatacttaatctcataaggttttatattgcatcrcttatcttccaataagcagattgtgagctattacagtgctgacaaagatcaaattaaggctgagtcc

SEQ ID NO: 492785 - DNA, 362 bp, Homo sapiens
ggaaattacggcagccctgtttgcattcaacttggcctacactccagaaagacacagtgaatttagggaagagtctaaattttttttcaaattatgaattttcactatattctaaaatatgagttgctcaagtaggagaagcgggccatccttcaaaaccaagctcctactctaaattccctatgagggcagccacgtaggtatgccttggcatcaaccttgcaggaaaagaactactaacatggtgaattccacttcctggacaagtatcatgagcccaggttctcacatcaatctacataagcaattgytttctaagaaaatcactccagactggggacactctaattctgcttcccaaa

SEQ ID NO: 492786 - DNA, 542 bp, Homo sapiens
cttcttccttatgggcagcggctctgtgggaaacacaatgatggttctcaattgccaagtggttcagaagactgggactttgtgaagacgtgtcacgaacatcttaaccaattttattctccatatattcctcactttatgaaacagcgctctgtgatttaacattgtttttaaaaactttaaagagtacttccaacaattataaaattaacattctaagatgtaagaaactggtctggtcttagtggtgcttaggataatggtgctatcctacaatggtaagttgcacagataagcactgtgctaggatctttcaacttggcattggatattgctatggaaattgtcaattttattaacaatgatttgtaaaggtatgtaaaaatttgccttttcatagtaaagtttgatgtctatctctagagaagatgtgatactggtaggaatatttaaatgacactatgtatatatagtgagacaaaatcactatatacatacctacatacrcacacgtatatacagtcatgcattgcttaacaact

SEQ ID NO: 492787 - DNA, 572 bp, Homo sapiens
tagaactgatatgtctaaagataatatatatcactcatctattaatgaaaccttacaaaataagacattaaaaatttttcaataaaaaccccagttcattagctttaacagtggcactgctccaactaagaggtaagacagtaacactgtctcaactaaaagataagacagctcaattcaagatgatacaacacaaattatggacaattttatctgatttgcttgctcctctggycagcttagtcagcttatccttttatattgagaacaaaaaaaaaaaaatcacaccaaagatacctggccaactaacactaagaaaataaaatagataccccccaaacagtatattcatgccattatattacaaagtactgattgacatgccactaaatagacacaatgaacaagcatttattggctagctccaaaaagaacaccttggctgtgtgataccaatctatggccatagttaccatgttctttgggttatatttggacataagcataccaaagcataccatttcaaaccccacaaaccttcctcatttgtaatcttattgggtttattctaa

SEQ ID NO: 492788 - DNA, 445 bp, Homo sapiens
caccttttcaagatatacaactgtactgggttcagttttttctatatattttatatatattatagcatacacatataatgcttggtactcagtaagcactgtttattattattctcttcatgctaataacacttgaaattgtttttaaaaattaaaaaataattctagataattcagacataatttctacacatcatcacaacctctgaaaacactatctccattagacaactatacaggtctcagtgatgttaatgatgatgataatcattaataataatgatagtagctatcattttttgtggaatgtgttattttggcaggctctgctctaaagtctctcaagaacccttttatagttactatattttctcttctttaattgagagaaatygagtcgaaagacagttaaattaagttgaccactgtcactgggcaagtaaac

SEQ ID NO: 492789 - DNA, 484 bp, Homo sapiens
tgagtaaattagacattctgcctataggattgcttcctggactcttacttatctacattaaaaattatatgtttcaggccgggcgcggtggctcacgcctgtaatcccagcactttgggaggcggaggtgggtggatcacctcagrtcagtagtttgagaccagcctacccaacgtggtgaaatcccgtctctactaaaaatacaaaaaattagctgggtgtggggtgggcgcctgtaatcccagctactcgggaggctgaggcaggagaatcacttgaacctgggaggaggcggttgcagtgagccaaggttgcaccactgtaccccagcctggatgacaagagcgaaactctgtctcaaaagattttttttaaaattacatgtttcatagtgatgttatgaaaaagtagcaacatagatattaattccaaggccatggtgactgttataattagttaataaaggcaaggaagcaaatagaaa

SEQ ID NO: 492790 - DNA, 256 bp, Homo sapiens
aagggaccatcctgaagaaataggaactaatcatccstgagccactcctccccagattctaaagcaccagccacatgttgataggaaggagagtgggatctctccagtctctccaactgagccctgatccctcatgccaagcaccagacacaggcttaagttgaaatgatcttcgacacaggaccagaagcaaacctattttgaaaacacagtaggtgaagtttaaaaaaggttctgatccttccaagtagggaag

SEQ ID NO: 492791 - DNA, 637 bp, Homo sapiens
tgctttaacaaccatgaattggatttaccaccttctcaattatttgcttattaatcatgtgtttggtcaatcaaaatacatgattaataatttgcatatgctgtttcattaattctttcagatattttacttcatatatgagggaactgagacttacaggatttaaaaattttgtcctagaatcagtagacagtaaataaactttatctatgttacttaatacctatatgaattctattttattctaccaacttttgtgatcatgcttcttttttccttaagagcaaaattcaaattatcaacaggcagcaaatctctgcataaagtgattgtgtctatctactttaaccaatcaatgattttttgttgtatactgaagatggtgatatatcttggtagcacgtataatgacatcagccacattcaatagaataaaaagaaaattctatgccagagattcaaaatgatagatacatattcagcttctaaaaaccttttgattaaagtagttrgagcatgctacactttttaatttcaaacaaatgtaaagtgaaagaaaagatgaactggtcaaagtatgtgaattaatcccaaaatgaatttacttttaaaattgagttttaacataattgatcaa

SEQ ID NO: 492792 - DNA, 639 bp, Homo sapiens
attagcactgctttgaaactattatttataaaagccatcagaaacttcttaatttttgtttagatgtatttggatctgctttttgggcctgaaactatttatcttcacaagtaacaaatgcttcctttagaattaaaattggggtcagtctctttttctgcattatgtttcattaattattcatttacatgtatagcactccatttatacctaattatatattatataattataattataggtagagactgcctgttgtttccatttatatcctcaatatcttgctaactgcttgcccagttatctatcatatcagtagccattatatgttactaaacacttggaagatatggtttttgtgaatacaaatacttcaattctttacagttcaaatagttaagaatccacacattcatttatcttattttttctattttcatattaaataaaatattttaataataaaaatatttttacacatcaaaagtatcagtttcagaacaaaagtttttttaataatcaaaatttgataagattttaaactcctrttcaaaccggcagtgtaaaatttactgaacgtgaggtgttcaatattccaaaattatggttctcagtgactagtctcatgacataaatgag

SEQ ID NO: 492793 - DNA, 627 bp, Homo sapiens
cttttgcattgtaaatgaaattttaaacatttagtgcatagataagtagactgcttatgtaaaaaaaatcagtggaatctacaaaaatactagaattaataaggaatttagaaaataacagcaaactaagtgaataaacaaaattcaactgtatttctatataatagctatgaaaaactggaaaatcaaattgcaaaagcaattatattcaaaatagcataagagtagagccaagatawctgtctagatgcagccaggaatagctcctcccactgagagaccagactatcaagaagacgggtacacttgtagcagatcttcagaaggaagacatttagagtgtacagagagaggatgccgaatctgggctgagtggggtggatcgtaagaagcctgcaccttgttgctgaggacgaggatttgtttcttgtcctaagtggctcctggagaaggaatgagttaaataggcatggaatggcccactctcaccatggatctccagaatcctagcagcaggagtccccacaaccccaatggacatttgagcaggcagagaaaactgcttggaatgttggcagagaaaggactccaggctgtgcagatcccagagggttaggtaccagaaca

SEQ ID NO: 492794 - DNA, 524 bp, Homo sapiens
cccaatggggaagctcgtggccctcctgccaacsccccagccccaccccgtgaccttggaccttagaccccctggggagctgggatcttgccgagagtctcaaccccatcacggcaggcctgggaccatcgcggctcccacacccacacatgaccctagttggggtcttgagactccgggggccctgagtaccgtaggggccgagacgcaagcctcggacggcggcctgctttccaacttaacgctgcggcacgcggcaggcaggtggccgagacctctgtgtcctcacagttctaaggagggaactgtctgcccggatctaaggaaggaattctacatgcagtttcaccccgatttgcctcacccctgccacggctccaacgcagccacgcggcacccccagacccggccacgtggccgctcctcacagtgacacgggagagggagcggaccccgcagcactgggcgcgtcctcactgggtgctgcgattccctggccgtgcctctgccaccctccacggcag

SEQ ID NO: 492795 - DNA, 636 bp, Homo sapiens
tgatggatcttgtccaaagacttaggttgtccaacagaatatttcagatgacaggagctatttctttatgaatacggttcatctgctcattaaccgttatacccatgtgactgtcattagtgtacttgagtgtttatgcttgtaaaaatgtgtgtgttagtattgtctgttttattgtgtaaagtggcctatgaagcatgctgtcatgtttttgtacatttctcaaataagtcttctttttaaaattgtaagcaaatgtctttcaaatcattatttattttttcctttttctcgctaacatttgagataaagaattttttaaatttttatggacacatagtaggtgtatataattatggagcacatgagatattttgataaaggcatgcaaagtgtaataactatattagggtaaatggggtaaagaatttttaaaattattttttcaagaactacatttttcaggattgtgatttgggggattttagactttagggattttgatctttcaggatttcaacatcctggattatggtgttcgrgactgtgtcagccccactccagggcaggagaaaggcactctgcctcgtgggggtatggtcaggttagtgggacagggaggagcgggggcagcca

SEQ ID NO: 492796 - DNA, 636 bp, Homo sapiens
tgatggatcttgtccaaagacttaggttgtccaacagaatatttcagatgacaggagctatttctttatgaatacggttcatctgctcattaaccgttatacccatgtgactgtcattagtgtacttgagtgtttatgcttgtaaaaatgtgtgtgttagtattgtctgttttattgtgtaaagtggcctatgaagcatgctgtcatgtttttgtacatttctcaaataagtcttctttttaaaattgtaagcaaatgtctttcaaatcattatttattttttcctttttctcgctaacatttgagataaagaattttttaaatttttatggacacatagtaggtgtatataattatggagcacatgagatattttgataaaggcatgcaaagtgtaataactatattagggtaaatggggtaaagaatttttaaaattattttttcaagaactacatttttcaggattgtgatttgggggattttagactttagggattttgatctttcaggatttcaacatcctggattatggtgttcgagactgtgtcagccccactccagggcrggagaaaggcactctgcctcgtgggggtatggtcaggttagtgggacagggaggagcgggggcagcca

SEQ ID NO: 492797 - DNA, 626 bp, Homo sapiens
ccaattagaagctgtaatatataaaaaataatttttacttgaactttgttagcttgyctttgaaatatattcttaatggtctatagtggaaataactacaaattgctgaagccagggagatctcaagaagcaagatacatttatttcttaataataaaacaaaaattcttcactcagatatcatgttcagtatcaaaaaggctcaaaataaaaagattcctccttgtcagaaagcttggcacagcaaggttccatttaagcactgttgtagacctgcataaccaatcagctttgaggaaaatggttttgccatcacaagagtttaaggtaaaaaacacacatcgaatttaaaatttagaatgtgttattataggagctgtcaagtcaagtctcttattacgtataataacagtccaggaaaatgagcttacagcagtaagatttagaagatgcttcccttggtgaatttggctttcaaagtatagaaactatgtttataacaaagatatttcaggaacaaaggcgaatattaactgtatgctattgtcataagtcagttgccttcatcaaaaggcaggctaatatatatatttacttaatatacattttatatgtaattaaaatga

SEQ ID NO: 492798 - DNA, 626 bp, Homo sapiens
ccaattagaagctgtaatatataaaaaataatttttacttgaactttgttagcttgtctttgaaatatattcttaatggtctatagtggaaataactacaaattgctgaagccagggagatctcaagaagcaagatacatttatttcttaataataaaacaaaaattcttcactcagatatcatgttcagtatcaaaaaggctcaaaataaaaagattcctccttgtcagaaagcttggcacagcaaggttccatttaagcactgttgtagacctgcataaccaatcagctttgaggaaaatggttttgycatcacaagagtttaaggtaaaaaacacacatcgaatttaaaatttagaatgtgttattataggagctgtcaagtcaagtctcttattacgtataataacagtccaggaaaatgagcttacagcagtaagatttagaagatgcttcccttggtgaatttggctttcaaagtatagaaactatgtttataacaaagatatttcaggaacaaaggcgaatattaactgtatgctattgtcataagtcagttgccttcatcaaaaggcaggctaatatatatatttacttaatatacattttatatgtaattaaaatga

SEQ ID NO: 492799 - DNA, 521 bp, Homo sapiens
ctccagcctgggcatcaagagtgaaactccatcttaaaaaaaaaaaaaaaaaaaaaaggaaaaagaaaagaaaakaaaaagaaagaaaaagaaaaaaggaaactagatcacagtgtttgtcagattttatttaatttaaattctactttttgtctactaataagaaagttgctcagtgaagtcaatgagtaactattgttgggtggtgatttattagtatttggataaccctcagaggtggtgtttatttcctgggcttctagcagtaagaactctcttatatgtactcaagatcagcttctttctctcgtcaccttgagaagaaaataaaacccaatggttaagaaaacaggcattggggttggaaatactgaataatgtatacactgtgcttacaacagtgcctgacccagtaagtgtttcagatgggttaggtgtcatctcatcatggaaataatacattatatctcattacatttcttacaacaattttatggtttatttcctcctttgccataaaa

SEQ ID NO: 492800 - DNA, 461 bp, Homo sapiens
gaagggcaagggcccagcactccayaaatgcttggaatggataaatgtgctttgccacaaaacaaaatttaaggaaccttaaagagacaaaccatggaaaccattgtcaagcagttgacaggtcatagggtgaaaaattttaaaacagagtgggcagagagtgtgggattcgtaattagcatttgctttgcaccttcttatctgccaggcactggacaaagtgctatccaagcctcggccagggtgggtggggaggggggcattcatagattcttgatctctggtcttgtttccaaagacatgtaggccatgtctcttgagaatccaaatgctttgcagaagtctgagattctcattcatggatggctcctgctgagccttcataggctgcactggccaatctccattttccagagcaaacaaaacaaacaatagaaaatcctgcagctaagactcacgtc

SEQ ID NO: 492801 - DNA, 674 bp, Homo sapiens
ttgcttctgcccagctccccactctcatattctgtagccacgttttctaatggtgttggggggcttctattcatcactactacaggggagatatcagttatagccaataaggagcttggctcagttcccaagtatgaggctgtatattcaccatttcacttccttagacacatactttcataaaagacatacctgggtcaacagcacttcttatttccagcctcccttattgagctggctggcctcatgcccttccctgactccacgcagcaggcttggctggtgctcccagctcccgctcagtccagcaggagggataccctcctccactgcctgtaggaggtgggctcctagccttcactggcttctgcacctggattcagcaggccagctcaccacaagagtgtcagttccattgctgatccataaagatgtctgccttgcttttccrccagactatttctttttagcttcctcttctttgtgttttatatatcattgctctgtgtaatgcagaaaggatgtatcaaagtgtaaactcgtagcactctctgcctaaatggcacaacacactctttagagggaaaactatgtaaagctttgttcaagccaaagcttgcctgaattcattagccaatgcattcattgcctactctatccacagtataacagta

SEQ ID NO: 492802 - DNA, 196 bp, Homo sapiens
aaataacagctggtgatgtgctggcaaggaacgtccagaaataaaatttcagcygaaaagaatgctgagaagttccagctgatgagctgggaaaggaaatgtttggggtaagagagactgccgatgtcgctggccctgcttcttctccccgcgagggcacctcagtgactctcctctgtctcaggctgggacctgg

SEQ ID NO: 492803 - DNA, 522 bp, Homo sapiens
gtggccaggctgacaagcacagttacaaaaaggccccttcaccatcagtcctccccgctgactcgccacactgccctcctacccagggaccctgcctcggggctggagtaatctggggctcctggattcatcttgaacaaggcagtctaggctggaaacaaaggccaggccaatgccagattcctgaacgtgggagggagacagaagcagaggaggttagaaaagaggggaaggaaatgaggagaggagaactgagggcagggaggagagggggattcatgagggtgtggtgggaaggatgcctgcactcactgccagggtcagaggctccagagggctgggcrgagcacgcatgtgaggctgggctcaaagaaggggcttcaccaggtacccagcaggccactgaagacctggagacgaagcaggaagtctgaacaaaaagctttatctctttcccccacccctcccccttctccctacctctccctccccttccttcccaccttccttcctctcccccta

SEQ ID NO: 492804 - DNA, 613 bp, Homo sapiens
cttgtagctagaattacatcaattcagtgtggtaaccttgagtacctcaggctgataagacattcagaagagtagttttatttttctacaaattatgattaataatttttaaagaaagaaaacaactcttggcttaataattgtgctttggcgtacaaagcctttcaaaacacaaacacagmattcagtggattaataaaacggggaccaacaggtcaacaagtggtcactgtctggtggtagtgctgccatttttaagctttcaaaaacccctaggatgttccctttatcaaaggaaatgaaggcaactcctcttggctgttcctgcctgatactacaaactttttaaaggcttcaagtcaggtagcagtttttgccaattaatgacttgataatctccaggtctaatgtaaccttgccatgatctctcttttattttcaccagatagagagtaataaataatacatgtaacctaacctattggctttgtccactctcataagtaatcctggctccttctccctgctgcggcccctggtcttggcccctgcctattcagcccagcatgtctgaacatttagtcatctcttcagagccacacttccaggaaaa

SEQ ID NO: 492805 - DNA, 613 bp, Homo sapiens
cttgtagctagaattacatcaattcagtgtggtaaccttgagtacctcaggctgataagacattcagaagagtagttttatttttctacaaattatgattaataatttttaaagaaagaaaacaactcttggcttaataattgtgctttggcgtacaaagcctttcaaaacacaaacacagcattcagtggattaataaaacggggaccaacaggtcaacaagtggtcactgtctggtggtagtgctgccatttttaagctttcaaaaacccctasgatgttccctttatcaaaggaaatgaaggcaactcctcttggctgttcctgcctgatactacaaactttttaaaggcttcaagtcaggtagcagtttttgccaattaatgacttgataatctccaggtctaatgtaaccttgccatgatctctcttttattttcaccagatagagagtaataaataatacatgtaacctaacctattggctttgtccactctcataagtaatcctggctccttctccctgctgcggcccctggtcttggcccctgcctattcagcccagcatgtctgaacatttagtcatctcttcagagccacacttccaggaaaa

SEQ ID NO: 492806 - DNA, 613 bp, Homo sapiens
cttgtagctagaattacatcaattcagtgtggtaaccttgagtacctcaggctgataagacattcagaagagtagttttatttttctacaaattatgattaataatttttaaagaaagaaaacaactcttggcttaataattgtgctttggcgtacaaagcctttcaaaacacaaacacagcattcagtggattaataaaacggggaccaacaggtcaacaagtggtcactgtctggtggtagtgctgccatttttaagctttcaaaaacccctaggatgttccctttatcaaaggaaatgaaggcarctcctcttggctgttcctgcctgatactacaaactttttaaaggcttcaagtcaggtagcagtttttgccaattaatgacttgataatctccaggtctaatgtaaccttgccatgatctctcttttattttcaccagatagagagtaataaataatacatgtaacctaacctattggctttgtccactctcataagtaatcctggctccttctccctgctgcggcccctggtcttggcccctgcctattcagcccagcatgtctgaacatttagtcatctcttcagagccacacttccaggaaaa

SEQ ID NO: 492807 - DNA, 613 bp, Homo sapiens
cttgtagctagaattacatcaattcagtgtggtaaccttgagtacctcaggctgataagacattcagaagagtagttttatttttctacaaattatgattaataatttttaaagaaagaaaacaactcttggcttaataattgtgctttggcgtacaaagcctttcaaaacacaaacacagcattcagtggattaataaaacggggaccaacaggtcaacaagtggtcactgtctggtggtagtgctgccatttttaagctttcaaaaacccctaggatgttccctttatcaaaggaaatgaaggcaactcctcttggctgttcctgcctgatactacaaactttttaaaggcttcaagtcaggtagcagtttttgccaattaatgacttgataatctccaggtctaatgtaaccttgccatratctctcttttattttcaccagatagagagtaataaataatacatgtaacctaacctattggctttgtccactctcataagtaatcctggctccttctccctgctgcggcccctggtcttggcccctgcctattcagcccagcatgtctgaacatttagtcatctcttcagagccacacttccaggaaaa

SEQ ID NO: 492808 - DNA, 343 bp, Homo sapiens
atacagctgctccaaacagtgctggatctcagatttctccaccatcacccttggctgactaggtctgggtaaggtctggatgtgtggagaatgagtgtagctccccttcctcccttccttctggctttggygggcaggaaccctgtggtctggtgctagtctttagtgaggccggatgcctcgaccttggagcccttccgtggtctttgctaccatacaaatatccctgtctcaacttcctggcttcaggggtcttacagaggcccagtctgtatgtgtcccattgacatagctccctagtctccttaagaaggcctggggcttgcagaaggaagtgagccag

SEQ ID NO: 492809 - DNA, 618 bp, Homo sapiens
tgacttaatacgctctatttaatcatccagactatttgattattaatctccaatatgcctcacatattattgtaccatccttccattaaagagagagagattttcaaattttaaaacttcaaactcactttgttttttccttcaattagagcaaattgatttttattaacttcaattttatttcctccctggaagtcctccacacttctccattcttcacaagggtatgggtttgtcactgagacagcwtggctataagaaagagataacagcgcatattatgatttaatttttctttaattagagtcaagagtaaggaaaagattcagactttggttattctgttcttagaaataacttccaacgcagcctaccatggtacaagacttggcgccaattaaaaataggcattgacaatgaaggaaaaggttctaggtagattcattcaggatacaggagggaagcagctattctgggaataaaccttcattcataaattggatcgacaagacaattcaagttaatttagttcaaaggaaggcaaggaaacttagaagccactgggctccttaaagtaatttctctgggaccatggtctctgtgaaggaaatgatcagc

SEQ ID NO: 492810 - DNA, 630 bp, Homo sapiens
ctggttacagatgcctaactaggtaacactggcacagagattatagttacttcttacctggagtgaatgctaagaaaggcagagctagatatttaatactcctgctgggttcccaaatgttatgcgagaatattaatatacaaacacatagaaaacagactctttgaactttttatcctctatgttcaactggacttttaaatctgtgtgtataaatagagaattacttccctaggaccaccagaraaacaaaatttactccaagcataattgtgcttgtctctcaatggttaagttaacttttattttgcaaaccaatttgttacttattttgcaaaccagtttcttacttgtcttcttctctcttgaggccgtagtgggccatccgcacagcttgtggcccggtttgattctccttgcactcttctgatgggaggccccaagtgatgactgcttccttatcatctctttgctaatcactcttagtggaaagcctgtttctgtattttgtttcttccactcagagctgtcctctgaagccctgagcatctgcagctttgcttgctgacttctagtttcctcttctctttcctttcatgagtgatttgaaactcccattaccaggccatg

SEQ ID NO: 492811 - DNA, 630 bp, Homo sapiens
ctggttacagatgcctaactaggtaacactggcacagagattatagttacttcttacctggagtgaatgctaagaaaggcagagctagatatttaatactcctgctgggttcccaaatgttatgcgagaatattaatatacaaacacatagaaaacagactctttgaactttttatcctctatgttcaactggacttttaaatctgtgtgtataaatagagaattacttccctaggaccaccagagaaacaaaatttactccaagcataattgtgcttgtctctcaatggttaagttaacttttattttgcaaaccaatttgttacttattttgcaaaccagtttcttacttgtcttcttctctcttgaggccgtagtgggccatccgcacagcktgtggcccggtttgattctccttgcactcttctgatgggaggccccaagtgatgactgcttccttatcatctctttgctaatcactcttagtggaaagcctgtttctgtattttgtttcttccactcagagctgtcctctgaagccctgagcatctgcagctttgcttgctgacttctagtttcctcttctctttcctttcatgagtgatttgaaactcccattaccaggccatg

SEQ ID NO: 492812 - DNA, 521 bp, Homo sapiens
tgcacagggactgtgttaggcacggagaatacaaaatcaatgtgacctaatccctgatttgagggagaaatatttgaataaatatgtgattatgctatcagatgttgcataagtgctatgtgygtacaggaaaaggaaaataatttcctagttctgtgaataacaaaatagtccacattaatttgtcaatgatcaagtataaattcagcataactggatatatttattaaatggatgactattatctaaatttgaatttaagaataatcatataaagtacattttatatagctagcacatataacattaacccaagtatctttacaatagctttatttaattagacataacacaataagtctatagtatacaaaatagattttattaataggcaccatcatcatgtccttaaccgtttttattagaccttaccaactatccttccaaacttaactacttgctcaggtaagatttacctttgcctatttctcctagaagagtctgaattgaagcagacagct

SEQ ID NO: 492813 - DNA, 575 bp, Homo sapiens
agttacttaacttctgtgaagagtaaaaatctgtacctcacaggattttaatgagaatgcacatatatgcttagcacagggcctgatgcatagtaggtgctcagtaaacattagttgtactgatttttcacttttgcaatagatttttgtgttaaagaggggccattcattcattcatttttttcttcacacattcattccatcattcaattgctatctggagaacatactgtgtaccaggaactgagttagatgaagccttgcrtaaaacaaacacagctcctcatggttgtggtgaagggcattacacaagcgatgccaggggagctgggtgtccctgagcaagctgtggactgaacagaggactttctacagagtatgattcgcatcataagtattatagatttgtacaaatttacatgcaagttttaaagcagatgggagtttcttgttcttaaaaaatatcagtatatttcaatgatttccagaagatgaaagtaaagtgccttgaggaaggggtgccctttgctaatttgtctaaaagcactgtgaggtagacatggcgattacattaa

SEQ ID NO: 492814 - DNA, 575 bp, Homo sapiens
agttacttaacttctgtgaagagtaaaaatctgtacctcacaggattttaatgagaatgcacatatatgcttagcacagggcctgatgcatagtaggtgctcagtaaacattagttgtactgatttttcacttttgcaatagatttttgtgttaaagaggggccattcattcattcatttttttcttcacacattcattccatcattcaattgctatctggagaacatactgtgtaccaggaactgagttagatgaagccttgcgtaaaacaaacacagctcctcatggttgtggtgaagggcattacacaagcgatgccaggggagctgggtgtccctgagcaagctgtggactgaacagaggactttctacagagtatgattcgcatcataartattatagatttgtacaaatttacatgcaagttttaaagcagatgggagtttcttgttcttaaaaaatatcagtatatttcaatgatttccagaagatgaaagtaaagtgccttgaggaaggggtgccctttgctaatttgtctaaaagcactgtgaggtagacatggcgattacattaa

SEQ ID NO: 492815 - DNA, 578 bp, Homo sapiens
ccatctgaggacacgggaccaaaagtaaaacacacacagacacaagccactacctgggacctccctgcgacacacgcatgcaagaaatttctgctatggcactattctccacatcctgcatgaagccaaccactatttttctgcttccttagggtcatggtacagtccatcctcattaattgcagattccgtacttgtgaactagtctagtcactaacgttgatttgtaaccccaagaccaacactcacagctcatctgtggacctatgcagggtgtgaaaaaattagtcgcccaacacactctttctcagttgaattcagacaggtaacacgaagtctccttgtttcagctctcatgctgtacacaagggccccttttgtggtctatttagtgccatgatttttgcatttttgcactttctgttgatgatggtgctgctaaaatggcyccaaacatagtactgagtgctgtctagtgttcctaagtgcaagaaagctgcaatgtgcctcacggagaaaatatacatgttacgtaagcttggttcaggcatgagctacagggctattggctgagagtt

SEQ ID NO: 492816 - DNA, 380 bp, Homo sapiens
cctcggcgtgccgcccgtgtctggacagcgmtatcttctgctgtctggatatagctctcttccctcctcctttgttagtccctggtctgccctctcgggtggtgggcatgtatgcgagttctctttctgattgccagaaatttcttttccactgtgtgagcaagagacagatttttttaaattgtctctcttctcttttatttattttgttctccatttgtggccctcacctccgcctgccttccttccccattctttctgtggattcctccttcttcccccttcaatttcaccatttctcctcccccgtcttcgccctcccatccccacccctttccccttttaaaataattcagtgatgtctcgggaatactagcaca

SEQ ID NO: 492817 - DNA, 494 bp, Homo sapiens
ctcattgtaacctggaaaactggtgttatgaatgtcatcctcatccctgacatgaggattcaagaaggttctattgtctgcaatacatgcatggacttgggggtaactgcactgaatgaggttatagaatggggctcctccaaggaaaggccttcccgtttatgttcatgtgttattgctgtggmagattcagtctctgaatcacagggcctttgtaactatgtggatgacagttgaaaaataaaatttcctccataaacactagtctgggcttggggtgaagagagagtgctctagattctcagtacaggattggtagtgacagcagcagctgaatggggctgagggagggcacagcccctgggagcaccaggatgaaggtgtgatgctgtcttgggcacaactgcgtatggcacgggagtgcatccgtccctgtgagttttcatataatttctaacctgggtaaaaaaatctagggctgcaccgatggccac

SEQ ID NO: 492818 - DNA, 459 bp, Homo sapiens
ggcaaaggtcagcggttggcaatctaagacccatagagcagaacagggtaaatatggacattacatatctgatctgtctctctgtttttgtttgtttgtttgttttgttttgttttgttttgagacagagtcttgctctgtggcccaggctgaaatgcaatggtgcaatcacagctcactgcagcctctatctcccaggctttaacaatcctcctgcctcctgcctcagcctcccaagtarctgagactacaggtgcatgccaccacacctggataatattttaaattttgctatattgcccaagctggtcttgaacccctaggctcaagcaatcctccctccttggcctcccaaagtgctgggattacaggcatgagccacaatgcccaggcaatgattgtctgggcacttttgtgattcccacttcagtaatcagtctcttttgtaattcctacttc

SEQ ID NO: 492819 - DNA, 638 bp, Homo sapiens
ggggctcaagtagaaaggatgaaaagatcgtgaaagatgtcactttcttacatagtttctgggataatgcccagctgtgtgaggcaggtataataaatgaaaatcaactatttcatcagtaggtgggaagccctttcagcaaaaagtttttagtctacagtaagcacatgccatgccacgtgaccacacatagagttgaatgcagccttagactgtgttaataaaagtatagtgtctaagtatcagaaatgaagaatttctgttttactttacattggtcagtttatgtctagagtcttttattcatcttttattcatctgtagagatcaggttttaagagagatgtagacaaattgatatcttaaagcactaagagataaaatgggaaaatgaaagatttgaaaccaagcgatatctgaaatggccgaaggaagtctgtatgttgctgtcacagaagtgaggactcaaaaaggayttgagaactgtatttattagattggatctgggcagaccccagagttataattaagagcaactcaaggaagtatcagggaaatacaagtgaaggaacagttttcaacaatgagaacagtttcaagatggaatagcttgtctgttggggcagtgagctctccat

SEQ ID NO: 492820 - DNA, 567 bp, Homo sapiens
gtacatgctatgcatttagcacatacccagtgttccataaatacctgttcagtgaatgatcaggccaagcctctattttacaaacagggaactaaacccaagaaaggtaaaraatttatcaaggactccaacagttagtgagtggctaagccactgatcaaacatagcatacccaaggcactttccaaggaatggccagaagctgcaccaaataaaccttctggtgtcatccaaaattcctgttagtcccacaaccactctctgagttgctgataaaatgataaaagtaaggaaatgtcataagtgaggaacatggctggcatatgcattagactggtatttgaggaaaaacatatgggggaaaatgttacggggacattatgtagcatgctgggtgtacttctgagggaggacagtttatagaagcctgctttacattgatggggaatgatagttcattatgaataaagcagagctaacacacagctctgtgatggccagattccacactcactaacactcctcctgcaaaatcgaatattcacattcaacccattccaaaacagc

SEQ ID NO: 492821 - DNA, 653 bp, Homo sapiens
caaatgataaacaaaaccaaaagtttgttttgtaaaagaataaacaatgtttatagactgctagctacattaataaagaaaaagagaggacttctgggtcccagacaagagcattttctcctcctctgtgtctgcctctaaaatctaccttgggccaggcacggtggtccatgcctgtaatcccagcactttgggaggccaaggcgggcggatcacaaggtcaggagatcgagaccacggtgaaaccccgtctctactaaaaatacaaaaagttagccgggcgtagtggcrggcgcctgtagtcccagctacttgggaggctgaggcaggagaatggcgtgaacccgggaggcagagcttgcagtgagccgagattgcgccactgcactccagcctgggcgacagagcgagtctccgtctcaaaaaaaaaaaaaaaaaagaaagaaaagaaaaagagagaacatccaaataaacacaatcagaaatgacaaaggtgacttaccatcaaccccacagcaatacaaaaaacccatcagagactattgtgaataattctacttataaaaactagaaaacctaaaagaaatgggtgaattcctggaaacatacaaccttccaagattgaaccaggaagaaattgaagtcctgaacag

SEQ ID NO: 492822 - DNA, 589 bp, Homo sapiens
tgcacacctctcctggctactgttttgaatggtgctgccctccagagctccaaggtttctttcagtcctgacccttgaggattgtcacctttttttcttgactcagctttgagtgtcttggcctctctttccatccccccaacctggggcttctcttcaggcatggggtgaagggatcaaaaccctgagggccaccccsactccatgatttctttctgcactgtctgctctctgtcctgtgctttcctgatttggaatcacttccctcgctttttctcaggctgagatccctcccagcttgccttatctctgcctggtccctgaggtaacccatttgcagcctcccattcctgctctgtctaggccatttcatgttctcttaattttgcattccattgcctttaaaatcttcaaccacttaaaaatgtaacaatatacatttttttctttcattacaaaagacgtgctcattgtgaaacaattgggaaatataggagcttataaagaataatataaaaatcactcataatccactcactccaacccaaccactgctaatgttttgatgtgcttatctttggtctttttc

SEQ ID NO: 492823 - DNA, 505 bp, Homo sapiens
ctaactacaacctctgcacctygggcttcggcaaacctctgatgcctgtcagtttgagataatgacttcttgatctgtacatataaacattgttgtagggatgaggctgatgatgaaggcacatgcgatagatgtttttacgtaatttggatatgaaccttttttataggggttggctaaggtagtaatgatgggtaagattaaggggattagggttattatggtagtggaaaaatacatgtttgctacttttatttggagttgcatcaatgtttttggttcctaagaccaacggatgactctaatcctttcaaagttgagaaagccatgttgctaggcatgggggcatgagttagcagttcttgtacactttctcggtagataagaagttgcaggcttctattgttagattcacaatctaatgttttggttaaactataagtgatagcaagtgacaggctcctgaaggtgaggaaccagacatcaaggagaaaaacaaccaagc

SEQ ID NO: 492824 - DNA, 519 bp, Homo sapiens
gtcagcacagcaagctggcaggagagagaacagcatctgtttctgggcagcgagcccttggcagagccaggagttgagggcctggggaaacaggtaggacagtggctctaatttgtcacttccccagcacttgtgtatttgcatcttgtatyctgaaaagtgatacatgtattaatttcacctatatgctggggaggaaaattagaaaatatgggaagtagataagaacaggaatggtctgtgggtctccaaggtcttgtacatagtgatactgcctcatccattcatctcttcattcaacacccacctactgactatcttttctatatctgctgctgagcttggtgctgtggacccactggtgaatgtgacatggttcttgtccttgaagggcacacagagagtggaaaaaactaaagtataaatgagaactacaaagggtttcagactgtatggggcatggggagcccatacaaacaggaatggaataaactgtgggtctccagtttccacctgccc

SEQ ID NO: 492825 - DNA, 519 bp, Homo sapiens
gtcagcacagcaagctggcaggagagagaacagcatctgtttctgggcagcgagcccttggcagagccaggagttgagggcctggggaaacaggtaggacagtggctctaatttgtcacttccccagcacttgtgtatttgcatcttgtatcctgaaaagtgatacatgtattaatttcacctatatgctggggaggaaaattagaaaatatgggaagtagataagaacaggaatggtctgtgggtctccaaggtcttgtacatagtgatactgcctcatccattcatctcttcattcaacacccacctactgactatcttttctatatctgctgctgagcttggtgctgtggacccactggtgaatgtgacatggttcttgtccttgaagggcacacagagagtggaaaaaactaaagtataaatgagaactacaaagggtttcagactgtayggggcatggggagcccatacaaacaggaatggaataaactgtgggtctccagtttccacctgccc

SEQ ID NO: 492826 - DNA, 584 bp, Homo sapiens
tacaaaactgagaattcaatctgacaaatatttattggggcacatagattaataaggcaaaatccctgcctacttacaatttaagtcttagaataaatagagggtgtgtaataaagttgtcagactgagagctcaactcagttcatgtggtggctactgtatttgggtgatcctaatagtcctaaatattaatctagaagaaggccagtagagcaattcttaacatccaatcttttacccatggttgrgataagcctcactttggagaaaatgttatatatgtaagtttacaaaacaggtaagcttaaggggaaaagtgaatttattattctattacaaaataggggggatggtctctttcctaaaagattcatagttaaggtcatttaactagcaaacacctatagtggcattaacatagaatcaattttgcaaaaaaatcaatttacatttaattttccaaaagtgacagcccataaggccaatgcctagaaaggtgatgattatagagtgaacattttataagatgaggacatctttcaaaagttgacatatttggttggcattcactgttaaactgatag

SEQ ID NO: 492827 - DNA, 584 bp, Homo sapiens
tacaaaactgagaattcaatctgacaaatatttattggggcacatagattaataaggcaaaatccctgcctacttacaatttaagtcttagaataaatagagggtgtgtaataaagttgtcagactgagagctcaactcagttcatgtggtggctactgtatttgggtgatcctaatagtcctaaatattaatctagaagaaggccagtagagcaattcttaacatccaatcttttacccatggttgagataagcctcactttggagaaaatgttatatatgtaagtttacaaaacaggtaagcttaaggggaaaagtgaatttattattctattacaaaataggggggatggtctctttcctaaaagattcatagttaaggtcatttaactagcaaacacctatagtggcattaacatagaatcaattwtgcaaaaaaatcaatttacatttaattttccaaaagtgacagcccataaggccaatgcctagaaaggtgatgattatagagtgaacattttataagatgaggacatctttcaaaagttgacatatttggttggcattcactgttaaactgatag

SEQ ID NO: 492828 - DNA, 417 bp, Homo sapiens
gctcaacgtgaccacatttcatctgccattactttttagtgtcttttaatatgaaggaatgcattcattctgtaagaaaaatgggattagaattttaggaaggctctcaaataatgcaacaataaattcttcaatacccagttgtcagatgtttcagtaaattgcaaatatcagattactttttwaaaatatttcaaacacacacttggaattaaacaagaaccatatattagaaaaggaaataagcttactttttctattgtaagactccaagcacccacatggatcttcatggtggagattttaacaacactgctaatactgacttacttccaatcagagctgagagagcaaacaaagacaaactctctatggatgtactcatttttttaaacccatatttaaaattaataattt

SEQ ID NO: 492829 - DNA, 417 bp, Homo sapiens
gctcaacgtgaccacatttcatctgccattactttttagtgtcttttaatatgaaggaatgcattcattctgtaagaaaaatgggattagaattttaggaaggctctcaaataatgcaacaataaattcttcaatacccagttgtcagatgtttcagtaaattgcaaatatcagattacttttttaaaatatttcaaacacacacttggaattaaacaagaaccatatattagaaaaggaaataagcttacyttttctattgtaagactccaagcacccacatggatcttcatggtggagattttaacaacactgctaatactgacttacttccaatcagagctgagagagcaaacaaagacaaactctctatggatgtactcatttttttaaacccatatttaaaattaataattt

SEQ ID NO: 492830 - DNA, 560 bp, Homo sapiens
gatttgtggattttgttcatgtattccctattttaaaaaataaaatagttgaccttagagtcctggccaaaaataaataaataaaatagtatatgtatacacactaagcataatttcatttgtatatgttgcatgtatttcatataaacaactaaacacaaacctagtgttatctctaaartggggattttgcccaatagtacccacctggctctaactcaactaaagaaaacacaggctcatgtaattttccttaacagaagatgtttattacttatgcattttaatagaggtatctatgtctgtctctacatctataaacatatatattatataatcaatctttagtgtcagttcattagaatttctacattcatatctgaaatgtaatggtatggcaatatggattgtggcgaagaagaaaagaaaaaaagaagttccctaaaaacgattggaataaaattctaaaaataaatacataaataaaatgaagaaggaggaggaggaagaggagaaaaagcgaggggattattaatattttgagtggtttaaatataata

SEQ ID NO: 492831 - DNA, 678 bp, Homo sapiens
tgaacaatcacattaggatgtttttgttttgtttttgagatagcatctggctctttcactcaggctggagtacagtggtgtgtttatggttcactgaacctctaactcttggcctcaagctatcctctcacctcagcttcctcagtagctgggactacagtggcacaccatcacacctggctaatttctttttattttttatagaaatggggtctcactatgttgcccaatctggtctctaacttctggactcaagcagtccttctgtcttrgcctctcaaagtgctgggattataggcatgagccactgcacctggcccattagcattttttatccagtatctgtgtatctgctctatacctaaatttagacatgtgtggtaggttaacatttcatttggttgattttggttaatagttctggcccactgatccttctttgcatcatgaatctgttaccctttatctattacctttactattaattattatttagctttgtgcacaagagcattgttttctagcatatacttattttaactatttttagaagcatttcgcattttgaaaagtgaaaataacctaagtgttcatcaatggatgaatggaaaaagaaactgtggtacgtatatacaatggaatattatacggctctaaaaaagaatgggatcctgccat

SEQ ID NO: 492832 - DNA, 569 bp, Homo sapiens
taagagtttggttttatacatttcaaggtgacacaaattatakgtgaaatcataaatcaatacatataaagtatacattggtttgacccaaaaagtcacgacattttgaagtggaggcttacaagtcatatacagagtttagggattcttcagttggcagttagttgaaagagttaagctttgtctaaagtagaaaggaatgcttaagttaagataagggggtctgttacctgtcatgtaatgccataccagagtcaggttggaaagtaagccacaatgtactgggtcaggaaagacctgtttaaggacattttatggtttgcaaggcataactcctcaggttccttagaaaggaatttgagcaagaaaaaaaaaggtcagcgctaaatcctcatatatattatttaatttttatgaaaatgacatcaaatattatttgatttaattttcacaaaaataaataaggtagaagcagagaaatatatagaaggccatgtctacacaattcatgcatggtagaactggtatatgaaggcaagtatgtatgattccattgctcttgttttttc

SEQ ID NO: 492833 - DNA, 569 bp, Homo sapiens
taagagtttggttttatacatttcaaggtgacacaaattatatgtraaatcataaatcaatacatataaagtatacattggtttgacccaaaaagtcacgacattttgaagtggaggcttacaagtcatatacagagtttagggattcttcagttggcagttagttgaaagagttaagctttgtctaaagtagaaaggaatgcttaagttaagataagggggtctgttacctgtcatgtaatgccataccagagtcaggttggaaagtaagccacaatgtactgggtcaggaaagacctgtttaaggacattttatggtttgcaaggcataactcctcaggttccttagaaaggaatttgagcaagaaaaaaaaaggtcagcgctaaatcctcatatatattatttaatttttatgaaaatgacatcaaatattatttgatttaattttcacaaaaataaataaggtagaagcagagaaatatatagaaggccatgtctacacaattcatgcatggtagaactggtatatgaaggcaagtatgtatgattccattgctcttgttttttc

SEQ ID NO: 492834 - DNA, 569 bp, Homo sapiens
taagagtttggttttatacatttcaaggtgacacaaattatatgtgaaatcataaatcaatacatakaaagtatacattggtttgacccaaaaagtcacgacattttgaagtggaggcttacaagtcatatacagagtttagggattcttcagttggcagttagttgaaagagttaagctttgtctaaagtagaaaggaatgcttaagttaagataagggggtctgttacctgtcatgtaatgccataccagagtcaggttggaaagtaagccacaatgtactgggtcaggaaagacctgtttaaggacattttatggtttgcaaggcataactcctcaggttccttagaaaggaatttgagcaagaaaaaaaaaggtcagcgctaaatcctcatatatattatttaatttttatgaaaatgacatcaaatattatttgatttaattttcacaaaaataaataaggtagaagcagagaaatatatagaaggccatgtctacacaattcatgcatggtagaactggtatatgaaggcaagtatgtatgattccattgctcttgttttttc

SEQ ID NO: 492835 - DNA, 569 bp, Homo sapiens
taagagtttggttttatacatttcaaggtgacacaaattatatgtgaaatcataaatcaatacatataaagtatacattggtttgacccaaaaagtcacgacattttgaagtggaggcttacaagtcatakacagagtttagggattcttcagttggcagttagttgaaagagttaagctttgtctaaagtagaaaggaatgcttaagttaagataagggggtctgttacctgtcatgtaatgccataccagagtcaggttggaaagtaagccacaatgtactgggtcaggaaagacctgtttaaggacattttatggtttgcaaggcataactcctcaggttccttagaaaggaatttgagcaagaaaaaaaaaggtcagcgctaaatcctcatatatattatttaatttttatgaaaatgacatcaaatattatttgatttaattttcacaaaaataaataaggtagaagcagagaaatatatagaaggccatgtctacacaattcatgcatggtagaactggtatatgaaggcaagtatgtatgattccattgctcttgttttttc

SEQ ID NO: 492836 - DNA, 479 bp, Homo sapiens
ctgctccaggttcagttaatactttctagatgttgtacaagacccatgatattcctgttggtagaggayggtggagagtatataacgtggccaaataatagagcttcttgaaaagtattttagcccctccacttcatttaatttcactcattaaatgagacccagatgaaatgaaaggcctagaatttaagtacttgcatgagatcaaagaactatttagcatttgaaccaagattaggccacagttaaagttttgtaactggaaggcagggaatttttagttgaacactgaaactttgcttcatacattcctgtctaagatgttatacattgttcaatttgaaaacacttctgtttcaacagcctcaaagagttgctgagagctaaattaattgaatgtggctggaaggatcagttgaaggcacactgtaaaggtaatcagtttcatttggaagataaactaatcccatttttctgat

SEQ ID NO: 492837 - DNA, 677 bp, Homo sapiens
tatctcatttgttaaaagtaacatttctaacccaatccatgatatttggtgtttgtcatggactactggagtttctaattccacataagtttgaaaagcttgcatcacttgcctttagactgctgtcagacctaggatcaataattgttaaccacatttggtaggggacagatggcttgcactactcctttctctaactctacactgagtcaattcttatgaatcatgattccaaagtcctgccagaaatgcaatggaaaacactggttaaagcactactggagaagttcactcacgtaaaaaaaaatgtcttcacaactgtctccacagtaggcagactcaaaaataggtcaacaaactttcctgcttcgttaatgactcatcatggacaccaggtagatcagagagcttagcctactgctatctttgtaaaacaagatctttgggtaagtaaacaagtacttgtagcccgggattcaacaaaagtcagaatgataccttaagaaaaacacatcaagggaggttaaaacaaaacaaaacaagatttggagaaaggaaagtaaaaaaaatgaaagaaacatagcytaaaggaagattgctcatgaacaggtgaatggcagtttttcttctctttgtaccaagttataataacccttttaggcctaattaggaattat

SEQ ID NO: 492838 - DNA, 606 bp, Homo sapiens
gtgaactgttcttagttgctacctaaagaggtctgaaagagttgatayaatctgttataatttccaaaccatcattaatttgcacagttaatcagtgcacccttcttctaagactgcatttgtacgttttaaaactagtattgtatgctaccatccaagcaaaaaaaaaaccccaaacaatgccaaatataataaactacagattagttaaaaaaatctttccaaagtgagacaacagtaacttttgaaaacgagaggtacgaataatttactcaagtacagaaaatcgtgtttttaaaacaacaataccacctacgctacattgtagttatcttttttaacacaaaataataatcaaacacctcaaatttaatggaaaaataatactgatctatgttgatgcattgaatgctgaaactacttacatgaagtcaagctattcccccagacctttgctgggttactgcttgatgacttacatttaacaatatgttctagttggcttgccaatttgtaaatgtgactcacatacacataaacataattaaatggagtatgtggagatacaaaatacttttaaaagaaactttcaagcaattatttttg

SEQ ID NO: 492839 - DNA, 606 bp, Homo sapiens
gtgaactgttcttagttgctacctaaagaggtctgaaagagttgatacaatctgttataatttccaaaccatcattaatttgcacagttaatcagtgcacccttcttctaagactgcatttgtacgttttaaaactagtattgtatgctaccatccaagcaaaaaaaaaaccccaaacaatgccaaatataataaactacagattagttaaaaaaatctttccaaagtgagacaacagtaacttttgaaaacgagaggtacgaataatttactcaagtacagaaaatcgtgtttttaaaacaacaataccacctacgctacattgtagttatcttttttaacacaaaataataatcaaacacctcaaatttaatggaaaaataatactgatctatgttgatgcattgaatgctgaaactacttacatgaagtcaagctattcccccagacctttgctgggttactgcttgatgacttacatttaacaatatgttctagttggyttgccaatttgtaaatgtgactcacatacacataaacataattaaatggagtatgtggagatacaaaatacttttaaaagaaactttcaagcaattatttttg

SEQ ID NO: 492840 - DNA, 578 bp, Homo sapiens
gtgaacttaggcaaatgacttaaccactctgaatctcaaattcctatctgaaaatgataaggttggacaatctgtgagccatttcctattgctcagattttgagtttctataaaagacctttgcccagactagaactaaaggccatgttctatcctgggacataataggcaacccctataataaggagtagtgcctccaccatttgtgtaaacatcccctcaacaaatcacttcataattttcttaattttcaaagcccacagagagaatacagggctcaagatcagacaaaactcaaacaggtttgtgacctcaccacatccgtatcagcttataattatcattattttcattccccaaacaatattctagctactatttattgtgtgtttacatcacactaggtgttctggagyatttcctcatttaatcaacccagacatctttaagataggtgcttttgccatccttatataaccgagaaggtaactaggtttaaacccatttgtgtaacctcaggtgttttattcagtctgtctaagttgcagcaaggtagtataataataccaatcatcata

SEQ ID NO: 492841 - DNA, 524 bp, Homo sapiens
cctgcccactttatcccatgccatcagttacattccagatatttggacacagagagacttctctggccccatttcctatttggtccatgttcatatttagcctcatctgtagatgtccatgcccaagtgctgctgggtgagtggaaatcatagccttcttactcatgtactgtccaaagtgctagcaaagaataattggtgatggcataacaggcctctgagctctttatcaagagcccaggttcaaatcgtccttctgtgcatttttttgcagcttttattttattggatttgaaaaaaacatttgacatcaatgatccatttttgaaacaggctgttttctttccatctttgacatratttgttttcttccacttgtcttaccaatccttctcaggcttcttcacagcatataccagacccagtttatgcactatcccaagttgtttcagaccatcaactgcttgctctaactcctagctgaagagaatccattgaggctcacatcattgcaccacttacaa

SEQ ID NO: 492842 - DNA, 524 bp, Homo sapiens
cctgcccactttatcccatgccatcagttacattccagatatttggacacagagagacttctctggccccatttcctatttggtccatgttcatatttagcctcatctgtagatgtccatgcccaagtgctgctgggtgagtggaaatcatagccttcttactcatgtactgtccaaagtgctagcaaagaataattggtgatggcataacaggcctctgagctctttatcaagagcccaggttcaaatcgtccttctgtgcatttttttgcagcttttattttattggatttgaaaaaaacatttgacatcaatgatccatttttgaaacaggctgttttctttccatctttgacataatttgttttcttccacttgtcttaccaatccttctcaggcttcttcacagcatataccagacccagtttatgcactatcccaagttgtttcagaccatcaactgcttgctctaaytcctagctgaagagaatccattgaggctcacatcattgcaccacttacaa

SEQ ID NO: 492843 - DNA, 653 bp, Homo sapiens
tatctgcttctctcagattggcactcatgcattaccaaaaggatgggcattgagtgtgatcagtagccttcagtcttctaagcttgcctctcttgaccttcactgtacaatcaagctagggcacaggcaaccagtattctgaccctatcatatcaggtgtatggcttccttcctataagtggaggctaggtggatgaagagagcatctgacctctcaacaatgcccatgtggaatttgtcttctgtcacatggagttgtagcactgatgagcaatgctggcaggaagctggaggaaaagrgagcccatatcctttgtaacccctacctgaagtggagcttctgttgtgatgagctgaaggaaggaggaaggagcaagcaatggttgctgtgtcataaacttacagtctttactcagatttcatatattttcttgaataaatatgtatttatttgctgcatgctcttaggacaattttcagagactttaagtcgttttctttttttatataactggttttgtcatacaaaaagaaagccacttttcaccagggaccagatctgtaaaactcctcatgaccccatttcagaagttggatccttagattgtacctatagttttattttgactcttttttgaacttaatataaatgg

SEQ ID NO: 492844 - DNA, 593 bp, Homo sapiens
ggaatgttgcatgggaatatagrtatactttcatgtttttttatggcagtaaaaatggtaggaatggtaactaagtaattgtgagaccagtgtatgtttattgagcacttagtatatgtcacacactgccttgaccactctacatgcactgttccaattcatcctcataacaattttttcagaaagctaccttaatttcctcattttacagctagagtaacagactcaaaatgtttaagttacttgctcaatgacatagttaagaaatggtggcactaagatgcaaacctcaggcaatctgactcaagcatgagcttttacccactgtgttatattgatttattcctccatgaaatagattcagatttatatgtgaggtttttacttccagcaatgttcttgtttgaaaccaagatttctactaagaataccagaaaacctataccccaaaaatctgtttaaagatattagagagctactaaggcagtgagcaatcaaggagctcagatcccagagaaaagagaaactcagagatataaaggtagcattcagcaccattttccctttgaggcatcagccaattcaaaaactgc

SEQ ID NO: 492845 - DNA, 631 bp, Homo sapiens
ctgctttctctccctttcttcctcaaacaccatcttctctgctctcattatttcagaagtttgctaaaccctctcacttgcttacgttatcctgttattttcatcatttgggtttatactatcattttaatggagtctcatagaaatgagaggtaaacacasaagcattttggaaagacccctctgaatgcagtatggagggtacattggtggggcaagaaggcagaaaagagacttatggtctttgggttattagccttgggcctctgcagaatgagcatcacaggcccaggatgacaggaggtgcggaaggcaagggcagcatcccaggagcccaggactctctaccagtgggcagccacatcgctgtccacggtttggtggggaaagttccccatcaatcaaaaattctgtcagcacccatgagtcatcactgagtgtcttacctcctttcctgagaaaatggcaaggactttgttacctgtgcatctatttttccataagttgagaagtaactgaccctgggaagatgactcagagcatcagaaaaccagcacgtttctgcttctcttacaagccctggtcttgacagacacgattgccctttctatttacatcataatacattgat

SEQ ID NO: 492846 - DNA, 631 bp, Homo sapiens
ctgctttctctccctttcttcctcaaacaccatcttctctgctctcattatttcagaagtttgctaaaccctctcacttgcttacgttatcctgttattttcatcatttgggtttatactatcattttaatggagtctcatagaaatgagaggtaaacacacaagcattttggaaagacccctctgaatgcagtatggagggtacattggtggggcaagaaggcagaaaagagacttatggtctttgggttattagccttgggcctctgcagaatgagcatcacaggcccaggatgacaggaggtgcggaaggcaagggcagcatcccaggagcccaggactctctaccagtgggcagccacatcgctgtccacggtttggtggggamagttccccatcaatcaaaaattctgtcagcacccatgagtcatcactgagtgtcttacctcctttcctgagaaaatggcaaggactttgttacctgtgcatctatttttccataagttgagaagtaactgaccctgggaagatgactcagagcatcagaaaaccagcacgtttctgcttctcttacaagccctggtcttgacagacacgattgccctttctatttacatcataatacattgat

SEQ ID NO: 492847 - DNA, 591 bp, Homo sapiens
atgtttctcttcttagtaaatgctcacttaagaactagttccttgttgaaacccctattcttagtctaattcattaatttaactgaaaacaggtacacttaaaggggaattttgcatcttaaggagaggttaaaaacaatgattaaaaatgattagtaattaagtaattagtaattggtaatgaactgctaattaaaagtaaaattcaagagtatatgtatacctttttcctttcatgattaataagtccatcatcacttcctggtgggagccttgattataccacaggctgttagggacctgtcagattctcctaaggtaacatgagttattactcatagcaaactggctggaaattctttttttattattacaattatctataacttaattgcttctggatgaccttactatcactccattcttggtctctctttctaaggtcagggtaatagaaaagaatyattcatcataagttttaaaactccccttttactaatcttgtctgtctccctgattggatctctggaggatcctctttttctccagcttgagatatggggggaacccacccccagtatttcaacgtag

SEQ ID NO: 492848 - DNA, 462 bp, Homo sapiens
aacattacagctgttagcacttctctaagacaagtactcatttagcaccatggrtaataacctggattttttttttttttttagacaagagtgttgctctgttgccaggttggagtgtagtggcatgatcttggctcaccgcaacctccccctcccaggttcaagagattctcgtgcctcagccactggagtagctaaataccctgaatttttatattccatcaagcactgagacagaacaacaacatctatttctctcccttttcacactgtacaaaacaaagataaggaagatgcctctggaatgatgataggtatgttggtacattgatctagtctccttttataaggctctgattagttctgtgtggctcaattagtgcaattacatccaaggggagaagtcctacaaagaaaactacaattaaacacagtacagctacctttgcctctctttgaacc

SEQ ID NO: 492849 - DNA, 462 bp, Homo sapiens
aacattacagctgttagcacttctctaagacaagtactcatttagcaccatggataataacctggattttttttttttttttagacaagagtgttgctctgttgccaggttggagtgtagtggcatgatcttggctcaccgcaacctccccctcccaggttcaagagattctcgtgcctcagccactggagtagctaaataccctgaatttttatattccatcaagcactgagacagaacaacaacatctatttctctcccttttcacactgtacaaaacaaagataaggaagatgcctctggaatgatgataggtatgttggtacattgatctagtctccttttataaggctctgattagttctgtgtggctcaattagtgcaattacatccaaggggaraagtcctacaaagaaaactacaattaaacacagtacagctacctttgcctctctttgaacc

SEQ ID NO: 492850 - DNA, 609 bp, Homo sapiens
cctaaaaaattgcttcacatacagtagatgctcaaacacgctgaatttcacaacttgacagtgttttattattttttctttattcttaatctctcttcctctccttgctagagtttagggtaccatccaagggggaaattaaagatttggcacgtcatgtgtgtataaccaaggatagcaactcgctcctaaaccgtgtaaccttttctcagtctgcctgttgcagtcagctccccaagtcctaggagcaagactcagaaagtgtgagtgaatgcagtgcaaacccagctttcgtggagaaagcaaccaggggaggtgccttccaactcaggcacagcagcygagttcactgccagcccgattactccggaggcaacagatgtgttgcagatgccattctgcatgatcttccttttcaccctggaatggtgccaggcacactggcagttccaaaggaagactttggatgtggatatgaaacgccttaccccactacacctctgccctccttcctttcaatcctccctccctccaatgccttagacatccagagcctttatgttgccctgcggctgcacaaatcctccctttgtactagacccaggctca

SEQ ID NO: 492851 - DNA, 605 bp, Homo sapiens
tatttaaacaaataagaaacagaatattaccaacaattccttccaggaacttcttaaaaatgttctctggatgggaggaaaattattgatcctggaaagaagaaattagattgaagaatgartggtgagcaaagaaaatggttaaatgataaattgtaaaatctcgataaacactaatataaagcaatgtaaataacaatatatatagttttaaaatatcaaaatagatctaaaatccattacaataatagtttgtaaatgagaagtgattgatgttaaaatgttctaggatcctcatattattcaagagagtgaaaattgatcagttttagacttatgataaattagtccccaaaatttctagagtttccactaaaaaatatttatgaaagatttaactttcaaataatagagagaatgagaaatgaaatactgctggaaaaaaagtccgtaagaaggtaagaaaagagaagaaacaagaaaacagagccaatagaacctacaaaataagatgatagacatgaatctaaatgtgtaactaaaataaatgtaaacaaaatgaagcctccaactgaaagataaatattgtcaggtttgacttttaa

SEQ ID NO: 492852 - DNA, 622 bp, Homo sapiens
gctgtgagatttcctacatgtcataaaactagaattattgaatgataaagctagatagatagctatattatatctcataaaagccaacttttatgaaacccttactatgtgtcaggcactgtgttaaatgctttccatactcatttcaagtaaccatcctaatagtcctatgaggtaggtcctaccaaactttccatttcatagatgaggaaaccaaggctaagatggctaaatggcttgttcagagtcatatagctaccagggctgaaatgcaaacctacactaagccactaggctatgagctaggtaccatatggtttttatgtttcagaagaggatccttagagtcccaaagaggtgtgtgagtttgctcagagccacccaattagttagtggccatcagggctggaacccagttttctggactctaaggtccctgatctttccattgtatacctcattctgcctctcagcatgagaggtggggctcctgtatctttgtgaagctctccttttccttctcatgtttgcaaaattcacagtgaatactctcatgtaaytgaaaattaaatttttatgtaaattacttttgacaatggcacagctcctgtttttttcattc

SEQ ID NO: 492853 - DNA, 264 bp, Homo sapiens
aaccttgctcctgtatctgctttcttgccttaagagaaaaatcttttcccccagattctgctgtctttacactcattctcatcttaccgatctctttaaaatttcagtcattctcggagaccatagggcagaacgcaaagaacataacataggagtcaaatggagccgaacacttcagtcactcacgtgatggctgtgtgtccttsggtaagttctgtagcttctctgagccccaacttccttataacatcattgaagtcctaa

SEQ ID NO: 492854 - DNA, 594 bp, Homo sapiens
tcactgaaatccactgcttccatgatttgtggatatctcaggtgggtgacacacgacacagactctgcctgctggtcacctgcatgttcgtccagggtttctcccctaccagcctagctcaaaagccctctcgtttgatcccaaggaattgctacagcacatgctgttggggtgcctggtgtggggctcctagagggctcctttaagcctgcctctccctctctggtagttgtaactagaaagggtattcaggaaaaaacacaaatttctctctaggtcttctcagcctccttaccaggcagcaagagctgagagaacttggagtagaatattctaaaccttgctcctgtatctgctttcttgccttaagagaaaaatcttttcccccagattctgctgtctttacactcattctcatcttaccgatctctttaaaatttcagtcattctcggagaccatagggcagaacgcaaagaacataacataggagtcaaatggagccgaacacttcagtcactcacgtgatggctgtgtgtccttggktaagttctgtagcttctctgagccccaacttccttataacatcattgaag

SEQ ID NO: 492855 - DNA, 570 bp, Homo sapiens
atttataggctcccagagggcagggaccatgtgatgtaatcctttatatccagtgttagatactgtctaatatggtagcctctaaccccttcagaaagagctaccctgaattgagatgtgctgaattttgaagactcaacatggaaaaaataatgcaaaacatcttatcagcatgttcttacattaattatgttggaataatattttggttaagggaaacatattattaaaagtaatttcttcagtttccgtttactttttttaatgtggctactcaaaaatttaaaactccrtacgaggcatgaatcttctgataggtagcactgtttaataccttctctggtggcaaatccaaaacacagatcttatataatttggataataaacccccttcagtcaccagtgagcccacactgataaaagaaagaaactgatcgcagagccgccgagatcccaacccaattaaacactggcctttcttccttcttttcacagccagttaggaaagaaattactcagaggcccggccgcccatcgtctgagatgtggggagcgcctctgccccgccgc

SEQ ID NO: 492856 - DNA, 619 bp, Homo sapiens
gagtgctatgtgctcccatttttgtagtacttgggtatactttgtgtgtgtstgtgtgtgtgtgtgtgtgtgtagacagggtctcactttgttgcccaggctgatctttgatcttgattttttgggatcaagcattctcctgcctcagcttcccaaaatgctgggattataagtgtgagccactgtactcggccaggatattgtttttgtgaaaacgcttatgaaaataagatactacacacctgtgatcaacaatagtttagagacagagtttataaagaatcctgaattatcagataaggaaagaattaaacctaatgtttctttgctttagattcccattctgtgtaaaacgatggatatttattcccagcccctatctttgtcacaaaggaagttgcgaggggaaagctatcaatagtggctgtgagttcatgttaacactttatgcatgccatgtaagagaacggatctaacattcaaagagtgcttaaaaaacacctaggcttttaatcctcatgacagtgctaaactaaggtcaacattttaggctgagagagctgaagcatacctatcaagattagccaactagtaatcatcagagatgtgactttcaagc

SEQ ID NO: 492857 - DNA, 618 bp, Homo sapiens
tacctttgatctatatctaggagtggaatcgctaggtattaggttatatcaacgttcaatattaggagaaaatgccaaactcttttccaaagtggttgcaccatttctacttcctccagtaattgtctctattgttgggcagcgtccaatccagtggaacataagataagctaatgaaatgatttaatattaccgatacataaatagggtgaataatgaaatggaagcttcaagatatgcctcttagggatgagaggacagtctccccctcagttgatattcattggtgttctgtctacatagatgtttctatttctctcctwtatgtgcttctcttgggttcctctccatcttggtggctgtgggaatgttttaccctttaattcattggcaaaactaaaagcccctcccaaaacaattatattcttctgcaaaaaaaaaaaaaaaaagcagtagtctcttccacacgtcttccaaagagttgtttgtcctcctctctctctgtaaattttcttccacccaataagtagccttgtgggtggaggtcagacgtgccaaattaatttactttgttatttagcatccagatatctcacctgggcatctagctctgttaaa

SEQ ID NO: 492858 - DNA, 661 bp, Homo sapiens
atacaaggataatgtctaagatagaagacacttaaaaacagtgtttttctaggtttttaggatatatatagataattagttagggtcattgttattagttgaattttgtctccacagaatccatgtattgatgtacccaagaatatgaccttatttggaaacgggggttgcaaatataattttttgagataatgagaattcaggtgggtcctaatccaataagcacgatgttcttataaaaagaaaattggttcacagacagacgtacatagaaggaaaacagtgtgaagagacgcagatattttttctactgcattcgatctgcttttaaatctacccattgagctctttattttggttattatatttttcatttttattcttttcaggtttactgtcatttgttataatttccagttactttctgaaatgtttatgtttgtcttttactccttgagcataacatcataatagttttacaaaatgtatcttctaattgggtctctttctgttatttgtttacttttgccttgctagttttacctcttgttacttgttgcctggcatgcctggtatactttgatcttgaatttgaaaatgtatkgaaaaaaaataataatttgaagcacaggataatgttttccttctctgaaaaagaaga

SEQ ID NO: 492859 - DNA, 619 bp, Homo sapiens
attcatgctggatatgctttaaactcatagctcaagagtatacattatatctttctctttggcattcacttagtatttatttctggttgtagaataaagcaagagagaagctgaacattcttgcatatttaaatctcaaatcaaacatacatggcctttccccccaaaagcttcgtgtgatatgcctctgaatacaaatgtgataatgttaaataatgtattttgcgataagattctatagtaatatgaagaatcatacatccacaggattctagattacatgctttgaarattccaaataagaatgttcaaatttacaacccagcacagcaattgcattataaaataaaagatggatagtgaataaatacaaggttgtaatcagtcactgagaaggctcttgctgacatcataaaacatgaaaaaatagcttgaacagctttcgtatgatgggagactcccaagagtgatttacagccactcgctttatcaactgttgcacttgatatataaaagaaatgttttttaccctttccaatagccttccctgacaatttttttttttttttacctaaagggaagtgaggggatttcgatgaaaattaacttcaaagctgtt

SEQ ID NO: 492860 - DNA, 615 bp, Homo sapiens
tttttcctctcttcaggtccttgacagtttggatgatttccacccatattggagagagccatctgctttactcagtccactaattctaatattagtctcttccagaaatgtccttacacctagaaataacgggccaggcaccgtggatcacgcctataggcccagcactttgcgaggctgaggggggcggatcacctgagatcgggagttcaagaccagcctgaccaacatggagaaaccctgtctctrttaaaaataaaaaattagccgggtgtggtggtgaatgcctgtaatcccagctactcgggaggctgaggcaggagagttgcttgaacctgggaggcggaggttgcagtgagccgagatcatgccattgtactccagcctgggcaacaagactgaaactccgtctcaaaacaaaaacaaaaacaaaaacaaaacaaaaggctaattatcatactgttctagtgtagtgcgtggtcatggagggcaatttcttgcatcagaagtctatgggcaacttgtggttatcatggttggtccagagactttagaagacatgagaggaggctgttaaagcctctaaaatgagagaatcacagggccattaataga

SEQ ID NO: 492861 - DNA, 615 bp, Homo sapiens
tttttcctctcttcaggtccttgacagtttggatgatttccacccatattggagagagccatctgctttactcagtccactaattctaatattagtctcttccagaaatgtccttacacctagaaataacgggccaggcaccgtggatcacgcctataggcccagcactttgcgaggctgaggggggcggatcacctgagatcgggagttcaagaccagcctgaccaacatggagaaaccctgtctctattaaaaataaaaaattagccgggtgtggtggtgaatgcctgtaatcccagctactcgggaggctgaggcaggagagttgcttgaacctgggaggcggaggttgcagtgagccgagatcatgccattgtactccagcctgggcaacaagactgaaactccgtctcaaaacaaaaacaaaaacaaaaacaaaacaaaargctaattatcatactgttctagtgtagtgcgtggtcatggagggcaatttcttgcatcagaagtctatgggcaacttgtggttatcatggttggtccagagactttagaagacatgagaggaggctgttaaagcctctaaaatgagagaatcacagggccattaataga

SEQ ID NO: 492862 - DNA, 571 bp, Homo sapiens
gacttcagcatactaatttacctccttttctctctgtaaaaatttcttcagactgttttkgatttttagccacatgaagtgacagctttcagtttctgtctccatctaatcacccatagtgcagactttctggttggttacagggaaaagttcgagcgcagtggctcacatcataggctgcctactccttctccttcaaggagtgtctgtcagtcttcccaaggtgagggtccacatccagtaattttatctatggcctaggtgggagtcatcaagcctcgtgatcacaatattaatgctttagcatgctggtaagcagcagtgctaagcaaagtccagccatattggctaggtgtttttcattgggagagtaattaagttaccttgcttagtgtttttgaaggcgctggtaccaaatacttctcctttacttttgtcatcaatgcctgggcgatgaactgccatgaatattcaccgtgatatctttgagggtcaggagagcagcaagagaagcagcagcacaggagatgggtaaggctgcctctttgcttgagcaacaaaaactgttgtt

SEQ ID NO: 492863 - DNA, 585 bp, Homo sapiens
ctgcatcatccccaaaggaaatccatagctgtcaacagacactctcgtttctcctccacttcctccactcctgttcctaggcaactactgatctaccagtatatgtaaaaaaaaaaaagcatgtcatctgcaagtagagatagttttatttcttcctctccaggctacatttcttttatttctttttgtagcctaattgcagtacaatgttgaataaaagtggcaaaggtggacatgtttattttgttcctatcttaggaggaaagcctccagtctttcaccattatgtatgatgtttgccattggtctttcatagatgtcctttatcaggttgagaaagttcccttctattcctggwttattgagtgtttttatcatgaaagatgttggattgtgtcagaagttttgtctgcatctattgagatgatcatgtaattttttttcctttattctattagtctagtatattatcttgattgctttttatatgtcaaaccaaccttgcatgtctgagataaatctcatttagtcatggtgtataatcctttttctttcttttctttctttttttttgagatggagtct

SEQ ID NO: 492864 - DNA, 457 bp, Homo sapiens
taaattggagaatatggtgtttacttcatatggctattgtaagcaataaaaaaaaaggtattttaaacacctagcatagcaggtgttagtgctaaattatatattactttctcctgataaagtaaccttttaaaaagtaaagagcttatttatatagagctagtttccagtctcttgttttagagacttaaaaaacagtactggactgctgttgttgtttcactgtggcaaagaatagaagaatgaattttatttcatcatatatttgatggttcccaaatcattccttgcttcttatagccagcagaaacctacagttggattttggtgagtctaagtttgtagtaagtgagattgtttttagtgagctgtcagcgggggttgatgaaaggcagaagaccatggycgtttttaatgaggttgtgtgaaaatccaatgaagtggtcagtgaaaattc

SEQ ID NO: 492865 - DNA, 596 bp, Homo sapiens
tatgggcagccctgctcctgaaattgatgaggtgtgtataccctgcgtcctgtttggaggttctagtgccccctgctgcctaagaaatctacctttatcccccagccggctaatgccacagcctccccagcccttagcgtcaggtcagcagagctgagccacccaaggtaggagagaactgctccccacagctttgascacatgggattctgagggtactttgtgggagaagctggtggcaggtttcaaagtggtggaagtggagaatgcctcattacaggaagcccaggcaaagcacaggcttcctggctgagtctgggggttgccgggcattactccgccagacccagtggtacgggtctgggcgtggatctaggaaggtgtacatcccaaagggaggctgtctgggaggctccccatcaggagactgggattccagaggtcttggcttgcaaagttggagggtggttggaaccttctgcagagggcagcattttgcttgtttgtgctgttcattgtagggccagcttcttggatggcagatctgtacaatcatgcagggccccgggctttgagggcccatgtctgagggcctg

SEQ ID NO: 492866 - DNA, 526 bp, Homo sapiens
gctgctcagtaaatacttgtcgaatgactgaaccaaacatggattgggtggcttctatgtgccagacactggaaatgctaatatgtaaatgaagcccagtttttgactccagggctcctggtctggtggagcgatggagcagcaaggagccatgtaatgatcctgtttccacggggcactgggacagtagaaagcacagaggaggaacacccagcccagctttgctggggccaggaaggatgcctggaggcgagacagccccttgagcttagttctcaggaatgagttggggatgtccaggtgaagaagagaaggaagggctttctatgtagagggaatagcatatgcaaaggcttagaggtctgaaagggcactggccttcaggagaacccagtcactaagtgcaagggatgccaaagtgtattgagaggaagctggagtctctctgaatctgctgtgattctgaaggctgcctgataaaaaaaaaaaaaattttwaaaaaagaggaaactgaggcagatcttca

SEQ ID NO: 492867 - DNA, 610 bp, Homo sapiens
gccccagccacatgtgccctcgtgagaaagccagcgcagatcagtgactccttgtgatttcagaaaagcaacttgatcctcttatggaaagtgatggygtttgtggttgtttcatagggtcaggaaaagcctaaggagagacccccagcctcaaactctgtccttcaataggggccgagcaaccccaacaaaaatcaaaaccaaattcctgaaccagagaaggaagcacttccaatgtgacaggtgctcagggctgggcttgtgaagttttgctttgggtgcctggaagatgagaagaaaacagaactcacttttctgtctggttctgtaggaaaccacacacacagaaccagacacctaggagtgggcggatagtgatcatgcaagggcaccctgtgtgatgagcagaaagcagtcgggtggggtgtcctgcagggagggaggcaggcttcaagcccccagcagctcaggccaccaagaaaaaggatccataacaaaatgctttcatcctcaccagtgtccctggtgattcaggggctcttcctcctcgtggagatcatggaaggcatctaacatgcctgagatgaaagagtatccctgctaatattaa

SEQ ID NO: 492868 - DNA, 610 bp, Homo sapiens
gccccagccacatgtgccctcgtgagaaagccagcgcagatcagtgactccttgtgatttcagaaaagcaacttgatcctcttatggaaagtgatggtgtttgtggttgtttcatagggtcaggaaaagcctaaggagagacccccagcctcaaactctgtccttcaataggggccgagcaaccccaacaaaaatcaaaaccaaattcctgaaccagagaaggaagcacttccaatgtgacaggtgctcagggctgggcttgtgaagttttgctttgggtgcctggaagatgagaagaaaacagaactcacttttctgtctggttctgtaggaaaccacacacacagaaccagacacctaggagtgggcggatagwgatcatgcaagggcaccctgtgtgatgagcagaaagcagtcgggtggggtgtcctgcagggagggaggcaggcttcaagcccccagcagctcaggccaccaagaaaaaggatccataacaaaatgctttcatcctcaccagtgtccctggtgattcaggggctcttcctcctcgtggagatcatggaaggcatctaacatgcctgagatgaaagagtatccctgctaatattaa

SEQ ID NO: 492869 - DNA, 439 bp, Homo sapiens
caacctaagtgcccatcaatgacagattggataaagaaaatgtggtacatatacatcaagggataccatgcagccacaaaaattagcaagatcatgtcttttgcagagcatggatggagttggagcccattatccttagcaaactattgcaggaacygaaaagcaaatgctgcgtttaagtctttaatccatcttgaataaatttttgtgtatggtgataggtagaggtacaatttcattcttctacatatggatagccagttatcccatcaccatttattgactagggagtcctttccccattgcataaaactgtatttttaaaaaggcagactgtcagattggttgtaaaagcaagacacaaccacatgctatctacaggaaagcactctaaatataaacaagtcaagtggtgggtgatgagactgcagaggtaaac

SEQ ID NO: 492870 - DNA, 651 bp, Homo sapiens
catggaaacagctggaggccattgtcctaagcaaactaacacagaaacagaaaacccagtatggcatgttctcacttacaagtgggagctaaacaccgggcacacatgaacataaagatggaaaaagtagacactgaggactactagagagggagagaggaagggaagccagggttgagaaatacctaaggggtactgtgctcaccaccgagggacaggttcaatcgtgctctaaatcccagcatcatacaatatacttttgtaacaaacttacacatgtacacccagaacctaaaataaaaattgaaaagaaaaaaaaataaatgaacgaatgaaattaatttmataagcactaaaaaaaaaagttatggttcaagttgagaggcctcctgcataggtatccccaaaagggaaaggcaatacaggaggagatgctgggttagggcagaaaaggagggcttcagttgtgggatgaagacatgatcaattacttgtccatttcaaatagaaataaacaagtacatcacaaacaagtgtaacaataaaagggcaaaattctgtatcatttcatgtattgaccctaggattactcttgtctccctactgcttggtatttgtgttctatgtctgctgatttctggctgataagca

SEQ ID NO: 492871 - DNA, 506 bp, Homo sapiens
ctgcaatgcagtggtgcgatctcagctcaccgcaacctccacctctcaggttcaagcaattatcatgcctcagactcccaaatagctgggattacaggcgtgcatcaccaggcctggctaatttttgtatttttagtagagayagggctttgccatgttggccaggctggtcttgaactcttgacctcaggtgatctgtctgccttggcctcctaaagtgctaggattacaggtgtgagccgccgcacctggcctgcaggcagtttacattttactcaatgtttagacaggttttactactcatttctgaacctcaattttctgtaaaatagggaaactatatgaagagtttcctttaaaaatttcagctagcattacttaatcaaaaaatgaaaaggttatttattgatttagctaatagaacagtccaggtatagtcttcaggagtggcttaatcagggaatttaaatgatatcaacaagacctgtgctaaccatcttcaggtt

SEQ ID NO: 492872 - DNA, 506 bp, Homo sapiens
ctgcaatgcagtggtgcgatctcagctcaccgcaacctccacctctcaggttcaagcaattatcatgcctcagactcccaaatagctgggattacaggcgtgcatcaccaggcctggctaatttttgtatttttagtagagacagggctttgccatgttggccaggctggtcttgaactcttgacctcaggtgatctgtctgccttggcctcctaaagtgctaggattacaggtgtgagccrccgcacctggcctgcaggcagtttacattttactcaatgtttagacaggttttactactcatttctgaacctcaattttctgtaaaatagggaaactatatgaagagtttcctttaaaaatttcagctagcattacttaatcaaaaaatgaaaaggttatttattgatttagctaatagaacagtccaggtatagtcttcaggagtggcttaatcagggaatttaaatgatatcaacaagacctgtgctaaccatcttcaggtt

SEQ ID NO: 492873 - DNA, 506 bp, Homo sapiens
ctgcaatgcagtggtgcgatctcagctcaccgcaacctccacctctcaggttcaagcaattatcatgcctcagactcccaaatagctgggattacaggcgtgcatcaccaggcctggctaatttttgtatttttagtagagacagggctttgccatgttggccaggctggtcttgaactcttgacctcaggtgatctgtctgccttggcctcctaaagtgctaggattacaggtgtgagccgccgcacctggcctgcaggcagtttayattttactcaatgtttagacaggttttactactcatttctgaacctcaattttctgtaaaatagggaaactatatgaagagtttcctttaaaaatttcagctagcattacttaatcaaaaaatgaaaaggttatttattgatttagctaatagaacagtccaggtatagtcttcaggagtggcttaatcagggaatttaaatgatatcaacaagacctgtgctaaccatcttcaggtt

SEQ ID NO: 492874 - DNA, 643 bp, Homo sapiens
acccattagctgtgtgatctttgactagttactttatctagaagctttagtctcctcatctataaaatgggtaatactacctagttcatggggatgttgtaaatattaatgatgaactaataaatgcaaagatttagacagcgcatggcacattgtaaagcagttgatgaatgtaattcttttgatttccctttaaccatttaaaaatatagaacaattcttagatcacaaggtgagcaaaaacaggaggcaggccctgctgtagtttgctgacccctgatacagagagatggactcttgtatctggtggagtgtaaattggagcattttttctggaaggcayttggcagtgtgttttaatctttaaatggcttgccttttttttttttgagatgggatttcactatgttgcccaggctggcttcgaactcctgagcttaagcgatcctcccacttcagcctgtcaagtatctgggactctaggtgcctactaccacgcctggctgccatcaaccctggaaatggctaggttttttttaccccattgacctcctttctgggaatttattctaacaacttaataagagatacacagggatattacagctttatttataagtacaaaaaaaatggaaaagggagc

SEQ ID NO: 492875 - DNA, 389 bp, Homo sapiens
ttttcaatatctcagaaagctaattagatcttaatcttatttaaatctcttgattttacacagtaataatagtgaacacatggtaaaattcagcccatcgaactcagaaacttcattttaggacaacatttcaaactcctttcccatccaggcatttttcagtagcagatatgtggcatacctgactcccttccccyactttcttctcctgatccctcttggtgaaggtttagggattagagatgtactcagagccagagttcagcggcctaaatcaccaatccttggattactacaagctcacctagagtctaaaagaacaattctccttatgccctttgtgatcctggaaacattacttctctcctcagttgctgtttctcacttag

SEQ ID NO: 492876 - DNA, 531 bp, Homo sapiens
acacccagcatcttatcactataaagaccactgaaacaatagttgatggtccaggcccagccatgagattggtacacgttttttttaatctgatgtatcaaaatacaataacctctatcccttgctccttcttcttcttcaataagcaattacacacattttagggaaaagaagataattcaaaaattcaatactttttggtccagctaacagtgagaaatgttaaggccttagggccacgttatactgaatggatatttttttttatagctcacatacctttttatttttatatataaccaaagataatgcatgtgacggttttccatatctatggtatgaytggcagtttccactctcctcaaagtgaaaggaaaacactggttataccaagggtaggtcatatagccaatgggttccaatggcccaagtacaaaatataatgtacaaaagtgtccagtgactgcactaatctaatgaggctggtgtgccatgtttgtcaagtgtggagctctcttgcacaggtactga

SEQ ID NO: 492877 - DNA, 625 bp, Homo sapiens
cttcccaaccccctgggcctgagctaccaggttgtcccttagagcaacaaaccttagcttactggaagaactgcatccactcatgccttggagagtgattctgtgcctcaagtcccaggtgctacaagtttcagaagacaatgtgtgcaagagtctgacctcacgaccactctgagcatctgtgytatggatcccagtgccactgtagctgcctgtgaaccacgtcagatccaacttcaagagagatcctctcagctaagaatccccactctaaggaagacaaaaacaggagaatccctaaaatccttgctctaataacctacacagtcactgtcactaccacaaattccttcagcctagaccactgaggctctgcagttatcactaacattgatcacaactgaaaaaacttcacagagactacaacactgcactaacaaagaagcagagccaccacactctgccatgccaggaccctcaggcccatctgcagctaaatgttttcccttataaaagccactctgtgaagtttggaaggagtgaccgtaccaccagataggcagaaattaacacagggacacacaaaaaaatgataaagcaaggaaatatgacaccaccaaaggac

SEQ ID NO: 492878 - DNA, 419 bp, Homo sapiens
agctgcttcccaaccccctgggcctgagctaccaggttgtcccttagagcaacaaaccttagcttactggaagaactgcatccactcatgccttggagagtgattctgtgcctcaagtcccaggtgctacaagtttcagaagacaatgtgtgcaagagtctgacctcacgaccactctgagcatctgtgctrtggatcccagtgccactgtagctgcctgtgaaccacgtcagatccaacttcaagagagatcctctcagctaagaatccccactctaaggaagacaaaaacaggagaatccctaaaatccttgctctaataacctacacagtcactgtcactaccacaaattccttcagcctagaccactgaggctctgcagttatcactaacattgatcacaactgaaaaaacttca

SEQ ID NO: 492879 - DNA, 625 bp, Homo sapiens
cttcccaaccccctgggcctgagctaccaggttgtcccttagagcaacaaaccttagcttactggaagaactgcatccactcatgccttggagagtgattctgtgcctcaagtcccaggtgctacaagtttcagaagacaatgtgtgcaagagtctgacctcacgaccactctgagcatctgtgctatggatcccagtgccactgtagctgcctgtgaaccacgtcagatccaacttcaagagagatcctctcagctaagaatccccactctaaggaagacaaaaacaggagaatccctaaaatccttgctctaataacctacacagtcactgtcactaccacaaattccttcagcctagaccactgaggctctgcagktatcactaacattgatcacaactgaaaaaacttcacagagactacaacactgcactaacaaagaagcagagccaccacactctgccatgccaggaccctcaggcccatctgcagctaaatgttttcccttataaaagccactctgtgaagtttggaaggagtgaccgtaccaccagataggcagaaattaacacagggacacacaaaaaaatgataaagcaaggaaatatgacaccaccaaaggac

SEQ ID NO: 492880 - DNA, 489 bp, Homo sapiens
ctggcatgctactacttctgtgatgtagaatacatttctaaactttcaacttttgttttatcattattcaatactaggccaatgaaatatattatcaaactggaatattctttaatccagccaactatttcccaataccagaaagataatatagcttgtagagactgtctacaatatctaagtagctagcttgctctgtaaatggaaattcaagtatcaagtacaaggttgaaagagacatcctccaaggtctcttcagaattctcttctatagaagctttgggggaaaaaatatctttcactgaaaaaaacatcaaaagtgttttagtgtcatctgtaagaggctgaataagagggcaaggagggaaatcaagaaaaagactaaagaaggtgactgaaaagcatgatgtatctcagacctgcatgtttcaagctgtgccaaatagtgttcaaacrcctttgaaaactaaatcctataatagtcaatca

SEQ ID NO: 492881 - DNA, 489 bp, Homo sapiens
agctggagcccataatgcattaaacagtggaaatagcaatggagtgcatcacactctgatactctgaatcatagatcagagaagggttctatataacgatttctgaataagtcacagtgaatgtgtaaactgctaccttaaagttactatttatatttgaggagttaaaattagaatgacaagaactctcattattttacattaaaaataattcgacattttttttatggtcaaattagaacccagtaggttagacttagcaagttccaaaagcctgagctagtgagggggtaaagacagttttgccgtgggaatagaaagtttrcaaactttctatttctaaggggaatctaaaaaataccactagcatctagttgaggagagcaggccccacaggttgcagacaggcatacagaagtacactaaaggtctgggaagatcagcaacaaccttttatgagtcactgggatatgagctaagactgtaaac

SEQ ID NO: 492882 - DNA, 585 bp, Homo sapiens
aatttctcaaatgtactactttactgtaatcacgtttatttatttcctttgtgttactaaaggctccattgaagaggcaaatttgtatcaaaataatgtttgaactcaataaaattgaatacagacaccaatctcctttactttgacaaatggacacaactaaagtttgtggaaatataaataataatggataataaagaaattatgaaattgaataagaatggagagatgtgkgtcatctatgtaaaaaatgattaaaacagtatggtactggcaaaagaataatcatagatcagtaggtcaatattaagaaaaaggctcagatacatatatgggtttcttatacatttatgtacggtctatataaatataatataaatggtattttcagttcatgacgaataatatagaatttactataaatgctcctttaccttgccccatatgaaaccaatttgtagaagaagtttaattataatataataaaactattaaagaatgagaaataaaggttgtatttcaatcttagatttgaagaaaatctttcttgagtgagatataaaatacaagatctaaaagaagaca

SEQ ID NO: 492883 - DNA, 635 bp, Homo sapiens
ttaggttttaaaatacatttttgaaaatttaccatgccctgtgtttagtactgttttgaaatgtgggcaagatgggccccttctctgattcttcccctgtagaaggccctcctctgacctttctctagtttaactcttgctcaggaatgtgcctgcctggctgaaatctgtgtcccttctccacctcccctttgagaccctgcagtagyttccagacaacaacatgataaatacagaaactgtgtgttacctttcaacatttctagagccatttgaaaaagtaattttatgtctggtgaatttcataatgaaaattaatgagcttgtatttattgtgttttatttcttttttttctagaaacttgttataaaattatcagttcaagagggatcagaaatcaaaatcaaatctattttactgtttgtttgcaaagcactgttctagaacacacaggtatgtggtacccggaattccctgttaccaggaccagcataggccttttttccaggtccatatcccacaagtagaacacacacctcacctgtgcatccctaggtgcaatgaaaggctgtttgcagggcgggtggaccgtttgaacatgcaggctgggctgacatgggttatgatgaatgca

SEQ ID NO: 492884 - DNA, 630 bp, Homo sapiens
caatgcacaatgtgtctgggtcatcacagcagtgaatacaaataaggtaagagaacaccatctgtgatttaaaaaaaaagtcataatcataaagacaaaggcaaagaaataatacrgaacatgcagtatggaaaatttataactcaagtaggattttggcgcaatattccctacttaacagtttataaaccagatttatatgagaaatttgggaaaaaataaaaataatacaattctactccaagctactaacatataaaccaaaaggttaaaattacaaatgaatgctttctgagatacatttttgaaggttgtaagtgtatcctttttaaaaggaatcatgaatagtggctgtttttgtgtcttttctgtttgacacatcattcaggtcaatcctgtttttatacatagctgactttaatttcagtgtttctctattgctatatatcacatagctatttatttgaaatagttggtttaatgtgctctgcactaataaagaatttatattatggatatttcaaaaagttgaattgcctttctatttgattctaatatgagtaacacatctaaatatgtatgtgccactatacctcaagcaaaattataacacaatgaatgtaaatgcag

SEQ ID NO: 492885 - DNA, 632 bp, Homo sapiens
tgccacaggttgttgtgagagtttgttaagataatgcatacagtgcctggtacatagtaaaaacccaattattaagctgatagtagtagtagtagtagtagttgtagtagtagtagtagttttgtagtagtagtagtagttgttgttgttatagtagtagtagtagcagcagcagcaacagcagtactaatagtgccattattattcattctttgcctatagctatatattgacttaatttatctattcatttattcaacaaacaattgctctaaatctgctctttgccagttacgattctgggctctggagattgaatggttaacaaagcagccaaagttcttatttttatagagctcgcattctaaggtaggcaacacaaaayaaacaaatactgaactaggaatagagaaaaattgcaggttaagtactgtgaagaaaaactgagggaataaaaaacagcctgctgttgtggatgtgatggccagggaagtcctctctgagatgccatttaagtagtgttgtgaattgaagacagaaaatatgcacatatctgaggaagctgtattccaagcaagcagtgagaacagtaagtacaaaagtgctggcagtaggtgttgatgtttccataa

SEQ ID NO: 492886 - DNA, 668 bp, Homo sapiens
ttctcatgttggatgataaagctaaaagtactaggtataaactgtgggtgagaaatatttcctatcaataatcttgatgaatygattgattgctgggcagctcgttgtgaacgaggctctatggtagagtgcagtgctgctcaaggaggagtgtgcagagttatcacttggggaattcaaaggcggctctggctcagtgaaactcagtaagaacctagacttctcatttctatcaggcttccaggtgatgcgacaactgctgcatatcacacatcgagtagtgagactaaaggaaaagctattggattggatgttacacgtcccaggaggtctgtcgtgtggctttggaacaaattctcttgctgtagcagtgcagataatcatactatcctgctctctgatggaatgtgactattaaaagactacatataaatattaatatgtatagatgtatgtatttcatagagatctgagagctaactgcaatcttgtaaatataaatgtctattcttaattatatgaataagtaataagacaatgtagcaatccttagctctcagaaattctgaagaacaaaacattaactgactgctccatttatactataactttctcacctccttcattccacatttttcccacaaaaaagccatgcctattaaataaga

SEQ ID NO: 492887 - DNA, 559 bp, Homo sapiens
tatcaggaggatgcatttttctgctgtctccagttcagtatctcacaagaccagcaagccttccagtctgggaagttataagaacatcattgtattactccattttcatactgctgtaaagaactgcctgagactgtgtaatttataaaggaaagaggtttaattgacttacagttcagcatggctggggaggcctcaggaaacttacaattgtggcagaaagtgaagaggaaaacaatgcatcttcttcacaaggcagcaggaaggagaaatgccgagcaaagagggaagcgttccttataaaaccatcagatctcgtgagaackcactgtcatgaaaacagcgtgggggaaactgcccccattatttaattatctccacctggtctctcccttgacatgtggggattatagggaatgtaattcaagatgagatttgggtggggacacaaagcctaatcatatcaaccattaatggggattctgtaatgtatatgaaacatgaaacacttgcagactgacactactggacctcaacaaagagacagcagacttgaagt

SEQ ID NO: 492888 - DNA, 559 bp, Homo sapiens
tatcaggaggatgcatttttctgctgtctccagttcagtatctcacaagaccagcaagccttccagtctgggaagttataagaacatcattgtattactccattttcatactgctgtaaagaactgcctgagactgtgtaatttataaaggaaagaggtttaattgacttacagttcagcatggctggggaggcctcaggaaacttacaattgtggcagaaagtgaagaggaaaacaatgcatcttcttcacaaggcagcaggaaggagaaatgccgagcaaagagggaagcgttccttataaaaccatcagatctcgtgagaactcactgtcatgaaaacagcgtgggggaaactgcccccatkatttaattatctccacctggtctctcccttgacatgtggggattatagggaatgtaattcaagatgagatttgggtggggacacaaagcctaatcatatcaaccattaatggggattctgtaatgtatatgaaacatgaaacacttgcagactgacactactggacctcaacaaagagacagcagacttgaagt

SEQ ID NO: 492889 - DNA, 541 bp, Homo sapiens
aaaaaactcaaggctcaatttcatgcttcctgtaagactgtggtgaagttcaagttttccataaatgtaacaaaccttcacagattgaaaaggaaatggtttcccttatcctcttgtcctcaatctagttgcatgggactgactcagcatctcacgggggtgaaaatcaaggatcaktgtttcttaaagcacccccgagtgactctcctgtgcagccagggttgagaatcactactctagtcattcaactgatcgttgctgggcacgcactgggttccatgaactgtgttgtatgctggagacgctctggcaaataacacagatgcaattcctgtccttgagactctacactctagggggagagaaaagcaacaaataaacaaagaaacgtctaattatacattgtggtaagtgcaataaagaaaatttacagtgtgttagggtagagaacaacaggcagaactctttaggtaagaaaggaattaaaagcttcactaaaggggtgaaatgaggctgagagtggaggaataagagggaatga

SEQ ID NO: 492890 - DNA, 541 bp, Homo sapiens
aaaaaactcaaggctcaatttcatgcttcctgtaagactgtggtgaagttcaagttttccataaatgtaacaaaccttcacagattgaaaaggaaatggtttcccttatcctcttgtcctcaatctagttgcatgggactgactcagcatctcacgggggtgaaaatcaaggatcattgtttcttaaagcwcccccgagtgactctcctgtgcagccagggttgagaatcactactctagtcattcaactgatcgttgctgggcacgcactgggttccatgaactgtgttgtatgctggagacgctctggcaaataacacagatgcaattcctgtccttgagactctacactctagggggagagaaaagcaacaaataaacaaagaaacgtctaattatacattgtggtaagtgcaataaagaaaatttacagtgtgttagggtagagaacaacaggcagaactctttaggtaagaaaggaattaaaagcttcactaaaggggtgaaatgaggctgagagtggaggaataagagggaatga

SEQ ID NO: 492891 - DNA, 540 bp, Homo sapiens
aaactccaagagtaaatttcacttcaggtgtagctgggttcagggcttmagcaaaatattttatttgtttacttttttggttaaggttattgagacgtaacttgggtatggtacccttttcgtacacagtttagtgagttttgataaacgtgcagttgtgtactcaccaacataatcgggatatagaacatttccacaatcccccctccctaatttttttcttgtccctttgtagtcaacttctcctgctaccctcagcccctgacaaccactcatctcttttcagtacctatagttttgcctttttcagaatatcttttaaatggaattaagtagtctagatgtactcataagattatgtgtctggcctctgttactcactatcctgcctttgtgtaggagtcatctgtgtaatcacacctctgatttctttttatcactgagtagcccattgtacagatgtacagtgatttttaaaacctattaaccaattgcaggacatttgatttgttaccatttttggcaactgtgaataaaact

SEQ ID NO: 492892 - DNA, 540 bp, Homo sapiens
aaactccaagagtaaatttcacttcaggtgtagctgggttcagggcttcagcaaaatattttatttgtttacttttttggttaaggttattgagacgtaacttgggtatggtacccttttcgtacacagtttaktgagttttgataaacgtgcagttgtgtactcaccaacataatcgggatatagaacatttccacaatcccccctccctaatttttttcttgtccctttgtagtcaacttctcctgctaccctcagcccctgacaaccactcatctcttttcagtacctatagttttgcctttttcagaatatcttttaaatggaattaagtagtctagatgtactcataagattatgtgtctggcctctgttactcactatcctgcctttgtgtaggagtcatctgtgtaatcacacctctgatttctttttatcactgagtagcccattgtacagatgtacagtgatttttaaaacctattaaccaattgcaggacatttgatttgttaccatttttggcaactgtgaataaaact

SEQ ID NO: 492893 - DNA, 578 bp, Homo sapiens
tttacatataaatttaaaaatcggcttctaatttccaaaacaaacaaacagcacaggctgggaatttgactggagttgtattaaatctgtagatcagtttgcagacaattaatattactacagtgctactacagcatggagtcggagtcccccagtccaggaccttsgtttatcccttcatttacttaggtgtttaaacatttttatcaaaaatatcttagagttttccatgaagcagtcttgcacatattttgctagatttactcctggatatttgatttaaaaatatgattatagatggactttttgtttgctaaacatttattgatatatcaaaatacatttgatgattttgtatttattttgatcaactgggttttgaaatcttgctttctcttgggaagtaggttcatccatgtaccctaatatactctgtaggcctcccccgatgcactgcctatgggactcaaggttgccatattgcacaactccgggggcagcaatgacattgtaatccatgtagtcaggagaggcattatttatatacagtagaatatgatttgtgctctatgcattgt

SEQ ID NO: 492894 - DNA, 511 bp, Homo sapiens
ttcagtttgcacgctgcacgaaggctgctggccataagaataaatttggaggaagaaggctgaaatccagtagcactctgcccaccaagctgtgtgccttggcgtggggctgcatctatactcagggagcactttctcctaattcagctacccagatggggtatcgtttcccrttttacacaaaggcaccctttaggccagtggatgccctggcccaggcctcgaagtttgactcatctccaagtcgatcatcagtagctgcatttatcagtttctcttggcacagatttgcagcattgccaggatgctgacaaaatgtttctagagaactccacgccctcttctaccctttctgttagtcttttattgattcttctctcttgtgtttctaagcctgagccaggaaccctcctgttattaaaagcagtcccagttgcccacacctttcatttcctttgaattacattaattgcctgacagctaaaaagtgagctggtattttcagatttca

SEQ ID NO: 492895 - DNA, 511 bp, Homo sapiens
ttcagtttgcacgctgcacgaaggctgctggccataagaataaatttggaggaagaaggctgaaatccagtagcactctgcccaccaagctgtgtgccttggcgtggggctgcatctatactcagggagcactttctcctaattcagctacccagatggggtatcgtttcccattttacacaaaggcaccctttaggccagtggatgccctggcccaggcctcgaagtttgactcatctccaagtcgatcatcagtagctgcatttatcagtttctcttggcacagatttgcagcattgccaggatgctgacaaaatgtttctagagaactccaygccctcttctaccctttctgttagtcttttattgattcttctctcttgtgtttctaagcctgagccaggaaccctcctgttattaaaagcagtcccagttgcccacacctttcatttcctttgaattacattaattgcctgacagctaaaaagtgagctggtattttcagatttca

SEQ ID NO: 492896 - DNA, 525 bp, Homo sapiens
gcaactgaccctaagacttgttttaattttgcgattgttttgaagctgctagtctgccaggcatatggtgcaggtaagctttgccaagtcgttcctccgaagcattttattaygataataatcacaaatgtgacctcagtccttttatcctgtttattctctaccgtttcctgtgataagtgctacttctgtactttgccaacctcctccacccgcatttgtttagggaaagaatattaattagtgatattaaggaggctatgggctgaaaatgaaattttcataatggaattccttagactatctttgccctccgaggcatcctctgtttaagcagttcaattgaatatcattattaacatacataataataataattagcattattgcctgcatcagttgttgttcatggaaaactgcaagctcttttctatctattggcctcagttaaaagtgcgaaatagattctcattttatgttttatttccctgtcatttttgctctgctcaactcctatgcttggca

SEQ ID NO: 492897 - DNA, 525 bp, Homo sapiens
gcaactgaccctaagacttgttttaattttgcgattgttttgaagctgctagtctgccaggcatatggtgcaggtaagctttgccaagtcgttcctccgaagcattttattacgataataatcacaaatgtgacctcagtccttttatcctgtttattctctaccgtttcctgtgataagtgctacttctgtactttgccaacctcctccacccgcatttgtttagggaaagaatattaattagtgatattaaggaggctatgggctgaaaatgaaattttcataatggaattccttagactatctttgccctccgaggcatcctctgtttaagcagttcaattgaatatcattattaacatacrtaataataataattagcattattgcctgcatcagttgttgttcatggaaaactgcaagctcttttctatctattggcctcagttaaaagtgcgaaatagattctcattttatgttttatttccctgtcatttttgctctgctcaactcctatgcttggca

SEQ ID NO: 492898 - DNA, 525 bp, Homo sapiens
gcaactgaccctaagacttgttttaattttgcgattgttttgaagctgctagtctgccaggcatatggtgcaggtaagctttgccaagtcgttcctccgaagcattttattacgataataatcacaaatgtgacctcagtccttttatcctgtttattctctaccgtttcctgtgataagtgctacttctgtactttgccaacctcctccacccgcatttgtttagggaaagaatattaattagtgatattaaggaggctatgggctgaaaatgaaattttcataatggaattccttagactatctttgccctccgaggcatcctctgtttaagcagttcaattgaatatcattattaacatacataataataataattagcattattgcctgcatcagttgttrttcatggaaaactgcaagctcttttctatctattggcctcagttaaaagtgcgaaatagattctcattttatgttttatttccctgtcatttttgctctgctcaactcctatgcttggca

SEQ ID NO: 492899 - DNA, 525 bp, Homo sapiens
gcaactgaccctaagacttgttttaattttgcgattgttttgaagctgctagtctgccaggcatatggtgcaggtaagctttgccaagtcgttcctccgaagcattttattacgataataatcacaaatgtgacctcagtccttttatcctgtttattctctaccgtttcctgtgataagtgctacttctgtactttgccaacctcctccacccgcatttgtttagggaaagaatattaattagtgatattaaggaggctatgggctgaaaatgaaattttcataatggaattccttagactatctttgccctccgaggcatcctctgtttaagcagttcaattgaatatcattattaacatacataataataataattagcattattgcctgcatcagttgttgttcatggaaaactgcaagctcttttctatctattggcctcrgttaaaagtgcgaaatagattctcattttatgttttatttccctgtcatttttgctctgctcaactcctatgcttggca

SEQ ID NO: 492900 - DNA, 612 bp, Homo sapiens
tgggaagggtagttgggggagagggtgggagaaaagtggggatggttaatgggtacaaaaaaagacagaataagacatagtatttgatagcacaacagggtgactatagttaataataacttaattgtagatttaaaaatagataaaagactataattgaattgtttgtaacacaaagaataaatgcttgaggggatggataccccattcgcccttatgtgattattgtgcattacatgcctgtatcaaaatatctcacgtaccctataaatatatatacctatgtgtacccacaaaaattaaaaataacaaaattttaaaaaaacgaaattagattaaaagtaaatgaggacaagaggaggcaagagggttctaagaaactatgtgtgtaactagaccagacattagtctgaaaaacaagtatatggagggcagaaaagaaaataaggagaaattatgggacatgatggtgaagaatgggctgtctgatttagtgattttataggcagaattgttctaggtgaaggcaggatctagggtgtaactttgggagcataaggtgagaagggwggagaaggccactgaaaataaaataatcaaaaaactaaaagc

SEQ ID NO: 492901 - DNA, 470 bp, Homo sapiens
actctgttttgatggtcataggcactgttgtctgaaagaccagttgactgccacactaaataagtgaatatcaaagaaggatatgaaactcatccctcttggaggcaccagtggagcttactrtaatttttcctcctgtgctataaatttcagattctgcacatcacacatgtacgaagaaatatgaccggaaggatttttcactaaaatgctaacagtcatggaataatttgggggatttattttatttttttaaatttgttatattgttgaatttttagaacaatgaagatatgtaatttttataattagaagagtaataaacagctagcacttattaatcacttgctatccacaaacattttacacctgatccttcacaggacctctataaggtacatactgttgctatcctcatttaccaataaagaaactgagacagaaacagatcaagtaatttgcctgagtca

SEQ ID NO: 492902 - DNA, 470 bp, Homo sapiens
actctgttttgatggtcataggcactgttgtctgaaagaccagttgactgccacactaaataagtgaatatcaaagaaggatatgaaactcatccctcttggaggcaccagtggagcttactgtaatttttcctcctgtgctataaatttcagattctgcacatcacacatgtacgaagaaatatgaccggaaggatttttcactaaaatgctaacagtcatggaataatttkggggatttattttatttttttaaatttgttatattgttgaatttttagaacaatgaagatatgtaatttttataattagaagagtaataaacagctagcacttattaatcacttgctatccacaaacattttacacctgatccttcacaggacctctataaggtacatactgttgctatcctcatttaccaataaagaaactgagacagaaacagatcaagtaatttgcctgagtca

SEQ ID NO: 492903 - DNA, 470 bp, Homo sapiens
actctgttttgatggtcataggcactgttgtctgaaagaccagttgactgccacactaaataagtgaatatcaaagaaggatatgaaactcatccctcttggaggcaccagtggagcttactgtaatttttcctcctgtgctataaatttcagattctgcacatcacacatgtacgaagaaatatgaccggaaggatttttcactaaaatgctaacagtcatggaataatttgggggatttattttatttttttaaatttgttatattgttgaatttttagaacaatgaagatatgtaatttttataattagaagagtaataaacagctagcacktattaatcacttgctatccacaaacattttacacctgatccttcacaggacctctataaggtacatactgttgctatcctcatttaccaataaagaaactgagacagaaacagatcaagtaatttgcctgagtca

SEQ ID NO: 492904 - DNA, 666 bp, Homo sapiens
tggtagaaaacttttagaattacagaaaggatttttaaaagtggggggaagagggaacccatcctaaatgccaccaacaaaaatgaccactgttgatattttggttactaagtttttggattttctagcatacatctactcagagtacaattcataattgacaygttaattgcaactgagagtcagctaaagcatgtacatgttaaaacaaggagaccacccacaatattagcaaaagtatttacttcctgccatataaaagcttccaaacttattttaagatgccacacaaagcccattatccaacatagtaactttggtttcaaactttgcctgtccattgactgtaggaaaaacaagcttaggtactccaggtaagacagaagtggggcatggggatgttgggagaggtgccatcacttctaaagtgtctgtatgcagggaatccaaacctaaaacagagaaactgacccagtaccacaaaattgagacaactgagcctatgatgaccacttagtgcagttagttatgttttgtctgcattagaaatcgacatttgcctttctaaaggatttctttctacatatcttgaaagacaacatagaggagtgatcctggctcagccaagggaccctgaggcaagctgattcagtacgttgggtctta

SEQ ID NO: 492905 - DNA, 637 bp, Homo sapiens
gagactactttcagccttttcccatggggagatctggagcataaactatacacatagtttatcctaccttgaggcaaaggggtctgccttttgcacctgcttcccatcagtcaagagctgagtgctatgggatgggggagtattgtgctaatctgcttggtgaaggagctctgggtgaggcaccaatagcatccacgtggcaggcatgatggctgccagtagcacattcatatgaatcttgggtaaccccaaaagaaagaccttttcccctaragctctgactgtactgttccagggagaactctgatgtgagcaactgttttgcaagacagatggagtcagagccaatcaaatcatgtcgagtgggtgcttcactggaaagagggttggtttagcaaagaagtgggaggaaggatgggtagacaaaggcaaatgtcctctctacctaccacataccaggcactgctagaggcaagggatacaatgaggaacaaaaaatacacatctctgctttcacggaatacacgtcttgtttaatgcaagacagaccaataagaaattataataaagtcagatatatgctttaatagagaaagtatagattgctatgaatgaatcatataggagtcatcttact

SEQ ID NO: 492906 - DNA, 637 bp, Homo sapiens
gagactactttcagccttttcccatggggagatctggagcataaactatacacatagtttatcctaccttgaggcaaaggggtctgccttttgcacctgcttcccatcagtcaagagctgagtgctatgggatgggggagtattgtgctaatctgcttggtgaaggagctctgggtgaggcaccaatagcatccacgtggcaggcatgatggctgccagtagcacattcatatgaatcttgggtaaccccaaaagaaagaccttttcccctaaagctctgactgtactgttccagggagaactctgatgtgagcaactgttttgcaagacagatggagtcagagccaatcaaatcatgtcgagtgggtgcttcactggaaagagggttgktttagcaaagaagtgggaggaaggatgggtagacaaaggcaaatgtcctctctacctaccacataccaggcactgctagaggcaagggatacaatgaggaacaaaaaatacacatctctgctttcacggaatacacgtcttgtttaatgcaagacagaccaataagaaattataataaagtcagatatatgctttaatagagaaagtatagattgctatgaatgaatcatataggagtcatcttact

SEQ ID NO: 492907 - DNA, 452 bp, Homo sapiens
actcctgtagggactgaggcttaaccctcctggggatccctgggagccagctccacagctacctaccctagggaaagtgagctgcagtatttattcacaaagtctgatcagggattgggtgacaattactcctcaggggcttgaggcaggttctggggtgagaggaagcctttacagagaggcatgcaggtgccagaagtggggtcacaggcactgaagtgaagggcaaggggagaggggctgggtgctgagtgtcggccatgcactccaacttcatcagctcctcctccccatcgytgatataaacaattgatattttctcatcttccataaagcgctgtgcaggaacgactttaggacaagtcctttaatgtcttttcaacctgttctggcccctgtgctcctcctagatacaaattctggagcagcaactgatttaccaggaaacactg

SEQ ID NO: 492908 - DNA, 331 bp, Homo sapiens
aagcgaaaggggtttccccttagagaaccatcagatctcgtgagacttatgcactgtcaagagaacagtatggggaaaactgcccccaagattcaattatctcccatcgggtccttcccacaacacawgggaattatgggagctacaattcaaggtgagatttgggtgggggcacagcaaaaccatatcaagaaagaaagacattccagatagaaagggaagcacgagatgaggcctggaagcaagagaaagcaaagttcccttgggacatggccagcctttcatatggccgaaaggtaggagagatgagaaatggaactcccagaagtca

SEQ ID NO: 492909 - DNA, 616 bp, Homo sapiens
gggaaaagattatagtgatactttcactgttttttatttaatgttttactatcttcaatgtagggattgaatatgagcacatttcctaaaatatagtgccaaatgcaacaatgtttcattgtttccatctttaaaatctttgtcccatgaatccacattattctaaatttgtatttaatgtctttcatatagctggcaccgtgatatcgtttggaaatattgtgacaactttagtatgtcctttgacttcaactacctagagagacagagatcagcaaaataaaattagtattaaatatggtaagaatcaggagtggcttctcagaagaggtgactctgagaaaaatcctgtagagtaacacaaaattgggaaaataagtacatttctgatcatcttagagaacaaagagagtaaagctttccttaaatctcaaaagttagagagtgtagcaatcattgagaaaagatataatgtaagtgtratggttaatactgattggcttgaaggatacaaagtattgatcctgggtgtgtccgtgagagtgttgccaaaggcgattcgcttttgagtcagtgggctgggaaaggcagacctactctttattttggtgggtac

SEQ ID NO: 492910 - DNA, 592 bp, Homo sapiens
  misc_feature (1)...(592): n = A,T,C or G
tgaatattctttcatccaagtgactttttaaatatggtgttgctggtgaaattttgagacttttttttcntaaaggagaaaagagattaattccaccccagatatttcacaagtctaagtaatgtgttgacttctcaacatctagcctacatmtttctattgtgttgtggagtcaaattaaaagtctaaaaaacacaaaggggaaaggcaatctgaaaaaaataatgctttcatttggcaagaattgtacttctggccgggtgtggtagctcacacctgtaatcctagcactttggggtgctgaggtggttgggatcacttgaggtcaggagtttgaaacccagcctggccaacatggcgaaaccctgtctctactaaaaatacaaaaattagccgggcgtggtggtgtgcacctgtagtcccagcttactcaggaggttgaggcaggagaattgcttggacccaggaggctggggttgcagtgagccaagttggtgctactgcactccagcttaggggacagagcaagactgtctcaaaaaaagaaagattgtacttctttgtgagaaaataaaaagctgggaaacagcca

SEQ ID NO: 492911 - DNA, 530 bp, Homo sapiens
gaataaagagctgaaatagtagaaaatagctatcaatggagagtggaagggtatgcatgagaatactatagtttcatcaataagattactagtcctattcaacttctgaaaccatgtgcatgcgttactccgataaaacaacttttttaagttgaacattgtccaactccacaaatcaatacattgggaagttaatattacaaatgtatttcttgtctaaaagcaaagaaccataatgtcttctctcttgcatagcttgcaatttggagtcctttatcccatgyaatcccaaaacactgtatctggggcagcaaattactatgggctacagtaaatctaaaagtttattcttaacatttttgggttttctgcacacacaggcttcacacacaggaggtattataagagtattctagatagtattgttgaaggaggaagaggtgtaataatatcaaaataatttgcagtaagattcaaacatttgtaataaaaagcttagttattaaagaagatactccttaacttgccag

SEQ ID NO: 492912 - DNA, 610 bp, Homo sapiens
tgctaaccagtgccccagccatggcccagggtaaccaaattccttactgttctkggggacagaaatgccaataacgcgaagttcagccaggtaaactatgctgattctcaaaccaacaatctctgggtggggttggaaactcagacctgggaagagcatcagcaagccctggggtttaagagcactcctgacctccagacctacctctttagccagtctagggcacttagggctcagcttaaggttctttatctttcgttccacactcccaggatcctcctgggacaaatgggaaaagaagataaagtttgatggctactagagtcaatggagttaaaggcaatgctgcccttggaactgttggaaataccaaagaacaattgcagatcaagagcagcagtgagtgtggagacatacactcacacttaccataatagaatagaaactagagggtttgtgttcacttatcagctccactacttcccaacttataacatttgcctactcaccaactagtaaatatctgctacatagtgaaagctccaaaactgttggttaatgaatgttgaaatcacttaagctttttgggcttctctggctccatattaaa

SEQ ID NO: 492913 - DNA, 610 bp, Homo sapiens
tgctaaccagtgccccagccatggcccagggtaaccaaattccttactgttctgggggacagaaatgccaataacgcgaagttcagccaggtaaactatgctgattctcaaaccaacaatctctgggtggggttggaaactcagacctgggaagagcatcagcaagccctggggtttaagagcactcctgacctccagaccyacctctttagccagtctagggcacttagggctcagcttaaggttctttatctttcgttccacactcccaggatcctcctgggacaaatgggaaaagaagataaagtttgatggctactagagtcaatggagttaaaggcaatgctgcccttggaactgttggaaataccaaagaacaattgcagatcaagagcagcagtgagtgtggagacatacactcacacttaccataatagaatagaaactagagggtttgtgttcacttatcagctccactacttcccaacttataacatttgcctactcaccaactagtaaatatctgctacatagtgaaagctccaaaactgttggttaatgaatgttgaaatcacttaagctttttgggcttctctggctccatattaaa

SEQ ID NO: 492914 - DNA, 610 bp, Homo sapiens
tgctaaccagtgccccagccatggcccagggtaaccaaattccttactgttctgggggacagaaatgccaataacgcgaagttcagccaggtaaactatgctgattctcaaaccaacaatctctgggtggggttggaaactcagacctgggaagagcatcagcaagccctggggtttaagagcactcctgacctccagacctacctctttagccagtctagggcacttagggctcagcttaaggttctttatctttcrttccacactcccaggatcctcctgggacaaatgggaaaagaagataaagtttgatggctactagagtcaatggagttaaaggcaatgctgcccttggaactgttggaaataccaaagaacaattgcagatcaagagcagcagtgagtgtggagacatacactcacacttaccataatagaatagaaactagagggtttgtgttcacttatcagctccactacttcccaacttataacatttgcctactcaccaactagtaaatatctgctacatagtgaaagctccaaaactgttggttaatgaatgttgaaatcacttaagctttttgggcttctctggctccatattaaa

SEQ ID NO: 492915 - DNA, 578 bp, Homo sapiens
agggtttggttttattgggaaatcctatgctagacttaccttgggcagactctggagtttgtttgtctttgagctgtataaaactgtaaacatttacacctaagtttcacagagatcagaaaatgcccttcaggcagtcagcagcttcagtgctatgcttgcatttctaggtccttgttacgagtatcactgaccttctttccaggtcaaagcagcattcaaaaagataccaaaatgttttctccaacaattgatagttgtttcatcagaaagattgtgtgtgttggggggagtggggggtgctggcagaaggaaccatgtttataatgtttacagraacaaaagtctcagtaagaaaaataattcagacaccaacctaaatttgcctgcccccaagaatgcttaacctattggaaacatattacatttaataccagggtagtggtggttccactccatttcaatttagtcagactagaacattggtgctatgtttagtactaagaacttgcatgatgtttctggatgacttagctccagagttcagctttgctgctgctcattccaaagcagaggca

SEQ ID NO: 492916 - DNA, 423 bp, Homo sapiens
ctgagacgcttccgctccctcttcctccttcctccactcattcctactttgagcggatgcaagagaaaggaaggcacttgttatttcaaatggggcttgacgcaggctcacaaagagcataaaaccaaaccattttcacaggcaatcagacccaggcagttaaaacaaactgagaactccrttacagcccattactgtctgatccagggctcccccgtctacacatcccttggctcctagaaaaaggagtgggaaagggcaaagggaaccctttctgtagccagctaataggctgagatcacggaaaaggccttcacttctcccatcaatccaagtgggaaaggcaagtgaacaattctcctgtgatttaaatagatgaaaagtaaatgatagtgttgacaaagccctaagcaaagatccttt

SEQ ID NO: 492917 - DNA, 526 bp, Homo sapiens
agcctgcatctcattattccttggagagaagaattcctgaatgttggccttaggaatacctatggtgataaggtcaatatgtacatcacacaatgcaacctatacacttccatgtacattgcacatgtacatcacacattacaacctttacacttccatgtacatcacacattgcaacctgtacactcttacctttattattacattttatcctcaaaaccatccaccgagataagacttctcattccctttttgtatacgagaaaaattaaaaaaaaattgattcatttgcgttcaacatgccagatacgtgttaggcagtggacatacaaatataaagtaaatcatcagctcaccattactataaaacagtgccacaggagttcaggaggctatggctctgtttggggctgaagttggctggwctatagggggcagaacatgaactgagtcttgaagaatggttagtgaataatgaggaagagctcgttggcaaatcaaaggtgacaagaagcttgggagaaag

SEQ ID NO: 492918 - DNA, 571 bp, Homo sapiens
caggccaagagatgtaggcaaattgtagaacctggaaagggcaaggaatcagattcttccctggagcctccagaagaatgcctcccagccaacaccttgacatagaacttctgacctccagaattgaaagagaataaatgcatattgcttcatgccctaggtttgtggtgttttgttaaagtagcaatagagaactcacataacatgctgtttctctgctggtaaggtttttccctagtaaccctatttcatatttatactatgtagtattggtgatgtatgactccttgtcccatttacttgtcagtctaataagaaatgtaagaataggtaaatggcagttcatatggaagggatatttgctcctatataaaatgtgaatatatggtagtaagtaacaggtagcaatggcagtatgcattcagctmacactggcccctcctaggtaccaggtcctgggcatctattggagagaaaggccacccctgctcagaaggagcacgcttagggtgatgcaggagccaggatccagcagggtgctcaccactgttgacacgcgccatgaggaggg

SEQ ID NO: 492919 - DNA, 594 bp, Homo sapiens
tcaaccaacatggtggaaaatgggctaaaacctttttggagtggtattggttctgttctacatttctgtgtcctccaggccccggacctgtccagccaaggcccagaaacccaggcaccaagtcccatccctccctttctctcctccccagtttctcactgcccgcccccccaactctccctcccaaagctgaaaatatccttttaagcacatgaacctggagaagttaagcattytgtgcatgcaaggttatccaagtgagcagagggagggctggagctagagttcctgatccctaatccagtgtcctctctgaaagagttattctagagtcgaatcgctaggttagaaagcgtggagagaagagctttggaattagaacatgaagcttcccgcactgctggcagcatttacgggctgtttccaaagaaacctatcagcctgtcaacgttcccacagcccctcttaccttcccggtgtcacaggcaccacaatgtgcagacaaatgcgcttctcacaacctcctcagccaggagctatccaggcagtgtttcatgtctcctgtccaaagcgtatgatggcagcgagttccag

SEQ ID NO: 492920 - DNA, 649 bp, Homo sapiens
tcttgtcccagtgtcctggtgtcctgggtggttttggccattgagtgtgtgcttagcacagtggttcttacattccacttacatacacatttccatctgcaaagattgtcacaaagtagtttattatatatttcctgtaacatatcagagaagatagattcaagaatgtagttgaggaaacagacacccagaggttagatccttcctttaaaaacttgtggtaaaatgcatataacataaagtttaccatgttagccatcttaaggtgtgtgatttagtgatattaagtatgtttacaatgttgtgcaaccattgccactatctagtttcagaacttttcattatccccaaaggaaacgtacatccattaagcagccactcctgcttccttcyatccccagcccctggcaaacactaatctgctttgtctctctggatttgcctgatttggatatttcataatttagatattacagaatcatgtaatatatgttcctttgcatctggcttctttcacttagcataatattttcaaggtatccatgtagacactgcattaatgtatcagtacttcattccttttggtggttgaataatagtccattgtatggatatacttcattttgtttatccatttatcagttgatgg

SEQ ID NO: 492921 - DNA, 649 bp, Homo sapiens
tcttgtcccagtgtcctggtgtcctgggtggttttggccattgagtgtgtgcttagcacagtggttcttacattccacttacatacacatttccatctgcaaagattgtcacaaagtagtttattatatatttcctgtaacatatcagagaagatagattcaagaatgtagttgaggaaacagacacccagaggttagatccttcctttaaaaacttgtggtaaaatgcatataacataaagtttaccatgttagccatcttaaggtgtgtgatttagtgatattaagtatgtttacaatgttgtgcaaccattgccactatctagtttcagaacttttcattatccccaaaggaaacgtacatccattaagcagccactcctgcttccttccatccccagcccctggcaaacactaatctgctttgtctctctggatttgcctgatttggatatttcataatttagatattacagaatcatgtaatatatgttcctttgcatctggcttctttcacttagcataatattttcaaggtatccatgtagacactgcattartgtatcagtacttcattccttttggtggttgaataatagtccattgtatggatatacttcattttgtttatccatttatcagttgatgg

SEQ ID NO: 492922 - DNA, 610 bp, Homo sapiens
gcattaaaaggtcagtcttctgactttacaatgcttgcttttgtagtacctacctatatcatctattcattaataattgttaaaggctgcattttatgtgaagcaagcattcctggagatcctgaataatttggaatttgtgtgtcttgagaaaaattttcccaaaggaatgaattgtagggaagcacagttttgggaaattttgtatataaaatgagattttcttaacttttgaatgtctcattattttcacttcacaaatgtgaatgcattgyaatttataaagggattcttaacgtttacatgtgtttttattaaagtgaaaattttgctcaagtattataatcttcaggttatttctttgcttttgttcatcataaactaacatctataaatactttttatttttaccctcaaacctatgaagtgtaggttctgttagagaactacatttcacaggtgaggaaactgagacacaagtagactaaattacccaggatcagagaataccctttggatttggatccaggtgattgttctccaaagctcagtatcacaaccactataccatatccacccccgcaaggcttttattcattaccagttatgt

SEQ ID NO: 492923 - DNA, 390 bp, Homo sapiens
ggctcttttttggttccatatgaactttaaagtagttcaaaattaccttttcttataactgagaaagttttaaaatggcaaataaatatctacctttagaaaacagtatgwgcaatcagttgccgagaacaactaaatgattgttttgaaggagcattaacactaagctagtctaggaacattaaaatccagttggagcattcagtaactataattattacattctacaaagatgataaatggtttcctattgaaccactgtgtgtccatgcagagaaactgaggtgtctgagctccagccagaggcacctgggcaacagaaaggcaaagatgtctgcttccttagcaacaggaagctgcagctcacccaggccacactcaccctgacac

SEQ ID NO: 492924 - DNA, 560 bp, Homo sapiens
gctccaagcaatagacatttttaaacagggtgcatggggaaaagctgtagtttttatctccatcagcctatttgcttattacaactcaataatggcgaagggaagctcaacattttgctggtttctgttgaacaaattcccacagtgcactagaccacacgcctcaaacacctaccgcttccagccaacyagcatcacatattaccagagttatggtaatttatacctggcaaataaaggaagaacagaatagtgatgagagaaaccctcaaatttcagtaacaataatgcagagaataaggttccttccaatttttaaattaaaaagaagacaagacttttttttaatttaggaaaagcaaaaggtaatcatgtcttaaatgaacttcacatactattagatgagataaggtgtgtaaaccttgagcccacaagaagtacattggtagtgattaagagtgtgggctctagggccgcgctgcctgcctctgagtcccaggcctgcctcctgctggttgggagactttaaacaaaggattcagtcgccctgtgcttcaata

SEQ ID NO: 492925 - DNA, 639 bp, Homo sapiens
gaaacaggatgttttgatactttcaaagttgatactcctgtcccctaggtgtaccctttctgcgtttttgccaagagcttatctcacayagcctcatgcatattggaatgtgtgaagatgtaatgtggatagccagccatcagcattcctagaaatgcagaggagtaaaaggagagaatgagaacacaagaggtttcattaaattatattgctgtagccaggcaccggggctcatgtctgtaagcccagcaacttgggaggctgaggtgggaggatggcttgaggccaggagtctaataccaccagcctgggcaacagggagatcctgtctgtaaaaaagatttttaaaaatttagccaggcatagtggtgtgcacctgtagtcccaattacttgggaggctgaggcaggaggattgcttgagcccaggagtttgaggctgcagtgagccatgatcatgctctgcactccagcctgggcaacagaatgagaccccaactctatataataataattaataatattcctgtgttattagtcaagctgaatattaagtatacacagaggaatgttgcagggatacaaactctcaaagaaataggaatgtaatacacatgaaaggaagcaaaatgcaaattaa

SEQ ID NO: 492926 - DNA, 538 bp, Homo sapiens
acaaaacaaaacaaaaaacctactgaacatttttagagaataaccatatggagaatttagaagaactttaggtttatagtaccacaagattcccagtagatattccataaaaattaatggagcacttacaacgcataatctagcaattattaaatcaagaagatatgctgtgtttcctgtcctcaaggggttcacagtgttaactggatgctccccatacagcatctcccctgcctctgagcctctacctctgctctcccaatcttctacattttccattccatctctccaggattccttccagtctttcctgctttcctaackgtggctttgcagatgctcatcttttttgtctgctttaacactccagtttgtccctggctaaatactattcatctttaggccgaacattaaatgtcacctcctccaagaagtttttctcgactactcctccttaagtttaaattaggagctcccactctgtgatactgtaacaatgcactcaccttattgtaacagtgtcctcactatatataac

SEQ ID NO: 492927 - DNA, 538 bp, Homo sapiens
acaaaacaaaacaaaaaacctactgaacatttttagagaataaccatatggagaatttagaagaactttaggtttatagtaccacaagattcccagtagatattccataaaaattaatggagcacttacaacgcataatctagcaattattaaatcaagaagatatgctgtgtttcctgtcctcaaggggttcacagtgttaactggatgctccccatacagcatctcccctgcctctgagcctctacctctgctctcccaatcttctacattttccattccatctctccaggattccttccagtctttcctgctttcctaacggtggctttgcagatgctcatcttttttgtctgctttaacactccagtttgtccctggctaaatactattcatctttaggccgaacattaaatgtcacctcctccaagaagtttttctcgactactcctccttaagtttaaattaggagctcccactctgtgatrctgtaacaatgcactcaccttattgtaacagtgtcctcactatatataac

SEQ ID NO: 492928 - DNA, 523 bp, Homo sapiens
agaataatacaatacagtaataacaactacaatttagagttccactaactaggaatcaggcactttgccaaacattgtatgtatgtatctatttaatgaacccttagaacaatctatgaggtgagggcttattatccttcctatttttcaagtaagacacagaaccagagcttcagtgacctgcccaaattatcacatgcagttmgtgagaagcaaagtcaatggtctcaaatattacatgtcacgaacctatgttgttttcttcttctcactggaacgtgagaaggtatacagagtaagaatgagtaattgctactctatgctaatttcatgcaaagtaattttaaactgatgtaaaaaaaaaaacaaacacccaaaacccaacatgacgataatgccaacatcacatggttctacctttcaaaccagttcatagattcataacttcatgttcatacatatttagccaagtccaaaaggtgcctcatttaactgtgaatttgcaacttatgcaaaaaaccca

SEQ ID NO: 492929 - DNA, 629 bp, Homo sapiens
atactaatgttctcaccgcttgccatttggagctattgaggtctagggcactaacaccatgaggagagctgctgttacaagaattgtgctgaatatgaaagagggactcttccacatgcccttattgcttaagcatacttttccattgcatgaagaatattgtgggttgttcatgtcatctttcaactcaatcttcattacaaaagagattaactaaattcttataagcttctgacaggtggaaatcctagtttccaacactggtacagattttactacaaagtgtcaygtacctttgctcatttttaaaggagatttgaaaggaaaagtcagttaaatatgatggagacaggaggcagagaaattctaggtagaaaagggtgagtccccagtgaaaaccctaccctcaagctgaaatgcctgaaaccccggcccaaagtgagaatttatatccctgttttcctacttgaatgttgccttttcctaaactgcccatggcccgccctgcctgcaatcctgtgcctataaagacccaagactcagtcagagaggagtggagactatggctggacattggagagaagcagcttgacttcagagggacagcttgacagtgtaacttcagagaa

SEQ ID NO: 492930 - DNA, 629 bp, Homo sapiens
atactaatgttctcaccgcttgccatttggagctattgaggtctagggcactaacaccatgaggagagctgctgttacaagaattgtgctgaatatgaaagagggactcttccacatgcccttattgcttaagcatacttttccattgcatgaagaatattgtgggttgttcatgtcatctttcaactcaatcttcattacaaaagagattaactaaattcttataagcttctgacaggtggaaatcctagtttccaacactggtacagattttactacaaagtgtcatgtacctttgctcatttttaaaggagatttgaaaggaaaagtcagttaaatatgatggagacaggaggcagagaaattctaggtagaaaagggtgagtccccagtgaaaaccctaccctcaagctgaaatgcctgaaaccccggcccaaagtgagaatttatatccctgttttcctrcttgaatgttgccttttcctaaactgcccatggcccgccctgcctgcaatcctgtgcctataaagacccaagactcagtcagagaggagtggagactatggctggacattggagagaagcagcttgacttcagagggacagcttgacagtgtaacttcagagaa

SEQ ID NO: 492931 - DNA, 425 bp, Homo sapiens
atcttttgacaaactatggtttagctttgtatcttttggatattatatgtggaagcaaaaggtgtattatttggtgtctaaatttgtttaactttacaaaatgtttgcaatattcatatatgcagtcgcatgtgtacttcatttatgtttagtgtataaatgtatcacawtttgctttcttatacaatacacatttgggttgtatacagttttagacgttaataggtaatactgttttggattattgtgcatatctactgatgtaaacatgccatgttctgttaggaataaacatgagaagtagctggatgagaaagtatgcatattttcaacttgtctgttcaatgtgatctattgaaccattgctttttttctggacaaagaatttttgcctgggactctcagatatccagaatcatcgtgaa

SEQ ID NO: 492932 - DNA, 657 bp, Homo sapiens
ggaagtttccttcagtaattatgagattctttctgcatttacattgttgatcatccagtgtgaaactctgtaatagcccttatttaactcttctcgagtgcttgaaaaatcaccactttggagacaggaacaagatctgattagattcttttttcccccttttgtcgtttgagtgggttccttttgttaaaagcaggcaggtttaaaatatttaaaaatcattctcaattgctttggggatttaaatttttttctagattcaaacctggaagccttgatcccaatctaaaaattaccttttctccctacttttatgaagraaaaaagctacttcatccatttttaatttttagaagcataaaatgctatgtatgtgctggagaattttcattcttttcccatttgaaaagtggtaagttagctggttttcttccaagacagatttatgaaattattattacttcacctattgttatttcatccattttgaaataaattctttaaaatcattttttgaatctgcctttggcttagtttaatgtaaagcttttaaaaagcttcaaggagagccactgagttgaaaatgacagccctctacagagatttattcaccatcaccacttagaatcgatattcttttggttgagaggcatgatt

SEQ ID NO: 492933 - DNA, 574 bp, Homo sapiens
aaagtttcatctgacttacttgttttttacccccgaagcttcagtgtaaccatgactccatacagctggggctccggaagcgtctcctgtagaaggctgatcaatcttgaaacagcggatattactaacaagagaaacagggagggaacaggaatcattaaaaccaaatgtgtgcaaattgctacctttatccragaaataaaaaatacacctgttaaacactctgtacttaccatttcttactgcgtttaatgtgtctgaaatacttatcagcaacaagaaccagctactcgttgtaatgaaaactgaggggcatatatacagagcacgaaaattagttttaatgagcatcgtaaagcagctattagagactttcacacattccactttagatgactgctctctcctgggaatgacaaggacagctctcagccttggcatgagaaaacaaaacttaagtaataggatgggtgtattcttacaccatgaatactcagaaagaacaacaacaaaacacctaagccacaattatactgcatttagatgatgtgagagaattctgcaatattcatct

SEQ ID NO: 492934 - DNA, 546 bp, Homo sapiens
tgccttcttgtgataaaatactttctcagtattgtctgggagaaacaatcttgatacaaaagccagatgctattgatgatggaaatgaggaaaaattaaattcttctaaggaagcaattgctcttatccagaaaacagaagcattttgagaggaagaataatgctgtattagacaccaccatggaaaatcatgaagtgctcagaatgtagccctcatgaataggataagctttattccatgtaccttgtgcaatggtaggtgaaakatgtcaggagaagattcataaaggagatggtcttggatcagattcttggaagataagtcacgtgctaaccctctgactaaggtcaagtgttaataaactgcctgacctgtttggaaaatacaggttgaaaaaccaaagggacttgtgtttctggccaagatggagtgataaggactggactgactctctggccagaaacaacagcaaaacaaacaaacaaatatcagacaaaatgtacagaacaacggttttcaagacactggacattgaacaacaaaga

SEQ ID NO: 492935 - DNA, 642 bp, Homo sapiens
gaggcagtagggtctgtggagagttggtaaaatagaatacatatctcgctatggtagagacaatgctcaccagattctgtgtgctctcccatatttccctgtcccctttgcagttggcttgggtccattggattaattttggtcaacaggctctgaagaaaaatgacatttcagggaattaagagcacgtgttcctccctctaccttctctttcttcccccagtgaccttggaggctacttgttgataaggtgagtcacaagaaggaggaatcctggatccctgagtcactgtttggattatagtgcttaccaaccctcattggactttgagtgactaagaaatcatctttccttggattaaaccactaagatttcgattttatttgctatttcagcagagtccattctatcttgactaatatactacctaattgtgagccattactcagctccaaatgactcctgccatacagtcatgtacacatggcattgccaaatagcccagcttttcaagagaagccagargcagggattttcatgtgactctaggtttaaaatgctgaaaatgaattcagttttaaaacactgtgacccaatactgtgtagaccaaacatatcagtgagctgagttcagcccatca

SEQ ID NO: 492936 - DNA, 679 bp, Homo sapiens
attgtgtaaaatgataaatgaaaaataaatgtcagtttcagggaggcagtagggtctgtggagagttggtaaaatagaatacatatctcgctatggtagagacaatgctcaccagattctgtgtgctctcccatatttccctgtcccctttgcagttggcttgggtccattggattaattttggtcaacaggctctgaagaaaaatgacatttcagggaattaagagcacgtgttcctccctctaccttctctttcttcccccagtgaccttggaggctacttgttgataaggtgagtcacaagaaggaggaatcctggatccctgagtcactgtttggattatagtgcttaccaaccctcattggactttgagtgactaagaaatcatctttccttggattaaaccactaagatttcgattttatttgctatttcagcagagtccattctatcttgactaatatactacctaattgtgagccattactcagctccaaatgactcctgccatacagtcatgtacacatggcattgccaaatagcccagcttttcaagagaagccagaagcagggattttcatgtgactytaggtttaaaatgctgaaaatgaattcagttttaaaacactgtgacccaatactgtgtagaccaaacatatcagtgagctgagttcagcc

SEQ ID NO: 492937 - DNA, 609 bp, Homo sapiens
ctgttcctttgggctgtaagtgatttggtggggagagtgaaggagatggaggagaaatgtgggcatcttccagtgagggtgccagaaagcgcagcgcaggcgcggggctttggccagctccctggggcttctgtttaggggcacagggtcccctgtgtgtcctgtttccctccaatgggkcttggagtaatacaacgaggagagcctttatggtctataagaccttacagggcaagggtgatggtgctggtgtctggatagcggataagggcggcccagttctcgccttgctgaagaggcgttgactctgggacacactggcaaaacagtccctgtggcggacatcccgagagtgttggactcctgtggttccccagttcccagcctcctgccatcggcttaattcaaaccctctgggagtcatcagaaatccttgtttatttcttccagtgcattccagagtttctttgaatgtgatgcttgtggagaggaacagaggggcctgggattgggtactttccaaactgggttattgaaacgttgtctccctggcccaagactctgcctaaaatggtccccagagtctcagccagatctttcacagccatg

SEQ ID NO: 492938 - DNA, 573 bp, Homo sapiens
tcctggccacttcccttgggatatctaagagaggcccccaagtcactaggccagagacagtccttatcttcctcygccaattcaacccctctgtcactttctagtattttagtgaatgctgcttcaccagccagcaagccaaacatctagagtctgccttgacttgacgcgtttccttctttctcttctcagcattgtcacgggtccctcaggccaccccattgttccaatgcctgttgcccacctgtggtcacgctgcttcctcgtttgtcagaggcgccagggcagcctcctaaactagtttgcctgaaccctttcttgctcctctgtgactcatttttcatatggaatccaggctgatatttaaaaaagcacaaacctaattatatcactcctcattttgaaacctttcagaggccgttcattggtcttaatcttcagatgaaaatctttaacaaggcccatcggaatctacctgaatgatccactcctgcttctgttaagtctcacctcccatctctcttcccctcatcttggaatttcagcgttttctcacgtcctgaaatgtgaact

SEQ ID NO: 492939 - DNA, 661 bp, Homo sapiens
gtggttcgtagtcagctagccagccaccaaagccagtggctcacccctgggagcctcctgccctggggtctacacrtagaaatagtcatttggttcatctcattgaccatttaaaaagtatattttgcttagtgcacaagtacagctaggagtgaaaaaaattatgaaaatgaattctattcaaaatttttagtttgtgggtttgaagttaggtaagaggaacaagagagccaatcgttctattacccaagcaggggctccccctgctggaaatctattttgaaacccataaattgttaatgatgccttcttgaattacctatatggcagtggaacaagaaaagcgccagtaatttaaatatttaaggctgatatcatctatctacataggtaatgaaagtgtttcctatacttctagagttcaaataaataaaacaagattcacctgctttaggatgaatagaatgaatacagaatggtgttataaattttaggaaaatgcaccagaaaatgatttttgtgttgttgctgttgttattcttaatttggcagagcaatagaattatcctggaaaatatctaatggaacccaaaagagtaagagggtaaaagggatgattttgtactcaacatcctgatagacaattaggaaaagtttttca

SEQ ID NO: 492940 - DNA, 661 bp, Homo sapiens
gtggttcgtagtcagctagccagccaccaaagccagtggctcacccctgggagcctcctgccctggggtctacacgtagaaatagtcatttggttcatytcattgaccatttaaaaagtatattttgcttagtgcacaagtacagctaggagtgaaaaaaattatgaaaatgaattctattcaaaatttttagtttgtgggtttgaagttaggtaagaggaacaagagagccaatcgttctattacccaagcaggggctccccctgctggaaatctattttgaaacccataaattgttaatgatgccttcttgaattacctatatggcagtggaacaagaaaagcgccagtaatttaaatatttaaggctgatatcatctatctacataggtaatgaaagtgtttcctatacttctagagttcaaataaataaaacaagattcacctgctttaggatgaatagaatgaatacagaatggtgttataaattttaggaaaatgcaccagaaaatgatttttgtgttgttgctgttgttattcttaatttggcagagcaatagaattatcctggaaaatatctaatggaacccaaaagagtaagagggtaaaagggatgattttgtactcaacatcctgatagacaattaggaaaagtttttca

SEQ ID NO: 492941 - DNA, 472 bp, Homo sapiens
acgtttaaaaaatacatagatggatgtacatatgtgggcaattttctttcctggaagaagtcataagaaactatgtcttacggttacctttggcaaaagactatgggtaggtgggaaagaggctttcagattgyatttttccctctagatacaagataggatgttataatcctagatatatggtttttttttaaatgccaagagtgttacctgggtagggagatttaggggccgtttttgcttttcttctttattcttatccctattaatttttaatgaaatgttagaaaagtttatgaaataaaagtgtatgttttcaaagtaccagctcgtgaaataaaattcctagttttcttaatctcacatgcatctcatggccacctgtgccaccttaaaactatctgagtcaaaagcagagtagcagtcactactgaaaacctcagaaaagagaagtccttccgtcacagacacc

SEQ ID NO: 492942 - DNA, 494 bp, Homo sapiens
tgaggagtatctctgagcatggaaatggctttatgaaagcaatgctcaagtaataaaagtttgaattggagagatgagagtggaacaaaaagagacrtgcagaacacattatgaattatgcattatgaatcacagccaagctggccctacctactattgttccaaatgcactccgtatttctctacctttgtttttgatcaaattaccccaactacctcatacccagtggcctttccccttcttactgtggatcctttaaagcaaaactcagaaaccacctacttcatgattcctgactgcctcagagagaatacagtcctcctttccagcccattcagattacacacaaaatgacaagaatcacaccagttatcctttttaccttctctattagattgattatatttcttcatatccttcccataacccagacgcctagtaaataatagaaaattaaggtttggatgcaaacaaaaggctttccgagacagga

SEQ ID NO: 492943 - DNA, 518 bp, Homo sapiens
tccacctagaattccattcaattggtaccctctttcactcccaatgtgtcctgtgagatgttgagttgctaggttcaattttgtgatatcttctaactggtctctcatctcaaagctttccctgagtgtatgctactggaaaggattaatctttttaaagtactttttggaataaatttatgcatgtgtttaaaatctttgccaatttatcactgccttttaaataaagtaaatgccctttggtctttgtttaaggccttccacaatttggtcccaaactgtgttttcagttttattcctggcttctctctgaaagcaaagtatgggacattgaagtacaaggcaagcctgggtcagcatttcaccagagttgacaacgtgggcatacagatgttttaaagayggccagagttaggaatgagacccctttctgggacaggcccaactttggttcttttaataatgataagacagaaatttcgggactgctacccagtttttattgtctctttattctt

SEQ ID NO: 492944 - DNA, 146 bp, Homo sapiens
ctatgttcaaagttaagttttcttcyattctgcagctaggcctgattcgggctgaatacctacagtggcaaagatgcacacagttggcttcccgactcactctgccagcattatcctgcccctcctcatcagccccaacgcaactc

SEQ ID NO: 492945 - DNA, 537 bp, Homo sapiens
aagtactcgagaaagctttgctacttaacacagaaatattcctttcttctgcttttcttgcagtagtgagaatagcacttttcttcttttcttttttacttctactcatgttcatttggatttctctctgactttcaagggagtggtcaagtgagttattttcaattcagtccacctkttcaattgattctattactcttttaaaaagtcgagataggatcttgctatgttgcccaggctggtcttgaacttccggcctcaagcaatcctcctgcctcagcctccctaagtgctgggattacagttgtgagccacaatgcctggcccatattactctttctactatatataagtgtccactgctacttgctagacctgagtctcttgctgcccttctgttttgtttaaatctttagtttcctctgttattttaaaaaataaatttcaaagcagagtatatctgttatttatactgttaaatatatttaaatatgtgtaaagaatataattcatttcaccttttacccctgagctaat

SEQ ID NO: 492946 - DNA, 442 bp, Homo sapiens
  misc_feature (1)...(442): n = A,T,C or G
nnnnnnnnnnnnnnnnnnnnnnnnnnnnnnnnnnnnnncttaatgaagaagtaacttgcacagacttcatagtatgaaggctgagacaaccacaggcagattaaaatagtaatacctaacttttattaatgcacctgagacagagttcaagggatatgcaggatattaaaagatagaaccaaggccagagacactgtcttagaaattatttctttttttgtttttcttgcaccttgtgagaaagaatcagctctatatacttctaaaacataaatcagtaaagtttctgacacctgacaaaagggtagagaggcaagatgccttatttataagaagtcatgctcagagaataaaartccatgtggcagagactgtgaatctattgtaagaaggcttggaggagctatcacaacagtcacaatccactcttcaacttctagaa

SEQ ID NO: 492947 - DNA, 442 bp, Homo sapiens
  misc_feature (1)...(442): n = A,T,C or G
nnnnnnnnnnnnnnnnnnnnnnnnnnnnnnnnnnnnnncttaatgaagaagtaacttgcacagacttcatagtatgaaggctgagacaaccacaggcagattaaaatagtaatacctaacttttattaatgcacctgagacagagttcaagggatatgcaggatattaaaagatagaaccaaggccagagacactgtcttagaaattatttctttttttgtttttcttgcaccttgtgagaaagaatcagctctatatacttctaaaacataaatcagtaaagtttctgacacctgacaaaagggtagagaggcaagatgccttatttataagaagtcatgctcagagaataaaaatccwtgtggcagagactgtgaatctattgtaagaaggcttggaggagctatcacaacagtcacaatccactcttcaacttctagaa

SEQ ID NO: 492948 - DNA, 577 bp, Homo sapiens
tggggaggcctcacaatcatggtggaagaccaagggacatcttatatgrcagcagacaagagaaagcttgtgcaggcgaactctcctttataaaaccatcagatctcatgaggttttttcactatcatgagaccagcatgggaaagacccaccctatgattcaattaccttccaccaggtgcctccatgtgggaattgtgagagctacaattcaagatgagatttgggtgggaacacagccaaaccatatcaccagcaaccaccagaagccaggagagaggcagggaataggttctacctcacagctgcagaaggaacaaaccctgtggacatcttaatcacagagccccagtctctagaactgtgagacaataaatttacattgtttaaactccccagtttgtagtgcttggttacagcaacactagcaaaggaatacaccaaagcaggtgtattgggagagttacctcccagaaccttggcaatgccatcctgcaaggagacactctccaggcattttgcctctgattcctctactcactgtgtcttcacctcaagactttatgggccaagaaaa

SEQ ID NO: 492949 - DNA, 616 bp, Homo sapiens
tggtcctgtgatgttccctgacctctgagagcagcagtgtcctcactgaatagcttcctgctatgacatgatatatgcactcctgaaaacgcttgcattctgcaaaatcacacaccaaaaataacagggcttatggcagaaacaacacggagacctaacaactcaaaaggtaggtaacattgccgccaaccccctaaaaatatgaacaaaaatgatagtgccatttaaagaaaggtgttaaatgttaataaaagcattctacagtaactttagttcattacctgtaacacacagagaaagttcctcatgaaagcaggtgtaaggaaagattatggctgctgaattgagataaggacaaaatgtttcaagattggggagaacctggacataagcccttccaagaaagagcatatgcggaaactgagtcaagacaaacaccagggtgagagcaagcatcagtayaggactgttctcttcaccagcttgctgtgacccactggactagtgcacttttttagctgctgttactcactgtgtaaaatctaatacagagagaaaattaaatctcacatgaaccaattctctcttgtgccttacacacacagctttcctattt

SEQ ID NO: 492950 - DNA, 575 bp, Homo sapiens
aaggtagtagatgctatttctatagttattagtactatcagtactacctcctgccacacacactgtaacaaagtgtacaactattgatataacaacagaagaacccaaaagacgttagtaaattcaaagatttctaaaaatgcatctacaaaaaggtcttaaaagtgccttagattgacgttagatacgtttgagtgatggggaaaacaagcactaatttaatagatggtatttcagggattactgccaccatagtgagagggaaatttctagatgttctgaagcctacaattatgcttcctgagtttctctttggtgacacttattttatgacactttgaagacaacataacatttctcttaacaygttgtgtagcaggacgagccacagacaagaacccctcagacactgagttgtggaaggaaaggctttattcagctgggagcactggtggactcacgtctccaaaaaccaagctccctgaatgagctattcctgtcccttttaagggcttacaactctagaggggtctgcctgagagggtcatgatcaattgggcaagcagtggctatgt

SEQ ID NO: 492951 - DNA, 619 bp, Homo sapiens
ctgctgagcctggggcagcggttggcatgacctttagtgagtcttccacttagcaatgtcctggccaggctctctaatactgatggtcactagcttgtcagccctctcgggaacaatccctcaaagctttctaaactgtgactgcatttttctgacataataagcataacttattgaacagatttaaatctttgatgaactaacagtgcttcagtcattattctgacattagtggcagtctcatagacagtgaactgtacaagatcagatggatcmcatagtgaccagagaaaatgcccttgagtttgttttttgactagccctgtggtacatattcactttattttgatttgtctctttcaaaagtgagacatagccaaggaaaacaccaaaataccaaccaatgggatgcttttaaaaggaaaaactaaggatttgaggggactgaatctactcagtaagtaaaatatcacgagggaaattatagaattagaaaactagaaggaataattgagatgagccagtcatacacccttcatcttatagctgaggaaaatgaggtcatatggtgtgaaatgacttacccaaagtcacgcagccagtcagcaacaggactagg

SEQ ID NO: 492952 - DNA, 638 bp, Homo sapiens
tatacacatgtgtgtatattaataaaggaaatcaggacaatcaaaatacatgttatctgtgatcaaaatccaaatggattcagaatatttgagctaaaaagaaaggtatgagtcatatggacagagtgttgttgtttttttaaatacaggctataataattatggtcttttcttgaaatactctacaaagtttagaccagtacactgaatccatttgtgtatgaagttcaaagattccataatttgaggaatattgtgataatgtattataatcactttctgagaattttgaggaggagttatgtattaggtttctctagagggacagaactaataggataggtgtatatataaaggggagtttattaaggagtgttgactcacacaagatgaggtcccacaataggctgtctgcaagctgaagagcaaggaagccagtctaagtcccaaagactcaaaactagggaagcctacagtgtagccttcagtctgtggtcaaaggtctaggagtcccaaagctgaagaacttggagtctgatgttcaagggcaggaagcattcagcatgggaggaagatgtaggccgggaggattagccagtctagtttttcatrttcttctgcctgctttattgtagcca

SEQ ID NO: 492953 - DNA, 609 bp, Homo sapiens
tgtccacgaggcagattcctttcacaggagacaaaatcctcttggcctaatttatcagatgaacctgcagaaacaggataaatatttatcttatgaattagtgaatctctaagccttcatttgtacacccagctgggaggatgccctcatgcctcagcccacgccatcctggaactggctccatcagctagggagagctaatggttaaatatgcatgacttttaggctgaggcaggcagatcactagaattcaggagttgaagatcagcctgaccagcatggtaaaaccctgtctctacgaaaaaacacaaaaattagctaggtgtagtggtgcacgcctgtaatcctagctactcgggaggctgaggcaggagaatcacttgaacctgggaggcagaggttgcagtgagccaagatcacgccactgcactccagcctgagcaaaagtgaggcyctgtctcaaaaaaaaaaaaaaaaaaaaagcatgatttttgtgagccagtgttaagcagttggtgtcttgacactggccaggaagagagtatcacgccatggaaactcacaaacattgcccattggggtcaccttgttttgttttattttttgtgc

SEQ ID NO: 492954 - DNA, 615 bp, Homo sapiens
tgcttccttccagaaggatgtatcaaagggagccacttaagtgtgcaccaacatcctgtactccctccagagtacaaagagtgccatcattgttcactgttaaactgtagacaaacataggttggaaagacaacagctgyatcctaagctggaaaagcatattttccttctgtttttgaagtcttgctgaaattgagcagccttgatagcagcgccagctccacgtcttggtgttctgaaggcttccgtggtgcacacttaaagtcagatgacatgtgagtgaaaacagcttaattccaaagaccagacaagttccttcctaagaggcttcattgaaagcagttcctgagataagaattacacaggggtgttttagagaggagctttaacatggtaagttccttatatttcttaggaagaaaatggctattgattaaatttatctttattataaagacatactaaataatatctactatgtaattatttgtcctttttgtgtttaaacatttcataatcattttaattgaataaatgattaaaagaaaagattattaaccagaaaagagaaaatagatgatggttgaagggttgtatagcatattatagacagag

SEQ ID NO: 492955 - DNA, 615 bp, Homo sapiens
tgcttccttccagaaggatgtatcaaagggagccacttaagtgtgcaccaacatcctgtactccctccagagtacaaagagtgccatcattgttcactgttaaactgtagacaaacataggttggaaagacaacagctgtatcctaagctggaaaagcatattttccttctgtttttgaagtcttgctgaaattgagcagccttgatagcagcgccagctccacgtcttggtgttctgaaggcttccstggtgcacacttaaagtcagatgacatgtgagtgaaaacagcttaattccaaagaccagacaagttccttcctaagaggcttcattgaaagcagttcctgagataagaattacacaggggtgttttagagaggagctttaacatggtaagttccttatatttcttaggaagaaaatggctattgattaaatttatctttattataaagacatactaaataatatctactatgtaattatttgtcctttttgtgtttaaacatttcataatcattttaattgaataaatgattaaaagaaaagattattaaccagaaaagagaaaatagatgatggttgaagggttgtatagcatattatagacagag

SEQ ID NO: 492956 - DNA, 615 bp, Homo sapiens
tgcttccttccagaaggatgtatcaaagggagccacttaagtgtgcaccaacatcctgtactccctccagagtacaaagagtgccatcattgttcactgttaaactgtagacaaacataggttggaaagacaacagctgtatcctaagctggaaaagcatattttccttctgtttttgaagtcttgctgaaattgagcagccttgatagcagcgccagctccacgtcttggtgttctgaaggcttccgtggtgcacacttaaagtcagatgacatgtgagtgaaaacagcttaattccaaagaccagacaagttccttcctaasaggcttcattgaaagcagttcctgagataagaattacacaggggtgttttagagaggagctttaacatggtaagttccttatatttcttaggaagaaaatggctattgattaaatttatctttattataaagacatactaaataatatctactatgtaattatttgtcctttttgtgtttaaacatttcataatcattttaattgaataaatgattaaaagaaaagattattaaccagaaaagagaaaatagatgatggttgaagggttgtatagcatattatagacagag

SEQ ID NO: 492957 - DNA, 615 bp, Homo sapiens
tgcttccttccagaaggatgtatcaaagggagccacttaagtgtgcaccaacatcctgtactccctccagagtacaaagagtgccatcattgttcactgttaaactgtagacaaacataggttggaaagacaacagctgtatcctaagctggaaaagcatattttccttctgtttttgaagtcttgctgaaattgagcagccttgatagcagcgccagctccacgtcttggtgttctgaaggcttccgtggtgcacacttaaagtcagatgacatgtgagtgaaaacagcttaattccaaagaccagacaagttccttcctaagaggcttcattgaaagcagttcctgagataagaattacacaggggtgttttagagaggagctttaacatggtaagttccttatatttcttaggaagaaaatggctattgattaaatttatctttattataaagacatactaaataatatctactatgtaattatttgtcctttttgtktttaaacatttcataatcattttaattgaataaatgattaaaagaaaagattattaaccagaaaagagaaaatagatgatggttgaagggttgtatagcatattatagacagag

SEQ ID NO: 492958 - DNA, 563 bp, Homo sapiens
gagaaaacctttaaaaccgtaatttaattcttgtggtatctctatgaaagaggtattataatccctgacttataaatgaggaatctagctttaggtattaaataataagccacatcctattacagactcatggtcaactttctgataccaaaaagctcagagtgcaaactgtgccattgacacacacatcacacacacacacacacacacacacacacgcacacacactacagcattgggaagaagaaatggaagtttctgcttttcttgattaaacaaaggtatgttattcacctatgttcccaaagttcaccttgtcctcctctttcccttgccccttcccctcyctcctcttcccccattccctccacctgtagagcaaagccattccccccttcccctccacggcttcataaacagatcttacccctggactctagattatacactgtcaataatgagatacgtggagtgccagccactagttaatcacttgacaggaaccaactcattttaaatcaccaacccatggatatagaaatgaagaccaagatctcaagcca

SEQ ID NO: 492959 - DNA, 562 bp, Homo sapiens
ttctgatttcacactaggcaatctatgtgcagcaccttcttttaaagaatcctttgtctcattttgaaagaactttcacaactttcttggagcatgcagagaggatctgacccatttttctagaaaatgtacagagccattttaaatctactggcccagcaatgtacagaaaatgacacttctccccaaggcttagtctcacttcaggactataatattgaaatcaaagcagacgttccctccatcttttgattttctgggattctcttcttctcattctaggcttcttttcctcaggaggacaaggtgccaaacttctttagcatcctgtaaaatctgtacatttytgagggtgttctcccacctgcccaaccatgttttcttctccacatcagttgacatttatctaagagggagtaaagaagcccatcttttttatttttatttatttatttatttttgtagcccatccttttctcttgcaatctttaggacaaggaattagttattaacttttcaaaaaaaatttttattttaatatcgtcactgtgtctctgacttt

SEQ ID NO: 492960 - DNA, 549 bp, Homo sapiens
gagtattagacttttcatagctataggaaggataatctttcaatcagattaatgagaaaatatattgcatgggccctacagcactttttgctttccaggctaatgcatgatttaaatccccaaagtacattttcagcattacaatatcctttgataataatgtcgcttgcacaaagacagataaaaataaaacagtcccccttgattttccattttagatttgaagtatattttctgttctttgctggcaatgaagtgaattctattgacaagagtcacatttaataagacaaagagaattttctaattatgctacctgtcaagattggaatctatgggattgcaattgcaattgaagaaacggaggaagcaattgcatatagtcccgtttactttggtgtatgattactatttgcacttagatattgctaaatgtaaatcaagcaaacacacagaagcacacattgaggtaaacaccaaaaggcaggtttcagaatagatyctaccattcccaattcaattttcagtaaccaattttctgaaattttc

SEQ ID NO: 492961 - DNA, 627 bp, Homo sapiens
ggcaagaggtgaatttatgggtaatggcaattttttgtttcttgatctgggtgatgggtatatggatatatttagtttgtaaaaattcakctagctgtatacttatgtgcactatgaaatatagttaatagacacattgtttgtatattatacttaaattaaaagtttaaaagttaaagaaggatcttcccagactttacctcagaccagacaattctgaatctgtgggtgaggggcctacgaattagtatttttcaaagcctcctccgtgagcctaatgtgcggttaggagtgaaaaccactcctataatggaacataattaattaaatattttatttatccactcattccacaaagtttaatgaccagttactatatgcttaagatattagccgcctctgaggatataaagataaataagacatagtctctaaagagcttagtttaggcagaggagaggcgaatcaataaatccctattgaaaatacaagcaagctacttacaagatccagaggagaaagtgatttgccaaagaagaatttattcattttttgttcatgtatttacaaaaatatttgggtacctacgctgtttgaacatggagatacaaatgtaaatggatatga

SEQ ID NO: 492962 - DNA, 627 bp, Homo sapiens
ggcaagaggtgaatttatgggtaatggcaattttttgtttcttgatctgggtgatgggtatatggatatatttagtttgtaaaaattcatctagctgtatacttatgtgcactatgaaatatagttaatagacacattgtttgtatattatacttaaattaaaagtttaaaagttaaaraaggatcttcccagactttacctcagaccagacaattctgaatctgtgggtgaggggcctacgaattagtatttttcaaagcctcctccgtgagcctaatgtgcggttaggagtgaaaaccactcctataatggaacataattaattaaatattttatttatccactcattccacaaagtttaatgaccagttactatatgcttaagatattagccgcctctgaggatataaagataaataagacatagtctctaaagagcttagtttaggcagaggagaggcgaatcaataaatccctattgaaaatacaagcaagctacttacaagatccagaggagaaagtgatttgccaaagaagaatttattcattttttgttcatgtatttacaaaaatatttgggtacctacgctgtttgaacatggagatacaaatgtaaatggatatga

SEQ ID NO: 492963 - DNA, 627 bp, Homo sapiens
ggcaagaggtgaatttatgggtaatggcaattttttgtttcttgatctgggtgatgggtatatggatatatttagtttgtaaaaattcatctagctgtatacttatgtgcactatgaaatatagttaatagacacattgtttgtatattatacttaaattaaaagtttaaaagttaaagaaggatcttcccagactttacctcagaccaracaattctgaatctgtgggtgaggggcctacgaattagtatttttcaaagcctcctccgtgagcctaatgtgcggttaggagtgaaaaccactcctataatggaacataattaattaaatattttatttatccactcattccacaaagtttaatgaccagttactatatgcttaagatattagccgcctctgaggatataaagataaataagacatagtctctaaagagcttagtttaggcagaggagaggcgaatcaataaatccctattgaaaatacaagcaagctacttacaagatccagaggagaaagtgatttgccaaagaagaatttattcattttttgttcatgtatttacaaaaatatttgggtacctacgctgtttgaacatggagatacaaatgtaaatggatatga

SEQ ID NO: 492964 - DNA, 477 bp, Homo sapiens
tctaattaaaaatgtgtaggacagggcctgagactcggtatttctaacaagttcccaagtgatactaatgctactgcttcacagatcacactttaaatagtaaggttcttgagagagattagtctcaagagaaaagagacaaaaatctccagagcaggaagaccaagaaaaaaaaatggaaagtagccagtcgattatcaactagatggccttagtggaagtagtttcagtggagtggtaggtgagaagctagatgatatgtatttagaaataaataggaaggaggtagggacargaaataaaatggaatggttttgttagtttttactctcgaagcggggaagagaaagaaatacgggttgaagaaatttactctcatttcataaaaaaacaagcagccaggtgatccgttgagtgagtttgaagtgtgaagtaaacattgtggcgagtgagtaataaggaagcactggagacaca

SEQ ID NO: 492965 - DNA, 664 bp, Homo sapiens
tagcttggatctatgtaggaaagggaattcttagaaatgttgttccagcttaactaagttggctcaatacaaattcatcacaaacataaccaccatgaattataacattggcaggattgtctcatgtttgttggtgaagcagaatgttttcttaccttttcttatgtgttatctttgtttccttcttcccacatgtggcagccagataggtgcactgtttggttcatcctttaagaaaaattgccattcagctgtgagaaggacagtcaaatgacagtttctaactgcagcatctttgagatctactgcaactttwaagtagagaccactttcttccgaggcaacccccatccaatgactgaggacagaagttactagggcctggtcttttctacccagctgagacttggtgatggtgtttgtttaccagagctgtgtattagtctgttctcacacactaataaagacatgtcagagactgggtaatttataaagggaagaggtttaattgactcatagttctgcagggctggggaggcctcaggaaacttacaatcatggcagaagaggaagcaaacatgtccttcttcacagggcagcaacaaggagaagtgctgagcaaaaggggggaaagccccttataaaaccatcgctatcttgagaa

SEQ ID NO: 492966 - DNA, 545 bp, Homo sapiens
agtgtacaatgcaaacacagtcatatgcttcttctgtaataaagcaaaaaagatgtgtttaaaaggcaaatgtacagtattacaagaaaggcaaaggttgggtaagaaaaaraagatttttaaaagctggaaaagacatttagaaaagatggcatttcaggtgttgaaaacaaatatgacttggatatccagaggtgtgatgggacatttcaggtgggaaaaagaacatcaagaaaggcacaaaaaatggaaacaataaggcatacatatagagcagcaaatcattcatatctgctaaagcagtgtttcctacatttccttggtatgaattcctctggaattcattaaaagtacagcttcccaggcccctcgcttggaaattctaatttagtgggtctcagataaggcctaggattcttaatttttaaaaaatatgtcaagtgatttttatcaccaggaaagtttaacaagtactagtcgaaagagcagagttggtgaaggacagtcatgaaagcagaatcttgaaataataggacaagaaattt

SEQ ID NO: 492967 - DNA, 545 bp, Homo sapiens
agtgtacaatgcaaacacagtcatatgcttcttctgtaataaagcaaaaaagatgtgtttaaaaggcaaatgtacagtattacaagaaaggcaaaggttgggtaagaaaaaaaagatttttaaaagctggaaaagacatttagaaaagatggcatttcaggtgttgaaaacaaatatgacttggatatccagaggtgtgatgggacatttcaggtgggaaaaagaacatcaagaaaggcacaaaaaatggaaacaataaggcatacatatagagcagcaaatcattcakatctgctaaagcagtgtttcctacatttccttggtatgaattcctctggaattcattaaaagtacagcttcccaggcccctcgcttggaaattctaatttagtgggtctcagataaggcctaggattcttaatttttaaaaaatatgtcaagtgatttttatcaccaggaaagtttaacaagtactagtcgaaagagcagagttggtgaaggacagtcatgaaagcagaatcttgaaataataggacaagaaattt

SEQ ID NO: 492968 - DNA, 553 bp, Homo sapiens
tggtggatgctcctccagatgagagtcggggaagggtactcaagctggagagccttagatgttgtcatttgggctctagaagttccctgcctgttcccctctgcatagctggattgtctactgagggctgctcccagctcctctcttctagaaagtccttgtttcctgtagggactgccctgctctggtgtaaccgccaagctccccagtgtgttagggaaaggagggaagcagtgcttatggtgactggtgccccacccagctgtgctccagcaccacctgacattctccagctggcacagggctggggctaggggatgatagggaaggcaggccatgctggagccatgctggggagaggaaaggcaggaccaagacgccctaccccaggccctctctgtcggcctcacccattcccacctcctgcccctgaggatttctaggtgtgtgtgaggacaggacactgaggctatgcactgtcttgcccctcttgytgattattcttaaattcggtttcatttctgccattagacctgactccagaggaaccacc

SEQ ID NO: 492969 - DNA, 582 bp, Homo sapiens
attttcatgctccccttgttcatcggctttcttccactggaatttcacctccctgagggcaggggtttcatctgcctggagtgtggaggtagccccagacctggatggggcatttcgtgggcattcaacacaggctgacactgggtcaatctgtctccatttggccgccgttacacatctctgactttcagagggaaggaagtgaggctccagccggccaagtgacgtggccaagctccccctgccaatccgggcctcaagccagggtcgggctgactcagaagcccacaagcctcctttgtaacttaccattctctggcagattcccctcaatccaattatcctcccctggagcacaactcaaaggtgtgcctagagatttttcaacatgcgtttccatctcccatgtatgcagtgactcctgcattacacaaaaatgcctctgccctctgcccccagacacactgaagaaccacaccatctcamccacatggtggttagctgctgccacaggcagcagatgatacttcccaacccagagaccccggtctccgagccatctcctgtgtaaatgcagcagga

SEQ ID NO: 492970 - DNA, 627 bp, Homo sapiens
catgtcctcctgggagcctgctaggtaaacaggccatccattttggtctggcttgatgtttggttgtcacaggctgccagagatgagtaattccctcatctcctcaragccctgagagaccagtcccaaaggatgctagctggaggaagacagatttcctcttaatatgaaggctagctctcagtgcagacagctccccaggcctgggtacagccaagcagagccacgcttgatgagggagggacagatttgggggagagcggattggactcggaattgtgaaggctcccctctacccctgaggctctataaaccataattcaagggcaggctcctcaacagaaaataatgatgagtcagagcttcttgccttctcaacaaccttccattccaccaaattattcaaagtgatttgtaccagagacccagattgtcattctagccctgtttgtttcgcatttgcattttctctctcaaaataaagcccctcctcctccttctttcaaaggtcacaatgggttaacatcatcaatacagcagcagaagagaaagtgcagttttaatgtgagaaagaaaatattgacaggtttatgcaagagacgtaattaactctatgctctgatgatc

SEQ ID NO: 492971 - DNA, 573 bp, Homo sapiens
gcctctttgccattcatcaaatattccagagcctgccagtcttaggaggaagctgcctgttccttctgtggggatgctcttcccccatacaagatatcttcaaggctaatgccttacctcctttgagtttttgatcaaataacactttctctctttgtttttgttgttgttgttgtttgtttgtttttgagatggagtttcactcttgttgcccaggctggagtggaatggcgcaatctcgactcacctcaacctccacctcccaggttcaagygattctcctgcctcagccgcccaagtggctgggactataggcatgcaccaccacacccggctaattttgtatttttagtagagacggggtttctccatgttggtcagactggtcttgaactcctgacctcaggtgatccacctgccctcctcggcctcccaaagtgctgggattacaggcatgagccaccacacccagccaataatactttctctttgagatttaccctacatggtagtgcaaactgctctcattccatccagctcctccactctatactatactactgtgtaatacac

SEQ ID NO: 492972 - DNA, 573 bp, Homo sapiens
gcctctttgccattcatcaaatattccagagcctgccagtcttaggaggaagctgcctgttccttctgtggggatgctcttcccccatacaagatatcttcaaggctaatgccttacctcctttgagtttttgatcaaataacactttctctctttgtttttgttgttgttgttgtttgtttgtttttgagatggagtttcactcttgttgcccaggctggagtggaatggcgcaatctcgactcacctcaacctccacctcccaggttcaagcgattctcctgcctcagccgcccaagtggctgggactayaggcatgcaccaccacacccggctaattttgtatttttagtagagacggggtttctccatgttggtcagactggtcttgaactcctgacctcaggtgatccacctgccctcctcggcctcccaaagtgctgggattacaggcatgagccaccacacccagccaataatactttctctttgagatttaccctacatggtagtgcaaactgctctcattccatccagctcctccactctatactatactactgtgtaatacac

SEQ ID NO: 492973 - DNA, 573 bp, Homo sapiens
gcctctttgccattcatcaaatattccagagcctgccagtcttaggaggaagctgcctgttccttctgtggggatgctcttcccccatacaagatatcttcaaggctaatgccttacctcctttgagtttttgatcaaataacactttctctctttgtttttgttgttgttgttgtttgtttgtttttgagatggagtttcactcttgttgcccaggctggagtggaatggcgcaatctcgactcacctcaacctccacctcccaggttcaagcgattctcctgcctcagccgcccaagtggctgggactataggcatgcaccaccacacccggctaattttgtatttttagtagagacggggtttctccatgttggtcagactggtcttgaactcctgacctcaggtgatccacctgccctcctcggcctcccaamgtgctgggattacaggcatgagccaccacacccagccaataatactttctctttgagatttaccctacatggtagtgcaaactgctctcattccatccagctcctccactctatactatactactgtgtaatacac

SEQ ID NO: 492974 - DNA, 573 bp, Homo sapiens
gcctctttgccattcatcaaatattccagagcctgccagtcttaggaggaagctgcctgttccttctgtggggatgctcttcccccatacaagatatcttcaaggctaatgccttacctcctttgagtttttgatcaaataacactttctctctttgtttttgttgttgttgttgtttgtttgtttttgagatggagtttcactcttgttgcccaggctggagtggaatggcgcaatctcgactcacctcaacctccacctcccaggttcaagcgattctcctgcctcagccgcccaagtggctgggactataggcatgcaccaccacacccggctaattttgtatttttagtagagacggggtttctccatgttggtcagactggtcttgaactcctgacctcaggtgatccacctgccctcctcggcctcccaaagtgctgggattacaggcatgagccaccacacccarccaataatactttctctttgagatttaccctacatggtagtgcaaactgctctcattccatccagctcctccactctatactatactactgtgtaatacac

SEQ ID NO: 492975 - DNA, 519 bp, Homo sapiens
acaaaattcagatttgtcttcttgacattaattttttwaaaaattcggttgaagtattatatagagaggaaagggcacaaatcaaagatgagcagctcaacgaattttcacaaaacggacacgcctgggttacccagatcaagaaacagacattactggaaccccagaagcccccttgtgttccctttgcaatagacatcatggcttcctgattttttaattccctaatttggtcaggtttttgcatggaactccgaaatgactgtattgatcccattaagaatcaaccaagtgagtgagcagagccgtttctttacacaccgtagcagatgctgcttttcctctgaagatggctctcctgggttctggggtcttggctgcagctcaagatgcaggcccttccagcgctaagtgaaaatcctgctcccatagcttttcagacagtctgagatgacttagcaacagagcaggctggtcctgttttcctgtgcacgacaagctgctgcttcagccgccagg

SEQ ID NO: 492976 - DNA, 603 bp, Homo sapiens
cctcttattggtaaagtgagattaatactaatgcctctctcacarggttttagctaagaccaaattaaagccacttctttttccccattgcccaagacagaaacatcttggtgtacaggacatgagggagtttgctcagagccctaggtagggaagggaagggaaggggactaccactgcaggggcaggacatatgctagaacacagggttgctttccatttattaccaaacatgtgtttggtaactttatgcaaataatttccttttataagttatccttttaccatttttcatctgaggttctaaatctggaagtggaggtatatgggaagaagaaaggatggttgattttgataagtcatctaaaagatgaagagtaaagagaattaacattagccatataggattactaaaaataagcgctgtgtccatggttctcattttatcattgcaatgggaccaagaaaagtaaaagaactggaaaggattttagctgttgggttacataaattttgaccctcaaataacagttccagagaatacattctcttcccaaactgaacttctcccttgaccatctcctatcaaagaagaagaagaat

SEQ ID NO: 492977 - DNA, 603 bp, Homo sapiens
cctcttattggtaaagtgagattaatactaatgcctctctcacagggttttagctaagaccaaattaaagccacttctttttccccattgcccaagacagaaacatcttggtgtacaggacatgagggagtttgctcagagccctaggtagggaagggaagggaaggggactaccactgcaggggcaggacatatgctagaacacagggttgctttccatttattaccaaacatgtgtttggtaactttatgcaaataatttccttttataagttatccttttaccatttttcatctgaggttctaaatctggaagtggaggtatatgggaagaagaaaggatggttgattttgataagtcatctaaaagatgaagagtaaagagaattaacattagccatataggattactaaaaataagcgctgtgtccatggttctcattttatcattgcaatgggaccaagaaaagtaaaagaactggaaaggattttagctgttgggttacatarattttgaccctcaaataacagttccagagaatacattctcttcccaaactgaacttctcccttgaccatctcctatcaaagaagaagaagaat

SEQ ID NO: 492978 - DNA, 600 bp, Homo sapiens
aacctcctctctctctctacagctctcttctctctggtactctgcctatgaactctaggtgccttccctggacttacaggttatctstctaacttatcattgccactggactctctctggattttcccatccttgtgctacaacctgaaaactctgtctaggcagtaagatggggtaatcgtagggctcacctttttctgtttaccatctgttagggatcactcattgccttttgttgcctaatgtccaatgcctgaaagctgctatttaatatattttgccatatatgtaggcatgactatgtattcatttatttggcttatgtgaggtgaaaaatagatccagtcgctaagattccatcttagttagaagcagaaatccactgaaaaatgcatttgaataaccattggtagatgttgctcacccaggatacagattcaagttgaacatgccttaaaacatatgatttgttttgttttcttctcttatcctttcagtttcacagtctggtttactcagtgccttcctctggcttgtcccagaaatcctgtaacatcaatcttgattctttgagctgggaaaagatgtctttggtccatc

SEQ ID NO: 492979 - DNA, 495 bp, Homo sapiens
aaaaccgaggtctccagaggttaagtgattaacttaaggtcacatagctgctagacagattattaattaaactcgatcacttgaaaggaccaataattctttgctctytaaaagcattgttttttagcagttaaagtgcttgagcagtagctacatagcaaacatttggtgaacattgactgtatgcaaaatgctgctctcagggataagaggtgagaaaaatggaccaaagggagccctcttcaaagaaggagcagggtactcaggggaaacccccgatataactttgaggtccccagtgacactccatgccagatgtgtctggcacgagggaccagaggcgtctgatgccctagtgtgctgaagtataagcttgtattgtttaacatcattctttcatttattcatttagaccctctcttgaatcattccttctactgcttccatctcatttctcttaactcatggcaaaatccccagagtatgatgcacatc

SEQ ID NO: 492980 - DNA, 664 bp, Homo sapiens
ctggaggtttaatgtagacagactattggatacccaattaggtaaagagtaacagttccatttgcagtaatttattttgaacatgtactaattcaacaaggagtattttcttcctaatttccgtcatgacaattaaatcaaatgagcaatttgttagacaaatttacccaaaaaggaaatcatccagaattggctttgagatagtttcctcaactatcaaaagaactggtgttgaagccatcaacattcctgtgatataactcagagaacctccgtcaacacatataaggacctggcagaatccctgctgattaattcagcattcatyccaagatggaaaagaacttgtctctggagtaattttcttcctcaagggtaagaacaatccaatgagcaagttgattcctttcattgattttacattttgttttcttaaaaaataaagtttttaagaaacttcattcatattcatatgcaatcaaggcatatgaatacaactttgcaccactttttatctttgcaaaataattactttaagacccaagaagggctttcccattataaacctagctagacttacccatttaaaaaaactttcatgtcaactttgtatggatttttttaaaaaatacaaatataggctgggcgtggtggctcacacctg

SEQ ID NO: 492981 - DNA, 486 bp, Homo sapiens
ggtactagtagctcatgtgtcagctaaaagacaaaaagatgtgatttctaatatctgcaaatattttaatacttatgagctaatccatcatatttttatatactayaaaatgtgttaacaattccaaaatagagaacctccataatggttctctcttttatccagtgatgcttatgttttcttcttagatcacagcatatttaaggccagaaaccataagataggtattataaacaagttaatcacctaaacaatatcacccaaaagaatctctaaactatatcaaaaagacaagcacttagatttgtaatgtaaccacacaaatcccatgagtatacttagaaaactgaacaaaaaagtgtacttacaaaactgtgcttgccagagcgtgaagtagttgataatgatggcattaaataataatcaataagccctttcttagcagtatttagtgctttaaggttgcagaagcacacacttagaagg

SEQ ID NO: 492982 - DNA, 536 bp, Homo sapiens
tgatgtggcagccacaggtaagaatgtatcattaagctatacactgtataatttgttctatcagccaaaaattagagataatataaacagtacatacacatatcatctgttaataagagtgaagtaggctgggtacagtgactcacaactataatccaaccacatttgaaggccaaggtgggaggatcacttgagcccaggagttcaacaccagcctgggcaccatggaaaaatcccatctctataaaaaatatatatatatgtgcataaattagccaggcgtggtggtacacacctgwagtctcagatactgaggaggctgaggtgggaggattacttgaccccaggaggtggaggttgcagtgaactgtgattgaaccactgcactccagcctgggtgacagagaaagaccccgtctcaaaaaaaaaaaaaaaaaaaaagagtgaagtaaatgttcatatactgcctagaacactgttcatattatgttgttgagtaagaacagcaaattacaaaatgtcttaataaaatgtta

SEQ ID NO: 492983 - DNA, 292 bp, Homo sapiens
tttggttcttattaaaagtgttaaatttttgtaacttatagcaaagacaagtgcaggaaaaaagttttgcaatttaaaacattttgagaatcaaaaagcaaggctttgaatgactctggtrataaagttaatccataaataatcaatacagaggacccttggactaaaaagggaagaattagtttaagaggaaaccaaggattgatactgcattggcaagtgtccatgaataataatcttgtgccctgtctccaattccagggcctgtgagggcatgagaggaagagtgatg

SEQ ID NO: 492984 - DNA, 546 bp, Homo sapiens
tgtttttcctcaggtcctgaggtcacgagctggccttacttcttcttcccacctttcagagttgtcttwtatttgttttataaacaatgttcagagttacagcaggagtatagggctaagtgtctcttctccatcttgtccctacagttaattttaatagttgatgtttagagaggtgaacattcagttccctgagtgctatagacattgagatttacaaattcactttctatgcacctgagaaacaaaagcagaagcaagtcccctattctctcaaaacttcagtttcctcagagtctcctgtgcctccaaactgcatccctctggtcacaagttcagctctgtaattcatcatctattcagcaaatatttaatgtgtacctactctttgtagttccttatataagccctggggctcaccagagaaagaattcaggcttcacttttcctgttctgtctgactagctcagaagattccaaggcagcaaaagagcacaggtaaggctaggttggcaagctctaggaaggcgaggtggtttctctacc

SEQ ID NO: 492985 - DNA, 557 bp, Homo sapiens
gcctgaagtggaaggagaaaccaggtgttagggtctcatccttctacctcctttccctgggatattggccacccaaatcctgactgcttgccatcacacattccaattttgtcacttcgttttgttcacctcttggtctcttagcagcagctctayctagacctccctgtgcccgggttttcaggctccttcgtgctattaacagccaaatgcccacaggcaaaaatcagataacgaattctggctcaccatgccagttcacttccttttgccatctgcgcactcaaatccatgttgcctgggcagctctctgaaggtttcatacagattaatttttttaaatcttatttccttcttaatctgtttttcatgggagcacgagttttccacaaatcactccaacagccagaaaaggaagtctggatccctggtttcaatgaggtctatatactgatgactcccatatctgtatacccttccctccctcacactatatgtgagttaaaaactgtataactgtttgtcttcttagcatccgtacttttgtgtttaaaagg

SEQ ID NO: 492986 - DNA, 557 bp, Homo sapiens
gcctgaagtggaaggagaaaccaggtgttagggtctcatccttctacctcctttccctgggatattggccacccaaatcctgactgcttgccatcacacattccaattttgtcacttcgttttgttcacctcttggtctcttagcagcagctctacctagacctccctgtgcccgggttttcaggctccttcgtgctattaacagccaaatgcccacaggcaaaaatcagataacgaattctggctcaccatgccagttcacttccttttgccatctgcgcactcaaatccatgttgcctgggcagctctctgaaggtttcatacagattaatttttttaaatcttatttccttcttaatctgtttttcatgggagcacgagttttccacaaatcactccaacagccagaaaaggaagtctggatccctggtttcaatgaggtctatatactgatgwctcccatatctgtatacccttccctccctcacactatatgtgagttaaaaactgtataactgtttgtcttcttagcatccgtacttttgtgtttaaaagg

SEQ ID NO: 492987 - DNA, 553 bp, Homo sapiens
aaactaggttttagaatattgaaaactttcatgattaatgtactagatattaacgsgggagagggggcagggggaagcctgtgttggtcctctccagaaagttgcacagccagtagcacccttcagtaggcttcaggcattccctgtggggccttgctagctggcacccagccgtatgctgctaaaacaaacctgagcaccagtgattcacactgttcctgaaagcaagttacttggtggaacctatccctctttaacaaatgaacagtcctgtctctttccaggaccagagtcctgcagcaattaagcatgcaacacttgggaagctatctgacggagactaccagttgctccaaaaaattttaaactccttagacattataggccctgatagcactctctttttcatttactcttttcatttaatgctttcacaaatattcctaggacactcacaggtgaagtttggcactgagcaggtaaggctgaaagagtcttgctcctgttactctccattgccaaattctctattgcggctaacttctgcacacca

SEQ ID NO: 492988 - DNA, 452 bp, Homo sapiens
tgtagaaagagacaagttgctccagaatgttctagcagaaatatctcagccttaggagttcaagaccggtcctggcaacatagcgagacccctgtctctgtgaaaaaaaaaaaaattttaagtagccaggcatggtgtcatgctcctgcagtcccagcaactaaggagactaagatgggaggatcattttagcacagaaggtcaaggctgcagtgagcaatgattgtgccactgcactccagcctgggaaacagagcaagaacttgtctcaaaaaaaaaaaaaaaaattytacacacacacacacacacacacacacacaaagacacacacacagcttcatttgagcctttgccttgcaagggggagggggttattgtttacagttgacaactaccaagtagcactgggctttagcagagaaagggaatttattacagtgataaagggatgc

SEQ ID NO: 492989 - DNA, 594 bp, Homo sapiens
gacctcccaaaggtgcctaagaggctgttccaaatccctccaggggtgtcttctctgagctccacctgcaccaaacagtgttatggaaaaataaaggctgccctcctggcaccgtcctgcccaaggggctcatagtccgagggggtgtaagacaaaagtagcagagctaaggcaactggcaaggcaagaccccacctcactcactcctcttcccaagcttcagccactgtgttctttggagtcagacagggaaggccctagggagaaagtggagcctcggctgggcctacaagaaggcatctaattgcagaaaagaagcagaggcagacccaaggttggacacttgggggacagtgtagaactgagtaggttgggtagaaagaggggacaatgagatcaggaaggaaagtggaggcagatctgagaggaaggaaagcttagttgcgcttgggcaggtttcttcccttccccaaaccagagtcctcataaaaggtctcctctcgggaggacatgtggggcaagtggacaggaggagaagytggggacccaaaggccagaacaggagaagagagcagcccagaggctggagatgcc

SEQ ID NO: 492990 - DNA, 443 bp, Homo sapiens
tctcttctcctcgtggtttatccycagcttgttcaggactcatattcatctcacagatcacctctgacctcttctggggaggctcccaggcttctaagctccttttgactaagaacctgaatcacacaatgtgccactggatggtctatctttccctcaatttctgaaggttagattgatcttcttataaaagaatcttcttaatggcagtcgggggaggagcgtgaggaatctctgcctgggctttgccctgtgcctcctccctttggttgaacctctgggggccctggtgagatctcacatcagaagctggatttcgattgctgccgttgtaactgactgggatttttattctttagtggcaggaatgaggacacgtggagtcaagggtgtgtctcatggctgaccattcctatacaactgtacctttgctcttcccccag

SEQ ID NO: 492991 - DNA, 487 bp, Homo sapiens
tattctccttcattcaacacaattgactttggagctggacttccctggtttaagtttacattctaccacgaactagatgtgtgacttcaggcaaattgcttagctactataagcctcaacttcctcatctattaaatggaagcaataccatccagagtgccacagccagcaagtgctgctgccaagatttccagctacctggatctgggtccacggcccgtgtgtctgccaaaatcctgtctccactggcaaaaaatcctggcttagtaacacccacatggcacaagatggcagtgtaatctctcccttatcccacttgcctattcttccccttttattccaagccccagatttctccctaatcatcctgggccctctggagcttcccctcaactccagttcctgcctggctggatggcacaaatcctgctctcagygcctctgaagtcatttgctgagaactgagggtagatcactttagaccatt

SEQ ID NO: 492992 - DNA, 353 bp, Homo sapiens
tgaggctggtgggcaaatcccagccagggctgacaggggtaagggatcctggcaggctgagccctgacaacaatgtctctgctctgggcctcctctgacctctccagggctctgtccttgcagcctggrtgagactaggtgtccccaggatagggctgcatgttctgaccactccagctcagggagtggctgctggtggggacaggccaggagagaggatgggagccaggatggtaagaaggttaaaaggcagctaggcggctgtctcagagcatgggcatcatggaatgatgggacaagagtgggagcccaccccacagcaagccctggctgggtgcacagggagatgtctg

SEQ ID NO: 492993 - DNA, 353 bp, Homo sapiens
tgaggctggtgggcaaatcccagccagggctgacaggggtaagggatcctggcaggctgagccctgacaacaatgtctctgctctgggcctcctctgacctctccagggctctgtccttgcagcctgggtgagactaggtgtccccagsatagggctgcatgttctgaccactccagctcagggagtggctgctggtggggacaggccaggagagaggatgggagccaggatggtaagaaggttaaaaggcagctaggcggctgtctcagagcatgggcatcatggaatgatgggacaagagtgggagcccaccccacagcaagccctggctgggtgcacagggagatgtctg

SEQ ID NO: 492994 - DNA, 625 bp, Homo sapiens
aaaatatgtgcttttgggccgggcacagtggctcatatctgtaatccagcatttttggaggccgaggtgggcggatcacctgaggtcaggagttcaagaccaccctggccaacatggagaaaccctgtctctactaaaaatacaaaaattagccaggcatggtcatgtgtgcctgtaatcccagctactygggaggctgaggcaggagaattgcttgcttgaatcccagaggcagaggtagcagatggcgccacttcactccagtggagacagagcaagacaccgtctcaaaaagaaatagaaagaaagaacatggaaagaataaaagctttagagtcgagcatggataggctgtctctgccagtagttattcattcaccttctcaacctcaactttcatatctataaggtagggctgaggcctacccaccaaggtggttggcagaaggaaattagataataaatgtaacgtttctggcaaaactttaagttaaatgaatgactcatttagttacttactctaataagtcctaagcaaatggacaaataaaattaggtttcagttatgcatctattaatgcctaaaaacagcagcgctgcacatcacaaaggaacaggcagactt

SEQ ID NO: 492995 - DNA, 389 bp, Homo sapiens
aaaatcagaaagcagtgtctcaaaaaaacagagagagtgtagggatgaagagtgcctatgaggtaggtttttttttttttttttttttttgagacggagtctcrttctgtcgccaggctggagtacagcggtgcaatctcggctcactgcaacctccgcctcccgagttcaagtgattctcctgcctcagcctcccgagtagctgggattacagacatgcactaccacacctggctaatttttgtatttttagtagagaaggggtttcaccatgttggccaggctggtctcaaactcctgacctcaggtgatccgcccacctcggcctcccaaagtgctgggattacaggcatgagaggtagttcttattattgtttgctttctacagc

SEQ ID NO: 492996 - DNA, 389 bp, Homo sapiens
aaaatcagaaagcagtgtctcaaaaaaacagagagagtgtagggatgaagagtgcctatgaggtaggtttttttttttttttttttttttgagacggagtctcgttctgtcgccaggctggagtacagyggtgcaatctcggctcactgcaacctccgcctcccgagttcaagtgattctcctgcctcagcctcccgagtagctgggattacagacatgcactaccacacctggctaatttttgtatttttagtagagaaggggtttcaccatgttggccaggctggtctcaaactcctgacctcaggtgatccgcccacctcggcctcccaaagtgctgggattacaggcatgagaggtagttcttattattgtttgctttctacagc

SEQ ID NO: 492997 - DNA, 651 bp, Homo sapiens
gtctcgatctgctgacgtcgtgatctgcccgcctcggccttccaaaatgctgggattacaggcatgagccaccgtgcctggcaggagctgatggttttataagcatctgggattttccctgtttgwactcattctctctcttgccactctgtgaagagatgccttccgccatgattgttccctcgccgcctccccagccatgaggaactgtgagtcaattaaacctcttttctttataaagtacccagtcttgggtatttccttacagcaatgtgaaaacaaactaatacatgaagcaaaagtataaaatacttagtgattatttgctaataaaaatgattcaaacaatcagtaaaggggacatttgaggttatttttatttctaacctgtatgtatcatattttatgggttcagtttacaaatcactttatagatgagtttttcatgatgccctgattgtcttctattgcccagaagaaggtattataaatcatgataatatctatactgaatttataatgaacactaatattatattctatttttagctactatttttaatttgcatacagttggaactcagaaaacaatgccccaaaatgaaggcttcagaagcagcctcagaaacaaaaggttttctctgatcttct

SEQ ID NO: 492998 - DNA, 428 bp, Homo sapiens
tttgactttgtaaaaaactaaatgcatatatagagtctggcatgtgttgcatacctcttctaagtatgattattaacatatgtaattctcacaactctatcgaataggtaacgttatcrttcacaagtaagctaactgttacacgaactaacccccaaatatcagtgttttcacaaaattgagggctcttttccccatgtatagcagagtccaatgtgactttgcagtgccctagttcattttatattatggcttttttcagattcaagttttatgaaattagcttttctagagggagagcatacattttaaccctgattcttacatacaaactggagaacagcctctgaggttctggaggcccactggtggcagactggaatgaagtaatctaggattagtcatttacttgttctaagtccttcatt

SEQ ID NO: 492999 - DNA, 612 bp, Homo sapiens
ctgcctatcatgtgactcaggccccataatcatattcctttaaggctcgaaataattaggagttctaacagtttagattttgaattgctkatttttcacagtacgataagcactagacatattaacatgaaatatatatgtcttggtttttagttccaccgctttacaaaggagaccatcttataaacaaaaaatgtccacacacttatctgattggctagaaagaaaaacaaaaccaacaataccgacttctggcaaggatgtgaaaaaatgggatcactcatacactgccagtgggaatgcaaaatggtactgccattgtggatatcagtttggcagtttcttatgaaactaaacatgtaactaccatatgactcaataattacatcccttggaatttattaaccccaagaaatgaaaacttgtgtttgcacaaaaatttgtacatatttatagaatatattattattatttataatagccccaaactggaatcagcccagataacccataaaaggtaagtggttaaagaaattttggtacagagataccgtggaacacaactccacaataaaaagaacaaactgttcatacaggcaacaacttgggtaa

SEQ ID NO: 493000 - DNA, 612 bp, Homo sapiens
ctgcctatcatgtgactcaggccccataatcatattcctttaaggctcgaaataattaggagttctaacagtttagattttgaattgcttatttttcayagtacgataagcactagacatattaacatgaaatatatatgtcttggtttttagttccaccgctttacaaaggagaccatcttataaacaaaaaatgtccacacacttatctgattggctagaaagaaaaacaaaaccaacaataccgacttctggcaaggatgtgaaaaaatgggatcactcatacactgccagtgggaatgcaaaatggtactgccattgtggatatcagtttggcagtttcttatgaaactaaacatgtaactaccatatgactcaataattacatcccttggaatttattaaccccaagaaatgaaaacttgtgtttgcacaaaaatttgtacatatttatagaatatattattattatttataatagccccaaactggaatcagcccagataacccataaaaggtaagtggttaaagaaattttggtacagagataccgtggaacacaactccacaataaaaagaacaaactgttcatacaggcaacaacttgggtaa

SEQ ID NO: 493001 - DNA, 612 bp, Homo sapiens
ctgcctatcatgtgactcaggccccataatcatattcctttaaggctcgaaataattaggagttctaacagtttagattttgaattgcttatttttcacagtacgmtaagcactagacatattaacatgaaatatatatgtcttggtttttagttccaccgctttacaaaggagaccatcttataaacaaaaaatgtccacacacttatctgattggctagaaagaaaaacaaaaccaacaataccgacttctggcaaggatgtgaaaaaatgggatcactcatacactgccagtgggaatgcaaaatggtactgccattgtggatatcagtttggcagtttcttatgaaactaaacatgtaactaccatatgactcaataattacatcccttggaatttattaaccccaagaaatgaaaacttgtgtttgcacaaaaatttgtacatatttatagaatatattattattatttataatagccccaaactggaatcagcccagataacccataaaaggtaagtggttaaagaaattttggtacagagataccgtggaacacaactccacaataaaaagaacaaactgttcatacaggcaacaacttgggtaa

SEQ ID NO: 493002 - DNA, 612 bp, Homo sapiens
ctgcctatcatgtgactcaggccccataatcatattcctttaaggctcgaaataattaggagttctaacagtttagattttgaattgcttatttttcacagtacgataagcactagacatattaacatgaratatatatgtcttggtttttagttccaccgctttacaaaggagaccatcttataaacaaaaaatgtccacacacttatctgattggctagaaagaaaaacaaaaccaacaataccgacttctggcaaggatgtgaaaaaatgggatcactcatacactgccagtgggaatgcaaaatggtactgccattgtggatatcagtttggcagtttcttatgaaactaaacatgtaactaccatatgactcaataattacatcccttggaatttattaaccccaagaaatgaaaacttgtgtttgcacaaaaatttgtacatatttatagaatatattattattatttataatagccccaaactggaatcagcccagataacccataaaaggtaagtggttaaagaaattttggtacagagataccgtggaacacaactccacaataaaaagaacaaactgttcatacaggcaacaacttgggtaa

SEQ ID NO: 493003 - DNA, 655 bp, Homo sapiens
accctaaagtgctctattcatccaaatcccagggagaagggattagaagggaccaatttttttcctccacctggaccctggagctccttatgtaaatcaaacctccttggccaggcaaggactggatcaaattaccaaagactctacaactcacagggtaatacaggcctaccagcctttgcaaaaccaatacggccactcacataaccctcagctgactaaagaaggtcagttttctttggggaaattctactgtgatacctttagagcaggctctgtaaccgtaataggttcattgcccaatgcacataacaagtcaatatgctgagaccctgagttgcagcacagaaggaggtttaactatagcatcaccaaacaagcagatgggaggaayttggagttaggccctttaaggattttggagtgagccaaagtttggagattgttgattggtctaagagtgcagagtgacatcatgggatgggaaggtgaagaagctgcattctcatgcgggtcccactcctctctgggggtctccaaactggttgctgaaattcaggtataagaaacatcttaagggatctttaaacaaaaagcttatgaatctaatgtcagagatcctgtctataggaacaatggggatgtacatggtcaa

SEQ ID NO: 493004 - DNA, 629 bp, Homo sapiens
tatgcagggtcaggatcatcaatatccactgtcttccacctccatatcttgtcccagtagaaggtcattagggtcaataacatgcatggagctgtcatctcctatgacaaagccttcttctggatacccmtagaagggcctgcctgaggacattatgcaggtaaatattttaagtagaaggagtatactactcttaaacaataaaaagtatagtatagtaaatccataaaccagtgaatgataatagtcatttattaagtattacatactgtacataatcatataagctagacttttatatgactggcagcacagtaggtttgtttacctgagcattaccacaaacatgtaagtaatgtgttgtactttatgatgagaacagcaatgttactaggcgataggaattttccagcttcattataaacttatgggaccaatgtcatttgtgtggtccatcattaagcagaaggtcattatgtggggcatgactgtcgttggctgtacttagatggaagcagattttatctatgtggtacaactatccatctcatgtctggttttctctgttaccaagccaaggcagatttcaaaattagagatttattagtttgggtcaatcattgaaattt

SEQ ID NO: 493005 - DNA, 629 bp, Homo sapiens
tatgcagggtcaggatcatcaatatccactgtcttccacctccatatcttgtcccagtagaaggtcattagggtcaataacatgcatggagctgtcatctcctatgacaaagccttcttctggatacccatagaagggcctgcctgaggacattatgcaggtaaatattttaagtagaaggagtatactactcttaaacaataaaaagtataktatagtaaatccataaaccagtgaatgataatagtcatttattaagtattacatactgtacataatcatataagctagacttttatatgactggcagcacagtaggtttgtttacctgagcattaccacaaacatgtaagtaatgtgttgtactttatgatgagaacagcaatgttactaggcgataggaattttccagcttcattataaacttatgggaccaatgtcatttgtgtggtccatcattaagcagaaggtcattatgtggggcatgactgtcgttggctgtacttagatggaagcagattttatctatgtggtacaactatccatctcatgtctggttttctctgttaccaagccaaggcagatttcaaaattagagatttattagtttgggtcaatcattgaaattt

SEQ ID NO: 493006 - DNA, 565 bp, Homo sapiens
ctgggttttagatacctcatgtgaatgwccttcttggattcctccctcagaatcttcctaaactaaacttccacttctcacacctcttggattagggcttctaaattcttcaggtaagataacactcctctcgcttcatttgaacccagggttctctaaaaaccttgtttatttacaatttgaactcttgcctcccactatttactttacttagcatcactagctgaaacctagtttcttccatcctgccctaaatgactcctactttcttgggaagactcctttatcaagtggacttcttttggtcatcttctttttttttccgagagtccatttttcctttttctccccatggctccatgcatgtatgcactcttggaagtagagacacatgctggggaaattagaatagaacctttttagcttctctacatgtccctctctaaggaaatggaaagtaaacacagcatgtcacccactaagccaatatgaatacatgcaatcattattattggggctttgccaactacttccaataaaataagcatgagtctcaatcttctca

SEQ ID NO: 493007 - DNA, 565 bp, Homo sapiens
ctgggttttagatacctcatgtgaatgtccttcttggattcctccctcagaatcttcctaaactaaacttccacttctcacacctcttggattagggcttctaaattcttcaggtaagataacactcctctcgcttcatttgaacccagggttctctaaaaaccttgtttatttacaatttgaactcttgcctcccactatttactttacttagcatcactagctgaaacctagtttcttccatcctgccctaaatgactcctactttcttgggaagactcctttatcaagtggacttcttttggtcwtcttctttttttttccgagagtccatttttcctttttctccccatggctccatgcatgtatgcactcttggaagtagagacacatgctggggaaattagaatagaacctttttagcttctctacatgtccctctctaaggaaatggaaagtaaacacagcatgtcacccactaagccaatatgaatacatgcaatcattattattggggctttgccaactacttccaataaaataagcatgagtctcaatcttctca

SEQ ID NO: 493008 - DNA, 489 bp, Homo sapiens
tgctgttgaataaatgatggrtgggaaaggaaaagaagtggaagggaagagaagtggaagaaagagaaggatgaaaggaggaagaaacaaaagaaggaacgtagaagggatagaagtaagctttacaggatgcttagaacaagtttctagtacttcattagctacccaggacatcaaccaaacaatgactagccaggtttagagtggcaactctgtcttcaagttatgaatcttagcaaccataattctaatcattagcatctatatatttccacagtttacaaccactgtactagcacttgttaacacaagtctggctcccctaagactaaatagctgttatggcctggagttagaaagcagccctttggactcaaaggcctgttcccctgcactgcacagccacagacaagagaagggtacagccacattctgtcctgtgctttcagagtggcccaaagagcttaccagccggaaaacagctgtggt

SEQ ID NO: 493009 - DNA, 483 bp, Homo sapiens
caatacaactgttaatattctgaaaacaagtcaaatttacttgttctggatattttaaaaaatatgttatggccgggcccggtggctcacgtttgtaatyccagcgctttgggaagctgagacaggcagatcatatgaggtcaggagctcaagaccagcctggccaacatgtacagaaaccctgtctgtactaaaaatacaaaaattagccaggcgtggtggcaggtgcctgtaatctcagctgctcaggaggctgaggcaggagaatcgcttgaacccgggaggcggaggttgcagtgagccgagatcatgccactgcactccagcctgggcaacagagcaagactccatctcaaatatatatatatacacacatacatacatatatacatacatacatatatatatacacacacacacacagacacacacacatatatatatgtacccatacacacatttatgtatattttagtgtttgga

SEQ ID NO: 493010 - DNA, 483 bp, Homo sapiens
caatacaactgttaatattctgaaaacaagtcaaatttacttgttctggatattttaaaaaatatgttatggccgggcccggtggctcacgtttgtaatcccagcgctttgggaagctgagacaggcagatcatatgaggtcaggagctcaagaccagcctggccaacatgtacagaaaccctgtctgtactaaaaatacaaaaattagccaggcgtggtggcaggtgcctgtaatctcagctgctcaggaggctgaggcaggagaatcgcttgaacccgggaggcggaggttgcagtgagccgagatcatgccactgcactccagcctgggcaacagagcaagactccatctcaaatatatatatatacacacatacatacatatatacatacatacatatatatatacacacacacacasagacacacacacatatatatatgtacccatacacacatttatgtatattttagtgtttgga

SEQ ID NO: 493011 - DNA, 498 bp, Homo sapiens
cccaggctagagtacttattcttttctctgcttcaccttcttttattgtatttccaytatagtctctaattactcaacccaacactcatctagatgttgctgtgaatgtattttatagatgggattaacatctaccatcagttgaatctaaggggaaactgttccaaataattggggtgagcctgatccaataaattaaaaggccttaaaaacagaacccaggtttccctgacaaagaagaaactccgcccgtggactgcagcatcagcttccgcaggagagtttccagcctgtgcttcctgacatcctgccctacagatttcagatttgcctagccaggtcattgtgtgaaattgtgttagccatttccttgcaataaatctctctctgtctctgactttctttctccatacaacacacacacacacatacacacacacacgtgtacatatacatagacacacaaatcctactagctctatttctctggtggaaccc

SEQ ID NO: 493012 - DNA, 596 bp, Homo sapiens
acttaataaaactagttacatgttttaaattgaaatatattttgagataatttaaaaaaatatttaaaaatcattggcagtatattcaagatgcaacagacacatgtaattaatcgatattgtttacaaatcttggcagtgcaaattcattgcagttctacaaggaagagacacttgtcaaatgagacactaagataactctaggtccaaccctgtggtatctcacttaaaaaagaactctatataaaactatatactctcacgcctgtaatcccaggactttgggaggccgaggtgggcagatcacgaagtcaggagatggagaccatcctggctaacacggtgaaaccccatctctactaaaaatacaaaaaatgagccgggcgcggtggcgggggcctgcagtcccagctactcgggaggctgaggcaggagaatggcgtgaacccaggaggcrgagcttgcagtgagccaagatcgcgccactgcactccagcctgggcaaaagagcgagactccgtctcaaaaaacaacaacaacagcagcaacaacaacaacaacaaaaaactatatactcaaaatgatcttcaaaagga

SEQ ID NO: 493013 - DNA, 607 bp, Homo sapiens
ttgggaagacagactcatccagatcctaaaggaagttttactaaaacagctctragggtcaaatggaaaggagatcattctccagaaggcagttgaccgtgtcccggtgttgtgttcaaccttatagtcttaggttatctggaagcacgatcttcccattgaaaaagaaaaggagaactcagcttttcacatatacatgtagtgatccttgaccaatgtcgattcccagatacacaaatcttccgcacaagccccaagcaccctgctcatttttcagagttgagcatctatttgtggaacatatgtgagcagccactggaaattttccattcttttgaagacagccaaacattcattccaggactatacatattttttattgtgaaaaatgacttgaaaaatgctcttagagactaagtttttaaaaatattctgttctgttacgctttctttccttttctttttttttctgggcagaaagaaatacaaagaagcctaatttaaaagtatgtttaattcagagaataggaaactttctttcttagcctacttttgagtatttctgtcacaagtgtattctcagttcagctctgaaggagtcaattta

SEQ ID NO: 493014 - DNA, 545 bp, Homo sapiens
gatatgcacctgtagtcctaactacttgggaggctcaggtgggaggattgcttgagcccaggagtttgagactgcagtcagctatgattgcactactgcatgccagcctgggcaacagatagagacctctgtctctaaaacataaaaataataaaactggttaagttatctgaagctcttaaacatccatggctgagaattttacctctagtggccatcaggtcagcctgttctggaacttacagattgtaaccttatgaattaacaactagaagacccatgcacyggtaagttttaccactcgtaattgattggagcttgcttcaggcagacctagctaaatactgtcaaagagaaattcaataatcattcttatcttccatgattgcaaactagattttcaaaaacttcaccttcaaaacctctacactccttcaacctagatattaggtattctggaaaagacaccaattggaaatattctctagagacattctggaaaggatcctaggaaggtgatagcagaagcggcccatctagaatgg

SEQ ID NO: 493015 - DNA, 470 bp, Homo sapiens
tcaaaacacattgctgtatttcaaagcagatctgctggcatctaacaattccaaaggtgtttcacacttctaaaaaaattttttttaaaacgttctttctaactcacaccattaagaacagttttttgttttttgtttttaattttcagacttctcctttattacattatcaagtgcattggccttttcaaaaaatgaatacaagtgagtgatggcaatcttatgcctgggacagtcccagtttgccagagcccacataattatcagtagcactttttttttttttccagtttcgaaagtctggaggataattatgtgatcacctatttgagctgagaatgaggacacatttctcacactcaactataaaccaacaaatgaagcccagttctgcagaatctagttcttgaagactgtcttcccccttacaaaaaacaagcaaaaaaacgaractgcaccagagctgctca

SEQ ID NO: 493016 - DNA, 561 bp, Homo sapiens
tgattgagcttcttgattctccaaagtgtctgagccaacgtacacttgagatattactgctggaggtatgcacaaatgtattggccactgtattagtctgttctcatgctgctaataaagacatatctgagaaggrgtaatttacaaagaaaagaggtttaattggctcacagttccacatggctggggaggccttacaatcatggcagaaggcaagtgaggagcaaagtcatgtcttacatggtggcaggcaaagagagcttgtgcaggggaactcccatttataaaactatcagatctcatgagacttattcattaccatgagaacactatagcgaaaactgcccccatggttcaattatctccacctggctccacccttggcacatggggattattataattcaaggtaagatttggatggggacacagccaatatcagacaccagccattccttggtgccctgagtttgcttcaagcacatggatcaaggaaaacccttatttcaagacatcttccaatcctattgatctcagatgacaagaacagaactctgtaaa

SEQ ID NO: 493017 - DNA, 594 bp, Homo sapiens
tcactgatattccagaacagggagaaaaaggaaatgttttcatctctgtatagttaagtgttccttattctgatgacaatagaaagctatttcatagacattacatctaccctttctctagtctaaatggaargcagaattacacagttaaccaaagatatattgagaaaggtttcttaaaacacactgaaagaaaattgtagtaatttattagctggtctcttagagtacatgtatatgtatgtgactgcatgcaaatctgtatgcatgcaaaagtgaatgcaattcacttctttgcttttcacagtggatcctgtattttaggatttgtgagctgtcagaatttcaataagtgaaaatgtcaccctatttctaatgatatatttggttaaaccatgctgatatgtaatagagagtattcaggcctttattgagaccagtcagtgcataaaatatcttctctactggtaaccaatatttattgaatgcctcctgtgtgtgtcaagggttctacacatgttattttatttgattctcctttgtcttagaattatgaactcaccaaatcattcctttaaagagaaaaatattttc

SEQ ID NO: 493018 - DNA, 594 bp, Homo sapiens
tcactgatattccagaacagggagaaaaaggaaatgttttcatctctgtatagttaagtgttccttattctgatgacaatagaaagctatttcatagacattacatctaccctttctctagtctaaatggaaagcagaattacacagttaaccaaagatatattgagaaaggtttcttaaaacacactgaaagaaaattgtagtaatttattagctggtctcttagagtacatgtatatgtatgtgactgcatgcaaatctgtatgcatgcaaaagtgaatgcaattcacttctttgcttttcacagtggatcctgtattttaggatttgtgagctgtcagaatttcaataagtgaaaatgtcaccctatttctaatgatatatttggttaaaccatgctgatatgtaatagagagtattcaggcctttattgagaccagtcagtgcrtaaaatatcttctctactggtaaccaatatttattgaatgcctcctgtgtgtgtcaagggttctacacatgttattttatttgattctcctttgtcttagaattatgaactcaccaaatcattcctttaaagagaaaaatattttc

SEQ ID NO: 493019 - DNA, 548 bp, Homo sapiens
tggtctttctgaattgccttagttttagataaaggctcttgtgggtccaggatggtggggaagaacaatttccctctgtttgctggcctaacaaggataaatgactctatctctgtggtttatgttgaatgcctgataatgcatctccragagaagcacttagcaagaaaactcataaatatggctataatgtttattcaaagtactctatttgcaaggccaagtatacaaatgaaggatgaaaacagacaaaatgtgtcactaacattagcctgtgctgtttgtgaggcaggtagtaataatacaggtagtgttttctcttattgcttgtttttcagggagttttagttacataacaaagatttattgtaagaataagaaacttactctcttccatcttatgggatgtctgctggtctgggaatgcaggtcatagagacgcattaccaaaagtgtatgttttagaaggttctttgtctcccaagccttgatatttgcataatatataaagtcaatttatactccttaatcatacacaaatactgcat

SEQ ID NO: 493020 - DNA, 548 bp, Homo sapiens
tggtctttctgaattgccttagttttagataaaggctcttgtgggtccaggatggtggggaagaacaatttccctctgtttgctggcctaacaaggataaatgactctatctctgtggtttatgttgaatgcctgataatgcatctccaagagaagcacttagcaagaaaactcataaatatggctataatgtttattcaaagtactctatttgcaaggccaagtatacaaatgaaggatgaaaacagacaaaatgtgtcactaacattagcctgtgctgtttgtgaggcaggtagtartaatacaggtagtgttttctcttattgcttgtttttcagggagttttagttacataacaaagatttattgtaagaataagaaacttactctcttccatcttatgggatgtctgctggtctgggaatgcaggtcatagagacgcattaccaaaagtgtatgttttagaaggttctttgtctcccaagccttgatatttgcataatatataaagtcaatttatactccttaatcatacacaaatactgcat

SEQ ID NO: 493021 - DNA, 551 bp, Homo sapiens
gcgactgcagccaaggtcaaagtggccatctggacacaggtatcagcagtgtggaggggctgccccagaaatggctttagcgggggagatgtttctcaggcattcagctcttggttttctattggtctcccttcaaaattgcttgggcaggtgggcagagcacctgatggatgccttcagmagcacctactcggtcagggtgggtcttccctcagtaaccactgcgggcaaacaatcccatttctttttcagtgagaagcttgagcaccagggacccctgcctctgcttattcaaggcctatgaggcatgatgctcaagtccgcagtcagcaaacttcctgttcaccccacagctcctcttccccagatgctacccacccccatcttgagttctgaatattttccagtgccatcatacctaaagacttccttttagctattcgatttgccctcccatggtgagtcagtcaaattaaaatgtggggctacgttattgtaccgaaatatttacaaaatagaaaactgaagaggaaaccatgctttgttttctg

SEQ ID NO: 493022 - DNA, 628 bp, Homo sapiens
ccagctccagatgaccttggcttgccagatgaccttgggctcagatcgtttctcattttagttctcatctgtaccaccaggcaaatggtctcttgttcatggagacttgaatgactcagacattgcagatgagttttgtaggtcttcatgttgtaactaaattttgggaaatattgttaacagagcagttaagagaatacagaatgctttcagcttctggggcagagcaagtttagagatagtcaattgctcagcaagacagacaacaattttrtgaagactttttttgtcctccccaccctcaattaaaatatgcaggtaaagtaaaggttaaatcaggcttggaaatgtttttgttgccttttgaacatacacaattgtttgggaaaaatgtactcattatggttatactctacttagtagaaatatatgatttctttttatattttaaataagtagactgactttttttttctcaggcaaagtcataattgtatttattttaaatttatatcctgtctgcttcaaaaaagaatttgaggcagccaggaaaatcataagctataaaatgagcaagctccattttctactaataaaataaaagttaggatctcatcagtgaaacaac

SEQ ID NO: 493023 - DNA, 486 bp, Homo sapiens
aatggcatgcttcactgttttcactgtttttatttcctagcatttccaattctttctgatagtttctttactacctccctgatgaaactgcccatgtaattttatgtttccactagagttttgacataatcaatcacagttattttgcttatacagtgttggtgagaatgtaaattagctaaaccactgtggaaagcagttcagaggtttcccaaagaacttagaactaccattggacccagctatctcgttactgagtatatacccaaaataaaataaatcattctgccaaaacacacatgtgctcggatgttcatcacagcactattcacaatagcaaagatatagaatcatcctacgtacccaacaatggcggactgtataaagaaaatgtggtacatatagcccgcaggatactatacagccaaaaarcatgatcatgtccttcgtggcaatatggacactgctggaggtcattatcctaag

SEQ ID NO: 493024 - DNA, 486 bp, Homo sapiens
aatggcatgcttcactgttttcactgtttttatttcctagcatttccaattctttctgatagtttctttactacctccctgatgaaactgcccatgtaattttatgtttccactagagttttgacataatcaatcacagttattttgcttatacagtgttggtgagaatgtaaattagctaaaccactgtggaaagcagttcagaggtttcccaaagaacttagaactaccattggacccagctatctcgttactgagtatatacccaaaataaaataaatcattctgccaaaacacacatgtgctcggatgttcatcacagcactattcacaatagcaaagatatagaatcatcctacgtacccaacaatggcggactgtataaagaaaatgtggtacatatagcccgcaggatactatacagccaaaaagcatgatcatgtccttcgtggcaatatrgacactgctggaggtcattatcctaag

SEQ ID NO: 493025 - DNA, 632 bp, Homo sapiens
tccgtgaatggcatgcttcactgttttcactgtttttatttcctagcatttccaattctttctgatagtttctttactacctccctgatgaaactgcccatgtaattttatgtttccactagagttttgacataatcaatcacagttattttgcttatacagtgttggtgagaatgtaaattagctaaaccactgtggaaagcagttcagaggtttcccaaagaacttagaactaccattggacccagctatctcgttactgagtatatacccaaaataaaataaatcattctgccaaaacacacatgtgctcggatgttcatcacagcactattcacaatagcaaagatatagaatcatcctacgtacccaacaatggcggactgtataaagaaaatgtggtacatatagcccgcaggatactatacagccaaaaagcatgatcatgtccttcgtggcaatatggacactgctggaggtcattatcctaagaatcaacacatgaacagaaaaccaaatatcacatgttytcacttgtacgtggaagttaaacattgggtagaaatagacaaaaagatggccacaatagacagtgggggctactagaggcaggaggaagggaggaaggcagg

SEQ ID NO: 493026 - DNA, 623 bp, Homo sapiens
taacattatgctgactagtatagaaattggaccaccagtagaatgctgctgcaaaaataaggaaacctaattataaggtatcaacttggtagttgggtgggggaaggtaaagaaaataagatccaagcgtaaagagatgaagatccatatgagcagtagcaaaacatgctgaaatgttgcctaagatcacctggaaagcaaatcctatgcctactgaacatgcagctctagggtaagaagttagaaaacatgatgttaatagtttgtgagcatggctagggctgcatttagtaaggtcttacaagaaggtgacaagctctaaaaatgattggtcaatttgccagtgccaacataaaaacaaatgcagtcctaaagaaatttaatttgtaaggtttattgcaagaggcaggaaagagactattgcaacagaggggagaagactcttgcaataaaggagagtattccaaccatgagatctgcaagcttctyaaaattcaagcagaaaaggtattttctttatgggaaggaaaatcaagtctaaaaagaactaaaggtgcagttggaagatgataaggaaatgctttccctgaggtcagcagattatttttaaggtggggctgtat

SEQ ID NO: 493027 - DNA, 624 bp, Homo sapiens
aacggggggtcaatattcagagtcttttggggaggaaagaatcttaactaacatttggtcaagtcacttaacaggcattttgttttgattaatcagtggggacaaaaaaattcccctaaactcatatgaagcaaaaacagaaaatgtagaggtctgtgtctgtccttgccataagtaaacaagagagtcatctgtaagtgcaatagtaaatcatgggggaagggcagttttctgccacaagccttttccacaacatgcaagggtggggggatttctttaaccatgactgttttccaggtgcacggggatcagataaagtttaacattgtmacaagtaaaatttgtgacacattcaatgactgatggaaaagtcaatttctgttacatttcaaagacttggtgcaaagaagcctagtaaaatctttcaaagagtggcatgggttaaatatgaaattaatcataataaatttccagaaacctccattcattgagaggggtcatatggggcaggaaaatgaaattccccagtaataaagattttagaaacatgtctcccaagaactttgggtatggtaattagcacatgaaaatgacagaaatcaaatagataaacagagaaactaa

SEQ ID NO: 493028 - DNA, 624 bp, Homo sapiens
aacggggggtcaatattcagagtcttttggggaggaaagaatcttaactaacatttggtcaagtcacttaacaggcattttgttttgattaatcagtggggacaaaaaaattcccctaaactcatatgaagcaaaaacagaaaatgtagaggtctgtgtctgtccttgccataagtaaacaagagagtcatctgtaagtgcaatagtaaatcatgggggaagggcagttttctgccacaagccttttccacaacatgcaagggtggggggatttctttaaccatgactgttttccaggtgcacggggatcagataaagtttaacattgtcacaagkaaaatttgtgacacattcaatgactgatggaaaagtcaatttctgttacatttcaaagacttggtgcaaagaagcctagtaaaatctttcaaagagtggcatgggttaaatatgaaattaatcataataaatttccagaaacctccattcattgagaggggtcatatggggcaggaaaatgaaattccccagtaataaagattttagaaacatgtctcccaagaactttgggtatggtaattagcacatgaaaatgacagaaatcaaatagataaacagagaaactaa

SEQ ID NO: 493029 - DNA, 624 bp, Homo sapiens
aacggggggtcaatattcagagtcttttggggaggaaagaatcttaactaacatttggtcaagtcacttaacaggcattttgttttgattaatcagtggggacaaaaaaattcccctaaactcatatgaagcaaaaacagaaaatgtagaggtctgtgtctgtccttgccataagtaaacaagagagtcatctgtaagtgcaatagtaaatcatgggggaagggcagttttctgccacaagccttttccacaacatgcaagggtggggggatttctttaaccatgactgttttccaggtgcacggggatcagataaagtttaacattgtcacaagtaaaatttgtgacacattcaatgactgatggaaaagtcaatttctgttacatttcaaagacttggtgcaaagaagcctagtaaaatctttcaaagagtggcatgggttaaatatgaaattaatcataataaatttccagaaacctccattcattgagaggggtcatatggggcaggaaaatgaaattccccagtaataaagattttagaaacatgtctccyaagaactttgggtatggtaattagcacatgaaaatgacagaaatcaaatagataaacagagaaactaa

SEQ ID NO: 493030 - DNA, 576 bp, Homo sapiens
tgcctcgatttcctcccctgtaaaaagaaaatgatattaagaaaatataatattcttgttgtgagaattaaatgaggaacacctagaagtgaacataatatgtagaaattattaaataattgttatatttcaaccctatttatataaaagggcatttacaataactcagtgctttttgattatttttccctggactgatggtaaggaaagcattttatattgatctagtatacaaagaagcaaatacacatatacatatatatgcagtttcatacatacttatcgcaaaaaacaaattctcagaacatttactccatggatacagtacctgatttttcccttgtatcttatgttatgtcatgctatgctattctttaccatagtccactattttattctacattttaaaatgttggtcatgacccactaaatcaatttcatgattggctaaagtgtgcttataatgmtctcaaagatattacatgaccttctaaatcagggtatcatttactacttaatgtaaagtaactacatgtataatctctggtattttctcttcattaagtttttgttttc

SEQ ID NO: 493031 - DNA, 532 bp, Homo sapiens
tgtagggtatataaatatcctggaacyaccctgctttctggtgagcagaaatcttttggcagcaaataaatatctgttggccagcactgaacttctgagtgtgtggctgcctcctgatttcttgccctatagcccgtttccagttgctgcataatcatcaagcacaacacaagattaaaacaaatacttccttaggttgatatttttccatttttacacccagcaggtaaacaaacattcatcaattttctcacagtggactcacttccaatttcaaggaactgattatagagatttctttgaatctactagaaagggggagatgtaggtctgggttacatagttgttacaactttgctgaaaaccctctgagaattctgcaaagaaaactgtacatgaacccctctaggtcattcagccactggtggtatgtacacacgttgctgttctatagaactccagcagggccctcgcccctgagtcttgatttcagaacttaaaggattacccatgcgttcggctgattgctcaa

SEQ ID NO: 493032 - DNA, 595 bp, Homo sapiens
ttcttccctttcttatttcatgtagtgttgatgtatctgtaaatcaaggtaatatttttctcctggccaagagtaggcacgttacttaagcttagtcaataagcttctttcttgcagaattgtgtactttgattctgtaaggatgggcagaattcacactttatcagtgcaaaggctgcagttctgaagtaaatatttattagtttttaagacaattcctggatataaccgtattttcatcctttctgagacttgattcttcaggaatgtatctgtttgctagggctagcataacaaaataccacagaatgaatgatttaacaacagaaatttatttcctcacagttctggaagctagaagactgagttcatggtttggtttcttctgaagcctttctctttgccttggagatgattgtcttcytcccgtgtttacacatgatcttctttctgtgtatgactgtgtcctaattttctcttcttataaaggcaccaatcatattaggttggggtccacctacatgacctttttttaaccttagttgcctctttaaaaggtctgtctcaaatacagtcacattatgaggtacttggg

SEQ ID NO: 493033 - DNA, 461 bp, Homo sapiens
tttagctttaatggcatttctcccataagtcttttgtatatctaatcttatattggtagcagactttatgagaatctaacctgacacagtcattagaacttacagaagcagaaaatagagtggasgttggcagaagatagggaagttgtagttcaatgggtataatgttacatttatacaaggtgagtaagttttagagagatactctacaacatagtgcctatactaaagatattgagagaggagaaaaggtaaaaaaaaaacaggcagacagttaaggcaggtcctcagtagaattcttttaaacagagaaacagcatgaaaaatcaagctgtagctgcacagataagtgagcaagacccaacaaagaaatgcctttgtactttgtgtaatcagcgggctcccaggaaaatgtttcctccccttctatggatgtatacattgtgggctccatgggaact

SEQ ID NO: 493034 - DNA, 566 bp, Homo sapiens
taatttatgtggagtacaaatttaaaatacattaccaaatgtttactataaaataattgaaccttatttaatataggtataacatcttcaaaattgagttaaatacaaaaaaacccttatatgctaaatttttatttgatatttctggtatcaagtataagaaatacttattttcaatagacttgtatttccctttcagattccatttttggaattgtttcagttagaggataaaatattattggaaatgaagaaatttccaggcaaatggtggggtggggatggtaaatttgtctatcgttacccgtgtctattgttggccacgctagcacaaacaaatcttatcaaaactatccctkctctgttctcttttgaaagcttcacaatagctgtccctcagtgttacagttttttccaccatcagttgagaaaaggttcccatagctctctgatagacagtctaacacacacatccacacaatgcacaaatacagctataaaactttttagatctaaatgtcacttttaaagcaaccttagagactattatgatttgaataaatgtc

SEQ ID NO: 493035 - DNA, 380 bp, Homo sapiens
tgaatgactgcaataataaaatgagtatgttaaactatcaattacttggctttgattctgtgcttgaawtatattcaatgagcctctgctgtgtgccagacaatgttctgggcagcagcgacacactggtgaacagtccttgcctatatggagcttacattttagaaggcaaagacagaccaataaataagtcagcaaacaattcgtcaatataacttcaaataataacaaatactttgaagaaaatcaactagggtcgtgcctgagggcttgggaattaaatgtactttagtttggaaaccagagaagtcatggctgagggatttatatcttcactgacaactgaagacccagaagaaaccagcaaggcaaaggctggg

SEQ ID NO: 493036 - DNA, 622 bp, Homo sapiens
tgtaaattccccccacaccccttcatagcttccaaatctgggatagggttataatcagattgcccctttgaacagaaacatggatagcatagtccttactcttaaacattttttttcttgctaaagcttctacttattttatacctgctgttttgtggggcactcttaactataggaaccttaaagatgttttacasttgcaaacacatcaatttattaacagaaaataacttcaaatggaattttctaatgaaatcacttcaatcaaatagtaatgttggcaagtagtaagtttcaaatggtttccctgttttcgtttctttaactttcttcaaaattgaaaaggaaaataaatcttcccattttcctttttactttcttctatcttttcttctttttttcctttttctttttttttttggaataaaggttagtcttgtgcccttttgtattccatgtactaagttcctacacctggatttcagtaggtattcagcaatgtttcctctgtgaccattttctatataacctgtaaatacagcttcaatattatgcctttttttgacaacacatactgtttttcaaaagttgattctatgatatagtgcttctttctgttgtc

SEQ ID NO: 493037 - DNA, 628 bp, Homo sapiens
tccttctaacaccttaggattctctttcatgcttattgaaatccttggcctaaaatatttctcaatatgatgttgacgtaaccttccccaatatatttcttaaggtcctgataaaaagttgtccactttttctcttggggcttttcatcatttttattatgtgcattagcatgactattgctaatagttagaaatattataatttacaatatatttatacatatgtaatccacatatattatttatatagacatatacaatatatactatttaattctcacaatagacccaggagaaaagtaactttattaactcattttataaagaagaaatgcaatgacttgcaaaaayttataaatttcagaaaagaatgtacatgtcacatatgttaaaatcactccagcattcccatcctccatactctttgtattctttcctttgctaatattaaagaatgtttggcgtctcaacttaatttgctcagcaccataggtgaattgggtttcagtcaaccaaccaagcagggaagaaagcaattaaaactgctcccagctattccagttcgctcattaggaaaaacaaaaacaaacaaacaaacaaaaaccctctgagtccatgaatctcaacc

SEQ ID NO: 493038 - DNA, 530 bp, Homo sapiens
ttgactgtggcagcgtcaatgaagtagctcgaggcctggcttgagatgaggttctcattgtgaaaccactgtgtggaattgtcctcaggggagtaggctccctggcacttcagagtcacactgtccttctcragcacgctgtaccattgaggctccaggaacaccacagcctttgggagatcttctgaggagccaagataatgtggggtgaggacagggagaggagcaggctctacactgccattcccagggagcctcaaagccagaatgagctcattgcaaacccatgcttggtggctcagtcttagagcatcttggccccatttttggcctgttcagtatcttaaggaaagctggccagagaagcacagggccaagttctgctgtgttggaggaactatccctgctaaccccacatcagcattttcccattcaacaagcatttcccaatatcttatggccattgtccccatatgtgccccactgggtcaatccaagaccatgaagctgactcaccagtccgcatgcca

SEQ ID NO: 493039 - DNA, 530 bp, Homo sapiens
ttgactgtggcagcgtcaatgaagtagctcgaggcctggcttgagatgaggttctcattgtgaaaccactgtgtggaattgtcctcaggggagtaggctccctggcacttcagagtcacactgtccttctcaagcacgctgtaccattgaggctccaggaacaccacagcctttgggagatcttctgaggagccaagataatgtggggtgaggacagggagaggagcaggctctacactgccattcccagggagcctcaaagccagaatgagctcattgcaaacccatgcttggtggctcagtcttagagcatcttggccccatttttggcctgttcagtatcttaaggaaagctggccagagaagcacagggccaagttctgctgtgttggaggaactatccctgctaaccccacatcagcattttcccattcaacaagcatttcccaatatcttatggccwttgtccccatatgtgccccactgggtcaatccaagaccatgaagctgactcaccagtccgcatgcca

SEQ ID NO: 493040 - DNA, 274 bp, Homo sapiens
ggactggtgagtcagcttcatggtcttggattgacccagtggggcacatatggggacaawggccataagatattgggaaatgcttgttgaatgggaaaatgctgatgtggggttagcagggatagttcctccaacacagcagaacttggccctgtgcttctctggccagctttccttaagatactgaacaggccaaaaatggggccaagatgctctaagactgagccaccaagcatgggtttgcaatgagctcattctggctttgaggctccct

SEQ ID NO: 493041 - DNA, 557 bp, Homo sapiens
taggcctgttcattttctttgaagttttattatctccctataaaccagattgactcctgaatttttgttttttagttccactagaaactaaaactgcccttttccaaagctctgcaaactgaaactggtgactttaagcttcagaaaaatcactgcaacagagcacttatgccttaatgccaatcttaatgcctgctgctatctgggtcactcagagagtttaccagaatgtttaatgaaataaccagagacattcaaattgcaaaccagtaaagcacatcacattgcaactgctatcttcagtctaccatttaaacttgcctcaaactcacctctagaaattgtttcacctagctgccctctaaactcaaaaactaagatcataatttgctccaaatattaactttgtttttttaatagaagaatactctgaattcctttcaagcaatacaatctaaaatgagcaagttagcctcaatagcaccccaaaatagaagttcttgrtatcttaacagcttaacaaggaggagcttgtgttcctactgatgtcaaaagaa

SEQ ID NO: 493042 - DNA, 580 bp, Homo sapiens
gaatggccagagtgtttgccttctttgaaatttatgcttcacaaaagaccaaatcttaggcaggagggccagtgctgccttgggtaaggggtagggaggaagttgtaagatgcatttttgggaggaggtggcrgtggccattctctgtgcccctgaaaccactttgtgtagcagaagcctattgtcttcatgtgtaagaatattcccctaggcagaagcacagggagatctgggttatccagggaaaagggactctgagaatacaaaaacctgggtaagtctggagtcatctgttgtgggaccagagaaatcatgcatgctgcttttgaccacacagaccatgatggggaagtactgcatctgatcagcaagagagacagggtctttggccaaaatggagggctcttttctaaccatgttctcagctgttggataggggacgacgactgattttgctgagtggtttgaaaagcctaggggaggccaagtaggggagacttactgccaggactatctctccaagctcagttcctggggcttccaccctcacattctagaggaaagcatattgccactcagc

SEQ ID NO: 493043 - DNA, 563 bp, Homo sapiens
agtgtactgcttacagcatgtggccttggggcggttacttaatgcctcagtcttatggattgctgtgaggggctgaacataytgtatttaaagatattgtccagattcttgcacacagtatatgctcaatacatgatagttatgatcacagccagtaatatccacatatggatattaatgtggccaagtgatccctgaccaatttcagagaacccttgaaactctcaaaacaaatgaagccaaatccatgattaagttaaatagaataaactcatcctctcccaaaggaaaatattttttgtccctttaaaatttttatctatggttactaaagtatagatccaaatgtctaaatgtctccttagtacttaccatttgtcaggttcattgttttagatctgtttgtcattgacattaccgtaaactccatttcattctgaatgatcctaaataacttcctggacttgcagcgagcccattggagcaatttaaagccagagtaactctttgtaaatgaacatattttcatgatggggcataacacattcattataatcaaacag

SEQ ID NO: 493044 - DNA, 622 bp, Homo sapiens
tgtggcctaatgtggaatccttttgtcttagaaagatcactggaggtacaggtcaacctggttctgagaaagtgtactgcttacagcatgtggccttggggcggttacttaatgcctcagtcttatggattgctgtgaggggctgaacatactgtatttaaagatattgtccagattcttgcacacagtatatgctcaatacatgatagttatgatcacagccagtaatatccacatatggatattaatgtggccaagtgatccctgaccaatttcagagaacccttgaaactctcaaaacaaatgaagccaaatccatgattaagttaaatagaataaactcatcctctcccaaaggaaaatattttttgtccctttaaaatttttatctatggttactaaagtatagatccaaatgtctaaatgtctccttagtacttaccatttgtcaggttcattgttttagatctgtttgtcattgacattaccgtaaactccatttcattctgaatgatcctaaataacttcctggacttgcagcgagcccattggagcaatttaaagccagagtaactctttgtaaatgaacatattttcatgayggggcataacacattcatta

SEQ ID NO: 493045 - DNA, 653 bp, Homo sapiens
catgaataactcttttttattttaacttttcacacccacagtatcttgcattcatactctcaagaactcaagggctggagaatcttcacagattagcagagaaaatttacttcacttgtcaaagagatggcatctcctctggggagggagctggcagctctttagcaatgcattatgcctcatgacattctagaagttgaagagtggattgtgactgttgtgatagctcctccaagccttcttacaatagattcacagtctctgccacatggatttttattctctgagcatgacttcttataaataaggcatcttgcctctctacccttttgtcaggtgtcagaaactttactgatttatgttttagaagtatatagagctgattctytctcacaaggtgcaagaaaaacaaaaaaagaaataatttctaagacagtgtctctggccttggttctatcttttaatatcctgcatatcccttgaactctgtctcaggtgcattaataaaagttaggtattactattttaatctgcctgtggttgtctcagccttcatactatgaagtctgtgcaagttacttcttcattaagaaaatttataaattcaacagattttcattatggttccacactcttccaagaactagaaatac

SEQ ID NO: 493046 - DNA, 544 bp, Homo sapiens
agcatccatgtccagactaaactgggaaagatgcttgccacccagagatcctggagtgagcatgaatgtaatgtaatgtaattacttgatgacctttggattgtcttcttctggaaagcacatgtgggcttttgggtagccaaaatgaaaatttcatgtttttgcctgcccgacacccattcctccttcttcartaaacagttccatgcatttcttctaggtaattactcctgcagcccctccatctgttccatcttggtccttacattcagttgtggttccactcctgactccaggggtggtcacataaaacagtggtccccaaccttttggcactagggactggtttcgtggaagacaatttttccatgcacaggggggtgggggtgtgggaggatggttttggcatgaaactgttccacctcagatcatcagacattagaatctcatacggagcatgcaacctacatccctcacaagcacagttgacaatagggttcacgctcctatgagaatctaatgcagcagctgatctgacaggagg

SEQ ID NO: 493047 - DNA, 585 bp, Homo sapiens
aaagggtgtggttgtgtttgtggtataggtggctagaccacaagcatccatgtccagactaaactgggaaagatgcttgccacccagagatcctggagtgagcatgaatgtaatgtaatgtaattacttgatgacctttggattgtcttcttctggaaagcacatgtgggcttttgggtagccaaaatgaaaatttcatgtttttgcctgcccgacacccattcctccttcttcaataaacagttccatgcatttcttctaggtaattactcctgcagcccctccatctgttccatcttggtccttacattcagttgtggttccactcctgactccaggggtggtcacataaaacagtggtccccaaccttttggcactagggactggtttcrtggaagacaatttttccatgcacaggggggtgggggtgtgggaggatggttttggcatgaaactgttccacctcagatcatcagacattagaatctcatacggagcatgcaacctacatccctcacaagcacagttgacaatagggttcacgctcctatgagaatctaatgcagcagctgatctgacaggag

SEQ ID NO: 493048 - DNA, 579 bp, Homo sapiens
ggtacttaaaatcccaagaccaaacattggcacagctcagatcatatcctggttttaatctgttcacttagtttctgtcttaaaaacaacaacaacaacaacaacaacaaagtccatggctgaaaggtccaagagttctttcctaaaagtttcatttacaaaagacrcaatttaaatgaacgtcttcattgggcaccacagagggccaatccaagataccctatctccaagtgtctactttaaaaaggcaagggaaactggctctgtctgggataggaaagtgggcaaggcagaattctagtttctataaatattatatgattcttttaatttggaaagaatcaaaattcatttggcctaaaatatttggatacgtgtctcaattactctgttagtgtaagcccgacctcctctctgctagcagaaagaattggcagacaaaatacatgctggtgactcagtgtgaggtgttctctcctccttggggggacgaagcgggagcagagaacactgaagccagaggcactgacttaaaatggagcatctgatccttaaagatcccctggtatttgttgtcag

SEQ ID NO: 493049 - DNA, 579 bp, Homo sapiens
ggtacttaaaatcccaagaccaaacattggcacagctcagatcatatcctggttttaatctgttcacttagtttctgtcttaaaaacaacaacaacaacaacaacaacaaagtccatggctgaaaggtccaagagttctttcctaaaagtttcatttacaaaagacgcaatttaaatgaacgtcttcattgggcaccacagagggccaatccaagataccctatctccaagtgtctactttaaaaaggcaagggaaactggctctgtctgggataggaaagtgggcaaggcagaattctagkttctataaatattatatgattcttttaatttggaaagaatcaaaattcatttggcctaaaatatttggatacgtgtctcaattactctgttagtgtaagcccgacctcctctctgctagcagaaagaattggcagacaaaatacatgctggtgactcagtgtgaggtgttctctcctccttggggggacgaagcgggagcagagaacactgaagccagaggcactgacttaaaatggagcatctgatccttaaagatcccctggtatttgttgtcag

SEQ ID NO: 493050 - DNA, 507 bp, Homo sapiens
ctgctgggctgactgtgctggtctttggaccctctcacgtgcctggggccttggctataacagcttgtctctattccacatggtttttccttctccagatggtgggcacaggcttttctccatggaagttgcagggttccaagagagagaggaggaggatacaaagtctcttgagaagcaagcttagaacgcacacaatgtcacttatattctactggctaaagcaaatcacaaaggcatccaaattcaagacattgaaaaatagattacacctcttgaagggaggtactgcaaagattgctattttgcaatatgctatatgtatacataatcaagaaagaagacatacatagctttcctttttccattacattttacccttcaattgaccactgtgacatggatttttacttgattccataggtacccactttttgagcagtgatccaaaatgatttttgagtccctagaagcattgatttggwctagtgtacggtcacctatcaa

SEQ ID NO: 493051 - DNA, 657 bp, Homo sapiens
ttaatctggattatccatgtgtgctcaatataatctaataggtctttaatctattaaggggagggaggcagaaaaggaaccaatgtcagaggaatgaaatttgagaaaggcttgactagctatgactggctttgaagatggaraggtactgtaagccaaggaatgcatgcagcctctaaaagctaaaaaggcaaggaaatggattcttctttagacctagagaaggaatgcagctttggcgacacttgatttggcccagtgggatttgcatcagatttctgagacacagaactgtaagataacaaatttatgttgtgttaaacctgtatgttagtggataatttgttatagcagcaacagaaaactatcagatcctataacccatgaatatagtaaaaacaataaacgggagcataagacctccaggttgtctgcacaggagaaaggagaacagaatcagacaggtcatttccctgctctaccattttctgtcaaaatgacccttggcaaattatttagtctttctaaacttcaacattctccaaaatggccagaagatacttgccttatagacttttttctaaaaacaagacaacctggtacttagctcataatgtctgaactctattatgagctctgaccaagggtgggattcca

SEQ ID NO: 493052 - DNA, 463 bp, Homo sapiens
ctaaaatttttatgctaacttcatagtttttgggatttacttttaaaaaataggaactaccactatatacttcagtaatagttaattttacaaaaccaaatatacttaataaatttataaagatgtattttaaggattctgctttatgtttatttgcttatatgccatcctatcttactayactggaaagcacttaaaggcaagagctgtgtcatttattttgctatttccgccatctggcataggttcatagtatcttacgcatgttttttaattaaagaataacatggcaataggtgagttaagatacagaaaagataagtatattttctccacttttcttcttaccacaccccagtcaaccttcctcagtccacaagccatgaggacacgcaagcagcactatagagaaggtatcacagcaaggaactgaggccttagccaagagccaacaccagctaga

SEQ ID NO: 493053 - DNA, 463 bp, Homo sapiens
ctaaaatttttatgctaacttcatagtttttgggatttacttttaaaaaataggaactaccactatatacttcagtaatagttaattttacaaaaccaaatatacttaataaatttataaagatgtattttaaggattctgctttatgtttatttgcttatatgccatcctatcttactatactggaaagcacttaaaggcaagagctgtgtcatttattttgctatttccgccatctggcataggttcatagtatcttacgcatgtttttkaattaaagaataacatggcaataggtgagttaagatacagaaaagataagtatattttctccacttttcttcttaccacaccccagtcaaccttcctcagtccacaagccatgaggacacgcaagcagcactatagagaaggtatcacagcaaggaactgaggccttagccaagagccaacaccagctaga

SEQ ID NO: 493054 - DNA, 467 bp, Homo sapiens
gaaagcagagctatgaagaatctgtccatgactcttggaacttcacaaagaaaaaagaacacccaaaaagggataagcagcaccttttttctgagttttaggggttcaagtcattagaggccttctctagactttttcttgtaccaaagatgatgacgagggaaggagaaatgggggaaagaaaggtaaatgaaagatcatttgtttttgtttttaaagacaggaagcaaacacagaaaccaagtgcatggytttgttttgctttgctttgtttctcttttgcagctctgaggaatttaagccaattcagagaggtcttgttatccataatctggaattcttattaggattttaccaagtaaggtggagttggtactgattggagttgagtctgatgtgagaaagattggaacagacaatggcaaaaaaacccaatatgactattaagcgttcaaatcataaggaaa

SEQ ID NO: 493055 - DNA, 567 bp, Homo sapiens
tcttttttgctgttttatagctaagagagaaagcacttctctctctctttttttttaagcgtgatataatgtctctgccattgggttgaatatgtctgtataatctacccctattgtctataaaattccctggatagtagttgacagtcaattgttcaayaatgagtgatctatcctggaacctgcataattagatttcattttgcttagtatatattaggttggtgcaaaagtaattgcagtttttgccattacttttaatgtgaaaaactcaataacttttgcaacaacctgatatatagttttcacttggtcatttagacaagctacattaaatattgctttttgtttcagaagtctttgcttttcagtctagtaataagtttctttcacattagctttcaaaaaatgaatcttcatttctgttctaaactttaagttgtaatttcaatgacttcactatctgtaatgttctctgtcattattgctaagtaaatcacaagaaccttgtttccaaaataataattttgagaaacaatttgagagtttatacagaaattttctaag

SEQ ID NO: 493056 - DNA, 567 bp, Homo sapiens
tcttttttgctgttttatagctaagagagaaagcacttctctctctctttttttttaagcgtgatataatgtctctgccattgggttgaatatgtctgtataatctacccctattgtctataaaattccctggatagtagttgacagtcaattgttcaacaatgagtgatctatcctggaacctgcataattagatttcattttgcttagtatatattaggttggtgcaaaagtaattgcagtttttgccattacttttaatgtgaaaaactcaataacttttgcaacaacctgatatatagttttcacttggtcatttagacaagctacattaaatattgctttttgtttcagaagtctttgcttttcagtctagtartaagtttctttcacattagctttcaaaaaatgaatcttcatttctgttctaaactttaagttgtaatttcaatgacttcactatctgtaatgttctctgtcattattgctaagtaaatcacaagaaccttgtttccaaaataataattttgagaaacaatttgagagtttatacagaaattttctaag

SEQ ID NO: 493057 - DNA, 567 bp, Homo sapiens
tcttttttgctgttttatagctaagagagaaagcacttctctctctctttttttttaagcgtgatataatgtctctgccattgggttgaatatgtctgtataatctacccctattgtctataaaattccctggatagtagttgacagtcaattgttcaacaatgagtgatctatcctggaacctgcataattagatttcattttgcttagtatatattaggttggtgcaaaagtaattgcagtttttgccattacttttaatgtgaaaaactcaataacttttgcaacaacctgatatatagttttcacttggtcatttagacaagctacattaaatattgctttttgtttcagaagtctttgcttttcagtctagtaataagtttctttcacattagctttcaaaaaatgaatcttcatttctgttctaaactttaagttgtaatttcaatgacttyactatctgtaatgttctctgtcattattgctaagtaaatcacaagaaccttgtttccaaaataataattttgagaaacaatttgagagtttatacagaaattttctaag

SEQ ID NO: 493058 - DNA, 549 bp, Homo sapiens
tctattattgtgtcctgtgtaatctcacatatgtgattaaatacaaaacccatgtatttatttgttcttttggaaacctatttatttttgcttctgaggcccctaaaaagaataggtaaactttttttatgtttaattcatatttcgtatccaaagtattaacatattaaaatgcaaaccatctcaacaaaatttttatcttttccttgtagttaatacttattctggaagttacaggtctgagagagagagaattatggaaaaaatgtatttaaatagaacgtgttatgctgccaaagtcttaaatcaatcatgacaacactgttcacagtgacttgtttctttattaccccaaggcttattggttgatttttgaccattctagcacctttccatatgaacacatttccatttgatttctactgttaaatgtctatttagactgcagttmttgtgattttataagatgatttcctggatgatttcttcattttcttgacataataggtaccacattcagctattttacttttctctgtagcttccttg

SEQ ID NO: 493059 - DNA, 604 bp, Homo sapiens
tgtcacatttctcagtgccaaaatgtgaacaactattgaccttagagtttgcttatgtgatgagagcgcagaggtcagaatgcgctggggaaaatgtcagtgtggacttcatacgtctccggaatgcttttcactgcagagctcctctttgaagagaaagcccaagagaaattcttgaaaattcaaaatttttattcttttaatacattgataatcatttatgtgtcaggtgtcattttaaacacttaagatacactaatgaatgaaacaaatataaaatgtcacaattccagtagagaaaaaaagataataaaaagtataatgaataagtgaaaagtataaaatgagatagtaagttgatgaaacaaaccagggtatggggcatcagaactataattttaatagtttttatagtaagcattactgagcagttgacagttaataaaaaatatttagattattcctgcactcaacgactatctgcgagccacataaagctgtgtggaagtactgctgcatttttcaataaggtcagatatttgggggattttttttttttcagtcartactacctctgcctgttttagcccagctcagtgtcaac

SEQ ID NO: 493060 - DNA, 565 bp, Homo sapiens
tgccatgttgaattatttaaaaataaatgttgaccttaagtttgaataataagaatttcataaatttgagttaatgtcaactaaaccttaaccatgaaaagagttttacaataagaattttaaaaatctggccaggtgcgatggctcatgcctataatcccagcactttgggaggctgaggcgggccaatcacctgaggtcaggagttcaagaccagcccggccaaagtggtgaaatcctgtctctactaaaaatacaaaaattagctgggcatggtggcacgtgcctgtaatcccaactaggcaggaggattgcttgaacctgggagacggaagttgcagtgagccgagatcgcaccactgcattctagcctgagcgacagggcgagaccctgtcccccgcaacmcaaaaaaaaaagaataaagaaaagaaaagaattattaaaatctgaaattgattacccagtgaagtgagagaattttcttccctgataaaatgatgaagactgcaaaactgaaagatggtttgaaatgtgactagagaaatctttgtagaatacagggaa

SEQ ID NO: 493061 - DNA, 631 bp, Homo sapiens
ggtggttatgtaataaatatttcccacattggactataagcccctatggcagggactgtacctatttctgctcaccatgatattcccaacgtgaccctgcagtaggctctccatcaatatgtgtttaattattgaatgaatgtactgagtttggctttgttcaaagtcatactgatttaaggacaatccataatgaaatccatcacttacaacaattcatgctaatcatatgattcacctgtgtaattcattaaaagtttacactgaatgtacaaagcagggaaaagaaaaacaagaaatagaaaaaaaggaagaaggctgaactaaagcrctaattttataggtttagttttgtcagaatttaggacatttggaatcctaacattaaaagggaatttatagatgtctgttcataccttgtacaggaattctttgtacagcatccctgtggaagggcattttaacccacattcaattccttcagtcctaagaaccagctccaaggcagcttgctcttctagctccgtagtagccaccctgactacatgtttgaatcacctggaggattttaaagatcaagttgcccaggccacacctcaaaccaattaaatcagaatctctgggggtggga

SEQ ID NO: 493062 - DNA, 586 bp, Homo sapiens
taaaatcctgaaagagagaatgtgtctgygattgtctctctgtcttttatcctgagataatctttctgtacctcaaaggctttactttcatcaacagctaaatttgtcaaaactgttttcttacccaatgtacttaactgagttgtttatattaatgaaaaagagttttgcataacttatctttctttttttttcttttttttagtatttgaagagatttattctgaaccaaatatgagtgaccatggccagtgacacagccctcaaggaggtcctgagaacatgtacctgtaaagattttttttttaattggggtatggggaagataccaagtcaagatgcatgtggttacaaataagaatttttaaaaaggcagaataaacatcttgtaataaacttaataagaaatacgtaaaagaagaaaaccatattgaaatgtatatcatgttcttaaatagaaaaattcagtataacaatatcagctcttccttagttaatctactacttttatgtgatcctgataaaacggccaacaggaactaaagttagacaagctgattataatgtatctatggggaaaataaaa

SEQ ID NO: 493063 - DNA, 586 bp, Homo sapiens
taaaatcctgaaagagagaatgtgtctgcgattgtctctctgtcttttatcctgagataatctttctgtacctcaaaggctttactttcatcaacagctaaatttgtcaaaacwgttttcttacccaatgtacttaactgagttgtttatattaatgaaaaagagttttgcataacttatctttctttttttttcttttttttagtatttgaagagatttattctgaaccaaatatgagtgaccatggccagtgacacagccctcaaggaggtcctgagaacatgtacctgtaaagattttttttttaattggggtatggggaagataccaagtcaagatgcatgtggttacaaataagaatttttaaaaaggcagaataaacatcttgtaataaacttaataagaaatacgtaaaagaagaaaaccatattgaaatgtatatcatgttcttaaatagaaaaattcagtataacaatatcagctcttccttagttaatctactacttttatgtgatcctgataaaacggccaacaggaactaaagttagacaagctgattataatgtatctatggggaaaataaaa

SEQ ID NO: 493064 - DNA, 597 bp, Homo sapiens
cagaagaatatgtatagaatgcatgttccttaatttagattacgttttaaacttccaatagaatgaatataagggctcccagagataagaaccctcatttttttttcccattacaatccttttgaattttttttacaacacaattattastcagtttttctaactggttttgatgaatcccatcttctccccctaaattggtatgtattagcatttacatctcatctttctagtaatcctgagatttaaaggcagagctgccatcctgaaaataagtaattaacatgtgctttctctaatactcaatcgtggatattatttttctaattttcttgtgcattttttcctcctttctaaaatttattttatttcccatataagggattctgcaatttctattccttggcgagccaaccctaacaatgcagtaatgattagatatgctgctagacccaggagtgttacaatccttgcttctctatctttctcatttgccctttaattgggcagtgtagcatcaacatgtcatataacatttattactttgaagtgccttagacatagcataagaacaatacatgtttaattaaatgaagg

SEQ ID NO: 493065 - DNA, 639 bp, Homo sapiens
attttaaaatgttgactcaattaattctcatcaccacaattgtgatatgttctctcattattccaccatagaaacctaggcacaaaggggctaagtaacttacccgatgtcctggcgtttatcgatggtggaattatatttgagcctgtgcttgtgactccagagatttaatgttgattactatgaacacctgctcctctttatgagtcatcgtttctcagccatatgacaagctatcctgtaatgcccctgttcttctctaaaaccagaatttagcattcctctttaagactgatctctatagttgagtactttcagagtgtgtccagaaaataatctagcacagttactacaggtttgaagactaaaactcaggaagcctgtgtcagtttgaatgaaaaatccttgtggtttttgttttgwtttatttgtttgtttttagtgaatcattctgtcagtggctttgtgtcagcagctgtaagatatcttctgaatttagcgtcaatgtccggggatataatgcatcagatttaagtgactggtatccactgagtttaatctcagaaaatccccctccttgacacagaagactaaagccacacaggcccgaagtaatttctctctttattatttatttat

SEQ ID NO: 493066 - DNA, 532 bp, Homo sapiens
ctggtgaccttgagatgtcagtaaccactgcaagagtaactgcccatgcaaatatacgtcactcagcgagatgcctaaatggaaattaaaagaatattaaccatctctacgtatttgtaagcctgctggtttctcctagaaatgtggagcratatgatgacataggtattctgttgtacaataacatccttgatataaatggatattcttctaaatgaaggatattagtgtccgagaagttggggatacattggagtaaataaagtgtttattgaaagatatctcagagttgttaacaagtgaatgtccaataaaacatatggaatatgtgcatagttatcagacttttccttttttgttattaatgaactttatttttagaatagttttatatttacagaaaaattgaatagatggtacagagttcccatatacaacctctgtccctcttgcagcttctgtttgattaaaatcttgcattagtggggtacatttgcaacaattaatgaacctatcttaatatatattatta

SEQ ID NO: 493067 - DNA, 624 bp, Homo sapiens
ggcattcttgatacagttgatggttttctcatcttctgcatgcatattgatatcctctgacctcctaaatattaaggttcactctttgcaatttaaagtaatgcaagtattgacaaatgtgtagcgtcaagtatgcaccattatagtatcatatagaacaggttcactactctaaaatatttccctccatttaaccctcttgccttctstaaaccctcaaacagtatgtagtcttttcagactgggttctttaaatgaatgtatttaagtttgattcatttttattttaatggcttgatagcttatttttcataataaaattattatattgtattgatggatataccaggtttgtttataatttgcctattgaaagatattttggttagttccagttttgggaaattataataaaatttatataaacatatgtgagcattttttttgtgtgaacatacattttcaaattaattgggagacaaataggaacatgactgccatatcatatggtaagacgatgtttagctttgaaaaaatgctgaactgtgttccaaagtgcttgtattattttgcatttccaaaagtaattaataagtgttcatgttgctctgcatcctagataac

SEQ ID NO: 493068 - DNA, 501 bp, Homo sapiens
aactcctgacctcaagtgatcgacctgtcttggcctcccaaagtgttgggattacaggcatgagccaccgtgctgggcccatccccatcttaatgaatgccatggagagcagatctttgctttctttatawcatggtcacttctctctgacatattgcaaacaatgtaaagtcaagggagtttagacatcacctatttccatggctgtgaaaactaaaagagacaccggtcatttcaagccttctgtgcccagaatgcagtgctgttccaggtgttctgggccactgagctccctgaggaagaagctgcatccggctaacaggctacaacccctctggaccagtcttgcaaagggagggatgcccagctgccatgccagcacaggaactcataccatagtcttctcagtgttctgagagtgggggctcctcccgtgcttgagctcaggccacagacctcagcccaatacccctacacagtgtgcttgactcctggggcatt

SEQ ID NO: 493069 - DNA, 501 bp, Homo sapiens
aactcctgacctcaagtgatcgacctgtcttggcctcccaaagtgttgggattacaggcatgagccaccgtgctgggcccatccccatcttaatgaatgccatggagagcagatctttgctttctttatatcatggtcacttctctctgacatattgcaaacaatgtaaagtcaagggagtttagacatcacctatttccatggctgtgaaaactaaaagagacaccggtcatttcaagccttctgtgcccagaatgcagkgctgttccaggtgttctgggccactgagctccctgaggaagaagctgcatccggctaacaggctacaacccctctggaccagtcttgcaaagggagggatgcccagctgccatgccagcacaggaactcataccatagtcttctcagtgttctgagagtgggggctcctcccgtgcttgagctcaggccacagacctcagcccaatacccctacacagtgtgcttgactcctggggcatt

SEQ ID NO: 493070 - DNA, 613 bp, Homo sapiens
ttattttgaaatattactcataataactgcwttttgtttatgcaactatgacttatatcatgactgccccacctaacaattattcttaactttgtgtttcctgtatttggccctaaattttcaaaagtaaaatcacccaaatgtcttttatgcttataatatcattggatttgctgaaatgaccactgggtggcacaaaattttgctcttttgccttataaatagaatgaataagaaaataattagatgtgttttggcattttccaaatttaataagtttaaaattatcataaacactcttctttttacttttaaaaatttaagatgtatcctaaaaaggaacatcaagcttaatccattttattcctgagttctaccagagttcaagaaagaaatcatacattactttaattttaagaatacagaaaaagatgaagcatttttaaactcatgcgaaaagactaacatgaccatgactgcagataaagcaagtattcaaaatatcaatagctttccttactttgccataacaaatcacaaaagaagattacaatcacaataggaaaaagtagttattaaatttatagaaatggactaaaaataaataagatgc

SEQ ID NO: 493071 - DNA, 561 bp, Homo sapiens
aactcttctctgggctgcataaataatctctcattttccccttctatttarttgacaccagctacaacaaagaaggccagttaattagcaagttaaaaaaaaagtgtgagtaacttttagaatctgtgagaaagcactggagaaatgaaactggaagaattagttgataattcttgccttctgtttttccagtgttttatttaatccccaagtgctttcagatagtttaagctcatttctttagattgagagagaatggaggatcctgaaaggacttgggaacatgaatgaagataattagaggtgatggtgacaaaaggaatagtaaatacaggaactcacttttagtgattccatcaaacgacagcttcttcacaaggcagttttgttttactttggtttgagggtggaccattatcaacatcctataagaagagaggttaagtgacatgtgaaagaccatacagaaattaagtggcagactagggattaaatccagcacaatcagattctcagttcctaaaaactaaaaaattaaaaattaaaaattcagcctgggag

SEQ ID NO: 493072 - DNA, 561 bp, Homo sapiens
aactcttctctgggctgcataaataatctctcattttccccttctatttaattgacaccagctacaacaaagaaggccagttaattagcaagttaaaaaaaaagtgtgagtaacttttagaatctgtgagaaagcactggagaaatgaaactggaagaattagttgataattcttgccttctgtttttccagtgttttatttaatccccaagtgctttcagatagtttaagctcatttctttagattgagagagaatggaggatcctgaaaggacttgggaacatgaatgaagataattagaggtgatggtgacaaaaggaatagtaaatacaggaactcacttttagtgattccatcaaacgacagcttcttcacaaggcagttttgttttactttggtttgagggtggaccattatcaacatcctataagaagagaggttaagtracatgtgaaagaccatacagaaattaagtggcagactagggattaaatccagcacaatcagattctcagttcctaaaaactaaaaaattaaaaattaaaaattcagcctgggag

SEQ ID NO: 493073 - DNA, 619 bp, Homo sapiens
ctgggctaggagaagctgaagctggaggtggagcttggcaacatgcaggggctggtggagaacttcaagaataagtacgaggatgagatcaatacgcatacagagatggagaatgtatttgctaccattcttaataaagaattaatttattttgactgaaacacatactgtatattttttgttcccttgatacaactcacatagctgcttaacataaacatgagggggcatcttactgtcctttgttgaagtctgcacaacataatctcctatttgtttctctgcagcatactgagaagtaagaggtacgcatgcttgttcctgtgggaacctgtgaggaggtcagatctaccatttcacctctttccgcatcctctctcacatagagcatctaatgkcttcctcctccctagtgcaacaccctttctgagtacccccatttcagagggtgcatgttaaaagatacatgattttatatacctctaattctcattttctcagtgaccatcacttcagtgttgatcaagtccaaaactttatttcatctactgcgagttattaaaatgactataccttaatccaaatggtcagaaacctgaaggaaaaacttcaaagtatc

SEQ ID NO: 493074 - DNA, 539 bp, Homo sapiens
tactatatattagcaaaattggtagaaagtwcatttttaaagaaagaatacactaaatgtagaaggccaaagatttgtagaaggccaaagattccttcacaactgcagtttgaaggaataaaagaaattaccttcattttatagcattaaaaatgaaatgagactgctactgtattttgagaacaaaataaatgtactgtcaaatactcttttatcttattttaaaacatcagaattgtgcatatttttagaaaacacaaaatgttgagcatctatgaacatcagaagaaaatgatgatatagattatgttgaatgttagttttaaactatagatggctgcaagttgattatccaaatcaaatacagcatggccttcctggatggacatcagttctcattaatgctcatatattaagaaatttttggagtggagtctaggagtaaaatttattctgttataattagttgcacctgaaatgctcttcaattagctagtgtaaattaatcaaggtcttatatccaggatactgaagtattc

SEQ ID NO: 493075 - DNA, 645 bp, Homo sapiens
aggacttgatacgtaactttaaatgttgtaccagatagtgttataggcaaattttatcaatcattcaataataggtcaatccaaccttacaccaactttttcatataataaaaaaagaagggacatttcctgtgtctgcaggtccccaagaccacacccaggtttggttattcactaggaaaattcacaggactcagcataaagtcatatttctggctgtgatttattttwgtgaatggattaaaaaaatccaaaaaaggaaaaggtgcatagaatgacatctagagaaaaaccaggtgttaatttccaagagtcctttgccagaggagtcacataggacgtgattaacttttttttttttttagatggagtctcactcttaaaagtgcagtgttcagtggcattggcaagatctttgttcactgcaacctccgcttcccgagctcaagtgatcctttcacttcagcctcttgattagtagctgggattacaggtgtgtgttaccacacccagctaatttttgtatttttagtagagatggtgtttcaccatgttgaccaggctggccttgaactccccacctcaggtaatcctcccacctcggcctcccaaagtgctgggattacaggcatgagccaccctccc

SEQ ID NO: 493076 - DNA, 494 bp, Homo sapiens
ttgttataaaggacattggaatgtctcctggaacctgagagcatgatttcaatgggggcttaggaattgctataaccaagttcccacattccctcaggactccctccacatctcatgttagtgcttgtttcctagcctctgttgcattytttctccctgagagtgaactcacgtccctcacttctctgttcccatcattggaaatatggctactggcagctcccaaaatatatatcttctagttcagccacaagagactttccactctcaggcctaagaccaaaaatcctccagaagtgggcactgtgttgtgtgcctgtagtcccagctactcaggaggctggagcaggaggattgcttgagcccaagagtttgactctagcctgggcaacgtagcaagaccctatctctaaataaataaataaataaataaatatcctgaggaaagggacacatgggttccacttggttttggagctctcagctagcccaat

SEQ ID NO: 493077 - DNA, 586 bp, Homo sapiens
tgaaaaactgaaaaagacatgattcatggaaccaggattacacccattctacccaatgaaatgtggtagcctagcggagatttgctctaagaagcatagtctagagttggaaacaggcagtcttacaggagccaagactctaaactggaaggtggcaagcaaaaaaagctcagggtctgaagccargagaacaagaagatgtcaaagagtggcaaaaaacctccctaaagcaggaaccacaaccccttcttagtcattgttgtgtcctatgcacctggcacattgttttacacaaaggggcattcaggtatttactgaatgaatgagccaaacaagcctgtggagtctgttaccaggatcacaaagacatttactgttcaaatatttctatgctcctccacctccctaaacccctttgagtaaagtgtggccattgaccagtacaggtcaatggactgtgagtagagcaatgcagtacacttaagaattaatgcaggaccctccagcatctcttcccctgcagtagtgatcgtggaagtctcatatttcagatgatacagtacaagatgtgaggacttttatcagc

SEQ ID NO: 493078 - DNA, 586 bp, Homo sapiens
tgaaaaactgaaaaagacatgattcatggaaccaggattacacccattctacccaatgaaatgtggtagcctagcggagatttgctctaagaagcatagtctagagttggaaacaggcagtcttacaggagccaagactctaaactggaaggtggcaagcaaaaaaagctcagggtctgaagccaggagaacaagaagatgtcaaagagtggcaaaaaacctccctaaagcaggaaccacaaccccttcttagtcattgttgtgtcctatgcacctggcacrttgttttacacaaaggggcattcaggtatttactgaatgaatgagccaaacaagcctgtggagtctgttaccaggatcacaaagacatttactgttcaaatatttctatgctcctccacctccctaaacccctttgagtaaagtgtggccattgaccagtacaggtcaatggactgtgagtagagcaatgcagtacacttaagaattaatgcaggaccctccagcatctcttcccctgcagtagtgatcgtggaagtctcatatttcagatgatacagtacaagatgtgaggacttttatcagc

SEQ ID NO: 493079 - DNA, 607 bp, Homo sapiens
gtcctgcttgctagcagaataagaaaatggattccttcaattcaatgctatccagtctgtagcattaatcctctcttcccctctcttcctgtggaaaagcttactggctcacctatttggaaggagtcctaaggacagggagggtaaaggaatgttagcaggaaagctgcaggaagttagagaaagtctagggccagtttctggcagaaaaaaaaaatttcccccttcccccttgggcagtaaagaagaaaattaaatgagagtgtcaaaacggtttgctgatgtgcaaaccgyttactagaccttggtcaaggtctaatatctttttaagaatgatggctttggaattagaccttttggggttcagatctcagctcttccttttgattggctgtggagctgtgggtaatttgcttaatctctttgagctttcagttcactatgaaacacgaccatgtggagattaaagaatcaaatgtactacccaatacacagtaggtattcaataaatgacagatattattacttttaggtgatatagatatcatatttttgtgaggattaaatattttaatccgtgtaaagtgattggcccatgagaagcaca

SEQ ID NO: 493080 - DNA, 625 bp, Homo sapiens
gctgtggagatgcagggagtcctgcttgctagcagaataagaaaatggattccttcaattcaatgctatccagtctgtagcattaatcctctcttcccctctcttcctgtggaaaagcttactggctcacctatttggaaggagtcctaaggacagggagggtaaaggaatgttagcaggaaagctgcaggaagttagagaaagtctagggccagtttctggcagaaaaaaaaaatttcccccttcccccttgggcagtaaagaagaaaattaaatgagagtgtcaaaacggtttgctgatgtgcaaaccgcttactagaccttggtcaaggtctaatatctttttaagaatgayggctttggaattagaccttttggggttcagatctcagctcttccttttgattggctgtggagctgtgggtaatttgcttaatctctttgagctttcagttcactatgaaacacgaccatgtggagattaaagaatcaaatgtactacccaatacacagtaggtattcaataaatgacagatattattacttttaggtgatatagatatcatatttttgtgaggattaaatattttaatccgtgtaaagtgattggcccatgagaagcaca

SEQ ID NO: 493081 - DNA, 625 bp, Homo sapiens
gctgtggagatgcagggagtcctgcttgctagcagaataagaaaatggattccttcaattcaatgctatccagtctgtagcattaatcctctcttcccctctcttcctgtggaaaagcttactggctcacctatttggaaggagtcctaaggacagggagggtaaaggaatgttagcaggaaagctgcaggaagttagagaaagtctagggccagtttctggcagaaaaaaaaaatttcccccttcccccttgggcagtaaagaagaaaattaaatgagagtgtcaaaacggtttgctgatgtgcaaaccgcttactagaccttggtcaaggtctaatatctttttaagaatgatrgctttggaattagaccttttggggttcagatctcagctcttccttttgattggctgtggagctgtgggtaatttgcttaatctctttgagctttcagttcactatgaaacacgaccatgtggagattaaagaatcaaatgtactacccaatacacagtaggtattcaataaatgacagatattattacttttaggtgatatagatatcatatttttgtgaggattaaatattttaatccgtgtaaagtgattggcccatgagaagcaca

SEQ ID NO: 493082 - DNA, 633 bp, Homo sapiens
ttgagctttcagttcactatgaaacacgaccatgtggagattaaagaatcaaatgtactacccaatacacagtaggtattcaataaatgacagatattattacttttaggtgatatagatatcatatttttgtgaggattaaatattttaatccgtgtaaagtgattggcccatgagaagcacatgtgttaactgttactacyactgttagctattatcagagatagctgtgtatggagaattcctgaaacctccaatcctctgaaactagagtcaggaaacagactttgacacatagaccaaaaacagaggtgacaggttcatcttatgtaccaactggccagttggcaatgagtgcctagaatgtgcctgaggcacaattctaagagctatctggctcagtagggaagagtatgctatgatctattagtgagatgtctgttctgggtggcagagagagtcatgtcagcatgtgtgctatagatttgccttctttagactgaagcttcattctagacagtttgggagccagtaacaaagggctggggctggccttgtccacttgtgctagtctccacttgctccatgttttactcctagcacaaagttgagacatggccagagcccaaaccc

SEQ ID NO: 493083 - DNA, 510 bp, Homo sapiens
ggttcttaaagactccagttcgaaaatggtttaagcaaagactagaacttgaataagaaacaaagaaccctacagagccagacattgctgctgagcaatatgggatgtataaaaaaggacctgcataacatggaagaaggggcatttagacgaggccagacagactctgttccattactaacatgaagtttttttttcagcttttattttagatatagagggtatatgtgcaggattattacatgggtatattgcacccaagtagtgagcatagtacctaataggtggttttccagctcactccccactccctatctcccctctctatcwgtccacagtgcccattgttcctgtgtttatgtccacgtgtgcttgaacgtttagctcccacttataagtgagaacatgcagtatttggttttctgttcctgcattaattcactttggattttggcctccagctccatccatgtagctgcaaatgacattatttcattcttttttatggct

SEQ ID NO: 493084 - DNA, 634 bp, Homo sapiens
tggaggctgaagtcgaaagatagggtacccctctgtccactggctttggctcagtgactctcaatgtctttgccaaaccttccttagacttctgtatccccacctgcccagccttgtggtctgacagctctcctagctttcccagctcacttcttatttcctttctcacaggcattttcttaaaatccaygcacatttgatttctccttggtgtctgctcctcagaagacctggactgatctcctctccccttcttcattcattatatagatcaactcaccctctctggataagtccttcctcagcctccctcgcatcaattcagcatcagcaaggtgcagaactagtctggtgcatagagattggttcagaggtcttgaatggggtgagcatgtgggcagagagggcccctcttactcagttaatggaggaagggtttactcagaatatctgctcattgatatattttatcccagaactaataacatccaaaagcatttttagttcttcctgtgtgccaggcattaggatcagaactttagctgaattatttcacttaatcctcaccacagcactgggaggcagatattaccatttgcattttacagatgaaagtgagggaggctaattattg

SEQ ID NO: 493085 - DNA, 634 bp, Homo sapiens
tggaggctgaagtcgaaagatagggtacccctctgtccactggctttggctcagtgactctcaatgtctttgccaaaccttccttagacttctgtatccccacctgcccagccttgtggtctgacagctctcctagctttcccagctcacttcttatttcctttctcacaggcattttcttaaaatccatgcacatttgatttctccttggtgtctgctcctcagargacctggactgatctcctctccccttcttcattcattatatagatcaactcaccctctctggataagtccttcctcagcctccctcgcatcaattcagcatcagcaaggtgcagaactagtctggtgcatagagattggttcagaggtcttgaatggggtgagcatgtgggcagagagggcccctcttactcagttaatggaggaagggtttactcagaatatctgctcattgatatattttatcccagaactaataacatccaaaagcatttttagttcttcctgtgtgccaggcattaggatcagaactttagctgaattatttcacttaatcctcaccacagcactgggaggcagatattaccatttgcattttacagatgaaagtgagggaggctaattattg

SEQ ID NO: 493086 - DNA, 587 bp, Homo sapiens
gctggccgccttccaagagtctcagtcctggaatccaggctattctcctatccttcctctcctgcactccagagtgcyttgatcaaagccattcgagaagttaacgggtttcatggaagcacagtcgtgcggaaaggctgggagacgtggttagcttatctgtcagcaatttaaacctagatggtttccagaaatgactgagctgaagaattgaccccgaattttcggccttctgccagtaggaggaggggtggagcgttatcctccaggagaattagccccattgttccagggcaatcctcccagctccaaagatcccacaaggggctgtgcccatcagtgaagcataagacacactcggaggtttgcccagaccctgtgtctgccccaggagcttatcaccctccccctacacacaggtaaggggtagcatgtgctgtctggttgaacttgaggtctagtgaaggatgctggtaaaaaggcctgggaatccttatgtggtgaagagcactggaagccagacagagctgtgttcaagtcttggcacctgctgaccttgggcaagttacttaaccatgctgagctcg

SEQ ID NO: 493087 - DNA, 587 bp, Homo sapiens
gctggccgccttccaagagtctcagtcctggaatccaggctattctcctatccttcctctcctgcactccagagtgccttgatcaaagccattcgagaagttaacgggtttcatggaagcacagtcgtgcggaaaggctgggagacgtggttagcttatctgtcagcaatttaaacctagatggtttccagaaatgactgagctgaagaattgaccccgaattttcggccttctgccagtaggaggaggggtggagcgttatcctccaggagaattagccccattgttccagggcaatcctcccagctccaaagatcccacaaggggctgtgcccatcagtgaagcataagacacactcggaggtttgcccagaccctgtgtctgccccaggagcttatcaccctccccctacacacaggtaaggggtagcatgtgcygtctggttgaacttgaggtctagtgaaggatgctggtaaaaaggcctgggaatccttatgtggtgaagagcactggaagccagacagagctgtgttcaagtcttggcacctgctgaccttgggcaagttacttaaccatgctgagctcg

SEQ ID NO: 493088 - DNA, 588 bp, Homo sapiens
tgttggagggatcagggtgattaaatgagaaggcattccataaactttgtcccttaagccttcatttcttggccttgagttgcaaattccttcatccttttatttttctccagtccttcttcattcttctttactggcttttgattttgtttccccagggcctgacactgcagcaggcacgtggtgagtgcacaataattaggtgttgaatgactgaatggacagatagcaccaggaggggtgctgtagaggagaggcctgtactgaaagggaggtcaccgcgaaggttcaatggtacagagaattgatgaacactttttctagaataggagaaagacatctcctttgttgctttcccctcaccaacttgcctctgcttccatcccttgctccttgctactccttcattctccaagtttctggccctcaatctgcacgtactgtgagtcccaggtcttttcctctcccacagatstcgcaactccattccagtctttctgttgctgccttccgggctcagctcctcccttgcagaccctggggaatctgggcgcccagactgccctctcccatctatcctccttggtg

SEQ ID NO: 493089 - DNA, 545 bp, Homo sapiens
tattatactttaagttttagggtatattcttgtctttgggtatagtctagggtatatttttaaagtaaattttaaaaggggaaaacaaaaactagaggttttaatggattttattttatttttatagccagtcaaattcagcagtggcggggggttgtataccaactttagtgaaaytaatgttaataagtaatggattttaaaggttaaatttttttctgactttcagacattgccttaaagataagttcagtttattgtaagttgaaaattaatttctgttacctatgggataaaatatgaaacatttgaaatataaattccttgtaagattatagcttacaacataagttgttgcgaatgttccaaaattatttttgtgatttgaattgggaaattatgaagacaaaaagagtacataaaatttagagtaatttacgaatagactcttactttttcaaagtctcccagaatgttactgtggacattcagtaaagtgatgtgtatgtgtatttgttggtagggacggtgttcagggggaaggt

SEQ ID NO: 493090 - DNA, 545 bp, Homo sapiens
tattatactttaagttttagggtatattcttgtctttgggtatagtctagggtatatttttaaagtaaattttaaaaggggaaaacaaaaactagaggttttaatggattttattttatttttatagccagtcaaattcagcagtggcggggggttgtataccaactttagtgaaactaatgttaataagtaatggattttaaaggttaaatttttttctgactttcagacattgccttaaagataagttcagtttattgtaagttgaaaattaatttctgttacctatgggataaaatatgaaacatttgaaatataaattccttgtaagattatagcttacaacataagttgttgcgaatgttccaaaattatttttgtgatttgaattgggaaattatgaagacaaaaagagtacrtaaaatttagagtaatttacgaatagactcttactttttcaaagtctcccagaatgttactgtggacattcagtaaagtgatgtgtatgtgtatttgttggtagggacggtgttcagggggaaggt

SEQ ID NO: 493091 - DNA, 612 bp, Homo sapiens
tatactttaagttttagggtatattcttgtctttgggtatagtctagggtatatttttaaagtaaattttaaaaggggaaaacaaaaactagaggttttaatggattttattttatttttatagccagtcaaattcagcagtggcggggggttgtataccaactttagtgaaactaatgttaataagtaatggattttaaaggttaaatttttttctgactttcagacattgccttaaagataagttcagtttattgtaagttgaaaattaatttctgttacctatgggataaaatatgaaacatttgaaatataaattccttgtaagattatagcttacaacataagttgttgcgaatgttccaaaattatttttgtgatttgaattgggaaattatgaagacaaaaagagtacataaaatttagagtaatttacgaatagactcttactttttcaaagtctcccagaatgttactgtggacattcagtaaagtgatgtgtatgtgtatttgttggtagggayggtgttcagggggaaggtacatacacatgtctgtataagcatatacaaacacatgaacacatatattttattagcctagtctttaagg

SEQ ID NO: 493092 - DNA, 574 bp, Homo sapiens
cctgcagaggcttctgtgccacctccttcagtgtagaggagcaggcaggagacatgcccagggcggcaggatggcgtgagaagagagccgcacactgggctgcaagaacaggcagccatctcgaaggccaatgctgcctgctctggagatggagggaggccgcacagcatgggggaatcgctgggtcagatctcaaagtgcttaccttttctgggcctcrgtttccttcttggcaaacagggctgatgacacaaatagcaaatgtttgctgattccttctagatgctggggccactctaaggactttgcatgagtgatcacagtttgtcctcacagcatccctgggagatggggaccaggcctccccatatggctggtgaggggatccagcgtcacacagtttgaagcatgtgccccgggtcccttggttggtaggtggaggagcagtttgaccccagagcctacactcttaacaaggaacacctcccttagttggtgtttgtgaaggagaatggaagtgagatattgcaaggaaaaagtctgctcaacaaaggtcaccaccttgtatcacctc

SEQ ID NO: 493093 - DNA, 606 bp, Homo sapiens
tggagaaagcctcacttactctccagaaatacctctctgcaaggtttcttgagtgaccttatgacatagtgcctggttttccccagatcaaatgatctgaaaaagtgaaaggcagaaaccacaatgtcttttataacctasccttgactcacacaatatcccactagatacacaggaaagccccatctaatgcagacagagagtactgaggatatgagaacaggaagatgaagacactcagaggccactttggaggccacattcactcattgccagtcggctgtccagcactagtgtcctgctgtagagtcagaggcagcagctatgagagcatctggccagattcctcctgctgcccagcctccagaccccctttggattctgcttatttcccaagcttgctccttccatctcttgtggattctattggcttccacatctgtaagtccttattttcctaaaggcaacaggactactttctgttgtttgcaatcgataatcctgactgggacagatgatgttgatctccaggaagttgttggtgagctcacgtgataagagtaagggagaagacgaactgaggtcagagaatcaaagagagtgaag

SEQ ID NO: 493094 - DNA, 622 bp, Homo sapiens
tctctcaacagtactttagtattggtattgtccctgttgtacaaataaagaagttgaggctcggccsgggtggtggctcacgcctgtaatcccggctcttcggaaggccaaggcggacggatcacgaggtcaggagatcgagaccatccttgccaacatggtgaaaccccgtctctactaaaaatacgaacaaaaaaattggctgggcgtggttgcgcgcgcctgtagtcccagctactcgggaggctgaggcaggagaatcgctttaacccgggaggcggaggttgcagtgaaccgagattgtgccactgcactccagcctggtgacagagcgagactccgtcccccccccaaaaaaaagttgaggctcaaaaaagttaggtaacttgtccaaggtcatgcagccctagaataataagggaaaacagtgtgtcccaaaatggcattatttgtccgtggggcaggtatgtttgaatttccatccatccatctatctatctgagactggggtctcgctatgctgcttggactgttctcgaactcctgggctcaggccatcctcctgggatctaccggcgcgcagagactacgggcgcgcagggactaccgaggcgcgcaaccg

SEQ ID NO: 493095 - DNA, 449 bp, Homo sapiens
aaatacacattcctaagatatatggctcccaagttcatgaagtggggagcgatacgtctgacagataccgactgtttctcaaaatcacatgtgccaaacaaataggaaaggwcatcagagggccagtgcagagttcccagggaaagcccaaagtcctgagcccgcaattcccctgaaatctaattagatggcagacacatgcctacttcaatggcagggtagagagtcatttgttgaagaaaaagaagggccctgaaggtgtgttaaatagacaggacatgactcagaaggaggaggagagtgagtcttaaatacagggcaaaggaaagccagtcaatgaaaccttgggcacacctctacctcaaggctacactgggcctcctgcctggctaaagggagagactgagcaccgctgccagggccttcttcaaacaacataggcttcagca

SEQ ID NO: 493096 - DNA, 646 bp, Homo sapiens
gccttttgaattcacagtgctgttttctggaaggttttgtaagaatgtgtgaccaaagtatccttttacagggaaattacttctaataagagtcagtggtagcagatgcatgaaaagcatcttaaacctgttttctcactgggtcactaaaagatcagaactgattataccattaagaagtgtgagcttgcccaggaaatgcgtgaacaccctcttgtctaattggttttgtcaaatacatgaatatattctgttcaattcatttactgctgatagatttgtcaatggccattrcaaataacattattttattacctaaggcttagtgtctagaagggtgagcaggtacaatttattgccaaaaataaaaatacatttagattagaagtctactttaaatttacaagcattctcagtggttggtgaaaaataagtttccaatagaattaattatttgcaattggattagtttgattcctttagagcagtgattcttagattcaggagggaggtagaaaagcatttgaaaatcagatgaaagttaaaggtcttcactccagaaaaatacacaaacactgcacattttttatataattcagggaatttttgacttaccaagctcaacaactcgaaggtaataaaagac

SEQ ID NO: 493097 - DNA, 460 bp, Homo sapiens
gtctgttggagtttgctggagtttactccagaatctgtttgcctgggtaacaccagcagaggctgcagaacagcaaattttgccaaacagcaaatattgctgcctgatccttcccctggaaggttcgtcacagaggggcacatgcctgtatgaggtgtctgttggcccctactgggaggtgtctctcaggtgacacgggggtcagagacccacttgaggaggcagtctgtcygttctcagagctcaaacgccctgctgggagaaccactactctcttcagagctgtcagacagggacattttcgactgtgtttttcatatactttctagtatttcacttcctcagacaaactgtccctgactactgtgtactacaaaccccaacctccccaatgaagtcacagtctaccaccatactttgttttctttttcttccagtaagtaccacaccatttgatatc

SEQ ID NO: 493098 - DNA, 472 bp, Homo sapiens
tacatgtcaagtgacagcagtaatttcttataaatgcggcaacattttttatttgatctttttatattaaataattcttaagtcacacccyattcatagacatctaacattgctaaggactgcaaacaaatatagcatagtagctccagtaattttagaaagctgtgtctttcaatatgtttttattgtgtcttcttcatgcctttcaccatgataatactactaatactaccaataatactaacagtagctaataatactaatgatacctagtgtttattgagttcatatactaattcaaacacttttaagtttttggatatattctcatttgatccaccaacacacaagagagatattcttttattctgattttaccatttgcaaagaaactgaggcttagagaagtaaagtaacttgttcagattgttagaactggattccaggttctaaataggactttgaggctcac

SEQ ID NO: 493099 - DNA, 596 bp, Homo sapiens
cattcctgtccattccagccaattggtgagctcctaagcatgcaatagacactgttctttacttttrggataaataagaagtgagataaattacataccgtcagagaacttttgcaaccttggctgcaactatcatgtgaatgatagatggaacttagaagggtcatctaaatctgcagtggagaaggcaggtcagggaaaatagctgcaagaaagcaatagtagtcatgcataaaaagaaaaaaggaggctgtgggctaggataaggattcaggaaggagatgaaaggagggaagtgatttttattgtactccatccactctgtcaatttagaattctcccttctttgcatttttgctctgttttaatcaaattaatgcaaacatttgtagcttcatggttgttagaagatgattccacactctttccccaaccatattgtcaattctctgtatctgtgtcactctttcacagtgcccagcatagtgctttgcacaaagaatgttttcaataatcaatgtgttaaacaaaaatggaaattgcataatgggatgttttaaaatctaatattattaccttcaaatgaccttgctgaa

SEQ ID NO: 493100 - DNA, 591 bp, Homo sapiens
acgtccagctctagaagcctatgaactaattaccatgggaaacaggccctccaggtggcattttagaacaaagttaggagtgactgtcgctggcagttacctatagtgatgaaatgggacagttcccttatcccccttgcaggacatccgacaggggtgtggccctctccttcggtcactcgctgctcaacccctaggggaagcatgcagatgggcaggtgcagaggccgtggggagcacttctggactctggccccacggcagcctctaggggtgggtgtctttgactcccaaagcccaagtgggcatgtgttaccaagcccttttagatttgctgtttgcagacagcttgtgtgttaatcagctcaatgaaccctctgccttatcccaagagcaaggccagtrtgacaggcttctgtattctgagttcttgcccaacgtattgaaaaattggatcacatgtaagcttgagggatgagtgcgaggttttactgagcggtggaggtggctctccgagagacggatggggagcaggaagtgggggatggagtgggaggtggtcttcccctggagttgggccgcccagcagct

SEQ ID NO: 493101 - DNA, 591 bp, Homo sapiens
acgtccagctctagaagcctatgaactaattaccatgggaaacaggccctccaggtggcattttagaacaaagttaggagtgactgtcgctggcagttacctatagtgatgaaatgggacagttcccttatcccccttgcaggacatccgacaggggtgtggccctctccttcggtcactcgctgctcaacccctaggggaagcatgcagatgggcaggtgcagaggccgtggggagcacttctggactctggccccacggcagcctctaggggtgggtgtctttgactcccaaagcccaagtgggcatgtgttaccaagcccttttagatttgctgtttgcagacagcttgtgtgttaatcagctcaatgaaccctctgccttatcccaagagcaaggccagtgtgacaggcttctgtattctgagttcttgcccaacgtatygaaaaattggatcacatgtaagcttgagggatgagtgcgaggttttactgagcggtggaggtggctctccgagagacggatggggagcaggaagtgggggatggagtgggaggtggtcttcccctggagttgggccgcccagcagct

SEQ ID NO: 493102 - DNA, 591 bp, Homo sapiens
acgtccagctctagaagcctatgaactaattaccatgggaaacaggccctccaggtggcattttagaacaaagttaggagtgactgtcgctggcagttacctatagtgatgaaatgggacagttcccttatcccccttgcaggacatccgacaggggtgtggccctctccttcggtcactcgctgctcaacccctaggggaagcatgcagatgggcaggtgcagaggccgtggggagcacttctggactctggccccacggcagcctctaggggtgggtgtctttgactcccaaagcccaagtgggcatgtgttaccaagcccttttagatttgctgtttgcagacagcttgtgtgttaatcagctcaatgaaccctctgccttatcccaagagcaaggccagtgtgacaggcttctgtattctgagttcttgcccaacgtattgaaaaattggatcacatgtaagcttgagggatgagtgcgaggttttactgagcggtggaggtggctctccgagakacggatggggagcaggaagtgggggatggagtgggaggtggtcttcccctggagttgggccgcccagcagct

SEQ ID NO: 493103 - DNA, 459 bp, Homo sapiens
tagtcatgtggccacttccaactcaagcagaaggaagtacacgtcagccaccacaccaagacaggacasgactgtaggggagggcagaattgagacccaaattcaaccagtgacaggatcgctgctgctgcctggagatccacagttcaccatcgcgtagcaaagctctgagactccctggggtgacagcatcagtttcatgcagcccagcattccccatatttttaaacatatgtcctgtatttaaagcatatcttttataatccacataagtagttttctgcaaaatgcacattgaaagacacagatataatgtcaataatgtgggatttgtaatcatcagagtttcattgtcacctggacgaaagaggccacttaaactcccccacttccagcccctcgtgtctaaaacaggggtaagatctgtcctaccaacctgccagggttggagggagaatg

SEQ ID NO: 493104 - DNA, 575 bp, Homo sapiens
aacatagtcacctccctataggggcctcacgcaggttccgtccttctgctctagctcatcacttagtaccgtgtcctccagcttcactcactttgccacagatgacaggatttccatcttttttaaagctccattgtaagtatagatcacattttttaatccatttattcattgatggacatttagggttttttccacatcttagatattgtgatgtgaggtatgtaaaatagtcaaactcagagaaacaaagaatggaagagtggttgcccgggctggcgagggcagtggaaattgaagttgctgttggatggtcataaagttccagttacgcaatatgtaagtcccagcgatctgcttctgttaagagggtagacctcaygttgtgttcttgccacaataaaaaataaagaaaaagaaaggcagactcctccagctcccagcaagaaagccttgaccaccagctccttccctacctgtgggtccactgccaggagcctgtgtgctaacttctaactgattctgaaagctcaagtcctcctctctttaatcctcagtcaaaatcccttcgcttg

SEQ ID NO: 493105 - DNA, 598 bp, Homo sapiens
tgctgtgcccacactggtgcccgctcacaggcctccctccagctctccagccccttcctccttcccagtccttcaccacccagtcagtgatgaggttcctgtggagtccagccttggagctctacttttctcatgtaacacgacaccctgtaaccccacccaaccccaggtttcagttatacatcagacataaccagggtagccagaaatgaaaatccctccagatgagaacaagcaaaggcaatttattcagaacttgctgtaacaagggagttggccaccactgcttgccatggcagagactcaaagacaggcaggggagtgggaagcctcagagtggagaaggagaggctccaggtgaggcccgacggaggctgttggcctgaggagatggaggcagccaagaaacaggygtcctgtgggattggggagggggcatacttgaagttggaatatgagttgaaaatggggacaaaaattagggaagccattagttacttctcaaatgctggccacgtgggacttgtttctgcccttggtggtcagagccgcgtctctgtgtaccacctgcctgttgttcatttctgcattcagtctt

SEQ ID NO: 493106 - DNA, 527 bp, Homo sapiens
gtcaaggtgcaggccgatgtgtggcatctggtgatggctgattcctggatttcagagggtgccctctcactgcggcctcgcgtggtggatggagccaggactcgggcgtcctcctctgtaagggcacttgccccattgagggaaccccaccctcaggacctcagctaaccctaattccctccccaagacccacctccagaggcctcacattgagggttacatttcaacatatgcatttggggaagacaaacagtccatagccccctcgtctacggcctcagcccaatttcacccccaccagcaaagaagccctctggatccctcatctgccggtcatgctgcaccgtaacacctgggccctggggcctttgctggtcacagtgggtgggcacctggcatgcccatctgagtgtggccagaagagtgggccaccaagctccatgggacaatctgagagagtggagtagtagcaaagggaggggtgcccaggcgcccrtcatagctggcttctctgcttctgcatcttc

SEQ ID NO: 493107 - DNA, 613 bp, Homo sapiens
gcctgccctgaccaccctgggacaagacaatggccccaattcttgtcctgatggaatccgacctccacgcacttcttttgagtgtgtgtctgagaacagaagtgaagaatcctattattctatcatttattctacatttatggagcatttctatttcagaaactgggaccggtgtggcttgcaggaggtgcatggctggtcatggcagaggggcaggcagggtgcaagggttcctcaaacaccagcatgtaggagcctctgggaccttgtagaaatgcaggttctcactcagcagggctggatggggcctgggcacctgcatttttcacccactcccagggtactggtgctgctggtccctgaaactaggctggtgaactttgcagacagcggtgagggctttggagaatgttctaagtaccctggagtccagaaaagttgttctgtgcttcatttgagctactggtggaggcaaggccggcatgctacaggtggggcaggcaggagagtacccaggtagatgggaggccacctggaaccttctggccatctggggaacgtggaaatgggccaaaaatggmgggagttgggagaagccagcagcactggagaa

SEQ ID NO: 493108 - DNA, 556 bp, Homo sapiens
tccccccatagattcctccctacctgccttgaagtaaattgtactaacaacctccataatataaactgtcagttaccatcgggcaattttgagctgcgtggataatcctactgaaagcaaagccacattcagcaggttcttccctacctgtgttctttgaggatgagggcactcaccagtaagagagcctcgctacatggggtaggggtgggaggatccacaagggtatccttcaaaagtggtctctgtactgagtcaagctctgtgacctggggccaaccactcaacctctctaagtttagtcagtcccattttcagrtgaagtcgtaaatacccatcaggcggtgcccacagaatccagcaggtatctaacaggagaaagaacacaaaagcacattcggtgaaaataacagcaccttccttctagggcagtggtgaaagtcaagtgttcccctctcagcttcctagaaagcacctctaactgggtggctgaaaatcatgcaaatggatcctctcccagttctggaggtaggaagcctgagatccaggtgtcagc

SEQ ID NO: 493109 - DNA, 317 bp, Homo sapiens
tggatcacattaactctagggctctcagaatcacgattcctttctcagtcctacgatgattttgtggctagcacaattatattgcttttcatgttaaaaggtgttagtttgttaatataaacatttaaaaatacatgccaattttagtcaccctgttctgcatttcttcttctttttttcttccttcatttatttatttattkgagctttaaaaacagatgtagacctgggcctctccagatggttgcttactgcagggacattttgggaccatttcccagggaagatgtttagacctctcccggtgggtgtgagac

SEQ ID NO: 493110 - DNA, 666 bp, Homo sapiens
gaagtcacttcgacccccgatgacaccgttcaaagcctcctctgtttggctttttgattcctgattgacattcgctggcgaggagagataaatgccaggctgaggacaatgttgatccgctcagactattctcagggaaagacttttcagaataacaaacaaaacaaaacaaaaacccaaaaacattggtgtgcttaagggactgaatagagcccaagaggtccagggacgcagggccaggcytttcaaggggctggcaagtccattgaggagttaattgtttgggtgtacaatgagtttattctggccacatacaaagagctttctcttccaggtccttcaaaagcaaatgtctcaaaggagccagaggaggaatctgtattaatggcatctcttggggtctctgagactgagaagccttggagaatgaggaaaaaagaaaccacttcccccattctgagatgtggaaggtctgtcaacaatcccaagtccccttcaattcttgggctctccccaaaccatgtccatcactggtgaccctccctcatattctttcaggctgccattgtccatctttgaaaaagacatggagataaacttcagcctggtagaagtgctcgaaggttcttgctttgaagggaccacatttatgccagagccaccatc

SEQ ID NO: 493111 - DNA, 582 bp, Homo sapiens
ctatcttgcctgagaagcttcaatgatgtcccgctgctctgcagataagaatccacrttcctgctctggccaactgggctttgctggctctggttcctccatttctacccagcatcacttccctccagccccccacagccccaaggctcctggcagcaaggtgtccccacagcgcccacaggcccatggtcccctgcacctgaactcccttccttccatgctttgcaggctctccatccctgtcttccttttggcctcccccaaacccccacttaaagtgggctccctcaccccatgtttcctctctttgtcctcttcctttgcttccttcacagcactccttccatcctgcaatttattacttttatttttttattttaaaaatagagacagggtcttgctatgttgcccatgctggtcttgaactcctggcctcaagcaatcctcctgccttggcctcccaaaatgctgagattacaggtgtgaaccaccacacctggcccaaactgcaagttttaaattttccatttttcaactcttttcaccactagaacaccagttccaagagggcaagaaacaggc

SEQ ID NO: 493112 - DNA, 460 bp, Homo sapiens
cgagcccacccgcccccaggtgctcagcctcctcccaccgggatgcaggggcttcactgacctgcttgccggatggggccgctgtctgtgcttcctccaaagccaaacttgtcacagaagggaggtgcccagtgggcctcgcagtggcagttcttcctgttgttgcacacctttcagggcagaggggagggacgtggggttagggcatatgctctgtgcatcaccacagcagaagcaaggggggccatggtcagagcccccccccaacactgacacagccagactcagcacacgccatggtgygaataagcccaaagccggcactacacaccacacaggggcgaccaaacctgaggctgtgaagatgcatcatctgcctattagtggctgtaaagagagtgatgaagattatttgggttcatcagcttgcctcccccacccacctcacttccttctccat

SEQ ID NO: 493113 - DNA, 569 bp, Homo sapiens
ctgttctgggctgtgggttttaattagtgaacaacattgttcactccctgtctttactgtaacaaggctgactgcttggaaaggcattcaaaggaatgggggaagggaactgctgggttaaaagaaaagtcaccatttttctaattataaaagcaacatgtgcttgatgcttctggagatttgggggtgccaattaatctagctttcagttgcttccccagtggagatgatccacagagtcagatgaagatcaaaatacagcatcagcttaatgactgccaaaaaagaggcttctggtatattctggagaggatactagtttaggcctagacagtagagaggcttcctgcaatttccaacttccatcctccccatgccccgacctctttccccttcttcccagccaaagcctcaggacccattgtggggaaggtagaaatgaggaacactgctgcctagaggactccatggagggagggaggggcaagtctcacccactactgacctcaagggctgcccaacacaggggctgcagccactcccyagttagcagggaccagggattttca

SEQ ID NO: 493114 - DNA, 491 bp, Homo sapiens
ctgtttttaatgtgtcatgattgccttcctagtatragatctatcaagtttcagtagcacaattttaagaacaaaaaaatagggcctcagatacaggggaaaagttgtaaacctgataaacgattacttccactgacagtaaagccccacgcccacttctctcagactgaatcgcaagggtagatttagtaggtcagcttacgttgcattcttcaaacgtttctaccaacacaggtaaaacagtcatttctcttaaacttcaaaattttccttcttcctttcagaaaacaagagttggctgtaacagtagcaacagcatcagtcactaagtagcatcagtcactaacgttcatttgagctcctcctaagcaaaggcactttacgtgtatttttaaatttaacttttacaacaattttggcaggtaggtacttatttgtatatgagacactggaggcaaagagaggttaggcaactttgccggggtcacaca

SEQ ID NO: 493115 - DNA, 517 bp, Homo sapiens
ctaagaaaatggggcaggaaatggctttgttgcttctttccctacttcataaggctaggactcggaaatacaagcagctcctagtgactgcttagctcctaggaaatgggtgggtggagttgacatcactgtgccattgcacgcaatgctattctgatgtcctagattctgctacctttattataaagtaatttctttcttgggaattgtgaccacttaaaaaatacatataccatgacacaattcaaatatgtcagttgatacatttgttttccttatagggagctctaaagagactttgggcagtttcagacacgtgagctyacaaacagctcaacaggagcctgggaggagagttggacgaggttggactggggagtacagaaggataaaaacaaagagaggaagggggagagagagaggacgagaaagagaccaacctcaacagggattgaagaggctgcaaatgtactggcaaagcaaaggggaagcttgatacgtgaataccagataaagg

SEQ ID NO: 493116 - DNA, 517 bp, Homo sapiens
ctaagaaaatggggcaggaaatggctttgttgcttctttccctacttcataaggctaggactcggaaatacaagcagctcctagtgactgcttagctcctaggaaatgggtgggtggagttgacatcactgtgccattgcacgcaatgctattctgatgtcctagattctgctacctttattataaagtaatttctttcttgggaattgtgaccacttaaaaaatacatataccatgacacaattcaaatatgtcagttgatacatttgttttccttatagggagctctaaagagactttgggcagtttcagacacgtgagctcacaaacagctcaacagsagcctgggaggagagttggacgaggttggactggggagtacagaaggataaaaacaaagagaggaagggggagagagagaggacgagaaagagaccaacctcaacagggattgaagaggctgcaaatgtactggcaaagcaaaggggaagcttgatacgtgaataccagataaagg

SEQ ID NO: 493117 - DNA, 517 bp, Homo sapiens
ctaagaaaatggggcaggaaatggctttgttgcttctttccctacttcataaggctaggactcggaaatacaagcagctcctagtgactgcttagctcctaggaaatgggtgggtggagttgacatcactgtgccattgcacgcaatgctattctgatgtcctagattctgctacctttattataaagtaatttctttcttgggaattgtgaccacttaaaaaatacatataccatgacacaattcaaatatgtcagttgatacatttgttttccttatagggagctctaaagagactttgggcagtttcagacacgtgagctcacaaacagctcaacaggagcctgggaggagagttggacraggttggactggggagtacagaaggataaaaacaaagagaggaagggggagagagagaggacgagaaagagaccaacctcaacagggattgaagaggctgcaaatgtactggcaaagcaaaggggaagcttgatacgtgaataccagataaagg

SEQ ID NO: 493118 - DNA, 517 bp, Homo sapiens
ctaagaaaatggggcaggaaatggctttgttgcttctttccctacttcataaggctaggactcggaaatacaagcagctcctagtgactgcttagctcctaggaaatgggtgggtggagttgacatcactgtgccattgcacgcaatgctattctgatgtcctagattctgctacctttattataaagtaatttctttcttgggaattgtgaccacttaaaaaatacatataccatgacacaattcaaatatgtcagttgatacatttgttttccttatagggagctctaaagagactttgggcagtttcagacacgtgagctcacaaacagctcaacaggagcctgggaggagagttggacgaggttggactggggagtacagaaggataaaaacaaagagaggaagggggagagagagaggacgagaaagagaccaacctcaacagggattgaagasgctgcaaatgtactggcaaagcaaaggggaagcttgatacgtgaataccagataaagg

SEQ ID NO: 493119 - DNA, 561 bp, Homo sapiens
tttctgaatatttgatgttacacaagtaaaatattcagatattcaactgcagtttatcattctcatgtatgttccatactttgtatatagcacttggatatgcattttggaccaatattttatttggctttctggaattatataactgtaaygttgtatatccatggtcatgtcacattaatttttatgagtaaatactacaatttatctgattggtaaattagagataagcatgatcagggttatattggccccatttagatgctaaaccagtattatctgataacaattcactgaaccagtattatttgataacaatacaagccaatactatctgataacaattctgcttcctttgccagcttctaagatctggggctggtgaaggaagcagaatgggaacactgagtgtacatctcatttgatacatttctttctatccatcctaaggatatcaagcacaataaaaaagaatgcaaagataatgaaacaagaagctgactagctgcccaaagtaacaatatcaagttctgaaataaaacctttctctgctccatcagt

SEQ ID NO: 493120 - DNA, 561 bp, Homo sapiens
tttctgaatatttgatgttacacaagtaaaatattcagatattcaactgcagtttatcattctcatgtatgttccatactttgtatatagcacttggatatgcattttggaccaatattttatttggctttctggaattatataactgtaatgttgtatatccatggtcatgtcacattaatttttatgagtaaatactacaatttatctgattggtaaattagagataagcatgatcagggttatattggccccatttagatgctaaaccagtattatctgataacaattcactgaaccagtattatttgataacaatacaagccaatactatctgataacaattctgcttcctttgccagcttctaagatctggggctggygaaggaagcagaatgggaacactgagtgtacatctcatttgatacatttctttctatccatcctaaggatatcaagcacaataaaaaagaatgcaaagataatgaaacaagaagctgactagctgcccaaagtaacaatatcaagttctgaaataaaacctttctctgctccatcagt

SEQ ID NO: 493121 - DNA, 561 bp, Homo sapiens
tttctgaatatttgatgttacacaagtaaaatattcagatattcaactgcagtttatcattctcatgtatgttccatactttgtatatagcacttggatatgcattttggaccaatattttatttggctttctggaattatataactgtaatgttgtatatccatggtcatgtcacattaatttttatgagtaaatactacaatttatctgattggtaaattagagataagcatgatcagggttatattggccccatttagatgctaaaccagtattatctgataacaattcactgaaccagtattatttgataacaatacaagccaatactatctgataacaattctgcttcctttgccagcttctaagatctggggctggtraaggaagcagaatgggaacactgagtgtacatctcatttgatacatttctttctatccatcctaaggatatcaagcacaataaaaaagaatgcaaagataatgaaacaagaagctgactagctgcccaaagtaacaatatcaagttctgaaataaaacctttctctgctccatcagt

SEQ ID NO: 493122 - DNA, 639 bp, Homo sapiens
ctgccgcgcccggcctgttctcagatttttaacgctacagtaaatgtctttgtccatgcctccttgtgcacatgagtaggtatcactctaaggtagcagttrataactacagctagctgctaagccaaatcatgcctgctgctgttttgttacagcctgcaagctaagaaatgtttttacatttttaagtggttgaaaaaaaatcacgatatgaatatttgacaccagaaaattagataaaattcaactttcagtgtccataaataaaattttattaaaacacagccaagctaattcatgtatgcattgtctgggactgctttcacacaattgtggtagacttgagttatcatgacagactgtaaaaagtttcacaaactctaaaatatttactctttgtccctttacaggaaaaggttaccgaaatctgttctactgagtgtagaatcaataggaaaaaataggatttctgtatcacagcatttaaaacaatttttttaacaaactgtcaaatgcccttttattggttgtatcaatttatggtttatgagagagaatacctatttctcctcttcttcaccaatatttttatcctatgaatattgacttttttatgatcttatggggaattttgtgata

SEQ ID NO: 493123 - DNA, 652 bp, Homo sapiens
tactttgtatttttgtttattatagtctagagggaagtaaattaccacctcattgtcagccaataatcattttcctagaaaaagtaatttatcctctgaaagagaatattcacctgctcacctttctgattgcttcattgtgtatgtgattgttaaactgcctaccgaccacgaaataggtgtttctatactccagatccaagacaaaagcagtccaaaatagagtgtgagtcagaagacttgagatcagattgcagtcygcttcccaagtcctcccatggcagtcattatgggagacagcaaatgtcacaggcattgatattctcagcatctattcctttgtgctcatcttttgggagaatgagtcttcacacactgtgagaagatactacttcttctatcctgagggttaagaaagggagaaaatgggatatttcttttagaactatgaaggacaaaatcccagtgcaaaaagaaaatgagagaacttctgcagaaaaacccttgaagttaataaagcagatatgatgataagaggaaactttttataggttataaataccttcagatgtactttaagccacttatttagttcttggccagcaaattattgttacagtgaccaaaaagctgatagaaagcacattttatt

SEQ ID NO: 493124 - DNA, 538 bp, Homo sapiens
catttcctagtatcatgttaaaaaawttttttagagaaacaggtgaaattaatttttatagtatattttatttaacctaatatgtctaaatacatccaaagtattattttggcatgtaatcaacataaatcactaggatgttttactttctttgttctaaacctttgaaatctggtgtgctttacatttatagcatgtctcagtttggacagggcacatttccagtgttgaacagccacgtggttagtggctgccatgctgcagcttcagtctttgttcttaacctttttttttttttcccgcatatgatgtgaataacaacttagaatgctttcctgtttttttttttttaatggaatggactcatttaaaaggatctcagcaggtgaggatactgatccaaacccacggtgtaaaagtgaagtgtgaagtgctgtgattcaattctgtaactacccaaggcaaggccctggcctgcagcacggctgaagatctgggcctggaggatttcaatgaccgcccagtcgttaggagccaa

SEQ ID NO: 493125 - DNA, 387 bp, Homo sapiens
tcaactccatcagcccatttaaataaattccctctgcaggttttactatacaattttgaaaaaaaaawtttttttttctgtagagacagggtcttgcaatgttgcccaggctggcttcgaactcctgggctcaagtgattctcctgcctcagcctcccaaagtactgggattacaggtgtaagccaacacgaccagtcccctctgcagtttttgaaacccctatttgtagcccatgattccagtgttacctctggtcgtaagacagcgccatggcccggattccagcgtcacatcctggataggcaaagagctgcttgaggtccgacacctgccggaccacgaccactcctctgtctcctcctgtgagcaggtactgcccatctcgg

SEQ ID NO: 493126 - DNA, 508 bp, Homo sapiens
gcatacagcgacattctgggtagattttataacctactataatacagaaatgcatgtcattaattacggacatggtactttaaattacggtaaataagtttggtataaagtagattgtctacatttgtacttaaaagtccttcacatatttcaaatagtctctttgtttyatacaaaagacaactttaacccaaagcatttaaactacaatcgttacttggaatttacagttttagcttctctgacgatagcatctttcattctttcttccttcaggcttttcaggttttagttgtagtttgacatgtgttctctttctagtcttttttttttcttttttataggcaggatcttgctctgtcacccaggctggtgtgatcacagcccactccaggctcaaggaatcctcccacctcagcctcccaagtagctgggactacaagcacacaccaccatgcccagcttttttttttttttttttggtagagatagggtctcactttgttgc

SEQ ID NO: 493127 - DNA, 385 bp, Homo sapiens
tacctccaccgtatgagatatgtctgcactgattcattgaacataaaccctggggaagggggctcttccaggcctatcctggcatcttcgattccaactccagcctcttgtccccagcgagcttcccctagcagccaggacagacaattaccttttcaaaacttgaatactgttaacagctcccttgtaacttaccaaccctctccttgtcattttagacttygctattccagtgataaataatctgaatttttaaaatggattctcagaggctgtattttaatctatatgcttgtgctttaaatcaataaccaataaccaatttaagctcatttaagccctgttagctgccacataatgttggtgttctgctcggcatcatagc

SEQ ID NO: 493128 - DNA, 595 bp, Homo sapiens
ctgggactgctgtgaagctgaagtaactgagtattaaactagtctccgactctttagtattttaagtgaaaacaaacaacagtttgaagcagcaacagcaactcattgcatccctattccctccggttgctaatttttcccaactccagcagcaactcggtccccttccccaagcagggtcggctccgtagctctccgcgctccgacccttcagatcctcgggagcccaggggagccaggtgctgggcggtgcgtccggtgccgccgcgccccttctcgccacctctggcctctccgccactcgggctttccggccgctctggatgcctcggttgcaccccwgttccatgaccccagcctccttccctaaccctcctattggtcccttctcccccgagcgcgcgcgcacacacacactcggttcgctcccgcggagtggctctgggagcacgaccgacttcagctcagcaaaccgcggtcatgccgcccagactcctcgccccgaggccccggtccccgccgccgccgctttcgcgccgctcctttccgcctagacaccgccgcctgcggccgcctgggcggcagcccctgcggt

SEQ ID NO: 493129 - DNA, 619 bp, Homo sapiens
tgaagtaactgagtattaaactagtctccgactctttagtattttaagtgaaaacaaacaacagtttgaagcagcaacagcaactcattgcatccctattccctccggttgctaatttttcccaactccagcagcaactcggtccccttccccaagcagggtcggctccgtagctctccgcgctccgacccttcagatcctcgggagcccaggggagccaggtgctgggcggtgcgtccggtgccgccgcgccccttctcgccacctctggcctctccgccactcgggctttccggccgctctggatgcctcggttgcaccccagttccatgaccccagcytccttccctaaccctcctattggtcccttctcccccgagcgcgcgcgcacacacacactcggttcgctcccgcggagtggctctgggagcacgaccgacttcagctcagcaaaccgcggtcatgccgcccagactcctcgccccgaggccccggtccccgccgccgccgctttcgcgccgctcctttccgcctagacaccgccgcctgcggccgcctgggcggcagcccctgcggtcctcaaagttggccccctgggagggggcggcagggagcagga

SEQ ID NO: 493130 - DNA, 271 bp, Homo sapiens
tgtgcatgcgaggagttttgcagycatgcctggtgggagtctgggggaggctcctggcttcaaagagcccaagccattagcccaggcttggagacttgagctgagtgattggagggaggggctgagcagcaagctcaggaatagcccaggccggccaggaggacagtttacctaaccgtcagtggtgagggagcctcgccccagcccagagctgggtccactggccagccaggtggaggggttccttcaggctctagtgatgacctggcag

SEQ ID NO: 493131 - DNA, 583 bp, Homo sapiens
gaggtaggggaatttaaattctgcataatatctgctgtcaatagatttgcccagtaaagttttgtatcaaataagttctaagtcttatttcacatttttatctcagtttctaaatctgccattattacattggatttaggaggaaaatccattataaaaaacctgttctaacaagaagactgttttttggtagtctcttaaacttcatattgggtgaagattatgctccttgaggataagattcatactgtaacaattttctatatcctccacaatgttttgcagattcaataactatttaatgaattaagttaaatttacctatactcttacaagtcttwctctcataaataaccttctaatccgcaattcctctaaaacatacaaaaaattgccaatataaaaaagcaagaaagaaggtgttaaccattttgtcattcaaaatatgactcattctttcttatacaactacctttgtcagcattcttgccattggactgtctagcctttgacactgttatatcatggcttgtcgttagagaaggtaaagtttggaaaaaagaagcagttacgtaaagcaatg

SEQ ID NO: 493132 - DNA, 603 bp, Homo sapiens
attacaatattaccaagttatcataatgtattttctgcactcccagagcaagataagactctagttgttgctgggaactatacattgtctaaatatgggttcacattctctcacagtgattctggaatcatacacacaaatgagatcactgctgtcacatcactggaattaagacaacctctctactcactggccatgtaaatatagatacagtactcaaatcctctgaggcttagctaattattggttgatttggtctacacttaccacattaactatttgaaaagattcattgatataacatgtactaagaacagttcctgactcataatcattattaaggcaatatttaccaatatgtgacattaaaatagatactactattagataataattcatactatacattcaatatttaagcaacagaattataattttgtgaagtaaattttgtactcaaatagaaaatctaattctataattattttctgcaatattgggtcatagaaccaacaaagaatatatgactrgcttagacgtatgtatttacttatgcgattagtaataaaattcttcactcattcctagatttgaatcccagat

SEQ ID NO: 493133 - DNA, 603 bp, Homo sapiens
attacaatattaccaagttatcataatgtattttctgcactcccagagcaagataagactctagttgttgctgggaactatacattgtctaaatatgggttcacattctctcacagtgattctggaatcatacacacaaatgagatcactgctgtcacatcactggaattaagacaacctctctactcactggccatgtaaatatagatacagtactcaaatcctctgaggcttagctaattattggttgatttggtctacacttaccacattaactatttgaaaagattcattgatataacatgtactaagaacagttcctgactcataatcattattaaggcaatatttaccaatatgtgacattaaaatagatactactattagataataattcatactatacattcaatatttaagcaacagaattataattttgtgaagtaaattttgtactcaaatagaaaatctaattctataattattttctgcaatattgggtcatagaaccaacaaagaatatatgactggcttagacgtatgtatttacttatgygattagtaataaaattcttcactcattcctagatttgaatcccagat

SEQ ID NO: 493134 - DNA, 636 bp, Homo sapiens
gaatatcaatattccaaagtaatatttagagaaactatatgcttccttcttaagatgaaattaaaatctgcttatgaaacatggagaagtctgcccaaacatrctaacttggctttcttatttgtgattctgtcactttttttttttctgttaagatttacaggcaaacatatgggcgacatggtattttaaggtatttttctccctaatatcttaagtgtggcattaacttaattcctgaggaaatgtataatcttcatggtaaaataatatggattacaagggtcttaatgcaagtgttcttttgaatattataaaacttgtgactcttaaacacaaattgtcccagcatagagccctgaaaggaccaaacatgcacatgatgaaatacacaaaacatctgctccaatttatggattagatgtagtctaatctcatatgcacatatttttatctctagtagatctttaaaaagtaaaagaaacccaagcctttattcagctcctcattgacctttttccctgcacactctcatacagggatgttcacaagttttgagaacaaatttaggagtttgaagaaaatgagagtaagtcatggagagtagaagacattccaaagtggtaaatgtaggct

SEQ ID NO: 493135 - DNA, 559 bp, Homo sapiens
ctgtttatgaaaactccccccatgatccagttacctcccgctaggtccacctccaacattgaggattacaattccacatgagacttgagtggggatgcagatcaaaaccatatcaaggagataaaaaaatctagaagcatgttgaaagccgtttaaaaatattcacttatttgtggctatttattttgatgtctatttccaagttcatttctttctattctttggtacctggaatatccagacatgttcatcytttagcctggtggtttttattaattgataaaggtgttactggctctgaagctaaacatgtgagcacaacactgggctatatgtctcaaacacttttttgtctaatttccgtatgcttaatgttttgataaggcattactaacttaattatcataggcattaaggctattgcctaactcaagataaagaatgctcaatttatgttctttttctcctgtcatgtttgagattccttttcttcctatttgtcaggtccttattttattaaatattatctttttcttacatctttaactttttcctttct

SEQ ID NO: 493136 - DNA, 559 bp, Homo sapiens
ctgtttatgaaaactccccccatgatccagttacctcccgctaggtccacctccaacattgaggattacaattccacatgagacttgagtggggatgcagatcaaaaccatatcaaggagataaaaaaatctagaagcatgttgaaagccgtttaaaaatattcacttatttgtggctatttattttgatgtctatttccaagttcatttctttctattctttggtacctggaatatccagacatgttcatcctttagcctggtggtttttattaattgayaaaggtgttactggctctgaagctaaacatgtgagcacaacactgggctatatgtctcaaacacttttttgtctaatttccgtatgcttaatgttttgataaggcattactaacttaattatcataggcattaaggctattgcctaactcaagataaagaatgctcaatttatgttctttttctcctgtcatgtttgagattccttttcttcctatttgtcaggtccttattttattaaatattatctttttcttacatctttaactttttcctttct

SEQ ID NO: 493137 - DNA, 559 bp, Homo sapiens
ctgtttatgaaaactccccccatgatccagttacctcccgctaggtccacctccaacattgaggattacaattccacatgagacttgagtggggatgcagatcaaaaccatatcaaggagataaaaaaatctagaagcatgttgaaagccgtttaaaaatattcacttatttgtggctatttattttgatgtctatttccaagttcatttctttctattctttggtacctggaatatccagacatgttcatcctttagcctggtggtttttattaattgataaaggtgttactggctctgaagctaaacatgtgagcacaacactgggctatatgtctcaaacacttttttgtctaatttccgtatgcttaatgttttgataaggcattactamcttaattatcataggcattaaggctattgcctaactcaagataaagaatgctcaatttatgttctttttctcctgtcatgtttgagattccttttcttcctatttgtcaggtccttattttattaaatattatctttttcttacatctttaactttttcctttct

SEQ ID NO: 493138 - DNA, 438 bp, Homo sapiens
aatttccttttgactctttgagttccttttctgacatatataaaaaacttagtttttgggggttgttttggctgtgtataaaattcaaaactcaaaataaaataatgttccttttgtggaataatgtcctaggattttatgatattgatgaaaagatattcatatgattctcattttttgtaattatactgtgttacaggaaaaggatagcaaacctaatttaaaaagggcaagttatgaaataagaacaattcaaatgactaacagttacatgaagagatgctcaaactcatttgtaatcatamaaatgaaaaaaattaaaatgcaatcctacattatactcatcaagttgagaaaaaaaggttatagttttataattctaagtattgaaagatatttaggtagaaaggaatcttgtgccttgatgttgaaagtatt

SEQ ID NO: 493139 - DNA, 524 bp, Homo sapiens
tgtgtgccacactttcaagaaagcctacggtcaaactcttctgattggttaatgtgtgagaagatgaactcatattctttgtggtaaatcctgggttttatagcctgagcatgccaacctacttttacactgattgtatcttttgtttcatctcttttcttccttgaactcattgtcctctctccatccacagcccaaatctgctcttctgactctgcatcagtgcatgtcaataccatccaagttatgactcaagatggaaasaagaaagtcatccttcacatttgcctgccccttaattttcactgagtctcttaaagattattcctgaaatatctctcaaatttgtcttttctgattacaaccttactgacgctgcagtaagttagaaactcaacatctgtagtctaaaccgttaaaatagctgcttgacttttccggtctctgtgtagctctattctctccattttcattaagtttctttgcaaaacacagacatgatactgccaaagtttcgaacaaat

SEQ ID NO: 493140 - DNA, 548 bp, Homo sapiens
aatccaaaacttgttattttatgcattttatttatgctgttatggcatgaattcatagagaataggttccaacagcttaagcctctttcgactggttctcaaagtgtgtttctcagggtggagcaggctgattcttcaggtgaacctaggtacctttctatttggcttccttctttttctgattttccctcacagattttagaaaactatcttagctcttagagtgcttaatacacccaatacctacattagttctctttgcaagaatcttggctttaacttgcttatttaccaagatgacaacagcatcctgggtaacattgtagactcttctagttttgtcacggtaacatctgcgggcatttctttctgatcagtgctcattcccttgatgtatacaatatttcctttcttgtagactcataggtatatggccaaaggaaaaattscaagttttctaaaatgcctagagagcatacaatgggtgtccttcttctttctttttgtgtttgtcatgttggtggatcactggaagatggaagttccag

SEQ ID NO: 493141 - DNA, 553 bp, Homo sapiens
atacattgaaaatgttagtaaaaattaaaaactgtaaaaactaaactttgttatgaaattcttgtgtgctggagactctgactctgagatctgctctttctttgttaaaaatgaagattgagtgttagagaagcattaaaagcataatagtactaaatcaaaactttccctttcatgaaatctaaaggactagaagagaattaaaaggraatggctttttcagtatgtagcaaaatgtcatttaatggcacatctgtgtgtcacctaaaatcacctagaatcatgtctcgtggtttggaaacactgttctagggaaagattgtttttcttcatctggaaccctggggactcctttatcttaggagcgatgaacccatgagggaagagaccatggggagagagagaagaggaaagagggagactgggagacaaaagggcaggctctgttgaagcagcaaaggccctgagagctggaaccaggtggttggtaaacacacccctgtttagaatttttacatcacaaaaaaattagcaagaaagaaactataaataa

SEQ ID NO: 493142 - DNA, 553 bp, Homo sapiens
atacattgaaaatgttagtaaaaattaaaaactgtaaaaactaaactttgttatgaaattcttgtgtgctggagactctgactctgagatctgctctttctttgttaaaaatgaagattgagtgttagagaagcattaaaagcataatagtactaaatcaaaactttccctttcatgaaatctaaaggactagaagagaattaaaaggaaatggctttttcagtatgtagcaaaatgtcatttaatggcacatctgtgtgtcacctaaaatcacctagaatcatgtctcgtggtttggaaacrctgttctagggaaagattgtttttcttcatctggaaccctggggactcctttatcttaggagcgatgaacccatgagggaagagaccatggggagagagagaagaggaaagagggagactgggagacaaaagggcaggctctgttgaagcagcaaaggccctgagagctggaaccaggtggttggtaaacacacccctgtttagaatttttacatcacaaaaaaattagcaagaaagaaactataaataa

SEQ ID NO: 493143 - DNA, 591 bp, Homo sapiens
tggagtctctctatgttgcctaaactggtcttgaactcctggccttaagtgagcctcccacctcacccttggccttccaaagcactgggattataggcatgagccactgtgcctggccagggccttcacttttaaagacttgtggttaattgggcccacctggacaattcaatatgatttccccatctcagtgttcatgaccttaattacagatacaaagtcccttttccatataacgtaacatattcataggttctaggacatctttgggggagcccttattctgcctaccaaagaaatggatattcacaatacaatgaattgataaagaattggtgtatgtataactaatacataacatgtataatgtatttatatatgtgtgtgtataaccaataaaatcactaatagaaactaaaataacgaatcaataaatatacaaattatcagacagaaaaatggccaaagacaaagacttgttctgcccttcatggtcgaggaacacatgtggccagtgagtaygtgaaggcaccatttacagaaaccatttacaccactccattggcataaaccacagtctgaccattggga

SEQ ID NO: 493144 - DNA, 605 bp, Homo sapiens
tacattatttattcctaaagaatattgtctgcacattttggaatgaggktaggtttatttgaatgttgtttaaattaatcactgtcttcatgcttcttcttcctttttcattgggtattgtgtgttttgaaagttaagcttttaaagaaaggcctttggaagtgtgctatcacatttttgccaaaccaaaaatgaatgacaaagaatgtgtatgtattccaggaatgtgtgtgtattcatagacccacacgcttatgtgactggtagtatatagataaaatgataatactgaatacttttggtgtgagaaatcttagttaatgattgttttcttctcctggtctgtgttttctatagggagcatgaattatattttgttagagagggaatacatatcattttttagacacaaaaagctatggtagatcaaacaacagcaaaaaaaaaaaaataaaaaaaaaaggctgtttttaaaaaagaaaattccctgaaagtaggactattctagttaccataaataatgtaaaaagtctggtaggcaaagaaagtttttgtatatctacataggataatgaaatacaaaaatgcttaggaagattaatgag

SEQ ID NO: 493145 - DNA, 605 bp, Homo sapiens
tacattatttattcctaaagaatattgtctgcacattttggaatgagggtaggtttatttgaatgttgtttaaattaatcactgtcttcatgcttcttcttcctttttcattgggtattgtgtgttttgaaagttaagcttttaaagaaaggcctttggaagtgtgctatcacatttttgccaaaccaaaaatgaatgacaaagaatgtgtatgtattccaggaatgtgtrtgtattcatagacccacacgcttatgtgactggtagtatatagataaaatgataatactgaatacttttggtgtgagaaatcttagttaatgattgttttcttctcctggtctgtgttttctatagggagcatgaattatattttgttagagagggaatacatatcattttttagacacaaaaagctatggtagatcaaacaacagcaaaaaaaaaaaaataaaaaaaaaaggctgtttttaaaaaagaaaattccctgaaagtaggactattctagttaccataaataatgtaaaaagtctggtaggcaaagaaagtttttgtatatctacataggataatgaaatacaaaaatgcttaggaagattaatgag

SEQ ID NO: 493146 - DNA, 605 bp, Homo sapiens
tacattatttattcctaaagaatattgtctgcacattttggaatgagggtaggtttatttgaatgttgtttaaattaatcactgtcttcatgcttcttcttcctttttcattgggtattgtgtgttttgaaagttaagcttttaaagaaaggcctttggaagtgtgctatcacatttttgccaaaccaaaaatgaatgacaaagaatgtgtatgtattccaggaatgtgtgtgtattcatagacccacacgcttatgtgactggtagtatatagataaaatgataatactgaatacttttggtgtgagaaatcttagttaatgattgttttcttctcctggtctgtgttttctatagggagcatgaattatattttgttagagagggaatacatatcattttttagacacaaaaagctatggtagatcaaacaacagcaaaaaaaaaaaaataaaaaaaaaaggctgtttttaaaaaagaaaattccctgaaagtaggactattctagttaccataaataatgtaaaaagtctggtaggcaaagaaagtttttgtatatctacataggataatgaaatayaaaaatgcttaggaagattaatgag

SEQ ID NO: 493147 - DNA, 466 bp, Homo sapiens
gctactgaaacccatataaatgcaatatgctgcggttggctttaatrtctgatgtatacaaattgctgatgagtaaaaagaataactgcatcaacttttagcaactctgaaatttatagttagtatgcatatctttgataagtactttaaatgccatgaaatgtccagtcatgaagtaatattctgtttatacagtctcacactcactagttagaattaacaatacctttctggtttgaaatccacttaaattttatttcttagctatagaagatattttgcttaaatcttgcactttggtacttcaaaacttcatgttaagtgaagtgtcaaagagttaaacaattgaaatatcataacgcttcatattcacttgggacattcatttgttaagaataggaattgtcgcagagtcggtgccattttctggctcgtgtcctgggtacgcataaaagatttttaccag

SEQ ID NO: 493148 - DNA, 466 bp, Homo sapiens
gctactgaaacccatataaatgcaatatgctgcggttggctttaatatctgatgtatacaaattgctgatgagtaaaaagaataactgcatcaacttttagcaactctgaaatttatagttagtatgcatatctttgataagtactttaaatgccatgaaatgtccagtcatgaagtaatattctgtttatacagtctcacactcactagttagaattaacaatacctttctggtttgaaatccacttaamttttatttcttagctatagaagatattttgcttaaatcttgcactttggtacttcaaaacttcatgttaagtgaagtgtcaaagagttaaacaattgaaatatcataacgcttcatattcacttgggacattcatttgttaagaataggaattgtcgcagagtcggtgccattttctggctcgtgtcctgggtacgcataaaagatttttaccag

SEQ ID NO: 493149 - DNA, 466 bp, Homo sapiens
gctactgaaacccatataaatgcaatatgctgcggttggctttaatatctgatgtatacaaattgctgatgagtaaaaagaataactgcatcaacttttagcaactctgaaatttatagttagtatgcatatctttgataagtactttaaatgccatgaaatgtccagtcatgaagtaatattctgtttatacagtctcacactcactagttagaattaacaatacctttctggtttgaaatccacttaaattttatytcttagctatagaagatattttgcttaaatcttgcactttggtacttcaaaacttcatgttaagtgaagtgtcaaagagttaaacaattgaaatatcataacgcttcatattcacttgggacattcatttgttaagaataggaattgtcgcagagtcggtgccattttctggctcgtgtcctgggtacgcataaaagatttttaccag

SEQ ID NO: 493150 - DNA, 466 bp, Homo sapiens
gctactgaaacccatataaatgcaatatgctgcggttggctttaatatctgatgtatacaaattgctgatgagtaaaaagaataactgcatcaacttttagcaactctgaaatttatagttagtatgcatatctttgataagtactttaaatgccatgaaatgtccagtcatgaagtaatattctgtttatacagtctcacactcactagttagaattaacaatacctttctggtttgaaatccacttaaattttatttcttagctatagaagatattttgcttaaatcttgcactttggtacttcaaaacttcatgttaagtgaagtgtcaaagagttaaacaattgaaatatcataacrcttcatattcacttgggacattcatttgttaagaataggaattgtcgcagagtcggtgccattttctggctcgtgtcctgggtacgcataaaagatttttaccag

SEQ ID NO: 493151 - DNA, 583 bp, Homo sapiens
ataaatggataatggtaatgtcgtgataaattatatatgaatgtattgtaattattatttcaaaaaatattcggccaggtgcagtggctcacgcttctaatcccagcactttgggaggccgaggccagccaatcacctgaggtcaggagttcgagaccagcctggctgacatggtgaaaccccatctctactaaaaatacaaaaaaaaaaaaaatttgctgggcatagtggtgggcgcctgtaatcccagctactcaggaggctgaggcaggagaattgcttgaacccaggaggtaggggttgcagggagccgagatcacaccattgcmctccagtctggatgacaagaatgaaactccatctcaaaaaaaaaacatttctacctgaatggactactgaaagttttctaaatatatctgagtctctaatgtgatcttcaaaaccattttatcttgcattcacgtttaggataatttcaatcctactcaggaaaatcaatttgaacttgatgctttcctgaaatattagagtgtaacaacctcttcttcccctctaaaccaaaaagtacttattcatatattgc

SEQ ID NO: 493152 - DNA, 504 bp, Homo sapiens
agaaaggcaatccaaaacaatcagggacatttaatatgaactgtatattagataattcttgaaacaattgttaattgtttaagatgtgataacagcactgtggtaatggttaaaattgcctatattttttgacatgcacactgacgtttgtacgaataaaatgacattatgtctgatatttgatattaaatattctatccaaaaaaaggggtggattatagaaaaaacaagactgagaaaaatctagaatatgagtgaggtgtatgtggggtttattatactatttaatttatgtgtatctttgaaaacattcatcattttttacaagtctcttccagcctaaaactgtccctctctcctctctctgattctaatccactcctggcttgtgtggtccacactgtggctctcagccactgtcacattgctcctcccatascctttgtgtttctccttcatgagttagtaaaacaacaaaacaaaacaaaaaacacatacaaaaaa

SEQ ID NO: 493153 - DNA, 594 bp, Homo sapiens
tttgtcaacaggaatagctaattagacataagttggtagtcctggggatgaaaatattggggaacaatattgttccccaatattggggaacaaacaatgtttgattgtttgtttgtttgttttttgygtcctgtccatctagcctgtttcctgcttgaaaggtgagcgtgataaatggcacaacagcagtcattttgggaccataaagtgatcttgacaatggcagctacacagtgtgagtggtaaagcagaaagacagagaggtttggcttcctggtgctatcttggagccacagtattcacgtccaatatcttccagacgtcttttctgtgagaggaaaagcaatccctaatttatttcagcctcagtgccagtaatatttctgttttctcctagactcactcctgcccttttcagttccactctgcattttaggaaatgatgtttcccaggctcccttgccttctgccttgcagcaaggtttagtgaatgggttgggtaccagagagcaagagacagggaaaagccagagcatttcttccccttcctccctgctcctgaagagactctggcaatgggtacaagtgttcgac

SEQ ID NO: 493154 - DNA, 678 bp, Homo sapiens
agttctgagcagaacttctaccacttcttatattgtaatcttggggtaaatgcatggagtaagaaaattgagagaaggaaggagtgagctttcaggttctgtggagcagcttctgattcatgttgagagaaatggtcaaaatgtcacagaggataggccatggccccactaagtctcatggattgaaaagtgagtgtggattagggagtgctgtcttacctgaaggaacaatacgaacactcacaagtcaatgttgcccaagttgaccagtcagatcatcaactcctcttctttgaagtgtggaaagaaagatggtaagtcctcacrtgaagtgatgttcagagttctagaaagttattaccatctttaaaattcttattcaactccctgatgcctaagattctgctaacataatcagcttgcaattttattttaaatatttttggttaaaattaaaaagtaaagctaaaagtaaaaaatcatagagccgatttggtggtctaaagaagagagtaacaaggcagtgggtaccaaaagtggaagaaaggatagaagggagagaagagacacccaaatatgaatagttcgaacctgggaccattaacgaaaaacatgttttgcctcaggctggccttagaagtcagagaagatatggcagaatcttcttggtaatagtca

SEQ ID NO: 493155 - DNA, 678 bp, Homo sapiens
agttctgagcagaacttctaccacttcttatattgtaatcttggggtaaatgcatggagtaagaaaattgagagaaggaaggagtgagctttcaggttctgtggagcagcttctgattcatgttgagagaaatggtcaaaatgtcacagaggataggccatggccccactaagtctcatggattgaaaagtgagtgtggattagggagtgctgtcttacctgaaggaacaatacgaacactcacaagtcaatgttgcccaagttgaccagtcagatcatcaactcctcttctttgaagtgtggaaagaaagatggtaagtcctcacatgaagtgatgttcagagttctagaaagttattaccatctttaaaattcttattcaactccctgatgcctaagattctgctaacataatcagcttgcaattttattttaaatatttttggttaaaattaaaaagtaaagctaaaagtaaaaaatcatagagccgatttggtggtctaaagaagagagtaacaaggcagtgggtaccaaaagtggaagaaaggatagaagggagagaagagacacccaaatatgaatagttcgaacctgggaccattaacraaaaacatgttttgcctcaggctggccttagaagtcagagaagatatggcagaatcttcttggtaatagtca

SEQ ID NO: 493156 - DNA, 645 bp, Homo sapiens
aatgattttctgcatgaaacaacattttgactgcaatccattacacgagttcaggtgtagaattttccacttgtagtgtcacgttggtgaccaaaaagtttcaggttcttgagtatttagaatttcagattttcagattaggtatgctccacttataatttgtaatagaagctgaaaaactggttgctttgcttgtaaatgcaaatgtacaccattaacatgtttataygttgtcttctctgatttcattgtattgtcctggcgggatttttttcatatgatctatgcttgccatgcacaaaaattgaagacattttacattaacttaataaacacttatcttcattttttctattaacaatatttcacctattatatgctttttttcccctcttgaatttgtaaaatagatctcaatgctggagaaatcctccaaatgtttgggaagatgtttttcgtcttttgccaagaatctggttatgatacaatcttgcgtgtcctgggctctaatgtcagagaatttctacaggtaagcaatttgaggtcctatagttaaaagttctgtgtttataactctcaaatatagactctagaatacttttgttcactcagctgtacaagagtgtcttgcttctgaaatggaat

SEQ ID NO: 493157 - DNA, 517 bp, Homo sapiens
gcaggcatccttctgtccctgaacatcacagcctgtgtaatatcttgtaggccaaacaaaagtcagtaaatgtttagtgtctagaacttcttttagattcagaatgaatataagacaattggaaaataaaacagtaaaaacattcacaaatgcaaaaatgtgttggacaaaaacaacaacaagtgcaaaaagttattggacaaaagggaaagtgagggtagaagaactgaaatagagagaaagagacagagagaaagggacattggcagaaatgctcattattcatttcctctcatatctttctctaagtgagctttcctcatttttcattcccagagaacaattcaatctccttatcttttgcctatgtaaagtttaaggtggaggacaccacaacacaccgtaaaccagagagcatgggtccattgctgctcaaaggtgaacagataagagacatagyttttttttttaagtttttttagcaagttaaaagttattttatgtatattattaaaaa

SEQ ID NO: 493158 - DNA, 583 bp, Homo sapiens
tctaatacttccctaaattatttatatttcttaagaaaaaagagcaccattcactttatttttaactttggaattttaaaaaagagctgttttctcagcatccacaacgccaatttctataatccaataataaaaatagttttrttttttaaaaacttatgaaggaagataagaagtattccagaattgtaaggcttttcagtttgaataactggtatatattttcataatttttcaaaatattgattaattgttacatgtagtattatatagactggatcttttttaacatgagtttaaaagcaatagaataagagaaatattttaactgtttttctttaattaaaatatttccttggagaggatggtaatgataaattgatatagctttaaagctatttccatttaaataattttagtgactctggtacagtttctttttaaatagagattttcaatgtttcttttagaaaagaatctctatatcttttcagttgaaaagctatttaattctcaagaagcagctccaggaagaaaaggcaggaaaagtattatgaaagcattcacttcctactccaatctc

SEQ ID NO: 493159 - DNA, 424 bp, Homo sapiens
ctgtaaaattctaatacttccctaaattatttatatttcttaagaaaaaagagcaccattcactttatttttaactttggaattttaaaaaagagctgttttctcagcatccacaacgccaatttctataatccaataataaaaatagttttattttttaaaaacttatgaaggaagataagaagtattccagaattgtaaggcttttcagtttgaataactggtatatattttcataatttttcaaaatattgattaattgttacatgtagtattatatagactggatcttttttaacatgagtttaaaagcartagaataagagaaatattttaactgtttttctttaattaaaatatttccttggagaggatggtaatgataaattgatatagctttaaagctatttccatttaaataatt

SEQ ID NO: 493160 - DNA, 620 bp, Homo sapiens
taatgcacatacaataacattatagagtgaatgcatgattgagtggatgtgtggaagggacagaaaattaatgctgtaagtgtcctgttagagtattgctcaaatgtggacacccgcrgaatcatctcattctcaccgtagtttcctcccagtaatctcactggatttttctgtttttctaaattgacctctttgagacatttggaatgaaagccatagtttaattttggcatatctccagtactttcattttaggtatgttcttttatgcccatgacattttgaaactgttttgttgtttttcttttcttctctttaaaaataatcaccagttgtgaatagattactacttgcttggtgtatttgttttttattgctaccataacaaatgaccacaaacttaagtgcttaacacaaatttattaccctatggtttcataagttggaagtccattgcaggtcttactggactatattcagcgtgctgtgctggtgggacgggactgtgtttctttatgttggcttttggggataattgttttcttcctcattcaagtattgacagaattcagttccatgcagttatagggctgaggacccagtttccttgactgtcagca

SEQ ID NO: 493161 - DNA, 678 bp, Homo sapiens
tctgcatccaaacatctaccctgcacccaagcccacatgacacagtgtatgatatataatgcacatacaataacattatagagtgaatgcatgattgagtggatgtgtggaagggacagaaaattaatgctgtaagtgtcctgttagagtattgctcaaatgtggacacccgcggaatcatctcattctcaccgtagtttcctcccagtaatctcactggatttttctgtttttctaaattgacctctttgagacatttggaatgaaagccatagtttaattttggcatatctccagtactttcattttaggtatgttcttttatgcccatgacattttgaaactgttytgttgtttttcttttcttctctttaaaaataatcaccagttgtgaatagattactacttgcttggtgtatttgttttttattgctaccataacaaatgaccacaaacttaagtgcttaacacaaatttattaccctatggtttcataagttggaagtccattgcaggtcttactggactatattcagcgtgctgtgctggtgggacgggactgtgtttctttatgttggcttttggggataattgttttcttcctcattcaagtattgacagaattcagttccatgcagttatagggctgaggacccagtttccttgactgtcagcagg

SEQ ID NO: 493162 - DNA, 656 bp, Homo sapiens
agtgagaaactcagtagatttcagccaaactagcctttcagttttttgtcaaattgcttttgagttcagttcagttcctagttatttcctggtttgggtctttataatcgctgttctgcattttgttaggtctttctagcayataatgatcaaatctgataactttagctgttgctagtttaagaaacagttattgtccatgtccttctctatttttttcctttccaatattatattgcattttgctctaattgttttcctatttcaagaaattgagattagtacttatatcaatatggagaatattcataagataaaaagatctattgctattcactgtattttttattttgaataaaaatcaaaacatttgttaagcgcagatagattgaataggaataaaggatgatgtacgaaagtaaattgaaataccaatgataacattaccttatattttatttatttattcactttaaacatgttactttgaatcctttaataattaaaatatattatttgctaggcgtacactttcatgttaaaagttaaaaagtcacacataagaaactttctgtgttaaaatagcagatggtctagtaatgcagacaagcaagtaaatgcataatttagggttggctaagaaaggaatgatcaaa

SEQ ID NO: 493163 - DNA, 656 bp, Homo sapiens
agtgagaaactcagtagatttcagccaaactagcctttcagttttttgtcaaattgcttttgagttcagttcagttcctagttatttcctggtttgggtctttataatcgctgttctgcattttgttaggtctttctagcacataatgatcaaatctgataactttagctgttgctagtttaagaaacagttattgtccatgtccttctctatttttttcctttccaatattatattgcattttgctctaattgttttcctatttcaagaaattgagattagtacttatatcaatatggagaatattcataagataaaaagatctattgctattcactgtattttttattttgaataaaaatcaaaacatttgttaagcrcagatagattgaataggaataaaggatgatgtacgaaagtaaattgaaataccaatgataacattaccttatattttatttatttattcactttaaacatgttactttgaatcctttaataattaaaatatattatttgctaggcgtacactttcatgttaaaagttaaaaagtcacacataagaaactttctgtgttaaaatagcagatggtctagtaatgcagacaagcaagtaaatgcataatttagggttggctaagaaaggaatgatcaaa

SEQ ID NO: 493164 - DNA, 656 bp, Homo sapiens
agtgagaaactcagtagatttcagccaaactagcctttcagttttttgtcaaattgcttttgagttcagttcagttcctagttatttcctggtttgggtctttataatcgctgttctgcattttgttaggtctttctagcacataatgatcaaatctgataactttagctgttgctagtttaagaaacagttattgtccatgtccttctctatttttttcctttccaatattatattgcattttgctctaattgttttcctatttcaagaaattgagattagtacttatatcaatatggagaatattcataagataaaaagatctattgctattcactgtattttttattttgaataaaaatcaaaacatttgttaagcgcagatagattgaataggaataaaggatgatgtasgaaagtaaattgaaataccaatgataacattaccttatattttatttatttattcactttaaacatgttactttgaatcctttaataattaaaatatattatttgctaggcgtacactttcatgttaaaagttaaaaagtcacacataagaaactttctgtgttaaaatagcagatggtctagtaatgcagacaagcaagtaaatgcataatttagggttggctaagaaaggaatgatcaaa

SEQ ID NO: 493165 - DNA, 500 bp, Homo sapiens
cacggtagatagagaagtcataggtgaaactgggcatttagaattccttagcatggaaattaataaaaattttgaatttgtttcatagtagtctaatgaatatatgtggttaaacttgatgacctaacctccctcatttataaattggagatctaaaaaaataccttctttgaaggctgattttgagaactgtatataatgtatgtaatttagcacagatcctggcacatggtagaaactcaaaatggtggctataactgtaaatatcataattaattatatgtgcttattgttctcaaaatgaaaacaataactaaaatgtatctttcattccaaagagtcctgataggatgtaaagaaagtgtcagcattctcccatttccttgcagcccatgacactctgcccaygttggtactgctaggacatcaaagcatgtctgggaaagctaacaccttaaaggagagcatctagcaactctagatggaatgtgctgtagaca

SEQ ID NO: 493166 - DNA, 486 bp, Homo sapiens
accttcctgtacaaaagttaatacaaaaattgaaaggagtaactgttataccagatatgcaaatattaatgtaaggtcaccagaaacataaaaaagcaaaaaaaaaaaaaaaaaaagaaccctcccaccaaaaaaaaaaaaatcacagtaaatctcaagcaacagttccaatcaaaggaaatttataaaatttcagaaaaataattcaaaaagtgcttaagaattcaatgagatacaagataatactaaaaaataacacaaatcagaaaaataattcaggatatgaataagaaattcacaaaatagatattataaaaaataaacactgaaactaaataatttattgaataaagtagaaaaaaaaaataamctgcttcctatactaaccaagagaaaaagagagaatattcaaagaaacaaaatcagaaacaaaaaaggagacatgacaactgatacaacaagaattttaaaaagatcatcagagac

SEQ ID NO: 493167 - DNA, 486 bp, Homo sapiens
accttcctgtacaaaagttaatacaaaaattgaaaggagtaactgttataccagatatgcaaatattaatgtaaggtcaccagaaacataaaaaagcaaaaaaaaaaaaaaaaaaagaaccctcccaccaaaaaaaaaaaaatcacagtaaatctcaagcaacagttccaatcaaaggaaatttataaaatttcagaaaaataattcaaaaagtgcttaagaattcaatgagatacaagataatactaaaaaataacacaaatcagaaaaataattcaggatatgaataagaaattcacaaaatagatattataaaaaataaacactgaaactaaataatttattgaataaagtagaaaaaaaaaataaactgcttcctatamtaaccaagagaaaaagagagaatattcaaagaaacaaaatcagaaacaaaaaaggagacatgacaactgatacaacaagaattttaaaaagatcatcagagac

SEQ ID NO: 493168 - DNA, 581 bp, Homo sapiens
gacaggtatactaagtaattgttttataagttctattttaaatatagcatgagatctatagaagtgtatatattaattgagatgtggagcaaataaagactataaaaatgtgctttaggcttacaggaaacatcacagtcytcagaaggagggatcctatgatgttggacaagtgccacagcagaaaccctgagaagtactagcaattgctcagcagattccatgtcaatatcataaagcaataaatgattttactagtatagtaacagcttgacgagtacagtattctctcaatagtcatcagggatggatttcaggaaccccacggataccaaaatccacagatgcttgtgtctctgagataaaattttgtaatacttgcatataacctacacacatcatcctgtatactttaaatcacctctagtttacttttaatacctaatacaatgtaaatactatgtaaatagttgtaacactgcattgcttttaagttattttttattgatgtattgctattttttatttttcacgtatttttattgtggaatctgcaaagaggaagccgaggatatggaaag

SEQ ID NO: 493169 - DNA, 581 bp, Homo sapiens
gacaggtatactaagtaattgttttataagttctattttaaatatagcatgagatctatagaagtgtatatattaattgagatgtggagcaaataaagactataaaaatgtgctttaggcttacaggaaacatcacagtcctcagaaggagggatcctatgatgttggacaagtgccacagcagaaaccctgagaagtactagcaattgctcagcagattccatgtcaatatcataaagcaataaatgattttactagtatagtaacagcttgacragtacagtattctctcaatagtcatcagggatggatttcaggaaccccacggataccaaaatccacagatgcttgtgtctctgagataaaattttgtaatacttgcatataacctacacacatcatcctgtatactttaaatcacctctagtttacttttaatacctaatacaatgtaaatactatgtaaatagttgtaacactgcattgcttttaagttattttttattgatgtattgctattttttatttttcacgtatttttattgtggaatctgcaaagaggaagccgaggatatggaaag

SEQ ID NO: 493170 - DNA, 564 bp, Homo sapiens
cactgtcctcttctcatgggctagcctgtgccacagacacagtttcctcttccctttccctcccctgtttgctgaactcactactccttactctccagaatctcctccaacgctcctcctcctggaggcctcccttgcccatcccatcccaggcctgaaacttgtcctctgggctcccaagggcagttcctccacctacagtttagtttctgttaagttttctcagtgcccactgaactgaaatatcacagaagagggaaactttgtctatgttgttcccctatgagccccacacatgttaatagagcaacacacagattctgctttatattgaattctacaaataaatttacaaatctaactcctcacctayattcttgtcttcttcccaataaatttcaagtctttctatctgaaaatgatttgaacttgaagataaagctggtttttgttgttgttgttgttgtcccttctgttctcaggacagaatctgaatcctaattcccccttagcctcttctccagcctccccaacctcaatacactgcatagctcctctcactga

SEQ ID NO: 493171 - DNA, 364 bp, Homo sapiens
atagtgacaacagtaccaaggagaacagtgctaaaccattaatgagaaacttcctccatgatccagtcacctcctaccaggccccaccttcaatactggggattayatttcaacatgatatttgagcaggaatacaaatccacaatacatcaccattcatctttctaatcacatgaatgatgctcacaccaataacaactttatgaatagtcactgcagatgcagatgcattgtagttttcacaaaatgttcttctctgaccacttgttcctctggtcaactttactttcaggtacttagaaatgaaatgggctttggtgttgcctaaagagtatgtttaatgaagaagaaattcatataattt

SEQ ID NO: 493172 - DNA, 364 bp, Homo sapiens
atagtgacaacagtaccaaggagaacagtgctaaaccattaatgagaaacttcctccatgatccagtcacctcctaccaggccccaccttcaatactggggattatatttcaacatgatatttgagcaggaatacaaatccacaatacatcaccattcatytttctaatcacatgaatgatgctcacaccaataacaactttatgaatagtcactgcagatgcagatgcattgtagttttcacaaaatgttcttctctgaccacttgttcctctggtcaactttactttcaggtacttagaaatgaaatgggctttggtgttgcctaaagagtatgtttaatgaagaagaaattcatataattt

SEQ ID NO: 493173 - DNA, 484 bp, Homo sapiens
aaaaagagtaatacacctggcatcgtggctcacgcstgtaatcccagcactttggattgctgaggcaggcagatcacttgagctcaggagctcgagaccagcctgggcaacacggcaaaactctgtctctacagaaacatacaaaaattagctgggcatggtggcaggtgcctgtggtcccagctactggggaggctgaggcaggaggattgtgtgaacctgggaggcggaagttgcggtgagctgagattgcgccactgcattccagcctgggcaacagagtgagaccctgtctcaaaaaaaaaaaaaaaagtaatacattgatttttacagtttgatggataatgcttactaaggctctttgcataggagcagtggaaaacagttctagctagcttacacaaaaaaataattttttgcagagacacaggtttcttctaaaatccaaggggaggaatccagttgaacttctccctcaaaccaa

SEQ ID NO: 493174 - DNA, 469 bp, Homo sapiens
ctcttgaggggtctgggatgggttggtgatggtgagcaagtaaacggtatttcctgctaggctcctgcataaagtttggagcttgcagaactgagactggatagggttgtttgccactgacaggaggtagcattgcaaatcagtgtatgtatatgggtagaagtgtgcaaagaagcaagtgtcctggtcatatggaaactgaatggtccacgtgagacagtagaagggctgctgcccatcayccgtgttgttcttgtagtacttgatttcatttccttctctcctccagccaatattgcgggtgttggcatccaattgggagtacaagagtggcttcatccctacagtataaagactcttgggttttagcaagttgacaatggtgaagcgataggtagcatcttttctggtgttctgaacacgaaaataaaaccactgagtgtgtttgttagtgtagaggtcagttcgc

SEQ ID NO: 493175 - DNA, 581 bp, Homo sapiens
taatctctaattatagaatctctattgctggtgatgtaagtggctgaatctgtggtttgacttctatgatccctggctttatgaaaagctgggatttttcgataatgtttgttccctctgcataataaactaaacaaatttaaattaactcttggggcaaatataattaagaaactgcagatgatatttttgttccttttgctgaccagagtatgccctgtgactttggatgaagctgttaagtgctgtttccatgggattcagtccagagccttcagctctgacgtcctaaggtatttggagaggccaaggtcaacatcggcaattatgagttttaaagaaagtttatttctttagtggtttgtatttagagaagatttcagacagaattattgcatttcaactttactcttaactcttcatcaatcatctgcctttctcattcccactctgtccactgactgttttgcaaagactggttyaatgagaaacaagcatcaaggttcaatctaggtaagttatgaatattaatatactagcctgtgaggtttgctataacaaatatcatacactgggtgact

SEQ ID NO: 493176 - DNA, 646 bp, Homo sapiens
tattgctattagtatagaaatgtgaaataagcattccaccacaaaaataagttttcttttgctgaactcatttgggttaattctgcaaggattaactgagcactaggttcagaatattgagctttaagaaaatttttataaaagcaatattgttatcagtagtagttcatatctgctgtgtgcctccaattggcaggcacttgtggaattgatggtattattctcattttacagaaaaggaaactgagcccagataacttatgtaatttggccaaggtcatacactgagcaagtagcaagcagaattctgtctcacgtgaaaaccattgtgtgagagartttgaccagtattttggtagctgtagaatttttctcaagcaactacgaagtctaggggactagtgcatactaatggaaacttttcatgtggagtgtcttcttatctgaagctggaggcttcaaagaattaaagagaggatcttgatagggctaattattttctttcccacagctctgcccagctgttcccattttaccccttttgtatgaaggcattcatatgattttgttgtagaggcttgtgatgatgacttcttggcaaaaagcctcaccatgtttttctagtgtgctggaaacatgatttcta

SEQ ID NO: 493177 - DNA, 606 bp, Homo sapiens
acctggtaggacagatcacccatccactggaaggacatgtatgtggcagtggtgtagatcaggggtctccaaccccagagccatggaccagtaccggcctgtagcctgttaggacctgggctgcacrgcccgagaagatgagcagtgggcagcgagctttactgcctgagctccgcctcctgtcagatcagtggtggcattagattctcaggagcatgcaccctattgtgaactgcgcatgcgaggaatctatgttgcgtgctccttttgaggatctaatgcctcatgatctgaggtggaacagtttcatcccaaaacaatccccgtgccccagtccatggaaaaattgtcttctgcaaagccggtccctggtgccaaaaaggttgggactgctagtgtagattactcatagacaaatctccccgtccccttgtcatgggttccttgatcctcagaacaagtatctcttcatggaccccatcccacacagtgtgtccaagtccccactctctgttcaggaggacttacaagtggcccatggtgccaaaaggcagactgtcctcaggtaatgggtcagtgaggggtgggaaggaatattactgagga

SEQ ID NO: 493178 - DNA, 606 bp, Homo sapiens
ctgatgaagcttagacttttaaattgagcccattttaaaaattgtatcttaaattgctattttaatgcaagcaattttaaataaaaatatttggtgttccagatatagagaatgggtaatagaggagtagggtacatggagtagrcctagaaggaaagtcaggatcttaaaggttacgaagtttgaagttttggggtttttttaagtgcctaatggctaatatttttaatgtatgtaccatgctaaaagtactgcaaaagtgttgaaaaacaacaaaaacactgatagatttgttaagatagatttcttaaaacaaattgaacattttatacataatttatcaaagcccattttggagagagaagaatatcagtttttctttttcttaggttgatattggcagtatgttttcccaaagtaatattatagccctatgttccacttgtaaaatactcaactgtttctatgtgtaacaaatttattactttccaatagattttcacagtgttctcatattcactgcataaattccagataggtatttgatacttaacttctctctcttactacagatccactttgcatctcatctcacccaaaattcag

SEQ ID NO: 493179 - DNA, 592 bp, Homo sapiens
aaccaggaagggaatgtggaggtcatcttcagagtctaacttctccacttaacaggcaaggatatcatatccaaagagtcccagtaaagttcagatcacacagctgaactagaagaccggtcattttagtgccaaactattgcacagattttttaaaatgttattttccaatttttttcctaagctggaccaccgctacttactgcttttctgcaaggtgcatggggggctggggtaggattgaggataatgtggagagaagggggttgatgagattttactgtagacatgacaatcacttggattcctcacccctcatctcaaaaacaacctgagtcaggtatgtctcaataaagctaaaaaaatgttgggaaatagcttgtagccaagattagaatatttccagtattctctaggaatactggctacaggttagagtagaatattcccaatattccaagagagtgctctaagagaatactcctcattccttgagtcatgaggataagccagaattcctttacagtatacagtctctccccagactgtgcactcaactgtcrgcaggcacttgacgttgatctgacctcac

SEQ ID NO: 493180 - DNA, 579 bp, Homo sapiens
gtaagaaatcctcttcaaagagaatgtaaattaaggtggggtttcctcatctgtcaatctttactttgagtgtaggcctgtacaaatcrtctaattaatatggctgtaactgctgctgggaacattccatcgggagacaatgagaacacttcccagtggtgtaatagaagagatcctcagggaggagtagtctgacagccattgccttgacatggcaattctggaacctttgaaaaaatgaagtaatgccacatactcagcgtcttctggagatgcagtttacctaagactgggtgtttagttatagggcacataaaggttgagtggccttctaggttaaagtaatgatttaacttactaggatactatttataatactcaggatgatttgataattgtccagaaaaaaatggattttttaatatatctcataagactcttaatatataggtttatcctccatctccttttttaaaaatttcagtagcatttggggtacaattggttttttgttacgtgggtgaattctatagtggtgaattgtgagattttagtgcgcctatcacctgagtagtgtac

SEQ ID NO: 493181 - DNA, 648 bp, Homo sapiens
gtgatgtgactctcctgcctgggcccttctctcagtaagaattgtgacatatcactggatctagcacacagctgacgttacattcttgcctgtgccatgcccactaaaattattgtgacctctttctgtatccacatataggtgatataaccctcttctctggaatgggccccacacaaaggaaggatagtgacatattgcaagcccaggcacacaggtaagggtacttttttgccagagtcatggacaaaataggtcattgtgacatatctctgggcctatgacctagggtaagtgactctcctgcttgggccctgccaacctggagtgtgacatatttctaggccaggcacacaggtgagggtactcttttgccagggctatgcttcatagaggacattatgayatatctctgggcctatcacctaagtcaagtgactccctccttgggccctacccacatggagcattgtgacataaacagagaacctgtacctagttgatgtaactctcttgtctgggtgctgtcctaagagagccttttgacatatctcaggacccagcacccaagtgatgtggctcttctgcctcatttcttcccacatgttacactgtgacatattcctaggaaagcagctgggtgatatg

SEQ ID NO: 493182 - DNA, 542 bp, Homo sapiens
tgttaaatataaatttttttctagtcctcaatgttcctattactgaacacatatctttcaggaagtcaccagtggaattaaaaataagtgcatttttrtgtgacatattttcagttttacttgcgctttgtgacctcttcttgcctagacaaagttgttaaaatgcaagagggagatgtagttgtgaattgttttcctttgtggatttgcatagaaacctttccctcattctttcaactggttttcctccccatgcaatattcataggtctgtttctaagcaaggactgtggctagtaggccatgaaaacttcctagacttggcagactgggctgtatcatcttcaccctctaacatgagaaaatccagcatggcagttttcctgcaggcagttcagattcctcgtagacatatttaacagtgactgaggaggaagtctctgtatctccccagcatctatagtatagatggaactaattaattcatgatctaaagaacaattaaatattcccaagaccacaagaattagcataaaatgattt

SEQ ID NO: 493183 - DNA, 471 bp, Homo sapiens
gcagctgctatgcgctttctgcacagaggtgtggtaggcgcccaacttacagcaccctgaaaaggacaggagtcatagaggaggacgatggggccttcagtctggtgtatggtgtggaagaagtgttggagaggaggaagactggagagtgtcttcctcggtgaggtgttgagtgctctttatctgtgtgcaggtgcttacatgggttgaagaagagatttttgctgctcttccaggagcctgattcttggtacactgattccttctttttcagggtcacctctgttttaacttacggtaaccctttttaaatsgttgcgctaaggtctgctagaagcaaacctccccgtgaaagaagtccaattgctttcatggactttgtgaaagaagctctcatccacgttgcccatttgaacaaatactttttaaaaagttagccagttgttgcttttctctgcaaacctttggctt

SEQ ID NO: 493184 - DNA, 569 bp, Homo sapiens
agagcgagagcaggactgtgtttgggcagggagtgaggggccctggggtggccaggaagacagatggcagtgccctgtcatcttaagcccagaaaaggccatttataaggaggactgtcaatgtcagaattggttgggaactgtggacttatggggacagtcatgctggcgggggggtggggacagggaggtatttgaagagtgtgagtagaagggcttctctttgtagagatgaggctaggggatgagtgtttggaattctgcagctctggggagtggctgtgagcagagaggggccctggttcgggcactgggtgtttgtggtggttgtgggtcgggtgggtattgcagcttggagaaagccccagacccctaccctgggcccctaacttgtgcctcttgtccctgccttcaccagacagagccaccatggkgacgacggccccagggcccattcacctgctggagctatgtgaccagaagctcatggagtttctctgcaacatggataataaggacttggtgtggcttgaggagatccaagaggaggccgagcgcatgttcaccag

SEQ ID NO: 493185 - DNA, 598 bp, Homo sapiens
ctgaaaatcttcatggttaacaattactaataggttatatgttaggttacttttcagtcccactcagctcaaagggtttgtcattaccctactgatttgcaattctaagtcttctgcctgttgcattctgatgatccatttctacgcaagacatataatctaaagctgagacacagcaatagaagaccaaagaacagacacagcaacaaagtttgcatgaggcaaatcaggagggtaggaatgagattttgatgtgcatcctggccaaattccagaactagcaaagagagcgccagttcctaattccaatcaaagcaaattcagccatcttattttcatacagaagtggtctacgttgatttttaaatctctttaagggattagggagcctctgaaatataaaggaaactaaactgatagtaatgtaaaatgagcagtgacctatcatactagcaaacactgtcaaaaacagaaagctaatggtgggattggagtctagarcacaggagttatgtttatccagtgctgcactacacaacagggcagtcacttgccacatgtgcaatttaaatttaagtaaaattcaattaaacattcc

SEQ ID NO: 493186 - DNA, 633 bp, Homo sapiens
atatagcacacacatggtttccagtaattctgcaagctgaagattaagatttgatgaacctccatatacctaagtaataatacaatacattgcagttatttgcacaaaggcagcaaatcaaaatacatatgcaaactgaacttgagtccttcacacatgaaattattaatttataaaatatccttttaaattgtcatataaaattctggaaatttgtatagctggaaatacatgccaataatttcatgactctttaaggttataaagcctatggraaaaagttcaagattagatctaggctgtagtgggatatggaattgcagttatttattctaagtattgacaaaaatactgaatttagaaagaaatacaaccaaaactgtgttttaagaaaatttaatatgcagacattctttcagatgaatgcaggatggattgaagaagagagattgaaggctggaatcagttgggcaatgggagataataagagtacagaaaagaatggtgttagtagaaatgaagatgaacagaaaaagctaaaagacactggacaggaagatctgaaattctaagaaggcacctaaagacacaacttgggaatatctggtaacccacccagagaggctgtcaggc

SEQ ID NO: 493187 - DNA, 324 bp, Homo sapiens
ttatgtctagtaatgaaactccaataagaaatctggacaccgatgcatagtggagcttcctaattggtaaacacacattaatgtgcccaacataaataggtatagctagggtatcatcatgtgcctggagggtgatatgtcctgactatactttctctcagaatttaccctgtgtgtatcctttctaataagactgtaatggtaagtacgaccctttagttctgtgagacattctagtaagttatcaaacctgagagtgttgtgagaacctaatwtgtaactagttgataaaaaatgtgagtggcctggggaccccatgtgcag

SEQ ID NO: 493188 - DNA, 545 bp, Homo sapiens
ctgacatctgaagtaagtcttcttggggaccgtatcctcaaacctgtggattctgatactaactccaggtggttagcatcggaactgaattgcagtgcatcccagttggggtagaaatggaagaacaggtttgtcacagttgtctccatggtcagtgtctagaggctggctctgtcgtggagttgcacagtgaattctacagaagactgggaggactttttgtgacatgaaaggcctagctccagcctggccactttcagctctcagcacgactggtctcattagcactttgctgctggaatgccctggacagcaggcaatcctcttagataggagactgaaaatacgggtcaagtccagctcccttctgctgtgtgtccctgagacccccaggaacctcacatgacagggggagggtaragagcttcaccaatgccccctcctcccacctggcatcgctctccaagtctttttgtcctgttatgatggcatgaaggtggggtatccagccccctcagtaagtaaatgtcccatctgggatatga

SEQ ID NO: 493189 - DNA, 499 bp, Homo sapiens
tggcccaggagtctacttttcaggtaagtttctgtattgagtgatgaaccactgagaacagactgaaaaggacaaagtctttggaatgactctatcagtagtctattgtcaaatggtcaccacatcaagggcctttgccttcaaagaaggcaatttattcttctgcataattcatagatcttccacttggaaatgttctgaattacagtttcttattcaaattaggtttaagaaaacagtttttatttcctagacacttgcctctcaaagcatatttcttgaggtttagcaactattctcttagtttttcagggactggtaactcaagaatagaattgggaaggttttgacctccccaatataagaagggaagagtggcagtgtttgtgctttccttagtagttttctggactgtggcctcttttaagtcacatagggtgactgtcttgctgcacrtcactgtatgcatcctactgattgatccactagggtgactgaa

SEQ ID NO: 493190 - DNA, 546 bp, Homo sapiens
tggttggcaggggggtttcccctttgggagatgctactgtgattcatatgtgtgggttgactacaaagaagttctgagtaggsaaaggaggggacaggagaagaaaaaagagagagagagggaggacagggatgggcaagttaagacaccacaaagcagcaagcattgaacaggacaagggctgtctttgtcctaggcattctgggggcacaaaggagaatgggacatagcccccattgagaagctaagctttaggccaaaggcttaaagacaaaggcacagcttcccgtgggatgagaaaaagtacccccaggaagggcaaaccaagacagatggaatcacttttacaaaaaaaaaaaaaaaaaaagaaaaatacccagactgtccaagtcccacattttatatctaaatcctagcaaggcctggaaatgctaatgataaaaatttcgctgaaaatacacacatttctatctacttctcaacctggtaaacagggtccttcgtcatctattcctttcttatctctccagcttcatcactcatctc

SEQ ID NO: 493191 - DNA, 546 bp, Homo sapiens
tggttggcaggggggtttcccctttgggagatgctactgtgattcatatgtgtgggttgactacaaagaagttctgagtagggaaaggaggggacaggagaagaaaaaagagagagagagggaggacagggatgggcaagttaagacaccacaaagcagcaagcattgaacaggacaagggctgtctttgtcctaggcattctgggggcacaaaggagaatgggacatagcccccattgagaagctaagctttaggccaaaggcttaaagacaaaggcacagcttcccgtgggatgagaaaaagtacccccaggaagggcaaaccaagacagatggaatcacttttacaaaaaaaaaaaaaaaraaagaaaaatacccagactgtccaagtcccacattttatatctaaatcctagcaaggcctggaaatgctaatgataaaaatttcgctgaaaatacacacatttctatctacttctcaacctggtaaacagggtccttcgtcatctattcctttcttatctctccagcttcatcactcatctc

SEQ ID NO: 493192 - DNA, 480 bp, Homo sapiens
ctctcccaccactttttggctctatttccatcccagccccagcactgcatatacattaaaaacatgtctaaggcatctggactgaaacccagcatctgctgtaagaaaaatgagattttcaagtaaggcctctttggagtgggatggtgccaagtgagatggggcctccaaggtagactccatcacatggmaacttaaaaacaaatttccccaggactggaaaatttgctttgagcaggattccagaattcatgcgagaatatgttccactctttgcttggggctcttgcctcaaacgcctgtcatcagcaccatcctactgtcctagagggcatctgggcccttcaccatcgatgtgcaggcatcccagtgccagcatcacagcctgctgagcattgtgttggttttaccattcagggtgaaacaattttagaatgaggcatccatgcccatgtagtggggcaaccgtgcagtaacaac

SEQ ID NO: 493193 - DNA, 554 bp, Homo sapiens
ttcatccatccaaggttgcacagctagtaggaggcagacccagaattcaaatgctgtctgattccaaaggccctgttttcacccctctaccctatcgtattcaaatttatatgctttcggcacggtgcagtggctcacgcctataatcccagcacttttggaggctgaggcaggcagatcacctgaggtcaggagttcgagaccagcctggccaacaagacaaaacctcayctctactaaaatacaaaaattagctgggcttggtggcaggtgcctgtaatcccagctacatgggagactgaggtaggagaatcacttgaacttgtggaggtggaggttgcagtgagctgagattgagccactgcactccagcctgggtgatagagcaagactctgtctcaaaatttaaaaatatatatatatatatatatactttcaaagtatgtcaaaagtttttggagagcagaaggacttctaagatctgtgtgcactggagagctccctgtgcagccacttttatttttagaggctgccctcttttttttttttaactc

SEQ ID NO: 493194 - DNA, 581 bp, Homo sapiens
gaccaacctcaccagaaactttctctctccctagtctgcacccttggcatacctttatgaacagggccctgcagtggctggtgcgcctccagaaatcacatccatgttccaggcaaaaatgaggcaattaggcctaaagacttctccttgaagggctttgtctttttgttggtgaaaakaagccagtctcagtagacttctgtctacatctcattggcaggactctataaaaccatcagatctcatgagacttattcactaccacaaaaacagtataggggaaactgctcttatgattcatttatctcccaccgggtccctttcacaacacatgggaattatgggagccacaattcaagatgagatgtgggtggggacacagccaaactatatcattaaggaacttagaattagctggtgtcaaagctacacagaagaatgcaaaatcatttaggatactgctcagacttcacagttgtaaagagacatataacaattcattgcagaattctttgtcatcgtaaaaaaatgaaagcaacctaaatatctaccaaaattagaatggaaaataaattttgtaa

SEQ ID NO: 493195 - DNA, 581 bp, Homo sapiens
gaccaacctcaccagaaactttctctctccctagtctgcacccttggcatacctttatgaacagggccctgcagtggctggtgcgcctccagaaatcacatccatgttccaggcaaaaatgaggcaattaggcctaaagacttctccttgaagggctttgtctttttgttggtgaaaagaagccagtctcagtagacttctgtctayatctcattggcaggactctataaaaccatcagatctcatgagacttattcactaccacaaaaacagtataggggaaactgctcttatgattcatttatctcccaccgggtccctttcacaacacatgggaattatgggagccacaattcaagatgagatgtgggtggggacacagccaaactatatcattaaggaacttagaattagctggtgtcaaagctacacagaagaatgcaaaatcatttaggatactgctcagacttcacagttgtaaagagacatataacaattcattgcagaattctttgtcatcgtaaaaaaatgaaagcaacctaaatatctaccaaaattagaatggaaaataaattttgtaa

SEQ ID NO: 493196 - DNA, 581 bp, Homo sapiens
gaccaacctcaccagaaactttctctctccctagtctgcacccttggcatacctttatgaacagggccctgcagtggctggtgcgcctccagaaatcacatccatgttccaggcaaaaatgaggcaattaggcctaaagacttctccttgaagggctttgtctttttgttggtgaaaagaagccagtctcagtagacttctgtctacatctcattggcaggactctataaaaccatcagatctcatgagacttattcactaccacaaaaacagtatrggggaaactgctcttatgattcatttatctcccaccgggtccctttcacaacacatgggaattatgggagccacaattcaagatgagatgtgggtggggacacagccaaactatatcattaaggaacttagaattagctggtgtcaaagctacacagaagaatgcaaaatcatttaggatactgctcagacttcacagttgtaaagagacatataacaattcattgcagaattctttgtcatcgtaaaaaaatgaaagcaacctaaatatctaccaaaattagaatggaaaataaattttgtaa

SEQ ID NO: 493197 - DNA, 581 bp, Homo sapiens
gaccaacctcaccagaaactttctctctccctagtctgcacccttggcatacctttatgaacagggccctgcagtggctggtgcgcctccagaaatcacatccatgttccaggcaaaaatgaggcaattaggcctaaagacttctccttgaagggctttgtctttttgttggtgaaaagaagccagtctcagtagacttctgtctacatctcattggcaggactctataaaaccatcagatctcatgagacttattcactaccacaaaaacagtataggggaaactgctcttatgattcatttatctcccaccgggtccctttcacaacacrtgggaattatgggagccacaattcaagatgagatgtgggtggggacacagccaaactatatcattaaggaacttagaattagctggtgtcaaagctacacagaagaatgcaaaatcatttaggatactgctcagacttcacagttgtaaagagacatataacaattcattgcagaattctttgtcatcgtaaaaaaatgaaagcaacctaaatatctaccaaaattagaatggaaaataaattttgtaa

SEQ ID NO: 493198 - DNA, 650 bp, Homo sapiens
cacgctactgcactccagcctggcaacaaagtgagactctgtctcgagaaaaaaaaaaaaaaaagaaaagaaaagaaatagcaatgaagacaagaaaatgatacaaaatgcaactcagtgtgagtcatgaaattttacttagtttacataggtccttacattgtggcaagaatatattaaaataaggttttaatggaacatttcaaagctatttgatttcctttctttttataatcaagagcacaactgcaagtccctttttcccgtataacaaaaatatttctgactcaaaaattctgtgagaatttctgctcactctgtaccatttcttaaatatgagttttacctacactcttttctatatgagatcatcttgatttcagcttaaaggaggtttatttaaaatgctgagacagtaatttccatgaattacctgtcactatggggaacatggagatgggagactagatcaagcctgttgagattcaaacttgttcttccaggaaaatcagatctgaacttaacaattatacacatgaatagatgggagcagccaaaagtcatttctatttaatgcagaaggcattagaaaacttatgaartaaatttgcctccttaattatgtttgttgacactgactctgaaatgag

SEQ ID NO: 493199 - DNA, 606 bp, Homo sapiens
tacccagtagtgggattgctgggatcatatggatagttctatttttagttatttgagaaaacctcatactgtcttccataatggctaaactaatttacattccaatagtgcacaagagtagtaaaagacattttgagtattgtttgtatatgtgtaaatgagaagtaaagtcatttaggtttataagatggtctgatatgcaagtataaaaaatattcagcccagccactttgatacctaatgagataatgattttgttctctttcattctctgtgtrtttttttcaactttgtctcccacaacatccatccatgcagactttgctgtagcctcatccattggcttatctggattgcttacttctatatcttgatcttcccaattcctagtgcctggaatgtcccttcccctcttcattctctaatatctaaattctccttttccaaagcctgattcatagctactttctctctgaagcaatttagaaataatgaccttttctcctacattttctcataatttttaggttaaaatttgcaatttactaccaattcccactctctagatcatggacgatattattttgatggtggaagtcacgccag

SEQ ID NO: 493200 - DNA, 457 bp, Homo sapiens
ctgatcaacaaactgttacatacaaacaatggaatactaaatcaataataaacaagtcattaacaattgatacatagaacaaacttaatgactctcaaatgctttatgktaagttaaagaaagtcaaactctaaaagtttcataatctatgattccacctatatgacattctagaaaagacaaaactttaggcagaaaacagatcagtggttgccagaggctgggaagaggctaagaaaatctcttcaagaaaagctgagcatccctgtcgcaagcaacttcataaaataacttatttttataggatctaaaaataattcattcaaaactccttaaatttaatggtttcaagagaaagtggtcaacttgaatcacgcttcttcataaatctctttctactaattttccatgcttaatgcatttaaatacctgttcacaaatttttccctctgaaaca

SEQ ID NO: 493201 - DNA, 457 bp, Homo sapiens
ctgatcaacaaactgttacatacaaacaatggaatactaaatcaataataaacaagtcattaacaattgatacatagaacaaacttaatgactctcaaatgctttatgttaagttaaagaaagtcaaactctaaaagtttcataatctatgattccacctatatgacattctagaaaagacaaaactttaggcagaaaacagatcagtggttgccagaggctgggaagaggctaagaaaatctcttcaagaaaagctgagcatccctgtcgcaagcaacttcataaaataacttatttttataggatctaaaaataattcattcaaaactccttaaatttaatggtttcaagagaaagtggtcaacttgaatcacgcttcttcataaatctctttctastaattttccatgcttaatgcatttaaatacctgttcacaaatttttccctctgaaaca

SEQ ID NO: 493202 - DNA, 573 bp, Homo sapiens
atcaaacgcaaagcaattcaaatggaactggatataaggagggcccaatacagttaagtttatagagggtgcttcctttgacaaaaacaggaacacacagcttcagagatcgctgatcaagcgagaaaagaggaaaaaggagtggagatctgtttctatttctcccttggtaacttcgaaaacacacacacacacaacagcagtttcctggactaatcctgccttcagctttacattttataaatactatgaccttttaaaagtctaggaactaaagacaaacaaaaagaggcaaatgcatttacctatttaacagtccaaatcagaagcagctccctcaagaggaaccagcagtccgtgaagggccattcctgggaaagtgcacccattcgttccccacagaccctcggcccctcagcgctcacttcattgcgctcccctggcagcggcacaccctccctctggaaaggaaaagcgagcaccccttcaaaagagctcggtggaggtttactgggatgcagagcaagcccttctccggcttgaagaggaggasgtgcaagagacaccgaggaa

SEQ ID NO: 493203 - DNA, 556 bp, Homo sapiens
taaacacaatgtatatccacacagtggaatactatttggcaataaaaagaaatgaaacactggcattaaaaattcagagattagacagggtaggaccactagaaatataaactgcattggttattttcaactctttttaatccaacagttttaaaagcagcctaggcaagattaccagaacctctgccttttattttctgttcttctctctcgctcttgcccttgtctgactcagagtcagtgggcgaggagagtactattaaaggtaaagggcttatatggtacttgaaacactcactttcctgactaccaaatgtatagaattgagaagacttgggcrttatttattctaaagatacagagaaactaaggtcatagtttcaatttgatttaaaaaggggtttaagcaattgtgtattagtaatttattactgagtaacaaattacctcaaaacttagtggcttaaaacaataaacatttgtcatctcacagtgtttgtgattaggactagagagcatcttatctgggtggttctggctcagggcctctcctgag

SEQ ID NO: 493204 - DNA, 601 bp, Homo sapiens
aggaagactgggtccttttgagaaagtactcttcaacactgccacaactgaatactgtaaaagttttctagatcttcctgagacatgcctgcctgcatttgataggtgaccgtacactagaccaaatcaatgcttctagggactcaaaaatcattttggatcactgctcaaaaagtgggtacctatggaatcaagtaaaaatccatgtcacagtggtcaattgaagggtaaaatgtaatggaaaaaggaaagctatgtatgtcttctttcttgattatgtatacatrtagcatattgcaaaatagcaatctttgcagtacctcccttcaagaggtgtaatctatttttcaatgtcttgaatttggatgcctttgtgatttgctttagccagtagaatataagtgacattgtgtgcgttctaagcttgcttctcaagagactttgtatcctcctcctctctctcttggaaccctgcaacttccatggagaaaagcctgtgcccaccatctggagaaggaaaaaccatgtggaatagagacaagctgttatagccaaggccccaggcacgtgagagggtccaaagaccagcacagtcagccca

SEQ ID NO: 493205 - DNA, 612 bp, Homo sapiens
tgtttatgtgtgtgtaggtaggcccattttaataatgtttaataggtattaacggaaaaataaaatgaaagatgccttctgaactacatcataattttggcagtcttagtttcactattaacttctgttgtcatarcaagccttactgaagagaataaaagaggattaactaagattctgtactcactgagaatggagcaacctctggtgactctttctgattcagtaacccagaaagcaaagtcatggatatggttggagagtgcattatttaatatttagaattaaagattgaggatatatcattttgcctcatattattctagaaatatttctgatggcatctttaatacttaaaagactatctttaagctgagtttaacggagacctgggggaaagacatttaaggttaggcttccaagaccaaatgatttgggttagatcctctgtttctcattggctacacagtcttgagcatgttaccaacccaagttcactatgactcagcttctcactatgaggtgaggacataatgaaatcatacatattaagtgccagctcacggcaagtactcagtaatttaataatgacaagctggcattcagccaggt

SEQ ID NO: 493206 - DNA, 453 bp, Homo sapiens
acttttcctccattcctgcgctgctctaaggttaaacagcagcaaaggaaagaaatacacactcgctgtttatttggggggaggggaaatatggatttgcagctaagttatcacgatccttcgctccacccccggtctggcactctcaactgacacgtacatcatctattaattgctgtttgcgtacacagatacataatatattcatttttatctttggtaaaatataaatggaattgtcagcgcgctcctgtctgtttgtttgtctaaggctatcaaaaraagtcaagagaggaggctgtggtccggatcctgaccctgattgtatgaataagtaagcaggatgcaagtgattgggttagatggtgcgaatatttttttttttcaagttaggaagagggtaaaaagacaggctggcggggggaaggcaaacagtgcatccccaaatcctca

SEQ ID NO: 493207 - DNA, 510 bp, Homo sapiens
  misc_feature (1)...(510): n = A,T,C or G
ggccaattactgctccaagcccaagaccattaaacagcgtgtcttaaaaagtnnannanananaaaaaaaaaaaaaaaaaaagggaaaaaaagttttaaccctctaaattagaaaatattagatgattattttaaaaataaatcttttccaataattcaatttaagagacagaataaagtcatagtaaccggcagaattcaatttcatgattgttgacgcctattccctggtttcaaacaatattttaagcaattgatttgttaattatgtgactatctttttcaaacttcttttttttttattaacaaagaaaaagtgtctaagtacctcttcttttaaatatacctcttgaatccctgtggggaagataatgaatattatcatatccctaaatgtactttatcagaaaatgacacccattaatagatcataatgttaaaagaaaattataatcaaaacttctgtgaaaagtgttaaakaaatcttctatatgagattatgttagtttt

SEQ ID NO: 493208 - DNA, 688 bp, Homo sapiens
gtctttcttctgggctggtttgyaaactacaacatgagggtattgcacatgtcttggtcactattgtgttcatgccttctagaaagtcctcactaatcaattaactgaataaataattgatgaatgagtgggtgaagacagagggtgttgtgatagctgtggctttttagcatagctgccctaagcatttcaaaattgcaactaggtttctttcttaaccttactgtccattgattaacttagaaaagttacaacctctcttctcagttattccatcgttcatacatctcataatactttaagtagtactggctacaggccatttttataaaaacagatattcctgagtttcaaaaatcaaggcaagtgcctcttgtgtatattgataacttgtagtgcttgttcatttaaaaccagggcttcgttaggggttctaatatcttcatttttacacgaaatagcaaaacaggccaaacttttctgttcctttgtaatggaagttctatgtcaccaaaaagtttattttcctttgtaataaaagttctgtgtcaccaaaaaaaatattaactagaaaaagagaatactagtatgttatcaaaattacaatgtcttcttgcctccttctgaaggacactccatgtttgagtactgtcaatttaatgcaatcatgaatttaactttcacaatt

SEQ ID NO: 493209 - DNA, 601 bp, Homo sapiens
ggctacaggccatttttataaaaacagatattcctgagtttcaaaaatcaaggcaagtgcctcttgtgtatattgataacttgtagtgcttgttcatttaaaaccagggcttcgttaggggttctaatatcttcatttttacacgaaatagcaaaacaggccaaacttttctgttcctttgtaatggaagttctatgtcaccaaaaagtttattttcctttgtaataaaagttctgtgtcaccaaaaaaaatattaactagaaaaagagaatactagtatgttatcaaaattacaatrtcttcttgcctccttctgaaggacactccatgtttgagtactgtcaatttaatgcaatcatgaatttaactttcacaattatattttagagaacaaatacttaattgtcaccaaaaatggagaatacatcgttattctttatactcaaagaagcagtgttaaattgtggctcaacatagagtaatacagggctgagctatgaggttaaaagacatgtctgcatctattgttatagacaggctgtaatttatttatatttataccctgggaaagtgagatttgcagttgcaatgatagattatt

SEQ ID NO: 493210 - DNA, 596 bp, Homo sapiens
cttaacaaaactgaagcctttgaaatcataacatttaccctgaggctatttaaaaacactatgttacatgggcttagggaaaaaatagttaataaaatccacattctaatagaataaatgttggaattcaaaaaggatgggattttattgaagtcaatttttcctctgttaggaaaaaatagattagaggaaaaactaaatgatggaaatatataacagtaattcactttaagtgaaaaagttagaygtaagaatgttcaattatttgccattaaaataccagatatctaatgacttgtcattgagggtaagtaatgtcttataatgttcttctgcttttactatggtcttcccattacactcacaccttttcagattcacaatagtggttcccaatctgagggagctaaacacagagaaaagtagtcaaaatatggaaacaggtggaagtatgtactgactgattgatacacttgctgaataaaagggaataactcaaagaacctcatgttgcattctctgaaaatggaagacaggtgcaatgagtagctacaggaaaatcaacatggtaaggtgattaatcaaaactttgtaat

SEQ ID NO: 493211 - DNA, 624 bp, Homo sapiens
gcaccccactctactggtatcaatttattgattctgatgataaagacatacacaagactgggcactttacaaaagaaagaggtttaatggtcttacacttccacatggctggtgaggcctcacaataatggcaaaaggcaacaaggagcaagtcatgtcttacacggatggcagcaggcaaagagagagcttgtgcagaggatctcctctttacaraaccatcagatctcaagagacttattcactatcacgagaacagcaggggaaagacctgccctcatgattcagttgcttcccaccaggcttctcccacaacatgtgagaattcaagatgagatttgggtggggacagagccaaaccatatcaggtgttaaatttccaattagaacagtaaataataagcagtaggctcttctaagggacttttcttacccctagggagacaaggtgaaagctaatggggtttttcctacatgagagggcacacctgtcatagattaaagagaagaaaaaaatgtatctgcttataaaggggaaaaattgatgtccctactccactgaaagcatctccttatttcagaaatttgacatatacaaaattttgatatataaaaattttgatg

SEQ ID NO: 493212 - DNA, 147 bp, Homo sapiens
tctactttgtcctgctggtgttgcttgaggaggtagagggggcttccccagatttggtargtagggggaaagtggtaactccccttccttcctacactaatcgggcaagctttctctgggaagtgaagggtagttttagtcctatat

SEQ ID NO: 493213 - DNA, 595 bp, Homo sapiens
tcactagaagctggaatagaaggcatgaattccacctagagcctttggagggcacatggttctgccaacaccttggtttcagaattctggcctccagaactatgacaaaatgaatttctccgagttaagccacsaagtttgtggttatttgttagacagtcctaggaaactaatatacttgagaaacttaaacaccagaatcaccttagaaaagtgatttctgaaagcaggaaaaaaaaataaggtgactcatgattgtatcttcaaagctagtttctataccataggatccaacgtgcctggcacactgcacatcttcatcagttgccacttcatccccatacgcattccagaaacccattctgttaccaccatatggctactgcccaaccacagctactctccaaagtctgcatttcctaattaatttagactaaaactgcattagaatcaccacatataatctgccagaagccctgaaaatcctggagattctgattcaggaaacctggggtggggcctaagtatttgcatgtttaacaagcttcacataagatactaatgtcgaccaaagactgaaactttgaacctaggg

SEQ ID NO: 493214 - DNA, 276 bp, Homo sapiens
tctgaaatagaaatagctctaccttcatagggctttttggctccccatcamaaaaccagattcctcagtggactcttttacccaccactccacctcccactaccctatctcttggctagaccttacattgataagttgtcatttactttataggaaaggctaaggaaagtggaatggaagctttgtgagtgcagttaccctatcttccctgtttgtcactgatccacagcacccaggacgaggtggcccatagcagacacttggtgggtgggcgga

SEQ ID NO: 493215 - DNA, 567 bp, Homo sapiens
ctggtggtatcgtctgcagaactgattgcttcttgttggtggggagaaatccccacacatttggtcacagaagtctactgtgttgatgattgtggtgtaagagcagaggaaaagcaatttgatttttctccacaaggggaagaaaatgtttcatgattcaactaatgatttacctttcattgtaaggttatcatgctcaagtattaatgtargaaggcttttttgatgcagagtgtgtgtgtgtgtgtgtgtgtgtgtatatgtgtgtgtttgtagagggctaacattaaaaagggaaatgtaataaggaagaagaaatggtgttctaaacttaaaacccatttcatctgctaaatcgtcctagtgaaataccaactttagttaatttaaaaaaaagtttagttaattgtaaaaaaaaaaaagaatctcttcattattttaaaaaccatttgtgtttcctttttctgtaatttattcatatttgtccatttttaattgcagtgttattcttgttattgattttttaaaacgtggtctttatatttgagtgaaattaaccttccatca

SEQ ID NO: 493216 - DNA, 570 bp, Homo sapiens
cagctggtggtatcgtctgcagaactgattgcttcttgttggtggggagaaatccccacacatttggtcacagaagtctactgtgttgatgattgtggtgtaagagcagaggaaaagcaatttgatttttctccacaaggggaagaaaatgtttcatgattcaactaatgatttacctttcattgtaaggttatcatgctcaagtattaatgtaggaaggcttttttgatgcagagtgtgtgtgtgtgtgtgtgtgtgtgtatatgtgtgtgtttgtagagggctaacattaaaaagggaaatgtaataaggaagaagaaatggtgttctaaacttaaaacccatttcatctgctaaatcgtcctagtgaaataccaactttagttaatttaaaaaaaagtttagttaattgtaaaaaaaaaaaagaatctcttcattattttaaaaaccatttrtgtttcctttttctgtaatttattcatatttgtccatttttaattgcagtgttattcttgttattgattttttaaaacgtggtctttatatttgagtgaaattaaccttccatca

SEQ ID NO: 493217 - DNA, 570 bp, Homo sapiens
cagctggtggtatcgtctgcagaactgattgcttcttgttggtggggagaaatccccacacatttggtcacagaagtctactgtgttgatgattgtggtgtaagagcagaggaaaagcaatttgatttttctccacaaggggaagaaaatgtttcatgattcaactaatgatttacctttcattgtaaggttatcatgctcaagtattaatgtaggaaggcttttttgatgcagagtgtgtgtgtgtgtgtgtgtgtgtgtatatgtgtgtgtttgtagagggctaacattaaaaagggaaatgtaataaggaagaagaaatggtgttctaaacttaaaacccatttcatctgctaaatcgtcctagtgaaataccaactttagttaatttaaaaaaaagtttagttaattgtaaaaaaaaaaaagaatctcttcattattttaaaaaccatttgtgtttcctttttctgtaatttattcatatttgtccattttwaattgcagtgttattcttgttattgattttttaaaacgtggtctttatatttgagtgaaattaaccttccatca

SEQ ID NO: 493218 - DNA, 572 bp, Homo sapiens
aacctatttcagacttgcgttcacacttatcaaactatcacttaaacagagtatttaaggtctggtgcagtggttcacacctgtaatcccagcactttgggaggccaaggtgggygtcaacagtttgagagcagcctggccaaaatggggaaaccccatctctacaaaaatttaaaaattagccaggtttggtggcacacacctgtaatcccagcgacttgggaggctgaggcacaagaatcgcttcaacccaggagacggaggctgtagtgagccgagatagtgccactgcactccagcctgggcaataagagtgagactctatctcaaataataataataatatttaataaaaactctttgaatgacacaaattaccacttaggcaaaaagaaccttggtatttacaggggtaaaaagttcaaataaataataaacttcatttattattatatataagccaagagaatttattatatgcaagggaatcactgttcagacaatgagctgaggggccagaatttgtgagacagaaggggtccttttcacacaatatttacttgaagtttcac

SEQ ID NO: 493219 - DNA, 536 bp, Homo sapiens
gctgagcagaaccatatacctcccagcacggagagatttccaaccacttacagcattctactagctgttctctgcctggcttcaataagtatcacctggcacagaagcagcttagtatatggtcagatttcaaagaacctccactctgagtactggagccccttctctgcatacttctcacccatactctgccctgaaaatcccagctatcttagcagccctgaacactgttctttgacccctcagcaaatagaccatcgttctctgctgggctctccctctctgccataattctaaaactgtctccaggcagaaagccaggacaactgcggagtttacctcatgtgtttcccttctcgtagggattgcaatcctgtatatcctatttccattttctgaaaatagttgcttcctattttttgcccagtcttttgtagttgtttatggtgaaaggtccagtctggtagcactagtatgttgtggctggaagcagattatatgagccttaarttggtctctctacatccatttgtgta

SEQ ID NO: 493220 - DNA, 632 bp, Homo sapiens
gagatggcaaattggatccactattcttttaattccatgaagttgcaccatatgtttataaatagtgcttttgtgatgaccctaattgagggagattgagtgctataactggcctgtttctgactctctattgtctaagatcttgcattcttttaaaagttgaaacagaaaactagagtaaattacacatatctgctacccaaaggatttatattttccttttgtttgttcttaaataccatcattcctttcatctggtgactgttcagttgcaggacagagtgtcataaagccagatatcctgtcctgtgaattcccctccacttcgtgaaattaagaggtaagaggggcatggaaggaggaaaggaaaaaggcagaggaagttctgtttcactraagacctaacccccaaataaaagaaaaatatgttagcacacagaaaatttctgattagccacaagcttcagtgttgtcactggtgctggtttacttactccatctgatgagaaatggagacagcatgaatttcaacagcgtgctgaaatgggctgtgatggcactcaggctaagtgccgacagaaggggcccacctgccttgctatgcagatgaggtctgagtgtgtgaggacttc

SEQ ID NO: 493221 - DNA, 650 bp, Homo sapiens
actgggtaactacctcatgttcctgggtcaagtaatattaataagaccttaacctggaattcaattcttagtgcccatattaaaaaatgactgcaacaatgcatgccactaacgttctttgcacactgccattccagatgacctgtacctctgagtccctccaacactgtgaaccatcargaatggactttctatctttgcacttctcttgcgggacattacaacctataaccattagccagaaaatggttaaaattgatactataatgataattctgatgttaaggtaacttaaggcaatgctcagattttgacaataattgcacaagaagatatgatagtttggcatgttgatattatttcaataagaaaaacagcattgtaattactggctgcacagacatttggagtcacatatatgcactatcagaagcacagagtgggaccctcttatagagccatgtgattctcttggttgtatttatggacctaggcactaacacctgggaaaatactatgaaatataaaccttaattgaaatatgctcatcatgcttaattggagcatgctcccgggaaagtagaggaggtttctgcctatgttaaaaattgcaaaatagggcccaaaggtaacacaattttcttctttta

SEQ ID NO: 493222 - DNA, 650 bp, Homo sapiens
actgggtaactacctcatgttcctgggtcaagtaatattaataagaccttaacctggaattcaattcttagtgcccatattaaaaaatgactgcaacaatgcatgccactaacgttctttgcacactgccattccagatgacctgtacctctgagtccctccaacactgtgaaccatcaggaatggactttctatctttgcacttctcttgcgggacattacaacctataaccattagccagaaaatggttaaaattgatactataatgataattctgatgttaaggtaacttaaggcaatgctcagattttgacaataattgcacaagaagatatgatagtttggcatgttgatattatttcaataagaaaaacagcattgtaattactggctgcacagacatttggagtcacatatatgcactatcagaagcacagagtgggaccctcttatagagccatgtgattctcttggttgtatttatggacctaggcactaacacctggraaaatactatgaaatataaaccttaattgaaatatgctcatcatgcttaattggagcatgctcccgggaaagtagaggaggtttctgcctatgttaaaaattgcaaaatagggcccaaaggtaacacaattttcttctttta

SEQ ID NO: 493223 - DNA, 519 bp, Homo sapiens
tttgagacctgtcacagcaagggctccttggcatttctatctctgtgtggcctctgcccaaggtctctccagcatggtggcttcaaggcagctaagcttctcacattcaggaattccaaggtggcaggaggaggcacggggagagattgagatcaaggcagcaattgtattatcygtgtttgtagccttgtggtatctagtctccaaaatgatgcagcatgatttctactgccttttatttattacaagcatgttagtaaaattgacccacgtttaagaagagtggaaattagatttcaccctttgtgggaagaatgttgaagaatttacaaacatgttcttaaaccaccacagatgatcaattcagtttcacagacactgagtttgaatttctgggtgccttagtctggttcctgagcaaacaagagtcttgggtaaggattaatccttatgctttatttgagaagtacacactcaaggcagtgaaagtaaggaaaaacgaaaaaaaaggcagggaag

SEQ ID NO: 493224 - DNA, 610 bp, Homo sapiens
tatagatttaattgaattatcctggaaataaacaacatttaaaaacttctactctcatgtacttttccaaataacaaacacataatgcaaaatttctgttcagaacttataaaggtaagtcttttatgtaattttttagacatgttaaagctctcatagctctcaagagtatcagaggtaagcaaaaaccaatcaaattttaaaaggctggtgtcctctatcamttattggagacttgacaaatgtagcttaaaaacttgggataaatagagaaataatacattgctggaaaggcataggaaacaaaatgactattcatagaaggaaataaaagccttccattagaaactttaaaaatcaatggttttatatgtatatgtatttataagtaaaactgagaggggaacaaacagcaaataaataaaaattaaaaccaaatacagtctgagggcagtggctcacacctgtaatcccagcactttgggaggccaaggcaggtggatcatgaggtcaggagttcaagaccagcctggccaacctactgaaaccccatctctactaaaaatacaaaaaattagccgggcatggtggggggcatctgtagtcccag

SEQ ID NO: 493225 - DNA, 643 bp, Homo sapiens
gcctcatttactcagtctcttgcccctccaaaggtcaaagtgatacctcatgaaccaagacccccaccttaaattacacagttagcatagactacctggtgtggctctaggtgccaagtaaacacaaatactcttatcaagcattatattccaagggtttagaagttatttcytaggaactggtcaaggactaatcctttcttggaatgtgcagagtttgcacaacacagacctgcagagtaaatcgttagctacacagtgcataacttgtcaactaaatggtgattacacagatactagttaggagcaagactgtgaaacatacaaacgtataaaccaaaaaaccaaccaaatgtgctttctactttttaatgctctaaaataaatttataaaaagtatttgaaaacatgatcatgggtaacgttcaaatttcaaaaccacagtgaataatgcactatttccctgatattttaaaaaataaatgttccccaacagtagagaaggcatattttgaaaaaaatctcacttgtcattttccatacaagttgagaaacatgatgagcaattagtggatgaaataatgcagtgcaatcttcagaaacctcttgagggtatcagaaaaatatcctatttgaatattgg

SEQ ID NO: 493226 - DNA, 629 bp, Homo sapiens
aggtgttcctgtgactattgcctctctcccgagacctccctctctgtctaaccagtctctaactgcctcctctctcactagcatgttctgcttctgatttggctttgtaatttctgcaagattttcaaagcacaatgacattggttttctaatgtaaaaaactgggttccagagctaacattcaatgattctacctttatagccaatacaacaataacattttaatttgaaaatatttcagagagctttaatatgcatagatttccatattctatcccaacaaactttttgataagtgcatgtttcatccctcaagcaaactttaaattgttttggctatagattaaaattctgacttattcactagttattttatgatcatattctgagttgaatttgccagcccccctaaattatgttaccgatatgttgaactcctacctctcagtacctcatwatgtgatcttattggagacagagtctttacagatataaaatgatgttgctgtaggatttttcttggcccctttgctggactcatagcaggggcttgctatgctcaaccccttagaagagggagcatgtgagtgagcaagtgcaggatctggccagccactccaggtgccaaa

SEQ ID NO: 493227 - DNA, 642 bp, Homo sapiens
gggggctcaagctattctctcacgtctgtctccttaagtgctgcaattaacaggtgcaagcccaggtaattatcaatcttttatttgaatatgattcattattagttagaaaactactctcacgggcactacctcttgcctgcttttttttttttttgtagggtacaggtcatacttttctatttctttgaatgtctcataattttttgttggaaagtggaaattttagataatatattttaggtattctaggtactatctgggtattatctcctctcctgggcttgttattgtaatttgcttatttgttagtttagcgaatgtctggattgttttagtgaaatatttctctattctcctctttcagtgttagccctcatataatcctctttaaagaggagcagcctttagtatgccctcagtcatcaagggataaccacggtactggtaggactctcttccattctttctctgtccwcacccctttatgaaagtccactattttcctttctagtcaattcctctactgttttcagtaagtccttgggacataacttactctacaaactaatccagtcaaattatgtctcctttgagggaagaatgtctgaagttattatttgatattttgagtgttcccct

SEQ ID NO: 493228 - DNA, 598 bp, Homo sapiens
tggtgggttggctggaggctgtggtcagcaagaggagttgggatggctgggattctcttttcatgttttctcacatcttatgcttcttaatgacatgatgtttcagagcactgttgcaaggaggtgaaggcaatgtttcagtctctgtttgtttcacatttgctgatgttcagttggccatcacaattgacatgaccaagccctgattcattgtaggcaagatagtaaaacagggcatgggtactggtaagatatgttcaccgtcagccrtcactataacaagctaccacagtagcccataaaatctagcaaatgatttaaatctagagaaatgtacttgcatagggaattttcaacgtaaacaattgggatacaatttcaccaaaagaagaggaaatggcattcatttttccctgatttcaaacaaaacatttgattgtcaaagaggtatcaattaaataattcaagcatgaaattaagcttctctttcaaaagatactattattggtattattgatataagaggatgaatcagtgaaacagtgaaatcagagagcttaaatgggtgttaggaagaaaataccatccattttccttt

SEQ ID NO: 493229 - DNA, 538 bp, Homo sapiens
tgtgcccatttcaaacttttcctcaagcataacttagaaacagtttcccacgtgccagcaaatgacaaaaggaaggaaaagtcactttaacatctaaaacagctctgcagagggtttttacaactcctttgcattaccagtgcagagagcaattgtttcacaaagtgtatcgtaacacttgaccaaatttatatcatgtttatattcttcttaaaacaaacagaaaatacaaatatctgtctgaaacagatctgtgaaactgtaataacagaaacaagaaatgagtttattgttcccattaggcctgctgttctatctgtttgacctatgctaatttttgccctcagtgttcatggataaggaggaaggcaaaatgagtccaccctccaatataatgatggcagcaatctataatggatcttgaacatttccaaatacaaggcttyagtgagggcagaggaaaatgcgaatacaaacaatactaaattaaaatggaatttttcctttctcttcagtgctaactcaccttggttcttta

SEQ ID NO: 493230 - DNA, 672 bp, Homo sapiens
gccccttagcctacccactgtaaacctgtagatccatgagtgggcaatgcatgcttgtatttgcaagccactgagattttggtctgtctgttatttaccatgactgaagcaacaactgaaaacatcactgcctgttggttattttactctgcgtttttgaagagataacttacagggtttcggttgtcttaaaaaatagataaatgaataaataaataaataactactctagaaaagaataatccacatttctctgcccaagcgtaaaggccaagggaatagatttagtctcttctgttctgtctgagtctgagcttcagagagctagtgatggggaaaaaaaaaaatctctgggattttgatgagattaacctggcagaaaattgctaaagtaaaaggttgtatcttaaggcatcaatcttttttaatcttagagtcctactgtgtaaacaaattggaaaataaaaagkaccacttgagtgaaaacagattttattattttttaagctactccacagctattagtgctgaaatatagctgcagttttaatcaaacattggtcacatgactttacccaaattcctacttattcattaatggagaaaaaacaagcaatcaaaggaatatatcagaaagcacccagattaaaactttcaaacttttagatgctg

SEQ ID NO: 493231 - DNA, 672 bp, Homo sapiens
gccccttagcctacccactgtaaacctgtagatccatgagtgggcaatgcatgcttgtatttgcaagccactgagattttggtctgtctgttatttaccatgactgaagcaacaactgaaaacatcactgcctgttggttattttactctgcgtttttgaagagataacttacagggtttcggttgtcttaaaaaatagataaatgaataaataaataaataactactctagaaaagaataatccacatttctctgcccaagcgtaaaggccaagggaatagatttagtctcttctgttctgtctgagtctgagcttcagagagctagtgatggggaaaaaaaaaaatctctgggattttgatgagattaacctggcagaaaattgctaaagtaaaaggttgtatcttaaggcatcaatcttttttaatcttagagtcctactgtgtaaacaaattggaaaataaaaaggaccacttgagtgaaaacagattttattattttttaagctactccacagctattagtgctgaaatatagctgcagttttaatcaaacattggtcacatgactttaccmaaattcctacttattcattaatggagaaaaaacaagcaatcaaaggaatatatcagaaagcacccagattaaaactttcaaacttttagatgctg

SEQ ID NO: 493232 - DNA, 590 bp, Homo sapiens
agctggttaaacaccttatgtacatctattggttcttcatctggttctgggaatgaagttagcagatcagacagtgaggaaggaaaaatagacaagcagaggacatgggcaacagaacccacagaacaacagaatccacaggacaacaggacctctacaggtctcttaccatyaacaagcccttaatgatgggagacctgaagaaaggctggtactcttcatcacagagttaaacaagcactggccaagatttagagaagcataaagggataaaggggtccagttggagctagaaaagctatgagcctggctgctacttttccataccacccaggagagccagatcatggatgacaagtgtgagtggcaacagggcctagtgccagcgttgaccttctgagcataaactggacatggctgcttctgaatttcagttctgcttctgagacatcgtgcattatatctatgtggcccacattaaccaggaaccatgaagataagaaaaccctggaatgcttaggtgaattggtgcagcaaaaattatctacattctaccccttgcaacatggcatttatatatactgctttta

SEQ ID NO: 493233 - DNA, 590 bp, Homo sapiens
agctggttaaacaccttatgtacatctattggttcttcatctggttctgggaatgaagttagcagatcagacagtgaggaaggaaaaatagacaagcagaggacatgggcaacagaacccacagaacaacagaatccacaggacaacaggacctctacaggtctcttaccatcaacaagcccttaatgatgggagacctgaagaaaggctggtactcttcatcacagagttaaacaagcactggccaagatttagagaagcataaagggataaaggggtccagttggagctagaaaagctatgagcctggctgctacttttccataccacccaggagagccagatcatggatgacaagtgtgagtggcaacagggcctagtgccagcgttgaccttctgagcataaactggacatggctgcttctgaatttcagttctgcttctgagacatcrtgcattatatctatgtggcccacattaaccaggaaccatgaagataagaaaaccctggaatgcttaggtgaattggtgcagcaaaaattatctacattctaccccttgcaacatggcatttatatatactgctttta

SEQ ID NO: 493234 - DNA, 596 bp, Homo sapiens
aaagacacaagcaaaataatgcttctgcctaacacgatatagctatcccttctaaaactgaaagactcttccatattggaagatatacattttctttttcatcttgtagcagagttatatttcccctttggtagtctgtaacttaaaaacatatttaaggttaattactattcatacttctttattctgttagataataaaaatagaagaggaaggataaaaagtggcttatatatgtgtgtatatacaaaaatrtattctgaattacagacttactccttattgtgtagcagcaacctaatttttcctagtcagaaataatcaaccttccaattacagtgacatcaccttttttaacttgttgattcatgacatgaatccaaagtgtccaggtagaagtctccaatttaaatgtaataaaacatttactttgtcacctagtggaagctctattttcttggaaactaagacgtttagaacaacaaaacccagagtttaatggctgggaagcaaagtttttcctaggttacttgcagtaatagtaaaagatgccacttccatttccatccttaattccaagactgcctatggaagag

SEQ ID NO: 493235 - DNA, 596 bp, Homo sapiens
aaagacacaagcaaaataatgcttctgcctaacacgatatagctatcccttctaaaactgaaagactcttccatattggaagatatacattttctttttcatcttgtagcagagttatatttcccctttggtagtctgtaacttaaaaacatatttaaggttaattactattcatacttctttattctgttagataataaaaatagaagaggaaggataaaaagtggcttatatatgtgtgtatatacaaaaatgtattctgaattacagacttactccttattgtgtagcagcaacctaatttttcctagtcagaaataatcaaccttccaattacagtgacatcaccttttttaacttgttgattcatgacatgaatccaaagtgtccaggtagaagtctccaatttaaatgtaataaaacatttactttgtcacctagtggaagctctattttcttggaaactaagacktttagaacaacaaaacccagagtttaatggctgggaagcaaagtttttcctaggttacttgcagtaatagtaaaagatgccacttccatttccatccttaattccaagactgcctatggaagag

SEQ ID NO: 493236 - DNA, 625 bp, Homo sapiens
tatcttgaggaggcaagaattgagtttgatacagacctgtacagattcacttctgctaacaattacactttgcaaaacatgcaaacacttaaactttgcaaaacatgcagtattagttacttggtcctgatccrgatactgattttcatttcaccttccatttcaactttttatcaggctggagccctctgctttagaagacaatttgaccaaacaattgacgtcttcccagaaaaagatgtaacacttaagtccttatcaatacaaatgggcttttaattcctagctattggccatttgacaagaagtagactagatatgttcagccttgttgcttgctctagaagcaataattcaggctttgaaccaacagaccagagcttttggccttgagtaataagactaaatgttgtatattgagggcctgatccatgactcttatttgtgacttctcatattgtatcttatttaataatcttcatgataacccttggagatatattttttatcatccctattttacagataaaggaaatgaagctcatacaggttaagccaattgttcacaccacaactgaatggcagggacagatctcaatctgaaagtgtctgactccaaagccta

SEQ ID NO: 493237 - DNA, 632 bp, Homo sapiens
atcctgtgcctatatttctattcacttaccaatatattaaacgtatcaatattcacatcattaaggattaagacaaagatcacagcacatcgtaacctcaatttattctcttggtgctactttcacttcccactgccaaataacttttgtgctttccaaaacaattcacatgtggcccctagccacatgtgaatctttaaattgttttaattaaataaaattttaaatttagtttctcagtcttacgaaccacatttcaagtgatcaatggttccactttactaatgacttccacattgaacagtacaaataagaaatatttttatcacagagaggtcaattgcgcaacactggcttagactttaattgtagatcatgtgggcagtttttacatatttgattctkagttatttaagcattaataaaatttacttatgtattattctatcctattttccttatagtttttctgtatttattcattctttcactatgcttcttcaaagcctatttcccaagaagtttctatgttcaatttttatgaattcttcattcctgataacatcttcagtttgtacttatatgtcaatattagtttaacctcatataaaattctaggtttgacattcatt

SEQ ID NO: 493238 - DNA, 527 bp, Homo sapiens
cggtgacggttggcaccatcaccaccaygtcctttcctcctgttcctactgggaaacctgcatcccctcagcccacaataggaaagagcctcccatggccctgcacaccctgtattttatcctagaagccagcagagtcccttctcaccatggccccctggatctctccgctttcaccaccttggccttccctgactccctcaactttgcttctccctcaaacgatagaccctgcaccctctgttcccagcctgcacacccttcctcctctcttctcccagttaactcccgctcgtccttcagatggctgcatcggcatcatctccccaggaagcctgcttccatctccccgacttagtccactccccctataatggaccttcaccacaccatgtcctgctccttcagagtgtgtgtcacagggaaagttcacacttgtctggtgatgacctgcccctctctagagcatcactcctgttagactgaaattccaacaaggcagagccatggagccccagaaccaagca

SEQ ID NO: 493239 - DNA, 527 bp, Homo sapiens
cggtgacggttggcaccatcaccaccatgtcctttcctcctgttcctactgggaaacctgcatcccctcagcccacaataggaaagagcctcccatggccctgcacaccctgtattttatcctagaagccagcagagtcccttctcaccatggccccctggatctctccgctttcaccaccttggccttccctgactccctcaactttgcttctccctcaaacgatagaccctgcaccctctgttcccagcctgcacacccttcctcctctcttctcccagttaactcccgctcgtccttcagatggctgcatcggcatcatctccccaggaagcctgcttccatctccccgacttagtccactccccctataatggaccttcaccacaccatgtcctgctccttcagagtgtgtgtcacagggaaagttcacacttgtctggtgatgacctgcccctctctagagcatcrctcctgttagactgaaattccaacaaggcagagccatggagccccagaaccaagca

SEQ ID NO: 493240 - DNA, 425 bp, Homo sapiens
gtggagtaaaagtatttaaatcataaaaggtttccctccactaaccaccaaaagctacaaagtgtccaacataaaattctagagtgggtaaaggaagtcatgatgaagtgagataatattcttagggaattctgtatccaaagcaaataccaacaaataaattaatagtccccaagtctccatgtgcctgccaggacagaccaggtcatgamaggcgtaatgaaatacagtgcccactcccgcaagtttaccttcctctcgcactcagtcggagcacagttcctcataaatatttaacttaaattgcaaagtagacagatcaacttgtcacattaacaccaggaagttaagctgaaaatcacaggctgatagcctccattttaattaatattctactattcacacttctattggtttttaaagat

SEQ ID NO: 493241 - DNA, 549 bp, Homo sapiens
tgtttcttttcatcttactctatttttatgacacaacattttctctttagtgtgtccatcacatgaggaacacaaaaatcctgcaagatttttcagtgtagctcagtttatgaaagtatacctacggattgtaagccttgaatagttttgtatagtttaacttggtatggcttttgcatatattatataattttatgctcacaataatctgtgagatctgcatcgcctatacatatagagaacttacacacacagacacagacacasacacacacacacacacacacacatatagcctatttaggcatacttcagagatattgtcagtttggtcccagagcaccacaataaagtgaatatttcaataaactgagtcacacaaagtttttccagtgcacataacacttacgtttacactatactgtagtctattaagtgtgcaatagcattatgtctaaaaaacaatgtacatacttaatttaaaaataattcattgctttaaaatactaaggagcatctgggccttcagcaagacataataattttgct

SEQ ID NO: 493242 - DNA, 632 bp, Homo sapiens
gaccgctggaaggaacttgacctgtgtgtgctggcctgtgtgctcttcttcgatttaattccagtggtggggatctttcaatctcccaacaccagatgctttcacagaatgtatgctattttattttgaaatctcctatcagttctagtcaaatatatgttaaagattaatacaactactaagttactggaggaatcattatgcagcaaaattactataaaatgaatttaaaaatggacttcgaaaccattagaaaaatggggaaattatatgaatttgactattcacaggaaagaaactgtataaatggataatgtatagtaagaaatattttcaatgcagtgaataagcaaattaataagatttttaatagcagtgagatagatttttttaaactgttgggattacagaattaaaaagaaacaatgcatttgttgtcctgagaatgtggaggaataggcattctcagaccctggtggtgggattgcccaycagccagatttttggaaatcaatttggcaattttttaaaggtcttaaaagtgtttgctatcctccaccttgatccagtgtttctctaaggacatcattagagatatgtgtaaggatatatttacaaagatgcttattgca

SEQ ID NO: 493243 - DNA, 649 bp, Homo sapiens
tgcaaataaatcttacgagctagagttctcttttcattgttctgctttattttcttcaaaatttaaaggcaacaacaaagaaagtaaatcttatatccttattaagattaatggcaaaatgaatgaacgcatataaacaatagaagggacaaaacccacagggctcaggagctttaatactaccccaaagaccatgaggctgatttctaagctgaagaaatgattatagatcatcccaggagtatgccaaccaataagacggcagcagcactatttgttttctgccttttgtgtgtttcttaacgttaaccttgccaggctgtcacacagattccagcagcctggggcagtttgagggctctgagagggagggcagagtttttgatgtcagtctaaagggcaaaggctgatcagtatagtcaagaatacagtccattcaaggcttgacatggtgtctccattattgttacccttttatgcccatctttgtagtktatacccacttccactggaaggtaatacacgcaataagtacttccttttgtttgttctgtatttagccttacccttgactttaaaaagcatttgatttatttgttttcagaatggtggcgtattatggctactgaaataattgctgttgatcagg

SEQ ID NO: 493244 - DNA, 653 bp, Homo sapiens
tgtaattttaatcgtgttgatgacaccaaagataccaaagatttctttctctgtgcggtctgcattttgcttgtgctcttttataatttgaacgattttctctgacatatggtatgtacagccacagctcagataccccaaagaaataattatctatgcgacggcggctgctaatttggaaagggatattttctgtgtttctcttatatgtttgctgtctgctcgacatgttcaagatgcgagttcagatgctgctgtaattggattccttaaattctgattacaaattgaggaaggaaactggttggaaatggccttcagtcctagccatggcctctatccccgctgggacctrtcacagtaaagactgccaattactgaaccacagaagctctgaccattgagtagttgagctggaagagaccttaggaatcatttagtccaagccccggtggcccagaggaatgaaatagttatccaaatcaaataactcttgagagtgaaagcccacacatgcctcctggttcctgccccagtgctccgcttattgtacagtgctacctctgcatgagagcggtcccacattgacaaataggatggtggcaatcctttagcaatgagcagggactgggatttatctcttaacattttca

SEQ ID NO: 493245 - DNA, 516 bp, Homo sapiens
gcacccttgtcctgccctttggatgcagggagaaagggaagcctgcagtgaggactggtcctcyggaggggtctagggaaacagaggggagggacgtcttagggaaaaggaagtaggggcaggggagggagttcagggatttgaacatcactttaacatcttctagaacttgggtaaggacagtatagagtaaaatctgccctgagaacttgcacgtagagtaaggaaggtggtttctcttcagtttcagcagacttgtggccaggcactgagctggagtttggaaacccggttccctctcagagctctgacatccagttcttccaactgaaagtttatttgacctcattcccattaggatggctgctgtaaagcaaaatgaaaacaaaaaataacaaatgttggcaaggatgtggaaaaattggaaccttgtgtgctgttggtgggactgtaagatggtgtagccactgtggaaatagtatggcagttcctcagaaatttaaaatgtgagttatc

SEQ ID NO: 493246 - DNA, 490 bp, Homo sapiens
acatgagtcagagtcctaagcagtgaatacgaggataagctctgccattggctgaaggaaaactcgacgctaataatagcttaggcttggagtcagcctgtctagtgtgtgacctgaagcaagttactttatttctctaaagagcagttccttcatatgtattgtggggataattacagtacttgcctcacaagatagaacaagatgagataaatcgtgaaaagtttagcacaatacctagcacagagtaaatatctacacatgtaagctgtccttattacatgaggcagtggaagatgatttaaacttttaccatttaattattcaatgggaataataataataatacctgcastataggctgcaggaaaaatgagatgaataaatgcacacataaagtgtcattatattgaaattaacatatggtcttcaacaggatgggactatgtttcttctttgttgcaatgactgtgacttattttaataaact

SEQ ID NO: 493247 - DNA, 471 bp, Homo sapiens
gactgactgcagtcctggtttttggtgtgctaagttttgtgtttcattacaggacttcgagatgattttagcagaaagttgaagaagctgccccatgctctcctagccattttaagccagatgtttgtatctggaattaaatatttgttttagcaactcacgacttcctggatggcttacaggaatgcagcttggcagcagagctaaagatccctctttgccaggcttctgcataggcagaagagatgacygggaattgtgatttcaaaggctgagtgccccaaactatttattctaataggaaggtgggaaataaaagccccactggactagacaggagggaatatgggttctcagggctgtgtcactgcataggtgaccctagctgggagttctgatctcttatttctaaaaacaaggttagaccaagtgctctctaaaatcctgcctttctaggagtctgtggtttta

SEQ ID NO: 493248 - DNA, 587 bp, Homo sapiens
ccatcgccccagcttccacctgctccactgaccctgaaatctctgctcttctgttcagactcctcagctcacctcacctctgcttctgatgggcctgcctgctgctcccacccacccaggacaggggcacagacaggctgcagtgaggcagtgagggtcactgggtcagtgggaggcaagtcttcaaggaggtgtgggaagtcagggaacacctcggtggcaggaggtttcctggaaatctcacaggcctcatcatgtagatcatggtcctggtcttccccagcccccggaagctctccagtttggatcccccctcctgtgccctcctgcccactgggcacactgctaggtgtcatggtgcccccagggcctcctaatcagaggcagtgccaaggagaggctttagccacagtcactgcctctctgccctcagggcaacattcctcagagttcattctacgcttrttccccccaccagcacccccactcccacctctccactgtcattggggtgtaggtgacatgatatttcccagctccccgaagccctcaaaagtaaacacacaagctaactaggcacagcacac

SEQ ID NO: 493249 - DNA, 540 bp, Homo sapiens
cccaccccaaaacccaggaccgcccctctcccctccccttgcccctgggtccgctcccgaaggctggagccaatcagactgctgcccagaccgaacccactttcctattggccattggggtctttgggactcccttggagggagcccgaagaatcagagtattcggcgcggggtcctggcgtagggccgcaggccccaggcatcctttgtccacgacccctgatttgggcagcagccggaggamggagctcagctctgggcgggcctggggaagaaaggagacaggcggcacgggggtgagggttgtcaccagggggtcccagagcgaaatcccaggtctccacctggttaatctcccaccctggagttgagcttggctgcgggactgggggagggaaggagcggagctggatgtcctgggggtggggcttcaggctggaggggcccagtcttggagaaacgggcggagctcgagaaaggctagggtaggcatggtctgggcgtggcctccacaaatctcttgggcttattggtcatact

SEQ ID NO: 493250 - DNA, 407 bp, Homo sapiens
ggatggccccccacctttcagataaggaaggggggtgctcagaatgatgaagttacttaagtgacygcccagacggtatggccctgtctccagtgaccctggcccgcaggtgttccgctggtagaacagggtgcacactcaagagggaccagcaaaggggaagggatgctgcaggaactcttataatcctgcttctgagtgagatttatgtgggaccctgccccctttagaaattcgagcactcctgggagaactaaccctttaaggaggtaactccttcttcccaacccatttacagaatcccatcatcgcgtgcacatctcatcccaggagggagagaggagctgccgagtagaaagcagactggctgcagggacagaagacaccaagggcaccctcccccacag

SEQ ID NO: 493251 - DNA, 577 bp, Homo sapiens
attttacattcccactagcaatatataaggattacagtgtcctcacatgcttgccaacacttgttattttgtttttttattttttatttttttgagacagagttttgctcttgtcayccaggctggagtgcaatggcacaatgttggctcattgcaaactccacctttcaggttcaagcgattctcctgcctcagcctcccaagtagctgggattacaggcacccataaccacacccggctaatttttgtatttttagtagagacaaggtttcatcatattggccaggctgacctcgaactcctgacctctggtgatctgttcgccttggcctcccaaagtgctgggattataggcgtgagccaccgcgcccagcccttgattttattttatttttttgccttccaagtgagcatgatgtggtacctcattgtggttttaatttgcgtttcatctgcttgttagccattcatagattaccttcagcaagatgtctactattttttaattgagtcattatgtgcattatttttaattcattcatttggtcattcatctgagcacctcttatgttcctg

SEQ ID NO: 493252 - DNA, 558 bp, Homo sapiens
gagagcaaagatatacagttctaccaactacactttgcgtgtggatgtgaccctactacatataaccaactgttttctatgttatgtcagaacagagatccaaccctgaaagtctgatctggcaagctcttgattcagtaaatgcttccaggtgattttggtgcaaytgcattgtgagaaccacattagagtaagatgatcagtctcacctagaagtttaacctggtatttcttgtaccaggtactggaagtctggagacagcagcctctccaccactcatggctgtttttcaccaatacctgagtagcagaataagaaggtgatgcctctcccagctagctgtaaccttccatacagccacagtgatccagagtcccagcttgaaaagtagggtgatgtgaccaagggtccccttcctccatgtaaagtaccaatgctgctaagaccaagtaaatctcactattctcgccatgcgtgttcgaccattcataaatcaggtactcaccacaagttgacaaagttgatgaaactcggggagaattccctttcctcagaat

SEQ ID NO: 493253 - DNA, 346 bp, Homo sapiens
aggtgagcattagatgtcaggttagatactgggttggaatcactcactgttaccttagaagggtagggaggattgtgggtagaagacgtctggrggtcagacatgggaggtttatggatgagaggacaatggaagtgaacaaaaagccatgggagcctgaaaactgttggagaaaagcactttgcggctccagcactgaatgtatctgctgtactctacctcctaccagtgattgatcagataacagattcattgatattatggtgattcagcaccttgcccttgtgcctgctcctaactgtacctgagatactattacacagccagatgtggtatcaaacattcc

SEQ ID NO: 493254 - DNA, 500 bp, Homo sapiens
aaagggtacccattgggtttcaatactggcatgagagatagactacacactccatgtttcataggacactgccttgtatttgttcatctcatttgattccaaatgcatcccactaaaatcaagtggctgtatccccttttagatacaagaaaaccaaggtccgaaggagtgaagttctggctcaaataacagtagggagcagagctgagattcaaattcaaggccgtaacacgtaccctaagaagttacattaatttaaaaacactgctattaaagaagtgttgtggagttgagaagtggaagaatgaatatagttgaggatactctgttcataaacctgaccagggcctgctttgttgttttggaaatgagttgaaggcagaggttctgggggccacagtggggcttaacatacaaagcgatccatacaaaggcaactgtgtmattaccttagaattaactagaggaactctaggttgtaattcttcagtgcaaacacc

SEQ ID NO: 493255 - DNA, 679 bp, Homo sapiens
tgtcttttaaaaattattttccaggcccggcgcggtggctcacgcctgtaatcccagcactttgggaggctgaggtgggcagatcactaggtcagaagttcgagaccaggctgaccaatgtggtgaaaccctgtctctactaaaaataaaaaaaattagccaggcgtggtggcaggtgcctgtaatcccagctactcaggaggctgaggcaggagaattgcttgaacccmcgaggcgggggttgcagtgagctgagatcatgccactgcactcctgcctgggcaacagaacgagactccatctcaaaaaaaaaaaaaaaaaaaaaaaaaaaatatatatatatatatatgtatttgccaatatctagaaagatacacatgtgcaaggaatacacacccaggaatgatctgttcccacatctgtgtccttccagcttcgctctgccttctgagcactagctgtctctgaaggaacagggctgtcaccctggaatattagagcaagatgggggatttgtttgggatctgagccttatcttggtgcagggagagccagataaaagtgacccagttagtcattcaagaaatatttgtgcacctaatatgccaggcccttggctaagtactggggatttaatgattaaaggaaaataaaaagaaatagttcctaccttcatgga

SEQ ID NO: 493256 - DNA, 679 bp, Homo sapiens
tgtcttttaaaaattattttccaggcccggcgcggtggctcacgcctgtaatcccagcactttgggaggctgaggtgggcagatcactaggtcagaagttcgagaccaggctgaccaatgtggtgaaaccctgtctctactaaaaataaaaaaaattagccaggcgtggtggcaggtgcctgtaatcccagctactcaggaggctgaggcaggagaattgcttgaacccccgaggcgggggttgcagtgagctgagatcatgccactgcactcctgcctgggcaacagaacgagactccatctcaaaaaaaaaaaaaaaaaaaaaaaaaaaawatatatatatatatatgtatttgccaatatctagaaagatacacatgtgcaaggaatacacacccaggaatgatctgttcccacatctgtgtccttccagcttcgctctgccttctgagcactagctgtctctgaaggaacagggctgtcaccctggaatattagagcaagatgggggatttgtttgggatctgagccttatcttggtgcagggagagccagataaaagtgacccagttagtcattcaagaaatatttgtgcacctaatatgccaggcccttggctaagtactggggatttaatgattaaaggaaaataaaaagaaatagttcctaccttcatgga

SEQ ID NO: 493257 - DNA, 596 bp, Homo sapiens
gctgtgtgacttgagacaatttacctaacctccggtgggtcatttttttcattacataacggggataataatgactgccttaatgatctcaccgaacaaatatgcaaaccaaatcaggtaacttgtaaagctgtcttaaattgattaccctatatgaatgtaagggtttatttttattgttgatgatgacaatgtagatggttaatcactaattaaaaataattggcttaaagaagcatagttatccaattaacttatccttgattgattaaacaggtttaaacccagttcttgtggttgttcattaccatggacatagaacgatcagttatatactaggatggttgttcttcaccttcagcgtgtttcagaatcacctaaagagcttgttgaaatgcaggcttcaggaacccctccccagagtttctgattcagaaagtgtggatcggggtctgaaattgtgcatttctaacaagttcccaggagacactgatgctgttagtctagagaccacaatttgagaactactgtcttaggtggacaggacattttcagycttgttacaaattgctataagggccctgaaaaaagattcc

SEQ ID NO: 493258 - DNA, 606 bp, Homo sapiens
aataatctccaggttcccagagggatgacttgcttaacacaccatttcttgtcttactgctttattagcactctggccatctcacttttatttccccagtatcctaccagtatttcccrtacctcccaaacttgcaaactagtctttgtcttagggtctacttctgggagaactccaactatgataactgaacaatgatatatgcttttagctttcattttaaaatggaagtttgtgagaattcacctaaaacctgtttgcaaagcagtgccctaaggaactctgtggctttggctttgggccactcacaccatctttttgagcctcagtttctttataaaattaacagatggaatcaatgacctcattctaagattctattattttaagacctgaattaaggtttcttccaccctcatcctagcaccatttcagcaatttactgctgggtgttacttctctatgttggtaaagaccattctctttcagggtattcttaaccaatgcaaacagggtttctaaaaagtccttctactggattcatgctttggatacccttttgtcacttgtcatcagctcagactctgaatactgtttctcctacta

SEQ ID NO: 493259 - DNA, 606 bp, Homo sapiens
aataatctccaggttcccagagggatgacttgcttaacacaccatttcttgtcttactgctttattagcactctggccatctcacttttatttccccagtatcctaccagtatttcccatacctcccaaacttgcaaactagtctttgtcttagggtctacttctgggagaactccaactatgataactgaacaatgatayatgcttttagctttcattttaaaatggaagtttgtgagaattcacctaaaacctgtttgcaaagcagtgccctaaggaactctgtggctttggctttgggccactcacaccatctttttgagcctcagtttctttataaaattaacagatggaatcaatgacctcattctaagattctattattttaagacctgaattaaggtttcttccaccctcatcctagcaccatttcagcaatttactgctgggtgttacttctctatgttggtaaagaccattctctttcagggtattcttaaccaatgcaaacagggtttctaaaaagtccttctactggattcatgctttggatacccttttgtcacttgtcatcagctcagactctgaatactgtttctcctacta

SEQ ID NO: 493260 - DNA, 495 bp, Homo sapiens
ggcacagggaaataatctaaatggcacttaacttcaaagagcagtaatatatataatctttgttcctcacatcagccctgtgaggtaggcaggtaggcattattatccccattttatagaaaaggaacatgaggctgcacccaagccaagattacacagctagtggtgagaggatccagaataggtccaagactccaggctcttagcccattgmtttcctatttcatattcatcattgcttccttcagagcagaatattaggaaacacttttatggctgaggccacaggtaccatcccaagtctctctactcagagcaaaagccgtaagaacctccctgtgtcaccttgggcatattacttagtgccctagaacaatctcccctcttctcttgcccaaaagagcactcctttggggtttaagcaatgcaagtgggacattatctgcaaattccccttgaaacacccatattttacctcaaaaatcaacaaggctt

SEQ ID NO: 493261 - DNA, 485 bp, Homo sapiens
tgcagtccatgtagtgactcagagatcccgggtgcactggcggcctagacctactcamttaacacaagccctccttggttgataggccatgggcagagagagcagagaatcaccaggttttacactgcttcagcctggaagtaacaccatcatctcagctcacatttcattgcctgcagataatcttatgacccatgtaagggtgggatggtggaaagtatgactgggaaagtgttcccagggaggaaaaagtgagctggatttagtgaacacagggcacgctctccttcatactagtgattcagcctgtgctttgtcccacagtttcctgaatttactcttctcattgtcgacagttctgaatggcagccagttctgcttcatatggcacattggtctgcagcatttccctttggggttatacaggacgacactattctgtcttccatatgaggtattctggaatgtaaggaagacagaaggat

SEQ ID NO: 493262 - DNA, 485 bp, Homo sapiens
tgcagtccatgtagtgactcagagatcccgggtgcactggcggcctagacctactcaattaacacaagccctccttggttgataggccatgggcagagagagcagagaatcaccaggttttacactgcttcagcctggaagtaacaccatcatctcagctcacatttcattgcctgcagataatcttatgacccatgtaagggtgggatggtggaaagtatgactgggaragtgttcccagggaggaaaaagtgagctggatttagtgaacacagggcacgctctccttcatactagtgattcagcctgtgctttgtcccacagtttcctgaatttactcttctcattgtcgacagttctgaatggcagccagttctgcttcatatggcacattggtctgcagcatttccctttggggttatacaggacgacactattctgtcttccatatgaggtattctggaatgtaaggaagacagaaggat

SEQ ID NO: 493263 - DNA, 584 bp, Homo sapiens
aatctagaccccatctcctctcccatgtcacctatcacaaataggacaccaggctttgtttggtcgtctcctctcaaatgacacaagcagggtcatctaggccttcaggacattttcatgtcaacaggtcagctccctgtagagaaggtgaatttttctctcatttgttgattccacatccattcaaagatacgtggtgagcaccagctccgagtctgactctactgcccaattcatcagcaaataaggacccaccccctgcaatcaaggagtccaaccatgagcaagtaaccaacctgcgagtcaatgatctccaatgctaataacaccatgaaaaggacagaatggagaaatggggttaagtcagaaagaaggacactttcttcactcatcagagaaagttcctctcaggtcaaagagacgccgggagactgaagaagacgtcaggtggggatgcctgaggaagtgggaatccagyttggttatggcagggatggccaggcaggaccttggggagagcctgacaaggcctatgggtcacgttccggagtgtggaagtcaccaaaggatttaaatagcaaatc

SEQ ID NO: 493264 - DNA, 503 bp, Homo sapiens
aaacaagataaagttaagtaataataatattatgaagaaaataaaataaagatttgatagrtgtggtctgggattggaacgagtacaaaagtagattctctagccagggaatctcagtggaatagtatatgatggggagacaacaagggctaagccatataatgattgcggatgttaatcaggattttggaaacaagggagctagaaagtctttgaactgttttttaaaagtgtggtaattttttatgtctttaaaaagaaaatattgattattgtttggagaatggatttcagagtggaataaagaaaggaaagccacaagttaagaggtaattgctacgcccctcctgtgatggttaatactgagtgtcaacttgattggattgaaggatggaaagtattgttcttgagtgtgtctgtgagggtgttgccaaaagagattaacatttgagtcagtggactgggagaggcagacccaccctcagtctgggtgagcaccacct

SEQ ID NO: 493265 - DNA, 503 bp, Homo sapiens
aaacaagataaagttaagtaataataatattatgaagaaaataaaataaagatttgataggtgtggtctgggattggaacgagtacaaaagtagattctctagccagggaatctcagtggaatagtatatgatggggagacaacaagggctaagccatataatgattgcggatgttaatcaggattttggaaacaagggagctagaaagtctttgaactgttttttaaaagtgtggtaattttttatgtctttaaaaagaaaatattgattattgtttggagaatggatttcagagtggaataaagaaaggaaagccacaagttaagaggtaattgctacgcccctcctgtgatggttaatactgagtgtcaacttgattggattgaaggatggaaagtattgttcttgagtgtgtctgtgagggtgttgccaaargagattaacatttgagtcagtggactgggagaggcagacccaccctcagtctgggtgagcaccacct

SEQ ID NO: 493266 - DNA, 516 bp, Homo sapiens
tcaggtagttgtgcaactttgaacaattatctctgtgtttaaataaacatattgaaaagtgtgtattacatataaagttttacttattgctttttaataggaaatttactccacaacttatttattcatttaatattgcattaccaatatgtcatcatgttctttctttctctgtctttgcatgtgaggtatatatgtatatgaattcatgtaattgtttgtgattgattacaaactatttgaggcatgaaattatgaccttattagagaaaagwtaggttggcatgacaaccatataccgtttgaaattgcaggttgtttggatccaaatgtataaactttatggttacttcttatatattacacatatatatacacacacatatatatacacacacatacatacatatatatgtatctccacacacaaacacacacattttatatatatacacatattatacctataatttcaaatgtgtgtattttaaacactatcatcactattattttaac

SEQ ID NO: 493267 - DNA, 516 bp, Homo sapiens
tcaggtagttgtgcaactttgaacaattatctctgtgtttaaataaacatattgaaaagtgtgtattacatataaagttttacttattgctttttaataggaaatttactccacaacttatttattcatttaatattgcattaccaatatgtcatcatgttctttctttctctgtctttgcatgtgaggtatatatgtatatgaattcatgtaattgtttgtgattgattacaaactatttgaggcatgaaattatgaccttattagagaaaagttaggttggcatgacaaccatataccgtttgaaattgcaggttgtttggatccaaatgtataaactttatggttacttcttatatattacacatatatatacacacacatatatatacacacacatacatacatatatatgtatctccacacacaaacacacacattttatatatatacacayattatacctataatttcaaatgtgtgtattttaaacactatcatcactattattttaac

SEQ ID NO: 493268 - DNA, 626 bp, Homo sapiens
atgccctcctcctactccatctctggctccatcacccacttaatgtcgcactctggccctccttcctttttcactgcataccaggtctcacgccccatcctcttccaccaaaaaccaggcatacccacaaaggccctccaaagtcctcccctgtgagaggtcacagggggccaaaggcataattccagttaatgttcctttctccctagctgacctctcctggctccttttccacggatcccacctccttccttaattttttttttttttttttttttttttttttttgagagggagtcttgctytgtcatccaggctggagtgacacaatctcggctcactgcaacctttgcctcctgagttcaagtgattccagccacctgagtagctgggatcacaggcacccgcaaccactcacagaaaatttttgtattttagtagaaacagggtttcactatgtaggtcaagctggtctcgaactcctgacctcaaatgatccacccgcctcagcctcccaaagtgctgggattacaggcatgagcctggcccgtgtcactcaaccttataaccttacctggcacgacatatatgtcatcctctcctccacactcaccctggaggacagg

SEQ ID NO: 493269 - DNA, 626 bp, Homo sapiens
atgccctcctcctactccatctctggctccatcacccacttaatgtcgcactctggccctccttcctttttcactgcataccaggtctcacgccccatcctcttccaccaaaaaccaggcatacccacaaaggccctccaaagtcctcccctgtgagaggtcacagggggccaaaggcataattccagttaatgttcctttctccctagctgacctctcctggctccttttccacggatcccacctccttccttaattttttttttttttttttttttttttttttttgagagggagtcttgctctgtcatccaggctggagtgacacaatctcggctcactgcaacctttgcctcctgagttcaagtgattccagccacctgagtagctgggatcacaggcacccgcaaccactcacagawaatttttgtattttagtagaaacagggtttcactatgtaggtcaagctggtctcgaactcctgacctcaaatgatccacccgcctcagcctcccaaagtgctgggattacaggcatgagcctggcccgtgtcactcaaccttataaccttacctggcacgacatatatgtcatcctctcctccacactcaccctggaggacagg

SEQ ID NO: 493270 - DNA, 457 bp, Homo sapiens
attgctatttcaaagcaccatacattttatttattttctaacacacccttatggaggatttattttgtgccaggcccttccctctatggtttcctgatgataacttatataagcctggcgccatttttaatataccatagtactaaatatcttttcaataaaaattctgaagtacctatctgatatggtttggctctgtgtccccayccaaatctcatctcagattggaatcccacatgttgagggagggacttctaatccccatatatggagggagggaggtgattgaatcatggggctggtttcccccatgctgttctcatgatggtgagtgagttctcacgggacctgatggttttataagcatttaacatttcccctgctcacacttctctctcctgccaccaagtgaaaaggtctttgcttccccctttgccttctgccatgactgtaagtt

SEQ ID NO: 493271 - DNA, 457 bp, Homo sapiens
attgctatttcaaagcaccatacattttatttattttctaacacacccttatggaggatttattttgtgccaggcccttccctctatggtttcctgatgataacttatataagcctggcgccatttttaatataccatagtactaaatatcttttcaataaaaattctgaagtacctatctgatatggtttggctctgtgtccccatccaaatctcatctcrgattggaatcccacatgttgagggagggacttctaatccccatatatggagggagggaggtgattgaatcatggggctggtttcccccatgctgttctcatgatggtgagtgagttctcacgggacctgatggttttataagcatttaacatttcccctgctcacacttctctctcctgccaccaagtgaaaaggtctttgcttccccctttgccttctgccatgactgtaagtt

SEQ ID NO: 493272 - DNA, 369 bp, Homo sapiens
atgctctctctgttgaaggccccttctcatggatcctcacttaccacagccttttccatggtcccagtttcaactcaaatgtcagcttctcagagaccccttctccaataacctgcctctatctcttagtctttcatatattacccgattttatcttccaaaagtggaagacttattatkattcatggagcagaaatatatatttgagaatcttctgtggagaattacagtcatggacacaaatgagatcctaggggaagagtgcatagaagagaaaaggagacatctctgctaggtcatgaataaattcaacacataatcaatgtagagaaattagctggcaagcaaaataggagataaaggatgtgg

SEQ ID NO: 493273 - DNA, 657 bp, Homo sapiens
tctctttgaaatttgaatgaacccaacttgtgacaaaattcatccaggtgcagttacatttttcccaggtcttctatctgtcatagataatcaaattttagggaaagatgaaaggcaattgtgttctctagcaggtctctttctaaggcagataatagaatgtaaatggaatgtaagagagtattctcatcctgtgctgtgggagaaacagaggagggctggggagtggagatgtgaacgtgaaagtggctgcttctatagttcagtacgtcaaagacccatattatggggtattgtaatctgagccccaatacactcaatagactctagaaaatattcattcattaagtacatttttaattagagagaactttaaaagttacttttaaatgctttcttgtatttacatcaatgtatctgcaattgtataaactattagatgagattatcaatcgtcttcaagttaaagtgctatttatcaaatactttcttttacaaaatrtcatttttcctgaaaattgaatccatttgttttgatagccagcttgttctcaccaaatccattaaattatttgctggatatagctaaataaaaaataatttaggactgctcaaatatcagactatctcaagggtgacatattattggagagaaca

SEQ ID NO: 493274 - DNA, 357 bp, Homo sapiens
tgtaatctgagccccaatacactcaatagactctagaaaatattcattcattaagtacatttttaattagagagaactttaaaagttacttttaaatgctttcttgtatttacatcaatgtatctgcaattgtataaactattagatgagattatcaatcgtcttcaagttaaagtgctatttatcaaatactttcttttacaaaatatcatttttcctgaaaattgaatccatttgttttgatagccrgcttgttctcaccaaatccattaaattatttgctggatatagctaaataaaaaataatttaggactgctcaaatatcagactatctcaagggtgacatattattggag

SEQ ID NO: 493275 - DNA, 579 bp, Homo sapiens
gcactgtttatcactgaatccccatgcycaaagagtaaaacctcttgttttggtcatcgattgttttgtgatttgtggggtacactggaaaagaaatattggaatcaatactagcagatagcccatgatgtatgcagcagtgatcatgttttgacaacacatgaatgccaatggaccatctgtctttgtcactgaaaacactgagcttagcagtatgcctcctgaccttgtcttgtattggaggaaaaaaaaatggcaaaattcaaaagtcctcacatgatttccacttagtttatgtagaaagatgtctatggtctggaaaaacgcttttcaataatttccatctttttgattcaaacatttaaaggtacatctatggaccatcataactttcatggcatgaattataaatccatctcttgctatctcttaaagaacgtgtatagaatgcaagtgcttgaaagtgacattattggtagtgtagccttgaatttattccacatgataaacgtaacaaaccaatcaaactttatgtcacagtgaatcaatggtaagttgggaaactgcaaacagtagcca

SEQ ID NO: 493276 - DNA, 579 bp, Homo sapiens
gcactgtttatcactgaatccccatgctcaaagagtaaaacctcttgttttggtcatcrattgttttgtgatttgtggggtacactggaaaagaaatattggaatcaatactagcagatagcccatgatgtatgcagcagtgatcatgttttgacaacacatgaatgccaatggaccatctgtctttgtcactgaaaacactgagcttagcagtatgcctcctgaccttgtcttgtattggaggaaaaaaaaatggcaaaattcaaaagtcctcacatgatttccacttagtttatgtagaaagatgtctatggtctggaaaaacgcttttcaataatttccatctttttgattcaaacatttaaaggtacatctatggaccatcataactttcatggcatgaattataaatccatctcttgctatctcttaaagaacgtgtatagaatgcaagtgcttgaaagtgacattattggtagtgtagccttgaatttattccacatgataaacgtaacaaaccaatcaaactttatgtcacagtgaatcaatggtaagttgggaaactgcaaacagtagcca

SEQ ID NO: 493277 - DNA, 579 bp, Homo sapiens
gcactgtttatcactgaatccccatgctcaaagagtaaaacctcttgttttggtcatcgattgttttgtgatttgtggggtacactggaaaagaaatattggaatcaatactagcagatagcccatgatgtatgcagcagtgatcatgttttgacaacacatgaatgccaatggaccatctgtctttgycactgaaaacactgagcttagcagtatgcctcctgaccttgtcttgtattggaggaaaaaaaaatggcaaaattcaaaagtcctcacatgatttccacttagtttatgtagaaagatgtctatggtctggaaaaacgcttttcaataatttccatctttttgattcaaacatttaaaggtacatctatggaccatcataactttcatggcatgaattataaatccatctcttgctatctcttaaagaacgtgtatagaatgcaagtgcttgaaagtgacattattggtagtgtagccttgaatttattccacatgataaacgtaacaaaccaatcaaactttatgtcacagtgaatcaatggtaagttgggaaactgcaaacagtagcca

SEQ ID NO: 493278 - DNA, 602 bp, Homo sapiens
gctgaactgatgagcctttacacaattactgagaagttacaaggccactcagaggctctagccttatgagtctgccttattgttgttattttacgttaacaaatgtgtttattggcctaagacatgaatttactatcagcagggcctttttttcccctcttacttttattattattattttttaaatcaggcaacactttgttgaacaaacctgaccccaaagaatgcttgctggcatattgtccaagaagtctagcagaagtttgtatgattatcctgatgagtgagtgcagtttagtctagtctcttttttgttgaataacaccattacacatagtcgcccgacaagtaggagagccagttttacctttgcttgggtgttcatcatccagtgtggtccaaagaggtcacagaagataactttgcaccctgcagcaaagccaccataaagccatgcacatatttgtcatcctcattctcacacttcagtttgccagtagcttctctgcaacrtgctggaggactgtttcaaggcccaacattcggtttcagggaagcaaactctaccccctagattcagaatttttaaagtgctcagaaaa

SEQ ID NO: 493279 - DNA, 530 bp, Homo sapiens
ccctcctccatatgcatacgcataagaacagactattctgcaggactggaagtgtcaaggctttgaaatgtttgcttccatcccctggagccttttrtagcttgagtaacttagatttgaagacaagtgctgctggggaacaggccatgacttttggcatatgaccagtctgggtggatatggggtggtgtatctagaaagcttgatataaaggctcacagtggagatttgagtacagatttatttttttctgagaaaggtaaacatgaagtttgagaagcaaggggaggaaatggaactttaggaagcatttcgtttgggttatgagaaaactcatactgaacatacagttatgagggttccccctgtgttatcgtttcagtctcattggaaagactggttttttttaaaaaaagcttgaatgaatgaggtaagtgcagaatgtgatcctaagagagtgtatgcacaagagaaactgacttcgatttgaggcaggtgggcaagcatcagagtggacctccccaagaagt

SEQ ID NO: 493280 - DNA, 530 bp, Homo sapiens
ccctcctccatatgcatacgcataagaacagactattctgcaggactggaagtgtcaaggctttgaaatgtttgcttccatcccctggagccttttatagcttgagtaacttagatttgaagacaagtgctgctggggaacaggccatgacttttggcatatgaccagtctgggtggatatggggtggtgtatctagaaagcttgatataaaggctcacagtggagatttgagtacagatttatttttttctgagaaaggtaaacatgaagtttgagaagcaaggggaggaaatggaactttaggaagcatttcgtttgggttatgagaaaactcatactgaacatacagttatgagggttccccctgtgttatcgtttcagtctcattggaaagactgkttttttttaaaaaaagcttgaatgaatgaggtaagtgcagaatgtgatcctaagagagtgtatgcacaagagaaactgacttcgatttgaggcaggtgggcaagcatcagagtggacctccccaagaagt

SEQ ID NO: 493281 - DNA, 623 bp, Homo sapiens
tccagtactattcagctataaaacagagtgagatcttgtcatttgcaacaacatggatagagctggaagacattaagttaagtgaaataagctaggcacagaaaagcaaacttcacatgttttcactgatttctgtgtgctaaaaattgaaactattggactctttgagatagagagtagaatgatggctactagaggctgggaagggtagtgggtgtgagacagaagtggggttggttaatgggtacaaaattatagttagattgaataaataaaatctagtatttgcacagaagaragactaaattattgtacattttaaaataactaaaagagtataattaaaatgtttgtaatgcaaataaatcataaacgcttgagtcgatggatacctcatttactctcatgtaataattacatcgtatgcttgtattaaaatgtctcatgtaccccatgcatatatacatccactatgtatccataaaaattaaaaaatacttgttttagatattatgcattcccttcattaaaggaatatgatttgtatataagaaataagagtgataatacaacatagtaaatacaatgcaattatgaatgcagatggacaaagtctgatccaa

SEQ ID NO: 493282 - DNA, 548 bp, Homo sapiens
aattgagaaaagtcctgtgttattattcctcctgatgcaggaatctgataataatacctttgtttattttttgtatttattcaatatgcctaaaagattgcactcccttgcttctactatctttgtccatatgcagaatataataatatggcctctgtccaccaattaattctctctgcatcagaggaagatgaaaacatgcttgataggtaactttaacattggagaacaatttgatcatgttcattctatcttcctttcctttcttttggagccagttttcctgaagagaaccaactttttgtgttccttctaacatatcccttacctgccacacccacatccatatctagacagcaggatatttcactggtctagcagtccctgtgattctgtgggtgaatctacacaattttagtatccagtatgmagtagccattcactcacaaaataaatcctttctccaatacttcaccctccctattaatacttttggtgttctgaatgacctttaatcctttatgttacttttcatactgccatatata

SEQ ID NO: 493283 - DNA, 548 bp, Homo sapiens
aattgagaaaagtcctgtgttattattcctcctgatgcaggaatctgataataatacctttgtttattttttgtatttattcaatatgcctaaaagattgcactcccttgcttctactatctttgtccatatgcagaatataataatatggcctctgtccaccaattaattctctctgcatcagaggaagatgaaaacatgcttgataggtaactttaacattggagaacaatttgatcatgttcattctatcttcctttcctttcttttggagccagttttcctgaagagaaccaactttttgtgttccttctaacatatcccttacctgccacacccacatccatatctagacagcaggatatttcactggtctagcagtccctgtgattctgtgggtgaatctacacaattttagtatccagtatgcagtagccattcactcacaaaataaatcctttctccaatacttcaccctccctattaatasttttggtgttctgaatgacctttaatcctttatgttacttttcatactgccatatata

SEQ ID NO: 493284 - DNA, 559 bp, Homo sapiens
gaatagtcactatgaatatgatcaatatgcagataagaaaactgaggcatggagaaattaagtgacttgaatcatttcacacaatagtggacttagaatccaaacccagctctttgtttctagaatctgtgcttttaaacactatgctgttktagacaaatgaggaaacatttcaaaaactatttggaaatatctatattacattcattcaccccaattattatcagcgtttaagtgaaaacatgtctggacctttatgtatgtatatgtgtttgtgtttgtataaatgtatgtatattcatagatatatatgattcatatatgaatgaattcatgtatgaatgtatgatttatgtatgtatatatgcagattttatgttcatatttgcagacatttacttatacatgtgcatatttttaaaaatgaaaaatagatgtgtatttaccatttaaccagggccttgaataacaatggcttgggacatgtacaaactatttactcaggagaactatttatttgccttgcttttggctgacatctcagtgggcatccatgatt

SEQ ID NO: 493285 - DNA, 559 bp, Homo sapiens
gaatagtcactatgaatatgatcaatatgcagataagaaaactgaggcatggagaaattaagtgacttgaatcatttcacacaatagtggacttagaatccaaacccagctctttgtttctagaatctgtgcttttaaacactatgctgttgtagacaaatgaggaaacatttcaaaaactatttggaaatatctatattacattcattcaccccaattattatcagcgtttaagtgaaaacatgtctggacctttatgtatgtatatgtgttkgtgtttgtataaatgtatgtatattcatagatatatatgattcatatatgaatgaattcatgtatgaatgtatgatttatgtatgtatatatgcagattttatgttcatatttgcagacatttacttatacatgtgcatatttttaaaaatgaaaaatagatgtgtatttaccatttaaccagggccttgaataacaatggcttgggacatgtacaaactatttactcaggagaactatttatttgccttgcttttggctgacatctcagtgggcatccatgatt

SEQ ID NO: 493286 - DNA, 559 bp, Homo sapiens
gaatagtcactatgaatatgatcaatatgcagataagaaaactgaggcatggagaaattaagtgacttgaatcatttcacacaatagtggacttagaatccaaacccagctctttgtttctagaatctgtgcttttaaacactatgctgttgtagacaaatgaggaaacatttcaaaaactatttggaaatatctatattacattcattcaccccaattattatcagcgtttaagtgaaaacatgtctggacctttatgtatgtatatgtgtttrtgtttgtataaatgtatgtatattcatagatatatatgattcatatatgaatgaattcatgtatgaatgtatgatttatgtatgtatatatgcagattttatgttcatatttgcagacatttacttatacatgtgcatatttttaaaaatgaaaaatagatgtgtatttaccatttaaccagggccttgaataacaatggcttgggacatgtacaaactatttactcaggagaactatttatttgccttgcttttggctgacatctcagtgggcatccatgatt

SEQ ID NO: 493287 - DNA, 606 bp, Homo sapiens
ctgcaataaccatgtcaggtaagaactaccaaagaatgccatgagaccagccagcagagcagagctggttaggtcaaaatgaaaatgcttgcaaagagctttcagtgcagtcagttaatatttgagagctccctgttggcagtgtgaataggctgtttccccatcttctctcccatagagaaatattcataagaatctggaaatagcgaggagcagaaagaataagcacccatcctstgccgatgctgcatagatattgaataatgaaagctgcttatgtgtaaatgcctctgtcctaaacctgttaatagagcgatgcgttactggttttggttagcaagttttaacattttagaagaggtctttgcaattctgcaccaagaattccttctggttatatagtctttaagtattggtttttgatagttgtgaagtttagtatggtgtggaggaatggagggctgtgcgaattacttcactgcactgttgtgttttcattccaacaataatgtaaaaagtatctgtgtaagcactggccacttatgcggcttctgggaccacataaacaccttcaataccaataaagtgtttctccagtggcagagt

SEQ ID NO: 493288 - DNA, 606 bp, Homo sapiens
ctgcaataaccatgtcaggtaagaactaccaaagaatgccatgagaccagccagcagagcagagctggttaggtcaaaatgaaaatgcttgcaaagagctttcagtgcagtcagttaatatttgagagctccctgttggcagtgtgaataggctgtttccccatcttctctcccatagagaaatattcataagaatctggaaatagcgaggagcagaaagaataagcacccatcctctgccratgctgcatagatattgaataatgaaagctgcttatgtgtaaatgcctctgtcctaaacctgttaatagagcgatgcgttactggttttggttagcaagttttaacattttagaagaggtctttgcaattctgcaccaagaattccttctggttatatagtctttaagtattggtttttgatagttgtgaagtttagtatggtgtggaggaatggagggctgtgcgaattacttcactgcactgttgtgttttcattccaacaataatgtaaaaagtatctgtgtaagcactggccacttatgcggcttctgggaccacataaacaccttcaataccaataaagtgtttctccagtggcagagt

SEQ ID NO: 493289 - DNA, 606 bp, Homo sapiens
ctgcaataaccatgtcaggtaagaactaccaaagaatgccatgagaccagccagcagagcagagctggttaggtcaaaatgaaaatgcttgcaaagagctttcagtgcagtcagttaatatttgagagctccctgttggcagtgtgaataggctgtttccccatcttctctcccatagagaaatattcataagaatctggaaatagcgaggagcagaaagaataagcacccatcctctgccgatgctgcatagatattgaataatgaaagctgcttatgtgtaaatgcctctgtcctaaacctgttaatagagcgatgcgttactggttttggttagcaagttttaacattttagaagaggtctttgcaattctgcaccaakaattccttctggttatatagtctttaagtattggtttttgatagttgtgaagtttagtatggtgtggaggaatggagggctgtgcgaattacttcactgcactgttgtgttttcattccaacaataatgtaaaaagtatctgtgtaagcactggccacttatgcggcttctgggaccacataaacaccttcaataccaataaagtgtttctccagtggcagagt

SEQ ID NO: 493290 - DNA, 649 bp, Homo sapiens
atccaggctgatgaaaaaaaaattaaatgtcagatttccaggaagaaatrtgaaggtaaattaccggccaacatttctaaatttagaaaattaaataatatagatttacttaccagcaacttcaaaacatctaggcttcataaacacatcctaaaaaatgaataatgcaagaacattttggaacaagttgtacatagaagaaaacaatgtctctttaaacactcaacctcaagagtatttaatagcacccaggcctcctaggcacatacatcatatttggcttcaatctcttaaaacccacagcagtttgaaagtggttgtataatcagataatgtcccaggcaaaataaagataaaaatctcagtcattccaccgcaccagatgaatctatcctgtcttcattacatgataggaaatggattagtttgtgatatgatttggctgtgtgtccccaaccaaatctaatcttgaattataatctccacatgtcaaaggagggacctgtaatcctcacgtgttgatggagggaagtaattgaattatgggggcagtttcccctatgctgttctcgtgatagtgagtgagttctcacaagatctgatggttttataaggggctcttcccccttttcacgcacttctctctcct

SEQ ID NO: 493291 - DNA, 649 bp, Homo sapiens
atccaggctgatgaaaaaaaaattaaatgtcagatttccaggaagaaatgtgaaggtaaattaccggccaacatttctaaatttagaaaattaaataatatagatttacttaccagcracttcaaaacatctaggcttcataaacacatcctaaaaaatgaataatgcaagaacattttggaacaagttgtacatagaagaaaacaatgtctctttaaacactcaacctcaagagtatttaatagcacccaggcctcctaggcacatacatcatatttggcttcaatctcttaaaacccacagcagtttgaaagtggttgtataatcagataatgtcccaggcaaaataaagataaaaatctcagtcattccaccgcaccagatgaatctatcctgtcttcattacatgataggaaatggattagtttgtgatatgatttggctgtgtgtccccaaccaaatctaatcttgaattataatctccacatgtcaaaggagggacctgtaatcctcacgtgttgatggagggaagtaattgaattatgggggcagtttcccctatgctgttctcgtgatagtgagtgagttctcacaagatctgatggttttataaggggctcttcccccttttcacgcacttctctctcct

SEQ ID NO: 493292 - DNA, 406 bp, Homo sapiens
tggttttcaaaagactccgaaaaatgaccctaacttgcctccctgtccctgtccctcattgtttcatgacatggattctatgccctggccaaaacagactatttgctatttccagagtacatctcatgtcttcccacttccacagtaaygctcatattagtcctttcaccctgcatcactcacagttactaccctgatatctgcttaccaaagttccactcttacttcatgaacccctcaaatggcattttggaatccctacatctctcatttggcccttaattttttttttttttttaccttgaattatatcagtctgcatcttatcttcccgacaagattataatttcctgtaggacaagtatgatttctctttgcattttctacacagggtcctacacaagaa

SEQ ID NO: 493293 - DNA, 537 bp, Homo sapiens
ctgctgaagacatctaaccagttcaatggttagattttagtatttgcataatactcagatctttgtgacaatctgaaaatattataaagcttatagatgtctgaaattacttaggccataaatatgcttaattttaagtccctaggatcactgaaacrctactttctaaaaaccatttataggtaagccaacatacacgtggcagaatatatgttcaggtctaccgaacagagcagatgtgggggtacctccagagagacaaaaagggagcaacactctctttttcagcaggcaagaaaggtgttgctattttaagtcccttagcataatacatctctttgaacagcactgaaatgaattgaaccagatgaactccgccttgttgttagtaggtcatttcatgcttaacaacccgcaacacattcaatccacatcaactcaacacctttttcacaaaggactttaaagctgaaatggtttccagtgggagataagcaactatgcgccctgcagggaagtagtcttgttagtggctat

SEQ ID NO: 493294 - DNA, 207 bp, Homo sapiens
aaccagggaccttaatctccaakacctggtacttgtctcagacatggaaacacatgccatccatttacccaaaccaggaaattcattctaatacctttgtctccctctcattcctatccaagccattctttcactcaataaatatttactaaacactgactatgtgccaggccctgttactgtcgctgagactacagtaacgagtga

SEQ ID NO: 493295 - DNA, 189 bp, Homo sapiens
tctcaaactgttcacaaggcaaccagggaccttaatctccaagacctggtacttgtctcagacatggaaacacatgccatccatytacccaaaccaggaaattcattctaatacctttgtctccctctcattcctatccaagccattctttcactcaataaatatttactaaacactgactatgtgcca

SEQ ID NO: 493296 - DNA, 627 bp, Homo sapiens
ttgaaaagtacaaaggtgcaaaggtgtccgggcacagcrgctcacgcctgtaatcccaatactttgggaggctaaggtgggcagatcacctgtggttggaagttcgaggccagcctgaccaacatggtgaaacaacgtctctactaaaaaaaaaaaatacaaaattagccaggcgtggtggcgcatgcctgtaatcccagctagtcgggaggctgaggcagaagaattgcttgaacctgggaggcagaagttgcagtgagccgagattgctccactgcactccagcctggacaaaccccgtctcaaaaaaaaaccaaaaaaaaaaaaaagaaaagaaaagaaagaaaaaagaaaagtacaaaggtttgcagagattgtgggaacttggttagctataaatgatctatacctagaaatattgttgctcacatgtatacaaggaaaaggtagctcaacaggcatatctcaaaaaaaaaatggaatgactattttcaaagaatcaccatcatttcccagtttcccccttcagggatgtaaagacaattaacttcagtgcagtgtttgttagaggttgctatcattggcaatcattctgaccagaacagcaactgtaataaaaacaaatat

SEQ ID NO: 493297 - DNA, 627 bp, Homo sapiens
ttgaaaagtacaaaggtgcaaaggtgtccgggcacagcggctcacgcctgtaatcccaatactttgggaggctaaggtgggcagatcacctgtggttggaagttcgaggccagcctgaccaacatggtgaaacaacgtckctactaaaaaaaaaaaatacaaaattagccaggcgtggtggcgcatgcctgtaatcccagctagtcgggaggctgaggcagaagaattgcttgaacctgggaggcagaagttgcagtgagccgagattgctccactgcactccagcctggacaaaccccgtctcaaaaaaaaaccaaaaaaaaaaaaaagaaaagaaaagaaagaaaaaagaaaagtacaaaggtttgcagagattgtgggaacttggttagctataaatgatctatacctagaaatattgttgctcacatgtatacaaggaaaaggtagctcaacaggcatatctcaaaaaaaaaatggaatgactattttcaaagaatcaccatcatttcccagtttcccccttcagggatgtaaagacaattaacttcagtgcagtgtttgttagaggttgctatcattggcaatcattctgaccagaacagcaactgtaataaaaacaaatat

SEQ ID NO: 493298 - DNA, 652 bp, Homo sapiens
gcgcaaatgcaagaaacgtatttctgccaccacttgagtgatcttccaagtggattcttcccgcgcctccaggtgagaaagcagcccgctgccaccctcagggtgaggccacgcccgtacctgaactgcagaaatcgtgttggaataaatgtgtgctgttttgggcctctatgtgtggaataatttatgttgcaataaaaagaaatcattataattgccaatcttcttaattcttgcacatctracagtcaaaatgaaacaaaaaaaatcactcattgtttccattttcattcatttgatcattactcagtagagaatactttttttttttggtaattttttgaccattatattttatatttttttaaagttcatgttctcatttttctttggttttattcaattttattgaaagttctttgtacaataatttattagccacttgtcagtcatatgtatttcaaatgtcttttatagtctatgaattgaaacatcttaatctttatgaactgtggcctagaaaagtcctctctattttctgttaaaattgatttatttttctaaagtttgaatgatttcatttatacatagagctactaattttctaatctgtagctttgcttcatttatacatgtaagtatttgcttccta

SEQ ID NO: 493299 - DNA, 652 bp, Homo sapiens
gcgcaaatgcaagaaacgtatttctgccaccacttgagtgatcttccaagtggattcttcccgcgcctccaggtgagaaagcagcccgctgccaccctcagggtgaggccacgcccgtacctgaactgcagaaatcgtgttggaataaatgtgtgctgttttgggcctctatgtgtggaataatttatgttgcaataaaaagaaatcattataattgccaatcttcttaattcttgcacatctaacagtcaaaatgaaacaaaaaaaatcactcattgtttccattttcattcatttgatcattactcagtagagaatactttttttttttggtaattttttgaccattatattttatatttttttaaagttcatgttctcatttttctttggttttattcaattttattgaaagttctttgtacaataatttattagccacttgtcagtcatatgtatttcaaatgtcttttatagtctatgaattgaaacatcttaatctttatgaactgtggcctagaaaaktcctctctattttctgttaaaattgatttatttttctaaagtttgaatgatttcatttatacatagagctactaattttctaatctgtagctttgcttcatttatacatgtaagtatttgcttccta

SEQ ID NO: 493300 - DNA, 528 bp, Homo sapiens
gggctggcagggcccctgctccagtctctctttgtattctgtgctatggtttcccctgtagggcccttcatgtcttatcctaagtgagttaggaaagaagaggtatgttgaggggctggtgagagaagaaacacagtaaaagaaaacggagccttattggaatctgtagagttagagcctcatggtctcacttcctgcaaactttatttaacttatctatgactttggagaggaatctacagtctgattgttccttctattttttattaacttttttttttttttttttttactagcacagtgattccaagccattgatattcagggtgcctgattgtactcatactttgtctaaactaagtattttggttcattcaaaacttagaagaatttggtctagaaataactggaggtagaacatggtgtggccaatggagctgtgaatcaagagattcttatgrtagtggattttcagttaagaaaaatcagcccattaaaaaaaaggaaatggtacttcagaggctcacc

SEQ ID NO: 493301 - DNA, 576 bp, Homo sapiens
ctagtgattgttttcgtgtatcaagaaagttggtaatgcaaattgtaatgattgcaaaatatttgtatatgtttactgtctacccacaaatacgggtctaatattctggtttcatgggyctcagaatgcacagatctgttgaagcagcattgatatttatttttaaagtactagtaattttaagaagacaatgcacacggtaatttaatacagacaactatagaaagtgcagttatatataactttgtgaagcaatatttttatttaaataaatatttgctaaattacaaacagttgcacacaatagcactaccaatcagatgagaataggactcgctggttgaagccaattttctgctctagagtaggcttaaataggtgcagaataagaagaatatttggggtagaacggaagaacccagagaaaactaaggcaagaaagtgagaataagccgactgggcggcgtggatacttggcgagggtctgctggccaggcggtggaaagttacggagagtaggggaaggttttggtgaggtttgaagacaaaaaatgtagtttttgttcagtgtcgcgg

SEQ ID NO: 493302 - DNA, 550 bp, Homo sapiens
tgcaaatgttaaattgacttttgttaacctgattgtatctagagtcttctattaggttgaaaacatttatttcggtcgagagcggtgagtcacacctataatcctggcactttgggaggcttaactgggagtgttgcttgaggccagaagttcaggactagctttggcaatatagcaagaccccagtctctataataagtttttaaaaaattagctgtgtctggtagtgcatgcctgtagtcccagctactcaggaggctgatgcacaatgattgcttgagcctaggagttcagtatcagcagagtgagacctcatctctaaaaataaataataataataattattattatttgctaaatcagttctatttaaaggctcagatactttatcctaaccagagtcaatctcacaaataagtttactctgtgtgtgtgcattatrtgtgtgtgtgtgtgtgtgtgtgtgtgtgtatgcatataggcaagtaattaaatgtttttcatgaagttttaccttttttaaagtcatgtcttgtaaagcaaaggaaat

SEQ ID NO: 493303 - DNA, 501 bp, Homo sapiens
acatttagattgaagggaggatttgctgctaaaaaagtttgaggcccattcttgcaagtgatctttaaggcccctcttagctttaatgtctgggacagggtcagagttgtaaagacataactttagtaaatcaagacagtcagaggatactttgtattcacctggctgggtctgtcsagaatgcagatatctgatgcctttgaaagaaaaggctgtgcctgaactctgctgatccaaacacaatttgagaaagtgtgttgattgtatttgtggagatggccttcttaaacagggccagttagaaaaaacatagtctgagttttcttctcccgtgagctccaccattccttgagggtttcagttggtcagggatgaaaggtatgtagcattagtggcttgtttaatgctaactccttgtttttcctcttcctctctatcttgcctcatcttctttttaccctgtccaccttcaatcctgtctacctcctgtggccccaaagc

SEQ ID NO: 493304 - DNA, 525 bp, Homo sapiens
actgtctttataaatatggctttctacatttagattgaagggaggatttgctgctaaaaaagtttgaggcccattcttgcaagtgatctttaaggcccctcttagctttaatgtctgggacagggtcagagttgtaaagacataactttagtaaatcaagacagtcagaggatactttgtattcacctggctgggtctgtcgagaatgcagatatctgatgcctttgaaagaaaaggctgtgcctgaactctgctgatccaaacacaatttgagaaagygtgttgattgtatttgtggagatggccttcttaaacagggccagttagaaaaaacatagtctgagttttcttctcccgtgagctccaccattccttgagggtttcagttggtcagggatgaaaggtatgtagcattagtggcttgtttaatgctaactccttgtttttcctcttcctctctatcttgcctcatcttctttttaccctgtccaccttcaatcctgtctacctcctgtggccccaaag

SEQ ID NO: 493305 - DNA, 624 bp, Homo sapiens
tgccaccagttggaattctaggggatacttggtctttataatttctgagtacataagcatctactatatgtgcttaatacaaatgaatgccattttaatgtaccttaaaatttctaagcaaatacatgaaaagcartgtctaatttcttgcttattttcaaggtatacagataactctgttatattcagaaagagcagggacctgaaaaaaaaaatctgtgttaaagtctcatatgaactaaaaagaaaaagtaatttattcttctgctacttctcttttcagtaagggtggttgccttgtcttgctcattgcaagaatgaaagctgtataagttgaatgaaaatataaatatgactttgaaggtgggtaagtcttaccttcccttctagcagtctctgaagttgcttgaacaatggcttattttattattagttgggactctttggttgcaagtaatggaagtatacttgaactagattagcaaaaatgtaaggcttgttataacattgcacaagcacagaactcgctgctggctggtaagatataggactactgcattatggggatttttgaattctaatctactagagggaccattgttttaaaagttctttagaagttat

SEQ ID NO: 493306 - DNA, 606 bp, Homo sapiens
ggccttcataaggataaataaatgctctaggtgtatttaaaaatacatcctgcctaaagcatgaggggatttttctctgatcttgtcttgagaaccttgaaggttcctgcaggtaagactcatgattgtgtaccctcccratactcttcttccccagagtttttaactctcaagcttttccacattaagcctctagcatttcattgattatagtttatgtttttctaccaccttactaggttcagcagtggactgttgctcttgagtttctgttccagcaagctgtgattctttgtatctgtctgtctgtgtctcaagtttggggtgcagaaaattgccctatgacttcaattttctgatagctctaataataattgtcaattttctgtttgttgagttctttcttgttatgagtacaagagcaacaactttcaacctttttacctgcctgtttattttgtcattatgaaagaaattgtatcaccatcattctttaatcctatgtttggcttttaaaataattttcatattttttggaaatacacaaaataggccatatattataaactgcaatttttggtgttatctttttattcctcttgggtt

SEQ ID NO: 493307 - DNA, 548 bp, Homo sapiens
ttcaaagggaatgcttccagtttttgcccattcagtatgcaattggctgtgggtttgtcataaatagcttttattattttgagatatgttccatcaatacctaatttatttagagtttttagcctgaaggactgttgaattttaaatgattagttaatgggtgcagcacaccaacatggcacatgtatatacatatgtaacaaacctgcacgttgtgcacatgtaccstagaacttaaagtataataaaaatatacaaataaataaataaataaataaataaataaatatgcatggatgtctcaacttcacataaattatcatagaaaaaatctaatcacaaaacgacgtttgacaagattatgtgatctttactgcttttaaagactaataatctaggaatagattgagaatattcgacataataactaacaattcacccacaaataatgtgaataatactatatcacataagagacactcatttactttgatttatattattgcatgcctagaaaatcaaaggtgcaactaaaaagcagttggaat

SEQ ID NO: 493308 - DNA, 596 bp, Homo sapiens
aggcctagagtgcctagaaggaccttgaaggtgggactccaggcaggttgctgtggagccctgcccgggcttcctgggagaggaggcaaaactgctctgagcacggcgtataacccctaagccctgccctgctgccctgtggaggcccagtaagggggtrgcccttcccacagacctaagtatgggcagtgtgctcagaacccaaagccactccagggactactgtgatggccagaacctgccagaactccccggtctccctaatggtgacagtttatggctcagagccataagccagattccctcccctgccctctcctgccctatgctcccttccccttccctcccctctcctcttctctcccctcctttcctctctaaaggcaaatttctattcagaagaaggaggaaaacatcacattaaatagatgtggctctcctgctctgatcaccgtcatcacaagccaggtttaagccacccacagttgattttttataatttataaaaaattttataattttatagtgatttataaaattgcacccttcacctccagctccccttagggaaagagcacaaacagatcgtttcataa

SEQ ID NO: 493309 - DNA, 583 bp, Homo sapiens
tgcctggggtccaggcggatgcgtggcagaggtggcttcccctgcacagtgcctcttatggggctccctccaggaccccttctgggtcagcggccggccctgcagccacatccccgtggcagtgaccctccctgcccaccccacacccctattctctttgcattggtgaaggtaatgacttcccaaccaggcttccagctaaataaacatgaagcgcattgagccagcagttcaggctgggtaccagctggtggtccaattcacyctcgtcatttttcattccgaatgaaattaagctcccgagagcagaaaagaacccttttctaaaaaggaaatgcatcagcgaatcccttaggggaaaaacattttgacatggaagttttcctgtactttattcagccaacagggcgaggttccctcttctccttgcaccccttccgttacccctgctttcgtggccgtgttctcaatcaaccttctcatggattcgtttgtgggaaagtctccttccaccacctccccacccatagctccccatgcccatcccgtggtgctgccaagcccccctccagaactgcctgga

SEQ ID NO: 493310 - DNA, 436 bp, Homo sapiens
ctccaagcccagcccgagggcctcctgcttcctgaccatccatagcccaccatgtgccacttgaccacacagtgttagtatgggtgagatggggtgggggagctaccgtaaccagatctgaagtcctttgagggtggccgatgcatctggcagagagccaggcacagtggtgtgctggcaaccctgcctgataccccctgtgcttctgtgtccattggggaggggccctcacccattccttcacttcccttcaaggacttcagtgagcgtgcsgtctgcaccctccaggtattggggatgtgggtggccctgagctcatgaagcctaccgtcttggaggttggggggggaccattagtccccaaacaggaaatcatgatcacgtgagtgctcagcagagaacagaacaagtgtgaggcccaggctgtgcttcaggc

SEQ ID NO: 493311 - DNA, 553 bp, Homo sapiens
tgtccttccaggaaaggacaaccagggtggccgtgctgggggcrgcgacagccggacagccactcagacaggagtcgagggaccaagctgtggccacttagctgtagtgtgaccttggcacggctctgcctccctggctccatttcctttgccgtgggccgaggcctccagccctgtgaccccaggctccccactcaccgtcctaactcagcactcctttggttgcccgcgacagatgccctccggaaagtggcttcagcagccaggtgcttcgcctagctggagatgcgtgggaatggctctctggagcctctcttcttggctttcctcctcttgctcgcaggctggctgcctctgctccgcaggccacacgggagaccatgctaccagccttccatttgtaccggctgccgtgtaggcctctaagggaccccagtctcctctacggccgctccagaaaggatccagacggctggagccaagaccctcctaccttcggctggcgtcctgtcccagaagccacatggcctctgaggaggggttctccgtgtgt

SEQ ID NO: 493312 - DNA, 557 bp, Homo sapiens
ctcttccatgagccaggcgcctaacgggaaaagaagccatccgcctcctcccccgacaccctccccgcgtgcccgggccaggccaggygccagcagcttggctgggaggaaaggaggcgctcaggccccggggggcaggcagtggagggcaagcccaagtccaggcaggtggactggggggtgggaaatgtgtgtaggtgtgcaggtgcactgctgcgtgcacgatcactgcaggcgcgtgtgtgtggaggggtcgggtaaggcgtgtctgggtcagtgattctcaacagggggtgattttgccccgccccctgcctgaggatatttgataatttcacaatggcctgggggttggagggtgctcctgtcatccaggggtgcttgtgtgagaatgcactgggaatgtgtgtgtgtgtacacgtgtacagggactgcatgtcttgtgagtgtgcatgaacagggctgtgtgtgtgtgtgtgtgtgcatgaagagggtctgtgtgagcacatgtccacgaggcctgcgtgtgtgcacagaggctgcgtgtgtgagtccat

SEQ ID NO: 493313 - DNA, 557 bp, Homo sapiens
ctcttccatgagccaggcgcctaacgggaaaagaagccatccgcctcctcccccgacaccctccccgcgtgcccgggccaggccaggcgccagcagcttggctgggaggaaaggaggcgctcaggycccggggggcaggcagtggagggcaagcccaagtccaggcaggtggactggggggtgggaaatgtgtgtaggtgtgcaggtgcactgctgcgtgcacgatcactgcaggcgcgtgtgtgtggaggggtcgggtaaggcgtgtctgggtcagtgattctcaacagggggtgattttgccccgccccctgcctgaggatatttgataatttcacaatggcctgggggttggagggtgctcctgtcatccaggggtgcttgtgtgagaatgcactgggaatgtgtgtgtgtgtacacgtgtacagggactgcatgtcttgtgagtgtgcatgaacagggctgtgtgtgtgtgtgtgtgtgcatgaagagggtctgtgtgagcacatgtccacgaggcctgcgtgtgtgcacagaggctgcgtgtgtgagtccat

SEQ ID NO: 493314 - DNA, 557 bp, Homo sapiens
ctcttccatgagccaggcgcctaacgggaaaagaagccatccgcctcctcccccgacaccctccccgcgtgcccgggccaggccaggcgccagcagcttggctgggaggaaaggaggcgctcaggccccggggggcaggcagtggagggcaagcccaagtccaggcaggtggactggggggtgggaaatgtgtgtaggtgtgcaggtgcactgctgcgtgcacgatcactgcaggcgcgtgtgtgtggaggggtcgggtaaggcgtgtctgggtcagtgattctcaacagggggtgattttgccccgccccctgcctgaggatatttgataatttcacaatggcctgggggttggagggtgctcctgtcatccaggggtgcttgtgtgagaatgcactgggaatgtgtgtgtgtgtacacgtgtacagggactgcrtgtcttgtgagtgtgcatgaacagggctgtgtgtgtgtgtgtgtgtgcatgaagagggtctgtgtgagcacatgtccacgaggcctgcgtgtgtgcacagaggctgcgtgtgtgagtccat

SEQ ID NO: 493315 - DNA, 582 bp, Homo sapiens
gtggggtatggctcagggcaggtgtgtcctgctggaggagaggctaatggctggggcagcaaggttttccttatgagaggacagcacttaaggtggcctggctccttccccagggaccccaccgccacccatctcacctccccaggaccccaccgccttcccttgcctgtcccattttacagttgaaacacagccccaggacggcctgcggcgctgactcagtctccctggctgtggccgggcagtggactgggcaggtgctcagaggtacagacaggtgaagcagagagcacctgctgccccctgggccagggttctagaccaggtggtgcccctcacctcgtgaccgcgtatcctcatcctgggtgtgctgagtgtcctcaacctcaccatctgtgggatcagatggggtcmcactcactgtgattctcagaggacggcactcagagtccccctccctcaccaagtctctgccccctcctcaatctctgctgtgactgagggtgcccaggtggcctttcccatggactcagaagccagccccgccgtgctcttcctccagacccctcttccaggcccacc

SEQ ID NO: 493316 - DNA, 281 bp, Homo sapiens
taagacatttcatatacagtgagcagaaaggaactttaagatgtgcttttktatgacattgtttagattttgtttaactattagtgttaataataactattagtctaccattgcgtctcagctaggtgttgtgccagacccttcacattcattctttctaatccttacaccaaactgcaaggtgactattattattcccatgtgagatatgaagtagctacgtctaaaaagcagtataatgtgaaaagagccccttgcattaactgggtgctttatttttc

SEQ ID NO: 493317 - DNA, 591 bp, Homo sapiens
tttatatgaaagaggtagaaggtcttgtacctagtgaacataatctcattgaattcctccagcaatcttaaaatatgggttttatttacctcatattacaggtgaggaaactgaggcacaatttggcgatgtctctgcagagaactaaatgatcagcagaactgaaagccccatctaggcttattaaaatccaacaccctcactctttccaggatgtgaaacttcctggagcccttcttcatgccagtctcacccttggccctttgcctcagggagctcactcaagcctcatcacagagctagaagtgagctatgattatccacatgacacatgtgagggcactgagaccccaaagaatccccagaaagcagatctggcattcatgatcagcaacacaataaatgctgccttatagtgtttgattttctggtggcaagttatgtcttcttaaattgccaratgaacgcaatgcccatctcctttcagctagcacattttctctttgccagggaagcagtgctgcgtgatggctgagcacctaagctctaaagtcagactgcctgcctttaaagcactgtcctgtcactcac

SEQ ID NO: 493318 - DNA, 473 bp, Homo sapiens
tttcattcaccttttattctcttatttttctcttattgaaacgttgttataaaacaaacccatgaacaaaaatctaycttcaatgtatctagcctgttagtgtcaacctctcaacatatcctcctacccttcaacaaatattctgttcttatttattggaataacctttgttcttctttttgtatattgcattttattttattttttaaaaaatctttacttctatttgatatgttttggacttttcctttcttaatctggttaatttcccaatgttgaaccatttcaaattaacactgaaagatacagaaccctaggctctttttactatttatttacatatttatttatttatttatgtgttatttcttaggtagcatttgtctcaatggagatttcatgtccccctttaacctacgacttgggccttttgaaatctaaaaattttccttagtgccttctaaagtcataat

SEQ ID NO: 493319 - DNA, 292 bp, Homo sapiens
tgtccacaatcagtaagttgaggatggcaggacagatcaccagagcataagcaaaggtatgagctacactcacagctaagacactgaactatctgccctgggtctaagcaaaggccacagggttggttttccagaagctccaagatasgtgcatgtatatccagatccaatgttcacagcttggaactgtaatctttaaaagctaagttgagggctcaagtcaaaacatttctctcccaataaaaatcatgactacttgcagaaggaaaagcctggctatttggtttttagg

SEQ ID NO: 493320 - DNA, 561 bp, Homo sapiens
gtaaaaaatggaatggaatatgcttctggtgtgcatttcytaccagaactatttcattcaataataaaaaatatggaggctgaggttgattgtcacaaacttgccatgagcatttcttcaataatatatattgaattaaagaggaacgaaggagaagggcaaggatatccaataaatttaaaaaaaaaggaaaagtaaggaatatagaactgtgtctatgaagatacataagaacatcaaagaggaccatgaaaaattcagggaaaagttaagagtctgaagaaccaaaggatattctaactaaattcaagaaagcttttcttgagaacattccaaccacgaaaaagtgaaatatggaacaaatcataaaggcaaaaagggcataagcaaaataattatttttataacctccatagtaccaaccataattctttagtttgctttgacgtcgacccttccgaggcttgatgttatgaatatttatatactgcataatgatagcaaaagacattcataaatggtagtcaatgatgttcagacatttataaatgtagaactggt

SEQ ID NO: 493321 - DNA, 642 bp, Homo sapiens
tttgggaaaagatttatcatttctaataaaactaaatataccatctaccctatgcctcagtaattccagcccyacctaataggattgcaaatggaatacacaagttgaggatccctaatccgaaaatccaaaatccaaaatgctcaaaatccaaacctttttgaacattaacatgatgcccaaaggaaatgctcattgaagtatttcagatgtcagagtttcagatgagggatgctcaaccagtaagtataatttcgagtattccaaaatccaaaaacgcttctggtcccaagcatttcagataagaaatactcaatctgtaccacctaataataaaaaggatgaactattaatatactcaatatcttgaaaacgctgaaagaagtcttatacaaaagggtatatgccatatgtggcttcattaatataaagttctacatctggaaattaacatattttgggagataaacaaaatacatattggttacctgggggtacaggtgaatgcacaaagagggaaggggcacaagggatagaggctggtttccacaggtctatgtgttagtcaaatcttatccaataggatacttaacatttgtgcatttcacgatatataaattttatcttaaaaggaaaaaatgt

SEQ ID NO: 493322 - DNA, 416 bp, Homo sapiens
atgatctataaaaacaatttttaggcggggcacagtggttcaygcctgcaatcccagcactttgggaggctgagacaggcagatcacaaggtcaggagatccagactatcctggctaacaccatgaaaccctgtctctactaaaaatacacaataattagccaggcgtagtggcgggcgcctgtagtcccagctactcggaaggctgaggcaggagaatgacgtgaacccgggaggcggagcttgcaatgagccaagattgcaccactgtactccaggctgggcagcagagcaagactctctcaaaaaaaaaaaatttttttaatgtacattctgacagtaattatataaaaaggcatatacatatgaattaaagatgaaatcttctatatacagtgtgaaagaggtatgccgcag

SEQ ID NO: 493323 - DNA, 416 bp, Homo sapiens
atgatctataaaaacaatttttaggcggggcacagtggttcatgcctgcaatcccagcactttgggaggctgagacaggcagatcacaaggtcaggagatccagactatcctggctaacaccatgaaaccctgtctctactaaaaatacacaataattagccaggcgtagtggcgggcgcctgtagtcccagctactcggaaggctgaggcaggagaatgacgtgaacccgggaggcggagcttgcaatgagccaagattgcaccactrtactccaggctgggcagcagagcaagactctctcaaaaaaaaaaaatttttttaatgtacattctgacagtaattatataaaaaggcatatacatatgaattaaagatgaaatcttctatatacagtgtgaaagaggtatgccgcag

SEQ ID NO: 493324 - DNA, 416 bp, Homo sapiens
atgatctataaaaacaatttttaggcggggcacagtggttcatgcctgcaatcccagcactttgggaggctgagacaggcagatcacaaggtcaggagatccagactatcctggctaacaccatgaaaccctgtctctactaaaaatacacaataattagccaggcgtagtggcgggcgcctgtagtcccagctactcggaaggctgaggcaggagaatgacgtgaacccgggaggcggagcttgcaatgagccaagattgcaccactgtactccaggctgggcarcagagcaagactctctcaaaaaaaaaaaatttttttaatgtacattctgacagtaattatataaaaaggcatatacatatgaattaaagatgaaatcttctatatacagtgtgaaagaggtatgccgcag

SEQ ID NO: 493325 - DNA, 646 bp, Homo sapiens
atcttctatatacagtgtgaaagaggtatgccgcagctgtgagactgtgcaatgacaccattagacatcatcatgatatagccaaagaagggtagactactttgcagatgaacatgctttaacaaccagtgttgaatattttcagaataagcgtttttcagatctctgacttatgctaccatgtattgtgatagccaaaacatttcaactttgggaataatttyatttatcattatagtagactaaattatgggtcccaatcttcactggttctctcctaggtttctatcaacaccacgagagaaacacaccctccagcctgggtcccagaatgaggcaggtgaggcagaacggcagcagaacagccggctacacatctacagcctaaagcagagctgcctgggccaatgctatgcctgtatgtatgtagcatcactgtggcaatagctatctgatacaatgatactaaagaataatacatctttaacaatatattcacaaatccatatagaaaagatcttgaataggacatataagtatgtaactaaattgttgagcatattaataatgccaatagcatttccatttggcagaaaaagatgacaacacattaagatttccaaaaagtttggacccaataaaaaac

SEQ ID NO: 493326 - DNA, 495 bp, Homo sapiens
ctggtctaggttgtggcacagctattttaaaggaatctcagtctgtagcactgccagtgtactatccactgattaagacgctcttgagctctgtgggctaagaattgctcttctattgtatcctatcagttgtctagcatgcatctagtaaaaaatgtttgcagcaaagatcttcatagataggctgagtggaaaaggcttggaaaataacaaagttaattactttgaggatggcttagaaatgtcattttgcccatttgcccmatataagagatgctatgactcattttttatgtatatgtatatacatatatatgtgtgtgtatgtgtgtgtatatgtatatggtgtgtgtgtttaattcggacaatcttctataaggtgctaatagtattgggtctacagtgggattgatctctagaattaacatctgcatctattctgcagaatcaatatgattttgaggatcaaatttagaggtttatactaactgctgc

SEQ ID NO: 493327 - DNA, 633 bp, Homo sapiens
tcagcctcttttctcacttaagacatgtctctacaaacaaaaccaagtaagcaatttgaaacaatcctttaattatgtatggtagcctgggggtgatgggggatacgcaaaataattttaacttcctttatcttttgtaagtatcgtcaaaaatattycaggtaaaacccaatttttattgctgtgatctatatcagacacatggagaaactgaagcccaaagaagataagggagtttgctaaaggtatacaaatagtgattcaaatagttaagactagaattcttgccaacatgattccaattgcaccaggtcacctcttacacctcaattatcaggccacagaaatgaagatctttctatgttattatggtaggattcctctctttcaaactccattgatgatttagtccttgcttcaatctgtctgtggaaggggggacaaaaaaaagtttgggctagtttcctctcttccaaaatgatttcctaaaattttgacatctgccaaaagtttggactcagaagagacctttgaaatctctaaaccttaatttcaaatattttttggagacatagctgtgacatgattcctcaggagtcctagccacctgccaagttcgaagggtttttgttc

SEQ ID NO: 493328 - DNA, 610 bp, Homo sapiens
gctgcgcagtcagagcccagatacggtcaccagactcccggacttggattcagctccacatcgtgtcaccctggctaaaggatgtacacctctgcgtgactgggtttgtcacctggcagcatggatgctcaagcgactgacctgtcaggacagcagcaaatgaactgaagctgggggagcgtgcaggctggtgctgtgtggagctctggggcagaaggcactcaccaggggtgcccagagccggggtctgtgagtcgcgcgctgggtccrggtcacaggcgctgggtgaacagattgagaagacaaaatgaggatgtactccttacatgctcacgaaaagccttcttccccttcgttgggaacgacccccccagacactagacccaggccacacctggagtcagccgcaggcaactcagaggagcgcgagcccgggagcctcgggagggcctcggaggtgggtgggggtgaggggagcctcaggagggccgcgggtggtgaggggggcctctggaaggtctggagcccgctgaaggcaggcgatgacgcaggcccagtgcacatgtcccagggctcctgtctaggcacacggaagctgcatgttcgtttc

SEQ ID NO: 493329 - DNA, 610 bp, Homo sapiens
gctgcgcagtcagagcccagatacggtcaccagactcccggacttggattcagctccacatcgtgtcaccctggctaaaggatgtacacctctgcgtgactgggtttgtcacctggcagcatggatgctcaagcgactgacctgtcaggacagcagcaaatgaactgaagctgggggagcgtgcaggctggtgctgtgtggagctctggggcagaaggcactcaccaggggtgcccagagccggggtctgtgagtcgcgcgctgggtccgggtcacaggcgctgggtgaacagattgagaagrcaaaatgaggatgtactccttacatgctcacgaaaagccttcttccccttcgttgggaacgacccccccagacactagacccaggccacacctggagtcagccgcaggcaactcagaggagcgcgagcccgggagcctcgggagggcctcggaggtgggtgggggtgaggggagcctcaggagggccgcgggtggtgaggggggcctctggaaggtctggagcccgctgaaggcaggcgatgacgcaggcccagtgcacatgtcccagggctcctgtctaggcacacggaagctgcatgttcgtttc

SEQ ID NO: 493330 - DNA, 553 bp, Homo sapiens
ggggttagggcttccacatatgaatmttgtggggacataattcagtccagagcaaggttcctggaagccatccaggtggaggagctgcgagggaggatttgggtcccgcgctggaggagaagggtccggggtccaggctggagagccatgtggacatcaccctcccatacctgcaccatctgctgttcacagaacaaagtcctcagactgacattcaaggccctgacaatctgggccattcttgccctcaatccttaaatcgtaagcacaaagacttttaccttatccccaaagctagccgctcctatcccatctctgcccacctgaagtgggaactcctgcactcctcactcctccagggcaggacacttacccagaccagagctgactgccatggcacttcttcactgtgccattatggagggaagggagcaaggccattgctgtggttatacaaagcaaaactaagacccaggctaacagttggagggagtgaatgctagctcaggctacagcagccaccttgaggaactgcttctcaccctgcaacgtg

SEQ ID NO: 493331 - DNA, 553 bp, Homo sapiens
ggggttagggcttccacatatgaatattgtggggacatrattcagtccagagcaaggttcctggaagccatccaggtggaggagctgcgagggaggatttgggtcccgcgctggaggagaagggtccggggtccaggctggagagccatgtggacatcaccctcccatacctgcaccatctgctgttcacagaacaaagtcctcagactgacattcaaggccctgacaatctgggccattcttgccctcaatccttaaatcgtaagcacaaagacttttaccttatccccaaagctagccgctcctatcccatctctgcccacctgaagtgggaactcctgcactcctcactcctccagggcaggacacttacccagaccagagctgactgccatggcacttcttcactgtgccattatggagggaagggagcaaggccattgctgtggttatacaaagcaaaactaagacccaggctaacagttggagggagtgaatgctagctcaggctacagcagccaccttgaggaactgcttctcaccctgcaacgtg

SEQ ID NO: 493332 - DNA, 553 bp, Homo sapiens
ggggttagggcttccacatatgaatattgtggggacataattcagtccagagcaaggttcctggaagccatccaggtggaggagctgcgagggaggatttgggtcccgcgctggaggagaagggtccggggtccaggctggaragccatgtggacatcaccctcccatacctgcaccatctgctgttcacagaacaaagtcctcagactgacattcaaggccctgacaatctgggccattcttgccctcaatccttaaatcgtaagcacaaagacttttaccttatccccaaagctagccgctcctatcccatctctgcccacctgaagtgggaactcctgcactcctcactcctccagggcaggacacttacccagaccagagctgactgccatggcacttcttcactgtgccattatggagggaagggagcaaggccattgctgtggttatacaaagcaaaactaagacccaggctaacagttggagggagtgaatgctagctcaggctacagcagccaccttgaggaactgcttctcaccctgcaacgtg

SEQ ID NO: 493333 - DNA, 598 bp, Homo sapiens
tgcctcagcctctcgagtagctgggattacaggagtgcgccaccacgcctggctaatttttgtatttttagtagagatggtttcaccacgttggctaggctggtcttgaactcctgacctcaagagatccacgtgcctcagcctcccaaagtgctgggaattacaggcgtgaaccaccgtgcctggccacacagtctctttttagttctatgtggggcaatgttacgacaattatgaaatcccttttggtggctctggtgtgtgagagaggggctgcagagcctcctgttcagagcacactgtctggaggctgtgcacttcacaggctggtcagagaggtggacaacaggctgctcagagaggtggacaacaggctgctcaatgacctgtaacaggactgttcacaggtcagacagtgaccccaaggctggaaacataccactttaktgtccagcagtgagctcccagcccatccagcctcagcctgattgagctgcacaggggtgaaggtgtttctctctaatcccccactgaagcgtccagaacatgcgaatctcttaatggaggctgctgtggctaagccccccggtgagggatg

SEQ ID NO: 493334 - DNA, 593 bp, Homo sapiens
ttgagaccagcctggctaacatggtgaaaccccatctctactgaaaatacaaaaattagccgggtgtggtggcaggtgtctgtaatcccagctactcgggaggctgaagcagtagaattgcttgaacccrggaggcggaggttgcagtaagccgagattgcatcactgcactccagcctgggtgacagcaagactccatctcggaaaaaaaaaaaaaaaaaaaaagaatattctgaggctcataagcatgtatacacctgcctggtagcgggagtgatagaatctctcaggaatccctgattttgtgcccttgggcaagtcacctcaattccctgagctttagttctcatctgtaaagcaggcagccatccttaacctgcctacagactcggtggaccacctgacatttgagatcattctaatttgagaactatgctctggtattggcaggatatagatttaagtagcagatggacatttgcatactcttgcatttgattcttaaattatccatctcggtgtttaaatgtatagaattgcctgtgctcttcccttcgctagctcccagtgtcctccatgtttctcccacgggc

SEQ ID NO: 493335 - DNA, 597 bp, Homo sapiens
tagagcatgtagagctcatttgtgtttccaataagaagacttacataaaaaaaggaatttctgatgaactctgttaataaaaatgttttaaagtagtccatcctttcctcttaacactatggttgatctgcgttgagctgggacgtttccaccagatggggatcagaggtgccaccttggaggttgactgtgccactctccccagggccctgagcttggctcttctgcagtaggagttggcaatacctgtccccatgagcctcccaaggatttgagagtgtaaaatgagaggattcatgtgaaactactttgcaaatcatgaagttgctcttcaagggctacttttattcacagaaggagtcactcaacagatatttattaatttgtgtttgytcataatactgcctttaccaaggtaggaaagcaaattttcagcaaagagggtcagaaccaaaggaaatgtggcatgaatattggggtgcctaggattctgttatgcagtggattggggccttgccgtaatattttctaaaacagcacttctcaaactttaatgtgtatgtggatcacctgggagttatgttaacacacacattc

SEQ ID NO: 493336 - DNA, 560 bp, Homo sapiens
ggtaaaagtcctgctacagtctacagccgtgtacttaacaattgtttggaggagaaaaatcaagaagacctcaagtttggggtaatwtggggaagaaacattgaaacagctttaagatgcaaagtataaaacaaaacttcagaggacacaggaactcagagccagaggtgacagtgaatttcagaattttggctgggcatcgaactttcctggtccttatttgggggcttgggccattcttatctagattataaaagtccagggaactccagatgagatctgaattccacaaccattgtgtttaatccagaatttcctaccaaaacctcccagctggttccattcaccctgcccccagatgaatacaaaccacaggtatttgaccctatcagagggaacttgtgtccagacagaatgaatatgtgggccacagtgtgtgtattttcccagcagcctctgcaatttacagaagtttgcgattcaagatttgtaaagtagtcgtatgaaaaaaaaaatagaatccatctgaggtttctagatgaggtatgaataacacaaat

SEQ ID NO: 493337 - DNA, 653 bp, Homo sapiens
atattaatcatttgaaaatcttggaaatcatagaggatcatgaaagaaaccattattttctccttttttccatgtttaagagcaaagacctacatccaaaacatttgttaacaaattgcaataagaactccaagttgacaagatgatggtattggtttgcataaggggatttttttaaagtagcaaaaaaaaatgttctagcagaaaagytgcctcctgagccttaatgggaacaaatgcataaatcctttactacatatacagttatttaacactccacattttctttttttttcacatttttttattttttatttttatttttatttttttctctcttttttttttaattgccttaatgggatcaaatgcataaatcctttattacatatatagttatttaacacttcaaattttctatcacactttttattttatccctggctaccctccatcaatttattatccaaattcatggagagcagtaagaccagtaattaagttataaattttatctgaggagttgctatttgtttcccaatttgaatcttattactaactgctggtatcctctcatttcctaagcaacattgccatctcatggctaactccatacatttcccagggaaacaccaggcctaggtgaactagag

SEQ ID NO: 493338 - DNA, 575 bp, Homo sapiens
attgcacagtcagggaacattctttgataaggtgacatttgatcagagccaggtatctaggtaagagccttttaggccaaatgtttttttagcattatttgcttcttataggcacattttactttgatacaaatacaagtcaatttaaaaatgaatggggaaaaaatgactaggagatacagacatggaaakaacctttataaattaccctttaaaggagtttgcctaagaagagacaggaatttaggcagtaagctggggaggatataggattcagaaaggtctttcataagatgggagacatttgagatattttagggagatgaaagggggcctttcctgggcctggacagagtgcaggtgagggtaagagtagaaatggatacatttggggatagttagaagttgttaaagaaaaacagtgctgagaacccagttgatgttagatggttggacatttgtcgagggattaagctgcttcattgagtagtgttttcaaagcacatttcagccatttagaattgggagttaaggtgaatgtttcaactgatccaagatagagggtggacttgata

SEQ ID NO: 493339 - DNA, 447 bp, Homo sapiens
tgtttcttatgtacttcagaatcycaggtcttaggagggggcccctgatgaataatgtctgttgggtgaatttattggcttggcagcttggcttcagcagcttggtcaaatgtgagtagaaattcagaaagaaagctctgccacaaccaaggctaaaaatgccccaagtgtctatctgtctgtctctctctcgcacacacacatacacagagcccaccaacgggatcagcacagcagctacttccttcctccagcatcctttctcattttaaggctgctttgaattattctagatccagggaagaagggaatgtatttcctttcttgcttgttgccaccttattccaaatcaggtaagaaaagatagtgtttgaggggggaagatgttaggacctttgagttatccaaccagtctcccagaatgagaagtgagaaaagcacaaggtg

SEQ ID NO: 493340 - DNA, 401 bp, Homo sapiens
atgactctcagtgggttgatatgtgtcaagtgactactcctgaaccaattgtagtgactcagattggctggtacaggccttagggctacccctggagccagagagtggttgggaatagctccaygcaaaacacatatactcagaaaggaggaaggatggtttctctaaggaaaatcagaatgtgctacaacaaaagggagtcaatggatgctggaccaacaaacactatgctaactaaaattgatcatttttatatctcacctaataaggttttataatttcacattgaggaaatctcttctcagtcatcacagaaagtaatgaaacctgattcaaactttaaatttttaatggactgtataaatacatcacgaaaattttccatgacctctcacataatt

SEQ ID NO: 493341 - DNA, 401 bp, Homo sapiens
atgactctcagtgggttgatatgtgtcaagtgactactcctgaaccaattgtagtgactcagattggctggtacaggccttagggctacccctggagccagagagtggttgggaatagctccatgcaaaacacatatactcagaaaggaggaaggatggtttctctaaggaaaatcagaatgtgctacaacaaaagggagtcaatggatgctggaccaacaaacactatgctaactaaaattgatcatttttatatctcacctaataaggttttataatttcacattgaggaaatctcttctcagtcatcacagaaagtaatgaaacctgattcaaactttaaatttttaatggactgtataaatacatcaygaaaattttccatgacctctcacataatt

SEQ ID NO: 493342 - DNA, 656 bp, Homo sapiens
agcacattggtggaggaacatacaggtggttggacatcgagaggagggatcgaggtaagaagatacaagtagctggacatcgagaggacactgaagggagcatgtgtggaagaacacacgacaggcaccagcacaccggcaggccattcaccagcagaatctggcagagtttggccaggacagcagtcagaggagagcccaactccaggggaaaccatctcccttctggctccccatctgctgtagagctactttcactcaataaaaccttgcactcattctccaagcccgtgtgtgatctgattcttctggtacaccaaatcaagaacctggaatacagaaagccytctgtcctagcgacaaggtagagggtctgactgagctggttaacacaagctggctatagacagtaaaactaaaagagcacatggtagcacccacccactggggcttcaggagctgtaaacatccacccccagatgctgctgtgggcttagagccccacaacctgcccatctgtgtgctcctctagaggcttgagcaacaggacactgaaggagtgagccactcccctgtctcacacactgcgagggggacaagggagcttgtcccgtttcatctgcaggattcaactgatacagacagtgttttgttga

SEQ ID NO: 493343 - DNA, 593 bp, Homo sapiens
atcaacaaacttggaaaagagtaggggaaagtgttggctcttctcttactacattgctgaaaaaccagtctattaagttaattattgtgtttcaacaaatcttcattaataaagagtcctgtaattttatttttattttatataattttataaaacacattcaactagggaaattaagaaaataccaaatcatatgagttaaatacatttgtatctatagttcaaaattaatctccaacaatactgttgcttcaaaaacaacaacaacaacaacaaaaacaacaacaacaaactggatcaaagaaggcatacaaagacaaaggtgtatgtgaaaagatgatcaacatcactaatcatcagggaaatacaaatcaaaaccacaataaaatwtcacctcacaacttcacacctgttgggatggctataatcaaaaagttagaatataaaaagtgttaaaaatatacagaaaagagattctttgtagactgttggtagaaacataaatgagtacagccattatagaaaaatctatggaggttctttaaaaaattaaatatagaattaccacatgatccagcaatcccacttctgga

SEQ ID NO: 493344 - DNA, 641 bp, Homo sapiens
attttactctactctccttaggactgctcctcaaacagtgtaagatggagtgcccagcctcttttgtgtcacataaaccacactagatataaataactcttgtaaacattttggtctaaagagaagaagccagacaccaatgccacctgctctataatttcatttttaaaacattctaaaaaataaaaataataggcaaaatcagaataatgactgccaagtagaggttgaggaagagattgcacaaaaaggagtactaaggaactttttgggtgtgatggaaatatttttaatcttgrcggtattggtgtgcatgaatgtatgttttttttcaaactcataactgtatacaaaatatacatagatttactagatataaattataactcagtaaaactgacctcaaaaaagatgtaaaaaacgggtttgactaaaatttaaaaagtatctttgaaattattatcaattaaatttaaataatcttatcaattattcacaaaaagtgttccctgcttcctaccattgtcgtcctttataccacagggtataaaaaggacaactcattctcttcaaatatggtttcaaaaaaaaaaacaaaatgatgacagggctctctttttatgcactcaatttattcaaag

SEQ ID NO: 493345 - DNA, 650 bp, Homo sapiens
ctctttcaggttataaaggacagagacacactcacattacttggataatttgtggaaaggggagaattatgacaatctatcaagggagaaaattgagatagaatatagcctcaatctcagcaaacgtaaggcttagagagaatcgaagagtttgtatggaaggaagcacagttctacctggttgggagagacagaaagargtatcacaagtgatatacaattttttgaacatacagatgattttaggatatttaaaaattagcatcaatgtgaacttgtttggaatatttaaagtaaacataatgttaattgttacatattctttaataaacgttttcctgtattcctagactcactggtgatgatactaaatgccacagatgcagatgaaccaaaccacttgaattctaaaattgccttcaaaattgtctctcaggaaccagcaggcacacccatgttcctcctaagcagaaacactggggaagtccgtactttgaccaattctcttgaccgagaggtacagcaaagcacttgggggaacattcaagattaaagggtttgattataagaaaaccaagagaggtgactccattttacccgaaaattaaaaaagaaaagaggttctcagtacttaacttggctaatctagg

SEQ ID NO: 493346 - DNA, 650 bp, Homo sapiens
ctctttcaggttataaaggacagagacacactcacattacttggataatttgtggaaaggggagaattatgacaatctatcaagggagaaaattgagatagaatatagcctcaatctcagcaaacgtaaggcttagagagaatcgaagagtttgtatggaaggaagcacagttctacctggttgggagagacagaaagaggtatcacaagtgatatacaattttttgaacatacagatgattttaggatatttaaaaattagcatcaatgtgaacttgtttggaatatttaaagtaaacataatgttaattgttacatattctttaataaacgttttcctgtattcctagactcactggtgatgatactaaatgccacagatgcagatgaaccaaaccacttgaattctaaaattgccttcaaaattgtctctcaggaaccagcaggcacacccatgttcctcctaagcagaaacactggggaagtccgtactttgaccaattctcttgacmgagaggtacagcaaagcacttgggggaacattcaagattaaagggtttgattataagaaaaccaagagaggtgactccattttacccgaaaattaaaaaagaaaagaggttctcagtacttaacttggctaatctagg

SEQ ID NO: 493347 - DNA, 499 bp, Homo sapiens
tccttatcagacacacatgcacgcacacattaaaaaccaataattcccagcctttggtcttactaaggttttcattgaattttataggattttacttcctttccctatattcatggtaccatagggaagcccactttttagtttttgtgggaattatagtctaaaaatttggaggctaagagcagaccctaaatcttccaaatctggagcagatagaggcaatatttcctggttagttcagactggtaggcatcaaataagaaaatgtatttaagcttgatccatctgtcttctagtgaagcttttcagtcaatgaaacgtcttcacagactcgaacaattggaccacacattttaatttttggtcctgtcatgtgtttctatcttttaaaatgttttcatttttctcttctttttctattttgccagaacttcagaggctgctagccagacactattttattctggaagwtatacatgttttgtttagaattatatga

SEQ ID NO: 493348 - DNA, 581 bp, Homo sapiens
gacgaggtctaatatctagaatctataaagaacttaaacaactgaacaagcaaaaaccaaataaccccattaaaaatgggctcaagacatgaacagacacttctcaaaagaagacatacaaatggccaacaaacatgaaaatgctggggattttgagttgaattggttctgctctctatgtctcatcctgaagcaggctagcctaaggatattctaacagagaaggcagtggagaaagagaggatgacagcatgccagccctccttctagtattatctagtacctacttgtatcaagtgggctaccattccatcagtcatagctattcacrtggctgagcacagagtcaatttgagatggcaacctctaaagggagaggacataggaaagcatgagaaatcagtactattcgtgaaaataatttttcacagtcctaatcatattttcctacaggatttttatttcttctgttttactcaatagtacctttcatatattaatattttggatatttgccgcctataaacgtcatgttgaaatgtaatctccagtgttggaggtggggcctaggtggaggtatt

SEQ ID NO: 493349 - DNA, 576 bp, Homo sapiens
ggtctaatatctagaatctataaagaacttaaacaactgaacaagcaaaaaccaaataaccccattaaaaatgggctcaagacatgaacagacacttctcaaaagaagacatacaaatggccaacaaacatgaaaatgctggggattttgagttgaattggttctgctctctatgtctcatcctgaagcaggctagcctaaggatattctaacagagaaggcagtggagaaagagaggatgacagcatgccagccctccttctagtattatctagtacctacttgtatcaagtgggctaccattccatcagtcatagctattcacgtggctgagcacagagtcaatttgagatggcaacctcyaaagggagaggacataggaaagcatgagaaatcagtactattcgtgaaaataatttttcacagtcctaatcatattttcctacaggatttttatttcttctgttttactcaatagtacctttcatatattaatattttggatatttgccgcctataaacgtcatgttgaaatgtaatctccagtgttggaggtggggcctaggtggaggtatt

SEQ ID NO: 493350 - DNA, 563 bp, Homo sapiens
tcacatgttgattgttcagatgagcagagaagtgggcacagaaagagttgggcacaggactggttaagtgtggatgggggtcaacttggaagaaagcgtagcggggatactgcacaaaggaagccagcccaggtgggatgccatggcatgcttgggggcacacggggaagtggggctccagtcggatggctggaggaggaaaagctgtgggctaggagatagaaggctcggtgagtgctcactgtgtgaccttgggcaggttgtttggcctctctgagactcggttttctcatctcacaggcagttgtgaggawgtcctgagagtacgtctggggaaggcctttgtaaaccctgagagccagaggtccccagggtcagggagaatcggggaggcacctcgggtgaccagaccagcagcaggctctgggcagagggcgggcaggagggggctgcaagctgaacttctcccccaaccccaggaagggtcaccctgtccaacgtgtccgagcggaaagacaacatgcgcctcggccttagtctcgccaccaaccccaaggacaaca

SEQ ID NO: 493351 - DNA, 537 bp, Homo sapiens
cttaacgtgacaccattgtttgaagagtgtaactgggacacacaaattagcacataagagattattttaaagtgagcactggatagtttctttcttaccagcttttggcgctctcaaatggaaaaaagaaaagctataagacttaaaagcatttrgttgcattgaactttaaagcaactcaggaccaatatgtctcactgccaagttatatttagtctttctggggtgaatagttttatctttttagataaatggaattataagcgttttaaattgctcttgtcttatgttaaatatgaataataatacctataacctgactattttagagagatataatgaggaggatttatgagatgcttgcaaagaactccaagcttcttggaacaaaagcttcacatatctacatttctggaaatataaaaatacttgagcatcaatcgtggcataaaagatgtgctggcattacagtacatattaaactctatgcacatctgatctgatttgaggattttgtatatcattttttctcataag

SEQ ID NO: 493352 - DNA, 537 bp, Homo sapiens
cttaacgtgacaccattgtttgaagagtgtaactgggacacacaaattagcacataagagattattttaaagtgagcactggatagtttctttcttaccagcttttggcgctctcaaatggaaaaaagaaaagctataagacttaaaagcatttagttgcattgaactttaaagcaactcaggaccaatatgtctcactgccaagttatatttagtctttctggggtgaatagttttatctttttagataaatggaattataagmgttttaaattgctcttgtcttatgttaaatatgaataataatacctataacctgactattttagagagatataatgaggaggatttatgagatgcttgcaaagaactccaagcttcttggaacaaaagcttcacatatctacatttctggaaatataaaaatacttgagcatcaatcgtggcataaaagatgtgctggcattacagtacatattaaactctatgcacatctgatctgatttgaggattttgtatatcattttttctcataag

SEQ ID NO: 493353 - DNA, 511 bp, Homo sapiens
aatgtgttctctttctgttctcattgtcacgctactattaatacttaggaattcacctgaattagtgaaacagcctcataattgcagattttcctcaaatctccttgcttctaatttgcctcctacattatgacccaaactttttctaaattattcatctgatcatgccattctctttcagaaaatccttcaatgtttctccaatttccttagcaagaaattcaagggtcttccaatctcatttcaactccactctggcctaaaattccagttccaccacatattggctaactgacrtgaggcaattctctgatctctaaatacaacttttgtataatatctatctaaatgatacagtatgggattatagcaagaacatgagttgtaccccaagctgctagcacctagaaaatgcttaataagttgtagttatcagagtaacctttgtcgtctcattgccccacactgcttactatgcaacccagactctgaactgaaccgacactttctg

SEQ ID NO: 493354 - DNA, 541 bp, Homo sapiens
gatgattctctatgacatcacaaccctccccacagcaacggaatgtgacctgaggtgcagaagaagcaatgagattgataaactcttaagagataatgactatactctcctatttagcaaaaaagaagataaatgcaataactgccccaaacatgctatgcatgtattgcaattcaaccaagtggacttagcattttacacyacttgtcctatttgtgtatttgctacatacacatccttactgtgttgattttctcttccacctccaggtgggatggctttatatgcttacagaaagttttttgttgttgttgttgcttacttcctatatgacataaagtctttcaaaaaagcaagtccaagatttgtatacattgttgttgattatatgctaatgactagatatgtaacaatattctaaaggtcaataacgagaactttggctatttggtaaactcatttacatattaatattgtagttcaaatggtaaatacaaatgtttgcctgagggaactgctaaaacatatgaaaaacctagat

SEQ ID NO: 493355 - DNA, 571 bp, Homo sapiens
ttccctctcaagatttgacttcaaagaaattaaaatactcatctttaacacgaatgtaagcacaaatggaagtcctgaaattaaatggcaataagttatcagttatataatggtcgtccacatgatttagcatatccatatgttaagtaatttcagattttcatcaaaatgaaagcatgaaattagaaaatttcatggatgttttatggacatttatatacattcttggtctctgggacccccagtttgaagaaaaatttagccacaatagattgttttcctagctgtctcccaccttaggtttcagaattgtcttcttttctaatgaaattccttgygtcaagtaaagttctcattttgtcacagccttaaatttttttttcttcactgtcttttatcctgcaatattgtattatttcttctatttttttttttttttttttttgcttatgtaggtacaacagccaataactgaataatcttgttagtgaaacctttttgggtaactcattgttaagttggtgcttgtgactgctgtgtaaggctggcttttagaaagtatcttcttgat

SEQ ID NO: 493356 - DNA, 598 bp, Homo sapiens
ctttcttctaagctttaactgctggcttgacatttctccctgggtatctccttgcttccaccttcagtgcagcacaaccaaagtgaaactccttacttccctccacccaaaccagttctttstccaaatttcctggtttctattaattggcactgccactcacccaggctcaaaatgtcagtcattctgagactcttctctcttatcttacatgtgctcatctgcaaagctgtacattctactgctacaacctccctatatgtatacatgacctcccttatcatcccttcagccaccacctttattcagaccctcactgctttgtacctggactactgtaacacctccctgtctgattgaatctagttcatctgttacactgaggtgagattaaatttgctaaacacagtaattttgtaccactctttagccccaaattacgtagttctcatagctgctaaaataagaacaaactctttagcttttccaggtcttccataataatgcccaaatatacccatcttggcttgtctttcccttactaccttactggcacctgtattctagcataagtgttttatctctattgtacttttta

SEQ ID NO: 493357 - DNA, 581 bp, Homo sapiens
aatatctgtgaatgtgtgtgtatccatagatgcacaccatctaaaatgctcaccatacattgttaagtttctccacctgtatggtaattcctccctaccattgttagatttttatattattttcctttagttaattcaacaaaaatttgcttttatcccattttgtaataagcattaaaaaataaatggagaaatacaatgtgtacattttcttaaaagtgcatatgtatatatgcaaaataattatgcgtcaagatatttgagaagcattaaaaattattgaagtcatgaaaactacttttcaataaaaaattgggaarttaaaggcagcagttggtaagtgtctttaaaaatattgttattactactagtaaacattttgaaaattctctaaaagcttgctgtctggagctatgaaaatcacaaatatggttatttctagtgccatctggcactaaatacctgctaaatcctttaagtgccatctatataccaatagaaccctaatacaagagccagagtctttctgtgaaaaaaaaaaagagagaggatttattttgttgatgatttatatatgaaaa

SEQ ID NO: 493358 - DNA, 613 bp, Homo sapiens
ggagtgactggcttcataactttcagaagaactaacgccaaatttatttatctattgtttcactttatgttctggcatccatgtgcagaacgtgcaggtttgttacacaggtatacatgtgccatcatggtttgctgcacccctcagcccgtcatctaggttttaagccccgcatgcattaggtatttgtcctaatgctctccctccccttgcccccaccttccaacaggcctcaasgtgtcacgttcccctccctgtgtccatgtattctcattgttcaactcccatttatgagtgagaacatgtggtgtttggtttcctgttcctgacttacaccaaatttataatgggaagttcgggacttgtcatttgttcggttgtctggtgttcagtatccacttcgcacaataacaagcgaagaataatttctggtcacttgaaagagagtttagcattgctctgaaatctaagaagccgctcctctgacttgtctactaagcctgtgataggtgtcatgaatcatcctgatcaggcaggcattttaagcatcatcacattcagcggctaataagggctgggtggaagccgtcttttagtagatgaagtctgagcc

SEQ ID NO: 493359 - DNA, 633 bp, Homo sapiens
taagaaaataattcatccatgcttacaaagatgtgcaagggaaaataagaactggtctagatgcccaacgatgggaatactaggtaggtatgttagttttctacagtgggagtaacaaattaccacaaaggtaatgttgtttaaaacaacacaaatttattctcttactgttctggaggtcagaaatctaaaagttagtgggtgcagtgcaccagcatggcacatgtatacatatgtaactaacctgcacaatgtgcacatgtaccctaaaacttaaagtataataaaaaaaatwaaaaaataaaaaaataaaaaaattaaaaaaattaaaaaaaagaaatctaaaattaagttaaatctaaattaaagtattggcagtgatgcatcccttctggaggctctaggagtgaatctttattttttccaatttctagaggccacccacattccttggctcctggccgcttctttcagctttaaagtataccactccaacctctacttccgccgtcacttctttttttaatttgatcttcctgcctcctccctcttatgtagacccttatgattacattgggcccgcctgaataatccaggataatctccccatttcaagatccttactttaatcac

SEQ ID NO: 493360 - DNA, 487 bp, Homo sapiens
taactccaggaatttaaactatgtaggctcagccaacgatttttgcttatagagttcaaattagcatcttggagagaawtttttcagcatttgttgagttttgaaagctacgtgtatcttttaaaggtagttcctcttttataaatttgactttaaaaatatgtgatcagaggcacaaagatatttatttaaggattttaatggaagctacatttaaataaaatatagtatctaaactatgattcccaataagttgctctagccaattaaaacgatgaaggagagttatatgtattgacatgacatggggcaatatactcaatatactgctaagtgaaaatgtgagtttcagaatattatacattatttcattttgtttaaaaatatacatatggtatatagtctatatttatggtacagaatttgtatacatatattatctacatatagcacagagcagggattagcaaactctaatctatgggtc

SEQ ID NO: 493361 - DNA, 487 bp, Homo sapiens
taactccaggaatttaaactatgtaggctcagccaacgatttttgcttatagagttcaaattagcatcttggagagaaatttttcagcatttgttgagttttgaaagctacgtgtatcttttaaaggtagttcctcttttataaatttgactttaaaaatatgtgatcagaggcacaaagatatttatttaaggattttaatggaagctacatttaaataaaatatagtatctaaactatgattcccaataagttgctctagccaattaaaacgatgaaggagagttatatgtattgacatgacatggggcaatatactcaatatactgctaagtgaaaatgtgagtttcagaatattatacattatttcattttgtttaaaaatatacatayggtatatagtctatatttatggtacagaatttgtatacatatattatctacatatagcacagagcagggattagcaaactctaatctatgggtc

SEQ ID NO: 493362 - DNA, 547 bp, Homo sapiens
agctgggggaatttagacttttacttttggtttacaggtatgtgttaagggaaaaaaagtaagatttaatgttaacataattaaaatgtgagtatatttctttgyatacatataaacaaaaggtaccaaatagtaaactagttaattaacatccatacaactgaccacttattttatttacatatataaaaactttgttagaaaaagaaattcaaatcaatagtcatccatatgtataatttattatactacacttccccccactagctactcacctcaattcttaaaatttagtactaatgtttatgatggaggtttacaggtcataacaactagccttttgctactactcataaaaataaacccctcagaatctatgcattgtctttcgttacagtagtgtataatgtggttggggtcttcataacatttatgccatagggccatatgttgttttgaaattaatcttccttggggtgattcatgtcagtcattttaagtacaagcctcaagttttgatggtactcaggaaagatttctaccaaat

SEQ ID NO: 493363 - DNA, 491 bp, Homo sapiens
gatttttttttttaagtaattctggtataatctgactattttatgtgttaattctctcacttcgttgtcgcaagtgctaagagagcaaatgaaatatgggcacatcagataacttctatttagtattctatcatmtctactcacttaaaattaagtggaaacacccatacttgttttaaattctgattcaaagtgatgaggatttcggaaatagtaggaatgacatggacataggccactctcaagcaggcttgaggtctgatccaagacctgagatttcttttccaaacacgtaactttattcaatcatataatcttacttagatcttccccatgttaaggctcagatcttccccttagtgagtgaataaatgtaacccaagtgtgtaaggcttcttgtgaagatcagttaagtcaactatagtttattaagtttcttctatgttgtagacaggttaacatgaaatagtatgttagatactcttggcata

SEQ ID NO: 493364 - DNA, 491 bp, Homo sapiens
gatttttttttttaagtaattctggtataatctgactattttatgtgttaattctctcacttcgttgtcgcaagtgctaagagagcaaatgaaatatgggcacatcagataacttctatttagtattctatcatatctactcacttaaaattaagtggaaacacccatacttgttttaaattctgattcaaagtgatgaggatttcggaaatagtaggaatgacatggacataggccactctcaagcaggcttgaggtctgatccaagacctgagmtttcttttccaaacacgtaactttattcaatcatataatcttacttagatcttccccatgttaaggctcagatcttccccttagtgagtgaataaatgtaacccaagtgtgtaaggcttcttgtgaagatcagttaagtcaactatagtttattaagtttcttctatgttgtagacaggttaacatgaaatagtatgttagatactcttggcata

SEQ ID NO: 493365 - DNA, 484 bp, Homo sapiens
cgctgtgggactttgcggcatctagcccaggcactccggcagcccaaagggagctcatcccccagtcaagcccagtaggcgccggccggctgcgcccagtgcagggcccgctgagcctgcacccatccggaacccagctccccggctcctgcccgcgcctctccctccacacctyctggcaagcagatggagccagctctggtctcggccagtcccagagagggtcccccacagtgtagcggcgggctgaagggctccttgagtgcagccagagcggatgccgaagccaaggagatgctgagaatgagcgagggctgctagcatgttgtcacctctcaatatctcctgcctgaaatccagaattcagatctgtgtttcctggagatgctcagcgtactgaaaatagtaaataatttggaaccaaaaagaactggattccaagccaggcttgactgcttactagttgttgtgcctttggtatttc

SEQ ID NO: 493366 - DNA, 608 bp, Homo sapiens
ctcatgcgtgtccctttgcactcatctgctcgccttactgcttgtctgctatgttgtgatgtagcacatggccctaactaaaaggtgagcagataacagtatcatgctcttggactagaattgtcaccagaattgtgaaacaaatgaatctattttctttataaattacccagtctcagggattctgttacggcaacacaaaatggacaaagacaggaggtaattagcattagataagatcctcagggtaggaacctcatgagattggcagctttataagaagaggaagagagacctgagctggaacatttgctctgtcttgccacataatgtctcttgccaagtcatgacacagcaggaaggccctcattagatacctgtgccatgctcttggacttcccagcttcyagaagagtgagctaactaaatctccattctttataaaattacccattctgcagaattgaaatatcgcaacagacaatattttaagacaattacatcttcagacaattaaggcataattaaaacaatagaaatgttgaacttacagaatgcaggtggtgggattattgagaaggtgctggtcaaaagacataaaatttcag

SEQ ID NO: 493367 - DNA, 536 bp, Homo sapiens
gtttaaattcaagcaatcagtgatgcttgttaccaagcagtgaccagcttgcataaggacatcctcattgttgctcctctttcctctgtgctacactctccatttccccctgctccttaataacgggatagcacatgagattttgctttaggttttgtagctaggaatgtcagctaagataagcatagaggcaggagaaaagttgagattctgaaataaaaytattcaacctcattcattacaacccagtctggcttctacatctaccacatcaccaataatctatttttgtagttgcttttttttttcaattttattttagcttcagggggtacatgtgcaggtttgttacctgggtacagtgcaggatgctgaggttcggggtacaaatgaacacagtatggagcgtagcagccaacagttcgtttttcaacatttgccctcccccttccacctctagtagtcccttgtgtctactgttgccatctttctgtccttgagtacccagtgtttaactcccacttacaagtgagaac

SEQ ID NO: 493368 - DNA, 388 bp, Homo sapiens
tggaggtcctaaggggatagaggagaaattttacctcccgtgcaccaccataaatcccacttttaggtattgcctttctcaatcccattcctgattcaaaccgtatttttgacacagcatgaagttgctcccaagtgctggcttgcctttcagtgtagaactttcccwgtgtcctgcacttctcatcccatcattgtcaaaggatctgtggtcagccgactcttttctattctttaccactttggttttctaaggaccaccttttttttctttctctctctcttcagttttcttccttattgcactcatctcctcctcccaacctcacaactctgctccctcctgcttttgtgctagagctgtgtgtctttcaaagacaacagttatt

SEQ ID NO: 493369 - DNA, 388 bp, Homo sapiens
tggaggtcctaaggggatagaggagaaattttacctcccgtgcaccaccataaatcccacttttaggtattgcctttctcaatcccattcctgattcaaaccgtatttttgacacagcatgaagttgctcccaagtgctggcttgcctttcagtgtagaactttccctgtgtcctgcacttctcatcccatcattgtcaaaggatctgtggtcagccgactcttttctattctttaccactttggttttctaaggaccaccttttttttctytctctctctcttcagttttcttccttattgcactcatctcctcctcccaacctcacaactctgctccctcctgcttttgtgctagagctgtgtgtctttcaaagacaacagttatt

SEQ ID NO: 493370 - DNA, 621 bp, Homo sapiens
aacacttacatatgtatgtatacatatgtatattttatattttgtttacattatataaacttacatatggatttacttgttatgtaagattagctcacacaattgtgaggtctggctaggtaagcctgaattccacagagcaggcatcaggaagagattatcataagcaggcagrccccatgagcttcagctgatgcttgaagtccacaaaaagaagggaaggtccaggggaagggggagcatgctggcctgttggtgtgtctgattttcacggaaggcctagtccctctctaaatggcttctgcttaattaagtgaggcacccaaggataatctctcttttggtgaactcaaaatcaactgatttggggctttatttacatctcctcttactggagaattcaaacggtagtttgattgagtcactggtagaatgtgcatgtcttcatcactgcctccctcctgcaccctaactctcaaaagagaatgtttcttgtagcctaactctaactagaaacacactagaaaggaaagtcggggaaatgtggttcagcctagccaagctgacacatcccaaagccatcacacattccagtggtgatgacatatatgttatgagaaa

SEQ ID NO: 493371 - DNA, 621 bp, Homo sapiens
aacacttacatatgtatgtatacatatgtatattttatattttgtttacattatataaacttacatatggatttacttgttatgtaagattagctcacacaattgtgaggtctggctaggtaagcctgaattccacagagcaggcatcaggaagagattatcataagcaggcaggccccatgagcttcagctgatgcttgargtccacaaaaagaagggaaggtccaggggaagggggagcatgctggcctgttggtgtgtctgattttcacggaaggcctagtccctctctaaatggcttctgcttaattaagtgaggcacccaaggataatctctcttttggtgaactcaaaatcaactgatttggggctttatttacatctcctcttactggagaattcaaacggtagtttgattgagtcactggtagaatgtgcatgtcttcatcactgcctccctcctgcaccctaactctcaaaagagaatgtttcttgtagcctaactctaactagaaacacactagaaaggaaagtcggggaaatgtggttcagcctagccaagctgacacatcccaaagccatcacacattccagtggtgatgacatatatgttatgagaaa

SEQ ID NO: 493372 - DNA, 621 bp, Homo sapiens
aacacttacatatgtatgtatacatatgtatattttatattttgtttacattatataaacttacatatggatttacttgttatgtaagattagctcacacaattgtgaggtctggctaggtaagcctgaattccacagagcaggcatcaggaagagattatcataagcaggcaggccccatgagcttcagctgatgcttgaagtccacaaaaagaagggaaggtccaggggaagggggagcatgctggcctgttggtgtstctgattttcacggaaggcctagtccctctctaaatggcttctgcttaattaagtgaggcacccaaggataatctctcttttggtgaactcaaaatcaactgatttggggctttatttacatctcctcttactggagaattcaaacggtagtttgattgagtcactggtagaatgtgcatgtcttcatcactgcctccctcctgcaccctaactctcaaaagagaatgtttcttgtagcctaactctaactagaaacacactagaaaggaaagtcggggaaatgtggttcagcctagccaagctgacacatcccaaagccatcacacattccagtggtgatgacatatatgttatgagaaa

SEQ ID NO: 493373 - DNA, 621 bp, Homo sapiens
aacacttacatatgtatgtatacatatgtatattttatattttgtttacattatataaacttacatatggatttacttgttatgtaagattagctcacacaattgtgaggtctggctaggtaagcctgaattccacagagcaggcatcaggaagagattatcataagcaggcaggccccatgagcttcagctgatgcttgaagtccacaaaaagaagggaaggtccaggggaagggggagcatgctggcctgttggtgtgtctgattttcacggaaggcctagtccctctctaaatggcttctgcttaattaagtgagrcacccaaggataatctctcttttggtgaactcaaaatcaactgatttggggctttatttacatctcctcttactggagaattcaaacggtagtttgattgagtcactggtagaatgtgcatgtcttcatcactgcctccctcctgcaccctaactctcaaaagagaatgtttcttgtagcctaactctaactagaaacacactagaaaggaaagtcggggaaatgtggttcagcctagccaagctgacacatcccaaagccatcacacattccagtggtgatgacatatatgttatgagaaa

SEQ ID NO: 493374 - DNA, 586 bp, Homo sapiens
cagacagtgtgggcttgcaggtttcaacccaggttgaaaaaycccagcttcctgatctctggggcacatttccctctctgtgtgcttccccagcccatctaacaccttggtaacattctttctccattaattccttctgtttgaaacatccagagtagtttctgtttttctgtctagataatgattgatacacctcccatgccccacctctcacccaggacaggatcgaagtgttgggggagccacaacctgcttcacctagaaagtaagaaagaaaaagagaactgaacagtaccacaccttacaaagttcaaccccattttgaaaattaagggtggcttatcaaatttcctaagtcagccaacccctggtgacatgtattcatggtggtgctgtgatgtgccactgagatcccccatgaggattgaaggatttatcccgcagaagctggaattgctcccaaaatacaatccccaactgtcaatcctcttcgggatttgtctaggcttatgaaaactaggcagaggcagcccccacccagtgactgatcagcagggagttataaaggcccaagctcatattccaa

SEQ ID NO: 493375 - DNA, 586 bp, Homo sapiens
cagacagtgtgggcttgcaggtttcaacccaggttgaaaaaccccagcttcctgatctctggggcacatttccctctctgtgtgcttccccagcccatctaacaccttggtaacattctttctccattaattccttctgtttgaaacatccagagtagtttctgtttttctgtctagataatgattgatacmcctcccatgccccacctctcacccaggacaggatcgaagtgttgggggagccacaacctgcttcacctagaaagtaagaaagaaaaagagaactgaacagtaccacaccttacaaagttcaaccccattttgaaaattaagggtggcttatcaaatttcctaagtcagccaacccctggtgacatgtattcatggtggtgctgtgatgtgccactgagatcccccatgaggattgaaggatttatcccgcagaagctggaattgctcccaaaatacaatccccaactgtcaatcctcttcgggatttgtctaggcttatgaaaactaggcagaggcagcccccacccagtgactgatcagcagggagttataaaggcccaagctcatattccaa

SEQ ID NO: 493376 - DNA, 586 bp, Homo sapiens
cagacagtgtgggcttgcaggtttcaacccaggttgaaaaaccccagcttcctgatctctggggcacatttccctctctgtgtgcttccccagcccatctaacaccttggtaacattctttctccattaattccttctgtttgaaacatccagagtagtttctgtttttctgtctagataatgattgatacacctcccatgccccacctctcacccaggacaggatcgaagtgttgggggagccacaacctgcttcacctagaaagtaagaaagaaaaagagaactgaacagtaccacaccttacaaagttcaaccccattttgaaaattaagggtggcttatcaaatttcctaagtcagccaacccctggtgacatgtattcatggtggtgctgtgatgtgccactgagatcccccatgaggattgaaggatttatcccgcagaagctggaatwgctcccaaaatacaatccccaactgtcaatcctcttcgggatttgtctaggcttatgaaaactaggcagaggcagcccccacccagtgactgatcagcagggagttataaaggcccaagctcatattccaa

SEQ ID NO: 493377 - DNA, 578 bp, Homo sapiens
gcttattgggatgtgaggaatctgggtctatttcaggaatgttagcaattttgccctaaagcaactttgatcttgttgctcctccccttgcttggtcattaactgggaacatggagaccagctccactctttgacttctyaaagagtcactgcttactgcataaatacatctcctcttactgtactcttttcctggaagaaaaaataccaatcctctcccctgagaggggcttcaacttctcgttttcaaaactatttaccccagctgatgccctaactaaaaaagcatgcctttgaaactggtaagcaaaggccagggaaggaaaatgaggatctgccagccacaacttcctcaagtaagaattcccttctgtcttctccaacccatcctcaaattccaccagagatggggtttccagcggctttaggaaattcctcaaaaacaggggagggggaaattatgtacaacttccattgtatctagccacaagaaggtggtctgttacccaccctttctttccctttaggcttttaactgttagcagtggcaattaatataaattagccaatgacattgt

SEQ ID NO: 493378 - DNA, 590 bp, Homo sapiens
gctgtagaaagctctgctgatgggatgtccacactaagtttggcatcaatatggtgactttctgggagcagaggaccastaggttgcctaaaaaggggtgaacgaacctgcccagatcagaaatggagcagattaaataagccattttggtagaaacacaagtgatttctggttactaggcactaactaggagagcagagaaactgtaagagacatgagcaaggagaaatgttccaaaaactctgaatcctggagagaaaaatctgtaaactggtctttaactgaagatggataggtgatttggggaggaggaagttatcatcttggcagggcttccttctttctcaggaatggtgaatgggaagatgagggtctaatgtcagcaaggtgggataagcctgacacttccagctcccaccttctcaaaccaatgcctcatcttttgctgtgtcctcttgggtagatgtgaggaaggccactgatctggagagctgaattctagccctaacactgacactctgtatatggccttagacgagcttcctacctctcttgccatccattgtgtaaaaggaggttccttaacaaat

SEQ ID NO: 493379 - DNA, 632 bp, Homo sapiens
ttggggacacattgcttttggttcccagtgcccacatgcaactctgagctgtttccttccaaccaccrgcaccctctagagtgctgggaacatatggctcaagttttaccactcttggatctgcccaccacccccctttccttgtcctgacttatggggaattccactcctttctgccttgaacacttctttttcaacacttagaagaaaaaaaaaaaacatgtctttctaccccttggtttcatgatggggatagcatcttcagagattatttcagtagactgagaaactgaggcctcttcccagatttccttgattgggttcctggattacaaggttaaggagtaagaaaacatttttaaaaatgacagatattagactgctacagagaattggtagatgatttatgaagccaatagcccatcaccaccaaagagctgttttgtctttcttaagggaaagggggctcagccctcagaaaagcagtagcagctttctttcctccaggagcaaagagctcacttcttccaagtagcataaataaataatgtagttatatttgcatattctgctgcattaaattctttaaaatttacatataaagcacccatctcaatgtctggaaaataatg

SEQ ID NO: 493380 - DNA, 632 bp, Homo sapiens
ttggggacacattgcttttggttcccagtgcccacatgcaactctgagctgtttccttccaaccaccagcaccctctagagtgctgggaacatatggctcaagttttaccactcttggatctgcccaccacccccctttccttgtcctgacttatggggaattccactcctttctgccttgaacacttctttttcaacacttagaagaaaaaaaaaaaacatgtctttctacyccttggtttcatgatggggatagcatcttcagagattatttcagtagactgagaaactgaggcctcttcccagatttccttgattgggttcctggattacaaggttaaggagtaagaaaacatttttaaaaatgacagatattagactgctacagagaattggtagatgatttatgaagccaatagcccatcaccaccaaagagctgttttgtctttcttaagggaaagggggctcagccctcagaaaagcagtagcagctttctttcctccaggagcaaagagctcacttcttccaagtagcataaataaataatgtagttatatttgcatattctgctgcattaaattctttaaaatttacatataaagcacccatctcaatgtctggaaaataatg

SEQ ID NO: 493381 - DNA, 619 bp, Homo sapiens
ttaaacgtagatgcaaagatatatgtctgctataattgtgctggtaaagttacatattcatgtggcactcagtagaataggatgaaaaaaactgaaagcaacttggctggtttgcggtaggattgtggatgttttcttcctgccttttacttataattttgttaatgcttttgtactgtttgcataatgcccatttaaaaataaagtgacaagaaaaataaaagtaaagattattattttaaaaaacagggtgggggtagaagagaaacatagatagataagatggtcagagccaaacttccacccaagttttccagaacgcagcmacataaagttactttcatgaggaagaattatttttcaccactgctcatctgcatgaaaaagaagaagaaaaattaaaagtgtcttggaagggagcagaggtttccacgagcttctttgctgggtggggcgatgatttgaccatagagagactgaagtcattggttggcagttaccagggtgaagctgttcctggcttcactccatttaacctctgccatgtaagcaggaagataaatgtcaaccaagcacaaaacaaggccccccagtgcccaggcagatgcttgtgtcccaa

SEQ ID NO: 493382 - DNA, 521 bp, Homo sapiens
acccaacatgattattacatttttcaataactggcttagaaaggacatttaacccaacagggacaatgagataccttagagttttcttctgaggtgtttgtgagggaaagagtcactcttattgcttgctggatttgaaactaagaactatcttgctgtcacatggagttgacacttttaagcttacaaaaaaaaaatgaccaagtcaaaatatgatgataataacagttgtgattaactaacctaagcccccaaatctrtcattctgaagccctgaatacctttcattaatacattcccttttctgcttaagcctttttgagtttcctgtcacttattactgacacagactccctgagacaaagctttataaggaccttctttgactcctatcaactgcaaaaacaatatctaataaaaaacataagaaatggctgtgtgggtgatatttatgctggtgttaggaaagctcataccccggcagtagaaaacatagcaattcaaaagcacatgttctggga

SEQ ID NO: 493383 - DNA, 478 bp, Homo sapiens
gtatgcccatacaaggtaatattttattgagatacaaaaatartaaagttctgacacatgctacaacatggatgaaccttgaaaacattaagctacatgaaatttagccagacacaaaaggacaaataccatatgatccacttacatgaagcatgtaaaggaggcaaatgcatagagacaggaagtagctgagaggttacccggggtcgggggagtggggaataggcagttattgcttaatgggcacagagtgtgtttggagtgataagaaatttttgaaatagatagtggtaatggttgtacaacattgtgagtgtagttccacataatacaatgccagtggattgtatataaaaatggtttaaatggtcaaaaccggaaggcattttaacacacacagtggaaagcacagaggttcacccatggatgctttcattgaggtagcggaaaggacaggtgcagttccaggtgagtttgt

SEQ ID NO: 493384 - DNA, 684 bp, Homo sapiens
ctgttcttttataagttcataatcttttactctgagtttcatttacttggtcaggaagaaatctgttgggtgcagaagatggcactgacctaataagatcttaagctaccaggagatgcaagacaggcattacttaagcagcatggctatggaagaaccagcctaattgacaggctgaaccaatgtggcacccaggaagatggtgctgtgcatcaattctagacagtagacagaggatgggaacacagcataggtagaaaagatgagcgttgcaagaatcaagagatgatgaaattgagtattaaaaggtagtcaaggcaagtgatttggagctggaatatctgagttggaatgccatttggaagcaatgttccacataggaaagactaaacagagtgaactagcacattggcaaaaaggcccmagtcaggctgccattcagggcgtgctggtcaagatgcctccattatatgaataagttaggcctgaagtagcaggctgatggtttggggttgttcactgtttttggatttaggctacggaaagtaccatggtgggggtacagtgttatagtcccacagatgttcaggggagagagaatcttgaagaacatggagaacaggagtcattgtttccagagaaggaaatagagggcaaggaaaatgatgatgcagagataaaggg

SEQ ID NO: 493385 - DNA, 497 bp, Homo sapiens
gttgccctaattccctattctcctgtctcaccaagatcatccagattgatgtgagccsttgtataaatcaagcctgagaggggcccctggtccctctctggccttttcagacacaagcatacatcagggacagcagcaaccccaacagcatgggcatgtctggaaccagggaaccgtttgtgcctgaacttaggttgtgaccactttgggtgtagccttgggggcaaactgagtttccaaagggtcgacctgcctgattctttcaccctctagcagttcaggtcctccccgagcataacagagtctcatctggggcagttcgtgactcaaggagtaattctggttcagaggtgccctagcaaaaacaggagcatcaaactgcaccattgctttaatttgggcttgcaggcagactgtcggggcttgagttgaactggttctctgagattctagctaattggattgagaaggggcacattctgcatgttctccaacct

SEQ ID NO: 493386 - DNA, 536 bp, Homo sapiens
caaagtgggcatggcaaggaatttacagccatctttaaccatcacaatacatgacacataaactggagaatctaatcaccaaatgaaaaacaaaacaaacaaacaaaaacagaaaaacagaaaagcccagccattttccatgaggggttagtttcatgctgctgcaacaccaggtggtgtgcatgagaaatgccactggctcaaagcagtctcctgctgaggtgctcccgcctgctaccaagctggcccatggtgagccctgcaagcgcacagagctggtctcstgagtgttagatgttcttgatagaagtatccattacagagtctcaaacataagcaatcatttgggttataagaatccgagtatgcatgtcaaagaaaagccttgaatattgaggagtagcttgatataataaaatatttggaaacacaaagatcacgtgatattgcaaaagcatcgcacctgtaggaatccacattgcacaacatcagggaagtggctttgagagcaacaacaaaatgaaatagtagagtta

SEQ ID NO: 493387 - DNA, 542 bp, Homo sapiens
cagatggtggtggagcaagcgaggacagttaagaatgttgatgattactggattactgaggagtactgtgagctttctggtcctctgctcagaggtgtctagctctgaaactgggatcctggctctgagctggagaggcgcttccagttactgctgtcctggagcgctggaagggagcataagtgtgaggagacagtgggcttttagcctgggatgcagatgagagatgtcttgacctgagtgaaaaccttgcaggcaagctgcargtctaccgagcagggtgagggaggctctcgacctggatactgtgaactagggagagaaagtaaattcaacagaaggagggcccagggcagagatttaggaatatccacagtttaaatattgctttacttaagtatactctgcctgactataagtagcatttgaatgttcaacatatgacctttcatttctcccctccattggtttgtcttaactgataaatctttattttcccatggtcaacctggtagtttattaatattacatctatcagttcc

SEQ ID NO: 493388 - DNA, 411 bp, Homo sapiens
tgcacatcagttgataacctttgagtcaagtactcatggaatagctgttttgcattatcctcatcaccttcatcatcatggccattctggccagcactaaagatgtacagccaacctcttctgtggctgaagtttatcttctataaaatgagaacttgtttttcatgaagctgtcattttcacaagtttggggtgcaggtgcagattgcctactgttgtgtttctgaacacttccctcgcgaggctcctaaccccaccccagtaaactcatcaacatgactccttccagcttctacagctctggagagggttcctttttatcttgcrtttccagggatgtttcacggccttttgtggagtgggccctggctgagcttctggcccttcttgagtgtggaggatgtcacagac

SEQ ID NO: 493389 - DNA, 569 bp, Homo sapiens
ggcccaggaaatcttggcagcgtcaytggggccggtgcacttttaagaggagcttgggtgatatgaaattgtttggacaaaatgagtgagaggtcttgaaataatgtcaaggcaggaagaatgcattgacttggagtggctgccaagagcaagcatttgcaggttgttttggggaagcagaactggctgtgttctctttgtcctgtgcacagttggaagacgggaaatggaggaggagagatggggaaggagagatggggaatcagataagaaagtgttttccaacagaagcatcggcacacattggagtgagttcccttcccttaagaggccaggagcttatgtaggaaccaagctccatctgaagcagccacagggctggagcatctcgcagattagttgccagggttctctgattctggccctgttagcctccatctggacacacagcaattgcatgtttagcatttttattacaaaagcaacatacaattttgacccttgaacgttacaggtttgaaccatgtgggttcacttatatgcggattttttttcaacaaaaatattgg

SEQ ID NO: 493390 - DNA, 569 bp, Homo sapiens
ggcccaggaaatcttggcagcgtcactggggccggtgcacttttaagaggagcttgggtgatatgaaattgtttggacaaaatgagtgagaggtcttgaaataatgtcaaggcaggaagaatgcattgacttggagtggctgccaagagcaagcatttgcaggttgttttggggaagcagaactggctgtgttctctttgtcctgtgcacagttggaagacgggaaatggaggaggagagatggggaaggagagatggggaatcagataagaaagtgttttccaacagaagcatcggcacacattggagtgagttcccttcccttaagaggccaggagcttatgtaggaaccaagctccatstgaagcagccacagggctggagcatctcgcagattagttgccagggttctctgattctggccctgttagcctccatctggacacacagcaattgcatgtttagcatttttattacaaaagcaacatacaattttgacccttgaacgttacaggtttgaaccatgtgggttcacttatatgcggattttttttcaacaaaaatattgg

SEQ ID NO: 493391 - DNA, 429 bp, Homo sapiens
tggtccaggtgtgtgtttctcatgagctccagagctrctgctggcctggggaccacactgtgggcagtgggtggtccagttcctctcatgtctaagagtccatgggacaaggagccccacgtgccctgtactctacccacaaggtggggagaggaggctgggtacctgccagagcgtgtcgaacttctttccctcggggatggagagcttccctgtcttgtctttgtcgatgcgatagtgcagcaccttcccttcgtgcagcaggcacagggcgtaggagccgttgttgtctctggctcggatcctagaagagaggatggaactgcatcatccccaggcccgccagtctccaggtgggaccctgggaggaagcaccctggcctgaatggtcagcagccgctctctggggcctgtcacctggcaaggcag

SEQ ID NO: 493392 - DNA, 573 bp, Homo sapiens
tttacacacccagcaacagccaagaaccccagccaggttctgtaggagatgaaaggttgtcaagaggtgaaattgccaggtggcaaacccctccaaggtgtttcctcacactttctctgttaaaaacaccataagataccctgacaaggagactttcctggtgctcatgatggagaaagagcrctgaagagagaagaaaagctacatcagtgatgaccacatgtgctgtgcggtgtacgtggtgtgtattttcattgaatcctcaagacagtcacagacccagaggagcagagcctggggaaagtttcccttagtctaaggttctacaaccatcatgggaacatgggttctgaagctgggtcttgctgcccaggcttagctctgctcttccctctcactaataccctgcctgatgccaggcctgggcatggggtgctatgcaccatcagtccacaggtgagccctgcaggtgtggagggagcacgggaaggtgtgggactgagctgtggacaacacaagggagaaagccttggaagctattatctgggaggttggcaattatggggtgataac

SEQ ID NO: 493393 - DNA, 590 bp, Homo sapiens
ttctgtactatgcaataaaatatatttcacagatcttttagtattatgctttactggtatgagtattttcaatgtttgtctctatttgacaccattagataaagtttagggtgaaayctcatgctttataattgacccatgaataccggattcttgaaacacagaaattaatgaccttaatgaaaatatgtccatttctttatctaatccctgaacacctccatgatcagtgagtgctcgtggggtgggtacaatttccatcacatggttctctgtctcagaaattatgataggagacttaaagagggcagcgttttgtatgagaggatctggggcaatatttttctaaagctaattaatgtctgcaaagtgattatttttctgagaaaataagaacgcaagaactttccattaggccttctcataataaacacacacacgcccttcctcctttaccatctttagataatcatcagagctcagacaaaggagcctttgaaggaggaagatttccttcctctgtcatccttacactctgttttattggagcacttttgtgccttttgagtttgggagtttctctctagaag

SEQ ID NO: 493394 - DNA, 563 bp, Homo sapiens
ctgcctgggccctctgtgagtctgtgcttcacattaaacttacatctttttagataccaatttttttttccaaatcaaaggcattacaccgtttctgaaataagtcatcataaagaagttggcttgtattaaccttctggagttcattcagactgcatatcttaacaatgtgagtagctgatttagcatacaaatctgctaaagcatttccctgatatttaggtttagttctacaagtatgagcttcaattgtaataacagcaatctgtaatggtaacagaatagcagaaggagttcmtctacttggagtccatttttgatgggggttccactaaaggtgagaaaccctggtagttttcatatcatgccaaaataatgtactactctgaaagcatgtttgctatctgtataaatatttactgattggtccttagctatatgacaagctcaggtgagggcaaaaatttccacaggttgggctgacttaagttgagggagagttcccttctctactaattttgggtggtaacagcatattctgcctgatattttccttctgaggt

SEQ ID NO: 493395 - DNA, 522 bp, Homo sapiens
ctgctcatttcaagatgcatactacctgcaagaatgaagtcagtggagataaatggggcacttcttggaatggcggggatagcataaattatttttaagatttcatatccaagaggccaataagcccacagcttaagtatacaaataagtttcacttatatttgtctagaacaatttcatctggggaacatatgatggccaaaaattccaaagagccaaataaaacatacttaatgacactttttttttttttgagatggagtctcactctgtcgccaggctggagtgcaatggcgcgatctcagctccctgcaacctcttcggcctcccgggttcaagcgaatctcctgcctcagcctcccgagtagctgggactacaggcgggygccaccacctgcctcagcctcccgacgtgttgggcttataggtgtgagcccccacacctggccgcttaatgacacttttaagactgcccagagcctaactacactttgggcattttctgatttattcattttctat

SEQ ID NO: 493396 - DNA, 627 bp, Homo sapiens
cccaacagctgccacagttccaacagccaattcctagggccgggaattgctgtagacaccagccttsttccagcacctcctgccaattgcctggattcccatcctggctggaatcaagagggcagcatccgccaggctcccaataggcaggactcccacacaccctcctctgagaggccactatgtttcgtagggccaggccctggacagtctccctcacctgccactagagaaacacctgcctttgacgtccccatatggcaaagaccactcatggagcccccagccccaggtacagctgtagagacagtccccgagggatctaagaaggagccatgcccagttctgcccagaccctcggccaggctgacaggagcggacgctggagctgggcctgcactgggccacataggagctcaccagtgagggcaggagagcacatgtcggggagcacccagcctcctgctgactggaggcccgtcccagagcccaggaggctgcagaggcctctccagggggacactgtgcatgtctggtccctgagcagccccccacgtccccagtcctgggggcccctggcacagctgtctggaccctccttgctccctgggaagctcctcctgacag

SEQ ID NO: 493397 - DNA, 601 bp, Homo sapiens
ttcaccatacactcaaataagattgagcagtgattctttcatctgtggtggtcattccaagtgatctgtccagggcacatggggactctatccctaggaccacttgtccccacagaaggagaaaccacagtagcagcaccaagggtaggtcacagcattgtcaccaggagtccccatattcttctcccagacgcagtgaaccttgtcaccctcttcccacactccacagggggtgtacaaagaggcatcttgcaktgacctgaccctgggatgttatggaaaaggagacagcctgagctcatgactcctggaattacatgctccagtcttggctatatacagacctacaattcttttccttttactcaggcactttgccttctggttgaggacagtgttctacagccctccacagtgtgctagagctgactagagtcgaatagccactttctttgtgcaagtttcctttctgtgactttactggatttcattggtagtaagcgttcatccagacagattccaagacagtgtccacatgaaaggaaaacaaaggctgatgggcagagacgccctgagcatccagtcccagggtacctttgcc

SEQ ID NO: 493398 - DNA, 601 bp, Homo sapiens
ttcaccatacactcaaataagattgagcagtgattctttcatctgtggtggtcattccaagtgatctgtccagggcacatggggactctatccctaggaccacttgtccccacagaaggagaaaccacagtagcagcaccaagggtaggtcacagcattgtcaccaggagtccccatattcttctcccagacgcagtgaaccttgtcaccctcttcccacactccacagggggtgtacaaagaggcatcttgcagtgacctgaccctgggatgttatggaaaaggagacagcctgagctcatgactcctggaattacatgctccagtcttggctatatacagacctrcaattcttttccttttactcaggcactttgccttctggttgaggacagtgttctacagccctccacagtgtgctagagctgactagagtcgaatagccactttctttgtgcaagtttcctttctgtgactttactggatttcattggtagtaagcgttcatccagacagattccaagacagtgtccacatgaaaggaaaacaaaggctgatgggcagagacgccctgagcatccagtcccagggtacctttgcc

SEQ ID NO: 493399 - DNA, 601 bp, Homo sapiens
ttcaccatacactcaaataagattgagcagtgattctttcatctgtggtggtcattccaagtgatctgtccagggcacatggggactctatccctaggaccacttgtccccacagaaggagaaaccacagtagcagcaccaagggtaggtcacagcattgtcaccaggagtccccatattcttctcccagacgcagtgaaccttgtcaccctcttcccacactccacagggggtgtacaaagaggcatcttgcagtgacctgaccctgggatgttatggaaaaggagacagcctgagctcatgactcctggaattacatgctccagtcttggctatatacagacctacaattcttttccttttactcaggcactttgccttctggttgaggacagtgttctacagccctccacagtgtgctagagctgactagagtcgaatagccactttctttgtgcaagtttcctttctgtgactttactggatttcawtggtagtaagcgttcatccagacagattccaagacagtgtccacatgaaaggaaaacaaaggctgatgggcagagacgccctgagcatccagtcccagggtacctttgcc

SEQ ID NO: 493400 - DNA, 601 bp, Homo sapiens
ttcaccatacactcaaataagattgagcagtgattctttcatctgtggtggtcattccaagtgatctgtccagggcacatggggactctatccctaggaccacttgtccccacagaaggagaaaccacagtagcagcaccaagggtaggtcacagcattgtcaccaggagtccccatattcttctcccagacgcagtgaaccttgtcaccctcttcccacactccacagggggtgtacaaagaggcatcttgcagtgacctgaccctgggatgttatggaaaaggagacagcctgagctcatgactcctggaattacatgctccagtcttggctatatacagacctacaattcttttccttttactcaggcactttgccttctggttgaggacagtgttctacagccctccacagtgtgctagagctgactagagtcgaatagccactttctttgtgcaagtttcctttctgtgactttactggatttcattggtagtaagcgttcatccagacagattccaagacagtgtccacatgaaaggaaaacaaaggctgatgggcagagacrccctgagcatccagtcccagggtacctttgcc

SEQ ID NO: 493401 - DNA, 655 bp, Homo sapiens
cagtactattctccatcagacaaggaagaactcaaaagaattcttgctgtttaacagggagctgagcaagagtaaggtgtagaaagcttacttaaagaaataataacagataaatttccaaaacttgagaaagatataaatatccaggtacaggaaggcatgacaacaccaaacagaatcaacaaaaataagactactacaagacatatactaatcacactttcaaagacaaggacaaaaaatggatcctaaaaccagcaagaggaaagaaacaaataacatatgaaggcattccaattcctctggcaacaggcttctcaatgcarattacacaggccaggagggaatggattgacattttttaagtgctcaaaagaaaaaaaacctgccatccaagaatatattcttcagcaaattacccctccaattgaaaggagagataaagactttcctaaacagaaaaaagatgagaggattcaccaccctcgggcccatcttacaagaaatgctaaagggagttcttaaatctcaaagaaaaaaatgctaaagaataaaacaaaacttttataaatataaaacccactggtaaaattaggtacatggagaaacccagcggatggagtcaaaatgtagaatttttctgtgtcttttttgc

SEQ ID NO: 493402 - DNA, 655 bp, Homo sapiens
cagtactattctccatcagacaaggaagaactcaaaagaattcttgctgtttaacagggagctgagcaagagtaaggtgtagaaagcttacttaaagaaataataacagataaatttccaaaacttgagaaagatataaatatccaggtacaggaaggcatgacaacaccaaacagaatcaacaaaaataagactactacaagacatatactaatcacactttcaaagacaaggacaaaaaatggatcctaaaaccagcaagaggaaagaaacaaataacatatgaaggcattccaattcctctggcaacaggcttctcaatgcagattacacaggccaggagggaatggattgacattttttaagtgctcaaaagaaaaaaaacctgccatccaagaatatattcttcagcaaattacccctccaattgaaaggagagataaagactttcctaaacagaaaaaagatgagaggattcaccaccctcrggcccatcttacaagaaatgctaaagggagttcttaaatctcaaagaaaaaaatgctaaagaataaaacaaaacttttataaatataaaacccactggtaaaattaggtacatggagaaacccagcggatggagtcaaaatgtagaatttttctgtgtcttttttgc

SEQ ID NO: 493403 - DNA, 655 bp, Homo sapiens
cagtactattctccatcagacaaggaagaactcaaaagaattcttgctgtttaacagggagctgagcaagagtaaggtgtagaaagcttacttaaagaaataataacagataaatttccaaaacttgagaaagatataaatatccaggtacaggaaggcatgacaacaccaaacagaatcaacaaaaataagactactacaagacatatactaatcacactttcaaagacaaggacaaaaaatggatcctaaaaccagcaagaggaaagaaacaaataacatatgaaggcattccaattcctctggcaacaggcttctcaatgcagattacacaggccaggagggaatggattgacattttttaagtgctcaaaagaaaaaaaacctgccatccaagaatatattcttcagcaaattacccctccaattgaaaggagagataaagactttcctaaacagaaaaaagatgagaggattcaccaccctcgggcccatcttacaagaaatgctaaagggagttcttaaatytcaaagaaaaaaatgctaaagaataaaacaaaacttttataaatataaaacccactggtaaaattaggtacatggagaaacccagcggatggagtcaaaatgtagaatttttctgtgtcttttttgc

SEQ ID NO: 493404 - DNA, 594 bp, Homo sapiens
tctcaagctcaggagagggtaatagatatattagatattagaagctgctagcacagaaagggcatttggacctgaagtgggtatatacttcctaagaaatactgcctaagaaatatgtatgagaaaagagcagagtgtctaacgtcaagccaccagcaatgccataataagcacaaataaatatatagtggataggtggagaagcaaaataccaaaaaagaaacaggaaaagtaaataaagagggaaaaaaaaacagaagaaaataagcaaagaaaatgggattttctttgaattttcatttagagagttgtcagtctggtcaaacactgctaaaaagtcaaacaattcacgaacttacaagtaaccatttgatttaggtacatagaaatcactggtgactttggcaaaatttcagagacattgtggagaaggaaaccagattgctgtaggctgaggagtgaagtgacaatgagagatacagagaaccggtatagacatggggcttggctaaagragaggagagagatgaaaactgaagggggatgttagatcaaggaagaattatgtttttgtttttgtaaggtaaggttgag

SEQ ID NO: 493405 - DNA, 623 bp, Homo sapiens
gacacgttatctcaagagatacactatcattctactgytatactgggtacacttttgcattgtcaatagctcccatgattaaaagagagaattaatgacagacatcttgattcatactttatttcaatcatctcacttgatccttcaaaccctatggtattatgtattttttcattgtagaaattaatgctcagaaataaatagcgcactacaaaatgccataattgaaacccaagcttgccagcgtctaaagcccattcttctaccatgataccatggtgcttttttcaagcgatatggcttttccctctcctctaatgacttttttattcacctctccaccttggctttatggcgtgcgcgcactcacacacatacacacacacacacacacacacacagagcttaggttagctcatcattatttctttagtacctgttatttgattttttgccaaccaggcaccagacttaattttttatattgcatatagtttgctaaataagggacatgtagtaataaaataatatcccagaggacattttcacattttacttgctgtttctctttcaaaatttccaactttagaagaggcaaacagccataggctctggatataata

SEQ ID NO: 493406 - DNA, 621 bp, Homo sapiens
gacacgttatctcaagagatacactatcattctactgttatactgggtacacttttgcattgtcaatagctcccatgattaaaagagagaattaatgacagacatcttgattcatactttatttcaatcatctcacttgatccttcaaaccctatggtattatgtattttttcattgtagaaattaatgctcagaaataaatagcgcactacaaaatgccataattgaaacccaagcttgccagcgtctaaagcccattcttctaccatgataccatggtgcttttttcaagygatatggcttttccctctcctctaatgacttttttattcacctctccaccttggctttatggcgtgcgcgcactcacacacatacacacacacacacacacacacacagagcttaggttagctcatcattatttctttagtacctgttatttgattttttgccaaccaggcaccagacttaattttttatattgcatatagtttgctaaataagggacatgtagtaataaaataatatcccagaggacattttcacattttacttgctgtttctctttcaaaatttccaactttagaagaggcaaacagccataggctctggatataa

SEQ ID NO: 493407 - DNA, 623 bp, Homo sapiens
gacacgttatctcaagagatacactatcattctactgttatactgggtacacttttgcattgtcaatagctcccatgattaaaagagagaattaatgacagacatcttgattcatactttatttcaatcatctcacttgatccttcaaaccctatggtattatgtattttttcattgtagaaattaatgctcagaaataaatagcgcactacaaaatgccataattgaaacccaagcttgccagcgtctaaagcccattcttctaccatgataccatggtgcttttttcaagcgatatggcttttccctctcctctaatgacttttttattcacctctccaccttggctttatggcgtgcgygcactcacacacatacacacacacacacacacacacacagagcttaggttagctcatcattatttctttagtacctgttatttgattttttgccaaccaggcaccagacttaattttttatattgcatatagtttgctaaataagggacatgtagtaataaaataatatcccagaggacattttcacattttacttgctgtttctctttcaaaatttccaactttagaagaggcaaacagccataggctctggatataata

SEQ ID NO: 493408 - DNA, 623 bp, Homo sapiens
gacacgttatctcaagagatacactatcattctactgttatactgggtacacttttgcattgtcaatagctcccatgattaaaagagagaattaatgacagacatcttgattcatactttatttcaatcatctcacttgatccttcaaaccctatggtattatgtattttttcattgtagaaattaatgctcagaaataaatagcgcactacaaaatgccataattgaaacccaagcttgccagcgtctaaagcccattcttctaccatgataccatggtgcttttttcaagcgatatggcttttccctctcctctaatgacttttttattcacctctccaccttggctttatggcgtgcgcgcactcacacacatacacacacacacacacacacacacasagcttaggttagctcatcattatttctttagtacctgttatttgattttttgccaaccaggcaccagacttaattttttatattgcatatagtttgctaaataagggacatgtagtaataaaataatatcccagaggacattttcacattttacttgctgtttctctttcaaaatttccaactttagaagaggcaaacagccataggctctggatataata

SEQ ID NO: 493409 - DNA, 621 bp, Homo sapiens
gcatggagtatacagctctggctgtacctccctgctgcagcctgtgtgatggcagcggccactctagatggcccaccactgccatcaatcaccactctgtagaggtacatctaactgcygttaggatagggacagtgaccattcttaactgcttcatgctgacagggggcattgtttttgggaaaatggcagtcaggttttctctcaggggcctatataagggtctccagtaaaagggagccattgtccgaggctccatttgcatgaccgttggagtttgacggcccatcctttttgtttcttctgagctgcagtcagagatcactggttggttcaccctcacaactgtcaaaagctacaaatatctcaaaaggaaagcttccttgattctgaaaaacaaaacgaaggatcatcaatggttcaagcaaaatgtcaaaaaagattacttcagtcttctgttagttccgttcactcaaagaaactcctgttcacaatctccaaaattatcagaaaccttgggacaaaaaggtgcctcaagagggtgtatgggcccattaaattagtcccaggcagccctcaccaaattgcagctagcaactggctggggctgctcctctgttg

SEQ ID NO: 493410 - DNA, 621 bp, Homo sapiens
gcatggagtatacagctctggctgtacctccctgctgcagcctgtgtgatggcagcggccactctagatggcccaccactgccatcaatcaccactctgtagaggtacatctaactgctgttaggatagggacagtgaccattcttaactgcttcatgctgacagggggcattgtttttgggaaaatggcagtcaggttttctctcaggggcctatataagggtctccagtaaaagggagccattgtccgaggctccatttgcatgaccrttggagtttgacggcccatcctttttgtttcttctgagctgcagtcagagatcactggttggttcaccctcacaactgtcaaaagctacaaatatctcaaaaggaaagcttccttgattctgaaaaacaaaacgaaggatcatcaatggttcaagcaaaatgtcaaaaaagattacttcagtcttctgttagttccgttcactcaaagaaactcctgttcacaatctccaaaattatcagaaaccttgggacaaaaaggtgcctcaagagggtgtatgggcccattaaattagtcccaggcagccctcaccaaattgcagctagcaactggctggggctgctcctctgttg

SEQ ID NO: 493411 - DNA, 625 bp, Homo sapiens
tagaggacaatagacatacttctcaggtagccaggggctcagcctagactcagacagcagcagattgaatctcaaggcagaagtcatttcaaatgctgctatttagcccttattccattcagctttctatcatagttaattatttctatgtctgtctcctgcattaaattgtatcttccttgaagtcagtgacctcgtctttgtaaacccaatgcttgcaccgtgcttggcattcagaatcaggcacgaatgcttgtgagtgaatgcaacagcaaatgccatctgcytggtgaactcttagacacatgttaaggcccagtttaaatatcatctgctctctgaaatggactgaattgagaaaagaagaatatagatttcaagacagaagtaatgagagacctggatggagaatcccaatcctggagaaaatgtatccagaattatggagattcagaaaaactctgccgaagtagatgctgcatttatacctatattacagactgtgtgccctttaacacacacaagtcctcatagagactgagaagtcatctctgaagggggctgatcctgtgggaaaagctattgtcagagctgcctatgagttgagtgtggctggaacaggcag

SEQ ID NO: 493412 - DNA, 625 bp, Homo sapiens
tagaggacaatagacatacttctcaggtagccaggggctcagcctagactcagacagcagcagattgaatctcaaggcagaagtcatttcaaatgctgctatttagcccttattccattcagctttctatcatagttaattatttctatgtctgtctcctgcattaaattgtatcttccttgaagtcagtgacctcgtctttgtaaacccaatgcttgcaccgtgcttggcattcagaatcaggcacgaatgcttgtgagtgaatgcaacagcaaatgccatctgcctggtgaactcttagacacatgttaaggcccagtttaaatatcatctgctctctgaaatggactgaattgagaaaagaagaatatagatttcaagacagaagtaatgagagacctggatggagaatcccaatcctggagaaaatgtatccagaattatggagattcagaaaaactctgcygaagtagatgctgcatttatacctatattacagactgtgtgccctttaacacacacaagtcctcatagagactgagaagtcatctctgaagggggctgatcctgtgggaaaagctattgtcagagctgcctatgagttgagtgtggctggaacaggcag

SEQ ID NO: 493413 - DNA, 625 bp, Homo sapiens
tagaggacaatagacatacttctcaggtagccaggggctcagcctagactcagacagcagcagattgaatctcaaggcagaagtcatttcaaatgctgctatttagcccttattccattcagctttctatcatagttaattatttctatgtctgtctcctgcattaaattgtatcttccttgaagtcagtgacctcgtctttgtaaacccaatgcttgcaccgtgcttggcattcagaatcaggcacgaatgcttgtgagtgaatgcaacagcaaatgccatctgcctggtgaactcttagacacatgttaaggcccagtttaaatatcatctgctctctgaaatggactgaattgagaaaagaagaatatagatttcaagacagaagtaatgagagacctggatggagaatcccaatcctggagaaaatgtatccagaattatggagattcagaaaaactctgccgaagtagatgctgcatttatacctrtattacagactgtgtgccctttaacacacacaagtcctcatagagactgagaagtcatctctgaagggggctgatcctgtgggaaaagctattgtcagagctgcctatgagttgagtgtggctggaacaggcag

SEQ ID NO: 493414 - DNA, 625 bp, Homo sapiens
tagaggacaatagacatacttctcaggtagccaggggctcagcctagactcagacagcagcagattgaatctcaaggcagaagtcatttcaaatgctgctatttagcccttattccattcagctttctatcatagttaattatttctatgtctgtctcctgcattaaattgtatcttccttgaagtcagtgacctcgtctttgtaaacccaatgcttgcaccgtgcttggcattcagaatcaggcacgaatgcttgtgagtgaatgcaacagcaaatgccatctgcctggtgaactcttagacacatgttaaggcccagtttaaatatcatctgctctctgaaatggactgaattgagaaaagaagaatatagatttcaagacagaagtaatgagagacctggatggagaatcccaatcctggagaaaatgtatccagaattatggagattcagaaaaactctgccgaagtagatgctgcatttatacctatattacagactgtgtgccctttaacacacacaagtsctcatagagactgagaagtcatctctgaagggggctgatcctgtgggaaaagctattgtcagagctgcctatgagttgagtgtggctggaacaggcag

SEQ ID NO: 493415 - DNA, 465 bp, Homo sapiens
ggggcttagtaataccagacagagagcccagaaaattatagagtgggagaaaattacagagtggtgcatcaaagcagaagtcttggcctatggattgaataatagtagaagcataggaaatgccctgactaggaggtttcttgggtacccagtgctcatccaagcacaccaaatcctgagtgtcagagaacataacttagttctcatcctcaccagatgattgcactgaagtccctgccccaatcatgactgccttagaaactaggatgtgcctgagcctccagttcagatcccttcaggaaaaggagggatgggagaaaacaaaggcaggataayaagttgaagaggctggtagcctgtgtcctatacaatgatttatttgtatgtattttgcactgtgacttctgggggtcagttttctgtggcaagctggccttttctctttctggacctggttttgcacgt

SEQ ID NO: 493416 - DNA, 614 bp, Homo sapiens
gctggacagtgggcaggagccaaattgctttcaccataagccctttttgtagtagaaaaggattggagattgggggaacaatggatcccttgtattaaatgaggtgtggctaggaaggctgacccatagggtggtgtggataagaaggaataggaaagatgaggtttggcrtatgatggacagtacggtgaaccgaggtcagtcccttagtggacaggattccagagtagtaatcagaagatggtcagataaccaggaatttattctagaggcaacgatgctgatttgagaatctgatatttaatacacagaaggctaagaagcctgtccataacgtgcagagaaacttgatcttatttccttgtacataaagccctcctccaaacattttactaggaaaaaatttaaacatataagaattaaaagaattgtatagtgaacactgatatacctaccactaagatttcacaatttttgttacatttgctttttcacatagctgtcctatctcatcatccatcagtccatcttattttttatgcatttcaaagtaagttacagacattgataaacttcacctgtaaatacttcataagtatcatgaactattaata

SEQ ID NO: 493417 - DNA, 594 bp, Homo sapiens
agcctgattgcaggtagatctagaggcagcactcattatttgacacattcccaaggtgtttaaaaagtagcatatagcattttttgagtagactaatataggctggcacaaataagctggaatattaaaatcaaaattgtttagttctgtgaaaatcataaggtaataaaataatctaaaaataatgcttctaggtttttttctctttagggtagctcaataaaatatgtgtgcatgatgcttagcctatgattaatcaagtgatctttgaatatttataacctgaacattttggctttgtgatgtcaagaactcgttttaagtaggatacacatcagtttcttatggrgtagaattgtttttttaaagtaacttttcaaaaattgtcatacaattttccattattatctgtactcataacaaataatgtattttggtataagctgcctggatactcatttcaaaggcagaataactttgttgtcactttgcagaaacagagattttgaagatgtcgcaaaggcactcaggtcaagctggcactgaagcaggaaatggggcggactctcctccaattgtcaactccaagtactc

SEQ ID NO: 493418 - DNA, 634 bp, Homo sapiens
aatcctgtatttaagctaaacagaaaagatgatttacaaaatgatagatacagttagataacagaatgaatttcccttgggtattataactccacttaaggaaagttttgtttttcatgatcctcttctcaaaaacagatattctggcacttaggagacagaaatgtaycatttgacctttaaacttctgttttattagtgtaaccacaagcaacagagtcactgactggcatgtttgcactttatggcctttagcacttaaaattatttgataactgttatgccactatttgttttttattaaagacactgtgaggaatatgttacattaaaaatagaatatattgggctaagcttgatgaatgatatgtaatttggttaagtgttctcttgagcacttcattcatgtattttgatgggacaagggcatatgtttgaagggtagaattttgttttgttttctagtgagttagagaataacaacagatatggttttaagtatacaaagaaaaaacaaaatataactgtaacattactcttgattaaaaaacgatgcatcacctgagttgcctatactcaattagtccttaagctctatctgtaatggtctatgatcagaggaaattaccagctg

SEQ ID NO: 493419 - DNA, 618 bp, Homo sapiens
tcagaaaaattctgaacaacaaagtttgaaaaatgttttcatcaatggacacttttatacaaacacatgttcaaacatacatacactaaataactcagacataagttagcaaaccagagtttttactaagtcatgataatttaaaaatagattcttattctattaccttatctataaacaaatcaattagaatgtgtgtatgtgatggataaataaatgtacaggccaaaaatgtctttgagactagagatttggcctgacaattggaagaaacagagtttttgtttactaaaatttataatcatgcaaaagaaacaactttgagcaaatttggttgtcatggtggttgcyagatatgaggaatcaggaattcagttcatataagatatttcctttgcacattcaaatggagatatggaagatgttttaatatagatctgaaattcagataaaaggtccaaattggtagtatacgttttagattccacctatgccagagtgcagtggcatgatctcagctcaccacaacctccacctgccgggttcaagcgattctcctgtctcagcctcctcagtagctgggactgcaagcacaccactacacctggctaatttttt

SEQ ID NO: 493420 - DNA, 344 bp, Homo sapiens
gttttcctctacccaactctcaacagaagaaaacaagattgtgctttttgtttatttgtgtatcaagtttatctagtttaaattgatgaggtggtagaaaatacacatttgaaattaaaattgaattatgaattataatcaccctaaccatgtaagttcattactttatatatatcaaacttaatttgtttcctaacatgtaattcattattgcagttcagagaaggagaagaaaattaatgagctaaaatatatgtaaaaactagaatatataatctgtgcataaacaaaaatgttagtgctatttgctgttatcaaatkttgtttaccttattagagaatac

SEQ ID NO: 493421 - DNA, 607 bp, Homo sapiens
ggttataagttttaatttcacaaggtaagtcctagatatctactgcacagcataatgtctataataaacaatactgtawtaaaaacccaaacatttgttaagaggatataccttatgttaagtgttctttatcatcatcatcatcatcacttcatcatcataattaacaaagatgatagaagaaaacttctggaagagatggataggttcatggcatagattgcagtgatggtttcacaggtgtatatgtatctccaaactcaagaagctgtatatattaaatatatacaagtttttgtatgtcaattataacctcaacaaaattggttttagacattgtcaagggctgttcaaaacccgttatatatggtattcgttttgagactcttctgagtgatttgcactcttcaaatccacttctggtttaacacagtttaatagcggctgtctatgcctttctgcctctcaatattcctctctattttatctagctacacctataactcttatctatggtaatcatctaagttgctagtttcagtccatcttactcccagaactgattctacaacaattcatgtcctcctactaccccttccttcttcca

SEQ ID NO: 493422 - DNA, 399 bp, Homo sapiens
aggagggaaaaaaagaaatatcaaattcagcayaagggggagagaagaagcaggggagataagtttcttgtccaaaagagtagatatgttagacatatgccatttttcattctaatcaaaagtccccaagcacacagaaaccattgaccagaatgtaaccatttgtacatgccaagataaaaattataggtgtttgttagtttcacactgatttcttcaaattaagcaattcaattatgaattaccacaatgtagctttatttgtccatagctttttattttttaatgtattttccagcaaattttttcttagtcaaagacatacttcagtgaatctcagaagcatcttctcttccagaaaactcatacctgttcatttcaagtcattatacactggca

SEQ ID NO: 493423 - DNA, 399 bp, Homo sapiens
aggagggaaaaaaagaaatatcaaattcagcacaagggggagagaagaagcaggggagataagtttcttgtccaaaagagtagatatgttagacatatgccatttttcattctaatcaaaagtccccaagcacacagaaaccattgaccagaatgtaaccatttgtacatgccaagataaaaattataggtgtttgttagtttcacactgatttcttcaaattaagcaattcaattatgaattaccacaatgtagctttwtttgtccatagctttttattttttaatgtattttccagcaaattttttcttagtcaaagacatacttcagtgaatctcagaagcatcttctcttccagaaaactcatacctgttcatttcaagtcattatacactggca

SEQ ID NO: 493424 - DNA, 662 bp, Homo sapiens
tttcttcatgaagtgaccccatgcttagagcttccacagaaccattcttacctataagaagcctctctgcatatttkgggatctaattttctttgccaatgccattctacctactttcctcttgttagaagtctctcaacatttctagactactggtggtaccatttcttattttccactgctttaatgactttttcccttgcaaggctctttttccccatgtcttgaaaattcaatgcaataggaggtaagaaatgcatgcccaattcaccatcttgttctcaagccccattaatctattattagatgattccttgcaatctattcaccacttcatatgcactggcaatttggaaagctattcccataattggtaaacatgttctgttaacagataatgtcttgagtagtactgccagagaccattttgcccagaagtgcctagaaaacaatcccccttatcacctccccaacccactcctaactcccaaggacggcccttaacaaatgactggttggtgtgcaggtatgaacatcacagttccagcatcccatagctgggataatgtgaaagcatgcatttttgaaaagttttacaggatttgcttgcaagattaatatttggttgtccattgtggtaactggcttaagaacatactcat

SEQ ID NO: 493425 - DNA, 367 bp, Homo sapiens
gtatttcacttgacataataaatgaataggaaatacattttttaatattaaacccaaaatagctcacggaacactaagtttaatccttttctaaagaaagcatcaagatagtcatgctgtgatttctctttgggcaaatctgtatctttcatattgtgtaaagcctcctcctcagtacatcttacagtgagctcatgtaaagaaagttggtttccttatttaagtcttttgatccargattcaagatgctaaatttaagaagtcctattttactgatgactctgaggagtagagaagttcagtattcatcacaattttaatcaacttgctgggtcatttctttaaaccagtagatgagctgacaacg

SEQ ID NO: 493426 - DNA, 367 bp, Homo sapiens
gtatttcacttgacataataaatgaataggaaatacattttttaatattaaacccaaaatagctcacggaacactaagtttaatccttttctaaagaaagcatcaagatagtcatgctgtgatttctctttgggcaaatctgtatctttcatattgtgtaaagcctcctcctcagtacatcttacagtgagctcatgtaaagaaagttggtttccttatttaagtcttttgatccagkattcaagatgctaaatttaagaagtcctattttactgatgactctgaggagtagagaagttcagtattcatcacaattttaatcaacttgctgggtcatttctttaaaccagtagatgagctgacaacg

SEQ ID NO: 493427 - DNA, 606 bp, Homo sapiens
ggctacagcagtgtcagaccttaaatctaggtcttttcactccaaatccccatatcctctctcccctcccaagtcttcaaatgagcataacttcaaatacaagtattcyttgccttctccctgcctctctcccctcatcttccctgcaccgtttgcaatgctgttgtcaggactccactccacatctaatctaattttactcagcaatttcaatgtaggtattcctaataaaaattaaggagttgatccatggataaaagtggaagtggaattctaaagaagttcatattaaggcatttttaacttctaggactacatagatatttattattatctacatctattcagctcttgagttagcatattgattatttgagtcccttggattcttgtatctgggatagtgactatcaagaattggataccaagagatctgttcttccaaataactctatttcaaaaacccaatctacttggttcctaagttcaaatactgagagttcatgtagcaaggcacacctctccttgaaaagcaatgaaaatattagtatttaaattaatactgactttatgagaactactgtaaaccttcagagaaggatgacc

SEQ ID NO: 493428 - DNA, 606 bp, Homo sapiens
ggctacagcagtgtcagaccttaaatctaggtcttttcactccaaatccccatatcctctctcccctcccaagtcttcaaatgagcataacttcaaatacaagtattccttgccttctccctgcctctctcccctcatcttccctgcaccgtttgcaatgctgttgtcaggactccactccacatctaatctaattttactcagcaatttcaatgtaggtattcctaataaaaattaaggagttgatccatggataaaagtggaagtggaattctaaagaagttcatattaaggcatttttaacttctaggactacatagatatttattattatctacatctattcagctcttgagttagcatattgattatttgagtcycttggattcttgtatctgggatagtgactatcaagaattggataccaagagatctgttcttccaaataactctatttcaaaaacccaatctacttggttcctaagttcaaatactgagagttcatgtagcaaggcacacctctccttgaaaagcaatgaaaatattagtatttaaattaatactgactttatgagaactactgtaaaccttcagagaaggatgacc

SEQ ID NO: 493429 - DNA, 606 bp, Homo sapiens
ggctacagcagtgtcagaccttaaatctaggtcttttcactccaaatccccatatcctctctcccctcccaagtcttcaaatgagcataacttcaaatacaagtattccttgccttctccctgcctctctcccctcatcttccctgcaccgtttgcaatgctgttgtcaggactccactccacatctaatctaattttactcagcaatttcaatgtaggtattcctaataaaaattaaggagttgatccatggataaaagtggaagtggaattctaaagaagttcatattaaggcatttttaacttctaggactacatagatatttattattatctacatctattcagctcttgagttagcatattgattatttgagtcccttggattcttgtatctgggayagtgactatcaagaattggataccaagagatctgttcttccaaataactctatttcaaaaacccaatctacttggttcctaagttcaaatactgagagttcatgtagcaaggcacacctctccttgaaaagcaatgaaaatattagtatttaaattaatactgactttatgagaactactgtaaaccttcagagaaggatgacc

SEQ ID NO: 493430 - DNA, 533 bp, Homo sapiens
ctgttgtgcaggttttgattcacttccaaatgactgggaagaacaccaagatccttccccagagattcacaaacagaccacgagcagggtaatgctctctacagagatagggacttgatagaattgtggtgaatgacggggtggaaccaagtttctaaacctaaaatacacatacaccctgygcccaaagtgaacacggtggatgacttgggcaaataatttagcttctctgggtcttagttttcttatatgcagaatgaggtagtcagtgacattttttttcttccagacaggttctcagtgtgttgcctgaactggagtgcagcggcaccatcatagctcgctgcagccttgacctcccaggctcaagccatcctctcacctcagcctccctagtagctggaactacaggcatgtggcaccatgcccagagaatttttactttttttgtagagatgggggtcttgccatgttgttcaggctgatcttgaatgcctggcctcaagcaatcctcctgcatcagcctctcaaag

SEQ ID NO: 493431 - DNA, 502 bp, Homo sapiens
ttacccacagtgtagcacaactacaataacaaatacaaatatgatgggttacaatacatcatccatagtgcctgtgactgaccaaaacttggaaagaggttgcttacatctcagaaggactactggtgttgtttctcaaaagaggcaaggatactgtgggaaggcagataggcaagtgccccttacttaaaatggatctcaggactctattgcccccacccccrccaccattatgaagacagtgcaagcttttctcttcttattatgggattggagaaggtgggattaagaggataacctaggatataaagtgatacagtagcaggaatttggaaaatgtgaccttgtggccaactagaagtacagcagtcagataaaccacaaacactacagcagcaataacaataaaatccacttcaggcaatgtgaatagcactaacaagcagttactactcgaaacaactatactgagaagggagtagaattcccaagcagagcagca

SEQ ID NO: 493432 - DNA, 601 bp, Homo sapiens
ggggtactttctaatgcagcaatagaaaactaatgaatttatcgctgagccttaacatttgagaaaaatatgcctaatccaaggttttgaggtattgtgaggatttattacgtaatgtaagagragacacaaaaggccttctttttaagatagaaaaagatgtatctattgttttggttgagggcatgtgatcgccattcatgctgttcatcaagcatttccagcaatcccccattctagatgctgacagccctgcacaggagtcctcttatctgaggtttcatttgtcagggctctgttacccatagtaaatggcagtcaactgaggtctaaaaatatcaaatggaaaatcccagaaataaacacttcataagttttaaattgtgagccattctgagtatcgtgatgaagtctctgaccttcccagtctgtcccaccagggatatgaatcttctctttgtctggtgtctccatgctttagatgctcccactcattagccagttagcagccatctcagttgtcagatgggaaaaacacagggtttggtactatcagcagtttcaggcatccactggagtcttgtctgtctgcccttggtgt

SEQ ID NO: 493433 - DNA, 453 bp, Homo sapiens
aggagaggaggagaaggcagagrccagcttggaggaaggagaggaggagaaggcagaggccaccttggaggaaggagaggaggccttccttggaggcccctgcatcctcccttgctctgctctcactgctcctgcagctcccccactcccctcggagactccaccagatgtctgggtgaccaaggcagtctcacatgtgatcggaatgagattggctctctcaaatcaagagcctgagctagggataccataccctgagccctgccatgtcccaccagccatgtctgtctcaaacccaacctcagaacctgacacttgcacggaggccaggccgcaccaggcctacaggtgatgctgcctactcaacagtgtccttgaggcctcgagacccctgccctcctcccagggcccagccagtccattgaatggaaggacaaacacatggaaggatgc

SEQ ID NO: 493434 - DNA, 347 bp, Homo sapiens
tggtgggtggcaggtgggacatgcccctgtgctcccccagagaagtgaatgaggccaccctgggtgtgagagacagcaaaacgggaagcaagggccctgtccacctatttcttttttccacctcatttctttttcttttgraatcttatgcatgtgtttgtcacactcaccactgcgaagtctttcaggcgtctctgcagtttacagattgatgatcctagggagatggggttggggagcggtttccccggggaggcaagggcttcgggacactctcaggggtgtggtctggcctcagcctccctgagggtggacaagaccctcctggggcttcatgaggaggggcc

SEQ ID NO: 493435 - DNA, 684 bp, Homo sapiens
ctgtaggagatgaagagatgagggcagagatgggccacactgagcccctcccacctgaccaccttgtcccaccctgaggccccaggtcagagggcacagcctgcatctcacaggtgtggagacggaggcggagagttgtgctcggggctggcagtgccacactggggctctagggtgccctctgatcctgcaatcacagaaaggggtcccactccttggagtctgtccaacagttcccagaagcttaagtgtgcygtgcacagggacggactggggaccatgggtggaatgaaatgcccaaggagcttccagccccagagggaggaaagcagaaatcacagccacacagctgggcataagagagcagcgtgcgggagacagagggagaggcctctctcaggtcccagcctcgggaagcttcctgggggtggtgccaggaggtgggctagggtctcaaagtggggacagagtggaaggaccctgcagcggaaggaatggcaaaggcccaggcatggcaggggaaggttcagaatgggatgggggaagaggctgatggaagcggacacacaaggtggaaccaggatcagtggcagcctgcgccggggctcagccccatctctcccctcttccaggaagccctccgtgagtttggggctgagcctggtgccctgcgcccacccaccc

SEQ ID NO: 493436 - DNA, 620 bp, Homo sapiens
aatcacagccacacagctgggcataagagagcagcgtgcgggagacagagggagaggcctctctcaggtcccagcctcgggaagcttcctgggggtggtgccaggaggtgggctagggtctcaaagtggggacagagtggaaggaccctgcagcggaaggaatggcaaaggcccaggcatggcaggggaaggttcagaatgggatgggggaagaggctgatggaagcggacacacaaggtggaacsaggatcagtggcagcctgcgccggggctcagccccatctctcccctcttccaggaagccctccgtgagtttggggctgagcctggtgccctgcgcccacccacccagggcatcctgagctttgtgtctgcagggattgaggttctgtcttccccgctggacagaggccccagggggcagtgaattggcctcccaggctgtcgtagcaaattcccatgcactgcgcagcttgaaacaatcagaggttgtttcgctccctgttgtggaggcctgaagtccaagatcaaagtgttggcagggctggcaccttctggaggctgtgaagggggagctgcgccaggcctccctctcagctttgggggtggtcagttccag

SEQ ID NO: 493437 - DNA, 470 bp, Homo sapiens
ctgcatttcctgctgtcggtgaggctgcagggaggccagtcggctggggccgaggggtcctcagcctatggccagactccaaaggagggcatytcagaggagacaaggcgggacctgggggcttcgagtggtccaggaaccaggaggggtgagggccacccgcacttagggatcacagtggtttggggcactggggagggagagacagcaggtggcctggtagaaagagggctgataggccaggcacagtggcccacgcctgtaatctcaacactttgggaggccaaggcgggtggaccacttgaggtcaggagttcgagaccagcctggctaacatggtaaaaccccatctctactaaaaatataaaaaaaaaaaaaaaaattagtcaggcatggtggtgggcacctataatcccagctactcaggaggctgaggcaagagaatcgcttgaacccgggggatggaggtt

SEQ ID NO: 493438 - DNA, 470 bp, Homo sapiens
ctgcatttcctgctgtcggtgaggctgcagggaggccagtcggctggggccgaggggtcctcagcctatggccagactccaaaggagggcatctcagaggagacaaggcgggacctgggggcttcgagtggtccaggaaccaggaggggtgagggccacccgcacttagggatcacagtggtttggggcactggggagggagagacagcaggtggcctggtaraaagagggctgataggccaggcacagtggcccacgcctgtaatctcaacactttgggaggccaaggcgggtggaccacttgaggtcaggagttcgagaccagcctggctaacatggtaaaaccccatctctactaaaaatataaaaaaaaaaaaaaaaattagtcaggcatggtggtgggcacctataatcccagctactcaggaggctgaggcaagagaatcgcttgaacccgggggatggaggtt

SEQ ID NO: 493439 - DNA, 470 bp, Homo sapiens
ctgcatttcctgctgtcggtgaggctgcagggaggccagtcggctggggccgaggggtcctcagcctatggccagactccaaaggagggcatctcagaggagacaaggcgggacctgggggcttcgagtggtccaggaaccaggaggggtgagggccacccgcacttagggatcacagtggtttggggcactggggagggagagacagcaggtggcctggtagaaagagggctgataggccaggcacagtggcccacgcctgtaatytcaacactttgggaggccaaggcgggtggaccacttgaggtcaggagttcgagaccagcctggctaacatggtaaaaccccatctctactaaaaatataaaaaaaaaaaaaaaaattagtcaggcatggtggtgggcacctataatcccagctactcaggaggctgaggcaagagaatcgcttgaacccgggggatggaggtt

SEQ ID NO: 493440 - DNA, 623 bp, Homo sapiens
gccacggggatgcttcaggatggagcaatgtgcccaaagccggrttccttgaggctggggatgtcgttcttcctgtagaagtcagcctgcacatggttggcacggccaaagtcccggtttaggggctcaatgggctgattgatgcgcttcccatagacagaagacgtcagcactccaaccggcctctcctgttcctggtgaaagttatcaaagcacatagtcagcaccactgcattcgccagcacagctcacccgtgcacccatcagcctgggtcctgggagctttttctgcctgggtcccaccatggtagaccaagagggaacctccacgctgaagccaggggcttcacagggaagtagcctatggcagggaaccgttgaatttgctagaaggctggctggtgtattcattggacatgttgggaaactgtgccggaccatttgctctacccgtttgtccctgtgctcttcctggtcatttcccagctcctgctgctgctggtcccttcccaccacccagatcctggctcagatgtccaggtcctccctgacccctcccctccccagctccctgctcatccctctcactttccccatcttacatcctcacatggcttcctctt

SEQ ID NO: 493441 - DNA, 623 bp, Homo sapiens
gccacggggatgcttcaggatggagcaatgtgcccaaagccggattccttgaggctggggatgtcgttcttcctgtagaagtcagcctgcacatggttggcacggccaaagtcccggtttaggggctcaatgggctgattgatgcgcttcccatagacagaagacgtcagcactccaaccggcctctcctgttcctggtgaaagttatcaaagcacatagtcagcaccactgcattcgccagcacagctcacccgtgcayccatcagcctgggtcctgggagctttttctgcctgggtcccaccatggtagaccaagagggaacctccacgctgaagccaggggcttcacagggaagtagcctatggcagggaaccgttgaatttgctagaaggctggctggtgtattcattggacatgttgggaaactgtgccggaccatttgctctacccgtttgtccctgtgctcttcctggtcatttcccagctcctgctgctgctggtcccttcccaccacccagatcctggctcagatgtccaggtcctccctgacccctcccctccccagctccctgctcatccctctcactttccccatcttacatcctcacatggcttcctctt

SEQ ID NO: 493442 - DNA, 623 bp, Homo sapiens
gccacggggatgcttcaggatggagcaatgtgcccaaagccggattccttgaggctggggatgtcgttcttcctgtagaagtcagcctgcacatggttggcacggccaaagtcccggtttaggggctcaatgggctgattgatgcgcttcccatagacagaagacgtcagcactccaaccggcctctcctgttcctggtgaaagttatcaaagcacatagtcagcaccactgcattcgccagcacagctcacccgtgcacccatcagcctgggtcctgggagctttttctgcctgggtcccaccatggtagaccaagagggaacctccacgctgaagccaggggcttcacagggaagtagcctatggcagggaaccgttgaatttgctagaaggctggctggtgtattcattggacatgttgggaaactgtgccggacmatttgctctacccgtttgtccctgtgctcttcctggtcatttcccagctcctgctgctgctggtcccttcccaccacccagatcctggctcagatgtccaggtcctccctgacccctcccctccccagctccctgctcatccctctcactttccccatcttacatcctcacatggcttcctctt

SEQ ID NO: 493443 - DNA, 623 bp, Homo sapiens
gccacggggatgcttcaggatggagcaatgtgcccaaagccggattccttgaggctggggatgtcgttcttcctgtagaagtcagcctgcacatggttggcacggccaaagtcccggtttaggggctcaatgggctgattgatgcgcttcccatagacagaagacgtcagcactccaaccggcctctcctgttcctggtgaaagttatcaaagcacatagtcagcaccactgcattcgccagcacagctcacccgtgcacccatcagcctgggtcctgggagctttttctgcctgggtcccaccatggtagaccaagagggaacctccacgctgaagccaggggcttcacagggaagtagcctatggcagggaaccgttgaatttgctagaaggctggctggtgtattcattggacatgttgggaaactgtgccggaccatttgctctacccgtttgtccctgtgctyttcctggtcatttcccagctcctgctgctgctggtcccttcccaccacccagatcctggctcagatgtccaggtcctccctgacccctcccctccccagctccctgctcatccctctcactttccccatcttacatcctcacatggcttcctctt

SEQ ID NO: 493444 - DNA, 640 bp, Homo sapiens
tgaggctgtgctagatgagagccccagcagggagggtcatggggtcccaggcatgtcctggaggattctcctgggctcttccttctgtctcactcactgttgatagagccagtgaaaagcaaattcggtgtctcttcatgggatctgggcccctgaaaacctgtagagtagccccaggcagaatccgagaggtgggtgacaatccgagggatgggaggctctcgaagctgaggaagcctgcgtgtctctccctgttcctcccctgcacacagaatcctctgtctcctctgcagcactgccctccctgagtcacccaggcaggggcttcatcttggcctctgctagacgcctgcgcatggcctcccgccatgtctctgagtcaaatcccccctcctttctcttgtaagsacacccgtcttgaggtttagggccaaccctagatccaggatgatattatcctgagatctttaactgaatcacattcataaagacattatttccaaatcaggtcacatttgcaaataacaagggttaggacttggaactatcttttggaggattattattcaatgcattccatttgattggggattttttaagtcttttttgagggggcctttcatacaagctgctaatgtgc

SEQ ID NO: 493445 - DNA, 410 bp, Homo sapiens
ggtaacttctccaggtctctcccatcggggtcacaagacagctgccattcactgagaaagacatggagtcgttcattcttgccatctttttaaaaaacagaacttccccgggagctctccaacccctgcagccctcatcggcccgggatgcttgacacacacaagttatgccttgccaaaacccatcgtctgcactcaggacagggtacggctgtgcagccctgaatgagataactaagtggagaatggtggatgtctaaactcagtgcaggctcagttaggaaagkagaaggctttcctgcccaggatctggtactcacaataaatgctcgatgaatggctgttggctctccttcccttgagaggtcttcagtgagggagacgaacatacgtggcttagaggcaggaaa

SEQ ID NO: 493446 - DNA, 619 bp, Homo sapiens
gggagagataaatggaagactgataagtgaaaatgacccattaaatatgggtaggatttaggtaaaggaatatctagaatgctattataagatcaggtatgcctgggtgtgggggctcccgtctgtaatcccagcactgtgggaggctgaggcgggtggaacacctaaggtcaggaattcaagaccagcctggccaacgtagtgaaaccccatctgtctctactaaaaatacaaaaattagtcagccatggtggcaagtgygtgtcgtcccagctacttgggaggctgaggtaagagaattgcttgaacctcggaggcagaggctgcagtgagctgagattgtgccaccgcactccagcctgggtaacagagtgagactctgtctcaaaaaagaaaaaaaaaaaaaagatcaggaatatgttgcttgatttttccccatttcacagatgggaaagaggatatcaagtagcaagtatcaagtagctgtgttctgacctaaaattctgaggatttgtccatcttgttttatgcagaggaccgcatcctctttcactttctccctgaggaagaacctctcacactgaagccacacacattttctgctccagggctaatccca

SEQ ID NO: 493447 - DNA, 611 bp, Homo sapiens
agtccttcagagatgcctaaaatagtatctggaaagtaacagaaaatgaaagaaacagaaaccattgcaattcaacacttctaatccattagatctttactgatcacccactgtggggcaggcatagtactagggactctgaataaaaaaatcaaataaaacctaatgtctgtcattcgtccttttcacttacatgcacagaacatttatttgctttaaattaaaactttaygtaaattacttacccttaggatatgttttatcaaacatttcaacacggaatcacctttactttgaagacattctcaatttgaattttcttaacagaaacaattacaggttcttacggtcattttcctctatgaattccttatgtctaactttatatctgcagacaacaaaaatttatttagatcaagaaatatctagctgaatggtgtgaatcctgattttgattgttagtagaagataatgatgaacacaaaaattgtcattggcttttgggctgtaaaaactaagtctcattaattcccagtgtgaccccataaaaaaaaaattctagtattctcacaggtagccattgccctgggagcagagaaatgtggtaaaag

SEQ ID NO: 493448 - DNA, 611 bp, Homo sapiens
agtccttcagagatgcctaaaatagtatctggaaagtaacagaaaatgaaagaaacagaaaccattgcaattcaacacttctaatccattagatctttactgatcacccactgtggggcaggcatagtactagggactctgaataaaaaaatcaaataaaacctaatgtctgtcattcgtccttttcacttacatgcacagaacatttatttgctttaaattaaaactttacgtaaattayttacccttaggatatgttttatcaaacatttcaacacggaatcacctttactttgaagacattctcaatttgaattttcttaacagaaacaattacaggttcttacggtcattttcctctatgaattccttatgtctaactttatatctgcagacaacaaaaatttatttagatcaagaaatatctagctgaatggtgtgaatcctgattttgattgttagtagaagataatgatgaacacaaaaattgtcattggcttttgggctgtaaaaactaagtctcattaattcccagtgtgaccccataaaaaaaaaattctagtattctcacaggtagccattgccctgggagcagagaaatgtggtaaaag

SEQ ID NO: 493449 - DNA, 611 bp, Homo sapiens
agtccttcagagatgcctaaaatagtatctggaaagtaacagaaaatgaaagaaacagaaaccattgcaattcaacacttctaatccattagatctttactgatcacccactgtggggcaggcatagtactagggactctgaataaaaaaatcaaataaaacctaatgtctgtcattcgtccttttcacttacatgcacagaacatttatttgctttaaattaaaactttacgtaaattacttacccttaggatatgttttatcaaacatttcaacacggaatcacctttactttgaagacattctcaatttgaattttcttaacagaaacaattacaggttcttacggtcattttcctctatgaattccttatgtctaactttatatctgcagacaacaaaaatttatttagatcaagaaatatctagctgaatggtgtgaatcctgattttgaytgttagtagaagataatgatgaacacaaaaattgtcattggcttttgggctgtaaaaactaagtctcattaattcccagtgtgaccccataaaaaaaaaattctagtattctcacaggtagccattgccctgggagcagagaaatgtggtaaaag

SEQ ID NO: 493450 - DNA, 538 bp, Homo sapiens
tttataaatattttttcaaaagtcaaagaatatttaaatattttaagttatattcatgtttagatctgaagatgcaatatgaacttgctttgaacacaaggtgtcttcaaaaaatgtactctgtaacattatgttgtaagcctcaaatatacacaataaaatttatttttcaaaaatgtataccataaaattcttaacatcattaactcctctaagtcaattcaytgaaaatattgagaagttaaatgttaaatgcagaaagctgaaataaattaacaccagcaatcttttgtttaatatttactaaatgaaaggcacatttcaagaatgggtttaagaagagtatttcaagattttacattcatctacatgctagacatagatgagagtaaaatcagatagctttaatatcttccccttggacacatggactcaaccaggactcaactactagattactgtattatttataaaagactatatattgtttcataacaggaaaagctctagaactgtgctgttcaatacagtaggcaca

SEQ ID NO: 493451 - DNA, 613 bp, Homo sapiens
ctttttatacctaggtaatgcctgactctcattcacgttctcatgaattctaatttcttatgtacagctcaggtaccaaagatatgttcttctcataagtgttctcccccaccactaccctttccacaaatatttgacttattattagctctattctctggaaatatttgtgcattcctgaaattattcattccaatcataaaaagatatgttaataaaatatctatatttgaagttattatagagtttgaagatttttaaattgtcatagcactatctagactttcttttccactccattttgaagttatatacttttctagaaatctgtctttataaaaaagttcaaatttattgctctaaaattacattttaaaatttctgtatggttagtaactatatcccctcytgcattccatgtaaaatatctattttctttttttgttatgataagcttaattctagcctttttgaaaaattaagtcctgatatgattaatcctctattgtgcgttagatataattaattaaattctgctatttatttccttccatattttttatgggagtttatattgctaattcttttcctaacttcttgagatcaatgctat

SEQ ID NO: 493452 - DNA, 641 bp, Homo sapiens
gatgtggaactaaaagtgctgcaaacctaaagcctaactttccaaagtatacattatagcgttttatcagatatatcccattctaaagcctaagaattttaaattaaacrgatttttttttaaaaaagcctaagaatcaagtactaaacaggaatgttatgtatatatacttttttttttttttttttgagacagactctcgtctctgtcacccaggctagagtgcagtggcacgatctcggctcactgcaacctctgcctcccgggtttaaggaattctcctgtctcagcttcccgagtagctgggactacaggcatgtgccaccatgcctggctgatttttgtatttttagtagagatggggtttcaccatgtttgccaggctggttttgaactcctgaccttaggttatctgcccgcttcagcctcccaaagtgctaggattacaggcatgagccactgcgcccggccttttttttttttttttttttgagatatagatattggactgttaattgtcattgaagtattttggtctgaggtaggcttatgcagaggagaatgttttcatgttacttatattaacattgtttcttctacgaaatgacagattggtccaatgtgatgtaaggagttcagtt

SEQ ID NO: 493453 - DNA, 641 bp, Homo sapiens
gatgtggaactaaaagtgctgcaaacctaaagcctaactttccaaagtatacattatagcgttttatcagatatatcccattctaaagcctaagaattttaaattaaacagatttttttttaaaaaagcctaagaatcaagtactaaacaggaatgttatgtatatatacttttttttttttttttttgagacagactctcgtctctgtcacccaggctagagtgcagtggcacgatctcggctcactgcaacctctgcctcccgggtttaaggaattctcctgtctcagcttcccgagtagctgggactacaggcatgtgccaccatgcctggctgatttttgtatttttagtagagatggggtttcaccatgtttgccaggctggttttgaactcctgaccttaggttatctgcccgcttcagcctcccaaagtgctaggattacaggcatgagccactgcgcccggccttttttttttttttttttttgasatatagatattggactgttaattgtcattgaagtattttggtctgaggtaggcttatgcagaggagaatgttttcatgttacttatattaacattgtttcttctacgaaatgacagattggtccaatgtgatgtaaggagttcagtt

SEQ ID NO: 493454 - DNA, 530 bp, Homo sapiens
aaagctccaagaagtcctgcttatcttacctaagtattctctaaatgtatttcattacctcatcctttttgtcaatcaacacctaataattccctttaggaaatgcaagccaagaagacagacattccttggagagaaagacaatgtaatcaaattctctttttctctatgggttactcacagttggggttccatttaatgagctcggtttactgtttgctgaatgacttgtaggtgtgatatggcaacagcagatataggagtgtctaatgcagctgttcccagtatggtcatatataagttgaattctcttagtaagaagtgtcaatattctttaccaaaawacaaacctttcttttttggtttacaattgtaaatggaaattcctaagatgttggccctgcccaaattcaaatatcaaaacctaactttctgaggaggccaaaaaaacccattaaaaataatactgctgttgcaataccagtgaaagtatatgcataaatatgcatatgaacacacacacaccagca

SEQ ID NO: 493455 - DNA, 485 bp, Homo sapiens
tggctcatcacaaccaaaagtgtgaatcctcccctgcactgggggcagtttttgtacartgcaggcacacacacagcgagctccctcttgcctcaaccatttcttttgcctgaaatgtcctcttcctgatgtgctttccaaatgctgctcttccaccaggcctagctccagccagcatgaaaccactcattcacacctgacatgttcccaccttccccttgcaatgcctttctgttatatccccaataagcccaaatctttccagtccttcgaggcccgcctccaatgtctcatccccttccagtttctcaggctgctttctggagaagtcatttaattccgagtcaatgcaaaccatcgatataacttggttgttcaaactttttttttgagacagggtctcctgttgcccaggctggagtgcagtagtgtgaccatggctcactgcagcctcaacctcccgggctcaagtgattctcctgcct

SEQ ID NO: 493456 - DNA, 539 bp, Homo sapiens
gacttccaagctcattcagattgttgggagagtttagttctttgcatttgtagaactgaggtcttcatttctttgctggctgttggccagacatgctctaagcaactggaggccactcaccagttcttgcatgtgtctttaaagccatgagtggtgcatcaaatccttcttgtgctttgaatctatctractttctcatctgccaccagccagagaaagctctccacttttaaagaactcatgtaactatattaggcctcctctgaaaatcccccttttgattaattctaagcttactgattagtaaccttacttacatctgcaaaatgcctttgccatctaagataacataatcatgggcatgatatcccatcacaatcacagtttcttgtcttgaggattagggcaagagcagttgggccatctttagatttcggcccatcacagttgacatctgcaattaaaacaactattttccactctcccccaatagaaaaagggctcttttggaacactcagttccacatccccaaattcca

SEQ ID NO: 493457 - DNA, 539 bp, Homo sapiens
gacttccaagctcattcagattgttgggagagtttagttctttgcatttgtagaactgaggtcttcatttctttgctggctgttggccagacatgctctaagcaactggaggccactcaccagttcttgcatgtgtctttaaagccatgagtggtgcatcaaatccttcttgtgctttgaatctatctaactttctcatctgccaccagccagagaaagctctccacttttaaagaactcatgtaactatattaggcctcctctgaaaatcccccttttgattaattctaagcttactgattagtaaccttacttacatctgcaaaatgcctttgccatctaagataacataatcatgggcatgatatccyatcacaatcacagtttcttgtcttgaggattagggcaagagcagttgggccatctttagatttcggcccatcacagttgacatctgcaattaaaacaactattttccactctcccccaatagaaaaagggctcttttggaacactcagttccacatccccaaattcca

SEQ ID NO: 493458 - DNA, 556 bp, Homo sapiens
tatcactcttctgggaactttcccttgtcccacacatgcgtgttgagtggtgtgcagccatagctcttgcacgattctacatggcatgtatgatgctgttttgtaactgcctgtggatgtgcatcatcattagcacctgcccaatgtggggtgcagggttttaccccttagggctaacacataaaatgtgtttagtaggttcttaaatcaataaaataataatattaataacatagtatctatcacatacctgttgaactgtacttgtgtcagcccctgtgccgaatgcttctcatgctttagctcatttccttcttgcttattggctattataacccccaattgacaaatgaggacactgagtcttaatgaggttaaatatcgtgctcaaggatacatagtaaacagtaataaggaactcagtctgaatttgcgcccaagtctctgattttagctagatattactgagtcctaaaatggagaaggagggagggaggctggtggctgcagaggtttattratcaaatttgtgagggaatagtagatgggatatatg

SEQ ID NO: 493459 - DNA, 531 bp, Homo sapiens
tgcagctggcttgttggtaaggatgagcctgccggtatttggtacataagggcttaatgtaagttccagagaccaagcacacataatatgtgaagagctggtgacaaagttgaaactgggaagtagccagaggccataccttgaaaactgtggtatcctttgatgagaagttgaaatattctgcaataggtctgcatactcaatattttccactgaattgcttctaatgacagaggaaagataactttaggtagtctggtaactcagcaccaaacaacctgacaaatgttgccaatttctttgaagtctgatgtttcttctttaaaatgtaaattaaatgtgaggccaattatgttgaytaataggtattttaatataatctgctttcagcaaatgtttagatagaattgttaccccaggcatttggcccatgtttaatggctgatttagtaatctaaacacctccatctctgcagggagtatacagccatatgagaatcactgttataggtgatgaggctccatgagagg

SEQ ID NO: 493460 - DNA, 640 bp, Homo sapiens
agctgtgtcagctagccagggttcttcttaaagcaaatggaagttatataatcttccactcactgtcatgcaagataaagtataacctcataataattctggatttttacattaaaaacaattgcataacagtgtcccatttatggggaagattgtactaaatataacaagaagcaataagctttaaattttcaggttgtaatgaatgtgaactaaaaacaatgacatcccattagaaaatacatttaaataacatggaaaggcaactcatgataaatatttttaaaatattgaaaataatctgtacataaacatggtgagataattaaattaaaattaaaaataaacttacataattacataaacctgaataacatataacagataatttgggcttactattgagaatactagatgataagttggacagatatcttatataattatactaccttgcaagaaatgtacccatagtcatcatctcycttaatgttcacaataaaaaagaaagttagagtaatataattttctaaatcttaaatatactctatatccaattaaaaatctaatacaatagttggaagagaaaattttacatgctgatgtttatgtctaatgaatgaaaaagtctgttattgat

SEQ ID NO: 493461 - DNA, 640 bp, Homo sapiens
agctgtgtcagctagccagggttcttcttaaagcaaatggaagttatataatcttccactcactgtcatgcaagataaagtataacctcataataattctggatttttacattaaaaacaattgcataacagtgtcccatttatggggaagattgtactaaatataacaagaagcaataagctttaaattttcaggttgtaatgaatgtgaactaaaaacaatgacatcccattagaaaatacatttaaataacatggaaaggcaactcatgataaatatttttaaaatattgaaaataatctgtacataaacatggtgagataattaaattaaaattaaaaataaacttacataattacataaacctgaataacatataacagataatttgggcttactattgagaatactagatgataagttggacagatatcttatataattatactaccttgcaagaaatgtacccatagtcatcatctctcttaatgttcacaataaaaaagaaagttagagtaatayaattttctaaatcttaaatatactctatatccaattaaaaatctaatacaatagttggaagagaaaattttacatgctgatgtttatgtctaatgaatgaaaaagtctgttattgat

SEQ ID NO: 493462 - DNA, 424 bp, Homo sapiens
actgtgcaccgcagccctgtcaccaagatcatgctgtcggagaagcacctcatctcaggtgagcctctgtggggtgctccagtgctgggagagacagctcagatgggagtgtggagacaggaggatgagaatttccactggggagggacattgtgtaggaagagagctctggcggagaggattgacctgggatgggactgtaattgcagaagtgagagaataccataggggatcagtctggggaagagtgaatctgtgtgtgtttgggaatccatcaattcagcaacgatttacggggcacccaccatgtgccaggcataggggatacagtgatgaacaagacaggccaagtccctgccctcgtggagctgacattctagcagsgatggcagacaataaatctataaaaatggacatcaatggc

SEQ ID NO: 493463 - DNA, 417 bp, Homo sapiens
ggagcgaggggttgtcattcggaggctgctgagggatcggctgagggcattgcccttctggccctctttccctggtgactgccaccaacttcacttgggaaccctgcctgctcagagcctcagctttcccccgccaccagcgtgatctctcatagcaatgggggtcaggggttgggctgactcatccagacctctaaacattatctgaggcyacctagggggtcagggggagttaaggcagtggcctctggctgcctcggttagtccctgctccagcacttcccaggtgtgaggacttgggcaagatccttcatctctggggcctcagtttctccatctgtaaaatggagccaataagaaaggctttgaagatttgtgagagaacagcaggtgcttagaatatccctcctgtatagt

SEQ ID NO: 493464 - DNA, 567 bp, Homo sapiens
gcctggattcgaatttcagctccaacacccagstatatgtgatcttgggcagatgacaccacctatctgggcttccatttcctcactggtaaaatggggtactaaatagtacctaatttatggggttgctgtgtgtattaaatgtcaagtgcttagaacagtgtttggaacagggtcgatacaaaatgattatcgtgatggtggtgatcgtgacaattatttttatcattattttcatccctaacacctggaataggattccagcatattaggatattattggaaggaaagaatgaatgggtaaatggtggggaacgctttcctaagtcccatgttgcggggcttggcaggggccactcgagggtcacctggaagcgcaggatgatggtccagaccagccccagcgtcagccggtgattcccatccacgatgtcatgcgaacccacgttctccaggtgcacgcgctgctccttcagaaactgcagcgccttgtccacgttctccagtgagtggatccgcatgcggccgcgcgtgggcctgggctagggcgacaggggcggtgggcga

SEQ ID NO: 493465 - DNA, 475 bp, Homo sapiens
gtgactgtttcctgaatcctacttccagtctgtggtctcatgttgcttctaccgtgctttaaaggactgccaatgtgtgaagctttttgtatttgatgtgttaatgaggttgtgagttttattctttgctcagccaaatgaatttgtaaagagaattatgtattagagaatttgtaaagaggattatacacatatatatatgaaatmcacatatatataatccatgtatatatacatatgatccataaataatctgtatatatatgtttaatgagtaacaactatctattgatgaaaatggtggaagttatgtaagatgacttgtaaggagcatcccttccctgggagaaatcagcactgaatgtctcctgggaggtagcacattttgatgctgctgctgatgatgatgatgatggagaagaggaagataagcatctccattgctttttatgtgctaggtacatagtctcatttg

SEQ ID NO: 493466 - DNA, 495 bp, Homo sapiens
gagctgaaaggggctgcagaaaccatttggtcccattcattcattccaagatttattagctggctgctggcccttgcagccagtgtgatgagcatgacccactgttgagcaagctcacaatccagtgggagaaggaacgctcagccaagagctggggcatgccaagcctctgcatgayacagcactcaacaggtgcccactatagggcccagggaagtagcccttcactctgtgccactgtggggatggcatcagggaaggcttcctggaggaaaggacacctttctctattctagtgtttttcaaggctatgatttgccctcaaatcccagcttttgctgcatcctacacttctggatgtgcagggccacctgcactgagtctgaccaggctgggataaacctgggggtcctgaggccctgctcactgggctatgtatagtgcccctgagtacttccagcagtgcctgatgtgcagcagacagcatcaagacgg

SEQ ID NO: 493467 - DNA, 451 bp, Homo sapiens
gcggcagctcgggcccagtcacactccttcactggtgatctccctcccctgcaggcctccytccacctcccagacaagctgctggtgaccagattcctgtctcagcgtttgcttatgtgagatctctaactcagaacccgtcccttcctgggtccggcttctgctgggaagccagccacctgaggtgggggctgacgggctgggtgggggccccggactgcactgggctagcagatgcagggaggcagggagggggaggcaggccatttattgaagaactgcttgcagacatggacacacacagccatggtaaccagacgccaccctggggccagggagcacccagaaacagccctgggctgccagcccaggcctggacatttgcccaccacgggtggagggcctctcttggcatcaaccatccacgacctcctacggcaccatctctcct

SEQ ID NO: 493468 - DNA, 546 bp, Homo sapiens
tgagagtccagaggcttgctggggacagtgggaggaatgtgccaggaccacagccctgcagcagacctggaggacrtcaggccacatggaagcaggacatgagaacgctggagagatatctcctggaaccacgcatgcacacacgatgtagctgatgggtttggtggtattgagaggaattttgtggttctgatggaaagttcaagaaaaattagcgtcacagaaaaataaacactgcagaaaatacaattataattctagaaaaagcaaaaaaaactgtttaaggaagggaagtataatcataatacatgcttggcttagctgtgaaaaacaatcgcattgtcacagtaaaaatgaacagaagaactctgtggggatttaaccaagaactgtgatagaactgtagtagacaggtagaggcgagcagcccacagacgatgtctaacaccgaaagatcacactacaccagcgtactctatttggcattaattcagtcatattttcaaggtaaatacctaaggaaacagtttagcatttgcagaagcg

SEQ ID NO: 493469 - DNA, 546 bp, Homo sapiens
tgagagtccagaggcttgctggggacagtgggaggaatgtgccaggaccacagccctgcagcagacctggaggacatcaggccacatggaagcaggacatgagaacgctggagagatatctcctggaaccacgcatgcacacacgatgtagctgatgggtttggtggtawtgagaggaattttgtggttctgatggaaagttcaagaaaaattagcgtcacagaaaaataaacactgcagaaaatacaattataattctagaaaaagcaaaaaaaactgtttaaggaagggaagtataatcataatacatgcttggcttagctgtgaaaaacaatcgcattgtcacagtaaaaatgaacagaagaactctgtggggatttaaccaagaactgtgatagaactgtagtagacaggtagaggcgagcagcccacagacgatgtctaacaccgaaagatcacactacaccagcgtactctatttggcattaattcagtcatattttcaaggtaaatacctaaggaaacagtttagcatttgcagaagcg

SEQ ID NO: 493470 - DNA, 548 bp, Homo sapiens
tgtctctttttgaggacagaatcttagaatgctacttatggcagttacatctcaggagttcctttttccttgaaaactgagaagttgatagactaccgagaggatgaactagtggcaaaggagcaggatgagtctgcgattcagtgctgctccaggcagccagacccatggatcgtcctcacggccctcaatcgagcagycgcagcgtgccctcctggtctcctgccccacaggcctggcttctcgttcattaaccccttacccgtggatgcgtcccggcagcaggcgccacgtggctggtgagaagggcgaggcttgggcccatggctgctgctcaccgcacagccttctctttagaaggtttttcctttgcaagggtcctaatgatttctgcttcctccactgctggggaccactcagccatgagctgctcactcctctatgggatggatggtgaaatagaggcaacttaggtaaagactttcgggaatacctccaggctatgggaacagacagagccatatacaacatgacctgcactcttgggt

SEQ ID NO: 493471 - DNA, 548 bp, Homo sapiens
tgtctctttttgaggacagaatcttagaatgctacttatggcagttacatctcaggagttcctttttccttgaaaactgagaagttgatagactaccgagaggatgaactagtggcaaaggagcaggatgagtctgcgattcagtgctgctccaggcagccagacccatggatcgtcctcacggccctcaatcgagcagccgcagcgtgccctcctggtctcctgccccacaggcctggcttctcgttcattaaccccttacccgtggatgcgtccyggcagcaggcgccacgtggctggtgagaagggcgaggcttgggcccatggctgctgctcaccgcacagccttctctttagaaggtttttcctttgcaagggtcctaatgatttctgcttcctccactgctggggaccactcagccatgagctgctcactcctctatgggatggatggtgaaatagaggcaacttaggtaaagactttcgggaatacctccaggctatgggaacagacagagccatatacaacatgacctgcactcttgggt

SEQ ID NO: 493472 - DNA, 683 bp, Homo sapiens
ctgaccttgtcaagtttaggagcactttaacaaccagatacctaagtctaagtctaatcttgagtctttaaaagtaagaggctgtgtaagataaaaatctaggtgtttacgctgtcttggtgtcaacatttataccttaaccacttttgcttctacaggatgtgtatccaaaggccaaacttttcatgtctctttaaatcagcctgtaatgtgggtgtgaacttgatgtctctttaacatggcctgtaacatgggtgtgaaccacaaagggtgaaacacatttttaaaacctctcagagctttctctgcatacctaagaccatggcacagcatcttctgtaggtgagcccccgaccatcgcacctgctctccatacaggactctaggagcagatgctcaaccccctcggaggagaaacatctgggaaaaacactggagtgggctcccaggaggggaggccagggtgaaaagaaaggtcaccaaccctaaatccatcaggaacatgctgacctctcttcaggggatgctgcttaagagaccttttcaacatatttttatctgcatgatataaatttttaaaatatgcttgagtacctaatttttggtattttatttacatgaaatgtttaattctccgacagttwtatatccagcagcatatagctttgtgactccaatgacga

SEQ ID NO: 493473 - DNA, 586 bp, Homo sapiens
tttgtgtcagtttccatttgtttgttatttaatggtttaaaaacacgggcaaattcaaaggcatgccaggttttttctttttgcacatgttttaaaacgaaaggacaaattacagtaagaaaaatttagaactgaaatgattaacctgcaactttagagttaaatagagtcctctgaagctctctatgtctatttcttcattttcttttctgcctgctttgaatatgctatatagttattaagctactggtgttgagataaagctcactacagtactactaattcaaggttatttggattttttaaatacatttatccagttcaagctaaaatgtaaacattaaaagctcatttaaaacagaaagaagagttaaaaagattttaaaaaattgaactgccatgaaaactgctttacccaaaattgtggtccatagcttttattggatttacccaytggggcaaacaaaatgtagccatttggacaggtcccaattttgtcaaaaataatttgggttcatatatcttttatatgttcatgagtttgtgatgctatctaatggctagagtttcaaggtaaaagctattg

SEQ ID NO: 493474 - DNA, 516 bp, Homo sapiens
cactagactgatctggtggagacaggttttgaactcccatctctcctccaaaatcctccatttgacaccttcccaactgtctttgttttttggaggggctgtaaattactgttaactcatttgcccaaagtagagaattaaagagaaacataaaccaaatctaccaaaagacacttatttttcatttttcagatactattatgtggaaccacctcactgccagagagtgtaacttattcaaaatttctaaataaagcatttccactgtgaatcactgctacgtatgaaatgcaaccaarggacatcttgctctttaagactaacatcaaattatctctattctgaaatctaacaggaaaaaaagttttttttctaacagcttgctatccaaaaagtttctgtaggtgtttacacaggagacctgtagtaagctatcacacagtttaactcagatgagatgaaatcacccacaaagcagcctttgagggtttgtttaggtttgctttggattaatca

SEQ ID NO: 493475 - DNA, 616 bp, Homo sapiens
ctgtagtgcttgatgctgagctcatggtgacaattaatgatcataaggatactgagagggaccaggaagaggcaccaggcaaggactcttggccaagtgtctgtgcaggaacaaactcattggaaataattgtcaaatatatggaagtcatcccagaggaggaaargtggctataaatgagaactgacagagtatatggatttaaacattggcttcagtaaccttagtgtgttaattctggtgttaaattcgtacacccaggattttactattaattacaggtgatatttaattgggattgaaaacctcaaatactcccttagtcacccactgttggttcaagattctaaggcagaaattctttactattagccaagactttagtcccaaattgcaatatgtcttcctggtgaccaagactagattaaatacaataatggcaatgtgtcttttgtctaggacacagattgtccaattcccaaacccacatgttgtgaaatgctgttcaaaatgatcacgcacacacacacgagtccctttctcaactaagtttgaaaagtatgtgatatgacttggctgtgccccacccaaatctcagcttgaattgtagctccca

SEQ ID NO: 493476 - DNA, 179 bp, Homo sapiens
ttccttcctccacccagaacccatgtgtaagtgaaggctccagcctagcacaacagtccaggagcaccaggaccccactcactcttgccccagttcacctgtggggcaaaagctccaccctgacagaggcaagccaagctactacmccacccaaggctgcagggatgtcactccaagag

SEQ ID NO: 493477 - DNA, 530 bp, Homo sapiens
gagacctgtctcaaataatcggggttcacagtggttaccaggaagctgatgtataatatcttagtaataacagtctcttttaagctgataacaacttaacttcaattgcatgcaaacagtcttcctttttgcccccaacatgtacattttctgtttttgatgcctcactttatgtgaagcacaagcacatgcagatcagtgaagctgyggggcctgagatgggacaccccactgtggggcagtggttcttatgtccaagacctaagtgctcgggagcggcagtttagggtacaggtccctcctgagggacaggagtggggctggttcacagggcagcggctctggtgtctgaggtgtggttgtgcatggtgtggccatggagctaggacctggagcatgggtgtgagtggaacagcttcagcttcagagtccagggcacatgcagcgttcaggaggtggtggccttggtcctgaggtgacacaatagtggctccttctgggagggcacagcaagaaacattcagaggaag

SEQ ID NO: 493478 - DNA, 434 bp, Homo sapiens
gcaaatggggaatggaagaggggcaacactgtatgcagagactrctaccataggctgagtaagaaaggatgaggtctctgttttataatagcccccatttattggaacttggctatgtgtcagcaactataacaacactttacatatataattccatttagtctctgttagttagctctgcaaagcagatgccattccatctcacaaagaaaccaaagtttacacaaatgtgcccttaaaaaagaaataccccacaaaaagctaacaaaagtaggattcaaacccagttgttaatcacattaaagcctgtgctttaattcactctaccatggcaggaacagggaatcaatataagaagacagaaagagagagatttaataggtaaaattaactaagcttattattgattacacgtaggacaagggaaagagagg

SEQ ID NO: 493479 - DNA, 588 bp, Homo sapiens
aaaattaacttggacaacacattatcatcattctgtatgtttttaaataacactgtaaaaagcatatttcagtggcaaaagaaccacctccattaacctaactctgtcaaaattaaatacccagaatggaaagattttgaactaagtagagaacctcaacaaagttttaaaattgtatatacagttatgtttatatggagacagggcaccacagcaagggaatttaagctattcctgcaccaaaactaaatttgtacaaactcaggagagaattatatagtggattatatatattctatctgtactcatacacatacatagttaagtctgtaaaaggtaagtcatgaaaatgaagcatacatttttaaattctaaccaaggagacagtaagtcaattgctagggggaagaaaaaacaaaaaaacagaaaaggaacataaaactactcttaaagtcgggaacctattatgcgctcaaakgttacctaatattttcctgggcatcttcagctacacatattttaaaatatacagtgacaactctaaagctccactctcgcctaaacttttcagattcatataaccatcta

SEQ ID NO: 493480 - DNA, 566 bp, Homo sapiens
aagaccagcttaagtagagtcagatctgtctctacaaaaaaaaaaaacaaaaaaaaacaaaaaacaaacaaacttagctagtcatggtggcatcatgagcctgtagtcccagctactcgggaggctgaagtgagaggatcacttgaacttaggaagctgatgctgcactgaaccaagattgcatcaycctgtgccagcctgggtagtagattgagaccctgtctcaaacaaacaattaaattgactgcatcatcttaactttagctgatgctacttagcaagaaaatgaagaagtatgcgtcatatttaaggaaaatgtgtaacctccccaataaaggaaataagtttttaaaaccttctcacagttaaataaatctcacaaatatttgatcatttttgttttgtactaatactacatattattcccttatgtattaataactgatttaacaatgtctttagatattgatatctctagtatttcactttaaaatttttactttatattccaagagagatttataagtctttcacctaactgatttctgtagaactgattaaaatat

SEQ ID NO: 493481 - DNA, 644 bp, Homo sapiens
tttgctgggtgagagaagtttttgttttcaattgtatttccctaacaatgtctgaaggagataatgcaaggcagagggggggctcttatcactatctggcacttctccccaaacttcagtgttaaattccacggggaagggttggataggaactacttctctgggcagagcaaacataggccaaaggcatactttgcctgcttttcatctgaaaaccccaatctaaaattaggaacgtttgtgccccagtgacagaaaaagtctatcctaaatacaacaacaaccaaaagatgtgagagttcaatagagcatttgttagaagctaaaattggcagattgaaatttcttgccctgggtcttttttaggtagtatacagtgggaagatcatccgaagacgttattaatttactgaagagaaacaagagagtaactgggatttttggggggtcttttgaaattctcttttattcacctctagtattagactattgcaaaccaccatttcaaatggrgttggaggtggaagaatagagaagaagaaataaaaagtcttgatagactaataaaaataaaataataatgtatcagatagtagttatcaaagaaaaggagctatatagaagtaagataatataggaccttc

SEQ ID NO: 493482 - DNA, 524 bp, Homo sapiens
gggaagtgattggatcatgggggggatttcccgcttgctgtttttgtgatagtgagtgagttctcacgagatttgatggtttaaaagtgtgtgccacttcccctttcactctctctccctcttgtcaccatgtgaagaaggtccttgcttccccttcaccttctgccataattgcaagtttcctgaggcctcccagtcatgcctcccattaagcgtgcagacctgtgagtcagttaaacctcttttcttcacaaattgcccaatttcgggtagttttttatagcagtgtgaaaacggactaatacagtgagatattaagaatgaatactaggcctggcaaggtggctcatgcctgtaatcctagcatttggaaggctgaggcagsaggatcacttgagttcaggagttcaagaccatctggggcaatatagcaagacctcctccgctaaaaaaaaaaaaaaaaaaaaaaaaaaaagaaaatagttaaaagaaattagtctggggttgtggtgcacccctgtagt

SEQ ID NO: 493483 - DNA, 661 bp, Homo sapiens
aatgtaatgttaggcagttcctgcttttcaccaccatgcaatcttgaaaaacacatcataaattctcttatggaagtagttttgtatctattaatctgcatccaggttgacaagaggagacttaagctaaaacccttgggacaaagagaatagagttcaccaacagggaagaagaggagtcagtgccgctaatacgcatttgatgtgaactgaaaactaacccagagcattgtacctttcccttaaatgttctgkgcattttattttattgattttaatttttgtgttttgttgagatggggtgtcactgtcatccaggctggagtgcagtggcacgatcatagctcactgcagacacaacctcccaggcccaggtgatcctcccatgtcagcctccccggtagctgggactacaggtgcacaccaccatgcctggctgatttttgtatgttctgtagagacaggctctcactatgttgcccaggctggtctcaaactgttgaattcaagtgatcctcctgccttggcctcccaaagtgctgggattacagggatgagctaccttgcctagctgattttaatttttatcaatgaacataatttttaaaattcaatggtgctaaaaggctcctgctgacaagcttccatcccttcagttcac

SEQ ID NO: 493484 - DNA, 555 bp, Homo sapiens
cagcaaaaaatgtctgacttttgcagagaaactcctaatatgagtttgactgctgtcccayatctacctatgtggtcgtagtgctgtagtcactgttgttaccctaagaggacagccttgttcctccaggtctcttacaactctcttttaaggagctcgtattagatccctagagctgctgtaatgcattgcccaaatcttgtgacttaaaccaacagaaatttattatctcatagttctggaggctagaagcctgaaatgaaggtgtctgcaggcttcactctctctgaaatttttatgagaacatttttcatgtgatttagagcccacctgggtaatccaggatgatatcatctcaagattcctaacttaattacacctgtaaaatccatttttccaaataaggtcatattcacaagttctgaagactaaggcatggacagatctcattggaaaccatcattcaacccactgcaaagctttagccaattcccagctatgaattcttccaagatgaaaggataccaagctcaagactctcccttgttcatttga

SEQ ID NO: 493485 - DNA, 615 bp, Homo sapiens
tggcagcaaaaaatgtctgacttttgcagagaaactcctaatatgagtttgactgctgtcccacatctacctatgtggtcgtagtgctgtagtcactgttgttaccctaagaggacagccttgttcctccaggtctcttacaactctcttttaaggagctygtattagatccctagagctgctgtaatgcattgcccaaatcttgtgacttaaaccaacagaaatttattatctcatagttctggaggctagaagcctgaaatgaaggtgtctgcaggcttcactctctctgaaatttttatgagaacatttttcatgtgatttagagcccacctgggtaatccaggatgatatcatctcaagattcctaacttaattacacctgtaaaatccatttttccaaataaggtcatattcacaagttctgaagactaaggcatggacagatctcattggaaaccatcattcaacccactgcaaagctttagccaattcccagctatgaattcttccaagatgaaaggataccaagctcaagactctcccttgttcatttgaggccttcccaaagatgactgacattttcacaaattttatttggtttcatttcctatc

SEQ ID NO: 493486 - DNA, 609 bp, Homo sapiens
gctggggcctcaatataaaaagacagattaacaaaagamaaacaaatagaagtttattaacatgtatacagtgactttttctgtaacctctgcctccccccctcccaccatgtttatagacccctgcatttaaaccatctgggacttcaggttttaaacacgagctggctgaatcttcttgcttggtaccctgcaataaatgtatacatgggagacacccagggacaaatgaggaactctcaaagagatagtttagaattcaagcataaatactatcttcagctaaagacaaaacagagaatggtgtcagggaggacgaggtaactaggaaaagtacagtaaagaagagtaagttttgtaatgcagatgtaagtcaataccttccccactgctaagagcctctagtgatttacccatctttctctttcttatacagagagggagacacacttaaaaaattgagatttactttataaatgcaaatttcccatagaaaagggtttacttctcctttattttcagagcttctcctgtgtctgctgtttctcaaaataattctgctaaagaggcatattttggggtgtcatattctggtctcctatatcattc

SEQ ID NO: 493487 - DNA, 660 bp, Homo sapiens
ctgaggtcttaatctgcatataggaggcrgcttgtgggagtctaccaccagggaccatagcagtggctcacacagaggaaccagccatttaaagctgacttggaactgtgtatgaatgttatgtatgcaaatgatgacctcttggtaggaaaaaaagtacctttggcatttgtttaaatctttttctaatcacaacataggtatctagacatttgccttttgtttcattcattcgtttaacaattatttattgaacatttccaatgtgtcagacactattctaaggaggactcccagacctgaatgagtttatagtctaacaggggattcagacatttaaacactaccgctattaggctagtatatattttctacaactgtcacacacacacaccaagcaaaatggacgatttcctgttgtaacatattgcaaaggagatagccctcctaggacaggcccaagaaattccttagggggagaagtcttcacttatctttcaggttactgtaatatttttagatgtgtgaataatctttgtatttattccagtgctggcttagagaagtttttagcttattagaatatctacatagaaaaacaagttttttagtaatagtatcttcttccaagaagctggcttggaactctccatttattgt

SEQ ID NO: 493488 - DNA, 475 bp, Homo sapiens
gtaagaatattttgcataaattctgaaatcagaatgtgctggagtgttatgtttctttcaaactctgttgcctcctctgctgtatagttctcgtaatgawgccattattcatgatgataaaattctgaaaagaatttgcataatacattttttctcataatgagatttgttgccctattgatttcaagttaatgcttaatatttaatttaatttactgcctgtaattacagtgccagaataaaataaatgttacttgtgtaccaacaatagcactctactcttaacagggccatctgtcaatactgtcaattaggtgaattatgcaattaatttaacatcatgaactcatcgggtggggagggagagataggctcctaggtgtgtttggaaagttgttggtattagaaaacaagtagaaaaagtgccagctctcccaggtagttttgagatttatccatcccactcccagccacc

SEQ ID NO: 493489 - DNA, 601 bp, Homo sapiens
ttggctcatgtgtgcactcagaatcttcatagaagattactctagcaaaactgactggaccagattagcccttccttccgctccctctctagacagagagaatgcgattcaagacaacaggtattttgcatctaaaaaggacagaggtgaaagggtggatgtcagactagccttgttggacagtcatccaagatagtatgttcatgagggagcagagggaggtagatagagaggtgatacccttttccaagagagccaaaatgttcttttgttcaattataatagtgggcattaatcatgttgtttaaaaatctaatgtacactgacggccaattgagcatttcctagggcccaaggaaaatgctatgtgagaaattctctgagccctgggctaaattagtcttcaaatatgtgctatgaagtgatactgtcaaagtagttagtttatgacagcataaaatatttcattgaactgtaaatgaagaacaccctgacatccytttccatttcttttatttatttgttttttttgtttgtttgttttttctgaattgctcctttctgtaatttgggaaagactgcagttctttatctgcgatgt

SEQ ID NO: 493490 - DNA, 668 bp, Homo sapiens
ctgacacctctggtttccacctactaaatgccagtagcaaccctctcaaaatcatgaaaatctgaaacatttacccaaatttcctaggtattccctaggaatgttgtaccatttccttgagaaccactgtctcacaggataaaatcttaccatatcttaccaatcgaatcttgtctctttggcatccaaagctctccatgtctgagtaaattggrccagaggagttaggaaacactggaaattgggtactggatatctttcactaatcaaattgacaaatcactgtagtttttaatgttgatgtctactgttggtgagcgtcaggagattcctgtaagctattcatgggtaaattttgtaccatttttctgaaaagcaacattataaaacatatcaaatatcttatctttcagcaattccttttctaaaaatgtattaagttatagaaatatgggggagaagctactaagacattcataggcattattttaaaatagcaaatatttcagaagaaactattcaactataaagagctggctaaattttagtacataacttataaacaaatttgtagtgtccagacaagattgtgtttcaaaataattcatattaaaaaggggtttaaaacagccactgtagtatattaatatcgaaattttatgcttaag

SEQ ID NO: 493491 - DNA, 618 bp, Homo sapiens
atttccatagtctatttatactaaacaccatgacacattctgcaatgaagagaataaaagaaaggatacataacctctgtggtagtggactacattcttgatatgagatgatgatgagcatactgttggaaagtgaagacaagggaaaatgttcaagatacttctggtacttttctattgcatttatttgctacaagcccttactacttcatatatggacaactgtgatacccaaccattagcatcccatctcaagttctttcacttttcaagttaggtatataccccagtgaaatttactttgggatttaatctttcagtcattgctttgcytgtgtcattccactgttcaaaccttattcttgactccttgttgtctataccataaaaagcaaactccttagacaaacatgcaaggccttcccctaatttcttcaaagtctggcttcaacggacttttcatagattatctaccatgaatcacttatataattcttaataataggtagtattaagcaatggttgaaggcacagatacaggagctcttactgtgtggccttggcaaattagttgatctctctgtgcctcagtcttctcatctgtaaaatgggacacca

SEQ ID NO: 493492 - DNA, 618 bp, Homo sapiens
atttccatagtctatttatactaaacaccatgacacattctgcaatgaagagaataaaagaaaggatacataacctctgtggtagtggactacattcttgatatgagatgatgatgagcatactgttggaaagtgaagacaagggaaaatgttcaagatacttctggtacttttctattgcatttatttgctacaagcccttactacttcatatatggacaactgtgatacccaaccattagcatcccatctcaagttctttcacttttcaagttaggtatataccccagtgaaatttactttgggatttaatctttcagtcattgctttgcttgtgtcattccactgttcaaaccttattcttgactccttgttgtctataccataaaaagcaaactccttagacaaacatgcaaggccttcccctaatttcttcaaagtctggcttcaacggacttttcatagattatctaccatgaatcacttatataattcttaataataggtagkattaagcaatggttgaaggcacagatacaggagctcttactgtgtggccttggcaaattagttgatctctctgtgcctcagtcttctcatctgtaaaatgggacacca

SEQ ID NO: 493493 - DNA, 537 bp, Homo sapiens
ctccacaaaatgttacagcatgtttactattccttcatattaaccagccatatttcctcttcagacataatgaagtttattctgatgaaattgaccatgtcaaagtttaaattattgctattcactgaaatcctttaattgcaccartgtgtttgttacacatattcatttgcctggtggttggcacacaataaggagtttataaatgttagctattttatagccatcatcatccttaccattctgattgaatataacagccatttggtatataatttatattatgtgttgagatatattttgtgagtacttcctgtattagatatttatttatgaattacagtaagacaatttatttggcagttcatgaccccacattataagatatttaattatataaatatgcctagaatatattaaagctactgttgaaatatccctccttatataaaaattacatgaaaattatttttcaattgtttattagataattttgagccacccaattttttcaactctaaaattctatcttgccag

SEQ ID NO: 493494 - DNA, 571 bp, Homo sapiens
aaaagggaaaatgtcattttaagatggggaatagatctatatctggaatgggatacaatttgtaattctgagtcttttgtgttgttccattcatttgtttaccagagcattctctggatgctgtaggggtaccctatggaaagaagactttctgaggttcctattataacacaaaaagagaaaaatacagggaaaatgggatctatgaaaaaacaaaacaatatgccataatttaccacgtttaaattcaagcaggttttcagtattttttttttttggtagtagagtttgagatatgtggtttacatccagctaacatgcttcatgtagtaatgtctataatgtgcctggtgtgtgtgtgtgtgtgtgtgtgygtgcgtgtgtgtgtgtgtgtttaagagagataattaagagagagagataattggaaaaatatcattaaacagttccacttacattaaggtgcctcctctaccatcatgaatcaccagccaggaggcacttttctctggtgattcattccaattcgattttataaaaaaaattatttcttggtttatagcaccgtgag

SEQ ID NO: 493495 - DNA, 641 bp, Homo sapiens
gggcatctgtctaagtgtacccctcctgtatctgaagctgtgcctgaagtcagcaagtgctaacagcaaggaaggggagatagataagaagtctggagaacaaagacaaactgaggaccatgaagatgagctggaacccacaagaacgtgctggagcctgcttctgtctttcattggcacctgcatctgagtctcactgcctcttggcctccaacgttgaagaaattggtgacactgccatggagctgtatatgaaatggctcaaatctggagaaactgaagaagtatccagtgggagctgcaggagctgttgatccatgccaaggaggtgagctagcagatgtaggacacgatgtgtgaggacacagcacctgaccctctaccaaccttcccagcatacatatggctgctgcatcatttctgccttccaaaccttgcacaaattatgctcttggcctatcagaatccaaaaccattcagggaaaggaattcttaaaacatcaatccagtttagctaaattgacaytctatgaaaccaccacacatatctacagatatcaaaaccttataccctttatcttaggtgagcaagaaattagagtgccttcatgttctataactgacttcttcctgctcctgag

SEQ ID NO: 493496 - DNA, 641 bp, Homo sapiens
gggcatctgtctaagtgtacccctcctgtatctgaagctgtgcctgaagtcagcaagtgctaacagcaaggaaggggagatagataagaagtctggagaacaaagacaaactgaggaccatgaagatgagctggaacccacaagaacgtgctggagcctgcttctgtctttcattggcacctgcatctgagtctcactgcctcttggcctccaacgttgaagaaattggtgacactgccatggagctgtatatgaaatggctcaaatctggagaaactgaagaagtatccagtgggagctgcaggagctgttgatccatgccaaggaggtgagctagcagatgtaggacacgatgtgtgaggacacagcacctgaccctctaccaaccttcccagcatacatatggctgctgcatcatttctgccttccaaaccttgcacaaattatgctcttggcctatcagaatccaaaaccattcagggaaaggaattcttaaaacatcaatccagtttagctaaattgacatwctatgaaaccaccacacatatctacagatatcaaaaccttataccctttatcttaggtgagcaagaaattagagtgccttcatgttctataactgacttcttcctgctcctgag

SEQ ID NO: 493497 - DNA, 602 bp, Homo sapiens
ggtaactgtgcagcatatcaattgtttaggayacaagagcttaatgtgatgaaaaatgatataggttgttttgaatattgtagttgttagcatgcaaatggcaatttaaattatgaacatgtacaaacttgagcaactagacttagagtcagaagcaaaggaccaaggatgtagtactgagtgatgcaggaaaattactcatttcattcactcagtggctaatgaatagttaacagtatcaaggcagcttgagtgagataaaaattaacattggattaataagcatcaagtcattggtaccatttgagaaatgggaacaaagaccagaatgagtagatttgttaaataaaattggcagcaatttttggagagataaatattttaaaaaaaaatgtgagagagagtttgcatgttacctagaacattctgaaaaaactcaccaatcttattctttcaaaaggaaaaaaaatcattgctttggtggctattgtgacatatcataatagagaaaaaaatcttcaaaaaattatcatttttctcctgttaaaaaagtaaagctaaccatgaacaaagaagactggatgtttggtattccataagtg

SEQ ID NO: 493498 - DNA, 602 bp, Homo sapiens
ggtaactgtgcagcatatcaattgtttaggacacaagagcttaatgtgatgaaaaatgatataggttgttttgaatattgtagttgttagcatgcaaatggcaatttaaattatgaacatgtacaaacttgagcaactagacttagrgtcagaagcaaaggaccaaggatgtagtactgagtgatgcaggaaaattactcatttcattcactcagtggctaatgaatagttaacagtatcaaggcagcttgagtgagataaaaattaacattggattaataagcatcaagtcattggtaccatttgagaaatgggaacaaagaccagaatgagtagatttgttaaataaaattggcagcaatttttggagagataaatattttaaaaaaaaatgtgagagagagtttgcatgttacctagaacattctgaaaaaactcaccaatcttattctttcaaaaggaaaaaaaatcattgctttggtggctattgtgacatatcataatagagaaaaaaatcttcaaaaaattatcatttttctcctgttaaaaaagtaaagctaaccatgaacaaagaagactggatgtttggtattccataagtg

SEQ ID NO: 493499 - DNA, 602 bp, Homo sapiens
ggtaactgtgcagcatatcaattgtttaggacacaagagcttaatgtgatgaaaaatgatataggttgttttgaatattgtagttgttagcatgcaaatggcaatttaaattatgaacatgtacaaacttgagcaactagacttagagtcagaagcaaaggaccaaggatgtagtactgagtgatgcaggaaaattactcatttcattcactcagtggctaatgaatagttaacagtatcaaggcagcttgagtgagataaaaattaacattggattaataagcrtcaagtcattggtaccatttgagaaatgggaacaaagaccagaatgagtagatttgttaaataaaattggcagcaatttttggagagataaatattttaaaaaaaaatgtgagagagagtttgcatgttacctagaacattctgaaaaaactcaccaatcttattctttcaaaaggaaaaaaaatcattgctttggtggctattgtgacatatcataatagagaaaaaaatcttcaaaaaattatcatttttctcctgttaaaaaagtaaagctaaccatgaacaaagaagactggatgtttggtattccataagtg

SEQ ID NO: 493500 - DNA, 646 bp, Homo sapiens
tttctttctgcattcattaaaaataggtttatgttttgccttcctgttcaattcccacttgggctgtaagcaagtaactaaagcaagggaagggttgggcatgtgggcgccagacttagatgcctctatttatgcctagattcttcctatttctcccattcttccctcaggataggagaaaaaggaggtggcagaggtctgattaaagcagggatgagcaactgagccaccactgcagtgctgagattgggtgaagcccccagcttcacagamaggcctgcaacatcattgcaagattaaatgtgccaatattcttgctaagttactactttttgcacattaccagagaatagacttcccgggcctaaaggaatggcaatgttttcattgtcatttatttctctgttcagtaaggtagatagtacaggttttaagagtcttcttttttttcctcatgagactctatttcttttcccctctattttcttctatgctaaatggctgtatctactcttgaaaatacattctaactctaagtgtcctttgtggatttgactttaggaaaccaaagtagcttcccccaagccaccctctgtctctcttttttgtttttttgcccattggtcgattttaccttctttttgta

SEQ ID NO: 493501 - DNA, 529 bp, Homo sapiens
aatataggcaattattcattatatataaaatctttgaatcatgcatcaaagatcctttaaaataaatggaaataatgtattttaatgacccagccacaaactagttggggatattgmgtaatgaatggcatagcaggaccaatggctctcgagccacactggttgtaggcagataatgagcaatgcatgttcgaagtccctggcatatgggacattccctttcattctgtttcctaaggaaagccatacaattgccttaaaattataagcaagtataggaggcatatttcctttaaaattatattgccagatacagaaaggatctaataaattcaaacctcatgttaagtgtagtataagggaaaggccactggattctaaaatcagaagtccagcctgtagcctcttgcttcgtgaccctgtaccagttacctattgccacaatgatgatgcgtaatttttttaaaaagccatccacgtcagtagcatacgatgatgaagttttgcttctccttaggatcctataggt

SEQ ID NO: 493502 - DNA, 542 bp, Homo sapiens
tctgtggcatctttcttgaaataatagatgcatactgtagcaacctatttataacatgcaacatatctttaacatttcatattagtctcatacatatatactaaagatttgctttaaaaacccttcatataagtatttccaaggtgtgtgtcattgcaaatggtagctaatgatgacttcttttttttcactatttgaaaggccactgggtagtctaaaaaaaaaaaaaamaaaaactatcattttttatgcccctcctctaaggattgcttccagtattcaaaaatattacacaatttcaaaagtgaagcaagatttgaagtagatcttttgaggagtaataagattaaaatggcaaaacaaatctaattatgtaagcaattcttctccttcacaaacctgaaagaaaagcaaattggtatttgtgaaattttctttgtctaataaatagtctcactttacaataacaccaatgaccctggtttaattaggtgcaattaattttatgcaagctgaatttgacatcttgctagaggcataac

SEQ ID NO: 493503 - DNA, 685 bp, Homo sapiens
ctgtttgtggctgtaccaaaaatgcaggtcataggatttttatgtgaaaatttctatatttaaatgttggcaactaagtctgtttttttttttttttaatatgcagtttttaatcatctgtgggctggattcttcctttatcttttccaaggctgccttgtaaaaacgtccactgctggcatctgcttttcttccttttcactccccagtcctgggtcctttagtctctcattatatcaaatacgagtgactcaaatttagccaaaattttcttgaatttatggaaaagctatatacaaaagtaagtttctgtatacaagtattttatakcaggaagaattttcagttggggatggtaacagttactgtaagtaagatatggttataaatgttgtttctctaaggggagaaatttctgatgtctagtcaatttacaaacctgtgttctagaacataaacatttgtttgtaagtaaaagaaagaaagtacatgcagatgcattaaatccatacttacacccagtatatatgagtacataatatacttttcttgggaattatcagatactttttcctgaatcaaatgatgaagactatttaaagtagaaaagagagaaaaccagtctattctgcatggacattttgttatcacttttatggtaagcagttccataagtgtgtgcctc

SEQ ID NO: 493504 - DNA, 615 bp, Homo sapiens
taatcacaggcccgagtaaaaatagctttagttatatgggtgaggtcatgaaattaaactacaagtatatgcttatctgtccacagaagcctaaaacacacactatgtccttccctcttcattatttgccacaagtcaagtgtagttcacaacatggcataacatgaagaataaaatcccttccatcatgggcctggaaatgaagacctctttacctcagaggcaaatatcagttaatgatagaacagtaaaacttgctacttaatttttaatttgatcaaatacatcactaacttttttcccaggaatgacatatagaaagaagcttctgtcgtgatagatccttacgtatagtaatgtaaaatatggtagtttatatcttatatacatatrtgtgtgtgtgtgagtgtggggactgttttaagtatatactgtacttcctagaggagttcacaacagcttatgttctttctccacaagctgaaacttaaatatgtgaaagcggtttcagtaacctgccatgttgccgtttgtgtttttcatcccttgtgatccccaagacaggaatgagcaccaaggtgatagttcgctgagtctcataaccctaacacttcc

SEQ ID NO: 493505 - DNA, 617 bp, Homo sapiens
tgtcagagttggaaggagtccctgagacttaaccggcccctctagagccctttcctatctgtcaaggttgcacttctcagactaaggagagaaatttgtgctgtggctgcactagtggcaacctcttgggaaacagaagatttggttctgcacttgccaacccattcctgttatcagcctttaacttacattatattttaaggagagaggtcgttatttagacaagctaaataaaacttttgtgagagaatgattccaggctggtccccagagggatggatggaatgtatagcttgattgttcccctgcctctctgattgcagtgatcatttcaacagaagcagcaagtcgacttttagcaatgtggactttccatggcaagaggattacagaggtttccttcaaagggtcgttttggaggctaacgttgggggagaagaataacctcagatcarttttcaagattcttactttgtgcctaataattaactgtattgctgagatgactcatcacccatagctacatccaccaaacagatgggtgacgccacatagctgggagtaaagtgaagctgtagagactgagagcaaaacaaaactgaaaacatttactacaa

SEQ ID NO: 493506 - DNA, 629 bp, Homo sapiens
ggagaaaataaaggctgcattttcaacttttttttttccttaattgaaggtaggaggtagaagtagggaggagcagatttaggcaaacctctcctctagcttaaaaataaaaaaaattgcaaatctcatttcttatcctgagctaatatcccaggatactatgtctgccacacagaagaaacagatggaatttcaattaaccccagggccccctgtgaaatctatattgtaccctctggatttacaacacattgttaatatatgactgcaggctctggagattccatcacaaatcaaccccctttattccagaggttcagaaaactactacaaaagcccacttcagaatcaaaagtggacagtttcttacaacttcatcttcagagttgaaacccaattttaattttrtaacagtttatttactgagcagtccccatgtttttataagagaaaacatttattttttttccttctatgaatgatgataatgacagactaaaactatttatgccaaaaagaaaattgggaaaagatacaccattaccacaccttgatgaatgattcaccataaactcacagtcaattatcatccaaaggatttttatatttaaaaaaattatgcctttata

SEQ ID NO: 493507 - DNA, 553 bp, Homo sapiens
aataaattatgagttattaatgcaggaacgaaaagaaatccaataccaaagacattgaagctaayaatatcttctcctccacttgctgaaccattataatcaggcctgggccttttttccctagtagaggtgataaatgcttacagagtggcagtttctccctgagctgtctaaagaccctaatgcaatgaaaccaaccacttcaggctcattagggtcacttttaacaagttaagcagaacccaccacccaaccacatcaggattcaaagtttcaaagaggatggggaatgtagagtttggaaaagagcaataaaaatgatcagaaataaatagtccaaaagaaataaaaacaaggccgagcatagtgggtcatagctggaatctcagcactttgggaggctgaggtgggaggattgcttgaaggctaggagtttgagaccaatctcggcaacatagcaagaccccattgttaccaaaaatacacgttttaaaaattggccaggcatggtgccatgcacctgtagtcccagctactcaggagactgaggcag

SEQ ID NO: 493508 - DNA, 553 bp, Homo sapiens
aataaattatgagttattaatgcaggaacgaaaagaaatccaataccaaagacattgaagctaataatatcttctcctccacttgctgaaccattataatcaggcctgggccttttttccctagtagaggtgataaatgcttacagagtggcagtttctccctgagctgtctaaagaccctaatgcaatgaaaccaaccacttcaggctcattagggtcacttttaacaagttaagcagaacccaccacccaaccacatcaggattcaaagtttcaaagaggatggggaatgtagagtttggaaaagagcaataaaaatgatcagaaataaatagtccaaaagaaataaaaacaaggccgagcatagtgggtcatagctggaatckcagcactttgggaggctgaggtgggaggattgcttgaaggctaggagtttgagaccaatctcggcaacatagcaagaccccattgttaccaaaaatacacgttttaaaaattggccaggcatggtgccatgcacctgtagtcccagctactcaggagactgaggcag

SEQ ID NO: 493509 - DNA, 620 bp, Homo sapiens
gtgccctgtgtggctccacagcagctcacactgctcatatccagccctgacctcatgtcaccccacagacctgtccttccttcctcctgcctagttcctgaatgtcagcatcctctagactccgctcaagcagmaaactcaaatgtcctctttcactgcttcttctttaattcccacacaatcctgtctaatcaacttgacctccttaacacctgttctgcctccctttttctgtctcctctgtcactgcaccatctctcctcattgagagtgccaggggaccctcatttcacccatctcccctctagagcttcacctgtgctgctacctcaaacaatctttcctgcctcgcatggttcattaactgcccatcctcacggcagagggcagttcttccagaaagtctccagctcttctagaaagacttcccttaaccctgaagcttggactctctgactctgtagaagggttggcagatacttcttatcttagttgctggcctctgccagttggtagtggttgtccagaatgttggagtaagaaagattccaaggtacagtccatcttccactggaaggatggctgtcactattctttgctgctaatgtgtgcatctgatg

SEQ ID NO: 493510 - DNA, 620 bp, Homo sapiens
gtgccctgtgtggctccacagcagctcacactgctcatatccagccctgacctcatgtcaccccacagacctgtccttccttcctcctgcctagttcctgaatgtcagcatcctctagactccgctcaagcagcaaactcaaatgtcctctttcactgcttcttctttaattcccacacaatcctgtctaatcaacttgacctccttaacacctgttctgcctccctttttctgtctcctctgtcactgcaccatctctcctcattgagagtgccaggggaccctcatttcacccatctcccctctagagcttcacctgtgctgctacctcaaacaatctttcctgcctcgcatggttcattaactgcccatcctcacggcagagggcagttcttccagaaagtctccagctcttctagaaagacttcccttaaccctgaagcttggactmtctgactctgtagaagggttggcagatacttcttatcttagttgctggcctctgccagttggtagtggttgtccagaatgttggagtaagaaagattccaaggtacagtccatcttccactggaaggatggctgtcactattctttgctgctaatgtgtgcatctgatg

SEQ ID NO: 493511 - DNA, 600 bp, Homo sapiens
gtaggcagcccaagaggccaatgtttattaaatgtctcactcgaccccaaatctcatgaattgtttaacatacaagacagacaaaaagccagtatttctccttgtgtcagctctcgttaggagcgtctctgctcctctcactgttggctagaaacaacattaacattcattgttcttaaacacatgggagaccaaggggtccctgtatacacagcctatcctatgccacatgtgtrccaatgtgcacctagtccataagcacaaagaagcaaatgttaaggccacattgatggtacccacttaaggagggcaaggcagttggcagtgtgtactgtcaccacgaggggcaactgaaatgtgctggagaaagaactcagtaatctcacaccaaaaagaaaacctcatgaaatcaattgtgtagacaaagtgagacttttcaagccatccatttaaagccagtcataatagaattggctttaggtggcctgtgacctgcaagacagatgcttatccagtctttgaagtagctaaagaattttgtcactgcttttttctcatgctgcctttctcaataatgtatgaaaaaaaaatagaaggaac

SEQ ID NO: 493512 - DNA, 642 bp, Homo sapiens
cgggcgcagtggctcatgcctgtgtaatcccagcactttgggaggctgagacaggctgatcgcctgaggtcaggagtttgagaccagtctggccaacatggtaaaaccctgtctctactaataatataaaaattagctgggctggtgacacacgcctgtagtcccagctactcgggagggtgaggcaggagaatccgcttgaacccaggaggtggaagttgcagtgagctggattgtgccactgcactctagcctgggcaacagagtgagattctgtctaaaaaacagatagatagatagataattcttggtgtgcaaaatgtcttagtatacttttctttatattataaacttctgcccatcaaaataaataaaattatgacacagatcacgccattctagayctaattatttccccagtttgctagccatatacttaaggtccatttctgagggttgggtgcatctacaatcagcaaatgttgtccactgcatattctcatgttgtagaagcattgtagaaaagcttccaaatatgtttcctcaccactatcactgttagagaaagaacattgccaagggcatagccattggaattgggggtgtaaccctatgcagagaacagcagatttggattcatca

SEQ ID NO: 493513 - DNA, 553 bp, Homo sapiens
taagttaaaactacttgcatgcacatcattattacattggcttctggttgtgaaagacagagaagtaatctagcaaaacgaaataagtcttaaaatatgacacaaacacatataattatttttaaaaatgggcataagaagtaagccttggtgaaattttccaattttagtttatcttgtggactgtcaagactgaaaatgaaccggtctaaattcttcaccatttatgaacaaagtatagccattaaatactgtcttatacctctagagcaatgttagaacaaacaaaccatattttatatgagtgtttttaactcctgtctctgggccaatgtctcataaataakctaaaaaaggtttttgagtaaatgcaattgattgaggcatgtgcactgttggtaagatcagtttggcattttaagtctgacatgttatcaaattgctaaatgtatggttgtgaaaatctaacagctgactgcagagccactgaacaattttgtagaatttctcctgttctaattactgaatatgttgaacagtgttaacaccactc

SEQ ID NO: 493514 - DNA, 492 bp, Homo sapiens
tgaaagaaaggtaaaataggacttgatttttgtgactgtggaacaatagcttttgccactcatgacacgtgactcagtggatagatgtcagggtctgatttatcggattcatcctctctcctcctcacttggagtggagacagtgatagggtgaaatggattgaattattccactcatagaaaagtgaggtgagactgacacacagaagagagaaagaaaagagaggaccaggtacaggagaaatgcataaattgtaacagcaatttagagaggatcagatattttgagcatgctttcaactctttactttctatcctttacatactaacctttgtggatatgttgtatataattacagataaaggmatgttatatattaattatatcatcaatggactgttttattacttctttcaaccaattcttcaattttactcaagctgcaaatcacactatcaaaagttaaagatgaaaaacacttgcaaggtcac

SEQ ID NO: 493515 - DNA, 563 bp, Homo sapiens
tgcttgaaccagattttaagtccagcacttcaagtggagagtctacaaaccartcagcaggagaattttctgcagatcatagagcatgttgttatgccttctggaaggaggaggggagaatcagataaaccatgtgactgttaaaaattgaactgcagtgtggaattcatacactggaggtcacaggatatcaataattccccttaaactggtaatttactgtcatttctattttggcccattttctcctatactgcttcattacttcaaggccatcttttctttttttggtggcggggagaggggagctaaaaaaaaaatataatctcatgggaataaagagtagcttgatgattatcagaggctggaaagggaagtagggagagggggataaagagcggttggttaataggtgcagaaatatagttagatggaaggaataagagctagtgtttggtgtggtgactataatttacagtaatttaatgtgtatttcaaaataactggaagagtggaattgaatgtcccaaacacaaagaaatattatatataagtattaccta

SEQ ID NO: 493516 - DNA, 621 bp, Homo sapiens
ttcttaaatctaattgacttttctcgccactcatgctgttgattactgacagcgggtcttgtgaaaattgagtcattcatttttgatgcctaccattcaggaaacttttaaaacaagtgggcatgagtgtgagaaaggcctgtgactcttgttacaggctgtaaacaccagtgatgggcactaacaatttccagcgaattaacgagcttaaacctcacctatgataaatcataatcatacacccagctagctttcttgataattattaatctatatattgtgcttgtctgtgtactttgctttagtgtttagatttttaagatgccaacatttttttaagttgctcttcaataaggcaatgtggtacaagcctctatgtataagattagacataactaaataaaattcaatttggaaatttttttccaatctgcatmcaaagcaagaaaaaagtaacgaagaagtcacaatgcctatcaattgccttggcttgttttataagccaatcggaggaagccagtattttttatttaatctaattgcttagtggcataagatagcagaatatatataatgtactcgctttgtggctactctgtgaaaatttaacaactgaaaaca

SEQ ID NO: 493517 - DNA, 191 bp, Homo sapiens
actttcttatcgctgtgctcttcctctctacatagctaagtccatctcacaaaacaatactcactcaatccaaatcatggacartgactctctgccgtctaccacatcatatacaaactccatcaatttcccttcaaaatcacccaccatttagcctatccaccactctcttttccatccttgtctttgaa

SEQ ID NO: 493518 - DNA, 191 bp, Homo sapiens
actttcttatcgctgtgctcttcctctctacatagctaagtccatctcacaaaacaatactcactcaatccaaatcatggacaatgactctctgcygtctaccacatcatatacaaactccatcaatttcccttcaaaatcacccaccatttagcctatccaccactctcttttccatccttgtctttgaa

SEQ ID NO: 493519 - DNA, 640 bp, Homo sapiens
gacaaaaatgtatatgactaacttacaggctagtccttcctattttgtatatcctaatggaatcattgggagatcagtgctactaaaatgtcagctttcaccctgagtgatatcagctgtccatccaaccatcatccatcccaatatttttttgaaatcacatcatgttatttgtcttctactgtgttccatgcacaaatgccattataggagaatggttttcaaagaaaacagatctgtaactttgaatgactgttatgttttactaaagcaaacacgtgataaaacaccatagccatctggactaaatcaaatacractcatatttctagtgaaaggtatttattcaacaacagtctacaaaaagttatgaactacctcctatgtgtcagacaatgcattaatcattgatgtgctgttcttcctgttttagaaagttagcagaatggaggtctttctataaattgtgtcatagggggtggagtttttagaggtgattaccgttctaagtaactgttggaaaaacaacaatttatgggcttagaaagatgaaggctgagaactagggaatgaaaagagaaacaggtaaaatgagcatatttacagagcgacagtgagtcatgggggaaaaaagttagtt

SEQ ID NO: 493520 - DNA, 570 bp, Homo sapiens
aaaactctaaacatgtgcctccagtttatatgtttattcttttataaattacttaaatttactatcattaactaataattcagagcaagaactacatacacttgatatagaatatcctatcagtgattgcatgtatcaatccatatttcaagaagccttgataatttttaattatcttgggcaactattgacacatgtataagattgccactattataagcaagtatgatggccaacgagaacctcagactaggagaaaaatgtgtcacctctgctatttcrtggtgtttggttgcctacattatttttttttacattcaataagatttctttgcagtaatccattggagaggtagggatagttaaaactaaatatcatcatctgaaattcatttaaccaggcccatgtgaaccaaaactgttgtaacaacctggaaatgaataaatgagggaggatgagacaattgacccctctgcattgtggaaatcctgtcattcccatcagatgccttgtgaattgcacataacatgtgactatcttttatatggaccaagagagggcttttattg

SEQ ID NO: 493521 - DNA, 594 bp, Homo sapiens
gaaagatggatttgtgtatcaatatctatctatctatctgtcaccatattaatatctaagagattaaaggagmaaacattaacattgtcctactaggtataatggattttagcctgagtatcctaggctgcatctgctggaaagcagagcctgatgcacagattataatgttgacacttcgaggggtataaatccaagcagtgattgaggaaaataggtgatgtgaggcaagaaaagatgtacagcgattgtgttgctgtgctggccaccacttccgtacaagttcagagacattcagttgcaaagacatttaagcatattccctctgcttatgggaacttttctaaaaggtttgtaagaggaaacggcactgcggagggacaggagtggaaatgtatctgtctggttccctcctgactcttgcttcccattggtcaaattttattccacagagatctaatgcttctatacatttggcaacttggtagctactcaagaagccatttcccaagccctgttttgtggcatttcatctaagaccagaagtggaggggagattcagcaggtcagactaccaaccaagagagaaggagg

SEQ ID NO: 493522 - DNA, 594 bp, Homo sapiens
gaaagatggatttgtgtatcaatatctatctatctatctgtcaccatattaatatctaagagattaaaggagcaaacattaacattgtcctactaggtataatggattttagcctgagtatcctaggctgcatctgctggaaagcagagcctgatgcacagattataatgttgacacttcraggggtataaatccaagcagtgattgaggaaaataggtgatgtgaggcaagaaaagatgtacagcgattgtgttgctgtgctggccaccacttccgtacaagttcagagacattcagttgcaaagacatttaagcatattccctctgcttatgggaacttttctaaaaggtttgtaagaggaaacggcactgcggagggacaggagtggaaatgtatctgtctggttccctcctgactcttgcttcccattggtcaaattttattccacagagatctaatgcttctatacatttggcaacttggtagctactcaagaagccatttcccaagccctgttttgtggcatttcatctaagaccagaagtggaggggagattcagcaggtcagactaccaaccaagagagaaggagg

SEQ ID NO: 493523 - DNA, 594 bp, Homo sapiens
gaaagatggatttgtgtatcaatatctatctatctatctgtcaccatattaatatctaagagattaaaggagcaaacattaacattgtcctactaggtataatggattttagcctgagtatcctaggctgcatctgctggaaagcagagcctgatgcacagattataatgttgacacttcgaggggtataaatccaagcagtgattgaggaaaataggtgatgtgaggcaagaaaagatgtacagcgattgtgttgctgtgctggccaccacttccgtacaagttcagagacattcagttgcaaagacatttaagcatattccctctgcttatgggaacttttctaaaaggtttgtaagaggaaacggcacygcggagggacaggagtggaaatgtatctgtctggttccctcctgactcttgcttcccattggtcaaattttattccacagagatctaatgcttctatacatttggcaacttggtagctactcaagaagccatttcccaagccctgttttgtggcatttcatctaagaccagaagtggaggggagattcagcaggtcagactaccaaccaagagagaaggagg

SEQ ID NO: 493524 - DNA, 625 bp, Homo sapiens
aattcttttaatgatgttaattcttcacaaattatcctgtaatattggtataattccaataaattatctaatagaatttttcataaaactgaggaaacttactcctaaatttatatgtagaagtagttgaccaaggatagccaagacaaaccagtcaacaaacaacaggaaatgaacaaaaagcatcaacaggaacaaaggaagaaaaacctctatgagatgctcagtctctttagtaatctaataaatccaaatgtaaacaaataaccacaagttgacattttatgtgcctcggattcatggatgttaaaaatagtaataccaaaagttggaatgaatgtggggactcttggatctagtgaaacttagggtagaagtgaaataggtacacacgttttgaataacaatttgctaacatctagcaaaattgatgatggctatattttaatatccaggaatactacttgtaagtatagtcrgtcctcgttattcacagattctgtatttgtgaatttgcctgctttcgaaaacttatctgtaaccctcaaattaatattcatggtgcttttgcagccacctgtagacatacgcagagctgtgaaaaatttgagtaacttgacatgca

SEQ ID NO: 493525 - DNA, 649 bp, Homo sapiens
ttgaacaaggcaaaactctgccttcttctcycatttttcatactttaaacaagcttcctatctgtgtttgacttagtgccataattttcaaaggtctgtgcttttatttggtggttttactattaaaagtggcccctaagagtagtgctgaagtgttatccagtgatctgaaatgcaagaaggctgtgatgtgggttactgagaaaatagatgtgccagctaagcttcatgcaagcatgagttacagttaagtggctgtgagttcactgttaatgcatcaacaatatatatgaaattagttgacttttaaaagaagcacacataaaacaaggtttttattgattgattgacaaaaatattgtgaccagaagtttttaggggcctaaccctttatttccccccaacaataatggttcaatattagcttattcagtgttcaaagtgaccttatacaacataactactgcaaataacaagaatttattatatatatcataagaaactctcacacatgctccagaagatatgtataaaagtattcattatttgtaatggtgacaacatagataacaatcctaatgtccttcatgaagggaatggatgaatacattgtgttatattcatccaagggagtaccctcagtgctagc

SEQ ID NO: 493526 - DNA, 649 bp, Homo sapiens
ttgaacaaggcaaaactctgccttcttctcccatttttcatactttaaacaagcttcctatctgtgtttgacttagtgccataattttcaaaggtctgtgcttttatttggtggttttactattaaaagtggcccctaagartagtgctgaagtgttatccagtgatctgaaatgcaagaaggctgtgatgtgggttactgagaaaatagatgtgccagctaagcttcatgcaagcatgagttacagttaagtggctgtgagttcactgttaatgcatcaacaatatatatgaaattagttgacttttaaaagaagcacacataaaacaaggtttttattgattgattgacaaaaatattgtgaccagaagtttttaggggcctaaccctttatttccccccaacaataatggttcaatattagcttattcagtgttcaaagtgaccttatacaacataactactgcaaataacaagaatttattatatatatcataagaaactctcacacatgctccagaagatatgtataaaagtattcattatttgtaatggtgacaacatagataacaatcctaatgtccttcatgaagggaatggatgaatacattgtgttatattcatccaagggagtaccctcagtgctagc

SEQ ID NO: 493527 - DNA, 649 bp, Homo sapiens
ttgaacaaggcaaaactctgccttcttctcccatttttcatactttaaacaagcttcctatctgtgtttgacttagtgccataattttcaaaggtctgtgcttttatttggtggttttactattaaaagtggcccctaagagtagtgctgaagtgttatccagtgatctgaaatgcaagaaggctgtgatgtgggttactgagaaaatagatgtgccagctaagcttcatgcaagcatgagttacagttaagtggctgtgagttcactgttaatgcatcaayaatatatatgaaattagttgacttttaaaagaagcacacataaaacaaggtttttattgattgattgacaaaaatattgtgaccagaagtttttaggggcctaaccctttatttccccccaacaataatggttcaatattagcttattcagtgttcaaagtgaccttatacaacataactactgcaaataacaagaatttattatatatatcataagaaactctcacacatgctccagaagatatgtataaaagtattcattatttgtaatggtgacaacatagataacaatcctaatgtccttcatgaagggaatggatgaatacattgtgttatattcatccaagggagtaccctcagtgctagc

SEQ ID NO: 493528 - DNA, 649 bp, Homo sapiens
ttgaacaaggcaaaactctgccttcttctcccatttttcatactttaaacaagcttcctatctgtgtttgacttagtgccataattttcaaaggtctgtgcttttatttggtggttttactattaaaagtggcccctaagagtagtgctgaagtgttatccagtgatctgaaatgcaagaaggctgtgatgtgggttactgagaaaatagatgtgccagctaagcttcatgcaagcatgagttacagttaagtggctgtgagttcactgttaatgcatcaacaatatatatgaaattagttgacttttaaaagaagcacacataaaacaaggtttttattgattgattgacaaaaatattgtgaccagaagtttttaggggcctaaccctttatttccccccaacaataatggttcartattagcttattcagtgttcaaagtgaccttatacaacataactactgcaaataacaagaatttattatatatatcataagaaactctcacacatgctccagaagatatgtataaaagtattcattatttgtaatggtgacaacatagataacaatcctaatgtccttcatgaagggaatggatgaatacattgtgttatattcatccaagggagtaccctcagtgctagc

SEQ ID NO: 493529 - DNA, 426 bp, Homo sapiens
ctgtcactggctgccagtttatgtacaacttaatggttaacttatcatccaaactgagaaagttttgagagtgttaagtgtaatactttggttttaaacaacaggtgaaaaccaggactgtctgggggaaatcaggataatcttaggcaaacagacagatattccaccctacacatccacccagctcttccaacttcccggaatatacactgttaatagtttcttaaaacttctccttttcttcataagtgtgcaagcaaacatacatacatttttaaaatttttcttcctttttacacaaaagataacattcactgtttattgtttgctgcttcattttttttcacttaccaataatacatcctggagatcacttcattgcaacacaaactgtcrtccttattcttttgttgttgttgttgacag

SEQ ID NO: 493530 - DNA, 649 bp, Homo sapiens
gttcacttgtatcatggtaccaaactagaagtgttttgaaggtcaataaacttggagctgtaagaaccaaggagattgttttctctttcttagaataatrtaatattagaactggcgagtaccttatagcactaacccaaacctttattgtacaagtaagaaatttgaagcccatagaagtaaagtaatttctccaaggtcaaacagttgtgcgacccctttgttcactatgccctgcatttgtcttagggacaaaaaatgtgccaactgactttaggctgatttttggaattttttttctaagttgtaaagaggtagagcaaaacaaagacagggatgaaatgggggaggggacataaatgttctttgtgatataaggggaagactctattttttgtctcttaaaattgtgatcataattgcaattaggtaaggatacctaattgcacaactttccttggtccacagaagtcatatgaacataaattctaaaggaagtcctaaaacacagtctccaaacccattattatgatgcttactattaagacaattaggtatgaatgttgttctcttatggacacaattccctttgaaaaagaatgttgctggtgaaaatgagattaatcttcgccttcctgagaagacctca

SEQ ID NO: 493531 - DNA, 502 bp, Homo sapiens
tttttcatgtcccgacaaaggtgtcagggaaacaaaagcttctcaaatggcagcttcccctagcayatgcctggaggcctgacaccctcccatctataccagtcttgcctggctggggtgtggacagcacagtggtcacttcaggatgtttgctctaacaagcatggccaagtataggcatagacaggacacagttctgtttccttgtggtgatcacacctcaggcacattcacttgaatacagcgtcaggtctggaggtagagttgggaatggtttttaaggctagtcactgccaggatgttgttgctttttcaggttcctgtttgtaacagatgggtgatttgcactattgaatggcaaagaaaaaaaggcattgggggtcactggcttgaaaggcttgctcctttgaatagatttgggctgctttcacgataaaattcccttaaaatttttatagccaagtagatttaaagcaggaattacaaagcttttgtgttaaat

SEQ ID NO: 493532 - DNA, 502 bp, Homo sapiens
tttttcatgtcccgacaaaggtgtcagggaaacaaaagcttctcaaatggcagcttcccctagcacatgcctggaggcctgacacyctcccatctataccagtcttgcctggctggggtgtggacagcacagtggtcacttcaggatgtttgctctaacaagcatggccaagtataggcatagacaggacacagttctgtttccttgtggtgatcacacctcaggcacattcacttgaatacagcgtcaggtctggaggtagagttgggaatggtttttaaggctagtcactgccaggatgttgttgctttttcaggttcctgtttgtaacagatgggtgatttgcactattgaatggcaaagaaaaaaaggcattgggggtcactggcttgaaaggcttgctcctttgaatagatttgggctgctttcacgataaaattcccttaaaatttttatagccaagtagatttaaagcaggaattacaaagcttttgtgttaaat

SEQ ID NO: 493533 - DNA, 502 bp, Homo sapiens
tttttcatgtcccgacaaaggtgtcagggaaacaaaagcttctcaaatggcagcttcccctagcacatgcctggaggcctgacaccctcccatctataccagtcttgcctggctggggtgyggacagcacagtggtcacttcaggatgtttgctctaacaagcatggccaagtataggcatagacaggacacagttctgtttccttgtggtgatcacacctcaggcacattcacttgaatacagcgtcaggtctggaggtagagttgggaatggtttttaaggctagtcactgccaggatgttgttgctttttcaggttcctgtttgtaacagatgggtgatttgcactattgaatggcaaagaaaaaaaggcattgggggtcactggcttgaaaggcttgctcctttgaatagatttgggctgctttcacgataaaattcccttaaaatttttatagccaagtagatttaaagcaggaattacaaagcttttgtgttaaat

SEQ ID NO: 493534 - DNA, 525 bp, Homo sapiens
gctgaggtcaggagtttgagaccattctggccaacgtggtgaaataccatctctactaaaaatacaaaaattagctgggcatggtggggcgtgcctgtattctcagctactctggaggctgaggcaggagaatcgcttgaaccyaggaagtagagattgcagtgagccaagttcgtgccactgcactccagcctgggcaacagagaaagactccatctcaaaaaaaaaaagtcccaggaaaaacctgtttcctccattcagaggactgacaagaaggaggctttgtaagacagaagccttttaccctacctgccctaataataccaccaaggacgcagttcccttctcactccccaccagcctatctgtgacatataggtagggatgccccttttttgcctctccccaataagtgtactttccaaagggtctgtgcaatggagccctattaacctaccccttcctgaggtggcacatgtcaatgaagaggtggtgactctcctcctccccaagcatggctgctgc

SEQ ID NO: 493535 - DNA, 370 bp, Homo sapiens
cggtctgtgatgctcttttattacactgcatgcacttccttgggtggcttaccttcttccacttcttcaattatcacttttacaaaattggtagacttgtgtttctagactgagctctcctgagttcacatctctaaatactggtacaggtagcttgcaagcatttcaagcacctcaaaactgctcttctcgtttttgttaatgacatttaatctgcttcaattatctattactgtttagcaaaccactccaagcttaatgacatataaacagcaaccattttatcacaytcacagattctgtgagtcagggattctgatagggcacagcaacgatggcttgtctttgttccacacacgagggcacgtca

SEQ ID NO: 493536 - DNA, 557 bp, Homo sapiens
gtaaattgccactgccctgtgtcctctgagtgccccactctatcatggtcttctgtcaccttccctagtagcttttggacacttcaatatagcaactaaggagttaacaccttgcaaacaagagacccttgggagccaggcttctccacgtgaaagccaggtcctttcagattggttgattgcataaacatgcagacagataaatagtttttggtatctcccctgcatgcagtcaatggcagaaatttaaataatcaacggtggtggaaacttgacagttgacccagcatccattctcatgctttcatttttctcaaaataattcaggactcttatgcctaggcagtcatctatctggtctttctcatgcagctcttgtgtttttgtaaaagttgaacccactcttagcctcctggcaaagccttgmtagacttcactataaggtgggcatgtgaccaaccaaccaggctgtttggaatgccaagacagcattgctctctctttctctgtgccctattgaagccaccctatgaaacaagagagccagacttagaata

SEQ ID NO: 493537 - DNA, 525 bp, Homo sapiens
ctggggtggggagcacatcaaatgagggggtacatcattccctccttgtctaatgctttaagactaatcaaatcaaattctgtaayactaaagttggaaaagaactctcttgatgcttaagataagtaatttttaagacaatgtaaatacactttaacgaaaggaaagaaaaaagggaaaaaagacaatgtaatacacttagaacaaaagacttgtcatacacgatacataacacaaaagattagcttcaggagaatgtagataattgcatgatggtagatttttatctttcactcatttgttcaacaaacatcaaccattaccaagccaaacacttgccagatactgttttaggcattgtatataggctcatcctagactttaaaaattgtctggagagtaaccaccaggtcgccatacataatatccctggattggtctaaaacaggtaggatttgggtggatgaattgtaaatctgatccagtttggcatttcttatgatctaataacaattcatttgtgta

SEQ ID NO: 493538 - DNA, 577 bp, Homo sapiens
ttgatagtctccacctgaatataaggctgtaattaaaactagttttcattctctctagacagatatgcagctttgctacattgaacagattccaggtcagtgatttccaagttgcaaagttttgtatccatttctattggaaatccttctctagatctaaattaaaccttcttcttggccaggcgtggtggctcatgcctgtaatcccagcactgtgggaggccgaggtgggtggatcacctggggtcaggggtttgagaccagcctaaccaacatggagaaaacccatctctactaaaaatacaaaattagccgtgcttggtggtgcatgcctataatcccagctactcaggaggctgtggcaggagaatygcttgaacctgggaggtggaggatacggtgagcctagatcctaaatatctctaatctctattctctaccattaatttgaaccagtgaccttcagcttatttctatgcaccctccctaagggtctctcactctacttcactctactaaattaattgttaaccctctgggactcatttttgtcctttgtaaaatggaggaattcatt

SEQ ID NO: 493539 - DNA, 577 bp, Homo sapiens
ttgatagtctccacctgaatataaggctgtaattaaaactagttttcattctctctagacagatatgcagctttgctacattgaacagattccaggtcagtgatttccaagttgcaaagttttgtatccatttctattggaaatccttctctagatctaaattaaaccttcttcttggccaggcgtggtggctcatgcctgtaatcccagcactgtgggaggccgaggtgggtggatcacctggggtcaggggtttgagaccagcctaaccaacatggagaaaacccatctctactaaaaatacaaaattagccgtgcttggtggtgcatgcctataatcccagctactcaggaggctgtggcaggagaatcgcttgaacctgggaggtggaggatayggtgagcctagatcctaaatatctctaatctctattctctaccattaatttgaaccagtgaccttcagcttatttctatgcaccctccctaagggtctctcactctacttcactctactaaattaattgttaaccctctgggactcatttttgtcctttgtaaaatggaggaattcatt

SEQ ID NO: 493540 - DNA, 368 bp, Homo sapiens
cctcataaggggatgccattacatttgaggccctcagtctttcttcctgtcatctttaagtgaaagttagaatagagataatccatccactatttagtgtgatgtgcataaactccctatgttactacgttaggctactggttattctcagaaaggattccattcacgtatttattaggttataatttagtgtttataacaaaagaccccaaaattcagtggctaaaacaaaagtgaagttcattctgtctgattgaactttccagagtcatagtccaaaatgcatagtgttgctctgtcatcctcactcaacacacagattttatttctgggttcaaagkggctgttccacttcatgccttcacagc

SEQ ID NO: 493541 - DNA, 519 bp, Homo sapiens
tgtttgtgtcatcttgactttgctactttgggtcaatactaccaccagtataggactccagtatttgctggactacagaaaaggaacaaaatttattgtcggtggttargcagaaagcctgaattcaggcctcagtttcctaggcatatgtggtgttagcagaagattctgcaactgccccagtcccacataaggtgaagtgaaagcgtcaagagaaccaggggccagaagaggcaaatccaggcaagaaactggcaggaggtgcaaccttgtgagttaagcgtaggatccacgggtgttggagttatcagctacttggagattaggaaagggaagttctattagggattggtgcaggaagaaaggctgaactaaccatgtgtttctggtgttttcacatctggggccttgctaaccctggagagtctgcccttccaaaggctagccagtttctagagatggtaaagggcttgctgcatgcaagtgcacctttcatatgcaaaccaaccaatccaatgc

SEQ ID NO: 493542 - DNA, 519 bp, Homo sapiens
tgtttgtgtcatcttgactttgctactttgggtcaatactaccaccagtataggactccagtatttgctggactacagaaaaggaacaaaatttattgtcggtggttaagcagaaagcctgaattcaggcctcagtttcctaggcatatgtggtgttagcagaagattctgcaactgccccagtcccacataaggtgaagtgaaagcgtcaagagaaccaggggccagaagaggcaaatccaggcaagaaactggcaggaggtgcaaccttgtgagttaagcgtaggatccaygggtgttggagttatcagctacttggagattaggaaagggaagttctattagggattggtgcaggaagaaaggctgaactaaccatgtgtttctggtgttttcacatctggggccttgctaaccctggagagtctgcccttccaaaggctagccagtttctagagatggtaaagggcttgctgcatgcaagtgcacctttcatatgcaaaccaaccaatccaatgc

SEQ ID NO: 493543 - DNA, 519 bp, Homo sapiens
tgtttgtgtcatcttgactttgctactttgggtcaatactaccaccagtataggactccagtatttgctggactacagaaaaggaacaaaatttattgtcggtggttaagcagaaagcctgaattcaggcctcagtttcctaggcatatgtggtgttagcagaagattctgcaactgccccagtcccacataaggtgaagtgaaagcgtcaagagaaccaggggccagaagaggcaaatccaggcaagaaactggcaggaggtgcaaccttgtgagttaagcgtaggatccacgggtgttggagttatcagctacttggagatyaggaaagggaagttctattagggattggtgcaggaagaaaggctgaactaaccatgtgtttctggtgttttcacatctggggccttgctaaccctggagagtctgcccttccaaaggctagccagtttctagagatggtaaagggcttgctgcatgcaagtgcacctttcatatgcaaaccaaccaatccaatgc

SEQ ID NO: 493544 - DNA, 472 bp, Homo sapiens
cgtttcatttttgttgacaaatatttaatayatatgtatagaaatatgaaatacgaagataggtgtatgttccacaaatttccctttaattcacaattattcctagaatgttaaaaatatgtgcttactggcagagagtaatagctgtagtaaattaaggaaacaagtttaaacaaatatgtgcttactcaaactctgcctaccagaagctgctgctcttcctgcccacacagcattcacatgagcttcaaggaatttcaacaccctaaaatgtccttttccctggtccttcagagaacaatagatataataataactgccagtgtcaagggtcttttagtaatttcacattcctccactggaaagatatcatttaactactaaagcttgtcaatgttgtctcatcttacatatggagaaatgagcttagtgacttgctcaaccacatctgggtagtgagtaggatggcatg

SEQ ID NO: 493545 - DNA, 472 bp, Homo sapiens
cgtttcatttttgttgacaaatatttaatacatatgtatagaaatatgaaatacgaagataggtgtatgttccacaaatttccctttaattcacaattattcctagaatgttaaaaatatgtgcttactggcagagagtaatagctgtagtaaattaaggaaacaagtttaaacaaatatgtgcttactcaaactctgcctaccagaagctgctgctcttcctgcccacacagcattcacatgagcttcaaggaatttcaacaccctaaaatgtccttttccctggtccttcagagaacaatagatataataataactgccagtgtcaagggtcttttagtaatttcacattcctccactggaaagatatcatttaactmctaaagcttgtcaatgttgtctcatcttacatatggagaaatgagcttagtgacttgctcaaccacatctgggtagtgagtaggatggcatg

SEQ ID NO: 493546 - DNA, 565 bp, Homo sapiens
tcctttatgcacatgatgcattagcagtgtaagataagaagacaatatgcatttttctgtactgtgttagaggtaaattccttgtgtgataaatcgcagtcwttagaagtaattaaaggaagctaaataggaattgatttggagttatataaccaaagcaagacaatcactacaaccgctcattcaattatgtctacagtgtaaaagcagcagaaattgaagatgtcttaagataaccgtgattcattagttttagcttttgctaagtagtcaaactgaaagtttgaattgctctgttctataattgaagaaaaaaaaattgggggggaaaaggaaaagaaaaagaaagaaatagaaataagatagaagacttgcccctcttttccatgttattattcctatagagtagaggtcagcaaactttttcttgaaagggccagacagtaagtatttgaagctttgtgaatcatatggtctttgctgaaactctgccactgtggcacagaaacactgaagaatggacatgactgtgttcttatactatgttatctacgaaaacaggcag

SEQ ID NO: 493547 - DNA, 396 bp, Homo sapiens
ggttcctgtcctgaggggcggggaggagaggagggggggrgtacgaggccggctgggcggggggcgctaacgcggctctcggcgcccccaggggccttcctgctgtgctggacgcccttcttcgtggtgcacatcacgcaggcgctgtgtcctgcctgctccgtgcccccgcggctggtcagcgccgtcacctggctgggctacgtcaacagcgccctcaaccccgtcatctacactgtcttcaacgccgagttccgcaacgtcttccgcaaggccctgcgtgcctgctgctgagccgggcacccccggacgccccccggcctgatggccaggcctcagggaccaaggagatggggagggcgcttttgtacgttaattaaacaaattccttcccaa

SEQ ID NO: 493548 - DNA, 385 bp, Homo sapiens
ggttcctgtcctgaggggcggggaggagaggagggggggggtacgaggccggctgggcgsggggcgctaacgcggctctcggcgcccccaggggccttcctgctgtgctggacgcccttcttcgtggtgcacatcacgcaggcgctgtgtcctgcctgctccgtgcccccgcggctggtcagcgccgtcacctggctgggctacgtcaacagcgccctcaaccccgtcatctacactgtcttcaacgccgagttccgcaacgtcttccgcaaggccctgcgtgcctgctgctgagccgggcacccccggacgccccccggcctgatggccaggcctcagggaccaaggagatggggagggcgcttttgtacgttaattaaacaaa

SEQ ID NO: 493549 - DNA, 478 bp, Homo sapiens
ggcattctcctgcctcagcctcccaagtagctgggactacaggcacctgccaccacgccagctaatttttttttttttttttttgtatttttagtagagacagggtttcaccgtgttagccaggatggtctcaatctcctgacctcgtgatctgcccgcckcggcctcccaaagtgctgggattacaggcgtgagccactgcgccccgccagacgtctgcatctttaaggggcaacaccaggtaagcctgatgcacgtagtcgagggacacactgggcttaggaagaatgggatgcaagagagggacacactgggccaataccctcagaggcctggggaggggctcaggaagaacagggtgcaagagaggacccctgtggagaaggagggaagtgggatttggatgagcagcaggcattgtgttgggggacccagaggtaccccagcatcggtcacacacctgactctcttcctcctc

SEQ ID NO: 493550 - DNA, 478 bp, Homo sapiens
ggcattctcctgcctcagcctcccaagtagctgggactacaggcacctgccaccacgccagctaatttttttttttttttttttgtatttttagtagagacagggtttcaccgtgttagccaggatggtctcaatctcctgacctcgtgatctgcccgccgcrgcctcccaaagtgctgggattacaggcgtgagccactgcgccccgccagacgtctgcatctttaaggggcaacaccaggtaagcctgatgcacgtagtcgagggacacactgggcttaggaagaatgggatgcaagagagggacacactgggccaataccctcagaggcctggggaggggctcaggaagaacagggtgcaagagaggacccctgtggagaaggagggaagtgggatttggatgagcagcaggcattgtgttgggggacccagaggtaccccagcatcggtcacacacctgactctcttcctcctc

SEQ ID NO: 493551 - DNA, 478 bp, Homo sapiens
ggcattctcctgcctcagcctcccaagtagctgggactacaggcacctgccaccacgccagctaatttttttttttttttttttgtatttttagtagagacagggtttcaccgtgttagccaggatggtctcaatctcctgacctcgtgatctgcccgccgcggcctcccaaagtgctgggattacaggcgtgagccactgcgccccgccagacgtctgcatctttaaggggcaacaccaggtaagcctgatgcacgtrgtcgagggacacactgggcttaggaagaatgggatgcaagagagggacacactgggccaataccctcagaggcctggggaggggctcaggaagaacagggtgcaagagaggacccctgtggagaaggagggaagtgggatttggatgagcagcaggcattgtgttgggggacccagaggtaccccagcatcggtcacacacctgactctcttcctcctc

SEQ ID NO: 493552 - DNA, 373 bp, Homo sapiens
aaaatcagcaaggaaaccagcagtcagtgtgcggagagctgttccccagatggagtcaaggaagtcttcctgcagaggtgacgtgattgagacgggagttggggaaggtgcactggaagctgggtgggtctcagagggcagcctggtggtttattyggcctggttgtgtgtgccaggcacggccgagggcactaaaggaagggtgcctcactgcagaggaggaggaagctccagtgccggcaggctcctgggatggagtaaggacatgtgggtgtcgggatgtgattctggtgaagcatttgagccctaccactccaaaacctgagttcaagaactcacccactacatatgagcagtgtggacttgtgaaaat

SEQ ID NO: 493553 - DNA, 591 bp, Homo sapiens
ctgatggtcctctatccacttcataatctttactgtgtgccagtgaacaagagccccaggtgcccaccctcctcagagacagttctgtgcgaaggatagaccaaaccaagcaagcagacaaataaatcacagtaattgtatgaggaggaaaatcagcaaggaaaccagcagtcagtgtgcggagagctgttccccagatggagtcaaggaagtcttcctgcagaggtgacgtgattgagacgggagttggggaaggtgcactggaagctgggtgggtctcagagggcagcctggtggtttattcggcctggttgtgtgtgccaggcacggccgagggcactaaaggaagggtgcctcactgcagaggaggaggaagctccagtgccggcaggctcctgggatgsagtaaggacatgtgggtgtcgggatgtgattctggtgaagcatttgagccctaccactccaaaacctgagttcaagaactcacccactacatatgagcagtgtggacttgtgaaaattaacctctcttatccttggctttctttttggtacagtggagttgatgaaaagcatcagcttcagaggatt

SEQ ID NO: 493554 - DNA, 465 bp, Homo sapiens
aaagggtatgagttgactggttaatctgtgcctggcagttgcagtcaaaggtaaaatgaggaattggttattgggagctatattaattgccagggctaaataaacaagtgtacaggttccagtccagttggctggtaaacataagtaggaaccagttccacgcaggaaaaaaagctccttgttgttcaagacaaaaattgttttctatgatgaacatgtgggttagcttgccatttttgtttttccaagtagttaaggtccctgctaagatggccccagttaaaggctggaaaggaccttgggaagtatcccgagttgccccagcagttctgttttccgaatggagttagttacacttagtgtcctccaacaatcacccaaagctattttcataccggsaaatcaaaaggcaaccagatatctgaggatcagtacagtcttcccaatggaaaatgtgaacacagc

SEQ ID NO: 493555 - DNA, 497 bp, Homo sapiens
ggctcagattaacaccagtgaaaaacatctcaagatctgctcctgtgtggtttctcctggtcagtcacccaagaaccagccctgcagctttctccactggcccacggcacagactccagagtggccgccgcactcgccctgkatgggccctgcagcttctgtgccatcacttccccgagctcactcacaccttgcaccccagcaccgggccacccagcaccgtccacactgtgcagtcgtgtgcttcccgagagtcggttatatttgttcccaaacctgtttactccagtcgtacttgctagtgtaaatacaccctgcaattaaatattacataaaacaatgaacatctgagtgcaaataagaaggccgtcgcttctataaataaaggttgaatttttggaaagactcaaacaaggcaaggtactaaaactttcttcaaatttttttttctgtgaaacagcaataaagcactgagggaaaaataagtcaaaattcca

SEQ ID NO: 493556 - DNA, 497 bp, Homo sapiens
ggctcagattaacaccagtgaaaaacatctcaagatctgctcctgtgtggtttctcctggtcagtcacccaagaaccagccctgcagctttctccactggcccacggcacagactccagagtggccgccgcactcgccctgtatgggccctgcagcttctgtgccatcacttccccgagctcactcacaccttgcaccccagcaccrggccacccagcaccgtccacactgtgcagtcgtgtgcttcccgagagtcggttatatttgttcccaaacctgtttactccagtcgtacttgctagtgtaaatacaccctgcaattaaatattacataaaacaatgaacatctgagtgcaaataagaaggccgtcgcttctataaataaaggttgaatttttggaaagactcaaacaaggcaaggtactaaaactttcttcaaatttttttttctgtgaaacagcaataaagcactgagggaaaaataagtcaaaattcca

SEQ ID NO: 493557 - DNA, 521 bp, Homo sapiens
attctgctctcaataatctttgccagcgttatctgtattcattctctcgttctgtaaagaaggctgctaagtaattgttaaatatctttcctgctccctgaataaattggagatacagaaaaataatagggatatgattgcaacatattcatttggtcatgtttgccctgatttagtggggcacagcagacagctccagcattccagaactattgccatacaccgagaagggtcaaagtcacacttttttccaacgatttttctcagacactcatgctccttaaagctccctcataacccatcaccctgtgggtggggacaccaattcttagcgtccaggtatcttttccactgaagagacattcaygtcaaaattctgacagttttcttcttttatttaagctaaacatttccatttgagacaagaacattttaaccattacatccacaggctttgtatggtgcatttgcaggttcagtatctcccaggccaagcaacagtttgtgcatatagtaaatac

SEQ ID NO: 493558 - DNA, 569 bp, Homo sapiens
aagtaactattattattattttttaaaagaaaaatattatgtctgaatgtggcctgtcatattcacktacttaattcagacaggaattatctggcccaaatcctttgcgtgtaattggtgggttgaataaaatgtcttccttggtgtaatttttctttaacagcaggtagccgggttttggattctgtcccatgtctagtttttacttctaggctgaaattttgtgagcacgaaactactttccattaggtaaaattatacttattatgtagcattagaagaaaaaaatccaagtatgttcagtgaaaatttacatcaattgctaatagttcttatatccttaaaaaatatacatataccacttgccattttaggatttttatttctagtatgaaaacccaaataccagattaattcaaagagctgtagccccaaaaggacctagcttctcttaatgaggaggaacaaactctgattagttttgattaaattagaagtatcacattgctttcctgagacataataagaagacacattttataggtagtgagacacttaactccaccctt

SEQ ID NO: 493559 - DNA, 617 bp, Homo sapiens
ctctaaatttgtatttctaaagagacaattcttaggtgaaacaagatacaaaattcatattttacccaaaccaaggaaaaatggtgygagtaaaagttcaattaagaagaccaggaaaagcagacacccttacacatggagatttccttacagatgtaactttcttaattgaattactggatatagggtggagtcttttaagtaacagggccaagaaagcattcagtttctaggtcctaacaggcaggggtagctggaaggcagaagcattcagtttctaggtcttaataggcaggggtagctggaaggcagaacacatgcccccaaatcaagggtcccatttttatactaaatcctgggtccccaaagagaaagtaatgctaggggatgagagactacagtatagttcgttgtaagaccacttccttgaggctgccgggcaacccagcacctatcagaccactcttgaatcagtcagtccattccccatcccataccctctaggtgcctaagagtgtgctgtgtttatccaaacacaaaaagaactgagtatcccccttatcactgccattaaccatccctaaaagtgtatctctcatgtagcctttatataccaa

SEQ ID NO: 493560 - DNA, 534 bp, Homo sapiens
agaagagttcctatgaagctgggatttacatacttcattctccgttcctggtcatttcatccacagcttgactgttgtcaatcatggttccttgcctttggagtggtactataaaggtacagagaatgcccatctcagtaccaaaatttcaccatgaaaaatcataacagaaatgacaaagcttaaagaaaagtacgccggatttcagaagtatttaccataataatttttaagaaagcttaccataaatacttccaaaaacaacaggctttacaaaatattatacaacatcctgtgtacagcagtaagtatctactcaggccatttgtcaagctgtttagtaattagtttctcatgtaccctcttgtctcaagaaggtcaataatcatctgatttcctctctagctaatgatctgttgttagcctacttttaacaatggaagraggaactggtatatgttttaagtcaaccagttctccttaagtctcatagtttctgtttcaacatcatgttattgtgtacttacagaagca

SEQ ID NO: 493561 - DNA, 240 bp, Homo sapiens
catcagtcaatctctcctttcttttctttaatctaaacacccatctgaactgatgtgctattgcaatggcgtttatccccaattctttcagaratctatttggttaatgattctgattcaaaagccatactgttaacaaccactgatattttccttttcacatctcagctttcagaagtattcaaataaaatgatttgatttcccaaatgacaataaaaattctctttacaaatatcaac

SEQ ID NO: 493562 - DNA, 565 bp, Homo sapiens
ccggtggtggttgctaacttctggaaggaacatcttctcaagactccttggtcgtttctaccatccgacctctgattctcctcaccaaagcctctacacggcaaaggtcctcttagctgagagcagagcttagtatatgagcattaaagcatgctgggaattagaagtttggcctgtctctgcacatagctgcaaatgaactttatcagagttcaggggaaaacagtcttcaggtaaacaggaacatgtgccagtggaaatcccagccgtttgtatactgagcaatgagagaagatttcttctttgacagcacgacggataccatcataaaacagtcctgcgatcgcagcagagaatctgtctgaagagcaaacccagtgctgcacctgcacatcgagcaggttctgccctcctgtgatgtgtggtacccaaaagtcagcctccctcaccaggaactgggtaatagtccccggaggtaatggttccgagatggccacagccctccagatcaccaaaattaatgacttsgcttagcatatttgcgtagcttcatccagattaccat

SEQ ID NO: 493563 - DNA, 481 bp, Homo sapiens
gaatcagaggctctgggagaaggctgstggtgactcaaggccgggtaaccagcgagccctgaccgtccctccgtgcaggactcgactcgacaaggaatccagggaattgctccgacaacatcaggcccggactcttatttgttttcatgtttgagggtggatctaagccctgcaacatcatcaaaacattgttttaatgcaggtgccggtgccacacgttagagggcttgtgcctgccagcagtggaaaagtaccgccttgagtcaccgcggtgctgaaggtcactgggcctccttacgcaagccctggacccggcgcccatgaactcgctaccctgggctgcgattgttctttctttggtttccctgtgagccccagtgacaaaccaccggaacccagagtgactcacagacagtggagtgtcagagccaaaaggggccgtgtgagcttccaactcgacccacagctctgccaggagagg

SEQ ID NO: 493564 - DNA, 517 bp, Homo sapiens
tgtgttcagatctcccatgcagaagtcrctgcccaggccacttggggtctcagatgaccaggagctcagcgctgatggttttagacctcacaggcagtaggctgcctaaaaatagaagccttcaaagcatcagtgctcctggagccagacactttcccaatacacagagaagacacctgaaagcctgatgacattcttcatcatgggctcggcactattcatcctacactgctttgttgttgatacccggttaccatttgatgacccagggactggtccctgtgattctgccccagttaacccccaaggaaacggaggcaggtacagaagaagagacccactcttgggatcagcaacaaagacatcatccctggggagagccgagggtagccaagtttcagggagatagggacaaggagaagcagacgattctgctgttgggcgcttaggaagagaagctgggatacagatgcagatacagtgaaagatacagatatagagatagatgcaaatacag

SEQ ID NO: 493565 - DNA, 489 bp, Homo sapiens
tgggcgtgttggaggcacacagaggatggagtgtccacgaccagcccactaggattccagaaagggcccatgcctgtcataggcagttggaagtttgcttgaagagatggaatgagacttgttgggctagcatgtctgggctctggttgggaaacatggtcggtcagtgggattgaggaatgtggcctggacaaaatgtgacsgcagtttgcatagttctgaggcctggatgggagtggtggcaggggcgcacttggggtgtcctggttgtccagcaggtgtgggacacatcccacctgtcccactccaccccatccttctgtcaccttctgagcctaggtactggtcattggatccaggccctaaggctttctgtctcatttctagggtccatatatggaggcctcaatctcagcctggccaggcacactcacgcaggagggagatttcaacaagctttgggaaacagttttctttccaacccaagca

SEQ ID NO: 493566 - DNA, 643 bp, Homo sapiens
tagataggctgcatctacactctcatctayatgatacacacatgggtgggagggtttgtgtgtgcatctcatagatgtactcttaatccagattaactctggctttaacatttaactggagcaaggaggatcacttgaggccaggagttcaagaccagcctggtcaacaaagaagacccctgtctctgcaaaaagtgtaaaaatcagccaggtgaggtggtacacacctgtagttccagctacttgggaggctgaggcaggaggatcgcttgagcccaggaggtcgatgctgcaatgagttgtgatcatgccactgcactccagcctaggtgatggagtgacactctgtctcaaaaagcaaaacaaaacaaaacaaaacaaaacaaaaaactaaagaaacatatctagttgtgaactagcagccaaaccttctgagcctgagtccacagtgcttgtcatcactgaccaaaaaaattaaaaattttctgagacccagataagaagctggaactcttccttgctaccttgaactcacgctgtctgctcacttcaaacggccttacaatcccactatttcactgttcgatgtctcagtctgcaccttcgtcagtgtagaggtgcagattaattccacaggcttaag

SEQ ID NO: 493567 - DNA, 643 bp, Homo sapiens
tagataggctgcatctacactctcatctatatgatacacacatgggtgggagggtttgtgtgtgcatctcatagatgtactcttaatccagattaactctggctttaacatttaactggagcaaggaggatcacttgaggccaggagttcaagaccagcctggtcaacaaagaagacccctgtctctgcaaaaagtgtaaaaatcagccaggtgaggtggtacacacctgtagttccagctacttgggaggctgaggcaggaggatcgcttgagcccaggaggtcgatgctgcaatgagttgtgatcatgccactgcactccagcctaggtgatggagtgacactctgtctcaaaaagcaaaacaaaacaaaacaaaacaaaacaaaaaactaaagaaacatatctagttgtgaactagcagccaaaccttctgagcctgagtccacagtgcttgtcatcactgaccaaaaaaattaaaaattttctgagacccagataagaagctggaactcttccttgctaccttgaactcrcgctgtctgctcacttcaaacggccttacaatcccactatttcactgttcgatgtctcagtctgcaccttcgtcagtgtagaggtgcagattaattccacaggcttaag

SEQ ID NO: 493568 - DNA, 643 bp, Homo sapiens
tagataggctgcatctacactctcatctatatgatacacacatgggtgggagggtttgtgtgtgcatctcatagatgtactcttaatccagattaactctggctttaacatttaactggagcaaggaggatcacttgaggccaggagttcaagaccagcctggtcaacaaagaagacccctgtctctgcaaaaagtgtaaaaatcagccaggtgaggtggtacacacctgtagttccagctacttgggaggctgaggcaggaggatcgcttgagcccaggaggtcgatgctgcaatgagttgtgatcatgccactgcactccagcctaggtgatggagtgacactctgtctcaaaaagcaaaacaaaacaaaacaaaacaaaacaaaaaactaaagaaacatatctagttgtgaactagcagccaaaccttctgagcctgagtccacagtgcttgtcatcactgaccaaaaaaattaaaaattttctgagacccagataagaagctggaactcttccttgctaccttgaactcacgctgtctgctcacttcaaacggccttacaatcccactatttcaytgttcgatgtctcagtctgcaccttcgtcagtgtagaggtgcagattaattccacaggcttaag

SEQ ID NO: 493569 - DNA, 626 bp, Homo sapiens
atgtcctggtttatgcaatgtctctcaaatgccacatctgattcctatgcttgccccgagagacacgtgtttacaaatagggaaatggtagctcaaaacggggaggggccttgctcaaagcttcatggttaatgaggaaaccaggttttcagattccagatcttgtgctttttttttttttggtaaactcaggggtctgtgagttctttaggagcaggattttctgttttcaatgtgataatcttgaaaacaaaaaagccaaaaccccattggcaatgaaaatttgcaatctgaaagacgttttaggggaacaggcgttggtttttgagttgtctttgcagtactttagggcctgcagagatggaaaatggawaagcggtttgcttgttcccaaatgggaggaacaatgagttttaccaggccctttcattcggtgataatgtattttaaaaatctcattttctcttcaaatttatttcagtctgtttttgatatgacttgaattaaaaaaagaaaaaaaaaaaaaaacttcaggtgatgtagccagaagttgagctaaaagcagagctttctagattggaggtggttgctaaggagtccttccattcagatgggatcagcctgca

SEQ ID NO: 493570 - DNA, 666 bp, Homo sapiens
gcttgaaactcaactgggctttactacagatcatctctcagagattttgctaaagtgtccaacccagagcagaagttgtctctgaaaatcccaattaataggttcagacagaactttgcaatagtgaagaatttctcaaatatgcagactttttaaaatcagaaccacaatgagatacacaaatggagatcacaagccaacaaaacatgtagccttggtcccaattaaagggagaagagaagcatgtgtgcctctctctgaaatgattcaccaaatgcagatggaactctgccttcctgtcagtgttgtctctatttgtagcaaaaaaggtgcttaaaaatggaaaacactgttttgaatgcagccatcaatctcttgtgcaatgtcagtatcattaatctaattagtaataagaagccaggtagattgttatcagagcagccatcaatagacagctactgccctatgtaggaaggcattttttgcctctatgcagagacagtgtgatgatgatggctcctgtggcaaataccagggcaggagagcagctttgcagacacctctctatggcagcttacagaagaatcttacctcaaggacccaggtttcccagwctctccccaacaatcctgtatgccattataaatactgatctctcttctttcc

SEQ ID NO: 493571 - DNA, 351 bp, Homo sapiens
catctggaatttttctgattaatattctttaagtatatttattattatacagaggacagataatacacaattaggggaaatggcagcaccatctctctttgcatgtccttcagagaaattcaagggttmttggtaactccttagaagacattcactgcagtcacctggagggctctccttgaggcattctgttgaacagaattttccccacctccttaaatttctagtgaacagaattttccacacctccctaaatttctagtgatggaacaagaacatctgtcctgtcagatcatccttcaattcggttctacctgcaaccaatattagtttccttctcttcactttttt

SEQ ID NO: 493572 - DNA, 609 bp, Homo sapiens
ctgctatatcgttttcctgcttgggcttgtcttatcacttatcattgaaccacactgagatttcccttactaagtctagccatgtcttttgagaatcctatcttaatctaactttttctttcctatgtcttgtgcaaaggtacctttcttttctttaagaaacctactagttattgactgtcacctgtatgccaggaattgttgttagtgttaattcagaattgaataaacagagcccttgctcttgagggatttgctgtcccctagggaagtgtgctatcaaaggaaaatgaaagccgctgtgaggatagagagaatattatgtgtgagtaataatttctcaatagagaaacatttgatctgagttttaaagaactgacaggagtttataaagtagaacatataaaaaaggcattctagagagaaaagataaaaaagaggcagggaagtgtatgatggattcagraacagggtagctagaatatatggggaggtgggaagcagaaggaaatcaagccgaagcggtaagataaggctagattataagaggtccgcataccatacaaatgatcttggattttattctggaatagtagacccctttagaag

SEQ ID NO: 493573 - DNA, 532 bp, Homo sapiens
ataaatatattgcctggggtacagtaagtactcaataaacactgtgagttttgctgttatagaggatttctgagggatggggagttacatacgctgttgttttggaagttactagttgaagtattaaggaagatggactggagataggggagggcctagcatcagggaaatcatatttaaataacaatctctatagctgaaaagaatcctaaatgccatttaatttaaccctttcattttacagataaagtgaggctcaaagagagggtgtaacttactagagcctaggtatgtgactccctatacaatgaatgccctttccctcacacattttctccccagccttttctataccyattatccatccaacaactcagtctaaacaaaacaaaatttacagtgcatactggtttcagtgacttgagacctggaatttaagccaggctagaagaggatgccagtttattgactcaaagtagggtgaccagcattacaagtcgcctttaccccctccccaggcgaatatttgcaa

SEQ ID NO: 493574 - DNA, 683 bp, Homo sapiens
ctgctcactacatttcaccaacacagcagcctcagttatactttgaccattcacctccaagcaaataccactgtactttgaaaacaagggtgggaagggaccaaagaagtcctttgaacagtcctgcagcattcaaaagagtccgtattatgtacctgctatatatcatgggtacaaagatgaatggtccatgctcactgtacccttgaggaattcacaggcttgtagagaagacagttataaaattataatcttgagggccatctgcctaycaaatgaaacaatttactcagctcagggagtcagggacaggaaccagagagaaagtgacacctgagctgactcttgaaaggtattgagtaaaccaggagattggcttggctgagcagagagtgataagactgaaaagcacagctcatggagggcctgaacccctgaaccaaggagcttggcttgatgggcaaaaatgaggcatggagcagggaataacctgctcagagtgacatttggcaaggtcactctgggtgcaggctacaaggatgtgagggagcaggaccagaaacagaacaaccagttttgagcctaccttgcaagtccaggcaagaagcaacaaagacctgagctataaccataagggagggcaaagaaagaagagactgattctggagcctctggtgaggaga

SEQ ID NO: 493575 - DNA, 683 bp, Homo sapiens
ctgctcactacatttcaccaacacagcagcctcagttatactttgaccattcacctccaagcaaataccactgtactttgaaaacaagggtgggaagggaccaaagaagtcctttgaacagtcctgcagcattcaaaagagtccgtattatgtacctgctatatatcatgggtacaaagatgaatggtccatgctcactgtacccttgaggaattcacaggcttgtagagaagacagttataaaattataatcttgagggccatctgcctatcaaatgaaacaatttactcagctcagggagtcagggacaggaaccagagagaaagtgacacctgagctgactcttgaaaggtattgagtaaaccaggagattggcttggctgagcagagagtgataagactgaaaagcacagctcatggagggyctgaacccctgaaccaaggagcttggcttgatgggcaaaaatgaggcatggagcagggaataacctgctcagagtgacatttggcaaggtcactctgggtgcaggctacaaggatgtgagggagcaggaccagaaacagaacaaccagttttgagcctaccttgcaagtccaggcaagaagcaacaaagacctgagctataaccataagggagggcaaagaaagaagagactgattctggagcctctggtgaggaga

SEQ ID NO: 493576 - DNA, 636 bp, Homo sapiens
ctgcccctctggtactcacccaaggcttgtacaaaccaaaaggtgcaatgaagcacagaaagagaactatgtagctctaccacatggggccaaacagatgaattgaaaaataaatcaatttacaatagaataggaagtgaaaaaatattaggactatagaccratgggtctttttatactagtcatgtatgaatagttgttatggtaatagacaaataatgcaacacaaatcagcatctcccctactctcaacactctccataggtagaatattatggttttcacgcttatccttagtcctgtttcccctctatcttcacattaatttgcttctgcttggctataccaatttcagttcatgttaaatttccaaataccatacaaaacggagcctcttgggggcaaaatcagcaactacatttgcaaacaactactttataacttttctaaatatctcataatcatgttccattcatcatttaaaaagagtatggatgttttccagtaagtttatacaatctggatgtaaaaaagcagacataattattctgaactttgcctttgtgtcagggtaaactttttaaagtggaaaactggtcaatttttttcagccattcaaacctattctgctataac

SEQ ID NO: 493577 - DNA, 278 bp, Homo sapiens
acagtctcatcccttggatgcctgcaaacattatttacatattatatgtaaagaragcattataacctagcacagtatgaaaattttagataggagtaaagcatggtatcaagaagtagcagcaatatactctcccaagagttatatgtgacttctaaagacagctgagaaaaaaagatactgtgaatataacctgctttttctaccttcagacatgtctaactacaattcaacttgtctgctgctagatgaagcataaatccagagagaacagccac

SEQ ID NO: 493578 - DNA, 278 bp, Homo sapiens
acagtctcatcccttggatgcctgcaaacattatttacatattatatgtaaagaaagcattataacctagcacagtatgaaaattttagataggagtaaagcatggtatcaagaagtagcagcaatatactctcccaagagttatatgtgacttctaaagacagcwgagaaaaaaagatactgtgaatataacctgctttttctaccttcagacatgtctaactacaattcaacttgtctgctgctagatgaagcataaatccagagagaacagccac

SEQ ID NO: 493579 - DNA, 564 bp, Homo sapiens
caaggattcatccaggaacttgaagcatgtaaccaggaactaccttttgacttttttctcttctacgttggtttcattcttaggtatgaagggcacagtggcctaaggttcacattctaggtctaagatcatgaggatggagtgtctttttttttggctcatgcatttaatattctgggattggtttccattaaaccagagtgatgtggatcatgtgacatacctttcaagtaacattgctttgagaaagttatgatttcaatggccatgctgacatctcaggatagagtcaatttcatccaattccacccaaagcrcatggcttgatagtcacactcagttacacatgggaatgtgtaagaacattgtagtgcatgtagagaagaaacaaactcaaaaataaatttatataccacataaaaaatgtttttaactttaaatataggagatatgtgaaatgattgagacattttgaatacatttcagatttgctgtttaaaattggtattacagcagcattgtggaggatagttctaaaaatgattagactagaattgaggcaat

SEQ ID NO: 493580 - DNA, 595 bp, Homo sapiens
tcaagctagagcagtgtgagtcaggaattcagagagattaacaagacatctgtaagtggccttaggataaggagactattactaktaagcaggttattatttcatttagaataatgaaaacaattgatatcaaaaatgataaaagtttggccaggcgcggtggctcatgcctgtaatcccagaactttggaaggccaagtcaggtggatcatgaagtcaagagatcgagacaatcctgtccaacatggggaaaccctgtctctactaaatatacaaatattagctgggtgtggtggcacatgcctgtagtcccagctactcgggaggctgaggcaggagaatagcttgaacctgggaggtggaggttgcagtgagccaggattgtgccactgcactccagcctggtgacagagtaagactccgtctcaaaacaaacaacaacaaaaaaatggtaaaagttcaagtcctatatggtatgagaacaggacagatttcacttatctaggcattttcaaatctgtgtatttcaacaacagtagctcattaaacttcttttccatgacaatcaatgtgaatttaaatgtcatcaacacag

SEQ ID NO: 493581 - DNA, 595 bp, Homo sapiens
tcaagctagagcagtgtgagtcaggaattcagagagattaacaagacatctgtaagtggccttaggataaggagactattactattaagcaggttattatttcatttagaataatgaaaacaattkatatcaaaaatgataaaagtttggccaggcgcggtggctcatgcctgtaatcccagaactttggaaggccaagtcaggtggatcatgaagtcaagagatcgagacaatcctgtccaacatggggaaaccctgtctctactaaatatacaaatattagctgggtgtggtggcacatgcctgtagtcccagctactcgggaggctgaggcaggagaatagcttgaacctgggaggtggaggttgcagtgagccaggattgtgccactgcactccagcctggtgacagagtaagactccgtctcaaaacaaacaacaacaaaaaaatggtaaaagttcaagtcctatatggtatgagaacaggacagatttcacttatctaggcattttcaaatctgtgtatttcaacaacagtagctcattaaacttcttttccatgacaatcaatgtgaatttaaatgtcatcaacacag

SEQ ID NO: 493582 - DNA, 595 bp, Homo sapiens
tcaagctagagcagtgtgagtcaggaattcagagagattaacaagacatctgtaagtggccttaggataaggagactattactattaagcaggttattatttcatttagaataatgaaaacaattgatatcaaaaatgataaaagtttggccaggcgcggtggctcaygcctgtaatcccagaactttggaaggccaagtcaggtggatcatgaagtcaagagatcgagacaatcctgtccaacatggggaaaccctgtctctactaaatatacaaatattagctgggtgtggtggcacatgcctgtagtcccagctactcgggaggctgaggcaggagaatagcttgaacctgggaggtggaggttgcagtgagccaggattgtgccactgcactccagcctggtgacagagtaagactccgtctcaaaacaaacaacaacaaaaaaatggtaaaagttcaagtcctatatggtatgagaacaggacagatttcacttatctaggcattttcaaatctgtgtatttcaacaacagtagctcattaaacttcttttccatgacaatcaatgtgaatttaaatgtcatcaacacag

SEQ ID NO: 493583 - DNA, 357 bp, Homo sapiens
gtattttgattaaatgcatattgaaatccacttataactagccaatcaagacaatgaaagggactcaatgcaccattaagattgttttctaaaatttttcaagttaaacaattcattaggatattgttatgctctgatatctcctagaaatggggactgagccccaggaccagtgacacgttccggcccataggcgacagccctgtccaatgtaggatgtctcggcmaaaagtgctgcttcttccaagatggaaataactgctgaaagagatttcagggctatgctcgatgtgtatcaggtgcttagtgaattataaacggaatcatcaacatggttttgcacaattcaaagcagtt

SEQ ID NO: 493584 - DNA, 357 bp, Homo sapiens
gtattttgattaaatgcatattgaaatccacttataactagccaatcaagacaatgaaagggactcaatgcaccattaagattgttttctaaaatttttcaagttaaacaattcattaggatattgttatgctctgatatctcctagaaatggggactgagccccaggaccagtgacacgttccggcccataggcgacagccctgtccaatgtaggatgtctcggccaaaagtgctgcttcttccaagatggaaataactgctgaaagagatttcagggctatgctcgatgygtatcaggtgcttagtgaattataaacggaatcatcaacatggttttgcacaattcaaagcagtt

SEQ ID NO: 493585 - DNA, 618 bp, Homo sapiens
ggtcccaggcatcactgtggagaggatagggcagattcaatcattattccagaggtcacagcagtggggcctacctgattacacagtggtgaggaaacagataaataaacaggaggggccagaggaagagggaagagggaattcatctgagagagatgtgcctggagagcagaatggcacaaggatgggctctagggaaggccacaggtgaagggatgaatcatcccagaagaaaagaaaccccttcttctcacagggaacagagagcattgccaggtgaggggacttttcaggttcaacacaacaatccccttgtctgtctagcctttatacactcatcctgtggggtgctgtgtcccagtttctataaagcaagcctgcccttcatgctttgcccccttcctacaagcccaccytccctttcacttctctaccttgttatgatgcggcaggaggcccgcaccaggagccaaccagatgtaaccgcccaatcttggacttcccagcctatagagccatgagccaaaataaatgtattttctttataaattactcaggctcaggtactctgtaataacaacagaaaagaaactgagatagatgcccaccgagaaagca

SEQ ID NO: 493586 - DNA, 515 bp, Homo sapiens
ctgcatgcacagttcagatgttctactgaacatgagtctatcatgagatgctgatrtccagcaaacccagagacacttttcaaatcctcacaggtggaagtcctgttgcatagacaaggtaataagatgcaggatgtagtgaaaaacaaaagttggctttagcctgtgtgtactgagtaagtagattaaattaaggactcaatttcatcaattataagcacttgtgaagttgctgtgagagacagagatgatatttgtaaggtggttggacatatttagtaaacagtgccattgccaggtgtctgcagaaatgcatgccccataccaactgcagctaatggcaactcaacgaggcaaaaatggagagtttactttcagataccctatgtttgaaacacagccttcttcaggacagtggttgccacgcctacattgagttgagagccttagactccataagcattcaatattaaatagcaaagctctttccacactacctagcaatttatttctgg

SEQ ID NO: 493587 - DNA, 432 bp, Homo sapiens
tgtagactatttattttagaccattttaatacttatattttattataaatatcttattatttatttattttaaaatgtaaaagtatattttgccttggtaattacatagcatgttttgaggcaattagagatgtcctaaggaattgtttactcgggagaaaataatcgttatcatagtgacaatagctacaatgaattgagcacgttttatgwgctaggctcagctctagacactttacaaaccctttttctaatccccacctcaatcctacaagaaccaactgtgtcacccttcttttgcaggtgaagggattgaggctcgggggaagaaacttaatttgtccacaactatgtggttcattagagcttctacagtggaatttgaccctggttttgtctgaacctaacttccaaattatctctagttttcca

SEQ ID NO: 493588 - DNA, 623 bp, Homo sapiens
aataagatgtgatgattggccttggtcctgtgctctccatgagacaattccaaaatacatgaagactgagagtcattccccagagaaaattcataatattgtcactggaaataggataaattgagaccatacaggaaaaagagatgggcactagacctaaacagccactgtcctttgccctactcttttgattgatagttgtgaagatgaaaacaaggaagaaaggaatggatggcagcaatttacgagagtagggcccaggctcatggttactggaaaggctgcttgggaacgaaggcagtatcaggactctgttatctcacggaacctttgcagagccttgtggtgctgcattattaaaatgatttagttgttctctgtgcatttcccccttattcctgctaccaaattcctaactctgtctcatgttctgayctatcaagagagaacatctccttggtccaacagtaagcacagtcctccatgagtaaagaccactatcccctggtccctggcccattcagttcacactgatgaccacagtgagctactttcagctccttcctgagcagacggcccagaggcagcgactccaggaaaaggccttggaaggtggtttccca

SEQ ID NO: 493589 - DNA, 623 bp, Homo sapiens
aataagatgtgatgattggccttggtcctgtgctctccatgagacaattccaaaatacatgaagactgagagtcattccccagagaaaattcataatattgtcactggaaataggataaattgagaccatacaggaaaaagagatgggcactagacctaaacagccactgtcctttgccctactcttttgattgatagttgtgaagatgaaaacaaggaagaaaggaatggatggcagcaatttacgagagtagggcccaggctcatggttactggaaaggctgcttgggaacgaaggcagtatcaggactctgttatctcacggaacctttgcagagccttgtggtgctgcattattaaaatgatttagttgttctctgtgcatttcccccttattcctgctaccaaattcctaactctgtctcatgttctgacctatcaagagagaacatctccttggtccaacagtaagcacagtcctccatgagtaaagaccactatcccctggtccctggyccattcagttcacactgatgaccacagtgagctactttcagctccttcctgagcagacggcccagaggcagcgactccaggaaaaggccttggaaggtggtttccca

SEQ ID NO: 493590 - DNA, 547 bp, Homo sapiens
tgtgtcccccatttctgagtccatatactgttaatggcatctcagcatcttaccacctctttgtacttggccctggcttgtttcatgrtagctcacctctgaggcactggagccctggccataaattcttctctgaacacaatgccctaattgctgtaccaagtttggaacttcctagagacttgttgaatggctttgctcaaaatgctgatagcaatatagacaatgaaatccaggctgaggtggtctcagatggagataaggaacttattgggaactggagcaaaggtgactcttgttatgttttagcaaagagatgggtggcattttgctcgtgccctagagattttggaactttgaacttgagagagatgatttaggtatctggcagaataaaatttttaaacagcgaagcattccagaggtgacttgggtgctgttaaaaacattgagttttataagggatgcagagcataaaagttcagcaaatttgcagcctgacaatgtgatagaaaaggaaatcccgtattctgagaagaaattcaag

SEQ ID NO: 493591 - DNA, 633 bp, Homo sapiens
gatatctgaagagtgtctgcagaagcacccaacagaatagtggtttagttatccttgcataatttttttacgtggtgtgctgcaagtttagattttttttwaaaaatcatgtttttgtttttctagaacagaaaagcaactgatttcctagaatcgagcctagtatgtaggtagctctttgttgctttcagtttcaatatgaattatatttcaggaaatgttttaagtagacttgaattggcccaagaggctgcttttctggctgcaaaactgttacactaggtcattttaaagcataatgtctgaaagcatatacaatttggagggaataagggagaaacatcattattttagacttccagcacctccttgtttgttgttgtttttcaagtgccatgcactcagcccttaaaaatgtttgtacaaacaagtttatcattataagaagctgaagacaggcctcttcccagggctgacttaataacttggtcatcattttcagtggtcttcaattcattctccatgtgctagactcagtgatttaaaacacacacacataaattgaattatgtcacttttttgcacaaaagtctaaaaatattcctattgcacttaggcaaaaatcctgtctcc

SEQ ID NO: 493592 - DNA, 590 bp, Homo sapiens
tgtctgtcctgtggcctgtcctttcagtattctgccaaatgaacaaaataaagcaatgaaaatgagtttatttagtgccagcaagtggcagttctgaggtcagatgcacatgtgagtggacttccaggggacagacaggccagcctcactagtggtaatttcaggcactgggcaaaagattggacaaatagttgaggccggctcatcaggatcaccctgggctgcaatgaccaggctgcatgtcygtgccagcacccaggattccatcaggagatcatttacccttcacgtggcttttcagcatgcatccgcgcgggcactggcttcatctatgagtctgctcctgtgaccgtgcatacacgttggctcggcagactcttccccctcctgctgctgcctccattatcaccaacactgcaaaatgttctctctccaatggaacattccccccattcccgccacccctttcacaccctgctgttcgtgaccaagaacacccatttgctttgatacatcttgctgtggcatgtcaagaccattgactttcctgaaacctggctcaatggattcctatgcattttccttccagg

SEQ ID NO: 493593 - DNA, 535 bp, Homo sapiens
taatatgtcctcccctttcctcttctcaatatagtaaaataatcagatgagcagcatttcaccaggacataaagtgcttacaactggaaggaaaaaccatttttcaaggtgatgtagaccatttattgtttttatgtaaatgtgwttgtaacttaaaacaagctgtatctagtgaccagtggtgaccttacagtgtcttttcttggcagtgctacgttagcactggaaactggttcaagttaccatagtttgcttgcttttttaattcataaggacatctttctttgattctactctatgaaacatagactgtcaactaattctgggtaatctcttctccctacctgcaggattttctgtattacaagctctggtagtatctagattaaaccatctaagagtaaattcctagaagtcaaggtcagagagcttttcttacacagcctcccatcacccaatccaccatggcttaccagggttatcctcttaaaattccctcctgtcctgtatgagtctcctcagtggagtccgtctc

SEQ ID NO: 493594 - DNA, 471 bp, Homo sapiens
agacatggtgtatatatatgtgtgtgtgtgtgtgtgtgcacgtgtgtgtgtgtgtatgcatgttgcatgtgtgtctcttttataaatgataactaaatccagttttgacagactcccctaggcatcccgtatgaccacagatcttggtttggtcatccaagaccttcccaactccactccatcttaccacagagaggggtaactgagtgccctggttttaagtcagtggactctgcaacaagctccccttgtttaaaatcccactcaattatttactgtttgtgagattttgggcaattcagcctctgtgtctcagtttccttgtctgtttaattgggaatgatagcagtctggtgaagattaagtgtatatagagagtgctaatatctccaaacttgcctctttctcctagcgcatccatarcatccacgtagtcaactgctctattccttgtccccaaaacccctggga

SEQ ID NO: 493595 - DNA, 470 bp, Homo sapiens
tgcatagttccctctcactgtttaaatggggaggtggcaagatttcctggggtgaccctggctctataatcaagtgagctttattaaatggccgcatggagcatgtaaattctcccagcccagcttatataacacactttgtgagaggcggaaaccagttcgaatttgaacctctgcagagccctgcctggtagatttgcagacagcggtgcccatgagacatctgaaactttacgactacatatttaagcatttatgagacttgaactgtgttccattaaaatggaaaaaaaaactgcaaggaaaaaaatcctgagacttccagcaagggtaattagccccaaatgtttcataaaggatttgatagcattctggttgtaagcccctttcccyggtctgtcataggagagaaagagaagaaagaaacctattacaaattcaccattacttaaaaaaaatcacatgacaaa

SEQ ID NO: 493596 - DNA, 516 bp, Homo sapiens
agaaaatatttaagatatggacttggttgtttttgtcatacctaccaaagaaatcccttcctttttatgcccctgttcattcactcaacttcttcccttttgtttctaagtttggcactagtccggctggcttagtgccttccaacctcccaccaggcctgggtctatttctctgttactcccattgtactgttgctggtggagagaccggaggggcgatcactggaataggagatgtccacgtaaagccagtgttaatccctgcctaggtgacatcacataaatatggctcaacctgatcacactgaactccccatgaagagggccacaccacagggttcccatcaggctatgtctggcaaagrctcagctattccgtgttcttcattggaaggataagaagttgctttctatctgacactgtgtgcacagacagagaaggcacgtatcattagaatgtattttttaagcctttcttttttacggaaggaactttcagaatgataagtcagcaaa

SEQ ID NO: 493597 - DNA, 600 bp, Homo sapiens
taacagttaaacatggttgtggaggtcaagcatttaacatgtgtctggatccattaggtgttaagaaaataatatgtcctcccctttcctcttctcaatatagtaaaataatcagatgagcagcatttcaccaggacataaagtgcttacaactggaaggaaaaaccatttttcaaggtgatgtagaccatttattgtttttatgtaaatgtgattgtaacttaaaacaagctgtatctagtgaccagtggtgaccttacagtgtcttttcttggcagtgctaygttagcactggaaactggttcaagttaccatagtttgcttgcttttttaattcataaggacatctttctttgattctactctatgaaacatagactgtcaactaattctgggtaatctcttctccctacctgcaggattttctgtattacaagctctggtagtatctagattaaaccatctaagagtaaattcctagaagtcaaggtcagagagcttttcttacacagcctcccatcacccaatccaccatggcttaccagggttatcctcttaaaattccctcctgtcctgtatgagtctcctcagtggagtccg

SEQ ID NO: 493598 - DNA, 517 bp, Homo sapiens
ccactttcatgatctaatcagccccgaaagtctcacttcttaatacccacgtgttgggaattagatttcaacatatgaattttggaggggaacaacctgatcacagcagaaggcttggtgcctttttttccccaggaacaggatggcgagggttatttttacagcctctcacaactgggcacatatgatccaaattcagagcattactgtagcattccagttttccacttgcgctccttatgtcttcctgttcatcttctggttttattgattcgtggacagtgagtgctctggccatttctattggtgtggacttgccctgkaaagggactcccaccctctggaagaggccccagcatgattaaactctggagaagtgggtcgtgttttggaaagcatgttagctatgcttatttatatgccacatcatatatgggctaaaaccagcacatgtggtctttgtttcattgcttcctattgaacgcggattcgatccagcgtgctggagaggaatgat

SEQ ID NO: 493599 - DNA, 517 bp, Homo sapiens
ccactttcatgatctaatcagccccgaaagtctcacttcttaatacccacgtgttgggaattagatttcaacatatgaattttggaggggaacaacctgatcacagcagaaggcttggtgcctttttttccccaggaacaggatggcgagggttatttttacagcctctcacaactgggcacatatgatccaaattcagagcattactgtagcattccagttttccacttgcgctccttatgtcttcctgttcatcttctggttttattgattcgtggacagtgagtgctctggccatttctattggtgtggacttgccctgtaaagggactcccaccctctggaagaggccccagcatgattaaactctggagaagtgggtcgtgttttggaaagcatgttagctatgcttatttatatgccacatcatatatgggctaaaaccagcacatgtggtctttgtttcattgcttcctattgaacgyggattcgatccagcgtgctggagaggaatgat

SEQ ID NO: 493600 - DNA, 535 bp, Homo sapiens
taatatgtcctcccctttcctcttctcaatatagtaaaataatcagatgagcagcatttcaccaggacataaagtgcttacaactggaaggaaaaaccatttttcaaggtgatgtagaccatttattgtttttatgtaaatgtgattgtaacttaaaacaagctgtatctagtgaccagtggtgaccttacagtgtcttttcttggcagtgctacgttagcactggaaactggttcaagttaccatagtttgcttgcttttttaattcataaggacatctttctttgattctactctatgaaacatagactgtcaactaattctgggtaatctcttctccctacctgcaggattttctgtattacaagctctggtagtatctagattaaaccatctaagagtaaattcctrgaagtcaaggtcagagagcttttcttacacagcctcccatcacccaatccaccatggcttaccagggttatcctcttaaaattccctcctgtcctgtatgagtctcctcagtggagtccgtctc

SEQ ID NO: 493601 - DNA, 304 bp, Homo sapiens
gggttttattgctcacaaaaacgacaggtccccctggaattaagttgacctgagaattcagaaatggcagagctttagggtcctttatttcactggattgagttttagatgtcaccctttctaccaggcataatatatttgaatttttatttgtgactcctttccaaacagacaatatattcagtgtctcatcagttatcacatacatctgctgctcatgttccatttctccctgtggtgactagtaaacatgatttcagcatrgagagatttctgtaaatagagttattcctattttgtgtct

SEQ ID NO: 493602 - DNA, 605 bp, Homo sapiens
ctgctgctgctgggtggccaaagctgcacccaaggagcacaaagctccagccctgtcaactcagaagggagccaaggttttctccttttcccagcacccactggctccatggagcatacagccctggttgtgcctccccaactgcagccagcatcatagcagtgccactctagatggaccaccactgccatcagtacttacagcacattaaacaaattaatagaacttcgtttgctctttctctccttctataatattaacaataatagctaacaataawtaagcatatgttaggttgttagataaattctgaacacttcatatatattttcttatttcaaagtcacaacagactttaaaaaaaaacagagagtagattgggcaaggtgcttcacagctataatctaagcactttgggaggctgaagtggaaggatctctggagctcaggagtttgagaccagcctgggcaacatggtgaaaccccatctctacaaaaagtacaaaaaattagctggttgtgatgacacacacctgggaggatcacctgagcttggcaaggtcaaggctgcagtgagccatgattccaccactgccctccagcat

SEQ ID NO: 493603 - DNA, 644 bp, Homo sapiens
atccatatgactgcagtttctaattgtraaaccaaaagcacatggaaaattcgaacatatgagcagtgcaaattgtgtttaagtgtctctttcgaatgagcttttctccccctactttttctgcctgggttctgtttatggcatggaaagactcacatggctaatggcacatagagagttttggctactgaagtatctcgaagtggtgatgtgtgtttagagaggccctgccttcccttattactttgcattgcctttgttttttagttcgtcctgcctacagagggaaggatcaaccccccaccaacatcaagataatagcatcatatatcacctagaggatataaattaaacacatggtgggattttttaatagagcagggtaggcacccaagctggtgaggggcagcttgaggaaagaaagagacaagtatccctggtctttactgtggttagggaatgggaccgggatgaggaaggtgagggttcttatgggcagaggtttgtaggatttgattccacttttctatggacttatttagatgtgagacaaaagagaaaggtagaaaaagtggtgcctcaagctgttagcaatcaaacatttgtttaaaatggaggaatctgactgttcaccatcttgtttt

SEQ ID NO: 493604 - DNA, 461 bp, Homo sapiens
ggcaactagcccagaattgccttgttctcatgtcctggtcttttttgcttggatttcttcaatattaggaatttctctgtcctggwgaaagagtgcagctttctcattgccttacccctgggtactgggacaaggtgtaggtggaaaagttctaaaatgcattaattctacaaacatttattgaccactgactgtgtgccaggcacccttttaaatgtttgtggtacaccactgagaaaacagaaaaagaatcctgcattcatggacctttacctagcagaagatagatagtaagcactaaaagcaatcaagaagtaaaaaatgtattttcttagaaggtcataattactatgggaaaaagcacaatagaggcacaagggagataagagatgttcaggagctggatggacagattgttgtattaagtaaactgaccaaggaggcctcaatgagaaggtgac

SEQ ID NO: 493605 - DNA, 461 bp, Homo sapiens
ggcaactagcccagaattgccttgttctcatgtcctggtcttttttgcttggatttcttcaatattaggaatttctctgtcctggtgaaagagtgcagctttctcattgccttacccctgggtactgggacaaggtgtaggtggaaaagttctaaaatgcattaattctacaaacatttattgaccactgactgtgtgccaggcacccttttaaatgtttgtggtacaccactgagaaaacagaaaaagaatcctgcattcatggacctttacctagcaraagatagatagtaagcactaaaagcaatcaagaagtaaaaaatgtattttcttagaaggtcataattactatgggaaaaagcacaatagaggcacaagggagataagagatgttcaggagctggatggacagattgttgtattaagtaaactgaccaaggaggcctcaatgagaaggtgac

SEQ ID NO: 493606 - DNA, 577 bp, Homo sapiens
tcaagaaaggaaggagatgaaaatcaacatgaaaataggaactcagaaagataaacgtagctctgcttactgcttttgctctgaaggtaattgacgaagactggtaaccttaacttgcatggctttgaaagcatcatggacaagagatcaagcctaatatgaggacttttcccttcttataactgagaatgccttgcagtgaattgtttgatgaagtctaaacttccttactctgagaaaacagcaaggagaagtgtcttaatcttttgtgtttgttggggaaaaaagctatctatcctaagaatattaactaaaaattagcaatgattgaaatgtgtaggcaaaattgacaccacctgagttgctaaaaacaaaacaaacaaacaaacaacaacctctcaatttgataactaagttaaaagtgtcctagatttatagtatccaaaaatgcttgacagaaacaaatgtcacaactctttgcagaagtccttgaactaggcttawtaaatatctagtttcaaggaatataaattctcagttaaaaattaaaaaacactgaagcaaatgaacaccatga

SEQ ID NO: 493607 - DNA, 569 bp, Homo sapiens
acacacacacacttatatatatatattgagacggagtctcgctctktcgccaggctggagtgcaatagtgcaatcccggctctctgcaatctccacctgccaggttcaagtgattgccccgcctcagcctcctgagtagccgggactacaggcatgtgccaccaagcctggctaatttttttgtattttagtagagatgtggtttcactatgttggccaggatggtctagatctcctgacctcatgatccgcctgcctcagcctcccaaagtgctgggattatcatatctttaaagtttaagtaaaatgtaatgggtcaagcgcaataagtgcaattattatttgtattggatcttctgttagatctgcttgagatattatagtttaatcagaattttatctttggaaatgatttctagagatctcagggtaagggaaaataaagtaaaacaccacacccttaatattcaagtctaacattttttggccgctttgctatcgtatccattgtaaaggggctttttttttcttttgaggacaccaagccaaaagtctcagcaagatttaaa

SEQ ID NO: 493608 - DNA, 569 bp, Homo sapiens
acacacacacacttatatatatatattgagacggagtctcgctctgtcgccaggctggagtgcaatagtgcaatcccggctctctgcaatctccacctgccaggttcaagtgattgccccgcctcagcctcctgagtagccgggactacaggcatgtgccaccaagcctggctaatttttttgtattttagtagagatgtggtttcactatgttggccaggatggtctagatctcctgacctcatgatccgcctgcctcagcctcccaaagtgctgggattatcatatctttaaagtttaagtaaaatgtaatgggtcaagcgcaataagtgcaattattatttgtattggatcttctgttagatctgcttgagatattatagtttaatcagaattttawctttggaaatgatttctagagatctcagggtaagggaaaataaagtaaaacaccacacccttaatattcaagtctaacattttttggccgctttgctatcgtatccattgtaaaggggctttttttttcttttgaggacaccaagccaaaagtctcagcaagatttaaa

SEQ ID NO: 493609 - DNA, 644 bp, Homo sapiens
ataatgaactcacagccagcatataatcaaggagaatgagttctacaaattttcaaaaggctcctgtgagtataggttacctttggaaatgaatggagagaatgaggttggaaagggataaaaaatgtatttcacatatatgtgcaatgttttatgactaaaaaagcatgaaccaaagcaattttaaccaaatattaatatttgttaaatatgattatttactacatgaatgttcattgaattatatttcttccgtatatctgagatattttataattttaaaatttattttcaaataggatctcataatgtaacatggatggatgcctattttaggactaagtgagagtaactgtrtaaagcattttggaagacataaaggtaaatgaaatgtaagcagtactttcactgactagcagagacagaacttcctcgtggaggcaggcagaaagtgttccgtaaaaatccgggatggtattcatgtgggttatcatagatcttgtgccccctggaatgttccatgaagcagcccagggaaggaaaaatgagagaaaagaacacaaataaccagagtgccatttacaaattgaagtgaacaaagcagacaggaccagtttcctgaatgcagtaacttttgaagtcag

SEQ ID NO: 493610 - DNA, 644 bp, Homo sapiens
ataatgaactcacagccagcatataatcaaggagaatgagttctacaaattttcaaaaggctcctgtgagtataggttacctttggaaatgaatggagagaatgaggttggaaagggataaaaaatgtatttcacatatatgtgcaatgttttatgactaaaaaagcatgaaccaaagcaattttaaccaaatattaatatttgttaaatatgattatttactacatgaatgttcattgaattatatttcttccgtatatctgagatattttataattttaaaatttattttcaaataggatctcataatgtaacatggatggatgcctattttaggactaagtgagagtaactgtgtaaagcattttggaagacataaaggtaaatgaaatgtaagcagtactttcactgactagcagagacagaacytcctcgtggaggcaggcagaaagtgttccgtaaaaatccgggatggtattcatgtgggttatcatagatcttgtgccccctggaatgttccatgaagcagcccagggaaggaaaaatgagagaaaagaacacaaataaccagagtgccatttacaaattgaagtgaacaaagcagacaggaccagtttcctgaatgcagtaacttttgaagtcag

SEQ ID NO: 493611 - DNA, 604 bp, Homo sapiens
gttttattttggtggaagctgtcaaaatgtcaaatgtactgctctgtttttatggcttctaygacccacataattttcaaattcctgaaccaaacacatgagctagtacaatctgttctaccagtatacatcacaatttatccccagtgaaagttttaaaattggactggcacatggtgccagggtcctgtctgtgctccttttactataagaaaaagctgctgaataacaagaggtgtagcactaaaatctaataatattttctgctttctcagtccattcctggcatcaacaaacacaagataagttttatggtatgtaattcctgagacacagatcagtgtaggatatttattagtatttattaaggtatgtccttggtatcataaaagagaggggaaggaattgagatgaagaagttgagccgctgcattgaaggtttgattggccccaaagttagcaccacagaaagttctgaaacataatggtctgtcactatcagagttttctatcacagggcaaaattaggcctttatacccatccttatgttggtaattagatgtgggccatacagagaagggcatgctcttggatgaagtactg

SEQ ID NO: 493612 - DNA, 604 bp, Homo sapiens
gttttattttggtggaagctgtcaaaatgtcaaatgtactgctctgtttttatggcttctacgacccacataattttcaaattcctgaaccaaacacatgagctagtacaatctgttctaccagtatacatcacaatttatccccagtgaaagttttaaaattggactggcacatggtgccagggtcctgtctgtgctccttttactataagaaaaagctgctgaataacaagaggtgtagcactaaaatctaataatattttctgctttctcagtccattcctggcatcaacaaacacaagataagttttatggtatgtaattcctgagacacagatcagtgtaggatatttattagtatttattaaggtatgtccttggtatcataaaagagaggggaaggaattgagatgaagaagttgagccgctgcattgaaggtttgattggccccaaagttagcaccacagaaagttctgaaacataatggtctgtcactatcagagttttctatcacagggcaaaattaggcctttatacccatccttatgttggtaattagatgtgggccatacagrgaagggcatgctcttggatgaagtactg

SEQ ID NO: 493613 - DNA, 633 bp, Homo sapiens
tgcttgtgagctgattaacaaacctctttggcccccaagcactagagtctgcctgacacctaggcctgaggtcactgggcatatggccagcttgggcccccagggcttcctacctgagacttgaacctcctcaatcagcctttcctcacaggctacgttacaatcaaactcagagtaggattatatatttgacttattttttaatcctcttcagtacaccagaatggggtctggcataaattaaaggctrgataatacttcttaatagattatatgacatcaacaacctgctcatgatttttttttaactggcgctgcacttgggattaaacctaaactccctgaccaagaagtcatagtctcaccctcgctctgctttctcccatgtcagcctccccttattcacaaattagattttctttttcttttgttgaaaacaaacaaattttttcctgctagctctagcacatccttcaggtattagcttaaaatctcacctcctcagagaagccttctaaaatagattcccctatcttgtactgttttctatctcagcttcttcactttatagcacttatcacatttgtaattggtgtcctttatttgcttgcttccccaacagatactaaactc

SEQ ID NO: 493614 - DNA, 633 bp, Homo sapiens
tgcttgtgagctgattaacaaacctctttggcccccaagcactagagtctgcctgacacctaggcctgaggtcactgggcatatggccagcttgggcccccagggcttcctacctgagacttgaacctcctcaatcagcctttcctcacaggctacgttacaatcaaactcagagtaggattatatatttgacttattttttaatcctcttcagtacaccagaatggggtctggcataaattaaaggctggataatacttcttaatagattatatgacatcaacaacctgctcatgatttttttttaactggcgctgcacttgggattaaacctaaactccctgaccaagaagtcatagtctcaccctcgctctgctttctcccatgtcagcctccccttattcacaaattagattttctttttcttttgttgaaaacaaacaaattttttcctgctagctctagcacatccttcaggtattagcttaaaatctcayctcctcagagaagccttctaaaatagattcccctatcttgtactgttttctatctcagcttcttcactttatagcacttatcacatttgtaattggtgtcctttatttgcttgcttccccaacagatactaaactc

SEQ ID NO: 493615 - DNA, 567 bp, Homo sapiens
tgtggtgaaaagagcaatacaaagtcaggagcagtagttyttaggagcagaatgttaaaacacgcccatgtgtgtccttctcactacctgctttgcagtcttcacttgtatccaatttatctggtattcatgagagtgagcttttccccaaaggtgaattttccttgtcaatgaaacttactatctatttaactcttgtcttagaaatagttaaaactgctagtttctacttccccctcttcttatagtagagtatattggacatctcagcatcttttattcagacaggtggttgccatcagaggcagtaattgtccgggccttagaggactgcggagccctcaggagtgatagagatgtaggccaatttgctcttacactaagggtcccaggactgccagattctgcggctttaatggcaggttttgtgggctttttgatctcctttctctttgccgattcacttttttttgatgcttacttcagttgaaaatcattatgttcctactttcttcacttcattctccttctgtctctcatctgttgattttgatataaatgagctgt

SEQ ID NO: 493616 - DNA, 531 bp, Homo sapiens
catgtaaggtgcagcctccaagcagggtgaagaggagtaatgtatacagggctgtctggcactgggtattggagcaggaacaagtgagaaaggagctcacataatgaggttcctcaacaaggagtgtcatgagcctaacaggggtgaggacagtgaaggaagtggccctgctgtgaggggccagagcttgggcagggtgaggaggacatcaatttacaaggatggtctggcacaaagtgttgaagcccaaggaggataggaaggcatgcacactgaggggtgttgagcatcctgagagcacttgtaggatgagaaaagttgctgcctgaaaatgtaatcagatgtagtaaaggaatacagggataagcaggatwttcacatattaggcagtggacaggtccacaagaagtgttaaagccagaaaatgatcaggagggcatccacacagaggacagggtagcacgtttacaggaaattggttacataacagactgatggcaaataattagtatattgcttatttataacagg

SEQ ID NO: 493617 - DNA, 602 bp, Homo sapiens
taccctaaaacttagagtataataaaaaaaaaaaaaaaaaggaaaaatgaccttttcaagttaagaataggaaaaataggttttaaaaacctaaagacaatggattaaatgagaaaagaaaaaaagctgtcacctaatcaccggtttcaatatctgaaggaggaaagtacraacaaaagcaggtgttctaaatggagtcttaagaagagaaatacaaaattcagaaatgtttccatgcattattagctttgaccaagggagatggtactctgctgggctgaaagcattggctacattcaactctcagagctcagtgaatgaatatcctctgggctctgactccatttccatcaaggcaccctgtaatacaatttcccctggcctcagatttgctacagtgagaatgtaccaagcaataaccagaatgccaattaaagaattgtcattctagtttatatactcattttttaggtatttagttagtgtgactcagttctcacaaggttgacaaatcctagactcacttgtgaaatctaaatcagtcctctaaacctaaaaagctaaagattacatgctagcacccctgccccaactctactgct

SEQ ID NO: 493618 - DNA, 677 bp, Homo sapiens
accgctataagcaaagctcagaaatagaacctggaattttccatttttatcctgttctgagcagaagattacattatatctttgggaattatctgtaatagcattgtttaaaagaaaatgcagtaatgttgcaggaaaaaagggtataggatatggataaaatcataacaaaaatctctattgcaaaagatttttgttgcacctgcggttcactttagaacatcagcaatctgttttgaaytggtccataatttctagtgcaattcaaaaataattgctaatgtgctttttaacttgcaattttcagagccataaaccataaaattcactctggaaatgctgaggctctttattttaaaatgtgagaaaagaaatgccttacgtcttttctgtatgttcctactcaaagacgaacagctctctggatctgtaagaggaagttatgatttggttcataacacaaagaaacaagggagggaaaaaaagaaaaagaaaaaaaggcaaacagagatgagtacttggcggccatgcttatcaaattaacacaaaaaatatgcttttctgattcaattattttaattacataagtctgaggtaacacaaacaatgtagaattgaccacaattaattaattgtatttattatactagtcaaactcctgatttaagcctattata

SEQ ID NO: 493619 - DNA, 514 bp, Homo sapiens
ataggtgtgagccaccacagcmggcctgaattgtgtaacattttctcccaatagttatcacatatattttcctacaaactaaaagctccatgacagcaggtgtgtcatcttcaggtgtgtcaccagtccttagatgaatgcctggcacaaataacgcatttggtttttcttggatgaaacaaataactgtattgctcaataatgccaccctagatccaggctggagggcctagaggaatgaatgaatgaatgaagaatggcactaacaaattgtgtgatctctggcatgtctgaggctcagtttctttatattttaattcaagatgataattcctgtaaaatagctgctttataaaattgttataaagagcatctgaaattacacacacatacacacacaaacacacacacacagagacatgttactaaactgaactgtgtccatttgcctgtgtgcaatggaaagccaaacacaaaagcactgggttttgtagcgagaaaggtttattaccag

SEQ ID NO: 493620 - DNA, 642 bp, Homo sapiens
tgttgaaggttaaaacgtattattgtatttgtgattaatataagaaagktaatgtgttttcttctttctaggttactttttcttatgtttttaacagagactaactttagattacctataattcaagaaatatctattctcaacatcccacatcactgtatgttctttgctaggttattgggctcctgctgtgcaatttagatccttctttgtcattattttctcaagggttttcaaatttccctctttgaggattatagcaatgcacacttacccctgcagcccgttgggtggcaggcagctttgctacctcatgtggctaggtgatttcacagaggtggcaatgataattcacagagaagtaaacaggaagcaccttaaattcaaggttgtggaatgtcgctcctgctgctggtcttctgggaatgttgtgcattttttctttttaaaacttagggtttctgtagaaataatctgttccatcctacattaaatgagaattagaaagatatactcagtcaaatcagtgatttgctggagtggagtcaatggcctgaaactcccttgctggaaagatggctctggagtatgtgagctggattcaggaggcagataacagccagggacagcagtatcatggca

SEQ ID NO: 493621 - DNA, 644 bp, Homo sapiens
tgggtcatgtggcacttccctctttgaggggttctgggattcaatgtaaaagtgaaattctttatttttaaagtttagattttctgccttccaattatgcctgcttttcacatatttaaattattaggtcctaaaaactgcaaatactttgtttgccctgtttcttaatgggctcagccctgagttcagtggcttagttgaaaaatrttaaattaaaagctacctatctaaatgaaattggtctctttatgcaatcctctggtaaattcctatgatattgtgttactttggcattcatttttaatcttccttgaactaacacaactaaacgctttcttgaaaaagctccaattctctctctttgccttgaaatgtaaatttactgcccctttactataaacttgttacggtcttcagccataacttgttgatttacagaggcaccatttaatcccactgtccttttaaactggtgagttttacctgtctcttggctgaaattttaaaagcaaaactataatatctttatttatgtttgtctatatctgtgtgtacatgggtatatgtctgtctatatactgtctatgttatattaaattgacttataaataaacaagttatcataaactaagtaaaagtattag

SEQ ID NO: 493622 - DNA, 644 bp, Homo sapiens
tgggtcatgtggcacttccctctttgaggggttctgggattcaatgtaaaagtgaaattctttatttttaaagtttagattttctgccttccaattatgcctgcttttcacatatttaaattattaggtcctaaaaactgcaaatactttgtttgccctgtttcttaatgggctcagccctgagttcagtggcttagttgaaaaatgttaaattaaaagctacctatctaaatgaaattggtctctttatgcaatcctctggtaaattcctatgatattgtgttactttggcattcatttttaatcttccttgaactaacacaactaaacrctttcttgaaaaagctccaattctctctctttgccttgaaatgtaaatttactgcccctttactataaacttgttacggtcttcagccataacttgttgatttacagaggcaccatttaatcccactgtccttttaaactggtgagttttacctgtctcttggctgaaattttaaaagcaaaactataatatctttatttatgtttgtctatatctgtgtgtacatgggtatatgtctgtctatatactgtctatgttatattaaattgacttataaataaacaagttatcataaactaagtaaaagtattag

SEQ ID NO: 493623 - DNA, 644 bp, Homo sapiens
tgggtcatgtggcacttccctctttgaggggttctgggattcaatgtaaaagtgaaattctttatttttaaagtttagattttctgccttccaattatgcctgcttttcacatatttaaattattaggtcctaaaaactgcaaatactttgtttgccctgtttcttaatgggctcagccctgagttcagtggcttagttgaaaaatgttaaattaaaagctacctatctaaatgaaattggtctctttatgcaatcctctggtaaattcctatgatattgtgttactttggcattcatttttaatcttccttgaactaacacaactaaacgctttcttgaaaaagctccaattctctctctttgccttgaaatgtaaatttactgcccctttactataaacttgttayggtcttcagccataacttgttgatttacagaggcaccatttaatcccactgtccttttaaactggtgagttttacctgtctcttggctgaaattttaaaagcaaaactataatatctttatttatgtttgtctatatctgtgtgtacatgggtatatgtctgtctatatactgtctatgttatattaaattgacttataaataaacaagttatcataaactaagtaaaagtattag

SEQ ID NO: 493624 - DNA, 654 bp, Homo sapiens
cattgctttttaatatttattatttccctacaaatctggagtggaccttgaattctttcatgtctacaagtatttaaactaatattactaatatttccaaatttctttccatttttctggaaatcactaaaattaaaaacactttttcctgaagtgtttttggaatcacttggaatcactaaaattaaaaacactttttcctgaagccccggaagctgaagccagaaaatttgatacaaacttggaaaaaaatcatcacagcaacttaatatatgaacagactctgtgcctgttgataaatagactgctcagaaagctcactggaacacctgaggcaaactacaaaccaggaaaaatgtgtcaggttgccactatctgctctcacttcctgaagatgcttcaagcccaacatctaaaaaccttcatgattggctgccatgtggactcaaaaaaaatgagtttatagtttgttctaaccactaacatttgtttttcttttatttccatagaaacatctcttaataaayatctggttgctcagatcatatagaggccttactttggtggacggccatctacaacatcactgcctgaaatgaaacacagatgttaactgtttaattggactggcctattcatgggattgaaaagatt

SEQ ID NO: 493625 - DNA, 440 bp, Homo sapiens
gtagcccagactaagattgtgagttaaatgttagatgttgaggatgcggagggttaaagagctgcatctccccctacmccccttttttctcaccctttctgtcttattcaggctagcccaaaccttcattcacttctatgcccccagcggtatctgcaaatgctcagtgcctggaaaaaagagatctggcctggacagagtgttttgagtttctgtgcagaaaaagttgtgtccatggggtgggatggtcaagggtctccctctgagtgggcagaggcggagaatcaggattgagagatggaccaaagtggccaggaagatcacgagcagggacactgagcactgcctaccaagagtatcgtcaaaccctatacgctgcctcttgaccaggcacctatcctccgctatgaagagtgcggaggaatcacgaattatccccg

SEQ ID NO: 493626 - DNA, 621 bp, Homo sapiens
cagccttaattgatgccctgcagaattgcaagataaatgaatggtctttgttttaaaccactgagttttgggatggtttatcatgcagcaaatactaactgattcagatgtaaatattcaagtcatggtgcacacaattttgataatgccatawctttgataagaagttacagtaacctacaaaaccgataccagcaatgactttactcttaccctttaaacaaagaaaaaaaactagaaattaatttgtaaaagatggaaaataaaaaaagaagctttcagagtttgcaatcatcgtaacaacagatattctatttgttctttatcatttgcatgtagacacttagtttctgggttaatatacttaggatagtctttattattttatgtattttgcactatttgacatataacatgtctcctcaagtttaccatagaaattcaataatgtagtacaatcttcctttgatatgtctcattgtaaggaaattatatagtcttactttgaattccactagaaaccaactgatcctgagtgtaaggattgagtgaaaataaatttaatttggagattaaagatatagcaataaaagattgggaaaatgagcaaggaaagggaag

SEQ ID NO: 493627 - DNA, 621 bp, Homo sapiens
cagccttaattgatgccctgcagaattgcaagataaatgaatggtctttgttttaaaccactgagttttgggatggtttatcatgcagcaaatactaactgattcagatgtaaatattcaagtcatggtgcacacaattttgataatgccataactttgataagaagttacagtaacctacaaaaccgataccagcaatgactttactcttaccctttaaacaaagaaaaaaaactagaaattaatttgtaaaagatggaaaataaaaaaagaagctttcagagtttgcaatcatcgtaacaacagatattctatttgttctttatcatttgcatgtagacacttagtttctgggttaatatacttaggatrgtctttattattttatgtattttgcactatttgacatataacatgtctcctcaagtttaccatagaaattcaataatgtagtacaatcttcctttgatatgtctcattgtaaggaaattatatagtcttactttgaattccactagaaaccaactgatcctgagtgtaaggattgagtgaaaataaatttaatttggagattaaagatatagcaataaaagattgggaaaatgagcaaggaaagggaag

SEQ ID NO: 493628 - DNA, 636 bp, Homo sapiens
ccacttggaggactgaattaaatgagatatgtttacataatgagaagcacattgtctggctgatagtggatatcaacaaatggcagtcatggatgtttcatagacaaagaaagggctcagtttctgcagaragcatgaataaaagctgctctgtgagcattgctagaagtatgtcctttttataaagtggtttagtcttgaattttatcaaacctatcactggggtatggcatcagatttgcatttttgtgtaatatatgaaagatttttttcccaaaaaatattcttaaggttccaaggtttagtggtatatcagtgataaaatgttcaagtctcatatacccacaaatgagaatgatgatggaataatatcccatctagtcactcatttaactaagattcaccaagtacctaatgtgtatgagagcctctgctaattactaggagaaatgaaccagaccagccactgccctcagcggttcactgtctactcagaaataaaaaagaatgcaatagtcttgtgttagggcatggaagtggctgtacctgccatccatggttttgtttgcccagaacacagtcttcctgcttctggaaaatattctactctaaactatacagttaccaggggagcag

SEQ ID NO: 493629 - DNA, 687 bp, Homo sapiens
cagctgggaaaccagcaaactctcagagctgttactctaatcaggggagaaaattttcacagagaagttccccacaccccattcttttattttactttaagttctgggatacatctgcagaacgtgcaggtttgttacataggtatacatgtgccattgtagtttgctgcacctatcaacccatcatctaggctttaagccccgcatgttttagacatttgtcctaatgctctccctccctttgcccctcaccctgccatgaggccccagtgtgtgatgttcccctccctatgtccatgtgttctcattgttcaactcctacttatgagaacaygcggtgtttggttttctgtccctgtgttagtttgctgagaatgatggcttccaggttcatcatgtccctgcaaagacatgaactcattctttttatggctgcatagtatcccatggtatatatgtgccacatattctttatccagtctgtcattgatgggcatgtgaattggttccaagtctttgctattgtgaataatgcagcagtaaacatacaggtgcatgtatctttatcacagaatgatttataatcctttgggtatatacccagtaatgcgattgctgggttaaatggtatttctggttctaatccttgaggaatcaccactctgtcttccacaatggttgaactag

SEQ ID NO: 493630 - DNA, 371 bp, Homo sapiens
tatttcaaactgtacagtcaccagaagtacacagttatcaaaaatgtacacacttcacttggcatctccagcaccttcagctttctgtgcctggtctgttttggcatctccattttctgcagggttattcccctccttgccagcatcagcttttccctttttccctttgggtaccttctctcccttctttacaggggactttctaggcttgggctctggctttggaggagcaggtttrgcagacaacctcgcggatcttctctgcggttcgtccttcaccttggctttatctcccttagcatccccttcagcctttctcttgggcatggtgacggccacgacggtggcgggatgtaggtgctggatgcggg

SEQ ID NO: 493631 - DNA, 657 bp, Homo sapiens
ggacttttacagtgagagttcatcagttccagccaccatgggaattaaacacagaccctmaaacagtgattctcaaaacatagcagaccaggaaaaaacactgcctggaaatctgtgaaagccccagaatcagaaactgagaatggagctctgaaatctgttttaacaagaacttttgatgattatatgcatgctaaagtttcagaacatcttgtctaaagaccagcaggaccaagttttcaggttccctaccttgggtagggaaatataatttgttttggattacagagtatctcttcactttcccaagcacagtaaatatattcttctagtctctaaaaacttaattttaattgagatgacttccaaaatatgaaatcaagatttaccttcaataaaacttattaaacacgaaccaactgcttcaactttatacatttgtgaataggctaatataaatgcctaggttatcagtaaggctaatttttaaattcagtgtaatttaaaaggttttatcatcttctagtaagtaacagaataaataagaattcctagagttgcttaaattgcttatcagcaattcctctccctaaaggtaaatcatatattctttccaatctctctagccaagtctgttcaattcattttcacaatttt

SEQ ID NO: 493632 - DNA, 635 bp, Homo sapiens
tgctcctccaaggggtgggagggccaggcctgcccggccctgaccagatgtttgggaaaagtgccaggctacagcaaagaaaattgctgccaatttatctaaggtgtaataagtattaaggaagcctctttctcatgtttttgtttacaagaaaggctcaaatcttacaaagactcaggggcttcggagtgcatctccgtaggtgtccctgggacactgcactgagagtctatggacatgggttctagtctccattttgccactgacttccttgggaccttagaacaatcttttagcctttctgggttttgttccctccattgtaaaatgaagatgaaaaactagaaaatttctaaagacagtttcagctcttaaaaaagtgggaagaataaaacctgggactctaaaatctactcatcctaaagatacwtccttagaccaggatgcctagattatttgaggtcaaaagaacttaaacgtcatagttcaatctcttagttgacagaggagtaaactgagacttggagaggtggctgtgcttggcaaagctcaccgggttcattggttggagcagagctccacacggagccaaggctcctggcttacagatccagatgagaccaccctcagccttc

SEQ ID NO: 493633 - DNA, 620 bp, Homo sapiens
cattgtgtaaggcacatgatgggcatccctcatctgatcttcttcccatagcaccgcaaagtagggaatgtacaaatccacagagataaggaagtctgagaggcaggaacaacagacaaagggtgtcaagtactaggaccttagagaataggtgagaaggcagcaaatcacttggctgacagtaagaacaacaccaaagtgtctgcctggggtaggggcatcaagggccagggagatgtgcactggggagtcctggggaggctgaggatgggacaaccacttgcctctgaaggccagattcaaggtcagactgaatacaggatgactggccaggaggctacttccaccctgccgcagcatgaactgctccttccaccstaccctgccagagacaagagacatggagtttagtctgtagaagaactgaactaggaaggctccagatcccaggtagcccagtgaaaccaagaagatttggtgaaagtgtagtgactgcatggtgagatccttcacacccgttgcctcaattcacttcccctacttggccaccagaacatggttaggatgagagaggccaggcaagggataggagctttatcatcattggaaactctgagcag

SEQ ID NO: 493634 - DNA, 397 bp, Homo sapiens
atggaacctacctcccagtcatcttggggacttacattgggaactttcgcaaagacgatcaacacaattgtttctaaaaacactggtgcagactatgggaggagccacctgctgaaaactgaggctgaaattcataccttggatagctctgtgatgcatgcaagtatttgcgtgcttgccaggatattaaaaacatccagttgttttgcagcctcacctcatagtgggtcagacccgggagtcctagaaaaagcagtgtgggttgtaagatccccctgtcctgcactcaggggctggccttgcttscactcactgggtctacgactgtgggtgaggacctttctctctctcagcttcagtttcctcagcagcaaatatatcaggcaagaggtttggg

SEQ ID NO: 493635 - DNA, 567 bp, Homo sapiens
cccaaaaagacactcagtaaacaccctatgaatgaaggatatcagatgcttgtaatgcacaaggcccatgtcacttttcgggagtgctacacttgtgttggttttaatccttctgtaagagctggaaaaytagtcctaagaggctgcagcaggcaagcattagctcacaaaaataaggcaaatcaactgaaggaaattggaccaatgagtataaatatcctacaacttcaagtcacattaaatcaaactcccaatagtaaacactccctcacactgcttcccagccttttcatgttgtgctacagatagataatgataatatttaagtagtatattggggtaaactgacaaagctgtggccagaggattctgcctcaggacattccattccaagcatttaatcacacttaaaatctaaaacccttactctgatttactatttatattatctgactcctgattgcctttccagcttcaaaagatggtcttattcttcttgccctcctgcacatgcctcatttctattactgaaacaaattaagtcctgtcttggggtatttgtactag

SEQ ID NO: 493636 - DNA, 661 bp, Homo sapiens
ctcccagtcatgcttcctgttagggcctgtggtactgtgagtcaattaaacctctattctttacaaattacccagtctcaggtagttctttatagcagtgtgaaaatgaactaatacaatgtgagttgaattatgatttctatttcaattctaaaatttccagtttctagattttttcaaagagtacattgcagtatatttaaacactggcaaagtttcactaataatggattatacaaatatatatttgatttctttagtacttaagacaggctaatccatttcttctagtttaatactcttaccaataaggtaaagctaattaagaaaggcctcgtaaagagggacataaaagagatggctttgagttagatcctttagaagctagaaacacaaatttccaggataaaaacagtgggcatttagtgactgatcaggaaaggcatgatagaaactctgattggaaatatcatccaaattgytttggctctgcccctccacattcaagacatcagttaattacatctctaaaatgtatttcacaatcacttctttttatatctactgcctccaccccagcctactacctagggtgcagaggggagtgaagtatagatgtgtgctgggtgtgtacaagccaccaccaccttttattccaatg

SEQ ID NO: 493637 - DNA, 580 bp, Homo sapiens
tcctataacaatatttcaatataaatataatttatattatatatttacatatattataaacataattaaaggagcamtttcattagttaatgatcaggatcagatattcctaatagctttatgaatagcttatgagataaataaatacagaattatgtaatatatgaggtaataaatggaagagtaaatacaatttatcccaaaataacactaactgttaaaataattatgccactcacagtcatgaataagctccaatagctaatttgtctttatttttgcaatacctcaaaatttactgtaaccaaatagctaattgatttcaaatttttaaaaaattttcacagttcatcaatattgaattattcaattaatatttaaaaatacttggctcatgtagaatatataggaagaataatgtgagcttaaatcaattttctcttagaaaattttgttggaaaagcattacttgttttcattcacatttttataatggaaattggttcctatccctaatctgacttaatggaaaggaagatcaagttcttgacatatctgataggatagcaacacaatttgc

SEQ ID NO: 493638 - DNA, 429 bp, Homo sapiens
gtgcccacccagattaaggatgcctctgcctttcccagtccactgactcaaatgttaatctcctttggcaacaccctcacagacaaacccagaaacaataccttgcatccttcaatccaatcaagttgacactcagtattaaccatcaggagtacttcaatagttattaaatgtrtggaggcttactttatgttctaacatatagtccgtcttgaaaatgtgcatgacaaaaccacggccaacataatactgaatgggaacagatggaagcattacctctgagaattggaataagacatggatgcatggatgcccactctcaccactcctctttaacacagtactggaagtcctagccagagcactcagacacgagaaagagactatatcagtaaagagaaatccaaactgtcactgtgtgctgatgat

SEQ ID NO: 493639 - DNA, 429 bp, Homo sapiens
gtgcccacccagattaaggatgcctctgcctttcccagtccactgactcaaatgttaatctcctttggcaacaccctcacagacaaacccagaaacaataccttgcatccttcaatccaatcaagttgacactcagtattaaccatcaggagtacttcaatagttattaaatgtgtggaggcttactttatgttctaacatatagtccgtcttgaaaatgtscatgacaaaaccacggccaacataatactgaatgggaacagatggaagcattacctctgagaattggaataagacatggatgcatggatgcccactctcaccactcctctttaacacagtactggaagtcctagccagagcactcagacacgagaaagagactatatcagtaaagagaaatccaaactgtcactgtgtgctgatgat

SEQ ID NO: 493640 - DNA, 429 bp, Homo sapiens
gtgcccacccagattaaggatgcctctgcctttcccagtccactgactcaaatgttaatctcctttggcaacaccctcacagacaaacccagaaacaataccttgcatccttcaatccaatcaagttgacactcagtattaaccatcaggagtacttcaatagttattaaatgtgtggaggcttactttatgttctaacatatagtccgtcttgaaaatgtgcatgacaaaaccacggccaacataatactgaatgggaacagatggaagcattacctctgagaattggaataagacatggatgcatggatgcccactctcaccactcctctttaacacagtactggaagtcctagccagagcamtcagacacgagaaagagactatatcagtaaagagaaatccaaactgtcactgtgtgctgatgat

SEQ ID NO: 493641 - DNA, 655 bp, Homo sapiens
tattatactaacattgcataaacataaactcaaaaccaaaaaaaaaattaaagttagggatgagagagggagggatggagattttacagattactggcaaataataaaatttgaatgattttacaacagcaaaaatagaagggctatgccagtggagtgacaccttcaaaaaactaactctaaatgcagaatctaaacccattaaatatatgtttcaagaaataaagcaaaatayaactattttcatattaaaaaacgaaaaaatcagaaagttgttccaccagcagatcacactaaaagaaacataaaacaaggtgtctcaggaagaatgaaagaaatctcaaatggtagattttagattaaagaaaaatttaaaaaatttagaaactatatgggaaaatttaagtaaatattaactatatagaataaatagtatttaaattgttgtgtagcccagcgtaaaataagaattaaattatatgacaacagttacatgtcagccaggaaagtgagttatatagcagtattctgagagtcttctctagtttaggaggagaaggacatgatagattaattttacattttgggaaggggatttgtgtatcataatttatcagataactaaagtgataataatagagtaaatacattctat

SEQ ID NO: 493642 - DNA, 655 bp, Homo sapiens
tattatactaacattgcataaacataaactcaaaaccaaaaaaaaaattaaagttagggatgagagagggagggatggagattttacagattactggcaaataataaaatttgaatgattttacaacagcaaaaatagaagggctatgccagtggagtgacaccttcaaaaaactaactctaaatgcagaatctaaacccattaaatatatgtttcaagaaataaagcaaaatacaactattttcatattaaaaaacgaaaaaatcagaaagttgttccaccagcagatcacactaaaagaaacataaaacaaggtrtctcaggaagaatgaaagaaatctcaaatggtagattttagattaaagaaaaatttaaaaaatttagaaactatatgggaaaatttaagtaaatattaactatatagaataaatagtatttaaattgttgtgtagcccagcgtaaaataagaattaaattatatgacaacagttacatgtcagccaggaaagtgagttatatagcagtattctgagagtcttctctagtttaggaggagaaggacatgatagattaattttacattttgggaaggggatttgtgtatcataatttatcagataactaaagtgataataatagagtaaatacattctat

SEQ ID NO: 493643 - DNA, 655 bp, Homo sapiens
tattatactaacattgcataaacataaactcaaaaccaaaaaaaaaattaaagttagggatgagagagggagggatggagattttacagattactggcaaataataaaatttgaatgattttacaacagcaaaaatagaagggctatgccagtggagtgacaccttcaaaaaactaactctaaatgcagaatctaaacccattaaatatatgtttcaagaaataaagcaaaatacaactattttcatattaaaaaacgaaaaaatcagaaagttgttccaccagcagatcacactaaaagaaacataaaacaaggtgtctcaggaagaatgaaagaaatctcaaatggtagattttagattaaagaaaaatttaaaaaatttagaaactatatgggaaaatttaagtaaatattaactatatagaataaatagtatttaaattgttgtgtagcccagcgtaaaataagaattaaattatatgacaacagttacatgtcagccaggaaagtgagttatatagcagtattctgagagtcttctctagtttaggaggagaaggacatgatwgattaattttacattttgggaaggggatttgtgtatcataatttatcagataactaaagtgataataatagagtaaatacattctat

SEQ ID NO: 493644 - DNA, 630 bp, Homo sapiens
tgtattatactaacattgcataaacataaactcaaaaccaaaaaaaaaattaaagttagggatgagagagggagggatggagattttacagattactggcaaataataaaatttgaatgattttacaacagcaaaaatagaagggctatgccagtggagtgacaccttcaaaaaactaactctaaatgcagaatctaaacccattaaatatatgtttcaagaaataaagcaaaatacaactattttcatattaaaaaacgaaaaaatcagaaagttgttccaccagcagatcacactaaaagaaacataaaacaaggtgtctcaggaagaatgaaagaaatctcaaatggtagattttagattaaagaaaaatttaaaaaatttagaaactatatgggaaaatttaagtaaatattaactatatagaataaatagtatttaaattgttgtgtagcccagcgtaaaataagaattaaattatatgacaacagttacatgtcagccaggaaagtgagttatatagcagtattctgagagtcttctctagtttaggaggagaaggacatgatagattaattttacattttggkaaggggatttgtgtatcataatttatcagataactaaagt

SEQ ID NO: 493645 - DNA, 642 bp, Homo sapiens
ctgagctaacactcaaaacacagyaggcactccttcccactcttctctcccctttccaaaggcagagaagtttaccctgtagccactgccaccctaggccataggtgtactgctggattgcctctgatgttcccttaaggcccaagggctcttaagtcagcttatagtaaatgatgcctggtcttggactcactcttcaaggtcgaaaaggtataggagtcaggaagtctttgccactggatactatacttatttttttggtgttctggaacataaggtatcaataagcattcctaattatctctcaatataaaatgaaatgcataaaaatctccttataaagttatgctaattattacataagcttccttgttgtacctgcttctcagtttcttgagaatcatcagccatcacctccagtgatcaagtaagaaatatccaaataaccaatatctctgacaggtattacagtagacttaaaaacctgaggtttatttattttgctcacagatgatggatattggaaacttcattaattcttaagaggccagaaaaaaatgtattattgctttcaggtacataggagctaaaagttttcaaacatcaatgagcttcagaatatatatcaagataaaatcaatg

SEQ ID NO: 493646 - DNA, 642 bp, Homo sapiens
ctgagctaacactcaaaacacagcaggcactccttcccactcttctctcccctttccaaaggcagagaagtttaccctgtagccactgccaccctaggccataggtgtactgctggattgcctctgatgttcccttaaggcccaagggctcttaagtcagcttatagtaaatgatgcctggtcttggactcactcttcaaggtcgaaaaggtataggagtcaggaagtctttgccactggatactatacttatttttttggtgttctggaacataaggtatcaataagcattcctaattatctctcaatrtaaaatgaaatgcataaaaatctccttataaagttatgctaattattacataagcttccttgttgtacctgcttctcagtttcttgagaatcatcagccatcacctccagtgatcaagtaagaaatatccaaataaccaatatctctgacaggtattacagtagacttaaaaacctgaggtttatttattttgctcacagatgatggatattggaaacttcattaattcttaagaggccagaaaaaaatgtattattgctttcaggtacataggagctaaaagttttcaaacatcaatgagcttcagaatatatatcaagataaaatcaatg

SEQ ID NO: 493647 - DNA, 621 bp, Homo sapiens
gcttactgtctgcgctgtaaatcttttgtttactttcaacctatctatgtcttttaatataaaatgtgtcacttgtagacagcatatatttgagtcattttatatctattctgtcagtctctgtctttccattagaatgtgtttaaactattttcatgtcatataactaataagctataatttacacctgccattttttatattygtttcctatatgtcttatgtccttttggtttctctgtttcagagttcttgattactttcctattaaacatatactttttggggatatatcattttgattaccttcttgtttatttcactatattttaaaaaatattttcgttttggcttccctgaagtctcagttagcttttaaacaattcaatttagttcagtttaacacaaatttaatttcaatagtatacataattttcttgcattgtagctttgcccctcatttttgtgctattattgtcaaacaaattgcatcttttgattaacacatttttatatttgttgctgcatgtagctgtgttttaaattacgtagtaaaagaaaagggctgtaagcaaaatacatttacaccaccctatccttataatgtttaattttaaatgt

SEQ ID NO: 493648 - DNA, 621 bp, Homo sapiens
gcttactgtctgcgctgtaaatcttttgtttactttcaacctatctatgtcttttaatataaaatgtgtcacttgtagacagcatatatttgagtcattttatatctattctgtcagtctctgtctttccattagaatgtgtttaaactattttcatgtcatataactaataagctataatttacacctgccattttttatattcgtttcctatatgtcttatgtccttttggtttctctgtttcagagttcttgattactttcctattaaacatatactttttggggwtatatcattttgattaccttcttgtttatttcactatattttaaaaaatattttcgttttggcttccctgaagtctcagttagcttttaaacaattcaatttagttcagtttaacacaaatttaatttcaatagtatacataattttcttgcattgtagctttgcccctcatttttgtgctattattgtcaaacaaattgcatcttttgattaacacatttttatatttgttgctgcatgtagctgtgttttaaattacgtagtaaaagaaaagggctgtaagcaaaatacatttacaccaccctatccttataatgtttaattttaaatgt

SEQ ID NO: 493649 - DNA, 621 bp, Homo sapiens
gcttactgtctgcgctgtaaatcttttgtttactttcaacctatctatgtcttttaatataaaatgtgtcacttgtagacagcatatatttgagtcattttatatctattctgtcagtctctgtctttccattagaatgtgtttaaactattttcatgtcatataactaataagctataatttacacctgccattttttatattcgtttcctatatgtcttatgtccttttggtttctctgtttcagagttcttgattactttcctattaaacatatactttttggggatatatcattttgattaccttcttgtttatttcactatattttaaaaaatattttckttttggcttccctgaagtctcagttagcttttaaacaattcaatttagttcagtttaacacaaatttaatttcaatagtatacataattttcttgcattgtagctttgcccctcatttttgtgctattattgtcaaacaaattgcatcttttgattaacacatttttatatttgttgctgcatgtagctgtgttttaaattacgtagtaaaagaaaagggctgtaagcaaaatacatttacaccaccctatccttataatgtttaattttaaatgt

SEQ ID NO: 493650 - DNA, 436 bp, Homo sapiens
cagagaacatgtcactgacaaacatttatctcttttttaaaaaacagtattgtattagtcagtgttctcttagagggacagaactaatagaatagatatctacatgaaggggagttttttaggagaattcacacacacaatcacaaggtgaagtcccacaacaggccatctgcaagctgaggaaccaggamgccagtctgagttccaaaacctcaaagtagggaagcggataatgcagccttcggtctgtggctgaagctcaagatcccctggcaaatcactggtgtaagtcccaacagtccaaaagccaaagaacttggggtccaatgttcaaaggcaggaggcatccagcacgagagacatatatatggactccagaagacttagccagtctagtcctttcacgttcctctgcctgcttttatcctagccacac

SEQ ID NO: 493651 - DNA, 619 bp, Homo sapiens
tttattcatttaacagatacacattgttaaattgcgatcctgaattctgcaacaaatccagtaaaagatattgtctttgccttggaagtatgcataagcatattgaggaggagaacagttttataagtcagtagttacgataaaagttctatgatatgcatttgtacaaagtgccacagagtataaactctgcaaaggagagccaagggggaattctattagactttccctccccacgagcacaatgtattacagaatttagtataggcaaaacatttttccctctagatggcatgggtcctacctagattgaaaggactaagaacggcacagagctcagtgctcagtcttctaaaaaactaataaaatattaagtctcacaatgataagcatggtctatttattttttcctgagtggaacaggaggcaacaggaaaataagtttttatggtgtgttcagcaagatgttactcctctttttgtataagataggkcctattgctgacgttttctatatgtcacacagcattttatgtcacacagttcctcagcgtaaccttacttgcccatgctccatattgaatcatggacaatttaactctgacagtaatctcacttc

SEQ ID NO: 493652 - DNA, 586 bp, Homo sapiens
ctgggaactgtgctctacgcgcccttctagctgaaccaagaaaaaacattgagaatgattgcatgcaagtattcatgaggtcaatttaatgacgaaccattctgtgaccttaaatatgatagattctggaagaagacacamtatttgtaattattatatataattatttcatgcttaagccagtgatattcaaacatattttaaggaacaacaacttgcagtggccatcttattgtgattaacaaaagattacctgaaatgtgctttcatcacatttgcctggcaggcttctttgacatttagctctcaatttatacattactttatcagccaggcctttcctaaccatcaaaagcagtatctctttattacatagcttcatttttttgctataacatttattttctgggccttttgagaaagctgtacagaatatcagctaaatattgagaatatgaaataaaacatgtatttttaggaaataatatttgtgttaaattaatattgaactgagtttgccataatccagcagaattatctctattcccccatagtgttgccgcctatatgtagtgtagatagagag

SEQ ID NO: 493653 - DNA, 634 bp, Homo sapiens
acattactcacaagaataaaacattcatggtcatgcatgcaaaaatctccctatgtaggcgtggtattatcatattacccaagttgattaatgcttcagttgcaaactaaaggcaaaatattcatataactttctgtttctacaagtaaaatgaaaataaaatagctttttccaaagttacrcgaaatgtcaagtaaaagtggtttgcaaattaaattaactagaaaattgcctcagttttccagtgacacaatctcattttcttccctgaattcttatgagataaaaaatggtcttattattaactcttactttatttgactacaatcaaaaggaaagtgaattactttttaaaaaatgaaatggttgtaattgtccaaagagaaatttccaaatggaaccaaatgcaaaatttgtggtaaatatacaaaactctcttgaagctaacaattaaatgacctacttcgcatgtactttaatagttttagtcaatcttgttataatttacacagaacttcattactaattccagcaaatcatagaaaatcaaattcaaagaaatcatagaaagactttaaagttacctatcttaacatagaattcactcattagctttcattattgtttcttctgg

SEQ ID NO: 493654 - DNA, 176 bp, Homo sapiens
gaacagaaaaatgatagatttaatgagttctgaagtgtgttaatcaagttaaactgcttatgcctcattgtgccgtccacttaagctgtgactattaaaataagttacratccataatttattacctctgtcctttgagaggctaattagctttcctacaattaagcactattcac

SEQ ID NO: 493655 - DNA, 500 bp, Homo sapiens
caccagaaggtctaaccttctatagttctaagaaaaactgcaggasagagccaggatgtgggagctgtccttcccagtgggtctcagagacacatttttgatggtggtggtgggaaacagaaccactacttatgtcaagagactttaagccaattaaaactaagctccttttaaaatttttttgagtactaaggagatttttaggtggtctagctctcttggaatacaaactacaaactattttctttggctgctctttacctcttataagtcaatgagaggattaatggtaaaaggctttatttctgatctttggaggacaagggaaagctaaacaggagaactagatcaatatagcattgtttcttctcaaaaggacttagaatcattgggcattaaatatgggagccctcagcatcacctgggccaagtttcatagtttatagtcagaagtactaagggtcactcaaaccactagttagagggagcatagggtttag

SEQ ID NO: 493656 - DNA, 500 bp, Homo sapiens
caccagaaggtctaaccttctatagttctaagaaaaactgcaggacagagccaggatgtgggagctgtccttcccagtgggtctcagagacacatttttgatggtggtggtgggaaacagaaccactacttatgtcaagagactttaagccaattaaaactaagctccttttaaaattttttygagtactaaggagatttttaggtggtctagctctcttggaatacaaactacaaactattttctttggctgctctttacctcttataagtcaatgagaggattaatggtaaaaggctttatttctgatctttggaggacaagggaaagctaaacaggagaactagatcaatatagcattgtttcttctcaaaaggacttagaatcattgggcattaaatatgggagccctcagcatcacctgggccaagtttcatagtttatagtcagaagtactaagggtcactcaaaccactagttagagggagcatagggtttag

SEQ ID NO: 493657 - DNA, 586 bp, Homo sapiens
cagctgcaagttagtaaggcatataaggtaaggctttaattatagatctatcctgccgtaaaagtgcttaattagagtcatgaaaaatcttacttgaagcaggatttttactgaagatttaaagaattaagaaaaatctctttttccattcatttttctttttcttttgttgatttttatccatcctgctatcctactttcttcctattacaaggactaacatagggaaaatttagtctgttaatagctacccttttgactggttattgattttcacttctttttttttttttttttttttttgagagggagtcttgctgtgtcacctaagctggcaagctagagtgcagtggtgtgatgtcagctcactgaaacctctgccccctgggttcaagcaattctycctgactcagcctcccaagtagctgggattacaggcacccgccaccacacccggctaatttttgtatatttagtagagatggggttttcaccatgttggccagactggtctcgagctgctaacctcaggtggtccactcgcctcgacctcccaaagtgctgggattacagttgtgagccatca

SEQ ID NO: 493658 - DNA, 447 bp, Homo sapiens
cagcacctgattaaagccttcttccttggcaatacttgccttctcagccgttggctttctctgcagtgagcagcaggacctagaacaaacccttggttgttcggtaacactttgatttccaaacagaccattgaatagacattcagtatgtatttgcagaattaatacataatatgaagccaaaatcttttcagaatattatagaacaggacaggcactaggtgatgagaacttcgctaggacaggtactgcatcttgatgtatatatcrtcaccttgaggtgggatagagatcaaatctagtagacaacattatattgagccctaattacaacttgaatgatacctaccgtaatgtaaaattttcagattaatttagtttcaacattactttttagattctcttccaaaagtagagtgacgatagttgcctgatctatacaaaagt

SEQ ID NO: 493659 - DNA, 556 bp, Homo sapiens
ctgctgatataagtgtttagtagagccaagcattgccccttattctacacatttaatgttcaaaggtagacattattgaccttatttttacatggaaagatgaagaaactcaaagaagttaatgacctattaaggacacagtaaatgaaggagctaggattcaaactcagggtctgtctgagctcagagccaaagctctttcctttacacagtgccacagacactgaggccaagtatattttcagcaaccaaaacaattccaacagtttcatttttgtgctattttcccaaactataaatgttctcttttagtaacagcattgcaaagtattgagactgttgagatcattctatgaatgtcacattttgaaagcacttaattgctggtgtagtgataactcacatttcattgaaaattatttggggatttttcttttctttttccacacaaagattcaattcaacaatgaggtaagaacatctttaactatacaaagagctaatttgttacatacatatctgtactygatgagattatcagtgaagctttggtgga

SEQ ID NO: 493660 - DNA, 607 bp, Homo sapiens
aatatttccacacagtcccagcatttaagagcttccagggtcctcccaagtccattttctgcccatgattattctgctttcagtaygtttagaagctaatttctcaattccattgtgtgggtgcatagtaatgcaggagtttggttatgaaatatataaagaaagggctaaaatttgactgtaaaaatattttttatccatatctacctgtttgatagcatttcccattattccaagctataaatcagaatatggttacaagatattggcaggggtgggggaagctaggaagaagaggaatgaattccaagataacaaaactgaacatttattgagggttagtacatgccagctacttagttgagcgatttgtctacacattctcagataatcctataattattttctaaagtggaagtcatcccaaatttatgatggcaaaaagaggctcagagggtctgtgtcagttctccaaagccatatagcatttaaatggaaaagcaggtatataaaacctaaacctttcactccaaatctcacatttcttccacctaactctgctatcctcaataatcaatagtccagattcaatgatatagctattaga

SEQ ID NO: 493661 - DNA, 491 bp, Homo sapiens
gagagtcattagtgtagctctagacataggcaattgcccagactttaaactgttttggaggcagcttttkggtcagtagaaggaacagtatcactcaagctagcccaagtggtctctagctgtgtctccatgagtgcagaattatttttttcccctctgtagtaattattattagattctaccaagaaatgttgttttccctagtttataatagttaatatttatgaaaaattttccataggtcagcatatcaactatgattcctttggttacaagtgatagaaatcccaacccaagttactcaggtacagagagaaatttattgcatcatgtaatcaaacttgagcgtaacggaggactagctggctttgaggatgattcagaccaaagatcagcactctcttcttctcccacctccacctctttctgtatattgtcatcatttttcttactgtgatctggcttcttccataggctgtttggagctcata

SEQ ID NO: 493662 - DNA, 491 bp, Homo sapiens
gagagtcattagtgtagctctagacataggcaattgcccagactttaaactgttttggaggcagctttttggtcagtagaaggaacagtatcactcaagctagcccaagtggtctctagctgtgtctccatgagtgcagaattatttttttcccctctgtagtaattattattagattctaccaagaaatgttrttttccctagtttataatagttaatatttatgaaaaattttccataggtcagcatatcaactatgattcctttggttacaagtgatagaaatcccaacccaagttactcaggtacagagagaaatttattgcatcatgtaatcaaacttgagcgtaacggaggactagctggctttgaggatgattcagaccaaagatcagcactctcttcttctcccacctccacctctttctgtatattgtcatcatttttcttactgtgatctggcttcttccataggctgtttggagctcata

SEQ ID NO: 493663 - DNA, 491 bp, Homo sapiens
gagagtcattagtgtagctctagacataggcaattgcccagactttaaactgttttggaggcagctttttggtcagtagaaggaacagtatcactcaagctagcccaagtggtctctagctgtgtctccatgagtgcagaattatttttttcccctctgtagtaattattattagattctaccaagaaatgttgttttccctagtttataatagttaatatttatgaaaaattttccataggtcagcatatcaactrtgattcctttggttacaagtgatagaaatcccaacccaagttactcaggtacagagagaaatttattgcatcatgtaatcaaacttgagcgtaacggaggactagctggctttgaggatgattcagaccaaagatcagcactctcttcttctcccacctccacctctttctgtatattgtcatcatttttcttactgtgatctggcttcttccataggctgtttggagctcata

SEQ ID NO: 493664 - DNA, 491 bp, Homo sapiens
gagagtcattagtgtagctctagacataggcaattgcccagactttaaactgttttggaggcagctttttggtcagtagaaggaacagtatcactcaagctagcccaagtggtctctagctgtgtctccatgagtgcagaattatttttttcccctctgtagtaattattattagattctaccaagaaatgttgttttccctagtttataatagttaatatttatgaaaaattttccataggtcagcatatcaactatgattcctttggttacaagtratagaaatcccaacccaagttactcaggtacagagagaaatttattgcatcatgtaatcaaacttgagcgtaacggaggactagctggctttgaggatgattcagaccaaagatcagcactctcttcttctcccacctccacctctttctgtatattgtcatcatttttcttactgtgatctggcttcttccataggctgtttggagctcata

SEQ ID NO: 493665 - DNA, 421 bp, Homo sapiens
agattctggcagtcatgctttgcaccttttaattgctgagcctatgatacttaaatttacttttattgcactttgggatccatcctgaatactcattctatttcgtcaactccacagccagcmtaggcttcataacttgcttgcatttcgtgcatggtagcttattagaatgacacatataatgatagagactgagggaaattctcccacttcttcagtctgccttatcacttttgcaggcaacatcactttatgagcacttcagccttaagtcagtggcatctcctagatttaaaaaatcagacatcattcaattgccttgctatttgaagagaaaacaataacttcagcgtaatgacgtttcttccaagatggctgttacctcaggctgccaagaatcctctcattaagaaaaagtgac

SEQ ID NO: 493666 - DNA, 616 bp, Homo sapiens
gaatgattttatataaatgttaatgagtccccaacaattcaagttttctttaaactccttcgtaagtattcctaacttcagactctccttttttcaactattttgcatattaatagcaattatcccacacggggagaggaaacagcatgccaarccctgctttagaatcattagctcatcgtaatattaatcctgaacacaaccacagttactacgtcaacctcataaaaaaaaaaaaatgagtctcagcgatgctaaataacttgctaaagtttggacagtgattttgaggctaagttaggattcttttcttttttctttttttaaggcagtgtctcactccattgctcaggctgaagggcagttgctcaatcatggctcactgcagcctcgaacccccaggctcaggtgattctcccaacttagcctcctgagtagcttggactacaggtgtgcacaaccaagtccagctaatttttgtattctttgtagagatggggttttgccatgttgcctaggctgttcaacttctgggctcaagtgatcagcctaccttggcctgccaagttgctggaattacagacgtgggcaactgcacctggtccctgagttggga

SEQ ID NO: 493667 - DNA, 561 bp, Homo sapiens
ctcaggcagatagaagaaataaaatcaagacctatcatatttagagggaaaaagtaacaaatgtggaatttccaggaattccttggggagaagggtcctaatacaaattgccacttctttaatgtatacaaaagacatgaaaaatgtccctttggtcttaaagaaggctggctcctggttcatgagagctgccattgcctgcactagctggtgatcactgccagaatacatacaaaaatgcatrcagtcaacctgttagttttattgctggtgtattagtcagggtcctctagagggacagaactaacggaatatatatatatatatatgtatacaagggggagtttattaagtactaattcacataatcataaggttccacaataggccatctgcaagcttaggagcaaggacagccagtccgagctccaaaactgaagaacttggagtccaatgttcgggggcaggaagcatccagcatggcagaaagatctagactgggaggctagaccagtttctcctttcacatttttctgtctgcttatattcttgctgtgctgg

SEQ ID NO: 493668 - DNA, 599 bp, Homo sapiens
ctcagtctccctagtagctgtgactagaggcatgtaccaccataccaaggtagttttttttatttttattttttgcagagacaaggtctcactatgttgctgaggcttgcctcgaacttctagatcctctcacctcagcctcccaaagtgctgggattacagatgtgagacaccacatccagccttgaaattcttaaaaaagtcaacccaagagtcatttttgtttaaagtttggaaagacatgcctctatggactacctagtctatatcctgatagctaatctaggtccttctagccctttacctgtgtgtctaggctattatctttataccttgatgctggtagggcccctacaacttgagaaaaagactgcccaaactgactccagcttctacaatatggtttgctagttaaatttgtagctgctcgtcagcaggtaagagcacaagcagtaatcaatgactgagctctactttctcttgggtactgtggttgggaayattttcattcaatcactcataaaatatttattacacataaaccataagataggcacttggctgtgctttggggatttgagtgtgagcaggatgaagtt

SEQ ID NO: 493669 - DNA, 506 bp, Homo sapiens
tggacagaaaacctaggtccccagctctagtgagctgacatcctggaatcagcgagctctctttggtgttgaactttcagtctgggcattttgagcaatttaaaaaaggtctcataatggtggatacatgtcatatatccaaatctatagaatgtacaacaccagccaggcgcagtggctcacaccagttatctcagcactttgggaggccgaggtgggcaaatccggatcasttgaggtcaggagtacgagaccagcctgaccagcagaacgaaaccccatctctattacaaatacaaaaattaactggcgttgtggcaggcacctgtaatcccagctacttgggaggctaaggcaagagaatcacttgaacccaggagtcggaggttgcattgagccgagatcacatcactgcactccagcctgggcaacagagtgagactctgtctcaaaaaaaaaaaaaaaaaaaaaaaaaaagaaaaagagaatgtacaacaccaggagtg

SEQ ID NO: 493670 - DNA, 506 bp, Homo sapiens
tggacagaaaacctaggtccccagctctagtgagctgacatcctggaatcagcgagctctctttggtgttgaactttcagtctgggcattttgagcaatttaaaaaaggtctcataatggtggatacatgtcatatatccaaatctatagaatgtacaacaccagccaggcgcagtggctcacaccagttatctcagcactttgggaggccgaggtgggcaaatccggatcagttgaggtcaggagtacgagaccagcctgaccagcagracgaaaccccatctctattacaaatacaaaaattaactggcgttgtggcaggcacctgtaatcccagctacttgggaggctaaggcaagagaatcacttgaacccaggagtcggaggttgcattgagccgagatcacatcactgcactccagcctgggcaacagagtgagactctgtctcaaaaaaaaaaaaaaaaaaaaaaaaaaagaaaaagagaatgtacaacaccaggagtg

SEQ ID NO: 493671 - DNA, 506 bp, Homo sapiens
tggacagaaaacctaggtccccagctctagtgagctgacatcctggaatcagcgagctctctttggtgttgaactttcagtctgggcattttgagcaatttaaaaaaggtctcataatggtggatacatgtcatatatccaaatctatagaatgtacaacaccagccaggcgcagtggctcacaccagttatctcagcactttgggaggccgaggtgggcaaatccggatcagttgaggtcaggagtacgagaccagcctgaccagcagaaygaaaccccatctctattacaaatacaaaaattaactggcgttgtggcaggcacctgtaatcccagctacttgggaggctaaggcaagagaatcacttgaacccaggagtcggaggttgcattgagccgagatcacatcactgcactccagcctgggcaacagagtgagactctgtctcaaaaaaaaaaaaaaaaaaaaaaaaaaagaaaaagagaatgtacaacaccaggagtg

SEQ ID NO: 493672 - DNA, 564 bp, Homo sapiens
tgtactttagattatattcttggtcctacctcatcactggaactcaaaatcttgggtaatcttgtgcttcctggacatccttggccaataacttgggtgcgagtaccctgtgctttgtaccctacaacctcaggccatccctgctcactcctattctggcttttcctacgcaggctggacaagaacaaggaaggacagagagtgacattcaacctgtgatagtgccagcgagagcacttgaagaaacataaagcctgtcatcagctctgtcattacaaactaatctccatcctaagatgtgatgtattttaagacagcataaattttaaaaatgtctttggaggaaaaataataaatgtgaacttagatttatagggcattgaatttcagaaacgtcaaaatgttctctttaaagaaaattgtgccttagaactggggaaatgcagttacctgttagcattctgctacccacccacctgcctgctgcttccttgtgcacctsgtgacagaaaaggctggtttgctcggcaacatcaggaaatagccttgagtttctccatcatg

SEQ ID NO: 493673 - DNA, 641 bp, Homo sapiens
acttcctgatatttacctgtattcaagatgagtcaggttgtcaggctgctaatttctggacatgtgagttatttctgtagttttgctccaatataccaccaaaaataagatagatcctttactctgccagtgccatcttcagtggcaggtgtcaactgacagatttgaatagacaatttatatgtgtattatttgaaacctagagcatttcctgtagttagctctctcctctacaatgttttgcaaacattacaagaagaacggacccatctcaaaaggtaaccggaaggtaacttgaagctgttatttgcttgtggggagatggggctgtggtcaggcaatggaagtggtggatagctggatagatggatagctggatgctcagggctttctgcagcagcactgggagaagctctagcattgaggacggagtggagcccaagagggacattggaaagccctccatcaaaggtagatgagacctccatgataacaggacattagtatagagactggtttggtggaagaagttgccactgctgaggtgccaattraaagaggctgttgtgtcctggagaaaggatgaacaagggtacgcttgtgcccactgttgattttctgtggcaccccagcacagagaa

SEQ ID NO: 493674 - DNA, 664 bp, Homo sapiens
accagtttcaccttgaaatcccccacccactcacccttgagtcccttcctccagcaagatccaatatcctaagttctacaattcaggacaatgacccacagggtctcctgacagaccaacaaccacaggtagggtcaactctatgctccaggccagaaggcagccactggagatgagaactttgccccagtgccaaaaattcatcatttttgttccgttgttggttgaggagaaatgtggagtcttgataagacaaggtagtgagaatgaggagggggccccagggtggaggagaacaattgttctgacagaaggctaactatgaacaacctgtttgcacaacattctgttctcaaatacctcactctgccaagtaatcccagcagcattaccctatctgcatgtagcagctccagcacgaccctataaaacttccctccagcccctgcctctttgcagacagccccttctctgctgtatgacccattgcactcttgcaacatatcgtcttactttttttctaataaatttgctttctttaactcastgctgttttggtaaattctttaactgtccgcaatgctagccccagccagtcacaacccacaacaattagtcaagaaagaaaaatataagaagtggcttctacttctttaaaaagata

SEQ ID NO: 493675 - DNA, 380 bp, Homo sapiens
aatcttaaatagtttgattttttttttaagtcatgcccatatacatgggtgaagatgaaaatattgatctttttctctttcctgcctttccagggaaaaaacacttttgaaaggaacaatttggtgatggcttgggaaaatataaaggaatccatttgatccagagcatttaaagtggttgaaacaaaatctttagagtattttacattgtcagggagattyacctgatggtaaaccgattgcaaagagcctctggagattctttacaattatctctcagttttcttctgcctggtgatatgtataagtgtatatacatatctgcctgagtgataggatatgaatgatatgaagatgaaaacttgcattgatcataaacc

SEQ ID NO: 493676 - DNA, 596 bp, Homo sapiens
gctgcaacccgctggggtcaccttccacgttgtggaagctttgttcttctgttcctctgcaaaaaatcatgctgctgcttactctttcagtctgcaccacctttaagagctgtaatattcaccacgaaggtccgcagcttcattcctgaagtcagccagaccatgaacccaccggaaggaacaaactcgggacacaccaacccactctggattggattttacctgagcaataaagagacttttactatggtaactcactaagatttaaggatttccctattacagcaaccactgtagtatcatttttaactaacagtaaccttcagttaatcccaaatgtaatgtgttacttttatagaacaacttaataaaaatatataatttccaaatagcaggcagygtcctcctaacaaagattttacttgtatgcatttcagttctttgtatacttaaaatgcatatacatttctcaaactacaaaatactgctatctttcttgctagtctgatctgggatcaaacttctagccgattctcctagctgcctacatcaatatatttatcctaaggcaacactcctgtaaactgtgtttttgg

SEQ ID NO: 493677 - DNA, 323 bp, Homo sapiens
ggacacaccaacccactctggattggattttacctgagcaataaagagacttttactatggtaactcactaagatttaaggatttccctattacagcaaccactgtagtatcatttttaactaacagtaaccttcagttaatcccaaatgtaatgtgttacttttatagaacaacttaataaaaatatataatttccaaatagcaggcagtgtcctcctaacaaagaktttacttgtatgcatttcagttctttgtatacttaaaatgcatatacatttctcaaactacaaaatactgctatctttcttgctagtctgatctg

SEQ ID NO: 493678 - DNA, 480 bp, Homo sapiens
cagtaagttgtgcagaactattatctgtctcaccttcttatgaatgacctttcctattkataaaagaccttgaaatcatttcaaaatgaaaatcatcaaaagacacacagttacaattgaccatttctgatatatccacttttagggaaaaatagaacatcaactatatcagttttttcatgaaatctctgcataaaatatgagtcatgaagcatttcatgccacttgtgtggtatttataaaataaaagatccaattagaagtgatgaatgtccaatatacttagagaaatcacatcttcatgaaaacatgacatgggctatagagaaaatattccatctgcggaatgaagcagaacatactccaaatttaaactagaataggttacaatagtatgaatattacatacatatgtgctttaaagaattaaggcatctgttacatttattttctatttctttgtttttagacaggggtaga

SEQ ID NO: 493679 - DNA, 478 bp, Homo sapiens
ttaacctaaacataaacagggattgactaagcagaatagagcaaaggaagtggtgtcttggtggattttggctgatgggcgcaggggtcaactggaaggtgtcttgagtaccacgtgggctaaggaatgtgttggaggcaaacaaaatgcaagagaatactgaaaaaacattccaatacctagaaatttgctctgacgctgcagaatgcttcttaaaatttttagtagcaggaacctaaaacacgaagtctwtgcacttttctctttatgttcgctcataaagggtgattctagaacttctatgatagttgtggtagtgcagtgtagtcatctgtgacttatctatttgatagcataattccagatgaccagaaatgccagttggcccgaactgaacaaattttactgccagatgtgcagtcctaatcacaatgtgtgcattctattcagcaagcagcaatgtttcttgcttgagcaa

SEQ ID NO: 493680 - DNA, 560 bp, Homo sapiens
ttagtttactgaaggtcaattctgtgctgcaaattgtgaagcatctattcagatggtcagagatctgtcgcagaccctgaatcaataaatattatctcttatgctatggaagctgtcccagcccattcagttagctaaataaggaacaaagcagttgtcctctcacrgaaaattaagagataaacttaactgatccaattaaaaataatataacttgaaaaataaaagataaacaatcttagttttctaacttcttaattttaaagggatatgaactattaatatctaaagtatatcctagattcgtagggttacaggtaaaagatatctaattctcatttactgctgtccttttaaattattttcttaataaataagtacagtttattctaacatacatatttcatactgctattgttacaacatgactatttatagtaagtttaataatgtaggaggtagagcaatgtggctgaatagaaccccgagtgattgtccccacatcggaacaccaaactgaacaaatattcaggcaagaaagcacattcataagaaccaaa

SEQ ID NO: 493681 - DNA, 578 bp, Homo sapiens
ctgctgtgttttgactactatctgctctcaactaaatccctcttcacgacttggcctcagctctcagcccttactgccttgtccactgtgggtcacaaccccttctccgagcagtctgcactccttgatcaatatggaggtatagagaatgcttcctcttgccctgatgtagagcaaatatgaagactcatctcagtctgagagttcattatatgatcagttgaggccctgttcccactgcattacatttcaacttatccttctgtgcaattctgctttcttcattcaaccaccttttacaaacataattgatggaagtgartagagaactggtacatgggaagagccagagaacagatattcaggccttattgattctgattgcaagttctgttttttctacttcaccttattttctaggccagatattaccttgtcttgcagtttgtaatgttttgtaaataaaccatttgtgatgtgttcacctttgattttaggcttagggccagtctgtagattaataaacatcagccattaataaacatcagctaatattgctgacgaatgcagaaggattt

SEQ ID NO: 493682 - DNA, 473 bp, Homo sapiens
ctgctggcccttgtgaacaagaaccgatcccattgccaccacactacaaaatgctttgactaacaccaccaatcagagtgtagtgactagtggtccaggagcaccttgccccaccaacacagtggactcctaaccttgaggagccagagaacaaagtcagggactgayacaagcccccagatattgaacatgtagtccaggagttgaaacctaagccttagcttcctaaaatctttcgaaaatgaagccagttggctggatccaccttatatcacaataaaccttcaaggtcatcaaataggataaaagaaaaaaaaaatctattttctccaaacaaccacaccacctccccagcaagggttctgaactttctgcaaagcagaaatgacagaaatttctgtcaggtcacctacaaagggaagcacatcagtctaacagtgcacatcttagcagaaatcctacgaagttgaaaa

SEQ ID NO: 493683 - DNA, 473 bp, Homo sapiens
ctgctggcccttgtgaacaagaaccgatcccattgccaccacactacaaaatgctttgactaacaccaccaatcagagtgtagtgactagtggtccaggagcaccttgccccaccaacacagtggactcctaaccttgaggagccagagaacaaagtcagggactgatacaagcccccagatattgaacatgtagtccaggagttgaaacctaagccttagcttcctaaaatctttcgaaaatgaagccagttggctggatccaccttatatcacaataaaccttcaaggtcatcaaataggataaaagaaaaaaaaaatctattttctccaaacaaccasaccacctccccagcaagggttctgaactttctgcaaagcagaaatgacagaaatttctgtcaggtcacctacaaagggaagcacatcagtctaacagtgcacatcttagcagaaatcctacgaagttgaaaa

SEQ ID NO: 493684 - DNA, 596 bp, Homo sapiens
agcccctctttctctccagagagaagaaattctgtttctaacaaacatatcctctccgagggaggcgagaaaaatccctagatgtttgcaaccctttggaatgtaaataaatggctccaggggagatgggtcgtaggcctgtttaccattcaaacatctcttaatcctgattcccagtaatttttgcttagaaagccctgattgtacagaatatgagatattagttgtttctcaacaacagatacatgatagtcttagtttactttccctgtatattatacttaggtcatttctgaatccccctgggttatttttctataaasagtaacactgttcagagtcaggctctctctactgagcttctatgctcctctaagttaatggagctgtttcaaagtaatagtattagtattctactcatttacaagatgcagttaacttctgaccaatgttagaacaccaaaatctcaacaacaacaaaaacaacaaaacagttttgttttgtttttttaaaaagaacgcccaactctctctgactctggcaaaattagagcttagaacagttttgcttttaaattgttcaaccttctttagac

SEQ ID NO: 493685 - DNA, 496 bp, Homo sapiens
tgctcacttggtcacattactttttaaatagttcttatttttcagctgttggaatgttttaatatttaataatttcacagtagttttagaggttagctgttactaatagcaagagttaatagctattgctatttaaagttctgtgctttgagaaaaaattatttcaaataggcagcatagaattcgttacaatataattggactctcagtagttgttctattgagtaatctgctattgtttacacataatttgaagtataggtcaaatttatccttgacaattaagtacagtttttcaatgttgtgttgtaattgccagtgacttgtagtatacttgttcttgcttaaataaagtagcactttttgttcgatgaatttatttccagtcrttcaaaaattttattttcagtggttaccatgtagcaatccatgagacttaaatagtatcacaaacaatgtaattacattaagcatttcatatgccagtgatatattt

SEQ ID NO: 493686 - DNA, 610 bp, Homo sapiens
ggtcagtctagtgctgtttataaggtactgtctaagtgacggagaagtctggcagctcctcctgcagttccaaagtcgatcctagaggaaaagaggtgagtacttgcttgtgttctcctagtaacataattttgtatgaactatttccattttattatagaaatttcttcaatatcatccaaaaaaatcatgttcagatttcaagatcgttttatctccttcagtcatagaggtagattcagtgaatatccaataacacactggtaaatggccttcaaagggaagtgttttagtctaaattaccagtattttgtcattgaaaaaagatcacaggttttcaccataagctccagtctccatatggggctatagcacagaaaataaaacaaaacgaaactgtccttaccagcactccattttctgttctacattgtgtgggctcaggaaaagytactggtttccatttaataatagcatggttgattaatattgcttgaagggcgaagcttccatgacctctccaggcttgccaccctctcaataccttgatatattcaccaacctggaagctcttcaaaactcattgttcaaggatttataaaaagcttaa

SEQ ID NO: 493687 - DNA, 610 bp, Homo sapiens
ggtcagtctagtgctgtttataaggtactgtctaagtgacggagaagtctggcagctcctcctgcagttccaaagtcgatcctagaggaaaagaggtgagtacttgcttgtgttctcctagtaacataattttgtatgaactatttccattttattatagaaatttcttcaatatcatccaaaaaaatcatgttcagatttcaagatcgttttatctccttcagtcatagaggtagattcagtgaatatccaataacacactggtaaatggccttcaaagggaagtgttttagtctaaattaccagtattttgtcattgaaaaaagatcacaggttttcaccataagctccagtctccatatggggctatagcacagaaaataaaacaaaacgaaactgtccttaccagcactccattttctgttctacattgtgtgggctcaggaaaagttactggtttccatttaataatagcatggttgattaatattgcttgaagggygaagcttccatgacctctccaggcttgccaccctctcaataccttgatatattcaccaacctggaagctcttcaaaactcattgttcaaggatttataaaaagcttaa

SEQ ID NO: 493688 - DNA, 610 bp, Homo sapiens
ggtcagtctagtgctgtttataaggtactgtctaagtgacggagaagtctggcagctcctcctgcagttccaaagtcgatcctagaggaaaagaggtgagtacttgcttgtgttctcctagtaacataattttgtatgaactatttccattttattatagaaatttcttcaatatcatccaaaaaaatcatgttcagatttcaagatcgttttatctccttcagtcatagaggtagattcagtgaatatccaataacacactggtaaatggccttcaaagggaagtgttttagtctaaattaccagtattttgtcattgaaaaaagatcacaggttttcaccataagctccagtctccatatggggctatagcacagaaaataaaacaaaacgaaactgtccttaccagcactccattttctgttctacattgtgtgggctcaggaaaagttactggtttccatttaataatagcatggttgattaatattgcttgaagggcgaagcttccatgacctctccaggcttgccaccctctcaataccttgatatattyaccaacctggaagctcttcaaaactcattgttcaaggatttataaaaagcttaa

SEQ ID NO: 493689 - DNA, 610 bp, Homo sapiens
ggtcagtctagtgctgtttataaggtactgtctaagtgacggagaagtctggcagctcctcctgcagttccaaagtcgatcctagaggaaaagaggtgagtacttgcttgtgttctcctagtaacataattttgtatgaactatttccattttattatagaaatttcttcaatatcatccaaaaaaatcatgttcagatttcaagatcgttttatctccttcagtcatagaggtagattcagtgaatatccaataacacactggtaaatggccttcaaagggaagtgttttagtctaaattaccagtattttgtcattgaaaaaagatcacaggttttcaccataagctccagtctccatatggggctatagcacagaaaataaaacaaaacgaaactgtccttaccagcactccattttctgttctacattgtgtgggctcaggaaaagttactggtttccatttaataatagcatggttgattaatattgcttgaagggcgaagcttccatgacctctccaggcttgccaccctctcaataccttgatatattcaccaacctggaagctcttyaaaactcattgttcaaggatttataaaaagcttaa

SEQ ID NO: 493690 - DNA, 652 bp, Homo sapiens
tctgtttttctctcctccaccatcctcttcctttctaatgatacaattttgagaataaaagcccaagtatgttcaaaggggctcatagacaaaagttactaggggcaaagatactcatttctctatcagagygatgcagaggtaagtagcttgccaattagttaaatgaataatcatggttttatccaccttccttgggcaggacatatctgggactatgataggactatgctaggtattaccattgggtgatttatatagggatgaggtagcttttagcctataggatgcattctcagtatatgacctttctgtcttttttgatctttgtgcagcacttctgttttttcagcatacattgaaattattctttccatctttagcatgttctgtagtctattaattatttactatttatttatatttagctcagcttatgaattctgcctatatatcatgtgttaattatttattcattatcttctgttccaacataccctatgagttttgcctatatctcataatctaccagcttatttattatctttgctaattactttttatgagatacactcatgttatttgttttctggttctctagagcagaattaagtattttccaatgataaagcaaactcattacaatatcata

SEQ ID NO: 493691 - DNA, 652 bp, Homo sapiens
tctgtttttctctcctccaccatcctcttcctttctaatgatacaattttgagaataaaagcccaagtatgttcaaaggggctcatagacaaaagttactaggggcaaagatactcatttctctatcagagcgatgcagaggtaagtagcttgccaattagttaaatgaatartcatggttttatccaccttccttgggcaggacatatctgggactatgataggactatgctaggtattaccattgggtgatttatatagggatgaggtagcttttagcctataggatgcattctcagtatatgacctttctgtcttttttgatctttgtgcagcacttctgttttttcagcatacattgaaattattctttccatctttagcatgttctgtagtctattaattatttactatttatttatatttagctcagcttatgaattctgcctatatatcatgtgttaattatttattcattatcttctgttccaacataccctatgagttttgcctatatctcataatctaccagcttatttattatctttgctaattactttttatgagatacactcatgttatttgttttctggttctctagagcagaattaagtattttccaatgataaagcaaactcattacaatatcata

SEQ ID NO: 493692 - DNA, 652 bp, Homo sapiens
tctgtttttctctcctccaccatcctcttcctttctaatgatacaattttgagaataaaagcccaagtatgttcaaaggggctcatagacaaaagttactaggggcaaagatactcatttctctatcagagcgatgcagaggtaagtagcttgccaattagttaaatgaataatcatggttttatccaccttccttgggcaggacatatctgggactatgataggactatgctaggtattaccattgggtgatttatatagggatgaggtagcttttagcctataggatgcattctcagtatatgacctttctgtcttttttgatctttgtgcagcacttctgttttttcagcatacattgaaattattctttccatctttagcatgttctgtagtctattaattatttactatttatttatatttagctcagcttatgaattctgcctatatatcatgtgttaattatttattcattatcttctgttccaacataccctatgagttttgcctatatctcataatctaccagcttatttattatctttgctaattactttttatgagatacamtcatgttatttgttttctggttctctagagcagaattaagtattttccaatgataaagcaaactcattacaatatcata

SEQ ID NO: 493693 - DNA, 494 bp, Homo sapiens
gggcgtggtggtgggcgcttgtaatctgagctactcgggaggttgaggcaggagaatcgcttgaacccgggaggcggaggttgcagtgagcagagatcacaccactgtactccagcctgggcgacacagctagactccatctcaggaaaaaaaaaaaaaaaaagagagacaactgatactcgcattaaccaactgtcatayacgttttcaagatcaattaccaggatttctgcatgctgaggtgtctgagaagatgttgggcagataacacgagactccttacacacacacacgctttcccacacacactcctttgcacttcaatgtacactgctactaaaacttccttttttccccctagcagtgcaaatataacagttttgctttgcaattgcaacaaaacagactaggaataaacactggactagtgcaggccagaatacagaatatgagattttaaaagtcacagaggcagaaatattcttctttcttag

SEQ ID NO: 493694 - DNA, 636 bp, Homo sapiens
gtttatgggatatcagcagatctgatctaactgtacaagtggcacagcttatttagaggtagaagcggaaaggtctttgtgaagtcagcacttttttcaaggtgccagaatcaatgaaatctggacttatattcacaagacacacagatggttctcatgtgcatttttaagatctagagctgtcctgatagttataacatctcttctytctggaagctgcagatttaggtagaaaggaatcttttcttgtggctcttggatgtgaagcttatggttccatttctcattgagcatttataaatgaaccttatgaattattattttaaaaaacagatgccaggttccattaagataaatatataggtattgttgcttctttcccatgtgttgtatctttttgttttgttttgttttctgaagctgttacttaaagattcaccagacctcagaaacttgtcagtaataagccttttcatttgcttttacaagcagcatgcagaactaccaagatcacaaataagctgcctcctgtccctggaagtctcccagatcctcttctgcttttccttctctccctgctgatcttttctttctgggccatggctctaacctcaggctctcagcccctgattcaga

SEQ ID NO: 493695 - DNA, 562 bp, Homo sapiens
gttgggcaaagtcaagtcaactctcacactttctgagtgcaggaaaataaaatacactacaattttgaaatcttattttggcccatatttcatgttctttttatttatttacttatttattattattattttttgagatggaatcttgctctgtcacccaggctggagtgtagtgactcgatctcaggtcaccgcaacctccacctcccaggttcaagctattctcctgcctcagcctcccgagtagctgggattacaggcatgcgccaccacgcctggctaatttttgtatttttagcagagacagagtttcagcatgtwggccaggctggtctcgaactcctggcctgaagtgatccacccgcttcggcctcccaaagtgatgggattacaggtgtgagccaccgtgcctggccccatattttgttttctaaacagactgtgacaaacttgagagcaggccctgggcccctggtgaccttccagtggggaccgcagaccccagcccgcaccgcccttgctctggctctgagatggccgtgtgtttcggaggagagggatg

SEQ ID NO: 493696 - DNA, 625 bp, Homo sapiens
ctgcaaataatcacaatttagtcttgtgcttcaggcttttttgttattaagtttttgcttaaattctcatttctgaatgcttctaactcgaatattcttttatttattcataaaatattcattcaataaatattgatacttcagcaatttgctgtgtggtaagcccygtgtcaggcttcaggcgtgctgagaagaataaataagggcccctcctcgctggggattggcaacacattgggacaagtgtctaacccagccagagcggctgcccttttctgcctgacaagggcatcttgctgtcccgggccgggtgggagcgttgggtgaactagaggtcatgaggttacgtccatctgggaagtcatcttaggcgcttcccctgctgtgcccactgctggggatacccatgaatccatgcaactctgccctgagccctagaatgcatgattcccttcccctccctttcccaaacctctctcagtgcctcaccggccttctgtgggtcagatgcacactcggcctccgtggaggggttgtgcagagcagtgcaggtggaggaagtggaaatggctctaccttacttcgcaacgccggacagcaccttacagacctcagacctggtccc

SEQ ID NO: 493697 - DNA, 625 bp, Homo sapiens
ctgcaaataatcacaatttagtcttgtgcttcaggcttttttgttattaagtttttgcttaaattctcatttctgaatgcttctaactcgaatattcttttatttattcataaaatattcattcaataaatattgatacttcagcaatttgctgtgtggtaagccctgtgtcaggcttcaggcgtgctgagaagaataaataagggcccctcctcgctggggattggcaacacattgggacaagtgtctaacccagccagagcggctgcccttttctgcctgacaagggcatcttgctgtcccgggccgggtgggagcgttgggtgaactagaggtcatgaggttacgtccatctgggaagtcatcttaggcgcttcccctgctgtgcccactgctggggatacccatgaatccatgcaactctgccctgagccctagaatgcatgattcccytcccctccctttcccaaacctctctcagtgcctcaccggccttctgtgggtcagatgcacactcggcctccgtggaggggttgtgcagagcagtgcaggtggaggaagtggaaatggctctaccttacttcgcaacgccggacagcaccttacagacctcagacctggtccc

SEQ ID NO: 493698 - DNA, 625 bp, Homo sapiens
ctgcaaataatcacaatttagtcttgtgcttcaggcttttttgttattaagtttttgcttaaattctcatttctgaatgcttctaactcgaatattcttttatttattcataaaatattcattcaataaatattgatacttcagcaatttgctgtgtggtaagccctgtgtcaggcttcaggcgtgctgagaagaataaataagggcccctcctcgctggggattggcaacacattgggacaagtgtctaacccagccagagcggctgcccttttctgcctgacaagggcatcttgctgtcccgggccgggtgggagcgttgggtgaactagaggtcatgaggttacgtccatctgggaagtcatcttaggcgcttcccctgctgtgcccactgctggggatacccatgaatccatgcaactctgccctgagccctagaatgcatgattcccttcccctccctttcccaaacctctctcagtgcctcaccggcctyctgtgggtcagatgcacactcggcctccgtggaggggttgtgcagagcagtgcaggtggaggaagtggaaatggctctaccttacttcgcaacgccggacagcaccttacagacctcagacctggtccc

SEQ ID NO: 493699 - DNA, 579 bp, Homo sapiens
ctgtattaacttgtatttctaccccggggcagtgttgggaaagacaccactttcataggcagttctacagggagtgggctttgcactcatttttccctatgagtaaaagaggtcgagacccaccaggggcatgcagtcagttggaggtggaactgggctgctgagcaccagccacctgttctccaccgcccgcctttctgtgggagttgcccatggttccctaggctgcgttcccagaatcggccttccctcctcgtccattttccatgcacaaccggaaacagtggatgtctctccttagtgaaaccgcatgaactttcttaggaaaatacagtgttggcagcagcagcagcaaatttactggaaaattaagatacgacaattgtgggtttttttgcctaattatcaaaccattgaaattaaatttcatgacaaccctcatgtatgcataaacctctttataatgtatgataatagatgttatctcattacatgctttaagatgcccggctctgtccccctcgctygctgcagggacaccgcatttagagggtgcagcggacctggcaccgaagcacc

SEQ ID NO: 493700 - DNA, 561 bp, Homo sapiens
acaatgaatttaaaagaactatatgccccaccacagacaaatctcatattaaaactgctgggtaaataagttgcagaagatatacaatatatatgtatatcaaattttaaaatatgttttaaaatactcgatattatctataaatatcaaatttaagagtagtcattcatgctaagagagcaagagacacagtgtggaagaatatacagagctttaacagcatatttttatttctttaaattaaaaacataaaagcaaatataatatactgaaatattaaaaatggacaagtctgtatggtagacaaattgatacctcctagacatttatttatgtttcttatacttgaaatgtcttataaaaagttacttttaaagtcatttagactaatgtgttagcctgggatccccccagaaagcagagcctgagaaaagggtttgcacagagctagtgcttagggaagggatgccaggaagcatgtagagtaggcaaagtggggcagcagaggagaaggtgatgccagagggcatgttgctgtgygtcgctgagctggcggccctg

SEQ ID NO: 493701 - DNA, 591 bp, Homo sapiens
actgcgcctgaaacacagcagccatgtccacagatggaacacygggggcctgtgaacagaggcctctccaaatgggggattaggagctggggcttttcctctgaatataggttgttttcattttttttcccccttcaaaaagaaggtaactacttttgtaaagaaaaacaaacgatcctctttgtcaacccatgcccagggatgccaactgggccatgcgacagccttcgccccccacacccactgccgggcaagctgggcctcaggccagttgccacaagccgtcatggtccccaggaagtggctctcaactcaggccgaccaggctctcagagtcaccaaaaccacccaattcaccatcgtggtctccaggaagtggctctcagctcaggcagaccaggccctcagagtcaacaaaaccacccagttcacctgccccagtgggcggaggctcctccacaggcctcagaagtactgactaacactggcctggagcagatgtttggagatgtgggctgtgctggaaaaatccactgctggtgctgttgctaagctacctgggaaggaggcagagggccggtgggcaagccc

SEQ ID NO: 493702 - DNA, 458 bp, Homo sapiens
cttaaaaccaagcatccaaagccatatggaaaggtacacagaataaatgacattatgatggcacaaaccactgctgcagtctgggaaaggaaacttattcacagataggaagccaagctccaccaatacatcatcatgtcaacaattagaaagaatagaaacactagatcagacgcccccamactcagacagtgagtcagaaaaaagaagagcaagaggacagaaatgcattgtgtattgatgctgctcattcctgtgccatttcgtaagcaccgtattctgtgagtgaaaacaaaatatatttgaaccttttattccaggcttttaaaaaatcacttcaattttcctcctctgataaatgttttacgagttcccttttctgatgaaagattttgctgtgattaaagatttcatgaagttatgacaacagaggaatagatcttcattctcggaagctc

SEQ ID NO: 493703 - DNA, 606 bp, Homo sapiens
tttagaaataactttactaagaaacttaagtcacatttagatgtttgggttttagttaactgaattttgttattttcatatttgtatccatgcaatgtcttaatgcatggatttttgatatgttttgctggaaattatgtgtcctttccttgaagaaacatttttaaaatgtcattaacctttacttaaacaagtggagaaygtgaaatttgtttctgctttcattctttgttctttttcattggtttccagacaaaggcattagggcaatagtgaaggctttgcaatgttttcaacagtgttattttcagtatgacatgttaagccagtgcttttattaatataggaacctggtatgactagcataaaatagccaaaactgctactcactagatgtatatcatataaaatatgtttattatatagctaaatccaaatactctctttaaaattaggttataaaatacaatctattttattcatttaacatattcaaagaaattataatttggcaacactgtatttttttactggtagttttcaatttgagttaaaacctatgtacatatttacatagttcttataaattctttagatctcagtttc

SEQ ID NO: 493704 - DNA, 649 bp, Homo sapiens
tttcacaacaaagctgaaaaatatgttagatgcatattggtggagaatattttattcttctttttttttctgagaagaattgaaccgataagccacatttgatgaatgttatgaataattcagctgggtatgtttgagcatcaragacatataattttttaaaaagccagaactttatcaatatatcaatatacagtggtgatgacataacaaagttattttaagggtacacaggaatagggacttaggtttggtacaacatccaaacatcatgaaaacaagagcatatttcatgaagaatccagggcagccttgagatcttctccttgtttctctagtgctaggggagagaaattcttcaaagtaaaccagaagtacaatatgcacagaggccacaagtagtctgggtgttatattttgctgcaacctgaggaggaacaggtagtcatattttcatgcccatatccaccattggagtagctcaattacctctgtatatctgctaatgtctgccttgtatcaaatgtcttctagtgacattctttttcccctcttgacttccacttggcccataattttctcttccctgtgattttgactcaccaggagcccagaggccatcagttacctcataggatcctttcagctt

SEQ ID NO: 493705 - DNA, 639 bp, Homo sapiens
acacttagtggtcgctttcttttccactccatttcaccccttaatccccagatcgctcgaatctggaaattgagttactaatactgctctctgcctgcctcattgggtgattatgaacatcaggaaagaaagcatctgagcgcatgcatcctttataagttaaaaggtgccacatccatagaagagcgacctcctcagaacaaaggcttggaggccagacgcagtggctcatgcctgtaatcccagtacttttggaggccaaggcaggcrgatcacctgaggttaggagttcaagaccagcctggccaacatggcaaaaccccgtctctactaaaaatacaaaaaattagctgggtggtggtgcgtgcctgtagccccagctacttgggaggctgaggcaggaaaattgcttgaaccctggagtcgaaggttgcagtgaaccgagattgcaccactgcactccagcctgggcagcaaagcaagactccatctcaaaaaaaaaaaaaaaaaaaaagaagaagaagaaaaagaagaaaggcttggaaggctggtgggatcactggctagacacagcctcccaaggtgacagtcctttggtgaggctaccaagtcgagagtctggcctttactaatgcagtt

SEQ ID NO: 493706 - DNA, 617 bp, Homo sapiens
acatatggctatacttacgtgtatgagcttgtcttctacaatcatgattatatatgacagacaattctcagtactattatccagttgttttctttgcaataaaagatagttattttagttaagagttataactagggaagagaagccaagatggccaaataggaacagctctggtctacagctcccagcgtgagcaacgcagaagatgggtgatttctgcatttccatctgagataccgggttcatctcactagggagtgccagacagtgggcgcaggtcagtgggtacatgcaccatgagtaaaccgaagcagggagaggcaytgcctcactcgggaagcgccaggggtcagggagttccctttcctagtcaaagaaagtggttgacagatggcacctggaaaatcgggtcactctgacccaaacactgtgcttttccgatgggcttaaaaaacagcgcaccaggagattatatcccacacatggctcagagggtcctacgcccacggagtcttgctgattgctagcacagcagtctgagatcaaactgcaacgtggcagtgaggctgggggaggggcgcccgccattgcccaggcttgcataggtaaacaaagca

SEQ ID NO: 493707 - DNA, 649 bp, Homo sapiens
tctctgcctttgcatttgctgtgcattagggtgactttctgctaatttataccacctttcagagtacattcgaacaagatgcatttgaaaaatgccccaacattatcctttccacggcactctgattttatgcatttccaccttgctttcataaactatgcaacattgacctatctgctgattttttctgaattctcttggtgataagaaatttgttatacctccttttttcrttttgcttacttttaggaacgcaagtcctgaattaataagttttggttgttaaaaatacaaaggtcagatgaagttccaagtccatcctctcctagaggctgccgtcagtgcgttggatagcattccttttgttgctgtttttctaatacatctgcatccagagatacagacctaaagaaacacatagtttggggttgcttctcttttaaacaacataatctgaatcatatgaagaaagtattgttccacactttcttttcctcaagatctcttggagatctatctgcatcaggatgcatagatccacatagtttaaaaataatctgtttcgaagatgtatcctcggccctctttggatgccaaacgtttgtaggaacttaactattaagtgatccaaatgtgtgatttcaagtca

SEQ ID NO: 493708 - DNA, 646 bp, Homo sapiens
gtaccaggggtctctgaggaaggaatttttgaagggagcgtggatgttgggaaggwgcagccacatgaagaccagggtccagagccctccaggcagaaggcacatgaaaaacaaaagccctgagtgggcaccatgcctggcattttcaaaggcttggaggcagagccatggagcacagcgggtctggggcagagcagcacaggatggtgtgggaaagggaggcagagtctagccgagtccctgtaggtcccacagctcagtggatgccaacctggcttcatattaacatcacctggggagttttaacaaaaactaaaatgcctgggttctgccccagagttttcgtttgtttgagatggagtctcgctctgtcgcccaggctggagtgcagtggcgcgatcttggctcactgcaacctcctcctcccgggttcaagcgattctcctgcctcagccttccgagtagctgggattacaggcacctgccaccatgcccggctaatttttgtatttttagtagagacagggtttcatcacgttggccaggctagtctccaactcctgatctcaggtgatccgcccaccttagcctcccaaagtgctgggattacaggcataagccaccatggccggcctgccccagagat

SEQ ID NO: 493709 - DNA, 646 bp, Homo sapiens
gtaccaggggtctctgaggaaggaatttttgaagggagcgtggatgttgggaaggagcagccacatgaagaccagggtccagagccctccaggcagaaggcacatgaaaaacaaaagccctgagtgggcaccatgcctggcattttcaaaggcttggaggcagagccatggagcacagcgggtctggggcagagcagcacaggatggtgtgggaaagggaggcagagtctagccgagtccctgtaggtcccacagctcagyggatgccaacctggcttcatattaacatcacctggggagttttaacaaaaactaaaatgcctgggttctgccccagagttttcgtttgtttgagatggagtctcgctctgtcgcccaggctggagtgcagtggcgcgatcttggctcactgcaacctcctcctcccgggttcaagcgattctcctgcctcagccttccgagtagctgggattacaggcacctgccaccatgcccggctaatttttgtatttttagtagagacagggtttcatcacgttggccaggctagtctccaactcctgatctcaggtgatccgcccaccttagcctcccaaagtgctgggattacaggcataagccaccatggccggcctgccccagagat

SEQ ID NO: 493710 - DNA, 646 bp, Homo sapiens
gtaccaggggtctctgaggaaggaatttttgaagggagcgtggatgttgggaaggagcagccacatgaagaccagggtccagagccctccaggcagaaggcacatgaaaaacaaaagccctgagtgggcaccatgcctggcattttcaaaggcttggaggcagagccatggagcacagcgggtctggggcagagcagcacaggatggtgtgggaaagggaggcagagtctagccgagtccctgtaggtcccacagctcagtrgatgccaacctggcttcatattaacatcacctggggagttttaacaaaaactaaaatgcctgggttctgccccagagttttcgtttgtttgagatggagtctcgctctgtcgcccaggctggagtgcagtggcgcgatcttggctcactgcaacctcctcctcccgggttcaagcgattctcctgcctcagccttccgagtagctgggattacaggcacctgccaccatgcccggctaatttttgtatttttagtagagacagggtttcatcacgttggccaggctagtctccaactcctgatctcaggtgatccgcccaccttagcctcccaaagtgctgggattacaggcataagccaccatggccggcctgccccagagat

SEQ ID NO: 493711 - DNA, 619 bp, Homo sapiens
gagggtaatttgttcagtataacagagttgggtgttcgctttctgggtagggtagcctaaggctgagatatcaggaaaataagaaagctggaaaaggtgtaaaagtctaaaggagaaggaagagcaccaagcaatatagttgggaataaagaaaggttgaaaacagtgamtagtgggagatttctcttcaaattaaggactctaaatggcttttttaaaacaggtatgtctaataatcagtgatggttatttgttttttctgtaatataaagcccctttataactttaaaactttagtaaactcagctatatgcacaggcacattcacgcacaccttgtgagtggtttctggtaatgtcaaagaaaaggagctgaattctctggatgaatcagtgtggcataaagagaagtctacttgggatgatcaggtttcagcagatttaacctaaggacctagagctaaaggcaaggaaactgtaaattcctgtcaagttgcagtaatcttgcagtaaaactcctcccaagttttacagtaatcttgggaaagttcaatgaattactatagaatggagggtaggtgatacagataaattttagtgagatttcaaaggatgagatt

SEQ ID NO: 493712 - DNA, 211 bp, Homo sapiens
ttctcggccatacataatatattagaatatacttgattttacataacagaaatctaagttgaactgctttatgaaaaaagggaatttactggcctagataactgggaarcccaaggggttacatctaggggtgccaacacagtcaacaagactctgactctctttatcatgtggctgtctctgagacaacttcattttcacaataattctt

SEQ ID NO: 493713 - DNA, 531 bp, Homo sapiens
tataatggaaatgaatgtggcatcattctaagtgtgtggcattatctaataaattttaattttagctcttccaattatctcagtcactatctaagactggaaactaggttaaatattacatgattcattttcttaaaagggaagagagaataatgttttaagaccccatttttgagagctttctgcatactagtcactgtgcaatagtgcagtttagtccacgttcatggtggaaatttggcgtccacaaggaagtatgcccaagcttttcaatcattttacacatctccataaatctgtaaaaataaacatgggaaatcttgcgaatgtatttaatgaacttctagacatgtgttcctttgcggtggaaaaaatataatttgaaaccttacgatgtgttaaacacaggaggccaaaatcactgtgatttaatgaaaaacaaatttaagttgaacaactctagaatatataggrctggggaagttatcaaacaaagcattatctgtgaaaaaaagtctttatagatagaag

SEQ ID NO: 493714 - DNA, 614 bp, Homo sapiens
gctgaaagaggtgtaacatttatcttttcactcttgaagtgctacctacggggccaccgctggcagaggtcattaggcaaatgcaggctcatctctccgtgatactacatgtgaggcatttgcacaaatgtagattgtagtaaggcctgaatgtaatgtatatacttcagtcacttttatgaaattgttcagtcatctggacgtttytcactgtgtttaccaggaaatgtgaaatagagaattgagcaattttcccatcaatttgatcaatgtagaacagcaacctggatgccttcagtcttttttttaaatgcctttttttctctcaattgctacaatttatttatttattttactaaattgcctagttaattacttcaattttccaatctatcttaccattgaaggctaagactgtttgaattttacatgtggttggtacaattgaggtctgtacctaaagtgtaagattttcagtgtaggattcatgtttgtttatccaccttcttgcttggtccttttgatctgtaacctagactgttcaaatctcacctttgaatcaatcaagtagattatggaaacacaaaaggaaaggaggagagagattggaatga

SEQ ID NO: 493715 - DNA, 414 bp, Homo sapiens
tccctcaaacctccttccaaacagtattccactccccacagtaatgcctacttgaccaatatcatcaacatttaatctggagtgttttcatatttatgtcagtaaaatcatacaatctgtattcttttgttcctagcttcttttcactctacgtatctgtaaagttcatccatatttttgcagatagcaataatttgctcacttccattgctatatagtattacattgtgtaaatatccaccacttcattttattattgaaataaatttgagttttttccagttttctagttttrggtcactctgaagtgttgctatacacgtttttgtacttttccttggtgcacatctgtacacattttatatgtatttacctagaaatggaatggctaggtaatggcatatgtatatgttc

SEQ ID NO: 493716 - DNA, 544 bp, Homo sapiens
atgcttttcccttctgagccctatgtgtcttcatttcaccccagacagactcactcacccagcctctgggtctaaattgccccctaatttacaaaaccacgtgacccttccaggtagatgccgtgtcttgctttctttttgacccaaagcaagcaaaaatgttgagtgatgcttctcactttcaacacacacacacacctcaagttaattctgagatcaattttttgagactggtccctgggacatgtcaccagtgagatgaagatgtatgagagtgcaaagaagttggagttctttttcttttcttaagaggaattttcacttgygagcaaaattttaattggatgtctaaacttccagataagcttttgttcaacatttgtcatgaatttataggggaagtaaaaaatcaatattctgcagtacttctttcatcccaaggaggttgaaagactttagctgcaaagtgaggagatcagaagagaaacagatttattaaagaaaaaaacacctcatcttaccaatatcatttggaagaacagac

SEQ ID NO: 493717 - DNA, 655 bp, Homo sapiens
cccgggagacagaggttgcagtgagccaagcttgtgccactgtactcaagcctgggtgacagagcaagacttcatctcaaaaaacaaaaaaaaaatttaaaaattagccaggcatggtggtaaccacctgtcrtcctagctattcaggaggctgaggcagaaagattgcctgagctcaggagtttgaggttacagcgaactctgatcatgccactgcactgcagcctgggcaacagagtgagactgtatctcaaacaatcaaataaaggatagtagggataagctggccaaatagggctaagggataggtaaagaaggtagactacattgagggaggaagttctgaaattaagtggggagaattacctgctgctcagaccagggcagctcccagtagcgtcttcgatttgccagaagagccaaggaatccagttgtagcagctttaatgggagcaggggaagcaggcagtctggccaggtggtgggaataggctgctggcggtgatgggtatagcagtgtagtgataggtgagagagtctgtacttagcactcagagaaaaggaaccatgggggtggaaagggaccaaagctaggacagaagtggaatggcatttgccactgtagcaataaacgcctaagagcctcacactgcag

SEQ ID NO: 493718 - DNA, 294 bp, Homo sapiens
tcattattaatgtgcttctgatctagaagattcacttaggatcayagagttttatttttgtgtatttatttacttagagacagggtcttggtccatggcccaggctggaatactgtggtatgatcctagctcactgcaccctcaaactcctggactcaagcaatcctcctgcttcggcctcccaggatcacagaagagacctgaggaatcctctggtaagaacttctcattttatagacaggggaattgaagcccagagaaatggaatgacttaaccccaggtcacaaagacag

SEQ ID NO: 493719 - DNA, 641 bp, Homo sapiens
tggaaaggagatatagtaggagagctcctgttaagactaagatgtcttaaagaggagtctgaattcaaatggaaaaaactcattattatagttcttcggctcaccaatagattcagaaaatctggattcagaagaggaagaataggaagaggatgtggatgagacacaggaggaagactggtactctctcttttttgacaaggtctcttctgtttttgatgcagatsttattaaatcctcttcagtggcaccataattagactctacttcagacacttctgataagtccaaactttccctttgttgactagctcctcttgaacttaaagaagaaatttatggcttcacaaacatttacaagatatgactagtccactcattattctggttctgcccctggccaccccctaaagctggggcataagacaatgagggccaaactactcccaaactctaaactcaggcacttccaacctcaatcattcatgtgtcatccttaactcttctcttccctcccatatccagtccatcaagaaatcctgctgactctaccttcgaaatatatcttttctcaataactcactgccaccactctggcctaagctgtcatcatttcttgcctgggcagcagcatagcctcc

SEQ ID NO: 493720 - DNA, 546 bp, Homo sapiens
tccaactctgctctgctcccagctctgctgcttttctagaagccgctccagggtctctggacccaaggcctcctgcatgagaaggtagaaggagagtggggagatctggacagatcaggacctgctgctatagctmtaagtccaaagtcctgtctctgttttgcagtctccccccagatctaggcttcatatcctttgccctctttggccacgggtccccataaccagctcaccagtcccctctatgcatttactccctttccttcttccttcatctcaccctggggatcaaggaaattgcctcagtagacagagtgaatactaggcgtccagcttgctctacttcatcctggctccacaactctggtttcctggggacaggaagaaaatcgggggctggggagctgagggaactgtgaggaaaaggaaggggaaaagaggacatgctaggatttcggacacagggctccaggggaccttaagaatatggaacaggctgccactgatgatggtggctgacggactgggtatagaatgagttagaat

SEQ ID NO: 493721 - DNA, 546 bp, Homo sapiens
tccaactctgctctgctcccagctctgctgcttttctagaagccgctccagggtctctggacccaaggcctcctgcatgagaaggtagaaggagagtggggagatctggacagatcaggacctgctgctatagctctaagtccaaagtcctgtctctgtttygcagtctccccccagatctaggcttcatatcctttgccctctttggccacgggtccccataaccagctcaccagtcccctctatgcatttactccctttccttcttccttcatctcaccctggggatcaaggaaattgcctcagtagacagagtgaatactaggcgtccagcttgctctacttcatcctggctccacaactctggtttcctggggacaggaagaaaatcgggggctggggagctgagggaactgtgaggaaaaggaaggggaaaagaggacatgctaggatttcggacacagggctccaggggaccttaagaatatggaacaggctgccactgatgatggtggctgacggactgggtatagaatgagttagaat

SEQ ID NO: 493722 - DNA, 546 bp, Homo sapiens
tccaactctgctctgctcccagctctgctgcttttctagaagccgctccagggtctctggacccaaggcctcctgcatgagaaggtagaaggagagtggggagatctggacagatcaggacctgctgctatagctctaagtccaaagtcctgtctctgttttgcagtmtccccccagatctaggcttcatatcctttgccctctttggccacgggtccccataaccagctcaccagtcccctctatgcatttactccctttccttcttccttcatctcaccctggggatcaaggaaattgcctcagtagacagagtgaatactaggcgtccagcttgctctacttcatcctggctccacaactctggtttcctggggacaggaagaaaatcgggggctggggagctgagggaactgtgaggaaaaggaaggggaaaagaggacatgctaggatttcggacacagggctccaggggaccttaagaatatggaacaggctgccactgatgatggtggctgacggactgggtatagaatgagttagaat

SEQ ID NO: 493723 - DNA, 342 bp, Homo sapiens
gaaattgcctcagtagacagagtgaatactaggcgtccagcttgctctacttcatcctggctccacaactctggtttcctggggacaggaagaaaatcgggggctggggagctgagggaactgtgaggaaaaggaaggggaaaagaggacatgctaggatttcggacacagggctccargggaccttaagaatatggaacaggctgccactgatgatggtggctgacggactgggtatagaatgagttagaatctgaagttctcgaagatccatacccaagaacagactcctgcaatagcagccatcccagctctgtggcaaatgtctctcctaggcagaag

SEQ ID NO: 493724 - DNA, 342 bp, Homo sapiens
gaaattgcctcagtagacagagtgaatactaggcgtccagcttgctctacttcatcctggctccacaactctggtttcctggggacaggaagaaaatcgggggctggggagctgagggaactgtgaggaaaaggaaggggaaaagaggacatgctaggatttcggacacagggctccaggggmccttaagaatatggaacaggctgccactgatgatggtggctgacggactgggtatagaatgagttagaatctgaagttctcgaagatccatacccaagaacagactcctgcaatagcagccatcccagctctgtggcaaatgtctctcctaggcagaag

SEQ ID NO: 493725 - DNA, 342 bp, Homo sapiens
gaaattgcctcagtagacagagtgaatactaggcgtccagcttgctctacttcatcctggctccacaactctggtttcctggggacaggaagaaaatcgggggctggggagctgagggaactgtgaggaaaaggaaggggaaaagaggacatgctaggatttcggacacagggctccaggggaccttargaatatggaacaggctgccactgatgatggtggctgacggactgggtatagaatgagttagaatctgaagttctcgaagatccatacccaagaacagactcctgcaatagcagccatcccagctctgtggcaaatgtctctcctaggcagaag

SEQ ID NO: 493726 - DNA, 342 bp, Homo sapiens
gaaattgcctcagtagacagagtgaatactaggcgtccagcttgctctacttcatcctggctccacaactctggtttcctggggacaggaagaaaatcgggggctggggagctgagggaactgtgaggaaaaggaaggggaaaagaggacatgctaggatttcggacacagggctccaggggaccttaagaatatggaacaggctgccactgatgatggtggctgasggactgggtatagaatgagttagaatctgaagttctcgaagatccatacccaagaacagactcctgcaatagcagccatcccagctctgtggcaaatgtctctcctaggcagaag

SEQ ID NO: 493727 - DNA, 372 bp, Homo sapiens
aaagctggagagggctggacctttaatatcaattgyattgttattatattactgcttgttgagcatctataaagtggatactactcacattttagaggtgaaaaaaaattgaggcttagagaagttaaggccagggaaatgtagagaagttacccagccaaagtcacacagcttccaagtattagactgggattttggcccggagttcaagctgtttccactagatttccttttaaagaactaccttttcaaattcatccagaggcctcctccttaatcttatctctttaaacccttatctctcaggcatccctcaatggcaactctttaatctgagaagtagcaaccagttaaagaagcactactgggaga

SEQ ID NO: 493728 - DNA, 457 bp, Homo sapiens
gggattaatactataaagcaatgtaacagcctgggcgttggagttagaccccttcggtttgtattagctggatgacatgaggaaaattgcttagattcttctgagcctaggtttcctcatctgtaaaatgggaggaaagtccttgtggtctacagtccttgtagtgctttaaagatgaccatcaattctttgtcttcctttccttcccttcccttaaatctggctggccctgtaactgtttaaccaataaaaaataacaaagttatgttgtgctatttctgggcctacactttaagaaagcttctaagcttctgcttttgaatatccctaaagctaccatttaatacwtctggctatcatgctacggaaaccatatgaagaaccatgtggagaaaagaggcactgaggttacagggagagcatgaagagggagagagccagccatcccacagtccca

SEQ ID NO: 493729 - DNA, 612 bp, Homo sapiens
ctgcttcgtttcgccttctttccccaacttgctatgactcttgccccaatactgactgcagcctccccatcccmccccgcatcattggtcaactaattccattaatccaactaatcctcgcactcactgattgcccagtattaaactccttcaccctctcgcacgagtcatcatacttggtaacatctttatattgacccctcagtgaccccccacaatgacgacctgccatccattctttcctcacatcacccctccctccaggctgtcttctctcagccgcaacccattcctcaagctacccccttcctcctggactccagccccacccctcctggcgcagatcccttccaccttgatcctctcccctgtacgactccgctcctccatcctcccacaggaccccctcttcctcacgcagacccccacatacctatctcctctcccgccgaccccctcctcggtactctcctcgcacagctccgggtcacgaataccgccctcgcatcccgactccactagcctttgcccgcccccgccttcgccgcctcactctccctacgctgacactaaggcccctccgctgggcctcttcccaaagcggagcccacc

SEQ ID NO: 493730 - DNA, 467 bp, Homo sapiens
gctttaaaaatattaaatactattgacaacaataattcttattaaataaatgaaataccatataacaataccatatattgattacttccatatgctgcaaaataattttttaaatgagcattaatatattatgtgcttgtaaaaggcacacaasggataagaaaagtgcataagtacatgtgttttctcagtggaattattgttcacatttgggaagctactctctaaacttgggtaatttctctactcctctggctgtcttatttctccttcggtaattatctcttcccacttcctattccttagtaacaccctctcaatcaaatagcaaccctactgctctggaagattatctccctatttatctggataaatacacgctattctaagaaattatatttatttactcatggctacttttcaacctaggtaaagaggccccacaacacaggtaacattttccacac

SEQ ID NO: 493731 - DNA, 551 bp, Homo sapiens
gctgcataactctgttctctaataattgatgtcttaccagaagaagaagggatggacccaagagagaagtggacacttctaagaatacccacaaatgacaaaggtagaataaaaggacacaaggaaggcctaaggagaatgaagggaatgagagtaatatgggggaattttctatgtaaagggaattctctttcccaaatactctctgttaagatttccaagtatctgtcttgtgggtacaccaggatagcagagggaagggactaatgccacggtgctactccaccttaactgaccctccacgctgaagcccctyatctctatttcaactctagcattcattctccttgctaccaggacaaaggtcaaatcatacctggagctgggaaacaaagccctctcaaatctgaatatgtgtttcacgaggagagagagagcagcagaggggaccacgaggaaggcagagattccctgacgacctcatgcctttgtacaccactcgcctttactctctggattaaacagcattagggagacaagagaggaaacac

SEQ ID NO: 493732 - DNA, 551 bp, Homo sapiens
gctgcataactctgttctctaataattgatgtcttaccagaagaagaagggatggacccaagagagaagtggacacttctaagaatacccacaaatgacaaaggtagaataaaaggacacaaggaaggcctaaggagaatgaagggaatgagagtaatatgggggaattttctatgtaaagggaattctctttcccaaatactctctgttaagatttccaagtatctgtcttgtgggtacaccaggatagcagagggaagggactaatgccacggtgctactccaccttaactgaccctccacgctgaagcccctcatctctatttcwactctagcattcattctccttgctaccaggacaaaggtcaaatcatacctggagctgggaaacaaagccctctcaaatctgaatatgtgtttcacgaggagagagagagcagcagaggggaccacgaggaaggcagagattccctgacgacctcatgcctttgtacaccactcgcctttactctctggattaaacagcattagggagacaagagaggaaacac

SEQ ID NO: 493733 - DNA, 551 bp, Homo sapiens
gctgcataactctgttctctaataattgatgtcttaccagaagaagaagggatggacccaagagagaagtggacacttctaagaatacccacaaatgacaaaggtagaataaaaggacacaaggaaggcctaaggagaatgaagggaatgagagtaatatgggggaattttctatgtaaagggaattctctttcccaaatactctctgttaagatttccaagtatctgtcttgtgggtacaccaggatagcagagggaagggactaatgccacggtgctactccaccttaactgaccctccacgctgaagcccctcatctctatttcaactctagcattcmttctccttgctaccaggacaaaggtcaaatcatacctggagctgggaaacaaagccctctcaaatctgaatatgtgtttcacgaggagagagagagcagcagaggggaccacgaggaaggcagagattccctgacgacctcatgcctttgtacaccactcgcctttactctctggattaaacagcattagggagacaagagaggaaacac

SEQ ID NO: 493734 - DNA, 522 bp, Homo sapiens
ctgcataactctgttctctaataattgatgtcttaccagaagaagaagggatggacccaagagagaagtggacacttctaagaatacccacaaatgacaaaggtagaataaaaggacacaaggaaggcctaaggagaatgaagggaatgagagtaatatgggggaattttctatgtaaagggaattctctttcccaaatactctctgttaagatttccaagtatctgtcttgtgggtacaccaggatagcagagggaagggactaatgccacggtgctactccaccttaactgaccctccacgctgaagcccctcatctctatttcaactctagcattcattctccttgctaccaggacaaaggtcaaatcatacctggagctgggaaacaaagccctctcaaatctgaatatgtgtttcacgaggagagagagagcagcagaggggaccacgaggaaggcagagattccctgacsacctcatgcctttgtacaccactcgcctttactctctggattaaac

SEQ ID NO: 493735 - DNA, 464 bp, Homo sapiens
ggcaaggaacctggggtgcttttccatgagctcagaaaggggcttcagaggttcatgcaaaatgaactggtggggagtggtcagccsttggaggggtaggaaaacatggttggggactgtggaagacccgggagtggacaggggcaaaggcctgggagttctgggcaaccctgataaaagctgcttgttttgcacctgagtgagcccagggttctgccccatgattccgtctgtgaagtggagagggtttggtgcctggtggcaacctcatttctaacacagcattatgtttgccaagtaccctttagcccaatttcataggtactgagcccttgagtaccgatttcataggtgctgaacacacacacacacacacacacacacacacacacacacactcacacgcttgagagggctggctactattctaaaaagcaaccacaaaaaaaattcatcagcccccg

SEQ ID NO: 493736 - DNA, 580 bp, Homo sapiens
cttgtggatggctaatagccaggacataaagtagattaaacacattgaactttatgaaatatgtgtgtcatctccatatgtaaacttatttttgcaagtaatagcatatagtatatcttaaataatatgatgcttttagtaggacatttagaaaaagaattttaagttttaaaatgaaataaaagtaataatcttaagaagggtttatgttttcgctattttgtaaaaaaaaaaaaagtaagcatttgcttttcaaaagtataattgaaatattgtcttatttgttgtttccaagcaaagataatattatcttaataaaaattatcttattgggcaagaatttctatgatttattattttgaataataatarcatcactgtcctttctattgccagttggtaaactcatcctcagacctaataagtatttctaccatttatgaaaattaaatttagttttcagtctgtgtcagtgtttattgggggacatgcccccaatatttcaatgtaggttctttctattttccataagtgtcagccggctgagaaataaagagagacagtacaaagagaggaattt

SEQ ID NO: 493737 - DNA, 567 bp, Homo sapiens
tattttactcacaaaatctgaatgatggcgtaaccataggargcaaaggtgggctagagacagctgtagtttaatttccattttttctctgttattagcttaccagtagatcatcaaggttatcaaaatctgtgacatctgttgttacaaagcagaaagtttctttgttttttttttctacaggacaaagataggttttatagtaatagattttgaaattggaaaacctttatacattacaaaacaataactttaactttaatttaattccaatgggaggtggaatgtgagaacctatctagctagtaacagaacttgaactacaacttcagtcttctcattttcagtttactttctactccaccagtctgcctcttattttacttccataaaagaacaattttaaataaaggagaattttttaataataaactcaaaacttattaggtatttgtaaatacgaaattatatttttctgagtgttgcagaggaaatttcttttcttgaaagtctttgttctgccttcttcattgcattgggaattattttactgggaggggccagggg

SEQ ID NO: 493738 - DNA, 551 bp, Homo sapiens
tggctcttcaggatgcaaaacaagtcctgccagcaagtccctgcagcccaggcatagcaaaacattcggggaggaattgtgctgtacaaatgattttaccaaccttatcacattaagcagcattcaagggttttctgaccacaacttaggcaaatttcatgttatgctatagtaatgaacttacttgttctatttctaaacaaaacattgggttcacattggcctggacaaagctttccactccagtactatttacttgtccacttattctcaaaaatacaagatgaatgatgtgcaataccatggctgtggcacatgacttttctagacctggatcatttgtgtcccaatatttgactgattttggggtgggatgaaagcatgccttcagtttgtacttctatcatgcccattgctaccatacacttaatgacataatcatgttccaatgtgtcctcagaattactattcctagctggatatactaaggctttatatctaggtcagttcaytgagtctgtgtcccctctactccctccatcgtccctcca

SEQ ID NO: 493739 - DNA, 402 bp, Homo sapiens
tatagaatcagaccaattttttaaaaaaagtatgaggatgtgtgccagtcagtaaaaccataccatagtgaccacttagattttaatttaacctattttaagattcttagaaagtttaaagctctcatctctgtcattatgatggatttctgtgccattgctacagggcaaaatcatttggaggagagctctgaagtacacactaaggacagaattacctgggcttcagctctatttttcctgatatgtgtattctcttcaaggatactacaaaagtggtatttcaaatccctctagcaacatccactgaaatcatcttggggcaracagaatatggtagatttatgaatattcataacagcacatggcccattatgattcaatgtgctgtgcaaaatacag

SEQ ID NO: 493740 - DNA, 407 bp, Homo sapiens
tttttcagtttgggcaaaagcgagaatgttctcatctttaacaatgttcagaaatgtcacaagactactttcattcaaaaatctactttgcaatggttttctaaatggtttccaaaaattctgtcagtttttaaaaagagtgattcttaaatacacagagctttaaatacagaactgtctcctaaaattattttctcttgatttgacattctgagtgtcaaaatgatttaacataaattaccagaaatattcttatattktacttggttatttacacattaatgacagtgacacaaaaaaaaaataattgtttttaatgaatctttgtgaacagacactaccccaaaaggatattgaccttccagttgctatctacgatgacgtccgcagcaagaatttggggaatg

SEQ ID NO: 493741 - DNA, 583 bp, Homo sapiens
ctgttagtgtaacccagcagcccaagaaaagacataatggagttgagtcaggaggcgtgtgcttttatggagctgtgtgtttaaagatacatctgaggtttgtttcttagcaacagggatcatccaaagcacattggcagtgtcagagcaaccaatgatgcccaaaaccaccctgtaaaatacaatagaaatctacagagtaagagggaagaagctaagcacagttcctccaacaggtggagaaactcagaaggctgaacagatgcagtcgccattgttttagactagacagcaccagggtgagagaagtttccaccccacaggggccaagccacctccctccacctggcttccttctggccagagcaggcttttcttcaaggagcatcatgcagagagctcttgcctctttgagctcccygcttccccagcacctggagctgcagcatccaaacaaatgatcatttatccttcatatgtgaagggtgagggctgaacctgggagaagatattagagacctaaatccagaggttcttaaccttgtttttgtgccattggaccctttagcgttctgatgaagcc

SEQ ID NO: 493742 - DNA, 418 bp, Homo sapiens
gaccccatttctacaaaaaatatacaaaaattagcccrgcatgatggcaggcacctgtgatcccagctacttgggaagctgaagtgagaggatcacctgagcctaggaaggtcaaggcttcagtgagccataatcacaccactgcactccagcctaggtgacagagcaagaccttctctcaaaaaaaagagagaaaagaaaagattgtgctaggaaaggaaagtgaaagaaaagtaaatcacttagagatgaaaaagcaggaagtaaaagtaaatagatgtggcaggaaggtagcacccatttcaacaatttttgtgaaaggaatagtccattggttgtcagagaagcggcctgactcatacagaagaaagagagcacaggaacaggtgaatctcctgttgttgcaggatctaaaagc

SEQ ID NO: 493743 - DNA, 482 bp, Homo sapiens
ggccactgcactccggcctgggtgaaagagtgagactccgtccccaaaaaaaaaaaaaaaaaaaaaaaaaggaaacagaaactaaccccttgatcatgttagtattgaccctagtgctgtctgttaacttgggatataaggaaagagtttgaaaatattattctcagctttctttacatattctctttamaaatttgctaatatcctctaaacaaaactgttctctagagttcagagtataaactttccagcagatgctgctgatgctaaaaatgtctcccaataataccttttaactcaatttccaatccttagtccttttctacatgcttcaagatggtctgaggattggctgtgcaacaaatagtctgggcaaatcttcctactacaaagctctttagcaccaagagaagtgagaaactgatagttgcccaccaaagtcctttttccttattcttcctgggcacgcagcaagctcacat

SEQ ID NO: 493744 - DNA, 510 bp, Homo sapiens
agattcattcaccatccactcatgcatgtatccaacccacatttattgagtactgactatatgtttgatttcattcaggatactgagaatataggggcaatcctggcagatatgctacctgccttcttggagcttatagtctcaacaaatyagttgtttaattacaataattgggactgtcatgacaggaaagtacacatgggattctgacccatcaggaattatacacgtctcaaggccagataccaagtttgtcttttcaagttgtgggatgaccttggtcttactatagaacaaggaaccatgatacaattggcaaaccacagacggtctgctagtatcctcttctccagcataatcagaagccatgggctcaccccgactcctcctcctccctcacttcttgtgccaaatatgtgttgtgggctcccagccagcactcacccttctgtattctctgtctctctggggctgaaatcctgtgaattccatcacccagatttccatgcc

SEQ ID NO: 493745 - DNA, 510 bp, Homo sapiens
agattcattcaccatccactcatgcatgtatccaacccacatttattgagtactgactatatgtttgatttcattcaggatactgagaatataggggcaatcctggcagatatgctacctgccttcttggagcttatagtctcaacaaatcagttgtttaattacaataattgggactgtcatgacaggaaagtacacatgggattctgacccatcaggaattatacacgtctcaaggccagataccaagtttgtcttttcaagttgtgggatgaccttggtcttactatagaacaaggaaccatgatacaattggcaaaccacagacggtctgctagyatcctcttctccagcataatcagaagccatgggctcaccccgactcctcctcctccctcacttcttgtgccaaatatgtgttgtgggctcccagccagcactcacccttctgtattctctgtctctctggggctgaaatcctgtgaattccatcacccagatttccatgcc

SEQ ID NO: 493746 - DNA, 422 bp, Homo sapiens
gttgcttggaatcaagcacatacagaggtctgtcatgggaaagctctgctgcccaggggagggagttttggagaatttgggcccaggccaaattaatggttctctcttctctaccctctcccatagcccatttgtgtacaccttgattttagcacatatcacaaggcattatgatgttatctacaattctccttattccccacaagtctgattgttgctcactctagactccaagcttcgctgtggaagggaccatgtattatcctcttacagctatagccccttatgctaagtgctgcccayaatctagtaaaagatacttgcttttatctggaggaattaacaaaggctattactacttttgtcaaagagctagcagaatgatctagttctggcatggcaccctctaacacctccggtga

SEQ ID NO: 493747 - DNA, 642 bp, Homo sapiens
ccaccctctgcagaattccctcctttcttcacaaaactctctgcatcatccttttacttccctccaggctggctgcatttcctggtgggttgactacagcattcaaaagtgaacaaatgactgcctccattattgagagggaaaaggtaatgactaagtggcatattggactctttcatcttccagactcctgacacccaatcttggaacagaacccaaggaaaagcaaatggacagcagacagtccacatgagtgagaatgactccctgcaccattctcccaggtctcagaatcataggagtaaggttgccctccaaaaactacaaaatcagtgcctgatagatcaaagcagacactccaagtgacagtgcaccgtaggtctgtgtcctctgtgcttgcacagaatcctgtgtggccccatcactgtcctgcccacaatcttctgaaatgttgtcacatcagtgccaccctctagactgagaaagcctccagttagggacagtgtcctaatatcaatcttcatattaattatcgctgtcacagggtagtgcatgacacattttttgaaccaattcctcttccctgarccaacaagactaaagagtaaattaatgaaaagaataaatgtggataatgaaagg

SEQ ID NO: 493748 - DNA, 652 bp, Homo sapiens
tgcagtactctcgcccatccctgccctcactgcttgtctctgagacactcagaccctgctggctctgtgcaccctgatttcagtagctgtattttgctgtgggggctcctgcccaccctgagctctacacactcccctgacttttgtacactccatagtaccttcttatagccacagccatacagaactccactggccagcccagccctggccttccagtcatgggacagagcctgtgtgtgtacarttagacataagttgggccaggagtggtggctcatgcctgtgatcccagcactttgggaggccgagatgcgtggaccactgaaggtcaggagctcaagaccagcctggccaagatggtgaaattccgtctctactaaaaatgcaaaaattagccagggtgtagtggccagcgcctgtaatctcagctacttgggaggccgaggcaggagaatctctttaacatgggaggcggaggatgcagtaagccgagatcatgccactgcactctgcctgggcaacagagtgagactctgtctcaaaaaaaaaaaaaaaaaaaaaaaagttaaaaacctgggccctttcacactgccacacagtcttggcactcagctaacattcaccagaaaatagataattcttgtggggc

SEQ ID NO: 493749 - DNA, 652 bp, Homo sapiens
tgcagtactctcgcccatccctgccctcactgcttgtctctgagacactcagaccctgctggctctgtgcaccctgatttcagtagctgtattttgctgtgggggctcctgcccaccctgagctctacacactcccctgacttttgtacactccatagtaccttcttatagccacagccatacagaactccactggccagcccagccctggccttccagtcatgggacagagcctgtgtgtgtacagttagacataarttgggccaggagtggtggctcatgcctgtgatcccagcactttgggaggccgagatgcgtggaccactgaaggtcaggagctcaagaccagcctggccaagatggtgaaattccgtctctactaaaaatgcaaaaattagccagggtgtagtggccagcgcctgtaatctcagctacttgggaggccgaggcaggagaatctctttaacatgggaggcggaggatgcagtaagccgagatcatgccactgcactctgcctgggcaacagagtgagactctgtctcaaaaaaaaaaaaaaaaaaaaaaaagttaaaaacctgggccctttcacactgccacacagtcttggcactcagctaacattcaccagaaaatagataattcttgtggggc

SEQ ID NO: 493750 - DNA, 652 bp, Homo sapiens
tgcagtactctcgcccatccctgccctcactgcttgtctctgagacactcagaccctgctggctctgtgcaccctgatttcagtagctgtattttgctgtgggggctcctgcccaccctgagctctacacactcccctgacttttgtacactccatagtaccttcttatagccacagccatacagaactccactggccagcccagccctggccttccagtcatgggacagagcctgtgtgtgtacagttagacataagttgggccaggagtggtggctcatgcctgtgatcccagcactttgggaggccgagatgcgtggaccactgaaggtcaggagctcaagaccagcctggccaagatggygaaattccgtctctactaaaaatgcaaaaattagccagggtgtagtggccagcgcctgtaatctcagctacttgggaggccgaggcaggagaatctctttaacatgggaggcggaggatgcagtaagccgagatcatgccactgcactctgcctgggcaacagagtgagactctgtctcaaaaaaaaaaaaaaaaaaaaaaaagttaaaaacctgggccctttcacactgccacacagtcttggcactcagctaacattcaccagaaaatagataattcttgtggggc

SEQ ID NO: 493751 - DNA, 652 bp, Homo sapiens
tgcagtactctcgcccatccctgccctcactgcttgtctctgagacactcagaccctgctggctctgtgcaccctgatttcagtagctgtattttgctgtgggggctcctgcccaccctgagctctacacactcccctgacttttgtacactccatagtaccttcttatagccacagccatacagaactccactggccagcccagccctggccttccagtcatgggacagagcctgtgtgtgtacagttagacataagttgggccaggagtggtggctcatgcctgtgatcccagcactttgggaggccgagatgcgtggaccactgaaggtcaggagctcaagaccagcctggccaagatggtgaaaytccgtctctactaaaaatgcaaaaattagccagggtgtagtggccagcgcctgtaatctcagctacttgggaggccgaggcaggagaatctctttaacatgggaggcggaggatgcagtaagccgagatcatgccactgcactctgcctgggcaacagagtgagactctgtctcaaaaaaaaaaaaaaaaaaaaaaaagttaaaaacctgggccctttcacactgccacacagtcttggcactcagctaacattcaccagaaaatagataattcttgtggggc

SEQ ID NO: 493752 - DNA, 653 bp, Homo sapiens
ttttgcattgtggaatgtgaaagaagaaccaggcaaggaatagcaagaaatgggcagagaagcaggcagagcagataagagggtattgtaatgcaacccaaaaaaggttggctttatcccacaagcaacacgaagcaataggaaagaagtggcgtagtcagatttttaagcgatccctttgttaactgtttgaaaaatgggtctaaccagaatcaaagtgtccaattaaaagtagtccagataagaatggctgaagtcctgaataacgcagaggagagaagaaattaaagacatgggaggcaaaatttccagaagctggtacttcattgaatgtaagggtaaaagaaagaacaggcagtaagaacccgtttggtgtcctttctaggcaactgagtgaaaagtgatgctgttgaattagatgcagaatrgaggaagaagaagagggggcaatatagaatatagatgctgagcccagtcctcatctgtgtttgaaggcctttgggaccaccatcagttggctggattttcaaatctagggttcagagtaaagtctactgggatataatgatagatacgacagttggtacccaacaggtgcatgatgtcatccacatcatatcatgtgtggatatcatgtgaagcaatcaaaacaa

SEQ ID NO: 493753 - DNA, 588 bp, Homo sapiens
ttaatgtaggaattaatacacacacacccacatgtttacaaattgtgtaaattgtctcaggaagaataaacaaaaaagtgattgccttaaaaagagctaggtaactggggtagagggrcaagcaggaaactcactttttttgtatgtcatttacatatttagaattacatggcatgcattgacattacctattcaacagtagatttttaaaaatacatcttataacaatacagagtcttcacactatagacatataatatcatctgtcactgggagatatattgtcaaaaaacagactttttttttcttttgtgaattttcaggatcctgtttctattttcattattcatcacctctggatgacaagcatatgcgcctggaagtttagaacagcagtttgcactacttcccatgaatgaggcttaaataattcaaatacaactcccatatggagttatttaaaataatttttgaacctccttaaatcccttttggaaatgtgtagggtccaaataaatgaagtaaactctttattagcaaagtatagttttatagctggacatgatgatcacattgaacctaattctg

SEQ ID NO: 493754 - DNA, 527 bp, Homo sapiens
tcattcttctgattcccgtggctcagagtctcagagtagtttttgttatgtctccctaccagccgtgtttaatccttttatttctgttttttccaatacgtttaaaaattttagttctccttatgccaccttagcctgcctgttaaatgcattcttggatccctgcagtggtcttctaaatattgatcatctttcttttcatgattgacatcaccygtgcccactgtctaccacacttgcaatgttgctgggataccatgttctatgggttgaaaaatggagttgtgagggagataaaacagacctgaaatgataaaggagcccatgtcaacttcaaggcaataagccccatgggagagtcagcagtgcagaggtctgaggcaattggaggatgccaagcccatggcctgtggaaggtgggaacgtaggcatttggagaaggctttgtcagggattataaagaggtagatgacaggcccgtggcaaatgtgagagaggtgggaagccacagggtgtggtgagagagc

SEQ ID NO: 493755 - DNA, 670 bp, Homo sapiens
gctgggaactgcatatggcttgtaagtatttacgctgtggatcgtatatgtctgtctctgctatgtcaatttaattatcatataaaactccagatctgaatctagtcgtcatccagcctctggggtagcgctgaacctggagataactggaaaagtcagtaaatctatttaagatactgttgtggccacaaaagagcctccagcaagagggctggagtaagctaacccagaagaggtccttgctgacattataatctccctgcctgtttatgtgaggcttcttagtgagaagctgagtccagtycctggcacagaaaggcagaggggggaaaccgcacctgtggttgatattcacatggcccttctttcattcagcacaaaggtattgaatccacattgcacttaatgagacaagctcccttacctttgagcagtctagtagtggaaatagttatgggataaaaaccaatccaaaatctaatcaagtcatccctggtggaaaacatctctgaacacaaatagtatatggttcacagatactaatatttatagtgaagtgttagcctatgtgtgaagacttttgaaaatgaaatgtgtctttatatttcttccattgtagcatgcagtccattcagaatcttgggttggccatcatttccatcattgctgg

SEQ ID NO: 493756 - DNA, 619 bp, Homo sapiens
tgtacacctgagtgacagagccactggcccaagggactggagggaggaaagtgcaaggaggacacctgagcagagctgagagggggaactgagacacagttccacacatggggcrtgttggcatagcaatcccatctagcagaaacatggaaaccaaaggacaatggaactgacttatttttccaataggtaccatgggaagataagaactttaaaaaagtcatcaccataatactgttagaaacaggtttgtttgctcattttaacaaactagacctttacatactcaaaagggaattttcaccttcattgcgacagtccactgaacatccatttttatgataactagtggtgttgaattctccatttcctgaggatgtttagaatttggaaacaggaagaagtgatccagaaccaagtctgatgaactataaggtagatgatcaagctgtattattccaattcaagtttttttcaagtataacaataaagtaactggttgagattctatatatgcttataaaattcctattgaaagcaatttcaggaatgcaattcctaaaatctttccaagaatggtgaattagctaaatgccataattaacagttacttatcatg

SEQ ID NO: 493757 - DNA, 662 bp, Homo sapiens
ctgtacacctgagtgacagagccactggcccaagggactggagggaggaaagtgcaaggaggacacctgagcagagctgagagggggaactgagacacagttccacacatggggcgtgttggcatagcaatcccatctagcagaaacatggaaaccaaaggacaatggaactgacttatttttccaataggtaccatgggaagataagaactttaaaaaagtcatcaccataatactgttagaaacaggtttgtttgctcattttaacaaactagacctttacatactcaaaagggaattttcaccttcattgcgacagtccactgaacatccatttttatgataactagtggtgttgaattctccatttcctgaggatgtttagaatttggaaacaggaagaagtgatccagaaccaagtctgatgaactataaggtagatgatcaagctgtattattccaattcaagtttttttcaagtataacaataaagtaactggttgagattctatatatgcttataaaattcctrttgaaagcaatttcaggaatgcaattcctaaaatctttccaagaatggtgaattagctaaatgccataattaacagttacttatcatgttatttcagaataatggtaaatacataagtaagcatattaac

SEQ ID NO: 493758 - DNA, 386 bp, Homo sapiens
cttattctacacccctttgtacttaagtcttgccttactgtgtatttcctttcttccttcctttctatggtgccaggtatagtattatatattaagtggaaactcagtaattgagttactgaactgaatgatttaaaatgccacaygatcccttctagttttgacttcttatcaggtctccaagttcatgtctccaaatgctttcttaacatctcaaaactgtctcattgccaacatatgaggccttacaattatccttcttccactttcctcttatgtaataaagcattaagttctcgctattccttccggacaataagtcttaaattgaacatttcttttccagtcacaaggtccctgggaggcaatcctaactaacataatcc

SEQ ID NO: 493759 - DNA, 510 bp, Homo sapiens
gcagtggtgcaatcttggttcactgcagcctcgaactccagggctcaatcgatcctcccatctcagcctcctgagtagctgggactacaggcacattcctcaagcctggctcattttttgtagagacagggtttcaccatgttgcctgggctggtcttgaactcctgggctcaagcaatttgctccctttggcctcctaaagtgctgggattactggcatgagccactgcacccggcccggatgtttttatagtttgctttttaagataatgcagtggacaacacaatttagaaataaggagagcaaaatctgtataccacatgggaagtatcattttttcctgttttacacctgggcaggtaaggtgtaargtgggaagtgggaggtcaaggggtcgcccaggctacacatctaagtgtggagctgggacttgaattcaagtctcctgactgggagtccaagctttccttgcactgcagccaagaatttaagaagtttcgccaataaag

SEQ ID NO: 493760 - DNA, 570 bp, Homo sapiens
  misc_feature (1)...(570): n = A,T,C or G
aacgttttacaatttcttgtagcttaatttataaattattctcctcataattggkggggattttttcttgtgtgtgtcttgttttaagaaattattctctcactttatgtcatgaagatattttcctatattttcatctaaaagtttggttatttttacatttaaatctttagtccagctataaataacttttgtgcatggtatgaagtatggatccaattttattttatttttttgtctaaatgactagttggcttgatactttatttaacagttcatccttttcctattgatcccattgccatttctttcatatttcttcctctgttctgttatactctcatctgttgcattggtcagtgtttctatccctgtgtcaatactattctgtcttaattactacagcctttgctttttaacaagtcttgatatctggttgagctttcttaaaaagttgctacaccttgtttgtaaaataggctcctgactagttttggttctttgttcttctgcataaattcgtgtaacctgtatgggaaaaaatactttggggacttttgcttggaaann

SEQ ID NO: 493761 - DNA, 662 bp, Homo sapiens
aactgagggctcctcctgtgaggctgggtttatattgatatgcaatatagttggttcccagaaccccttccagatggctgcataccagatatttgtaaagaatttccctccctctcctattagtcttgattctttcctcttcctgacccagatgtcagcttctattgagatctaagtgtcttgagctctccgttcccttattacaggcttcttggatctcaaataatctaacttcactgcagttactccactggactgctgcctagtaagtctggaggccaagatctaaaatattgttctgagacctccaggaatatcggcttccttccttcttcccccgttcgagagaaatggcctcattgaactcttctgagggatgacctcagtgtctttttcaaattggaaagaaacatgagttttatcccaactcatgcccgcctccttagccatgacatatagacaatggactctcaccgagaactctgccaagcatacctgagtagragctgattcctaagtgtttattcctaagcaatttattaggtggactagagagagtatcttcctctgccatcaacctgacagcatgagaggggtgctgttctccttagaaacttgaacttgagcatggacaaagacttttcctttactaccttgtggac

SEQ ID NO: 493762 - DNA, 200 bp, Homo sapiens
aattttaagatggttgtaaaatgtttaaaccatactctcacctggatttattcctatacttttagttcaaaacttaacattttagaagakgcagattccaaaatcactatagataaaatttttccattttaaacacttaagtataagtttcttgaaggcagaaattgtattctactcaactttgaatcctctgaagcatc

SEQ ID NO: 493763 - DNA, 533 bp, Homo sapiens
ctgattacactcccagttcagaattcttacttccatttctcacttccaattctcatactccggaataggtcgccatggtttaactaagttttacattaactgcggagcatcgtgagctagtctttaagcaacaaaggtcaaaggccaaatacgtatcattgaaataatasttagctatttataggtctaaactcaaactctatatgtctattgtcaactaattttttttaaaaagccagtttttacctcaatgttggattcatatgaacatagtaagcatgattccaaacaagtataggtatgttttaaataaatgcatatctcagtatgtatgctaatggcatagcctcttttaaaaatgttattttgaattctgatttctgcccacattctttaaaataatatatattttataatatttactttaagcagtaaattaatacaagccagtaatttactgagatacaaatgaggttccgataatcgtagcatttttattttataccaaaaaataagcaacattgcatttaaac

SEQ ID NO: 493764 - DNA, 547 bp, Homo sapiens
aaaacctactaaacttttgaggagaaatatctattttataccaccattaataactgaaactcctatttctcctaacagttaattttacagatgtgagtaaaagcataacatttctccatgatttatctctactttgaacttgtagttctccagatattttggccttgtttaaattggcttttatttgttattttaygttgagggtgagggaacaggtaaggctagctacaaagaaacattttggggtgatgggaagttttgcctcttaattaatgaggtggttacataaacatatttgcaccattgttcaattgtgtcattgcttatcaacctgtatattttaaatagacacattttactatgtataaattgacctccaaatattttttcaacttttattttaggtatgtggggtacatgtgcaggtttgttgtgtgggtaaattgcatgtcattggagtttggtgtatgaatgatcccattacccagacagtgagcataatgcccaacagttgttatttaaaaaaaaaaaaaaatctttgccattc

SEQ ID NO: 493765 - DNA, 637 bp, Homo sapiens
ggcatcaaaagaataattgtataaaatgggtgagtttcatcatcgaggatctataggataccacggaagatgtaacagtctgggacgcagggaagtctttccagaagaaataacaagctgatatatgaaagatgagagagtttaactgagcaaagaataatgagaagggaactaagtctatccttttcccctgaggcaaaatgatgtaacttcactgtatttgtttcttagggttcccacaacaaattaccatgaacctagtggtttaaaatgatagaaatgtatcccctcataattatggaggccataagtcagaaatcaaggcgtcagaagtgtgggttccttctagaggctccgagggagaattcattccatgcgtcttgtagcttctggtggctgctggcaatccctggagttccttttcttgcagatgcttcactccartttctacctccatcttcacatcaccttctcctcttatgttttcttccctcccttcctttctcttataagaacacttctcattggatttacagtccatcctcacccaggatggtctcctcttaagattcttaattacatctgtaaagacttttttccaaataaggtcaggtgcacttattttttattctttttg

SEQ ID NO: 493766 - DNA, 437 bp, Homo sapiens
gtcacctcctgtcaggggcatgaagcgggtgggagagcactgggcaggtgttgggtgtgtgagcaggagaaagcataggtgcccctgcatgtgtacaaccctgcctgaccctgcacattgctcagagaagagcccagccaagcccaggggacacatctatgmagcaatggtttctcctggaacctgatggtattcataggtttctttaatgagtgtgattaacaggtccacaggttggatgcatgatggtgaattttggcactggaaccccagggccaaagcccctggactcttcctttgtgtcctccctccctccctcgcccactcggtcttcttacaagccaccgtccaaaatcacctcattctgctctgagagaaggtagccgtgtccccttccctgccaccttttctgccttctttgggtatagccgaagtga

SEQ ID NO: 493767 - DNA, 437 bp, Homo sapiens
gtcacctcctgtcaggggcatgaagcgggtgggagagcactgggcaggtgttgggtgtgtgagcaggagaaagcataggtgcccctgcatgtgtacaaccctgcctgaccctgcacattgctcagagaagagcccagccaagcccaggggacacatctatgaagcaatggtttctcctggaacctgatggtattcataggttkctttaatgagtgtgattaacaggtccacaggttggatgcatgatggtgaattttggcactggaaccccagggccaaagcccctggactcttcctttgtgtcctccctccctccctcgcccactcggtcttcttacaagccaccgtccaaaatcacctcattctgctctgagagaaggtagccgtgtccccttccctgccaccttttctgccttctttgggtatagccgaagtga

SEQ ID NO: 493768 - DNA, 553 bp, Homo sapiens
aatgcagttggtgtggtggctactttcacagtcccaggggtgtgagggtgaaagggtgtccgtgaggatgccagcttttgctccccgctcccaaacatcactcactgttatgatgaagtcttaacctagcatctctcatcatttctgtgggagggattttcctatgaatcacttccacatttgaacatcccaggcgagggcccttgatgctattttcctctcaggaaatatttattcccttgtaatattttcatttcttggctccttgaagagtgatagagtctcactctgcttgtcactctaggacacagaggacagagtggttgctctgtgttctttctgaagccctggagttggagatgtaggcagccattgatggaggctcagtatttagagtgtcctygacaatgaggttctttctgctaagtgccaggaattgttcttttgacttcaaccttttctttcacagccttggtattattcgtcagtgttttcacacacacgcacaggagggtctgggggaatgtgttgggagatgtcacaggccagccca

SEQ ID NO: 493769 - DNA, 588 bp, Homo sapiens
ttatataaaaatattgtgtgggctgggttaccatgaggaaatgaaaaacgtgaaattcgggtacatcatttctgacaggcagccaatatttatggtagttggctaaagtgattttacttcaaataaacaaatgtttaatgttttcataaacacatagacatgaccctaattagtaaatttactaatagayttttgttcattatctccagaccaatctttagatatatttatttttagaaaacagggaaaactttacaactgtgtctcaaaatattttgagagtttcttaaaatgtttgaaagcagcatgattttatgagtgtataagcattggtacttttccaaactgttaaattgccctttcaaaactcaaaattcatttttaactagattctggttttagatatttttttctgctgcggaaagttcttagatttaccataggatgggttcaagttttataatacagtcatgtactgcgtaatgacatttcatcaacaacaaacttcatatatgacagcagtcctgaagaatataatattgtatttttactgtaccttttctatgtttgatatgtttagatacacaa

SEQ ID NO: 493770 - DNA, 538 bp, Homo sapiens
acctgtgagtcacttggaggccttcttggtaatcakattgactgttgtgggatcacagtgcttgtgttcaaataacccttattttacttaataatggccccaaagcataagactagtgatgctggcatattgttataatagttccattttattattagttattattaatctgttactgtgcctgatttataagttaaactttatcataggtatgtaagtataggaaaaaatataaaatatatagagttcagtactctaagggtttcaggcatccactggtggtcttggaacatagctccctcagataaggggggaatattatatatatcctggtggtatgctgagaaaaaagggaaaacaggtactggtgagcaatggtaaactgagtcacaattgtataacttttgctatgaaaagtacgtagttcctaaaacttttaggccaaaagtgtctactgatgcataagaaaaatcatactctgactcaattgccctaacatatttgcagtcccattttttaaaccacaaggatagaaaaa

SEQ ID NO: 493771 - DNA, 538 bp, Homo sapiens
acctgtgagtcacttggaggccttcttggtaatcataytgactgttgtgggatcacagtgcttgtgttcaaataacccttattttacttaataatggccccaaagcataagactagtgatgctggcatattgttataatagttccattttattattagttattattaatctgttactgtgcctgatttataagttaaactttatcataggtatgtaagtataggaaaaaatataaaatatatagagttcagtactctaagggtttcaggcatccactggtggtcttggaacatagctccctcagataaggggggaatattatatatatcctggtggtatgctgagaaaaaagggaaaacaggtactggtgagcaatggtaaactgagtcacaattgtataacttttgctatgaaaagtacgtagttcctaaaacttttaggccaaaagtgtctactgatgcataagaaaaatcatactctgactcaattgccctaacatatttgcagtcccattttttaaaccacaaggatagaaaaa

SEQ ID NO: 493772 - DNA, 538 bp, Homo sapiens
acctgtgagtcacttggaggccttcttggtaatcatattgactgttgtgggatcacagtgcttgtgttcaaataacccttattttacttaataatggccccaaagcataagactagtgatgctggcatattgttataatagttccattttattattagttattattaatctgttactgtgcctgatttataagttaaactttatcataggtatgtaagtataggaaaaaatataaaatatatrgagttcagtactctaagggtttcaggcatccactggtggtcttggaacatagctccctcagataaggggggaatattatatatatcctggtggtatgctgagaaaaaagggaaaacaggtactggtgagcaatggtaaactgagtcacaattgtataacttttgctatgaaaagtacgtagttcctaaaacttttaggccaaaagtgtctactgatgcataagaaaaatcatactctgactcaattgccctaacatatttgcagtcccattttttaaaccacaaggatagaaaaa

SEQ ID NO: 493773 - DNA, 581 bp, Homo sapiens
attctcccatcttagccaagaaaactctgccacataacctcaggccttattaagtctatgaacagaaaggtaactggagaactgcaataattatctggttaatgagttaaaaatcactcttgcctgaaataacctggtaataagtaagtcttgctatcatattcattaaaaaagaacatttctcagagagccaaaaggaatgaggatggtgttcaaatcagtttacaagtcagcattyggggcactgcatacaactttccaaagtaaaaataaaggtacaatgtatagagaaaagccaccaagtaaagttgaaggcacctcttaatttcaaaatgaggatatctagcattcattaagaggtcaccatgtgccaggaatgaggcttatagttttatgcagatcattttaccattccttaaaacacctaaatgtggcagttactattttcatccccatttttcagatgagaaagctggggctctgaggagttgcatgacttcctcaagggtatcctgctgctaagtggtggagctagcttgtaagccagacagtccagctccagaacccactattctccctca

SEQ ID NO: 493774 - DNA, 656 bp, Homo sapiens
taattggatgactcattttattttcctttttcggaaaactgttgaaacattgcatcagtgtcacccatgtggaccttcataagctgtattatttattgtttgtaaaaactagatgggacattcctctctcaacagctaaatgacatttggcatagacaaaagagattatcttaatatcctgttacgtttgttctgtggcactgtttggattgtgggtgggagaaggtaaaacagtaaaagctatgtttgtggattaagtgtaaggatgcaaaatgtgtgtactgattacattttggttcagsagaaatgtcataatcaccatgaagacttgttttatgcacattctcttaaataccatttctaaaaggttcttagtggagaggaaatcttgctggaaggcagagttatgacacgcattaagggtggccatgttaatgaagtggagcaagggaaatgggacctgggaatcggctgcctcaccttctttgcccttgaaatcagcctcctctcagtctgggctgggttgaaattaacataatgagatggcttctctccacttgcagagtgtatgttctcaggaggatggagctgaatgcactccctactaccggtggtcctcctggaagcttagttctcagaggcagaggacacaagca

SEQ ID NO: 493775 - DNA, 656 bp, Homo sapiens
taattggatgactcattttattttcctttttcggaaaactgttgaaacattgcatcagtgtcacccatgtggaccttcataagctgtattatttattgtttgtaaaaactagatgggacattcctctctcaacagctaaatgacatttggcatagacaaaagagattatcttaatatcctgttacgtttgttctgtggcactgtttggattgtgggtgggagaaggtaaaacagtaaaagctatgtttgtggattaagtgtaaggatgcaaaatgtgtgtactgattacattttggttcagcagaaatgtcataatcaccatgaagacttgttttatgcacattctcttaaataccatttctaaaaggttcttagtggagaggaaatcttgctggaaggcagagttatgacacgcattaagggtggccaygttaatgaagtggagcaagggaaatgggacctgggaatcggctgcctcaccttctttgcccttgaaatcagcctcctctcagtctgggctgggttgaaattaacataatgagatggcttctctccacttgcagagtgtatgttctcaggaggatggagctgaatgcactccctactaccggtggtcctcctggaagcttagttctcagaggcagaggacacaagca

SEQ ID NO: 493776 - DNA, 521 bp, Homo sapiens
ctgctctggtctcccaaggatatggtctaggttcagaactgcttagcgcggaaagagcaatacccatttcttttggcttctgaactcaagtgccctccctcaagtctactttttaaacaaggtgtttgtgttaaaggcagaggtcacaaaggctgractggatatatagaaaaattccaccttcagcttgatctcagtaggaaaggcaggaagggaacccagaaggttcttttgctttgcttgccaaaagcaggaacgtgagtccagcaggtttggtggcctccgcaccaaaaaatatttttgcatacattttctgaagtacttagaaaagcatctttaaccaaaggaattgtaatgaggcaaacgtgacttcatgcagctttgaaactgtgctgggccaaggagtcaaattcttttcctaccagaggagaataccttaattccttggtaatggcaagcttactgggtcctggaaaagctgtgtttttactgtgtgtgacatctccaatttcctccttcca

SEQ ID NO: 493777 - DNA, 521 bp, Homo sapiens
ctgctctggtctcccaaggatatggtctaggttcagaactgcttagcgcggaaagagcaatacccatttcttttggcttctgaactcaagtgccctccctcaagtctactttttaaacaaggtgtttgtgttaaaggcagaggtcacaaaggctggactggatatatagaaaaattccaccttcagcttgatctcagtaggaaaggcaggaagggaacccagaaggttcttttgctttgcttgccaaaagcaggaacgtgagtccagcrggtttggtggcctccgcaccaaaaaatatttttgcatacattttctgaagtacttagaaaagcatctttaaccaaaggaattgtaatgaggcaaacgtgacttcatgcagctttgaaactgtgctgggccaaggagtcaaattcttttcctaccagaggagaataccttaattccttggtaatggcaagcttactgggtcctggaaaagctgtgtttttactgtgtgtgacatctccaatttcctccttcca

SEQ ID NO: 493778 - DNA, 602 bp, Homo sapiens
agtcttctgactcccactagttcaagtttctgagggagaagctgattgagcggagctgtgcattagacagcttatagatgggtgctcttaggtcacatgttcccagtgagccaatcagcagcctctagaggagaggtcacgcggcacagaatatggccgcctatgcttaaggcattacagagggcatcttcctctggaggggtagtaaatgtaggcactttcttctaaatgggctatgggtgtaacaggcattaggctgcttctattttatcagaggatggggccatgattagcccaatgaacatttactaatcattgaaatttaagcatggcagcctggtgtgtaaccattgtttgagttagcatacttcagttttccccygttgatttagtctcatgtaaatctctgaagcctcggccagtcttttcttaaatacacgtaacagctaccataattctctttctgctagtcctttggtccacctaagttcacctagtcaaggtagacagtctgcagccactatccttcttcactttctaagggctttctcagcattgggggcttattaagcagcaagcaagtcagtcctgtaaatgtgggg

SEQ ID NO: 493779 - DNA, 368 bp, Homo sapiens
ttgctttatgctgtgggccccttttccttgactctgactgtacttttgctggttcctgcgtccatctcttgtcacatagctcaatttgcgtgtgccatcaatttcctgctgggattaagatacctggcagtgcagggtttcctgggatrtgggacctctaaaaccgaaacctagacagtcccagtaaatcaggaggattaatctccctaactggaacccagccctgtctcctcccttggccctgctccaattaccttcattctggccctcagtacccccaacttggataacggctttgctggccagtgactaaatacagtggccagatggggtctgtggccatcgccatgtgcacctctctgctaggg

SEQ ID NO: 493780 - DNA, 480 bp, Homo sapiens
actttgaaagagcagtaggattagcagacactttgaaatattacattaatccagcttgggttgaaaatatccaaaggactgactcatgaaatttcaagtaattgaacttctggactcaaacagacatgagaagaaaaagttatgttccttcaaactatttcagctcagatgattttttcctttttagttcaaaacctgacaaaggtttgcttgatgaggagaagagaccaccttccccacaatgaaagttaacgctataatgataataggagggcttatgactgaatctgtattcagatacaccgattttgtttgcttttagtggcaagcaggtttagcaggttagagaagagggtaatgttttgatactgtggtgaagcygaggagggcgatgtccttagtctgaggagaccagcatgaagccacctttattgccctaaaatgtctctgccttcaaacaagtgggctaaagagggaggg

SEQ ID NO: 493781 - DNA, 480 bp, Homo sapiens
actttgaaagagcagtaggattagcagacactttgaaatattacattaatccagcttgggttgaaaatatccaaaggactgactcatgaaatttcaagtaattgaacttctggactcaaacagacatgagaagaaaaagttatgttccttcaaactatttcagctcagatgattttttcctttttagttcaaaacctgacaaaggtttgcttgatgaggagaagagaccaccttccccacaatgaaagttaacgctataatgataataggagggcttatgactgaatctgtattcagatacaccgattttgtttgcttttagtggcaagcaggtttagcaggttagagaagagggtaatgttttgatactgtggtgaagctraggagggcgatgtccttagtctgaggagaccagcatgaagccacctttattgccctaaaatgtctctgccttcaaacaagtgggctaaagagggaggg

SEQ ID NO: 493782 - DNA, 201 bp, Homo sapiens
aggtcacctgcccggggaaatctacagcagagctgtcagcggtgaatcccatcatcactcacctgtgccctacagaggctgcttactgggaatacctgtgactcrtcagaagagggactcaaccaataatagaaggggagttggtagataaataccccaggtccctcattcctcagtggggataactatgagatgtggttt

SEQ ID NO: 493783 - DNA, 644 bp, Homo sapiens
tgtggcagtgtcatgggtttttttatttggtactgttgcaaaggaggggctggagatgaagcagaaaggagaaaaaccgaagccttgaaaacacaaattggaaacagataaaagcaaagctgaatgcaaaggagtctataacacggatgccacaggaattcctggagcccccgaagctgggtaggattacattctgagtgcaggtgtcactgacggggctctgaatgaccagcttcctaaggaagtatatacacattgttgtacatgggtgcccttgttcagggggcaaagagggggcattagcagagggggcagccagaaggcacaatctattggctgtgatttctgaagagcaaaagctcatttttgtgaagtatagaaacctgtttctaccattctcccttgtcttaagtagcgtattattggaattagttctcgaatgtaagtagcttatttaggaggtggttccaggaggcagtgatatgaaaagaaagccagtaaagcattatcagtccaggtaccactgtgggctactggagctcattctccctggagactctgagaaatggtgtcraatacatctccaaaggggcaagggagtggggaaatttatcctccatctgtattcatccctggttgagagc

SEQ ID NO: 493784 - DNA, 578 bp, Homo sapiens
ctggtctttaactctcagcttagggaatcagactgaattagttctttgtgttattaaccggaggaacacttacattttctgacaactctaatcttggagctcagggaatagcacagagcatttgtatgaaattacccctcgttctatctataggcctaacagccagcatttgtgaatttggcagaagccagcagatctcacagttaatgtcttcctctcctgccaggatctttggaacaaggtgcttagagtgccacatgacaaagagccggacagatcctgggatgtggagcccaggtgatgttatttgcatccaattaaagaagcaggaatgggtagcataattgacatgcatgactcttaatgccttttggttcattaagcctttggatcaacttttgtaggaagacatttaaaagaaactgagcaggacttgggcacaggtagaggtgagcttccgggctgaatcccctactaggccgttagtcaattgtatgtttcctttttggactcacctctgggttgcaraggaggttgctctgattgtttcttgttataccataaagataaggagcttg

SEQ ID NO: 493785 - DNA, 421 bp, Homo sapiens
ttatattaatcctctgaaatataatggcatagaaaaattatrtaaagtaaaaataatcttttgctaaccagaatagtatattgttatataatgtaatataaatggtgtgttttcatgtttatgtcctaaaatctcctttgagatctctttcccataatcataatactaaacagttggccaggcacagtggctcacacctgtaatctcagcactttgggaggctgaggcaggcagatcacctgaagtcgggagtttgagaccagcctggccaacagggtgaaaccccatctctactaaaaataaaaatattagctgggcatggtggcagacacctataatcccagctactcgggaggctgaggcaggagaattgcctgagcccaggaggcagaggttgcagtgaaacgaaatcacgccattg

SEQ ID NO: 493786 - DNA, 421 bp, Homo sapiens
ttatattaatcctctgaaatataatggcatagaaaaattatataaagtaaaaataatcttttgctaaccagaatagtatattgttatataatgtaatataaatggtgtgttttcatgtttatgtcctaaaatctcctttgagatctctttcccataatcataatactaaacagttggccaggcacagtggctcacacctgtaatctcagcactttgggaggctgaggcaggcagatcacctgaagtcgggagtttgagaccagcctggccaacagggtgaaaccccatctctactaaaaataaaaatattagctgggcatggtggcagacacctataatcccagctactcrggaggctgaggcaggagaattgcctgagcccaggaggcagaggttgcagtgaaacgaaatcacgccattg

SEQ ID NO: 493787 - DNA, 440 bp, Homo sapiens
ttataaaattgtcacaaggacatgggacatgctggctatttttccctttttactattttatagcatccaattaggtggataataaaattcttatttttccaatgagtagtccaagacttcacgaataaaagtaccatgcttaatgtcacactactaacaagcggcaggaccagtgtttaaatgtaaatatatcttatttcaaaatttgtttgttttaccaaatyttgtagctccttccaagactcccaaccttcaccttttctttctatccctaagaatacatatgattttcacatacgaagttcgtttataaccttttgctaattaattagtgaaaaaagatgcaatgaattttgcaaaatgtcatgcaaaaaatgaagcaggaacagacaattaggaaatattaaaccatggttagtagcattgcatatcagcattgg

SEQ ID NO: 493788 - DNA, 403 bp, Homo sapiens
acaaacttcctttgtgtttgatctgtacctatctataatcagattcttcagagaagagcctgagatggaagttagggtgcgtgtggttcatcaaaggaaggactgtgaacaggagaaagggaagagacattagtactgggcaggggaggagccaaggacacgtgtgttttcagcaggactctgcctctggcctcctcacatagtgtgttctggaagatgaactgtgtcytgagttggtccatcctcaaggcaaggaggtcaggctcccttgttggtccatgggctgtgggctttatgcaacctcctgggaaataaagtcagtcttccatgtggctgaaagcggttctctggggagacagcacctacccaggagcagccaatacacacgaacctaacccggagg

SEQ ID NO: 493789 - DNA, 587 bp, Homo sapiens
gaaaaggttagataccctataatgcagggaaatttaattttttctactattcaaagtrttgccttttagttcatatggataaaatatattattgtgatttatcaaaaagtatgtgtattaaactattgaaataaaatatattataaaaccactcacttatttttgctcacttatcatttcaagtgttagtacatgtaattaccatttatatagggtcattcacatacatatcaaaaaagacttttttccaagaaaaagtttcatatcatccaaatctcactgtgtcttttaccaaacagttcacattcagtttaattttattgtccatatctggattggaaattgtttcatatttttaaaaaactattcttattacaaagtatccttcatatctcataaattaattaactttagtaaggacatctaattaattaaatattcctaagtatagatcttgttgacttagtttaaagatatctgacaaatagtagcagtgcctgaagttcgtagggtaggaaaaaagagttgtcatgccaactgcatggtcattgtgtgaccacagggggaaagacacatgcctcactgaa

SEQ ID NO: 493790 - DNA, 607 bp, Homo sapiens
ggtgtgtgtgcactggctctctcatgcaaagaacagaactcacrggataggaacttcaaatgttaaatcatctgaattaaatctagggcattaaccttctccgtttttctaatacacaatagagtaaaatctgtgggattaaatatcccaccctacaacttgtaatggagaataacatacattttttagattaaaaatttataaattaaaatattttctacgtagactttctttacatgctgcagggccattcttgcacctagaaatggaaatacacataactggggtgcaggtgaagggttgcgccagcacctcccttctccacagaggccaaaaactaacctcactttctagactcactcctcttcaagatctgcttgttctaggtggcttcatcatagagactgttacttaatcatggtgcttttctgattgcagaagagtcaagaatgactttaggagctaattctctgctatggctcctaaagtcatccataaaaactcttttccaattatgcaggtaaccagtgactgaacttaaggagttcccagtaaaatgaccaagtatctaggaggtgctggcctaaaggtcactcaaagagacact

SEQ ID NO: 493791 - DNA, 607 bp, Homo sapiens
ggtgtgtgtgcactggctctctcatgcaaagaacagaactcacgggataggaacttcaaatgttaaatcatctgaattaaatctagggcattaaccttctccgtttttctaatacacaatagagtaaaatctgtgggattaaatatyccaccctacaacttgtaatggagaataacatacattttttagattaaaaatttataaattaaaatattttctacgtagactttctttacatgctgcagggccattcttgcacctagaaatggaaatacacataactggggtgcaggtgaagggttgcgccagcacctcccttctccacagaggccaaaaactaacctcactttctagactcactcctcttcaagatctgcttgttctaggtggcttcatcatagagactgttacttaatcatggtgcttttctgattgcagaagagtcaagaatgactttaggagctaattctctgctatggctcctaaagtcatccataaaaactcttttccaattatgcaggtaaccagtgactgaacttaaggagttcccagtaaaatgaccaagtatctaggaggtgctggcctaaaggtcactcaaagagacact

SEQ ID NO: 493792 - DNA, 607 bp, Homo sapiens
ggtgtgtgtgcactggctctctcatgcaaagaacagaactcacgggataggaacttcaaatgttaaatcatctgaattaaatctagggcattaaccttctccgtttttctaatacacaatagagtaaaatctgtgggattaaatatcccaccctacaacttktaatggagaataacatacattttttagattaaaaatttataaattaaaatattttctacgtagactttctttacatgctgcagggccattcttgcacctagaaatggaaatacacataactggggtgcaggtgaagggttgcgccagcacctcccttctccacagaggccaaaaactaacctcactttctagactcactcctcttcaagatctgcttgttctaggtggcttcatcatagagactgttacttaatcatggtgcttttctgattgcagaagagtcaagaatgactttaggagctaattctctgctatggctcctaaagtcatccataaaaactcttttccaattatgcaggtaaccagtgactgaacttaaggagttcccagtaaaatgaccaagtatctaggaggtgctggcctaaaggtcactcaaagagacact

SEQ ID NO: 493793 - DNA, 527 bp, Homo sapiens
ctcagaggaaaggggtattcagggtattttgaagagattagacacgtattttttcacgacatttttcccccatgattttgtagcctctccctacagaaaggaataaaaagacgtttctctttgttccccctsttcctgctcttgtaattggacttggagttcttgcggaagggaaagagattgaagatgcaccaatgatttgctaatcaatagttatatatatatatatatatatatatatatatatatatatatatatttccattctaaatgtgcagtgctctgtaactgaacccacatcttggctcaatgcccagtggaaatttcaggaacaagggacagtgtgtctcagtccattgtttcaaataactctccttggcttctttagggggatgaaacaggcattcacattaggccagaaggttattagatctccacgagatgctgcccaggtctggctgcacaccgtgaatattattctgtcaacgcaaatgtccttagaatctgctagaattgaatgactctta

SEQ ID NO: 493794 - DNA, 603 bp, Homo sapiens
agttcctgtcaataaaatatgacaattaaattcagaagcgaggccctttccttgcttatcttgtttagtgagacaagctcattcctaagcagtcccggccaatatgactttgaaatagtcatccctggaatccatttcgggtttctttttggacccaagagctgagctgaatttggacatcaggccaaggctgaacagcaacagsgttcaggccatttctcattaggaaattactgcctctaaaccaggcccaaagtgagcactattgattttttaaatactttttttattaacaattttggggaggtataatttacatatcataacttcacctgttctaattcagttgttactggaaatggggtcttggaactcatgcaagaaataatttggggtgagtccacagagtaaaccgaaagcagatttattgagaaagtaaaggaataaaagaatggctactccataggcagagcagcctcaagggctgctggttatccatttttgtgattatttctcaatcatatgctaaacaagtggcagatattcatgagttttctgagaaaggggatttcccagaactgagggttcctcttccttttagac

SEQ ID NO: 493795 - DNA, 567 bp, Homo sapiens
ctgaccagttcctgtcaataaaatatgacaattaaattcagaagcgaggccctttccttgcttatcttgtttagtgagacaagctcattcctaagcagtcccggccaatatgactttgaaatagtcatccctggaatccatttcgggtttctttttggacccaagagctgagctgaatttggacatcaggccaaggctgaacagcaacagggttyaggccatttctcattaggaaattactgcctctaaaccaggcccaaagtgagcactattgattttttaaatactttttttattaacaattttggggaggtataatttacatatcataacttcacctgttctaattcagttgttactggaaatggggtcttggaactcatgcaagaaataatttggggtgagtccacagagtaaaccgaaagcagatttattgagaaagtaaaggaataaaagaatggctactccataggcagagcagcctcaagggctgctggttatccatttttgtgattatttctcaatcatatgctaaacaagtggcagatattcatgagttttctgaga

SEQ ID NO: 493796 - DNA, 579 bp, Homo sapiens
cagctgctgaggtgggtatggtgggtctctatgggcccacattggaaagacttcaaggaaattgatgtgaaaaagtacattgacggtcagtctgcattgaggatcttattgttaaaaaaataaatatataccatgtaaacatgcaggcacgcagatgtgtaaatgaatgtgcatgtgaggcagtgagacagactgacagggaaggagagagacaatgagagagacagagcctgagagatgtggccaaaccacctgatgatcagatttggtggtgsgacattgaaaatattttattttctcctttaagtaaaacttaaatattttagaatgttcatcttatctttacaattataaaaagatcacatcatattaaatactatccatttaacactcacctattaaataattgatgtatatttcctagttttaatttttataggcattttattacaaagccaaaaatatgtaatatattaatagtaaaagaaggaattcaaaattaatgaaaaataaaataaaagatctagtcccttcacccagacacagtgccctccccatgagatgctcctcctcctgtcc

SEQ ID NO: 493797 - DNA, 579 bp, Homo sapiens
cagctgctgaggtgggtatggtgggtctctatgggcccacattggaaagacttcaaggaaattgatgtgaaaaagtacattgacggtcagtctgcattgaggatcttattgttaaaaaaataaatatataccatgtaaacatgcaggcacgcagatgtgtaaatgaatgtgcatgtgaggcagtgagacagactgacagggaaggagagagacaatgagagagacagagcctgagagatgtggccaaaccacctgatgatcagatttggtggtgggacattgaaaatattttattttctcctttaagtaaaacttaaatattttagaatgttcatcttatctttacaattataaaaagatcacatcatattaaatactatccatttaacactcacctattaaataattgatgtatatttcctagttttaatttttataggcattttattacaaagccaaaaatatgtaatatattaatagtaaaagaaggaattcaamattaatgaaaaataaaataaaagatctagtcccttcacccagacacagtgccctccccatgagatgctcctcctcctgtcc

SEQ ID NO: 493798 - DNA, 537 bp, Homo sapiens
aggtcactcacaggcacctgagcttgactgtggccttttctccttggcattgaggccgttgctggctgactcaggtggtggttctgactggcaggactgcttatagctacaggacagggtggcagccctgagactacctggagccacacctcagctctccctcccaatgcctgcccagcacctgcagtctggatggcccagctgtcaccacatactagaggatgactctgaccaggagccatagcttcaggcttcctgctrctggccaccagagagagtcgacccctgccctcacccaagtccttccccagcctgatctctcatcctcactgagctgctccatggtctggaaccaggttccaaagtcctcaggtggaaattatctgcagccacctgaggcagctgcagctccctaattactgtgcattcctggtgccagagggaagaacagcagggtgacagggcccggtggggggtgctggaggagccctggtgggggtgtggagtggggctaagggtcttggcctctctaggtct

SEQ ID NO: 493799 - DNA, 504 bp, Homo sapiens
cctttgtcaggagggtgtgaaaacattcatacctgggaggtaggtaggtaagacaggagaccccagctaggaaccacacccctgaccccaaggagatgggctgcaatctggcacacaactctgtgtagagctgctgtgtggctgctcttttatagcagcagtccttggctatgctatttttctgatcataygagaaatacatactttttgtagaaagtttggaaaacacacacaagagacttttctgcttgtaacatgagctccctttccctgtccagggtcctaactctgtctttggtcttaatgctgtcctcgaacttgacggtacctacattattccatcaaactcgcaaatgccccaaggtccagacttctatttctcagagaagtagaccaaggctcatagggttacgtacttgcctaaagtaatcagaattgccttctgaatctaagtactgcaatcaattggcagtgtcgttctatttctgtgaacagtccttacag

SEQ ID NO: 493800 - DNA, 524 bp, Homo sapiens
ctgtaaaacaggggtggtttagacctggtgttttcaaactgtgttcatgggagccatagagttctatggagaggcctcaaggggctgctactggcaggggcatgagagcaaggcagggcaagcagggtctccggagcttccacatctctcaaaacactgtagctcagctctgtatctttaaagaaaaaattggtatgatatgatatcgaaaaaagatttgaagatagagactactgggacaagatgctctctacagacctgtgtagttttcaagtctttgactctaatttgaaatcaaaaacaggaaaacaatgaggctttatgtcacaagctaaaatatgttcctactctttggcccagtatttctatttctgagactatattacaagaacataatttaaaaaaacaaatgttacctacccaagtatgagcaacgggggtattttaatagtcaaaacctggaaacatttaaaatgtccaaaacaggggaacraagagttgagtaaattacagtatagtaactc

SEQ ID NO: 493801 - DNA, 387 bp, Homo sapiens
catttaaatgtgaccatgcacttaatatttagatgtacaattctgaagctcagataaaaagtctgaggaacttcaggaggtttaggagtcagcatttgagttatttgaagcatagaagtaagtagcttcacccgatcactagtaagaggtgaaaagcagtattattgattcttgtgtaacacacacacacacacacacacaaaaagataaactccatggcctatcctcttccaccaagagctttttctctgcttccctaagggacttgtctttctacttgagcatttgcaatacaggtgaagacagtgaggctagcagaacagagccctgtgaagcattracatgtaagagtcaggcagaggaaaatgagacaacaaaggacagaga

SEQ ID NO: 493802 - DNA, 642 bp, Homo sapiens
tgggtggggaattaagcatatttcttgttctgctctgtgtcctacacagtccaggactgtgtttattttttggttaattcaacaaacatttattgaatatttcttgttctactctgtgtcctacatagtccaggactgtgtttattttttggttaattcaacaaatatttattgagctcctactaattcctgaggatggcactgacctagacagaaacagtcaccatctacataaagttgacagttcatcaaggaagatagatattaatctaataattacaagtatgagaagcattaggaaggagaaaatacagagtagtatgttaagacttagtcctctctgaggaagtgatgtttaagctggaatctgaaggatcaasaggcattattaggatgaaaagaatgagaaatgtaggatggggccaaagctaagtttacaggcaaagaaataggtgctctataacctagaggaaaagaagaggagcactttaaaggaaatgaaagacagagaggaagacagagggaaaagatttgaggcacaaaagatcatgccaggtcctctagttcggacagtggaaagactttggggagctttatgcatcaagtgatttggtcagatttactttttttgtgagaacttct

SEQ ID NO: 493803 - DNA, 602 bp, Homo sapiens
tgggaaagttcaaactttagaaggtggaaggaactgaaagcttgttcactctcatatctggtgcctaagctaagaagagtcacgattttgggggctgtaacacttggggcttctctattgctgtgtagtattatgtagtctcaccacatgatcactctgtcatggaagcttcaggacactcatatttcttacctgtagtctcagtgcccccaaggtacatatcctaagagaatgagctaggtggatcctctaatcccctttatgggctagcctcagaagtcatgcaacatcactttcattcgcaccacaagcccacccagatttaagaggagagaatagtttccaactcttgatgaagaaatctcaagaccacattttaagaacmtgtgggatggtagatataggtgtggactactttagaaatgcaatcacttacagacagaacaggagctctataccagctcttgctgttgagaacattttgcattttggaaactcatttaaactagaatgtagaattgagagaagtttttttaaggtcacttctcataggtttttcttctctcttggtctattggtttataatgtgaggggacagcacc

SEQ ID NO: 493804 - DNA, 632 bp, Homo sapiens
ctgggccacatccagcttcgctataagaaatataggtttttttcacttcaccttcctaaataatgatgacaactattacttctttaccataacctagatgtcaggcattgttctgggtgcttatgtatattaagccatttaaccttcacaacaactctagaaagtatgtaatttaatgcccattttactgctaaggaaaccttctgtcttacccaagatcacgtagccaataagcggcagaactgggattcgaacctgagccatgttcatggccacaacctctactctcttagcagttcctggaaaggattacctgttccacatatccctctcggtgtcctcttgctcatccagttatttggctctggaatcttgtcccagttagcgattcacttctagtgagtcacgccgtgaaatcttcagaattgcagtgtgactgaacggtactgtgaaacactgccttttgaatcttccttaggttttaacaaaggacttcacagtcacactcttccctcagcttcatcctaagaacacaatttcctgagaggcccctgggtttaatatttgccccagaagctatttcttaatgttagcattgyttgctatctagagaggtgggaatcttcataaat

SEQ ID NO: 493805 - DNA, 633 bp, Homo sapiens
accacaacagtaagacactgaatgctttcacctaacacctagaataagacagtgatgtgtactctcaccactttaacccaacattctagtgggagttctagccagtgcaataaagcaaaaaataaaawgcattcaaattagaaaggaagaaataaaactcttaatttgcagatgacacaattgtctaggtagaaaattataaggagtctacaaaaaagccgctagaactaataagtgaatttaagaaatttatgggatacaggccgggcgtggtggccacccctgtaatccagcctgacaaacgtggtgaaacccagtctctactaaaatataaaaattagccaggcatggctaatctcagttacttgggagcttgaggcaggagaatcacttgaacccaagaggtggaggttgcagtgagcctagatcacgccactgcactccagcctgagcaacagagtgagactccctctcaaaaaaaaaaaaaaaaaaaaaaagaaatgtataggatacagatcaattttttttggatgatcaattgtattcttatacacaagcaacaaagaattggaaattaaaattttaaaaaaccaaaaatatttttaaaggaaaagttgcacatgttcacaactg

SEQ ID NO: 493806 - DNA, 318 bp, Homo sapiens
ctgaccaacatggataaatcccgtctctactaaaaatacaaaattagccaggcgtgggtggcacatgcctgtaatctcagctactcaggcggttgaggcaggagaattgcttgaacccgggaggcggaggttgcagtgagccaagatggcaccattgcactccagcctgggcaacaagagcgaaactccatctcaaaaacaaagaaaaaaagataatagccatcctaatggatgtgaagtggttcaatgtatatctttttatttgtataacttctttcaaaatgtatataattatyttgtgtatatgtaatttgtttt

SEQ ID NO: 493807 - DNA, 668 bp, Homo sapiens
aaggccgaggataaagactcagccatttgggtcctccatgggacattctgatgggcactcgctgaggctttgccaggcctgccttgargttcagcttgtccctgtgcccatcctcccccacccttcctcatgtgtaatgaactcctgtgtgttcatccctcatatacatcttgcaccccaaatgtcacctcagtgtctgctttgggggaacccaatctgcaaaagctatataataaaaaggctgcctcttgctgacacagctatgcttaccacacagagaaggcagccccagggcctgaacgcccctcctctaaaatgggctctttaacacctggctcagaatcctacaaatctggaaatacagtttgccagcgcttagacagtttagatggaggctctccaagtgaggtttgttagagttgcagggaaagctcaaaggcagagtggaaggtgaggagagctgcagtcttaacgcacccctcttactagaagcccctacagagggaccctcagcagtgagtgttttttgcacagcaatgacctgatactcattggtctaccaaggccactggtcaaaccactgacctctgtgggtggaaatagagtttgccaattcaccatgaaatgagggaagttgtgatgatgtcatgaatttcagggaattaact

SEQ ID NO: 493808 - DNA, 640 bp, Homo sapiens
tggggattgagcaaggccgaggataaagactcagccatttgggtcctccatgggacattctgatgggcactcgctgaggctttgccaggcctgccttgaggttcagcttgtccctgtgcccatcctcccccacccttcctcatgtgtaatgaactcctgtgtgttcatccctcatatacatcttscaccccaaatgtcacctcagtgtctgctttgggggaacccaatctgcaaaagctatataataaaaaggctgcctcttgctgacacagctatgcttaccacacagagaaggcagccccagggcctgaacgcccctcctctaaaatgggctctttaacacctggctcagaatcctacaaatctggaaatacagtttgccagcgcttagacagtttagatggaggctctccaagtgaggtttgttagagttgcagggaaagctcaaaggcagagtggaaggtgaggagagctgcagtcttaacgcacccctcttactagaagcccctacagagggaccctcagcagtgagtgttttttgcacagcaatgacctgatactcattggtctaccaaggccactggtcaaaccactgacctctgtgggtggaaatagagtttgccaattcaccatgaaatga

SEQ ID NO: 493809 - DNA, 640 bp, Homo sapiens
tggggattgagcaaggccgaggataaagactcagccatttgggtcctccatgggacattctgatgggcactcgctgaggctttgccaggcctgccttgaggttcagcttgtccctgtgcccatcctcccccacccttcctcatgtgtaatgaactcctgtgtgttcatccctcatatacatcttgcaccccaaatgtcacctcagtgtctgctttgggggaacccaatctgcaaaagctatataataaaaaggctgcctcttgctgacacagctatgcttaccacacagagaaggcagccccagggcctgaacgcccctcctctaaaatgggctctttaacacctggctcagaatcctacaaatctggaaatacagtttgccagcgcttagacagtttagatggagrctctccaagtgaggtttgttagagttgcagggaaagctcaaaggcagagtggaaggtgaggagagctgcagtcttaacgcacccctcttactagaagcccctacagagggaccctcagcagtgagtgttttttgcacagcaatgacctgatactcattggtctaccaaggccactggtcaaaccactgacctctgtgggtggaaatagagtttgccaattcaccatgaaatga

SEQ ID NO: 493810 - DNA, 668 bp, Homo sapiens
aaggccgaggataaagactcagccatttgggtcctccatgggacattctgatgggcactcgctgaggctttgccaggcctgccttgaggttcagcttgtccctgtgcccatcctcccccacccttcctcatgtgtaatgaactcctgtgtgttcatccctcatatacatcttgcaccccaaatgtcacctcagtgtctgctttgggggaacccaatctgcaaaagctatataataaaaaggctgcctcttgctgacacagctatgcttaccacacagagaaggcagccccagggcctgaacgcccctcctctaaaatgggctctttaacacctggctcagaatcctacaaatctggaaatacagtttgccagcgcttagacagtttagatggaggctctccaagtgagktttgttagagttgcagggaaagctcaaaggcagagtggaaggtgaggagagctgcagtcttaacgcacccctcttactagaagcccctacagagggaccctcagcagtgagtgttttttgcacagcaatgacctgatactcattggtctaccaaggccactggtcaaaccactgacctctgtgggtggaaatagagtttgccaattcaccatgaaatgagggaagttgtgatgatgtcatgaatttcagggaattaact

SEQ ID NO: 493811 - DNA, 534 bp, Homo sapiens
tggcctagagctcttgtgagaaaagggatccaagaagggggtagtagagagagaagtgagagacggagaaaagagaacaactgccacaagaagcaaaacgctggagagggacagatgtctacagaagatgttttgggacagttttgctgttgaatgagtgccagtatccttccatagtggcctcgggagacctgtagttcagacccgtgttgtaggaggtgtcttttgaatgggtcttattttgaggagggacccaggagacccagatctgcaatggggataatgacatctgctccatgcaatcatcatgtggggatcatggggtagcaagataggaccctgcctggcagagattgggcaccaaggactcccttcccaccatcstgtgccatctctgccttctctccttacttcttgcctctcacctggaaactgccgcaaaccaaatcctcctacctccccttcaatgaccttcagaatgccagccctggaaggttggctcagaggtcattgtataccaagctacagagtttg

SEQ ID NO: 493812 - DNA, 608 bp, Homo sapiens
gggagccgagctttgtctgacaaagaggaatggatcagtctgactgttccctggcaccatgactgtgaccactactggcgttatggtagctggtgccaggctgctcaaggatccaaggcctgtggggctccccgtggtcttgagtggtacctctacaaaaatctgggtggctctctgtatcagtctagaggcccatggggttcaggaaagttctcctgttcccaagattgcacaggtccttgtgggaactgtgatcacctggtggttgttacgttctcattctttccccatattagggagcatctcctggctctgcactagtccagggcaggcggctcctcagcttcagtcttctctgttcttcctgtgtccccttgctcccttgttggatcccaacatgttttcttaaaagagccacttgaagagtcactatttaccactttgtttcctctctgtgagagtggcacatactagccacttctagtcagccctagaaccctctagccctattttttttcttatagcacttatcctcaatatgagtcccttattargtttttttcacccttctagaatataagttccatgagagcagagttcccttctag

SEQ ID NO: 493813 - DNA, 616 bp, Homo sapiens
atagttattagtgagaaattaattgaaaacaatttttattttagggcattttgtgtgctttgttgtgtttgaggatgcaagaggagggattattgaacgccaaaattcatgcaagtcccatctgtccttcaattcaaataacaccatctcaaaattttaacctagaagtgactgacagcccattatgtaccatgtgctacatgctgggaataaaaggacagtaacacagcctctacattcgagagtacttacaaatctcactaaggcagcaaacttctcttatacaatgagccagaactatagaatacaaacataaacagaggatatgagaaaatagaagcaggaataactaacttaaataaataaatccaagaactagaagtcactaatgaagtgacagaaaaattatacagaataacaagggkatagagaaaaaccccaattatttcaagagccttatactaacagaactctataaacctattatttttagcagtttaatctatagatttctaaaagcagtctgcatcaagaatctgaaatatataactttaaaggaaggataagcaagaaagagggaatagtaaaggttatgttagccctccattaaaacata

SEQ ID NO: 493814 - DNA, 647 bp, Homo sapiens
ctgatctgacagaaggcagagctcaggtggtaatgcttgcttgcccaccactcacctcctgctgtgcagcctggttcctaacaggccacagactgctaccagtctgcagcctggggkttagggacccctgtttacatgattgagaatttctgttcttaggcaaccatcatctagcctcctatattcttctaaaataaatatgtaggtgatgcccatatcttcaatctacctctacctcttcttttctggccacactatttcaccctagtgcagaatgctaacaatttgttgtctatattattgttctagccttctaagtctttcttccactcattttgcctctcgaccacctcttatatacacttctattagattaagtcatttttgtattttcccatgcacaaacaccagttttccaatatcatgattctactaagccacgtaccacttacacaaccctactctttgcctctaccttgctctttaaatttttcttggatgttcttggcctgaattttaggataacaataaaagtttttgaaaatctgtgctgtgacattgattaaaatttctttgaatttataaattatatgggagggaaatttaactttttaaatatccagtctaaaaatatggtatatttcctc

SEQ ID NO: 493815 - DNA, 647 bp, Homo sapiens
ctgatctgacagaaggcagagctcaggtggtaatgcttgcttgcccaccactcacctcctgctgtgcagcctggttcctaacaggccacagactgctaccagtctgcagcctggggtttagggacccctgtttacatgattgagaatttctgttcttaggcaaccatcatctagcctcctatattcttctaaaataaatatgtaggtgatgcccatatcttcaatctacctctacctcttcttttctggccacactatttcaccctagtgcagaatgctaacaatttgttgtctatattattgttctagccttctaagtctttcttccactcattttgcctctcgaccacctcttatatacacttctattagattaagtcatttytgtattttcccatgcacaaacaccagttttccaatatcatgattctactaagccacgtaccacttacacaaccctactctttgcctctaccttgctctttaaatttttcttggatgttcttggcctgaattttaggataacaataaaagtttttgaaaatctgtgctgtgacattgattaaaatttctttgaatttataaattatatgggagggaaatttaactttttaaatatccagtctaaaaatatggtatatttcctc

SEQ ID NO: 493816 - DNA, 641 bp, Homo sapiens
agtgacagggccacagtttgaagtgaggtgctctggcttcagatgccatgctcccaaccactatactattctggttccccagataggcttggactatacccgcctgaatgagctcctctggttctttccatctttatcatttaaagtcagtgaattatcatgagatccataacataacatagactttagaggccactttgataatgagaacacacaagtggagacactgaaatcccatactgcctctccttcatggacttggccttcatgaagcttgagcctggctgggtgtggtggctcatgcttgtaatccctacactttgggaggccaaagcgggtggatcacttcaggtcaggagttycagaccagcctggccaacatggtgaaaccctgtctctactaaaaatacaaaaattagccaggtgtggtggcacaggcctataatcccagctacttgggaggctgaggcaggagaattgcttaaacctgggaggtggaggttgcagtgagccaagattgtgccactacactccagcctgggcgacagagtgagactctgtctaaaaaaaaaaaagaagcttgggcctaaggagcttctagaagggacaggcagtatgactgctggtgagtcaacttatcc

SEQ ID NO: 493817 - DNA, 641 bp, Homo sapiens
agtgacagggccacagtttgaagtgaggtgctctggcttcagatgccatgctcccaaccactatactattctggttccccagataggcttggactatacccgcctgaatgagctcctctggttctttccatctttatcatttaaagtcagtgaattatcatgagatccataacataacatagactttagaggccactttgataatgagaacacacaagtggagacactgaaatcccatactgcctctccttcatggacttggccttcatgaagcttgagcctggctgggtgtggtggctcatgcttgtaatccctacactttgggaggccaaagcgggtggatcacttcaggtcaggagtttcagaccagcctggccaacatggtgaaaccctgtctctactaaaaatacaaaaattagccaggtgtggtggcacaggcctataatcccagctacttgggaggctgrggcaggagaattgcttaaacctgggaggtggaggttgcagtgagccaagattgtgccactacactccagcctgggcgacagagtgagactctgtctaaaaaaaaaaaagaagcttgggcctaaggagcttctagaagggacaggcagtatgactgctggtgagtcaacttatcc

SEQ ID NO: 493818 - DNA, 530 bp, Homo sapiens
cagttcctccttggaaacaaggcactctttcagagtttgttgtagtcagtgggaatgaggtaacttaccaactctgctgaaatgcrttagaaagtttaaacaaagactggcaaatatctgaaataactggtgtttttcagatctagtttatgtttgatggggcagtttataaaaagataatatagaatataggaatttttgagagattaaaaaagtatttgatgccattcagtaacactgcctgctaacgtagctgtttttctctcatagagcagggatttggaatgagacctagaaccctgctgtgttgcttggttttaccctagataaatagttgaaaacagatataggcagtagagaggatggattagtcatcagtggagacatggaaatatccagcggttttgaataactttaaaaacaggagtctaatcaaatacagtcaggagaccaacaaattgaatagagagaaaggggttaacattgaggaaattggctacagaagggagggcaggaagggggaaaaggtt

SEQ ID NO: 493819 - DNA, 530 bp, Homo sapiens
cagttcctccttggaaacaaggcactctttcagagtttgttgtagtcagtgggaatgaggtaacttaccaactctgctgaaatgcattagaaagtttaaacaaagactggcaaatatctgaaataaytggtgtttttcagatctagtttatgtttgatggggcagtttataaaaagataatatagaatataggaatttttgagagattaaaaaagtatttgatgccattcagtaacactgcctgctaacgtagctgtttttctctcatagagcagggatttggaatgagacctagaaccctgctgtgttgcttggttttaccctagataaatagttgaaaacagatataggcagtagagaggatggattagtcatcagtggagacatggaaatatccagcggttttgaataactttaaaaacaggagtctaatcaaatacagtcaggagaccaacaaattgaatagagagaaaggggttaacattgaggaaattggctacagaagggagggcaggaagggggaaaaggtt

SEQ ID NO: 493820 - DNA, 464 bp, Homo sapiens
ttcaaagtcaggctgtacaaacaacggcagtaagttaggtaaaccatcctgtccagggggagttgaggcccagcatgggtgaaggatggctgagggcagattctgtacagagggtagcttagctgcaacacaggcagtccagagagaaaaaaagagaagtgaactggacgaggcattgcaggatttttatggctctctaaataagatctttatacctattgtggagttcgagtaagagacactatgaattaagagaaatgcttataaaatacgggttcaaaggcaaagtaaaaacaaacttttctgaaattctgtctttagggaagacattgggaaggctggtaaagaaggagttaaaaaaaaacygcaccgaaagtgactgggaagtagtgaataccagtgtatattgacaggaagtagggcctaagatggagtgatgagtgtctaatatttcctgtaggaag

SEQ ID NO: 493821 - DNA, 663 bp, Homo sapiens
tgttatttgtcctgttacatgtaaaatatcagttactggactcttccagaatcaggagaaggaatatggcaagccaatcaaatacctggagaccttacaggtttagtatagaataaaactgtcttcctaaataggtcattttcatcaggtgacagtaagtcgaaaaaagggtgagacaattttctttcattctcatcaataccttgtaagataattaccacagcaccgcactttctggatgtatgcagcagtggttaggagcagagtctgaagctggtctgatcagggttctaatatatatgggctttatccatgctagcttatgattcccctagggcgagctgcttaatctttctgagctcaagttacttcaccttttaaaccttagttcctcatctgtaatgtggggataacaatgccaaccttacagggctttcttgaggattaaatgaaacagggcatgtaaatgctcagtataggtgcgcattcaaattatagctgaaatattttgtgggttttgttattrtcattactattattattatatgatccaagacagaattcaacaaacattcactgagctgcattttgtgtgtgctccatctctactatgtagtaaatgagtctgacttggcttcattttccaagaagctggtattcagc

SEQ ID NO: 493822 - DNA, 678 bp, Homo sapiens
gcagcacacaaacatatattcatacacgcagaatgagtagaaagaaaaggaatgtgtatatacaaatgtggtgaaatgttaactgatgactcttgatgaagttcacatgggtgttcattgtattattcttcaacctcttctgtgggttggtaacttttcaaaataaaaagttggagcaaagaagaataaaatattgaggactccctaatacactttcaaatgtactatctcatttaggatttatagcaatcttaagtattatatagatttcacatattaaagtgataacaagtagtgaaatcctaatttgaatctaggtctgctcagaaagccctttcctcaatacaacaagacttccatagtaactcgggaacatgcatcatttctaagattgttaacttgaraacatgtaagtgatttataaatgaatttgtggattacaatcctaaggctgagatgactatagaacacatattggcagattttttatctatgcaatagtaaagaaagaaaaaaaggagaacaaatttttttggaaaaaacaagtttactagctaccagttttagtgttgataaacctttttcctcactatagacaaatctggatatgtggttaggaaatgccctgtcttcttgttccacagtgaatattaatgccaaaaaagatgcacaggttac

SEQ ID NO: 493823 - DNA, 626 bp, Homo sapiens
aggagaaaagggctatacgacaaagccacaaagacatggtgatatctttctgcttaggctgcagaaaaaaactagaagtgatgtagtgacctgtcttccgatgcctcaaattaagtaagaattaaataagttatgtgacatgcgagttaatggctcrcaccaatttaaaaaatgtcagggaagtctttagcttgaaagaaatcgagggagctgttacaggactagaatgatatgtgtcagaagagtcctgatgccatttcaagtcatctctggaagtgccaagggaccactgaccctctgcctgggagaaaatatacacaggaatatggaatggactaggctgggtagaagacagtcacgaaatatgattaattcttctgacactattttgctttgaaactgttctattggttctcccttcctctcccttggtcattatcttaggttcatcccataaattttctggtcactttgggacattagaagggtctcattttcaagttatgggaaagccaagtatcatctaaattaggggtccccaacccctgggccacagactggtaccggtctgtggcctggccacacagcaggaggtgagtggtgggcaaggagtgaagcttcaacag

SEQ ID NO: 493824 - DNA, 328 bp, Homo sapiens
tccccacatctgtaccactggggtccttttcgacaaccctcaaccctgcacacccacccagacccatgcagggatgttcaataaagtcaccaggggcatcgccgttcctcttcaggattcccaggccactttcattcacctgctctgtgggtgctgctcaccttctcagcttcttccttaagcatggaatctccgttagtgtactccacccaggtccctgcatcctggacacagtgtgagacttactattgtagttwtagctgtcagctctctgtcaggattacaatttctggtctcttatctctggcttcccccatcacaaccataa

SEQ ID NO: 493825 - DNA, 569 bp, Homo sapiens
tatagtctccaggttgggcacgatgggctcatgcctgtaatcccacccactatgggagaaccgaggtggtgggtcacctgagggctaggygttcaaaaccagcctggccaacttggtgaaaccccgtctctactaaatgtacaaaacttagccgggcagggtggtacactcctgtaatcccagctacttgggaggctgaggcaggaaaatcgcttgaaccgggagaggggggttgcagtgagccaagattgcaccaccgcactccagcctgggtgacagaccacaactctgtctcaaaaataaataaataaataaacaaataaataaataaaagtatagtctccagaccaagagcactagactcatcagggaacttgctagaaaggcaaattctcaagtccctccagaaacttcaccgtgtggctcagcagtccattttaatgagccctctaggtaactccaatgcccgctggagctgagaacactgacccagagcagagattggcaaactacagtctgtgaactccatctggcctgctgtccataagctaggagtggttcccatgaac

SEQ ID NO: 493826 - DNA, 649 bp, Homo sapiens
acttccttcttttttgtcttgtaaccaggaccagatcctgagaaacaaaataaaacaaataggcacaaggtgtaactgtctctcctcctattttgacccttgcctggggtccccaccaataaacctgaagcatctgtgatgccctggatgacaccctaaagcaagcactgtccacaggtttggctgacagatatattttgtgtagcctctacaagattaataatgggtaaatgtcacatcaaaactcaattatccagaatctcttagaaaaygtaaagatttggcctggggacagtgacaagaactcagagtgcagaatagcagtttacccttgaggctgagcatggactttcccacagtccccaccactccttctcgtttcatacctgtttcctttatactcactcatttataaaactttcattatccttgtaggcatttggtctgtgtcctctgccttaatacagaaattgattaagacttaactttaaatttgtacttgtaaaactttagcatttagtaaaatcatctgaggagtttgttaaaacacagatgtctaggcttaacccctagagtttctgattcagtaggtctcagacaaggcctgagaatttccatgtgaagcaagttcttagataatgcagttact

SEQ ID NO: 493827 - DNA, 637 bp, Homo sapiens
attttttaaaaagacactcttttaagctatgagtttttttctcctgtatctttcagaataaaggctttttcctgcacgtcctacacatgtatcctggaacttaaaatacaattaaaaattttaaaaaagaaataaggcttttatggcaaggatattttgcatactatagcaggtaaacattaataaagaaaaaaacctagacttttctctctgctcattagtccttagacgctgatttctgattttgtagagttgctgttatttttcctcgacgctgggctgcataactgagaaaygtgtttctcgcctacctggtttctcgcctacctgttggctccagcgtgctgtgttttccttcttcttactacaagttcaggaaatcaagcatggtctccatctgtgtgaggaggagattcaaggtgcctgtgccaggagcaagctgtgtagccctaagtggacaccaagaagagagaaaaatttagaaataacggaaatgaattgggttcagagaaatgaaaacagaactgccactttaaaaaaatatttctatttaaggacaatacaatacaaagaatggcatgtgggtaggcgttgaatagaggtggactgaatgaaaaaagaatgaagaaattaacct

SEQ ID NO: 493828 - DNA, 637 bp, Homo sapiens
attttttaaaaagacactcttttaagctatgagtttttttctcctgtatctttcagaataaaggctttttcctgcacgtcctacacatgtatcctggaacttaaaatacaattaaaaattttaaaaaagaaataaggcttttatggcaaggatattttgcatactatagcaggtaaacattaataaagaaaaaaacctagacttttctctctgctcattagtccttagacgctgatttctgattttgtagagttgctgttatttttcctcgacgctgggctgcataactgagaaatgtgtttctcgcctacctggtttctcgcctacctgttggctccagcgtgctgtgttttccttcttcttactacaagttcaggaaatcaagcatggtctccatctgtgtgaggaggagattcaaggtgccygtgccaggagcaagctgtgtagccctaagtggacaccaagaagagagaaaaatttagaaataacggaaatgaattgggttcagagaaatgaaaacagaactgccactttaaaaaaatatttctatttaaggacaatacaatacaaagaatggcatgtgggtaggcgttgaatagaggtggactgaatgaaaaaagaatgaagaaattaacct

SEQ ID NO: 493829 - DNA, 637 bp, Homo sapiens
attttttaaaaagacactcttttaagctatgagtttttttctcctgtatctttcagaataaaggctttttcctgcacgtcctacacatgtatcctggaacttaaaatacaattaaaaattttaaaaaagaaataaggcttttatggcaaggatattttgcatactatagcaggtaaacattaataaagaaaaaaacctagacttttctctctgctcattagtccttagacgctgatttctgattttgtagagttgctgttatttttcctcgacgctgggctgcataactgagaaatgtgtttctcgcctacctggtttctcgcctacctgttggctccagcgtgctgtgttttccttcttcttactacaagttcaggaaatcaagcatggtctccatctgtgtgaggaggagattcaaggtgcctgtgccaggagcaagctgygtagccctaagtggacaccaagaagagagaaaaatttagaaataacggaaatgaattgggttcagagaaatgaaaacagaactgccactttaaaaaaatatttctatttaaggacaatacaatacaaagaatggcatgtgggtaggcgttgaatagaggtggactgaatgaaaaaagaatgaagaaattaacct

SEQ ID NO: 493830 - DNA, 607 bp, Homo sapiens
actcagtattcgtatttgaagttcagtgctctatctgagacaatgcacaaagagtgctagaatttccatacaaactggtttgacattgcaatgtacatgttcaagggtttaatgctaatggaaagtatttcaagaggtaatctgtcttttcaaaccttaccactggtcctctctattgactttctatggcctcacaccattacctgtttcaacttttactttttccaaggacacccctttttatttcttcccagccagagaatgtttccactaattaaataagtggacatcagggatcacattttcacttatttccctttctccataatctcacactattcccctctgctctctttcttcagcactggggctatccttatttctgggcagcacttggcaaatgtttactagagtaacagtttatttacaatttatttctaattctatgaaatcactagttggtgtaatttcacaacatctgtggatatgcaatttgagaaatatttatgaaaaacacatcaatgctttcatcctgggggcatggtcatttcaaacaacatagaccagtgaataaaaacrgctttgggagctgacaaatctgagctga

SEQ ID NO: 493831 - DNA, 555 bp, Homo sapiens
tccctttggagactcatgcaaactttgccctttcttggcataacctggcctctttgctctctttctgcctacgtccacccactgttactctgctgcacatatttttcttcctcccctgactctttaaaggtgaatatgcttcaaagtttctgatctgagaatgttattacttttacaatacattctagacttagactatctcatttactctcaaagrtttgcacttttatctcatcacttcagtgtatggcattgcctcataattttcagagtaaaaaaagaggccataaggcaggaataccttcatcttgccactgtcaaatctctaaacccacctgtatctgtcctgtcctcgttgtttcacctcttttgcaacataggatgcatctttcctacaaaaacaaaggccgattccttcacctttaccccagattacccactttacccctgtacctcagcttcagcctggttcaggacttttgtcatacctgttttcctctcttttcctacttagtctctccctttctgaattcttcccctaggcattcaatatgc

SEQ ID NO: 493832 - DNA, 479 bp, Homo sapiens
ggtttctaattataggaaggtttttgacccaataccaaggttactagaaaattaaagtgctgttttaaagataaatgatgactttgccctggaggctccttctcgcagtctctgccattgaatctaactcaacgttctgtgatcctttagagacagtactttattttctaccaattgagcctttaaggaggtatctctttaactacattgttaatttgtagagaaatttaactcaaactagcttcagcaagagtagccaattgttcttggctcttgaaactcaaaagtccagggatagatgtttgaggaatggctggatccagggtatcaaatgataccacccagctcatttaatctttccggtgtttcactctttctccatttctgcacctctcagctctttcttctgtgtttgrcttccttctccggggacttctttcttcattaatggtggcacttggacttccacaggcatacca

SEQ ID NO: 493833 - DNA, 610 bp, Homo sapiens
tgaggcatgtggctgcagacccagtgagtgacagggacagctcttggccttttgagcttcaaagggcataaacagtacatttggaggagatgcctgctagttccctttgatctccacctgagaggcaatggggactctctagatgtagggcagggaggggaggagttttggatgcagagtagaaaataatgagagagagagagagagagagagatgctgagaagcaactgagagagctgcaggtattggttctcagagcaaggtggagcctcaccccgtccctctaacctgctgtgcaccaaaggaagctagaaacgatagacccgaccccatagataggcttgggggacgcgcccttctcctgcccacagccgcattcacagcagcaccgggctgtaggagcagggcagtggagctggttggatgttgcatctagacagacaagatcagggattctgtggcatccccccagcccccgagggtcccagcacagcagacattacctgtaccttcaagactcaggctggyggcctggcagaggccctgtagtgtggagagggcacagcagcgggtggctggcctttagctatgtgtaggtggtaacccccac

SEQ ID NO: 493834 - DNA, 538 bp, Homo sapiens
ttccattgcagagccgaggccccaaagggtcttttacccgccattctcgctgatttgtttaaagtgtccttcttattaatttttaaaactgttgtaaaagttttgaggcctggcatggtgactcatgcctgtaatcccagcactttgcaaggccaaggtgggaagatcgcttgaagccaggagttcgagaccagctccaccatgagtcagagaccagcctggccaggagtcagagacatagagagacccccgtctctamaaaaaaatgtaagaacttaaccaggcgtggtggtgcacacctgtagtcccagctacttgggaggctgaggcggaaggatcagttgaacccaggagtttgaggttgtagtgagctatgattgcaccgctgcactccagcctgggtgacaaagcaagactctatctctcaataaataaacaaataaaagaaaaaataaaacgaaagttttaatttattttttgagtcacatgtgttgaacttatttattcagtgaaatttaacctttcagagtgtacaatg

SEQ ID NO: 493835 - DNA, 578 bp, Homo sapiens
gttcattaatagaggagactgacttgtcaattctatggcccaggtcattgtgaagcatcttgggttggagctttgtgtctgaggatggtggggcagaagacctcagcccttgccctcaaggaacttctagtctaagtggaaaagcaagcttatttcctttgacttcctcaaccctcctgtgaaaagagccctggccttgggttttaatcccacctctgccatttgttagttctgtgaccttgggtgcatgccttaatctttctgaacctctgtgtcttcatcagcgaaatgcagaaatgataatgcctcacaagctggttgtacagattgaataacaatgtgaacagagcaccgagtataatccctggtaagtagaaaaactccatcccaatattcaaagttcacaggcacagtagtggcgttccgagcwcagggttacatcttcatccctgtgggtgggaggacactgactttgacctgccacggctaaaggtccttcccggaacccccagcttccttccagctctaacatgttccatgttccggttctcccactgatgggcctttgcctttaggtg

SEQ ID NO: 493836 - DNA, 627 bp, Homo sapiens
gttaagggtcagcaaaccttttcttaaaaggccagayagtaagtatctcccacattttgcaggccgtatggtctctgttgcaaccacacaactctgcagttgcatcatgaaagccgccgtagacaattcataaacaaataggcctggctgtttccagtgagattctatttatggacacttctatttgaatttcatataatattcacatgccacaaaatatcattcttctatagatttcttttcttcaaccacttaaaaaccatttaagaatcattcttggtttgcagaccatacaaaagtaggaggtgggcgggatttggccgatggaccatagtttgcctgtccatgatccgggtggtggggatgtgggtattctttcaattctttgaggtatttgaaattttccatataaaatgttgggaaattgtcttttctaagtcaatggcttgtcttttagctttgttttgatgtttcattatttaaaaataatttttggggggagcatgctatttatttgtagccagctaaacttgccaaccttttcctttgtggtttgtgattttgtatcttgctaaggaatctttcctaccctggcatcacctagctatgctcctatattttctgtaa

SEQ ID NO: 493837 - DNA, 627 bp, Homo sapiens
gttaagggtcagcaaaccttttcttaaaaggccagacagtaagtatctcccacattttgcaggccgtatggtctctgttgcaaccacacaactctgcagttgcatcatgaaagccgccgtagacaattcataaacaaataggcctggctgtttccagtgagattctatttatggacacttctatttgaatttcatataatattcacatgccacaaaatatcattcttctatagatttctyttcttcaaccacttaaaaaccatttaagaatcattcttggtttgcagaccatacaaaagtaggaggtgggcgggatttggccgatggaccatagtttgcctgtccatgatccgggtggtggggatgtgggtattctttcaattctttgaggtatttgaaattttccatataaaatgttgggaaattgtcttttctaagtcaatggcttgtcttttagctttgttttgatgtttcattatttaaaaataatttttggggggagcatgctatttatttgtagccagctaaacttgccaaccttttcctttgtggtttgtgattttgtatcttgctaaggaatctttcctaccctggcatcacctagctatgctcctatattttctgtaa

SEQ ID NO: 493838 - DNA, 627 bp, Homo sapiens
gttaagggtcagcaaaccttttcttaaaaggccagacagtaagtatctcccacattttgcaggccgtatggtctctgttgcaaccacacaactctgcagttgcatcatgaaagccgccgtagacaattcataaacaaataggcctggctgtttccagtgagattctatttatggacacttctatttgaatttcatataatattcacatgccacaaaatatcattcttctatagatttcttttcttcaaccacttaaaaaccatttaagaatcattcttggtttgcagaccatacaaaagtaggaggtgggcgggatttggccgatggaccatagtttgcctgtccatgatccgggtggtggggatgtgggtattctttcaattctttgaggtatttgaaattttccatataaaatgttgggaaattgtcttttctaagtcaatggcttgtcttttagctttgttttgatgtttcattatttaaaaataattttkggggggagcatgctatttatttgtagccagctaaacttgccaaccttttcctttgtggtttgtgattttgtatcttgctaaggaatctttcctaccctggcatcacctagctatgctcctatattttctgtaa

SEQ ID NO: 493839 - DNA, 627 bp, Homo sapiens
gttaagggtcagcaaaccttttcttaaaaggccagacagtaagtatctcccacattttgcaggccgtatggtctctgttgcaaccacacaactctgcagttgcatcatgaaagccgccgtagacaattcataaacaaataggcctggctgtttccagtgagattctatttatggacacttctatttgaatttcatataatattcacatgccacaaaatatcattcttctatagatttcttttcttcaaccacttaaaaaccatttaagaatcattcttggtttgcagaccatacaaaagtaggaggtgggcgggatttggccgatggaccatagtttgcctgtccatgatccgggtggtggggatgtgggtattctttcaattctttgaggtatttgaaattttccatataaaatgttgggaaattgtcttttctaagtcaatggcttgtcttttagctttgttttgatgtttcattatttaaaaataatttttggggggagcatgctatttatttgtagccagctaaacttgccaaccttttcctttgtggtttgtgattttgtaycttgctaaggaatctttcctaccctggcatcacctagctatgctcctatattttctgtaa

SEQ ID NO: 493840 - DNA, 672 bp, Homo sapiens
aataaaattctaaatatagatgtgctgggggtaaaaaatcttgacaatgtaagggctatttacatggcagaaagaaaaggaagaaggtatatcaagaatagcctgcactgaaacatgaaaacatattaagtagagggccccagagtatccaacgtttttaaggtaaagattgatcaaggtgaaaaaaacaaaacaaaactcagtctcttatctttttgggataatcttcaagatatttagataaagtagaagagttagatgagtgcttacaaatacaatgtggcactctaaagcaatataattttaaaatattgtgttcaactacttatttgttgtttcagcttgttttaataakaatcttgaaaataatgatagcattaactatcacagacatagcatgtgaatgctgggtaagcagtcatactctgctaagaagctgtctgtttctcttaaatatagtagcacagaatcaaatatcttataaaacttatcctgaaattacatatgcatcattatatttgattagaatgtattctgtacaacagctacttctgataaaaatgaatctaaaaagttaccttccaaaaatcaaggtccctgcgattctttctcttcttttgcaagaagaaatgtgaattcctaaaagctctgtatatattagataggaagcag

SEQ ID NO: 493841 - DNA, 598 bp, Homo sapiens
tattggtattatcctaaatgtacacataaggtttctggaccagagaaaattattattatttacttactacaaatgataactgtgttgtttccaagtgactcaattcttacacaatgaggtaataaaagacagctgtcacactccatgtacaggtctmtacaggagaaaaattcggttgccctcactccctgagtctccttggaaacactatgggaaggatcctgagtcattactttaatctattgatatgtaaataattctctcctgaggaaaaataagaccagcgtctccagctttataactctagcgtctcatgatcccaagttttattcactcttgaaatattcttcccaagaagtaaatctctctgaagttctcattatcttatctgtcagaaattaacatccagagatcctaggtcccaagtttcagcaaaattttcttcaaaagacctgactgtgaaaaagtataaaacatattttacctacagtcccacagactttgagcttgaacattaccagtttttattacttgtctgtatattttacttatcaacctacccctcaaattaactacagctgtcttaaaaccatttaaa

SEQ ID NO: 493842 - DNA, 654 bp, Homo sapiens
atcttccagtggtctctccccagcaatccttggcatctcttgttttactgtggcatcactttaatctctgcctccgtcttcacatagcctttttgtgtgtgtgtctcagttttctttttctgtttgttaaaagaacacttacattgtgtttatgatccaccctaattcagcatgatttcatcctgatccctaccttaactacatttgcaaagatcctatttccaaataagattacattctgaggctttgggtaaagttactaagaccaactattatctttactattgctttaatagaaagtatttttcatatttttcataaaaagcattgtctacccatttgtaggtactactttctcattataaaaatckgagtgccatgccttctgccaggaccttggtgagacatttataaggaaatgatattcatttcttggaaccaataattgtcagttttattaattatagcaattgtatgagaaaggtcacacaattttccttaactgctgtgagtttaggagtaaaaagcaatttccaacagtggaaatggagcaatgttttctgaaatagatcagtctgatacaattaaatagatcatttaaactttgtttatttttggttcaagatgtaccaaaatgttttcagtagtgaagca

SEQ ID NO: 493843 - DNA, 596 bp, Homo sapiens
ttcagcaaagcccctgtgatccagatgaagagtcactggtagagtccatgtgccgttagcctcatagttttgcacatgctatttcatctgcttaaaatattcttgtcaatttcctgcagataagaagccatcggagtggtcttttactgggaaacatgcttggatttgcattcttaaaaggaaactgatggactaaaggcctctccagactttggtgtggagggagcctgcctcaggtgctgtaggattctttgccaaagstagggatatacagcttccctaggtgtcaccgcccccaccccaaaactctgccacagcattgagggtgctccaaagatgcagaccattgtatccattaaccttagaaaatcaatctctctcttccattctttcataccttcctgtttaccttcccaaaggtctctgctcctcctacctcccaggatagaatcccctcaaggggcctctaacacaccaaagccatttctcttctagtatggacaatttctctttcctttctgcaacacaactctcccctgaggcaaagggagcacaggggaactagctacctatgtggaaagggaaaagaagtgtac

SEQ ID NO: 493844 - DNA, 596 bp, Homo sapiens
ttcagcaaagcccctgtgatccagatgaagagtcactggtagagtccatgtgccgttagcctcatagttttgcacatgctatttcatctgcttaaaatattcttgtcaatttcctgcagataagaagccatcggagtggtcttttactgggaaacatgcttggatttgcattcttaaaaggaaactgatggactaaaggcctctccagactttggtgtggagggagcctgcctcaggtgctgtaggattctttgccaaagctagggatatacagcttccctaggtgtcaccgcccccaccccaaarctctgccacagcattgagggtgctccaaagatgcagaccattgtatccattaaccttagaaaatcaatctctctcttccattctttcataccttcctgtttaccttcccaaaggtctctgctcctcctacctcccaggatagaatcccctcaaggggcctctaacacaccaaagccatttctcttctagtatggacaatttctctttcctttctgcaacacaactctcccctgaggcaaagggagcacaggggaactagctacctatgtggaaagggaaaagaagtgtac

SEQ ID NO: 493845 - DNA, 553 bp, Homo sapiens
ctatttggcccctgtatggttgtaaaatcagttccttaaatgcaggataawcagagagctctgcatgtagcagcaccaatgagcatacaaatatactaataaagaggtcctcagaaaacaagtttgctctaaaatgtttcttccttaacgtctaatgatttttgtttcacatttgagacagtatactactttcataacactgttcatggaaaatctatcccgagagggaccctatttagaaaatataaactctatggaaataaagtaagggagttatacaaaaaaataattattcgatctgcagattccagaggccaataacttttcaatgagaattttacaatttattatcaaggtttttcatttcctgacttttagaaggtgggcagtgacataggtatggatttcccatctgtcaggtccaaagtgaaacctcatcttgtcaagaaaagtctccctgacccttccaattcataacagtctccaccttctctgaacctctgaatacattgcattatcattcttcttgtcaccataataagaatgcacagct

SEQ ID NO: 493846 - DNA, 638 bp, Homo sapiens
tagttagctaatctgagtttgagcttaaaagttggaattatttttaaaaagagaaaaggaaagaaggaaggaaggaagggatggagggaggaagggagaaaagaaggaaggaagaaagaaggaaaaaggaaagaaagtcagggaaagagaagacagagcaaaagggacagcaagtggtaaaacaaagaactaggagcatgaataaatagtaggcttgaaaataggggataggattctgaaagcataaacacttccccaaagccataagcatacttgtatctttcatttttgtttactatgtccaggcacaattcattttattgtgcttcactttattgtgctttgcagttaatgtgttttcttcaaactgaatgctttttgcaaccctgtatcaaacaaatctatcagtaccatttttccaagattatgtgctcacttcmtgtctcaatgtcatgtttttgtaattatcacaatatttcaaatgttttcattcttattatatctcttatagtgatctatggtcagtgatttctgatgttactattttaattgttttgtagcaccacaaatcatgcccatataagacagaaaacttaatgaaaaagttttgtgttctgactactcaactccattaacca

SEQ ID NO: 493847 - DNA, 578 bp, Homo sapiens
tttccatgaaacatcatccttgaagttatagtttttccttttaataaaataactactactgcatttttattaacctctcacatttcccaagccactttgtgggagacaaacatacaagataggccacacatacgtgtttgcttttcagaaaaattacacactggtaagaagcttagaatcaacacagaattatggctacaagtaaacacagtcgaagattaaattaaatgcctacatccaagggttaataggatcagacccaagtgtctgagaccatcagaatctaccaatgcaaagttaggatgtatcctcactgtataatatatttcaaaaacaattcaggatcctgtgttagaaatacaaaattcaaatgctggctcaatagcttaaatgaggaactttgataacatccctgggcttctgcatctgtgtcctcayttgcaaaataaattttatttatttctatggcacttttagttctactgtgatcaatgcttaaggcagagatttatcgctcagatcaagtttcgggtaagggcctcttccttgacgctagacagcacccaccgttggccttc

SEQ ID NO: 493848 - DNA, 674 bp, Homo sapiens
gtagcagctgctaacaaattgttaaataaatagaaatatcactctacaaaacatgttggaggtagcagaaaacctcaatggacagataacaattatattaattgaaacaacattgaagatattcacagaaaacaacaaaagtggcatttattaagtgagttgtatcaagcatttgaggaacataaaattttaatcttatgcatgmcttcccggagaataaaaataaggagtactcccaaagtaatcttaagactataggataaatatgatatgaatcaccaatttaggtatgtagaaaagaaaaactacagatcaaaattatttatgggcataaatgaaagtatcctaatagaattttagaacacttcagccaatagtatgttaaaaagataagatccaagttagcttctcctcccaggaatgcaatgctgattccagtttagataatctaattctgtagttaattgctttaaagattaaagagacaaagcacatgattcgtgcagtttatgtaaaagcagcttttgatatagaaatgttaagaaccagtgtaataagaggttacacggggtaaaaaggtgttaacatgagaaagctgctgcctttcaaaggaggtgccaaaccacatgtaaacttttcaaagaagagagccaaagataattatgtgacttttt

SEQ ID NO: 493849 - DNA, 674 bp, Homo sapiens
gtagcagctgctaacaaattgttaaataaatagaaatatcactctacaaaacatgttggaggtagcagaaaacctcaatggacagataacaattatattaattgaaacaacattgaagatattcacagaaaacaacaaaagtggcatttattaagtgagttgtatcaagcatttgaggaacataaaattttaatcttatgcatgacttcccggagaataaaaataaggagtactcccaaagtaatcttaagactataggataaatatgatatgaatcaccaatttaggtatgtagaaaagaaaaactacagatcaaaattatttatgggcataaatgaaagtatcctaatagaattttagaacacttcagccaatagtaygttaaaaagataagatccaagttagcttctcctcccaggaatgcaatgctgattccagtttagataatctaattctgtagttaattgctttaaagattaaagagacaaagcacatgattcgtgcagtttatgtaaaagcagcttttgatatagaaatgttaagaaccagtgtaataagaggttacacggggtaaaaaggtgttaacatgagaaagctgctgcctttcaaaggaggtgccaaaccacatgtaaacttttcaaagaagagagccaaagataattatgtgacttttt

SEQ ID NO: 493850 - DNA, 639 bp, Homo sapiens
agcttttgatatagaaatgttaagaaccagtgtaataagaggttacacggggtaaaaaggtgttaacatgagaaagctgctgcctttcaaaggaggtgccaaaccacatgtaaacttttcaaagaagagagccaaagataattatgtgactttttcatcccttcacccaaaaaaagattaaaatgggggtacaaagtgcagccttccacatgtctagacacagaggaaaatggaataataatttcttccacatgacagacattggtaataattaagaaactggggcccggcggggtggctcacgccagtaatcccagcactttgggaggccgaggtgggcggatcatgagatcaggagatcgacaccatcctggctaacagggtgaaaccctatctctactaaaaatacaaaaacaaaaaaattagccaggtgtggtggcgggtgcctgcagtcccagctactcgggaggctgaggcaggagaatggcgtgaacctgggaggcgaagcttgcagtgagcccagagcccgccgctgcactccagcctgggcaacagagcgagactccgtcaaaaaaaaagaaaaaagaaattggaattaagatctcatrttgatactatttcataaatataagctgaagt

SEQ ID NO: 493851 - DNA, 641 bp, Homo sapiens
ttctttgagtttatccttttaaaagttttctgagcttctccttataggactcaagtgacaaggatgttataacttttgatatttttcccacaggcacctagagtctgttatttttttcaacattttcccttatgtttcttaacaaataaattaattaacagataatttctgttgggctgtctccaagtttccagtctctttcgtctgttttcttcattcagtaggtaaactcaccagtgaattttaaaatttttatctattatattttcttgttctaacrttttcatttttaaattgtttttaattcactgctgaaaattactatatttcaatttatttccagtgtgtttacttttaactacacctacaactaaaggatagttatgttctttgctataaagtcattctgtgtaattccaacatttgggttgccttgtgtttagcattagttgattgtatttttccttgacaattcatcatagtttcttggattatgtataattttttggagtatacactacacatttttgatattattctgtgagattgtaggttttattaaaagcctgttgacaatgttgtttatttataatatgttccattgccagctcaatggataagcccactgtagcttaactcac

SEQ ID NO: 493852 - DNA, 650 bp, Homo sapiens
aatacagttttgggtgtgtgtgtgtttttttttagacaaggtcttgctctgtcaccaagctggactgccaccttcgtctcctgggttcaagtgattcccctgcctcagcctcccaagtatctggaattacaggtacccaccaccacacccagctaatttttttatttttagtagagatggggtttcaccattttgggaaggctggtctcaaactcctgacctcaagtggtttgcctcctttggcctcccaaagagctgggattacaggcatgagccactgcacccagccgtttgatatagctttaatatcaataatacagggttataatttttgctattatatgacttttaaagaaattaagaaaaaaatatatatatttacacatgtagtcttttgtatttacccatggaagagggtaagtccatatggtttgtacaaaacaaagtcaggaaagtatgatcatgtacktcggtgaagcttcaattagtttggtatggataggacaatggtggtgagtcaatagtgatgtgaagtaagataagagaagtgaacaagagccagattatgaaggattttgtggaattttcttgtttctttactctggtaagcttatggattgatcatctgaaagttctgtgaagcctaataa

SEQ ID NO: 493853 - DNA, 588 bp, Homo sapiens
gacaaactactattagagaatgaagagagtatcatttaatctgcctaagagatgcggtgatagtattcacaggtctctgcctgtttcagcttttttttcacccagccccaccactggtaggaagggtatctttaaattcaataactcacagaagttcttctataaaagctgatggacattagcaagacatcatggtgtttttgtttggtaggttctccattctgagaaatacaggaattgatataacatagaagctgccagcttggagcacagggcattgcaacaggattaagttgagatagaggagtagacaaggggaaagaaatcaaaaggagaggggacttctagtgcctatgagaagttttgtgcagcaccgagaaacaaataattaaggtaaagtataagaaagatatgtgccctgctctggatccctggtcagtcataaaaaagagtagttttgtttttctttttttttttttcctgatgatgaatcaagtctatgatcctctgaagggcataacaagggtacacatgctatagggaaacttcactccgwattcaagtttgagctactcccaaagttcaatt

SEQ ID NO: 493854 - DNA, 642 bp, Homo sapiens
cgttctctcagcacagacagttcaatgttttaagcttctatagtatacatatgcaggagccatgtctatggttctccaaaacatgacaaaatgggcatgccagaatcaatgctgttaaaatatacaggtgtggccttaaaaatggaataactttaaaattatatatagtttgtaatttttaaaaattgcagtctattttgctattatcaattaaaatgaaaactgatagaaaactacacttataaaattttgttactggatttgacttgatggctcagcacttaagggaaactctcattggagggaacttgccatttatagaggatttcatcagtaatcaaataattttgagagagaaggacccaaaaggactatrgagatgagagtgagcagctccgggatgtattcctggctctctgtttatagtattcacttcatcagtctgggtaaagttgacctggatagagaaaagaagaaagaaatgggttttaatagtgaggacaatgctatcttctacttacttcaaagcagataggtttatgatgaaacagagttttgtaaatcttgtcgaattagaaaacaaatcactgacaatgtgcacaatcagaaaaaataaaaataaaaaaattattgacacttgac

SEQ ID NO: 493855 - DNA, 576 bp, Homo sapiens
agataacctcttggcatttcagtttcctcattttaagttttggatatgacaatacctatttcacagggttaacataggcattaaatgagaaaatccatgcaaggtaccaataatagcaaattacttcacttcatttgaattgggtctgctggttggcaaattccttttactataaatctttgaacacggtcttaagctcagcagcttttggcagctaagcagaaaatctggctttctgccaaacatgtgctctttrttgtaaaatatggaatgttgtctctaggagatactttgctgggctcaggactccttcccctcctccttgcactcaaatatgcccatgtcacaatgatcatcaatgcagtgtgagtggaagtgatctgtaatacttctagacggggtttccctttttcctcccttcacacattccaccttatccaccaccattttgcctcaggtagcaggtaattgagttattaattatctttagtttttgacatgctattatttcatttttgttttttccttttagcttccatccccacacccttgctgttttccccatatcccacaaac

SEQ ID NO: 493856 - DNA, 605 bp, Homo sapiens
cctgtgttttatttttgaaggaccttgtgggacaatccagtatctagactttaaaacgccttgtgttcttccattrtgttccacgttgtcctttagactagtcactgggcatttttgtctcactgagctaattgtatttgccacatattgatcaaaaataatttcatggcctttagcttcttattttaagaactgagcaaatgtgctgattgtataaataagacagaatggagaactttcctgggaaatgagagatattttgaaaacaactgtcatactgaagactcagggaggcttaattagctgatgcttgcaaagtactttgaaaaatcaaaaccatgatgtccttgctaagtatgatgaataccatttattcttggatgagtaaaaagtcatttattttgagacattcgagtttggtgtgcactgactacaaaatacagattatttttgcagaaatagaaaataaaactccagatgaaaaatgcaaaaatgagacaaattttggaattcacagaattattattctcaaagacttaaatatgcagtattgatgtgaaactaaatcaatattattttgctcaaatgcgtgagcttattcaaag

SEQ ID NO: 493857 - DNA, 667 bp, Homo sapiens
tctgatagagttcaaaagttcaaaagcacagaaatggagagtaagtatatctatctttccttttcttttttttctggagacggagtctcgctctgtcgcccgggctggagtgcagtggtgtgatcttggctcactgtaacctctgcctcctgggttcaatcaattctcctgcctcagcctcctgagtagctgggactacaggtgcacaccaccatgcccagctaatgttttgtattttagtagagacggagtttcacgtgttgcccaggctggtcttgaactcctgagctcaggcaatccactcgcctcagcctcccaaagtgctaggattataggcgtgagccactgtgcccggcctgsatttctatcttttatagcaacttgacactgtcatgaaatcccatgtgatcatttttctagtaattcattttcattgaattttatgaaagtattgatccatgatggatttgaaatttaaaaatataaccggtttttaaccataggtagtttgagaaatatctagctatcagatgactgcggttgaattaaatttagcctaaagctgcctccttgcatattttaagtttggcctaaaggtttatccatacatagtgaactgtaacctaactggatatgtaaacagactatagcctacccttgtaacaag

SEQ ID NO: 493858 - DNA, 667 bp, Homo sapiens
tctgatagagttcaaaagttcaaaagcacagaaatggagagtaagtatatctatctttccttttcttttttttctggagacggagtctcgctctgtcgcccgggctggagtgcagtggtgtgatcttggctcactgtaacctctgcctcctgggttcaatcaattctcctgcctcagcctcctgagtagctgggactacaggtgcacaccaccatgcccagctaatgttttgtattttagtagagacggagtttcacgtgttgcccaggctggtcttgaactcctgagctcaggcaatccactcgcctcagcctcccaaagtgctaggattataggcgtgagccactgtgcccggcctgcatttctatcttttatagcaacttgacactgtcatgaaatcccatgtgatcatttttctagtaattcattttcattgaattttatgaaagtattgatccatgatggatttgaaatttaaaaatataaccggtttttaaccataggtagtttgagaaatatctagctatcagatgactgyggttgaattaaatttagcctaaagctgcctccttgcatattttaagtttggcctaaaggtttatccatacatagtgaactgtaacctaactggatatgtaaacagactatagcctacccttgtaacaag

SEQ ID NO: 493859 - DNA, 586 bp, Homo sapiens
tgctgcatggcacccctcctcttactggagatttgggcaaagctttcagatgattcaagctctcctgagtgaagggagcctatcgactatgaagattctcattctgtgtagtctgaaatgttctcacttgacggtaaaatgcttcctattctttacatagcttgcactgagaagagagctaccaaaaagaaggaaggaagagaggaaraagaggaggaatctgagagaagaaagtaaagaagaaaggaaaaggtagaaagaaaataaactaaaaggtaagaaataaagggaagaactagtggggccaagagaataaaaggaatctgaataaagattctattttctgaagagtaataaaatacctttcactatgtcctgaccccaggtacaggggcctgttttctccagatgtaataactgcttcaaaggaagcttcagaccaggagcaagtaactttgccaagtcaaggaactgcaaaatggacactccacactacagaaagcatttattttgaagaattagatctattttcttcatttgcctggtaaattcaggctagttttcaccataatattattataacttt

SEQ ID NO: 493860 - DNA, 589 bp, Homo sapiens
tgaaaattaaactttattatctattgtagaaacatttaactaaacccagcatgtcaattacacaatgaaagttaacaaagaacagaggctgaaaaagtatctgctatacattgaaagtacccctgtaagtgyagaaatcagggaacaaccataggaacaaaaacaatatgatgcatttttttcctctgtatatttcacctgagactcttaatagtgctacgtgactaggagaaaaagcaagtattgtgggctgtccactcagaataagggcttattacattgtgacactctgtaagtgagccaagttttttgacatttctttttttctttaccatcattatgacaatgattattacaattctaaatctagtcaaatgcaattggatatgatttcatgagtcttgaaaaaacacactcaaaatgtctacttgtttgatttttctctggatattaccaaaaatatgtcttttgtttatctctttcagtgttccattgttttaataaaatataagcataatagaaaaagccttatgttaatagtttcaacagaaaatcttttttgcattttagttgattaaaccagaaaatt

SEQ ID NO: 493861 - DNA, 642 bp, Homo sapiens
gctggagagtggactgtgtacctggctgactggagtgtgctttggtgtaggatatctaatggatctcagaagaagtggaatctagccagcatcaaagggtatacttaaaccttcaagttctttctttttcccaccctctcatcccaaggccatggaaaagtaacacccagagagaagtctagatgaacagaaaaaagtcaaaagttttgtgaaagagtgacaagagaaatgcayccacaacctttccgagtaaatagaatgtctgagcagaacagtctacatcacatataagccatataaaaataatgacatgatagccatataatcatctttggaaaataaaaatgagaagaaagaaaaataatattgaatttaacaagtggttaaagtagataaaaaatccagttgggggacaggaaagtaagctaatccccacaagggagtcatatgtagaggataatcagtaaagcataaattttttcaaaagaattccacaaagagatgacaaaatacaatgacatgaaactgggaattacaaaactaaagattaaaaaaaaacttgaaacagaatattgaatccaattaaatctagaaccaagagtatataactggaagcaataatgattgcaaaacagaatatta

SEQ ID NO: 493862 - DNA, 642 bp, Homo sapiens
gctggagagtggactgtgtacctggctgactggagtgtgctttggtgtaggatatctaatggatctcagaagaagtggaatctagccagcatcaaagggtatacttaaaccttcaagttctttctttttcccaccctctcatcccaaggccatggaaaagtaacacccagagagaagtctagatgaacagaaaaaagtcaaaagttttgtgaaagagtgacaagagaaatgcatccacaacctttccgagtaaatagaatgtctgagcagaacagtctacatcacatataagccatataaaaataatgacatgatagccatataatcatctttggaaaataaaaatgagaagaaagaaaaataatattgaatttaacaagtggttaaagtagataaaaaatccagttgggggacaggaaagtaagctaatccccayaagggagtcatatgtagaggataatcagtaaagcataaattttttcaaaagaattccacaaagagatgacaaaatacaatgacatgaaactgggaattacaaaactaaagattaaaaaaaaacttgaaacagaatattgaatccaattaaatctagaaccaagagtatataactggaagcaataatgattgcaaaacagaatatta

SEQ ID NO: 493863 - DNA, 516 bp, Homo sapiens
aggtggatataacactggcatttgcttatgagagttgttgagacgtttaataagaacatgtgctgatatacgtaacaagaacagtgtctggatagaaacctgtcctaccactgcccaacaggtttctaagataacatccttggcagggtaagagagtctttaaaaacagaaaggaaggtgattctttaggacatagataaatagaaaatggaagtctggaggttctgtttgatgattgtagtctgaagatcaatcaatcaatcatccagtgtacctttatgtaaaagcaaaaaatgtaattatcagggaaagtagctaataatgtgaccacaacttccttgaaaaagtaaacacatcaatgggaccaacatttttgttagcttgaattcttamctaaagctgtatgaataagtattatcagataataaaacaatctggtttcctggtaagaaaaatgaaactctgcacaatttgttctacataccagatgactttatttcatatagtaacactcct

SEQ ID NO: 493864 - DNA, 560 bp, Homo sapiens
agtgtgaagatgtaaagatgttttagttgtcacaatagctgggggatatggtcataatttagtgggtggcaccagggatgaaaaacaccctgcaaagcatgtgagactattcttacaacaaaaaaattaccctccccaatgtcccagcagtgttcacgttgagaaacacttatttaagccatgattgtgttcatggcacactttacacaaaatactggaatttttggatgcacattcaaagaaatgcagttgtagtcacatattacwgcatttccttggatgacctttagcactgtcttgctgtttgaatagaagcgtttactgccttgaattccatcccataatctccaccggccaaattctcatttgtttcagtaaacccaaatctttcctaggtgctaagtttgtggatgtatgccacctcttctatgttccttgcagcaatttttgctccactcttcaccacatcttttttccagctttatggaagtaggatcaactacaccacatcttatgacactcagggctgtgagttcagtctgccagacatttctaaaata

SEQ ID NO: 493865 - DNA, 574 bp, Homo sapiens
caggcatttggaagagtgtgaagatgtaaagatgttttagttgtcacaatagctgggggatatggtcataatttagtgggtggcaccagggatgaaaaacaccctgcaaagcatgtgagactattcttacaacaaaaaaattaccctccccaatgtcccagcagtgttcacgttgagaaacacttatttaagccatgattgtgttcatggcacactttacacaaaatactggaatttttggatgcacattcaaagaaatgcagttgtagtcacatattactgcatttccttggatgacctttagcactgtcttgctgtttgaatagaagcgtttactgccttgaattccatcccataatctccacsggccaaattctcatttgtttcagtaaacccaaatctttcctaggtgctaagtttgtggatgtatgccacctcttctatgttccttgcagcaatttttgctccactcttcaccacatcttttttccagctttatggaagtaggatcaactacaccacatcttatgacactcagggctgtgagttcagtctgccagacatttctaaaata

SEQ ID NO: 493866 - DNA, 578 bp, Homo sapiens
aatcttgatgatgtttagtaagttctgaactcatccctatgttttctattctatgaatccttcatctcatttttttgttactgtttaattaggcatatttgaattgggttcctatcatttgccactggaagagtcctgactgycacaatatcactggaaagaatcaggtgacctgagttcaatgtcagtctatctctccctcctagcagagcaacaggggaggacaattcagtcaaatttgctacttctattttcctttctactatagtggattaatgtgaggattaatataatgcttagcacagtgctggaaaaatagtaaatacccaataaatgttcatttatattattaactttatcataccagtatcttaccattatttcaggcatgatgtagtattttaaaagttaattcgaccataatttgaacaagtgttgtgcttcatgataataaatacacatgttttagacgatacatgttactgcctcttattttaaactttcctctctattcatcatataaacattctaggaatcttgaaatctactattctagacatgaagagacatcctctacc

SEQ ID NO: 493867 - DNA, 443 bp, Homo sapiens
atattttccaacttgatctatgattcaattaaaatgcaatcaaaagccatgacagcttttttttttttcaaaaacagccagatagattccaaaattcatatttttataattaaactcagtagtccccaaagatgggatctttccctgtttgatattgcagagccaatacatgaaaccaaaagtgagcatcaagcagaagctttattccatggccaaakaatggagaagcgggagcatggctcgcaaaccaacctctccactagaaagggatgaggtgattacaatatagggtttctctaataacagggacattaaaagtgaggacattggaagtgaggggagaaatattcatgtgtattttggaaatgggcagtgaactcagaaccagagtgtcacctttctttttgtccattatgggttcttctggtcattttcatggcaat

SEQ ID NO: 493868 - DNA, 609 bp, Homo sapiens
cagcatggattagtgaggacagaacctctactttttggtggtcccttggctatctgggggaaacctgcagggagaaatgtggcagggagctgggaggattttctttccccagttcgtgaattacctaactcatttcacctccttctgtgtgagacacataactggtggtgagaggtgaagctggctgggcttctgtgtggggtggggacttggagaacttttctgtctagctaaaggattgtaaacgcaccaatcagcactctgtgtctagctaaaggttggtaaatgcaccaatcaatcagtgctctgtgtctagctaattgggtggggacttggagaacttttctstctagctaaaggattgtaaatgcaccaatcagtgctctctgtgtctagctaaaggtttgtaaatgcaccaatcagtactctgccaaaacagaccaatcagcactctataaaatggaccaatcagcactctgtaaaatggaccaatcagcaggatgtgggtggggccaaataagggaatgaaagcaggccaccagcgcaggcagcagcaactggctttggtcaccttctgcaacgtggaagcttttttcttttgctcttcac

SEQ ID NO: 493869 - DNA, 468 bp, Homo sapiens
ctttgtcctctgtcctgagattactggaacctattgaaattattttggggagatagtggaggagcagcatcatgaataggtttacatttttggaagatcattctggctacgtgggatggagtaagaatagagtggaaacagaagactttttttgcttgtaggttgttttgttttccaagcagatgatgtcagcctggaatagagcaayaacagcgagaatagagagcaatgctagaattcaatatatatatttagaagagagagaaatataatctataaatttgcttattggttacagtaatgaactgatgcttggcaaatatttttagtgcctccacattcttcacaaacttcaatctccatgtctcagagaaggtaacaattgagataacttatcatttattattatttattattatcagtgcattttaggaaatattagtacaagtattcaaatgtaaagttcca

SEQ ID NO: 493870 - DNA, 468 bp, Homo sapiens
ctttgtcctctgtcctgagattactggaacctattgaaattattttggggagatagtggaggagcagcatcatgaataggtttacatttttggaagatcattctggctacgtgggatggagtaagaatagagtggaaacagaagactttttttgcttgtaggttgttttgttttccaagcagatgatgtcagcctggaatagagcaataacagcgagaatagagagcaatgctagaattcaatatatatatttagaagagagagaaatataatctataaatttgcttattggttayagtaatgaactgatgcttggcaaatatttttagtgcctccacattcttcacaaacttcaatctccatgtctcagagaaggtaacaattgagataacttatcatttattattatttattattatcagtgcattttaggaaatattagtacaagtattcaaatgtaaagttcca

SEQ ID NO: 493871 - DNA, 561 bp, Homo sapiens
ctaggctcttaagccaaacctggccttttccacattccctctgcttctggccaaccctaattctgccatattcttggagtcccttagctgctgccaatgccaagcccccaacctgtaaaccagcctcttccaataagtatttccaacctctagattttaaaaataccccagtgccacatgtagattcaattacaaagcacagacawgcatctagaagaagagaagggcaaaaattgactgatgttccaccagcagcccttaggccacttggcaagaatgactccattcaatttaaagattgtgttaaatgacagtgtctcattttcccaaagatccttaaattagagggtacgaaggcttcttcaaatgcctgaccagacataattctgccatggatgtttttagtgctggcaaatcatctagtgatcgggtcaagagatgtatggaaccttgatctctgcattttctcctggctatggaatggttagctctgtactcaaactgtcctctccttaatagatatgagactggttagggaatgtcacaggtgcctagaaatga

SEQ ID NO: 493872 - DNA, 606 bp, Homo sapiens
ccagagctcgcccagaaaattgggtggaagaggaaagctgtggatatttagtaagtgcttgaggctgagggatactcctaagatgcctggaatcacagtttgcaagatgacttgatacattttagaggagcaggtaggggagtgggtccaatcatcccaaaagggagaggactccaggaggaagagaggaagggaaagagtctcaagtcatgcaggggactgtgtctggacaggttggcacatcttctgaacacttggtaatgaacaattccactcctcattgtgggaggggcgggtagagtagtatctggaacagagaggggataagcaggttccacaggcttttggcaagcttcaaagggccacgtgttgggcagtgaggaggagstccctgcaggcaaccatcatcagaaaaacagtgaagtcaatctagcaactcccctccccaaagagagaactagttagggcatcaaatcatttggaaggcctgttaaagcacagattactgcctctcaccccctagagtgtctgatttataagtctggacagggccagggactttgcatttctaaccagctcctagtgaagtccatgctgctggtttga

SEQ ID NO: 493873 - DNA, 611 bp, Homo sapiens
atgtgaatagcaaggtgcctttatattcctaaagctgcacaggaattggcttacacacagaagtttacagcataactagattgatatgattcttattttgttttgttttactgtttcctggacaataacaattatgatttaaaacttggccaaatcctatagaggcccctctgatactgtttctttctgtgggcataacacctggatgagtcagttaactttccacttctaccaagwctataatcacttgaatgctatcctttggccggctacagccaattgcagctgatcaacatttttctaagcacactaaattatgtgcataaaaaataatagccacccatctttgtccaagtagacttttcttacttagcctgtatataattctctatcaaatagtcactatggagatgtgtatattaaatagacatgtgtatctatttatgcctggatccttatgacagtgacagaaacaaaagtgatggtaacattttattggaacgtggttccctttgtctccagggaatcttgtatgttgtaaataatatatacaataaaattattaaagaaaaaattttaaaacagaaataaatcagggccctcatctgtgg

SEQ ID NO: 493874 - DNA, 611 bp, Homo sapiens
atgtgaatagcaaggtgcctttatattcctaaagctgcacaggaattggcttacacacagaagtttacagcataactagattgatatgattcttattttgttttgttttactgtttcctggacaataacaattatgatttaaaacttggccaaatcctatagaggcccctctgatactgtttctttctgtgggcataacacctggatgagtcagttaactttccacttctaccaagtctataatcacttgaatgctatcctttggccggctacagccaattgcagctgatcaacatttttctaagcacactaaattatgtgcataaaaaataatagccacccatctttgtccaagtagacttttcttacttagcctgyatataattctctatcaaatagtcactatggagatgtgtatattaaatagacatgtgtatctatttatgcctggatccttatgacagtgacagaaacaaaagtgatggtaacattttattggaacgtggttccctttgtctccagggaatcttgtatgttgtaaataatatatacaataaaattattaaagaaaaaattttaaaacagaaataaatcagggccctcatctgtgg

SEQ ID NO: 493875 - DNA, 668 bp, Homo sapiens
aaatgtcaagttcgagagtttttatccttgctttctacgtattgctgccataatcacttctcctaagttagctgtatgtaaatcctcatttctgaaaatgatgctcacttgcacagaaatatcaaacataaaatattttttatagtagataacacataaaatgcaatgaactgactataaacattcaaccatctctatatcccacagatatttattcagcaccaactgcatgccagacaatgtgttaggcattaggaatgagragcagtaaagatgttgttaagaactcatctgataatcatctggaatctagttctggtgtagtgaaagaatgagaaataaaactgtagattctgtgtgttaatgttgcatgaaagagcagctcctggatctgaggagggtgatgacaacagtctccattttctgtaggattctcccccacaggaaatatgctgagttaaaaagcaaaatttcttctagcccatccactgattgtgcactggtctgtaccggacaccagaagaatagaaaggaaggaaatactgattgatttgcattgatttgtgccccttcaagttgatatattggagctataacccccaaggtgatggtatttggagatgaggcctttagaagctaattaagtttcaatgaggttatgagggtgg

SEQ ID NO: 493876 - DNA, 668 bp, Homo sapiens
aaatgtcaagttcgagagtttttatccttgctttctacgtattgctgccataatcacttctcctaagttagctgtatgtaaatcctcatttctgaaaatgatgctcacttgcacagaaatatcaaacataaaatattttttatagtagataacacataaaatgcaatgaactgactataaacattcaaccatctctatatcccacagatatttattcagcaccaactgcatgccagacaatgtgttaggcattaggaatgaggagcagtaaagatgttgttaagaactcatctgataatcatctggaatctagttctggtgtagtgaaagaatgagaaataaaactgtagattctgtgtgttaatgttgcatgaaagagcagctcctggatctgaggagggtgatgacaacagtctccattttctgtaggattctcccccacaggaaatatgctgagttaaaaagcaaaatttcttctagcccatccactgattgtgcactggtctgtaccggacaccagaagaatagaaaggaaggaaatactgattgatttgcattgatttgtgccccttcaagttgatatattggagctataacccccaaggtgatggtatttggagatgaggcctttagamgctaattaagtttcaatgaggttatgagggtgg

SEQ ID NO: 493877 - DNA, 571 bp, Homo sapiens
caggcaatggcaatgaaagttaccaccaaagcgttttcctctaatccagtggttctcagcctttgtcttaccctggaactcagggaactttacgtagtactgatgcctgggacccarccccagatttgctcatttaattggtttgggggcagtctaagtattgggtgttgtagaagcttcccagatggctctagtgcacagccaaggttgagaactctcgccaaaccttctttcatggaggtgaagtgcgagtggggtttttgaaggtcagattcactcaccacatgaaaccaggatgttagtagtgcttcttgaaaaataagtgtttcaatgccaaatacattttagaagttctgggttaaacaacagcaaataataaacaacctttgtttgctagaggatttataggacttttaagggcctttggtatgttaatggacattgaaactctcaaagagggggaattttacatggagcctttcctaaactaatttaaccacagaaactttttgagtttgagtgtcttggggaacatgcaatctgagaaatacactttggaaaatgctaaatt

SEQ ID NO: 493878 - DNA, 571 bp, Homo sapiens
caggcaatggcaatgaaagttaccaccaaagcgttttcctctaatccagtggttctcagcctttgtcttaccctggaactcagggaactttacgtagtactgatgcctgggacccaaccccagatttgctcatttaattggtttgggggcagtctaagtattgggtgttgtagaagcttcccagatggctctagtgcacagccaaggttgagaactctcgccaaaccttctttcatggaggtgaagtgcgagtggggtttttgaaggtcagattcactcaccacatgaaaccaggatgttagtagtgcttcttgaaaaataagtgtttcaatgccaaatacattttagaagttctgggttaaacaacagcaaataataaacaacctttgtttgctagaggatttataggacttttaagggcctttggtatgttaatggacattgaaactctcaaagagggggaattwtacatggagcctttcctaaactaatttaaccacagaaactttttgagtttgagtgtcttggggaacatgcaatctgagaaatacactttggaaaatgctaaatt

SEQ ID NO: 493879 - DNA, 571 bp, Homo sapiens
caggcaatggcaatgaaagttaccaccaaagcgttttcctctaatccagtggttctcagcctttgtcttaccctggaactcagggaactttacgtagtactgatgcctgggacccaaccccagatttgctcatttaattggtttgggggcagtctaagtattgggtgttgtagaagcttcccagatggctctagtgcacagccaaggttgagaactctcgccaaaccttctttcatggaggtgaagtgcgagtggggtttttgaaggtcagattcactcaccacatgaaaccaggatgttagtagtgcttcttgaaaaataagtgtttcaatgccaaatacattttagaagttctgggttaaacaacagcaaataataaacaacctttgtttgctagaggatttataggacttttaagggcctttggtatgttaatggacattgaaactctcaaagagggggaattttacatggagcctttcctaaactaatttaaccacagaaactttttgagtttgagtgtcttggggaacwtgcaatctgagaaatacactttggaaaatgctaaatt

SEQ ID NO: 493880 - DNA, 571 bp, Homo sapiens
caggcaatggcaatgaaagttaccaccaaagcgttttcctctaatccagtggttctcagcctttgtcttaccctggaactcagggaactttacgtagtactgatgcctgggacccaaccccagatttgctcatttaattggtttgggggcagtctaagtattgggtgttgtagaagcttcccagatggctctagtgcacagccaaggttgagaactctcgccaaaccttctttcatggaggtgaagtgcgagtggggtttttgaaggtcagattcactcaccacatgaaaccaggatgttagtagtgcttcttgaaaaataagtgtttcaatgccaaatacattttagaagttctgggttaaacaacagcaaataataaacaacctttgtttgctagaggatttataggacttttaagggcctttggtatgttaatggacattgaaactctcaaagagggggaattttacatggagcctttcctaaactaatttaaccacagaaactttttgagtttgagtgtcttggggaacakgcaatctgagaaatacactttggaaaatgctaaatt

SEQ ID NO: 493881 - DNA, 627 bp, Homo sapiens
cctcacacagggaatgagagagagcaaatctcrtgagacttcactgccttctccaactattgattctgcagtagcctcacccattctcccaggatgtaaactcaagattggtgaggagaggccagggctcacgcaaattatagcctgcagcatgctgcagcccttgaaaggagttcaaaattttttttctttattccctcttgtataaaggagtgattgaaggcccactagttgcaaatgtgtgggcactatagggaagtcaaaagtaataaggagacactatccctgcccctccaaaattattgctagtgatgataacattttataactttaaagctcctttaatgttttaagttgctgcatagtaggaggccagagctatagaagcagctctgtaaccaagaagctaccagaggccccctctaagatttttctgtccttagagacgtttttcatgttctcaagcttgtaaggtgcagtacccagggctgtggtggtacccagcctgggaggtggtgtctgtgggcttatgaatttgggagatagcactcagctaaagtagctaagctaccagaaataaaacaacagaaaaaaatgcaaactctcttgtccatgcaccattttgca

SEQ ID NO: 493882 - DNA, 627 bp, Homo sapiens
cctcacacagggaatgagagagagcaaatctcatgagacttcactgccttctccaactattgattctgcagtagcctcacccattctcccaggatgtaaactcaagattggtgaggagaggccagggctcacgcaaattatagcctgcagcatgctgcagcccttgaaaggagttcaaaattttttttctttattccctcttgtataaaggagtgattgaaggcccactagttgcaaatgtgtgggcactatagggaagtcaaaagtaataaggagacactatccctgcccctccaaaattattgctagtgatgataacattttataactttaaagctcctttaatgttttaagttgctgcatagtaggaggccagagctatagaagcagctctgtaaccaagaagctaccagaggccccctctaagatttttctgtccttagagacgtttttcatgttctcaagcttgtaaggtgcagtacccagggytgtggtggtacccagcctgggaggtggtgtctgtgggcttatgaatttgggagatagcactcagctaaagtagctaagctaccagaaataaaacaacagaaaaaaatgcaaactctcttgtccatgcaccattttgca

SEQ ID NO: 493883 - DNA, 627 bp, Homo sapiens
cctcacacagggaatgagagagagcaaatctcatgagacttcactgccttctccaactattgattctgcagtagcctcacccattctcccaggatgtaaactcaagattggtgaggagaggccagggctcacgcaaattatagcctgcagcatgctgcagcccttgaaaggagttcaaaattttttttctttattccctcttgtataaaggagtgattgaaggcccactagttgcaaatgtgtgggcactatagggaagtcaaaagtaataaggagacactatccctgcccctccaaaattattgctagtgatgataacattttataactttaaagctcctttaatgttttaagttgctgcatagtaggaggccagagctatagaagcagctctgtaaccaagaagctaccagaggccccctctaagatttttctgtccttagagacgtttttcatgttctcaagcttgtaaggtgcagtacccagggctgtggtggtacccagcctgggaggtggtgtctgtgggcttatgaatttgggagatagcactcagctaaagtagctaagctaccagaaataaaacaacagaaaaaaatgcaaamtctcttgtccatgcaccattttgca

SEQ ID NO: 493884 - DNA, 248 bp, Homo sapiens
gcaaagacctggattgtttctgtttcagctccyactttgatttgtaatctagtaatttctttactccagatcaagaagagcaaatagaacaatgaatatgaaagtgcttggagaaaaatatatgagaacatatgcaaataagaaccctcattaccatttattcaaagtaaatttattatgtcctgatcccaggatcctaggagcctgtgccaaagtgttcctgcacccagccttctctcttccagacc

SEQ ID NO: 493885 - DNA, 472 bp, Homo sapiens
tttactggttctttttgacattctagaattcaatcaaattgagctaaaatatttaaatatcccaggaatacatttgaatgaacacagctaamcagtggagaaaggtcatttcattttgaaaacaaaaataaattaccctcaagtattaaaagtcattattataaagattctggaagtctctcctgttgatctttgtgattctgatataagctggccaaagcttccaatttctgaaggattactgaaaagtagagggactgctaaagcagcgacttagctggtgcctcaaaaaagaactcagaaggaatagagaaagacattggaatctgcatttgagttacccaagggctggtttagggttgataaaaagatgtttctctgatatgtttgcctagggaagagactgcctactgtgatgatacttttcactggtttgtctcagaaatacattattttcatctccataacatgt

SEQ ID NO: 493886 - DNA, 631 bp, Homo sapiens
acagtatagctctgcccctcaccttcccataacttgctgtcccattcagtttcctaaaagaataatttacaagataacatctacctcttggatttattcaattccactaaaaatcatttagaacccctcaaattgtctatattttcccttctccttttctcttatgaagagggtatataagcctcatctactgtgtattctttgagtttcrtattttatatggcttccatgcttatgcacattaacaaatgtctatgaattttctcctattgtttcttgtcagtcattgcagtgaaccttcagagagcagcagagggaggggcattttccttctaccctacagttctaaactgtacttgttatatgtatgtttgtagaaggtattgttggtgtttctggaacatgatttgttcattaaagcattttaaatgttttgaaaccacctttgcaaaattatgactgagacagtgaaagagatctaacctaactgacaccatcttgcttctaacatttaagccttcctgggtgtaagctgaactaactttgggaggtacttagtttatagtttaaaacaaagataacagtgctttcccaaaacaaacctccttctatcttggggattagactacta

SEQ ID NO: 493887 - DNA, 566 bp, Homo sapiens
agctgctccgcataattatgtgctgtcttttccaaaagacattaaacattaagagaatggaaaactaatcttatttgaccrccacttatcctcaggaccagtcaagtgtcagcatatggtatgtgctcaataaatagtaatacaattattttttaaagcaagtgcttgattcaatcaattcaatgcactggctctcctatattagaaaatttgtatttgtctgaaagagagttattagctagagttcaggtaaattattgtatatcctgtatgtttttacttcctatagacatttctaatgaataaaagccagtatttaaacttatctttaaatcacaaagtcttggccttcttgtttatttatttttaaaaccagtgcatatctgagatcttttaccatgttgttggtgataattataaagtagaactggagtaaagacaagggtcataatgatttgggataaaaagcataccacatcatgtattgaataaacagagcaattaaactgatagataaatagacagttcagtaacatttatatgcattgtaacgaacccaaacttgt

SEQ ID NO: 493888 - DNA, 566 bp, Homo sapiens
agctgctccgcataattatgtgctgtcttttccaaaagacattaaacattaagagaatggaaaactaatcttatttgaccaccacttatcctcaggaccagtcaagtgtcagcatatggtatgtgctcaataaatagtaatacaattattttttaaagcaagtgcttgattcaatcaattcaatgcactggctctcctatattagaaaatttgtatttgtctgaaagagagttattagctagagttcaggtaaattattgtayatcctgtatgtttttacttcctatagacatttctaatgaataaaagccagtatttaaacttatctttaaatcacaaagtcttggccttcttgtttatttatttttaaaaccagtgcatatctgagatcttttaccatgttgttggtgataattataaagtagaactggagtaaagacaagggtcataatgatttgggataaaaagcataccacatcatgtattgaataaacagagcaattaaactgatagataaatagacagttcagtaacatttatatgcattgtaacgaacccaaacttgt

SEQ ID NO: 493889 - DNA, 597 bp, Homo sapiens
tgtcctcctagaaattagcactgtaataacagtgatgcctaaaaatgtatatgtacacagacttacatcagttaagatgcctaactgtatcttcatgcttgaagaaataattactttgggatcctttctgttttactatttcagtactttgaaaaagctgtaggtgtatctatgtaaaaataaaaatcaactaatagcactatctttagaattatgatgtctagcatttagaaagtataaacgacaaaatgttataaagttgtcagacatttttrtgcctgtttatgtagaaatgattttaatctgagaagaagggcaaagtctggcataatgacagaaataatggcatgaaataaatgatatgaaataaatggctatttagaactaaaaataatgaaatgaggtgagttctacgaagatagtgggtaattatctaagggctagtgattaaaatgtagatgtgatgtccaaaactgtagcagccatttgggactatgaagcaacaatcctgtgaaagaagagcatgcatggtgaaaatagtggaaatcaacaaactcattatttgtttaagctactgttacaggtttttttcttatt

SEQ ID NO: 493890 - DNA, 619 bp, Homo sapiens
tctctccccacagccaggagggatattgtgcaatgggtagagagttttgtttggtgaagatgaaaaagttctggagatggatagtggtgatggttgtacaacaatgtaattgtacttagtactactgagctatacacttaaaagtttttattaagcwctgttatatgccaggtgcatttttttaattttttaaattatactttaagttctagggtacatgtgcacaacgagcaggtttgttatgtatgtatacatgtgctgtgttggtttgctgcacccattaactcatcatttacattaggtatttctcctaatgctatccctcccccctcccccctcccccaaccccaggacaggccccagtatgtgatgttccccaccttgtggccaagtgttctcatttttcaattcccacctatggaactctgatatttttaaatgtctgctaacattcaggattaggtagcattctccagagaaacagaaccagtaggatatatacagatataatatataagaaggtatttattgtgggaattagtccacatgattttagaagccaaaaagccccataatatgccatcagcaaactgaagagccaggaaagctgctgtggtgt

SEQ ID NO: 493891 - DNA, 488 bp, Homo sapiens
gagaggtagtcgcaaaggtcagttgtttcagggtcctggccacaaggtattttaaaacatgcctcaaatggaaagaagaaatattaatataaaaggttttcttaaataaagagccaggagttgaaccctgagaggaacctgtccaatggatttcaagaagtcaatggtagaaaatctttcagttctgcagcaccacccgctgagtttcttgwagctctcaagctaggatggccatgctcttggtgattatgtacagtcttagttacctcttttataagagcattgaaggaaaccaagatatttcatcctgaaatatacttctttatgtattttgagatggctgttcagagtgcttgcaaacaagagtagccttgcaaagctgtcttttgtggaggtgatttgcatctgtagagaatctgcattgatacagccaggctttctctgaggccctcccttgtccaatttgggaaagcttaactgagggtctg

SEQ ID NO: 493892 - DNA, 500 bp, Homo sapiens
ccctttgcctctacccccaaaatttctgatttagttgagttgrgatggagcctgctcattattgctttttaaacattaccctgattattttaatattcagccagaattgaggactactgcaatagtggggaaaatgtgattattagaagagttttttttttatctaatctcaataagtcagttatagaaaacttacttttcagtagtgtgttagaactgacttataatagcttatgaaagctgattgttaaaatttcagaaattttgttaaccctttggtgttgttttggtcaatgaaaagtagatgtgtgggataatttacacattggcgaatactacaaatcagggtttcccgctcccagctgattgcaaagcatttaccagtacaacactgctctagcctttagttcattttccttcaccttgcttgtccttgaatcagaaactacatgtaactagaggcactctccttttaatgaagttcagatgaaagttttttc

SEQ ID NO: 493893 - DNA, 500 bp, Homo sapiens
ccctttgcctctacccccaaaatttctgatttagttgagttgggatggagcctgctcattattgctttttaaacattaccctgattattttaatattcagccagaattgaggactactgcaatagtggggaaaatgtgattattagaagagttttttttttatctaatctcaataagtcagttatagaaaacttacttttcagtagtgtgttagaactgacttataatagcttatgaaagctgattgttaaaatttcagaaattttgttaaccckttggtgttgttttggtcaatgaaaagtagatgtgtgggataatttacacattggcgaatactacaaatcagggtttcccgctcccagctgattgcaaagcatttaccagtacaacactgctctagcctttagttcattttccttcaccttgcttgtccttgaatcagaaactacatgtaactagaggcactctccttttaatgaagttcagatgaaagttttttc

SEQ ID NO: 493894 - DNA, 496 bp, Homo sapiens
gcaaagagggaggctcatcagagtgagagagagagagagagagaggaggaatttggagccagggcagacagagcagagtggtgctggtggcaaggagaacagagggagaaccacagcagggaggacgcctggggatctggggtgctagagagtggggacggggggtamaacagagaagagagaatttaacagggagagcggcagagatgcagagatgggataagaggcggaaatatatggagattgaggacgatcgaagaattggggagaaggagcaacaagagattaaataagacgtgaggatggagcccaggtaatttttgtatttttagtagagacggggtttcaccatgttggccaggctggtctcgaactcctgacctcaggtgatccacccgcctcgacctcccaaagtgttggaattacaggcgtgagccaccgcacctggccacccaagcattcttgattgaaaaagtttgcttatgtcttagttcta

SEQ ID NO: 493895 - DNA, 262 bp, Homo sapiens
tagaaatgagatctgagcaaatgcttttctcatgaacacatgggctctgctaaaccaaggttccaagtcaatccagcccatccttcaacatctgtagagaatattatggaccagagggaattgagggggacacttacttagaagctcacagataaccattttttcagatgacataagaaaagaaaatggaataggctactttaactaaattttcatgttaggrtaaagaaaaaaggtccttgatatcattatcaagtacaca

SEQ ID NO: 493896 - DNA, 603 bp, Homo sapiens
atgccagacacattctaaatacttttccagtattacacagttagtaagtggtggaggtgagatttctctcaagcagccyaagtccagaacctctacatgctgaatccctataccatactaccacccagtgtgtatgtatgtatgcagagagtatgtatccatggagatactatgtttctaaatgatcagtgtttcccactaattaaaacaagccttcagagctaagcagaactggattcccatcctgggtttccctcttcttaggagtgtcatcttaacaactccctcccaggattattgtaagggtttaataagaatataaataaataaactgtgtgtgggaggaggggcaggtggcacagtgctctaaacattgtaaattttattattatacttatttatatgtctccccccaaattaatttttccattcttaagcctcttataatgtttaaatttagacattttggaatctatattaaaatgatttatgactatataactgtattaaaaatttgtagacaattaactatatctactacattgtcaaactgtaggccaagaaggaggagtggctcttttatttgtaattctgcaaaaggta

SEQ ID NO: 493897 - DNA, 603 bp, Homo sapiens
atgccagacacattctaaatacttttccagtattacacagttagtaagtggtggaggtgagatttctctcaagcagcctaagtccagaacctctacatgctgaatccctataccatactaccacccagtgtgtatgtatgtatgcagagagtatgtatccatggagatactatgtttctaaatgatcagtgtttcccactaattaaaacaagccttcagagctaagcagaactggattcccatcctgggtttccctcttcttaggagtgtcatcttaacaactccctcccaggattattgtaagggtttaataagaatataaataaataaactgtgtgtgggaggaggggcaggtggcacagtgctctaaacattgtaaattttattattatacttatttatatgtctccccccaaattaatttttccattcttaagcctcttataatgtttaaatttagacattttggaatctatattaaaatgayttatgactatataactgtattaaaaatttgtagacaattaactatatctactacattgtcaaactgtaggccaagaaggaggagtggctcttttatttgtaattctgcaaaaggta

SEQ ID NO: 493898 - DNA, 589 bp, Homo sapiens
caagaaagagactgtaagactgaaattcgcacgtaggaagtttgatggaaagatctctgggaagcacctgtaagtaagtaatgaaggaatatcgggcagagggacaagttgaatggtgctgtggttgcaaaaaggacttcagccacaaccatgaggagytccagagctggactggcctgcagagttgtctcataatgaatcaaggagagaggcttttgtaccttcatgttgaccagtcattgggtataagttgccataaccttgattgagtgacacatttttgttgagctgatggtagctcctagacaaggactcagctttgaattttagcagctaactctccagacagccaaggaattggtgcctgggtgctgtagcagaaacgtgggtggcacaccagcattcactacaccactcttacctgagaggccactttgatctttcttattcttccctcctataggactctaattatatttgcagcaaaggtcaagtgccaccagttattcctttcctggtcctaccgccctaggctagagaaagtttccacccttctgaattccattaccatatcatgagagcgtggtgc

SEQ ID NO: 493899 - DNA, 357 bp, Homo sapiens
cagcatttggatcagtgaatgaacagaaaatggataagtgaatgaatggatggatggagggatagatgggtggatggatgaatggataatattgatgtgaatgcatgcatatgatggacagatattccaataatggacatttttgaatatgtaattatcagagtgagacacatattctagtagagaaattccctttccattcctccccctctctcattcctctccaagtaaggtcactggacttcccatcgtttacagcctgtagaacaaccatttccatctctctcaggattttttctgcacctgtatattgaaaccacacacacacacacacacacacacacacacacacwcaca

SEQ ID NO: 493900 - DNA, 600 bp, Homo sapiens
tgctttgcctcaaggacaaggtctatgtcttttttaactcaatcagctcagcaccacgccagtgccctgcacagacagatgctccataaatgcttttgaatcgactaagatggccagaaaatgtagtgtcttctctcctttcttcacctgctgcctaaagtgagctgagaattggtaggaacatgttgggagagagaatgataaaggcagaacttagatgctgagcctagcatttagaataataatgaaattttctgagaagattcttcctaaaatccacatgtattcagataatcccaccaggaaatattacaggtgataaattcagcacaatygcattttccccaggttcccaggaacattttatccatctcagtgtggtagccagaaatcaaaagaagagagtgcagaattaacacctgcacatttttaaggatttaatgaaatatttatagactatttcagccttctaataaaagttattaccctttggttggtaagtgtgacctccaggggacaataacattctattacatcttaaaattctataaagttattagttatctcctatggaaaacaatcctttattgacaagagata

SEQ ID NO: 493901 - DNA, 466 bp, Homo sapiens
gtcactagctgatctcatcctcctgactcagtcacctctctctcagagagccgaatacaaagctgtttctttgctattcctttccttattagattaggaggcactctgggccatgtgtatgtgtgtgtgtgtgtgtgtgtgtgtgtgtrtgtgtgtgtgtgtgtgtgtgtgtgtgtgtatgtttgtatgtgtgtataataagagttgcttgattccacaaggatgattacaagctggtagaacttttttaaacattcatttaaatagatttataaatgcaaataactattaactaactataaatttgctgcctttatactgctaataaagactgtctatactcattcattattggaaatggtgaagatgtattttcttattttgtatcaatctgcttttttatcctacagggatcatacaaaattaataaattcagtgttatctaaattttaaagcattaatctat

SEQ ID NO: 493902 - DNA, 466 bp, Homo sapiens
gtcactagctgatctcatcctcctgactcagtcacctctctctcagagagccgaatacaaagctgtttctttgctattcctttccttattagattaggaggcactctgggccatgtgtatgtgtgtgtgtgtgtgtgtgtgtgtgtgtgtgtgtgtgtgtgtgtgtgtgtgtgtgtgtatgtttgtatgtgtgtataataagagttgcttgattcyacaaggatgattacaagctggtagaacttttttaaacattcatttaaatagatttataaatgcaaataactattaactaactataaatttgctgcctttatactgctaataaagactgtctatactcattcattattggaaatggtgaagatgtattttcttattttgtatcaatctgcttttttatcctacagggatcatacaaaattaataaattcagtgttatctaaattttaaagcattaatctat

SEQ ID NO: 493903 - DNA, 614 bp, Homo sapiens
tcagtgtggcagccatcactcagcctctgggactcacaccaggggcataaggagaatggaagccacacgtgaaaaagggaagggtgatttctttctttctttctttttggggagsgtgatttctttttttttttttttttggttggggggaggtgggaagggtgattttttttttggtgggggaggtggggaagggtgatttcttttttttttttttttttggtagggggaggtggggaaggtgtttttgtggaaatacgaacagctctgcttcaggaaggcctttgtggagtgtgaagggagcagtgaacaactctggcccctggtgtccagcctgggagcgatcctagaggcagtggtcatgttgggcgaggggtgcccagaagatcaggcggtcctgctcagaggacaccacgtggtggctgaaaggactagtttaagagcacatttgagataccctctggaggctgccatcagtacttagagggagagtgggtctttgcagggggataagggagaaccaatgaaacctgaataattacagcaagtgaactttcactgagcctgaggctgctgtgaccaggaaaacacagccagcatagaagcagattcac

SEQ ID NO: 493904 - DNA, 469 bp, Homo sapiens
tatgctaaataacaggccatatttttaatatctttccatatgttaagtaatcaatgggttaaggcttcaattctaatactgaggtgaatctaattatatggctacacatattgaagaataattctgtaaataaatctagttatgagactgattgtagcagaagtcattcacctccctcagctttcagtacagtgctgtccaacatacagayaatgcaagccacatacatagttttcaattttttagtagcaacctttaaaaaggtaagtaaaaaaggtaaaattaaattttcatttaacccaaaatatcaaaagtatttaaatttcaacatgtactcaatagaaaaattaatgacatattttacatccttttttcatactaagtcttcaaaatccagttatattttacaattaacagcacattttcatttagaacagtcacatttcaagtgttcaacagccacaggtat

SEQ ID NO: 493905 - DNA, 469 bp, Homo sapiens
tatgctaaataacaggccatatttttaatatctttccatatgttaagtaatcaatgggttaaggcttcaattctaatactgaggtgaatctaattatatggctacacatattgaagaataattctgtaaataaatctagttatgagactgattgtagcagaagtcattcacctccctcagctttcagtacagtgctgtccaacatacagataatgcaagccacatayatagttttcaattttttagtagcaacctttaaaaaggtaagtaaaaaaggtaaaattaaattttcatttaacccaaaatatcaaaagtatttaaatttcaacatgtactcaatagaaaaattaatgacatattttacatccttttttcatactaagtcttcaaaatccagttatattttacaattaacagcacattttcatttagaacagtcacatttcaagtgttcaacagccacaggtat

SEQ ID NO: 493906 - DNA, 469 bp, Homo sapiens
tatgctaaataacaggccatatttttaatatctttccatatgttaagtaatcaatgggttaaggcttcaattctaatactgaggtgaatctaattatatggctacacatattgaagaataattctgtaaataaatctagttatgagactgattgtagcagaagtcattcacctccctcagctttcagtacagtgctgtccaacatacagataatgcaagccacatacatagttttcaattttttagtagcaacctttaaaaaggtaagtaaaaaaggtaaaatyaaattttcatttaacccaaaatatcaaaagtatttaaatttcaacatgtactcaatagaaaaattaatgacatattttacatccttttttcatactaagtcttcaaaatccagttatattttacaattaacagcacattttcatttagaacagtcacatttcaagtgttcaacagccacaggtat

SEQ ID NO: 493907 - DNA, 482 bp, Homo sapiens
cacatattgagtttgtttttacaatagtaattgaatgtgcatagaattattctcttatttcagttgaytgtgttactgcccaatagtgtacgtgttcagaatggctggaattgagcccgtgaaaatggagtgaagaggaacaaccagctttaatgaaatgcaaacctccaggatcagatcctttgttctctactcgctttagctaattagccacaaatattttgaaatacatcattttgcaatgaagcaggcactttagcagtataaaatgattataaacaacttagaacaccaaatttacaacaataaagtatgttatcctattgttagattaattttgtttaatttcttaatctacaaactagaaattttattctttgttctacctttctgagaaatctttcaagaatcaaaaggatggagatccaagcaccctttgacctacagaaatgtctgatatcatattattaataagatgggat

SEQ ID NO: 493908 - DNA, 581 bp, Homo sapiens
tacaggtattattcttttttttttttttttttttttgagacaggatctcactttgttgcccrggctggagtgcagtggtgcaaacacaacccattgcagcctccacctcctggcagaagtgatcctcctgcctcagccttccaagtagctgggactacaggcactactatacctggctaatttctaaatttttttgtagagatggggtctcactatattgcccaggctggtctcaaactcctgggctcaagtgatcctcccaccttggcctctcatagtgctgggattatagccatgagccaatgcacctggcctgtacaggtagtttcttgttttatataaagaaacctaggctcagagacatggaagttgttcaccatcatgtgtctacaaaatgacggagttattaattgaatctaaatctttctgggactgttctttttgctcttttccaacatatgctatcgcttctctaaattagggagctcaggcaaccactatgttgtatacaaaaaaaagaagaaagtacttaagtatagtagcaagcttaaatcatatctttgattctttgatcttttgaa

SEQ ID NO: 493909 - DNA, 531 bp, Homo sapiens
ccatgcccagctctttgacttttaattaggaattaatatatttacactgattgtaattactcatatttgaatttatttctgctatctaatgttttactatttgtcctccttaaacattttttatccatttttaaaattaagatcttcctattttattttatccccctaataaactggaagttatatatactgtttaatttcttgtactgattatgtagaaattttaacatgtatatttaactcaacaaattatagacttatttagcctcctcttaaacaatacaaagccttctaatactttaatttaccctctcacaatagtatatgtwaaattattgaacaatagtagaatttagatattgttgccattattttggatagtgtttagatttacagcaaacatgcaaacaattttctttgttcaccattacttctcgcattttggatcttccttctggaagatggtaattttctcttaacattttgaagatacgctgcagtatcatttggcttctattgttactattgaaa

SEQ ID NO: 493910 - DNA, 515 bp, Homo sapiens
tgcaacatggtgaatgggtgattgcttgtctccaagtccctccttggagaatggaaaatgttaaagagataaagttataaaaataggcataggccgggcatggtggctcacgcctgtaatcccagcactttgggaggccaaggtgggcggatcatgaggtcaggagatcgagaccatcctggccaaaatgatgaaaccccatctctactaaaaatacaaaaattagctgggggtggtggtgcgtgcctgtaatcccagctactcgggaggctgaggcaggagaatcacctgaaccagggagtcggagtttgcratgagccgagatcgcgccactgcactccagcctgggtgacagagcgagactccgtctaaaaaaaaaaaaaatacaaaaattagctgggggtggtagtgcatgcctgtaatcccagctactaaggaggctgaggcaggagaatcacttgaactagggagtcggaggttgcagtgagccgagattgcaccactgcactccagcc

SEQ ID NO: 493911 - DNA, 677 bp, Homo sapiens
gcaacatggtgaatgggtgattgcttgtctccaagtccctccttggagaatggaaaatgttaaagagataaagttataaaaataggcataggccgggcatggtggctcacgcctgtaatcccagcactttgggaggccaaggtgggcggatcatgaggtcaggagatcgagaccatcctggccaaaatgatgaaaccccatctctactaaaaatacaaaaattagctgggggtggtggtgcgtgcctgtaatcccagctactcgggaggctgaggcaggagaatcacctgaaccagggagtcggagtttgcaatgagccgagatcgcgccactgcactccagcctgggtgacagagcgagactccgtctaaaaaaaaaaaaaatacaaaaattagctgggggtggtagtgcatgcctgtaatcccagctactmaggaggctgaggcaggagaatcacttgaactagggagtcggaggttgcagtgagccgagattgcaccactgcactccagcccaatgacagagcgagactttgtctcaataataaaataaaataaaataaaataaagacaaaattaaaaaataggcactatacaaatatcagaatgtattcttttctgtacttcaaagatgtttaaatggttttgataagaaataagtttcattctcacagactt

SEQ ID NO: 493912 - DNA, 622 bp, Homo sapiens
aggccattcttttacctggaaagtaatagaaggaaaggtaatattaactaaacaacaaatatacttaatgtgttttttgatcttttggtggggcttgtttatttgcttaaaactcttgactagcctcccttagaaaaaaggtgtggttaaatatgcagtttagttcttcacacagagacatgaaggtctgatgtactttgaaattaaagtaatgaagagggggaaagtgtttgtcaaacaggagaatgaccaaacagaactacacagtctgagtttcaaasagtttctcctttaagagtcacaaagctgtttagagcagagaaagaaagaaaatctatgtttttttttttcatactgcatcatgaagggcaacattcagctctgtctttaatgccaagcagtcaaactataaaaaggagcattattttagagtccttgaaatgacttacaaaaagcctttcaaaagatttagatgctagtggtgctatgcaaatgtctcacttgaaattgaaattcttaaaaataaatgtttattttgctttccattaagagaaaaaaatgcaatgcctcctcacataaccagagagctatttaacacctgctgaatggctaaatggttcag

SEQ ID NO: 493913 - DNA, 488 bp, Homo sapiens
ggtttcacatagttgtataatttccattgctcaggtaactaataaaattatttttcctatgctgtttagccatgtggatgtcctcttttgttagtcttttaataaaagactatcayttaaagtcttaaagggtaattaaaaatagtttgccttttatttcttggttatttatatatctgagatatgagttttttgccagactgatttataccaccatcttcttctactctacagcttgctttgtcacatctttaaaaatgcctgttgatcaacaaattttatatagtctcattaatcaataattttattttaaaattgttcactttctgtgttacatttaagagaaaatgtttgccttctttaaagtcatgaaggttttgttttctattattttctccaaaacttttgctttatattttacatttcaaccttcaagacacttgacattatttactttcaggtgtaatgtttgttagaggttaactttc

SEQ ID NO: 493914 - DNA, 635 bp, Homo sapiens
ttgaatggggttttttctcttgtaaatttatttaagttccttatagatactggatattagacctttgtcagatgcaaagatttcaaatattttctcccattctgtgtattgtccatttaatctgttgatagtttatcttgttgtgtagaagttacatttaactatctatatctgcatgtatatatcttctaaaatctaatattgcaatatattgtgtctatgagtgtatatattttgcaaattaattgtaacagtatcctatctagaatatgtgtttagaataacgtttaaatattttgataaaaattgtgaggcatttttgacgctagtgaggcagtgtaccagaagggggttgttaaaaacagcttcatgaagatgtgaatatcttgggataggtttaaacctaaaaattgctttaaaagaacagtgactgttatacaagaaaaaggagaataaaactgataagaatcaaaggcttaacattaattctttgaacacacatttgagcacacagggctggattytgtaaagaatatattaaaattaaagacaagttcaatgttcagagaatgcaacagtaactacaaagcagaatgaaggtaagagtataaaactgacaaataaaaagtactgat

SEQ ID NO: 493915 - DNA, 635 bp, Homo sapiens
ctgtgtctttcaggattattattggcttgtgatgatagcagggaaactgatacagtttggaagtgtgtcgcctccaaatctcatgtgaaaggcgaaaccagtgttggaggttggccttgtgggaggtgtttgggtcatggggcaaatcccgcatgaatggcttgggaccctcctcacagtaatgagttttgactctttcagttactaaaaaatttgattgttaaaagagcctggtacctcttcctctccctcttgcygtgtgatgtgtctgcttccccttcactttctgctatgagtaaatgcttcctgaggcctcaccagaagctgaccagttgctggtgtcatgcttaataaactgcactaccatgagccaaataaacctctttattttgtaaattactcagtacttggtattcctttatagtaatgcagaacataatacagtaaccttaaagccaagtgatgataatgacagattgaaggctggcagagatcttgtgaatagctgcttatggaagagcactctttttgtattccccactaaccacccacaaactccaatgtgtggtgagcttagtaagtgataaatgttcatcgtacaaagaaccttgaaatgtctggctttaacaggtaga

SEQ ID NO: 493916 - DNA, 590 bp, Homo sapiens
tgtaaatcttgaaagaagctgtacgtcattttcgttgactgccaggaagtgcatggtcacgcctgccacaggtcttcagagcgcctgtgggcctgcatgggtccctcagtgagtaagtcttttccatctcatctttcccgcctctgcttcccattgtactgatatttccatttattctttcaatgtcttgtgctctgacctacaacctcgaatgtgtcattggaacatgtcataatataagcctgtatacaatgagccaagtaaaactttttcttgagtcagagtcttactccgtcacccaggctagagtgcagtgacacaatctcggctcactgcagccttaacctcctgagtcaagcaatcctcccacctcaacctcctgagtagctgggattacaggtccatgccaccagggccaggtaatttttgtattttttgtagagatgggatttctccaaatggcccaggttcctgaactcccgagctcaagtgatcgccctcctcagcttcccaaagtgctgggactacaggcgtgagcygcagcgcccggccctaaatcagtttggatgctcactgtgacatctttaccg

SEQ ID NO: 493917 - DNA, 603 bp, Homo sapiens
aatggctgtctatggcagtttggtggaaacaataataatacattataaatcaatgaaaatgaagttttgctgtgataatcggatatagatttgccaacatttgtatgaaattcaattctgtttgattgcatcagcatatgctgtgtggcactgctagcactattgatttgaaggttcttatccatatgtctaaattatttctattacatctttgcattactgtttagaaataacctgggtaaaccgaagccatttattccattttcagtggtattttcttctgattctagttaaatgctcaggtctgtattttgaatggaaagaaatgccttttttttcagtcctcctttctttaacaacagctaatgctaagctataatggtaatgtgcctatttccatgtttaacattcattgttgtcattattgttattattttcattgttatctttttctgagagcatctgactgttatgatgggtcagattttcaaatagcactttaaatgattccagacgctacagctacacattaatcttttaaaaaaaaatacggttgtgcrtcttactgaggacaattaatcagtgaaaatactgaatttccga

SEQ ID NO: 493918 - DNA, 438 bp, Homo sapiens
agagactctgggaaagagaagggagtcctcaactggcagtaagttctgccaggctctcgggagggagacagggcgtccagaatgtctaggggacagtgatcaaagaaaggaggtgtgatcgaggaagaacccttgagaagcagggagctcagaccctgggggcaggggacggtggccacatgtggccgggagtgggcagttagttgtgragtctgggaaggacagtcagaaaatctgaacattcaagagggtgccctgagaatctgcatggggacgggaaagagagggagacaggtggccacagagcacagcagtggatggagagcccacaggaagcccagatgcccgggaggtccacgggggctgtcccctcccggtccccagccccacctgtggggggtgtcccactctgggctcctgacacccaggtgccggttg

SEQ ID NO: 493919 - DNA, 438 bp, Homo sapiens
agagactctgggaaagagaagggagtcctcaactggcagtaagttctgccaggctctcgggagggagacagggcgtccagaatgtctaggggacagtgatcaaagaaaggaggtgtgatcgaggaagaacccttgagaagcagggagctcagaccctgggggcaggggacggtggccacatgtggccgggagtgggcagttagttgtgaagtctgggaaggacagtcagaaaatctgaacattcaagagggtgccctgagaatctgcatggggaygggaaagagagggagacaggtggccacagagcacagcagtggatggagagcccacaggaagcccagatgcccgggaggtccacgggggctgtcccctcccggtccccagccccacctgtggggggtgtcccactctgggctcctgacacccaggtgccggttg

SEQ ID NO: 493920 - DNA, 562 bp, Homo sapiens
gtgaggccgcagacggcgctggggccaggcaggctagggtgggagagtctgtggggagcagtaatggatgaggcctagagccaagcaggacagaagaaaagaaagctcgaggcatgaaggcagtgggattgattcctgaaggtcaagagtggtgaggctgagcagggaagagtgagtttcatagggtaccccaatggccgggcacagtggctgatgcctgtaatcccagcactttgggaggcygaggcaggtggatcacttaaggccaggagttcgagaccagtccacagggagaccccatctctacaaaaaaataaaaaagaaaatagggtaccctcaaaagaggagagagggttgtgggctacacctggagggggtggtgggctagatcctgaagagaagatagcaacgggacagagcagggatgagcaaccagttgagaagagggtggggtagttggttgggtgctaggccatgaagccacgaggagggtggccacctgccctgacccccactttgcccctgcagcatgacagggctgtgccgccctgtgtgcgcccag

SEQ ID NO: 493921 - DNA, 489 bp, Homo sapiens
ccttttccactagcggggagtttctcagcataggcactggagcccaggagtaggccttcagcgttgccacctccaagtgatgtcaggcagccctcgacaccctgcttcctcttgttccctgggaggcttgtttccttgtgagtggcaagcgagccgttaagggtccaggctctaagtccctgctctgtctcaaacagagtgaggcttcctatatctctccccccaccccaccacgatccaggagctcaacagaagtcccagaattgcacttctgtggctctggttgggccttgtacaggctcctgggccaatgactggagttgtggggagggaatgtggccccttgcccacctctggatcctgaggattgaataagccccacccggaccacacagaaggggtgctattgccyaaaggagacagtgggtgctgggcgggccgacccatgggtgtctgtggtcgaagggaggggtccagagacgcaggcag

SEQ ID NO: 493922 - DNA, 579 bp, Homo sapiens
atttttcccatctttgtgttcatgtgtgctcaatgttcagctctcacttattagtgagaacacgtggtatttgattttccattttcacattaattcacttagaataatggcttctggctgcatccttcttgctgcaaacgacatggtttcattctttttattgaattggatatgcctttgtggtgggggctgtgccgggcaatgtaagatgtttagcagcatccgtggcctcaaccaacaagatgccagtaggacctaccccatcttttttattgacaacaaaaaatgttttcagacattgtcaaatgtctcctggtagggggcggggggcacaataggccccacttgaggaccactgctctaatgcccatctagtcggtggtccacattgtgctgtattcctgattgaatgaagtactagaaagcaaagtaaaawacataaaatctttcttaatggaaaaacaaaattaatgtcaagtattgattctgtgatacgaatgagaacatggaccacacatggctgcgtcggagttatgtctctgcctttcagaggatgcagccgcttcactttccttgcct

SEQ ID NO: 493923 - DNA, 579 bp, Homo sapiens
atttttcccatctttgtgttcatgtgtgctcaatgttcagctctcacttattagtgagaacacgtggtatttgattttccattttcacattaattcacttagaataatggcttctggctgcatccttcttgctgcaaacgacatggtttcattctttttattgaattggatatgcctttgtggtgggggctgtgccgggcaatgtaagatgtttagcagcatccgtggcctcaaccaacaagatgccagtaggacctaccccatcttttttattgacaacaaaaaatgttttcagacattgtcaaatgtctcctggtagggggcggggggcacaataggccccacttgaggaccactgctctaatgcccatctagtcggtggtccacattgtgctgtattcctgattgaatgaagtactagaaagcaaagtaaaaaacrtaaaatctttcttaatggaaaaacaaaattaatgtcaagtattgattctgtgatacgaatgagaacatggaccacacatggctgcgtcggagttatgtctctgcctttcagaggatgcagccgcttcactttccttgcct

SEQ ID NO: 493924 - DNA, 489 bp, Homo sapiens
tgtaactaagcctatgttcatctgtgttcagaaaaacagaatatcaaatctagtacaaaaattgtaattatggctagttcttgtttgaatttgcctagtgcatggccatcctgtagatttacctgatttttacactgcaggaaatatgagataaatgggaatatgaggactacaacctcagaatccttcatatctttaagactgtcatgtattagtccatgcatggtggctcacgcctgtaatcccagcactgtgggaggccgagatgggagaacagcttgagtccaggagtttgaggccagcctgggcaacatagggaaactccgtctttgttaaaaaaaaaaaaaaaggataaattctttaaaaatggcatgtatctataaaactctcccmaagatgtattggtgcatctattcccaaatttggcagtgtatagtaatgctttagaaaagatagtgtttcaatcatcaaaagtgagcttaaaaatta

SEQ ID NO: 493925 - DNA, 615 bp, Homo sapiens
ttttaaaaaagtaattaattctttatggtattccttctacctatgattgcacaaacacacattaactgtttgccaaagcccacaaaacagctgaagtgtatttcttggtcctgctgctgatctggttatctgaggcaaatgcctacttaatcaaaaaaacagcaagaggggagccaggtaaggtggctcacgcctgtaataccagcactttgggaagcagaggcgggagaatcgcttgatcccaggtgttcaagaccaacctggacaacatagtgaaaccctgtctctacaaaaaatagaaaaattagccaggtgtggtggtgcgtgcctgtagtcccagytactcaggaggctgaagtgggaggatcccttgagcctgagaggttgaggctgcagtgaaccatgattgtgccactgcattccagcctgggcaagagagtaagacccagtctcaaaaacaagaaaaagaacaagtggcaagaggaatagtatgaagccttgggaaggaaatgcccagcattaatcaaatagatattattcaaaagtagggcatgatggatatttattatactggtgttaacggtaaagcgataccttttggaagtgacagcatca

SEQ ID NO: 493926 - DNA, 615 bp, Homo sapiens
ttttaaaaaagtaattaattctttatggtattccttctacctatgattgcacaaacacacattaactgtttgccaaagcccacaaaacagctgaagtgtatttcttggtcctgctgctgatctggttatctgaggcaaatgcctacttaatcaaaaaaacagcaagaggggagccaggtaaggtggctcacgcctgtaataccagcactttgggaagcagaggcgggagaatcgcttgatcccaggtgttcaagaccaacctggacaacatagtgaaaccctgtctctacaaaaaatagaaaaattagccaggtgtggtggtgcgtgcctgtagtcccagctactcaggaggctgaagtgggaggatcccttgagcctgagaggttgaggctgcagtgaaccatgattgtgccaytgcattccagcctgggcaagagagtaagacccagtctcaaaaacaagaaaaagaacaagtggcaagaggaatagtatgaagccttgggaaggaaatgcccagcattaatcaaatagatattattcaaaagtagggcatgatggatatttattatactggtgttaacggtaaagcgataccttttggaagtgacagcatca

SEQ ID NO: 493927 - DNA, 589 bp, Homo sapiens
catggccgggcacggtggctcatgcctgtaatcccagcactttgagaggccaaggtgggcagatcacctgaggtcgggagtttgagaccagcctgaccaacatggagaaaccccgtctttactgaaaatacaaaatcagccgggcatggtggcacatgcctgtattcccagctactcgggaggctgaggcaggagaatcacttgaacctgggaggcagaggttgcagtgagccaagatcacaccattgcactatcatcttttctaggcctgctaatatgcttgttctacctctgatataaatgtacaaatagattcagaaatgcatagctccaagctacccttctttcagcttcttctatcaagttctctttgtcttctctgtcgtaacctgaacatgagaaattgtggtcaatgattatatagcatatcaactatttaggcaaaccgcaggaaaagttctacactttgttctctagctacatacaagtcagtcaaatttaccaaatctttggaaagtctgaagacccagagtatactacayagtaagttctacctatcaaatgataagtagaggggacatcaccttat

SEQ ID NO: 493928 - DNA, 546 bp, Homo sapiens
taccttattatttttacactattgtttctaccaggccaattctattcagtgttttatataattttatacaagagtttggtgcacacatcccacagcacttgggaatagtcctttagtgtggtctttgaaattaaatcgcacatggaatctcaacttagtcacttcatacatctgagaccttggtcaagttatttcacttctaagatgttttggttttcacattcaacaatggaaactatcatgacctacattataggatggttcagatactttataatgtattgcatataaaatcttatttatagaggttttcctgcagttaaggagccagaagatctgggttcagacctgggttatgctccatgcaagttttgtaacttcatgagatgacatttgttagcttcagygtacccctttctaaagtggaactgattgccaacaatattgtagagttgccaacgggtttgataataaataatgtggaagtactttgtaaactgtaaaagtgttaaccacaaattcaaataaacttgtttatgcaaagca

SEQ ID NO: 493929 - DNA, 621 bp, Homo sapiens
tgtgtccactttccattatggctatctcagacatcttcctgtattttccatgtactcccttagtagagagtctcaccttataccttttagggaaaaacaaaacacaagaagaaaactaatcactataaaacccgcaaacttacctgaatttgcattcagtacattctcttttcatgctatgatactgaaaaaaaagtcctttttcttgtctatatccartcttgttcaattctcccactcatgtcacatttgtcttatgatctttattttcttctttatttttaagtttaattgatatacaacatactatacctttaaatagtgtaatgtgatgttttgacctgtgaaatcttcaccacaatcaaaatagagaacatagctatcacccttaatagtttccgtgaacctctttttaatctctcttttcttcctctctttacatttcacttcttccatgctgatgtttcaaggcaatcatagatgtactttctatgactttagattagtttactttttcttgaatttcatgtaaatgagaaatatgctatgaattcttctttttttgttgttttttgagacagggccttgctctgttgtccaggctgaaattcagtggcataa

SEQ ID NO: 493930 - DNA, 567 bp, Homo sapiens
aggaagctctgatcaatattacctttccaaactstacaaatatcccagaccaattgcctatatattatttatgctgtgaagataacatttaggcaatacataattaaacaacaactatctctggagacacaagtagaacattgattatgaaataatccacccttgacaaaaggaaggaaagatgtccttcagggtttgacaactattttttaataaaaccagacaagcagcttggcagttgcttttcctggtagaggtccccaacctttagcaacgtatacctcaaatgaatatcattacttatattcttatctgcttacctctaaattatagttacctgtattacaagcctaattcaatcattggtccctaaacacaaggaaggcagtggttttttgcaatgtgtttcccaaggcagaagttattctgtcagcagcagaaatggtgattggatgatacgaaattgtatttcattacttgactcaaaacatatatagtaaaatcctgttaaacgtgccttattgtgcccaagttttccttgctctagatgcaaggtgctccatcata

SEQ ID NO: 493931 - DNA, 434 bp, Homo sapiens
catctttgcttatcttggatccctccccatcctattccctcacttccttacaagtccttccctcaataaatgacttgcacatccctgtctctatcaaacctaaccttggataagaactatgttttgtgattccaagtccagtggctttcccactgcagaacgctgtgtggctaaggaaatgtggaagatgctagatactagtccctttcttatcaatgctggtaactgatccaggatatacatttttcctctatctcagaaaaatcatgtaaacttatttctcagtctatcttacggttatatctgtctcaaataaggacaatgatgttatgctgttatatataatcttttaagtatttcaattagtattttgtagtgggatcattttatttcacattagatcccttgctaaytataaaaatgttataaatcca

SEQ ID NO: 493932 - DNA, 621 bp, Homo sapiens
aggtcaactctatggagttggacaactccttttgtaaacacagaaatagccctctccctgaaacactgcatcctgttgactctgccttacctgagcctgcaagagaattcacaggaccaggtgcacagtccgtggcaggtaagtctgggtctcatggtgcacccaccatactggctgcttagtctaacagctctgaggtcaccattacatagctgttctatctagtgattaacatgagcaatgatttaggagattatagcaatcatcaaagggtggaattaaaataataaagaaaaacaataaacaggaggagaraaggagggattgcttttgctccacagatcatttatgtaaataaaagaaaaatcacagcgctaagccactaaatcagaggttgcaattagctcaattgtagagtgatttggtgccattttgagcaacaatagccagagtgatcactcttaactgaggtaaattaagtattctgattactccacttttatgaaaaagagttgccggccattacagagatctaatttacacgaactctgctccatttctcatactgactcatcttttacgtttttttctgcttcttttcacatctagcacattttgctg

SEQ ID NO: 493933 - DNA, 621 bp, Homo sapiens
aggtcaactctatggagttggacaactccttttgtaaacacagaaatagccctctccctgaaacactgcatcctgttgactctgccttacctgagcctgcaagagaattcacaggaccaggtgcacagtccgtggcaggtaagtctgggtctcatggtgcacccaccatactggctgcttagtctaacagctctgaggtcaccattacatagctgttctatctagtgattaacatgagcaatgatttaggagattatagcaatcatcaaagggtggaattaaaataataaagaaaaacaataaacaggaggagaaaaggagggattgcttttgctccacagatcatttatgtaaataaaagaaaaatcacagcgctaagccactaaatcagaggttgcaattagctcaattgtagagtgatttggtgccattttgagcaacaatagccagagtgatcactcttaaytgaggtaaattaagtattctgattactccacttttatgaaaaagagttgccggccattacagagatctaatttacacgaactctgctccatttctcatactgactcatcttttacgtttttttctgcttcttttcacatctagcacattttgctg

SEQ ID NO: 493934 - DNA, 450 bp, Homo sapiens
gctgctgtgaggcgttggtgctagctcagatgcatgcagatggctgggttttccaagtgcctgcatgttatgggcagtttgcaaagttagcactgtgttttggaaaaagaacaagcccagagacagccaagcccatgtactagracacagtagtgagctgctaaaattttctttggaaacacatccctgaaaatgttcacagaatcctgctaacctccgcaatttgtggtccagtaatgagttgatccacaaaatgggtagagctgaattggaagaagaagggcaagttgtaagaaagttggcaatcaattccaaggtggtaagcagcaattcctggagtgggttgtagttccagtccctgccattatgttacctcagcaagtaagttcagctctctgaactgcctcttctccattataaatatgggaaagacaatgtattctatgatgt

SEQ ID NO: 493935 - DNA, 450 bp, Homo sapiens
gctgctgtgaggcgttggtgctagctcagatgcatgcagatggctgggttttccaagtgcctgcatgttatgggcagtttgcaaagttagcactgtgttttggaaaaagaacaagcccagagacagccaagcccatgtactaggacacagtagtgagctgctaaaattttctttggaaacacatccctgaaaatgttcacagaatcctgctaacctccgcaatttgtggtccagtaatgagttgatccacaaaatgggtagagctgaattggaagaagaagggcaagttgtaagaaagttggcaatcaattccaaggtggtaagcagcaattcctggagtgggttgtagttccagyccctgccattatgttacctcagcaagtaagttcagctctctgaactgcctcttctccattataaatatgggaaagacaatgtattctatgatgt

SEQ ID NO: 493936 - DNA, 633 bp, Homo sapiens
gggctggacttgggcggacagctccagattttcaggtctggcacaaggtaaagccaaagaaagcagcaaggaataaagaaaatagttcacaggaagaaatatcatttgctaacactgcatggggttatagaccccctggaactaaagttaatgcccttgaggagagtaactccttccaaattactggtgtaacccaccacggtcataagttcttagacagcagggatttttctccaaattaattatcccaattccccttcatccttaagactgtgtgtttccttgatgtacacagaagtgttgcattaaccttattctcagtttctgactcttcatactcaagtttgaggtgaacagagaaaatccatagccgtagccagctcttggctgttactctctccagagtctcgtcttctgtcacctccttccccattccctccaccctggcacatcatcaccacctactttcaaaagaactgagaagaaagccatggttaccraatgtctcttagcaacttgacatcctcctcaaagatgctcacataaaagtgaaggtgggccaaaggactccctctaggaaacagggtagcctaatggaagggaaatggatcaaccccagctctgccccttgtt

SEQ ID NO: 493937 - DNA, 453 bp, Homo sapiens
cagtgtaagaatcctataaactagccacaaacccatagattgttctctggacaagccaaggagactgccaagtccttgcacatactattgtatttcctctgcctaaaaatcccttcccctaatcaactggtcaatggccacttccctccgaaaagatttctctgattccccgaagagtagttagttagtggtttccatctgtgttcctaaagtccttcattctcgtgtattttataatatcttatgcagttcttgctagctagactgaaaactcagtgagtgctaatgaaggcaattttattcatctctgtcactccagatgcatgattcatagccaatrgatgtttgataaaataatgaatgaatcactagtttaatagtgtaaggctgattagagatatagttaggcaccaccagtgtatataaggatagtcaaagccacagatatgactg

SEQ ID NO: 493938 - DNA, 206 bp, Homo sapiens
ctggctaacagttcagttccagcagtgacaccttctttgcctgtgtcacagtatcttttgtgggcaattttttggctattttatyttgtcctttttttgtaaagccaaaatgagacaaaaataaattcatatgctaaaattaatgataataaatgaagatctcatcaaaatcatacaagagagacaaagaagcaaattcttagctc

SEQ ID NO: 493939 - DNA, 505 bp, Homo sapiens
tttttatgcttacatagtagaaaaaaatataatgggcctctttcacgaacagaatagcaacatcactgctagctgcttataaaacaacttttaaaaatttatttccaactttcaaataaactaagtgagaattgagtttttgtattcaaatataaaattgtaaaacatgattcatcctaaattgcaaatytgttcttgtgacagtcttccatggaaattcagcaacagaatatcttacttctccatgaccattacagttcttaaattatatctttaactgggctgtaacatcactcctccaaataacatagaacagtgattctcagtttgtttctgagatcagcaatatcagtatcacttaggaacttgtcagaaatgcagattgtgcagctctagcctaactctattgaatcataaactctggggatagaataggccaaaatatgttattacaaggcctccaggtaattctgatgcatgtaaaagttgagaaatattaacatat

SEQ ID NO: 493940 - DNA, 505 bp, Homo sapiens
tttttatgcttacatagtagaaaaaaatataatgggcctctttcacgaacagaatagcaacatcactgctagctgcttataaaacaacttttaaaaatttatttccaactttcaaataaactaagtgagaattgagtttttgtattcaaatataaaattgtaaaacatgattcatcctaaattgcaaatctgttcttgtgacagtcttccatggaaattcagcaacagaatatcttacttctccatgaccattacagttcttaaattatatctttaactgggctgtaacatcactcctccaaataacatagaacagtgattctcagtttgtttctgagatcagcaatatcagtatcacttaggaacttgtcagaaatgcagattgtgcagctctakcctaactctattgaatcataaactctggggatagaataggccaaaatatgttattacaaggcctccaggtaattctgatgcatgtaaaagttgagaaatattaacatat

SEQ ID NO: 493941 - DNA, 399 bp, Homo sapiens
ggagtgcagtggtgcaatctcagctcactgcaacctccgcctccctcctgtgttcaagcgattctcctgcctcagcctcctaccgagtagttggatttacaggtgtgtgtcaccatgcccagctaatttttgtattatttagtagagacaggtttttgccatgttggtcaggctggtctcgaactcctgacctcaagagcctcctgggcctctaaaagtgctggaattacaggtttgagccacctcgcccygcctatactgaacatttacataatattttgtttgactaggtttctgccattaagaagatgcaaaaccctgagggagtgtacctcttcactttgcatatgggaaaactgaggctcagagaagtgaaatgactgagacctccaggtgcca

SEQ ID NO: 493942 - DNA, 624 bp, Homo sapiens
aagcagggaccatcattttcacatagaatttcccaggactggaagggacttttaaagacccagaaatctttctgggcagtgcctcccacgtgtggcccctgaggtgttactgctgctctggtgaccgggggtagttgaccctatttcaatgtcaatcagataatatacattcctttatcaacttgttttttttttgagagagagtctcactctgtcacctaggatggagtgcagtggtgcaatctcagctcactgcaacctccgcctccctcctgtgttcaagcgattctcctgcctcagcctcctaccgagtagttggatttacaggtgtgtgtcaccatgcccagctaatttttgtattatttagtagagacaggtttttgccatgttggtcaggctggtctcgaactcctgacctcaagagcctcctgggcctctaaaagtgctggaattacaggtttgagccacctcgccccgcctatastgaacatttacataatattttgtttgactaggtttctgccattaagaagatgcaaaaccctgagggagtgtacctcttcactttgcatatgggaaaactgaggctcagagaagtgaaatgactgagacctccaggtgcca

SEQ ID NO: 493943 - DNA, 653 bp, Homo sapiens
  misc_feature (1)...(653): n = A,T,C or G
gacctgggaaatatacattccctgcagtgatatttaacctgcctctcttctctgactaaggggtcaagtcttagtttatgactcccaagggtcaactacataaaataaacatgagtttaacccgggtacgagagatacacatgtgtagcacragatataattttattacagaaataaccttcacaaaatagggcttagtgaaccccccagtcccaaaaaccacattacttaggacacatccaatttaaacaccaatccacatatctatttccagacccttgactagtgctgtagttctctactgaaaattttattgagggagtatcaaagaagggattaaacttcgaaatacatacagcagagatttcctgaaattattccattcccacatctctctcctcaaagctccacacatcacagcatttgctcaaatctgttcaaactttagtccctgcccatttgtctttctcattctttaatgtcttctttctttactcgtatttcctcttccagtaccactctntttcttccctcagcaggtctccctaagttcttttctgtgtagaactattttttccctcagaaagacaactagctagcagagctacacacaaaactatttggaggagcagacagagggctctttctttatt

SEQ ID NO: 493944 - DNA, 653 bp, Homo sapiens
  misc_feature (1)...(653): n = A,T,C or G
gacctgggaaatatacattccctgcagtgatatttaacctgcctctcttctctgactaaggggtcaagtcttagtttatgactcccaagggtcaactacataaaataaacatgagtttaacccgggtacgagagatacacatgtgtagcacgagatataattttattacagaaataaccttcacaaaatagggcttagtgaaccccccagtcccmaaaaccacattacttaggacacatccaatttaaacaccaatccacatatctatttccagacccttgactagtgctgtagttctctactgaaaattttattgagggagtatcaaagaagggattaaacttcgaaatacatacagcagagatttcctgaaattattccattcccacatctctctcctcaaagctccacacatcacagcatttgctcaaatctgttcaaactttagtccctgcccatttgtctttctcattctttaatgtcttctttctttactcgtatttcctcttccagtaccactctntttcttccctcagcaggtctccctaagttcttttctgtgtagaactattttttccctcagaaagacaactagctagcagagctacacacaaaactatttggaggagcagacagagggctctttctttatt

SEQ ID NO: 493945 - DNA, 538 bp, Homo sapiens
tggagagagtaagacattgaaagaaaaatgatacagtcctgaggamcaggccatggactggggtagccaatgtgaaaaataaaacaagaagtcagataaagaaaatggaattgtattattcaagaatacctgtttatttagatcaaccccttgggtttaaaataaatttaaaagcaattgagattaagccatcgttttagatgagccaaggaggcctgaaagtggcattaaaaaggtctcaggatttgtggcatcagcataaaagtggcagttacaattagaagcagaagtgaaatggctaagatgtagaaaagcaagaaatgaacagatggccaaagcattcagcttgctagggtgctaaaaccagatatattttatatttcattccaagttaacaaatattaggacattaaaatgcatgaacgtggtgtgttttccatcttgccatgtttttattaccaagttagggggaaaaaagtaggctgcacgtaatgtatgcaaatgcatcagtctaaacaaatgcagagtcagtggagat

SEQ ID NO: 493946 - DNA, 606 bp, Homo sapiens
atgtaatatattgcaatcttgtatttcatggaatacacttagggcaattctggtctattatatgcttctaagtaaagttgctccccaccccccgtttatcataaactaaaatggctttgttattttctcccaagaaacctttcacttttcttttactaaaaaactcctatagaattatatctagcttcacagtgtccagaatttcatctgctgaaagctcactcagaatattacttctttaagttcagtagagaaatgttgaacagggcatggccataaaatttcaagtgaacttagttttgcttggaactcacaacatgttaattttctcttcttgcttctttgtcattttctgatggctttgactctagattttctttacattctagaccttacattgaccaaagatgagattttccagcttcttccacatatttggatatccattctcttaactcagttcctgaattcaatttgccatgtgccattttcrctctacacttctgaagttttggtggaaagtctagtgactgcccagtataacaactcagaggaaaaaaaaagtgctactctgtactctattgacataacaatgattcaataaac

SEQ ID NO: 493947 - DNA, 564 bp, Homo sapiens
atttgaactggagcccatgcatttagccatgcatcagcctgcccctcaagcacagaatccagacctgtcaggtcagggacaaagaaatattagcaagaaaggtgatctattcctgagtgaccaggaggctagtaaaattaatcagggtctttaagtggctgagaaatgaactacctattaaaacctgtctttaataagaaaaataaagttaggaaatgggtgcaattagtaagtcataataaaaaacaggtaaagggtcacttagaaaaattaaatgctagagagatacataaatcaaggggccctatggcatgcaaaccgaaaggtcttggcagaattagctaatgaacttaagaaactcttgacacctactttcaaaaagcgacggcaaacagggagatggctagagagggaaaaacgtgggactcaaaaaacaagaagaaaaccgattccagcartttccctccagggaagccgtaagttccgtttgtaggcaagccatagaacaaattttatgattaaaaatttacgataaattttacgagtagaaaatccagtaagcag

SEQ ID NO: 493948 - DNA, 564 bp, Homo sapiens
atttgaactggagcccatgcatttagccatgcatcagcctgcccctcaagcacagaatccagacctgtcaggtcagggacaaagaaatattagcaagaaaggtgatctattcctgagtgaccaggaggctagtaaaattaatcagggtctttaagtggctgagaaatgaactacctattaaaacctgtctttaataagaaaaataaagttaggaaatgggtgcaattagtaagtcataataaaaaacaggtaaagggtcacttagaaaaattaaatgctagagagatacataaatcaaggggccctatggcatgcaaaccgaaaggtcttggcagaattagctaatgaacttaagaaactcttgacacctactttcaaaaagcgacggcaaacagggagatggctagagagggaaaaacgtgggactcaaaaaacaagaagaaaaccgattccagcagtttccctccagggaagccgtaagttccrtttgtaggcaagccatagaacaaattttatgattaaaaatttacgataaattttacgagtagaaaatccagtaagcag

SEQ ID NO: 493949 - DNA, 474 bp, Homo sapiens
ctggggacaaaaataacagaggtcagctccagttcatgacactgtcacaggggagctgcaggagctgcattttttcatttgtccatcagcaaatgtttatggtgctttcttcatgccaggctctggggagttcttcatatatgtgaagagccatcatgggaaacttcaatgcacttgtgtatgtacgtgagtgtgtaagtctgtgcgtccccaaggaagaactagawcaaatgattcaaagttatgggagatgaattttgaacccacaaggggagtcttttccaacaatgatatccgaccaatatcggataggctgtgtcctgagcagtgagctcctcataccagaagtcctcaagcagaggctggaaaatggccataaatcaggcttactgcagaggggtttctgtatcaggtaaaaggggctggaatagagaaaggacgacaatcgtactcaacaactgctgtaacaagtga

SEQ ID NO: 493950 - DNA, 553 bp, Homo sapiens
tttcagggaattcttgtgtaaactggaaattttccagttcgtgagccctgtgccaggccctcccataaatcacagcaagtaggctgtcggctcagcagagggggaagaggtggaggggagtgcggcaaaacagaggggaagccagtggctggccagggtggcgggtgggaagcacccacgttctcctggtgcattctcactccaggtatcactgggaagaggaaagggaaatgaaagggcagcaggaccagagggcttctgcctgcaaacaggcccctgcacgcctgcaaacaccccagcccccatgctcccaayctgggagaagcccccgaaacaggtcattttttaattgaatacaatattaattactgcgtgcaccattaacggtttgtgggatttgactaattaatgtaatagtttttgagtcacgctcattaaatatgaaaattacgctggtaaaaggtattggtttcattatcaatcttgtatggacaggatgggggcaggaactagaggagggacagagccctgcttgtctcttcagggccgtaaa

SEQ ID NO: 493951 - DNA, 535 bp, Homo sapiens
aaaagcccttattggtaacatccctaggtctttctggtttaaacgttaagagctatgtagaatccagtggtttgggaattggaaggcacatcctattactgctctaacaagacaaattaccaagaatgtagtggcttaagaagtctgcaaggggttggcagggcagcattccttctgaaggctctaagggagaacccattgtcttgccttttccagcttctagtggctgcctgtagtcatggctccatggtcccttcctcgcttcaacttctgctgcttctgttattctatcttcttctccaactctgaccctcctgcctttctcttataaggatgcttgtgatcatactgaatccactcagataatccaggataatctctgtatctcaagacccttgatttaatcacaactctgaaaacccctctgcaatgtasagtgagatatttacagcttctggggattaagacatgaacatttgtaggggggcgtcattcagcctatcacagaaaggatctaacaaatacaaatgttctt

SEQ ID NO: 493952 - DNA, 637 bp, Homo sapiens
cgttagggttggccacaagaagattcctgggaaattctggagggcagaagggggcatgttgaaatattaatccaatgcaggttttgcacattgaagatgtcttcccctagatgttttttggccttagtttgagcaatcactagctgggaatgccctcctcaaagtgctcccagcagtctggccatggctccagcaagcagcattgtggagtgagacctcccagtgtggttttgaggactgcatgagctaaggtgtggagcgccaggccrctgccctgcaggtgctcgttatttattatcaaaggtttccaggtcgcaggtgacgtgccacctgcaggggtggaactccgtaactccactagtcctgatatggagtgccacctccctttctcagagtgcctggtatttctcattcacaaggctctttgccattcgtccttagatagttatctatcttcacgggtttattttcatctcccttcctggactgcaagctcttgagggtggaactgagcctttggttggcgctgtgtctatccctggagcctgacacagggcccagcccattttggagccaagtgagatctgcgggcgtggctgagtggctgagtggacaacatgcaggtttcttcacagga

SEQ ID NO: 493953 - DNA, 606 bp, Homo sapiens
gctgggctctctacccccatggagtactggttctaatgagggggaaaaggaaactcggaattacaagatgttgccagcagatatgcagaatcccaggggagcccaaggcagagatcctatttctaacttgctgagaccagacttttcatcctagaagaagcgtatctacgttgagacctgaagaatgagaagtagttaaccaggtgatcaataggtggaaaagggaaagtagaaatatgagtactttaagcagatggaacagcaagtccaaaggtctgggtgcaagggagagaccatgatgagaaactgaaagatcaatttggccagacattcatggcattkgttcattgtatgcacattatgcaatgctttccagcaattgtggtttgtgtgagggggtgacaagacagagagaaggtgccagacctgtgaccttgtctaccataaaggatcctagagggttttgggtcttgactctgaacaacagacacaaccttcccacagatatcctcttacctgccatgatgtcaccagctgggtggaattcatacagtccatgaagtaataggaagaagacctctgtggtccctgcagcccgggagaaaa

SEQ ID NO: 493954 - DNA, 414 bp, Homo sapiens
tatgacagcagatctttgtcaccttggggatgaaaagaggacagtctctggacaagagatygggaatgcaaagaataaaaaattcgggaatgctggggggtgggagtctcatgtttagttaaaaaaagggcattaaaaaaaacttgagaaacaccggtctgaaccatggctgttgaaagcagaattgcagaggatcttgcttctacctggagtgacagaaggaacaaggagaagagagacccattgagcctaggagtttaatcttacactggcagctactgaggttgtttgggctgagactcggctttaatgtataatcagatttacgtattagtcaagggctgtgtcctggctgctggggggtgccacaggggctggagaggtgtgaggaaaggaaacaaacaatgaaaggga

SEQ ID NO: 493955 - DNA, 414 bp, Homo sapiens
tatgacagcagatctttgtcaccttggggatgaaaagaggacagtctctggacaagagatcgggaatgcaaagaataaaaaattcgggaatgctggggggtgggagtctcatgtttagttaaaaaaagggcattaaaaaaaacttgagaaacaccggtctgaaccatggctgttgaaagcagaattgcagaggatcttgcttctacctggagtgacagaaggaacraggagaagagagacccattgagcctaggagtttaatcttacactggcagctactgaggttgtttgggctgagactcggctttaatgtataatcagatttacgtattagtcaagggctgtgtcctggctgctggggggtgccacaggggctggagaggtgtgaggaaaggaaacaaacaatgaaaggga

SEQ ID NO: 493956 - DNA, 512 bp, Homo sapiens
tgggctgccataagaaaatactacagaattggcgacttcaacaacagagrtttattttttcacagctctgaaggccagaagtccaagatcaaggggccagcagtggtggtttccagtgagggctcttttcctggtttgcagtcaccttcttgctgggtcctcctctgcccatgcacacacacagagggggatcttggttgtctcctttttataaagacactagtcctattggattaaggcctgacccctatgacctcacttaacctttactaccttcttataggccctatctctaaatacaattacattaggggttagggcttcaacatatgaatttgaaggcaacacagtttagtccacaacaattagatatgttttttctttcaataaggctaagataaaagtcttttctgtgcttccagtacatgtggtgttcttgtctaccacgatctctgctaggagaactcagcaagcatgctgtgggtggaaaaaggatacagtaaactatttca

SEQ ID NO: 493957 - DNA, 533 bp, Homo sapiens
gctttcaatgtcattatattagtcagcttgggctgccataagaaaatactacagaattggcgacttcaacaacagagatttattttttcacagctctgaaggccagaagtccaagatcaaggggccagcagyggtggtttccagtgagggctcttttcctggtttgcagtcaccttcttgctgggtcctcctctgcccatgcacacacacagagggggatcttggttgtctcctttttataaagacactagtcctattggattaaggcctgacccctatgacctcacttaacctttactaccttcttataggccctatctctaaatacaattacattaggggttagggcttcaacatatgaatttgaaggcaacacagtttagtccacaacaattagatatgttttttctttcaataaggctaagataaaagtcttttctgtgcttccagtacatgtggtgttcttgtctaccacgatctctgctaggagaactcagcaagcatgctgtgggtggaaaaaggatacagtaaac

SEQ ID NO: 493958 - DNA, 526 bp, Homo sapiens
tatattagtcagcttgggctgccataagaaaatactacagaattggcgacttcaacaacagagatttattttttcacagctctgaaggccagaagtccaagatcaaggggccagcagtggtggtttccagtgagggctcttttcctggtttgcagtcaccttcttgctgggtcctcctctgcccatgcacacacacagagggggatcttggttgtctcctttttataaagacactagtcctattggattaaggcctgacccctatgacctcacttaacctttactaccttcttataggccctatctctaaatacaattacattaggggttagggcttcaacatatgaatttgaaggcaacacagtttagtccacaacaattagatatgttttttctttcaataaggctaagataaaagtcttttctgtgcttccartacatgtggtgttcttgtctaccacgatctctgctaggagaactcagcaagcatgctgtgggtggaaaaaggatacagtaaactatttca

SEQ ID NO: 493959 - DNA, 610 bp, Homo sapiens
ctgctcttggcttaaaatcttcatagattcttcttcttctttgaacttccaacggaaatcctgagcctgwatctcactggcccagttgggtcatgtgctcacccctgaactaatcaagatgtgaaagaaaatgaacgcactgattggctgagaccagggtcacgggacctcccttggcgctgagcttcagccccacccaagccaagtggactgacgcagagaaagagcattttcccttggaaaatcagacagctatttccaggaataggacaggatgctggacaggctaaatcatcatgtgactgctcctgcctcctgtacatgtcccttttctcctccctgcctgttccattcccctcctttttctcttttttcctcctttctcctcagcagcacataaaccactttctatcccttaaaaacctggtttcttctttcctcatctgaaactcccaattcgtctaagaaagcagatgcttcagaggcaagctgcctctgagagcagtttcgagcctgattctgtacgtgtgatcattgcccagggacaatttggtcctggctgatcagtcagtgccttgcgcttacgttcccagtgtgggaggaaggaaca

SEQ ID NO: 493960 - DNA, 610 bp, Homo sapiens
ctgctcttggcttaaaatcttcatagattcttcttcttctttgaacttccaacggaaatcctgagcctgtatctcactggcccagttgggtcatgtgctcacccctgaactaatcaagatgtgaaagaaaatgaacgcactgattggctgagaccagggtcacgggacctcccttggcgctgagcttcagccccacccaagccaagtggactgacgcagagaaagagcattttcccttggaaaatcagacagctatttccaggaataggacaggatgctggacaggctaaatcatcatgtgactgctcctgcctcctgtacatgtcccttttctcctccctgcctgttccattcccctcctttttctcttttttcctcctttctcctcagcagcacataaaccactttctatcccttaaaaacctggyttcttctttcctcatctgaaactcccaattcgtctaagaaagcagatgcttcagaggcaagctgcctctgagagcagtttcgagcctgattctgtacgtgtgatcattgcccagggacaatttggtcctggctgatcagtcagtgccttgcgcttacgttcccagtgtgggaggaaggaaca

SEQ ID NO: 493961 - DNA, 601 bp, Homo sapiens
ttgtctcgggtcattgaggtttgtatttttgttattttcttctttttttgagatggagtctcgctctgttgcccaggctggagtgcagtgatgtgatctcagctcactgcaacctctgcctcccaggttcaagcagttctcctgcctcagcctcccgagtagctgggattacaggcacctgtcaccacgcccagctaattgttgtatttttagtaaagacagggttttaccatgttggccaggctggtcacgaactcctgacctcaagtgattcacctgcctcagcctcccaaaatgctgggattacatgcgtgaaacactgtgcctggcctgttggtttttcagttaatttttttctttttttgggggggtgggggtagagatggggtctcgccatattgcccaggctggtctcaaattcctgggctcaagctgtcctcccacctcagcctcccaaagtgctgggattataggtgtcagccactgcactyggcccgaggtcattgagttttattgatgcagaaatcactgaagttcttacaaatgttttcgtttttttgtttctttgtgttgttttttattttttggtggtggcaaatgg

SEQ ID NO: 493962 - DNA, 601 bp, Homo sapiens
ttgtctcgggtcattgaggtttgtatttttgttattttcttctttttttgagatggagtctcgctctgttgcccaggctggagtgcagtgatgtgatctcagctcactgcaacctctgcctcccaggttcaagcagttctcctgcctcagcctcccgagtagctgggattacaggcacctgtcaccacgcccagctaattgttgtatttttagtaaagacagggttttaccatgttggccaggctggtcacgaactcctgacctcaagtgattcacctgcctcagcctcccaaaatgctgggattacatgcgtgaaacactgtgcctggcctgttggtttttcagttaatttttttctttttttgggggggtgggggtagagatggggtctcgccatattgcccaggctggtctcaaattcctgggctcaagctgtcctcccacctcagcctcccaaagtgctgggattataggtgtcagccactgcacttggcccgaggtcattgagttttattgatgcagaaatcactgaagttcttamaaatgttttcgtttttttgtttctttgtgttgttttttattttttggtggtggcaaatgg

SEQ ID NO: 493963 - DNA, 601 bp, Homo sapiens
ttgtctcgggtcattgaggtttgtatttttgttattttcttctttttttgagatggagtctcgctctgttgcccaggctggagtgcagtgatgtgatctcagctcactgcaacctctgcctcccaggttcaagcagttctcctgcctcagcctcccgagtagctgggattacaggcacctgtcaccacgcccagctaattgttgtatttttagtaaagacagggttttaccatgttggccaggctggtcacgaactcctgacctcaagtgattcacctgcctcagcctcccaaaatgctgggattacatgcgtgaaacactgtgcctggcctgttggtttttcagttaatttttttctttttttgggggggtgggggtagagatggggtctcgccatattgcccaggctggtctcaaattcctgggctcaagctgtcctcccacctcagcctcccaaagtgctgggattataggtgtcagccactgcacttggcccgaggtcattgagttttattgatgcagaaatcactgaagttcttacaaatgttttcgtttttttgtttctttgtgttkttttttattttttggtggtggcaaatgg

SEQ ID NO: 493964 - DNA, 621 bp, Homo sapiens
tttatccagcaatgtatgagggttttgatttttccacatctgtgtcaacactcattattttcctttgtttttctttttatgatgccccttgartcatattttccttctttttaaaaaattatggccattctaatggaggtgaagtggtatctccttgtggttttgatttacatttccctaatgactaatggtgcagagcgtcttttcgtgtgacacacacacttctaaaaacacctggagagaccccaccaaagcgacagtggtttcttctaggggttgggggaagtccctgttttgaaagcaggtggttcaaaaaccacctaacattgaactattttgaatgtttttatgagcatttctgtgagtaaaatgtagcacaagttaatgctggctagtaccttcttctgactaagatgtatagaagtatcgtatttagtacttggaacatgagcaaggggatacatgggagttaataaagctcttaacctgcctatggacagatttgattttctagtgcaggtaatggccgagtaaggattgaactggtttccgtcggtgtatttatattttatttaaattgcatagggaaatgaggcaacttattagaccaagtgattaaga

SEQ ID NO: 493965 - DNA, 624 bp, Homo sapiens
tacacagtcagggctgaataagtatttaaatgaatatagctgatgcttttcagtagaacagagtatgtctgcagtaaaacttatgtcttgcctgacattgtaaccagtgggtgtatttttgcccctgtctgatgagagttgagacaaacgattgacatttagaaaaataattttccccttgtagcattaaaatggcccagtttatctgtagwacttacacagaactgagcatctcctgagttaatgatgcaagtgacacagggactgatctccagtgccatataggcgatagtgtttttccaaaggccagaaagatggaaaatagtgaaaagtaaagagaaaacgagctaaatttagactttttggagcattgtgggttatcaaatgtactctaagtgattgttagcatgcattaatggtgataaggcttaaaatttaaaagcactttgaattaaattctgcttatacatttttattaaatatcacttttgactttggtgcctttgtattcttcagatgctcttcaggttatcagcaagtgctagtgcgatggctgacttgtaaatgtgtgtgtgtttctttaatagcctgattttccctacaaagatgacctcctggccttgg

SEQ ID NO: 493966 - DNA, 568 bp, Homo sapiens
cagctgtgttaggcccatgtagcctggggcttctaaggatggggagttccattgactgaaacttgtgttgttttcagaaaacatccatatgatccaacgggggagctgacctgtctggggagatgaatacagtggtttcatgggtcttttggggaagcctacctttcacagccctctaattgctgctgtgctaccttcccaggttttcagcatataaaatatatgtggcccayctagggccaggctttcagacttggagtcacttcgattagaatgtcactcctccactgcataggtgtgcctgttaccctcgaagacatgatataagttcatgatcttctgactacaaactgattctgatgaaagtcaggatccaggagctagcgtcttattgggtgtttcctattgcatggtttaacccaactcctcaacacctgaagtgtaattggcactggcacttcatcggtcacactggaatgagggcagagcaatggcacccactgcctgcctgtctaggaatccttgtccagaagcaggactctctctccccacctccctctctccaccc

SEQ ID NO: 493967 - DNA, 568 bp, Homo sapiens
cagctgtgttaggcccatgtagcctggggcttctaaggatggggagttccattgactgaaacttgtgttgttttcagaaaacatccatatgatccaacgggggagctgacctgtctggggagatgaatacagtggtttcatgggtcttttggggaagcctacctttcacagccctctaattgctgctgtgctaccttcccaggttttcagcatataaaatatatgtggcccacctagggccaggctttcagacttggagtcacttcgattagaatgtcactcctccactgcataggtgtgcctgttaccstcgaagacatgatataagttcatgatcttctgactacaaactgattctgatgaaagtcaggatccaggagctagcgtcttattgggtgtttcctattgcatggtttaacccaactcctcaacacctgaagtgtaattggcactggcacttcatcggtcacactggaatgagggcagagcaatggcacccactgcctgcctgtctaggaatccttgtccagaagcaggactctctctccccacctccctctctccaccc

SEQ ID NO: 493968 - DNA, 558 bp, Homo sapiens
tgagccaccatgcccggcctcccaaagtgctggggtaacaggcgtgagccaccatgcccggctggctttcttttccttttccttttctccttccttctttccttccttccttccttccttccttccttccttccttccttccttccttccttccttccctccctmcctctctgacaggatcttgtgctgtcacccaggctggagtacccatagctcactgcagcctcaaactcctgggcttaagtgctcctcccacctcagcctcccaagtacctgggactgcaggtgtgtgccaccatgcctggctaattttcttaaaactttttgcagagatggggtcttgctacgttgcccaggctggtcttgaactcctgagctcaagcaatcctcctgcctcaacctctcaaagcactggggacttgggcagttttagtggattggaggcaaggggagccaatggggtgagcatggagagtgggagtgagtttgcgagcgtggcgagtgtggagtgcgtgggaaactatcacactgtggaggagagcagagaatgaaacagca

SEQ ID NO: 493969 - DNA, 564 bp, Homo sapiens
aaaaggagaaaagagcctgacacacagccctcaacaacaccaatatttagggggatggacagtagaggagggaactacgaagaacaataagaaggagctgcctgagaagtacacagaaaaaaatagtggatggttaatcagaagccaagaaagaatttctagctctaaggaagagtcaacawgtaaatgctttaggagatgggatgaagactgaaaatgctcattgactttttcccctgtagactatatacactccaggaaaggtgcaatatctgccttgttcgttctttcttttaataccttttttattttagatttttgtggctacacagtaggtatatattgtgttgttcattctcgtatcatcacatggaatagaatagatcctcaataaaaataagttaaagtaatgtgaatagactaacacatttaaaagagaaaaatagattaaactatgttagctaaagagcttcaacctcactctaatttctttcgttgtgagttttcctaagctattttctcctaaaaatgttaactttcctttccccatccccaaaagatggg

SEQ ID NO: 493970 - DNA, 612 bp, Homo sapiens
acagcaggattgccaggcactatgtttgacggttccttcatccacagtgcccagaaggacaggcagctctcttcaggtgagcacctggtattcagtcactcttcctgacctaatattcctgggctcactgctgtcaccctggatgctccctgagtctgtaatcacacacaagaatatattgttgtgcttagatttcaaagtcctaattaaagttccttaacttttttgttaatcagttgcagattttctttctaagccaaaaagctcattagaaaataagtcacacaaagaggattttgctaacttaacctgtttttattcgtcctctgaaaaactaaagagaaataagggaggtgagggacaggacagatagcacattggccccaaagttaaaacttggaggtgaaacctgtttatccttaaatgctccaccagaggtggtagccacccagttacaaagtgagatcacaaaacaataagattattctcttagatgcagagtgctcagcacccaatgagggtcctgttgtctctatttttctgttaaactatatacccayctttctattctctggattaaaggaatccagaatattttactatggcataaaa

SEQ ID NO: 493971 - DNA, 264 bp, Homo sapiens
acgtctcctgccctgtcctccttctgcccttgcacttgtcaccactctgacttcatctcctgtgctctccactggcctcctgaccattcctgctgctttagagcattgtactggaagtttctgccgccctacgtgctcgtctctcagacatctacttggctaaatccctgctgccctccacattcacgatgtggctttctctatgagacccaccctagtgaatactgcagctccctycctaaccctacggtcctgcactcccag

SEQ ID NO: 493972 - DNA, 605 bp, Homo sapiens
tggccaggctgtcctgcccctcttcctgcccagttccatgtctgcgtgttgggatccattctctttggtaattgccactataggttctcccttctcctcaacacttagcttccttaggcttccagaactacattgactgtcttcactgcctggaaactcattttccttgcatttccccatttcctcctgctgctgcggagtggcctgttgaaactctyattcctcacataagtgcccttctctccatgtctctcacttccaattccaccgtcagcactgcatgcatgactctgaaaaggcaaccccctcctgcctgctgtctaaagcttcaagaccacattttcagctctcagttttggacatccacttggactttatagaagcatttcaaagtgaatatagttaatattgaacttttttcctcttctctttaagcccagatttccttttaaaaaaaaaaaattatcactctaccaggaaggaaccctggctaactatgaaccattcttaactcttttccctccctcttcctccatccaatccatcaccagaacgttctttttctaaattcttcctccctccctctcttcttctcgccttccttc

SEQ ID NO: 493973 - DNA, 367 bp, Homo sapiens
taactggcatacagtccaatctaacattttaggcacaaaccttaatttgttgggcaggsttaggcataatatatccttccaagtgcagtggaaaagcagtcttggcatgtttggatatgttgatttgcatatacggattttgtttgttaccaaagctacgtatttgaatacagcagtcagacatgagttcccttcagggaaaatgcaccttagtattttaactttgatattttacatgatagcaattcccactcccttttccttttgatatttactagcctccctagcctccaacatctacagccacatttaactggaggaactcactcctcccaggtagtttttcaacagttacgtgttctcccaa

SEQ ID NO: 493974 - DNA, 615 bp, Homo sapiens
ctgtggtcccagctactcgggaggctgaggcagaagaattgcttgaacctgagaggcagaggttgcagtgagccgagatcatgccaatgcactccagcctgggcaacagaggaagattccagctcaaaaaacaaacaaacaaacaaacaaacaaaaaaccaaaaagcctggcacctcccacctcccctctccttgctccctctcttgccatgtgacgccgtgtgacgcacctgctcccccttcacctctcgccatggctaccagctccctgaggctctcgagccgatgctggtgccatgcttgtatggcctgcagaaccgtgagccataaaacctcttttccatgtacattactcagtcgcaggtattcctatttatagcaatgcaaaacggactaacgcaggcccactttgaaaatcaagaataattgtctcatctcagagtccgtaatcacatctgcaaagccctttttgccacgtcaggtgacatattcactggttctaggagtagggtatttggggaggagtagatgtatttgtgggggcaggtggcaaagatcaggaatctcaaggtytttttcctgcagaggtgagaactctgacagggaggcccctga

SEQ ID NO: 493975 - DNA, 519 bp, Homo sapiens
aggtgtcggggaactcacagagggtggagagagccctgggtgcagagtcttggccgtcaggccgaggcgggtgggaagagacccggcattccggacagaacaataacaatcatcgtttccactcaccaggggcttgccctgcagaagacattgtgcctggtccattacacacacaccacagtctcgttgcatccccctgtaaccctgtgaggtagctgctatcattgtacccattcttagatgggggaactgaggctcaggcaagtaaaatgacttgctccagattagggaagtggtagggagtcaagaggggctaaggcctgagtccgtctcattctcagagcgacacccataagcatgggctgcctgcccatggaaactcataaagtagagacacttaagacataggcggcccccggcggtggctcctgcctgcagtggcccagttgcataaacactgagagaaggctgccgaatttcactckaaggggttgttggaacaaagttgaaatgtggtcc

SEQ ID NO: 493976 - DNA, 604 bp, Homo sapiens
tttcccatattgattgtcaattgatcaacaagattttgatttcttataaatgtggcactggaggttccaaaagttcataccaataggttgtcattaggagctttaactctattctaggcaggtaaagcacccacacaggtaacaagaaacaagtgctggagtgtgatagattcatagccaaatggagaacaaggcagtatatgttaagatgttcttttttttttttttttttttgaaagagtctcgctctgtcgcccaggctggagagcagtggcgcgatctcggctcactgcaagctctgcctcccgggttgatgccattctcctgactcagcctcccaagtagctgggactacaggcacccgccaccatgcctggctaattttttttttttttttttttgtatttttagtaaagacagggtttcaccatggtctcaatctcctgacctcgtgatccgcctgyctcggcctcccaaagtgctgggattacaagagtgagccaccgcgctcggtcaagatgttcattttaaggaagaacataaatgtaaaaataagtaaggaaaggaattgaagctgggagcagtggcgcgcatgcctgtaatc

SEQ ID NO: 493977 - DNA, 450 bp, Homo sapiens
ctgatctctttagagtagtgacatcacaaatagttggattttacaattcttgttttcaagtgcccttgatacatctttaaacaaaaagaagaaaaaaaataaaatcacaactgagctcagaataatcctgaacattgctggaaaacctcttgtccatcccagttatctcatatcacagcatccatttacctataatcttaaaggatatttgataaagtctacatggttaatatatagcaatgatacagacaggatgcaggacaatactgggtagaagagggtggttccccgacaaaggccccaccctcaagcctggagacccatggccctaaatggggacaggcattcctgttttcgtgcycaaaaagttgccttttggcctgccacgcccactgtcctgtacccatataaacctgaaccccaggctccagaagcagacaaacagacgag

SEQ ID NO: 493978 - DNA, 600 bp, Homo sapiens
ctggcactttcacttgccatataggcagttgcatttttttaccacccttgctgcttttaagtctttaatcacagagtggcaatttctctttttttctcctgggattctatactgtttctgttggaatagcttggagggaaccgtgagctggattggaaagccacttagatatttccctagcatgtccctaggaagacacagtccagataagtattcagagtccaagcatgtgaaacatcaatgccaattatacattcagcagtgaaaactacaacattgaattgacaacacagtatgccccttgaggacagggagatcttggccctacccctagttggctttctctttaatgtggttaagtttggattagaggagagaggacaggggtcacayagggagacaatgacttggctccagtaagcaagtcatgtttactttccatttcgtgtggtgcagcagctttgtgtggctaaaccaaatgaacccccaatgtctttgatccaatcaaaacccagtatgaagcagcaaggtcatcataaccaacaccctcaatttctactttggagacccttgagctgcattggtttctatttggggttt

SEQ ID NO: 493979 - DNA, 613 bp, Homo sapiens
aatggtcagatagctagtgacagatctgtgattgaaactcctgtacttagctctggagtctgtggctatattgaacacactaggtcacctctcaaaacagatcttacatagccttcccaataacttgttcatatgtcacttggccctaggcttacggtcagcaaccccatctctttgtcttcccatcatgtataccttaaaatgtggcctgatcacatcaattataccatctttttttcatgcttcaaacaatcagggctatccaaccgaagctagcactctcttcacaaactgttagtctccacccaaaggattggcctagctattttgcacygttatcaggtttgctacaagcctattaaaaatcctttgtcttcagttcttgccaattaataggatagtgatttgagggcaaatagccagttggaagggaatattaatgtgtatgtttaatgcagtggtggagaagttatggcactttaaatataacatcttgcatctttctcttttaaaaaaattattctttaagttctgggatacatgtgcagaacatgcaggtttgtgacacaggtatacatgtgccatggtggttagctgcgcccatccacccacc

SEQ ID NO: 493980 - DNA, 613 bp, Homo sapiens
aatggtcagatagctagtgacagatctgtgattgaaactcctgtacttagctctggagtctgtggctatattgaacacactaggtcacctctcaaaacagatcttacatagccttcccaataacttgttcatatgtcacttggccctaggcttacggtcagcaaccccatctctttgtcttcccatcatgtataccttaaaatgtggcctgatcacatcaattataccatctttttttcatgcttcaaacaatcagggctatccaaccgaagctagcactctcttcacaaactgttagtctccacccaaaggattggcctagctattttgcaccgttatcaggtttgctacaagcctattaaaaatcctttgtcttcagttcttgccaattaataggwtagtgatttgagggcaaatagccagttggaagggaatattaatgtgtatgtttaatgcagtggtggagaagttatggcactttaaatataacatcttgcatctttctcttttaaaaaaattattctttaagttctgggatacatgtgcagaacatgcaggtttgtgacacaggtatacatgtgccatggtggttagctgcgcccatccacccacc

SEQ ID NO: 493981 - DNA, 606 bp, Homo sapiens
gttcaagtcctccttcccttggaaaccaaggtttctctgcccggagctgcccacatcacagtgtttctgttaattatgtgctgttctctatcaccttatgctagtcctattttttgtaaaattttctcttatyattatatatataatatatattatattagtgtaatatttttatatattatatgctaggctaggcttggtggctcacacctgtgatcccacactttgggaggctgaggcaagaggatcgcttgagtccaggagttcaagaccgcctgagcaacaaagggagaccctgtctctacaaagaacaaagtattctatgcttactacagatacatcaaacataaaccataaaaaaaaaacccataaataaatctatcctggggtagccattatcaaccctttcaaataaagccttctctgtgtgtgcatatacatatgtaaatttatgtaaatttcatgtatagtttttatgtaaactaatcttgttcccctaagcagaatataatttctttgagggcacaaatatttggtattactgtgtctgctgtacaactcggatgctacaaaatctgtaataatctctgccgtgaccagggccag

SEQ ID NO: 493982 - DNA, 509 bp, Homo sapiens
aaacacacccacctagaaatgagcagtgactctacaatccagtgaagccctacagcccactgcggcctatggcaagaaggagaaagcagtgtctgtgctgggctcggcacttttctaggtgttctgtgcattattaccttgacaaattccccgacaatccactctttatgcactgtttctcccatttgacaggttgggaaactgaggttctgagaatgtagatgaggtgcccaagcttccatagcttgtacgtggtatagatgggtctgctcaccccctccaawccccactccatttctgccactaccctgtggactcctggcactccattggagaccatgggaaagccagggtcacctgtctcagagctttcctactcccttccagccattgaggagcatccaggaatgaagctatttcttccacgggaaccccagagggactggaccttgagatgacaactgtgtactcagacaatccatttggggaaaaacagttatgccctggct

SEQ ID NO: 493983 - DNA, 435 bp, Homo sapiens
cactgtactccagcctggtcaacagagctagaccctgtctcaaaaaaaawaaataaataaataaagaagaagaaaaaacaatgacaacaacaaaatttggtttctggggtagtggaattaagagtaattagttttctggatttttccaaatttttttggagggccttatttgtatcttgaaccaaaaaactcagaattgacagctttctgtgtataaagcactcttcaacactgatgctgggaggagtaagaaactttatataatacagttctgctaaaggactttatgaagatattggcttggtatggattttctaaagtgtgaaagtaaaaggattaagcttcaaatacaaatatggagggaaatctatacatatcacttacctcatagcaatactgttgaactttatgcaaaactttgtttaggtccttgtt

SEQ ID NO: 493984 - DNA, 485 bp, Homo sapiens
ctgagacacttcctagctatgtgactatttaacctctcagtttattcatcaataaagaaagggttacccttcagaggttgctacttcagaggtaataggattattattattactaacttattaatgcttttctttccttcacctgattggctctggtaggtttccatataggcaattaagagtgcgaccagtttgaccaataaagactaactgctaccaacatttaaaagccgtatgaaattgggttctggtaaaatgggaaatattcagagaacagttccacttctttgataaatggtagcactaactactggttgattccaatgacaacagactaccaaatttaaagaaaacggggagggcacttgaaagtagcatatgctacttatatgtctcattcatgtatmtagtggtgaaataaaatcactaataagtgagaagaatatgggttaaagaacagcaggaaactcagagaagaaaaaata

SEQ ID NO: 493985 - DNA, 398 bp, Homo sapiens
ggaaagcaaaaccatggacaaggagagactcctgtatttcaaaactataaatgtgtatgccctatgatccagtcattccagttctcattacatatgcttsacaagcactctcaaatatataaaaggaggcagatacaaggacattcattgcagcactattttcttgttactggaaataacttaaaaggttatcaataagggaaagtcgaaacaacatggtacagtcatgctctgcataatggcatttcagtaaaggacagattgtttatatgagtgtagtcccataagattattataatggagctgaaattttcctatggcctagtggtgtggtagccaccataacatgatgcaacatataactcaagtatttacgatgatgctggcgttaaactaac

SEQ ID NO: 493986 - DNA, 494 bp, Homo sapiens
gatgtgctatggacacccaaggcaccaaggtccttccaagggccgtcacttttttaactctcaaccccatggccaccactgcctcatcacaattgggctagacscactttggtgcctatcttggtgatcacagaagagttagcttcttttttcccttacagataacatcatttacatgttctccaataatgagacctccccatatcatcacaagacatccaccatctcaacatcaaacatgtactgaacaatggattgtggatggatagtaaactacgatcttctgaggatgaccccccaggcccactggcacccagcaggaccacgaggcttttgctagaccacacctctccatttcacatgcagcttctggcaaaagctcccttttttaccggttttaaaggttagctaatatttcccacttactcctcctggcaggaagtaaggattattgctccagaacccaccgagggtgcagtcagaggcagtaacga

SEQ ID NO: 493987 - DNA, 496 bp, Homo sapiens
attcctacaggagactactcaccccataacctcaaaaacctcttcatgaggatggtaagtcacctgaatcctgaagtgaattactcgctattccattggaactcatataggacacagaatctagacctccagagaacagcaggacccatcttcagaaaataagaagcatttgttccctgagcctgtgaatcaaaagtgcaattctatttctttttggaatgttaaaaagtraatcataatatttaagcaggtgaacccacgagtaacatagcagggtctttcttgtcattattagctccaacctagcacagacattaaaggtacagatgtatactagcatgaaactgggagaacaggagcattcgagcaaccttgagaccaatgggcctctcttataaaatgcacacctcctctcactgagattgaggaaggtttcttgtctccgagccttctcccagtagagctataaatccaggctggctcctccctccccaca

SEQ ID NO: 493988 - DNA, 313 bp, Homo sapiens
tgtgaatcaaaagtgcaattctatttctttttggaatgttaaaaagtgaatmataatatttaagcaggtgaacccacgagtaacatagcagggtctttcttgtcattattagctccaacctagcacagacattaaaggtacagatgtatactagcatgaaactgggagaacaggagcattcgagcaaccttgagaccaatgggcctctcttataaaatgcacacctcctctcactgagattgaggaaggtttcttgtctccgagccttctcccagtagagctataaatccaggctggctcctccctccccaca

SEQ ID NO: 493989 - DNA, 496 bp, Homo sapiens
attcctacaggagactactcaccccataacctcaaaaacctcttcatgaggatggtaagtcacctgaatcctgaagtgaattactcgctattccattggaactcatataggacacagaatctagacctccagagaacagcaggacccatcttcagaaaataagaagcatttgttccctgagcctgtgaatcaaaagtgcaattctatttctttttggaatgttaaaaagtgaatcataatatttaagcaggtgaacccacgagtaacatagcagggtctttcttgtcattattagctccaacctagcacagacattaaaggtacagatgtatactagcatgaaactgggagaacaggagcattcgagcaaccttgagaccaatgggcctctcttrtaaaatgcacacctcctctcactgagattgaggaaggtttcttgtctccgagccttctcccagtagagctataaatccaggctggctcctccctccccaca

SEQ ID NO: 493990 - DNA, 524 bp, Homo sapiens
tgataaaatcattgtcctctccaccctgattcctacaggagactactcaccccataacctcaaaaacctcttcatgaggatggtaagtcacctgaatcctgaagtgaattactcgctattccattggaactcatataggacacagaatctagacctccagagaacagcaggacccatcttcagaaaataagaagcatttgttccctgagcctgtgaatcaaaagtgcaattctatttctttttggaatgttaaaaagtgaatcataatatttaagcaggtgaacccacgagtaacatagcagggtctttcttgtcattattagctccaacctagcacagacattaaaggtacagatgtatactagcatgaaactgggagaacaggagcattcgagcaaccttgagaccaatgggcctctcttataaaatgcacacctcctctcactgagattgaggaaggtttcttgtctccgagccttctcccagtrgagctataaatccaggctggctcctccctccccaca

SEQ ID NO: 493991 - DNA, 492 bp, Homo sapiens
tcctgctctccctcctccaggtgaccccagccatgaggaccctcgccatccttgctgccattctcctggtggccctgcaggcccaggctgagccactccaggcaagagctgatgaggttgctgcagccccggagcagattgcagcggacatcccagaagtggttgtttcccttgcatgggacgaaagcttggctccaaagcatccaggtgagagaggcaggcatgcagagctgctaagtctagagggaaggacgggagagaggttccagagttgggtctcagcagtctatgtcactgaggtggcttcacttagaatctctgggcattgattttctcatctagaaattgaacagagagccaaataaacatgagaaactttatttctccaaagacttgattccaagaaacrtctgtgaaattcactaagtttaagatatgaagagacagacgtagttatttctggatctaaacaagtagacttagttgtaaaga

SEQ ID NO: 493992 - DNA, 438 bp, Homo sapiens
ctggatcccacactaccccagctccccacaggaaaaattcaaactaagaatgggtgagacmgggttcctcagtcactccaaagagtccacaattccatgcccccaccacaatgggctctttgtgacactttgggattcaattgagaaagttctctcctatttcatcaatattttagagaagctgagatttacacacacacacaaagtacaagtccaatttgtcaccaatactgtgaaaattgccctctgttcatctagggctctatgaaaagacaccacaagacataatggattaaaacaacatgatcaggtcttcattcacacatttgcaattgggaggtggctctctccacaggcatcagaggagaagtgctgctgggatctgaaaacctcaggcccaagacacttgtgaacaggtggcagggggtgctggctcag

SEQ ID NO: 493993 - DNA, 409 bp, Homo sapiens
caggaaaaattcaaactaagaatgggtgagacagggttcctcagtcactccaaagagtccacaattccatgcccccaccacaatgggctctttgtgacactttgggattcaattgagaaagttctctcctatttcatcaatattttagagaagctgagatttacacacacacacaargtacaagtccaatttgtcaccaatactgtgaaaattgccctctgttcatctagggctctatgaaaagacaccacaagacataatggattaaaacaacatgatcaggtcttcattcacacatttgcaattgggaggtggctctctccacaggcatcagaggagaagtgctgctgggatctgaaaacctcaggcccaagacacttgtgaacaggtggcagggggtgctggctca

SEQ ID NO: 493994 - DNA, 409 bp, Homo sapiens
caggaaaaattcaaactaagaatgggtgagacagggttcctcagtcactccaaagagtccacaattccatgcccccaccacaatgggctctttgtgacactttgggattcaattgagaaagttctctcctatttcatcaatattttagagaagctgagatttacacacacacacaaagtacaagtccaatttgtcaccaatactgtgaaaattgccctctgttcatctagggctctatgaaaagacaccacaagrcataatggattaaaacaacatgatcaggtcttcattcacacatttgcaattgggaggtggctctctccacaggcatcagaggagaagtgctgctgggatctgaaaacctcaggcccaagacacttgtgaacaggtggcagggggtgctggctca

SEQ ID NO: 493995 - DNA, 438 bp, Homo sapiens
ctggatcccacactaccccagctccccacaggaaaaattcaaactaagaatgggtgagacagggttcctcagtcactccaaagagtccacaattccatgcccccaccacaatgggctctttgtgacactttgggattcaattgagaaagttctctcctatttcatcaatattttagagaagctgagatttacacacacacacaaagtacaagtccaatttgtcaccaatactgtgaaaattgccctctgttcatctagggctctatgaaaagacaccacaagacwtaatggattaaaacaacatgatcaggtcttcattcacacatttgcaattgggaggtggctctctccacaggcatcagaggagaagtgctgctgggatctgaaaacctcaggcccaagacacttgtgaacaggtggcagggggtgctggctcag

SEQ ID NO: 493996 - DNA, 519 bp, Homo sapiens
gcagcccaggagcagcctggagcagatgatcaggaaatggctcatgctttacatggcatgaaagtgccgctcttccgctttcaggtgagacaggccggcatgcagaactgcagggtctagtgggatggatgggagacagagtgtggaatcgagtctcaatggtccatgtcacttcgggggcttcatttagcatctctgggccttggttttctcatctataaattgaatagagagccaaataaatctttctgtctttaaagacttgaggctgctctgcctggagagtaaccattcttttattcctttacttccttaacaatcctttcacttyagaaaatctataaaattgaaaaataaaacttgacgtcaagatatgtctgtgaaattcagtaggttttagatatgaagagacagtctgactcgttctttctggattcacacaagtagacttcattacaaggagaatattttactgtatctgtagaatagtttttaaaaagtagagccaagcccaagagt

SEQ ID NO: 493997 - DNA, 593 bp, Homo sapiens
gtgtgtgtgacggggcagaagcacaaaaatgagctcaaatgagaatgagtctcaaatcctgtgtgaccagcactgctctgtgtatttattcctattgactgaggctgttcatgctrctggccccaatgcagccaacatcactcattacctagcacatgacttatccaagattccctttaccatcactgctgaccttctgatccatttatgatgatttccctgtgtcctcagactcagcgagaggcttgaggtgcatttgcggaagaggaatttgccgtttgttataacgtcgctttgggtcctgcgcctttcgtggtacactccaccggatctgctgccgctgagcttgcagaatcaagaaacataagctcagaatttactttgagagttaaaagaaattcttgttactcctgtaccttgtcctccatttccttttctcatccaaaataaataccttgttgcaagatttctctctttacatctctttcacatttgatgtgtctttgtgtctcaagacacttgggatgcacttaccagaatcctaagtttttaaacaaaataaaatttgaaattctaggaatttcaagcaggcg

SEQ ID NO: 493998 - DNA, 593 bp, Homo sapiens
gtgtgtgtgacggggcagaagcacaaaaatgagctcaaatgagaatgagtctcaaatcctgtgtgaccagcactgctctgtgtatttattcctattgactgaggctgttcatgctgctggccccaatgcagccaacatcactcattacctagcacatgacttatccaagattccctttaccatcactgctgaccttctgatccatttatgatgatttccctgtgtcctcagactcagcgagaggcttgaggtgcatttgcggaagaggaatttgccgtttgttataacgtcgctttgggtcctgcgcctttcgtggtacactccaccggrtctgctgccgctgagcttgcagaatcaagaaacataagctcagaatttactttgagagttaaaagaaattcttgttactcctgtaccttgtcctccatttccttttctcatccaaaataaataccttgttgcaagatttctctctttacatctctttcacatttgatgtgtctttgtgtctcaagacacttgggatgcacttaccagaatcctaagtttttaaacaaaataaaatttgaaattctaggaatttcaagcaggcg

SEQ ID NO: 493999 - DNA, 593 bp, Homo sapiens
gtgtgtgtgacggggcagaagcacaaaaatgagctcaaatgagaatgagtctcaaatcctgtgtgaccagcactgctctgtgtatttattcctattgactgaggctgttcatgctgctggccccaatgcagccaacatcactcattacctagcacatgacttatccaagattccctttaccatcactgctgaccttctgatccatttatgatgatttccctgtgtcctcagactcagcgagaggcttgaggtgcatttgcggaagaggaatttgccgtttgttataacgtcgctttgggtcctgcgcctttcgtggtacactccaccggatctgctgccgctgagcttgcagaatcaagaaamataagctcagaatttactttgagagttaaaagaaattcttgttactcctgtaccttgtcctccatttccttttctcatccaaaataaataccttgttgcaagatttctctctttacatctctttcacatttgatgtgtctttgtgtctcaagacacttgggatgcacttaccagaatcctaagtttttaaacaaaataaaatttgaaattctaggaatttcaagcaggcg

SEQ ID NO: 494000 - DNA, 596 bp, Homo sapiens
aaacaagtccactctcccagtgtttaaatgagggctgctacttaaaactgcgcttggacaccgaccacggggctacagacagacaaaaaggcaggcttctccttaccaactctaagattctgatctaaattactttagataataaacacggccgggcgcggtggctcacgcctgtaatcccagcactttgaggcgggtggatcacctgaggtcaggagttcgaaaccagcctgaccaacatggtaaaaccccgtctctactaaaaatacaaaaattagctgggcgtggtggctggcgcctgtaatctcagctactcgggaggctgaggcaggagaatcacttgaacctgggaggcggaggttgcagtgagcccagatcgcgccattgcactccagcctgggcaacaagagttaaaactccatctcaaataaaaactaaataaataaaaataaacacaccttgcactagatttttcaaactgaaaacaagctccaggtgcttctcgctttatctcaattcgctacatcctttcaaatctaatcccaaaacgtracacttgccaagaaagtagcatgggggtaacttggcgagccagc

SEQ ID NO: 494001 - DNA, 479 bp, Homo sapiens
ggcccgggagttgctgtgtggcacaggcagcaccaggaccctccctgcaggaaggtggacaaaaggctgaggggagggacaggacggtgcactctcaggggctgggagatggacagttctcagagctcacscccacgcagcccccgctctaccccacgctaacacacacactctgttccaaaactgcccttccacactgggtcaaaaccatgtcccagggccctgcccaaggtccacactcactgtgtctgctggggtcaccagacagcctcagggagtgtgggaatatccttgctgctgctgaaggcctttctcctctcacacccacacctgcacccccacctgtagcttccccaggatatttaccccagcttgagggtgtcaaggctcttgttgagtgtctgaaagctgaactgcatgtgtatgaaggaacagtttcagttgtgtctacactcagagttgacactggtggcaagtcc

SEQ ID NO: 494002 - DNA, 479 bp, Homo sapiens
ggcccgggagttgctgtgtggcacaggcagcaccaggaccctccctgcaggaaggtggacaaaaggctgaggggagggacaggacggtgcactctcaggggctgggagatggacagttctcagagctcacgcccacgcagcccccgctctaccccacgctaacacacacactctgttccaaaactgcccttccacactgggtcaaaaccatgtcccagggccctgcccaaggtccacactcactgtgtctgctggggtcaccagacagcctcagrgagtgtgggaatatccttgctgctgctgaaggcctttctcctctcacacccacacctgcacccccacctgtagcttccccaggatatttaccccagcttgagggtgtcaaggctcttgttgagtgtctgaaagctgaactgcatgtgtatgaaggaacagtttcagttgtgtctacactcagagttgacactggtggcaagtcc

SEQ ID NO: 494003 - DNA, 615 bp, Homo sapiens
gtagcctcaacctcccaggctcaatcagtgctgccatctcagcctcccgcgtagttggtatcataggtgtggaccagggtttcaccatgttgcccaggttggtcttgaacgcttgggttcaaggagcacacccaccttggcctcccaaagcactgggattacaggcatgaaccaccatgcctggcctcagtggcacagttttgagggtgaattatgataactaaaattgaagaagaaacctgagattgttgtaattaataatttgacttcatattatgcctttaaaaatagcttaggaggaastaacatgttgagtaagcgcctgggctctgggataaattccgaatttgctatttacttgctgtgacattggacaagttactgaactgtgcctcagtttccttgtatgtaaatgtatttttaggttaaatgaacaatatttaatataaattgtttagtacagtatcttgcatatgttatagctatggaagattattagtaataaagacttctttagatgttttatatattttttattcatcagttcctcttattttattctctatagtgtattacaggaaaatataatagtgttaacctatggactgtttgtgt

SEQ ID NO: 494004 - DNA, 605 bp, Homo sapiens
gccccctatcccagtgtgcctcctgtgccctgaggggaccctatatcccaggaagccacgcaaagcccttcccaatgtccttcccttttctaactgtgtctccttacccaagaaccatctaaagccctaagaagctaagtgaccaatccaaggtcacagagccagagaacagcagggtaaagtgtagaagccagggttcccactgcctggtctgtagatgcttcaatctatgttttaaaacagttttaaaaagtggctcatgcctgtaatcccaacactttgggaggctgagggaggagaatcacttgtagccaggagctcaagaccagcctgagcaacatagtgagacccagtctctaccaaaaaaaaaaaatacaaaaatttgctggggtcgggggtgggggtggggggcgatgcatgcctgtagtcccagctactcgagaggccaaggtcagaggatcccctgagcccaggagttcaagactgctgtgagctatgattgcaccactgcattccagcttgggcaacagagcagaaccctgtcwcaaataaatttttaaaaaaaagaaaaaaagtttggtgccctatcccttaagataaatcca

SEQ ID NO: 494005 - DNA, 647 bp, Homo sapiens
ggcagctgctgccaaccccacagccaacacagagcccctcctcttggctctacagagatggagggacttcacttcacaaggagctctctacaaacctggtgaggagaggaaatgcacaaacagaggggtcataaaagcataaacactgacgagctcccagcacacttactccacaagcataactgagctggtggctgcatcaggcaagcagtcagtgggtgggtgggtgggtggatggatggatggatggagagaaggaaggaaggaaggaaggaaggaaggaaggaaggaaggaaggaaggaaggaaggaaggaaggcaggcaggcaggcaggcaggatggattatggatggttggatagatggatagacggatgaatggaatgacagatggagccatggtttccaggttagcgtagcccatcatacaagaccttccttttccttcaccccacccagaaaaccccctttttccaggtttatttattcaccaaagtctattggaactgtcagatctgttccacggcctctgaattttgagcaattttctatttaatcttttctgccccttttcctccggaagagggtgaggagcccargtcatgggcacaagctgggtgcacaggcacaggtgggcagttaggaact

SEQ ID NO: 494006 - DNA, 586 bp, Homo sapiens
gcctttaaatattcctagcttactaagaagctgcacagttcttctgtatcagtagctgaattagaaaaatatcagagagtgtacacagcatcctgtgacaaacacaggtttacaactgcacatgaacaaacaccaggatttacaggaatataggaagtattttaataagtgtattctttccaacacaagtatttacaagaagtattataacaaatgtgttcttttttttttttacagacattcctagtctcaaggtagcaagggaacagtccttgagaaagaactattcaaattttgacgatcacargctattgccgcttttagtaaacacttggaaactcagtgtccagatgccacgatttctagtaagtatggattcaaattaaatgctgtggtaagtagtatgttaccatacttctaatcttattatttgtttaaacagagggtgcttgctaacctcgtgcttctgttaatgacttgggcactcaatgagttcgtgtccacccagaaagcatttgtttagctggcaggcacccaggctgggcccggctgtgtgcaggtcctgggctctcacagccaagtcaac

SEQ ID NO: 494007 - DNA, 585 bp, Homo sapiens
caagtcttagaacatttgagaagcagagaaagtagaggaggaggctccttcacctgccatgcccaggctgtggggaggagggaaaaaagcctgaacatatggatggagggacaaagtcgagtttgaaagcactggaccaagtccaagagggccaattcatccatcacaggccagcagcagrcagcactggacttccctgatactcacaggaggcgagtgggcctgggcctggaaaaaagagccgagagtgagggcagagctgatgaaaacttaggaagcagcccagcccacagccgatgggttcctctcccaccttgagcatctctgcaccccagggaggtggagattgagactgaggccagagggaatccaagactgcctctggccaggctcaacagtcacatccttcaatcagccttgttcttttttgccttcctgctgttccctctgcctagaacatgatcccctatcatttatctgacaaatccctactcatccttcaaatgtcagcttagaagccactttctctaggaagcctgccctgacagttctcctctcctcgctgcctttgccaggctgggttta

SEQ ID NO: 494008 - DNA, 611 bp, Homo sapiens
tccaatatgagagccaccagtcacaagttgctgttcatcccttgaaatgaagctagtatcactggaaactgaaatttaaatttcagtcagtttaaatgtaagtttacaaactgacatcagcttagttgttgggaatctggaacaacttaggtatataaatctacttttgtaactttaaatgttatgatatctaaatatgaagcatattttttataaaaaattggcgtaggaattgagatggctgtagataagaaacacaacagagtttaaaaacttagtacaaaaatataaaacatctcattaattwtatgttgattacatgtacaaataataatatttttgtatatactgagttaattatgattaacattgagtttccttgcttcttttcactatttttaacaagcattaaaactaccgactactaaacatatatagtaataaatatttaaattagtaactactaaaatatttaaatgtttttagttggcttgagttatatttcaatgggacagtgctagtctaacttattcaaggctcttcaccagctctccatatactgcagagtgaaataccattagtgttctatgggtaattgatttacttttcta

SEQ ID NO: 494009 - DNA, 640 bp, Homo sapiens
gtccaatatgagagccaccagtcacaagttgctgttcatcccttgaaatgaagctagtatcactggaaactgaaatttaaatttcagtcagtttaaatgtaagtttacaaactgacatcagcttagttgttgggaatctggaacaacttaggtatataaatctacttttgtaactttaaatgttatgatatctaaatatgaagcatattttttataaaaaattggcgtaggaattgagatggctgtagataagaaacacaacagagtttaaaaacttagtacaaaaatataaaacatctcattaattttatgttgattacatgtacaaataataatatttttgtatatactgagttaattatgattaacattgagtttccttgcttcttttcactatttttaacaagcattaaaactaccgactactaaacatatatagtaataaatatttaaattagtaactactaaaatatttaaatgtttttagttggcttgagttatatttcaatgggacagtgctagtctaacttattcaaggctcttcaccagctctccatatactgcagartgaaataccattagtgttctatgggtaattgatttacttttctagactcagcctgctgtcactttgcacatc

SEQ ID NO: 494010 - DNA, 615 bp, Homo sapiens
atggttgacctataatagttcaatgcaaatgccacctatatatagtaccatatcatctttaaatccactagtgcacattagcttttctaaattattaaagcgtttgatcataccttgtttattgctattaccttcctactgaccttttagaatacttttaacrgagatatcttgaaaaccctagtagattatgagtttgttgaagataagaatatcacttatctgtctgttgtctttgtatttgtcatagcataagcaaaggttgtgacttttatgttagtgacttgtatcataaacgcatttttgttttaatgagtgaatgagcttcctggatattcagatttcagggatttacctgattgaatttaccttttagaaagattacccttgtgcattttaaaacatcaatacaggaaatatcagaaccacttattctatttatggtttactgtttctgaaaatgaagacatgtactgatgtctgaatggcatttatatatgacaataaaaattgatgtctttccctgaaggggtgaataagttaaatgaacaactgtttctaaggaatatcaaattcacacctcctattaagtgtctggataaataaggaaaatag

SEQ ID NO: 494011 - DNA, 465 bp, Homo sapiens
ttaccttcctactgaccttttagaatacttttaacagagatatcttgaaaaccctagtagattatgagtttgttgaagataagaatatcacttatctgtctgttgtctttgtatttgtcatagcataagcaaaggttgtgacttttatgttagtgacttgtatcataaaygcatttttgttttaatgagtgaatgagcttcctggatattcagatttcagggatttacctgattgaatttaccttttagaaagattacccttgtgcattttaaaacatcaatacaggaaatatcagaaccacttattctatttatggtttactgtttctgaaaatgaagacatgtactgatgtctgaatggcatttatatatgacaataaaaattgatgtctttccctgaaggggtgaataagttaaatgaacaactgtttctaaggaatatcaaattcacacctcctattaagt

SEQ ID NO: 494012 - DNA, 467 bp, Homo sapiens
cttcataatacaattgtcttttccaaattagcaattgtgaatgcttgagaaataaatctaatgattaaatgtgttaataccactttctgctattattttcaatartaatagcagagtatgaagagaaatgaagaatgagaaatgagatttcgtatgaagaaatgagaaatgaagcaggtattttccttatgaatttcttaatatccatgaaactgaaaatgctatataaataccaattaaaacatcacaaaccaataactttatatattaccgtaatataatttcattattgtttaaaacaaaacgtgatggattatgattcatctaacaatataaaaataagaaaagctaggactttgtttcttttttaacaacttcagttactttaatatacatctagcttaagagtttgtgttttgctatataatagataaattagctactaatttatgcatctctcacctctc

SEQ ID NO: 494013 - DNA, 467 bp, Homo sapiens
cttcataatacaattgtcttttccaaattagcaattgtgaatgcttgagaaataaatctaatgattaaatgtgttaataccactttctgctattattttcaataataatagcagagtatgaagagaaatgaagaatgagaaatgagatttcgtatgaagaaatgagaaatgaagcaggtattttccttatgaatttcttaatatccatgaaactgaaaatgctatataaataccaattaaaacatcacaaaccaataactttatatattaccgtaatataatttcattattgtttaaaacaaaacgtgatggattatgattcatctaacaatataaaaataagaaaagctaggactttgtttcttttttaacaacttcagttactttaatatacatctagcttaagagtttgtgttttgctayataatagataaattagctactaatttatgcatctctcacctctc

SEQ ID NO: 494014 - DNA, 640 bp, Homo sapiens
atagtttttaaattgttttaaacaatctgagaaaataatttgtttgtaaatatggatatttcgaatccttttctttttttaagagttcatttttgttttttattgttttttttcaatcagaaatgtctcaaattttttcaactgatttttagacctgttgagatggtcattttaaaartgtgatctgtcaatattttagtatatttcccaatataaaatgaagcattttgggttgatcattgttatggactgaattgtgttccccctcgaaaagatatgttgaacttctagcacccagtactgcaaaatgtgatctaacttaaaaataagatctttgtggatgtaattagttaagatgaggttacacttgagtaaggtaggactttaatacaatatgactagtgtcattataagaagatgatgaaaaaacaactatctgatgagaaggcagagactggcattattcagctgcaagccaaggaatgtttaggattgccagcaacaccaaaagcttagtaagccttggagcagattattccctagagctgtggagagagcatggtcttactgacatcttgattttggacttccagactccagagctgtgagacaataaatttctgttacttaaagccactca

SEQ ID NO: 494015 - DNA, 640 bp, Homo sapiens
atagtttttaaattgttttaaacaatctgagaaaataatttgtttgtaaatatggatatttcgaatccttttctttttttaagagttcatttttgttttttattgttttttttcaatcagaaatgtctcaaattttttcaactgatttttagacctgttgagatggtcattttaaaagtgtgatctgtcaatattttagtatatttcccaatataaaatgaagcattttgggttgatcattgttatggactgaattgtgttccccctcgaaaagatatgttgaacttctagcacccagtactgcaaaatgtgatctaacttaaaaatargatctttgtggatgtaattagttaagatgaggttacacttgagtaaggtaggactttaatacaatatgactagtgtcattataagaagatgatgaaaaaacaactatctgatgagaaggcagagactggcattattcagctgcaagccaaggaatgtttaggattgccagcaacaccaaaagcttagtaagccttggagcagattattccctagagctgtggagagagcatggtcttactgacatcttgattttggacttccagactccagagctgtgagacaataaatttctgttacttaaagccactca

SEQ ID NO: 494016 - DNA, 593 bp, Homo sapiens
gataagtagttttacctgaggaataagtagtgttcaatagcattatagggtaactatagttaataataatctattatatatttcaaaatagaagatatttagaatgaccccaacacaaggaaatgataaatgcttgagataatggatatcttagttaccctgatttgatcattacacatcgtatgctggtatcaaaatattacatgtagcccataaatatgtatgactattatatatctataaaaattaaaaataaaaaaatagaaaaaaattaagctatttttttaaaagaccataatagatatattttggcaaacaccattgtattagtctgctttcacactgctgataaagacatacccgagacgggcaatttccaaaagtagaggcttaagggacttacagttccacatgcctggcaagrcctcacaatcatggtggaaggcaaggaggagcaagtcacatcttacatggatggtgccaggcaaagagagcttgtgcagaaaaactcttgtttttaaaaccatcagatctcatgagactcattcactatcacgagaacagaccaggaaatatccacccccataattcaa

SEQ ID NO: 494017 - DNA, 593 bp, Homo sapiens
gataagtagttttacctgaggaataagtagtgttcaatagcattatagggtaactatagttaataataatctattatatatttcaaaatagaagatatttagaatgaccccaacacaaggaaatgataaatgcttgagataatggatatcttagttaccctgatttgatcattacacatcgtatgctggtatcaaaatattacatgtagcccataaatatgtatgactattatatatctataaaaattaaaaataaaaaaatagaaaaaaattaagctatttttttaaaagaccataatagatatattttggcaaacaccattgtattagtctgctttcacactgctgataaagacatacccgagacgggcaatttccaaaagtagaggcttaagggacttacagttccacatgcctggcaaggcctcacaatcatggtggaaggcaaggaggagcaagtcacatcttacatggatggtgccaggcaaagagagcttgtgcagaaaawctcttgtttttaaaaccatcagatctcatgagactcattcactatcacgagaacagaccaggaaatatccacccccataattcaa

SEQ ID NO: 494018 - DNA, 559 bp, Homo sapiens
tctacagctgcgacatcaagcctcccctaatcttcttccttcattcctgccttcatgattgactcaaagtaaagccttaatattatcctggagcacatttcttccataagtgggttttcatactgattttctttttattttattttgattttaactttctgttatatcaataataataagcttagttgttttataagcagtcaaaatttaaagcatagcgttaatcagcaactcacaacagtttgcaaaaattatttgacccaaaataaatagtgatagaaaaaacaagtgccacagaaatttgccccaatgcatgacctgcaattttgtaaacacaaaatcatcctaagtgttgtgtttttggaataagaatttgggatgatcaatgcaggaacagaaaaccaaataacacatgttctcacttctaagtgagagctaaatgatgagaacacatggacccatagaagggaacaatacacactggggcctatcagagggtggaaggcaagaggaaggagagaataagggaawataacttattggcactaggcttaatatc

SEQ ID NO: 494019 - DNA, 604 bp, Homo sapiens
gctcacaggctgcacttgttgttgcaaggctctcagagtacagggtgacctgacacccagttgacatactgaaaggtacaagtacacaatatgctagagaaaaatctggggaaaattcttcatttgtgtaggcctttgcctctgtaagtcacaaaatctgtaatcaatctaccttgaagtcaggactgttgtgatatatgatttggggcattactaattgtatttgcagatataaacttaaaagctactttaatgtgtacacatgtgcttatgtgtaatctcactaagaatcctacattagtctctaagacataaaggtagaattaagggttgaggcaacctatagtagatttctagaacagacttctcaaattctaatgtgcatacaaatcaactggggaacttgttaaaatgcagagtgggatttaataggtctggagtgggaacagctattcacatgtctaaacatctcccaggagatactgatygttctggtccatggactacgttttgagtaataagggttttagaagagtggaaggaaaggggaggagcagaaaagctccattacttaaacaaaccaagtccctttctctatttttga

SEQ ID NO: 494020 - DNA, 589 bp, Homo sapiens
tgctagttaacaaaaattattcctttactagcatctgtaattccaagcaagagtgttatttttkgggggggtattgtttgcttatttatttatttatttattttataagatcagcttttaaaagacctgtttcttaaccagctatttcatgggagtatcacttgacctctctgttgattggttgtgtgactgaccttttgcactcagaaaaagagttaatttctgtcaaagtgctgtaaagatgaacaacttagagaaaactgagagcaagatggccaactagaagcctctactgatcatcctccctgcaggaacagcaaattgaacaactatccacaaaaaagcaccttcataggaaccaaaaatcaggtgaggaatcacaatatctggttttaacttcatgtcactgaaagaggcacttaagagggtaagaaagacagtcttgagttactgatcccctcccacattccccatcagcaggtgcttggcacagagaaagaatctgtgtgcttggggaagggacagcacagtgattgtgggactttgcattggaactcagggatgctctgctacagcagtacaagtcaga

SEQ ID NO: 494021 - DNA, 589 bp, Homo sapiens
tgctagttaacaaaaattattcctttactagcatctgtaattccaagcaagagtgttatttttggggggggtattgtttgcttatttatttatttatttattttataagatcagcttttaaaagacctgtttcttaaccagctatttcatgggagtatcacttgacctctctgttgattggttgtgtgactgaccttttgcactcagaaaaagagttaatttctgtcaaagtgctgtaaagatgaacaacttagagaaaactgagagcaagatggccaactagaagcctctactgatcatcctccctgcaggaacagcaaattgaacaactatccacaaaaaagcaccttcataggaaccaaaaatcaggtgaggaatcacaatatctggttttaacttcatgtcactgaaagaggcacttaagagggtaagaaagacagtcttgagttactgatcccctcccacattccccatcagcaggtgcttggcacagagaaagaatctgtgtgcttggggaagggacagcacagtgattktgggactttgcattggaactcagggatgctctgctacagcagtacaagtcaga

SEQ ID NO: 494022 - DNA, 643 bp, Homo sapiens
aaaaaattacatatgaagaatgcatatttataacctgaaatggctccaaaagaaagacagggcctggtacagaataaagcctcatgtttcccatttttttccaatttttcctagtgttagggaaagatttcacctgtcatctaaagaaggcatgagctcaagagtggaattttaaaaataataaacactttacccacgaggtgaaaatagaactcttcttcttcctgaacttcactcttctcaacttgtctgtgtaccacgttggaacagtgcagagttagaagtcaattaacagtgaaggccagtatttcagttttagctcagccagtgagtcattttgtgaccttaggcaagtcattcagcttggattaggactcagtgatttataaggatcctccagtttacagaagaccatgttttagaagaaagcagctctagtatatgatctacactctactacttagtagtaattgaamtggcaagtggctcagtcactctctgcctcaatttcctcaactgaaaaagtatgtaaccctcatggagtttgtgaagattaaatgagataaggtttctgaagagcttaaaatggcacctggcatttaataagcacgcaatggctttttgctcttattgttacaatgat

SEQ ID NO: 494023 - DNA, 596 bp, Homo sapiens
aaaaaggcaatcttgggaaaggtaccaggaaagaagaaagacatgacagtcattggggttgagggtccctatagaamatcatttagtgaaagatgtcttcctttagttcttcttcctttttattccctatccacatccttgttgtcctccctttctcagtttctctgtgtgtagccccaaaagaaagcttaaccatggacagcagctcaacaggccaggcacactgcaagttaggtgtcacctggacaggctaggcttgctaacagaaaacagggatggggtttgaagtcctgagggagactggagagcagctgtgcagtactcaaaacccaaactcaggtcatggccactgatcctacccagacctctctctcttgagttatccattctaatttcttgtccttctctgaagccccttgaggttggagaagagtgaaggaatgcatcctgagttattaaaggcactcctaagaagctcattaagtccttttctccttaactccaagaaaagatcccattttccttccaacactttaaaaccattattcattggatggaaacatccttcctcccctcaacccttttcaaagggaatc

SEQ ID NO: 494024 - DNA, 596 bp, Homo sapiens
aaaaaggcaatcttgggaaaggtaccaggaaagaagaaagacatgacagtcattggggttgagggtccctatagaaaatcatttagtgaaagatgtcttcctttagttcttcttcctttttattccctatccacatccttgttgtcctccctttctcagtttctctgtgtgtagccccaaaagaaagcttaaccatggacagcagctcaacaggccaggcacactgcaagttaggtgtcacctggacaggctaggcttgctaacagaaaacagggatggggtttgaagtcctgagggagactggagagcagctgtgcagtactcaaaacccaaactcaggtcatggccactgatcctacccagacctctctctcttgagttatccattctaatttcttgtccttctctgaagccccttgaggttggagaagagtgaaggaatgcatcctgagttattaaaggcactcctaagaagctcattaagtccttttctccttaactccaagaaaagatcccattttccttccaacactttaaaacmattattcattggatggaaacatccttcctcccctcaacccttttcaaagggaatc

SEQ ID NO: 494025 - DNA, 647 bp, Homo sapiens
aagagaggcgagaggctataggggatgaagtggagcaagaagagagaacagtacgaaggggcagggcacaacccggtccccaggtcccagcccacccccacccttccgcaggaggcgcggccctagaggcggggttagctgcggagcttcgcgtgggcccagcggcacctctctctccgcactgctagggagaaggagggaggatgacagattcaattaaagtgcccaagccaagcagacacgttgggtctccaaagagttgtggctgggaattcctggctctcaccccgtttgtccccgtgccctctgtgtaccaactgggcccagccaccccaccggcaggtctttctctcacatgcccagccttgggggggcatttcaggrgctgttcctgccacccagcgcaggagtacataacagatggcttcccttcacctgtggtcgccctgcaaccttttttataaggctagtcctgccctgttgaggaaatggaattacctgtaggaataccttgggtgttggcttcctccctgctggaatggggtgtgttgtagggggaactgggcggtacagcagggaggggctgcttcagagtgggactggaaacatgggtgaggctcaaagacagagatcccagtgtggctgtg

SEQ ID NO: 494026 - DNA, 589 bp, Homo sapiens
cacccccaaccaccacacacacccatgcccacaaggtcttagcaagagggggcatgccagattgggtggggatgggccgccttcatggggcgtcaggggactgggccctctgggatgcagaggtgggaaaggtgcccaaggtagggtgggcaccctggcaccagtgccctgccctggcagaaagaagggggaggcctttgccccacccatccctcccagatgatgggtctargagggccccttggcctggttggcaccaccatagctccaggtggcacctatattggcatgggtgttagagccctgggtaagggttaggggagtttcccagaagctagagaagcttatgaacaccctctccttcccacacatgtcctctgcctctccccctctttcattgctacctcttggccatgggcattggatttgggcctaaggagttaaacacccacccttgcccaatccctgtgtgagttgcgtggtgaacgagcctgagcctgtgacctgacagtgaggtcagccaatcagcgcccccaccacaccaagttgccacggagaccggccctggggtgggagaaaggaggcgggt

SEQ ID NO: 494027 - DNA, 619 bp, Homo sapiens
aaaaattagaggtaacatatgcatctgaatgtgatagcaggaattagggaagacrttggggtgggctgggtcaggggcaagattttgaactaaaatgaatagcagaaaaattgagagaaataaggaagtccagaataggagctattttctatgtaaagtgatgagtattgttttaatatgttgatttctgcagtagcaataggacaggccgggtgtaatggcttacacctgtaatcccagaactttaggaagccaaggtgagcagatcatttgagctcaggagttcgagaccagcctgggcaacatggtgaaaccccgtctccacaaaaaacttagccgggtgtggtggtgcacaactgtagtactggctactcgggaggctgagttgggagtatcacttgcacccaggaggtcgtggctgcagtaagccatgattgtactactgcactccagcctgggcaacagagagagactttgtctctaaatggatggatggatggatggatggatggatggatagatagataggacatacaatgctcactgccatgtgctatgccttgtcctagaatttttaaataaaatctaatttctagtcaccatccttcaaggaaattat

SEQ ID NO: 494028 - DNA, 653 bp, Homo sapiens
tctatggcactctcttgcaaaatgacttttaatgggtcagcgaacccttaattcactcttctctttctggtccttacaatataaaaaggtcagactgagagagggttcagtcagtcattcatctgcaaaataaacttttacttcttggccggttacccaggtgctgatcttcttctgttctatttcctaatgtgcgtacatattttgattttttaatgaaatcttaaggtgcacacttcatacctaactgcatccccacagcaggtatctccttagtgtgacaggcgagagcattatgctaagtagataatcacaacaattaactgaaaaggttataatttcatcctgtttggtactgttggcctgtcaaaaataattaggttaaaatagatctcaagactccctctgcaaatttaggggagaaaatagaagaagaaagraagaaaaaggtgacagctaagaactttttacttggccaaattaaatgttctgaaatttcactgctggctgaaacactagagagctatttaatagaagaatcctttcaactcagttggaggtatttggtttctgtttcaatgcttctcaatacaaatattgaaaatgtataaggcaaaatttcaaggcacaagttctgaccagaaagataatct

SEQ ID NO: 494029 - DNA, 526 bp, Homo sapiens
ctaagtgacatgggcaccaatggaaacagcattcttattttcacatatatgtcacttcaaaaatatatgttatgttactcttttatgcttttcccacattacttacattttgacttcccctgttcagaaatactgatggtgaggaaggtgagctagctatgcaaatggctctaaatcttatatatccttatgactatggatacattgaagtgctccactgtcatgccttttcctgacctatgtaataatctcccccaaactggttggcactgggcctgaatggctgcccttattttagtttgattgaagttcattcttgaggttttaaatatttaaaattaatggacagwttgagaaaaagaagactgaccaagtgagaggtgtttgacctcaattgcatcagtgtatttaaagttgacattttcttctataggaagattaaaaatactgaagttaaaacagaaaggggtacttctgttgtatccagataatatgtttgagctccttgacctgtctgggggaacag

SEQ ID NO: 494030 - DNA, 643 bp, Homo sapiens
ttttccttatttattcaagtagactggtttccaagattggggttcatgcatctcagagattggctacagacaatcatctggggtctagagagaaaataccagaactattatattatttatttttgtctgaaaatgtaagaaagagattaagcttcctagcacgtatggaacggcctagtgctgacataccccagcactctttgtaggtctgtattttagactgtcttgtatcttgaacagtgtgggagtttgcctgagagggaaatggagttccacaaggtggaggtagggaggggaccattggttccacctttttattggctttcagagtttcaaagtagggcttagtaagtggctttacagattacactatctcgttttaacgaaatgtatgctcaccacatagacaagtagctagaaaatggctcttgcagagaaactgcagatttaaaaaacctaataatgtaagaacaaatgtacaattccatcgtagaggtggctttttgcttactttgccatgtgacaagagaaaagcaatgagcgagccagatctattaagaattaacataacttttttttcattgatcaagaatattattgakcatgtggattcacacaattgttaatgagggtcctcactcca

SEQ ID NO: 494031 - DNA, 502 bp, Homo sapiens
tggtcagtggtgagacagaaatttgaatcgacaccattcactgctttgagccactgagccatcctgcttcagacaggaccttactctgtttactctgcctaagacttgtagctcagcaaccagaaatgagaccatgctccctcatgytgtggccttttttctttccctgtctggaaccccagttcttctgagactgaagtctagatcttagtcactgcagttggtgatccagtacattttcttgctggtcactttttactaggactcccaataactgccaattgttagacctctgcttctcttagtattcctgttgcctatgtatccttgatgcatggatatagctttagagattgtattaggtctgagaaggaccccaaacatcgcctgttaacaactacttggctgatactttaccacattcctgctaagtggttatgtggccattcttgaagaaactttttccatctttttttttttttaattaaaaaaatttttggag

SEQ ID NO: 494032 - DNA, 502 bp, Homo sapiens
tggtcagtggtgagacagaaatttgaatcgacaccattcactgctttgagccactgagccatcctgcttcagacaggaccttactctgtttactctgcctaagacttgtagctcagcaaccagaaatgagaccatgctccctcatgttgtggccttttttctttccctgtctggaaccccagttcttctgagactgaagtctagatcttagtcactgcagttggtgatccagtacattttcttgctggtcactttttactaggactcccaataactgccaattgttagacctctgcttctcttagtattcctgttgcctatgtatccttgatgcatggatatagctttagagattgtattaggtctgagaaggaccccaaacatcgcctgttaacaactacttggctgatactttaccacattcctgctaagtggttatgtggccatycttgaagaaactttttccatctttttttttttttaattaaaaaaatttttggag

SEQ ID NO: 494033 - DNA, 537 bp, Homo sapiens
tcttacaactaccgaaggtttatccctcagtacctaacaaaaccacatcacagcttgctttattttcaggcaacaaattctccaaagacagaactggatgggggtgaacaaacttctgccaagtatgtgacagttttataaagtttctcattcagtagttgtgctaagaacggctctgtcatttagacatactcttgaagggaactgcattctttatcaaagaatttccttatagtttcaacaaacatctccacagcttctacttgattcaggaatgaatttggaatggtttaaaacacactagcaaggtacattaattaggacaaggttyagtaacataacagaaagattcaaaatacaatgacgagacagaaatcatttctttctcacataactgctcagaggtaagtggtgctaggctgacaggacagcattgtcattctcaagataaggctttcatctctgggttctaggcaactccagtgagaaagggaagaaagagtcattgagcacgccatatgcctttctaggagcaca

SEQ ID NO: 494034 - DNA, 535 bp, Homo sapiens
ttaactactttagtttttacaaaatgtatttgtactataccgatccacaaaagagtcctgaaacaaagaaatgatgacagactagtctaccctcaaagaggtaggtrctttaagcatcttctggttggtactaaaaccatttggcctcagaataggccaaaagatgtgaatcttaaaatacctgggaaaaatctaccatggatagtcaacatttatttgttccttagagccaatagaggctctacatacacatttcactggaatctgataccaatcctctaacgcctaaagtagggcaggtgttattctatttttccaggtgaggaacttgagagttcaagagatgacatgatacagataattataaaaccaggactagaattcaggaagtttgatttctcatctgatggcttttctattatccaaccaccaaattaagtgaagctctaattagaacaggtctaaacacaataatgatatttcatctattaaatcaaaaccagtgtatagagaatggccacatgcaccaaaccac

SEQ ID NO: 494035 - DNA, 564 bp, Homo sapiens
tgtcctcacctgtctcctacaggacaacgcataactgtagggagagtcacaaatggggaaccccaggctgggagaacctgaatctttactatgggacagcaaccatgcctgcctatggctccagagggagataatatttctaccttccaagcctgtttgttacatagccttaaaatctatggtggaaaaaatatagagtttggaactgggtgtagctgggtttgctgacactaaacctttggtctgcttctgcttcattatgaaaccatgggcaagtgacttactatctctgcacctcaattttttttagtctgcgaaatggaggtaagaatgcctatctcagaggatgaagataagtttggcatattacagacacttaaaaagaataacacctacattttctaatctgctatggcatgtgattgtgttcttgccatggctccgtcagaagaggagcataaacattattttgagtgcctttgtctctgcatagaaggtaccaggatagaggccagcagaggatgagtgrcatattttgatcaaagttgcacaaatagaagcttg

SEQ ID NO: 494036 - DNA, 484 bp, Homo sapiens
agtgtttgggtaagcaaaattctgcaaaatgacttcaccattggcagtcatttgcccttggccaaactgacttgcaattattctcagagtgtcagaagtttccaaattagcttagtccctgtctagtgctgagtaggctcctcagggtgggtcatgtycatgccctgggcctcgtgcaggatggatcccattgcccctgaagagtaggtgccccattgtccattttcccccacaactgattcagttcctgctggtaactatgacattgacatttctattttttcagcatcctgcacccacttccactagactcttctgtctctggttttatttttttaagtaaatgacctctaactgacagacgcttcccttcttggagaccaggcttttcactttcttcaatgcactctaaaactgttgtgttgtgctctcaggttagacaagccaagctgtagagaagcttccacacccacacacaggtact

SEQ ID NO: 494037 - DNA, 684 bp, Homo sapiens
tgtagtacatagataattacatgtgagccattcctataaaaaggtttagattggtcaaggatgaaagaaaaagagacttgcaggtggaaaacaaaaagggcaataaattaaatctttcaaaataataattgctgaaaaatagtcatcttaagaacctcatataactactagtttaaaatattgccatccagttattgaaaaaagcaatttttcacatcaagaatttttatttatcttaaaatatttcagaggcaattggtgttatgctttagacacttgactgacagtaaaagtttactataataattcaaatgcctcttcaaagtggatgaacagaaacaaaacgttcagmgaggtgagtgttaaattattattatttagtgggaaaatgacctgaactattttctttggttgctgttacataatccataatctgatatcagttccattttgttgtttgtatttgtgcttgaactttcaatacaatagaggtcactaatggaagcctaaaaaagaatttttatttgacttttggttcattagaagtttctttgttctagttattttccttagcagagtgaatttctctcactttctcactatttgtccaatttactacctaagcctggatgtttgtcttttcatactctggaaacatggacaaagacaaaacatagggagttt

SEQ ID NO: 494038 - DNA, 684 bp, Homo sapiens
tgtagtacatagataattacatgtgagccattcctataaaaaggtttagattggtcaaggatgaaagaaaaagagacttgcaggtggaaaacaaaaagggcaataaattaaatctttcaaaataataattgctgaaaaatagtcatcttaagaacctcatataactactagtttaaaatattgccatccagttattgaaaaaagcaatttttcacatcaagaatttttatttatcttaaaatatttcagaggcaattggtgttatgctttagacacttgactgacagtaaaagtttactataataattcaaatgcctcttcaaagtggatgaacagaaacaaaacgttcagagaggtgagtgttaaattattattatttagtgggaaaatgacctgaactattttctttggttgctgttacataatccataatctgatatcagttcyattttgttgtttgtatttgtgcttgaactttcaatacaatagaggtcactaatggaagcctaaaaaagaatttttatttgacttttggttcattagaagtttctttgttctagttattttccttagcagagtgaatttctctcactttctcactatttgtccaatttactacctaagcctggatgtttgtcttttcatactctggaaacatggacaaagacaaaacatagggagttt

SEQ ID NO: 494039 - DNA, 612 bp, Homo sapiens
tgtcttggtaggagggattcagttaccagcatgcacagcacagagcagaatccaacctcatagattttcaaaaacttatcgctaaagtctattattaacagcttggtaagaaaagtctttttcattgagaaatgtatagattattgtgaaggaaaagtatttgctaagaccagactggcygaagctaatccttttgggaatagccttaccaatttgggggaaatgactcatttacttataagctatacctgtcagcttccctttactacctttgacagctcttaaaccagcagtataagaactgctagtgaaaaaataaacattagtataaaactttatgtacctattacataacagtcatatattaggtgtccattttaagtacagatactgaaatagcaaaataatttattggagaaactcaaaatgctatagaaaaatttgacttggaaagcaccacaaatgtacatgatacaagtaaacttgaagaaaccaattacattgggggatagtcttgttttctgttattctgtggacttgctttattaatatatggaatttagagtttcttatatttaaaaaatatgaaaatgcacataatcattcccaggc

SEQ ID NO: 494040 - DNA, 479 bp, Homo sapiens
gttatgttcagtctgagtacacgagtcacagtctcaacggttaactggatacactgatgagagcctcaattgttgctggggactgtgtccccttagtggggtcaaagctgcacacgtatgctgaatcttggtctgmgagtcaccaacccacatttcaacaaaatccgtgtatgagagtcaattttccaacttttggctatgtccaggtgtgatattcagtacttcaatagctgtgttcatgtggaaagatgacaatctttatcgttggctgggtgtgcataggagtgtcacaatgtcgcttgtgcactgggccctgttacagaactctctgtactaactgagagctttatacaatatgcatgatagtcacaagttgttctgagacctttgttgtagtatggactcaattgtacctgtggacctaagcccatgtattagaatcaacatctctccaattggctgggtccagagagaagagt

SEQ ID NO: 494041 - DNA, 479 bp, Homo sapiens
gttatgttcagtctgagtacacgagtcacagtctcaacggttaactggatacactgatgagagcctcaattgttgctggggactgtgtccccttagtggggtcaaagctgcacacgtatgctgaatcttggtctgcgagtcaccaacccacatttcaacaaaatccgtgtatgagagtcaattttccaacttttggctatgtccaggtgtgatattcagtacttcaatagctgtgttcatgtggaaagatgacaatctttatcgttggctgggtgtgcataggagtgtcacaatgtygcttgtgcactgggccctgttacagaactctctgtactaactgagagctttatacaatatgcatgatagtcacaagttgttctgagacctttgttgtagtatggactcaattgtacctgtggacctaagcccatgtattagaatcaacatctctccaattggctgggtccagagagaagagt

SEQ ID NO: 494042 - DNA, 535 bp, Homo sapiens
tatgggtcaaaagtactaaaccttcatttagtgattctataggaaaatatttaattaagatacaaaaaaagaaaggaaagacaaaagaatgaagaaaagaaggaagaagggcagagtaggaagagaagacatgagaaaggaataaaatgtacagaaaggaagagaacacaaaggaattcctatatcattcttataaccagagaactgaacaaatctttcctattcaggctgtgagktgtaatatgcttcgatgcatacaggtctaaaagtccagaaatcaagagaaataaaactgttgctatgtgttcaatatataaatgatgaaacagattctcaaaggcataaaagaacttgtctcatccacttttgcctgaaggagtcagctctctcctgtcattaatattcattctgtgttgtctaagagtggttcagaaagtatctaagattctccagaaaaaaaacaagtcgttggaaacttgcatatcaagtacttttttacaaaacaatttaaaagcagggcagttttgtcaattta

SEQ ID NO: 494043 - DNA, 636 bp, Homo sapiens
ttatgtggtgggaagaacatgggctttggaatccttggaattaaatttgtttgggtttgaatttcaaattaaaattttactctaagtttgtattcataaagcatatcatttggatatatgatgttttaatgaaagtccaagtgaaaacttctagtatttccgtaatgttcagaatataggcatttgcaattccatagagccaaataactcaattgttattttcaaaattaagaatcttgggtatttattatttattagttctaacaaaaaggttatatgactataagagtgatcaaagtcacagctgacacttgaaaatgcctttacacagcaatatacctgattctgttctcagtgaaaaaagttcaggaaatttaatttaggatgccaggtggcacaataggttatacattaacttgtcccctctggaaaattaaatttgaatttggccctggtcacaaatgaaatgagtcatttggtacatgccactaaggatactcacaaagccaaaatgrcatttcattgaaaaatcacctgttaagaaaaatgtcttcagtcactggggagtttaaaaaaaaagaaaaagaaaaagaaaaagaaaagcaagtgatagagcaaaataaaaggaatactagg

SEQ ID NO: 494044 - DNA, 585 bp, Homo sapiens
cacatggcacatttaacttaaaagtggtagggaattcttaattccaccatctgcctggaatgagggagacctggaaatatttgtgagcaacactaatggaggccaaaatctctgattaagaaccatgagttatgatcagtttctcaaagtatttcaagtaatttaacctacttctgctgccacacattcttctcttctttttaaccttttgtcagaaattttcaaaatacaaaaatgtctttaataataacttaggktttgtgatttatttgatggcagtttttaaaaagatgtttttaatcctacttagaaacagtccactttcatgatttgttgcaattttctttccctggttaattaaactcatttcttaggaaatgactcatggcgaatcacactaagaataaaattagtcacattgccctctttgttataagatgagtgtaaataatctttaaggaaatttttcttaaatcaaaaaagcatgtaatagtccccaattcagtaacattatgtaaaatagcagactcagagagtagtaaatccagatgctgtcctattattgcatgaaacaaggcagaaatt

SEQ ID NO: 494045 - DNA, 614 bp, Homo sapiens
tgctggtgccagggagcagcacaaggccatggaaggcctttctgggatagcagattttctgtttgagaaagcacggtacatcgyttggaaaattaggtgatccttctcactgtagcctgataaggatgacctgctgactatatctagatcattgcccattgcccagcaacatgtcagttccctgtctctccgtcccatggagagttttccacccattttcaatggtccagagcactgttaagcctctggaatctgttgtggggccctggacatagaaggatgagtcaacttgctagggcaaaggagaactggaccagagaaactgaagctctattaggagctcagacaccagtgggacacatctcccaccctcctcttatctagcactctgtgcactcatattatacacatcccttgagatgtatttgatcccattgggactctggacatacctctatcacagcactttttactttgtgtgctttcttcccatagaatgtgggctacttcagagaactatttgtgtcttacttcatgttgtatctgtagaactcagtatagcaactagaataaagaaggtgctgaaagaaaataacaaaactgtagaatgaatg

SEQ ID NO: 494046 - DNA, 614 bp, Homo sapiens
tgctggtgccagggagcagcacaaggccatggaaggcctttctgggatagcagattttctgtttgagaaagcacggtacatcgcttggaaaattaggtgatccttctcactgtagcctgataaggatgacctgctgacyatatctagatcattgcccattgcccagcaacatgtcagttccctgtctctccgtcccatggagagttttccacccattttcaatggtccagagcactgttaagcctctggaatctgttgtggggccctggacatagaaggatgagtcaacttgctagggcaaaggagaactggaccagagaaactgaagctctattaggagctcagacaccagtgggacacatctcccaccctcctcttatctagcactctgtgcactcatattatacacatcccttgagatgtatttgatcccattgggactctggacatacctctatcacagcactttttactttgtgtgctttcttcccatagaatgtgggctacttcagagaactatttgtgtcttacttcatgttgtatctgtagaactcagtatagcaactagaataaagaaggtgctgaaagaaaataacaaaactgtagaatgaatg

SEQ ID NO: 494047 - DNA, 568 bp, Homo sapiens
aatatattcattcatattttttgcctgaacaattctgggaatgcaggccaatcctgatgcagcagcaatggtacattctctagatttttaaggaagagccggacatacgtctactaagtattcctaattttcagagacatattccaagttctaggagcatatacattaaaggaaaaccctttctctttaccagaagtgaggggacaataccccacttcctccttggtggtaaatggggtatagagatactcattgcactgcttgttcatttattcaacactgcataccaaagcagcacaaaacccagaggtttgagatcacaatttatgatctcatatggctctggagcattgattgggttgaggtggtcrtttcttatttgaggtgtcttatgggatcttagtcaaatagtcattgaaactagagtcacctgaagccttcttcaaacacttaaagtatctggagttgggggaggatgggcatttttctctctccacattgcctttccaactggcttgcttagccttctgcattacataatggtctcagggtagttggactttcttac

SEQ ID NO: 494048 - DNA, 592 bp, Homo sapiens
atgggtggtcattccccccggagctggccctgagctgtggctgcaggccccaggcagagccaactggggggkgccttcctgattcggaaaccccttctcttacagggagcgcggcctgagcacgttcctgttccggccgcactgtggggaagccggctccatcacccacctggtgtctgccttcctcactgctgacaacatttcccacgggctgctcctcaagaaggtaaccaggtcactctcgggagcccgtcctgagtgactgccctgccctgggctcctgggaggctcaaccagtgaggccagaaggctgggccctcttctgggctgggatgtctgtccttatcttggttttatttttaattatgaaagtaatataatcaaactcatcacaattttgattttccaaaaactggagaaatggaaaaaagccagcccttatgctattacattaatagaaatagccattattagctttttagtatatctaatttccatcttttatccacagcatatttttaatgtgtttattatcataatgaacacagaatttggttcctgcctcgtcccttactgttgtatgacaagcatt

SEQ ID NO: 494049 - DNA, 388 bp, Homo sapiens
cctgggttaaaatccttgctctgctgtttattgtctaggcaactttgaccagacgacttaaacaagagcaatgcccgtaaagtgcctagtgcagtatttggcacacaacagatgcttaaaagacagcaattactgattcagacgtcccgcagagcagtaatatcactaacatgtgctcatcatcatatctatcatttatcaaagctcaggattttgaaccttgtaattacttttcatacattctcttatgcttaacaactcggctaggtgaacacaatccattgcctcataaagaaacaagatgacctttgtgtatctatsatcagtggggaggctggaggtctgggaagtggtaccttggagcccaactgttgaccaaaccagggct

SEQ ID NO: 494050 - DNA, 231 bp, Homo sapiens
catgggctacaccttgacctaacgtctttacgtgggtacttgcgcttactttgcggccttcgtcagggtttgctgaagrtggcggtatataggctgagcaagaggtggtgaggttgatcggggtttatcgattacagaacaggctcctctagagggatatgaagcaccgccaggtcctttgagttttaagctgtggctcgtagtgttctggcgagcagttttgttaattta

SEQ ID NO: 494051 - DNA, 601 bp, Homo sapiens
ttttatgggtgtgtatatatgccaaaacatattaaactgtacattaaatacatgtagtttaytgtatgtattttataaattatcctaaacgctcaagtcttattttgtaaaataatgaacttgactagctgatctctaaagttccctgaggtccagtattcaagaatttattccttctaaacacatacacagaataaatgtagaaatgaggagaaaaaaaggaggaaaaagggaaatgtttgattttagacttaagtcaggcacaaattttcatacagcaaaagaaaagtgtcaaaactaaggtacacccccatatttaataaatgttaggtgtaaaaacaaaaatagttttaaccagtagaaggcatgccataaaattcaaagtactaaagaataaaatctctctcatacttaactacagtatttttgcacttttcaaagtttattcatgtacactatcccactgaccttggcccagcccatgaatgcagtaggtaacttaccatttatcaatacacttctgacaaaagctgtgagcacaaggcaggatgaggtcagcccgcccatccatacagatacaacactcctcctcatcggtcag

SEQ ID NO: 494052 - DNA, 601 bp, Homo sapiens
ttttatgggtgtgtatatatgccaaaacatattaaactgtacattaaatacatgtagtttattgtatgtattttataaattatcctaaacgctcaagtcttattttgtaaaataatgaacttgactagctgatctctaaagttccctgaggtccagtattcaagaatttattccttctaaacacatacacagaataaatgtagaaatgaggagaaaaaaaggaggaaaaagggaaatgtttgattttagacttmagtcaggcacaaattttcatacagcaaaagaaaagtgtcaaaactaaggtacacccccatatttaataaatgttaggtgtaaaaacaaaaatagttttaaccagtagaaggcatgccataaaattcaaagtactaaagaataaaatctctctcatacttaactacagtatttttgcacttttcaaagtttattcatgtacactatcccactgaccttggcccagcccatgaatgcagtaggtaacttaccatttatcaatacacttctgacaaaagctgtgagcacaaggcaggatgaggtcagcccgcccatccatacagatacaacactcctcctcatcggtcag

SEQ ID NO: 494053 - DNA, 601 bp, Homo sapiens
ttttatgggtgtgtatatatgccaaaacatattaaactgtacattaaatacatgtagtttattgtatgtattttataaattatcctaaacgctcaagtcttattttgtaaaataatgaacttgactagctgatctctaaagttccctgaggtccagtattcaagaatttattccttctaaacacatacacagaataaatgtagaaatgaggagaaaaaaaggaggaaaaagggaaatgtttgattttagacttaagtcaggcacarattttcatacagcaaaagaaaagtgtcaaaactaaggtacacccccatatttaataaatgttaggtgtaaaaacaaaaatagttttaaccagtagaaggcatgccataaaattcaaagtactaaagaataaaatctctctcatacttaactacagtatttttgcacttttcaaagtttattcatgtacactatcccactgaccttggcccagcccatgaatgcagtaggtaacttaccatttatcaatacacttctgacaaaagctgtgagcacaaggcaggatgaggtcagcccgcccatccatacagatacaacactcctcctcatcggtcag

SEQ ID NO: 494054 - DNA, 622 bp, Homo sapiens
taaatatgtggtatacctcattgtgaagttactgcccttcttgggaaagactttttttctaatattatatcctacttttcaggttataagttctttttragatttttgttaagttttggggaatttttgtttatttttggaaactgtccttgcttagaattaaaagaagtatccaacaccatggtgctttgagattttactagtctttgaaattcagcaatcactgttgttgactgccctagagacctcttctaagctaagatctttaattgtttcttcttggatacagttgctgtaaatccacttggctatatttacatataatttgacttcagggatttttttttttttttttggcctggatcttcctcaacaacttcctttcatttatctctataatgtgatatttattattaccaagtaggctcagattcaaaactgttgttttttgttttttttttaaattacaattgtccttttcctattttaggtaactaaaggaattaacttcaaatacagtacattaaattttaatacctaaaggaaattttacatattttggggttactaacttcataaagttatatatattttaaatttatagctttattttttgattaat

SEQ ID NO: 494055 - DNA, 469 bp, Homo sapiens
tgcaggagataagccacagcctccctctaacgcccagcctcctcctgaaagctgagtagcaacgagcgatatcatcacctttgctgcttccgttctgaacgtgcttcaggcctggctgcattttatcaaggggattggtctcaggtacagcccgacctgcctcttctcagaaagcccccctaaagcagccctcccaagggcaccccataactgccagggggagcttcaatcccagttgctaatacaatcccctccatcccctcctcctctgaaagggaaagaccatgaactgcttccacctttcccaggaaaggacagagactcagggagcaggaactgcctcagcacagaggcggacagaggacaggggcaggctaggatgaaaagctgacagccccatcccactccttcctttcttcccagaargaagcccacatcacaggtgactgcgaagcctgataagctttac

SEQ ID NO: 494056 - DNA, 600 bp, Homo sapiens
gatgaaaccataaagaaggaagcaacccagcttgagcaacatagtaagaccagcatctctacaaaaaaagaaaaagttagccaggtgtggtggcacacacctgtagtctcagttactcgggrggctgaggtgggagggtcgcttgagccctggaggttgaggatgcagtgagccgtgattgcaccactgcactccagcctgggcaacagagtgagaccctgccaaaaaaaaaaaaaaacttggatagaagttacatggttaattttcaaaagaaggacaggtgtgattgggaaaggtcacctggagaagctactagaatggctggcaaaactatattttggcctgggtggaagttgaaagtgtttaacttcaataattcaaagccagacaattattttgtgtggtttttctcgatatgtattttatttcacaataaaaaagaaaaatatataagccttgcatgatggttgatactgagtatcaacttgattggatacaaagtattgatcctggctgtgtctgtgagggtgctgccaaaggagattaacatttgagtcagtgggctgggaaaggcagacccacccttaacctgggtgggca

SEQ ID NO: 494057 - DNA, 558 bp, Homo sapiens
cccggccgggcgtttgagggctactgccacgcagcgtttctggagcctgccggctggtgccctggtggcctttatctctgtccccctttgtcctctttatctcaggctctccaggaggccggggggcccactccgcctatcgctcccctcggctacgctgccacttcaatgccccgcaggtcgcgagctgctgttctttcgaaggcgtcggagaaccaggggcgtcccgcgccacctctgactcggagcagcgccgagcactgacgctcccgcccttgggcaaggacgccagtgcgcccgcgcgcgtccctctgcgcggcagcccgtcgcgggccctcaaggggaagcccaggccaggatggccccgggtcgcgcggtggccgggctcctgttgctggcggccgccggcctcggaggagtggcggaggggccagggctmgccttcagcgaggatgtgctgagcgtgttcggcgcgaatctgagcctgtcggcggcgcagctccagcacttgctggagcagatgggagccgcctcccgcgtgggcgtcccggagcctgg

SEQ ID NO: 494058 - DNA, 576 bp, Homo sapiens
tgttctgcattgagaaccaagatatgtagactatttataaatcagatttcattaagttaggagttatagacagaaatgtattcttttcaactttggcagtttttgacaaatttttctatgtatttcacattctgaagatgtccgctattggagaatggccattgtcaatccattcattcattccttcacttatttgttcaaccaaaaccgatttattgaatgactactatgtgccaagcactattctaggtgctttgagttcagccccgagcaagaacatcaacagaagacaaaggcatgcccttgyggagccatggagcatacgtcccagtcggagaaaatagagataataaacataatgcgtttcttttagagtgttagaaaggaataacagctataaataaaaatagaaccagatcaggaggattgaattactgtgctctgatagattcctggtatatgaggacattaacttttttttctttttaaattcaaaccttcagcagaaatattctagctttaggttttgaaaagaggtgtgaagctacttttaccactttctcattctttgtcctt

SEQ ID NO: 494059 - DNA, 631 bp, Homo sapiens
gaactttaatagcaaggggtaaaaaaagatgttagaatatccttgtgagatatacctgaaagaaagttctcattgcctcttataattctttgcaattcaggccgatgaaagtaaaaccttcagtctatttaagtagacattgttaaatcaacattgttgtacccttagctcaaagcaaaatgtttgagtcagtccacagaatactagagtgttgctatatttttggttttaaccttaattgttcaagaaagaggcacgttaaatatgtaagcatccctgccttctgtaaataaatattggttgaggatatttggttcatgtaaattaacaaaagctgaaatgaagattagacacatgtaaaactgattgaatagtgagtgtcctttataatgtcctagctgtcacacagatgacacattttataagtgaaatggcttatatctttcttctcrtgtgtctatataggttatttctggcacttttgtttggttctgaattaccttatgttcttgacctccccccaaatttgaatgtttaattgacttaggaaggatataaacttagtgaaagttctagacagatactagtaaaagtaatgtaccgatagtaaagcattaattagtcaaagata

SEQ ID NO: 494060 - DNA, 639 bp, Homo sapiens
tcagtggccagaggaacctcacccaaacaagtgacagcagagaataatggttcagagtgtggaaccctggagtcaggcaactgggctcaaatctgaacctcaacactcattggccatacratcatgggtaaactacctaacctctctgtacctcagtttccccatctgtaaaatggaaataatggtaactccttacttcgtactattctgaggattaaatgagtaaacacatgcaaaccatttaaaacagggtagggcatatattaagcactcactaatatttgttattattagctattagttttattacttagggctgatcaaattttagagaaaatatctgataacttcagcaaaaattatgcccaaaatgaaaagtaactcattggcagaggacagtggaaaaagcacaagccaggggaatcagccacccaagtgctatgtaggccaccaacaagctgtgtgagcccaggcaagtcacttcatctctccagaacccagcttcctcaatgtgaatgaggaacttgactattatctatgatttctgctgctgagttctcaaatcaaagactcctaaaaggtcctcttattcacttcacactcattagaatgactgtgatcaaataaataaataaagta

SEQ ID NO: 494061 - DNA, 351 bp, Homo sapiens
ctgcgagccgcagggaggtgctagtgtaaatgggtggttggggcattgttgtgggagggtaagtgggtggaaaacacgaggcatggctctgagagcaggatactgacatcgcagtttgaagctggagcasgtgttggcagtgaccacacctaaggtatgagcagggagtgggtgctcgaggtggggtgaagtaagacatgcgaagtgagggtgggaaggtgactggtgggttattggaaggatgatttaggcagatgctgaagccactgggagtgacaagagtcatagtggtgcaggggaaggcagcatgaccgtcaagatcattaattgcagccttgtttggaggaacaa

SEQ ID NO: 494062 - DNA, 549 bp, Homo sapiens
tctatttaagcaccaaaatgtgggtgcttgttcatgataaaatttggcaattcctgaatttaggtgaaagttagttcagagagttagttgcagattgaattaaacttttaaatcaaaagkttttttttaatttaaataactttctgaccatacctcttccctgttaacttcttttcaaggtatcttaccttgttttcctttctgcaatttattcatgagataaagtttcctttctctttttgcttaagcatttgggctcccattgacttaaagaagtccctgatagagagattttagaatgagcaataccagtgtttttcatgtcatcatggtggctctccacattttatgtggcaatgtctggaggattcacactgtatgattgacttggggccttggactgacccggctctgcaaatctcagttccaaggctgagttctgtatgtagagatgagttgctatgtgtccactttattagggctggtccagggctcctcaagggtagctacactgaggacagccctcctttgagtggatgagggtgagtt

SEQ ID NO: 494063 - DNA, 602 bp, Homo sapiens
ctggtctgtaaaacctaaaatatttactaattgatcttttrcagaaaaagtttgccaacttctgttttactctgtctcagcttattctgttttcagataaatgcaaatcaaacgccattttctaaaataattcttcctagcaaaaatgagagtatctactgaatctcaaaattctccatccatttgataattcttcatattaaaattacatttaatcccacatggcatcagcaattaaatcaattttgtcataagcatggttagttacttggttcatcaatgtctcttcctttgattggatgcattgactcattcattcatttttgcagaaaataattctgggtggtatgctttagctcttgtgtgtcaagaaatgttttgccttcactctattcaccttgttgtaacacttctcattatttgaaatcactctgttcaggcatttgtgtatctaccatttctctcacaacaaagtaaaatacataaagtataaaaatcttttccaatttgaccataattgcatcctcacaaaaaaagaacataatggtgaatatctgagtgatcatattgtgcagtgaatatactcaatcattcttcaccag

SEQ ID NO: 494064 - DNA, 555 bp, Homo sapiens
agaaagcaaaaccatgaataaggtgggggactaccattttggaaatagacaaaaaaggaaaacaaacaaggacttatcttggccttcctggataaagtgacttccagaaagcaaagtaattgatcaggagtaaatttcttttataaaagtatcaaagttataggccgggcgtggtggctcacgcctgtaatcccagcactttgggaggccagggcgggtggatgacgaggtcaggagatygagatcatcctggctaacacggtgaaaccccgtcgctactaaaaatacaaaaaaattagccgggcgtggtggccggcacctgtagtcccagctactcaggaggctgaggcaggagaatggcgtgaacccgagaggcggagcttgcagtgaacagagatcacgccactacactgcagcctgggggacagagcaagactccgtctcaaaaaaaaaaaaagtatcagagttaatacatgaaaaaataatgatacaattagagtatcatcattctgcaacactaataatataattgatttaggcaatgataccaacagc

SEQ ID NO: 494065 - DNA, 555 bp, Homo sapiens
agaaagcaaaaccatgaataaggtgggggactaccattttggaaatagacaaaaaaggaaaacaaacaaggacttatcttggccttcctggataaagtgacttccagaaagcaaagtaattgatcaggagtaaatttcttttataaaagtatcaaagttataggccgggcgtggtggctcacgcctgtaatcccagcactttgggaggccagggcgggtggatgacgaggtcaggagatcgagatcatcctggctaacacggtgaaaccccgtcgctactaaaaatacaaaaaaattagccgggcgtggtggccggcacctgtagtcccagctactcaggaggctgaggcaggagaatggcgtgaacccragaggcggagcttgcagtgaacagagatcacgccactacactgcagcctgggggacagagcaagactccgtctcaaaaaaaaaaaaagtatcagagttaatacatgaaaaaataatgatacaattagagtatcatcattctgcaacactaataatataattgatttaggcaatgataccaacagc

SEQ ID NO: 494066 - DNA, 555 bp, Homo sapiens
agaaagcaaaaccatgaataaggtgggggactaccattttggaaatagacaaaaaaggaaaacaaacaaggacttatcttggccttcctggataaagtgacttccagaaagcaaagtaattgatcaggagtaaatttcttttataaaagtatcaaagttataggccgggcgtggtggctcacgcctgtaatcccagcactttgggaggccagggcgggtggatgacgaggtcaggagatcgagatcatcctggctaacacggtgaaaccccgtcgctactaaaaatacaaaaaaattagccgggcgtggtggccggcacctgtagtcccagctactcaggaggctgaggcaggagaatggcgtgaacccgagaggcggagcttgcagtgaacagagatcacrccactacactgcagcctgggggacagagcaagactccgtctcaaaaaaaaaaaaagtatcagagttaatacatgaaaaaataatgatacaattagagtatcatcattctgcaacactaataatataattgatttaggcaatgataccaacagc

SEQ ID NO: 494067 - DNA, 555 bp, Homo sapiens
agaaagcaaaaccatgaataaggtgggggactaccattttggaaatagacaaaaaaggaaaacaaacaaggacttatcttggccttcctggataaagtgacttccagaaagcaaagtaattgatcaggagtaaatttcttttataaaagtatcaaagttataggccgggcgtggtggctcacgcctgtaatcccagcactttgggaggccagggcgggtggatgacgaggtcaggagatcgagatcatcctggctaacacggtgaaaccccgtcgctactaaaaatacaaaaaaattagccgggcgtggtggccggcacctgtagtcccagctactcaggaggctgaggcaggagaatggcgtgaacccgagaggcggagcttgcagtgaacagagatcacgccactacactgcagcctgggggacagagcragactccgtctcaaaaaaaaaaaaagtatcagagttaatacatgaaaaaataatgatacaattagagtatcatcattctgcaacactaataatataattgatttaggcaatgataccaacagc

SEQ ID NO: 494068 - DNA, 627 bp, Homo sapiens
tttgaaaacaaggcattaaaattagattgtcaatggktacattaatattcattttcttttttttatttgactactctgaatcctataaaactgtaatttagaaacagttctcatgattaaagtaggtgtcttgtagattatgtttataaaatattcaataaacatcatcttcattttcacgaagaaatgtgctctttgatgagggtgactcaagaaatcaattcatttaaaaaagtgattgcattttcccacagctacttctgtaaatcaggaaactgaatgatgctaatgtaattaacatgttcacaattgcatctgcctcctttaattgagtcttcatggcagaatagatattagcaattataatagacataaataaaataatctaatattcaggttacatgtcttgatttttcaatttgatgtttactgtcatctgcatatgaaggatatatacacacacacacatatatggagtgagagagagtgtgcattcttggcctaacttcatttttcaactcatcatttaagtggcaatgattttaaattgacagaccttaaaacagaatctctccacgcataaattacctctttggagaaaggtaggacatttcatgagaatggatt

SEQ ID NO: 494069 - DNA, 671 bp, Homo sapiens
taagtaaatttatatatttaaaacactatggtttaatttgtaaccataatattgataattttgattaaatgaatgtaaagttagaaatagaacatggttatatggcttttcagttaagaataaagtgtcaatttttaagtacactagttttggaagggatttccaaattatatatccagttactcaaacatttttatgttacatgaatttaaaagtttatgatatttttagtaacatttttgaaaaaactcaataaacttttgaacagtyaatagatctttgataaccacaggaaaaaaaatagacaaaattttaatacactgtttggtttgtatttaaataacaaactctatttgtatatgttagaatggttgcctaataatattctatagaataagaagataattcctatatatactaaattaaaacatggaactctgtaattcttctaggccatggccaattttctgaattctgatctcaattcttattctttgttctcttgaaatcagatgtccttcactatgattactggagagagacatatactacgaatacttaataatcccaataaaatattgcatgtatattattcatgaagaagttagagatcatgactattaatttctctaagctaaagtataagacgttacaaactacatcaagatggt

SEQ ID NO: 494070 - DNA, 671 bp, Homo sapiens
taagtaaatttatatatttaaaacactatggtttaatttgtaaccataatattgataattttgattaaatgaatgtaaagttagaaatagaacatggttatatggcttttcagttaagaataaagtgtcaatttttaagtacactagttttggaagggatttccaaattatatatccagttactcaaacatttttatgttacatgaatttaaaagtttatgatatttttagtaacatttttgaaaaaactcaataaacttttgaacagttaatagatctttgataaccacaggaaaaaaaatagacaaaattttaatacactgtttggtttgtatttaaataacaamctctatttgtatatgttagaatggttgcctaataatattctatagaataagaagataattcctatatatactaaattaaaacatggaactctgtaattcttctaggccatggccaattttctgaattctgatctcaattcttattctttgttctcttgaaatcagatgtccttcactatgattactggagagagacatatactacgaatacttaataatcccaataaaatattgcatgtatattattcatgaagaagttagagatcatgactattaatttctctaagctaaagtataagacgttacaaactacatcaagatggt

SEQ ID NO: 494071 - DNA, 637 bp, Homo sapiens
ttctacagtagtaatgttatttacagaaggaattagagaatttgcaaatcttgtgacctccagaataatggctggtaatcattttattatgcctgtatcttgggcagatatcaggcccttctcaccctcctaatctggtgatctttcattagttttacaaaggtggtttagttttggaaagagctattatttagactaacttccttccaaagtttgcttggctattgcccaggaatggccaaaggcaatttggaggctaaaggcaagatggagttggctaggtcagatttctttcactgttataattttctcactcttattttcgcaaaggtgatttcagtggtaatgaagataaagaggaaggaagaggtctgaaagataygtaagaataattgacagtaatggatgactggtttgaaagaacagcaagcaactgataattactccaaatgtctttggcccaggcagaagagtggatggtggtgccattaagtgagataaggagcacaggaagggggagcagattttgacatgataaattgtcatctctgaaaatatgcatattggattaggtaaatattttatttgtgatgtcaaaaactttcaaaagagttcagaagataatttaaattgcagt

SEQ ID NO: 494072 - DNA, 608 bp, Homo sapiens
ggcagctgtgtaattatgtttttctctagggaggaggtaatgaagacgttgtcaatagcaagttcagtggtcatttacagctcttaagcctctgccattgcccaatcacattcagtacagagagcatcctgggcaggatggtgaaaatggcatgactttctcttgaaaaaaaaaaaaaaaattcctggcatgctagagttctttgagtatgcaagataacagtttgaatctctttccagggttaggtctcatattcacaagtacccagtatttggtattttctggactttaatataccttgctaaactcacactgaggcatttagtaaatgtttattgaacattgtggttactgaaggtccaaaacatgtttgacactggagactcacaggttaattaggcaggattcttgtgttmggccatttagcagaaggaaaacaacctatgatctagaaaatgcaggacggcatattgttgcaataataattattcagtgaaggccacaagatggagaggttaattttaggaggagttcaagacaaaagactgaagaagtgaagaagggctagatcacgtggtgaagggaggtgccttatattgattattagc

SEQ ID NO: 494073 - DNA, 539 bp, Homo sapiens
caggtgaggaggcccagatgtgaactgggaaggtggagacaaatattcaccttcataacaataacaaaccctcgtgtaacctgactatgggccaggcactgtgctgagagatttacatgctgactcaccaaatacccacaatggccctgttgctatccccatcttacaaaggaactcgtgctctgagaggttaaatcccagaggttaaatcccaagatcttgggattcaaacccagtctggctccagagacttgggctcctaagcacttctccatgccagctcctgaagagtccaacaagcagccggagcccttccccacgcgtacactgcacaaacagggcaggcttcatgggtgtgactgcggtcgacccggccccattctgggtttaatgctttgccatggccattttgacaaagggggccgcatcttgcatttgcacygggccctgcggatcacacagtcagtgctgggagccaaaggcgtggcagacaaggtcattctcaggagggaaagccggctgctcacccgtctgcctgc

SEQ ID NO: 494074 - DNA, 616 bp, Homo sapiens
gcacctatctggtccctgagggcatttcagtttctaactcctgcataactagggcactggtagttagatcccaagtagatccagccctggtttctcaagggcttgggagcaaaaggcaagagtctaactcccctggaataaggcagaggcaaggagacagcacatgcacccccttcctgagctgtgaggccacaatgagtcactcccacaacatccatgtgtcccagggtcactgcaccctctgcaccctgggctgggcctgacctgtcacttgactccaaggaaaagcaagtgcagcagaggagggagagagaagcgcgaatgccacagtcttgagagaarccctccccaggcttctggagtgggcagcagttcccacctggtgggtcttcaaggaaggctgcttcttcatttaaagagaggctgggatacaggcagatgtcacagggagccttgggacccccggctcagagctacatttatactattgacctaggttctttcattcctccctccctccctgcctccctcctttctttcttccttccttcttcatcccacacgtgctgcggggtagagctacctgcacttacaacttgagaataatgtccctgag

SEQ ID NO: 494075 - DNA, 471 bp, Homo sapiens
atctggtccctgagggcatttcagtttctaactcctgcataactagggcactggtagttagatcccaagtagatccagccctggtttctcaagggcttgggagcaaaaggcaagagtctaactcccctggaataaggcagaggcaaggagacagcacatgcacccccttcctgagctgtgaggccacaatgagtcactcccacaacatccatgtgtcccagggtcactgcaccctctgcaccctgggctgggcctgacctgtcacttgactccaaggaaaagcaagtgcagcagaggagggagagagaagcgcgaatgccacagtcttgagagaaaccctccccaggcttctggagtgggcagcagttcccacctggtgggtcttcaaggaaggctgcttcttcatttaaagagakgctgggatacaggcagatgtcacagggagccttgggacccccggctcagagctac

SEQ ID NO: 494076 - DNA, 658 bp, Homo sapiens
tggcatgatggataaaaggtggctgctggagccatcctgtgtttgaatgttggtgtgactgctttctggcactttcrtgtcaagtgcttggatgagagcctggctgcagtacgtgctcaacggctgctgactgttatgatcattacctcttctacaatcaagtcgattgtaaagcatgcacattttaaaagcataggatgtaaagtaaatataaaccaaaatcctagtgctttctccccacaccccagtgtgttccaggtatgccaagtgcatgcatgaaagcagtaatcacaaggcaggatgcccgattgtcagaggtggcctgtgatcccaaatcgcaatgcgcacattggaattacctggaatgtttagaaaccatcccaatacctaggttccaccccagagatcacaatgtcattgatctgggttacaatctgggcatggagacattttaaaaaccagtcttctaatgagcagctagggccgagaaacactgccttccatgaacagaaccccataagtaggtcacggaactcaggagccccaagagggaggtaacctctgtgggctgggaaaccaggggatacaggcagaaaatcatggatgttttcaggaagatttgagctggtataactgctgccaaagagatacactccag

SEQ ID NO: 494077 - DNA, 622 bp, Homo sapiens
agatggtgcctgggaggcatctcccccgaaacgaacttccagctccgtgtttctgcggcattcaacaggttactgaggccgtcgattgcaatgacagattgtgaaataaatgataccacccaaagcactttcattatcctgccacagatttttggcaattcctcaagtctggttcgttttatgtctaattacatatcaccattcatgtcccccgtatgttatgtttcacataataaatacatggaaaatctttctctttttccatcagccgctgcccagaaatgaacggattcctggtgtgtgcgtacgcaataaagaagcagttgtttcagacacggtgacacttcataacctggactttatgggcccctgtcgctctgattcggagggctaaaaggaggattttctgcaggctgttcctgctctggaagcaaaaggcgattgtcgggagcaatgtcctgggatggctagaacggcagccygagccccactctggggagacaaaggggctgtcaggctattggagggtaatttgcttgacttctggagatgaggcctgactgcaaaagttttcctgtacctcccggtgttaatagaaaggccagggtcattgatcaatcat

SEQ ID NO: 494078 - DNA, 631 bp, Homo sapiens
atgggcaagaaaaccatagaataattattgttgcaagctttctcatcagagacagaggtcccagcctcagcactgtcattttctaatactaaggcattacgccattttgtttattcaacatatatttattaagaacctataatgtattggagttttcgtaatgggcactgggcatacttggtggaaccaagcaaacaaacaagcaagaagcatatataactcctgccctcactaagcttatagactaagataggggaggcagaaatcaaagaatcatcaaataagtgaacagtctcatttgtgaaaaacattaccaaggacagyatattagaggaggaattgacctagtcagactctcttctgcacattgagtgatatttatacacgtatcttaggattactgtgaagattaagagaaaaatatatattaacagctcacataaaataagaactgtacaaattttccctgttttctctattcttctaaatgcaggtgaatgcagtgcattaatttccagataatttttcttgcttattgcaggattctgaagtgttatgaatggtctttattaggaggaaatgctaatgggcatgttttcccttttttttttttttttttgagacagagttt

SEQ ID NO: 494079 - DNA, 631 bp, Homo sapiens
atgggcaagaaaaccatagaataattattgttgcaagctttctcatcagagacagaggtcccagcctcagcactgtcattttctaatactaaggcattacgccattttgtttattcaacatatatttattaagaacctataatgtattggagttttcgtaatgggcactgggcatacttggtggaaccaagcaaacaaacaagcaagaagcatatataactcctgccctcactaagcttatagactaagataggggaggcagaaatcaaagaatcatcaaataagtgaacagtctcatttgtgaaaaacattaccaaggacagtatattagaggaggaattgacctagtcagactctcttctgcacattgagtgatatttatacacgtatcttaggattactgtgaagattaagagaaaaatatatattaacagctcacataaaataagaactgtacaaattttccctgttttctctattcttctaaatgcaggtgaatgcagtgcattaatttccagataatttttcttgcttattgcaggattctgaagtgttatgaatggtctttattaggaggaaatgctaatggrcatgttttcccttttttttttttttttttgagacagagttt

SEQ ID NO: 494080 - DNA, 547 bp, Homo sapiens
aagaaatgtttggaaaaggagagtgtgactctactgtgttaactacttttttttttttttttttttttgagacggagtctcgctctgtcacccaggctggagtgcagtggtgcgatctccgctcactgcatgctccgcctcctgggttcacgccattctcctgcctcagcctcctgagtagctgggactacaggcgcctgccaccacacctggctaattttttgtatttttagtagagacggggtttcaccgtgttagccaggatggtctcgatttcctgacctgatgatccacccgccttggcctctcaaagtgctggaattacaggcgtgagccactgcgcctggcctgtattaactacttttaagaagctaagattgaccaaaatctgaccagtggattcagccctatgaaggtcagyagtgacgttgagaagaatagattcagccgaggactggggtcaaaaccctcacaattttgatcagatgtccattctatgaagatctgtttctatcagtctccccagcttgtattgtaaattttatgg

SEQ ID NO: 494081 - DNA, 618 bp, Homo sapiens
gaatgcatggtctccaacacaggcaggataagaagagaggagcaggaactgacaggtgagcaacgccagcaaactgcaagtatttttcatgagaattctagttctattccgtttctatrtatatatttgggcatttgggtgtaccactgtagccagtgttagtcttaagcaaaatggcataatatagctctccttcttaccttctgtcttctcctcttgttacctctggataattagtacccctcaacactttatttaaaactcattcttactcctgcacccagtaaactcctaaacattcagtatctcacccccatttgtgaaataaaaacagctaatctggcataattcttatatgtgaagaactaatcctacaaaactgatgtatttctcctctgggaattatttgcattttaaagaacatctccttaaaaaagaaaaaagaaaaatactcccctatgagaattaagtcttactagtagttcaggcatcatataaagcaggcaggaagatgacccagaataaaggcattccctaatgccccaaaaatcataagaagaggttattcaagcacccctactctgcctcttcataatccctagcccaccactcgtaccc

SEQ ID NO: 494082 - DNA, 567 bp, Homo sapiens
aggggttagagatggattagcccaacatatggtaagatgcaatgccaagccactgtgctgaggcatcgttttcagcatcctgactgcttttagtgtctcaaaagtcctgggtcaagtggtgcataattggtgtcctgaacccaaactgtatggtactaaaaatagtgcaatcctggtttgttgtatatttaaaatcaacaccacaccctctggttttcaaagkcactcttcacaggtaacccggcaaaattggaaactcttattttttttttagttattttcctttttgtttacaaatttaagggatggtttgtttttctcacaagcttttttggtgcacgtcatgaatttctctttttcctctgcagttttaccattatgattatgctccagtgtatgacatattgctctagtgacccacacaggttaaggtgcagaaaatcttcagaaattaccattgattatcaaggttttttaaaaacaatggcctctgatgtttatgaagtcaaattttcccctaccaattaaaggactctgcagtgccacatgtaaacagctatctgacag

SEQ ID NO: 494083 - DNA, 577 bp, Homo sapiens
aaacaacttctaacttagcctgaatcttttccagcattaaacatccttcaggagtatcacaaattagcttctggctttgacatttgaaatwtagggaatatgttgaactaaaagtttttgctttgctctagcttttactattttttaaaacttttattttagcttcagggatacatatgcaggtttgttatataggtaaattgtgtgtcatggggctttggtgtacagattatttcaccactcaggtaataatcatagtaacctccaccttcaagtaggccctaatgcctgtgtttcccttgtttgttgtccatgtgcactcaataattagctcgcatttatagtgataacatgcggtatttatttttctgttcctgttagttcacttaggattatgacctccagctccatccatgttgctgcaaaagacatgatcttgttcttttttatggctgcgtaatattccatggtgtatgtgtaccatgtttcctttattcattttaccattgatggacattcatgttgtttccatgtctttgctattgtgaatagtgctgcaatgaacatatgcatgcat

SEQ ID NO: 494084 - DNA, 577 bp, Homo sapiens
aaacaacttctaacttagcctgaatcttttccagcattaaacatccttcaggagtatcacaaattagcttctggctttgacatttgaaatttagggaatatgttgaactaaaagtttttgctttgctctagcttttactattttttaaaacttttattttagcttcagggatacatatgcaggtttgttatataggtaaattgtgtgtcatggggctttggtgtacagattatttcaccactcaggtaataatcatagtaacctccaccttcaagtaggccctaatgcctgtgtttcccttgtttgttgtccatgtgcactcaataattagctcgcatttatagtgataacatgcggtatttatttttctgttcctgttagttcacttaggattatgacctccagctccatccatgttgctgcaaaagacatgatcttgttcttttttatggctgygtaatattccatggtgtatgtgtaccatgtttcctttattcattttaccattgatggacattcatgttgtttccatgtctttgctattgtgaatagtgctgcaatgaacatatgcatgcat

SEQ ID NO: 494085 - DNA, 643 bp, Homo sapiens
gcgctctgagtgcggggccgccaagctcacgcccaccyggaactctacctggcccgcaaacgcggcagacagccccagttccaccgttgcctctccctccacacctccctgcaagccgagagagccatctccggcctcagccagcccagagaagggctcccacggtgcagcagtgggccgaagggctcctccagcgtggccagaatgggtactgaggccgaggaggcaccgagagcgagccagggctgagagggctgccagcacgctgtcacctctcaatatgaggtagataggttttataaatatgacatttggttcttgctttgagatgttgaaagagatactgtaaatgggacgactgattgccagcatcaatttaaaggagaggggctacctgagagataatcagagattactgactttttcttcattattcattatttcattttgttcacaaattaatggctcttactatgtggcggggtagcccaattaaaaaaaaatctgtttgcattgattctacctttctgtttcttataatttcctagatgcactttgtattcattttctttacagacttctcttttaaaaaaaaactctacatcaaaacaacatagcatacataggtagaaaatttagttgg

SEQ ID NO: 494086 - DNA, 643 bp, Homo sapiens
gcgctctgagtgcggggccgccaagctcacgcccacctggaactctacctggcccgcaaacgcggcagacagccccagttccaccgttgcctctccctccacacctccctgcaagccgagagagccatctccggcctcagccagcccagagaagggctcccacggtgcagcagtgggcygaagggctcctccagcgtggccagaatgggtactgaggccgaggaggcaccgagagcgagccagggctgagagggctgccagcacgctgtcacctctcaatatgaggtagataggttttataaatatgacatttggttcttgctttgagatgttgaaagagatactgtaaatgggacgactgattgccagcatcaatttaaaggagaggggctacctgagagataatcagagattactgactttttcttcattattcattatttcattttgttcacaaattaatggctcttactatgtggcggggtagcccaattaaaaaaaaatctgtttgcattgattctacctttctgtttcttataatttcctagatgcactttgtattcattttctttacagacttctcttttaaaaaaaaactctacatcaaaacaacatagcatacataggtagaaaatttagttgg

SEQ ID NO: 494087 - DNA, 677 bp, Homo sapiens
ttaagctccactaattactaccagattgctatgttgtttttaacaatgtctgggacataaattcctctagaaattaacccaatcacattatgtctcctattacagggtagattctggggtcagtgtccaatgtttgttctgattccrggaagtttttttcccagttgtcttattccccagatatttcctgcaaactaattgacttacagtctaagttgtatcatccacaaatttcctcccaactgtcctttgccacaacctccactgatccacacctccacttagtacccatagacttaaacttttctaagctctgttgcaaatggagtcagttcaattgggaaaagactgggagctgttttatggcctgcttcttctctgtggcaaaatttctggagctggatgtgggaagaatggcaagcttatgttgagtgctaccacctctcctggagcgaagcccttagtggggaagggggagtgcattagcctgaggtcctcccctgtggccattcctgacagacacctcatgagccagacaaaggctattagacccccagtgttctcagtgggtcatgtccaaggtagagccactgttccaagagtgggaattaggcagaaggaagctctcatctcttaattatgcttgtcaagcacacagcctcagcaagagaccactg

SEQ ID NO: 494088 - DNA, 677 bp, Homo sapiens
ttaagctccactaattactaccagattgctatgttgtttttaacaatgtctgggacataaattcctctagaaattaacccaatcacattatgtctcctattacagggtagattctggggtcagtgtccaatgtttgttctgattccaggaartttttttcccagttgtcttattccccagatatttcctgcaaactaattgacttacagtctaagttgtatcatccacaaatttcctcccaactgtcctttgccacaacctccactgatccacacctccacttagtacccatagacttaaacttttctaagctctgttgcaaatggagtcagttcaattgggaaaagactgggagctgttttatggcctgcttcttctctgtggcaaaatttctggagctggatgtgggaagaatggcaagcttatgttgagtgctaccacctctcctggagcgaagcccttagtggggaagggggagtgcattagcctgaggtcctcccctgtggccattcctgacagacacctcatgagccagacaaaggctattagacccccagtgttctcagtgggtcatgtccaaggtagagccactgttccaagagtgggaattaggcagaaggaagctctcatctcttaattatgcttgtcaagcacacagcctcagcaagagaccactg

SEQ ID NO: 494089 - DNA, 583 bp, Homo sapiens
tggtgggtggaggggtgttgtttttgaaattagacttgtgtttgagggtttggcactttgacactgggggttgattgtggaggttcagatgagaaagccccttcacttccccgcctcctgcctgtgttatgggggcccatgcccagactgggctgcatgtgagaacctcccacagagttctgagatccccatgcccaggcccctgccaaactgatgacagcagattctctggggtggggctgggcatcggggtactttcaagatctctaggtgatttccatggctgagagcccctgttttggatatttctggggtgagtgagtgagtgtctcctggggtcagaactctcctggctgctgcctaccctgacctagacaaccaaacccacggattctcagacggaggaatagctcaggcttcggagtccacagaccaccatcacccaggcacctgaatacactcacaacccttctaggggcactgctttgctgacgcactgtttcgtgagcttgcaaatcaagagaactgtcctgggcctccagcttcccttcccccagarctggcgggcagggcaggctttcca

SEQ ID NO: 494090 - DNA, 581 bp, Homo sapiens
aggaacctggctttgactcttaactgctcactctttaaatggataacccgggtaagttatttcctgtctctgtgcctcagttttcttacaaattggcatgaaaataacagtgcctccttcagagggtaattctgaggattaaatgaaatattgcccatacagtgcttaccacaggctggtagatgattggtattcggtaaacagtagttatttttgttatactaatatgttattaatataattaccattttgtatttttaaatgtaagccayaaggaaaggaattattccaatagtttaatttacaaacttgagttttctagaaagacttttaaaaacagtagtgatataaatcaatttatcttaagaaacataagtatctgggccaggcaagtttcagaaatgtttatcattttcaaagtaccaaatattctcgtcaaaacaagctgcttcatcagagttctaattatatatttaaacatacatgcacacacacacgtttgtattacaatattcaaaacttctgaggaagaattatcttttttttttcatgtgccaaagctaaaactttcacttgctaca

SEQ ID NO: 494091 - DNA, 568 bp, Homo sapiens
gactcttaactgctcactctttaaatggataacccgggtaagttatttcctgtctctgtgcctcagttttcttacaaattggcatgaaaataacagtgcctccttcagagggtaattctgaggattaaatgaaatattgcccatacagtgcttaccacaggctggtagatgattggtattcggtaaacagtagttatttttgttatactaatatgttattaatataattaccattttgtatttttaaatgtaagccataaggaaaggaattattccaatagtttaatttacaaacttgagttttctagaaagacttttaaaaacagtagtgatataaatcaatttatcttaagaaacataagtatctgggccaggcaagtttcagaaatgtttatcattttcaaagtaccaaatattctmgtcaaaacaagctgcttcatcagagttctaattatatatttaaacatacatgcacacacacacgtttgtattacaatattcaaaacttctgaggaagaattatcttttttttttcatgtgccaaagctaaaactttcacttgctacag

SEQ ID NO: 494092 - DNA, 616 bp, Homo sapiens
ctgctttttattttgaaaattaaccaccaaattatggrtggttctgctttgatttttataacaattttcataacaattttaaggattacattgaattttctccttttgaaagtctttgaatcaatctgtttttctgatattaaactgaaaatgaagcaaaaatgaagatggaagtggaatgtgaagaaaaagaaagagaaaaagtaaaaatggataggaaggaagagaatgaaaatggaagagaaagaaggagagagaaacagggagttaacacattaactgacaaagaaatatttgctcaacacttactatgtgctgtataccatgctaggagctaaggaagtgttcatcagtaaacaaagtcgtggctctcttgaagtttatactttaaagaggtaagggaaaaaaacaaataaatataaaatgttcctagccgtgataagcgttatgaagaaatagaaagtgggtaaggaaatggagaatattggtggacagggattgctattttagctagagtgggcaggaaagtcctctctgacaaggagacatttgggcagaaacctggatgaaatgagggagcaaaccatgtggatacctaaaagaagggcattcctca

SEQ ID NO: 494093 - DNA, 616 bp, Homo sapiens
ctgctttttattttgaaaattaaccaccaaattatgggtggttctgctttgatttttataacaattttcataacaattttaaggattacattgaatyttctccttttgaaagtctttgaatcaatctgtttttctgatattaaactgaaaatgaagcaaaaatgaagatggaagtggaatgtgaagaaaaagaaagagaaaaagtaaaaatggataggaaggaagagaatgaaaatggaagagaaagaaggagagagaaacagggagttaacacattaactgacaaagaaatatttgctcaacacttactatgtgctgtataccatgctaggagctaaggaagtgttcatcagtaaacaaagtcgtggctctcttgaagtttatactttaaagaggtaagggaaaaaaacaaataaatataaaatgttcctagccgtgataagcgttatgaagaaatagaaagtgggtaaggaaatggagaatattggtggacagggattgctattttagctagagtgggcaggaaagtcctctctgacaaggagacatttgggcagaaacctggatgaaatgagggagcaaaccatgtggatacctaaaagaagggcattcctca

SEQ ID NO: 494094 - DNA, 616 bp, Homo sapiens
ctgctttttattttgaaaattaaccaccaaattatgggtggttctgctttgatttttataacaattttcataacaattttaaggattacattgaattttctccttttgaaagtctttgaatcaatctgtttttctgatattaawctgaaaatgaagcaaaaatgaagatggaagtggaatgtgaagaaaaagaaagagaaaaagtaaaaatggataggaaggaagagaatgaaaatggaagagaaagaaggagagagaaacagggagttaacacattaactgacaaagaaatatttgctcaacacttactatgtgctgtataccatgctaggagctaaggaagtgttcatcagtaaacaaagtcgtggctctcttgaagtttatactttaaagaggtaagggaaaaaaacaaataaatataaaatgttcctagccgtgataagcgttatgaagaaatagaaagtgggtaaggaaatggagaatattggtggacagggattgctattttagctagagtgggcaggaaagtcctctctgacaaggagacatttgggcagaaacctggatgaaatgagggagcaaaccatgtggatacctaaaagaagggcattcctca

SEQ ID NO: 494095 - DNA, 671 bp, Homo sapiens
attgcttctggttacacagcatgattgagattcaaatccagctttggctggtcacagagcttgtgccttagctgttacaaaacccaggggcctccccgccctgttccaatggtcaggatctcaagcagccacttctctccttttattttattttattttagagacagagtcttgctctgtcgcccaggttgagtgtagtggtgtcatcttggctccctacaacctctccctccccagttcaagtgattctcctgcctcagcctcccgagtagctgggattacaggcatgtgccaccacacatggctaatttttgtgtttttagtagagacagggtttcaccatgttggccggsctggtctcgaacccctgggctcaagcaatccttccaccttggcctcccaaagtgctgggattacaggcaagagccactgagcccagcctctctctccttctttcaggtctctttcccccatatatctgaaaaattaaaatcttttaggtctagcctcaaactaggactaaacttgaatctcaggaactcagttaaaggtcacagctcccaagcaggggaactgtgtgtgtgtgtgtgtgtgtgtgtgtgtgtgtgtgtgtgtgtgtgtgtgtgtgtagtgggggtggcgggggggcggcggggtctgccaatgattgc

SEQ ID NO: 494096 - DNA, 671 bp, Homo sapiens
attgcttctggttacacagcatgattgagattcaaatccagctttggctggtcacagagcttgtgccttagctgttacaaaacccaggggcctccccgccctgttccaatggtcaggatctcaagcagccacttctctccttttattttattttattttagagacagagtcttgctctgtcgcccaggttgagtgtagtggtgtcatcttggctccctacaacctctccctccccagttcaagtgattctcctgcctcagcctcccgagtagctgggattacaggcatgtgccaccacacatggctaatttttgtgtttttagtagagacagggtttcaccatgttggccggcctggtctcgaacccctgggctcaagcaatccttccaccttggcctcccaaagtgctgggattacaggcaagagccactgagcccagcctctctctccttctttcaggtctctttcccccatatatctgaaaaattaaaatcttttaggtctagcctcaaactaggactaaacttkaatctcaggaactcagttaaaggtcacagctcccaagcaggggaactgtgtgtgtgtgtgtgtgtgtgtgtgtgtgtgtgtgtgtgtgtgtgtgtgtgtgtagtgggggtggcgggggggcggcggggtctgccaatgattgc

SEQ ID NO: 494097 - DNA, 531 bp, Homo sapiens
attccccccccaccgcccagtggctgggcactgacaataagaatgtttttccatcactaccaatctagaccagttacagactggagcatttcaccttctatgccccggtgaccacagtgacctggagaaaatgattgctcaaaaatcctcagtgaccttgcctgggatgtgccacattccccactggaacacatgcattatggggaaatcctagcaatgaacctgcagaaggaaaacaaactgtcaactactatccaaaggtcaaaagaaagctcagcggttgtcaggtgctgatcctgtttctttgggagtctagcacagaaagataaatctcatctttcatgagcatgaatgctctatgctttcattcatatatggaagctaaaaaaaatgacctcataaaagcagaggacaataatggttaccagaggcagggaayggtgggtagagtaggggcaggagggaaaaccaaggtgggtaaacagctagataggaggaacaaggtctagtgttctgcagcactatagggtg

SEQ ID NO: 494098 - DNA, 585 bp, Homo sapiens
atatatattagttatcagtattaaaataattatgaatcacaacaaagcctactcaatgctgtaatttcagttcttcatacttgtgattttatagacccatttgaaaaataatagcttttgaaactaatatcaagaataaaattatgctagacacatgaatgactgtctttgaaaatgactagacaactggagagtgcagcaatcaactactgctcaattaatacttcataatttcactgttccagtagtattctgactacttactatgttttcctttatgtttgtaatttaatacattggtctgttcaaattcctgccatggacaggaattttatactttattttcttataatatttacttgatataaagaatttcagtgactttttgttttgtttgtaggcaaaagctcttcctaggagatctagccaactaccaattatgaaataaagaaatgtagtgataaattcatgataataaattcattttctacaggattactgaytgaaatatcaagatttttaaaatcagatatccataaatgttttacttgagaataaattacatattttactattgcattaact

SEQ ID NO: 494099 - DNA, 462 bp, Homo sapiens
tgcagagtctcccctgcaacagcatgmtcaccctgtagtggaattcacgtttatgatgagtatgaaggcagctaaaatcactttgaaacctgtggaaaagaatggggattaaattatgttccgctgcatcactttatccaaaagtcaaaactgatactgaatgaattaaaattaaaaagtgaaagaaattgaagaaagatgctccacttcctgattaaagccaagctcaaatacctggattccactagagagattatagtattaggattgcccctgcaggaatctataacagtcactaagggatgtccacaagcctaaagaaaaagttatagaaaatgcagtattaaattagacacaatggatgaagttctgcactcaatttttatattccaaatggtcatttaattttgatgaaaaatattttacagtagtgaagaagagccaagcagaacaacacttcag

SEQ ID NO: 494100 - DNA, 601 bp, Homo sapiens
aattcctcacgtaagggagccttatccaagaactgtacaatgaggggggctttggaactccatcaattccctggtgktgttgatgcccaaccggcctccagtggtccttctcaatgcatggatttttggactcagcagtaacaaaccacaactccctttttatccatattttcagttctgaccaaaggtaataccatcatacttttcttacctagttcagaatggcccttataagctcaaacacataatcaagagaaaatacaaaaccttgtatgacattctatctatccctgaatgaattttgtttcttttctagttcagtcacaatcgttcttttgtatcttgaaacttaaagactaaattatatgagcaatttttagtgatgctgtttatattagataataaaggaaccatagggagaaagattaaaacattatttgttaatagatacaaaatatatatatgcatatatataagcaagaagaaaatatggataattactacaatccttgtttatgcaaatgatctcatattcatagtcggcatctgtaacttttcttttcactacccagtcctcattcccttcatcctcagccagtgg

SEQ ID NO: 494101 - DNA, 633 bp, Homo sapiens
tccactcatgaggcaccaatgtgaaatgacctatctgggggacacttcagggctccagtcctgttgaccatctcctcaggtgcagaytttggactgataatcaaaattggagtccatgtgcagtactatgaattgagtttcagaacctacatgtacatcctcataatgatttgaagtacgtttgcaaaattagagcctataatcttgggctgtaaaatcatcatccaccttacaccatcctactgtgatgactccaggtttctgtttcagttcttatatctgtactggtgggagagatgctactgttccatgcttagaaatgtagtcttttactataagaattgagtcatccaactgagcagataaacaaagcatatcaaccagtaaaggtacttctggtaagctgtccaactgaatgtgtgagaccttttcggcaaagctatgcagtttctcattctcttctacactaccaaccatggcaatctcacctactcagactaagtcctctgcagtgttgactccatgttctatgagcctctggcagtcatctaatggtttaatggtctcctgctcaatgatgtccacctcttactaaagggtcaccaatcgctcatccaggagctcctcaagggt

SEQ ID NO: 494102 - DNA, 504 bp, Homo sapiens
gtgaatgtcctcgagcaatggaaaatgcctttggaaagggcactacagtggacatcagatgttgtaattgyttccttctctctctttccttatgggaacacataccatacagtttagatgaagccaattcataacctgaagggtgaggtaggcatgtgacacaaatcaaagcaactagacaacctcataagtttggccacttgtttgtttcagaggtttatgtaacttaagctgagaaaataaaaatctgactggagatgttatgcctgagctatcaggaaagatattttcctgagaaggagattagactgagaagatttgcatcagtgaagttgatagtcatatatttcaacaagtagtgagattatccttgaaaaatcaagctaagcaaagactagagaaggcaagaaagaagtagggagggagacaaaagctagagactaatttaagtccatgggtctattcatagctgaagctagcagaaaccaccaaattcccagttcc

SEQ ID NO: 494103 - DNA, 548 bp, Homo sapiens
cgaacagcaaaatgacccagaagagaatagttagagaaggtctcaacacacatgcacttgctaggaatcwtatcaatgatggaagcatcaccaaatttcaagaattcagggtcattttccagcttcttaccagaacagtgctcaatcttttccttcagtgcagcaaactttccagcaatgtgagcagtgtgacaattcagtacaggggtgtagctaacactgatttagcctggaagtttccgaataatcatctgagcagtgaagccagatgcttccattggtgggtcatatttgctgtcaccagcaacattgccacaacgaacatgcttgacaggcacattattaaaactgaagcccacgttgttcttaggaagagcttcactcaaagcttcatggtaccttccaacagactttacttcagttgtaacattgactcaaagaaaggtgaccaccatgccagtttcagaacaccagactccacttggcccacagggatagtaccaatatcattttgtagacatcctggaaaggcagatgcaatggcttgt

SEQ ID NO: 494104 - DNA, 536 bp, Homo sapiens
tatatgtaatctatatcctaatgtatctttaacatttgccatctataaaattatttttctatctataaagttaaattcctattcttgagaagtacaaggagtgtggtcctagtaaatatttaataaccagttaaaaaaagaaagaaccaaaagaaaaaaaccggattcgttccatttaataataactgttggtgggtaaatatttctactctggctgcattcaacttaccaacatgtcataaatgaatgtggagttaaaaagagatgttgcacagttctgctctcatgaagcagaaacttcaccatatcagtgaataagataagtttaatatagaactgaatatatttttagcatcaaaaagaaaaaaatccaaggttaacatgccatagagaggtaataaacactaaaaagctagaatttttgacttttttaatttakttttaaataaaataatttgaattgaaactaataatttagaaaatcttgccctgactcattcatttttactcctgaagaaatgaaatgccaaggttta

SEQ ID NO: 494105 - DNA, 588 bp, Homo sapiens
cgggaaggtctgcttcgcagctcacatatgtggccattgtcagatctcagaagctctgcttccaagcttactcacatggggctctccactggtctgtttcacgacgtggcacgtggcttcccctagagcaagcaatgcatgagagagtgaaagagagcacccaacagggaagcacaagttttctgtaacttcattttgaaaatgacatcccatcacttctgccatgttctcttcctagaagcaagctgataagtccagcccacagtcacgcggaggggattacccaaaggaaggaataccaggagactagaaggcaggacattgaggaccaccttragaacctgcccactacacctctatactcagaggactgtgttacaggacagtttaatctctaggcaaacacagaaccaataagactataaagcaaatagttttacaagatcccagtgtggtctgtataggcatttatttttcaaaatttgattgattttttttctctttagctgacaacattgattttatttgagggagaaaaaaacccaccaacttaattattgatttcatttgaaaagaatttttaacatt

SEQ ID NO: 494106 - DNA, 588 bp, Homo sapiens
cgggaaggtctgcttcgcagctcacatatgtggccattgtcagatctcagaagctctgcttccaagcttactcacatggggctctccactggtctgtttcacgacgtggcacgtggcttcccctagagcaagcaatgcatgagagagtgaaagagagcacccaacagggaagcacaagttttctgtaacttcattttgaaaatgacatcccatcacttctgccatgttctcttcctagaagcaagctgataagtccagcccacagtcacgcggaggggattacccaaaggaaggaataccaggagactagaaggcaggacattgaggaccaccttaagarcctgcccactacacctctatactcagaggactgtgttacaggacagtttaatctctaggcaaacacagaaccaataagactataaagcaaatagttttacaagatcccagtgtggtctgtataggcatttatttttcaaaatttgattgattttttttctctttagctgacaacattgattttatttgagggagaaaaaaacccaccaacttaattattgatttcatttgaaaagaatttttaacatt

SEQ ID NO: 494107 - DNA, 532 bp, Homo sapiens
ttagcattaggtatatctccaaatgctatcactcccccctcccccgaccccacaacaggccccggtgtgtgatgttccccttcctgtgtccatgtgttctcattgtttaattyccacctatgagtgagaacatgtggtgtttggttttttgtccttgcgatagtttgctgagaatgacggtttccagcttcatccatgtccctacaaaggacatgaactaacctgttgtggagtgaagatcattgtctccccatctctacaacggagccaaagtagagataaggagagggaggcttaaatagactcagttaattgcacaaagcctcaccagtggtaaagggcaaaggcagagcttaaccctcaaggctttctaacctcaaggttagagtattagctactaagtattaactacagtattaactactaagttatatggtacttagggcataacttagccatgacatgtgactccaaagataaataagtgttcatggttgaagcagcctctttgaaaaacacctacttattcctt

SEQ ID NO: 494108 - DNA, 487 bp, Homo sapiens
tatgtatctatctgtctataactaaacaaataagagtgttaactgtgagaattttgtttttgtaacaataattagtttgctaaatggcttagttggggcgaatgacttaaggaaaaagaagtcccatcccatggaaactagatgcagttcatttatttgagggagatattttagtatgggttgggagtcccagccctgacatttattagtcatgtaacctcagacaaaacttgtcagccctgtctgttttcctaactataaaatgcaaagatgkttcctcctagagagcttctacatcacattgactagcgccaatacaaggcttagtacagtgtttagccgatagtgactactcagtcatcaaggcacatagtgactacacaccaacaagacttgctgctcttgttttgtgtccctaggccacaccccgatgtagaagtcagcattctcgaaaaccttagttcaccaggtaagcccagctttacat

SEQ ID NO: 494109 - DNA, 477 bp, Homo sapiens
cctcctctcaagtgtgtcaagggaaatacaagtgaagtgctatggaagagcagaagggaagaccttacatcctgctttgagttgggagtaggggtgtcgaagagaagatattggccttttgtcaatatttggcagcatggttggatggtggtgttctgggtctcattcctggaggcccagcttacagcttgctcttgcaaccctttcgataaatttataagcactcagattctctgaataaggtctcttttaaattaaataatgagagtattttatggctcctgtgactgacccttacctgatacacttccagtcacagtcagaatcaatctaaagtccttaccaagscctaccagcccggaaccatccagccttagccactttcttactgtctctttcactgactctgcttaagctacatgtcacttttgcatttttgttcttccctgaacacactaagcttgccttacttagggc

SEQ ID NO: 494110 - DNA, 526 bp, Homo sapiens
ttaagggcaaaattcagcccataacaccatcattgtggggttgtctgtggtttgcctctatctacatagctatttaccatattatatcaacagaaggatcttagatgctgttggtctaggtgctgtttggtctatccaaatggatatccacacrcagtgcagtttgctgccatccacacagctatttgccacattagatcagcagtaggatcctagattgaggtgccatttggactaggactgggctacaagggctggcagccaggctggtagacacaggtgtgtacaaagggcacaaacacaagactttaggagaagaggcctggagggaggggggaggaaggtaaacttgccaaccagtaataaaccatatttgatgagcagctctgcagcagacagtggacaacagcgccacacaggagacccccttccaggaccagcacacactcactctacctgcatcatgcaacttgcgcatatgcccgtgacacagtccatcaatgttgtccatgcctggtaatttggc

SEQ ID NO: 494111 - DNA, 526 bp, Homo sapiens
ttaagggcaaaattcagcccataacaccatcattgtggggttgtctgtggtttgcctctatctacatagctatttaccatattatatcaacagaaggatcttagatgctgttggtctaggtgctgtttggtctatccaaatggatatccacacacagtgcagtttgctgccatccacacagctatttgccacattagatcagcagtaggatcctagaytgaggtgccatttggactaggactgggctacaagggctggcagccaggctggtagacacaggtgtgtacaaagggcacaaacacaagactttaggagaagaggcctggagggaggggggaggaaggtaaacttgccaaccagtaataaaccatatttgatgagcagctctgcagcagacagtggacaacagcgccacacaggagacccccttccaggaccagcacacactcactctacctgcatcatgcaacttgcgcatatgcccgtgacacagtccatcaatgttgtccatgcctggtaatttggc

SEQ ID NO: 494112 - DNA, 511 bp, Homo sapiens
atcattgtggggttgtctgtggtttgcctctatctacatagctatttaccatattatatcaacagaaggatcttagatgctgttggtctaggtgctgtttggtctatccaaatggatatccacacacagtgcagtttgctgccatccacacagctatttgccacattagatcagcagtaggatcctagattgaggtgccrtttggactaggactgggctacaagggctggcagccaggctggtagacacaggtgtgtacaaagggcacaaacacaagactttaggagaagaggcctggagggaggggggaggaaggtaaacttgccaaccagtaataaaccatatttgatgagcagctctgcagcagacagtggacaacagcgccacacaggagacccccttccaggaccagcacacactcactctacctgcatcatgcaacttgcgcatatgcccgtgacacagtccatcaatgttgtccatgcctggtaatttggcacaaatgataagc

SEQ ID NO: 494113 - DNA, 582 bp, Homo sapiens
acctcctgctgcgcagcccggttcctaataggccatggaccagtaccaactaccagtatcatccactctgataatcwgtgtgcaaatatggcagcaccctgaagtggtaagagagggctttgcagcctcagtctctctcctctcctcaccccctgggccctggttaccagtctcgagggaaagctggggcgatttagtcagcacaacaggatgacagacagagctgcagcaacggttcatgtaagaaactgtaaggaagcgagggaagcagcacagggcaggaaagcaaagacatgaattcaacaattcaatggcagtccagcctcaaccagacactgcaggtagcactggtggcctgtcccaccttgaggcaagagcatcgtgaattcacccctgcagcagccagtcactggcttatggacatcctcaggggaaggtgtatctggcatggtatatctgggcaaaaaaaagcccacagaccaagagaaatttgctagagaatgtgtcccttgagctgtgagcagataaccgtcgtggcagatggaggtggctgtgtgggcaggggatgagaggaggcttcaa

SEQ ID NO: 494114 - DNA, 531 bp, Homo sapiens
actgagtgcaatgggaacatgagagccagaacatttttgcccaatgtagatacctctactgagtgtctttgctctgagcyaccccgctggcctgagtgagacttttccagagcggcactgtggtctctttccctctgatctcttttccttcctcctctcctttcatggttgtcaaacctgaaagccctccatacctactcacagacatttccaccaataaatctcttgcatgcttaaattccttctagtgtctgcttctgacaagacctcaacagtcacacctacatatggaaaagtgcaaatttccttggtgtacaaaccaataaattttctcaattttaaaagaatgttctttatattttattgatacatattaggtgtacatatttttggggcacatgtgataatttgatacattcatataatcaaatcaagggggttgggatattcatcaccttacatatttatctttatgctaggaacactctaattatcctctagctattttgaaatgtacaatgagttagtgtt

SEQ ID NO: 494115 - DNA, 628 bp, Homo sapiens
actgagtgcaatgggaacatgagagccagaacatttttgcccaatgtagatacctctactgagtgtctttgctctgagccaccccgctggcctgagtgagacttttccagagcggcactgtggtctctttccctctgatctcttttccttcctcctctcctttcatggttgtcaaacctgaaagccctccatacctactcacagacatttccaccaataaatctcttgcatgcttaaattccttctagtgtctgcttctgacaagacctcaacagtcacacctacatatggaaaagtgcaaatttccttggtgtacaaacsaataaattttctcaattttaaaagaatgttctttatattttattgatacatattaggtgtacatatttttggggcacatgtgataatttgatacattcatataatcaaatcaagggggttgggatattcatcaccttacatatttatctttatgctaggaacactctaattatcctctagctattttgaaatgtacaatgagttagtgttaactattgtctcctactgatctatcgaacaccagtcttattttttctaccttcagacaaagtgtatattcatacccattaatttaaactctcttcat

SEQ ID NO: 494116 - DNA, 513 bp, Homo sapiens
tagaagtctggactttacactggttaaaacaaggagaagcctgagaaacgattcacaggccagaactgcatttttttttttttttttgagacagagtctcgctctgtcgcccaggctggagtgcagtgctgcgatcttggctcactgcaagctccgcctcccaggttcatgccattctcctgcctcagcctcctgagtagctgggcctacaggcgcccgccaccacaccctgctaatttttttttttgtttgtatctttagtagagacggggtttcaccatgtgttagccaggctggtctcgatctcctgaccttgtgaaccrcctgcctcggcctcccaaagtgctgggattacaggtgtgagccaccacgtccatttttgaaacctcactttccagcactggagatagtggcgggtaaacagaaggcgctcacttgtacatgaagcgcaaggctcctggtgcctgctgaaacaaggtcagcttccctgatctacgttcctgccttctccac

SEQ ID NO: 494117 - DNA, 605 bp, Homo sapiens
tctgggggctttcaaacaaaggctcagtgaccccccctcaggaatgcccttggaggggctcgtatcaggtggcctcagatatacatctttcttaggaggtcattcagccctgaatatgtcagctaatggcaaatggcccagactgcataggcattgtgaagtatcctgaaratatggaaaacaaggttcctgtgccttgggaagtcaatgaggggaacacatataccccctttttatttgacaagagttttctgtcctgactgacagccactttccagggcaggaacggtgcctccccactgctcaggcctgggacactatagtcctttattcagttcattattttgttgtttgaaggagtttcctagaaacatacttcctctttcccagctctctggtcaatatgagaacatgatgacttcttagaaacaagaagacattatgccttttctctggcctgcccacagttttgattttttgaaagaaggcttaaaatatttttgaagatatatatagagcccagtctttctggaagaagccactggtagtagcaagcttcccacaagaaatgctccctgaccttagttgttttgttgataggtctc

SEQ ID NO: 494118 - DNA, 605 bp, Homo sapiens
tctgggggctttcaaacaaaggctcagtgaccccccctcaggaatgcccttggaggggctcgtatcaggtggcctcagatatacatctttcttaggaggtcattcagccctgaatatgtcagctaatggcaaatggcccagactgcataggcattgtgaagtatcctgaagatatggaaaacaaggttcctgtgccttgggaagtcaatgaggggaacacatatacccyctttttatttgacaagagttttctgtcctgactgacagccactttccagggcaggaacggtgcctccccactgctcaggcctgggacactatagtcctttattcagttcattattttgttgtttgaaggagtttcctagaaacatacttcctctttcccagctctctggtcaatatgagaacatgatgacttcttagaaacaagaagacattatgccttttctctggcctgcccacagttttgattttttgaaagaaggcttaaaatatttttgaagatatatatagagcccagtctttctggaagaagccactggtagtagcaagcttcccacaagaaatgctccctgaccttagttgttttgttgataggtctc

SEQ ID NO: 494119 - DNA, 493 bp, Homo sapiens
tacacctctatgtgctatatttcttacctttttatgtgtatttttacattgctcccgactctccatgtgttttgacttgttcttcatcctgaccttggagcacattaatccattacaccattgttttcattctgctgttcaacccattattgagttctttatttcagttattacatttttttcatacttggyatttctactgattcttcttttagatttatagttgcagtactttggtttgctttgctttttatgggttgtttagtgtgtattctcttatagaggtagtagcagtcctcagctagcatggtatttttctttgtgggcatataatcctcactgagggttcctaaccttgtctgtacatcgaaatcacatgggagttttaaaaaaatactgatacctggatcccatcctcatacatttgatttaattgttctgagtgtgacttggacatccaggttttttttaaaaaaaatctctccaggtgatt

SEQ ID NO: 494120 - DNA, 566 bp, Homo sapiens
agctaagtatcatgaacagaatattggtagacatataaacagcaaaagtcagacagaaatgaggaatattttattggaaactggaggaaaggtgatcttttttataaagtggcaaakaatttggctgaatagtgtttatgttctagtgctttgtggaagatagaacttgcaagctttgatatttagctgaaataattcccaagcaaagtgttaaaagtacagcttggtgccccctggcttcttacagtaaaatctaagagggaaaatgacataacaatagaattgttaggcaaaaaggatctaaacttaaagatttggaaaatttgcagccatccatattgcaaaaattgagaaaaaatgtttggaacactaagggtgtggcctagtgaccatttgataagatttgtgtgggcataaactgtagatttaatcagccaccccagaaggaataccaccagtttgaactgaaggggaaggagataggaaggaatgaagggaggctgtcagacttcttacgtcttataggacaggaccaatcttatagatacgttttatagtataggacc

SEQ ID NO: 494121 - DNA, 516 bp, Homo sapiens
ctaatttgaaggtcccagctggccgctcaggggagtttgagcttaaagggcgaggcatcaggaactcattctaagtctttgaaaaagaataacacaatggaggtggtgactcaagaagagaggtccattctccctcagccaccccatgtctccacatgtgtgtcccccagtgctttcctgcagttcctgagccagtcctggccaaagcaggccacagggagcttcagcattttgagcaactgtccctttagccatattggtggatctcagcaatattttccttcacattctcagtattccaacactgactcttcaaatctttccctaacctgccaaaaggygtgaatatctgctgataacccctaggctcctgtgtggccctccatcctccaggtgcccaggagctatgcttcctaaagcctctacattgccttgtcaccatccacccctgaagaggtaagatgtttactctacaggcttttttggtgtctaaggccttgcgcttctcttaggtga

SEQ ID NO: 494122 - DNA, 492 bp, Homo sapiens
ccaaagaaacattagaagtttatgatgcagaaataagtagcttgtgtgtgacacattcccaacttgttaagacagctattacaatggaatgctctccaatggatgggaccagattagactccgttgctaccagccaaatgcagcccgggaaaattggcaattgcatgcaaatgggaagtgattagtattatctctgccattagactcttcccaatgggaaggtgacagagcagttttgagatagactattagaaaaagcagacatgactctggcttgtcttttaaagacattgttttgtctctgcatttttttccctgaaaagtgtttaattgtgtgttcattaatttaattaacatcattgattgagcacctcytagtactaggcaaagtgctcatctctgaaattccaagatagataagaagatccttgctttccagactagtaggggagaagggtgataaacagttaaaattacaatgatgtagtcaga

SEQ ID NO: 494123 - DNA, 572 bp, Homo sapiens
gtattctggcatgagaagcgataccctcagcacgcactcagagtaaagatcactcattttgcagggcatcccttccttaccgctgtgatcgtgttctcccctccagcagagaggaaaatacacagaccttttaataggtttatctgggctcaagtcatacttttagcataaacagtaagttcctttgaatatacaacgtaagtcctatgaggttctttacattgctggtgaaaggaagacaacagtgtgaattatgtatcaataaagctattaaaaaaaagatgacagtagctgccttaaaaggtcactgtaaagagtggtcatgatatgtccagagaatctgaatttaggaattactcaagtcagcagctactgatactcgcaataacatatgttaaaatgagcattttagagttttcaattctcttttactagcatttgcttctttaatytcctcggcagaattaatgaatctaaaaagcaaataataaaaccagggaggtttataagaatgtacccacagagcatgtaaaaccatgaaattatctttccttttcccctcatgcctcagc

SEQ ID NO: 494124 - DNA, 568 bp, Homo sapiens
agaagccaaagaatagaaaatgctggaacttagcatgaggtaataaagaacttaaagttagaagaaacttactctagctcatcgtctgcatgtgaacggagaaaagactatgcttagttgttactggcaacgacttctttcttacagctcacgggaaactcttaaaattctttttaaaatataattcctcacccgtgtggtacactatggaatacagaaagttggagttgccttttttctagttaaatrgcggacttttttttttttttttttacctattcacatagatcttgtagttatgtactcatcttcattcaacccttcattaaatcatttcataggtaattatagagcacacaccatgtgccaggggcacttctaggtctgagaatacaaagatgaatagatgagtaagatgtgatctgtactttcaagaagctcacattctaattctatctagtgtgattaatgagcctttaacaggggaatgtacacaatgcagcagaggtgagcgtaagggatacaactctacccaggaaggtcaaaaagggcttcacacagagtgagg

SEQ ID NO: 494125 - DNA, 591 bp, Homo sapiens
ctgtggggagggcctgttggccttcacctaggccatgccctggtgttgccacaaagcgccttggaggccgtatctcaccaaccggcaggaggtccctgcatcaggcctgggcctcagacacattctctcctgtgatcctctagccagcctctcccccgtccccccttctgatgagccaaaggttctgcgccatgcatgctcaagctgggactgccgctgtcctggacagagaccagctctaaatcaggcaatttagagccaggcgtggtggcctgygcctatggtcccagcactttgggaggcccaggcaggaggattgctagagcccagtagttcaaccagcctgggcaacatggggagaccctgtcctacaaaaatgaaaataaaaatattagccaggcgtggtggccagcacctgtagttccagttactcgggaagctgagatgggaggattgctggagcctgggagttggaggctgcagttagccgagattgcaccgctgcacaccagcttgggcaaccaagcaagatcctatctcaaaaaatagacaaattttaaaaatcaggcagtttaggtgagactcaactgc

SEQ ID NO: 494126 - DNA, 570 bp, Homo sapiens
ggtcatgtgagggatgggcttggtgtcactgtgccctgcccagcccacctggccagacctccctctgggccagaacagagaatcatgagaacagtgtgaggaagctgcccttgggctagttggggtctgaccccagtgctccccaggccccactgggcacacgtggacttrctcctctgaaccttaaaggcagtgcttgttatcagcatcaacatctgttccccttccagcaaatatatgtcccacaggcacggggtgagcccgagagagatctgtggggaaagtaggcatgagaggacctggcccttccaggctggggctggtggctcgagctagcccattggggcttcagtgaccttccccatgagagtcaccggacccctccaggaggctgggtcagacaaggtcttgcagctccttatgggggggcactcatttcagtggagagaggggcttccccagggcttgagcctcccctcagccctcccaagtcaggccctggcccagtctgcccttaaggctgggcctgagccccaccctctgccctggaatgacacctcttcggcagag

SEQ ID NO: 494127 - DNA, 570 bp, Homo sapiens
ggtcatgtgagggatgggcttggtgtcactgtgccctgcccagcccacctggccagacctccctctgggccagaacagagaatcatgagaacagtgtgaggaagctgcccttgggctagttggggtctgaccccagtgctccccaggccccactgggcacacgtggacttgctcctctgaaccttaaaggcagtgcttgttatcagcatcaacatctgttccccttccagcaaatatatgtcccacaggcacggggtgagcccgagagagatctgtggggaaagtaggcatgrgaggacctggcccttccaggctggggctggtggctcgagctagcccattggggcttcagtgaccttccccatgagagtcaccggacccctccaggaggctgggtcagacaaggtcttgcagctccttatgggggggcactcatttcagtggagagaggggcttccccagggcttgagcctcccctcagccctcccaagtcaggccctggcccagtctgcccttaaggctgggcctgagccccaccctctgccctggaatgacacctcttcggcagag

SEQ ID NO: 494128 - DNA, 611 bp, Homo sapiens
aagaaacagcctcagagcagatggaagactccctgccccaaatggtagtcagcccacagtcagcacttctggaaggaaggaaagaaaggcttccttctgcagaaagctgctttttggcttgtttctgaagctggggagggtctgtggttcctatgtcaccttctgtgcttaggatgtgcrtctgaccatggtacccactcccccaggctgggcaagacattccctctagctggagaactgggccctgacccagcctggcctgtttgttgtgctctggcttagcatacctggtattttctgggatttttcatcttgatttcctgaatgttcaggaggactgaccacacctggccctggatgttcatgggaatgcccttatacactcaatcaattagctgtgggcagaaaacgatctggtgtcacaggccatgggatgaccccagccaggaccagagcccgaggatcctggaaatctttggttttggccccatgattcctcggtaaaggtgaggtcaagctgggacagggtctcccttcgcaggattgaaagagtgtgtgggcactcagagtcctgaactctgatctggaccttttctttccttcgggtcagc

SEQ ID NO: 494129 - DNA, 716 bp, Homo sapiens
ggtggctcatgcctataattccagcactttgggaggccaaagcggacagatcgcttgaaccaggagttcaagaccaacctgggcgacatggcaaaaccccatttctactaaaaataaaaaaattagccaggcatggtggcacacgcctgcagtcccagctactcaggaggctgaggcaggagaatcagttgaaccaaggagacggaggttgcagtgagctgagattgtctcactgcactccagcctgggtgacagagcgagastgtctcacaaaaaaaattgggaaccttcattttagatgatgtggctttaaaggtagtggtcacagtcccctggggacagtaaagtgtcagtagctgtttgttgaaaaactttttaaaatggttgtattaatttttaacgtgtaataggcatagcgtaaaagttaccatttacactgggtatggtggttcccatctgtaatcccagcactttgggagactgaggcagatggatgagactagcctgggcatcatagtgagaccctgtctctataaaagaaaaaagttagccgggcgtgtgctggtggtcctagctactcaggaggctgaggtaggattgcttgaatccaggaaattgaggctatagtgagccacgattatgctactgcactccgggctgggcaacaaagcataattgtacagttcagtggcattcagtaaatacacattgttgag

SEQ ID NO: 494130 - DNA, 577 bp, Homo sapiens
tgtgcattggagaggagtgtctgggctcatctgtgtgttgtgcagkctagctagagtgtgtctccaacctcagctaaaggcatggccaagatctacgggataagggagtgaagggctcctgagagctagtgggacaggatggaagagcaccagcccaagccctgggggacttctctgccttgtgaccagaaaggggagaggagatctcccacaaagccatccagacaccacctttgatgggctccttgcactctgctggggagggggtgggctgtatatcttgctctgtgcccaaggaagaccgccttgaacctgttgagctcagccaatggggtgcccaggcagaacactgagagaaggaagggaagatcgtgagctcagcgcattcgtttccctgagaggcggccgcgggctgagggcattgctcggctgaaagtcccagccccatcaagcagacccctcctcactgcagcgctgtcttgggtctggtgaccccctcctctcctccgtggtagtaacagtccccgctgacactcgctggagctccacactctcctctctggtgtcctgcacctgc

SEQ ID NO: 494131 - DNA, 536 bp, Homo sapiens
attgctcggctgaaagtcccagccccatcaagcagacccctcctcactgcagcgctgtcttgggtctggtgaccccctcctctcctccgtggtagtaacagtccccgctgacactcgctggagctccacactctcctctctggtgtcctgcacctgcccatgcctgcaaacagacctttatgaaaataccctcaaaacacacagtctggctgtgcctccacttcctgctaggacctcgaaggatccctcaggtgggaggcgaacagcatttgggggagacagcccctcctctcctgattgtttcttctctggtttccttctctgttgggcccccatggacagatgagcccagggtgagggtggcacaaagttatctcggggggacagttactcagcccttctgcccctygaacatttccctcccaagcctctgcaccagctctcccacaccccaagccaggctggccagccctaggcaggacacagaggggacccacgaccactcaggcctcctctatcacagctggcccacagct

SEQ ID NO: 494132 - DNA, 584 bp, Homo sapiens
taggaggtcaggcgcgttggctcatgcctgtgatcccagcactttgagaggctgaggtgggcagatcacctgaggtcaggagttccacaccagcctggccaacatggcaaaaccccgtctctattaaamatacaaaattatctgggcgtggtggtgtatgcctgtaatcccagctaattaggaggctgtggcaggagaatcgcttgaacccgggaggcagaggttgcagtgagccgagatcatgccattgcactccagcctgggcaatgagactgaaactccggctaaaaaaaaaagaaaagaaaaaagaaataagggaacaaagcagcacctgggggctccactgaaaaatgagaggggcagaaggcaggaacctccggcagagggaagagcaggtgcccagcgggcaggacgggctcacagacagggtgagcaggaggagcagacacacaggcagcagcgggggacagaggagaggcaggcagggctgactgagtgtaggctgcggggctctccatgggtcccctcttgcagcccagggagcgggtcagggacgcagcttcagccgtcagatgccagagatt

SEQ ID NO: 494133 - DNA, 584 bp, Homo sapiens
taggaggtcaggcgcgttggctcatgcctgtgatcccagcactttgagaggctgaggtgggcagatcacctgaggtcaggagttccacaccagcctggccaacatggcaaaaccccgtctctattaaacatacaaaattatctgggcgtggtggtgtatgcctgtaatcccagctaattaggaggctgtggcaggagaatcgcttgaacccgggaggcagaggttgcagtgagccgagatcatgccattgcactccagcctgggcaatgagactgaaactccggctaaaaaaaaaagaaaagaaaaaagaaataagggaacaaagcagcacctgggggctccactgaaaaatgagaggggcagaaggcaggaacctcyggcagagggaagagcaggtgcccagcgggcaggacgggctcacagacagggtgagcaggaggagcagacacacaggcagcagcgggggacagaggagaggcaggcagggctgactgagtgtaggctgcggggctctccatgggtcccctcttgcagcccagggagcgggtcagggacgcagcttcagccgtcagatgccagagatt

SEQ ID NO: 494134 - DNA, 662 bp, Homo sapiens
gaggagaggcaggcagggctgactgagtgtaggctgcggggctctccatgggtcccctcttgcagcccagggagcgggtcagggacgcagcttcagccrtcagatgccagagattcccaggagcagttaccagggagcaaatcgctatgctcccgtggagattgctgcaacccatccgcctgcgcccacccataggacactccacccacacgacccgggttatgagatcacctccatttcaccctgtgcccccatgtcacgccccagcccagcccacacccacgccctccatcccggcactaacaccagcaaggccagaggtctgccccgccctcctctccctcctgcagggggtcggagcctgggggagagaagcccgccacggggtcaccagccttccctgggggactctgcctagcagaaggacccacaacccgtccagcactactgctaagacgctcgtgtcattcacgcccgggacgctcgtgatttatggactttaatttccccagatcctcagtggcttccctcctttccctctggcctgtcagggtgtttgtctcccagcacccccagcacccccctccctggtttttaatttgaagcatctgtctggagcatcccgaggaggagacgcctgcgaggctgaatgcatgaagcag

SEQ ID NO: 494135 - DNA, 537 bp, Homo sapiens
ggcagctggaggggtttgcgctgggctggagagctccaactctgccaacccggacgaggcaggtgccagacccagttcttgctctctctgcggctccagagagggggtggagctgctgggtctctgtgccasgcagaggcagaaatcaatgcatcgagctggcccctgggatccagagagccagggagaggaagatttaattcatccccaacctagagccctgcctcggagtcagatcccttgggagtcacccacttcggttagccaagctcaaaggagtccctcccacgaagaactggggcagaccctgctggctccctgcaaaggtgaggactcacagcatgccaccctacacacacacacacacacacacatgcgcgcgcgcttttgctgagctccagactcactttcctctctctgttgcctttgtttttagaagagcactcctctgcactaacccaactgagactgcaacctagctccctgcctcagtttccttacattgggagtgaaacaccaggtctgcagcatgcctcc

SEQ ID NO: 494136 - DNA, 537 bp, Homo sapiens
ggcagctggaggggtttgcgctgggctggagagctccaactctgccaacccggacgaggcaggtgccagacccagttcttgctctctctgcggctccagagagggggtggagctgctgggtctctgtgccacscagaggcagaaatcaatgcatcgagctggcccctgggatccagagagccagggagaggaagatttaattcatccccaacctagagccctgcctcggagtcagatcccttgggagtcacccacttcggttagccaagctcaaaggagtccctcccacgaagaactggggcagaccctgctggctccctgcaaaggtgaggactcacagcatgccaccctacacacacacacacacacacacatgcgcgcgcgcttttgctgagctccagactcactttcctctctctgttgcctttgtttttagaagagcactcctctgcactaacccaactgagactgcaacctagctccctgcctcagtttccttacattgggagtgaaacaccaggtctgcagcatgcctcc

SEQ ID NO: 494137 - DNA, 590 bp, Homo sapiens
cacaaagtcaactctctgccggtttcttccaaccaggtctgtggactgcagataatgacggatccaccccatagggctgctgcagaactcgctgagctgttggaatgtcgggcgttactctctgcctggyacctacatgtttattttaataatgctgacaacgaagggaagctggagagcgtgaagccaccaccaccctgtccctgcctgtgtcttgccagcccttctgtagacaatggtttgtgctaataaatggacacgctgcccctgcaggccatgaattaaaggcaagtgtcaggacagatgggacaaaggcacaagttccattccgccgccccttgagtcccttctcagtctgctgggcactctgtcttgttgttgctgttgagatagagtctcactctgttgcccaggatggagtgcagtggcatgatctcggctcactgcaacctctgactcctgggttcaagcgattctcctgcttcagtctcccaagtagctgggattacaggcacccaccatcaagcacaactaatttttgtatttttagtagagacagggttttatcatgttagccaggctggtcttga

SEQ ID NO: 494138 - DNA, 486 bp, Homo sapiens
tgagctgcctaacgttatgccgttgccctgcagaggtgactcgctactacctgtattgcagccagagtggaagcagccccttccagcaggtatggccccccgaggcctgccctcaccctgcccacagccgctcccccttgaccctaagcctcaccactgaccargatggcggaggtggcggggccttgcttgcctcactgtggtcctctccttagctgcttctgtgaggggggcgtgcttttggtcgtgggttctagattggtggttaacacatatgcagctcaatgcgggagctagttcccatgcagatgctgtccaggagctctggggtggggccgagattctgtactactcacaagctcccaggtgaggccagagctgctggtccaaagacacatctgagctgcaacgagggagaagactgtgcagctctcaagaagccagaggagtagggggagacttcctgcaagtggaggggcctgtgca

SEQ ID NO: 494139 - DNA, 486 bp, Homo sapiens
tgagctgcctaacgttatgccgttgccctgcagaggtgactcgctactacctgtattgcagccagagtggaagcagccccttccagcaggtatggccccccgaggcctgccctcaccctgcccacagccgctcccccttgaccctaagcctcaccactgaccaggatggcggaggtgkcggggccttgcttgcctcactgtggtcctctccttagctgcttctgtgaggggggcgtgcttttggtcgtgggttctagattggtggttaacacatatgcagctcaatgcgggagctagttcccatgcagatgctgtccaggagctctggggtggggccgagattctgtactactcacaagctcccaggtgaggccagagctgctggtccaaagacacatctgagctgcaacgagggagaagactgtgcagctctcaagaagccagaggagtagggggagacttcctgcaagtggaggggcctgtgca

SEQ ID NO: 494140 - DNA, 561 bp, Homo sapiens
aagtgcctcccttgggagctcagggacggggagggaggtctggcttggccaccaaggatgatagagatctcatctggtcatttgtgagctgcctaacgttatgccgttgccctgcagaggtgactcgctactacctgtattgcagccagagtggaagcagccccttccagcaggtatggccccccgaggcctgccctcaccctgcccacagccgctcccccttgaccctaagcctcaccactgaccaggatggcggaggtggcrgggccttgcttgcctcactgtggtcctctccttagctgcttctgtgaggggggcgtgcttttggtcgtgggttctagattggtggttaacacatatgcagctcaatgcgggagctagttcccatgcagatgctgtccaggagctctggggtggggccgagattctgtactactcacaagctcccaggtgaggccagagctgctggtccaaagacacatctgagctgcaacgagggagaagactgtgcagctctcaagaagccagaggagtagggggagacttcctgcaagtggaggg

SEQ ID NO: 494141 - DNA, 485 bp, Homo sapiens
tgagctgcctaacgttatgccgttgccctgcagaggtgactcgctactacctgtattgcagccagagtggaagcagccccttccagcaggtatggccccccgaggcctgccctcaccctgcccacagccgctcccccttgaccctaagcctcaccactgaccaggatggcggaggtggcggggccttgcttgcctcactgtggtcctctccttagctgcttctgtgaggggggcgtgcttttgrtcgtgggttctagattggtggttaacacatatgcagctcaatgcgggagctagttcccatgcagatgctgtccaggagctctggggtggggccgagattctgtactactcacaagctcccaggtgaggccagagctgctggtccaaagacacatctgagctgcaacgagggagaagactgtgcagctctcaagaagccagaggagtagggggagacttcctgcaagtggaggggcctgtgc

SEQ ID NO: 494142 - DNA, 658 bp, Homo sapiens
tgactggtgctgctatctctgaaggagcatgatgagattgtgcagtaaaaactggctactggaatgcactgctgctgctcggggggagatctgttgctggagagacagggacaagaagaataagccagcagaaagagcatatgcctcttttctctcctccagcctttggtttctctctagtcctcctacaggcagaacccaacaaggagccagttgacgaaggagagatgttatgtgcagagccccaatcttagcaccaaaacrtagagtttagaagagtgagctcgggctgggcgtggtgactcatgcccgtaatcccaacattttgggaggctgaggcaggcagatcacctgaggtcatgagtttgaaactagcctggccaacatggcaaaaccccacctctactaaaaatacaaaaattagccaggtgtggtggcaggcacctgtggttccaggcactctggaggctgaggcaggagaatcacttgaacctgggaagcagaggttgcagtgtctgagactgcgccactgcactccagcctgggtgacagagcaagactccatctcaaaacaaaacaaaataaaaataaaaataaaaataaatgaatgaataaataaataaatagaagggtgagctcggagttgagagatgatagc

SEQ ID NO: 494143 - DNA, 652 bp, Homo sapiens
ctgacacagtcctccacccctttggctactcagcatccatctacatgtactgaacaccatctaatgakaacaacaaacgtacacctttaccttataacatgcaattatcttttgtacaaagacactcacagtgttctcaaagagaggagacataaaatcccaagagctcttatatcctcctctgagtgacagtcatggtactcgtttctagatgacgttgatcacccctcaaaactagtcatggtcccatctgaatattttgtaacttaaagatgaaattgtgaagttaaccactgctaataatctttacataaaataaaaacggcagagagaagagacattagttaatatgtgccagtgcaaacatgtatacatatcaacaggcaaggaagaaaatattcctgctttctatgttcttgtttttatgaggtcatgttgatattaacttccttctctcattgcctgttccatatccattagtcttcccttagacaaggaagtactacacgggtcacagagaacttcctgggttccttgtctcctttatatagtagctaactagtttctctttgctaactaggaaagtgattctcttctctgcctgtttattcagcagcataaagagcctataaaatgtccaggtgttagcctt

SEQ ID NO: 494144 - DNA, 652 bp, Homo sapiens
ctgacacagtcctccacccctttggctactcagcatccatctacatgtactgaacaccatctaatgagaacaacaaacgtacacctttaccttataacatgcaattatcttttgtacaaagacactcacagtgttctcaaagagaggagacataaaatcccaagagctcttatatcctcctctgagtgacagtcatggtactcgtttctagatgaygttgatcacccctcaaaactagtcatggtcccatctgaatattttgtaacttaaagatgaaattgtgaagttaaccactgctaataatctttacataaaataaaaacggcagagagaagagacattagttaatatgtgccagtgcaaacatgtatacatatcaacaggcaaggaagaaaatattcctgctttctatgttcttgtttttatgaggtcatgttgatattaacttccttctctcattgcctgttccatatccattagtcttcccttagacaaggaagtactacacgggtcacagagaacttcctgggttccttgtctcctttatatagtagctaactagtttctctttgctaactaggaaagtgattctcttctctgcctgtttattcagcagcataaagagcctataaaatgtccaggtgttagcctt

SEQ ID NO: 494145 - DNA, 652 bp, Homo sapiens
ctgacacagtcctccacccctttggctactcagcatccatctacatgtactgaacaccatctaatgagaacaacaaacgtacacctttaccttataacatgcaattatcttttgtacaaagacactcacagtgttctcaaagagaggagacataaaatcccaagagctcttatatcctcctctgagtgacagtcatggtactcgtttctagatgacgttgatcacccctcaaaactagtcatggtcccatctgaatattttgtaacttaaagatgaaattgtgaagttaaccactgctaataatctttacataaaataaaaacggcagagagaagagacattagttaatatgtgccagtgcaaacatgtatacatatcaacaggcaaggaagaaaatattcctgctttctatgttcttgtttttatgaggtcrtgttgatattaacttccttctctcattgcctgttccatatccattagtcttcccttagacaaggaagtactacacgggtcacagagaacttcctgggttccttgtctcctttatatagtagctaactagtttctctttgctaactaggaaagtgattctcttctctgcctgtttattcagcagcataaagagcctataaaatgtccaggtgttagcctt

SEQ ID NO: 494146 - DNA, 562 bp, Homo sapiens
ctgaacctggcttcctcataaccctctcacctcatgctctccaagtgggcaggtgtccttcttgggactaaggtttcagacccttgcccatgccatcactgtcctccaaatgaaagtctaattggttaatgtcactcttaaatgtggcctgagtgagtcactcaagtccaggttgttcatcagctctgagcgcagcaggggtcatgccttaggtcctccacttcccagggcactgacctgaacttgcacccgccctggttccccccgccccccactgatcttgtggtctacaaacagcccctgaatttcttcccaagaattgctgttaagcccagtctctcctccttcctatagtgctgtattgatttttgtgttgttttaaccaaaagcagaactttmaatctatccctgtgaaatctcatctagttggttttagtccaacattccagcatgaacaaatcatttcaaatcttgactcttgtcatccatcatattccatctgacctgcaccacttgagaccatctgaagattgattaagcagcctcctgagttttcatccaa

SEQ ID NO: 494147 - DNA, 608 bp, Homo sapiens
gctgcattgtccctttctcatggaggcctcctgcgagctccttcttctctagagtctaggttagttcttcctgttatccctctcacggcaccctgtactcttccttaacatgcactttgcacaactgtcgttctgtaggtatctgcctatctatcagctttccctgcctcccactggtgtaccggctctgggaggcggggctgcatctggtttattctccactcrtggcaagtgcctggcacagggctgagtgtaggcaacgttacccggatggcaagcgcctgagctgggttcagacttccctgcctggaaatgccgtgaaaacactgcctctatctacacttcccaccagtgctgcaggcgtccccaggacgtcagcacacagagaggctggctggggggtctctggatgctgaccctggtaggccatcagtagtcacttaaaaaagtttttaataggccgagcacgacggctcatgcctgtaatcccagcactttgggaggcctaggcgggtggatcacttgaggtcaggagtttgagaccagcctggccaacatggtgaaaccccgtctctactaataatacaaaattagccaggcgtggtggc

SEQ ID NO: 494148 - DNA, 605 bp, Homo sapiens
gcattgtccctttctcatggaggcctcctgcgagctccttcttctctagagtctaggttagttcttcctgttatccctctcacggcaccctgtactcttccttaacatgcactttgcacaactgtcgttctgtaggtatctgcctatctatcagctttccctgcctcccactggtgtaccggctctgggaggcggggctgcatctggtttattctccactcatggcaagtgcctggcacagggctgagtgtaggcaacgttacccggatggcaagcgcctgagctgggttcagacttccctgcctggaaatgccgtgaaaacactgcctctatctacacttcccaccagtgctgcaggcgtccccaggacgtcagcacayagagaggctggctggggggtctctggatgctgaccctggtaggccatcagtagtcacttaaaaaagtttttaataggccgagcacgacggctcatgcctgtaatcccagcactttgggaggcctaggcgggtggatcacttgaggtcaggagtttgagaccagcctggccaacatggtgaaaccccgtctctactaataatacaaaattagccaggcgtggtggc

SEQ ID NO: 494149 - DNA, 564 bp, Homo sapiens
ctcaggaggctgagaagggagactctctagaacctgggaggcagaggttgcggtgagctgagatcatatcactgcactccagcctggatgacagagagagacttcatctcaaaaacaaaccaaaacaaaacagagtcaccaacctcctagagctggggctgtgatgcttcccgggctgacagattgaccctgttttgagatatccggagagtgaaagtactggaaaattaattagcagcagtagacactggctacccggaggctacaggaatttatggggtttttgtttcttttttgtcatggaataagttttcagcatgtgtgttgattgatttcctgctaagttcctctctgtcttaaaaaaaataaaacaactctcagagtttggagtccgttgaagcatgttaatgaccttttttmcgaatcacttcttcttggtattgtgtctatcccccacccccactctccttctctctcttttgcttctgactttcagacaggcaaggggttggtccctctgaagggctgggacccaggacccgggtgaggcaagctgaatacctg

SEQ ID NO: 494150 - DNA, 564 bp, Homo sapiens
ctcaggaggctgagaagggagactctctagaacctgggaggcagaggttgcggtgagctgagatcatatcactgcactccagcctggatgacagagagagacttcatctcaaaaacaaaccaaaacaaaacagagtcaccaacctcctagagctggggctgtgatgcttcccgggctgacagattgaccctgttttgagatatccggagagtgaaagtactggaaaattaattagcagcagtagacactggctacccggaggctacaggaatttatggggtttttgtttcttttttgtcatggaataagttttcagcatgtgtgttgattgatttcctgctaagttcctctctgtcttaaaaaaaataaaacaactctcagagtttggagtccgttgaagcatgttaatgaccttttttccgaatcrcttcttcttggtattgtgtctatcccccacccccactctccttctctctcttttgcttctgactttcagacaggcaaggggttggtccctctgaagggctgggacccaggacccgggtgaggcaagctgaatacctg

SEQ ID NO: 494151 - DNA, 619 bp, Homo sapiens
ctgtggggcctcctcttgcctcctccagcatctccccatgcctggagccatgccccacactcaagagaaatggaagtgaacaagtaaaggaggctaagkctgacgtgtgggggtcaagcctttccagccccatgttaggagaaggggacagtgaggtgggaaaactgccctggccagaatgcctgggacggcctgcagtaactccctggactgcctgcactccctgggcctcagcccctgctctgtgaagtcagggtggggcagctccactctccctggtcctctgatcagagtcgggacttaccccttggccctgatccaaaaggtccccaggttttgaggtgacagccttcagtcaccacgtttcagtgaggcgcctgggagtcacattgttttaatccttcctgaggcccaggtctctgtaaccagctcctcctcctaactgggctccccatcttcactgctaccctggccctagctgggaatccctgcccctccagtccccattccagccctaggcgtcctcaggagggctaggagccaacgccatgggtcctgggcacagcaggtgggtttgcccagactgcttcaagccacagagctaggcctcatgagggtc

SEQ ID NO: 494152 - DNA, 619 bp, Homo sapiens
ctgtggggcctcctcttgcctcctccagcatctccccatgcctggagccatgccccacactcaagagaaatggaagtgaacaagtaaaggaggctaagtctgacgtgtgggggtcaagcctttccagccccatgttaggagaakgggacagtgaggtgggaaaactgccctggccagaatgcctgggacggcctgcagtaactccctggactgcctgcactccctgggcctcagcccctgctctgtgaagtcagggtggggcagctccactctccctggtcctctgatcagagtcgggacttaccccttggccctgatccaaaaggtccccaggttttgaggtgacagccttcagtcaccacgtttcagtgaggcgcctgggagtcacattgttttaatccttcctgaggcccaggtctctgtaaccagctcctcctcctaactgggctccccatcttcactgctaccctggccctagctgggaatccctgcccctccagtccccattccagccctaggcgtcctcaggagggctaggagccaacgccatgggtcctgggcacagcaggtgggtttgcccagactgcttcaagccacagagctaggcctcatgagggtc

SEQ ID NO: 494153 - DNA, 535 bp, Homo sapiens
actcttcacacacatgggacatgggtacagataccagaattctgggagaagctttgggaacctgaggtcctggaggggaggataaaagaggagaggagcagccctcagaccagggacctgtctgaagcaggccaccctccactctggactctcaggccctgcccagagactactcctttgggtatcccttgagtgtmccctggaaaagccagcccactcatccttgtcatcaaccagcctgcacgttccagcactgggccctacagatacagaggggtcccacattctgggccctcaggagctcatggccagtgagagaaacaataaacacattgacaatgggacctggagtgaaaggggctgcaatcaagacagggccggggctgggtagggaggtgtcgagtggggctcccagagaatgttaggctccacactgagttttcaaggaccagtatgcaaaaactgcaagagcaggatgggggttcaaggaggcgagggcagcctgcacgaagccccagggaatgagagaatgtgg

SEQ ID NO: 494154 - DNA, 549 bp, Homo sapiens
tgtgtgtccgtccgtgtgtctgagcacctagcccacccgggccattctgggtctgatggagcaagtccctcccctakaagcttttcctggcacttcctcgtttcagcccagtggagtcgggcgggaggagagacgtggggtctccgttcccatggagtccacgctgcggcccgacaccaccaggattctcatagttccacccctaatttctggggccagaaatttctgtggtacacaaccagaagcagaaacagaagtacaaccagaagcagaacctctgctcagcccctgggtaaaaatctactttggggtgctagcaaaactctgcacaaatattctattcattcctcgctttgggatatcaaattaagtcaataaagcccggcctgggcctctgtggttcacaccacaaagccagaagaagcatctgctcaaggctgagacttgggtggggcacgtggagtgctcaccctcagagtctgcaactgagggtgagcgcctccttaaattctcccctcagagcctccctgcctcaccctagtcccgact

SEQ ID NO: 494155 - DNA, 380 bp, Homo sapiens
ccacccctaatttctggggccagaaatttctgtggtacacaaccagaagcagaaacagaagtacaaccagaagcagaacctctgctcagcccctgggtaaaaatctactttgggrtgctagcaaaactctgcacaaatattctattcattcctcgctttgggatatcaaattaagtcaataaagcccggcctgggcctctgtggttcacaccacaaagccagaagaagcatctgctcaaggctgagacttgggtggggcacgtggagtgctcaccctcagagtctgcaactgagggtgagcgcctccttaaattctcccctcagagcctccctgcctcaccctagtcccgactgcaggcaaatctgagggctgctgttca

SEQ ID NO: 494156 - DNA, 512 bp, Homo sapiens
acttcagaggtccacacagtgcctcacatggagaaatcactccataaactaagctaatgctgaattttcttcttcctcttcttcttcctcttcttcttcttcttcctcttcctcttcttcttcttcttcctcttcctcttcctccttctygtcctcctcctcttcttcttcttcttcctattattttttgagacagactctcgctgtcacccttgctggagtgcagtggggtgatctcagatcatttcaacctccgcctccccggttcaagcaattctcctgcctcagcctccaaagtagcggtaactacaggcatgcgccaccatgcccaactaatttttgtatttttagtggagacggggtttcaccatgttggccaggctggtcttgaactcctgacctcaagtgatctgcccaactaggcctcccaaagtgctgggattacaggtgtgagccaccgtgcccagccgatcttattattttttaaatcacaattaacaggtgagggatga

SEQ ID NO: 494157 - DNA, 512 bp, Homo sapiens
acttcagaggtccacacagtgcctcacatggagaaatcactccataaactaagctaatgctgaattttcttcttcctcttcttcttcctcttcttcttcttcttcctcttcctcttcttcttcttcttcctcttcctcttcctccttctcgtcctcctcctcttcttcttcttcttcctattattttttgagacagactctcgctgtcacccttgctggagtgcagtggggtgatctcagatcatttcaacctccgcctcccmggttcaagcaattctcctgcctcagcctccaaagtagcggtaactacaggcatgcgccaccatgcccaactaatttttgtatttttagtggagacggggtttcaccatgttggccaggctggtcttgaactcctgacctcaagtgatctgcccaactaggcctcccaaagtgctgggattacaggtgtgagccaccgtgcccagccgatcttattattttttaaatcacaattaacaggtgagggatga

SEQ ID NO: 494158 - DNA, 731 bp, Homo sapiens
ctgcagatggccttcatctgtggggtcaggagcaccctcaatctaaaagttgtccatctggaaagagccattgttgccacccatgctggggagtaatggtcagcgggttgaatttttttctacccagcggtcatctcagtgcagactctaaccagcttagttccctcccccggtgattctggaagtgcccacgtccttggaagtggtggccttcctcctgtgagtgcacctctgtcttcattagctgcacagggatgagcccccttgggtgggtaggcaataaagaaaaaactaattacaactgagcaatgactgctaccatagtttgttgtatatgaatgtagtttccttaaaaatccaaagttggaaccatgwttattaattttgaaaaaagagagcacgtataattttatccttaattgggtaattaagttctcactaactaagcagagtctgtcaagaggagatgagggatacttaaataaatcctttgagaacaacattaagaatcacttttcgtctctgttcccatctctactcttttgtaaatctgttacgatgctggtctgtctgtggtgggaatatcctcatgtaaaaatcagactaatgtactcatacatttttaggtcacacaattgagcggcattacttggctccttgtcctaagaagactgctttgggcctgtgatgtgagaggaaacacagcctttccctttagaaacttggatgcg

SEQ ID NO: 494159 - DNA, 731 bp, Homo sapiens
ctgcagatggccttcatctgtggggtcaggagcaccctcaatctaaaagttgtccatctggaaagagccattgttgccacccatgctggggagtaatggtcagcgggttgaatttttttctacccagcggtcatctcagtgcagactctaaccagcttagttccctcccccggtgattctggaagtgcccacgtccttggaagtggtggccttcctcctgtgagtgcacctctgtcttcattagctgcacagggatgagcccccttgggtgggtaggcaataaagaaaaaactaattacaactgagcaatgactgctaccatagtttgttgtatatgaatgtagtttccttaaaaatccaaagttggaaccatgtttattaattttgaaaaaagagagcacgtataattttatccttaattgggtaattaagttctcactaactaagcagagtctgtcaagaggagatgagggatacttaaataaatcctttgagaacaacattaagaatcacttttcgtctctgttcccatctctactcttttgtaaatctgttacgatgctggtctgtctgtggtgggaatatcctcatgtaaaaatcagactaatgtactcatacatttttaggwcacacaattgagcggcattacttggctccttgtcctaagaagactgctttgggcctgtgatgtgagaggaaacacagcctttccctttagaaacttggatgcg

SEQ ID NO: 494160 - DNA, 549 bp, Homo sapiens
gcctttccctttagaaacttggatgcgacaggcccaatgtaagtgtgcatgcctggagtttccctaaacagatrgtaccttacatggagacagtgtgtagtcctgcctgaggtacagaaatcaggtgtaggtcactctgcttgccctgcaatgactttctctcttcctttctctattatattgataaagagaaatacatatatgtgtgtgtacatatatgtgcatatgtatatatgtgtgtatatattaatatgcatgtgtgaatatagatacatatacatatgtatatgatacatacacatgtaaatatgtatacatatacacatatgtatatgatacatacacatgtaaatatgtatacatatacacaatatataaatatatataaaccccatgagagaggatcctaagtgcttttaaagggattctgctagcaggaaaggagggcaaggtgtctggacgtctggagggaaagtcctccggagggagaagaggcagcatacaggtgattgctgggagcccctattctgagattcagggaaaagcaag

SEQ ID NO: 494161 - DNA, 590 bp, Homo sapiens
gaagcaggtttcagagcgagaaatactgtaactgaatgccagtctggctgcttgctgcccagaagccaaaatacaacaaagactacagagaagaaaacactttttaaattttttttttttttttttttttgagacagagtcttactctgtctcccaggctggagagcagtggtaccatctcatctcactgcaacctccgcctccccggttcgggcaattctcatacctcagccttccaagtagctgggactacaggcatgcaccaccacacccagctaattttgtatttttagtagacatgggatttcaccatgttgcccaggctggtctagaactcctaacctccagttatcagcccaccttggcctcccaaagtgctgggattmtgggcgtgagccaccacaccaagcctaaaatgcattttgaaactaagctacttgattatgatatcaccgtggataattaaagtcattttatcttgataaaggaatcagttcatcaagtggacaaaacagtcttaaatgtttatgtagctaataacagggcttcaaaatatataaagcagaagtggctagaactacaagcagaaa

SEQ ID NO: 494162 - DNA, 590 bp, Homo sapiens
gaagcaggtttcagagcgagaaatactgtaactgaatgccagtctggctgcttgctgcccagaagccaaaatacaacaaagactacagagaagaaaacactttttaaattttttttttttttttttttttgagacagagtcttactctgtctcccaggctggagagcagtggtaccatctcatctcactgcaacctccgcctccccggttcgggcaattctcatacctcagccttccaagtagctgggactacaggcatgcaccaccacacccagctaattttgtatttttagtagacatgggatttcaccatgttgcccaggctggtctagaactcctaacctccagttatcagcccaccttggcctcccaaagtgctgggattctgggcgtgagccaccacaccaagcctaaaatgcattttgaaactaagctacttgattatgatatcaccgtggataattaaagtcattttatcttgataaaggaatcagttcatcaagtggacaaaacagtcttaaatgtttatgtasctaataacagggcttcaaaatatataaagcagaagtggctagaactacaagcagaaa

SEQ ID NO: 494163 - DNA, 606 bp, Homo sapiens
gggtgtgctgtcctggctgggaacgtgcatacataggcagacgctcttcaccaccattgagtacgtctctccagtgtctctgggtattttattctgtgtaggattgaagtgaacccaagaaataggctggacaaaaaaagaaaaataagaaaggcaacaaaaaacctctctttgaagatacgatataattagatctcagtaaaagttattttcttaagaacaatcaggaggtcagttgcatcaggtgggcatacttaccaaaatatgaaagcctaatcaaaaacaagcatgccactttccacttatagaacttgaaatttacaaaacaataaaatatactcatgtgcatgcacgtgcatgtgtacacacacacacacacacacacacacttaataaaggaggagtaaaacctaaaatgacccytctgccaaagacaaggataaaaattagcagggcatagagcatgcccagccacctgccatctgcaatctcccttcctcccttcttctcatagccctctgccaatggaccctattttattcccgaataattacagcagtgcctctaattctacaccataagtagtcctgaagcctacaatggtaa

SEQ ID NO: 494164 - DNA, 566 bp, Homo sapiens
aaatgctggtgaggatgcagaggaatgggatccttcggacactgctggtggaaacacgaaatggtgtaaccactgtggaaaacagtttagcaggtggttttaaaaagtacataacatgtcaattggtacattttagcagatgttaaaattaactaagaacttctgttgtagtggtgcaaaaatcaatggtgtccttctattgccttgctttatacattcttttagaaaatgtcagatttccaattgaactaaattgtggacctttctattaatttaatggttttgtcacagcttttggtttctgccttcctccaaatcacttgcactgaggatttctgggtggttatgggagagctctgaggtcctgatggcccacttctttctccaggaaggtcagtcaatatccctgggcttgaggtccrcatccagtgagacctttttatctatgacacaggtggtggtcatcagtccccggatctcacggttagcccttcgacatgctggggagcagcaatcctgcacaaagcctgggcacactggctggggctttaaggttgagagagcag

SEQ ID NO: 494165 - DNA, 335 bp, Homo sapiens
tatccatgggagaagaatagggagaggaccttgcagtgaggccatacaagctcctcctgattttaccacgtgtcaagacagcacataataccaattggagccttaaaccacacttaagctttccagatataactatagatttaactgcatacacaaaggggtgcatttgagaaaggctttgccaaattatattcagagcaggctagaattgargagaaaaccaatatctttcaagctgttgctacgatgcataaaaccaatatccttgcaaaatgtccgtatttcatcagcatttcgtctacagcaggaagaaaattggcctcgaattcacagta

SEQ ID NO: 494166 - DNA, 393 bp, Homo sapiens
ggggcagagtgaagaaacacctgcagaatttctaaaaaatacaactcagacagtttctgtccagcaaactgtccatagcaacagcgaggcagagtgaagaaacacctgcagaatttctaaaaaatataacccagacagtttctatccagcaaactgtccatagcaacagtggggcagagtgaagaaacacctgcagaatttctaaaaaatataactcagacagtttctatccagcaarctgtctttcaaatataaaggtaaactactctgggaaatagtattttcttgagtactttttgagtgttatacccaagagataacttgaaaaattagggcaaaaagacaggcatgggcattgaatagaatatattaatatttatgatactgagataa

SEQ ID NO: 494167 - DNA, 606 bp, Homo sapiens
catacattagaaatacattctgtgaagggttttccttttttaaattttctgtgaagatctctttctgaaactcgactggacttttaaagcataagatgctatgttgctgtcaaatttcaaaacagaaacctagaatttaaaaattgtaaatttgcttatatattkggtattttattaatgtggcccacaagatgttatctagcagccggttagcattttcagaaaaaaaaaaaaacacccctaccaacttcctttttcaataataatttattatctacctactgattcattaaaataataattttgcaaacataaagtttagtaaaatgaagaaaaaggtctttaaatgtaccatgtccttgtattttacaataaactaattgtatgaagtgtgaataaagaataattttatgttctctgagaaacatggaaatatacttcaatatagagtcattaaatgatacgacaaagaaaatttgtacacttacttcctttggtgtttccaagccagattacctctgttattcctacccgtcaacctatctttcttctggggataaagccccatcttctgggaactgctcctccttccacagccagcctggg

SEQ ID NO: 494168 - DNA, 610 bp, Homo sapiens
aactcttgtttggtgttgtcatcatcaaaccatttcaattttttgcttgagctctgaatagcctcatttacaaacacctcaagttcatgtggtattttgagaacttttcatcatttttcttaaaaytcgaaaggagaatagacttaaggcaactgctgacatttggagagatgggaaaatatggtatcaaagataggtctgagctttgagcctcaggtattgagggctgaccatggtgtggctgatggagaaagtgaggtgtcaagaggaagagtggccatgctgggaacagggtggatgtgctcagtgtgaagctgatcgttgtgtaatttgtctcaaaggtgtacggagttttccatgtcatattttaacattcttgaattctggattgttggggtttttttttaagatataactagacatggatgtttcatttgctgtatataaatttaattggccctgctttctcactaagacttttgttttaattagcaaactcctcttctttgtaaatcaaggccaaggccacaatataaatttgcataataaatgcaagcagtttgaacttgatccctgaagatgtgagttctctgtgcacagaaaccagttg

SEQ ID NO: 494169 - DNA, 610 bp, Homo sapiens
aactcttgtttggtgttgtcatcatcaaaccatttcaattttttgcttgagctctgaatagcctcatttacaaacacctcaagttcatgtggtattttgagaacttttcatcatttttcttaaaactcgaaaggagaatagacttaaggcaactgctgacatttggagagatgggaaaatatggtatcaaagataggtctgagctttgagcctcaggtattgagggctgaccatggtgtggctgatggagaaagtgaggtgtcaagaggaagagtggccatgctgggaacagggtggatgtgctcagtgtgaagctkatcgttgtgtaatttgtctcaaaggtgtacggagttttccatgtcatattttaacattcttgaattctggattgttggggtttttttttaagatataactagacatggatgtttcatttgctgtatataaatttaattggccctgctttctcactaagacttttgttttaattagcaaactcctcttctttgtaaatcaaggccaaggccacaatataaatttgcataataaatgcaagcagtttgaacttgatccctgaagatgtgagttctctgtgcacagaaaccagttg

SEQ ID NO: 494170 - DNA, 610 bp, Homo sapiens
aactcttgtttggtgttgtcatcatcaaaccatttcaattttttgcttgagctctgaatagcctcatttacaaacacctcaagttcatgtggtattttgagaacttttcatcatttttcttaaaactcgaaaggagaatagacttaaggcaactgctgacatttggagagatgggaaaatatggtatcaaagataggtctgagctttgagcctcaggtattgagggctgaccatggtgtggctgatggagaaagtgaggtgtcaagaggaagagtggccatgctgggaacagggtggatgtgctcagtgtgaagctgatcgttgtgtaatttgtctcaaaggtgtacggagttttccatgtcatattttaacattcttgaattctggattgttggggtttttttttaagatatarctagacatggatgtttcatttgctgtatataaatttaattggccctgctttctcactaagacttttgttttaattagcaaactcctcttctttgtaaatcaaggccaaggccacaatataaatttgcataataaatgcaagcagtttgaacttgatccctgaagatgtgagttctctgtgcacagaaaccagttg

SEQ ID NO: 494171 - DNA, 660 bp, Homo sapiens
attctattgtttccagagaggaatgtgtggtaaaaatcttctctatcgcacactacatcatttttaaaagaagaatcacacaagtgtttttatatatataaagagttgagtttatacccacatccttaccattcacttttatgaccactgcaagaaaaaaatatttaaagtattacatattttgaaacaaaaagtgctaatttttattacaatcagtttttaacttcatgcccgtaatcctgtttaacygtaaagtaacggatagtttttagaacaagtaattcttggccaaattgaggtataaatataatgtaaaaagttaatcagttaatatgattgtctacatatgaggtgctggaggaaactttaggataattacaggcaccaccaaatataatataattcagtaactttattcagctagaaatttctatctgatcactaaatgctgagtctgaacaccaccatctttttaaatggaggataaaggagaatcctgagaaagcctccccatggggccgcctgggagaggatgacagaactcattgtgagaactccacccacgtccacatcattgtgtcccctgtgaagcaaatgtctcagtacacagggggaagggcaacaaaaactggtgcaacaggggaatggtggaaatctact

SEQ ID NO: 494172 - DNA, 529 bp, Homo sapiens
tgaacccatatgtgtgctctaattaacaaaagctgccttagtgtttatgctttcgtgttgccctagttccatggctacctgcataggctcaagtatgaagcttccaagttcttgggaaatacactaaggagwtcccacagctcagaccacagagattacctcattacacaaagatcagggagtccaagacagtccccgttcacttcaacccgcatgggccaacccaggcttgccctctcaggccgtggactcccttaatatttcttcctcttcccacccagccattcacatccttgtctttgctgaatcctggaaacctgggactctaaggggccttagagaccaactaattgagttggatatggacaggggaggcagaagaagaggggagagtgggggaagagtgccagccttctgcatgccccctagctttacccctagcacttccatgttacgtgttttgcatttaagatttctgactgacattgcatttgagtaaactgactctcagagagcttacatgacttgt

SEQ ID NO: 494173 - DNA, 581 bp, Homo sapiens
cataaagtcataggaagaaaaagcatatgttgtatcaatgacttgaattttgtttggatgcagccactaaccagcagagtgatattaagatgtttatttaacctttctgtttcacaaattmtccgatgaaaaatggtaacttttactagagatgagatatctggaagattgcttctatttgtgaagttctaaatacattgcttacataaaaattttaacaaaggctgattgctctgattaagattgtgttttgccaatgtgtactggtacaaaaacacacacatagaccaatggaaaagaacaaaaaactcagaaataaagctgcacacttgcaaccatctgatttttgaaaaggctgacaaaaacaagcaatggggaaaggactccctactcaataaatggtgctggggtaagtggctagccaggtgcagaagaatgaaaaagaccctggcctttcaccatatataaacatgtcatccattctcaagatggattgaagatgtaaaacacctcaaactataaaaatgttagaagaaaatctaggaaataaccttctcaacatcaggcttggcaaagaatat

SEQ ID NO: 494174 - DNA, 581 bp, Homo sapiens
cataaagtcataggaagaaaaagcatatgttgtatcaatgacttgaattttgtttggatgcagccactaaccagcagagtgatattaagatgtttatttaacctttctgtttcacaaattatccgatgaaaaatggtaacttttactagagatgagatatctggaagattgcttctatttgtgaagttctaaatacattgcttacataaaaattttaacaaaggctgattgctctgattaagattgtgttttgccaatgtgtactggtacaaaaacacacacatagaccaatggaaaagaacaaaaaactcagaaataaagctgcacacttgcaaccatctgatttttgaaaaggctgacaaaaacaagcaatggggaaaggactccctactcaataaatggtgctgggrtaagtggctagccaggtgcagaagaatgaaaaagaccctggcctttcaccatatataaacatgtcatccattctcaagatggattgaagatgtaaaacacctcaaactataaaaatgttagaagaaaatctaggaaataaccttctcaacatcaggcttggcaaagaatat

SEQ ID NO: 494175 - DNA, 517 bp, Homo sapiens
taaaaaaattaaatgtgtccatactagcctgtgtatgtttgcatatctataaatatttctgtatgtaaacatctgtatctatattaagctacatatgaattcttgtcaatgtctccaacaataatccatgactatatggatcattgcagcctactccttttgcttatgtgtgaatttccactccaatattgagaaccgtagctcccacaacctgccactcatttatttacttaagtctgctattctggtataactgtatatcagtaacagaattgtcaaccattgtccctgtggaaaacaactgatcctctatactatagggcttacgtgctattcctgctgtctctgttcttatagactccatttyttcccagattaatgaggttttggtacagtctttttcccttcagagaaggactttgttatggaaaatgctctgagtatatttttaaatggttcccctactgctgccagagacataatggtattttttcttggcccttcaccttgacaacct

SEQ ID NO: 494176 - DNA, 522 bp, Homo sapiens
gtagcagagtaaagaaatcaggaacctcacaataaaaatcacggaagataagtgctaataattaaccctcccagaatattctatacttactatgctcacttttgttctgttcctcaccataagggggtcagggaccccttcccaagggattattcactcccctaaacagttatttctcttttaaagtttaactgcccccatacaagattaaatattttccactaggaggaaatagctctagccaatcacatagtaaacctccttgtaaaatttgtttcttcttgcttagaagccatcaaacttatgcaactggagccttggaatattggctctctttttaccaggracccttagataggcccttagatctgactaccatttcccccaaaacaatgccccctgtcagcatgaagcagttaagagcagttgtcatccctatcctaatggcagttagatgtacctcttcagagggagggtttgatggcagtggctgctccagatagtctgccactgccatgatat

SEQ ID NO: 494177 - DNA, 541 bp, Homo sapiens
cctttatattcaggaattttttttttttgcacaatccaggaacaattataaccctgttgaaaatagtggtaatggcaatatactattactagactkcaatacatgaattaatgtataaaggaaaaaaaatctgtgcttttctgctactatttaaagttttattaggaagttaattttataaaagtaatcaagagggttacaattaaatgatacgtatttgaactgcatctattataataatatactgctctcaaaaatgtttttctattccataaaataaatccaggttaacaaataattttagcaaagggaatgatgaacagcgttggctagtttaacaagtggttagttagtgagccaaaatatcaccatatattacttaagatcaaactagacttttatgctttgtttttatgacatcttcaatgcatagatagtagggaggagccccaaataagtttgtgctaagaatttaaggactgaagaatatgaaataattgtatgatattggtacacaagtcacttttgtcacatacaagtt

SEQ ID NO: 494178 - DNA, 589 bp, Homo sapiens
cctatttatctatctataaatcaatcatatatctacctatctatttacctacctacttacatatgtatgtatcctactggttctatctctctggaaaaccctgactaatataattgtattggaagcatgaatgcctagatatttttcaataatcgaatatatttcacattaatttaagtaaccatgaagatagttatgaaaatagatagataggaaaggagtcccaaaaaagagaataattagagagcaaagattccctctaatcttgaggttctagcacatctagttacagaaacacaacaaaatctgtgaaaacagattttcacagatttgaagacaacaaaatataaaaacaatgaaatctgtaatgttagcacattgggakgtcaaggtgcaagtccaggagtttgagaccagcctgggcaacatagcaagaccctgtctctacaaaaaaattttaaaaattagttggacatggtggggcacaccttggtcccagctactgggaatatgaaatcaacaaaatctgtttacccaaatattcacatacattttatgccataatgatattttcaaatagtgaatggca

SEQ ID NO: 494179 - DNA, 447 bp, Homo sapiens
ctgccaaactcctcttccaccacctccagccaaactcctctcagtgttcaaatgttgctcctcttctctatttctctgtcacattgttccgccatccatctgcttgtcccctcctctccttgcctgctggtcagcttttggagcctggggttttggtttatatgggtacaggatagtgggcacggtgggccaaaaggcaacttcttgggcatgaaaacaggaatgttgtccccatttagggccgctggtctccaggcttgagggtgggacctttgccaggcaaccaccctcttctacccagtgtcttctgtttgtatcagtaccatgggagataaagacaagtraaagcatagaaaggcctcccacttgtgttcaaattgcctcgctttgttgtttaactgtttgaatgacaagccacatgaaacaagattataaattcctggagga

SEQ ID NO: 494180 - DNA, 644 bp, Homo sapiens
agaaatatctccagatgtagagttatctctttaaatatcttttgactcaytgcaaaaattcacttctaattgatgttcaattttacaaagtgaatgtggctacaaaatgcaaaagtcacttagctcaaatgggtgaatcacctacgtgtgcaaaaattcacttctaactgacattcaattttacaaagtgaatgtggctacaaaatgcaaaaatcacttagctcaaatgggtgaatcacctacatttacatctggttcagtcacttatgggttcaaatctatctacctacctacctacctacctatctttattaaatattataaacactatttactacttatatattattcctacattacatgtattcacatatacatagtatatagttttagtgataaaaattctaaacagaaagattactaaggcttgtgatatagccaaagagaatggacccaaagctttcgatcattactgtcaagcgaatatcatttcactcaagactatcaaagccaatatttatacacatctaagaatccatattcatgctgcacccaggagttctgtctcttaatggcagaccttaatctagattgatcccagatctcaaattagataaacatcaagtaggcacagaaaacaggat

SEQ ID NO: 494181 - DNA, 619 bp, Homo sapiens
attggtaatcttaattctatctgcaaacttaatccccttttgccatatattgttcacaggtttgggggattaaaatgtagacctcttggggagtgttattcaggaggtaaactgcagaggtttgtaaacaaaaaagaatgatgctgaattaacacaatctggttaatgtaagtcagagtttatcagaattggttttgagatttcaattggattgttggcaacatgagcctaatcaaaattccactcccgggctgctatgattgatatgcaatttctaaacgtatgtttaaaatactaatacagcttgggtaacatagtgagaccccccccccatctctacaaaaattaaaaatcagcaggtatggtggtacatgctgctagtcccagctacttgggaagctgaagtgggaggatcatttgagttggggaagtcgaggctgcagtgagctatgatggtgtcactgcactccagcctgggtgacagagcaagacyctgtttcagaagtataataaaatactaatattaatattactgataataaaactactaccacacctaacatttcttgggctttatatattaggccccttttaaactaattatatgaactaactttct

SEQ ID NO: 494182 - DNA, 623 bp, Homo sapiens
ctgattggtaatcttaattctatctgcaaacttaatccccttttgccatatattgttcacaggtttgggggattaaaatgtagacctcttggggagtgttattcaggaggtaaactgcagaggtttgtaaacaaaaaagaatgatgctgaattaacacaatctggttaatgtaagtcagagtttatcagaattggttttgagatttcaattggattgttggcaacatgagcctaatcaaaattccactcccgggctgctatgattgatatgcaatttctaaacgtatgtttaaaatactaatacagcttgggtaacatagtgagaccccccccccatctctacaaaaattaaaaatcagcaggtatggtggtacatgctgctagtcccagctacttgggaagctgaagtgggaggatcatttgagttggggaagtcgaggctgcagtgagctatgatggtgtcactgcactccagcctgggtgacagagcaagaccctgtttcagaagtataataaaatactaatattaatattactgataataaaactactaccacacctaacatttcttgsgctttatatattaggccccttttaaactaattatatgaactaactttctc

SEQ ID NO: 494183 - DNA, 631 bp, Homo sapiens
taaattacaatagaaagcaagaagccaagtaataaatgtttgtataatagagagtggtggaacagagtaagaagtagtttkcacttcctagacgtaacaagaaaactccaggaaagagtagatgcttgtataagtttgtaaagaatgggtaaaaacctggaaattaaaggtacatgcatgatgaaggtggaaaacaacttgcggggaaatatcactgctactgttttaaagggaatacagagtatgaaaatgtttggtaaaaggtagttgtgagatacaaagtttgaaagagaaacaaaagccaaattataaatgttctgcaatagcatttaatctttaatatcactaaggagaaaaatataaaataaatattaagcagagtggacaaatttcactgctaagctataaacccagtccagcaaaaagactaagtattgaactctgaggtttgggggactacaaacactctctcgcttccattctaggaaagtaaagtctcttagtgttggtaattggctggaggtatcctggcttgtgggttaagtaagtgctaggctgactggatggggtcttctgcacatatgggtcatctactgtaagactctggtgctctgctgcctttgttatataa

SEQ ID NO: 494184 - DNA, 631 bp, Homo sapiens
taaattacaatagaaagcaagaagccaagtaataaatgtttgtataatagagagtggtggaacagagtaagaagtagtttgcacttcctagacgtaacaagaaaactccaggaaagagtagatgcttgtataagtttgtaaagaatgggtaaaaacctggaaattaaaggtacatgcatgatgaaggtggaaaacaacttgcggggaaatatcactgctactgttttaaagggaatacagagtatgaaaatgtttggtaaaaggtagttgtgagatacaaagtttgaaagagaaacaaaagccaaattataaatgttctgcaatagcatttaatctttaatatcactaaggagaaaaatataaaataaatattaagcagagtggacaaatttcactgctaagctataaacccagtccagcaaaaagactaagtattgaactctgaggtttgggggactacaaacactctctcgcttccattctaggawagtaaagtctcttagtgttggtaattggctggaggtatcctggcttgtgggttaagtaagtgctaggctgactggatggggtcttctgcacatatgggtcatctactgtaagactctggtgctctgctgcctttgttatataa

SEQ ID NO: 494185 - DNA, 589 bp, Homo sapiens
tttctcccaggacacaatgattattttcagcttaagatgtaggtctttgtgttagaaaagctttattttttactagtttttttttctcttctatttattttttccatctttgtggggaacaatatttatgttgatgaatagtctcttgtaatgatcaggtagcacccttatctagcatatatctgtgttcctttcaatttcatgtatatgttgctacatatatatatatacacacacatttataaaagaaacataactttgttatttctttttatttttcttacttttactatggctttcattcttatcgcagttttgtgtatcattctattgttctctgagttttgataccacacttttcatcttcttttctttcattcttttcttgaatgttgataatgttttagctctttttaaagatagctcatgttgtctgcaatttttgagactatggataatattgtgattgtgcctttcacttgtctttttcttatgttcattttctcattgaaaaatgtttatgtttttgcagattttattcatgrgactcatgagttccttaatatttgttaatattcataaaagggac

SEQ ID NO: 494186 - DNA, 240 bp, Homo sapiens
cctggagttatatgaagctaggaaaagtcagctaggaggggccatcaggccaaaaaagtttacatgaccatttaactcagccacaaatgcagagagaacaagtaatacaggcggaccggaagtcaagctgaaagatcacaggagtaagaaaaaggcactcatgccaagcatcctgctattgagagaaaatataaactcttycttccattcatggagattccctctaactaggaaggggaa

SEQ ID NO: 494187 - DNA, 425 bp, Homo sapiens
aatgctctgcctcccggggaatctttaccaagactccctaatgtggtcttatttcctggaacctgagctgaagcagttcgccacctcccagggagttggtgccttggacaagctgagcagccacgcctgccatggctgagctttcatggcaccctgcatcccagggacacagagcattcattgatctgggatactttgtcctccagggcaaaaaaggtggcaccctgctgccctggaactggactaggcccccagagcctgaggtgctaaggcagcttgcctttccagagagtgggttcattgctgtgctgctycctggcctccgcagtccaagccacagcagtgctccaccattaatgagcctttgctactgctacacccagcttcacagaagcctaggattatcccagggtccggaatgacca

SEQ ID NO: 494188 - DNA, 564 bp, Homo sapiens
atatatatgtaatacataagttatgctttacctctatttgtcttctctctctcaacttaattttgggtcttttggctttcgtggaagagacattctgagtttcttttttactgaattatttcgtctagttgaagcattttaatctatttagtggttctaaaagagggtgtaaagcccatagcctagattgcatctttatttctaggttggatttttatcagcttttttcactcaaagtatttctcaattttgtcttttattatttggtgttcagaagaagttgcctcttccattctgtgaaattcctcttatttgtggaccttttctcttctctttcatttcttcttgcaaattgacctattattttctcagtacattttggtcatttactaccttatctaatgcagacagcagcattccccacatgctgtcaaaatcctcttttccattctcttatcttagagctaaagtttrtaagtactgcctttgaaattattgtgagttatggttttactgtttcacaattagataacatgaaattccatccttccagcttccagtaac

SEQ ID NO: 494189 - DNA, 537 bp, Homo sapiens
ctgaggcccagcaaggtaatgctctattttgttcagctctcatactgtaaacaagtgtctataatcaagtgattgatttagtgccatgttttttgcatttctgcctttttttgggtaatttcactgttaaaatgacccccacatgtagagccacagtactmtctagctttcctaagtgcaggaaagctgtgatgtgccttagggagaacctacatgtattagacactcttccttcaggcatagttacagtgtgatattggtcatgagttcaatgccactgagtcaacaatatgtattaaataaggtgtctttaaatggaaacacatataaagaaggtcatgtattgactgactgatgaaaatgttatgaccagaggctcacaggtatctaaccctgtatttcacctgggagcaatggttcagtatttgctaattcagtatttgcagagatgttatagaatataactagtgtgaataatgagaactgaccatgaatagatgtcgaggtgcttttggtggcacatggagatgtgccacc

SEQ ID NO: 494190 - DNA, 609 bp, Homo sapiens
tcacattttcactccctcccaacctctctgaatcatgtgtgtcttctggacactaaaataaagactgtgcaacctcttgccggaatgtgcctccaaagatctgagagaaatttgtaaaaacaatagctaatgtttactgggacttactacatgccaaacactctgccaagtgctttgttttttttttcagctataaatattttttgtttctatagcatttaagagaagcctataaaaagttgttgttaaatcaaatttaagaaaattttacatggaaattttactgaatcctcataggatccataagaggttggtactcacattcccatttaacaagtgaggaaacacaggcttagagaggttaagtaatttgcctcacaccttgaattcagcagagtggggtttcaggtgtgctttcgtctgactccggcactgagtaagcactgtgcttacttctgtgatagtgaaggtcacagaaragccgggctcagcctgagacaaaggctactgctgccagaaacagcaggaaagacggtgagagccaggctgatgaacaggcctccctttaactcaagttcaaaatcacagtgggatgaaaatctgagcatt

SEQ ID NO: 494191 - DNA, 620 bp, Homo sapiens
taacccgtggaacaaagggaggaccaaagaaagtcatgcccttccctttttgatggtgtccaagaagttccacttaggaactcccatttcgtttccatgtaacttggtcacatggacacatctgttgcaaaagagattgggaaatgtagttattgtttttgtcaaccatttgtccaaaaacaaattggggatcctattctcaaggaaacagtggataaaataaactgaggacaactaayagtctctgatacttccactctcagctgtttgcagtggcctgtagtgaagtggctctttctgcccttgctgtgcgtctcactccaggacctcctgaagagcgctgatcctgcactatacatgtggttcttctcctatgcctcccgacttgtcagagaatttcttgaggacatggatgactgtctggcagcgacagttccaggtttttatttttgtttctttaaatagagccttctgtttagcttaaatgtggaaacataaccatagacgtctgagaatgtgaacacaggttataattctgcgcaagaaacatgcattgcaagagtcccccaactgctgagtcagaggtctgtttgaggaggcgatagttgagttaaggtcag

SEQ ID NO: 494192 - DNA, 286 bp, Homo sapiens
tagccaccagtctatggtattttgttatagcagctcaaatggactaagatagagggcagggatttttgtgaattttcttcactctacatctccaacatctaagaaaaagccagacacawtcttggtgttcaataaatatttgttgaattaataaataaattatagtggacatttgtagttgttgcctttctgcattcattcctatctttctgctaagagcaccctaaaccttctttggggaatctctcttttctcacccttagtgcacatggtttaggtacaactg

SEQ ID NO: 494193 - DNA, 286 bp, Homo sapiens
tagccaccagtctatggtattttgttatagcagctcaaatggactaagatagagggcagggatttttgtgaattttcttcactctacatctccaacatctaagaaaaagccagacacattcttggtgttcaataaatatttgttgaattaataaataaattrtagtggacatttgtagttgttgcctttctgcattcattcctatctttctgctaagagcaccctaaaccttctttggggaatctctcttttctcacccttagtgcacatggtttaggtacaactg

SEQ ID NO: 494194 - DNA, 286 bp, Homo sapiens
tagccaccagtctatggtattttgttatagcagctcaaatggactaagatagagggcagggatttttgtgaattttcttcactctacatctccaacatctaagaaaaagccagacacattcttggtgttcaataaatatttgttgaattaataaataaattatagtggacatttgtagttgttgcctktctgcattcattcctatctttctgctaagagcaccctaaaccttctttggggaatctctcttttctcacccttagtgcacatggtttaggtacaactg

SEQ ID NO: 494195 - DNA, 437 bp, Homo sapiens
tatctcattgtagttttgattgtattttcctgatgactagtgatgttgagtaccttttcatatacctattggaatggcagctatttattgaacaactatgatatccaagagggcagatatcatttgtttaccactgtgtccccactgctaaagcatctggcacatggtaggtactcaataaacatttgttgaatgaatgagctactattcatatatgccaggtacttcacagtgaattcttatcaaatgtttggaggtargcatggtcatgcctattttatgaacggtgaaactgaggctcagaaaagtaacttggtcctggtcacaaacccaggtgaggagaatatagtacttgaacccaggtctctctgatgttaacatgtaaactcttcctctacatctcactggcttctctgcttctggccattttaatatcc

SEQ ID NO: 494196 - DNA, 437 bp, Homo sapiens
tatctcattgtagttttgattgtattttcctgatgactagtgatgttgagtaccttttcatatacctattggaatggcagctatttattgaacaactatgatatccaagagggcagatatcatttgtttaccactgtgtccccactgctaaagcatctggcacatggtaggtactcaataaacatttgttgaatgaatgagctactattcatatatgccaggtacttcacagtgaattcttatcaaatgtttggaggtaggcatggtcatgcctattttatgaacggtgaaactgaggctcagaaaagtaacttgktcctggtcacaaacccaggtgaggagaatatagtacttgaacccaggtctctctgatgttaacatgtaaactcttcctctacatctcactggcttctctgcttctggccattttaatatcc

SEQ ID NO: 494197 - DNA, 637 bp, Homo sapiens
aaagctttttttctctaaaattgtctcatgaaaatttcaaacatacagcaaatgtgaaagagaagcaaattttacagagaagaccatatacctaccacctagattctatccttaacattttaccgtgyttgttttatcacatatctagccacgtaaaatagaaagttttgttaaaaaggtaaacatatttcacaagaataaatgaaataaagaatagcaaaaagaggataactctttactgaataaagaactgctaaggatagtagttactgcttttgattacagccagattctcataaatgatcatctgcattttttaaaaccatatcactttctgttaatagagacaactgaatctaaactaattctatagtagattctaactattatatcttaatttgaaaggcaaggttaggacagtaaaggtagaagaacaccagcctcttggaaagaacagatcctccaaaaaaacaaaaacctttttagtttgtttttgagttataaaaaaaggattagggtaacgatttttctaatcattaatgtatcagaaatgaaaactattcaacactttgtctactgtaatacatgtacatgagaaacaactattctacttcaaacctctaatacaacaaaagaa

SEQ ID NO: 494198 - DNA, 637 bp, Homo sapiens
aaagctttttttctctaaaattgtctcatgaaaatttcaaacatacagcaaatgtgaaagagaagcaaattttacagagaagaccatatacctaccacctagattctatccttaacattttaccgtgcttgttttatcacatatctagccacgtaaaatagaaagttttgttaaaaaggtaaacatatttcacaagaataaatgaaataaagaatagcaaaaagaggataactctttactgaataaagaactgctaaggatagtagttactgcttttgattacagccagattctcataaatgatcatctgcattttttaaaaccatatcactttctgttaatagagacaactgaatctaaaytaattctatagtagattctaactattatatcttaatttgaaaggcaaggttaggacagtaaaggtagaagaacaccagcctcttggaaagaacagatcctccaaaaaaacaaaaacctttttagtttgtttttgagttataaaaaaaggattagggtaacgatttttctaatcattaatgtatcagaaatgaaaactattcaacactttgtctactgtaatacatgtacatgagaaacaactattctacttcaaacctctaatacaacaaaagaa

SEQ ID NO: 494199 - DNA, 442 bp, Homo sapiens
aggttgggggggatgggctgtttattattgcaacataacctatcccactatgactgatacattcacatatatcaacatggcaattaaatctctttatccaaaactacggtaggcactaatgttatgaatatttggaggaggggtatgatacaaaatacagctcttacctttagggatattataacagaattacataaaaygaggagaataaaaggaaatcaactattctagtgaaaagcatactcgacaatgagttataaaatgtgagttttaatcctactctctctatttactagccaaatgtcctatgccaatctcttaaccactaggaacctcagtttccttatctgaacattaacaaagcacaaagcaatatacagatgcatcatatctccactaaataaaactccaactttaaacaaagataaattaaaattgatta

SEQ ID NO: 494200 - DNA, 556 bp, Homo sapiens
ggggattattgatacagatatcatgtctcaccactttaaagatcaactrtagattttgtagaaatgctttaaaaatgaatgaaaaataaatatataagcctccagtatttgatcttcaaataattactcaaaaaattaactgtatggaatgaggaggcacacacctatctatagtcccatctacttgggaggctgaggcaggaagattgcttgagcccaggagtttgagtccagcctgggcaacatagtgagaccctgtctcttaaaaaaaattcagaaaattatatgatagtaagtagaggctaaatgattgagactatcataacaaccattattgctaattttaatctaattcaaataataatgtgtcccaaaaaaatctaaaaggaaaacctttgtgaaaatgattattttccatttaatttgttttggtgatttttccgttatattcttgtgtttaattttagattgtaaactctttgtaatataaactgtatttatagcttacattctctacaatgttggtaaagtatcatggacatattttatgcaataa

SEQ ID NO: 494201 - DNA, 431 bp, Homo sapiens
tggctctgtccatgggcgagcactgtccctgcatcacatatgacaagaatgcctggtgcggtgcaagtgcagatggggccactggcctccaggacactcactggggatgccaaggccctgctcaccacccacccccactgccctcagcaatgcgggtctgaggcagcagcccatgcacggccctgtgacctgcarctgagggctgagattactcaagtccacacgcagacacacacacgacacacatggacacagacacccatacacacacagacacacatggacacacacacccatacgcatacagacacccatacacacacagacacacgtggacacacacacccatacacacacagacacccatacacacacagacacacgtggacacacacacccatacacacacagacacccatacacacacagac

SEQ ID NO: 494202 - DNA, 450 bp, Homo sapiens
gccctgtctcctggggtccgcccagcaccacggcaaagcagctctgcaaggtggaatgagaggctcggggcgggctcggggccagccgggcctcctcagcccacaggggtgatatatggggacgtcrggcactgctggggcagggccaccctcacctggtccaggtactggggcagcacctcagccaggaccttctctgtgccctggctgatttctgacggcttcagcaccacgcaactccctgcaggggcagatggggacgtcgttgggggagcccagggtccccatgcccaaccaggggctgggctcagagggcatgtgaggcccagggtacctcagagcaagattccaggggcctctttgggaggggctactgggcggggagagcatggggttcggaacgccctcctcacctgcggcgagggcgcccaccaggagcaccagggtcag

SEQ ID NO: 494203 - DNA, 450 bp, Homo sapiens
gccctgtctcctggggtccgcccagcaccacggcaaagcagctctgcaaggtggaatgagaggctcggggcgggctcggggccagccgggcctcctcagcccacaggggtgatatatggggacgtcgggcactgctggggcagggccaccctcacctggtccaggtactggggcagcacctcagccaggaccttctctgtgccctggctgatttctgacggcttcagcaccacgcaaytccctgcaggggcagatggggacgtcgttgggggagcccagggtccccatgcccaaccaggggctgggctcagagggcatgtgaggcccagggtacctcagagcaagattccaggggcctctttgggaggggctactgggcggggagagcatggggttcggaacgccctcctcacctgcggcgagggcgcccaccaggagcaccagggtcag

SEQ ID NO: 494204 - DNA, 453 bp, Homo sapiens
gctgccctgtctcctggggtccgcccagcaccacggcaaagcagctctgcaaggtggaatgagaggctcggggcgggctcggggccagccgggcctcctcagcccacaggggtgatatatggggacgtcgggcactgctggggcagggccaccctcacctggtccaggtactggggcagcacctcagccaggaccttctctgtgccctggctgatttctgacggcttcagcaccacgcaactccctgcaggggcagatggggacgtcgttgggggagcccagggtccccatgcccaaccaggggctgggctcagagggcatgtgaggcccagggtacctcagagcaagattccaggggcctctttgggaggggctactgggyggggagagcatggggttcggaacgccctcctcacctgcggcgagggcgcccaccaggagcaccagggtcag

SEQ ID NO: 494205 - DNA, 545 bp, Homo sapiens
cctccctcctgagaaccttggcccttcctgcacttccctggccactgtcattctggtttgctgaataggcatctcccagcaggtgaaaggttccaggatgtagggactagttccagcacccaggaaggtacagagcaggggccggacaaacgtttgctgcagattcagcctctcaaaaattttctctgacctcctgccacytataccctctccagaggccactagccccttcctccctcccaagggcctccatccaacccacctgccaggttccagctcctggggcactccaagttcaaggctgatccgtgccagggaccctggctctctcccagggccaggcacaggttaaacattgataggcaatgcctgcagcattgccttatcccctcacctcctccatgaagcctccctgatgcctgggccaaggaccccaagtacttggagactgtctggtggctcttttcctggttagacatgcctgagagtgggcttctctggacagatggggtctgtcacatagccccagaagctggcccagccag

SEQ ID NO: 494206 - DNA, 545 bp, Homo sapiens
cctccctcctgagaaccttggcccttcctgcacttccctggccactgtcattctggtttgctgaataggcatctcccagcaggtgaaaggttccaggatgtagggactagttccagcacccaggaaggtacagagcaggggccggacaaacgtttgctgcagattcagcctctcaaaaattttctctgacctcctgccacctataccctctccagaggccactagccccttcctccctcccaagggcctccatccaacccacctgccaggttccagctcctggggcactccaagttcaaggctgatccgtgccagggaccctggctctctcccagggccaggcacaggttaaacattgataggcaatgcctgcagcattgccttatcccctcacytcctccatgaagcctccctgatgcctgggccaaggaccccaagtacttggagactgtctggtggctcttttcctggttagacatgcctgagagtgggcttctctggacagatggggtctgtcacatagccccagaagctggcccagccag

SEQ ID NO: 494207 - DNA, 449 bp, Homo sapiens
ctggtgagaggagtggggagggctatcaggcccagagctcagcgccactgccccagctcacggccggctctgctgcaggaccccttgcagtggctcggctccccaccaagggrctcctgccccagccccagctccagccccaaggagcagggggacccgcgcccaggcgtccagggctactcggtgctcaacagcctggtggggcctgcctgcatcttcctgcggcccagcattgccgccacccaactcgtatgtacggccacccgcccgccagcctgcctgcccttgcccctctcccaccagctcacctgcccttgcccctcgcactccagcccacctacccttgcccctcgctttgcctctcctggagctagggggaagaggattgagtggggacatcagagcaaaggtacacagatctggggtgggggtgcagagaggggagagag

SEQ ID NO: 494208 - DNA, 360 bp, Homo sapiens
taaaaccctcctgtcactttcctgtggggagatgctgctttccagaatcctctcagtgttctccttacttataccaagtaataaaacccttgttcatctaaacctgttttttttttttttttttttttgagacggagtctgctctgttgcccaggctggagtgcagtggtgcaatctcggctcactgcaagctccacctcctgggttcacaccattctcttgcctcagcctcccgagtagytgggactacaggagcctgccactacgcccggctaatttttttgtatttttaggcagcaaagaccactggtggacacagtgaatgacggggcggaggaccatcgtgggcaggcgctgcag

SEQ ID NO: 494209 - DNA, 573 bp, Homo sapiens
gtcactccgttcagggtccctgatttcctgcaacagcaactctgttcagaagagggcaggacagacagtggcaggcctcatcagaacccgaaggccatgcagaaccttctcatgacagcctcctgggggagacagggagccaacgggagtggtagcagctcctacaggcctcccactctctggaggatcacaaagtgtcctgtcatgactcagatgagcctcagtttgagctttcgcctctgtagcctgtgtggatatgttcagggccaccaggktgccatggtggagccgttccctacacagcctggagggcttgtgtgaagtggctgtttataatgagcagacttaggagaaattgaataaagaggttttcatgaaatgtgtaagtgggaatatgttgcctcaaaaatccaagtagccccaacaaacgttattagaaagcctgtcttagtctgcaaattaacaccacaaattggacaactgataaaagaaatttatttctcccagttttggaggctgggaagtccaagagcatggtgctggctttgggcaagggtcatcttgtggcagaag

SEQ ID NO: 494210 - DNA, 589 bp, Homo sapiens
gctgcccttggccaggactttcacasggtggagccaaggcccagagagggcactgaatctctccaggtcacacagcctgtcagggaggtggggccagagccaggtcacacatgtgcacacaacacacacgcacacatgctcacgcacatgcacgcacacatgctctcaagcacatgcacacatgcacacacatgcacacacgctctcgcgcacacacgcacacatgtacacacacatgcatgcacacacgcacacaatactctcatgcacatgcacacacgtacacacgcacacatgcatgctgtcacacatgcgcgcgcacacgcacacatgctctcatgcacacacgcacacatgtacacatgcatgcacacatgcacacaatactctcatgcacatgcacacacatgtacacacgcacacacgcatgctgccacgtacacatgtgcgtgcacacacgcacacacatgctctcatgcacacgcacacatgtacagatgcacacatgcatgcacacacatgcacacacatgcacacacgcgcacacactgccaggactgggggctgctgtttctgagggctcctggac

SEQ ID NO: 494211 - DNA, 574 bp, Homo sapiens
ctgcccttggccaggactttcacacggtggagccaaggcccagagagggcactgaatctctccaggtcacacagcctgtcagggaggtggggccagagccaggtcacacrtgtgcacacaacacacacgcacacatgctcacgcacatgcacgcacacatgctctcaagcacatgcacacatgcacacacatgcacacacgctctcgcgcacacacgcacacatgtacacacacatgcatgcacacacgcacacaatactctcatgcacatgcacacacgtacacacgcacacatgcatgctgtcacacatgcgcgcgcacacgcacacatgctctcatgcacacacgcacacatgtacacatgcatgcacacatgcacacaatactctcatgcacatgcacacacatgtacacacgcacacacgcatgctgccacgtacacatgtgcgtgcacacacgcacacacatgctctcatgcacacgcacacatgtacagatgcacacatgcatgcacacacatgcacacacatgcacacacgcgcacacactgccaggactgggggctgctgtttct

SEQ ID NO: 494212 - DNA, 574 bp, Homo sapiens
ctgcccttggccaggactttcacacggtggagccaaggcccagagagggcactgaatctctccaggtcacacagcctgtcagggaggtggggccagagccaggtcacacatgtgcacacaacacacacgcacacatgctcacgcacatgcacgcacacaygctctcaagcacatgcacacatgcacacacatgcacacacgctctcgcgcacacacgcacacatgtacacacacatgcatgcacacacgcacacaatactctcatgcacatgcacacacgtacacacgcacacatgcatgctgtcacacatgcgcgcgcacacgcacacatgctctcatgcacacacgcacacatgtacacatgcatgcacacatgcacacaatactctcatgcacatgcacacacatgtacacacgcacacacgcatgctgccacgtacacatgtgcgtgcacacacgcacacacatgctctcatgcacacgcacacatgtacagatgcacacatgcatgcacacacatgcacacacatgcacacacgcgcacacactgccaggactgggggctgctgtttct

SEQ ID NO: 494213 - DNA, 471 bp, Homo sapiens
gcaccctgagggctgagctgaggtgccgagtggacgagtggtgatcacccttccagcaggcaggttcccagccccagccaagcagtgtttctccaggagccggacagcctctctgtctccatggcaggtaggctacgttctgaagcagaggtggcctcatgggtcaggctcaggttccagggtgggtgggcagggtggaaccaagacagccccgctgaacccaggtccttcacragagggtggggcagggcaccccaggctaaggtctgagatcccaacgggacagggctcacggctgcccaagtgcaattatgggagatgccagggaccaggctgttccgggagatgagcgcctcactgggcacgtgtgacctcgggcctctccctgagccccagctccttgagcatcaaagttggggctggacaagaagcccttagcttcccttccagacttgacactcgatgcttctg

SEQ ID NO: 494214 - DNA, 542 bp, Homo sapiens
gctgcgcggcgactccggggactccagggcgcccctctgcggccgacgcccggggtgcagcggccgccggggctggggccggcgggagtccgcgggaccctccagaagagcggccggcgccgtgactcagcactggggcggagcggggcgggaccacccttataaggctcggaggccgcgaggcttcgctggagtttcgccgccgcagtcttcgccaccagtgagtacgcgcggcccgcgtccccggggatggggctcagagctcccagcatggggccaacccgcagcatcaggcccgggctcccggcaggctcctcgcccacctcgagacccgggacgggggcctaggggacccaggacgtccccagtgccgttagcggctttcagggggcccggagcgcctcggggagggatgggaccccgggggcggggagggggggcagrctgcgctcaccgcgccttggcatcctcccccgggctccagcaaacttttctttgttcgctgcagtgccgccctacaccgtggtctatttcccagttcg

SEQ ID NO: 494215 - DNA, 696 bp, Homo sapiens
ctgaagtggacaggatttggtactagcctggttgtggggagcaagcagaggagaatctgggactctggtgtctggcctggggcagacgggggtgtctcaggggctgggagggatgagagtaggatgatacatggtggtgtctggcaggaggcgggcaaggatgactatgtgaaggcactgcccgggcaactgaagccttttgagaccctgctgtcccagaaccagggaggcaagaccttcattgtgggagaccaggtgagcatctggccccatgctgttccttcctcgccaccctctgcttccagatggacacaggtgtgagccatttgtttagcaaagcagagcagacctaggggatgggcttaggccctctgcccccaattcctccagcctgctcccgctggctgagtccctggyccccctgccctgcagatctccttcgctgactacaacctgctggacttgctgctgatccatgaggtcctagcccctggctgcctggatgcgttccccctgctctcagcatatgtggggcgcctcagtgcccggcccaagctcaaggccttcctggcctcccctgagtacgtgaacctccccatcaatggcaacgggaaacagtgagggttggggggactctgagcgggaggcagagtttgccttcctttctccaggaccaataaaatttctaagagagct

SEQ ID NO: 494216 - DNA, 514 bp, Homo sapiens
  misc_feature (1)...(514): n = A,T,C or G
cgacgggattcccatccttttaagagcacttttcagccacttcagggcgcagagcagtggacgggaaatcaggaggtgcgcatccctaaatggggcaatgaccccttcacgccctacaaggctgtgacaaggagagaatgaaagactaggggtcttcacaacctgcaaaacttccgccaggccgaggactgtaaaacaagggaagccagcaagtcagagggtcaagggagtcggccccgcgttgggacccgttcccctacttcaaccaggccggagcggggccttcccgcctggcctggggagaagggctctccagaggccactacagaccccagggactgctcgtgcacgggcgcggccgcgacacccggccccraacacccgnntggcccagccaggctgggcctcaccgtgtcgccgctgaaacgcacagatacccgcgcgggaagcgaccagccgagcagccgccgtgttgccagcatcgcggcgggccagatgggtcacctcacgctgt

SEQ ID NO: 494217 - DNA, 514 bp, Homo sapiens
tgccgtcgccgctgccaccggtgccttgcgcgcttctccgctctgggggccgaaggacgcagggctttgacgtcccgagccctgcgccscaccccgtgcgcttttacgtcacctttcaccggttcaacacccgctccccgatctgcgcatgcgcccgcccgaggcctgcgtttgttcccatggcaacaggcccctcatggatgccgccacgtaccgttcttcctgcggcttggctcgtcctcaggtctaagggcgacctcaaagacccctttacccgcacccccaaggccccgcgctgctgcctaagttagtgacaatggccgtagggcaaaccttcgggattacttgcgtgccgggccccggaccaaactggtcaagagcaccgactggagccaaccgtctgggttcaaatctcagcaccacccccactagcgatttcccccaggcaagtttctcacctcagtatgcctcagtttccccatccgtaaaatggggaaaatgacgatctcattgg

SEQ ID NO: 494218 - DNA, 515 bp, Homo sapiens
ctgccgtcgccgctgccaccggtgccttgcgcgcttctccgctctgggggccgaaggacgcagggctttgacgtcccgagccctgcgccccaccccgtgcgcttttacgtcacctttcaccggttcaacacccgctccccgatctgcgcatgcgcccgcccgaggcctgcgtttgttcccatggcaacaggcccctcatggatgccgccacgtaccgttcttcctgcggcttggctcgtcctcaggtctaagggcgacctcaaagacccctttacccgcacccccaaggccccgcgctgctgcctaagttagtgacaatggccgtagggcaaaccttcgggattacttgcgtgccgggccccggaccaaactggtcaagagcaccgactggagccaaccgyctgggttcaaatctcagcaccacccccactagcgatttcccccaggcaagtttctcacctcagtatgcctcagtttccccatccgtaaaatggggaaaatgacgatctcattgg

SEQ ID NO: 494219 - DNA, 534 bp, Homo sapiens
aggagggtagcgggaggtcagcacgggtgactggctggcgacctcacctctctgagcctttcttgtgcatcgaatggggatcaattgcactttggccacggcgggctgctgtgaggtgtcagtgtgatcttagagccatgtggggtgatgggggcattgcactcacacaccacccagggcctcctagcattgccttctcaaatctcaggcacgcagctccactctctgctctcagtcacctcagccacaaagtggacagagtgggatctgtcaccataggaaattattcggatgccacagaagcctccttcctggtaggtaaaccaagcagcctgcccaggcagaagagctcatgggccaygttaaggcgctcagatcccatggtttattgaattcatttaaaacaaacacaaggttattgtttgtttttcaactgtgtggtggtaggaagtgctcctgacggttttcccatggcaataatttactccttgatttcacccaccactactgtgacagctttctctcactgattca

SEQ ID NO: 494220 - DNA, 590 bp, Homo sapiens
tggaaaggccccctgttccttttcctgtaatcaccattagatgattgaatgactggaagtgtgataaaggcagaaaatctcaaagccgtttctttttttttataccctttccacctcattctcttggaaaacatggaaaaaaatcacaaaaacaaaactccaggaagaatagcagctcatgcttatgatgtgtgtcccccacccagactcacatcttctgttgctttctggacctgggtatccacctctgaacttctcaacacggtctgactctcctcttcttcccagctctcccttcccaccgccttctcccctgaccatcgtggagcatccaacaagcctccccacatcctcctggcygccctccaagctgttagaatagtgactcagggcccgagcccaccacttccccatggccacctcccctggccactccacatgctccccatccacgccctcctcagtctctgcctccacccactttggggttttggttggtgattttgtgcctggattgctttggcctccttctccagaccccactccaagccccacttcgtcaagggcactttcctgaccgccgactctgg

SEQ ID NO: 494221 - DNA, 524 bp, Homo sapiens
gggggcccaggtggtgcacccgcattccccgaggaggccaagcgggggaggcagtggagctagacaggtatacagagaaagacggagaggagagagagagatggggagaggagaagagagaaagagcttggagagggatggagagagaaagggtgagaaacgaagagagatgaagagggggaaagaaagtgagggaaggaggaaaacagggagggggaggggrgagagagagagagggagagcgagcacatgccagccggccagccagcggacagcagaggcgaaggattggggtgggggtggtcaagaaaggggccgacagctccttctccaggggctaagaggtttcacagggaatcagtggggcctgggagccttccggatggtccgcagggaaaggattgttatctcagtttttttacgagggaggaaatggaaactcagaggcacttcctggagcccacccggtgcggggctctgaagaaccggagcccggcttccccgggacctgctgtgagaccttg

SEQ ID NO: 494222 - DNA, 524 bp, Homo sapiens
gggggcccaggtggtgcacccgcattccccgaggaggccaagcgggggaggcagtggagctagacaggtatacagagaaagacggagaggagagagagagatggggagaggagaagagagaaagagcttggagagggatggagagagaaagggtgagaaacgaagagagatgaagagggggaaagaaagtgagggaaggaggaaaacagggagggggaggggagagagagagagagggagagcgagcacatgccagccggccagccagcggacagcagaggcgaaggattggggtgggggtggtcaagaaaggggccgacagctccttctccaggggctaagaggtttcacagggaatcagtggggcctgggagccttccggatggtccgcagggaaaggattgttatctcagyttttttacgagggaggaaatggaaactcagaggcacttcctggagcccacccggtgcggggctctgaagaaccggagcccggcttccccgggacctgctgtgagaccttg

SEQ ID NO: 494223 - DNA, 420 bp, Homo sapiens
ggctcggcggtcgcgaggcctcggagcggcgtgggccaggaaagaagaggaaaggcgaatggaacaggagacagggaggcggaggaggaggtgccgagagccggctgctcggtggccgcaactagttcggctcagctagttccaatggcaggsggagggggcggaagtgggtagcgctcgtcttgaatcactccaggggaggggaaggaaagggaggcggggcaggctctccgcgagcccctccccagctccccgccgcccccacctcacgagctctcgcgatagcggtgcaagcccaccccggccctccggctgcggcatggggactctcaccttctggtctcctctgctgctagggacgacgcccagcgtgtgcgccgcggctgcccggcccccctgtccacccggttaggagtcatg

SEQ ID NO: 494224 - DNA, 420 bp, Homo sapiens
ggctcggcggtcgcgaggcctcggagcggcgtgggccaggaaagaagaggaaaggcgaatggaacaggagacagggaggcggaggaggaggtgccgagagccggctgctcggtggccgcaactagttcggctcagctagttccaatggcagggggagggggcggaagtgggtagcgctcgtcttgaatcactccaggggaggggaaggaaagggaggcggggcaggctctccgcgagcccctccccagctccccgccgcccccacctcacgagctctcgcgatagcggtgcaagcccaccccggccctccggctgcggcatggggwctctcaccttctggtctcctctgctgctagggacgacgcccagcgtgtgcgccgcggctgcccggcccccctgtccacccggttaggagtcatg

SEQ ID NO: 494225 - DNA, 590 bp, Homo sapiens
gtcagaccccttcgcaagtcctacaaggccccaccttatttttctgggtctccctcttatccaactcttccccagtacatacctggaattttcataatgtctggaacatgctatgccttttttaccccttcatatgcgtccagaatgttttcttccccatacggaaaagcaagtcccttctgaacttttaatactcatttaattcaactataatttctgcaaatcattccttcatgttattttctttcctacttctatcatctattacaatatttattacgttatgtttgaaggatttgaagttttccgtatcaaaccaagaggtccttgaggggatcagaccaacaggggcaggtctagcacayagtatattgagcctccttagtaaatattcattgactgaatgaagttagttaaatgcctttttggtgattcaagattatcatgaacactcctcctttcttggtccatttctttgtagctctttggggctggagaagagtataggatgatttgttcctttaaaaatgtacttaaggccggggtggtggctcatgtctgtaatcccagcactttgggaggctgaggca

SEQ ID NO: 494226 - DNA, 638 bp, Homo sapiens
acttagcaccattcattttaatatatgttttactacatatcttctggagctagactttcaacaaatgtctttactattaacaagaaggacaacttaagtacatgtaaatttttttaaaagagctttttttgtatttaaaaaaaaatccctttctaactttctttatgccattttcccaactcgtaagtattcagatccctggtgctacttcaagcctctcactaaattttttttttttttcagatggagtcttgctccgttgcccaggctggagtacagtggcgtgatctcggctcactgcaacctccgccytctgggttcaagcaattctccagcctcagtctcccgagtagctgggattacaagtgtgtgcaactacgcccagctatttttttgtatttttagtagagatgggtttcaccatgttggctaggctggtctctagctcctgacctccggtggtctgcccgcttcgtcctcccaaagtgctgggattacaggcatgagccattgtgcctggtctctcactaaagctttctgaagaagtccctccccaaacactagcctctagtgtttcaaatgatctcctttattccttttctcacatcagtagaagcccccattctttcaaagagttg

SEQ ID NO: 494227 - DNA, 623 bp, Homo sapiens
ttaattgcttgaatgtacccatgcagaactcggtactatacggagttgcacttttttctttttctcaaaaaagggcaaaaatgaaaggctgaggagacactttggagaagttagctactaggggacagaaaatggaagcttaactttcatgtaacagcttaattagagtttcatagataataataaaaatgcccatttcattatcagatagctctttttcccacaaatgtagggattacatttaaaatgttttcattctaaaaatttattacttattggaacatttaagtttcaggattaaacgtgaactaccttaaatttgtgaaatcagtggaggttagatgccaaaagtatagaagaataaagactatagaaaatgggaaaagggttttttagatcatttactccccgcttgaaaagctacatgccaaatatagaaaatatatagaaatgcctttattacttttaagytctatttaaatgactatggttttataggtttaaaaaaactgaaagcagggtttcaattaatttccatgtgtgtgatcttatgtaagatgtcatgagttatagatgttttataaacagattactccatagtcatataattatatatttccaga

SEQ ID NO: 494228 - DNA, 603 bp, Homo sapiens
ctctaacaatttaagtcttaacaagaacattatgtatactaacttggatcagagccaaatctagatactttttagccaaaaaagcataaattccacagttatttaacacccagcctctactgtagcctgagtcccctagcacactacttctgtggcaaagtacatattgatggcaaggctctgcctcaatgcccatattagagcgcttaaaatctcttcagtgtggcaactcttaaacttcacttcattaaggagaacttgwcaaataaaagagctctaatgaatcattttatacagataagaaatgggaattaatattagctatttgtttattagcaactttatcacagcagtaaaaatagccattgtgattatgccaaaatccacaacatgtcagttgggtttttctggattctattattaacatgacatgaacaagataagatagcaggggagaggaagactacagaactctttaaagaaattgaacaaaaaaggagtaagaaaaagtgggggaggaaaatttaacatagcagttgagagagaaaaacagttaatatgtttgacatagtaccctcttttctaaaaaatgtaaaggtcata

SEQ ID NO: 494229 - DNA, 543 bp, Homo sapiens
ttcttcaggaaattgctgtgtattggctttcaaatattttgccatgtgtttgtcctgtccacaactagaatggagctgttttccccaaacctgagtttctgtttacacctgcctcaaaagctgtctgaagcagggctccacacccagttttgtctgacctcagtttcctttttgtttccttgggtttccctttatttttcmcccttaagcctttcctggcttccatattcttcttccagccctgacggctgtgtctcaagggtctgcaatggtgaacgtcactttgctttcattccttcccatccaagtgctggttgggccgggggaggtggtgggtgcagaaccctgctggaggcagctctttagccctttggaaccatggttcataccccacttctcctctgtgtgcctccttccccttccccagaaaggccttagttaaggttattagcgtgactggcaataataataccattatatgggtaaggatgatacaagtgggttcaggaggtagagggtatgagcaatttggatgaaaggaga

SEQ ID NO: 494230 - DNA, 623 bp, Homo sapiens
gcaggtgaatacgttaggagagaattgtgagttgaaaacatacatttaggaaaacataagatgcttgagaagagcaactttgtcttgtttactctttattctcaactccacacataaagactgaaccttcagcaaatgctgagctgctactgctaatgttgaactgatactatcacccacttccaacctcccttgattagaaaactaatagatgcaagtctcctgacacataataaggaygcaataaatggaaatttcattgataacttgataacttggacaaggacagccctttttgtttctattatatattctagaatataaaatatgaatacatgacaaatgaccaacattacaatatatactgaagtatatggggcaagtgctattaaataaaggacatttaaattattttaagatactctatcaatattttaaaagcatacaagtttgtggcataatcagtattgaaatgaaatcaattctaaatcatgtttgacttctagttagaggtttatattctttcatttaatcagtgtttaccttgtattctgtaaattcatttggttttcactgggcttttatgtcattaatttcttatttaataatttgtaacatcccat

SEQ ID NO: 494231 - DNA, 648 bp, Homo sapiens
actcttatctccaaattgatgatatgtattacagagcagttgccacctaactgaataactcatatcaatcctaactgaaagcacaacagcacttaaatatataatctagcccaaacttaaacctaaggtagggatttctataggaacaagaaagcatatatatgaactgtattttttcattgtttcaattaattttaacctgtggtataagctatgtgctttccagatttacacatatataaaaatttgacatataattcgagagaattaatggattttatagtgaacatctaaggactgctaggtatttctggacctcaggtttaaaaacatgggaataactcattgatggtagaaccgtagtatcaatctggcatttaagatatggtatatttttgcatattctgaggaaggttcttctttttataagacacagaaatagaaataatagtattgggaakaattttaattagatctaagaataacattcctaatgtggatataaaaattaagatgtgtttctgggattctcagtaaagcttatattttatgatatagtcattacataattttccagaactataatagtttcagaacaaacctactgggagggccaatacgggagtcaggaagcactcaagaagttaa

SEQ ID NO: 494232 - DNA, 487 bp, Homo sapiens
gctgccaatagcactggaaaggaagataataattcaaatcccaattctgcatctactagtggcatggcattgaacaatttgcttcatccctttggacctcagttttctcatctgcacaatgtaaagaaaaaactttgtgrttcttaactagaagtgctcaccaaaatcatctatggacctctattaaacatacacaagccaagattcatacaaagagattctgattcagtaggtccacagggaggaggagagcaagaaaatgtctgtttttctaaaatgatccataaatttcacagtctgtagtttcagaaattccaggaattctcaatcatttatttgcaagaatttattaaagatatggtgtgttctttttattttaaatcctctggaagaaatacactagatgtttcaacattgacttaattcattttaattattccattaatcatcaattttaatggtcaatttaattattaacaaatgagtt

SEQ ID NO: 494233 - DNA, 586 bp, Homo sapiens
ataatcactggggtgtcttttggtacctccttgccatatcttgacagaaaattgacaagtacagtggtcatggactaagaaggacatggtgawcaggaagtcagacctctcagggatgacattctgggtcacaattagataagcgatcaagacaagcatagtcaagggttcttggaagagtgagggaactttagaatgcaccggagaggataacaatagcaacagctgaggactcaaggtcaccttcagaggtggggcctgtagtttgttccaccaaacttgctttgtatattttccctggaaaagaaaccaaccagaatctttgagcagctatttctagtacagacagttaggtcatgattctgtcttatacattttagggaagtagaagttacagacaaagtcataaatcgatacatggaggttacattggtttggcccaaaaaggtagaacatcttgaagcaggggcttacaggtcataaatgcgttctttaatttgcaattagttacaggagtaaaacttttctaaaaacttggagtgagaataaaggaatgtttaggttaagacaaggaaggctgttaacc

SEQ ID NO: 494234 - DNA, 586 bp, Homo sapiens
ataatcactggggtgtcttttggtacctccttgccatatcttgacagaaaattgacaagtacagtggtcatggactaagaaggacatggtgatcaggaagtcagacctctcagggatgacattctgggtcacaattagataagcgatcaagacaagcatagtcaagggttcttggaagagtgagggaactttagaatgcaccggagaggataacaatagcaacagctgaggactcaaggtcaccttcagaggtggggcctgtagtttgttccaccaaacttgctttgtatattttccctggaaaagaaaccaaccagaatctttgagcagctatttctagtacagacagttaggtcatgattctgtcttatacattttagggaagtagaagttacagacaaagtcataaatcgatacatggaggttacattggtttggcccaaaaaggtagaacatcttgaagcaggggcttacaggtcataaatgckttctttaatttgcaattagttacaggagtaaaacttttctaaaaacttggagtgagaataaaggaatgtttaggttaagacaaggaaggctgttaacc

SEQ ID NO: 494235 - DNA, 641 bp, Homo sapiens
gactgcctcttttctaaagcctccctgaattcctcataggctcagttcacttctctatcttcctagtttccattttgattttgcttctatacctacacattctgcatgaaatttttctataattttctataatgtgagtgaaagcacagagtctaaatcacctttatagactaaaggcttaactcatagtatatattggctaacaactgaacatgcacgtggaatcctttctcaaakaagtcacagattctgtaaaagacttcactgagaaattgacttttgattaaatgtttgttttgtcttctccttgttattctcagtgaagcatgtttggccaccctatctaaaattgcctcatgctatcccttgtcaaacactattccccttccctcttatatttttctccttagcatttattatcatctgacatacttttttttttaactttagtttaagttcaggggtacaagtgcaggtttgttacataaacttgtgtcgtggggatttgttgtatagattatttcatcacccagatattaagcctgatacccattagttatttttactaaccctctacctccttttaccctccaccctctgaaacacccagtgtatgttgttcccttccctgtgtccctgta

SEQ ID NO: 494236 - DNA, 641 bp, Homo sapiens
gactgcctcttttctaaagcctccctgaattcctcataggctcagttcacttctctatcttcctagtttccattttgattttgcttctatacctacacattctgcatgaaatttttctataattttctataatgtgagtgaaagcacagagtctaaatcacctttatagactaaaggcttaactcatagtatatattggctaacaactgaacatgcacgtggaatcctttctcaaataagtcacagattctgtaaaagacttcactgagaaattgacttttgattaaatgtttgttttgtcttctccttgttattctcagtgaagcatgtttggccaccctatctaaaattgcctcatgctatcccttgtcaaacactattccccttccctcttatatttttctccttarcatttattatcatctgacatacttttttttttaactttagtttaagttcaggggtacaagtgcaggtttgttacataaacttgtgtcgtggggatttgttgtatagattatttcatcacccagatattaagcctgatacccattagttatttttactaaccctctacctccttttaccctccaccctctgaaacacccagtgtatgttgttcccttccctgtgtccctgta

SEQ ID NO: 494237 - DNA, 530 bp, Homo sapiens
agggagaaatcatgttacacagagaaagtccttcaaagtacgacctctctggaacacctatcttagtttctctttggcagtttgtagaaaaggaatgtttctgtccttacctcaggctttctatttgagaatctgtgggtgtgaggaatgcatttttaacaagcccatttgggaatattgatgccatctgggaagtgtaaaagtaattacagaactgcttctacagagtgttggtaggctctaccatctaagaccccctaccccagtcagaatagatgaagcagaaacaagacgaggaggaagctccagtcagctcctcttcatgcagaaatggcatcaaggactagtattagagaggatatagcccccgacaaattctatcaacttctgaaaagrtgcatttaaaaacagcgagattgctatgaaaatataccttcaaggagactctcctaggctctccttccaacagaattgccatttagccctgttttatagaaaccccatgtctgttcttgcatgggctattacag

SEQ ID NO: 494238 - DNA, 498 bp, Homo sapiens
ctgcagaccggggcctctcctgaattggcacctcacctttccttgtcctcatgggaagctcacacaagccacgagcaggtctcatgctccttggtttacaggtaaaaagcagagaccacaaaagtgacttcctcatggcctctcagtgatartgggcaaaactagatcttaaacccaagcctggctgacccccgttcaattttttttctggtaaacctcttgcataatttggatccaatcttctttttcagtcccaccatccccttcctgaggaaaccaccctattcccgccatgctgtttttttggctgtttccagagcatgccgccacatgcgtggtgctgcccctctgcctgggacacactactccctgccctcccttttgactttggaagatccactcttccctcaaggcccaagtcaaacactgcttcctcctccaagaagcctctcctggtgtccccatctcctcaccatctggctcagccatgtgctgtca

SEQ ID NO: 494239 - DNA, 476 bp, Homo sapiens
gctaactggttttggaaaatatgttgctgacattctgcttcccactggtttctttttgcagaccaaaatggagttttgtttttctcctgacagcagatgccacagattsggcagacccaggaggctcttctttacctgggcgtgtggtgagaactcaagtccgaagcctatgtctgagcagcctatctgtacttcattgagcctctgttttcacatctataaaatagggataacaactacctcattgcactgaagtggaggctaaacgagcttcaaacaaaaagatcaaagtctggttaacttccaagcactgtgaaatgctagctcctagtactgacaggcaaaagatgtgtctttctttctcccattgggagttgccctgactgcgaatccccccgtatatgatagtgctcaagaacatttccaatatggtatagaatgtagtacttgtagccaaaatagagcacgctttacac

SEQ ID NO: 494240 - DNA, 476 bp, Homo sapiens
gctaactggttttggaaaatatgttgctgacattctgcttcccactggtttctttttgcagaccaaaatggagttttgtttttctcctgacagcagatgccacagattgggcagacccaggaggctcttctttacctgggcgtgtggtgagaactcaagtccgaagcctawgtctgagcagcctatctgtacttcattgagcctctgttttcacatctataaaatagggataacaactacctcattgcactgaagtggaggctaaacgagcttcaaacaaaaagatcaaagtctggttaacttccaagcactgtgaaatgctagctcctagtactgacaggcaaaagatgtgtctttctttctcccattgggagttgccctgactgcgaatccccccgtatatgatagtgctcaagaacatttccaatatggtatagaatgtagtacttgtagccaaaatagagcacgctttacac

SEQ ID NO: 494241 - DNA, 587 bp, Homo sapiens
gctgtggttgtcttctgttcctgaaagcttttttctggcccttttcmtaaagctcatgtcacatgagctcaccccacatcttccgtccatttcctggccacagccaagtccaggcactgagctcagagtgagacgtggccacaaattgtgggatccattctctggagaagacaatctaatgactgttttttttttttttttttttttttatgtggagtttcgctctgtagcccaggttggagttcagtggtgcgatctcggctcaccgtaacttccgcctcccgggttcaagcgattctcctgcctcagcttcctgagtagctgggattacaggtgcacaccaccatgcctggctaatttttttgtatttttattagagatggggttttgccatgttggccaggctggtctcaaactcctgacctcgggtgatccacccacctcggcctcccaaagtgctgggattacaggcgtgagccaccatgccggccacaacttttatcattcattccataactagcttgctgagcttttccaaaaacaacttagccattcttagttcacagccagttctacatattcctagt

SEQ ID NO: 494242 - DNA, 575 bp, Homo sapiens
aatatgcatcacccgttaggaaccaaagagtgtttggggggctttgaacacagtggtgaccaacactgtaaatctccctgctctcagaagtctccactctactgagagacaacaataaagaggacaatttcagcaggatcaactggaagatgataaactaaggcaaagcatagctctattataacacaaaaattgttgagatgttgccgatgcttttatacttaaaaaaaaaaggaacaatctaaattagtatgaagtagatgtttctagaagtgacaaatttttatttaaatctttaaatactttgtgctattattcttttgttgtcatgtggcttatagcacagaaaggaaagcttctgggacagagactttcctttgacaaacccaatgtagctattgaacatttgtggaaagttaaaaaaccagtcctaccccattgtcacttcagaaaatgcctacrtctgaactgaggctgttggcattctttgataatttacttcggccattttcacagggttcccccctgcccctacccttggatatttgtggttgcctcacattttatgcattgat

SEQ ID NO: 494243 - DNA, 600 bp, Homo sapiens
tcaaataaaaaacacttgctgggacaggaagataattagcgatttctaaacacagacagcatccatgcccaccattcctcaaggaaaaggtcagccctcttccttgtacacaccatgtagcattgccatctggctgcccatggctctccagagtagcacaggccacycttgcttcttgggaaggaattactttttggaagcttccctgggtgctctgaccagaaaaccagagacactttgactcatctggttcccaacacacacttcaagccatgcacactgtcaaagcagatggaagcaatggtacttgcccggtggaagcgttcatgatgcagcctcctttctcaaccgccatttgacagctacagcccctgtccagtgtgtcatgattcatcccgaaattgtggcccagctcatgtgccagggtcacggctgcaccaaggggattgtctgaatggtcctcaaagaaaacacaaaagtacaggtgtataattcatatctccttggccttatttcccaggtctccctccccacagaaatatacctttcattaacatttgacttaatgtaattccttataagggaccaaggtaaaacgct

SEQ ID NO: 494244 - DNA, 402 bp, Homo sapiens
ctcctgtgcacatgtgaatcagagaacccagaaaagcacagagtcccgcaccacatggagacaaacactatcaacgccctggagcccttccatccgggctgtttactaagatgcctggatatgtagacttcagcttttgcaatccaagtcccaaacagacctggcagttgttgaacccctgtttctctagtcctctatttcttcgtcttcttgcttattgcatttttcctcccaagtgagaaaraaggggaaaaagtactgtgatagtaaatattgagtgtcaacttgattggattgaaggatgcaaagtattattcctgggtgtgtctgtgagggtgttgccaaaggagattaacatttgagtcagtggactgggagaggcccacccgtcctcaatctggg

SEQ ID NO: 494245 - DNA, 532 bp, Homo sapiens
gcactgtgtaggcattttgacttcagagctcttattgctatacttatacaacttctatttccccttaatctgacttttgccttttctgcccatattcctttaaagggacaactatacttaatgtagcaatctctgtctttgaaagaaattataaagaatttggagtgagttgggtgaatctatttcccacttattgccatgggtcaaaactgaaaggaacaacgaggaactgcataaatcaggattctgtttgcctctagtgtggagaataatcaccttagtcattttatgtgtatcagttcatactattccatgcgtaaaggtgcatgaaatattcaataatgcgagtgaacgatcaaacycatttatatttattcattagtgccacataccacccgcaaatagtctatagactagaagcaaagtgaacctcgaattcattttctaattgcccttcttgccctggactgcaagtggtatttattagccactgctcattaagcatccacatggtctatgatgtgggaggaca

SEQ ID NO: 494246 - DNA, 346 bp, Homo sapiens
tggctcactgcaacctcccgcctcccggtttcaagccattctcctgcctcagcctcctgagtagctgggacgatattttattccatttgctttatacgttgttcccctcctcccccttccccccactgcccacctcccaatctttacaaacacacasagtgtttttgctaaaccatctgaggataagtgatatacaccatggccctttcccaccaaatacttcattgcatatttcctataagcagatattctcctacgcatcatggcccggctatccaagtcggcaaatgtcacatccaggcagttcctcgcttctcagccacactcaaggctgtccctgacccag

SEQ ID NO: 494247 - DNA, 656 bp, Homo sapiens
ctggtaagggccatgcagtgatcaacaggtcagggggccctggggtgcaagcccctcttaggcatgatggctccctgctgggtctctttctggtgtggatattcagacccaaaaaccaagtgtttgtgaacccacaaggcctagttggtgcctgcctcttagcatcagtgcgtgcagaggtgcacccttgggcagggcacaggctcacctggagattgtcttgactggccactgctggccactagcggtgatgtagcctgtgctcctctctctctgcctttgtcactggctaagagggtcaccccccacccccaggggttgaagactgcatctcctccactccccataatcaaatttcccaaccaaccacgtgatgcatggtgtgacaaccatgtcttgctgagttgcgaaattatctgtgtwttgacttatgttataaaaactcaatcacatttgtttaaacacttaatgagacatattgaaaaaaattaaatttcacgaaattgtcattgccttggaaaatctagaatttggagttctcataattatggtcagtaatctaagaagttaatcactgtcaggaatgaacaacggacttgttagtcaactgtctgaaggtgatacaaaagtggtgttaaagctggaaatcagttgtt

SEQ ID NO: 494248 - DNA, 381 bp, Homo sapiens
acagcttcaggtatagcttcatattcttgctttacttttctttctccatccattctacttaatttaccttgtcaaaataatggttcatatgattcagaagacatgatttaaaaaattaaaaaataatgattgaaattatccttttatgatatttttaaaagaacaaaggtaaccaaktgaattatactggcataattactgttatataattttacctatttgttgaagttctattctttctaaatcattgtcaagtgaattacttctaatgagcaatgaatagagtcaggtttactgtgtttacttattcaaagatttcagatttgtttttccttccaaaggcgttctatcctgaatctcatcatgaggcttccttgcctt

SEQ ID NO: 494249 - DNA, 555 bp, Homo sapiens
tgccagtcaatttgggaaatagtctatcatgatccatcctccagctacaacagtatacatatgcacatacatgcacacacacacacacacgacatgcagaatacactcactccctttctccaaaactattattctatatagcatcagtgttaaacttcaggatctagtaatctatactaggcctagatgtggatgaggcatttcagatgcagcttttcttcatctggagacctgttaactaaaagagaagttacatacacaacatacaatgctgaaaaagggataggataactgcagkagacacgcctgtttgaaaatggcggaaatggaaggcatatagcagtcattagtccatagcaattctgaaatccagccaagcactgttaccggtcctctgaggatcaagttctccattagtgcctaggttggcctccctcagaatagtttcccaatgcgttgttctcaagagctcttagttccaccctctggggtctagactaggaactctgaatcaattttcctttttcataagaaactgccttccttgaacagagg

SEQ ID NO: 494250 - DNA, 651 bp, Homo sapiens
aatttaaactcctttttaagacggatgtttttggtaayggctttacttagtaagtgctatatgcaaataaaagatttaggaagaggatgggcacagtggttcacacctgtaatctcaacactttgggatgctgaggcaggaggataacgagcccaggaattcaagaccaacctgggccacaaagtgagaccctgtctctacaaaaaattaaaacattaggcaggcatggtggtacatgccttgcagttccagctactcaggacccagaggcaggaggatcatttgagcccaggaggctgcagcagtgggctatggttacacactccagcctggtgacagtaagactctgtctccaaaaaaaaggataagaacaaaaaaagtattgggatacacaaatctaaatttgagataatcctcatttgtgacaaatattccaccttattagtgactatttttcttttttggacaactgtttattggctttaacataaaatttgtccaaatggtgcaaaaatacacatctatataaattaaatctacttaaatataaagtacttgagaagaatatgggtctttataacagaaaatctatttttaaaattatttttttccttaggttactcacaatttaaagaatgcaccaaaacatga

SEQ ID NO: 494251 - DNA, 464 bp, Homo sapiens
gggaagtgttacaagccaacacactatttactatgttaatagacaatggaattaacaataaattggattatgctgaataggtaaggagtttcttactcctgaatttactttctagagagtggtatttaaaaaagaggtaaaatgttattattcttgataaaagtagtaaatgaaaacacaaatagagataaatmtatgtccttactgctctactctccccttagctaattctcagttaaacatgattcattcagcaccataagacaggggggaaaaaaacatgattcataagaatctatgtgagtgtttcagaatttgttacagtaatctctcaccaactgagagtggggatgattacattcctaaaaggtgccatgttaggtaaaacctccattggcaaaattcaagaaaatatggaacttgtaagatagtaaagcaataaagttggtcataaagcagaaaag

SEQ ID NO: 494252 - DNA, 603 bp, Homo sapiens
taggaggacttgcatttttataagatgtttcaatctttagaaattcataaaagcaaagaatgtatactcaataaatgattgttacttgacagatgggaataacagccaatattaatgatggtctctgaactgagaaatatccataattttcatggatcgataaatacgttaaactttattatctttgggtcrtagggatgaaatcttacaggttttatataactatcataaatgttttatagactactgatcagtaagactcagccagaggggtgtattaagaatgggaatgtgagaaccaagaggtcagcaggacagagaggcacagcctcttcacaagtcagagaagataaacatttcagacaagatgccatggttgaaaactgaagaggtaaggtcctcatgcaaacacagaggagatatgaaaagatcattgtccttacagaatctaggaatgagagaatatcacctcatcgtataatgaaaataacatctgaggtattacaccagcatgtttactgagcacttgctaagtgccaggcattgagctcagcactgtacatgtattgtctcattgaattcttagtgcaagtccatggcatg

SEQ ID NO: 494253 - DNA, 532 bp, Homo sapiens
tgtaatcaggaatgcctggcaagctggacgtggtggctcacccctgtaatcctaacacattgggaggctgaggtgggtggatcacctgaggccaggagtttgagtccagcctggccaatayggcaaaaccccatctctactaaaaatacaaaaaattagcagggcgtggtggtacatgcctgtaatcccagctactcgggaagctgaagcaacaagaatcacttgaacccaggagacagaggctgcagtgagccgagattgcaccatgagactccagcctgggcaacaagagtgaaactccatctcaaaaagaaaacaaaaacaaaaacaaaaaaaacctggtggtccttttaaacatgcatggttttcgccgtctagagacttactgaggttgaatgtcaaagtatagcatttgagaatattttatgccttccagttgattctgccgtgagctgtttgagaaaatactaggttaaactgcatgattaatattattcactattaactggagaagatagtaatgttacaaatc

SEQ ID NO: 494254 - DNA, 532 bp, Homo sapiens
tgtaatcaggaatgcctggcaagctggacgtggtggctcacccctgtaatcctaacacattgggaggctgaggtgggtggatcacctgaggccaggagtttgagtccagcctggccaatacggcaaaaccccatctctactaaaaatacaaaaaattagcagggcgtggtggtacatgcctgtaatcccagctactcgggaagctgaagcaacaagaatcacttgaacccaggagrcagaggctgcagtgagccgagattgcaccatgagactccagcctgggcaacaagagtgaaactccatctcaaaaagaaaacaaaaacaaaaacaaaaaaaacctggtggtccttttaaacatgcatggttttcgccgtctagagacttactgaggttgaatgtcaaagtatagcatttgagaatattttatgccttccagttgattctgccgtgagctgtttgagaaaatactaggttaaactgcatgattaatattattcactattaactggagaagatagtaatgttacaaatc

SEQ ID NO: 494255 - DNA, 532 bp, Homo sapiens
tgtaatcaggaatgcctggcaagctggacgtggtggctcacccctgtaatcctaacacattgggaggctgaggtgggtggatcacctgaggccaggagtttgagtccagcctggccaatacggcaaaaccccatctctactaaaaatacaaaaaattagcagggcgtggtggtacatgcctgtaatcccagctactcgggaagctgaagcaacaagaatcacttgaacccaggagacagaggctgcagtgagccgagattgcaccatgagactccagcctgrgcaacaagagtgaaactccatctcaaaaagaaaacaaaaacaaaaacaaaaaaaacctggtggtccttttaaacatgcatggttttcgccgtctagagacttactgaggttgaatgtcaaagtatagcatttgagaatattttatgccttccagttgattctgccgtgagctgtttgagaaaatactaggttaaactgcatgattaatattattcactattaactggagaagatagtaatgttacaaatc

SEQ ID NO: 494256 - DNA, 532 bp, Homo sapiens
tgtaatcaggaatgcctggcaagctggacgtggtggctcacccctgtaatcctaacacattgggaggctgaggtgggtggatcacctgaggccaggagtttgagtccagcctggccaatacggcaaaaccccatctctactaaaaatacaaaaaattagcagggcgtggtggtacatgcctgtaatcccagctactcgggaagctgaagcaacaagaatcacttgaacccaggagacagaggctgcagtgagccgagattgcaccatgagactccagcctgggcaacaagagtgaaactccatctcaaaaagaaaacaaaaacaaaaacaaaaaaaacctggtggtccttttaaacatgcatggttttcgccgtctagagacttactgaggttgaatgtcaaagtatagcatttgagaatattttatgccttccagttgattctgcygtgagctgtttgagaaaatactaggttaaactgcatgattaatattattcactattaactggagaagatagtaatgttacaaatc

SEQ ID NO: 494257 - DNA, 462 bp, Homo sapiens
atcggccggatgcagtggctcacgtgtgtaatcccagcaatttgggaggccaaggmgggcggatcatgaggtcaggagatcgagaccatcctggctaacacggtgaaaccccatctctactaaaaatacaaaaaaaattagctgggtatggtggcaggtgcctgtagtcccagctactcgggaggctgaggtgggagaatggcgtgaacctgggaggcagagcttgcagtgagtgagcagagatcgtgccattgcactccagcctggacgacagagtgagactccatctcaaaaaaaaaaaaaaaaattcagatcatcagcaagtgtttaggcttcaagcatgtgaaatattccaatcaattggcaaattatctctgaggctaactagggctccctgagcatcagaaagtttaccagccagaatgtaagataaattaatcctgcttaaatattttccagttg

SEQ ID NO: 494258 - DNA, 633 bp, Homo sapiens
tttcatgttccactctagctctgatactatctgattatcaagatctagggagagacatgttagctcacacctttaacttaaattagaaaacagatgctataaatcattgtttgtgcattaaattcccgtgatctgagtgaaagcacatagaggtttatttgctaaatatttaacrtatatatttagtatcatacttgctaaattgctgcatattttcatatatatgtacatataatttcatatctaacatattacatgttatatggtacatatatatgaaaagatacaggaattagcaatgtgtgttatatgtgttaagtatggtgaatgaactgagaagaatgtgcttctccataaaagggactttatcctaatatttacacataagcatttatgtaggtaatgaaaaagttggcaaactttttctatggaaaggccagtgtataatttaggctttgcaacccagcaatctcagtcacagttacttaattctgctatttatgtaggtaacgaaaaagttggcaaactttttctatggaaagaccagtatataatttaggctttgcaacccagcaatctcagtcacagttacttaattctgctattgtaacacagaagcacttattgacaata

SEQ ID NO: 494259 - DNA, 633 bp, Homo sapiens
tttcatgttccactctagctctgatactatctgattatcaagatctagggagagacatgttagctcacacctttaacttaaattagaaaacagatgctataaatcattgtttgtgcattaaattcccgtgatctgagtgaaagcacatagaggtttatttgctaaatatttaacatatatatttagtatcatacttgctaaattgctgcatattttcatatatatgtacatataatttcatatctaacatattacatgttayatggtacatatatatgaaaagatacaggaattagcaatgtgtgttatatgtgttaagtatggtgaatgaactgagaagaatgtgcttctccataaaagggactttatcctaatatttacacataagcatttatgtaggtaatgaaaaagttggcaaactttttctatggaaaggccagtgtataatttaggctttgcaacccagcaatctcagtcacagttacttaattctgctatttatgtaggtaacgaaaaagttggcaaactttttctatggaaagaccagtatataatttaggctttgcaacccagcaatctcagtcacagttacttaattctgctattgtaacacagaagcacttattgacaata

SEQ ID NO: 494260 - DNA, 632 bp, Homo sapiens
tactgaaacattttagaaatttcaggagaatgttgaggttttaaaggaaagtattaatacacttgacaggttttaattttttaatctagtcaaggcaaacagctttgaatcaattatccacagttttcaacatataatcaaggattttgacaatatttagatgttgaattgccaagctattagcaaccaagagatttgattagacatccatattaataaacacctgtcataatagcataacagatgttctaggaacacagctaacacaaaatctaaaaaacttggtcgtattttttgmcaatgtggtgcctaaattaaactttacaacctttatcatacttgttttaataaaattcaatgctgaaataatttatatcaatagaaaaatatttttacttcaaatgactaaaaggttttcattgacatcaaagcctcttgcagaaacatttgaaattatcagttaaaagcgcgttagcaaaatactagtgtgtgatgtgtgtatgtgtgtacaaaatatacacatgttattactaggggctcctgcgtggaacagtgcaggtctagatcatgcacatgctctaagatccactatttaaaaatttgccatagttcaggtccatacatataatttt

SEQ ID NO: 494261 - DNA, 632 bp, Homo sapiens
tactgaaacattttagaaatttcaggagaatgttgaggttttaaaggaaagtattaatacacttgacaggttttaattttttaatctagtcaaggcaaacagctttgaatcaattatccacagttttcaacatataatcaaggattttgacaatatttagatgttgaattgccaagctattagcaaccaagagatttgattagacatccatattaataaacacctgtcataatagcataacagatgttctaggaacacagctaacacaaaatctaaaaaacttggtcgtattttttgacaatgtggtgcctaaattaaactttacaacctttatcatacttgttttaataaaattcaatgctgaaataatttatatcaatagaaaaatatttttacttcaaatgactaaaaggttttcattgacatcaaagcctcttgcagaaacatttgaaattatcagttaaaagcgygttagcaaaatactagtgtgtgatgtgtgtatgtgtgtacaaaatatacacatgttattactaggggctcctgcgtggaacagtgcaggtctagatcatgcacatgctctaagatccactatttaaaaatttgccatagttcaggtccatacatataatttt

SEQ ID NO: 494262 - DNA, 620 bp, Homo sapiens
aacctctgcagttttcaccaagcctggcctgacacactttccctacaattagttatcatgtgcgtggcataataatctgaacataatctttgaaaggaaaattaaatcatacatctcaattcagtgatccttgggagccatctgagtgtatggaaaattggttgctataaaagatgcccaaactcagctcttagaagacagagtagaacctacaattcccagcccttcagctattattttccatgtttctaaaataatagctatgtttraaaataagctgctcttttgttctttagatcttttattattatcattatttgtaacaatgttttccagttttcaatttgaattcctctttctccttttgttttttgttggtctaaaaagcccctaaaaataattctttttgtctttactatagcatctgtgctcacaggaataaactactttttagttattctttaacttacatactacttccttctctaatatccagcatctgaaatgaggagcaataaaaatatgtccttatggtcattgacagtttctatttggaactgatttagccaagggaaaggaggctacatcgtagatgatagtaacatgttgaaagtagatgc

SEQ ID NO: 494263 - DNA, 619 bp, Homo sapiens
cacttgggaggctgaggcaggagaatcacttgaacctgggaggcggaggttgaagtgagctgagatcactccactgctttccagcctgggtaacagaataagactccatctcaggaaacaaacgacgacaaaaacaaataataaaaccatcctgttatacgaagactcacatacatagaatcctattagtgttttgtcattttatttctggaaagaagaaggggaaggaaagatagagaacagatggaactttaaattttcctgagcatctattactagaaattttccatcaatttctaatttaactttttttttttaaacggaatgttctgttttctcagatgccttttctgtgtcaatggagattatgactttgttcctaatctattaataaggtaggttatattaaacaatgatagctgytatgccaggctctttgaaatatacatatttgggatgatattatcctagagtttacaaatgggaaaactgaagctcatgaaagtgaagtgaagcagccatcacaaggttaatgagaattactagccagctctaggcagaattatagttaggccttggccagggtgttctgatacacttcaaaccacctccctgcagc

SEQ ID NO: 494264 - DNA, 514 bp, Homo sapiens
ggattacaggcgcatgccaccacaaccagttaacttttgtatttttagtacagatggggtttcatcacattggtcagactggtctcgaacgcctgacctcaggtgatccacccacctcagcctcccaaagtgctgggattacaggcatgagccaccacgcccggccccaatcagttttcttattaaacaaaaaggattttaggaaaacagactaayacgtgaaagaagtaactcacctagaatcttaatgcccattactgatatgaattgaactgtttttatttgaacattcacactcatacagatatgaattaacagtacatggacaatatagagttgtacatgaaaattaacttattctcttgttacaaaattaggattatcctgatgacacgattttgtaaacttttgccaccatatattaacaatgtccatggagaagaagaataaatgcctactgctgcacagtttaggatgtttctagtatttcaggatattagaatattatcatgaa

SEQ ID NO: 494265 - DNA, 514 bp, Homo sapiens
ggattacaggcgcatgccaccacaaccagttaacttttgtatttttagtacagatggggtttcatcacattggtcagactggtctcgaacgcctgacctcaggtgatccacccacctcagcctcccaaagtgctgggattacaggcatgagccaccacgcccggccccaatcagttttcttattaaacaaaaaggattttaggaaaacagactaacacgtgaaagaagtaactcacctagaatcttaatgcccattactgatatgaattgaactgtttttatttgaacattcacactcatacagatatgaattaacagtacatggacaatatagagttgtacatgaaaattaacttattctcttgttacaaaattaggattatcctgatgacacgattttgtaaacttttgccaccatatattaacaatgtccrtggagaagaagaataaatgcctactgctgcacagtttaggatgtttctagtatttcaggatattagaatattatcatgaa

SEQ ID NO: 494266 - DNA, 514 bp, Homo sapiens
ggattacaggcgcatgccaccacaaccagttaacttttgtatttttagtacagatggggtttcatcacattggtcagactggtctcgaacgcctgacctcaggtgatccacccacctcagcctcccaaagtgctgggattacaggcatgagccaccacgcccggccccaatcagttttcttattaaacaaaaaggattttaggaaaacagactaacacgtgaaagaagtaactcacctagaatcttaatgcccattactgatatgaattgaactgtttttatttgaacattcacactcatacagatatgaattaacagtacatggacaatatagagttgtacatgaaaattaacttattctcttgttacaaaattaggattatcctgatgacacgattttgtaaacttttgccaccatatattaacaatgtccatggagaagaagaataaatgcctactkctgcacagtttaggatgtttctagtatttcaggatattagaatattatcatgaa

SEQ ID NO: 494267 - DNA, 514 bp, Homo sapiens
ggattacaggcgcatgccaccacaaccagttaacttttgtatttttagtacagatggggtttcatcacattggtcagactggtctcgaacgcctgacctcaggtgatccacccacctcagcctcccaaagtgctgggattacaggcatgagccaccacgcccggccccaatcagttttcttattaaacaaaaaggattttaggaaaacagactaacacgtgaaagaagtaactcacctagaatcttaatgcccattactgatatgaattgaactgtttttatttgaacattcacactcatacagatatgaattaacagtacatggacaatatagagttgtacatgaaaattaacttattctcttgttacaaaattaggattatcctgatgacacgattttgtaaacttttgccaccatatattaacaatgtccatggagaagaagaataaatgcctactgctgcacagtttaggmtgtttctagtatttcaggatattagaatattatcatgaa

SEQ ID NO: 494268 - DNA, 574 bp, Homo sapiens
tgggtggttgtaagtagccaggcagattaaaaggctgcttcctagagttttctttacctttgatgaccttaatcaggtcattaagcattttaagacaggtttatagctctcctgtggtccaagcttggactaagtactccttaatcttcaattttatgttttaaatttttggaataagtagaaacctgaaatttataaaattaatgacttgagtatgcgagtgaatagcttcagagagttatttggcttatggaagatttcagattatggtaggtgcttgaatatacttatttctcatactctttcttccatccctttaacaacaaaaaaaggccttattagaaataggcaaacttgaatacacatagagctgtactgctcaaattgagtacttgagttggggagaaaagtctcccggtctagatatagctttgaaaagagaaggatcaggtaggatgccgtacacggcaggtgtrtgcagggacagggataacgttaaccccttttgctgtgaatattgtcagagggtctgatgtgtaattaggcattccttagcttcactcctgataaaaac

SEQ ID NO: 494269 - DNA, 562 bp, Homo sapiens
acatcatacttgaccatgagactaaatgctttctccatcagattagacacaaaatattgtgatatcacaggtctgtctttaattcaaaatgaactatccaaataatactcagaaacagtgacaaaaaaaaggacaacaaatgtaaatgactcccatgacacaatggtgtatgataaacttgacgtacttacaaattgacaccagctcttcattagcaaagaaaatggaataaagagtcatgtcaaagcagtagttttccccataataaaggaaaacggaatatacatactgggttagaaatatccagcaacttgccacataacaccaataagaaaatctcaattcacaaagtctcatttttcaatggcccattaatcacagaacaattaaacactgcataaaaaataaatttcaattcacctatagatccaacacactttaaaatggatagagaaaawctttttaactgtattaggataaaaacacttcctattaagcctcaggtaccatggcttaaagagtacatacagaattctcaacacaatgtttccttgcaaaagaa

SEQ ID NO: 494270 - DNA, 562 bp, Homo sapiens
acatcatacttgaccatgagactaaatgctttctccatcagattagacacaaaatattgtgatatcacaggtctgtctttaattcaaaatgaactatccaaataatactcagaaacagtgacaaaaaaaaggacaacaaatgtaaatgactcccatgacacaatggtgtatgataaacttgacgtacttacaaattgacaccagctcttcattagcaaagaaaatggaataaagagtcatgtcaaagcagtagttttccccataataaaggaaaacggaatatacatactgggttagaaatatccagcaacttgccacataacaccaataagaaaatctcaattcacaaagtctcatttttcaatggcccattaatcacagaacaattaaacactgcataaaaaataaatttcaattcacctatagatccaacacactttaaaatggatagagaaaatytttttaactgtattaggataaaaacacttcctattaagcctcaggtaccatggcttaaagagtacatacagaattctcaacacaatgtttccttgcaaaagaa

SEQ ID NO: 494271 - DNA, 454 bp, Homo sapiens
tatttccctacttatacttgtgacctcgctacctatctcctttggttaagggtttggccgggggcggggggagggtttttttttgtttttttttttttttttttttttttttttttttgagacagggccttgctctgtcacccaggttggagtgcagtggcttgatctcagctcactgcaacctctgcctcccgggctcaagcgatcttcccctttagcctcccaagtagctgggactatacacttgtgacattatgcccggctaatttttgtgtttttagcagttggggttttgccatgttgcccggattggcctagacttcctgggctcaagtgatcctctcgccttggcctcccgaaatgctgggattacaggcgtgagccagtggacccagcaaggttttyttaattgcccaattctccatcctggaagcgatctagtatgaagcgagtt

SEQ ID NO: 494272 - DNA, 683 bp, Homo sapiens
tcggcttgctgaaacctccgtttcctgggttcaagcarttctcctgcctcagcctcctgagtagctgggattacaggtgtgtgccaccacacccagctaatttctgtatttttagtagagatggggtttcaccgtattggccaggctggtcttgagctcctgatctcaagtaatccacccgcctcagcctcccaaagtgttgggattataggcatgagccaccgcacctggcctatatcttcttctattgagaaccattcatgacttaggaatgacaagaacatatcaactatacttgctaaacagtaaagagaaaaaaatcattttctttttcccttaggaaaacactgagactcagtctgagcttctggaaggctaaagcctgcaaaaacatgggcttttcaaagctcacagaggcaaggagagggaggcgatgggtcagaccaccactcaattttctgtagtgatggcagagctgagacccagactcaggagaaagctgatccatggcccttctatgtcttgtgttagttttgtgggatgacattctgcatgagcaattgattgtgctgctggaaacacaaactatgaatctgagtgtctatggagtttattcttgtgatcttatgaaacaagtctcctgcatacagatttagggacaggcatattgtcagcatgttgaa

SEQ ID NO: 494273 - DNA, 609 bp, Homo sapiens
aggacaagttggtaagatgtatcacaagtcttgaaagtgtgtgcttgagtcctaatgtctgaattggaaatgactggctgaagtctgtacagggcagtggctagaagcttgggctttgtggagtttgtcacatttgtggtgaaacttggctctgttgctttcaaactatgctggatacactgtctcatttgtgtctccttagctattttcttctgtgtacgtattttttaaaaaagatatagttagaagttttagtgtgtgtaagtaaataaayatactagatatcatcaataataatagattaatgtcattgtcaacatcatcatttcaccagtaatttaaaataatagtaacactatatgtactctgtgtgtgtgtgtgtgtgtgtgtgtgtgtgtgtgtgtgtgtgtgtgtgtttgtgtgtgtgtttctgggctttctagtccagtttgatgacttttctgtggcgtgtgtacactcctacgctattgtaattcttcatatgatgaaattaccatttactgagtgcctccagtatgcccacatggactcttagaatgctcgtcttctggtatgcagatcaccagggtaggatttaatgcccatgcc

SEQ ID NO: 494274 - DNA, 554 bp, Homo sapiens
ccacagtcagaatgtgtgttctataaacagttcttgcttgtctgaccttttcaccatcctttcctttggtaattgttcaggttgttttgctccctacttttttaaaaaawttttttgagacagggtcttactttgtcacccatgctggagtgcagtggcacgatcacagctcactacagcctcgacctcctgggctcaagtgatcctcccgcctcagccccccaagtagccagccaccatgcccagctaattttttctatttttttagtgacacagtttcaccatgttgccaatcctggctccctaccttaacccagtcctggttcctgttctgatagatgctcaacatcagttgatattcagactgggattgtcgcccattcattcattcattcattcacccacacacatgcacagagtcactgcttccaccaccccttgtggttccagatgctgcagcacaggggtgaggctcctgcttccaggtcttctatttgaatagaggagccagtaagtagagaaacacattttttaaaagtaaacaaataggactt

SEQ ID NO: 494275 - DNA, 607 bp, Homo sapiens
tctaatgaaaaggattgactaggtttcacttattgcttgccaactggaattttgttaggcacaattacataatgcagaagtatttgagctgtgcctacccacatcagaatcctaaactaggtttcaaagggactacattccattttaaagaaattcctagtactgctaactttcctggaaataaaagctatccctycctaagactgacatttttatggccagaaatgtacatttaatctatttgttttaaactgtaatatattatggatgcctaaataaagccaaatgcctatcagaaagcagttgagaaaagaaaatctgcctagaaaactattcttatgatctctgctgggtaagaataaaaaagtaccacccaagacaggcaagaccacgctcccatggtcaaatgtaaggacagaaaatgagccacaactcgcactgtagcccctgaaaaaaaaattatcgataggtccaaatgcctcttccaaaaatgctgactcactgaaaattattgccatttaataaataggaagcaagctattacatcgtttgccaaactttctcccacatttctgaaatatattctttaatagctcaataacattca

SEQ ID NO: 494276 - DNA, 607 bp, Homo sapiens
tctaatgaaaaggattgactaggtttcacttattgcttgccaactggaattttgttaggcacaattacataatgcagaagtatttgagctgtgcctacccacatcagaatcctaaactaggtttcaaagggactacattccattttaaagaaattcctagtactgctaactttcctggaaataaaagctatccctccctaagactgacatttttatggccagaaatgtacatttaatctatttgttttaaactgtaatatattatggatgcctaaataaagccaaatgcctatcagaaagcagttgagaaaagaaaatctgcctagaaaactattcttatgatctctgctgggtaagaataaaaaagtaccacccaagacaggcaaraccacgctcccatggtcaaatgtaaggacagaaaatgagccacaactcgcactgtagcccctgaaaaaaaaattatcgataggtccaaatgcctcttccaaaaatgctgactcactgaaaattattgccatttaataaataggaagcaagctattacatcgtttgccaaactttctcccacatttctgaaatatattctttaatagctcaataacattca

SEQ ID NO: 494277 - DNA, 610 bp, Homo sapiens
tggcaccgaaagctgccggcctccagcccacccaccagctcacccacatttgactaggaaaattatttcattaaaaaaaaaaaatcacctggaatgaaagtcaagaaatattttcaacttagccttcagggcaattgattttattgacttcttggggcagtgattgggaaatgctggcggagacgtcagaagatagggaggccataaagagagccccaggccctcagaatgccttctgctttatggagacctgtccacaccttcaaggcaaaatgaattgagatgctgttttcctcttggcatgggatacatgaccactgggaatctttggacttayttggccttttggatccaaccaatggcccagaaatcagaacagcttggttctaacctcatccagggctgttaagataatattgaggggagggctccattagagggaagatggagggatgtgctgcctcccggaaaagacgccaactggcctcctctggcccactgtcctttgtgcctttgaaaggaaacgggtgtcctgtgggtagttcaagaaaatgagcccttttgtccacctcctcatttcctgtgcagaggcctggacacctgagctcag

SEQ ID NO: 494278 - DNA, 516 bp, Homo sapiens
tgagtaatgagtccctttgaggataagatcggtgcctcctggatgaagaggagaactgggttcccagtggccgcagtgcctttgcagtaggccagatgacctggatctgccacccaaggacttctctgccagagtcttatcctgtgttcttgctacacacaaaccaccataggagggcatcatactagtttgagggaccagaattttatcacatagccagatgatggaagaatgaacgagttttgtttacttgttaggggtcagaagagaaaatatgggcccagttataaatggactcctttcaggataaattcattacatctcttggaatttgtgaatgggagttggtccaagcgtggcaacgtcctcgggtcacctctgacatcacaccccatgcagaaactgggccttccctcacagaagcaccyggtggggttggggaggggcagaattcagatggcacctccacagggactcctgaaagtcactcaaccacatcttttctgatgcaactga

SEQ ID NO: 494279 - DNA, 535 bp, Homo sapiens
ctgctggctctcctgttgtgttcccttcacagatgtgcagtgccgttctgaacatcctgcccttgaactttccctacccataattttccaaaccaaagcctggcaataaaaatgtcagtgagggatggagaaaactggggggagtattttaaaaggaaaaaaaaaaacagggaggtgctttgcacacagtgatttgtgttgacttcttcaacaaaggttaaatgcatgccgtgacttctcaaaaaagggcatgaaggcagasagctggagctaattttccagaacactacctagaaaggctgtatttcataaaggaactggttacagagtaggctggtgagcttccttttccatgtcacaggctgcccatctcatcatgctgcaggatggggtacactaaaggggatagtgaaagctggtatacacagtcctttacagtttaaaatgcgctgtcatgaatgggatgggatctgtgctgtcctcacagctctcccaggtgcctgtcttggggctgagcacaggagaggcagtgggt

SEQ ID NO: 494280 - DNA, 616 bp, Homo sapiens
ctggctctcctgttgtgttcccttcacagatgtgcagtgccgttctgaacatcctgcccttgaactttccctacccataattttccaaaccaaagcctggcaataaaaatgtcagtgagggatggagaaaactggggggagtattttaaaaggaaaaaaaaaaacagggaggtgctttgcacacagtgatttgtgttgacttcttcaacaaaggttaaatgcatgccgtgacttctcaaaaaagggcatgaaggcagacagctggagctaattttccagaacactacctagaaaggctgtattycataaaggaactggttacagagtaggctggtgagcttccttttccatgtcacaggctgcccatctcatcatgctgcaggatggggtacactaaaggggatagtgaaagctggtatacacagtcctttacagtttaaaatgcgctgtcatgaatgggatgggatctgtgctgtcctcacagctctcccaggtgcctgtcttggggctgagcacaggagaggcagtgggtctacacctgtgcctagtcagtttgaacaaggctggagaaggaagccagatactttatgacatttcaaagacctccatcctatgt

SEQ ID NO: 494281 - DNA, 616 bp, Homo sapiens
ctggctctcctgttgtgttcccttcacagatgtgcagtgccgttctgaacatcctgcccttgaactttccctacccataattttccaaaccaaagcctggcaataaaaatgtcagtgagggatggagaaaactggggggagtattttaaaaggaaaaaaaaaaacagggaggtgctttgcacacagtgatttgtgttgacttcttcaacaaaggttaaatgcatgccgtgacttctcaaaaaagggcatgaaggcagacagctggagctaattttccagaacactacctagaaaggctgtatttcataaaggaactggttasagagtaggctggtgagcttccttttccatgtcacaggctgcccatctcatcatgctgcaggatggggtacactaaaggggatagtgaaagctggtatacacagtcctttacagtttaaaatgcgctgtcatgaatgggatgggatctgtgctgtcctcacagctctcccaggtgcctgtcttggggctgagcacaggagaggcagtgggtctacacctgtgcctagtcagtttgaacaaggctggagaaggaagccagatactttatgacatttcaaagacctccatcctatgt

SEQ ID NO: 494282 - DNA, 653 bp, Homo sapiens
gaaatttaccttttcgtagtttattctaaggaattaattggacaaaagcacaaagacatctaattgtattattaaaatggaaagtttaatattcaacaatagcagataggttaagtacattaggacattatgaagtggcttaaaacggacattcaaaaaaaggaaatggaaaacctgagtaatgtacagcttgtatggaatgaactaaaaatatataaatttttgcataggtagaatgacattggaagaacatacaccacaatgttaactgattatctctgggtgttggaaaatgattgatttatcaacttttttactgttatttcttttcttttttttttttttgcaatgaacaggcatgstctggcagtttttaaatgaagtatggaaattatggattgtgcagtcatagtcaacgttcattgagagcttactttatataaagcatcatgctcagcattgtgctttgtggcatttgattttttaaaaatcaaacgccctccaatcttaagcaaggatgatggccaaaaggtcggcttattacccaactgcaacaataggagggacaggtaattaaaaggcaattgccatgacaaatagaaaagatgccaaagtcaacattttttcaaggagctataaagcccgtggaggag

SEQ ID NO: 494283 - DNA, 395 bp, Homo sapiens
cttgtaactcaggcatccttcaggaaccttggatcaaaacaattgtgatcctgccaagccttggctcaaggcaaggacaattgcctttgattctaaaccatttagggaatctccaaaactagtgtttagtcaaggactcctatattaggtgcatcatttatgaaaaatatcaaggactgagaaactaacattttgggaaattactattatcaacatctgatagaaacaggatgaccacattttgttgaatgtaaatttccaagagcaaaaaacatgggaatgaggccgatttcccatcttaagcacgcaggatttcaaatcaatttyttattaacttgataacattgctttttctagaaaggtcactattttttgtgttaagaatatgctcttgg

SEQ ID NO: 494284 - DNA, 615 bp, Homo sapiens
gtccaatccaaacctccttggtaatcacggttcctcagaccctcctgaggcaaaactggcctttcttgggtttacttttctggatatttcaatcacttttgtgccattgtccctgctggatgaatctttggtccactgtaggaactgagacttaataaataatattagatacatttaaattgttcattatggaaaggaacacattttattagtagataactacttgtaaataacctagaaagttggattgacagtaaactcaaatatgagttttcagtgtaatatggtcttcaaaactgttgatgggatctttttttaattttttttttttatttttgagacagagtcttgctctgtcacccaggctagagtgcagtggcacaatctctggtcactgcagcctctgcctcccatgttcaagcaattctcctgcctcagccccctgagaagctgggactacaggtacccaccactacaccaggctaatttttgtatttttagtagagacggggtttcaccatgttggtcaggctggtctsgaactcctgacctcgtgatctgcctacctaggcctcccaaagtgctgggattacaggcgtgagccactgcacccag

SEQ ID NO: 494285 - DNA, 527 bp, Homo sapiens
tttccctcttctgaaagcctgtacctctgagaatctgttccacttctgcctcttatccaccattgctcaaatgggatacacaccttaaaacatgcatctgtgggaacacacataacacatgtgcccagcaaattgtacatgatcattcagtgcttgctgatgaattctatgatggctggttaggagtttaaagcagggaaacagagacatattttcaaacaggccccttatctggcctctctcctatgcctttccataatattttctctacacactttttcagttataacctgccccttgtttgtgctttcttggctctctatcttattgttttacctgttttattcttttactttcttttatcctctgacaggtggtgacatattttttctcttatttcttctttgaaagaactccaaagctttgcagatagtttttcctttcactttctctctctgtctctccctcttcctctctctctccccyttccctcccctcttctcctccacgttttaatccttttcttc

SEQ ID NO: 494286 - DNA, 602 bp, Homo sapiens
gatgacatatagatggatagataattagaaggtggatagatagatagatccttatttagttttacaatacaacactcttgagagaagacaggtaatcttattaagatcctcctgcagatccccatggggacctgcatctgcaaatctttgttaactaaatgactgcatcagtaagcacgcaatcagagaagcagaaccaataagaaatatatatgtgtgtgtgtgtgtgtgtgtgtgtataaagttgcctttaatagacattggaccacactcaattgtggaaactggtaaagcaatttctataagaatatggcctttgcattgtgatgctagaatttgaagtccatgagtcaggaagttgagaagagattatacatgtcgagggggtgggggagaataagaataaattggaacccacaggcacaatttggagccccaggagaataaagtaaaaaaacatgtgtcagttcttgttgcttctgatcttaggggtgtaggtatcctgcagaagctgggcccctttgctgyggagcaaaacatgcacatctggcccagaggtcagaaaagttacaagaggatccagaaaaggtggagcagttgca

SEQ ID NO: 494287 - DNA, 570 bp, Homo sapiens
tgccttttgccctttttttgtgcatcccttcctccttcctggaagctgatgtgcacatgtgatatctgtggtatttaaacctcagtgaccttggaaatggaagctatgaagtatgaagaaccagaatagaagtagcttgagtgactaaaaggtttgtggagcagtttagcagtccatcactggactgcctacatttgacatgagaaaaaatggtcttttatcttgtttaaaccattgttttggtgggcttactattatttcctgttgaatctaatcttaaacaatacaagtatgtggtgtggaaacaggagaaaataaaacctaatggaggattttagctatagactacaaaaaagcagattgagaagaaatagtcacagagacagaaggaaaaccaggagaaaattatatttgaaagataaaggaktatctaaaaagggagagatgaagcactagatattcttgactcaacagatatgaggaccaagaaatatctcatgataggcccatgcttctcaaactttcatgtgcataggaatcatttggtgaattgttaacacccagaatatg

SEQ ID NO: 494288 - DNA, 565 bp, Homo sapiens
ttctgcctttaaaaggaaagaaattctgcaatgtgtgacagcatggatgaacctggaacacattacgttaagtgagataaaacacatgcaaagaaagacgagtactgcatgacaacatttacatgaagaatttaagtyagtcaaattcatagaatcaaaatgtggaatcatgattgtcaaagaaaatgagtataaagtttcagtcaaacaagataaatataaattaaaataaaatataaatataaataaatataaaaatatctagcaatctgttgtataacattatccctacagtcaacaataatgtaaacttaagatttgtcaagactgcagttctcatgttgtgctaggatcactataaaataacaaaataaaagaaaacaaattttttaaagtattgaatttaatctgttagaaaattcataagatacatcacataatagtatttattgttaagtattctatgctaaaattgatcaaacatataattacaacctacttggtgtacaaagatgtgtgtatatgcagggcatatttgaacaaattagagtcatatggcgatggc

SEQ ID NO: 494289 - DNA, 565 bp, Homo sapiens
ttctgcctttaaaaggaaagaaattctgcaatgtgtgacagcatggatgaacctggaacacattacgttaagtgagataaaacacatgcaaagaaagacgagtactgcatgacaacatttacatgaagaatttaagttagtcaaattcatagaatcaaaatgtggaatcatgaytgtcaaagaaaatgagtataaagtttcagtcaaacaagataaatataaattaaaataaaatataaatataaataaatataaaaatatctagcaatctgttgtataacattatccctacagtcaacaataatgtaaacttaagatttgtcaagactgcagttctcatgttgtgctaggatcactataaaataacaaaataaaagaaaacaaattttttaaagtattgaatttaatctgttagaaaattcataagatacatcacataatagtatttattgttaagtattctatgctaaaattgatcaaacatataattacaacctacttggtgtacaaagatgtgtgtatatgcagggcatatttgaacaaattagagtcatatggcgatggc

SEQ ID NO: 494290 - DNA, 462 bp, Homo sapiens
atttcaggtgctggggatagaacagtgaacaaaacagacaaaagtccctagcttcatggagcttatattctagtaggagatggtgaaaattaagttaaagatgtaatatattatgtagtatatgagaaagtgataaattctaggaaaataayaacagcagaaatgggagataaggaattctggagagtagaatttgtaacataattaatgctataattttatttttgtctaaatagtatgaatttgcattttttgcttctcctttgccaatatttattgaaaagaatgctttacattttctaaatggattttaaaactcttatgatttatttctagcttcgttgaattgtggttggaggatgtggcctgtgcagattttgcgttggtgtatttattagtgttttctttgtggcggggctgtgtcagtttgcgttgttctcagtgcaagtgcctgaaaaccca

SEQ ID NO: 494291 - DNA, 663 bp, Homo sapiens
ttggacaagcaataagaagccttggatttcattcagcctgaatctactacatctaagcgcctgagcttgtggaaaatcacttgatgggtttgagcctctgtttccttatgtgtaaaatggtgataataaatcctacctaatacatttggttgttctaagggtcaaatgaaataaggttcaaggaagtgtgctgaaactctgaagggcaactgtgatggaaatcttttgtttagtaggaggaaattaaaaaggattaggaaggtgggggaataccataatcaagggtgatttagaaccattagcaaaaagtaattgtgttctcttgtagaattgtcagagccatgagctcttcctcatccctttctccttgttatgtgaatgatgggagcagacacgaccttctgtccatgatccatttagttcagataataggaaaggatgttgcagtctaaggatcaacagaacaatagaagaacaaggggragaaagagggcagaagaggagggggacagaaatcaacattacattatcatggtggcgagtcagacatggtggcaaccactgtgtgtactgtttttttttttttcatgcagagatggcttttggattcccagtggtaggaagagaagcttaaatggatgaatacaaaataattattaaaaa

SEQ ID NO: 494292 - DNA, 595 bp, Homo sapiens
ttcctagatgatagtgtgttaatctttaaaatgcagaagaaagcttgtttgaacctggaaatgtaactctagaccacaagaagatatggaayaagacatttactaacacaatctattactgttttttcttcaaaaataagtataaaatatttttgatgcctataacttctttaattataaagacattaaacctcaaaatgaaaattgaaaggtctcattacttgaccaccttgcctcctcgtgcttcccattcaaaagggctcattaagccagcaaaggcctccaagggttgttcctgggttttacttgtcacttattttcagtaaaatatgacaattgaattgattttacagattacttgaatttgaaccttctcctaccaccacagtaaaaaatatataaatgatgtttatatttaccacattggcttatcaatagctgtacttacaatatattctatggaaaataacaagaaaattaaagtcatcatctgctctctattacttttaatgaacatttatttgactatacatgtaataccaaaagtcattccaacacagttatccacagtaaagtgcattgctgaccattcaaa

SEQ ID NO: 494293 - DNA, 584 bp, Homo sapiens
cccacaactagacaattagtctaatgaccctaccacctgtccaactgttagtggaagtaaatagcccttaataagcagctagaaaaattcattcatggggaatttaagctgctatgcgacttctatcacatccttcatgaggatgaaacaactaagctttgtaattcaatttgaccaattatttattgcatgtctattgtttgccatacactgcgatagacactaaaaagcattcaaagctgagtaggccatgtttcttcgggaaactcattttccaattatagagatcagaaacatacataaaacacgaaaatgctgggcaactttagataattaccataaaataagtacatacaaattactgcagagtttcagagaggaaggtacatgccattctaggaatcataaaatgtttcttggggcaaaagtatgtgcactgaaccttgtgtagytggaataatctctttagctgggaaggcaagataagtagagtttagctagaagtgaaggtttcagcttgtgtattagaggtgtgtaacaaggggatgctttggaagggcctgcaacctaaagaggtgttttat

SEQ ID NO: 494294 - DNA, 487 bp, Homo sapiens
acttactaattagtatctatacagtagcaactacttattcatctaccactggtaacctacctaggtttgctgtttgtccagcaaaaarcaagatatgtatctaagaacataaataactgctttgctactttttcttccttttttcccaaccccttgctttgttacttgctagtctccaaaacgtggagaaactaatttctgattagagattttaggagtgggagggactttcatatacaagatgcatttctactgcaaattaaaggataaaatttgagaaagatgaaaacagtaaatatggagacagaaaattccagatagaagattctagaacagggttccctaaccctcaggccacagagcggtagcattaggaacaagaccacacaggaggaggtaagcagtgggtgagcattaccacctgagttctgcctcctgtcagatcagtggtggcattagattctcataggagtgtaaaccctgttgt

SEQ ID NO: 494295 - DNA, 487 bp, Homo sapiens
acttactaattagtatctatacagtagcaactacttattcatctaccactggtaacctacctaggtttgctgtttgtccagcaaaaagcaagatatgtatctaagaacataaataactgctttgctactttttcttccttttttcccaaccccttgctttgttacttgctagtctccaaaacgtggagaaaytaatttctgattagagattttaggagtgggagggactttcatatacaagatgcatttctactgcaaattaaaggataaaatttgagaaagatgaaaacagtaaatatggagacagaaaattccagatagaagattctagaacagggttccctaaccctcaggccacagagcggtagcattaggaacaagaccacacaggaggaggtaagcagtgggtgagcattaccacctgagttctgcctcctgtcagatcagtggtggcattagattctcataggagtgtaaaccctgttgt

SEQ ID NO: 494296 - DNA, 595 bp, Homo sapiens
tgagacaggacagaattgcatgaaagaatcgagaagaagattaaagagccaaggctagatttggggaaatcctttcatttaagcattagggaaagtaaaaccagtgaagaataatgagatgttagaaagcagrgcggtgtaggagacttcagaaagcaagaggatatttcatgagaaaagagataatcacagtgttacaagctgagaggcatgcagatagagaaaagggcaataggcttagtaacctgggagaaaacagttttattaaaatgttaagaatggaatccagattacaaagtgtgactaggtaaaaaggaagtgagaacactgagcttacagtatacaagtatccaggaagttggagcaaatgaaatactaaaggggatatttgataaatgggaccccaggggagaaaatagtgggcaaatgaggaaaggttcttggagagcacatatatatgtatttttgattttctgaaaagtgaaaaagaggcaaggtagaaaatttgtagagaaatgccaggatgtagataaggatcgttgtgggaacttagatggagttaatcttgcctcttttaaagcatgaagcaaggaaa

SEQ ID NO: 494297 - DNA, 595 bp, Homo sapiens
tgagacaggacagaattgcatgaaagaatcgagaagaagattaaagagccaaggctagatttggggaaatcctttcatttaagcattagggaaagtaaaaccagtgaagaataatgagatgttagaaagcagagcggtgtaggagacttcagaaagcaagaggatatttcatgagaaaagagataatcacagtgttacaagctgagaggcatgcagatagagaaaagggcaataggcttagtaacctgggagaaaacagttttattaaaatgttaagaatggaatccagattacaaagtgtgactaggtaaaaaggaagtgagaacactgagcttacagtatacaagtatccaggaagttggagcaaatgaaatactaaaggggatatttgataaatgggaccccaggggagaaaatagtgggcaaatgaggaaaggttcttggagagcacatatayatgtatttttgattttctgaaaagtgaaaaagaggcaaggtagaaaatttgtagagaaatgccaggatgtagataaggatcgttgtgggaacttagatggagttaatcttgcctcttttaaagcatgaagcaaggaaa

SEQ ID NO: 494298 - DNA, 592 bp, Homo sapiens
aggaagatcacacagtgaaccagccatgcaggaacctgcatggccattggaacccagagtgccaaatgggatagaaatatgtggagaaaatagtatttatgtaactcttctcagggaggtgctattggtgtttctgataarcaacttgggattggggggtaaagctcaccaaggtgcatactcaaggtagaataggtgatcactaaactgcctggtaggttgcattaagtgtgggagttttatcttctgagtggggtctccaggcatgactctattatagaactacatgactcggacaaggggttggcaaactttttctgtaaagagccaaatagtaaatattttaggctcatgggacaaattacctttgttgcagctactcaactctgtctttgcagtgcaaaagtaactaaagatgatatgtaaatgaatgaagacagatgtgtttcaataaagctttatttatggacattgacatttgaatttatatcattttcttatgtcaagaagtattattcagcatttgatttagttctcatcattaaaacatgtaaaaatcattcttatctcatgaccataccgaaaataagca

SEQ ID NO: 494299 - DNA, 592 bp, Homo sapiens
aggaagatcacacagtgaaccagccatgcaggaacctgcatggccattggaacccagagtgccaaatgggatagaaatatgtggagaaaatagtatttatgtaactcttctcagggaggtgctattggtgtttctgataagcaacttgggrttggggggtaaagctcaccaaggtgcatactcaaggtagaataggtgatcactaaactgcctggtaggttgcattaagtgtgggagttttatcttctgagtggggtctccaggcatgactctattatagaactacatgactcggacaaggggttggcaaactttttctgtaaagagccaaatagtaaatattttaggctcatgggacaaattacctttgttgcagctactcaactctgtctttgcagtgcaaaagtaactaaagatgatatgtaaatgaatgaagacagatgtgtttcaataaagctttatttatggacattgacatttgaatttatatcattttcttatgtcaagaagtattattcagcatttgatttagttctcatcattaaaacatgtaaaaatcattcttatctcatgaccataccgaaaataagca

SEQ ID NO: 494300 - DNA, 592 bp, Homo sapiens
aggaagatcacacagtgaaccagccatgcaggaacctgcatggccattggaacccagagtgccaaatgggatagaaatatgtggagaaaatagtatttatgtaactcttctcagggaggtgctattggtgtttctgataagcaacttgggattggggggtaargctcaccaaggtgcatactcaaggtagaataggtgatcactaaactgcctggtaggttgcattaagtgtgggagttttatcttctgagtggggtctccaggcatgactctattatagaactacatgactcggacaaggggttggcaaactttttctgtaaagagccaaatagtaaatattttaggctcatgggacaaattacctttgttgcagctactcaactctgtctttgcagtgcaaaagtaactaaagatgatatgtaaatgaatgaagacagatgtgtttcaataaagctttatttatggacattgacatttgaatttatatcattttcttatgtcaagaagtattattcagcatttgatttagttctcatcattaaaacatgtaaaaatcattcttatctcatgaccataccgaaaataagca

SEQ ID NO: 494301 - DNA, 624 bp, Homo sapiens
tatagagagatttacagagctacagtgaatagaatgcagtggaagattataagtattgttgaatcacaatttaggtaattctccttggactacttttggatcaagtgtatgcatatgtcagtatttacaccagtggcatgtcacacaaaaatgaagaaaacaatatttatatttttattattcctattcttttgactgatctctgaatgcctgggatagaagtagaactcaaggctgacttcttaaaagatrtcatgaaatgacatgtctgaccacggttacagttaaaattatatcttatattttccaatgttagaagataagaaaattttaatattttgtagtttataagatagattgttagagcttatcatttattgtcttattgtttagattgactaaagaatcagggaaaattgaaaatcgccatggatgtaaattatttgaaaagttgcatagggaatttgtcctgacattctagatttgttttttctttactacatggctaattcttcgctatgatgcaatgatgtgtttatcctttgagatggatttctgacagtcttttgttaccaccctgttagtgcaaattttactgcctaaaagtaatgctttgtaaccagt

SEQ ID NO: 494302 - DNA, 560 bp, Homo sapiens
ggccttcaacaaccacatccagtgttgtaataagcctctgtcacgtgtcatcaaataaatatgtgtagaattttaaaatagmtaaatgtacatttatatattaatgttgaattctgagaacgcaaaggcacacaatattaactagaaaagccataccttatattttagcagcaatgagaagacaggttttttaactcacaagttttagaaataaaagttcaagttattgtctttggggaaatgtattgcttaatttagacgtgctgtcaattttctttctctatctatcctcctaatctctgatttataactccgttttcttatttgaaatgaagaggtttgggctaaatctatcttcaatctagttatctttcaacaaatatatattgaatgcctattttgtgttaggcactgttcaaactgaagcaatgaatatagcataagacctccaggtaacggggggaggagtcacagatagcaagcaaaagagtaataatttcagatcataaagactgtgatagaagactcttctcgcaggaggctttgctgtggtttgcagc

SEQ ID NO: 494303 - DNA, 560 bp, Homo sapiens
ggccttcaacaaccacatccagtgttgtaataagcctctgtcacgtgtcatcaaataaatatgtgtagaattttaaaatagctaaatgtacatttatatattaatgttgaattctgagaacgcaaaggcacacaatattaactagaaaagccataccttatattttagcagcaatgagaagacaggttttttaactcacaagttttagaaataaaagttcaagttattgtctttgrggaaatgtattgcttaatttagacgtgctgtcaattttctttctctatctatcctcctaatctctgatttataactccgttttcttatttgaaatgaagaggtttgggctaaatctatcttcaatctagttatctttcaacaaatatatattgaatgcctattttgtgttaggcactgttcaaactgaagcaatgaatatagcataagacctccaggtaacggggggaggagtcacagatagcaagcaaaagagtaataatttcagatcataaagactgtgatagaagactcttctcgcaggaggctttgctgtggtttgcagc

SEQ ID NO: 494304 - DNA, 560 bp, Homo sapiens
ggccttcaacaaccacatccagtgttgtaataagcctctgtcacgtgtcatcaaataaatatgtgtagaattttaaaatagctaaatgtacatttatatattaatgttgaattctgagaacgcaaaggcacacaatattaactagaaaagccataccttatattttagcagcaatgagaagacaggttttttaactcacaagttttagaaataaaagttcaagttattgtctttggggaaatgtattgcttaatttagacgtgctgtcaattttctttctctatctatcctcctaatctctgatttataactccrttttcttatttgaaatgaagaggtttgggctaaatctatcttcaatctagttatctttcaacaaatatatattgaatgcctattttgtgttaggcactgttcaaactgaagcaatgaatatagcataagacctccaggtaacggggggaggagtcacagatagcaagcaaaagagtaataatttcagatcataaagactgtgatagaagactcttctcgcaggaggctttgctgtggtttgcagc

SEQ ID NO: 494305 - DNA, 600 bp, Homo sapiens
agcagtattattgacaaatgaggaagaatgaaaacgtatgaactaaactagtaatagtaggaatgattgcataaatttgtttttatacagatctaggtgaatttcaaatccttcaytgtgcctaaaacatcattttgtcaagcataatacaactacaagaatatttaccatattttcaagacagttctttcattaatctattctatattaaagaaatagacccctaagcaaacattttccccagtttgtatgattttcttttttagaatctttaatatacatctcaaggtgcttgctaaataacaactctccaatttgtctgggaaatagtagcaagttgatttctgcaaccataggggttcttaatctggttttcactggcaggttttggaatgtctgtaagctcctccgctgtgtgcataattttctgtatatgggaatttattttttgtagaagagtctatagttttcagagtttaaaactatagaaggttaagctccactctactacagctcttcccacatgatatataacagttgggtttcttaggatgcctccaaaaagctcaatttttgctgtgatctagactaaggcaacac

SEQ ID NO: 494306 - DNA, 600 bp, Homo sapiens
agcagtattattgacaaatgaggaagaatgaaaacgtatgaactaaactagtaatagtaggaatgattgcataaatttgtttttatacagatctaggtgaatttcaaatccttcactgtgcctaaaacatcattttgtcaagcataatacaactacaagaatatttaccatattttcaagacagttctttcattaatctattctatattaaagaaatagacccctaagcaaacattttccccagtttgtatgattttcttttttagaatctttaatatacatctcaaggtgcttgctaaataacaactctccaatttgtctgggaaatagtagcaagttgatttctgcaaccataggggttcttaatctggttttcactggcaggttttggaatgtctgtaagctcctccgctgtgtgcataattttctgtatatgggaatttattttttgtagaagagtctatagttktcagagtttaaaactatagaaggttaagctccactctactacagctcttcccacatgatatataacagttgggtttcttaggatgcctccaaaaagctcaatttttgctgtgatctagactaaggcaacac

SEQ ID NO: 494307 - DNA, 623 bp, Homo sapiens
ttatatttaaatacgcagaggcagaacagtgtcagggtctcaggaatggttaatattataatccatatttcttgagaatttaggtttttattctagtatagtggtagataaagccaaagaagtagatttggagctgtgtcgtaggacttgaagttcaaaataataaatttggtgtttatttagtgggcactgggatataacaaagtgctttggagaaagctgtgctaccatcagaacagcttttctttatggacctatcatgggacagcctgccctagcacttattagcatgtatggggcctacagcaagactgtaaatggaggcccccataccatatatctaataatgtaaaagtatcctcctaccttgaaaaatatttctcaataatcyggaagactaaattcaaaccagaatttttttgttcttcagaattccaagtgcaggccagaatcataaccatatggcaataggtgaccctggtccccctctaccagctatctcctgctttctaacaaaccatgagtagcccacatatccaactggggtaggataagaaatggtccacttgcttctcccaccccagttaaacagtgaaccttgcctctaggatacacacaactgc

SEQ ID NO: 494308 - DNA, 627 bp, Homo sapiens
tgaggcatgttacaaagggtgatatgagaaattacttgggattagtatatggtagaaatattttgtaagaggaatgcattattgaagacattatgcaattcaaaattcgtgtaattcaaaactaattttaaagattggccagtgttattacttacaagctaaagtggcattggtaactgcaatactataaacaaagtttattattcatttccgatgattttgaaattatttaattattgacaaaatatttcttttgggagattcacatcgttttaaattttgagtataaagtgatattttaataatgtttcttattacactctgaagtatgcacaattgtaagtagctcaattgtgcttgtgttataggcaacaggatttcaccaacaggaacagggcaggtggaagattttttgtaatacctgtagatgcaacattgcaargtgaacttcaaggaattattaatacataatattgtttatatactttaggtatctctgactggaatgtgctacaatgtaactctcagtggtaatgtgagagccatttttgtgtctataaaaaatgatttcagtcatgtagaatcaaagctgaatgctgcttgagttttttagttggggcctaatcg

SEQ ID NO: 494309 - DNA, 667 bp, Homo sapiens
tcaaatctctcttttgccttatttgcttttctcctttttcacaggtaaccaccattctagccactattgtatgtgccctttacatctacatttttaaactttgcataatatcgttatggggaatatcattaaaacaatgcataatattgtttggtatgtactaaaaatatacataaattatatttcattggctatatttatttacgartgaattttctactgattaatatatttttgagatttatccatgtggatatgtttaacttgatgcaacacattagaaaatttattgattcttccctagatggtcagtttatttcactaagataaataatgttatagtgaacctacttgtacttgtatatgattaagtgttgggttgctagaaattattaaagatttccaaatctccaatatgagagtatcaaaataagagtcctcaccaacagcagtaagtgtgtggaagtttcaatttttccacattatcaccaacatcttggtttaatacatttaaaaatgtttgctgggtttgaggtatcattgtttaaattttcacttctctaataataaaggtaaacatttttccataagtattggctattcaggtttcttcttctgtgaattatctatgcatatcctttatacctttttcttttaggtttttgtt

SEQ ID NO: 494310 - DNA, 667 bp, Homo sapiens
tcaaatctctcttttgccttatttgcttttctcctttttcacaggtaaccaccattctagccactattgtatgtgccctttacatctacatttttaaactttgcataatatcgttatggggaatatcattaaaacaatgcataatattgtttggtatgtactaaaaatatacataaattatatttcattggctatatttatttacgaatgaattttctactgattaatatatttttgagatttatccatgtggatatgtttaacttgatgcaacacattagaaaatttattgattmttccctagatggtcagtttatttcactaagataaataatgttatagtgaacctacttgtacttgtatatgattaagtgttgggttgctagaaattattaaagatttccaaatctccaatatgagagtatcaaaataagagtcctcaccaacagcagtaagtgtgtggaagtttcaatttttccacattatcaccaacatcttggtttaatacatttaaaaatgtttgctgggtttgaggtatcattgtttaaattttcacttctctaataataaaggtaaacatttttccataagtattggctattcaggtttcttcttctgtgaattatctatgcatatcctttatacctttttcttttaggtttttgtt

SEQ ID NO: 494311 - DNA, 667 bp, Homo sapiens
tcaaatctctcttttgccttatttgcttttctcctttttcacaggtaaccaccattctagccactattgtatgtgccctttacatctacatttttaaactttgcataatatcgttatggggaatatcattaaaacaatgcataatattgtttggtatgtactaaaaatatacataaattatatttcattggctatatttatttacgaatgaattttctactgattaatatatttttgagatttatccatgtggatatgtttaacttgatgcaacacattagaaaatttattgattcttccctagatggtcagtttatttcactaagataaataatgttatagtgaacctacttgtacttgtatatgattamgtgttgggttgctagaaattattaaagatttccaaatctccaatatgagagtatcaaaataagagtcctcaccaacagcagtaagtgtgtggaagtttcaatttttccacattatcaccaacatcttggtttaatacatttaaaaatgtttgctgggtttgaggtatcattgtttaaattttcacttctctaataataaaggtaaacatttttccataagtattggctattcaggtttcttcttctgtgaattatctatgcatatcctttatacctttttcttttaggtttttgtt

SEQ ID NO: 494312 - DNA, 667 bp, Homo sapiens
tcaaatctctcttttgccttatttgcttttctcctttttcacaggtaaccaccattctagccactattgtatgtgccctttacatctacatttttaaactttgcataatatcgttatggggaatatcattaaaacaatgcataatattgtttggtatgtactaaaaatatacataaattatatttcattggctatatttatttacgaatgaattttctactgattaatatatttttgagatttatccatgtggatatgtttaacttgatgcaacacattagaaaatttattgattcttccctagatggtcagtttatttcactaagataaataatgttatagtgaacctacttgtacttgtatatgattaagtgttgggttgctagaaattattaaagatttccaaatctccaatatgagagtatcaaaataagagtcctcaccaacagcagtaagtgtgtggaagtttcaatttttccacattatcaccaacatcttggtttaatacatttaaaaatgtttgctgggtttgaggtatcattgtttaaattttcacttctctaataataaaggtaaacatttttccataagtattggctattcaggtttcttcttctgtgaattayctatgcatatcctttatacctttttcttttaggtttttgtt

SEQ ID NO: 494313 - DNA, 432 bp, Homo sapiens
ctaagcatggaatgtaaggttcttctgaccccatcctatcttctytcctatcgtcgtctctcactatacttccacaggcaacctagtttagtatttcacaatttgatccataggagaggttaataagctctctttgaaaaatggcttgactggaaaataggttttttaaagttgcatatcatatctccctcttggaaatccaaaatgaacatcagtgtattaaggtggagagggggaaggttggaagggttcctgaaagagtaaattaaacaagggttacacaattagtgacaagattgccccctctcctccaacaaaaagggtcaaataattagaataagtaaagagataaattatcagtcttaaatcagtatgaaagaaaaaattaaagccctttaaagtatatactattcatttcagcattcaactagc

SEQ ID NO: 494314 - DNA, 658 bp, Homo sapiens
ggtagtggcgggtcggcaaggcacagcacacgacctrgtggaccagccactgggaacaatgagtctatggtggccaaatccagccttgtcctccactttgtcaagggacaatttcaagagtaccaggagagcataatcagagcagccttccttacacagactgtctgcttagacgacacaatagtcaagtttgagatctggggcagcgctggacaggagcggtatcatagcccagcccccatgtactatgaaatcaccaaaaaagatacatttgcaccagccaagaaatgggtgaaggagctagagaggcaggccagccccaacattgtcactgtacttgtgggtaacaaggcagacctggccagcaagaaagccccagaattccacgaagcacaggactatgcagacgacgacagttgactatggagacatcagtaaagactgcaatgaacgtgaatgaagtttacacggcgagagctaagaagattcctaataagccccagagtgcacctggtgctccaggccaaaactgaggtacggacctccagaagaaccacccagccagcaagagccagtgctgcagcaactgagcccctcttgcctgcccactgcaactacttcctctgcctgaacgactagactggaatccattctaact

SEQ ID NO: 494315 - DNA, 645 bp, Homo sapiens
aaaaatgtttttctatgtttactacagaagatatgcatactgaatttaccattagttctataaagtctagtacctgtaaagataaatctagcttaggaagtaggtgaaacagtaggagagttatacttagcctacaaaatgtatgaattccaaaccatcaattatattaaatatctactatgtggaaagctctacgtcagttataaaggaaataaatgtttgtaagatgtaatgctattgtagtggaaatacaacatattagtattagtactgagatagggaaggrtcagagatgtatctaacataagtcacatttcaaatcagaatgaaacaattaattgaaatgcaaatactattaccaggcttttttccttgccaaaataatcaaaccctttgttctgacaattataacagtattaggctacacaagccattcagactagtaaggtaagaaagttttaagatggaagcaatgtgcagataaaatcagatgttagctgagtaaagcaagaactatatttattgctttctgctaacgtttttgagacaaaggaacaaatgtctagcagctgaaccaagacaagttagggacttaaatggcattgtttaaaaaaaaaaaattctatttccggtttcttaagttta

SEQ ID NO: 494316 - DNA, 547 bp, Homo sapiens
cttgaatctagaggtggaagctgcagtgatctgtgatcgtatctctgcacttcagcctgtgtgacagagtgagactttttctcaaataaaagaatcaatacagcaatacagccccaatttctaaattggagaaagtcattttctatttcgtctctctctgttcctccactagattgtaaactctttgagrgtaagaattatgcagttttgtctgctcttcaatgttttattgccttgcattaaaaagataataaatactgcttgatgaattaattaaaaacagcatacagaagagatccaaatttaattttgtaataaatcacctctgagaataataagaaaaccagaatatttgaaatacatcatttaattgaataaggaacagtaaactgatttttaatgttcctgtttttatgtatttgaagttaatgtttagttattttgttttaaaatctttataaaaattctctgctttatcttccagtgaacaagacatattaatagcttttctgtagagcaaggcatattaatagcttttctgttgaat

SEQ ID NO: 494317 - DNA, 547 bp, Homo sapiens
cttgaatctagaggtggaagctgcagtgatctgtgatcgtatctctgcacttcagcctgtgtgacagagtgagactttttctcaaataaaagaatcaatacagcaatacagccccaatttctaaattggagaaagtcattttctatttcgtctctctctgttcctccactagattgtaaactctttgagagtaagaattatgcagttttgtctgctcttcaatgttttattgccttgcattaaaaagataataaatactgcttgatgaattaattaaaaacagcatacagaagagatccaaatttaattttgtaataaatcacctctgagaataataagaaaaccagaatatttgaaatacatcatttaattgaataaggaacagtaaactgatttttaatgttcctgtttttatgtatttgaagttaatgtttagttattttgttttaaaatctttataaaaattctctgctttatcttccagtgaacaagacatattaatagcttttctgtagarcaaggcatattaatagcttttctgttgaat

SEQ ID NO: 494318 - DNA, 514 bp, Homo sapiens
agttttatcctactgagtacaaatatttgttggggaattaaagatttattagataaatggcttaaagattaattaattaactatactatctttttactttcctatcttatctgtaggccattggtctgttaatatatataaattgctctgtttcctgctatctttccatttcttaattaaatattagaaaaatgcccaaggaaaaacaatacaactgagcttcctttctggttttcatgcttttaaaatttataaaaattgtggctctgctgcctttttttttttttttttttttttttgtagttagatgaatttggcctgrgattctatgaaaaaaataaaacaatagtttttatttcatgatttttttttcaagttgttctgattttataatatctagtcaagtgatgacatgcagagattttgctgtgaggagagggagagagcaaaaagtattctgccctgattgctttttagtgattttattactagaaagataaacattgccttgtta

SEQ ID NO: 494319 - DNA, 627 bp, Homo sapiens
agtactccataagaaaaatttgctatagaaagcataaaaactgcaaatgcattatatcctccatgaaaccagctttaatttagttgctaaaccctgatcattgttgcactatacactcagaaaatgtatagcagtgactattttgtaaatatgaagagttcatattcagcacattcagcaatggtttatatctaaaatgatttttgaagaatgctttaaaaaacttctttgcctagagtctttaaagctggcactttaaaactatgtttcatggattgtcagttggaatggacttcaggaggtccataagtccatgaaattacagttttttaacatgaatttttctgaggatacatratttttatcatactctcaaaagaatctaaaactcaaaaatggttaagagacacttaaataaaatgttgataaaggccatggtcattgattctcattcttcagaagctttgcatgtgtgagtttacctactcactaaaatgtacttgtaaatccaaaaccagtactcggtgcttttgcagtcatttgtaaacatatttggagaagcaaaaattttgagttaccttatgtgttcattcctctctgaggtcaaagaaggtgatggtttgcctt

SEQ ID NO: 494320 - DNA, 534 bp, Homo sapiens
aatacaaatggacatggcagtattccaataaaactttactgataaaaatatatggtaggccagatttggcaagagggccatagtttgcttggccctgatctatgtattcaggacctggtctacattcaggttagtatgctattctggacaaattggcattagtagctttaatgsatgaaatgaagtcaaaggcagtgaatgggctcagaggtggtatcagaggtaagagagggaaggtggggaaccttcctcactggaaggttattatcgtcaaggtgttcctaaggagacggtatggtacttaaaacccagagacttcatgattgccctgtaaagaggaactcttggggtgtgctgcaggagctcatgacacaaactcttaccaaaggcttcctttcctcttgggatctctgtcttgcaactaatgtagctgagttcacattctaatacataactgactgatacaatttttttgtctcttggacagtgaggtaatatgttggaatgttgggggtacacattctattgtggaga

SEQ ID NO: 494321 - DNA, 475 bp, Homo sapiens
gaactcctgacctcaggtgatccatcctccttggcctcccaaaatgctgggattacaggcatgagccatcacgcccagcccacttgctttctttttaggtcaacatctgttcagttttggctttcccaagccattgatggccatgcctcaaatgtttgaagtaaatgttctggccctaaaaagaacaatttttctacatatgaacaaacatgacttcttaatcctccactatcaggacycttgaaggttaaagtttctagctgccatattcttgccctaaacagatcatacattgcccctgagatgacatgaatttattcagttatgggcactgaacattacgaaatattctggaattgaaataatcaaaatgttatcaaccttctccctgccaagtcttccagccctctccatgaatcacagttgtgatgcacttttacaaagccggatgaaatgcccggagccctggctgggg

SEQ ID NO: 494322 - DNA, 613 bp, Homo sapiens
actgatgagtgttcagaacaccaggcccaccacttattagctgttgtgggttgaactgcatcccctagagacattttcaagcccaagtcctcagtacctgtgaatgtgaccctatttggaaatagggccttgctgatataatcaaaatgagatcatgctggattagggtgggccctaatccaatgacctgagtccttgtgagaagtgggaaatggggacatagtcaggcacatagggagacatcatgtgacaaaggaaatagatattggagtgacgtgtccacaagccaaggaataccaaggactgtgggcaaccaccagagaagcaaggaagaggcaaagaaagaccctcccccagagccttcagaggggccatggtcctgccgataccttaatcttggtcttctggtctccataaatgacacaataaatttctgttgttttaagccaccctgttggtggtagaattgaggttctaatactttaaaaagtatttttataaaaaatgaaagcaaatgttttaagaattcaaattcaaaaaatttagttaactctttttttwaaaaaaaagactactttaatatttgtttttgatagaaagagctgtcttctga

SEQ ID NO: 494323 - DNA, 599 bp, Homo sapiens
atgaccgcagatgcactttttaccccttgaacagtataaaatgaaattgcttaagaaatgggaaggcaaaagtagaagtagaatattacatgtggtatggagaaggcggactcaagaactagagataagatcacttgtgttatgtgtctcatgaaatgaaatgtaattaatttgtatttgaattgggagcttcagtttgttttaaatatatttgtktacctattgttttagaattcccaaaaagttatctacatttttgcttacatttcatgaaaacacccaaagaatgacttgtttacctacatttttttgtttgtttttaggtattggttaattatttctcaattcccaggattccttcacccaaactgaggtggtatagaataaatgatacatgtttggagggacaaaagtcattgtttgagggaaagagtgatatcagtattacaactgcttctggctgaacaggtttgctttttagtttataaaacttgttacctacattggagtcagagctaaaacataattttcagtagcttttgaagtgttttattttaacagctttattgaggtatataactcatacatgataaaactga

SEQ ID NO: 494324 - DNA, 560 bp, Homo sapiens
gtgcagctcagtgatttttagcatgttcatagagttgtgctacctgcaccacaatctaattttaaaatgttttcatcatcccacaaagaagccctgcaccctttaacagtcattccccatttccacccctcaaacttttttccaaagtggcttcagccttttcatctgcmacagcagcatgtgagggtttcagtccacctcctcgcccatggtttatagccttaaagtgtcataaatgtaactgtaggaaggtcatggaacccagcatgatttagatttttgattcacctcacagataactagatcaaggcaaaatcaacctggaatcaaccatttttttcccaagataaagtcacaggattctaggctcttaaagtgcttcagcaccagacaatccggtagtgattgagattcaaataaaaatgtgctactgttgacctccttttatatttcaagtgaaaagtctatctatgaatctttaaggagatgtttatagacaatgctcaaatgggggttattagggaaagataattttggggaagggagcaaaggcaacagga

SEQ ID NO: 494325 - DNA, 599 bp, Homo sapiens
tggcttttcatctccaaaacggtacacgacatttatactgtaagaaatgcaagttgagtgagccgagattgcgccactgcactccagcctgggcgacagagcaaaactccatctcaaaaaaaaaaaaaaraaagaaagaaatgcaagttgaaactatgatgaaatgctattttaaaaccaagaaatttgcaaaaatccaaaagtttcacaacacattcaaaatcctggagacaatatgaattagctcaatgctcttgaacttaatttggtaatacctggcctcaatgatcctcccaactcagctttttcaatattttctgaaattacaattacaaatgtatattccttttgactcagcaattcctcttttggattttacctaacaaatatgcctataagcaaaaagatatatgaatatgtaaggtttttcactgcacattgttttccattaaagccacagggactggtcgaacaaactaagataaagtcccatactggaatacagtgcagaagtaagaaatgaataaggaaggtcagtatgcattgatgtggaagatcttccagatatttgtcaagtgaaagagaacaaggcacatacc

SEQ ID NO: 494326 - DNA, 624 bp, Homo sapiens
ttgatgtagacctacagttaactggtactttgttcttttttttttttttttttaagacacggtctcactctggcgcccaggctggagtgcagtggcgcaatctctgctcactgcaagctccgcctcccgggttcacaccattctcctgcctcagcctccrgagtagctgggactacaggcgcccaccaccacacccggctaattttttgtatttttagtagagacagggtttcaccatgtcagcaaggatgggggtctcaatctcctgatctcatgatctgcccgcctcggcctcccaaagtgctgggattacaggtgtgagccaccacgcccggccctagattcatatgttattgttagagataatacagatcatttgtatgctttgcccagttttcatcaatggtaacattttgctaagttgtactatagggacatccctcagtatccaagcaggattagttccaggaccctcgcagataccaaaatccatggatgctcaagtccctgatataaaatggcatagtatttgcatataacctacccacatcctcctgtatactttaaatcatctctagattacttttaatacctaatgtaatgtcaaggctatgtatggcagct

SEQ ID NO: 494327 - DNA, 624 bp, Homo sapiens
ttgatgtagacctacagttaactggtactttgttcttttttttttttttttttaagacacggtctcactctggcgcccaggctggagtgcagtggcgcaatctctgctcactgcaagctccgcctcccgggttcacaccattctcctgcctcagcctccagagtagctgggactacaggcgcccaccaccacacccggctaattttttgtatttttagtagagacagggtttcaccatgtcagcaaggatgggggtctcaatctcctgatctcatgatctgccygcctcggcctcccaaagtgctgggattacaggtgtgagccaccacgcccggccctagattcatatgttattgttagagataatacagatcatttgtatgctttgcccagttttcatcaatggtaacattttgctaagttgtactatagggacatccctcagtatccaagcaggattagttccaggaccctcgcagataccaaaatccatggatgctcaagtccctgatataaaatggcatagtatttgcatataacctacccacatcctcctgtatactttaaatcatctctagattacttttaatacctaatgtaatgtcaaggctatgtatggcagct

SEQ ID NO: 494328 - DNA, 612 bp, Homo sapiens
gtcagatgttctgagattggtatccacctgttccgcttcacaaaacagttctaagatcacaagcggcttttgtatcactaaccccaatggtatttttctgttctcatcttccttgaacttcagtgctttgacaccattgacgactccctccttaatttgccaacaccacattcttcaggtttcctattacctcttgagctgctctttctctttcaccttgatagagtcaycttctttatcaaatctttaattattttagttattcagtatataatcctcatctctcatgttcttctactgtattctctacctaggtgatctcatctacttatttggctttgcctttattatctgtttattattaactaccaaatatatagctcaagttcaaattccaaacttgatcttcagactcaagtagccaacttttaaatctatttgcatgactcactgctgcctggaactcagtgttttccatactgaactcataacctttccagaaaactgccaggtcctccttcagttgttcatatcttgataaacaaagccatcaaaggaaatgcctaaatacccttcctgacatttatttgcttcctactgcatatccaagcc

SEQ ID NO: 494329 - DNA, 313 bp, Homo sapiens
agtatttgcccttccatctaaaattgtgttcttacataccacaatttccagttccaaagaggagacccscacactgctatggtttgctctgacggaatggccaaagtgggggaacaagttaaaagtgggtccagaactttgctcatttatatgaaagtttggtcttaaaagtattggatcaataaaagtattagaaattaatttcttcttgatatttttaattgcctaaaaaaacagaagttatcagttgcatgggatgttttgtacttagtgattctcatttcagagaagcttagttttaatgagttcctat

SEQ ID NO: 494330 - DNA, 521 bp, Homo sapiens
agcaccccaaaccatatattactgttcatttttaacatttagccctgctcataccagtgtctattacattgtcagtgagagtgtctgggaaagatgttcatggagctgggtctggagagattattagattaatagcaatagaagtaatagggaatgaggaacccattttaggtagaaagagcataggcagagatagggagaagaaaaacagcatggtacattcctggaactaaaagcgttacctgcatttgtggaactacaartgtccatagcaacagaaatggagcaaccagcagatctgcagagccttatgtataatgcttaagagccaagacttcgcactgaagaattttaagtaggatagtgaaagccaacatttttggtttggattatgcacgctggtggcggagacaaaataagaaaccccaatgatagagacagaaaaaaagttgaaacttttatgacatatatttaagagataaagtacacagcactcaatgactgagtaatgttaaaacaga

SEQ ID NO: 494331 - DNA, 480 bp, Homo sapiens
aaaattgttctttgctcaatttaactttgttaagttgaaaaaaattctgagaaagtctgataataaattatcttactaaatataaaagcttgatgttcacttaaatgtgtcttaattaattcatttatcaaatactaccgagagcctgcaatataccaggcatgtctaaggccctggggaaccgaaatctaataggtagctactctgacctgtcagtctagtaggtgagtcagttacatgaaccactaattgcaatacactgtgataatttttttcgaaaggattcagtgttgacatgaaraaggggatgaccagctcagacagttagggttagggtagattttaccaattttcttgagcttggtatggtggctaagaagcggggcagagatggacattccaagaagaggcaaccacatgttcctaatcatgaaaccaccaaatacaagagtaagttcaggtgactgaatgaaatttgct

SEQ ID NO: 494332 - DNA, 670 bp, Homo sapiens
ttttgagcaattagaatcagggagacagaaatctgagtttatgtaaaaggcttgatagaattatattctattctagactgacctaagatgtgaaacataggaaaaaaatatgacaaatgtaacataagtaaaaatatccaaataaaactgtagcagttatagctaatggtataaccaaacagcattgaccaaccccaacagaactttccatgatcatggaaaagttctatatctgcaccatgtccagtacagtagccactagccacctaagattatggagaattttaaatgaacctattgagctagtatgggtgagaaactgaagttttcattgtatataattttaattaaacttaaatagtgtgaactaaatatgatttaaagtccactaatccgatgcattcatggggagcttaaatttagaacacagtttattagggagagagtcaaggcttgtggattatagatgaataggttctggggccaacagtggtagtgatagcttaccaatttgggagaggagcagcagtttccttggtagtttaccagtrtggctttgtaaatattcttgaaaactcagactagagtttatttttttaatgcttcccggtgattctgtgagctattgcaaaccctatgacaaaagttcccaaatatttttcagttcata

SEQ ID NO: 494333 - DNA, 567 bp, Homo sapiens
aggatgccttacaatgggcttaccagttaaaggacaagttacttttctctgctttgagcaggttgttcaacatgcagaatataacttttaaaatgcatgaatgaaagggtgcagatttacaattgtataaaaggatattcaaaataagtttttaaaagctgccttagcttaatatagctaataaaaaaatgacaaacaagcaactagaacaataacaacaataaagaaaatgactgttatccttctgaattcctttgcctgtcattcaaatgggatattacccttttcrggactggctgaataactcaaactaatgtaccaacctgtgctgcttacattccctagtgcattccattttggtgttattacttttgcagccactacattggcttcttgcaaaatagaatctctaaaattttcctgcattcaatgagctgttgaggttttctaataagaaaacacaacactaatgctgctgtcttaattctgtgcattactttcccgccaaattcagaagcatgccgatgtcactacaagcaatccattagaattacagtcacctctgca

SEQ ID NO: 494334 - DNA, 598 bp, Homo sapiens
aagaaactctgaaccctttcgctctcagcaccgacagacctgtcccacccctctaggcaattactaccctactttctgcattcaaagatttttatattctgagcatttaatataaatataaccatataaaatgtagtcttctgtgactgggttttttcaccaamcataatgttttcagggtttactaatgttgcagtacgtatcactgctccattcctttctaaggccaaataaaactttactgtacggatccatttgccttttaaatcacacaaaggaagaaaagagaagaaatatgcatgtattctgtttctgatgctggtataactctctttactaggttctttgtgtaagtttgaattactttcagaatgtacttgctttctgcctgaagaatttcctttcactatttcttataacataggtctgctagaaacacatttgctcaatctttatctgggaatatctttatcttgccttcatttttaaaagatagtttgctgcctatagaactcttggttgactttttttttaaatctgaacactttgaatatgctgtcctactacttcctctccattgtttctgatgagaggccag

SEQ ID NO: 494335 - DNA, 598 bp, Homo sapiens
aagaaactctgaaccctttcgctctcagcaccgacagacctgtcccacccctctaggcaattactaccctactttctgcattcaaagatttttatattctgagcatttaatataaatataaccatataaaatgtagtcttctgtgactgggttttttcaccaaacataatgttttcagggtttactaatgttgcagtacgtatcactgctccattcctttctaaggccaaataaaactttactgtacggatccatttgccttttaaatcacacaarggaagaaaagagaagaaatatgcatgtattctgtttctgatgctggtataactctctttactaggttctttgtgtaagtttgaattactttcagaatgtacttgctttctgcctgaagaatttcctttcactatttcttataacataggtctgctagaaacacatttgctcaatctttatctgggaatatctttatcttgccttcatttttaaaagatagtttgctgcctatagaactcttggttgactttttttttaaatctgaacactttgaatatgctgtcctactacttcctctccattgtttctgatgagaggccag

SEQ ID NO: 494336 - DNA, 598 bp, Homo sapiens
aagaaactctgaaccctttcgctctcagcaccgacagacctgtcccacccctctaggcaattactaccctactttctgcattcaaagatttttatattctgagcatttaatataaatataaccatataaaatgtagtcttctgtgactgggttttttcaccaaacataatgttttcagggtttactaatgttgcagtacgtatcactgctccattcctttctaaggccaaataaaactttactgtacggatccatttgccttttaaatcacacaaaggaagaaaagagaagaaatatgcatgtattctgtttctgatgctggtataacwctctttactaggttctttgtgtaagtttgaattactttcagaatgtacttgctttctgcctgaagaatttcctttcactatttcttataacataggtctgctagaaacacatttgctcaatctttatctgggaatatctttatcttgccttcatttttaaaagatagtttgctgcctatagaactcttggttgactttttttttaaatctgaacactttgaatatgctgtcctactacttcctctccattgtttctgatgagaggccag

SEQ ID NO: 494337 - DNA, 598 bp, Homo sapiens
aagaaactctgaaccctttcgctctcagcaccgacagacctgtcccacccctctaggcaattactaccctactttctgcattcaaagatttttatattctgagcatttaatataaatataaccatataaaatgtagtcttctgtgactgggttttttcaccaaacataatgttttcagggtttactaatgttgcagtacgtatcactgctccattcctttctaaggccaaataaaactttactgtacggatccatttgccttttaaatcacacaaaggaagaaaagagaagaaatatgcatgtattctgtttctgatgctggtataactctctttactaggttctttgtgtaagtttgaattactttcagaatgtacttgctttctgcctgaagaatttcctttcactatttcttataacataggtctgctagaaacacatttgctcaatctttatctgggaatatctttatcttgccttcatttttaaaagatagtttgctgcctatagaactcttggttgactttttttttaaatctgaacactttgaatatgmtgtcctactacttcctctccattgtttctgatgagaggccag

SEQ ID NO: 494338 - DNA, 654 bp, Homo sapiens
cattgcttaggttatgataatttcccgtcattctctagatgccatctggctttttcacaggacacatgggactgttgagaagggggctttgggctgacctgacaatttgtatcttacataatttctggattgtttgggtggttttagagtgtccccctggcagataatattgttttacatttactgcctgccttggccggggcaagtgtacaagcatccatctcctttttgtttcctgattaccttatggactcaatccttgtctttagctcaatgaggtctgccagtgctttcctcctatsacagaactgatttcccattaatgggctcagaagtgtgaccaatgcctcatgtcgtaaccctttttacattggaaatgacctagacatttaatgagttcctaaaataattttaagcttttgaagtacataaaagtttctcctgtaagcatttatctcatttacatttactcaatttatttatctttaacagtttatctgtattattcatgataacctagacattagacaaaactagtcatcattccaagttattctcctgttaaccatttgtgtagcctgtgaatatcaggtgtttacctaagcaagaagtttaaacacatgggcatctttgctggtgattcagaaaattcag

SEQ ID NO: 494339 - DNA, 742 bp, Homo sapiens
ctgccaaaatgaatttagcgaatgtgagattaccagaagacactaggattattatcctttttttcttcaaaagtaatgacctgaaatgcagttaatcacaatctcctttcattccttaagtattcattgattctacacttgcataataattctcatagtatttgttcattgcatgtgacatgccattttttgtttctatttttttcttaacgagtcaaaaaggacgtgtacctatttgaatgactatgaggtgtaaaaaatatttacaaaataacgtctcacccgtcaactttgttctagctacagtttggaaatattgccattttatgtttgtatacaatgtaaaaacaatattttgtacatatgttgttccattgggacccttaaataaaacagtgggttgaggccatctgcattcacttctcttagacaatgtagtcaatagaagtggatagagagatcatttttaccttatcctcttaaaattcatagaggccaggcccaggaatgaatatcacattcctggtgttagtttattaaatggcttgctaggtagtcacacaattcctttattaatattattattttaggaataaaaagatctaagaatacaagtgttagaaatataatatttatgccattaagatcaggtttgaaattgtctaaatagaaatgtagtttacctaatacaaaggctatgagaaaattcacctsagaatgtttttgtacctttcctcacagc

SEQ ID NO: 494340 - DNA, 611 bp, Homo sapiens
catcacacccagctaattttttatattttttgtacagatgaggtttcaccatgttggccaggctgatcttgaactcctgacctcaggtgatctgccttcctcggtctcccaaagtgctgggattccaggcatgagccaccacaccsgaccccacttcttatttgaatctaaactatgataactaactgtgggattaacatatacacaattgtaatggtaattcaaacaatccatgtatataaagcaggatgcctgttatgtcgaaactgcaatatgtaagttactgctgctagtatttttatttcagtgcattggttcagtattattttgacttaagagatatttatgggtgccaccatatttcaggcactgtggtaggaatggatacacaacacagcaaaaacaacaattgcctctcctgaaaattataggtgtcaaccaataattataaaccatgtgtgtaaatttacatttaaaatttatacgtaagggcaaaggaagcttttagtaattcatagattgtctttcaacgtatgctttccttgttcagagctaccatttttctagaagagaaccaaatctccctctcctggttttacacacacatacac

SEQ ID NO: 494341 - DNA, 611 bp, Homo sapiens
catcacacccagctaattttttatattttttgtacagatgaggtttcaccatgttggccaggctgatcttgaactcctgacctcaggtgatctgccttcctcggtctcccaaagtgctgggattccaggcatgagccaccacacccgaccccacttcttatttgaatctaaactatgataactaamtgtgggattaacatatacacaattgtaatggtaattcaaacaatccatgtatataaagcaggatgcctgttatgtcgaaactgcaatatgtaagttactgctgctagtatttttatttcagtgcattggttcagtattattttgacttaagagatatttatgggtgccaccatatttcaggcactgtggtaggaatggatacacaacacagcaaaaacaacaattgcctctcctgaaaattataggtgtcaaccaataattataaaccatgtgtgtaaatttacatttaaaatttatacgtaagggcaaaggaagcttttagtaattcatagattgtctttcaacgtatgctttccttgttcagagctaccatttttctagaagagaaccaaatctccctctcctggttttacacacacatacac

SEQ ID NO: 494342 - DNA, 614 bp, Homo sapiens
ttgtgcttcaaaatttctggcaatcactggcctctcttattctccctctttttctcaacttaatatgttatgatcattgaaacaatgggctaggatatgaagacctggtttttgccagtgagtkggctccaccatctagccaagatatctttatgggagggcttgaggaagtgtgacactattctaatcttttgttaaaacaacccctggccagaagttagctgtatggtcacgccatctcaagtgaggctgagagtattgactttagctgggctgctgtttgatcagctcatactccagcgttttcaacaagtgtcttccagggttatcctggatgcaaatatctagttcgaagaaaaagaaagaggaccagtaaagaaagcacacctaattcttagtgaccttggtctactaatagaagtgagtagttacatgggtctatttagataaaagggaggctgaaacatgtagtcccttgccacgtagcctaaagagattctaagattctcaagaatagcctctgtcttctgtttaatgtttaggttaaaaataaaatcacagattacttaagaacctaaaattcttaaattggagggtcatccctgtaaaatgaa

SEQ ID NO: 494343 - DNA, 496 bp, Homo sapiens
ctcccaaacacctttggtcttatttgttctgtcattctaccctttatagtgactaggtcatttgtatctcctaagctcaatgtcagaccttgttcttcgtttctgcaaaaataggattctagcttccgcmcaatgagctaatgtcctaaaatttatttctctggaatttcatccaacttatctgtgtgtgtgtgtgataaccttttctgtactaatgattcattctttttttacacagtttcttcctcatctaaaacatttcctcttccgatacagctgtctataatatgtcttttcaaaatcataaaatgtcacagccccctctttcaatactcagatatttactttggagtcatcccctcctcatgtaagaaactacccaccatgccatattctagaagtttcctaagcttatgccaaagaggacatgactcttcacatctccataaattaaatgatggattattactctgatgtttttcccaggtgataaata

SEQ ID NO: 494344 - DNA, 491 bp, Homo sapiens
agacttctaaaaggtctaaaataacatgagaaacacattgagtagtgatgtattctgacttcttcatgtggagagggccaaaaataataaattatactgttcttgcatatttcttagataactattttgagttatgtgtgataaaaagggatgatcagagggtgtttccttaaattaatatttgaatattcccttcatgaatatagacttaaattactcaaaatatatgcttaacttttttcattattgttaaaatggtacattatcatttttgaaaaaattgaaaaaaaaacattgaaaagtacaaagaatctaaagattacccacgccctacarataatactaagggttacagttttgattgaggaaggctttgtaagaagtctaagcatagattatttagggagaagtttatctagtttatctattcgccagtttctcgtttaatagaacagttatatcctttgttggtgcttgccctttggcctttt

SEQ ID NO: 494345 - DNA, 542 bp, Homo sapiens
gctgtttttccttcgtgaggaacagggccagagtggagagaaaaagttgaaagtatattcctttgattctgaatgcactggtgacaggcctggcaaaatgggattggagttggcagtaaaatgatacttggggagtatctttttatttttgggctcttcttgctttctcattgtcagcagcagcacctcctccttcctctgatcatcrgccatgagaacagctctttgaggaatcatccttgggcagaatttggtctgggaagcagttttttttagtaagaaagacaaatgttgtctatgtagctaatactattaagcaatagatttccagtggtgtgtcagagtcctgcatttcataattctagtggataccattttttatttttaaagttttagatttgaaggtacatgtgcatgtctgttacatgggtatattgcataatggtggggattgagcttctagtgtactcatcacgcaaatattgaacattgtatctaaaaggtaatttttcaaccttcacctccatcctccctcccctctt

SEQ ID NO: 494346 - DNA, 400 bp, Homo sapiens
ccacaaattaaattcaacaaatgttaaactaaaatgccaaggactatactaggcttagatcacatacaatgtcagtgaatgttatgttaccagtaaatgaaaagctaatttcaggattctaagaagagaatgagaaacaacaaaaacattttacacttaaaaaataacttatctttgtatatatcaatcatttaaggkgggtgatttgataatcttatagcaaccaaaagataaaactttcaacctaaaactttacacaaattcatttacactcatctcctgcccctacaattacttcaatgagtacaaaagacacacgaatttaggaataactatgaaattcaaggagaagaacttactatctctagcactatataacatgaattataaaaattataca

SEQ ID NO: 494347 - DNA, 616 bp, Homo sapiens
caaattgataaagggcaatgaaacttgtacttagagcttgctagtatcgggaaacatcacccagaccatctgtgccaatgcactctatacaatttctccaaataagaaaaagatttcaataaaagacaaatgtgttccagacacccatgaaatggcagcttctcctacttgaaagtggagtggggaatacaccagtatcctaaaaccacatacatcatgaatgcccccctttaaagtgttccaaatgtacgttctaataccacatttctgactaaccacactttccaaagaatcccattttgaaatgctaaaagataatcctgaaaagaaacatcagatgcaaaagttgtgaatcctgatgccaacttgttaaaatattttcacatctaagtttagaaaaggagaacacaattttcaatttattgccacagtttactttatgctgtgtgatttataactgacttgctatgatctgcatctaggttaattctgtttgaatccttagaactaagataaaagaagtcatctttggaggtttmttttctaatataagcagttggaattttaatagaggcataaattgatagctgggatgatttcagtctgagttgttaag

SEQ ID NO: 494348 - DNA, 581 bp, Homo sapiens
tccctcaataacggcattaatctactcatgagggcagagctctcatgatctaatcacctctctagaggctccacccttaatgctgttacaatggcacttatatctcaacatgagttttggagggacgttcaaaccacagcagcttttcagatggttctgtctccatattcatgacacgtcgtgtaacattgcattttagcaatgaagatcattcctccggtggttgcatttttttccccagrgacagccagctaggccaacttatcacagtttacctgggactttcctggttttagcactaaaagtcccacctgggcaacctctggcaagctgcgacagttgatcaccctagagccagtggtggtgaaccccctactggactgttggtcaaagattaggcacaggtaggtctaagttcagataatgaaaccgatcaggagagatttctgggatcatttatcccatacaggggctgggatcatttaacccagagcagagaaagctgaggtggggatgggagggggctattttggtaacaaccttcacgtgtgtttgctgagtgtacttgaatgtgtgtccag

SEQ ID NO: 494349 - DNA, 553 bp, Homo sapiens
aaccctaatctaattaagttcatgtgtttgtgcttaaaaattctcatataaaaaatggagtaaaaaaaaaagtgtctacttcctagggatattgtgaagtcctaatgagatatgacatataagtccttatgggcagtgcctcatgtatctaagtacccactttaagttagccattattgttttcttctaatataaagctttatgtagttgaatttatttatctttccctggaaagaccctttgagccatgtttctactctttccaggttttctgctgtgcargggtggaaagctgtagtaccttttctcactcatcataagggtcagagctgacattcctataacaaaatacaggttaacgagatttatttaatctaagttttacctgaaacactcttaacagaaatgaaaacccaagggcccggggaaactctgtttttatatgtaggtttgatgaagaagagaccactgtgtagaaatgtgattggacaaaaggacatgacctaagttcttcctatgtccttcactttaaagtacccagcatgtcaaggta

SEQ ID NO: 494350 - DNA, 246 bp, Homo sapiens
tcaccaaaatatgataaaaactcascagtatgtattttcggagagcatctttctttgatatacatacacagttcatttttatttcaaagtatcattataaggagacttcaatattccttaatgggttataggcataattcaccttatcccgatagaaacacatcccgtttgtgcacagaatgtacacaagagaacatgataaggcatctacctgtaagtcaatgacctctttctgcttttaatttt

SEQ ID NO: 494351 - DNA, 636 bp, Homo sapiens
caaaaaataaattaaaacacacacacacacacttatgcaactcatgaacaccatccctgcaataatttctggataagagaaaaacaatcccagaagatgcgtagcctattaaatatttgtagaaatataactcatttgaaaatgagatattacccttgcttaccacacattacacggcctactctctgccttctcagtgggggtgcagacagaggaatccaagcaagtttatgagaccatcatgtgaccccactgccggccaaggactctgctacaaaataagaagctataaatttctttctcattaaatactttgtcatytttacagaaagatttcatatccaggtactttacatcttgttttcaacagatttccaaagctgtctctgtctatatggagcatttttgttaaatatttctttgcacgtaagttttcactgtgcccttgaacacagtgaaaatttacatattttcacttttattttcacatagggaactacacttatctccagagtcttcccaatttcttttgctaaaagactatttgtatttatccagttaggtgtctaatgcaaaacacactaatttttaaaggttgttctcatcactgaatattttggtctaacaaagccatat

SEQ ID NO: 494352 - DNA, 522 bp, Homo sapiens
gtgccagtagaaaggggtacctgaaagccaggtatgttcaacatggaggttccctctgctgttttctttggtgccacatgtgcagaaaagcagaagggaaggtggcgccggccgggtagagaacccatctacatgataaaagcttaggatggggtggccaccttcttcgcacactataaatggcacacctggtccaaccaatcctctgccccctatgtaaatcagacaccatctcctcaagctcatctataaaccaaccacatttcaccgtgagctggggaaatccactcagaaccccctccctctgcacaagggagcttctctcttttgcctattaaacttccttggcatgaggcaaggaacctcgggtattagcccagatgaatgacgccactgcacttccatcccttccgccctgtaaggacccagcgctcctccctcctggggatgcagaaacaaggcgccatcttggaagcmgggatactgatacatttctattgtgtgtaagttacccaatctctt

SEQ ID NO: 494353 - DNA, 548 bp, Homo sapiens
ttacatatgtatacatgtgccatgctggtgcgctgcacccactaactcgtcatctagcattaggtatatctcccaatgctatccctcccccaaccccacaacagtccccagagtgtgatgttccccttcctgtgtccatttatacatactttcaaggctagatgttctaacttgctttattctctgcttaaagcagtgggtctcgactttggctgcacataaaaatggatgggaagtgtttaaaaaaaaaaaaaaaaaaaaaaagaacaactcagtgcccaggccacactccagtccaattaaattggaatctctggaataacatcctggtattggggtttttttccttattattcattccaatgggcagccaagattgagacccactggcttagagttgctccttccccagacaaaggtctcattatgtaactggtgagwccctttccaagtaacaggccatacccttcagctatgttcctctaacacaactattcttaaccagcctgcagaccccacctggagggttataatttgagagttcttgg

SEQ ID NO: 494354 - DNA, 574 bp, Homo sapiens
gagagaatgagagccaagtgaaaggggaaatgccttataaaacaattagatctcatgagacttattcagtaccatgagaacagtatggggcaactgtccccatgattmaattatcttctcctgggtccctcccacaacacgtgggaattatgggagctacaattcaagatgagatttggaaggggacagagccaaaccatatcaatgaccatccaggaaagactaatacgttagaaaaaagtcttggactacatcaactctaagttctacagaccctataggctcaaagatttgatgagttctttagcagatagccctgtataaattccatttgataaaaggtacaacaaagagtaggttcctttatcccactatcttctactttcttcttgctgcttattttgcttgcaaggtctctgtaagctgtgccccttaatttgttatactatatacatgatcagagtttcattcttttttctcttgaggcctctgggttgtcaagaatacccatagaatatcaggtaatatttatggttgtcatgcttattcttacagtggattggttttccaccag

SEQ ID NO: 494355 - DNA, 574 bp, Homo sapiens
gagagaatgagagccaagtgaaaggggaaatgccttataaaacaattagatctcatgagacttattcagtaccatgagaacagtatggggcaactgtccccatgattaaattatcttctcctgggtccctcccacaacacgtgggaattatgggagctacaattcaagatgagatttggaaggggacagagccaaaccatatcaatgaccatccaggaaagactaatacgttagaaaaaagtcttggactacatcaactctaagttctacagaccctataggctcaaagatttgatgagttctttagcagatagccctgtataaattccatttgataaaaggtacaacaaagagtaggttcctttatcccactatcttctactttcttcttgctgcttattttgcttgcaaggtctctgtaagctgtgccccttaatttgttatactatatacatgatcagagtttcattcttttttctcttgaggcctctgggttgtcaagaatacccatagaatatcaggtaatatttatggytgtcatgcttattcttacagtggattggttttccaccag

SEQ ID NO: 494356 - DNA, 630 bp, Homo sapiens
gttcgagaccagcctggccaatgtggtgaaaccctgtctctactaaaaatacaaaaattacctgggcgtgatggcgtgcgcctgtaatcccagctactcaggaggctgaggcacgagaatcgcttgaaactgggaagcggagattgcagtgagccgagatcatgccattgccctccaggctgggtgatgaagcgagacttggtctcacaaaagaaaaaaaagaaagatggtgaacagaatggaccctccaaataagatctataggaccttgttcccatgttccatcatgccctttaactgtccccaaggactggggaatacagatgtagtgaagtgtcaaagccatgggagtctagcacctagagcagagtttctcagccttagcactattggcattacctatagggacagaaggcagggaaataccaggcagagaagggttaggtccctggcaaagccacaccctcaagcctagacccatggcccaaagtgagaacatgcattcctgttttccagcctgaatgttgccttttccaaarccccccctggcctgccctgtctcctatcctgtacccataaaaccccaggctccattagcactggagtgggagagaaggagagaagcagcag

SEQ ID NO: 494357 - DNA, 645 bp, Homo sapiens
ctttattaaacagtttatgttattcctcatcaaatttgggaagcttttaaaaattaatagastttaattttttttaattttgttttttggaacagtgtcagatttacaggaaaattgggcagataatacagaatgttccatgtaaccctctatgtctttttcacaatttctcctactattaacatcttacattagtgtggtccatttgttataattagtgaaccaatactgatatatcattatcaagtaaagtctaaaatttacattaagtttccttgtgttatacagttgtgtgtgtgtgcatgcgagagagagagaaagagaaatacagttctatgggttctggtaaatgcataatgccatgtatccaccattacagtatcatacaaaatagcttggctgcactaaaattctcctgtgcttcatctgttcatttatctacctgctcagaaattccttgaaaccactgagtttttactgtatctatagttttgcctttttcagaatgtcatatattataatcatacgatatgtagtctttccagaccagactcttgcatttagtaatgtatatttaaggtttctccatgtatttttgtgacttgatatctttttgtaaaaaatcactgaataatatttcattgt

SEQ ID NO: 494358 - DNA, 464 bp, Homo sapiens
agccatgttaagaaccaccagggttcagctttgcaggagaggcctgagatgctctgcgtgcttaaacgaagtctctcttcaggttcctttacggtttggaaattttattccaatcagacgtaggtgtttacacaacgttatttamgctctatgggaaggtgtccactctgctgcttttattctaattggctgagttggctgcaatgaggaaattgagttttctcacacaaatcgcaccacaacacaatctggtattggaggatatatacacaaagagaaagcagacactatcctaaacatcaaacttctgattttcaggggtttctttgttgttgttgttgttttgagatggagtcttgctctgttgcccaggttggagtgcagtggcgcgacctcggctcactgcaagctccgcctcccgagttcatgccagtctcctgcctcagcctcccgagtagctggga

SEQ ID NO: 494359 - DNA, 464 bp, Homo sapiens
agccatgttaagaaccaccagggttcagctttgcaggagaggcctgagatgctctgcgtgcttaaacgaagtctctcttcaggttcctttacggtttggaaattttattccaatcagacgtaggtgtttacacaacgttatttaagctctatgggaaggtgtccactctgctgcttttattctaattggctgagttggctgcaatgaggaaattgagttttctsacacaaatcgcaccacaacacaatctggtattggaggatatatacacaaagagaaagcagacactatcctaaacatcaaacttctgattttcaggggtttctttgttgttgttgttgttttgagatggagtcttgctctgttgcccaggttggagtgcagtggcgcgacctcggctcactgcaagctccgcctcccgagttcatgccagtctcctgcctcagcctcccgagtagctggga

SEQ ID NO: 494360 - DNA, 557 bp, Homo sapiens
ttcatgtgccttaggtgctcagaagctcacacacaggttttgtgattacttgggatactttcctgaatctgggtttctgatctaataattcttgtctttctttattatttgatttttatctataccttagtaatttttgagtctatttatttaggaagcaaaacccacagaggtgttgtgaagactgagtgaaatacaagtgaagctccttttatggctcacaatagctggtgggcctgacttaattgcattttgttctgtagttttaattttaaaccagttatatctcmttttcctcttaccctcttatttggaaagaagataaatacatgtaataagaaagaaattataaaagataaagaaaggaaatctgaccaactgttacttgtatgaagatggggctaaatcttgagcaattaaatccacagcatgtgtgtatatataaaaaaaagtaatttcatatatggttaaagtatggtttttactgttaagttattgaaatttaaactttctatccaagtggtcaaggaaataaaataggaggatcaaagtgcaaa

SEQ ID NO: 494361 - DNA, 557 bp, Homo sapiens
ttcatgtgccttaggtgctcagaagctcacacacaggttttgtgattacttgggatactttcctgaatctgggtttctgatctaataattcttgtctttctttattatttgatttttatctataccttagtaatttttgagtctatttatttaggaagcaaaacccacagaggtgttgtgaagactgagtgaaatacaagtgaagctccttttatggctcacaatagctggtgggcctgacttaattgcattttgttctgtagttttaattttaaaccagttatatctccttttcctcttmccctcttatttggaaagaagataaatacatgtaataagaaagaaattataaaagataaagaaaggaaatctgaccaactgttacttgtatgaagatggggctaaatcttgagcaattaaatccacagcatgtgtgtatatataaaaaaaagtaatttcatatatggttaaagtatggtttttactgttaagttattgaaatttaaactttctatccaagtggtcaaggaaataaaataggaggatcaaagtgcaaa

SEQ ID NO: 494362 - DNA, 580 bp, Homo sapiens
actgaatggtataaattgacacacaatacccattgatattacataagaattcttcaaaactgaatgatcttggaatataagccatcgatgttgactttagaaaacaagttctgctagaaaggtgactgaattaataacagttctggattatataaaagatgtgttagaactmtttgggggcaatctgaaaatacaaccaaaatttgactgtatctctgggaaaaatatagttgtctgttttgaatgaggtctacgttaaaaactaccaaatcagctatgtgtgtgcagacaagcatatgcatatgtctgtctgcctctttagtgagaaaatctgttaaattgaagttctaacggcagtggtgatttgtcctgagcttctgtccctgatgtgtttcattacaaaacgtattggtttataatttgacatatgtcattagacttgaagagaccgacgttgaaaaatcacaacacttatgaaaaatacataccttttgtcaatcagatttaaatcagccacttcaaaaatggaagtttattttctaactgataaatatgatacaagtttaaacccttccaatgt

SEQ ID NO: 494363 - DNA, 580 bp, Homo sapiens
actgaatggtataaattgacacacaatacccattgatattacataagaattcttcaaaactgaatgatcttggaatataagccatcgatgttgactttagaaaacaagttctgctagaaaggtgactgaattaataacagttctggattatataaaagatgtgttagaactatttgggggcaatctgaaaatacaaccaaaatttsactgtatctctgggaaaaatatagttgtctgttttgaatgaggtctacgttaaaaactaccaaatcagctatgtgtgtgcagacaagcatatgcatatgtctgtctgcctctttagtgagaaaatctgttaaattgaagttctaacggcagtggtgatttgtcctgagcttctgtccctgatgtgtttcattacaaaacgtattggtttataatttgacatatgtcattagacttgaagagaccgacgttgaaaaatcacaacacttatgaaaaatacataccttttgtcaatcagatttaaatcagccacttcaaaaatggaagtttattttctaactgataaatatgatacaagtttaaacccttccaatgt

SEQ ID NO: 494364 - DNA, 580 bp, Homo sapiens
actgaatggtataaattgacacacaatacccattgatattacataagaattcttcaaaactgaatgatcttggaatataagccatcgatgttgactttagaaaacaagttctgctagaaaggtgactgaattaataacagttctggattatataaaagatgtgttagaactatttgggggcaatctgaaaatacaaccaaaatttgactgtatctctgggaaaaatatagttgtctgttttgaatgaggtctacgttaaaaactaccaaatcagctatgtgtgtgcagacaagcatatgcatatgtctgtctgcctctttagtgagaaaatctgttaaattgaagttctaacggcagtggtgatttgtcctgagcttctgtccctgatgtgtttcattacaaaacgtattsgtttataatttgacatatgtcattagacttgaagagaccgacgttgaaaaatcacaacacttatgaaaaatacataccttttgtcaatcagatttaaatcagccacttcaaaaatggaagtttattttctaactgataaatatgatacaagtttaaacccttccaatgt

SEQ ID NO: 494365 - DNA, 577 bp, Homo sapiens
tttgacaacattagtatggataacatgctgaaaaaactagggtatcagcattaataggctgcatattaaaaagttactactttatttttactttgaaaaacactgccaatagattctgcagcatggcaaacaggtaatacttaaagccaaatggcgcttcggcttatttcaatactatttttatgtaaagatcagtgtgaraatatcagctcaatggttgaggttctaggatcaattgccttgcagtttttatactagcttttgatatcttttgcctattaaaacactttgtgaactttagaattaaggaactaaaaaatatttaccataagtccaagttatgacttgaggatcatatctgattagaactgtggcagaactactagaaaaagattctgcaaattggtttcagtgattcttgttgatgtaatcaacaagattacataatcaacaataatagatattgaaccaaaatgatcctttttttaagtttaaggttatttagtttctcttgcaaggatatgatttagtcacacactaatagggaatatgtgtatgtactggtggggagcagtgg

SEQ ID NO: 494366 - DNA, 653 bp, Homo sapiens
aggaaaagaaattccaaaggtaagggacaagaatggaggtaagtaygaaagaccaagagccaggaaagctggatttgattgtgattcattcttgttaagtggtcttgaattagccatttgcccccattggcttccgtttcttcatttgtaaaattaagtcaataatacctggccattcatttgtaagtctctcagtttataagtgaatatgtgttggatttcaaaaactattaatatcgattaaacatcttctgggaacctttttcatatatgccctctgttataacttgagccagattgacacaattggtattagaatgaggagactgtgttgcagagaatttatttgactttccaacagtcacttagctagtgggttacaaggctacagtttgaacacagctcgcaaacccattgctttttaaaaaccagtaataccactacttattcactttatcatggtatttaaatttcaagcatgaccaaataaacacatgcttatgcttacaaacataaatgctactgaaacaaaagtttcagaaaacattattcatactgcatttcaatatattatacttttgaaatcctagtcacaatcccctaaactgattttgtaaccaactaactcacaagtcgcagttagaaaatagtct

SEQ ID NO: 494367 - DNA, 648 bp, Homo sapiens
tccctgtgctcagcactgccttggctgtcacagccagggacagactttaaaatgactcaatagtgagacataaaaatatcaaggtcatggactgatgctgcgtctgagggagtgggagactttgtaaactatgaaaggttgaaggttaaattactactatttttcacctttgtcccaaccaaagagactgttaacaagctgttagtaagcatgacttgtgataagagagtgagaaaaaaaaaatctgagtaggaaataaacaatttgttgacaacaggaagaaaactgggctcgaggccaaatacctgctcatctccctggagctgcagcttagcctgtgagagcagcacactcaggggctgaagactccacggatttgcgtccctgttgcttctgcgatggagtggctttcaaaagcgaaaacaaaacgcaggggaagaaagkgttgaaagtgaacagccaatcattctcacgaaaacaaaattttaaaacaatccacattttaagcaaataaaattctggcaggagattcttgggcagagaatttattatacaagcattctcaatcaacttcttttgttccaactgctaccccccgtgcccggcccaaagaatgtcttactttccttaaaacatgctaaactcaac

SEQ ID NO: 494368 - DNA, 672 bp, Homo sapiens
tatggcctgctctcccttggcctcagggtcaacagcttaactctttctctgggcacaagcaatccaagctgtatcctggctccccagggagcatctgcaaatatggacagccctgactctctctttctgtggacgccagcacgcccgccatgtcaagccatgttgagctgagccgagccccaagagccatgtctcttgtgcacagtgtcgacagggcagttctaccttttacagcaatagtggctcagagccaagtatgaacttacacaaacaagttatataacaagtggaggtgcacactcacgcaccaaactcgcttggatatccaccttggcctattccttgaccaaagcacatccatgtaccttwcactccaccccctaggctgagggaaacataggccctggacacacaggttttatacacaggtttggcacacaggcctggcatataagctttgggcacacaggcctgatacatacacataggcttctgggcacataggcctgacacataagccttatacataggctctgggcacacaagcccatcacatacataagcttcaataaactgctcggctgttggcacagattaccataggtgttgcaacattggtgattactgttcacattgccctgagtgcagctcattagctactttgcctacacc

SEQ ID NO: 494369 - DNA, 672 bp, Homo sapiens
tatggcctgctctcccttggcctcagggtcaacagcttaactctttctctgggcacaagcaatccaagctgtatcctggctccccagggagcatctgcaaatatggacagccctgactctctctttctgtggacgccagcacgcccgccatgtcaagccatgttgagctgagccgagccccaagagccatgtctcttgtgcacagtgtcgacagggcagttctaccttttacagcaatagtggctcagagccaagtatgaacttacacaaacaagttatataacaagtggaggtgcacactcacgcaccaaactcgcttggatatccaccttggcctattccttgaccaaagcacatccatgtaccttacactccwccccctaggctgagggaaacataggccctggacacacaggttttatacacaggtttggcacacaggcctggcatataagctttgggcacacaggcctgatacatacacataggcttctgggcacataggcctgacacataagccttatacataggctctgggcacacaagcccatcacatacataagcttcaataaactgctcggctgttggcacagattaccataggtgttgcaacattggtgattactgttcacattgccctgagtgcagctcattagctactttgcctacacc

SEQ ID NO: 494370 - DNA, 672 bp, Homo sapiens
tatggcctgctctcccttggcctcagggtcaacagcttaactctttctctgggcacaagcaatccaagctgtatcctggctccccagggagcatctgcaaatatggacagccctgactctctctttctgtggacgccagcacgcccgccatgtcaagccatgttgagctgagccgagccccaagagccatgtctcttgtgcacagtgtcgacagggcagttctaccttttacagcaatagtggctcagagccaagtatgaacttacacaaacaagttatataacaagtggaggtgcacactcacgcaccaaactcgcttggatatccaccttggcctattccttgaccaaagcacatccatgtaccttacactccaccccctaggctgagggaracataggccctggacacacaggttttatacacaggtttggcacacaggcctggcatataagctttgggcacacaggcctgatacatacacataggcttctgggcacataggcctgacacataagccttatacataggctctgggcacacaagcccatcacatacataagcttcaataaactgctcggctgttggcacagattaccataggtgttgcaacattggtgattactgttcacattgccctgagtgcagctcattagctactttgcctacacc

SEQ ID NO: 494371 - DNA, 672 bp, Homo sapiens
tatggcctgctctcccttggcctcagggtcaacagcttaactctttctctgggcacaagcaatccaagctgtatcctggctccccagggagcatctgcaaatatggacagccctgactctctctttctgtggacgccagcacgcccgccatgtcaagccatgttgagctgagccgagccccaagagccatgtctcttgtgcacagtgtcgacagggcagttctaccttttacagcaatagtggctcagagccaagtatgaacttacacaaacaagttatataacaagtggaggtgcacactcacgcaccaaactcgcttggatatccaccttggcctattccttgaccaaagcacatccatgtaccttacactccaccccctaggctgagggaaacataggccctggacacacaggttttatacacaggtttggcacacaggcctggcatataagctttgggcacacaggcctgatacatacacataggcttctgggcacayaggcctgacacataagccttatacataggctctgggcacacaagcccatcacatacataagcttcaataaactgctcggctgttggcacagattaccataggtgttgcaacattggtgattactgttcacattgccctgagtgcagctcattagctactttgcctacacc

SEQ ID NO: 494372 - DNA, 676 bp, Homo sapiens
tattcacaatagcaaggacatggaatcaacccaaatgaccatcaatgatagactggataaagaaaatgtggtgcatatacatcatggaatactgtgcarccataaaaataaacaagatcatgtcttttgatctgcatgggtggtgcaaactaatgcaggaacagaaaagcaaacactgcatgttctcatttataagggagagctgaatgatgagaacacatagacacatggtggggaagaacacacactgaggcctatcgcagttgggggtgaggggagagagagcatcaggaagaatagttaatggatgctgggcttaatacctagatgatgggttgatctccgcaccaaaccaccatggcacaagtttacctatgtaacaaacctgcacatcctacacatgtaccattgtacttaaaataaaagttgaagtaaaaaaaaaaaaagatatttccttaagtgggtgggggaggaggcagagtgcgtgcacacacataaaagattaccccttattattaattctgtagcaattttcttagataaataacacatttttctttctttcaccattagctacccaaataaacaggtaactagatttccacttccaatcatgaaggagtattagaatccagaattaatctcctgccataattagaaaactaaaaaatagata

SEQ ID NO: 494373 - DNA, 683 bp, Homo sapiens
tccattgattcatagcgcagacttattgcatgattatataatgacttttagtcaaaggaatattaaaggcaatataggcctcaagtagttcctgtgaatttcagttttaaactttcaacattctctctacctaggctatatccttacatatttcagatctaagaaattctttccctttttcatcagaagaggattgaactgaagaaaccgatagtatttgcagaatcgtagatacagatgtccctgaagaaayaccctcttcctagattgtgttatttgtaataaagtaaccctgatttattctggataaaatggcattggagaccatatgacaggcttcagaagtattcatttcagaaagcatgaaaggcagttgtttgactatcatgcaattcggtttgtaagggtagagagaaaagtaaatattctagacaaatctgagtctatataatgaatggtgtagtaagtacaaaagggcattaaccaggggtcagaagtcccgaattcttagccttggaccaactacccaacctcaatttgttcagctgtggtttggtaaattttaggcagagagaaaagaatgagcaatgagataaagtctgttgggaacagtcaagttacacaaatgaataaattgattgaatttgtactattttttatttttctactttgatggatattta

SEQ ID NO: 494374 - DNA, 519 bp, Homo sapiens
ggcctcccaaagtgctgggattacagacataagccaccattcctggccacaagcttttatcatattaaactatcaatgggaaatggccagggagctgctctctaatccccagaagtttctgctgaccaccctgaatttgcaggcaggctgttgggagtggaggacattgcaatgcactttccctgagagcaattggaggagcaattgtattacattcttggactgatccgcacaaaacccagccagggaccatttgaaatgccagtctatggttctttataacaaaaggactaatttaagcaaataaagtaggtggaaaaaattcactggaggatctgtccctgggtgatctttgctggatgtggaggtgaatgctgggtcaatactgacttgtgccctaggggtcaggtgagraggagactaaggaggcccggcctatgcagtctgctccccacagggttcttctcttagcttaatgtataagatattcctgcttatgaaaatgccctgtccacaaaa

SEQ ID NO: 494375 - DNA, 526 bp, Homo sapiens
ctggcagtcccacagcccagccaatatgtgtccctaagtgtgcttctaggaataggatgagaggtaattaagtgagatattgggaaccaccagtttacacacaagaatctgttcacataaaacttacttgtagttcatagattacaaaatggaagcaggyatattaggcacttatttactccagtaatagccagatttcttttttgcataaactttttatgcaaaaaactttctaatctgttagtatatgaagaattttgataataatgagggaatacattcatggaatagttacaaaatcttacagttaatatatattttaaagtaaaaatattaaaactaacaaaagacgtatttttaaaaacaagatgctatatttctctggtgtaaaggcctgtttaccttcacacagtgaagctgatattaactctgtggttgcaagaggagcaagggtaccataccacgtaggttttcatccctaggaggcttgtgaagttcaagacaagatctaagcatgctgatcaca

SEQ ID NO: 494376 - DNA, 526 bp, Homo sapiens
ctggcagtcccacagcccagccaatatgtgtccctaagtgtgcttctaggaataggatgagaggtaattaagtgagatattgggaaccaccagtttacacacaagaatctgttcacataaaacttacttgtagttcatagattacaaaatggaagcaggcatattaggcacttatttactccagtaatagccagatttcttttttgcataaactttttatgcaaaaaactttctaatctgttagtatatgaagaaytttgataataatgagggaatacattcatggaatagttacaaaatcttacagttaatatatattttaaagtaaaaatattaaaactaacaaaagacgtatttttaaaaacaagatgctatatttctctggtgtaaaggcctgtttaccttcacacagtgaagctgatattaactctgtggttgcaagaggagcaagggtaccataccacgtaggttttcatccctaggaggcttgtgaagttcaagacaagatctaagcatgctgatcaca

SEQ ID NO: 494377 - DNA, 597 bp, Homo sapiens
gcccccctcctccagtggctttcaggcctgcttcctgggacctttgctgagcgaaatctatagaccaggctctggctatggtaagctcatgaatgcctgaattttcttctctgcttgctgaagtgatacaatttcagtctgattggacttctttcagtgtccttagctccagtctgcccaccagagggcagcctagagcggctccctggtcagmgtcttagcatcctagtcccggtcagggcctttgaaagataccgtacacatctgggaaggaaactgaggtactcttctctccatagaaacatccttaacaaaattcctctggcaaattcagtgtgactccacaaacatagaacagaatttaagaattaacaggactacagtgctgtggaatgagtcacggaggcaagtgagatagtgagatacacccagccaaaagaaaaactgcatagtgctctgcataaacacctgagtggttaacaaactggtaaatgtgatattggaaaagaagggaaccctcacattctggaaatggcaaaatacctacttcagatacgtagcttgcttgtcaatcattgttagttagcatgcagtatt

SEQ ID NO: 494378 - DNA, 477 bp, Homo sapiens
aatctactatgtgttaatcttgtagtgaattgtaaataaattcgaacctagaatattttaatataagaatttaagaggttaaaagtaagtttataatatgttggggmaaatattttcagatttattacagaaatgtgaatttggaaagagacatttctggcacatgttctgaaaattaataacaatattttagaaaaaaaggctgcattataaatcatataaatagggcataattccagatcattaactttcatacaggaaatgagtctagatattattttggaagagatgtagaagactgaacacttattctgaattcttcacttgagttcaaaaagcctaactcgttatttctgaatgcaactaatgcattcagacatgatacccctctctgcaaaattttaaacaatttctatgatataagatctctgactacatctctttaatgattttgtgtttgtgtgtgtgtatgtgtgt

SEQ ID NO: 494379 - DNA, 360 bp, Homo sapiens
tgggtccacagaagagaaatgggggcagggctgccrccccaggaaaacagaccctctgcacccccacggtgccacagtcaggggagctgaggcacgcagggcacagcacctgagggcgtgggagcaggggcttattctttctaatgcatgggtcttggcattagcttcatcctgtggggccagagcagcatcccacagaccccacccacttcaccaggcatgactgatttccacaatatgggggggtctccgtggggcgggcagagcctggtgtctccccaaggaagtggtgggacagggtcttcatgggggcaggccccaggcgattggaccccaggcagtgacagtgccctgccccca

SEQ ID NO: 494380 - DNA, 565 bp, Homo sapiens
cttctccttgtgggccttgagcatgttggagaagcggaagcgctggccacacacgtcgcacgggtacggcttctcgcccgtgtgcgtgcgccggtgccgcttcatgttgggccggctggtgaagctcttgccacagatctcgcagatgtacggcttctctcctgggggttgggggtgggcagcagggcgtcagtgaggggtcgccacaccccagtctggggccagcctccgtctcccatggagccayagtggggcccagccccggcgctctcagatcctccccgaccctggggcattttgtgccagcctcacccaaccctgggaggcaggaagcatgggtaaacggaggcccagacttgagaaggggtgtggccaagattattccaggtgtcctgagcggggctgagaaggggtcccaggcccggcaccgagctccgtccccaggggcagccgcacctgtgtgggtcttcatgtgctcatcgaagtactgcttcatgttgaagtccttgccgcaccattggcacatgaactgcttgtggccaatgtggatgctcatgtgtgaccg

SEQ ID NO: 494381 - DNA, 588 bp, Homo sapiens
tgcgggctttcccagctccggcccgggcccttccgctctccccggcacttacwgcggtctctctccacttctcccttctaggaccgcggcggctaggtcacctcctccggacgccgacacgcgctgccctggcaaccgtcaccagggaaacaagcgacgtcacttgcgcgttttcaacgctactctacgggggccgagggggcgccaagagttctgaaagtgacagaggcgctgatggcgcgctgggctggatccaagcgagcacgatctcgagtgcgctggagattttaaatcttctggagtatatttttaaaaaagttttgtggaccaaacgttctgcacagagatgcccattccgctctcctgttggggagttaaaaagcgaacgatctcaccatgaaatttaaagtagccattcagatatatttgaaaaatgtaaaacagtgtggggaaaggccatgttatgatggtgagtgaaggaagcaggacgcaatatagcaatgctaaataaataaagttgtgtttatttcaaactaggcactaaaacaagaccgaaatagaaatattaaaagtggttatatttgggtg

SEQ ID NO: 494382 - DNA, 384 bp, Homo sapiens
cagttttaaatccactggactgaggcactcaatgttacttgtctacaggtatctacagaactaaacttttgcaagctctctccagtcatttcgactgtggcccaatgatgtcacaggactgttgagacaacagaaatcactggatcagtcatgtaactaaccagtcattccctaaacatggaaactgctcaactcatttattatcatcctttgaatatgtattatgttccaggaagcaccatgatccttaycaagagggaagtaaaatatttccataaataactacagttaaaagtttccatataagtggtagaaacaactatgaaaatcttgaggacgaatacatcattcctggatctggtgatcggaaaaggcatttcagct

SEQ ID NO: 494383 - DNA, 384 bp, Homo sapiens
cagttttaaatccactggactgaggcactcaatgttacttgtctacaggtatctacagaactaaacttttgcaagctctctccagtcatttcgactgtggcccaatgatgtcacaggactgttgagacaacagaaatcactggatcagtcatgtaactaaccagtcattccctaaacatggaaactgctcaactcatttattatcatcctttgaatatgtattatgttccaggaagcaccatgatccttatcaagagggaagtaaaatatttccataaatawctacagttaaaagtttccatataagtggtagaaacaactatgaaaatcttgaggacgaatacatcattcctggatctggtgatcggaaaaggcatttcagct

SEQ ID NO: 494384 - DNA, 642 bp, Homo sapiens
ttcatagagttcattttgagaatcaagaaggtaggttatatgttgttggacaaacagaaaaccgatttttaccaagtctgcgctcctattttttgcacgattaaaaatcaatgcacacttattgtagaaagttgtccgaagtataaagaagaaaatccactgaacttctcgtgtccttattcataaataaccttatggtatttaaggtttttgcattccttgtctattgacgtgtgtatatgaaatcattatcattttatgtaatatgctttttcacttgtacaaaattccctggatttttaaatgttcttctaaacttacaaaaattgtaaaatgccatcatactgaygtacaaccattcacttgagcaatactcagtcagtgatactgaatattttctcagatttcactgtgataaatatcttttgattaaaaactcttcttgtatatgacatgctgctcacatatctaattagtcctttcctataaagttcttgacaattagtgatccaaatgaacagattcatattccaaggagtaattgtctacttgttcttatttttactgccattttttcttgtagccttagtgcctagaaaagtttcatagatgtatgtctgagctaattgtgcaaaaatggga

SEQ ID NO: 494385 - DNA, 642 bp, Homo sapiens
ttcatagagttcattttgagaatcaagaaggtaggttatatgttgttggacaaacagaaaaccgatttttaccaagtctgcgctcctattttttgcacgattaaaaatcaatgcacacttattgtagaaagttgtccgaagtataaagaagaaaatccactgaacttctcgtgtccttattcataaataaccttatggtatttaaggtttttgcattccttgtctattgacgtgtgtatatgaaatcattatcattttatgtaatatgctttttcacttgtacaaaattccctggatttttaaatgttcttctaaacttacaaaaattgtaaaatgccatcatactgatgtacaaccattcacttgagcaatactcagtcagtgatactgaatattttctcagatttcactgtgataaatatcttttgattaaaaactcttcttgtatatgacatgctgctcacatatctaattagtcctttcctataaagttcttgacaattagtgatccaaatgaacagattcatattccaaggagtaattrtctacttgttcttatttttactgccattttttcttgtagccttagtgcctagaaaagtttcatagatgtatgtctgagctaattgtgcaaaaatggga

SEQ ID NO: 494386 - DNA, 559 bp, Homo sapiens
tttttcctttccagtgaactctacacattacctaaaacactggtttcattgtattattaacaaaatcaaactatatgatgaattatttagtatgtgtgagtattaagtcatttgctaattgtktagttcacaaatacaaatgctaaatctccaacctttttaaaacaaagacctttattctatgtatgttccaaaaaattctttttcacaggagtatatagtaagcatattctgtatcaattaaactttatgaattctataattgcacacacatttctggaaaactgttgatctatttaacatctagcataatatagggcatcatgatgatgaaatgggttatacagaaaagagctagtataaaatcacattgccatcatgcaaaattgagaaagttttaaatattgaagatttccagaaacaccataactcatcaattcaggcatactggccatatttttaaaagtaacacttggtttttttctgacccgaccaagttgaagaacagtggtgagttcatcatgacagtccagtttcctaaacgctaaaagttaatttg

SEQ ID NO: 494387 - DNA, 627 bp, Homo sapiens
tagataattctcaaagcaattttcggatgaaataaacttagttctacccaatagtctggagtgttcttatttcatagtgcaacttgcctaagcccaaactatttagacatcttcctataacatactccctttgttgtgataaaaataaatgaacagatcccatagctaaaacttcaaaaatacctagttttcttttttgaagttccgcactttacttaggagcactttgasaattgaaaaaaacaagaggaatggtttaccaattgtacaagtctacactggaattccaaatgaatgttttcttcaggaaaataatagggaagatgccacctacctgagtccttctcaagaactctgaggtcacatggagatgaccacaacaggcaaatcgtggcctccaatatttggtgcattttaagaacactggctatttagtctgtaagagtaaaactaactatttaaagctggttataaattatatctcctgctcactctctctaaatcacaccaaatacaaagactttctcattctctcatgccagcaatacatcagttataatactcagtaaactttggttaaatacaaaacactatagaataagatacaggatctagcaactactgaca

SEQ ID NO: 494388 - DNA, 627 bp, Homo sapiens
tagataattctcaaagcaattttcggatgaaataaacttagttctacccaatagtctggagtgttcttatttcatagtgcaacttgcctaagcccaaactatttagacatcttcctataacatactccctttgttgtgataaaaataaatgaacagatcccatagctaaaacttcaaaaatacctagttttcttttttgaagttccgcactttacttaggagcactttgagaattgaaaaaaacaagaggaatggtttaccaattgtacaagtctacactggaattccaaatgaatgttytcttcaggaaaataatagggaagatgccacctacctgagtccttctcaagaactctgaggtcacatggagatgaccacaacaggcaaatcgtggcctccaatatttggtgcattttaagaacactggctatttagtctgtaagagtaaaactaactatttaaagctggttataaattatatctcctgctcactctctctaaatcacaccaaatacaaagactttctcattctctcatgccagcaatacatcagttataatactcagtaaactttggttaaatacaaaacactatagaataagatacaggatctagcaactactgaca

SEQ ID NO: 494389 - DNA, 456 bp, Homo sapiens
aaacttcaaaaatacctagttttcttttttgaagttccgcactttacttaggagcactttgagaattgaaaaaaacaagaggaatggtttaccaattgtacaagtctacactggaattccaaatgaatgttttcttcaggaaaataatagggaagatgccacctacctgagtccttctcaagaactctgaggtcacatggagatgaccacaacaggcaaatcgtggcctccaatatttggtgcattttaagaacactggctatttagtctgtaagagtaaaactaactatttaaagctggttataarttatatctcctgctcactctctctaaatcacaccaaatacaaagactttctcattctctcatgccagcaatacatcagttataatactcagtaaactttggttaaatacaaaacactatagaataagatacaggatctagcaactactg

SEQ ID NO: 494390 - DNA, 456 bp, Homo sapiens
aaacttcaaaaatacctagttttcttttttgaagttccgcactttacttaggagcactttgagaattgaaaaaaacaagaggaatggtttaccaattgtacaagtctacactggaattccaaatgaatgttttcttcaggaaaataatagggaagatgccacctacctgagtccttctcaagaactctgaggtcacatggagatgaccacaacaggcaaatcgtggcctccaatatttggtgcattttaagaacactggctatttagtctgtaagagtaaaactaactatttaaagctggttataaattatatctcctgctcactctctctaaatcacaccaaatacaaagactttctcattctctcatgccagcaatacatcagttataayactcagtaaactttggttaaatacaaaacactatagaataagatacaggatctagcaactactg

SEQ ID NO: 494391 - DNA, 511 bp, Homo sapiens
ggggtttcagcttagagtgctaaggtatcatttttctttacttgtggcattacaagagtctcactgagacactgctatgtaatatcttggcraaacagtattgatctcctttcaaaagtgaatagaggtcagctttctgtctggatacttatatatctgacttgtacacctaacaccattaaaatctatttgagtgcattagtggaaatggattctattatatggtctcatggggaacccgccaggaagtcatagagtataacgtagacggctccttttaaagacatttcaggcaattttcttgccatcccttcacttcattcccactggctaactgggaatcatccaattactacaatagccaggattgatacccgggagttagaagaaaactctttcaaggaccgaggttcgctcaactcatgaaaaacatgttgccatttctgaaaacaaaaagagggtttaatactttggagtacataataatgtgaaatatacctgatacttatga

SEQ ID NO: 494392 - DNA, 511 bp, Homo sapiens
ggggtttcagcttagagtgctaaggtatcatttttctttacttgtggcattacaagagtctcactgagacactgctatgtaatatcttggcaaaacagtattgatctcctttcaaaagtgaatagaggtcagctttctgtctggatacttatatatctgacttgtacacctaacaccattaaaatctatttgagtgcattagtggaaatggattctattatatggtctcatggggaacccgccaggaagtcatagagtataacgtagacggctccttttaaagacatttcaggcaattttcttgccatcccttcacttcattcccactggctaactgggaatmatccaattactacaatagccaggattgatacccgggagttagaagaaaactctttcaaggaccgaggttcgctcaactcatgaaaaacatgttgccatttctgaaaacaaaaagagggtttaatactttggagtacataataatgtgaaatatacctgatacttatga

SEQ ID NO: 494393 - DNA, 644 bp, Homo sapiens
aatttttaattttccactctttcccaataaatgttgtacactttaacccaagagatcttacaagattggaagttcaatctgcgctgtaattcagccacctgcaggaaacagactttgggtgtggtgtccagaaatctctgcctttggctacaagacataaggatttcttttagggcaatcacagatgatttcactcccttatgtggactctgagttcagaatttacagcccttttcttaagttctccagtgtactttgaaggaaccaatctatctcattattattgtcactaaaatgttctgtggtaataaatacttgttctcccaaaaacttgccttctaagggcacttaatttctactgtctacaagttttgccactgtatgccacggaccaccagtgtcccttttaccactagagacaggatcatcattgctgttagatctgattagaccagagaaccaattctggaaaacccagaactaattcaggaacccatcttttaaggtgctactcctctgcagctaccaatggtataaagccctgtattagttagcatttgaccagagaagactakaaatgatacaaaatatggcattaccagagatttggccatgtgtaattgttaacctagttaaacagttca

SEQ ID NO: 494394 - DNA, 496 bp, Homo sapiens
cagggtgagggctgttaaaagggatagagggaggggagaactggaggtggtcggcagaagaaaaaaaggaggaaagagaaaagcaaatcaccaggaataagcagaaggtggcggccttcacatctccaaacaaagcctctgcaggacacattcctcagttcaggatgactttagcctctcaggagtctgatcaagctgaacgtgacatctggatttgcttttctgttcctgtgacccgggtctgacccattagctccctctcaggccatggggactggatcatgactgggtgcatgactcaaggcagtccaatgagactccaccccaggacctctcttggaaccattatagaaaggaagcccttttccactgagagtttgggtaagatgatggtgaaagcctggaattgccagagaccactgcaccggaagatcctacaygagaatgaaaccagcacagagggaagcagaacaagaagacagagacaaagtgctga

SEQ ID NO: 494395 - DNA, 556 bp, Homo sapiens
atgacacattcggcttcgttagttatgagactcaaggatcacaatagtcattttcatatttttgaaataatttttattaactaatgccaattttaagagaacatatttaattgcctgtgattcaattagagattggagcacgttgaagacggagtttacctctcctatcctgttgctaatcagtaagattgaggacttaaaaggcctgaagctttctagatcttgcctgcattttattctataragaagagatacatactgagcagacaagtgtcagtatccaggagctgttgttttatggaaagtactttttctttacactgaataccgtgggtggtaatgagaaatttatgcatgcatgtggtggcagatacaggcgtggtcaagtggatgaggaagaaagagatgggggctatttaaagatatgaactttgtcactgggaggcagattcaggttatctaattcacttttccactcttgttggtagtaccatgaaaggaactggattttctttcttattgtcagtaaagtatttatctagaagtcagagaaaaa

SEQ ID NO: 494396 - DNA, 466 bp, Homo sapiens
agcctctgagcttagcttctggtatcaggctgttgtactaattcaaaagtgttgtgccagccacttggtaaaccaccaaaagtgtgtaggtgtttgtgagggggatttgggaggaggatgagcctcaaaaccatccaaagttttttctcctyggtcaatcccgtggcccttggttgttcattaaatgtgagccttcctactagctctaatggatcctgagtgagagtcattcttgcatagttgtctgggaggtctcctgctgcctggatagtaagtcactgcttgaaacaattgtaaaagatcattttggcctttgcatccatatgtgatatgggaaatttacacccaccacacactttctggtgtcagagatattaatgcctgaggtctgtcatccctttttgattaaaagccaggctttatatctacatttaaggaaacaaacaaaaaaagtcctgcagggact

SEQ ID NO: 494397 - DNA, 466 bp, Homo sapiens
agcctctgagcttagcttctggtatcaggctgttgtactaattcaaaagtgttgtgccagccacttggtaaaccaccaaaagtgtgtaggtgtttgtgagggggatttgggaggaggatgagcctcaaaaccatccaaagttttttctcctcggtcaatcccgtggcccttggttgttcattaaatgtgagccttcctactagctctaatggatcctgagtgagagtcattcttgcatagttgtctgggaggtctcctgctgcctggatagtaagtcactgcttgaaacaattgtaaaagatcattttggcctttgcatccatatgtgatatgggaaatttacacccaccacacactttctggtgtcagagatattaatgcctgaggtctgtcatccctttttgattaaaagccaggctttatatctacwtttaaggaaacaaacaaaaaaagtcctgcagggact

SEQ ID NO: 494398 - DNA, 560 bp, Homo sapiens
ttctctatggattttgcaaacagtcacgccgccaaaggattatccagaggaacagaactgagaggctctcagatcttctggattggagatacttaggcagagtaagcaagtttagataaacacagcagaccacttaaaaaattccactggactataaacatattgattctagtcataatctctaaagttaatccaatattwtaattgttaaaatctcagtgtctccatgtactttttaaaatttaataagtttacaaagtcctatatgtatttcttcatgtttcgtttgagtctattcataatagcaagtccatcaggatctagcactgatcttactagctattccattgtcagtgcctcacttgatgtgttactggtataaggaaacattttatgaagttgaagaaaacatcaagagaaaagtccctactttgtttctctctagagaaatagtgtagtcatatttctcaactgtagtgagtaatgggtataatatggtttttcaaaatgatgactacaggaaatacctcctttcaatcatgcaataggtttataaacac

SEQ ID NO: 494399 - DNA, 560 bp, Homo sapiens
ttctctatggattttgcaaacagtcacgccgccaaaggattatccagaggaacagaactgagaggctctcagatcttctggattggagatacttaggcagagtaagcaagtttagataaacacagcagaccacttaaaaaattccactggactataaacatattgattctagtcataatctctaaagttaatccaatattawaattgttaaaatctcagtgtctccatgtactttttaaaatttaataagtttacaaagtcctatatgtatttcttcatgtttcgtttgagtctattcataatagcaagtccatcaggatctagcactgatcttactagctattccattgtcagtgcctcacttgatgtgttactggtataaggaaacattttatgaagttgaagaaaacatcaagagaaaagtccctactttgtttctctctagagaaatagtgtagtcatatttctcaactgtagtgagtaatgggtataatatggtttttcaaaatgatgactacaggaaatacctcctttcaatcatgcaataggtttataaacac

SEQ ID NO: 494400 - DNA, 630 bp, Homo sapiens
ttctctatggattttgcaaacagtcacgccgccaaaggattatccagaggaacagaactgagaggctctcagatcttctggattggagatacttaggcagagtaagcaagtttagataaacacagcagaccacttaaaaaattccactggactataaacatattgattctagtcataatctctaaagttaatccaatattataattgttaaaatctcagtgtctccatgtactttttaaaatttaataagtttacaaagtcctatatgtatttcttcatgtttcgtttgagtctattcataatagcaagtccatcaggatctagcactgatcttactagctattccattgtcagtgcctcacttgatgtgttactggtataaggaaacattttatgaagttgaagaaaacatcaagagaaaagtccctactttgtttctctctagagaaatagtgtagtcatatttctcaactgtagtgagtaatgggtataatayggtttttcaaaatgatgactacaggaaatacctcctttcaatcatgcaataggtttataaacacctggatgctcacacagcttagcagtggtgatttaataataaatgaattgactttgccttcacataatgtg

SEQ ID NO: 494401 - DNA, 641 bp, Homo sapiens
ttgattgcttccgggacttatttggaatataaaggtgtcctgaagtcttgacttaagatgaactttactgatttcttttagcaaggctgtcctccagtatctgattcytccctattataacaagcattctgatgcaagcctgacacatttgttttatctcctttgtaataattccactcgactaagaaatattcttttctctaatgtgactcaaattctatgttttggaagtatttaggacttttttgtagttactaaactatacataatttttatattgaatatattaattcaaaaataattttgtaagcaagtggaaggacaagtttcatgagatgttttaaaggagctcttaaaaccactaatgaaaaaatgtccaaagtaatcatttaagtgactatgtaagaatgtcttttctagcctcaggtctgaaaatgttccaaattagcacattccaataaattaaaatactgattagatagaatttaataactatgggacatagtgggtgcttttttccttattacctgagttgaaaagatggctcttttcataattgttagatcatctcgatctaaaatatcgttcaggtcaggaatttctcctctgcagggaaaaaatgttaataacaaaaataaaaa

SEQ ID NO: 494402 - DNA, 641 bp, Homo sapiens
ttgattgcttccgggacttatttggaatataaaggtgtcctgaagtcttgacttaagatgaactttactgatttcttttagcaaggctgtcctccagtatctgattcttccctattataacaagcattytgatgcaagcctgacacatttgttttatctcctttgtaataattccactcgactaagaaatattcttttctctaatgtgactcaaattctatgttttggaagtatttaggacttttttgtagttactaaactatacataatttttatattgaatatattaattcaaaaataattttgtaagcaagtggaaggacaagtttcatgagatgttttaaaggagctcttaaaaccactaatgaaaaaatgtccaaagtaatcatttaagtgactatgtaagaatgtcttttctagcctcaggtctgaaaatgttccaaattagcacattccaataaattaaaatactgattagatagaatttaataactatgggacatagtgggtgcttttttccttattacctgagttgaaaagatggctcttttcataattgttagatcatctcgatctaaaatatcgttcaggtcaggaatttctcctctgcagggaaaaaatgttaataacaaaaataaaaa

SEQ ID NO: 494403 - DNA, 641 bp, Homo sapiens
ttgattgcttccgggacttatttggaatataaaggtgtcctgaagtcttgacttaagatgaactttactgatttcttttagcaaggctgtcctccagtatctgattcttccctattataacaagcattctgatgcaagcctgacacatttgttttatctcctttgtaataattccactcgactaagaaatattcttttctctaatgtgactcaaattctatgttttggaagtatttaggacttttttgtagttactaaactatacataatttttatattgaatatattaattcaaaaataattttgtaagcaagtggaaggacaagtktcatgagatgttttaaaggagctcttaaaaccactaatgaaaaaatgtccaaagtaatcatttaagtgactatgtaagaatgtcttttctagcctcaggtctgaaaatgttccaaattagcacattccaataaattaaaatactgattagatagaatttaataactatgggacatagtgggtgcttttttccttattacctgagttgaaaagatggctcttttcataattgttagatcatctcgatctaaaatatcgttcaggtcaggaatttctcctctgcagggaaaaaatgttaataacaaaaataaaaa

SEQ ID NO: 494404 - DNA, 615 bp, Homo sapiens
  misc_feature (1)...(615): n = A,T,C or G
tggcactaattcagtgattcctaagcatcagattatatattatatatttcatgtattttaataaataatgttgattattctattaagtaaatgtgttcacatagacttaatatttaagtacatatttaatacacattgtcaatatatattttgaattaaaatctcatgaagtctctctcagcttsagactgacatatcaacccttaatgagttcatcattgaattagaacttgcctgcatataaatgtattcttatttgtacagctatttacaagttttgtcaaatgaagggtaaaatactgttcacatgacataacacattttcaaaggttattaattccttgatatttggaacaaaattaataagttatgatgtctaaattgttaaatttgaatagtgaaaccttaagtgattgaagtagaaagcatttcaagcacctacccttaataatgcatcatagagtttttttccaaacttttccttcacagaatgtgcaacatccctgtttgaaacagaaagatttatcatttanacagtatgacaatgtttaatctttatttgtcacgataatgctattgttttgttgacattctttgaaattacattctttgaaa

SEQ ID NO: 494405 - DNA, 615 bp, Homo sapiens
  misc_feature (1)...(615): n = A,T,C or G
tggcactaattcagtgattcctaagcatcagattatatattatatatttcatgtattttaataaataatgttgattattctattaagtaaatgtgttcacatagacttaatatttaagtacatatttaatacacattgtcaatatatattttgaattaaaatctcatgaagtctctctcagcttcagaytgacatatcaacccttaatgagttcatcattgaattagaacttgcctgcatataaatgtattcttatttgtacagctatttacaagttttgtcaaatgaagggtaaaatactgttcacatgacataacacattttcaaaggttattaattccttgatatttggaacaaaattaataagttatgatgtctaaattgttaaatttgaatagtgaaaccttaagtgattgaagtagaaagcatttcaagcacctacccttaataatgcatcatagagtttttttccaaacttttccttcacagaatgtgcaacatccctgtttgaaacagaaagatttatcatttanacagtatgacaatgtttaatctttatttgtcacgataatgctattgttttgttgacattctttgaaattacattctttgaaa

SEQ ID NO: 494406 - DNA, 561 bp, Homo sapiens
  misc_feature (1)...(561): n = A,T,C or G
ctggcactaattcagtgattcctaagcatcagattatatattatatatttcatgtattttaataaataatgttgattattctattaagtaaatgtgttcacatagacttaatatttaagtacatatttaatacacattgtcaatatatattttgaattaaaatctcatgaagtctctctcagcttcagactgacatatcaacccttaatgagttcatcattgaattagaacttgcctgcatataaatgtattcttatttgtacagctatttacaagttttgtcaaatgaagggtaaaatactgttcacatgacataacacattttcaaaggttattaattccttgatatttggaacaaaattaataagttatgatgtctaaattgttaaatttgaatagtgaarccttaagtgattgaagtagaaagcatttcaagcacctacccttaataatgcatcatagagtttttttccaaacttttccttcacagaatgtgcaacatccctgtttgaaacagaaagatttatcatttanacagtatgacaatgtttaatctttatt

SEQ ID NO: 494407 - DNA, 561 bp, Homo sapiens
  misc_feature (1)...(561): n = A,T,C or G
ctggcactaattcagtgattcctaagcatcagattatatattatatatttcatgtattttaataaataatgttgattattctattaagtaaatgtgttcacatagacttaatatttaagtacatatttaatacacattgtcaatatatattttgaattaaaatctcatgaagtctctctcagcttcagactgacatatcaacccttaatgagttcatcattgaattagaacttgcctgcatataaatgtattcttatttgtacagctatttacaagttttgtcaaatgaagggtaaaatactgttcacatgacataacacattttcaaaggttattaattccttgatatttggaacaaaattaataagttatgatgtctaaattgttaaatttgaatagtgaaaccttaagtgattgaagtagaaagcatttyaagcacctacccttaataatgcatcatagagtttttttccaaacttttccttcacagaatgtgcaacatccctgtttgaaacagaaagatttatcatttanacagtatgacaatgtttaatctttatt

SEQ ID NO: 494408 - DNA, 536 bp, Homo sapiens
attattttactacttgccaattcagcttaagttgacatctccagagctgaggcaacagaacaccatggccagcacaaagagcttaaaatttttttgcttcatgatgattgsaacaggatagagagcagagagggggagtagatgaaggtataggtgtaacaagacgggaattcgttgatcattgttgaatctgaactatgagtatacagggagtcatattactaagctttttacttgacatgttcttagaatttcacaatagaaagttaaaaaatgtttgactcatctttaaagatttctacagggccttgttccttcaatggtagctcattccaaaatttgtataacacctataatgttataaccattacgataacctaaaatagtagcacgatgaaaagagagtcaagtattatttgtctgtaataatcttaaggaaaaaacaaagttcaaggcgatacatgagatgtcattcacttaaaagaaatcttttcacatttattgctagagaacattcacaggttgtgagattacca

SEQ ID NO: 494409 - DNA, 536 bp, Homo sapiens
attattttactacttgccaattcagcttaagttgacatctccagagctgaggcaacagaacaccatggccagcacaaagagcttaaaatttttttgcttcatgatgattggaacaggatagagagcagagagggggagtagatgraggtataggtgtaacaagacgggaattcgttgatcattgttgaatctgaactatgagtatacagggagtcatattactaagctttttacttgacatgttcttagaatttcacaatagaaagttaaaaaatgtttgactcatctttaaagatttctacagggccttgttccttcaatggtagctcattccaaaatttgtataacacctataatgttataaccattacgataacctaaaatagtagcacgatgaaaagagagtcaagtattatttgtctgtaataatcttaaggaaaaaacaaagttcaaggcgatacatgagatgtcattcacttaaaagaaatcttttcacatttattgctagagaacattcacaggttgtgagattacca

SEQ ID NO: 494410 - DNA, 536 bp, Homo sapiens
attattttactacttgccaattcagcttaagttgacatctccagagctgaggcaacagaacaccatggccagcacaaagagcttaaaatttttttgcttcatgatgattggaacaggatagagagcagagagggggagtagatgaaggtataggtgtaacaagacgggaattcgttgatcattgttgaatctgaactatgagtatacagggagtcatattactaagctttttacttgacatgttcttagaatttcacaatagaaagttwaaaaatgtttgactcatctttaaagatttctacagggccttgttccttcaatggtagctcattccaaaatttgtataacacctataatgttataaccattacgataacctaaaatagtagcacgatgaaaagagagtcaagtattatttgtctgtaataatcttaaggaaaaaacaaagttcaaggcgatacatgagatgtcattcacttaaaagaaatcttttcacatttattgctagagaacattcacaggttgtgagattacca

SEQ ID NO: 494411 - DNA, 536 bp, Homo sapiens
attattttactacttgccaattcagcttaagttgacatctccagagctgaggcaacagaacaccatggccagcacaaagagcttaaaatttttttgcttcatgatgattggaacaggatagagagcagagagggggagtagatgaaggtataggtgtaacaagacgggaattcgttgatcattgttgaatctgaactatgagtatacagggagtcatattactaagctttttacttgacatgttcttagaatttcacaatagaaagttaaaaaatgtttgactcatctttaaagatttctacagggccttgttccttcaatggtagctcattccaaaatttgtataacacctataatgttataamcattacgataacctaaaatagtagcacgatgaaaagagagtcaagtattatttgtctgtaataatcttaaggaaaaaacaaagttcaaggcgatacatgagatgtcattcacttaaaagaaatcttttcacatttattgctagagaacattcacaggttgtgagattacca

SEQ ID NO: 494412 - DNA, 622 bp, Homo sapiens
ataaaacttttgctgatccagayaggatcacagcacttgcaggctaagctgtaaaaagtaaaaaatgtgcacacaaggaaggtgaagagctgaaagttaatcctgcagcctccacccccacactaatctgtagacaatggctaagataattcaaggacatttgggactggataacttttccttgccaactttgattccatggaagtgactccctggaaaatccagctgtgaagctatatgtagaaagttgcataatcatttagtgacgcctgcctgaggcacaggatgcagtaacttactatgtgctagctacttgtcattcctattctacatctacctggcacatatatatttatgagaagttttatatgtaagactgaaccatttaataaactccaatcttggtttgcgaaagtaaaaatatggaaataacctctgtccttgctggctctcaactctcaatactcaagatactgtggggattcccctagctcttattcacagtgtttctctatgggaagtgtgagagataatcagtccagtttctttactattttctcaatgtacctgctatgctcaccaacatgcagtaattttggtggcaaactatagataaaagcag

SEQ ID NO: 494413 - DNA, 622 bp, Homo sapiens
ataaaacttttgctgatccagacaggatcacagcacttgcaggctaagctgtaaaaagtaaaaaatgtgcacacaaggaaggtgaagagctgaaagttaatcctgcagcctccacccccacactaatctgtagacaatggctaagataattcaaggacatttgggactggataacttttccttgccaactttgattccatggaagtgactccctggaaaatccagctgtgaagctatatgtagaaagttgcataatcatttagtgacgcctgcctgaggcacaggatgcagtaacttactatgtgctagctacttgtcattcctattctacatctacctggcacatatatatttatgagaagttttatatrtaagactgaaccatttaataaactccaatcttggtttgcgaaagtaaaaatatggaaataacctctgtccttgctggctctcaactctcaatactcaagatactgtggggattcccctagctcttattcacagtgtttctctatgggaagtgtgagagataatcagtccagtttctttactattttctcaatgtacctgctatgctcaccaacatgcagtaattttggtggcaaactatagataaaagcag

SEQ ID NO: 494414 - DNA, 622 bp, Homo sapiens
ataaaacttttgctgatccagacaggatcacagcacttgcaggctaagctgtaaaaagtaaaaaatgtgcacacaaggaaggtgaagagctgaaagttaatcctgcagcctccacccccacactaatctgtagacaatggctaagataattcaaggacatttgggactggataacttttccttgccaactttgattccatggaagtgactccctggaaaatccagctgtgaagctatatgtagaaagttgcataatcatttagtgacgcctgcctgaggcacaggatgcagtaacttactatgtgctagctacttgtcattcctattctacatctacctggcacatatatatttatgagaagttttatatgtaagactgaaccatttaataaactccaatcttggtttgcraaagtaaaaatatggaaataacctctgtccttgctggctctcaactctcaatactcaagatactgtggggattcccctagctcttattcacagtgtttctctatgggaagtgtgagagataatcagtccagtttctttactattttctcaatgtacctgctatgctcaccaacatgcagtaattttggtggcaaactatagataaaagcag

SEQ ID NO: 494415 - DNA, 622 bp, Homo sapiens
ataaaacttttgctgatccagacaggatcacagcacttgcaggctaagctgtaaaaagtaaaaaatgtgcacacaaggaaggtgaagagctgaaagttaatcctgcagcctccacccccacactaatctgtagacaatggctaagataattcaaggacatttgggactggataacttttccttgccaactttgattccatggaagtgactccctggaaaatccagctgtgaagctatatgtagaaagttgcataatcatttagtgacgcctgcctgaggcacaggatgcagtaacttactatgtgctagctacttgtcattcctattctacatctacctggcacatatatatttatgagaagttttatatgtaagactgaaccatttaataaactccaatcttggtttgcgraagtaaaaatatggaaataacctctgtccttgctggctctcaactctcaatactcaagatactgtggggattcccctagctcttattcacagtgtttctctatgggaagtgtgagagataatcagtccagtttctttactattttctcaatgtacctgctatgctcaccaacatgcagtaattttggtggcaaactatagataaaagcag

SEQ ID NO: 494416 - DNA, 364 bp, Homo sapiens
agctctctcttgtccattataagtcactttcctttctggctctgcacattttcccaacaatcaaatctaaaacgtcactatcaaccaatctccatcagagctcttttcgtactgactccaaaaatcgctgggytccatgtcttgggttttaaaaagaacaccttggatacagcatcctctacccgttattcaactatttcacaccttttcactgcaagagttctgagagtcatgccagctctccagagcctgagacctgctttctcttaactttgcagtttactttcttgtatcacattctgtaaacaaagtttcagatatggaatagcagcagcaagctgtgtcactgggcaggaggtggggg

SEQ ID NO: 494417 - DNA, 439 bp, Homo sapiens
tgactgtccaccaaagtgtcattttatagggcaaagttaaacttaacaacccaaaatgatagaggagatatatctactgttttaagataaaggccaaagaagatgttacaaaggatattataaatagacaaataagggagtttgtggaakagtccatagtgaatgagtcatgctgtgttttacattaaccaaagggagctggtcactcttcccctaacctatagttacaggaagaatgcgacttctggtggtatacatttaacattagcatattagataacttgctaatgtttttagaataatctttttacgtgttactagacttaactcactctagaaagcattcatccaaatgtgttttcagagagccaaataaatataagcatttatttcattaaattaattcaatgaacatatactaaacttcatgggtgcctgg

SEQ ID NO: 494418 - DNA, 644 bp, Homo sapiens
tgcctgtaccagctattgactgcctgcctcctaattgctttttatattaggaggaaataaactgctatcactgttattttaggtatctgtctcagctaaccaattaattctaaatgatatactcccaactatatggcacagtacctgttagataactttttatctaattgagggcatatacttgaacgataaataacaaaataagatgctataaaatcaagaaaaaaaagacttgaatcctcacacattcagttggaacacttgtattttcttaccgtctggggaaacgtgaaaaatggaattaataacattccttaggaatagagcagacgcctagtaacacctggctagtcaatacatggatccagatattccatgggtcaatatccaaaatgcaaaaacgatgtactgaatgagacagacactgatagtttatccatgaaggtactttgatctcatatgattttagaagcrgaagtgacttttgtccaagttattttacagaagagaaattgatacccaagtacttttgtggatctattgctgagtattcctgcaaagtggctaaaacaaagaaaggtggaatttagtggtgcaactagctgaaaagcttaggaatggaactgacattaaccaacaccgta

SEQ ID NO: 494419 - DNA, 545 bp, Homo sapiens
tttaaattgattttatcactttataatcttatcatatgccaaggattaaagtaaaaaaaaaagtctgaagtctttgttttattggagagatttaccccttggatcctcaaggacattacaaacattaattatatctcagcagatccataagtargagataagttaaacttaagaataaaatgatatgcaaaccccagtacttaagaattcaatcacagaaattaaaaaatggcaaagtaaaagtgaatacaatattttcattcatagaacatgatttgagttcctattatgtgcaaagtagctcactacaaaaaaagacaaaagacacagatactgtatctgggcaatcatcaaactggcaacccgttgtactctcttggcaaagaacaagaaagggggatttgaaaagcattgtgtctactttagcgtttccaagcttaggaaaagttgccctctccaaagcccattttggaacatgaaaacaccatggttcatttgttttgctcccagccaaacagaatgacagcataactaaaataagaaaa

SEQ ID NO: 494420 - DNA, 422 bp, Homo sapiens
tgaaggttataaagaggattaaatgagatcctgtacaaaaakcgcccaggaaagctcctggctcacagcagaccctacctagatcagtaggaaaaacaaaacaagaaacagagacaaaggcttgtctgactctttatttattccaggacagaagtaaggtctcaggaagttagtttatttttacaccgtggcagcccagagctgagacatgaaatcttcagcctgggctttcctcaccacactacgtagctaaggcaaaatgataaataaattcaaattcaaaatgatctgcaatgtttgctgaatcaaatatgacattcatatcaaaaacttatcaatgcactctgagagtttagaaccattctacacagttctttaagcaggtgattaaataggcacttaaatcagcacaggcctaagtt

SEQ ID NO: 494421 - DNA, 700 bp, Homo sapiens
aaggttataaagaggattaaatgagatcctgtacaaaaatcgcccaggaaagctcctggctcacagcagaccctacctagatcagtaggaaaaacaaaacaagaaacagagacaaaggcttgtctgactctttatttattccaggacagaagtaaggtctcaggaagttagtttatttttacaccgtggcagcccagagctgagacatgaaatcttcagcctgggctttcctcaccacactacgtagctaaggcaaaatgataaataaattcaaattcaaaatgatctgcaatgtttgctgaatcaaatatgacattcatatcaaaaacttatcaatgcactctgagagtttagaaccattctacasagttctttaagcaggtgattaaataggcacttaaatcagcacaggcctaagttattgccaaatttttgaagaagtgttaataacatataatacctaattctgcattgatgggagtttctctcagtgctttgagtatgtagcaaatgtcaggaaggtgctgtacatttattttgtgtgtgtgtctgtggctgccttatgataataaatgagcatctcaaaatattcattttaactgtgtagacataaattatgagacaaactttcatctccactcaccctatgaaagtcatgtgctttgatatctctgtgccttctcctctactttttttctct

SEQ ID NO: 494422 - DNA, 645 bp, Homo sapiens
atctagctaacacgtcatctcttttataaaacgtcttaccaaatcctgcaggagaagataaatccgctttcttcacctctcaccaaaccctattcacatctctcctaaaaataatgagttcccatcatgtgtcagattctgggctaagaactaaaagaagctaatacttattatgtatttactatgtgccaagctgttaaatgcagcacctatttatgaattctttttgagatggggtcccactctgtcgctcaggctagagtgcagtggcacattcataggtcattgcatcctcaaactcctggcctcaagtgatccccccgcctcagtcttctgagtaactgggattacagacaggagccactgcgcttggcctatgtctaatttaatccttacagttctatgagtgtggggttattttatgaccattcacagatgagaagactgaagtgcagagagattaagtgaatttacaaaattgataagtgtcagggatttaaatacagtcktcatggacttagtctgctgccttctttatagatctgccaaccctggaaatatagctcagctttacttctagagatcttagccccaggaatcttgactgacagcaccaattgccttccctctggatctattgcagca

SEQ ID NO: 494423 - DNA, 617 bp, Homo sapiens
catgggtatattgacctgcatgacctgcatctccctgcctgtacttgctttcgaccccttcatccttcacagggctttctctaattagtccttcgcatatctaatctcaccttggtgtctgcttctcagagaacctaaacagagacaatacatatgagaatgattgctgcctcaaataactgagttattctagaaaaatggacacataacatttttaaaacacaatttattgtaatcactcctataactatagcagatataaagtgtctcgagaatacagataaggaaacaaccgttcctgtctggagtagaggaatgtgtgttagggaaaggtgcaaggaaataacgacttttaggttggaacccagaagaattgttagaataacagataagagtatttcagaagagatgataacatcaggaaggacacagaggtatgtaagtgttacgtatgtttaggaaataaggtacttttccattcctggaaaattgtttcactgatgcaaaacacttttaaaacacggatcagcaaggcattcttcatttagarcgtccaatttcaatgaaccttccagcctcagtcttcccaaggccaagggaagcatgaactattgcca

SEQ ID NO: 494424 - DNA, 642 bp, Homo sapiens
tgcatgacccatccctccttttcccactttccctcatccctcccttctgtctgcatgtattgtacgtaacatgtgccaggcagcagacagatcctcagaaaaagacctatagatttagataaaagtgtgacacaaaatgttctgagaaaaacagaagtctacagggaaataaactttccctgcctctactatttcctttccaggagacagagacagaaagaccagcttaggttaaactatatgagaatgaggcctagttagtactgacatactctgcaatgaagtataagtctctgtggatataataatactaaaaaatctaagggatagatttttctatctcttagaaattatttctgtcccttagtattattttcactttgatggatacattcctgcattcccagggatgtagctcacttattataggaggtgtgctaggtgtagatatttcagaaatacagaaacacaaatgaraaaataaaaaccacttataatgaaaggggccccatagtcctatagaaataatacttactggtttttaaataaacatagaaattgacacttctgatcttaaaacttgaaatttacatttgtctcatctgagttcctcccttaggaaactgatcttcaggtaaggga

SEQ ID NO: 494425 - DNA, 504 bp, Homo sapiens
ctgaacctgggaggctgcgtgcttctgatttcctggcttcctatttatccttcattaacattctaggttcccgtgtcagtggctatgatgacacctcaagttatcactccccagcaaatgcagcagatcctccagcaacaagtgctgagccctcagcagctccaggttctcctccagcagcagcaggccctcatgcttcaacaggtaattgtccttcctccacctccagcctgtctcccccagaacccaggggcccccatcactccattcgcaatctcccctccaccagagcagctcctttgctcagtgaagagtaaagcagcgtgggtggggcaggacacagaccactccctgaataatcgatgtgcttttgcatgcccaaaagagaggagccctgccatggtgactagtgtttgggcctggagagtacccgatggactgagatcrgggctgtaattggacttggtagcagtaagatcttttaggtttacatggctcctaaat

SEQ ID NO: 494426 - DNA, 644 bp, Homo sapiens
aagatcagtgttcctaattctgagtatgattcaaaagatcagagagacttttacaactaaaaggactatccaagccctttcagagcttacatgttctggctaataactatactttacaaacaactgcattcacttaacctaacacatgaccttgatctgatacatccataaaatggtatgtatatcaagaccttctgatgcaaagttcaaagaaagagaaaaatggkggtttcctttcggtcttcatgtagtttattttacagtaaaaaccatcattctcatattagcaaccaatttcagacttactaccatgccactgagaaagttaattgagtttcactccaaaaaacaaattctataccactaacaacaaaaatttaaataaatttaaatgaaaagccagtgttttcattttaagaacagcatgcataaaatgatccaattgttttcaccccttcccaagttatcacattaatgtaaaacccagtgatagttatattcatgtcaaaacgattttttcacttcttcaacagatattaactcacaacattacaaaaaaaagggaagagaaaaaaacaacattgacacaataaaagatcagggaattagcttttctgaaagcagactataatggggggggtaca

SEQ ID NO: 494427 - DNA, 609 bp, Homo sapiens
cctcagcagtgagcttctctggaggtggcagtaaacctgcagggagagaaagaggcactgagagaggggagatagagagttgatgagaaggtttacgtacaagagaactcacgtgcacaggaaaacataatgataaactctgtcctctaaatctacatctactctagtaatctttctctcagaatataccatttcattatcagtaaatataatgctccatgagttgttaatcacaaattacaattgaacaatgcctgaataaaatcaggcttcagatttcatattagaatattagatcctgactttgacctctgattctcacaagtgcaaaatattccctaatctttccccacctttctgcattcaactgcacatcctagaacaataatattgaagatctatttaatgttttacctttgcagtgatatgtcttgtcattcccttgatgatcygaagaagcattttgaaggtttaattctacttggaatatttcctgtttggttcctgaaatggagattttattgcccttaagtttcctttgctgcctctttgggtcctgggccagactcacttctgagtaggttcctctttgtttattcatctctgcag

SEQ ID NO: 494428 - DNA, 609 bp, Homo sapiens
cctcagcagtgagcttctctggaggtggcagtaaacctgcagggagagaaagaggcactgagagaggggagatagagagttgatgagaaggtttacgtacaagagaactcacgtgcacaggaaaacataatgataaactctgtcctctaaatctacatctactctagtaatctttctctcagaatataccatttcattatcagtaaatataatgctccatgagttgttaatcacaaattacaattgaacaatgcctgaataaaatcaggcttcagatttcatattagaatattagatcctgactttgacctctgattctcacaagtgcaaaatattccctaatctttccccacctttctgcattcaactgcacatcctagaacaataatattgaagatctatttaatgttttacctttgcagtgatatgtcttgtcattcccttgatgatccgaagaagcattttgaaggtttaattctacttggaatatttcctgtttggttcctgaaatggagmttttattgcccttaagtttcctttgctgcctctttgggtcctgggccagactcacttctgagtaggttcctctttgtttattcatctctgcag

SEQ ID NO: 494429 - DNA, 577 bp, Homo sapiens
cttcctgagaaactgatgagacagaaatgaaacagggtccccaattcccgtattagatggtggaggatgaccaaaaccctgagtagcatcagggtccttaaaggatgctgttcccagatgaggggcccccaaaggagggcaaactgggctgcttgtcaatggggtccgaggaccagagcggccttggtcactgaggaggtcccattgtgaaacagctaagagcttcggcatccgcggcctgggcttgagtcctggctctgcccctagctcgtgtcatcttagcaaatgacttaacttcagagagcctctgtttcctaaactgaccaatggagacaaatacacctaccccaaaatacggctgtacggattcaacgaggtgaagtgcatgcaagggcttggcacacggtgagtgtcccatgagcgttagttgtgctgcttgaggcccagtrttccaggggggacgccataaccaagtgtcctcaagagccgttggctcccagggagagaggtggacatgaggtcacacatgaagagctcttggcagggtgcctgctcacagcaagcgctcagcaaacgg

SEQ ID NO: 494430 - DNA, 478 bp, Homo sapiens
tcatttttcctggtccccatattcaccatgctcatctctccatctgcatggagttttcccagtctcgacaacctcattgcttttggtaaccattctccatcttttcagagctcaaagttccatgtcctttaggaagacttggaccaggtttaagtcacaggaatctatcttttctgaattcagaagcctccatggggagtgccatggactgtggcttcctcaggtatttggtggctttgctcatggtgtggctgtgggtgccgttctagctagactggacattttcctacagaaaaacmccatggcgcacagccagtgtatgtatgtaataccaccaatttcaagtgggtgcttctcacgtatttttaatttttggcttcttagcacatacttgctgggaatttggtgactggtttgtggctgtgtccgtgtcgctccagacaggatttctttgttttgccaagtgttccttggtgaa

SEQ ID NO: 494431 - DNA, 371 bp, Homo sapiens
ttcgtgccattttagctcatgttcgttggtttacttttgtayaatctatttattttactttaaaagttaagctttgagtagatagagaattttttaaaactgtatgtaaagtttaaaagatccttgtgtattgggtgtccttctgccaacccattctcttcccagtatcctcagaggtaacattattgtgaattttgtgtttatttttctcttactttatggtttcaccacgtttgtattcctatatgatacatatatgtagatgaatcataaaatatatgtaatttggtgacttgctattttcatgcaacactatgtttctgagacccatctttgttattgctggcgtctaaattccagtcatttcccag

SEQ ID NO: 494432 - DNA, 612 bp, Homo sapiens
gtcccttcccctcagatgaaaagccacaaaaaacaggaaacttttcatactgttcccatcttcaaagtattggttcccttctggtttctgcctgcttttgatcactctccagtaccttgaagcacttattttcaatcttgtgtacagagttttaaatggtgggattttttgtttgtttgtttgttttggtgagtgtgttggttcaatacaagatacttcrccattagcataaatattacctccctttacttattttgacattttaactgatggattgtacctaggaaaacagtgtttattttgagtggtttcatttattgcatgtgatctgcattgtattgtagaatttttctttctggtaagtatctgtcatcacttaatcataaatcacatgcaagttcaaagtacaagtttcttaattgaagagtaattattataataatcacttgtaataattagttataatgatgtgcatgtcttttcatttgtggaaggaattataattcccaatatgacaaaactttgaaattcccttaataattactaaatgattatgactctatcaagttgcaagtgactgttttggaatagtatgacctcatatctaatatg

SEQ ID NO: 494433 - DNA, 622 bp, Homo sapiens
cttcccctcagatgaaaagccacaaaaaacaggaaacttttcatactgttcccatcttcaaagtattggttcccttctggtttctgcctgcttttgatcactctccagtaccttgaagcacttattttcaatcttgtgtacagagttttaaatggtgggattttttgtttgtttgtttgttttggtgagtgtgttggttcaatacaagatacttcgccattagcataaatattacctccctwtacttattttgacattttaactgatggattgtacctaggaaaacagtgtttattttgagtggtttcatttattgcatgtgatctgcattgtattgtagaatttttctttctggtaagtatctgtcatcacttaatcataaatcacatgcaagttcaaagtacaagtttcttaattgaagagtaattattataataatcacttgtaataattagttataatgatgtgcatgtcttttcatttgtggaaggaattataattcccaatatgacaaaactttgaaattcccttaataattactaaatgattatgactctatcaagttgcaagtgactgttttggaatagtatgacctcatatctaatatgaggcatttaaacta

SEQ ID NO: 494434 - DNA, 379 bp, Homo sapiens
aagaaatgatgcaccatatagcactattctatgcattatcatttaaaaataatcaatacataattaatagtgaagatatgaagatctgtgcttttttttttttttttttgagatggagtctccctctgccacccaggctggagtgcagtggtgcaatctcagckcactgcaacctccgccttccagggtcaagcgattctcttgcctcagcctcctgagtagctgggttataggagctcgccaccacaccaaactaatttttgtatttttagtagagacggggtttcaccatgttggccaggctggtcttgaactcctgacctcaggtgatccacccacctcagcctcccaaaggattacaggcatgagctaccgcacc

SEQ ID NO: 494435 - DNA, 632 bp, Homo sapiens
aacctggttcctggtggcaccatgggtgagagaacacattcatgcttcatttgtcccaactgtgactataatcgtagtttcatggtttctgttcatctccggtgtatgtggctctgacccatggccctttggacttccctttcaacactcagttgcttgggaagagccagcagtgaaaataagaatattaagggggcatatttgcattagccatggagtgatggaaaaacaggctcagcacctgtttgcttgccttctcagtgagaccaaagttccctgaaataatattgtattgtatatgcatggatttctgcacatgggacaattctgaaataggaaaaatgtgatacatacccaaggctaaaaaataacccaatgttgggaatcatttaaaaatcattaatctaatagcttatctttttaaatgatggattccgtctgygttccttgtgtttatgttgagtttgtagctaatgcagtttttttcttttttcttttgttttacaggctaaacatatttttgactggtatgaacccattctactttcatgcagtaaatataattttacactgcttagtgactcttgtgctgatgtacacctgtgataaaactgtcttcaagaatcgtggac

SEQ ID NO: 494436 - DNA, 515 bp, Homo sapiens
gtttacatggccagacctgtgaagccttcctagatcctacagtaaaaattaatctcttcagtcttctcttggtaatggtttctcctcttatgatgcatgcagtttccttgtgtgctatttaataccctcttttgactccccaccagatgttaaactccttgaggctgattatatgtttccaactggcacaggatgtagctaagaggaagcacttggaaaatgtttgttaactggagttaaacacacacttactgaacatgacaatactgactagttgaatcacaatgaatggctggtctagacatacagtagttaatgactattatagcacctgtttttagatatctagscttttgccccaaatacctcagttcaacaggggtatagaataggtgttcagtgcatgcttagtggtttggactggcaagagagcctatcagtgttacacgaatatttgaacaccctctttgagcttctcctgcaagggacactacattctttatatctgggcacat

SEQ ID NO: 494437 - DNA, 612 bp, Homo sapiens
ctgaggaataacctacaaaatgtctgaccaatactcctcaaaactgtcaaggtcatcaaaaccaagtaaagtttaagaaaccaycacagccaggaaatgtctgaccaatactccttaaaactgtgaaggtcatcaaaaacaagtaaagtttaagaaactgtcacagccaagagcagcctaaggagatatgaccactaaatgtatgataacctagacagtaacctggaacagaaaaagggcagtagataaaaataaagggaatattaatacagaatggactttagttaataattatgtataaatattggccattcatttaaacaaatgtacaataatgtaaaatgttaataaaaggtatgaggtttctgagaactctctatattattgtcataattttctataaagataaaactgttctaaataataatgtttatatttctaagtaggccaagaataaaaccacagaaaaccattactattcaagagataagcagaggaaaataggtcagtaaataaaatttaaaaggtatgaccagaaatacagaaagatatagacagatctaacatatgtcatagaggtcaaagaggataaggaacaaatagaatccacag

SEQ ID NO: 494438 - DNA, 506 bp, Homo sapiens
tcatgccctttgtctccagttgaacatactctgaggtgttatttaaactctgcaacttccctacagtatcagactaagactgcaactttgcctaacatttgcacactttctcagtttcttttccttccttgtcctactttctccatgcctttattagcttttcctgggagcacttccttaactgatcatttatgtaaaaatccttgccttaagatctgcttccggggaatccaccttttgacattatgtaaactacttcttcagctatgtattatcatagtcactgtcataacatyatatgacagctacaacatatgtcatcatatcataacattatcatgatagttgtaacaactatttttctccattacagatagctatttcattgtgttcacagcaagtttatgaacttctcaagcataggaaccatgtgatatacttttatgtcctcagcatatggctcagacccttgcacattgtaggtgatcaatacttgttgaataaac

SEQ ID NO: 494439 - DNA, 537 bp, Homo sapiens
gggttcagtcagctggctttgcttctagaagattttaggggaccatggctcagcttggcagtcctggaatgtgtgctttggctctgaaggkctgggaccaagccccttgctttgttctctggccccttgaggttaggaatctgtagtgttggaggggccgaggtgttctcagtctgtaggtcacaacactctgatgggggggtgtcaggcaaagtacttcatcagggcagtggcagtgggatacatgcttgcttgcacatgccagcagccacagcagtgtgatgaagtgcatgcacattggcttgagatggccactggtgggagtggggtggtgacatttctctgtaagctcccgccagtggtggtgactgtgcagcaggggtgaggcactgggaagggcagatttgctggcgtccatgcacatgtttgcaccagaggtggcagaggtgtaacaggggctcattttcattcagttcaaaacattttctaattttcctgtgctgttttttgttttttttttttccttttttaaccatg

SEQ ID NO: 494440 - DNA, 588 bp, Homo sapiens
cgttaggggctgggggaggacgggaggacggtgatgatctcccagtcttgttaaaggtgacacctagtcattgagtggcactggcctggccccaggcagccaccagcccacgtccctgcatgtcagggcttcctgaggcctcctgagcagcactgcagcctgcttgctggtggagagccctggcagtctgggatggagcccctgtgagcccaagtccccaagcatgccaggcaagccaccataagctcactataagcccacaaccttcagggcacacagccatgaattatacccattacacgaattcagagacagttccccaagcagttcccagagctaagggaagactgagatgagaagtacacaggccactgtgtgcctgggtgtgtcttctgtcactatatttgctcaacacaagtccagcacggcagtgggggctggtagagactgggcactttctttgctcttccccatcactcctctgtgggagatgtggccatgtgcctgtggtctgcaggagacgtgagcttccccaaggtcacccagcaatragcaggcagaacagactcaatccacacggccccgacc

SEQ ID NO: 494441 - DNA, 441 bp, Homo sapiens
gctctggggtcagaagctgtgcacgcagagaactggtgatgtttagcctgaggaagataagggacagggcagaagcaagagcrtcttcccaaaagggtggaaatgagaggttgtgttggagtgccagccctgaccacgctgggctgcctgtggcgctccacggactctgacttcgtgctctgagatgtgtccgtcccatgggcccctttggcagatgagcaaactgagcttcagtaacttgcaaatgatataacttgtactccaagtccatactctttccagagtgtggaactcatgggggaagctccaaggagacagattctagtttggcaaaagtgacctttcctggaggttggagccatttagaagtagagagagtgcgattgacagtgaacctcctagccctgaaggtgggcatggagatatgaggaggggagtcag

SEQ ID NO: 494442 - DNA, 391 bp, Homo sapiens
gcggcagctccgacccctgcagtccaggaccctggtctctgctgtccacctcagtgagaaatgaccaattctttacagagttgcatgggacaacattgcctccccatccagcctggcctcgggcagccttctwccccccttgtcctctcaaggtgagggactcttctccacacctctgcaggactgcatgagccaccaccagcacagtgatgcctgtggcatgcgggccttctgccccctctcaatggcaagtctaataaagccaagttcagggaccacaaccatgatgtgtacagagtggtcaccattgctgaactcccttaaccacctggaaggcaggcgtcccggcccaggcttaattgcattctctaatgaatgaagacaggattct

SEQ ID NO: 494443 - DNA, 391 bp, Homo sapiens
gcggcagctccgacccctgcagtccaggaccctggtctctgctgtccacctcagtgagaaatgaccaattctttacagagttgcatgggacaacattgcctccccatccagcctggcctcgggcagccttctaccccccttgtcctctcarggtgagggactcttctccacacctctgcaggactgcatgagccaccaccagcacagtgatgcctgtggcatgcgggccttctgccccctctcaatggcaagtctaataaagccaagttcagggaccacaaccatgatgtgtacagagtggtcaccattgctgaactcccttaaccacctggaaggcaggcgtcccggcccaggcttaattgcattctctaatgaatgaagacaggattct

SEQ ID NO: 494444 - DNA, 619 bp, Homo sapiens
tattctataaatccctgctaaagagcaagatctattgctcgtctacatcctgctgagaaagcaagttaaactgatttcacatgtggaggagcctgctgaactcattttcctgcttggaagcatggaggggaagtggaaggagcggaaaaagaaaaggactttcccctttaaaataaattccagctcacctgtaagccaaaccaaataaagacagtatagggattaaagccatggcctctagcgtcacaagaaaaaaaaratacatctatatttaaatgtaatgttggttccttagttgtgaaaaagttaccatagtgatgtaagacattaacaacagaggagtctgggtgagaggtatagagactctgtatatctttgcaactttttggtaaacctaaacctattctcaaatgaaaagtttactgccagatcaaattgaaaagcttaccaagcatcttccaccaagaacaattggctatccacggactcttgtttatggtactggaaaacatggcacaagcttgcttgaaaactctttatcgaacaatgacaggtttagacaccccagtgctgatggtaattaaagacagtgatggacaggtttttggtgcgttagcag

SEQ ID NO: 494445 - DNA, 577 bp, Homo sapiens
ctgactttgaatttttttacagctttgcattgtgttggcatgtttaccttcaaatgggatggggaaaaaaactacttgtttttcttgcagttatagtatgttctgcgtgtttatgaaggggtggtgggacagttcagtgcgtctcattcagcatgtccactctaggtaatgccttttggttgctcaagaccctgttactggccatcaccctggagtttcctccaccaagttggaacctgtttttaaggcattgtcagatagctgcttatctaagttaataaaataaaaaatgttcacaaatataaatatgtttttaaactaatttactttccttccaaagggtcttagatgctttaaaggtaataccttccaaacttgactgagtatcagagtgacctcagcagtccccaacctttttggcactggggaaccagtttcatggaagactatttttccacgaatggggaccaggggatgctttggggatgaaattgttccacctcagatcatcaggcattagttagattctcataaggagcgtacaactagatctckcacatgcacagttcacaatagg

SEQ ID NO: 494446 - DNA, 627 bp, Homo sapiens
ctgggaccctcctcgcctttcctgcactctcttgactgcaggcactgggtggaaaggagagatggattaaaagagagctccaaggaaatggagatgaatgcctttagatttggtatgataagaagaagggcatttctyagatacataaaagagaccagatcattatcaagatagtgcttgaaaacacacatacctctaacccaggactagtatcacatggtggcaatggtggtggttgtctcaactgtactcttggaggtgtgctgggaggattttctgcttcagaattcccagaattctaccttaagtgccttaaccttcgagtaaaggttcatttctctaggagatcagttttaaaaagaaaccaccatagaaccatttgagtccactatcagtcatgaacatgggggagtttattacatagcagactttcttttgaatcttacagttgtttaggatgttggaaaggtgagttttgatagagaaatgggcataggggaagctttgggacctgggtttttgcctagagaaggcaccttagtgtggggtcgtgggtagccagaagcctaagtggtacacagcagagcaagagtactggggagaagatggcagtgggagggtaaagtt

SEQ ID NO: 494447 - DNA, 557 bp, Homo sapiens
ctgtgtcctttgtcctttgaccttctacccttctccctgtctggaatgcagacacgatactggaggtaaaacagtcgtcctatgtagcaggtgctgtcagtgctctgcccaytattcgttgacagtcaccattctatttaccacaggcttcctgttgaaaactccttttctctacccgaggccttttgctagctacagaatcatgctgagcctgtagaatgcagtctgaaagtgggggttagtgaccctgggagcagcctttaactaatgacagatggtagttggtggataaatatcccagctctttggccttgaggtgggacaactgaggcatgagctacatacacctggggcagagagagctccctgaggtccccagcgggactgaacactggttgcccacagcagtaacccactcattaacacatcctgtgtaggctttcttactttgcctgtctcacttccccatttccctaccttcctgggatcacttcccaaataaactatttgcatgtgaatccgtttctcaggagctccttctgggggaacccaaacta

SEQ ID NO: 494448 - DNA, 640 bp, Homo sapiens
tatttgatgtattgaaataatatttcattctgatggaataatctcaaaaattcctcttgacattttaaataatttattgtgaggcctatttatttcttgtttgtcatattcagtgtctccttagcaacagaattatgtaaattgaaagaagtgcaaacactgttattgacatattccattgcttgggagaacttgttcaatatgttaaagagataaattacaaaaacttcactcttgtatatatcaaggttcttaaaagaaatattacctgtgcacaggacattctgagctgaagtgggtatttatggtgattgtcatgactatcatttgaarccaaattcaattgaatccaattcttttatgttaatgttattaaatattcttccagtatggaaaccaggagtatcattatgtgtatgttgagaaaagagggattaaaatttgatgacaatgttctatttttattagcagacaacaatttaaaaggttgttcatcaagagaattaatgtaatcctgaaaaagaaaataaaggaagttccattatgaaagatatccattatgtgtttcaacaaatcaaatttgaaaagcaattctcaaagttgttaaatttatgccagtacatgttcagaataccagctc

SEQ ID NO: 494449 - DNA, 566 bp, Homo sapiens
tgcaaccggaaagaacaagtcccctggaaacgaccccgctgctgccatcgccactgctggtgctgctgctacggcaggccctggctctccatgcagtctccagaatgccctcatctactcccattcatttcttgagcaccacctgtgtgcttggtcgtgcctggtcgtctgaggcacagccctgcggcaacgctaactctagccttcttcccaggaggcgcaagtttagaaatcttccagaaggcgcagtttagaaatcaagtgctctccggtcctaattgcggtcacactgagttgcagtggccctgcgatggccttgtatatcctctcccaggaaggctgaacacccagcacacaggacagaccctggtactcagcaggtgctgcataagcgtctgttaaatgcaggactggagcagtgcagaaacagctcttrctctgaaatcgcaggcgcttcccggggagtcccgcaccggcgcagacggcggatccagggcgtggagggggccggggaacgggttcagagtgccatctaccggcagttcgtcggactggcaggaaaggcc

SEQ ID NO: 494450 - DNA, 477 bp, Homo sapiens
tgctccatttcatgggaaatgctatgtgtctctgaacagtccttccaagggtatgcaggttgagaattttcctgccagtgccttgcatctcttgtcccctagagtaaaagttcactccatagagggttaactcctacatttccatattatacgccaatccctttagcagtgccaagacagacatatcccacaccctttacatctgggtgtaaaagctgtaggggaagccagagacacttcacagcagactcatgtgttagaataatgctgacttgaatgcctttttcagagtcagtaacccttgtgttggccagggctgaacaggtaaccaatagccctaaagamaggcgaaactcataggatctgagaaagaatgtaagaggtatttgatacaacgagtggaccagaactagaccaactctagccaaatctagcttccaatattaaatcatttcaatctctgattggattatggag

SEQ ID NO: 494451 - DNA, 573 bp, Homo sapiens
tgcaagacagatagatctctgtaccacaaacccccaggccagggtttatatcttgagtgaaaaagtatccatgctctggaaagaatgtgtaggtggctgagagaatgatacaggtgtcaaaagttctgaacttcttcttctgattttcctccatacttagaaaaactttgttcaaacttagacaaattacaaataaaaggaaagtaggaaggagaaaaaaatcggtatttctttgtaactatatattcttatttttaaattcaatattctgaaacaacagtgggagctggtacatcctcaaccctttgtgagagctgcagcatcatctaaccctacactgacctcgtgtaagagaacatgatactgtttccattttatgttgcaaatytggggaaagtttctcatatttcacctagatttatgtaaggaaaagaatcccagtaaatgaccttccatatggaagctggctgttagattcaagggctaaagtaggaaacacaaacttcttcaccttcattattcaggtgctcaggggttaatccatgtcatgagacgcaacaggcatagcaacag

SEQ ID NO: 494452 - DNA, 491 bp, Homo sapiens
atgggtaatttgaatatctacgtctatcacaacagtcagccctcctgctcgtttgttttagtactggacatatggctgaaatatggtctatgcgatactaagaaagatctgctagggagggattcagacaactttccttactcttatacagggaaactcaaggaagaagagtactcttcttttctgtttataaatagtagtctctgcatgtgataactgctgtggaagccattttgtatcctggaggagaaccarcttgagaataagacccattctctgagaatggcagagccgaagatattaattatttatgcctatgagagcatcattaagttgctgaattgatgaattttggggatactccactttaggccttcttgcttttaggaaaaatttatttaactgtgttgaagcccccagagtcatcctgacacagaattcagaatgtctaactcaaaagccagcattcttcatagaaataccacaacagg

SEQ ID NO: 494453 - DNA, 575 bp, Homo sapiens
atgggtaatttgaatatctacgtctatcacaacagtcagccctcctgctcgtttgttttagtactggacatatggctgaaatatggtctatgcgatactaagaaagatctgctagggagggattcagacaactttccttactcttatacagggaaactcaaggaagaagagtactcttcttttctgtttataaatagtagtctctgcatgtgataactgctgtggaagccattttgtatcctggaggagaaccagcttgagaataagaccmattctctgagaatggcagagccgaagatattaattatttatgcctatgagagcatcattaagttgctgaattgatgaattttggggatactccactttaggccttcttgcttttaggaaaaatttatttaactgtgttgaagcccccagagtcatcctgacacagaattcagaatgtctaactcaaaagccagcattcttcatagaaataccacaacaggtagcttccacaagtaaccttttcttttttttttttttttttttgagatggagtctcgctgtgtctcacaggctggagtgcagtg

SEQ ID NO: 494454 - DNA, 556 bp, Homo sapiens
ctggcaaaggatgagagaaaaggcttctctcagtagcaacatttgaattagatcttgaagaatgaggaatttttcagacagggatagaacgatatcaggcagaaagcaacacttgtacagaagtgatgaaaagcttggagygagctgcatgatgagcatctcagagtggtaggagcagaacagcacatacgtggtaggagtggcacccaagaatctaaaggcaggtggcattcagattgtcaaagttcaccaaattcagagtttatttgcttggcactggaaaaaaaagttgaaactctttaaaacaggctgatatgtcagacttgttttaaggcagtgattctctaagtgtggcctgtggcccctgggggttcctgagacacatttgggaaattgtgtcctcactttgcctggctttgtgttatctggggtaaaaatctctgatatgcatgagtttcagttaataaggtaacataccaagggtgaggactgtttgtatatagtaaatattgatatgatgtaccccacatgaaattagttagggtcctcaataatt

SEQ ID NO: 494455 - DNA, 579 bp, Homo sapiens
gacaacaaataagtgataaatattgttcttggccaaatatattctgttgctagaaaacaacacagtgtgtttatgaaattaycagaaaacactgtcaccaaacagtaatattgtataagaagtccttgtccccagaaatgttcctattctcaccccagattgtttttagaagcagaagttgtttctcaacaaaatctagttctgttctcaatttgtcttaataaggaatgacataagtttaccagactaaggagtccatttttcattccctgggtttaatctgtgcagacagaaagctgtaaatatcataagtagttgtagctggctggctggccttgaaggggcccatttgttaaggaccatggttcgttgatttcatgtgtgtcttccaagggccaagaggctgtttgcccatcatcactatgcggtctggggaacaaaagccgggggcccagaagcctgtgttgaaggatgacgtgacctttgaccaccactagaaaggcctggagggaaagaggcaaagtcaggctccagtaaggtttaatgacagatcttgttagggttaaaaaaacagctcag

SEQ ID NO: 494456 - DNA, 579 bp, Homo sapiens
gacaacaaataagtgataaatattgttcttggccaaatatattctgttgctagaaaacaacacagtgtgtttatgaaattaccagaaaacactgtcaccaaacagtaatattgtataagaagtcctygtccccagaaatgttcctattctcaccccagattgtttttagaagcagaagttgtttctcaacaaaatctagttctgttctcaatttgtcttaataaggaatgacataagtttaccagactaaggagtccatttttcattccctgggtttaatctgtgcagacagaaagctgtaaatatcataagtagttgtagctggctggctggccttgaaggggcccatttgttaaggaccatggttcgttgatttcatgtgtgtcttccaagggccaagaggctgtttgcccatcatcactatgcggtctggggaacaaaagccgggggcccagaagcctgtgttgaaggatgacgtgacctttgaccaccactagaaaggcctggagggaaagaggcaaagtcaggctccagtaaggtttaatgacagatcttgttagggttaaaaaaacagctcag

SEQ ID NO: 494457 - DNA, 541 bp, Homo sapiens
ctgttgctgaagctcttatatcaacttttctttcactcctgacctctgcttcagttggcttcattttcttratgtatttgtatgtgagatggaatgagagtgcggagagggtaaaaaatgttctcccaaggccatgcctacttctcaaaaatgaactgaaaaattgtccagttagctgagtctcttaggcctaaaagcaatttttatcctcaaataatgaaaactaagcaaaaagtatgagtctacggagaccaaattcagcaaataattgtctccatttgccattttcttcctgcctgtagtgacaaagaaaaactcctccagtgtttttccatctgggctcattcacatggaacctttgctcaggatgtggagaggtggggaggttaggctgagaggaggccagaagcactcccgtggaaaagttcagttgggataaatgcgcagatacagggaaactcagacctcagaagagcccttcccctgaactccccagcatcctgtcctctgcccccactctgggttttatggtggcctcact

SEQ ID NO: 494458 - DNA, 561 bp, Homo sapiens
taaaaaaataataataatgaaaaaaaaaactgagccgctgtgcctggggacagagcaggtggggaggatggcaggggacagcacacaattctcacccctcccccatctcccctggcccccccagagggggaggcagtgtccgcctcccaccccgcctgcctgtctccagctyaccctgaaggtcccccagagaggaaagaggggactcgggcgtcccctggttcccgatctgtggcgccagctggattctaattagccaccagagcttgagagacaggaagcagggggctgggggcgggggcttggatttctgcccaagacggggaggctgcaagttgggttgcaatgagtccctcacttgggaggacactcattacctccttgctcatggtgaggatgcgagtaggggagatgagtgggcagggtcaggacaggggcatggggaagaggcttccagagggtccaaggcctgcctgggatctccccgtgagctgtcccaggaggttccagtggggaagagttggcagtctctttgcccagaggtgcccagatagctgggtc

SEQ ID NO: 494459 - DNA, 446 bp, Homo sapiens
aagctgtccaagctgaggtaccaggcattctgagaggccgagatagaaccacctagttgactttagttgacctcaggtayatgagtgagtcccgccagcccagctcagatcagtagaagccatatgggattatgttagttacacaggaatagctaacagatactatgtcaatgacagtggtggtagcagagaaagaagaatgggaaaatggtttcaactgtatgagaaggttaagtcgaataaagtggatgtcacatatctgtgagctggagaatattaggttttgtagcagaaataaagacaagttatagagtatattaaagttcacaaaaaagaaataaagagtcatttattataatttgtaggaaagcaaaaacattctaaatgaaaacaccatatattacagtgtaataaaagaacaagtgatgttgataacaaatgacatt

SEQ ID NO: 494460 - DNA, 616 bp, Homo sapiens
cactaagctctttttctaacgactctagtccttgaagcttgtctttgaagtccttggctaagtcttcatgctgtggctatccctagccaattttaaacatggaccagtacctgcaaaagaaatggtatgttagaaggattctaatgcaataggtaacagygggtagcagatgactcgccatttgcttgatcataggccttacctgggatgaggcaaattagtgtcacagaaggagaaggaaagctgagaagacacactattattcacccctttgttccccttgatctttcattactatctcccacccttctgatcccctaaagattcaggctgtaccaagcccatggaaacactaatgatgctgagtcatacatgctctctatcagattctgttctctcaactcaccaaatgccctttgaggaaacattcagaacctgctttatccacctgtgttttctgatgccagcaaagccactggttccttccccttgttccaggccccctatggcataattcagataatgtacattttaagccacccccttttcatttctgtacatttggtcaaagacaggtcaggatttgggcattctcattacaagcaaggcttcactg

SEQ ID NO: 494461 - DNA, 361 bp, Homo sapiens
aataattttcctgggactcacacagcawtcactggcagagctgggattcaactgcacgtcagagcccacccttgtcaccactagaatcaggttgacaccctgcccatagaaacccttactggaaagccagcagggaaaggaacatttgctgcttcttgtcatttgggtctcagcttaaatgtcacctccacagggagatcgtccctggctaccccatctaaaataggccctctcttcccctcccctccgttttcacctctcccctcttcccctctttctttcccttcttaactgagaatgagtctctccatggctcttttcattacctgcaatttgttagttttcttctacaacttgtgtt

SEQ ID NO: 494462 - DNA, 495 bp, Homo sapiens
gcgatctctgagctgcatatgagaaaaatccacctccaactggcttaagtaaagaaggaatgtgttggctcatgcacctgaaaaatttagatctagactcaggcttggctggatcctgggaataaaaggctgtcatcaaaactcggtctctcttagtctcttctgttttcctttgcctgttttgccttcaggcaggctcttcctagacaaaggcagcgtggccaccagcagcgtcaggttcacaccttgccaccttaacaccttttcccaagggctccagcagaagtcccagtgttgactstcactggactatatgaagtgacatgcccatcgctgacctggtcactcagtggagccagggtatagattgtattgattggccagacctagcccatgtgtctgtctctgaagttaggaggtgggtgagtgtcatttatatgtttcggtctaagggttaaggaggggcagttctccaaaggcacatcaggagctgct

SEQ ID NO: 494463 - DNA, 539 bp, Homo sapiens
tttctctcatagtcaatgtgtatagtgcagagcttggttactttccattagtgttttctatggtagccctaaatctccagtagtttgctaatttattgacttcagggatcatattttatacttttatgtaaaagcacagactatagagtcaaacagatatctctttgactccatactctgctacttgtcagttgtgaaacattaaactgatttcctcatctgaaaattgggataatacttaccctgtggaattgttttgwgaatcaagtgaattagtttatgtaatagctttaatccaggaattgaacttttcctactcaaaaaatatttgatgatttcccattcactcatgaaaaagaaatccaaaaacattatcatgcatgatctagcccctgcctacttttccagtgccatctgcctcccttcacaaaatgaaaccttaagcatgttaaacttccacatgtctgtgaatgtgtcatgctgtttcatgcctccattcttttcgggttattcttcctctgcctgaaaaaacctgtaag

SEQ ID NO: 494464 - DNA, 539 bp, Homo sapiens
tttctctcatagtcaatgtgtatagtgcagagcttggttactttccattagtgttttctatggtagccctaaatctccagtagtttgctaatttattgacttcagggatcatattttatacttttatgtaaaagcacagactatagagtcaaacagatatctctttgactccatactctgctacttgtcagttgtgaaacattaaactgatttcctcatctgaaaattgggataatacttaccctgtggaattgttttgtgaatcaagtgaattagtttatgtaatagctttaatccaggaattgaacttttcctactcaaaaaatatttgatgatttcccattcactcatgraaaagaaatccaaaaacattatcatgcatgatctagcccctgcctacttttccagtgccatctgcctcccttcacaaaatgaaaccttaagcatgttaaacttccacatgtctgtgaatgtgtcatgctgtttcatgcctccattcttttcgggttattcttcctctgcctgaaaaaacctgtaag

SEQ ID NO: 494465 - DNA, 577 bp, Homo sapiens
gggtaattaagtcatatcctggtttcagagattacattgtattggaagacaacctaatttttccaccaaagatctacatattatttcccaggaatggcacttctatatatgtatgagttaatctttatttcaattcagagtgtttatttcttaggctaacttccaaactctgtaaggtgtgccctccttggaaactgtagagccctatgtactgacaccaaaaaatcacttaataataattataaagatatagtgtattcttaggttaagtacaatcaactaagctttctaatatgcaaaccacagtttttttaaaggaaactttttttctctgacatatatattacttttcaatcctaattgaagaaatattctgactcagtttttttggcatggtgatagagtgaacttccatccattattagctaatacttgaagtttcttcttaaaacatacagaccacagggaagtataattttgctacagagtagtgattctcaaccacgatatcccttctgttctctgttatcttctagccagatgacarttgttgtgattttgagcatgtagcataccc

SEQ ID NO: 494466 - DNA, 574 bp, Homo sapiens
ccaattaatttctgcaacttttaatgacatctttctgagtaaaaacctcacataatgccctaagcatgtgattgatggcagcttatgtttgatttgtrctggattcctgattttttttagtatttttaaagagtccctctgcagccaatcaagcaatcaacgtgaaatactcagattcgctcttgaaaagtacaagaaaacagaaaagacaatgtggtttcctttcctggccaacagacgattggtgatgctatttaagtagttttctggctgatggattacagagatttttattccaagagaaaaagacagtcaaggaaaaccacttaatttttcttctattcaagataccagagtataacactacccttaaatatgagtatgtaatataccatttccctttattgactttcctagactttagaaaaagtatttccccatatcctagaaaatgtcccgagtttgtaatatcaatggaaggatttacattgaacaaataggaccacacaagaactcacatatgtttttagtgggcatgaccacgggaaatgaatccttgattaacatggggttt

SEQ ID NO: 494467 - DNA, 556 bp, Homo sapiens
caaattgcaaagaattattatttgttaaatgatagaaaatcttcccatgagcatagatgacattaagcaactaatttaagatatttaaagcaatgcttgtttttattggcaaaatatgcagtatcttgagaggaatttttagtctgaatttttagattgcttagttacccactatgagagtatcatataattattactctcagagattttaggaagctgctactgtgtgctaaataatacgatacactgctgatacaaagggccaacaaatacgatgctgaccccagaggatcttactattcttaaaggcatcatatggatagatagtgttttaacttgttttatgaattttatgattagaatggttcaagagcacttctgctctcaatattgccagaaaatgtgtctttttaatgtatctctgtctctcgtggtgtgagaaccaaastctttttttccccaccacagcttgttgtctatattaacatgatgctactatttcattgctttcaatagcataactttactatttcaagagtctcttgtccaggtcaat

SEQ ID NO: 494468 - DNA, 492 bp, Homo sapiens
gtttttttttgtttgtttgtttgtttktttttaagtaaagcctgcattagctatagaggaaagaaacattgtataattttattattagattgtaatagctttgttggacctttatatcatgtttaagtataaggccatgcgtcttttgcaaacaagttcatgaaccaagaaaaccaccttataactccaccaactctccttattcattgttttaaatgcttttataaatctttactgtcacttgataattatttacagtaacatggaacaaaagtgaagcagatatttgaaatctacagatgactctacctccaattcaggtgatcctttctaactcatctttccccagaactatgaactggcagtgaaatcactttgtttcagtatcatctactccttctcttgtggggatcagtgcaggtggaaggcaggagattgaacaggtttttatttttcttttcttccttttttttaaaatcccttattaaaatt

SEQ ID NO: 494469 - DNA, 407 bp, Homo sapiens
acttaaaaaaaaaaactccaaaataacaaaaacaaactcctcttaccttgtatgcactgttttccagagagggccttagaccctgtttgaagtctaactgtccctcctgctcagacataattttggcaccgtcattgtgtggccttagaaatggtcctcctgratactgaaaagtctgacctggcggtgtttgcagccaactttctgagtctatctctgtgtttgttgttgttggtagtgatggtttgtttgttcattttttgagacagggtcttgctctattgcccaggctggagagcagtggtgccatcgtagctcactgcagccttgaaaactcctgggctcaagccatcttcccacttcagcctcctgagtagctgggattacatgtgcaagccactgccctc

SEQ ID NO: 494470 - DNA, 628 bp, Homo sapiens
gatctaacattttagatcaatgggatgagggaaaaatgaagtaaatggtttctattttctttttctttctcttttttattttttttgagacagagtcttcctctgtcgtcccaggctggagtgcagtggtgcaatccyggctcactgcaacctccgcctcccaggttcaagtgattttcctgcctcagcatcccgagtagctgagcctacagatgcgccccaacacatctggctaatttatgtatttttagcagagatggggtttctccattttgagccaggctggtcttgaactcctgacctcaagtgatccacctgcctcagcctcctaagtgctgggattacagatgtgagccactgtgcccggccaatggtttctattttctatgaccctcttttaccccaggcttttcccatatacaaatagatcagtgttggtgatatttctctttttattatttatttttgtagagacagggtcttgctattttgcccaggctggtcacaaacttctgccctcaagtgatcctcctgggtcagcctcctaaaggaggccttaattaaagtttggaaatcagatgagggcaaccatgtattggcctattattcagtatatgtcaccagaagt

SEQ ID NO: 494471 - DNA, 573 bp, Homo sapiens
ctactctgctttccctctacctgtcatccttttgtcttgcttccccagtgttggcattttatgaggcttcttatcaaaatacagttgacccttgaaaaacataggtttgaattgtgtgggtccacttttacgtggatttttaraaataaatatattggaaaaatatgtagagatttatgacaagttgaaaaaacttgcagataaaccatataacatagaaatactgaaaaaaaaatccaagaaaaaatagatattccctgggtgtataaaatatatgtagatattagtctattttatcactgacgctcaaacaacaggagtttgaactatattggttcagttctatgcggattgttttttacgactgccacccttgagatagcaagaccagctcctcctcctccttctcagcctactcaacaagaagatgaggaataagacctttacaatgatccacttctacttagtgaatagtaaatatattttttctttttttataattttcttaataacattttattttctcaggtttactttatcataagaatatgatacaaaatatgtgttaatcaa

SEQ ID NO: 494472 - DNA, 449 bp, Homo sapiens
acacatacatgaccataggcaaactcagcagagaaacctcctagccaatcctcaaaatacatgaaaaataatattggctatttgttatccactraggacttgggggtggtcaacataaagtggtatttaaccagaaacaaaacacatgttctataaaagagcaaaaaatatatttcatataaggaacgacaacatttagttcaggagaaatgtgaaaatgttcgtgaagaatgtggtgtttgaaatttgtaccaacattgtgtaggaaacatgcattgcggacatgttggagaagtgctttaaagccaggatgaggcattcatatccatcccgaagtcaatgagacttctaaccttgtttgtttagggaagtggcataaacgcactgctatgctggtaaccaggagaagaatgagaacggtgaggcacctcgtcaacgattgttgaatg

SEQ ID NO: 494473 - DNA, 587 bp, Homo sapiens
tgtcagtacagaaaactatacatggactataaggaaacactgcatttgattttatgacatggrcttactattagtcatcagatttcaaacaaatttagatttactcatttgttcacttactccagaatcatactgagtcttgttttaggtgctcagtgtatccagtccccctcactacccctcaaacagttaaatgtggcccttgacatcaaggactcagaataaagagagggagaagcatgtaatcaattacaacacaaagcagaaaatactgtaatcatagaacatgaactgacaaaatgtatatagattgtacgggaagaccacatccaagacgtactgtggagacccaagctgtattagcgggagatcttctggtagatgtgagttggaaattgagttgaagatgagataaacagttccaaaaaggaacaggatagatattttctcttggttaagaataataacatgaataataacatgaataataacaagaataataacatgatgactacttttagtcatcatttttatatttaatctttgtagccagattaatttaaaacttttttccgttttgtatctca

SEQ ID NO: 494474 - DNA, 587 bp, Homo sapiens
tgtcagtacagaaaactatacatggactataaggaaacactgcatttgattttatgacatggacttactattagtcatcagatttcaaacaaatttagatttactcatttgttcacttactccagaatcatactgagtcttgttttaggtgctyagtgtatccagtccccctcactacccctcaaacagttaaatgtggcccttgacatcaaggactcagaataaagagagggagaagcatgtaatcaattacaacacaaagcagaaaatactgtaatcatagaacatgaactgacaaaatgtatatagattgtacgggaagaccacatccaagacgtactgtggagacccaagctgtattagcgggagatcttctggtagatgtgagttggaaattgagttgaagatgagataaacagttccaaaaaggaacaggatagatattttctcttggttaagaataataacatgaataataacatgaataataacaagaataataacatgatgactacttttagtcatcatttttatatttaatctttgtagccagattaatttaaaacttttttccgttttgtatctca

SEQ ID NO: 494475 - DNA, 587 bp, Homo sapiens
tgtcagtacagaaaactatacatggactataaggaaacactgcatttgattttatgacatggacttactattagtcatcagatttcaaacaaatttagatttactcatttgttcacttactccagaatcatactgagtcttgttttaggtgctcagtgtatccagtccccctcactacccctcaaacagttaaatgtggcccttgacatcaaggactcagaataaagagagggagaagcatgtaatcaattacaacacaaagcagaaaatactgtaatcatagaacatgaactgacaaaatgtatatagattgtacgggaagaccacatccaagacgtactgtggagacccaagctgtattagcrggagatcttctggtagatgtgagttggaaattgagttgaagatgagataaacagttccaaaaaggaacaggatagatattttctcttggttaagaataataacatgaataataacatgaataataacaagaataataacatgatgactacttttagtcatcatttttatatttaatctttgtagccagattaatttaaaacttttttccgttttgtatctca

SEQ ID NO: 494476 - DNA, 587 bp, Homo sapiens
tgtcagtacagaaaactatacatggactataaggaaacactgcatttgattttatgacatggacttactattagtcatcagatttcaaacaaatttagatttactcatttgttcacttactccagaatcatactgagtcttgttttaggtgctcagtgtatccagtccccctcactacccctcaaacagttaaatgtggcccttgacatcaaggactcagaataaagagagggagaagcatgtaatcaattacaacacaaagcagaaaatactgtaatcatagaacatgaactgacaaaatgtatatagattgtacgggaagaccacatccaagacgtactgtggagacccaagctgtattagcggsagatcttctggtagatgtgagttggaaattgagttgaagatgagataaacagttccaaaaaggaacaggatagatattttctcttggttaagaataataacatgaataataacatgaataataacaagaataataacatgatgactacttttagtcatcatttttatatttaatctttgtagccagattaatttaaaacttttttccgttttgtatctca

SEQ ID NO: 494477 - DNA, 505 bp, Homo sapiens
gtagtcatcatgttattattcttgttattattcatgttattattcatgttattattcttaaccaagagaaaatatctatcctgttccttttggaactgtttatctcatcttcaactcaatttccaactcacatctaccagaagatctcccgctaatacagcttgggtctccacagtacgtcttggatgtggtcttcccgtacaatctatatacattttgtcagttcatgttctatgattacagtattttctgctttgtgttgtaattgattacatgcttctccctctctttattctgagtccttgatgtcaagggccacatttaactgtttgaggggtagtgagggggactggatacactragcacctaaaacaaagactcagtatgattctggagtaagtgaacaaatgagtaaatctaaatttgtttgaaatctgatgactaatagtaagtccatgtcataaaatcaaatgcagtgtttccttatagtccatgtatagttttc

SEQ ID NO: 494478 - DNA, 551 bp, Homo sapiens
aatagacaaaagcatctgtatctttcatgacagtagaaagtgaayacagagacgttaatcattattatagtccctcaaaaggtactgctttttcattccaaatatctcttactttttcttgacacagtcaaatgggtacgctaatttacctaataaaaacaaatccttaggtaaattattggcttcctttaaaaggaagctaaagtaaattaggatgggtcaaagttagacctagaaacttcaaaagtgactatttaattgagtgtatttaacttatctttccatgataattgataacaaaagcattcatctaattgaaaatctccatgaaataaagcaagacatactgaaacactattccatatttttttcatgaatcacttatctttaaagaaaaattgagttactgatgtattaacagttaattttcagctaactgatgcagaatttaaacctttgacaaaaaaattaataactttgatgttttaattttaatattaacaaaggatagcagatttaagccatatttaaaatgttcacagtacatatag

SEQ ID NO: 494479 - DNA, 636 bp, Homo sapiens
caatagacaaaagcatctgtatctttcatgacagtagaaagtgaacacagagaygttaatcattattatagtccctcaaaaggtactgctttttcattccaaatatctcttactttttcttgacacagtcaaatgggtacgctaatttacctaataaaaacaaatccttaggtaaattattggcttcctttaaaaggaagctaaagtaaattaggatgggtcaaagttagacctagaaacttcaaaagtgactatttaattgagtgtatttaacttatctttccatgataattgataacaaaagcattcatctaattgaaaatctccatgaaataaagcaagacatactgaaacactattccatatttttttcatgaatcacttatctttaaagaaaaattgagttactgatgtattaacagttaattttcagctaactgatgcagaatttaaacctttgacaaaaaaattaataactttgatgttttaattttaatattaacaaaggatagcagatttaagccatatttaaaatgttcacagtacatatagacacttaccctgaacaattagttacacagagagtcacaagatgaaattcaaaagcagcatctttagattttgaggttgttactc

SEQ ID NO: 494480 - DNA, 636 bp, Homo sapiens
caatagacaaaagcatctgtatctttcatgacagtagaaagtgaacacagagacgttaatcattattatagtccctcaaaaggtactgctttttcattccaaatatctcttactttttcttgacacagtcaaatgggtwcgctaatttacctaataaaaacaaatccttaggtaaattattggcttcctttaaaaggaagctaaagtaaattaggatgggtcaaagttagacctagaaacttcaaaagtgactatttaattgagtgtatttaacttatctttccatgataattgataacaaaagcattcatctaattgaaaatctccatgaaataaagcaagacatactgaaacactattccatatttttttcatgaatcacttatctttaaagaaaaattgagttactgatgtattaacagttaattttcagctaactgatgcagaatttaaacctttgacaaaaaaattaataactttgatgttttaattttaatattaacaaaggatagcagatttaagccatatttaaaatgttcacagtacatatagacacttaccctgaacaattagttacacagagagtcacaagatgaaattcaaaagcagcatctttagattttgaggttgttactc

SEQ ID NO: 494481 - DNA, 443 bp, Homo sapiens
acaatcgttgacgaggtgcctcaccgttctcattcttctcctggttaccagcattgcagtgsgtttatgccacttccctaaacaaacaaggttagaagtctcattgacttctgggatggatatgaatgcctcatcctggctttaaagcacttctccaacatgtccgcaatgcatgtttcctacacaatgtttggtacaaatttcaaacaccacattcttcacgaacattttcacatttctcctgaactaaatgttgtcgttccttatatgaaatatattttttgctcttttatagaacattgtgttttgtttctggttaaataccactttatgttgaccacccccaagtcctcagtggataacaaatagccaatattatttttcatgtattttgaggattggctaggaggtttctctgctgagtttgcctatggtcatgtatg

SEQ ID NO: 494482 - DNA, 443 bp, Homo sapiens
acaatcgttgacgaggtgcctcaccgttctcattcttctcctggttaccagcattgcagtgcgtttatgccacttccctaaacaaacaaggttagaagtctcattgacttctgggatggatatgaatgcctcatcctggctttaaagcacttctccaacatgtccgcaatgcatgtttcctacacaatgtttggtayaaatttcaaacaccacattcttcacgaacattttcacatttctcctgaactaaatgttgtcgttccttatatgaaatatattttttgctcttttatagaacattgtgttttgtttctggttaaataccactttatgttgaccacccccaagtcctcagtggataacaaatagccaatattatttttcatgtattttgaggattggctaggaggtttctctgctgagtttgcctatggtcatgtatg

SEQ ID NO: 494483 - DNA, 518 bp, Homo sapiens
gcatgccgaagaatataaaatggtagacaaaagaacctttatactcccttctctttggctttaaaatatatatatatttgcaattccttaagggctgtaaaagattgattgatttttacaaaycttaaggtattacaaagatttggcagggaacgtgggggattagatgtggtttttgttctctgcatattgttcatttgaaaaataaacacataaatgaaagaatggtttgatgaaaatacaaacaaacgaggtgtttatgttactacaatttctataattttacaggtatattagtcaaaagctttaataaaattgagaaaaagtaaaaggcagaatttctgattatatcaaatgactttgactaaaacttcaattaataagctaaaagaataggtcaaataggtacaaacagtccacaacattatctttcttcatgactggcctcttaaaatccaccttgaggggcaggcaggctctgtcctgcacctgaatgaaagtcaatggcaatcccatta

SEQ ID NO: 494484 - DNA, 518 bp, Homo sapiens
gcatgccgaagaatataaaatggtagacaaaagaacctttatactcccttctctttggctttaaaatatatatatatttgcaattccttaagggctgtaaaagattgattgatttttacaaaccttaaggtattacaaagatttggcagggaacgtgggggattagatgtggtttttgttctctgcatattgttcawttgaaaaataaacacataaatgaaagaatggtttgatgaaaatacaaacaaacgaggtgtttatgttactacaatttctataattttacaggtatattagtcaaaagctttaataaaattgagaaaaagtaaaaggcagaatttctgattatatcaaatgactttgactaaaacttcaattaataagctaaaagaataggtcaaataggtacaaacagtccacaacattatctttcttcatgactggcctcttaaaatccaccttgaggggcaggcaggctctgtcctgcacctgaatgaaagtcaatggcaatcccatta

SEQ ID NO: 494485 - DNA, 658 bp, Homo sapiens
gcatgccgaagaatataaaatggtagacaaaagaacctttatactcccttctctttggctttaaaatatatatatatttgcaattccttaagggctgtaaaagattgattgatttttacaaaccttaaggtattacaaagatttggcagggaacgtgggggattagatgtggtttttgttctctgcatattgttcatttgaaaaataaacacataaatgaaagaatggtttgatgaaaatacaaacaaacgaggtgtttatgttactacaatttctataattttacaggtatattagtcaaaagctttaataaaattgagaaaaagtaaaaggcagaatttctgattatatcaaatgactttgactaaaacttcaattaataagctaaaagaataggtcaaataggtacaaacagtccacaacattatctttcttcatgactggcctcttaaaatccaccttgaggggcaggcaggctctgtcctgcacctgaatgaaagtcaatggcaatcccattactttggtgactcagagactgaatgttctctagtcacatctgtatacaagaacactttcagtttattaattaaatgttcattcttgtgtaacaatttttaaaawtccaaacttccttcaatttaaaattttgtggcaatta

SEQ ID NO: 494486 - DNA, 361 bp, Homo sapiens
agagtaagaccctgccttcacaaaaaaaaaaaaaaaaaaaaaaaaaaaaactcaggttccaaccctggagttactaaatcaggatmtcagaatgcagagatctggcatttcaaaaaaaacttcccctggagattctgatcagccaggtttgggccagacgaactctaagctcacttaaacctttgacattttatgagtctattaaatcgagtacaaaaaatgctgagtccaaactgagcaaaacaaatcccatctccctatgcccagcctccttggattcagaaagccacactgcctggagagtaagcagagagagaattgtcattaacccaaagaccatctttgaaaacagactggctgc

SEQ ID NO: 494487 - DNA, 361 bp, Homo sapiens
agagtaagaccctgccttcacaaaaaaaaaaaaaaaaaaaaaaaaaaaaactcaggttccaaccctggagttactaaatcaggatatcagaatgcagagatctggcatttcaaaaaaaacttcccctggagattctgatcagccaggtttgggccagaygaactctaagctcacttaaacctttgacattttatgagtctattaaatcgagtacaaaaaatgctgagtccaaactgagcaaaacaaatcccatctccctatgcccagcctccttggattcagaaagccacactgcctggagagtaagcagagagagaattgtcattaacccaaagaccatctttgaaaacagactggctgc

SEQ ID NO: 494488 - DNA, 277 bp, Homo sapiens
ggtccaaggctttggtgtgagcaatcaccatcctgtccacaaaagagagaagacacaggttccgtcagtctgggaaaggctcagacaccctcccatcctctctgtcccatcttcccctgtcagaacacaactgggggmcaggcacgatggctcacatctgtaatcccagcacttcaggaggctgaggcaggtagatcactgaggtcaggagttcaagaacagcctggccaacatggcaaaaccccatttctactaaatatacaaaaattagccaggc

SEQ ID NO: 494489 - DNA, 499 bp, Homo sapiens
tatattatttggttacgtaaaaatggtacattctttgtgaataattcaatctttatagaacagtttatgctagtatcacttgcataattactatgatgaacatcctcccagatatcttctgtatctgtgggcacagctttccataaatrcaattatactatttgtcaacattttcctcttcatgaaattgctttttaaagacattgcttatgaatatttaccctggatattttacatcaaaatctccctgcaccattgtttcctaataattctatatcctggtcccccaaaatttcattagaatttgatgaatggcaggttaaaatggaaatattaaaaacataaatatgaaatatttatattttatatgaacttataatacaaaatattaaaaacacataaaacttatggtgccttctttatggaagggtggagataaatcatatagtgatctcagataagtggaccaggcaggtaacagcaaggaaattaatgaaga

SEQ ID NO: 494490 - DNA, 499 bp, Homo sapiens
tatattatttggttacgtaaaaatggtacattctttgtgaataattcaatctttatagaacagtttatgctagtatcacttgcataattactatgatgaacatcctcccagatatcttctgtatctgtgggcacagctttccataaatgcaattatactatttgtcaacattttcctcttcatgaaattgctttttaaagacattgcttatgaatatttaccctggatattttacatcaaaatctccctgcaccattgtttcctaataattctatatcctggtcccccaaaatttcattagaatttgatgaatggcaggttaaaatggaaatattaaaaacataaatatgaaatatttatattttatatgaacttataatacaaaatattaaaaacacataaaacttatggygccttctttatggaagggtggagataaatcatatagtgatctcagataagtggaccaggcaggtaacagcaaggaaattaatgaaga

SEQ ID NO: 494491 - DNA, 557 bp, Homo sapiens
ctgagaattatttttaatatttgagaagttcacaatggtgacccaatatccaataggaaaaaaaatggcaaagaacattagcaactcacagcagaggagcaacgagtcaattctaaacattcaaaaatgcagactttcattagtaacaaaataaatgcaagctaaaacattgatgtgctaacatttctgtcttgtcatattagcaaagagtcaaagaccttttatctgttttagctgarccactacctcataattatgcagagttctggaaaggtccacacatccagagctcttctgcgagtacaggattgatggttcacccatctgcccactctccaataacttcttggggagattcagatttaagaatcatgataagttagtgtttttgtctattttatattgctataaaataatacctaaggttgggtaatttgtaaagaaaaggggtttatttggatcacagttttccaggcatggtactggtatttgcttggcttctggcgaaggttttcgtctgcatcaaaacatagtggagaaagtcaaagggaagtggg

SEQ ID NO: 494492 - DNA, 508 bp, Homo sapiens
agctgaggagttgtgaatagtgcttaattgtaggaaagctaattagcctctcaaaggacagaggtaataaattatggatgtaacttattttaatagtcacagcttaagtggacggcacaatgaggcataagcagtttaacttgattaacacacttcagaactcattaaatctatcatttttctgttccatcccattccttcctcctgatctttattttctcttttcatatatctttttttctgttttctctttcartagatgatctcaatctatatgtctcctcctcatgatttctctcttttatgttgaacctcctatatatctttttatttctttcactttccatcagctgttatttttatactccactcatatttatttttttcttatttttcttccctctctccatggatatctttctatcttatatgcgaccgttcatacacccttcttcctgatagcatcccactgagttatactattcagaacgttattgatgatcaatga

SEQ ID NO: 494493 - DNA, 625 bp, Homo sapiens
ttactttttcaacctcttttagacagggaaaggaaacagcctctctaactatttcctcgggttatggacagggccaggttggttaaaaaaaaaaagaaaaaagaaaaatccctcagcaagcattgtgaatcatgggtaaagatttaaatagcacaggattttctgactcggctcagtacttcattatttataaaaacgagatggtgtgctaaaaagtagaacaaaaaccacagtggcctcttctgccttkgctctcagacggatttctgggaaaaaatccaaactttctaccgtcgtggtttcttagcaatatgtaaaagaaaagagttgattattaattgagctgagttagctatcccccagagatttacactgtgataagtccctacttgaccagtgggcttgcttcttttatctctgcatgaagcaggagcctgaatcgttcaaccatttcaaaacatccacgtttctcctccagcaataatagtagctataaactcagagtgtagcataggatcttactattaccggattagaaagttatgagcattctcccccacacacaacatacagtcagcttagagttgaacagacaagaaaataagaacataaattttactcagac

SEQ ID NO: 494494 - DNA, 625 bp, Homo sapiens
ttactttttcaacctcttttagacagggaaaggaaacagcctctctaactatttcctcgggttatggacagggccaggttggttaaaaaaaaaaagaaaaaagaaaaatccctcagcaagcattgtgaatcatgggtaaagatttaaatagcacaggattttctgactcggctcagtacttcattatttataaaaacgagatggtgtgctaaaaagtagaacaaaaaccacagtggcctcttctgccttggctctcagackgatttctgggaaaaaatccaaactttctaccgtcgtggtttcttagcaatatgtaaaagaaaagagttgattattaattgagctgagttagctatcccccagagatttacactgtgataagtccctacttgaccagtgggcttgcttcttttatctctgcatgaagcaggagcctgaatcgttcaaccatttcaaaacatccacgtttctcctccagcaataatagtagctataaactcagagtgtagcataggatcttactattaccggattagaaagttatgagcattctcccccacacacaacatacagtcagcttagagttgaacagacaagaaaataagaacataaattttactcagac

SEQ ID NO: 494495 - DNA, 509 bp, Homo sapiens
gcaagcattgtgaatcatgggtaaagatttaaatagcacaggattttctgactcggctcagtacttcattatttataaaaacgagatggtgtgctaaaaagtagaacaaaaaccacagtggcctcttctgccttggctctcagacggatttctgggaaaaaatccaaactttctaccgtcgtggtttcttagcaatatgtaaaagaaaagagttgattattaattgagctgagttagctatcccccagagatttacactgtgataagtccctacttgaccagtkggcttgcttcttttatctctgcatgaagcaggagcctgaatcgttcaaccatttcaaaacatccacgtttctcctccagcaataatagtagctataaactcagagtgtagcataggatcttactattaccggattagaaagttatgagcattctcccccacacacaacatacagtcagcttagagttgaacagacaagaaaataagaacataaattttactcaga

SEQ ID NO: 494496 - DNA, 558 bp, Homo sapiens
aaaaagctgttgatcactgttgttttttgaagtgccaatcccatgccatgcagtattatgtccctctcctatctgtgtattacacattcccctctcccctgtatcaaaaccatccatctgtgggttcttcttgcacagttctagaacagccttgcaaattaatacaagtcccaggcccaatgcctaagagaccagacgtgggcaaagacaagtttggatggaaaggtgttatcacagagccctgtccagctcctagaattcctcaggccagtgacacttttttgctgctggccacccatgcctctgatgagaacacttgccaatttggccagcagaaagagagtaggccrgatgttttcatgagcccacaaatttagaaactctcctagtagtactttttctctctccatttaagagacaactacggtcaaaagttgagccattctcttctaccccttcagtgtctgaccctttcactggctcttatctgtgaacacagggaggaaggtatggattttgtcacagtagacaatgggtcaacagcatgagtttgaggac

SEQ ID NO: 494497 - DNA, 558 bp, Homo sapiens
aaaaagctgttgatcactgttgttttttgaagtgccaatcccatgccatgcagtattatgtccctctcctatctgtgtattacacattcccctctcccctgtatcaaaaccatccatctgtgggttcttcttgcacagttctagaacagccttgcaaattaatacaagtcccaggcccaatgcctaagagaccagacgtgggcaaagacaagtttggatggaaaggtgttatcacagagccctgtccagctcctagaattcctcaggccagtgacacttttttgctgctggccacccatgcctctgatgagaacacttgccaatttggccagcagaaagagagtaggccagatgttttcatgagcccacaaatttagaaactctcctagtagtactttttctctctccatttaagagacaactacggtcaaaagttgagccattctcttctaccccttcagtgtctgaccctttcactggctcttatctgtgaacacagggaggmaggtatggattttgtcacagtagacaatgggtcaacagcatgagtttgaggac

SEQ ID NO: 494498 - DNA, 509 bp, Homo sapiens
tcatcaaacatatgctgggtccttagcaatacggtgtcacagttgakcatttgagtgctggaactgtcgttatagttgtcatttggggaagaaagctcaaagttcacatttgtaaactttttggaaattttcaaacatataaaagcagcaattataggatactgacaccccctgcccccatactccttccctgttacccggtttccacaatgattaatatttggttgattttttccttcattgccttccctttctcactatttttctggagtattttaaagtaaatcccagacataatattatttcatctgtaaatatttcataaacattctaagttaaaatcctagctctttgacatactatgtttatgaccttaggcaggttaattaatgtccctaatgttcatcttctacatatgtaacatgaggataattatggtacattcctcatagggttataatgaggagtgaagggactattccatggaaagcatttgacacttagcatgc

SEQ ID NO: 494499 - DNA, 532 bp, Homo sapiens
gctatcaatagagtgcagtgaagggttcgtcctgagatcctgtgtagctgagattttctcctctttcctccatgatggcccagtgtatataagttgggcttctgccttgatgcgtccttaatacagctcatgtccctctcagtcacaatgaggccatttccagaacctcttctcatgcgatggttttcttttctttcttttttttttttkgttttttttttttttggacagggtatccctctgtcacccaggctagagtgcagtggcacaatcacagctccatgcagcctccatcttctggctcaagcaatcccccagccttggcctcccaaagcactgggactataggcatgagacaccctgcccggccagtatgttctcttgataattcacctggccatcctctttttctgtaggtggctaggctttgcatctcataccatgggcctctgactagggtcctctggcaaataaacaaatttcctataactgtcatgcaattctagttcaccctaccatcacctaaaattcc

SEQ ID NO: 494500 - DNA, 537 bp, Homo sapiens
cctgctgaagaaaagataaccagagttcctactgtgtatcaatctcaagtctcgtctatgtcagttagcaaaagccacttaaaggcttagcatctccttgaagggaattaacctgttttgacttctcaactgcaatatgcaatacaatgaagaaagataaaaagttaaaagagctaagaaactgggtagtatttgttttacttgaartatgtttcccaggaatataaatgaaagtttataaacagttctcctttcaatcattactgtgtttatatgctggaaaattggggagatgggttgatagaacccttttaatcctcatcctccaagaaacctgaggccgagctgcaaagtggaattcgatggtagtcaaagggttgttttggatagaaacctgtgctagtggtgtccaccaagtcagcaattttggtgaaaaaaaaggtgtctaatacggcagcatctctgaagttatgctttcttgtttccagtcccaattttgttatttcctagcagtatggtctttggaagcttccataa

SEQ ID NO: 494501 - DNA, 607 bp, Homo sapiens
catgccccttctgaatgttgaggtttctcataaacatttccccagtgagccttctgggagatgaggatgactctgggcccattgcccttgctggggcagagcgccaaggccccatactcactttcttctcctttctcccgaatctggctctcttcctctttcctccttcctctcctactctgctgtcattccttccctttcttcagtggaaagaggacacgtttcacagtagacacacaggataactcaaccttctgagcctcagtttcctcctgcgtaaatggggtaataatgggrccttcatctcaggatgtaagggaaagtgcttagcactgtgttaggcacgcacagtggacatttaaaacatattggtcatgtctttccccctccaccctatccttttgccctaatcctggccactgccctgttttctttctattttcctgctccagccctgctcccatttccaccctgggcacttccaccccactgattgtgctgctgctgcctgggagggtagacgaagaagccaggcttcattcagaggagggctgaccaccgcagggcccgcctggccttggcacttccccatgagaccgcaccctag

SEQ ID NO: 494502 - DNA, 607 bp, Homo sapiens
catgccccttctgaatgttgaggtttctcataaacatttccccagtgagccttctgggagatgaggatgactctgggcccattgcccttgctggggcagagcgccaaggccccatactcactttcttctcctttctcccgaatctggctctcttcctctttcctccttcctctcctactctgctgtcattccttccctttcttcagtggaaagaggacacgtttcacagtagacacacaggataactcaaccttctgagcctcagtttcctcctgcgtaaatggggtaataatgggaccttcatctcaggatgtaagggaaagtgcttagcactgtgttaggcacgcacagtggacatttaaaacatattggtcatgtctttccccctccaccctatccttttgccctaatcctggccactgccctgttttctttctattttcctgctccagccctgctcccatttccaccctgggcacttccaccccactgaytgtgctgctgctgcctgggagggtagacgaagaagccaggcttcattcagaggagggctgaccaccgcagggcccgcctggccttggcacttccccatgagaccgcaccctag

SEQ ID NO: 494503 - DNA, 579 bp, Homo sapiens
tgcggccctgacaagctggcactgcgggcatttattcagtatagatttaatgacaaaggccttgaatcaacacgctttgtgggtaaataacattgctgaccccctacatagagagcagtcttgagcgcaaatgatcaaaggtcggttttaggacaacatgagtaaacgagctatttagataaactcctctacaytcccttgtatctacgccttaagcttttaggcttctgataagagaatctggctgccttcagccaaaatatccttcaaaacttgcaaaacccccagccttccaagaaggtttgcttctattcctataatttctcccaccactgtgactgatctcccacacttcctgtgcatggtgcattttcctagacataaaggaaaggatagataaagacaaataaggtataatagtccctattctgaaagggactttcaagcaaagtaatgaagggagatgaatgaagtaatgaagtgaacaaagtaacatgccaagtagagcagagtaaaagaatactctgcctgtagatttcaaactgggtcattagtattaaagcatgggccactatttaa

SEQ ID NO: 494504 - DNA, 590 bp, Homo sapiens
ctgcataccatcccctgtaactgctgttacttggtttttgacttttaaaaataccttaggtaaggccaagtgtgatggctcacacctgtaatctcagcactctggggagctgaagcaggaggattgttggagcccrggagtttaagaccagcctgggcaacatagcaagacctccatcactacaaaaaaattaaaaagaaaaaatagccaggtacagtggtacgcacctgtagccccagctacttgggaggctaaggtgggaagatcacttgagcccagtagtttgaggctatagtgagctatgattgcaccactgcatgccagcctgactgacagagcaggaccttgtctcaaaaataaaataattaattattttcaaaaagcaggatacaaaataacagcaaagtagaagggataagttctagagttctacaacactgtaggatgattatagttaacaataatatatagtttcaaatagctagaaggaggatattgatgttcccaacacaaagaaatgatgtttgggatgatggatatgctaattaccttgatctgatcacttatacatgatatgtatcaaaatatta

SEQ ID NO: 494505 - DNA, 624 bp, Homo sapiens
gtttttgcctagtttgtgacacaaattgagttagttttatgatttccctctcaccaatttaggattaaattttctgagaatactttaacacttatttaaacactttcaagattttgttgttgttgtcttcctttcccattctcctcatccttgtgtgtttatgcctttaccaaaaaagccctttaatattgtcttagctggggtttgggcaggcaacaaaggcagatgtgtgtttaatttaccatcttaattagaacacagcttgcacttttaacttctgtaccatactgccttaactttattgccttttttatgtgtaaggtaacccagattttggataatayaaatggttgtggatcctgtcttctaattacaaatttatttattcaatacgcttttattggctactctacatcagccactttgctgagcatttcaaatacaaagctcaggttccggtgttagaattcagactactacaaaggaaatttgagcacgttgttataagtgtatgataggaatagaaacaatactaaggaaccatggagaaaaaagggactaattttaattgagagtcaggaaagacttcatagaagtcataatgttctagctgtgtcttagaaa

SEQ ID NO: 494506 - DNA, 624 bp, Homo sapiens
gtttttgcctagtttgtgacacaaattgagttagttttatgatttccctctcaccaatttaggattaaattttctgagaatactttaacacttatttaaacactttcaagattttgttgttgttgtcttcctttcccattctcctcatccttgtgtgtttatgcctttaccaaaaaagccctttaatattgtcttagctggggtttgggcaggcaacaaaggcagatgtgtgtttaatttaccatcttaattagaacacagcttgcacttttaacttctgtaccatactgccttaactttattgccttttttatgtgtaaggtaacccagattttggataatacaaatggttgtggatcctgtcttctaattacaaatttatttattcaatacgcttttattggctactctacatcagccactttgctgagcatttcaaatacaaagctcaggttccggtgttagaattcagactactacaaaggaaatttgagcacrttgttataagtgtatgataggaatagaaacaatactaaggaaccatggagaaaaaagggactaattttaattgagagtcaggaaagacttcatagaagtcataatgttctagctgtgtcttagaaa

SEQ ID NO: 494507 - DNA, 308 bp, Homo sapiens
ccctccttcaaagagctcgcagtctggccaactcaaaaaaatacagtataaaaataagtgtggcagccaagtatcaggccctacaccgatagacagagatggtattttaacactcaacttaaaggccttaaaaatcaaaaagtacacttcttttcttctgatgactggtcaaaatgcaggtctaggacaggcgctcctctaaattttgcttcyttactggccgccacccctactcggatgcaatctgaacctcccgcctctctgcccggaaataaattcagttactttttttcttggtgtcgccagca

SEQ ID NO: 494508 - DNA, 603 bp, Homo sapiens
ctgcggagacaatcaagcaatggccttcatgtwaggaaaacactgaccagtgagtgccgcccagcaatggaaatgctgccttatggagaagacagctcacaattccagaaagtgctcaaacataatggttctcaaactggaacatgtattgaatcacctagagagctggagaaaacccagatgctttgggcccacctgcagagattcctgttcagtgagtgtggaggaggcccatgattttgcatctccaggtgacactggtgatgtggatgctgctagcccaggacctcactttgagagccatggctctaacgcaagctggggcaccccattcaggctggcagagaaggggtgcttgacatcaagtgggaggttgaaccctgcaaccttccaaaacaatttgactcggtaggtcctgctggcattcaggactgcctggtgcccagcctgagacgcctgaaaagtcagagtgacccaggtctcccgccaggggtgcccctgcgtggacacctcaggcaaatcactttcctacagttttactatttataccaatagaaggtaatgccatcatcatgcaatgccacaggcactaaggaaaaaggc

SEQ ID NO: 494509 - DNA, 548 bp, Homo sapiens
tgtgctcattttttcttgccaattcctgagtatccttctggtctagagccattttatagccaggcaagcagagcacctagaagaagcaataagaaatgaagaggacggccacagattgcccagaaaacaaggtcaaaggcatgacctcacctgcctcaacttgactaattacatctgcaatgactagtcccaagtaaggccacattctgaagtactgagcattaggacttcagtatataatatttaagaggatacaattcaacccatagcaactaaattgtatctaaatcagtcattccccaatcctggtttaargccaaagcagatgggagctgcaacctccctctcagatcaatttctcccagatcaagtcttttctgctctgctgtaggccacactgtgtgaccctgtctcttacagacctccctgatcccttcacctctccccaccgcccagacatgctgtctattgcttcctgctccccccaacccagggagggggcagaggaagtagggggtaggggaagccgctgtttgtccacttctctt

SEQ ID NO: 494510 - DNA, 625 bp, Homo sapiens
ctaacgaatattggagagagttgtgctcattttttcttgccaattcctgagtatccttctggtctagagccattttatagccaggcaagcagagcacctagaagaagcaataagaaatgaagaggacggccacagattgcccagaaaacaaggtcaaaggcatgacctcacctgcctcaacttgactaattacatctgcaatgactagtcccaagtaaggccacattctgaagtactgagcattaggacttcagtatataatatttaagaggatacaattcaacccatagcaactaaattgtatctaaatcagtcattccccaatcctggtttaaagccaaagcagatgggagctgcaacctccctctcagatcaatttctcccagatcaagtcttttctgctctgctgtaggccacactgtgtgaccctgtctcttacagacctccctgatcccttcacctctccccaccgcccagacatgctgtctattgcttcctgctccccccaacccagggagggggcagaggaagtagggggtaggggaagccrctgtttgtccacttctcttggctcacacagaatgtgggccctggtaaagagtgggtcaataaaacacctttcctt

SEQ ID NO: 494511 - DNA, 398 bp, Homo sapiens
cacaagaacttggccacaaaytgaagaggtgcaaccagcatccagacagaaaagactctccttgccccagagatcagtgagcatctgaaggctggatcaaagcccagacctagagagcagatgttaaatggagtctccagaaggcctctagccccaagagacccagcacagagcattaaaggtggatcagtacacgtggggatcattccagcaaataggctgtgtgaactcaacaagacttggcaaagaccttgcctgagctcgtcatctcagagggcctcacagcccatccaggctcagtcacccacaggagccaactgttcatgccagatttcagtgtaagggaagaaaaggagaaaagaaaatggctggaaccaaggagttctgaaataaaagga

SEQ ID NO: 494512 - DNA, 398 bp, Homo sapiens
cacaagaacttggccacaaattgaagaggtgcaaccagcatccagacagaaaagactctccttgccccagagatcagtgagcatctgaaggctggatcaaagcccagacctagagagcagatgttaaatggagtctccagaaggcctctagccccaagagacccagcacagagcattaaaggtggatcagtacacgtggggatcattccagcaaataggctgtgtgaactcaacaagacttggcaaagaccttgcctgagctsgtcatctcagagggcctcacagcccatccaggctcagtcacccacaggagccaactgttcatgccagatttcagtgtaagggaagaaaaggagaaaagaaaatggctggaaccaaggagttctgaaataaaagga

SEQ ID NO: 494513 - DNA, 529 bp, Homo sapiens
ggaagatgaaaacattctggagctggctggtggtgatcattgcttaacaatgtaatgtacttaatgccatagtattgtacactaaaaatggttaaaataaattttatgtcatgtatattttaccacaataaaaacaataaaggcttttgagtgactgcaggctcagagaataaggctgtactgatcaggtagcactgtctgtcgtgggtgcaggagagcttttggcacacataccagttactagtctcacatccctggcaacctctacaatcctgaaacagtagttctaaaccagagatttgcatyagaatcacttgggattctgaatcaataaatctggccagagacctgtccttgggtagttagaaacaccacccagttcactctgatacacacctgtattagggaccaccaattgatggagatggtttatgacccaccctttagccatcttgaattatttattgactttcataactccttcagaatccagtaccaagagaacatctgttcaactcttgggggtgtt

SEQ ID NO: 494514 - DNA, 544 bp, Homo sapiens
cttttctacaaatctgtaattacatgatcccagtatttaaaaatgtttcttgcagttacagctttttctgtattttatagactcattaataatttacatgatcatcagataattcggcttaatatgtcttattctattcagtatgctcttwaagttaactgtgaccgaaggaacatgtcaactaagaaagctaaacgtttcacattgataataaatctgagattaattgttcttttggctttcacttaaactccatggagtttaactgggaaaaaaatatgccaccactttagacccatgtgaaaggaagacagcctgatgctccagacctgtttggagcggccgtctcgtatttccccactcatgagccaccacacacagtcagcttctagcaggcctggtgtgggtgttgtttcccaggacactttttaagtaagtgtgtaagaacatagatgtgtccattcagaaaagttcttcaagtccttaatgtcctcagtgaaagtatgttagaatgtattgtgtttttatagcccacactccagct

SEQ ID NO: 494515 - DNA, 632 bp, Homo sapiens
cctggttctgttcctcgcttctctccttcttcagattcagttttcaaacattcaggacggaggatctgaagaaagccactgtggtttggttttaagtttgcagctatatcttcaaaccatggtggtggtgatgtgcgtcataaaattttaggcctttgtgtaaggaccctgcccaaaatctgttagcacagaaatcataaaactgcattcttcacctgtcaactaagtaaatgtaagatagaattataagtgggtgccctagcttcatggtgttcaaggtaaatagtaggcactatttaaaataatgccggccgggtgcggtggcttacacctgtaatcccagcattttgggaggccgaggtgggcggatcacgaggtcaggagatctagaccatcctggctaacacggtgaaacccygtctctactaaaaatacaaaaaattagccgggcatggtggtgggcgcctgtagtcccatctactcaggaggctgaggcaggagaatggcgtgaacctgagaggcagagcttgcagtgagctgagatcgcgccactgcacttcagcctgggcgacagagcgagactccatctcaaaaataataataaacaaataaataaataaataaaataatgc

SEQ ID NO: 494516 - DNA, 529 bp, Homo sapiens
tccagccggggcgacagagcaagactctgtctcaaaaaaaaaaaaaaaaaaaaattctcattttatgcaccagattggccaragtaggactatgttgacaaggatgggccagacattcctattcataacagtgtaacttagtacattagaggggtgaaatctggcaacatttttggtaatttatcttttgttaattttaccttgttgggttctagatatttttatagtcctaaaaatattcttgagctttgttctggcatgtggttaagttacctggaaacaatttgatctcttcagacctggctttgaagtgttgttaaactggactaaaacagcttttaatctagttcattttccctgcttctgagtcaagaaccttcagagtactgtaactaatgcctcgtgaattatgaagttttctgccccagcttttggacacaggcaccattgccagttgcatgtgagctctgagccctcctcactccttgggtagtttacccaatctcacgtgccgattggttttcacctg

SEQ ID NO: 494517 - DNA, 623 bp, Homo sapiens
atttaagattcatagcaaatgtttaaggtacccacaacctaaactttcatttccttttagtattgttaattaaaaatagccctctttttcttaaataaattagctaagggagacaggatgaaatatacatgctggtgatagtcattaggaattctcataagctcttatccttgagtcatttatgccctaatttttcacagcaaacaaatgctcattttccatatggctygccttattttccgtattttcatatactatgccttttctcttctatttgtcattttctattagtgttctttatttttctttatttgctgcttctccagctcattttccacaagcttctttttcctgtttgctcagtaaattcaagatcagtaacatttctcaccaactgagctttacaatcaccagtaaatcaaccaataaatgatttttaaagtatactgtgtacgtgtgatggaagaatgaacaagaccaggagataaagcatgagaaatatagaagctaccttcatgaatattctatggttgcaagatttttccatgcaaaacagttacatcaaatgtacataaaatgtcacataaaaatgcagaagatgtgtccttggttaaatttcctcc

SEQ ID NO: 494518 - DNA, 511 bp, Homo sapiens
atcagttaccttcttctcctttcctctctctgatctcttctgttatgacaataggaggcagaaagctagaggctgaagatgaatgtttgggattaggaaaaaggagtgcctccttgtgcctgtactgtaaggcaaggttatggttaaatggaaagttccacttctaaagtttaagcccatcttaaagggatacttgawttttttttttttccagcttgtagttttactggaaaacacacagagaggaaggaaggctgtaacttgggtcaagaatattttattccaggatctcttcactaaaataccatctaatagctacctcttaccccacaacaacccatagacacattcaagtcttacagtttatataaataaatgaaagtagtactggttacactgataagattcaaatttgacaaagcaacagataaaggaggtattatacttttagcaggtttgaaagttcaacaaataaataataaattctgcatatagattgttgcattggatt

SEQ ID NO: 494519 - DNA, 486 bp, Homo sapiens
cctcagcctcccaagtagctagaaccacaggtacgccccaccatgcctggataatttttatttatttacttttagtaaaacagggatcttactttgtttcctaggcttgtctcaagatcctggctgcaaatgatcctcccagcccagtctttccaaagtgcttggattataggcattagccactgtgcctggccatcacacatattagacatggcrctaaggattctacctagtgcagtcagggaaagaaaaagagagaaaaggagggaggaagtaagggagaaatgaagtaaacaagggaggaaaagaaggaaggaacgggaggaaataagggagggaggatggaacaaaagggaggtaggaaggcagaaaggagagagagaagcaaggagaacgagaggaagggagagagaggggagagaagaaaaaagaaaggaacgaaaaaaactaaagagacattcagattggaaaagtgaaataaaacta

SEQ ID NO: 494520 - DNA, 493 bp, Homo sapiens
gataggacaatattttaaccgaaatgacatatgacaactcaaaactatgtatgtggccaactgggagctagcctcttagaatgatccaaaaactgtttaatttggttagcacttttgataaataaatactgaatttgaatgcccttagactatagacatgcttactctgatttgcaaaagccaactacctcttctagattctattattcgctactttatttccctgtctctgaactccccaatacacctkgtaatgtttacttttagatgtcaacttgactggattactgaatacacagaaacctggtaaagcattattttggggtgtgtctgtgagggtgtttacagaagcgattagcatgtgagtgtgaatggactaggtgaggaagaccctccctcaacgtgggtgggcaccatccaatttgccagggctggagaacaaaaacagaggacagacaaatatgtccatctatttcctagagctgggatgcat

SEQ ID NO: 494521 - DNA, 616 bp, Homo sapiens
atttctgatcaattttgcttccctaaaactttgattttttttttgccatcattatgcaaatagtcctactcaatagaccagcttcatttaatgctaaaattaggaacacattaatttgaggtattttatagtaaagcttaatggcatttttaattttgaaagaattttaaggatttttaaccattgctcccatctcgccatatgcacactcctgaagtatttttgaagctcttttgcttttctctgaactataaggttgtactagctgttatggaggcctacaatccaaatctaaatgatggcagttttcatagcctactttgttttatttgaaatggaaagttactgatttttatttcaaaagaagtagtctgcaaagacaggaaaggtgaagccagtccagtcaacaaatctgtaaggaagatggtgctasaggcttagagagactgtttcaatctccaaggcaggaaaaataatgaatatataataatcttcttttagtgaaaccagagttcagtcatttttagcatcttttaatgagaacctgattttttaatgatttttaaagatttttccttcaaaaaatctaggtaaaggaaagcagttaatagtaaat

SEQ ID NO: 494522 - DNA, 675 bp, Homo sapiens
cacggccttggctggttaactctatttgcttagtcattcgttcatttacacatgtatttacccattaactaataggccagtcaaatgaggttacttctggagtgctgtagttctgtttgcatatcaggatctacaataaaagcattgccttaggtcctcaggtagaggttgatcaggggcagaaaggcttttcctgctgactccaccagcagcattctggtaagatgaaaaatggagaatgattagtgtgggccacccttgagagactatggttagtcataattgagtagacacagcaataccttcacgagactatccatcaagaaataagttttttaaactgtagttctagtaagaaagacaaacctatttaktttgtttaagtaagtgtgcttggtgccagggattcgaaataagatagggcctcatctctttggccttaattctaggctaaacattactcagcttgatggtaagtgtaaaactgaatacaactactacagcaatgacccactggaaatgtgtagcactttacagtttatagaaatccttttatatgcttgttctcgtttgatccttgcattattctttagttaattgaacaagtgttatttccattttctaaatgaacaaactaaaacgaagacacctaaatcacttgcctaagattacaca

SEQ ID NO: 494523 - DNA, 565 bp, Homo sapiens
actggcaggtctggggttcaaatccagttgggtctaagtcctgaacctgacctcttcactatctcacaggtggttgtccatgtttgaatcaaagtctgaaggatggcatttgttttagatttctgaagcttttttttttttwaatttatatgggtacatagtaggtatatatatttatgggatatatgatatattttgatacaggcatgcaatattaaataagcacatcatggaggataaggtatccatcccctcaagcatttctcatttgtattacaaacaatctagttacactctctaagttatttttcaatagtcaccctattctgctgtcgaatagtaggtctcattcattccttctatttttttgtaccctttgactatcctcaccttctccccaggcccctactacccttccctgcctctggtaactatccttctactctctatgcccatgagttcaattgtcatgatttttagaccccataaataagtggagaacatgcgatatttgtatttctgtgcctggcttatttcacttaaaattaacgatctccagttccaa

SEQ ID NO: 494524 - DNA, 565 bp, Homo sapiens
actggcaggtctggggttcaaatccagttgggtctaagtcctgaacctgacctcttcactatctcacaggtggttgtccatgtttgaatcaaagtctgaaggatggcatttgttttagatttctgaagcttttttttttttaaatttatatgggtacatagtaggtatatatatttatgggatatatgatatattttgatacaggcatgcaatattaaataagcacatcatggaggataaggtatccatcccctcaagcatttctcatttgtattacaaacaatctagttacactctctaagttatttttcaatagtcaccctattctgctrtcgaatagtaggtctcattcattccttctatttttttgtaccctttgactatcctcaccttctccccaggcccctactacccttccctgcctctggtaactatccttctactctctatgcccatgagttcaattgtcatgatttttagaccccataaataagtggagaacatgcgatatttgtatttctgtgcctggcttatttcacttaaaattaacgatctccagttccaa

SEQ ID NO: 494525 - DNA, 597 bp, Homo sapiens
agaaaaaaaagacaatcttcctaggtgattttaatatgcaacatttctacctccattaccaacaaaggactaatgttaatgaatgttaccctctgatgctataatctaatttggttttatggtatccataaccaaaagaaagatatgtatatcttcaaactgatttcaaagatgcatctttatcaaagttaagtattaaatgagtttgtagctaagagatagtatataaaattatggtttttatgtttatctgtggtttgtcacaaatacaaaaacactttacaatacatgtgacatataaaaaaatttaggctacaatctcagatataccagacatataactcttttattttgtaataattaaacaatatgtgtttttgaggtatcattatgctatggcaatattaaatttcagttgattaaggtctaagtttacttccttgtagttgcagtgaagatcctttggagtgatataatgacatagctttcattagttaatgggtatcygtaatgattggtcttcaggtatcaaaactaacattctttggatatacatcattttatcttgttctcagttacgaatccattcaggaaact

SEQ ID NO: 494526 - DNA, 320 bp, Homo sapiens
tgaaagtcatcctctcaagacaacgatgatttggagaagcgccatatcatagcaaagatctttgattctcctgactgttactgactttcagatcagcagcattcatggagcaattaatagaattgtggtttatatgacaacagggaaagcatttgaaagatgggaaaggattatcatttcaggttcttgataaaggcaaaaaaatctaaaaagataaaagtaatttttcaatattaaatggaaaactggtttgctgttatttcaatgtccatttttttaaaaaaaatctgctmttaatatgaaataaaatattaaaatgc

SEQ ID NO: 494527 - DNA, 482 bp, Homo sapiens
ctgtcgaccgtgtagcatataatcacagtgtatgctccagttctgaagcagtcgcaacttacctgaaaagtgtagctttctgacatttttcaagataaaagaataacaagcaaaaatgaacatgaaaatataaattcatttacttttaagaatactgtatgtttttgtatgtgactaaattaacatactcagaagtatttttttaaaactcccttccccagtatgtattttttaatgtgtttggaaaatataacacatggtaataattttagaagtttggccactttagccccttacttgacagtctgtctcaggcagtttgtggaatgccttctttcacagttcctccatgactttctccttgagggacccagtcatacattargcaaaggtggagaaggaggttccttctacctttagttatttgccacattgattaactttggtgccacaaatccctgtcattaggtaatcagtaacaa

SEQ ID NO: 494528 - DNA, 610 bp, Homo sapiens
gtcctagttctggcaatgttctcgaaattcttcaagattataaatcttcactatgttcaatttaagttgttcttgggaaattttggataacacttatcaaatataacctctaagaaccagagatgaattaatctacccaggcttacttgtccccagaaattttataaaatgcattgctcctagcgtacataatactaaatatattctcgatgtctatgtggtgccagaattgtggacagtagagaggagctgtaaaagatctctgaacaggaaattccaaggtgtcaacgggaaaaatttcagttgggaaatcataacatcaacatagttgaatgtagtgaaaatgccacctattttattttagtcccaaatactaagtaataaagcacagagctggacacacaatagaatctttaaagagtatgcaataacttgttttaatttggacaatgatatttcagctaaaataaatattgatgggaaggttggcatcagttaagctgtgrtcataatataaaaatagaattgattacaaataaaaaaaatacattcaatgtcatcaagtccagtcagtgaaaaacctaaacaaaataagagagccctttatgct

SEQ ID NO: 494529 - DNA, 511 bp, Homo sapiens
gaagaggttgatagatgcccttggggtctgaaacgtctttgcaagcatcctgtagctgactagcaggctcggatgagtgcttaagtgagagactaggttcttcatcagatggatgatgaaccmttctggggcattttctctgaggaagcatggtgcagctccaaacctaggtaggagagatcacaagatcagcactcaggcatcatcagaagtgtttagaagagaaggagtacattagtccactagggctgccataacatttcatgagcccaaaggcttaaacaacaggtgtttatttctcacagctctggagtctgggaatccaagatgaatttctcggcaggtttgctttccccaaggcctctcttctcggcttgcaggtggctgccttcttctgtgtcctttcttctatacctgtacatccctggtgtctctctttctttttatgagaacaccagtcttattggattaggaccccactgttatgagctcattaacatcagttactttt

SEQ ID NO: 494530 - DNA, 511 bp, Homo sapiens
gaagaggttgatagatgcccttggggtctgaaacgtctttgcaagcatcctgtagctgactagcaggctcggatgagtgcttaagtgagagactaggttcttcatcagatggatgatgaacccttctggggcattttctctgaggaagcatggtgcagctccaaacctaggtaggagagatcacaagatcagcactcaggcatcatcagaagtgtttagaagagaaggagtacattagtccactagggctgccataacatttcatgagcccaaaggcttaaacaacaggtgtttatttctcacagctctggagtctgggaatccaagatgaatttctcggcaggtttgctttccccaaggcctctcttctcggcttgcaggtggctgccttcttctgtgtcctttcttctatacctgtacatccctggtgtctctctttctttttatgagaacaccagtcttaytggattaggaccccactgttatgagctcattaacatcagttactttt

SEQ ID NO: 494531 - DNA, 616 bp, Homo sapiens
tggttttcaagaggaaatagaatcagaggaaytgtaatagataaatttaattttaaaaatagaatcacacaagataaatttatattgaaatagatgtatttgacataaatagtaggaatgtgaccggaaaattcctactaaaattatctagaaattagaaccctgtcaatgttctatacaatattacatactatggaaattatttatagccccacaagtttatttcacatattgtatttttcagttctcctttttttgaattttctatttgtttgtttttatgaactttttttctttacatgcataagcatacttataatagctgctttaatatccttgcctgataattccaacatctggaatatctcaacatcactttccatttattacctttccttgaggttgcatcacattttcctgtcttgtcttgtaattttggatcataacctggattatatttttgaattacaggtgtggagattctagattctgttatatgcctgtgaatagtcttaactttttttattagcaggaaatttacttggctcaactcaatttccaagcattgactttcttgcaatgacaagtagttaaaatctctattcaggttttattt

SEQ ID NO: 494532 - DNA, 627 bp, Homo sapiens
gcaaacaaaatagtataattgtatttactcacatcccaaataatagcaatattgcaccccctttatatttttagcttgaatgagactatatgatggttcattatggtttagtgcctaaaacaaaaaatcaccataagtattgaattaatgtgtgcatgatgtcagaatttggaaatctgtcttttcatgcattttttaaagtgttcccagaaatcaagaaatagcaacaatgctaattggcttgtgatcayttaaatgttttcctaagggcaaggaaaaaataagcctttggaatttccctctaatccaaaaaagcaggtttgtgaaaatccagaagagaaaaaaaaattgtacttttcatactgcttaggaaactttaatcttattaacttttgtcaaggatattgacagtactggggaagcaaaaggtttactaggttaagtctagaaccagctatcttataaatatagcattttaacataatatattaacatctatagggctgtctgcttacgtctacctcccatgtagactgagtgtcctatccttggtgtgtagggaatcaaaagtattactggatgaatacataaatacagatgaaggtctctcgcttttcaattgtttca

SEQ ID NO: 494533 - DNA, 626 bp, Homo sapiens
caaacaaaatagtataattgtatttactcacatcccaaataatagcaatattgcaccccctttatatttttagcttgaatgagactatatgatggttcattatggtttagtgcctaaaacaaaaaatcaccataagtattgaattaatgtgtgcatgatgtcagaatttggaaatctgtcttttcatgcattttttaaagtgttcccagaaatcaagaaatagcaacaatgctaattggcttgtgatcacttaaatgttttcctaagggcaaggaaaaaataagcctttggaatttccctctaatccaaaaaagcaggtttgygaaaatccagaagagaaaaaaaaattgtacttttcatactgcttaggaaactttaatcttattaacttttgtcaaggatattgacagtactggggaagcaaaaggtttactaggttaagtctagaaccagctatcttataaatatagcattttaacataatatattaacatctatagggctgtctgcttacgtctacctcccatgtagactgagtgtcctatccttggtgtgtagggaatcaaaagtattactggatgaatacataaatacagatgaaggtctctcgcttttcaattgtttca

SEQ ID NO: 494534 - DNA, 627 bp, Homo sapiens
gcaaacaaaatagtataattgtatttactcacatcccaaataatagcaatattgcaccccctttatatttttagcttgaatgagactatatgatggttcattatggtttagtgcctaaaacaaaaaatcaccataagtattgaattaatgtgtgcatgatgtcagaatttggaaatctgtcttttcatgcattttttaaagtgttcccagaaatcaagaaatagcaacaatgctaattggcttgtgatcacttaaatgttttcctaagggcaaggaaaaaataagcctttggaatttccctctaatccaaaaaagcaggtttgtgaaaatccagaagagaaaaaaaaattgtacttttcatactgcttaggaaactttaatcttattaacttttgtcaaggatattgacagtactggggaagcaaaaggtttactaggttaagtctagaaccagctatcttataaatatagcattttaacataatatattaacatctatagggctgtctgcttacgtctacctcccatgtagactgagtgtcytatccttggtgtgtagggaatcaaaagtattactggatgaatacataaatacagatgaaggtctctcgcttttcaattgtttca

SEQ ID NO: 494535 - DNA, 472 bp, Homo sapiens
taagaagtggaccactctcctctagcatgccacagcctggggtgtatgctccagctctcctccatctccatgctagggtgttggtgctgagtttgcgggggtgatcttgtgtctatatgtgcacaatcttgtatttgaccaaatttaaacctaaaacttaacaaaagtcataaaagtggctgactgtatctggaagtgacacggtgaaattctttacatctcacagaatggtgcttcaagataaaaactgagttacagaaaacaattttttttgcatayctgagtgcacttttaacagaaattttaaccatagaaagcaccattggcttctttcaaactggtttttctcctcctcatcagaaaaattatctgaaactttgaaatagaagacattacaggatgttctctttcagtgtagtactgagtttgcaactttgactttccattaactggttaacttgtagatttttgt

SEQ ID NO: 494536 - DNA, 615 bp, Homo sapiens
ctattctccccccattccccagttgtttcagaggtacctttatggaaacatggttttgcaaggactgctctgaatggtagatgaaaaaattgaaaaacaaagaactgtatagtctgcctagtcattaaaatatcctcccttctcatacttagttctgtttattcaatttttgctgtcatgcatgtaatttttacctcaatatatgatgaaataatactgaaaaagtgcttcagaaagtaaaaatctttaaagtataaggaatggtaattaccattagttgtgcattacacgttactctgaataataaattgcttgtttcaaggtcacttttaaaatattttattatggaagttttcaattttatggaaaagtagggaggattttcaaattagctcaataattattacccagcttcaaaaaagttagcaaaaatattagtacatggttaatcttgtttcatctatacccaagtcactctgctctatgggttmtttttaagcaaatcttagataccatgtgttttcttctttttaggataatcatatttgagacagagatttaaatataattataattcattaacattcaaattattttccctcacagaagagtggt

SEQ ID NO: 494537 - DNA, 616 bp, Homo sapiens
agtatttgttccaggcactatgccaggttctataacaagataaataggaaccagtccctgtctttatgaccttatggtttctaaataggaaacagatattgtaataaataattgygatatagtaagaaaaatgcttcaaaagagaatgcagtgagctccatttcaggtgtagtggtcaggcacaggcttaccaatgtgaacacaatgacactggatactgacagataagcagaagtttctcattccagcaagaataggatggtatttctgagagaaggaagggcatagacaaacctcagaggttaaaaacagcaaaatgtgttctgagggggtgtagcgaacatttggaaaagagtgggaggagaactgctccaggtgtgcctagattggtagccaggaccaaatcatagagcccttatattccacacaatgggaacaaagattttaaacagtgagggataacaccagatttctaggttgtcagagccatgcttgcagccctgtggagggtgcttggacagagcaagattagaagcatcattctggctcattggctgcttatgatcagattttagggatgcaagtttatacaagtggcataaagttgacctcaatg

SEQ ID NO: 494538 - DNA, 534 bp, Homo sapiens
tccacctgtaactaaagtgaggcctctgccatcaggcccatcattccatctagataggtatggcctcctgccaccaccgggacacacatctgtgatacaaccagagacwacaaaggtaccctgggctggaggcagggcaggggtaattgcagtatcagaacctacttcccaggattcttgacaaagttctccccaacaggtgcttctcctctctggagtagtgtaatgatgaaagacacgtattagaagttgaactaccaaggtttgaatcccagctctgcccaccaactatgtaatcatgagaaagtcacttaacctctctgaatctcagcttcctcctctgcaaaagggaagaataaagctcctatatagtcccataaaattggtgtaaggattaaaagacatgattggtgtgaagagttagaacagtgagtcaacatgaagtcatgttccatattatttttcctttagggtcctccgtcttcccctttccctggagacccatcctatctgccctagtggggcagtgccttg

SEQ ID NO: 494539 - DNA, 534 bp, Homo sapiens
tccacctgtaactaaagtgaggcctctgccatcaggcccatcattccatctagataggtatggcctcctgccaccaccgggacacacatctgtgatacaaccagagacaacaaaggtaccctgggctggaggcagggcaggggtaattgcagtatcagaacctacttcccaggattcttgacaaagttctccccaacaggtgcttctcctctctggagtagtgtaatgatgaaagacaygtattagaagttgaactaccaaggtttgaatcccagctctgcccaccaactatgtaatcatgagaaagtcacttaacctctctgaatctcagcttcctcctctgcaaaagggaagaataaagctcctatatagtcccataaaattggtgtaaggattaaaagacatgattggtgtgaagagttagaacagtgagtcaacatgaagtcatgttccatattatttttcctttagggtcctccgtcttcccctttccctggagacccatcctatctgccctagtggggcagtgccttg

SEQ ID NO: 494540 - DNA, 578 bp, Homo sapiens
cagagacttccctagggccaccgcctgggatgtgggacggaatgctcaggccagcraggagtgaggtcaccaccttctggataaacacagcagggatgtgggcgcgggcgcgggagactgaggtcccagctactcaggaagcagcggcgggaggattgctgagcctgggggtccaggccagcctgggcgacaatgtaacaccccctcccgcagggctcccttcctcgtcactctctcttttttttcctttttttttaaacgttttaaaataagagtttgattgtgtgagatagggatctaacagtattcttttccatgtggatatccagttagttgcctcagcacatttttggaagagatttattcctttatttatttacttatttcttttgttttgagacagagtatttctctgtcgcccaggctagagtgccgtgatgggatctcggctcactgcagcctctgcctcctgggtttcagcgattcccctgcctcagcctccagagtatctgcaattacaggcgcgtgccaccatgcccggctaatttttgtatttttgtagacgagtttcaccatgt

SEQ ID NO: 494541 - DNA, 191 bp, Homo sapiens
tctagagatcaatgaagaaacataaacattgtacaaacatgtccaattcacatatttctgataagattagggggttttgtgttacttatctaagcaaagcaaagcttggatacacaggagtccccactcatgagaagaaaggggctgacagytgggaaacctgcactgatcattgcagagatgttcaccac

SEQ ID NO: 494542 - DNA, 294 bp, Homo sapiens
gtcatgacatacatatatgtcaacaaaataatgaaacctacagagactcacaaaaaactagatgttaatacaaagggttgtcattttccccagattttcaaactgtaaaagttgttcaaamtatatacatttgtgtgtgtgtatatgtatggagatgtatatgtgtgtgtatattgtatatgtgagtgtgtatataaagtttttacaaatataaaaagtagcaagttttgttgaactgaagagggatctcatcttgctggaaaaggacacattggcagttgggggcagggtgga

SEQ ID NO: 494543 - DNA, 535 bp, Homo sapiens [sequence omitted]

SEQ ID NO: 494544 - DNA, 187 bp, Homo sapiens
gagatcaatgaagaaacataaacattgtacaaacatgtccaattcacatatttctgataagattagggggttttgtgttacttatctaagcaaagcaaagcttggatacacaggagtcyccactcatgagaagaaagcggctgacagttgggaaacctgcactgatcattgcagagatgttcaccac

SEQ ID NO: 494545 - DNA, 187 bp, Homo sapiens
gagatcaatgaagaaacataaacattgtacaaacatgtccaattcacatatttctgataagattagggggttttgtgttacttatctaagcaaagcaaagcttggatacacaggagtctccactcatgagaagaaagsggctgacagttgggaaacctgcactgatcattgcagagatgttcaccac

SEQ ID NO: 494546 - DNA, 603 bp, Homo sapiens
atccatactatttagatacagaacccacatggctgtgaattccccaaatctcaagcacattgtagaatagtcacagaatctgagcaayacctgactatctaaatggcccaatttctctcttaagaagcttttaggagaaataaggtcacataaaaatcaaggtagcaagcagtattattcctccaggcatctttgagtcagaaagagcctgaattttaaaaataaaaactgctgtcttgcttaatatattctctcttctaataagccaccaagcagccattgtactctcccaagccagtggacatatatcttgctaagacacatgtgtccacagtcaggatattgtctaggaaacctgagcctgcagcctgcgcaggagccgccatcactgcattaattccttccagaagaatagaaacccaggctcaaggcagcagcacagggtccccgaaggacacattgccatttattttcggtgtgattattttccattacacacttgcaaggggtgtttttgaatgctatcttactttcttttcatgtcccttcatttactgcacccctagagacagtcaaaatctccaggccacactctgcaataaa

SEQ ID NO: 494547 - DNA, 599 bp, Homo sapiens
ctgcagagagggactaccatctctaccaagagctggacactaaataattaggtggttataactttcagctctcaacacacaaagactagaatgcagaaattaaagaagaaaaaaraagaaatttggggaccataatttattctgaattcacaaatgcaaaagtctgtgttcacaaagaaagtgctcattacttaattcttaagtacctcttacacattctgtgtagaaggactaatgtgtgcaaggatcctgatataggaatagaggaggggcatagcaaagccactgaacagaatggatattagccaaagcgcaaattggggtagaagttcagagggagttagagtcagatataagaacaaaatatgcaaggtcttataggttatattatgcattctattttctctctttaagaactagagaaaaccacagattgtttttataacttttataaaacatcaatttagtttgcatacacatatatacagctataatgcacataatattaatttgccattgaaggattataggtagtttttatggacacaatgtcataaaaatgtcacccttggtggcgtttgttgaatacattgaaggta

SEQ ID NO: 494548 - DNA, 534 bp, Homo sapiens
tatgatcctttgagagacatcatttcctttcatttcttacatttgtcttttaactggttctcatagtttaaatatgctacaatttttggtttagttttakcttcagcttttcattatcataaagttgaaatgagcatatatttgcataaaacatttctatatttataatttctctggctagatttacagagtaaacccctaaagccaggtttacaaatatgttaggatagttaatattattataaactccatgttatttattaatgggagagggatctataattggtaaaatttagagcagagaaaatgagttgttgttgttttccttgcccttgcaaagagttttagaacctcagccttcactgttggggaggagtgactggctgactagttataattatgtaaatattgtcagcaatcagggttgttttcccttctttgcccagcaagccacttgcaatatattagcaaatacttcccactgaaacgatgttaaaatcctgtgccagaactacatctttagggaatgcaaca

SEQ ID NO: 494549 - DNA, 582 bp, Homo sapiens
aatttagaataatcttgttcaaatcttgtaaacttcatttcaatactatacaaaagctttatagcaatatggtcctttcctttcctcttcttatacattataattgttcatttacgtgctaatatattataatcccatccgtattagtcgtagctctgtagataaagagaattaataggagatgtgtatcttctactgaatatataaagaggtttcttataagctattggytcatgcaattgtagaagttgagaagtcccagaatctgccttctgtgagctggagatccaggaaagctgggttcaaagcctgagaaccagagagaagattatacagattctagcctagatttgaaggcctgagaatcaggagttctcagagcaggagaagatcactgtcatacctcaaacagtctggccattagtttaacattcctccaccttttcattctatttgagccctgaagaaatgggatgaggcccaccacaactggagaggtccatctactttactctgtccaccaattcaaatgttagtgtcctctagatgcaccctcatagacacactcagagataatgttta

SEQ ID NO: 494550 - DNA, 611 bp, Homo sapiens
agtatttattttcctaacgtatatggtgagtttatgcaatctggttgaaaaatatggtgtaatacatgagaatatatttaaggcacacaggtaaacagtggtagttcactccaatgccatkgttactatgcaagaaacgttatagactgctcaaatttaaaagaataaaaaaagaaagtacaaataacagatttaggcaaaaagtggcacagaacataaacaatatttcctgcttgtcgattgaagggcatacttgacaatattttcgttatagacactaagatccaaacatattgtagtggtgacctatttgggatcctcaaggaacattaaacatgagagcaaaataaatacactttcagaaaaataaaagctgagataatttatacttttaatttccattttttggttcagccttttggggattttatatttaaagtatgcattttaggtaacatattattcagggttgctttcatcccgaatactgaattattcttcttatgtgaagcatataaaatagtcaaacgtacagaacttacttctttcctgacttactttacattagttaaatattttttagtattcattttgatttattctataggcac

SEQ ID NO: 494551 - DNA, 611 bp, Homo sapiens
agtatttattttcctaacgtatatggtgagtttatgcaatctggttgaaaaatatggtgtaatacatgagaatatatttaaggcacacaggtaaacagtggtagttcactccaatgccatggttactatgcaagaaacgttatagactgctcaaatttaaaagaataaaaaaagaaagtacaaataacagatttaggcaaaaagtggcacagaacataaacaatatttcctgcttgtcgattgaagggcatacttgacaatattttcgttatagacactaagatccaaacatattgtagtggtgacctatttgggatcctcaaggaacattaaacatgagagcaaaataaatacactttcagaaaaataaaagctgagataatttatacttttaatttccattttttggttcagccttttkgggattttatatttaaagtatgcattttaggtaacatattattcagggttgctttcatcccgaatactgaattattcttcttatgtgaagcatataaaatagtcaaacgtacagaacttacttctttcctgacttactttacattagttaaatattttttagtattcattttgatttattctataggcac

SEQ ID NO: 494552 - DNA, 474 bp, Homo sapiens
attaaatgacaatatctagatcaaatttggcagtacattcaggtagaccgagttcaatttaatccttatctgttaaacagctcctatgagtacggctctgcattaagtgctgtgaggcatattaaaattggtatttgccattgttcccatcaagcatcaagtgggtttgaaaagacaagaacatgcaatacctaaatacaaattggagagaaacaggagaattaaagatcaaggtctatggtaacttagaggagagagatatctggaaagattttggctggctttgacaaaaagcactgggataggcagagatggrtaggggtagcttctcaggatgaggaaatagcaagagcaaagcatggaggtaggaaatcttgaggacaagagaaatcagggttggttacagaaacagagtgatgtgcaaaggaacatgggggatgagtcgaggaaaaagtgaagggggaaattatggtt

SEQ ID NO: 494553 - DNA, 621 bp, Homo sapiens
aatcccttttttatatagctggcaaaaatataacaggaaattgattaattaaagtttggtagcacattggaatttactcaaaaacagcttctaagtaagagtagtccatggtcaatgggtacagtaactgtacttgccttgttacggccagtttgaatgtcaccatgtaaaacccaggaaaggctcacaaaggcaataggaacaaaacaaccttggctgttgtcattctggttactcgttcaatcaaaggtaaccaataattgaatctataagtgattgccaaaatatgcagcttttgatgatgctgttatttaaagaaaggtatcaaaataattaattctgtgatcagagaaatgagcacaaccaatggatctagaattkgatgttcaacctgttgaaatgccagaaacaacttcataaggggtttttacttattttatttcttatttatacttttttttgtaacttttattttaagttccagggtacatgtgcaggatgcgcaggtttgttacagaggtaaatgtgcgtcatggtggtttgctgcacatatcatcccatcacttaggtattaagtccagcgtccattaaccattcttcctgatgctccccctcccccaa

SEQ ID NO: 494554 - DNA, 412 bp, Homo sapiens
gtagtattttcttgggcacctgttagagctccagacaggtaggtgggattaggttcatcgtcagggaacagagattacaaactggggaggggcacatggcagtgaaaataagctttgtcctctgtattttgatagagaggcagaagagcctttgatgaagtggttgttacctgaagatttaaaaaggtgcaagmagcctctgttacttaaaactcttcattagctttccttgccattagaatatgttccaagtttcttaccatggctttccagaccctggatggtcagactcctatttcctcttgtgtctctctcttgtttcttatgcttcaggaacattagatgttggatacgtcaccagtgattccatgctctttcctgctgcaggctcttggtacatcctgtgcctgca

SEQ ID NO: 494555 - DNA, 518 bp, Homo sapiens
ctgtggaaagaatggtagagaatgtagtattttcttgggcacctgttagagctccagacaggtaggtgggattaggttcatcgtcagggaacagagattacaaactggggaggggcacatggcagtgaaaataagctttgtcctctgtattttgatagagaggcagaagagcctttgatgaagtggttgttacctgaagatttaaaaaggtgcaagcagcctctgttacttaaaactcttcattagctttccttgccattagaatatgttccaagtttcttaccatggctttccagaccctggatggtcagactcctatttcctcttgtgtctctctcttgtttcttatgcttcaggaacattagatgttggatacgtcaccagtgattccatgctctttcctgctgcaggctcttkgtacatcctgtgcctgcaatctgaaatctcttcctttctttttacatgactgtcttcttatcatcttttaggcctcagttaaacatcacaagctctgggag

SEQ ID NO: 494556 - DNA, 579 bp, Homo sapiens
tgggggtgcttgctggcctggccactcaccgagctgtgagcagcaggggaagctccacccagggccctagtgagtatgggtgtggggggaggggcacgtgggtggccckgatcagtgtcagggtgagctccccccatcccaccttcctgttacctgtggagggtgtccagtttcttgccgttttgaagcaagaattggaaaaaaaaaaaaaaaccgcacaaacagagcaaggaaagaatgaagcaacaaaagcagagatttactgaaaatgaaagtatactccacgtgatgagagaaagaatgaagcaacaaaagcaaagatttattgaaaacaaaaatacacactacatggtcgggcacggtggctcacgcctgtaatcccagtacattgggaggttgaggagggcagatcacttgagatcaggagttagagaccagcctggccaacatggtgaaaccccatgtctactaaaagtacaaaaactagccgggcgtggtggcacacgcctgtaatcccagctacttgggagactgaggcacgagaatcgcttgaacccagtctgcactccagcctgggcg

SEQ ID NO: 494557 - DNA, 580 bp, Homo sapiens
ctgggggtgcttgctggcctggccactcaccgagctgtgagcagcaggggaagctccacccagggccctagtgagtatgggtgtggggggaggggcacgtgggtggccctgrtcagtgtcagggtgagctccccccatcccaccttcctgttacctgtggagggtgtccagtttcttgccgttttgaagcaagaattggaaaaaaaaaaaaaaaccgcacaaacagagcaaggaaagaatgaagcaacaaaagcagagatttactgaaaatgaaagtatactccacgtgatgagagaaagaatgaagcaacaaaagcaaagatttattgaaaacaaaaatacacactacatggtcgggcacggtggctcacgcctgtaatcccagtacattgggaggttgaggagggcagatcacttgagatcaggagttagagaccagcctggccaacatggtgaaaccccatgtctactaaaagtacaaaaactagccgggcgtggtggcacacgcctgtaatcccagctacttgggagactgaggcacgagaatcgcttgaacccagtctgcactccagcctgggcg

SEQ ID NO: 494558 - DNA, 580 bp, Homo sapiens
ctgggggtgcttgctggcctggccactcaccgagctgtgagcagcaggggaagctccacccagggccctagtgagtatgggtgtggggggaggggcacgtgggtggccctgatcagtgtcagggtgrgctccccccatcccaccttcctgttacctgtggagggtgtccagtttcttgccgttttgaagcaagaattggaaaaaaaaaaaaaaaccgcacaaacagagcaaggaaagaatgaagcaacaaaagcagagatttactgaaaatgaaagtatactccacgtgatgagagaaagaatgaagcaacaaaagcaaagatttattgaaaacaaaaatacacactacatggtcgggcacggtggctcacgcctgtaatcccagtacattgggaggttgaggagggcagatcacttgagatcaggagttagagaccagcctggccaacatggtgaaaccccatgtctactaaaagtacaaaaactagccgggcgtggtggcacacgcctgtaatcccagctacttgggagactgaggcacgagaatcgcttgaacccagtctgcactccagcctgggcg

SEQ ID NO: 494559 - DNA, 597 bp, Homo sapiens
agccactgctgagagagggatggactccatctgtgtgtatcccagaggaggggcggtcctggaccgtcatctgagaggaagtgctttgcctccagttacacaaacacctccggtccttaaagggacgataggtagcctctgcctccccactgggggcccttctctgtgccaacccatccaacccagagggctgatggaagacgtgtgctctgcaggggctctctgtggcttcttgcttcactgggtggatgggtatcaagatggtgacttgaggccgggagcmgtggctcatgcctgtaatcccagcactttgggaggccgaggcgggaggatcacttgaggccaggagttcgagaccagcctggccaacgtggtaaaaccccatctctactaaaaatacaaaaattagctgggcatggtggcgggcgcctgtattcccagcgacttgggaggctgaggcaggagaatcacttgaacccaggaggcggaggttgccgtgagcctagatcgtgccattgtactctagcctgggtgacagagcgagacttcatctcccgcaaaaaaaggtggtgacttgatttcacagagaactccagc

SEQ ID NO: 494560 - DNA, 603 bp, Homo sapiens
atacctcgcggacatgtcttacggcrccccatgaaagcatcaccattaatctgaccagtcaccgcagcattagtatcttcagggcacagatgaagccgtgggcaccagtgataaggagttgccactgctggctaagtgcggagcctcacacatctgtggcccagaaacccacaccccactccaaaccctctatagctccaacagttatgctaacaagaaaaaggagtgaaaacccgctccagttacggtattgtggaggtggaggacacttgtggcagccaatccaacacctccattttatagctggtgtaaacatagttcagaaaggttgtcccacttgctgaaagtcacacagcagttcctgggcggcaaagtgaggacatccaggtctcctaaatctcaccctcgtgctctgcccacttgactgggcttttcaatcctggctgtcaaagagaagcaccaagtccacttgggctcctggccagcatccaggccagtccaactcaacagcaagcggaagcaaataccacacaatgaactcgttgaacagactctgcgctcaggcttaaccagtgcacagcctgcacacccgacaggcggatg

SEQ ID NO: 494561 - DNA, 621 bp, Homo sapiens
cgcggggcgcacgcatatcaggaagacacagaggcctttttactgaaaatgccagcgggtgcggattccacrggctcctcttcagcatcagtctagtgtgggattcatacaccttgagcctctttcaaggtgaaacagagaatctcactgaaaactttaaatcccactgtaaattccaaaattagacctgcgccgcgaagaccgcccaccagcaaaatgccaagcgtatttctttaaaaactggaaagccgtgtttcgctgctcttcctgtagacaatacagcatgggggcaggagtggggtctggagtcggacgcacgttcagaggctggggtcacttctcccaaaccgtgtgcagtcggacgcacgttcagaagctggggccgccactcccaaactgtgtgctctaggtccagcttttgcacccctcctagcctcagtttccccatctgtaaagtggggatgatccttgaacccccaccataggactgctgttacgattaagtcacatgggaaatacgaagtccttagcacaacgcttgacataaaggaagcactctaaaacaaacaaacaaacaaaaaacaacgaactggaagccactgaagccttcatggggtgaaa

SEQ ID NO: 494562 - DNA, 491 bp, Homo sapiens
gtggacctaatgtctctaggatcttgtgccctcattagtggcctggaaggacgcccagaccttccagttcatcaggggttgaagtgggcgatagttgttcaccatcatcttcttctcttcaccaagtgcagaaaacaggagagtacgaaatgcagagagctggaatagagggcagccagggtgagcttggtatgagtgcagggtgagccagcccccgggtgtccctcaggccttgtgtggtctcctcccatgctgaatcaggatggccygaaatgaccagtaaagatggtggaagtgatggtgtgtgcagggccaggttataaaaggcattgccgcttccgccttggtctttaggatcacttgctctggggggaagctggtcaccatattgggagggtactcaagcagccccgaggagaggcccacagggaaaggagctgaggctcccagccaactgccagcgccaacttgccatccacttgagagggcca

SEQ ID NO: 494563 - DNA, 535 bp, Homo sapiens
cgccgcgccttggtccaggctcgcgatactggggtttcctccatccamctcacgccagggtcacggctacaggcctagatttgaacactccatccccatcgggatcctgtagccaacctccaccctcctccaaacctcccgacccctcggcaggtgcggccccacacttctcccttgctccctgaagggccccagcgctcgccccccgcgcgcttgcgcactcgaggcagaagccgatttccaaaggttccggtgaggcgtcgctgggggcggggcggggctcgcagcctccgcctgtctccgagccgagaaccaaatgaaaaataaaaaggcggaatattgtttttttaaattttggaccgcagtgtccacaggggagcaggcctggattatctttaatggcactggtcagtcacggggcggccattacaggtagaggcctgaggcgagggacactgcggcccctctggctccgtctccccggcccgactatccccgccgagacccggccccacgcgcccctcccggcccggag

SEQ ID NO: 494564 - DNA, 535 bp, Homo sapiens
cgccgcgccttggtccaggctcgcgatactggggtttcctccatccaactcacgccagggtcacggctacaggcctagatttgaacactccatccccatcgggatcctgtagccaacctccaccctcctccaaacctcccgacccctcggcaggtgcggccccacacttctcccttgctccctgaagggccccagcgytcgccccccgcgcgcttgcgcactcgaggcagaagccgatttccaaaggttccggtgaggcgtcgctgggggcggggcggggctcgcagcctccgcctgtctccgagccgagaaccaaatgaaaaataaaaaggcggaatattgtttttttaaattttggaccgcagtgtccacaggggagcaggcctggattatctttaatggcactggtcagtcacggggcggccattacaggtagaggcctgaggcgagggacactgcggcccctctggctccgtctccccggcccgactatccccgccgagacccggccccacgcgcccctcccggcccggag

SEQ ID NO: 494565 - DNA, 564 bp, Homo sapiens
agctgtagaactaagacgtaagcgaactgtttcaatcaagaatatatgggtggtcaggcacggtagctcttgcctgtaatcccagcacattgggaggtcgaggtgggcagatcacctgaggtcaggagctcgagaccagcctggcaaacatggtgaaaccttgtctctactaaaaatacaaaaaatgagccaggcatggtggcaggcaactgtaatcccagctactcaggaggctgaagcaggagaatcacttaaatcctggaggcaaatgtttctgcaagctgagatggcaccattgcacttccagcctggggaacaagagtgtaactgtcacaaaaaaaaaaaaaaaaaaaaaaaaaaaaatacaggagtgcttctggaacagcattccatgccaatccaacccatctttcaacatttgtccaaacgcaccagagggccttgagggaaacatgaacttaatagctcccagctcaagattttaacaaatgacataaggaaagaaaactgaaaaatagactaactggttaaactrcattttgatgttaaggtaaaaggtcactg

SEQ ID NO: 494566 - DNA, 500 bp, Homo sapiens
cccttcaggctagggctagaaatgttccatccgtgggtgggcactggctgagttcagcccagttttgctttctgctatgacaacgcagcactgagttcaatgcaaagtctcacactgctgtgctctcccttccccaagcatgcagattctcttcttgtcacatggccaatgctaggwcataagggagggctggcatcagcaactcaagactgtctttcctaccgtgttcactgcctttttcagtgatacaaagtttaaaccaggtactataattatttagctatttttagttctaataaaggtgttttttatttagatagttactcaatttgttattcttatgaggagaacaattggcagagacttctaatcagccatcaagctctacttttgtgatcacatacattctggatggcagtcttatctggagtaacgggcaaatgtaaaaaaacaaactcttgccactgcctgtcatgatattgttcttcatatgctgctca

SEQ ID NO: 494567 - DNA, 500 bp, Homo sapiens
cccttcaggctagggctagaaatgttccatccgtgggtgggcactggctgagttcagcccagttttgctttctgctatgacaacgcagcactgagttcaatgcaaagtctcacactgctgtgctctcccttccccaagcatgcagattctcttcttgtcacatggccaatgctaggacataagggagggctggcatcagcaactcaagactgtctttcctaccgtgttcactgcctttttcagtgatacaaagtttaaaccaggtaytataattatttagctatttttagttctaataaaggtgttttttatttagatagttactcaatttgttattcttatgaggagaacaattggcagagacttctaatcagccatcaagctctacttttgtgatcacatacattctggatggcagtcttatctggagtaacgggcaaatgtaaaaaaacaaactcttgccactgcctgtcatgatattgttcttcatatgctgctca

SEQ ID NO: 494568 - DNA, 528 bp, Homo sapiens
aactcattcctgccagctcttctcagagtctgagtcagacaggaccacagggagaaaagactcttgaatcatgggacttayatttgggttaaagcacagaccaaatgctgtatgtaagagcctacctctgcaaggctgcccctgctcccactattgcacccatcctgccaggggccgactgggctgacaccatcattcccgtcactcccaccactcccctcccctcccagaattgcaatagtatgtcaaatctgggaccccgatcagggatctgggaagttgagaaagcatccagttggcaaactaagatatgggtttcaccctaagaaaagagttttaaatgctggctgtgcatgaaaattgcctgggaaattttagaagaatgtaagcgcctgtgccccatctgaggtcaatcaggtcatttgatgtggtttagaataactgcccagttaacattgccaggcagggactgtcaccaggacataatttctcttctccacatccaaatcctgaccaatgcctaatgga

SEQ ID NO: 494569 - DNA, 528 bp, Homo sapiens
aactcattcctgccagctcttctcagagtctgagtcagacaggaccacagggagaaaagactcttgaatcatgggacttacatttgggttaaagcacagaccaaatgctgtatgtaagarcctacctctgcaaggctgcccctgctcccactattgcacccatcctgccaggggccgactgggctgacaccatcattcccgtcactcccaccactcccctcccctcccagaattgcaatagtatgtcaaatctgggaccccgatcagggatctgggaagttgagaaagcatccagttggcaaactaagatatgggtttcaccctaagaaaagagttttaaatgctggctgtgcatgaaaattgcctgggaaattttagaagaatgtaagcgcctgtgccccatctgaggtcaatcaggtcatttgatgtggtttagaataactgcccagttaacattgccaggcagggactgtcaccaggacataatttctcttctccacatccaaatcctgaccaatgcctaatgga

SEQ ID NO: 494570 - DNA, 528 bp, Homo sapiens
aactcattcctgccagctcttctcagagtctgagtcagacaggaccacagggagaaaagactcttgaatcatgggacttacatttgggttaaagcacagaccaaatgctgtatgtaagagcctacctctgcaaggctgcccctgctcccactattgcacccatcctgccaggggccgactgggctgacaccatcattcccgtcactcccaccactcccctcccctcccagaattgcaatagtatgtcaaatctgggaccccgatcagggatctgggaagttgagaaagcatccagttggcaaactaagatatgggtttcaccctaagaaaagagttttaaatgctggctgtgcatgaaaattgcctgggaaattttagaagaatgtaagcgcctgtgccccatctgaggtcaatcaggtcatttgatgtggtttagaataactgcccagttaacattgccaggcagggmctgtcaccaggacataatttctcttctccacatccaaatcctgaccaatgcctaatgga

SEQ ID NO: 494571 - DNA, 484 bp, Homo sapiens
aggctgcagtgagccagccaagattgcatcactgcactccagtctggtcatgagactctgtctcaaaaaaaaaggaaaaaagaagataagaactgaagtatcacatcagccatcaacaacaccccatctcaaaaataattcttactttttcagctatgggttaacccatcagttttttcaacttagtaaatcagtgactttattccaccgctcagctatttacccgacattgcacaactcaagcaggaacatgtaaggaacaaaagggcagcactygtgcccacactgtcctttttattagtttctttggtttttcatcctgggaatcgatacttggaagcagtgttttctgtcacaagagggagcaaccagggccccatcgtcttccttttacatctatatcattgtcagaacctctcctctggcttcctgccagactcagaccaaatctacccccatgcccaccaccatggacatgttggac

SEQ ID NO: 494572 - DNA, 556 bp, Homo sapiens
tggcatgggttcccctccttcaaccctgatgtcttggttctcacaggtttctaagggtcaggacacacagctgccttatgctgtcctctgtaggcttatttccaggaaaatccaaaactgttctttgaaacccaacggttaaattcactggttatgttgcagagacatgacagagagctttatggctgctgagtcctcytcacaatgccttatgtgcagacatgagcttttgttaaacacagtaaaagcggcacgagtgaggcaaattggttcaatgtcaattttactgcctagatctaagtaacatttctggtctcccatctgcctgataagggcagctgctagatctccctttcgtattctgctgacataatgaagtgaggtattcctattagtacattatgtttagtatataaacaatactgtacattgggagcagtctgcatagctttttaattatattttgtggagaatgcgcaagtacggctgcagagctttgctcatcttgttcagtctttggggaaaaaaaaaaacttcctgccttcctgttgacggt

SEQ ID NO: 494573 - DNA, 249 bp, Homo sapiens
tgtaacaaagaatactatatagcaatgaggtgaagaataatatatagcrtattcatgaatattcactaatatttatgaatgctacataggaaaattaaaaatattcataaaatgaataccatagaatactatatagcaatgaaaatcaactccagctacatacaactgggatattatgaatgtaatactgaagaaaagatacaaatagcatgattccaattatatcaaaaccaggagaaactagactaa

SEQ ID NO: 494574 - DNA, 249 bp, Homo sapiens
tgtaacaaagaatactatatagcaatgaggtgaagaataatatatagcatattcatgaatattcactaatatttatgaatgctacatrggaaaattaaaaatattcataaaatgaataccatagaatactatatagcaatgaaaatcaactccagctacatacaactgggatattatgaatgtaatactgaagaaaagatacaaatagcatgattccaattatatcaaaaccaggagaaactagactaa

SEQ ID NO: 494575 - DNA, 651 bp, Homo sapiens
ttttttctcttgttttacggcagcagagccccagttcccagaagtgaagcacccttctccarcccagtctgagtggtctgcgttgagctaaatctcccctgattctaggggtggacacatgctctgggcttggccaacccatctcactggcctgtgaagagtctggggtggacaaagaatccctatttgtcaaatgagactaacaatcagtctctagtcccagccagccccaggacacttgtagcagctattaggaaagagaggctctcaaagggaggccccctctgagtgtgcagccaacactgaggaaagcagagctgagagggaggcacctgagtcataatatgtcaacgcctggatccagctgcgcctgcagccacagagacctctgggctttctagttacttgagtcaatcaatcccctgcttttaaaaatccattggaggatatgttgtttgtttgtttggttggtttatttttgcacttgtaccccaaatagtcctattatgccccctagtcggccaaggctaatgtgtggcctacctcctgcaggaagaccccctcccattcctgcagcgccactggctttcctggcttctgagcccgctcctctcttactatctgaccacaccccgtgcacagtgcccacat

SEQ ID NO: 494576 - DNA, 583 bp, Homo sapiens
tttatattcctctgcgccaggctcattcctccctcagggcctgggtgcttgtctggaactttctgtcccctcgtcctcccactctgaattatctgctcctcctacccccagatcaggctctcacatcaccttattttgttttccttgcagcccttagcattatctgacattatgcagtcacctacttstgggcttgtttgctgcctgtactgctagataggaagctccatgagaacatggaaagggaaggatgttggctctgagctgcccccacaccagcaggtactgcagccctttctggcctggcatgtctcctcatgccaagtggtggcttccactctcttctgcccagctccacaggctgcgaatccacaccagcccactcccgggaacgccttttccagttgtctggcttgctgtggcctgggtctcgggttcactcctttcctgctcctcacaggtgtaagaatacaggaagggggtgcctgagtgccagggaggcctttgcccaccaggaagctcacaccagacaaggctgtgttgccctagggatgggccaggtgctggccatggtgccacctgc

SEQ ID NO: 494577 - DNA, 596 bp, Homo sapiens
ggacatgtagtgggtataggtgagggatgttgctaagcatcctaggatgcacagggaatccatcacaacagaattatcaagctcaaaatgtccatagtactggagtgagaagggctgctctagatttacagaaatttatggtgcagacttatctggcactcagttatgaacaactgcaaaccctgaaataataggagaaatcttaagcacttcaaaaagaaccaagaaaagagtgacaaaatagcatcctcaatggttaatactggtagttagtggtaaatataamtatacacacaccaaaccgcatgcttcagagacaagttactctgagaaagaatatggccaagaaacagtggttaagaatacctcaagtaaagtacaaagagagaacataatggaagagcaggtctggagttaagaggcatcgttttcatctcagttttattaaattgctaatgcataaagaaaatattaaggtattttaaatccatcttatgtaatgagagaagtgtgtacagttccatttagtagccagcccaaacagcccctttgttcacaattattgcttgaaaagaacatagctgagtttaagatgt

SEQ ID NO: 494578 - DNA, 633 bp, Homo sapiens
ctgcacaattgatgatcagagtggaaatctgtgaacacactcggtctctaagattccctttctggggcggaaaggcaatcctgattatggagaatcatgcctaaaaatcctcaagagccaggcacackgtaggtgcacagcaattttttacggaagggaaaaacagaaaacaaggaatggctggatgcaccgatggagtgaatgagtgtgtgcatcactgagactgaagttaagctgggactgacatttagagccgcctggagggggcagagagggtggaaagagcacaccagggcaaagcgccctgagacatgtcttaagcattgagcaggaacaagacaggcaggagaagaaaaatgagcgtccagccagatagatgatgttgggtcaactcaatccttccccgtctgtctggagtaactctgcaggcacacattacagcatgccgatcagccaaagggagcagtgattggcatctctgagccagcacctgtgagcagactgacattcagggagacaggtccaaatgccaccggtcaaaggccagagaaccttgcagcctgactggggccactcagacaggtgcgatgacagccgatcccatgcaatcaccctgagtagtggtttgaattt

SEQ ID NO: 494579 - DNA, 633 bp, Homo sapiens
ctgcacaattgatgatcagagtggaaatctgtgaacacactcggtctctaagattccctttctggggcggaaaggcaatcctgattatggagaatcatgcctaaaaatcctcaagagccaggcacactgtaggygcacagcaattttttacggaagggaaaaacagaaaacaaggaatggctggatgcaccgatggagtgaatgagtgtgtgcatcactgagactgaagttaagctgggactgacatttagagccgcctggagggggcagagagggtggaaagagcacaccagggcaaagcgccctgagacatgtcttaagcattgagcaggaacaagacaggcaggagaagaaaaatgagcgtccagccagatagatgatgttgggtcaactcaatccttccccgtctgtctggagtaactctgcaggcacacattacagcatgccgatcagccaaagggagcagtgattggcatctctgagccagcacctgtgagcagactgacattcagggagacaggtccaaatgccaccggtcaaaggccagagaaccttgcagcctgactggggccactcagacaggtgcgatgacagccgatcccatgcaatcaccctgagtagtggtttgaattt

SEQ ID NO: 494580 - DNA, 468 bp, Homo sapiens
gttctgtggttagtacaacggcatcattttttaaaaaatgcgtcaaatatgttgaaagcttaaatgtcagaattgacccacttcgaacattccaacgaacagtagaaagggcagaatgttagcaatggctgagtctgggtggtgggtataaagagggcttgtttttttagtctggttttccgcatattagacgtttttcataatctctttggaaaagctttccagcgcctggggctgagtatctctcggacgggccctgggggatgggtctcgtggggcctggtatcagttcccagctggcggtcgagttctctagagggaacagggsctgcatgtagcagtatttttattattttcaaccgcagtcgcttcttcctgttgccttctgggtactgggaggcacccgggaagagctgggattctggggtcccccagtatggtttacctgctctggggcaacagggacaa

SEQ ID NO: 494581 - DNA, 574 bp, Homo sapiens
tgcctactccttaggaatgagtggcatgtggttcatatgagtatactttttaaacatttaatttttttttttaatagagacagggtttcgccatgttgcccaggctggtctcaaactcctgagctcaagcaatctgtctgcctcagcctcccaaagtgccaggattacaggcataagccaccacacctggcctcttttcaaacacgtaagacatttgttagcattttgataaagatacagctttcagacagtaatacgcacagrtcttcagtgcaaaagtcaatgaatgttgacatatgtgtacccctgtgtaatcatcactgaagctgtaggatggcaaggtgaagacattttgaacaaaggccaggcagaagctaggatcttgtccaactaacccattgtgctcaccctttcagacacctaaaactcctttgcagaaaagcatggacaggctaggaaagcaactgacactcttctcctttggcataatcggtgagtgaagcagtttccatactgggtttgttctgcagatggaggggagccatcataggggggttgccatggccgtttctca

SEQ ID NO: 494582 - DNA, 574 bp, Homo sapiens
tgcctactccttaggaatgagtggcatgtggttcatatgagtatactttttaaacatttaatttttttttttaatagagacagggtttcgccatgttgcccaggctggtctcaaactcctgagctcaagcaatctgtctgcctcagcctcccaaagtgccaggattacaggcataagccaccacacctggcctcttttcaaacacgtaagacatttgttagcattttgataaagatacagctttcagacagtaatacgcacaggtcttcagtgcaaaagtcaatgaatgttgacatatgtgtacccctgtgtaatcatcactgaagytgtaggatggcaaggtgaagacattttgaacaaaggccaggcagaagctaggatcttgtccaactaacccattgtgctcaccctttcagacacctaaaactcctttgcagaaaagcatggacaggctaggaaagcaactgacactcttctcctttggcataatcggtgagtgaagcagtttccatactgggtttgttctgcagatggaggggagccatcataggggggttgccatggccgtttctca

SEQ ID NO: 494583 - DNA, 612 bp, Homo sapiens
ttaaacaccacaacttgggggaaataaagctttattaggagtcgagttataaatctgcgttagacaaagctgcagatatttttggaaagcgccggctatttgagctactgaaagaaaatcagtttctttcaattctcctaatgctatgactttcactgataccattgccaacatttcagagccctgtctgtgacacaaagcaagggaattgtgaacttggcttcagaagttgggacatggggaggtagggaggtggggaggccagtgtcgggtgggcatggttgcggagcttaagttaaacttaaagttgaccataatatgcaaaaataaagaggctctcagttggaggcactcagaactgaatttggaaaaatctgttgtattttcttacatccaatctttaaaagtcttaagagttcatgtcactgaatattctcastataaggacagcattaattgtatcaacttaccattagatagtttgtcaaaacaggaagaatgtgaaattcagagtcagttaaaccttgttataatttgtggccttgggtaagtttcttcgtttttctgaacaagattaccagttgtataggttgctcactgcaaaaagttgcc

SEQ ID NO: 494584 - DNA, 665 bp, Homo sapiens
tgctcccattttggagtgcagatgtcttgttgccagatccctcagttttctaagagaggacatcaaaaccccacatttttaatgtcaactctaccagtgtttgaatactggtaatgcatttagcatttcttaacaggtgtctacccagtgtacagcaaactatttctgtaggctgcccgcagttgacatcctccattctgaccctcgccaagcatttcagaaaaggtagacaggcctgcagagaaagcagatggctcawcgcacatcacacagtgagtatgtggcaaggtgcggtctggaacgcaggctcggagctcaatgcagtttccacttcacccacaatgagaaacacctctgtgcacacatttgacttaattgagataaatcagccatcataaaattaaattatgtctcaaattaaacatactatatggaaaaggtcctatgtgcatctctttattggcattacatgaaagcccatagctcacttgtaagagcccatcacaacaatcttagggaagaggaagaaggctgtttccacatttgacattaatttcccagccaacctggagtcagggtgtccctacaaggtgccgtgttggaaaatgctccattgtgagacctgagccctcgctgcttgcagcagcccctttttaattctgtct

SEQ ID NO: 494585 - DNA, 665 bp, Homo sapiens
tgctcccattttggagtgcagatgtcttgttgccagatccctcagttttctaagagaggacatcaaaaccccacatttttaatgtcaactctaccagtgtttgaatactggtaatgcatttagcatttcttaacaggtgtctacccagtgtacagcaaactatttctgtaggctgcccgcagttgacatcctccattctgaccctcgccaagcatttcagaaaaggtagacaggcctgcagagaaagcagatggctcatygcacatcacacagtgagtatgtggcaaggtgcggtctggaacgcaggctcggagctcaatgcagtttccacttcacccacaatgagaaacacctctgtgcacacatttgacttaattgagataaatcagccatcataaaattaaattatgtctcaaattaaacatactatatggaaaaggtcctatgtgcatctctttattggcattacatgaaagcccatagctcacttgtaagagcccatcacaacaatcttagggaagaggaagaaggctgtttccacatttgacattaatttcccagccaacctggagtcagggtgtccctacaaggtgccgtgttggaaaatgctccattgtgagacctgagccctcgctgcttgcagcagcccctttttaattctgtct

SEQ ID NO: 494586 - DNA, 665 bp, Homo sapiens
tgctcccattttggagtgcagatgtcttgttgccagatccctcagttttctaagagaggacatcaaaaccccacatttttaatgtcaactctaccagtgtttgaatactggtaatgcatttagcatttcttaacaggtgtctacccagtgtacagcaaactatttctgtaggctgcccgcagttgacatcctccattctgaccctcgccaagcatttcagaaaaggtagacaggcctgcagagaaagcagatggctcatcgcacatcacacagtgagtatgtggcaaggtgcggtctggaacgcaggctcggagctcaatgcagtttccacttcacccacaatgagaaacacctctgtgcacacatttgacttaattgagataaaycagccatcataaaattaaattatgtctcaaattaaacatactatatggaaaaggtcctatgtgcatctctttattggcattacatgaaagcccatagctcacttgtaagagcccatcacaacaatcttagggaagaggaagaaggctgtttccacatttgacattaatttcccagccaacctggagtcagggtgtccctacaaggtgccgtgttggaaaatgctccattgtgagacctgagccctcgctgcttgcagcagcccctttttaattctgtct

SEQ ID NO: 494587 - DNA, 609 bp, Homo sapiens
gctgccacacctggcccccagttaactcaacttagtaagtgaagcatattcctaactgcaaaaaaagttcaaatccctttaaaaatactgactaaagcctattacagatgacacaatcctaagaacctgcacatctctttgctaaatcatggtgaagttccacacgatggaatattattctgcragaaaagggaacgactactggctacgatgtggatgaaccttgaggatattaagctaagtaaaagcagccaaaaacaagcatggacaacacaacgataaaagcagccaaaaacaagcatggaaaacacagcgaaaccccgtctctagaaaaaaaatacaaaacttagccaggcgtggtggcgtgtgcctgcagttccagctactcgggaggctgatgggagaggatggctttggcccaggagcttaaggctgcaatgagctatgatcaaaccacggcactccagcctgggtgacaagatcttgtctcccaaaggggaaaaaaaaaagcttacacagtctatgaaatgtctagaataggcaaatccatagattagtggtgactgctaatgggtacaggatttccttttgtggtgatgaaaatgtgct

SEQ ID NO: 494588 - DNA, 609 bp, Homo sapiens
gctgccacacctggcccccagttaactcaacttagtaagtgaagcatattcctaactgcaaaaaaagttcaaatccctttaaaaatactgactaaagcctattacagatgacacaatcctaagaacctgcacatctctttgctaaatcatggtgaagttccacacgatggaatattattctgcgagaaaagggaacgactactggctacgatgtggatgaaccttgaggatattaagctaagtaaaagcagccaaaaacaagcatggacaacacarcgataaaagcagccaaaaacaagcatggaaaacacagcgaaaccccgtctctagaaaaaaaatacaaaacttagccaggcgtggtggcgtgtgcctgcagttccagctactcgggaggctgatgggagaggatggctttggcccaggagcttaaggctgcaatgagctatgatcaaaccacggcactccagcctgggtgacaagatcttgtctcccaaaggggaaaaaaaaaagcttacacagtctatgaaatgtctagaataggcaaatccatagattagtggtgactgctaatgggtacaggatttccttttgtggtgatgaaaatgtgct

SEQ ID NO: 494589 - DNA, 584 bp, Homo sapiens
tatatttactcctgaaattggaaagtgtctctagacttaacactgataaacactgcccaaagccaaataactaaagatgttgtcagtctctgtttccaagagctgttgggtctcgcaataatagagaggctgaaactgctgtagatcatcttgctcccatctgctcttgggtccttccagtaaatgggagtcctcttaatctaccatatgttaaactgccttggggctaaagaacagtgatgtagatgttatcacacaatttctgaatctttcacatactttacaatttctaaggtggaaagaaaaaatcagtatcctatttttagttagggttagagttagctttgcatcgttgaatgatacaggatggttgctgtataactaacataattaagtttaccttaaagaaatatgctaagaacatcaaggcctttttaggtgttcctgtmatttggaaagggtgtagccagtaatttataaatagattgttcttgttgcacaccaaagggcaaatctgggctcaccctttttgcatgttgtgtgaatttaacaacttgtgttttctgcattaatctatttttaga

SEQ ID NO: 494590 - DNA, 611 bp, Homo sapiens
tggggagtgggaggcaagggctgcagagtaggaggcacgtgggccggctcggccatggaggagccacacgtgctttgccagcccccatacgtcctccctccctgcaccttccccttcagaccatccgagccatcctgggargctcagcctccaccacccatgtgggcaccttctgcattacctacaatagccagcctgagaggagcagcaagccctctgcaggccctcgggacacgtaataatggcagtcatctttaccgcctcttcacgtcattgcctgcggcagctctgtgctattttagactctattgatcctggtgccaataaatggttcatattcttcaacttccttaacttagaggctatcgtctcagtcaaattgatgtcttctgtctggctgacatagcttgggattctagtagcgtgtctttcaatgattaaggattacgttcttgttttgcttttgttgtgaagcagaatcagcgtcactgagacacgttcatgcaggaggcctcgtctccatcacaccacaaatactttaaggtgccaactttctgttctctagtggagtccagatccaacaggaatggctgggtctgggggaggcaggg

SEQ ID NO: 494591 - DNA, 611 bp, Homo sapiens
tggggagtgggaggcaagggctgcagagtaggaggcacgtgggccggctcggccatggaggagccacacgtgctttgccagcccccatacgtcctccctccctgcaccttccccttcagaccatccgagccatcctgggaggctcagcctccaccacccatgtgggcaccttctgcattacctacaatagccagcctgagaggagcagcaagccctctgcaggccctcgggacasgtaataatggcagtcatctttaccgcctcttcacgtcattgcctgcggcagctctgtgctattttagactctattgatcctggtgccaataaatggttcatattcttcaacttccttaacttagaggctatcgtctcagtcaaattgatgtcttctgtctggctgacatagcttgggattctagtagcgtgtctttcaatgattaaggattacgttcttgttttgcttttgttgtgaagcagaatcagcgtcactgagacacgttcatgcaggaggcctcgtctccatcacaccacaaatactttaaggtgccaactttctgttctctagtggagtccagatccaacaggaatggctgggtctgggggaggcaggg

SEQ ID NO: 494592 - DNA, 522 bp, Homo sapiens
gttttatacaagactgtctaccctaaattccagcccatctttatactctaaaactgagagacttgatgaactgagtctaccgaaacgtgatgtctatttctttttttctttttttgaaaggragtctctctctgtcgcccaggctggagtgcaagggcacaatcttggctcactgcaacctctgcctcccaggttcaagtgtatctcctgcctcagcctcctgaatagctgggattacagatgtgcatcaccacacccggctaatttttgtatttttagtagagacggggtttcaccacattagttaggctggtctcaaactcctgaccttatgatccgcccacctctgcctcccaaagtgctggtattacaggcgtgagtcaccgcgcccagccaggtgatgactatttctaatacccacttacatgctttagagactaatggtgactctggatttagggtctatcttagataatttcatttctagattatactatgcaccgataacttcactgttgtggt

SEQ ID NO: 494593 - DNA, 522 bp, Homo sapiens
gttttatacaagactgtctaccctaaattccagcccatctttatactctaaaactgagagacttgatgaactgagtctaccgaaacgtgatgtctatttctttttttctttttttgaaagggagtctctctctgtcgcccaggctggagtgcaagggcacaatcttggctcactgcaacctctgcctcccaggttcaagtgtatctcctgcctcagcctcctgaatagctgggattacagatgtgcatcaccacacccggctaatttttgtatttttagtagagacggggtttcaccacattagttaggctggtctcaaactcctgacctyatgatccgcccacctctgcctcccaaagtgctggtattacaggcgtgagtcaccgcgcccagccaggtgatgactatttctaatacccacttacatgctttagagactaatggtgactctggatttagggtctatcttagataatttcatttctagattatactatgcaccgataacttcactgttgtggt

SEQ ID NO: 494594 - DNA, 657 bp, Homo sapiens
ctgatgtcaaacaagtcagcctcctgcccttttatttcagtttttacactgtaaacaaatgtcctccagttcatggtctatctattctacacttttctcattttcatgctttttgttgatggtttctctatttaaaatgaccccaagcatagtactaaagtgctgactagtgctcctcagctcaagcaggctgcgatgtgccttacaaagaaaatatgtgttacataagcttcagccatgaattatggtgttgttgatcatgggttcaatgttaacaaatcaaatatatatatatatggcatctttaaacagtaaacgataaaaccaagtcaagtattgaacagttgatgaagatgttgggatcacaggctcccagtaacctaaccttgcattttttccggggcaatattgagtattcactgataatgtttatagtgactttatagagtgtaactgtcacaaataacaagaattgattatacctatagaggaggttataggcatcaagttacatatrtgtatggtggaggcatgggggaaggtggtggtgtgtgtttctctaaggaggtccctaatttattgagaacttttctctaggtctttggggcaatatgaaagaatgtcaaaaaaattcatgtgtgagacctatgtcatgat

SEQ ID NO: 494595 - DNA, 604 bp, Homo sapiens
cataggttttggctatctaccattcctccctgaggaatttcatttttggcttaatggggaaaaawatataaacaactttccattttataatacctggtaagtatactgataatgattttcagaacaattttcacaagagtttaatgcacaagcgaatgaagtaattacttttgaaaaaatgagagtgttttcaattttgaatgtgttgagtttgagtttttttgtgtaatgtctattgaaagttttagttgataaataaaggagaagaatataaaacttagaaatatgtcattgtacatgaaaaataacatattccaacctgcatgagtttgtaatatgaaaaataaattatagattatgtttatgtattggaaaactgattattacagagttgccaactcttccaaactcaatctggacagcatatgtaatttattgatgcttccaaaatgtatatggaaatacacatttagaaatggttttctaaatggtttctaacaaaggacaagaagaggaaagatactctcaaaggagaataacaaggtggaaggctttctctataaggtataagaaatattacttagctggagtaattatgaatttc

SEQ ID NO: 494596 - DNA, 604 bp, Homo sapiens
cataggttttggctatctaccattcctccctgaggaatttcatttttggcttaatggggaaaaatatataaacaactttccattttataatacctggtaagtatactgataatgattttcagaacaattttcacaagagtttaatgcacaagcgaatgaagtaattacttttgaaaaaatgagagtgttttcaattttgaatgtgttgagtttgagtttttttgtgtaatgtctattgaaagttttagttgataaataaaggagaagaatataaaacttagaaatatgtcattgtacatgaaaaataacatattccaacctgcatgagtttgtaatatgaaaaataaattatagattatgtttatgtattggaaaactgattattacrgagttgccaactcttccaaactcaatctggacagcatatgtaatttattgatgcttccaaaatgtatatggaaatacacatttagaaatggttttctaaatggtttctaacaaaggacaagaagaggaaagatactctcaaaggagaataacaaggtggaaggctttctctataaggtataagaaatattacttagctggagtaattatgaatttc

SEQ ID NO: 494597 - DNA, 604 bp, Homo sapiens
cataggttttggctatctaccattcctccctgaggaatttcatttttggcttaatggggaaaaatatataaacaactttccattttataatacctggtaagtatactgataatgattttcagaacaattttcacaagagtttaatgcacaagcgaatgaagtaattacttttgaaaaaatgagagtgttttcaattttgaatgtgttgagtttgagtttttttgtgtaatgtctattgaaagttttagttgataaataaaggagaagaatataaaacttagaaatatgtcattgtacatgaaaaataacatattccaacctgcatgagtttgtaatatgaaaaataaattatagattatgtttatgtattggaaaactgattattacagagttgccaactcttccaaamtcaatctggacagcatatgtaatttattgatgcttccaaaatgtatatggaaatacacatttagaaatggttttctaaatggtttctaacaaaggacaagaagaggaaagatactctcaaaggagaataacaaggtggaaggctttctctataaggtataagaaatattacttagctggagtaattatgaatttc

SEQ ID NO: 494598 - DNA, 643 bp, Homo sapiens
gtcatttatgagtctcttgcctcttgcctcatgattgcctgtggctgctgctgctgcaaacctcataatccagtgtaactgtgcacacaggcaaaggtggggagaggctgaagggcccaattatgcacctccctcttttaattagagaggaaactatttctccaagggtcctcagcaggattactcttatgtcttttttaccaaaacagggtcacatcctcaaccctaaaccaggtaaagatacaggattaatgtaactgacaagattaatcactagtcatgctttgtgtagacacactgcttccttcaaatctgaataaaattagaattcttattgcaaaacagaaagtagaaatgactaataaactggtaagcaactaacagtggcaggtgctatttccttcctactctctataagtcatacactaggcaagtgctgtaggttcttcaagcatcttagagacagatacattttcaataatttagttgcttgtttgaacatgaaaaaaatgcataacaataatttacacaagccaatgtaatgagtgttcttgttttacccatttatcaatgaggaaaataagatttagaaaacataattatgttrcccattatcagcaaatatccacaaagaagccgagag

SEQ ID NO: 494599 - DNA, 569 bp, Homo sapiens
agagtgttccttatatcacatcactctgacacaatcatctaccttccctttccagttataatcactttgtgattacattaagcacacctggataatgcagaataagtttcccatttcaagtcatttattagcaactttcattccgtctgaaacattaattccttaacatattcacaagttttggagagtagaacatgggcactttgagaagcaggcattattctgtctaacacagtctctaaccatgtgtggccacataggattttatggtgattaagcagtgaaagtggaaatgtatgacagtcataaatgcagtctggtcggagatgttctcagagagatcttagtagctggcaatattatcacattggttctctaacccatcaagtaaagtttacttagaaagaaaagacacttgaaagcttctgaaactatacttctatacaagtgtaatgaagcraaagcaatgcctcatgtctagaaaaactgcaaagatttgggtcgccatcgaaaacttgaaatatgcataggtgaaaatgcctattatgtccctcattaaacttgcctcc

SEQ ID NO: 494600 - DNA, 619 bp, Homo sapiens
ttaccagtacttaagtcaggtgatagaagcactaaactttcaatagtagctttgagaaacagccaggaaccaccagccactcctttccccagatccacatgaagttcatttctgggtctggggcctcatgcccatcttaaaaatatcttggtttgttagctaaagaactaacttccagggctaagacaaaactgtatttaattcatctttttctaacagcccgcctgatattacagacttttcaaaagaacaaagattgccttcaagtgtttttgcaaaaaaaaaaaaacatgaattgtagtggctggaaaataaaggctgccaacctgacatctttctttccctatgtgccctctctagagcatgaaggagtgtggccaatgggggctgattaagtagcactgctcctttcrgctaaaacagggcttctcctgctagaagttccaggaatgtgcaggaatgttaatatttgtatgtgtttgaaaagaagtctgtgaggactccggggtccttggctggcagtggtatgattcaaacacctactaaggtactttcacttctttcttgctttattatagacgtctcctccaaataaccactaggtggcaggcaaaccaca

SEQ ID NO: 494601 - DNA, 451 bp, Homo sapiens
taaacctatgcttgcatatcacctcgacctttaacatcgataagcagtagggttagtgtcaacaactctccaaacctgtcaatgtctttattcttgcctgcggaagggaggggtgagagagaccttaataaatcctaattcctcgttgttggattctaatacaatgtggggttatcttttatcctaatttaaaggccattgatcccacactgtccttgtcttacacatacactcatccttaggtgcaaatatggtccccactctcaccttcacccctagcttgccagcgggctccccacaccctcctccagccaggagagaggcaaggagcaygcaggcatggagcccccataaccagtggcgcatctacagacataaacccactcttccttcatgggggatttcgaggcaggtccaacttccataaggatttctcttcagtgtagtgcta

SEQ ID NO: 494602 - DNA, 336 bp, Homo sapiens
agggcaacatcagctgtggaggacaaggaagggatggggtgtgccaaaatggggtagaaacgacgctgtgttgtattggaaagaaaatagactttaaagtcagaaagaaaggtgaaaatagcaagcttttactgactggctgtgtgatcttgggaaggttatttaactccctaagtcttgtgtgcttcaaccacaaatgggaagagtataacctaccttgcagcattgtgttgaggattagggataatgcgtattaaagcagagatcctggcacacggtggtgctcagtcaacagtggctgttaggtatttacmtggtgtcccaggaagtggatgg

SEQ ID NO: 494603 - DNA, 607 bp, Homo sapiens
agctgccttctttctgtgtcctcacagggcaaagaggagtgggaaggagaggaagggagaaagagagaagactgagagagagagaagaaggggagagagagcaagctttctgggctgttcttataagggcactaatcccatcatgggaaccccacctcatgacgtcatgtaaacctcccagaggccccatctccaaatactatcacattgggggttagggattcaatatatgaattttagggggacacactttcagttcataacaccctccttccatgccctcattcccagacacttgagaatccatgtgtaatgagagtgttaccttgaggagtatgcggctcctgcgtattatatggaggcagagacaaggattcmgaagcacagttctagcagcttgtcagtaagccactgcaggggagctttgatgaactctcatatggcataggtccttcctttctacctacgatttttctttttaaaatttccttattatttttatttgagaggcatgaacatgaggcaaaatatgttatttcctgttctttgtaaaatctccaaattgagctgtctgtagtcaaaagtgaggtaatcttcttcttttatc

SEQ ID NO: 494604 - DNA, 642 bp, Homo sapiens
atatgggggttgttcttcttactctccaaactgtggactgctaaactttaccagggatgtttttcgtctgaaatgacatttaaaagacttataaacacaatgcggaaagaacatttttattttttccactcggtatctcagcttcaagttttagaaattagagggtgtggagtgtctactgactcttatgtttgtggtttagccaataactaagacatccaaggataattccagttctaagccagggtggccctactgatctttttgccaataaagtaaaactacaaaagtaaggacatggagaaacattgtgatacatattctgctccttctcctctactctgtccttccttaaccctcacttcrtagattacatttgtcattttgttttctgtgatttgatatttatttccattgagtaagagagtacaagccaacctccagtagttcagaatgaaagctgttttctttcatttcagctaccactggaatgctgttctcaccaaactacttactggctgactttcttcatatgaagtcatttcgtattttgtgatgtaactagtaggtctgatcagccaatctacaaacatttattgatatgatccatagttgatggtttagagaattattttggaaatg

SEQ ID NO: 494605 - DNA, 642 bp, Homo sapiens
atatgggggttgttcttcttactctccaaactgtggactgctaaactttaccagggatgtttttcgtctgaaatgacatttaaaagacttataaacacaatgcggaaagaacatttttattttttccactcggtatctcagcttcaagttttagaaattagagggtgtggagtgtctactgactcttatgtttgtggtttagccaataactaagacatccaaggataattccagttctaagccagggtggccctactgatctttttgccaataaagtaaaactacaaaagtaaggacatggagaaacattgtgatacatattctgctccttctcctctactctgtccttccttaaccctcacttcatagattacatttgtcattttgttttctgtgatttgatatttatttccattgagtaagakagtacaagccaacctccagtagttcagaatgaaagctgttttctttcatttcagctaccactggaatgctgttctcaccaaactacttactggctgactttcttcatatgaagtcatttcgtattttgtgatgtaactagtaggtctgatcagccaatctacaaacatttattgatatgatccatagttgatggtttagagaattattttggaaatg

SEQ ID NO: 494606 - DNA, 580 bp, Homo sapiens
ggtgaagcacagggagatactcccagctgcagggtggcgggtggatcaaataaagggcaggggacttcttggctacaaagcagagccaggtggcatggaggaaagggcggcctaagctgacaggcagggtttatttatttcctttctctttgtcacagggcccctttaaaatgactcaacagactattagtctcaatggaatatcaaccccaacagggggaaaaaaaaaggtaagaaaatcctcaagaaaagaacacatacatctcagcccagtccaccagacagggcaacgtggggacactgttgggaggaactcttccagtctggccagagatccaccgccacaacctggatgccacagcctgggtgggcacctgggccagccttgtcccctcacccttgcctcagtctggctgcactttccagtctgccctctctgtctcccagttggtaggttccttcctgagcccctcacagtcagactgacacataccctgtgcatttcaatggcctcctgtgtggacagtatgaaaattaatcttagaaatgtkatcaagtccaaaaggaaattcctagggga

SEQ ID NO: 494607 - DNA, 455 bp, Homo sapiens
ctcacaaggcacagtgcctcactcacccttcctgtgacagagcataacttcccttaacactccacagtttccagaaggctgcattgttctcgaatcccatttttgagtttcagaagacctcatttcctctggctattctttctctttccttggtaggtaggggaacgaaatcaactctcccattctcctttgctctagttcactgtctcctttacatttaaagtggtaagacaacctacaatgccaatacaaatgctttaatgctacaggagcaaagccagaatgtaagtgtggtgtagattgtggtggaggccgtggtggcaggagtgggaaatgaggagggaagtggaraaagaagctataggaaagaaagtctgtggaggctgtgcctgaacagtatcaacctacccagagcaaaatgcatcaggtgcacgcaaaagtgtcattgatttgaa

SEQ ID NO: 494608 - DNA, 582 bp, Homo sapiens
ccagagtttaaacatcagtctctcttgtttctcaatataaatgtcatatgttctaagacttgactcatctgtcagggttggtgcagccctgacttgcagcaggaaacatagactctccttcagcagcctgagagagctccttgcttgagcagtggccagggacacagacccctctaaaggcagaagtgcccccccagccaggtggttacatctgagctgttctgcccaaaagctcccaggctgttccagaccatggccagtcgagggcaattccccgggagtggcacamgtccgtggaggcaggagagtgagaaagggcccacccacactcccccctgactgagggagacaggtttcccccctcacccagtaagagattccgcgtgaggggctgtttctctggacctttgccctgttcctccccagccctgtgacttgctctggataatgggatgacagcggacttcatgcaagcaaaggacttgtgactgcttgcttttctgcatttctgtcatccttgggagaagaacaagccaggctgccctgctaccccaggaggaggggaaagacaccaggccagaa

SEQ ID NO: 494609 - DNA, 563 bp, Homo sapiens
aaaaaagataaagaaaattagatcatacggtttctaagctaagtcctgacccaagccctgtatttcaaggaccaaatgtaaaatataaaacrggagtcccattctcagaacaaagcctcagaccacgcctcagggaaacgcagatcatccgcaacaggcacagaatggctgagccggggacttgcagggaggaaaagggtaatatgggaaatataccattgcattaaatgggtgcagggactctggcctttggtgtagggactctggccttcttccagtgcagcacattaaaaccaatatcaggggtggtgcagcaggagctgcagagatgactcgttctcctgacaaatagccacccaaacagttggcaaactgccctgctccacccatcctggtgatcttaccacaaatggaagcatctggcacattcatcatcttctatggggcatgaatgaatgcttaggctgtagataatttagcaggaatatatgtgtgtattatcatgcagataggacaattatatcataatagaaatggaacccgaatcgtctttgcctgacttt

SEQ ID NO: 494610 - DNA, 649 bp, Homo sapiens
tgggaacttgtaagatgttatttttatcattaggggtcagggaaatttaccagaatatagtaaatgtacatctttatttcgccccacccaatcaatcccaccaggaattcatttaattctctcaaactccagactcataaatttcttcaacgcaggaaaattttcttctaccatgtactcaattattctttcctccatctccatcttttttcttcttctgaaatttctttaatccatgtatcaggtttcatagatctatatactctgtttttttcactatttgctactcagtaatggccattttctcctttaatttacctaccaattttccaatgttaaataacatcctgggtttgttatcccagaaaatgttttcggtactgcacttgaatctccctaaggctcctattctgttcacgttgatgcctgtcttctcccgttgctcagtttcattagggtccacgtctcagwctttgtgttctccctgcctctggctcccaaaccccctcagttgggctgctcttctcctttgtacactggccctcaggtacaactcctggaactccttgaatggtggaagatgcagtcatattttcccaggcggcccactggctgctaggtccctggcaaggcaccaagttgatgcctc

SEQ ID NO: 494611 - DNA, 293 bp, Homo sapiens
taactcaaacaaataaacagccctcaaaaagcatcacagwctggtccctctgttagtctatgcagggcacgctgaaagtcacaggtaattgagattcatttgacttgggaggaccaggcagcaacatggtttctagctcctggcagtatgttcctggaactccaacaaacctgaatgaggcacaggagacccaagaccttggcacattttcacctaagccaactcacaccattaaacctcagttaggaaatatcaataacttccaaaaagtggattgcagtttaacatattac

SEQ ID NO: 494612 - DNA, 638 bp, Homo sapiens
gtttcatctccgaactcctgtcagtctcaaaattgatagaacagcctgaagccattaaacagagttatgtcagcaatcacctttctcattctctcatatgggtgcgaatacgtcaaggggacccaggcaagggaacaacagggtggctttttttttttagcattcaagggaacaacagggtggcttttttttttagcattatgacaagcaaatgcttgaataccaaggagcacatgagctttacagcagcagggaaaaaagaaaagaaaagaaaaaaaagcccccacatggacgcctgcctccaactccagtggccctgcacggtgcaaaaaggagattgctaacaaaaaggttattcaacgcttctccgaataaacccaaaggtaacaagtatggacggagcasatgtcaggaggctgagcgctactttggaaaactgccgagatatttaaaaatagcgctttcttattaacccgagcataatgctgaaagtcctttaaaataaaacttcccagatgccacctgcatctgacatggcaataggatgaatgccagtgtgcccactgatactggaaatgctctcaagaaacagcctcgactgattgttccggcacaaacaaatcacaaactaatttatg

SEQ ID NO: 494613 - DNA, 493 bp, Homo sapiens
cctagaagtcatgtgaagtttgctttgatttccacgtgggtggaagtggagtggtccacatagcatgtcccactccccctgtgcccgccccgggctcctcgtaccacccggtgctgccttgagcacatctgctgatacgtggtctctttcayttgctttacaaacattttggtttattacatgaccactgctttttcatttgtagggtggctttacggggagcaaatgtttattttacaaagacaaatgtatggaagctgtttaaccacatttttgcttcaatatgctctttttaaggtctattatcttatcctttaaaaatgttgtaatgtgtactttgcgaatgaaagatgctttattagttttattgtctgtgtcccaaaataacgtttgttcactgattttttttccctacttttttcagaaactacatttccccccatgagttagaatagttacaactaaaagccaggtggccgcaggttgtttacca

SEQ ID NO: 494614 - DNA, 630 bp, Homo sapiens
atgtgagtgaaatatccaaaagtatgccgtgaatatgtttattgcagcatttttttttacagacaaacactaaaaacaatttaaatgcccaacccttttgggactggttaaatttggagagggaagaagagagagaaacagagaggtgtcaacaactctaagcagtggcagaccattgggattataccttaagaggtacaaaactcacaaacacctctgtccagagtactccaaaacaaacattaaaagggatctaagagatctaggaggtataccgacattatccactayaaatttaatattaagaaaatagaaattaaaagagtcacatttttatgagaatttgtataggataaaaatagtatttcaaatcagtggggaaaaggataaattatcaaatagccaagaaatagtgggccaagttggaaagaaaatttgttacatttcctgactcacaccatttgcaaaaataaatttcagatgcattaaggatttagatatttaaaaataaatccaaaaactatagaaaaattccataggagaatatttgtataatcttagagtaagtaagcctttctaaatgtattgttcttgatcctatgaacacaaaatttaaaaagaaattaaaat

SEQ ID NO: 494615 - DNA, 608 bp, Homo sapiens
atgtgagtgaaatatccaaaagtatgccgtgaatatgtttattgcagcatttttttttacagacaaacactaaaaacaatttaaatgcccaacccttttgggactggttaaatttggagagggaagaagagagagaaacagagaggtgtcaacaactctaagcagtggcagaccattgggattataccttaagaggtacaaaactcacaaacacctctgtccagagtactccaaaacaaacattaaaagggatctaagagatctaggaggtataccgacattatccactacaaatttaatmttaagaaaatagaaattaaaagagtcacatttttatgagaatttgtataggataaaaatagtatttcaaatcagtggggaaaaggataaattatcaaatagccaagaaatagtgggccaagttggaaagaaaatttgttacatttcctgactcacaccatttgcaaaaataaatttcagatgcattaaggatttagatatttaaaaataaatccaaaaactatagaaaaattccataggagaatatttgtataatcttagagtaagtaagcctttctaaatgtattgttcttgatcctatgaacaca

SEQ ID NO: 494616 - DNA, 608 bp, Homo sapiens
atgtgagtgaaatatccaaaagtatgccgtgaatatgtttattgcagcatttttttttacagacaaacactaaaaacaatttaaatgcccaacccttttgggactggttaaatttggagagggaagaagagagagaaacagagaggtgtcaacaactctaagcagtggcagaccattgggattataccttaagaggtacaaaactcacaaacacctctgtccagagtactccaaaacaaacattaaaagggatctaagagatctaggaggtataccgacattatccactacaaatttaatattaagaaaatagaaattaaaagagtcacatttttatgagaatttgtataggataaaaatagtatttcaaatcagtggggaaaaggataaattatcaaatagccaagaaatagtgggccaasttggaaagaaaatttgttacatttcctgactcacaccatttgcaaaaataaatttcagatgcattaaggatttagatatttaaaaataaatccaaaaactatagaaaaattccataggagaatatttgtataatcttagagtaagtaagcctttctaaatgtattgttcttgatcctatgaacaca

SEQ ID NO: 494617 - DNA, 457 bp, Homo sapiens
tctgccgggctcttctccctctgccttctaattgcttggaaacagagctgacggcagtgggaacagctcagccactgctggtctcatgactggaggcttttgtttgttcacagaatcatatttttacactctggcttccgctaatwtatgccgcagactgagctctcccttgctgaagattgagtttgggagggtggggagttgattcctgggtatatagagtcatcgtggagcctatcaaaagccaagcaggggatatattcaccaccacaaagagtaataatagccaggctcagggtttattttctggcggttccctcctccaataggcctgccgtgttccagtagctcatctgctgaagaaagcttctgctgggaaaattaagcggctcctcatttaagatggagcacatcagccctgagctagtcgctgatcagcacctatgggagctcatcc

SEQ ID NO: 494618 - DNA, 457 bp, Homo sapiens
tctgccgggctcttctccctctgccttctaattgcttggaaacagagctgacggcagtgggaacagctcagccactgctggtctcatgactggaggcttttgtttgttcacagaatcatatttttacactctggcttccgctaatatatgccgcagactgagctctcccttgctgaagattgagtttgggagggtggggagttgattcctgggtatatagagtcatcgtggagcctatcaaaagccaagcaggggatawattcaccaccacaaagagtaataatagccaggctcagggtttattttctggcggttccctcctccaataggcctgccgtgttccagtagctcatctgctgaagaaagcttctgctgggaaaattaagcggctcctcatttaagatggagcacatcagccctgagctagtcgctgatcagcacctatgggagctcatcc

SEQ ID NO: 494619 - DNA, 457 bp, Homo sapiens
tctgccgggctcttctccctctgccttctaattgcttggaaacagagctgacggcagtgggaacagctcagccactgctggtctcatgactggaggcttttgtttgttcacagaatcatatttttacactctggcttccgctaatatatgccgcagactgagctctcccttgctgaagattgagtttgggagggtggggagttgattcctgggtatatagagtcatcgtggagcctatcaaaagccaagcaggggatatattcaccacmacaaagagtaataatagccaggctcagggtttattttctggcggttccctcctccaataggcctgccgtgttccagtagctcatctgctgaagaaagcttctgctgggaaaattaagcggctcctcatttaagatggagcacatcagccctgagctagtcgctgatcagcacctatgggagctcatcc

SEQ ID NO: 494620 - DNA, 457 bp, Homo sapiens
tctgccgggctcttctccctctgccttctaattgcttggaaacagagctgacggcagtgggaacagctcagccactgctggtctcatgactggaggcttttgtttgttcacagaatcatatttttacactctggcttccgctaatatatgccgcagactgagctctcccttgctgaagattgagtttgggagggtggggagttgattcctgggtatatagagtcatcgtggagcctatcaaaagccaagcaggggatatattcaccaccacaaaragtaataatagccaggctcagggtttattttctggcggttccctcctccaataggcctgccgtgttccagtagctcatctgctgaagaaagcttctgctgggaaaattaagcggctcctcatttaagatggagcacatcagccctgagctagtcgctgatcagcacctatgggagctcatcc

SEQ ID NO: 494621 - DNA, 623 bp, Homo sapiens
aggatgggggtggaagcagaggcgatttctcattgctcagcccaagatggtagctgaaggagccccaggcacaaggagcagcagccatggccccctgagcaccagcaccgcagatccctggcctgcaaatcgattctgctttctgtwtgatgggcttgttggcttcagcttggggaggaaaaacaagctctttcccaaggagaggagccgtgtcagaggtggctgtggtgcctccatccctgccgcacaccccatccccacccagccctgtgagagatgctgggtcagcgggcaggacaccattcttagcctctcccctggccctagccaggcctctgcctgcctggtggtgtggggcgaggcaggccaagatgcctgggttgaggggctcctgcgggcagttgtctggccctgtgcacctgctcaccgcggctgctcctggtccaatgtgtgtggccctggatggatgtgtgcatttggtggggtgagagagtaggtaagagtgaaaacaggaaagcaaagggcagcatccacaaacttggaaacatcagcctgctgtggaagggacgctcaagccccttgtccacagtattgctgagctctagaaggggaggaattgggag

SEQ ID NO: 494622 - DNA, 438 bp, Homo sapiens
ccggctcagcgccatgtccacaagactctgtgatacacctctgtggggttcaatatgaggacaagaggatgggcatctgagcagccacttcctgcatgtggtgaggcagcccaacacagtgggcttttccgttttgcagcccccacagagccagcccctccaagggagcacgtttcattggcagcagtgctggcagtggcagctaagcccttatagggcaccactcctcccaacctcagcaacctcctctctcctcctgtggttttcctaataaacacctttaaaatatttatgaaggcagcttcaatgaagtaacacgacattgatttaaaatgattttcktctaataggtagcttgagcatgggctccatttcccaagctcctaagggcaggcccatcagggtgaacccccaggatgggcattcaaggctctccat

SEQ ID NO: 494623 - DNA, 654 bp, Homo sapiens
tgctgccagcaaactgccactggtgacatctcacactcagtgctgatgaaaattactgaagttagagagaattgaagactgtcttctcatggaggaagaattcattagaaatcagaaataaatgaaaccattagaagaaaagcaacagaaaagattaaaagtggatgatctgaggggggaccccaatagcagtaggaaccttggaagagatcacaatcatgccattattctacatctgtgggctcagaacactacatcagcattctttcatttgtagacaaggatctgctggaacctggctgctcggttctgctcagccacaaggtgcatgcagtgataggggtgctgatggatgacacggatcccctattcacagtgatgaaggtggaaaagactccccaggagacctatgctgatactgggggaaaagttggayaaccaaattcaggaaattaaggaatctgtgaagcctcctctcacccaacatgaatattatgaagagacgggtgtaaagcctcctacggggtggggggtcattctctatggtccacctggcacaggtagaaccttgtagccaaagcggtagcaaaccaaacctcagccactttcttgagagtggctggctctgaacttattcagaagtacctgggtgat

SEQ ID NO: 494624 - DNA, 645 bp, Homo sapiens
gctgtctcaccaggtttataatctccttctcctctgaggatccttttgtctttctcctaagtagcaaaacaaccaatacataactaacagtaaaacgaatgttttcaacacatgattctcctcactgcataatatcatctcagcaactctagccatgtaaatgtgtctgtttacagtttataaatctccagtctactctttgagtaatctctatttgccttttctattcataagcataacacataatacctttgcctgtttatctaacagttattactgcttgatgtttcttaatgtttcatcgtggtgagaggcattgattggatcttccttcaacayagagatgagccaaaatttgctaagtgtatttatttataatttatattccttatagttccaaaatgcatttaagatcatttagatgaaaacatgtagttagcttaattaaaataaaaacaaaagttaaaaatatcttttagagttaggataagatagctattgtcacagagcataaaatttggcttgaacttttttggcaagccagggaaaacagaaagtagtacaaagctctcattatgtgatcaaataaactacatgagttctttcctcaacaaatgaatgtctgtaacaaatatttgtgaagga

SEQ ID NO: 494625 - DNA, 609 bp, Homo sapiens
gaaaaagccaaggtatttcccctgtttcatctgcttatyagagacattgcagcagtggtctggtctcttctggggttccacttccaccaggaagcctctccctttgcagtcccagttcctaaactctgctaacatcacttaacgtctcagtcactttagccctagctagaaatatcttcctgatagtctaaggcttgcctcacccatttgcccattttgctctgtcaacacctttggagcaagtttctcatattaaggttcatctcttgaactgcctggcatagattctgttttcctgcctgaaacttaaacaatatagctaccattttatatgcacctttcttagtttctgctactctggttaacaatatttgaagttaaagaatcttttggttcagccaacttcctaaacaaggaagagcttggacagtagtgtactggtaactgatatttaacaattagttctccaagaaagaaaaactttgatttgtagcatttgccaatttccatggtgcaactactcccatcatggctgatttcaagctaccagcataatgtcactgaatatggatttggaaagagacacacaataaacttgagctgctgcag

SEQ ID NO: 494626 - DNA, 603 bp, Homo sapiens
catcagcacagataccaataccagcctgccctgagtggacagtaaccggcctgcaaatggcaaagctaggaaggaaaggaggctggtggcattgcaagtctgtacctcaaaagaggaggcattggggtggcaacattgccaatgggctagaagtaagagtgagagccagaagaatctaccccactgtctgccaggtataccacagaagccaagcaaactgcttctttcctggggagggtctctgtgctccaagaaccatgctcatcctagcaacaggaagctctttagtgccagcctgttgcaatrgacttcagtggctatttctcctgttaatgccttttctgttttgctctctcaagatcttaactgcaactgcccctattactccaactgagattacaatttttgagaaacctgcaaacaggacagctttagagtgtaccccaaatacaaggacacagaatcaaattccatgaacccctataaatcatgaatccactggaatggaagccccatgggggctagactttgctgtttgctcactgatgattcttgagtgataagaaccaggcctggcacatagtaggtaccttctatgtgtgt

SEQ ID NO: 494627 - DNA, 603 bp, Homo sapiens
catcagcacagataccaataccagcctgccctgagtggacagtaaccggcctgcaaatggcaaagctaggaaggaaaggaggctggtggcattgcaagtctgtacctcaaaagaggaggcattggggtggcaacattgccaatgggctagaagtaagagtgagagccagaagaatctaccccactgtctgccaggtataccacagaagccaagcaaactgcttctttcctggggagggtctctgtgctccaagaaccatgctcatcctagcaacaggaagctctttagtgccagcctgttgcaatggacttcartggctatttctcctgttaatgccttttctgttttgctctctcaagatcttaactgcaactgcccctattactccaactgagattacaatttttgagaaacctgcaaacaggacagctttagagtgtaccccaaatacaaggacacagaatcaaattccatgaacccctataaatcatgaatccactggaatggaagccccatgggggctagactttgctgtttgctcactgatgattcttgagtgataagaaccaggcctggcacatagtaggtaccttctatgtgtgt

SEQ ID NO: 494628 - DNA, 654 bp, Homo sapiens
tgtaggtccaaatggcctaggtttcaccatgtgacaaaagccaagtcacttagcccctttgtccatctctaaaaagcaccaacctggggttcatgtgaggattaaatacaaatttaaatgattaaagagcttaaaacaggccctggcacgtagtaagtgttyagtaaacctttactaggatgatcatgatgagcacataaatgttcgggtcactgtcattagatacttccgcctaattaatcttcctcagacccagcacaccatggaactgcgatggaagcgtgcaaatggagatgaaggatcactcataccactatgctgagcaagtcattgtaaaaggaacagaaggtgtcctttttcctagcttgttagttcccttataccacacaaaggaaagagcttgaagacagatgcggaggttaaaaacactctgccccacaaaggctctctctctctcacacacacacacacacgcacgcacgcgcgcacacacacacacaccctgtctcttcctctcataaatcaccactagttcactccctcattcctacatctgtacccagagagcctccagccctccatacaagacagggatttccagactctagtccttaagcttggtcaaatgagcagacccagctccaagaataaagg

SEQ ID NO: 494629 - DNA, 654 bp, Homo sapiens
tgtaggtccaaatggcctaggtttcaccatgtgacaaaagccaagtcacttagcccctttgtccatctctaaaaagcaccaacctggggttcatgtgaggattaaatacaaatttaaatgattaaagagcttaaaacaggccctggcacgtagtaagtgttcagtaaacctttactaggatgatcatgatgagcacataaatgttcgggtcactgtcattagatacttccgcctaattaatcttcctcagacccagcacaccatggaactgcgatggaagcgtgcaaatggagatgaaggatcactcataccactatgctgagcaagtcattgtaaaaggaacagaaggtgtcctttttcctagcttgttagttcccttataccacacaaaggaaagagcttgaagacagatgmggaggttaaaaacactctgccccacaaaggctctctctctctcacacacacacacacacgcacgcacgcgcgcacacacacacacaccctgtctcttcctctcataaatcaccactagttcactccctcattcctacatctgtacccagagagcctccagccctccatacaagacagggatttccagactctagtccttaagcttggtcaaatgagcagacccagctccaagaataaagg

SEQ ID NO: 494630 - DNA, 566 bp, Homo sapiens
ggtagggaacattaaatgtagcgaamcatggtaatgaattaacccttcatcctgaagggtttccaggaaataaacatgaattcagccatgaaaaaaaagagtataaaagtcaattatatttcaatggcttccaaataataaaatatatttttaagaacaagtcaaacctaacatgatggctcacacctgcaatcctagtgacccaagaggttgaggtaagaggatacctctggcttctcctaaacttagaaaataagtagattaaggaaaagaaggaaataactaaatctgctctcccatgtggccttctagctcctgccctatctttttaccctcacatgctcatctactggtccacctcccactcactcatcagcccactggcatctgacctctatcactactacttcacctaaagcaccattgccaggatgcacatggtccctttatgtagagtccacaggagacttcagtcagtatcttactggatctctatcctgcattacacacatccttgaaaccctgtcttctccgttatccagcactccacatctccccattcttcc

SEQ ID NO: 494631 - DNA, 566 bp, Homo sapiens
ggtagggaacattaaatgtagcgaaacatggtaatgaattaacccttcatcctgaagggtttccaggaaataaacatgaattcagccatgaaaaaaaagagtataaaagtcaattatatttcaatggcttccaaataataaaatatatttttaagaacaagtcaaacctaacatgatggctcacacctgcaatcctagtgacccaagaggttgaggtaagaggatacctstggcttctcctaaacttagaaaataagtagattaaggaaaagaaggaaataactaaatctgctctcccatgtggccttctagctcctgccctatctttttaccctcacatgctcatctactggtccacctcccactcactcatcagcccactggcatctgacctctatcactactacttcacctaaagcaccattgccaggatgcacatggtccctttatgtagagtccacaggagacttcagtcagtatcttactggatctctatcctgcattacacacatccttgaaaccctgtcttctccgttatccagcactccacatctccccattcttcc

SEQ ID NO: 494632 - DNA, 242 bp, Homo sapiens
ctgtgggctgggagagtcagggtgctctccctgtgaagaggaggcccatccacagaccctgaaagttgattgggcacagtacccagcacccacctgggkggtagtggtggtgacagtgatggtggtggtggcgagtgatgtggttattgatgatgattggtgattgatgatgatatggttgttgtggttggtgatggtggtggtggtgtggttgttgttgaatgtggttggtaatggtggtg

SEQ ID NO: 494633 - DNA, 458 bp, Homo sapiens
agcttttttaatatttattcggagagcttttgcattgtaaataaatgggtctacacaaagagttctctttgtctggcaactacatacaaaggcgtttggggctcccttccctctggggatcgccagctctctccccgggtctaacaaatagctcggctcccaagccccgatcccggcctgcaaagcgagcgcccggccgccagggcccggagagtgctctggcgagggggctgcgagcgcasgggtcaggggaggggctgcccgggctggactagggacgtgggggcccccagccccggccggcgcctcccgagccccggagggcgccgggcgggacaaagggaaagaaggaaagggagggaggtcagaaacctgcagcttcaaaggcgccgaaggccggagaggggccgggggctgcgcacgcgggggtgccaggcttcctggcggcctccagggag

SEQ ID NO: 494634 - DNA, 400 bp, Homo sapiens
gctgctgcaggaagcgttgaggaccgggcgggcccgccccggggaggggcctggctggcttgtcacagacaaaggagggcttggctggggcagcagccactcccaggcccagggaccagactctcaggcagcctggggccgggccccacctgctcatgggtcgtcgcccgcgttcctgcaggttctcgatgtgcggccacagtccagccggtacctcccgcccggcacgcgggtctgcgcctactggagtcagaagtctcgatgtctgtacccgggcaacgtggtccggggtaagttgcacccaaagcgggggctggggcaggcccctctgagacccacaggctcatatctgcccccaacagcctggsttccgaggctggcgagggcagaaccagctctc

SEQ ID NO: 494635 - DNA, 634 bp, Homo sapiens
ggttagacccacagttttggaaccttggatatgaagaaccaactgcatactgttggttaatcattagtcctttgccaggaaggggaacatcacacacttgggccatgtaccctagaacttaaagtataataaaaatatatatttaaaaaaaatctttagtgctttgcaaacatataagcactcttccatgaggacaaaaccaaaattacaaacagcttcctaccaaagttttcttcctccattcacacccctgccctaaatttcccactcagttcattgaacaaacctttattgagctcctgctgtactacaggctctgagctaggtgcagggggcagtgttgaccaagccagacacagtctctcctattaaggagcatttcatctacgaattgattagttcaagtcarcttattaccacagcgttctctaaaagctaacaaaaaattacatttttaaaactttcttttataatcggccctaatccctaggtatataagtccaagtataaagatgtaataaaaaatcttatcatggaagttatgtcttgttaaataacggaaacactgctacttaaaaaccatgaaagttaagatcacattcattcgacaggtcttaactgagcacctactgtg

SEQ ID NO: 494636 - DNA, 634 bp, Homo sapiens
ggttagacccacagttttggaaccttggatatgaagaaccaactgcatactgttggttaatcattagtcctttgccaggaaggggaacatcacacacttgggccatgtaccctagaacttaaagtataataaaaatatatatttaaaaaaaatctttagtgctttgcaaacatataagcactcttccatgaggacaaaaccaaaattacaaacagcttcctaccaaagttttcttcctccattcacacccctgccctaaatttcccactcagttcattgaacaaacctttattgagctcctgctgtactacaggctctgagctaggtgcagggggcagtgttgaccaagccagacacagtctctcctattaaggagcatttcatctacgaattgattagttcaagtcagcttattaccacagcgttctctaaaagctaacaaaaaattacatttttaaaactttyttttataatcggccctaatccctaggtatataagtccaagtataaagatgtaataaaaaatcttatcatggaagttatgtcttgttaaataacggaaacactgctacttaaaaaccatgaaagttaagatcacattcattcgacaggtcttaactgagcacctactgtg

SEQ ID NO: 494637 - DNA, 544 bp, Homo sapiens
atagaacttgtgatggcagtgatgggggggtgtggccatgtggatgtcctaagggaggggaacccagcaaaggagaaggggggctagtgaccagcttgcagggctttaagcctctgtgcattctccccagtgcctagcagaagtccttgcccatggatcaatttgacagctaagaataaagtgtccatgggtcaccaggcagaagtctgagctttgggaaggatagcaccaagcctagcaccctcacagtacccacaatttccaccaaagcatggctggctccatacttctggtgcttgggtgctggcaatgatgacttggaagactgatgcagatgtatgagtggatgtgattgtccaggaagagtgataaataaggagaaaggggccaaggaaagaaaactggggcttccacatttaaagagaaaaagaggtggcagaggaggctgggaaggcacggtcagagatgcaggagcaaacccagtgagatggtggcatgggctgggatgrtttctaggaggcagtggccctcagggtcaagtgca

SEQ ID NO: 494638 - DNA, 508 bp, Homo sapiens
agagagtggaaccagagttagggaacttgtcttgaagctgcaattgcagggttttgcaccgagtgttttaggaggtggcttgtgtggggtggtggtgagggggtgctgatgagattttagaggaaggttttgagcctgggcactgctactggcttccccttttgttagaacctggccatgcctctgaacatggcttctcttctctctgtggactgacagcacctgagggagggcagggaacaaccagggaggccccagcatgggaacagagaagagagacaggcagccctgcctgtaccagggacctcttgaagactgtgtggatggtccctgacttaggattgtttgatttaggattttttgactttagatggtacaaaagtgatacacattcagcagaaactgtactttgagtttttggaattgggctacatttgttgatattgttttttctattkcaattaagtctaatagaagagatgttatattttggttgcagtgaggtttg

SEQ ID NO: 494639 - DNA, 666 bp, Homo sapiens
aaaaagtaaaagatgacccctagaaaattaacaatggatatgaatgggtgattcatagagaaagaacctgtatatttataaacctatgaacagacgttcaagtgataatcagagaaagaaatgcccctttaagtaatgagataatattttataatcatcgtgctgaaaaaaacatcaagtctgatacaccaagggctggggaggatgtgggaaaatgagaactcttacacattgctggtaggattgtaaattatttcaaccttttttggagaataaactattgctatctaggggagttgaacatgtaccttataacccaggaattccactctcatctatatcctagagaaactctcacactagtgcacaagtaayagcaaatgacagtttctttgtaggggaaaaagtggaagtaacctaaaatgcccttcagtaggtccatgctatgattttctatggtactttctcttgtttgaagcattttatcccctctgtctcccccactctccctcttcctttccctctctctctctccctctctgtctggatctggcagggtggtagggtggtgggcaggccccagggctgggatcaatgtaggagagacgctggaaaagcagagtagggaaaacacagctacaaggaatgtgcagagaagcctctgca

SEQ ID NO: 494640 - DNA, 666 bp, Homo sapiens
aaaaagtaaaagatgacccctagaaaattaacaatggatatgaatgggtgattcatagagaaagaacctgtatatttataaacctatgaacagacgttcaagtgataatcagagaaagaaatgcccctttaagtaatgagataatattttataatcatcgtgctgaaaaaaacatcaagtctgatacaccaagggctggggaggatgtgggaaaatgagaactcttacacattgctggtaggattgtaaattatttcaaccttttttggagaataaactattgctatctaggggagttgaacatgtaccttataacccaggaattccactctcatctatatcctagagaaactctcacactagtgcacaagtaacagcaaatgacagtttctttgtaggggaaaaagtggaagtaacctaaaatgcccttcagtaggtccatgctatgattttctatggtactttctcttgtttgaagcattttatcccctctgtctcccccactctccctcttcctttccctctctctctctccctctctgtctggatctggcagggtggtagggtggtgggcaggccccagggctgggatcaatgtaggagagamgctggaaaagcagagtagggaaaacacagctacaaggaatgtgcagagaagcctctgca

SEQ ID NO: 494641 - DNA, 666 bp, Homo sapiens
aaaaagtaaaagatgacccctagaaaattaacaatggatatgaatgggtgattcatagagaaagaacctgtatatttataaacctatgaacagacgttcaagtgataatcagagaaagaaatgcccctttaagtaatgagataatattttataatcatcgtgctgaaaaaaacatcaagtctgatacaccaagggctggggaggatgtgggaaaatgagaactcttacacattgctggtaggattgtaaattatttcaaccttttttggagaataaactattgctatctaggggagttgaacatgtaccttataacccaggaattccactctcatctatatcctagagaaactctcacactagtgcacaagtaacagcaaatgacagtttctttgtaggggaaaaagtggaagtaacctaaaatgcccttcagtaggtccatgctatgattttctatggtactttctcttgtttgaagcattttatcccctctgtctcccccactctccctcttcctttccctctctctctctccctctctgtctggatctggcagggtggtagggtggtgggcaggccccagggctgggatcaatgtaggagagacgctggaraagcagagtagggaaaacacagctacaaggaatgtgcagagaagcctctgca

SEQ ID NO: 494642 - DNA, 471 bp, Homo sapiens
tgctaacatggacctgtaagctgccctgttaccaaggcaaagaggagcggactctctccctgctcccccaccttctaatctcatggcccttaccctagcagtgctcatagagagctcatggccacttacctatttagtcttccttgcagtggacattcaatctattttattatgtatttatttttgagatggagtcttactctgttgttcaggctggagtgcagtggtgcgatctcagctcactacagcctccatctcctgggttcaagtgattctcctgcctcagcctcccaagtagctgggattacaggcrtgcaccaccacacctaatttttgtatttttagtagagacagggtctcaccatgttggccaggctggtctcgaactcctgacctcaaatgatccttctgccttggcctcccaaagtgctgggattacaggcatgagccaccgtgcctggtccctttcag

SEQ ID NO: 494643 - DNA, 466 bp, Homo sapiens
agccttagaacttgtttgggagtcaagaaagttatcaggtgrcttgttgcctccatttctgtatctgtaaaatggattttacttttcaacctctcttccagaggagggggtgccacgtgcaggaccgagagaatatttgctacatgtttggagttttttaaagaaaaaccaaaggggactacaaggcatttattcatcaaatacgaaaacctttcattcccctccccaccccacctccaagctggagaccttggctataaagaactaatgtaataactgtgttgcaatgtgtttttcctctggtttcttattcctttggagtaagaggcatggacatttagacctcaactgaaggcattgattggaagagtttctcccagagttggcccacttggaaaccaggtaatctgagctggtggaaaaaaggcaaaaacccacagcttgttagcacacacaaagcttttta

SEQ ID NO: 494644 - DNA, 438 bp, Homo sapiens
gtgggcatgtgcttgctttttctcagagtcaagaatctgttaggctgggagacgggagasggagggaaatttgccaaaatgggaaaggagaagctagagacaagtggaatgtactaagaatgggctggagattatcagaagctgaggcctcctttcatggaaacctggctgttgggtggttgatgttttcccaaactcctaactcctgtgattcaggactgtggctttagtaattatcaaatactactttgcccttgtgtgtaaacggccaattacctcgaactgtcagaagggcccagaaatctcaagatcagttccccaaaatcagggaatggactaacccagttttgaaaagttccaggtgtagatctggagacagcatggctttgcatgtgtatatagacgtgtaggggaggaatggagcctcaatttattttt

SEQ ID NO: 494645 - DNA, 438 bp, Homo sapiens
gtgggcatgtgcttgctttttctcagagtcaagaatctgttaggctgggagacgggagacggagggaaatttgccaaaatgggaaaggagaagctagagacaagtggaatgtastaagaatgggctggagattatcagaagctgaggcctcctttcatggaaacctggctgttgggtggttgatgttttcccaaactcctaactcctgtgattcaggactgtggctttagtaattatcaaatactactttgcccttgtgtgtaaacggccaattacctcgaactgtcagaagggcccagaaatctcaagatcagttccccaaaatcagggaatggactaacccagttttgaaaagttccaggtgtagatctggagacagcatggctttgcatgtgtatatagacgtgtaggggaggaatggagcctcaatttattttt

SEQ ID NO: 494646 - DNA, 301 bp, Homo sapiens
taggcccttcttgaaggtccaggaaggggctgtgggcaccatcctagaaaaggggtctggggctccatggagtcctcctgcctgcaggagcctcaragggccctgggtgaggccagccaaggtgctctgtcctgtccctggcccttgagtcctgcctcacctgctagctttttccaccaagaaatcaggatggcaaccgccaatgcagccccactagaggaaggagatcaagagtgtcaaggcccacacccatcttggcacattaagtgacccattgattaactagtcaataagttagagc

SEQ ID NO: 494647 - DNA, 561 bp, Homo sapiens
aaacattgttttaatgtgtacagagttgaattattgtcatataaaattatgatacataaaaactaaaaacacaattaattaatgtgacatagcctactgtaaaacataagccactaaaatataaaatggtggaacaaaatttaacaaaaaaaattaaccaaaaaatattgaatcaacatagtgtactaccaaacaataattattctagatagccatgcattttaactgtgactgcacatttataaagagcacatattttggtatttttgtttaatttcaacttttcctataggttcagaggccacatgtctaggtttgttacatgggtatattaygtattgctaaggtttgggataactgctactactactcagatagatagcacagtaccccataggtagcttttcaggccttgtctctttcttcctttcctcctctagtggtccccagtgtctattgttttcatttttatatccttgtatactcaatatttagctctcacttgtaagtaagaacatgcagtatttgcctttctggtttttttccattaatttacttaag

SEQ ID NO: 494648 - DNA, 537 bp, Homo sapiens
tgttgctacaaagaacacaattttttttggctgtgtagtatttcaatgtgtatataggtaccacatattctttatccaatccaccwctgatgggcaactagagtgatttcatgtcattgctgttgaagacaataaagtttgaatcactggtatacagtgaaagcaataacattttatagaaaatgcattataatcattcataaaaagctttgatgagaaaatatgaataggcacttaaataatactagacatacttattatgtcattaatgtatagctgctatttttgcacaaaatgtaaaggcaaggcaacctttggaagcaaaacattacattactaaaataatataaacaatataaatacagtacaatatggaataaaataaaataattagaaataaatttatacaatcacatagacaaagtttgagaaaagttgatgaaaatgctagtatctttttgtatgcagtaaacttaaacataaatcaaagattataatatatggtgtgcctattaattatctagtttaccttttata

SEQ ID NO: 494649 - DNA, 506 bp, Homo sapiens
cttaactacaggaatccttctatcaccttcgtctttcatgtttgagcctcattcctctcctcacccttccatggrtctttagcttggaatttaagactttgaactaataatgttcattttatttcccccgtcgtatatcttctaactatagaacaagaaactgctattagagcagtcatctcctgagtctccaaatattgtatcaaaaatcttgacaccaagtacttttcctcctttcctcagtaatattccaacacttttccaaagtccagaagtaaactacctgtttgactttcattgtgattttgataaccttaatacctgactcctaaaatagtagtatagcacaataattaaagtatttaatgcaagactcactaaggctgaaaacatttgtgattattgttattttaaatatgttggacaatctcacattaaatacaaacaaaaaacagcaacaaataagctaataaaaagagactacttatcattacactttctcttat

SEQ ID NO: 494650 - DNA, 506 bp, Homo sapiens
cttaactacaggaatccttctatcaccttcgtctttcatgtttgagcctcattcctctcctcacccttccatgggtctttagcttggaatttaagactttgaactaataatgttcattttatttcccccgtcgtatatcttctaactatagaamaagaaactgctattagagcagtcatctcctgagtctccaaatattgtatcaaaaatcttgacaccaagtacttttcctcctttcctcagtaatattccaacacttttccaaagtccagaagtaaactacctgtttgactttcattgtgattttgataaccttaatacctgactcctaaaatagtagtatagcacaataattaaagtatttaatgcaagactcactaaggctgaaaacatttgtgattattgttattttaaatatgttggacaatctcacattaaatacaaacaaaaaacagcaacaaataagctaataaaaagagactacttatcattacactttctcttat

SEQ ID NO: 494651 - DNA, 624 bp, Homo sapiens
accattaattccagaactcagactagatgacagggcattcaagctcatgttcaattctttttctactttaccttatcaattttattagaaagttagctcagatggcaccaatgaagatagtcaatcagaaaaattaatatttcagtactatatatcaattagtattagtaattatatgcttgtggtaaaattttaaaaatgataattacttatttggtagaagacaaaaggagataattatggagtgaaaaacttttctgatataatgtgtacttcaaataaactaattgtatcttcagtaaagtttatttcttgacattacaagtctgtaaataaaatcagtgtgttgactttttcatgtctcaaaagagcattgaggggcagtacttaacatcaaatttttatttatttcttataatctgtagacaatttcttacttaaaagmttttaaatctagagaaatgtttctttttttcatgggttttattatgtttaagtcatatttacatgagatttatgtattctctctagttacattttcatctgcatattttttcacatgatatatatatataagacaattattcaaaattctataagaaacaataatacattttataaata

SEQ ID NO: 494652 - DNA, 495 bp, Homo sapiens
atgctgatgatgtatattcatattcaataaaatagtatgtaatgcacctccaaatacctacaatgcctccactgatacagaaaatagtataacaaggaaagtggtcagtgcctttttaatataaattcagtactgtatacaaccgttaaactcttgtgaattctgtgtcatcaaggaaaaaagatagccttaacttactgctagaaaactaggtgagttttgagctaagacagtaataaagctatcttctatacaaaatagcayaatacaacaataaaagcatggatacaatttcctccgtactaaaaatttccaaaaaattgtgaagtcacatataagtagggattaaaaagaactatggaaaaatgaaactcttaaataagaggttaaatgagaaaaacgatttgtgatgactcaaatggttaatccttatctctcaattcacatgtgggtgtggtgaggcacccataagagtaaagagtatgtacttatact

SEQ ID NO: 494653 - DNA, 495 bp, Homo sapiens
atgctgatgatgtatattcatattcaataaaatagtatgtaatgcacctccaaatacctacaatgcctccactgatacagaaaatagtataacaaggaaagtggtcagtgcctttttaatataaattcagtactgtatacaaccgttaaactcttgtgaattctgtgtcatcaaggaaaaaagatagccttaacttactgctagaaaactaggtgagttttgagctaagacagtaataaagctatcttctatacaaaatagcataatacaacaataaaagcatggatacaatttcctcygtactaaaaatttccaaaaaattgtgaagtcacatataagtagggattaaaaagaactatggaaaaatgaaactcttaaataagaggttaaatgagaaaaacgatttgtgatgactcaaatggttaatccttatctctcaattcacatgtgggtgtggtgaggcacccataagagtaaagagtatgtacttatact

SEQ ID NO: 494654 - DNA, 570 bp, Homo sapiens
agagataaaggtcccacctagctcactgaaccagagaggtctaatgaccttctgaaggtcatccagcatggtagtggcagaagtgggggcagtcagttcacctgtttcctaatctgccatactccaggctcctgaccactgccaagaatttatttcctcaccattcgctggctatacaaattgtaggcatctgaattcccttgagctctaaaattattttaacatttggagcacttgtaagcctttttcccttttagagtcaggtaattcaaagttcttatagctataaaataagtagaaacaaaaccctaccagtaaaactgaagtaagggtttgctccaatgcattaggcacccaaaaagcctaacattcaaccgtaatatactggaggtcagaatacgtattatttagagttttaacttttgttaatctagatgcagggttgcctaaatcaaactctggcctcycatactactcactggccactccttaaatcttttaatcctgaactaaaagaaactgtgcttaacctagttccaagcatgttgactacgcagaaagaaaatacac

SEQ ID NO: 494655 - DNA, 670 bp, Homo sapiens
tgttgcgaggagacgtcgggcagaaaaagcagagggagactacagcaactgtgcacacaaataatagagtgctttcttactaatggcaatttccctttccccttatggagaggttgaagactagataataaagccagaagacagtgaccacagcctcccattcactcatgttcctaccttccctttgcagaggtggttaccagatggcctggcattgggctcccgtcaagtcctgcctgaaaagtacttcgagcaccaccattcccttctgaccaacatttatctacccctcagcaatgttttctcctcttcctctttctctctctctctctttctcttttttgagacggagtttcattcttgttgcccaggctggagtgcaatggcaggatcttggctcactgcaactgccgcctcccaggttcaagcgatttctcctcctgcctcagcctcycaagtagctgggattacagccatgcaccaccacactcggctaattctgtattttcagtagagactggggtttcaccaagttggtcaggctggtctcaaactcctgacctcaggtgatccacccccctcagcctgccaaagtcctgggattacaggtgtgagtctgagtcaccaggcctggccctccttgtttctttctatacctacttttgaagac

SEQ ID NO: 494656 - DNA, 627 bp, Homo sapiens
taagtggcttcagattttctggcacgctagttctacaccacacagagcacaacaataaatcttccttttttaaagacgctgcaccgagagaacctttgtttcatacaactaaaggaaactaacataacaattggctacttaaagtttctggatttctgttttgctttctccaatagtgcctcgcacacagtaaaagctgagtaaatatttgttgaaagcatgaataatgcaatgataacagtgttatccatcatataccttgttgatctgaattaatgtcttacattagaaaatcagttgtgttttgagaaygaaaaacgattttatttttaaataatttttaaaaacattaaaagtaaaggaccttttacaaaatatgtgataacactgtaataaacacatccagaaaataaattaccacggcaacacaaatgttaggagtaccagatgagatagaacatttattttaaaagcacttaagaatttacagtcatattataagaaactagctttgctaatgaatgcataaattctttgtgtctgattttttgataaaacacagtgaatatgacttagagaaaatagcagccacagatacagctaaaatgtgaatgaagctggaggcag

SEQ ID NO: 494657 - DNA, 638 bp, Homo sapiens
gaggaaccagccactaagtggcttcagattttctggcacgctagttctacaccacacagagcacaacaataaatcttccttttttaaagacgctgcaccgagagaacctttgtttcatacaactaaaggaaactaacataacaattggctacttaaagtttctggatttctgttttgctttctccaatagtgcctcgcacacagtaaaagctgagtaaatatttgttgaaagcatgaataatgcaatgataacagtgttatccatcatataccttgttgatctgaattaatgtcttacattagaaaatcagttgtgttttgagaacgaaaaacgatttyatttttaaataatttttaaaaacattaaaagtaaaggaccttttacaaaatatgtgataacactgtaataaacacatccagaaaataaattaccacggcaacacaaatgttaggagtaccagatgagatagaacatttattttaaaagcacttaagaatttacagtcatattataagaaactagctttgctaatgaatgcataaattctttgtgtctgattttttgataaaacacagtgaatatgacttagagaaaatagcagccacagatacagctaaaatgtgaatgaagctggagg

SEQ ID NO: 494658 - DNA, 440 bp, Homo sapiens
aaaagaggtttaattgactcacatttctgcaggctgtacaggaaacatggctggggaagtctcrggaatcttacaaccatggcagaggggaaagaggaaagaggtacatattacatggctggagcaggagaaagagagagaagtaggaggcactacacacttttaaacaaacacatctcatgagaactcctcactgtcacaagaaaagcaatggggaaatctgcccctacctgccaccagacccctcctccaacactgggtattacaatttgacatgggatttatgcagggacataaatccaaaccatattacctgggcatctgtccagtcctcaccatcttcctctgccatccaacttcaacctcccatcatctcgcatgccaccagcttatctatattggatacctcttgcatgtaactgtccttcactgagtctcag

SEQ ID NO: 494659 - DNA, 462 bp, Homo sapiens
tggcttaaaaataatcagtcttcaggcctggcgtggtggcttcatgcctacaatctcagcactttgggaagctgatgtgggtagatcacctgaggtcaggagttcaagaccagcctggccaaatatggcgaaactccacctctaccaaaaatacaaaaattagctgggcatggtggcacgtgcctgttaattccaactacttggaaggctgaggcaggagaattgcttgaacccaggaggcagaggttgcagtgggccaagatctcgccattgcaccccagcctgggcgacagagcyaggctctgtctcaaaaaaaaaaaaaaaaaatcttcaaaaatgaagaagattagaggccaggtatagatggaagtagaggagtatatatcctatttggtattgctggcaaatgagatttgaagcaggaaatggaaaacaaagcagggttccacttatcatctagag

SEQ ID NO: 494660 - DNA, 638 bp, Homo sapiens
tttctcaccacccttcccccaacagcagaactgtattccacactgcactcatttaaaaatgtaatataatcaaaggaagcattattcttacaaaggctattaaaagagctaagtaaattcatacagtataataaaaatgatttatttactatgaggaaaaaatggtagggaaaayagtgccgctcagctccgtctgcaaagtcgggttcccatagaatattaatcttcattgattagctaggaagaaaagcaaagctttacactttcacttttacggtgtaagttaattaaaatacttcagtttgacaaaggcccatctgatcacactgaactccttaatactgagcattgcagaatattctttttgcttcttgaaatcatcaatttatgtccaacaacatctgtaggaaaatgagattggccacatgtctcgacatagtgaaccacagttatttggcttttcaaaaacagtattttttcttaacctttatgtgtgtgtgtgccatgcccttctaggagaaaaaaacaacaaacaaatgaagacttctttccagaaatactgtacgatacacaatttcagggagagcatggatgccctggtgtccttttactacccaaagttaaaaatcttaattcta

SEQ ID NO: 494661 - DNA, 638 bp, Homo sapiens
tttctcaccacccttcccccaacagcagaactgtattccacactgcactcatttaaaaatgtaatataatcaaaggaagcattattcttacaaaggctattaaaagagctaagtaaattcatacagtataataaaaatgatttatttactatgaggaaaaaatggtagggaaaacagtgccgctcagctccgtctgcaaagtcrggttcccatagaatattaatcttcattgattagctaggaagaaaagcaaagctttacactttcacttttacggtgtaagttaattaaaatacttcagtttgacaaaggcccatctgatcacactgaactccttaatactgagcattgcagaatattctttttgcttcttgaaatcatcaatttatgtccaacaacatctgtaggaaaatgagattggccacatgtctcgacatagtgaaccacagttatttggcttttcaaaaacagtattttttcttaacctttatgtgtgtgtgtgccatgcccttctaggagaaaaaaacaacaaacaaatgaagacttctttccagaaatactgtacgatacacaatttcagggagagcatggatgccctggtgtccttttactacccaaagttaaaaatcttaattcta

SEQ ID NO: 494662 - DNA, 402 bp, Homo sapiens
gtttaaaattgcatttcaaaagggcaataggatttagaatatgtaattaaatcagaggtaccaatacacatcaggatgaactatyaagttcggggggctttttgttggttagttggttgttcatttgcttttgattttagtagcaatgtatttgattctcacgaggtttagatgtgcgtttgctagggctaccgtaacaaagtaccgtggaccagggaaatcaaacaacagaaatttacttccccacagtgctggaggccagaagtctgcgactcaggtgtcaggggggttggtttcttctcagatcatcctcctttgactggtaggtgatcatctccctttgggtcatgtagtttgccctttgtgcgtgtctatgtcctaatctcctcttcttataagaac

SEQ ID NO: 494663 - DNA, 402 bp, Homo sapiens
gtttaaaattgcatttcaaaagggcaataggatttagaatatgtaattaaatcagaggtaccaatacacatcaggatgaactatcaagttcggggggctttttgttggttagttggttgttcatttgcttttgattttagtagcaatgtatttgattctcacgaggtttagatgtgcgtttgctagggctaccgtaacmaagtaccgtggaccagggaaatcaaacaacagaaatttacttccccacagtgctggaggccagaagtctgcgactcaggtgtcaggggggttggtttcttctcagatcatcctcctttgactggtaggtgatcatctccctttgggtcatgtagtttgccctttgtgcgtgtctatgtcctaatctcctcttcttataagaac

SEQ ID NO: 494664 - DNA, 580 bp, Homo sapiens
ggactcattttatcttacttatctttttaaagaccttagcttcaagtacagtcacattctgagttactagaggctagaacttccatgtatgacttttgtcaggacacaactcagcccatataacatgataatttagtatagttgttcctccatatccatggaccttggtgtcaagacttcctgygaataccaaagtccatggatgctgatataaaatgaggtctctgatataaaatggagtgatatttgcatataacctatgcacatccacccacatactttaaaacatctctatattacttgaatacctgatgcaatgcgaatgctatgtaagcagttattatccagaatgtttagggaatgatgacaaaaagtctgcacatgttccgtgcagacccaggtgtgtgttgggttttttttccccgctaaatatatttgaagcacagttggttgaatctgcaaatatgaaacctacagatatgaagggccaatagcattcctaggataaggctgagacatcaaaacattttaccagctaaatttgaaaagtactattctcaactctcattcccacttgaga

SEQ ID NO: 494665 - DNA, 627 bp, Homo sapiens
tctaaatgcacgttggatttgaccaggttttcgtagtcagtggcgtaatttgaaataaaagggggaggagaaaagtagtgatgtttttctttaattttacgttaataataaaacagttgtatgatttttgttataagtcaagaaaataagattttatgaaatatgaataatcaaaaagtatgtctgatactaaaccctagtctttcttctgaactcatattcttttctacttgttgggtactaatatcttatttctaccaggaaattctagggaaaatacayacgtggtagtttttctttgttttgcaattcttttacacgaaaaccatactgagggggcaaattttagttttgtagttaactgctctaggatattcaagtctcttccttgggaatctcatggcaggtcagtttcaaattgaggcagataaccatctccccatgttctctaaaccctcacttcagaaggcactctgccatctgtttaactctacattgggaagccaacttttacttttaaaagccaagactgacacctctgtgtctgccacctgagcccccatgtaggtgaactcatcattgtgtgtcaagatccccctctgcctcctgctttcagccttgtgctgc

SEQ ID NO: 494666 - DNA, 580 bp, Homo sapiens
ataattggcatgaatttgattgttgtcttatacccttagtcatttggctattggttcgttttactatgagaacattgtaaacaataccatggttcatatactatttcagtcagtggtgccttataatgtctaacatggttactgtcaggaagaagtaagcaatttttgtattccttgggattgtttattcttgaaaattttgaggtaattttaatattgagaaataacattatactttgaagtattttgtaatgagcaaacaggactgtgtaaataactccctttatttccttacactatatttgttgcagaagcaacttttataaataaatataaactttaaaacagttacaaattagcacagtgggaataattcaaaaaattmgaataagtctttggggcaaaaaaaaccttgaaaaggcccttggagtttcaggtcaacctatgcatgtacaggagccttaacaaacagctagataggaaggttcatcatttcctaattttacttctttctagaaaagaaaaagaaaagcttcctatatttctagaagttgaaggaaaattacttaacccttatttt

SEQ ID NO: 494667 - DNA, 466 bp, Homo sapiens
ttgatatgtcatgaatgagggagagaaaagggcacatttctttactgagtgagtcccagacagtgataatatgtagttaacaatgcagttctgtcaatatgattgcatgttattccacaaaagctattaggtttcccaatgataatatgcatcattttcttgcagcactgttaagtctaccttacttcagtgttgagaacctcttcagaaaggggccagctatattgccgttgctccccttgtagtctatacccaaarcctcttctcctatttccttcacaagattaaattttagtggttatttatggaacctgacataataatggacacactgtttttcttaactcatgtgtatcgttttcccacttccaagcttctttcaaataaattaattgcacttgtattagagtttgactctagagtatcaacactaagataaaatcaaaaaactttcaggttgacaaaa

SEQ ID NO: 494668 - DNA, 633 bp, Homo sapiens
taatccactgtccaagtgcttcccaggggaacacagggttgtgcctgcccacatagtttaggcagaagcaagaccactgggctggaagctctagcaagcatagcccatctggctatgagaaacaggagtggatggagttgcctgccctgccatctgggtgtttccaaggcaayaggaggctgcaccccttggcaaattcaagcagaagtgtaactgctgggctagaagctgtagcagacatgtcttgcctggcaggtgtgtgtggagtctagcaggcattgccagcagcaggtgtcacccaccctaccatctgggtgcttcccaagacaacagggggctgcaccctctagctgagtttacacagaagcaggactggtgggctggaagatttagcttgtattgcctgtctggctaccagcagaaggggtgggggggtcacgtgtccggctgtcttggtgtttcccaggacagtgggaggctgaacttgctggctgagttcaggtagaagagggatcattgggctggaaactctagcaagtgttgcccacctggctaccagtggcagaagtgagttgggtcacccacgatgccatccaggtggttcccaggacagcaggaagctgtacccaccag

SEQ ID NO: 494669 - DNA, 633 bp, Homo sapiens
taatccactgtccaagtgcttcccaggggaacacagggttgtgcctgcccacatagtttaggcagaagcaagaccactgggctggaagctctagcaagcatagcccatctggctatgagaaacaggagtggatggagttgcctgccctgccatctgggtgtttccaaggcaacaggaggctgcaccccttggcaaattcaagcagaagtgtaactgctgggctagaagctgtagcagacatgtcttgcctggcaggtgtgtgtggagtctagcaggcattgccagcagcaggtgtcacccaccctaccatctgggtgcttcccaagacaacagggggctgcaccctctagctgagtttacacagaagcaggactggtgggctggaagatttagcttgtattgcctgtctggctaccagcagaaggggtgggggggtcacgtgtmcggctgtcttggtgtttcccaggacagtgggaggctgaacttgctggctgagttcaggtagaagagggatcattgggctggaaactctagcaagtgttgcccacctggctaccagtggcagaagtgagttgggtcacccacgatgccatccaggtggttcccaggacagcaggaagctgtacccaccag

SEQ ID NO: 494670 - DNA, 642 bp, Homo sapiens
tggagctgtctcttagcaaccaactggagctagctgctctttggaaattccctgtgaactagcatatggcgttttctgatccgacctctgccaagaaaagataacacacagacatctaagagagatgagaggagggggaaactcataaatgccttctgccctctgccctctttccgccccaaaatgcacacacttacacgttatcccagaactcccagcaaagaaggataagcttttgcaagcacaaagtctccggttgtcattccagggctgctgtgccatagctacatttagaaagttgcaggagaaaataaactgattaacaagcagcgaaacctgcaaattatgcctcacttaggcttagattcaagaaaacccagaccaagcttgggattctaagagtctctccgtgcaagctgacctcatggagaaagtggcagagcttgtcccttccactgggagaccctggagttcattcaggagactggatgcccctgggctcgggctgcactgtggaccccactgtggaatcaccactcccaggctgacctcaggcaggttccagatctgttctccacttctgcaacaaaacttaccygggccatggttttatgcagaaatctgacaaggtacctatatgaa

SEQ ID NO: 494671 - DNA, 586 bp, Homo sapiens
ctgcccctctggccatgtgcatgatttctccctgtgacagaggcctctaatcattctctcttcctctgccggggtgtcagccacaaatctgggcagagtcattaaagtgtccacctgtccgagctcattgttaggaggattcatcagtggccaggcctcactgckgcctccacctggagagggggctgatcctgcagcccctttaccctttaccctcggaaagcttggggactgagcaggccagggccctgtctgggctctgaaagctggagggaaggagagagtgggagaggagcaagaagagaaggcacctgcccagcaggcatccttgagtccctcctttttctgcagcctcccctgctgggatttagtttgaagcttagcccagatatcaggaatgtgctccctggccatgcctcaatgttgagaaaaaagttcctctcagtttcaaaaggagatagctgtgtatagaattcttgcccccttctacagaatacacagtgctttcaagataatttcactgcaccagtgagataaaacttcctgctctaggaccttgaatgttcagagagggcagatatggaat

SEQ ID NO: 494672 - DNA, 586 bp, Homo sapiens
ctgcccctctggccatgtgcatgatttctccctgtgacagaggcctctaatcattctctcttcctctgccggggtgtcagccacaaatctgggcagagtcattaaagtgtccacctgtccgagctcattgttaggaggattcatcagtggccaggcctcactgctgcctccacctggagagggggctgatcctgcagcccctttaccctttaccytcggaaagcttggggactgagcaggccagggccctgtctgggctctgaaagctggagggaaggagagagtgggagaggagcaagaagagaaggcacctgcccagcaggcatccttgagtccctcctttttctgcagcctcccctgctgggatttagtttgaagcttagcccagatatcaggaatgtgctccctggccatgcctcaatgttgagaaaaaagttcctctcagtttcaaaaggagatagctgtgtatagaattcttgcccccttctacagaatacacagtgctttcaagataatttcactgcaccagtgagataaaacttcctgctctaggaccttgaatgttcagagagggcagatatggaat

SEQ ID NO: 494673 - DNA, 610 bp, Homo sapiens
agatgcgcgtgtcccatgtgagcagagggataactttgacatctgtttgtgctttgtctaaaggaatttttcttcgtgggaaaattgtaagggaggtatgtagcttttcaaaatttttgtagctatcttatttaggagtagactacatagactgggaagcaggtttgcatgacaagtttcccagcttgaatttccctttggcgtagtgattttggggtcccwagatttatttttcttccatatttactttttctttgcttaaatttatctttgcctaaattaattgtgggacgggaaagggaaaatttatgtttcagaagaaaactatggtacacttattagtttctagctctgatcttttttttttttttcagttttgctatttgcccacaatttaaactaaatcctatttttttttctggttacaggctttcagacaaatttttctcctattttttaagctcactgaaattgataatacctttttaccgaggccttgcaagctgaagtttatgcataaataaccttgtgacatacaaattacagatcacaaaatctgtcagatcgccaatgcctccttccacagtaactaaagatgcctctagttgaa

SEQ ID NO: 494674 - DNA, 428 bp, Homo sapiens
agcttgaatttccctttggcgtagtgattttggggtccctagattkatttttcttccatatttactttttctttgcttaaatttatctttgcctaaattaattgtgggacgggaaagggaaaatttatgtttcagaagaaaactatggtacacttattagtttctagctctgatcttttttttttttttcagttttgctatttgcccacaatttaaactaaatcctatttttttttctggttacaggctttcagacaaatttttctcctattttttaagctcactgaaattgataatacctttttaccgaggccttgcaagctgaagtttatgcataaataaccttgtgacatacaaattacagatcacaaaatctgtcagatcgccaatgcctccttccacagtaactaaagatgcctctagttgaa

SEQ ID NO: 494675 - DNA, 623 bp, Homo sapiens
tgaagaacctcacttgatcagaagatttaattaagttgctcttaatggagaaattccttttggttcagcagaacacctattttatgacacaagatatggycaaatccaccacgatagaagattcaggtctctgcgctgggagtatttagggtctcgctctggtaggagagaggaacgggcagcccatttccattggaatgtgacaagggctgcactagagggctctctcagcacaggcaaagggaagcagccattgcagagagggaaatcctcctgaaaaaggcacgtgagtggagtccccatggcattgataggaatgggacagttaatgtttattgagtccttgctgtgagccaggcaccatgctgagtgcttaaatacatgttctcattttattcccaccaccaccccatgagatgggaattattattattcacattttatggctgatgacactgaagctcaatattactttattggtaccaggtgctcctgggattcaagtcctggtccaactgagcccaaatgcactcttcagccttgttagccagggcctgcagtgcagaaaggtgtcagccacagggggtgcttgccaatgaaaacttgccatgctttctctaagt

SEQ ID NO: 494676 - DNA, 671 bp, Homo sapiens
tttaatcttgttttctcttttctccaacctgagtaaactcagtttttctctctagacttagatctttcttcactgaggtgctacgtagctagccctgcttgtcgctgtccagtgctgaaaacggctctcttcctgaccctggtatgtaattaagcaagagttaaatgattagccttgaaaaatcagcaaatgagtcttggctcttggaagcaktgtttttttctgcttcaaagagcctgttctctttataacctataaataatcaaggcaaaaatcataaaagtttaggccatcagcatcacttaaaatcttcataatcaaggctgttaatgaatcactacacctgcattaaagacaagagtacacaagctggtttcttacttaaatactgcttcttattagctcaagcacattgaaaatgcatgcagagtatctgcctttcttttacttcctgtaaagtaagacatataaatggcgtcatttaccatccgtcagaatactggaaaccatatctacaaaatatctgctctgtcacactttaaaggccttatagcttcaggaatctcctattcaaatataaatacttctagaaaaagaaaaaaattaagctttagcaggcatatacatattttcacatgcacacacaacctgaggagggttggtggcaccca

SEQ ID NO: 494677 - DNA, 624 bp, Homo sapiens
tgccgaggacagagatgagaggcaaagtattcatttgcccacataaccatgcccaggctgctaccttctttggttagagtgcagtgttggtaaaaattggagactctgcatgctctgacctccccctcctgctgaagtgaggggmcttctgtgtattctgccatttagaaatgctacttacaaactttgattaaaatgcatgaatggggctgggcacagtagctcatacttgtaattccagaactctgagaagccaaggcaggagggttgcttgaggccaggtgtttgacactagtgtggaaaacatagcaaaatctcatatctacaaaaatgttttaaaattatctgggcatggtggcacacacctatagccccagctactcaggagcctgagaggggaggattgctagagcccaggagttcaaggctccagagagctatgattgtgccagggcattccagcccagataacagagagagatttcaataaaataacataaaataaaatgcatgaatgtataaacaaatctggtttattcatataatggaatattattcagccacaaaaagtaatgaagtatttgatacatgctacaacttttcacttagcgtaattttcatcat

SEQ ID NO: 494678 - DNA, 563 bp, Homo sapiens
aaaaggatgctattaacaattatatcagaaccatctaggaaagattgcactttatggttacctaagaatatgaaacggagagtttgggggtttggcagtggtgatgaggaaatgcaaaataaagttgtggggacaacccagaatagaccagagtacatggcccctgttcagcctggcagtgggtgggcgttcccatcaggcattgggaaagtaaggcttgggctctggctgtggtctggggaagaagggatgcaattggaacagactggaaggggcctgaatggctttggacagtggaggacatggtgggttctgggcacagtggcaaggccagtgctgggctttaggacgatcactctgtcattggcaaggtgagtggagagaggcaccacatccaagatggagaagccgaacccagccaccagtgccgggggtgggaggggcgggggctgagcaggccatgagccaggaagtggggyacattccggaggtttgttctccaggctcctcaggcccgcagcagggggtccttcttgaatgggcagctgaaactacactgtgcc

SEQ ID NO: 494679 - DNA, 578 bp, Homo sapiens
tgatctgaagtcagttggcaattcccagttgttgtgggtaggccctaattgtatggctttagaatgcaggggcttatacctgtggaaggctgagttgtctcatttagatcagtttgcagacaagcacccgggtgtatctgcttttctggcaaggctgtgatcccacatgtaccagtctgttctcacactgctaatgaagacatacccaagactgggtaatctgtaaaggaaaggggtttaatggactcacagttccacwtgcctggggaggcctcacaatcatggcggaaggtgaaggaggaggaaaggcgtgtcttacatggtggaaggcaagagagcgtgtgcaggggaactcccctttatagaaccacgagacttattcactatcacgagaacggcatgggaaagacctacctccatgattcaattacctcccactgggtccctctcacaacacgtgggaattctaggagctacaattcaagatgagatttgggtgggaacacagccaaaccaaatcaccgcatgaccaagcagatttgttacctgctctggcttgtgaccaatagagggatggg

SEQ ID NO: 494680 - DNA, 482 bp, Homo sapiens
gctgtttgaaaaacatagtggaggtgayaaagccatgagattggatgtgatagattacttctggagggaaagagccatcattcttcccagggcagactcaggtgcagaaagaagcctgtgtgtgaagagttaaaaagccaaagtgtggggtgaggggactggcctcctcacgcctcggcagggccaggcctcctgccaatgcttatgggcccggatctcctcccaggtgaccatcttggtgctgcagggccggctggatgaggcccgacagatgctctccaaggaagccgatgccagccccgcctctgcaggcatatgccgaatcatgggggacctgatgaggacaatgcccattcttagtgtacgtgggggtagctttgctctgctgggtcacaggagatgcgtgattcactaaatataaagggtgtggatgggatgacgtctcatggctggtctctcccttagcccgggaacacccagac

SEQ ID NO: 494681 - DNA, 482 bp, Homo sapiens
gctgtttgaaaaacatagtggaggtgacaaagccatgagattggatgtgatagattacttctggagggaaagagccatcattcttcccagggcagactcaggkgcagaaagaagcctgtgtgtgaagagttaaaaagccaaagtgtggggtgaggggactggcctcctcacgcctcggcagggccaggcctcctgccaatgcttatgggcccggatctcctcccaggtgaccatcttggtgctgcagggccggctggatgaggcccgacagatgctctccaaggaagccgatgccagccccgcctctgcaggcatatgccgaatcatgggggacctgatgaggacaatgcccattcttagtgtacgtgggggtagctttgctctgctgggtcacaggagatgcgtgattcactaaatataaagggtgtggatgggatgacgtctcatggctggtctctcccttagcccgggaacacccagac

SEQ ID NO: 494682 - DNA, 554 bp, Homo sapiens
ctcacactgatcaaacagctcctgaaagagactcggacataaaaatcaaaccacaaaggcccttagagatcatctgattcattcagggttcatgcccagaaaatgaccgggatatgccaattgccacggtcaattaccagcaaagctgggatcacagcgcacgtcttcttgccaccagccaccaccaccacaccacatcacccaggatgtttgtctaggtagcagtcaccaggatgggtcaggggaagtcagtcccctcctgccttccaggctggcatgttcctcagaactcaaaatatccacccaaccatggcctgcaccacatgggcatcagggttacaaggaagcctctctgtcttgatgtccccaaggtagtaaggaaagggagagagcaggggtgagcaccgagagtgtggtctctggagtcagactcaggtttccatctggccctyacaccctggacaagtcagctgatcccaggaggcaaatggggacgccaccctctactgacgtggctgctgtgcagatgagtaaggtcatgaatacactgccaa

SEQ ID NO: 494683 - DNA, 415 bp, Homo sapiens
tgccttctgggatggattactgctcagtatctgccacggtatctccggcttcctgagggctggtgtttggtaactttcttatgcatctctgtytccagcacctgggcctgtgttcgacggctcagtagacactagagtgcagggatggagatgacacaccacccagcatggctcagagtgaagtgatttcccccttccacatcctcatctgcctccaccccatgaaagtatttatagacagggaatcgtgggagtggagaactacgtacgtagcagggttgagtagagaaagatgggaaatgtccacagacgtcttttctttgctcccctttgcggtggggattctggagatgtcagggactgtggggattggctgcttggtaggcagacatgaatgatggggtatcaggactag

SEQ ID NO: 494684 - DNA, 548 bp, Homo sapiens
tatgtgacttcaattcctaaggtcacctcatggtccaaaacagccgctgaatattagcattacatatgtgttctgaacagcaggaaagaggaaggagaagatggacctgcctccttcattttaaagttcttcccagaaataccagacaacacttttttataaatttcactggtgagaatttggccataaggtcatatctagctgcaaggaattctgcggggaaaatcagggcttcgtttccaatgaggaagaagggaatggttattgggaagctaatagctgtctctgttacacctgttgactaagggtaagcataatacagaatcattaaggaaatgtcactggccacagcttctttgctaatakttttaggaacttcctattgggctccatttatttagatcagtcaacaattatttgctaaaaacctgctatttgcatcattttttttcttttgtagaatggatttgtaccttcccaatggggttttagtgagcattaaatgagataataatgtagaacgcttggaagagcatctgatatatatt

SEQ ID NO: 494685 - DNA, 631 bp, Homo sapiens
gtgcccacccatactgagggtgagtgtgcctctcccagtccactgacacaaatgttaatctcctttggcaacaccgtcacagacacacccaggaacagttcttttcatccttcaatctaatcaagttgacactgaatattaaccatcacagattttatacatacttagggtcaagtgttaagcattttgtttcaactataagatatatgcttggaaattagtttggctgacactggaatttaggtattatattaagctcagagccttttggattgtaacccatttggcattatatcatgttttataattatgtgttttttttctcctccccagaaccacagtttcctattagacaagaagtgacaggttaccgtaatccaggtaggagttgcctgtcaatatgatattttttcaatagcatttactgaaacatacaagatttaggtatgccctaattgttgtrggattttcaaaatgtgtcatattctatgggaatcaagccgtttaattcattaattcattaaattaatatttatttattaaatgcttaagtgacctagagttgtagaaggcactaaagatataatggcaaacaaatgcagtttattgggggagacagtaactaataagc

SEQ ID NO: 494686 - DNA, 470 bp, Homo sapiens
tgattagaaatgatagtgtcattatgtaagtgctaatagtacctaaaatgyttgaatgctcactacgtactgagcactagtgtacatgctctacatggattacttcaaaacaaccctatgggcagggacggttattgaccccattttacaggtgaggttaatatcactttgcccaagggtcggcacctagcaattggcagtgccatgcaggcatttttacttcagagttagctctaaacatctaaatagtcttggcatgaaattctattattattggaggtcaaagggcatgactacattgtaagcagtacaatggaattgttttggaacctgaagtctcagcttcaatttctagtgcaccatttatcaatcggtgtccttgggctaattacctcatttgctagtggaagataatagcattacctacctcacaggttggtatgaggtggataaattaattcatatgaaac

SEQ ID NO: 494687 - DNA, 470 bp, Homo sapiens
tgattagaaatgatagtgtcattatgtaagtgctaatagtacctaaaatgtttgaatgctcactacgtactgagcactagtgtacatgctctacatggattacttcaaaacaaccctatgggcagggacggttattgaccccattttacaggtgaggttaatatcactttgcccaagggtcggcacctagcaattggcagtgccatgcaggcatttttacttcagagttagctctaaacatctaaatagtcttggcatgaaattctattattattggaggtcaaagggcatgactacattgtaagcagtacaatggaattgttttggaacctgaagtctcagcttcaatttctagtgcaccatttatcaatcrgtgtccttgggctaattacctcatttgctagtggaagataatagcattacctacctcacaggttggtatgaggtggataaattaattcatatgaaac

SEQ ID NO: 494688 - DNA, 616 bp, Homo sapiens
tggggcaaaatcctcctggtactgaccagcttaggctagtcttcctttaaattgagctcacctcacacaactgtcaattacacatgtatggggagcaatcacattatcctaaagcctcattttaatctaccattctcacttaattctctgagtttcttaccagagctgctaacatataataataaaactcacactcaattctatctcaatttctactcttcagcaccctctgctacaggtactggccaacataaaacaagaggcaagaaaaagactcacatatccattaggcgggtcattttaatccttgaaaactgagtttacttcctacctaagcttccatccgcttaataccaaggtgatcaagtctgtgtgctaaatacaggaaaagccttrataggagaccctgctaccaatttgtaggaaataggacaaaaaaaaaacaaaccacaacactttgaacttccactgttgagtatgcaaacagcaaaatccagactatagggaagtcaacaagtcacaaggcccaagtttttcaacagataaagtagaagcaaaaaactgtaagaaaggaatgaagagagaacctacagattaagaaacttaaacgacttac

SEQ ID NO: 494689 - DNA, 618 bp, Homo sapiens
acaggagcatgccaccacgccaggttaatttttttttgtatttttagtagaaacagggtcggaccatgttggacatactggtctcaaactcctgacctcgggcaatccgcctgccttggccccccaaaatgctgggattacaggtgtaagccactgcacccagccagaagatttttcaagaatgaacattaaatgaatgtacaggccgggtgtggtggttcatatctgtaatyccagcactttgggaggctgaggcaggctgatcacctgaggtcacgagttcaatactaacctcgccaacatggtgaaactccatctctactaaaaatacaaaaattagccaggtgtggtggtgcacacctgtagtcccagctattcaggaggctgaggaaggagaatcacttgaacccagaaggcagaggttgcagtagctgagatcaccccactgcactccagcctgggtgacagagtgagactccatctcaaaaatagaaaaatagatttacagattttaaaaattgaaaattatactataaaaaattaaaattatacttttaaaaattaaaagaattcatcactagtatacctgcactgcaaaaatcctaaaagaaattattc

SEQ ID NO: 494690 - DNA, 618 bp, Homo sapiens
acaggagcatgccaccacgccaggttaatttttttttgtatttttagtagaaacagggtcggaccatgttggacatactggtctcaaactcctgacctcgggcaatccgcctgccttggccccccaaaatgctgggattacaggtgtaagccactgcacccagccagaagatttttcaagaatgaacattaaatgaatgtacaggccgggtgtggtggttcatatctgtaatcccagcactttgggaggctgaggcaggctgatcacctgaggtcacgagttcaatactaacctcgccaacatggtgaaactccatctctactaaaaatacaaaaattagccaggtgtggtggtgcacacctgtagtcccagctattcaggaggctgaggaaggagaatcacttgaacccagaaggcagaggttgcagtagctgagatcaccccactgcactccagcctgggtgacagagtgagactccatctcaaaaatagaaaaatagatttacagattttaaaaattgaaaattatactataaaaaattaaaattatacttttaaaaattaaaagaattcatcactagtatacctgcaytgcaaaaatcctaaaagaaattattc

SEQ ID NO: 494691 - DNA, 257 bp, Homo sapiens
aatgctccaccacaatccttctcaaaccagagcacacaacagaagaagcttggggtgcctggctgcaccccgagtttgtgattttgtaggtccagagcggkgcctgagaatccacattcccaagtgctgctgctggcccagcaccacgctctgagaatcatattctccagggaaatgcagctctggagtgggcttttctgctggtgacaaaggaaaatcactgcaccttattggttgtctgctcattaatctttaag

SEQ ID NO: 494692 - DNA, 560 bp, Homo sapiens
gagagggtcgtgatcgattgagcaagcagggggtacgtgactgggggctgcatacaccggtaattagaatggaacagaacaggacaggggtcttcacagtgcttttttatgcaaataaccgattaggtcaggggtccatctgtaactaccaggcccacggtgtggcgccaggctgtctgcttgtggatttcatttttgcctttcagtttttacttcgtctttctttggaggcaaaaattgggcataagacaatatgaggggtggtctcctcccttaatacatttgtcccaatcatcayatgcaccacacgatgcagaagtccatggacacaagctgggaggaatcctatggacaccagcatcctcctcagcaccgtgacagcatggactgagcgagcactgtgtgccaggcatcatgtcgggtgtgcgagatgcagcattccacaggtcggggggcggtcattaaccccactttacagacgaggagatctggaccaggcaaatcagacaacctgtccaagctcatacaatgtcacatccccaacaccagttcttcccagt

SEQ ID NO: 494693 - DNA, 523 bp, Homo sapiens
tgagataatattctaactgttggayaatcacggtggccagacatgtctacaagaaagcagagtcttcctaagagtgggtgggaagggcatctatatctccaccagagagagagagtctggtgggaggaatcaaccgcctgcctgtgcagctcagtgagttctcatacctgtatacggtgtctattgttcacaaggtctggatcctcgtgaggtagattcttcagccatgccatctagcagaggagacttttcactctgcctgcccacataggtggctagtttaaggaatttatttcttttagaggagataatgtaaagtgctttgcatagtgtctggcacagcatgttaaaagcaaaactttagacaaaataaatttaacagagtttatttgagcaaagaacagttcatgagttgggcagcactcaaaactggaagaggttcagagagctccaccacagcagcatgagcaaccagcttttataggctgaatgcaaaagtaaagttgacaaaattacttgattg

SEQ ID NO: 494694 - DNA, 523 bp, Homo sapiens
tgagataatattctaactgttggataatcacggtggccagacatgtctacaagaaagcagagtcttcctaagagtgggtgggaagggcwtctatatctccaccagagagagagagtctggtgggaggaatcaaccgcctgcctgtgcagctcagtgagttctcatacctgtatacggtgtctattgttcacaaggtctggatcctcgtgaggtagattcttcagccatgccatctagcagaggagacttttcactctgcctgcccacataggtggctagtttaaggaatttatttcttttagaggagataatgtaaagtgctttgcatagtgtctggcacagcatgttaaaagcaaaactttagacaaaataaatttaacagagtttatttgagcaaagaacagttcatgagttgggcagcactcaaaactggaagaggttcagagagctccaccacagcagcatgagcaaccagcttttataggctgaatgcaaaagtaaagttgacaaaattacttgattg

SEQ ID NO: 494695 - DNA, 639 bp, Homo sapiens
atattcattgagaacacttctctgacacatatggaacaaatattgttaagctattgaaggggcttcagattcattagcctgtctgagacatgcacatgtctcaggccagccctgagataatattctaactgttggataatcacggtggccagacatgtctacaagaaagcagagtcttcctaagagtgggtgggaagggcatctatatctccaccagagagagagagtctggtgggaggaatcaacygcctgcctgtgcagctcagtgagttctcatacctgtatacggtgtctattgttcacaaggtctggatcctcgtgaggtagattcttcagccatgccatctagcagaggagacttttcactctgcctgcccacataggtggctagtttaaggaatttatttcttttagaggagataatgtaaagtgctttgcatagtgtctggcacagcatgttaaaagcaaaactttagacaaaataaatttaacagagtttatttgagcaaagaacagttcatgagttgggcagcactcaaaactggaagaggttcagagagctccaccacagcagcatgagcaaccagcttttataggctgaatgcaaaagtaaagttgacaaaattacttgattggcta

SEQ ID NO: 494696 - DNA, 443 bp, Homo sapiens
tttggcgttataagtaatctagagatgatgtaaagtacatgggagaatgtgcgcaggttctgtgtaaatacaacaccattttacataagggacttgagcatctcagattctggtatccaaggaggatcctggaaccaatcctctatggatgactgtattaaaactaaaggctastgtggatgagactagtgtactagtcgtacactaaaatctattctcttcttaagaacttggttagatcctatttctgaggtcctgaaatgaggtaaagccgcattcgccaacagaacggaaagatgtatgccacttctgggttcaggctttctgatcatgtgtatgcccggttcacattatcttccttccttccagccattatttaggcatggcagcaaccagggttcaaccatgtagccatccccaggggatggtagaaacaacaacct

SEQ ID NO: 494697 - DNA, 506 bp, Homo sapiens
tttttgtttaccttcacaacagaatggatgtcataggcaggtttctgctgtgcctgaatcccacataccactggatttttcaagtacgtgttccagtaaataccccattttcccccaagcaaattagaattggctttctctgtcacttgcaaccaagagagtcttgactagtataagcctctagcataggacctcacacattagttcctgtaaaatagcaactatcatcaccgttattcatatgataaatgagcaagccatcctctttggtaactgtaaactgtagaaatgaaaagtgcatgcagtatgctcaataacttttgtctcccctcttattcccagcctgctcctttgtcctttccaaattcacatcttgacctccaaggaaaccctcaacattcattaaaagcagagcccacccatcttataaaaatagtcccagactcacccaagtcacgaatattccgctaggcagcatttgytcccatgttacacaagtgatccct

SEQ ID NO: 494698 - DNA, 505 bp, Homo sapiens
agacagctgctctgttgcttttcctgccctgcctctattccctttctggtaccagtggctcaatttctctctgggggaaccacccctccaactctctgtccatggctggaccctgccctgtcccaggtatacccgtaactcaggttacattcctctgagtgcaatgcttgcttcagaaatgggccgggcacgggggctcacacttgtaatcccagcactttgggargccaaggcaggtagatcatctgaggtcaggagttcgagaccagcctggccaatatggcaaaaccccatctctactaaaaacaacaacaacaacaaaaacaaaacaaacaaacaaaaaattagctggctgtggtggtgcatgccttataatcccagctactgggaaggaagaggcagcagaatcgcttgaccccaggaagtggaggttggagtgagctgagatggcactgctctctagcctgggcgacagagcgagactccacctcaaaaaaaaaaaaaa

SEQ ID NO: 494699 - DNA, 577 bp, Homo sapiens
tttacccaaataagttgaatatttatatccacacaagacttatcacataagtgtttatagcagcttgattcatattgccagaacatggtagcaagcaggatgtttttcaggaggtaaatggataattcaactgtggttatatccagacaacaaaatagtattcagagctaaaaagaaatgaattatcaaggcaagaaaagacatggcggaaccttacaggcatattgctaagtgaaaaaagccaacctgaaaagacaacacattgtatgattctaactacatgacatcttggaaaaagcaaaatcatggagacagcgaagaagaaaatggtcaaccccacttttgtcacttctgaaaaattttagattatgagagtaatatgtctatcagaaaatatgtgcttccaaagcaawgtcaagtctgctcagggtatgcacagcaacagaaagacagccacctctaggacatcataataaacatttgaaatgctttagaatgtgtatgcttctcttgcagagaatattttggaatccagcaaactaaacaacattaaatcaaacatttaaattaaaagcca

SEQ ID NO: 494700 - DNA, 604 bp, Homo sapiens
cagcaaacactgaaaaaaattgatgtttctcatcaggtttacttatgacctgcaaaataaagtaagcatattagaaaaataaatttcaaaatattcattggcatagttcaaaaatgtgtacaagcaggtaatttcmtggaagatagcatactgtgcatgcttttagatattatcaattagatgttttatttataagtccctgaaatcacttaacatataacactgggaatgcatttacactgtgcattgtcatactattatggcacctttgatcagctttgccatttcagacatttggtagtttttatattgattcagtcgttaatcagagcatttttatttcagaattagcatataccaaaactgttctgagttataatgcaaatatgtcctatcaaagactaaattaacattttactgctgttaaccagaggcaatgtctcgtaaaaaaattagatgactatgccaaaactttacattctgagctgtttaaaattacaagatttctaatccatgcttacagatgaaaaggaggaagtgtacctcctcctttccctgctgacaaaataaaacaccaggtttcaaatctcaaatgagagttttg

SEQ ID NO: 494701 - DNA, 587 bp, Homo sapiens
acaatccgtaactattttaactattagtttgaatttgttgtataatacaggaagtgtatacatgtctgtgaggccagtagagcttttgctaagaattcttagagaagtgacctatttcctgcttgaatctgaggccaactacagacaagtttccttgaaatagccctttgccatctggcggaatttgcacatatacccttctataaaggtrtatttcttccacattcagtatgtttgtagtgctctcatttcattgtcacctcacacgatatcgcaaatgctcccagggcccccacagctttagtagcatactaatccctttgtttcaactcttcttactctttccactggacattaaaaacaattttatttcaaacttggctttgaagtcaaaaaatttcaaagttcttttaaagagagatttctatgtcacacagtgcccccctttgtttaggactaatttattgattataggtgatattaagttgtcaactcttgctagataaaaacattagagaaacacagccttcatggagagaattaaagaagacacacaaagaggagggtatgaaaggtatggaggcaat

SEQ ID NO: 494702 - DNA, 587 bp, Homo sapiens
acaatccgtaactattttaactattagtttgaatttgttgtataatacaggaagtgtatacatgtctgtgaggccagtagagcttttgctaagaattcttagagaagtgacctatttcctgcttgaatctgaggccaactacagacaagtttccttgaaatagccctttgccatctggcggaatttgcacatatacccttctataaaggtatatttcttccacattcagtatgtttgtagtgctctcatttcattgtcacctcacacgatatcgcaaatgctcccagggcccccacagctttagtagcatactaatccctttgtttcaactcttcttactctttccactggacattaaaaacaattttatttcaaacttggctttgaagtcaaaaaatttcaaagttcttttaargagagatttctatgtcacacagtgcccccctttgtttaggactaatttattgattataggtgatattaagttgtcaactcttgctagataaaaacattagagaaacacagccttcatggagagaattaaagaagacacacaaagaggagggtatgaaaggtatggaggcaat

SEQ ID NO: 494703 - DNA, 571 bp, Homo sapiens
catacatgcaattctactcactagctatgtcaaattttgtcttcttagatgatcaatcagttatacttccttcattctatattaaagtagtatagccctttcatttttactaagtaatgcttgttataatatttccaagtggctccaactatcctgagctagctagagaaaataacatattttgaaatataatcacttctaaagccttgttaggtgttggtcaagataaaaaaccattaacttgtcttcaaaatttccatgtgtagccgtgagtacaaaagagaatttacatttaaaaaatgtagactttcagaaaacaaaccaaactttaagggataattttsatttgtctttgaagtgtgacaaaacagaaaaatgactaataaaaaccaagaaatgagatactttgaagaaggacatagtaaatcatgaaattctgcagagacaggaatacagaggcagaagaaagattacttattctgttataagaaaatcgtgggtaatattagtgtaatttcattaaagtggcatgtaagttaaataaagtttgtgtgggaggaagaaagaagca

SEQ ID NO: 494704 - DNA, 540 bp, Homo sapiens
ctcaccaatcacagcttgccagctcccaaaagacattctgacaccagtaagcttatcttttcccagtgaaatcctgtttatcctttgttctccagacatactggagaccaccctgatctgtatgtgtgtcctgaattgcaatcctatttctagtatgttattcccaaataaaagaaaaaaaactttttacttagagatttgtctctctatattttatgttgactctgtgtgtgtgtgtgtgtgtgtgtgtgtcctattggttctgtatctctggagaacccttactaattcaggaaggaagaaaggaaataatctagcrtggaactccagtttcaatttctgtattagttaggtcaaggaatactagttcttatatgaaaacaaatacatgatcaaggagttctgtgacttaatataacatgtatttctcaataaaaatctgatgtagttattcttggtagcatgattctttgggaatttttccttttatcaaatactccaggattcaagctgttccaatttaggatgctaccttaaata

SEQ ID NO: 494705 - DNA, 540 bp, Homo sapiens
ctcaccaatcacagcttgccagctcccaaaagacattctgacaccagtaagcttatcttttcccagtgaaatcctgtttatcctttgttctccagacatactggagaccaccctgatctgtatgtgtgtcctgaattgcaatcctatttctagtatgttattcccaaataaaagaaaaaaaactttttacttagagatttgtctctctatattttatgttgactctgtgtgtgtgtgtgtgtgtgtgtgtgtcctattggttctgtatctctggagaacccttactaattcaggaaggaagaaaggaaataatctagcgtggaactccagtttcaatttctgtattmgttaggtcaaggaatactagttcttatatgaaaacaaatacatgatcaaggagttctgtgacttaatataacatgtatttctcaataaaaatctgatgtagttattcttggtagcatgattctttgggaatttttccttttatcaaatactccaggattcaagctgttccaatttaggatgctaccttaaata

SEQ ID NO: 494706 - DNA, 634 bp, Homo sapiens
tagtttaagtttagactttattttaaggagagatgataagccatttaaatgttttatgtgggaacataagactgtaagattaacatattaaagggtggctgttgttgcttgtataaaatgtattaaaggagatcaaaaatgaagtgggaggaaacagtttggagtctacagcaataatccatgtgaaagatactggtagatgtagccagaatagtagacatgaatataagaatagrtaagttttaggtacattttaggtacaatgatttatttaagaaatatttaggattaacttaggaattatttagaatatttagaacaataggtaagtgaggcaaaagagaatgatgaatcagatctcacactcagaattctgatttgcacagtggattgatgctggagccatgcactgatacatgaagttggaaagattataaacactacgtgagaaatgtggcatttaggatatatgagaaatattcacatggagttttcctaaactctagatgagtgctataggctggagttagtattttggcaattatctagaacatggaaacttatgtaatggaagggcaggaaagaatttgtagagtgatgaggaaaagaagctaagaactgaaccctgttaagt

SEQ ID NO: 494707 - DNA, 634 bp, Homo sapiens
tagtttaagtttagactttattttaaggagagatgataagccatttaaatgttttatgtgggaacataagactgtaagattaacatattaaagggtggctgttgttgcttgtataaaatgtattaaaggagatcaaaaatgaagtgggaggaaacagtttggagtctacagcaataatccatgtgaaagatactggtagatgtagccagaatagtagacatgaatataagaataggtaagttttaggtacattttaggtacaatgatttatttaagaaatatttaggattaacttaggaattatttagaatatttagaacaataggtaagtgaggcaaaagagaatgatgaatcagatctcacactcagaattctgatttgcacagtggattgatgctggagccatgcactgatacatgaagttggaaagattataaacactacgtgagaaatgtggcatttaggatatatgagaaatattcacatggagttttcctaaactctagatgagtgytataggctggagttagtattttggcaattatctagaacatggaaacttatgtaatggaagggcaggaaagaatttgtagagtgatgaggaaaagaagctaagaactgaaccctgttaagt

SEQ ID NO: 494708 - DNA, 488 bp, Homo sapiens
ctgttatgaactgtaacattgtgcaccgggaattgtaagttttctctgggagagagagggattcatttttgacataatgtatctgatacaaattgacaatagaaatgagtgaaatactcaggaatcactaatgcttgactgttctcctgcccaactgtgaataataatgtattccttggataggtgtttattccctgaataagtgagagcttgacctgatttagcaggaaatcccatcctagtgaggagactctagaaataatttgctcttctctcactgactctttggtgtactgaaggttaggatattgtcaaaggtaaacccacaaaatgtcttggtgagcartgtgtccaaaaacctacctcaatctctggtttcacttgtatagattatgatgcttcagccacatgaacaataatccttgcttcaagttgccttaaataagaaagctatttattatctcatgtatcagaaaatcaagaggtag

SEQ ID NO: 494709 - DNA, 633 bp, Homo sapiens
gtctcgaactcctgacctcaggtgacccaccctccttagccttccgaagtgctgggattacaggtgtgagccactgcacctggcctaaacaatatactctcttaagaaataacacacttcttaaattttaaagcattttgactagtggttctttttttttckgtgtttgaaatttggctagttgggttggctatagtaatcatctggagatttttatgcctgaagcttgattgccctctagcaagtccaaagcaagaagaggttcttccccacagggatcaatttgttgcttttcctttctgcagcttctgccataatgtttgaacacagagttagacgttgacattttctcatgctgttccttctgtcttcccacaagggttttcttagacatagattcttaccgtatatagaccttggttctttttttttttttttaaatcctgattgtgaagtgtgtttagtcatgttgttggttagagttgaggagccagagaaatttaaccttgagattgcctaacttacatgtctccacaaagactttagactaatttttcttctcagaggctgctagctgtacctccgttgcagagtcttcgtcttcattttgtgcttcaatatttaacataggca

SEQ ID NO: 494710 - DNA, 359 bp, Homo sapiens
gctgggattacaggtgcctgccacaacactgggctaattttgtatttttaatagagaccgggtttcrccatgttggtcaggctggtctcaaactcctgatctcaagtgatctgcccacctcagcctcccaaagtgctgggattacgggcgtgctgagccatcttggcgaaatttggaagcttctccttcaagattctgggcgcagaggtttggaggcagtgactgcctgcttaggagactacaattctattttgtttccagggttaggacagaacttcccattccacaaatattgtattggttgcaggtcaccagaatctgaatgatgccctcagcctttgtgctctccagaaaatagg

SEQ ID NO: 494711 - DNA, 392 bp, Homo sapiens
acaggtgcctgccacaacactgggctaattttgtatttttaatagagaccgggtttcgccatgttggtcaggctggtctcaaactcctgatctcaagtgatctgcccacctcagcctcccaaagtgctgggattacgggcgtgctgagccatcttggcgaaatttggaagcttctccttcaagattctgggcgcagaggtttggaggcagtgactgcctgcttaggagactacaattctattttgtttccagggttaggacagaacttcccattccacaaatattgtattrgttgcaggtcaccagaatctgaatgatgccctcagcctttgtgctctccagaaaataggtgtgagctatgaggacctgctccctatggtcaggacttgaga

SEQ ID NO: 494712 - DNA, 539 bp, Homo sapiens
ttcactggctccctattgcccctgaatagagtcttaaactctttagcataacacatacacttttttcatttttaattgacacatagttgtacgtatttatggagtacagtgtgatattttggtacatgtatacaatgtgtaatgatcaaattaggataattagcatatctgtcacctcaaacgttaattatttcttaatgatgaaaacattcaaaatcctctcttcccgctagtttgaaatatacaatatattattgctaactatagtcacccttcggtgtgatggaatactacatttgttcctcttatgactctttacccattgaccaacctctycccattctcttctccccatccttgtcccagcctctagtaaccactgttgtactctttatttctgtgaaatcaacttatttagattccacattatcagtgagatcttatggtggttgtctttctgtgcttggtttatttcatttaacgtagtgtcctctaggctcatccatcttgccataaataacaggatttcattatttttt

SEQ ID NO: 494713 - DNA, 507 bp, Homo sapiens
agattatcttctttactcagcctactgattcaagcactaatctcttttggagacaccctcccagacacacccagaaataatgtgttgcaagctatctgggcatcccttagctcagtcaagttaacacctaaaatcagccctcacaagaatctacctctccttctctcagtcaaagcgctgcattctctgcaataatccaatagcacccataatatgcaatagcaccaatgagatgaaatggaacttttgctgggacttctggaaaagtgacctgatatgttttcccctgagacttgaaggtgagaagaggtgagcgtggagttgtgcagccaccgtgaccccaaaggaagagactctgagaataaggccaagatgaaggtgrctagggtcatgacatacatagaaagggggcatgatggcagcaatgtgaaaacaagcagccccccaggcccagagcatcacatgaataataaattccctttttgcctaagctatttggggtaggac

SEQ ID NO: 494714 - DNA, 507 bp, Homo sapiens
agattatcttctttactcagcctactgattcaagcactaatctcttttggagacaccctcccagacacacccagaaataatgtgttgcaagctatctgggcatcccttagctcagtcaagttaacacctaaaatcagccctcacaagaatctacctctccttctctcagtcaaagcgctgcattctctgcaataatccaatagcacccataatatgcaatagcaccaatgagatgaaatggaacttttgctgggacttctggaaaagtgacctgatatgttttcccctgagacttgaaggtgagaagaggtgagcgtggagttgtgcagccaccgtgaccccaaaggaagagactctgagaataaggccaagatgaaggtggctagggtcatgacatacatagaaagggggcatgatggcagcamtgtgaaaacaagcagccccccaggcccagagcatcacatgaataataaattccctttttgcctaagctatttggggtaggac

SEQ ID NO: 494715 - DNA, 642 bp, Homo sapiens
aggtaaacaaggatgcagtcagcacaacttacggccttcaagaatttacaagctgagaaaagagttacgtcatgtatttgcatacagaattgtagaataaagcactttgagataggacggtgaaatggcattggcccagtgagtgttgtagcctataagagaccagtcgcctttgcccctgagtggggaagaggggaggtggggtgggcagatggcatggctgagttgctgggtggtaaaattttcactgttgatttgtcactaagttctaaccttttatttgtttatttacttttttccagacagagtctcactctgtcacccaggctggagtgcagtggtgtgatcacagctcactgcagcttggatctctcaggctcaagcgattgtcccacctcagcctcctgagtagctgggatgacaggtgtgcatcaccacgcctggctaatttattaaaattctttttctagagataaggtctccctatgttgcccaggttgttcttgaactcctaagckcaagcaatcctcccacatcagcctcccaaagtgctaggattacaaggatgagccaccaccacacccaacctaaatcctaaacttttaaaagcttgtacaagctgtcttggatgccgtgtggagc

SEQ ID NO: 494716 - DNA, 643 bp, Homo sapiens
ttcactatatgtgtgggactgaccaacaagtaaggaagtggaaggaagaacaacaacaaaaaagagctctaacattttttactaactggtatcactatttccctggcatgcttgataacaaagactttaaattttctcagccttaaaaaaaaaaagcacaagacaccaacatatgttatatataaatacagaagaagcaaccaaacccaattacatgcatcacaggaaggtcgtaaaaaaaaattacactcatcatattcgaggagaaatgctggctcaagtgaacatctcccccactgagatttctttctgtktgagcttaagctagccataaacaaacttgagtagtattcaaaaatatcattaaagagtttcttggaatggcgatatagtctgtgaatttgaaatctaccaaggaaagagataatcagagcatcctagcaaccagaagaaagaacagcatgaagatggaagcaggcagcaagatgcacatcaacaaatctgccccgtcgcccagaggcaatcaatgcaaatattctatacactttcttctcggtttttacctatgccattctaggaagaacttgggagaaaatctatgtaagcctgaatccccttagcctatatagctgtgtagttcttt

SEQ ID NO: 494717 - DNA, 642 bp, Homo sapiens
cacttactaacaccgtcacggctctgttttggccatcatctgtttattaactaaactctcttctctcccaactccaaatctttgtttcttctagattgagttctctccctgaagagcctaatccaacctggtccctgtaactgccctgataccttaggagatacctgggcttatttaacttctctctggccaccatgtctttttccagcctgagtcaaagtatattctttgctctaacctaattcttttaagaatgacmgagtaaaataagtaaaatttatatgaggagggagagggaggaggcaatcaagagaatgaatagtccctattcttgattaatccttattataactatgagttcaagggcaattatataatcttgttaaagcaccagggctaaaaacttgacatggaattgtaatttctgttgtgtatctaattactatgaaagcctagttctacctgtttcatcatttataaagggaattgcaacccccgccacgaccaacaaagtagtttcagagattgggagggactaagctagtcaatgtaaaccaagcttgtccagcccatggcccgcaggcctcagtgtggcccaggatggctttgaatgctgcccaacacaaattagtaaatttcctt

SEQ ID NO: 494718 - DNA, 629 bp, Homo sapiens
agcatataattaaagttgaaatctaactattttataaccactgttcgaaagtttaataacttgtgccaaaagtgtctttgaagatcagtggtttcactttaaatgtaaattgagtgggacaaactggccaagcttactgagatatttttgcatacaccttatgtacttcccccarttcctacaagaacaatcaaccaaacaatgaactaaacaaacatgtaaagcaacaaggaaaaaacattttttagtttaatgtttcagcataaatggattgaagatatttctcgcattatgcttttggctgtggatggaagagccaacacttgtgtattctgaacaaatattttgagtttcagaggcccagagcaacaaagttttgtctataaacaacagatgacaggtattaattaataaagagtgtgttcatatgtaggcagccttgacggactcttgattcatggctggtattttcagacacaaccacacatagctgtagtagcactattaataggaagattcaaataaatgttcaattagaggattcctcgatcagatgatcttattgaaatcaggtgaagggaggaactatggtaataagccagttactgcaaaaatagaatgagattaat

SEQ ID NO: 494719 - DNA, 624 bp, Homo sapiens
tgagtcatatgcacatgctcatcgattaawcctcatcccatgcctcatttatacatacacagagctccaaactgttccctttacatgatttaaatcatcattttatttactcgtcccaaagtagaaatctgaatggacactatcccgaccttgaaccattttatacatacatagagctccaaactgtttcctttatatgatttaaatgattattggctcgtcccaaagtagaaatctgaatggatactatcctgaccttgaactacatgcagccagtttgagaagttctgggaatcaacgctggatgcgtcctagctctaactaatatttcgtgactccagtcaggaacattatggctgcctcaggccagttttctaaattacactctaagtaataaaaaaaggcagaaaaattggagactgacagaggttcttggacaacacaaaatacaataattagagaaacaagaaaacataccaaaacctgaagtagtcaagaacacagcattaacatggatcaaagtgttctatattcttattacatttttaaagaatcaattccaatgatttttaatgactttttaattggtgaaaacataatgatccttgtggaaaacagcataga

SEQ ID NO: 494720 - DNA, 532 bp, Homo sapiens
ataggtgagtcatatgcacatgctcatcgattaatcctcatcccatgcctcatttatacatacacagagctccaaactgttccctttacatgatttaaatcatcattttatttactsgtcccaaagtagaaatctgaatggacactatcccgaccttgaaccattttatacatacatagagctccaaactgtttcctttatatgatttaaatgattattggctcgtcccaaagtagaaatctgaatggatactatcctgaccttgaactacatgcagccagtttgagaagttctgggaatcaacgctggatgcgtcctagctctaactaatatttcgtgactccagtcaggaacattatggctgcctcaggccagttttctaaattacactctaagtaataaaaaaaggcagaaaaattggagactgacagaggttcttggacaacacaaaatacaataattagagaaacaagaaaacataccaaaacctgaagtagtcaagaacacagcattaacatggatcaaagtgttc

SEQ ID NO: 494721 - DNA, 626 bp, Homo sapiens
ttcagctgggattcaggaagatactctaggacaaagaaacacttttgtgtacttgatcagaaataaaagaaaaagactaacaataattcaataatacaaaccataaatcaccaccaaagtatattagaatataacagcaacaatttataaaataacaattatagctgtcatttactgagttcctgtactgtgtcattggacctggtaatggatgttttttatacgatgtatgccacacacacacacacacacacacacacacacacactcatacacaggactttaaattttttaaactctgtaattaatatcttgatatttgaatattgccaaaaaagtacatctgagatcatataactttgttaaaagcacacagctaataaattccaggtctacctggctctrttaggagcattgaagggaaataacatgaaaagacatggaacacatggaccaaaataagaagaaatagtattatcactcattcaaacgcttggcaaaaacctggcacccagtattatcactcattcaaatgcttggcaaaaacctggcacccacaccaactgtgctcttttcttcaccctctacatccaatcaacaagtcccatgatttctacctctgacat

SEQ ID NO: 494722 - DNA, 666 bp, Homo sapiens
acaaccaccacctcatttgttcccctgcttctactcctgcctcttctcccatccactcttctttttttcccatccactctttataaggtatgtagaataaacttttaattatgtaaatcagaaaaagtcctctgcttaaaatggctcaagaatttctttctgcacttgtaataaaatgttacactttaccatgattcataaagctctatgtagttagtmtctcctttgctcactaagtccatctgtgtcatccttcacatatttccttgaaaatatttagatatccttctacagagttgttgttttttttcctgtgaatttcattttggaaaaggaaacaccaaaatcaccacatgatggagatccaatggcacagagaaggctggttgttctttaaaaaaaatattctggaaagcacatttgaacctgaaacagatatcgcattctcacccaagtctgctttccataaggtactgttcagtgggggaatacagacttctctgtagctaaaatcattacttctgacaactcattgaaagtttaaatcttttcctatccctgcatttaccatgttactgccaatatggcaatagattcaccttagagctaacacccagaaaactcctagaggaatattttttgttacttgtaggtatatttagattg

SEQ ID NO: 494723 - DNA, 510 bp, Homo sapiens
ctgaatgccctctgcaccagtcaargggcataaagagtccccatcaagctaatttgtattctgttcttcctttcctcatagtgtttacacttttcaccatttcctctatctccacgctgttcaaaatgtggttcttgcaacaatgctccttctaaaaactctagcatcaggaagatgggacttggctccatacattttaatatgttccccacatgacacttaagaaatcggatatttgagaaccaactacagtattcttaaatccaaaaggacctacattccagtaaatacaaaatcaagtgacttataaatcaaaaacagatggattgatttttttcaactcaatgtggcattaaaacatatctgtcaaaaagtaatttaaaaatagttagtcacccaaccaaataagcatactcttgtccttattttcacctaccaagtgatgctttcagtttttctgatttaaatttcctcttgtcgtacttcacttcctcataatgaaaatgaatt

SEQ ID NO: 494724 - DNA, 510 bp, Homo sapiens
ctgaatgccctctgcaccagtcaaagggcataaagagtccccatcaagctaatttgtattctgttcttcctttcctcatagtgtttacacttttcaccatttcctctatctccacgctgttcaaaatgtggttcttgcaacaatgctccttctaaaaactctagcatcaggaagatgggacttggctccatacattttaatatgttccccacatgacacttaagaaatcggatatttgagaaccaactacagtattcttaaatccaaaaggacctacattccagtaaatacaaaatcaagtgacttataaatcaaaaacagatggattgatttttttcaactcaatgtggcattaaaacatatctgtcaaaaagtaatttaaaaatagttagtcacccaaccaaataagcatactcttgtccttattttcacctaccaagtgatgctttcagtttttctgatttaaatttcctcttgtcrtacttcacttcctcataatgaaaatgaatt

SEQ ID NO: 494725 - DNA, 490 bp, Homo sapiens
tggccatagataggtaagacttgttgaatagaagtgcatgttgctgagtctatgcatagcctctatcccttctgcacatgctgaataggtgagttgaatggggatgtaatgtgaatgggaaacctgcgcattctttaagtccttgatgatgaaactaaactctgcaatcctttcaggattgtggcattgctcttcatttactatttccctagttagaggtaattctagtggcctccacttggccttttctaccacaatagcctttattctatgttataaagggtaatcttctttaatcaatgtttacagattcaaatgttcattttatcttcgaaataccttttatagaaatatctagaatascatcagtaaatatcttgtaccacggcctcaccaagttgacacataaaattatcattacacaatgataccaaatgaggccacttcataattttaagctacacaaaaacagggtcaacataccacccat

SEQ ID NO: 494726 - DNA, 581 bp, Homo sapiens
gtaatcattaataacatccatttttaatattgaaaagaagtaatagtataaaaaaagcatatctgtggttagtctattcaaaaaatataaaatataatacacaattattgtcaaattagcaggtattaaaaaataaaaggaaagatacatatatgcaacatatttagaggtcatttatttaaaattactgttttttagaatacttttgacattgtatttgttcataggttagattttagtgcttatattttctcctaatttattattttgttttttaactttttattacatatatgtacataaaatgcacaaaatcataattgtaaagtttgataaactatcataaaatgaatataccattaaaacatcrcccaagtcaagaaagaacattacccatatcccagagtccttcttgtaacccctctaatttctacctaccttttcctatctaccttatactactatctcatacctaagctttgcttgttcttgaacttcacaataatgaaaataggccatatgagttcctctgtttatggattcatttgcttgacattgtattggagaaaatctatccatgt

SEQ ID NO: 494727 - DNA, 612 bp, Homo sapiens
aacaagatagtgagactcactttctacaaaaattgcaagaattattcaggtgtagtgctgtgcacctgtaatcccagttacgcaagttgcttagctaggaggattgctggactccaggacgttgaggctgcagtgagccatcattgtgctactgcactccagccagatcaacagagttagaccctgtctcaaaaaaaaaaaaaagaaaagaaaagaaaaaagaaaaagaaaagaaaaaagagtaatacctcagtggagtgacatcaccaaaaatggcagaatgcaagtaatctggcttcactccccgacagaaaaccaaaaccaaatatccagcaccaggatcatcaccagcagtatcacatgtacttcaaaaatatgtacaactattacgtattgataaaaaataaaaccaataaaaacataatagttcagaaaactacaacaaagtacaaagatgacaaataatagtgaagtakgaacaagttgactctgagttctgcatgagacaaggatgcctgatatcgtgtatactacaaatcattctacagaactggggcacagccagacaagaaggccaaaaatttccaccaacaccagtacaatacagggcaa

SEQ ID NO: 494728 - DNA, 582 bp, Homo sapiens
ttgataaatttataaattatatttcaaaataaaatttatgccatgctatgcccttgcaattcttttactgggtataaataccaaagccatgatcaatatgaccattaaggagcatatwcaagggtaggcagtgtatagttgtttatttgctagggagttgaggcaacctgtgtgtctgtccttgagtgagcttatagaaagtggtggatggatatcatagaatactatgcagaagatacagaaatgctgatggttttggaaaatgtagttgaaatgacaatgtaatctataaaatagcattatgtattcaaacttaaaataagcatgcacaataatacattttctacagaaatatgtaaatataaggatttgcacaaaatggtgaaaatggagataaaaggaaaaaatcaaacaagcatataaacaaattgataaataataaaaagccttaggctgatggaaataatgtgtatgtttgaggagtatgattaacttaagctttttcacctgaggcttaactaggaaaagaagaaagactagaattttagccttcaatagggcaaatgaaatagaacttgaaca

SEQ ID NO: 494729 - DNA, 582 bp, Homo sapiens
ttgataaatttataaattatatttcaaaataaaatttatgccatgctatgcccttgcaattcttttactgggtataaataccaaagccatgatcaatatgaccattaaggagcatattcaagggtaggcagtgtatagttgtttatttgctagggagttgaggcaacctgtgtgtctgtccttgagtgagcttatagaaagtggtggatggatatcatagaatactatgcagaagatacagaaatgctgatggttttggaaaatgtagttgaaatgacaatgtaatctataaaatagcattatgtattcaaacttaaaataagcatgcacaataatacattttctacagaaatatgtaaatataaggatttgcacaaaatggtgaaaatggagataaaaggaaaaaatcaaacaagcatataaacaaattgataaataataaaaagccttaggctgatggaaataatgtgtatgtttgaggagtatgattaacttaagctttttcacctgaggcttaactaggamaagaagaaagactagaattttagccttcaatagggcaaatgaaatagaacttgaaca

SEQ ID NO: 494730 - DNA, 619 bp, Homo sapiens
aaacataacagaaaatgtaaagactctttcaaaatagcttaaatatattattccaatttgctttatatttcttaactaaagtcatgccttgaaaactttaggatacttattttaaacacctgacatttttgttatcaagcagaatatgtagaaaagtggtgttttaaaacataaaattataacacaattttaaaatatcaataggtaaattaattattgttagtaaaacatacctaagcataatctaataggattacttttaaaatctcattttatgatgagattcttgagctcattcttaaaaagtcattttttttgacaagtttccaaagaacaactgggctcagtctaagtgccgcagagaatagcatgaggcatgtagtaaagtgacgcaaagattaaagaagtatctggcattttgcttctctacaggcagaagatgactcaattaaaattttaggaaatcaagtttcctcatgaattccctaacactatgagggggctctgtacccttaaagtcaaaggcccaggaacaaagcagcaggcatacacarttgctgatattcaatgcaaataatccatgccagcagaatggaagaggaactttaatgacatccca

SEQ ID NO: 494731 - DNA, 619 bp, Homo sapiens
aaacataacagaaaatgtaaagactctttcaaaatagcttaaatatattattccaatttgctttatatttcttaactaaagtcatgccttgaaaactttaggatacttattttaaacacctgacatttttgttatcaagcagaatatgtagaaaagtggtgttttaaaacataaaattataacacaattttaaaatatcaataggtaaattaattattgttagtaaaacatacctaagcataatctaataggattacttttaaaatctcattttatgatgagattcttgagctcattcttaaaaagtcattttttttgacaagtttccaaagaacaactgggctcagtctaagtgccgcagagaatagcatgaggcatgtagtaaagtgacgcaaagattaaagaagtatctggcattttgcttctctacaggcagaagatgactcaattaaaattttaggaaatcaagtttcctcatgaattccctaacactatgagggggctctgtacccttaaagtcaaaggcccaggaacaaagcagcaggcatacacagttgctgatattcaaygcaaataatccatgccagcagaatggaagaggaactttaatgacatccca

SEQ ID NO: 494732 - DNA, 499 bp, Homo sapiens
ctggtgctaatgtcgatcccggattgggaacccctgggcagggctgtgtgaggtcggaagtgctccatcccagcgggcctggctccaagtacctgggggccaggctgatgttcaggtcctgaaactccasgaccagcagatgcctgtggctttttccagctctggtatgcaagtggcaacctgcggaaattagaaaagaaacccagaagaccagcacattctcagaggcacgttctcaggcaaggacacccacctctcctccggcttggttttcctgggaaaggtgaggctggagatcttgaaggatgagggagagtttctccacgaggggtcgcacttgcccgaatggtgcccggagctgaacctgtatcctggtgtgttcttgttcgggacataaacatgtctattaaggatgaggagctcagtcaattctcagccagaaagtgaaatgtgagagtgtgggggggaagagagatggagagaggaggcagagagtgca

SEQ ID NO: 494733 - DNA, 499 bp, Homo sapiens
ctggtgctaatgtcgatcccggattgggaacccctgggcagggctgtgtgaggtcggaagtgctccatcccagcgggcctggctccaagtacctgggggccaggctgatgttcaggtcctgaaactccacgaccagcagatgcctgtggctttttccagctctggtatgcaagtggcaacctgcggaaattagaaaagaaacccagaagaccagcacattctcagaggcacgttctcaggcaaggacacccacctctcctccggcttggttttcctgggaaagrtgaggctggagatcttgaaggatgagggagagtttctccacgaggggtcgcacttgcccgaatggtgcccggagctgaacctgtatcctggtgtgttcttgttcgggacataaacatgtctattaaggatgaggagctcagtcaattctcagccagaaagtgaaatgtgagagtgtgggggggaagagagatggagagaggaggcagagagtgca

SEQ ID NO: 494734 - DNA, 499 bp, Homo sapiens
ctggtgctaatgtcgatcccggattgggaacccctgggcagggctgtgtgaggtcggaagtgctccatcccagcgggcctggctccaagtacctgggggccaggctgatgttcaggtcctgaaactccacgaccagcagatgcctgtggctttttccagctctggtatgcaagtggcaacctgcggaaattagaaaagaaacccagaagaccagcacattctcagaggcacgttctcaggcaaggacacccacctctcctccggcttggttttcctgggaaaggtgaggctggagatcttgaaggatgagggagagtttctccacgaggggtcgcacttgcccgaatggtgcccggagctgaacctgtatcctggtgtgttcttgttcgggacataaayatgtctattaaggatgaggagctcagtcaattctcagccagaaagtgaaatgtgagagtgtgggggggaagagagatggagagaggaggcagagagtgca

SEQ ID NO: 494735 - DNA, 618 bp, Homo sapiens
acttaattctacagaacaaaatttacatagttatattattgtagtgcctgattttcaactgaaaaagttttgagtactaacctactgatgaaacacagtaaaattatataagcactgaacacaacagaatataattttttgtttttttgagacagagtcttgctctgtcccccaggstggagtgcactggcacagtctcagctcactgcaacctccacctcccaggttcacgtgatcctcctgccttagcctcccaagtagctgggacgacaggcatgtgccacaacgcccagctaatttttgtatttgtattagagatggggtttcatcattttgcccaggctggtctcaaactcctgacctcaggtgacccacccgccttggcctcccaaagtgctgggattacaagtatgagccaccaagtccagccagaatatatatatgataagccttaatatgtaaaaataacagtataacaaaaaagtaggatgtgaatttgaaagcagtgtttgtgagcaggtgttaacttcagatactgcctaaagctaatgaattgagacgtaaacatttaaatatattatttaaagtcataaagccaatcactaggatacaaaacag

SEQ ID NO: 494736 - DNA, 522 bp, Homo sapiens
atttggagtgaaaacttcttgaaggcatagattagctcattcatttttgcatcctaatagaacttatcaccttgcattctaatacttatgtccaaactgttaataattacacaatagacaatggaacaccctacatcatgaaagtcatttattttgccttagctgcagttcattcttccatccaggcacttatcacattatattgtaaatatccccttatttgtctctttcttcccactggattggaagcttattaaaagcaaaaagcctcccatctttgtatttttaacacatagcccacagcatcctgctaatggcctcccagtaaatatgtaattaatgaattaatatttggaatctgttcttgtagatttctttatttgtcagtgcyttgcttcccaaataaatctttttatatcaacgtccaaattactttacaaagcttgggatttaactaatgtttttactataaagcacaatgtttctacctatacaatattcagtaagtttgggtcagagtca

SEQ ID NO: 494737 - DNA, 668 bp, Homo sapiens
gtctctacctcagccaaaaagttttggggaaatagagtctaattaccccagggaatcgacatgtgttcttcagaggaggtcaatagtcaaacactagtctagttggtttcatcctatagcggaaagtcaggtaaagtaattagtctcaacatctcaggggtgctgactcatttccacttcctttagaggagscactcaaactctgtccacgttttttctccatagaaatatgataaagatcacttctcaggaagcattcatatttcaagaagctctgtatgatatacattaaggtaaatattcctaatccttgtctctagggttagagaaggttgggctgtactttgccgtttttaagccagcagccatactgaattcactgtttttcctcaactcagcataccagatgacccttggttgcagccgtaaccaatcctttctcaaggaccaaatcacacctgcctctcttgtcctttccaggctctgagctaaagtcttggcatctttcttgtatgccctccaagtattagtccaaaaagataccaaaactcatattttatggaaaaagatgtttcctgtaatatcttttgtcttggctttagcagtatgcattttaataaaaatattgacttaaatattgacttaaatttatgtgtttgtttatgttg

SEQ ID NO: 494738 - DNA, 617 bp, Homo sapiens
tggcatcctctgagatagaagtcctcgtggagtctctgatcaaacattttgggtgcagggctactctgcttctgcagtctctcaaagccacagctcttttactctctgctgcacatgaaacatacacgttatggtaggtagagcatacttatggtcaccccaggaccttctgcccaggctcctccatatactatgcctaccctacggtgcctgcctgtaccatgttggattggcctattctgtaaggctcactgctgttccaggctccatytcagaagggagacagagtcacctcttctctctaccctctgccttcagatttcctcaaacccattcccgtttctccccccaaccctgggcactgggacctggtcggaaatctaatgtctaagctcttttgctcatttgctccttccttctcccaaccccatagaatcatgttctctttctggactgggaaaattccctttggcatatcattccttttcctaaacctacgtttatggccaactttataatctgaatccttcaggtcaccaagtgttgacacaaaatctcggcttttcaggctgctctgtctatggaatagccattcttttattcctgtactttcttaa

SEQ ID NO: 494739 - DNA, 565 bp, Homo sapiens
ctggctctcatgctgccactctcctgtcccatgcccggagggtactttattgatagtcatgaccctctttctgtctcaaaccggtcatagcctcagaaccattctcatcacagcatgccctgacaycatcagccactgatcagagttggcatgagagagaaaccattttgctctttctaatttggagcttgtattagctttttatctcagtagtttaattagcctgacaattctaggttttcatttcagaaaacataatatttttaaatagaatctttttatgatatgaaggagaaacaaagagaagggagatccctcaacatttatcattagataaatttgtctccacaggggaaactacacggtgttcagtaagctgttttgttggcctgtgcctcctttcttctatatcttttatccccccgcttctttccatcccttcctcaaaattatatatgagtaatgaggcagcgcctctggggcagggtgggtggaggtgttttcttagggtccagtaaacattcagattcaaacgactatcacaggccacacacctggccccagc

SEQ ID NO: 494740 - DNA, 159 bp, Homo sapiens
gatacttatatgagttctgaaaagaaaaatyaccagcgtgctactggtagaaaccagaatgccaaatttggctaaagtctaatagagacatagcccttcctctgccaatactggcatagataataataatttgtatttatataatgaaacatccccagg

SEQ ID NO: 494741 - DNA, 159 bp, Homo sapiens
gatacttatatgagttctgaaaagaaaaatcaccagygtgctactggtagaaaccagaatgccaaatttggctaaagtctaatagagacatagcccttcctctgccaatactggcatagataataataatttgtatttatataatgaaacatccccagg

SEQ ID NO: 494742 - DNA, 159 bp, Homo sapiens
gatacttatatgagttctgaaaagaaaaatcaccagcgtgctaytggtagaaaccagaatgccaaatttggctaaagtctaatagagacatagcccttcctctgccaatactggcatagataataataatttgtatttatataatgaaacatccccagg

SEQ ID NO: 494743 - DNA, 494 bp, Homo sapiens
ctgtcttaccgggacgtgcatcgagtggtacaaaatgataactactaatggaatgtgatatgctgcccctgccctaccaatgttagagcatcataaaggagattgtgttaattatataatctagttcattccactcagaggctctcccacaaaagcagaaaatatactgttggttcttccacttataatcatattgtctgrttttctggtgtgaatgctaaaatctgccactttttgattgagtacacatttattcccccaggatgctaccttataatacatcatggacttaagggaacatataaagggctaaaagtggcccatatggcccatattagcctgcttttattactgatttgaataagatagaaacttgctgttgtaactgatacttagttcacttaagcctggatggaataaattggtgttactccagacagtggagcaaattatcctaatgctacctgtctccagtgatttgaaatgttattttc

SEQ ID NO: 494744 - DNA, 494 bp, Homo sapiens
ctgtcttaccgggacgtgcatcgagtggtacaaaatgataactactaatggaatgtgatatgctgcccctgccctaccaatgttagagcatcataaaggagattgtgttaattatataatctagttcattccactcagaggctctcccacaaaagcagaaaatatactgttggttcttccacttataatcatattgtctggttttctggtgtgaatgctaaaatctgccactttttgattgagtacacatttawtcccccaggatgctaccttataatacatcatggacttaagggaacatataaagggctaaaagtggcccatatggcccatattagcctgcttttattactgatttgaataagatagaaacttgctgttgtaactgatacttagttcacttaagcctggatggaataaattggtgttactccagacagtggagcaaattatcctaatgctacctgtctccagtgatttgaaatgttattttc

SEQ ID NO: 494745 - DNA, 494 bp, Homo sapiens
ctgtcttaccgggacgtgcatcgagtggtacaaaatgataactactaatggaatgtgatatgctgcccctgccctaccaatgttagagcatcataaaggagattgtgttaattatataatctagttcattccactcagaggctctcccacaaaagcagaaaatatactgttggttcttccacttataatcatattgtctggttttctggtgtgaatgctaaaatctgccactttttgattgagtacacatttattcccccaggatgctaccttataatacatcatggacttaagggaacatataaagggctaaaagtggcccatatggcccatattagcctgcttttattactgatttgaataagatagaaacttgctgttgtaactgatacttagttcacttaagcctggatggaataaattggtgttactccagacagtggagcaaattatcctaatgctacctstctccagtgatttgaaatgttattttc

SEQ ID NO: 494746 - DNA, 576 bp, Homo sapiens
aatttggaaacaattattttttaataaaaacgaagtcagtatcacaagtgctgtttgctccatttgaaaacaaacgtttctggatctccataggaaaaataaaaacaattcaatcggaggttacctaaaactagtccttgtcattcagaatagcttcaggctgctcacatcatacataccttgggcatatgctgaagagaaaacaaaaaatcatggagagattaatttaggtacattattctgataattcctagcaaaggatagccacttttgtcttccgtgtsctctgagcctttttatgaactgatagtttggagctaatgaaaaccaagctttcagatttcctgagtctcatttagacagtcagtagactgtcagcccagagagggacatcaggtgctttccaaaaacattctttagtatgaggttgtggatttgactatgttagagagattgtgaaaattgaatataggaatttgcttatttattttattaaaaaaatttttttgagacaaggtctaactgtattgctcaggctggctcaaactcctgaccttaagtgatcctcctgcctca

SEQ ID NO: 494747 - DNA, 576 bp, Homo sapiens
aatttggaaacaattattttttaataaaaacgaagtcagtatcacaagtgctgtttgctccatttgaaaacaaacgtttctggatctccataggaaaaataaaaacaattcaatcggaggttacctaaaactagtccttgtcattcagaatagcttcaggctgctcacatcatacataccttgggcatatgctgaagagaaaacaaaaaatcatggagagattaatttaggtacattattctgataattcctagcaaaggatagccacttttgtcttccgtgtcctctgagcctttttatgaactgatagtttggagctaatgaaaaccaagctttcagatttcctgagtctcatttagacagtcagtagamtgtcagcccagagagggacatcaggtgctttccaaaaacattctttagtatgaggttgtggatttgactatgttagagagattgtgaaaattgaatataggaatttgcttatttattttattaaaaaaatttttttgagacaaggtctaactgtattgctcaggctggctcaaactcctgaccttaagtgatcctcctgcctca

SEQ ID NO: 494748 - DNA, 576 bp, Homo sapiens
aatttggaaacaattattttttaataaaaacgaagtcagtatcacaagtgctgtttgctccatttgaaaacaaacgtttctggatctccataggaaaaataaaaacaattcaatcggaggttacctaaaactagtccttgtcattcagaatagcttcaggctgctcacatcatacataccttgggcatatgctgaagagaaaacaaaaaatcatggagagattaatttaggtacattattctgataattcctagcaaaggatagccacttttgtcttccgtgtcctctgagcctttttatgaactgatagtttggagctaatgaaaaccaagctttcagatttcctgagtctcatttagacagtcagtagactgtcagcccagagagggacatcaggtgctttccaaaaacattctttagtatgaggttgtggatttgactatgttagagagattgtgaaaattgaatataggaatttgcttatttwttttattaaaaaaatttttttgagacaaggtctaactgtattgctcaggctggctcaaactcctgaccttaagtgatcctcctgcctca

SEQ ID NO: 494749 - DNA, 529 bp, Homo sapiens
gttccaatcacctcccagcagttccctccctcgacacatggggagtatggggattacaatgaaagatgaaatttgggtggggacacagagccaaaccatatcagtgtgagtgatttgtaaacaaaaaatatgtgcacaaccacagatgattggctaaataccagaattgtggagccattaaaacatatgcagtagaaagaaaactaagtgactttgaaggatgattaggtaggaagttaaatggtatgtgccacttccatgtcaactgaaaatgtgtctgtatatgagactgtaggtgatgaaaagttagtaggaattatctccaaacgctgacagcttgaacaaattgattgctacactttcactatacaaasttttaactttaaaaagaggggtggaaatgtttgcctttatgacaaagacaaaacaaatgccagactcggaggtgctgaactcacactcgtcaaggaaataattttgcagacaaatctgcactggataaaaggacatagaaggcagctctattctt

SEQ ID NO: 494750 - DNA, 369 bp, Homo sapiens
caaggagggagtcagaagagacacacttcaacccaactttccctccaaacttcagtgtattgccattgcatcttctcagccaaayccaacaatccaccagccagcaaaggagtctgggcgttgcagtctgcaagggtcaagtttgcagagaccacagcagggcagaaagggatgaatacaacttggggtacaaatgaacaaagagaagtgaagtttgcccattcttctagcttcatctcaagccaacctcctcctctctctctgtccctcctttgacctatttgaatacagcataaatagaatttttaaaatacataaataacatcataataatagataaataaataagtagaataaaaaggaataaag

SEQ ID NO: 494751 - DNA, 369 bp, Homo sapiens
caaggagggagtcagaagagacacacttcaacccaactttccctccaaacttcagtgtattgccattgcatcttctcagccaaatccaacaatccaccagccagcaaaggagtctgggcgttgcagtctgcragggtcaagtttgcagagaccacagcagggcagaaagggatgaatacaacttggggtacaaatgaacaaagagaagtgaagtttgcccattcttctagcttcatctcaagccaacctcctcctctctctctgtccctcctttgacctatttgaatacagcataaatagaatttttaaaatacataaataacatcataataatagataaataaataagtagaataaaaaggaataaag

SEQ ID NO: 494752 - DNA, 425 bp, Homo sapiens
ccatgttgataaaaggcctcttacaatgtgtaatatttacagccaggcaactttgtaagaatctaactgaaattactggatggacagatcacatttaataaacgtgtgtatgccagatactattttatatgctttacaaatactaataatttaattctaacaactctataggttaggtaacattattgtcctgtttaatagatgaagggactaaggctcagagaaattcaataartgagctaacacagaaccagctcccggagccaggcagtttggcatcagtatccttgatcttaatcaccccactgtgttctctaaagattcttactgactatgagattatgaatggaaattaaaatatgtatagttatattgatggggtgttctcttattttggggttctgtttttgtggggttttttaatc

SEQ ID NO: 494753 - DNA, 542 bp, Homo sapiens
tgaacaccatgttgataaaaggcctcttacaatgtgtaatatttacagccaggcaactttgtaagaatctaactgaaattactggatggacagatcacatttaataaacgtgtgtatgccagatactattttatatgctttacaaatactaataatttaattctaacaactctataggttaggtaacattattgtcctgtttaatagatgaagggactaaggctcagagaaattcaataagtgagctaacacagaaccagctcccggagccaggcagtttggcatcagtatccttgatcttaatcaccccactgtgttctctaaagattcttactgactatgagattatgaatggaaattaaaatatgtatagttatattgatggggtgttctcttattttggggttctgtttttgtggggttttttaatcttttaataagctaaaatttctaagcaggctttcataggctttctcttgatcttaatttctttgagcctcctggtgtawtcttaaattccccaattatatttacatttttaa

SEQ ID NO: 494754 - DNA, 537 bp, Homo sapiens
gaaatttgactgaggtttttctaactccaaagccccttctgttaccacacaaacacacacacatacacacgtatacacatatatacaaatccaaattgaacactgtctctgccctactggagcttagagcatcatcttttaaaattaagacatatatatttttaagtagcatacatcacataatgttatgttttattttgcaatacaaacaaacttgctaaagctcctaaacctgctccttttgaattcttaaatttcttctgtattagcaaacagaaaggccaccttttcttcctttaaytaatattaactaattattctaaaatttttgctgttcatgaaagttccttttctgttgttttttttttcccctcatctccttgaacactacattctcctggattttcccctacctcctgggaccttccttttctttagtttttgccgcttcatcttataatattattctcaaggctctgtccttgtcctatacctctcctacgaggtaaccaattgttggtcaaccacatctatttt

SEQ ID NO: 494755 - DNA, 580 bp, Homo sapiens
tgaaatttgactgaggtttttctaactccaaagccccttctgttaccacacaaacacacacacatacacacgtatacacatatatacaaatccaaattgaacactgtctctgccctactggagcttagagcatcatcttttaaaattaagacatatatatttttaagtagcatacatcacataatgttatgttttattttgcaatacaaacaaacttgctaaagctcctaaacctgctccttttgaattcttaaatttcttctgtattagcaaacagaaaggccaccttttcttcctttaactaatattaactaattattctaaaatttttgctgttcatgaaagttccttttctgttgttttttttttcccctcatctccttgaacactacattctcctggattttcccctacctcctgggaccttccttttctttagtttttgcygcttcatcttataatattattctcaaggctctgtccttgtcctatacctctcctacgaggtaaccaattgttggtcaaccacatctattttccaagcttcatctgatgaaccaaatgtctttagcaaaaatat

SEQ ID NO: 494756 - DNA, 451 bp, Homo sapiens
gtcttgctggtctcctgcacatgctctataaaccaacaagagctaccagcaggtgcatgtcaccttgcctttgctcatgttattccactaccaggaatgcccttctcccatatctctgtctatctaaatcttatccatccttaaggacctagaataagtgtgttgtcctctgaattctttgttgctcacatcattcaacatttttctttctctttttcccacattcctctttttaattgamataaacaactatgtcccacctctttcctaagtgttttaaggtggcccagataacaaaaaataaggagacaggtggattagagttccagcacactttctagctgtaagcaagttccccaaactttctgtgccctattttcctcatctgaaaaaatgggaaaagtcacagcgactatttcaagggattactatggaagcaaatgaaatgata

SEQ ID NO: 494757 - DNA, 520 bp, Homo sapiens
aaaaaaaaaatactttacagcaggtttccaaattaattactgctggaaaaagtatgatggtagaaagtctcaaggctgagtttcaatcctacaaatttcaaagcaagttacatttattattacaagaagagcaacaaaatattataaattgcctctgaccagcattaacaagtccttataacattagtaatcactcctaacatagttcgcaatttgatttagtactataaaaataactagtctttttgtttgtttgtttgtcagtatagaamcatcagtgtcacttacctctctgggccctggttgtctttttataaattgaaaagttatataaatgccatcactcttatgctcccagaccctagaagctaccattaattgagcacactttttcctgatcagcccagagtaagcacagttatccaggatattaattccaatggaggaacaggcagaggtgaatttatgtcatgcttgaactacataatctctggagattctcctgattttaaaggtctgt

SEQ ID NO: 494758 - DNA, 562 bp, Homo sapiens
ctgctccacctcccacaacatccaatcaggcatcctgcagacggtggcaaatcacagagaagcaatggcaaaggggctgtggatgggcctgactgtctggacatggccaaatctgctgcccagccacttgctcttgtgacctcatcctgacctgaagcgtctgcctacaggtgctcctgcctctcccctggcccagcaaggaccgcaggatgcccttccttaactcctgggtaggagcccacagtggtgactgatccacgtgaggtcccttaggtggtaaaagcgtctccacccccagccttcccgggacgtcctgtgcagcaggagttgataacgctgtgtacaggctgatgggggtagacacgctcttgttgccaggccctggacrctctgaaccccagcctgggctcctggccttaatggggcagggaggggaccatcggggcacagagccagggatcctgttactctctacatagaggtgccaagtaggctactttattgccaagttttcttttttaaaaaaactttctttccattctatgactctttaagggaagaa

SEQ ID NO: 494759 - DNA, 623 bp, Homo sapiens
tgaggctgggtgtggtggcatgcacctgtaatcccagctactagggaagctgaggcatgagcattgcttgaactggggaggtggaggttgtggtgagccaagatcatgccactatactgcagcctcctgggtaacagagtgagactctgtctcgaaaawaaaaaacattatactaagtaaaagaacaagtcataaaaggccacattttatatgattctgtttatgtgaaatgtccagaagaggcaattttacagacacagaaagtaaattagtggtttccaggaactgaggagaaaaggtaatggggaatcactgcctagcgggtatgggattttccgtaggggagatgaaaatgtggtgaatattgtacaatactgtgactgcactgtcattcatggtaaattttacattatatgtattttaccactctaaaaaacgtgtcatcaattatttcccaaaagactgctaattccttaaaattttctctcacctcccccaaaataaacttgttttaacagcaagactattttttttcaagtataagcttatgcagaaactctatctctgaaacagataaaagtggaagtcttggagtagagagatccctgtgtcccttttaccct

SEQ ID NO: 494760 - DNA, 576 bp, Homo sapiens
ggcttccatctcatgggtgggattggtgctattataaagggtgagtttggagccaggcacaatggctctcgcctgtaaccccaacactttgggaggtcgaggggggaggattgcttcagcccgagttcaagaccagccttagccaacatagtgagaccctgtctctaacaaaacttaaaaaattagcagggtgtggtggtgcatgcctgtggtcccagctacttgagaggctgaggtgggaggatctcttgagctcgggaggttgaggctaaatgagccgtgatggcaccacygcactccagcctgaatgacagtgagaccctgtctcaaaaataaataaaaatagtgagctagggatcaattattttgatggggttttatatgttactagcagctagtattatgccagctaatgtaggcctttgcatttggtacctggagcatgcttccctcatgcatccacatggctcacctctatacccttcaggtctcagctcaaatggcatctcagtgaaacctacttaaccactctaaaatcgcacccctcccgcacctgccctggggccgcctgtgccc

SEQ ID NO: 494761 - DNA, 540 bp, Homo sapiens
  misc_feature (1)...(540): n = A,T,C or G
agcaccaccatgccccagctcactctctctttctctctctctctctctctctctcyctccatatatatatatatatatatatatatatatatatatatatatatatatataaaanttttttttttggtagagatgggatctatgttgccccagctcttcttttcctaatacctctgctcaggcctgggaggcttctctgtctggttggagcaaagaaggctggtccagggttccctccttagtgtctgccagcctaacttgcatccccaggtgcaagagagcctcaggagggcagagcccggccccaagaccttcaaaccattcccaaggcctcctggctctccctctccccagaagcttaagcgtcctaacctaagtagggccaccaagctctacccatcttcaggactctagaagagaggtgttcatgagcccctggactctggatcaatccttcactcgccttcactcctgcaaagtgggggtccatgtgcccatcctacagatgcagatatgcaggcccaggcaaagtccatggcc

SEQ ID NO: 494762 - DNA, 540 bp, Homo sapiens
  misc_feature (1)...(540): n = A,T,C or G
agcaccaccatgccccagctcactctctctttctctctctctctctctctctctccctcyatatatatatatatatatatatatatatatatatatatatatatatatataaaanttttttttttggtagagatgggatctatgttgccccagctcttcttttcctaatacctctgctcaggcctgggaggcttctctgtctggttggagcaaagaaggctggtccagggttccctccttagtgtctgccagcctaacttgcatccccaggtgcaagagagcctcaggagggcagagcccggccccaagaccttcaaaccattcccaaggcctcctggctctccctctccccagaagcttaagcgtcctaacctaagtagggccaccaagctctacccatcttcaggactctagaagagaggtgttcatgagcccctggactctggatcaatccttcactcgccttcactcctgcaaagtgggggtccatgtgcccatcctacagatgcagatatgcaggcccaggcaaagtccatggcc

SEQ ID NO: 494763 - DNA, 577 bp, Homo sapiens
agctgggagcaatatatttttaatgttttaaatgttttatttggcacactaaaacccacatgcttaaccactgtactgcaatgaatgaatgaatgatgagtgttgaatcaaaaaatatgtgttgatsatgtctaagaagggagtgaaaaccacaactgaaacccaccagcctctaaaaaagttatgagtaaattggtgcaaaaaaatattgtttatccacgcctgtaatttcagcactttgggaggctgagataggtggatcacttgaggtcaggagtttgagaccagcccgagcaacatggtgaaaccccgtctctataaaaaattcaaaaattagccgggtgtggtggtgcactcctgtggccccagctacttgggaggctgaggctcaagaatcacttgagcccaggagatggaggctgcagtgaactgttatcaagccactgcactccaggctgggtaacacggcaagactctttgtttcaaaaaaaaaaaaaaaagaaagaaagaaagagtatgattgatctatacattaactccccacaaaggcacagaacagcagaagctgccctggaga

SEQ ID NO: 494764 - DNA, 577 bp, Homo sapiens
agctgggagcaatatatttttaatgttttaaatgttttatttggcacactaaaacccacatgcttaaccactgtactgcaatgaatgaatgaatgatgagtgttgaatcaaaaaatatgtgttgatcatgtctaagaagggagtgaaaaccacaactgaaacccaccagyctctaaaaaagttatgagtaaattggtgcaaaaaaatattgtttatccacgcctgtaatttcagcactttgggaggctgagataggtggatcacttgaggtcaggagtttgagaccagcccgagcaacatggtgaaaccccgtctctataaaaaattcaaaaattagccgggtgtggtggtgcactcctgtggccccagctacttgggaggctgaggctcaagaatcacttgagcccaggagatggaggctgcagtgaactgttatcaagccactgcactccaggctgggtaacacggcaagactctttgtttcaaaaaaaaaaaaaaaagaaagaaagaaagagtatgattgatctatacattaactccccacaaaggcacagaacagcagaagctgccctggaga

SEQ ID NO: 494765 - DNA, 577 bp, Homo sapiens
agctgggagcaatatatttttaatgttttaaatgttttatttggcacactaaaacccacatgcttaaccactgtactgcaatgaatgaatgaatgatgagtgttgaatcaaaaaatatgtgttgatcatgtctaagaagggagtgaaaaccacaactgaaacccaccagcctctaaaaaagttatgagtaaattggtgcaaaaaaatattgtttatccacgcctgtaatttcagcactttgggaggctgagataggtggatcacttgaggtcaggagtttgagaccagcccgagcaacatggtgaaacccygtctctataaaaaattcaaaaattagccgggtgtggtggtgcactcctgtggccccagctacttgggaggctgaggctcaagaatcacttgagcccaggagatggaggctgcagtgaactgttatcaagccactgcactccaggctgggtaacacggcaagactctttgtttcaaaaaaaaaaaaaaaagaaagaaagaaagagtatgattgatctatacattaactccccacaaaggcacagaacagcagaagctgccctggaga

SEQ ID NO: 494766 - DNA, 626 bp, Homo sapiens
tgattgctgctttggccctgcctgttttctaggataaattgtcctgccatctctctgcagttggactagataacaagtaatgagcaagtatgatactgcttcctgcccatgacaccatctaactcaacatctcagaaactggcctttgcagaaaggtagtctccaaccttcaatgacatcttagtgctatccaygaatccttccacatgtccctacttgatatggtttggctgtgtccccacccaaatctcatcttgagctgtagctcccataatccccaggtgtcatgggagggacccagtgggaggtaattgaatcatgggtgttggtttttcccatgctgttcttgggataataactaagtctcatgagatctgatggttttataaagcctgcacatgctctcttgcctgccaccatgtaagacatgcctttgctcctccttcaccttcctccatgattgtgaggcctccccagtcatgtgaaactgtgattccattaaacctctctttctttataaatcacccaatctcaggtatttctccatagcagtatgaaaatgcactaatacactactcattaattcaattcattttactgagcacctactccatgcaaggcattgt

SEQ ID NO: 494767 - DNA, 626 bp, Homo sapiens
tgattgctgctttggccctgcctgttttctaggataaattgtcctgccatctctctgcagttggactagataacaagtaatgagcaagtatgatactgcttcctgcccatgacaccatctaactcaacatctcagaaactggcctttgcagaaaggtagtctccaaccttcaatgacatcttagtgctatccatgaatccttccacatgtccctacttgatatggtttggctgtgtccccacccaaatctcatcttgagctgtagctcccataatccccaggtgtcatgggagggacccagtgggaggtaattgaatcatgggtgttggtttttcccatgctgttcttgggataataactaagtctcatgagatctgatggttttataaagcctgcacatgctctcttgcctgccaccatgtaagacrtgcctttgctcctccttcaccttcctccatgattgtgaggcctccccagtcatgtgaaactgtgattccattaaacctctctttctttataaatcacccaatctcaggtatttctccatagcagtatgaaaatgcactaatacactactcattaattcaattcattttactgagcacctactccatgcaaggcattgt

SEQ ID NO: 494768 - DNA, 626 bp, Homo sapiens
tgattgctgctttggccctgcctgttttctaggataaattgtcctgccatctctctgcagttggactagataacaagtaatgagcaagtatgatactgcttcctgcccatgacaccatctaactcaacatctcagaaactggcctttgcagaaaggtagtctccaaccttcaatgacatcttagtgctatccatgaatccttccacatgtccctacttgatatggtttggctgtgtccccacccaaatctcatcttgagctgtagctcccataatccccaggtgtcatgggagggacccagtgggaggtaattgaatcatgggtgttggtttttcccatgctgttcttgggataataactaagtctcatgagatctgatggttttataaagcctgcacatgctctcttgcctgccaccatgtaagacatgcctttgctcctccttcaccttcctccatgattgtgaggcctccccastcatgtgaaactgtgattccattaaacctctctttctttataaatcacccaatctcaggtatttctccatagcagtatgaaaatgcactaatacactactcattaattcaattcattttactgagcacctactccatgcaaggcattgt

SEQ ID NO: 494769 - DNA, 571 bp, Homo sapiens
gttctgcccgcagggaggaaaacacagggtaaattactggagaagtcagcttcttctgcccctcagagaaatgaggaagctcaagtcaggatcgggagactagaagactccagaaaaaaaaaaaaaaaaaaggcttatctctgattcaccctctgctgcagtaaccaagccttctatcagtggctgagatttcagagtcattttcccagaacaaaaaaatgatatttccaaatcaaagagaggacaaaggacaggattaataaaagggggttggcgacckctttgaaaaggaaggcagagctcggcatcttttatattctcccagttgtccagactcccacccccaagccatgtcgtcatagcattccaagcgggaagaaaaatgagcaactgtcagtctaccatttttacattctagaggaggaactgagatccagcaatgtagatgagtgatgtggccaaagcagtgacaaaaccagacccagaacccaggccctctgagttcaccccctgcactgaccgttcactcactgacccttccttgcctcaatttttcagcagccatcaatca

SEQ ID NO: 494770 - DNA, 493 bp, Homo sapiens
tttcatgcattgctggtgggaatacaaaatgatagtgatttgggaaaacagttggcagttkctgataaattacatactatatgactcaaggatcccactcctagatatttacccaaaagaaattaaaacttatgtccacccaagaacttagttgcaaatatttataatggtctatttataatagcctcaacctggaaataaaatgtttcttactaaatgattaaacaaactatggcatattcccaccctttgattcttgggaaaggctgggaaagttggttatctgaaagttttgcaaaaataacgggaatcaatgatacacgcacctagaggtcagaggatgagaaaacacacagtatgatttatcccactgagtcaccttttgggccccatggtgcccatgttgaatggattcctgcaaatctcttctctcttggccaccctccctctgtcccatccccactcccaggatctagcctcctctcttccagca

SEQ ID NO: 494771 - DNA, 608 bp, Homo sapiens
tcagcaggcaaggatcagtgggtagaggaggctctaaattgtttcttcctcatcacaaggctgcggagaagttgttgctcgcagagacgtatcaaacaccaacatttctgtcctccagctttgaatactcaagtagtgaggctcaaagaggtacgggcttctgagaggaacttttgccctagaattaacacaaagtggacatttacagaataattcaacaaacacttaacaaactcctactataagaaaagtgcttggatagagataagtaaaaattgttctctctactgaagagttgaagtcaaggctaacgtaattactccatttcagcacaatttcacaatgagacaaggagaacactaaccattatgtataatggcaatccaaccacatctgatgtgcaaaacccctgggatggtgagttcaaatagaccaagagctgattataaaaatgtgaaggtgcccacggaacgtggggctcccagcgagtgacctgctgcgacaccagatgcttytggtggatataacagaagagagttgatgagtgaggtggccagggttcaggtctctgttccacaaaagttagacgtgcgacctccaaccagcag

SEQ ID NO: 494772 - DNA, 604 bp, Homo sapiens
catcttagagcagggtggtctctctgaaggccgggctgtctgcagagtgcgtgacatccatctgcacccatctccttcccagggacagcctttggttcagttcttcatgtggtcaccaaggagcaaagctcagagacaaaaggcattctgcccagacagccccaggccttatcatccatctcctgcagaccagaaaccagtgcttgttagcctggccaccccagacagcagacagggtatcccacaggtgcttctgcacgtggccagagactctgcctcccctgctcacctgttggttctgaggagaagatgggaaccaggctggtttttcccasggcaggatcgatgtgtgaatcccccaccgggtggtgaaagccacaagctctctgtcccgtttgctttctaaactgaagtaaataactcaggtccttaatttttcatttttgtggttaatcctgttttcagacatatcacagacatggatgaaaggtcatgtttctcagacatcaagttaaaaaccaatagtgaccacagtcatgaaagaacattcagcctgagacaaaaggggttaacgcacagggaagataacgacggtgagacccgc

SEQ ID NO: 494773 - DNA, 604 bp, Homo sapiens
catcttagagcagggtggtctctctgaaggccgggctgtctgcagagtgcgtgacatccatctgcacccatctccttcccagggacagcctttggttcagttcttcatgtggtcaccaaggagcaaagctcagagacaaaaggcattctgcccagacagccccaggccttatcatccatctcctgcagaccagaaaccagtgcttgttagcctggccaccccagacagcagacagggtatcccacaggtgcttctgcacgtggccagagactctgcctcccctgctcacctgttggttctgaggagaagatgggaaccaggctggtttttcccacggcaggwtcgatgtgtgaatcccccaccgggtggtgaaagccacaagctctctgtcccgtttgctttctaaactgaagtaaataactcaggtccttaatttttcatttttgtggttaatcctgttttcagacatatcacagacatggatgaaaggtcatgtttctcagacatcaagttaaaaaccaatagtgaccacagtcatgaaagaacattcagcctgagacaaaaggggttaacgcacagggaagataacgacggtgagacccgc

SEQ ID NO: 494774 - DNA, 604 bp, Homo sapiens
catcttagagcagggtggtctctctgaaggccgggctgtctgcagagtgcgtgacatccatctgcacccatctccttcccagggacagcctttggttcagttcttcatgtggtcaccaaggagcaaagctcagagacaaaaggcattctgcccagacagccccaggccttatcatccatctcctgcagaccagaaaccagtgcttgttagcctggccaccccagacagcagacagggtatcccacaggtgcttctgcacgtggccagagactctgcctcccctgctcacctgttggttctgaggagaagatgggaaccaggctggtttttcccacggcaggatcgatgtgtgaatcccccaccgggtggtgaaagcsacaagctctctgtcccgtttgctttctaaactgaagtaaataactcaggtccttaatttttcatttttgtggttaatcctgttttcagacatatcacagacatggatgaaaggtcatgtttctcagacatcaagttaaaaaccaatagtgaccacagtcatgaaagaacattcagcctgagacaaaaggggttaacgcacagggaagataacgacggtgagacccgc

SEQ ID NO: 494775 - DNA, 627 bp, Homo sapiens
tgtcttgattatagagcttacgttctagcagtaagaaatagaccattgaaaaggaattaggtaaactataggcctgcagactgcagtaaccaccatgaaggaagtacacggagtggtgagaccaacaataaacaggagaggcctccttgaggtcagggaaagcctctccaacgggagacatttgagctaagacatgaaaaaggagagaacatgttctaggtaaagggaatgtccgcgaggctggaagaatttgttgtaatcaagtgaccaaaaggagrccagtgtagctggcttcagtaaacgcggagcagggtgccaggggatgaagccagagggtgaagctcggccgtcttctgggtcgtgggaagaaactggatttcatccttagtgccacgcagcgtttgaagccaaaactgcgttttaaaacacacatttgaagggaaatctgatatcagagcccatggcaaggaaaagcgccatcccgggtgagccgcctcagctctcacctggatcactgtcttgctcgtcgccgccccctgcctccatctttaccctcccagagtccattcccaacacagatcctttatcaagttagtgaaatcgggttatttttctgccttaaattct

SEQ ID NO: 494776 - DNA, 655 bp, Homo sapiens
ataaggtctcccaggctacctaaacatcaattgtattgctttaatattgactggaattacataaactcattgtggtaataccagcttctcaggcatgaaaatgcaaaaatgaattagttaccatattgctctcagtttcttagtagacagaatctgtcaaaacatgaggtgtagaaagtaattcagtaayaaagggcgtctttggttgtggaaattctgacagccgtgttgtgtgtgtgtacgtgtgcaggagccaggggtaggaacatttactaacatgagccacccaggacttggacgacctaccttttggtaacagaatttgattttccattgggtatctgccttttaccctatgcagcctaaatgtttctggaaaatctgaccctgggccccacgtaataacttgtcagctccagggattcatttaaggccatattcatatttcatctcattggttacagggattaaattagtgatgggcttgaaacccaattccaacaataaaaaatgagagaaggtctgttaagatttctaagaaaaaagcttcctcacttttccaaagaagctatccagaaagacatactcttcctgctacacctcaatacggaagtttttagcagccatttcacaaacatagaggatcaaccttggc

SEQ ID NO: 494777 - DNA, 566 bp, Homo sapiens
ggaggttttctagtcaaatcattttgaacagcaatttgggaattacaaatgatcaaatgatactcccaaaacaatcctcctctgaaaaaaaaaaaatatatatatatattcgagattacccaagaatttaatgcaaattcaaattaamcattttatatattacaagctgactttatcatctttctcattttattagtgtaaccttgtcttccaggttataccttatttttccaaaaatctttattgaaaataaagtatatacatatgtgtgtatatatgtgtggatgaatatatatatatattaaatatatatatatattctttttataaggacttttagaatttccctaaaagaaaatgtgcttcaagatataaatattcattgtgctttatatggaaacctagttcttttcttttttattatttttctttgctgcattgaaagatagaaaataagtaatgccattaccctgctgtgagagttgaaggattaaagtgtccttttcttctgaaaaagaatactaatttttattttcctaatgatttatgagtaatggacatcaaaa

SEQ ID NO: 494778 - DNA, 665 bp, Homo sapiens
atgtcgtctttattatagcctcttcacaaagcatctgtgtgtataacatattaatgtggaaagaacaagagctttggagccagccaacctacatcaaacttagcctcagtctcatctttttgctttgatgcttagaaaattattaaacctctctgagcttatcgatatacaataaaataattaaggatctatttcccaatcaccaaacatttaatctaccatgatgtaagccccatgatatttgaaacatagtaggtagccagtaatatgtgttgtagtgccaactataccccyagacattgtgtaaatgcctatgtatacaagtggtgatcaagacagagttccctacacacagggaaggtttaaaactatttggtgaactggacgaaaaggcaggacatttcagtgtagttatgggtgggtacatggaggaacacatgaatttgggaaactacacacagttccctatacctatacagtagcatggtgtggagaggaatggtgagccatgagtttgaggagataagacagggaaatgtcaggcagcatctggtggtcaggcaaaggcctttggcttctatcccaaagcaaagggggaacccctgaaggatctgagacaaagaagtgacataactggatgcatgttcttaaatgttcagtccagc

SEQ ID NO: 494779 - DNA, 644 bp, Homo sapiens
ttttacttatatctcatcttcgtgggcatcacccaaaccaatctgcctgttacctgctaattttcccctatctctatgcaatgttttccgcctttgctaggcctagaaataatctggagtagttgttaaagacagattttagctacttccagagattcctgctcaatagatttgggggtgaagttcacttgtatgtgattttaaaaacagtctaaatgatcccartgcagttggtccatagatggcactttgagaaataactgttctcaatcaggcatctttgcaatgaaacatcccatcacctctgctattttatttgggatacctggaattcctctttgcgctcattgtttactttaaatcacagtttaatactaatttcttccaagaatccttagctattaattttactccatatttattagagaatgaagaatggagcacacttcttcagcatttttatagagatgcctgtatgattatatgcatggtgttatcctgtgctcgcttgttatgtcacataacattatttctattttccagtcctccatcactactttagactgtgatccctctaaattcaggaatcctatctctgaccagcatggtgtttaaccctgaaagttaccctgaaactatatgct

SEQ ID NO: 494780 - DNA, 189 bp, Homo sapiens
tttcagttcatcagttatttagctgcttaatctgttctttgtcaatttaaaactttttatctgctattgtttttcctattctcctttwtccaatgtgcctgcatgtttctcttttttttcatattttcttattcctttttagggtttcaattctttcacgtcttacttagtttaagcatacttctgtta

SEQ ID NO: 494781 - DNA, 604 bp, Homo sapiens
tccagtgctctgtcggtaaatgcttaataaattgcttgtaggaaaggaggcaatttctgtggtgtaaatacttccaccgtggctgatttccagctgatttaacttaatgtgaagttgagaagagaaatgcgcaatcagctctcctgagcttgatgaccagctgatacaaacaccccaccagtaatatctcctgtgtgactacagctaactccaatcctacaacggaaataaattgagtttctaggatatgtctgtgtgttttattccactccaagtcttcatctctgaggttttcttttaacttgtgataatacatttacatctgaaaaagatgatatttaggacataggagacattactcaacatctagtayttgaaatatctttagatcaaggtattcaattaatttccttggttttttttaaacaggaatctttaactgttcaaacttaattcaaattaagtgcttattgtgagttccccaaaaactgaaaagaaaagtaaagaaacaagacccaatattttcatactgatcttagaccaaagttaacttaaggcaacttgttagtaaaggggaggatggtgatgataaagccaaacatat

SEQ ID NO: 494782 - DNA, 592 bp, Homo sapiens
ggtgggcgtggtcaagactgggggcgccctggaaacttccccacccaagtttctcagattttctgttccatctctctctcactctttcctgaaatccagaatttcagaactgggaaggctctccaaaacaattcatccattttacagagggagcaactgactcggagaggcagtgacatttgggcatacggtgccttgtctccgtctgaaatccgggattcttgactttctccacccttgcccagtgaaccccgggcttgtgctgggggcgggttgtgacgggattgggatccctggcctcgggaggcgagtggggcagcagagccggccccccagcggttcccttcatctccccycgccccgcagtgtgttgcatactttctaaggcggcggctgcagcagcggctccatccagcccgtcagctcctcctgcaaggcatggctggctacctgagtgaatcggactttgtgatggtggaggagggcttcagtacccgagacctgctgaaggaactcactctgggggcctcacaggccaccacggtgaggggctgggaatgggggtgggtccccggtcccctgtacagatcag

SEQ ID NO: 494783 - DNA, 620 bp, Homo sapiens
taggcattatgatatataaaatagaaaaaagtgaagatttatgtggtttagctgagtcaatgagtcaaaaatgtggaatgctgaaaaaaaatgaaatattttatcccattcatagaagcacttcttcaaattataattttccagagatgatcatagtacactcaaaattaatttttaaattttggtaactgctttaataaggatgattgagaaactgcagtgtattaagaatataatagtagggaactaggaacatcagccctgactcagatttcacccgtaactactgaaaatgataaagagaggttgggatgaygtgattcatatatttgaatgtctatcatgctgaaaatttcattttattttaatttcttaattgaaggataaaattttatgtatttattttgtacatgatattctgaggtatatttacatggtgaggtgactgaatctagctaattagcatatgtattaccttatattgttatgaattttgtggtaattaacatccaaaatatataagaaattcaaacaactcaatagcaagaaggcaaatgaactgattaaaatataagcaaaagatctgagcagacatttctcaaaagaagacatacaaatgg

SEQ ID NO: 494784 - DNA, 651 bp, Homo sapiens
atggctcacgcctgtaatcccagcactttgggatgccaaggcaggcagatcatgaggtcaggatattgagaccatcctggctaacacagtgaaaccccatctctactaaaaatacaaaaaattggccgggtgcagtgcctcacacctgtaatcccagcactttgggaggccaaggtagatggatcacctgaggtcaggagttcaagaccagcctgactaacatggtgaaaccctgtctctactaaaaatacaaaaattagctgagcatagtggcacacacctatggcacacacaattctggtcccagccactcagaaggctgaggcaggagaattgcttgaactgttgmgggattcaggaggacgagagagacctcgggttgaaacaggagaatattgagtgcactcaggcccggctgactcacgtgtaaaagactgggcccggaataaagacagcacctgacttttatacacacttcagaaaagggggtgggctagcttgaagcaaggttacagtggcatgaaatcagggatacagaggcaggacaaagacaggattgcacatgactgttgccaagcaacccagatgtctgttatctaggtttgtcagggcacaggcttatcctataaccttcactatggtgctcaggca

SEQ ID NO: 494785 - DNA, 620 bp, Homo sapiens
ctttgcagggatccttgaccctggtctgtatgctgtgwtttgccatagaatagagtacagttttcatagacctagattttttgtattagagtgctttatcctgaatagtttaaactgaagaagtggagaaacttgtgtttcaacaaaataagtacagtaatttcctcttatacatgggggatacatttcaagacccttagtgaatgcctgaaaacatgaatagtgctgaactctatgcatacaacaatttttaaaaatacatatatatctataataaaatttaatgcataaattaggcacaataagagattaataatatctaatggtaaagtggatcaattgtaacaatatactgtaataaaagttaagtgaatgtgagctcacaaaatatcatgtactatagtcaccctactttctgcactgatgtgagatgataaaatggctatgtgataagtgaggcaaatgcagtaggcattgccatgtagtcttgggctattattgaccttctatttgactatatgtcagaaagaagatcatctgcttcacgtgatcttggatccgtgagccatgatgatgttgttggttggatgttaggtacagattatgtcaatgactagtga

SEQ ID NO: 494786 - DNA, 620 bp, Homo sapiens
ctttgcagggatccttgaccctggtctgtatgctgtgatttgccatagaatagagtacagttttcatagacctagattttttgtattagagtgctttatcctgaatagtttaaactgaagaagtggagaaacttgtgtttcaacaaaataagtacagtaatttcctcttatacatgggggatacatttcaagacccttagtgaatgcctgaaaacatgratagtgctgaactctatgcatacaacaatttttaaaaatacatatatatctataataaaatttaatgcataaattaggcacaataagagattaataatatctaatggtaaagtggatcaattgtaacaatatactgtaataaaagttaagtgaatgtgagctcacaaaatatcatgtactatagtcaccctactttctgcactgatgtgagatgataaaatggctatgtgataagtgaggcaaatgcagtaggcattgccatgtagtcttgggctattattgaccttctatttgactatatgtcagaaagaagatcatctgcttcacgtgatcttggatccgtgagccatgatgatgttgttggttggatgttaggtacagattatgtcaatgactagtga

SEQ ID NO: 494787 - DNA, 620 bp, Homo sapiens
ctttgcagggatccttgaccctggtctgtatgctgtgatttgccatagaatagagtacagttttcatagacctagattttttgtattagagtgctttatcctgaatagtttaaactgaagaagtggagaaacttgtgtttcaacaaaataagtacagtaatttcctcttatacatgggggatacatttcaagacccttagtgaatgcctgaaaacatgaatagtgctgaactctatgcatacaayaatttttaaaaatacatatatatctataataaaatttaatgcataaattaggcacaataagagattaataatatctaatggtaaagtggatcaattgtaacaatatactgtaataaaagttaagtgaatgtgagctcacaaaatatcatgtactatagtcaccctactttctgcactgatgtgagatgataaaatggctatgtgataagtgaggcaaatgcagtaggcattgccatgtagtcttgggctattattgaccttctatttgactatatgtcagaaagaagatcatctgcttcacgtgatcttggatccgtgagccatgatgatgttgttggttggatgttaggtacagattatgtcaatgactagtga

SEQ ID NO: 494788 - DNA, 149 bp, Homo sapiens
gccagggaagggctggggcaaataagggacaggacacatccaaatccaggaaaggrccagggccatgacagagccagggcgagtccttggcagggccaagttccaggccagggccaggaaagggtcatggcagggtcactgtacggcca

SEQ ID NO: 494789 - DNA, 149 bp, Homo sapiens
gccagggaagggctggggcaaataagggacaggacacatccaaatccaggaaagggccagggccatgacagagccagggcgagtccttggcagggccaagttccaggccagggccaggaaagggtcatgrcagggtcactgtacggcca

SEQ ID NO: 494790 - DNA, 626 bp, Homo sapiens
cgcctggccagactttgtagtttgtatcatctatcttgatgatgcctgacgccctttttctttcttttctatgtgcagcataataagagtgccacatactccgtgggaatgyagaaaacgtactccatgatctgcttagccattgatgatgatgacaaaactgataaaacccagaaaatctccaagaagctttccttcctgagttggggcaccagaaagaacagacagaagtcagccagcaacttgtgcctcccatcggtcggggctgcacggcctcaggtcaagaagaagctgccctcccctttcagccttctcaactcagacagttcttcatactaatgtgaggaaacaaacacgttcaggccccgaacatttccggtgctgactcagccttaaacatttgtgccataatggaaaatatctatctattctcaaatcctgtttttctcatagtgtaaactcacatttgatgtgtttttatgaaggaaagtaaccaagaaacctctaggaattagtgaaaaaagaacgtttttgaggcctgttactatattgctataagttatttattatataaagtattgtaaatagaatagtgttgaagatatgaaatacggctatttttaatg

SEQ ID NO: 494791 - DNA, 612 bp, Homo sapiens
cgcctggccagactttgtagtttgtatcatctatcttgatgatgcctgacgccctttttctttcttttctatgtgcagcataataagagtgccacatactccgtgggaatgcagaaaacgtactccatgatctgcttagccattgatgatgatgacaaaactgataaaacccagaaaatctccaagaagctttccttcctgagttggggcaccagaaagaacagacagaagtcagccagcamcttgtgcctcccatcggtcggggctgcacggcctcaggtcaagaagaagctgccctcccctttcagccttctcaactcagacagttcttcatactaatgtgaggaaacaaacacgttcaggccccgaacatttccggtgctgactcagccttaaacatttgtgccataatggaaaatatctatctattctcaaatcctgtttttctcatagtgtaaactcacatttgatgtgtttttatgaaggaaagtaaccaagaaacctctaggaattagtgaaaaaagaacgtttttgaggcctgttactatattgctataagttatttattatataaagtattgtaaatagaatagtgttgaagatatgaaatac

SEQ ID NO: 494792 - DNA, 612 bp, Homo sapiens
cgcctggccagactttgtagtttgtatcatctatcttgatgatgcctgacgccctttttctttcttttctatgtgcagcataataagagtgccacatactccgtgggaatgcagaaaacgtactccatgatctgcttagccattgatgatgatgacaaaactgataaaacccagaaaatctccaagaagctttccttcctgagttggggcaccagaaagaacagacagaagtcagccagcaacttgtgcctcccatcggtcggggctgcacggcytcaggtcaagaagaagctgccctcccctttcagccttctcaactcagacagttcttcatactaatgtgaggaaacaaacacgttcaggccccgaacatttccggtgctgactcagccttaaacatttgtgccataatggaaaatatctatctattctcaaatcctgtttttctcatagtgtaaactcacatttgatgtgtttttatgaaggaaagtaaccaagaaacctctaggaattagtgaaaaaagaacgtttttgaggcctgttactatattgctataagttatttattatataaagtattgtaaatagaatagtgttgaagatatgaaatac

SEQ ID NO: 494793 - DNA, 626 bp, Homo sapiens
cgcctggccagactttgtagtttgtatcatctatcttgatgatgcctgacgccctttttctttcttttctatgtgcagcataataagagtgccacatactccgtgggaatgcagaaaacgtactccatgatctgcttagccattgatgatgatgacaaaactgataaaacccagaaaatctccaagaagctttccttcctgagttggggcaccagaaagaacagacagaagtcagccagcaacttgtgcctcccatcggtcggggctgcacggcctcaggtcaagaagaagctgccctcccctttcagccttctcaactcagacagttcttcatactaatgtgaggaaacaaacacgttcaggccccgaacatttccggtgctgactcagccttaaacatttgtgccataatggaaaatatctatctattctcaaatcctgtttttctcatagtgtaaactcacatttgatgtgtttttatgaaggaaagtaaccaagaaacctctaggaattagtgaaaaaagaaygtttttgaggcctgttactatattgctataagttatttattatataaagtattgtaaatagaatagtgttgaagatatgaaatacggctatttttaatg

SEQ ID NO: 494794 - DNA, 360 bp, Homo sapiens
gtctaagacatggtcttcatcttgaattggttctgggtcaacagaagcctaggctgggttgattagctcayttcactcttccctgagaggcctctgaggagctggccacactgggagctttaggagggtaggatcaatgcctttggatatctgggtggggtagagggagttttaagtatagagaaagggggaggggagagagtgttgaaagggtgctgatggcacatctggacaaggggcagacctgggcctacttaagatggcattgcattgggctcagggtttatagagcatagaatatgctttacatggaatgatgccacctccactgcctgagatgcactgtatagactgagatgc

SEQ ID NO: 494795 - DNA, 360 bp, Homo sapiens
gtctaagacatggtcttcatcttgaattggttctgggtcaacagaagcctaggctgggttgattagctcatttcactcttccctgagaggcctctgaggagctggccacastgggagctttaggagggtaggatcaatgcctttggatatctgggtggggtagagggagttttaagtatagagaaagggggaggggagagagtgttgaaagggtgctgatggcacatctggacaaggggcagacctgggcctacttaagatggcattgcattgggctcagggtttatagagcatagaatatgctttacatggaatgatgccacctccactgcctgagatgcactgtatagactgagatgc

SEQ ID NO: 494796 - DNA, 360 bp, Homo sapiens
gtctaagacatggtcttcatcttgaattggttctgggtcaacagaagcctaggctgggttgattagctcatttcactcttccctgagaggcctctgaggagctggccacactgggagctttrggagggtaggatcaatgcctttggatatctgggtggggtagagggagttttaagtatagagaaagggggaggggagagagtgttgaaagggtgctgatggcacatctggacaaggggcagacctgggcctacttaagatggcattgcattgggctcagggtttatagagcatagaatatgctttacatggaatgatgccacctccactgcctgagatgcactgtatagactgagatgc

SEQ ID NO: 494797 - DNA, 483 bp, Homo sapiens
tggacattttctatcttatgtcatatgttctgcacattagtatagtgacaaggtaacagtaagtacttttttaaagctttagacttaggagattgttgtctcatgtgcagagaccaaggaaattgtatgtatcagtgagataggcttcccatattatgctcatgcrttatacctgcctagctacattgcctttttttaaattaaacattatattgatgtaatcatactattacataggcgatatatgtattttatgattgtatgttgatatagttatggggaatctaatcctatacgatgtaatcatagattcacatatagttgtatattttgcccaatttctttcagtggtaatgtttcacacatatcacaatcaggatgttgacatcaatacagcccactgattttattcacctttcctcagctttactttccccaagtatactcctccaggtatgcatgggtgtgtagaaatatggaacg

SEQ ID NO: 494798 - DNA, 609 bp, Homo sapiens
ttttcttctttcattgaggccactatttcctgcaaatatggtccaaagagagacagtcttctcagtatagacttcccacagatgcagctgttagtgaaactgctgcctcactaccatgtaagtcttctatagttattatagccagctttccattaaccgtaaattgatcatggattttcagtttaatcaaagggggaaatgtaaggactctgaaaaaaaaattaaaattttccaaatcaaccaaaatgtctacatattcaaaggcatcaattgtctggactgatgcagcaacaattgatgctataccatttctatgacagtatgggcatccccacaaccagcagcagttagacatgtgcaggtgcccctgctagagaccaacaataatacaagctagctcttagcaagtgtcagtttctctgaattttctcatttaatgcccacagccctgtaatcagatacagcaataatgttamtaatcatcatttctgaagcacagagaaattaagcaggtattcaatatcataagcgtttaagaaataaagccaggatttgaatcaaattatttctgtatcatgtagtgagtagatatttaaatgcctaaatata

SEQ ID NO: 494799 - DNA, 493 bp, Homo sapiens
aatatagtttggaaggcagtttgcattctgagccttaaccatatttmtttcttttaacccaattttttcacttatatgattttatcttttggaagtagtccaaaatatggaaaaagttatgtgcagcaaagatatttgttgcagtgctattttaaaaaatgaatacaatgggaagatcctaagtgtccaacaacagatgaacagataagtaaattaagaaatactcatttggctgggtatggtggcttaaacctgtaattccagcattttgggatgctgaggtgggtggatcacctgaggtcaggagttcaagaccagcctgcccaacatggtgaaaccccgtctctactaaaaatacaaaattagctgggtgtggtggtgcatgcctataatcccagcaactcgggaggctgagacaggagaatcgcttaaacctaggaagcggaggttgcagtgagccacaccactgcactctagcctgggtgagacagag

SEQ ID NO: 494800 - DNA, 603 bp, Homo sapiens
accatctggcctggtattcagactgcagtaaagccaaagaatgggttgaggtggtacagagaccactgggatataccttaaaagagccacagttgtccaaaatggaataccaagcgygccccgataaactgttctaagcaattttacaatccggttaaatgttttttttttgtatgtgtgtgtgtaagtacaaacatgcatatatgtgtgtgtgtgttggggagaaggctgagagttgagaccagtactccattttagaaaaaagtacttgtttattttttaaaaagtatttatttgtttatttagagacagggtctcactatgttgcccaggctgttcctgaactgctgggctcaagtgatcctctcgcttcagcctcccaaagtgctgagattacagccatgatctaccatgcctagctgaaaaaactactttattttatttacttaagtcctcagatttgtttgtcatttttaatgttaaaaattcagaatctatgattttgaaacagattttggtaatcccgtagctcagtattctacccatggacttagagatattctgtgtgaacagattgatataaaaagatatatgtgtgtatgt

SEQ ID NO: 494801 - DNA, 657 bp, Homo sapiens
gcacctggatgacttatgctaccattttgtgaagtaatcataaagtgttacacatttaggaaagaacatgatgggttyagttttagacatacggaggtacctacggacatccaagtagaggtccaggctacagatccaaagcttatattggcttttgatatagatgtattttttactttattgctaaaattcagctagtatatgtcagggtggctgtatcagttggtaaaattctgaaatgctctggactcattgataaatggtcatttccttcagactcccacgtgcgtcccatttcccacacaccagctgttctaacccttcttgggatacccccataccaccctacagtccatgatgaaagggttaatacctggcccagaagtgggcctccaggaccctgcccagccctgtggctgtcctgtctgctctgtttgttaaaagttttgaatataactcctgctcacaaatcatgaaggtggaacacatttcccacatagccatgtgcttagtctgtttcacaatcttccacaaatcccatcctaagctgcccttccagtctaattgatatctctcctaagtcccctctgctgcaggcagcattaattacccactgctccctgactccctgcattttctcaccttcatttctttgtg

SEQ ID NO: 494802 - DNA, 657 bp, Homo sapiens
gcacctggatgacttatgctaccattttgtgaagtaatcataaagtgttacacatttaggaaagaacatgatgggttcagttttagacatacggaggtacctacggacatccaagtagaggtccaggctacagatccaaagcttatattggcttttgatatagatgtattttttactttattgctaaaattcagctagtatatgtcagggtggctgtatcagttggtaaaattctgaaatgctctggactcattgataaatggtcatttccttcagactcccacgtgcgtcccatttcccacacacyagctgttctaacccttcttgggatacccccataccaccctacagtccatgatgaaagggttaatacctggcccagaagtgggcctccaggaccctgcccagccctgtggctgtcctgtctgctctgtttgttaaaagttttgaatataactcctgctcacaaatcatgaaggtggaacacatttcccacatagccatgtgcttagtctgtttcacaatcttccacaaatcccatcctaagctgcccttccagtctaattgatatctctcctaagtcccctctgctgcaggcagcattaattacccactgctccctgactccctgcattttctcaccttcatttctttgtg

SEQ ID NO: 494803 - DNA, 632 bp, Homo sapiens
ctgattgaggctctgatacttactgggactctacttgtcctgcttccagtttctactgaacacccagtgtttgttayatcatgcataagtacaacactttatattaagtgccagatgtaagcacagtgagatgtgaaggagttctggagaatatgagctcacttggactggaacagtcgggaaagggttcaggaatgagggggccttgagctgattccaaatgatgggcaggacatggagtagctgagagggaaggcatgaacctgtcagataatggcataagcagaaattttcatggaagaaggaagatgacaaatagaataggagggaactttccaactctgtgaggccagtgttatcctcatattaaaatcaggcaaagatatcacaagaaaaaaactccacagaccaatatcctttatgacaatagacacaaaaatccttaagaaaaaactagtagcctgaatccaacaacatgtaagaaggcttaagtaacatgaccaaatgggatttatcccaggagtgcaaggttggtttaacataaaaaagccaatcaatgtaatataccatattaataaaataaaggataaaaaccacatgatcatctcaataaatgcagaaaaactatttga

SEQ ID NO: 494804 - DNA, 591 bp, Homo sapiens
ctgctgatctgataggaggtggagctcaggcagtaatgctcccttgcctgccacttaccccctgctgtgcggcctggttcctaacaggccacacaccggtactggttcaccacctgggggttggggacccctgctataactgattcatcaaccttctttttctctagacatattcagctcagctctgttgattttcctgcttagtacctaatttttatttaatgggttttgcacctcttcaccattccctattcaatttcagcacatcccagcttcctaaggatagaggataaacagtcaagtaaaacaggtcctttctgacttcatcctctgaaamgcagcaaggtcaggtgaatcaatgcaaacaacggtaagcagggagcctgcacttcagtataacttcattggtaacatgaagtctcatggcaccaactgtggattcttccttttccagcaggtctgagggacagtgatactctttaccaaggtgggaaactggaggccaaattagatgaatattgacttgtccagtgggaaaagtcagtatggggaagagcagtaatcaatgcattcattcattgaataaatgct

SEQ ID NO: 494805 - DNA, 629 bp, Homo sapiens
atatttaaaaacttcaatctactttacatagaaatcaagagtaaacaaaacaattttaaaggttaaaataattatagtatttaagcaactattctcatagtcttacaagcaaatattatcatttaaaatttttagcaatgttttattcagggctaataaatgtggwacataatttataattagccactcccacatccattacagacatcactaatcaatcatggaacattttttttctactaattcctatggtagcctcataatccttgcaaaggattcaaacagcccttattgttcaacaggaattagaatgagagttaaaatgtatttgtatctcctctctatgccttcatcaatacacagctaagaaaattttaataatttcatgtaagatgtttgtagactattctatttatgttatagttattttaacagcagacttccatgcaaaatgtggtcatatatatgtatatatgacctcattccttagttttagttttcaacctcaagaatcaaatttgcttcaacataatacacatacagaattctataaatcaccaaaacctaatacctcaacctcatataatgtatcgactttagctctttggattctatcaagcttcttccaa

SEQ ID NO: 494806 - DNA, 569 bp, Homo sapiens
acaaagcaaagaaatacttgaccacactttgaccttcactttagattaattcatgattaagtgcctgctctcaaagcatccatttctctggccatagacataaaatatttgttgtttgttcactttctgtgatatccatacccactccaatcctaagataaagtttctaattcttcctctatcttgttttctttaaaagtattttttctcatatggtcccttcaaatcggctctctgcttcattctttttccttgtttgaatgaaataccttgcccattgtttatattctctgcagattataataatcatcacaaggtctactcttcctataatgatatagactatttcttcccatatgatatggagtctatttctccaatcttgaatttgggttggtcatttggctggctttgcccaatgtaaccttagsaaacatgatacaagcagaccctggaaaatcacttgtacgatggctttggcttatttgctgctcttggaactctgagctgacatatgaacaaacctgagatatcctactggatgatgaccatatggaggcaagctccag

SEQ ID NO: 494807 - DNA, 598 bp, Homo sapiens
ctgtttggatgagagaacacaaaaggcaaaggaagggtaaatttgctctctctgtgctgtagctgggacaccctttttctgccattgggcaccagaactccaggttctccagcttttgggctccagggaattacaacagggcaccccagattctcaggcctttagtttcagactgaagctacaccatcrgcttccctggttctggagcctttggacttggactgagccacactaccagtatctttgagcctccagcttgtagacatcctactgtgggatttagactccataatttgcatgagagaattcccaggatatatcccctcttttctatctatcaatctatctgtcaatcaatcaatcatcatctaatctgtctatccatccaaccatccatcattccctccctccttccctccgtccatccatcaattctactggttctttttggagaatcccaactaaaacacaaccatttttcaagaattgacactgcttctaggcaccgttctaaagatcatccagttattaaataaactaacaggacttaggagccaggttttcttcctttacttgaatgaatgaaacacctatcaaa

SEQ ID NO: 494808 - DNA, 598 bp, Homo sapiens
ctgtttggatgagagaacacaaaaggcaaaggaagggtaaatttgctctctctgtgctgtagctgggacaccctttttctgccattgggcaccagaactccaggttctccagcttttgggctccagggaattacaacagggcaccccagattctcaggcctttagtttcagactgaagctacaccatcggcttccctggttctggagcctttggacttggactgagccacactaccagtatctttgagcctccagcttgtagacatcctactgtgggatttagactccataatttgcatgagagaattcccaggatatatcccctcttttctatctatcaatctatctgtcartcaatcaatcatcatctaatctgtctatccatccaaccatccatcattccctccctccttccctccgtccatccatcaattctactggttctttttggagaatcccaactaaaacacaaccatttttcaagaattgacactgcttctaggcaccgttctaaagatcatccagttattaaataaactaacaggacttaggagccaggttttcttcctttacttgaatgaatgaaacacctatcaaa

SEQ ID NO: 494809 - DNA, 593 bp, Homo sapiens
agctggaactccagcctgctcctctggagctttaagacatgggccagttgccatatacttcctttgggcttacagaaggtcccgtttttcttcaaacccctgcgaagcctgtaactgagttcctgttatgaagaactcttgccagtgttctcttcatgactgacagtcacctaagacttggatttcttctctgacttatttctcactctctcctactcacctggaaatgccaccatgatgcttgccacagatgtgggtgactgtgcctgggcctcaagcactggcccttacagcaaagcaaagggcagtatccatcggctctcatgttcctgtttcaacgccacatccccttgtctttgagatctcagtatgtttcctgataaagtcagctctgaaatgagggtgtggtagtatctgcattttgcatatttctttcaagctatgagaatgcaagaytgtggaattttagtaagtagtctatataggatgcatttcaagattcttaatgcacttgacacatcattcatccaaagtacaagttcctggcaattccggttcattacaacacagacctgacactagatgtgagcacc

SEQ ID NO: 494810 - DNA, 518 bp, Homo sapiens
cttaatagtctctgttgcccttgaacccctgtagctttttgtttctgcttctcatttgccccttaggttttattgccttgtcataggtccctaattcttcttctagaacccagagcaaagcagtaaacaactttatatgggccaggcattgtactagccgctttgtgtagtatcttatgtaatttctacaacgttggtttatcttttttaatccccattttatagatgagatgactgaggttcagaagtcctcttatctataaggtgttatagtacatgttcaactrtgtttcctctgtagatcccggcacaaggcagggggtcttcctcatggcagatgctcaggaaataagggatgatgccatttttaagagcagtttgggttgagtgttggggtgggcagagagtggggtgtcatgggatacgtctgtataggcagtaggtaagagagggtccaaggtcagagtgccctgcagtcacacaagctgaatgctggtggtgactgattggtgttctct

SEQ ID NO: 494811 - DNA, 518 bp, Homo sapiens
cttaatagtctctgttgcccttgaacccctgtagctttttgtttctgcttctcatttgccccttaggttttattgccttgtcataggtccctaattcttcttctagaacccagagcaaagcagtaaacaactttatatgggccaggcattgtactagccgctttgtgtagtatcttatgtaatttctacaacgttggtttatcttttttaatccccattttatagatgagatgactgaggttcagaagtcctcttatctataaggtgttatagtacatgttcaactatgtttcctctgtagatcccggcacaaggcagggggtcttcctcatggcagatgctcaggaaataagggatgatgccatttttaagagcagtttgggttgagtgttggggtgggcagagrgtggggtgtcatgggatacgtctgtataggcagtaggtaagagagggtccaaggtcagagtgccctgcagtcacacaagctgaatgctggtggtgactgattggtgttctct

SEQ ID NO: 494812 - DNA, 575 bp, Homo sapiens
gggcaattctcacttgaggcctctcatgcttttttttatagttggatgatggctaaaacaggaatcatctggaggttcaactaggctaaaagccaaagatgacctcttcatttctatatttgtcacctctgcagaattgggtgcaacacctggaagatggttgggcatctagctctctttctacagtttctccayatgtctgcttcagacttcctaacagtatggcaatcctagggaagtcaaatttcttagtgctgactggcttatcctagaataagttttgcaaaagcgaaagtcacagaagacataggcagaagctgtgaaacgtcttataatttagccctacatgtcctataaagtcacttctgccatgttttatatgaaaaacaagtcacgttttgggtaggccatattcaaggaaaaagcaatgagattttacctcttgatttcaggaacatcattcagtatggtgaataaagggatcattagttttctttgtgacataagcaatgctagtagcagcaggttgatatgatcaaagtgtttgggttcctgagagattactgggtaacgag

SEQ ID NO: 494813 - DNA, 478 bp, Homo sapiens
tatgattttaggcttctgttcagatttaatttcatgttttctgkcaaaaatattcattaaagacatctgtgctcttcaaatgcaagtactatttgtatttttagcttggcattggtatctgtatgaaatagaggatttgtgtaatatatctgaattagtctattaaaataaaaagtgtatgtgatctgtgggtgtggcttgtaggttgggaggatttactggtactgcaatgtcagatgtatgtgaaaacttttgttattgaggaaattaaattgtacctatgctatatttttaatgtaagtgttaaattatacatcattttcacaactagtttagtgtctatggtttaattaatgtcttcaatatttatttcagagtttttatcactaaccatgctagaggttaaggtaaattgtttttaggtttgctggatgaagtttttgcgctggcagttaccatatcctcaagaggagtggga

SEQ ID NO: 494814 - DNA, 574 bp, Homo sapiens
gcatttttgttattaatcattatgaataacaaatgtcctttgacagtggtttgagaagaccaggtattttggacaagctgttagctgacttttccaaggcaaaaacaaaacacaaatggaagagtgtattatatagttcctttctccatgttaccctcttcttagaacctacataaatctgaatgggaacaatgccagacctcaacaaagacaattgtcaatatgcatactggatataaaagtttgtatttatggcacagggggatagatggaaacggtgattggggtgctctggatagcctagctttgggaatatgtatattgacrcaataagtatatatgtcgagtaactttattaatggtttcagagaatgaccagatgaaggctactgcaatcttggtcacccttcacagttaagcatggacatggttatacaggagagtgggtttttacattacagaaaaaaaaaatcttgtggtacaagggagggattttcttcctggccttctccaatgaccaagactataaagctcattaatgtgtttcattcattagattttttttaccaaattt

SEQ ID NO: 494815 - DNA, 649 bp, Homo sapiens
ctgccaaatggttctccataagactatttttttattagggtcatgtgctattaattcttttgatagtgctttctgctctcttattagagcatacagggaagtgcttcttgggaagtattaggccaaagtcatgagagtgaaagccaggtttgtacaacttatttcttctactyactttcaacactttttgacactttttcttctattttctgacacataaagttctattcaaactagtttctgaacaatgtcttagcatgtcctctatgccttttccccttttctccaatttttatgtgtcaaaattctgtttattcatagagagtaatttatgtttcattttctctattagatgaggcaaattcttctggcataatgaaatagtaaactgtccttccttttaaccccattgcatttttatttcttctagtacctaatataattcactgttttattttccaattactccctttagtagggattttgtccaaagaggcctatacacagtcaacagtcattgttaaatatttcattgatgtaggacataaacataagcatcatttaatctttaaagataaactaataaatatttaaagtatctcctgattgttttatttcaattttaattcaatgttttatctagcttatt

SEQ ID NO: 494816 - DNA, 588 bp, Homo sapiens
tcagcattctggagttctgagcctgtcttggagtagggctcttagtcatccatatcagaatcatctagagtatttaataatwtttaatcttcttcaaattgcctagatcaactacttcagacttactggaaatggatttgggaatctctaatttttttacgtgaataggttttgggaaacaggtgatgtttggttacatgaatatgttctttagaggtgacttctgagattttggtgcacccatcacctgagcagtatacactgtaccctatgtgaagtcttctatccctcacctccagacacttttaatccacaacaaccatatttctagagaagaaagcatcctttctatccaatcctgcatctccatcaggggacagctctgagtaaatctagagacagtagggtgagtaggaaagactgggtcctgccctgaaacacagttcaatgccttattttcaggagtgaaagaaaaggccaattctagaactacaatctagtaagattcaggaaagagaggctggccttagtttctttggtgagtatggtagtgattaccctgaatattcaattactggcaaacaaggc

SEQ ID NO: 494817 - DNA, 666 bp, Homo sapiens
aaatgcctggctttcagaacttgttctcacacttctcttatatgtgacctcctgttctactcctcaattttctatctgtaaagggaagtgatgtgaaagagcctacctcatgaagctgttgtgaaggctaaatatgtcaatgtttgcaaagctaagaaggctgtggccacattgtaaggacttagtacaagtcagctatcatttttatattactacattggtcagttaattcttcctacaattttattaggtgagtgttattgcctactttacagaagaggaactcatattcagagactttacctgataaagctaatattacatgggaagtaaacggtaccacctaacaaagagctagtagagactgtctttttctgcagtaaggaaataacgtctcaaagagtattrcctctgtaactgtttggattagggaatcattgaccctagttacgtaaaaaactccaaatgaagacaaggaaagtaactagcacattgcagagatttttattttcagttaatgtttggaaactcacatctcacagcccaaaatgtccatctaatttatcagcgagcattagagctgattggatgccttgtcatgcaaatatgaacaaggaatctcatcacagttgaagagcttggaatgtatgagcttaatgcatgtct

SEQ ID NO: 494818 - DNA, 666 bp, Homo sapiens
aaatgcctggctttcagaacttgttctcacacttctcttatatgtgacctcctgttctactcctcaattttctatctgtaaagggaagtgatgtgaaagagcctacctcatgaagctgttgtgaaggctaaatatgtcaatgtttgcaaagctaagaaggctgtggccacattgtaaggacttagtacaagtcagctatcatttttatattactacattggtcagttaattcttcctacaattttattaggtgagtgttattgcctactttacagaagaggaactcatattcagagactttacctgataaagctaatattacatgggaagtaaacggtaccacctaacaaagagctagtagagactgtctttttctgcagtaaggaaataacgtctcaaagagtattacctctgtaactgtytggattagggaatcattgaccctagttacgtaaaaaactccaaatgaagacaaggaaagtaactagcacattgcagagatttttattttcagttaatgtttggaaactcacatctcacagcccaaaatgtccatctaatttatcagcgagcattagagctgattggatgccttgtcatgcaaatatgaacaaggaatctcatcacagttgaagagcttggaatgtatgagcttaatgcatgtct

SEQ ID NO: 494819 - DNA, 666 bp, Homo sapiens
atgtattccctttagcaatctattaagatttagtagtcatgtcatctatcatctcttttttcataatgtttcataatgttttcattagccatctgaacaatttcaccctgtttaattgttccaatgatttttgtatcccttttattcgtaacattcttttttttctgaatatttctaacttttttccgtcattcaacccattaggaggagttgagccccgatctgcaacagccttcctcacatgctttcacccttctatcaggagagtcacacaacaatcccaagcatgctaagccccatttatcacatcaatcattccttgggtaaaaggcctaaatttggaacagtttatcattatgtaatctaactgaaggtgcctgcaatttcaacatttcaacaccttkagaagcattcaatttatcataataagggtagagttgaactactcccaatttcaaggtatttctacataaccctgccttcagccagttcaacagattaagacttccacatttctgcaaaaggtgcattttctgaactctttgaatgttcccaagctccaggtttcggatatctcttgatcttcactcccttcactacacactcaaagccttcatagtcttatcagtgattatcagtttggcagagtgacattctgatcaaaag

SEQ ID NO: 494820 - DNA, 582 bp, Homo sapiens
cacgaatgggccaggtgtgttggcctacgcctgtaatcccagcactttgggaggccaaggcagggggatcacaaggttaggagattgagaccatcctggctagcacagtgaaaccccatctctaccaaaaatacaaaaaattagccaggcgtggtggtgggcgcctatagtcccagctactcaggaggctgaggcaggagaatggtgtgaacctgggaggtggagcttgcagtgagccgagattgcgccacygcactccagcctggacgacagagcaagactctgtctcaaaaaaaaaagaaaaaaaaatttatatatatatgaatgaatgaatgtggctgtgttccaataaaactttatttacaaaagcaaactcctggctagatttggcccttgggctatatttgccaaactctgattaaaataagctaaaaattaaggtgttgatcatatgacctatgaaacaagtctaacagcttaaaacttttaattattttatttaagtgtgaaacagttgtagaatttattgaatttcatggatttttttattataaggatgcaataaaatttatctttgaagct

SEQ ID NO: 494821 - DNA, 464 bp, Homo sapiens
gcctggaggcttaatgatatatttgagatcattttgaaactttatctactttgtcttaacatacatgtttaaagttgtctgtctaattttaatatacattcttcatcaacaattaagccacctcccaattgactgcattatctgtaattcttcactcactaactctctcatatcacacaccataagaagaaagagaaaagggaataacctatattaggagaggctcattgacaraccctgaaatataaattgacacaaacgtgaatgcagagttttgtaaaaaaaaaaaaaaaaaaaaggtttaaaaaatagatctacagttaaatgactagtatctctaccttttgttaccttttgtttccttttttgcagattgtttcccagagaaagctgtccaaatccttgctgaaccatgggaacacagcagggaaatcttccatcacggtaagcaggcactccctaag

SEQ ID NO: 494822 - DNA, 494 bp, Homo sapiens
ctggaaggccaccgccccatcccagccttggtgtcctgcccggctggcctcagacaaatgccaacattgtcaggccttgggataaaccctgatttttttcttcctctaatatgaaaatctaatttggcaaaaagaacattggaaagggttcagtagcctcgaccctgatgtgctctgctttcccatccatcctgagagttatttgtgaagatcaaataaggtaggagagcggaagggttgtgtgtttcataggaaatgtgtggagttagtagcgacagtaagaggagcggctttgcttattgatgacttgctcagtgcaagctctgtgccaaaagccygaaattatggtctaatttaatcctgtcagcaaactataatgtaggtaccactattatcttcattttataggtgaagaaatagccgttttctgagatcagacggttggtaggctggagtgtggggacttcaggatggtctgactccacaacgagctg

SEQ ID NO: 494823 - DNA, 494 bp, Homo sapiens
ctggaaggccaccgccccatcccagccttggtgtcctgcccggctggcctcagacaaatgccaacattgtcaggccttgggataaaccctgatttttttcttcctctaatatgaaaatctaatttggcaaaaagaacattggaaagggttcagtagcctcgaccctgatgtgctctgctttcccatccatcctgagagttatttgtgaagatcaaataaggtaggagagcggaagggttgtgtgtttcataggaaatgtgtggagttagtagcgacagtaagaggagcggctttgcttattgatgacttgctcagtgcaagctctgtgccaaaagcccgaaattatggtctaatttaatcctgtcagcaaactataatgtaggtaccactattatcttcattttatasgtgaagaaatagccgttttctgagatcagacggttggtaggctggagtgtggggacttcaggatggtctgactccacaacgagctg

SEQ ID NO: 494824 - DNA, 522 bp, Homo sapiens
tacacttcctgccccacaagagaccagggacttctctgtaactttatctcctaagaaactctagaggtgcctattccatgtcaccacctttgtttaaaagcttggtgaacagtgctaggcagaaaatatgtcccaatattccatttatagctcttgttggatttgtctgcctgggaaactgaagtgaaatatgttctttaagtgaactccgcattatttgtcactcagagcaaaaaaggaaatgcctaaaaggatggtttcaaatccttgtggtctattatttgtaacctgggtagtgaatggcaagaaaaatgcagtgagaaagaaaaagaggcctggaaatgcaaataacatgatataaaaaataaatttagataatttgatgacattgacctaaaaaagaaaaatcaaractatttctttttgaaataatcagattgttttgtctacaactgagtttgggtgtaactcctttgcacatgttcattttccattactttgagttgttacacaaatccatta

SEQ ID NO: 494825 - DNA, 660 bp, Homo sapiens
tacctatacagtctgggccccagcggccaggacaacaccgaggttggagatagtccttcctacaaatatggcggcatccggggagagacagagagtatgttctgacctcaaaggtgtaccttggagggtaaagagaggacattaacccacgataagagcaatgcagttactctakgtggtagaattgccttagctttcaatttaggtcttaatatttatctacagttaaaaatatctagatggaacacatttggctttctaggtagcataaaacttaattatgattatttttaattgtaagaactggatgaaaaaatcagagaacaatgaacatacgggggaaatatctaaagtgatatcagaagtgaagttagtagatgaaataaatattaaggcctaggcacatgctagaagtatacctaaaacttatcactgagtatcctagcagtcaatgcaggaagggagagatcatgagttacaaaatgcacagtatgtgtggatttaaagcaaacccattgctcaggcttagcatatttattggagatattgcagatgtagaaatgcctgtggcaaaggcagtataatgcagcaagggacatttcccacaatatccttgtaggagataaatgatgagttccttagaagagttctagtgcagct

SEQ ID NO: 494826 - DNA, 603 bp, Homo sapiens
tcctacaaatatggcggcatccggggagagacagagagtatgttctgacctcaaaggtgtaccttggagggtaaagagaggacattaacccacgataagagcaatgcagttactctatgtggtagaattgccttagctttcaatttaggtcttaatatttatctacagttaaaaatatctagatggaacacatttggctttctaggtagcataaaacttaattatgattatttttaattgtaagaactggatgaaaaaatcagagaacaatgaacatacgggggaaatatctaaagtgatatcagaagtgaagttagtagatgaaataaatattaaggcytaggcacatgctagaagtatacctaaaacttatcactgagtatcctagcagtcaatgcaggaagggagagatcatgagttacaaaatgcacagtatgtgtggatttaaagcaaacccattgctcaggcttagcatatttattggagatattgcagatgtagaaatgcctgtggcaaaggcagtataatgcagcaagggacatttcccacaatatccttgtaggagataaatgatgagttccttagaagagttctagtgcagct

SEQ ID NO: 494827 - DNA, 609 bp, Homo sapiens
gtttattttttatagcaactagcattatcctaactagtataggatgtaccacaacttattcaaccaatttcctactggtgggaattcaagttgttttcagcttgttatcytcctacaaatagcatttccataaatttatttgatcatatatgcttacctttgtctaattcctctcctctcccggggtaaattcttagaattggggacacagaagcatactataagcataccttcaaatttagtaaataaatttctcccgtaggttgtaggaatccacattcttactgtcatttttctcatacccacagatgggtaaaatttgtaacatagtgggcaaaaataaaaaaacaaatgaaaataaaccttcaggactccaaatatgactgaattttaataagtatgtatgtaacgattagtggacttagcacctttttcatgtttattgctggttttcatttcttctttttgagacggagtctcagtctgtcacccaggctggagtgcaatggtgtgatctcggctcaccacaacctccacctcccgggttcgagcgattctcccgggtcagcctcctgagtagctgggattacaggcgcccgccatcatgcc

SEQ ID NO: 494828 - DNA, 609 bp, Homo sapiens
gtttattttttatagcaactagcattatcctaactagtataggatgtaccacaacttattcaaccaatttcctactggtgggaattcaagttgttttcagcttgttatcctcctacaaatagcatttccataaatttatttgatcatatatgcttacctttgtctaattcctctcctctcccggggtaaattcttagaattggggacacagaagcatactataagcataccttcaaatttagtaaataaatttctcccgtaggttgtaggaatccacattcttactgtcatttttctcatacccacagatgggtaaaatttgtaacatagtgggcaaaaatraaaaaacaaatgaaaataaaccttcaggactccaaatatgactgaattttaataagtatgtatgtaacgattagtggacttagcacctttttcatgtttattgctggttttcatttcttctttttgagacggagtctcagtctgtcacccaggctggagtgcaatggtgtgatctcggctcaccacaacctccacctcccgggttcgagcgattctcccgggtcagcctcctgagtagctgggattacaggcgcccgccatcatgcc

SEQ ID NO: 494829 - DNA, 594 bp, Homo sapiens
gctgaatttgtgatcagtcttgctgagaaaaataccacctttgatacttttaaggcttctctcgtcaaaaatggtgcagaatttacggtatgtatatgtggagaagataatctgtagatattaatgttttaatttatgtttgtttgtttgtttttttttttgagacagagttttgctctgtcgcctgggctggagtgcagtggcgccacctcagctcactgcaagctccgcctcccgggttcacgccattctcttgcctcagtctcccaagtagctgggactacaggtgcctgccaccatgcccggctaattttttgtatttttagtagagatggggtttcaccgtgttagccaggatggtctcgatctcctgacctcgtgatccacccgcctcrgccttccaaagtgctgggattacataatttatgttttaatgtcactattgattttaaattttgatagggtttaatataggattttgatataggaaggagacaattttatacatatcaattaaataagccattaagtgtgtaatgttttcatgccattaagtagtgatgatttaaccagattttctgtgatacctctagg

SEQ ID NO: 494830 - DNA, 675 bp, Homo sapiens
agcagctgttttatggggctccaggttcaccytaggtttgacaattgaattatgaaagataaaggagaaagacttgtcagcctctccgagtagatcctttggccgaaggagtgtccatgtggggtggtatctcggcctggtggagggggatgcgatggtagtgagaatattagggtattcatatctttcctcccgagtcaaacgttgccaggcacgttcctttcgcccctcccaccctccattctgcattaattccaagtttaattccaaatattagagtgtggtagaaaaggtcaaatagagcagccacggattaagcaaacgcccctccgcgtatggtgggggctgcagcgcccgtagctccacgctccgccccgccgccgctgattgtcccgcgccttgtgacgtcacacgcgggtttttaaggccgaaccctaggcaggctctgcagaggcagcggttggaggcgcggtgggtgtctgcgggggtctcgcggggcggctgcggtgtttcaccgggaaaggctcgaggagagcgcggctcacgagaggtaaacggaccctgcagaccgtgctgaggcggtcccggtgccgggccgctggagctggggtcggccatcggaggagggcgggcgggcaggagagtgtcgcggggcggtggggcgagggtcgcgga

SEQ ID NO: 494831 - DNA, 561 bp, Homo sapiens
gccagctgggactggtatgctgcattggccactcagaagaaatataaataaataaagtcagacaaactgggatgagttggtcaatctaactgaaccttatagctgtcatagggaggccaccaaggcaaggggtaggagaggcaagatttagggaggaggccagtccaatggggctcagagcccccagttccactttaactggatcagttgtgtcgtgttttacacattgagcttccaggttagatgtttgtttgtttgttttgagatggaatctcactttgttgcccaggctggagtgcagtggtgcaatctcagctcactgcaacctccacctcccaggttcaagtgatacacctgcctcagcctcccaagtagctgagatcacacccggctaacttttttgtatttttggtagagacrgggtttcaccatgttggccatgctggtctcccactcctggcctcaagtgatccacccaccttggcctcccaaagtgctggcattataggcgtgagccattgcacctggcccgttacccttttttttttttttttgagatgg

SEQ ID NO: 494832 - DNA, 579 bp, Homo sapiens
aaaataggaattctagagattatggagtttttatgtggcccctgcccccacccccacccccaagttctgtggaatttacatcatgcttttcatacgaagcagaaagtcttatgagagtagggggcacttggcttccagtcagtttgggcccatctctgcacctctaggtctattccygtctctaaaaaaggaactgaattaagcttagtacatttcaaactttttgacagtagaatccattttttttcctccaaatgaaatcttatataaaactacatgttaaataagagctgaatttttgataattttataggttcacattagtaatataatgagaacagaggctaatgtgttggtggtctccaaatatgctgaaatttagcacgtttgtttaaaaaaatgctgacgttttataaaatctaaacttacctaaaaacaaaagcctcaggctggacgtggtggctcacacctgtaatcccagcactttgggaggctgaggcacgaggatcacggggtcataagttggagaccagcctggccaacatggtgaaaccccacctctactaaatgtacaaaaat

SEQ ID NO: 494833 - DNA, 471 bp, Homo sapiens
attcatagaaaaaggcaacagtaaaaagcttggagctggaaccagtgaatgcaaactgagaacacaaacatgaccccagagcttctgaaaggacagaaaaccggtggatatatctgggcctttctgcttagacattttaaattgatgtgtaaagcagagaataattttaccatccacaaggcaaaaaaatgagagcagcagcaggcagggagaataagacagcatgcagatggcaggctgatgaasggcctggcagaggggatgtgcaggtgaacatgctggcaggggcggagcggaccacaggagacacaagtcagagagaggtggcctctcttctgcagcccacgggcagacccggaaggctcaatgtaaaccgtaaatgctgaaagcacaccaggcattgggcatacatggctatgcaagtttccttcctcttataaaggtgtaacttcaaactttactacttaattt

SEQ ID NO: 494834 - DNA, 692 bp, Homo sapiens
tttactacttaatttcagatagaaataatcaacatttcttaagggaccaaatttctttaaaattttttttttatttttattagagacagggtctctgtcacccaggctggaatgcagtggcatgattacagctcactgcagactccaactcctgggcttcagggatcctcctgcctcagtctcctgagtagctaggactacaggcacgcaccacatgcctggctattttttttttttttctttttctagagatgaggtcttgctgtgttgcccaggctggtctcaaactcctggcytcgagcaattctcctgcctcagcctcccaaagtgttgggattacaggtgtgagccatggtgcccagccaccaaatttctttctttttaaaaattattttatatttatttttgacacagagtctcgctctgtcacccaggctggagtgcaatggtgcaacctcggctcactgcaacctccacctcctgggttcaagcgattctcctgcctcagcctcccaagtagctgggattacaggtgcctgccaccacgtccggctaattttttgttatttagtagagatggggtttcaccatgttggtcaggctggtctcgaactcctgacctcaggtgatctgcccgcctcggcctcccaaagtgctgggattacaggcatctgccattgtgcccggcctcc

SEQ ID NO: 494835 - DNA, 615 bp, Homo sapiens
aactgataaacagttaatttacccaaaaatatttcatttattctggacacagttaaacataatccttcttagaataaactayaaatctcagtgaactaccttatttccaactttttagggatcatatacttgtttccatatccctccaatgtcttaatgcatatattctatgtagatcaacatacttatatttattccatttacatattaactgctaaatccatcatagcacagttgtttttgaattataaaaaattattttaaatgacaacagcaatataatgaagacaaagatgcatatgtgagcataatatattttagtacaactaagaacatctttcacgtaatgaagtatccacatagaggaacaatgagcaacatgaataggtgacaaataagaaatgacatttgtaattgacggggaagcgtaacaatttctgagaagtgtaataacacagtgaaagccgtgtttaaagatgataaaatggccagacgcggtggctcacgcctgtaatcccagcactttggaaggccgagacaggcggatcatttgaggtcaagagttcaagaccagcccgaccaacatggtgaaaccctgtctctactcaaaataca

SEQ ID NO: 494836 - DNA, 471 bp, Homo sapiens
agctgcaggatttcttagtcgttaacaccacagtgctgatgacaaagagcgagttgtaatcctcatcactgccagggctgagccagagcagacagaaaatcgtcatttgctcgttggagacttgttaggttacagctcctgcttcgttctgtggtcttggcttttcttyctatacaatgacgccgctgcaagtgagctcagaaatgcttggtttgagagccatttgcctgtgatttttgaagactaaagaagtatttacactagatactcttccagaacaaaatagaaatttcagcaaatacttactgacctttaaagccttgttgtggatttctgagatttaaagatactttaaaattctcaagaacaaagtacggtttgtatttttctgcttcctttttcttttgtcttaatttacatttggtttttcttctcagcctgagaaattaaggtcactgccttttataaaag

SEQ ID NO: 494837 - DNA, 588 bp, Homo sapiens
tgttcttgtacttattaaacataagtcagtaaatgtgatggagcaatgatgtagagtatgtaaataagttgatttttttttcacatattagactgtataatgcattagagttttgtcctttttacttttttgatggctattttaattcatcaataaagatagccaagttaatttttttttccttttactttcttcaaacccttttatttttctaaaagatactgccaccatcagtatgttgatatcaaatgcagggtattataataaaggaaagatgttaggagaaatagctaagcacctcttctcccaaatacaggttttataaaattaccacttgtcttaatgagccacacttaccttggaaaatcagattatgtatttcaatagaaataygttgaaactaacctgtagtttctaactatataaacctttaatctttacgttcttgctgtggatcttgaaagagctttctcctatgtaaaccaacttttggtatagaaggactgtattttcagttattgatatacacagaatatgaatgattcttatgtttgctattatacatacatgaatgatatttaaagagtt

SEQ ID NO: 494838 - DNA, 583 bp, Homo sapiens
cgatttctattaatctttttcagaaacacctttactgtgataaattcacatactataaaatttatccattttagatatacaattcaatgatttttartaaagataccgggttgtgcaaccttcattataatctggttttagaatacttccgtcacgccattgatatctttcatacctacttatagttaatgccattcccacccccagccctaggcaaccattaatctactttctatcttatatagagttgcttcagtgaacattttgtgtaaatggagtcacacaagatgtggtcttttgtgtctggttctttccacgtagtgtgtgtatttgaggcccatccttctctgcagcttctgtgcctttctgatactgcgtcctctatgggtggccagacaaacccctcctcccttcatcccttgtgactccctctgttcttaatttttttgttgcatcctaagcctgaatggattctattatctatcctcttcactctgaaatccaggttgctacactaaattagagaaggaaattgtgaatctgtccagattgctttagaaaccctgtgtggtctccaaaatca

SEQ ID NO: 494839 - DNA, 545 bp, Homo sapiens
gtatacaagagtcagctggccattattctacttctctttgccatcctgtgagctcctttttttatgagccctgcatgggctgtgccagcttgtggcatctttcttctgactccacaaggcacagagggtttgcatcttactttgtaattcagccagcacccatatttaagtataggaattcatctatctacatcctttccttccatgggaccgtgggggacctttagtaccctcatatcacctggctcccagtaggccttggaagtgcttgttggctgcttaactgatgaccacctgctctcatgctctggctcatgctctcacactctggctctcgctctcgckctctctctctctctctctctctctctctctctctctctctctctctctctgtctctgtctctctctctggcattcggaggtgggctacttggtcacaaagtacccaccaactcttttaagaataatgagaagccaattacactcctacacgaacacagcactggtacctaaaatccaattgctgtgttacaatccagttg

SEQ ID NO: 494840 - DNA, 670 bp, Homo sapiens
gtctctcttctcagttatgaaatattttctttttagaggatctcttagcccttagtctcttgccatacgtagactcaacatatggcaaacatcttcagggggagactttccatatatttgggatataactcttctctctagcaagacttcatcttctaagcacaatgggattttactctacctttctatctaacccagcttcccagtctgtcacatcaccctaaaatatatcaagctttccatgtgagaaagtcagcctcatgtttggtgtcctttagtttctaatttgtcgtgctagccccaaaataaccaatgaaagctctcttgctttctctttccccaagcaaagtctctgcataggccatatcccaatcctacagccattcccagatgaccaaatacccaaagggaagaagaggcccggtgccaaccagcttacctagggagggctgtttccactctggaaattttatcttctccttgtttccacaactctctaattktttttaaatacgatttttgctatttgtcttttttttaagttgctgcagcaggagtgctggcttcttgctactttctcctggctaccagagcacaagtccatgagtcagcttctgcatcagagtcacagatgcccatgtttttccacacagtctcattctctgcatca

SEQ ID NO: 494841 - DNA, 671 bp, Homo sapiens
aaaccaaaaaccagaacgaacaacccatgcaaaaactccaaaaggctgttgtggtggaatgagaagaaagaagacctggcctccaagaccaggctctgccactacctagctgtgcagccttgggcaaattgcttagcctctctgagcttgtatctctttctgtaaaatagctatgatgacacccatctcaaaagcttgtcttaacttgcttagcacaaggactagcatatccgaagtccaaatacatgattgctcattcattacttttgccagcatggtggcctgcactcattatgtgtttgttggttgtgtttcaaaagtatcctaagaaaaaactgartaggtatggttttgtcataatatggatcaaagacgtttgcggcttgcctgaaaaccctgacatgatcttaataacttaggtcacaagtaaacaatttattaccatgacaagcacaagccacagctaccacttattgaacacatactgggtgccaggagatatgctagtgctccacatgcattatctcatttaatcttcacagtaaatgaagaattgaatgcatcagacctcagtagaggaaataatctactctgggtgtttcagcaggaagggatttaaaatgggatactatgtgctttcaaacactgcaaagcccaaaggagcaggttct

SEQ ID NO: 494842 - DNA, 460 bp, Homo sapiens
gactcccacctcccggagggggcacggggacttgcgtggggcgggcgggggccgggattccgggcggggcgaagggacccagctcggctgcggggcgcgcggtcgctctccctcaggactgcggctcggatccctccctacctctcccggtccctcgcaggactctacatcgccttcggcgtttcctctccctcccgcagtttccacccttcggcttgtcttactctyggctccttcgcccaccctttcctccccatcctgtcccccgcccccactcttctgcagtttgtaactgagagcgccccaaacaaccccatcaagccaataaacccaaaatgtgagcactgccccaaacccgtgtgcttatcctgccgcttctagaaggcaaattgatacggggtggatttggaacggctttctcagagaggcccgaaagctttcaaaaattctaagtcaggag

SEQ ID NO: 494843 - DNA, 645 bp, Homo sapiens
tgtactcagcgtccaggcccattctacaggagtgaggctagatctaacagccccctgccccagcaccatgggtgattcccaggaattaggtgtacgccctcctggagatctgcctgtgcagatcaggctgccctgacccttaaaggaaggctttccccattctgagctggccccagccctgagcacctaggagaccctgtcttctgggccartgatgtgtgaggtgtgtgatgggaaggagatctaggacccagaagccagtactgctgattgtgctttagatctttccctttacattaaatccatatgatgccccttggagctggccatgtgggctctgggcccaggagaggacccaagaacttgccaagtggcatgtcaccagcttggcctagctacggcagccttctttctgaagactgatccttttccccatgcccaaccctgaagcaggtggagagcattttaggtccgggatctgggctgaaagctgaggactgacagaacagataggggtgttctttttgagtttgagttggtatggtagctttttctattctctctgctactactcctcttagtttataaaatctagataggatagtctttgcctattgctgcaaaactcttctgggccactgctag

SEQ ID NO: 494844 - DNA, 574 bp, Homo sapiens
acaggattggaacagataggtcacagaagggggagcccaaatagctaccaagctcatgaagagacactcatacgctagtaatcagagaaatgcctattaaaatgaggttgagacacagccctacacctggagcactggcaacaataggaagttgggtgagaccatttgttggtgaaaatatagctaaatgagagtactttccttggggtgcatggggactggtgcagcctttctggagagcaatcaggaactttttggtggaattaagtaagtgcccaccctctgatccagagttctctctctctctccctctctctctgccatcttttgttcaaaccaagaagccagatttaaaagccccccagaggctacccacagaagagtccctgcacaaagagttgctcccaggaagagcctgggtaaatgtaggatacattgtacgtttcaggacacaccagggaagtcgctgagacagttaccactgcactttgtgggaaattccatcccatttgtacatagccccrggtggctcccatggcctgtatcccagtcccctgaatttccagggctggca

SEQ ID NO: 494845 - DNA, 543 bp, Homo sapiens
tctccgctgtattctgagctgagcttgatctggytcccctattgtgatagtcttgacacctatcagaatggtccagaataaagtcttccttgctgtttgaacaagggtcagaataactttttctttaacaatcgttaacacactgcgttcttcatcaagaaagccttgctaccaaaaaaaaactgcctgctgtactaaacagtgttcttggggatataattgactgatgttcaggtgcaagaaacttatcctgttaaggacggaaaacaattgcacgcttacattgatctggtccccaggccacactttcatttttgctagtttgaaatctacagtggggagagaaggctgagggagtgagcaggggaagagatgctttttcacaccagcactccatctggaacgccaggaggccctctccaacacaccctcaaagcctggccagagtaggcttggtgggtgccaaccaacctaggcctctgatccctgtactcatggcaggatcctgctggtccccaggcagcaggtggggatgtcaacagg

SEQ ID NO: 494846 - DNA, 543 bp, Homo sapiens
tctccgctgtattctgagctgagcttgatctggctcccctattgtgatagtcttgacacctatcagaatggtccagaataaagtcttccttgctgtttgaacaagggtcagaataactttttctttaacaatcgttaacacactgcrttcttcatcaagaaagccttgctaccaaaaaaaaactgcctgctgtactaaacagtgttcttggggatataattgactgatgttcaggtgcaagaaacttatcctgttaaggacggaaaacaattgcacgcttacattgatctggtccccaggccacactttcatttttgctagtttgaaatctacagtggggagagaaggctgagggagtgagcaggggaagagatgctttttcacaccagcactccatctggaacgccaggaggccctctccaacacaccctcaaagcctggccagagtaggcttggtgggtgccaaccaacctaggcctctgatccctgtactcatggcaggatcctgctggtccccaggcagcaggtggggatgtcaacagg

SEQ ID NO: 494847 - DNA, 624 bp, Homo sapiens
gtggggaaagagcatttccagtccctctaacttctagggaggctgagtccccatcagcaaatcttagcttagggcctaccatgtgctggcctcggtgcctgtcactatgggcatcgatagtggaggccatggccctgcatatatggggttgacactctagctgggcaagggcccagtggcatgtgcagttaagccagcaagaacatctttttttttttttgagacagagtctcactctgtcgctcaggatggagtgcaatggcgtgatctcggcccactgccacctctgcctcccaggttcaagtgattctcctgcctcagcctcccaagtagctgggattacaggtgcatgcccccacacctggctaatttttatacttttagtagagatggggtttcaccatgttggccaagctggtctctagctcctgacctcagataatctgcttgcctcagcctctcaaagtgctgggattacaggtgtgagccaccacgcccagccaagaacacttttctttatttctgaaaggaggcaacagtaayacggcaatgacagacatatccattgcccactttaaagagacaggtgttcggccccttcttggtatgactgcagccaaaacc

SEQ ID NO: 494848 - DNA, 263 bp, Homo sapiens
tgaagactgcacagtgcatgcratgtgtggtcaagtaagagccaagctctggagaaaaactttctcatttggatccctttcttgttttaccacttactgagtaggggactgcgagcaagtcacttcacatctcagccctggggatcataatagcacctcccttgtatgtcttgtgatgattaaaagatgtaaggaccatagcaaagtgactggcacagagcaaaggatgttctgactcatctcccctcctatccaggctcctc

SEQ ID NO: 494849 - DNA, 263 bp, Homo sapiens
tgaagactgcacagtgcatgcaaygtgtggtcaagtaagagccaagctctggagaaaaactttctcatttggatccctttcttgttttaccacttactgagtaggggactgcgagcaagtcacttcacatctcagccctggggatcataatagcacctcccttgtatgtcttgtgatgattaaaagatgtaaggaccatagcaaagtgactggcacagagcaaaggatgttctgactcatctcccctcctatccaggctcctc

SEQ ID NO: 494850 - DNA, 596 bp, Homo sapiens
attttcacacagaagcttgaaggcattgttttctttcagtgtggctatttagaagtccaaggctgayacctgatctttcgtatgtttttctctctcagggagctttagaagtctattctttattctgggtattctgaaatttgtgatgatgcaccttggggtgggcatttagttgggcctctcaatctggagactcacatctttcaattttgtgaagtggtattatttttactctcactctctctcctctattttctctttatagaatttctattagctggaaattggacttcctagagtggtcctcattcttatattttttcaattattattatttttaaatctctgtttatttttgttctactttatcttccaccaaacttgcttttaaatattttattcttactcttcttttgaacaatttccaaaatttcatttttgttttttcattaattcctttaaaagtaacatccaaaatagagaataaagcatctaactcttgtttaatggatataacatcttactttacttttctgaagaaattatcagatttttttttcattttttttctactccttccatcgtctctgctttct

SEQ ID NO: 494851 - DNA, 601 bp, Homo sapiens
ctggaagcggctggggccggagcacacgtgtttcgtgtttcggtgagtgtggcggagatggagagccgggatcccgcccagccgatgtcgcctggagaagcgacgcagagtggcgcccggcctgccgaccgctatggcctattgaagcacagtcgcgagttcttggacttcttctgggacattgcgaagcctgagcaggagacgcgacttgcggccacggagaagctgctggagtatctgcgtggcaggccgaaggtggagtggcggggtctggggcagaggctgcgcatatcccggcaaggaagcggcggcgggcccagggagttgagactgggggcacgtggtcgcgaacctggatgccarggtgcgcgggggcgtgcaccttgttgtcaccattgaacacgagggtgtgcttggttccgcaggggtccgagatgaaatatgccctgaagcgtctaatcacgggactcggggtcgggcgagaaacagcccggccctgctacagtttggccctggcacaggtgaggtggtgctcctggcagggtcccagccatccaggtcaaaatggtggggtatgaggagggcgggtgtggtgtctcag

SEQ ID NO: 494852 - DNA, 601 bp, Homo sapiens
ctggaagcggctggggccggagcacacgtgtttcgtgtttcggtgagtgtggcggagatggagagccgggatcccgcccagccgatgtcgcctggagaagcgacgcagagtggcgcccggcctgccgaccgctatggcctattgaagcacagtcgcgagttcttggacttcttctgggacattgcgaagcctgagcaggagacgcgacttgcggccacggagaagctgctggagtatctgcgtggcaggccgaaggtggagtggcggggtctggggcagaggctgcgcatatcccggcaaggaagcggcggcgggcccagggagttgagactgggggcacgtggtcgcgaacctggatgccagggtgcgcggggkcgtgcaccttgttgtcaccattgaacacgagggtgtgcttggttccgcaggggtccgagatgaaatatgccctgaagcgtctaatcacgggactcggggtcgggcgagaaacagcccggccctgctacagtttggccctggcacaggtgaggtggtgctcctggcagggtcccagccatccaggtcaaaatggtggggtatgaggagggcgggtgtggtgtctcag

SEQ ID NO: 494853 - DNA, 427 bp, Homo sapiens
cagaagtcgatagtttggcctgcattgtacttcagcatcgccatgccctggaggaactgaagggagcagggaatcaagtgggatctaactgggtggagcgggaagactaacaatgcgctcaaatttcaactttttctctaggtctgcttttagttctgtaattttgttaagtaaaatcttacaactagccrtaatacttacatgagttcttaattttatctgatcttcccataaatgccaataggccaattgtttagaaagagtgctttctaattttttttttaatagggaaggcttgggcggagcatggtggctcacgcctgtaatcctagcactttgggaggcagaggcgggcagatcacttgaggtcaggagttcaagaccagcctggccaacatggtgacaccttttctctactaaaaataca

SEQ ID NO: 494854 - DNA, 427 bp, Homo sapiens
cagaagtcgatagtttggcctgcattgtacttcagcatcgccatgccctggaggaactgaagggagcagggaatcaagtgggatctaactgggtggagcgggaagactaacaatgcgctcaaatttcaactttttctctaggtctgcttttagttctgtaattttgttaagtaaaatcttacaactagccgtaatacttacatgagttcttaattttatctgatcttcccataaatgccaataggccaattgtttagaaagagtgctytctaattttttttttaatagggaaggcttgggcggagcatggtggctcacgcctgtaatcctagcactttgggaggcagaggcgggcagatcacttgaggtcaggagttcaagaccagcctggccaacatggtgacaccttttctctactaaaaataca

SEQ ID NO: 494855 - DNA, 557 bp, Homo sapiens
gaggaaaaggatggacaggtaggtagtgaacatcataggaaagggggagttagcctcagaaagtaacagccagaccagaagggaccagagtgtttaaagcacacagactggtgaattttatttctgtgccactttctatcctaatcaatttgaatattcagccaggcgcagtggctcatgcctgtaatctcagcactttaggaggccaaggcaggtggatcacctgaggtcaggagtttgagaccagcctggccaacatagtgaaacattagctgggcatggtggtgtgcggctgtaatcccagctactcaggaagctgaggcaggagaatagtttgaacctgggaggcagaggttgtagtgagccaaaatcacgtcactgcactccagcctggtcaacagagtgaaactccatctcaaaaaaaaaaaaaaagtacatattcaaggatccagaaaccacttaagaccataagggatctcagaaagyatccaattcaacttcatgttacagataaggaaactaaagttctcccattgccacactgtgaatgagaatcc

SEQ ID NO: 494856 - DNA, 600 bp, Homo sapiens
cgataactcactcactcccatgataatggcattaatccattcgtgaggctctgcctcataaaagagcccacctctcaacactgttgcattgaggatttactttccaacacataatttggaggatacagtcaaaccatagaaaaatgattgtttaaaaaggaaagaaattacaaagtggttgttattccagaaagagcagcttcacgattcatcttatctctatgttttgaataactgaagtaaaagacaaaccagtgccacacacttttaaccgtgaatcccctaagcagttgtaaaatactgtgtcagagatgtcaatagtatgaatagtttagattactcttctcagtttttaccccactgtgactcaagcccccactcacctgaagaagtctttccgctggtcatgcagaagsttgatacccgccagcatgctgcttgtaattcaccaataggagattctattcagaaagaagaaatactgaaatctttaggattccctcctaagtcccggaacatgtattcttaaagggaagcaacttgctttgagaaggctggaatcaatgaggagtccacagttacatcctgtgctgggcgcag

SEQ ID NO: 494857 - DNA, 609 bp, Homo sapiens
ctggtttttgcataggtagcaatgcttataaccatcaacttcagtaaaacatcctcaaatcctttgaacaaagcaataataggtattttatttttgacctccaaattgtagaaaagttttccatttctttgttattttagatatgtccaataatagcaacaccagtttcaaaaacaagacagaagaaaaagcaaatgagatgcacagaataagaaaggaccttagagctgactttactttcagtttagtaacactggagatgggatgtggttgaggctccccagtctgcctatctatgtgttttaagaagggtgctttctgtrccctccttctttcctggaaagttagctgtgctttgtgaaatagtgtctgaggggcccatggctatgtttagagccattgctttatttgtattttccttttttcagtaactgatgacaggtgcctccatggccatttcagttatttcctccacccagacttggtgaactcctccatatctctctaggccttactcctcgtctgtaggctgagggttgaattgtctttgagtactcttttaagttcaagttctgttgttgaatttacaggcaaaagagcgagcataca

SEQ ID NO: 494858 - DNA, 571 bp, Homo sapiens
ctgactagcattgagataatcttctaaatcatgtgttaaaaaagtttcagataatatcatcggtgtcctcaaattatcctgccttggacgctgtatgagtgagacacaatagtttgagtcatttttgtgttgaagcccatttgttacagaaggcaaytttatcgtaattcaggggactacatagtttagggaagtgagaagaggcctaagtagaagtgagaagtgagatttgagttgagacctaaaacatgagttaaggttatctaagcaatgcctgaagaggaaagtttgcagggtacatggccatttggatagaggtgctgaggaaccatttgaagaactcaatggagcccagcaaggttggggagcagtttgcttaatccacacttagagggaaaggctgaagccagatcctacaggatcttttaatcatgtaagtatctgagtctttttcctgaaataactaggggtatctttgaagaaattttagcagaggagtgatctgattgagtagagattgcatagagtcataggtaaatattttgaaagttacatgtaaacttttctcctg

SEQ ID NO: 494859 - DNA, 571 bp, Homo sapiens
ctgactagcattgagataatcttctaaatcatgtgttaaaaaagtttcagataatatcatcggtgtcctcaaattatcctgccttggacgctgtatgagtgagacacaatagtttgagtcatttttgtgttgaagcccatttgttacagaaggcaactttatcstaattcaggggactacatagtttagggaagtgagaagaggcctaagtagaagtgagaagtgagatttgagttgagacctaaaacatgagttaaggttatctaagcaatgcctgaagaggaaagtttgcagggtacatggccatttggatagaggtgctgaggaaccatttgaagaactcaatggagcccagcaaggttggggagcagtttgcttaatccacacttagagggaaaggctgaagccagatcctacaggatcttttaatcatgtaagtatctgagtctttttcctgaaataactaggggtatctttgaagaaattttagcagaggagtgatctgattgagtagagattgcatagagtcataggtaaatattttgaaagttacatgtaaacttttctcctg

SEQ ID NO: 494860 - DNA, 637 bp, Homo sapiens
tggatcttgtaattgatcatttatttttttcctctatcactaaggagttctataccaaatttgcatcccatctacttctagcaagagcacaggaccttatggcatcaattcgaatacaaactttccatggtcatattttatggtttttcttttgccctacattctttatttttatcctgttgtttatatttctgtaacttgcctcaaataaataaggatgagataagactagcttacataaatgtgcactcatttgactttctgttttatttttcttgccctttctggaccagaccaacactatcatttacaagaggaagagaaaataaataacctaatagcakactgttcttattactctgatcttgttccacttaaacttaagtacaatattttgtttttcccataaagatctttctctgccagcaatgctgataatattgcaggcagaacaatgtggatatgaaactacattattgtcattgaattagactgaggttgctggtaccaactatagcagtagtagtattcaaccaaaggtaatattgctccaaagggagcatttggcaatatttagagacagtttggtgtcaaagctgtggggcaaggagaaggttaagggggaagatttgtaatt

SEQ ID NO: 494861 - DNA, 637 bp, Homo sapiens
tggatcttgtaattgatcatttatttttttcctctatcactaaggagttctataccaaatttgcatcccatctacttctagcaagagcacaggaccttatggcatcaattcgaatacaaactttccatggtcatattttatggtttttcttttgccctacattctttatttttatcctgttgtttatatttctgtaacttgcctcaaataaataaggatgagataagactagcttacataaatgtgcactcatttgactttctgttttatttttcttgccctttctggaccagaccaacactatcatttacaagaggaagagaaaataaataacctaatagcatactgttcttattactctgatcttgtyccacttaaacttaagtacaatattttgtttttcccataaagatctttctctgccagcaatgctgataatattgcaggcagaacaatgtggatatgaaactacattattgtcattgaattagactgaggttgctggtaccaactatagcagtagtagtattcaaccaaaggtaatattgctccaaagggagcatttggcaatatttagagacagtttggtgtcaaagctgtggggcaaggagaaggttaagggggaagatttgtaatt

SEQ ID NO: 494862 - DNA, 558 bp, Homo sapiens
ttctgctgctagctgggtttttgtcaacaaatgggcagccttcagaagcagccaactcactgcagcagccgctctctgcccttcttcaccacagtgcrataagatgtctgatagatggctatcagttaataatcactctaaatctgccagcattttctgggcatccctgtagtcatgtacaagtgtctaaaaggcgagtcacaccactccacatagaagtggctggccaccctgggatttcccacacagatacttcatttcctttccccatttcttggtctctcagctcctagagagttcgccacatgttatgcagtgggcaggtctatgcaaacctatccctaaatgccaaggaaggtgaggggcacaagaaagaggctgagaaattcagtttctgagaaagaaacatttgatggggatttaggaacagaagtcatagtcgtgggcaatggtgagacaagatggtgggtccccatgccattatcccacagaactagggcttatattttgtatggaaggaatgtgtaggatagttaaagctgacctccagggaaagac

SEQ ID NO: 494863 - DNA, 539 bp, Homo sapiens
tgccttactccccatttggcttagtaggtccttctttggccctctctttgttctgccttgctgcctattgtgccactgaactcactggaatggtaaatgagcttattctcttttgcctgttctaggcaactgatagcagcttcttagagcatgagctattaaaggtcttcaaggtgatatcaggtctcagcagcagacagtgtcatgattggtcatgggttatggtgcagaggactggcagtagtacccatgccatttatttgatccatctggaagcaacaactgtattagtcagggttctaaagagaaacagcaacaataagatagattagggtgcactggtgtaagtcctggaggcagaaggtctgaaaaccaggacactgatgctyaagggtaaaaagacagatgttccagctcaagaagagagagagtaaatttatgctcctccacctttttgttctattcaggccttcagtggattggatgatacctgctgacgttggtgagggaagaacttctttactcaatctaccgatgct

SEQ ID NO: 494864 - DNA, 648 bp, Homo sapiens
ctgctactccaggcaagcctactttatcctgccagggagatgctaagcccaatccagtggcttcctgaggggacaggactttaaaaccttgcagaactcatgaagactgggtccaaaatagcagcccttagtcataccgccttctacttcaccaagtttgccccatctaatgccaggtacctgccctgtaaagacctggaggccacctccagcacccagagacacagtcacagcagagctctgcttcacrgttactgaggccttaccattgctctcaatgtgcccattggcctgagggccaccctcggtcctgaccacggtttcttgtcggtcagaaagggtcccctgagaagagaggtagcttggaacatctggtggcacgacggtttcatctgcaaggagacagaacaaatagaacaccagggtctcagtgacaagaaatgcagacacacgttcactgtcaagctcagaaaggggatcctcccagtgacgaccatcagcgctgtgcagagagatgacatggagtccatgtacgcaacaggccctcccagagcctgctcagctttactctacacccagcgtgaagagcgcagccagcagatgccagacgccacaagaagtggagaccagtgatggaaagccggggct

SEQ ID NO: 494865 - DNA, 364 bp, Homo sapiens
ctgctaaagtcatctatattaaaagatctttaaagtctctcagcattcaagaaataacttaggcatctttttagaagtattatacattcttaatcaataaagcctgtgtgtcttgaacatttcctagttagcagtaaaacacttagtttctctttataagatttttcttttaataaaattacttgcattttgacttatgcccttaagyttctatttgttgtctaaatggcaccatttaaagtgttttaagaaatttaatatttctttattggattaggagaacatatctttaaggaaaaattaccctcttagcaggtgatttacagtattattttctcctggccaacctttttaaaaatccaaa

SEQ ID NO: 494866 - DNA, 542 bp, Homo sapiens
accatcatagtggctgtcatgtggatgatggagtaaataggacaagaggcagagaagcytggtaaaagacagtgacgctgtaatctaggtaagagatgagagtggtctgaaccaaaactttagcagtagggatggaaggaagcatatgactggagggagatttagaacatagcgtttacaagatttggcaatagactcgggtaggggggtgggcagcagagcccaagtttctggcttggtagtgttcccattcatttgatcagggaagagaggagattgaatagtttggggagaacagttcagatttaggcatgttgtattgagagatgtttcggataaactagtatcaatttccacttggcaggtgtgttagaccgttgtgcattgctataaaggaatacctgatactgggtaatttatgaaggaaagagttttcattggttcctggttctgcaggctatgtaagcatggctccagcatctgcttctggtgagggtctcaggaagtgtacaatcatggtgaaaggcaaaaggagagcagga

SEQ ID NO: 494867 - DNA, 575 bp, Homo sapiens
ttgacatataaagtgtgtaaatctttgtttatagttckaaaggattattttctttcttttctgtttgcaggaaaaaagagaaggcatagatctaaagtaaatggtctccaaagaggtaagaagaaatgtggggatttactcctttgaactcgctgtggtcctgttcttcctgccagaccccatctttgctgcagcctcagaatctcctatgggccacggtagcttcagacctcatggattctttagagtaccagctaagtcattgtaacaaacagatcccaaaatacagtggcttaaaccaaataatctaagagcccagaagtggtaggcagtctgccttccttaacatgaggtttccaactgtgggtccacaagggctgagctggttgacattgtctcccaaccagtgggaatgaaaaaaaaattgacaaaagaaccagccatttatttattttaatagaaagactcaaaagtcttctgcccacatcccattggccaaaaaaaggtcacacagccagagctagctgcaaagcgaggctgagaaatataacgctggccgggcagtccttggttca

SEQ ID NO: 494868 - DNA, 517 bp, Homo sapiens
ttaaattaaactgtcaaaagtggcctgtaggttttcaccatcctttctctgcttgycatgtggatgcagagaaaagggagtctgccaaacttgaaacttacccaactgtcccatagaactgatctttatagtttcttttgaacaaatgtgaaacttgagccccccagttttgaaatctcagaaagctccatttgtcttatcagaggccgtttctcaggaaaccaaccatcaggcctctaagattgtaacaaggagctgaaacacaccaggtcacagcatctggacaatgcaacccaggtaactgacccccggtgcctgcctaactgactatctgcttcttgttgacatattcctcttctttacccctaattcctagtttgctgcatgtagttacatttctgccctataaacccctaattttagtcagttatggagatggatttgagactgatctcccatctccttggctgcagcacctgattaaagccttcttccttggcaatacttgttgtctcag

SEQ ID NO: 494869 - DNA, 626 bp, Homo sapiens
taaaaccgaaacctgtgccagccttatagtagctaccatgacaatgtcatactgagagactgctggtgaggaagaaggcagggccaatgcatgccaccgtcacccaggattctgtatttacacgtgacagtagttacacccacaggctaaggagttgtagccttatctgtgacactaacaaagccttttcccactgatttcattctcctttaaatttcaaagggatcagaaccaggccaggcatggtggctcacgcctgtaatccagcactttgggaggctgagcctagcggatcacctgaggttaggagtttgagaccagcctggccaacatggcgaaacactgtctctactaaaatacaaaaattagcggggagtggtgttgtgcacctgtaatccctgctacttgagaggctgaggcatgagaattgcttgaatccaggaggcagaggttgaactgagccgagattgtgccaaggcactccagcctgggtgacagagtgagactctgtctcaaaaacaataacaacaacaatcaaaacaaaaacaaaaaacaaacaaacccacaaaaggatcaggaccatgrtggcaggtggaatgataactctccttttccagataaagcag

SEQ ID NO: 494870 - DNA, 441 bp, Homo sapiens
cagtaagtcaagctctggggccctagggcactgctccacaaatgagccacagggcccrgctgtggggagtgaatgcacatggaacgtggggacacaaaaaaatagttccaaaaaaaaaaagaggatgggtcagagcagtgacagtacctgctgcagcagccacgcctgggataggaaaggagcacctgtgatctgccgtaagcctcaacaggtcccacgcgaatttctgaggaacttagattcctctgatgttggcaagtgcccaggaaatatcttgtcagaggaaagtcggggataactgtctgtgcagggccaccttcgggtaaacacgcagggcctgttggagagccacctgggtgactgggactgcgtccacatgacctctgcagtcaccccgcccactgttccctaaggccacacttccataccgcctgccctcgc

SEQ ID NO: 494871 - DNA, 606 bp, Homo sapiens
tggggagcctgcattgagccaagtcaggaacagaaaggacgcaggaaaatactgagagggccaagaaaacagaccaagcctgtggctgggtttgcagctttgcagatctgayggggagttctttctctctctaaatggcaaaaagaaaaaaaaaggctgtcaaaattggaatggcagttgagctgtgccatcttaggggctactttgcaatctaatcagagctattgccatagacatagcgctagtgtaagcatccacatatggaaaagcattcatctgcacagtggttatgcccgagtttgatcgtttttatgtacatctagcagtagctctagcatactataattagactcattcacagttttctaattcacacagctattcatcagtgagaatcaatcactagctaagtgtgttaccggcaccatctagacacaaattacattgaataaggttcattaagtcatttaatgggaatatcataagtacagtcagtactatattacacttctagtgggcactattttccataaaggttttggatgtcttatttagatttgtgtgagtttgttccaacaaaaaagtcactacagtgaagtcttactc

SEQ ID NO: 494872 - DNA, 606 bp, Homo sapiens
tggggagcctgcattgagccaagtcaggaacagaaaggacgcaggaaaatactgagagggccaagaaaacagaccaagcctgtggctgggtttgcagctttgcagatctgacggggagttctttctctctctaaatggcaaaaagaaaaaaaaaggctgtcaaaattggaatggcagttgagctgtgccatcttaggggctactttgcaatctaatcagagctattgccatagacatagcgctagtgtaagcatccacatatggaaaagcattcatctgcacagtggttatgcccgagtttgatcgtttttatgtacatctagcagtagctctagcatactataattagactcattcacagttttctaattcacacagctattcatcagtgagaatcaatcactagctaagtgtgttaccggcaccatctagacacaaattacattgaataaggttcattaagtcatttaatgggaatatcataagtacagtcagtactatattacacttctagtgggcastattttccataaaggttttggatgtcttatttagatttgtgtgagtttgttccaacaaaaaagtcactacagtgaagtcttactc

SEQ ID NO: 494873 - DNA, 655 bp, Homo sapiens
ggttcactccttttgccatgtgaggacacagaaagactgtgctatctataaggaatggacccttagcagacaccaaatctgctagcaccttcatcttgaacttcctggcctcagaactgtgagaaataaatttctgttgcttataaattacccagtataaggacttttcttataacagtctgaatggattaagacaagttttaagtacttcataggatgttgatcaaaatatacagttactgcttaaaaggataaacagcttaaaaagctccaatcatgacagaggctgaatagctgttcacctaatctgttcctcctttttcttgggtacacacctaacaagtgtggagggttaaggatagtttcaaattatttgtcaattcttccttcaaaaagtatgtctgtttttctccccttgaacatgggtgactttgaccaatagaatatggcagaattgatctatttccaggctgtagtcttaagaaatgcaattctcaatgcttgtctctgctcttgatgcttgaacatgtgctcttaaaatacagccattatgctgtgargaagcccaagcagccctgtggggcggtggttggttctttctggaggctctgaaggaaaatccatttcatgattctctcctagcacctgacggctg

SEQ ID NO: 494874 - DNA, 610 bp, Homo sapiens
cacacctggctacttttttttgtagagataggatcttgctatgttgcccaggttggtcttgaactcctgacctcagcctcccaaagttttggattacaggtgtgaatcaccatgtccagctactttgtcagtatactttctcatagccaggtgagaaacatatttaaacagaagtcctgagtctttcccataaaaacatacttctccccaagtctccaaatctaataaattggtaccactcttcacttggtagctctgggaccaaactgacttatctaagattattttctttccttttatcccaaaggataagtcctgtggtctctacttctagaacttgtcctgcattccacgccttgccacctcaccatcatctctgctctggattatgtactgtgtcattccccaactaatcttcttactccctctgtcccctggagccctccaaaacccatccttcatagaacaagccataggatgyttttataaatcagaccctgcccctcccctgcttaacactcgccaatcacttcctattgcatttggcataaaatccaaatcccttgctgtggctgatgagcctctccattacctgagtctgactgtcact

SEQ ID NO: 494875 - DNA, 608 bp, Homo sapiens
aggacttgatgatggtccttccatgtggaaaaaaaagaagagatatgtttctcatacatttgtctaaatagattacaygcatttaggtgaattatttctgacacctactacatttgtcctgattggttgcccatcatggaaaaaaagaaaagaaaaaaatggtggggcatagtcacatgaaattctacaggctcacatagaattcaaaattagaggctgaattaatgaattcacttattgagtcaatagaaactcaggttagagcagacaccgtgtttcacttgtacatctgtgttctccgtttagtattaacaacagcacaaatgttttcatgctctaggggctacttacctatttctacatgttttgatttcacaaacttctagtagaacaaatagataggtgaaatttatcaagaaaaatgataatggtaatcgctaatattattgagtgcttaagtgtgcttaatgagtattactaatccatgcaacaataattacctagattatctttacaccttacgataaccttgagagttaagaattatgatgacaacctcattttataaataagaaaactgaggcacagagaggttaatggcatgtgta

SEQ ID NO: 494876 - DNA, 593 bp, Homo sapiens
gacttgatgatggtccttccatgtggaaaaaaaagaagagatatgtttctcatacatttgtctaaatagattacatgcatttaggtraattatttctgacacctactacatttgtcctgattggttgcccatcatggaaaaaaagaaaagaaaaaaatggtggggcatagtcacatgaaattctacaggctcacatagaattcaaaattagaggctgaattaatgaattcacttattgagtcaatagaaactcaggttagagcagacaccgtgtttcacttgtacatctgtgttctccgtttagtattaacaacagcacaaatgttttcatgctctaggggctacttacctatttctacatgttttgatttcacaaacttctagtagaacaaatagataggtgaaatttatcaagaaaaatgataatggtaatcgctaatattattgagtgcttaagtgtgcttaatgagtattactaatccatgcaacaataattacctagattatctttacaccttacgataaccttgagagttaagaattatgatgacaacctcattttataaataagaaaactgaggcacagagaggtt

SEQ ID NO: 494877 - DNA, 608 bp, Homo sapiens
aggacttgatgatggtccttccatgtggaaaaaaaagaagagatatgtttctcatacatttgtctaaatagattacatgcatttaggtgaattatttctgacacctactacatttgtcctgattggttgcccatcatggaaaaaaagaaaagaaaaaaatggtggggcatagtcacatgaaattctacaggctcacatagaattcaaaattagaggctgaattaatgaattcacttattgagtcaatagaaactcaggttagagcagacaccgtgtttcacttgtacatctgtgttctccgtttagtattaacaacagcacaaatgttttcatgctctaggggctacttacctatttstacatgttttgatttcacaaacttctagtagaacaaatagataggtgaaatttatcaagaaaaatgataatggtaatcgctaatattattgagtgcttaagtgtgcttaatgagtattactaatccatgcaacaataattacctagattatctttacaccttacgataaccttgagagttaagaattatgatgacaacctcattttataaataagaaaactgaggcacagagaggttaatggcatgtgta

SEQ ID NO: 494878 - DNA, 593 bp, Homo sapiens
gacttgatgatggtccttccatgtggaaaaaaaagaagagatatgtttctcatacatttgtctaaatagattacatgcatttaggtgaattatttctgacacctactacatttgtcctgattggttgcccatcatggaaaaaaagaaaagaaaaaaatggtggggcatagtcacatgaaattctacaggctcacatagaattcaaaattagaggctgaattaatgaattcacttattgagtcaatagaaactcaggttagagcagacaccgtgtttcacttgtacatctgtgttctccgtttagtattaacaacagcacaaatgttttcatgctctaggggctacttacctatttctacmtgttttgatttcacaaacttctagtagaacaaatagataggtgaaatttatcaagaaaaatgataatggtaatcgctaatattattgagtgcttaagtgtgcttaatgagtattactaatccatgcaacaataattacctagattatctttacaccttacgataaccttgagagttaagaattatgatgacaacctcattttataaataagaaaactgaggcacagagaggtt

SEQ ID NO: 494879 - DNA, 608 bp, Homo sapiens
aggacttgatgatggtccttccatgtggaaaaaaaagaagagatatgtttctcatacatttgtctaaatagattacatgcatttaggtgaattatttctgacacctactacatttgtcctgattggttgcccatcatggaaaaaaagaaaagaaaaaaatggtggggcatagtcacatgaaattctacaggctcacatagaattcaaaattagaggctgaattaatgaattcacttattgagtcaatagaaactcaggttagagcagacaccgtgtttcacttgtacatctgtgttctccgtttagtattaacaacagcacaaatgttttcatgctctaggggctacttacctatttctacatgttttgatttcacaaacttctagtagaacaaatagataggtgaaatttatcaagaaaaatgataatggtaatcrctaatattattgagtgcttaagtgtgcttaatgagtattactaatccatgcaacaataattacctagattatctttacaccttacgataaccttgagagttaagaattatgatgacaacctcattttataaataagaaaactgaggcacagagaggttaatggcatgtgta

SEQ ID NO: 494880 - DNA, 357 bp, Homo sapiens
gcacaactggtgagaaaggctgctctgagcactagggaaaagagctaacgtatgctgggcttaatacctaggtgatatgctgttaggtgcggcaaaccatcatggtgcacgcttacctatataacaaacctgcacatcctgcatatgtaccttggaacttaaaaaaattataaaagaattatttttttwaaaaaaaggaaaaaagaaaggctgctctgagacacctgtgtcctggccagtgggtgtcttcttcgatgcagtaggaacactgcacactagggctggtgacttggtgacattctactacaaagcagccttaatgataaacttcccacagaatgcattcactctaaataa

SEQ ID NO: 494881 - DNA, 608 bp, Homo sapiens
tgttctctatgctgccacctccttgtatggtgtgttcatgtgtgataaatggtactagttgctgcttctaacaactccaacctcatagactttggaattcrtagtgtgaatttattgtgtgtttgtgtgtatacgcgcgtaacattatgtgtgctttgaccatttcactgcaatttgttgtagcttcctctgtgtcctggaggaataacaataataatatttggtacttaattgagcatttactatgtgccagtctttatatataaggagtgaatgagctattacaccattatgaggtggccctcttaccctgtacactgaactgcctctggaagatcttaaaggtccttgcctagtgagaatattcctgatgtgactttgattctggattgacctttgcctctgatctatctttgggtggatatttgtccttaggagtgatggcccttagaatcagaacatgctgaagcataaactcatataatgaagtcaagtgaccattcattaaacaaaatgcaatgtaaccctaggtaggatagtgggatagaaaaacaggtgtgtaatcctccctgagtttgaatcctgtttgtgctgtctactagatgtgt

SEQ ID NO: 494882 - DNA, 608 bp, Homo sapiens
tgttctctatgctgccacctccttgtatggtgtgttcatgtgtgataaatggtactagttgctgcttctaacaactccaacctcatagactttggaattcatagtgtgaatttattgtgtgtttgtgtgtatacgcgcrtaacattatgtgtgctttgaccatttcactgcaatttgttgtagcttcctctgtgtcctggaggaataacaataataatatttggtacttaattgagcatttactatgtgccagtctttatatataaggagtgaatgagctattacaccattatgaggtggccctcttaccctgtacactgaactgcctctggaagatcttaaaggtccttgcctagtgagaatattcctgatgtgactttgattctggattgacctttgcctctgatctatctttgggtggatatttgtccttaggagtgatggcccttagaatcagaacatgctgaagcataaactcatataatgaagtcaagtgaccattcattaaacaaaatgcaatgtaaccctaggtaggatagtgggatagaaaaacaggtgtgtaatcctccctgagtttgaatcctgtttgtgctgtctactagatgtgt

SEQ ID NO: 494883 - DNA, 505 bp, Homo sapiens
aagcttattttaatgtcattatcaggccagttgacagaggcttcttcccagaggcctaccaggccatactggccattagcagcaagagctgttttgcaccacgtcggatgacattgcataatatggcactacacagccagccaaccagctcttctgggtgtgatggcagagtggcaggggatggagcagggaagaagaaggggaccaaggaaactgaatcagcattgtactcctgggcacctgccaagtaacaattgcatatttccaaagaagcggttattctcccgtaagagagaaagcaagatggctgtggtcctgcccttccccttccccaggcactcccttctggcactggctgggaggaatcattgcttacctgtcccatttgtagtcrctgccatattagaaatcgtagggaggggactagaatagccacagctataaaaggattctgccagttggttcccccatgatttttttctgtgcataaggcctgtatccatag

SEQ ID NO: 494884 - DNA, 603 bp, Homo sapiens
tttttctcagaattttatatcacaaaaacttctgtcagccatcagggatcagcttgtttcttccttttgatgataggaatgaaataaagaatgtcctttcattctcactatgttgcaaggacactcagagccatattgtattttcagtctcttaattgtattgtgtatgctcaatcacatttaatagtaaatgtgccttctttttttttttttggtatttaccttgttacgtatattcctttttgtgagtttgctaggatcatttctttttggaaaggaagtttttaaaaaaatcatttattatatatttcataatccagggcttagtattttgtaattttttctctactttacttccttagctattaagacaaccagtaattatatcatatgtcttcaagagttggatttcccactggtgcaaccatcctcataataattggaataatgtgacataaaagggaaaatgttattcaaatttacttgtaatgaatgccatatgacttttttttgcattcttattcttcaataatatttttggggccaggcacaatgacttatgcctgtaatcrcaacactttgagaggccaaggtggtaggatc

SEQ ID NO: 494885 - DNA, 612 bp, Homo sapiens
tgtgccctgccaacttagaaggggtggggcttctgcctgttcctggctcccactggctgcatggagcatgtagccctggccatgcctccccaactgcagccagcatcatggcagtggccrctccatataggccgccgctgccatcagtaccttgcttgtttacacagtactcctgggtgccactttttatcccacttctgacaccatctgttaaaaaaacttcagccaaattaaagttaaaggagtttaattgagcaatgaacaattcgtgaatcagggagtccccagaatcacagcagatttagagagattcttgcgcagccacatggtggaacaagagttatagacggcaaaaggcaagtgatgtacaggaaatggaagtgagacacaggaacaactgggttggttacagctcggcatttgtcttatttgaacacagaacagttggctacatttgactggccaaaattcagtgattggcacaggtgtgggctacagtcggtttacacctccatttgttatagttcatgatgtatagaaaaacatttaagacatgaaaacgtaaggaggaggcagctttaggctaaagttgatttaacagttgttgacttt

SEQ ID NO: 494886 - DNA, 542 bp, Homo sapiens
tgtgccctgccaacttagaaggggtggggcttctgcctgttcctggctcccactggctgcatggagcatgtagccctggccatgcctccccaactgcagccagcatcatggcagtggccgctccatataggccgccgctgccatcagtaccttgcttgtttacacrgtactcctgggtgccactttttatcccacttctgacaccatctgttaaaaaaacttcagccaaattaaagttaaaggagtttaattgagcaatgaacaattcgtgaatcagggagtccccagaatcacagcagatttagagagattcttgcgcagccacatggtggaacaagagttatagacggcaaaaggcaagtgatgtacaggaaatggaagtgagacacaggaacaactgggttggttacagctcggcatttgtcttatttgaacacagaacagttggctacatttgactggccaaaattcagtgattggcacaggtgtgggctacagtcggtttacacctccatttgttatagttcatgatgtatagaaaa

SEQ ID NO: 494887 - DNA, 668 bp, Homo sapiens
agagtagcacttgtttttagtttattatgaatgatatacatgagacaaagcaaatgatacacaagggcattatgcctgtagattgggatggtgccacgtcttccatggggagggagattatggcatgccatgctgagcactttggactgtagacagytgggggagccactgaaaggttttaggcaagggaataacactgtaagactcctctagaaataccaaggatggatatgagtctgggaggaaggtgagtggcggcagtggggaagtaggaaggccagtttggggtttctaatagtagtccagaggagagatgatagaggcaaccaatgacttctattttcttatgaacagatacattcaaaatctttattattcatgacaccgagtggtaatggaatcagagataataaaaatcagtagatattcttggtttcattttaggtgatggctcatacctcttttcttgctaagcctattgtcagggctattaaaagaacagaaggagataatttgaatttacactaatttatttgcctggcctggggcagatgtagggcttaaaagtgatatatagtagtctttattatttttatagtttatccagtgcttgggtaaaatatacattcagctctaggtcaattttccagcagaacgtttcataaaac

SEQ ID NO: 494888 - DNA, 668 bp, Homo sapiens
agagtagcacttgtttttagtttattatgaatgatatacatgagacaaagcaaatgatacacaagggcattatgcctgtagattgggatggtgccacgtcttccatggggagggagattatggcatgccatgctgagcactttggactgtagacagctgggggagccactgaaaggttttaggcaagggaataacactgtaagactcctctagaaataccaaggatggatatgagtctgggaggaaggtgagtggcggcrgtggggaagtaggaaggccagtttggggtttctaatagtagtccagaggagagatgatagaggcaaccaatgacttctattttcttatgaacagatacattcaaaatctttattattcatgacaccgagtggtaatggaatcagagataataaaaatcagtagatattcttggtttcattttaggtgatggctcatacctcttttcttgctaagcctattgtcagggctattaaaagaacagaaggagataatttgaatttacactaatttatttgcctggcctggggcagatgtagggcttaaaagtgatatatagtagtctttattatttttatagtttatccagtgcttgggtaaaatatacattcagctctaggtcaattttccagcagaacgtttcataaaac

SEQ ID NO: 494889 - DNA, 594 bp, Homo sapiens
ctcgtttagtgttgcatgccagctaccaaatcaacctcccaaaaggtagtctgcttttctctttcctaactaatgaccctaagtgtcctacaagtggaatactatggttaaaacctccatggattagagaaagtaagtcaggtaaaatgcttagcacaattcctggttcgtagaacacatacgataactgttaatattagcaacagttctagcagtagtaattattatttttgttgttaatgattgtaacacttcatgattacatttattgatttttagacaacatcgggtttcatgacataaaaatgtgaaaacattttggaaacaagtagacaaaaaattgatacattactgctttatcaatatttatttgtttaccaacaaggttgaacatttgttcatatatttataggacatagaaacttgatgactgtgacttcctatttctgtgacatctgttaccacagtaactaatgcagtcagtgggaatatgtgaattkcatgagcctggccctccagcttgccagtcgtgagagccagagggaatggagcagcctgaggctgtatcacctgatggctggatgcatctggctg

SEQ ID NO: 494890 - DNA, 370 bp, Homo sapiens
gtgtatggcagtagatttccctaaacaattttcaaaacagtagtatgtcggttagtgggtgagaatcctaatgccaccactgcagcctctgctcagggttttctcagatatttagaaggttttattttatttttttcaaaaatttagaaagcaggttattwtcgtctccctctcaaaatggtctcacactcactttcttgctttccctgaatttttatatcatggttttgatcatttgtattcctttattctgccatttcttggtttcttgtcatcttaataattcataaaaaagtgaaacaaagatatgctctcaattttaaatccatcttagagaacactaaaactctttatgaggaactcagggaat

SEQ ID NO: 494891 - DNA, 494 bp, Homo sapiens
atgaatatatatgcaaaaatcatcaataaaatattagcatatgaaactcagcgatacataaaaagaatcatacctcatgaataagttttgttccatggatgcaaggctgattcaatatttgaaagttaataaatgtaatctaccataataataggctacaaagaaaaattaaacaaccatatcaattcatgcaaaaagaacatttgacaaattgctaggtattagaaaagattacctagtagagcaatggcatctcagtttcaattcctacacattatatcagaacaaatatgcagtgtctaaaacccgttagcttctcctatctttgttaagtttgcttattaaccataagagaaactcatcctagtcagcacgcataaaagtgaggctgctttatatgacacagsggtatttcatggactccaaagacagcatactcagtcagactttgcaaaggataaactcaaaaaaaaaaaaaaaagcttgaaaaacca

SEQ ID NO: 494892 - DNA, 657 bp, Homo sapiens
ctgctgttttaaatcacagcatttcagagtagaagttgatggcaacttacacagttggatttggttttctactagaactacctaatacaataccacaattcacagttaagtgtagwcgaaaagggcagcaacatcagaaggcagagaagaccctgatgggggtacgtacaagcttcccagtgcttcaggattcattattttaataatgacaaaattaaatcttagtatcaaaatgaccaggtgtgaggttatgcacttggatcttctcccttcctcgctatacaccaaaaacattagtaagtctctggtgaaggtatttgtaggttcaatacttttaggttgctgattgctgtgtttggcttcaagttttgtggtaataaacagtgatgcccaaccctctcaactatgtatggctattctattgcctgctttaataaagaagtaaaaggagaattactacttggaaggtacttgctaacaaaccattattttctttagctgccaacatctcaatggtattagagttagtagtttccagtttcccaagaccacaagcagagaagcctgaaagagaatcatattttgggacagttaaactatgaaaagtttactatgcagtgactgtgcttaagagtctaaagagattgataaatctaa

SEQ ID NO: 494893 - DNA, 620 bp, Homo sapiens
tctactgacatttttaatgtcaacattaccaacagcagatgggagatgtctgcattgggtgtctgtttccaattaagatctttaatttatgataaatgaatacgtttcaatcatgtctgccttgcattcagtgtatgcttggttgatcaacaataaaagctgccaggaatgttttggcacacaaagagagactgagtcagcttataggtrgaaggctcactgttttaatggttccttaaattacttaaatcagaaaaactaaaaagaaggtaacaaatgagcttagtggttttgtttaatatatgtacgtgaaaatttgaaaaattaaagaggagaaagaaatacctgtagacatccccaccctaaaacaaaccctgttagcatttaggtatcttattctggtctttggactatgcatagaatcatttagataagtataattacatattgattcttaagtttttcacctaacatatcctatgctttattttcccagttttccacaatctgttacggctatctattgcttcataacagatcaccccaaaacttagtggctgaaacaagaagattaatttggcttaagaatctgcaattttgggaatgcttggcagggacag

SEQ ID NO: 494894 - DNA, 593 bp, Homo sapiens
ctgctccttgagtaacacagctagcctataggcaatgagctcagaatagcagcttaccagatgttggctagctgtatttctacccacttttaattgcatgcaaattaaagggaaggctattcagaaatttctagaaaatgggcagctacttgttgatgttgtcttggaaagggacagtaacttccaggtgttgccatggcatttggaaaccatcatggcgctggtgggagtgtctgatgaagatgggcagcgagggcaacgagacattgcttttcatgccacttgctggttctgtctagtttcctgtcttgtccaggaaacaagtgctgcccgtcacctatctcataacttcttgactcttgtgtctttcagttactttcaatctttaggtcaaaacagggttattatttaatgaattccttagaatccaataagaacttcagtcctttaagtggttacattttaacaattgctaaccatgtggctcacaccaactttttcactaagtaagaagagtaaataaagcttcrcattatttatgttaaaattaatttgaataaattggggaactattaatatacaatgaggatttg

SEQ ID NO: 494895 - DNA, 649 bp, Homo sapiens
ctgaaccacgacagaaaactatagtatatcatgtaaggaggtaataatagttcttaactttcaagaaagttataaaagttaaataagctagtgtaagtaaaaaatattcacaaagcacaatatacattttaaatattgttttttcaaagtctattcttaaattaagacttttttccatcataatatagaaaaatacatctgtcactaatgggagataagaccttgaatcgcaatattttaggtaatcatwtttttcatccttaacagagggtagaggatagtatttgagggggaaatctgctcgtttttcaagaaatagtctagtttaaatccttaatcttctggtaaataatttgttgttgttgttgttgttgtttgtttttttgagatagggtcttattctctctgccaagctggagtacagtggtgtaatcaccgctaactgcagcctcaacctcccaggctcaagcaatcctcccacctcagcctcccgagtagctgggattatgggcatgcaccaccatgcccagctaattttttcagagacagggttttctatattgcccaggctggtctcaaactcctgagatcaagtgatcccccgaccttgacctcccaaagtgctgagattataggtatgagccaccgt

SEQ ID NO: 494896 - DNA, 649 bp, Homo sapiens
ctgaaccacgacagaaaactatagtatatcatgtaaggaggtaataatagttcttaactttcaagaaagttataaaagttaaataagctagtgtaagtaaaaaatattcacaaagcacaatatacattttaaatattgttttttcaaagtctattcttaaattaagacttttttccatcataatatagaaaaatacatctgtcactaatgggagataagaccttgaatcgcaatattttaggtaatcatatttttcatccttaacagagggtagaggatagtatttgagggggaaatctgctcgtttttcaagaaatagtctagtttaaatccttaatcttctggtaaataatttgttgttgttgttgttgttgtttgttttttkgagatagggtcttattctctctgccaagctggagtacagtggtgtaatcaccgctaactgcagcctcaacctcccaggctcaagcaatcctcccacctcagcctcccgagtagctgggattatgggcatgcaccaccatgcccagctaattttttcagagacagggttttctatattgcccaggctggtctcaaactcctgagatcaagtgatcccccgaccttgacctcccaaagtgctgagattataggtatgagccaccgt

SEQ ID NO: 494897 - DNA, 649 bp, Homo sapiens
ctgaaccacgacagaaaactatagtatatcatgtaaggaggtaataatagttcttaactttcaagaaagttataaaagttaaataagctagtgtaagtaaaaaatattcacaaagcacaatatacattttaaatattgttttttcaaagtctattcttaaattaagacttttttccatcataatatagaaaaatacatctgtcactaatgggagataagaccttgaatcgcaatattttaggtaatcatatttttcatccttaacagagggtagaggatagtatttgagggggaaatctgctcgtttttcaagaaatagtctagtttaaatccttaatcttctggtaaataatttgttgttgttgttgttgttgtttgtttttttgagatagggtcttattctctctgccaagctggagtacagtgrtgtaatcaccgctaactgcagcctcaacctcccaggctcaagcaatcctcccacctcagcctcccgagtagctgggattatgggcatgcaccaccatgcccagctaattttttcagagacagggttttctatattgcccaggctggtctcaaactcctgagatcaagtgatcccccgaccttgacctcccaaagtgctgagattataggtatgagccaccgt

SEQ ID NO: 494898 - DNA, 541 bp, Homo sapiens
tcttaaaacaagaaaaaaaagaaagaaagaaaaaagaaatgaaggttttcactgggccaatatttgtggagataaacaactgtgagtagattctatgtgtgtttttagagtttcactgacatattttgcaatgtttgcatgtcatggttgaggggcaatgataccacaattgcatatagtttttgtcttaatcagtgggatgagtcttaaggtaatttattgagaacagagaagggaggataggttgacaaacaaacattttcaagtgttgtattttggaaactttattaaatgcctactcaatatcagtatgtgaattttacccacacaaatgaacctattcaatagaaattttcttaattactcaaygtaatacacatgcacatgcgcacatgcacgcacacacacacacacgcacatacacacaaacataacccagcctccactacttaagatgagagtatagtctagttaaccaggaggttatgagagttcagataaagtttgtcttttggcgtggtgacagaagcacaaacttcat

SEQ ID NO: 494899 - DNA, 581 bp, Homo sapiens
ctgctgaaaacgtacaatcaaacttgtggcccaattaaagaaattacacaggacttaaatagtagaatttttatatattaatattatacatggcttcatagtttcattccaatgctcattttcctttgcccctccactatttttcagtatgagtattttaaattgctgtatatttttaggaaagatgccttgcatgatggctggaacaagatggggaataaatattatataaatagtatgctaattacttatgattgtgcttgaataaagtcatattgacagtcttgattcaggcccctagaattaatggctcatacacacacacacacacacacacacacacacacacacacacacacacacattgctgagtcccaagcaaaaggcagcccctggatttcctatgacatytctaagggaactaactaccgtaaagaggcttggctcccaagaccctcgctgatatttctgcctaaattgctcctctaaaccatcatcgcaggaaacattttttgaccaccacattccttcttcctgctgcaaagttgaatttcctttgagacagctttctaccctacata

SEQ ID NO: 494900 - DNA, 623 bp, Homo sapiens
aattataatacttgcagatttcaatataataaaatcccttatccacagataaggatgttgagattcacaggaattaagagactttctcaagggatcatctgtgacagacactttgctgaggattatcagatcatcaattataaataatgtttaaagactagccaaaggaacttcaatgggagacagtaataaatattgctctgtcatgcattgcatcaggagtcactaatcacastaaactatacatataaatagattatattactaaaatacaaaggagttctgcaaactcctttgcagtttctccaaataatttggagaaaaattaaaagtaaaagaaatagatttgaaaaagaggatttagtcttatttaagccaaaaaaaagcttaaatccaactaccacataagcaagtccctacacattaaagtcacgctatcatagctttctacaacaagaatatacgagtgcatactatgtcaaaggagagagatgtcatatgttcaaatatgtttgcctttttctctaagcagagacattcccttctacgtgcttattgcttttctgtgcctttgacactgcataaaatacttggttaatagttccttcacaatctgttaggtt

SEQ ID NO: 494901 - DNA, 623 bp, Homo sapiens
aattataatacttgcagatttcaatataataaaatcccttatccacagataaggatgttgagattcacaggaattaagagactttctcaagggatcatctgtgacagacactttgctgaggattatcagatcatcaattataaataatgtttaaagactagccaaaggaacttcaatgggagacagtaataaatattgctctgtcatgcattgcatcaggagtcactaatcacagtaaactatacatataaatagattatattactaaaatacaaaggagttctgcaaactcctttgcagtttctccaaataatttggagaaaaattaaaagtaaaagaaatagatttgaaaaagaggatttagtcttatttaagccaaaaaaaagcttaaatccamctaccacataagcaagtccctacacattaaagtcacgctatcatagctttctacaacaagaatatacgagtgcatactatgtcaaaggagagagatgtcatatgttcaaatatgtttgcctttttctctaagcagagacattcccttctacgtgcttattgcttttctgtgcctttgacactgcataaaatacttggttaatagttccttcacaatctgttaggtt

SEQ ID NO: 494902 - DNA, 580 bp, Homo sapiens
tactctgacattcctaataaagattattatataaaatactcagggaatcatgcagatacaatttttgacaataatctggggtactggtacatgatatctaatccttaatgaaaggacacatttagaaatttagaaatttcactagtctatagaacaaaaaggcagagagaagcagtttaagaaaatcttttacatgctaaaaatatggggctttgacagttaatggagatataccttgctttacataatagcataggaaaaygggaatctcaatgtatctgcttctcaggtgattaactgagactcagataagttaagtgccctccgcagaaaggaatagaatttccactcctgactccccacccacaggcccagcacttctcccacccaactttcagagcagcctgatccagctctgctgctgcagcaagctcaaaaagtccccatcttgaaaagttatttctcatttctcatttatattactaatattttcagcttccttatcctcacttctcattattcaaaatattttaacaaatacatttgtaagtgtgtctgcacatatctaaacatatataaa

SEQ ID NO: 494903 - DNA, 560 bp, Homo sapiens
tgatgggaagtaattgaatcacggaggcaggtctttcctgtgctgttttttgtgatagtgaataaatctcatgagatgtgatggttttaaaaatgtgagtttccctgcacaacaagctctctctttgcctgctgccattcaygttagatgcaacttgctcctccttgccttccaccatgattgtgaggcctccccagcctcttggaactgtaagtccattaaacctatctttcttttgtaaattggccagtcttgggtatgtctttatcagcagcatgagaacaaataatacaccagttttattttaatgtacaaaatgttttaaattactttttctcagtagactccacaggaacagtcatcttgtttttttatgaatttttaaaactcccttccagaggcagtcttcttattctggctcttttctcttctctatgaagctgttatatctgtagaaaattccctccaacagcagcttccttctgatggcttccagttttgctcttctcacaacttaagatgttacaaaaattcctcagtgtcagtctccatcacgtcat

SEQ ID NO: 494904 - DNA, 560 bp, Homo sapiens
tgatgggaagtaattgaatcacggaggcaggtctttcctgtgctgttttttgtgatagtgaataaatctcatgagatgtgatggttttaaaaatgtgagtttccctgcacaacaagctctctctttgcctgctgccattcatgttagatgcaacttgctcctccttgccttccaccatgattgtgaggcctccccagcctcttggaactgtaagtccattaaacctatctttcttttgtaaattggccagtcttgggtatgtctttatcagcagcatgagaacaaataatacaccagttttattttaatgtacaaaatgttttaaaytactttttctcagtagactccacaggaacagtcatcttgtttttttatgaatttttaaaactcccttccagaggcagtcttcttattctggctcttttctcttctctatgaagctgttatatctgtagaaaattccctccaacagcagcttccttctgatggcttccagttttgctcttctcacaacttaagatgttacaaaaattcctcagtgtcagtctccatcacgtcat

SEQ ID NO: 494905 - DNA, 560 bp, Homo sapiens
tgatgggaagtaattgaatcacggaggcaggtctttcctgtgctgttttttgtgatagtgaataaatctcatgagatgtgatggttttaaaaatgtgagtttccctgcacaacaagctctctctttgcctgctgccattcatgttagatgcaacttgctcctccttgccttccaccatgattgtgaggcctccccagcctcttggaactgtaagtccattaaacctatctttcttttgtaaattggccagtcttgggtatgtctttatcagcagcatgagaacaaataatacaccagttttattttaatgtacaaaatgttttaaattactttttctcagtagactccacaggaacagtcatcttgtttttttatgaatttttaaaactcccttccasaggcagtcttcttattctggctcttttctcttctctatgaagctgttatatctgtagaaaattccctccaacagcagcttccttctgatggcttccagttttgctcttctcacaacttaagatgttacaaaaattcctcagtgtcagtctccatcacgtcat

SEQ ID NO: 494906 - DNA, 306 bp, Homo sapiens
gctacacacggacaagaaacaatacttatctttgtatactgttttcaggtaggaaggtcctaggtttaaaatatcattttaaagttgattcaaatcaactttatggcttaaatcctagttctacaacttgctatgtgaccttagataaattatttaacctaagttgctgattccccactttcaaaatgragatgataattaaactgcgctaataattgcacagagttaataggatagtgtatgagtacaaagggtctgacacatagtaggacttcaactagagccagtataggtcgcctttcctca

SEQ ID NO: 494907 - DNA, 579 bp, Homo sapiens
aaaacatgtttttaacattaaacaattttactttcatatctgtttgcctatcttcaactctgcatggaaagtatattgaatagatttttaggatattgtcaaatcttgtatcaaatccaaaactctgatatctacattgatataggatatttcatttagtcgcaagagaaactgttgataaaagaacactttccccaatgaacgttttaatagcttttcaagggtattggatatgcttgattttgtgttcaatttttttctgcccaagaaaacactttgtgttactgtaatcaactacaaataatgtcttcacatttaaaaggctgaaaggttctcagtttttaataataattagaaataatgaatgctttgttctgtctaaaatatatttcattgatgttcagaatttcaaacacttcatgtattcactatttcaaaggtcatttaaatttgaagactttgcgctttaaaatctgaacatggccttaaaatttatatcttttagcatccttgctaagtacaattagctgttttttggaattagactattatcactwttatcacatattaaaataattc

SEQ ID NO: 494908 - DNA, 491 bp, Homo sapiens
aaattaccccctttcttttactgcttgtttttgggggagacctcttttaaaaatatatcattttctactttgtgtttaaatatttgtgcacacttaacatgtgatcacaatttaattttcagggcctaatccttgacaaatttgattcacatttgtattcctacagttcactgaagagtacatttctgaatgtacacttattaaatgtgtgaatggtaaaattaagttgttagrttctttaatgtaagttatagctatatatttaaggtaaattttggattcgaatttgtcttgtgtctattctttcatatcgcatccaccatggtaaaaaaacttacactaaatgatttccctaaaatgccctctgtttacattcacaatttgctagactcatagctgcatccttcattattctattaccttctaaaactccagtaaagagttcttcctgacctcttatcattgggactcaccggtcaggccaaacatta

SEQ ID NO: 494909 - DNA, 579 bp, Homo sapiens
tcccccagcttctgggaaactcagctccccagatttccaactgtccagtaggaaccccaggcccttccactgaaytctctctaggcctcacaatcctgttttttggttgttgttttttttacatggagtcgctctgtcacccaggctgcagtgcaatggtgcgatcttgactcacggcaacctccgcctcccggattcaagcgattctcctgcctcagcctcctgagtagctgggattacaggtgtgtgccaccatgctcggctaatttttgtattttcagtagagatggggtttcgccatgttggccaggctggtctcaaactcctgacctcaagtgatccgcccgccttggcctcccaaagtgctgggattacaggcatgagccactgcgcctggccatcaccgtcctgttataaggggtcagacctctggccctggacccttagcctgaaggatcccagatgccccagactccagaaaaccaatttgcttctttagtccttgcaaaacctacagcttccacctccttgtcctaatggcccccaggaatcaagtgcccgtcctcttagaaaccaggt

SEQ ID NO: 494910 - DNA, 579 bp, Homo sapiens
tcccccagcttctgggaaactcagctccccagatttccaactgtccagtaggaaccccaggcccttccactgaactctctctaggcctcacaatcctgttttttggttgttgttttttttacatggagtcgctctgtcacccaggctgcagtgcaatggtgcgatcttgactcacggcaacctccgcctcccggattcaagcgattctcctgcctcagcctcctgagtagctgggattacaggtgtgtgccaccaygctcggctaatttttgtattttcagtagagatggggtttcgccatgttggccaggctggtctcaaactcctgacctcaagtgatccgcccgccttggcctcccaaagtgctgggattacaggcatgagccactgcgcctggccatcaccgtcctgttataaggggtcagacctctggccctggacccttagcctgaaggatcccagatgccccagactccagaaaaccaatttgcttctttagtccttgcaaaacctacagcttccacctccttgtcctaatggcccccaggaatcaagtgcccgtcctcttagaaaccaggt

SEQ ID NO: 494911 - DNA, 579 bp, Homo sapiens
tcccccagcttctgggaaactcagctccccagatttccaactgtccagtaggaaccccaggcccttccactgaactctctctaggcctcacaatcctgttttttggttgttgttttttttacatggagtcgctctgtcacccaggctgcagtgcaatggtgcgatcttgactcacggcaacctccgcctcccggattcaagcgattctcctgcctcagcctcctgagtagctgggattacaggtgtgtgccaccatgctcggctaatttttgtattttcagtagagatggggtttcgccatgttggccaggctggtctcaaactcctgacctcaagtgatccgcccgccttggcctcccaaagtgctgggattacaggcatgagccactgcgcctggccatcascgtcctgttataaggggtcagacctctggccctggacccttagcctgaaggatcccagatgccccagactccagaaaaccaatttgcttctttagtccttgcaaaacctacagcttccacctccttgtcctaatggcccccaggaatcaagtgcccgtcctcttagaaaccaggt

SEQ ID NO: 494912 - DNA, 533 bp, Homo sapiens
ctattactgtggttattgttagggattttattgaagtccctacatagccctgaatgtaagtaagagctaggccgcttctcagctgtgtgatttggggcaagttcattcccagttttgagcctcagcatcctcctctgtcaagtggaaataaataatctatattttgaagcaatgctaaatttccagagtccattaagcawgaatgcaggtcatcagtgaagcttctccttctcccctgccacccgctatccccgggacaatatctgcttgttaaataacttgattctaagaatccattaaaaggattatcacagggtgaacatttaggccattcttggattttcatctatgttagtggggtttctagtttgaatatatatttgggtagaggagggtgttggcagtttccaggatccttttcaatgtgctgggcttctaaatatctccgctgaccctaactcaaagggttcctgccgcactaaataagatgctgtgtgtgaaggttctcagcaggctgcctgacacacaaacca

SEQ ID NO: 494913 - DNA, 533 bp, Homo sapiens
ctattactgtggttattgttagggattttattgaagtccctacatagccctgaatgtaagtaagagctaggccgcttctcagctgtgtgatttggggcaagttcattcccagttttgagcctcagcatcctcctctgtcaagtggaaataaataatctatattttgaagcaatgctaaatttccagagtccattaagcatgaatgcaggtcatcagtgaagcttctccttctcccctgccacccrctatccccgggacaatatctgcttgttaaataacttgattctaagaatccattaaaaggattatcacagggtgaacatttaggccattcttggattttcatctatgttagtggggtttctagtttgaatatatatttgggtagaggagggtgttggcagtttccaggatccttttcaatgtgctgggcttctaaatatctccgctgaccctaactcaaagggttcctgccgcactaaataagatgctgtgtgtgaaggttctcagcaggctgcctgacacacaaacca

SEQ ID NO: 494914 - DNA, 533 bp, Homo sapiens
ctattactgtggttattgttagggattttattgaagtccctacatagccctgaatgtaagtaagagctaggccgcttctcagctgtgtgatttggggcaagttcattcccagttttgagcctcagcatcctcctctgtcaagtggaaataaataatctatattttgaagcaatgctaaatttccagagtccattaagcatgaatgcaggtcatcagtgaagcttctccttctcccctgccacccgctayccccgggacaatatctgcttgttaaataacttgattctaagaatccattaaaaggattatcacagggtgaacatttaggccattcttggattttcatctatgttagtggggtttctagtttgaatatatatttgggtagaggagggtgttggcagtttccaggatccttttcaatgtgctgggcttctaaatatctccgctgaccctaactcaaagggttcctgccgcactaaataagatgctgtgtgtgaaggttctcagcaggctgcctgacacacaaacca

SEQ ID NO: 494915 - DNA, 611 bp, Homo sapiens
cacaactctgggttacttcatcctctgtgcttcattttctttatctataaaatggcactgatataaatagtacctaccccagaggattgttgggggggattaaatgagttcaatctggtcggrtgtggtggctcatgcctgtaatcccagcactttgggaggccgaggcgggtggatcacttgaggtcaggagttcaagagcagcctggccaacatggtaaaatcccatctctactaaaaaaatatagaattagccgggtctggtggtgcagacctgtaatcccagctacttgggaggctgaggcaggagaattgcttgaacccaggaggtggaggttgcagtgggccaagatggtgccattgcactccagccagggcaacaagcaaaactccgtctcaaaaaaaaaaaaaaaaaaaaaaaaagagttaaatccagttagaacaatcaaaacatggcctggtacatagtagacattcaatagattttagctattttcattaccataatttatttgatcgattctctgtcaatactggcattgatattgatataagcataaggaaatgaatatcctggtacatctgtctgtgcacatgagtgagcagagcca

SEQ ID NO: 494916 - DNA, 611 bp, Homo sapiens
cacaactctgggttacttcatcctctgtgcttcattttctttatctataaaatggcactgatataaatagtacctaccccagaggattgttgggggggattaaatgagttcaatctggtcgggtgtggtggctcatgcctgtaatcccagcactttgggaggccgaggcgggtggatcacttgaggtcaggagttcaagagcagcctggccaacatggtaaaatcccrtctctactaaaaaaatatagaattagccgggtctggtggtgcagacctgtaatcccagctacttgggaggctgaggcaggagaattgcttgaacccaggaggtggaggttgcagtgggccaagatggtgccattgcactccagccagggcaacaagcaaaactccgtctcaaaaaaaaaaaaaaaaaaaaaaaaagagttaaatccagttagaacaatcaaaacatggcctggtacatagtagacattcaatagattttagctattttcattaccataatttatttgatcgattctctgtcaatactggcattgatattgatataagcataaggaaatgaatatcctggtacatctgtctgtgcacatgagtgagcagagcca

SEQ ID NO: 494917 - DNA, 611 bp, Homo sapiens
cacaactctgggttacttcatcctctgtgcttcattttctttatctataaaatggcactgatataaatagtacctaccccagaggattgttgggggggattaaatgagttcaatctggtcgggtgtggtggctcatgcctgtaatcccagcactttgggaggccgaggcgggtggatcacttgaggtcaggagttcaagagcagcctggccaacatggtaaaatcccatctctactaaaaaaatatagaattagccggrtctggtggtgcagacctgtaatcccagctacttgggaggctgaggcaggagaattgcttgaacccaggaggtggaggttgcagtgggccaagatggtgccattgcactccagccagggcaacaagcaaaactccgtctcaaaaaaaaaaaaaaaaaaaaaaaaagagttaaatccagttagaacaatcaaaacatggcctggtacatagtagacattcaatagattttagctattttcattaccataatttatttgatcgattctctgtcaatactggcattgatattgatataagcataaggaaatgaatatcctggtacatctgtctgtgcacatgagtgagcagagcca

SEQ ID NO: 494918 - DNA, 564 bp, Homo sapiens
tgtcccaacttgtggcctccaagcccatcaggctgcttagagacagtggcagcagcatggctcacacacagcacatctagcacagacaagaaacatttgtggctgggtacagtgattcacatctgtaatcccagtgctctgggagactgatttgggacaatcgcttgagcccacaagtttgaggctgtggtgagtatggtcataccactgcactccagtctgggcaacagactgagaccctctctctaaaacaacaacaaacaacaaagcatttgctatttttcacagtcacttatgttgcttactcttttcttctrttatccagttttcaacttagtttaagagattaatgattgtttcttaggtgacattcttcccaggagattatagcacactcaaatgaaagactcttcataaaccccagccaacacacagtcaaaaaccttcccacagtcacccactgctgctgggttctttagtgtcctactcacttccaatccacatttcacctgggcttgacccacttattttttagctcactgataagttgagtactgtgtaact

SEQ ID NO: 494919 - DNA, 572 bp, Homo sapiens
ctggatgtgaccgcttcctatgggggccccaggcacagaaagatgcaaaggagggtggatggaagtggaacgtgggcaaggcccagagagcatcaggttgactgtttcaccaggcacccctgctccggtgcaaggcagaagccggccagacscccactcagcgcccctcctgggctctggccctggcacctagacccatcccgccattctccgcagctccactgcccgcaggcaggagctgccggcgtggaacctgcgggctgcagtgagcagtggaggcagtagccgctgctccctggattcccgggatgtttttctttggcttttttctttttctattttattttagattcagaaggtacacgtgcttgtttgttatatgtatatcacatgcacaatggggggggggttgaacttctagcatacccatcacccaaatattggaggttgtacccagtaggtacgttttcaactcttccccccaactttttgagtccccacagtgtattctctccatcttcatgagaacatgcagtatttggctgtttctgcattcacgtaggataatgacc

SEQ ID NO: 494920 - DNA, 572 bp, Homo sapiens
ctggatgtgaccgcttcctatgggggccccaggcacagaaagatgcaaaggagggtggatggaagtggaacgtgggcaaggcccagagagcatcaggttgactgtttcaccaggcacccctgctccggtgcaaggcagaagccggccagacccccacycagcgcccctcctgggctctggccctggcacctagacccatcccgccattctccgcagctccactgcccgcaggcaggagctgccggcgtggaacctgcgggctgcagtgagcagtggaggcagtagccgctgctccctggattcccgggatgtttttctttggcttttttctttttctattttattttagattcagaaggtacacgtgcttgtttgttatatgtatatcacatgcacaatggggggggggttgaacttctagcatacccatcacccaaatattggaggttgtacccagtaggtacgttttcaactcttccccccaactttttgagtccccacagtgtattctctccatcttcatgagaacatgcagtatttggctgtttctgcattcacgtaggataatgacc

SEQ ID NO: 494921 - DNA, 572 bp, Homo sapiens
ctggatgtgaccgcttcctatgggggccccaggcacagaaagatgcaaaggagggtggatggaagtggaacgtgggcaaggcccagagagcatcaggttgactgtttcaccaggcacccctgctccggtgcaaggcagaagccggccagacccccactcagcgcccctcctgggctctggccctggcacctagacccatcccgccattctccgcagctccactgcccgcaggcaggagctgccggcgtggaayctgcgggctgcagtgagcagtggaggcagtagccgctgctccctggattcccgggatgtttttctttggcttttttctttttctattttattttagattcagaaggtacacgtgcttgtttgttatatgtatatcacatgcacaatggggggggggttgaacttctagcatacccatcacccaaatattggaggttgtacccagtaggtacgttttcaactcttccccccaactttttgagtccccacagtgtattctctccatcttcatgagaacatgcagtatttggctgtttctgcattcacgtaggataatgacc

SEQ ID NO: 494922 - DNA, 572 bp, Homo sapiens
ctggatgtgaccgcttcctatgggggccccaggcacagaaagatgcaaaggagggtggatggaagtggaacgtgggcaaggcccagagagcatcaggttgactgtttcaccaggcacccctgctccggtgcaaggcagaagccggccagacccccactcagcgcccctcctgggctctggccctggcacctagacccatcccgccattctccgcagctccactgcccgcaggcaggagctgccggcgtggaacctgcgggctgcagtgagcagtggaggcagtagccgctgctccctggattcccgggatgtttttctttggcttttttctttttctattttattttagattcagaaggtacacgtgcttgtttgttatatgtatatcacatgcacaatggggggggggttgaacttctagcatacccatcacccaaatattggaggttgtacccagtaggtacgttttcaactcttccccccaactttttgagtccccayagtgtattctctccatcttcatgagaacatgcagtatttggctgtttctgcattcacgtaggataatgacc

SEQ ID NO: 494923 - DNA, 417 bp, Homo sapiens
ctgaaggtaaattcagttaatccttcttggcccaggttaagccccatgaagctctcaaagatctttacccaccttttcagcacatagagyatttcccttgtacgtgtatttgtatccctaatattggcacttgattatggtaatatgtgatcttttactaccttaagctgttattcttcaattatgttctatgtatttgtgctgttttcccaaccagattataaactctttggaaggaaccatgccacatgctgactgttcacacattgccgagtagtaaattccttcactgtgctcttccaaccagaataagaaagctaagatacgtgttttagtaggagccctaatacagtcagtaaagcttgtatttccattagcatgcttatagttgatgtacattgtagttaataccagact

SEQ ID NO: 494924 - DNA, 443 bp, Homo sapiens
agataaatactgtatgatttctacttatataaggctagaatagtccygatcatagaaatagaaggtaaaagggaagagggaaggatgtggagtctttgttgaatgggcacagagtttcagttttgcaagatgaagagttcttgagatggatagcagtgatagctgcacaacagaatgaatgcacttaatgccaaggaaatacacacaatagttaagatagttaattttagggctatgtacattttactgtaattttttaaaatgggggaaaatattagcaggagaagaaagtaagtcagagaggaggaggtagaaaacaaagatagctagaacgaaagaatcatgagcacaggcaattctgggtaaggtaacttgtaaagggacaaaggggcaatggattgaaagcagataacagatgctcctcttatgccccatccaaggag

SEQ ID NO: 494925 - DNA, 668 bp, Homo sapiens
attttattgttatagttaccttaagtatactataggtttcaaattcctctactgggagactaccattgtcctgtgcttaggagccagagagtttctctctctttttttttcctttcctctgagttttcaaccactccagcataccaataccacaggatatccctctgtgctcttgacctttcccaaacagtagaaagttcatggttgaggcagctaggattctccattgttctggtccagcctcagtcttaggtaggccctctggctcttcttcctgtggcagtcaaaatctgccttgtatttgtatyggtcttaggtagaagtttcctactcttcccctagtagtaaaagacctctccttggtatcagtgtagaatcctgaggcctaaaatgatttctgcgcctctttcagaagtaaagggttttctcttctaccctttccccggcatcaatgagtctctgcctgcatcctggggacaggagggttcctcctctaagcagcacaggggtttgacttctaatctcccttcagaaacgtatgaaatcagaaggttttctgcccctcccccactggtttgaggcttaaaggagaagggtctgagtaaatgggaaggcctttgtcctgtctcccaggcacaaaggcctctctgcatcattctctctctgca

SEQ ID NO: 494926 - DNA, 615 bp, Homo sapiens
agtttgccatacttatctctcctttttttttttttgccgaagtactttaaagcaaacctcacgtatcatctcatttaattcscacatcagtatccctgtctgaaaaatatggaccacaacataaccacaatcttgttactatacctgtcaaagttccttggtttcacagaatacctatttcccagtcatattcctcctgttgtcactgtgggtcattttatgttggttttgttgaataatgagaaaaacaaggttcacacattagtttggtggttctttcccttaaatttctgtaattggaagtgatcttactcttcctcctccctcctatttaccttctgcaagtgacttaaagaaactgatttagttctttagaattttttccctctggatttgtctgtctgctactttttgatgttcaacttgaccctctgtatcctccctttcagtgaatgggaggtgcctacaggcttgattagatgttggttcacctgtttagggaagaacacctcccagattggtctgtgcttcatgctgcatcccatcctgatgcacagtgtctggttttctcatttttaagcatgctaaaatagatcattggttcaggtggtaaca

SEQ ID NO: 494927 - DNA, 601 bp, Homo sapiens
tattattgctctgtctttattgacttagaataaatgcatttccaacaatatggcacattcaacaatgtgagaatttttaaaaagctggaaccatcatatctcagctcttaaacaaagttaagactttacttcacaaaataccacagactttggatttaaaagttccatgacctgtttttttcactctaggctctccataaccctggggaagttcctcccttgcctgtatcccagtcccccctttaccatgttctatttttaacaccctcaccttttaaacataatataaatatacaattatcatgtttattctttgctgttctctcactatcccccccatacacatacgcactagaacataagtctcatgagartaagaactgtagtgtattttgttcactgatgtatcccaagtacctagaataatgtctgtcacaaggtaattactcaatgaatatttattgcataaatgaaacccataaacctaacataacttataataacaatctaatgacaaaaagaaacttattctaaactctaagcatcaccttgttgacaaaagatcaggtgccagcattatccatttcctcattacagaaga

SEQ ID NO: 494928 - DNA, 608 bp, Homo sapiens
ttacctgcattactgtaggcaccttctgggtggcctgctggctttacccatgcccctcggtgctccacaaagcaggcaaaggcatcccttagagctcaacagaccttgtctctccctgtttaccctctgctggcttcctaatcactgagaataaagccagatccttttctgtggcccacaaggcctcacgcctttggcccctgaacgcccttttctactgtcctgctggttgtcatgactgagactcgaaaggtctgtccaccatgtcctggctgtgtgaccttccaaagggccttaatckctccgtgactcaatttccccctcagtaatgggagaagtgatagtacctatctcacagatgtgttgggaggattaaggagattatatgtgtaaatgacatagaagagggtacagcatccatgcaggaaatgttcaatgtcaatgtggttttttttgttattttaatacacacatgcaattcatgagctctgcccacaggtggcagcccggcacatttgttaactggcttgttgacaggaaaatcaaggttacacgttcctttctcttaaaccagtttctttatcagtaatatgactgctgtctttaac

SEQ ID NO: 494929 - DNA, 514 bp, Homo sapiens
tgggatgtgctgcaggaccagggccaggtgtggggctcatgcctatcacgccagtgctttgggaggccaaggtgggaggatcccttgagcccagtagttcaagaccagcctgggcaacacagtgagaccctgttcctaaaaaaatttaaaaaattaaaaaaataaaaacatgccacaggaccactgctcagagctctttggtctggcaaccctggaccttcacatggttttgtttgccaaagcaaagtccttattaatatccaaatacagtttgagttttcttgggctttatcctctccagaaacccaggagygtgttaacttcttggttgcattgctttcttcaaagagagagtgaatccggtagagatagaaaggatgtcctttacgtatcccacagcggcctcacggagaacgataagagaacaatcattaaaactttcattgccataattttctgctttcgttttttaaaagtttgggttagcaaccaatttcctccttgaccaggtgat

SEQ ID NO: 494930 - DNA, 514 bp, Homo sapiens
tgggatgtgctgcaggaccagggccaggtgtggggctcatgcctatcacgccagtgctttgggaggccaaggtgggaggatcccttgagcccagtagttcaagaccagcctgggcaacacagtgagaccctgttcctaaaaaaatttaaaaaattaaaaaaataaaaacatgccacaggaccactgctcagagctctttggtctggcaaccctggaccttcacatggttttgtttgccaaagcaaagtccttattaatatccaaatacagtttgagttttcttgggctttatcctctccagaaacccaggagcgtgtyaacttcttggttgcattgctttcttcaaagagagagtgaatccggtagagatagaaaggatgtcctttacgtatcccacagcggcctcacggagaacgataagagaacaatcattaaaactttcattgccataattttctgctttcgttttttaaaagtttgggttagcaaccaatttcctccttgaccaggtgat

SEQ ID NO: 494931 - DNA, 514 bp, Homo sapiens
tgggatgtgctgcaggaccagggccaggtgtggggctcatgcctatcacgccagtgctttgggaggccaaggtgggaggatcccttgagcccagtagttcaagaccagcctgggcaacacagtgagaccctgttcctaaaaaaatttaaaaaattaaaaaaataaaaacatgccacaggaccactgctcagagctctttggtctggcaaccctggaccttcacatggttttgtttgccaaagcaaagtccttattaatatccaaatacagtttgagttttcttgggctttatcctctccagaaacccaggagcgtgttaacttcttggttgcattgctttcttcaaagagagagtgaatcyggtagagatagaaaggatgtcctttacgtatcccacagcggcctcacggagaacgataagagaacaatcattaaaactttcattgccataattttctgctttcgttttttaaaagtttgggttagcaaccaatttcctccttgaccaggtgat

SEQ ID NO: 494932 - DNA, 554 bp, Homo sapiens
acctggaatgcagtggcatggtcagggcccactgcaccatccacctcccgggctcaagagatcctcccacatcagcccctgctagtagctgggactacagggactacaggcatgtgccaccatgctgggccaattttttgtatttttagtagagatgggggtctcttgccatattgcccggctggtctcaactcctggactcaagtgatctgcccaccttggcctcccaaagctctgggattacaggcatgagccgttgcgcctggccaagtcattcaacttttaaggaaagacgcgactcaggcaagaggcatgggggcctctcgggctccatgtgctctctcctgctttatcttcaaagcacttttccagggagctgcacggcctcccagtcargggctttgtgaaacgatgttggcaagtagaaatgagcacacctggcttcttacctttcttacaagccgtatacaaaaatatcaggcaggatgaccttctgaagcaacaagaatgcgtgtttcccccacactcttcctttcaacccctattctggtgac

SEQ ID NO: 494933 - DNA, 514 bp, Homo sapiens
cctctccctcctgcaccccatagccaatctgccagcaaatcctactggctctaccttcaacgtagctcaagggtcttgccatttctcacctccactgccacctctctgatgactcccacagccacacagcaggcttctctgctttaagtgccatctgaagacaggtgcacagtgttcacggtgctgccaacagggaggtgattagctggcactggcamcacctggcacatctgggcattaaaagggaggaaatctccattagagacacaaatatataagtttcattaatcctatcaagctctcgttaatgctattatgcctgacatgagaattcactaggcttcctgatgaaaataagacggatacatatctctaagaataatgtacacaaattatatggcaaaaatataaaagttcatacaatgggcaatagaataaatatgaatggccatccaacagatgaaaaatttcttgttaattcaaattacttttgaataggaaaaagtatttgcta

SEQ ID NO: 494934 - DNA, 514 bp, Homo sapiens
cctctccctcctgcaccccatagccaatctgccagcaaatcctactggctctaccttcaacgtagctcaagggtcttgccatttctcacctccactgccacctctctgatgactcccacagccacacagcaggcttctctgctttaagtgccatctgaagacaggtgcacagtgttcacggtgctgccaacagggaggtgattagctggcactggcaacacctggcacatctgggcattaaaagggaggaaatctccattagagacacaaatatataagtttcattaatcctatcaagctctcgttaatgctattatgcctgacatgagaattcactaggcttcctgatgaaaataagacggatacatatctctaagaataatgtacacaaattatatggcaaaaatataaaagttcatacaatgggcaatagaataaatatgaatggccatccaacagatgaaaartttcttgttaattcaaattacttttgaataggaaaaagtatttgcta

SEQ ID NO: 494935 - DNA, 514 bp, Homo sapiens
cctctccctcctgcaccccatagccaatctgccagcaaatcctactggctctaccttcaacgtagctcaagggtcttgccatttctcacctccactgccacctctctgatgactcccacagccacacagcaggcttctctgctttaagtgccatctgaagacaggtgcacagtgttcacggtgctgccaacagggaggtgattagctggcactggcaacacctggcacatctgggcattaaaagggaggaaatctccattagagacacaaatatataagtttcattaatcctatcaagctctcgttaatgctattatgcctgacatgagaattcactaggcttcctgatgaaaataagacggatacatatctctaagaataatgtacacaaattatatggcaaaaatataaaagttcatacaatgggcaatagaataaatatgaatggccatccaacagatgaaaaatttcttgttaattcaaattacttttkaataggaaaaagtatttgcta

SEQ ID NO: 494936 - DNA, 555 bp, Homo sapiens
attctgagttgttcatttatatttataagtagttcatttatatttacaggttgctagtgtgaaagttacagcttctttgataatgaacatgattacaaatgatagaagccatgactatagttagcgagctgggcagtatcttagttcattcaggctgctatgacaaattaccatagatgcaaggcttaaacaacaaacatttatttctcatagttctggcagctaggaagttcatgattaaggtgctggcaggtccagtgtctggmgagggcctgcttcctggttcgcaggaggccatcttcttgaggtgtcctcacatggcagagagcaaagatagaggaagcaagtttttctcacgtctcttcctatgaggcactaatcctgtcattaggattccaccttcataacctaattaccaccagaggccccatctcataatattatcccattgggatttggagcttcaacctatgaattctgggagacacaaaaacgcagtcatgtagtggatgggagtttttcattagaaggtgagcaagtttagccgtgttggca

SEQ ID NO: 494937 - DNA, 502 bp, Homo sapiens
taaattaaagggacatgtccaagtcccatttgcaagaaaaattaaggaactccctggatgtcatttcattgtaaataaagaggtcagtgggcacaaagctgtcaacccaaacacaaagccttctttagctaagggagagtggactcagaaatgcacggtgaggtctcctgatttagcctcttgatgaactcatgactgcatgttcagcaagagaggtggggaggtagatggtttagtgccataaataataaccaaaagtaccattttcactagcaagtctacaagactttggggcaaagtggctctgggttgaagccatactgactaaaagttatttaaaagggaaawtttttttttctactgactcacaacacaggaaaagagcaacaggacaagaaacaaacagaggctgcttcatggtaactgaacatgactcactgagcgcatgtgaaacattccctggatacacctcaacaagctgggagttgaagcacattttagg

SEQ ID NO: 494938 - DNA, 623 bp, Homo sapiens
aatgtaccataaataaatgtatcattatatgtatttcaggtagttatcaactatatctgactaagaattactgtatttcaataatggacaagcagtgaggcattgagagaaatgccattaacaacacagagctggccaagatataagtaacagttttctctttttattctctatttaacacaggatctagagtagtgagtaagaaacaacacgaactacaaaagatattacctcttggctgactgayggcagcagcctcttaaccagtgccctctctgttactcctttctctctcgtctctccaatccatctttctcaaacagagttgtaatcaaatgacttccctggtaaagacttcaatggctccctcatttcctactaaataatgtcaaaactaattaggccgaaattgcagcttgctagtctcatccccaactttgctggtacacattccaacctgccattttatgagttaatgattcgggaacaaatgttttgggaatatgaccttgaatggactcttgctagctgaaaactcctagtcttctcagtgactttggtgatgccctagtagatttgtattttcataaatttatcacacaatagagtcactgggaatcctt

SEQ ID NO: 494939 - DNA, 604 bp, Homo sapiens
tgtaaacaatcaatgtgcttctatacaccagttactatttttgtctacaaatactgaatggccatgttgcctagtggaggtctctgaatctctcctggttctgagtgctactaattcatgaatgattctttcttcaagtaaactctgctaaattttatttgtctgaagtttttgatttaacaataaaaatcatgtacagactgagaactactgctgctgccaaggtaaaagcttttactgagccaatgctgacatgaacagctatgaaatggttatctcaggtttctagtctgcctctagccgccccattggaagacactaatagagagaggactggcaaagaaaagctgttattgtataggcacccatccttcttgtgacaaagcagattggaaaagggaaggagttttgaaattgagagacagcacattaaaattaaaatgcacatatatcatccatgagccyggcctttgctcaggaaacatgtgactaatttcatgaaaaataaaccactaaaattacttaaaataatgaaaagtattaatattctagtactaactttttcatttaatggctactatttgtgattattaaatataataga

SEQ ID NO: 494940 - DNA, 346 bp, Homo sapiens
ggcttctgggctgcgagaccactggctgcgtagagctgggcacgtgcccactggacatctcttcatctcatgccyactttgctgaagggggttgttgttgcggcggttgttgcccgggaaccagcctccgacgggcagagcagggctggagaccagtgggcttaggccttagccagccgagccctgacctccacccaccacagaacaacgggactggctgcctggttctgcacaccaactctgtgcccctcgtttcccatgcattctctcctcactcttggaaccttggggtaggctttgtctttggtgacagatgaagagacgaagggtctgagaggttaagcaa

SEQ ID NO: 494941 - DNA, 594 bp, Homo sapiens
cctcggtttccttgccgtaaactggcgaagagaccgtgtgagccgtgtttcctggggccaagagattccaagaaggaaaacctgggattcctggggactgagatgagggccgggggccggaaggggaggggtacatggggagggctgaggggcagcccagaaaaggctttcaacactgggcagcagcgtctacacaggcagagatccctgcatctcacttcccacaggactgaccagtggctggaggtgggactggtcaggctcagcccagccaagtcwgggaccagaggacacttagtgggggatcccctgggccaccctcaccgccctgtggctctcctgacaccacaagagaggtgcaggaactgaccttgggtcctaatgggggcaccttcctggcagcaggccggcagggtggtgtggtcagcgcactgggctctgcgtctgtgtgatggtgggccagacagttaacctctctgtgtctctatttcttcactggcgaatgggggcactagcagcccccacctccgcgcacagtggcctgaggattaaaggcaagggtggcacaagacctacggcaaaagctccgagcag

SEQ ID NO: 494942 - DNA, 514 bp, Homo sapiens
gctgcccagggagttccaccaccgtctcccctctggccgccaacgaaacccaggctcatggtgacctggcacaggtctgttggactcggggtccttctcatacccaagatcaggacatagcagcagggctgcccccagggaagggagctggcccctagacacgccccaggaagcayactagggaaggatgccctgctgacttcaataagttattgcaaaaaaaaaacaaaacccatttattgctatttggcccctgcgttcgtgcctccatttgccagaaaatgagccaccggcgacaccaggagaggcaggagacccccagcccttgcacaaaacccactcccttggatgctgtcctcagcgagggtggctgggggccaaccagggggcccacccgcagagtggcagaggaggcaggttgaccctgcggacgttgagctctgtggcgaaggtcctggccttctggtagaagaagagcgacttctcacggtccaggaggaagttgtggtagatg

SEQ ID NO: 494943 - DNA, 571 bp, Homo sapiens
atccaactcttcctgggtgtgtcatcatcagagtcccctaccttggggagtcactgcgtgcctgagctccaggtccccccacagatgcgcgagcccacccaggctgtctccggtgtcctccccttttcagggtgagtgctgtggagcctgcattcaatgcattcccacgcggctgcacacctgtgtaccagsccctgggccacaaggcgttggggcatgtggcctgtctggggctccctctctctagaggacagacgaccctggcacagcaccgggggatgcccggcattaaggggcaggctgctggaaggggaactgggacttcatcagccacagagccgtgtggttgatgagggtgggaagggcacaagagaaagggaatgtgccactcagcctggcacatgcagggaccaacgagatgtctggcatgtctggaaggcagagggcacactgggcagccctcgtggtcagcagggggaagaggcacaggaagcagagctcagccaggcagggagctctgcactgagtgaaggacctcgggctgtgccccacggccggacgggggagccag

SEQ ID NO: 494944 - DNA, 571 bp, Homo sapiens
atccaactcttcctgggtgtgtcatcatcagagtcccctaccttggggagtcactgcgtgcctgagctccaggtccccccacagatgcgcgagcccacccaggctgtctccggtgtcctccccttttcagggtgagtgctgtggagcctgcattcaatgcattcccacgcggctgcacacctgtgtaccagcccctgggccacaaggcgytggggcatgtggcctgtctggggctccctctctctagaggacagacgaccctggcacagcaccgggggatgcccggcattaaggggcaggctgctggaaggggaactgggacttcatcagccacagagccgtgtggttgatgagggtgggaagggcacaagagaaagggaatgtgccactcagcctggcacatgcagggaccaacgagatgtctggcatgtctggaaggcagagggcacactgggcagccctcgtggtcagcagggggaagaggcacaggaagcagagctcagccaggcagggagctctgcactgagtgaaggacctcgggctgtgccccacggccggacgggggagccag

SEQ ID NO: 494945 - DNA, 526 bp, Homo sapiens
attccacccattttagataaggaaactgaggcagagagaggcttagtggctcatctgaggtccctctgacagtggggcacaccataccctggggccaggtttcaacttctggtccaggctgtcacctcccagaggaaaaaatcacacggtttagggctgctggatgatacaggatgttcaagggaagctgtgaggaggcacgtgcaagcctgggaggcccagggtacagttggggcctgatgcagaagccagcgaactgccatctcacttcctcttccaccagccctccagcctccagagcccatcctccagtgaggacgtgggccataggaggtcaggagctggcatgcaaactcaagttcaccaggctccaaagtgtactagggtgtcgctggagagaaactgcaaccaatttatgatttacagggtcgttcgcgcacattatctgataccatcacctcatgcccatcacaaggtcaggatgagccccrttttccagatgaggagactgatttccagagagctc

SEQ ID NO: 494946 - DNA, 576 bp, Homo sapiens
ctggtgatgcccccctgctgttgtgccttcctcattgccgcctgccttgggcatggtccgtgctttcttatttctgccacctgcgtgtgtgctcatgtcgggttgtgtcactctacatgctgtgctcacttacatgtatctattaacctgctaccagtgtgatcataagacactcagagagggctgggtgtggtggctcatgcctgtaatcccagcactttggaggctgaggtgggcaggtcacctgaggtcaggagtttgagaccagcccagccaacatggtgaaaccccgtctctactaaaaatacaaaaatttgctgggtgtggcggtgcacgtctgtattcccagctacttgagaggctgagcrggagaattgcttggatctgggaagtggaggttgcggtgagccgagatcgtgctagtgtgcttcagcctgggcaacagagtgagacttcgtcccccgcaaaaaaacaaaaaacactccagagcgacatcaaacaagcatcaattttaagtcatgaaacaagtaaaattttaattccaattagcaggttctgatgagtgattataggtgt

SEQ ID NO: 494947 - DNA, 309 bp, Homo sapiens
tgtcttaaccaacaaggaaagcctttgttcaaattagccaaatttataatcagtgttcagtggcagttacatgcactaaatttggaagaatgtcactcattyctaatcagaacaccatgattataaattattatgccattagcccttttctgcttttaactatatacctttccttcccagtaagggaatgaatttagacatctaaaatgcagttaatataagtcttagggttttgatgcattactaacatttgaaatgaggcgtgagaccattcctatggtgggttaatatttcttactacttctgaca

SEQ ID NO: 494948 - DNA, 591 bp, Homo sapiens
tgtcaacagtcttccacaatgttaaacatattcttagagacacatccctctcaccatgtatttcttaggcttagagaagcttaagggacttaagtgagcttaaggtgtcagatatattgacgcagaagagaaatcaacgtacttaaaacccaaccctaaaatccttagcagtccctagacaaaaaaatacttcatggcaccagggaggcratttaactcagtgtagggagctgggtgtaagacagcaaagaagggcaaagaactgtaactggggagtgcagagcccgagctgtgtctgaaataatgcttctcaaactctagccacatgcgcatcacctggaaggcctgataaagacagtggcacacaccccagagtttctcatttaaaagccttgggatgatgggttgtagaaatgggtgtttcttacaagtcccctgggttgatgctgatgctgttagtcccagggaccacaatttgagaatgacaggtctaaagaaagcagcttccactcagttctagtgtctggttgagactgagcaatgtagatccatggaaaccttaagatttttcaagcatggctggattttctc

SEQ ID NO: 494949 - DNA, 422 bp, Homo sapiens
cagctgtgtgttaataatattgtggccaagtttttaattttgtgctgtttaaataattagtaactgtatcaataagtcaattactataacaatttgtagtctcatacaaagagagagataatagtaaagaaaaaaaatgaatgaatgaatcaatcaatcaagaaagttggctgagcagaggaaagctcatttcaccagtgatgtttaatgagcatatagcttgggcaagccacttcacgtctctgtgtttcgtttttctcacctaatgggacagaaatagccrtcttgtctgctgccatgcctcctctcagagtcactgtcagtattcattttatattcagagttctcaggacagtgcctagttatgcaatgtgttctctaaatggtagccattgttgatcttattaatttagcaaaattac

SEQ ID NO: 494950 - DNA, 378 bp, Homo sapiens
aaaaaagccaataggcacagccattccaggtagttattgttgatataatttcattggtaatgaagcctaagacagtttatcccacgagctctgtatccgtaatgtgaataacaaaaaataaacagaaatgggttacctgagatgtaggttatctccccgaaggacacaactctagtctttctactctagctgatacaaaccrgtattattaaaagtaacagttcaaatccaaaaataactgaagtttagaacttcttgggaatatagagcagtctcagaggtctaaggctcaagaggaaccccacctccacctttattagtcatttaattcaggcctattagcctgcagaatttagctgtatacagaaatccaaagct

SEQ ID NO: 494951 - DNA, 649 bp, Homo sapiens
tggtaacaaacttctaacttctgttcatggtagaaattaygtcatttggatctgtgatcaccaggtcaactagctgtaataggacttaaaagtagaaggaactacttagaaaaacagtaggaagtatcagagttcatcaagacagagccaagatatggttactgagagttggatgatacggactttgaaatatttttctctatttaaatctctaaagattttcattagatatggtcagaactaagacatccatttaatgtcagctacgaaacagttgcatctgcttgaaataaggagtagaaggagttagagaaaagaaacagaaaagaaaaaaagaagagataagaaaatgtatagtgggaataaacaacatttaaaattcttgggcaaaagtgccacatttctctccacaggtctccccagtcatgaaaaaccatccctgatttgtaagtattataagtgagttgtggcctttcttcaacagaaatggagtatatacattcacacaagcgttgcatttttgaggatgagaaattcaatgtcatccagtgtaaacttctgtatagtcatgatctactatatatcattaataagtggatcaataaacaacttaagtggcattaaactaagtaccttaggaagcaatttc

SEQ ID NO: 494952 - DNA, 538 bp, Homo sapiens
gacacagccttcctggactgggcctatgaaatgaggcatgtctcattctgcactggcccatgaacccrtgcatctcacccctctcagtgttctgagattcagaattcttcctctgcttgagtgctgggcaccaatctcagctcacactcccaagctatgcactgcagccctggggttttgggactagcctgtgtctccactgtctggcccctctggttcaggcagtagctacactgggggatctgaagtgctccaaggatactgaggaagtactcaggtgggggtccttgaaaaaaccctcaggctgagcagtggaggctgtgctgtgcacatattcttgcaggtgtggccaggcaggagtactgggagggactggcgggcagaagggcctacaatacagatgtgtcccagctcacaggaaagttggccccgctgtctcttcgctcagaagtcaggtgagttgagagctacttggtggaagaaagagagccttggatgttgggcgcctatggctgcgttctgctgcagctacccaaca

SEQ ID NO: 494953 - DNA, 538 bp, Homo sapiens
gacacagccttcctggactgggcctatgaaatgaggcatgtctcattctgcactggcccatgaacccgtgcatctcacccctctcagtgttctgagattsagaattcttcctctgcttgagtgctgggcaccaatctcagctcacactcccaagctatgcactgcagccctggggttttgggactagcctgtgtctccactgtctggcccctctggttcaggcagtagctacactgggggatctgaagtgctccaaggatactgaggaagtactcaggtgggggtccttgaaaaaaccctcaggctgagcagtggaggctgtgctgtgcacatattcttgcaggtgtggccaggcaggagtactgggagggactggcgggcagaagggcctacaatacagatgtgtcccagctcacaggaaagttggccccgctgtctcttcgctcagaagtcaggtgagttgagagctacttggtggaagaaagagagccttggatgttgggcgcctatggctgcgttctgctgcagctacccaaca

SEQ ID NO: 494954 - DNA, 538 bp, Homo sapiens
gacacagccttcctggactgggcctatgaaatgaggcatgtctcattctgcactggcccatgaacccgtgcatctcacccctctcagtgttctgagattcagaattcttcctctgcttgagtgctgggcaccaatctcagctcacactcccaagctatgcactgcagccctggggttttgggactagcctgtgtctccactgtctggcccctctggttcaggcagtagctacactgggggatctgaagtgctccaaggatactgaggaagtactcaggtgggggtccttgaaaaaaccctcaggctgagcagtggaggctgtgctgtgcacatattcttgcaggtgtggccaggcaggagtactgggagggactggcgggcagaagggcctacaatacagatgtgtcccagctcacaggaaagttggccccgctgtctcttcgctcagaagtcaggtgagttgagagstacttggtggaagaaagagagccttggatgttgggcgcctatggctgcgttctgctgcagctacccaaca

SEQ ID NO: 494955 - DNA, 558 bp, Homo sapiens
caatgcagggcctaaatttgtgcattaaaagaataggccagagctgaggaacacaagtgcttttggatgcatggggagagcagttcacaaccaaaagaattctcctattctaaccatcacaccctaaattcctgttcctggcactctttactcatttatttttatgtcttcagctcctttaggcattggagtttgccaaagtatactttgtaagtgaagctcatactcatcactgaataagagaagatataatgatatctgaacattcaatgttagaaattgtatggtgatgaattctcaaataatgtaataatttcttatttagagagcttataaaataattaacctaaggacatttaccacgtatttctgtactcttcgtgataaagcagtgatgaaactggagttgaatgagtagaaataatgtacataatgtgtagctactctaaggcatatktctaaaattgaacatgtaaaacattttatcaagtattttctttatagttttagattagcaaacactttcaagtttttggctgttgctggcccactgtgatg

SEQ ID NO: 494956 - DNA, 606 bp, Homo sapiens
tacaggcacgtgccaccacaccccgctaatttttgtatttttagtagagacgggtgtttcaccatgttggccaggctggtctcaaactcctgacctcaagtgatccaccygtcttggcctcccaaagagctgggattacaggtgtgagccaccatgcccggcctctttccaatttaccttctgatgatgtttgtcagcatttcccataagggttctgtgaaacactgtttgggagatatcagtgtgggggatttaattcatttgaaaaaagatgcacactgtattctcctgtgaaagcacacaatagtacactcaaggctctgagaaggtgctatttttggtaccaacaccaatttaatttcatttaactctgtgatttcgtgatttctaaacgtgtttaggaacagagtagcagttttgtatttcttgttctgtttttgttttcttacaaaacccttatggaaccagcatttgaaagccacagtttcagttacggttggtaagaatgcggctccccagcgaggcttgctgggtgggagatgcaggaggtgaggagtggaggctagccggccctgagggctgcctggctggaccacaggcctggcc

SEQ ID NO: 494957 - DNA, 588 bp, Homo sapiens
acatgcctcttgacaggacccaggtacctcatacaggggttgttaaccttggctccatggggttacaggtggggtggctgacacccctcaaatcatatgcaaaattcygtgtatacatatattcttctggggagacaatcatgttttagcagattctcactgtaccgctgagtgtcacccagcatgaaaatgaaccagcctcttgaaccttcttttttgacttcaggcccttctggtagtttcacagccatagagagtggaaagaggaaatgaaaggagcgaagatccatcgactccacaacttctaagaagctttaaattgttcacttggtggacacatctctgagcttgctcccacgacatcctgagggaggggaggcagccgggctgcccttctcctcccagttccccagcgtgactaagcgtgtaacgcacatgactccctcatctccacccctgctgtggttaacaccccctgcctctcgggccctcaacaccctggtacaaaactagcaaagagcaaagaaaattcagggtgctgtggcagctccaggactacttggcaacccatcaccaggatgggagccc

SEQ ID NO: 494958 - DNA, 618 bp, Homo sapiens
aacaataatatatatcacattaaagcaatcactgcaacaatagcatctactgaggtctgctatgtgccaagcccttgcaaggtgacttgtttcccccctcactcaataaacaataattaaacacctaatagatgccaagtctgggctgacatcagagatacaatggtgggcacagtccttttcctcaaggaactcacaatttgtatttttttcatttatcctttgcaacaactatgaggtgtatctcatttggatacagatcccactgatgagggtgcaaggtctttgtccagaggcagcccaaagggaggaggagccccagtcaccggagccagggtgtggggagcacaggctgatagaggcaacactgaggcccagggaagktggcatcacccaacacaatggcagacaggggaggtctcagatctattggtcaggctggtgtgcttggcccaaactggtcacatgacttctaacagggaccaacatgaagttctgaaactcaggcaaaaccccacattaactggcatatatgacctgattgtcagcaaggaaagtggaaaaacacttggattttgggatgctgacaaatctggaacgagcccaggctgtgctaag

SEQ ID NO: 494959 - DNA, 481 bp, Homo sapiens
ggttgaagcagtccaggcctgattggtagatcaggtgagctctggaagtcccaaagttgagcagagctgtaggttttcagggaactcagagtatacatgtgtgatctttagtcagcaaatggccacttgcctctatttaaaacatagccccatttagccactcaggttgtattttgaaagattggctctttcggttcacatttgttcactggactaaggtatttgcagattaggagtaaaagagaatgaacttcstaagtttcattttggtaagtgaaggaaaatatagctatctcgattactaggaaccaaccgttttccaaattttagagttttcatgaggaggcattttccctgaattattctgaattctttccctaccccttattctgctcaggagagcttcagtgatttaataaatgggttaaaattgggaagaatatacaattaggcttggtttagctaattcttgttaccactt

SEQ ID NO: 494960 - DNA, 613 bp, Homo sapiens
tgtcctcttgggacttgccctcaggctcaaggctctagagtccatcccacatgatcttagcactgrgggtcctcttgtcgtaggagactgcctcttatgagaggccactcagagattattaccttttatggtaagtacttaccaccttggctaaagcagcctgctttagcaaagtgaggagaaaggtcagcaactggggaagactggccttccaccattttgcatagcatggaagtatggattctaaacgctcacactgtagatgagggaagttttattttatcttttgatttttatttttttgagacagggtcttactcttgctcccaggctggagtgcagtgactcaatcacggcttactgcagacttgaccactccagactcaggtaatcctcccacctcaacctcccaagtagctgagattacaggtatgcaccaccacgtccagctaatttttaaaatttttatagagataagttttcaccatgttgcccagactggtctagaactcctggtctcagggaatcctctcaccttggcttcccaaagtgttgagattataggcatgagccaccgtgctgggcctgagggaagctttgaatgagataaggc

SEQ ID NO: 494961 - DNA, 636 bp, Homo sapiens
tgtaagcagttaataataatgaatttattcacaaggtgttttatatagagaaaaatggtttttaaattcagcagaaaatgttacatctgcttttaggcattcctttctgaattgatcttattttaaggaggactagactttagtgggggcggagagaagcacatcaaaaactgattcctttaatatagatttagttaatgagacaaacaaagaaaataagcaaaacaaatttaaaaagtcaatattccttaatcarataggcctaaggaaaatgcaatggccaatttaatatattgtattgcttaccacttaaatattcaaaacatctacaaataatagtggctactctgggaacacttattgtatgtcatgcactatgagagctttattcagataatttaattttattttcaccctcttggaaactgttacaaacatttatctgtaggattgatacactatttggggatgtagatagcactctccgcttatactatggaaaaggttaggatacaaacaggataaatgacaagttttagagaaggcttactatgtctgtctacaattaaatgtgccaatttaaatgaaaatctggcataaagatactgagatggccacaaagggtggtccccacag

SEQ ID NO: 494962 - DNA, 602 bp, Homo sapiens
ctgggaacaactggggtcttcattggaactgcattggaactaaactttgtcctttccttacttccttccctcccacaagagatgatctcaaaggtattcctagtatatttcctgcatattttccagagaaatcaacttgtagaagctggttccagaagtgaatcaagaaagtaggtggcatatataaaattttggtttggatcccttgtcatccagaaggcaatgaatactttccatcaccatcgcaattttctttggctgacggccctagaaactgaacaatattctgcccagtgcagctcctrtcctgcttaggtgacactattttctagaaaagccatcactgatagtagatataatagaatacatgtgaaacttggcatcaagcagcaacgcatgtgttaaaagtttcacatatagtgaactggaattggtattccaggtcaaggaactgcattagcaggtgcaatgtatctggcaaattacacatttcaggtgcattgtaaccataaagcaatggaattggatacttgttgacaagtgaaagtgatactttcagggggaaaacaataactaaagactgagaactagtaggcaattaa

SEQ ID NO: 494963 - DNA, 668 bp, Homo sapiens
ggaaaggaattggatgtatataaattgacatgtgtattaagttgaaggcaaataggtctatataaataatagtgttaaggatgtttatggtgtttattcgaaatatgtattcttttgatataaattttaggattatgaatacattttgaatttatcgtagctactttgttaaaatactttatgatttagtgtcataaaaattttgtgagggtctcgaccagtattactcaaattgaacattacaaggtscctatctatgggatagaaaaaattcttcagaattaaaaagaaattacatgattgcagtctaatttttcaaagaaattattttttaatgattatttttcctattggcatttaaataatagagaagcagctttgaaaagttgcctaagcttacacctttatgacttgggttcaagtctgaggcttctttaaggtatgactgttagcaaatttttgagtatcttcaacctccttctctttatctgtgaagtggggttgatgatatctcgtaatctttctgtacgaataaaataaaatatatggagatgttttgttacttgtaaaatttagatgtcaaggagtaaatagtattagaaaatcagccctgaaaagtgaagagctatataataatttaagttatttttaaaagttagaagttttta

SEQ ID NO: 494964 - DNA, 641 bp, Homo sapiens
atgttagagaatgaatcatacaaaatatcaactgaaatcaatcttttttcatagcaatcataggtatacgawgtaatattggaaatggcttaagctcctgtctgatggagagtaacatcaaggtagaggtagatgaaatactgaagctcatctttttatcaaactcctgccagtctctgaagaaggtcaataattatgacaggacacagataaaagaatgctccatatttcccagcactgtgagtgactgagcatggctttatatgcttggccaagagaaacttccagaaaatcaataaggaagtaataaccatatagaaaaatctagatgtgaggatttttatcttgttattgaaggaattacttacaaggatgtatacttgttaagtgttcatctttacctaccaaaatactgtactactcagttaaacttttaggtcgtatcattttcatacagggtgaataatgatcaactgctcttcatttcagtcgcaaccctggtgtgctgtttgctgttggacttctgtctgcatgagtgagttttcttgcaggttaaaagactgaattccttcttttcctctcccttcgaccctgagcctggagggcagacagacagaagcacacatatgattaatacagca

SEQ ID NO: 494965 - DNA, 269 bp, Homo sapiens
aactacagctgccctaggatgagttttcttattaagtcaaaacacatataatactccaaaactgaacatttttcacctatccaaccacttgtttcatgtrgttcaaccttacttgtcaaggaactgtgcagagtccaatgagtgtgaacaatggtaaatgcagtgttctgaaaggtgtggttatggactagactgcttagcactttgtgaatcctgagaagcatattagagttcactctgaagggggtgggaagctcttggagaatttg

SEQ ID NO: 494966 - DNA, 479 bp, Homo sapiens
tacgactaaaaatcattcatcataaaatatctctttatacagtatagaaaagtttttgatcagtcatcaattaactagttttttaaaaaatgtatttaaatatatagtattaaattgtaagctttatcaattcttgaaaattatgtgaaagaatgacaggaaaagtggagaagcattaatgcacctcactaattcattcattcttttaactgtgagaaagaaatatctactctattgcaggcactcttctaggtattgagaataacagtaaaaaaaaaaaaaagagaaaacacaagaacaaaaagtattgctttcacagagtgaacagttctcttgagcagataataataggtaataattattgagcacttgctgtgtgctacctaattttatgtatacatttcttaacacatttaatccttagrgtacccttgaaaaaatgaggagtctgagttaaagagaggctaagtatttttttt

SEQ ID NO: 494967 - DNA, 576 bp, Homo sapiens
ctagacagtaagtaaaggacagcttcagcacacgacatccttaaatgtgagattctatttttaaaaaattcattctgaacttctgattcacacttaatactaatatctcttgttccactattagaatatgtcacttagcctccggtgtaaagtgtattttttgacacagcacagaaaaatacatctgattctttttcagtattttgctttatgccacattgartgaatgcagcattcacaatgcataaagtggtcttctcactccagccttgtcatctaaacagaaattacagtgtcatcacctgctctctgaactctcattttagttgcaatagactggaacaaatgattgagagatgtaagtgtgtgtgtgtaattgaggggcctagtgtcagggttgataattaaacacatttcttagggttagatgaatttatggagtcagagagtgtcagtgaaagagaatttatttctatagacaaagttggcgattccccactactgaaattcctctttgtctaaaaacaacttcacagatctagacaaataaactagtctggtgggcaatgacagtct

SEQ ID NO: 494968 - DNA, 576 bp, Homo sapiens
ctagacagtaagtaaaggacagcttcagcacacgacatccttaaatgtgagattctatttttaaaaaattcattctgaacttctgattcacacttaatactaatatctcttgttccactattagaatatgtcacttagcctccggtgtaaagtgtattttttgacacagcacagaaaaatacatctgattctttttcagtattttgctttatgccacattgagtgaatgcagcattcacaatgcataaagtggtcttctcactccagccttgtcatctaaacagaaattacagtgtcatcacctgctctctgaactctcattttagttgcaataractggaacaaatgattgagagatgtaagtgtgtgtgtgtaattgaggggcctagtgtcagggttgataattaaacacatttcttagggttagatgaatttatggagtcagagagtgtcagtgaaagagaatttatttctatagacaaagttggcgattccccactactgaaattcctctttgtctaaaaacaacttcacagatctagacaaataaactagtctggtgggcaatgacagtct

SEQ ID NO: 494969 - DNA, 544 bp, Homo sapiens
ctaaaaccatcacattagtgattagaacttcaatatttaaatttggggagagagagaaacactctagtccatatcacatttaattcagaaaaacgtgcaaacatagtacacatggtctcccaggccttggcactgcctagctctgtgtcagatgtagggagccacttcatagcacaagaaacctgcagcccactacttgtatcatgtacatcttccagaagccatcagtctgacgctgcatgggacaggctgtcaaatatagagtaacctatcaacttaatgacaatatttttatgatgcccatactacaggatggaattcacactaagaaccagggaccattcaataatactatgtccccagtgggtatatttttggatctagaaatcaagggggaagcagaatgtctccactcatgatctccctcagaagggacycacctgggctccacttgacctaggttcccacatttctacctctgggctttgagtgttcggaagtcctggtcctgagggagatgcttctgccagagcacattaggagc

SEQ ID NO: 494970 - DNA, 611 bp, Homo sapiens
tgtaatgaaatagaatgcatagctgatcacaaggtctttgcctggaaggcaggttcagagtgacatgattaatttatttcacagaagcttccatatttatgaacattcagagacaggaacaacacacagaaccagagcaaaagcacactcactccacccattcccagcaatctgctgttccttaggtttacccacatattgacttaaaagtctttcaggggccaggcgcggtggctcacacctgtaatcccagtactctgggaggctgaggcaggcagatcacttaaggtcaggagttcgagaccaccctggccaacatggcaaaatcccrtctctactaaaaataaaaaaattagcttggcatggtggcaggatcacacctgtaatcccagctacttgggaggctgaggcaggagaattgtttgaaccccggaaatggaggttgcagtgagccaatcgtgccactgcactccagcctgggtgacagagcaagactccatctcaaaaacaaacaaacaaacaaacaacaaaaaaaaagtctttcagaacctaacctgtctacaagtagaaaaacttgttaaatcccagagtggaatcagttatagaatcta

SEQ ID NO: 494971 - DNA, 627 bp, Homo sapiens
ttgaaagatttgatatctcattccagtcttggcagccactgagggattttgatttagtttgcacttaaaaacatttctctggattccgggcgaaggactgattataagggagagagaatgggaataaaccgataaccggaagcgccttggcaagaaatgactggcctggaacggggtggtagccatggggagagagggaagaggagggactcaagatgtagtctggaggtggaagtagcaggacttggaaacaccatgtctggaggaggggtggtggaggaggggaaggtggcaacaaatcattcttaaactgatttattcatttctttcacccacttaaatggaggaggaaaacggtctcatggatctttcttctgtgattttctttgagtaaacacctaccctatagccacctaaacctggctgtcccacctgaagtattccattctgcattctatcttgggctagtggaaktttcctttccaattggattgttagattgtgcgagggagagaactgtgttgctttcatctcctgtcctacatagcacctagcatggtgctttgcacaaagcagatgctgaaaatcatttctgaaatacatttcttttgagtgctttgtaagaaa

SEQ ID NO: 494972 - DNA, 627 bp, Homo sapiens
ttgaaagatttgatatctcattccagtcttggcagccactgagggattttgatttagtttgcacttaaaaacatttctctggattccgggcgaaggactgattataagggagagagaatgggaataaaccgataaccggaagcgccttggcaagaaatgactggcctggaacggggtggtagccatggggagagagggaagaggagggactcaagatgtagtctggaggtggaagtagcaggacttggaaacaccatgtctggaggaggggtggtggaggaggggaaggtggcaacaaatcattcttaaactgatttattcatttctttcacccacttaaatggaggaggaaaacggtctcatggatctttcttctgtgattttctttgagtaaacacctaccctatagccacctaaacctggctgtcccacctgaagtattccattctgcattctatcttgggctagtggaattttcctttccaattggattgttagattgtgcgagggagagaactgtgttgctttcatctcctgtcctacatagcacctagcatggtgctttgcacaaagcagatgctgaraatcatttctgaaatacatttcttttgagtgctttgtaagaaa

SEQ ID NO: 494973 - DNA, 600 bp, Homo sapiens
ccggagtccaggaagaatccggtggcacatggacttgaaggatgaatgcggggattttattgagtggtggagatggctctcagcaggatggatggggagctagaagcagaatgaactggaaagatgatcttcttctggaggttggctgtccagtggcccacctcctctccaaatgtccccagccaaaatcttctcggcattcagacgctccttctcttctgtcatgccrtgctgccattcttctgctcttctgttcgtctccttgtggagccaggggtttggggtatgggtacatgatagggggtgtggtgggccaaaagtcaactttgggtgcaaaaacaggaatgcctgtcccactgagggccgcaggtctccaggcttggggaggggcatatgccagggagctgccctcttctttccagcatttccctgtctcctgtccagatcactgtgactgctgagagtgttactatggtttacagcaggaagaagctgtgcaagagtagcaggaagtgccagagaattaacactccaaggagcaaccaagttgaggtataggtgcccagtggcaccctgttgaggggtaaatatcccgcttgt

SEQ ID NO: 494974 - DNA, 619 bp, Homo sapiens
ctgcttcacatcctcaccaccacttggtattttctgtctattcattttagctrttctggcaggtatattgtatatatctgtcttagtctattttgtgttgctttaaaggaacacctgaggctgggtaatttactaagagagatttagttggctcacagttctgcagactgtacaagaagcatgatgccagcatctgcatctggttagggtctcacactgcttccactcatggcagaaggcaaaggagagatgatatgtgcagagattacatagcaggaaaggaagcagggatatgagaggtgccaggctgtttttaacaaccagctttcacacaggaactaatagcctgagaagtcactcacacacaccccaggaagggcatatctattcataagggatctgcccccaaaaccggaacacttcccattagaccccaccttcaatactaggatcaaatttcaataagatttggtagggacaaacaaaccatatccaagctatagcaatgtccataattataaaagatccctggacttcagaatacctagaaggccagggatatcaatttcttcagaacggatccacaaaggaaagaaaaagccaaattcagaggcacaag

SEQ ID NO: 494975 - DNA, 619 bp, Homo sapiens
ctgcttcacatcctcaccaccacttggtattttctgtctattcattttagctgttytggcaggtatattgtatatatctgtcttagtctattttgtgttgctttaaaggaacacctgaggctgggtaatttactaagagagatttagttggctcacagttctgcagactgtacaagaagcatgatgccagcatctgcatctggttagggtctcacactgcttccactcatggcagaaggcaaaggagagatgatatgtgcagagattacatagcaggaaaggaagcagggatatgagaggtgccaggctgtttttaacaaccagctttcacacaggaactaatagcctgagaagtcactcacacacaccccaggaagggcatatctattcataagggatctgcccccaaaaccggaacacttcccattagaccccaccttcaatactaggatcaaatttcaataagatttggtagggacaaacaaaccatatccaagctatagcaatgtccataattataaaagatccctggacttcagaatacctagaaggccagggatatcaatttcttcagaacggatccacaaaggaaagaaaaagccaaattcagaggcacaag

SEQ ID NO: 494976 - DNA, 619 bp, Homo sapiens
ctgcttcacatcctcaccaccacttggtattttctgtctattcattttagctgttctggcaggtatattgtatatatctgtcttagtctattttgtgttgctttaaaggaacacctgaggctgggtaatttactaagagagatttagttggctcacagttctgcagactgtacaagaagcatgatgccagcatctgcatctggttagggtctcacactgcttccactcatggcagaaggcaaaggagagatgatatgtgcagagattacatagcaggaaaggaagcagggatatgagaggtgccaggctgtttttaacaaccagctttcacacaggaactaatagcctgagaagtcactcacacacaccccaggragggcatatctattcataagggatctgcccccaaaaccggaacacttcccattagaccccaccttcaatactaggatcaaatttcaataagatttggtagggacaaacaaaccatatccaagctatagcaatgtccataattataaaagatccctggacttcagaatacctagaaggccagggatatcaatttcttcagaacggatccacaaaggaaagaaaaagccaaattcagaggcacaag

SEQ ID NO: 494977 - DNA, 450 bp, Homo sapiens
tgagctacatgtcagatgggtgtgattgaggttggcataggaaaaggagggcttatccagtgacgacaacacagacaaaggcatggtggtacctgagcaggcccagcagccacaaaaagcagctaaatcttgaggaataacttcctaattcacaaccatctgacaaaggactaaggggtccagccttggtgggtgctgaaaagggagatggccgactgcctagcaaccattgctaaactctataaaccaaggatgagctggagaagaggccaggggccaggaaatgcagtcagatttcaaagcagagctcatgtcacaaacccagaggagtgttaggagcactgaatagaaatgcgagcttccaaaaagaatatatggaaaacttcaaagtgctgaatcttccayagaaaacatgctgagaagtttaagagataacaggaaaattaaaat

SEQ ID NO: 494978 - DNA, 274 bp, Homo sapiens
atttgggggaatattttccgcccatcctaatactaaggggagtcccaagctgacttatataagcaatccaatcttgcacctctggagccaacttaacgtatcacgacttgggtactgacccagactggaccagtcagagtcctttccccaagaacttgggcttggaactaggagagcccacctcccttgggctggtctcttacactggtgaggggtgccratggcagcctttttgtctatcacacgagctggagaccagagatggccctgaaga

SEQ ID NO: 494979 - DNA, 613 bp, Homo sapiens
acattgcatgaatatttgtttcttggttttgctcgctgtgtgatgattatgtcagaagtgaacattagayaaagttgggtaaaggatgtgtgagaattctctgtactattattgcaactcttctgtaagtctaagagtatctcaagatagaaagttttacaatgagaacacaggactacaaagaagggaacaacagaaacaggggcctacttgagagtggagggtgggaggaaggagaggataaaaagtttacccatcaggtagcaggcctattacctgggtgatgaaacaatctgtatcccaaagccctgtggcacacaattaacaaatataacaacactgcacatgtacccctgaacctgaaacaaacattatatattttattatattataatatagcatataataatataatatggcatatattataatattattatattatattatatattctgtatatatatataatttttaagtggtaatatgttatcaaggtagaggggtcactcatataattcaagatcatagatgtatttgagcctcaggcttatgttagtgccagtgacttttgtttcttacaaccaaaacattctgactcgtgcaccctgaa

SEQ ID NO: 494980 - DNA, 613 bp, Homo sapiens
acattgcatgaatatttgtttcttggttttgctcgctgtgtgatgattatgtcagaagtgaacattagacaaagttgggtaaaggatgtgtgagaattctctgtactattattgcaactcttctgtaagtctaagagtatctcaagatagaaagttttacaatgagaacacaggactacaaagaagggaacaacagaaacaggggcctacttgagagtggagggtgggaggaaggagaggataaaaagtttacccatcaggtagcaggcctattacctgggtgatgaaacaatctgtatcccaaagccctgtggcacacaattaacaaatataacaacactgcacatgtacccctgaacctgaaacaaacattatatattttattatattataatatagcatataataatataatatggcatatattataatattattatattatattatatattctrtatatatatataatttttaagtggtaatatgttatcaaggtagaggggtcactcatataattcaagatcatagatgtatttgagcctcaggcttatgttagtgccagtgacttttgtttcttacaaccaaaacattctgactcgtgcaccctgaa

SEQ ID NO: 494981 - DNA, 613 bp, Homo sapiens
acattgcatgaatatttgtttcttggttttgctcgctgtgtgatgattatgtcagaagtgaacattagacaaagttgggtaaaggatgtgtgagaattctctgtactattattgcaactcttctgtaagtctaagagtatctcaagatagaaagttttacaatgagaacacaggactacaaagaagggaacaacagaaacaggggcctacttgagagtggagggtgggaggaaggagaggataaaaagtttacccatcaggtagcaggcctattacctgggtgatgaaacaatctgtatcccaaagccctgtggcacacaattaacaaatataacaacactgcacatgtacccctgaacctgaaacaaacattatatattttattatattataatatagcatataataatataatatggcatatattataatattattatattatattatatattctgtatatatatataatttttaagtggtaatatgttatcaagrtagaggggtcactcatataattcaagatcatagatgtatttgagcctcaggcttatgttagtgccagtgacttttgtttcttacaaccaaaacattctgactcgtgcaccctgaa

SEQ ID NO: 494982 - DNA, 571 bp, Homo sapiens
gctgatgttccccacaaataggccttcagagtgctctatccagctcctgctagcctgtggcctgactcctctacaccagggggccacgaccatgtccarggttgcctgggagcactcagcaaatccaagcaagcacattttcatagccagaaggaagcctgccaatgtgctgccatcacagggaggtacaaatattttgctctcttactataaatgctgatggtgattctagaaacaacttggatgttttaggtcataatttatttctccgtcccattctgggaaggaagggaagttgttgcctcttgttttaaatgggagacccaaatcacatattcagtaataccatgcttatcttttgctggaaattcacatgctcgtgaagggcagtgagatgttatgatatttttccctctacgaggtagttagggctcctggaaaaggaaaggttacttttaccaggagagagggtgccagctcccttgaccccagacccaggtgatacacctatgccagatgggagtgtgtatgggcatggggagagggatgggacgagggctctggggtatct

SEQ ID NO: 494983 - DNA, 618 bp, Homo sapiens
tgcttgcctagacatgatagatactcccgttactcccaactcattggccagaactagtcacatgactgtagcaaactacaaatgacccagaaagaacgattctgcccagaaggtagagagctggaaatagttggaaatgctagtcattactccagtcggtatttggaaaccaacgtgatcagaacatcaagtagttgattgtgaaggcacaggtccccaagtgatggccagtgttcagaaatcctaccttccaaaatgatgctaaggaacgatctagtcttttattttactagatgctccaatagtttgttgaagcaaatcttgttgctatgcgaactaacttgaactattcctccatttttgtgcctatggaatcttagaatggcagaagtggatgagatttcagggctcactcagtttcacagtcagagaacaggcctggagaaaggctaactaagggtctcttctgagtcacacggctactgaggggctgccctaggaccagaatctagccctctcgtttaggctttgttcacttcactctgcaccacrcttcctttagccttttctccagagccagatgtttccatttcgtggtaccagctctcatactatttt

SEQ ID NO: 494984 - DNA, 635 bp, Homo sapiens
acagtggcacgccaccacgcctgactaattkttttttgtattttttgtagagatggtgtttcaccatgatgtccaggctggtctcaaacttgtgagctctagcaatccgcccacctaggcctcccagagtgctgggattagaggtgtgagccaccacgccctaccaagatttttaatatgcagaaaattgctgcttagttatttcaagtttttcctgatatttgttcttcaagccattttgtagatatttgtttgctctttgacaagtgctcgtttgcacagtggcagagagaattgagtcttacaaatgtgtagttcttactttgtttcactgaaggtttcaatcacccattgaagctggattagtacacaaaacccgaagaatgtagatgagaagataggaccttgcatgttgcactgaaaatcccattacaaagcccccaaaagaggccccacgaaggttggaaagtaggtaaagcaataccaacaagagctctttttgtgctgtttgtatgcgtgcatgagcctaacgttaatcaaatcctatttcttgctctacttttttttgatctataaaatgtggagatatggctttccccaataaacagagacagtatgaagatttataaaatata

SEQ ID NO: 494985 - DNA, 569 bp, Homo sapiens
acatattttatttcagcctcagaataaccccataaggcgaacactattatcctcatattatacgtaagagacctgaagttaagggagttcaggaacttgcagtgagtggctaagcaggcatttagactccagttccctatgtctgaagcccaccaggcccctctgcctcttctgagctaccctgaggatccctggctgtaacccatagaccagccaggcccaaggtctatgggctcaaagctctttgaccttgagcagagactccctctcggacactgagtcccagcataaggctacagagcaggctggaaacaggagctggggcagattgggcagggccctgtgagccacaggaaggagtttgagtttgcctggtttaacatggggagtgaggaggaataaacgggaagaactgtgtgctggaagcgagagaggcttccctcgtgcaaactcacaatcttcattccggmttggttgaaacctagactctttatgcctcagttaccctggctgcgaactgggacattagagagagagagggaaaaaggagcttggtgtttcttctttcc

SEQ ID NO: 494986 - DNA, 569 bp, Homo sapiens
acatattttatttcagcctcagaataaccccataaggcgaacactattatcctcatattatacgtaagagacctgaagttaagggagttcaggaacttgcagtgagtggctaagcaggcatttagactccagttccctatgtctgaagcccaccaggcccctctgcctcttctgagctaccctgaggatccctggctgtaacccatagaccagccaggcccaaggtctatgggctcaaagctctttgaccttgagcagagactccctctcggacactgagtcccagcataaggctacagagcaggctggaaacaggagctggggcagattgggcagggccctgtgagccacaggaaggagtttgagtttgcctggtttaacatggggagtgaggaggaataaacgggaagaactgtgtgctggaagcgagagaggcttccctcgtgcaaactcacaatcttcattccggattggttgaaacctagactctttatgcctcagttaccctggctgcgaactgggacattagagagagagagrgaaaaaggagcttggtgtttcttctttcc

SEQ ID NO: 494987 - DNA, 650 bp, Homo sapiens
catttaggatatattcaaatctataaaataaatgtaattaaagccaaatttttagtttatcaatttacaatacacttttagcagtgaatttgcccttatagtcacttcatgtacctgttttctcagtaaagttcatgtaaatgaccatcacaaaccagacttcttgaagaatagagccttgtccaaaggaatgagttcaagtttgatgggagagatgaagctggagtgttgtacatgcattattgattgttgttaggagcagaatgagtgactaaggacaactgcagaacatgaggagagaaaacaagtctcayaggtgtctccaaaccccagaggcagagctttcaagaagctaatgaagcctcaagttcaaggacccttattgcactggccccttccaaggcccttccagggagaggtcctaaaaatgttctcacatggtgacatgggtttgaaaattttgtgggagtaaaatattttcattacaatttgttaagatattgcatccctctaaccccaactttccctccttcgcactccccttcatatgagggggcaatggagtagccctagacatttttaggacagagctaagggtgcttttagtcagttacagggttcctagctactccagtggaagaatggcttcc

SEQ ID NO: 494988 - DNA, 650 bp, Homo sapiens
catttaggatatattcaaatctataaaataaatgtaattaaagccaaatttttagtttatcaatttacaatacacttttagcagtgaatttgcccttatagtcacttcatgtacctgttttctcagtaaagttcatgtaaatgaccatcacaaaccagacttcttgaagaatagagccttgtccaaaggaatgagttcaagtttgatgggagagatgaagctggagtgttgtacatgcattattgattgttgttaggagcagaatgagtgactaaggacaactgcagaacatgaggagagaaaacaagtctcacaggtgtctccaaaccccagaggcagagctttcaagaagctaatgaagcctcaagttcaaggacccttattgcactggccccttccaaggcccttccagggagaggtcctaaaaatgttytcacatggtgacatgggtttgaaaattttgtgggagtaaaatattttcattacaatttgttaagatattgcatccctctaaccccaactttccctccttcgcactccccttcatatgagggggcaatggagtagccctagacatttttaggacagagctaagggtgcttttagtcagttacagggttcctagctactccagtggaagaatggcttcc

SEQ ID NO: 494989 - DNA, 517 bp, Homo sapiens
ggtgggatgacggtggcggggtgaagagggccatttgagattctgtctaaaaaaccaaatcgtgtgaaaaaaagaaaagtagcagcagttgtaccaaacctactttctccaaccttcaaattgtctgggggcttccctggcccaactttgatagatgtagtggagccaggctttccaagtgttctgtttggcaaatctaaagccagtacatgccaggctagagatgctcatggttcattattgaatcctttgccttctctgtttgcctgtttctatgagaacacagccaagcttggggcactctctgtgtgaaggaaggcaagaagaacctgaataatccaattcctctggaaccccatatcatctatatttaggaaaagcattaygaacttatttcaaaaatgatttcctcccttaacaatgggtggctctgcactcagtgtaatgggtttgcactctggatggtggggtgggtctgctgagtggggcgttgggtgtcggggaagtctggaggtgg

SEQ ID NO: 494990 - DNA, 526 bp, Homo sapiens
tgtgtttaaaacataatttaagttctttacattaaaataaatttgagatttaattaaatacatttaattaaataaaaagtgtgaatggctcagaatcgtttatgacatgatgctgttctgcagtgtttgtagataatatcaaatgcttctatattctcccttgaagtgaaagaacgtaagaaatgaaaaacactgaagaaagtttgcccaggtgtgagagtaaggggaagaaayacacttctccagcaaattatgaagatggtcactagcttctgaagcttgaatatgaaattatttggtagagtggtaaaggattgatgttgggtgacggtggagaaagaggaatgggctctagcgcctctctatggtgctggaggacaggggtgtgtgtggtaggggggtactgctttaaggcagacaatattctgagttattctctgtcaattgctacacaatcgatagagatacataaagggagaaaattctaggtttgtccaagccaaggcagaagggaggctccaaaacc

SEQ ID NO: 494991 - DNA, 613 bp, Homo sapiens
tactttgacctcttctcaaacctgctaagtgtggacacacaataaaagcacttttggtgcagataaactggagaaggggcctgtttgtatagttttctttgaggaaatattccctgcaggaagtatgcagcaaagagaaaggctcatatgacagaatatgttaaagcacattttctttttatctctttgcacatccccactttgccacccactttagcccctacctactcaatctcctatgtcacaattccaggtgcactcatcagcatgcaaaaatcacatatgaggtggatatattttcagatgaagatggataaatcaaatctgcaaatggataatgacatgggcaagtcatcaatttayacttgtaaacaacttttcagctagaccttgggaacaaggaacatgatattctgtctacaaactcatgtggctttcttatttgaaagttttttgaaagatttttggttttgttttgaggaaattttctgaatctattttgaatgttagaatttgggcatttgctaaaaggaagttgcttgagcttggatgtttgtgctaagatttctttagggacagcttctccaactttttcaccaaagtcgtcctaacc

SEQ ID NO: 494992 - DNA, 634 bp, Homo sapiens
taaatgtgaataaacaaaatgtattaacctttcaacaggaattatctttaagtgactatggatcttttatttattttatactttctattttcctgtattttccaaattttctatagtaagtatgagttgcttttccaaggaaacagatcttcagtaaaattaattggtaggttaaattagtgaaaaagaaaaaaaaaaagttttgctcttatcagcttacatttttaccatgagattaaaaaaaaaaaagcaactacataatatcaggtgattgtgtaccgtgtttgtaaaaaatattttaatcagggcttagagagtttaggaaccccctgccatgacaagcatgctacttgtcgaagaaagaaagaaaaagtcttgactgagttaagctttggagtttaattactatttgaatgaagaattaagactttaaaacccagttgggcattaagtcatcaaggcctctgacacactgttttaataaagctcctgaagttgatgccacacaggaaacaggagcaaaaaaaactcaactcagtgaattccagtattgaatttgtactttatgaaaaytgtagcttgccttcagaatttgaaggaaggggaaatctgttcagctcatttattttcggat

SEQ ID NO: 494993 - DNA, 540 bp, Homo sapiens
aacaaacaaaacatctccaggaaaaaatatcaaaggatctaaaattaatgtgttatttcagttttcttctaagccagcaaaagaaagtccctctctgactaacgtctgataatacaaacctcccaggccagcccctttaacgtgctgatttagggctcatgcccgttttcctctctcctcatttcatcttcgtctctctgatgcaatcagcatgctggccttaggctcacctcggttttgttttattttttaaggktgaaagaaaaaaactttggtttctcaagtggatataaaattaaactcttctccccttttacagcagattctctaaatcttagactttaaaagttttgatttaaatcctgccttagagtgagtcacagaaaaagaaattctcatcagttatctacttcggtagcactgtttggtactcatctgtggggtcctaggaaaagcattcaactcagattgaaaaatcttgcttgagtccttgatgtactatctgcttgctgtgtgactacgggtaagtcatcacaactc

SEQ ID NO: 494994 - DNA, 577 bp, Homo sapiens
cccaggcaagagtgcagtggcatgatcatagctcactgcagcctcgaactacaaggctcaggtaaccctccagccttagacccccgagtagaactacaggcacatgccacaatgcttggctaatttttttttattttttattttttttgtagagatagagtctcactatgttgcccaggattgtctcaaacttttgggctcaagcagacctcttgcctcagcctgccaaagtgctggggttacrggtgtgagccaccacacctggccaagataataaatttttgaaaaaagaagtagcttagaaaatgaatatcctgaatacaatgccttgtatttaccattaaatgaagtaaaaagtaaaacaaaaactagaatgaaactatatcttggtgcatagtctagtcatactaattcatttctacaatttttcttgtttccttgcctccagacttttcctgctttaatctcttcaatgcccaactcagagataaatcttcctaaaataacattctcaccatgttgctttcctggtcaagaacctacaggctctcctcatagattactgcatcaagatccc

SEQ ID NO: 494995 - DNA, 628 bp, Homo sapiens
gctaacaagctagaggtcacaacttgggaccacatccaggcatgcattcctattgctaacctgatctttcaccttgaagacaaattccgatagtcaaagaaataatagtcatctattactgagctctgtcctgtatgtccagtcatggattcagtgccctacatacataatttataatcgccakaaaattctttaagttttcttttctccattatatagatgaggaaaaccaaggcacagaaattttaaatgattttccgggaccatttagttagtagtggctgacccagcattcacacaaaagtttttcaagcacaaactgttcttctagctctatactttgatgctttgttcctattagtaattataaggtgagatcctcagtgttaatgaaaatcagtgtcctgtctagaaagcaactaataaatggtcaatggctctatctctgtttgtgaataatatattatagcatattatttctttccagtagctttgataatttgttattcaaagtgatttgtcttagtcatctatttctgtgtaacaaattaacccctacacagcagcttgaaacatttgtaatcttacaatttctgtgcaggagaaatctaagtgtggcttagctggg

SEQ ID NO: 494996 - DNA, 628 bp, Homo sapiens
gaatactgactaacaaatgtatgcaaagaggctgtccaaggttgaggaatcacctgctagtattaaaagtaacagtgtaccaccagtcagattaaaaaaacccacaattaaagggtatttgatagagtacacaaaacagacttgcctgcctagtgagcttatttagtactagattaaacactgctctgactctgtctaacaaatcataaaagtaagatccaaagggaataaatcatttccaagtaacttaactgcatcatggaacaaagctaaggaatatttgcatgaaaacagaaatatccaacactcattgaagtaaaattcacaatgactagcaaaaaaatgtttcaaatattataggcttgtaaagaagtaagaaaatgcaagccacattgaggacaaaacgcaataaattgaaatgggtccagaactaatacaaatgttaaaattagcaaacaaggkcactaatactcttattatagctagtttacatatgttcaaaagttaaatagagacatgaaagatgtctctatttggtagacaaatagtgcttctatttggtttttaaaactacccagtttgaacttttaaatataacaactgatttgtgagaataaaaatacgctgg

SEQ ID NO: 494997 - DNA, 554 bp, Homo sapiens
cctgcacgagctgaaggctcagttcctcctccttctcctcctcagggctcctgctcctcggccccagatcctctcgaactgtttatatgtagtccttggctgctaagctcatctcctgaccttctcagtttttggaaattctggtaaacggggccaaaagacttgggtgctgtgtgccctctgcatctcttgtcaattggtacctaattccaaatgcaatgtgagctttcttttctccaccctcctcacacaccctcayccactgggacaaaacactcaccatccagaaggtcacgaattttgtccaggtaaatttcaaagtaagaaacctggttaagaagaaagaaggagtgtgaagtaaagagggcctatcttaaatctagttcaggaatcccatactaatgtgacctgctcaaacggtggtgggaggaaaagaacagaagagaacatcttgacaaagaactctggtaaccggaaagggagtcaagttggggagcccaggctcttcagtgggaagattttagatcttcccctcccagtccccatctgaatgc

SEQ ID NO: 494998 - DNA, 501 bp, Homo sapiens
tcaccatcatctctctgatatcatcatcatcattagccagaagccttagactcactctcaatgcckcccttttccttcaatccccacattcatatgaattttccaagttgacatcaaactgcatctttagatgccaccctcttctttcaaacacaacagccactgctttagttcattatctctccctgaacttttgcaatactcaagtcatcctccaggaacatgcctgagtgatcctttttttttttttttttttttttttgagatggagtcttgctctgttgcccacgctggagtgcagtggcaggatctcggctcactgcaaccttggcaccccccctcccccagttcaagcgattctcctgcctcagcctcctgagtagctgggattacaggtgtgcgccaccacgcccagctaaattttgtatttttagttgagatggggtttcaccatgttggtcaagctggtctcgaactccttgtagggtccagacctactgg

SEQ ID NO: 494999 - DNA, 501 bp, Homo sapiens
tcaccatcatctctctgatatcatcatcatcattagccagaagccttagactcactctcaatgcctcccttttccttcaatccccacattcatatgaattttccaagttgacatcaaactgcatctttagatgccaccctcttctttcaaacacaacagccactgctttagttcattatctctccctgaacttttgcaatactcaagtcatcctccaggaacatgcctgagtgatcctttttttttttttttttttttttttgagatggagtcttgctctgttgcccacgctggagtgcagtggcaggatctcggctcactgcaaccttggcaccccccctcccccagttcaagcgattctcctgcctcagcctcctgagtagctgggattacaggtgtgcgccaccacgcccrgctaaattttgtatttttagttgagatggggtttcaccatgttggtcaagctggtctcgaactccttgtagggtccagacctactgg

SEQ ID NO: 495000 - DNA, 640 bp, Homo sapiens
tgcgctgctgtcacgtgaccggaggccagacagcggacgcgcgaacagggcgaggcaggacggggcggggcgacgctggccccgccccccggcgcctgcctgcctgccccaatgtccgctcagtgtgtgggctcacctggcgtgcgggatccctgtaagctgacgaagcaagcggcccgcgaggcccctcgaactgtcaactaggagaccgtggtgcggcctgggctggcctgattgactcccaaggtctagggcttctttgctgcaaagtggccgccttccggctttgcccagtttctaatgagtaacctcggacctgatgctaatgcgaaagcattcttaccgaatgggggttgggaaggggagggttttggaaacccaaaattcttaccagtggtctcaagcgtcttgaaattcattcattcatttaacaagtatttattgtgcacttagttgtactaggtcctgttctaggggctgattttcctttyattgaagcagggaataggacagtgactgccccgaagtagttgggagtctaatggcactggctggccaatggagatcaagtttgcagtatgcaaagtatgagctatcctagaactgtgtatgaagcaaagacaatgatacaaagaaagga

SEQ ID NO: 495001 - DNA, 495 bp, Homo sapiens
cctgtccaggagtcctacccgggtcagtgtcccctgcaccaaggctatgtggggagggtgtcagactctgagaccctaagtccacaccgggtccttttccctaccgcaggtgtccagtcattgcccaggcactgggccccgctcttctccacacatctcaccattacactgagccaggaggaggcggatcctagcatctcgacatcggctgrccagctgcagggatggggcaaaggggttaagtcccagatcagagggtatgagtgagatgctaaggggtttctcctcaacctaccctctccctcacctgcaccacttctctggccccagcagcatctgcaaaggtgacaccactgaagtctaggaccaccaccctgacaggctcagcaactagaatgggagaagacaggagtacccaggtgtcaccatgcaacatgcccaaatcttccttcttgtcaccccatctcacctgcaaccattgggccatctggcttt

SEQ ID NO: 495002 - DNA, 495 bp, Homo sapiens
cctgtccaggagtcctacccgggtcagtgtcccctgcaccaaggctatgtggggagggtgtcagactctgagaccctaagtccacaccgggtccttttccctaccgcaggtgtccagtcattgcccaggcactgggccccgctcttctccacacatctcaccattacactgagccaggaggaggcggatcctagcatctcgacatcggctggcsagctgcagggatggggcaaaggggttaagtcccagatcagagggtatgagtgagatgctaaggggtttctcctcaacctaccctctccctcacctgcaccacttctctggccccagcagcatctgcaaaggtgacaccactgaagtctaggaccaccaccctgacaggctcagcaactagaatgggagaagacaggagtacccaggtgtcaccatgcaacatgcccaaatcttccttcttgtcaccccatctcacctgcaaccattgggccatctggcttt

SEQ ID NO: 495003 - DNA, 645 bp, Homo sapiens
ggcaaaggggttaagtcccagatcagagggtatgagtgagatgctaaggggtttctcctcaacctaccctctccctcacctgcaccacttctctggccccagcagcatctgcaaaggtgacaccactgaagtctaggaccaccaccctgacaggctcagcaactagaatgggagaagacaggagtacccaggtgtcaccatrcaacatgcccaaatcttccttcttgtcaccccatctcacctgcaaccattgggccatctggctttgaagtctcctataagtaaagaagggcagtcaccactcccgaaacacagcatgaacatgcaccccttgagcacaaggatccccctcagaacacccacctgcctcccactccctgaggatccacatccctcctaaaccaagctccttcaccttttctccttctccgagccccaggtgccactccaggttgcagcgaaactgcccacgggtcccaaagtacagtggtgttggatagctcaggatgcagagccccgggacctggaggagctaagaggtcaaaggatcagagaaatgtctggggctaatcttcccttccttctttggctgcagcccacccaccctggggcttcctctgagtggtctgtagagctctgtcccct

SEQ ID NO: 495004 - DNA, 437 bp, Homo sapiens
atagtgtatgactagttgggaagttaaacagatgccctgctcacaaggtagggcccctccaattagtgttccagctccctttcgctgatattgaaactgaagtaatttgttgctctattggtcacagatgaattatgcctgcacaattcttcgagggctttaagtaaccttattgaaaggcagtgactaagaccctttccttgctcccaagcttcctaagtcccaggctgcctgtggcacctggactgctgcccctgggtcycccacattccagggccacgatggaggaagggcaggccaggccaagcataagtaataaacagtctttaccgggctcaggccaggagtccgtgggccttgaggacctccctgtatttgtcaattttcttctccacattcttttctttttgtctccatagcctcaggagttgtttctt

SEQ ID NO: 495005 - DNA, 601 bp, Homo sapiens
tttaccgggctcaggccaggagtccgtgggccttgaggacctccctgtatttgtcaattttcttctccacattcttttctttttgtctccatagcctcaggagttgtttcttctggtcctggatcttggctttctccttccccttctcctccagggtggctgtcacggtctggtactttcagccaatctcgtgagccaggtaccccaggtaggcgaactttctcgtaggcttcagacgcacaaccttgggggcaacaggaagcaccatccgctttttcctctcacggggcggtgggacgccaccgaacacctggcggcaggtcctaggcggcctggctggctgctgtcgtggggcggcccggctcgcaagctctgccagaagacgtggggcctcgggaagggctggtgttcatccgcttgcggaggaaagccaggtacttcaacttgtttccgtagaaattgccagaaatgtygatgccctcgcagcgcacgatcaccaccttccggcccagcagcacctgcttagccacgatggccgccaggcagcccaggaggtgacctcggccatcgagcactaggacctgcccctccgccatcttca

SEQ ID NO: 495006 - DNA, 537 bp, Homo sapiens
caggtgcttgttctgccattttcccaaagccaattcccagtgctccgtgggcaggacggcaggtggggctggagcccacacagccatctctgtctctcccttctctgctcatcccccagggatggactagttttggcaaaatggatggtcaagctgtcttgggcataactaatgcgaaataattctcaccaagactgatcacagatttgccarttgttccttttttgaaacattggttatgagacttttatcctacatgtaaattctggctttaataactcaagagtttgaatagaagtgcccagcccttcaagggaatcctttgaacttagtatctccaaaagccttagctttataaatattcagatgcacaatatatacatatgtgaccatgttattccataatttagattctcttttaactctgctttaaatttgagtgtactacactaaaagaacaaaaagggactagctactgtcatagtttaagttacaacagagctgctcttccagaagaaactgtgttttcccacaagt

SEQ ID NO: 495007 - DNA, 667 bp, Homo sapiens
ctgaatttagtagagcagaaactgcacactctgcctcattcatcattatattatttgtacaacaaatatttagtaagcctttactctatgccagtcacagtcctacaaaagacgtgacagcaaatgtatagtgtccaacaacatttaagattacactctgacctcacgtattcagagatgatccctctgaagctcaactatgaaaacaaacaaaacaaaacaaaacacaaaggcgccaaaagggtcctgagtaggtaaaatagatgtttgaagtctgatgtccacacactaagtttctgtgctgaattcataagacattttgccaggatggcctctcttattttacataccatcttaatgaacctaaacatctgtttttctagccccaaacagataaatcagaaataagctggcggacgacggggaaggagaaaagctctaatagagatgggcacactgaaaagagttagmtgtaataagaaatgctgtctccctgccagaggaaaaaaaattagacacacaaataacacaagaattttttttaatgtggcagtctgagaaaactctatcgtttcctgtaaaggcaagaagcctgtcagagctcaataaacctgagggtgttgctatgttaaagcacagtacagtcagggctggtcatctagtaaag

SEQ ID NO: 495008 - DNA, 599 bp, Homo sapiens
cctctcccagggcttattattattgttgtgtaattgtttgattatttgtttttttatttgtttgattagctggttgggttaagtttctttcctccagagcatatagcgttggatgctccataatcttgagcatgtgcaggcaccctaaccactcctcattttctcctccccccaaaagtggcaatggttttagccaggatcttttttactgcttatttccctgatatccctattaaggatctagttggtcagcttccattggttagcatccacgaattgcttgctaattactttattgtttatgactatgtcctgggtcacaaattagttcacagtctgatctaattaaagtcagatctctttggggtgagttttgtggcttacyccaactccatgaggactcttttcaactgtctctctctctatatatatttttctttctctctgttaagcttctacctggtctgccattttgtttactgctatcatggaattaatagccatgatagcaataaacttaattgctcactatcaaaatttccattattttcaatagtgcacttaggcttgaaattcctcacactccgttccaaataaaa

SEQ ID NO: 495009 - DNA, 437 bp, Homo sapiens
gcatgacctctcattctgtaaccaaatctggaccctgggctccagaatgctgatggcctgggccagccattctctggtggtgatgcccggttacgggttccgctcaaagcaggctcccagggcctcactttagctyggcgtccaaacgagtctccttcatcttccccgtccctgggcttccgctgggagggtgccatccgaaggtgtcgggagggccatcctggggagccccggcctgaatttcacggaatgacacgggcagagagaggccagcaggctcctgtgcacctcagccagcctgtgcactgtggcaggtgcagccaggaggcctacccggacagccaggctgcagctcttataaaggcccgcaggcagggaggctccaccacttcatgaatggcggtgagccctgggacagcccgccccgtcccggaagg

SEQ ID NO: 495010 - DNA, 437 bp, Homo sapiens
gcatgacctctcattctgtaaccaaatctggaccctgggctccagaatgctgatggcctgggccagccattctctggtggtgatgcccggttacgggttccgctcaaagcaggctcccagggcctcactttagcttggcgtccaaacgagtctccttcatcttccccgtccctgggcttccgctgggagggtgccatccgamggtgtcgggagggccatcctggggagccccggcctgaatttcacggaatgacacgggcagagagaggccagcaggctcctgtgcacctcagccagcctgtgcactgtggcaggtgcagccaggaggcctacccggacagccaggctgcagctcttataaaggcccgcaggcagggaggctccaccacttcatgaatggcggtgagccctgggacagcccgccccgtcccggaagg

SEQ ID NO: 495011 - DNA, 537 bp, Homo sapiens
acatcagttctcaggccagctttccattcctcggattccatgtttcttcaacaagcaggtcccaaacatgttctgctgaagaaccgtggcctttgggtgatattccacagagcctgctcaaaaacagggccrgggctaagttcacttccttgggctctggagtcagcattctaattgtggagtcagcattctaattattctaattatggtgagaccttcctcttctctcaggccttcgcccttcacccaccaagccctcgtcgttcctcttcaaccccagcatccccctgggttcctgtgcaggcctcggcttccaggaaccctgccttggagtgtgtgtgtggctctgtgaccggcaagcaggaggccacggctgtcccaccctcagggctctcacatggtgagtggcttggaggacaccctccatgtggagctcagggccaccaccccgacaaggcctgcaagcgtgggcttgtgcctatcactcatgccttcccagctacctcggcccagtgagagttgagcactgcgctgagc

SEQ ID NO: 495012 - DNA, 537 bp, Homo sapiens
acatcagttctcaggccagctttccattcctcggattccatgtttcttcaacaagcaggtcccaaacatgttctgctgaagaaccgtggcctttgggtgatattccacagagcctgctcaaaaacagggccagggctaagttcacttccttgggctctggagtcagcattctaattgtggagtcagcattctaattattctaattatggtgagaccttcctcttctctcaggccttcgccyttcacccaccaagccctcgtcgttcctcttcaaccccagcatccccctgggttcctgtgcaggcctcggcttccaggaaccctgccttggagtgtgtgtgtggctctgtgaccggcaagcaggaggccacggctgtcccaccctcagggctctcacatggtgagtggcttggaggacaccctccatgtggagctcagggccaccaccccgacaaggcctgcaagcgtgggcttgtgcctatcactcatgccttcccagctacctcggcccagtgagagttgagcactgcgctgagc

SEQ ID NO: 495013 - DNA, 537 bp, Homo sapiens
acatcagttctcaggccagctttccattcctcggattccatgtttcttcaacaagcaggtcccaaacatgttctgctgaagaaccgtggcctttgggtgatattccacagagcctgctcaaaaacagggccagggctaagttcacttccttgggctctggagtcagcattctaattgtggagtcagcattctaattattctaattatggtgagaccttcctcttctctcaggccttcgcccttcacccaccaagccctcgtcgttcctcttcaaccccagcatccccctgggttcctgtgcaggcctcggcttccaggaaccctgccttggagtgtgtgkgtggctctgtgaccggcaagcaggaggccacggctgtcccaccctcagggctctcacatggtgagtggcttggaggacaccctccatgtggagctcagggccaccaccccgacaaggcctgcaagcgtgggcttgtgcctatcactcatgccttcccagctacctcggcccagtgagagttgagcactgcgctgagc

SEQ ID NO: 495014 - DNA, 537 bp, Homo sapiens
acatcagttctcaggccagctttccattcctcggattccatgtttcttcaacaagcaggtcccaaacatgttctgctgaagaaccgtggcctttgggtgatattccacagagcctgctcaaaaacagggccagggctaagttcacttccttgggctctggagtcagcattctaattgtggagtcagcattctaattattctaattatggtgagaccttcctcttctctcaggccttcgcccttcacccaccaagccctcgtcgttcctcttcaaccccagcatccccctgggttcctgtgcaggcctcggcttccaggaaccctgccttggagtgtgtgtktggctctgtgaccggcaagcaggaggccacggctgtcccaccctcagggctctcacatggtgagtggcttggaggacaccctccatgtggagctcagggccaccaccccgacaaggcctgcaagcgtgggcttgtgcctatcactcatgccttcccagctacctcggcccagtgagagttgagcactgcgctgagc

SEQ ID NO: 495015 - DNA, 620 bp, Homo sapiens
accccccttggccagggggatccctgagaaaccttataagaaatgcctcgctctgcctcctccctgccccactctctaacaccatcaggcttcttaaggactacacagwaactggccccttggaaagcctcccccactgcgaacttaaacatccgaccagcgtcccttcccgacaagagagcaccaacttcggagtggctctggccctctacggaggctgtgtgctgagtatcttcctgtccccgcttcaccttctgatggacagggtctgattgaaatacagttaaatattaagtctccacacccaaatgagcgtgggtctcatgtaacatacgtgttagccaactgcgcacgcttgcaacccccccttcatgaatatccatggctcttcctgcagcctggtgagtatgtgcacccagccagcctgttcagcacgaattcctgtctcctccttccctctcctgaagtgcttgcttttcggttttggttggaggccttgcttctggcccacaggctgagctaccctcgtttagaagtaaagctctgtctaaatttatagattttgtgacttttccagtccacagtggccagtgcttcacgttgcctcaagggtgacggtc

SEQ ID NO: 495016 - DNA, 432 bp, Homo sapiens
cctgctcaaaaacagggccagggctaagttcacttccttgggctctggagtcagcattctaattgtggagtcagcattctaattattctaattatggtgagaccttcctcttctctcaggccttcgcccttcacccaccaagccctcgtcgttcctcttcaaccccagcatccccctgggttcctgtgcaggcctcggcttccaggaaccctgccttggagtgtgtgtgtggctctgtgaccggcaagcaggaggccacggctgtcccaccctcagggctctcacatggtgagtggcttggaggacaccctccatgtggagctcagggccaccaccccgacaaggcctgcaagcgtgggcttgtgcctatcactcatgccttcccrgctacctcggcccagtgagagttgagcactgcgctgagcgctcaca

SEQ ID NO: 495017 - DNA, 501 bp, Homo sapiens
cctcatcctgctgagtccaggaatcccaggaacagatcagcctcttcctggcttcagtgcgcatgtatttcagcctgctccatggtgttcagcattgctgcccactgcaagactgcaaagcagagaactggccctgtggcgtccatggtctcttatatttctgtgattgaggggactcaccgatcttattataaccggataaccggcattcagggagagctgccctcagaaagcaggagagggactgggttgattcccttgtctcatgtcctgtgaattttctgcagaagggaagctggctggaggtgccatggcttgtggtgtgttggccccttcactcattacaagtggcagtgtgtgcttttcggataatccccgctgcaaccctgtgaggaaggggctgttkttgtcttgcccatttttcagatggggaaatggaggtacacgtggccagggaggagcccacttggagcactgcccacccttcccacaaaacggcag

SEQ ID NO: 495018 - DNA, 501 bp, Homo sapiens
cctcatcctgctgagtccaggaatcccaggaacagatcagcctcttcctggcttcagtgcgcatgtatttcagcctgctccatggtgttcagcattgctgcccactgcaagactgcaaagcagagaactggccctgtggcgtccatggtctcttatatttctgtgattgaggggactcaccgatcttattataaccggataaccggcattcagggagagctgccctcagaaagcaggagagggactgggttgattcccttgtctcatgtcctgtgaattttctgcagaagggaagctggctggaggtgccatggcttgtggtgtgttggccccttcactcattacaagtggcagtgtgtgcttttcggataatccccgctgcaaccctgtgaggaaggggctgttgttgtcttgcccatttttcagatggggaaatggaggtacacgtggccagggaggagcccacttggagcactgsccacccttcccacaaaacggcag

SEQ ID NO: 495019 - DNA, 599 bp, Homo sapiens
aagtcgtgcaaaacatctgatgtaagatatttataatacaggcctctccctgagctagtggtgcctggagccagggttcccaagagtcccgggacccaagtgcacatcacaacctgcagaagaatcaacacctcattcagacacttaaccctgtgatgtcaatatctgtagatacacatgagattggcaaagtagagatgtgttttcagagtcctcttgatttcacagtggctttttgtcattttttttggttgttcatttcaattagtggacagtaagaacacctgtgctacccgtgagcagccagcacaatgtattctgacatcaaacagctccttagaaagtctgggaaccctgccatgagacgtcatgcaaatccagttgagagtcctttgtctcttatgattctaaacaaaagtaccaccttcttcagggaaagtggaattgacccaccctgtgaccggcaagtgcccgctggagggcaccttccctggggggtagtttagttttcctttcaatgccgtgaacagtttcacttccrattaagcaccaaagcaaaagatatacagaaatagttcatttggaagaggatggagtca

SEQ ID NO: 495020 - DNA, 413 bp, Homo sapiens
caacattttaaaagtcattaatttaattatgcagacactttaggttagtgctgttgggattctccraaaggcgcccacgtgaaccagcgcccctcacccgcagcccacttgtcctcagccctttccctccccagtctccaggattttaagttgtaaattacttgaaacgtgtgcattcaccaccaagagaaaacacaaatgttcctccacacttagaatactgtaaaggaggggaaaaaattctaaaaacgtgagggataactgaaaaaaaagtgatgaaacaggccccagaacgcataacgctgtccaaagtacaccgctggcttctggccacgtgactctccccatagcagtcacaaaactgtggggctgactttgttttcctgcgtgttgtctattttgacttactcaca

SEQ ID NO: 495021 - DNA, 549 bp, Homo sapiens
cgtggcacatgcagacggtcggagaagaggcctccgttccttcctcgcctcctaaccaccggtgccctgacagatccgcctccagctcatgaaagggtcaggtgttgggacttgtctttggaaaccatatagcactttccacctcaagtgattttttaaaatctacatgacaggccatgtaaaaaggctcctcatactctgggcagtccctgcccctgtgtgccaagccctgacatgctggttggatgagaggattgctaaacatatttaccraagtgctgtggaattgaaggcatttgggaagatagcatgcaggaaaactgtctcttcaaacaccgattgattaggggattagggatgggcccacctgagccagataaggagctcgaggtgcccggcccaccccccaggccaagcgactatcctcctgggaggcgctggactgacaccctggctcacatccttcctccaattctccctctgttttaaatcccaaagctttcctgcacctttacactgcattttatgctttattaccttctcagcccc

SEQ ID NO: 495022 - DNA, 549 bp, Homo sapiens
cgtggcacatgcagacggtcggagaagaggcctccgttccttcctcgcctcctaaccaccggtgccctgacagatccgcctccagctcatgaaagggtcaggtgttgggacttgtctttggaaaccatatagcactttccacctcaagtgattttttaaaatctacatgacaggccatgtaaaaaggctcctcatactctgggcagtccctgcccctgtgtgccaagccctgacatgctggttggatgagaggattgctaaacatatttaccgaagtgctgtggaattgaaggcatttgggaagatagcatgcaggaaaactgtctcttcaaacaccgattgattaggggattagggatgggcccacctgagccagataaggagctcgaggtgcccggcccaccccccaggccaagcsactatcctcctgggaggcgctggactgacaccctggctcacatccttcctccaattctccctctgttttaaatcccaaagctttcctgcacctttacactgcattttatgctttattaccttctcagcccc

SEQ ID NO: 495023 - DNA, 654 bp, Homo sapiens
tagctaacatggtactaagactgaaaacccattagctgagcaaacaatttggaaacacagaataactccaaagaaaaccaaaagaaggggataatgaaagcaagagcagaaattaatgaaatagaatatgaaggaaaaatagagacaycagtgcaaataagacctggttctttagaaaaacgggcaatattaacacactgctggcaagatcatctaaaaaaataaagttagaaaaagacaaaaacaattccttttgtggaaggaataatattggtataccctgggcaagattgatcagacgcagaaaatggggaaagcagaaaaaaaagcagtgccacagatgaaaacgatatagctgcatccgtggtaatgatgtttcaaatcttaagagaaatgcatgtgcaactttatgttactaaacttaaaaatttagatgaaatagaagatttcctagtaaagcatacatttgcaagccgacttgaaaatatagagagaaacttggtgagactaaagcatttaagagagtatatgttcaaaaattcacaaaaacccagaaggttatacaatcaggtccacaaattttgagtgaacatatgattcctgtcttttacataccatttattgaaatataagaagaagaaaaccatcacagct

SEQ ID NO: 495024 - DNA, 654 bp, Homo sapiens
tagctaacatggtactaagactgaaaacccattagctgagcaaacaatttggaaacacagaataactccaaagaaaaccaaaagaaggggataatgaaagcaagagcagaaattaatgaaatagaatatgaaggaaaaatagagacatcagtgcaaataagacctggttctttagaaaaaygggcaatattaacacactgctggcaagatcatctaaaaaaataaagttagaaaaagacaaaaacaattccttttgtggaaggaataatattggtataccctgggcaagattgatcagacgcagaaaatggggaaagcagaaaaaaaagcagtgccacagatgaaaacgatatagctgcatccgtggtaatgatgtttcaaatcttaagagaaatgcatgtgcaactttatgttactaaacttaaaaatttagatgaaatagaagatttcctagtaaagcatacatttgcaagccgacttgaaaatatagagagaaacttggtgagactaaagcatttaagagagtatatgttcaaaaattcacaaaaacccagaaggttatacaatcaggtccacaaattttgagtgaacatatgattcctgtcttttacataccatttattgaaatataagaagaagaaaaccatcacagct

SEQ ID NO: 495025 - DNA, 654 bp, Homo sapiens
tagctaacatggtactaagactgaaaacccattagctgagcaaacaatttggaaacacagaataactccaaagaaaaccaaaagaaggggataatgaaagcaagagcagaaattaatgaaatagaatatgaaggaaaaatagagacatcagtgcaaataagacctggttctttagaaaaacgggcaatattaacacactgctggcaagatcatctaaaaaaataaagttagaaaaagacaaaaacaattccttttgtggaaggaataatattggtataccctgggcaagattgatcagacgcagaaaatggggaaagcagaaaaaaaagcagtgccacagatgaaaacgatatagctgcatccgtggtaatgatgtttcaaatcttaagagaaatgcatgtgcaactttatgttactaaacttaaaaatttagatgaaatagaagatttcctagtaaagcatacatttgcaagccgacttgaaaayatagagagaaacttggtgagactaaagcatttaagagagtatatgttcaaaaattcacaaaaacccagaaggttatacaatcaggtccacaaattttgagtgaacatatgattcctgtcttttacataccatttattgaaatataagaagaagaaaaccatcacagct

SEQ ID NO: 495026 - DNA, 607 bp, Homo sapiens
gggactgcactctgccatcccctgtgcctgagatgagacccccaccttccctggcagtttcttacctgtagacacaggcctgggccagaatgtgccccacggctggcctgcatcctccacgctccctgggggcctggcgccctcctcggtagcctggggtctccacgctggcacagtagtctcatcaaccgaccggggcctccagtcccccatgctgggcctggccttgtgggcctgggccacaggcaacaaactgcccagcgagggagagatgtggtcactgcagacggaggcacaggacgtggacagggagcaggatccaccgtcgctcatctcgtaaaagcctggacggagcagacaaggcaggtcagtgacccccatccagaaragcccagggccccctctcctcctgagcttgtcacggcacaggtgggcccaggggaacccctgagctgaggctaccggaggctgtgtgccatcgtccacacggccggcctgggagagagtggctcaggtgagaatgttcaggattcttcccaggagctgccagtgggttggtcagagcccactccacctgcactctgcagccctggccctccctcttcct

SEQ ID NO: 495027 - DNA, 612 bp, Homo sapiens
gctgctcctaatttggtcatcttccctcaagcaggaaggkgtcgccaagcagagggtcccacggagccaagactccacagactgctacgtgaccacagggatgggttagacccgcttccagcttctgcagctaaagcaacagcccccacagggcagaggaaagcgacaaaaccaaatcccagcgcttctgaaatggacacatctgccctctggaaaaaatcaattggcgttgccgtgacagattctgccgcccagcaagacgcgaagtgatttagtaatctagttgttttttgtttttgattaagcaaacagttttctacaaaagcagctaaccctctcctatcattgccggagcatgggcttggtaaaggaagtaggtgcaaaatgctggattttattgattctccaaatgaagtgttcccacaaggcgaagaggtggagctccggaaatgctcaccgtgtctgtcttctccctggcatggtggggctggctgcacaaacactcgaagaagtctttgaatgccagccctcagcacgtggggcaggtgcaatggtgcctggagtctcaaagctgagtcatgtaagaatccgcttaaaatgggttcaatgttg

SEQ ID NO: 495028 - DNA, 566 bp, Homo sapiens
caccatgttctcaattatgtctgcggttttcctctctctgagggtctatccgccccacctgtggtgaggactgaaggcttacaggttaaacacagctawcccttccaggcagaagtggtaatttgtgctctgatctcagtgatgttttaaccattagaggatgctttttaacaccttaaattccatcagtcgggatggaaacttgaaaaggctatgggaaatacattattgctccatctaaaaagctcccttcaaatgagaatgaaggaaaggaacgagctactgaatgcaccaggcaatcttcttgccctcactgttagaatcgccctatccttgcctctcctgatcactcaaacataaaagatattaaaatatttttttccaggtaagactagttggccaccgatccacattctcaagaggaaagtgtgatgatttcttggtatggctggtgcagattgaactgaaaatctgagcctgcccaggttgaagtggctccagccctgcggttagcaggacactcatttagatggaggtgagcagtggggcggttccctcagatgcag

SEQ ID NO: 495029 - DNA, 654 bp, Homo sapiens
ctgatacctgcggcattgataatagacactccatagctcagctttaggttcgtaacagtaaacgcctttgttatatagatatataggtgtctcttatcactctcagcctagccagtatagataaagcagtgtggggcaagttttctctactggagtgctatttttagcacttatacttctactggcttaaacatacctyactgtgtgtttttttgttgctgttgtttttgtttttgtttttgttttgagatggagtctcactctgtcacccaggctggagtgcagtggcgtgaactcggctcactgcaagctccgcctcccgggttcatgcttctcctgcctcagcctcctgagtagctgggatcacaggtgcccaccatcatgcctggctaaatttttttttgtattttcagtagacggggtttcaccgtgctagccaggatggcctcgatctcctgacctcatgatctgcccacctcggcgtcccaaagtgctgggattacaggcgtgagccactgtgcccagcccaaacataccttactcttatgcactgtatttcatctatgctcataaagttgttcccaataaatactatcattgtttacaccatggatgcatcgtggtgtaggtcgccatgtatcatacataatgttt

SEQ ID NO: 495030 - DNA, 654 bp, Homo sapiens
ctgatacctgcggcattgataatagacactccatagctcagctttaggttcgtaacagtaaacgcctttgttatatagatatataggtgtctcttatcactctcagcctagccagtatagataaagcagtgtggggcaagttttctctactggagtgctatttttagcacttatacttctactggcttaaacatacctcactgtgtgtttttttgttgctgttgtttttgtttttgtttttgttttgagatggagtctcactctgtcacccaggctggagtgcagtggcgtgaactcggctcactgcaagctccgcctcccgggttcatgcttctcctgcctcagcctcctgagtagctgggatcacaggtgcccaccatcatgcctggctaaatttttttttgtattttcagtagacggggtttcaccgtgctagccaggatggcctcgatctcctgacctcatgatctgcccacctcggcgtcccaaagtgctgggattacaggcgtgagycactgtgcccagcccaaacataccttactcttatgcactgtatttcatctatgctcataaagttgttcccaataaatactatcattgtttacaccatggatgcatcgtggtgtaggtcgccatgtatcatacataatgttt

SEQ ID NO: 495031 - DNA, 529 bp, Homo sapiens
atatccagaagcaataaggaaaaaacaaatggtgtattgactacatagacagagatccctgaatagttttctgaactctcccaggcagtggctcactgtgaaaacttcctttgacactcaatttgtcatccccaatctaatggagctttgatgatcttactggcatcctattcccagtgacactgagaatattgctaatagctagcaaggtccagagtccctctttgctctgtcctcttaagtgctttcacagccacactcatcatgttcaactttcttcatcctttcacataggtagtgatactcccattctgccatctcatctcccagcagtcttgtaaatgccctaagagacctggtggtgttcttctgcatgctagtacagcaatgaggtttgctccaccccaacactagaacctaaatgcacgcaagttattttatcccaygaaaaactgtcattgccaagtggaggtggaacgttaccttgaatctgtgtggtatccatcttgggacttgtttctttgtgtgg

SEQ ID NO: 495032 - DNA, 467 bp, Homo sapiens
caatgccttctcctagtaataacctctctctcactctgggaataattctgtagcttttatagtgactcagaaatccactggaatactggtcattaaggttcttgggaccagcactggggtctctcttgtggtattaaggaaacagagtttcaccactgtatgtgaccattctggacacrgataagcacttcatgaggccaagacattatctgccacctagtggctaccctaaagcacattgcccagaaccaactggaacctcaatcctgaacagaataggcttgtctctcctgccaggtcatgtggatagcctcggatggagtccgtgttatggaaagtatctcctgctctcaacattgaactatctcaggagcaggctgggtggctacaggctctttctttctcagtctacaccattaggttttcacctcttagccctgggctccatggtgggttggctcaataga

SEQ ID NO: 495033 - DNA, 498 bp, Homo sapiens
cttctttgagctggtcattcacagcccagggactttggctccctggagaatcagaggactaattcaaggaacctgggaatcatgcggatgccaagcattgtctctaaagagggaacacgtaacatctcacctacgcacaccaytattttctaattgtgtgtagaattcatgattaagaaattacaaatttccttaaaggcactgttgacctcagaagacatttatatcattaagaatttattagctacaaaatctaggtcaggttatttatactttctgaacttaggatattcttatctgtaatgtggaaatattagtagttctcattgcagtgttttttaaggatttattatatattgaaagagttaaacacaatacctggtatagtaagtacccaattaatgataaccttaaaatatcaattattattactattgaaatgctttcatattaaaaagagctcctcatcctcattctgctaaatattgggggcaaaac

SEQ ID NO: 495034 - DNA, 534 bp, Homo sapiens
tctggtctgggacctccatctttacatcaaggtcttccaccttgacctctctgtccttcttctaccatcctcagccgggcagtgcctctccaaatatggttgcagcagctccaagtacagcatcctcagcagaatcgacttcacagggaggaataaaagggaggcaaaacctcctatatatcctcctccttatttcaccagagaggaaaatctctccccaacctttcagcacaccttccctgataacctcaactggccatgcgtgggtcatatgcagcaacctctaaatcaagaagaataatattgtctgggtgaagacttgcccagggctgagctcatcttttctgagcacagtccctcaatgctcaacttctattagagagaaagaagttccagtaggcaacacccaagtgtaccatagactgggcctaagaaaaagggaagacggaatagagacctctcyctgcctgctcagagtgtctcacatcctccctcaatactcctttgtccacccccgcctgactgactttctaa

SEQ ID NO: 495035 - DNA, 548 bp, Homo sapiens
ctttttcccttgtattagtttcagtattcactcaacaactgggccatatcttgggctagcactggtgctacaggtcatgggaggcagggactctgcccttctgaatatgatgacctagtaaatgtgaaaactacctaaataattaaatacagcataagatgtgccatctcagaagcaagtcaggcttctatgggttggaagagtgtagcccagagagaacagcaggggcacaggttgacaggagtgagaaaatgaaagctttttaaaagaagatatcaggatttcttaaaccaggcaatttgattaaaaaaaattatttggattgtaagtggcccataaattaaacaataccaatttatggggttttgcttttgttttaattgagtatgttgcctttttatccatttttggaatgctctaaggtttcagttgctaggacctggatcccacattgagatctcaagagtgaaatctcagcgcgtggcttccgtgtctccrccctgctgtcttgtcattctgctcatgtgagaatggaccacgtgctgcag

SEQ ID NO: 495036 - DNA, 548 bp, Homo sapiens
ctttttcccttgtattagtttcagtattcactcaacaactgggccatatcttgggctagcactggtgctacaggtcatgggaggcagggactctgcccttctgaatatgatgacctagtaaatgtgaaaactacctaaataattaaatacagcataagatgtgccatctcagaagcaagtcaggcttctatgggttggaagagtgtagcccagagagaacagcaggggcacaggttgacaggagtgagaaaatgaaagctttttaaaagaagatatcaggatttcttaaaccaggcaatttgattaaaaaaaattatttggattgtaagtggcccataaattaaacaataccaatttatggggttttgcttttgttttaattgagtatgttgcctttttatccatttttggaatgctctaaggtttcagttgctaggacctggatcccacattgagatctcaagagtgaaatctcagcgcgtggcttccgtgtctccaccctgctgtcttgtcatwctgctcatgtgagaatggaccacgtgctgcag

SEQ ID NO: 495037 - DNA, 595 bp, Homo sapiens
gggagctaggggtggtcattggtggagcttggacgtgcctggaggagcctggagggatgatctgcccctcaatcaatagaaccagttaagaagagaccatctcccaaccctgaataggctcagtgtccgaaggtaggttgtgtagaaatgcatccccacaatcacaagaatcaatgtgaaagtaatatcaggagttttatttcagctattggtgggtcaatcttttttctctgtggawttttttttcttccaaagtttcctgttttcttcataatttaatttccttcttagctttttttcctcctatatatatgatattatgaagtatatatttggtcttcatcctgttttgtgacatacagctgctaaaacctttgaaatctctggaatgaagagtgtcttctgcttgctaatgagatgacttgtgtctggaggccccagtatagcttcaggaagggggctggtctccagaaataaaaaggcatgattagagtattggaccagtcggccccaccctcaaacctcccgggaggagagaggggctgaaggttaagttcatcccaaatgaataatgatttaatcaatcgtgtctaca

SEQ ID NO: 495038 - DNA, 484 bp, Homo sapiens
cctcctctctaccacttgcttttattattgcaatgaccaccaacaaaacaaaaataagttgcatttattgagcctatactttgcgccaggcactatactataattccctgcaactgttacatcatttaatctccacactaactctctaaggkaatatcttttgtcatcttcattttacaaacaaaacataaactctaaaatgttaagtcagtatttggtccaagaacaccttgagcaaagtaacctgaaaagaggatacagctataaatattagattctgtctagcatagcaagtcacccctggagtcactacatgttaactgagtaattaaacaattttgtctttgattttgtttttagcctcagctccagatttctccaaaagtccagttaaaaaaaagtcttttgttcaagttggtggggatattgttatcggatgcaaaccaaatgcttttcccagggcatctatctcttggaaaagagg

SEQ ID NO: 495039 - DNA, 466 bp, Homo sapiens
aatcccagctactcgggaggctgaggcaggagaattgcttgaacccaggaggcggaggttgcggtgagcagagatcacgccactgcactccagcctgggcaacagaatgagactccgtcttaaaaaaaaaaaaaaaaagaaccaattcagtttctgttctctcactttttccggtttttattatctctkgtccttaggattcttttatggcagtgctaagcactgagctgtgtctggcacataatactcacattcgaagggatgaatgtaggcttctgtatttacatttgtaatgtatgcactgaaatttctggcaagatgttaccaggtagtgagattttgttgtttttttcccaacaaggtcttcctctgttgcccaggctgcagtgcagtggcgccatggttcactgcagctgacctcctgggctcaggtgatcctcccacctcagactcccaggtagctggg

SEQ ID NO: 495040 - DNA, 446 bp, Homo sapiens
tcggtctcctggccttgactggcttcctgaggcctgcagcatcctgtggcttatggccccttcctccatcatcaaggccatgggtgtgtatcatcacatctgtctctgtgacttctgcttctacyatcacctcatctctgaatctgatgttctggcctcccccttacagggaccctggtaattaccttggccagacccagagaatccaggataatctcatctcagaatccttgatttaatctaacctgcaaagtcccttttgctatgtaaggtaccatattcacaggtctcggggcttaagatgtggatgttttccaagggtattattctgtctgtcacagtccttcaggtaaactcctggggcaacctttttgaaatcaagaggactttcatgcacctgttcctctttagcccatcaccgtgtttcatttccctcattccgcttc

SEQ ID NO: 495041 - DNA, 527 bp, Homo sapiens
agagtctgtattaaaatatatatatattttcactaggtatagaatttgaggctgacaggtttttttttttttaattttttcagtactttaaagatgttaattttcttatggtttgcctactttctgatgagaagttggctgctgctcctttttttttttttttttttttgagacagagtcttgctctgtcgcccaggctggggtgcagtggcgtgatttcggctcactgcaacctccacctcccgrgttcaagcaattctcctgcctcagcctcccgagtagctgggattacaggcacctaccaccatgtctggctaattttagtagggatggggtttcaccatcttggtcaggctgatctcggacttctgacctcgtgatccacccgcctcagccttccaaagtattgggattataggcgtgagccacggcgcctggcctgctgccactcttatatttgttcttctggatggaatgtctcttttttttctggttgctgggaacatgggctattcccacccctatgt

SEQ ID NO: 495042 - DNA, 527 bp, Homo sapiens
agagtctgtattaaaatatatatatattttcactaggtatagaatttgaggctgacaggtttttttttttttaattttttcagtactttaaagatgttaattttcttatggtttgcctactttctgatgagaagttggctgctgctcctttttttttttttttttttttgagacagagtcttgctctgtcgcccaggctggggtgcagtggcgtgatttcggctcactgcaacctccacctcccgggttcaagcaattctcctgcctcagcctcccgagtagctgggattacaggcacctaccaccatgtctggctaattttagtagggatggggtttcaccatcttggtcaggctgatctcggacttctgacctcgtgatccacccgcctcagccttccaaagtrttgggattataggcgtgagccacggcgcctggcctgctgccactcttatatttgttcttctggatggaatgtctcttttttttctggttgctgggaacatgggctattcccacccctatgt

SEQ ID NO: 495043 - DNA, 588 bp, Homo sapiens
gtgtttttggcatgataccaactgccagactgttcctgctcccgtcatcctcaagctttgaggcagcatcactgatcccacatttaaacagagaatgatcacacaggttgacgttaggtacacataattggattttcacttgtctggttttttcctgtcttcctaaattgtttcattcaaaagagttcttccatttttttctagatacaatacgccctagactctatcagtaagggagttttacttayagttaagacatccagcatggctgagcatatctaatggacccattcacaattttacttcaggagaggtcttaaattgaacatttctaataacttttgggttgtgtgcttgctactacatgtccatgcctatggggatataaaatcgctgccagttcctctatttacctcaacatcttcattactgattaacattttcccactatggacttaaatacttaaatttatgttgaaaagaagttttgcatttgctatttattattttctaagtatacttcccctattttttttcttaactttcatcaatggagtcactgctttttaatctagttattagctgtct

SEQ ID NO: 495044 - DNA, 613 bp, Homo sapiens
agggactcttaacttcggatctgctgatgtggcagaaagctggccgtatctctaattggatatgttcagatactcttctgacatgcatggtgattaggccattttagatcaacaggacgtgctgatcaatgaaaactattaatgtcttaagcaaatgatcagggtattaataattaattttgtgagagaaatgtcatctcggacctcgggattgatctacaatgttaagcagtttctggaagcaattaaaattagcttaggaaatgtatccaattacctgataaagatttagttcatgatatgatagtatttacagtgcatgttctattaagggctgtagatttttaaggatgaagaatttcacgaatcctattggcatttatttacattcaggtaggtaaggttcacctttgctaatcagaaataatggggtcgtggacagtaatttgtcagtgggcagtggtaaccaaagcatccggttttctgaagggagctgaagattcatgaatctcaygtgggactctggtgcaggatacgaagtttcataatttcaatttttctgtcagagtcagaaagaaagctgcaggatgagccaagagttatggtggcaata

SEQ ID NO: 495045 - DNA, 679 bp, Homo sapiens
gtgtggtccatctataaaagagcagcaagatatctatctgccaaacttatggtaaggattagtgagaatgcatggaaagcactgagcttaggtactggcacaaagttgaaacgtcatagctatctttgttaaagacagcacagcgcagcctgagtttgggagttataggctgagggggaaagaggctggaaggtaaatcaagagcctggtctccaatcatctttgaacgtatattaaagattctggacttgaggccaggcayggtggctcatgcctgtaatcccagcactttgggaggccgaggtgggtggatcacgaagtcatgagatcaagaccatcctggctaacacggcaaaaccccatctctactaaaaatagaaaaaattagttgggtgtggtggcacatgcctgtagtcccagctactagggaggctgaggcaggagaatggcttgaacccaggaggcggaggttgcagtgagccgagatcgtgcatcactgcactccagcctggacaatgagcaagactccgtctgaaaaaaagaaaaaaaaaaaaaattctggacttgattctgaagtctacgaggagggtgagaatgactttcaagaagggaaagacctaaaaagattttattttcctgtatgaagatctgcttaaaatgcaatcccctgaaggacata

SEQ ID NO: 495046 - DNA, 581 bp, Homo sapiens
  misc_feature (1)...(581): n = A,T,C or G
ctcctttgtgtcctgatctagaagtggatctcattcaccatggctttcaaagtcctctggtgataggagagtttccatatcattgaatataaatttaagttttactgctgaatttcctggagattaattnaatgaaaatctctgggtcccatttcactgtggaggtaacttctgacatttaggaactgaagaatttgggagaaaaaacgtaaagttatgtcattgttttacttttaaaataaagatttcaaaataaaccaacgtagaattcaaaagggagcttcaaaactcaaaccctcaacccacaccttttttgtttgtttgttttttgagacagagtcttgctccatcacccaggctggagtgcagtagtgcratctcagctcactgcaacccccacctcccgggttcaagcgattctcctgtctcagcctcccgagtagttgggactacaggcacctgccaccatgcccagctaatttttgtatttttagtagagatgggtttcaccttgttagtctggctggtcttgaactcctgacctcaggtgatccacccacctcagcctcccaaagtgctgg

SEQ ID NO: 495047 - DNA, 608 bp, Homo sapiens
agtggtgagagtagagatcctcgtctgattccaggtcttagagggaatgcttctgacttttgcctgttcaatacgatgttggctgtgggttgttatagatggctcctattttgatgtatgttccttcaatgcctagtttgttgagaatttgtaatcatgaagggatgatggattttatcaaatgctttttctgaatctattaattatatgttttttgtttttaattctgtttgtgtagtaaatcacatttactaatttgcatgtattaaaccatccttacatcatagaaataaagcccacttgatcactgtgaattcacattttgatgtgctgctggatttggtttgttagtattttgtcaaggatttttgcatctatgtycatcagggatattagcctatagttttttgttttttggttttttttgggggggtatccttgtgacatttttgtatcacaaaatgattttgtatcaaaattgtatcaaaatcattttgtgatacaaaaatctgatgatgatgctggctttgtggaatgaattagggagaagtctctccttgatgttttggaatagtttcagtaggattgagatcagctctactttgtac

SEQ ID NO: 495048 - DNA, 608 bp, Homo sapiens
agtggtgagagtagagatcctcgtctgattccaggtcttagagggaatgcttctgacttttgcctgttcaatacgatgttggctgtgggttgttatagatggctcctattttgatgtatgttccttcaatgcctagtttgttgagaatttgtaatcatgaagggatgatggattttatcaaatgctttttctgaatctattaattatatgttttttgtttttaattctgtttgtgtagtaaatcacatttactaatttgcatgtattaaaccatccttacatcatagaaataaagcccacttgatcactgtgaattcacattttgatgtgctgctggatttggtttgttagtattttgtcaaggatttttgcatctatgtccatcagggatattagcctatagttttttgttttttggttttttttgggggggtrtccttgtgacatttttgtatcacaaaatgattttgtatcaaaattgtatcaaaatcattttgtgatacaaaaatctgatgatgatgctggctttgtggaatgaattagggagaagtctctccttgatgttttggaatagtttcagtaggattgagatcagctctactttgtac

SEQ ID NO: 495049 - DNA, 596 bp, Homo sapiens
tgaaatagaatgcatagctgatcacaaggtctttgcctggaaggcaggttcagagtgacatgattaatttatttcacagaagcttccatatttatgaacattcagagacaggaacaacacacagaaccagagcaaaagcacactcactccacccattcccagcaatctgctgttccttaggtttacccacatattgacttaaaagtctttcaggggccaggcgcggtggctcacacctgtaatcccagtactctgggaggctgaggcaggcagatcacttaaggtcaggagttcgagaccaccctggccaacatgggcaaaatcccatctctactaaaaataaaaaaattagcttggcatggtggcaggatcacacctgtaatcccagctacttgggaggctgaggcaggagaattgtttgaaccccggaaatggaggttgcagtgagccaatcgtgccactgcactccagcctgggtgacagagcaagactccatctcaaaaacaaacaaacaaacaaacaacaaaaaaaaagtctttcagaacctaacctgtctacaagtagaaaaacktgttaaatcccagagtggaatcagt

SEQ ID NO: 495050 - DNA, 619 bp, Homo sapiens
tagactgtgccaaatcttctctctgacatagacgaaggatagatttcttcttacctggatatgccctttccgtcaggatccagagttttaagaacttactttcttttcttattacttggagaatccattttatttttattttgttgttggagctcttctccacagttacttcccagccattttcccaaaygccagacatcatcactgcttcctgtagccctgttcctcttctagctggagttggaggagcatcagtcggggtcctgagttcccctctcttatactgccagacatttacatttggcttaaaatgtccaatagagtcccccatttgtcaattccagagagcattctaccaacttcactgacaagtgtaagttcttctcattaacctaatctgttcattgaatattctttacctgctttcttgcccaggaatcctttctgctgtgcaactgttgatgtctggactgaatattatttttcactttcatctaaagcaagcttgtccaacctgtggcccaggatcgctttgaatgtaatccaacacaaatttgtaaacttccttaaaacattatgaggtttttgtgggatttttattattatttttagctcatca

SEQ ID NO: 495051 - DNA, 619 bp, Homo sapiens
tagactgtgccaaatcttctctctgacatagacgaaggatagatttcttcttacctggatatgccctttccgtcaggatccagagttttaagaacttactttcttttcttattacttggagaatccattttatttttattttgttgttggagctcttctccacagttacttcccagccattttcccaaatgccagacatcatcactgcttcctgtagccctgttcctcttctagctggagttggaggagcatcagtcggggtcctgagttcccctctcttatactgccagacatttacatttggcttaaaatgtccaatagagtcccccatttgtcaattccagagagcattctaccaacttcactgacaagtgtaagttcttctcattaacctaatctgttcattgaatattctttacctgctttcttgcccaggratcctttctgctgtgcaactgttgatgtctggactgaatattatttttcactttcatctaaagcaagcttgtccaacctgtggcccaggatcgctttgaatgtaatccaacacaaatttgtaaacttccttaaaacattatgaggtttttgtgggatttttattattatttttagctcatca

SEQ ID NO: 495052 - DNA, 601 bp, Homo sapiens
tcttctctctgacatagacgaaggatagatttcttcttacctggatatgccctttccgtcaggatccagagttttaagaacttactttcttttcttattacttggagaatccattttatttttattttgttgttggagctcttctccacagttacttcccagccattttcccaaatgccagacatcatcactgcttcctgtagccctgttcctcttctagctggagttggaggagcatcagtcggggtcctgagttcccctctcttatactgccagacatttacatttggcttaaaatgtccaatagagtcccccatttgtcaattccagagagcattctaccaacttcactgacaagtgtaagttcttctcattaacctaatctgttcattgaatattctttacctgctttcttgcccaggaatcctttctgctgtgcaactgttgatgtctggactgaatattatttttcactttcatctaaagcaagcttgtccaacctgtggcccaggatcgctttgaatgtaatycaacacaaatttgtaaacttccttaaaacattatgaggtttttgtgggatttttattattatttttagctc

SEQ ID NO: 495053 - DNA, 619 bp, Homo sapiens
tgctatgttgttaaggtagagggtactagagggacatggcaggaggaaggagttttcctagctacagtttttacattttcattattttttactttatttatttacatcattcccatcctttgttgtactttaattctttatattaaactctccccattcaaatcaccaccttggtttctgtctcctgactgaaccctccctgattatagtcagattgattcaaagacaggttttgttccttaaggtatattatttctgatacatttaggaattgctaactataatttatgtttgatctgtgttatattgctgacttggcatttagtgtttctgaaggaaagggaacattgtataataaaggattattgaaaggctgtcttctgtggagttgtctacccttgacccaaagactgtctccagatcaaaactagtaacagtgctcatctgattagatgtcttggctgcttgttagtctttatcattttyttacatggctatataaataaactaagattattttgttttctttgtcttaaacaaatgctattgacctcattagctttgttctaacaggcaatatttttaccatatgataaatatactaaaatggttggttagt

SEQ ID NO: 495054 - DNA, 655 bp, Homo sapiens
ctgtaactggcttatttgatgttaggatgatggattatgatttttaagaccctgtttctaaggatgtcaagttaagcataatagattcttgttttgcttgtgtatgtgttggtatgtgtacatgtctaattatcacctttattgaggtataattcacatacaataaaactcactacatttaagtgtacaatttgttgaattttgacagttatcaaaccctatcacaatagaatatttttgccaaactgagaagtttacttgagttcttttccagttaaactcccaaccctccaggagactgccagtctgatctctttcactatagatgagttttgcctatgtatacatttttgtgtctagcttctttctctgagcataatgtttttgatattaatccatgttgttttaggtattagtagattattcctttttattgctaagtagtatttcattgcatkaacatgccacagtttgtccattcaccagacatttgagttgttttcaacttttgactgtgacaaataaagatgccaagaatatatttgtacaaaaatcctttccctttcttttgcttggggcgggggtatgtaagtgcttaagactgaaattgtaggatctaaggttagtatgtacttaactctgtaagaaaatattc

SEQ ID NO: 495055 - DNA, 638 bp, Homo sapiens
tgaagtttgataacaaagaaatatatataagacaaaaatagacaagagttaacaataaaaacacaactatctgttgayataacatatggaaactttttgtcagaaagctacatcttcttaatctgattgtccaaatcattaaaatatggatgattcagtgccattttgccagaaattcgtttggctggatcatagattaacattttctgggagaaaaaagaaaaagagatatttatttaggaaataaaccattttttacaaaaatctccataaaacctcaacttttctagcaataaaccaaaactaatactttcagtgaatatctattaaatgagcatttccattagtttaacacacaaatgtctcctcccctacatttcactcttgaggtctagaataacttactctgtaaatcatagatattctcaataacctctttttgttatcaattacggtaagactcaagcatccagaaatagctttaaaactgagacacaaatataggaaagacgtctagttaattatatttacattgagaattaaacggccacctgagttatttacaacattcttgaaatggcaattaactatggcagtttctgatgtagcttccagcaagttccaaaaccccccatagc

SEQ ID NO: 495056 - DNA, 588 bp, Homo sapiens
aacaataaaaacacaactatctgttgatataacatatggaaactttttgtcagaaagctacatcttcttaatctgattgtccaaatcattaaaatatggatgattcagtgccattttgccagaaattcgtttggctggatcatagattaacattttctgggagaaaaaagaaaaagagatatttatttaggaaataaaccattttttacaaaaatctccataaaacctcaacttttctagcaataaaccaaaactaatactttcagtgaatatctattaaatgagcatttccattagtttaacacacaaatgtctcctcccctacatttcactcttgaggtctagaataacttactctgtaaatcatagatattctcaataacctctttttgttatcaattacggtaagactcaagcatccagaaatagctttaaaactgagacacaaatataggaaagaygtctagttaattatatttacattgagaattaaacggccacctgagttatttacaacattcttgaaatggcaattaactatggcagtttctgatgtagcttccagcaagttccaaaaccccccatagc

SEQ ID NO: 495057 - DNA, 607 bp, Homo sapiens
tgggttctcacctctcactcccctctccagctccttaacattttctttatacaaactcaagcaaatttgaatatatcttgttatacttcccaatttttatacaaaaataacatacaggcagtttttaaaaaaactacagatttaagtgatgtttaattgatagtttttaaactcaggttttaatttttaattagatatttcctgtgaattgactatcatttggataatttttccttatctcctatgacaattttcaagttttcttttaagagtctgtggttagtcaccagtgcaagacaagtaagtctggggtgtctttgtttttattatttcagaatcggaaaagtttatatgtgtttggtaaagaaaatttgaagaaaagagaaaccacaaaaaagagtaatcctactactcagaaatatgtaatgatgactgttattgtgtttaggactctggtactgtrtaatagatatcttgaatgtcccaataaaacacaaacaaaagtaacatttactttaaactgtaaagtggagaagcattaatttaccatgaaatcacaaatgttcaaaatttccaagttcatgggtgacagcaatgagatgtgttt

SEQ ID NO: 495058 - DNA, 493 bp, Homo sapiens
ctcaaacctaaaaaaaaaaaattctgagtttctgccaaataccgtgcatttgtcttctgggccacctgtgagattacttctgaggagaccaaatgtggsaggtaggaagaggcaagaaggaaatggagatccaccacatccggggtcaaaaaaaaccttccatctactttaaaaatactcacatgggctgtgcccaagtggattctttctaaacatcatcacagaagaatgtaattgagtctgtttaccctaaggtaagtcatgctcctctacacacagacacacataccttcacctaggtacaaaaaaattgatatttcttttctactgaagaaagggcacaaaaagtttcttgggcagactagacgtttttaatgctttcctattgtgaaaataagtaattcaaaatctaagctgttggaatcttaacatattgtaaggcttaagggaatgtgattatgtgagtcacttaaacttgtatctgtaacctggg

SEQ ID NO: 495059 - DNA, 515 bp, Homo sapiens
tttgcaccactgcactccagcgtgagcaacagagcgagacactgtctcagataaacaaataaacaaacaaaccaccaatttcaaatactctagaagtgccaaagccttaagaggaccagctacttttcctctctttccctttagataattaaaaaaaaaaagtatgagaaaaagtatgaagaagtatgaagaaatatacggagaactacttgttttcctgccttatttaggacatgtgccaaaggatttccaattcactctgcttcatactgacctttaaaatatttcggccatcaaatgattctctttccttgaagatatatttgccttccgctgtgtagagattgtacctgccttcagctgtaaatattccaaagataatgttagaagcttagattgattggttgttttctcttggatttctataggtacataggtamgactagcaaaattttcatgaactacctggaaagtggcataatgaagaggaaaaatgtcaggctatgaatcaagag

SEQ ID NO: 495060 - DNA, 538 bp, Homo sapiens
tgctgaccaaaccccacagaacagagggcaccaggcatcacacgacatctttccctcccatctctgccatctgtctgtctggcaatggaaggagcttcagcaggagrtccttcccagaaggttgattcttggcctgggtggtagaggagatatcctgaccctaaagtcttccagccccgggtcatcctctcctatactagggcctattgaccgtagaggccaggtgcggtggctcatacctgtaatcccagcagttggggaggccaaggtgggaggattgcttgagcccaagagttggagaccagcctgggcaacatggtgagaccaattgactgtagggcttgtcccttgctaagacaggagcagaagactggatggctgtgtcctcaaggcagtcccctcccatccccattcccaaagtcagaaagtgaagccagatctcaagggctgatacctgaggcaaggagagctaaggggagagaaattggggctgagtggaagcagatgcctgcacaagccaagtgtgtcttattgatct

SEQ ID NO: 495061 - DNA, 662 bp, Homo sapiens
ctgaccaaaccccacagaacagagggcaccaggcatcacacgacatctttccctcccatctctgccatctgtctgtctggcaatggaaggagcttcagcaggaggtccttcccagaaggttgattcttggcctgggtggtagaggagatatcctgaccctaaagtcttccagccccgggtcatcctctcctatactagggcctattgaccgtagaggccaggtgcggtggctcatacctgtaatcccagcakttggggaggccaaggtgggaggattgcttgagcccaagagttggagaccagcctgggcaacatggtgagaccaattgactgtagggcttgtcccttgctaagacaggagcagaagactggatggctgtgtcctcaaggcagtcccctcccatccccattcccaaagtcagaaagtgaagccagatctcaagggctgatacctgaggcaaggagagctaaggggagagaaattggggctgagtggaagcagatgcctgcacaagccaagtgtgtcttattgatctgtacaagctgatagaaggaccatctgctgaaatccagggctcctgagttggtgggtttgcttgtgaagcttctaggacaaggcgcagccagatggaagggagagggtccagggcttcctaaatgca

SEQ ID NO: 495062 - DNA, 537 bp, Homo sapiens
aagtgaagccagatctcaagggctgatacctgaggcaaggagagctaaggggagagaaattggggctgagtggaagcagatgcctgcacaagccaagtgtgtcttattgatctgtacaagctgatagaaggaccatctgctgaaatccagggctcctgagttggtgggtttgcttgtgaagcttctaggacaaggcgcagccagatggaagggagagggtccagggcttcctaaatgcagccgcatcacctgtcaactcgctgcagtttcagagacagtggaagctgctctttacctcaaaagcacaaagcagaattggcaacttcacwtgtctcaagagctccaagatcctttggtctcgtgtcctttggcaccccgtaactggactggggacaaatttgttacgtgtttccaaggctacagacatggcgccatcctcacaggcctagctcatgtcatggatcaggtgctttgctggggggatacaatgacccatgtggtctgcgtcttctgccattggcttgaactgggcacccc

SEQ ID NO: 495063 - DNA, 539 bp, Homo sapiens
gcctggcttgcaaggggtgcctggtccctctgcacgaggcccagaactatcatcgtagttcacttgctcacaggacaggatgacaggagggcaagctgcaccagtaggtgttcacggatgcatgggataaaggcagggccccacacaagataaaaatgcagggctctagttcaaggattcctgagcaaggttaacgtcagtggtgaggccatgtttgtaccatgtgcctttggtatgatgtgaggggaagagcactttacctctggggtcctcccaaaaccccataactcagtgggcacagtggctcacacctataatcctagcactttgggaggctgaagcgggcagatttcctgagctcaggagttcargacaagcctggccaacatggtgaaaccccatctctactacaatacaaaaaattagccaggcatgatggtgcatgcctgtagtcccagctactcgggaggctgaggcaggagaagctcttgaactggagaggcagaggttgcagtgagccaagatcgtgctactgcact

SEQ ID NO: 495064 - DNA, 568 bp, Homo sapiens
gagaggcagaggttgcagtgagccaagatcgtgctactgcactacaccctgggtgacagagggagactctgtctaaaaaacaaaacaaaacccataactccagtctaaccaggagaaaatcatcagacaaatccaaattgaatgacattctataagataacttaccaacactcctcaaagactatgaggaatttcaagacgacagcagagtgttaaaccaaacgccaagcccttctaagcacagrgcctgggcgatagcacaggccacatacctgggaagcagcctgggcaggaggcctgagaagcaaatgtggggtgccccaggcccccacagcccttggaagcaggaaaggcgtccctgtgaaggaaccctgtgggtgggggtgaggatgggggaggaaccaggggcctgagctgcagaaggggtaaaggtgtgactgcgggcaggacccagggcccctctctgagggtcctcagcacaggggggctgccatgaagttgggcactgcccatgcaggccatgcagcccatctacaaagagacccccatagctgcagggccccagcag

SEQ ID NO: 495065 - DNA, 578 bp, Homo sapiens
ttgtatttttagtagagatggggtttcgccatgttgcccaggctggtattgaatcaagcgatccacctgcctcagcctcccaaagtgttgggattacaggcatgagccaccacaccaggccagttttattttttttttaagagaaagggttccctatgttgcctaggctggtcttgaactcctgggctcaagtgatcctcctgcctcagcctcccaagtagctgagactacagacatgcaccactgcacctggcttggcctgggttttgaaggatgtgtaggaaagtaaagaaaggagtggtgaacattttcaggcagtgggggcagccctaagcaaaagaytgtaaggcacagagggtagagggaaaagggaggacaatgaggctgatgacaagggtgaggaccaattctccaggctttcaaaaggtgaaggaacttgactttcaccctgtgggtagtagggagtcattgagggttttatgtagaggaaagaccccacctcacccatctccatggtagttatgacaaaagtggacgaggagcgctagaaaggaaggagctagaagcccagtttgcca

SEQ ID NO: 495066 - DNA, 451 bp, Homo sapiens
caaggacacatttgtcagcgcatgccacacacacacacacatacacacatgcatgcacacatgcactcacactgtcacccgtcccagccatctgtgccacacacatgccatgcacactcacactcccagtccccccaggtggagcagggtccttctgactgcatttctggatccgttctcgaagttgcctgctgctgctcagagctctgctgttgagtcccccccggcagccggctyctgagggcgtctaccagatgtagcccccgtcgtcagcctcgcctgcctcgccctcctcctcctcggcctcctcgcctgcttcctccgtctccttctcctcctcatcctcccagccgacaccgcttccaaagtcccccgagaagcccacgatgtcatctgtgaggggatcaagccaacagggggtgagggagcttctggcacgcaccccccagca

SEQ ID NO: 495067 - DNA, 595 bp, Homo sapiens
gcccccaggctcttgtccagccctgggaaaagatcaggttcaggcacgcttcatctggctattcagccgtttctccagccctccatctctccgcctcgccatcagccccagccctctattctgggtctgggcagcttggaatctaaccatgggattgagaaactcgagaacggcgaaaggtccttccttccacctccacataggactatgcctgaaccattcaaaacccgttctgaaagccctgcagggaaaagaattcctgctttccctgggctacccatgtcagggtttaagctccctccacccatgttaagttcttcctactagctaactggtatccctcctgctctggtggaagccgacttctttggggtgaaggttcttttggggcccagattgtagggcccagagtctggcaggaaggaacaagggcagrctggcccagcatacacctgtgtcctcagccccttccctatttccctccctcctccaggcagagcagcaagcttcctaccgctggccgggccggctacactgctggctgagccattctgcttggagttctcatgaaggagctggaaccagtcccgcagcc

SEQ ID NO: 495068 - DNA, 565 bp, Homo sapiens
gcagcctccagtttcacactcgaggctctccctcaggctggccttcctgcctcttccgcagtgagagaaggaggcagcaggagtcgggaaggatggggagggcgggaggaccgcagactgctcccgtgagagcccacggcggctctctccctctctctccttcttcctcttgctttcacgtgcctccccgtgtgttcctgtgtccctctctcctctgtctctcattgagcctcttccycatccctctgctcggcccacacctggcccacacgtacctgtcctagcagccaagagtcccgcagcccctgggcccaggagcagacagaggaaggctgcaggggtgcttcctgggagcctgtggggcacctggcccagcactcaccccatccctcaggcttgacctgagcgctcctgagcccccaggcaagcctctggggaggctgcaggcaccacttccctcgtttgctaaaaccaacgaagccttctccaggagctcctcagggttcaggggtcctctgctgggggtccaccccacaggagatggagggaggccaagagaggtgca

SEQ ID NO: 495069 - DNA, 596 bp, Homo sapiens
agaaacgaggtaacaaaacccactctgtgagcagcctccagtttcacactcgaggctctccctcaggctggccttcctgcctcttccgcagtgagagaaggaggcagcaggagtcgggaaggatggggagggcgggaggaccgcagactgctcccgtgagagcccacggcggctctctccctctctctccttcttcctcttgctttcacgtgcctccccgtgtgttcctgtgtccctctctcctctgtctctcattgagcctcttcctcatccctctgctcggcccacacctggcccacacgtacctgtcctagcagccaagagtcccgcagcccctgggcccaggagcagacagaggaaggctgcaggggtgcttcctgggagcctgtggggcacctggcccagcactcaccccatccctcaggcttgacctgagcrctcctgagcccccaggcaagcctctggggaggctgcaggcaccacttccctcgtttgctaaaaccaacgaagccttctccaggagctcctcagggttcaggggtcctctgctgggggtccaccccacaggagatggagggaggccaagagaggtgcag

SEQ ID NO: 495070 - DNA, 597 bp, Homo sapiens
ggcagggagggagccccttctgtgcaaagcactgcccccggttccagcctcgactttttgcctctgctgtggccaggctgggcaggcaggatggaggggccccagtggatctggattccaggaccctcactcccaggaaagcaaaggcagccagccagagagggacgaggagagcagggccctggggtcctgcagatccccaggcttcccccraccagtgcaccttgggcaagcacccgacctcgaggggctcagtgcctatctcccaggactactcagagattaaagcagatggcacctgcggggtgcctggggtccaggaagcacttaacaaatcaaagctgctatgatggagaagagacccccggactgcaagtgcggaaaatgagggacagagatgccacatgaggaaccccaaaaaagtggagagggagaggccaccatggggacagcagagaccagaagggatacgaggagagtcccctaggaggtcttgtggggaggaatgacgaggaagtcctctgggcagctggggagtggccactctgagggtaaaactcaaggacacactgaggggtccctgaggccaggtgtggg

SEQ ID NO: 495071 - DNA, 597 bp, Homo sapiens
ggcagggagggagccccttctgtgcaaagcactgcccccggttccagcctcgactttttgcctctgctgtggccaggctgggcaggcaggatggaggggccccagtggatctggattccaggaccctcactcccaggaaagcaaaggcagccagccagagagggacgaggagagcagggccctggggtcctgcagatccccaggcttcccccgaccagtgcaccttgggcaagcacccgacctcgaggggctcagtgcctatctcccaggactactcagagattaaagcagatggcacctgcggggtgcctggggtccaggaagcacttaacaaatcaaagctgctatgatggagaagagacccccggactgcaagtgcggaaaatgagggacagagatgccacatgaggaaccccaaaaaagtggagagggagaggccaccatggggacagcagagaccagaagggatacgaggagagtcccctaggaggtcttgtggggaggaatgacgaggaagtcctctgggcagctkgggagtggccactctgagggtaaaactcaaggacacactgaggggtccctgaggccaggtgtggg

SEQ ID NO: 495072 - DNA, 641 bp, Homo sapiens
gtactatgagccaaaacctgtgctcagcatttatgtagaccatctcatttaatcctccagccaaccctgcaaggcaggcactgcctccctagcttacaaattaggaggtcataatattactatctagtgtgtattgaactttactctgtgccagcctccaggctaagcactttcacgcctttctcacctaaacttcacaacaatccaataaggkcaccatcatcttacagatgaagaaatcaaggttcagagaagctaagtatcatgagcaaggtcacgagatgatagggagggcaactcgttccatcctgcacacatggacgtgtccacacacagcacattggcccagccttgtgctatggaggaagcagagacagatgagccaaacccactccatctccttgccccagccatgaagggtaacactcaccgtaagctgaagctggctgcctcctgcctcagcccaggggtagatgaccagctacctgcccactcttcccctgcaagatggcattcctggagccctgcccataagcctccaatgaccagccatgagttaggtgactcccacgaccagacgtgcctatttccttgtggtgctgatggcggccaggcagcactgataatgatctctcctctgc

SEQ ID NO: 495073 - DNA, 429 bp, Homo sapiens
ttggcaggtggtgctgagttggaaggtcattagactcagggcctggggctgccatgtttgggtggctgggaaggctgagtgcagggagatgagaagcctgtctgtgtagagagmgggagcaaggcaacagacctgcatccctgcatgtgacagaagcagagagaatggggccctgatggacttccattcccgtgacacctgggtatcttcaaattaatgctgcccccacttttacccaagatagtttgagtgggtttttgtttcttgcaaccccaatgatgaggagtggttgactccccgtcacccagcccaggacggggcacacaccagtgttccaccaaagctcgttgagctgtcaagtgaacgtgggacaagcagagggagggagaaggctgggggctgcccctttttcctcctcccaccccctcg

SEQ ID NO: 495074 - DNA, 519 bp, Homo sapiens
gccaggctcgtgccccttgtgggtccagggggccgacgttggggagggctctccgccatttctggctgcccctctagtccttcctcgggtctctttcatcctccctcccctctctcccatctgcatgccagactttccctcccagtcttttctatctrtgctctctctcttattctctgagtcccatggttttctctcagctccctgcctggcctctctgtctccctgcaggcctctctctttcatcttcctctccttgcctgctctggaagtccttctccatgtgttcccctgcctcggtataacctctcctctgtccacctgcacccactttctcccccagcttcccccacccagctcccaagtcctgagcgctttgggggaaactgaggacaggtttcaccctactaaggatggaacaggcaggacgggagagaatagccagccttcagcaggtggcactgttgggtgacttttgcttgtaaaaccttttagcactgaaaaaacatgctggaatct

SEQ ID NO: 495075 - DNA, 519 bp, Homo sapiens
gccaggctcgtgccccttgtgggtccagggggccgacgttggggagggctctccgccatttctggctgcccctctagtccttcctcgggtctctttcatcctccctcccctctctcccatctgcatgccagactttccctcccagtcttttctatctgtgctctcyctcttattctctgagtcccatggttttctctcagctccctgcctggcctctctgtctccctgcaggcctctctctttcatcttcctctccttgcctgctctggaagtccttctccatgtgttcccctgcctcggtataacctctcctctgtccacctgcacccactttctcccccagcttcccccacccagctcccaagtcctgagcgctttgggggaaactgaggacaggtttcaccctactaaggatggaacaggcaggacgggagagaatagccagccttcagcaggtggcactgttgggtgacttttgcttgtaaaaccttttagcactgaaaaaacatgctggaatct

SEQ ID NO: 495076 - DNA, 626 bp, Homo sapiens
catatcactatcatacaagtagtacaattttcttttctttgttgtttttttgagataggatctcattttgttacccaggctggagtgcagtgacgccatctcggctcactgcaacctccacctcccgggctcaagtgatcctctcatctcagcctcccatatagctgggattacaggtacatgccactacgcctggctaacttttgtatttttttgtggagatgagctttcaccatgttgcccaggctgatcttgaactcctggactcaagcaatcctcctgcctctgcctcccaaagtgctgggattacagttgtaagccactgcgcccagcccacacatagtacaattttctgacttaggcccacttctctgttggagagtctgtgatctacaacccaaatatgaagatttcttccagaatgggaagattgtccaattactttcaagttccaggggtagctggaaaaaaataaaggaagaaataagcagtgcatattccggtcactctgctttatttcttctctgtttccctgacaatgaaacttccacctgaggctttatgatggagagaggctgataagcagcagtcctgagtgatayagtgtgcaatttggggtgggtacc

SEQ ID NO: 495077 - DNA, 512 bp, Homo sapiens
cagtaaaaatcctcaggacctagaggctacaatctacattaatagtgtctgaagacctagaaatgtcattaaataccattttggataattcttgtagacttgagatgatgtctatttaaagttacaaaatagtgcccatatttctgtattcattacagaaaacaattggatatggaaaagaaactaacatgctatgccacaatctctaaagaaagattagggaagtttcagcttaaagcaagaataatcacaataaagttttacaaccctttgcaagcatatatgaaaaacwtacaaaaagtttgtaatgatcttttcttaagctaagagaacagaaaaaatgagaaaaattaaattataaaatgaaactttggtttagaggtaagaaacatttgatgacagtcaagagatcagggttgtacagtgtattatgtgaatgttgtgactcattggtttcatcttggatatcataacttgacattttgtaaaagtgatttttcatgggagttttt

SEQ ID NO: 495078 - DNA, 512 bp, Homo sapiens
cagtaaaaatcctcaggacctagaggctacaatctacattaatagtgtctgaagacctagaaatgtcattaaataccattttggataattcttgtagacttgagatgatgtctatttaaagttacaaaatagtgcccatatttctgtattcattacagaaaacaattggatatggaaaagaaactaacatgctatgccacaatctctaaagaaagattagggaagtttcagcttaaagcaagaataatcacaataaagttttacaaccctttgcaagcatatatgaaaaacatacaaaaagtytgtaatgatcttttcttaagctaagagaacagaaaaaatgagaaaaattaaattataaaatgaaactttggtttagaggtaagaaacatttgatgacagtcaagagatcagggttgtacagtgtattatgtgaatgttgtgactcattggtttcatcttggatatcataacttgacattttgtaaaagtgatttttcatgggagttttt

SEQ ID NO: 495079 - DNA, 626 bp, Homo sapiens
tgaaaaataatacttcttcggccaatggactgccagtcactattatttagtgtaaaatactgtattacatatgtgtaattttttaaattgcagtgtttcacatcgaagcaattaaatataaaaaccaaatgtttattcagcttaaaggcaacttagaaatactgatcccagatagaaagatgctttagtcccaagtccgctgttctaaaatgccacaactaaaccaacaaagggatcttgaagcataataagtgttcataccttttcaactatacctctgcttgtcttgaatataaaaacctaagctgcagttatgccacagyacagaatgtgttatattttacatcactgagccttagttttacaaatggtaaaaaatagggaaggtaaactgaggttttcttaaggagctgttacatccaacagactcatgaaaatctttgccaaatgtccccggtacatagctcctccccactgatgggctcaacggggagaagctatgcacatgtctcaatttgcatatgctcaatggcaatacaggattcccaggataaagtaagggatataaatgacacagcacactgaaaagactgtaatgttacttcagaacgttgcaaaataaagat

SEQ ID NO: 495080 - DNA, 581 bp, Homo sapiens
ttattcctatcaccatatacgtactcacaaaagagcagtgtaaaccaggtattacatttccacaagggaaagtagaaccaggaatagccacatgatacttaccgaaagcttcactttccctatagagaaagcaagcaacaygaatcttctgatttggggcccagcctgctgctgtatacagaggttggcattattggtgatagaaatgtctgataggagtcttttaattatactctggagtgtggaggtggagtgcaaggctgcttcctttattactgcaagtgttattttctattatctcaggtttcgttttgtgtaataaactgcttcttgttaaacaatgtcttctgcttcattatttttttgggggtgggtgtaataaagttggagatttgtaaaaaagtttcaggttgggtgtggtggctcatgcctgtaatccctgcactttgggaggccaaggagggaagctcacgtgagcccaggagttcaagagtagtctgcgcaacatactgagaccccatctctacaaaaaataaaaccaagccagccgggtttggtggtgtgagcctgtggtcgcagct

SEQ ID NO: 495081 - DNA, 356 bp, Homo sapiens
caaaaaaaaaataaaaataaaaatgaaaaagaggtgccatgtgtacaaaaatcaatgcatatttatgaacttttttttcaaatatattttcacacattttatctaaatacataatacagaagcctgtgtgacttgggcaatgtggccaggagggcctgagactaacacayccaccttggcaaaaggacataaaatatgtcttatggtcagaaaaatcaacattttgtgtatttacttagtttatgaaaagtactgaaaatgctattactagctgaatttgtgatttccttttgaaattctgagttatccttatttttcccattttgtttttgcaccaaggagactgcagtcaaata

SEQ ID NO: 495082 - DNA, 356 bp, Homo sapiens
caaaaaaaaaataaaaataaaaatgaaaaagaggtgccatgtgtacaaaaatcaatgcatatttatgaacttttttttcaaatatattttcacacattttatctaaatacataatacagaagcctgtgtgacttgggcaatgtggccaggagggcctgagactaacacatccaccttggcaaaaggacataaaatatgtcttatggtcagaaaaatcaacattttgtgtatttacttagtttatgaaaagtactgaaaatgctattaytagctgaatttgtgatttccttttgaaattctgagttatccttatttttcccattttgtttttgcaccaaggagactgcagtcaaata

SEQ ID NO: 495083 - DNA, 587 bp, Homo sapiens
tgttactcaggctggagtgcagtggcatgatcatagctcacttcagccttgaactcctcagccttctgagtagctgggactacaagcatataccaccatgcctagctaattaaactttttttttttttttttttgtagagatggggtcttgctatgttgatgagctggtcttgaactcctggcctcaagcagtcctccttcctcagcctcccaaagtkctggaattataggcatgagccactgtgctcagccaatagggatttttttgggggcaaatgttcagttaggctactagcacaagtcaaattaataaataggtctcattggtcaggacaaagatgcttaatgttctgactccactagagcaaaaacctggaggtgggtctcagttacccctacccctattttcctggagccagaacccttgcccacctgggtgtcgctttgaaatttgtagtttcaggactaaaccttattagtggtaaagatctttgggggtgggtctaatgctgagtagaatggtcatccatctgtgaaatagcagcccaggaattcctctgatgctagaggaagtggtctgtaatgac

SEQ ID NO: 495084 - DNA, 530 bp, Homo sapiens
gctttatgttgctctgtgtggtatggggacagagggtacactggctaagtttgaagggcaagcatgggactgaccaccatgtctgcctcagatgacccctcatccaaccaatcaacaaaatagaggacatgttagtgacaggaattttgtcctagtctctggctgttggagccaggtggtagagtaatgaggtaaggggtaaaggaaacagtcttagcaggttagaataacagagcaagccagtagtagtttgcttttgctctttaaagtaggtgagtggagtatatgtgttaggaggagacccagatagttcctgtgtttatatagagcatgmgcagcatgctgtaaatcccagtggcctgtatttcctccatgtttggagtggcttctaggatgataatggtttttggaagtgtatggaaatagtggagtaagagcaatagttgctttgaaaatagtccttctgggtggccatacacagggattcatatgaattctgctggctatgtaggaggatcagtggtgttgtc

SEQ ID NO: 495085 - DNA, 530 bp, Homo sapiens
gctttatgttgctctgtgtggtatggggacagagggtacactggctaagtttgaagggcaagcatgggactgaccaccatgtctgcctcagatgacccctcatccaaccaatcaacaaaatagaggacatgttagtgacaggaattttgtcctagtctctggctgttggagccaggtggtagagtaatgaggtaaggggtaaaggaaacagtcttagcaggttagaataacagagcaagccagtagtagtttgcttttgctctttaaagtaggtgagtggagtatatgtgttaggaggagacccagatagttcctgtgtttatatagagcatgagcagcatgctgtaaatcccagtggcctgtatttcctccatgtttggagtggcttctaggatgataatggtttttggaagtgtatggaaatagtggagtaagagcaayagttgctttgaaaatagtccttctgggtggccatacacagggattcatatgaattctgctggctatgtaggaggatcagtggtgttgtc

SEQ ID NO: 495086 - DNA, 615 bp, Homo sapiens
gaacagtagttttgggaaaatcttatcttctcagcaggctcttcagctacttcaaaggtattcataacactttaagcagwgtagtttctggggggaataactttaaatctgaaaatacaatttcaaattaggatgttgttggaaatctgtcctacataaaccttaaaacttacaaacataaacttttcaattaccactaaatagactggtaaagatttgaaataaagaatgatatgttctaattgcattgttttggtagcagaaagtctttcaacaagaaaatgaaattatttctcatgtttcccctccctgcccccagccatgtcatatgtttggggttaattttataggtattgttggaaagggaacaaaatatgtttacttctacatactgaaagaatttctgaaagtgagattatctaagaataatagattccaaaactttccattttccctcctgagggctcctgcaccttaaaagaaattgtgtatacttaaggtgtataacatgatatttttaaatatgtagtgaaatggttgctacaaccaagccagataacacattcatcatctcaccgagttatctgtcccccacatttttttgtggtatgaaca

SEQ ID NO: 495087 - DNA, 615 bp, Homo sapiens
gaacagtagttttgggaaaatcttatcttctcagcaggctcttcagctacttcaaaggtattcataacactttaagcagtgtagtttctggggggaataactttaaatctraaaatacaatttcaaattaggatgttgttggaaatctgtcctacataaaccttaaaacttacaaacataaacttttcaattaccactaaatagactggtaaagatttgaaataaagaatgatatgttctaattgcattgttttggtagcagaaagtctttcaacaagaaaatgaaattatttctcatgtttcccctccctgcccccagccatgtcatatgtttggggttaattttataggtattgttggaaagggaacaaaatatgtttacttctacatactgaaagaatttctgaaagtgagattatctaagaataatagattccaaaactttccattttccctcctgagggctcctgcaccttaaaagaaattgtgtatacttaaggtgtataacatgatatttttaaatatgtagtgaaatggttgctacaaccaagccagataacacattcatcatctcaccgagttatctgtcccccacatttttttgtggtatgaaca

SEQ ID NO: 495088 - DNA, 615 bp, Homo sapiens
gaacagtagttttgggaaaatcttatcttctcagcaggctcttcagctacttcaaaggtattcataacactttaagcagtgtagtttctggggggaataactttaaatctgaaaatacaatttcaaattaggatgttgttggaaatctgtcctacataaaccttaaaacttacaaacataaacttttcaattaccactaaatagactggtaaagatttgaaataaagaatgatatgttctaattgcattgttttggtagcagaaagtctttcaacaagaaaatgaaattatttctcatgtttcccctccctgcccccagccatgtcatatgtttggggttaattttataggtattgttggaaagggaacaaawtatgtttacttctacatactgaaagaatttctgaaagtgagattatctaagaataatagattccaaaactttccattttccctcctgagggctcctgcaccttaaaagaaattgtgtatacttaaggtgtataacatgatatttttaaatatgtagtgaaatggttgctacaaccaagccagataacacattcatcatctcaccgagttatctgtcccccacatttttttgtggtatgaaca

SEQ ID NO: 495089 - DNA, 615 bp, Homo sapiens
gaacagtagttttgggaaaatcttatcttctcagcaggctcttcagctacttcaaaggtattcataacactttaagcagtgtagtttctggggggaataactttaaatctgaaaatacaatttcaaattaggatgttgttggaaatctgtcctacataaaccttaaaacttacaaacataaacttttcaattaccactaaatagactggtaaagatttgaaataaagaatgatatgttctaattgcattgttttggtagcagaaagtctttcaacaagaaaatgaaattatttctcatgtttcccctccctgcccccagccatgtcatatgtttggggttaattttataggtattgttggaaagggaacaaaawatgtttacttctacatactgaaagaatttctgaaagtgagattatctaagaataatagattccaaaactttccattttccctcctgagggctcctgcaccttaaaagaaattgtgtatacttaaggtgtataacatgatatttttaaatatgtagtgaaatggttgctacaaccaagccagataacacattcatcatctcaccgagttatctgtcccccacatttttttgtggtatgaaca

SEQ ID NO: 495090 - DNA, 399 bp, Homo sapiens
cagctgctgctcagggaagtagtgtgaggctggcttcgagcaaggctagccattgactgcaccagtagtaggtcactgacacagagtgtgccacccagactctcgaaggagacctgagagatggcactgccttacagggatgaagttaattagctaattaccaacatatttgaagtagggaatctgtgggaagctggctttttggagtgagagaacattccagtcaagcagagatcccatgaaagtgacatagcaagaagagagagagagagagagagagagaaaragaaaactgtgcctggaacagtggttcttaatgggactggaagggattttgcccccaagggaatatttggcaaggtctggagacatttcagttgtcacacagtgtgtgtgtgt

SEQ ID NO: 495091 - DNA, 337 bp, Homo sapiens
cacttaaaatttcttaaattctattttatcctactctattaaatgtttatccattaaaaataaattgttaataaataataaatgkactttaacacagtaattctcaaagtgtgacctggggacacctgaggcccccatgattccttcaggagttccacaagatcaagacttttttcctaatcatattaaaattgtattatttcattcttattctctcagtgtttggtggagttttccagaggctttttgatgtgtgatattgtgagattgaattcagaagcaaatacgagaatccagctgcttttataaggctagactttaaagacatttgcaaacg

SEQ ID NO: 495092 - DNA, 581 bp, Homo sapiens
ccgaggtaatctaactgatgtaagaaattacaaaatactgaccttaattatattaaccgcaacaaataatgagtagaaaaggttaagatttatataaacttgtagaagaagaggcctggcaagcaggcaagatgctgcagttgtttactgaacatgaacaggagtggggagaagaaaatgtggtgcgctccaaaagcaagcaaaaaggactgtgtttcaaattggaccctccaattttataccttcgtcctcttccccacccctccttaacttgtgggtacacaaagaagtgcatgtgctacatctgtcttctgaggtcgctcacaatctcacttgttaaagaatgccatatctagaaagcatgaaaaaattagttacctaaaaaatgaaacctgaaaaaaattgataytaatgcaatggagaaaattgcttggtgaaaagaatgctgagtgaataaaagagaaaaaagagattaaaaaaaggacaaaaagcaggagtccctggaacagcattaagaaacatgatgccagagcatgacgttcaggtcacttacatggggattacttgcaggacttgttaaa

SEQ ID NO: 495093 - DNA, 524 bp, Homo sapiens
accgcaacaaataatgagtagaaaaggttaagatttatataaacttgtagaagaagaggcctggcaagcaggcaagatgctgcagttgtttactgaacatgaacaggagtggggagaagaaaatgtggtgcgctccaaaagcaagcaaaaaggactgtgtttcaaattggaccctccaattttataccttcgtcctcttccccacccctccttaacttgtgggtacacaaagaagtgcatgtgctacatctgtcttctgaggtcgctcacaatctcacttgttaaagaatgccatatctagaaagcatgaaaaaattagttacctaaaaaatgaaacctgaaaaaaattgatattaatgcaatggagaaaattgcttggtgaaaagaatgctgagtgaataaaagagaaaaaagagattaaaaaaaggacaaaaagcaggagtccctggaacagcattaagaaacatgatgccagagcatgacrttcaggtcacttacatggggattacttgcaggacttgtta

SEQ ID NO: 495094 - DNA, 394 bp, Homo sapiens
gtgggaaacatagcactgagaaaatttcaaatgaccctgtatcagagtacatttgttgaaacactgatgaaaaatgggtatgtacatcatttgtgagcacaaaaatatttaggaaagttagtctaattagtttatgccatgaaaagtggctgatttacatgttttatagtggcaaatctgcttgtttctgtttagaatagaaaatattaagcacacttttaaacctttaactttaaagtctaaaattgagtttatgcctaagaaataacattgcagtctctagagacagtaatttactatccttcttaattattggctaactacaatyttttaaaatcaactatgtttgaagaattattactcactgtgaccctagtttttgcaagagtgaaga

SEQ ID NO: 495095 - DNA, 605 bp, Homo sapiens
gctgcatccatgttgctgcaaaggacatgattacattcttaaaaaaagagaatctactaaatactaaacatctaartatcttaaaagcaatgagctaagaataggagagtttattgagagaacactattacattaaacaactataatttttgaagattacaaattttaaattttaaaaggcatttgaaacacattttttaaaaaatttgccttcatatatatttatttatttcatatttttagtagtctgaaaattgttacatgccttggatctgggcagtttgcagatgtactaatttctgcgtgtagacatcctagaaaaataagaaggctcgaagagacagtaacaaataattatacagccgttctgctttaacagatacagagcatgcatttcctttgtatagttgagtactaagttgaacaaagttgacttaggtacagttttttcttattgctatttggtagtccccacttatttatggaagtatgttctaatacacccattggatgcctgaaaccatagatagtattgaaccatgtatatatttatatattttcaatctgataaccaagatggctactttatgattaatgggctggta

SEQ ID NO: 495096 - DNA, 414 bp, Homo sapiens
attttgttcttcccaacccagctacttttgtggaattccaagagctgagaaggacctgtgycatctagcccagggcatcacaaaccccagcaaaatcacttagaatgttttttcaaagtacaattcccagaccccaccttacatttaacagttgtaaacaactcttgcttttgtctgccagggcatgattctcttcagagttccttcagagaagtctttcttctttccccactccatgtggttctactagggctacaaattctgtaaggcaggcctctctagaggtgataggacccaagataggcatatggtccaaactgggccaatcagagttatcttttgagatgtcagagtcagtggatgaaagaccaaagttcctcttctcccttggatgcctaatagaaaatgtggtta

SEQ ID NO: 495097 - DNA, 311 bp, Homo sapiens
tggttcagtggtatttcagattgtggtcttctccaktctgccttctagtgcttaaattaagaaagctccatgacttctgcctaggttttatagctacattcacggggagagacaggatggaatgtgcttacatggtcttacctggaaccggaactgctgcctcaaggattttgcacttattttcttccctgcttgaaataattttcacatagatcattgattatcaaactcctactcatatttcaagttttacctcaaatgtcacctgcccggagaatcctttcttgactgccctccttaaagtggccttc

SEQ ID NO: 495098 - DNA, 311 bp, Homo sapiens
tggttcagtggtatttcagattgtggtcttctccagtctgccttctagygcttaaattaagaaagctccatgacttctgcctaggttttatagctacattcacggggagagacaggatggaatgtgcttacatggtcttacctggaaccggaactgctgcctcaaggattttgcacttattttcttccctgcttgaaataattttcacatagatcattgattatcaaactcctactcatatttcaagttttacctcaaatgtcacctgcccggagaatcctttcttgactgccctccttaaagtggccttc

SEQ ID NO: 495099 - DNA, 444 bp, Homo sapiens
aagtcaagcaattttaaagcatgaaatgttaagcaaactcccttccccttaccccgcccccagcccttcatttccttccatakaggcagccactgctatcaatatctcataaatctttctagagatattgtgaggctaatgaagcataaatataaatatgcattttaaatgcaaaaaagttcatttttgttttacattttacagtgtgtaatggttttatttatagtatatagtaataacagctaacactaattatagcataatcacgtgctgggagagctgacatctaatggaaatctgccccaaaccaaaggccaggtattagccacacctttactgccttctttaggcatcaaacctaccctacatttaatgaggtcagcatttcccaaagcatggtaggtgcaatgattttacatggtacagagtgaacatttgttattt

SEQ ID NO: 495100 - DNA, 563 bp, Homo sapiens
ctggttgggtagtcagcaggttgtgaggtgggcctctagtagagtgcaggggctggccagtaggttctgctgcttgttgttcaggtccatgcactggctgccataagccccctcctctttycctactcctagctgcccccagatgattcagccacatggtcccctcagtgttctgcattaagtgagacagaaatgggtttcctgggcagcatcccacaagcctggggaatctggacattcactttgctctcactttccccatggcaaaaattgtgggctgagggagtctctcttggcactgagttacctcggaagagcagtgaggcgggtagaaggaaacagttcttaccttcctccatgcatctgttcttggcttttttgcctgaccaaccagttggaacctctcaagtggcttcctagactcctacaaaaatacttttgttcatggtagttgttaaaattagtgtttctgtgggagtttgagaactgaaaactccatttcaccatcctaatcatgtcacttcttaaaaggtatagttgtgtgatagtttgtatgtatagtt

SEQ ID NO: 495101 - DNA, 589 bp, Homo sapiens
cattctctgaccatgctatttactatggcaatgttccccaccccatcctggacagttattattgctctttcctgctttatctttctttctggtgctcaccacatctgacacttgcatcctttctcctctccctcttcttccctttcctctccttctcctcctctcctttccttcttgactttatcccaacacttgaaggtaagcctcaagagaagatctttgtctggcatatattagatgctcactaattatgtgttgcatgaataatagaaatatgtcctttaaggatgacaagtcagagtggggaagcaagtgtcctargccgcctgtgtcctcccctgctgctcacagctctcattgccttccagatttcaagcctggggaagagggggtgtgaatgacagcagtgcttgctgtagtgcagagaaaaaccctgcagactgggcaaatccctagaaaggcagagggaagggcttaggggagaaagagaagaccaactacacctgggccaaagcaagaggccatctaggtgtttgagacaggcaggagcagataatgtggtggtccccagcctcttctcccttccccc

SEQ ID NO: 495102 - DNA, 437 bp, Homo sapiens
ggtacggaagcaagatattgattctctaagccttcaggtcacccattcagcatttggagcagacacagagccttgtccactgactcaaatgtcctagacaatattacattgtcctctgtgtgttgtgatgcacagggttgaaatacactgctttatccttccttctactcccttcactatttcctcccactccttccttcctacttattttcctcttgtgcaatccttgcagccgtgagatcttttctgcagttgcagagatcagtgggtgagctgtggtctttccgacagaagttattctcatgatatgagtgacagcacattgagaacccccagtgcatgccrtatttaaagatccaaaatgcccttccttaaacagaaaaacttacccaagaaaagacagattgtgaaaatacttcagtagccattgtccccct

SEQ ID NO: 495103 - DNA, 559 bp, Homo sapiens
ttccttgactccctgtgtaaacaataacttttgtgtcaaggccaaatcatagtgtaacctttgtgaagtcatcttagccagcaagtaaactaaacacatgtattatcaaccatgcacctacttcaacaaatgttgaaaacataaaaagctgaaactgtgtacactgtgtacatattcatagacaaatccattacaaccactgcctggctgacagcaatttataagaagctgtcccaccagcagcagtgatcacagattcagacttgtaatcaattcacaagacacaataggttttaatctatcactgcctttatttagctttctagtaggaaacagaatgggaaacacagcttgcatagtatctgctatctcgtaggaaggcccagcaactacccacagttgcagactcttggcctcccctctgcgcactatggtgcacatagttgccaaagatgaagrgtgtggttcaccctacccaggagaaaccactgctttggtttccttctggattctttcttgctccaatcatggaggcccaaggccactgggcaactcatag

SEQ ID NO: 495104 - DNA, 460 bp, Homo sapiens
gaaatgtgtagtgaggttgtttctcgtaacatcttgacaccatgtgagaacgaaagcaacaccatggaaagcagagtggagaaatggaaagaaacagatcctttgtaacacttccaaattaccagatcaagacttgcccaaagccatatctaactctggatttttcagttaggtgagccaattaattgscttttttctccttattaaataaggttgaatgagctctcctgtgtttaaacagaaagaatctcaatggaaacaaatgacttccccttgttgatattagagagatctgatgatatgtatcctttgggtgggcaattggccacacaagctacaggtgcattggtgtgtggcttcttaaaaggagggatatgaaataatcacaagccaaatgactggagtcaaagccaacacctgagcagaggagaaatggtattccaaccaagggatcatagaa

SEQ ID NO: 495105 - DNA, 500 bp, Homo sapiens
tcatattctgttttttgagatggagtctccactctgtcacccaggctgcctcccagattcaagtaatcctcctgtctcagcctcctgagtaactgggattacaggtgcaagccaccacgcccagctaatttttgtatttttaggagagatggggtttcaccatgttggtcaggatagtctcgaactcctgacctcgtgatccacccgcctcagcctcccaaagtgctgggwttacaggcatgagccaccatgcccggccatcatattcattttttttatcactccaaacctagagtagcgccttagtataaggcagaaaatacacacacacgtacttgagaacctagcgggtttacagggactgtacctctaggttgtaccaatccttttagagatgcattatccctaccgtgcaaggagaaatcatgcagcttctccaaagtcacaaagtttgtacagggcagagctggaattcaagctggagtcagtgagcacctttc

SEQ ID NO: 495106 - DNA, 500 bp, Homo sapiens
gaacccaaaccccagcttgggccttggactggcaagattctactatgtcatctctggaaatccaagtgaagcagacaaaacccatgtctgtggcagcagtttgcaaggctttgggataacctatctgtctataaatccagttagtcatctattggccaaatcaatgtacttgaaagtgtcggatatattttccattaaaaaaattacatgtttcaaaaatatctaaatctaaataaccaaaatctcattttgattacccaaagagtaataatagcaaycataaaaataagagcagctactatttgtacagcacttacaaagtgtcaggcactgtgttcagtgaaaataatgacaacatgttgtaccagagcttgtcacattttgtgtgcattttttaattcttctccaacttcaaaacactctagttcaagttaatagaaggggtgacagtggatatgtgaaaggaaaaatctcactcacgaggctccctgctccccttc

SEQ ID NO: 495107 - DNA, 571 bp, Homo sapiens
ggattacaggcactcgccactacacccagctaacttttatatttttagtaaagacagggtttcactatgttggtcaggctggtcttagactcctgacctcaggtaatccactcacctcagcctcccgaagtggtgggattacaggcgtgagccaccacgcctggccaaaaaatatgcatattttaaatatgcatattttatttttgtattttttcatgaaggaaggtcaaataacaaaacaggaaaaatcctttttaagataagtgaactttaaattttcctcaaaaaaacttataattcacacctgacccaacatttcatcatccagtttttgttttgttttgtttttttgagatggagtttcgcttttgttgcccaggctggagtgcaatgccacgatgttggctcaccacaacctccacctcccacgttcaagcgattctcttgcatcagcctcctgagtagctgggatwacatgtctgtaccaccacacctggctaattttgtatttttagtagagatgaggtttcaccatgttggtcaggctggtctcaaattcccaacctcaagt

SEQ ID NO: 495108 - DNA, 591 bp, Homo sapiens
atcccaagctcacaggaataaaaaaccacctgccagttgtttccgttttccacctatgtctaatttatgtacttatatttataagaaacaaatcactaagtcttatttcatccttagttatgttgtgtttctatcgataacagcatgaagatttcgggsacctggacattaaaataagtttgagtactggctttacaatctactaggtgtgatccgaggcaagtcagtctcttcatgtttcacttctttcacttgtaaacatctattcagaagttgctgtgaacttgatatttccatgcttataaactgattttttgaaaagagcctggtacataggacgtgataataaatgaaagcatttgctacttttggaaaaacaagcatgacaagatagtttatatactgttgatcttaagcacagtatatgcatcttatttttagctagtctgacagtgagataataaaaagagttatctttgacttgcactacgagtagaagaattcaacttcagtttctagaaagatgtataagaattaagagtggcagtcttcctagtctcaactgccatcttcccaccaggtggtaaattc

SEQ ID NO: 495109 - DNA, 591 bp, Homo sapiens
atcccaagctcacaggaataaaaaaccacctgccagttgtttccgttttccacctatgtctaatttatgtacttatatttataagaaacaaatcactaagtcttatttcatccttagttatgttgtgtttctatcgataacagcatgaagatttcggggacctggacattaaaataagtttgagtactggctttacaatctactaggtgtgatccgaggcaagtcagtctcttcatgtttcacttctttcacttgtaaacatctattcagaagttgctgtgaacttgatatttccatgcttataaactgattttttgaaaagagcctggtacataggacgtgataataaatgaaagcatttgctacttttggaaaaacaagcatgacaagatagtttatatactgttgatcttaagcacagtatatgcatcttatttttagctagtctgacagtgagataataaaaagagttatctttgacttgcactacgagtagaagaattcaacttcagtttctagaaagatgtawaagaattaagagtggcagtcttcctagtctcaactgccatcttcccaccaggtggtaaattc

SEQ ID NO: 495110 - DNA, 611 bp, Homo sapiens
tttttttttaatagagatggggtcttgctacgttgcctacgctgttctcaaactccttggctcaagtggtcctcctgctttggcctcccaaagtgctgggattatacgcatgagccaccatgcccagcctgaacatgctcttaagaaaaaaaaaaagatgaacatctgtctttcctaatgatatttaaaaaattgctactaaataataaagtktaatatatgctttttaaaaagtccattgtaccaaagggtatttaggctatacaaatccttgtgttcccaggtttcctaatagcactctaaaaggaataactgccactgaattccttatgtaaccttctagaaactttcattacaaatatttattacaaatatttaggtgagtaatcaggcacatcactgtttaaggaataatctgttacacaggatttatatatagaatatcgctggaaagatacacaagaaactgatcacagtatttgtttctgaagcaaagaactgagggaatggggataagagagtgctgtttttcaatgtacacttgtcccttggtatccgtgggggattggttctgggacctcctgtggataccaaaatctgtggatgctcaa

SEQ ID NO: 495111 - DNA, 623 bp, Homo sapiens
tgggggaggggtaggaatgccgtcctcaggatctgaaacaagcacgtctaagacgtccggctgaggtccggccccaccccctacccaaccagggagctgtccgggccaggagtgctgtttcgcctttcggcaagaggtcagcggcaacgcaagctctctaccacgaccctggtcccgcttccccgacgccccgagcgttcccctttccagcttgttcgcgcttctgtccctcccaaggacactgcagcacgagatgggacggcattcttaggcggcgggagcagaaatcctgcctgagtcagcgcccgcacctcctccacgccggcctgagccaggcctctgcagccccttcctctcagtactcccgcacccctctccctttttggtttckcccaccctgaccacctggccgacccggtaccggtgatttggttctggttccggcttctgctggggttccggctccaggggcgtcctagtgcggctcagggcccccgacgcccttccggcgctcatcccttgattcctcccctcccccttcgccgcctcaccggccccgggctgtggctgcggatacccgcgccgtggcaggcggggggagggaagaacagagaaggatgcgg

SEQ ID NO: 495112 - DNA, 543 bp, Homo sapiens
gagcatttgaagagctttgtaggaaatgtttttaactcctaggcttaaattcagattattctgtagcacagaaaaattttataaygtatctgaaacaaacaggttatatgttagccttataaataacttaaatttagttatatcttttatctttctgcatttctgtaggctgtcaaaatgagacagtagctgactggagaagtagatgtcctgtctagagagtatgtgccttgggtaccttcctgctctcaggctcagccattctataagtgtctgaaagtaacagagcctttggattagtaccacttggtgtatgtctttcatctgttcatataatatgtgcagcttcttgctttcttcaagtcttcagagctttttaactaaattgtttgatgagaaatatagcaaatggcatatttaaaatctttctcttgttttatcaaacttttgaacgactttagattcacaagattcatcgtgattcaggagacaattctcagacaggtgagaatacttcaattgaactctaacatacttaggagg

SEQ ID NO: 495113 - DNA, 615 bp, Homo sapiens
tttttattttacctctttggcctaaagttttcataatttcaaatttggggtttagtgtcctttatttcatgagtcacacactttgttttcagagcacattaaaatcaggatgccagaatcccatattaaggacctagctaacttgcctaggcttcagaagcttgcttgaggcaaggacaatctttttctgatcatctcactttcagttctatttggtaagtaacatttatcaggtgtcagacatcttctatatgaaatatttacagcttactcagttttatgtcaaatttcttgttaacttcaaactttttattagtaatgtgcaaatgtttaaaaatgctttaagacagctaggtactaaagcgtcaacaatttctgctctttaccagtgtaatctacggtataatcttctggcctgcgaactagtctattcttccacatagtcaacttgttagaaatacaggctttcagatgatatgtgtatcagatagtttatattatataaactattataactgcctcttacacagagttgtttacttaaatgtcatgtgctgaggrgggccgtattaggaaaatgcaacactctctaataatttccgtgactagtaagag

SEQ ID NO: 495114 - DNA, 559 bp, Homo sapiens
ttcatgactcaatgttgtttggatttaaagtagtcatataagcctttctcattcagtcttcagttcctgtttttagagctgcttggtgatactgggcactacagatttaattgcaaggccttactgcactgggcctcagtttcctcatttgtaacattatgccactggtctactcagatgaccttaactcttccagtctttgtaggtagttgtggaagcaactgtcaaagctaaaactagtaaaagaacttatggagattccctttagggtatatttgtagtatatttgtataatgaacaaataaatctgtaggttttctgtaagaagggtcagtctgctaacatctgtcacgttgccctttcttcatcagtagkttaagaatttcaatctttaatgtgtagactactttctaatatttttattttttagcaccaaaaggagaaaacatattgttacaaggctggttatagtgtctcaatggacactgcaaagaactacataaaagaagtctgtctcaagcagttcgtatttgagtcagtggtcagatggggcagttgc

SEQ ID NO: 495115 - DNA, 517 bp, Homo sapiens
tgcaagctgctgtttttctcttaactcccaaatgcgtacactgccatcttctgagcatgagattaactgcctgtcagaacagaaaatcagtaatacaaaaagagcgcaccactgagggccaatgctaaatttgcagtgaaagaaatcagtggagccctcaactgcttttattcagctcttagcaggaactgacaaaaatyacaatttagcatgacgttacaacgcaaactaaaagcaccctttaggaaagccacatgttactcgttacattagctcaaatgctataaattgattctctccatttaaaaaaatgcccttgggaaaacagtgtgaattatacttcacaatgtcctaagcagcccccttccctcctcttgctacctctcttctctgggtgcttcactataaaaatatcctgcatagaaaataatgatagtccctgtccatatgttcgtccctagaagctcagcagcaaatctaccctgacaggaaaccactcacttagtagcctcacaca

SEQ ID NO: 495116 - DNA, 572 bp, Homo sapiens
atttggtggggattttacttctggatttgttcctcttgacatgaaaaacatatattctctgcttcacatcaaaaatgtaggcttacttttaagtagctatatttttaaaatctgwgtcctgtttttgatctagtttttattatatcttgcattttacctgccatttctcttctttctcttttgttcattttacaggaaatgggagatcagagatgctcagattttttcagcgtagtttcccctaacatcacagctctctcctgtctcttttattcacagtgagacactaaagacttcccagtgagcaaatttttcacataggtgaaacttactccattaaccgctaaaactttgaagaatgattattttaatcactctggaaatacatttcacagttccttcatttgcaaagtaaactatgcataagatgtacatagaatgtatgcctatctttcacagagtcagagccagcctagtgagctttcacttttgtccatggtttggaggctgttgagctaatcagagctgttttcctgggcaccaaatgctcttatgtcttgcctctgcctacc

SEQ ID NO: 495117 - DNA, 768 bp, Homo sapiens
tgtaatgcccaacaagagaattgttatattcttactgtattagtcaaagattgaggcataatggtgtcaaggaaatataaattgctgagattcttgtttagaaacccataattcagccakacaggtgagagacaagaaatgtttcaccttttttgacttctaggtttggcatattgagtttcttgtgttaataccacagctacaccaagtaaaaggttattgactttttgcaccaaccagtttattctacctgatttttctcattcaggcttccttgttaacagtttgatttgaaggctttcattatcaaaatccacaaggttgtgtccttcatttttcttgggagagccacctcctgtttcttcctggaaggaactctgtggctggaaatgttaggagcttcctgggctgaagaagttcagaccctagccagtccagggtgctcctaacaaatggcatatataatatatccagatatttattgatattaaggaattattggggaggtttagatatgaaatgatattgtggtttgttctttttaaaaaatctttatctttcacagatgcatatggatgagataaaatagctgtatttgccaccatctattataagagctaggaaaatgggtagggatagagatgaactcacattggctaggagttggttattgctgaagccgggtaaggagtacgtgagtttcattatattattgtttctacttttctatatacttccaattttcaattaataaaagtatttttcagc

SEQ ID NO: 495118 - DNA, 634 bp, Homo sapiens
tcttcatgtggtggttctccttttttgggcaaaatcctgtctttcacaactctcttcccaagcaccttttcaaatatgccagttatctttgccttccatgaagttgtttcccatctctgagctggtttgattgtattagattatctgctgaaactcacccctgtgttgctagctaattggctggtgcttcagtctgtggtccctgagtggggatctaggaacaaattgtgccatcacatatcccacaacaactccccttgaaggctctggagctatgtgtaagcagccgactatatagatgctaattccatgctgagccttttagaaaccagcatcttagcaaaggacagttgcaactgtttttatatcaactttatgtgcctctttttctatttgcaaaaatatttgttcaatttaacaagtgtttatggagttctgcctctgtgcaatgtgctaggcatgccgggggcacaactgtaggacacagttctctgtggagaggccttttgtggagtaggaagtggggagctacgatttattgtcaggcccagttcccagtgatttacttaatcctcctctacatatgagggatttgatattttctccwtttttgcagaggaggaaacaggctcaa

SEQ ID NO: 495119 - DNA, 331 bp, Homo sapiens
tgcatgatttcatgggacacgtaatcgcccctgtggtcaacctcgtaggcagagaccaggtcatattctgaaatcaaaagagtgagsagaggctgagtcatttcggaattccgagaagaatcaggaagtcttaagatataatattattttaccacatgacctttccacccagtcaaaaatgatgaagaaaaatgcaacacctacccatactgaattcaaagtgtgcaatatggaacatcacagtttaaagaaaaaaattgtaacaagggccccataatgtgctattaccaagccaggaaattctccaacagtgatgcggtgatgttaacag

SEQ ID NO: 495120 - DNA, 635 bp, Homo sapiens
tgtcatctgccctcccagccactcaggggcatgctcctcacctcccaccagctcctaccactgtagctgagtcaggggaaggatgacagaaagcaggatggcttgttccaaacagtggaaggttagcacattttattgtgtataaaaaggtgattactctttaagaaatcaaattattctcagatgaaataagtcatattcttatgacctttattttgaagagagaaaatattcgtcctttaytgggggcacatataatatttatcatgcaaaataactactggtaagccatgtttacataaacacaatgctgtggtaataaacattcaacaacccgctgtctggagaagaacgacctggattttggcatttgccaatttccctggtgtaaatcttcccctcatggctgatttcaatgactgctgtgccatcactgaatattcagtgcacagagatacgcagcagcccccagtgtgtgatatttctaccatacagatgcaaaagaggccagtggcctcaagagcctagattattatcaaatatagtgaaataattatgaaatgatgagctttgagtattgcaatgtttttaatataattaatttcactgtaaatgtatgtattttaattattctc

SEQ ID NO: 495121 - DNA, 604 bp, Homo sapiens
ctttctcttgtaaattcactgtgacaattttttttaacattttatatcatttgcacctagcgccccctggtggttctcaaaaaggtactatggtgagcgtcaatctgayaccggtcaccttatatactatttgtgtactcatttggcagggaataatttcaaaagttaatgcatatattaagtgcttgcctttatgttattttatcaaattgaaataactatactgagaaattctgaattgttaactttaattttctagatcttctggaaatacattgagagaatgaaacctagttcttcctataaaagtcaattaatattaacatttgatacggcaatttattgttggtaacaatgcaaaataatatttattaactgtcattggatgggttcaggttaaaaaaccacctagcaaccagtgcgacacacctgcgttctcatttacctgatgcagtatgaagacacagagatccctttccataagacagcaaatttccaaatgtcacttgtaagtggcagaagtaaaagcatgcattgaaaaagaataagacttgccctcatgtcaaattgtggcccaggatatgaacgttgctgatggtgtcac

SEQ ID NO: 495122 - DNA, 571 bp, Homo sapiens
gtccaagtccaaaggcctcaaaactagggaggctgatgtgattctcagtatgaggccaaaggcctgagaactttggagggccactggtgtaattattggagtccaaaggtcagagactctggagttctgatgttcgacagcaggagaaaaggaacatgccagctctagaagagagaaagaggaaatcaccttacttatccctggtttttttttttctctatccaggcccccaattgattggatggtgcccacgtgcattgagggtggacctccttcactcctcccgacgactcacaggccagtttcctccacgagcaccctcacagacacaccagaagtaaagccttaccagctttttacatatttcttaatccattcaagtygacacagttaaaaactgactgggaaaaaaaatgtaacctcaataccctaaaagcttggagagtgactgaaaccttgcctatgtccaggtgagcttttattaggaaacaaatatttttcacgaataatgtaattcctggctcagcacctgcttcagtagatgctatgtctgcctagttcgggctaaagt

SEQ ID NO: 495123 - DNA, 571 bp, Homo sapiens
gtccaagtccaaaggcctcaaaactagggaggctgatgtgattctcagtatgaggccaaaggcctgagaactttggagggccactggtgtaattattggagtccaaaggtcagagactctggagttctgatgttcgacagcaggagaaaaggaacatgccagctctagaagagagaaagaggaaatcaccttacttatccctggtttttttttttctctatccaggcccccaattgattggatggtgcccacgtgcattgagggtggacctccttcactcctcccgacgactcacaggccagtttcctccacgagcaccctcacagacacaccagaagtaaagccttaccagctttttacatatttcttaatccattcaagtcgacacagttaaaaactgactgggaaaaaaaatgtaacytcaataccctaaaagcttggagagtgactgaaaccttgcctatgtccaggtgagcttttattaggaaacaaatatttttcacgaataatgtaattcctggctcagcacctgcttcagtagatgctatgtctgcctagttcgggctaaagt

SEQ ID NO: 495124 - DNA, 631 bp, Homo sapiens
ctgcagacagcctattgtgggacctcaccttgtgattgtgtgaatcaatactccttaataaattcccctttataaatacatctatcctatcagttctgttcctctagagaatcctgatcaatacacagtgccatatgcagcttttattccaaygaagttaaacctgagaaagaggccacacagttggttctcctctctgctcctcagaggagaagtccacttgccttcctggtgactgacaggctgtgaggttcctgtttcattgtcggtcaccatttttccaccccaaactcaacaacaggtcgggacacacagaagctcagagaagtgtgcacgtttctacactgctggacagctcaatgctcatgtccctggagctctccaaggttgaccttcatgtctcgcaggaaggacatttcagccagccttcgtcccccatagagcagagcctggggtgagaagtaggtgccagtccttcatgaggtggtgagggtggtgagacaagaacactgtgaagcagaagtggtgtgatgtccagcattgcccctgctccaggagcccccaggaggcccaccagcctctcagcaggtggccctatggtccataggacttctccaggagagctgaaggg

SEQ ID NO: 495125 - DNA, 631 bp, Homo sapiens
ctgcagacagcctattgtgggacctcaccttgtgattgtgtgaatcaatactccttaataaattcccctttataaatacatctatcctatcagttctgttcctctagagaatcctgatcaatacacagtgccatatgcagcttttattccaacgaagttaaacctgagaaagaggccacacagttggttctcctctctgctcctcagaggagaagtccacttgccttcctggtgactgacaggctgtgaggttcctgtttcattgtcggtcaccatttttccaccccaaactcaacaacaggtcgggacacacagaagctcagagaagtgtgcacgtttctacaytgctggacagctcaatgctcatgtccctggagctctccaaggttgaccttcatgtctcgcaggaaggacatttcagccagccttcgtcccccatagagcagagcctggggtgagaagtaggtgccagtccttcatgaggtggtgagggtggtgagacaagaacactgtgaagcagaagtggtgtgatgtccagcattgcccctgctccaggagcccccaggaggcccaccagcctctcagcaggtggccctatggtccataggacttctccaggagagctgaaggg

SEQ ID NO: 495126 - DNA, 631 bp, Homo sapiens
ctgcagacagcctattgtgggacctcaccttgtgattgtgtgaatcaatactccttaataaattcccctttataaatacatctatcctatcagttctgttcctctagagaatcctgatcaatacacagtgccatatgcagcttttattccaacgaagttaaacctgagaaagaggccacacagttggttctcctctctgctcctcagaggagaagtccacttgccttcctggtgactgacaggctgtgaggttcctgtttcattgtcggtcaccatttttccaccccaaactcaacaacaggtcgggacacacagaagctcagagaagtgtgcacgtttctacactgctggacagctcaatgctcatgyccctggagctctccaaggttgaccttcatgtctcgcaggaaggacatttcagccagccttcgtcccccatagagcagagcctggggtgagaagtaggtgccagtccttcatgaggtggtgagggtggtgagacaagaacactgtgaagcagaagtggtgtgatgtccagcattgcccctgctccaggagcccccaggaggcccaccagcctctcagcaggtggccctatggtccataggacttctccaggagagctgaaggg

SEQ ID NO: 495127 - DNA, 635 bp, Homo sapiens
ccgcgcccagccggacagagtatttaagttagtatgatgcatatcattgggtaagcattcaacagaattcgttgttgcttttattatatactactattgacaatagtagtaatacataggagatggcggaggtagtggtgataatgctggaagtggtgatgatggtggtgatagyggtgatggacgagatggtggcagcggtggtggtgagatgtttttgtagagcttggccactttctggggtcttcctatggatctttgccaaccttctcactttgactctcccctgtgcccacatttcgaagcacactttcctgagcaggaacttgaagaggaagatcgtgagggaaagggctgggggcttgagaaatggctcccaagtcacagagagggacagaagcagagcaggagcagacgctaagctaacaaggcctgggcttgtcaataagaggtacttccatgcttgctttattttcctctttaaatctctttccatcgagagccaggaagtgcttctcaaatgttccttgtatgaagaaaacagtcaaacattgtcttctgagctcttcactgccctgggatggcctggcatcagggcctaagggccctgaggggctctaagctgtggcccagca

SEQ ID NO: 495128 - DNA, 635 bp, Homo sapiens
ccgcgcccagccggacagagtatttaagttagtatgatgcatatcattgggtaagcattcaacagaattcgttgttgcttttattatatactactattgacaatagtagtaatacataggagatggcggaggtagtggtgataatgctggaagtggtgatgatggtggtgatagcggtgatggacgagatggtggcagcggtggtggtgagatgtttttgtagagcttggccactttctggggtcttcctatggatctttgccaaccttctcactttgaytctcccctgtgcccacatttcgaagcacactttcctgagcaggaacttgaagaggaagatcgtgagggaaagggctgggggcttgagaaatggctcccaagtcacagagagggacagaagcagagcaggagcagacgctaagctaacaaggcctgggcttgtcaataagaggtacttccatgcttgctttattttcctctttaaatctctttccatcgagagccaggaagtgcttctcaaatgttccttgtatgaagaaaacagtcaaacattgtcttctgagctcttcactgccctgggatggcctggcatcagggcctaagggccctgaggggctctaagctgtggcccagca

SEQ ID NO: 495129 - DNA, 514 bp, Homo sapiens
gtgtgtacacagacaacttcaccaagggcactcttttgaaacttgaaagagaatggacttctggcaattaaagacagtgcygctttatctatgaaactccctatttctgagatgcaacagggcaaaattactagaatcaaaacaggacaataaaagcatgggctattctagggaggaatgaagacattgtggtttacagcttctcctttgagaatgatgtctttagggtcatcctgcactgcctcccttttcaagccccactcttccccacctgtgttctttgtccctttgagggacaaagcattaaaaactgagcactaataaagatgaacaatgtgatccaaaaggatatactcttgttttcaaaactctaagcaaaaggcctcacacatagtaagtgcctaacattgatgtaatctggggaagaaaaacacaaggaaggtcatctatcatggctgagattcaccatacaacaaaagtacttatcaaaaatgaacataggtacaagcttctg

SEQ ID NO: 495130 - DNA, 423 bp, Homo sapiens
gacacaaggatgggtgagactggttgcatagcatggagttgggtaataggagaaaatgcaccccttctcctcccctgagatgaaatttcagttgttcccacagtatgttttcattgtacagtagatgcaagagctccagctagtgtgagaaccgagctcagataagagaaacacagtgatggcacggttcctgcagggctcccatgctattttctcagcattamggaaacccaacaatgtctaaacagctgaccttgtggtgtgttggtaggtttgcacaattcccaggggtcatattagcatatgcatttcaagggagagatcaagtcaactttggaaaaagcaagacgtcggtacatttaaaactcaccttccatctacattctccctgaaccacaagagagcagttactaaagtatccct

SEQ ID NO: 495131 - DNA, 423 bp, Homo sapiens
gacacaaggatgggtgagactggttgcatagcatggagttgggtaataggagaaaatgcaccccttctcctcccctgagatgaaatttcagttgttcccacagtatgttttcattgtacagtagatgcaagagctccagctagtgtgagaaccgagctcagataagagaaacacagtgatggcacggttcctgcagggctcccatgctattttctcagcattacggaaacccaacaatgtctaaacagctgaccttgtggtgtgttggtaggtttgcacaattcccaggggtcatattagcatatgcayttcaagggagagatcaagtcaactttggaaaaagcaagacgtcggtacatttaaaactcaccttccatctacattctccctgaaccacaagagagcagttactaaagtatccct

SEQ ID NO: 495132 - DNA, 407 bp, Homo sapiens
accagttcccactgacccagtccctgctgaccaggtaccactgaccagttccccaatgacaaggcccccactgaccaggccttggatgaccaagtccctgttaaccaatcctcccagaccaggttcctatttttttktttttttgtttttggactttactttttttttttttttttttttttgaggcagggctcactctgtcgcccagactggagtgcagtggcacaatcttggctcactgcagagttgatctcctgggctcaagcaattctcccacctccacctcctgagtagctgggactataggtgcacaccaccacacccagctactttttgtatttttagtagagagggggtttcactgtgttgcccagggtggtatagaactcctgagctcaagcgatcct

SEQ ID NO: 495133 - DNA, 407 bp, Homo sapiens
accagttcccactgacccagtccctgctgaccaggtaccactgaccagttccccaatgacaaggcccccactgaccaggccttggatgaccaagtccctgttaaccaatcctcccagaccaggttcctatttttttttttktttgtttttggactttactttttttttttttttttttttttgaggcagggctcactctgtcgcccagactggagtgcagtggcacaatcttggctcactgcagagttgatctcctgggctcaagcaattctcccacctccacctcctgagtagctgggactataggtgcacaccaccacacccagctactttttgtatttttagtagagagggggtttcactgtgttgcccagggtggtatagaactcctgagctcaagcgatcct

SEQ ID NO: 495134 - DNA, 407 bp, Homo sapiens
accagttcccactgacccagtccctgctgaccaggtaccactgaccagttccccaatgacaaggcccccactgaccaggccttggatgaccaagtccctgttaaccaatcctcccagaccaggttcctatttttttttttttttgtttttggactttactttttttttttttttttttttttgaggcagggctcactctgtcgcccagrctggagtgcagtggcacaatcttggctcactgcagagttgatctcctgggctcaagcaattctcccacctccacctcctgagtagctgggactataggtgcacaccaccacacccagctactttttgtatttttagtagagagggggtttcactgtgttgcccagggtggtatagaactcctgagctcaagcgatcct

SEQ ID NO: 495135 - DNA, 407 bp, Homo sapiens
accagttcccactgacccagtccctgctgaccaggtaccactgaccagttccccaatgacaaggcccccactgaccaggccttggatgaccaagtccctgttaaccaatcctcccagaccaggttcctatttttttttttttttgtttttggactttactttttttttttttttttttttttgaggcagggctcactctgtcgcccagactggagtgcagtggcacaatcttggctcactgcagagttgatctcctgggctcaagcaattctcccacctccacctcctgagtagctgggactataggtgcacaccaccacmcccagctactttttgtatttttagtagagagggggtttcactgtgttgcccagggtggtatagaactcctgagctcaagcgatcct

SEQ ID NO: 495136 - DNA, 402 bp, Homo sapiens
cttcacatcctgatggtttggatgtatccagttgaactacagctgctttatgccagtgttttgtaaataattttcctgattgtattgggtttctttttttatattttctttcttcttttgagatggagtttcactcttgttgcccaggctggagtgcaatggggtgatctcggctcaccgcaacctccgccttccaggttcaagcgattctccttcctcagcctccctagtagctgggattacaggcatgygccaccacgcccagctaattttgtatttttagtagagacagggtttctccatgttaatcaagctggtctcgaactcccaacctcaggtgatccgcccgcctcagcttcccaaagtgctgggattacaggcatgagccactgcgcccggcct

SEQ ID NO: 495137 - DNA, 629 bp, Homo sapiens
gctgcctagtcagccggggcctagtcacggggagcccagtcagtaaggcctggtcagtggggcctcatcagggggggacttttcagtggggtcctggtcatcagggcccattcagtgagggccaggtcatggcagaggcccagtgcatggggccctggtcagcaggggcctggtcagttggacccagtcatcccaggactggtcctcaggggccactctgacttcacgggctcccctgaccgtgccagtcctccagcctatagccaatggtgtcctttatatctctcccggcacaggcccaggacrtggagatgcccgatgctgggaggaggcacagacagcaggaaggagagaaggaaggaacttccatagtatggatgcctacgaagttacaacacgtggttccatcgccatgttctctgtttatttcccacataattctctattctaaactggcctcagttgagcacaaaaccatccttgtactaccacaaatagttggccatggctctttgatagcagtttttattctgctgtggaaattatccttgaactggaaaaagtccccaatccaacatccagtcactcaacactctcatctttataaagagctgctttcaaattctaca

SEQ ID NO: 495138 - DNA, 542 bp, Homo sapiens
acacccctgcctaatcctcccaagagcttgtccctgaaggagaaaactggaaagatgcatcatgctccgtggacctacctgtcccctcttcaaagcaggtggtatgaaattttcccatataaaattctaaccctatgattgcaaaaataaggattgcaaaaaataggaggaggccgatctgcagcaaagggatcatcgccttcatgatcgacttcaggacgacttgtaaacctggggggacacagagagaggccccataagcccatgagcaagtacccccaaaccccgccaccaagacgcccaggtctctcccagacaaagcaggtgtgttcctgagggaayattaagcacccaggagcctggggattgggcaatggtgaaggaagcaccacacggaggctgatccttatcatgggaacaacacttcctaggttttttttttcctttgagacagggttttgcactgctgcccaggctggagtgcagtggcacaatcacagctcactgcagcctcaacctcctgggctcaggtgatcctcctg

SEQ ID NO: 495139 - DNA, 577 bp, Homo sapiens
tgcctgtttttgtataaaaatgtatgggaacacagcagcatctatttgcctaggttgtttctgtggctgcttttgccctatgacaccagagttcagtaactacagtagagacctagggcttgtaaagcctgaaatagcggtgcctttacagaaaacgtttgtcaaacggcggggcgcggtggctcaggcttgtaatccctgcactttgggaggccgaggagggcggatcacgaggtcaggagatcgagaccatcttggctaacacgcgtgaaaccccgtctctactaaaaatacaaaaaaaaaattagccrggcttggtggcggccacctgtagtcccagctactcgggaggctgaggcaggggaatggtgtgaacctgggaggcagagcttgcggtgagctgtgatcgcgccactgtactccatcctgggtgacagagtgagactctgtctcaaaaaattaaataaataaataaataaataaataaataaataaataaatagtaaaaaagaaaacgtttgctaatctgtaaatagagtatcagtcaaggtagccatttatctcgtgacactgaata

SEQ ID NO: 495140 - DNA, 577 bp, Homo sapiens
tgcctgtttttgtataaaaatgtatgggaacacagcagcatctatttgcctaggttgtttctgtggctgcttttgccctatgacaccagagttcagtaactacagtagagacctagggcttgtaaagcctgaaatagcggtgcctttacagaaaacgtttgtcaaacggcggggcgcggtggctcaggcttgtaatccctgcactttgggaggccgaggagggcggatcacgaggtcaggagatcgagaccatcttggctaacacgcgtgaaaccccgtctctactaaaaatacaaaaaaaaaattagccgggcttggtggcggccacctgtagtcccagctactcgggaggctgaggcaggggaatggtgtgaacctgggaggcagagcttgcrgtgagctgtgatcgcgccactgtactccatcctgggtgacagagtgagactctgtctcaaaaaattaaataaataaataaataaataaataaataaataaataaatagtaaaaaagaaaacgtttgctaatctgtaaatagagtatcagtcaaggtagccatttatctcgtgacactgaata

SEQ ID NO: 495141 - DNA, 540 bp, Homo sapiens
acattgacatcagaatcttgttagacatgcggaatctcaggtccatcccagaactcctgagtcagaatcttcgtgttggccagaccctgaagccacataaatacacatcaggttttgagaaaagctgctctgagtggtccattgattgtaaaaattggtgcytccatgaagccagagatgaagtttccttaagtgagaatgctgatgtccagagcagagtcttttgccagggacaggaagcttcatgggctaccatggaaaggaagagttgtgctgggtgttgggcttagctagggctgtgctaccccacatctgctggctcacactggacctctgtgccatggccaaggctatggggtccttgctgcctgaggtccagtgactttggctcattcttcacaatgaagccagcccggggaacattttcttctggggcatctgtgagctctaaatcccaccctaggtggaaggagccatgagatgatgtccccttagcacttcaaggacattcctgagtataatttacattaaagggctgtt

SEQ ID NO: 495142 - DNA, 540 bp, Homo sapiens
acattgacatcagaatcttgttagacatgcggaatctcaggtccatcccagaactcctgagtcagaatcttcgtgttggccagaccctgaagccacataaatacacatcaggttttgagaaaagctgctctgagtggtccattgattgtaaaaattggtgcctccatgaagccagagatgaagtttccttaagtgagaatgctgatgtccagagcagagtcttttgccagggacaggaagcttcatgggctaccatggaaaggaagagttgtgctgggtgttgggcttagctagggctgtgctaccccacrtctgctggctcacactggacctctgtgccatggccaaggctatggggtccttgctgcctgaggtccagtgactttggctcattcttcacaatgaagccagcccggggaacattttcttctggggcatctgtgagctctaaatcccaccctaggtggaaggagccatgagatgatgtccccttagcacttcaaggacattcctgagtataatttacattaaagggctgtt

SEQ ID NO: 495143 - DNA, 636 bp, Homo sapiens
attttttccacagttttcttactttctgttaatttcaccactcttagttggtgagttgcccgatttattcataaattttcagcccctggcaaggtggatgacctacagtaggtgctcaatagctcaataaamagttgctttatagttcaaaggtctttaatggccttttggttattgagagagtattttaaaattttggaattgaagttggcttgaagaatgttctctcaaaaatgttggaaattaaatatcttatgtttccaataaacattattcaggttccctgggaaaccgactaagatacggagaatagtttattggggatgttcttgaggccaatactggaggaggggtgggggtgggtttggagaaaaaggagggagaagagggagaggggcaagggatgggaagggaaagagcctgcaagcctggcagagggagaagttgggctgtggtgtagtcacaaccaagactacagtggccctgtagggaggctctggaggtgggagagcccttcaggattgtttggaggtggtgcaaaggggctgcacctttctatgtccacagccaggcagttatagatgtgagccattcctggaggggagcataatgtctggctcttcctgaaggggttga

SEQ ID NO: 495144 - DNA, 495 bp, Homo sapiens
tctcagtgaaacccctcacagtactttatgcagagctgaacccttgacactttctgtccctattttatttttcatcaccttctaacatgctacagaattatgtacttatttattttgtttatctgtcycacccaactacaaatggaagaatttttgtctgtttggctcactgctgaattcctcaatgcctaaagaggactaggcacttgtaggaactcaataaatatcagatgaatgaatgaacaaaatctactacctacttagaatttaatttttattcatatcacttagatgaactcttggaagtaaattttggttctagttcatcatcaattaacaggagttaacacaaaataatcaattaaaattgctttgaaactaacacttattttggctatctctataccctgcctcactaatcacttgagaatgaaaaaagaaaccagaaacttgtctttctcattttcaaatgaaatcttttttttttttttgtaa

SEQ ID NO: 495145 - DNA, 600 bp, Homo sapiens
tgtgttttgattgaaattcacagcaaatgaaaattttagatacctagacaattgtgtttcttttatgtttattcattcttagagtttattcacaactgagcccaagctccaggattaaaaaaaaaaaaaattctgaggccaggtgtagtggctcacacctataatcccagcactttgggagactgaggtgggaggatcacttgagccccagaattcaagacgagcctggacaacatagtgaaaccccatctctacaaaaacaaacaaacaaacmaactagcaaacaagcaaaaaaaaccataaaaagccaggcctggtggtgcacgcctatagttccagctttttgggaggctgaggtggaaggatcacttgatcccaggagtcagaggttgcagtgagctgagatcacaccattgcactccaccctgggcaacagagtgagatcctgttcaaaaaatatatatgtttcaggcaagagaataatgtaaacacaaacattttcaataccttaatataagtaattaaaactgtgaaaaccaaaatgagatcttttgcttgtattggtatagtagcccttggaccgtaacaaaattattttat

SEQ ID NO: 495146 - DNA, 600 bp, Homo sapiens
tgtgttttgattgaaattcacagcaaatgaaaattttagatacctagacaattgtgtttcttttatgtttattcattcttagagtttattcacaactgagcccaagctccaggattaaaaaaaaaaaaaattctgaggccaggtgtagtggctcacacctataatcccagcactttgggagactgaggtgggaggatcacttgagccccagaattcaagacgagcctggacaacatagtgaaaccccatctctacaaaaacaaacaaacaaaccaactagcaaacaagcaaaaaaaaccayaaaaagccaggcctggtggtgcacgcctatagttccagctttttgggaggctgaggtggaaggatcacttgatcccaggagtcagaggttgcagtgagctgagatcacaccattgcactccaccctgggcaacagagtgagatcctgttcaaaaaatatatatgtttcaggcaagagaataatgtaaacacaaacattttcaataccttaatataagtaattaaaactgtgaaaaccaaaatgagatcttttgcttgtattggtatagtagcccttggaccgtaacaaaattattttat

SEQ ID NO: 495147 - DNA, 585 bp, Homo sapiens
gagaaaattgtcactcaaataatttttctgtaggtcttaattttcttgtggaaccctggctgagaaaggctggtttaagggagttggtgacattaaaaaggatrcatcaaaggtttgataatccatatccttgagatacttgaagctgtggaaattaccttgtccatggatccatgtgtgtccaaggatgtctgttactcttgttcatcatcttgacactaagggaagattagacatctgaatgtcaaacagtaaggaatcaaatcatggcactcctgtatgagatgatagctatattaaaacacatagctatgaatggattactatgtattgacatggaaaagtatttcccagtctgttactaaataagaaaatgacagaacagtctgtccagtgccagtctgtataatgatgtgtcagggcctgctgtgggcctcagctttctgaatcctcatgggaacccatgaggcagggccctgctggccccagttatgcatgaagagaccagggctggtgcccgtcaaagatgcttcgtccacgatccctgcactcgtggtgaagacatcatcaaacatgaggatctcc

SEQ ID NO: 495148 - DNA, 593 bp, Homo sapiens
tttttctctcaaaccttggctgggtaaatttttattactacattagctttctgacacctttaaatacatttgaacaatattttctcagattttcktcttgttcacattgaggaggattcatctgatattagcagaggtggaagtcatctatatagcgatatcttaaccgcatattagataaatctatttcacaagaatgttgtacatatgcacgggaaagtattaggacccacccatgtagctaagctcccgagaccctgcccctctcccaccagccctctcctccctggttgtgatcgtgctaaaaaagatagtgcccgcataacaatgccatccttttgctctgaaatgttcacagcattgggacatctgcccgctttgatgtttttctgttattaactgcctatgagatcagcatggagactgtcatgcctcagacactgcgtggaccacctggaggttccacctgtgatcccacctgccctagaaactgcagtcctggccaccaccaccccttcctccttgaagatggctttcatgctcaggtttcatcacagccctcatccaagtctgccttggttgcagtgcacatg

SEQ ID NO: 495149 - DNA, 594 bp, Homo sapiens
  misc_feature (1)...(594): n = A,T,C or G
ctgatgattggaaaccatgctggttcactgttacggctgtcatttgctggaccattaccgtgtgcctgacactgccattaagtgctctcctataggtctggattacttctcacatcattcagcaatttcatctttctatgtccactttacagattaggaaatagccccaggagattagtttgattgcccaagattatacaggaagactgtggaggatcccaggagtggactcyggctgggctgactccaaaacctgtgcttctgagccttgcgccttactgctttgtttaagcactttgtgcaaagaaaatcacctcagtttctagaaaagacaatttaggggcagagagggactcatccccatgtatgagcaatgttcaacactatctactttgattttatttaatagcactttaatcaaggaaacccaaacttattatcacctgcaggtagacaagtagtacattttatagactttctttactgctttttatttgtttttggtttttttttggatttctttttgcttgaagatggataatttcaaactccctggatnaattttccctctgtatatttataattcatgtccac

SEQ ID NO: 495150 - DNA, 594 bp, Homo sapiens
  misc_feature (1)...(594): n = A,T,C or G
ctgatgattggaaaccatgctggttcactgttacggctgtcatttgctggaccattaccgtgtgcctgacactgccattaagtgctctcctataggtctggattacttctcacatcattcagcaatttcatctttctatgtccactttacagattaggaaatagccccaggagattagtttgattgcccaagattatacaggaagactgtggaggatcccaggagtggactctggctgggctgactccaaaacctgtgcttctgagccttgcgccttactgctttgtttaagcactttgtgcaaagaaaatcacctcagtttctagaaaagacaatttaggggcagagagggactcatccccatgtatgagcaatgttcaacactatctactttgattttatttaatagcactttaatcaaggaaacccaaacttattatcacctgcaggtagacaagtagtacattttatagactttctttactgctttttatttgtttttggkttttttttggatttctttttgcttgaagatggataatttcaaactccctggatnaattttccctctgtatatttataattcatgtccac

SEQ ID NO: 495151 - DNA, 605 bp, Homo sapiens
aatacagaatgtgcagcagaattagacaggctgcccaggggacacgacagatagggatggaagcagtattgaaacaaccagatggacaggatgaagcacttgatcttctacagcatctctctcttttttttttttatctctttaaagggctgggtgaagagggagtggggccaccatcagcaccatcaggsaagcagactatgaaatcaatgttttaggcaccttcatgtgttggcctttgggcatccataataaggagcatttaccttagtttggctgctgtttgtctttggagtcagacaagaaagagattaatagaagaacaatgctatttcactgtttggatgtgagaaaaccagcaagcttccaatatcatgttttatccagcttggatttccctaccctcagtgtcatgatggtcctttgaagcaaaacaggatgggttgcccctcacgcggagcccttgtgcatgcattgttctcagtgacaaaaggaggcttagaggttagtgtagacgccgctgtgcagaaccagccactgccctggaaggcgatcaacattcatcagggagaggatgcatgcacccctgcttgggggaaaagcct

SEQ ID NO: 495152 - DNA, 605 bp, Homo sapiens
aatacagaatgtgcagcagaattagacaggctgcccaggggacacgacagatagggatggaagcagtattgaaacaaccagatggacaggatgaagcacttgatcttctacagcatctctctcttttttttttttatctctttaaagggctgggtgaagagggagtggggccaccatcagcaccatcaggcaagcagactatgaaatcaatgttttaggcaccttcatgtgttggcctttgggcatccataataaggagcatttaccttagtttggctgctgtttgtctttggagtcagacaagaaagagattaatagaagaacaatgctatttcactgtttggatgtgagaaaaccagcaagcttccaatatcatgttttatccagcttggatttccctaccctcagtgtcatgatggtcctttgaagcaaaacaggatgggttgcccctcacgyggagcccttgtgcatgcattgttctcagtgacaaaaggaggcttagaggttagtgtagacgccgctgtgcagaaccagccactgccctggaaggcgatcaacattcatcagggagaggatgcatgcacccctgcttgggggaaaagcct

SEQ ID NO: 495153 - DNA, 605 bp, Homo sapiens
aatacagaatgtgcagcagaattagacaggctgcccaggggacacgacagatagggatggaagcagtattgaaacaaccagatggacaggatgaagcacttgatcttctacagcatctctctcttttttttttttatctctttaaagggctgggtgaagagggagtggggccaccatcagcaccatcaggcaagcagactatgaaatcaatgttttaggcaccttcatgtgttggcctttgggcatccataataaggagcatttaccttagtttggctgctgtttgtctttggagtcagacaagaaagagattaatagaagaacaatgctatttcactgtttggatgtgagaaaaccagcaagcttccaatatcatgttttatccagcttggatttccctaccctcagtgtcatgatggtcctttgaagcaaaacaggatgggttgcccctcacgcggagcccttrtgcatgcattgttctcagtgacaaaaggaggcttagaggttagtgtagacgccgctgtgcagaaccagccactgccctggaaggcgatcaacattcatcagggagaggatgcatgcacccctgcttgggggaaaagcct

SEQ ID NO: 495154 - DNA, 606 bp, Homo sapiens
attttgaattgagcataagctatataggctgatttrctccctctctgtcacttcgttattattaattctgtcagaggctatttattttattactacagaaaaagatggttagtggaatctactgttaagtaaatggtgtactctgggggaaggataatctctaaagttgtctttaaagaaatatttcctaagtggttaaatgactttttaagtatattgtctgcatgtactgaggctatggagaaaccataaatatctgatactcatctaaaatattttgatgactcaagaactatatttaactgataccttgaacacctattttatcattactagacagcaggacttcaaataaactactctaaatcttttgcttgcacttattttttaagactgctgccaatctttataatcacacataagcatgtggtaatttagtatgcacctataatttggtataacatttgcagttgggaaagtggggtaaaataaaatagaataactgcaatttcttatattagataagaagttataagaagaatatttttcaattgtaagtaccacatgggtagttttattttttatttttagtggccaaggtagtag

SEQ ID NO: 495155 - DNA, 501 bp, Homo sapiens
ctgtcatatggtaaacaatccattgtaaggttttatttctaagaagagcctcagagaaaatgttctatcttatttatttattctatggaagaataataaagtttataaaaatatgcacacaataataagcaaacccttctctaacatttgtggggactaagccagaagaacaaattaatgcctatattacatatgcactgatatttaaaagttataaaccaaagaaaatattcaattagcacacttggactgctccacattccactctcaagtatggcagcccaaaaagagttaggcaccagattctttgctaacycttgtcctcctactgccactcttggcactatcctgtaccagcaagggcttcacacaaacatctgtgaaaaacctaaacattatattcactctccatccaatcttctgtataagtgactcccttgccggtccattgagtctaaggatgcacacacattggagcataatccacattgcatatcatag

SEQ ID NO: 495156 - DNA, 501 bp, Homo sapiens
ctgtcatatggtaaacaatccattgtaaggttttatttctaagaagagcctcagagaaaatgttctatcttatttatttattctatggaagaataataaagtttataaaaatatgcacacaataataagcaaacccttctctaacatttgtggggactaagccagaagaacaaattaatgcctatattacatatgcactgatatttaaaagttataaaccaaagaaaatattcaattagcacacttggactgctccacattccactctcaagtatggcagcccaaaaagagttaggcaccagattctttgctaacccttgtcctcctactgccactcttggcactatcctgtaccagcaagggcttcacacaaacatctgtgaaaaacctaaacattatattcactctccatccaatcttctgyataagtgactcccttgccggtccattgagtctaaggatgcacacacattggagcataatccacattgcatatcatag

SEQ ID NO: 495157 - DNA, 651 bp, Homo sapiens
gggctcctcagtcaggtggcgacttggagaacttttatatctagctggaagattgtatatgcaccaatcagcactgtctagctcagggattgtaaacgcaccaatcagtactctgaaatatcaccaaattctgcagaggagaatatagatagcagaggccaggacaggaagggctgaatactaggtagcaaagtgggccatgactcagtgatgccaacatggagggaagcccacagggagcctgcacagaattgagtgcctaggtgaaatgttgcatagggtcttgtgtgtccaccagccatatactcatctccactggcacggcactagcttggggcatgttaattaaatatcccagaacaaggatcaatttcagaaagaaagggagatatagtgagcatacagaatcctcaaatttactgtgtttaatatattgaagtaattgaatttgacagagtctacaaggaagtgattaaattggagtttctattattactcagaagtgaggatttgtgatacaaattaaatgcagttacatgaaaatgatattgcatgtctgyacatctgaattggaggtctgtgaaagtcatgcttctaccctctactcggcctttgataataaaattgctcaatgtttgctttaagttctgc

SEQ ID NO: 495158 - DNA, 633 bp, Homo sapiens
ctggttgggtaggcaggccctgagagaggcgtcaaggttgacatacaccaaggcaggttcaagatgggaggggacagtgggtcccgctctcccagtcccgccccacctccccatctcccggcccttctctcgtctgtcctagtgggctgtctgtctgtctgcttgtctcttctgactcctctttccttctctttctttgtcttctcccctgcctgtctcccagctctcagctctgccctccggactcactcyctttccctccccttctttctctgtctctcctcgcctccatctctttcactattgctccttttcaagccctctctgtcctttcctttccccctcacagttttctctccttttcccacccattattctttcttctttgccccctctccctccatctctcagaataacatgcaaaaacctttcactcctgacttccttcccacattctcacacaaagaataaataaagagaatgtcaccaacaagcatcaaccactgcgtttcaatagaccctttgctcttaggagagggacagacgaatttctaaaaaaaaattttctctctctctctgacacattcatgacttggcatcctatagcaagttaagtatttttccaaacacagc

SEQ ID NO: 495159 - DNA, 592 bp, Homo sapiens
aagaaggtggattttaggtctctaaatcagatctatttctctgttcatctctggttccttcaaacttgaccagataattctggatattaatgggaaagtctgtatcctgccataaaagttgttacatcctacaatcttaattctttcccagcaatgagcccatttctcttgcaactgraaaattgtagagtcaggaagaaacctctggaggattgggtattaacagtgggagaggtgagtggtatctcacctaaaggcaacaggagttgtaatctggccactagctttttctaggacttctttctctctttgtctctaaattgagagaaaaatagctgaactgatctgggtacttcaggatcacatgattcctgcctggatgtctacattattaattatggattttctttctgagttggctaataaggttttaaaaatgtttactggtctcaattttatgtcccaagttttcatgacagaattgggcttccctctgttgagtcaaaggagggagattaaagatgacttttcattacctgaccctttctttcttcaactgactatcccttatctgctgagcattacatgtctt

SEQ ID NO: 495160 - DNA, 592 bp, Homo sapiens
aagaaggtggattttaggtctctaaatcagatctatttctctgttcatctctggttccttcaaacttgaccagataattctggatattaatgggaaagtctgtatcctgccataaaagttgttacatcctacaatcttaattctttcccagcaatgagcccatttctcttgcaactgaaaaattgtagagtcaggaagaaacctctggaggattgrgtattaacagtgggagaggtgagtggtatctcacctaaaggcaacaggagttgtaatctggccactagctttttctaggacttctttctctctttgtctctaaattgagagaaaaatagctgaactgatctgggtacttcaggatcacatgattcctgcctggatgtctacattattaattatggattttctttctgagttggctaataaggttttaaaaatgtttactggtctcaattttatgtcccaagttttcatgacagaattgggcttccctctgttgagtcaaaggagggagattaaagatgacttttcattacctgaccctttctttcttcaactgactatcccttatctgctgagcattacatgtctt

SEQ ID NO: 495161 - DNA, 592 bp, Homo sapiens
aagaaggtggattttaggtctctaaatcagatctatttctctgttcatctctggttccttcaaacttgaccagataattctggatattaatgggaaagtctgtatcctgccataaaagttgttacatcctacaatcttaattctttcccagcaatgagcccatttctcttgcaactgaaaaattgtagagtcaggaagaaacctctggaggattgggtattaacagtgggagaggtgagtggtatctcacctaaaggcaacaggagttgtaatctggccactagcttttkctaggacttctttctctctttgtctctaaattgagagaaaaatagctgaactgatctgggtacttcaggatcacatgattcctgcctggatgtctacattattaattatggattttctttctgagttggctaataaggttttaaaaatgtttactggtctcaattttatgtcccaagttttcatgacagaattgggcttccctctgttgagtcaaaggagggagattaaagatgacttttcattacctgaccctttctttcttcaactgactatcccttatctgctgagcattacatgtctt

SEQ ID NO: 495162 - DNA, 569 bp, Homo sapiens
acatttttcataaaataagttttacacacaatttagagttgatatataagtactgtttttactcttgattttcctgtttctattttcttaaaaatatcattttagcttccgtgcttttttggtaatctgcttatcagatatatttgcaacatttcccccaggatatgaatatttttgtatcgactccttcactaatgggtaattttttctcctatcaacatgctatagtttacttaactatttccttattattctatatctattttctcaatttctsttcttacccacatggctgtagataagactttgaatatatttgttattattttcttaggattaacttctgtgagcaaagtgtggttgtagacagggccccttcacactcctgaaactttacttgaacatcattcatcatctttcctcatcattcagtttagtggctctttctttttacatgcctcacgattttatttattaaatatttgccagtgttcagggtcattcaaattatgaccattgggctgtgaggtttgttttgaacagatctgtgaactacaaatggttttgct

SEQ ID NO: 495163 - DNA, 612 bp, Homo sapiens
agccatagacaatatgtaaacaaatgagtctggatgttatccaataaaagtttgcaaaaacaggtggtaggctagatttggccatgggcaatagtgtgctggctcttgatatatacaatctaaagaaaacattgtaaccgtaggactgttgaattaatatacacacacaaattttgtaatgtaaagtgtcatggtaagaacagacatgaataaaatatgccctcagttctcaagtgatgatatattagctgcagaaactagacatgcaaatatatacatagaattcttaataaatatgtaaatattaaggccatattagaaaaccttctagtaagggttatgactcctttcctaacctgatctactggaaatattgagtcagatgtggaaaagttatagaacttgaacattcaaatagcaaaagatattctttaaaattaagtactaggaaaatatgacattttattctccagggcagcagttgaagaagctttgagttctactgatatattttgaacagactgaatctttgtgcatacaacacaatcagaaattctttaaggtgtttagtataaaatttyaagctttgaggaaaaatgtcttccccaaaaa

SEQ ID NO: 495164 - DNA, 579 bp, Homo sapiens
cctggaggcttacatttgacagcagagaactaaaatatgtctcaatctcaattgctcctagagtaatggcatacccagagatattagcaaaatggggtctttagtaacagacttcagagatctaaatttagtgaatggctttaggcatcatcgctgaaagacacatgcttaaacagaattggattcacatgggaaagtagatgaatgggaayggacagttctgtaccacagcttctgggactcgtcagcaatattccaaagataaatgaagccaacaaagacacaccaaacaacagaaaagtacagtatgttgataccctcctgctaaaatccatgtcataaaagcaggatcaaaaattaaccatagggtggccaggcgcagtgacatacacctgtaatcccagcacttcgggaggcagaggcaagcagattgcttgagcccaggaattccagacccctgggcaacatggtgaaaccccatctctacaaaaaatacaaaaattagccgggcatggtggcacccgtctgtggtcccagctacttggaaggctgaggtgggagaatcacctgagctcagga

SEQ ID NO: 495165 - DNA, 388 bp, Homo sapiens
tggactcttccagtgcctcacaggtccgaccagggctgtggatcttttcaaagaccataagggcttacatgttaagaagaactgcccatccatacaggccaggagtgtctggggctagagaagtgggatagagagagacagcaggcaaagtgaggtctacccagagaggctacaaagaagtcagcctaatacttgaaaatagtggggggaaaatccctcattggatctcaaaatgttcatctccttcctactgtgtgttttggaacctagaggtgctttcaattgccaggagacgatggcgtctcwtagtctgtggtgaaccagcattgctcgattaataggagcagcctgtatcagtgtaacaactgtgggtgggtatgggcacatg

SEQ ID NO: 495166 - DNA, 542 bp, Homo sapiens
ccttgaaaagattttctggagtagcaggaactgagtagaagcaccaactcccagagaggctactaacaaaaggaagaaatggacgtctgcaattattatcaagatgcaaatgttattatctgtgctagtttcctcctgctgtgtagtggtagttccataaactttgtggctcaaaacaacacacgtttctttttgaaatttcatagtcccagtgggtcaggaattcctatatggcttagctagatcctctgcttggggcctcagcaggcttcaatcaaaacatgggccagaactgtggtctcatctgaggctccactggggaaggatgcacttccaagatcatgtggtagttgtttgtattcagttctttgtgggctgtcaaactgcagacctcaattccttacatagttgttrtttagagaccactctcagtttcttgccaagcgatccttcctggtgttgtcacttgccttttaaaatccagcaggaaagacagtctccttgcaagatgggcattacaaacttatgtaacataatcacaa

SEQ ID NO: 495167 - DNA, 587 bp, Homo sapiens
tggttagtatgaactgaaatggactataagtataaaatacacttggatttcacttcatataaaagatccaaatattttatattgattacatatgatatatcacataatttttttggaaaccttgggttaagtaaaatatataattaaaatttattcacctgtttccttttttccattttaaatgtggcatctagaaaaatttaaattacttttgtggagtctgatgtgtcaccattggacagtgctagtctagataaaccctttcggttcctacctcctaaacctcagtgctygagggtttttgtggggatcctaattgctattgctgcttccccagttcccgcgttcaggtcactgcgttcccatgaaatgcattaggaatttatcctggtagctttacttactgccacattctgctctaagaacagtatttcattcaaactcccattaaaaaaaaaaaattccccactaaaaaacacatttctctttccagttattcttcccacagtgtacttagtaacttatttgttccaggacatgaacacgttttcctgtgggatggggactgggaatataagattcagtgt

SEQ ID NO: 495168 - DNA, 587 bp, Homo sapiens
tggttagtatgaactgaaatggactataagtataaaatacacttggatttcacttcatataaaagatccaaatattttatattgattacatatgatatatcacataatttttttggaaaccttgggttaagtaaaatatataattaaaatttattcacctgtttccttttttccattttaaatgtggcatctagaaaaatttaaattacttttgtggagtctgatgtgtcaccattggacagtgctagtctagataaaccctttcggttcctacctcctaaacctcagtgcttgagggtttttgtggggatcctaattgctattgctgcttccccagttcccgcgttcaggtcactgygttcccatgaaatgcattaggaatttatcctggtagctttacttactgccacattctgctctaagaacagtatttcattcaaactcccattaaaaaaaaaaaattccccactaaaaaacacatttctctttccagttattcttcccacagtgtacttagtaacttatttgttccaggacatgaacacgttttcctgtgggatggggactgggaatataagattcagtgt

SEQ ID NO: 495169 - DNA, 596 bp, Homo sapiens
tgtgctgtgaccagcgtcacactagttgttcaccagcctagagtggcatgggaaacagagtttacagaactatagcctatctgagaatttaacaaagactcattgctgtttattatttattttgttgaargattatgattctgagaaacctgcccaaattaacaacagtccaaatgtcaatatgctcatatgtatttcaaattcttaagtaattgtggaaagaatcaaatttttaaagatctgtgatagtttgacttaaaagagtgagccatctttgatcataaacttttactgcatatttctgcataccttgtatctgattttccaactagtgggaactaacaaaactacagggcttagcatttcagagcaaagtgctcagcgtgggcttgcatgctggtccacaatggatgaccgtgcatccttcactccctggagtgtctagtcatgtgacgagtcccctccacagttcccccttccctctgcatcaggtttagcacacaaagacccttcctgtctccttgaagctcttccttcccctgcctgtgccctgcccttgttctgaactcctgcatgctcacatgtttggtcacagc

SEQ ID NO: 495170 - DNA, 528 bp, Homo sapiens
cactgtgctgtgaccagcgtcacactagttgttcaccagcctagagtggcatgggaaacagagtttacagaactatagcctatctgagaatttaacaaagactcattgctgtttattatttattttgttgaaggattatgattctgagaaacctgcccaaattaacaacagtccaaatgtcaatatgctcatatgtatttcaaattcttaagtaattgtggaaagaatcaaatttttaaagatctgtgatagtttgacttaaaagagtgagccatctttgatcataaacttttactgcatatttctgcataccttgtatctgattttccaactagtgggaactaacaaaactacagggcttagcatttcagagcaaagtgctcagcgtgggcttgcatgctggtccacaatggatgaccktgcatccttcactccctggagtgtctagtcatgtgacgagtcccctccacagttcccccttccctctgcatcaggtttagcacacaaagacccttcctgtctccttga

SEQ ID NO: 495171 - DNA, 613 bp, Homo sapiens
cactgtgctgtgaccagcgtcacactagttgttcaccagcctagagtggcatgggaaacagagtttacagaactatagcctatctgagaatttaacaaagactcattgctgtttattatttattttgttgaaggattatgattctgagaaacctgcccaaattaacaacagtccaaatgtcaatatgctcatatgtatttcaaattcttaagtaattgtggaaagaatcaaatttttaaagatctgtgatagtttgacttaaaagagtgagccatctttgatcataaacttttactgcatatttctgcataccttgtatctgattttccaactagtgggaactaacaaaactacagggcttagcatttcagagcaaagtgctcagcgtgggcttgcatgctggtccacaatggatgaccgtgcatccttcactccctggagtgtctagtcatgtgacgagtcccctccacagttcccccttccctctgcatcaggtttagcmcacaaagacccttcctgtctccttgaagctcttccttcccctgcctgtgccctgcccttgttctgaactcctgcatgctcacatgtttggtcacagccttctcatcccctg

SEQ ID NO: 495172 - DNA, 534 bp, Homo sapiens
ctgtggagctgcagtccactatttttggcacctgggagatgcacacggcccctgagcacacttcccgccttctgatccctcacctgctcagcttcccaggctccgtctttatcttgaggatctctgaagactgcctcttcccctgtactcttcaggatccagtacaatgcctagtacatgggtaaaaattaaaattatttgaatgttcactatttggcaggcactgttctagacacttgccacatacagctcattcagttctcataatctgatgaggtacatactgttattaccccatrttcatttcctggggctgccgtcagaaattagcacaaacttgttgtcttaaaacaactgaaatttatcctctcacagtatcctcttcacaggtccgaagtctgaaatcaaggtgttgacagggccgtgctccttctggaagctctaggggagaatccttccctgcctcttgcagcttctgggagctgtggacattccttgcactgcttcagcccagtctatgcctttgtcttcacg

SEQ ID NO: 495173 - DNA, 605 bp, Homo sapiens
taagcacgaagagcaaaccagcaccttggcttcttattgctccttatcattctttccccctctgtggcaaaacccacggggtcaggtgctgagcttccaacccattgtcctacgaggtgactcagggtaggtgayggatatggtgcaggctgcacacacacgtgagcacatgtgcacacacacatatctgggtcctggggtgctgaggggattgctcaccaggctgtcttctcactccagaaagctgaggagaaccaccttggaggtgctgattacctcctgcgtcccctcccttccttttctcctcaatgaagagtgaatgaatatactgcagagttgacttaatatttgctctgcttgagagcattgggtttccccaagcagggggtggtcagccaggtcacaacaggccaaaacgactcttttggtttttgtttcctttccaggctcccctgggggtaattagcatttcccaagcagcagcatcaaggatgttgccctgtatatggaggctggccaagagctgggagctcaatggcctagcatctgtgggattcaggatggacttgtccagaccctatttccagatgaagccacatgtatcc

SEQ ID NO: 495174 - DNA, 605 bp, Homo sapiens
taagcacgaagagcaaaccagcaccttggcttcttattgctccttatcattctttccccctctgtggcaaaacccacggggtcaggtgctgagcttccaacccattgtcctacgaggtgactcagggtaggtgacggatatggtgcaggctgcacacacacgtgagcacatgtgcacacacacatatctgggtcctggggtgctgaggggattgctcaccaggctgtcttctcactccagaaagctgaggagaaccaccttggaggtgctgattacctcctgcgtcccctcccttccttttctcctcaatgaagagtgaatgaatatactgcagagttgacttaatatttgctctgcttgagagcattgggtttccccaagcagggggtggtcagccaggtcacaacaggccaaaacgactcttttggtttttgtttcctttccaggctcccctgggggtaattagcatttcccaagcagcagcatcaaggatgttgccctgyatatggaggctggccaagagctgggagctcaatggcctagcatctgtgggattcaggatggacttgtccagaccctatttccagatgaagccacatgtatcc

SEQ ID NO: 495175 - DNA, 477 bp, Homo sapiens
ctttggaggccgaggcatgagaatcacttgaacccgggaagaggagattgcagtgagccaagattgtgccactgcactccagcctgggcaacaagggtgaaactctgtcaaaaaaargaaagaaagcaagaaagaaagaaggaaagaaaggaaggaaggaaggaaggaaggaaggaagaaaaaaagaaaggcttgtgaatgggatgcaatggcagggcacagaaaacatgatgggggatgtataatgaccataaaatataaatgaatgtcattttcttaggaaattaaagtataattttaacatttattatttaaaaatgtaatatatatttataaaaatatgttttgagggagctaagtattataggtaatatgatacagatgttatcttttcttcttcataagttgtgtttagaagactacattatcaaaaaatagaaagcatgtttaacatatataagaccttataagactatt

SEQ ID NO: 495176 - DNA, 620 bp, Homo sapiens
ctgctttggaggccgaggcatgagaatcacttgaacccgggaagaggagattgcagtgagccaagattgtgccactgcactccagcctgggcaacaagggtgaaactctgtcaaaaaaaagaaagaaagcaagaaagaaagaaggaaagaaaggaaggaaggaaggaaggaaggaaggaagaaaaaaagaaaggcttgtraatgggatgcaatggcagggcacagaaaacatgatgggggatgtataatgaccataaaatataaatgaatgtcattttcttaggaaattaaagtataattttaacatttattatttaaaaatgtaatatatatttataaaaatatgttttgagggagctaagtattataggtaatatgatacagatgttatcttttcttcttcataagttgtgtttagaagactacattatcaaaaaatagaaagcatgtttaacatatataagaccttataagactatttatcttacttttacctgtagttctgacacattattcctccccatcttttattcattgcaatgccctctagcatattacccatgaatatttgactgaaaatgaaaagcatttcaccctgaataatataaagtcttttgcaa

SEQ ID NO: 495177 - DNA, 604 bp, Homo sapiens
ctgggtgcggtggctcatgcctgtaatcccagcattttgggaggccaacgtgggtgaatcacctgaggtaaggagtttgggaccagcctggtcaatatggcaaaaccccatctctactaaaaatataaaaattagccaggtgtsgggggcacacacctgtaatcccagctacctgggaggctgaggcaggagaatcacttgaacctgggaggtggagattgcagtgagccaggatcacaccattgcactccagcctgggcaagaagagtgaaactccatctcaaaaaaataaaaataaataaataacccagcgtcaggcagttctttatagaagggtgaggatggactaatacaaggtgtcaagtgggtaatataattatgtgaagtggccaaaggtaagtcatcaaggaatgaactggagagtacatgcccaacttaaaacattcaaattattaacttcagaaaaaataaaaaggatttcaaatatgcttaatatagtatattacagacttcatggtatgtgtggttatatttacataatcacctacttatgtatttacatggtcataataaagcaaattctgaatattaatttaacaactaa

SEQ ID NO: 495178 - DNA, 597 bp, Homo sapiens
tggagccacaggacctgtgtcattgctaaaattaaactgcacatttaagcctgtgggtccaagcagtcaatacaaaagacaaacatgatcatttacaaaaattctcattgtctaagaaaataaagctgtgtggtgaacacagactaaaatagtgggagacaccaccaactgcatcgtttctagagtaaacacagtgaacaggtgttgcaaggcctggaaatgatctgatataacccagggataaagcccagaatgtttgggtcagtgtttctcaaccctgcctgacatcagagtcacctggaatccagcagacactggggcctttcccttgtggtttgtgccgcagggtacaggtgagatttcagcctctgtatttttccaaagctctgcagccatttctgatccatagctaatgctgagaaacactgatctctaccagggattcttatattgttccacaaagcccccaggaacctgccagcagtcctgggagctgctccaggraaaagggagctacaaggcaaggatcacccagggccaccagaagctggaggaggcaaggaaggaccttcccctagaggctgtggtccattcagg

SEQ ID NO: 495179 - DNA, 416 bp, Homo sapiens
agcgcaggtgcagtgggctgtcaggggcagcagaggcctytgggctgggaacagatgtcacatctgggcatctgacaggagaagcttgtggagaaaccaggagaggttcagcctccagcctcaggtcctggctcccgccagccttccagggctcgattctcccgggacaagtagaggggctgctgcatgccaagctgtcatcctggtcaggccaggtcaaaaccgaggcagggtcctctttgaatgtatgtgtttgtgtgtgcgtgcacatgtgggggccggaggagctgaggatcacatgggaaaaccgtgtgtgtttatgtgtgagagagagagtgtgtgtgtgagtgtgtgtgtgtgtaaatgagaaacttttatccccacaaaaataaggatgtgagattttattttatcca

SEQ ID NO: 495180 - DNA, 657 bp, Homo sapiens
ttctgaacgaagagaaaccctaccaaatttgggtagggggagactctgaggaatattccataaggttgggagggaggtagacaggtggatcccagacacctggactccttgatggaggcaggtctagctccccttcgcagcttctgagcatgccccctggcctcctctttggactcctgcatcaagagggcagatgggaaaccaccaggctttgggtcagaagacccagatttaaatttcagccacccrctatgtgaccctgagccagtttcataacctttctgagcctgttttctcacccacaaaataaaactaaccatacctacctcgggagtcacgagatgaaagaaaaagtgtgtcaagcccctggcaggtgctcagtatcagcagctattaagcttttttctaaccaactctgagcaaatccctgaccccctggagccctcatttatcctcacctgggccacagaaaaaatagctgactggcgtctttcccccagccaaggagacagagacagcctgaagataagactgaagtgaagagccaggcgcagtggctcacacctgtaatcccagcactttgggaggctgaggcaggcagatcacctgagatcgggagttcgagacaagcctggctaagatagtgaaaccccgtct

SEQ ID NO: 495181 - DNA, 605 bp, Homo sapiens
cacctgaggtcaggagttcgagaccagcctggccaacatggcaaaaccatgtctctactaaaaatacaaaaattagccagcatggtggcacgtccctgtaatcccagctacttgggaggctgagggaggagaattgcttgaacccaggaggcagaggttgcagtgagccgagattgtgccactgcactccagcctgggcaacagagagaaaccccatctcaaaacaaacaaaacaaaaacccagatggtctattggaggagatggactagtacacagtcttttacaacatgctgtatgaagtgctatcatgcacaggatgggcttctgaaagattgcgctggcttggctgacttctgaatgatgggaaagttttcgccaggtgagaaaaggaggaatccatattgctagcatatgcaaaggtaagcagtcatgagaagttctttggttagagtttatttggatgtaagttacacaaatacaaataatagtctagtttatttttgtgatttaaattcaaagcaggcwgtttctgaacattggatgagagaatcagtgatactggagctgatgctttaggctttcttttggcctttccttttcagca

SEQ ID NO: 495182 - DNA, 668 bp, Homo sapiens
cctttagttgtctatatgtcttgcayactttattgttacagtcataaccctgataaccacacattgctcggggaataaaatgaggtcattcagaagctaacctaacagctaacacagatgttaaatgaccataacatgttacatatattttcaaagtgtctctaaaattaggaatataacctgtatatttttctattagctaaccaagttttctgataagtgaataaacaagaagaaaagtgggaaaataagaagctcttttatacttgtatctatttataaacattctgattagcaaacatggaaataatgagttaccattatatttccgttcactgttttgaaatgatttcttcttaatattctattcaataattttatgatattttcatatatttccctcaagtctttattaagagcagttaaaagaccagtgcaaacaggagcagagcctgcctgtgaatggctctgagatcacacagcctttgttgcaggactagaggatggcagtagagagacgcttgccaaggtcaggggaagaattcatcaaaaaccctcaggaaagcctgtagaaagcaggtagttaacatcaggggagcagaagaggagaaatgcaattttaaaaagtttttctctgtttcttagtacttaatactggaaagggaaat

SEQ ID NO: 495183 - DNA, 605 bp, Homo sapiens
cacctgaggtcaggagttcgagaccagcctggccaacatggcaaaaccatgtctctactaaaaatacaaaaattagccagcatggtggcacgtscctgtaatcccagctacttgggaggctgagggaggagaattgcttgaacccaggaggcagaggttgcagtgagccgagattgtgccactgcactccagcctgggcaacagagagaaaccccatctcaaaacaaacaaaacaaaaacccagatggtctattggaggagatggactagtacacagtcttttacaacatgctgtatgaagtgctatcatgcacaggatgggcttctgaaagattgcgctggcttggctgacttctgaatgatgggaaagttttcgccaggtgagaaaaggaggaatccatattgctagcatatgcaaaggtaagcagtcatgagaagttctttggttagagtttatttggatgtaagttacacaaatacaaataatagtctagtttatttttgtgatttaaattcaaagcaggctgtttctgaacattggatgagagaatcagtgatactggagctgatgctttaggctttcttttggcctttccttttcagca

SEQ ID NO: 495184 - DNA, 605 bp, Homo sapiens
cacctgaggtcaggagttcgagaccagcctggccaacatggcaaaaccatgtctctactaaaaatacaaaaattagccagcatggtggcacgtccctgtaatcccagctacttgggaggctgagggaggagaattgcttgaacccaggaggcagaggttgcagtgagccgagattgtgccactgcactccagcctgggcaacagagagaaaccccatctcaaaacaaacaaaacaaaaacccagatggtctattggaggagatggactagtacacagtcttttacaacatgctgtatgaagtgctatcatgcacaggatgggcttctgaaagattgygctggcttggctgacttctgaatgatgggaaagttttcgccaggtgagaaaaggaggaatccatattgctagcatatgcaaaggtaagcagtcatgagaagttctttggttagagtttatttggatgtaagttacacaaatacaaataatagtctagtttatttttgtgatttaaattcaaagcaggctgtttctgaacattggatgagagaatcagtgatactggagctgatgctttaggctttcttttggcctttccttttcagca

SEQ ID NO: 495185 - DNA, 605 bp, Homo sapiens
cacctgaggtcaggagttcgagaccagcctggccaacatggcaaaaccatgtctctactaaaaatacaaaaattagccagcatggtggcacgtccctgtaatcccagctacttgggaggctgagggaggagaattgcttgaacccaggaggcagaggttgcagtgagccgagattgtgccactgcactccagcctgggcaacagagagaaaccccatctcaaaacaaacaaaacaaaaacccagatggtctattggaggagatggactagtacacagtcttttacaacatgctgtatgaagtgctatcatgcacaggatgggcttctgaaagattgcgctggcttggctgacttctgaatgatgggaaagttttcrccaggtgagaaaaggaggaatccatattgctagcatatgcaaaggtaagcagtcatgagaagttctttggttagagtttatttggatgtaagttacacaaatacaaataatagtctagtttatttttgtgatttaaattcaaagcaggctgtttctgaacattggatgagagaatcagtgatactggagctgatgctttaggctttcttttggcctttccttttcagca

SEQ ID NO: 495186 - DNA, 446 bp, Homo sapiens
acagacaaagtccagctctttaaacaatagagtttcagacaaacatctgtctcccctcagaagcatttcttcacagtccagatagycaggaagccattaaattccaaatccaaggtttcttcccaggacaaagcatgaagccagaatctcaaatctatagtctgttcacattttcaaatgaacatggttgccttttaaggagaggctagtgcctctgaaaaacttcacttaagaattaattgcatatatgaatcaaaaacagactaatcaacaagtaaatgttgaatttttcataggcttttggcaattgttattataatagacattaaaagacaaatgcatctatcagtccatttaaatcagtgttattatccatattgacttacaaatattaaacacatcttcctgtaaaacataataacataccctgttttagaactttttga

SEQ ID NO: 495187 - DNA, 446 bp, Homo sapiens
acagacaaagtccagctctttaaacaatagagtttcagacaaacatctgtctcccctcagaagcatttcttcacagtccagatagtcaggaagccattaaattccaaatccaaggttkcttcccaggacaaagcatgaagccagaatctcaaatctatagtctgttcacattttcaaatgaacatggttgccttttaaggagaggctagtgcctctgaaaaacttcacttaagaattaattgcatatatgaatcaaaaacagactaatcaacaagtaaatgttgaatttttcataggcttttggcaattgttattataatagacattaaaagacaaatgcatctatcagtccatttaaatcagtgttattatccatattgacttacaaatattaaacacatcttcctgtaaaacataataacataccctgttttagaactttttga

SEQ ID NO: 495188 - DNA, 637 bp, Homo sapiens
aggagtgaagagcctgaagaaggagaaactggacttcttgcttataaggcaggtagatttgtcccacattgcagtgctggttctctgaatagcagggcatttatttaggccagttggtctttaattatttaatatagcagatacatagtcagttcaggttgaggatatctgatttattgggcaaagtagattttttagagggctaggttggagttccacactccaacttttaggaatcatgtaatttctggcatgatctttctgactgtttcctgatttgttaaatggagattactgcattgcatagtgatacaaaggtggaaccatgagtacaagttgaaatcttaatctccaaggaagtattatggaagtacaggaggaatcattaattcttcctcagaaatggaatcagagtgacttttgacattgggattaaagattgagtagaatttcactggaacagcaacaatgagagttcctacacaagtaacagtttatgcacaacaatagtgtatacgtgaggctgtgtggtatgtgcataaaatcagtcctgcatcaatgcctaccyatgtcattctggcattctgctagaatcacctgtaactctctacctgagacttcctgtttattgggcagg

SEQ ID NO: 495189 - DNA, 406 bp, Homo sapiens
aaaccgtctcaataaccaatttacccaactagcaaaatgtgaggccaaaattccaacccagcttacctaaacaatcaactttgatatctgaccatgtgcctctaatattttgtcytgaaaagggctcagcggtcatctgtgtagtattcaaacatgtttgccctgaatctaatcattggaaaacagacatatccaaaagaagggacatacttcaaaacaactggcctgaaaacttcaaaaaaagtcaatgttgtgaaatacacatggggaataaggggtgggggacagagaaaggaggcggatatgcaattgcctagatttaagaacactaaagatgtgcatcaactaaatgcaatgggccaggtgtggtggctcatgcctataatcccagcactttgggaggctg

SEQ ID NO: 495190 - DNA, 400 bp, Homo sapiens
tggtgacccggggttttgtgcttggcttccaggtcccctcgggttattgaggacgattgaggtcatgcctccgagagcaccgcgccctgggcgcaggaggagctgttgctcagtgttgtctgtgttgtaaggtggactttgtagaaacttggctttgaggttttttgttttttttttttttggccccttctaagcgaaagccttggacttattgcccaggtttctctggcccctgagaagccatatctcaccttccccgcgccttcggattgggtcttagactyagcccatgagactgtgggttgtttattaattgtgtggtcaccaaccatgcatttcaccactggtgggggggtggggttgccaggtttaaccagataaaaatacagcacacccagtt

SEQ ID NO: 495191 - DNA, 435 bp, Homo sapiens
ctgccatttcctccttggaygtctcccctcactcccagcctcagtgagaagtctttctgtgaactcctagaatgcctcttgtaaatccccacaagtgctctgacgctgcattggaattggctgacttctcgtgtcttcctggacggcaggctccttgaaggcagatactatctttcatttctgtactcccattgccaagcacactttgttgaatgagtaaccaaatagtgtgacctgctttgggacagtcacttgttctaatgggtcaataactaatggattggtattctgcaaacccacaggcacatgcatagatagtttatgtatcaggtgtgcttggtaaattttgttcaggttagttctggaatcttggattatactatgaatattgctttctatccttttttccgtctcttatgttacgacatttccctg

SEQ ID NO: 495192 - DNA, 581 bp, Homo sapiens
gagggccaacttcccgctcacagatggctgtcttcttgctgtgtcctcacagggcaggagggcaagggaactctctgagatctcttttatatgaacacgactttcattcataaaggctctgccctcatgaactaatyacccaaacgccccacctcctaacactatcacactgaaacctaatcaggtttcaacatataaatttctgggagacacaaacattcagtttatagggctccataatggattatttttctcaatgttctgttttctctcaccattgatcctaagcggctgtcatcgtgcctggaatataaaaggtgttcaatgaagagcaattacatgaaggaaagggatggtgaaggaggaagaaaggaagagcagccaattttaagaacaatggctttgtcattcatttccatgagcttattttacatatttttaatttttccctgctcaataatgttttcattactactgacccagtttaaaattttcttatggggacacaaattatttataatatatatgtacttgtgtgcaagcatatgtattgtaagccataatacggtatatgttagaag

SEQ ID NO: 495193 - DNA, 342 bp, Homo sapiens
tcagttttgtatgagtgtggactggctagaaatagtgtagtgagaggcactcccactcttgcatcaacaatgtgattacagcaatccagtatcttttacccttccyaatgttcctagtgcttgtttctgagaaatggctcattcagtggccggttcaaagcattcttgctgcttaaattaagctcttaggtgacctcaactcttcttctagaagagtgtcacatttgtctttcatgaactttccatgaagatacagttggagaaaccaaaagaatagaaggaggggcctcaccaagcttacaggacaggatgtatgattgtttttattcctgcttactaatc

SEQ ID NO: 495194 - DNA, 228 bp, Homo sapiens
ttgtgattctgtgggacaatatttgcatttctggcaagttcccaggagatactratgccactgatccaggggccacactttgaaaaccactggtcgataggataaacaacctgcttatccaaccaatcagtgacgtgagagggagtggggatattatagaataaaatgccttctaacagcctacaaacttaagacaatgtatagacttcacctggatcttaattcaag

SEQ ID NO: 495195 - DNA, 228 bp, Homo sapiens
ttgtgattctgtgggacaatatttgcatttctggcaagttcccaggagatactaatgccactgatccaggggccacactttgaaaaccrctggtcgataggataaacaacctgcttatccaaccaatcagtgacgtgagagggagtggggatattatagaataaaatgccttctaacagcctacaaacttaagacaatgtatagacttcacctggatcttaattcaag

SEQ ID NO: 495196 - DNA, 577 bp, Homo sapiens
ttcacacaatattccttgaacagtatttaccagatttcattgagtctaagatgcatggattttcacattttttaaatgtcagagtcaggatttttaccttacaaataaattgtgtgtgatcatgtaattggcagtgctccaaacccagccgtgactgccactaggcatcactggggactgggcccaagagctccatttttccccttcaggatatgaaattgctcagatgtcttcttagggaaaagaagcaaagcaatgaggaaaccaagyctttttgagaggctcggcatcttgatccaagaacagatgagcacaaaataaagttccttgaaaactaaagttccttgaaaacaacagtttgaactctggtttaaatggaatagaactaaaagttcactttatcctgctaaccagaggacgaagaattgggcacgaatcgccaactagttttaggcaaataaagaaactagaaatctttaacttaaccaacacatcaaaattgtatgttaaattttgtgggtcttatattagcgtggccttactaataatttctgaattgggcaatcacttactgtca

SEQ ID NO: 495197 - DNA, 638 bp, Homo sapiens
ctgtctgcataaagtaaatgttcccagttgtagctttgaaaatttcttcttttcctttccttgcttcccacaagtggaaacaagaccctccctactcttttcctcctgcttgcacggcatttggtgagatggaagctcacagtatgagtttccccttgtggccccagcagattctggagactttgtgtgattcccatttcttggctatgggcccccacagatctggcttgttccaggtctttgtctaagtgcatttgagtgttttagaaggctgataaataaatgacagctctttaaaaaatattctcatggcccataccatgggttttgtcatatatgaaaatatcagcattttgattttgggggctctatgctttaatctatcttacaaagtttaatcacacaatacgaagaaagatgacatcaaagaaggtaacttcattatccaatttgagagcctctagctggggctacttaaaagtaaatataaattagtaaaaattaaaaaattcagttcctcaagtgctcagtagccccatactggctctcatgttggacaraggagatacagagtatttcacatcataataagttccactgatcagagttgtaaattactgagcttcagaagagcacag

SEQ ID NO: 495198 - DNA, 537 bp, Homo sapiens
gtcaaatgccagccatgaaagcaaaccaggtggggacgcttgctggggagtggtgcttggctgggaagagctatttccgtgctctggacatttctccctgcttccttgaggcagaaaaggaggcagagctgctggggagtagctgtcccatggtagctgtccatgaccccactggcttcttgctgtgaccttaagaagagtcacaaatggcagatctcttccttccttattcgccacctgtcctttgtttctgctccttcccatccttcagtctcatctgttctcccagagcattcttcccatgcctaagccccttcatcctagggctcctctggcagaatgggaggaaagagtgtggagggcagatggatggagcttggtgtctgttctgggacaggcatcaccatctattacttggctatctagaagstccatccaagattgtggacttgacaagagaaacctgatcctgacagttaacctgatcctgactgcctagatactaatacaatgagagaaaaaaactaaaaactgtgg

SEQ ID NO: 495199 - DNA, 537 bp, Homo sapiens
gtcaaatgccagccatgaaagcaaaccaggtggggacgcttgctggggagtggtgcttggctgggaagagctatttccgtgctctggacatttctccctgcttccttgaggcagaaaaggaggcagagctgctggggagtagctgtcccatggtagctgtccatgaccccactggcttcttgctgtgaccttaagaagagtcacaaatggcagatctcttccttccttattcgccacctgtcctttgtttctgctccttcccatccttcagtctcatctgttctcccagagcattcttcccatgcctaagccccttcatcctagggctcctctggcagaatgggaggaaagagtgtggagggcagatggatggagcttggtgtctgttctgggacaggcatcaccatctattacttggctatctagaagctccatccaagattgtggacttgacaagagaaacctgatcctgacagttaacctgatcctgactgcctagatactaatacaaygagagaaaaaaactaaaaactgtgg

SEQ ID NO: 495200 - DNA, 607 bp, Homo sapiens
ctggcctgagccaggatggcttcagctaggttaggaagagaaggttgtttccatagtgcaggaagggcagagcgtgtagaaagatgtctgatagaagcttgttttgccattagacttgctcctcccacacttcttattttgggaaagggcatcaccacagcccacatcacagggccacagactcagggcagcggggattacagagtatccctcacacccccacctaatcacccgcaaactttgtcaaatttaccacctcaacagyttctttattgcccctcctctgaaattcaattgctactgctttagtgtagaccctcatttccctttgccctgctggagtgaacctaacttcagttagaccctaaaacgctctgtgaaatgctccctacttggcttcctctctggcctcttccctaaatgccttccccctccattgacactgagtgaactgcagttcctcaactcacggtgctgtttctcttccacacgtctttgcaaatgccatctcctctacctggaatgcctttcctctccctatttttccaccaaattcctccacttggaagtctcccctgacgacttactccttccctcctctgtggca

SEQ ID NO: 495201 - DNA, 458 bp, Homo sapiens
gcttcccacttgtaaactgaaattaaattacctggaataggcctcccttctcttaactcccaatttgaaggctgcgattttaaattagatgagaatttacttaactctatttgatacatatccttatgaatgaacatttgttgactgtctactgaatgtgacaggtattgttctaagcactttatttgtaaygacttacttttacaaaacacccctatgagtaatgttctattgtccccttatttacagttgaggaaactgggtacagagagattaagtaactagtctgatgtcacaggtagtattcagctgagcctgcactcataaatatgatactgtcctgcttctcccttgctaatataggcaataaagagctttctgaaggggaagaaatattattattaaactgatttaatgaattactataattgcagtttcaataattagttttgtaaaat

SEQ ID NO: 495202 - DNA, 535 bp, Homo sapiens
ctaattatttgcctttaaggcttcccttgtacttcagctctccatgagctgctataagcagagaaggctgattaattgaaacctgattgtgcccttcatgggaatgcaagtttgctatagtaatttggtggcactgagttcagccatctgttcatattttcctctgtgaaaacactgtgcaagattttccaggtatacataaggcttttttgtggtaagaaaacataacaatgagatctactctcttaactcctttagtgtacgttacagtattrttacgtataagcacaatgttgtacagcagatctctagaacattttcatctcatttaaatgaaattttatacctgttgaatagcaactcttgctttccccctccctcagcgcctggcatccatcattctatttctgcctttgagttctattttagataactcatataagtggaatcatgcagcatttgtccccctgtggcttgcttatttcacttagcataatgtcttcaagatttatctaagttgtagcacatgtcagaa

SEQ ID NO: 495203 - DNA, 550 bp, Homo sapiens
gagcccttagttgcacctctggcagatggaaaagtggctgtgggccaggatgatctcaccgtggtactcaatgaggaagggatctgcacacagaaatgtgccctgaactggacggacataccagtggccatgggtgagaccaacagtagctgctgtttcccactttgggttgaggttgtgtgccattcctgcagaacggagtcccattcgtagctttagcagactggtttackttgtgtcattcactttcagttccccttcttataagtagatgacattttagggtcattaaaaatgggatagtctagttcttgcaagaagctgagttttactccagagggggaaaacatataaacagaaatgtttattttaggaagtgattatctactgctatcttttacttcttagtttttttcttcctcctttttttaagagttttgattgtgtcctctgccaaatagactacatttggaaattagtggaaattccttgtgtattcctatagtatgagtaattccatattgaagggtttttgatatagtaattccat

SEQ ID NO: 495204 - DNA, 607 bp, Homo sapiens
cacgctgctagtctgggggatcacaaatcaagagccatgccttgattattctcttcttgagtgcttcagttgacttttacaataccatagtttcctgatcttgaygcttaatgacatttgtagtcacattttctggtttcttctaccctttttctctaaaacagggcaatgttgcccctcagagaacattggtcaatgtctggagatgtgtttagttatcacaaataactaggaggaggggaagaaggaagagaagagggtccactgctactgatgtctagtgggtagaggccaggggtgctgctaaacatcctacagggcacaggacagtattattcacaggacaaagtattattcgtctcaatatgtgaatactgccaagatagagaaacactgctctggatgcaggcattctctccaagtagatatatattctttttttttgttatgagacagggtctcactctgtcacctaggctagagtgcagtagcacaatcatagctcactgcagcctccaggaatcgagacctgttgatattttagtcatgtttatgtagtcagcatatttttttaaaataatatgataaaataccataattaaatgat

SEQ ID NO: 495205 - DNA, 502 bp, Homo sapiens
cgtcatctggagatgaagatggaaggaaatggggatcaytgaggatgaagaagaaaaggagccctaaaggtctcttacagtcatcactttgtccgtagaaacacatctctgggaaggaatgagttaggtttttcttattctttcttcattaataaaaatagaaaaacaggtggtgaaacaaattggaaaacaatgtacacacaactaatactcttgaagaaagagatttcacactgtgtcctgctaacctgttctgatattcaatggcacttgttacccaggagttcttttttaaatcactatctgaaatccctattgctctcctgtgagctgtattttttttttttttttttttttttttttggctttcctctgtttatcctcaggggacagaaagaacatatggcaactatctctcaagtaataatccttcaattttggaaatacgtattatataagatttttcctctctagccttttattctttgagctaaataatact

SEQ ID NO: 495206 - DNA, 502 bp, Homo sapiens
cgtcatctggagatgaagatggaaggaaatggggatcattgaggatgaagaagaaaaggagccctaaaggtctcttacagtcatcaytttgtccgtagaaacacatctctgggaaggaatgagttaggtttttcttattctttcttcattaataaaaatagaaaaacaggtggtgaaacaaattggaaaacaatgtacacacaactaatactcttgaagaaagagatttcacactgtgtcctgctaacctgttctgatattcaatggcacttgttacccaggagttcttttttaaatcactatctgaaatccctattgctctcctgtgagctgtattttttttttttttttttttttttttttggctttcctctgtttatcctcaggggacagaaagaacatatggcaactatctctcaagtaataatccttcaattttggaaatacgtattatataagatttttcctctctagccttttattctttgagctaaataatact

SEQ ID NO: 495207 - DNA, 577 bp, Homo sapiens
ttttccagtgagaacagctgttagaaggctattttggtcaaccagaaattatgagatctgtgctaggkttgttgcattaggtcagaaaaaaaaaaggaagaactagatacaacttattgaaaatggatggttattgaaaatggatggtagaggaagggaagaaacaaacacttaatattagattctgaactttgacaattcagaaaacagagctgtaatatttttctccattttattgtccatagagactgccttggaatttgcaaatagtaggctcctcagttggaagtattaagacgtgctctctcatataggtaatttggttaaaaatctcaaaataagtaaaacattgaaatgaagcctcacaaaagctccatttaacatgtaagcacattgagaaataaagaaaacagtaacttttgtgagttatgtagctaacaaatggctacactgagattaattcagatctgtatccatctctgtccatggaaattaatcactgttgattgatcgctccctgtgtagaggataaaatgcaccaggtaaggggatgtttttattcagctactacaatagg

SEQ ID NO: 495208 - DNA, 548 bp, Homo sapiens
tattctgaaatttaattaaatagtagttttaaatctgaaaagaaaagaaaaacatactaagcttaaaagtaagagaggctatgagacatattggctattaaaacatttggatatctatatatatcctattgcaaaaatatttaaattatttcaacaaaatggaaaaaagcaattgaaggaagaggacaatataggatataagaaattactttaggtgattatyaccagattaagtaaagaaaaattagcaagatcttgattcttggtaaagtctcctttgagcaataatattactgcatttgattacatcttataatatagtaataatcaaatttaaatattgtttatttatattcaatgtgtagaatcaagctataggaaaaaaatcactgaattatggataactagcacgaagtaaatatattaaatttaacaatgcaaaacaatactatatgtaacaaactacaaattagtgggtatgaattttggaaggaaaaataactccctcgtattttgtattcgactatgtgtaaaacaaggttatctta

SEQ ID NO: 495209 - DNA, 647 bp, Homo sapiens
ctgcaagaattctgaaactagagggcatgacaggaaagcaggcaagggataagaaccactggtggaagtgattaatccttaggtcctctaagtataggaatccagtataaagcaaaatgattccattagccatactacttagaagttgtcatcagtggaggatacctagagatgactaccacaacatattatatatgcctgtgtatcatagacyacatataattttcaacatagcctgtcatttccaacaaatcctttaatcctcttcaaaaagatgcaagtttaaaacccctagaaccagggggaattatttgtctattataatcaggattttgatggttggagtgggcagaaaagaacatcgctaacataattcttttataatgagtcatagttctctctgagtgtatagagcaagctaatggagtattcacttcaatgcattaccttctgtgtctgtactatagataaggcattgtgcatgtttatttatgtgagaaacatgaagataaataaaagttccttccctctaagcctttactatcttgcaggaagttaggaaaagtttcacaaaaacaatacaagactgaattaatttacatagctttcttgggtgtaatatttatgcttcaatattctgattactt

SEQ ID NO: 495210 - DNA, 656 bp, Homo sapiens
tagttaattgtatttgtattttaacattttaaaatagaatggatgctgtgactattttgaatgaataaaagtgctgttaatcctccaatgtaacatttctacatggaaagaaactctacaatgtctaccatctattaatatttttctatcaaattatatcacagcagtagtttctatttctctaatttcaatatttwtatatatatatggctgagttactagcagaaacgtggttattagaaaatcctctcagtggaaatgaacttttaaaataacattttacatgatgctaaacactgcttttcagaacacctactcatttgttagctgctaaaataacaatgagacagtaatagcttaattcaaaacagtgataatatgtaatgcataaaggtcaaacccaaactctttgaatagagatttcatctatgttccttttaagtgtgtttctgtacttcagggataagctttttttgtgaagactgcattgcaatacttttcaagaattacttctttatgatcctcctttggaggtgaacatcaaaaagaaaacactccttaacctccttctttgtcaaaaattttgtattctccgaggactagattacaaacattgacacaatttcagagtcctcccctagaaactcatgtccaca

SEQ ID NO: 495211 - DNA, 563 bp, Homo sapiens
tatgctaaccctgtaagaaagcttccaagaaactggaagccaaaatttaagctcaggcacaggaaatattgtaacttctgccttctttttcccttggtctcagtcttcaatcrtaattgtaaagaggcaatttataaatgaaattattaaataaaaataaggcatcttgctagacagtatgatgtgatgtagaacatagagctcatttttttgttctttttaatattccaaataaatatcaagaacataatttctcctatactcctagtcatatatcttcatctttgttgttgaatataaggcccacacagctaaaaatgctgccaggaggctttggtggtgggaatgagagggcaagcagggactcctgtggtgccaagctccagcttgaaagcaacagggaacttgcctgcaggctggaagacagcagggcaggcagggcatagagagaagagagaaaggcctggattctcctccctgggaaacaaacattcactctgaaaccgtacacttcagtggctcttactgacttgcttatatcatatttcatgtggtggctatgg

SEQ ID NO: 495212 - DNA, 563 bp, Homo sapiens
tatgctaaccctgtaagaaagcttccaagaaactggaagccaaaatttaagctcaggcacaggaaatattgtaacttctgccttctttttcccttggtctcagtcttcaatcataattgtaaagaggcaatttataaatgaaattattaaataaaaataaggcatcttgctagacagtatgatgtgatgtagaacatagagctcatttttttgttctttttaatattccaaataaatatcaagaacataatttctcctatactcctagycatatatcttcatctttgttgttgaatataaggcccacacagctaaaaatgctgccaggaggctttggtggtgggaatgagagggcaagcagggactcctgtggtgccaagctccagcttgaaagcaacagggaacttgcctgcaggctggaagacagcagggcaggcagggcatagagagaagagagaaaggcctggattctcctccctgggaaacaaacattcactctgaaaccgtacacttcagtggctcttactgacttgcttatatcatatttcatgtggtggctatgg

SEQ ID NO: 495213 - DNA, 670 bp, Homo sapiens
atctggtcctgatttactgtttaattctgtgaccttaaattctatgacagaagccaggttgatcagttatctgttctatgtctctgcttaggccttcttcccatctcctcctcctttttttcttcttccttctcctcctcctctttcttttcctcctcctctcagtctgtctaaacactgtcrtcctttataacccaactcaagttccacatcctgcctggtgtgtcctcacagagtgatcttatgtctgtttactatttcattaatctctattctttgggtatgtttattgaaaacactaataaaattgttaaacctctactgaagttacaaagagaataataaatttcctgtataattttaacaggaatgaaaaaagaagaccccagatattaaataatatggtattacaaataacttaggacaataaatttgaaattttaatttttaagaccaaattttaaaaatagagctatcaaattaatgcaagaagaaatagaaaacctaaatgatcctgtagctcttaaataaatgaaatcagcaattttgttaagtagatacctgttctttctgagcctactgagagcttcctgatagctttcacgttagtcttacataaataatatatatctcaattttgcctgattgctgttatcagcagacccttttt

SEQ ID NO: 495214 - DNA, 670 bp, Homo sapiens
atctggtcctgatttactgtttaattctgtgaccttaaattctatgacagaagccaggttgatcagttatctgttctatgtctctgcttaggccttcttcccatctcctcctcctttttttcttcttccttctcctcctcctctttcttttcctcctcctctcagtctgtctaaacactgtcatcctttataacccaactcaagttccacatcctgcctggtgtgtcctcacagagtgatcttatgtctgtttactatttcattaatctctattctttgggtatgtttattgaaaacactaataaaattgttaaacctctactgaagttacaaagagaataataaatttcctktataattttaacaggaatgaaaaaagaagaccccagatattaaataatatggtattacaaataacttaggacaataaatttgaaattttaatttttaagaccaaattttaaaaatagagctatcaaattaatgcaagaagaaatagaaaacctaaatgatcctgtagctcttaaataaatgaaatcagcaattttgttaagtagatacctgttctttctgagcctactgagagcttcctgatagctttcacgttagtcttacataaataatatatatctcaattttgcctgattgctgttatcagcagacccttttt

SEQ ID NO: 495215 - DNA, 670 bp, Homo sapiens
atctggtcctgatttactgtttaattctgtgaccttaaattctatgacagaagccaggttgatcagttatctgttctatgtctctgcttaggccttcttcccatctcctcctcctttttttcttcttccttctcctcctcctctttcttttcctcctcctctcagtctgtctaaacactgtcatcctttataacccaactcaagttccacatcctgcctggtgtgtcctcacagagtgatcttatgtctgtttactatttcattaatctctattctttgggtatgtttattgaaaacactaataaaattgttaaacctctactgaagttacaaagagaataataaatttcctgtataattttaacaggaatgaaaaaagaagaccccagatattaaataatatggtattacaaataacttaggacaataaatttgaaattttaatttttaagaccaaattttaaaaatagagctatcaaattaatgcaagaagaaatagaaaacctaaatgatcctgtagctcttaaataaatgaaatcagcaattttgttaagtagatacctgttctttcygagcctactgagagcttcctgatagctttcacgttagtcttacataaataatatatatctcaattttgcctgattgctgttatcagcagacccttttt

SEQ ID NO: 495216 - DNA, 470 bp, Homo sapiens
ctgctcaaaaacctccttcccacaaagaagtaaagtcaaacaaagaggaaacaccagaagatgatattttttgcataaactctaagcattcaagcatatttcacatacactctgtgaggrtagtaaaatgactttattacctaaggaggagaaatgaagaaaatctaactaaaaggtttggatattttctactgtatgacactcagttgaccaggaaatagattgttcagctcagggggactatgtgaacccagcttctcttcataaggggatgtcaccttaaagcacagagatgtggtcatatttctttaccttctttgaactgcctggtatataatgggtgcccattaattatttctaatattctgtgcttgagtttgattggctgagagaagggcaagtgaggaaagatttaagtgattgaattctaagcttatcgtggaagttctggaccaaatactatttgccaa

SEQ ID NO: 495217 - DNA, 588 bp, Homo sapiens
tgtgcagccagctctcccctgccttcagggtcagcagcttaactctttctctctctgggygtgagaacaagctgtgccatgctgtgctgtgctgtgctgagccatgctctgtctcccctctgtccatctgcaagatggacagctctggttctcaatctctctctccctttctctgggcaccagcacctgcacaagagccatgttgagccatacccaagagccaaggcctgtgcacagtgtcagcagggcagctataatttttacagacaatagtagctccaagccaagtatgaacttacacaagcaggttatataacatttggagtatgcgcctgtgccctaaacttgctgagtcatgcagacctggatgtctgccttggcctaaccttgaccaaagcacatccgagtaccttacaacagtgcttctcctaaacttactaaaatttagtcttttctacacccaaccaactttacggcctagcttaaggcataacttaacataggtgtgggctgtgaagtcagggagatgagatgaggaagtacagattcttgcctcatggagctctgaggagaaaaaagatgggtgaa

SEQ ID NO: 495218 - DNA, 533 bp, Homo sapiens
tgtgcagccagctctcccctgccttcagggtcagcagcttaactctttctctctctgggtgtgagaacaagctgtgccatgctgtgctgtgctgtgctgagccatgctstgtctcccctctgtccatctgcaagatggacagctctggttctcaatctctctctccctttctctgggcaccagcacctgcacaagagccatgttgagccatacccaagagccaaggcctgtgcacagtgtcagcagggcagctataatttttacagacaatagtagctccaagccaagtatgaacttacacaagcaggttatataacatttggagtatgcgcctgtgccctaaacttgctgagtcatgcagacctggatgtctgccttggcctaaccttgaccaaagcacatccgagtaccttacaacagtgcttctcctaaacttactaaaatttagtcttttctacacccaaccaactttacggcctagcttaaggcataacttaacataggtgtgggctgtgaagtcagggagatgagat

SEQ ID NO: 495219 - DNA, 490 bp, Homo sapiens
cagtcagtaggggggatcttggtaaaatgcagatcccgatttaacaagtctggggtaggtctggctgcttccatcaacttcactttgactaagaccatgcggaaaatacttactagatgctgagtgtgtctaacacttttgtgttgaaaagacagtggcagaaagacagcatctaatcagcattagattagcagcaactaatctaatgctggctagattcrttgcttttagttattggcattgtgagagacactgaaattgaatgcatattacctggtgggaaatatttttttttggagtgaattagttaaccctttagtgaaggcctactgtgtgctaaaggctggggatacgggtaggatctaccagaactccgattatagaaggagatgatagaaatgctgaggataaaagctgcactggagggaccgtgggaagacaaaggggatacttaaccttggaccaggcaggagccccagggagatgttcc

SEQ ID NO: 495220 - DNA, 490 bp, Homo sapiens
cagtcagtaggggggatcttggtaaaatgcagatcccgatttaacaagtctggggtaggtctggctgcttccatcaacttcactttgactaagaccatgcggaaaatacttactagatgctgagtgtgtctaacacttttgtgttgaaaagacagtggcagaaagacagcatctaatcagcattagattagcagcaactaatctaatgctggctagattcgttgcttttagttattggcattgtgagagacactgaaattgaatgcatattacctggtgggaaatatttttttttggagtgaattagttaaccctttagtgaaggcctactgtgtgctaaaggctggggataygggtaggatctaccagaactccgattatagaaggagatgatagaaatgctgaggataaaagctgcactggagggaccgtgggaagacaaaggggatacttaaccttggaccaggcaggagccccagggagatgttcc

SEQ ID NO: 495221 - DNA, 555 bp, Homo sapiens
ctagagagattctgtgaggcagtggacataataaccagagttcacctggcaaaggcacaaggtaggtctcctcggggagagccccttctccccaccttccatggatcccagccagtctgggcccctgtggcttgggtgttccctggtcaggtgaagagggcyagtcctggccacatgagcagcaggcatggacagtggggccccggcaggtgtggaagcccagggagacctgtgtggggaatgcggagaacctgtctggggcctctaaaaactaatgcattctgaggaggactcatttctgataagttcttggttggtggaggttggtatttagggcaaaatgtgaactcactttcagccacagtttaagacaagctttattatttggttactcttgttttagtaacaaggctctgctggtggacagtgctgagaaagctgtgttccctctctgtgttccccagtgccagtgtctgtctctggcctgagactctgcatctctggttgtagcagccaccctcacacaggctgaaccaggcaggcaaggagcaggga

SEQ ID NO: 495222 - DNA, 555 bp, Homo sapiens
ctagagagattctgtgaggcagtggacataataaccagagttcacctggcaaaggcacaaggtaggtctcctcggggagagccccttctccccaccttccatggatcccagccagtctgggcccctgtggcttgggtgttccctggtcaggtgaagagggctagtcctggccacatgagcagcaggcatggacagtggggccccggcaggtgtggaagcccagggagacctgtgtggggaatgcggagaacctgtctggggcctctaaaaactaatgcattctgaggaggactcatttctgataagttcttggttggtggaggttggtatttagggcaaaatgtgaactcactttcagccacagtttaagacaagctttattatttggttactcttgttttagtaacaaggctctgctggtggacagtgctgagaaagctgtgttccctctctgygttccccagtgccagtgtctgtctctggcctgagactctgcatctctggttgtagcagccaccctcacacaggctgaaccaggcaggcaaggagcaggga

SEQ ID NO: 495223 - DNA, 640 bp, Homo sapiens
aaagttggctcatgaatgtgaaggatgaaccacagcacctcctccccaccccatgatagaccccacctccatttgctgaacgttgaaccttaggggaaagtatactagggtgtccagtcaccttagaattggctcttggcatctatggaaggctacagatccttcaatcctggaacactgacagtagcaatatccacttaggaaccaggcaaaatggaatcagagaaagwgtacaggcttcagggccagagggcctcagttttccaggccacctctacttcacattagatgttgatgtgcaggcaagttgcttcaacacagtgtaggtgtaaggggcatcagttcagaaggtggcattcaatatcaaggaaggtagcattggtaaacccacttagtaggctctcaataaatgacttcgattgttatataacctttgcaatccctcctggaattcaccctgtgtcctgataaataaatgtgtggtgtttatggaggaatctgcatctcctttgggagcatctacctagttaattctagcaagcacattttgaagtgactgactgcaattctgaagcattgtgtgaggcattaaaatcagattagttggccttccccaagagaactggtgaatttttcaaaa

SEQ ID NO: 495224 - DNA, 575 bp, Homo sapiens
tttcaattgagtgacagtgagcaaaagaatgccgtacaccaatttgcttcttaagtaatcaggctgcccctgtagggttagggaagggctagcttcagaacaaatcaggatctaattaggaagtgggataggaaatggatgctgggaaggcagccagcaacagcatccacaggtaccatgataagaggtttgtcaggaatagagagatgacacatggaaggttctgagcatgtgccttagcatgaccatagatcactctaataataagcaaaggtgcaaacccttctaggaatttctttctgtctctgctccaaataataatcattytgctcttttgaaacatgccccaggcacagcaccctgctgatgctctggagaagtggcaactcagtcacctcccctcagagaaaaggctgctcttgctgcaaacaactcgcagctgctttatggcttttccattttattgcaagtgcattcccagcagtctctgaacactgtattccagtgtcctaaacaaacgtccttgtcatgccatgagaggcatttgcatctgaagtgtcacctgggatcataaa

SEQ ID NO: 495225 - DNA, 414 bp, Homo sapiens
tataaactctgtatgcatgaaatatgttcacaatgagaatttaagtaggaaaagcaaaacacacagctatgtcagaagaatagtcccaatgcttctttgactttgacaaatgaggcacctacagatgtgtgattacatttttattcctaaatttaaatataatttcctaacagaatttgtacttattaaatgtatgcaaggaaaaacctggtcacaatgtttaactctacgagtgaagaatgtattgagcaccaccttatagcgcacactgctgtttgcagctctggacaaaycttgttgggcaaggccggtgcccatctgctattatgtctccagtgcccagcacactccagtgcccagcacagaaccagacatgaggcaggcatttagcaagtgtttaatgatggagaaatg

SEQ ID NO: 495226 - DNA, 414 bp, Homo sapiens
tataaactctgtatgcatgaaatatgttcacaatgagaatttaagtaggaaaagcaaaacacacagctatgtcagaagaatagtcccaatgcttctttgactttgacaaatgaggcacctacagatgtgtgattacatttttattcctaaatttaaatataatttcctaacagaatttgtacttattaaatgtatgcaaggaaaaacctggtcacaatgtttaactctacgagtgaagaatgtattgagcaccaccttatagcgcacactgctgtttgcagctctggacaaatcttgttgggcaaggccggtgcccatctsctattatgtctccagtgcccagcacactccagtgcccagcacagaaccagacatgaggcaggcatttagcaagtgtttaatgatggagaaatg

SEQ ID NO: 495227 - DNA, 348 bp, Homo sapiens
tggccactggccttgattcctgctaagtgtgcctctgacctcgtycccatgctgcctgccttgcagagggtgtatccggcagagcaacttccaatagtgtcgatggtgtcagaatgagcaggcccataaatcagccagggaggctgcaccctcactgtaaaagtgaaggggactttcagccgcattttcttcttgctgttgaaagtaaacagggcataaatcttgctgaagaagaaggtttctatccagccacctgcaaacaccccagcagtttggaggacagtcggcttacaccttcttccactcaaaacacagcacccagctcaggaccaggcacactgtgttcaa

SEQ ID NO: 495228 - DNA, 497 bp, Homo sapiens
ctggtaagcataataccttccaaatttgaaggtcatggctactcttcaacccttcctgtaaggtattttacaaaacagtggcctagagtagcaaaattgaagtggatgtgagctaacctttyaagatttagtctatcctagattgaacacacatgtggctgtgaccattctcatgtacttacaaaccttctgttacaaaagggaactttcctatattttttgtcctcctcagtcctaaacttggcatgctaacttaaaaccagttataggagagagatgctggaggattcccaggatgaaacattcctcagcagcctcctgacttaactcagatccagcagctcttggcagatcctgaactaatgtcattacagtgaattgagccaaaacgattattgcttgctcacattttaggaacacttgttgttgaagaagcaaactaacaataacaagttaggcattccttctgaatttaccatataaggattatgtataaa

SEQ ID NO: 495229 - DNA, 497 bp, Homo sapiens
ctggtaagcataataccttccaaatttgaaggtcatggctactcttcaacccttcctgtaaggtattttacaaaacagtggcctagagtagcaaaattgaagtggatgtgagctaacctttcaagatttagtctatcctagattgaacacacatgtggctgtgaccattctcatgtacttacaaaccttctgttacaaaagggaactttcctatattttttgtcctcctcagtcctaaacttggcatgctawcttaaaaccagttataggagagagatgctggaggattcccaggatgaaacattcctcagcagcctcctgacttaactcagatccagcagctcttggcagatcctgaactaatgtcattacagtgaattgagccaaaacgattattgcttgctcacattttaggaacacttgttgttgaagaagcaaactaacaataacaagttaggcattccttctgaatttaccatataaggattatgtataaa

SEQ ID NO: 495230 - DNA, 579 bp, Homo sapiens
actgcaacctccgcctcccaggtacaagccattctcctgtctcagcctcccaagtagctcgaattacaggcatgcgccaccacgcctgcctaattttttgtatttagtagagacaggatttcaccatattatgctggtcgcgaactcctgacctccggtgatcgacccgcctcagcctcccaaagtgctgggattaaggcgtgcgccaccgcgcccggcccctgctataatcttttcagaattcgtctgcaaggtcttcaacactgttaccctgaacacacttccggcatgaaatatgaatgccctacatttcttaaattgtgcatctaacaatggagaagattagtctctaaaaattataattcccttaggaacgatttagtaaacctggtgaattactcgagcagmgcgcctgtccaccactttaaggcttcaagctccagcccgacgcccctccttccctctccacgcccttccctgacaaggcttgagtggcgggcgagagcagggctgggcggggcctcccgtccctcgggcggggtgtcacttccaggttccgcgagcacttccgggtcgtca

SEQ ID NO: 495231 - DNA, 587 bp, Homo sapiens
gctgccctgggcactcgctgcgttcgctcaccgctgtcacctgcacggtgtggctggcagctacggactcttcaccctctgcgagaacagcatgatcctctctgctgccatcttcatcaccctcttaggtctgcttggttatctccattttgtgaagattgatcaggagactgttaatcattgattcccttggcattcagatgacttcatcttatgcttcaggctaagaaagcactaccttcatagaaatgggcaaggtcaaggatattgtcatcaatgaggctatttacatgcagaaggtgatttactacctctgcatcttattgaaggatccagtggaaccacatgggatatcccaagtagtacccgtcttccagagtgccaagccccggctggactgcttgactgaagtatacaggagctgccaggggatcctgcacaccagaaagccacatcaacaagcccatgagccccagcgttcagaaggccagcatygtcttccatgggagatgactcttaagccataagggttggttttccgtactccaaaccatcaggtggacacagtcctaggaaccattatggat

SEQ ID NO: 495232 - DNA, 603 bp, Homo sapiens
aatttttagtagagacagggtcttgctatgttacccaggctggccttgaacttttgggctcaaacgattctcgtgcattgacctccctaagtgttgggattacaggcatgagcactgtgcccagcctagcagtgtttaagataaagtctcagccttctgagtagctaggactacagtggcacaccaacatgcccagctaattttaaaagtttttttggtagagaccggatattgctatgttgcccaggctggtctcaagcaatccttctgcctcggcctcccaaagcactaggattataggcgtgacstgctatgcctggctacactttcaaagtaaaaattctgactgtcagagctgacttatacacttattatatataagtaacacataaaagtagatataaattccttatgcaacagctcttatacaattataaaacatgtaacaattttaaacaaatatgactgaaatgcacaaatataatgtgatgtatgatgcaatgtatgaagctcaatttttactcacgagactacagtaacaatggttcaattcttctgagatcagcattcctatatttactatcaccaccatatgcaacagtg

SEQ ID NO: 495233 - DNA, 603 bp, Homo sapiens
aatttttagtagagacagggtcttgctatgttacccaggctggccttgaacttttgggctcaaacgattctcgtgcattgacctccctaagtgttgggattacaggcatgagcactgtgcccagcctagcagtgtttaagataaagtctcagccttctgagtagctaggactacagtggcacaccaacatgcccagctaattttaaaagtttttttggtagagaccggatattgctatgttgcccaggctggtctcaagcaatccttctgcctcggcctcccaaagcactaggattataggcgtgacgtgctatgcctggctacactttcaaagtaaaaattctgactgtcagagctgacttatacacttattatatataagtaacacataaaagtagatataaattccttatgcaacagctcttatacaattataaaacakgtaacaattttaaacaaatatgactgaaatgcacaaatataatgtgatgtatgatgcaatgtatgaagctcaatttttactcacgagactacagtaacaatggttcaattcttctgagatcagcattcctatatttactatcaccaccatatgcaacagtg

SEQ ID NO: 495234 - DNA, 691 bp, Homo sapiens
tctttttatcctagtctagcaatttcactaaatagctagtagagaaaacaaaactgatcaacagagctttagctaaacaactacttgggccaagaaatttcatcttgatttacagaagtttttgtagtttcatactttgcttcttcagttctgcaatgtgcagaattccccacaggtggcagaaaatcaytggaaatcatatatagttatgtgatttcttttttttaagatcttcagttccttcttcattttagtaactttattatttaataagcttgatcagtgtttgctttggtttcgagtaagccatcctattacttatctttttatccctatcttgttaattatccatacttattgttgaaacattacaaactacaagtaagccaaaaagataattattattaacatatttatgtatagcctttcagattatatatatatatatattcacacacatatatattttatgtataaattgcacatataagtctttataaaaatcagataatgtacttagtggtttataatctccattttcttcttttcatttaaaatatgagctgggtgcagtggctcacacctgtaatcccagcactttgggaggctgaggtgggtggatcacccgaggtcaggagttcgagaccagcctggccaacgtggagaaaccacgtctctactaaaattacaa

SEQ ID NO: 495235 - DNA, 537 bp, Homo sapiens
cccctgcctcttcttgggcactttagtccctggtatctcagagaagctgaactcctgaccttctctatatgcttccagatctagggtgtattccacagctgcagccccatccattgcaaggttctgagcagattggcttgatatgatgcacatttaaaaataattattctggttactgcactggaaataatctttgggggatcagcagtggagttgggtggggtacaggcaagggtggaggcaaagaagagactagtgaggaggctgttgtaatgatcccagtcagagacgatggtggcccagaycaacacgagggaaaacaaagaactaaggatgctttctagagtcccactgtgagcagctgggtggatgatagtgccattcactgaaataggaaaataagctgaatattttcccaaatgagtgaagtggttgcccaaacccaggtgattatgggttattgcaggcaccctgaatctggtctctaatgttaaggttaaaggtcagttggaccaaaggatcagagctccctaaaag

SEQ ID NO: 495236 - DNA, 537 bp, Homo sapiens
cccctgcctcttcttgggcactttagtccctggtatctcagagaagctgaactcctgaccttctctatatgcttccagatctagggtgtattccacagctgcagccccatccattgcaaggttctgagcagattggcttgatatgatgcacatttaaaaataattattctggttactgcactggaaataatctttgggggatcagcagtggagttgggtggggtacaggcaagggtggaggcaaagaagagactagtgaggaggctgttgtaatgatcccagtcagagacgatggtggcccagatcaacrcgagggaaaacaaagaactaaggatgctttctagagtcccactgtgagcagctgggtggatgatagtgccattcactgaaataggaaaataagctgaatattttcccaaatgagtgaagtggttgcccaaacccaggtgattatgggttattgcaggcaccctgaatctggtctctaatgttaaggttaaaggtcagttggaccaaaggatcagagctccctaaaag

SEQ ID NO: 495237 - DNA, 538 bp, Homo sapiens
agctgctgcggaggctgaggcaggacaattgcttaaacccgagaggtggagattgcagtgagctgrgattgcgctactgcactccagcctgggcaacacagtgtgactctgtctttaaaaaaaaattgccaggcacggtggctcacacctctaatgccagcactttgggatgccgaggcgggcagatcacgaggtcaggagatcgagaccatcctggctaacatggtgaaaccccgtctctaaagtacaaaaaattagctgggcgaggtggcgggcacctgtagtcccagctactcgggaggctgaggcaggagaatggcgtgaacccccggggggcagagcctgcagtgagccaagatcacgccactgcactccagcctgggcaacagctagactccatctcaaaaaaaaaaaaaaaatttgggacagtaaaggacctgggggaagaaaggttatgtaacaattatgtgaaccaaatgtagttcaacttagttttactctagtatgaatatgaggagctaagcatctttgtatctct

SEQ ID NO: 495238 - DNA, 538 bp, Homo sapiens
agctgctgcggaggctgaggcaggacaattgcttaaacccgagaggtggagattgcagtgagctgagattgcgctactgcactccagcctgggcaacacagtgtgactctgtctttaaaaaaaaattgccaggcacggtggctcacacctstaatgccagcactttgggatgccgaggcgggcagatcacgaggtcaggagatcgagaccatcctggctaacatggtgaaaccccgtctctaaagtacaaaaaattagctgggcgaggtggcgggcacctgtagtcccagctactcgggaggctgaggcaggagaatggcgtgaacccccggggggcagagcctgcagtgagccaagatcacgccactgcactccagcctgggcaacagctagactccatctcaaaaaaaaaaaaaaaatttgggacagtaaaggacctgggggaagaaaggttatgtaacaattatgtgaaccaaatgtagttcaacttagttttactctagtatgaatatgaggagctaagcatctttgtatctct

SEQ ID NO: 495239 - DNA, 445 bp, Homo sapiens
tttactgtcttatgtgatgtatgacagtaggaatctgcactcattcattttggtacatgtccrtagggcaaaatcagattcggtgtttaggtatattttgtctgcttcctgcattcccatggttttgacattatattttactttttttttgtgaacataccaatgcttcaatttttttccagtaatataatcaactatattatgagaaagagaaaaattttgataaaacacaaatttcatgttttcctactctaattggcttttacttaacaatacaggtaaaatttagttgtgctgttttgctatttctgtttggctattctctgtttgtctatgtcttctccacataggcacaattagggaatttcgtacactcttgtgccaactgctttgatagtcacaagatgtatttctcgaactcctaggtataaaactcaagtatcca

SEQ ID NO: 495240 - DNA, 445 bp, Homo sapiens
tttactgtcttatgtgatgtatgacagtaggaatctgcactcattcattttggtacatgtccatagggcaaaatcagattcggtgtttaggtatattttgtctgcttcctgcattcccatggttttgacattatattttactttttttttgtgaacataccaatgcttcaatttttttccagtaatataatcaactatattatgagaaagagaaaaattttgataaaacacaaatttcatgttttcctactctaattggcttttacttaacaatacaggtaaaatttagttgtgctgttttgctatttctgtttggctattctctgtttgtctatgtcttctccacataggcacaattagggaatttcgtacactcttgtgccaactgctttgatagtcacaagatgtatttctygaactcctaggtataaaactcaagtatcca

SEQ ID NO: 495241 - DNA, 511 bp, Homo sapiens
aaaaggataggctaccccaaagatgagctttctacctctcatctcttatctgcttaaagttgtgtattagtccattctcacacagctatgaagaactacctaagactgggtaatttataaaggaaaggggtttaattgactcacaattccgcattgctggggaggcctctggaaacttacaatcatggtggaaggcaaaggagaagcagataccttcttcacaaggctgcaggatagagtgagtgcaagcagggraaatgccagacacttataaaaccatcagatctcaagagactcgctcactatcatgagaacagcatgggggacacagccctcatgatctaatggcctccacctggtcttgtccttgacatgtggggatcatggggattatgaggattacaattcaggatgagattttgggtggggacacagccaagccatatcaacttgtaaaatatttttttcccttttgatacttcagatatgttaggactcatttataacgaat

SEQ ID NO: 495242 - DNA, 652 bp, Homo sapiens
atgaactccttctcaaggaatgctttcctctaactgcggtgaaggtggtggctctggtggtyctctccaacatgggtgtctgggttttgactgcctaagagaaggtaagggacagatggatgaggcatgggacagtgtgcctttgcaaagcacattggagactttgcacagggctgcctgaatggtcccttacatggaaaaggtagcttggatttcagcctgaatgctactgaagtttgggtttatttcattactttattgctaaacactatgctgtggtgttatggactgtgctttactgggaaataagttcacatggcaaaaaaatatttcaccaggtgcaaaaggtcatgtgattgccctggaattttttagcatcttggttagaaacttcagttaaacctcaaactttcgagtatggtgaaatacctggtcttatattaaccctaagtatgttgtgtgttacttagaaatcttacttcaagactggaagtctgcattgaagactcagggaaactttggaaaactaagttaccttggttgagaaggcatgatgaggctgtaactgtttacagagagacttttgtttaaaactgcagggcatgttgtaaggttggtttggtatctttgtggttttgatattaaggtccaa

SEQ ID NO: 495243 - DNA, 533 bp, Homo sapiens
tgcactgagcaataagaagtcgtgaaagtctctcaaactcaagagtaagagaacaaaactacgcagatgttggtcttgccgctgttttaacatccttttccttcctgagtttgaacccaactacagagcaggcaatgggtctagaataatttatagataaggttccacattatcatatacctataaaacatactgataatttagccagaacataaaatcattttttttagtggatagaactatcttgttctttacattccgtgtaaattctcagatacgtcatttttaacataattacaagatactgacaaaataaaataagctttcagctggtatcgattgctgatttaaaataatccagatgtcttctggacagtttgtgcataccttattatccactaattatctattacattctataattttcttatccaggggcccttaaagagtgtgaggaatgacagtagtctgtgatkaaaaaacaagtttataagaatttctactgagtcaatgttctgctatgaattttgttt

SEQ ID NO: 495244 - DNA, 603 bp, Homo sapiens
tggaacacccaggtaaactaacacaactaggttcctacacacaaaacaaatattctaaactgtttccacagggcagccaccaagggaaaaataaggaaatttaactattttattctaaacacttcatttacatataaggcaactgtggccccaaggttgtgatttattaacctagttaacggcagaagctgcactaaaacctggatcttctacttaaaatgttgttttggccaggcgcggtggctcacgcctgtaatcccagcactttgggaggccaaggcggacggatcacaaggtcaggtgtttgagaccagcctggccagcatggtgaaaccccgtctctactaaaaatacaaaaaattagccgggcatggtggcctgcrcctgtaatcccagctacttgggaggctgagtcagaattgcttgatcctgggaggcagaggttgcactgagcagtgatcacaccactgcactccagtctgggtgacagagcgagactccatctcaaaaaaaaaaaagtttgattcttttatcatcaagcattaatttaatatccaaaggcatatattcgtatttactgtgctttaaacatttgtctgtgcg

SEQ ID NO: 495245 - DNA, 603 bp, Homo sapiens
tggaacacccaggtaaactaacacaactaggttcctacacacaaaacaaatattctaaactgtttccacagggcagccaccaagggaaaaataaggaaatttaactattttattctaaacacttcatttacatataaggcaactgtggccccaaggttgtgatttattaacctagttaacggcagaagctgcactaaaacctggatcttctacttaaaatgttgttttggccaggcgcggtggctcacgcctgtaatcccagcactttgggaggccaaggcggacggatcacaaggtcaggtgtttgagaccagcctggccagcatggtgaaaccccgtctctactaaaaatacaaaaaattagccgggcatggtggcctgcgcctgtaatcccagctacttgggaggctgagtcagaattgcttgatcctgggaggcagaggttgcactgagcagtgatcacaccactgcactccagtctgggtgacagagcgagactccatctcaaaaaaaaaaaagtttgattcttttatcatcaagcattaatttaatatccaaaggcatatattygtatttactgtgctttaaacatttgtctgtgcg

SEQ ID NO: 495246 - DNA, 462 bp, Homo sapiens
ccaaaaataaatcagaccagcatatagataaaataagcaatctgactgcatatttccacatttgagtgcatcatattggaattactaagcacagttaatatgacagacattgggaaattcacttaaattttccacctgcttcaggtttcccagatgcaaatgtcaaataataaaagtctttctttccaaggkgctatcacatgcttaggtgaaggacactacaggaggaaaaataaaacaaaaactgttgtctttgctcacaaaatgagatcttataaccttacctaatagattggtaaccacaaggccagatcttctttcattggtagcaaattagcttcatgtctgctggctagcattggctatactgatgcatatcagagaggccaggtccactgcgtacctttgggctcagagcagtgcacattatttatccacttgtaatacctgttttggaaacaa

SEQ ID NO: 495247 - DNA, 654 bp, Homo sapiens
cattgaaattgttacatgccattaggcttactgtaaactatcccttgataaattatttgctggacaatgagcttaagaatctgaggtgtcttcttgcttttatagagcaaaataggactctgatgcttaaatggaagtcrcagagcacataatagggtgtaggtaaagttactgaacagccacatctcactttcaggaaagtagtggaagagattgtgtcttgagaagacaggcattttagaggtaacccttttaagatttcaattagttatttaagtatatgaatcatgtgcttatatgtattacttaaatgtttctgaggccagcaggcatataggaatcttaaccagctacagggagaagttttgtttttctaggactagacatattttttttttaactggggcagaaaatgctttgggtttttcatgtttaatcacagaatttggagaaaactttaggactttatatggataacatcattattaactatgaaataataaaaagtggtgttctgattcccataatgacaatctaataatgtatgacaaggtgtattgaaagcagttcacattttcaatggttgactttagatagatatatataagatgttttcagagaaaatttatggtatttttttcaaaaattactcga

SEQ ID NO: 495248 - DNA, 654 bp, Homo sapiens
cattgaaattgttacatgccattaggcttactgtaaactatcccttgataaattatttgctggacaatgagcttaagaatctgaggtgtcttcttgcttttatagagcaaaataggactctgatgcttaaatggaagtcacagagcacataatagggtgtaggtaaagttactgaacagccacatctcactttcaggaaagtagtggaagagattgtgtcttgagaagacaggcattttagaggtaacccttttaagatttcaattagttatttaagtatatgaatcatgtgcttatatgtattacttaaatgtttctgaggccagcaggcatataggaatcttaaccagctacagggagaagttttgtttttctaggactagacatattttttttttaactggggcagaaaatgctttgggtttttcatgtttaatcacagaatttggagaaaactttaggactttatatggataacatcattattaactatgaaataataaaaagtggtgttctgattcccataatgacwatctaataatgtatgacaaggtgtattgaaagcagttcacattttcaatggttgactttagatagatatatataagatgttttcagagaaaatttatggtatttttttcaaaaattactcga

SEQ ID NO: 495249 - DNA, 654 bp, Homo sapiens
cattgaaattgttacatgccattaggcttactgtaaactatcccttgataaattatttgctggacaatgagcttaagaatctgaggtgtcttcttgcttttatagagcaaaataggactctgatgcttaaatggaagtcacagagcacataatagggtgtaggtaaagttactgaacagccacatctcactttcaggaaagtagtggaagagattgtgtcttgagaagacaggcattttagaggtaacccttttaagatttcaattagttatttaagtatatgaatcatgtgcttatatgtattacttaaatgtttctgaggccagcaggcatataggaatcttaaccagctacagggagaagttttgtttttctaggactagacatattttttttttaactggggcagaaaatgctttgggtttttcatgtttaatcacagaatttggagaaaactttaggactttatatggataacatcattattaactatgaaataataaaaagtggtgttctgattcccataatgacaatctaataatgtatgacaaggtgtattgaaagcagttcacatttkcaatggttgactttagatagatatatataagatgttttcagagaaaatttatggtatttttttcaaaaattactcga

SEQ ID NO: 495250 - DNA, 587 bp, Homo sapiens
actgatttggccaacttgaaaggagagcaaatgtctagtatttgaatgaaatacattacttgggaaaattgaactaagttaatacagagaaacatcaagataagggataactgtttgacaagggtatccctgaaaacagctttttccctttcctctcttggattcatatgagcactgctaaggaaggttagaatggtggtagattatacagtaggaactcctccaggagakaaatcaggccttattgatctcttgcagttctcagtattatttttaattataataagttattgatgaatgatgaaatgtggtagttcattgttctaaatttgtcaatctaggaataaacagataaagtagcttgatatctttagtcagtcaattcaaacatgtgattggatggatggctttcactaacgtcagaaggtttgcatcatttgatggctttttcctggtgtcaacacttctttacataagcggatcaacacatcctggtctaagcaaagaacatatcttactcccctcgcccccactccccccaaaaatccctcaacatgttgtatggtctccaaggaaaagtattcaaa

SEQ ID NO: 495251 - DNA, 587 bp, Homo sapiens
actgatttggccaacttgaaaggagagcaaatgtctagtatttgaatgaaatacattacttgggaaaattgaactaagttaatacagagaaacatcaagataagggataactgtttgacaagggtatccctgaaaacagctttttccctttcctctcttggattcatatgagcactgctaaggaaggttagaatggtggtagattatacagtaggaactcctccaggagataaatcaggccttattgatctcttgcagttctcagtattatttttaattataataagttattgatgaatgatgaaatgtggtagttcattgttctaaatttgtcaatctaggaataaacagataaagtagcttgatatctttagtcagtcaattcaaacatgtgattggatggatggctttcactaacgtcagaaggtttgcatcatttgatggctttttcctggtgtcaacacttctttacataagcggatyaacacatcctggtctaagcaaagaacatatcttactcccctcgcccccactccccccaaaaatccctcaacatgttgtatggtctccaaggaaaagtattcaaa

SEQ ID NO: 495252 - DNA, 587 bp, Homo sapiens
actgatttggccaacttgaaaggagagcaaatgtctagtatttgaatgaaatacattacttgggaaaattgaactaagttaatacagagaaacatcaagataagggataactgtttgacaagggtatccctgaaaacagctttttccctttcctctcttggattcatatgagcactgctaaggaaggttagaatggtggtagattatacagtaggaactcctccaggagataaatcaggccttattgatctcttgcagttctcagtattatttttaattataataagttattgatgaatgatgaaatgtggtagttcattgttctaaatttgtcaatctaggaataaacagataaagtagcttgatatctttagtcagtcaattcaaacatgtgattggatggatggctttcactaacgtcagaaggtttgcatcatttgatggctttttcctggtgtcaacacttctttacataagcggatcaacayatcctggtctaagcaaagaacatatcttactcccctcgcccccactccccccaaaaatccctcaacatgttgtatggtctccaaggaaaagtattcaaa

SEQ ID NO: 495253 - DNA, 620 bp, Homo sapiens
gccccctccagtgcctagtgccgtacctggcacaagggatggggaaatgcatttctggggagcccgccaatgttccagatgctgctaggcacttaacgtgggccttctcacttcatctttacaaactccattgaggtagggaccacgatgttcatatgaaggaggaagggggttctgagaggccaaggatgtatgcagggtayaggctggcaaaaaatgcttcctgggccaggcacggtggctcatacctgtaatcctagcactttgggaggtgggaggatcacttgagtccaggagttcgagaccagcctggccaacatggcaaaaccctgtgtctactaaaaatacaaaaaattagctgggtgcagtggcacatgactgtaatcccagctacttgagaggctgaggcagagaattgcttaaacccaggaggcggaggttgcagtgagctgagactgcgccactgcactccagcctgggcgatggagtgagactctgtctcacacacacacacaaaaagcttcctgaatgatttacaaaccaatagactgacttgaactgggacaagtttggagctcagaggactggggtggtgaaggaagtcttttccaagaagcagt

SEQ ID NO: 495254 - DNA, 620 bp, Homo sapiens
gccccctccagtgcctagtgccgtacctggcacaagggatggggaaatgcatttctggggagcccgccaatgttccagatgctgctaggcacttaacgtgggccttctcacttcatctttacaaactccattgaggtagggaccacgatgttcatatgaaggaggaagggggttctgagaggccaaggatgtatgcagggtacaggctggcaaaaaatgcttcctgggccaggcacggtggctcatacctgtaatcctagcactttgggaggtgggaggatcacttgagtccaggagttcgagaccagcctggccaacatggcaaaaccctgtgtctactaaaaatacaaaaaattagctgggtgcagtggcacatgactgtaatcccagctacttgagaggctgaggcagagaatygcttaaacccaggaggcggaggttgcagtgagctgagactgcgccactgcactccagcctgggcgatggagtgagactctgtctcacacacacacacaaaaagcttcctgaatgatttacaaaccaatagactgacttgaactgggacaagtttggagctcagaggactggggtggtgaaggaagtcttttccaagaagcagt

SEQ ID NO: 495255 - DNA, 594 bp, Homo sapiens
atcagcagatatgtgagtgaggctatcttagaccatgtggctctagccacactgttgagtgagtctaggtgagaccagcagaagaaccatcctgttgagcccagccaaaattgctgatgcacagaattatcagcaaatacaatggttgttattttaagccartaaattttgctggttgtttctaccacagtggttaactgatacaaatgggatgatctggctgtcacaagggcataacagcatgccttgaatatgtttttaaaaatctaacaattttgtattagggttcactcaaagaagaagaaccattggtaggttattacacatacacacacacacacacactcaataagaatttgttaaatgcaattatgcaattgcaggagctagttaatcagtctccataaggctattgttttactatctaatgctagaatttcaagtccacaggaagatggatgtaaagtaggcaagagcaaggacaagacaggacccacaagtatccactagaatcaggaggatggactgaaatgtgttgttttttgccacctcttacattagcgtcctgcaggagaagctggtgccgtcatcatg

SEQ ID NO: 495256 - DNA, 594 bp, Homo sapiens
atcagcagatatgtgagtgaggctatcttagaccatgtggctctagccacactgttgagtgagtctaggtgagaccagcagaagaaccatcctgttgagcccagccaaaattgctgatgcacagaattatcagcaaatacaatggttgttattttaagccaataaattttgctggttgtttctaccacagtggttaactgatacaaatgggatgatctggctgtcacaagggcataacagcatgccttgaatatgtttttaaaaatctaacaattttgtattagggttcactcaaagaagaagaaccattggtaggttattacacatacacacacacacacacacwcaataagaatttgttaaatgcaattatgcaattgcaggagctagttaatcagtctccataaggctattgttttactatctaatgctagaatttcaagtccacaggaagatggatgtaaagtaggcaagagcaaggacaagacaggacccacaagtatccactagaatcaggaggatggactgaaatgtgttgttttttgccacctcttacattagcgtcctgcaggagaagctggtgccgtcatcatg

SEQ ID NO: 495257 - DNA, 547 bp, Homo sapiens
taattcggcaggaaagggtggaattatgtaatgagaggcgctgcagtcagctcactccctatctggaagaaaatgcacctgggcctgtctcttacactagcccacaaaacaaattccagaagagatttattaaataaaaaaaaaaaccataatatgaatcttgtaaaaaaaatgtaaaatatgagaagaccttctcaaccaagactggaaacgcagaagttatgaaatttgacaatttatttatttatttatttattttgagacagagtcttgctctgtcgcccaggctggagtacwgtagcccaatctcggctcactgcaagctccgcctcccaggttcacgccattctcctgcctcagccttccgagtagctgggactacaggtgtctgccacaacgcccagctaattttttgtattttttagtagagacagggtttcaccatgttagccaggatggtctcgatttcctgacctcatgatccgcctgcctcagcctcccaaagtggtgggattacaggcgtgagccactgcgccggccgaaatgt

SEQ ID NO: 495258 - DNA, 612 bp, Homo sapiens
catatatatttctatacacgcctgagttcccttttcaggcaaatacctggcctcagtttagacagggctttttatcgctcctgggacagcactgcggctggggccagcatctgatagcttttctttattcaacccccaggagtattaagagaaggaaatacacacaaacagcaatttattttagctctctgaagcatccaccatttcaggttctcttttgccagcatttccaccaaattaatctcccaggcccctcacagaagctctctagctccctagagccttacaactccagaagtatcaacaacttagagactggagttttaaataataaaggatrccctccctcaaatggcgcatctaacaggttgacaggcggggacagtgaagactgaaggaagctccaacttgcagcttgacttacaagacaaacagcagagaatagcagttaaaaggccagccagaaacttgtgagatcaatatatcgcagctctgtcttacttaagagtcgtatgatcttgggcaaggcatctaatctctctgccccttatttccttcatcaaaaaaagtgggggggctcataatacctactccctgggtctgttgggaaga

SEQ ID NO: 495259 - DNA, 569 bp, Homo sapiens
tcttcttttcgtacccttaacatcattatcaagcctaacaaaataaaataactatttagtattatggaaatatccagtcagtgttcaaatttcccttaatggttcgtaaatgcactttcaaagttggtttgttataaggattcaaacaaggtccgtgtattgcatttggttgaaatgtttcttagtcctatttaatcaatatgctgtttagttggtaatgtgtcttagagatcattctaatgaccaagtttttaattagctgcctagtaagccattgcacaggtgttccatcatgtattttgtcagtcyccagtggtggatggttaaacttttctcagcctcttactgttataaactgtgctatgcagtaaatagtctcaaacatgtggctctgtacatgcttgagatgcaagaatacacataagacaaatccctatacaaggcatcattcagtcaaatggcatttgcaattttgacaaaaattgataaattgtctaccaaagagattgccccaaggctacacctgttaccgcttacccatacccacaccaacaatgggtattatagaa

SEQ ID NO: 495260 - DNA, 531 bp, Homo sapiens
taggaatggtttaaggtagagataataaaatgtaaaactgagtcctattttgaacttttcaagtcaaagcaatgagagccttcacacagaatctacaataaatgcaacctgaaagttgaaatgaatttagcatgttaatgttcttcatgatgtgatcagtcttatcaattacagctacagcagccstgagcagtttgtgaagaattgccaataaaaatactaaaatcagctctgcacaagatgggagtatcatgacatctgttttcaaaattactctgctgtaattgttgaatctcattatagttggtaaaaattgtattctttcacctgggataagtgcctgtgattttaaatagcatcacttcagaaatgacaattgtgaatccatgctaattacatcgctgtgctgtacttgccaaaaagagaggattcttaccagtgatttgtaccactttgggtgttcatgactgtgggcagcaatgaacctcacatcaaactgactttggcagggaagtaatgtaataacacatg

SEQ ID NO: 495261 - DNA, 552 bp, Homo sapiens
gtggtttacaaaatctgacatatgttccttctctacccagcccagccttagaaccgtctgagcccagccatctaacttccttcttttgagtcactactgagatgttgtaaactcagggctctcccttactcagcaagtttaataaatttagctttgtgtcatcaaagggtggctctggtggtctttgtgaggtgctttgcaaaagtcaatgggtgcattgctgtatagaaaatgaagagtgaggtcgggcattggtggcttatgcctgtaatcccaatactttgggcggacaaggcaggaggactgctggagttgaggagttggagaccagcctaggcaatatagtgagacatcgtcgctacaaaaagttaaaaaattagctgagcatggtggtgtgtacctgtagtcctagctacttgggaggctgaggtggraggattgcttgagcccaggagacagaggccgcagtgagctgagattgcatcattgcaccccagcctgggcaacagagcaaggtcctgtctaagaaagaaagaaagaaagaaaagtgaa

SEQ ID NO: 495262 - DNA, 636 bp, Homo sapiens
ttatgtgaggacacagcgagaaggcatcatctatgaatcaggaaggaggccctcaccagacacaaaatctgcctgtgtcttgatctcagacttccagcctccagaactgtaagaaataaaagttgtatgtaagccacccagtctacactattttataatagtcactggaatggactaagacaagcccccaggttacctggagagatttgtttttaaaagttgaaaagatttgaccatatttaggtaggaagataaaatctagaggattgttaatgtgagttcatgttggtactttctaaaagtgaactttgccacattaagccagaggcattcattgtcttgaagatttttttaaagactattacagcaggaatgcaaaaactaagtaaataacttttaatcaccaaaataggctctggaacccatttcaggggctgtggttgacagtgaaaacaatttccacacagcttactacttgtatcaacatgcctttgctatcctaattcgtgattagaaagagcctaaatcaatcccttattgtgrtgggaattgtacgatttgaaattcaggagctctgtctctcagtagccaagttccctgcgacaaagagggcttattagttgtgattgtgttcag

SEQ ID NO: 495263 - DNA, 531 bp, Homo sapiens
agctggtccctgcattagactgcctttctcattcacttgcaccttttctagtaggaacttgaccatgtacttttaaagtgtattaaatatggggtcaggcacagtggtttatactcctgtaatcctagtgctttggaaggttagcttgagctcaggagttcaaggctgcagtgagccatgattgcgccactgcattctagcttagccaacagagtgagaccgtgtctctcaaagaaacaaaaaacaagcatcttaaatttgggtgttgcggacatataatttaaagaggattaaatgaaactctaacctaaaaagaggattttgcaacaagttataaaaataataagctaattttggctgggtgcggtggctcacgcctgtaatcgtagcacttcgggaggccgaggcaggcggattgcctgagctcaggagttcaaaaccagcccakgcaacaaggtgaaatcccatctctactaaaataccaaaaaaaaaaaaaaaccgggcgtggcagcgtgtacctgtagtcctagc

SEQ ID NO: 495264 - DNA, 659 bp, Homo sapiens
gaactgaagggatggaagcttgtcagcaggagccttttagcaccattgaattttaaaaattatgttcattgataaaaattaaaatcagcyaggcaaggtagctcatccctgtaatcccagcactttgggaggccaaggcaggaggatcacttgaattcaacagtttgagaccagcctgggcaacatagtgagagcctgtctctacagaacatacaaaaatcagccaggcatggtggtgtgcacctgtagtcccagctaccggggaggctgacatgggaggatcacctgggcctgggaggttgtgtctgcagtgagctatgatcgtgccactgcactccagcctggatgacagtgacaccccatctcaacaaaacacaaaaattaaaatcaataaaataaaatgcacagaacatttaagggaaaggtacaatgctctgggttagttttcagttcacatcaaatgcgtattagcggcactgactcctcttcttccctgttggtgaactctattctctttgtcccaagggttttagcttaagtctcctcttgtcaacctggatgcagattaatagatacaaaactacttccataagagaatttatgatgtgtttttcaagattgcatggtggtgaaaagcaggaactgcctaacattacatt

SEQ ID NO: 495265 - DNA, 212 bp, Homo sapiens
ctgatttctttttcaggtccatccctattacttttccaaaataaaatctggactctggggtatcttgcatgatggattttccattgcagcataccaattgcgcaaaccaccacaggactacaggctggtggcttaaaacaattamtactgaacagaaaaaaaaatgctaaagtctactgtattacttatggcacttaaatgtattgctattg

SEQ ID NO: 495266 - DNA, 476 bp, Homo sapiens
gccccacgcagatcaataaactggctcacctgatcttgttgtggcccctacccaggaactgactgagcacaagaagacagctccgacttcctataatttcatctctgaccccaattgctcggggagactgatatgagtaataataaactctggtctccctcaaaatttaaaagaaagagagaaggaaaaaaaaaaaaaaaaggactcttggcttcccagccagtggtctgcacctgtttctcattggatccgcgtaaaatgtgacgcatccccctcgtttcacgtcctctttgttggctggctcgttgcactcccagagatgmggcagagtgcctgcccctaggagcccaatttgctgtcagttccccccgtcctgggccgtcctgtgcttgcctgatgtttgtcacccagtgtagcgggctctgtcctcagtggctgcacttgagtcggcgtgcttcgtcacctactgtagctcc

SEQ ID NO: 495267 - DNA, 565 bp, Homo sapiens
agaacgtaaatctggtccctgtcactccatcttggccagaagcagaaccaaatcatgacttcaaaaaaatacaactttgtggctgggcgctgtggcttacaaggcctgtaaatcccaacactttgggaggctgaggtgggcagattgcttgagctcaggagtttgagacttgcctgggcaacgtggtgaaaccccatctcaactaaaaatataaaaattagcctcgggtggctgaggtgggagaatcacttgagctcaggaggcaaagrttgcagtgagccgagactgcgccacctcactccagcctgggcaacagagtgagactccctctcaaaaaaacaaaacaaaacaaaaaaactttgtaaatatgttttaaaagcactgaattatatacttttaaagtattaatattatggcatgtagattgtatctcaattttaaaaagcaccgtcctccaagggtttgtctgcagccctgggactttgaacaatttgaacaggtaccaagcaccttcccatcttgggactttgcattttgtcttctctctgcctagaacattgttcct

SEQ ID NO: 495268 - DNA, 461 bp, Homo sapiens
acccagggtccttcagagaaccaggtgctccggttgtgatctcagtctcacgtcagagatttgcaagctgcttaaggaagccttctctgtgacttccacactgattattctcacaggctgcctgctttcttgcaaacctgtttcttgttttcttccaggaagtcacattgcctgtgtcctcccagaacctaagagacaagagctggctggcctcaggggccagcagccaggctctcctgtggctgtgggacccccaggctttggagcaagcctgctctgagttctttcctgcaagggttcgggatcctcatctcactttayattgtcaagggcccaaccctcggagcctctcttcctccccgtctggtccctgcttctccactgtggggtttgcttcggctgtcccatctccatgctctcagccctctcctcctgtctctgactttggaacaccacctcac

SEQ ID NO: 495269 - DNA, 575 bp, Homo sapiens
accttcggtaacgtgtccaagctctctatgctttgattgcctcatttgtcaaaytggattgatgataacatacttattttagggatattgagctattgttgaattagatacagtcatgtgccacataaggatgttttggtcaagggcagaccacatatacaaaggtagttccatagattaaaataccctattttttctgtcctttttctatgtttagatacacaaatacttgccattgtcttacagttgcctacagtattcagtccagtaacatactgtccaggtttgtagcctagaaggagtaggctatcccatagagccgtggtgtgtagtaggctttactatccagggttgtgtaggtgcactctatgatgttcacacaatgatgaaatcacctaaggatgcatttctcagaatgtatatccatcatcaaacaacacatgactgcatatactttcaaaatagtggctggcacaccgaaactctatttaaatgttagccaggattccaaaatcgaatccgtaaatgattctggagtgtctactagtaactccagccaccatttactcaaacag

SEQ ID NO: 495270 - DNA, 693 bp, Homo sapiens
actgctgcaacataatatctgcaatgagcttgccagatagtctaaatttttaaagaatagccagcaatctgagtctatgcaaaaactcagatttctggctattttattattttaaatactggccaccaatgaaaaagttttacacattgtgtaacccaaataaatcaacactctgtacccatccttcttgagcacacacacatctgagtggcacggccgttctaaggcagacaactcttcgcactgccttggcttggcctggctttggtgcaaggaggtgtgagatcaaaggaaatgatctcactgaagagagcagcagcaggggttacttggcctgcaggacatgggccagcctggcattcttcagggacaggcacacagcccaccccaggagtatgtcagagcccagagaggtggaggccaaaaaggcacattcaaaaaaggctgctgctttgctgtgttttcattatttatatttaagatgttagacaccattaatgaagaatgtgaaaatgtttatgcttgaccaaaaatragaaagacatagggtctaggttcttccttgaggtggggagaggcaattcaaccttcatttttaaagagtaaccagactgcagagagacggactgaagccaaataaaagggaaacttcctgaaaacgaggcaggcatggcaatgagtgtgagattttcc

SEQ ID NO: 495271 - DNA, 386 bp, Homo sapiens
tgtgcaatggtggtgctttccctcctggtgctctctgcagagggagaagcattggtctgtttggagtgggaggctaagggtgttgtgtggcctctgtgggtgggcactgtgcccagcacaccccccgcccacaccacacacacacaccacacaccacacccatgtagtgggcaagaagtgctttgctgagtgttgggctgacgttcaggtccccgtcctggtgcagggggagagtggctctgtctgctgagatgtggtcygaggggaggctgtgtggctctggaaccagaggcagccagctcctggctctgtcactgagcaactgagtgaatgtggagaagttgcttcacttctctgggctcttcctcagtaaaaggggagcctgg

SEQ ID NO: 495272 - DNA, 439 bp, Homo sapiens
atgactgactgcccgggtctcactattaggagcagaccgggaactatcaaaaccccttaccccattcctctaagtcatttctcctccctaactctgacagtctgtgaatagcccttggagcaggggtggggggtttgctattacactaagttccataagagtacagataamgggtttctaacaaggggaaggagcaacacaggaggcttaaaggaagatgtgcatttgagcaggctacagaaggatgctatttgtgggaaccagtgaagtatgcctttagcagaagaaaagttaggattggggtgagcattccagcagaagaaacagcataagcagaggaatggtgaggactctggagtgctgagcagggggtgagcagcggctacacacagaggccatggagggtggcagtggggattgggagcgaagaaaatgacaa

SEQ ID NO: 495273 - DNA, 443 bp, Homo sapiens
tgaattgaaaacttgtgtttttcttcttaaaagccatgccaactttacatcctgtgctattatgtaccagtgcttctcttaagagttttaaatggagttttcccccaaaaatgtcttcaagtaaaattgatccacagaggtgtgctgggtttattcaactgcttcaggcaacgtccacttccaccttagcacatccatgtaaacctggggaatctgtggtaagcagcccctaagatggttccgtgtaactccacctcctggtattaataaccttgtgctcatattcacccctccccttcagtgtggcctggayctagtgactcgcttctcgtaaagagaatgaggcagagggaacagtgtgtcacctccaggattaacttataaaaagactgtgatttgcctctcagggactctctcttgctcactcattttgagggaaggca

SEQ ID NO: 495274 - DNA, 605 bp, Homo sapiens
acacaacctgacaaaaactcctatttttacaacaactctagaaacttgattttttctgttctcaggagttataccacactgtaaaacaaactagtgagaaccgatttaaaactgtttctaccgttccccctacccctcaggttattttagtttcccatgactcataaaggaaatcttcaggattcacaagaaattggcaattcttttccatctttgctgttgagtattgataggaaaacagcatagtttggggcaatttaagtagagaacaaacctccgggggcttggggtggtgtctcakaaggccggatctgggaagggcctttgaaaagcttgcacggaaagctgcgaaataaatcgtttctttttctctttctttacgttctaaaatctcgtgatctgtttctacaatacacaggctaattgatgttatccttttggcatgattcttgctgtcctggggtctatcacttgcaggctatgagaatgaggccatagaccaccacactggcagcactgagcaaaaggtgctagacccttctgagttcaggtgctgtgtaactggtgctgtgattggacagggtgactaacctcagtctctctgg

SEQ ID NO: 495275 - DNA, 613 bp, Homo sapiens
ataatgtaagttttctaatttgagacttctttcttccttgctgcaccccatctacgccatgtgttgcccatcccactggtgaaaatgcagagctgcttgttaaggaggtacatgtcagaccttggaatttactggaatcagacctggaaggtactatgaagagctcagaaggctggtggttttcaagctgttctcttctgagcctgagagactccaggagtcatcttgagggatatagcacggagggaggtgaaaagtggtgggaagtggaggaaggaaggggaccgctagagccaacctgagtcgctctgctttttcctattttgtaagctaarcattgtcaaagcatccatttaaaggaaaagttctgctgctacatataaaagttaaaaaaccactgtgtctacccttccttttgctaacactgagaggcagagtggttcagcacaaggggacacaaagtggcttagcacgagtcacgagatgtgacgggtctgagacctctcagcctagagctcccttacccctgggccactttgttagacacacctcctttaattcaaatccccgtctcagtgggacatggctttttcattttttcaaggaaaggttt

SEQ ID NO: 495276 - DNA, 619 bp, Homo sapiens
tgtttctgtacctcacttgtgttttctgtccgtcaccttctttgttctgtccacaaatgttcttcaaccaaatggcagtgccagattatctggtttggggcctgcccaattcacgaattgttctttgcttaattaaactgtggaattagatttgtctaaggtttttgggggttgttttttgttttggttttgtgtttttgttttttttgtttttgtttttgtttgttttacagtctcctttgccccagagttgttgtgaggctcaaatgagatcttagctgggaaaagctctttagaaattgccttgcaatgtgaaaatgtaaagcgtggtcacaaaggtcagaaccttctctgaagaatagcagagtgtcacgtgcaggtaggtgcagaataaatataagtggaggagggagagatggcccgtgctctaccttccttttgcaatgcaaactcagcaaaaaaaaaaaaaaaaaaaaaaatccttaaaaatagttggaattccatcgattcctctcataagtgttcctaaggcagaggctatagtcccagagccacagcaatggtggcaggactaccactcagctsagtgtaagaacgaagtgctggccctgggttgcca

SEQ ID NO: 495277 - DNA, 561 bp, Homo sapiens
ggatgtagaagagtttaaaatattctagcctagtggtttgcaaacttggccacatattaaaatcttcagaggaactttatgctacaatgctcatctcagtcacagtgtctgtgggtgagacccaagctcagttacattttaaagctcccgagagtttagaactattgatctagtcttgatttcgtatcaatttctctgatggtatcttgcttgacatcttacttactgggctgcatttttgtgctgtgtctccctgacacccaagtgaaaactgctggatgaaccgaaaattcacccaaacaacgtgaatgtaatggaaactcttgaaaaggcttacaagccttgaagtaaatgttgggcraagggagcgaaagggttagcgtttttttgcattgggacctgccttctttttatgcttctaggaacgtttaaaaatgagagcaaggaatatatttcattgctttaattgttcaaggtcttttaaaagcgtgtgcaataaaatgccttttaagataactgacctttgtattttaatgctttttggaagggaacaatacctag

SEQ ID NO: 495278 - DNA, 493 bp, Homo sapiens
cagtatctgtgtggcacgccactgtgccctttccatgtattctctaaaagtccaaatgctggctgccagggccctcccagaaccacaggatcctaaatctggcaaaactcaggtacccactagtctaacacctgtaaactacagtttgaggcattcattcattcaaaaagcattactgatgtttacatgatgcatggtgccaagacgaggctacgtttctgctctcaaggacctgctccaatatctgaaatggcttcccaatggcaacaggggaagtccaagtgctttatctagtagctctagtttctccacaaccgggaccgaagcttctattgccaccataaactttctcccattgccactcaacayatattctttgctttatttaaactaaactcttggctcaccttgtcccctctgcttgacctgctatccttccactcccaacaccaaatatccacgtcctacacatcatcaagcacactcgtagtct

SEQ ID NO: 495279 - DNA, 335 bp, Homo sapiens
agttagttcttgtatttctgctctgaatttttctttttattttgatcagtgtcatcaccagggccattattttaatttacaagttgttgcttttaatttatatctctagaattctgggcatacatacatttttaatcactgaggagaagaaaaacataaagttattattaggttatcacaattacttttgcaccaatctaatataaagaggtctgtaatataaagagatgtcttgtatattcattgtattataacttaaaggcgtatgaatggagaaactgtcaaccaccagcggcaggaaagtatraaacaacttgtttttacaagtggaattc

SEQ ID NO: 495280 - DNA, 557 bp, Homo sapiens
ttaaatgtaattaaatttaatttaaatttaaartctgttaaagacctatgtttagctcctttgcaaataaataggacttgttttggtaggaaaccagtaagtcttaatcctgatatttcttcaagtgtattttgagaaaactcatgcttacattaatgagttttaccaaatcagtaatgataataatagttttaaatctaatcagagcaaagcacaaacaagtctatttggaggagcaaaattgagttaagggtaagagcacactttgaaaatgatttctctggattgttgtattcttagagatatctggaggaatttatttgggcaaacctgaggcagtcatttgctattatttctccttctaggtttctgtgctgagccagcatattcctggcactgtagcgctttcaaagctgtgcactatagaggctgagaaattcaggcaaacatccctttcacctaaattctatatattcaaatttttccatctcaattataaaaataagatttcatttgaggtgttttaatttccattgcttgtagtgatattttcattc

SEQ ID NO: 495281 - DNA, 513 bp, Homo sapiens
aactgctcatgtacatggtctaatgaaaattgaaagctaaattattactagctgtttctcagactatcatgtttgagaatcsggagcattgcttctcaaactataatgtctgagaatcaggggatcttgttaaaatgcaaattttgatttacaagttctgggatgtttcccaagcttctgtacaggcacgactcagagttagtgcaagttcaagttccaaacaaccacaataaaacaaatatcacaataaagagagtcacacacattttttgttttctagtgcatataaaagttatgtttatactgtactatagtctattaagtttgcaatagcatcatgtataaaacaacaatgtacatatctcaatttaaacatattttattactaaaaaatgcttacaatcatctgaagcaccacgtagtcataatcttttcgttggtggaaggtcttgccttgatgttgatgcctgctggctgaacaggatggtggttgctgaagtttgagatggctgt

SEQ ID NO: 495282 - DNA, 533 bp, Homo sapiens
aaactggtagatatggtaatagtacaaaaacatttgtctctgaatagatgacgaggaagaaaatggaaggaaggaatttcttattaaggatgattcatgtgaagaagatgcctgctttggttcaaataaaatgttaaccagaagtggaaaggggaatgttaaagcaagtgcttgtagtagcagtgagacccttgcttagagtagctatatactcacattcccctattattttctcattcataaaatcatagaattatcatgagcaggggtctttaaatatggcccataggcaaaatttttcctgttgcctcttttgtaaatatatgtttattagtacacagccatagccatttgtatatggattgtctatgratgctttcagtgcaataagtgagttgaaaaattgcaacagagactgcatcgtgcacgagcttaaaatactctctgactctacagaaaatgtttgccaactgctgctcatgatagtgaaatgaaaaaatgcttgtacatttcttaacacagaacctagcaaa

SEQ ID NO: 495283 - DNA, 391 bp, Homo sapiens
aatttaaacgaatgagacaaatgatgaaatcaagaaataaaagaaatkaagctatcagtatattgttttagctctttttaatgaaacttctagttcaatatcagtaaattattttgcttggatatgaactctaatatgttttaccaacatgattttatgctactggcctctaggattttgaggatagtggactttataaatatttatgtgtgtattttcaaatatctatccctctttacaagcatagtatttgcatatattttcacatatttgtacacaaagtgagataaagtcagaaaaggaagggtaagtggacttttcagactaaatcaagtggagtgggatgtaggatgacattagtctgcctttattaagctccagaaattctgaa

SEQ ID NO: 495284 - DNA, 633 bp, Homo sapiens
tccatccaaggttctggcacatctacaagttatttctctgttctcccggtgccactccactagatctcttctggttggtgtccatactcaggagtacaagagcatttttaagtctcatgcaacaatttcagatgattgcaaactgggagtctggcctcagattcatccatacacatctttgctctcacaccacgttgaatggtgccagactgaagccagatctcaaagtgtcctaggatacaacaaaacaagtggctcacmagactgagtgttaccaggcccctgcacatacactggaatgtttctgaagctgtctatgaagagcaagatgggaaggagattatttagagccctctcatgttttatcacatattttgtttttattcttccagattttggattttcactttctccttcagcatttgctcatcgtgcccatgttaacatgccttgcagcctaatatcatgggcagaagggtattctctcctgcttcagagaaaatctgtattttctgtcctgccttccatgctttgcgttgatttattaaattacttaaatttgtaaaatcctcttgttttagacaaagctctccttcaatactagctgctgaatccgattttgagtgtcaacag

SEQ ID NO: 495285 - DNA, 633 bp, Homo sapiens
tccatccaaggttctggcacatctacaagttatttctctgttctcccggtgccactccactagatctcttctggttggtgtccatactcaggagtacaagagcatttttaagtctcatgcaacaatttcagatgattgcaaactgggagtctggcctcagattcatccatacacatctttgctctcacaccacgttgaatggtgccagactgaagccagatctcaaagtgtcctaggatacaacaaaacaagtggctcacaagactgagtgttaccaggcccctgcacatacactggaatgtttctgaagctrtctatgaagagcaagatgggaaggagattatttagagccctctcatgttttatcacatattttgtttttattcttccagattttggattttcactttctccttcagcatttgctcatcgtgcccatgttaacatgccttgcagcctaatatcatgggcagaagggtattctctcctgcttcagagaaaatctgtattttctgtcctgccttccatgctttgcgttgatttattaaattacttaaatttgtaaaatcctcttgttttagacaaagctctccttcaatactagctgctgaatccgattttgagtgtcaacag

SEQ ID NO: 495286 - DNA, 163 bp, Homo sapiens
ggcaatcactggactcctggaggtggagctgacttggctcaagaattaacctatcaggagttatttctttaaaaaggaccctgtgtaatcattggaggtgactgccctytggtcaggactgagcattaatttaaagacttctcattcagtgacaggtgtgtgg

SEQ ID NO: 495287 - DNA, 608 bp, Homo sapiens
gggactacaggcaagtgccaccatgcctaatttatttttatttttatttttattttgtagagacaggattttgccatgttacccaggcggacttaaactctcgggatcaagcaatccacccgcctcagcctcccaaagggctggaattacagccgtgagtcacttgcgcccagcctgttggtacattttaaaataatctttcttctaagtggaagaattaacattcattttactttataacacttwaaatgagcaagtctaagttcataactaaggaaatactgccatataaaggacttgcttcttgcagcaatcatgaaagttgtttcaattagtagtgagcctaacttgtgatcaaaatttgaaaagtaaccatacatgctactttaaactatttaacattgtggtggttttaaaacatacccacaaattctgaccccctcgcccccaaagatgcactctatcttccttccacgtaagtgtggcccaggcttagtgacctgcttttcaggagtagagtgtagtagaattaacaatgtatggtttgtgggagttggtcataaaagacattgcagctttctccttgctgtatctctggaagatgccag

SEQ ID NO: 495288 - DNA, 563 bp, Homo sapiens
cagtttttaaaaatcagacggagagctcagggcactgaccgagcgaggactccaggacctgtgcttgcctgtgcgctgagtacctcgagggccgggctcggcttagtccaggatgatggtcagggttatacttccctgagcccttgctctctgagtgtctgartgtgccctctacgattgcatcttcagaatcggccttctaggattttatttaatcaagcgaaattggataggtttagttgtttggttcttttaaatgaacttagccacccacctcttaattacaaagtaattttaaattgcagagtaaaaatctcaataggaaccaaggcattcagcaatagtgatttgaattatgcctgtgattgtgcaattttctcctttttgaaatagttattgaaaatctctttgaattaaatgtgaggattagtcatacagccatcctgtcaacatcggaaagcgtgtaaaccgttctagcgtgttgctgtggttggtgctgaccaagcagagacccccgccgcatcttgggctcttaggagctgctgggagggcgtccacaagca

SEQ ID NO: 495289 - DNA, 563 bp, Homo sapiens
cagtttttaaaaatcagacggagagctcagggcactgaccgagcgaggactccaggacctgtgcttgcctgtgcgctgagtacctcgagggccgggctcggcttagtccaggatgatggtcagggttatacttccctgagcccttgctctctgagtgtctgagtgtgccctctacgattgcatcttcagaatcggccttctaggattttatttaatcaagcgaaattggataggtttagttgtttggttcttttaaatgaacttagccacccacctcttaattacaaagtaattttaaattgcagagtaaaaatctcaataggaaccaaggcattcagcaataktgatttgaattatgcctgtgattgtgcaattttctcctttttgaaatagttattgaaaatctctttgaattaaatgtgaggattagtcatacagccatcctgtcaacatcggaaagcgtgtaaaccgttctagcgtgttgctgtggttggtgctgaccaagcagagacccccgccgcatcttgggctcttaggagctgctgggagggcgtccacaagca

SEQ ID NO: 495290 - DNA, 666 bp, Homo sapiens
tgtgccagtttttaaaaatcagacggagagctcagggcactgaccgagcgaggactccaggacctgtgcttgcctgtgcgctgagtacctcgagggccgggctcggcttagtccaggatgatggtcagggttatacttccctgagcccttgctctctgagtgtctgagtgtgccctctacgattgcatcttcagaatcggccttctaggattttatttaatcaagcgaaattggataggtttagttgtttggttcttttaaatgaacttagccacccacctcttaattacaaagtaattttaaattgcagagtaaaaatctcaataggaaccaaggcattcagcaatagtgatttgaattatgcctgtgattgtgcaattttctcctttttgaaatagttattgaaaatctctttgaattaaatgtgaggattagtcatacagccatcctgtcaacatcggaaagcgtgtaaaccgttctagcgtgttgctgtggttggtgctgacyaagcagagacccccgccgcatcttgggctcttaggagctgctgggagggcgtccacaagcaggaggtgaagcccatggtcagtgggactttttaggggcactggtagcttgtggttggagagaagctagatagagccagtgcctttgtccccaacccag

SEQ ID NO: 495291 - DNA, 666 bp, Homo sapiens
tgtgccagtttttaaaaatcagacggagagctcagggcactgaccgagcgaggactccaggacctgtgcttgcctgtgcgctgagtacctcgagggccgggctcggcttagtccaggatgatggtcagggttatacttccctgagcccttgctctctgagtgtctgagtgtgccctctacgattgcatcttcagaatcggccttctaggattttatttaatcaagcgaaattggataggtttagttgtttggttcttttaaatgaacttagccacccacctcttaattacaaagtaattttaaattgcagagtaaaaatctcaataggaaccaaggcattcagcaatagtgatttgaattatgcctgtgattgtgcaattttctcctttttgaaatagttattgaaaatctctttgaattaaatgtgaggattagtcatacagccatcctgtcaacatcggaaagcgtgtaaaccgttctagcgtgttgctgtggttggtgctgaccragcagagacccccgccgcatcttgggctcttaggagctgctgggagggcgtccacaagcaggaggtgaagcccatggtcagtgggactttttaggggcactggtagcttgtggttggagagaagctagatagagccagtgcctttgtccccaacccag

SEQ ID NO: 495292 - DNA, 413 bp, Homo sapiens
ccgatggatacggagggccaccatattccaaraaaccatccgacttcttttttttttaatataaaaatgtaaaacctctaaaggccacaccagataccagcagatatttagcaagtgttatcacattaaagaacagggtcaggcaatgaaagagctgcaaactgttcttctgaaaggcaaatgacccacacactttgaaagctgtcgaaaaacatctgtgggtatcagacaccacacccaaggctcacacgccgacttcaggttgggtgcgtgtctctctcttccatactccgtcacatactcacacacactaagagaaactctgttccacagatttgagaaagaaactggctaaaattttcaaaatgtaggtctttaggaaaatatcgcagactaacagatgcctgccggca

SEQ ID NO: 495293 - DNA, 413 bp, Homo sapiens
ccgatggatacggagggccaccatattccaaaaaaccatccgacttcttttttttttaatataaaaatgtaaaacctctaaaggccacaccagataccagcagatatttagcaagtgttatcacattaaagaacagggtcaggcaatgaaagagctgcaaactgttcttctgaaaggcaaatgacccacacactttgaaagctgtcgaaaaacatctgtgggtatcagacaccacacccaaggctcacacgccgacttcaggttgggtgcgtgtctctctctyccatactccgtcacatactcacacacactaagagaaactctgttccacagatttgagaaagaaactggctaaaattttcaaaatgtaggtctttaggaaaatatcgcagactaacagatgcctgccggca

SEQ ID NO: 495294 - DNA, 570 bp, Homo sapiens
tgtaaagccacaaccagtgactccatggactagcaggcccaggctgacagctcggagggcccgtgtgactgggtcccacctgcccctgatggaactttttgtgtccccaggaatggtctggaacacggacctggtggagaccctggagctgcagaacctgatgctatgtgcrctgcagaccgtcaatggagcagaggcggggaaggagtcacggggcgcgcacgccggggaagactacaaggtgcgccttctcgccacgcccacctgcacctgccttttcctcccgcctggtgggactcagccccacccctgcattttctctgcattttatgtcgtttccccaaaagtatatccaaaaaatgcctttttccctctggtaactttgatccctgggttctcgccattttctggatcactgtgacctgttccttgctttgggtcggcatccactgatgccagcagtggcatctccaagccaatgtgctttgctgttagaaggccaaggttagaagtgcagccagcgtggcatgaccaggaaataaatgccagtttattaaataacgagtaagc

SEQ ID NO: 495295 - DNA, 570 bp, Homo sapiens
tgtaaagccacaaccagtgactccatggactagcaggcccaggctgacagctcggagggcccgtgtgactgggtcccacctgcccctgatggaactttttgtgtccccaggaatggtctggaacacggacctggtggagaccctggagctgcagaacctgatgctatgtgcgctgcaraccgtcaatggagcagaggcggggaaggagtcacggggcgcgcacgccggggaagactacaaggtgcgccttctcgccacgcccacctgcacctgccttttcctcccgcctggtgggactcagccccacccctgcattttctctgcattttatgtcgtttccccaaaagtatatccaaaaaatgcctttttccctctggtaactttgatccctgggttctcgccattttctggatcactgtgacctgttccttgctttgggtcggcatccactgatgccagcagtggcatctccaagccaatgtgctttgctgttagaaggccaaggttagaagtgcagccagcgtggcatgaccaggaaataaatgccagtttattaaataacgagtaagc

SEQ ID NO: 495296 - DNA, 570 bp, Homo sapiens
tgtaaagccacaaccagtgactccatggactagcaggcccaggctgacagctcggagggcccgtgtgactgggtcccacctgcccctgatggaactttttgtgtccccaggaatggtctggaacacggacctggtggagaccctggagctgcagaacctgatgctatgtgcgctgcagaccgtcaatggagcagaggcggggaaggagtcacggggcgcgcacrccggggaagactacaaggtgcgccttctcgccacgcccacctgcacctgccttttcctcccgcctggtgggactcagccccacccctgcattttctctgcattttatgtcgtttccccaaaagtatatccaaaaaatgcctttttccctctggtaactttgatccctgggttctcgccattttctggatcactgtgacctgttccttgctttgggtcggcatccactgatgccagcagtggcatctccaagccaatgtgctttgctgttagaaggccaaggttagaagtgcagccagcgtggcatgaccaggaaataaatgccagtttattaaataacgagtaagc

SEQ ID NO: 495297 - DNA, 640 bp, Homo sapiens
tgtaaagccacaaccagtgactccatggactagcaggcccaggctgacagctcggagggcccgtgtgactgggtcccacctgcccctgatggaactttttgtgtccccaggaatggtctggaacacggacctggtggagaccctggagctgcagaacctgatgctatgtgcgctgcagaccgtcaatggagcagaggcggggaaggagtcacggggcgcgcacgccggggaagactacaaggtgcgccttctcgccacgcccacctgcacctgccttttcctcccgcctggtgggactcagccccacccctgcwttttctctgcattttatgtcgtttccccaaaagtatatccaaaaaatgcctttttccctctggtaactttgatccctgggttctcgccattttctggatcactgtgacctgttccttgctttgggtcggcatccactgatgccagcagtggcatctccaagccaatgtgctttgctgttagaaggccaaggttagaagtgcagccagcgtggcatgaccaggaaataaatgccagtttattaaataacgagtaagccaccgtttcaagcctgccctgtggaggaaatgccagtttattaaataacgagtaagccaccatttcaagc

SEQ ID NO: 495298 - DNA, 640 bp, Homo sapiens
tgtaaagccacaaccagtgactccatggactagcaggcccaggctgacagctcggagggcccgtgtgactgggtcccacctgcccctgatggaactttttgtgtccccaggaatggtctggaacacggacctggtggagaccctggagctgcagaacctgatgctatgtgcgctgcagaccgtcaatggagcagaggcggggaaggagtcacggggcgcgcacgccggggaagactacaaggtgcgccttctcgccacgcccacctgcacctgccttttcctcccgcctggtgggactcagccccacccctgcattttctctgcattttatgtcgtttccccaaaagtatatccaaaaaatgcctttttccctctggtaactttgatccctgggttctcgccattttctggatcactgtgacctgttccttgctttgggtcggcatccactgatgccagcagtggcatctccaagccaatgtgctttgctgttagaaggccaaggttagaagtgcagccagcgtggcatgaccaggaaataaatgccagtttattaaataacgagtaagccaccgtttcaagcctgccctrtggaggaaatgccagtttattaaataacgagtaagccaccatttcaagc

SEQ ID NO: 495299 - DNA, 585 bp, Homo sapiens
  misc_feature (1)...(585): n = A,T,C or G
gttcactatcttgaaggtgttgggtgnntcacgggtatatacacagtccacagcttattaaattgtgtgttttaaatatgctcagtttaccataygtcattatatctcaataaaactgttatttaaaacaaacaaaaagaaacactgcatcttctanacgaagcacaaggtgggggctaatcccgggctcaggggccagagggaacagtctgacccttcctccctaacatctgccggggctccggggaggtgggcaccaggctccaaagggcctgaggtttctttactcacgacactgcaggggaagtcctggcccaccgcagacaccaagaaactgaaacctaaagacattatgttgcccaaggaagttacacagcttgtaagcgatataaccagatcaaaagctttctgtgtgatgccaaggcctttctcccattcatctaccacaagttcaaaaacgccgacctgaaataagtaggtgaagattgtgtgtatgtgtttaaaacagaccgttctctccactgaagccagacagtgagagccactctggccattccagaagcgtcaggcaccgtgggcacagca

SEQ ID NO: 495300 - DNA, 585 bp, Homo sapiens
  misc_feature (1)...(585): n = A,T,C or G
gttcactatcttgaaggtgttgggtgnntcacgggtatatacacagtccacagcttattaaattgtgtgttttaaatatgctcagtttaccatatgtcattatatctcaataaaactgttatttaaaacaaacaaaaagaaacactgcatcttctanacgaagcacaaggtgggggctaatcccgggctcaggggccagagggaacagtctgacccttcctccctaacatctgccggggctccggggaggtgggcaccaggctccaaagggcctgaggtttctttactcacgacactgcaggggaagtcctggcccaccgcagacaccaagaaactgaaacctaaagacattatgttgcccaaggaagttacacagcttgtaagcgatataaccagatcaaaagctttctgtgtgatgccaaggcctttctcccattcatctaccacaagttcaaaaacgccgacctgaaataagtaggtgaagattgtgtgtatgtgtttaaaacagaccgttctctccactgaagccagacagtkagagccactctggccattccagaagcgtcaggcaccgtgggcacagca

SEQ ID NO: 495301 - DNA, 394 bp, Homo sapiens
ggaagggcagagctcatcagagtggttccccaggcgggggagtgtgggcaaggagccgtgctagctgctttgtcctttgggacacttctgtgcatgatggaatattcctccctcccagcctccmcaacctttccctcaccctttactttcactcacagtgcttccttatcacaggcacagagtccagaatattgcctggctcttgcctctctcctggcccgggatactgcacaggcagcattgaaggaatatatgattttaaacaattaaagatgaccatggaaatactcagatgctaggaacagtgatcagcctagtagatagtatgcctcggtgaatttttctaacttcattcaaaatatcagaaatagctattgagtatgtgatattgtgt

SEQ ID NO: 495302 - DNA, 463 bp, Homo sapiens
tatacctagtctttagagctgtgcatggcatagagtacgtgcttagtaaatatttattgaatgagtgaatggtacagatgaggttattgaagatcccacaagttaagttacttgcctaagatcacactgctagcaggaaggaaaggcaggatttgaacacagggctctccaaatgtatagattcctttcttccagattgcttggttaggccgcctagtggtgtataaaaatggagctcggagaccccaaargtattcaacaaaagctctatctgaggtctaggaaatgtggattctgacccatccttgctgaaatcctggtgtgactttagaaaagtcctttctccagttgtctccattttctaatctgtaaaatgaggagatggaagcaatgctctctgagggtctcagggtcttcagatgccctgggaaggtttatgctttgtcttcttctgcatgcagtt

SEQ ID NO: 495303 - DNA, 498 bp, Homo sapiens
  misc_feature (1)...(498): n = A,T,C or G
agccatgggtgcttgctcccgggggccggggcaagctcagccaactaggggtgagaatgacagtcggtggggcctggagactggatgtgatttgggggagctgaggagaagggccaggtgatggggttgggggaatgcaggctcaggagctgcccagggaaagagcagagctgcctacatgcgngaaagggtgggtggggcagggcaagagactcctcaacagacactctgggcgccgtggggcgtggtcctcacctagctgccactgtatctgtgctgcgtggcctggggagagtgtctgggcctctcggggcttccccatctgtgactcgggtgcscagcacaggcctcggcctgcattgagcaggtgcttggcacacacacgtggcagtgccagcctcctcccctggccaggcgggatcatcggcatgtgggcaggtcctctggccttcttacctttcttcatctctgccccaactgggcagaacccatgtccgt

SEQ ID NO: 495304 - DNA, 505 bp, Homo sapiens
  misc_feature (1)...(505): n = A,T,C or G
gggtgcttgctcccgggggccggggcaagctcagccaactaggggtgagaatgacagtcggtggggcctggagactggatgtgatttgggggagctgaggagaagggccaggtgatggggttgggggaatgcaggctcaggagctgcccagggaaagagcagagctgcctacatgcgngaaagggtgggtggggcagggcaagagactcctcaacagacactctgggcgccgtggggcgtggtcctcacctagctgccactgtatctgtgctgcgtggcctggggagagtgtctgggcctctcggggcttccccatctgtgactcgggtgcgcagcacaggcctcggcctgcattgagsaggtgcttggcacacacacgtggcagtgccagcctcctcccctggccaggcgggatcatcggcatgtgggcaggtcctctggccttcttacctttcttcatctctgccccaactgggcagaacccatgtccgttcctgagatagag

SEQ ID NO: 495305 - DNA, 626 bp, Homo sapiens
tgtgccagcttggaagagctcctgtccaccctccaaaagcggccccaaggccttagcttccttggcctgtcaggtgagtgctggtatggtggccacgcctgccatgttcggccttttcagggacctgcctgagacccaggtgcctcctcctaaggggctgtcactgctaccagccaggcagcaaggctgggctccatgaggctggggcagcagggggcagagtgacagtgacagaaarggggcatgatcccagctcctaaaaccatgggttagggggcgaggtgggtatctgcctctggtctctccaacccaaccttcagagcagactatggtaggcaagaccctgttccacagggactttcttcttgtccctggcaggaaaagggatcccaaggtcagggtgttgaaagctgccaagggaccctcctacttcctggcaggggctcctctgacacaaccctgcccagggctgtggtctgatttagcttgttctctcttgagccacatcagggcagtccccaacctgagctgtctggaagacaaccccaggaagggctttgatgacctggcttgccccactggggccggggcaggctgtgccctccaggggatgagggcttaagtga

SEQ ID NO: 495306 - DNA, 626 bp, Homo sapiens
tgtgccagcttggaagagctcctgtccaccctccaaaagcggccccaaggccttagcttccttggcctgtcaggtgagtgctggtatggtggccacgcctgccatgttcggccttttcagggacctgcctgagacccaggtgcctcctcctaaggggctgtcactgctaccagccaggcagcaaggctgggctccatgaggctggggcagcagggggcagagtgacagtgacagaaaaggggcatgatcccagctcctaaaaccatgggttagggggcgaggtgggtmtctgcctctggtctctccaacccaaccttcagagcagactatggtaggcaagaccctgttccacagggactttcttcttgtccctggcaggaaaagggatcccaaggtcagggtgttgaaagctgccaagggaccctcctacttcctggcaggggctcctctgacacaaccctgcccagggctgtggtctgatttagcttgttctctcttgagccacatcagggcagtccccaacctgagctgtctggaagacaaccccaggaagggctttgatgacctggcttgccccactggggccggggcaggctgtgccctccaggggatgagggcttaagtga

SEQ ID NO: 495307 - DNA, 322 bp, Homo sapiens
tgggccaggaggccgtgtaatgaccacacactcctctcaagcaaaaaatgtttttccttgtgttttgtacaaaaagggggtgggaggtagttccgtgtgctggtggtgacggcatccacggggctagaagtgggcggtgacgcggtccgtctccagcaagtcgtccaggatctgcaggggatggaagrgtgggtgggtgggtgggtggggatgcacacggaggggcggggcgcgcggggggcggggcgcgcactcactatgtctggtgtggtgccgatcttcttggctagctcgctgcgctccatggtgctcaggtacaggt

SEQ ID NO: 495308 - DNA, 481 bp, Homo sapiens
ggaggctattcccaatgccaggtgaggctgggccggcsggggtggggtctgcccaaggcctccaggcagcatcctgaggcccctggcccccacaggatcgagctgcaggagtgggagcatgtgacctgcatgaagacagtgtctctgcgcagtgaggagaccgtgtcgggcctcaaaggctacgtggccgccgggacctgcctcatgcagggggaggaggtcacgtgccgagggcgggtaaggggccagtgagcgggggcgggaactggcagcccctctgccatccccacagccatcccacagccatacccatgccctccagatcttgatcatggatgtgattgaggtggtgcccgagcctggccagcccttgaccaagaacaagttcaaagtcctttacgagaaggagcagaaggggcccgtgaccgccctgtgccactgcaatggccacctggtgtcggccatcggccagaaggtgtgc

SEQ ID NO: 495309 - DNA, 606 bp, Homo sapiens
gaaagggaaacaggccctcggggaagcccctggccaggcctgcctctcccctccctggtgggcccagcgcccctgctcacttgtctctgcccacagtgcctgtctgtggaggacgccctgggcctgggcgagcctgaggggtcagggctgcccccgggcccggtcctggaggccaggtacgtcgcccgcctcagtgccgccgccgtcctgtacctcagcaaccccgagggcacctgtgaggacgctcgggctggcctctgggcctctcatgcagaccacctcctggccctgctcgagagccccaaggccctgaccccgggcctgagctggctgctgcagaggatgcaggcccgggctgccggccagacccccaagayggtgagggagagtccaggcagaccaggggagtgggtgaggagggtcccacggcccatgggacccggcctggctgcaaagccttcggggagcctgggggcctggggagacgcccaggagtcggcctgcggctggggattcacaacgtggggctcactactgggcagttgggagcctgtaggagccccgggagggacctcatgagggaggaacccagaggcctgagtggga

SEQ ID NO: 495310 - DNA, 560 bp, Homo sapiens
gagtggagcctgcacctcccagtccaggccccccgtccaggaccagctcagccagtcagagagtgagtgcccacgccgacattgtgctggcagcacagaggtggagcccgtgtaggaaggaaggagtggctgcccaggatgagggatggagagagtgagcaggggctggaagtagaaacaacagacacaggggaaggtggcgtcgccaggagagtggggctttgaggcaggagggtcagcctgagtgagggcctggcccacactgacggcctgcagctctggtgagcagcgcccgggaagcaggggctgagtctggaagaaaagctctcacagccgcctcacccgcccccagggtatctgtacggctccctggccacgctgctcatctgcctctgcgcggtctttggcctcctgctgctgacctgcactggctgcaggggggtcacccactacatcctgcagaccttcctgagcctggcagtgggtgcastcactggggacgctgtcctgcatctgacgcccaaggtctgcccccacaaacccgcgaccctggccctccg

SEQ ID NO: 495311 - DNA, 541 bp, Homo sapiens
  misc_feature (1)...(541): n = A,T,C or G
gcaggggggtcacccactacatcctgcagaccttcctgagcctggcagtgggtgcagtcactggggacgctgtcctgcatctgacgcccaaggtctgcccccacaaacccgcgaccctggccctccgttccccaccatggactcccaggccrtgccctcccagggaccttacccaccccacctcctgacccctctccctgggtcttggtgggaggcgccctgngacctcccccccagcccagcgcccctactccccaggtgctggggctgcatacacacagcgaagagggcctcagcccacagcccacctggcgccctcctggctatgctggccgggctctacgccttcttcctgtttgagaacctcttcaatctccggcagcccagggacccggaggtcaggcttcttgggaaggtacccggcgggtgggtgtgctgggggcctggtggacactgagcacctaccctcacaggacctggaggacgggccctgcggccacagcagccatagccacgggggccacagccacggtgtgtccct

SEQ ID NO: 495312 - DNA, 458 bp, Homo sapiens
ctgtgcctgctctgcagacaccccctcacggtggctacacagactcctcctgagaaaaatcctgttttgcacaactctgctggcgtgacccacatgcctccaggatcgagttcaggcccccaggagccgaaaggccctctggggtcagggcccagcctggccagatgggccctgtccagaatgagcyggccctcccagcctgtcccccacagcacccctccatgcgtgtccgccacgggaccccatttggcccaggggtgcccgccgagcagggccgctgagccccgtgctgtgtccccagcgtccctgctgaagctgtggtaccgggagctggaggagcccctgatcccgcacgagttctacgagcagtgcatcgcgcactacgacagccccgaggcggcggtggccgtggtgcacgcgctgccccgcatcaaccgcatggtgctgtgctacctcat

SEQ ID NO: 495313 - DNA, 483 bp, Homo sapiens
gacaggagggatgtcctgccgcccccagccaggccgaactccgcactcgctctcccggcagaggggccagaatcgcccggcccagccctggagccccctccactcccccaggcccctggccccggcgctccccacgtcttctgcctggtctgaggrtgcagccagggcacagcagcggcggggagggcgcctctggccccccacctcacggccagttcccgcgggcaccgcctcgccctccgctggccgcgggtcagctccgagaaagtgccttctgtgtcctggagccgagcgacgctgcctccttggggccgggctgcctccctgtggctcctgcgcgccctggcctgggccttgcccagccgccccggtctctccttccctttctcctgtcctcgtcctggcctgcagctcttcccagccccgagagagcttcccgacctgtccccgcctcctctccctccctcggcccgtggtccccag

SEQ ID NO: 495314 - DNA, 466 bp, Homo sapiens
tgcatctccttgcggtggctctggtccatcccatccaggatctccatcagctcactgcctgtcttggtcgggtgggcgcacgcagcctcgtgcaccgtcagctcatggaaggggccgtgccatgggcagccgatgcgtttgtacttgcactgggttaccctgggggaggcaggtacattactcacagactgagccccgaacaggaggctgcaacaagctgtcctcycatatggcttccatccagctaagaaccccttcctgcaggacacacgtaactgtgagcccaccccccaggatgaggtcagagtggcagcatgtggagagaaaggagacaggcagaaaaagggagagagaggggaaggaagagtgcaagcttgagcctgtgtgccccgcaccatggcgtggttctctcctctgtttggcagtggtggtcctgcacagcctcactgcaggagacttggtggct

SEQ ID NO: 495315 - DNA, 491 bp, Homo sapiens
tcctgtgggaggcacagaccaagggcccacaccactgycctctcacagtccccccgccccccggaggtatgccactccacgtggccagctctaaacacctcctggtgagactgccgggggccttggacgaggttctgggtccagctctgcacgtacagtggccttagcacaggcaaaacagcactcttcttggctgtggcccgacccccaagggagttccaggcagggctggagcatctaatgccacccaccaaggccacctggcctctcttcctggctctgcatagcccaggaagattcgaggtggggtcctagaccctcctaagggagcactgaggctgccaagcacatcaccacttacctcccagcactgcgggcctctcccccgaaagccaccccagctcctgggccggcccctggccacaggcctcattcctttggggcctccagatcccagcatgggctcagtcaattccataccatgaggaggc

SEQ ID NO: 495316 - DNA, 491 bp, Homo sapiens
tcctgtgggaggcacagaccaagggcccacaccactgtcctctcacagyccccccgccccccggaggtatgccactccacgtggccagctctaaacacctcctggtgagactgccgggggccttggacgaggttctgggtccagctctgcacgtacagtggccttagcacaggcaaaacagcactcttcttggctgtggcccgacccccaagggagttccaggcagggctggagcatctaatgccacccaccaaggccacctggcctctcttcctggctctgcatagcccaggaagattcgaggtggggtcctagaccctcctaagggagcactgaggctgccaagcacatcaccacttacctcccagcactgcgggcctctcccccgaaagccaccccagctcctgggccggcccctggccacaggcctcattcctttggggcctccagatcccagcatgggctcagtcaattccataccatgaggaggc

SEQ ID NO: 495317 - DNA, 497 bp, Homo sapiens
ccagcactgcgggcctctcccccgaaagccaccccagctcctgggccggcccctggccacaggcctcattcctttggggcctccagatcccagcatgggctcagtcaattccataccatgaggaggcagcagtgaccctgccctcctctggctctctctgggcctccaagaggacctgcaagctccgaggagacacagggccattgccccttcagccccaatagctccattcaagtcagaacacagggagtccctagagtgccctggactacactggcccagtagccaagggacacagccacactcacccccagaccctccccactggtcaaaggacatctctaggtgcatggcccggtcccgaccaacactcagcccaggaggtctgtccacagcaggacggtccctggtcacatgctccggagcctccccaccatctgggtcccctcagcccctgckcaagactctggctctacaccaaggccaggccacaggca

SEQ ID NO: 495318 - DNA, 557 bp, Homo sapiens
tgcacgtcgcagccgccaacgggttcagcgaggcggctgccctgctgctggaacaccgagccagcctgagcgctaaggaccaagacggytgggagccgctgcacgccgcggcctactggggccaggtgagtgcgggcgggagcaggtgggagggggcttccagcgcagcagtctgcagctccggcctgccgtccacaggtgcccctggtggagctgctcgtggcgcacggtgccgacctgaacgcaaagtccctgatggacgagacgccccttggtgagcttgcggagcccacctccacctgggggagaggacaggcggagagggcgcccctgacgcctgcgcccacttctcagatgtgtgcggggacgaggaggtgcgggccaagctgctggagctgaagcacaagcacgacgccctcctgcgcgcccagagccgccagcgctccttgctgcgccgccgcacctccagcgccggcagccgcgggtgagcgccgcccccagcaggccccgccccgggcttggccccgcggacgtcagccccgggcggagtgccagcc

SEQ ID NO: 495319 - DNA, 598 bp, Homo sapiens
gcacgtcgcagccgccaacgggttcagcgaggcggctgccctgctgctggaacaccgagccagcctgagcgctaaggaccaagacggttgggagccgctgcacgccgcggcctactggggccaggtgagtgcgggcgggagcaggtgggagggggcttccagcgcagcagtctgcagctccggcctgccgtccacaggtgcccctggtggagctgctcgtggcgcacggtgccgacctgaacgcaaagtccctgatggacgagacgccccttggtgagcttgcggrgcccacctccacctgggggagaggacaggcggagagggcgcccctgacgcctgcgcccacttctcagatgtgtgcggggacgaggaggtgcgggccaagctgctggagctgaagcacaagcacgacgccctcctgcgcgcccagagccgccagcgctccttgctgcgccgccgcacctccagcgccggcagccgcgggtgagcgccgcccccagcaggccccgccccgggcttggccccgcggacgtcagccccgggcggagtgccagccgaactgggggcagagtccgagggggtgggcggggtcctccgg

SEQ ID NO: 495320 - DNA, 598 bp, Homo sapiens
gcacgtcgcagccgccaacgggttcagcgaggcggctgccctgctgctggaacaccgagccagcctgagcgctaaggaccaagacggttgggagccgctgcacgccgcggcctactggggccaggtgagtgcgggcgggagcaggtgggagggggcttccagcgcagcagtctgcagctccggcctgccgtccacaggtgcccctggtggagctgctcgtggcgcacggtgccgacctgaacgcaaagtccctgatggacgagacgccccttggtgagcttgcggagcccacctccacctgggggagaggacaggcggrgagggcgcccctgacgcctgcgcccacttctcagatgtgtgcggggacgaggaggtgcgggccaagctgctggagctgaagcacaagcacgacgccctcctgcgcgcccagagccgccagcgctccttgctgcgccgccgcacctccagcgccggcagccgcgggtgagcgccgcccccagcaggccccgccccgggcttggccccgcggacgtcagccccgggcggagtgccagccgaactgggggcagagtccgagggggtgggcggggtcctccgg

SEQ ID NO: 495321 - DNA, 487 bp, Homo sapiens
tcgccattcccacttctggtcctgccacctcctgagctgccttcccgcctggtctgggtagagtcatggcctcgagcacaggtgaccggagccaggcggtgaggmatggactgagggcgaaggtgctgacgctggacggcatgaacccgcgtgtgcggagagtggagtacgcagtgcgtggccccatagtgcagcgagccttggagctggagcaggagctgcgccaggtatggcccagggcccctcgctgccctccaggtcacaatggggtggccgagttggccccagccccactggcacatgggacaagggctgaggggttaggtagggcacagtctccctgcctgctcccctcccctcccagggtgtgaagaagcctttcaccgaggtcatccgtgccaacatcggggacgcacaggctatggggcagaggcccatcaccttcctgcgccaggtgaggctcctgcactgcccggagcaccccccc

SEQ ID NO: 495322 - DNA, 495 bp, Homo sapiens
tatgccagtgggaccagtcctgagagctgagggcctcaaggcacgacccttctccgggagccccttgccccctctgccgcgcttccgcgcagaaatgtccttcttcggggacagcaggggccggcaccgcgcgcccctgagcccggtagtgggggaggggtagggcgctaccccctccccgtctgggctcayggcgccggccggccgcctggcggtttcagatcatccgtcaggtccaggccgtgttccccttcttcagggaagactacgagggctggaaagactccattcgccacaacctttcctccaaccgatgcttccgcaaggtggggcaggccagggtcggagcccgggggcggagcgcgcgcggaagtcctgagcatccaaggttgggcagccccacccatgtctgacccccacacccaggtgcccaaggaccctgcaaagccccaggccaagggcaacttctgggcggtcgacgtgagcctgatccca

SEQ ID NO: 495323 - DNA, 631 bp, Homo sapiens
tgtatcattgtctttgcttcatacacagttctaggatagctcatactttgcatactgcaaacttgatctccattggccagccagtgccattagactcccaactacttcggggcagtcactgtcctatwccctgcttcaataaaaggaaaatcagcccctagaacaggacctagtacaactaagtgcacaataaatacttgttaaatgaatgaatgaatttcaagacgcttgagaccactggtaagaattttgggtttccaaaaccctccccttcccaacccccattcggtaagaatgctttcgcattagcatcaggtccgaggttactcattagaaactgggcaaagccggaaggcggccactttgcagcaaagaagccctagaccttgggagtcaatcaggccagcccaggccgcaccacggtctcctagttgacagttcgaggggcctcgcgggccgcttgcttcgtcagcttacagggatcccgcacgccaggtgagcccacacactgagcggacattggggcaggcaggcaggcgccgggggggcggggcccagcgtcgccccgccccgtcctgcctcgccctgttcgcgcgtccgctgtccggccctcggtcacgtgacagcagcg

SEQ ID NO: 495324 - DNA, 570 bp, Homo sapiens
acggagaaagagggctgatttaggaaagtctcatatatggttagcataaggataaacacatataacctttttggagcacaatttggcaatatataactttttttttggagacagagtcttgctctgttgcccagactagagtgcagtggtgcaatcataatcacagctcactgcagcctaaacctcctgggctcaagcaatcctcctacctcaacctccccagtagctgggaccacaggtgcacaccaccatgccagactgtaatttttgtagaaacagggttttgccacattgcccaggctggtcttgaactcctgagctcaagcaatctgcccacctcagcctccaaaagcgctgagactacagttgtgagccaccctgcccagccttaactagatttttaacacacagccaggggcagtggcttgcgcctgtaatcccagctactccgaaggctgacgcaggaggatcacttgagggcaggagttcatgaccatcctgggcaacacagcaaaatcctgtccctaaaaaaawtttttttttttttaatttttaaaaatatggaacact

SEQ ID NO: 495325 - DNA, 624 bp, Homo sapiens
ccacctccattcttttgccaccccattgctctggcacaagagactctattcccaaagaatagtcaagacaggaaaggaaaggcttttgcgaactctcaccccatgcttgacagttttggctgcatgagctgctttcttcttagcatcatactgtgtaaggatatcaatgaggcccatgaagtagacctccttctggggggctcctgggagagagaccaacaattcagagtaggtttagttccaattccctttctccaggaagcagtcagttttgttctgaaaagctaatcaggctctcccccagcactctggtctctgtcctccaggaaaaatcccctctccacccttaaattgtcccggttctctcaccttcagcactccggatggcatagacatcaatgaaggactcaaactctcctgggcccaggggccgatgggaatggatgtagcctccgataccctctggggaggtgccataggagcccacmagagcaggaggtccagtcaggctgcagtccccatccacctctgactcatcctcccgcacgggcgcttcctcctctggttcagagccccgaatgatgtcgtggatgcctagcagaaggctgtagtccatgatcttca

SEQ ID NO: 495326 - DNA, 574 bp, Homo sapiens
ggacgcgttcgcttccccttccaccataattgtaagtttcctgaggcctctccagccctgaggaactgtgagtcaattaaacctctttcctttataaattacccagrctcaggtatgtctttattagcagcatgagaacagactaatacagaggttatttttatgtcgctaagaacatatgtgatttttttattcctttgttttccccaagttttctgcgagtatatatcaccttataaccagaagaaaaaaaatagtctttttaaggatctgatgaacttatctatggtgtaagggttataactagagtagggattaaatagaacaaatggaaaaactttgacttatcactttaggaaacattgcaacagaattaagaagaataagtaaaaaacacaaactatttggagctggatagacatagtttttttttcttaaataaaaaaaaagtattattatttttattcagtcttactctgtcacccaggctggagtacagtggggtgattatggctcaccgcagccttgacctccccaggctcaagcaagcctcccacctcagccttcccagcag

SEQ ID NO: 495327 - DNA, 620 bp, Homo sapiens
aaagtaaacaaaactgaaattccaaaacataccagttaagggagtaggtggggagctaaagagtgcatcaaggatgactttgatgcaatatttctggtgtttcttaagagagcatattcttcaagatactagcaaccttgtccatgaatgcaaaacaccactgagtaaatataattctagacaagaatgagagtttcacagctcatttttctatcggccagcagggtgctgccactgttgttaatagtcattgttaatggaagaactaaaaagctctttttgaagagagagamatccctttatgccaaagtaactgactaaaaatctatgctattaagcaaattaaaaaccaggggacaaattttaattaaaaatatttatagcaagtggaataacagctgccagtttctctcaccactcatgaatgtgttttgcagctggctataattctctcttgtttcaatcagcttaaccaataataacagctgttcactagacaggggacattttattagcacccatttgatatgtagtcactgcttaagaaatctttaatatgagtgatttttaagagaatcacaccgtgacttgatggatcattgtctaaagaacttttctgt

SEQ ID NO: 495328 - DNA, 610 bp, Homo sapiens
tgaatgtgcacactgagaaaaggctttttcaaatgtagtaaaaggaactaatacaactgaactctgtaatgaatttaaatctaatacaagtgaactctgtaatgaatttaaatagtctaccgtatgttttattagaagaatgtcatttggggcttggttggtggatagaaagttttctagaggccgtgtcaaaaaaaaatacaaaaatatataaaagaatttctgatgtttatttagtgtttgtgaaggtccagatactatgttaaatatttttcaagcctcataggttcataattaaattctttaaggaaagaaagcactattatgatctccattttactgtaaaggaaaytgaagtttagaaaggccaactaacaaatgaatgcttaacccaggtctatctgaatctagtgccctaaaatcttaactgataggcattgttgaatatttacctatgatttcaaagccaggcattatactaaatgaaactaagagataataacctggaaaatgtgaatagtcagaactattccattaaacagccagtcagagttgagttatacaaggattcaaagaaatgtatatgtgtgcttcacacagaaattaattt

SEQ ID NO: 495329 - DNA, 522 bp, Homo sapiens
cagcaccgtctccactggccatttccttccaagtgcccaacggcgggtagctccacatccaagggagggcatcccactccacctgtgcagttctcagaaatctctacctcagtttaagccactgatagaagaatactcttaaaagtattcttaaaagatcttatgggcccaagtccatctatgccaccygtatctcaggcagcttgggggagacaagaagcaccatgacagatttatttcttaatcttgtgagctttttccaaagaacttggtaagcaaataaagtatgttttatgaaatagataccatcttaactattctcagtctgactcaagaaattataagcccttaaaaatcaagctgtgagtatgctatgttatggaatttgaattttagtagaatatagtcagtaagatgagttgcatagctttctggtagaaaagacctaatggaaatatgtcacacattatctcaatcactggacactgtgatcaagaataccttccttgagagataacttac

SEQ ID NO: 495330 - DNA, 660 bp, Homo sapiens
gctgaatgaagccagcaccgtctccactggccatttccttccaagtgcccaacggcgggtagctccacatccaagggagggcatcccactccacctgtgcagttctcagaaatctctacctcagtttaagccactgatagaagaatactcttaaaagtattcttaaaagatcttatgggcccaagtccatctatgccacctgtatctcaggcwgcttgggggagacaagaagcaccatgacagatttatttcttaatcttgtgagctttttccaaagaacttggtaagcaaataaagtatgttttatgaaatagataccatcttaactattctcagtctgactcaagaaattataagcccttaaaaatcaagctgtgagtatgctatgttatggaatttgaattttagtagaatatagtcagtaagatgagttgcatagctttctggtagaaaagacctaatggaaatatgtcacacattatctcaatcactggacactgtgatcaagaataccttccttgagagataacttacacatgctggtcactatgattaactatcagcatttagaccattagctgatcttaatggtcacgaatgaggaatagaagaaaccagtgtttgaaatacatagagcataggactggccaaccctataat

SEQ ID NO: 495331 - DNA, 619 bp, Homo sapiens
tggtttctcaacactagtcatcaatcttttgtctttatctccagccactctctttccctttccctaagcaattattcccaaatcgcacctctcttctgaagtcccagtctgctcctcccatccggaaacacactctgaactgaagatagaggctacttcttagtttacttgactctgcttctcccaccttccaaatatcttttacaaaaacttccactatgcagcacgtactttcctgtccccaaaacacaaagcagatgcctggttcacttagagtgattgagcgatgccttgtggccctctggattctgcacctgccattctactgaaaaggattcagcagagatcaccagcgatcaccttattccaaatttagtggtctttaagactttcttaacttcgttgagcttcctgtagcaactgtaccagtcatcattttggtctttgagtctttcctgtcttggcttctgtgacccatcttctttccrgtcctccagcctctctttgataccttctccttcctcccgctccttccccttaactctggggttcagcactggcccttctaactctctgaattcttcctgggctatctccgcctccctcgttttgtaattta

SEQ ID NO: 495332 - DNA, 586 bp, Homo sapiens
gcccaattactatctgtgcacacacatctgtgttttctgtaagtcaacacagtaataaggctttgttttcattctaaagctccagacagatgaactgaattcagtcctggggatgtgttctactaacaattaaaggttacacagaaagtttaggacgtttgtttccagaagacacactcatattgcaaaactgtggcttagcttttgctattgattttaaacaatatttagcaaaaattcttactgaggaggagaattctcttcccatttctgccatcaaaagaagatgttatcctgtacatctttaagtccaccagtgctatgagttgaatgtctgtgtcttccactgtgccccctcccctgcaaattcatatgctgaaatyctaaaccctaaggtgatgatggtattaagaagtgaagccttggggaggtgattagatcatgagggcagggcacagcttcatggatgggatcagtgcccttataaaagtgatcccagagtgttgccttgttccttctgtcatgtaaggacacagctagaaggcaccatctatgagcaacagaccctcacccaacaccgaatcta

SEQ ID NO: 495333 - DNA, 582 bp, Homo sapiens
taacattgtagcatgtaacatatacattctgcgtctctcttggactgtgagcctctcaagaacagagctcagtttttccatttttctgtatcaaacacagaacaagagcaggcaatgaataggatacaacttatggcaattattgcaatataaggcagatgtgagctccaagatagtaggaactttgccatttttgtttacctctgattcttcaagacagatactgagctcggtaaatatttgttgaaagaatagatggttttgtagcatgattttatattatccgacaagtagaatggattatctactaaatctttctgtttctagggtctctgattatattattcgtagtctaaattcatattaaaagttatgagttggtcactttcctccgccaatgcagtatgaactctgtttatttttaagtcaaactcttatcacatctacctttgtgtaactgaaataactcagacttcactggccagatagcattgttrtattacgacttcaccccacaacaagtggcaaaaaccaaattcacattagctgaagcagtgagagatttttggtctatgtaaccag

SEQ ID NO: 495334 - DNA, 584 bp, Homo sapiens
taattgttttctgaggctaaataatgttatcaagcctctctctctctttcttcccccttccccactccatctttttggttcttttagcctctgtttctcttcgtacattggccttattctctcctgtcctagaaagactgtcttcaagtagtgggaaaggaagccccccactggtagctccccttccaaaaggaagaaaggtctgcacccttcaccccagaatccttgtctcatgcctagkggaagggttctgattcatcctgctctggcttagtcctccctgtgcccaacccttaaccccagggcagagatgccaagcttggccaggccacgccccagggccccacttacggtcatgaagtgggcagcagtcccacagaccatgttggtgtgggtgagggatctttccacaatataaagagagagttttaggcccccaaaatgatgtccaatacaccatgtgtgagattttagggaggaaaacgttagggaaatgtgaacattttcttgccaagatctgactaaatgtagcttaatgttagattattgaaacattgtttttgatacaccaggaattcagtaac

SEQ ID NO: 495335 - DNA, 584 bp, Homo sapiens
taattgttttctgaggctaaataatgttatcaagcctctctctctctttcttcccccttccccactccatctttttggttcttttagcctctgtttctcttcgtacattggccttattctctcctgtcctagaaagactgtcttcaagtagtgggaaaggaagccccccactggtagctccccttccaaaaggaagaaaggtctgcacccttcaccccagaatccttgtctcatgcctagtggaagggttctgattcatcctgctctggcttagtcctccctgtgcccaacccttaaccccagggcagagatgccaagcttggccaggccacgccccagggccccrcttacggtcatgaagtgggcagcagtcccacagaccatgttggtgtgggtgagggatctttccacaatataaagagagagttttaggcccccaaaatgatgtccaatacaccatgtgtgagattttagggaggaaaacgttagggaaatgtgaacattttcttgccaagatctgactaaatgtagcttaatgttagattattgaaacattgtttttgatacaccaggaattcagtaac

SEQ ID NO: 495336 - DNA, 482 bp, Homo sapiens
tagaagaaaaagcactgcactgattcctctaggggtcattctggaaaagtctcaattacagaactaggtgtgagtgcagagagtggtggtgaggaaaaataaaatgatattgtgaagcaaagcactaattcagcagttgaaacttcagtgataccaggcagtgagtgtaagagaagaacagggaggatgatagtttttgtgaagggtataagaagagaaagaatgaggacaagattgccgaagagaaattgcacagaaagataatgcatgggaagggaaaactgaataggaaaagacgacagggctaggatactggctaacagtgactgattattgayccacaccaggaaatgttctccatgtttgcatcaactattgtacttatagttcatagcaaccttctgaggtaggtatttgtaatattcacattttgcagagaggaagccaaggcttagagaggttaaggaacatgtccacagtca

SEQ ID NO: 495337 - DNA, 644 bp, Homo sapiens
gcattcattaattcggtctcttcttttcttttctattaatctgtgcggtaatttgtaggtatccttaatatatgagagtsatggaaaagagaaaacagtaagcgaaacattcacttattggatattaccctcgtctgccccccccgcccccccaccataaaacatactatgtgataaactacacccaagaaacctctttcctctggactgttctgcaatgcaatttaaattcaggtatgatgtttaatatccccctgagagtacccagcaagccacttaaaattcacagttggggaagctcaggggctggaatatatttgcgggcagagcttcactgtgaaatcaatggctctaattaactacccatgcaggttatgaggaatatcgggaacttacacttaccttggtgtcgtctcgtttcatgctccttttgggtttacacatatacaaagaggaatagtccagtctgcaaaacagaaatcagcatcaggcacccattcggggaggggctctgccctcgccagctccataccactttctggagaagaaaaaaatcaaaccaaagcctagacagatattcgcaagggtgcgtgcaccttaccctataaaatctctatgttccagtaactgtctctcttgcaaat

SEQ ID NO: 495338 - DNA, 461 bp, Homo sapiens
taggataaaaacctgaaagcttcctgaggagtttaaagatatattctcttgagatatgatgttactrtagatatctagactagattaattcattaaatcattcacttatagagtagtcatttggcactcaccatgggccagtctatgctggggggtacagcaataaacagagctcagcaccccacagcttacagtgtagtagggaacataatatcccatgaaggatggacaatgacgggaagacttgcaaaggagaagcaaagttgtagccctgggaaagggctgaaggagcagagctgacctaggctatgggtcaatcaaggtaggcttcctggaggaaactacaaaggctgagtggaggaacactgggacgggaagaggggagaagagcatctcaggcacagagaactgtgtgttcaaaggcctgacagcaagaaggagagcagtgcttgaggaatgaa

SEQ ID NO: 495339 - DNA, 502 bp, Homo sapiens
cccttttgcatatgaggaaactggcccrtagcatttgaggacttgcctgtggtgcctgagttttagaatccaggtgtctgactccaaatctagtgtgtggaacactgtaccattttcatttaaacaaatacatttctaatggtaaatttgaggtatcatgtattgggggaaaaggtttagagcagggatctttactttgttctatacaggtagctcttttcagatgttttttcatgtttagtaaaaacaactctggtctccagatgaatggcattcagctccgtcttgttagtgctgttttgtttgtggtagggttttccgggtgcagattcatagcaccttaactttgtattggctaataattaacaaaagcggctgctgacttcactaagtgattgcagattttactgcaagttcttttgtttgcaactgtctaggatacaatgatcatgtggaaggcagttctttgatggctaattctataccattaataaagtaaact

SEQ ID NO: 495340 - DNA, 502 bp, Homo sapiens
cccttttgcatatgaggaaactggcccgtagcatttgaggacttgcctgtggtgcctgagttttagaatccaggtgtctgactccaaatctagtgtgtggaacactgtaccattttcatttaaacaaatacatttctaatggtaaatttgaggtatcatgtattgggggaaaaggtttagagcagggatctttactttgttctatacaggtagctcttttcagatgttttttcatgtttagtaaaaacaactctggtctccagatgaatggcattcagctccgtcttgttagtgctgttttgtttgtggtagggttttccrggtgcagattcatagcaccttaactttgtattggctaataattaacaaaagcggctgctgacttcactaagtgattgcagattttactgcaagttcttttgtttgcaactgtctaggatacaatgatcatgtggaaggcagttctttgatggctaattctataccattaataaagtaaact

SEQ ID NO: 495341 - DNA, 502 bp, Homo sapiens
cccttttgcatatgaggaaactggcccgtagcatttgaggacttgcctgtggtgcctgagttttagaatccaggtgtctgactccaaatctagtgtgtggaacactgtaccattttcatttaaacaaatacatttctaatggtaaatttgaggtatcatgtattgggggaaaaggtttagagcagggatctttactttgttctatacaggtagctcttttcagatgttttttcatgtttagtaaaaacaactctggtctccagatgaatggcattcagctccgtcttgttagtgctgttttgtttgtggtagggttttccgggtgcagattcatagcaccttaactttgtattggctaataattaacaaaagcggctgctgacttcactaagtgattgcagattttactgcaagttcttttgtttgcaactgtctaggatacaatgaycatgtggaaggcagttctttgatggctaattctataccattaataaagtaaact

SEQ ID NO: 495342 - DNA, 535 bp, Homo sapiens
ctgcattaactgcctcagagggtagagatcattttgttcctattctggaacacagactcaatactttgtgtcatgtgaagggtcctcaggtacctcccattgccttgagtagaaagtggggcggaggtggggtagaggagatctctccgggggagagaactgcttgtcttgcaagagaacaaaaggtacagggctstctttgaaatatgcacttccaggtccagggtttatgctgctatgcacaaagattgatcaagtacttcaaaatgagtaagtagtgtctcgaagatctttctacacttccagcctgctcatgtgagaaatgagaaaataaatggacatacacgctggccaaaagtgtgggaaaatcaatagtagtgccaaatcagaaggctagctcaaccttcagtgtctttcttgaagtagaaagccccaaacagttagaagctatgaaagactccaggtctgattcttccctctaagaagcacaccgcagggtacttgttcctaagccagctcgagggtgggtgttgag

SEQ ID NO: 495343 - DNA, 560 bp, Homo sapiens
acaaactcctcagggtgttttctttgtgtataagccaggctcagatctaatgctcttgaaattccagcaacaaatcccttttccaaaggttaatctcttcgactacagaattactttgtagaggttttactttgtaagtgtacctactcttgaccccggttttactcacaagctacaagatgtcagcttcacaggccccattatgaggatggagagatagggatactggatttatttgggcattgggtatttacatataaaaattactgaaagcaggtgaaattgggactttcctattctgaggcgtttctaatgacagtcttcaatagtattatatattcactcaatagttgagcacctagtgtagccagtgttcaacagtaaatgaagcaaagtccctgattctgtggaagttaattttatttacacacacaaacacacacagtcttaygtgttgcatcattagctggtgatcagttcgagaaataagttagggtatgaggttacttagataacatttaagcagaaacctgaagtaggtgagaatgagctgtgcagat

SEQ ID NO: 495344 - DNA, 660 bp, Homo sapiens
gaggctgagctttttagctggtcacagtggctcactgaacaaaattggaggcatttttataggaagtaagaggtgaaaggatactgtgaaggtaggcaaccagtaatgctaccaggracacatgaagtttaaggtctctggtaagcattcacatggaaaagtcaagtaaggttgaaattataagcctcaagttgaaagttcaactttcaaagttgaaaggaagagcagagatgataacagttcaaaaggagagcagagctgataacagtttggaaatcattagcatgtagatcatatgtaaagtgaagagggcggatgagatcaattagtgacagagtagagttgaaaacttgtcaattttgtatttattactgtgacttgctttaattaattttattaattcaacaagattttaatgtatactttccatgtgttttaaactgctttgaaccctcagggcacaaagatgaagatgtatcttttgcttttaagaagctgagatagaaaaaaaagataaaaattagttttgttaaatgattcactacaatatatattaaaaattaacctatttaggtatatttgtgacatttggataatggtagtagctctactgcagattcactttttaagtgagaatttaagtaatttatcttgagtaat

SEQ ID NO: 495345 - DNA, 660 bp, Homo sapiens
gaggctgagctttttagctggtcacagtggctcactgaacaaaattggaggcatttttataggaagtaagaggtgaaaggatactgtgaaggtaggcaaccagtaatgctaccagggacacatgaagtttaaggtctctggtaagcattcacatggaaaagtcaagtaaggttgaaattataagcctcaagttgaaagttcaactttcaaagttgaaaggaagagcagagatgataacagttcaaaaggagagcagagctgataacagtttggaaatcattagcatgtagatcatatgtaaagygaagagggcggatgagatcaattagtgacagagtagagttgaaaacttgtcaattttgtatttattactgtgacttgctttaattaattttattaattcaacaagattttaatgtatactttccatgtgttttaaactgctttgaaccctcagggcacaaagatgaagatgtatcttttgcttttaagaagctgagatagaaaaaaaagataaaaattagttttgttaaatgattcactacaatatatattaaaaattaacctatttaggtatatttgtgacatttggataatggtagtagctctactgcagattcactttttaagtgagaatttaagtaatttatcttgagtaat

SEQ ID NO: 495346 - DNA, 586 bp, Homo sapiens
aaattactctcagcttgcttgttgtcttaggcatatgttctgggagtggccaacacctgttttacatctgtgttagtctttgcggaataaaaagcaaattagggtttaatggggactattaatcttgtcacctaattgagtagatctaataaatcttttcattcaaaacccaatgggaatttctagttggaaatgagtgtggggaatattcaatctcaaaaatattttcatacacaaagattatatatgagtttgtgaaagatgttgaatattcaatgaaatttaatgagtatgaattgaacacttatcctgggcctagaactgttggcagttgcttttgagagttacagagtacatttatggtaattactgcacttacgaattttgctatgtggtttgggagtatctgaagtatcttatagtaggtctctaaactggtaataataaaaagttcaaatatattattttgttacactccacgaggatcaaacttcatcatgacatgattataatttgaaatatgagtaagaaataygtagggtcatgatctctataagcccattctttgcttcttaattaaattttg

SEQ ID NO: 495347 - DNA, 627 bp, Homo sapiens
tatgacccactgactccctttgtctctttccacagacaccttacactctaccccacatttacacccaccccacactcccattctcatcrctactccacccctttccataggggaagtagtatttgacctctgcttttgttggttcccctgcctattatttcaactggaatagggcaggggaagtcacatctggggacaggatgggacctttgggccactgctttatttctcttgggcccatgaatcaatgaagaggagaaagtcattgagaagcatttgggcacctgcagatatgatcagtggcaacagcagtttggcgattctgcctgaggtgtttgaatacggcttaaattcccctcaaagtagacagttcttattccatttgtctttttctcctaagtggctgcacctttctcagggaccttatgccagctttccattctggatatgccaattatttgccagatctttctgactgatcacaagtacagtacgggaccactctttaagaatcactagtccttaaaacatttaaaaatagttgactttgtttttctactgaattgcctgaatgaaagttttgagaaaatattttgtcatagtcataaattagttttaagtctaaat

SEQ ID NO: 495348 - DNA, 627 bp, Homo sapiens
tatgacccactgactccctttgtctctttccacagacaccttacactctaccccacatttacacccaccccacactcccattctcatcactactccacccctttccataggggaagtagtatttgacctctgcttttgttggttcccctgcctattatttcaactggaatagggcaggggaagtcacatctggggacaggatgggacctttgggccactgcttyatttctcttgggcccatgaatcaatgaagaggagaaagtcattgagaagcatttgggcacctgcagatatgatcagtggcaacagcagtttggcgattctgcctgaggtgtttgaatacggcttaaattcccctcaaagtagacagttcttattccatttgtctttttctcctaagtggctgcacctttctcagggaccttatgccagctttccattctggatatgccaattatttgccagatctttctgactgatcacaagtacagtacgggaccactctttaagaatcactagtccttaaaacatttaaaaatagttgactttgtttttctactgaattgcctgaatgaaagttttgagaaaatattttgtcatagtcataaattagttttaagtctaaat

SEQ ID NO: 495349 - DNA, 598 bp, Homo sapiens
tgaaatgttattggacaactacccagtttaatgaattttccagtgtcataatagccctgtaggcgctcagcaggrtgggatatctatgcttaaacagagatttatttggattcttaatctaatggaggttcaaatatgtggaatttctggtcatttgtaaaaagaggattatgagcagagggattttcctagcaccctgccggagaagcagggacacccagtctctgaagtttgccgctgggtcagatcatgatgcttcagaggaactctaaaagagacactcactcttgcccactcttccctttgttctctagaccaaattctgaaaatacctcgtcgtcttactaactttccaggcttggtaccctacccataagtcttttcctggcttcaaacatctaacatttatgtgacttacatgccatgctcgcacacatcacatgtgggacactaagcactgatctgtgtactcaaaccaggcccttaataggcaacatctcatttaaaccctcccagtaatcctatgcaacagacttcctaaaatctcacttggtgaaactagctcaatttgcccaacatcacacagctattataattc

SEQ ID NO: 495350 - DNA, 522 bp, Homo sapiens
catgtcatgggggcaacaaccctgaataaaataactaactactgagaaaggcattatgtaaagctgtctccagcttgactttgacagcatcatgagctgctccattaatcctaaactgcctacctacagactttacagatgtgagctaataccttattacttaaggcaataacattcagatatttttatttgaagctcaaaaacatccctaaccaatacaactacttacctatgtaaaacatgtgactacatttaacytcaatgatggatgataacttcacacgttctcattgaaaaatgtggacgagaatatttagggaacatttttgtggcatggattaaatgacaatatcgaagtgaagtgtacactcaaaattattctccaatatagttgtttccctgcagttagtgaaaatgctgtttctgtttaatttttccagttaatttgtgtgaaatacaatgactaaaatagtgcatagacaacatagatccccctgattaatcatgtccaacatgctcttt

SEQ ID NO: 495351 - DNA, 582 bp, Homo sapiens
cagccttcagacttataattctgtctagacttgcagcatctgattgctccagtggatgggctgttgtctggagagagtcgctctcagtgtgtggtagccagagacaggccttgaagttgggggacctgggcttcagttctatctctgcccctagaaatgcagcatgaccttaaggcaaatcatgttttccactgagcccttgtttagtcattggaaaaaagaaaacatttcttccctcttggtgttgttgggaagattaatcaaattaaattaatcttccaattagcacagagtctggcacggagtaagtgcttaatatgttttctttttaaaacaagaagaggcagattttttatctgggaactgtgatctcacccttctacattggtgttcagtgtctgagggacataggacttggcagccttagtaagacaaacctaggggctgatatttggagtgatggcctgaagaaaaggaattatgagtgttctatatgagtctgagggccatacaaggartttaactcaataaagctgtccatcactcagtactatccaatgatgggcaacattttaaggcaag

SEQ ID NO: 495352 - DNA, 582 bp, Homo sapiens
cagccttcagacttataattctgtctagacttgcagcatctgattgctccagtggatgggctgttgtctggagagagtcgctctcagtgtgtggtagccagagacaggccttgaagttgggggacctgggcttcagttctatctctgcccctagaaatgcagcatgaccttaaggcaaatcatgttttccactgagcccttgtttagtcattggaaaaaagaaaacatttcttccctcttggtgttgttgggaagattaatcaaattaaattaatcttccaattagcacagagtctggcacggagtaagtgcttaatatgttttctttttaaaacaagaagaggcagattttttatctgggaactgtgatctcacccttctacattggtgttcagtgtctgagggacataggacttggcagccttagtaagacaaacctaggggctgatatttggagtgatggcctgaagaaaaggaattatgagtgttctatatgagtctgagggccatacaaggagtttaactcaataaagctgtccatcactcagtactawccaatgatgggcaacattttaaggcaag

SEQ ID NO: 495353 - DNA, 538 bp, Homo sapiens
gaaaccattacagaaatattcaagaaaaacttaatctccccatttagccacagggaagacatggaggacaggattttagctttaagccttaaatgttcaggactgaaggagttagcctcaaaattacttataaatttcatcaaatattgagtgtctgctttgtgccaggaaaatgtctactgtttggctgatctccttgcatgtcccttttgatgatttcctgtttttgtccctttttcttcttttagtgaggaatcaaggttctcagtgtaatcaagttactcagcctaccgaaatcgttttgatttctattcacaggtgttttgcctgtgtttacctgatgttccctctagctaatccagggattctgtatgtttaattgttgatataaagtggcagacacactttcgagatcttaatagcaagaatgtaagcatttcttttcyttttttaatcttaggatttatggcaatttcatagaaatctgacagagttggataagaaactgtaatactgtatatgagatagagaagatatt

SEQ ID NO: 495354 - DNA, 558 bp, Homo sapiens
gctgctgcggtgctctcctgcactggagtaggtacagcctaatcaaaggcctgttgttttcctttggctttgaaactcactggttgtgggtgtatctgttgcatgatcatgaacacttaaaaaaaaaaaaaaaagacagatccagtcccattactttggctctggcacagaagtttctggaaagagaaaacataaaatgataccaaagtggtaacagtaaaataaatacctctctctgaatttcatggaagtaatgaagcttcagggcaccaraggagactttagtagctccaaagctattaatgactgtccaataacccaagaactggccaaacaagctggactgctttcctgtgagtcatcagaatcactgcaggcctatgatgggtccctttcacctgtgggaaacaggctgttaaaatggagagttgtcactagttatcagcttcttagtcttcaccagggctgggcaacaagagtcataggacctgtctgtatgcttatgctttttaatttctttatctccttgcaaatgtaatgatgtgacttacaatacat

SEQ ID NO: 495355 - DNA, 558 bp, Homo sapiens
gctgctgcggtgctctcctgcactggagtaggtacagcctaatcaaaggcctgttgttttcctttggctttgaaactcactggttgtgggtgtatctgttgcatgatcatgaacacttaaaaaaaaaaaaaaaagacagatccagtcccattactttggctctggcacagaagtttctggaaagagaaaacataaaatgataccaaagtggtaacagtaaaataaatacctctctctgaatttcatggaagtaatgaagcttcagggcaccaaaggagactttagtagctccaaagctattmatgactgtccaataacccaagaactggccaaacaagctggactgctttcctgtgagtcatcagaatcactgcaggcctatgatgggtccctttcacctgtgggaaacaggctgttaaaatggagagttgtcactagttatcagcttcttagtcttcaccagggctgggcaacaagagtcataggacctgtctgtatgcttatgctttttaatttctttatctccttgcaaatgtaatgatgtgacttacaatacat

SEQ ID NO: 495356 - DNA, 617 bp, Homo sapiens
acatttgttgttttaagtcacaaatccacttcaaggtggagcctgaatttgagcctatctgtccatgctgtctacactacactctctaagcagcaaatgtcactctggttttattttccacactgtgatttggtccttcctttcacattcttgcctacataattattctgtcttctttaaactgccactctcgtctccaaaagagaaatcactttttaaacttaaagtaacatagagcaaacactaccattttgaaacgggagcacctctccctggctcccacagcacaccctgaatctggtctatgctgggtttgtctggagaactagaggccgggcaaagattgtggacagctgtgcctttatgagggtcaaagtctgcctcctaggactgtgaacagaaaggaggaagtttacccatggccatatgctgactacacagtgtcctccttccctcctctcattctgagtcaccagggagtccygtctgtttttcacaggttccagctgaggcacccaacagcaatgatgttttgtgaaaatagtgtgtgatttggatgcaaatgatcctgggttcaagacttgcttctgtaaagaagagaataccacactctcctc

SEQ ID NO: 495357 - DNA, 538 bp, Homo sapiens
ctgtcctacaagcgtctttctcctcctcctgctcacccattctgagctcagacttaccatgattccctcatttgacctcgagcatatcaccatcaggggtttgcaattcaaagtacagcatcayagcagacagaacaatggcttggccaaagatgtccatgtccttatcctcagaatatgtgaacaggttaggttgcatgatgttttgactgcattgtgttttcccagaactcatatgttgaagcctaacccccaatgtgtctgtatttggagatagggcctttagggaagtaattaaggttaaatgaggttgtaaggatgctgtttgtattagtccattttcacactgctgataaagacatacccaagactgggaagaaaagaggtttaatggacttacagatgcacatggctggggaggcctcgcaatcatgaaggaaggcaaggagtagcaagtcacatcttatgtggatggcagcaggcagacagagggagcttgtgcagggaactcctctttttaaaaccatcagatctcatg

SEQ ID NO: 495358 - DNA, 538 bp, Homo sapiens
ctgtcctacaagcgtctttctcctcctcctgctcacccattctgagctcagacttaccatgattccctcatttgacctcgagcatatcaccatcaggggtttgcaattcaaagtacagcatcacagcagacagaacaatggcttggccaaagatgtccatgtccttatcctcagaatatgtgaacaggttaggttgcatgatgttttgactgcattgtgttttcccagaactcatatgttgaagcctaacccccaatgtgtctgtatttggagatagggcctttagggaagtaattaaggttaaatgaggttgtaaggatgctgtttgtattagtccattttcacactgctgataaagacatacccaagactgggaagaaaagaggtttaatggacttacagatgcacatggctggggaggcctcgcaatcatgraggaaggcaaggagtagcaagtcacatcttatgtggatggcagcaggcagacagagggagcttgtgcagggaactcctctttttaaaaccatcagatctcatg

SEQ ID NO: 495359 - DNA, 565 bp, Homo sapiens
ggcaccagagtcatactaccagacagaactatctggtgtaggaaaatgatatatatcaaggggcttgggatggggctggggccaagggctggaataatgcaagaaaaataatgaaaatgatcaacttctctgcaccatacataagmaggacttggaaggaaacattgaagggaggaaaggaaagagggtaaaaggagtagggaagaaagctgcacagcttgggaggcttaggagaaaggcaccagagaagactttctcaaaggtgaggaggccaaataattttacaaagaaaatcaaagtctactgtctaatgttagattttctgtttttctgtgatgtaaactccctctgttactccaaagcttcagaaaagtctggtgcacacacacacacattcatgcagagtagcttgagagggaagtcaaggaaaggagccacgtgcccccatctgggtgggtgcagaggacacagaaggcaccagccacggagacagggtgtgggtgagacagagattcaggccaaagggtcccatggaatgtgaatccctagaaagtcatagaaatct

SEQ ID NO: 495360 - DNA, 620 bp, Homo sapiens
tatctggtgtaggaaaatgatatatatcaaggggcttgggatggggctggggccaagggctggaataatgcaagaaaaataatgaaaatgatcaacttctctgcaccatacataagcaggacttggaaggaaacattgaagggaggaaaggaaagagggtaaaaggagtagggaagaaagctgcacagcttgggaggcttaggagaaaggcaccagagaagactttctcaaaggtgaggaggccaaataattttacaaagaaaatcaaagtctactgtctratgttagattttctgtttttctgtgatgtaaactccctctgttactccaaagcttcagaaaagtctggtgcacacacacacacattcatgcagagtagcttgagagggaagtcaaggaaaggagccacgtgcccccatctgggtgggtgcagaggacacagaaggcaccagccacggagacagggtgtgggtgagacagagattcaggccaaagggtcccatggaatgtgaatccctagaaagtcatagaaatctaaggaggaccctgggtatttcctcaagatgtgggagaggggcttccaccaatttctattaaacctcagagtaactagaatccgg

SEQ ID NO: 495361 - DNA, 329 bp, Homo sapiens
tccccagagagtttgcaaagattgtgggctccaccttcccwcctgattcgccacccgcaggagaatttactatttctctttcatttgtggggagaagacaccgttaacgcccccaccccccgctcacacgcccaccctcgccggtgccccgggcctgaacgcggcacatctcaaccccctcccacgccccttcacacttctattatttctgtttctttggacaagaatcatttgcgttaatgatttttttttgaaaacgttcaagtttcactccagtaagcttcctagaaggaaggaggaggtgagggaggagagagaaggaagaggag

SEQ ID NO: 495362 - DNA, 609 bp, Homo sapiens
tgtggggtgatctcatttataattccaatacatgatgaagtttgtattgttatctgctgatccacagaaaaagcaaattaactgaaggcctaataaaaggtaacttggctgggtacagtggctcatccctataatcccagcactttgggaggccaaggtgggaggattgcttgagtccgggagtttgagaccagcctgggcaacctagggagattctgtctctacaaaaaattaaaaaaaaaaaaaaaaagccaggcatggtgtcatgtacctgtggtcccagctacttgagaggtgggagcattgcttgagcccaggaggtcgaggctacagtgagctacgattgtacgactgaactccagcctgggcaacagagtaagaccctgtttcaaaaaaaaaaaagaaaaaaggcwattcaagctacacatagtggctcccttccaaagaatatgttatgaaaagagggaaaaaatgagagtggggaaacctgaaaactctgcctcaaggccagcatccatggtgataagccatgctgatagtgcgtacccttgatatgatgtcatgagaatgggattttacctctgtgctcttcttccacaaaacaaataa

SEQ ID NO: 495363 - DNA, 526 bp, Homo sapiens
ctctcacactaagctgaatgacactggtgtgctttttggtttctttttctaatttgttccagaccaattttgaaaaygatacacatcttataaaatacacacacacgcgcacacacacacacacacacacacacactgcactctggacacttgtagagagtccccccacccccccagtcttcagttgtgatttgtcagaatatatgtgtgaggagagtgcatggggctttggaaagagaaacccaaaatgctcattggaggccagaatcctgtcctattcatctttgtctccctagagcctagctgggcgcctgtcacctagtggctgggaatgtttgttgaaagtttgagaggaagcaggagagaaggaaggagaaagagtaaaaacagagagggtggaagcaacagaaagagggaaaaggagaaaattaggaaagtgtgagacccaggaaagttagaagagaggaagataattaaaacaaacaaacaaacaaacaaacaaacaaaactacagcctgtaagaaga

SEQ ID NO: 495364 - DNA, 431 bp, Homo sapiens
aagtggttccttgtttgtgggatgaaccagagtaaaatctagtgaggcataagaatggagtaacgccagaaatgaacttctgctgtttcggagcccattttactggaagttgtatgcatggattaaaggaagggggtggtcacatttggaatccctggttgtgaactttgtcaactccacgcaacttttttgcttgaactcttcctaggcagcggcaatttctgactctgtggccctygtagctgactgtgcactggaacacacacaaatgaagcaggactgtcggactagacacttggaaagagcaattgggtccacccaagcctctagacaacctcttttcccagtgagggttatgccctgctggaactgcccagagatgcagatctgaagctcattaagagagactgaactgcatctatatttaaagc

SEQ ID NO: 495365 - DNA, 632 bp, Homo sapiens
ctcactttgttttacgtaagtaggaagctagagagacgttgaaagtttatccaaattacacagctggtcactgctggatttgttgctagaagccaggtgacctgatgtttagccagaattctgttatctttaagtcccaccctgagatagctcttcaccactagacatgtttgtgatatgaccaaaacctctrtgctgacctcagcaactctaatgaagtcagactaaggtgatttgacttcgtggtaccaagctctaagcatccaagccaagcaaaagcctgtctacactcagccttaggtgttcctggggagagtcttaggttggaagacccctggaggggagaaaaaggaatcaatgattatttttttcagaacaagagaaaaatcacttcaatgtgccctgtgtctccaccagttctaagggtctaccagttggtgattactttaatggtcatagatgccaaaggcagaaaattcaacagatccttctggccttgtagagatattaggcaaacttttttcgttaaatttctattctctgctttggtcagagttttcaatattccagtgaaaccatcttagctattttcagacagacaaaccacaagcccaaaaccacagaagatgtgg

SEQ ID NO: 495366 - DNA, 614 bp, Homo sapiens
tgcggtttcataaaatagaggctccctgctgtaggcacttcttgtagagcttaggaatgcacccctgggggatggcaggcagtctgaatttcttccaccaggtcagagagtcaatgtcacagctaaaatctgcacctggggcgggacaactggaaacagcctcaggagaatgagggcagattgtcagcgtgtaaagggaaaggatttctgccttggagagtcactgctcattttycttgcaaaaaaggcccaggctctgcttttgcccatccagtctttacccctggtgtgagagtggggccagctactgaccagacctcctcaccttctgctcttaccttctgtcccctgttggtgagaagtaaggtctctggcctttgcaaagtggggaagctagttccatgctagcggttctaaaatgggatactttttaaatagaaacgggggggaagatttgctgaaagagtcagaagacccaggagaagcccatgagtgtacacccttccttttctgggccccacaacacggttcacatcaccctccacccctttgctaatgttcctctctccctgaacttcttcagcacacaattcaggtctccccttggactctgg

SEQ ID NO: 495367 - DNA, 611 bp, Homo sapiens
tttgttttaataaatttgttacttgaaagcatgcagcttctttttttattgccccactttatgagggccgatttattgtttagcttgtaatgagtaccatatttggtcrtagtcacttgaatgtttcaaagtttacattttggaacaatcagtcttattttaaaaaggatagaatagaataaagaatgaatgtatgcagctttatgcttcaaataaataaaaatcagttctgacaatgtaagaacattctctgctcctctaattcccactttgttttgataagttaattctcagatactgtatgttaaataaagatattctatgataattcactaactaaacaatgttaaaggttaaacctcattagtttaccagataaattttaggtctgttgttaattatggaaaaatactctttcctttttaaggtgatgatttgaatgacacgtcatctaaggaggcaaattcccaaagagagtctgtcacattcaaggatatagaaaagaggtcagttacattccttcagaaaacatgttttaataaccattaggtgccagaccctcaaatatgcacaggattacttctcaataaatcaatacttttgtattttca

SEQ ID NO: 495368 - DNA, 585 bp, Homo sapiens
cgtactgctttagtttttatgaacatgtgactgaaactgagttccttttacctaacatctggctttcaacaaaaacttattgatatggctccgatgagtggaggaacaccagggttctttgtcctcatgccggcttagacaaaacgacatggacatacatggagtgkttttaaggaacccagagtttagtaggcaagatagaagtgggaagaaaaaaggaagaagctcccctgtacggagacagaggcaggggctctccaaagcacaggacaggaaccccacctgccatggataccggaattgctgaatcttatggtagctctatttttagttttttgaggaacttccaaactgttctccatagtggttgtactaatttacattcccacaaacagtgtacaagggttcccttttctccatatccttgccaacatttgttattgcctgtcttttggaaaaaagccattttaactgaagtgagatgatatctcattgtcactttgatttgcatttccctgatgatcagtgataataaacactttttcatatacctgtgtgatggttagtattgagtgtcaactttac

SEQ ID NO: 495369 - DNA, 514 bp, Homo sapiens
gataaagtttgtctattactttggtgaaaaaagtctactttctaacacatacttcaaagtttccttaaactttttttaagactaaacctgtgaatggtttcattcattggcagagatagtgtaaggcaatgggtggggtccatggacttggtcctaagcttaaatctttgctttctttgctgaaatacctcaagaaaatcacaatttcctttcttgcctgccccactcccctgcatttgacatgcttggtcaagatcatctctaaatactttttgggttctacattctgtgatatgacaatcttcacttaagtattgtgttgaccctgtcctgctggttttgccatttagatagagtgacatgacacctccaggagaaggtaaatggcatgtggcatcaggggctaattctagtgcagttcacaacagaggttgctcagatcataaagtgggttaaakagtggtagatataaagcttgtggtagagttagaactggtcagagccatatagaaga

SEQ ID NO: 495370 - DNA, 626 bp, Homo sapiens
aataattcaaaacattttcagggacaaaaaaaggaaatatttaacatttattataatacctgagttttccttccttcatgaaaagagtactgaaaatcattttaaaaaaatttagttctaaataaaatagattcaatagtttttaaagatcactgaaaattgctttggaattgaagaaaataacattgaatgatttayagcttttaggagagatgggatacaagtcaatgacctgaagaaatggaaagaatgaagactcaggaaataaaacagaatgaaaaagataagaatattccacagagaagttagataatataagtgtagctttgggggctcagattaggaaaaacggcattagcttttgttttttgcaaaaactctaaaaggagcttaaaaatggtttatttttccacagtgcaggagtgataagacacagttttcagtgttttaagtgtctgtgtgtatgcatatatgtgtgtgcatgtgtatgcatacatatgttggtatgtaaccacacgtgtacatgcaaggatgtgactatggagactctaggtgctttgatcctctgtatcatatatctctcaagttaagaaaagggtattccccatcctgctcattggaaggtg

SEQ ID NO: 495371 - DNA, 594 bp, Homo sapiens
ggaatggtgaaagtttgaaagctatatacatctttaaaaacagtagtcactcacagagacttagaaactaggtcagtgccagtgcgtgcatgtgtgtgtgtgtgtgtgtgtgtgtgtgtgtgtactcctgtgtacactgaaaaacaacattgggacgctcatccccattgcttgaataattttattgacctttgaatctttagctcaatgtaggaataaataaattaaatgaatgcctgaatttgtaaatggcgtttgaggaaataggttataagtgacaccagcataacacttatcaaggacacaccaaaaattaatttgaaagaaagaggaagaacattggcascaaatgaaagacaggggtggcatttatcatcatccatagaggtgaaaaggactgtacgactacaaaattaaatgcctgtttctaggagggtcactggtggtagcatgtggagggagtgtgtggatgctatataggattttttgaaattaaatacacttttcctcctcccagtgaaaataatttccactgaaatttgacaaatgtaaacaccatgtgcagttttcaaagaagggaataataaggcagcc

SEQ ID NO: 495372 - DNA, 551 bp, Homo sapiens
gccttcccatgcagatttcccaaggggagaaagtggccttgtcaagcagattcaaatattccagtttttaaggcaattacatttctcattgtaaattgaattgacatttagtcccaagattctgtttaacattagtctgcctctaagagatagatctgctcactgagctgacaagatcagattttctaatgtctcaggcttctctgatcagagcctcccaccaaaagctygtatttggagaggctctcagtagccagccatatgggtttttttccataaaaacacttatgtttatgccagttaaatcaatctttccttcatgatttttctgtttctactcatagaaactatattctattccctctgaagacttatgaaatattaaattcagtttcttctatgatttgatattttaagcatttgccaatttaatctcactgggtaatgcagttcatgtatcaagagaagcttaccattcatttatttactcattcatgccataactcttcctcaagtgactactgagtgacaacttgcatcttgtcagatgc

SEQ ID NO: 495373 - DNA, 605 bp, Homo sapiens
ttttggtgcctttaaaggtatgtttgagacaacttcaaatttccatacattctggattaaactttcraagcagaatatcctgaaattgccacaaaagcactgaaaagcctgcttccatttccaacatgctatcttagtgaagcagggttttctacagtgatagcaaccaaagtgagattatggagtagactgtacataagcaacacacttcaggtgtcactgtctcccatcagccccagatgggaccgtctagttgcaggaaaccaagctgagagctcccactgattccacatagtgagtggaataatctacatcataataagttgtataatcatttcattatatattacagtataataataatagaaataatgtgcacaataaatgtcatgtgcttgaaccatccccaaaccttctcccatccctggtctgtggaaaaattgtcttccacaaaactggtccctggtgccaaaaaggttgggaaccactgtcttaaagaaacaatgctaaatacagacttgtcagatctctacataatataagcatcagaataattcatccagactagtggtattttaggatacttttcttttttttatactgag

SEQ ID NO: 495374 - DNA, 605 bp, Homo sapiens
ttttggtgcctttaaaggtatgtttgagacaacttcaaatttccatacattctggattaaactttcaaagcagaatatcctgaaattgccacaaaagcactgaaaagcctgcttccatttccaacatgctatcttagtgaagcagggttttctacagtgatagcaaccaaagtgagattatggagtagactgtacataagcaacacacttcaggtgtcactgtctcccatcagccccagatgggaccgtctagttgcaggaaaccaagctgagagctcccactgattccacatagtgagtggaataatctacatcataataagttgtataatcatttcattatatattacagtataataataatagaaataatgtgcacaataaatgtcatgtgcttgaaccatccccaaaccttctcccatccctggtctgtggaaaaattgtcttccacaaaactggtccctggtgccaaaaaggttgggaaccactgtcttaaagaaacaatgctaaatacagacttgtcagatctctrcataatataagcatcagaataattcatccagactagtggtattttaggatacttttcttttttttatactgag

SEQ ID NO: 495375 - DNA, 605 bp, Homo sapiens
ttttggtgcctttaaaggtatgtttgagacaacttcaaatttccatacattctggattaaactttcaaagcagaatatcctgaaattgccacaaaagcactgaaaagcctgcttccatttccaacatgctatcttagtgaagcagggttttctacagtgatagcaaccaaagtgagattatggagtagactgtacataagcaacacacttcaggtgtcactgtctcccatcagccccagatgggaccgtctagttgcaggaaaccaagctgagagctcccactgattccacatagtgagtggaataatctacatcataataagttgtataatcatttcattatatattacagtataataataatagaaataatgtgcacaataaatgtcatgtgcttgaaccatccccaaaccttctcccatccctggtctgtggaaaaattgtcttccacaaaactggtccctggtgccaaaaaggttgggaaccactgtcttaaagaaacaatgctaaatacagacttgtcagatctctacataatataagcatcaraataattcatccagactagtggtattttaggatacttttcttttttttatactgag

SEQ ID NO: 495376 - DNA, 542 bp, Homo sapiens
ctctcccctcgtgagggccgctcccaccgaccagtcgaactttcgtaaatggagctgtaaagttaaaaaaaaaaaaaaaaaaaaaaaaaaggcaagcaaggactaattatgtacatactgctttacagsactttttttttaaacacaaaaaaatgtttagcacattttccaaataacttcaactattggaataaatattaaactttctagcaccacctattggtaaagagtttaactgcaaatattgcagctttaacagctgttaagagcaaaatccaatctgtcttacatgtaagttatatatacgaggacacgtcacagattatattccaacgagtttgaattttgacagatacaagtttattgtcacttagattttttcataccattgaaaaattataactaaatggttcattattttcttgacatacaaacatacaaacttatcaacatacaatgcagagattttcaatactataggagggcgaggagcagatattttagaatatcataaacacaaaaataggtgatcaaacttcata

SEQ ID NO: 495377 - DNA, 602 bp, Homo sapiens
tcccatgtgtgaatagaagctcaataaatatttaatcaaaagaaatgctaaataggagtggtgagagagggcatccttgtctttcaccagttttcaragggaatgcttacagcttttgcccattcaatgtgatattggctgtgggtttgtcataaatagcccttattattttgagttatgttccatcaatatgtagtttattgagagttttaacatgtagaaatgttgaattttatcaaaggccttttctacatctgttgagaaaatcatgtggtttttgtctttggttctgtttatgtgatggattacgtttattgatttgcttatgttgaaccagccttgcatcccagggatgacgctgacttgatcgtggtggatacatttttggatgtgctgctggatttgttttgccagtattttattgaagattttcacatcgatgttcatcagggatattggcctgaagttgtccttttttgttgtgtctctgccaggttttggtatcaggatgatgctgcttcataaaataagttagggaggagaccctccttttcatttgcttgggatagtttcagaaggaatggtaccaactcctctttgta

SEQ ID NO: 495378 - DNA, 602 bp, Homo sapiens
tcccatgtgtgaatagaagctcaataaatatttaatcaaaagaaatgctaaataggagtggtgagagagggcatccttgtctttcaccagttttcagagggaatgcttacagcttttgcccattcaatgtgatattggctgtgggtttgtcataaatagcccttattattttgagttatgttccatcaatatgtagtttattgagagttttaacatgtagaaatgttgaattttatcaaaggccttttctacatctgttgagaaaatcatgtggtttttgtctttggttctgtttatgtgatggattacgtttattgatttgcttatgttgaaccagccttgcatcccagggatgacgctgacttgatcgtggtggatacatttttggatgtgctgctggatttgktttgccagtattttattgaagattttcacatcgatgttcatcagggatattggcctgaagttgtccttttttgttgtgtctctgccaggttttggtatcaggatgatgctgcttcataaaataagttagggaggagaccctccttttcatttgcttgggatagtttcagaaggaatggtaccaactcctctttgta

SEQ ID NO: 495379 - DNA, 622 bp, Homo sapiens
tctaaatggagccgacccccatcttcaaagtcctcttcagtcttatctgtagcttcccacctctctcttgctttartcacatgccaagagagctggctgaatcatcagtccagactgccaatcagaaatatgaatcaagtcactcctgactgctctgctaggtctaagggatgcaatgagcgagaaagacaacataccctgtgtccctgtagagcttatattaaagcagtgaaacaaatgttaaataaattatttttaaaatctgtaggtagttagttaaattagaagaggaaatctcggtgaggataaattgcaggctacagtggggtaaatgagagggccaaacccattccttggccattaatttgtctttcattttcagctcaaatgtcacctcctccaagaagccttccctgaccatcaagcaaagcagtcactctctaatccatgtcccactttatttccttcattctacttttcaccacctaaaataaccttgttcatgtaatgtttgtttattacctacctctttctttgagaatataaactcaaagagctaaaccttaatatattatttactgctgtatcctcaacacctagaagagtgcctggcatttaatag

SEQ ID NO: 495380 - DNA, 622 bp, Homo sapiens
tctaaatggagccgacccccatcttcaaagtcctcttcagtcttatctgtagcttcccacctctctcttgctttagtmacatgccaagagagctggctgaatcatcagtccagactgccaatcagaaatatgaatcaagtcactcctgactgctctgctaggtctaagggatgcaatgagcgagaaagacaacataccctgtgtccctgtagagcttatattaaagcagtgaaacaaatgttaaataaattatttttaaaatctgtaggtagttagttaaattagaagaggaaatctcggtgaggataaattgcaggctacagtggggtaaatgagagggccaaacccattccttggccattaatttgtctttcattttcagctcaaatgtcacctcctccaagaagccttccctgaccatcaagcaaagcagtcactctctaatccatgtcccactttatttccttcattctacttttcaccacctaaaataaccttgttcatgtaatgtttgtttattacctacctctttctttgagaatataaactcaaagagctaaaccttaatatattatttactgctgtatcctcaacacctagaagagtgcctggcatttaatag

SEQ ID NO: 495381 - DNA, 622 bp, Homo sapiens
tctaaatggagccgacccccatcttcaaagtcctcttcagtcttatctgtagcttcccacctctctcttgctttagtcacatgccaagagagctggctgaatcatcagtccagactgccaatcagaaatatgaatcaagtcactcctgactgctctgctaggtctaagggatgcaatgagcgagaaagacaacataccctgtgtccctgtagagcttatattaaagcagtgaaacaaatgttaaataaattatttttaaaatctgtaggtagttagttaaattagaagaggaaatctcggtgaggataaattgcaggctacagtggggtaaatgagagggccaaacccattccttggccattaatttgtctttmattttcagctcaaatgtcacctcctccaagaagccttccctgaccatcaagcaaagcagtcactctctaatccatgtcccactttatttccttcattctacttttcaccacctaaaataaccttgttcatgtaatgtttgtttattacctacctctttctttgagaatataaactcaaagagctaaaccttaatatattatttactgctgtatcctcaacacctagaagagtgcctggcatttaatag

SEQ ID NO: 495382 - DNA, 562 bp, Homo sapiens
tgttaaatgcagtagagtttccagaattttaggcacagagtatggagagaagaatcaaaaggctcagagaagtaagcatgcaaaactgggtatgaccagaatccatcatcatctgcctttgctcctttagagggccgaaggaacaacttgttttttcagggttctggtgttagtgacagcagcattgttgaaaagttcatttgtgtctatcctctgcaaatcaggactgacaatgggcaatgctgttataaaactggcctttctgccagcartgtgggtgatgatggtccagagtggcagaagccaggtggcatcactcaatcaccaggaagaagatgggcacaactaccttactggcatccaggttgaaattgctgccacatggccttaaaccatggggatttatagatatggctaatagataatggtattttaaagagcaaaatagattggcaaccaacaaaggtattccttaatgtagataatcaaaaggaatcaaggatggaaaaaagaatgctgaggtcagctgccccagaggaaattcatgatcctttgcctattt

SEQ ID NO: 495383 - DNA, 562 bp, Homo sapiens
tgttaaatgcagtagagtttccagaattttaggcacagagtatggagagaagaatcaaaaggctcagagaagtaagcatgcaaaactgggtatgaccagaatccatcatcatctgcctttgctcctttagagggccgaaggaacaacttgttttttcagggttctggtgttagtgacagcagcattgttgaaaagttcatttgtgtctatcctctgcaaatcaggactgacaatgggcaatgctgttataaaactggcctttctgccagcaatgtgggtgatgatggtccagagtggcagaagccaggtggcatcactcaaycaccaggaagaagatgggcacaactaccttactggcatccaggttgaaattgctgccacatggccttaaaccatggggatttatagatatggctaatagataatggtattttaaagagcaaaatagattggcaaccaacaaaggtattccttaatgtagataatcaaaaggaatcaaggatggaaaaaagaatgctgaggtcagctgccccagaggaaattcatgatcctttgcctattt

SEQ ID NO: 495384 - DNA, 522 bp, Homo sapiens
agttctctgattttcaaagccttctattgcttactttcactctactagagcaacctttttttttttttttttttttttgctgtattaaggaggttgacaaataacattggcaatggtatttgccatcttcatttccatcttaggttcttcttccttagccatttctgtgccatatgactcctggtcatagctgattggatcaggatgaccatctggcccaagggcaaccaatttctaggctggccagtgatgtgtaacctgctctggtacaaaaagstttacccaagcaggattgaaggtaataacctggaccaatcagattgtctttcttaggactttgaatagggaaataaagagtgaattagacaaagggaaaggtgccagaggagaagtgaacccaaagagaagcaggatctgggagagaggctggtggcattagaagagaagactggagtgaagttgttcttcggtagcagcctagtgtaccctttatttagtcaactttatttgaccttagagggc

SEQ ID NO: 495385 - DNA, 522 bp, Homo sapiens
agttctctgattttcaaagccttctattgcttactttcactctactagagcaacctttttttttttttttttttttttgctgtattaaggaggttgacaaataacattggcaatggtatttgccatcttcatttccatcttaggttcttcttccttagccatttctgtgccatatgactcctggtcatagctgattggatcaggatgaccatctggcccaagggcaaccaatttctaggctggccagtgatgtgtaacctgctctggtacaaaaagctttacccaagcaggattgaaggtaataacctggaccaatcagattgtctttcttaggactttgaatagggaaataaagagtgaattagacaaagggaaaggtgccagaggagaagtgaacccaaagagaagcaggatctgrgagagaggctggtggcattagaagagaagactggagtgaagttgttcttcggtagcagcctagtgtaccctttatttagtcaactttatttgaccttagagggc

SEQ ID NO: 495386 - DNA, 522 bp, Homo sapiens
agttctctgattttcaaagccttctattgcttactttcactctactagagcaacctttttttttttttttttttttttgctgtattaaggaggttgacaaataacattggcaatggtatttgccatcttcatttccatcttaggttcttcttccttagccatttctgtgccatatgactcctggtcatagctgattggatcaggatgaccatctggcccaagggcaaccaatttctaggctggccagtgatgtgtaacctgctctggtacaaaaagctttacccaagcaggattgaaggtaataacctggaccaatcagattgtctttcttaggactttgaatagggaaataaagagtgaattagacaaagggaaaggtgccagaggagaagtgaacccaaagagaagcaggatctgggagagaggctggtggyattagaagagaagactggagtgaagttgttcttcggtagcagcctagtgtaccctttatttagtcaactttatttgaccttagagggc

SEQ ID NO: 495387 - DNA, 545 bp, Homo sapiens
ccaacagtgtggcatgggtcaaggttcactaggaaaaataacattgatataaactactattgaagacccaagctgaggccatatgtgatttctaatcctcacggcatctctgtgaaagagaaattatgacccatttccaggtgagaaagctggtttatggaaggtaagatagtttgtccaaagatgcccaggcaggaaggggcagtgccaggcttgtccttactcttccaaattctgggcactccttgtcctcttctgaaagttttaaggtcattccaagtgttaaatgaaattatgcatttaaatcacttggctagcctatctcaacaaatagtagccactattataattaacatgcttgcttaagttcagacagccttgtttaactcgtagagatggaatytgatctgaggtctgcagactccaaggctcttattctttctattataacagacagtattgtttcattattactaataccattataaatgtcatcatcatcattatcatttttgccattggaaagtcatttgaacttatggagt

SEQ ID NO: 495388 - DNA, 576 bp, Homo sapiens
ctgtgatatggagcccagagttctacccacagaaccctctcaaagcagggcagcttgacttcccagtaactccatatagcaatagctgaaaggatattttatttaagcctttcctaaagtggcccagagaggtgaagcaacttacccaaagtcacacagctcctaattgtcaaagggtggactagggtctaggactgtcccttaatccagtgctcctggaacttccctgggtttccacccacgagactccccacagggaagcctgaccatctccccagctctgcattccctcaggtgcccccttcacactcgcatgatgctttgtcacaggcctttgccatgctgcctgccaccgtttattttgtgacatctgtttactgccctccccactgccccagagagtgggctccacaaaggcagaggctgcccctggggtctgacacmgtgcctggcagtgtgcagaggccacacccctgtgctggatggtgagtgatgctgaacgctccctccaggactgtaagctgctccctgtggacactcgctggctgtggggcgaggccagccaggactactctg

SEQ ID NO: 495389 - DNA, 655 bp, Homo sapiens
tgtgtccctggcagagtcactgaacctctctgggcctctgtttcctcctctgacaatgatgtgactcccggcccactccaagaggactggaagcctcatcctccattgcccgctctccttacctctcgcaggccagcacttcagggaaggcgttcacccggaggaaggtgcggctgagaaacctgtcatcgctggtggccgagtggacgctggatgaggagctgcagtcgtccttctcaccctggctcaggctccccagactgctggaaggagaggcctctaccggctggtgtggcaaaacagcctgctttaagttttcatgcagagacgggttggaggagccatcggccagaggctggggtggcagtaggagtcacactcagtccatgtgatgcctctgggatttgatctagtattcataattctaccagtgattcamgctagccgctcacaggaaggtctgcctggaggagactggccagggtgccagcagacaccacagagtttccgtcccaggttctgccacatcgacagcccagaggcccgaatcacagttcacttgtcctcacaaggccagcccctctgcaccaggttccttcccctaaactgccaacctggatctgtgccccggacacccagcgcaccctcctcccag

SEQ ID NO: 495390 - DNA, 515 bp, Homo sapiens
cgcaggccagcacttcagggaaggcgttcacccggaggaaggtgcggctgagaaacctgtcatcgctggtggccgagtggacgctggatgaggagctgcagtcgtccttctcaccctggctcaggctccccagactgctggaaggagaggcctctaccggctggtgtggcaaaacagcctgctttaagttttcatgcagagacgggttggaggagccatcggccagaggctggggtggcagtaggagtcacactcagtccatgtgatgcctctgggatttgatctagtattcataattctaccagtgattcacgctagccgctcacaggaaggtctgcctggaggagactggccagggtgccagcagacaccacagagtttccgtcccaggttctgccacatygacagcccagaggcccgaatcacagttcacttgtcctcacaaggccagcccctctgcaccaggttccttcccctaaactgccaacctggatctgtgccccggacacccagcg

SEQ ID NO: 495391 - DNA, 632 bp, Homo sapiens
ttactaggaaaaataaaagtggatgtgcttcttgagtgttgggtaggggagatagaaggtagaggagagtttattggagataacaaaccatacttttttttacaactaataattttacaagtatttatttactttctactatgtatcagccactggtctaggcactgaggacacagcaatgaagaggaaaagaatccatgccttcatgggagtaatactctagtcagcagatatattagtcagggtcctctagaaggacagaactaatagaatatatatatacatatatatatatgtatgtgtrtatatatatatatgtatatatatatgtatgtatatatatatgtgtatatatatatgtatgtatatatatgggtatatatatatccatatatattttatatatggggagtttattaaggagtgttaaactcacatgatcacaagtttacacaataggccatctgcaagctgaggagcaaggaagctagtcttagtaccaaagctgaagaacttgaagtcctatgtttgagggcaggaagcatccagcctgggaggaagatgtaggctgggaggctaagctagtctagccttttcatgtttttctgcctgttttatatcctggccacacc

SEQ ID NO: 495392 - DNA, 632 bp, Homo sapiens
ttactaggaaaaataaaagtggatgtgcttcttgagtgttgggtaggggagatagaaggtagaggagagtttattggagataacaaaccatacttttttttacaactaataattttacaagtatttatttactttctactatgtatcagccactggtctaggcactgaggacacagcaatgaagaggaaaagaatccatgccttcatgggagtaatactctagtcagcagatatattagtcagggtcctctagaaggacagaactaatagaatatatatatacatatatatatatgtatgtgtatatatatatatatgtatatatatatgtatgtatatatatatgtgtatatatatatgtatgtatatatatgggtatatatatatccatatatattttatatakggggagtttattaaggagtgttaaactcacatgatcacaagtttacacaataggccatctgcaagctgaggagcaaggaagctagtcttagtaccaaagctgaagaacttgaagtcctatgtttgagggcaggaagcatccagcctgggaggaagatgtaggctgggaggctaagctagtctagccttttcatgtttttctgcctgttttatatcctggccacacc

SEQ ID NO: 495393 - DNA, 635 bp, Homo sapiens
caaccctgtaactttgtgaaaaattgaaaataatgttacgtctacagaaaagcaaattagttgtgtccaatctaatacttattgccctgtgaacatgtttgtacctatgtacatgttcatgtcaatatttcttttctgccaacatacgtgtgatattttaattttcctttggccagttgtaatatataatagcatatggattgcctccataatgagttaaataatatattttacagtgtttattgtacgttgttattactcttttttttagcattttgccatttttatctktagcagtattcaagcatttgtctttacaaaagtcagatcagttactataataaacattatttggtttctccttcatttaaaaaaaaattgaaggttcagaaaagtactaatcacatgatgacatgtcacatatatgttgatttgctttgtgaatgtaatagtttacacacacataaatacttcatatttcaggtatggcttatatgacttacatacattctacaaaatactttaaaagcaattgtgtctgatggacctcaggcaagacacagttattattagacacttactttatctaaaaaatctaaaaaatcaaatctaaaaatattttagatatttttgct

SEQ ID NO: 495394 - DNA, 635 bp, Homo sapiens
caaccctgtaactttgtgaaaaattgaaaataatgttacgtctacagaaaagcaaattagttgtgtccaatctaatacttattgccctgtgaacatgtttgtacctatgtacatgttcatgtcaatatttcttttctgccaacatacgtgtgatattttaattttcctttggccagttgtaatatataatagcatatggattgcctccataatgagttaaataatatattttacagtgtttattgtacgttgttattactcttttttttagcattttgccatttttatctgtagcagtattcaagcatttgtctttacaaaagtcagatcagttactataataaacattatttggtttctccttcatttaaaaaaaaattgaaggttcagaaaagtactaatcacatgatgacatgtcacatatatgtygatttgctttgtgaatgtaatagtttacacacacataaatacttcatatttcaggtatggcttatatgacttacatacattctacaaaatactttaaaagcaattgtgtctgatggacctcaggcaagacacagttattattagacacttactttatctaaaaaatctaaaaaatcaaatctaaaaatattttagatatttttgct

SEQ ID NO: 495395 - DNA, 632 bp, Homo sapiens
tgctttgaactggcttgactttgtgattccacttcctcccttcactccctgctggatcgactcatgaagttttggatcctgataagtcaattaaatgcttccaaccccaaacctgaatcacatcccggaaaacatccatggatgtgggttctggtgttccaaatttgactctcactttagccactcattttgtgtgtcttcactagagattttaatttctcagaaataggatttcctcaactgcagacgagatgaatggtgccatgaaggactaaatggggaatgtgagttgagctatgacgatctgcaaggtcccttggcagatgtcatgataaagatcaccaaggaatgcagcacgtggaatggccaacattttagatcctaatgacagaaccgtgagaatataatctttcgaataattccagacgaaagccatatgaatgttggtttacagtctttgatgcttgaattcacagaattactatgctaagtcttcctatcactttgtattatgtagttctggtgtcaactactcaaagagagtattgtttagtcataaatctctcatgtcttagccttycctctgcctagataagacagaacacttctcctgggggaggacaagaaggtat

SEQ ID NO: 495396 - DNA, 619 bp, Homo sapiens
aaactactttccatttcttcttcccattagaggaaaataattgatcttttggtcataccttacaaagatgttgtgaagatgaatgtagaatatctgaaggagcatcagagggaaatgccaaagtgtacataattagttttacaatctataattaagtatatggatagagatgaggtatccatgtgtgaattatacatttaaaaactaggcttgcttttttttttcctttctaacagtagtgaagagcccaattacacctggtgttatattagtagagacgaagacccagaaaacttcaytgtataagaagttcttaatgcatcaggagaatatgataccaaaactgttagtgaaatgattaaaggtaggacagacagtacaccactaaaggcaaaaggtgataggttgttcttgattcacaaagaaaagaaatcaagtcaaaggtagttagatatgaaagattcagggtcttaacccagttctggatgtgggcatattacagtacagtagtaaccagtccactaaatactaaaacacactgagaaaccatctcttcaagccatcctctaagtccacatacctcagccaaaggagatgtctgggagacagaatgtgagca

SEQ ID NO: 495397 - DNA, 586 bp, Homo sapiens
tatgctcacttaaaggctagtttttgtctgaaactttcatcccactacagaaaccagatggaatatctcacaatcaaataacagatgaagctgaaaaacaataaaagcatgtaacacataattctactttattcttgtaggagccactttaactcaaggctctgagaacttatttatggaacccaaatattagtaactcgtaattttctaaaagaatagaaatttaaaagcatacmtttctaggattagaattggatggggaaggacaaaagttaattgaaatttagcaaacttcaaagaaaaagaaagaatatccatttgttaaattaatttacaaatgggaagtatagctttctgtaaaaatcatatcattttccaaattttctaagtgttcaactatattcatcaaatcattctttcattaaacaaatgatggcagaagtttctggttatcgtccataatctattcccgcttcttctggtcaagagtctaggaaaatcctgctctcgtcacaggtggcagggctaaaaagctctatttctttgtctctgtaggtgtaggtatggtcatctaagtaagttctgg

SEQ ID NO: 495398 - DNA, 392 bp, Homo sapiens
tcatgttcccatctgtacacaaggagcaatatgctgtatgccacacacgggggatgggaataataacaaccataaacaacaccacttactatttcacatgtgctatgtaagtacgaactatcccctctgcacacaggagactgtaataaagtgacttgccccaggtcatatagctagaagtgaggacggggagatttggatccaggttaggtggatcaggaagccaggggtcccaaccactccactctactgcccccttgagtcaaaaacatgcctaggtgcctggctctaggccaggccagagaaagggagtatatgctgaactcccccatgggaaaccgaggtcttgtctacaaactcctgtrggcccttcaagttcagagccctcaatg

SEQ ID NO: 495399 - DNA, 524 bp, Homo sapiens
gccccgtagtgttgaacaggaaaaaaaagccccactagaagttttcctccagccctgactttccaagagttcggcacagcccacgcttatttccatctggacgagatagatgggtggttttcagacatttcagcggctgaattctttgtgcaaaatcaatgtttcctgaaagccctgtgtgtccaacagccaggagcagagctggtgtactggctgcacgctcagaagaagctgcagcgcttcctgcccccagacccamcctgtgccctcctagagagaagttccagagctgccccacagagctgctcaaggccctcaaggtcctcccaggacctaaggcccttccctgccctcacccttgtgggtcccacaaccaggcacgccaggccaccctcacccccttcagtacatccatcaacatccagtggaaatgaatgggcctcctgctccaagccaagcagcactcagcctgtgctccacccagcctggccctgaccccggtggcctggtgtttcctaagtaca

SEQ ID NO: 495400 - DNA, 418 bp, Homo sapiens
ggagctagatgggatggcatcactcccctcactgaaacccttcagtgcctctcattgcctgtaggatgaaatacaagctccaggccgggccaggtggctcacgcctgtaatctcagcactttgggaggccgaggcgggcggatcacctgaggtcaagagttcaagaccagcctggccaacgtggagaaccccgtctmtactaaaaatacaaaaattagccgggcgtggtggcatgcgcctgtaatcccagctacttgggaggctgaggcaggagaatcacttgaacccaagaggcagaggttgcagtgagctgagatcgtgtcattgcactccagcctgagcaacaagagcaaaacttcgtctcaaaaaaaaataaaagaaaatacaagctccagaaccccggcctgcgggcctcagc

SEQ ID NO: 495401 - DNA, 442 bp, Homo sapiens
ggcactgggccagtttcctatgagtgcagacagaccccaggtggtgcatgcacccccctccctttcctggccagtgttgggggtgggcacagtagggcccaggtggcttgaggtgggtggttcctggcacagctctgacctcacttctgtgaggctctgctgtatctggggccctgccccctccctcattgtccctggcaggtttctgtttttctggagcacttcgtggaggtggcagtgtgctcatgctcgtggccttgggtgcagttctgggagtgggagttgctgagctcacccgaagcccttggctggcactgtgagaacttgtgtgaacacacttgcctgcctccaaacaggtggtgcacagacctgggttacccaggcacctgtgggggatgcccsgtgtgggcagagacgtgagtgcgtgtgtgtgctcaggttt

SEQ ID NO: 495402 - DNA, 599 bp, Homo sapiens
tgaatatattttagaaagagaggaaggatgtctgcagaactttgttctgttttctgccacaaaaatgtgaatagttcagagtgaaaaccttttgtgatggttgatgtctcaggaataagctggatctccaatgttttggggatgctttgagtctcaaaaaaaattgataatcagaaaagtaatttttgtttgtttgtttaatgtatccctgttctgtttttaattaaactccaagtctcattttacatattcttggaaaaacctaagttgckctgtaatttacataagaagcatgctcaggacctctttgtaccccggggagcctgattctttgggaatgaagcttttcattcttcatacactggccttggcatcctgtggaatttgacccaactagcagctagtcagtctgtcagtgagcagaagagtgaactcttcttgatctttattgctatgtgtgaaaacttggcttcctcactgaacggtgaggaatggatttaaagcatgagctttagtagtatcaagatgccattttcctttttcttgctgtcttggggagcttctgcatgtgaccccctaatcagaaggcatgtttttag

SEQ ID NO: 495403 - DNA, 266 bp, Homo sapiens
acatttattgagcacctaatgcaccagacattctgctaataattgcattgattttatcctcatccccacttcagagacgatgagaaaacagaagctcagataatttgcccaaagccacaaatttacaagtggaaacagccagtatgtgaagggtcagtctgcttgtcacccaaacccgttgcttccccatagaagaggagtgaaaatgtgccttgtactaagacttttaaaaaaactctcaaawaacgtcttgcctttcccagggt

SEQ ID NO: 495404 - DNA, 452 bp, Homo sapiens
gtaggtagggggctgagggcttggaggttcctcagggtcaggccacagactgcatccaaaccacagtgcccagcctcaccagcccaccaccagccccccagagggcctgccaagtccctactcagaatagcragtcctgcagccctggctgtctgctggctatggggctagaaaagtcccaaccacaagaaagattcagtcagatctgccccaccgtgggcctgggaggggaacaaggactgaatgttgaaggagagaaggccacagagcagccctgggtacacccaagagaaggcatcctgctctctccccagccccaggcagaacgaaagaatcagtcgagccagctctcagttgagcccatttgagcctctcaaactgcagcagaagattcctgagaaatctggaagctcagagcagaagcccaaaatcccctgagaaaagattcatgg

SEQ ID NO: 495405 - DNA, 654 bp, Homo sapiens
ctgcctgtccctgccccatcctggaggccccagggtcaggaaaggctaaggcagctatgctgcatctgtgcctgccttatgtgagcaactcacttccaaaaaaatgttatttttatggttgagttggaaactcactccaaccttgacgtgtgtgtggtggttttggtccctcctttctaactgataaaccataccaaaggctgttcactgcgatgtggtacggcacgcgtctgaacctgacctatgcctggtcacgtgacacatgccatgaaaagtcaatccgtcacaaaggaaatcttaagctctacaatgttaaacagactaaatttatgtgagtgctttcaatggctctaagacctctaggagctttgtttaaggcaaatggaatgaataagcgcttctgttagtcacataacacacgacaaaacaaacatcaggaagggagaatgattaaaaaacaaaactgatcagattacagacaatcgcctgagtgctgggtgaccactataaayccctcttccccaaggaaccccctcccaattcagttgtccaatttgatgctgaatattgcttaaaagaactccatcactcaaagagtgttgaagcagatattttaaaaagcaaagcaacccaataatcaccctcattatgatc

SEQ ID NO: 495406 - DNA, 511 bp, Homo sapiens
atcaacaaggcagctacttggccattgctgatttgagctgcacttccatagtttacagtgttgtgggaagtagctgcctagccagggaaaacatttcctagcatcccttgcatccaggtgagtcctgcccaaagttcttcctaaagaaaattggacagaaaataacccgtgccagttctaggcctgaatgaaaatgccttatgcagttccccatggtctctcttcccttgtctgctggccaagttagatgcccaggtgatggtagttccttaatgacagtcaccaatcattgactggactgtatgwtgcaaagaaatttcaaatgtaccaggctactgaggatatgggatttatttgttacagcacctgacgctacctaatacagggtactgcctgccacatacagtggctaactgaattacatgaatacaaatgcctgagcaaatgtggatcgcttggtgcatatccacagggaagccaatctcaaaggaggacttgaaatcaccttcag

SEQ ID NO: 495407 - DNA, 573 bp, Homo sapiens
tggcagtagtccagacagacagggggagtgcccagaaggccatcacacagctctcttctgctctaaccctgacccagtagcgagagacacaggaggctttgccccaatcacccagcagcccccacaccagaggaagcctccactgcctgagacctgtgacatggcccagactccgaccctggccctgccctcctaattcctcacctggctgcctcccagacatgtgagaagttactcaagggcagtggccatgtctcatctgactttacsaattctaaatagcaatgacaatcacagtaaacacatgcgaagcaggtcccgtgtgcaggtgctcctctaagctctcaacacatataaacacagtcatcacaaccctgcaaaacaggtgctctcataatcccattttacacatgagggaactgacgcacaaagagattaagaagtagaaatgactaacatttacttagcactcattctgggcctgacataattctaacctcttcacttgtgtgaaatcatctaatcctcactgcaaccctatcacagtccatatcttacaggtggggaaacagg

SEQ ID NO: 495408 - DNA, 573 bp, Homo sapiens
tggcagtagtccagacagacagggggagtgcccagaaggccatcacacagctctcttctgctctaaccctgacccagtagcgagagacacaggaggctttgccccaatcacccagcagcccccacaccagaggaagcctccactgcctgagacctgtgacatggcccagactccgaccctggccctgccctcctaattcctcacctggctgcctcccagacatgtgagaagttactcaagggcagtggccatgtctcatctgactttaccaattctaaatagcaatgacaatcacagtaaacacatgcgaagcaggtcccstgtgcaggtgctcctctaagctctcaacacatataaacacagtcatcacaaccctgcaaaacaggtgctctcataatcccattttacacatgagggaactgacgcacaaagagattaagaagtagaaatgactaacatttacttagcactcattctgggcctgacataattctaacctcttcacttgtgtgaaatcatctaatcctcactgcaaccctatcacagtccatatcttacaggtggggaaacagg

SEQ ID NO: 495409 - DNA, 573 bp, Homo sapiens
tggcagtagtccagacagacagggggagtgcccagaaggccatcacacagctctcttctgctctaaccctgacccagtagcgagagacacaggaggctttgccccaatcacccagcagcccccacaccagaggaagcctccactgcctgagacctgtgacatggcccagactccgaccctggccctgccctcctaattcctcacctggctgcctcccagacatgtgagaagttactcaagggcagtggccatgtctcatctgactttaccaattctaaatagcaatgacaatcacagtaaacacatgcgaagcaggtcccgtgtgcaggtgctcctctaagctctcaacacatataaacacagtcatcacaaccctgcaaaacaggtgctctcataatcccattttacacatgagggaactgacgcacaaagagattaagaagtagaaatgactaacatttacttagcactcattctgggcctgacataattctaacctcttcacttgtgtgaaatcatctaatcctcactgcaaccctatyacagtccatatcttacaggtggggaaacagg

SEQ ID NO: 495410 - DNA, 486 bp, Homo sapiens
cacctgttgtaaaggatccctcagcaggaatgcctatcatcttttamttcccattaacctgccccgttcttgccactgtcctcacctgagcacccagggttgcctctgtgtgtgtgagatgaatcaaggatttttgttgtggccgacagagatgagggaattccaagacctagaaactgtctgaacataacatacaagaggaaaaaatgaagacattttactagcaacagtgttctccaactttatcctgacaactgtcctagatgcctggagctccctgacctcccagccccactggaacaccctttctgaaagcaatgtggagacagggtgtctctgccctgccagccagaccagaccagagagctggtaagtttaggagcctcaagatggatgtcataacaaaaaataatgtcacaaagtaaatttgtagtaattgtttataagtttctaatggaatttcccatgcagcactataaccagcag

SEQ ID NO: 495411 - DNA, 625 bp, Homo sapiens
acagactgtcagagctagaagggaagggagcaggcgtggggagccagcctctgatgtacscatacacagggcaggaactgtactaaggactttacaactatgctctcttctacttttctcaatgggaaaatatcatcacacccattttgcagatgagaacactgagacttaaaagggttccatcaatctcatcaggccacatagctaatgggtggccgctctgccatgccaacacaagccttactccaaggctcatgattttgatactgcatcatgcactgattataaaaagctggaatttagtatctcatatgggtcataaattgatggcctagagaagtgtttcatttggtgggcttcatttgggtgggcttctgcttctgtttcatgtctccttaattaaatgtacacacctttagaagagcaagtgctctcctttggccacaagctccaccactgactactgtattcacctggcttcacttatgcatgttcattacctctctggacccgagatgttgagtctgtgatctctgtgatccaggccaaatctgagtagttgaaattgagatacagagaaacaaggtagcctacgtatgtcatggaaaaggaacattaccaaggt

SEQ ID NO: 495412 - DNA, 628 bp, Homo sapiens
tccttccaatactggtcagarctctagcccacggccacatctcttatgacagacactcatggctgctaagcctgctagaaagggaaagtatctttattcccaattagttacttttttctggggccaactcagctccaaaagaactgagctggactccatttttgcactgtgcatagtaaaaatcccactacccaatttctaatattgatgatgatgccagaagcagaaaaacagctggaatatctgtttccaaaagcagctcgtagagctagcattttggaggggaaaagaacctctggaacgaaaggaccacagaacaaatgtaacgtggccatcactggaaataaactagaagagaacacccataaggttaagttgtggcctccaagatgacatgtgcactttggaaagccatcagtttctcatccatagaggagagagagcaagtgaatagtgtaaagcgggtatagatgtagggagtattaggaaccaccaagctgacctaaaggaagatgacaggaaacatactttccatcttgctagtaacactgacatctactgaaactctctgctccatttcctacaccaaaacctgcggaggcctgccgttttgtttcagcatttcctt

SEQ ID NO: 495413 - DNA, 511 bp, Homo sapiens
gactgctaagaccacccagaccactggctgtgtctttccaattgcaagtacaatgcgttgtatgaaatacagctaaggaagccagatgccctcacaataaggctgttgtacctggaaaggtgtgccatgcccagaatgcatgaccctgcagtctgtgagagctgcaaagatccaacayatcttaagcttgggccagaggtgtttcagatcttcccctcaccatcaccacaatcttagaaagccaaacaactttcctgagccccaaatacctgcagaatgggaagcatctcatggacttcaaaaggttgctgtgaagattggagaaatagcattcctggcacagaggtgatgtctaatgtgtaatagtctccatgttgtcccaggtaggtcctggcttaaataccaagccagagaatgtaagatcccagactccaagtaattcacgggctacaagatgggatttaggggtcaaatgtttttacccatttgttagatgagtaaggtaatgaca

SEQ ID NO: 495414 - DNA, 629 bp, Homo sapiens
aacggctgcccccagtcttgcagcacctcggcatcctctttgggtggacaccatcctgaccctagatggatgacttgaatagtggggcaaagtctggatttcagtctcctttttctattctggccagatgcccttccatacaacctacctaatcattcacagcagccctggtatcaaaaaggacctattgatgggcaccaggttcttgctatatcaagattttaaaaggagaatagaaaacagtatgcttacaagaayaagaattaaatctgtgtatatttgcctaggaaagaaaaactaacagaatatacaatgtgctggccattagtattgtttgtcaaatatttccaggcctttattcctataggtagtggcatgatgaagcttcctgctacttttgatcttggtgaggccagggagagatgtgcagaagcttgacagcagtctgctaatctctctttttcagctctgtgtggcaacactcaatgttctagatagtggctgcaccatgagccagtgtcgctgagtgagaataaggtatagagagtctcgggccaacactcagggtactcatagcacaagtgagaaataagcatttgcaattttaggccagttagacttgagagttt

SEQ ID NO: 495415 - DNA, 553 bp, Homo sapiens
cgggctgggagtcaggagtccctggccgcgtgtccttgggtgagtcattcagcctccagcatctctgtgtcctcctggacgtatctggggtaatgacccctgtctcgttgatctcccaacattttataaatataaaacaaaatagtggatgccaaagtgcttcagaaattagaggaaagaactctttggagtcccacttctccaccgttcttgcctgaggagcctgtctgtgggcatcagcagagactgggcaggaggtagaggtggggtccccawcacaagatgggcaccgactctctctgactgtctaccaggggctgggcattgccacgttcgttattctctcatgtcattctcccagatccggtgtcagatggtttttattgtctctatttaaccgatggggagctgtggcttggagatgtgaagcagcttgctcctggcacattctggagttcatcatgaacactgcaggcctctctgactctgtggtttagcttctttgcacaacacttggcatctcatattctcaaacagtagcaggccactttat

SEQ ID NO: 495416 - DNA, 627 bp, Homo sapiens
aagtgtctggtaagagcttactttctggctcatagaaggtgccttcttgccatggccttatgtagtggaaggggtgaggggcctctctcaggcttcttttataagggcactaatcccattcataatggtagagccaaattgttttccaaaggccctacctcctgacaccattaycttagagattaaaatgtcactatatgaattttggggagaccctagcgagagtgtcatgccaaagatgacaagcaaggctcatttctagggtagggagggacttagaaaggacagacagttagcttctgagtaatactgtctctttagttaaaaaatattacattgttccatcacaaacccagtttgggagctagaaataagaccagcttctttgggagggaggagaagatggtatgtcctgacacaagagtcacacaggtggctggcaacctcacaccccagggatgccaacaccaaggcctggaaaagccagaatatcttgcatcaaattgtgacaataatgcaaagtgaggtaaaatcagtggaaagcaccagagcttcactcacatcccggtcacagctccacgaaggaaaccagcgcatctactgggtctgcactctagctagtggcag

SEQ ID NO: 495417 - DNA, 567 bp, Homo sapiens
tcacaagtgaatatgaaattatgaattgtgacgagtgatattacagggaaaaatcagggtgctgaggtagaagaatgagaatggaggcaggaacagatctcattaaatctaatttagataaagggttggaggtcarggaagccgtctctagatggtgacatgtaagcagagacctgaagggtgagtagctagtgtgaactgggtgggaaggggcctgctgttggtggctaggggaggagcaaattggaagggccaggagcaagggctccctggtcaggcgatgatggggataatggggcatgcaggcttctgggagccttgccaatgtaaatgataacaagaagcctctctcacgtgagtggagggtgacatgatcagattttgcgtgaaaaacattacattggctgcttggtggagaatggacagggaatgagggttgagaggaagaggcaaggggcaagagttaggagtctctgcctgcggtccatgtgatgtgtggtgatagctggattagggtggtgtctgtgagaaggtgtgaagaaaggaattaagagacctgtccagagg

SEQ ID NO: 495418 - DNA, 567 bp, Homo sapiens
tcacaagtgaatatgaaattatgaattgtgacgagtgatattacagggaaaaatcagggtgctgaggtagaagaatgagaatggaggcaggaacagatctcattaaatctaatttagataaagggttggaggtcagggaagccgtctctagatggtgacatgtaagcagagacctgaagggtgagtagctagtgtgaactgggtgggaaggggcctgctgttggtggctaggggaggagcaaattggaagggccaggagcaagggctccctggtcaggcgatgatggggataatggggcatgcaggcttctgggagccttgccaatgtaaatgataacaagaagcctctctcacgtgagtggagggtgacatgatcagattttgcgtgaaaaacattacattggctgcttggtggagaawggacagggaatgagggttgagaggaagaggcaaggggcaagagttaggagtctctgcctgcggtccatgtgatgtgtggtgatagctggattagggtggtgtctgtgagaaggtgtgaagaaaggaattaagagacctgtccagagg

SEQ ID NO: 495419 - DNA, 567 bp, Homo sapiens
tcacaagtgaatatgaaattatgaattgtgacgagtgatattacagggaaaaatcagggtgctgaggtagaagaatgagaatggaggcaggaacagatctcattaaatctaatttagataaagggttggaggtcagggaagccgtctctagatggtgacatgtaagcagagacctgaagggtgagtagctagtgtgaactgggtgggaaggggcctgctgttggtggctaggggaggagcaaattggaagggccaggagcaagggctccctggtcaggcgatgatggggataatggggcatgcaggcttctgggagccttgccaatgtaaatgataacaagaagcctctctcacgtgagtggagggtgacatgatcagattttgcgtgaaaaacattacattggctgcttggtggagaatggacagggaawgagggttgagaggaagaggcaaggggcaagagttaggagtctctgcctgcggtccatgtgatgtgtggtgatagctggattagggtggtgtctgtgagaaggtgtgaagaaaggaattaagagacctgtccagagg

SEQ ID NO: 495420 - DNA, 606 bp, Homo sapiens
ttccaaccgatactctgtcagtagcacatgggggttcctgtgattccccccattctcctacgtttggtattgtcaggtatttcatttttgccaacccaaaacatataaaatattgaggtttcaatgtgcactttatggatcattaataatttgttatttattttgtcttacataaatgatctttttttcagttgtctattttgttctttttctaaaaacargttgtttgcttttttctcgtctatttttaggagtctggatactaatcctctgtcagtggcacgcattgtgaatattttctcccaatttgtggcttgccttttcactttgtttatagaatcttttaataaagggaagatttttgaaggcttttatgttttaacaagcataatgctacagcaagacacacattaaaaatgtttttcctcttggattttgaagcccttcttatctttcctagatggaagagctcagcttaaaaaagaactcattcaggtctttgagcaggagcttaagcgaaagtggacggtgggtggtgctaggtggaagcggggcagcaaaactgccttccgtggaggccacggatgcccggaatgtgcacagcag

SEQ ID NO: 495421 - DNA, 606 bp, Homo sapiens
ttccaaccgatactctgtcagtagcacatgggggttcctgtgattccccccattctcctacgtttggtattgtcaggtatttcatttttgccaacccaaaacatataaaatattgaggtttcaatgtgcactttatggatcattaataatttgttatttattttgtcttacataaatgatctttttttcagttgtctattttgttctttttctaaaaacaagttgtttgcttttttctcgtctatttttaggagtctggatactaatcctctgtcagtggcacgcattgtgaatattttctcccaatttgtggcttgccttttcactttgtttatagaatcttttaataaagggaagatttttgaaggcttttatgttttaacaagcataatgctacagcaagacacacattaaaaatgtttttcctcttggattttgaagcccttcttatctttcctagatggaagagctcagcttaaaaaagaactcattcaggtctttgagcaggagcttaagcgaaagtggacggtgggtggtgctaggtggaagcggggcagcaaaactgccttccgtggaggccacggatrcccggaatgtgcacagcag

SEQ ID NO: 495422 - DNA, 555 bp, Homo sapiens
aaggcagtaggacggccctcacggaacccctgagaggcccacattgtgcagagggaggggctaagtaaggaaggggaaggcacccacagccaagccgtggtttccaagcmgtggcctgtgaggctgtcattttatgatgagagtcagaaatgaaataaaattatagattcctgctttgaaatgtgggactggtgttccaggcctccagaataaaatcagttccctgtagaccagcatgtgggatccgggatcctgcctcacttcctggttgaacccccactaccccttactttcctgatgagccccaactccagcagtgaagcacttgcaggcccctgcaggtgatggcctgccctctgtccgtgcttggcacgtgctcttcactcaagggaaatgccaccctctcccccactagccaagctgtccccagtcccaccaaaccagattaagtcactttctctgtgtttccaaagccccttggggttaccctactgaatagatttgtagtttgtttatgtgagtctcccttttcgcctagccaggtgcagaactgca

SEQ ID NO: 495423 - DNA, 555 bp, Homo sapiens
aaggcagtaggacggccctcacggaacccctgagaggcccacattgtgcagagggaggggctaagtaaggaaggggaaggcacccacagccaagccgtggtttccaagccgtggcctgtgaggctgtcattttatgatgagagtcagaaatgaaataaaattatrgattcctgctttgaaatgtgggactggtgttccaggcctccagaataaaatcagttccctgtagaccagcatgtgggatccgggatcctgcctcacttcctggttgaacccccactaccccttactttcctgatgagccccaactccagcagtgaagcacttgcaggcccctgcaggtgatggcctgccctctgtccgtgcttggcacgtgctcttcactcaagggaaatgccaccctctcccccactagccaagctgtccccagtcccaccaaaccagattaagtcactttctctgtgtttccaaagccccttggggttaccctactgaatagatttgtagtttgtttatgtgagtctcccttttcgcctagccaggtgcagaactgca

SEQ ID NO: 495424 - DNA, 597 bp, Homo sapiens
gatgctgaggatgctctgcagggccatgagggtgcaggatggcccagggctctccttgatcagatgctgtacctttcgcaggatctcatgaggcacgtagtgcagctcgaacaccagggcctctagaagctggaagaagtgttcctgcactggggccggcttcaggggcatgatctctacaaactgcgagatgggctgcagggtccactccagcaggaagaagtttcgagcattccaggcccacatggtcctgatgactgacaagacttgtatgcagaggacagagtcactggctttgtggaaaacattctgtaggacctggaaggcctgaagattcttaacagtcacccctgaggaggaaaacawgaatgatcttacaagtcatttctcctgcctgtgtctacaaatagatgttttcattactaagagggcatgccatttgaagtttctgtgttctaactcctatgggcacatgtccatcagaagtccagaaaagccagccacctggggtatgaagaaggctagtgcagcatggtccaagatgcactcaaactgtggccactctgaactgacatgtgccatgaacatcaaatacac

SEQ ID NO: 495425 - DNA, 517 bp, Homo sapiens
taggatcccatctttgtgctgctgaggaggaccttagggaatttatggaacctctcagagctttcattcctgaacttaccactgggaatatgctctgtttataatagagcatgtggagcccttggaagctgtaaatgctttagaaataggagactgtttacaaattccatttggccttctagctctctctgccaaggtcaagatcatccyataggtgatatgtgtaccaagtcctaaaacttggagcattcccacttgtgcccatatacctgctcctgaccagtgtcacttgagacagaaggggcccagcccctctttccttggcttcatcatggagcttctcttccttggccattgtccccaggaggtcaggacagcctggctgggagctagggaaggaatgttagggtgctgggcatgggcattcatctcatgggaaccctcacacctgttgatgctgcctcttgccaatgcccttctcccttcccctctagtcactctcattgatacagctcag

SEQ ID NO: 495426 - DNA, 570 bp, Homo sapiens
gttaatatcctttaccaaccattattttgttatacgtggcaggaaaataagcagatgaggtcatctgcctagacygaggtgttgtgattatttacagccctaatttttgttcagtaattggtaggtacagttctaattcttgctaatgactacgatatattgctcaggcaaattagaggaatagaatgttctgttactttagcagtattggtaaaaagtgacacaataaaaatgagtactcgttgaattaaatgccttcaacaacatcataattcaccccaaagatgctaatactaaaaacacatcctgcccccatgaagtggacttcagtagaatggaatttctgtatttatttagcattggcttctatcactaattaccccttctttaatgtaattttggggcataacgtagtaagtggttcatgatcactaattaaatgcctactatctgtgagaaaacatattttaaattgttctcttgaaataaaaatgaaaatactcaaaagaaaattctttcttaaaggtctcagaaagaaagcaggattttttaaaagttaattcatgacaa

SEQ ID NO: 495427 - DNA, 567 bp, Homo sapiens
aatatcctttaccaaccattattttgttatacgtggcaggaaaataagcagatgaggtcatctgcctagactgaggtgttgtgattatttacagccctaatttttgttcagtaattggtaggtacagttctaattcttgctaatgactacgatatattgctcaggcaaattagaggaatagaatgttctgttactttagcagtattggtaaaaagtgacacaataaaaatgagtactcrttgaattaaatgccttcaacaacatcataattcaccccaaagatgctaatactaaaaacacatcctgcccccatgaagtggacttcagtagaatggaatttctgtatttatttagcattggcttctatcactaattaccccttctttaatgtaattttggggcataacgtagtaagtggttcatgatcactaattaaatgcctactatctgtgagaaaacatattttaaattgttctcttgaaataaaaatgaaaatactcaaaagaaaattctttcttaaaggtctcagaaagaaagcaggattttttaaaagttaattcatgacaa

SEQ ID NO: 495428 - DNA, 567 bp, Homo sapiens
aatatcctttaccaaccattattttgttatacgtggcaggaaaataagcagatgaggtcatctgcctagactgaggtgttgtgattatttacagccctaatttttgttcagtaattggtaggtacagttctaattcttgctaatgactacgatatattgctcaggcaaattagaggaatagaatgttctgttactttagcagtattggtaaaaagtgacacaataaaaatgagtactcgttgaattaaatgccttcaacaacatcataattcaccccaaagatgytaatactaaaaacacatcctgcccccatgaagtggacttcagtagaatggaatttctgtatttatttagcattggcttctatcactaattaccccttctttaatgtaattttggggcataacgtagtaagtggttcatgatcactaattaaatgcctactatctgtgagaaaacatattttaaattgttctcttgaaataaaaatgaaaatactcaaaagaaaattctttcttaaaggtctcagaaagaaagcaggattttttaaaagttaattcatgacaa

SEQ ID NO: 495429 - DNA, 551 bp, Homo sapiens
cccacaaccccagatcatcacactgcattggaccattttcttgatagctttggctctgagcctctctagagccctctgctggtggatttttttwaaaaaaaatacaaggattaaggattttacctgacttctagatcccatccatccaaggtaaaacccttcacatatctggctttcctgggaagagtattccagaggaaacactatttccactttaatgtaagtgttcatgggaagtgaaagtaaacattttgcacacagagaaaacctatcaaagactcagagcaggagataaaaaggaaggaagatacaaaaaaatgtaaaaatcaaaagaagggaaagttatgcattgtgggtgactgcaggttctggaaacaatctacctgaattcaaactctggcattatgctttaacagacacatggctgttaacaagttgcttagtatttttggacttcattttcctcatcaggaaagtatggaaaaaaatatcttttattatgttgattaaataattaataaatgcaaaaaaatgcaaatggattctattgc

SEQ ID NO: 495430 - DNA, 551 bp, Homo sapiens
cccacaaccccagatcatcacactgcattggaccattttcttgatagctttggctctgagcctctctagagccctctgctggtggatttttttawaaaaaaatacaaggattaaggattttacctgacttctagatcccatccatccaaggtaaaacccttcacatatctggctttcctgggaagagtattccagaggaaacactatttccactttaatgtaagtgttcatgggaagtgaaagtaaacattttgcacacagagaaaacctatcaaagactcagagcaggagataaaaaggaaggaagatacaaaaaaatgtaaaaatcaaaagaagggaaagttatgcattgtgggtgactgcaggttctggaaacaatctacctgaattcaaactctggcattatgctttaacagacacatggctgttaacaagttgcttagtatttttggacttcattttcctcatcaggaaagtatggaaaaaaatatcttttattatgttgattaaataattaataaatgcaaaaaaatgcaaatggattctattgc

SEQ ID NO: 495431 - DNA, 646 bp, Homo sapiens
attactatcattatatcaatttagtcaagaggaaatggaagtaacttaactacaggcttaatagcttcctacacaggatcatgggaggcagtcagaagaacagagttaccactacagttttcatggtgagtcctgctgccaccccagtaccgtccataaagaaaatagagaggaactgacttgtataaagtgtcattttctaaaaaaaaaaagctccttattcataccacattaataaagttaggcagaaaatctaaacatacagatcactccccaaaccttcctcagacgatacctgggataaactggtatttcaccctgccaaagagaagtaaaatacggataaaggaaaagcaattacrgcaatttgttaaaggcatccagcaccaaagctaagatctgaattcaaaatccctccccactaatcctgtggacaaaatggtggaattcgtacttgctgaaaccacctttacttataaatattatgaaaatactttaaaccacaaatcaagcaataaaaatcaggtttagggggaaattttctgggtatttttttcccacacacattcaaaattgcttttaagtctttactgacaaaagtgacattgttttttaaaaataaattgggaatacagaaactgccaga

SEQ ID NO: 495432 - DNA, 646 bp, Homo sapiens
attactatcattatatcaatttagtcaagaggaaatggaagtaacttaactacaggcttaatagcttcctacacaggatcatgggaggcagtcagaagaacagagttaccactacagttttcatggtgagtcctgctgccaccccagtaccgtccataaagaaaatagagaggaactgacttgtataaagtgtcattttctaaaaaaaaaaagctccttattcataccacattaataaagttaggcagaaaatctaaacatacagatcactccccaaaccttcctcagacgatacctgggataaactggtatttcaccctgccaaagagaagtaaaatacggataaaggaaaagcaattacagcaatttgttaaaggcatccagcaccaaagctaagatctgaattcaaaatccctccccactaatcctgtggacaaaatggtggaattcrtacttgctgaaaccacctttacttataaatattatgaaaatactttaaaccacaaatcaagcaataaaaatcaggtttagggggaaattttctgggtatttttttcccacacacattcaaaattgcttttaagtctttactgacaaaagtgacattgttttttaaaaataaattgggaatacagaaactgccaga

SEQ ID NO: 495433 - DNA, 632 bp, Homo sapiens
ctgttgatctattataacttccagctatttccagctattagaacctgacacggtatttttaaggtttccattagacatatcttcaggtaatagaagtcgagataatctacagcctcttaagaaaagatggaaggtatatgctgctctaagggtcttttattaaaatactccaagagaggaagtctttccaagattaggcataatgtgagaattgaagaaagagatagtgtagaataaaagctctctgaagaacccttaacatgaaatgcaatcacataatgatcttcagagtgtgaaattctgagtgtgaatctacacacaaacacactgtgaagatattataagatcttcctagtatataatcttatgtataagattatagatatgtatatgtattttatataggtagaggtgtktaagtatgtaaataagtatatgtgtgtgtgtttatatataaaatcttatacttatcattgtgttacattacattctgataaatatttggggattgaaagtagccaggatacaattttaaaagccacaactgcagagtcaagctaggaagaaaaaattattatagaaaaagatatagttttaaaacattttttttaaaaaaacagcactgtgtaatg

SEQ ID NO: 495434 - DNA, 430 bp, Homo sapiens
gtcgctatactggagggagggcaacatggagatgtaggtggccctttagaacatggaaagcaaacttagtttatcttcttggagaagaagcttcttgtctcttgtggtagacttgcctagtttttctggtagcagaactcatcctgagttctgttacaattcccacagaggttcttaagctacagttcatggggattcatatgtagaattcagggtgtctgtggacttggatgagaaaaatamatagttctttattttataaagttctatctgaaatttatcactttagttattaatattattaaatacaaaccacagtgcataagatacctaagactttgtcacctatagaaattacagatattttcataccacattatgtcatgtatgcttatcactatgtctgaattatgagagttattaggctgac

SEQ ID NO: 495435 - DNA, 338 bp, Homo sapiens
ttttagcatcaacaagctgctctgacatcctccctagccccctttctctctagaaataaatactattgatcagcagtagccatgtctaaagctggcaggaatgcatgagcttattaagtttctttattaaagttgactataatctggaaaraagagttgattccccttggacttacggtcatttatgttttttccttgtaatcctccatttggaacatttcattacatactgtctaatggggattgggaatattttcattcagtaaacgatttttgtcatgctgctttttcccaatcattaaaaactcagtagaaggaccacagagaaagatgcaaag

SEQ ID NO: 495436 - DNA, 563 bp, Homo sapiens
gtcagggaaataaaaaggcattctctaaaagaactgagccctggagagacgaggttggcattctaggccagaaagaaaaaccaaagattttcttctgtccctctgttggcctgttgacactcagaggccatttagactgctttcttgtggaaaggagaaagctctttctcttggaatcagtcctgatccctttatgtcaattcagacagaaattctaagcaaacagatatttgtgtttgtgtgtgtgtgtctgtgtgtgtgtttgtgtgtgtgtctgtgtgtgtgtttgtgcgtgtgtgtctgtgtgtgtttgtctgtgtgtgtgtctgtgtctgtgtgtgtgtttgtgtgtttgtaataggtaaaatatttggctttcccattgtaatacagagtaaaaagaacagaartgagaaatatcaaaagaccataagaataaagtgtgaatgacaatgttgagaatgatagcaaatgtatattactgaaatataatgtctcatttaaggctcccccagctttgtgagtgagggttagaatccacgatggggactacactcataaac

SEQ ID NO: 495437 - DNA, 563 bp, Homo sapiens
gtcagggaaataaaaaggcattctctaaaagaactgagccctggagagacgaggttggcattctaggccagaaagaaaaaccaaagattttcttctgtccctctgttggcctgttgacactcagaggccatttagactgctttcttgtggaaaggagaaagctctttctcttggaatcagtcctgatccctttatgtcaattcagacagaaattctaagcaaacagatatttgtgtttgtgtgtgtgtgtctgtgtgtgtgtttgtgtgtgtgtctgtgtgtgtgtttgtgcgtgtgtgtctgtgtgtgtttgtctgtgtgtgtgtctgtgtctgtgtgtgtgtttgtgtgtttgtaataggtaaaatatttggctttcccattgtaatacagagtaaaaagaacagaaatgagaaatatcaaaagaccataagaataaagtgtgaatgacaatgttgagaatgatagcaaatgtatattactgaaatataatgtctcatttaaggctcccccagctttgtgagtgagggttagaatycacgatggggactacactcataaac

SEQ ID NO: 495438 - DNA, 593 bp, Homo sapiens
tctgatctcagcatttcaccccatgtggcaactgcatcgttcctggctgtagtcctaggttcatgtaatttaaaactttatattaatttgctaatcatctgatggttttttttagtatttcccaatcatatatttgaattctttaaactaagatgttcctagtttattttaatgtgcatttctaattcctacttttacttttgtttttaatattattttgtttcagatgtgtttttaatttctgggtccaacctaaacattagaaacatctaatctatttattttcacccaatttttaaaaagttatactctcttaaatcacttctattttcttctattattttttgaaatcatcaaattttagaatcagaggtcatcttcatgaccataacaaatcaggaaatatcatacatgtgacaacacatatgcgaaatccaagcctccaatctgtttcttgggcactgcacatttayagtgttatcagcatatacatttatcttttcagaatgatgcctcacgaaaatttattgcaggctatacagagataggtattctttggaattccatcatgccatattatatgctgcaaagag

SEQ ID NO: 495439 - DNA, 367 bp, Homo sapiens
tgtgcgtgcagtgacactggtggtgttggctgcacacacacagtttggtgttggctccaacactaacatttcaagtctggtggtatatatctrtcgtctatagtacacattcattttctatcatgcgcaaacactgtgttaaggtttttaatttttagtcaccttaaaaacaatcttcttgtattgttttgttttgatacaaaaactcttaggattgttgtaagtatctccattttcagagaagaaaatggaagcaaatggagactgacttcgccaggattgcatgacccaaggtaacagtgcagcaaggacagcagctcctgtcagacaagaatctcttcaacttactgatgacaaatttacatcc

SEQ ID NO: 495440 - DNA, 599 bp, Homo sapiens
cagctggggataattacataatttggagtaagagacaggacatgggccttagagtcaagtagaamtcagttcacatcctgactacaatctgtagggctggagttttggagaatgttagtcaaactgaatgagtagactgagtgcggtggctcacatctatactcccagcattttgagaggctgaggtgggaggactgcttgagcccaggagtttgagatcagcctgggcaacatagtgatactctgtctctacaaaaaattaaaaaaaaaaaaaaaaaagaacttagcttgatatggtagcacatgcctatagtcccagctacattggaggcttaggtgagacgatcacttgagcccaggagtttgaggccttattgagctagaattatgctactccaccccaggatgggcaacagagtgagaccctgtcttaaaataaaaacaaaaaacctgaatgagtcactgttacccataaagtcacctcatggtattaatattggggcaggctcagtgagttttctaagttaaatggccagcacagaagagatgcattgattactattagttttctctctattgtatagagatatgacagattg

SEQ ID NO: 495441 - DNA, 640 bp, Homo sapiens
ctgcttgcagaccatgtcagacctgacaccaagaaagatcccctcagataagtcccccattgcgggaaaaacaagaatagcaggaccccaaaagcccctgacaccaaggaccttaaaaacatacaccaccgctggcacaaacttccagagctgaggccactgagccacccagttattgccaacatttcatggargtgaggaagctgcacagaaacaatgtcactgctcctatccagaaagtcacggttctcttcccaaatggcacagtaaaacccaagtgaggtgaaaacctctccatgaaagccactctagaagaaagtataaaagaggctcctgttctaccagatgcagagacatcaatgcagggacacaagaaacatgaaaaagcaaggaaataagaaatcatgaaaggaatattaactctctaggaacagactctaatgaaaaggaaatcaatgaattgccagaaagagaattcaaaataataatttttttgaaggaaactcaatgagaaacaaaatacagatagataattcaacaaaatcaagaaaacaatttcatgatatgaacaagaacttaaactgagacagaaattgtaaaaaagagtcaaacagaaatcctgtagctgaagaattcaatg

SEQ ID NO: 495442 - DNA, 640 bp, Homo sapiens
ctgcttgcagaccatgtcagacctgacaccaagaaagatcccctcagataagtcccccattgcgggaaaaacaagaatagcaggaccccaaaagcccctgacaccaaggaccttaaaaacatacaccaccgctggcacaaacttccagagctgaggccactgagccacccagttattgccaacatttcatggaggtgaggaagctgcacagaaacaatgtcactgctcctatccagaaagtcacggttctcttcccaaatggcacagtaaaacccaagtgaggtgaaaacctctccatgaaagccactctagaagaaagtataaaagaggctcctgttctaccagatgcagagacatcaatgcagggacacaagaaacatgaaaaagcaaggaaataagaaatcatgaaaggaatattaactctctaggaacagactctaatgaaaaggaaatcaatgaattgccagaaagagaattcaamataataatttttttgaaggaaactcaatgagaaacaaaatacagatagataattcaacaaaatcaagaaaacaatttcatgatatgaacaagaacttaaactgagacagaaattgtaaaaaagagtcaaacagaaatcctgtagctgaagaattcaatg

SEQ ID NO: 495443 - DNA, 545 bp, Homo sapiens
gagagaaatgactcctctttttaccagcgacatcataaaacacaaaaactgggataactgagaaccctcccatgtcttaggmattactttcttcacaatttacaaaattagagtgtggaaacattgcttcttgctttgtatttatttattttttttgagacagagtttcgctcctgtcgcccaggctggagtgcaatggcacaatctcggctcactgcaacccctgtcttctgggttcaagcgattctccagcctcagccttccaagtagctgggattacaggcacccaccaccacgtccagctaatttttgtatttttagtagagatggggtttcgccatgttggccaggccaatctcgaacttctgacctcaggttagctgcctgccttggcctcccaaagtgttgggattacaggcgtgaatcactgtgcccagcctgcttcacgcttttaaactgtatatatgccatttctgataacagagttagaaatgacacaaagataatttcattttatgttaagaaaatgcagaaatccacagctg

SEQ ID NO: 495444 - DNA, 490 bp, Homo sapiens
actgagaaccctcccatgtcttaggaattactttcttcacaatttacaaaattagagtgtggaaacattgcttcttgctttgtatttatttattttttttgagacagagtttcgctcctgtcgcccaggctggagtgcaatggcacaatctcggctcactgcaacccctgtcttcygggttcaagcgattctccagcctcagccttccaagtagctgggattacaggcacccaccaccacgtccagctaatttttgtatttttagtagagatggggtttcgccatgttggccaggccaatctcgaacttctgacctcaggttagctgcctgccttggcctcccaaagtgttgggattacaggcgtgaatcactgtgcccagcctgcttcacgcttttaaactgtatatatgccatttctgataacagagttagaaatgacacaaagataatttcattttatgttaagaaaatgcagaaatccacagctgg

SEQ ID NO: 495445 - DNA, 478 bp, Homo sapiens
gtgccacagtgtcacctgcagttttctagcagtgcctggcgtgtgtgtgattggtgctcaaatgtagagcaaaacgctgttacaggaacgagtgctgtattctgtttcctccttcaaatttcctcttcagaaacgttaaaaaaattaaatatatgtgcataggttaaaaacttaagacttgaaaatcgaaatgactccttgatccctgggctacagaatggatgttgtgttagtaggcatgaaatcagcattcatcttgtacatctccatcagagctcttaggtgagcaggtgcgttgtcaatgagccagttgtattatgataggtgtaggtcttaatggtaggcttaaaatactcagtcaacaatgctgtcatcagatgtactgtcatccatgctttgttgttccwtttatggaggacaggtagaggagatgtagcgtaattcttaagggccctgggatttttgaaatggcaagtga

SEQ ID NO: 495446 - DNA, 643 bp, Homo sapiens
tgaaacaggcagcactgtggctttattactttattactttggcatgtcaactgttctgttacagcgctgatacaaaagtacaacacctgcgtcrccaacagtcctgactttaaaacagtgccctgagtaagtaaccaaaggacaccccaataagccagccaggacccccgggtgcccctcggaggcggcgcttcatagcgcaagggaagacatggggtagctgtgttgtgtttggagtcatcagagcccttcctgcaacttccaagctatctgcatgaaatccaactcctaacacattaaacaggtcttctcttcacagccaggcagcccaaatgcacactcggggtctccgaagctccatcccggcctttctcatcacccacgccttttggaattcaagaactcacacaagcattcatttgacgaactcagaggactgaccaagaaacggagaagtcacattcaaataagacacatttctcaatactccttgatggctacctccccaaaaagtggacccttcagataaaaatcaatcaaagcaaaaatcaagtatgtatcacatgtgattctttttcagaatttcaaattcaactgttccctggagaagtcagttctcctaatgcatagttctacctcagta

SEQ ID NO: 495447 - DNA, 542 bp, Homo sapiens
gacagggcagagacaacccagggtggggtggatacaagactgatggacagagtggagacctggggcggggtggatgacgggaggttgcctggtgcgtgcaacgagcatcactccaatgaggggtatgctgaaggccctggcctcacctgagtggagtacatcaaggtagcaaaactgcactcacaccccatgaatacatacaacattttgttaaagtactctaatgtaatctaattaaaaagacaaccaccaagctttcaggcatatgggtaggggatgtaacactgagaggagacacaggtgtgcttccaaggccccacagcctgcaggccgtcctcatctccatgtcacttccgccccagaggcccttccacagggccctgctgtcygcaaagtcaccacctggtagatggctggctctccaccttccccacagacaaggactcaaaagccatcaccaaaaagaaagcagatctgaaagtggaaagcaaactgatttagagaccacatgcgtcctttccaacacgcacctcccaggcggc

SEQ ID NO: 495448 - DNA, 473 bp, Homo sapiens
cctgtttttttcaatgctaaagtttatccgcattgcaaacactgccagcccggcacaaggcagagccacctgccacccacagaggaggcttaatggccagtgacacctcgcctgtcagctcctttttatagcaaccaaaataacaacaacaaaaaaaaaaaaacaaaaaagggagatggggaggggaggaaaactctacgggattggggtgtgctgagggaggtctgagggctgaggctgagatctaaacaggcaaatgtcatgacagcaaaagcctcttgcaggcacgtctattcacccacggtctgcacagtgagggcccacgctggaatggcctgcgtgtgggttcagccccctgggtgtgtgcaagggaatgcagcagccaggagagggccagrcttatggaattacactgccgggtgaaaaacacacgaacagaaaagaacttagttcaggtgaaaagcactgacttc

SEQ ID NO: 495449 - DNA, 473 bp, Homo sapiens
cctgtttttttcaatgctaaagtttatccgcattgcaaacactgccagcccggcacaaggcagagccacctgccacccacagaggaggcttaatggccagtgacacctcgcctgtcagctcctttttatagcaaccaaaataacaacaacaaaaaaaaaaaaacaaaaaagggagatggggaggggaggaaaactctacgggattggggtgtgctgagggaggtctgagggctgaggctgagatctaaacaggcaaatgtcatgacagcaaaagcctcttgcaggcacgtctattcacccacggtctgcacagtgagggcccacgctggaatggcctgcgtgtgggttcagccccctgggtgtgtgcaagggaatgcagcagccaggagagggccagacttatggaattacmctgccgggtgaaaaacacacgaacagaaaagaacttagttcaggtgaaaagcactgacttc

SEQ ID NO: 495450 - DNA, 620 bp, Homo sapiens
ctttgtttacctaagcgagcctgggcaatggcaggcgcccctcccccagcctcgctgcggccttgcagtttgatctcagactgctgtgctagcaatcagcgagactccgtgggcgtaggaccctcccagccaggtgcgagatataatctcctggtgcgccgttttttaagcccgtcggaaaagcgcagtattagggtgggagtgacccgattttccaggtgccgtctgtcacccctttctttgactaggaaagggaactccccgaccccttgcgcctcccgagtgaggcaatgcctcgccctgcttcggctcgcacatggtgcgggtgcgcggcacccactgtctygcgcccattgtctggcactccctagtgagatgaacccggtacctcagatggaaatgcagaaatcacccgtcttctgcgtcgctcatgctgggagctgtagaccggagctgttcctatttggccatcttggctgccctcccatatttgtgaaatggaaaaccatcttcataggagtttgaccaccttgaccagatgctttttctaataaagctttgctattaataaatgactaaagtaatttaattagcttttatattgaaattgaacagtgtac

SEQ ID NO: 495451 - DNA, 515 bp, Homo sapiens
ttgaccaccttgaccagatgctttttctaataaagctttgctattaataaatgactaaagtaatttaattagcttttatattgaaattgaacagtgtacagagtaacttaactgttcttgttcaactacacagaccgtgaacagcaaatagaaagtaaatactctatttgtgttctgtttttctttttgtttttgtttgagacagagtttcactcctgttgcccagactggagtgtagcggtgtgatctcggctcaccccagcctccgcctcgcgaattcaagagattctcctgcctcagcctcctgtgtagctgggattactattygggtttaaaagcatttgcaggtctgcttggtggatcatttctgtaatcccaaaagtttgagagcctgaggcaagggaatcacctcaggccagaaatttaagaacagcctgggtaacatagtgagagcccatttctacaaaaaatccaaaaaaatagatgggtatggtgtcatgaacctgtagtcacag

SEQ ID NO: 495452 - DNA, 515 bp, Homo sapiens
ttgaccaccttgaccagatgctttttctaataaagctttgctattaataaatgactaaagtaatttaattagcttttatattgaaattgaacagtgtacagagtaacttaactgttcttgttcaactacacagaccgtgaacagcaaatagaaagtaaatactctatttgtgttctgtttttctttttgtttttgtttgagacagagtttcactcctgttgcccagactggagtgtagcggtgtgatctcggctcaccccagcctccgcctcgcgaattcaagagattctcctgcctcagcctcctgtgtagctgggattactattcgggtttaaaagcatttgcaggtctgcttggtggatcatttctgtaatcccaaaagtttgagagcctgaggcaagggaatcacctcaggccagaaatttaagaacagcctgggtaacatagtgagagcccatttctacaaaaaatcmaaaaaaatagatgggtatggtgtcatgaacctgtagtcacag

SEQ ID NO: 495453 - DNA, 615 bp, Homo sapiens
cctgtcaagagaaaacaaagagatgacttgtttttcatcgttttaggtaatttcacatctgtaaattggggaaaatatttgcgtcttacagttttaatgattgagtgagaagatatgcctaaattagtttccatagcatgtggcacatagtaagagctaaatgaaaattaactattgttcttcctcctctgtctctgccttctcctcttcttcctttccctctttctttttcttttctttctccatatctttctcctttccaatcttcttcttaattagctacaatataatccttttgaggagatttgagggataaccctcatttgcttactgaaaacttgagaaacacccttaatttctatattcttgtctgattgtgtctctgtctggctatcctgtatctattcatgcatatgtccatgcctatctkgcagattgatagtatttctgcagaagagttgaattctttgctacctttgttgattattatcgactttgactcagggtaatgtgttctcatcttgtgcacacactctggagctacacagcctatttaaaaaatataagacgataagtacctcacaaattttccaaaaacactccagcttaagttat

SEQ ID NO: 495454 - DNA, 618 bp, Homo sapiens
tcataggcatagcaaagaaaaaaatacttaaaatatattgaggtttctaggtgtagaataagcacaaactaatggctgaccagatttaagagatggaaaagaggaacaaggcattcttcattgagatagttaatacaaagagaaaaaatagttgaataggtgagtaggcaagatagtgaaatagctgagagataaatgtgttaagtgtgaaatgttgatgagatgctgaaatggcatggactaacacagtagttacatggatcgcctgatgacagagctggatgttagaattttgtagtttgtgttgtgtaagtgacagatgaagccagagcactgtctactgttgtccaagaagagaatgaaagtwaaaaaaaaaaaaattgctcaggaacaaaagctgagaacaacaacacgtgcaaggaaaaaaaaaaatgcttacaatacagtctgggaaggctggtgtaaaactaggagaaaatctaagaggaaacattcatgagaattaatatttatgaaaatcaataaagatctaaaagctccagagaggtgatataagggaggaactgcaacatatataatgaatgcggcaattataagtccattagtgatctcagtaag

SEQ ID NO: 495455 - DNA, 460 bp, Homo sapiens
agctacacagtatgatgttatgtratagatctgtatccttatgttttgcagagaaaagaacacaaacaaaatgagaaaataaaaaaagaagacacccagaagggtaattgctctcggtactttctaactataagaagaggcattgtaatttaaacaaaggtgtcatccaggagacaggcatgcctttggcatgatcctaatatatagtccttagaaagacaagtagaaggaaaacaccacccctcacatacaatctatagttggaaaatggataaattaatagagatacagacctagcaatttatgcatatgtaaagttctatggctttatctctatatctgcaatcatttttatattacagacacagaaatttttcacgagaacatgctggtatttgaaatgttccaaaaaatctgttccatttaagtaagcctatcttagtcgattcccccatcttcc

SEQ ID NO: 495456 - DNA, 674 bp, Homo sapiens
ggaggttgactggacattctctctccaaaagscttttcattgtggctagctggagattcagcacagctcatgctctcacggtaatcagacatcctatacagtgctggttttaaagaaatcagaagtttcaaggtctctttcttgataactagcccaggaactgacagagccttacttctgccacattgtcattaatcaacggcaagtcacaggcccgctcagatttgtgatggaagggtggagaaacaggctccccttcaccataggtgcaaaggcatacacacataggagaaagagaattgttgatttctcccattggaggccaccaccccactgagaagattaatgttctcagtgtcagtcaacctaggaagattaatactggaataaggaataaatctcatcaaagggatattatatgaagaagagaagcttctatttctgggcaatagaataaatgtattcaaattctaagtgcacaagagccctgaaacagttgttaggaaaatattggatgaaattgatgagaagccccaagcttggccagaagttttactttcctctctgttctgtaattctcattcatgatccttaccctttcattaaactctgattaaaattatggccttagcattggttctgctgtggggatagaggaaaagagtctgtgttcc

SEQ ID NO: 495457 - DNA, 549 bp, Homo sapiens
  misc_feature (1)...(549): n = A,T,C or G
tgaaagatctggcttctaggtaaaacaatgcattaccttgtatctagttactcttatgtagaatgaaaaagactttgagaaaatcnacttcaccaaagtttttaaaagaccacaaataccacataacattattttgcatttcaaatgatgcctaactatgttgtctgatttccactttaaaatcctataagcagaagaaaaatttgttatattctttacccaatgccaacaaactgcatatagatagacacttgagattctcttcaacttgctagaaatgagacttgatcaatatagattaatcaaaattrtatgtgtatggctgccaatggctacaatttgtgtttaggatagtacttatgtagtttggacatatttgaaagacttaacatcacaatttttaaacaaccttaattgcaatgtaagataagcattggtcttcttaggatagtatgccatatgttagattgccactgaagtctctttcttaaattacagattattccataaagcataatgcaccagaaatgacagactttgattccaaaa

SEQ ID NO: 495458 - DNA, 640 bp, Homo sapiens
ctgcaggcattctctgctggctagggggctgctgtgctatggtgggagcaccactactctcctccactacagtactctgcccagtgcatccctcagcactggcctccctggaccaggcttctcaaggccagggacctcccatcatctttcttagaagagtttgtgacacacagcagacatgcaatacaggtgtactggattaatgcaggatgcatgccatacaagggcatcaacagcagcatgggcraagaagaaagttaaagaggccagatcacaaatgacatatgagcataaatatgtccatacctgaagagacagataaccagttcaaggaaggtagtgaaacatttgaggcttaaatgatatacacacttattttcctggaaaatgggtagggcaaagggcaaagtaccataggaattagatgacatttttcagtataaatggcagcagctacaatttttggagagctaacagattagagtcaccagggatacagtgttaaggtcaaccttgtctcggccctccttcatcttatagggaagctattagaaagaaacaattaaacagagtactgaatgttacaagagtagttctgaatattatagaaatacctcatagcacagacacctaactgact

SEQ ID NO: 495459 - DNA, 640 bp, Homo sapiens
ctgcaggcattctctgctggctagggggctgctgtgctatggtgggagcaccactactctcctccactacagtactctgcccagtgcatccctcagcactggcctccctggaccaggcttctcaaggccagggacctcccatcatctttcttagaagagtttgtgacacacagcagacatgcaatacaggtgtactggattaatgcaggatgcatgccatacaagggcatcaacagcagcatgggcaaagaagaaagttaaagaggccagatcacaaatgacatatgagcataaatatgtccatamctgaagagacagataaccagttcaaggaaggtagtgaaacatttgaggcttaaatgatatacacacttattttcctggaaaatgggtagggcaaagggcaaagtaccataggaattagatgacatttttcagtataaatggcagcagctacaatttttggagagctaacagattagagtcaccagggatacagtgttaaggtcaaccttgtctcggccctccttcatcttatagggaagctattagaaagaaacaattaaacagagtactgaatgttacaagagtagttctgaatattatagaaatacctcatagcacagacacctaactgact

SEQ ID NO: 495460 - DNA, 647 bp, Homo sapiens
ttgaatgattccatacctgtcattcaactgcaaccatttctgtgtgcttttaggaataaaaaattaaagccttttatgtaaattaaaccctaaaacataaattcccaagttttttgatcccactatctatagaaaaggaaamccttgaaggattttttttaaaaatcaataaaaagtacattcaacgttctcttgtgacttcatctgttctttcatagtacctatattttttaaattcttcttaagactctcattaatgcagttataattcattaatgtgactaatatttattagttagtagaattatggtgacaccatgaaaatctttatggttcaatagacagagcttatgattggaggaaggagattttgaatcttgctttcagtaataatgtcactacaggtgaataggtgaattattgaaactttctgtaccttgactgatgtaatctcatgggaaaacggtatctccctttaagcataaaatagctaaatgtacagaaaagcaattataatgaagtgagtttatgttgctgttatttttttcatcatcattatcatttcaaaagaacaagaacaatctttagatccatatttggcaaggatgaagggaaaaatcaaaagtaatatgagaaactaataaacc

SEQ ID NO: 495461 - DNA, 597 bp, Homo sapiens
tgtgtcttgcaatgtttctttcaaaattttaacatttacaccaaaactaagagttataagatcattcatcatcagtgacctttaacaaatttgtctgtgatgatttgaaaatttttgattttatttcctcatggaaactacatttggatattttaatttcaagttacaaatgtattaatggctcaaaaayatatgttgataagctcaggtgagcctattattatactattttatcacatatttgttaatggtgcctgatttacttgatgaatgaaactgtaagtcttgacccaaatgagtaccaattaacatttgtaatatgtaactggaaaagggaactgacagattcttgagtgccagcggtctcaatttgtctaggctagatttagtcctaatagacagaaaccacataggataaatgacattctttgactactttaacctaagcttttattctgcctttagattttaccaaacagatggaagagtaaggcgaaactagtaaaaaaaaaaaaatcctgctcaaaaatgcaggaaataaaataagaaaagctagccaaaggtctagagcaaaacttgcctaggtcacctgtgaga

SEQ ID NO: 495462 - DNA, 548 bp, Homo sapiens
gcacatttctacaaggtctcaggccacaaaggcccttaccactcctttgcaaagtccctataatcctcattgtcattatcatcaccaccatttattaagcttytaccatatgccaagcagctatgttcattttctctagtctttataatagttgcacaggattgttatacccatgacataggtctttgactacaggaatgatccgttatattctggggccactcgcttccagcctgagttacacttatccacagagaaataagctctgttaagactcaattctgtaggggaattgactgcttccctgtgtttatctgctctgggcactataatttttactgcaaagagtcaggcagggtctactcagttcagatacttatctgtaacagcaagtagaaatgttctttcactggaggctttataaagacagcccaacaaattagttgagaacaactgaaaccacagtgtggaggaaaaactatatatattttatcatagtcaattataatatttattagaactgctatttttgatgtcttcccccctcc

SEQ ID NO: 495463 - DNA, 548 bp, Homo sapiens
gcacatttctacaaggtctcaggccacaaaggcccttaccactcctttgcaaagtccctataatcctcattgtcattatcatcaccaccatttattaagcttctaccatatgccaagcagctatgttcattttctctagtctttataatagttgcacaggattgttatacccatgacataggtctttgactacaggaatgatccgttatattctggggccactcgcttccagcctgagttacacttatccacagagaaataagctctgttaagactcaattctgtaggggaattgactgcttccctgtgtttatctgctctgggcactataatttttactgcaaagagtcaggcagggtctactcagttcagatacttatctgtaacagcaagtagaaatgttctttcactggaggctttataaagacagcccaacaaattagttgagaacaactgaaaccacagtgtggagraaaaactatatatattttatcatagtcaattataatatttattagaactgctatttttgatgtcttcccccctcc

SEQ ID NO: 495464 - DNA, 562 bp, Homo sapiens
tgtatggtgaatagttttgtaaaatagacagatgtctacaggtacttcacccttgccatatagcaagcttttagtgctccctgcctcccaatgggccgccagttatttmtggaaggaataaaccagttacaatacatcatagctccggctgtttgaactttctggctctagccatccttgcccatgttctctgcccataaagcctttacagatgcctcaccactgtcatggtctatcaggggaacagatgccagtagctatccaagctgcgacctcttgataatcccaaactcctgttctctaaggcaccagcgctgggcagggctttgcgcagatggtaggagtgcatcttctggaccctggacaactctatacccatccaagaacaacatccatgcaagaaactctttacccctcctgcacatccagtctgcaagctccaatggagaataagttatatttcttcccccactatccttcccactccatctaagacctgtcctcaataaaactctcttctattaggaaaacaaagctcttgtgcatatgagtgaatgagcta

SEQ ID NO: 495465 - DNA, 645 bp, Homo sapiens
gggacagaacctaatgattgattcagtaagtaaaattccaggaaagaatkgcgtgcatttagatatgggcttctgtggcaacaatgctagagctgaggaaaaatggaacaagctgtcataaacaggcaaaagaaaatagcagtttccatctggaccttacctttacatggctgttttagccgtgatcattccaaaatgaatttgaaatcacattttacctcatttctctttatatctggcccaatatttcttttggtaatccatggctatgaagcccttataaacagaatcctggcctattttcaaggatgggagatatgacacaccaattaactctaggaaggtttgaatttagggtggttttatttcaccatgcagaatgtttaagccatatctcaacatagccagctactgcaaattccaatcccagaatcacattgctcccatagtggatcatctggctgtcaggagattctcagcaaacaacaacaacaacaaaaagcattaggccgcttcttcctaattatgtctctctctaaatatctaattatcattgagaacaaattgcatgttacagagataatattatggggaatcgttaatctgttgggcttctgcttttgaattcctgagtcggtactgcag

SEQ ID NO: 495466 - DNA, 421 bp, Homo sapiens
attttagaagttaaagcctacccaaacataaaaggatatgatttgtgtcactgtcatctaaagtgtctactgctacattttccatggggctgaagttttgattaaaaagaataatatcgtatcccaggtgtatccctaaattggtaactacttccgaaagtcttttttaagyttgtacttaaatgacttttttttaaggataatagttttgtattataaaagataaatgcacaaagcagctacatgtaaaatgtcactttaggacacgctgttctaacacaaatactgtcaacatatcatttgtgagtgaactgacaagatgtccaaggaatgagttacagtggagaaaattcaacgtgcatcacagaatagttaccagctcctggccctccacagatgtggacctaaaaccacctggagg

SEQ ID NO: 495467 - DNA, 615 bp, Homo sapiens
tttgcccatcttctttcaagcagatgactgagtcaatcccacattacatatgaggaaactgaggtaagagtggaaataccctgaaaaaacaattttcttcctctgttaaaaggagataactatttttttccatagaactgttgtaaagatcagagctaatgtattcaaagttcctagtgaactacctagtttatacgtattgaaacagagagagctgatgctgatattttgatattccagattacttggtgatatgccttatcatatcatagaagataataaatgttaatttatacaagcattatatatatatttgcgtatatatacacccatattatcttaagaaaagttagaacctttttctctctctgtacgtttcttgcaactttatgatattaaacaaatggaagtgttagaggtaacttccaataggaacaaggagagacyaggaaagggaggagaagtggctacattttaaatgacaggtaacattgtgtccggaatttattccttgtggtgggttcttcgtcttgctgacttcaagaatgaagcagccaacctcgcggtgagtgttacagctcttaaagatggtgtgtgtgtccggagtttcctcct

SEQ ID NO: 495468 - DNA, 623 bp, Homo sapiens
gactggcaaagcagaatatctgtgtgtcagtgtacttcattcatccatcgctgggtcagggtctgcaggttggaccctagcagaggttcctcaaaggattccacattcttggtcaccaaagctgttgtggttttcttcaccatggaagtagataagtagcaggcctttgccctaatagttggtcaagtccctgcaggcgcatggggaccastgttctggcaaatgctggttggggagaacatacagattttaatcacttttaaaaatagactcagggggtacaagtgcagttttgttacatggatatattgtgtgctggtgaaacctcagcgtttagtgtacccatcacccaaatagtgtacagtgtacctttcaggtaatttctcatccctcacttccctctcacccttccagtgtctactggagtctccaaaatctccaatgagtcttcaatgtctattccacttttcatgtccatgggtacatattacttatctctcacttataagtgagaacatgcagtctttgaatttctgtttctgagttatatcacttaagataatggcctccagttccatccatattgctgcaaaaagtataatttcattcctttttatggctga

SEQ ID NO: 495469 - DNA, 590 bp, Homo sapiens
gtggaattgtttaaggaagaagatctgacggaagaggaagatgggggaatcatccgcagaatagggactcgcggtgaaggctatgtcaagcccgatgagggcgctatggtggaggttgcgctggaagggtgctgcaaggaccagcyctttgaccaacgggcgctccgctttgaggttagcgagggggagaacctggatctgccttatgatctggagagggccattcagcacttggagaaaggagaacattccactgtgtacctcaagcccagctatgcttttggcagtgttgggaaggaaaagttccaaatcccaccaaatgccgagctgaaatatgaattacatctcaagagttttgaaaaggccaaggaatcttgggagatgatttcagaagagaagctggaacagaacaccatagtgaaagagcagggcagtgtgtacttcaaggaaggcaaatacaagcaagctttactacagtgtaagaagattgtgtcctggctggaatatgagtctagtttttccaatgaggaagcacagaaggcacaggcccttcgactggcctctcacctcgacctggccatgtgtcagct

SEQ ID NO: 495470 - DNA, 278 bp, Homo sapiens
ttggcagtgttgggaaggaaaagttccaaatcccaccaaatgccgagctgaaatatgaattacatctcaagagttttgaaaaggccaaggaatcttgggagatgatttcagaagagaagctggaacagaacaccatagtgaaagagcagggcagtgtgtacttcaaggaaggcaaatacaagcaagctttactacagtgtaagamgattgtgtcctggctggaatatgagtctagtttttccaatgaggaagcacagaaggcacaggcccttcgactg

SEQ ID NO: 495471 - DNA, 278 bp, Homo sapiens
ttggcagtgttgggaaggaaaagttccaaatcccaccaaatgccgagctgaaatatgaattacatctcaagagttttgaaaaggccaaggaatcttgggagatgatttcagaagagaagctggaacagaacaccatagtgaaagagcagggcagtgtgtacttcaaggaaggcaaatacaagcaagctttactacagtgtaagaagattgtgtcctggctrgaatatgagtctagtttttccaatgaggaagcacagaaggcacaggcccttcgactg

SEQ ID NO: 495472 - DNA, 582 bp, Homo sapiens
tggctgtgggtcagcagcggatccacaggcagcttgccygggagaagttctatgccaaaatgtttgagaggctggctgaggaggagaacaaggccaaggcagaggcttgctcaggagaccatcccactgacacagagatgaaggcggagtgcaagagcaacacggcgggagccagtctcaggtggagacagaagcatagcgcctctcaccagccctactcctgaggctgcctgccccccagcctccccactccaccctgttagttttgtaaaaactgaagaattttgagtgaaaacaaaacaaaacaaaaaactcctctttcatttataaattacacagtctcaggtatttctttatagtagtgtgaaaattgaataaaacacataatttcaccttgtaaggtgaatcctccttggttctcatgtaaccaatgttttaacactcttctttaaaagggcttttcttaatgttggaaaaatttcccaaaacaaaaagtgcaatagggacatattaaatttagcaaccaaagtgaacaatgtctattttgtttctagttccctctagtcactgtgctccttggtc

SEQ ID NO: 495473 - DNA, 510 bp, Homo sapiens
ttttctgatgaagtagtctgagaaataatgagactttcctgaagaaaaccagtaaacagcaaagtcagcatttattcttttcactccacagacatttttatctaggtattgttcaaaggactaaatgtgtgtcagtcttcattagtcatggatttttattttaaaaagtgtggtcaaaaatactttattaagtgggtgatatttaaataaacccttgcatgaagtgaagaagcaagctctgtagatatttgtggaaagaatgtttcaggtggacagaacaattaaaaggactaaggctggagarggcctggccagtttagggaacatcaaagatacaaggggtgagggtgaaagggaacgggtagaaagggagatggaagaaagttttttgtctttacctaacagtcatgggatgagcaactcagctttgcatgattatccgagtacaggtttctttcaactttttgctgttccatgccccagggtatggtccatatctgcctaataaca

SEQ ID NO: 495474 - DNA, 510 bp, Homo sapiens
ttttctgatgaagtagtctgagaaataatgagactttcctgaagaaaaccagtaaacagcaaagtcagcatttattcttttcactccacagacatttttatctaggtattgttcaaaggactaaatgtgtgtcagtcttcattagtcatggatttttattttaaaaagtgtggtcaaaaatactttattaagtgggtgatatttaaataaacccttgcatgaagtgaagaagcaagctctgtagatatttgtggaaagaatgtttcaggtggacagaacaattaaaaggactaaggctggagaakgcctggccagtttagggaacatcaaagatacaaggggtgagggtgaaagggaacgggtagaaagggagatggaagaaagttttttgtctttacctaacagtcatgggatgagcaactcagctttgcatgattatccgagtacaggtttctttcaactttttgctgttccatgccccagggtatggtccatatctgcctaataaca

SEQ ID NO: 495475 - DNA, 669 bp, Homo sapiens
tagtaatttttttgttcttttcagaaactaattgtggtaggtcctttgaacagctacyccaaaaaccttcacagtgtttgaaacagggtgtggaataggataagggtggtgagaagaggctacttggaaggtgtctttccatttttgagattgggtgacaaggtgtgtgacgatgctgctcacagagaaagggcattcagaggccagaggaaaatcagaaaaatttgggacatgtgaaattgaaagtacctgagaaacagtcaactggagctaacatgaaagaaatgttcatatacagcttttcagcttagcaggaaagtctagtctacataggtttgtaattcaagcatccaagtatatgtgatagttgaaatcatgcaagtgagttacgtccagaaatgttcagtgacttcctcatgtctcaaaccattataagaatgaaactcaggtcttctctctttaccacaattctcaataagacaaaatattagggcaaaataaacctgtgtatgaagtgtctggatctcttcaaatttggaatctgatatcagaaattgctacagcccttaattgctaacacagatagtccctcttttatgtttcataaatgttctgcattttaccctatttctattagatttgaatttcacctttttagtaacttcactt

SEQ ID NO: 495476 - DNA, 669 bp, Homo sapiens
tagtaatttttttgttcttttcagaaactaattgtggtaggtcctttgaacagctactccaaaaaccttcacagtgtttgaaacagggtgtggaataggataagggtggtgagaagaggctayttggaaggtgtctttccatttttgagattgggtgacaaggtgtgtgacgatgctgctcacagagaaagggcattcagaggccagaggaaaatcagaaaaatttgggacatgtgaaattgaaagtacctgagaaacagtcaactggagctaacatgaaagaaatgttcatatacagcttttcagcttagcaggaaagtctagtctacataggtttgtaattcaagcatccaagtatatgtgatagttgaaatcatgcaagtgagttacgtccagaaatgttcagtgacttcctcatgtctcaaaccattataagaatgaaactcaggtcttctctctttaccacaattctcaataagacaaaatattagggcaaaataaacctgtgtatgaagtgtctggatctcttcaaatttggaatctgatatcagaaattgctacagcccttaattgctaacacagatagtccctcttttatgtttcataaatgttctgcattttaccctatttctattagatttgaatttcacctttttagtaacttcactt

SEQ ID NO: 495477 - DNA, 669 bp, Homo sapiens
tagtaatttttttgttcttttcagaaactaattgtggtaggtcctttgaacagctactccaaaaaccttcacagtgtttgaaacagggtgtggaataggataagggtggtgagaagaggctacttggaaggtgtctttccatttttgagattgggtgacaaggtgtgtgacgatgctgctcacagagaaagggcattcagaggccagaggaaaatcagaaaaatttgggacatgtgaaattgaaagtacctgagaaacagtcaactggagctaacatgaaagaaatgttcatatacagcttttcagcttagcaggaaagtctagtctacataggtttgtaattcaagcatccaagtatatgtgatagttgaaatcatgcaagtgagttacgtccagaaatgttcagtgacttcctcatgtctcaaaccattataagaatgaaactcaggtcttctctctttaccacaattctcaataagacaaaatattagggcaaaataaacctgtrtatgaagtgtctggatctcttcaaatttggaatctgatatcagaaattgctacagcccttaattgctaacacagatagtccctcttttatgtttcataaatgttctgcattttaccctatttctattagatttgaatttcacctttttagtaacttcactt

SEQ ID NO: 495478 - DNA, 189 bp, Homo sapiens
gtatatattctctttataccagaagtaagtatagtttcattcagtgaaagtcactgtccctaatctatamaatactcaaagtttaaaaaaaatactctatgttaaaaactgtgagcattgaaagctgacttatctattcagagatcacatatagtaaagggtattacagtataaaataccaagaaagca

SEQ ID NO: 495479 - DNA, 541 bp, Homo sapiens
actcaggctgggagaatgggaaagctttatagtgaaaaggggcaaggctttggggtaggwggctatgggcatggagaggcgcaggtaggctaaagagaagcaaggcatctgatgggataggtttggagagagtatttggctttctttaattagtactaaactagaagcaggggcaatcttagagaagttggcagtcattgaccaacctctgattgttttcggcaaattgctactgaatttgtggcttgcattcctgaactggctgctgcagagattgtggtttgccttcccaagctggttgctgcagtggttgtgggtcagagttccattgtcgtacgtggtttggccactgtctgttttaatattcagtctctattactaaaaggtatacaaatggctaggcttctcacttcagttcttcatgtacaagctccttttagaggtttctgcactaaactattgtaaaaaaaaaaaaagaaaaaaaaggccaactccatttatccaatgtcaaccttgacgttaagaatgatgaatgtggcag

SEQ ID NO: 495480 - DNA, 541 bp, Homo sapiens
actcaggctgggagaatgggaaagctttatagtgaaaaggggcaaggctttggggtaggaggctatgggcatggagaggygcaggtaggctaaagagaagcaaggcatctgatgggataggtttggagagagtatttggctttctttaattagtactaaactagaagcaggggcaatcttagagaagttggcagtcattgaccaacctctgattgttttcggcaaattgctactgaatttgtggcttgcattcctgaactggctgctgcagagattgtggtttgccttcccaagctggttgctgcagtggttgtgggtcagagttccattgtcgtacgtggtttggccactgtctgttttaatattcagtctctattactaaaaggtatacaaatggctaggcttctcacttcagttcttcatgtacaagctccttttagaggtttctgcactaaactattgtaaaaaaaaaaaaagaaaaaaaaggccaactccatttatccaatgtcaaccttgacgttaagaatgatgaatgtggcag

SEQ ID NO: 495481 - DNA, 629 bp, Homo sapiens
ctggttctgtgtgtattacactttctctgttgcaattcccctgtcttgataaatcagctcygtctaggcagggggctagatgaacccattgggcggttacacacagagagaccaagaagaatcagaacaaacaggccttgctgggctctgctcagtttattaccattagatcatatcccttttgtccagttacgttgctccacaactattcacttctttcatcagatttaacataaaaatacagtttccccctgggtgtttgggtcttcatttctgaagcctcctgtgtcaagcaaaactttgattaaatacctttgttatgcttttctcttgttaacctgtcttttgttatgggggttttgggctgtaaaccttgtggcgggtgaagaaaagataggacttttctcccctagagtattttaaaagtcttgtggaggcctgtgcttatgtcaaagatgtctggaggcatggcttgactgttcattcaaagacaaagaaacaacactcatggactttcctgcctggaggaaatgtcacccttggccacacagcttctcagagcaacgttcacgtccaccagcggcactgataactgactcctcagcactgtccagcgaatgctgcatgga

SEQ ID NO: 495482 - DNA, 376 bp, Homo sapiens
ccaaggctcagagggtaagaagtgactggaagttgtcttgctacgtatgtggtgcakgttctttaactttcataaaaatatatttgataagatggtcaatttgcatgagtatttacccaatcagagggtgcagagaacagttatatggagatttttttttaagctattacatttacatcatttagaaatcaaaatgagataagttacctaccaagggtaccttccccatttctacgcccatcatagggagctgagaatggcctgactaataaatttgcattagaattaacaaccacagggatggcatactttacaacagcaacccagggacaaggaaaggggagaggatgttaccaagcctagggaaacaactcag

SEQ ID NO: 495483 - DNA, 376 bp, Homo sapiens
ccaaggctcagagggtaagaagtgactggaagttgtcttgctacgtatgtggtgcaggttctttaacttwcataaaaatatatttgataagatggtcaatttgcatgagtatttacccaatcagagggtgcagagaacagttatatggagatttttttttaagctattacatttacatcatttagaaatcaaaatgagataagttacctaccaagggtaccttccccatttctacgcccatcatagggagctgagaatggcctgactaataaatttgcattagaattaacaaccacagggatggcatactttacaacagcaacccagggacaaggaaaggggagaggatgttaccaagcctagggaaacaactcag

SEQ ID NO: 495484 - DNA, 376 bp, Homo sapiens
ccaaggctcagagggtaagaagtgactggaagttgtcttgctacgtatgtggtgcaggttctttaactttcataaaaatatatttgataagatggtcaatttgcatgagtatttacccaatcagagggtgcagrgaacagttatatggagatttttttttaagctattacatttacatcatttagaaatcaaaatgagataagttacctaccaagggtaccttccccatttctacgcccatcatagggagctgagaatggcctgactaataaatttgcattagaattaacaaccacagggatggcatactttacaacagcaacccagggacaaggaaaggggagaggatgttaccaagcctagggaaacaactcag

SEQ ID NO: 495485 - DNA, 594 bp, Homo sapiens
aaagacattttccgagagctggaaggagaaccaaaagagtgtggtgttatggaagccgagagagttttaaaaaagaaagtccttgtgttttcatcagtaactttgttgtgtatcagtgttttcccttcatgtaacttaaatgtccactaatgcaagtgaaggcaatctatgcctaatttcttcactaaatattctactaataaatgatttactgacaaaatgaaattatataactgaaaaggtttaaaaatgataagaaatatcccaatggaagctgttttttaaataatgttattactgtcagtaacaaaattatgatgacacaggtccaacaccttttaaaagagaggaggtaaaaaggagagttggatatgaagaatctcagactgcagtgcagctctgagaaagtctcagccaggtacatgggtgcccgggagcagagattgcctgtcagaagggccccatgagggcagaagtgacctggctctcgtgtccctgccatgatcagtcattggctgtaagcagactccgcccggactgtgtggcctcggcaggaatcayggtggcagattgagaggggcagtgctggaggct

SEQ ID NO: 495486 - DNA, 565 bp, Homo sapiens
tgagagtctcttttccatctcagattcatccctgttcctagagagtagctctcctagagttccccctgagaacctggggtgttcactgaggccctttcctcttggcgagccttttaagattgcaaaacctctgctgtattcagacacttttgcttagttgcttaatgtcctgctccatgcagcctcagaatttggcaaatattttgataggaaaacagtgtcaagtgtccattaacctttctcattgggtttccagcctcatgagatttggatttttccagtccccaaaactggaaccaaaaattcggctgtctttactgcctcttagaggccttctgcccaagtctgttgcctggattctttccctcttgccaagtactctgaactagcaaatgccccaaaggaaaaatcagttataaaatgtcgacattcytctctaagttttctcattctccaggacttgttgcccaagtctgagtttcctcatcgcttcttcaatgacttcaaatagatgctattttgtgtatattatccagcttttctagttgtctcagtgagagcaatg

SEQ ID NO: 495487 - DNA, 590 bp, Homo sapiens
ttgtgtaaacaaagctcacccatttctatatagttcatatttctaagccaaggcaaagacaaaatagggatcatttttctttgacaattttatttagcataaaagactatatacaggcattacacctgtaaaaaacaattccatgtaaataataaayataaaccccataatttggtttatatctttatccacctatcaaattccatgaccattcccttaatttacatttttaccagtttggtcaggattcatagttggagacagtagaatcttctttacctgattgatgcaagaggaattactaagtgatatgactagttcacagaattgttaagagagctgagaaaacagactatgatgacttcattaaccacaacacagaattaggcctctcaaggagtttctacctttaccctgcctctgcccctgtggatttgtggctgaatcagtgggctggtattagtgctgttcctatgacgatggttctagctccagaattacatcatctcttccacccttttccaacaaaatgtagccccacgtctgcctctctcccttgtaactcagttccatatcagttttgtgtaagt

SEQ ID NO: 495488 - DNA, 590 bp, Homo sapiens
ttgtgtaaacaaagctcacccatttctatatagttcatatttctaagccaaggcaaagacaaaatagggatcatttttctttgacaattttatttagcataaaagactatatacaggcattacacctgtaaaaaacaattccatgtaaataataaacataaaccccataatttggtttatatctttatccacctatcaaattccatgaccattcccttaatttacatttttaccagtttggtcaggattcatagttggagrcagtagaatcttctttacctgattgatgcaagaggaattactaagtgatatgactagttcacagaattgttaagagagctgagaaaacagactatgatgacttcattaaccacaacacagaattaggcctctcaaggagtttctacctttaccctgcctctgcccctgtggatttgtggctgaatcagtgggctggtattagtgctgttcctatgacgatggttctagctccagaattacatcatctcttccacccttttccaacaaaatgtagccccacgtctgcctctctcccttgtaactcagttccatatcagttttgtgtaagt

SEQ ID NO: 495489 - DNA, 483 bp, Homo sapiens
gaaactggatctgaccctggaattggttcctgcggctcttccagagcagcagacaagcgtcggccgtgccctggcagccgcagaagtgctagggcaggactcaggtatgtcaacaagatgtgtggctcacggtggtgtccttccgaagcagcgttcccaggacactgctgcctggggatgaggcatgtcagacccgcgagggggaaaccgaggcagaggctgagcctggggcacccgcagctgcccctcrgggactgggaggtggtctccgcaggctgtgtgggcaaggaccctgctggaggacgggaccctcaccagcctgctgtccccactgtcttactggcgttatcagcggggtgttcccctggagttgggtctcccgggcaccccgagacactacgggggcaccccctctccatcctggtggaggggtgcaatggcctcccatcccctccgtgccttcttcagggaagaggagaaggc

SEQ ID NO: 495490 - DNA, 497 bp, Homo sapiens
cagacccgcgagggggaaaccgaggcagaggctgagcctggggcacccgcagctgcccctcagggactgggaggtggtctccgcaggctgtgtgggcaaggaccctgctggaggacgggaccctcaccagcctgctgtccccactgtcttactggcgttatcagcggggtgttcccctggagttgggtctcccgggcaccccgagacactacgggggcaccccctctccatcctggtggaggggtgcaatggcctcccatcccctccgygccttcttcagggaagaggagaaggcagatggggaccccctttgctcccggctcctttcagtcacctgcggcccgtgttctcttctgacctcctggctccctggggcagtggcttgcccagcccctgcccccaactgtggcttaggtgtggacctggccgctcggcccgttctctccagtgtcaccagctattcccaccagcacataacatgggctattatgtcctgg

SEQ ID NO: 495491 - DNA, 622 bp, Homo sapiens
atcatgtctgccctggggccatcagaagcttgtggctgtcactggaggtagctgagcctgtgggttctgagcctgcggattctgagccgsaggcactggggtgaggctttgggtttcaatggcagcatcaggatggtttcaggggatgagggcagagcgggaggcggcaggtggcctgggtggggatggcccatgtagctggggtctggatttgggccaggattggatgtggggtgtgggggtttcaagggtgacctgaagcttggtgacctggggggacggctgagatgaggctggattgagacgtctgtatggtgccgagtgttggctggtggggggtggattctgaaggcccccaggaacagaggaccctggctctgaagtgtgagttgctgggagagcaggtggacaagcagcaggcaagggcttctccggcctcaggggagtgggtgccttggcgagagcccaaaggtgggggacgtggctgacgccgggcaaagctttgggggcaccgggctggggtggtggtgaggacctgtgggcaggtgtgtgtgcagccagccacagcctccgcacaagtgaggggaaggggtggccagaagcccctgcaacttggcctgag

SEQ ID NO: 495492 - DNA, 638 bp, Homo sapiens
ctccctctcaggagaactcatgatcacgtcgggtctgtccagatgccttctttctctccatctttaactcartcatgtctgcaaagacctttcttccattcttccacatacagtcacgttcacagggttagggttagggacatggatgtcttttttttttttgagacggagtcttgcctgtgacccaggctggagtgcagtggtgtgatctcggctcactgcaagctccgcctcccgggttcacgccattctcctacctcagcctcccaagtagctgggactacaggcgcctgccaccacgcccagctaattttttgtatttttagtggagacagggtttcactgtgttagccaggatggtttcgatctcctgaccttgtgatctgcccgcctcggcctcccaaagtgctgggattacaggcttgagccaccacgcccggccagggcacccagccattttcagtggccacatcacgtgtgagtgaggggaccagtttctgagcggggaccctggtttctgagcccccgtggtgtgctcagtccttgtgaggttatggtgaggtaagaatagtggcccccagcgtggagcctgtttccatttctctttttctccttctaaggcagtacaggcggcccag

SEQ ID NO: 495493 - DNA, 617 bp, Homo sapiens
cacaatgttgtgcaactatcaccactatacagttccagaatattttatcgccccacaaggaaacctcaaacccagttagtcagtcagtcctcattcctcccctagcccttggctaccactaatttgctttctgtctgtatggatttgcctattctggatatttcaaatacattcaacacatttgtttagatttaaattttatttatttttatcactaaaacattcacaggtttaaggtttaaaagggtctgcagtgaaaagtctccstctcacccctcttccccagcaacacagttccctatccagaggcatctttccagaaattaaaaattcctctttctttacccagatggtagtattctatacacactgttctgcagttggtcttacttcacttatctcagagatcaccctataacagaacaaaaagagctttccttttacaggtgcatagtattccatcatttcagactgtgtttcacacactgttaagtgctttggggctatagaaattaacaaaatatggtccttttcctaggcagctcaaagtctaaaaagtactttattttgagagggagtgtggagacaaactataggtttcagcttcgaggctgatc

SEQ ID NO: 495494 - DNA, 578 bp, Homo sapiens
atgatcaactgggaggatgggaaagggatgctattttgagatgggccccactggagcagatctcaagactgaggctcctgtgctgtgccgtgctctggggagttgccgaggcagcctttgacaaatggttctcaagccctagagcctggagatacaagattggcagatagatggaaattgtagtcacagtgaaacaggagagttccctgatcccccttgcagaatgtgtgacaggggtgtggctcacctgtttggtcgtcatcrttgcccaaacccctgaggggaaggagagcatgtagatggacaggtgcaggagcccaagtgggcatgtgttacagtgggctcctttagccctgctgtccgtggttagtgttaaccagctcagtgggccctctgccttttcacaagggcagagggccagtgtgacagctttctgtatcccaaattcttgcctagcatccccggaagaattgggtcacacatgagattgaaggaggaattcggggttttattgggtgttggaggtggctctcagcaggatggatggggagctggaaggggagatggagtgggaagat

SEQ ID NO: 495495 - DNA, 546 bp, Homo sapiens
tgtttttagccagccttccttgaactatggctcctgcatctgaaaaacaggatgatgttaccaatatagctattgtggagatgaaatcagagataatgcttcataatttttaaattctttttaaatttttattttagagacggggtcttgatctttgacccaggatggagtgcagtggtgtgattatagctcactgtagccctaaactcctgggttcaagtgatcctccccacttggcctccagagtagctgggactacaggtgtgcatcaccattcccggttaatttataaaattwtttgtagagatggtgatacggtttggctctgtgttcccacctaaatctcatgttgaactgtaatccccatgtgttgaaggaggggcctggtgggaggtgaccgaatcatgggggcggacttcctttttgctgctctcctgatagttctcacgagacctggttgtttgaaagtgtgttgcacctcccactttgggctgtctctcctgctctggccacgtaaatattgtgcctgcctttccttcaccttct

SEQ ID NO: 495496 - DNA, 568 bp, Homo sapiens
gctggggacaaacacatctcactgscctcaaaagaagctggttccttctcttcttttgctgtgacagctccagtggccaacatgtcagcagtccataaatcagaacctcaaagaacaaatcaaaatcccacaaatccaaacatatatttacatcattataagtgtgttttttaaaagcctgggagcacgtacaccatgtggaaagtggttatcaggggcacttcacttggaatgtcttctttttacaacatgaatgtgtactttaataattcaataatatttttttaatttcatttgggagaaatatatagagatggtggaatgaaaagaagaagaagtcctgtagtttagtactgtgctgctcagtgctttccaagagtcagcagggggaaggctgaagggtgtagtcagctccgtcccttcaacttgttcccactcatgctgctgtgatggtgatagcaagctgtgacttagggaggccaaggggcaccatgtcttgagacctgaatagaatggctagggagtcctggactgttggagctgcagggagttcacaagagcatctagt

SEQ ID NO: 495497 - DNA, 537 bp, Homo sapiens
ggggacaaacacatctcactggcctcaaaagaagctggttccttctcttcttktgctgtgacagctccagtggccaacatgtcagcagtccataaatcagaacctcaaagaacaaatcaaaatcccacaaatccaaacatatatttacatcattataagtgtgttttttaaaagcctgggagcacgtacaccatgtggaaagtggttatcaggggcacttcacttggaatgtcttctttttacaacatgaatgtgtactttaataattcaataatatttttttaatttcatttgggagaaatatatagagatggtggaatgaaaagaagaagaagtcctgtagtttagtactgtgctgctcagtgctttccaagagtcagcagggggaaggctgaagggtgtagtcagctccgtcccttcaacttgttcccactcatgctgctgtgatggtgatagcaagctgtgacttagggaggccaaggggcaccatgtcttgagacctgaatagaatggctagggagtcctggactgttggag

SEQ ID NO: 495498 - DNA, 655 bp, Homo sapiens
acacattgaagtctccccagagaaggaatcagagccgtaatttgttttttcttttaatttagattttacttctatcctagatcagtcccattctttctgctatttctctggtcccagacctctttattttacctcacaactagtttaccagctcccttaaggtgacccatcattaactttcttttttaatctttcagctagcctattgtcaactactcccaaagcctggaaagaagctctgcccattgtcactctcctgctcttgatatatctgatattgtttctgattctgctattttctgacatgcttatcaaaaaaggcctgatttccaaataatgagaaacaccgaactaatatattaaaacatggaatttgtgcagatgctttatagagaaacaataacattcataatgtcaatatttgatggtaaaartgaggactgagcctggctcatgagggatgctggtctatttctccatttcacttgggatagccacacttgcttggttaagctcttgaacaatttccttgtgagacagaacctttaagaacgacgtaggctaagatgagaaatggaaaccagccagttcactgaccttaaagaatacgaacaaaaaaccagaacacctgcttgttctttggcaggcacagcag

SEQ ID NO: 495499 - DNA, 540 bp, Homo sapiens
catagccaagcctgcagcttaaaggagtttccatgagataggaaaacagcatgttctgattatttctcaaactccaagacagaggtacagatgtggtaacctggatctggagaaaaaattccattagttttgttccagtggtttctgtcctctatgccagttgaaatctaagaaaaaacagttattccatcctaatgagttaagaatgcttattagaaaatgtattaatgagcatggaatttagtaaatatttggggtttgaaaatgatcttatatataatgacatttaaaagactttcctaccaaaaataaatcacatggatgtactaagtaatctggaatgaaagtaacacatattatttttcatttcaatagattcgggttaacattttggtyacatttttctctaattagcatttgagtgttaatgtgagctttccataaataggtgcaagttactttaacttttccattggttccccatgagagatcattgttgttcttatatatggatctattgagccctatactgtatgtgac

SEQ ID NO: 495500 - DNA, 621 bp, Homo sapiens
ggtccatttgctagccccaaatctttataggggtcttcacttccctaactccatttctaggccctttcaggcgcaaaacacaaaaatacttaaactaaaatatggtgaatgtagtcaccattctgtttcatctatccattcatttcttccttcgttcatattcatccaatatcttcaaagtttatctgatcttattataggaacaagttatgagtgaaggtagtacaaaaggaatttaagtctcagatggaatgtctctcagttgtctctcaacattcctaggtccatgaaattccatttctttctgcctcctacctcctacccctaagtctgtctccaaagtatctctccagggtcactccctcaggatgggtatgcttctccctytcactcttctttcccagctcatcttgccagtccctgaagatcttactctgaggcttatcacctttctttccagaatcattactcttttcccttcacttgctttcctttctctttctagacatactcaaacaaacaaactgtttgataaggctgggactgggatgaggtgagcgaggcacctggggtgcaaagtttaaggaggtgtgcactcaccttacccaaatcccagccggc

SEQ ID NO: 495501 - DNA, 621 bp, Homo sapiens
ggtccatttgctagccccaaatctttataggggtcttcacttccctaactccatttctaggccctttcaggcgcaaaacacaaaaatacttaaactaaaatatggtgaatgtagtcaccattctgtttcatctatccattcatttcttccttcgttcatattcatccaatatcttcaaagtttatctgatcttattataggaacaagttatgagtgaaggtagtacaaaaggaatttaagtctcagatggaatgtctctcagttgtctctcaacattcctaggtccatgaaattccatttctttctgcctcctacctcctacccctaagtctgtctccaaagtatctctccagggtcactccctcaggatgggtatgcttctccctttcactcttctttcccagctcatcttgcyagtccctgaagatcttactctgaggcttatcacctttctttccagaatcattactcttttcccttcacttgctttcctttctctttctagacatactcaaacaaacaaactgtttgataaggctgggactgggatgaggtgagcgaggcacctggggtgcaaagtttaaggaggtgtgcactcaccttacccaaatcccagccggc

SEQ ID NO: 495502 - DNA, 621 bp, Homo sapiens
ggtccatttgctagccccaaatctttataggggtcttcacttccctaactccatttctaggccctttcaggcgcaaaacacaaaaatacttaaactaaaatatggtgaatgtagtcaccattctgtttcatctatccattcatttcttccttcgttcatattcatccaatatcttcaaagtttatctgatcttattataggaacaagttatgagtgaaggtagtacaaaaggaatttaagtctcagatggaatgtctctcagttgtctctcaacattcctaggtccatgaaattccatttctttctgcctcctacctcctacccctaagtctgtctccaaagtatctctccagggtcactccctcaggatgggtatgcttctccctttcactcttctttcccagctcatcttgccartccctgaagatcttactctgaggcttatcacctttctttccagaatcattactcttttcccttcacttgctttcctttctctttctagacatactcaaacaaacaaactgtttgataaggctgggactgggatgaggtgagcgaggcacctggggtgcaaagtttaaggaggtgtgcactcaccttacccaaatcccagccggc

SEQ ID NO: 495503 - DNA, 302 bp, Homo sapiens
attcccgtggggatcgcacagtgctggtgattgctcacaggctgcaggcagttcagcgcgcccaccagatcctggtgctccaggagggcaagctgcagaagcttgcccagctccaggagggacaggacctctattcccgcctggttcagcagcggctgatggactgaggccccagggatactgggccctcttctcaggggcgtctccaggacccagagctgttcctgctttgagtttccctagagctgtgcggccagatagctgttcctgagttgcargcacgatggagatttggacactgt

SEQ ID NO: 495504 - DNA, 340 bp, Homo sapiens
ttttgtcatgtataatttaagaataaggacatttctcctgcaaaaccctaatactgtcatcacccccaagatacttaaaattgataccatattatcaaacacacaatccatattaaaaaatccccyattgtcccagtaacaccttatagtaaatgtctgttattttaagcgggtgtcattcattacatggcaataggtaactaatacggtgagtctgcttcttccagcaaggaccctcagggggtgcggtgattcatagttctcactcagacttctctgtgtctgctcatatgtccctatttcatatctcagggtccggtctatcccaaccaggggtctt

SEQ ID NO: 495505 - DNA, 652 bp, Homo sapiens
gggatgtgattgttttagagttttgaattcrtatgtttagcctgagatcctactagtatttctgttgaatatgcctgttgactgcccacttgttagcaaaatggcattgaatgttggaactgtaaactaccttagaaatcattcagcaccatcttttgacagaaaaggatatgagagttcactcctgtcactcaggaagtgcaaggcaaagatagaagcagaattaaatttgttttaatacagttactcagccatctggtaacagtttcctaagtgccaacgaatgtatggggctatttattgcagattttaagatgatatatggggattgagggaatgagaagttttagggagtggtagaggaagggcatataataagactgaatcccagatcccagcctcagaacttattttgtgaccttggtcaagtgatttaatctttccaaacctctatgtgtcctatagaagtaataataatacctatatagggttgggtgttttttttgtttgttttttctttttcttttcttttttttttcttaagatagggtctttctctgtcacccacgctagagtgcagtggcgcaatcacagctcactgtagcctcaaactcccaggcctaagcgatcctcccactcagcctcccaggca

SEQ ID NO: 495506 - DNA, 490 bp, Homo sapiens
ctaagtgagagtgggaccacagagcccagctcaggtcagcagaawtggccaatcttcagacctatgaaccaaaatccatatttatgattgcatgttatgaggttttgtgattatttgctacacagcaatattctggctataatttactgatataagcatcatggatgccaaagaagatatttctatagaggcatatattatgagttgaattgtgtacccccaaaaaatatgttgaagttctaataccagtacctggaatgtgaccttacttaaaaataggacctttgtagatgtaatcaagttaacatgaagccattagagtgggccttaatccattatgattggtgtcctgataggaagaggagaggagacacaggaaagaacaccttgtgaagattaaggtaaagaatgtcgtgatgcatctacaaaccaagggttggaaagaactacccacaaccaccaggagctaggagagaagcattcaacagat

SEQ ID NO: 495507 - DNA, 490 bp, Homo sapiens
ctaagtgagagtgggaccacagagcccagctcaggtcagcagaattggccaatcttcagacctatgaaccaaaatccatatttatgattgcatgttatgaggttttgtgattatttgctacacagcaatattctggctataatttactgatataagcatcatggatgccaaagaagatatttctatagaggcatatattatgagttgaattgtgtacccccaaaaaatatgttgaagttctaataccagtacctggaatgtgaccttacttaaaaataggacctttgtagatgtaatcaagttaacatgaagccattagagtgggccttaatccattatgattggtgtcctgataggaagaggagaggagacacaggaaagaacaccttgtgaagattaaggtaaagaatgtcgtgatgcatctacaaaccaaggsttggaaagaactacccacaaccaccaggagctaggagagaagcattcaacagat

SEQ ID NO: 495508 - DNA, 580 bp, Homo sapiens
gacttcagccgctgccgcagccgcagcacggcggccagcggctctgcgtggtggtacagcatggcgttctcctgctggatgtcgatgagcggctcttcgtacacgtactccagaaactccttggcctgcttcgacacctacaaaacaagcgtcgtcagtcagtcctggagaagcacctggctctccacacctgctcaaactaggaaccatagctgaaatatcaaaggaacacgattattttctcaatacagacaaatgaaaaagtctgtagttgaattaaatgtaaattttgacttctctctcttccagacattcaactgtaagctaggaaggaatttattaattctgtatcttgactgcagtggtgattayaggaacctacacatgtgacagaacggcacagtatggtgccgttatactgacttattataccaatgtcaacttgctgtttttgtttttgatattggaccttagttgcctaagatgtagccaagggaggaaactgtgaaaggtacacagaacctctctgaattgtctatgcaatttcctgtgaatccacaattatttcaaaataaaaaag

SEQ ID NO: 495509 - DNA, 441 bp, Homo sapiens
tgtctggagaactggagaagatgttgtgtccaagagatttagtggtggccattacaaataaagacttttaagagagataatgccaatcacctttttttctccctggaggatgggagttgtagtatgaaagcactgargtcagatatgggaataaatttcctgagagggaagactggtaggtattaaaatgtatctcttatagtaatgctttttaatgtaaataaaataagaaaaagatttttttgcagctatttagaaatagggactcactcttctgcttagaggtaagggtttccaaggcagggccagataacttacgcacactgccatttattcctctttcccctaaggcagactgaatttgcaagacattctctaaatattttctttaggaagaccaaacacagggaaactcagggtaaatatggacctaaaagccaa

SEQ ID NO: 495510 - DNA, 441 bp, Homo sapiens
tgtctggagaactggagaagatgttgtgtccaagagatttagtggtggccattacaaataaagacttttaagagagataatgccaatcacctttttttctccctggaggatgggagttgtagtatgaaagcactgaggtcaratatgggaataaatttcctgagagggaagactggtaggtattaaaatgtatctcttatagtaatgctttttaatgtaaataaaataagaaaaagatttttttgcagctatttagaaatagggactcactcttctgcttagaggtaagggtttccaaggcagggccagataacttacgcacactgccatttattcctctttcccctaaggcagactgaatttgcaagacattctctaaatattttctttaggaagaccaaacacagggaaactcagggtaaatatggacctaaaagccaa

SEQ ID NO: 495511 - DNA, 616 bp, Homo sapiens
ttctttaacttttattttgggttctggggtacacgtgcaggatgtgcaggtttgttacataggtaaatgtgtgccatggtgatttgctgcacctatcaacccgtcacctaggtattaagrccagcatgcattagctatttttcctaatgctctccctcctcccactacaccccccaacaggccacagtgtgtgatgttcccttccctgtattcatgtgttctcgtagttcagctcccacttataagtaagaacatgtggtgtttggttttctgtttctgcattagtttactgaggataacggcttctgcctacctccatgtccctgcaaaggacatgatattgttcctttttatggctgtatagtattccatggtgtatatgtaccacattttctttatccagtctatcattgatgggtatttgggttaattacatgtcttaatgcatgcatttttttaatgattcaaatcggcatcttctgtattagggagtgtctagcagatatacccctgacatgtcacttagggtacaggaacaagttcctcagactccaagtgttatcctggacagagctgcctcctctgattccccagccttacaaatttttgctgctca

SEQ ID NO: 495512 - DNA, 485 bp, Homo sapiens
ggtagcaatgcaggtctgaccaataatgggcgctagattgcagctttcaygaggacagtctctttctgcgggggctgctgaaataagcatgaacctgatgccattgggggctaccacgtggaaactgaggatgaggccagcacagaggagaagagagctaagtgatggagggaggcagattcctgatgacatcatgtgaactcctggatgccaccatacctaaagccagccacccagcgtcttctcttacatgagccaaagacttctattgtgtgattaacccagttttaattgggttttctgtcctttggtaccaagagaatcctggctgataaaatagccctgctactgagaactccaatcaacaggctcagctactgagtcagtcctggcaggaggcaggtgggaagctccaccctccagacaatctgtgatttctcctgctgcaccagtcagcacttacacctgggtgagcagccctcccc

SEQ ID NO: 495513 - DNA, 562 bp, Homo sapiens
acctcccgcttccttaactctgctgacatcctgctcatttgccctttatggaaggcttgagccacctggccacaacttttctctcctcaatgctgccwtcatcccggatgacatcagcctcgccatttccgatccagcgactttcacctctgccctgcctctgccctctactcccacggccataccttggactcggccatctctcagaatttttctacatagaaaatctccatccccagtatctccttcctactcataacctcctggtcttccatctcgccttcgcttttgtgtcctcggcacctgattttgaccccatcaagatctctggtttctctcaatttgtccccatcttttccctccaaccttcacacattgcccagtccagccaagaacctatggctctctctccaaaaccttgcactctccatgcccttactcactgtaaaacctggcatagggctagtccagcagcctcctctcacactcccaccccaggcttctggcacagccatcagaccccctctccagtgaccatcacaacaggatcaagctttctaac

SEQ ID NO: 495514 - DNA, 587 bp, Homo sapiens
gctgggagctaccagggatactgaccaggccactgtccaagaacatcctcccttctgtgattcccaaagtggcagccagaggtgaggcgcagggagtgcagggtgcaccctgcagaaatgcagtccccaggacacgctcacacccgatgcctgcaggctgtggggcaacacggaaaggccgctggccacggctgggcccagacctgcagcctccagtggtgcatgctcagctcagcacaggcttcatctctgatgcgagccaccagccaccgaggccccgctgagcagctcctctgagagatgccgagacactggggaggagtgagaagctcctcaaggttccctctctgcaaacgccaggtgcagggtgagcagaaactgcctttgcagagtgccaggcagggcccgtctgatgagttcaggcacactggacggtccatttttttttcagatattctgctatggacacaaaattcaccatccccaggcaaattctcacatttatgccagcccctactctccgatgaggcacccaggttccccaaagctgrgttttcccaggtttgcatcttccaagagaacagcaa
